United States Patent Application Publication US 2004/0016025 A1 - sequence listing, part 2

SEQ ID NO: 1634 - DNA, 2000 bp, Oryza sativa
ccccggccgggatgatcaactcttcaccatccaacgcaggggatggaggaacgaagcagtagcacaagaggggaaacgggatcgccagcggccggcggccaccgcgcgccatgaatccctcgctccctctctctctctctccgcctctccccagtttgagccgcgaacgagcgtgacagatgggccctgcagaaacgggcctcaagtagatgggccgagaataaggcccacacggtccccacctcccctgccacgtggcggcgcgtcgtcgtttgcacgcagctcgacgtgacgggaatatatctatccatccataagagcaggtacaatagcaggctataataagccagctataaatatattttaaacatataaatgagaagagagaaggacaacgggctatagatttatagacagctgtagcacggactctaagacacagtgtgtgtatgatatgtgggaccatatatcaatagtgtggtatgtaactattgtatgaatgagctattagattggctatagatgaattaaagctaatagttggctatactattaaacttgctctaagcgatcgtttcgaaaacgacatatttgtaaatagaaaataatttgtgaataaaatttttatatacatgttcttagtgatggtatatccgtaaatggaaagtaatttataaataaattttttatacacgtgttcctagcaatccaataacaaagactgaaaaataaagttcaataaaaaaaacctcaaaatcagctttaaatttaaagttgaaaatttaaattttagctaataagcataagtataagtaaaaaaaattccctctgtccaaaaaaaaatctagtactgatgtgatatattctaatacaataaatttggacagagatatgtccagattcgtacacgttggttttttataagatagagggagtagaccttatctctcctacgccatgtaggccccacctcaccacaaccgtcagttttccttgcttgcttcgccgcgttgccttttttattttctctttccttccaggacgacgcgctctccacgcgctcgcgcgtctccatgggccccacatgtcagtgacgcggcgcacaaggtcaaagcctatccggttcgtcccacccacccagctgggcccacgcggcagtgacacgcaacggacgtggccgcctcctatataggcggaggagacatcgcccgcagaattgcagagcaccaatcaatccttcctcccagccaagatctttcttcctcctcctcgtcttcaggactcaattcgtcttctggtacgcccgaattctcctcatcgtagaaatcatctgtgttgggtgttgctgtgcgttttattattaattggtcgaaagaaattggggatacagactgatgtggggaattgatctgagaaataatccatccattcattcatcagggatcatatatggcctggtgttcgtttgatcttgtaagcttgtttgttccggattttagtgctaccagagatccggaaaacatcgtagtttcggcttgtttcctggtgaaataatctggtagtatatgaatcaagttggcaacacttctctaaaaagaaaatcaagctggcaaccattctctcgtgtgttgagatatgattagttattagttgtcacgcgttgaatgccttgtttctgttcaagtatttgcacgttagtcatgttctagagtcagaattttgcaacgaggattggtatggtaggtacaactacttttatatttcccagtaggatatggctaagatcggagctgtctttcggtactatatagatgcctccacgcctgttcattgcacaacatcaatggttggttttctgatgagagtggatcgtttcatgtattggaaatatcaaagatttatttcatgccatctcattccaatttcaagaattcagtttgctcataccatgatcatcctactttgtttcagatagcttagcttgattggggtgggtgaca

SEQ ID NO: 1635 - DNA, 2000 bp, Oryza sativa
tttcagagaaaaatgaaaacatctaaacctttcattttcattcaaacttgtggacccactatttagatccatgagatctattgtgtagaactaatgtcttttttagttcgcgaaaagaaaatttttgggtgtcacatcatacgtttgaccggatatcggaagggattttcggacacgaatgaaaaaactaatttcataactcgcctggaaaccgcgagacgaatttattaagcctaattaatccatcattagcatatatgggttactgtagcactttatggctaatcatggactaattaggttcaaaagattcgtctcacgatttccatgcaaactgtacaattatttcttttactttatatatatttactgcttcatgcatatgttcaaagatttgatttgacctttttggaaaaaaaaattgggaactaaacaaagcctaaggaccgttcgatctctagatttggagagaaattattgttgcacgcaaaacgagaaatctcattagcactttattaagtattataactattataaaatcgaaaaatggatttatttgcttttttaaaaacaacttctatataaaaacttttaaaaaacacacactatttggtggtttgaaaagcgtgcgaatggaaaacaagttagttgaagaatagaacagagcctaaggttgccaatccgctccactgtcttccataaggaaattgtggatattataggtaccatatacgctcacgactagactaaccgactggttgtcggggaaatattatatataagatatgtaagggattaggattcagatattacgtttacttgtatatcaaggaaatggcctgtagccctacttcggtaagattataaagtagttataggagatttaaaccgtattaggttaaatctctatcttgtaaacatatgtctcctctgtctatataaggggaatagagcgtcccatcccttaaggtcataaccacaatttagatcatcagataaatacaacaaccaacgaatataatctctaaacatgagtacattattatttttcatcaaaaaggcttgaacatgtataaaatcttacctcatcacccattcattttagatactttgcataaacccttttacgtgttgccgaattctagttttgacagaaacgttcccctcctgcctaacacgcatttcgtttccttggccgggatatcctactaatatttcgttcattctcaaacacacatacagacacagcacacacgcccacgcatttacgtgggctactttttttttatcaaacgaccgctaattttttttagaaaaaaatcaatcatgctaaactaagaaaacaaacggccccaagagagaggagaaattgattgtggtgtaacggaattggttggtttgcgaatgcgtggtcttccaggcgcttcctccccctccggctttcccctgtccggttcacacgcggcaccctcctcccgctgctgctgacttgtgggctcccacggcctctcctggtccacgtgtaccagccgcaaaggccacgtcaccctctcccccaccgctatctccctctgacacggagggcccaagccccccacctcggttcacgagccccgcacgctgcatgctgggcacggcacgcggcgtctccacgtgtccagcccgcggctgctgcgtggtgagcttagccatcaccaccggcgagctcctccccgcccgcgacgtggcgcgcggagacgggtccgatggggctcgatccgacgatccggactccggcctacagtaccacctggcccctccctccccgcgccgcctctagtggtgagatatttaattgcgcggggccccgccgtactcgcttggcaaccccccccaacccccaacgccaacgttgccgaaccggaagccgaagcgaagccaagctaagcttccctctgcatgccttgccgcgggcggcaaatgtgaggattcgaatccggagatttccatccgtctatgcc

SEQ ID NO: 1636 - DNA, 717 bp, Oryza sativa
gttatctataggctctctataaaagatccatgtcagtatattttcctacttggaagatattaaatgaagagagagagcaaagctatttactaccctggagatagtctatagagaaaaacgagacaatgtattaaagagctatagatacccatgtagacatactattgagatagtttactattaatctagtctattgttgagatgtacatgttttatagatagcacattactttaccattgcgggtgctcttatagggtagataagagaagagtgagagagagagagaggagaaagggagaggaggggagagggtgatgatgtggcaagctgacatgtggggtctgcatggatcccacgctgactcagccgccacgtagaccaaaactggggtcaaaaccaccaaaggacctcgggtgaccggttttgtatagttaaaggactccgtatatctcgttttgcggtttgaggacgtttttttatcccgatgataagttgagggacctttggtgtaccttttccaaacaagtacaacggtagaaaaggcccagacagtccaaccgaaccagcccacaaggcccagtaggcccaggagaagagaaaacggccatcaccgcggtatataaatcggtccttgccccaccaccagccaccccaccccgaccgacgccgaccccacctctcagaatccccccaccccaccaccaccaccaccaatg

SEQ ID NO: 1637 - DNA, 2000 bp, Oryza sativa
  N_region (564)..(564): n = any nucleotide
  N_region (1313)..(1313): n = any nucleotide
tcatgttgcacagtacttatcatttatgagagtaacatcgttcgttgctctttttgtgcattgtattgtacagtattgggttacattgcactcgagcaaacttttgcgagtcgtgttgcttgcttattttcaatctatagctgcatctttcttggtcgccctagctatatgtatggtcgttgttgagaaatgaggaatgactgccaaagcaacaaattgaccttatttacgttgaagggcagggtgctgctagcgctttggctatcaagaatgctagtattcttttttttcctatcctttacaaagtcaagtgtcacaaacgaatcgctgtgttccgttcttgattgtatgtcatcctttgcattccattggatgtaacatcgtcttttctttcttgccaaattagatattgtctgcgggaatgtaataagttagctgatgctatagtatccattggatgtaacagtcccccaaacaccgatcttttgggacggtgcacctccgggcgttgagggtttggttgccggcgattttgtcgctttcatgggttaatggaaacatgangttttcccttaaaaaaaaaaactttgcattcctttgtcgcgcagaggcggttcgtccgtcagcttttccgatgaagcaattgccatattgccataattgctactgatactccatcccaattgttcttggaaactatatcatctcatgttgttttcttaaaataaattatcataaccatctctcttttcttccatttcatctctctatcccctcatatattgaactggtttcttacatgataaatgatttcttcatctttttgttttctctgctcaactcttttgcaacatcattttttttcttcttacttatcaacatattaatgctataaaaattagttgaagtgaagggtttcggattgcactaaccatcatatattgcccatttgcattgatgttgatcggtgaaatcgtacactccattccacgcacacgacgcatcgtacattgcacaaattcgggactagatacgctacaacccactaacttaggtagggatgtgatcccttctagtacgatgaatctggatatccatatatcaaaattcattataataagggaccacctatacatttgtcgacaaattttctcctaaaaatttgacagatgtaattatagtataatcgtagtgtaattacactgtaacttatatgtaattacactgtaacttgcagggtaactacaggtgtaacttggtatataaggtttcacgtaattttggaatcgttaaatctattacaagatttggtnttattgaggaagaaaaaaaaatcacgacacacacatatgtgtggtaaggatttattctcacaatctccattttatcgaaataacatattacacagatatttttgaaagttacatacaagttacactatagttacagtgtaattacatgcaagttacagtgtaattacactatgattgtactgtaattacatctgtcaaatttttgggagaaaaattgttgacaaatatatagcaaaatcgttataataaaaggggttacatcctttttagttgagttttttttttaaatggagagagtagcaacgagcaaagcataattttcgtactgtaccattttgcttgggaacgaacaaaactagagaggctgagcaaccaacaagacacggccagggtggatcgcccatcccgtccctgtggtccagaggataagccgcaccaccacgcgccgacacgtggctgccgacctgatgggcctgccagcttggccggccgcatcatccccggcgaagcggcagccactcctccccaatcctctcggcagccaaccgtggccatggatgaaatgacatgatacgattgctgtttatataagctgctggtgaaccagcgtacagggcctcaacagcactgctactggacatactctactactactagccagtaagctagctaactaactacgtggct

SEQ ID NO: 1638 - DNA, 2000 bp, Oryza sativa
  N_region (81)..(81): n = any nucleotide
  N_region (197)..(197): n = any nucleotide
  N_region (285)..(285): n = any nucleotide
  N_region (573)..(573): n = any nucleotide
  N_region (586)..(586): n = any nucleotide
  N_region (1757)..(1757): n = any nucleotide
agcggaaaaagataaaagcgagctaagcctgaaggcttgactcctgcagcgggcgactccattccacaagcatccttgacngcagcgacgaaaccaacctcttcgagacatcttcaactgagaaggacttcaactctggtgtgggggaaaagagagcaagactgagtactacccactgtactcagcaagtcataccngaagagaaggtatgatgcaagatatatccaagggaggctaaaggttcttttgcataaagccggcatttcaagacagtagttgaaagcngtaaaacagttgtagtaattaatccatattaaccaatcactgtccaacgttacaccacgttgcaacaggcccaaaccaccacctgaactaatcagttccaaaagctaactagggtgaaactaatcacggtgaatctggtcgaccgcccataaccgcgggcacggctattcgaatagttttactctgatcagaggtgtacaactgtacccacaagacacagccccacgacacgttcccgtgcgccgacatgccaccacgacataccggaaagaggccgtgacaggaccnttcgcataacccnctctaaccgatcgcaccacaccttagggttcgcccccgtccccagcaggcaacgggcagccccccctttcgtgccacggtgaatccggaagccgatcaaccggacaccccggacgacccaactccatcacgcccaccctcgcctgggtacgtcggctagagaaaagctacactacaagcccagccgttgcccacgctggcttgtggtaagtacgataagttcttccagggcatcccgcgaaccggtccttaatcgccatgggcacgtctagcaaaaccatgcacccacagcccaccatgtagtgtattttaattaaccaacaccattgcggtggcactaatccaaagctattgctaataatcaaagtctatgctttaatgtgaccccctttctgtgcactagttgaactaagcatggctaagcatctcctaaaccaacatctagtcattttaatacccaagttatcaatggcgtaagggacaacaacatatagctgagtaataggacccatcccacatgatattgtaaaacaatggcaatatttaatagaaatgcgggatatttgtaaattgggtacaatatgatcaattgtattggcatgacttggccttgctctcgcactgatgagaccacagcaacgtcttcgagaaaccacgaatcgacgaaacgggcgaaatctacgcgacaaacaaagcacacaagcaaaacatgctataagactactgaaacagataacaaagccatttttaatggattctacacatttttatgaatttactgagacttgaatggatttaatcggagctcggatgaattagttatgatttttagaagattatctgtgtttttactataaaagaaaaacccttaatcaatttattgcgcaataattcatcccagggctgacgtcagcacaaggaggggtggcgccgacacgcgggacccgcgggtcagtgactcaaggagagagaggggcggctggcaagcgggccccaccgagcggtggctcatggggacgaggagatgcccggtcggctcggctcggcctcaaaccggccgaccggttatggcgagggcggtgccgcgcacgcacggtcgccggcgacggcaaccggaggcgcggaaagcggcggcggatgacggcggcccaaaggcggcggcacacagccgnagcggcggctcggcccggcacggcgctaggagggagagaaaggggaaaagagggggaaggggcgcctcaccgcgagttggccggccttggggggaaaagacgacggcgaacggcgacggcgagcgaccggggaacggcgacgataggcggacgagctccgagacctcctagggaacaagatgggagggattagagggagaggggtggttaacagcgagcggattcgccggtcgaaggcggcgg

SEQ ID NO: 1639 - DNA, 2000 bp, Oryza sativa
  N_region (187)..(187): n = any nucleotide
  N_region (655)..(655): n = any nucleotide
  N_region (667)..(667): n = any nucleotide
  N_region (686)..(686): n = any nucleotide
  N_region (1910)..(1910): n = any nucleotide
  N_region (1938)..(1938): n = any nucleotide
ttcaaaacactagcttctgacttctgagttactctcacctgaaggccctacactaacacgtgtaaacacaagattaatccaaaaattaattcactgtttatttatcttccagttttcctcaatcagttagcgttagcctgcctttgtcaaaatccaaaagtatttgacgatagtcaattacagaacnaatctccagctacaaattatcatcaacaaatatgagaatcactagaaaaagtgacagaaatatcacacagtctacataattttgcatgagttaccaaacatgtcgaaaaactataacaactataaaatgcatcttgactatggacttatactcttgtacataacaatttaatgttcttgccacaaatatctaaaacttaactttctgatttggaacatactgaaggaccagtaaaacatggggctgaaagacctgtatacataccagcatcagtagacctctgttgtgaactttcagcgcttcctgaagttagcagtggttcatccaaaatcacatctttggcccctgccattggcacataaaggaccagacatttaaagtcatacgataacgagaatcaaacagccacaatacatggaaaaattgcattttgattaaggcttgtgttctggcattcttttaccaaantgtgaccagaanttaaaataaaactaaaaanggaagattgtcgaaaacccatccagcatatcattctcatcgataaactcacttaaatagtaaataaagaacagtatccaaaagaactttatatgcaggtgcttgattatgatccttattaaaattaaaaaaaaactaacatcacataattagggtgtttagaatagcacactgaaaagataaacagttaaggaaatgcattttttaaaaaaaaaaatagttgaggggtccatggccccatgttaatatgcatgagtggtatatacgaccagaaactaacaaagcagatgagctcttgagtgaaagattgaaaacatcttaacattcaaactgccgcatattcctaacattccacatccaaatgacatcttgagttcgcatgagtaaaaatctgaaacatatcctacgaatgctcatctatctgtatccgggttcagttatcaaatgcaagatgactaataggaaaaattgccgaattgggaaaaagtgtgttatttcagacttaaggatgcaggatgcatgcttaagcaaacattttgttccaccaacggttaaatctccgcttgcaaagaattacatgcaacttatccaatgccctcaccaaaccaaggggaaaaaaaatcaaaacatagtatcaattatcaagaaccgccgcaccacagcgaacagggcgcatcattcgagctacacgaaaccaatcacacgcagtaaccttatcacacgacatatcagaatcggcgcctcaaatctcccaaggaacacgcctcccaaggaacacgccttactctcccattgactttcaatcccaatgtaaccagctaaaccacccaagatttgggtcgctccgtacctgagctgcccatgtcgccggaggagctccccgacgccatcctcgacgcggcctaccctatcccgtaccacccccccccttttcccggcggcggtggttggtggcggcgctgcggctgcgcgcggcggcgaaagcggacggaggcttcggcttaaggagagagagagagagagagagagagagagaaagagaaagcgaattgcgaggagaagaacacgcgaggcggcccaataaccaaaaagaagcccataaggcggcccatctcccactaggggagtagcacccaccgtccgatcgaatccaacggcgcaggatgcctcgcctcagctatataagagtcgcctctctcatttcgcctaaaccctagccgtccanaccccaccaccaccgccgtcgcctccancccgccgccgcgggagaaaccacaggtaagggcaagcgcgccgccgctgcggccgccggcga

SEQ ID NO: 1640 - DNA, 2000 bp, Oryza sativa
gcaaggttggggaaagaaagaggggaaaataagagtaggcgttgatatgtggaccttataatttttaaattttttttccttgtcacttacatgtgagcagttagtcctacatctactttttaatacctggatgctgcatcagtcaaatcaccctaaaaaaagcctcgaagagtttgttttgtactggattttaatatttgagaaggcgatatattcggttttgcggtggtgtacaatcatattcggccaatagtccagggagtcaaaatggaccttttagtaaatagtaaattcattaaccgggcctatgcaatgtaaagcggaataagttcatttgaggtcccttaacttgtcaacgaatctgattttcgtccctcaaccagaaaaccagatacaacgggtccttcaactatcaaaaccggtacagattagatccctcggcggttttgactgacgtggcgcctacgtggctaatttgactcagtcttcatctgacgtgacattgatgtagcgtttacgtgacaattctatccagaaaaataataaaactcgtgggatccacacgtcagtttcacacacaaattaataaaaaatggtatcatcctcacccctcctcttcctcctctctccccattttccctttcttcggaaaagctggtccattcgcgggatgatgggctcccgcgctagcatcacgaaccgcaccatgttcccggagtcgtcctggatgccgtcggcgagcacctggagcccgtacagctcggcggcacgggatgatgcgatggcggcggtggacgagccgccggatattgttctacacctcccgcgccttcttcctcctcatcatcctccagatcccgctcttcatgtcgcccccttctccctcccaatcccctctgatttagctctgtttccgtgtcgatcgtgtggtcaatcttagcaaacgagcaaacaatggttgcctcaaaatagatcctgtatgcatatcactacttgtagctagtaggtttgattatagtgcatatgtgcgtgtgatgagttctcgacgagcaggacggcgcggtcggcgatccagagctccacggcctggaaggcctcctcgaactggtcgcaggggatggtgttgcaggtggtctggcagtgggcgcgggagaacggggtagcgcacggcgggcggacggccgtggatctggggatttgcgcggggcgcggcgctggcgaggtttcaatcctccagaggcgaggtgttcgtggctggaaagggcggcgttgcgcagccgttttgacgatggtttccctggcctaccggcgagcgcgcaagagagagatggccggcggccggtccactccatttcgtcgtcgccggccgcatctggtgcccatccccccagcgcaagagagagatgaagagaggggagatggggagagaggaggaagaagaggagtggtgagttggaccgacatatggggctcacgtgggcccatctttttttaattatttactctgtgagactgacatgtgggtcccatgggttttattatttttccggattaaattgccacgtaagcaccatgtcagatgaagaccgagtcaaattagccacgtaggcgccacgtcagccaaaaccgctctcaaaaccgccggaggacctaatctgcaccggttttgatagttgaggggcccgttgtgtctggtttttcgatcgagggacgaaaatcggattcgttgacaagttaagggacctcagatgaacttattccatgtaaagccgtaaagcccatgaggtccgtgaagagcagaactgggcctcctccattccatctcggcccaaatcgcgactcgactagctcccccctagctagggtttcactacataaacacgctcacgacgcctctcccctctctctctctctctctctcctgcctccgcttctctcccccgcgccgccgccgcctccaccgaaagcagcagccgccggcgagccagccagcagcctag

SEQ ID NO: 1641 - DNA, 2000 bp, Oryza sativa
  N_region (1040)..(1040): n = any nucleotide
agttacgtacatatagtaactaatggaattgctcagttgtacgaatattaaagttcagtaacctatattattgtaaacactcagatctttaaggcaaaggactaaaataactaagtatttcactgagtagaaacatgtggcacttcatcctacatttgacatttgtaataccaaacactgaatggaagtagacaatattgaccttgcaaagaagtattaaggggctctacaaactcagggaactccatttcatcgagtgccttgaggacatcatcagcgttgatcgtctgcctctttgattctttgcacatgtcattggcactgcaaacaatttctataagtaaaggcgctgcaaataaaatcatcacgaatacttacaaagaggtatggtactgcagtttgattctaatagatctacacaaaaagtcttcttttttaaaaaaagaaaatgttcacgaagggaagaaaaatgattcttatgagtttgcctgtaccctcaagtacattactagagttaagaaagtttatgaacaaatgcagatcgtggatcacctgcaccatcaaatgtcaataatttttttcccaaagtaatgtcaagcaattctggccatgagcataaattcacttagctttacccagcgaaataaataaattcactaatagctttctcccccaaacccctagagattaaacagaaacatgaaatccatgaccaaaaacgtgaaagttatactatatcagtatgagtatctatattcatagtccatatccatagatagaaggaagaataaggcgaaggggggatggggtacggacgtggcggagaggtagtggatgaagatgcgggcgctctcggcgaaggcggacatggcgtccttgttgacgatgacctcggcccctccggcggcgacctgggcgagcttctccttcactaggcgccgcacgatggccttgggcagctcctccacctccgcctccgccatggacgccgccgccgccgcttggcccggctgcttctcaggttgggaatgggatccccnaccttcccccgtctccccagccatctccctctctctctctttctcaggttgggaacggtggtgcagcggcgattcgacaaggcaaaccctagcctagtgaaaaattgacgagtcgcgcgcgctttgtctcttcttcccccctcccttcccgcgctttgcttctgcttgagttcgcactaccaaaacaagcaactgtccattccattttcatttcgagcactaaagaatttcagttccatttttcactctaaaaacacactccaacaaatctaaatctaaaccacaattgtgaaagcaagatggtgtctacttccggttccgggtcgagattatgcacacatcactttgaccagtcaccaggactacatgtacagttgagtcggggacacagaaaaagggagaggaatcagatgggccaggaaagaggagagggccatgaacacaaagcccatgtcagaccaattcctattttttaaaaaaaattagacaaaacatggggtgttgcgagaatcgaactcgcgacctctcgcacccgaagcgagaatcataccactagaccaaacacccgattcgaacttttgtctctggaacatttaactgacccaagcattttacaaacagtaagaacagctactacgaagaacaaaatgtgtttccccttccacaggtagtaagaggtaactagtcaacttggaagtaactcagatggattcgcggtcaaaaagtgggtgagtgttactgatgccagcaacgggccggtttcagcccacgcaaatgtttaaagcaaaagcaaagcccggcccaccataaaccctagctctctttctagcatggacaggaggacaggacccgattcctcctccctcgccggcatataagtagccgcagccgccgcctccatttcccgaccttgctccacacccgcagcagcagcagcagcaaggagaagaagaagagcca

SEQ ID NO: 1642 - DNA, 2000 bp, Oryza sativa
  N_region (516)..(516): n = any nucleotide
gagttcggccgggggaaaaggcccgcctttggaaatctcgtatccgccccctagattatcagctagtgtgcacaccacaaaattatacaggttcgggccgctatgaagcgtaataccctactcttgtttgtatgatgattcttctgtgcttgtgaagcctctgaatctccgacatacaagctagggttaaagaagctttggatcggggatccagagttcgatccttttcccgctaggcatggtcctccttttatactctaaggggataccacacatgctgcgagagctacctagggagaagggaaaatattctctatattaattatatatcttgtgccttagcttggaaaccgcatacacgtcgtctcggtcgtggggcctaccacaccacgccgcctgacacgggggacacccctgtcaatcccccattaatagatggagaattatggtggtggtcctctcatggggaggacctcgaatgacccttccgatgggacgggtcatacctacctccantccgccggaggcagatgcgacgtgggggcgcagctgtctgtccagtcagctgtgaccggtgacaggccggtcacagaccggtcattcctgaccgccgcgcaccagtcgggcacaccgcacgtcttctcctaccgcattgaatacggcagggagcagttggggcgctgcagtcattaaaggaggttcggcttcggccttctccccgcttgctccccccgccagatggcggataggcgagagcctcggggtgaagcggtacgagggcccgagaggtacgacgtggcaccccgaggcctcggggcgaaaacgtgcgagggcccgagtggcacgacgtggcaccccgaggccccctggccgctcccgcgaaccgcggggtacggaagtaggaccaggctgtaggtcatgcgccaggatgggaaggtaaattcccctcattccgcataccctcgggcccacttcaccgacagacgacaacaagtacttttaaaataatatattcatttaacatcgcttatgttttaagggtgtgtttagttcacgccaaaattaaaagtttggttgaaattgaaacaatgtgatgaaaaagttggaagtttatgtgtgtagaaaagttttgatgtgatgaaaaagttggaagcttgaagaaaaagtttgaaaataaacaaggcctaaatatcagatcaaaacacactcatcctactaaaagcctggagacgagctgtaactttccaaggggtagtacaaaaataccaactttcctgggtattaaaacaaaagaaaagcaaaaataatacacattgacagatgagttaacgcccgtgacaggctggcacacggaaaacgccgtccagtccaacctcccatttttctccaaatccccaaaatgccctcctccccagctataaatacaccctcccagagcccttctaaaccttccccatccgtctaattgcgccccttatgcattagagcccccggagtcccctctgtttcgcagataagtcctttggttcccatctttttattacattcaggtcctcctagtttcttttcctttcgagtctactccttgcattcttgcgaggaagcccctcgggttggtcgaattttagtttccactccctctcctcggggagtcgttgctgttcttgttcttggtcgaggttgaggttggtggcgtagatccgatctgaggaatgtttacctatcctttcctctaacgttcgccgtactccgatgaagttgaacgtgctccgccgccgccgttcccactccttctccgtcgccttcctctactggttctacgtcttctcatgaactcatcgccttcctcccaagaacaccatctccagcctctaattgattatatcttgatttctttttcatcctcctactagtttctttcttgtgttctttggaatttttttgatctcttgaagagatccggttcttggattaagttttggacaagaaccgtactgtga

SEQ ID NO: 1643 - DNA, 2000 bp, Oryza sativa
gaacttcaatcatgctgatttctagtcgccaatgcatggtagagatagcaaaagaagcaaaaatcctaagaattattcactgatttgttccggtactcagtaatagtgacaagtaaccgccgtctcccctccatcagccaccgtcgtcaaccaagcggccgcgactcgcagccgccgtcgttgccctgccccgtggcgccttgcaagccgtcgtcgcccttttccgcagcatgcgacacctcggaaacaaccaccatcatcaccatttcttttggagaacaccttgcaaaaacgaccgaactaacaaaaggagccggtacaatctaacactaacagtcccatatgccacagggatagaaccaggggcaaattggtatttgcatgtgtcaactcacggctaaacattcgaccataaactactaccacgacggaagtgctacgaatcgaaaaaaaaaaggatgtcctatgcttctagtcgaaagcgggaaatttttgtgctattttttgataccgagttgttttctgtgttatgtatcgaatttttttattgaaaaaatgtggcaagtcacaactgtggcagtgaaccaaacacatacctaacaaactgtgacatctaaaagtgtggtgtgacaaagtatgaccataaacacgccgaagacatcccgctccgccccggcctccccgagttgatcttgttgtcgtggttgaaggaggaggtgtcattttctgcagtacgacgagacaaccggcgcccggtggatgaccttacgcactaacgtcacattgccgccttccgtgaatcgtgatgacgtagactgtgctggagtccgaccatcttggagatgatgacccgatgtctgcctcgaattttcaaatgcaacaagcaaaattctcactctcaatttaggccgtgtttagatttcaacttttttcttcaaacttttaactttttcgtcacatcaaatgtttaggcacatatatagaacatcaaatgtggacgaaaaaaaaccaattgcacagtccgactgtaaattgcgagacgaatcttttgagcctaattatgccatgatttgacaatgtgatgctacaataaatatttactaatgatggattacttaggcttaataaattcgtctcatagtttacagacgaaatatgtaatttgttttgttattagtctacgtttaatacttcaaatgtatgtccacatacttaaaaaaaaattttggcacacagaataaactcagccttacatagctcgatcgaaagatcactgcaaggctcgatagtggatatctgaattcgttacctcacgatccgggtgaacggggatgagtcgacggcgacgcttctctggtgaccaagatgtgggctagcttatggtttattttcctgctaaaattgccacgtaggacggttgtgctacatccgtgaaaaccaccgtcaatactgtcatacgagttagtagtattttgcatggtttgaacagttgaatgactaattatacccggttttatatggatgagggatataaatcaagggaaaattggaaccatgccattataattttgtaaaatttaagatatgccatcctgacccacatgtcattgactcatgtgggtcctacgtgtcatttgagataccgatgacatatctcaaactttgtaaaattataatggcattgttgcaaattacccataaatcaaagggtatccgacctatattagaaggacacaaattggactttttccaatagaggagcccactccaatcgagacacagcgagaggcccaagcccacctcactccctcgacgcccccaaaaccctaactcccccgcatccaacggtgacgaccaccccacctcacgatccaacggccaatacccattcaccggacgctatatagcccgcgccccactctctcttccaccttcgcctcttccctcccaccccgccggcccccgcctccgccgccgcgccgctcgcaactccgccgctg

SEQ ID NO: 1644 - DNA, 1491 bp, Oryza sativa
  N_region (24)..(24): n = any nucleotide
aaaatttccccccttttttttttngcttttgccccatttttggctctcacctacaattggtgtatatataataccattatgggtatctatagtataaattgatcaccaatgattaacaatatgtaaacatgctatattaattattcaaaaccactcatttaagtttcctaatgtgcaataccacatagccatcttagaaggtaatatgaacaacattgtaaattgttgatcggaatgttactctataacgtactcttgttttgtccagcatatcatcaccattcagatggaatatcatgtgattatcttctcccgatcatctcgtactacatgtgtcgctgatcacatgactatataacacgtgtctctctcagtatctaattttgccatcgacaaaaaatagtagtcaagccatgtagatcttgaaagaagacgttaacaagacgacaaacaattgttatacattgtgaaaactattaacttgacattttttactccagtattaagttaaaaattctatggtctcgttttcaaaattgtacacaacaaattgaaattttcaattcaacttttaaaacctccaaccttttaatttctcacgcgaccatgcacgactttggagagtgaatgcgcgcacgtcgctgcatctcccacgataatatatactacctacatgtctcaatattacattatgcttatacacataacaaaattaaattagactacccatttcaataggaattaaaaaaatatcctaaaatagactaattattgaacgcacccatacaaaagtgtgacatgatcccaaaataaactattttatcacaccacgcaaaaaaagggccatgtgacataaatcacactgtagtgctttagaatgggcggcttcaatatgaatacaaactaattctaaaataaaatatttatcaaatgtgtggcaaacaataatagagatatgtgacattatcctaaaataaaatattttatcacaagctcaaaaaaaaaatccgtgcatgacatgagttataattgagagatctgcacataaaaaatccactgagctctggatatagcctttcttttatatattcattcattcataccagaccatctccggtttgaaaaatatatttgttaacaaataatattgcaccttaacatttagcatgaacatattactatcaaataaaggaaaaaatcgtgctatacgtccattctccacgtggcatgccaggtccaccgtcggattctatcacttcccgcgatccacttctcaacatctgggccgtcgtccatccagcacggatcttgaagcaggaaggcccattagcaaaccctagacagctacgccgccgcaaataaatagcttctctgccctttccgttatctctctcctctattgcagccgccgccgctcccagctcgcgctcccctcgccgccgcagccgccgccgcctcgcctcctcggagatcttcgctgcccttccgtca

SEQ ID NO: 1645 - DNA, 2000 bp, Oryza sativa
  N_region (1)..(1): n = any nucleotide
ngatgggagggggaagaagacgaggtataaaaggcggagagagagagagagagagagagaggtgattgcgtgggcgggaggcgggaggtcgctctcaggtaggtggccattgtggtgtgcagagtgttacactctctctgatgagtgatgaagcatctcatctcatcatcttcttcttcttctcgaagactttctcttctcagctcaggtctccctaccttaagctctctcctctctctcgatcacttgctaatattttccaccacctttactaacttcaacctataatagtactcactttggtcataaatgtttgtcgtttaatttaagacaagatttaggtcctcttgaaacgcaggataagtaataggaaaaatgtaggaattaaaggggtaggaaatggaaagaggagcacattgattgcaccattggaaaaaaaattaaacccatgaaaagtttccaagaagtctaaccttttgtttatttttctatgaaattgatcatagaaatatgtaatcctacgaaaatattcatatcttgttcctacgaatcaaaggatcctatggggaaaaaattccgaagagaattgaatatttcaaaaattctttgccaatcctctatgtcaaaggaacccctcgattgatgttttggaactttgaccatcactaacttctaaaacaataatttagaaacgtaaaattaatataagtaaaattgtcttaaaatgtacctaccataatatcataagtgtgggtggggagaggttaatatcataaatttgtcttaaaatgcgtaaatcaataagttaatcacgtattacacacaacgaagcagaaaacggttgcttctgctgctaatggcagcttcaccaattatctccagggtatgtgtggtgatcaggtgtagtaaccatccacccagctcatcatcacacttcgtcagatcagccgtgttggtagggctagcagcagctgcatatgttggactctttttctgccttaagctttttgcctcttatctatctttctcctgctaacattatgttcaccttgacacttttgcatcgatcgatctgccactaactactgcagatgctattgctagctctgcatggatgcatgcccctgttggactttgtacacacacattcgctttgctttagcatcacttcattctcgaccagtgatttaattggaacgcaagcaaccgaccaacatggtttaattatcggtctcatcttctcaccatcaattaattaattaattaattaattaacaattaattacatgtaataattaattgctagccagatatgccacagcacacacagaatcttatcatgcatggccatgggggcctaattaattagcctttggttatctatatctatagcttggttagggacagacaaacagtagtgctagctagatagagcggtactgcatgtgtggaagagatggcatttggatggtaaccacatgttaaataataataaggcaaaatttgctacaggacacgcaaaaaacgtgtaattagctggaagacaccgtgaaaacgtgatacggctaacggacactacaaaaattgtgtaattagctataggacacttgtcgtattattttattattttcggatcaaaagaggtgagatatttttctaaatgcccagattgccccttctctttccttggttttctccttcgccgggatcgcgcgcagtggggcgaggttggcgaggtcggcacaagaggacgcctgtgcatgctccgacttgcaaatcagagaccagatcgagcccctgaccggctgcagctgcctcctggctgcctgctcaagctctcaagcctgaagtctgaaggagctcgccattgctgcctgctcaagctctcaagtctgaattgaaggagctagctagccatcttcttgctggtggagcgagctcgccggcgcatgcttggctgctgctagctgctagctggccggtcttcctcttgtccggcg

SEQ ID NO: 1646 - DNA, 2000 bp, Oryza sativa
  N_region (782)..(782): n = any nucleotide
  N_region (954)..(954): n = any nucleotide
  N_region (956)..(956): n = any nucleotide
  N_region (961)..(961): n = any nucleotide
tacttgtgacttgaaacttttattcagaagcatctatgcatgatgttcaggttcacttttgtctcaaatttccagagatgtccacagtttggttagatgttttcttctgctgttctctttggacctggtactagctagcgcaatgtatagcatccatcgatgacatgcttaagaaatacaggtgatgattttctctatgttctagcttcatttatacgtatctttttttaagaagggtacaactcaggacgcacacttacacacaccacactcacacacgcgtgcgcgtctctaacacacgctaggaatttgattgaagatactaggcctcaatgcacggagaacgtgcagtgtcactgaacacgcacgcgtgagtaccctattacatagtcgggaccaaccgaagtccttccggaggaaagaggggaaaaatccgagcaagcgagcaagctcaggttgccaccggtgacacttcacctgagcaagctcgctcggtctctacaggttgctttatctgaacgcaaaagcgatattccatggaaaagctctcaggcccacggcctcattagacaaggcccaacgctcaagtttctttgaggcggcacatttagataaggaaatgtctgagggaataagatcacggaggtccctcaacctaacagcgagatgagatttttgagatcccttacccttaaactcacataaaccatgcaatcaaagtcctatgatagtatatatgagcggttttgctgacgtggcatcctagtcagtcaaataaaaancaaaaaagttatggggcctaaaagtaagtgagaaggaaaaaatatgagacccacatatcttccttttctctttcttctcctctcttctctttgccactgagggggagcggcagcaggcggtgacaaggaaccggagcaggcaggcgagtgctcggcggctgacggagtggancngggtngtggcagcaggcgagcgcacgtctggagcagcgtggctgtgagcgcgcgaccgacacagtggagcggcggtggcaagcaagtgatgttgcgagtgcgactagtggagcggagcgggcagtggtggcgcgggtgctcggcgacgccgacgccgtcgcgcttggccacggccacgccaccaaccacctccccctcatctcctcctcctcttcttcctcttccccaaactgcgacatctgccaggagacccacgcctacttcttttgcgtcgcggatcacgccctgctctgtcggacctgcgacagcgtcgtccacatcgccaatgccttcatctccgcccattgcaggttccttctcaccggcgtccacgtcgccccttgacaccacccctctgctccttcgcacctggagccactgttcgctcgccgcgtcccaagcccctttgcacctcctgagcccggagccgccgctcgcccgccgacgtcgccgctccgcctgcctccggccgcacgccgccgctgctccccttctacggcaaatataaaaatgaagagaagaagagaaaaagtaaaagagcggcaaagataaaaatgaagagaagaagagaaaaaggaaaagagaaggagattggtgactagatcgttgaccacatattttttttctcacttacatgtggatcccacatttttatttattttattttatgctgattaggatgtcatgtcagcaaaatcgggcaaaaattgagtcgaatactgccatgggacctcctttgaacggtttgagtgagtttaggggtacaaatttctggttctgtggttaagggacctaaaaaattctcgctgttaagttgagggatctccggtgaacttattgcaatgtctgagagacaacgaagtgatagattgggcctccagcccacgagagtagaagtcccagtcgcacgtttcgtcgcctataaatactctcccccttgggcagccacaaaccctagtcgaggagagcacccaacccctgcgccgccacctccgatcgtcagcc

SEQ ID NO: 1647 - DNA, 2000 bp, Oryza sativa
  N_region (1416)..(1416): n = any nucleotide
  N_region (1418)..(1418): n = any nucleotide
  N_region (1423)..(1425): n = any nucleotide
  N_region (1432)..(1432): n = any nucleotide
  N_region (1436)..(1437): n = any nucleotide
ttttcattcaaaaaaaatgcatcctcaacatactgaaacaatgtactaactactagcaacagatcaatatgcagcaattccctggatatatgaccaaagcataagaagggacatggactctgaatatttgcatcctcttgtgggctctaaccttaattctgaactatacaggtggtgcacatggatgagaagggatggaacaggaaattgccgcggaatagggttcaaaattaccggtgtagaagacccatttgacggggcgtttggtgagggtgtcctcgtagtaggtgatgaagtcggccttggcccagacgtggcagtcgaagccgtcggcggggtggcggccgaggtagacggagccagggacgagccagtttgggggcaggatgccgacgccgacggcggcgaagcggcaggcgcggcgggccggggtgtagaagaaggaggtgccgttgttccactcgttgtcgtagaagggctcgtcggcggcgagctggtagcggatgacgtggaggttgcggccccccggccagtcgtaccacaggtccgccagcgacaggttgccgtggaactccatcaggagcttcgcgtggaactgggccggccatggcgtcggcgtcggcgtcggctccgatccgtcgccggcgacgacgaggaacaaggccgccgcgaggaggagaggggccgccgtcttctccatcttgtgcaagtggctgcgctgctgcgtgggagtgagatggcgtagtacggtttcgagggcttgagtgaaattgtgtgattttccaagggtgattatgcaaaaattcgtccatttttagtacggtttgggcccattaacaaatggactttgctttgtccaattgctacaaattgagcctactttcttttcgtttttgctgctttaacaagtagaaataggcccaagtggcagagttacctacctttgctaattttggactccaagcacacaattagtactcatccgcattgtgctaattcaggttattgagaggggaagaaagtggttatacgagatcgatggaggacgcagcagctaacggtcgctatacgatggaaatgagattgtaccggacatattgtgcatatatacaaaaagtataggagtatgttccagacgatggcaacttgacctctttaattcaaagctagcctcaaacgtacttaactattcatgctttgacgtcaaggcaagggtcgagtagtaagtaacacaggctcaaaaggcaggctatcttaagctacctatacgttttgagtgtagtatacgagccgatcgatcgatcgatcgaccactgtaccgcactgcacgcgccaaattgaaaatcggattagtggctcaaatcaaaaactaaagttagtctgaactttgtctagtgtgcaaaatcttttgacatnanttaannnattggtnggtnntgtgcgttgtgtcttgtgtgatttccacacttggttgacgccgacgtcgttgtaaagtttgcacgcggcaactgggcgtggtctctgaacgaaccgtcaattcattcatggaatgaatttgatggaaacatatcccgactttgtgcagtctgtaattgtgctatgttagtgccacaaagtcgatatagcacaactacaaattgcacaaaatcgacatgggacgactgcagattgcacaaagttagaggagtttctttcgaatttgatatatggtccgtccaaaaaaaatcatgggattggcgcctgcctgaatccatggtgggtcgttggccaactcctccatttctcacggcgccggtcgccgccccggccctacttcccttcacgcctccactgacctcgccggccggccaccaccaccgcccgcgcgccacacctataaaacctcacctcctccacctccatggctcaccaccacgtacagcaaacaccaactcagctagctatactctactcatcttctctgccagctgctactacaccaaccagagctaatcaagtaa

SEQ ID NO: 1648 - DNA, 2000 bp, Oryza sativa
  N_region (1578)..(1578): n = any nucleotide
tacaaaatccaaatacgacataacacaaatacattataattattatgtaatcaactctcggtttcaacttaaacagagctaattagtgttgagaaaaacacaacccatggtgcttaattattctctcgttgcatcacctttaattttcttttcatgttattaacaaaattaatcatcttcatatatgatttatgatttgatatgtggcaaagcggtagtgctagagcggttgtgatcaccttagatgtctcagacactacgctttgtcacacgtgcgaaaggccaaggtgcagacgtgcgctgtgcagcatgcaaaaagagaatttcggacgctttatttattagcaaacaatagatccaatgattataataatatgtccaccagttctagtgtaagtgtaaattagttaatatagaatttaaattagttaattagttaataatagtagaccttattttgaaacagtgcattacctgagaataatagaccaatgtaaaaagtagatccgataatttatataatagggccatcagtttaagtgcacgtataaatttgttaatatagatattgtttatttgataggtacacgatataattgtgtaaaatttattttaaaatagtgcattatttgaaaataatagtacaaagtaaagagtacaccggtttaaattatatgatggtagattctttggtttgtaaaattattattatttaaaaaatatatccattatatatataaattgaaaaaagaagaaaaaaagggaaaaaaaaggggaggaatcgtatgtacagtacgcacgtatataatccacctgccaatgtgcgggaggaggataggtgggacccatagtatttagtttgttttaagatcaattttatctaacggtgtgtaatattggaccccgccaatttaatttaaaatcaagggatagatgttttgcttttttcttagaatttctaggattttctctattttattagagcgccacgtggtggcttgagaacgtctgtaggaagttttatggacttttagtatataatagatagatagataatagatagatagatagatagatagatgacgacgtttatggtgactttcgttcgcctcaaaatatacaccaatttttaaacgtatccatagaggataaggtgttcggattcgcctttacaaaggctaaagggtgaatgtacctatgtataagggcttgcatctctaaaaagaaaaaaacgctcttctttgacatacagggcatgtgccactttaccgctactttcaacataaccaaattttagtgttaccaaattttaattgggaaaaaaactaaacactaccttaacaacaccatcctaccaacatttggtagttccgaagattccctcataaaaatgctactaaattttggaaaaacatcaaactaaaccaacgctatcaaaatttggtacaaaagcctatagcgattggtgaaggttataggaaaaagaatatttcgacaaaaaacaaggggagtactaatcttctttgctgctacatgatggcattaagtgaaaagcgagcagacgaaagatttcatgtncaagaattttacatttcaaggcttacagcctctcgagataacaacgaaacgcgagctaaaaagcgaaatggataagtgaagcaagcccatagtcattgcccaggaaggcaaactaggccggcccattaattcctcctacgaatcgatctgggctgtgaccctagtacccgacgtgtatataacaacatcctctccatcgcttagggtttctcctcggacgcagccggcggcttagggttttgtagctgtcgccgatccaaggtacgcagcctccgagcgccgcctctctctcacacacacgagcgcttccttactcgagatctctcgcgcccctctccgcttcgattctctgtttgttgatcgattttggtttgttccgtcgccttcgccgcaggttccgaggagcgaggaggagatccgcc

SEQ ID NO: 1649 - DNA, 2000 bp, Oryza sativa
atactacctttttcatggacaagaaccaagatcatatactcgaagtctgcatcattcagatagtcaatcgacagttgcatatcataaatactactctgtagcctcagaaattaaggagaagtaagctagaatgcggttaaggagataggggacaataactgcttggaagaagaaagaaagaaaagaagatcgaaataaagcagcaacaacatgacaggatgatcagaaaacgagacgcggagaagagaagcaaaagcatagcaagcaaagggaagaatccaaaggagaattaagaagattaggttggattagtacatataataacaataatcctatagtaggagagaaggccggataaatccaatggcaggtggtcgagagaagaagaagacgacgacgaggaggagcagcgagagaggcgatggagacggaccgtgcaaggtgcggctgttcggcgcgaaatggtttctttatgcagcccgcctacgtacgtgcacactcaactcacttcaattgatagtataattttaatttagctgcattgattgattggttcatgcctcactcttgactggatctcctctactgaaaatgtagtttctctgcaaacaaaatgtacggattgagatcaaatgcagtcactgctagaactgcaagtcagtgacggcacattatctcatccattcattttttagatcaagggtgtagatcaactgctatagtaccatcgctacagtagctgtgaaatattttttacgcgtgaacagtgctctaaggatctcagcccttagatgcaacttggatggtcctagtgtgactaattaagttgcagtcacactagggactgcacctgaaccaaatccaaaatgtattgctccctctcaggctccctgtgggtttcggtatataacatttaaccgtccatcttatttaaaaaaattaaaaatataaattacgcataaagtactattcattttttatctaataacaataaaatactattcataaaataaattaaataaaacgaatagtcaaacgtataacatagaaacccacaactaaactacgggcctgttcactttgatgccattttcaatcttatcaaatttaggtaaagtcgcaaaaaaagtggctacatttagtttgctgtcaaattttggtaactatataagaaatcctgctatgccaaaattttggtaatgcaaaaatttgataaggtttttttttgacatcaaagtgaacaggctctacaattataacagaacaaagggagtaagttttttatttccttctcattcttgtactggacaaatccaacagtactactgaaaaattatcaaggttcagtataagtattccacggcaattaatctagctagctagtatcctttctgagggcatatataggatatgttcattctagtgattatctttcacctgcaaattaaacttcaatgttcatgaagatgttggtggtaagcaaagtgtagaaattaaactggaccgtttctgcatattttcaatgaagatcagattatattactagtacatacgtaccaatattatttatatatatagtcattatctgctccatgacaactgatcaattaaggaagactatacaaatcacatggccatgttgtacactaatatttctttcttttttctgaaggtgatatatatacagtagtagaattgattagtttaagctgcaggttaattagcaagtgagtcgtagtaaggcagaggacgttggccttcttattcaacgcagcattaacacgtttgctcccctcgaaccagacaccctaccctacctgtcctcctctcttcttcctcctctcctctccttcctcctcttataaatccacctcctccatctcaagttgcaccgctactagcagctaacctacctacactacactacaccacacactacacttggagagaagcacacgtagctagagtgatcgattcattttcttgctcgatcttgatcg

SEQ ID NO: 1650 - DNA, 2000 bp, Oryza sativa
  N_region (1983)..(1983): n = any nucleotide
cctttcttaaaaaattaaattaagtaagggtgagtacaaacgtactcagtaagtcaccactacaaaatgcatttagtgcacacaggggttcaaggatggcttggtttatttgcataaagctagttttcacaattcatatcacaaacctatgacttagcatttttaactgaaaaaccacgttaaattgaagttgtcatttatcgagggttcatccaccttcccaagtctcgcttggttcggtttaccctcacattccattttataccactaccaaaataacctccctgcacatcggcaaggttacgcatgcctttacatctcgtagtctaagcaatattaaaatctatgagtctagtcaagagtagtacaagttccgacgctcattaaccgcgagcatggctattcgaatagatcggtttactcatactgcagtggatgtacgctttttaatcctgcaatccgtgacttgtccaacacatgagcctagtcccaacacatgagacttgtcacggcccggtttttcagtcattctcgcattgcggcacccactccaaggactatgagcccccattacacccaagcacaccaaccctacctcgagtcggaagtgaggggagtcctggcgctctcgggattaggagttatttaacatatatacacttatagggtgtattttaggttttagtcggcattatccaaacatcaacactgcaacaacaacaacaacaacaataacatactcgtacagaacctaccatgattggggtgccgcccccatgagaatttcctagttcatcgggtctatacccacttgagaaatgcaatcgtactcggttcgtttcttgtatagcttcctgactcggtccttaactgaccagggtcggcgactaacagtttccagaaccacccatattctattcttgccaccctagtcgaaattattttgttttattaagttttggttttcacaaaaggtttttgagtgatcacacatccatacccatataacataagtatggagtgtacgatcgtctaaaatagcaatgctaagcaatgccaataattgactgtgtataaataaatagactcatgcaacaatggatgaatgcataaacataatgataacaagatcaaggaggggtttcattcaagtgtaggtacacagttttataaatagcatgcaattttatttgaagacaacacatttataaatataggttcgatatgctcgaggaagggagcgtagtgacttgccttgttttcagaaacctatgtcttcgaggaatccgtttcagttagatacccggaatgcccacgttcaaagaataaccaatatccaaaacgtccgacaaacgaccacagaagaaccacacacaatcctaaatataaaataaaagtaatattcagtacaaactaatggtgccagtaaatagatcttgattttagagagattatggaagttgaatggagtcattcggaggtatggttcgtaagatatggatttccaaagtttggaaggatttgtaaaccgtggaggtagcactcctcggggtggggagatgattcagacttccagagagggttttgggttgtagagggacacaagatgtgattttagtgagcaaggaggctgatgatggtctcagcccgaaggttagatgaaggacattatacagacttctatagaggaattaatctctggaataagtacatctgaggtcccttaattttacatcgaatctgattatcgtccttaaccccaaaaccagatacaaccggtcctcaaactgtcaaaaccggtgcaaacgaggtcccttagcagttttgaaggcggttttggctgacgtggcgcctacgtgactggtttgaccaggtctccgtcccacgtggcgatgacgtggcaattatatctcgaaaaaataataaaaaccatgggcccacatgtcagccacacaaaaaaaatttaaaaacggtggggcccanacgtcagctaaaaagat

SEQ ID NO: 1651 - DNA, 2000 bp, Oryza sativa
aaaaaaaactatatgatccacatgttaataggacccacgtcatcacccccatttctttcccctcttctctcccttcctcctctccgtcgtcgacgcaccccctctcttcgccctcttctatccctccctcggctgtgagcctaggatcgcggggaggagcagaggcggccgggcgaaggaggcgggagtggggaaggccacgcagagctaggcgcaatgggagctcgaccatggccgtgcaaagcgacacaggagcggaggaggttggacggcaatgaaacggtgagtaaagaggaaaccgagtggggcaaggcgaagaggaggaggcccacaacggcgaggtgatggtggtccagcccgggtagatccctccgcggacgtgagaagaagaagtggagttcactggtgaggtcgccgttgggctttgggctcggccttccccatgctcccctacatcacccatcccctccccgctcaccagcagcccagtcagagtcgtcgcgcttggcgacttcctcctatgtctatcttaggaagcagcccgcccacagcgggaggcctgctacgcccatgctatagtcgtccgctgcagcgtttgggccgggcatggagctcattggtgacttcctctgtgtgttgctctgccaccggccgacctcagctccatcattcctgtctctgccgcgacgtcgcctaccactacatgggagagagtgtaaagaaagatagggagggagagaaagagggtgccaggtgggacctgtatttttttttcacgcaatgacatgcaaagcaccatgtagacgccacatgcaacaaagaccaagttaaagcaccacataggataaagagaaaattccctatatacccctgaaaatttactcaatcccttcaatacccctgaatttgacattatcccttatatacccctgagttttcattttgatctcctctatacccatctccgttagttgaccattagttgaccgttaaatattttaaaatgactatattacccatattatacatatgtgtggtacctacccaataaattttcatatgaaaaataaacttatacaaaatacaagcaatataatcatttaatgcccaacttaaaaaataaaacttattattttttattttttaaaaattatgattaaatccatacattagtttcaccagaaaattaagagcaaaaactaaatgttatttaggtttaaatttttgggaagatatacgaaattcatcaaatttgatctgaaatttatttaaaaattttaaatttgttttctaatttgtgataaactaattatatcccctttgttttttcacaacgaatcttttttcactaaatatttgttgaaaagtaattttcaaatcttatgcagaacttttttttacaataaatctttttttattttaatgaaataatgttttattttcaaaaattcataacaaatatttagtaatttattccttattggttttcacaactcaaataatttacacataaaacatttctagcttttaacaatataacaaggacaataaaagtaatttctacaataactaacggtcaaactaatggtcaactaacggaatgggtatataagggatccaaataaaaactcaggggtatataagagatcaaacaaatttcaggggcgtagaagggattgggtgaaattacatgggcatatagggaattggccctaggataaaatcattgttccaaactgcccaggaacctgatttgttctggttttgatagttggcctatgttatgtcgcaagttttgttgctaagggatggtaataaaattcgacctatagttgagggacataaaatggaccttattgtcttacagatttcttgttacaatgggccttgaggtttaggggaaatagcccatcgacggtgggccacatagctagaattttggcgggaaaactagtgactgggtggcaactggtcgtccaaaaatatctcaatacggtctg

SEQ ID NO: 1652 - DNA, 2000 bp, Oryza sativa
  N_region (728)..(728): n = any nucleotide
  N_region (787)..(787): n = any nucleotide
  N_region (832)..(832): n = any nucleotide
  N_region (882)..(882): n = any nucleotide
  N_region (940)..(940): n = any nucleotide
atgttgcaactacaaacataccctgagttcacaatgagtcagtgccaaagataacggaagtgaaacaagaccaacaccacaggtgtgacttggaaacttggccgaaactctaggattgactgaagtcgtttgctcctagaagaactcatcttcgggttccatctcctcctcttcgagagttgggagtagatatttatatagagagcaagggtgggtactatatattatacagaccaaggtaggggtattaagtgtttaatgctagctttagaggaaaggttgtttattttcaagttttgaattcgtctagtgagtgcttctcgacgaccagagtgagagtgagtctcactcagtcggaggagtgtagtgtatcattgttggatcaacaacaatggctcctggccaaagagacaaaaggactttgaagctttcgtgacaaggtatttccaaagcagacatggggtcaccttatgccaactggaggggtctcatggaccaagaacatgttaggtctcagaccatgttgcaccaggaagcttaggggtccttcccgaaaccatccccgtgaatctacttgtccatcggcatcaaggcttccctgccctagctagttactcagttagggggtgtcccactcacccatgcggtcacactatgttatgcttggtgaaattttgaacaaaatcagtccttagatacgagaatggtaaaactacaccacaagtacntctttttaatacaccaacccttatgttggatttttcttaggattcacaaaaccaaattnttaaccactgtagatcattatgacattgagaaaggcgtttagttntgatactaaagagtacagctatttaaacacaactagatagacgacaaacngtgctttgaataactcaattagcaatggacggttgtgcacccacttaggaggacatgncgatatattgcaatatacgaccgagctcatgtgtcacctagagaagcgcatatggaaaattaaagtgcttaatttcaaattatgggccaatatgatcgaatgtgactttccttgatcaagattttgagcttcttcctcaatgaaatgagaaatgatttgaaattttccatgaatttgttgagagagttttgggattttttttatttgaatttgaatttttcgctggaattttggtttgatcagagatttggagggagatcttggcaacacagctactcttcaatcaaagaacaactttcacgatagggtttttaaaaattaaattttcccgctaaagccacaaagaacgagcattacagaatttagataggatttattcagatttgtaatattaaaatgtatcatagtctaaattagatttgtctattttgggataaaatgagcatgtgttcagctgtcatcaacgactcatcgtcgttgacttggataataagggcggcaacagtaccacgcaggcacgtgccatgctcttgtatttttcttgctcctataagctaggactcgagagattttgcagcttatatagacgtacgtacttgctgagttagacgaagttacatctgatctgtgcatgttctttgtcatgctatgcagaataacgccaaaacccaggcccccagacccaccattcaccaagctatgcagtataacgccagacttttggctcacgagcagactagcaaaagcagcaaatgagcaatacatgattgtacatttgtacttagctgcagtgctcttgaagctaacggagtactccctctgactcataagacgttatgatatttttaaaacttaaatttcgataagtttgattaactttatagaaaaatatagcaatcatttaacacaaaacaaatatactactatcaaaatataataaatgttaattaataaaattaatttgatgttataagtatcgttatagtttactataaacttaattaaagttaaaaatgttttttttataaaaagttaaagcgatcttctataatatcaaatg

SEQ ID NO: 1653 - DNA, 2000 bp, Oryza sativa
ttgagcaacgtactacttcaattcctgcgttttttctattcatgtgttttttctatcctgctaatcaaagggcccctaattcattttctggattctataactacatattctcagaatttatgtgacaatctgaactgtttaggaagctgaagattctgtgaaaagttacagctactaaaagctccctaaacaggcactaggttgtgtttgattaccggttacattttatcacaactatactttgttagctaagttatagtagataaaaatatggtagatagattactagctataatatgtggtaaagttaataaaaatataactatgataatgaaccgaactcaactatggtagcttaaaaaatggtgtagtaaaacgtgataatgaatcaaacacctctttaatccgtccagatcaccggcagtcggtgagattgcactcgatcatcgagactgtaggacatggccattttgttgactatcagcgaggaccctggaccctaaccaataaccatctagatgatggacaattacattgattaatcaactacagaaaaaaaatagatggaaaattctactttcttttctgacacaagcgtggctaagacactgtcgagaggacatacatcgtccgcattaatactgttgatgtaataacaatcacttgggtgatctactccagttttatacaaggggcggatccaacgtggatgcaggggggattcgattccccccctacacccacaagacccatggatacctccggagcaatcctttcaattttctcgccataaatgataaactaatggtccctaaatagctgtaggttaaagaaactatataattaagtccatcattttttttttattcctggatccgccctgtttatacacatacaatcaaccaaacgcatcgctggctgcacgagggatacgagccaccccaatgcagccaatcaaacatacccatactacatcagcagtaatgcattgaagctgtttgctagtgaaaggtcattgtcaggtagctactgattgttattgctgcatggcacggtcgatgcagagagagagagagaatgcgacccatacatgtgtgcagatgtgctcatcgatcgtcgtctccttgcaagcgacctgtcggttgcggcaaaaccaaccacatccacatgaacacacagtcagtaacattaacagtaaaattaattttctctgtacctttgatatataatgcttcctccgtcctacgataacttcacttttcactcatcacacatatcaataaaagggaaaaaagctagaatatcttctaatttaacatatcccaaaacaatcgcccccaccactttaataagtctcattatatttgcgatctactttcacaaactctaataaagtgataatctaaaagtatttgaggacagattagatggtgaaaaataaaattattttagaaatgtacgacctgatcgtgcctgaggagtaaacaaatatactacggctgtacggcatatatggctcgttgcgtccctatcgaaccaatgctattttccaagcaaagaactatgaggcatctagcaaatccacagcatcgacgtgaacgaatatgcggccatggaattacagtactaattgccctaattttttttcctgtagaaaggagtataaatgtataattaataagatgatataaacgagctgtggaagttgcgacaaagagaacaagggagccaagagccaaggatttatttatttatttctcctttttaacttgggagtcttttgctattttcgtcttaattaagccgtcgatatatatcttcctgatacttctgatgatactccttgaaatctttgtgataccttcgatatactcgttaatatacggtgatacttgctggcaagtacactatgatagttgttgatattcgtatgtactatcttaaaataaaccatatgagaaaaaaaagggggatacatagtaggattatatcctgccata

SEQ ID NO: 1654 - DNA, 2000 bp, Oryza sativa
ttttaattgggtaaaaaagctatatcttttgggaaatgttaaatatgtttaaaaaatattaagaaaagttagtgtgggattgattttagaaaatgaggataattattgatgttgtttctttcctccggctgtttgtttagggtatatttagatccttggtaatttttttcaccctgtcacattctaatgtttggacatatacatgaagtattaaatatagaaaaaaaaaactaattaaacagattgcgtgtaaattgcgagatgaatcttttaagcctaattactacaatgatttgataatatgatgctacagtaaacatttactaatgacgaattaattaggcttaataaattcgtctcgcagtttacaggcggaatctgtaatttgttttgttattagactacatttaatacttcaaataagtatctgtatatccgatatgacacgacaaaaaatttcacccttaatctaagaacagccttagccctcctttattcatgagacaatggtgattacgagctcctatacctcctactactagtagcttggtgatgtgaattgatggcagcatcaaaccaggtgaaggtggcatggactcacgcgtagctcgcccttgagggcttgaggaggcaaacctgacttgccccttctttcttaagacccaaagctaatatatgtggttaagtcacgtcacctcaaattaccatagccattagatgaaatagcaacagtttagattgcaagtctctacttagcttcccttccattaacagtagcccaatatacatgggcaagcccaatccactgcctaggcccaattcgcccgttcccactacactgccgagcgtttccatctacccgcgccacctgaataacggccgacgcgccggctccctacctcccgcgcgcctccccgcctcctcgaaactgctcgcctccttggtatttggagagacagaaaactaatcgtcgccgcacatggagtaaaatttcattagaaaccgtcttccacaggcataacagtcttctcgcattacttcgattggtttcctacttcatctccgtcactggaaacggcctctccctcccatgaaacctggagcagcccctcacctttaagaaatcacacgagtatacaattcttctcccaaaggtctgcttcctcctcttcttgaatcacatatatgttcattcaatttatggcctttatttctttttccatggacgctagatttatttgttcctcttgccactgaagttatcaaagaatagaaaaacagacagatggatttggttttgtcccttctttatgtttctactagcaagattgaaatttatttggtctgtatacttaaaggagtcaattcatggtatttataaggtttctactagcctgttcatggtatgtaaaccattttttcaactttgctgtacctataatttgttgtgtttctaaactcctattgcagttcgtccctacacctattgcctactatcattgtagcagcagctatgggctattactgaggtcagtacccataacattcccatccaaagcagcgactgattgggtttttccatatgattcctctatcaagaaaatatcccaatatattggtacctcatattcgttcatggtcaccggctttcaagatattattatatgatcatcctacgatatcttcttttcaagatattactaagcatttcttctgtaaaaacaccgtcaggattttcatgtatatactatcatagattgcaagtgcaaggttatgtgtgattattttaacaatgaacttaatttaggtacatatattggttcctggatctgtgcatgctatccttccttgctatatgatgtttctactttaagttcagaattgtaagctacagttttgtgattgatgtaactttattcttcggattttgttctgtctgaggtttcaatgtagtccaagaatgtaaatcacatcagccaatgtgatcaaccacaaaacag

SEQ ID NO: 1655 - DNA, 2000 bp, Oryza sativa
cggcggcggcggcagcggacgcggattagggcggcggttgcggaggtcgcgttcgaggccggcggcggaccacgcacgcggaaggttccccttcagattccatcattgaagaagcaggtagagcaagtgggcacctctgcgactcttcccttcccgtcaatatggagatcgaagcctgttaatccaatttattctccctctaaacggctttcaattcatcctctagctagataaaccacaagaaccatcgtccacgctgggaggcaaggcatcatcagtcaagcagaagcaatagctaggttggcgcatgccgtaggctgggttatcgacttcctgcctgagaagaactttacgaagcaagagcaaggcatgaagtgtgtttttctttgattcatgtgctcttaacagtgttacttacagatctatcaggctttcaggaaacatatatgctctttatcccactaaggtataatattttcttttctctctccatcgattgtgtatatagattccactgttggatagcagtcccacgatgcatctgcatgatgattcatataattggctaaccagtgtgcagtttttatcaatgtgtaatttactggatactcaattatgcagatgccatgcccagcaattgtataagaactgtaagacttgatcaatgttttttttaatgtatatgattggcattgtggttttctgtaggcttctgtcagacttgatctgttgaaaccaaccacaaatgtgctacccttttttccggtcatggtgctgctaccatattcatatgcaaaagaagaaatactctgttgcttaaataaggaacgctttcttttttcatatataagtagtattcatattcttctatctcatattacagttttgctcatatggaaatagagatagttagatgaataaatttgaagatcgtcatgggctcattaattcattgtggccttactttcaggttcttacctacctttccctcaggcaagtgtgctacaaactttttggtgacaaaagagagtttatatatgtggtccggggcacatttattttctttagtgaaccaactttacactgagatttatgctacatgtcttccttcacagtagaattattatcggttttgatgtttttagtacttatagaatggacatctcaatcagaatgtttcttccaaactgacgaacagaagttttttttttcatggtgtttgctggacttacaggtcaaatgctattttattttttggaagtcgattgacaaaccgtgcattcatctccgctcatctccaaatgataacataaaatctattacgtaatttgttgtttgataactttagagtagtgataactggtatttttatttttctcatgatgggtttataattttacctttgaacagttctttgactatgtgattgtctggcctaggtgacgttggtgatgagctgtgagcatacacttctatatcttattatttttagttctaaaattaattatgctgtactattctttgttttcagaaattgaatggtttgtcagatttttattcaaaaatattatattttcttttcacaaattgaacatagagtaccgtctcacacgctgctcatcatgttttttatactttaatgtacacacgaactatatagttaatgctatttttcttctttcattaagccataccattttaattatttatagctctatggtccacattgtcctttgtgtcccatcatcttagttttttcctttagacgatcaagcaatatttgatctaaaatatcataaagcaaatcatctcaattgcttatagttttctcgatgattataaaatatgcaattatatgaagcatacaaaatcgtgtcatttagttgaaagaacacatcttcatcttatatttattttctatgtttatcatacgaaattcccgtagcaatgcgcggggtttcatctagtataaaaaggaggagttgcccccctccaatccc

SEQ ID NO: 1656 - DNA, 2000 bp, Oryza sativa
  N_region (1258)..(1258): n = any nucleotide
  N_region (1425)..(1425): n = any nucleotide
taggcctcgttggcatgggcttctaccccgggccatctacgtgtacggacggaataatagtaaggaataagttcacttttgatcctcaactcataatattggtgtaaccaaggctccatcgtgtccagttttaactgacaagacaagttagcgtatgacccatgtagcctccgtgtgttagtgactaatcttcttccttctctctaccattctcccctcttttgcctatctctctctatggatagtatattttgttgttaattattatgtcgattatggaaagattagtgataattaaaatatttttttgttaattaaaaatttactgttctcatctcattctctctcatccagccgactaaacaaattagttgttttcctatctagccaatgattaagagataacgtttggatgatttttgtggtaaatttgtacaaagacaacagtgtatagtagaggtagatcctgccgagtcctaaccaatacactccagtagtaaggtagaaagaaaaacatacagatggcaggtgacaattaacaagaaggtactactccagtacaattgtacggctgtgatctttagggcctgtttagttggaaaaaaaaacctacataccacatcggatatacggatatatggacgcacatttgaagtattaaacgttgtctaataacaaaaattgcagattccaccaggaaactgcgagacgaatttattaagcttaattaatccgtcattagcaaatatttactatagcaccacattgtcgaatcatggcgcaattatgcttaaaagattcgtctcgcaatttcctgacgaactgtgtaattgattttttctacatttaatactccatgcatatgtccacacatttgatatgacagcgtgggaaatgttatttgggaactaaataggcacttagtctactactttcccaacttcatatccctcgttttttcattatatgcatgcttcccaaattgttaaacgacgtgtttttaagaaaatgttgaaaaattgctttaaaaatcatattattctattcatgaattttttagctaatacttatttagacatacgctgaaccgtcatttcgtattgcgtgcaatggaggaagtgttcacaacttcatccggctcagccgtatcaagccagcactacatacatatggtgcaggaactctgtgtttagatctatgggcgtaaagtttagatatacggacatatatttgaagtattaaacattgtctaataacnaaacaaattacagattctgccaggaaactgcgagacgaatttattaagcttaattaatccgtcattagtaagtgtttactatagcaccacattgtcgaaacatggtgcaattatgcttaaaagattcgtcttgcaatttacacacaatctatataattgttttttantttatttatatttaatactatatacatgtatccaaatattcgatgtgacatggtgtaaaattttaccagggatctaaacaggcccctactccaccaaaagagcacaaacatggtaacactaacaccccccgtgctgttctacagctgtaacaaacacatacttcctccgtttcacaatataagactttctagcattacccacattcatgtctagatttattaacatctaaataaatatgggtaatgctagaataaatgaatgtagacaatgctaaaaagtcagtacattataaaacggagggagtaataaaaccaggaatttacacttggcgcgtacaaaacggggaaagccatgctggcaaattcattccttccttgcatacacccacagccaaaaggagttacatgtaaatcttatccccttgggagtatttttttcccccttacaaactggtcccctgcagcaaatgcaaaaggccacccagtccaggagtccaggcaggcaaggcagaggcacacacacctcacctatccccttcccttccgccgccgccgccgccgccgccgccaccacg

SEQ ID NO: 1657 - DNA, 2000 bp, Oryza sativa
tgacgagctacacggtgcttctgtcgtcgctcgtcaggacaggggacgacgtggacgagctgcacagggccggcatagtcgacaacatgctctccaacaacgacgacgcagcgtccggcttcttccagcgtctcggcgactgcagcacgatgaactacgatgaccacctgttcggcgcgctcttcgccggcgtgaagcggtaccacgacgcgagctggcacaggcacaaagccaggtttctgcgcgaccactgcagcaatccatggtctgtcatcgccttggggctcgccgtgctggcatttgtcttttccctattcaaccaattagttgttatccacagtctaatccaccataatggatagtggatagtgatagtgtactgcatgataaattaaggagtactagtattaactattataaatttgagagatggatttgtttgatattttttaaggaaattttatataacaggctatataaaaaatgagagagtggccaatctaaaaagaaaacccctttagaacgaagcctgaaaagattgcaacgaaattagcagcagcaagaatctctaaatgattttgtgctcaaaatcgacagaaagcagtgagtatgtgtctacatagatgtagcgaaaccgttaatgtattaggcaattcccttgctttctttaatttattggggccacctgaaatcctgaacatacccgaatgtggttcgctagtagcaataatcctatcggtttttgctatcatgctgtccataagatccgagatccatgatgatagggagaggaaaaaaatttcaagcataaccctatttttttcatacttttgtccaaatatgattgtgaaaattattttttgcttaacccgaacatctttgcattttacaaagtgagtgtaactcaattgattaggtttctagcaatgaaacctgccacacctaggttaagtctagacttgacacgggtgttcgtatataggactatttttttttcaatggtaggcgatgtattcatcgacagcgaagcatggtgaattcgtaaatctcaagatataccggcctagtttttgaaggtactgataagggtgaggtgctagtatgtgcaatataattggatgtgtgcgcgtttatataatttcgtgcatctacactgtgtttcggaaaaaaaaaatagaaaggacatctatgccatttttacacgtcgctagtcttttagtctatatatgtaaaaataaagaggtatcagtgaagatggtacttactccgttttatattataagtcgttttaaaaatattgctatatttttctttaaacgtgattataattaaaataataattagaaaaaaatcaaaatgacttataatataaattataaattataaaagaataaattgtatccatgctacatcaacttgacagttaaatacaatttggtgtaagaacttgagaaaccgagtgttctagtgaaacaacttggcaggtagatgtaatttagtataagaactttataagtgatcatataaatacaacaatttgtaaggtaggtacgattttgatacaataaattaagaagttatgcggcaacttaatatcattttttggtgtataagcagatttatatttttatcctaataactattaattgaaagtcaattaaactggatatagaaaaccttatatttcggttgatatttgagaaagtgaagaaaacaaaaaaaaatcttaagaggtaattggatgtaaattatatgtgcagtataattcttaaatattaaattcaatattataaggtaatatccgtaggattagtatgcaatggcatattgataacgttaaaaagattcatctagcatatacttagccaagttgatccactaaaatactaaattgtcaaagtctcgtacttgaacgtatcctcttgtcaagttgttgcactcagatgtttaattctcaagttcttatactatatcgcacctatctgccaagttgttatatg

SEQ ID NO: 1658 - DNA, 2000 bp, Oryza sativa
  N_region (137)..(137): n = any nucleotide
  N_region (148)..(148): n = any nucleotide
  N_region (387)..(387): n = any nucleotide
  N_region (394)..(394): n = any nucleotide
ttctcgacgtagtcgtacttcctcgaacgcgcgtgcgcctcggcgcaaccgccgctaccggcttggccatggctgcagatcaaagtcaatcaaaagtccaaaaaaaaccaaccgaatcgaatcaccacgcggccganacggttggggntaggtttttggccgaatcgatggatcggctggtggattacctttggcagggcgagccgaacgaagccggcgacctctcgccgagttgtccgccgccgccgccgccgccgccgcgtcgagtcgcggcgattctcctctcttctcgtcgtacgtcgcggcggagaagggaggaggagggtttggtttggagggaagacggcgttgaaacccgcgctgattttgcggggatctttttttttncttcttnatttttgcgggtatttattttgtgggggagacaggtcggtttgatggacgaaccgactttggaaacgtgtactacagtgaaaggaagcccacgtaacctcaggcccacaaggcccatctattttgacggttttgctgacgtcaaattttcttcttagatcgatttttctaacgaaaggcgtagtgtgcggttcgttacgtacgcggcattggactcgatgatgaccaagtgagggtcttgcatacatattttttcccttttcactgtataaactgaagtgattagatgataactctacttaaatgcatatgggagagatatgtgaccttcgaaaattacatactaattacgtgcaagttatattatagttacaatataattatattgcaaacgtaccatatttaatttgacaatagctaaatgtacaaataatatctgaatgtgataatttaacgctatttcacgaggggataggggttggcttttagtccgtgtgtctatgtatataatttgtatacatgtatatcaagtttatacgtatatgtataagtgcatacttttaatgtataaaatttttatatatatataaacaaaactttgtatatattcatacaaactttatacatatgcttacagagtttattcatatacgtacaaactttgtacgtatatataaaaatttgtatatacacgtacacatatatgtacaacaagtactccgtaccatatagaaactaactacgtgcaagggggccgcgcatggccgatcgttaattagcaatcttggtttcaacgtggtctacttttatccactaagatagtcttatatgtcatcctcaagtgtcgattaaaataaattggtaaaaaaaaagagtcaaattatcaaaattctcaaggttaccatatctataaatttcaagaaagggtttgtaagccacttacagaaattgaattctagaaattaatttttagggtttttcaattattatgttctactttttcagttttgtcttttgaaccattattaccaatataggtcttaccttaattttttattactttgtttatttttgtacgcaaattttgaaatagaatcacaaccttagaattgcattgaggaaaatcattacaagctgcaactatatcatgagcaggttatgcgcacagtggaaacattgcgtccaatctgggaactagtggttgcacccgtatgatttcttactagcatactttcactcaatttttttttttgaagcgaaaatttcactcaaatatttttttttctgttcaacatttttcatcatgagcacaaatagtttggaaatggtcttctccccaagattggtcatcatcagtatcctcgaatgcacacgcgaacaaggtggccagcaatggtgcaaaatagtttgatctactgtatattcgccaaaactccatttttttcccctagagaagaaagggttcagacttctgaatttacctgctatgtttcatttttatctgaccatttgatagatgccaacataaggaaggaaaatgaaatattcaaggtccataagaaatgaaattttcagagaatgactaaggacagcatgaaagcttgtta

SEQ ID NO: 1659 - DNA, 2000 bp, Oryza sativa
  N_region (14)..(14): n = any nucleotide
  N_region (22)..(22): n = any nucleotide
cgtccccgtcgacntcacccgntgcttcctcgtcggcgacagcgccggcggcaacatcgcccaacaacgtcgcgcaccgatgggccgccgccaccacctcctcgagccgccgcgtccgcctcgccggcgtcgtcctgctgcagccgttcttcggcggcgaggagcggacggaggcggagctgaggctggacggcgtggggccggtggtgagcatggcgcgcgcggactggtgctggagggcgttcctgccggagggcgccgaccgcgaccacccggcggcgcacgtcaccggcgagaacgccgagctggcggaggagttcccgccggcgatggtggtggtcggagggtacgacacgctgcaggactggcagcggcggtacgccgggatgctgcggcggaatgggaaggcggtgcaggtggtggagtacccggcggcgatccactccttctacgtcttcccggagctcgccgactccggcgagctcgtcaaggagatgaaggcgttcatggagcgcaacgcgccgcccaaatcgaatgcttaattagaagcgttttatttacctttggcatttcaaaatgttaacctggactgctatttcatatatattttgctgaaatttgatcaagttttgcgatgatgaattgctctgtgaaataaacagattttactttttttagataatgaaataaaacatctcggcttttgctcatcagagctacagccaattattataaaagtaacacccaaacactgaacgtagtttaaatgaattaaacatacctaataaaataaaaccgattttactagcagcgtattttttattccgatttcatcgcatggatcccatgatgctgacggagacattaacctaccatacgattctgttcacgcggagcacgagcacagctgcacatttctgacttctttttgacgcgacaagagaaaaagagagagagagagaggaaggctgtgttttcggtgcaaagtttagattttggttgaaattaaagatgatgtgactaaaaagttatgtgtgtatgacagattgatgtgatggaaaaggactgaagtttggattcactttagatctaaacacacagccttgaaacatgataagaattactttttgcgacaagtaaaatcagtctgacttttgagacgtacgcgacgcattacacgtcgatagaaaaaatcaaattcaaaagctattttgaagaacacttttcgtgtagggttctatccttttcttacaggctctcgttttgagcctataggattagattctcctcgttttctgttagcacgcttttcaaactgccaaatggtatatttcgtgcgaaaactttctataaagaagttgttaaaaaaatccaacaaatttattcataaaaaagttatatattaataattaattaatcatatactaatcgcatttctcgttttgcgtgcgactaaaccgtccaccgccccagccgaaacaatcgcacccttattgggccagaaaatataatcattgtgttatcatacaattatttcgtaagtttaaacaacttctatttccaactttagtcgtctattacacggtccaaaatgaaacacactcttttgtttaatgatattttctaattaagtagagggcgttttgtataaaacaaatgtttaatgatttttttcacgtgtgccaaagtcgaacactttaggagcgtatgctactacaaaatcgatcttttatggcgtcaccttattattttctccggcggccatacgtgaaaactaccagcgacaatggggctatagaccgccagcaaaaatggatcttcgctggccaacgaaagtgtatctttttgctggcggctcactttagcgatttccactggcggttgaagaggactgccatattaaaagatcagctctctccaccgcacctaactctttactccctctccatccctatcggtacgcactccttccctacccctctccttctccttccctgcag

SEQ ID NO: 1660 - DNA, 2000 bp, Oryza sativa
  N_region (119)..(119): n = any nucleotide
ggacgccggcgatgggtgctggcggcggtggcggccgtgagccctgtcacactctaaaatttagcccaaatttccagactattttgtgttttcctgtccaagaattagccaggggtacncaaaacggtaagtaatatacagttctaaacataaatacttacagaagaggcacttaatccttacaccgaaatgaaagcagcagcagtggaaaaagacgatcctagtggggcttcagctccactccacaggcaaaactcaactggggtctgagccttggtcatctaactctgtcttcaactcagaagcactacacttctgaaaagggggaataatagcaaggctgagtacaaccaccgtactcagcaaaccacaccaatgatgcagacgtgcaagtggatttaagaacggcttgtggctatttgcataaaggcggttgtaaaacattttattgagtaaaacagtaaaacagttggttaattaaggtaacattaaatctccactgatcaatgctacatcacgttgaacaggcccaaccaacccatatgaactacagtgcattgagtcgatttattaagtgtgagactaatcacggtgattctggtcgatcgcccataaccgcgggcacggctattcgaatagtttctctggccagaggtgcacaactgtacctacaagacacaatccatcagcatgtcaccgtgcccggccggaggcgtcaccatgtcaagtgattgtgacaagacccttcatattaccctctctgaccaagcacaccataccttaggtttcaccccgcccccagcaggcagcgagcagtcccctctcgtgcctaggtgaatctggaagcgacaaaggccgtcgcagggcccatcccgctccatcacgcccaccattgcttagatgcgtcagccagagaagagctatacttcaagtcaggcagttacccattcccgcttgtggcaagcattgtatgtcttccagtgcatcccgtgaaccggtccttaattgctatgggtgcgaccagcaaaaccatgcacccacagcccaccattcagtcgcattttagttggataattacggccaataaaacatggccgggtgtctcgagcacgcagctcgttctgataccaaaatgtctaatactgtaattatcccatcaactgagctagtggtaattaagcatggctaagcatatagttctagctaggtcatcaaagtaacacaagctagtcgatttatcacccaaggttgacgaaggacaagcaagcagataggtaaaccctgatcccatgtaattagcaaaacgatgcatatttatttgcaaacagtaaaacatttataaattgggatcaacatgctcaagaggaatgtgttactttccttgcttcttcacaacaatcttctgaactcttttcctcgcgatcgcgatcttccgaaacgacggattctacacgctggcatgcaaaacaagaaaaaaaacctaataaaaaccaagaaaacagtacataaaaagtaaacaaacatgtagagctcaattttagatgaattttgcaagttgaatggcccaatttggagttcgtatgaattagatatgaattttagaagttttgagccatttatatgaatttatagaattattaccgatttattgcgcaattaaaatggtttatgatgtcaccgaggggaataggtggcgccgacaagcgggccccacctgtcagtggctcaaaggaggtcggcgcacggtggactcggtccacgcgcgcgttgcccacgggcgcaccatgtggcagcctcgtggtggccatggcggacgggctagcggaggtggcgccacgagagcacccacgcggggcggcacagggaggccacgtggacggcccagatcggctaggacggtcgatcgaacggccacgggcaggcgcggcgcggcaaaggggccgggcagccacgggcgagcagggcggcggcagccggccggaaagcggtggcgctcggcc

SEQ ID NO: 1661 - DNA, 1770 bp, Oryza sativa
  N_region (204)..(204): n = any nucleotide
ttatatatcatataaaaatatactattattatcctatcagtttgatttatccaactaaacgtcgatacgcgaacggcggccgcatcatcgcaggcttgcacatacgatgattgctccagttcacatgtgacgccgtggcacggagaaataccaacgtaccatttcattgaacttcgccaatttctctcgtggttgttttctttnctctttttttatggtatgtgagggtagaatggttatttcatccctatcattgcatgtggcacacctatgaggtatttttatgggtctaatgactatgttaagccaaacgattaattttgggaacctttttcaacgatttgaaacctcggggactgaattgatccaggaatgaaacttcatggactgtattggccattcacccttaaagaaatacttcctccgtttcataatgtaagtcattctagtattttccatattcatattattattaatgaatctagataaatatatatgtctagatttactaacatcaatatgaatattggaaatgctagaatgacttgcattgtgaaacggaggtagtagcaaaaatacccttctgttgctaggaatagtaaaatgtccggtcgttactgtggactcaaacaacatgattattttaagtaagggtcaaatacccaatacccggactcaatttagttcctaacatttcctattatccaaaatagtcctacaaatttagcatacgagtagttggatccaccggtgcatgcgatgtcatctcaacatgtaaggtcaatatttaaatgtccaaagcaaccctacatttatcattagaaagaaacaatcaaaaaggaaaaagaaaaaaagggaaaaaaaagggccggcccggccagcgttgtttcgtccttattagtttcattaatttgttttgtttttctctttatttttccttagatctattttttttagtttttgagactaccaaaaaaattgttgcaagtttttcaagggaaaaactttcaaatctaaatataatttcactatagctataatataacttatatataagtattaaaataatatatacaactttatatctaacttatatagagattacaatggtagcctacgtacagtgcagttacattatagattacagtgtaactatagtgtaattataaattataattacacaacaactatattagcctatagtttcatttgaaagttttttttttgccaaaaacttgtgacattttttttagcaattctttttttatcttaaatggcatatataaggataggatagacatttagcgcttaccttgcatgcgggatgaggattacatggcatacgaagtggtgctcccgatgagtccaaggaatatattgtgccgcataaaaaaatatagcattactttgcacaatatgaaacaacaagaatatttatgggacgcgctaagtaccatgaaaaatgactatatatgaaatatatagatagtagatttaattagatccatgcctttgcaaagtctatggttaatttgaaaatctactgacactattgattcatttgtaactatatatgccattacaatatatttaaaactagatccatgccactttgtacatctcgactatgatttgaattgtttttttgtcaccgtattttcatgtggatcgaagtgcccatgcccccgatactgtgggactcacatatatgcgcgtggcatggtgcagcggcgtgcggcagcaagggtgaggctcccgtcatgtgcgagc

SEQ ID NO: 1662 - DNA, 2000 bp, Oryza sativa
cgcaaatttattcccccctcagggtcagcaccttgattttctttattttttttgctccttttctcccaccaaaatcatgtgagctgaaaaaatcacatgattgtgtttgaaaaaacagctgtgggctgtcactttctaaaaagtagctgtgactctgtgaggaagtcaaaagctcgtttggttatacataggtgggcttttgaataactagtcccactgacaagtgggccccgcatgtcatacacatgttgaaacaaaagaagggggagagatggagatggcggcggcggtgttatcgtcctcggtgtcatcggcctcggcggcggcggcgtgtcacgcccagaaattcccgaatagaattccaagcagaatgtgcattaaaacccccgtccaggaccggccggggtacacaaacgacaatgttgacatacagatccacgtcttacaaacaatataaaagtcttacataaatgcagcggacaaacgaaagataacaggagctaagccttgacttgaactgcagcgggaacaccactccacaggcatcctcgacggcacggacgaagcctactcctcggagaacccaccatcggacacatactcatactccggggttgggggaaaatagagtaagactgagtactatccactgtactcagcaagtcataccggaataggggtatgatgcagggatttaacaagggatagctatacaggttcatttgcataatactggcatttataaacagaagttgaatgcggataacagttgtaataattaatcaatattaatcatccactgtccaacgttacaccacgttgcaacaggcccaaccatccacctgtactatccaattccattaaactaaactaggatgggactaatcacggtgaatctggttgaccgcccataaccgcaggcacggctattcgaatagttttactctgatcagaggtgtacaactgtacctacaagacacagccccacgacacgtttccgtgcgccgacatgccaccacgacatatcagaaagagactgtgacaggacccttcgcataaccccctctagccaagcacaccacacctcaggtttcacccccgtccccagcgggcgacgggcagtcccctctcgtgcctaggtgaatccggaagccgcataggccgtcgcagggcccatccaaactccatcacgcccacccttgcctggatgcgtcagctagagaaaagctacactacaagcccagccgttgcccacgctggcttgtggtaagcacgataaattcttccagggtttcccgcgaaccggtccttaaatgccatgggtgcgactagcaaaaccatgcacccacagcccaccatgtgattcattttaattaaccaacaccaaaatggtggtactaaaccaaccttaccaattgaacctaaagtctatattttaatgagatttcctcattgtgtgctagtggaactaagcatggcgaagcaattcctagtccaaaatctattcatgttataacccaagctaacaaaggagcatggtatcaaaaatagcatggctgtaacgataggtaaacatcccatagtaatattgcaaaacaaatgcagtatttgaaggaaaacaatagaacatttgcaatgtaggatcaacatgatcaagtaacaagcatgacttgccttgctctactgctggaggaacctcggcgactatttcgaagtacaccggagcgtcagaagaaccggatatctagcgacatacaaggcaaacaatgcaaacaagctataagactactgaaacagagaacaaaactatttttaatggattctacacatttttcttgatttactgagacttgaatgggcttaaacggagctcggatgatttagatatgaattttagaaaattcactgtgtttttactataaacagaaaatccttaattgaattattgcgcaataattaaatcccgacgagagagagggcggcgccgacatgcgggcccc

SEQ ID NO: 1663 - DNA, 2000 bp, Oryza sativa
tctggacacttggttaagtgagaaaccatgtgcataatatgtgaacacgctgagtatttcctcgaacgatcgacatttgaacattttagttaactgaacgagctaatctaactttgctatatatacccaatttggtaagcgtatattaatcgatgtttggcttgcggtgcaagtaaaaatgggcgccctgatcgactactgtgcatgccgtacgttgaatcactctacggtcttgatcagaaaattaactaagagctagacataacattgtagttaccactaattcatcaggtccattagtgcttgacttgtagtgttggccatgcttacgagctaggagacgtgctcgtggaagcaatcacgcaaatgaaggtgaaagtgtaacatataatgtgcaacctttacaagatcgtgctttaatttgtcacagcttcagcttaaaacctaagctaattttgaagctcttgttaaagcttcatgaaaagaaagccaggcaacacagagtgacaaaaagggtccttaacactctaatcatctacacgtggacttatatataagcgattttgatttgttttcactataaatttatagtatgttattttaatcttggctttcaaattacgaataatacagattcaaaagttttgtctggttcattattttttctacgacttatcaacaaatcgatcggtcgaaagtaaattagaaacaggaagattcaacttttaaactcaagtgacatcagcaagcatgctccaagtctggtgaccatgctatagcaaaccatttttcatagatcattttaagcacatgataaatttcaaaaatagaaactgagcacatgataaacaatctttgtgccacccaattttatgatggtttttctcaacagttgcagtccgaagaggcgtactccattgtactacgatccaatagtggtcgtcgaatatatgcttgatataaccaaaacaggcatcccccataacttgattcgactgagggaattgctaaagatactgattttatatcatttttgttagcatttttttaaagtggtaaacgtcctactttgtacgggaactttttatataaaagttcttttaaatatcttataaagtcatttctaaatttaaaataatttaaacccaattaattagtaatatgagctaataatattctcgttttacgtgtccaagcttaatatcctcattagtgtaatcaaacggagagtgaacatcctcatttttttccttatatttatacttgtcagtcaaaattttaattttcaaccttaaatttagagttgagtttaagatttttgttcattatagttatttttcagtcttttcttttagataatttaaaacacatatatgaggaggagagctagggttaatatctctgcacgaatcttaaagcatattcgatggtccaaaatttaaaaaataagatgtgagattttatatcaatagatatatagacaatacaataaaagttagagttttatttacaaattatttttcgttagcaaatactccctccatttcgaaatgtttggcaccattgactttttagcacatgtttgaccgttcgtcttattcgaaaacttttatgaaatatgtaaaattatatgcctacataaaaatatatttaacaatgaatcaaatgaatcaaatgataggaaaagatgtaacaattacttaaatttttttaataagacgaacggtcaatcatattaaaaaataatcaatggcgccaaatatttcgaaacggtggaagtattccgtttcgcttttacctcgaacaaaccacgatggaggtggaaactttccgtgtggccggaatgtaaacgcgatccccgaggtggatactgacagcgacgtccgccttcttcaaaccgggcacgtgccacgacgacgccctatccaccacactatccacacacacaaaaccgcattactactcgatcgccggcgtcgcggtcgccatccgccgcatgc

SEQ ID NO: 1664 - DNA, 2000 bp, Oryza sativa
accggtgtactgtgttgcgggagaagatttgggattattccctttcggagcaaactggatagttttggaggcaagatccagcactgaagagcaagtcgatatataggccattatctgagaacgaaagatgtttgcttctactccttgcgaacttggcaatacggtgaaaaatatatactacaggtgtcgaagcaggcggtgcattttttaccttcctatgggggagaaaaacaatgcgcttcctcccccgggtctgtaattaaataacatggcaaaattttgtccgtgcccgttcccgttgccgtcgatagccaaattgctctcgtcgttttccatgttccatgtacgatgcggaacgatggaatatctggtcgaaacgcaaccgcgcaccgtacgtgtacacgcgctcgtcgcaaacgtgcacggtttgcacgagtggccgacgtctagcgaaagccccagacgcagagccaacgacgcgcgcacgctacaccacaccgtggaggttgtcagccacacgtgcaagtacaaccacaaccgagggccaggcggtagtggacaccgcgccacgcccgctagtcaatccacgcgagtagtacgcgactagcaacggcgtgtacgtccgtgtacgacggacacgatgcctcgtcgtcccgtacggctgcaaccaggcaaaaaccggcgcggtgaggccaggtccgcgcgtgcgcgcctcgcaaagccgcgagtcgtccgtccaccagtccaccacacgggcgggcatggagaatggagaaagagaaaaaagaacaaacagcctcggtcccgtcacaaaagaccgacatgcggggcccatgtaactgaccccgacacgcctcattcccaccccgcacgtgcgccggcagccttatctctcagcgcggtggccaggattctctgcgtccagcgacactgtgaatggatttgcatattagtagtacactttataaatcttcgaattcatcatatataattttcataaatcttcgaattcatagtattactccaagcatgtcatactccctccgtcccataatataaggaattttgtgtttttgcttacaatgtttgatcactcgtcttatttaattttttttaaaattattatttattttatttgtgacttactttattatccacagtattttaagcacaacttttcgttttttatatttgcaaaaaaaattaaataagacaagtggtcaaacgttggaagcaaaaactcaaaatctcttagagcaaagataataatatagccaacctgttggctataaggttctttgtagccttctcttagcctactcatataatagttagctctttacgattaatacagggcccacttgtctttctcacagagtttattagttcttatgttcaagccggctgtaagtttatagcctgcttgtcctctctctcctctcttttctcctccatctcagcatttagccggcttatagcctactattatacttgctcttatatcgtgagacggagggagtcaattcggatcctctactgtagaggagaaattttcagaggtagctacagtgcccggcattaggagtactgtgaagcgtccgatagaagatggatggatcagatgagatgctacagtaaatctgctacagcactaaccagaggtgctacagtacattcatcccctgtagctacagtaaatcgtgactgtggtgtgcattagaacactgttcccctcacatattagtgtagctatagtgaccctctacattactgcagaggatccgaatccggagggagtacctcaaagtagggttttttatgggagtacattgttttgtacgagtgcggtgttcgcagaagatctttttcatattcctcagctgctagccgccagctctacggatggcacactcgtaaataactcgggagtacgtgccggtttggtgcgctcgcgaaaccacaagccgttagtagtaagctccggtggtggcgccttcatt

SEQ ID NO: 1665 - DNA, 2000 bp, Oryza sativa
  N_region (24)..(24): n = any nucleotide
actgcccgtcgcccgctggggacnggggtaaacctgaggtgtggtgtgcttggctagagggggttatgcgaacggtcctgtcacggcctctttccggtatgtcgtggtgacatgtcggcgcacggaaacgtgtcgtggggctgtgtcttgtgggtacagttgtacacctctgatcagagtaaaactattcgaatagccgtgcccgcggttatgggcggccaaccagattcaccgtgattagtcttatcctagtttagtctaatgaaattggatagtacaggtggatggttgggcctgttgcaacgtggggtagcgttggacagtggatgattaatattggttaaattattacaacagtttttcgcatccaacttctgtttataaatgccagtattatgcaaatgaacatgtatagctatcccttgttaaatccctgcatcatacctctattccggtatgacttgctgagtacagtggatagtactcagtcttgctctatttccccccaaccccagagtttgagtatgtgtccgatggcgggttctccgaggagtaggcttcgtccgtgccgtcgaggatgcctgtggagtggtgttcccgctgcagttcaagtcaaggcttagctcctgttatctttcgtttttccgctgtatttatgtaagacttttataatatttgtaagacgtggatctgtatgtcaacattgtcgtttgtgtaccccggccggtcctggacgggggttttaatgcacattctgcttggaattctattcggtaatttctgggcgtgacactgggcgatagagatagagatgataaggcacgctcctctcctcactggaatatctccctcccacaccctctggcttgggtcggctagattaaaaaccgacatctataatatattatataaaaaaattagtttggtgtcgccgaaagtttacaagtttataaatataccatcaaaagttttagttgccttccgtttctataatttttttaatatgtttttcatttgctttctgccaaataataaagagaaactaaaggacggatttgcccttatcctcctgaactggattgatgcgtccgtatttatcgcgagtgtgcgtctcggcgacttgcggtgtcagcctgcagccgcaatctcctttccaccagccagcgctagctagcggtgaagtggctggtcttgtcacaaaaagctaatcggtgaccagtcacgcgcgccctcccgcgtgattgaacacgtgtcgcgcgcagaggggggcggcggacggtacccacgcggaggggttttccgggttttttattcggttttctctttctattttggtttttttcggtttctcttctttttttttctttttaagatgtacgtatgcaaagtttatattcgtatgtataccaagttttgtatttgtacgtatagaaagtttgtatttatatttttttctctcggtttttaatatgtacatatgtaaagtttatatatgcgtaggggtgaaaacggtacgaaaacggacggaaacaatctttacctttttgttttcatatttttttcagaattagaatcggaatcaaaaactccggatacgaaaacagaatcgaatattatcgaaacaaaaaacggagcgaaaatgaaccggcgcgaatacggtaacgaaaatttatcagaatacaaaagtccctcaagctaagcttcaaactttgtcaggtacaattctcaagttttaacaatcaacaatacattacaaaacacaatcatatcaaatgaaatattttaatggggcccgactgtaagccggtcaacgttgagtcaagggctgagggagaggcgtgggtcccactctctttttattttatcttcttttcttttctttctctctttcctcctcatctcttttctatctctccctatatcttttctttctccgcttcttttttctcttgtgcttcccaaccaggtagagaggggatgggcggcgacgcagggggatg

SEQ ID NO: 1666 - DNA, 2000 bp, Oryza sativa
  N_region (108)..(108): n = any nucleotide
aggaaacattttgagcagaaatcgagtaaacattaagatacacagccatagggcctcttgattccgcagctgtctgtaggaggctaggagccaacacacaagaaaatnaaaagaaagggaaaatagtgatgctaccttggagatggaggttgggagagattggctgagaggaagccagacctgtgttgtctgcgagcgggagaagacttaatcagcatcttcagtccacggtaagtgctgctagcttaatggatcaccaaaaaacagctttattaaccatcagaaaggtttaaaacaaaatctttttactccatctaccaaaagcagaggatggtggaaacaacaaaatctttttactccatctagctttgatggctaaatctcgcacttgagagcaacaagtgatttgttgtaataaccaggacaatacagactatattggttaataaaatccaaaatggagtctgtttggcaatggaaaacaagcagtcatgtttacaacactttcattttctcataatatttttttgggagaattgtgtttataccccagctttcaatctcaattgtgattttactcagttttttagcgtttgcaattttacccccgctttctctgaacgaagttgccgtttgcccctactatggatggcagttaggtgggtcccacaatattcagttaaggaaagagaaattagaagagaaaaataattttggaaatatgggattaccattgtacccttaagtaatatatgtgggtgtgcatcagtacatgttcgatatcctccttcccccagatccattcccatcccgaagtccttggcgcggcggcgccagaagcaggcggtggagcagctcttcagcgcggccgggagcaggtggcggcgcagctcctcggcgtggccaggagcaagctgcggctccaactcctcggcgaggccggaaggcggcggtgatggctcctcaacacggcgtcgcgagcagcaggaggcggcaggagtacctggcagcgacggcgatcctcagcgctatggcaggagcagcaggcgatggcagcgactcctcggagcggcaaaccattggtgatgaatcctgctcttgacgggttcatcagatcgaaaggacttgaccaacatgaagatacctgatgtggctgatactatgcacttatgcagtaagacacaggatgttaatgaacttaccattcatagacatcattcatgttcatgcaatgtggcgccattagattttcatacggattttgaatcatttcacgaaagctcagtacaaaataagggtaaaaagacaagtgttgtttaaaaagtaggggcaaatatgcaatagctagcaagggcataaaagtcttttcgtgctcgacttaaccccgttaaattgaccatccaaaccagggacaaatctctacttcgtttcaaaaaagtaggagtaaaaacgcaaaccctaaaaagcgagggcaaaatcacaattgaacttcaaaataggggtaagaatgcaatagcccctattttttttgaaggaaattttctgataatttagaaacatacaagacttcatgacattttctgataatctagaaacatttttctgataatcccaaattggtcaatctaaaagattaacacagacagtatatagtgaagaagaattgcagatcatcaaccatatcatgtatttgtatttgtagttctagatacaacatactgaaacactgaataagtacaaacttcttccttagctttaagggaatcaaagccaaaaaaaaaaaatccaaaacatgaatccctaaccatcacaagataaatcagttattccatacccaaaatcataggtggtgtagcagaggcggacatcgacaggaccaagatcataggtgacaggaccaattggagagtccctccagactcccggcgtcgacgccgggtgggacggctgatcgcgaaggagacgggcaagacacgatgacggaggtggccagggcgctt

SEQ ID NO: 1667 - DNA, 2000 bp, Oryza sativa
  N_region (839)..(839): n = any nucleotide
  N_region (845)..(845): n = any nucleotide
  N_region (1144)..(1144): n = any nucleotide
ggatgggtttgtcgcgcatgtacgccaccactgtctcctcgggaagctcatcgttggagcccctgtgcacgatgttgaacagtcgcggcgcctgcagtggcgccttcgccattcccgctgcgcctccttctcctcccccgaccaacgatcgtgcccccgcgacatcgcagtgcacaagacaagcaccatcgttgccgtggcccctgcacccgacgatggtggtggagaatgagaagcgtcgctggagggagagaccggagagaggtagggaaaagagaagagaggggagggaagtgaagaagatgaaactgacagctaggtccctcatgcagttgaggttaacggagattttcgacatatttttgacagattcgtaaccgcgtgccacacacattttgcaaaattggaaaccatgccactgccatcacattttccatccgtcttcttccttctctcttctcatcttcttgctttgcgagcgtcagacatcggtagttttgtgacgattgcggcagtcagcctccgcggctgtgaggaggtcagcgcgagggctctggcaacggcgagggagagaggcaggaggggttggcagagagcgcggtcacccaacgggctgacacgggggatgtggcctccagatctaaagaggagacaaggagctagagagagaagagaaagggacaggggtggagagtggaggggggcaccaccggcgatggaagggagcgtaggtgacaaatggtagcgacggtggtggaggaggaggagcgacgacggtggctgtgaggaagtcggcccgaaggtgggagcgacggcggcaaccagcggcggtggtgganggggangaggagcgatgggggcggagggagcaaacgactcaaccgggctgcaccgcccgcccttgtgtgcgccatgaccgtttgccaccaccccgtctccggtcgctctggcctcgacttcaacaccgggtgaggaggcaggagaggatggtgatgcgtatcgggttaaggagggaggagcggatgagatggattgctagggaggctgagaggtggtggagagagatgggaaaaacaagagggaaggatggaggaaaaagatgaatctgataggtgagacccacatgcagatgagaaagaagatngaaaatgtgacggcagtggcacggtagtgacagcaaagatgttggccatcgagatcttctgcgattacttcacatcatagttcttcctttcagccttgatcacacacagaaaatcctaaacgcatgtaaacctgtacacaaatatgacacaatgcatgtgaccgaataaaatttgtgcaaacttattaactttggtcaattaacactctaattgcatttggtcaattaacactaattgcttatcagtacgaaaaccatcagaagctgactaaccaaatcacagtgaaccaatatttatcatttggctaattgtttggctaataaccgaattgtgcaaattaaactctcacggctatgtatcaaatttggctcagtgtgattactatattggatgcgtgtaatacatgcaacgagttcctctttattaatgtataatatggtttcggggaactgctggtttcattttgcattttagacttcacacaacttgcagcagcctcttacgagacaaggcagtattttttttcaacaaaactagaccaaaaccacatataaaaaaagcacagagaaattaaaagtatgccgaatctaattcgtacccttatcagaaaatcaagtaggatggctcccataactattgaaatcggtgtaatttaaccctctcagcggttttggagaacggtttcactgacgtgatgtttcaacccgatccaaccgactggctcaacatgtgggacccacgtatcatagtcacattttttttcttccttctctttctctttgtttcttcttttacccaccatggcgacacatggcccaaggaggagctgcagctaggccgccctgatgcgtagcg

SEQ ID NO: 1668 - DNA, 2000 bp, Oryza sativa
  N_region (1907)..(1907): n = any nucleotide
aagcccttcctaccagcatgaccagttcgtccaacacgatgaacatagtcctcataatggttagggacatcataattcacaaccagctcaagctacttcacatctaattcacaaccagcaatcagcaagttgcatacgttgctcttgaaatcagcaagagttgattcacggtcagtctgatctttcccaccatgtaaagataagcatggatatccacgctgaaacaagtctttaagtagagaatcacatttatcttgtgagtggacaaaaacaagaattttgcctctatcaaaccactctccaagcaactccaacagcctcaagaacctctcattttctggccgcacctcaaccagttgtgtgatatctttgttgacgacactcctcccacccacctggatctcaacaggctttgtcagcaccttacgtgccagtatctccacctgccgtggaaaaatggctgagaaaagaacagtctgcctatctgggcgggtattctgaactatccgagtaatctgaggctcaaagcccatatcaaacatcctatcagcttcatccatcaccaagaatgtaactctccgaaggttagtaatctttccactgctggtgcaaaggatatcgatcatcctgcccggtgtacaaacaacaatttcagcgcccctctttagttcactgatctgctgggcaacacctgaacctccatagatagctacacagttgatgccaagcgacttcgcgaacttcttaatgtctgaatgtatctgcaccacgagctctctggtaggagccataatgagcccaatagggccatctccaggcacaacaggcggctggtctttgacatgcctgagcattggcaggacaaacgctagagtcttgcccgatccagtctttgcaattcctatacaatcacgcccactcattatgattggtaatgcctgtgcctgtataggcatcggcttctcaaaaccaagcttcttgatggtgtcaaggagcttgctggtcagcccactctgcacccatgtttttattggcttgggcacatctttcccatgtaccttgagctccagatttttcctgtaggtagccacttcctctcctgtcatcattgtgatatccttcacctcaatgtacaaattcttccggaatggctggtactcaattttggaatggtcaacaatagccagcttttctaccttcgtcttcttgacacgtttcatgaactcctcatcatcctcatctttcgatccaccctcatcgtcgtcgtcgtcatcataatcagagtccgaatcatccccttgcataattctccccattgccttcttttgccctttcttatcaccattactcacagcatcctttgcacttttaccattcttatcacccatgttggaagcaggcatgctctccattgatgccacagccgtctccagctttgcgacctccggcaacaccatggagctcatgaatgcatcgagcggatcaatctcatcctcctccataggagcagcaacatttgcatcattcacctcactcggcaaatcggcagtgatgccaccgtcatcttctgcattttggctatcctccttgtatccctcctcatcagactcctcaccatccagagtccacttcttcccggcattggaatcgccgtcggccccagcggccgcggcaggagtgccagcaccggccgccgcctcctgctcgcggcgcttcgcctcctcctcctccaaccgcttctgctcctgccactccttgacacggcggcggcggagctccatctcctcgtcgagccgcttcttctcctcctcaatcatcttctgacgccgcctctcggactcctcctcatccaccaccaccaccacctcctcctcctccatggcagccgccgcctccggctccgcgtngccgcggtggtggtggtggtgcgaggaccggcggcggcgcttgcggtggcggtcctcatcttccccctctccctcctcctcctcctacgcccc

SEQ ID NO: 1669 - DNA, 2000 bp, Oryza sativa
  N_region (777)..(777): n = any nucleotide
aggatgagaaaagcttttgcaaggagcaatgggataaggaggaaaacagacttttgcaaatagatttttgttttagcaaagacacgtccttatgggtttaaccgtttggcttgacctacagtcgagattgctctgataccaacttgtcacgcccagaaattcacaagtaatttctgaactaatttgtgcattaaaaccctcgtccaggaatcagccgaggtacacaaactgacaatttaatatatagattcatcaaaataactaaaacgataaatacttacataagaggcacttagtcctcaccatgaagaaaactgcagcggaaaataaaacctagcgaagcttcagctccactcccacaggcagctcgactgggttctaagccaaatgtcttctccttctggatcctttttcttcaactgaggtttgatgattattgcaagaatgagcatatgatatactcaacaagccacacagcaaatatgcaagtgtacaaggataccaaaggatggcataatatagggttcatttgcgaaagcagcatttagcaaagagttgagaatttgtaaaacaatagagtaattaatcatcaaaattaaccaacactgaacagcacacccatgctgtacaggcccaaccaaacctgaacaaccaacccggtcgtacatatcaacctccaaaccgggattatccattccaaaccaggagtcaaattaattatcacattattaacattgatgagtagtgtgggactaatcacgaaaaacattgctcaantcgcccataaccgcgggcacggctattcgaatagttttactctggccagagatgtaccactgtacacacacgacacgattccacacatgtcgccatgccctgaagtaccaccacggcactacaaaaggggaaatcgtgacaatacctttcgcacaacacaactcaccacagtgcaccattcctggatcataatcaccccctcaataaccagaggcatggactccccagcgacccccacggacttctcgccacttttcagtctggcaccccgtaatgaaccatgctatacaaaaggtaaagccgttgcacacgttggcttgtggttggcacggttaatgtttcacaacagtagctcgtgaaccggaccttaattgtcatgagcacgaccttcaaaaccatgtgctcacaacccaccattaatcatattttaattatcaattaattatcataacacgattgaccatcgtgagttaccattaaatataaacataagtaatagtgaagtataatttatcccattaatgagctaatgtttctaagcacggctaagcaaatgtaaataacatctagctgaaccaatccaatatataaggtccatgctagtcaaattataacccataggaaaataaagtcatcttcagccataattaaatgggaaaggctcaccacccgatgacattctaaaataatgcataagttgaaataaaacattagctttaaacgggttcaacatgctcaaagggttgtttgggatttgtgtgacttgccttgcaaacaagcgtcttcaattcgtcttcaggaacttctccaacgaacgaacgatcctccgaaacaacggaaaactaaacctagaacgcaaaacgagaaaaaacactaataaaaacaaaataaacagtacaattaaagttcataaataggtagaacttgaatttagatgaattatgagacttgaacgacctcattccgagttcgtatgaataagatatgaattttagaagatttaattccaattaaacctattaaagaaaagactattccaaattgattaaacaatttacaaatcacttatagctgagacaaaagattaaaaccggaaatagattagatcatatttggtagatgacatatattaaaaaggaataatatgccattgaaaagaaagaacggatttatatcgattttggacggctgagattaatctcgaccgagtcgaccaagatcgg

SEQ ID NO: 1670 - DNA, 148 bp, Oryza sativa
  N_region (140)..(140): n = any nucleotide
gcctctcgcgtcctctcttccgggcgggcagggggcgtcctaggcggagcggcggtgaccaccagatccagcccgctccggccggatctggcggggtagcgactagcggcggcgagggtgggggcaacggcggcgggganggcgacgg

SEQ ID NO: 1671 - DNA, 2000 bp, Oryza sativa
  N_region (10)..(10): n = any nucleotide
  N_region (26)..(26): n = any nucleotide
  N_region (48)..(48): n = any nucleotide
  N_region (134)..(134): n = any nucleotide
  N_region (1874)..(1874): n = any nucleotide
ctctttgttnagggatgtctgaaaanggggcagggacattcgctgctncagcggctgcatcttcttgggcccatattgcctccttgccgatgtaccctgcggtgcccagccgatgtgggtgctcattccgctgntgcagttggcgatgtgcctcgcttgattccctaaactcttgggtgttcttgagagagcagaattcctcccacaccgcctcggttatttgagggtattcatcgaatggcgtatgattgccgggcgggttgacaaactcggtgaagagcttcgacttccaattcttccaagctttacccatcttatggaatgccttccgcttgagcctatcctttgcttcagctggaaatgtgaaccatttctccattgccgtccaagctcgctctttctcggcttctgtgaccttgccgatatctttatggaggatcccgaagttctcacgtgccgccagcccgcagcagttagaccatcttccaatgacagtcctgggcgccgtgggcctaccactagcgtcaacctctcttataacttgcactgtggtaggccatatattttgtgaccggggatttctactcgacctacttgcacttgtcccgccctgacatcgatgtatgttgttcctgcggcaattctgtagcacaaacagaaggcaacatttgctaaggggtgctagctaaaatttatgtggtcatgtggtgaaaatttgtcctataaattaccatgaattttgggttgttcgaccgccgttgtcgagggatgaccttcggcaactgtctccgtggctgggtttgcttcttcttggatcctcgcaggtgttggggagggcgggtttgcgccgggcgttgtcatggtctaattttcgcgaaaaagcttataaatttcctaccattatactaaatagcattagatccaatgtaatacggggtatactatgaaagatatggcctcagttttgctcagaactatgcatcaattacaatcatttgcatgaagggataaaaagaggaaatcataacatcgaaagagcaagtgcagaaaatctgttcttatgcataaaaaaggaacaagtgtagataatctgttcttatctataaagaacaagtgtagaggtatataaccactaaatcaacagcaacagcggggggaaattcatataaacagcaacagcagggggaaattcacataaacaacaacagcagggggaaattcacatagacagcaagggtatataaatctgttcttatccataaagaaaagaacaagtatagatagaatgttattgagcaattcatccttggccatttaacaagaagtacagggggcagcagcagcagtatatatgccacaggggtagcaacatcagggggaaattcacaaaaagaagaatagataaaaaaaatgaacaagtgtagataatctgttcttattgagcaattcatcactggccatttaacaaggaacacattgggcagcagtagcatgggcaaagatactccataggggcagcaacaataggggtgtattaacaagtagcccacaataacagcagtagcaggggtgtattaacataaaacatcactggccatttatatagttaaaatcatgcaaaattcaaccaatgtaggcaaaattaatcctaaaatcatctaatacaaaaagactaattcctataatactgcatatatttcatccacaaacagtccaaattcatcacctcatatatttcacatctcaaatatgcatatatttcatcaaaaaaaaggagacaatactactaacttcatgtaaacaacaattcatccattcaattcaagcaagtgctgataataaaacagcccacaatcataaatcaacaaaggaantacaaaatgcattttgtatatgagggtattcatctacaaaatgcattcaacaaaaagggtatataaatcaataagtttagataatctgcaaagttccttaatcatcaaagaatgacagaaaacaaa

SEQ ID NO: 1672 - DNA, 2000 bp, Oryza sativa
  N_region (904)..(904): n = any nucleotide
  N_region (986)..(986): n = any nucleotide
  N_region (992)..(992): n = any nucleotide
ggttagctacactacttcaagagtgcaactctctcgtttgccgtggccatcgcagtcgcaatgacacccacgttaaggttaaggtctgtttggagagcttaaaattctaagaaacaattagttgatagcagcttttgaaaacatagaaaaactgggtttatcagcttctgacttctattcattttctggtttatataactacagtttctcataatctaaaaaaaagctgaaccgtttaggaagcttccgattctgaaaaaagttgtagcaactataagctccctaaacagagatggagataaggagagcaccagagctgaccaatgagaatgagctaaaacgctattgccaactcacaatctaaaacagtgttcgggaggtggagcacatgaaaacttggtggtttattaatggttaattaactaagtattagctataaataatttaaaaaagaattaatataattttttaaaccactttcgtatagaaattttttgtaaaattacaacattcaataatttaaaaagcgtgcatacggataacgagacatatgagttggaaaagtaaagaaaaaaactcggcctaatataccggtataccgtaaaccgtgaccgtagcgtttgccggtcgaactgccggccatcctccgtcgtgcggtagtcgagcagcacgtccaggaagtcgttcttgggcggctcacccgcgtcgcgctcccgcatgcgccgctcgatctgctcgtcgaactcagcgaacagtcgcgtgaacaccctcgacagccacctccgcagccgctgcgggtcgaacgccgcgaccgccgggaagtagtccaccacgttcgggacaccgacggtgcccgcgaactctgcgaccgtgtccgctaattcccccgccgatccggcgcgtncctcgtcgaggtcggcgaggtcggccgagaacagcgtgcaggagagcatgttcagcaaggtcgtgaacacgacgcggcggangtcganggccgcgccctcgcgcgccatcctcgcgacgtgcgacacgagccggcgcgccttctcgcggcggaggcgctgctgcgcgtcgaggcggcgcggcgcgaagagctccgcggagcacaccttgcggagggcgcgccactgggggctgctgggagggagccagggcatggcaaacctgtcgtgcccgcacgcccggacgatgtccggaacagggcgcgtcgagaaggcggcgtcgtggcgctggaggatgtctcgggcggcgtccggtgaggacgcgacgatggtggtgacggcgccgaggcggagcgtcatgagcgggccgtggcgctccgcgaggcgtgccagggagcggtgtggcttggcaccgagctcgaggaggttgccgacgagcggcagcgggcggggacccggcggcaggttgcggcgagcgtcagagaagagccggagaaggtacagggaggagacgaggagaataacacacggcgcatacaggagcaggagctccatgattgaccgtacaaatgtgtgcttactgcttagttagccgcaaaacggtgcggcggactggcattgtatattgagataaggttgggggcgaggaaaatgagaatgatagttatgatatgattaattaagttttaattattaaaaacttaaaaaatatatttatcttatattttaagcaatttttatataagaagtaaaaagcattcgtaggaaatataagataaatactaaatcaatcttaatagagaaaaacaaaggtttgagtagtgacggttttctcttgccatggttagtccttgtactgttctttatctttacgggccaagcttctccattatactttccatcctataaaagcatctcaaacaacatctctattctactctctaagctaaaatttagctagtgtagataaatttacagcttcaacagacttgctagctggatggcttgtccatctggttggccaaacccatcccctcgctgaccagtcgtgcacaacaa

SEQ ID NO: 1673 - DNA, 115 bp, Oryza sativa
  N_region (32)..(32): n = any nucleotide
  N_region (42)..(42): n = any nucleotide
  N_region (52)..(52): n = any nucleotide
  N_region (60)..(60): n = any nucleotide
  N_region (70)..(70): n = any nucleotide
  N_region (73)..(73): n = any nucleotide
  N_region (102)..(102): n = any nucleotide
aaggaatactttgaatgctaaatgatgacaancatggtatcntagtatgacnagctgatntcgacgcatnacntgaagtgggtaacttgtatgaggttgacnccaaagatatgaa

SEQ ID NO: 1674 - DNA, 2000 bp, Oryza sativa
atgaggtccttgggccattggatgaaggtaccacgggcatttcctagtgataggacctcgtcgttcggtggatactttagtgggaacagctcgtattcgggcttcaccgagttgacttgaacttttgcacagtcgcccctaagttgcgctccatgcactcttgtctctggggtcggcttgtacgcaagtccctcggctgctggaaccgtgaaggtcggcatcaccctaactgtgagtgtgcagctcgttggttcctgcgatagattcatcaatttttagaacattatataacatatggattcgttaagcctttcatgtattgtggacgaaacttttaccgttatgtggtcgacggcgctgtcgaccaatgttggattttccgccacctcagttgatgcgcaattgctgcgcttttgggtgggacttcctaactcttcgtcgcagcagcaacagcggcctgtgggttatgttgctcttctcggatctcttgcctaatcttggccctcatcgactcgagcttttcattgaattcagatgccagctccgctctgatcgacgccgggatcttggctttaaggcgtgcatctttctccgccttgttggaagtccgcttcttggactgccacgcgtagtctggaaatccaaacttctagggaatggaggacccaatgccccgtgtccttccacggtgttccttgttgcccaacgctttcgtgaggaggtcgtcctcgcgtctttgagagcaggcctcttgcgaggcttgttgctcggcaaccatctccttatgcattacaatttagttgggttaaataaactgcatgataggaaacaatgtgatcatctattttgactagacacttactatagcttcgtacactcgttgatcttctggatttggcatgaaaattgtgccattagcattcttctggtatctagccctggcccagttcctagcccgagggtgtgggatatcggcaaacacccgcggcgtgttcgattcctcctcttcttcatcctcctgctgccattcctcttccttaccggcatatccggcggtgccaagctagtgtggatactggttcaaggtctggagcatcgaaatgcctcgcttcttgctctggactcggtggtcgacttctttgcgtggaattcgtcccagacccatttcgtgatacaaggaaatttctctgttggatcgggattcgccgggttgaagacgaactcgccgactagcttactcttaaagttcttccaagcattgcccataaccttaaaagcagcctgcctgataaggtactcgtgctcctcaggataatcaaaactctccttgaatgttagccaagcactgtccttctctgcggccggcacttgcttgatgtcatcctatagaatattgaatttctgcctccctatgaccccgcagatagacctaaatcggctcaacattttcctaggacttgtcggcaagcctatttggttcactgcagttatgcggtaccgttccttagggattttgttccctgtcctaggagtacgtgcccttaaggacccactagttgttgtcgacattggttctccttactgagatattgtctattttttttcaaaataacgaaaatacacaatttagtgcttcaatggctaagaattcaaatttcaaaaatcacttagtcacataaataaattaaattgcacatctcacagatctaacaaactgaattgaatatcacataaaaataaattaaacatatcatcaatcactaaaatcagctattcatccacatgacacattcatctattcatccacattcatctaatcatctattcatccacattcatctatgcatacacattcatctatttatccacattcatctaatcatctattcttccacattcatctattcatacacattcatctattcatccacattcatctatccatctattcatcactaaaatcattcatgcaccacattcatctattcatcattcatgcg

SEQ ID NO: 1675 - DNA, 1742 bp, Oryza sativa
  N_region (5)..(5): n = any nucleotide
  N_region (48)..(48): n = any nucleotide
  N_region (51)..(51): n = any nucleotide
  N_region (91)..(91): n = any nucleotide
  N_region (109)..(109): n = any nucleotide
  N_region (112)..(112): n = any nucleotide
  N_region (126)..(126): n = any nucleotide
  N_region (136)..(136): n = any nucleotide
  N_region (140)..(140): n = any nucleotide
  N_region (144)..(144): n = any nucleotide
  N_region (150)..(150): n = any nucleotide
  N_region (152)..(152): n = any nucleotide
  N_region (1014)..(1014): n = any nucleotide
  N_region (1017)..(1017): n = any nucleotide
  N_region (1019)..(1019): n = any nucleotide
  N_region (1027)..(1027): n = any nucleotide
  N_region (1031)..(1032): n = any nucleotide
gaatnccccgattgatcaacacatgttgtccttctgcaccactatttncanggctatagccttttctcccttacttttactaacaaacttnctccaaatcccagttgangcnaacttcaataattntcaatggcanccangttngacccntnatgggccaaagggcatttatgacaaatttatcgtgcactggatctaccccaaacatattatacaaccaccctaacacgtcgttcaaacccatatgctccggtgcattcagactagtatcatggaaggcatatacagtcaaatccaccccgctatcacatatttgtataggagaatcgccataatacagacgaatgggcatatcacctgacatcctgataaaacatgacaaatagtctcacgtttaatcatttaatcattcgataattaccctattacaacttatactatattgccgtgtactaatttacaactattagtaacaaacaactagtttaataatccaaataaaatataacacctttgtacctattttaacacacaacatatcaataatatgtactaactaagaactaatttaaccgtacaattacttaaatacctctaccaacatttagcaataacaaatatgtgctaaccatacatactaacatcgaacaatgcgaaacaattaacaactcttaaaccaattttttattaaactttcatatgcattgtacttagggattactaatgtataccttaacttcactgctggagggcgttgccaaccctttgctcccggccggcgcctcctcggcctcctctccggcctgctaatcccttcccctcgctccctccggcgctcacggcgacgatgtggcgactctcggtggtggctggcgatgtggtcctcaaaacaaatcgaactcgcggcctgggtggacggggctttaaaccggcctgtcgaacgcccattgttcgacagggtcggtggagggccctgtcgaacgcccccggttcgacaggcctcgtggcgcccgntgntnggccctgnccgnngtggcctccgaatcctccgttgacagtgagctcaacgccagccgttcgactgggctttgtcgactgccgtcgttcgataggtgccctatcgaattgcacccgttcgacagggacctactttcgcgattttccccggttggccactacttttgcgattttccataaaaataatattaattctcaaaaaaattccactgtccaccaccttccccatgcatcctcatgccgctgctcggtgtctctggcttgactttgatgaggcgctggatctggccggctggcgagctcctgcgttggtgtgctcgcgagagaaaatgttggatggagtgtgagatctcgggagggagcaggggaggaggaggaggaggaggaggatctatgtcaagcggattggggtggcctcacccctcctcgcctggatcgagccactgccatggccatctccatcgccggctcctctgccgccccggctccaccctccttcctccggcctccctccaccgccaccaagacgcaccgctgaggcgcaccgtgctaccgtcgtgtaccattgtcgcatcagccagcgaggaggctggggtcgccagatctggtggtttgcttttctctcgctctcctctctctcggtcctcttgttcgcttttctctcgctctcctctctctcggagccaaggcgacaggcggcggcgcaagaggggaggcggcaggcg

SEQ ID NO: 1676 - DNA, 2000 bp, Oryza sativa
  N_region (1689)..(1689): n = any nucleotide
  N_region (1703)..(1703): n = any nucleotide
  N_region (1735)..(1735): n = any nucleotide
  N_region (1823)..(1823): n = any nucleotide
  N_region (1923)..(1923): n = any nucleotide
acgagagtcttacttgtatgatgtcactagtagctacgctttctaacttttaactgcagagaaatgtctctttcttttctaccttgtgttgtgtgattcaatgtagcatagatactagcacagaagcttcattttaggccgataattccttctctcgaagaattcagggctctttaacgttgtcaacgttcaggtcacaatcagcctcgcaagttcaggtctacagtcttgcaacctaaacaagctggttttcttcattctgattctggaagtaagaaaaacagagggcatacttgtcaagcctacccggatttaatgtgttggcaacttttttgacaagtcgacaagcacaattgcaacacctaaacaccttgcggtgatatagagtctctaaccacctcgatctagccaaagggccaaatcaagatgggttttgcaaaaagaaaagctaaaccggctagcggagccgatttagagatcaaaatcagcctctaggccgatttagatcgatatgaggataactacccgtcttgtgggcaaaacggaaggttttcaggacaaacctacaaagaggtgtcacactctcgcagcggcggcggatggtttacggcgcaaaccgataaagatggactaaaactagggtaaaatagaaaacatagtaaaagaacgattcaagtagattgtattcgggggttttacaatgaaccggccttatcctttaaataggggttggtcttaccctctacaggctcttctccacgtccaactcgggatagaaaccaaaggaaatacgaaacatgccttcccgagcaaggaaacccgagacccgatgaaaacagactcggactcggaccctgacggtctgactgcccacatatctgcggtcagaacggccctactagccggtcagaccgcccacacacctgtggtctgaccggtcctatgaaggaaacccgtcactttccaaactttgtcaatttttccctatttcgtccataggtgccaaatttgggtgtaaacataatgttcaacaataaaagacgataacatctgctttaacatctagggcgtgtttagttcacaccgaaattggaaatttgattgaaattggaacgatgtgatggaaaagttagaagtttgtgtacgtaggaaaattttgatatgatagaaaagttggaagtttgaagaaatattttggaactaaatagtagaggtgaaaacggtacggaaacggacagaaacgacctttatcgtttcgttttcatatttttttcggaattgaaatcggaatcggaaacccccggaaacaaaaacggaaacgaatattatcgaaaccgaaaacggagcgaaaacgaaccggcgcggatacggtaacaaaaatttatcggaatacacaaacccctcaaactgagggtcaaactttgtcaagtccaaatctcaagtctcaacattcaacaatacatcacaaaacacaaccatatcaaatccaattgtttctctcagcagtaccatcataaacacaatctatgcagtctgtaacttcatatttgcataacaaatattgcatggagttgcataacttcaacaagcaacaacagcaagtcagccatagtacatagttcatcacaaaacattgctgagaattacatagttcagcaatagtagaagtataaagtcagccactatatnaacatatgttagtnaaacaagcacaaaccagggacaccaaggcacnaaaatttcgctccaggttctccattcaccagtcaccaccactccaccagtggggcttgagtcggcggcggtgacgaggacggcgcganacggtggtgcccgggacgacgcaagacgtcgggggcggggacggggacggcgagcgactacacgagacgcggtggccgggacggcgcgagacgttggggncggggatggcgagcaacggcggggtcgaggacggcgcgagacggcggtggcgactggcgaggacgaagcgtaggggg

SEQ ID NO: 1677 - DNA, 2000 bp, Oryza sativa
  N_region (574)..(574): n = any nucleotide
  N_region (598)..(598): n = any nucleotide
  N_region (601)..(601): n = any nucleotide
  N_region (710)..(710): n = any nucleotide
  N_region (720)..(720): n = any nucleotide
  N_region (726)..(726): n = any nucleotide
  N_region (731)..(732): n = any nucleotide
gccacacgacccaagaagccaagggcctatatgggccatccgccactgggaggtcaatcataaagcccattaaggagcccaagacaaaatagacactgtttaccctcataagtgtacctatcataagggtatccatataaattcccctatacacattaactctagggtgtatgagcttgcacagaggctataaaatagccccctattggcatgtaatggggggatcctaaaaattcctcaaattaatacatattgttttactttccactgtgtgaaccacgtctttcgacgtacgcaattatgaatcgacaacagttggcgcaaccattgatgccacccaagaaatcggtcaaagagagagagagagagagtagcgcctagaagaaaggagggagaaggtgatgtggagatagctggcgaagaaccagcaaggaccgaagcaaaatcagagccaccaaggggcgaagggggagtaggccgaagctggtcaaggaaccaaagatgcaacccaagcgacgacttccacccaaggaagcttagaagcaatgcttcggtggcgcaaaaggcggagatngaggcgatgtgacaagacatgcangangctgcaggacaccctttagccaaatgcaagaacaacaccaggcatacgatgcagccctgcaggccaagtcaacatcttcagcaagactaactcccttcttggccccctnatggggaaanggggtncaacnncggttcaagcttcacaagcaatacaagcttcgactcacttagtgcagccctctgcagctgtacaagcagtccacactgtgtttcaagtggtgaaactgacttcggctttccaagtgcatcccaccgctcatgcaacgatggcaccggttcatccaacggttgccccgatcctacctgtcaaaccgattcaagctcaagcaaatcaatcttcggtggctgcttcatcgactctcgaagcacggttccagacctttctccagcaactaggccagccccacacaatcccaattgtatgccctttggcctacgccgttatgggaccaaaccaagccacgatggcagggcaactgttataccagcacaaagcccgcatttcgtctcatgatcctttgaagaactctcaagccatgtggcctggcttagatgatggaacgtcttgtccccaactcatgtgcaagcgatggctttgtctttcgcacaaccatacccaggcctttcgccacagtaccagcaaggcacggcgttaaaggctgggggcgaaaagaacctacctctaagctgggggctgaggaaagaacccatcgctcctcagttcgagtatccaccagtgtcaaagtattcggggaaaccaatccgagcgaagtcctgtcgatctatgagttgactatcaaagcgactcatggcgaggaaaacaccaaggcaaaggtaatacatcttattctggacgggattgcccgatcctagtattttaacttgcctctaaatagcatttactcatgggagcaattgtgcaatgtttttgtcttgaatttccagtggacctacgaggagccaaaaactcagcaagacatgtgcagcattcggcaaaagctgggcgaatcgacaaggaagtatgctaggcgtgtttcacaagcaagatgtcgagtgcaagatatcaccgaggcctccatgattaatgctgcttcggctggcatttgtcttggcaaatttacaagaaaaatcacaacgaaaagagccacagacggttgaacacttgttctctatcattgacggctatgctcgcagtgaagaggatatgaagcgaaagctcgagattcaagctaattacgacaaggttgcagccgccgccgctcaagcaagcttacaagagtctgaagttgggtccatggaaaatcgccttatgtagccagcgagccaagcctcacccccaaggcaaggctcaactcccacgacttggaagaagtttcgctttgaaagggggaaagcag

SEQ ID NO: 1678 - DNA, 2000 bp, Oryza sativa
atttaacgacaatcctgccatagagaacaaaacaagtcccaacacagttgtagcccatattacccttttaagtcatttagaacgtcatggttgccgccaaatcacagatggaatgttgaacaagaagtactcctaacctggtcgttcctatccattttgcaacacttgatctatagaaatattcttgacaggtgctaaatgaattgtggaagtctaaagattcagtccagcaggacaatacatttttgttcctaacccattgccattaaatctttgcaattgaatctccagagctacaagatacaacatgtagcatacaactataacctacatactttttcagcacaagttttaacaaaggtagtacaaaatgataagggatcacaaaccttaatattttgcattcttgtgcaacaatctagccaaatttcccagcataaactttaacatcatccaatttcagtctacaggcaaaccaatgaacgaactccatttgcttccccagaacaactggaggtataagcatcagcaaggccttgaattttgtccttaaaaggatccacaaacctttgcacaaacttctcctcgctcatcgcggctatgcagtagtaagacaagtcacagttcagcaatccctttgccttgaggaccttgagcaagcaatgccgaggcaacaaccgccgctcaaggctatacgccaacaacgttggcctttgtgcgatgtagctttgctccagaccgacatcccttatcaagaactcaacagatcgccgtatccttccatcggataaacgcagcacttgtggcgccctccttacgattaccaggaaatcatcctgcgaaaacccaagatcatccagcagctgcattttactggcaatagtctccctgcttaagaaagccactgtactgagcacgcggtggaacgtcctccaaccacgggccacgcctaactcctccactcttgccacagcgtcctggaggaacctagggttcacggtgaagagccggcaggagtacagggacaaggttgtgcgagtgacatcggaggcgtttatcccgcattgcgcgaggaaggccaggttcggcttcgccaccttgtcgaggtcggagccgaggagggcggcgttcatcttgagcgccttgaggatattctcgaacgagccgaacaccgggtgccagaaggcgagccttgtggcgagggagctgctccggaagcacctgccggcgagcgggaggaggcgcgcgatctgggagcgggagaggcccaggccgccgagctcgtcgacgcgcctggcgaggctgctccccacgtcggcgcacagcagccttgggtcggcggcgacggcggcggcgatgccgtcggggcgcgagaggccgaggtcggagaggaaggcgaggacggcgtcgggattggagggggacctgaggttggagagcttctccgaagccttggctgcctgggctcgggtgaggccgcaggtggcgacgaggtactcgtcgacggcgaagggtttgggggaaactggcgcggtggtggagaggaggcggcggagggggcaaggcggcgggaaaattccggcgattgggcgaggggatgctggctggaggagcagagataggatgcgctcccggaggcggatcatggcgtcgtcgtcgtcggcggcggcggcgcaagggttgccgacggcggccgcgtgaaatcacagggttatgatttctcagctcggtgagctcacaaacaaggaagggaaaagtacactaaaggtccctcaacttgtcatcgagttacaaaatcatcccccaaccgcaaaaccagatatcgaaggtccctcaactaacaaaaccgttcggttgaggtcctctggtggttttggacgcagttttgtctgacgtggcgtgtgagtcagcgtgggcctcacgtgggtcccacgtgtgggaatgagtcatctctctcccttccttctctctctcaaactcttctcctctctgcgcaattc

SEQ ID NO: 1679 - DNA, 2000 bp, Oryza sativa
ataaggcgatccaaattaacctgtatgcctgtaccagtcccaggaaatagcgctggtacaacaggaagacagaatatcacaacaacagcggtctctttattaagagtaggattacaaccaaggttggaactgcggacagaacccgagttcgcaacaacattacaaaaaggcggaagcggaaagcggagactagccctaagccacaagcaaagccttggggaaaggccgaaaccctactactgctcgaagtctgcttgctcctggaagaactcttcatcagccgggtccacctcttcgtcttcaagaactgggggggtttaattatatagagcaagggtgagtatgggagtactcagcaagtcaggggaattaagtgtttaatgcaagcttcaagggaaagccagttgtttttcacaattgattttagtttaagactttcagaaacatctaagtgagtgcttctcaacggcgcggacgagaaagtgcgtctcatccggccggagcagtgaaaatgtgtcgattgattcttgtcggcacgagaggctcccagccaatcgtttaccgacccggctgctccaacagccacacgcgagaggctccctgccaatcgctcaccagcaccggctgcaccaacagccacgaatcaaacacgtcggaacaagaggctccctgccaatcgttcaccgacaccggctgctccaacagcctcgaatcaaacacgtcggaacgagaggctccctgccaatcgttcaccgacaccggctgctccaacagcctcaaaccaatcacaaaagggaaaaactcacacaccaacagcaatttccaaagtgttcactaaaactacgctaaggaatcacctcacatcctcccatgaccgtgggcacggctgttcgaatagttattaacctctgcagaaggggtacactttacccacacgacgttactaaccccgaatcacccagcccgcgactctcggtcacgtctggcgaccttgaggctttcacgacaaggcatttcgaaagccgactcagggtcatcttatgccaactggaggggtcccacggaccaacaccaggttaggtcccagaccatactgtgccaggaagcccaggggtcctccccgacaccaccccagcgaatccacttgtcccttggcagcaagatttccctggcctagctaattactcagccaggggcgtcccatatcacccatgtggtcgtacttgacatatgctcggatgtaattcccaaggaatcggtccttagagcgagaacggacagaccgtacctccagtacgtcttccgtaccgcgagttttagaaactcactttattttcaaggcaccaacccaagtgtcgggttttccaagcattttgtaaactcaagttttacccaggtgatcaattttagagtttgaggggagtctcgatattcgtacgcgaggtgcgaataccgagatttcacctgacgggtgtcaagggtgttagggtattcaaatatcaaggaaggtgaatgcagcaaatgggtagggcctgccggttgtattgcaaaccgaggccaagtgccaagtgtaacctagttaatgcatagtttgcggaaatcaaaatacttaatttaaactataggttcaattgatcaaaggtgacttgccttgctcgagatcttgagcttcttcctcgaaatccgcgcactgcgggtcttcgggctccgagactacacgcagaacgagacgactcaacaaagcgataaaaagaagccctattaaagaccattaagcatgccattggatagatctcgatttttgagaaattttggaagtggaacggagtcaatcggacgatcggttgagaagatatgaatttccgaagattaaaggattttctggaaaaagaaaaggaattattaattccctggaaaaagaaaagaaggagggatgcaatttagatttcattttgggcggctaagggcagcccaatagaatggaatgtacgcggccgaaa

SEQ ID NO: 1680 - DNA, 2000 bp, Oryza sativa
tgatcagggtcgacattgtgtaggaaagattataatgaaatggaaaacatacgaagaaaaactaggtagatcacgagggtgaaaaggtatgaaaaaatggagagagatagagggaaatgtgctaatagtagatgaattgttgtgacatgaccttgtcacatagaattgctagggcacactatatttacatgccaatatatttatattgcattttcctacatctaagtaattagatttctcgtacaattcatacttgggtatgatattctcatggatagttggggatgtcagcaatctatagcttacacggtcccttatgaaagactctattggtcttattgtgctccttgtgagcacatttggatacacattcaaatagattaagataactcgatggaatgtataccctcaaattctttttcgataatgtaatcaatattaccctattaatttttctagcatgaaaatctcagatcaatccaaaaccatgtccaactcaatagttatatatcataataatttacaactcgtccactcataaattatatttttttaaagaaccactcaccatcccttccctcctctttttcatatttgtatccaataaacaccttgcccattctcttgctcatccttctgtctgtttgacagattggaccaatttatcactcgtagttgaaaggaacaagagcgatttaatgatatcttatcacttgtaattggacttcaagcctctttttttagaactacttcaagcctaccatcatcgagttatgcctggtgtcgtggcagctcggtagagccatgatatcgactgcgcagcattgtcacgtgtgtcatggatctagctagcctgcctttggtgtgttggtaaggcttgaggccatggggctgcgggttcagctttgtggtgttcttgaattggtggttatgtctggcacatagggtggttgtgtgtgaggatttgattgtggaatgacgaaagctttgtcaaattcttgcaagctttgatgacggcaacaatcttgagcgtcgtcacgacatcccatttctccacacaagtttccatattagaatcttggtccgatttcccaaacaagcaacggcgacgtgagcgtccccatggaattgttgctttggagaatcttcttcctatgacagtggccattattaggaacttagtggcatcttggaccatcttgtggctagggttcaccttttcgtatcggaaattatacccgcttatcaacggtttatagaaacccgataaaaaccaacaactttcggtcaacacggtatgaaaaccagctaaaactgaccggttttgaaaacatagcagtgtgcacgtgttttccgtgtaacagacaaaacaaattaggtctaatgtctagtttcacgtaaaaccgttttgttctatcttcttgatgaaaaggctatcttttgctatttaactttggaaattgctatgcatatgacccaactgtccgactcacgtacgattgaatttgatcaacggttgtaaacggctgcagtgtatatgaatatgctatcatttgattgatctataattgcttgtctctagttgtacatgagttgtacaactggatctcatgagcaattttacggttcttaaggaggtaccaaaaatttagtataaaattttggtaccttatagtacccaggtatcaaaaggtattaaatttacaatagaaaaagtgatacctcatggtacctcctcaagaaccgtaaaattactcggatctcatacatatagcagtactcttttactttcctccctgtttatccctaattaactttacactgttaggcctaattaattttctctacattcgtcccgactggattctcaagtagacgacatgcgtacgtagcatccaaatacacgactcgtgcgcccgtaagacaccaaactcccctcttaaaacgacgcgacaatcacaagccgccgcgcccctgcactgcaccaccctctcgccgcc

SEQ ID NO: 1681 - DNA, 2000 bp, Oryza sativa
  N_region (1147)..(1147): n = any nucleotide
gctgctcacagtccatcatccatccactgggctacgagtgctggtttctgaatcctaggggggcaaacattttgctatttgagttttttttaagtagattttgttttaaaccaaactgttgcgaaactatagatacgtcgctaaatttgttatcagactattgatgaaaattttcccttagcgaaactagcaaccattttgagttgttgttcctctcccaaggaagtttactcacacgtccgcaactaaaaacaccacttcccgttcgacctgtatgtgttaagcatgccgccagcgtttatcttgagccaggatcaaactctctataatatatttagcaatttatttatggcaaaactgtgtatttaacaatttaaaccagacacgctaagaaatatactcgatccaagccaaccatcccatcccttaaaccaaatgcaaatgcacggtaggtgatcaattcaacgagtttttgactgccaaagtcattagcccatccaattctacattctacgagggaataagttcagtttagatctccatacgtcaagtttgaattacatcactacaccgtgatactagatacatatagcgtgtctctaaacttgcaaaataggtgtacctgaggtcctagggtaatatagtgcccaatcttaactcacgtggcgagtgggtctcacatgtcaacaacccactcttgtttcttctctctccctcctctcccctctcttccccaatcctcttcaagccaggagggggggcggcgagcgacagggagacactggtggtcaacatgagcgcaggagcttgaccgtggaaggtttccaaggaggcggcccacctcggggggctgaaattctatgatgtcgaggaggatgagctggcaggagcacgttgactactagtggaggtatgcagtgtgctagacgatgacgagcgtgtcctcgggactcaggaggccatggtcacgaggtggaggcgatcagggtgggctgcattgcgagcacgatagccgccgatgaccaacctgaagctgccccggcgcggggttgtccccaacccccccccctatgcgacgctatccattagtggtgccttttgccgcgccatacaaaacaagtggcttgtcagcgattgcccttatccncgccgctcggaggcctggtgatagatggggaagatagggaagagaggaagaagaatgctgctccctgcccttctagtttgaagaccattgtccttctagtttgccgcacccactgccccactctaagtcggcggtcgtccctctccttgctactcgttgctcacccgttagtccaccttgttggttggccctctccaagtcggtatccacccttctcgccgtcgctcgaggctaggtgagagtatgagagatgtggaagagagggaagagagtgagtggggggggggaagaacaagagttggccgatgacaaatgtggctcactcgttgcatcagctaaaactgggtactatcttggacctcacaccagttttataagttaaaagatgagcgttatatttggtattatggtaaaaaaacataattaaaactcggcgtcgaagatacgagagatgtaaagtgaacttattccttctataaaatgaatttcgttcttctctacgccaatcccctgcaggccatccgttcgtagaagatgggactaatgctggcctgcaaatttatttgggctggtaacgaggaaacatttcctttcccagcctcacagactgaggcccatcaagccgcggagagcaacccctcaagacgatctgagccgtccgatccatctcccgcaccgcatccgtccgcccgatgcgctcccgcgactagggtttcttcgagaggaaggataaaagggctcgtgggcagccgccgctataaaccctaaccattccttctcccaccttctcccttctcctcgctcctccccctccgccgccgccgcagcggagcagcaacagcaggcgagcgac

SEQ ID NO: 1682 - DNA, 2000 bp, Oryza sativa
  N_region (1907)..(1907): n = any nucleotide
aaacgccacaaagccacaagccaacatacgccaagacaagacgacggatatcgacttcagggataagcacggctagttccctacggtgtctccggatactgtcaggagagacgaaagcgctatctctgatctcgccgggtacggattcgaggaggaagactaccctgttgtcgactacgagtcagatcttcagaccgccatgtcgacaacagttagataagctaccctaaatattgtactggtgtgattatggtgaataagagcaataccggcttcggctaacaggatgtagggttattacctaacaattcaggggcccgaacttgtataaaaatccttgcctctgtctcttttacctcagtttcgcgtatatcctagtaccaacgatccccatactatacaaataccggaatcgcgacatcaaacctcgacagatagtatagcataaactaacaccgaccgaaattcaatgttcaaccccaaatttttgatccctgctacatatcaaaggatgtttttagatcaggggtgtaaagttttggcgtgtcacatcagatatacagacacacattggaagtattaagcgtagtctaataataaaacaaattacaaaatccgcctgtaaaccgcgagacgaatttattaagcctaattaatccgtcattaataaatgtttactgtagcaccacattatcaaatcatggtgcagctgggcttaattaaaagatttgtctcgtaatttacacgcaatctatgtaattattttttttatatttaatagtcgatgtatgtgtcaaacatatgatgtgatatggtgtaaaattttaccagagaatctaaactggtccaaagttgcactttgtggtgttgacaaaaggggtagtatatataaaatccaatttgtcacgtgtcaaccaaaaggccaggtttctccagcagaggtagctatcccaatacgcacgtacgtatgtactcgatacttgtaatacgcaaatactgaacgttgtatcacccacacaaatactgatacatatacctatacgtatgcgtcaccgtcgctgttgcacctgccaattgccataaatgccccgggtcaccacccggtctcttctccctccccccctctctctcactccggatcgatcagcttagctccacccaacccccagccgcgtcgactagctgagctgagctttcccttggcctatatactctctctctctcttctcgccccaccctactccttctagtacctccgagctaagccactccaccgccgattgatcgcgtcacggcggcgcagcccggccgccagcgtcgtccgtccgatcggcaggtgagggagtactggctactgttgtcttcttcttcttctccctcttcttcttcctgcagctgcctgctgctgctgcagcggattctgcaggtcgcgtcgcgtcgtgtcgcctctgatggtggtgtagcatctctctctctctcctgtggcgcgtgtgtcagttcttgggctgctgtaattagcctcctggcaagagaggtgttcagaattcagatcagggccaccccgtactactagagcactagctgcagcagcggtctctggtctggaccagcgaatccaatcgccccactagagataaccaaaccctagttgcatctgtatctctccttgcgtgtttggttgtccttagctggtgaagcaaagcgccggggcagcagcagaaacacccaaccgattcacagttaatttcttgatcgatttattgagtacggcttccccagccgccttcaatttcgtttgctttatgcttggttttttggttccatcgattgccgagaattcgagcatgcgatcgctagcggcaattgaaagaagatgtggctttaatttttggttgaattcatttcangggggggggggggttgattttgattagcctttttgtgttgacgcatgcagatctgaggagggagaaaggtttgctgctgcttgtgctaggacg

SEQ ID NO: 1683 - DNA, 459 bp, Oryza sativa
  N_region (4)..(4): n = any nucleotide
  N_region (7)..(7): n = any nucleotide
  N_region (10)..(10): n = any nucleotide
  N_region (96)..(96): n = any nucleotide
  N_region (98)..(98): n = any nucleotide
  N_region (108)..(108): n = any nucleotide
  N_region (124)..(124): n = any nucleotide
  N_region (133)..(133): n = any nucleotide
  N_region (139)..(139): n = any nucleotide
  N_region (150)..(150): n = any nucleotide
  N_region (155)..(155): n = any nucleotide
  N_region (167)..(167): n = any nucleotide
  N_region (179)..(179): n = any nucleotide
  N_region (203)..(204): n = any nucleotide
  N_region (210)..(210): n = any nucleotide
  N_region (218)..(218): n = any nucleotide
  N_region (224)..(224): n = any nucleotide
  N_region (231)..(231): n = any nucleotide
  N_region (246)..(246): n = any nucleotide
  N_region (259)..(259): n = any nucleotide
  N_region (262)..(262): n = any nucleotide
  N_region (264)..(264): n = any nucleotide
  N_region (266)..(266): n = any nucleotide
  N_region (273)..(273): n = any nucleotide
  N_region (275)..(275): n = any nucleotide
  N_region (279)..(281): n = any nucleotide
  N_region (286)..(286): n = any nucleotide
  N_region (288)..(288): n = any nucleotide
  N_region (301)..(301): n = any nucleotide
  N_region (307)..(307): n = any nucleotide
  N_region (310)..(310): n = any nucleotide
  N_region (312)..(312): n = any nucleotide
  N_region (333)..(333): n = any nucleotide
  N_region (342)..(343): n = any nucleotide
  N_region (346)..(346): n = any nucleotide
  N_region (380)..(380): n = any nucleotide
  N_region (394)..(394): n = any nucleotide
  N_region (402)..(402): n = any nucleotide
  N_region (422)..(422): n = any nucleotide
  N_region (425)..(425): n = any nucleotide
  N_region (447)..(447): n = any nucleotide
ttanaanttncccatttaaaatttcaattaacccattcatttaaaattaatgatttaaattttcccttaaaaatttaattttccattttccatttntnatttttaaanaaaaatttttcttaantccttaaancccccngcccaaatttngcccnacctttacaaancaaaacttcttnacccttaacccgaacacccaaacnntttacnccctttcnccgaancaaaacnccattttcccaaacncattggccccaanaancngnaaaaccnanaaannnaaaangnaaaaaaccacccnttaaanaangngccccgcgccccacgccaaanaaccttcgnnacngcagcccttcccgcaccggcacccgaccgccaanagggaaaaaagagnagccgagnagagcttaccgagggctgcngcngcaagacaaccatagggaggcnaccggcgccgaa

SEQ ID NO: 1684 - DNA, 2000 bp, Oryza sativa
aagaaatctctttaaaaaaactcgcatgctaacttgagacgatcagactcctaattgccgctcatgattctgtaaaactaaacaaatccaagcgaattctcacggtgaattttaccttaactaaaccatataataataatcaaaagaaacctcacgcgttgcaatgcacgggcattttttctagtctgattaaatatttaaattgccacatgaatgcatcaagagcatgaacttggtataaacagaaactaaatccgaagttccgaaccaaaccaaatttggcctattatttttagaacctcacttatgaaatatttcccttgcaattatgtacgcgttcctaaaatccttgcgttccaaattaaggaaatcgctgtgtacacaaaaattaaatccaaaattagttgcttaattattacaggtgatcaaaagtactcccttcatctcaaattacttgttctagatttgtccttaattggtcaatgatattaatctttgaatatgaatttatataattaaacttatatagtttgacacatcacaagatttatatatttagatttatcatgagaaatcctatcataatgttgccaaaccatgcagattttcaaaaattaatagtcaaagttagctagctagacacatttgatttataataactaatccgaaacgactagtaattaagaccacgtttgattcagtttaggattatgataatctgaattattaggagtaagctgaaacaaacagatagcttattatgattgattattataatctataagccggattattataatatgataatccactctaaaggtgctttttctaaattattgggtgaataacagctaataatccagagaatcaaaaggctaacagcttattctatgtcagtttattataatccagcttatagtaatctgatttaataatctatattataataatcttaagctgaaataaacaggcctaagttgaaacggagagagtacgtagcaaaatcaatcagagctgggtgcatatgcaacgaattaaatcggagatcgaacggtcgatcgaaactaaagcagtgtactgcatgcaacggcttgcaatgtgtgtaccagtctaaccacttaggtacttaaaccaaccaaaaaagtgtaagcaacccaacgaatccttgcatggttcgtcaaccgtacgtacatcaactccaaatcgggtccccgtaactatacggcattatggcggcgctatatatttcttctatctatctactctctccttctccagatattttgacgccgttgattttttaaaacatatttaaccgtttatcttatttaaaaattttaattaattaataattcttttcatatcatttgattcattgttaaatatgctactaccacttaagtttttaaataagacgaacggtcaaacatgtttaaaaaagtcaacggcgttaaatatttagggataaagggactaattaactatagattatatatataataagatttacttcggttcaacaaaaaaatatctcgagatatcggtaccaaatcattttctaattgttgaatctaacaatgcacatcctgaccagctcgatccaacgatcgaaaacaatttggtaacgtcaggtaccggtatatcgagatacttttcgttggaccggaaaaaatctcatatataatagccatagttagccacacaatgatgggttgcagctgacacacactgccagtactacgtggttatactgctaatgcgtcattagctcagttaattagccattgagaggcgagctcgatcgaggtgaggaggttagctcagctgtcgctgtgaacacggagctctctctctctctctctctctcctctctcctcttcacccgctgccgcccactactactaaaacgggcaactcatccacctcctcgacgcagcctcactcctcctccattgctacctcaagctccagctcgagctcgaggctttgctttggccgca

SEQ ID NO: 1685 - DNA, 2000 bp, Oryza sativa
tccatgtgaactctaaactcatctttcaatattatttaattttgaattttgaattttaggttacttataaattggttattcctatatggacttttagactcttcttcccatatttttttaaatttcaaattttagttatttataaattgtatttttataggactctaaactctaattttaattttattatgtttattctgaattttagttagttttaaattcctatattgactctatactctatttctaatattccttattttaaattcctaatttctattatttcttaattgtatttcgatatggactctataccctacttctaatattccttatttctattatttcttaattgtatttcgatatggactctataccctacttctgtactctataccctacttctaatattccttatttttaattccgaatttctattatttcttcgttgtatttctatatggactctatactattcttctaatattccttatttttaattccgaattttagttatttataaattgtatttctatatgaactcagtctcctcttccaaaatttcttattttttaattccgaatttcaactatttctaaattatatttctatatggactctgtttttctttttctccgattaatatgagattttctaggccgtgagagcgaacgtggaggctctttttctattcctttaataagataatagatattagtacttttttaagtttgacaaaaaaagtcaaaccacttatctgttataaaacaaatgaaggtgattctgtagccacattgtttatgggggtgttatccatgggcgtaaagttttggcacgtcacatcggatatagggacacatatttcaagtattaaacgtagactaataataaaacaaattaccaattccgcctataaaccgcgagataaatttattaagcctaattaatccgtcattagcaaatatttattgtagcaccacattgtcaaatcatggcgcaattaggcttaaaagattcgtctcgtaatttacacacaatctgtataattaattatttttttcgtttatatttaatactacatgtatgtgtcaaatattcgatatgacatggtgaaaaattttatcagaggatctaaatagcctctatatactttttttttcatccgtcaagccacttctgtcttcttacacggaatagttttgttggccgtccgtatagaagtcagcgagcgtacatacgctcggccgcttgggcctcagtctggagctaggccgtttgggcctcgatctggcgctgctgcttgcaagtcgcaagccatgccgtaggggctgtttgtccccaggtggggcctcagggtgtacagcaagaaatagtaatggcatattttaaaggaataagtttatctgaggtcccttaactttacacccgaatccgatttacgtccctcgattggaaaaccagacacaacgggtccctcacctatcaaaaccggtgtagattaggtccctcaacggttttgaggacggttttggctgacgtggcgcctacgtggctaatttgactcggtcttcatctgacgtggcattgacgtggcgcttacgtggcaattcgacccggaaaaataataaaacccgtaggacccacatgacagtctcacatagaaaataataaaaaaatcatgggccccacatgtcactcaaactcacccttcctcttcttcctcctctctccccatctccctctcttcatctctctcccctctcctctcctcttccggtgagagtggcgagttggaggggggcggcgagaccggcgcccaccggtgagagcagcaagttggaggagaaagccggggtgataaaaggggatcggcgacggcggtggacggaacagatgacccgggcggcagcaggtccccccggagcaacgccggcaatcgagatccggcagtggcggccgggagaagggcagtggccggcggggagaaggggcggcgtgag

SEQ ID NO: 1686 - DNA, 2000 bp, Oryza sativa
  N_region (20)..(20): n = any nucleotide
  N_region (62)..(62): n = any nucleotide
  N_region (193)..(193): n = any nucleotide
  N_region (348)..(348): n = any nucleotide
  N_region (354)..(354): n = any nucleotide
  N_region (362)..(362): n = any nucleotide
  N_region (419)..(419): n = any nucleotide
  N_region (495)..(495): n = any nucleotide
  N_region (705)..(705): n = any nucleotide
  N_region (726)..(726): n = any nucleotide
  N_region (741)..(741): n = any nucleotide
  N_region (1422)..(1422): n = any nucleotide
  N_region (1473)..(1473): n = any nucleotide
  N_region (1545)..(1546): n = any nucleotide
  N_region (1916)..(1916): n = any nucleotide
  N_region (1969)..(1969): n = any nucleotide
atacacttcaaatatatctncttagtcacaccaatcttactaattccactatgcaccaatanaacaattcaggtttagcaagaaaagaccaacatattgtctaataataatatgtactatcttaaggtttcatatgaataggtcagttttttatgtagcctagagcatttcaaatggagaggtccctcctctntttccctgattgcagcaagaatttcgtcatggaccttcagaacagcatatatattgtaacataacatttgcacaatagaagtgcaaagtatacataactgcagaactgccgaatgctacgattaatggtatgaaataccccaaaaaaaatgggcncactgntttctctnaatatttgcttgatactattctctgaagatattttttcttaggatctggatacctanttagatattcacatctcagaaatgcagaagctaatcatctctcttcttatcctctacatgtattaattacataaanatgattaaagaaaaacacatcataaggattatgcaaatttcagtacataaaaagatagcaattgtttaaagaaagtatcgctataactcaagatatgtcattagcctacagattgatgtatcagatgcatggtagccgtccatttagctactaatgaacggtcaaatgtgaaggttacggtaccggattcatccataagtcttcaacccntacccctagccttaattaatntctgcacaacaaacnaaactaaccaaaataataaatacctgtttatttgcgtgatgcaggtcgttgtgtctttcacaaccttgttggtcggtcatttcctttctcctcgtttccccttaccacaaggagtgccaaactggggagcagactggcctgatgacagtgttgagacagaggtgccgcattagtttgcaggaatcaaaatgttacttctagaagatcaatgatttgtatccagtgctcaaacttaactgccaaaaatgcaaatgctacaacactctcctttaagcatacctcccagtgcacgcccagtgccattgttgagctgagctgccgtcatcgcaaccgctctattcaactttatactccctgggccatgatggctgcagaattaaacaaaattaagcaaaatagaaatcaacacacctgccgagaattcctaataaaacaatcaatcaattaatatcatccaacaacaaacaagatcacctcacaataacaagctatccaatattctttttcctattataggctgtaaaacaactatgtaaactatgtaaacctgtttgttcagatgaggagtatggcccaatgaaaaccgaacttgctgctcactcctatcttgagacctatttagcatatggatggcttctccacctgatgacctaaaaatatagtaataaaaccaaggcaacnaagaattataccagatatgtattaggtaaagatgattagcaaataaatccntaaggattttttaacctgctagtaaagaaggacatgaagcataggcgtgtgatgatgcccattgaaccgtgnnagacggcgggtcgatgatggcagcagccccgttggcggaagtggccggattcatggcgccaaagatgaccagatggtccagatcttcttggcctcggcggctatggtgccgggcgtcgacagttgggggaagagcaagcgcggcgtaggtggcaatgtgggcaagcaccatgggaagaccctcgtggtagccattgatggaaaagagatctgcaagcatgttccctgtcgacatctcaggcgccaccgccgatcctctcccgccacatgctatcaaggtcacttatcgaacgcaccgccgtcgctggtgtccatctctacctcccgtatacaccgtcagctcagcttgtccgcctgatttggctcgatancggcggcttgatcctcactcgcgggcgctgttgatgggggatcggctgtaacnctccaccgaaggcagcccctgcccctccacc

SEQ ID NO: 1687 - DNA, 2000 bp, Oryza sativa
  N_region (882)..(882): n = any nucleotide
  N_region (1549)..(1549): n = any nucleotide
  N_region (1590)..(1590): n = any nucleotide
  N_region (1616)..(1616): n = any nucleotide
  N_region (1626)..(1626): n = any nucleotide
  N_region (1654)..(1654): n = any nucleotide
  N_region (1825)..(1825): n = any nucleotide
  N_region (1882)..(1882): n = any nucleotide
  N_region (1973)..(1973): n = any nucleotide
gggtgcgccaaggagttgggcgcctctacgttctccacgtcgagctggcgcaaccggtttcccttctcgcaaaggggaaggatcaagcctgggtctggcacgctagatacggtgtcacgcccagaaattttcgaatagaattccaagcagaatgtgcattaaaatccccgtccaggaccggccggggtacacaaacgacaaagttgacatacagatccacgtcttacaaacattataaaagttttacataaatgcagcggaaaaacaaaagataactggagctaagccttgacttgaactacagcgggaacaccactccacaggcatcctcgatggcacggacgaagcctactcctcggagaaaccaccatctgacgcatactcaaactctggggtttggggaaaatagagcaagactgagtattaccaactgtactcagcaagtcataccggaataggggtatgatgcagggaattatcaagggatagctataatggttcatttgcataaaacgagcatttataaacagaagttgaaagcagtaaagcagttgtaacaattaatcaatattaatcatccactgtccaacgctataccacattgcaacaggcccaaccatccacctatactatccaatttcattagactaaactagggtgagactaatcacggtgaatctggttgatcgcccataaccacgggcacggccatttgaatagttttactctgatcagaggtgtacaactgtacccacaagacacaaccccacgacacgttttcgtgcgccggcatgccaccacgacatactagaaagaggccgtgacaggacccttcgcataaccccctctaaccaagcacaccacacctcaggtttcaccccnactcctcgcaaggccgtgggcagtcccctctcgtgcctagatgaatccggaagccgcataggccatcgcaggacccatccaaactccatcacgcccacccttgcctggatgcgtcaggtagaggaaagctacactacaagcccagccgttgcccacactggcttgtggtaagtatgataagttcttacagggcatcccgcgaaccggtccttaactgctatgggtgcgaccaacaaaaccatgcacccacagcccacccatgtgatttattttaattaaccaataccgaagcggtggcactaatccaacattaccattagaatctacagtctatacattaataggattttcccctttgtgtgctagttgaacaaagcatggctaagcaatccctagtccaatatctagtcatgttataacccaagctaacaaaggagcatggtaccaaaatagcatggctgtaacagtaggtaaacatcacatagtattattgtaaaacaatgcagtatttgaaggaaaacattagaacatttgcaatataggatcaacatgttcaagtgaccggcatgacttgccttgctctactgctggaggaacctcgacgactatctcgaagtacaccggagcgtcggaagagccggaatctaagtgacatacatagcaaacnatacaacacgctataatactactgaaacagagacaaaccanttttaatggattctacatatttttcntgatttactnagacttgaatgggcttaaacggagctcngatgaattagttatgaattttagaagattcactgtgtttttactataaacagaaaaatccttaattgaattattgcgcaataaatgcccagggctgacgtcatcaaagggagcggcagcgcgacatgcggggcccgcatgtcagcggcgcaaggggagagggaggggcgcnggcacgtgggccccatggatcagcggcacaaagcggccggtccaccgtggactgggnccacgcgggtggtccaccgccggtccacgggaccgacggtccggatcggcctcgggccgatcggacggcgcagggagcagccgccgggctnggctcggcttcaaagccggccggccgg

SEQ ID NO: 1688 - DNA, 2000 bp, Oryza sativa
  N_region (24)..(24): n = any nucleotide
  N_region (1982)..(1982): n = any nucleotide
ataggtgggcccgaacgctttttnattttttatttgctgactggattgcaacgttgccgccacgtgtgcaagcttaagccaaaaccactcagaatagtgcttgggggggggttaatttgtccggtagtgtaaaatgtccggttttgttgttcaaggggtaattcgatcgactgttatagttcggggggtaattcatactttttcctttacaaaaccgacgaaaaccggacgcactattgaaaaatgattttttttacaggcactcctactgcacgagcggaccgagtgggtaactccacgactgcctgtactgaagtctgttaggggggagccgtcctggttcacctacgaagacaggattaatttttagttaaaattgaactttttgactggctcgagaatataaattgctcgcttttctgtccaaattttaaaaatggatttgattttttttcaaaaaaaaacttgaccagatcttgtctaaaacaaaagtttttttatgaaaaccaagtacggtgaacttgctagctagtatagtcaagcggtctcgtgtcattattattccataggtgtatgacacaatacgtgccctcatatatgcacatcttatatcaccgttttcttctctatcaataatgggtgttaccatgaacaatcgctagttctgcttgtaggggatgccatgcatgagcaatgcgtcatcctgagtttgaatccgtacaaatacaggttatctcactgttttcttctctattaataatgaatgcagtgaaaatagtaagatacaatgggtacttcgtattccaacaatttcatatatgcagtgaaattggatccaattacatttatcgaaaaattaatatgtacacacacagtgagagtgtgagactatagttagatgcatggggtgtgtgtgtgtatgacagatgcgtaaaattttagttatctcatttttcttcatatgcatgctgaaaattattgagttttcagattaagtggtgggtgtgcgtgcatgtcttgagatcaccaacccaaaaagttggaaacaatagcataattccattgccgtcctatacgttgaccaaattaacaagtttgagtaaaacttacttaaaagcaccgaattagcacacgatcgagcctcgatccatcctaagcgcgcaaaggaaacacacatgcagtggggcacaaatctaaaggcagattgatcgatcatgcagaaatcgcccccaaaccagtaaccgatggcccatcagatcatctacaagaggttacctagcatagcatagcataaagaacaaccccaagcacaacgatcgaaagaatcttcttcggttgagacgtagctttcgatccagagctctctgcctctctagctagcttcaattcccttcaaaatttaaagagtaaaatgcatttacagtccttaaacttgtacagttgtgtcatatagatcccaaaaattgtcaaaatgcatatctaggtaccaaaacttgtcaaagtgtatccaggtcccaaaacttatctcaaaacacgtcatgtctgtgtggcatgccacatcaacgccacgtaggattctaaaggggttgtggtgatttgggacctagatgacacactatgacaagttctggtacttagatatgcattttgagagtttagcgacctatatgacacacccctacaagtttaaatactgcacgtgcactttactcaaatttcaaaggcgaaattttaaaacccttttctttctttgagtacggacacttaaattcaattcgttcgctccactaatcttaaaagccattattactctcttactcgctttcatatctaacgcccctctctctctctctctctcactcagcaacagctcgcagctcactctctcactctactactcgtagctaagctagctcgcgccgccgccgccgccgtcgccgccgccatgagcaaggagaagcaccacaagcgggagcaccacntccggcgatgctgcggcg

SEQ ID NO: 1689 - DNA, 137 bp, Oryza sativa
  N_region (3)..(3): n = any nucleotide
  N_region (13)..(13): n = any nucleotide
  N_region (28)..(28): n = any nucleotide
  N_region (59)..(59): n = any nucleotide
tgnttacgataantggcgaacggcagcntcggcgagtgttccacggcaagggcggcggnttcctgtcgtgggatcgccggtacaggattgccgtcgaggcggcgcggggctctgctacctccaccacgactgctccc

SEQ ID NO: 1690 - DNA, 2000 bp, Oryza sativa
  N_region (112)..(112): n = any nucleotide
acacccaattgtattggaatctgtgtcaccaagatgtttatatcgtgtactttgtccattcaaaattctaaggcagacataaaaaaaaaatctaaagtatgttttatttttngttttttaaatgagatggacatatttgtaatctatatgtagtaaattaaattagtcatcttaatactaattggttagatgtatgcatataatttattggttttatcagacgagttaattttatttttatcttgatgaaaagaaattcaaccagtcaatcgagtagattgcattaaggatcatattagtcacatgagctaactattccactttacctatttgacccattcttactgctgacggatccagtttacttagcccaatcatcatgcggtgcagtgccagaaaggtgctagtagggaatccacttttgttctttaggtttcattccgacctgtcggaactcagggttgttgccacaccacacgttatcaaagaaaaactggtatcggaggggccatggatatccggtgcaccccaattctcttatttcttttaactccactttcatataatttaaaaaataaaccaatcaaaacttactattaaatctaaaacctcttgttcatgtcatcctcgttagtgacaacacaatcttacctaaaagaaagactttggcgtgacaacaatgaaaaatatttgactagcataggtggtgcggctaaaaaggttgttttcaaaatacatattgtagtgtttattttttatatttaaatgagacaggttaaaaaataaaataaactgcagccacgatcatgagcaatgctttaattttgctcgcgcaacttaagaacaaaggacagcggtcaagattcatggatgaatggcgatgaattgtttgacggaaatcattttgtgctggagtagtagtacgtgaagcatatctggtagtagtaatttggtagcatggatgttcattaatccagtgatattttcaacacggaggtgatttgcagttgtagagacatgttcttctttaacaatgcacttgtgcctttgtatcaagagagtaagagacacattttgtgcagttcattttgcattaatacacattttctcttcaggatttgctatttcacttgcgatatatttaggttcgtatctttcactttttcattcacaaaatcttgcatcaagaattatattcttatatatcaacttatagtacaatcagttacgcagcacttacacgcaattacggtgtatcaaaattagattttacaatgggtttttctgtagatttacgatttttgacatgtttattttttattgtatttaaaatgggttatatccattggtcagaaaaatttataggtaatcccttctccttaatttgcccggtacatgttccatccactattcagaaaataatctcattatactaaaacagagtgcctcaacagttgatgataacaacatactttctccgtttcatattataagactttttaacattgctcacattcatatatatgctaatgaatctagatatatatgtatgtctagattcattaacatctatatgaatgtgagcaatattagaaagccttctaatctgaaacggaggtagtaactaataattatgctatcataacataatttttgtctttaaaaaagagtatatcgaataaagacaaaaggcccaccggccgatatatctagtagaatccaagttaggatcgaaatcaacctcaacctagtcgtagtagcatcgcctcgctaagctttggttgctggctgacaccttgcacgtcgccgtccgacgcgccatggcgagtcaacgcgtcgcacccgacgacgcatggcgacggtataagtagccgaggcgaccccgccaggatgatccagcagcaagcaaacccaaagccaccatcaacacagcacgtacacgtacgtgcaacgtcactgcatgatgtcatcgtcgtcgccggtggtggcgtcaccgccgg

SEQ ID NO: 1691 - DNA, 2000 bp, Oryza sativa
gtgttggtgaattttattagcgtcaaagcactctggaaaattgaatgagacttccttaacccagcaacttagatttcgccaccaaggttatagggttattttgttttccggaaaaaaatgctttccctataatggtagctaaagattgacatcatcccaaacaaaagtctagcaaaaggtttaaatttctagccattttaaacataagaatcatctgaagaaatttttttttcaagaaagtttttgaaattcctataattttatcagaaaccataacatatgacacgtttaactactaattaaatttttaggttgttagagttttttttcgcaaaatgaccatccggacactataggactatagcaaaactcgtatgtggcgtcgctcctcgcctgccccttctgccagggttaatatttgtcgatatacgtgaatacttaagttcaaaataatatatcatgcacataattaaataaatgaataaaaaatgccaatgtctatgagatacacatgagaccacatgcagtgggcgggcagcgtgtcgagcagttttatagttttatattagtcccagctcccaacgcatgttttaccggtgacttctgcgtcgtttcgtctcacatgtgatttcctggccggcacatacatgaacatacgctccttccgtgtctctctttttttaaaatttatttttttcttattcttttgttttctttttattttccccttattctttccttttttttcccattgtttgagggttaaaacagtaggggaagctcctactgcacattttattaaaagcaccaatatacaagggggggtacaacaggagggaaagaaagaaagaagaaaaagacggcctaaaaggcaagctaattaagatatgctgttaatccattattaaaggtttttctgtctcctttactctatgcatatgcagagtaaactcatccttgaaatcagccttccatttgccaaagtttgcttgaatactgttgaagatcaagtcgtttcgtctactccagatatgccagcaacatattgtcaaaacttccataaaaaagggatgagggaagttcctatacgttgcaatgataatggtcatgaaattcaggtttagatcccaatttataccgaggatatgccaacattgctaggcaaaggggcaagcaaagaagagatgaagagagtcttctgtgattgagttgttgcatgtaacacatgaagctccaccttgggtattgaaatgttttcgttgcagcaactctttagtgtttaatctgtccaataaaagtaaccaaagaaacactttcaacttgagtgtgcatttgcttttccagataagagtcaagggaatttcagattgaatatgggtgaaaaacaggtcatagacacttttcgattgatattgaggtgagttccgtccattgatcttccatatgatttgaatttaaggtttgcagagtgctggaaagaaggtgccattcctgaattgcttggatggggagtggagtataaaagacctcttgtaagaccttttttttccattgtttgtttacatatgtgatgttcatgatatatttttgtttattcacactatctataagatggtctaggatgtattttgagatgttaatgtagtataagcagaattttccataacgtgtctttcattattcacatagtatgttggtgaggttatatggtatattttaggtcatttaagtagtatctatgtgatgttcttttgcttacttttctctattatgtagactttttccattttattattttccccttatgttttcttctatctttaattaattctttttttatttaagtgattcatatattttatttttatatatatttcatagcattagttattaatttttatttctattttcttcttcattattttactctacttaattattttatttaattttaaattttaattttttttattttcaaccgttccaagtccatggaggcg

SEQ ID NO: 1692 - DNA, 2000 bp, Oryza sativa
taaaaacatgacatatattttattggaacaagttcactgtagctctctcatttttatgctgaatttaaatcacgtgctcaatcgtagtactaaatataacgcatgtctcaacttataaaaccggtgtacctagagattttagacagtatagtgcctagtttagttgatgtgacgagtgagaccaacgtgaaccccatgtatatatatatatcctccaaccccctttctccatctttgatacttttctctccatctccgacactacccacactcctcctcatctgtgccgcctgccgcaaccgtggccttgccgcaggaaggagtccctttcttcggcttccccacgttgccacctagcagttccctagctctgcctccgacggcctcatccgctccttcaacctccacccgcgtgacgcctcgccctcgccctgccatggttgcggcgataatgacgttctgatcgggaccattgtcgagaggcccatccacactcttcttgcgccgtcctctttctcgcgtgagacttggccaaggcgaggcgaggggcatgggtccacagcgtggttgtaactggttgctgtgttggacgttcatggcgagacagctgcgcggagtgcgcacgcgggggatgcggtgatgccacgtggtcagctgttggacgttccacgacagcaacgatgctatgacatcagcgcttagtaaatactccctccctcggttgcatgttataagatgttggttaaagtcaagttgctttaagtttgactaaatttatagacaaatatagtaatattgatattaccaaattagttttattaaattaataattaaatataattttataataaatttatcttgggtcgaaaattactatttttttctataaacttggttaaactggagcagtttgactttgaccaaagtcaaaacatcttagaacctaaaacggaggaagtatgttcttgcacggcgcgcctggagccgatatgcaatggattccttccatggccacgccacacggttggtggtagtacactcgtactgcatctgcatgactgggtgagcgaaggccggcgaggcagagcatggcgagaagaagcggcggccagtgatggtgggaagatgatcttgttggtaggtgtaaaccttggagctcgggattggcttggaagatggtggttggttgtggtcaccttgcatgcttctgctgcagcggtaattaaggaggaggagatctcatcagtgcacgacgatgtcgaatgcgtgtttgcagctttaggagcttgccgccgagtggtatggcaagtagatgcttgctggcagaggagctcgcacggtggccgttgtcggcggagtagctcggacggtggccgcggcgacattgccgacgacttcgcttgcaatggggttagttgctgccattgcttcatggtaagtgtaacttgtttttattttgttattctttttgggaatagcccggaccatatgggtcccactcgccccgttagtcaaaaccgaacactagtgcctgagacattaggtacaccaattttacaagttgaaggcagcattatatctggtattgggttcgaggatgtaatttaaactcgcgtcaagatgagggatctatagtggacttatttctatttaatttgggtgaaagggttattgggctttttgattctggaaggaggccgagaccgatttggcctggtagcgtcatgggacggcccagagcggaggcctgcatcacaagcaatgtgatgtaagattctatctttttctttcaataatcaaaatgtgaggtttgtttgaaaacttttcagccatgacaatagatctaaaatcgtcaaacatcaaatcgaataacgtggctctgataccacttgcatgattaaacaagaccaaacaaacctacgagagagggggtgaatggtagggaaaaccaaaaaccctaaaatcttttgcgtaataaagatttacctcgaatggagtag

SEQ ID NO: 1693 - DNA, 2000 bp, Oryza sativa
gatgttttatctctcctttttctctttcttccatgtcaacaagtattcctaattagcaacgcaaagagaccactgttgacaaccattgtacatgccataacaagtgaaatcctacaaataaaaaacaaaaagagaaacgactgaaagttatttttattcgaaccagatgtccggttgtttgaaccatattttaagtcctcatattacaaaactgagaataaattgaggtggctgccaaacttgtagcttagcatgtaatttctggcatgaagaatcaagtaggaagggcagaattgattttttttctgtgatagattaattaattgaggaaaaaaaactaccagaagttgttaggaaaatgtatcaataataatcgaataggagcattgaaaaagatctcatttctctaataccttaaatcaatatcggtaaatccaatctctctaattttctctttatagaagaaagaccattgtatttataatgacctcactttttgacagaaaaccaagcaagtaaaatcctctgctaatttccaagtaccataagacatctttacgatgtcacatgtgcatatgcaagttgcacaacacagtaaattaaacaaacccaaaggtggacctacattattaggctatatgatgtgcaggctgatactggccgtttgggtttccgttttcaatattagacgacattattcgataattaaagtttcaggtatttcaaatctgatacccgcatccacgtgacatataccagacattttcgtttttgataccacggttttcttatagaaaaaatgaaattaagcagtagagtatcaactaagatcctattcgagattctaaagaaacagattgtgagtagccaactagtcgtaatctaaaaatatagatttgttactccctccatttcataatgtaagtcattttaccatttcccacattcatatcgatgcctatctagattcattaacatcaatatgaatgtgggaaatgctaaagtaatttacattataaaacggagaaagtacattctaaccttttaatttattttctggattatatacaattacatagttttggaatctagctagatgatttaggaaaaaggctatagagctgctagaagttcctgtttaaacaggacataggagtgttggactaaacggcacttcagcagtcctggcagtcgtactccatacgttttaaaataaattaacatctttgtacgagatatgtcacgtttcggtttatttttttaaaaaaatagtatgctcgtagcagtagcacaactgaactctgctgtcagctcaggcgtgtgctagctagcaagctcgagcttgccgttaaactgaatggccgctgcacagccacgactggggcaattaattaatagaatttcgctcgcgcagctcatcagatctggatcctcgacgacgacgtcaaccaacaagattacaagaaccaagtcaagtcgtcgtacgtccacctgtacacaatcacacacacagtctctcagtgcctgattaattagcaactccaatcgggaataacccgtcggccaagagatggatgattagtttcagacattaatttgatcctgacacagccaacgcgttccgtcagaggagttagtgcgcgtttgtttaattgggagattagctgcgtggaatgttcttaattacgtcgtcgccaaacctctctgctagctagtacggtggcgagcagtgttagctgccgcgcggcacggcttgccagcgcgtgttcccgcgctatataaggagctccccggcgtcgctttctcctccacagctttagctacgatcgcgacgcacgcagctagcttcagctgatcgcgaacgagctcacattggtcgatcggcgtttgcatctgcattgtgcattgcaaaacgatcgaattagaaagacgtgcaatcgtattgcgcgttcgcgaaaaaggatcgaattcgacggagcctctttaattcacgcagaacg

SEQ ID NO: 1694 - DNA, 2000 bp, Oryza sativa
attatcataaccatttagtcgacgtataagagctgagtgtgtgcttgaaagagtttccgtcgacgatctctctgcatgcaacgaatccggccagcagagccgccacacactggccggcatagcttgctttgctatcaaaatctccaacttgtcggcatccatcgagatatacttatatataagtacctacctagcaagtttattattcgatgtttcttcttcttctttccatggataattaataattaattaataaagataagtagataaccacgttcgttcgttcctcatgatcgatccgccctccctcagatagtaccggttttcgtacggttgaccccgctcgcaaataaacaatgatcttcttcgatcggaaaaagaaaataaaaaaagaaagaaaaggcaaggcgccccaacatttttctattcggcccgccgcctgtgtttcgatcgatcgatctatccggaagcgacgacgacggcgacgtacatacgcacacagctagatctagttattagctggagtagcctttcatgaaagcaacctaatctataattctatatagcttttgctttgcttaattatctagatcttaatttggcctctctctctagttcttctctagttctctgcagaatgaatgaatgaattaagccgatcgatcgacatatatggatggacaggagctagcagctagcaagaatggcaccacatacgatggatatgatcgaatcgatgcataggcagcatatggagcacatatatacgaggaagtgtacaattcaggaggaacatgcatgaactgatgaagtacatatattagttatattgaaattttaaaaaaaaatcctttcaaggatatatgttagtacatatatttggtcctttgagtatattttagttcacgttaaaattgaaagtttggttaaaattggaacgatatgatggaaaagttggaagtttatgtgtgtaggaaagttttgatgtgatggaaaaattggaagtttgaagaaaaaatttggatctaaactcggctctagctaagcaaccagcaacctgcagcagtctcctccatcaaattaacacaaatctatcatgtcgagcagctgagaaaagttaaataaagaagaagaagaagaaaaggcatagctaagctagattctctctctttctctgtcgagaaaacataaaaataaaggcaagtgaacgtcacactctccgcctgtctagcagcgacctatccagaagacgactggcacgatcatccctcatcctgaatgtgaagacatggcatatatatacttcctcgtatatatgacttgaattaacaaaataccttcagaagtaatcctttgtcgtttccaaggaagtatatatttgaattgaagtacacgcatgaacttgaactgatgaagtacaatcctttcaaaggaccaaatatatatataaaaaatccatatatgacttgaatttaacaaaataccttcagaagtaatcctttgtcgtttccaaggaagccctgtctgctaactactacaaaatatcaaataggtgtcgccactataggtgccggaagtactaaaaccggcacctatatgccttttcccacttcccacagcttgaaatcgttaaaaaccgacacctttaagcaactataggtgctggttctaaataagaaccgacacttattctataggtgccggtttttatagaaaaaactggcacctttaatatattataggtgtcggttaattaaaaaccggtgtcggttaattaaaaaccgacacctgtaatatattataaaaaaaccgacacccacgtaatcgagccgagccaggcgggtagatatttttccaacggtgggtcccacacccacgggagataaggacgaggcgtcgagcgctcaagctgcatccgtccagttcttcttagcttcttctctccttctctccatccttcttctcctctctctctctctctgcggcggcgggaggggcgt

SEQ ID NO: 1695 - DNA, 278 bp, Oryza sativa
catgtagacttgattttagaaaaatttagcaacttgaaccacctgaaacggatctacggttatttagttatgattttccgaagttttaatctattaaaagaaattggaaaaagaggagatgatgacgtcagcatgacgtcatccatggccggcccggctcggattggcgacctcgccggagctagggcagtcggccggggttttggagggcatgtacatgtagaggacgacgagacgaacccaacggtactcaccacaacgacaaacgacgaccgatg

SEQ ID NO: 1696 - DNA, 2000 bp, Oryza sativa
  N_region (508)..(508): n = any nucleotide
  N_region (512)..(512): n = any nucleotide
  N_region (514)..(514): n = any nucleotide
  N_region (602)..(602): n = any nucleotide
aaaacaaattttataaatgtatgacaacatataaaagaatgcataatctcttgtgcatgacaaaaaaaaaaagctgagaggacttatgagagtgagccattaaaggcactgcccaatcaagttttaagagaggcaatatgtttgcataccttgtgggccaacttctccagcttctcgtgttccattttctgcagtaagtcaccatgcatgttgttagcatagcgtcaagatacattctaaaacagaagttcgcaacgattaagaaagcgggtaatttcggaaaaggtttctatttgaaagaaacaatgattgattctaaaagaacatctacatctgtctgcagagttacaaaattccgagcatcaaatgtacttttagatatacatttgcggtccttaaaggcaatcaaagaacaaaaggaactaaaaaaaggccatgccttaaaaagaagaaactaatatcacaaagcataagcatcaacagtcagtcctgagataagactgtattnagantntccatccacagaaagccaagcaaaatatgggatgccagcaacgatccaattgaaacagcagtagtacaaatacataatggagaaaacnaatcagtgccagcagtacgtttgtgaggatcactagaataacatcaggccagctactgcagtgcttcaaaagagtataattgagcaaccggcatagaagatcacagatatagataattaaaacaagaacagcttgactattgtacaaaatgttgaatgagtaatatttgaacgatcttttttataaaaccaggagaacaaccctgctctgcttctcatgaagaaaaaaaaaacccacataaaactgaccttaaaccaattgttttaagctatttgttaagttcatttctcaaaatatttaatttgtccctataatcaagtagataatcggtggcaacaatctactcaataatgtaaatcaaacagggtatgttcaagtagcaagcaagaatctgtctcaattaggccaaaaaaaatgcaagaataatctaacaggaaagaattttgatgcaacattgcaaccgcaatagcatatgtgaagcaaggcacagggtgaacatatatcagtcataaattgctgtgctaatggatgagggacgcaggcaggacgacagccaactcaactgtattccagatcagtaaacaggcagacgtataatatattcctaggcgtgcactgcaacaatgcaggccgaaaatatttggggatcccagagctgagtgcggtgcgggcagggggactcgtacaggaaagaaagagagaccgcgtcgcgactctctctctctcaagtcccagatttgcggaactaggtgaaatccacacaccgctcaacccgagcccacagatcacagcgcatacgcatctcagacaggaatcgcgcgcccgcacccgagagggagagagatggaaggaagataccttgatgtagacgttctcggcggccttctcctcctcgccgagcaccttgccgccggaggaaaagagcctgcgctgcacgaacctcgccgccgccctggatggagccctagccgccgcctccatcgccgcgagaaaccctagaacacgagacgagaggatcttcgcttcgttggctccgtgaaactgtctctctctcccaactcccccactgatgatgatgatgactcgattctattccaccgctgctatgactccctgtgctactttgtaatttggccctttcaaatatgcttatttgaaaacattctacgtagtcctcccctcagggatggttaacgagtattagaggtttgtgtgggacttggatgaataatactccggatcagatcaaatccgacggccagaaacgcatcggagcgctgaaaccctagcctccccacctcccaagtcatatacctgcagcctcagcctgctcctcctcgtcgccgccatccttgccttcgcctgcgccttcttccgccgccgcatcgcgtcgtcgaa

SEQ ID NO: 1697 - DNA, 2000 bp, Oryza sativa
  N_region (1940)..(1940): n = any nucleotide
  N_region (1947)..(1947): n = any nucleotide
cgttggccatttgtcggagcatgctactgtccgggagcagatgtccctagccactccctcgctacatcccgacgtcccgccatccatgcctcgttgcagcccagtactgtccgtctactagccaccaaccgctcgagccagctaccatcgctgttgcttgccagttcggtgtgctggttcggactcctctacccccgtcgatcactggcatccttaccggatctggccgaatggcccagttctaggcagagatcttagagggagggataaagagccctgctcccaatgtccctggagttgtccaacttccaacgtccacttcggcggcgatgacgcgagggagaggatgcaggaaggttgtgtggtggtgagttagtcgtgttcgcgcgtgtagcctctggagtgggagcgacatctagcattagctatgtttgtcttggctgtcgaaagatcgttgtgcctatagatctcaccgttttcctaaactgaaccaaccgctcttaaattttaatttttaaaactttaattttagagtactttgaatgtagttttttaagcgttaaggatatgcatataaaagttttaccagtaaattattatttttattattaataaattcttttggtttataattagctctcttaaacaaccgacgatggagctacgattatagaactcgatcagatacacaaattcgggaatcgttcattagtatatcacactggcggtacggtagtgttgactacatgcaacctcgtgcaacacacaccacgtattatattagtatattacctagactatagtttgaaacgaagtgtgatgaagctaggttgacttctcgctgttgatgttctgcccccggccacctgatgattaatttgatattagtagttaattaagaataatatcacctcacatgcagagctaggtgattattgatgtataggccacatggggtcaccgttcccagagatgcgcgcatgcaattagaagcaacatcaccggagtcagcagtgagatcgagcaaactagctagcaaattactcccttcatccctaaatatttgacgcagttgacttttctaaacatgtttaaccgtttgtcttattcaaaaaatttaagtaattattttttttatcatttgattaattgttaaatatatttttatatatacatatagttttacatatttcacaaaagtgtttttaaataagaataacggttaaacagcgttaaatatttcgggacaaagggagtagctgagatcgcgtgcgcgcatgtgaaccaggatatgtgcaggattcatttttattttcagactcttttgaagcgcagggattctaaaactatagaaataagaaaacaaataggaaaacaaaggtttgaatcatataattacttaaaatgtgtttcgatggcacagaaaaagatataaatattgaaattatatgttatttcgagttgagtagtaagagaaaagagaggtgtggctttggaattatcatagaaaacaaataacacgaagtacgtacgagctcatgtttaaaatccttaatttggaattggagcataggaatgaatccaacgggattttaatttgcaagcccaaatcttaccaaccaaacaacctcttcataaagaaaaaaaagcctaaaaattaattaaaatccttcaattttcctttgaaaatgctttaatacaaataagtctttattgggttcaggtgatagacagccacatgtaagtgataaaatcacctgcctttgccttccaagtagacgacgaaagaacctacgcatgcgcgccacccagccactcactcagctcgcgcgctggagtacaattactaaacaaaaactcaaaaagcgagggcggcgtgagctacaagtatacaaggtgggggcatcttcttcctcccgctcgcttgtcttctcctccangcgcgcnacgccgtcgggctcgtgaccgatcgatcgatcgagagagaggtcgctcgatca

SEQ ID NO: 1698 - DNA, 1324 bp, Oryza sativa
  N_region (3)..(3): n = any nucleotide
  N_region (19)..(19): n = any nucleotide
  N_region (32)..(32): n = any nucleotide
  N_region (37)..(37): n = any nucleotide
ggngaaacagaattatggngctaggattttangggcncaacggcggctgcatctgtgacaactgacgcgagaatgcgccggcggcaagcttcgccgacggagaggagaagccgcctgcctatccgctgggatcttggcgagtcgtgctgggccgggccattgtgccttgggccggcccaggaaagcatggcctaaggcccagctctatgttactagtaggatctagccgtcagatcaactggattgaagcacgggaagcgtgaaattttgatatgaatgggttcccgtcatacagttggcgaagcaagaaaagtcagagaagatgtacaatatacaacttcaaactgaaaaatgaagaatttccgtatgttgtctcgcaacacaatctcactgcagcaaacaatatcttcgattatactccctccattctaaaatatagggcacaactaatttttaaaggtgtttcataatataagacgtgcatgcatgcatgacaattaattagcatctcttctcttctaaattattactttttaaatgatacactcacgagatgtttaattctattgggtgcatgtattgtattaattggattgattcaaacaaagaggtgatagtaattatttcttggtctttaggttaagggtggttgtgccttatattttggaatggagggagtaatatatgcttgcaaaaggaggttttacaaggtagtaaatgttaaaagcttaatactactataatttcattcgaaacaaaacgtgaaggttgcaaggaagttgcagtcagaaggctcctgatcagaagttgaaagtgctgtaggtgtagggaagatggaagttgtcgaggagttcagaaatgagtggttcgaattgccaaattgcatcacaacagatgaacagaatttgttgcctgcgtattttagaagtacacatatgtgtaatcctatatgacataaatgcatattttctttttaatttttggtgatatttgttaatcctagagacgcgaagacttgtgttacgtttccattttagtctaccagctgcatttcttctgctttaaggactggcaggagatttcgtggtgaattggcaaactctgaaattgggcaacaaaaagacatagcatgcatcatgtgggagaaccaattgggctaaaattatcagaaactgaacccaaattaaccaaggcaacaagtcctcttgtccacacgctgccgcggttcgcgccaacccgcatgacgccttatatataaaccgcacgtacgccgatgccggcctagccctccgcgtggcattccgtcccccccgcgtgacgccaa

SEQ ID NO: 1699 - DNA, 2000 bp, Oryza sativa
  N_region (312)..(312): n = any nucleotide
  N_region (328)..(328): n = any nucleotide
  N_region (331)..(331): n = any nucleotide
  N_region (337)..(337): n = any nucleotide
  N_region (340)..(340): n = any nucleotide
  N_region (343)..(343): n = any nucleotide
  N_region (584)..(584): n = any nucleotide
  N_region (1380)..(1380): n = any nucleotide
  N_region (1415)..(1415): n = any nucleotide
gatcgggcagtatgccgaaacagtataaatcacttaatatctaaatgtgcttcaaagtagagattgcgtatgctcacatcatagccgatagagcaaacctaacgtgtatcagctagtactccgataccaccttatactaagatatcagtacggatgaaatatataaaacacagatcaatctagcaagcagggtgaactagcagactgatggagagcataatatatttcaaacaggtgagattttaatataaagggtggatttagatgatcaagaaccaaatagggaaacaagacaactaaatcaggtaagancggctaaaaccctgangcnatctcnatnagnattcatagaaagagttagataatacggttcaagactttacttaacggatcaaacctaaccaaatgcagcattaagtgtgaaaagaaacgtaagatctaaacaaattgatgaagactcattcaagatggtagatacactatttaatctaactcgatgtcgatatctaaacctatcggcctttttcgatgatagatgctagccgatgaggttagacaacgaaatcgatctagattatacaacntatatgataactcggtgactcacatggacaggattagagtgtcataaagatgtaagcactaatcccgagaatgcaaaccgccataacaagctttcctttttcgtcggagatcgaacttgatgcagcccaactcaaaaggaaaaactcgtcgaaacaatgaaaatagaaaaatggtggcgatgcgccaaagtattattgaattgtcgtcacttgtttacaaggtgtcgggccatatttatacccgtagtagataacatgttcttgctggacacgactctatctctattacaatttaaaatacgaacaagtcccttaggcgaactcttaccaaaaatatctctaaggaaactaaaaatatcctaattaattgatataattgcccttttctggactccaatccttgcgtggcaatgcctatgaggtgctttgattgatcccgatgatagttacggggtcgtcttttcgggactggttgcatcggcttgtcttcattggatttggtgtcaatcgatacatacggcagccgatgccgctcgtagccgatacgaactttgatttccataaacggaattccttcaaatcggctttgactctggctttgaatccggcccacggccttaccaaatttgatcgttaacattgagcccatcaacttttgaaccaaatccctaccttgatttataaggttaaaaggaaaataaattgtaatgtaaccttagatgtcatattatatatttatatagttatgtaaagttaaatgtgagattctataattcaatattttcgatatcgtttnaattctgatcaagtcctcagtatagttatgttttngattttccgatatttatgatcctgttaccatttcgagccttactgtttttatttagttttcgagaaaaaaatatggttacttgagacgtttttcgaccattttcatccctaatcgtgcatatttgttcagaacataaaaggatccaatcatttaatttacaaactataaacgcacaaatataaacaaatatattgactatgtttgacaaatgttttttaagtatgatttaaaactttttatatttgaacaaattttttaaataagacgaataaaagtttgtcaaaaagtcaatagctttatacgttaaaaaacgtaggtattacgtaggaacttgggaaggtgtaaggggaactgaccacgcgcggtcatatatcagcatcccctcgatctatgaaaacatagatcgcaccggctttggcatataaatactacggacggagctcctctgacgtaaagtcagagagacttcataatgtccctctgacttaaagtcagaggagcctcgtccaagtactaccactagcatgttccatcgatggcgagagagattagtagagggggcactcaactttgccaaatcgccc

SEQ ID NO: 1700 - DNA, 2000 bp, Oryza sativa
cttctttttttctctaaacacaaacgcggccaaattactagagaaaaattacaatttgtttcattggaaaaagaaagtgtgcgacgatagaaaccagacctaaccaggcatggtacacgcatgtggcaagaatggtagtacttacttttagatcaattggtaaaataaaatatgatacccgatacttttagggtaaattggaaccatgccattataattttacaaagtttgagatatgccatcggtatctcaatgacatgtaggacccacatgagtcaatgacatgtgggtcaggatgatatatcttaaattttgcaaaattataatggtaatggttctaattttcccatacttttatgatacataataactccacaatacttaataattgatactatcttcattctaattgaaaaagagtttattttttttataaggatctgaaaaaaaacttgtccatatttatatataagtgaatttttgagatggaggtatcacacccataatattcataggtactataaaatttggtaccaaaaggttcaagtatcatgatattgatctccatgacaccaagataccaagatacttgtactatgacatttggtacctaatggttcaattatcattatacctaatatcaccatgatatcttaagatatcatgatatatatttgatacatttatgatatttaggtatcatccatatctatatctatatactactcgtacctgtttaatggtaccatcatacatgataccttcatgatacccaaagaaatcatggtatttaggtatcatccgatatttttatatttattgaagttatcataatacctgaaactttcataatatctgatgatactacctctatattttaatagataacgccattaatttttaggcagacgttggacccttcatcttattcaaaaattttagggctaattggatccataccattaaaaatatgttggttttgaaatatgacactagtattcacgtatcgggaaccatgccattataattttacacgtattcaagatatgccactaccctttggatgcatttacaaaaatctggaccaaactacccttttccccttattccttctcccttcttcccctttcttcttccgcctctcctccatggcgtgacctgactggcgatggtggccaccacagtcacacctcctcctttctctagcactctttcgttcgtgtctccctccaccttagcccgccgccggcctcctcatgcgcgtcatctccctccacctcgacccgccgccggtctcctcttgtgcatcagcgcgtcctagatccagtcgcctctcctcgccgtgtgaggagctctgggcaatggcgatgaccaaagaattaaagagcggccacttctctctggcaagctcctgcacctccctccctccctccctcaccgcacccgcagcttctccggttcagcagctgcctccaccacctcgacgcccgatgcagcgaggacggccttcgtgaagagcctcggcagatggcggacctgcggtgttctgtccggcgctccgagctcccgcgacggatgtcgcaggcgaagagaggtagaagatgagtgaagagagagagatagaagatgaggggatttttcgtccaatacatgcaaaatacgtatcttagtggcaccattgagattacgaacaagcagcagtggcattgttacaaatacacaaatagtaatggtatattttaaaaccggcaattttttagtggcacgtatctaattaacccaaatttttaatatgtgagtgtgtacgttctatgaatctgtcacaagtcatgacgccgcgagccgcgtccagctacaaaccactcaacccaaacgcatccaaaacccctcgctgagctgccatgcatgcactccccctcctcccactataaattatcaccacctcattcccgccatgtctcaccaccaccaccaccaacactgcaacacaacacaccacc

SEQ ID NO: 1701 - DNA, 2000 bp, Oryza sativa
tattacatttgttttttatactgaaactcaactctagtttggctgaccaaatgcgccattatattactcaatcatggaaaacatgcatgagcttaccagtgcatggttcgaaatatttaataacgtactactctgttgtgattccagtttttattaatatgctttttttaatcgataaatgtattttccttgtcaacagtgttttggcacatgaacaccttggggggctgaaatcaacatgttatacattgtaaaggatctgttagtagattttttttttaagaacaaacttctactatgtcatatggaaagccaaaagtacttggatatttatattttgggatgggaggagtaatatggaaattcgcattatatatgcacattgcacagctgcttatctgccagaacaattccatcttcagttggctggagtctggaggcatttttcgtacagtaccatgcatcttgcatgtgtatcgttgctcgttgggcattgcagcgttgacctgtatatttcctacagttttttcagcacgccccactgatccctctagtctgtacgaactaacgaacagtttattatcgctgcatttgtgtactgtacaaaacaagcaagtggtgatcccagagctagtgttattttagtactgttcttgtcagtacaggttgtgttatgttgcgtttatactacgtactatacatctctacatgtgtgccgctgttagtacaacctgcacgctaagcaagatgattatagataatctctctgaatatcttgggttgggctgcattgtagcgtttgcctggagagtggattttaaaatctctacttccatattatttaacacttaaatagttattaaaaaatttaaaaacattcagaaaatgtattaacatatgatatatcactctacaaacatgcaatttaaaatttaatttctacatgtcaaaacgaaaaaagaataaatttgactataaatatacgttaactagttataatttaatttgttttttttgttacgatatgtaggagttgaatttaaagttgcatgtttatgaagtgatatatcacatattaatacatcttctcaatttttttaatttttttcataattgtttaagtggcatgcaaatataactaggggacatcccctcaaaagtttattatagtttccccattggcctgtactttacccacagtagataaatacagtgatattcaacttcatttatctaatgtactactccctccgtttcaaaatgtttgacaccgttaactttttattacgtatttgaccatttgtcttattcaaaaaatttaagtaattatttattattttcatatcatttgattcattgttaaatatactttcatgtacacatatagttttacatatttcacaattttttttaataagacgaacggttaaacatgtgctaaaaagtcaacggtgtcaaacattttgaaacggagggagtacaaaacaggctagtggtgtttagtttagaaatccttattgtcagtataggttccatgttgttggtataatctacatgtgtgctgctgcctgctgttagtagataatatctgtatctgccttgggtctcctgcaacgcatgagcggttagttggcttgatgagaaactgaagcgtcacggtttgagtggtacgtgtctccagcgccgtggggtgggagtgggatacagtcaagactccttcaataatcttcttgtcaaaaagaaaaaggtcaacggtttcaggcctacttctcttcctcacgcgcgctgtcctggttgtagttgtagttgtaatccacaagaaactcaaatcaaaacgcacacacaattcaattctcgtctcatctcataccatacccctgtaaggctgtaaggtgtaagtgtgttcagcgagatgcgagcttcttcttgacctcgacgtagatccatggccggcaccggaggcagccctctgctccgctctccctctccggtgatgaaca

SEQ ID NO: 1702 - DNA, 193 bp, Oryza sativa
  N_region (70)..(70): n = any nucleotide
  N_region (89)..(89): n = any nucleotide
ggattaaacaatttaaaagggggggccggccgccgggaaggaagccaaagccgaagccgaaatggagggncttggcttcttccggaggntcctccaggcggcgcttgcccctgtccgtgcccagtccagccttttcgccgcggcggccgccgccgcgcccgcgccggagaatgccttcgccgccgccccgaag

SEQ ID NO: 1703 - DNA, 2000 bp, Oryza sativa
cacggcgtccacggctgccagcatcgtcgtcccggctacgtctcgccggtgataggtagaagcagaacaagaggcgaacaactcgcaagcatttgaacgaacacctcatgtgcgagtagagcagcactgaggcgttcggagccgaactcgtcctatcaccggccgcggaggcagcgaacaccagtgtggattggagggccaagtctaacgcgatttggtgaaacatccaacccaacatgcatcgactgcgcgcggcggcggcgtcagttgctgttgctctgtgtgtgtccaacgccgcgacggccggcggtggcatccgccatgtgctgtcgacggctacgtggcgacgattggagtggcaccgccggtgaggaaggtatcggcgtcgacggggacacaactccagatcagatcagctcaagtgctgaactgatttttgttcagtttctgctccgaagtctgaaactattgatctccacaagatatgggctgccttttgctttagaaaagaccgaaatcaaaacgtaaacatttcacttctccaaatgtatggatgatcagtcatatatcatactccatcatacagacagcaatccaaatgaccgagggcggcaaattacctggaatttttatattttggtccttattgaaaacttattttacaaataggtccctggaaaaacttaaaccgggaatgtcctttttggggcgccagagtggttgacgccgtcctccaacatggcgccaccagccacaatggcgccgcggccgtgccaccgtggcaccagagcctacgagggcttgctgactcggcagagcggggcgccaaggaccaaaatataaaaatttcagggcaaattacatttattccaagaaagaatacgatatacttgtcatgcctttggctcggcctggcacgagtgtacgacacgaacctattaggctgttcctagactgttggtatagcccatggacaggcacgacacggctcggcgtgttgattaggccgtgtttggtcgtgctcgggcccaatggcctatttgaccatctatacttacttgtcagcagcacaattgaatcaaactccatcggtctctattctctaaatataagggattttggttggatgcgacacatccaagtatagcgaatctggacggaagcatatccagattctttatactaggatgtgtcacatcttatcaaaaccccttatatttagggacgaagagaatacatattaaacaagaaaacaatagcaaatcagtttaccctcccgtttatcgaaaaggaaggtaagtggaacgtggttctaaaatatttttaatttattttctttatataaccgacgtgggcattagagagattcattatctcttgacatttcaggtagaattgttgcgtctcattaagtttttatgttttccttaccaagttattgtaattgaacgaaagcactatgtagacgtcacaccggatgaattcttggggacgtttcactagggccgagtttagttcgaaactttttcttcaaactttcaactttttcatcacattaaaacttttttacacgcaaactttcaacttttccatcacatcgtttcaatttcaatcaaacttctaattttagcgtgaactcaacacaccataggatatataaaatcgtcgtttaaaccatccagagagatataaatgtacatggtttcgatagttgagaaagccttcttaatttggttttatggttaagtggccaaaattagacctggactatcattgaaagaggcaaaatggactttgtttatcccacataggaccaacgcgttgccggaaggcgtccaacccgatacggaatccttcaacaatcaataaatccgatttaatctcagaatcagatagggagatcgtccctataaaagtgagttatatatactgcagccttatcacagacaggtgctaggcttactcgtgaactgggaactaaataatcagatgagagatca

SEQ ID NO: 1704 - DNA, 2000 bp, Oryza sativa
  N_region (167)..(167): n = any nucleotide
  N_region (170)..(170): n = any nucleotide
  N_region (261)..(261): n = any nucleotide
  N_region (302)..(302): n = any nucleotide
  N_region (329)..(329): n = any nucleotide
  N_region (331)..(331): n = any nucleotide
  N_region (339)..(339): n = any nucleotide
  N_region (341)..(341): n = any nucleotide
  N_region (366)..(366): n = any nucleotide
  N_region (375)..(375): n = any nucleotide
  N_region (392)..(392): n = any nucleotide
cataccgaccgagcgagtggacactggccggccgacccgatccgtcctccgccactatacgtgctactgctacctttctgccttttctaccgtgctactggtgcgcgtgactgacgtcacggtgacgtcagccggtaggttcgtttctccgtcgccggggctggtangtnagccgggccgttggacgtcggagcgggtctccggtccggtccggtctagcccgtggaagcaacaattgaagaagaattcctttgactctcntttaattaaactattatctctgatgttgttttgatcattcntttttcctttttaccccttccatagangntaaactgnanaagtccaagcttagtgaggtttggngaccatcgntaagctgatcggaaccntatttttttttttttggggttggtggtgttgttagattataatccgatttaggctatgttcgctccagcgtgttccgaaaaacagaacgatccattagcatataattaattaagtattagctaattattttttaaacatgatcaatatgatttttttaatcaactttcgtacaaaaacttcttaaaaaaacgcaccgtttagccgtttaaaaagcgtgcgcgcggaaaacattgaagatgagttgagatacctagggtaagaacacggccttagtattggatgtttccttcccttatatagtttcttacgtagtgtccgtttcctgtccgtttcgtaaatattttttttatatctaccaatggtagtgtccgttttgtaaatattttttttataattaccaatggtctttgagaaactctaatatatttcacaaaagatatacctatgtacaaattttctctgaatcgtttctcgttagttttatactccctctaattcatattataagtcgtttgactattttcctgattaaattttattagatttgatcaagtttacagaaatatttagcaacatctaaaatatcacattattatttttattaaatctcacataatatgtttattttgtcttgaaagtactattattttttctataaacaacttataaaaggaaacagagggagtagtaactgtttttgttgttatcgtcaaacttaaatttatttggtattaacacatgcaatgagggaaaaatgtcttattctaaattgggaaaaaaacaattatagccaaaagcttgaggataaagacactccctcatacacgatgtgtcataggtaaacaacaaatatatgaaaccgtcaattctttaggataaaaaatcatactcttgtaaaccaattctaaaaattcagcttgccacatatacacacaaaatgacatacaaaaccaaaatgtcacatcacatatatagaaaacaaatacctaaaaacttggatattccaaccacaccaaacttcttcgccaacagcttccatattttagacatgacatatatgccgtgcaaacgaaaaagatttactctacagcaggcaaggagaaaaggggagatacacgagataaaagtcagtggcctgagagagtgaaaggctgaaactcgagcacaacccaacactgccagcagaaaaaactgaaaaaaccagaaaagccaatggtcaccaaccccaacaaaaaagcgagcgaccaatgcgatgggggttccgtaaaatcccatccccttcccaccctacccaaacacccgctggtataatggggttggtaaacgacgttgacgtggcacccctgccccagtcaacgaaccccccctccctctcaccaacccaatgctcctctcgcttacaggtgggtcccacacgtcatcctctccgggccccgctcaccaactccccccaactcccttctccctcccgctcccgccagtatttaacccctcccaccttccattcctcccctctccaggagacctcgccgccgatcgatcaatcgccgccgccgtctcctcgtgtaaccctagcttagtggattagtttaagtgtttgccggaga

SEQ ID NO: 1705 - DNA, 815 bp, Oryza sativa
  N_region (3)..(3): n = any nucleotide
  N_region (7)..(7): n = any nucleotide
  N_region (16)..(20): n = any nucleotide
  N_region (22)..(22): n = any nucleotide
  N_region (24)..(24): n = any nucleotide
  N_region (27)..(29): n = any nucleotide
  N_region (37)..(37): n = any nucleotide
  N_region (39)..(39): n = any nucleotide
  N_region (42)..(44): n = any nucleotide
  N_region (57)..(57): n = any nucleotide
  N_region (60)..(60): n = any nucleotide
  N_region (62)..(62): n = any nucleotide
  N_region (67)..(68): n = any nucleotide
  N_region (71)..(71): n = any nucleotide
  N_region (73)..(75): n = any nucleotide
  N_region (79)..(79): n = any nucleotide
  N_region (81)..(81): n = any nucleotide
  N_region (89)..(89): n = any nucleotide
  N_region (91)..(92): n = any nucleotide
  N_region (96)..(97): n = any nucleotide
  N_region (102)..(102): n = any nucleotide
  N_region (105)..(107): n = any nucleotide
  N_region (113)..(115): n = any nucleotide
  N_region (117)..(118): n = any nucleotide
  N_region (124)..(124): n = any nucleotide
  N_region (140)..(142): n = any nucleotide
  N_region (151)..(153): n = any nucleotide
  N_region (160)..(160): n = any nucleotide
  N_region (164)..(164): n = any nucleotide
  N_region (170)..(173): n = any nucleotide
  N_region (176)..(177): n = any nucleotide
  N_region (179)..(180): n = any nucleotide
  N_region (186)..(189): n = any nucleotide
  N_region (191)..(191): n = any nucleotide
  N_region (193)..(194): n = any nucleotide
  N_region (196)..(198): n = any nucleotide
  N_region (202)..(206): n = any nucleotide
  N_region (209)..(209): n = any nucleotide
  N_region (211)..(211): n = any nucleotide
  N_region (214)..(214): n = any nucleotide
  N_region (218)..(219): n = any nucleotide
  N_region (224)..(224): n = any nucleotide
  N_region (227)..(229): n = any nucleotide
  N_region (232)..(233): n = any nucleotide
  N_region (236)..(238): n = any nucleotide
  N_region (240)..(244): n = any nucleotide
  N_region (249)..(252): n = any nucleotide
  N_region (254)..(256): n = any nucleotide
  N_region (259)..(259): n = any nucleotide
  N_region (264)..(265): n = any nucleotide
  N_region (270)..(270): n = any nucleotide
  N_region (283)..(283): n = any nucleotide
  N_region (299)..(300): n = any nucleotide
  N_region (319)..(319): n = any nucleotide
  N_region (339)..(339): n = any nucleotide
  N_region (347)..(347): n = any nucleotide
  N_region (349)..(349): n = any nucleotide
  N_region (361)..(361): n = any nucleotide
  N_region (366)..(366): n = any nucleotide
  N_region (379)..(379): n = any nucleotide
  N_region (393)..(393): n = any nucleotide
  N_region (404)..(404): n = any nucleotide
  N_region (422)..(422): n = any nucleotide
  N_region (445)..(445): n = any nucleotide
  N_region (455)..(455): n = any nucleotide
  N_region (458)..(458): n = any nucleotide
  N_region (463)..(463): n = any nucleotide
  N_region (470)..(470): n = any nucleotide
ccnaaantttttttannnnngncnaannntttttgantnttnnnaaaaaatatttgngtngncaaanngtntnnncctngnttaaaagngnngcannggttnccnnnttaaannncnngggggntttttaaaagccccannnttttaaacnnncaaatcncatntaaggnnnnttnnanngggggnnnnancnngnnnaaannnnnttngnaanggtnnaaggnaannngcnnaannngnnnnntaaannnntnnngcnaattnnaaaanggaataaaaaacntaatgggtataaaatnnggtacccgggtttaatagnttagtaagcaacttttgtanaaattggntnttaaattggttntagangatttggggctantagggggttaaacntttgaacttgntttaaaaactccctccgncccaaatgggccccaaagaccgngataaaaaanccntgtgnggcagtnacagggaaaaaaaaaaaaaaagcttctctaatcctagctcgtgacctgacacctgtccagatgtgaacgaatcgagcggaggctagcgaagtagtagcgagtgtagcatcttctcgcgcgctggtctccccaccgtctcttcgccatttgcacaattctctcactcctctttcccctcccttcttcttgcttcttatccccaagcaataacgaggcgtcatctctctcgtcatcttctactctccctcctctagtcctcttcttcttctactttgtacgcgccactcactctccgagcttgacggcggcggcggcggcggaggtcgtcgagtggtggtcggggag

SEQ ID NO: 1706 - DNA, 2000 bp, Oryza sativa
tccgcgcgcccttcccctcggctgacgcaataaatccattttaaattaaaatttaaatgaagaaattcgcaaatattcatttaaagagcatataaacttcaaatggccataacttggccatttgaactcggaattggaccgttcaagtctctaatttttccttaagaagtcaagaacccatttttgtgctttgtttctgcttgttatatggagtttattagagtaaaagccttttcttttccgttggtcgtgtagacgctgcagcttcggaagatccgctcttcgtggaagttgaagccggcgtttgggaaagcgagcaaggcaagtcacatcatccttgagcatattgaatcccagtttataaaattattttaatttaaattaatgcattaccgctttatttaaattcccgcgttatcactgttttatttagccatgcctatttacctttgttaagacattattattgctattgttattattaccttgttcaccctaggataaacaaaaccccaactagtgtgtactctattcatggttccactagtatgaatttaggtagatgcttcgctgattaattaggcaacattaggtggttttataactttagactttgggaattctcatatcatttggacactatggaatggttggcttatgttggaattggacacacacctccccctctattcaaaatccccaaaaatggttttaggctgggctcggggtgcatggttttgatagtagcacctcggccatataaggaccggtcttcgggcctctgttgcaaagcactaccgtacttccacatgtctagtgggtaaggcttagtttgtggctcagtctggttataaacaaaagtacacggatagagatggacgaagtcgggggtcgatggacatctccagggcaaatgaaggctacacgagctgcggcccggtagtcgagatgtcatggcacagggccggtgtcctgctgctgggggctcagtcctgcctacctgtcccgggggttccggccgtaggtggggttgggtcggtactcttgtttatggctaggatgggttgggaactatgtcacgtcttccgtccgtataccgtggtggtatgtggcacgtggttacacgtgaggaagatgtgtcttgtgggtaaagatgtacacctctgatcagagtataatctattcgaatagccgcgccctcggttatgggcaagccgagcaatgtacccaagttagtgttttaattcttaaaacctgcttaacaactaaaatgtggaatggttggcctgggttggcttgggacgagctgggacccagggtcgggttgccggtttggtctgaatcatcgtaggccttgggttaaggcaggttcgtgtgggttcacggccttgataaataatattgtatagttctagaatcgtgtttacaaaatagctttgagcaactaagtatctttaaatgctgtttactgcaaccctaaccctttatattataactcccttgtactcccttgcatttattatgcacttgtgggtgtgtcttgttgagtacggtggttgtactcagtcttgctcaatttttcccaaacccagaagaggagtctctggaagatgaaggttttggtgtctagcttgtgcctgccgtcaagcgcctgtggtcgtcgccctagtcttccgctgtttctcgtttgtctttgtgtgtgttgggccttcgctgcccatgtaataaattaactatttacgcttccgcttgttgaactctgaattgtatcaacttttggtataccttgcctcctgggacaaggaataatgcacgcacgtaaggaacgcccgttgggttatttccggtcgtgacaatggagatttacggattattggtgattaggttttgcaattataaaacatgtgtaagcgctagcctggaaaagacaggaaggctgcgccgttgacatgcagaccccacatgtcaacctaaaggaccacggtagaccgagtacacag

SEQ ID NO: 1707 - DNA, 2000 bp, Oryza sativa
gtatgtgtataaacatttgatgtgacggaatttttagaaatttaaagggaactaaacacaacctctatcgtctttccgcccacagagaaacatcttctactcgtcaatttaacacttcgttccttccttgccgttggaaactaatttttctcgcacgcaaaacggagcaactcattaacataactaagtattagttttttttaaaaaaaatagattaatatgattttttaaaagcaacttttgtttttttaaaaaataaacaaaccatttaacagtttaagaacgtgcgtgtggaaaatgagaagaataagttataaacttaaaaaaataatgcagttcttggattctaggcatctatcataggacgataaaaaattcaagagtaaagtgtacgggcagtctttaaacttgtaggggtatgtcttctagatccctaaactctcaaaatgcatatccaagtcccataacttgtcatagtgtgccatctaggtcccaaatcactaaaacctcttcaggttcttacgtgacgttgatgtgtatgcctcacggacatgatatagaattattttgactgacaaatgggacccatttaattttttttcctttttccttttcttttatctttttcccctttcttctcctttctctgtgacccgtgcagaaaaaaggaaaaaaataagaatgagaagaaaacgaaaaagaaaaggaaaaagaagaaaaaaaaggaaaaggacacgtcacgtccatgtggcattgccatatcagcgccacataggatcttagaggggatgtgctaatttgggacctagatgatgcactttgacaagttatgcgatccggatatacattttgagagtttatagacctatatgacacaaccctacaagtttaagtactgctaatgcactttactcaaaattcaatatcatgctgttcacggttaagagagaaacaaaacgagcatcgtagtacgtaaacttgtttgaaaaaaagttttgtaactgcgaacagaattacagaagactacagtaatcagtcagatggaaaaggtatacctgaggttcctctcatcatgtcacgagatacaaaatcgtgcttttcaaccgtaaaactggataaaacgtatcccccaacttacaaaactagtacagagtatgatctttgaggttttgctatttcacttgcgatagaattttgagttcttatactctgacttttcacccgtacgatcttgtatcaagatttgtgttcctatgaattcaacttgcaaagttgcaattacatttagttacaaagtacttatatttggttatagagtatttacacttaattacagagcaactacactcttacattaaaaaaacatattttacaacagcttctttctcaagatttatgattttctatatgtttgtcccttttcttttatttcattcaaaaatggctatatgtattggttggaagttctgtaaaatttgaagcttcaaatctattgaaatatcaatgggtagtctcgtatttttattggcatatatagagataaaaagtatataaagtttagtttagtgtaaaactcctgacaattagattttcttataatatataagcaggaagataagattgaactgctttatcacatggataagcgtaggagctgagcggccggcgtgattcggcccacatgattgggctggtcgtgtgggagcattttggccggccctggtagataggagtacgcgatcacattggaaaatcacagctgctcgctgcacgtcgttggagtacttcctaatcccaactgttactcggaagttaagggcgccagcgccgcgtgatccaatcacctcgcaaaatcaccttgagaatagtatattcggaacagatttgcagcctcgtcgtgtctataaatagggtggtaaacacccatgcatgcaaagccacaagcaattcaacgagttacaccttccaccgtcaaccgaggagctttcagttgttgccgg

SEQ ID NO: 1708 - DNA, 2000 bp, Oryza sativa
  N_region (449)..(449): n = any nucleotide
  N_region (522)..(522): n = any nucleotide
  N_region (631)..(631): n = any nucleotide
  N_region (648)..(648): n = any nucleotide
  N_region (664)..(664): n = any nucleotide
  N_region (671)..(671): n = any nucleotide
  N_region (699)..(699): n = any nucleotide
  N_region (833)..(833): n = any nucleotide
catttctctcagagagctagataaacgttggaggcggcggaggcgagtgcgtcgggaggcggcagacgagggcgagggtggcggagcaggcgaggtcggctgaggcggcggaagggaggagtcgcgagggaggttctctcggcatgggctccagatgcaggcgtcagttccagaacgaaagaagatagggtagctattgttataaagtgaaagtgacgattatatccctccgtaaataattttatatagataaaagtactctccacaattctactaccactaagtgaggtggtaataaaaatagatctgaacccttcgatcaaataagatcaacagttcagattttttttctactacaagtagaaagcatcggagtgaggctttagtaagtatatactgtattaatttgactggcctgtgaataccatgttatatgtagtgtgcatgancacctgaagttattatttcctttttttaaggctcctttaacatcattctttttttccctgaagaaacggccangaggtttaatacgtccgcgcaaaaaggaacacgcaagttagccccaaatttccaatcattacacattcgccattgcaagacagctacagtccgcccgcaaggtgccttngcggcggcggctgctantacggcgggccatggngccacgnaacacaattgcagcctccggcggccgtntcgccggagcgagattacgtcggccaagtgccaggtgcagcccagccgccgcgcgtgtgtcacccgctgattgctgttagaaacgattaagacttagaatttggttctaaagcagagatactgatgttttaagngcttctcttttttttcccgcctttgatttgctatactagagcattttgtttttctcctttcagctttcattttatcctggaaatgtagaacaaaaggcagacatgtttgcaacacatctacaaatacatataagtgctttgtatcatcatccgatgtaactatatttttttttcatgtcaataaagctaatggcctgttcactttgatgctatttttaaccttaccaaattttggtaaagttgtcaaaacaaaaaaaaaagtggctacatttagtttgctactaaattttggtaactatataaaaaatcctgccaaaattttgataagttgtcaaaattttgacaactataccaaaattttagcattgtccaaaatttagtaattttttttaacataaaagtgaacagctcctaagccgaatggcactccccgtaggcaccacccccaaaaagaagaaaaaaaaaacgagctactgtttgagcgttggttttggatcggacggtgcacaacccatccatttcctgtgccagcatatccccctcctgatcgattcggattcctccagctaccgacacgccgacacttgtcacccacacaaggcccatgtgcggcccaactaggcccacccttccgacacgtgtccctcccccaccctcaccgaccggcagtagcattcaccttctccgccctcccccctccgccgcctccgccgctcccccaccttccagaaccttcctttcccgaaatagccacccctaccctaccctaccctacccacccccgccaagatccccgccgccggcgagctcgagcccttggtggtgctccggcgggcgttgtcgcggtcggatcagctgctgctggtgctggtgatgccgctctctctttcttgcgtgtacttccgggtgggaggttgatggcgatggtgaggtgttctttggcgcggttgccctcgcccccactcttatctcctctcctcgcccatgctacctaccttcctcccccgccggagctgctctgctgctcgtactagcgtgggagctgcctcttcttgttgagccatttcttgcctacaaggacagggtgcctcgccgtcgccattgccggcgtcggagccggacaaggaggttcagtgtactgtaccgtggttttgggccttctgagct

SEQ ID NO: 1709 - DNA, 2000 bp, Oryza sativa
  N_region (142)..(142): n = any nucleotide
  N_region (228)..(228): n = any nucleotide
  N_region (516)..(516): n = any nucleotide
  N_region (525)..(525): n = any nucleotide
  N_region (527)..(527): n = any nucleotide
  N_region (530)..(530): n = any nucleotide
  N_region (533)..(533): n = any nucleotide
  N_region (536)..(536): n = any nucleotide
  N_region (718)..(718): n = any nucleotide
  N_region (1573)..(1573): n = any nucleotide
agtagtagtggattgcgcgagacgcactgtcactctgtaccgagggccggaacaaccggttgttttctttgcacccccaacctctgtcagtagttcagaactgcatcagataggactgtcagaaatccccatcgtaaggganttcggagatgtgtttccggaagaattacccggtatgccgccgaagcgagagattgagttccgaatagatcttgctccaggaacccntcctctgtacaagcgaccctaccgtatggcagcaaatgaactggccgaagtaaagaaacagttggaagagttgaaagaaaaggggtatatacgtccgagtacttccccatgggggtgctcctggtgaatttttgtagagaagaaagacaagacgaagaggatgtgcgttgactacagagctctcaatgaagtcaccatcaaaaaccaagtatcctcttccccggatcgatgatttgttcgatcagcttaaaggtgccactgtattctccaagattgatcttcgttccngatatcacnanttncgnatncgtgaagaagatattccgaagaccgcattcaccacgtgatacggactgtatgaattcacggtgatgtcattcggtttaaccaatgctcctgccttcttcatgaacttaatgaacaaagtgttcatggaatacttggataagtttgtcgtggttttcattgatgacattctgatatactcacnatcagaggaagaccatcagcaccatctccgtctggtgttgggaaagttgcatgaacatcaattgtatgccaaacttagcaagtgtgagttctggttgtccgaagtcaaattcttagggcacgtgatatctgctaaaggagttgccgtggaccccgaaacagtgaccgccgtcactgattggaagcaacccaagacagttactcaagtccgcagtttcttaggtttggcaggatattaccggaggttcatcgagaacttctccaaaatcgctcgacccatgacacagttgttgaagaaagaagagaaatttgtgtggagcccgcaatgcgagaaggcgtttcaaactctcaaggaaaagctggtttcctcgccggtgttaatcttgccggatactcgcaaggacttcatggtgtattgtgacgcttcgcgccaaggattggggtgcgtgctcatgcaggacggtcatgtggtagcctatgcctcacgccagctacgacctcatgaaggcaactaccctacccatgacttggagttagccgctgtcacgtcctgataaattcatcccgaattaaaaatcattcgctaaaaggaataatagaattaattaaaattcgaaaagaaattggcaaacactaaaatacgtacaagaaaaattcaaatgtggcccggagaatttttgttaaattctccttggtctaaaaggagccctcaaattttacttgaattttcagagcgccggaaatatttattaagcaacaaaaacaattatcaaagtttattaaaaagaaaaacctaaaaaaataaatcctcttcctcctttgggccaagcccagcccaaagtctccctctcctccntctctttctctccctctctttctctccctctccttctcttctctccttctgcttgggccttccctccccctcccggcccagctccctcctcctccttcctcccggcctgcctcggcccagcagcccggcccaagccaggccgagccgagccagtcgcgtgcacgcgcgccgcgcgtgcgctgactgcgcgcgctgaccgcgtgggacccacgcgccggtcgtcttcctcctcccgcacggcctcctctctcttcccgtgaaaaccctagttcgttcctccctcgaatccgcgcgatttaagcgttggattccaaaattaattgggggggaattaatcccctttccttcctctcccttttccccctaatctcccctttaatcgtgcactattttgaccggaacggctgcgccattcatggccgccttt

SEQ ID NO: 1710 - DNA, 2000 bp, Oryza sativa
  N_region (28)..(28): n = any nucleotide
  N_region (1343)..(1343): n = any nucleotide
  N_region (1353)..(1353): n = any nucleotide
  N_region (1378)..(1378): n = any nucleotide
  N_region (1452)..(1452): n = any nucleotide
  N_region (1467)..(1469): n = any nucleotide
  N_region (1557)..(1557): n = any nucleotide
tcatatgtgagattatcgatgacatgcncatacatctcagatgcaacaaatgcacatgtaatgttcctgtggtatttctgaacaccaggtagaaaacatgtatgcttggtaacaactgacactgtccaataatccttccatttccccttatacgcgtgcactctccagggacaaccatctttttccttaacacaccgaacttcatattgcgaccggttcgacttggcaacccaaaactctctatgaagtgacactgcaaaatgttttaccgcctatttcatatcttctgctctactataaatcgctccctgaataacctcattttctttgtactcccatctcacactatcctcttcagagacgatcaacccagaaaaatcctcactagcccattctgctggattaatatccgtctcatcatctgacgaatcaccttcctctacacgctcgttgtcagaatcgtccctctccatttcatccacaatggcaccgacagtctccccctcgtcggccactccacctggttgaatgcccactggagctactacgcccccgtcctctcgtgcgttgacctcctccacagaagtctcgtttacttcagcacttggtccctcgccatcatccatgttcgtctgcacacctggatcctttgggtgaacaaacggaaccaaagctagaggccacccgcgttgcaatgcattttccaaataccatctccacactcgagagttttgaactggcattagttcccaataaaaaccctcagttgcccgacttactataacattgattgttatgtcacttgtctgtggatcaactctgaagcccctcattaaccatccttttatagaaggtacactcctctcagccggtctatcaattcccctttctgatacaataaaatctgacagatctaccccagttggcccgtaacgaacgtttcctggtccatggtaaacttggaatatttgtttgttcgacatatctgtcaacgaaataactagatcatattactctttcatgcaataaacatctacaacgtaatatcttcttgtgtaagccaatgcaacggtaatgtattaattccaaactagcagatctacgtagttaccgatatctacaatacacacttctagattagtacaactaaaaccctaaaaatataatgcatttattcaaacaaatttttaaagaatacacactatttaactcaatagtcacatataggatctatgaatattacctgaaatcggtgtctgaatccggcagggcttcgccccttcttctcttctcctcccctctcttcttttttttttcactggaattgaggagagaagaatganggctgggggntgggcagcaggccttttataggcancgaggcctgccgcccggccagagggcggcaaggggccgcctgcaaaatagccggccccgaatggctttttttgnattcgggccccttgnnnccgggttttcctaaaaaaaaaccctccctctgtcaccgcccgttcctcccccgtttgccacgtcagcttgtcgccctagaggtgggcngtaggggctatttctgcaattttttggtcgatatattatttctgtaaatattaaaaaaaataatctaaaaccgaaaaaaattctcgtcaaatctatctcggcccaaaattgcgggcacctcacctaccaggacaggaccccggcccacgccacaggtggcggccgccgccgcgcgccgcagccgcctcctcggcttcccacggatcggacgggtcgcagactcgcggcgcacactggcacccgatttgttggtttcttacccctcctacaaggcggccggacgcccacagatcggatcgggtcatcaactcatcatcgccccccttcaaaaggccacccccctccccctcccttctcgcctcattccccacagccgccgcctccttcctctcctcgatctccctattcgtcgtagcctcctccctcgttcgctccgcccgcaa

SEQ ID NO: 1711 - DNA, 2000 bp, Oryza sativa
cctggacgcctttttctgcctccctaaacctctaaaacccgtcccagttcaaaaccatgtccaggtccatccaagagaggttcaaattacactggctgagccgcttaaaatcaaggtggcaaccggccggttgctaccgctttttgacctggtttgcattgtgaggttgttttttcttctccccgagataagaaaaagcgagcgtttgccgtttcggccggatcggcggcctcgggcaacgtgctcgagcaggcttgtgtgtgcgcacacgagtcagtcaagtcgccacatggccggaaaacacaatgcgttggatcgtttcgtggcagacaagttttttttttgagtgattccaaagaggagcaaccagggttcgtaattctgacaaaaaccggctgtattctatgaaatttcgaccttttgatatggctcggaattaatttttggttaaaattttgaaggttaaacattaagtttggtcgaaatttagtcgaaatttatcgaaaaccgatcaaaatttgtcgaaaaccgtgataccgacgggctcgaaatttagtggtcaaccggtaatataaaccctgggagcaactttggtgctcccttaatctcaaaagtatctctaccgatcttgcaatttcttgtgtcctataaaatacatagatatctttatattaggtataaatttggactatcttttcctatgaatttgagtaaaccaaattagacatgttcgcggtatagccgctatgtcacatctgctgacacaaagtgctattcgagctagctgtaccgtagtcgaatgagtgcagccgaattcataagtaaagatacctatatttttggtgacgagactaataaaagtttgcctataattttcctattttttagcacataaaatgtacaaattaagggtaaacatacaataagcacatcattgtattatatcaataaaatcgcacgatcacgctgacactattttgtttcctaaaatattgtgcattgaaattgcgatttttaacacatttgttgcaagacaggataagagaatggaaattgaatgaaatctactcggagcaattgagaattagagactccattttgaggagggaatgggcaaacaacacgccgaagataccgggagaaatgaatccgctatccaaaatcgagctaatatagcactgttactcatatgaatttctagatttttttcctacatatatagtgcaattctatcatacagttattattaatttgtaataggtgtatttcggtcttattaaactccgataataatggtttaacaattactccctccgtttcacaatgtaagtcattctagcattttttacattcatattgatgttaatatatctagacatataaatatggaaaatgcaagctagacttactttctccgtttcatcatgtaagtcattctagcattttccatattcatattgatattaataaatttagatagatatatatgtctagattcattaacatcactatgaatataagaaatactaaaatgacttacattatgaaacggaggaagtagatactaataaaaagggataaaatatacccaaacaatcgagccttgtatatgtattttatctaccttgatacgattgggatcaaagtaatacagtagtatattcttgctttcatgggaggatcaaaaaaatgataacggtataaaaaaagcagtgaagcaagctcgcagacaacacgccggatacaaaggggaaaccgaaataaaaccgccggagaaaaggaaatgaatatatatattttcaatttcgtaacgaaaaaagatatatatataaaaagaagccttgaactccgcctttaaatattcccacctcgcctcgctccccttccccatcatctcatctcacaccaaaaacgaatcagctcgtctccttcctccgcctccgcctccgcgagctcccattccattcccggattgcgccgccgccggtgttgcagcagcc

SEQ ID NO: 1712 - DNA, 2000 bp, Oryza sativa
  N_region (192)..(192): n = any nucleotide
  N_region (484)..(484): n = any nucleotide
  N_region (1933)..(1933): n = any nucleotide
  N_region (1965)..(1965): n = any nucleotide
ccaatacgtggaatattcatagtaaactaaactactattggtagtggaatcctgaagattcacttaataatgctcatggaatgacatcattcgtggaaagaaaccagacatcatcgcgcagtatccttcctttcaggtttggagggattgcagtagctaatttcattttgctgactaaccttgactaaaagngttatttaatttgtaaagcacaattgaagtactgaaagattgcaatttggagtattgaaagttcagagcgcaccagcgaggtctgaattgtaaacacctttttattacccctttttttttttaggaaaagcactagcgaggtgtcacgtctacacttagcgtagcagaagcgttcactgtaattgcgatgaaaagttgacaggccacgttaattctgcttgctccaatcgatcaggaaatgcgctattgtgcatgtcacgtccttagttggatcgaaaaagatgcaagtgcntcaccgattcgtttggtctgaaactatattttgcttccgaggagattaaaacgaatctgggaagaacatgttcttgtttatgcctcgttccaccggatcagctactattgttcgtccaaaaagaatgcaagtagcagattaattacactccacgcccttaagaattcgatcaaaatcacgcacgtaattactctgcagtttccacggaatccttgtttacactttcctcattgtgacagatacgaatcagggtgctaaaattaaacccgagattacagcggagtatattccgaagaacaggaatcttctgagtttactccagatataagcatttattccttgcctttaaaggcctgatatctcacagaatccattagtttcattttgagagtggaacggctgccatttgtaaacaaccttccacaatatttcgctgtgtactagtactatactactatacacagaaatctaatatgcgtcacaaacaggaaagaactggcagaaaaatatacgcctcccactttccttgcaaaactgtaggatatccaaatgcatcgcgaatcgcagcaaaccgagaaatcccacgggaaactattttaatccctcgagagaatatcccctcgttctttgtatgtcactcaaatggtcatgaaaaaaattgaaaaaaaatgagaatgtgtattaacatgtgatataatactctacaaacatgtaagttcaaattcaactcctatatatcgtaacgaaagaaacaaattaaactgtagctagttaacatatatttagagtcaaatttgtttttttcattgtgagatgtagaagttaatttttttacttgcctgtttgtacagtgatatatcacatgttaatatattttcttaaatttttaaaatttttttcataaccatttaagtgacaggcaagcaacgagaggatatccgtccgagggatcaaaatcctcttccgaaatcccacccaaatttcattcctgctgaaggaactagaagctttataaccgcgataaaaaatacaagcgacagcgatttaggcagtagaatcccccgcgacccgaggagattagtctaattaacaagtgcagattccctagcatctcgtgctgtgtttaactgcgtgagtgcgcatccgcccctgattcccaacttgcgcctgcttgtctggattccacagaatcacgcctcggatcttctgcgccaacgccgccccccttcccaaaagaaagaaaaacaaacaaacaacggcgttggctacagttgggtgtcgcccagcctggctcgaaaacacacacgcgacgcggtcgcggtcacgcacaaaatacacgacccatgcggtgccccctcccggactcgagttctccataacccaacccagcggcggaaaccctcacgtccgacccctataaatacccaccatctgccgcgccatcccatngcaacgcacgcaaattcacagcaacacaagcngaagcacagtagaacgcctaggaaatactacgtcg

SEQ ID NO: 1713 - DNA, 2000 bp, Oryza sativa
cttgcagaagtcgcagagcagccaccctgcgccgttgcaaccttcgcactctacaccttcttccttaggacaagaagaatcatcacagccaaggtagttcaacagcatcagattcgaatggtttttgcatcgaaaccacacacagtcagattctcagcatcagaagagagggcgaaggctaccaatggtgttgatctagggtatgtttggatccttcgctccgctagcctggctcagcaaggctaaaacatctcattgccagcttgctagccttgccgtacccctgtgtttggttggtttgcttccgagggcaaggaatagtggctagctgtttgaatccttcaaaaattattgctttgcccaagtttattttgcttcctttttttgtccaaaaattaaaaggcactggtcatgttaataatcttgcattgttttttttcccatagccattcttttgctagtagtttattactaccttaaagttatatggcttgtttggtttagtaccctaccaatatattggtagtgccaaactctacgcaagttttggcactaccaatattttggtagggtagaattgtaaatgagtgtctttagatcaatgtcaattgagagccaaattttgaattgtggtgaagaacattctagaattgtgccaaattgaatatagtcattacaaaatatttggcttcaaaccaaatcatcacatttactatttaaactaccaaaaaattggtatggcaacattttgatatcaaaccaaaatggcccataatattttaggattcacaaatgagaaatcaagagaattccttaatcaagtaccatcataataaatgatcttggcaacgcaaaggctgcatctagcacaaagcaaacgatctcaaagacgctcttttctaactctaccaacttcctgacagagcgattgaacaagacagcacaccatgtatctcagaaagaagaggttaggagctgacgataaagaagaaatcaaatctaggagtctacgcggatgagatcgcctccggattgagctgctgctaatgagttcgtctcctgatcggggagagaatatcagcgattccggagaagtccgcgtcgcccgcagacaatattttcacgcgagtgaagtttgacgtcgaaagcgagccaaattggctctccctagccggcaaggtttttctcgccctgtacaactaactcgcccttaaaagccaagctattttactagttccaaacggatagccttgccaggcaaggctagggtgacccttgcccaggatccaaacgtgcccctagtgatctgaaccgcctatggtagatcggacggcggagggaggtcaaggttaggacagttacaaatggtaagcggttggacttcctagagagaactaccacagggcaccactgctgtctcgctgacccgtgggcccgtcctgtcggtgtgaggattgcacggttgcaccacacactgctccggcaaagcgccggcgagctcagggagcatgcaagataactaacctctgtctcggcctcagcctccggcggcgccgccggctccaccgccgcggccgcggcgacctcccttggaacggacacgcagccgacgaccccgcccttcctcctcgtccgccgcgacggcaccggcagagccgccggcgacaaggtacaccgccaccggcccacccacctgtctagcccagccgcgccgcaccactgcgccgccgccgccgccgccgccattgttccgcctctttacacctcgcctctccctctccacctcttctctccctcctcgtgtggataaagccgcggggaaaacgaacggctcccgcgcctgacgcccgggcccacgcgagtccacgtcggatcgtacacgaccactcaccaccgaggctgacactggggcccacacagaatccaactcgagacatttttaactcacaagtcaacggctccagcgttgaacacttgaaccagatctcgccaccgcgtcc

SEQ ID NO: 1714 - DNA, 2000 bp, Oryza sativa
ccaataccccagttggtcctatacatatgacctgcgatcaggaaaagaatagcaatagctaaatgatggtgcgcaatatcgctcaaccatagaccgccggttattggatctagccctccgcgaaaactaagaaattctgcgtatttggaccaattcaaggtgaaaaaaggggttgctccttcggcaaaactaggataaagttgagccaaaaggtcgcgattcaagataaattcatgaggaagtggtatctccttaggatcaaccccagcgtcaagaaattggttaatcggtaaagatacatggatttggtgccccgcccaagaaagagacccaagtcctaataaccctgctaagtgatgattcaacatggattctacgtcttggaaccaggctaatttgggagcggctttgtgataatggaaccacccagcaaaaagcattaacgatgcaaaaatcaatgcaccgattgcggtacaatagagttgtaattcactagttattccggatgctcgccaaatctgaaaaaacccggaggttatttggattcctcggaaacccccgcctacatcaccattcaatatttcttgccctacgattggccaaactacctgagcactgggtccaatgtgagtaggatcacttagccatgcttcataattggaaaaacgggcaccatggaagtacatgccactcaacccaagaaagataatggagagttgaccgaaatgagcactaaagacttttcgagagatctcctccaaatcacctgtatgactatcgaaatcgtgagcatcagcatgtagggttccagatccaagtggtagtatcagggcccttagctattgttcttgagaaaatggccgggtcttggcccatttcctcaaaagatgtttttacaggatccctatccacaacaatttttacttctggttccggcgaacgaatcatcattaagtcctcctctttccggacaagacatacaaagagacccgccaactttttagtgaacctttgaaagatagatattatgattagtccttttctttactatctaccgtccttctatttttttttagttattcactggagcaattatatattgaagtcaatctgaggcaagtgttcggatctattatgacataaggattgggtgcctaacggactttttttatcttggatttctccacgtaacaaaaaaacctttttttaatttaaaaagctagtctattttttttaagagtataagtccctatctatatctacatatgcgagctggcagttgacctgaccatgcagatggcctacggcgtacgtgtttgttcatgcaatgcaacacgtacgtaatgagctagttaataacgtcgacgtcgtcgtagactcgaaagtgtgggtggtaattaacaaattaaatttagtgtgagcaacgtagtaagtaagattacctgcacatgacatgatgagacaacacgcggtttctatatatcatattctgttttactcccaaagcaatgcaaaaaaataattataagtgctaattaagctagggaaattaaggcgttcaaccgatcgagagcagagcactacactatatactcctactccacatagttagcttagctatacctgcaagtgtactgcattactaattataattactttcactgccttaggtagacgaccgaaagaaaggaaggcgtagtcaactgcgttgctgacccatcacgaacgcattaatttcatggtcaacgccccccagcaatttgttccttatagctaagctagctagccacttaattaagaagacacagctgctgcattcgtcgtatatatatatcgatagatcactagctagctaattgagcataaccaaccatatatagtgttgttagtatacttgatcaaattaattaagcttttttccccttgattgatcgatcgaaagagtaccgcgaatcgatcaataatcagattcaatggcagcgccgcggtgggcggcgttc

SEQ ID NO: 1715 - DNA, 2000 bp, Oryza sativa
gctggtgacgcggtggacggtggcgagcaagtagcggcacccggcatcgccgatatttccccctcacgagtgaacaagtgcagctgcaaatgaggaccacattgcgctattcatcaggagcgttggatgcttgggggatggtggatcgaagagctactgccctctgacgtagttttcccaacgtcagaggatccggttccgacgagggagtaatagatccatgactctaaccgccatatataccaccctgtgcttttctgtgtacttacctactatactttattataaaacttaattctttcattgtatttaaatcgaataacttcacaatttatttactctatccgtttcatattataagtcgtataactttttttcataatcacattttattaagtttgaccaagtttacagaaaaatttagcaacatctaaaatatcaaattaattttattaagagggcagctaccctacgggattctgttgcaacgtggtagtcacgggataactaaatcccccgacatatttttttttgaccgaggaccacactgtccacgcgattccaccccagccaaaacccggctcggtatcacgcgcctccgcgtgcgaaacctcgccggcggcgctgccgccgtgactactccgagcaggagtgctccttcctccaaccagctagaaccctgctttgcacgcaatacctcgctggcgccgcctgcaactactcctaggaagacttccccccagccagagcaggagaggaggactttggttgcgacagcaaataggagacaaggatcgagtctaggtaaggcagaagacaagagaacacgtgtcgtgcttgatacttgatacctcgcaaccagccatgatacctgatgccttacaggtgctcggtactaggtctgatacttgataccttgcaggtaccaggtctgatacctatgggtactagccatgataccataggtactaagtatggtacctactggtaccatgtctgatacctggatatcaaacatgatacctacatgtaccaaagtatcatgataccactaaagtatcacggcaataaagaaccaaaaatcatatgtttatcaagagagagttgaataaaattaataaaggaaatcaataccatgaataagtcatcatagctgtagaatcacccatagaacatgtagaacccaaaatcaaacacagaacaagacaacacctgagcttggaggtcgcgagcctagatctgggtgtacagatcacaaagaggtctcttgtccttgatgacggtgacctcgtcgacgatggccacctcctgaaatgtggtgagcagctccgcctccatcatgtgcttgggcacctaccccacgaacagcttcacgatcttctcctctactccgcccatgcctccaccagcagcaatggcggcggcggtgatggcagcttcctccacgctcgacgcgccaccctgcaaggccagttgccgccgttgcctccgtgctccatgagggtgctagtcagaaggagagagagggagagaggagatggaagggaaagtgatgagaggataaggttgaatagatggtgtgaggagtgagagttagaaatttagtggcagtagttatcctgtgcctatggaatactgttaagtggtttttctatttaattaattaacattaaatttgataatatgtttattttgtgttaaaaatactactatatttttctataaacttgatcaaattttaaaaagtttgagaaaaaaataaacgatttaatatgaaatagatggagtagcctctttttgggtctttcaccaactcaaagccagcgtgcaacggtattccagcagatcaccctggatggtgcaccgttccaccaaccccacgttcccagctaatatagctctgaccgcttccgcaccgcgccggatcgaactcatcagcatcagcacatctctcttctccgctccccccgaaatcctcgcgcgagccgccgccagccacg

SEQ ID NO: 1716 - DNA, 2000 bp, Oryza sativa
  N_region (470)..(470): n = any nucleotide
  N_region (472)..(472): n = any nucleotide
  N_region (767)..(767): n = any nucleotide
  N_region (807)..(807): n = any nucleotide
  N_region (822)..(822): n = any nucleotide
  N_region (933)..(933): n = any nucleotide
  N_region (936)..(936): n = any nucleotide
  N_region (947)..(947): n = any nucleotide
  N_region (1058)..(1059): n = any nucleotide
  N_region (1895)..(1895): n = any nucleotide
  N_region (1917)..(1917): n = any nucleotide
  N_region (1960)..(1960): n = any nucleotide
  N_region (1967)..(1967): n = any nucleotide
atggcagcggcatgcatgccaggagatacttaacgatcttctccaccaagaaatagcacaacccatgtcataattaacatgcaacatggatctggctaggtgtcacgccccgaactaatcccgaccggaaatagcccgtgacgctccaaattaacctgttaatcgataccagtcccaggaaacagtgttggtatcatagggagatagaatgtcacagcaacagaggtctctttattatagagtagaggtacagtcatgttgggctgcggacagatcccgagctcacaactgcattacaaaagggaaacggaagccaggacttggaccaatcaacacaggcgcgacttgggaactaagccgaaaccctaaaactcatcgtagccggcttgctcctggaagaactccttatcagcgggttccgcttcatcttcttcagcaactggggggattatttatatagagcaagggtnantacgggagtactcaacaagccatgggaaataagtgtttaatgcaggcttcaaggaaaggttgttgtttttgcaattgattttatttgaactcttttctaaaaacaactaagtgagtgcttctcaaacgacacggatgagacagtgcgtctcgtccggtcggagtatgtgcaatgtatcaatctttaaaatagatcaagattggcacccggccaacagctttcaaacggccacccgggccaacaactttcaaacggccacccgggcctagctgatcccatcagctgcagattttcnaaacatcgatctcctttccaccacagcaatttcacaaacngtaggcaaacaaaantacgctaggaatcacctcacatccgcccatgaccgtgggcacggctgttcgaacagttagttaacctctgcagaaggggtacactttacccacacgacattactaacccgnatnacccagcccgnggggatcggccacgttgggagacctccaagctttcatgacaaggcatttcgaaagccgacacaggtttaccatatgccgacgagagggtcccagaccaacaacaagttagnnccagaccatactgtgccaggaagcccaggggtcctccccgacaccaccccggcgaatccacatgtctctcggcatcaaggctcccctgataagctagttactcagccaggggtgtcccattccacccatgtggtcgtacttgtcttatgtttggatgaaattccaaggaatcggtccttaagtgcgagagagggaaaccgtacacccggtacgttccccggttccgcggttttggaaattcatttagttcgcaagcaccgacccaggtgtcgggttttccaagtcttttgtaaaacccaagttttacccaagttgtttttcagattttaagtttgaaggcgtccgtcgatactcgcacagggtgcacgaatatcgagacgcaactagatggttacaaggggacatgatataacaattaacaaaggaaggatcaaatgcaacgaattaggtaggtctgccaatctgccttgcagacgggacaacagattaagtgcgatcctatcaatgcataatatttttcaagcaacataattaaattcaaatataggctcaagatgttcaaaggtggcttgccttgctcgagatctggagcttgatccttgaaatcctcgcactgctggtcttcgggctccgaaactatacgcaaaacgggacaactcaacaaacggcgaaaataaagccctattaatgacctctaagcatgccattagatagatctcgagatttgaggaattttggaagttgaacggagtcaaacggatttacggttgggaagatattgaatttctaagattattggatttttggtctaaaggaaaaggatttaattaaatccnttttgaaaaagaaaagaaaagnaaagaaaagagggagggaaattagacttccctcgggtggctanggcgcgncccgagagaaaaggggcggctcggccgagctta

SEQ ID NO: 1717 - DNA, 2000 bp, Oryza sativa
caccaaaacacaggagtagggtattacgcttctcagcggcccgaacctgtatacatcgcccgtgtcttgtgtgtttccactctcgcgaaccttccacactcagaccaagagcttagaatctcacccagggcccccggccgaaccggcaaaggggggcctgcgcggtctcccggtgaggagcctcatgctccgtcagactggtatcgattaacaggttaatttggagcgtcacgggctagttccggtcgggactagttcggggcgtgacatcaacctacatccttctcgcaaccgtacttcagtacacttctttatcttctctcactatgattctcttacaccgtcatatccaccacgcatgcacatgcctccgcctcttaactactccaatgtaaaacttacctcgccatcaacactactctactcctcgcagccaaggtggcatcaccgtcgtcccgtcacaacccgccagttgagggtcatagacatctgatacactgtgatatgatcaaggagaagcgtctgtaacaagtgctctgggaatgtacgttttggctagccatgttaacaaatttaatatcgtgtctcgatgtttggatctcttatggtgttcttccatgttttgctaccaaagtcgatctcagtgttagttttataacataaatggaatgatataaatttgcatgattttgctccctaatttctatcaattgatgtcagctagtattttcttgtaaattaatgttttagaatttgcccacgaaattcagatttgtatccatatcttttataagtatatacaaattattgacgtgtattgcaattgttaatgcgaatgccgagtttgaggtgaattgtgtaatttaagttatgtttcgccttcgatatcaattaatcacgggtttagtggtctgtcattatgtggcgggacttgtgatgtaatatgagaacttgatcttgtttggtgtccgtatccggttcaggtttggagatattaggccggcagctgaagaaaggtcacgggccgtagtttagtttcaacaatataatccccatatctagtagtgaagatatgggcgtaatttaattgtaaacatttcctgtgaagttatattagcgattgacagagactatatatatacagtatattaattgtttgactcactttcatgttatggcagagacaagaccatttttttttaaagcggagacaagaccatttggctttctttctgtcttcgttctttttctttcgagactgccttaatggcatttgactgtaaaacatttcataaaatcttacaaatttcagaccattacatcgttttaagattcgtgtgttgtacgcctacctctaaccctaacgcctcctctctcgtcattcccagcaacaccgtcacgaatgaatggatcaattgggcactctcgatatcttacagtaaaagtactaactgctgtaagctaggcacggttaattaatcatgtcatggtatacacgatcgccttaattaaattgatttctcactatacacgggacgttgaaatggtaattaaattaagccgctctctctcaaaataaacaagtccttaaatttaagggattatatatattgacgatatatatctagctagctagcaaatcgatcaggttgtttgtaccttactgttgtcttgagggtatgtaggccatgtacgtatacgtacgccagatcgatcgatctttgcagcactaatctatgtatcatcgatcttatcttgaaggtctgcagttagtgttatatattctagtgcaacaagtaagtaataaaattagcagtggcattaactcgatcgatgatggctaaactgatccttccaaaggactgccctataaatcaatagtgagagagagaggtcataattaagcagaacagtagcaattagtaagacagtagcttgtggtagagcttgtaaagtgtgtagtgtacgtagatagcaatataatggctgcatcagtgaag

SEQ ID NO: 1718 - DNA, 2000 bp, Oryza sativa
cacccttctcatcataataaaaggtgctttaaactgggtaataatttgattagctcctggtttggaatggtatattcctggtttggagatagaactgtgcagtcggggtggttgttcagaatggttgggcctatgcaacagggtatgttgtatagtgttggtttaatattgtttaattatcacttaactgttttataattctcaaatgtttgctaaatgctgcttttgcaaatgaaaccctactatgccatcctttggtatccttgtgcacttgcatatttgctgcgtggcttgctgagtatgtcatatactcaccttgcaatcattcatcagaggaagagttctacaatgaggctgatggtgtggaggattaggtgtagccttggtcaagctgcctgtggagtggagccgtctgcgccgtttaatttatttttccgctgcttagatctttattgattgagaggaactatctacctctgtaatgacattttattcgcttattaattagagtaataattgtactctattatcaatttgttattgtgtgcctcggctgattcctggacgagggttcacacacatgtaagcgtttggaattttggatagaaattccgggcgtgacactttgcggggggcatcccacttgaaggcgcgcggcggcggctctccttctctccgtccctctccccccactggcagcgcacagccgcccctcctcctctccgccatcgcatccagcacctccacctccaggccagtggatccactgccacgagctcgggagcagcctgatctggcctccatgagctcgggggcggccaaatccgcacctccgttgctccctcgacttccaccttgccatgggctgctggtcactgcgagcttgaggccggatctgaccaccttgagctagagggcaaccagatctacgcggttgctaggaaaccaccacgacaatggtggaggcaccgatggccagatccatgcgccacgatgatgaaggcaaccaccaccagtgtcacggctccttccccatgctctggcaagaggatattttatggatttctttgttgattttattggttttctcctaatcttgcttgttgacattggttatcccttcgatgctgcaatggatagctaatgcttggatagtagatgatcatttgcgataaactttgtgattcactctgtgattttgatgttgaaaaaaaattgtgattgattgataacaatttaaggctcgaacgcgaggtttttgtgctactcgatgcatcggttgattcgagccgatacattgagctggtttttttttattcctgaaaccttaaaggtgttcttaccgagtgtcggttagaaaatctagcacccatcagtttttcagtagtagtgtgtgcagatagcattaatcatatatgagtatatcccagggtttcatttaccgcgggtaaaccgcgcggttaccgcggttaccgcgcttaccgcgggggtacggtaaggggtaaaccgcggtaaccacgtcaaattcaaataaatttgaaaaataatttgaatttttgataaattttgtacggtttgtcgcggtttgtcacggttaccgcggttaccgtgcggtaaccgtgctttaccgccggggcgcggtaaccgcggccccggcggtaaatgaaaccctggtatatcctgcggaaggaacttctaattaaaagggctgcagcagtgtagcttcaaaaagtgaatttgccatgcaaggttatcctcatcatatcgatccatagggcaaaagcaattacaccagatcaatataatggtgtcgatcatctcatcaacagtagattccgcgtgcatcacacccacttgtccgcacacaagaagagaccagctaccaagcaatttgcagcggatgctaattcagctggcaagcaatccctccatctatatattggctgcagatgatcagatgatgcgctaaattaatcaatcatatactacacaatatgata

SEQ ID NO: 1719 - DNA, 936 bp, Oryza sativa
  N_region (38)..(38): n = any nucleotide
  N_region (59)..(59): n = any nucleotide
  N_region (111)..(111): n = any nucleotide
  N_region (141)..(141): n = any nucleotide
aaagtttaattgggaacgcgaacggttgttggcccttngttttggtccttgggttccgnaggacagcggaggtcctgagggccgccgtaaagggcgaacccgtcgcgcgcnatcggcatgaacagcaggaggaaccacacnatcggcgccggcgagcgcgagcacctggatgtggcggtcgccgagtcggtgatacggtgggcgtcctgcaccaacctgtcgacgacgcactcgctccgggcttcgctggtgtgctagcattttgtttatctgtgcaattcaccatgtgtcctgtggctgtgagagtgcttcgctagtctcttgccttcctccttgcacctgcgatgcaagctgaaagataagagtgagatgagtgatgagatgagatgagagtgtgagtggtagaatgtaacgtggacctgatgatatataatgctatagtagattaccgagtagtgtgcttgctttctgtttgttgaatgtgttccttatttttggtctcctttgtgcacttgtcactacttatcactaataccatccatcaacatcagcttggtgccatgctctctcttgaatgcttgcagacaaacttaaaccgaagttgacccccatgtaattagctcaagaaacatttcaaatacctcattatgaaaagatgatcgaataatatagtgattattggatagagatgacgtatttgctactataaagcaaagaaaaaatatggctcaagagatgatatatttggatcaagtgattaccaatttatgatcaagtcccctcttccagtcttccagtatctacaaatttgtgatcctatgggcctttgggcctggtcgctgacccagcccacggcccagccaagtcgtcgtcttcctcgatgccgctccaccgcttcttccacttcgcccgcgccggcgccgcccgtcgaacacc

SEQ ID NO: 1720 - DNA, 2000 bp, Oryza sativa
  N_region (26)..(26): n = any nucleotide
  N_region (68)..(68): n = any nucleotide
cccttcatctagttggagtatattcntgggggaaatgtacgtgttccgccccagttggctataagccnatataagggcactgtactgatcgcatgggctaatcaaacaacttgaatgaaaagaaaaaggcgaaacgaactgaattatcaggtcagagagcaaatactacatacacacaccagcaaaaaccacactatacataaatatatcgttgtcatctctgagttggatcgatctaccagagatcttccaaaaatcggcgccccaacctgtaaacatcctgaactatcccagcacgcaattaacaaagggttcttgatatctgaacagtgctgcgagatgcatgttaagtggttaattaacaaattcagacagcggtaaacgtgcgaggtagctagcagatcacatcgatctccctcccgtgtcctaggaagatcacgtctcgatcaaaaccattcgatcatccacccagtcgtcgtcgttgcttaattagaaaaatcgtcgcatatcagtttgagatcagcgaagatctctgccataataccagcgagattaccagttgaattagtttcccggacacacttgcttaatttgtagtaatccgatgctgatttgcatttggcagcacaagcaaattaaagttcagtagttaacctacaacgaggctgcagctagtagctagctaagccaagctgccaccgggaagcttcgatttgctctaatcacacacaataatcatcatcgatcgaacgatcagatgcttccgactaactgcaaaattaaaatatatcccggtcaatcccacgcgtatctctccggtccttgcatgaaatattagaaaattagcattatatatcatgcatgccctgtaaggatctagatacgatttcatttgcttcatatattcccattaattatttctggttcagagcagtgtactatatatattacgcagttgttgcgtcaactacacgagttgccaattgtttaatgcctgtgtgattagcagtctgaaaaaggccaagacatgagagaggcacgcacacacacacgcatgattgattggatcgatcgatatcaccaaattgatgatccagtttaatttgatcgatcgttagatcgagagatccaatccgtgctggatttatacgcagttggggctgcaatttgcattcccgcgacatgcgtggcctccttgaaaatgtgcctcaccggtcgcatggcgactatcatattgatatccaaactataaattatatgcaaaacccccaatctcgcctgctacggagatctcgcgaactggtagtcactgatatgtaggtcaggctaacgacggcaacattactgatctactccctctgtctcgaaatataagcacttttattatagtgtcaagtcaactatttttaactttgactattaatagcaaaaaaaaaatcaaaaaaatcaataatgtaaaattgatgtaactagatttattgttaaacaaactatcgtaatatgcaactatttttaattaaaatatcttatttttatacttattgttagttaaagtagtatcttgaagactgtgtaataaaaaatgcttatattttggacggatggagtagcaaaaatgatatagaaatatgcatgatttgatgagctcccggtgttgtagtattatatttgcacatcatgtcgcaaaagtcaccaacttgcattgcaatggcagaatggtttagctagctagctaggtagggatcgttcttggaagtagaactttgggagattagcgagccatagaaaatccgctggagcagatcggcctgaatctttcttaggatccattaatctcagcttaatttgctctgacgacgtccagctcttcctcccatgtggcttcagctaagctaagctaagctctgtataaataggcagctggtcgccatcgctgcagctactacaccttgcattgctcgaagagagaagacgagaacgtagaggttgttgcagctggt

SEQ ID NO: 1721 - DNA, 2000 bp, Oryza sativa
  N_region (1425)..(1425): n = any nucleotide
gcaacatagacagctcgtatacatccatccatggcaggaagatggagagatttaatataaggaaaaagtcctcgtacctgcaaatctagatagacgaggcaccatcggcggaagaaatcaaatttgggagcttctcagttctcaccacgagcaatcttgtgtccagtagcaatcttctgcaagaacatgctctcctcaaatcgagttggccttgctctccgatttactgcgtggaggccggaggctctactgcatttatatatgggcacgggattactgcagatgaatcgaggatgcttgaaagttcagcaaggggaggaggatgattgcaaattgactggatctgtgagccctatagttcagccaagagtgggggaagagagcgacgagatctgcaagcctgattctttggcgaagagtggaggaggaggacgaaattggggggctggttgttgaagaaggtaacaacttttgaaaaaaatcgcttcatccttatcaacaacttttttcacgcgaggagcttgccatcggaggcgagccgattcggctctcccttgtgagctagccttttctcgctcctatgggctagctcgcccccatgggctaggattttttttctgattccaaacgactgtccttgccaggccaggctaggcccctgctagccttggatccaaacgcaccctgagcctcctttactctgactcatccagatccaatggcttggaataaatcttcctttcatcagatggtcagtatttacttgatgacgtggcgcaatgtggtgaggaaaaactttagtattttcactactttagatacataatctgttgcctgtgataattagcaagcaacttcgttgtacaagctacccaacatatacatggctcagggcaccagggcggtcgcactgcccgtcctaccccaggaccagaccagaactgttcatgagtggtcgacgacggtcgagatgcgatggaaagtatggagacgataacctccacaagagtgtgcatgtagtgtctgaggcaaccgatgcgagtgtacatgtggctgaagtgtgcctgcgtcgcccgccgtgtgccagagtaggctggtggaggccgaggagaagtcgcgtggccatagaggattttgaacttgattaaataaaacatgtctttgtcttaataaaaaccaaagagaacaaaccataaatgtatttgagaaaactgaataagccttaaaaaagcacaattacttctaatattgttcattctgcccaattacttctactcttattcatcatcctcatcaagcccaattattttttatcttattcatcatcctcattaagaagcttgaggtaatcttgttcatcatcctcatcgaggagcttgaggtattgttccaacttaggtatgagggccatgacgcagggaggcngggggtgagccctagcgacacgggcatatcgcttctgccactccgtatccggatcatacctgtgcagcttccccgcccgtcggtactcctccaccacctcctcctccgtcatctccatgtactggtgcgcgtccgcgatcaacgcccgcaagaaggctttcgccgcttcctgttccgcagccgtccacttctccaagtaagcgtctatcccgaacggcttcttctcctgccgaggctgtttctcctcctccttcgcgtcgccgacggcggaattctccaccggcgtctcgccgtctttgcgctccatcgatctcaaaatcgaggatttggatggaggattacgctagtttttttttaggaaaaaattaggggacggtttggctttgggtcttggttgattgatttatttataggcgcggtctccgcctttccctgtacgcgttggcctacgagtcggactatgtttgtccgggtcggagttgagttccggctcgagatagcagcggagaccgtcggattttgatcgcacggtctgcggctccgtgtcggcctcgctggggttcagcgctgcgacg

SEQ ID NO: 1722 - DNA, 1912 bp, Oryza sativa
tttttttaaaaaatgcattatttaatactactcgtcccaaaatatagccacttttggctatgaatctagacacacagttgtccagattcatagctaaaaatgtttatattttgggacggatggagtagtttgaaaagcgtgctaacggaaaatgaggaagttgaagattgtagttgagaaatagaactaggccttagtaaaatttgaagttgttgggagggaagagatgagtgtgattagacttgcagacatagctttaagaggcttcgcctgcgtgagatcgtttaagagtctgcatgtgaaaataagcttattttcgtatgtggctctgttaagagacccacttgagaaaactgttttttatacgggtctcttaacaaaccgtacgcgaaaatgcaggtcaacttttgtagaggctattggttactaacttactatccgcctgcaaattgtatggttctcgtaaaaaaaattgtttatatagcagtgatctaccaacaaccagttttgttagtttcccatctgggacaggttataggatatcttgacaaaaaaaaaaacccgaactaccatagggcttgtttccaccaaggatcctcacctagaattgctcaactaaatgaaattttcgcgtgtccctgcggaaaatctgcattataatgctaaaactgagttatgtggatttgtcatttatgtgattatagagtcgtacatgcatgtatctgctggagttttaaatcatgacgtttataactacgaatttagacatagcacggtctagatttaacacacaatttataaaaaaactatagtagtacttttaacacaaaacaaacaaattacaaaaacatatacaatgctagattgagtgaaactaatttgatattttagatgttactatttttctataaacttaatcaaacttggttaagtttgattaagaaagatgttaaaatgacttataagatgaaaatgagtagtagtatttttgttctcttttgcaaatttggtgtttggtggaaaccaacaaaaaaacgtttcttgaacatgttttaatttgttgggaagcattaaactacaaaagaaatatgatagtcatgacgattttctcgagtcctcaacatatatacacataaatggcccacgaaagaatatttgaacttgggtccccttactcaggaaaatgacagggtgaaagcatattctgtctagcttagaatttaaatatgtgatatccaggtaattgaaccatgacaaaatagtaaatctcagtttagagataacacttgcctccacgtttccaaatatctttgcaccacattgctgtgcacaatgcaataaatccatttcacactttttggccgaaaaaaaatccattccacactgacctggatgccataaacctgattaacacgggtagatcggttgcattgaacttatatactccctccgttccataatataagggattataagattttgcttgcaacgtttgaacactcgtcttatttaaaattttttgaaattattatttattttatttgtgacttactttattatctatagtattttaaacacaacttttcgttttttatgttggcaaaaaaaaattaaataaaataagtggtcaaacgttgtaataaaaaactcaaaatctcttatattgtggaacggagggagtagaagaaaattaattccagccgtgtcatactactactaatcatctcaaacagaaaattgaaaaaaaaaacgggaaaaagaggcctggcccacaaaccaggtatggccctttgtttatcttcccgtgccacgtcgccactgcgccacaccataaaaccccattgccctctccactccgctcccctccaagcctccaactactccagtccacacccgcaccaccgcggcagcc

SEQ ID NO: 1723 - DNA, 2000 bp, Oryza sativa
cctcctaggggagtattgtatttatatagatagacaacttattctttaattagaatttgaatacaggcaaataagacctaggacacaggcaaataagaccttgccttcataggatcgagctccgacgcaagcaaaattggcaatcgtcacaatgtgatttagatagaggaaaaccgttgggagaaattatatcgatgccatgatagctagttgtgtattgccgataggctagactatatatatgggactggtacggtatcttgaaagagctaggaaagagatgctagagagttgggtctctttgatttggccagtgatttgttggtacatgaggcaaaacccctggcaccagcctatttatggttatcaggttttggctagctacaacttaattaaaaatgtttatgtttatgtttagaaagaagggagtaactttgtttgatattataaatcgttttgaatttgatttttatgtttttttaagtttcatcaagcttaaaaaaatacaataacattttcatacaaaataaacatattatcgaaatatgcttaatgctatatttactaaaactaatttgatgttataggtgttgtgagatctttctataaacttcattaagaaacatttgaaaaaaaggatcaaaacggttctaatatgaatgaatgaatgaatagaggggtacggcatgtgctctgcatataccgttactacgcctcgtacgattctgaccgggtagctagggtagggtgattaattattggtgcaaattaaccattggctatgcaggcatggctagctgctgtaactaattctccatcgatcattcgatctgccagatcggtgtcctcctgaattaatctcaaatctggatgtaaaaaagataattaatcaattcccctttcatgttgtcgactgcatgtgagcgaatgaagttcagcagctagctaatgcagttcttctgacttgcaagtcacaggaaagcaaatgcctacagttgagaaaagcacaaagctgatatctacattacacaatgctacagtttaatggacggatgatttctgcattacagcattagtacgtcttaattgcaactgtcggtcaactgctccattgatcgatctctcgtgctgttcctgcatgtgcatgcatgtatgagtacgtacgtacagctagactggtagtttaatttgattgtataaactgacgattttagttaattactatctaagcgtctatttagtttgctgtcattttcaatcctatcaaaatttagtaatgctgaattttgaaatgacaataaactaaacacacacttcaactatgtaccttatcacaatttggcaaatttaaaagttctctctctcaaaactccacttaactttggtaaaagcatcaaaccaaacaaaataatactatcaaaagtattgttgatttgataacaaaatgaacaagctgctttaaatttattcctcaggttcttagtacactgtacacctggatctctcgatcgatcccatataccagtacactatagattgctctcgccttaattaattaatttctagatctcaagagggcaacagaccccctggcaaggacagatcgaaaaacatcgctcgcctaaccattcaattctcactgaaaaagcttaatatattaggagtagtaagctagcgtgtgaggaagattcataaccatatatcatcttaattagcctttgtgatttagcttaatcacatggctaaggcacaaccacccatccacttaactcttcattactacgctagctacacgaggagagtagctagctagtacaggccccggcaagcataaatagcagcgtcccctgcttcctttcttcatcgtcctcagctcatcatctgcatgcagttcactgcacaccacacagcttagcttgctcagcttcactgatcttcttagctgcagctacttcactttgcatagtttgatcgaactaaataactcaccaagttagctg

SEQ ID NO: 1724 - DNA, 2000 bp, Oryza sativa
aaaaaataaaaggagagttcaagtaggaatacaatataaatttagctgaaattcggaattaaaaataagcaatatttaaagaagaattcatataagaacccaatatgagattaattaaaattcagaataaaaaataaaataatatccaaaattataaaaattaaaagtgagttcgagtaggaatacaattttgaaacaactgaaattgaaaataaaaaataaaaatattaaaagaacaataggatattaattaaaatttgaaaaaaaaactgaaattagaaaaagaaaaataagatttcatttaggaatacaatttataaataattaaaatttgtgataaaaaaaagactatggaaaaaaaagaccataaacatatgatgagataaattaagtaacaagcctataaatgagtagagtggtggcggttgatacgacatataaaaactattaataaaacaccaaatagaatcctaatgacgattaaaaggatggacgacaggcagaccgtgaagcaaatgaggtgattgccgggacatctagaaagtaaaaaaaaccattgataatcatattcgattaaaatctcaatgacaataaaaaagagaagcagcgggcagggtgtataggcgtatagttgcagagccaccaacggttgacgggacttttagaaaataaaaaatgaattccgatgatatttatgttcgatttttagaatcacaatgacaataaagagtaggcggcggacgggccataaaggaacatagtagaatcgtttgacgagacttctaaaaattataaaaaatgaaacccaacaagacaacaaactctaaaaactacaaggttcaatttttaaaggtttggaacttctaaaaagtaaaaaaaagaacgataatcatgttcgattttaaaatctcaatgacaataaagaagggaggcagcaggcgagccgtagagaagtacaatggcaaattaagccactaacggtttggcgggacttctagaaagtaaaaatgaacacgataattatgttcgatttttaaaatctcaatgacaataaagagaagagacaatggacgggctatagaggagtataatggcaacgtttgacgggacgtctagaaattataaaaacgaaacccaacgtgacaataaactctaaaaactataatatccaatttttaaaggttacaaggcgaatgaatagaaatagtggtagatcgagcaagcaaataaagaaggagatgacataagggatagtaactggtgtgacttttaaaaaacactccctccgttttttaatagatgacgatgttaactttttctcacatgtttgaccattcatcttattcaaatattttatgcaaatgtataagatataaatcacacttaaagtactatgagtgataaaacaactcataacaaaataaattataattacgtaatttttttgaataagacgaatggtcaaacatatgagaaaaagtcaacggcgtcatctattaaaaaacggagggagtataaaattagaaacacggggataataaggtttggtcttttaaactcttaagacaatgagatacttaataaattttaagtaaaatcatacttaaaaaaatatatgattttgtttaggtgctagccgcgcaaattgcgcggcccatccaacttgctaaccttcgttggattagcatcctatacgtggctgccctgcccacgttagcatggagtgggtcccacgtcaagctggcccccaggaaaagcgttcatggaaagagtaaaatatttcgaacccctactctttggtgggccctggcccatcacaggcgcgaggagaagcgaaagccccgcacgctgtgatcaatgaaccgataaaccataagctttagctttgcccatcaacttctcatccaagccaactctcccctcctctcctaggtttcgcctccgccgccgccgaccgccgccgccgtcgccgccgtagaccgatcgagcgggagtgggga

SEQ ID NO: 1725 - DNA, 2000 bp, Oryza sativa
actaccctgaccaagccaaaaggctgttgttgccaatgcctcgagtagttcaaaagatataccggacaactatgcatagaccgggtccatcctaaaaaagccaacctaacatgaaatgtgactcctatacaataaatctgagtcacgtttccttctaagttgttttttttacggagggagtatgttttccattatgatttagggcttattcggaataaaatagaaaaacgtaggagtagaaaaaaacacgagaatatgataagatttgcatgtgtacagagagaattggaaaataaagggattttttgttttttgtggcaccaagatttttacaaagagaataggtcagggtggattttttttcatgtgaaaacataagtagagaatagtgttcctcttaagaatcaaggtagccaatcctttgaaaagaatgagtacccctccatctttaaaaaaaaatcaaaccctatattagaatgattcaaatctagggtataatttttgtttgacagagtagctaatttaaaggaaaccctccatttattcttcgcatctcctggagataaagatgaagattaagtgtttcacgtaaaacgaggtggtaataacatgtgattaattgagttttaattattacaaacttaaaaaatggataaatatgatattttagaacaactttctatagttttcacacgaaatgtatcgtttagcactttaaaaaatatgccattttaataaaaagtttatcatctaatttttcgattagaaagggtaagggtcataatttttcgatttatatatgtggagtgtgtgctacaagagacgcttggggtgtgtgtgagtacgctggagcgtgcgtacatcttccgtgcaattgaaaaggagacaatgaaagcaaggccttgtatagttcctaaatttttttcccacaaacatcacatataatctttgaatatatatatagagcattaaatatagataaaataaaaaactaattgcacagtttgtatagaaatcgcaagacgaatcttttaaatctaattagtccatgattagtcataagcgctacagtaattcacatatgctaatgatagattaattagacttaataaattcgtctcacggtttacagacgagtcatgaaattagttttttaatttgtgtccaaaaatcccttccgacatccaatctaataccaaatactttcttttcgcgaactacaccagaaccaaatacgtctaatccaaccgtgagacaggccgtactccccccgtcgctggcgagagcttgccgtagtcggaagggagggggcatggaaaagtccacgatgattacgtcctgtccttcaggacagatcgttcgaaaccaacggcgcgctgttgcaagtccatcatcgaacgatcgacccgtccatctcggagaaggaacaacacctccaaagacaggccatcttccgacgaattgaccccctccccgctctttccagagggccgggggtagctagcggcgggcgtagcgccaattcgcaaacgtcaaacgagtgagatcccacgtcgcagcaaaagcaaaatgagtccctttctttccctttccctccaccctcgcgtcgtactcgcgtcgttctcttctccttcccttcccagcaaagccgagccgccgagcagggcagagcagagcaaaaccccccatatctccccgccattactcccctcccgtcccgtccccgagcggaaataaatgcagccgctggcgccgcccacccaccagtccaccaccaccagatccaagcccccgcgacgaggcgaggtgggagagggggcagaggcagagcgagatgagcgtggggcggaaaaattcaccacgccaccatacgcatttactccgcttccgcccctacccccacgcggcctcgcctccgcccaatgccattccgccgcttccccgctgagagatcgatccccaccgcgccgccgccgccgcagccgcagccgcagccgtcg

SEQ ID NO: 1726 - DNA, 693 bp, Oryza sativa
  N_region (8)..(8): n = any nucleotide
  N_region (14)..(14): n = any nucleotide
  N_region (24)..(24): n = any nucleotide
gccgccanttaatnggcgccggcnaggttagggggaaagtttccaaacgaatccgagggagagagagagggaaaaatggggggaaagggggagggatcccggggaatatttccaccctcttgattgcacgcggggcggacgggggccgcgggattcgcggcggcggcggcggcgctagggcgcgggcgggccgccggaacggcgggaggaaggggatgacaggtgggccccacccgtcagcgagggtggcgggcgggcccgcccgtcagcggcgcgcgcgcggggaggaggcagaatgggccgcggggaagagaagagagagggaaagagatgggccgagccggcccaagagggggacgggggggaaaaaaggactttttagaacttttctttttataaaaccattttaactttgtttatttcttaataattattatttgtgctctgaaaattccactaaaatttatttacgcattttaggcttttaggaaatatacaaaaatcctccaagccttatttgacttttaactttgcacattttaattgttggaggctttcacatggattttaattattctaggcataatttcgaggatgtattttagagtcgttttgagacgcgacagagatcgaccctatccaaaacggacagccgagatcgatcggttcacgtcgggtctacggggacagcga

SEQ ID NO: 1727 - DNA, 2000 bp, Oryza sativa
  N_region (1300)..(1300): n = any nucleotide
  N_region (1304)..(1305): n = any nucleotide
  N_region (1307)..(1307): n = any nucleotide
gtgactaatgaattctttagagtgcaggattctccgtaaaaattaattcaattttatcgatattccttaaatctttccatttcaaaggaagcctaaatgtacagtgtactacggtacaatcggtaattgttcaaaatcagaacgcaactacgcaaggcattgtgatcctctgtcgtgactgggtgttaaggtagaagatgggcaaccctcttgtagttttgtgcctgaaaaactggccagacgaaactaattgcttttctcgacttattcggatcggagcatgcttctttcaaaatcgttttaattttttttgaaaaataggataaacctgacctctacgcatccaatcggatgtatgtactgccatttcaaaattgatatgccgtctaggttctggtctaataagcaacgctagtcaaatgagacgattatatagtttcggcaattgttgactgaccatatatatgctgtctctgtttctagaagatttgtagtacttgcttgatttgatattgccaataaagttatcttttcctatctcgagagatctcagttttattcataaatatcgttgtttgagtcacttctatgacaacttggttagagcatcgttgacaaaataaaaactataacacaattggcatattcaagttttatttagaatattaagatacctgcttaagatagggcttataaaccgaagctagttttatattatagaacttaattttagaatgaatttaagtacagtttaaaactggactccttccgatcataactatttaacgttcaaaataagatttgattaaaactctaaaattatagccatccatttatttatattagaacaaatatttaagcaaaattttaaaacccggacataaatctaccaataaatttatgatattattttttgttcaattctacttatactactttaatatcgatattaagatactgttgataggtgaaattttaatagtttggtcgaatcttatcctaactaagggtgtgtttagttcacgtcaaaattagaagtttggttgaaattggaacgatgtgacggaaaagttggaagtttgtgtgtaggaaagttttgatgtgatggaaaagttggaagtttgaagaaaaagtttgaaactaaactgggcctaaacgtgagatatctacgagccgcgagatagtaaaaagtaatcccttcgtcccctaatataaggaattttggtattgtgctcgcactgtttgaccattcgtcttatttaaaaaaatcttggaattattattattatttgacttactntccnntntgctttaagcgcaaacttttaatttttaaaatttgcaaaagttttttaaataagataagtggtcaaacaatgcaagcaaaatcccttatattaggggactgagggagtatagcagagtaccataagaatcgtttattaaaatttatattttattgtaatatattatactaacttattattaaaaaattgaaaatatttttgccggtactttggtacgtcatccgtgtataagtcggtttttaagttcgttcacctttggaaatacaaatccgtatttgagtccgattttaagttagttcgcttttggaaatacagaaagagtcgtggaagaaaactttcgaaaaaactcgcatgctaatttaagatgatcagatttctaattgcagttcaccttaactaaaccgtaaaacaataataagattaaaataatcttcacccattacaacgcacatgtattattttttcagtataatataatataacaataatataccactacaatttataaaaaaaaatcaccctcgctgtggggcccacttctggggctagtacccacctcgccatccgtgggccccacagccccactccgccctgcaccgcagttgcagcagttcgcacttcccagttcccaaccccggccaaattgaaactcttgtcgtcctcacctggaaggaaccccccgaacacacgcag

SEQ ID NO: 1728 - DNA, 2000 bp, Oryza sativa
  N_region (1955)..(1955): n = any nucleotide
  N_region (1967)..(1967): n = any nucleotide
  N_region (1970)..(1970): n = any nucleotide
gaactggaatccttgatgcggctatgtgtttctacttaggaaaatattcagaaccatgatttgtacagccaccggttggaagttcaaaactgcatgtgagctattatgctgaaaatatacaaacatatatgggctggtgttagtgagctgctagtgaagcctgtgaagtgaatttgtgattctgcaattcccaagttcttgttgtcttgttgatctacttctatggtgctaatttaattctcatacaacttgtggagtcatttcggtcatcactcatctgtcaaaaactgataaactgtttgtgaccagcaccaacttgttctaccagcaaagtttggtgaagagccatatagcagataggaaaccaacccctaatattcagaaatttagaatgcctgagccggccgtgtgccgtgaggcatctaccggggtaattcagtgcgaaattaagatcttggtgtcagatgttttggatgcataaatctggatacgtttaaaacttgggcagattagtgttcaatgagtttctgtctgctggctggcctgacaagttttaacaatgctataggtcaattgttagttactcctgccttagatcgatacgatattggagttgccaatactcccagttgtttaccaaacaagcagtgtaatcttcacgcagaggtgcaaccagagagttgatcaagcatattgacaaagcacacttcagtgaacggaaaccctgtgaatttactgcaaattcagtcaacagcttaaacctctctctctaaaaaaagttttaaagctctgaaagtctgaattactgatcacgtgatcatgtgagatcatgtgaaaatatatttgtttcagaaatgaaggttgaaaaaccaactctcttttccgtgcctgtacaaaaacattttcagatttcaggaccctctcttcctcctttgttaaagcatgtattgtttatgtagttacaccatttatcttggaagtgatgtttacagcggccaaatatattccagttttgcatatgcttagattttaaagattcaaattgaaggaattattctcacaattgtgtcgattatatgttgatctcgggcaagtgaatactagtgtgatctccttatcagtcaattcgcctcctttttcaagaaaggtaagaacagattcttctcgtgcaagttgtgctgttgctttggttccaatacttgtatagctatgaccagtattcataccttttcgtacttgatacgtcctgctgatgaaacaccggtgtcactctatcagaacagtattcaggttatagaatttttttgatgtgtccaattgtccatcatgaatctaaagctccattcaaaacagactattggacggatcgttgctatgaattatctactcaattataagaataaattaaataatttaaaacatgtggtctaaataatatagttaaaggaatatattttttagaaaatgtgtttttcaaattatggagcaataatttgtttcaacaatcagatggataatctgaaaataagatgcatatgtacttaggggtgtgtttcccatttcctacttctcgtttttttacgcccatatgtttcccaactgataaatggtgtgtgcttttttaaaaaaaaatctataggaaagttgttttaaaaattatattaatctattttaaggttttttttctaatatttaattaatatgcgtaaatacatgtttcgttttgtgtacctgaaaggaggatttccaacccttactctcaaacacagccttaaaagcctacaaatgtatgagcatattggcactaaaatttgtttcgatcactttgcttactgctatagctctagctcttcagttgtcaccttttgttttctccttgtctttctctgcgatgtcgtggttgctccactctcttctcctcttctccttgcctgtctgatcgatcgcctcgccancgccgccgccancgncgccgtcgtcgtcgtcgtcgtcgtatcggc

SEQ ID NO: 1729 - DNA, 2000 bp, Oryza sativa
aagcccaaacaaaggattttcggcccagcacagcctagctccacataggagaaagtacacccaaggtccctcaacttgtcatctaattacaaaatcgtcccccaaccgcaaaaccgcacacaaggcatccatcaacttacaaaaccattgtagactagatcactcggcggttttaaccctggttttgtccgaagtggtggctgagtcagcgtgagacccatgtgggacccacatgtcattgaaacattagtctattttcccacacttctttctatcccctcccttccaagcagatcggcaacggcgtggggagcggccgtccggccggcggagcgggcaggcgacggcgcggggagcggccgggcggcgggtgctcgtcctcctggtcatcgaggccagtggccggcatgctggtcggcaacgggcgcaagcaccaggctctgacgacgaggttctccaagacgggcgcttgtccccccggtctgcggcgaaacggcattcggcatggcggacgaaggcggcgcaacatccgggtgggggagaagcgagcggaggagggtggcggcgatgaagcggtggagggcggcggcgtccctccccctggtggcgatggagacccagcggcccttccacaggcggcgcaatgcacggtcatcggcaccaccatatgccggccgttcttgtgctgccgccaccgccaagccgacacgacgccggcggcgagcgcggggaggcgttgaccgagctggaggaggacgacaagatggcgcgcggcgctggaggactcctcatgcgccgtttgccgcttcctccactccgccgccctgctcctcgtcgccgtccgctccatccctaaggagctctcccctcgcctcctctggacccccgccttcgagttcatcgccaacgaccgtggccaccccacctcctccattccacgcggtggagctcgccgacgactgatttggacttgggaggagctcgccggcctccccgcgcctcctctgggccctcgccttcgaactcatcgccgacgaccgcggccaccccgcctcctctctttccacgcggtggagctcgccggcgatgaacgatttggacttgggaggagctcaccggcctctccgcgcctccgccgtgcctccactctcgctcgttcgctggcctccgccgtgcctctgccgatgctcaaggggagaaatgggagagagagagagagaggagtaacggaggggagggagaagagaaagggtgttgacgtggcatcctgacatgtggggtccacatgggtcgcacattgactcagtaaacacatcggacaaaaccgtggtcaaaaccaccgagggattttgcaatggttttgtaagttggggatgcgttgtatccagttttgcagttgggggacgattttgtaattcgataacaagttgagggaccttgggtgtactttttccctccacatacgatattcgtgttgcggcccatgaggccatagaccatcagttaccccagcccgacccatcgtgctgcaagcctttgcaaccatcgacagttgagcaggccccccaaacgcgatgggcgtgggccgcgtggcgataatgtgtgcgccccgctcccctcatatccgtgtccgtgcacgagtgaacaacccaacccaaccgatgcgcgacgcagtgacgcaggcacagcgagttgaccggccgcgccacgtacggttggttcctcctcccaacacgcggcgggacccgtctccacgagccgccgttccctagaacgcggcggcaacgagcatcctcctccgcgtgggccacacgctgcgtttacaagcgttcacaccttcggcctggccttttttatactcccccccttccccaaggtgatcacgtctcgtctctgtctctcggcccaccgcttccatcgttcgtcctcgtctccacgctaccgtttcgcaaccacccgcttcctcctccggagaccgctcggccgccgctcgctccagc

SEQ ID NO: 1730 - DNA, 2000 bp, Oryza sativa
cgcggtcatcccctcaaccaccaccgccattacgactgtcgccgagacaactgcaaagatcgatggcacaacgaactggtcaaaaagctcatcttcttcagcctcatggcgctggcctcaccattcgacctggaatacttgctacatgcgttcgcctcccgtctcctccattgccctcctaccgaatgccgatgcatgagtctccctgtcgttccccgccattgctcttctgctgccgcgcatcactcttgtttttgtcgctcaatccaaagaaataaataggaatacgaaccctcgtccccaaagcccgggtcctagactactacgaatagaaagatttctacggatattcttcgtatcaattttataatgcttatcacctccttctgagctattcccacggtgccttcgggtcaaagcttaatccttaatagccaaccgatgcctggcaccaccgctaagcacaagggcaagaaaaagattggctttaaaagatccaaatacttccttgtgggtttataaaaaaccatatcatatcgaagaacttgatggtctttctccacccgttcgattacttcttaaaaggattagatatagaaaaaaagtagtctactcaggagaatgagataatgctcataatatcgctagtaaccaaccacaaaagtaaaccaccgtgcaaaggaaatatgggaaagagtgaagtaaggaaggaaaggagtcactgacatgtggactttatatgttaacttacgtggttggactaggtcaatgaaaaacaccttcaaaaccactgagggagtcattttgcattggttttaaaagtttggggatcaagatatccacggttacggttgagggatataaatagaattggatctatattttgagggattagaagtggactaattctgaaagcaaactagtgtactccgataacaaagttcacacctattttggggaaatctgtgcatctagaaacctattttggtccacacttgagacgccggaaaagctaaatcgcgcacgtttccgggagcagcctaactaattgaattagttttagactcctaactaactgaattagttttagataatgacgataattaagataagatttttcttttttggaagattttttttactaacagattaaaaacttttatgttagatttaaaaactttcgacttaagatttaaactttgaagttgaattttaaaaactttcaactgaaactttgaaaattttcaaatcaaaatttaaatttatacgaaaaattttgaaaactttaaaattagatttgaaaattttcaactcgagatttgaaagtttcttcaaaatgaaaaacttgtaagttaacatttggaaacttttcggctcaaatatttttgaaaacacgtgtgctaacgattaaaagtataagggaaaaaaaggaaatacgcgtgaggggaggaagcgaaaaagatggcaaaaaaatgcgtggggagagtgagctcgagcgccaattagcaacccctagacgctgtgagtaacggcctaaggccattcacagtgcaagcacctcatttgcgttacctcgtatgccacgtaggatagatacacaacgaatccatacctctcacagtgcagggtacgatccccaaaccaaccaccccaacctattctctctcccgctttcccctttctctccttttccctttccctctcctactttcactcccaccgacccgacagagccggagcgcgcggcggtacaggtcgtcgtcgcccacggcggcgcgtgccgtccccgcgaatctctcggtggcgacgagaaggcggagcgaggaggacggcggcggcgcggatctggagcggcggcggcgcgaggggacaacggcggctggcggattctggagtggagcggcgcgcgcgtcctcgtgctcatgctcgtggtcgtcgtccttggagtggtcatcggagtggtcatggcgggcggcggcggcgcgtcgtcctcggagcgg

SEQ ID NO: 1731 - DNA, 2000 bp, Oryza sativa
ctttcctgcctccttcctaccttcctgtatgattgctatttcttgagtagattaaccctgttccctgatgtggggtttgtacttgtcactttgtcagcattcatgctagtttctagagcttagagccctagtttgttaatgcaaaagcatattataaatatatgtaccatctggttgtaaatgactcgatgaaattctctagtgaccactattctcgtgtacattgttttgaaccaaacacctgaataatttgatcagtaattaatcattcgcagctgccactggatatctatgatccaccgaatgattgccttgttctgtaattctggcccgtcttgtctggtgagagactttgttcatccggaccgctttgtagtaatgttaatctgttttggataatcaatcaggtttagtgatatcattgtgttcaatgtcatattggtataatggtgatgtgagagtaaatagatatatgattcatgtaacaatttgtttagcagctggtggttttgaaagacgaacagacggcgatacctgaaccgtggacgggccatcatttgttgttgtttacaaaaaaaggcaaattgctggccaagttgcatccataattggaatttggatgcgtatatatccttaatttgggattaatatgggagagggtaggaatggagccgcgactctatatctactagcgtgttgcagctgggccagagttgttctattattgggattatccaagacaaaagtcggcaatatcctatatagatatgattatccgtggacctaatataatactaagatgaagaacaaaaggacttctagttcatgacgattagtactgtccttgtttcctgaaactattaataaaaaaaatagtactactagtttgataatcaagtggttcaagatcaagtgtggtgtaggtgcatgcttgctctttatttcgtgatatttgggcgaggaagtgaggattagacatggctaaggcaagatagtactctctccgtttcataatataagggattttaagtttttgtttgtactgtttgaccactcgtcttattcaaaaaaaaattaaaattattatttatttttttgacttactttattatccaaagtattttaagcacaacttttagttttttatatttgcacaaattttttaaataagacgagtggtcaaacagtaaaagtaaaactcaaaatcccttatattatgggacggagggagtagtgtattaacgaggtactactagtaagatgcatcaatgatgattacaacgggctcccgtttcggcccaacgaaaagcaaagtaaagtgggcctcgattgcgccagaagcccatcccggccaactaaaatgggccgcacgtcagccgcacaattaattaatggaataagttcactttgggtccctctatttgtagcccagtccgattttcgtcccttgaccgcaaaaccgggtacgacccatccctcaacttaccaaaaccgggcaaacgagatccctcggcgatttcgaaggcagttttggctgacgtggcgcctacgtggtttgtttgacctaggtcttcgccccacgtggcattaacgtggcgcttacgtggcaattatatcccggaaaaataataaaaagtgtggccccacatgtcagctgcacacaaaaaataatttaaaaatgatggggcccatgtgggccccacatgtcagcctcactactttcttcttccctatcccctctctctcttcttccctttcccctctctctctctctccttctgggcagtggacggcgcgtgtgagcggctaagcaggcgagcgccggtggctgcggcgggcgtggtcggcatcgccccccgaccggagtgccgcggacagcgcggcgtatgcgcgcgggtgaccgaagaagcgcatgcgccgggcggtcggagtcggcgagcgccgcgacgtcggaatcggccggcggcgggaggatgttggagagcgggaggatgttggag

SEQ ID NO: 1732 - DNA, 2000 bp, Oryza sativa
gcaggcggccatgggagtagcggtggaggacacatgggagcaatgctggctggaggcgccgctgcggctgctgcagcctatggggcacacaagatctcttctcatggccatggtggacacatgggctatggaggccatggaggctttggtggttacggccatggctacggcggtcaccacggcggcaagttcaagcatggcaagcacggccaccatggcaagttcaagcatggcaagcatgggcacggcatgttcggtggtggcaagttcaagaagtggaagtaatgcgcatgatctgatcatgctggaactctgtttaggctttaactgaagtgcttgcgcttggctggttaaaagcctaaaaaaagcctctcgaatgtatctaagcaggatggagctttgctcagttgctgctcccatccttcctctatgatttggtactctagtatgtggctcagtgacaatatggcttgctaataattaattaaataccttctgacgcttatgcacatctgtgttctaatgttctatagcctgatagatatgatgtgttgaaaccttctttgctgcttttctttcttctgtgaaagtttatgttaccatttattggtaactgctgtctcctgggacataattgttggtttctgattgtgaatttataaatttttaaaattttggatgtgcaatgcaacattagactggggagatccagatttttttcagagatctgagctcttctcgacttctcctagcctcctgatatagttataaaagtggtcagaactaataagatagataagttgtcatatatgttgacaaattgtcattgtatccctataatttggatggaggtatattcttctttgcggagttgattgataagtaccctttatgtaattgtggttatgaattaaagtttgttttagtctggtgttgactagtactctctctgtttcatattataagattttcgtattgtccacattcatatagatgttaatgaatcttaaacacatatgctagaaagtcttgtaatataaaatggggggagtagtttttaatttcttgtgtcaattaaaactatacatttacataagcataaaatcaagaaaaggttttgttttaaaaaaaagattagccatgtcattctaaagggacaatgttacaacaataattttgatcaaagattaagctattttgactgcacaaattagaaaggaacattctttttgtgattaaacgtactactccgccgtttctgctcaaaacttaccgacaacgacacacagatttccggcgcatctaattcccccactatgataagataagcaaaagcaagggctatgattttacacggcagagttcaagattctcacaattaaataaggaacataaaaaagcatgctttatttatcgccaaaataaaccttactaatttctttccataagccaaacaaaccaaataggacctcaccattatgacctttaccaaaatctaataaagttccaaaaccaaatagcactttcacactaataaccttatgatctttctgctttacaacatattggtaagatttattttagcaacaaagtaaacatgccataaatgaaaaattagaacaaccagtgcaagtctccttctccaataaacatctccttccatacataaacaccaccaagtcaaaaatcagcacgtcactacggctatatatatagtacacgtgaagaacaatcaggtcgcaatttagcttttactattctaatcagcaactccaaccgatccactaattacacgtcagcttgcttagccgcgtcgcgctgctctgcttgatcatcatcaccttctccgatcgatcctcctcgacgccgcccacaaatataaatcccacacgcgtcctcctcctcctaataaactcctccaattcctcgacgaatcagttttctcctctgattttccaccacaagatctctagtttctttgatttcttgatcagacgacg

SEQ ID NO: 1733 - DNA, 2000 bp, Oryza sativa
ttttgcaaacttagtgcatcaagtagtgattacaagcattgcaaccctcttattgaacatataagcaaaatttaaactctattcgtttgcgcctcaaattccccctcaattatactatattcatgtttattttgggttcgtgaaataaacaggaaactggtatagcctgcaaaatccttcctaacaagctaatcttgctgaacccagcgcaaacaaagggcaatcaatttttgtagtgaatacaaaggggatcgatttaggcgatgcaagcgacctcgaattcgcgatttcgagtcaactcgtcactcaaacgttggccattgcgccgtcagggacaagcactggcacaatcgctgctctcctgctcgcggatcgtcttgccggcgccgggtggaggctaccccgagagctcaatagctcggagagacgggagctcaataccgcggacggcgagctatggcggccgcaagggaaggtccgccctaggtttgcggcggggagggagggttggtttgtggcataccgaggaagaggcggcgctggtcggcgaagtcgtggtactcctcgttctgcgggatggccggggtgacgagcatgagcacgacgaagatggtgaccgccgccacccacgccacccacttcttcctcctgctcacatccatcgccgcccgctgccgccgccgccgccgccgcttctcctcgtcgcctcctccctgtcgcgatggatcggtggtggaattggaattggaatcggggcgaaggcgtaaacccggcgtacgctttgtcattggggttgtttgtttttgactttttccgagttgggtgttcgcttcacgccttcaccctgctcgccttgactcttcatcgcaaactcttcttcctccttgagttcgaagcgagaagacgaagacgaagcaatcctcctcctcctcctcctcctccatggctacgtctcgagctcaagtggtgacgtgtccatgtcgtccctgcatgaggtgcacgtggccatacacgtatatggctctgcacagttgatccagcaggtttattttattgatttctttttcgttcattagcagagttgatcagatttcgttatctgatcaagtgctcgagttcatttcatgggctagtgaccctggaagattatggcattgggataatcatgagagatcagcgagcaggtttcattgcatttgcagttcatgacagtttcagataaattaagctctcatgtcagacagtcagcggctgaagctttgtgaacggttaaacgggtactgaagactgcgaatctgcaactagattaaccaagggagaacatgtgtagcctactaatttatgccattttgttgtggctcttcgtgatatgatggagctgacgcatcagtttcagaaactgttgcgtcaaaagaaaaggtttcagacactggtgtatctgcattctgttgtgctgacgctcaatactatttctcactggaatgttatatacttctggaatattctgttgtgctgacgctcaatattatttctcactggaatgttatatacttctggaattttggtctagttttaatttccctctacagaagatatgatgcttattagtattagcagtatctgtaaaagtttcaacttagaacaaaacgggtccttctgtccaacggggacgtctccgaaactaatcataaatcctgatgacggtagtactcaaaactagtagtgcctaataacgagagtcgtaaatcaacaaaactccaaatgcaattcatacattgtcactggatatattggattcaatgccgatccgggtgtgagagcccacagaggcatcgtgatcgatcataattcgtaatgaactctgatatttaaccaagatcatatggacgctgcagatgcacctccttgacgcaaatatctctccctccctcatcgatcgatccatcgccggcgaagagctaccttagctattagtatcatcgatcatctccggcgagaag

SEQ ID NO: 1734 - DNA, 2000 bp, Oryza sativa
  N_region (1984)..(1984): n = any nucleotide
  N_region (1988)..(1988): n = any nucleotide
gcttactagttaatatcccacgctttgctacagaacatattgatgaacacatgttacatattatagaaatggtacatgtatacgtttaaataatataaaaataatgtgaagataacgacttggcattgcttcgatattgaattatgaaaataaaacaaaattataaaataaaacgtatgtcatatttacatgatatttaaaataatttaaataataattactaatgggtgatgatgtgacgcacttgtatgtgatttaaaataccatagataataattgctaatggatgatatggtacacttgcatgttgagatttaaaagttagtgggcatcaactttatagcaaaacatgggtatgtttcattaatcagtaagtagccagaaatctaaaaaatattatcgataagcgctccaacgaatccaactttttaaaaataccatcgtataagcacatttatcccaaaaatataatcattgttaggttttcattagcaattattcgttaaagtgttataaaaagatcatttttacttctacgaattgttaaatgatgattaaaatttttgctctttttattagcttacattaatttggaattaaatttaaaatatactgttcatttgggtttttttaaaaaatattcgacagcgaacggtctcgctacttccttccttgtgcgacagcgaatgttttgcccagtgagctgttgtttaattagtaactaattacccgattaataattaattagtaattaggaataattattataattaacgattaattgataattattaatcattaatgaggataattaatcaatttgaatgttcggtctcgctcgccggtaatgcgagagcgctcaatttaatcatttccgtgcaacggttcagcgagatcgatggtatattttcgttaaacaatttgcataccgaatacttttttaaaaaagccaaataaacagtaaatttttaaatttaattccattaatttgtatgttgctatttatactaaattattgtaagttgacgtaaatagcaaaagtttttatcagcttttaccattttgtagggttgctaacggaaacataacgaaacccgccgtagtcacctccttgccaccactgcctcggtgccagctgtgtcctagcgacaacggcaccatggacgacaacaagctccaccatggcaaccttcctcgtgccgcccattgcgtggtcaccacccttgccaactccgcccgttggggggccatccttcggcctctgctctagaccgctaccgttgtcgggtcttatccataacagtatagtggggtggctttgtctgacatggcaatttgacccaagtcaacaacgctgagtcattgtggacaacatatgtcacaacctcttacctatctctctcttcctcccctattcccatctcagcggtgcctggtgaggaagacgacgtctggcggcgggtcgacgatgggcggaggtggcaatgaggggactacggcgggtacttgagggacctgttgtgtctgatatttcggttgaagatgaaaatcgaactaagctgtcaaattaagggtcctaaaatgaacttattcaaccacctaaaccagtccgatatcctctttgccaagctcacggcccagtacgcgaacccgtccgtcgtccgccacggcgccaccacgccgcccgcaccgcacgcgcacggcaagcaagcgaaccaagcgaagaaaagcacacatattcctctcctccctgttcgattcccctcctctccacgcctccgcggtgtccaaactccagactcccccaaaaaatcccccaaaaccgaagggaaagaggaaaaaaattactcttcgctctcgcgtcgcgcacgacacgaccgagccagcaaagccgcccatccgccatcccgccgctcctgcaatctacagccgcgtcgccgcttgtccgcctgcgctcgttctcgctagggttcggaaggggganggtngggatcgcccgg

SEQ ID NO: 1735 - DNA, 1041 bp, Oryza sativa
  N_region (3)..(4): n = any nucleotide
  N_region (11)..(11): n = any nucleotide
  N_region (15)..(15): n = any nucleotide
  N_region (17)..(17): n = any nucleotide
  N_region (35)..(35): n = any nucleotide
  N_region (37)..(37): n = any nucleotide
  N_region (44)..(46): n = any nucleotide
  N_region (48)..(48): n = any nucleotide
  N_region (61)..(61): n = any nucleotide
  N_region (63)..(63): n = any nucleotide
  N_region (68)..(68): n = any nucleotide
  N_region (78)..(78): n = any nucleotide
  N_region (91)..(92): n = any nucleotide
  N_region (95)..(95): n = any nucleotide
  N_region (112)..(113): n = any nucleotide
  N_region (115)..(115): n = any nucleotide
  N_region (144)..(144): n = any nucleotide
  N_region (148)..(149): n = any nucleotide
  N_region (978)..(978): n = any nucleotide
atnncgcgctntctncncacacagagagagcgcgngntctctcnnngngcccccccgggcncncccanaggggcgcgngtgcgctctctcnntgnggcgccccgcgcgctcnnanatatatatatattatcagaatataatcangtannatcttgttgtaaagatttaattgtaacgatcataacggtatatacagattataaattagataagtattttaagagaaacttctctaaaaatatatatatatagatattgagtgtactagtagcttcttttggaaagaagagtgtctctctttaacactatctaaaaagaacaccatgtcacatccaactaggccctcctcctctttgatcatctcataacaatgcggctatgacgtctcctgagggaatccccacccgatcggaatcacaagagagattattgacttatcaccgatcagcagaaaagagacggcgaaaagcaatgaagaaaaatataaaaacttcaagataagaaaaggaaagataaaaaataaaaaaggaagaaagattcttccaagccgcccatggcgtggttcgaacgcgaggtgatgccctccctccgcagccgtacacgtgtcccgatccccagaccgaatcgacggctgcgactctcgtaacacgccaccaccgcctcgctcacagacaggtggggacgggtcgttccgggacccaccgtcagtgtcacaggtggtgtcttccgcgggtgagagggtgaggcggaaacgttgttagcagcgtataaatgtaaccaaaccctaggattccaacgcgagcttatcacttatcatcaatcggcgcctccctctctctcgctcaccgcctccttctcctcgcgatctatccaaacaaggtaatttggggtggaaatccattcggatttggttcgtagtccaattgcttccgtaccacacttgctcggtttcttggtttgggaatttcgtttttttgngcaatcttgtttgatttgatgtttgggatttgattttgttatcaggggctcgctaagatcggc

SEQ ID NO: 1736 - DNA, 2000 bp, Oryza sativa
tgcagaaaagagtgatccagtaatttgcagagaaatgttggctaagaaaggtaattctacaggtttagtgagaatacttgaatagggagactgtttccagcatgtgttcctccattaatgactgtaattgcagggatgggaagtgtcgtagcgcttttcccaacaagttctgctatatgcttgtacaatggaacctgcacagaaataagcaaccaactataagaatgcattgccatatccaacaccttcttttaacccagaaccgtggtgattttatacagaactattacctctttttcagcagcacctgctttacaagctgcaattgatacagccaacatagaattcactccaatctcagcctacatgatgcagtgtcaatagttattaaagcaggacaattacaagcgatagaagctgtactgagctggctgctacaaagttaggcttgacagtaaagtgagatggtagtaaagaggagtagacattaaaaaaaaattatagaaaacaacacatcaattattttcatcattaaatctacatggaacaaaccaatgttaagaactgtcatgtggctgattatacagatcgatcgactgtttgtggtaaagcacaacccttgaataatctctcattataactctcatcaaatagagctcagcaatgtaggatcaggttaattccatagagtgagaagagatatcgattggggttttagggatttaccttgtgatgcgccttgtccaagtccatgatggcctggtcgatctgcgactgctgctgcggatccattcccacaagcgcctccgacaccttgtcgttgatcacccgcaccgcatcggcgaccgccctggcgagcagcttccgcttctcggcgtccctgacggcgtcggcggcggcgccctcgggggcgtccgcggcggccgcggaggcccggtgcacggccttgttggtgtggaggctgacctccacggcgggctccccgcggccgtcgaggatctggcgcgcccgcacgctcgtgatcacggccggcgccgcccggcgcatgtggttggagatgaagagcaccgggtcgggggccttggcgcggaccgccgcgttcacggcctcctcgatcttgcgcgacagcaggtgcttctccaggtactcctgcaccgacatggactgaggctgcggcggtcggcgtgcggcgtcccgcgctgctcctcctctcgccaacgcttcccccctctctctgggctctctcctcccgcgccctctgcctctgctcgtcggctcgtcgcctccagctgccgggatcgctaggccgtggacattggccgaactcgaggaaggggaggctcgagacgagaagtcgagagtcctcggaccagtgcgtgcgtttgggtaggcgtgggccagtttcacgatgggccggagcccatttgtgtaagcttgtaccatgggctgagtacacactgtgtctatgggccactgactaggagaagcccagcccggtggtcatttccttcccattgtcttcaaggaaaaaaatcggatcaagcactccaattttggactggaagttgctggatatctcgagtttggaagcagagaattaactgcacttgagtcagtcactgatatgtgggccccattttactatggcccacatatcagtgactcaactacacagcagttaagtcagagcatcctttccctcgagtttgttctggacgattcgggtcgtgctggtaacctgaactgttccgttcgtaatctaccgagcccagaaccaagtccagcattttcgagtctatccaggaatagaagagaactatcgagaagctgctttcctctccatccttatcattcccccgccgcatataagaacgccatcccctcctcgacagatatccaagcaaagcgagaaaagaagccagcaatcgaaagcccaagcttccaaaaatccgcttccaattcgcgaaactacactagtcgtaagcgccaaatccaaccga

SEQ ID NO: 1737 - DNA, 2000 bp, Oryza sativa
gcaataaccgtgcaaatatcgcggttatcacggtaaaccgtgcggtaaccgcggtgaaaccgcgaaactgccgagttttgaattcgaatttttgaatgtgatttctgtacgattttagacaattatcgcggttatcgtgctaccgcgaggtggcggtaacctcggcccaaactctgttgaagatctttatttatcggcagaaataccttcttaagtgacagcttctaagcataaaccactacaatgacgtgcatctaagctttatttaagataaaataatgaatagtatcaactaagcaaccttgtattcctccaattattcctggtacaatcatgaacactacatatgtatcttgcgcaacgcttagctcacagtgctatgttcttcatggccaagcatccaagacctgagatattcatctctgatacagcttctgataacactattcgttctctggttgttgctttgagcacgatgtgccgagcctaaaaacagacaccaagcactgttgaataattattgtttttatgcttgtgtgtttaacatctgaatcattttcttcttcttgcagccagattgttggatcagctattctagggggaattgagatcaatcccagccctttatttattgatccaatggtccaaattgtgagctacagtaaaattagagctgtacattttcttcttcatgcagctagattgttggatcagctattctagggggaattgagatctagtgcagttacacaatcccaaccctttatttattgatccaatggtttaaattgtgagatacagtaaaattagagctgcacattttttcattaaaaaacgctacactaatttgctacagtactaaagaggcatctaggccatccgttttaaatccaatgatactcttgtgactgcttaacttgacagtggccactgcactggaaccgaatccgtctaggggtcggtcaagaacacaagctacaacaaacttgtgcagatccattgaatccctgaaaatgtcattcgggtgaacatctcaagcaataatatacctaagctgtaagtatcacccaccttcgtgactacagaaccttccccgtactctgcaacatttgtagccaaaattagtatttaaccctaccctcaacatgtaaaaaatgaagcaccctcagtctgataggaaggggagagattaagggaataattgcccggacacctctcggtttgaccgccgcccattgtctggtctgaccggccactcagtgctgcactgttcactgacagaaaatattaattactatattttcaataaacactcgcatttaataattgctcatcgacaaaaattgaccgatcacatgattctagaggtgtgactcccatctaatttgggaaaaaaagaaatagaggttcatgcgactggttcaattgctttatgctgtgataatgctattgacaaacaacaggtgttataccattttagcgattcaccgtggaaggccggacggttgatgaggtcatacgctaagacattaacatgtttgtatagactttagagcaaaaagaaatagtagtagctcgattagcccagaaacaagtaaacaggccactctcgtgggcctcgaatcgggaatagcccagtttccaagcctgcgacttttactgggccatgagctaaactctacgaaagaaagcccaactgcccaaccatgaaaactcgtaatccccgcgcgcgcgacggaaaccgcctactcctcccgttcccgcgtacactttccgcgccgaaacgcatctcagccgtccataggaaaacaacaccaatcgtgcgccacatgctcctccacgtcatcgatccgcggcgcaccccctccgccaatcagcgcccacctctcccctcctttaataccatcgccgccgcctccccttcaactccacaactcgcaaccgaattcccccaaattttcgtctcccctttcccttccccgagaagaagagagcggcat

SEQ ID NO: 1738 - DNA, 333 bp, Oryza sativa
  N_region (27)..(27): n = any nucleotide
ccatcacaaataatataatgtatttanttttttatgaagaaaaagaaggagcaaaaatgaaaaataagaaaaaaagacaataataattagtaggagtacctaccaaccgtggactagtattacctgctgaccaaccgaccttgcaaaggaggcttatatatatactccagtaaaagctgcctgtttcatcgatcatcgatcacagacaaattaaagcatacagcaattgattcagagtagttagcttaactagctcctctgctttaattagtttgccccttccaggtagagtatatatgggtagtataggaggagtagcggtggtgctggtgg

SEQ ID NO: 1739 - DNA, 2000 bp, Oryza sativa
tattagaagcagtacgatcttatttggtggagttgaaaattataagaaacaactgacaagcaatcaaccaacatatactgaatatgggaaagtttcttttagcttttctaaattaagtactgattcttaaacttaagtgagaatctagcctgttcaggggcgacggctaaaggacatagcaccactagtctacgcgattgcaaaaaagaagaatgcaagcctgcaacaagtatcgctttcccgaccaatggttggttgacctcggtttgccggtaacctcaggctggacgacagaactaattagccaacttgtcaatgtctagggtgctgttcatagcctgcagttgacagagtacgaaaaggacaagatcacatggaagctaactagtcacggcgaatacatgacgacatcggcctacaacgcacaacttcttggcataaaagcttcaatttcaatgcccctatctggaagccctaggcgccgcgcaaatgtaaaacattcgcttcgcttggcttgttatccaaaatagagtatggacctccgacagattggcaacccgtgggtaatcgaaaatggctccatctgcccctttgtcgaaggaatcaggaaacggccctcacctcctggcggagtgtagatatgtgaaagaatctaggcgacacttgcagactggacaacatgtgaacaaataagaccaacgttatggcaacaagcctcgacgctactcaagtggtgggaggccaccgcatgttccaacgaagcgccaaagaaagccttgcagactctaatgctattagtcgcctaggatatttggaatgaaaggaaccgcagagtttttcagcaccaagagcttccggtggctagtctgatagccaaaattaaggaggatgccaaaacatgggtcttggcgggcgcgaaacaccttgataggtggcttaccttttaacatgttcgggccaaaggccttgagacggtaaagttttctatttgcgcttgcgcatgtacaattttattcctctattcaatgaaattggtggctcactggttcattaaaaaaaaaagaatctagcctgttcgggaagaagaggattttgttcgtgagagagagagagagagagagagagagagagagagagaaggaggaggaggattttcaggcttcgcattgcccaacctctgcttctgttggcccaagaagaatcccaggcgcccatgggctggcagtttaccacggacctacctagcctaccttagctatctaagcgggccgacctagtagccacgtgcctagtgtagattaaagttgccgggccagcaggaagccacgctgcaatggcatcttcccctgtccttcgcgtacgtgaaaacaaacccaggtaagcttagaatcttcttgcccgttggactgggacacccaccaatcccaccatgccccgatattcctccggtctcggttcatgtgatgtcctctcttgtgtgatcacggagcaagcattcttaaacggcaaaagaaaatcaccaacttgctcacgcagtcacgctgcaccgcgcgaagcgacgcccgataggccaagatcgcgagataaaataacaaccaatgatcataaggaaacaagcccgcgatgtgtcgtgtgcagcaatcttggtcatttgcgggatcgagtgcttcacagctaaccaaatattcggccgatgatttaacacattatcagcgtagatgtacgtacgatttgttaattaatctacgagccttgctagggcaggtgttctgccagccaatccagatcgccctcgtatgcacgctcacatgatggcagggcagggttcacatgagctctaacggtcgattaattaatcccggggctcgactataaatacctccctaatcccatgatcaaaaccatctcaagcagcctaatcatctccagctgatcaagagctcttaattagctagctagtgattagctgcgcttgtgatcgatcgatctcgggtacgtag

SEQ ID NO: 1740 - DNA, 2000 bp, Oryza sativa
  N_region (1706)..(1706): n = any nucleotide
  N_region (1724)..(1724): n = any nucleotide
  N_region (1959)..(1959): n = any nucleotide
  N_region (1977)..(1977): n = any nucleotide
aacaaaatctttctcaagcacagaaatcttctctactttacccttcaagtcagaaactgaaattgcaacataacacagataagtatctaaagaatgcacattagtgcaataaaaaataaaaagacaatcatttggtaaaacaatagtagaataagatgtttcagccatttgcatacctacattttccttgtcgccaactagacatttcacattaccgagtacttgtttcaccgcagcgacttcctttcctactgaactaaataaagccagatgagcattcagcttttctgaaatcacagcaatctgtttatccttcatctggatagtccattgcagagaacaagcagagtcctgcctatcaaacatggtatcatgagccgataatcagtttgattccacatacaggtaattcataattaatgcaaatgtcagaagcaagaacagggcagaattatatgacagattagacaatgtacaataaagcagactccagatacactctagtcttacaaatgcatagcaattgttaaggaaaaactatgatattaatggcaagtagcctcacataaatatgcaattattacaaagaccaaaagtttagcatggagagaaaacataaaaaatgagttcagctccatataaactactacagaaggaagggggaaaataaaggtaaacacctgcctcgtaatgttttatgaaagcctcctttgattgaagcagtccctccatgttatcttttaactccttttcgtttttctccagctgctcattttcattttcaaggcattttatctgtaaaaaaaggtattgcaatgaacctctgttgaataggtacaaaccaagcactaggggaagaatgaagcatccacggtgtgatgtgacataacatgcatatcaaaaatcaagtgctgcttctacctaatcaaccaagcaccaggactagtcattgttacgattcggtagtaaaagtacaaatctacactatgatagacaactggcccaaacagccccaaatgttggtataatcgccacgaaacacaacatggcaaacaccagcatgatcacaatgtgtttaagttagggactgtaatttagttaggcattaaactgtaacataatccaacacatgagctctacccaaatccatgagacgagaacacaagctacttggcgaaattgagagttgtgaaggggctaagcagaacgaaccctggactcgagccgacggagcgcgtcgtccctcgccgccacctccgcacgcagctcccgcgtctcccgacggtgcccctcctccgcctccttccatctctgctcaaattccacaccaaaacccccaccacgcatcagcaaattcgacccaaaaccctaatccccagcaaacagagaatccaatcacagtccgtagagtaagagagagagagacttggctggcggcgtggagctcctcgcgcgccgcacgctcccgctcctgcgaaaccgtaaaatggaagaggaatcagcactacgagaggaagaggaagatccgacaaggcattggatgatcggcaagcaaagctcacgcggaggagccggtgctcggagacgagcgagagaagctgcagctgcagctgcggcagcgccgcggcctccggcctccgccgccatcgccgccgcgccggtaagctcccgcttcctcttcctctccactcgacgagccaaaaaanaaaaaaactcccaagggnccatatactgggccttgccagcccaaacccttccggcccaaaaggcccatccgcggaagccgaatctccatcgaacgaactcgaccgtcgattcagatccgacggctgagatcccacccaaaccctagcccccactccgccgcctcccttataaatagctcctctctccctcctcccccaaaacctctgccctaatccaccctcgccgccgccgccgccgcaagtagccacccgngccgccgccgccgccgtngccggagaaggagaggagcagcc

SEQ ID NO: 1741 - DNA, 2000 bp, Oryza sativa
  N_region (41)..(41): n = any nucleotide
  N_region (1310)..(1310): n = any nucleotide
  N_region (1375)..(1375): n = any nucleotide
cgacgctctccgtctcgccgtcctttctccatcgcctcgtngtcggcaaagttgcggatctttcgaccccctcgagcgcctcctcccgcctaagacttcggcgagaggggggcggtggagtacgagctcgacggcgcgggttctgctccccgtcgtcaccgctagcactcagagagaggttgtgcgcttttgctcgttcggccattgggttgaacgggagaagcttggcgcacacgaaagaggatgagagcttagaaaaacacacgcgccccctacatggcgcgccagatgacggagcgtggggctcctcaccgagagaccgcgcaggcccccctttgccggttcggcggggggcgctaagtgaggttctaagccctcggtctgtggaatattcgcgagagaggcaatgcacgagacatgggcgatgtagacaggttcgggccgctgagaagcgtaataccctactcctgtgttctggtggatctgtgtatgaagaaactacaaagagttcgagagctagaacaagtttagactctagaactcgtttgctcctcctttccccttttttcttctccgtccctctctttggtgggcaaggtcctccttttataactcaaggggataccacatgctccacttctacctactcttcttttgggtggggacccaccctctcttgaccaaaaccccgttcgccttctcttggaagctaaaatatagcttgtctttgagtgtggcccagcgtcctcactcgtctgacataggggatcaccctgtcattccttcattaatgggcggagatttgcaatggctgctatccgaatgaccctccgatgggatgggtcatacctacctccactccgctggaaggaggtgcaaaatgggtgcgcggttgtctgcctatgacatgaccagcgtcagaccagtcacagaccggtcattgttgtccaccacgtgtcagtttagcaagctgcatgtctgcccttcttcatacaacgacttccttgcaatggttgcgatgaagcctggaatatatctgggcgggactgacgtgccaactccaggaggtagcacgccggctccggctagggacgagtgcctggaggctctcatcaatccgacgggacggggcgaggcgtgtgtcaggccgcctgttgccacctaacccgcgatctgaccggtctgtgaccggtcacacactgcgaccggtcacggaccggatgagcgctgcgctgcattaaatgcggcgtggcgcgctcgtccaaaccgcaataaatgcggttaggtgagccctgctgtgctcacctaanccatacacgtggcgtcaaaaccacagggggtcgggacgcccctgccctcggggccgaaacgggancggcccgacccctcggggagataaaaggcggggaggtctcgtcaccctcaggcccgacccaagggtgaccgcggctacccaaacctctagtcatgataccctcggccccatgtcatcgacaagtactacctttgtttcaggttataagactttctagcattgcgtactactaatctaaaatcccttttattaatctattcttgttctatatcctttataaacaaatattcctagagaataacctgacaataaactaataaaatcctacaaaagcataaaagatggccactttgaatctttgattatgttgcacctcaaaaaaatatatatcatatattaccctaaaaaaaccatacacttttccaatttcagacagccaaaagaagagagagtgagagtctgagagacagcccattcagaggttagttagagttgggccgagcccatatcatctcctatataaatggcccttccgagcgaacctccgccccctccgaaaccctaacgccacccgcgccgccatccccgagcaccaccaaccccaccccccgagcgagcggagcggagaacgcgaggcgaggcgaagcaaacatggcggcggctgcggtgtacggcgccggcggcg

SEQ ID NO: 1742 - DNA, 1648 bp, Oryza sativa
  N_region (3)..(3): n = any nucleotide
  N_region (8)..(8): n = any nucleotide
  N_region (16)..(16): n = any nucleotide
  N_region (36)..(36): n = any nucleotide
  N_region (41)..(41): n = any nucleotide
  N_region (64)..(64): n = any nucleotide
  N_region (71)..(71): n = any nucleotide
  N_region (73)..(74): n = any nucleotide
  N_region (94)..(94): n = any nucleotide
  N_region (103)..(103): n = any nucleotide
  N_region (143)..(143): n = any nucleotide
  N_region (147)..(147): n = any nucleotide
  N_region (160)..(160): n = any nucleotide
ggnaggtncaccccgnaaccgcccttaaacgggatncccgncttaaactccgttttcaacgaanaccaccngnnatttaaggcccggggcggcnacgggatcnctgctgctgctctcgatcgaaaggcccccggaagcccggngaantttctctggtggngtcttggggtttcgaaagggtttttttttttttctagaagcgtcgccgcgaggtcggtgtcggacacggtcactgccaggtaggccatacctggtccgattaaactgtacatcgaggccttgggccataagtccaactgcaagatgggccagattaaactgcatactaggccttggtccataagcccatgatcagtaccggcagtctaacgaaagccactcctgactgggcccatgcagagtgattgatctcgcgtgagtttgagattattgcatatatagacatttcatactccctttgtttcgaaatgtttgacaccgttgactttttagcatatgtttgaccgttcgttttattcaaaaaatttaagtaattattaattatttttctatcatttggttcattgttaaatatatttttatataggcatataattttacatattttacaaaagtttttgaataagatttcgaaacgaagggagtacttatcataacaaacaaaattaacgcctaccagaaacagcataaccaccatccactatctaaaataaaaactgatttgctaaaaacatgatgctacatttttcagcttaaccaaaaacaacacgcttccctacaagttaaccttaacaccaaaatttccgtccgcatgagctgcacctgcaccaaaaccgcccttatctgcaacggtaaaacaaatgcacgacttctaatgaccaaatcaacggtggagatgcggccagcaacaccaatatgacgtacggccatcctggcgtcaccgtgacgacgacgagtcgggcgatatgccattgttcatcttgcgagcaaaaagaacggccatatatacaagctggccacttcacgaagagctcggtccgtttattctcaccggagaaaaaaaaagattaaaattcctttcgtgttgcattttgtttcccgcttcgctcgcgaatattaaattcgaaccgaaatttcgtaaaaagtggccgagatattcgcggcaaatccaccgcccgttcgtgcgaggaggaggaaaagccacacgtgttcacacgagctggataagatgaaaccaaaaagtccaaattatttctgtgcagcaaaaaaaaaacaccacaactttttttccattaaaaaagggagaaacgggcggggtgcttggcttgacccggtccgcgtgcaaagtacgcggcgggggttacgcggggcccaaacccgaggcccgcgggccacacgcgatccggcgccccggacaccgccggccaatccggcgcggcccacagggttcccccccgcaggatagatccggacgtgacgccgacttattaaatgcgcttctgagacgccgcgctatatgagccatcgcgtccgcccgtgcaccagcaccagcacagggtcgtcgtcgtctccttcctctcgccagtgccaccacagctcaagcgtgatccagcgtcgggccgcgcgtgcgagcgagcgagcgtgcgag

SEQ ID NO: 1743 - DNA, 2000 bp, Oryza sativa
  N_region (527)..(527): n = any nucleotide
ttcaaaactcgacgatgtcgtctattaaaaaatggagaaattatctaaattatttttagagttgtggggtaaataatctgcaacaacaataatatagtgaagtagttatgaaagtattcagaaatgcactccgtgcatcaaagtgtaataacagagtgggggatgtttggctcaaacttcagctagatagtactccatccgctccatttttagtgtagccataagtttccgtatccaactttgatcgtctgtcttatttaaaaatgagtaaattgcattagcagtataagaacttggaaggtgggtgcgattagatgcaaaaatttgaaaaccgagcatagcagtacaagaaagttggatgcgattaggtgcaaaaacttaaaaaccgagtatagcggtacaataacttggctaggtgggtgcgctcatggtgcaaaagttgctacgccattgttccacctcagcgaaagtgccacatgagcatgcattgaccatctcattttacagaaaagtccctaataactttngtattccaattacttcttcagatatatctgttttcctcctgtatcacaatgatcaaaccagtccatcttctcatccaaataaattctgctactgccaactccaaaaaaaaaacccaccacgatacagttcaattgtgaattcttcttcctcatgacctgcaatacaaaataattgggttgatgtgttataccgcataaggaaaataatattatttgcagattattcaactaattatatctactgaaaagggtacaacacatctagcaagaatttctcattgccaatgtttctcttatatcatatacagttataggaaacaccaataattacagtaaaaccaatctagtggctagtaccattagatcacttcattgaattgtaataacaaataacaggatattcaagtgaaaacccaaaaaaatgcagccattgtacagatcaataaaaccttaactttgaaatcatccatcaaatgaacgaaaaatagaaatctacaaccatcagcaagtgatttaccataacaagctaggagcaaattgtcggcttgaattggtttggttactggtttagtgcttgaattaatgtggcacacgaagccctcgccgccgctgcgatgtaacggtttccctcgttgtcgtcgtcactgccgccgccaccatcgctgcgccgccatcgccaccaccgcagccgcctctcaattaggaacacgtcgagaaaaatggaaggagatatgcattcgtttgttctgattgtcgagttaaaaaggaaatgtgattggaaccaaaaaaaaagctatttgtggttttctataaaatgagataggtctttcatatcaaagctgatgtggcaattttgctaaggtggaatagcaacgtggtaattttttttacatggctacttttgcaccatgagcgcaacccacctaaccaagttattgtactgctatgcttgattttcaagtttttacacctaatcgcacccacctgccaagttcttgtaccgccaacgcaatttattctttaaaaaatttttatgattagtatttttgttattgttagatgataaaacatgaatagtactttatgcgtgacttatgtgtttttaatcaaaatttgacatggaaactcataactgcgtttaaaataggatggttggagtaattaaaaaaaagttccaactcgattaatctgcgccgttgatttgcaatcaaacggcccagcaactcgattagtcctctaaagtaagatcagagagaaacactcacacaccagcacacggcgacctcatcggctcatcctcctcgattccggcggccgactcaaatccgaatcgccccaagagagagagaatggcggcggcggcgctccgaccggcgatcctccgccgcatccgcctctccccctcccctgcggcggctgcgggggccgcggcggcgtcccagccccacgccctggcgcggtggctcgcgcggc

SEQ ID NO: 1744 - DNA, 2000 bp, Oryza sativa
agtagtagtggacttggccaagatttcccaatgcaccaccactaacgcatgcagttgtaacgcagaggataggagacctggcagcttctgatacacgtgtcacctgcttgttctttgcatgtggggtgtgtgggccccacttggtggtgctgtgtgggccccagagacttctcgcactagcttgtatgctcggcttcgatgtcctctccgcggatgcagagcaccacagctgcaatgcctgcatgctctgaatactctgatctgaatctgctgccaacttcgtgaaattcagatcgcaatgcactgtttctcaacgcaacggggacctctgctaaattgtaacttgcttctgctcatttctgaataatactgatcgttttatctgatgaccaatgttggaaactggtcgagaaatgcatcaagcagtgcatgaacttcaaatctttaatcatgtttggtataggccaggagtaagcatacaagggggcccaagaaagctattttctcctccatttcaggatgctagttgctgcaaaattccaaccatatccagcgcatcctcctctggctagcaagctagctcagatgttacatccgtgaaacggctctttgtggaaacgtttttagactttctagtgaaagaggactagaggagtgttctgttttcagggatcagacaaatccaagattagtaaggattgacaataagcgtaccgtttgccattctgttctttgttttatctttcctttttcttgcgttggacaacgcatccctctatcactgaatattctttccttgcacacagatacacagtagtaggtttttggtagggtcggaaagtctcataatagaaaattatcaatgaattaactatgtttaatagtcctacaatttgatataataggatgttttttattttctaagtcaaactttttaacttgatttaatctattaagaaaatatagcaacatatataatatcaaattatttcaactaaatatgccattggttatatttgtatagttttttcttgaatactataaaactatatccaacaacgaattttattaaactaatatggcattgttgatgttgttacgattttttagaaatgggacaattttttaaaaataacttataacaaacaaaaaaaacacttgtagtataaaaattggatgaagtaaggtcattgtctacggctgattataagatataacggcatattagcgataaaaaataatttatagaactttttttactatatcctttgtgacttaaaaactaattacaatgcttgaaaaaaaaactatgttgaaaaaattatcaaaatttaaaatttaaaatttagcattgctttatatgtcacagatcaaaggaagcttttaaatcaaaagtatgctaccaccctaatctgtatttactactatggcctggtttagttcccaactttttctttaaacttttaacttttctatcacatcaaaacttttctacacacataaacttttaatttttttcttcaaacttctaattttagtcaatggaaggcatatgtccaagacgaaattggcagtttgtttgcctgtgttggcacctacacaagtgtgaaccaacaaatctactcgtgttttgtaaccacgcggccgactagcagccttagctagtgcatgcgtgtgcgcctgcctgcttacttccatctcgaattaccaatattaatcactttctgtgttctgctgttaattaactaacctcagacgacgtctcgttaatctgagttgctatagctttacgaaaggccacacctcggattataaatactacccagctcatggcaccaccacactcttcagtctcacacaaacccaaaaacccaaagcttagccaagctactagctagctcctcacttcttccagcttcttacactaatacagctcgagccacttcgtcttctcctctcttgcagcatagtttaagtttgagataggattggcgatagat

SEQ ID NO: 1745 - DNA, 2000 bp, Oryza sativa
  N_region (224)..(224): n = any nucleotide
  N_region (347)..(347): n = any nucleotide
  N_region (387)..(387): n = any nucleotide
  N_region (409)..(409): n = any nucleotide
  N_region (501)..(501): n = any nucleotide
tgatctgaagtatagctcgaccctttcctaggcaccggtggcgagggtgggcgtgatggagttgggtcggccggggtgtccggttgtccagttgccagattcaccgcggcgcaagaggggaccgcccactgccttttgaggagtgggggtgaaaccttagcgtggtgtggatggttaggggagggttatgcgaagggtctcgtcacaatcactcgacatggtgncgcgtgcatcatgggacatgatgactcggtgacatgtcggtgggttgtgtcttgtgggtacagttgtgcacctctggccagagtaaaacctattccgaataggcccggtgcccgcggcgggcnatcgattggggccgaatcggacccaggactttcacccggntgaatttaaggttcttcaacancgttggttgggcctgttcaacgtggtgtagcgttgatcagtggagatttaatattaccttaattattcaacagttttactgtttgctaaatnaaatattttacaaccgcctttatgcaaatagccacaagccattcttgaatccccttgcacgtctgcatcgttggtgtggcctgctgagtacggtggttgtactcagccttgctattattcccctttttcagaagtgtagtgcttctgagctgaagatgaagttggaagaccaaggctcagaccccagttgagttttgcctgtggagtggagctgaagccccgctaggatctcattttccgctgctgctgctcttgtttcagtgtgaggactaagtgcttcttctgtaagtattttacgctttatttacgtttggaactgtatattacttgtcgttttgtgtgccctggctggtcctggacagggatttaatacacagaatagtctggaaatttgggctaaatttctgggcgtgacataggccgactggcgggctaggccggaagggaaggcaggcctgagagagaaagaggaggtggaggagtgaacttcggcccgcgggaagagaaagaggagaaaacgggttgagcggggaggaaggacggacttgtaggggaggatgggccgaagacggcccaaggacagggaagggagattctaatttgtttttctatttgtttaattgattaaacaagtcacatctaaatgtactctagcttattataatccattcagtttatactttatagaaatccaactcaaaaatttagattacaataacgtgaagctgaaacaaatcggatgttagtaacattacgcggatctccccaaataaacgaacgatattatagtacgtaacagtaatctgtaggagtattattgccctttttttaaagtaaatttcacaaaactacatgttttatggttcaagttacagaaaacaacacatattttgacacttggcatttaagtacatatattttagtagtttagtttcacaaaatcacactatcgatgaatggattcacccatgagataacgtggttgttccattaaggatgaggacgtggcattctattaattttgtgcgatggctggtaataggatgccatatcctcatcctagatgaaacagtgaaatagtcacgtcatctcgcgggtgaatctatttattgatagtgtggttttgtgaaacgacactaccaaaatataagtacttaagtgtaagtgtcaaagtgtgtgtggttttctgcaacttggactacttgtgaaatttaatccttttttttttcgcggaaaggaagaaagaaacgctcacccaaaccctaggaaggagaagggggagagagagggagggaccgcgcggcggcgccgccccggtggaatccctgccctgatgtcggcgacagcgaagggcggcagcgatagctccgccggaagctccggatccaccccctcgtcgccggcgacaggcaggggcggcagcgatagctccgatgccaaccagccctcgccggtgaaggagcggggtgttgtgctgtcggagctgctcgggcacatcc

SEQ ID NO: 1746 - DNA, 2000 bp, Oryza sativa
tattttgttttgctgtaaatgaatcagataaactgagctcaaacaaaatgttgtcgataggcgtcatctacttttgttgcctggatcaataaattgttttatgtatcattcaatgaatttacaagtccactgacaccataggtcttccgttccaatctgcagtttggcgttggagtttactcttttcgttccgtaaaaaacaaaatatagtaatagatatgatacattataatattataaatctagatgttactatttaaatttatagtactagatatttttatactacgtttattttttataggacgtagcggatacttgtatattaggaaagagcccatcattataatcccagagagcccacacaatcatctgaaggatgtgtgtgtcgcaggattgaagggtccaaaggccaacttgaatttctcgtgcaccacttggaaaatgctccaaacatggtggttataactgtcgatacgacatatattgcgggacaatatggcccatgcgtaaacagtaataagaaagaagatgaatacgtggctgcagttcattggacggctaggagacattttgaaggaaagatttcacccagctgttcactaaaattactttagagatggttgttgttataccaactaccatatttgcctcactttaattgtaaaaagcttatttgaggtaaattttcatgtagctaagagtcagagatgtggaataaaattttcctccacaatttgggttcctcgagattatgtggaatttgctttcttgtccagtacaaaggacatgtttcattgtgattttttttttcaatgttattgtgaaattgaattattgatggtcttggaactgatggtggcatggtggttggctgctccggttgcttgtgccctggggtccagttatgtaccactatcattactaaactatttttttgcctaattgattggatctcaagtaccatatttctcttttaaattcagcattgtagcactatagggagagagacattttgtaagcgatgctgcatatatggttctgcttcattctgtcgaaaatgtaagtccacgattgtggctgccgttggactgcgtggacgttgctgcagacggcatgtcgctgttcttggggtcccgtctggttagcgatttgtgtcaccacaaacatgtggggtaattgagggaaatatatatacttacgttgaaaagttacctgatatattggggtagttcatcttcttttccgttgaaagctgctacctacttcgatcgcatgctcgctctgaccgcatcaaaatccatttttctgaccattccaattcgaggaaatttgtcacggggaaattgcttgattagtcgaatacgtaaccaactacttcctccttcctaaaatgttgatacttagaataaaatttaataggtgtgtccagatttaatgtcctacgatgagtcaaatcttattttagatagcaatattttagaacggaggaagtgctaccaaaagagaaggggctatatggaggaggagaatggaagaatgtgccattgtcacctcctacctaccaattagaaatttagaattgcaagttgcaaatttgcaacaaagcacacagctcaattttccttttactttgatttttttgggaaaattggaaccatgccattataactttataaaatttgatatatgtcatcctgacccacatgtcattgactcatgtgggttctacatgtcattgagataccgatgttatatctcaaactttgcaaaattataatggcatggtcctaaattacccttgattttttcacgtcaaactgtgcattagaaacgttcagttcaacacaagaacaggaattcgtttgtactagtaatatttactgcagattaattatctggagtggaacaattacacgtataatgacgagaagaagaataagaaaaaatgaaaggcaaaattaattactcccggcaatggggggaggatgagtaggacg

SEQ ID NO: 1747 - DNA, 394 bp, Oryza sativa
  N_region (107)..(107): n = any nucleotide
cggcggcggcgggcgcagccttgtagcgggcagtgggaaaagggggcagagagatggccgcagtggcatgtgcgcgttggtgcggcgacagagctcgaccggctgcntcgccccaatttgccactgacaacctccttgaagaggagaaaataagaaaaaggaaagagatgtgggccccatatctttcttctcacttcacttacatgtgggacccacattgtttttagttttatttgccacatcagtgaaaccaagcatttgtactgctatgtgacttaaattgtatggttgggtgaaaattcctggtattaaagataagaaatgtcaatcaaactcggtgtaaagttgaagggacggtaggggtgaagttattccgcaggcagaatcatcgatc

SEQ ID NO: 1748 - DNA, 2000 bp, Oryza sativa
  N_region (124)..(124): n = any nucleotide
  N_region (325)..(325): n = any nucleotide
  N_region (330)..(330): n = any nucleotide
  N_region (360)..(360): n = any nucleotide
  N_region (367)..(367): n = any nucleotide
  N_region (382)..(383): n = any nucleotide
  N_region (393)..(393): n = any nucleotide
  N_region (425)..(425): n = any nucleotide
  N_region (443)..(443): n = any nucleotide
  N_region (445)..(445): n = any nucleotide
  N_region (681)..(681): n = any nucleotide
aacttgcatgaacgttaacatcggcaaaaaaaataataataaatgttttttgaagctctataactgcaaattaatgtgttgaaccaaaatttgattacagttacatatacttgataaaaatgtnaactacaacatcttggtattgcaaaaatttgtgttaactattcgcatgattatagttgcacaaaattataattaaagttgtacaaatttaaaaccaaaaagttgcacaacctttaaaaatggcaactataggaaacatgacggatgcaatttttgcatataggacgatgaaaaaaattgttttagttagtaaaaaatggtntactntgtataccatatttcaaagtgacacgactntatttanatatttgtacaaacnnagcttatctncatataagtaaatgtcaaaaacaaacatcttngtgttgcgaaaaaaaatntnttaactattagcatgattatagttgcacaaaaatcataattaaagttgcacgaatcactaaccaaaaagttgtacaacattaaaaaatgacgactgtaggaacaggaaggtgcaatttttgcatataaaaaaagtaacaaaactggatggatatgacattattcaaccacccacatgtccaagctcagcagcaaatcaaaatcttagcagaaggaaatgtactcttcttgccctgnagcaaggtcctcccccccccccgcggtagaatccaacgctccctgaaaacaaaaatcgtagtgagctactacatctgagcatacaatcagtctgaagttgtgcttgtttataaccaaaattaggaaaaaaatcatatagtagtcagctaaaaaagaattagttgcacaatttaataattgaaaattgcatatatttataacataacttgcgcgaaatgtatagtattagtttattttgctatttggactatgctgctgggatgtagatggttcaagcgggaaaaaacagtacatgagaaaaaaagaggcacacttgctgtcgtgtgttgatgagaaaaaaaaagatacaacataaaaagtagtatgggttgcaaaaagcaaaaacacatgaaaagttggacaaaattactaagaaaacaagttgtctaccaaaaaaagtccccagttgtatgcatgttttcccaaacacaaacgctatttatcaaagtaaacggaaaatttggctcaaaaaacattagttgcacaaacttattacacgacttgcacggaaaatcaaaatggctactacaatagtcagggagtgcaactagcatagatacataattttcagaaaaagaaacaatgaaaattttaaggccatgtgctgatcgaaagcataggttttagttaaggccatatttaaagcagcaaataagtgaatcattgatacaacataattgtacatagtgtatgaagagatatgctttatactgtcaatttatacagtactatagcaagttatactgtccatttattctctatattttagtttcagattaatcctactgttaacgaccaaatttggtaatatcagcatcggaaaaggagattagatcaaggtggagtcgaaggcggagattgatctgaaacagagcaagaatcggctgaagtccggatcggctacgattaggatcggctgggtctgagtcagactaggtgagccgatgtagccgattctgacagtataatttggtgtatgacattgggttgaattgaggtacttcaagatgattgccgcacatggatagagtcctgagaaggcaattgtatctattaattaggatgttttatgtaacttccttagatatatgtttgggcaaaagtctgccgcaaagtcggctagcccaagcactgttaaagaaaagatccagaagttggggttgactgacgtcaatgaaggaaacgtcgtgcccatcgatccagagaaattcacacctgaacagaagaaggattttgaagcaatgttgtagcatgcccgggatcagttcttgaactcattc

SEQ ID NO: 1749 - DNA, 2000 bp, Oryza sativa
caccttgttggttgccatggcatcctatgcatctatcctttggtctctttcttgtgtgtgcttgcagctgtactgtatactgcccaaaaggcattattatgtgagtggtcaaaaggctaaaaaaaagtctcaaagagaggaggccaggggaacatggcattgcttgagtatcaagatatggaattgtgccactcactcaggccggggatcaaccctcatgagtgttgcttcagttttaagatggaaggaggaaaaaggtgatagtgttagctagtagtaccctgctattataccttgctgaaagtacacatcacaggtagctagctgcattggcacaactggtaaaatatttggagtatgtttaagagaaaaaaatatgaactaattgtacttttaattacttttttttatcttattataatgtgttttgtttgagctttgtactactagtataaatggtgtgcattttgcttttggttctactgagatctgattgcttcgcttcacttcactttccacccaatctgtcctgggagaggctcaaaagtactacagtgctgcaagccctgcaacacacagcgatgcagcttgtgtgtgcttcaagttttttttatgtgcatgtgggtcccagtgatcaatgactaactgcaggagccaactctgtcagtctcacacacagatcagctgatgtttgttgtatgctccccttctagatctgccatacttcgatcatccatccatatgcaggcaactcactcctgctgtgatagtggatctcctctactcatgtcacttcactacaacccccatttgcatctctgttgccacttggcaagaatggatcaacaaatataaaacagattaatatgcagatcaaataaaaatttaaatgaaatttcatatagtattacacttatttatttattttgcaaaaaaaagatatacaaacaaaaataaatggaagacatctttggacccacgattcccgtctgaatttcaacgacatgttcgaatactaacaacatttcttacattttttaaaaaaacgaagatcagatatttgctttaagatccgtgcaatgcaatcctctgtaaaactctctccctcaaacatacttccatccaattaaaagggaaatgccatgggattccatgcatcaaaatgagccgtgctgcatgtacaaggatcttgtagcatatcacagggttttttgctttgtggatacgtacaagtagtgatgcataaacatgcaaagataccttggccaaatagtggctatctaccatggaagggaagctggttggaaggtagagggtactacaaggatggatggatggtagtagttgggttaaagtggccacattttggatctacacaagctgtcttaacccaacaacaattttttaattaacttattgagggagaatcatatgggaggaggtggttaatgcttgcattggatgcaaaaggcagcagtagtatagtagtagtaagcttaaagtgaaagatggcactagtctcagtctcagatccaaatcctgcttacatcaccctttaaaaaaaacacacagaaagaattggttagttaatcatcttatctttatctgcaatgtacatgtctgcaatgatgcaaccagagatggtgaaaacacattggtaatcagaagatgtgttgtactttggttgatcgaaattgtttagatctattactactactagtacatgccaatgaccactgaacacagcctgattaatcagcgcagctagcagacagtttaaatgatctgatctctgaacagatttgatcagcttacggtaaacaagtggaggataatggtgtgtggctgcgtctgtcagagagaatgttgtagtacatcaagctaggcttgcaggggtagtagaaatctccccccttaattaggagtatatttactgcttcaccaggtagtacatactactgctgctcttaattaccccgcacgctgggtgcagagctaag

SEQ ID NO: 1750 - DNA, 1035 bp, Oryza sativa
  N_region (4)..(4): n = any nucleotide
gaanccttatctgaaggaatctggccgaagttcgggtgtcgtctgcgtggaagcttgaagaggatgtcgccgccacgttgccggtgagccctccccctcacactcaggtagatgtggactatgatggatgagccgttcgattcttcatccaacaccatttagcattggggtgaaatttagggaagtttaaattgagtgctgaattgtggaggggttaccataagtgtatcaaaatccctgcccccccctccgggaatcccaatccttgaagaggtcgattgttgttttggatatcgtggcggcataaaatttgatgatgggtaaataagtagggccggcgctgggcagggcaggcagtgttgccgccctgagccctaggcatcagggggccctacggccatgtacagctacgtgcatacacagttcactttgtgctactgccttagttaatctcttttaaaaccagataaaactttgacgtttctattatattatgttctaaaaatttcaattaggagagtaattactaattagtgtcttagtatatatgtagcaccatcttcctggttgattcattcatctcatgacactgcactaattttctgcatatggcttgatttttaatttttttagccataatagatgaagtttggttttcataaattcctatttaaaacaatagtttattgttaatgatgcgttaaagctaaacatttcttcctattcgaagtaaaaacttattgcccatagatattacacacgcggggtggaatttaaacaagaatttagtgaggctatgaatattccgttgatctcggtcactttgagcgtacgtgaacttatgggatacgtgtgtagtaatatgtgcctatgtgtcttccacataataaaaagaaaattattttttcccttgtacatctatataaacacactaatattgtagggcctctatattttttctcgccctgggcctccaaagttttaggaccggcctgtaaataagctattactttccgaaaagaaatctaactcgcg

SEQ ID NO: 1751 - DNA, 2000 bp, Oryza sativa
tacacttaaaatagaacgaaggtagtagcaaacagccaaacaattagtaaccagagtgagttagacaaaggaataaagtagctagcctagttctttgtttatacaggaggacagtactccatgtacgaggaccgctgccgcgggcggcccggggcccggaccctccccgtccccttgccctcttcctgttgcgcgacgggcgcagtgacgagcgaccgggggccggaactccttttaaatctttcatatcaaaattaaaattttggttgaaattgaaacgatgtgataaaaaagtttaaagtttgtaaatgtagaaaaattttaatgtgattgaaaagtttaaaaatttaaagaaaaattttggaactaaactgggccgtagtgtgattgatctggagcgcacgcagatgcagatgcagatgcagccacgtgaacgtgacgacgccaattccacgcgcgaggtggacgccagccgaaccggaaaggtagccgttgttagcgaaagctaagcgacgaggcgagtagtcgtatatggtttctgcgcgcgcccgccgcatgtgcactagtgagcctttgctcccttggcaccaatcgtggcgtgggtgaccctactaccgtgccgcgtcgtctctccttgtgggcgcgcgcgcggggggctccacggccgatataacgaccttgtggaggacgcgcgcacgtacggtcgactatctgcctggctgtgtggatcgtagcttccacgcctgcgacagatctcgcctaacgtctaggagtactactagtcctgctcgctcacagatgctgcgattggagtatgtccaagtgtaggatcctgtcactctcggggctgaactcagccagcgctagatactgaagattaggcaggcaaccttggacttcatttttaatatgatactcgtatatactccaacttgtgtgtagtagctacctttcccatgcattaattcacatctagtagtagaagcctcactttaccttccgcgcgccaatcaagcagcaaattcctttcttttttcccttcatgatcttgtgcagataatctgccgataccatgtcattttcctaccatatagcattggcattacttccaaccctccaggccaaggatatccgaaattccaaaccaacttccaataagcgttcgcttgctggccaacccctacgtttgctgggtaacattttcccatcggaaccatattcattgttaattcgggtggaggttaattggaaccattgcaaatttagaattatcgtatgttcgcctagtaagcatgccgccaccaacattgttgataatgcaagccacgttgttttctttttttccccttatattatcttagaacaacccaacaaaaggatctaacatttcactatactatttaaaagcttatctcactactactctattcgtttcatattataaattatttgatttttttcttaatcaaagtttttttaaagtttgatcaagtttgtagaaatataatccctccggtttcattttaattgacgctttggacaatgacacgctctacaagatatacctttgaccttatttttctattataatatatacaataaataaatgcatgtttacttttattatagtgttttgaaagacaaatctatatacatttttctagtttctttaaactaaatatttttaaagttattgatggtcaaagttataaagtttaacctcaaccttatccaaaacgtcaattaatatagaaccagagggagtatgctaatatcttctattatatactaaaagtccatgaaacaccctataaacgctctcataacgctatgtggcattcctataaacgctcctaaattaccacgtggcgttctaatagattagaaatatctagccattgatttttatttaatttggtggggtccattaatttagaccattagatttgatttagattaaaaacagaatttaatctctccctctcctctccgtcacgtgt

SEQ ID NO: 1752 - DNA, 2000 bp, Oryza sativa
ccctctcgcacgcgcctcgccgccgccgcatcgcatcccctcgtcgtcgcagccgctacctcctccgcttagtcgcctcccccccaccccggcacccccacctctcctctccgcctcgctgttgcctcttccatgatgtccctagtgagagcacggcgagggcatctcctcagacctcacacatgccggcgagccgccatctgctcctcgtcgttgctggatggggaggaagaactcggtgacctcctcggcgcccacgccgtcgccgaacgccgatgaggtccagcaggagatggccgtgggccgctcggcgtcggccaggatccgcgaccgggcgtctcgttcgctgctggggcaggagccatacatgacaatgtaacttattcttctcatgattttgctgggtgaatagcaaatgattttgcttttttgctccagtaaatgggaaaattgctctggttactgagcaattagggagttgatctggttgattttgttttggtggaacatagaagaagctgtcggtggaagagaagtgcttttcactgcatagtagctgatttatgctagatttatgagcgcgcagctgttcttgagttttggccctcttgttcagctattcattcagaagctgtcaccgaagaaagttgttgagcttagactcactgatttataagcacattgctctgggaaaatttataagcacatagcgcctcctctgctcctcacattgctctggtaaaatttataaacataaaatttataagcttcctgtttagcaagcagactcatcggtgtgtcacattcagaagataccagcacattccaactggaacctagatctgttggcctattgcatcatgtacaggcaagtctgaaaactaaataagggtaaaaccgtcttttctcctctagttaacaccatcaagtgtaaaaactaatggaagtgctacataggggaagggaaattttgagggtgcatagatagagaacttttgaagtttgggtggtagagatagaagaacaactttttttttatactacatagggaattttctctacaatatatcagtttgcgaggggtacggcgacggagatagtggcaggcctgctcattggaggacagcacctcaccgtcgtcagagctcatcgttgctgcccagctcctcctactctctaggtcagcccaaacggatgattatcggctctgggttctctattcggaggcaaatgctggccaacattcaaagattcatctgctcggtaggcatttattttccatgtaaataaatcttcaaactctcttcatcgttgattgttaattgctttactgctttgaatgacacaaccagatttggagtacgaaaccacctcgccatcacaggcatactgcctgccatgtggacttcgattataaatctacctcgccatcgcgcccatactgttcggtgtggtgtcgatgctcctgttgagaagtagcgcaattggttggttgcttacttaggcttaatattgggttaatgtagatatgaccctatggccttttattgtctttattttaaaatatatatatatattctgaaatacaggaagtatattttgtcccaaactaaatacatcacagtaacagcatggttgccttttttcttagattattttttcttcaactcaacattagggaactacctgttggtattaaaattttacactaataattaaataagtcaacttataaagcgattcatataaggatgtaatctaactcaatttatttaaagattgttttgtgttgctcaaacctacaattatgatgcattaataattttgtacaagatcatcggcttcatgatatacacttatgtaagacttgtacatatcaatgtagtttttaagacatttatgaactgtgttttgaaacaatcatgttttcaaattatcaccttgcaataaataactattgctacctagcaaggtgagaatgtatagccacctcctcaagg

SEQ ID NO: 1753 - DNA, 2000 bp, Oryza sativa
acaatttataaataactaaaatttgtgataaaaataaaaactatagaaagaaaagaccatctaaaacacatgacgagataaattaagtaccaggcctataaaggagtagagtggtggcggttgatacgacatataaaaattgttaataaaacaccaaatagaatactaattgacaccaagtaaggcggttgccaggacttctaaaagtaaaagaaataaactccattgataatcatttcgatttttaaaatctcaatgacaataaaaaggagaagcagcgtgcaaggtgtataagagtatagttgcagaggcaccgacggttgacgagacttctagaaaataaaaaatgaattctaacgatagttatgtgtaggatcaaatcacaagaactaagccaaccagatggggggtgaatggttggtataccccaaaaaccgaaaacttttagcggaaataaaagttaccctcgaaatcgatggatcgcggtctaaccaaagtagttgcgccggtctgatcgcctaatgaacatcggtctgaccgatgtagatcgatcggtcgaaccgccgagaaagcctgccgccgactcctgtcaccgccggtctgaccgccgtgtacccgccggtctgaccgtcggtgcgccgccggttagaccgccgaaacccggtgaaacacaaatcgaagaactcttaaagtggatgacgactttatttattctctctgtgtttacaaagtgcaccaacagcactccttacaaaaatttcgactaaactcgaaaccctaactcaaaacttcaactcaattgctctctaaagcgataccgggaagcctcacgctccccctctatttatacatgaggtaggcagcctaaagccacgaaccaaacttatactaggagtcctaaacaccttaggaaaccctctagtacaagaaagaaactttacataaccagtcgtaccaaatttggactccttccaaattcgactccgcatcccatacgcacacaataactccatcgtatgccatatggaatctccatcaaccacgtgcatcaactctagcctaagtatcccgcatgatctctaaccaccacggacgtcgtcttatccccaagccgactcccggtccatcaccgcaaatactctcccgagacatcgagtcacctacacatggaacaaacaaagaaaccatattccgagaccaagctatctccaactagactcattagcaacaaacaatagtattacatacgtatagtatccatctagaagtcataatcatggaataaactcggatatccaaataaacaacccgaaaccgaaaccgacacagtgtccgccggttagaccgcgggctgcgccggtctgaccgcgcattacaccccggtctgaccggcagcacaagcccggtctgaccggtccacataaaatcacagcagtacctgtatattcacatgtgaaatccaatcatctccaaaaccacttcgtgaataaattccaaataacaaaaccaataatctccaatgcccaattgttcatcatagaataataatcaaaaacacctttgattttacattatgttcaatttttagaatcacaatgacaataaagagtaggcggcggacgggctgtagaggggcatagtggcatcatttgataggacttctgaaaattatagaaaatgaaactaaaagagtctattttttaaaggttcgtaactttctaaaaagtaaaaaaaaaaccaattttaatcatgttcgattttaaaatctcaatgacaacaaagaagggaggcagcgggcgagccgtagagtagtgtaatggcaaagccgctgatagtttgatgggacttctagaaaataatgatggttcattttctacgtacatcccttaataatatataaataatagatagatgggatttatttaggtcctcatttggaggaagcaaatggatcggagcgcataaactcgtttcaatcatgaagtgatggtgcaaacgca

SEQ ID NO: 1754 - DNA, 2000 bp, Oryza sativa
  N_region (535)..(535): n = any nucleotide
  N_region (1076)..(1076): n = any nucleotide
  N_region (1097)..(1097): n = any nucleotide
  N_region (1955)..(1955): n = any nucleotide
tacattcgtaaatactcaaatatatcgatttgtctatcaatacatgtaacataatcaattttttgtataaatcaattcctgggattatatttaattatctaatcttataggattaattagtcacagtatttcgtattacatacaaatggacaaataagatatttcaccatccatttttaataagatgatgacatggcatgtctacatggcgttttaggtgggcctaaggttcatattggaccatatgacaaagtttaaggatctgattggatagaataaaatatcaggaccatattgaccttaaggcgaaactttagggaccaaatggggctattctccctatcttaaagcatttgcacgtaggatttgtaatttcgatgtttgaaaattttgaatttaaatttgaattgtgatgtttgaaattatgaatttatatattattgaattctatgcgttagaaatatctatgcttgaattatggtggtgtaaaactaggtatataaatagagcttattttgaaatatttagagaaaangaaagagggactgactgactgagaaataatggatgatatttatggagttggagatagtttttggatggaagtaactacacagctctggtttgtctaaaccagctaccattccatctataagaggcaccatcttcatatacttcaaatacaattttctcttaaactactcatccgatctacgatccgattacaccgttgtgttcgtaacaattaaatctttacaacaagatctcacatgattatattttgatgaaaaatcagaaattacttttatgatatgtttaaattacttttagatttcactaagttacttattagatatataaaagtaaattcagtaaaatctataagtaatttacatatattatagaagtaacttagaacaaatcgaatgtatatttagcatgtcatttgaagtaaatctgttgtagagataaaaacatgactctatctataaattaaattaatcagcacaaattatggaattaactaaaaaaataaaagtaatcacctcagagaattatgaatgtatagagatatnttaatcaaatccaaaaataanatatatatatatatgataatttgttcaatgaaaaaaggcattaattaaagttactttccttttgttataatttacttctataatatatgtaaattacttttagattttactaaatttacttttatatgtctaagaacttagtgaaatctaaaagtaagttagacatatcataaaagtaatttgggatttttcatcaaaatatagtcatgtgagatcttgttgtaaagatttaattattacgaacaacagtgtaatcggattgtaaatcggatgagtaatttaagagaaaattttatttgaagcatagatgataggaatattttccctacttgctcaatggattaatagcaaccaaaactcctaaattactagcacgtgggtgtctctcgttaagactaattggagaggtctccccaattagatttaccgtttttagatctaaagaaattaatctgtacggtacagtgtcgatttctcatgtcgcttccaacatatcatttatttcccgtttcaatcaaacaatcgatgtattctgtgtaggaaacaaaaacttccgatgaatttaattaggtgaggtgtccagctcgcgatcggtccgcgaaaaggctcgtacatgcgtgcgtggtacgtgaaccccgagaataaaatcatttctccgaattaactttaaccaagcatgcttctcaactgttttttaggtggccaaaaacaatttttgtaggcggaggggatgaccgcctgcagaccaacgacggtgaaaccattttcgcaggcggggccatggctcgcctgcgaaaatccaataaaaaaccaaaaaaaatcgccttcgcacgcgctgcaccaggagccgcacggccntccccagcctcccttcggccggatctaggaggggaggggagccgc

SEQ ID NO: 1755 - DNA, 2000 bp, Oryza sativa
  N_region (1974)..(1974): n = any nucleotide
  N_region (1986)..(1986): n = any nucleotide
cataaatcatcccaataaagcacgtcatttcccgaatccaagacaggtttggcaattcctctgaataagacatcatattagaaaacatccttccaccaaaaggagccatgtcacacccagaaatttagcccaaatttccagactaaatctctgtccaggaccagccagggtacacaaaacgataagtaatatacagttccaaacgtaaataaagcgtaaaatacttacagaagaggcgcttagtccacacaccgaaacgaaagcagcagcagtggaaaaaggcgatcctagcggggcttcagctccactccacaggcaaaactcaactggggtctgagccttggtcctctaacttcgtcttcagctcagaagcactacacttctgaaaagggggaataatagcaaggctgagtacaaccaccgtactcagcaagccacaccaatgatgcagaccgtgcatgggaatacaaggacggtttgtggctatttgcataaaggcggttgtaaaacattttattgagcaaacagtaaaacaatagagtaattaaggtaatattaaatctccactgatcaacgctataccacattgaacaggcccaactaacccacctgaactacggtgcattgagttgatttattaaggtgggactaatcacggtgaatctagtcgaccgcccataaccgcgggcacggctattcgaatagttttactctgattagaggtgtacaactgtacccacaagacacagccccacgacacatttccgtgtgccgacatgccaccacaacataccggaaagaggccgtgacatgacccttcgcataaccccctctaaccgatcgcaccacacctcagggttcgcccccgtccccagcaggcaacgggcagcccctctctcgtgccacggtgaatctaaaagccgatcaaccgaacaccccggccgacccaactccataacgcccacccttacctgggtacatcagctagaggaaagctacactacaagcccagccgttgcccacgctggtttgtggtaagtacaataagttcttctagggcatcccgcgaaccagtccttaattgccatgggtgtgactagcaaaaccatgcacccacagcccaccatttagtcgcattttagttggataattatgaccatgaagcatggccagatgtctcgagcacgcagctcattctaatactaaaaaggtctaatactgtaattatcccatcaactgagctagtggtaattaagcatagctaagcatatagttctagctaggtcacataagtaacatgagctagtcgatttattacccaatgttgacaaaggacagacatcaagtaaacatggcacaagcgagcagataggtgaaaccctgatcccatgtaattagcaaaacatgcatatttatttgcaaacagtaaaacatttgtaaagtaggctcaatatgctcaaggggaatatgtgacttgccttgcttcttcacaacaaccttctgaactcttatccttgcgaccgcggacttccgaaacgacggattctacacgctggcacgcaaaacgaggaaaaactctaataaaaaccaagcaaacagtacataaaaagtaaacaaacatgtagatctcaattttagatgaattttgcaagttgaatggctcaattcggagttcgaatgaattagatatgaattttagaagttttgagccattttaatagatttctagaattattattgatttattgcgcaattattgattgtttttccaaagaaaaaaagacatgctgacgtcatcaaagagggggccggcaccgacaggtgggccccaggcatcagcggctcaagggggcggcccacggtggacacggtccaccgcggcctcaggcgcgccgtggaccaggaccacgccggtccacgggcggccacagtgcagggcgggcgcagccgagaccggccggccaagcggcggcnaacggcggcganagcggcctagccgg

SEQ ID NO: 1756 - DNA, 2000 bp, Oryza sativa
  N_region (654)..(654): n = any nucleotide
  N_region (663)..(663): n = any nucleotide
  N_region (877)..(877): n = any nucleotide
  N_region (1978)..(1978): n = any nucleotide
taaaaattggcagtgatggcaactaacgagcatgccgtgattctcgtcctgtagtagttgagtttgtatgcaatatgcaatatgagagtatcatactactgtcatgcccagaaatttagcccaaatttctagactattttgtgtattaaatccctgtccaggaccagccagggtacacaaaacgacaagtaataaacagttccaaacgtaaataaagcgtaaaatacttacagaagaggcacttagtcctcacaccgaaacaaaagcagcagcagcggaaaaaggcgatactagcggggcttcagctccactccacaggcaaaactcaactggggtctgagccttggtcttccaacttcgtcttcagctcagaagcactacacttctgaaaagggggaataatagcaaggttgagtacaaccaccgtactcagcaggccacaccaacgatgcagacgtgcaaggggattcaagaatggcttgtggctatttgcataaaggcggttgtaaaacattttgttgagcaaaacagtaaaactgttgaataattaaggtaaattagatctccactgatcaacgctataccacgttgaacaggcccaaccaacccacctatactacagtgcattgggtcgatttattaagtgtgagactnatcacggtnaatctggtcgatcgcccataaccgcgggcacggctattcgaatagttttactctggccagaggtgcacaactgtacccacaagacacaacccaccgatatgtcaccgcgtcatcatgtgcccatgatgcacacgtcaccatgtcaagtgattgtgacgagacccttcgcataaccctcccctaaccatccacaccacgctaaggtttcaccccnacccctcaaaaggcagtgggcggtcccctcttgcgccgcggtgaatccggcagctggacaaccggacaccccggccgacccaactccatcacgcccaccctcgccaccggtgcctaggaaagggtcgagctatacttctgttcaagaagttacccactcccgcttgtggcaagcgttgtaagtcttccagggtttcccgtgaaccggtccttaattgccatgggtgcgactcacaaaaccatgcacccacagcccaccattcagtcgcattttagttggataattacgaccatgaaacatggccagatgtctcgagcacgcagctcaataagatactagaaaggtctaatactgcaattatcccatcgactgagctagtggtaattaagcatggctaagcatatagttctagctaggtcatcaaagtaacacaagctaggcgatttattacccacggttgacaaaggacagatatcaagtaaacatggcgcaagcgagcagataggtaaaccctgatcccatgtaattagcaaaacatgcatatttatttgcaaatggtaaaacatttataaattgggaacaacatgctcaagggaaatgtgtgacttgccttgcttctccacttggattttctgaactcttttcctcgcgaccgcgatcgtccgaaatgacggattctacatgctggcacgcaaaacgaggaaaaaccctaataaaaccaaggaaacaatacataaaaagtaaacaaacatgtagaactcaattttagatgaattttgcaatttgaatggcccaattcggagttcgaatgaattagatatgaattttagaagttttgaaccatttaaatggatttctataattattaatgatttattgcgcaattattaaatattttcacaaaggaaaaggactgccgctgacgtcagcaagagagggggccggcgccgacaggcgggccccacctgtcagcggcacaagggcgtcgatccaccgtggacagggaccaccgaggcggtccaccgccggtccatgggaaccaacggcccggatcgctcaagccgatcgacgccacgagcgcgcggctggggcatgggcacngcatgaaaccggctcggccgag

SEQ ID NO: 1757 - DNA, 2000 bp, Oryza sativa
ctgagttcttggcccattcatgcataagtctgattctcgacatcgtctgattgatttatcgtttgagttgatgtcaattctcctccactttatggttattctctgcaaaaggttagtgaaccaaacactagtggaatattattactctaacatgtatatgcattgcaagcatcactagttctcctttattttggtaatattgacggtcgaaactgatcaataacgaccgtcaacaatgggccgattgatgagttccacaaatcccttcatgaacttctcccatagcaactttagattgatcattatctaatcactttaatagcacctcatctatacttcggcgattcaactcccatcaagcaaaatacatttgaatgctcgccgccgaattttctgatcaaccctaagactaggatctttcaaatattctatcaaagggattctccagttttcttctaactcttgggcacaaatatccgaatttacaactaattcggcctctaaatcaattgtctcatgccccccagcttcatgtctgggatcggtaatgccggtcaaaccgccggtcatccgcagttagaccggttataatgcgtcggtcagaccgcccccaatatggaacttcgccaatttatcccaaagatttaaaatcaaacaccggcttttctaatataaaaaatactcctttcttcacattttagccagatgcttggtgtatcaaataactggacaaaaattccttctttctggatatatgaaaaattataacacccaactaatatgtctagatgaataccaattcaagtggcttttgaaacaataatcaaggtatcaaaacacttagccacttgaagtatgatcaataatgaatcaccaaagtcataagcctcacacacatgaattccaataaactacaaatgtaagtaatcggcttgagcatgtatgcaaaatattaacaatgccaatgatcctaaagaagacaactctagaacaaatcatcacattggccattgacattagccaaattactaataagcaaaactttcttggtgcaataattatgaaatctatatcttatatggtgatccataaaaacacacatgatttggcttttaataaatatcaaagactcactagccaaatcatacttcaaataatttatatgccaacttgacaattccaccacttagaactggcatttgcaacatgcatgtataatatcaatttaatgagcaaacacatgtgctagatagcaagcaatgttctaacatgtcataggcatataatataaagatgaacaccataaacccatgccttgccttagcatccaacaaacggtggctcaaagatgtgacgttgtatccttcgccattcatctctcttgatttccccataagcatattgatgtcttgcccccccaagcaaaatcgtctttcttgacttcacgatttcgaaggcaagacgaataccgcaccaacatccatagcatcatgtgaaggagacttttctctaatgaccgatgatttttctttcatcaaattggatttatcactactataggaaatcaccggtctttggacttttacctccttaggtctccacacttgcttatgtactgttcgaggctctaaatctttacatgtttggtcccttatgttttcggcctccttttctttttgacctatggcccgaaaacgttgtagcctcctcttttgagagcgagataagctggaaggtatccacttcggctgctgttgttttccaggaactaagcaatgattcttgatatttttgtttgaagtggaagttactgtgtcgctctcaattttcctactcatctctaatgcccccaggtcagatcggcctctaggcccagtcagaccggctacaagccgtcggttagacctgccaggagagtcggtcagaccggccatagactggcggttagaccggccaggagagtcggtcggaccggcagtaagccaccggtcagaccggcc

SEQ ID NO: 1758 - DNA, 2000 bp, Oryza sativa
gtatctgctcttcaagtccaatagggaatctttcgctcagtttgttttctgagtgcaaatgttgcaataactacaccaaatgaattgcaattagtatagaaagatagtacccttaaatatgaattgatttagcatgtgtcccaagaggaacaatcccttctcagaggatgccctaaaaagtggtacagagtaaaataattacttgcctgacaatcaacacgatactcgattgtgttcatcatctggagctctgaaagaattgctcttctctctttctcaacacgagaagaagaaaattttggatgaaaagctatctgggagaacaaaaatttggcagaaagagaatttgttaaacaggctacccaaatgcatgtaaaacttttatcgccaaatgaaagataattgttatttgaaaggcccttaaccaaaaagaaataaaatggtagcaaaagctgcgcatatagcctatacgtaacatcccacctcattcaatgcatccaacacagaagggagcaagtcttcaccatattcctgccacataaaagacaagctaatatgttaaacccttaaataaacaagagaagacatcaaatttggaccaccagattgaaatacctacatatgttaagcgttgaagacatgttatgcacataatatggcagtcaacagtttcccagttgattttcatatatattcttgtcaaagaaaatattcaaagcaatagaaaacagagatagacttaaagaaacaaccgatgactgcaaaagtacatacctttgttttagttggagaatgtatatggaacacggtatggtggaaatctgtatatgcattagaccttgcacctgtccccaaaagtttttcacgctttttactgccaagaaatgcaacatgctcaatcatatgtgcaattccctgctcatcttcttcctcatcaattgatccaacatgaacttccatgtgagcctcaaacctgcaaaaaagattagttagaatcttgcatcagcattgcacctaatcaccggttgacaagcatattagaacattgtgtatatgctctacatttagcacaagtttgtagtgtaatttactggcatgaactaggccccaagccaccgtataatatttgtcaatatatcaatatactgaaacaattttgatgtccaggaatcaacactaaagtatattgaatgtttaaagggtccaaaatccaaatagttatgttgcaacgaaattaacataacaacttgtcaaaagtcaaaactgtaggcccccacactgctaggaaatacaactcacggcatcccaaatcatgtaaatacttttgttatagcagctgaaggttatgttggtactgctgcaaaagaagggtttataggtggaaatgaaacaagtttcttcacctgtttgctggaactttgtttggtagaataagatatcggaggccattcttcaattgtcctcggactagctttggatgagaaggaagcggtgtgttaagaaaaccttcaagttcctccttcccaattggctgatctacataatgtttatccagagcagtttcagaccaagttggacttgcaacatgtggttcatcaggtccagcagcatgtaatacatggcgacgcctgatctgaaaatcatcaaacatcgtggtcagaattcatgaattttattccattgaaccactttaatcaagaaggggaactatgggatcatgttatactctgtagtgccatataacctttattaatttattatttcctgttttataacataattgaagctggattctttgaataaatacaagtaaatgcatcaaaacaaacatatgaaaagacgtgttcctaattctcgagtgtgttcactgttcacatgccgttgagaaccagccctgaagaatggtgctttaagcgatgatttgcagtacagtacttctttctagcttcaactttgatgttaattcaacaattagcttgccatttgtgctgtaaattaaa

SEQ ID NO: 1759 - DNA, 2000 bp, Oryza sativa
  N_region (1965)..(1965): n = any nucleotide
  N_region (1968)..(1968): n = any nucleotide
gcgcgggctcaggcgcgtcaggcgctgacggcggcggcgactggccggtcggccaccacggcgcgcgcgcgggaagcaacgggtggtgcggcgttttgagcggcgtcggcgggaagcggcagcgagagcagagagggagggggaagagaaagagagagagcgagctctctctcgctcagcgcctgagcggcgcacgtgcctcgcacgtgcgggcaaggatggagggggagggagagatgggctgagagggaatgggccagggggagggggatccggcccatccaaaattagaaggaggcaaaatagacttctgccaaaggctaatttgaaggaaaaaggagtttggaaatggaatttgacttcgaaatgggaatttggatatttttggagccgggcgaatatttggcaaggttttcaagagaggatttgaattttggaatttgatttggagacttgaattggaagaggaatttcgatgagggggaacaacgggatttgaattgagatccacgacacgacttagactcagcactcaaagaacgaaaattttcgcaattaggattttgccgaattagtttttaacgtctcacgaaaagcggagcgttacaccggatttgctataaatgtgttgccatatttttttttataaaaacatagtcagcatgtatttacattgcaagtccctaaaattcatatgtagttttagtatatttataatataagttactaaattacatacgttagttcctaaattattaatacatatataattacactaattacatatgcaactacaatagatttatactataattacatttgatatatttttacttcgcaatatttttaggtagaccttttcttaatttaaaaatcgtttgacttttaaggcgtttgacttttaaatatgttgctataactcccgatatacacaccacttcctccatctcatattataagtcgtttgattttttttctaatcaaatttctttaagtttaacaaagttttaaaaaatatagtaatattttcaacccaaaacaaatatattatcaaaatatattcaatgttaggtttattaaaactaatttaatatttgagatattgttatttttttataaattttattaaactattaaagtttaactagaaaaaaaaatcagacgactttaaaaatgaaacgtaatgagtattaatgtattatacagattgtttttaggacagccaccgattaagcccgggcggtcgatacacgacggattttgccggccgtcctgcaaatcggctgccccctgcacggggcacggcttgcaccacagcaccactcatccagcttccagccgccttcgcgcaccacggcaccacgcagttgtacacagttgtacgcgtcgtcgtgcgcagaaagtggaaaaaactcaccaggaaaaagcccgaaaaccaatcctctccatccgcgccgcagcagagcacagccgcggacattcaggtccgcgaatttccccgaattcaacacccgccgccgcggagcggggcgcgtttagcctgtagcgccgcaggcagcagcagcaaaggggggtcccgcgcggcggccgaaagggaagacgaggcgcaacaaatccccccaaaaagcagagatccgagagagcgacgaagcgacgacccgcggactggaggcaggcagggcaggcaagcgggcggaggcctccaagcggagagagagcgcgaggaggagccatgtccgcgtcttcccctcctcctcctcctgcccccgccgacgcggaggcggttccgctcttctactgctacgagtgcgagtccaccgtgtcgctgcccccgcctcccccgccgccgtcccgcccgctcttctgcccgcgctgccgcggcgagttcctcgaggaggagaaccctaaccctcctccggagccggaggaggaggaggaggtgtcgtcccttccccggccccggcntcntccccccggcttcctctccgactcctcctccg

SEQ ID NO: 1760 - DNA, 2000 bp, Oryza sativa
  N_region (461)..(461): n = any nucleotide
  N_region (464)..(464): n = any nucleotide
  N_region (1456)..(1456): n = any nucleotide
  N_region (1603)..(1603): n = any nucleotide
  N_region (1636)..(1636): n = any nucleotide
  N_region (1656)..(1656): n = any nucleotide
  N_region (1676)..(1676): n = any nucleotide
ccaaaagtcaactcaagtacagaatattttttgaatagctaagtactactacatcacttatatttaatgaatcacttatattaatttgatggtctctaccatgattatattcctttgatcattctttaaccttgctctgattgctttgatgccttgacttcagattctaagaacctaaccaaatccagccattgactaatttaggagcaaaacagcataaactctagtgatcaaagatgactagatgaggacctcaaatgacgtataaactctagtgcctggatggttgattttcggcccgaaaccaatgtaatcttccgggtttattgagcccaactacgaaaattctactgccttctttttaaagtatatatgacgctatttttcgtataacatttaaccatttattttatgtaaaaattttaatataaatatataaaggaataagttaaaattatatnggntttaaagataaaacaaatcacaacaaaataaatgatgcttattttcttgtaagatgcatgataaaacgttatgtcaaaaaatcaacgataccgcacatttaaaatggaaggagtaatacagtattttctccgcacgagtactatctcgatcctgcctcccagtccctagcattgatccgctcaaccagtctctgttcatcgtcaatgtccttcggctagtgctctttcggcgtcgatccgcgcggccagtcaatggcgagcaagagccagcaaacaattcatcttcctcaaggaggtcaagaattccctctttcccctccgattatctccctctgttaccgttcaaacaaccttgcaagcagataggaaaacatgtgtaatggttttacaggggaaaagaaatacaaatttcccaagcaaggctcttagtattaagcagtaaccatgcgctgtcacaccatcctattacctccatcccataattaaaaggattttgtgtgtgtatctcacacatggaccctatgatttttattatttttcagattgaattgccacataagcatcacattaatgacacgtgggataaagactttcaaaggagccacttcaaccaaaaccagagaaaatattataaatctcgtttgcactgattttataagtttgaggatacgttgtatctggttatgtggtctcgggatgcatttcggactcaacaaaaaatgggggacctagtgaacttgttcttattgagtaggaataagttcatctgaggtcccttaattttacgcaaatccgattttcatccttaaaccctaaaaccagatataaccggtccctaaactatcaaaaccggtgtaaatgagatccctcggcggttttgaaggcggttttggctgacgtggcgtctacgtggctggtggctggtttgactaggtctccgtcccacatgatattgacgtggcgcttacgtggcaattatatctaaaaaaatnataaaaaccatgggcccacctgtcagctaaaaataataattttaaaatagcgtggcccacgtgggccccacatgtcattccctctcccctctcagctctccctcttcctcatcaagccatctctcgcgccgcggcaccgcctcacangccggcaggagcatgccgacgaagcggagagcngcgcggcggcggcggcgggnccggcaaagccccgcggggntcggtgcctactcccgcgccgccacatcatgttagatgctgcacagcggtgaggaggagaggcggagttcgagctcagtacagcgaggattagtgtacagatcgagctaaacagccaacaggattagtggcaggcaccaacaagcagttgctgctgctgctgctcgagacatgcatgagctcgtgttcactacagtgaggccggccatctgcaagactgcaaccatgtcagatttggcacggagacgaaaaacacacatgttagtgacccaagttgttggtcgtcgtccatgctcgccaaggccgccgccattgccgccggtgt

SEQ ID NO: 1761 - DNA, 953 bp, Oryza sativa
  N_region (7)..(7): n = any nucleotide
  N_region (714)..(714): n = any nucleotide
  N_region (716)..(716): n = any nucleotide
  N_region (857)..(857): n = any nucleotide
  N_region (863)..(863): n = any nucleotide
taaatcncctctaccatataaggctgtatttacaccataaatttggtaggattaatatatcattataactacgcttaacatttgttaatattttttatcactatttacatatgtttggaagcacttattttgacaaatactttcatactttggtaatggtgtcattttaaagttgtgtcggtcactttttgcatattatattttgggatttaaagagtaggtataaatgaaaatgttcctattacaaggggcaattccttctacccgactcatgtgtaactgaaaaacacaaaaatcttgtcccggaaaagctcaaagcgcgctggccaggactcctgcccaaccaatgctaacgtgtatccatcccggctcaacccctctcctgcccaactacgatgggcctccaagtcagttgcaacgtgtatccatcccggctcacgatctatcatggactctcatgcttgtcagagtcgccttaaagcccatactgaatggaccaagtattcctggaccatctcttccagcccacacagcatcccaagacgcccagaactagtagtattctggaggaatatgttcactttagatccctcaatttgtcgcccagaccgatttcatccctgcacagcaaaaccggatacaacacatcccccaacttacaaaaccatgtaaacaagattcctcggcagtattgtgcctggttttcgctaatgntncgcctacgtgtttcttcctttgatggggtctttgtccacgtggcattgatgtgacgcttacgtggcaattcaatctcggaaaaaaaaaccatggactcacatgttagctacacaccaaataattaaaaaaatggtgaggcncgtgtngccccacatgtcatcctcactccttcctctcatctttcccgtgcattgcaaggagaagggcggagtagtggtaggcgacacagaggaggg

SEQ ID NO: 1762 - DNA, 2000 bp, Oryza sativa
  N_region (12)..(12): n = any nucleotide
  N_region (1359)..(1359): n = any nucleotide
  N_region (1372)..(1372): n = any nucleotide
  N_region (1767)..(1767): n = any nucleotide
ccaagcagccgntctttccgtcacctcggtacgtgttcaatatgttgcgcatatttgatctgttcatgttatactgtgtagtttacatgtatagatctaatgatgcgttcatgctagttttcatctgtaatgtcatgatttatttatgggatagattaaatcattatatgtctataatctcaacatcaacatccctatcagctttaaataatttgttgcattgaatacacttagctgcaagcaccaatatgccatcatatatgggttcaaagtctttccaaatctccgaagtaagttttctctttatagatctacgagatggacctatatattgccataaaatgaaattgacatggaatttcctaggaaaagattagggtcatgtcataggacaaaatcaaattgacactgatgtatggggcttttaactatttgccactcttacgaatggaccttaacgatttgccactaggcccacatgtcatagacacatgagggcccacgtgtcattgacagagcgtggcaaatcgttaattgctatgtcacaagagtggcaaatagttaaatttccccaaatgtatttgcacttaccatatccctgagaaatgttgtttgctcagatggagactttggcaatgttgtcgatgtggatcttgttactcgtgctagctactgattggatgacatcaacatggaggaggctaccaggccatcggacgtctgataaaaaacgaaatatcggacgcctctcatagcccttagtagcagcgcacctagcactatatttaaagcgcaagagcatgcagccacatgtgctagcctatgtatgcagcatgtacggctactagtactgtattataatgtacacatatatttttattctttgaactcttttctcttaaaatatatatttgatctgtgatttgattacatcattggatttgttataataaaatctttataacaagatctcagatggctatatttcgatataaaaaaactactgaaacatcgtgaaatgcttattgcaacaacaggtagtaccatatgtgacatttcaaaaacccattgcaacaaaaaaaaaaactttaaagtgcaacatagtccaattctaattgaaacatttgtttctcattgagtcaaacactgaattttaacgattgaaacatatatatttttttcgtcataatataatcatgcaagatctcattgtaaagatttaataacaacaaatacaccacagtaatcggatcatgaatcgcataattagtttggaagaaaaatggttttaaagatcatgtctcaatttgcatgttcctatatacttgcatgcaagttgtgcatgcatacggctgaggnaaagtaactgggnaagagaaatcaggaaaaacaccaggaaaggtgaatcaactttagactagtatagaggaagctggcgtccgatgtttgtcttcccgtcggacgcgcgacacgaagcattttcccatcaacatccgtatcccaggggaaccgacaataggaataattggggactttagttgctttgctggtggggaattctgtccctgcaacacacgatgcttctgttgagttgccgaagatattccactaccgtcttgagcctccatgcataattcctacggagtaaaatagaaaacatcaaaatattttacaataatcctacttactttttttaacggtataagacaacaataaaatagctatccctgaaagtaactgtctcaatatccaatgaatttgcacagnttgccaaaggagctggaaactatatctagtactaagtttcatagagacttttttgtaactattaatttcagaagttcatttgcatatgaagagtatcgaaatgacaactattacataatttcagacctataatgtagcatgtgcggcggtgacgggaggtcgcactagaacgggattgtttatctgtgacgggctgaaagcatcatcactatcgggtaaggccccccatcacg

SEQ ID NO: 1763 - DNA, 2000 bp, Oryza sativa
  N_region (1703)..(1703): n = any nucleotide
tccatccaatccatgacagcaaccaaagcattactattctatcatcttttcgtgaccagaaaatcgatgtgttaggataaaaaagaattacaggcaatactcttgcatgagttcacctcgaaaatgtgcagttctccggacaaggatttctagctaccgttatcctctcttattacaaggttacctcactatatatgtactaaactacaaagaacaagctagtttttttggaagcaatggtgcaccaacgactagatggaatcgtcaaactatcaatcaccattcaggacagctcgaaatggctccgattagatgaatgaaaatggcagtactaaggataaaagaaatctcaccttggagctgccgcaggtgcatctcgaagcaatcttacccagcctctggttctccctctccaactcctaatcacacccaattataattcaccagtagagaaaaaaaaagagaagaaacaacttcactaaatccaccgaaacagccgcgcaagaagagaaaaaggaaaaaacgaacgctggtccgcgaacctgtacgcggagccggagcgcggcgacctccgcccgcatcaccgccgcctcaccatcgcctcccgccgccgccgccgccatggcaacgttcctatcggagccctagaaccgaactgaacccacccagaagcgcaacgtcagagggacgtcgggcgtcgctccttggtccgtccgttccgaatcgcacggcgctgctgctgctacccttcgtttcgcggccgctccaatcgagcgagcaaggccgacgacgaacaggctcgcgctcggcccatgccagtgaaatcggcccaccaacatcctcgcgctccaccatggctgccgtgcgccgccgttcgctgctcggagaaagggggaagggcggaaagaagacctttgagctgatttttttaagttctaacagcgacgagatggtcagcgaacaactaacaaaacatctatctcgagggaataacggagaatcaagtattctctcatatgcattttagtagtgaagtcatgttctacagaataacccaagtttagtacaagtatgatagagttgggcaaaaaaaaaaaaggggcatattttgtgtgtatggttaattttgttttgtctagatcctggtgaaacacttttgttttggggaaatctgtcgaagttatgttcttggagtccgtttggtaaggctctaagttttaaatttaactatagtaattagatttgtactggatttatagagctatctaaacctagttttgcttctttagtttattttgtgagagtatcactccgtgccatttttaagtggagctaaaactatttgactgggatctagcttcaagagaggtagagttggagctgaagcactacgaaacatcttgacacgatagtactcaatgatgtatatatctagctttcttttgctattttagaagaaaattttttaagacaaatactaaggcaccagatgtccaatgtagcaagaatcacattctaatgttcactgttcactattgtcgaagagtgaatctcctctagcagggaagtaagaactccccccccccctcccctttgaaattcggctaaggggcgagttgagatcaagcttcgttcgtacgatgaacaccaaacacaaccaagtatacagatttaggtcgctcgggagcgtaatacccctatgnactctggtgttttagactatgtgggatgggcctgttcggctgcactcatgttggctgcatcgcagcagaaacagtgcttcgtgtaagcaagtaagcaactgcggcagcatcactgtgttgtagcggctgcaccttgcagccgaacaagcccgatgtatgtgttacagagttcttacaacgagagaaactagagttctgctccagatcatttctttcaaatgtctaatcctaagtcatcagactcctccttttatatcttaaggagagataacaattatattcttgcatggacgagga

SEQ ID NO: 1764 - DNA, 2000 bp, Oryza sativa
  N_region (1412)..(1412): n = any nucleotide
acttctcgagttcttcagcagttacagcaagtcggatggcagtaagaacaacatccttgagtctacgttcctttgattcatcctaattcttggttctgaaacttcttttttgtcagttttggctttcctcaaatatgcagcagctaactggatatgctcgcacagagaggagtatgaaccgaacatagctgggcttggaggtggctacaccctggaagctgttagtgccaatatcacttcccttgctcgtttctgaacttgcaacaattccttaacacttgatactcatttcactgtacctgtttgcttgcaagcagtggtgcgaaatctatcttcttcagcctcgtgagcaaactgaccatattcagatgacggccgtggcagccgcgcttggggtgcctctccgagtggagaacctgcataatggaccagctcaagatatctacactgccgatggcgttaacattcctcgcgtcaccttgctgtacacaggcgtccactatgatatcctttacccacgccatccttctggtgggagtgggagtaagagctcgacacaacgggctggttgctttcgtcccttctggtagggagagagctgagtttgattgctgcagatgagtatgaacattgccgaaataggtggcagacaaattttgactttttggtgacaaggagaagagaaatgtgatgatcttgattcttttgcaacttaactgtgattaagttctcttaagtgtctttgcagcagaatattttttcatgtagataaaagaaaattatattggaatcctgattggtttggttgtgctgaccaacttatgcacacccttgttgtccatatattgaatatttgcctggacaagctttctggaactgatggtttccctggactagtttggtggggagaatgaggatgaatgagatggtgtggtacaaggtgggtgaaatggtttaggatggaatgctaatcattgactgcttggttgcagttataaaacaaacaaaaaaaatggtctaattgcattagttgtatgggatgatataggatggtacaacaaattgtcctttgatagaagtaaatctatatataggtggtgtatgcatacgcctgactcgtgtttacaatgtaccagtcctaagtaaatacctcttttaataaataacattgttaactttttggtaatgttctataattcgtcttatttttaaaaattaatataaatatgctagaatgtaagtcatatttaaaatttctttgattgtacaatatatcacaacaaaataaataatatatgcaatttttttgaataggatgatgatcaatagtcggcatcatgtataaaagaacagagtgagtgtaaaaggaaaaaaaaaatctatggattaaaattaaatttgtaaacaatccncatttgaaagcaagaccttgtggacccgtggtcatttaattggtaaaatcttgtgcaaactattacatatacattactccctccattacacaatataaatcattctagcatttcccacattcatattaatgttaatgaatcttagacatcaatatgaatatgtaaaatactagaatgacttacattgtgaaatgagggaagtattaaccaagtactccctccgtattttaatgtatgacgccgttgattttttaactgacgtttgaccactcgtcttatttaaaattcttatgcaaatataaaaatacttatgtcatgcttaaagaacatttgatgataaatcaagtcacaataaaataaattataattacataaattttttgaataaaataaaaggtcaaatgtttattaaaaaattattaaaacattaaaattaaaatacagagggagtagtattcttaataaaatgatgcaaatgtcactaaacatttatttagtttgagaggaacattatcttctttctttgactgctcccttcttctacctcctctactgtatccagtgctgctgaaggcgaggcgagcacac

SEQ ID NO: 1765 - DNA, 2000 bp, Oryza sativa
  N_region (1762)..(1762): n = any nucleotide
tagcttttttcctaacaaaactttttaagatttggttaagtttatagaaaaaattagcaatatctactatataaaattaacttcattaaatgtaacattggatatattttgagagtatgtttcttttgtttgaaaatgctactgtatttttttataaatttaatcttttgtttgaaaatgctactgtatttttttataaatttaattaaatttaaataagtttgattggaaaaagttaaaaccacttgtaatatgaaacggaggtagtacaactgaaagagtagaagagtacacgttttaatttcaacaaaagctataacttgagcaccaccgtggcagaaatctatatgtgctcatggaggatagctgtatctcctggcactcaagctcaagtcgatcaccgtcgggcttccaccattgcttcagaccgtgcccgtcaccgtcaatgctcgagttcttccacaacctcgccgatggcaggagatgctgcagcgctccttctcgtcgtcgccgatcaaggagaagaacatgccaaagtacgacagcatctcattgtcgtcatctgcacctttctcgaagtagtcgatgtagcttttgcagatgatgtccccctcgtgcacgtacagctctggcgccccgccgcccacgacgtcttgaacagtttctccatctgctccgtatgagggcatgcttagttcgcaaaaagaacatttttaggtgtcatatcggatgtttgatcggatgtcagaagggattttcggacacgaatgaaaagatttcataactcgcttggaaaccgcgagacgaatcttttgagcctaattaatccgtcagtagcacatgtgggttactgtagcacttatggctaatcacgccggctcgccttcgccaccgccgattggtgattttgtctccacggctggtggattctgccaccattaccgggtgtcttcgtcttcaccgccgaccgcctttgcagccgccgactggtgctttcgcctccacggctagtggactccgccgccgttgtcaggcgtcttctttttcaccaccggccacttttgccgccgccggctggtggttttgcctatatagatggtggactccgtcatcgttgatggacatttttatcttcacagccggccgcctcagttgcgtccatggttgatgtttttgttgctattgatggacgaccttctccccacatcggctacctctgccgtcattgatgggaatattacaaagctaaatcattattaattttcttctttatatgatatttttattttactctgcctcactacatcaattggttctccattgagtagtgagtcgtgggttatatcatattttttcaacaattttcatagtatttatcttgattgcttgcgaaataatccaagtaaaaaaagtatcgatcgagttatggagctcaatttccctattcttttcgtttagtttgtcgatggatagttgcctttgggccgattcaaaccacgtggggacttgttggatggagtgtataatgcaaggttttaagtattactcgcaagaaatcaaaagcagagagataattgtgaagacgatgaagtctatcaacgacgatgtaatagaccagctgtgtagacgaggacaccaagagattaatctcgtgaccttctagaaactgaacgagattgaagtgatctttgagcgtagtcctgtaggagaacacattcgttgacagccttgatcaacttcatcttgccgttggcctgcaggntgtgcaggagcagctacggggcgggtcgatgcctgcagcgacgcagagctccgggtgcgtttgcagcaacatctcggcttttcggcacaatatatacatgcaaacaaatataatcgtgattgggttagcatataaaataatgcatggatgtgttgttgattatgggaacaggtaagcaagttaatttgtttgctccctccatgtcttgcatgctcccctgtacacacattggtcgacc

SEQ ID NO: 1766 - DNA, 1574 bp, Oryza sativa
  N_region (9)..(9): n = any nucleotide
  N_region (1283)..(1283): n = any nucleotide
gagcaaggnaatcttgtttttaatcatttccttttcctccaaaaattattaaataatactgcgagtgtccagcagccaattacttgttttttcgatgccctacagcaaatacacgtttttacggtgtcctccagctaattacacgttttttggatgtcatatagcaaattttgcctaaaaaaaatttttagctatagtttgtctattttcaccatatatatactctgttagttcaaaattagacacccgtatcaagctaaatttaattcaaatcagagtaaagcaagcaagtggaaccctctttattttgtgctagctccgcccctgctcaaactcatgtgcgtccataggccctaggtgacattcatccttcacaatcatattgtgttttataatacatctcgtcattatattgataatgcccgattgctcccataagtgagtaagagtagtgaccacctcgaaacaggctattaatataccaaatgcacattcaacatcttttctcgttgattcttgatgaagaggaaacattttttccttctccaattgacgatgccagatcgactgaacaagagttgcccattctagatagattccattggcgtatagtatcccaaattatattaatttccactgtgtagcgcatccttatcgatatacccatgagttaataagtgaatgtatgggattggttcaaaacactgatctcatcatttgatcctgctacaccggaacaaacaatgccaaatccaccggtcacaggatgccactgcctccacgatgattgttgctgcaccatagtctccatgtgtgtacattgctttctaactgtttgagcacttcttccacttcttctatgatatgttgaacatcatcaacggtgggtttcctcatatattccagtctgaatattgcaatgatgccttgatgcatgtgtgcggttgctctttttttttttagataatggaatatacacggatgcccttgtgttcttgttgttgatttgtattgtggatgcggaataggagggcatcgatgtgctgggctgtgaattttagagagccgcttgaagcatcgacttgattcaagccatcctctatgtttttatttattcgagggaacacatcaatgtcggttttaaaatgggtaccgacaaccccttcatcagtgcctaattagctgtagtgtcggttaggaaaccggcactgatatgccttttcaactggtattgttgacgatttctgtatttgtggcaaggtttagatgaggaaaggctcctnatttgacggatcgatcgaatcaatcgtgcccagcaggcagcaaagtatgcatgcatggccaaaccatagatggtgggcccacacactctggctctcctccctccttctaccgtacctcaacgccgtttcctatatttatgtcacctcgccttcgactacgtacataccaccctgcgcttgtcatcaaacaacggtcgacctcaaaccaccatcagatcgatcgagcttgaaacaaattaagccaccaaaagcaacattcccttggtgaccgtagctagactcatccatcat

SEQ ID NO: 1767 - DNA, 600 bp, Oryza sativa
tttgcggagggaggcgaagtggtttcgtttcgtttctctctcctcgttttgtaatttttcggttttggatttgtgctgaatttggtcgtaattttgggcggggagaggaatcttttttgaaaaagggtgagggttgtgtgactgctaggtgggaccgggagtttcgaggtggggatgcgattttttttggtgtggcccactgtaggtggcgtgaatcgcagagaaagcgaagcccgggaccaccaccaggtgggacattggttcctctttttgtgagttgtactgctgatgagtgagagcagaaatttaaaatcgtccgtgcacagaataagctcggtttggattagagatgatcgggatcaacaaataaagttgcatttcagccctacaaatttctctccaacattttatcaaatacggaggaggatagacttcaagcggaattaggaaaacagaaaaacagacttcaagtggaatttggaaaacaattttaaaaaatttgattataaattaaaataaaactcctgcaaagaaaaagctggaacgggatacacacgccatacacctgacaagacctctcctacttcgagcaagttagca

SEQ ID NO: 1768 - DNA, 1083 bp, Oryza sativa
  N_region (2)..(2): n = any nucleotide
  N_region (11)..(11): n = any nucleotide
  N_region (16)..(16): n = any nucleotide
  N_region (53)..(53): n = any nucleotide
  N_region (66)..(66): n = any nucleotide
  N_region (72)..(72): n = any nucleotide
gntggaaatgnttgcngcggcatgggcggttggagctttggctccagcggccngaggtgggaaacnaccganaggtggggcccacctgtcggcgtcccgagagagaggagggaggggcggcttgggccggcccacaaggaggagggaccgcgggagagggatgggccgacggcccaacaaagaaaaaggagggaaaagaaaagaaaaagagaaaaaggattttcctgggattaaaattgcactttggtgatttttaattggtaaaaaaaattatttccaaggctctgaaaattccactaaaaatcttgttaatgcattggagcatggggaactcaagaaaaattccaccacaccgaattcaattattaattgcatttattaattagggaattagctctaggttaattaagataatttcttcggacaatttatttaactaattttttttttaaagcaagcaaaaggggaaacttccgggcgtgacataggactccggatagagaaggaagttcctgcgctagtattagagtagtaattaaaaacttaggcgtggtgtctatgttagagataaccattgttagttgtgtatcccacggatttgtcaaaggtaggcggcaggtggtgatagtcctgaattccgtcctagtaatccaccaggttcgaatacatcatagagctatagccggaaccacgctggcagaccagcaggggtcggtgcccgaagcaatagatagggaattaccttgcttagcgtagataattaaagcacatagaaagttctctctagcctgcctacctatagttgttgtccttggatcgtcttaaccttagatagattacacacgttccttgagttcgatatccttttggggtcacccgaaggtgaagtgctacagcggtattccgtgtgcttgcagatttatctgtggtcataagaaataccaacactctctctctctcactctctcacctctctatcctttctcactctctcacctctctcttctctcctgggcacggccggcgcgggcacggccggcggcggccggctgcaccgcctcacttggcggcggcctcggcggc

SEQ ID NO: 1769 - DNA, 2000 bp, Oryza sativa
  N_region (1039)..(1040): n = any nucleotide
ccggaccatgattacactctccgtcgatcagggtctccatctgacggctatggcgagatgagggcacacactacagtctgggcacgcacagcagctggctcctgtactcatgcaagtgatagctccttgtgcataccaaaacgaacgagatctgcaaaccttaattatgtctgatcgtgaataacccgcattgcaccctagaataataagtgcatctgaactgcagtcagggtcagagtaacttattggagtgaactggtgttgtagggaacttcaattgtacaacttggagggcgcaatacaaatgaatggattaaatagtagaaagttgattttaaaagggctttcaacaaatgctgatgatttttttacaaaattgtaatgtttttatgagcttggaaaaggtaagtttggaaaaataaaaaaagataactcaaaactcatggcatcagcttgcattgagctcggcttagttcggctcgaactcataatcaactactttggttgcgttcggcactgcttgttaccatcctctactctctcgtttttcatacacatgttttccaaactgcttaacggcgtattttttgcaaaaaaaaaatctatagaaaagttgttttcaaaaattatactaacccattttttaagtttttttagctaatatttaaatttttcgtgcaataattcatcgctccgtttttcgtgcagaaaatgagggctgccaaccctcactcaagaactctgccttagtttggctcggagtaataataataagtcaagctgatgtgggatttcaagtcgtgagcataacaagccagctcatgagctacttgtttagttatcttcgaatacttagttctttcagttacaataaatcaaagttttgtcatcggcaaaaactcaaatatatttataataaatctataacccaagttgacaagaaataaggtgattctcatttttagtctggtcttatgaatgtcaaaagtactttcttaaatatgggtttttggattgtcaataatgggaaaccaatttnnattttggaaagataaatgaattggtaacttggcttttaaagataaatatccatctttgtatgcaattgttcggaggaaaacatcttctattgccaccgttatgggatcgatctgttccgcttaatgtttctttcaggagagctttagatggtcataatcttgtttgttggcatgagttgtgtgcctctatagtacatattcaattgaatgattcgtatgatagttttagatggaatttcaatcagaatggcttgttctcggtgagatctatgtaccaagctttaattaataatggctatatcgagagaaacaattgtatttggaagcttaaattgccacttaagattaaaattttcatgtggtacttgcttaaaggggttgtgttaaataaggataatttggcaaggcgtaactggaatggcagcttaaagtgttctttttgtttaaagaatgagtctattcaacatctctttatggattgtcattttgcgaagttcctatggagagcagttcagttctcttttggttttattcttccagttagcatatctcatatttttaatgggtgacttttgggagttgataagaaaatgagtaaactgatacttgttggagcttctgccatttgttgggcaatatggctgagtaggaacgatatggtttttgacaaatcaccatcattttcctatatgtaggttattttcagggcaactcattggctccggttttaggcacaactacaaaggtgtgatgaagatgaagagtttctgaaagttgtatgccgaaagttggagaccacggttgtcgaggagtgatcctctctagcgggagatcgtgagaacccccccccccctcatgagttcagccgggggaagaagctcgcctctagaaatcgcatataccgtccccaaggctcctagctagctcgcacacaaccaaattatacaggttcgggccgct

SEQ ID NO: 1770 - DNA, 2000 bp, Oryza sativa
tctatcttgacaattttttttaaaaaaaatttgataactttttgagcgtcatgcacaaaacgaggagatatcctctcgaggaataaaaatcaacttcccaaaacatggaatcttcatgtcaaaggggcgcaataaagaaaatatttgtgattcaataacacatagagtaattatgtgaggcaaaaaccagggataacttttctcccctttcccaacttctactctatcgttttcctcacgcacatttaccaagctactaaatggatgttttttataaaaggaaatattgaaaagttgctttgaaaaattagattaaactattttaaagttatttttgctaatacttaattaatcatgcgcaatccgtcactcgattttgtatgttaggagaaagtgttccaacacttgcaaaagaacctgtagcgtgatgcttgcacgtatgttttgtcgatgactttggggaaataaagagacttggaaacaacatctcctgttaagagcagccgctacttgtttggttgctatagttattcatgttagctcaagatactactctcttcatctcaaaattttacaatattagacccaattctatcctaatactctagatctaaacagaatgtctataggtccaatccaatattttaaaatggaggtagtacataaaatttttcatccataatatatcggtaatttgttggttcaggggtaggggtggacaggaagctcgtaactcgttagctcgctcggctcatgacaagcttggctcggctcgtttgatttttcctaacaagccgagctggaatttcagctcgttagatataacgagctagggcacatgagctgttggcctttggaattggatgttggcagagaatggtggcccaacagcccaactcggcagcccaaaaaaaaaccctagtgaccttgagaccttgacctattctcccccccaccctatccatcgcgatccggttgatctctgactctctcgatccccttctcagcttctctcgaccttctcttgtctcaagtctcgaccttctcagcttccccgctgacagccgccagccaccacccgccagccggcaccgccaagcgctgccgccagcccgccagctgccgccaccaccagccacccgccacccgccgctgccacgccatgtatgctctcgccgccgcatccggccggtgtctgccacgcaggagcgcggcgctgctgccgcatccggccaatcctcagtcaccatccaccgaaggaacttgacgcccaccaagctatggaggcagctggagcgcgacgtccacgccacactcgacctcgtcgcgccggtgaccagggccgacgctcgaactcgcttgttgtcttcctattgttgaggctcgcgagcctaatgagctagctcagagctttccaacgagttagagccgagctgggtttttagctcgctaggataacgagccgagcccgagccgagctagctcattattctaacggagccagaccgaccgcgccgaaccgagcttggctcgctctccacccctattcaggggtacaacatgccacgacaataaaaaaaatttcctgtttttcagtttggcctcactaatctttgcaacctcgaaattaataattcttcaacagctaaccaaatgtaatcagaggcaacagcaccagctattaacgatgaggattcagtacggcattacctgccatgaagacaactcatcattactggagagaaacagacatgaaaaccgaagccagttaagcaccacccaaacatcctttattaatttccatctccagcctgcataatcaaggaaaattattaaaatttaaaatttaaattaaacagcctcgttgatctgatcatctcacgcctatatatattccccaccctcctgcatcctctcgcatcgcagaaactagcactacttctctgaaaaaccctctgcttcatttcatttcgtgagtttatttcgacgatctgaaaacg

SEQ ID NO: 1771 - DNA, 2000 bp, Oryza sativa
  N_region (314)..(315): n = any nucleotide
  N_region (335)..(335): n = any nucleotide
ccgcgttatcactgttttatttagccatgcctatttacctttgttatgaccttattattgttgttattgttattattaccttgttcaccctagaataaacaaaaccccaactagtgggcactctattcatggttccactagtatgaatttaggtagatgcttcgctgattaattaggcaacattaggtggtttcgtaactctagactttgggaatattcatatcacttggacactatggaatggttggattattgtggaattggacgcacacctccccctctattcaaaactctcaaaatggttttaggctggnnttggggtgacatggattttnatagtagcacctcgagccacataaggaaccggatcttcgggcctctgttgcaaagcactaccgtacttccacatgtctagtgggtaaggcttagtttgtggctcagtctggttataaacaaaagtacacggatagagatggacgaagtcggggtcgatggacatctctaggacaaatgaaggctacacggggctgcagcccggtagtcgagatgtcatagcacagggctggtgtcctgctgctaggggctcaattctgcctgccttgtccgggggttccggccgtaggtgggttgggtcggtactcttgtctatggctaggatgggttggaaactatgtcatgtcttccgtccatatgccgtggtggtatgtggcacgtggttgcatgtgaggaagacgtgtcttgtgggtaaagatgtacacctctgatcagagtaaaacctattcgaatagccgcgccctcggttatgcgcaagcctagcaatgtacccaagttagtgttttaaattcttaaaacctgcttaataactaaaatgtggaatggttggcctgggttcgcttgggacgagctgggacccagggtcgggttgccagttcggtctgaatcatcgtaggccttgggttaaggcaggttcgtgtgggttcacggccttgtttaataatattaaatagttctaggatcgtgttttaaatttagctttgagcaactaagggtcttttaaatgctgtttattgcaaaacctaacccctatattataactccattgtactcctttgcatttatgctgcacttgtgggtgtgtcttgttgagtatggtggttgtactcagtcttgctcaatttttcccaaacccagaagaggaggccctggatgatgaaggctttggtgtctagctcgtgcctgccgtcaagcgcctgtggtcatcgccttagtcttccgctgtttttcgttgtctttgagtgtgctgggccgtcgctgcccatgtaataattaactatttacgcttctgcttgttaaactctgaattgtatcaacttttggtgtaccttgcctcctgggacaaggaataatacacgcacgtaaggaatgcccattgggttatttccggtcgtgacagcaaaccacgcttcgggaactttcggaacgacagaaactacgcgaagcacacatgcaaagctataagcctgtaaagaagcgataacaatacataaaaaagaaagcacatgcttctttaggttataacaaatattaggagacttgaacgggtcgattcggggttcgtatgaccaagagatgatcatccgaagtttaatgctgttatatggagatttgcggattattataattaggttttgcaaccataaaacatgtgtaagcgctagcctggaaaagacaggaaggctgcgctgttgacatgcggaccccacatgtcaacctaaaggaccgcggtagaccgagtacatagagacggtccacgggtcgacggaagcggaccccatgtgtcaaccgaggcgagtggccaacaaacggactccactagacaccacacgggctgcacaggtgaaaaccacgcggctaccgagcgggcacactaacacggtcaccacacgcacaagcgaacgactaccgacaccggtacacgggtaccggggccgacaaccgca

SEQ ID NO: 1772 - DNA, 2000 bp, Oryza sativa
  N_region (1151)..(1151): n = any nucleotide
aattaattccttaattatatatatttttgtcaagtcatggtgtgacttcggattgccttgtggtagaactgaagtgtgacagatttgtagtagcagaaaatctttatgcagattttttttgtatgtgggtaatactaatacttatgtatatatcgtggattttgtattggtttgatcactttgatgattcctactacctttttaataagcattggaattcagaaacgtgtagtacgtttctctctctttccaacgtaaaaacgtgtagcagtacgtgaaacgcgattccgccagccgaagttcgaattaattcgaattcggtttagaacataggaattccaagcaaatagtttattttagaaaatggattaaaaatccagcctttataccttaaaggatgtacgcggtcacagtttgaacaactattggtacttaggccttgtttatttcagtctaagctgcgagttgtttgtttctccaatatatgctcttatattggaggtatataagggcagtgggtcttatagattattagattatactaatctggcttatagattataataatctatcttaataatctacttatttattttagcttactcctaataatacagattataataatcatagactgaatcaaacagggccttcgacgtaatccctccttcctattttaaatacaatcatgagtttacatgtccaactttaattgtccatcttatttaaaaaaaataaaaaatgtaagtcgcgcataaaataatattaatattttatcatctaataaaaataaaaaaactaatcataaaaaaataaaataaaaatcaaataagacggaagatcaaagttggaaacgaaaactcatggttgcgttaaaaatggaacaggggagtacaccttaaacaagtctttccaaacaaatagtttacaataacatttgaaaaatgcaacgcatcatcacaccaaacaatgcagattacccaattagctttagctctctcagaatcaaggacgcaacttgtggttgcggcaatggggagtaggattacctgcttatgttaacacatcttatcgatctggaagcctgaagagtacatcggatcagacgtcgcaaatacatacggacgcaacacaacacaacacaggacacnaaaatcgctgtcaaatcttcagtatctttctcaccactcgattaccaacccttctccatctccttttcaattaagccctgcgctttgggttagtggacacaattaacccggtcgttgcgtctacgtagcactgtaccctgtttcgtaggtgaaaggtacaagtggttctttacttcttttttttttttgcctcttttattattaacccgttacctatagagtcgtcatttgttggcaccttgtcgttgagctattggactcatgcttaattatgctgtatttgtacagcagctagcactcgacgcagcaacgtccttcattctcgtacagtctcactgtacccaaaagggcacttgtatcgagatggggcgttaatcttgaccgctgatcacagcattagagagctcacgtggccttgacacgagatgtgggtttgcggagttgcagcccaagcccacgtgagcgctctgtacgaatcgccgtacaacttaggtgggcccgtcttgtcattgagtgactgaaaaagttcatttgggccccttaatttgacaccgaatccgatttacgtccctggaaaaaaaacagatacaacgggtctccaacttataaaaccagtgcaaacgagatccctcggtagtattgtccctttttttggttgtcgtggtacctactaggctaatttgaccatgtcttttgttccacgtggtattgacgcttacgtggtagtttacttcggaaaacaaataaaaggagcaaaattgaaaactaaataattaaaacaaaataggggcctacaaacaagataaaaaatggtgggacccacatgttaatgggtcctacttcctccac

SEQ ID NO: 1773 - DNA, 2000 bp, Oryza sativa
  N_region (128)..(128): n = any nucleotide
ccggttttaagttcaggatgctatatggacttccatccaaagtttagggtgggttggaccttttcctccacgaaatattggatagaaaatgatagtaggacttctaaaactcaactcagagagaattncaaatgggacaacggaaggtcgtggtacaagaagaggttgtcggactaataacaaaattggatatagatcatgtgtgattcaagacgacaccacgattatatatcttggagtaatacgttgttgttgccccattgctacaatatcgatatgaagctaagtcatcatgcatagcacatagactattgccaatcaaaatagtctgattgtttttttggaaaaaaatgtgtgtgtgcgcgcacgcgcgtatgtgtgatgttgtgtgttgtgtgtgcacgtgtgtgtattggaatacatacagattattcacaagcgtatatatctcaattaacaaaatgattttcggcaatacaatttttcactaaaacaaaattactattattatatctcatgattcatctcattagtaaaatcttctagcacacgcatatttataaaagaaaaaaaacactaggttcacaagttttgccattaattttacagtgactgaaggatcaatctctatttgcaacacttcaataaacagtcacaagcaacaacattaataattaattagattttacatgatcaattagtgcacattacagttataatcccatcaaactagcaagcatcggacttataattatacattcattctgtaattcggaagctagcatagaaaacttgcatcagcataacttctttagtttggcggaacaaatgtatgctaagggagatgaggctccatggaggatggcagaccatgacattgctagggaagagatgcctcactcgctggcgcggctggcggctattggcagcaattatgtcttgtatcttcataaataatcttcatttaacgcttgtatcttcctgtgtgaaaggctgcggggatacattgtatagatgcaaattgacggatcgtgatttgtaaaacaacatagagttaaatgtagaatacattcaatgcatttaagtgtgctctgattgaatttttagtacatttcgttttgcatttcaactaaaaccataagatatttgaaaaaaatatttttatgtgtgaaaaactatagaaattgttacgttattacatttttgctcaagttaatgtgttcaacacacatatagaagtatatagtatctgagatatgattgaaatttccagcaaacctattagtacatatctcttcaggaagaggaattacatgatatacacataaatttttaaccaaaatttacacgtcaaatcgtcaattccatgtcgtcttatgtgaaaaggtatatatatttgctaagcacatcactcttcaaaagttatgccgagtcaagctatcttttggagacaccatcacgagaagtccacatctcctccttgtgtttccaactatgggaggccaactctaccggatccgcactaaaaaaatagccttgcatgtagaggtatttttcaagtgctgtagagacattattttaagggacaattgctcattggactctatttcagagtcttaagtactaatctgaccctactttttagagtttactcatttgaccctgcttttgaaaaacgaagttaccttctgaccttcttttcatcacaccattaagtttcatttagaaaaaataaaaaaaaacaaattattatttgaatggaccaaaatacccttcatgacctatccattcactcctaaccctatccattcaccctaatcccatctctcatggttggcgcaaggcgagtggtggtggcagcgatggcatgcagaggggcggtggcgtcagtgcgcggaggagcagtggcgccgcctgttgccgtgcggaggaagggagggaggaatggtgttggcgggcggagggatgaggagtggcagtagcagcgtggaagggtggcg

SEQ ID NO: 1774 - DNA, 2000 bp, Oryza sativa
  N_region (977)..(977): n = any nucleotide
  N_region (1948)..(1948): n = any nucleotide
tatattgcctgattttattatacactgccaatacgaaacgtctaatggggattggggaacagtccccatcacaggttgatgtctgtaactaatggaggtttgtaatgggcaaatgccactctcagctcagctcagctcaatattcctagccctattttcttcttcgtttttctcctctcctccccttgatctcagtagcgcgtcttgttttgatacagagagcactatgaaaatgttctttgcacagaatgaatggtttatctgatacagtagtctcatgttttatcagacactcttgttattcaccagtatatcgcccatcactgtgcgttactacttagttactacttacaactaacaacggcccctttggttggataaacaagtgcgtgttgatcccttgctactcgtggttcgcatgatcagggttgaacggcttgttcaacgtgatgccaggcttatttctggtgtgattgtactttccctccagctgatatgagcgtgaagtttgatcttctgatagtttctagcggtctagcaggtgtcaagcctgggcagccagatagggaactttttaacttacgtaacttgtgtcactaacatataaattctttatctaacaatccatatattagcgaggaaagtaaatgagaagatcctcttcccagggaagttcctctggcggtctggcctcaggctcagggtagccctgtcatttagacgaacagccccatcgtttatatatatatctaataagagaaaaaacgaaatgggtatttttgcaaatgaaagataatttgtgaataaaatttttatatacatgttcttaatggtctaagatttatatacatgttcttaatggtctaagacgaatagccccatcgtttagcgaataagagaaaaaaacaaaatgggtatatttgcaaatgaaaaaaaaatgtgaatacaacttttatatacatgtatttaatgatctnaaaataaaggatgaaaaataaactacgattaataaaatcctaaaatcaactttaaatttaaaattaaaattcaaaaattttggctgagaaaggatgaggcctgaagtccaccgagagaaacaagcagcttaccgcttgcggctccgtcgacggccgccggcgcctctgcgtagagggggaaaaatgatgaaacgaaatggcgtctcaaagattcaagaaccgcgacacgcgtggcggcacgtggcgcgcgcgcgctgcccgcacaaccccacgagtacgagtgggcgtcttctccgcggctccgcatcgaggagcagtgggttcctttggattcgacgattcgagtgggccgccggcttttgtagcactagtttctgtttgcccaaaaaaaaaaaaaaaacgccacgtcccgacgcgccgacctccatcctgtgaccatcccacgttatacacacggtgattggctctgttaaaaccgtaataaagcagcttaaccacccagacaatgacgagcactaatctcattctcatctaagcaagtgccattctcttctcttctcgcactcgcgctgcaccaccaccaccaccacgcttgggcggccaaatttagccgcgcaactctctccggcggtcggcggcgagcaatgccacccccacctccgccggccgcggccatcgggaggaggtcgtccatcctcagcttcgcggcggcgcgggaccgctgcttcagccgccgcttcctcagggccggcctccgcccgctcgccatcccgctccccaccggagtcgacgacgacgcgggcaccaccgtgcacgtctgggtccccgccaacccgccgcggaacccgctcctcctcctccacggcttcggcgcctccgccacgtggcagtgggcgccctacctccgccccctcatcgccgcgggctacgaccccatcgtccccgacctcctcttcttcggcgcctcctanacccgcctcgccgaccgctccgaagccttccaggcgcgctcgatcaaggcgg

SEQ ID NO: 1775 - DNA, 2000 bp, Oryza sativa
  N_region (238)..(238): n = any nucleotide
  N_region (395)..(395): n = any nucleotide
  N_region (397)..(397): n = any nucleotide
gttatagatcagtctatactttgcagtgtatatcttttgaaagagaacatgtaagaaatgcatccagaattccagattgatatatcatcaaggaaataatattcatgggattctattaggtattatatgaaaaaaagattaattcctacttgtctgatcagctttttcttaaaagctaaaactattttaaaattctaaatttcgacttttaagaataattttagaagaattgaatttnactctcttttcttatccatcgtgaaaagagagctcattatcttaaaaaaaatcgtgaaaagagagctttggtagtgagagtggcaaaagaacccttaaaataaatacattctgaaattcaaaatcaaatttccagctttgcaaagcacacaaagagncnaatgattcgtacatgattgaggtcatgacgtaggagtataaatcttggcgtatttacgttacatttgatcacttgtgtgggcatataattaaggcttgtttgctcaagaaaccagaggccggagcaaatgcaaatttgcttggttcagctcagttcaactctcacaagtcacaaccttctttccatgactcctggaatataatccctctccatgtggggcggcgcatttttttcacaacaaaagcaacgtgtccgtgatcaagggtgtttgtcaccatgctccaacggattatcgatctgttggttcttttcagtattgattcgatagttcaaaattttgaaaacttcgtctcatgtgaaagttgaacgtcccaagtatttagggtgttggatctcatgggatttcagaattaaaattggctaactaagggcacgtataacggtgtgtaataacggtctctattcgttgccacgtaagtaaaatatatgacatggaagagagataggggggtggttgctacacatgacaatggttcgaagttgactcctaacatttgttaaagaaaattttgttgtatgggcgtggagaaaaagaaagaagtgtagaaaaaatattttggtgcattaatggttaagagtttttgttatctcaattattataggagtatagtttctaagtgatatgtattaactaagactatacctgactctacattttatatatgcctaataatgcgattgctaggaaggatagtcaggtgtggcaacatggaggaaattttatgcagcctagttgagagtttcagttccatcgtttgcttttcggcttattagtcgtaaccaaaatttaaattttccaacttaatttagaaattttttgaggttttcgtcatagtttagttttagtattggtttttaaatagttaagaatgtgaatataaaaattttacccatcaattattattatttactttctagggcttattagcgcaacaatgagatcgttatatgaagtgatcatagatgaactggttaggtccctttggtgaaaccagcctactcgaattaaagtcctagcttagacacgtgtgctcatatttatagctaattatttttacagtgttagacgatgtatccgttgacagtaaggcgctcatgattacttcgttaatttcaagatatgttagccctctcattgtgtgctcattagagtgattaaacaatgagatcattagcatatgcaccatgttaatcgagaccatttgtcaaggacctgactggcaatgatgactacgcaacggcccaaacatttcgaacaggaaaaggttctcgtaaaatttctgcaatttcatcttggcagtttttcttaaagaatttaccttgaaaagctacctattactattctgatattctccaaacaaaataggtctatttggatcggaagtaataaaccatctatatctatactaatataaaaaggaggagttggcctcctccaatcctacctgcccaatcacccgatcaatccctagcgtccatttgcatatctacttatccgtaccgtccatccgagtatcacctattcatccgatcccatccatca

SEQ ID NO: 1776 - DNA, 2000 bp, Oryza sativa
  N_region (702)..(702): n = any nucleotide
  N_region (782)..(782): n = any nucleotide
  N_region (867)..(867): n = any nucleotide
  N_region (879)..(879): n = any nucleotide
  N_region (934)..(934): n = any nucleotide
  N_region (943)..(943): n = any nucleotide
  N_region (952)..(952): n = any nucleotide
  N_region (1116)..(1116): n = any nucleotide
  N_region (1205)..(1205): n = any nucleotide
  N_region (1250)..(1250): n = any nucleotide
  N_region (1357)..(1357): n = any nucleotide
  N_region (1425)..(1425): n = any nucleotide
  N_region (1560)..(1560): n = any nucleotide
ttcaattattatatttattttggagtatcccataagggataatcattcagatcagaagctattcatatgagctacacttggtctatattacccggaagatttattactcgggagcatgttacatgcgtcatcctttaaagggtgtcgaaggcatattttttggcctaggcctaatatgtctgcagcccatattttcaggtgtggcctgtcacgttcttttagggacttaggcactttttgcttaggccaaagtgcgcgtgatcaagtgcccaataccttaaaatccttttataccgcagttacttaactttttaggagttggtacaatgcatcttaaaaggtgtcaaacagtaaagctttatatagctgtcccgctgacttttttatatataagtcaaggtgctgtttgggtttttaagcaattgattggatacaatatcattgcttttcgccacgtaagtgtgcatttttattgaccaatattatggcttaggctgattatatattgtggtcatctttctaggcggttggtaaatcctttatgagtttatttactcggattttacaccacatatgccatatatttccaggtgtggtgaaaccatgtgtcttctagggacttaagcacatctgttaaagcagtgtgcgcatggcgtatgcccaatactttggaaatttctttattcacaacatacaagcttntttatagctgttttgctatgtgaattttcaataatgtagccaagctttaggtatatcactcatcatcattttacaaagcngtcggtatatcactcggcatcatgttattcagggatttacactcgcatagttgcttacgattattaatatcaagtcgcttggttnactataattatngaagccactcggttggttggattatttattccttgactatatgcttggtttgttnacttaaccncatagtcgngggctacacctattaggtgcatctagtcgatgcacctgactttatttttcagccctccacagtcttcagatttggtaaaagtactcgggagaccatggcaaagatgattgaagcactcggctttggagtaatctggttcgagagaagattatcttttcgactgngaaggtctcaggggctactgtggagattatgggtaccccatacccacacggcatggttatccgactagttataggggataacttatatntatggaatatgtaacagatcatgacttgggtattacgtttccttntatattacggaacggcctaaagtcctggtttgataatattgtaaagtagatttaggaaaccgataccgtattggttaaggtttctatcttgtaatcctgccccccancctatataaggtgggcaggaggccctctagggggcatgagacaacctaatcgtcagatcaatacacanccggcggattcaaatccccaaacaggagtagggtattacctctcattgagagggcctgaacctgtctaaatcctttgtctccacatccatccacttttaggtctcgtgcgctaccccgttttattattgccgaantcatgtttcgacaaacagattttgcaaaatgccctttgttctacagggggcacatattcgatgaattgtggtctaagtatgccaatgttgttctagagatatatttatacactcgtggaatggatgctagaggagaattattgaacttggttgcatccaaaaatgacactactaaaaaatgattttcctgtacaggacccatttagattgcagatgggccataaattggtcgcgtctggaaaaataggctcatttttgcatgcggaccatttaagaggaccgcatagaaaaatcgattttttcgtgtggtcgattttatcgcgtgcggacttatcaagagagtcgcacgcaaaaatacacactccctcttttccctcttacccactttaaattttcccctctttctctcgtctcctctctatctctttttctcctcactc

SEQ ID NO: 1777 - DNA, 2000 bp, Oryza sativa
  N_region (486)..(486): n = any nucleotide
ttcattttatagaaggaataagttcactttacatctctcgtatcttcgacgccgagttttaattatgtttttttaccataataccaaatataacgctcatcttttaacttataaaactggtgtgaggtccaagatagtacccagttttagctgatgcaacgagtgagccacatttgtcatcggccaactcttgttcttccccccccccactcactctcttccctctcttccacatctctcatactctcacctagcctcgagcgacggcgagaagggtggataccgacttggagagggccaaccaacaaggtggactaacgggtgagcaacgagtagcaaggagagggacgaccgccgacttagagtggggcagtgggtgcggcaaactagaaggacaatggtcttcaaactagaagggcagggagcagcattcttcttcctctcttccctatcttccccatctatcaccaggcctccgagcggcgnggataagggcaatcgctgacaagccacttgttttgtatggcgcggcaaaaggcaccactaatggatagcgtcgcataggggggggggttggggacaaccccgcgccggggcagcttcaggttggtcatcggcggctatcgtgctcgcaatgcagcccaccctgatcgcctccacctcgtgaccatggcctcctgagtcccgaggacacgctcgtcatcgtctagcacactgcatacctccactagtagtcaacgtgctcctgccagctcatcctcctcgacatcatagaatttcagccccccgaggtgggccgcctccttggaaaccttccacggtcaagctcctgcgctcatgttgaccaccagtgtctccctgtcgctcgccgccccccctcctggcttgaagaggattggggaagagaggggagaggagggagagagaagaaacaagagtgggttgttgacatgtgagacccactcgccacgtgagttaagattgggcactatattaccctaggacctcaggtacacctattttgcaagtttagagacacgctatatgtatctagtatcacggtgtagtgatgtaattcaaacttgacgtatggagatctaaactgaacttattccctcgtagaatgtagaattggatgggctaatgactttggcagtcaaaaactcgttgaattgatcacctaccgtgcatttgcatttggtttaagggatgggatggttggcttggatcgagtatatttcttagcgtgtctggtttaaattgttaaatacacagttttgccataaataaattgctaaatatattatagagagtttgatcctggctcaagataaacgctggcggcatgcttaacacatacaggtcgaacgggaagtggtgtttttagttgcggacgtgtgagtaaacttccttgggagaggaacaacaactcaaaatggttgctagtttcgctaagggaaaattttcatcaatagtctgataacaaatttagcgacgtatctatagtttcgcaacagtttggtttaaaacaaaatctacttaaaaaaaactcaaatagcaaaatgtttgcccccctaggattcagaaaccagcactcgtagcccagtggatggatgatggactgtgagcagcagcagcaacaacgaccaaggagctagcaaagcaaacagcggtgaaaacgaccgggggcaacgaggcgtcgaacatgtggcgcggccgcgcggggcaagcgacgcgccggggtcccacgcgcgcggggaagaaaccgaagaatccacgagcaccaatccgcgcaatccccgcctccgcgatcaccaaatccgccgtcgcaccgtctccactcgtcccggatcaacaaaccgcctcttccacacaacacgccacgccacgcctcgccgcgccgcgccgcgacgacacgcgccaaccaaacgggtggcaggcaggcagcagcgagctgctgatgccgctgccgctgccgctgacaccccgcccgcccgccg

SEQ ID NO: 1778 - DNA, 2000 bp, Oryza sativa
  N_region (829)..(829): n = any nucleotide
  N_region (930)..(930): n = any nucleotide
caatcatggttaatagctcaactcattgtacatatcttctcaatttctactttctacctctctcaaacagacaccctaaacttccatcgaggaagatcggaatctgatctgttagttacgcctaagtgcacttgcgcggctttgttgatatctttccaaatatttgtagtttttttttgttaaaataaacgagtaattaaagtttggaaaagagcactaccaaattcagctattaaaaaacgcgagtctcaaataggctccagattcttcagttggcaacgggagaagctgatatggcgtggaatctttgatgtggaaaactgagctgtcgcattgtgaaagccattactactcctatcccaaaattttgacacattaacccttaaaaaaaatgaaccttagcaaaagttaacactccctccattccgtattataagtcattttctcctaataaaaattcttttatttgatcaagtttgtagaaaaatttaacaacatttacaacaccaaattagttttattaaattatatatatatatattttgtaaatttgatcaaacttaaaaatatttgactatagaaatcaaaaccgcttattatatgaatatttaatcttaatgccaaccccaataacattgatgttcatcatcttaattagcgtgagtaaggccatctacaatgggtaacccctaggtcgtcccctcaccgacgggcgttcgcttttccgtccgcgtctgctccctacgatggagcgcgtcccctggctgatggacgcgtctcttgccgctttttagcccagcaacgtagccaagagacgcattgggggganggggggccggggcgatgggctcctgtggacatcggttccccagctcgtattcctattccaccccttggcagaggtagagtctctgccggacgtcgacgatnaagagggagagaggagcttcgtcgcgaccaccgggaccgggacggcgccgaggcggacccacaagagagagagagcggcgagcggcggcgtcgatggatccgcggcggaggcgacggatccgcagtggagtaggcggctctccttgtcgccctaaccgacgaagctccggcagcggcggcggtcctccttgtcgcgcgacccgcgcgacgctcgctgtccgctgcctcgaccgccgcgacatgcgcgccctcgccgtccgctttgctgagagagagagagagagagagagggatagagcagagagcaagttgagggagtgagagagcagagagaaaggcgacaagaaagagggaggagtgagagccgcgttgccgacaggggtaggagaggaaattaatatatgtggctttttggttgggatacccactgtgggatagagtgttttcattcagttgcttcgagtttggaagaacccacttagctgtggcctccattgtgagctgagttcccttacaagtatcctcagttagtaagaacactttagaagtagctcatattgtaaatgccctaagatagctgccacctaatcggattgttcgagttggctagctagccaacgtggtgggcgcacgctagctaaccacccgtcacccgatatcaacgctaggccttttggtgccgttgaaatatatggcccttaagcaccatgtcagtcctgttggcgttgagatctatgatcgaacgtgatatgaatctagtattagatgtaacacgaatctaaatatatctacccttcagatttatagtacaagcatatattttttccgctattagattgctttacaatgattagattgctttccaatgggacggggagtaccatataaaggaccacacgacctagcttgtgattgctatgttccaaagcagcttgcatgtggtagctagctagtgtgaaacaggccaattcaaagtcacgcgagcaacgcgcggccaatacaaagcgagagagagcccaacttgctatctgccatttttgccaacttgctacctgccacttccagcgagc

SEQ ID NO: 1779 - DNA, 2000 bp, Oryza sativa
tctgtccttactccaaaggtgtgtttagttcacgccaaaattgaaagtttggttgaaattgaaacgatgtgacggaaaagttggaagtttatgtgtgtagaaaagttttgatgtgatggaaaagttgaaagtttaaagaaaaagtttgaaactgaactcggcccaagtggtgtgaatattgtgtaaaaaaaagggggaaaaaagaatgacgcggaggcagccacgagaccgctttaaatgcaatttacaccaaccaaatatccatggtgtaaattggaccagaccaataattgtgaaaccaaaaggaaaccgcttcgtgctgctctacgtttttttaagcaagtataggccctgtttagttcgtggggagtaatccattactctcttcccttttagtccctaggaatccaaataagagtgactaaaagtgactaaaagtgtatattggaactaaaatccattagtctttccatagggactaggcgtgtttggaggtgggtgttaggaacccatctcccatacacagaaaacggagcgatccattaacacgtgattaattaagtattagctaatttttttttcaaaaatggatcaatataaatttttttaacaacttttgtatagaaactttttgcaaaaaacgcatcatttagcagtttgaaaagcatgcacgcggaaaacgagagaggagtgttgaaaacttgctcttgcaaacacaccctaaagtggcagcctctctcttctctccccctcggtccacgtgcctttagtcctttttagttcctagatccaaatagtagggactaaaaagtttagtccaagaactaattttagtccagggaactaattttatctttttaatatactagaaaaagtgtacgtgtgttacaacggaaaaactaaatcgtgacatattttttatgcagtatttgagcattgtgaattgtgaaattgtctcacgtggctggttattgcattgcgatcgcttcatcctgattatgaaaatctcacaaaaaaaacataataggaatattctaaatacataaataatagaaataatatgaagatatgcctacatggttgtttatgcagcaacctttgaaaaatagccaagccatatcatctcatccatatcataatcggatcaggaagagcatgcagccggtgctagctgcgcttctttctaaactaataaagagagatttacgtatgcatagtattctagcacgaatcgatctgatgacctgttctcttcttctatacatgcaagcaaaaaattcgaaacagacatgtacatttgaacttagactaccgtattcatactcgaattggacgacgcaccaaacaatcagtaaaaacatcttcaatttttataatagtagagatgtttataaatagcttatagtttgctatctactgttttgtgatttgttcgaaattgtgctagttccaaccaaaatacacccaaaatatgttgacatcacacttcccaagttgatgctgtgccccccttaatcgcttgagctgtaacccccatatgatccaagcgtgatgcgtcgacgtcacgaaccaatctgcaagggacatccaaaggtgcaggctcacgtcctatcatgaattttgcctttgtcgtcctgcaaccatccaacccaatcttcatttttccttcacccaactcttcacttatccccgttctatcattttctttcatttcatatagtatatatcagtagagagaacagtaaaagttatcttcatggagtagtacacaccatttgacatcctgattatgtatagtaatttgaaacacggagatttcaagtggagttccgtagtcatttcatttgaaaatggttcggccaaaattcggtgaatgtttgttgggggcttggagtgacgtttgctactactgacggattttcagtaatagcggtgatccgttttgtcggctacggtctgtgatcttcagcacgccactcgcgctgcgcccaccattatgc

SEQ ID NO: 1780 - DNA, 2000 bp, Oryza sativa
  N_region (205)..(205): n = any nucleotide
  N_region (1848)..(1848): n = any nucleotide
  N_region (1864)..(1864): n = any nucleotide
  N_region (1966)..(1966): n = any nucleotide
  N_region (1977)..(1977): n = any nucleotide
ataatggcccgatggaccctccgacaaacgactactacagctgttaaattaagtcatgcgagattgctattgggcgatcagtcgcgcgcctccctccccgcgcgactgcacacgtgtcgcgcgcggagagagggcggcgacgtgccaggagtgagtttttcgttttttttggtttttttccttttttttcgtttatgtttgtttngttcttttcttcggttttttttctgtttggattttttttctccggtttttttatggtcggtttgtttttcccagtttatcttctttcagatttttcccttttttttaagatgtataaatacaaagtttgtattcgtatatataccaagtttgtattcgtacgtatagaaagttctatacgcgcatacaaactttctatacgggtatacaaactttttatatgcgcatacaaactttctacaggcgtatacaaactttctatacatatatacaaactttttatacgcgtatacaaagtttatatacgcgtatataaactttctatacgttatgtattttctattttttatatttttttagtgcatatacagactttgtgtatgtgtgtatatattttttatgcattaaaatatattcgtaaatatatacgtatgtatatactatacacacacacaacatacgtatatatataagatgtatacagtacctaggagagactagaggggggggggtgactgaccgcgcgcgtccggctgatcgcgtatcagcacccccctaagtcatgcccaagcgatccaaggaaagcaaattctgagtgatttccaagaaaaaaaatctgtcgcgtgatgtttagcaaaaaggatatggatgactagggaaatgggcacgatcagaaagtttaattttctgtttcatgttaattttctgtgcgagacattgacttgatcgagcatgcaactctttttgtttgtttgtgttggcttcgggactctttttgatcgatggagtatggtgttggctatgtatgatcatgttcttcaatctggaatatgatgtctagaaactgactttctgaaacaatatagatgatttcgcatttcatacatagccaccaaattcatggtttttgagaatgatcagctattattgtttgagaattatgagcatcttattgattgccgaatccaggataagaaccatcttattgatcggctattattgtttcattggtggaaccatctacctgagcagcagatattttgcactgaacatttacccagcctcacctacgacgcccgtggccaggagaagaacacgggagaggaggcacggcggcagaggagatcgtgaaagagcgagccgacgacgtcgaggagaggcgattacgatccgatggaggcgagatgggaagggagaacgcggcggcgggaatggggaagcggagttgcggccggaggaaaggcgagccgtccagctcgttgactccggcggaaaggcgagccgatacgagcgagctgagctgacccttatcgtgctgcggctccaggcgtgtgggcgcgccatcggatgcacgcctctttcacgcgtcgcgcatctgactcgggtatgcatgggctgagatttgaatccggtatgcaccaaatttttttccggtgacccacgttcgatcagcccagtacgccgcagtatatatactcctaattgtgcattacacgctcacgcatccacgcgaccagaaataacccaagaaaaaaaaaaagaagagaagaggagatcgaaatgggagagagaaagacacgggaggaaatggaggatgattacgacgaggcgctgtctcagctcagggagccggaggttccgtcnccgccgccgtccccgngcctcctcgcgatgctgcagtccgcgggcttcgcttccccgcccccgccgacgtcgacgcagcagcagcagggaatcgagctctgcagtgtctgcgctgaanaggcggcggcngcggcgttgcggcggcgcggggg

SEQ ID NO: 1781 - DNA, 2000 bp, Oryza sativa
  N_region (675)..(675): n = any nucleotide
  N_region (1226)..(1226): n = any nucleotide
gttctcggtaggataaattagcctaaagtatataagtcacatttaaggtttctttaataataaaatatgtcacagtaaaataaatgatatcctatatacctatacaaatcatcctcactattagaattctttgcttcctgctgcttccatgtcaccctttttgtcctcaccgttggatccgcatcggccgttcctcccgcatcgctcctctcctctcctctcccgcatcttgctgcggcgccggccccacgcgcatcgctccccacctctcctctctcgcatctcactgcttcgccggccccacgcgcatcgactcccctctcccgcatcgctctcctcgatcgtggcgggcagccaggaagcgcgaccaccgcgcaaacgtcgtgcctcttccattcaccgcgccacttgctttgctgattttatggcgactctcctcctcccagcgctgttgtgcgtagtagttgagggatcacgacctcctgtggttcgctccccattcacccagatcccttcgtttacacttcgatctccttcctctcacatctgtatatcattggcaataagcataaaagccatcgaatccgtttcctccgactatcaaatcgtcgcccatcttctcaaacttcccctccactttcatctccctcacatgtatgtatgtcggggcaccangttgagtccagctgcacatcgcctactcctcttcgggctaaagaacgcacttttttttatcaagggtggcccttgctgtgcccagcgccatggaggtaagcaccaccaccgcctttctaatccatgaaggtaagcaccatcatcgtcaattttgcagcccaaatacagaacagaaggaggtcgctggcactgggcaaaattgctcaacttgccgattattcagagccgattattcagagctgaaggagcacgccaatagcaggatgatgccttctgattcatcactatatctatgtgaccaggtctgaccgtctgaggcattgtccaactttcatatgtaatttttgcatactacaaatggattcagaattgaagacactattcctaacacaaaggtaaccatatcttccagcgtttaaacacttatttacatggatgcttctgttaagaaaaaaataccataggtacaaattcaattgctggttgattccaaaaatatatcatggaaaaaacattctcttccataaaattttcaggctgcaaaactgcantgctaatcttctctttgtaactcatgacacatgaacaacctaccaacaacggttcttctcctcctagattgtaacccatgtgtttatcctccagatgtgttccctttcatattattgaccctttatatgaccatcatgttatcccttctcctaacacaaaagttgcactaccgcatctggaggatcctaacataaaacatcatgacactaacaaccaaatttagtatcctcatactattaattgccaattttgtttgatttacgaaaaaaaatcctcatagacatagcactcttgaaacaacatagaagttttttaatcatattcaagttattacaatttatctgatttagctattacaatgttccgcagcaacgcagcggggtatcatcagtttatataaacactcttccccttcccactatctgccaggtacgaccgcacgagcataccaacgactagcaccgcttcctcttcctccttgttgcatctcgcccagtgcctattaggaatactttgccatatatgtacagattgtattgtattgtttctttccttgtattctcctctaattgaggatcctgtacatgtgcttcctatattaatacatggccacccctcccattgggtgtgtggtgttctccccattccattctatatggtatcagattccaagttttcttctcctcttccgctgctccagcgctgcttcctctctggtcgctgtgtccaccgagcgtcgccgcctccctggctgccacgcccttcttccctca

SEQ ID NO: 1782 - DNA, 2000 bp, Oryza sativa
  N_region (92)..(92): n = any nucleotide
  N_region (177)..(177): n = any nucleotide
cgcgggcctccccagggcgccacccgccgccgccgccgccgccgacgacgacgactgctggtgcgacgacgccccgccggccggcacggcanacggatccgaggtgatgagatccatcagcgtcgtgctggacgagtcctgcccggaggccatggccgccgcgggagtgagatctcnctccggcgagcaaagaggcttttcttgtgtgctgctgtgtcgagggatttttgcgggtcgggttggttttgtcaggttggggcaaatggagcactgaagtgccgtggccgcggcgctggctcgatccaaccgccaatttggatttggtgtactgtctgggctttggttgattggttcgacccggaccgattttgtgaattgcgaaggaaagacgaccttcacgccgatcaaatattcaaattcctccactcagctttcaaattcaaattaactagtatggcgttattcagattaattttatttcaaaccatacctttttaaaaaagttatcaaatatatgcatcatttagttttttaccaaactctaggaaatacataagaaatcatgccaaaacgatgatattgccaaattgtcgattgctaaaatttgataatatttgttttggctacaatctgaacagatcctatatataaatacttattatgatcgacatagcatgctccctctgtctatttctttttttttctttttgcaaaacataatataaacatgtatgcttatttacatgttcggtttgcctccatctacctattactgctatgtttaaatatataattttttcacgacaaggaccgtgtttagttgttttggtaaaaaaaattaacgtatacggacacacattttaagtattaaacgtagactaataacaaaataaattacagttttcacctgtaaattgcaaaacgatccattaaacataattaatccatcattagcaagtgtctattgtagcaccacattatcaaatcatggtgtaattaggttcaaaagatttgtttcacaatttacatgtaaactgtgcaattggtttttttatcgtccatatttaatgctttatgcatatatccaaatatttgatgtgatggaagagttggaagtttgaaaggcactaaacaggtttctctcttgttatatgcggttactccatatgttcttaaataatgtagcctttgatcaataattattgtaatgtttgaactactatgaaacgactaatgggggtttcatgtgcatatacattacatcatgcattttacaattaataatatataatgtgtttttaagcagggtacctttttttaagaaagagagggttcgtctcccatttctttatcgaaacgcatatagcaaagtcttttaacagagtttatatgacctgtaaggctgagttcggtagccaaagttcccagctcacttccctctttttttcacgcgcacaccttttaaaactgctaaatagtgcgtttttataaaatttttctatacaaaagttgtttaaacaattcatatcgatcaactttaaaaaaaaaactaatatttaactaatcatgcactgatggaccgctctgttttccatgcaacagtgattagttgccaacctcaggtgccgaacttaagtctgtaactcaacatacccagtaactgcatgctaaactaaaatagataatagacttccattatcaaatttgaatccccaaaggacttgcaacagacatatacgacaacacgacaaaacatgatctttcttcatttcagcctcaacgtttgcagcttccatccattttacagagttgtatagctcagcggctattctccttagcagcactaccctcagttgtagtcttctttcgctcgtcctcctgtatctgcaaaatggaccaagattcgatccaataacatacttcatgaattagttcaacgagatcatcttaaattttcttatcattgaaacatgctgcatttctagctttccacatagtcc

SEQ ID NO: 1783 - DNA, 2000 bp, Oryza sativa
  N_region (1119)..(1119): n = any nucleotide
  N_region (1124)..(1124): n = any nucleotide
  N_region (1126)..(1128): n = any nucleotide
  N_region (1132)..(1133): n = any nucleotide
  N_region (1135)..(1136): n = any nucleotide
caaggaccactcgtgaccattaattccaggccactcagaccatatgtttagtgttgcaaatagacgtagatggataacctagaagattctagtgtacataaagcgatttttgttttagaaataatacatttttaataaaaaattgtacaaataaagttcgatcattcaaaatcataagtttaacatcctatcgaacaactattcttcgatagatgacccatcaaacaacggttgttggatagaggttgtttgacgagacggtaggatttttttgcaattctttatgatgcatgtgtgtacgtgtgtgcatgggctaatgtgcatgaggtacctatagaacgttgaatgttcgagaggcctcctgcgtgcgtgcatgcatgcctgcaccttttactatttttttctcggaccaatgatcttatcaaacaattatggtccgaaccaatgttattcgataggctatctgatatatatcctgtcacacttcagttgtttgatatgatgctaaacttataattttatctggtatacctatatttttttcatttttccattaaaatcgtattatttctaaaaaaatgttgacatatagctataaagtggtaacggtgatgagcagtgaatttatctcactaattgacatgtgggaccatagagattgttaaatttggtaccaactactcctaacgtaaggtgacatttaggagccactaaacaatagtccacccattaggcattagctatggaggatgggataaattatattcaacctgctccttacaacgcattgatatttagctagtactcccccgtttcacaatgtaaattattctaacatttttcacattcatattgatgttaatgaatctagataaatatacaggaaatgctagaatgatttacattgtgaaacggaggaagtatgatttataattgtaaggataaggctgcaatggtaaaaatacaccccttcctttcctttttattttaaccagtgtaattttatctttggccaataaaaacttttaaattattatgttttgataaatgaaagtactataattatattttgcaagaaaaatacatgaaaatatgacatattttcaaaaaaaaaatatnaaaangnnnaganntnncaaagtttgtacaccgagattagtatatatttggttactacgcggtgtgaaatatgtttataaataaacaatcggatttgttagaaaacctttcaccaagatttttacccctcgaaaccttttagatttgtggccattggatcgccttgagatttgtatatgaagcgaaaaatgatagaaataaattttcacacatgtcaacattagattccattgctagttacccaaaccatagttgaatgcaagttttatataacttatattgtagtttcaatacaattatagtgcagttacaattataattcaattatagttacatctgaatcttttatactcaaaaaaaatttatagtagttttttagatactcccataaacatttttatttgtcaaagttactactccctctgtcctactcactaagacgcgcacgttttaagagtcaacttttaaatatttgaccaataaatagtttatatattattaatttaattttatttgataaaaatagtgttattggattgtcatttaaatttattttcctaataattatgattttatttctacaaacattatagcatatgagaaatttaaaatcaaatattagttttgaagactttatcaagtttgaccgtaccttagtgagtgagacagtgagacagagggagtaccaactaaagccttgttcagtttagaggggcttgaatgtgaataattctataccatgggaagtacgcaaactgatcctacgagttactcacgctcttataaatgaagttcgctcgatatctctttggtcaagtctcattccaattaagctttagcttcacaggctcacagctacactctttttggctattgttgca

SEQ ID NO: 1784 - DNA, 2000 bp, Oryza sativa
  N_region (1254)..(1254): n = any nucleotide
gagtccacacacatagggagctattgattgatcgagtatataatacgaaaatatatactttcaagtgttctgtttacacttaattttcagctgatggccctccaaggctgcatgccaactgtacatatactccctccgtttcaaaatatttgacaccgttgactttttagcacatgtttgactgttcgtcttattaaaaaaaattgtgaaatatataaaactatatgtgtacatgaaagtgtatttaacaatgaatcaaatgatatgaaaaaaaataaataattacttaaattttttaaataagacgaatggttaaacacgtactaaaaagttaatggtgtcaaatattttgaaacgaagggagtatattgttttattcagcatataatcctttttaattatttttgccgtttggcttagtagtttataaaacttgtgtgatatgacatatatatcctgacgtaacaaattaatctttaatttggtcatcgatcgtcgtctcgacctgcttgtcttaatccgacgacgagatcatgacattgcaattgcgctccagttgctgtacttggtatcttctctctcgtcgcatttatctgttcattcttcaaaattggggcgaatcaatttaattagttgattcaaaaatactactccataacaaattaataaacagtatagaagttgtactaattaaaatttattacacatgacggcacacataatataatacccacataattgcggcatcagccatctgcactggtgaggagtttgggctgcacaaaagctgctcagaggcccataagtcttctgggccgaaagtccaaacggcccaaactttgcggcccatatactatttctccagttagctcaggggtatcaagttacagtgcacctagcatttccaaagctaatcttgtgcttgatctcttcctttctggagctaattcttgcagcgtaagttgatccagttaattgctacgtacgaaggaactagcaactctacacatgctcacctttttttcttcttcttcgcacaaatcaaatgcatttgattctcttccaggaactaaatactagtagtattgcagtccaaaattggaattattttgtaaaactctgccgaatatgaaatcgggtaaaaaaaaaaatcttctccatcaattgataaaacgctgtaattatcttccggttcattacatattgccctatggatttattatcaaaggacccccaaaaccaatacgcctaacntaaagtgaataagtcttgcttcccttatctctcgctctgattgaatcgtcgtcctcaattacaaaaccgagtatagcacttcacccacctttaccaactgacgcaaatgaactccttcggtggtgttgagaagtgatttcagctaacgtggcaggttaattgcgattgactcactgagttagtaggtgagcccatatgtcatagactcatatataaaccccttgaagggaaaaaaaaatcagttacccatatgttatccatcctctctctacttctcttccttttttttctccgtctctcttacggatgggcggcagaaaggctgagagaggcgggcggcgacgaggttgagggagggaggaaagacctattcctaaatctgggccagaagtacatatgacttctctgcaaggcccagaccaacaggtccggcccacgtatcacttccgatcacgcgcacggcgcagcatggagctcgatttgggtaagaagccgtggggtgcagctagcatttcgaaacccaaatttcccatttgatcagtctctattttttcaaatccattcttgcaatacaagttggtccggccaactgctacgcggacacgaggaagtccacacgacaacccagccctcctcctcctccgcctcgtcttatacccaccaccgagacccatttccttttcatttcctcctcctcccccaaaacccactcctcctccccatcgccgccgccgccgacgagggag

SEQ ID NO: 1785 - DNA, 2000 bp, Oryza sativa
acaggagaatgccagatgtgcgggcacccgatgtagtgcgcatgcattgggcgctgctaccgcttgggcgcaccacgccgcctgttgtgccacccacgtctctcctacacgcgtcctcgtgctgccacgtgtccccaccacgcggcaccagagaggttggcaccgtcccattgtatgacggtgccaacgactctggcgccccgataagttttttcagggttctatttatgaaataagtttttttaaaaggatcagggaggtcactttggtgttgagtacgtagtatatcactagaaacaacaattttaccgtcgccattcttccaaggttggtgtttacactctgatattcttcatatctcttatatttgctggtattaacataagagtaaagtgcatagacgggtccttaaactcgtagggttgtgtcatctaggccctaaagtctaaaaatgcagattcgggtctcagaacttgtcaaagtgtatcatttagattccaaatcgatatagccctttagtatcctacgtagcgccaatgtggcatgccacatggacgtgacgtgtcattttctttttttttctttcctttttccttttcctttttgttttctgatctcattcttctttttgtttcctttcttctgctcggctcacagagaaaggagaagaaagggaaaaaaaagagaagaaaagaaggaaaaagaaaaagaaaaaattttaaatgggttccatttgtcacatcatgttcgtgtggcatgcgacatcagcgtcatgtaggatctcaaaggggctgtggcgatttgggatttagatgacatactataataatttctgagacttgaatatacattttaagagtttatagacttagatgacacaatattacaaatttaagaaccactcgtgtactttactcttatcataagttagtagtcttcagtcaacggccggtaacctcatagaacagaataaagacagggaacaaactccagattcttcccgtcagctgacaaagcgggaagaattctagttttagtgaagcggtagaagtaactattttcaaccaaagtgtttgagccccaaatcctcgcttttgttgaaaacaaaaacagtggtagatgtaattataacatgtactccctccgttttaaaatgtttgacaccgttgactttttagtacatgtttaaccgttcgtcttattcaaaaaaatttataaaatatgtaaaattatatgtgtacatgaaagtatatttaataatgaatcaaatgatatgaaaagaataaataattacttaaattttttgaataagacgaatggtcaaacatgtactaaaaagtcaacggtgtcgaacattttgaaacggagggagtattatcaatatgttttgatttgcctctcaaaataatacgtccgcatctcggcagtgcgcgtccccccttcgcccgtcacagtcggcgcgcgtgacggccttggagccagacgaaaagcaggtcgagaccgctccaccgcgcatatccacgcaacgcaactggtacgtgctgccttgacgcgcccagaaaagcggcacggcttccacatttttcggccaaatattatatccggccgtgtaccggagcacgtgccgagaacacgtcgccgtcgtcacgtctcccgccgtgatctagcgccaaccggggacgaccaatcacgtatagccggagaggtcaatagccgagtaggcgaccactcgtttggtctattggccagttagaatcgctgcaggttttaagcaagggggataaattaagagtcctggacgcgttggcgggacagggacgtgtgtttcgtcttcgagagctcgacttcactcgcaccgtgtccgtgtgttgcgtgtgtatatatagctgggcagccacgctctggtttccatcaaactagaactgaactgagcgagctagctgcttctacaactgtgcaggtagctaattaatctagcaatcctcccgtagattggaata

SEQ ID NO: 1786 - DNA, 2000 bp, Oryza sativa
cactttaccagattgcatagtttagaaggaaggtgggttagcgcctccctagcctaggccagatctgaggtcctgtgaggaggtccacgtgtccaactgtccaccattgatgccgatatgtactctaagagaggctaaatattcaggctagactctgtttgggtgaactgacccaagacgaggtcgtgccctcggagcttcttaaagacagtctcacatcctcaaagttggtgcataggaccgattggctggccaccggaaactagctaggttgttgcaccattttctgttggggaccatgactctaggttgctcgggaaatgccagatatgcattggacaaaacaggtcaagcagagcaggtgggtcaccccttccatgggatgttttgctgctaaagtaaaaccagtgtagagtttaatgagttagctagggtttatgattatgtacaatatcctttgcctcggggtggtggtggttgtgggggggttatctataatgtcctataagatcatttgggactctatagacgatattcaaagatagaatcaacaagaaatgaaggattcattcatagctagctcgagtgctccacaacttagtacaaacgttgttgatagtgacctagaacagtagtagggttgttatcattcgggaggcccgaacctgtatggttcttctcgctcccaagcactcccaaacacaccgagtgcacccagagccccttatcgatccctaacatgtgatctatcacgtcagcgatcccgaatcaaattgcatgggaaattcgactattgtacctattataatatattctacaaaaccctgtagaaaaccaaagaatgatgccgacgacattggccaataaaaaactgaacccataaaatcattggctatcttctcctagattccattgcaatgcatggacatgtctctaagtaggagagcatcctaccttattggctatcgtttaggagtaggaaaggacatctatgatcctacaactgaagtctggctaattcaagatctttagcccattggacactagggtgtgaagacccgatagatcgtgggtgtctgctggactgtgagctcgagggaccgttgatgtacagtgaatggacagtgaacgggtaagaggcaccaatttatatgaatagagagattgttgaatagtctcacatacttcatgtgtgaaaaaagggccctctcgatctccctcaacggcaaccgcgaagccctgctaactctgaattctgaataaagaattctcgtacagctagttcgctgttggtcccaaccggtctactggggccaatccactttcatgtgatgtcaagttgggcactccaggggaaactattttcatcctcaaggggatatcccctcgttgtttgtatgtcactataatggttatgaacaaaattgaaaaaaaaattgagaagatgtattaacatgtgatatatcactttacaaacatgcaagttcaaattcaacttctacatctcgtaacgaaaaaaaccaatttgactataaatatacgttaactagttgtagtttaatttgtattttccgttgcgagatgtagaagttgaattttaacttgcatgtttgtggagggatacatcatatgttaatatatcttcttaatttttttaattttttcataaccatttacttcctccgtttcacaatgtaagtcattctatcatttcccacattcatatcgatgtcaatgaatctagatagatatatatgcctagattcattaacatcaatgtgaatatggaaaatgttagaatgacttatattgtgaaacgaagggagtaagtgacatgcaaataacgaggggatgaaaatccactcccgcactccagtctgtgtttgcttgccttctcaaggcactaactaacttagagttaagctataaaagcaagcaaacatacactattatctactagtacatccttaacatcgatcaatgcaaccaccacaacgtac

SEQ ID NO: 1787 - DNA, 2000 bp, Oryza sativa
  N_region (1317)..(1317): n = any nucleotide
  N_region (1809)..(1809): n = any nucleotide
aaatccattttgaaaccactaagtgatttatttctttttgagtttggatcgaaaagagacttgtgtctcgattcgacttaagagacgcttttcaacaactcaaatggtaatgtaccgacctcccgggtcagatcattacttctcggctcccagagccatttcacttgattaagcggctcccagagccttattcattttctcggactcccagagtccagctgcccagcagtacaacaatccgcttccactcgggaagcctagtctatgatgcctgcagacatcccgaatcacacagattcgtttctgaccactcaggtcgtccatctgccacataggctgattctggttacgattcccacaccacaacaacttttcacaaagcacaggcaaacaaatctacgcaacgggaaccacctcacatccacccatgaccgtgggcacggctgttcgaacagttagttaacctctgcagaggggtacactttacccacaagacacgaacttactccagacactggccggtgtcagaggttcacgacaaagcctttccaaaccgagtctgggttacctcatgccacatagaaggatcaaatcctcacataaatataggccattttagttttcacaaatcaaactccaaccacctcgatcggtaatctggcaagcttcgcgttcttgccttaccaggaacccgggttggctccaaccgaccccgccccggcgttccccaactattggcatgcgaggttttctcgaaccgactagatacttagctaaggtgtcccatatcaccttgtggttgcactttgttatgcttgatgagtttcccacaggaatcgatccttatatgcgaatacgggacagcgccacgcaggcaccaccctcgcatcgcgagttttcacaattcattttatttttaaacacaccgacaccacatgtcgggttttcaaggcttctcaaacccatttcccaatttttcaacaatcaacggtgtatgtgggatatttggtatacgcgcttagagagcacgaataccgaagtaccgcaagggtggagcgacaaggaatcagggtagtacaacctacaggaattagtgcgactactgggtaggtccgtcggtttggcacgcaaaccgaggccaagtaagttaagtgtgtgattctaataatgcaagttgcaaacaaagtaataatgattttccaattataggagaaattgatcaaagggtgactgccttgctcaaggtcttcacgaagcttcgcgaatcctcgagaaaacccgcgatagacgaaaatccggtaaccgcaactatacgcnaacaattaaaacctaaaccaagacccaggaaagaatcatattttagactaaataatagtaccattaagtatatctcaattttacagaattactgaaagtggaacagagtcaatcggacgaatggaacgagagatatgaattttggaagtttaattggatttttctggacaaggaaatgatttatcggaattatctggaatatgagaaatggcttatggaatttatcaagaatattattgatagtcatggacgagcgggaccaggggtgtactgtacaaaggggagattaaatggacttttgttggctatgggcttggattagggagtaaaagtacacttttctctttcccttatgccaagaagggggtggctgatgggccaagcccacgagcggaaggggctgaggaggcggctgattgggcgctgacggggcaggctcgtccgagtcagcttgacttggtcaagctgacgtggctgccacgtcggggagcnggaaggggaatatgagaccgaacagccgatccgacggccggcggcgagcggcgtattccggcgaacggcggcgaatcagaggaagggtgggcaccggtagaaggagggggagaagtggaatcgatccaacggagtggatgagggagagacagcgcgacggcagccgtgcggcgagataccgagcgcggtgg

SEQ ID NO: 1788 - DNA, 2000 bp, Oryza sativa
tttaatgaagatgaatataaaattaggacatataaaaacaagaaagtcattattgtaaaattaggttagttttagttattacaaacttaaaaataattgatttaatatttttaaagcaacttttatatagaaagtttatgtacgaaatacggataaaatctgtatgttaatcagagaagaaaattgtgtttatcatatcacgagatgtcggcaagtttacgattgccatgcttaggtctgaagaagctacccaaaaattgtcctaccatttttagcgtgtagaaatgatcctttttctattactatgaaattcttatgtaatggatcggtccatttggaaccctatgcatttggaattgaaatttgtactggttggcatttgtggacggagggagtacgagtaactcgtaccgtcggccctatgcccggagcaatatgaatgccgctcagtggtgacgcgacgagcgccgtgcagccggtgcaggcagcaggctatcatctggtcccagccgcgtcaccgattcaatccacctgaagaattcctccagctagcggagcggtccagcccaatctcacgcgaagccatgcacacgcaagcagctctcgggcagagcgcgcggcgccctcgtccgtcctagagctgcccgacgaggccgatggcttcaggctcgccaaagccgcgctcgctatcgctgcctttgcacggagtagtgtctaatctgaccccgcgcccgccaattgcagtacacgacgtagggactgacggactgtggcctgtactactccagagtgtagtagagtctgtagagcatgtaatacctggactggagtagtggagtcgtgtctcgatcggcgcatggagggacggtccgtcgacgtacgtgtggaccatggaggaggagacgccgcctgcgacgctgagctgagccgtgtcgtgtgggcgtgtggcaatgtgccacgcccacgcgcaggagcgtggacctcgcgaattaacggcgctcgtggcctcgtgctttgctcgccccgcgctgcgcgcacccatggctcggctggctcctggcgacatcgtgggatgctggaaacgtgcccagaggcctcgtcgtttgcacctgcctacacacgcgtttgctagtacaatgcaaggatccaagagtatacggcggcaatgtaacgtaaattcctccaaggatttctactgtaccaaccacgttttgtgggcttaaacatgtactgtacatgcaacagagagatgcacgctgtcacacttcctcaactggctcgatgtcacacccttcaattctccttttttttttttcagaggtactcctgacattagtgaagcatcatctagtctagcagtaacaaggttaacgaaaggaaaaggtcaactttaaccgactcccttaatagtacgctgaatttaattcgtacctctcaacaaaaaaaccggatagaactactcctcaaactattaaaatcagtgcaatttgactctctcagtggttttaagtggcggttttactggcatgacactgttgacctgatattcatcccaggtggtgtttatgtggcattagagcatctccataagtgactctccaagttaaattttagcctacacatgaaaaaaactccctccatcagcctagctacttggattgccaagccatatggctggccaaacgagcttctcaactggccaaatttggccagcctcctcccagttgccaaacggtgggccccactgtgggtcccacctaactctttctttgcttccctcttctcttagccgacggccagctctcatgccctctaccgacggcgccgatggctagctcccacggaggttcgagatggccggcaagtggcgcaaggtggtcggcggcggcaccaacggtggaggaaggcatgcaatggggcggcggagggggacgtggcgaccgtgagtgagagagggcgcagagacgacggacttggagggacgtggcatcgagggaggg

SEQ ID NO: 1789 - DNA, 859 bp, Oryza sativa
ccttattaattgctgttgtctctgcactctagcaatctctcttgctgctgctagtgtttgtgccggagcgaaggaggcccttgtagctttccattcccggccacccatcatcgtcggagttgacgtcgaggggggccatgcctatcctgaagcactaccgttgtcggatctaataaagtggtacgggaagttggtgaaagggtcttacccgccggcgggggaaagtgaatcggcctgcgacatgaagtccctcgtgccggagccgtcgccgtccatctccggctaggtcttggactggtgcggcggacgagttcggcggaggtggaggcggatgcgggcatgagtggtggcagcgacgggtgagatcagcggaggcagagccggcatgagcggcggcgcgagcggagcaagggtgagagagcgagcggatagggaaatttttgggagcggatgagagagagagagcgagtgaggggcagtgcgcgtcccgcatggggcccaacgcttttttgccaaatttgctgctctggactcccaaatgataaatgtcaatttgtctactttttactactagtgtttagatctattttgctaaaatattgtccaaaccgacaaaaaaaaattactattttagtggatctaaacagatcctgaattttctttgtttgctgagctgatgaagaagtccgaggtcaaacaagagacaagtcacatcacttcaatttcttcttcaattttgtctctgcagcttcatcaccttgagagcagtaggggtcctatacgtcagtcacagcccgcacccggtcaaacgaagcgacagtacttagcttgacggagagcatctccgcagtccgcagcc

SEQ ID NO: 1790 - DNA, 2000 bp, Oryza sativa
cttttgatgggccatatggagacaaggtgtcctcgtacggaaaaagtacgtccgaggtccctcatcttgtcaccgaattacaaaatcgtcactcaactaaaaaaaccagatgtataagatccctcaacttacaaaactagatcattccaggtccttagacaacattgatcctggttttgtccgacatgacgactgagtcaccatggaacccacgtgaaccccacatatcaaggtgaccacggcattaccctctctcttatcctcttctctccctttctaccctttctcgtttttcttgtcgtcatttgggtgggctggctgtccggtgcggagaggaggaggtccgacggccgacgacgagcgacatggcggcgctgggtagagggaagcgtcgggagcgaaggaggctggcgaggtgaggtgggagaggaggcaaccacggtgaccataccatggaggagggcaccggcggtgaataggagctggatggcgcagaggagatgggcggggtcatccgcggaggagtggagaagcttgggagagaaatggggaagggcaaggtgcatacctcgccatcgtcctcatgtccttccttcctgtctgacgcaagaaaagagaggaagaagagagaaaaggaataaggggatctgatcaattggcccacccatttttattattttataatttgtttcttgatgaaaccgtcacataagcgccatgtgagatgaagatctagtcgaaggagccacattggtgccttgttagctgaaactggggacaataccatcgaaggattttgtttgcactggttttaaaagttggaggatacattgtatttggttttttggttaagggatgattttgtaaatcggcgacaagagtaggtatctccggtgtactttttcctcctcacaagtcacagagaagtatttggtgggagcctgggccggcacacatgggcgcggcggagaattcacaaaggaaactaggagcccgaggccgagtagaacacgggcattctggcccatttatggcgtggtcccgtagcgatccatgaatccatcagaaaaatcccaacaaatccagattctgccggcgatgaactggagttggtcgtcgcaagccgaagggatgaagaagataatgaagaagctgaggaagtggaggatgctgcaggagcagatcgaccgcacatcctgtcacgatgtccgccccgcgaccgtgttacagagcgaagatctggcggcgagcgaggcggaggaggaggcgctcctgcagcttggacgccgacggtgcggaggccatatatacggcacctgaacgagtactggaaggagcagcaggagtgggtcaaggcggagctcgctgcccatggctacgtcgagtgcgagatcgacgacaacggcgacaacccttgcacctgcggctgtgcacacgccggtcgtggagaagacgaagaggaaggctatggacagcgactgtggatgcgatgacgacgatgatggagaagatgaacgggaagcaaccgaagagacgaaggaaatttgagaatttgcgggatatggacagagaatttgagctaattggacatgattttggccaactaggattacatcatattaccattaccaatgttcaaatattcaagggtcaaaatatatctacacaataaagaacagaagcttttacatatggcagaaatttgcaactcttgagtcatctgcacttctctttcagtactttggcactcttattacagtttgagctttatcaaacaataatttatactagtagtaaaactaaacaaacaaattgaaataaaatataactccacagccactgtgccgtgtgcaacttgcgaacaacttgtccttaaacattaattaatggcgcgacagatttgtcgcattggtcacatcgaagatcaaagcaccacatcactcctgcaattcactcaaaaagaaaaaaaaaactctcctccacacttggtgcagcaagag

SEQ ID NO: 1791 - DNA, 2000 bp, Oryza sativa
  N_region (178)..(178): n = any nucleotide
  N_region (198)..(198): n = any nucleotide
  N_region (347)..(347): n = any nucleotide
  N_region (365)..(365): n = any nucleotide
ggcgaccgccacatcggattcgccgccccgcctcggcgcttcggcggtaaccgccggcaacaacaaacacctcgcctctctctctctctctctctctctctctcttcccctttctctctcgctcgccgctcgccggcgacgcgggcaggaaaccgcacgcgatccggttggtgaagcntttcggcgccggagcggccngagggaggccctggccagtggccacgtttcatcttggagcccatgggcacgcggtgcagcccgggggatagctcgtcgaccggcaggtgacagccctcgcaggtcgcagctggagcccggggccgaacggatccgcggaccgcggggcntgggcgtggccgcgggcnggggcttcgagtcgatcctcgacctgctgcgtcccgcggggctgggcgtgtcgccgatcctcatgcgcggtggcgtgctgcggcccacgcgggggcttggcgtggcggttgcgccgttcgagaaacggccagtacgtgcggctcctcaaccgcggccgcggcggctacctcttcgccgacgagtcagatattgacgctgcgtacgagtactacgcgcagctgcgctatatccagatattgacgctgcgtagggaaaaaaaaaggaataggatcagacaattccatcgacacctccaccattttactacagcaaacgggatggctccagaggagtaaaagtttcctctgtttttctgaaatctgaacagtccctggcaatggattagtctactgtcactactagcattaggttaatcagttaccaaactgtccaatttgtggactcttctttcacatctccttttgagacattaggagatcaatctggttcttctgatatttctgagttctgacatttcagaggaaccacgaatgtgttgcttgctcataggaatgggatgaagtccctacctctctgtggctgatatgttaacttgatagaaattggatagttcggtatgctttttctccctcaattcgatatttcaattcctttttaggccctttttacatgcgttcgtgaaggccttgcagtcttcggttggtgaaatctgctgcactagtcttctgcccttcgaagaggacattattttcttttgaagctttgtaggagagctaagctaccaccttcgttctcttgggccttcgaatatgataccaagtttctcagttcatttccttcggaaaaaaaataagcacgcaaatatataggagtagtacaaataacgtcaggaataaatgctttgtatcaaattaccatgacatttgatctcaacactgtgccactcaacaagtcaacagaatagggtttattcaatttagaggaattttaacccctataaataggaaaaaaaagaaataggaatgcatgtacactttaatctattttttttaaaaaaaggtatgagttgatgaaaattttcaaatgatttctctctacaacttctaggaaggaaaaatttctaatggttttctatacttacattcctacaaaccaaatggcacccaaaggaattaatccttagtaatccaaatcctttgtttttcctccaaacttaacaagaagaatgtattttctccaagattaatttttgatttataatttctcatatactataattttataacaactaaattataaccatataaagtaaactaaaatatcaaatcaatgatattattttcagtaaataaagtccaattcatattatactaattgttgaccaaaccttttaaaagttgattcttaatatatatgcatatatcatattatgagatggatgtagtaaataaaagattaaatttgcaagtagaacttgtttcaggatccccagaaacatgccaacccttttcttgtatttttcgacttcatatcagtacaatggcctgatcttggaatttcatattagttctgtataaactaagttaaaactatagtttgccggatcaatctctagctagggaaatcctccgagc

SEQ ID NO: 1792 - DNA, 2000 bp, Oryza sativa
  N_region (1820)..(1820): n = any nucleotide
catatttgacaaggacatgataattattttcgttgtcctttttacctggttcggggaactaaactgcaaagaaggctagatcatactgtatcctaacacatacagtatttttctaattatttatttaatcttttggttgataatgttcccccacaattgtagagacctgacaaatcattaccaattcaggtttgttgtaatgcattatcgattgttgtgtgccttgaaaaaatactactcctagtcgtgcaatcctcattctggagtctccagatttgtttgcattgtcgacgtgacttagctgggcaagaaagccttggtatcatggtatgccagtttggcggtacactgcatgcaatgctgatactggagcgaacccagttgtgtacacatgctaatttatagtgaaatgcagctgctttttctggtaatttgttgccatattattcttatctcccttgcttcaatagcttatgttcttgattagtcagcggcaacctatttgtgcatgcttgtttgagccgaggtaattttgagttttagaattaattaaggatttttattatctttttcgtcacttagtttcagctgttactagatcactgtattcgaaaattattttttttggtagatctgtcgtatatatttgatttgtgtttgtaagtcatagtgaacaaaaaaaaatattttcaagcagtacacgaagtagggatggtaattttgcccatgggtccggcgagaacgacatatttactaataataagttatgatgtaattcaaattattgttaataaatgataatttggtaaattattgattttatttctctttattaaattatgtatctttcgagttactccctccattacaaaatataagtcacaaccacccttaatctaaagaccaagaaataattattatcatcttgtagtttggatcatcctaataaatactaatgcatgcatccaataggattagataacatgagagtggaggatttaaaaaagtaataatttaatggagaagatgtcatagttaattgcatgtttgcatatatgccttatattatggaacatctaaaaaaatggttgtgccttatattatggaatagagggagtattattcatgtgagatccattaggacctgccgggcatatccgtgcctgtcgagcatgggtacgggcacggagttttacccgctaaccctattaggtagggttcggacaggtgacgacgagcatgggatcgggtatagttttgctctacccgtgccccacccaaccctttgccatccctggacgtgagtgcacctcggagacgctgcgatgctgtggtgactgatgactgttgctgccactcgccaccaaacgggagtaagagcattaattgcttgattaattcgttaattaattaactagtaggctgctgatgctgatcatggggacaaaaggtcagcgtttagcttacggagatccacatttgatggcaccggttccgggagaaatcccatgctctggggttaaaaatttgggagctggccttttacagccgtaaaacactacttaaaacacactctaattaaagttacatcaatactaataatactaataataaaactgcactagaggaaaaaacataggtgaaatttgagaatcatctgcaaaatcactatttcctttttaaaaaattttggtttggacgaattttgtcatttcgaggagtctctccatcgtttgacgagctggaggaggatctcgttccacgtgtcgatggggcccgggaggcaccagtgcacgcagtcgttgggcacccgggccctntggccgccggcgaacgggaacgcgttcatgtacggcccccgggtgcccgtcgccgcgaagcgccgcaatcgccgtcacctccaggcgcctccaaccttctagcgaccgggggcgcgcaccctcgcgtccgccgccgccgccgccacctcctccgcctccgcgcgccccatctcccggtcc

SEQ ID NO: 1793 - DNA, 429 bp, Oryza sativa
tgaaattcgagaatcgcttggatatatatatttttggaaaatcatgagctgtaattagtagttcaatcatttcaaattagcatgcgagtttttttaaagatatttcttgtatgactcctgtatttctaaaagccaacgaacttaaaacctaactcaaatacgggtctatatttgcaaaagcgaacgaacttaaaaatcaactcatacacggataacgtaccaaagtaccagaaaaatatcttcaatttttataatagtggagatatatactttttgcaactaatcatgaaacgcgggaatagccctatgcgatttattcctttacgaatatatatattagggtcctttattcttgtcgttataccatcctccacgagtaaacttcaatttttttttatgcagcttagtacacgtattggctaactcaca

SEQ ID NO: 1794 - DNA, 2000 bp, Oryza sativa
  N_region (1704)..(1704): n = any nucleotide
aatcataattaaacttgagttgctatcctccgaaaaaaaatattagagttgctgaatgcctctagcatagttaagaatatatagtggcctaaattaatggttggagtgtccaacttgaactgtttgatacctgagccgaaaaactatagctctttccatattaggcacatgcttagttaaagccttcgagttgtgtgcattacgtcacatgcaaacaatgcaggccaattaattgcacgtgaaaattcgaccgaatgaatcgtgcaacgttgaaatcctattctcaagcatacacaaaagaacttcaatctctacgaaccgacgatactttagttgataaggtttcttggcagaatttgttcattggcagctcaagttctagagtgagtacaagtactcatatttatgattatttatttttttttagtaatgagcgatgtactaatcagctacaagacacaagtaattttatcaattttaagttatatcaattatttgtataagtacatgtaagcccctactcatgagccaaatgatgatcagtggtttgcaggtcacctcgggctcggttcgtttcacaaacgagctacgaaagaggcttgagcttagctcatttggctttcaagctgagctgagccgagttggtcaaacgggcctaagctttttatccacctatgttcgtgtgtaacttttagtactagtatatttatgttaccgctattcattccaccacagatctaatggttgaaaatggttacaccacatgtcaagtcacaagtagggagataaaacattttgggtagtaaaataggatcccatctcgctcatgacgattagtccttttacttagtcatatagcccattgccccacatgtccttggttttgctctcgcggggatgagaagacattgaattaggttaggcggtgaagaaaatctatggaaggagactcctaccaagaaatctccttgctggtagtctcaagaggtgaacacggagcttaaaaaaaacattgctaaaggcattataagagagatgatggttcttagagttgaagaatcaaggaaagaaacgagatataggaaaaggctaaccaatggagaaagatgatatagagttagcgatagagaaggctatgaaagggaggcaccgatacaccagccactagaaacgaacaaggaaagggaagagtattggagaaggtgttatcacaaaagtagaattgagatccctctaccttctgtctttaaacgcactgtgttttaatcactgacatatgggtcagtgatttattaggcttacacgtcagtgacaaaattaaagtcgcgtgacttcaaaactagaggagcttgatcctcatagagtgataccttggaaatacccagagctacctcctccaaaagcaaaaccccaaaaacatttttttaaaaaaacacgtatacagccaaaatacgttacacggtggcctagccagtatataagttgaattgaagccttgaaggtatataggcaactggttagacttttttttccctttgcccataataaagccatctctcataaagccatcgacctcatctcctcctcctcctctctctgtctctctctggctgttcttatcagtttacgttgtcctcatcgtcgccggcgccgccctccaaagcttcatagatagctcgatcgatcgatcccgtcgtcgtcgancgtcgtcgacgcagcagcctcgccggcggccggagactggggagatcgatcgagagggagggaggttgagtaaggtggatccacgggtcaggcatggcaagaggcccctaccggccggcgaggaggaggaagaagaccagccaccgcctccgacaccaccagcaaagcaggagcagcaggacgaggaggagctcgccgcggtcgtcatcagcggcggcggagcaggagcagctccggcgccggagacgtacgcgcagtactactacgcggcgcgcgccgaccacgacgcctccgcc

SEQ ID NO: 1795 - DNA, 2000 bp, Oryza sativa
tgccaacagacaactgatcctggtgaaggatccacgtggctgcctgggagtccgttaatctaaaaaagaaattccttttgttggctggctcaatggaacattgtcgtcccatgatatgatggtgatcaccatgatcaactaattaatgatgtgaaaccaccgaaggaaactatgaagtgaattagagcaatgagtcaattctcgatgtcgtagtgtcataggtcagtgtctagatgagagagcacattaaatattaatttaaacctaacctccccaatacatagtttcttcatgttttttttctataaaaatagatataacaaacatttgtgtaggggtcaccgcatttctataggaggccatgacaagaaaactactagcatgtcattgtgcagttttcttgagtcgtcatattttaactctcaattagctcaggcgccacatcaaatttttagcttatgtggcagcataattaaatctatggaaactatcctacctagagcactggagcactaggactgcccttatagattactcgtttaggattcacccttcttttaaaaacaaatgttaagagatggccgaattcattaattaatatacaaagtttcaagttaaagttatatttttcgctcattactaagtccggttagtgctggagtagatatacttagttttgttgttatgttagttgatttacattgcagttcgtggaagctttgtccgtgatcgaaattgttgcttctgtacggtagccgtgatcaagaggaatatgacattatcttacagagcatcagtgatctataaatttccaggacaaactgatctagcacagaatgaagcagcagagaaaccaaaaatgagatatttggagcctccacccggagcggaccaccagagagatggcggagtcggcgaaagatggaggtcgcggtggacatcaccaccattaatgggaaggtcgatgtctcaggcttgcggttgcagctgagaaacctcacagagttttcagctgtgaccacatttgattgattgaagtgctaaggactaaggtaacgtgatttctgcaataacgctttggaattttgggtcgctgccgaggttcttcaaacccgaatactctgttcacagttctgagattatatttctttttcctagtatatattgcggttgtgatattcttctctcgatgtttgcaaaaaaaaaacagagaaggaaaataaataactttcttcttctgatgttatagctgcacgctatttgtttgaatgaaatagctgagtggacagctacgtgacatggtccgtatgtgcataagtttcataaatatttgaaacctcttccaaggttatatagtcatatggaattcttttttaatataaagcaactatattgttgttggaccattcattgtgttggcggatggcattgtgttgacggatggcatgaggcccttcgaccaaatctgccgaaacccgtggcgaaggctatggagcaagaacggcgtgaggcgaagagtcgtacgagtgtcttgccaggccagaggcgtctcaggcgaagggtgcaaggcgaagactatctgccgaaggaagacgacttcgccatggcaagttcgcccccgcgagggccgaggaagcctttccggcccaacaagcttaggggctatagggctagcgatcgccagacggcccatcaggggcccatgagcccctataacattatgtacccctgtaaatgtccctttcgtaagggtaatcatgtaaattcccctgtacaacctaaaccctaatagtaaaaacctgtaatggggctattaatagtctcctagggccatgtaatggggggaggggaaaaaaagaaagaaaacaattcaaaattcaatacacttcgtttccttccaaccactgttgagtaaccacgtctttcgacgtatgcagttgtcatttcgacaacagctggcgccgaccgtggggacctccgagcgaaaccactgagagcga

SEQ ID NO: 1796 - DNA, 2000 bp, Oryza sativa
  N_region (1049)..(1049): n = any nucleotide
  N_region (1983)..(1983): n = any nucleotide
aggtcaccaggattagagtatgagtcggactctatcctaggatctctcataaatagaggggcgtgcctgttataaccgtatgacgacttagcatagcgagagggagcggctgccggcggcgaccgatcgtgagtcgttgtaactctgatatgctgtatatgctggattggggaggagcgtcagtaatcagtgcctcggagatgtaggcttcagctgaactccgttatcaaatatcgtgcctcggtgtcgtcatcgttttggatctcctatgacgttttcttccgcgtttggtttccgatgtcgttttcggagctggttttataacaaaaccattgttcctaaacaaagttgaaggccagataagtgaagactagttcatactagagggaacatctcgcacaaatagttacgggaaatcgcaaaattcataaacaattgctgctttaggtgaaaaaagatggctattcagacccgactatataaaaataccaaatcgctacaatcacaaagtcagttaatggccagagctggattaagtgaaacgttcagttcatcccggcaccatataaagaaccagtaaagatagtatgatagaccgaccttttttctcaaatactccctccgtttcaaaatatttgacaccgttgactttctagtacgtgtttgaccattcgtcttattcaaaaaatttaaataattatttattcttttcatatcatttgattcattgttacatatactttcacgtacacatatagttttacatatttcacaaattattttgaataagacgaacggtcaaacatgtgctaaaaaatcaacggtgtcaaacattttgaaacggagggagtatattgaaactcctatttaagaagactgaattcttggcccatccaacatccaggaaagagataccatcctgggatttaagtgagaaagaaagaaaaaaaattaaaataaaccagaatttatggattataccctaagcaagtgtcaattgtaatactagatgtaatactagatgtttggaaaaatattttcttcccccntccctccgctccttatcacgatgaaattttttttaagagcatcaccaagagattatatataatctctctaaaaatttgttttatgctttctaaactaaaaatagaaagtacaaaaaagcttaactctccaagagaaacactaaattttatcttaaaaaaataaaagtgagcatttctatcaaactaccaacaaaattctcagttttcctccatccgtgtgaaatagatcatgcggtccttatggccctcaaaatcagttttgaggataatattggagtattgttggtgatactctaacccctaggtttgtgttttggaatgatatacaggtggggaagctctcccctggtgatttggtcaaaagaaattgtttcctccatttcctcctcagcacctcaagctttatatttatccatcgcagctatctcactcgtttcgtacaacagccaaaaagtaaaaattgaaacgggggcttccctcagccgttcatcgcccctttgtcgtctcagcacttgctgttaattgtataccccacttggccgctatctttgacaggttacctctgacaatgacaccccaaatcgtcattatcctctcggcgaaacctcattatcgccgacagctcacaacgccgatgcgacctcgtgcatctccttgttgatgcttagtattagcgtgtcctaatcaccttgcttacgtggcacttgccgattcctcacttaatcttaatccctcgaatttgtttttttttcaccgcatttaattaatttagcttgcatttcaattcaaatttaagttgattcgttgacttgttctttgcgcgattaggaaaaggggatttagctgttggtgtagtgggtggaaggctagaaggcgatgggcgcggtggattcctcgaggtgaggaggaggtgatgtgctcggcggcgacggcngcggcggcgcggcggcg

SEQ ID NO: 1797 - DNA, 2000 bp, Oryza sativa
  N_region (830)..(830): n = any nucleotide
  N_region (1407)..(1407): n = any nucleotide
gaggctcgggtgtcgctgcggcatccccgcacgcgttcctccttgctacggcctccactcgggtgacacggcgagcatccccgcgcgcgttcctcctcgtcgccgtcacaagcgaaggtggcgctgtggcgttccacaccttgctactgggatcccacactaggcgctggatcacgccggcctcactcaacacaggcgggagaagggggcggtggcagcggtgaagacgtgggtaatctcgtcgggcatattatttattaaaaaatgtgagacccacctgtcatactctcttcccctcttcctctctctcttctctctctcgcgggtctcgcggcggcaggtgttcggtgccgcgagacacggagcgggcggctgcggtgaactccagctgaggcggcggcggctacggctgcgtttgcactaatggataatctcgttactgataggcgatgatggcggagtcgcgtgcggcacggtcctgcgcgcgcggcagcctcgcgacggctgcggctgcatctgcgctgatggacagccttgtaactgatacttcctccattccaaaatataaggcataaccaccataacccaaagaccaagaaaataattattatcatcttatagtttggatcatcctaataaatacaatgcatgcatccaatagaattagagaacatgagagtggaggatttaaaaaagtaataatttaatggagaaggggtcatagttaatcgtctacatgcatgcatgccttatattatggaacatctaaagaagtggttgtgccttatattatggaatggaggaagtattaccgtttgtttttaaaaacnaaaataaaaggcgcctgatttgtcgataatgattacaaccaggcgcccgacgcggggggagccggatcgggcgctccccccgcgcggccctcccccacacgcctgcatatatgctactgggccccaccatagtgcctgccccacctgcaattgcaacaaatcaaccacatattttgaaaaccctctattaaaggaatttggtttattttttgttccaccaaaaatgtttcacctagtgtactcacaatgttttactatgtatagatctaatattgcagtgaactgaaatattccattgcaacaaaaaacccacatattttggaaaccctctattaagggaattcgttttatttttttttcaccgaaaaatgtttcacctaatgtacacacaatgtttcactatgtatagatcaaatattgcagtgaactgaaacattctttcgctatttgctgaaacattgtttttatataaggtgaaacaacacccggtttaaacgagtgaaacattttcgatctacttagtgaaacaattccgatatacctggtggaacatcgtgcaacatttaaaaaaaattcnataataagctaatttttttttcgtcggaatatatccatgtgtggtcttgttttgaagatttaattgcaataaatttaatgttgcaatcagatcatgatttggataagtaatttaagataaaaataagtttaaagtagttttgcacgtaaatcgggtgctgacgtcatgctgacgtcagcgcacgattttttaaagatttttatcgggcgaccgatccctagtcatccccctgatttgtttaaaaataaaagacataagttagttcctgtttttcagttagcgttttcttgtgactaagatctcgctgatcgatcgtgggatggcgcggtcaagtgcgcgattttggtatgtgtttccgttttgtaacaaactcctagagttcggagtataaataagagatgagaaccgggaaaagctgctaagtcgttcgctgcaccaaaaaaccctgtgttttgctctgtttcagtttcgtcagagttcttcagttctctgtagctgttcgacaacctaaagaaacaacgagtttttcagtgaagtccaattagagagcaggtgagattcgagtgctaggttagccaattccaacatgcacc

SEQ ID NO: 1798 - DNA, 2000 bp, Oryza sativa
gagtgtatctgtttatggctggagcagtgtgtcctccccaccagctcttcttcagaggcttgagttgttaccatgtgtttgcatcttttctagccttccgaattggattgggcagcttggaaatctctgtattttaatgattgggattagggaagtaacaagctatgatgttgatgttcttggaggattacctgctctcactgttttgtcactttatgtccacacaaagcctgcagaaagtattgtctttgataatgcaaggttctcagtcctcaaatacttaaagttcagatgcagcttagcgtggatgaaatttgaggcaggtgcaatgcctaatctccggaagctcaagctaggttttgatgtccacagagcagatcagcatgatgctatacccgttggaatcgaaaatttgtcaggacttgaagagatcactgcaaaaattaaggtcgattttactgctggtgatctttgtagaagatttgcagagtcagctttgactgatgccattaggatgcatccgggacgtccaattgtcaacatacggtgtgtagattggacctttgatgataaagataataacaatgtcaggacacgagatgaagaacataggactactgaaaaacaacaccttattgtgaaagaaggcttgaatgagaaatctgtggttctacaaaaggaccacggggaaggagcatgtaaatctgtcgaaggagaaaggcgcggagtcttaacggcaggatcatggtggcgtaggcagccccagttcgagcgtttttataaatctgccgaaagcaggtatggattaatttgtcactaagatactctagccctttatacaacactgccattttattatgagccattgtgctagattatcactgttaactcaaatataatctataactttggactaactagtggtggatccaggaaagtttgaggtgtgcccacgcactgaagagcaatgtgcaatagtcttccttcacatagacacaaaataaagtttgcattcgattgattcaacttgatctaagtctacgaatcgcaaaaaaaaacacatctctaattaatctttcaacaccctgatttcagtttacagtgaacaactaggaattcatactagaacactgctgcggaaaaattcaggattgacaaacttatagtacgtattaggtcgatcatatacaacgagtataaagttaggtttttaagaatatatcaaaataaaatttgtgatcaacttatgaccaacagaccatgacatccatatacagcaccacatatatttgcttgcctagctagtgattcaggctttctctgacattaaaaatctgattgatgctttgatagagctgacgacggcggcggcggcggcagcatcatatctggagcccaaactgttcccatcaagaacttcaccggcggctggccggctccgccgtgggaggagggctccgggacgacgatgccgccggtgtacatcaatgaaggcgagtacatcaatgtcatctactactcgcccccacgttcgtctacgacgacgtcgtcgcaggacgaaagtactgaagccagcgagagggagagatccggatcaggaacaggaagcagcgaaggcgggttttacggcccgacgttccaggccgtcggccgctacctcgaccgcaagttcgggctagacagagaagactgatgccggccgccggccggccacgccattgatgtgatggtataccttgcatgcatgcgtgcatgtgtcctacggatacacatatctacacgcgcgctttcgtccatgagagcatgtacaatagcatactataagtcagttataaacacatttcaagaagataaaatatgagagagaaaagtagtggactatagatttgtagccagctgcagcacgaagatgtatgtgtgtatgacatatgtgacaagatattagtgtagtatatatttataggtaactaactaactattgtatgctttgtatagtgttg

SEQ ID NO: 1799 - DNA, 2000 bp, Oryza sativa
  N_region (1858)..(1858): n = any nucleotide
  N_region (1865)..(1865): n = any nucleotide
  N_region (1918)..(1918): n = any nucleotide
  N_region (1966)..(1966): n = any nucleotide
  N_region (1974)..(1974): n = any nucleotide
  N_region (1984)..(1984): n = any nucleotide
  N_region (1986)..(1986): n = any nucleotide
ctaaaatctcttatgctttatggcgattacgcaacaattttgatcgtctgcttttatgatcaatggttcacactaaatattatagtaccatttttgtgaacagtgctttatataaaatattatacgtctcattatctcatgcgtgcatgtgaaacttgattcaattatataaataaaaatgtgtagcgacgattagtcactaattcttaataatattctaaacctagtccaatagagatatcattgttgcattatcgtatccgccgaagagtttattcgaaaataagattgaaccatgaatctctatacaatccaaaggttggggatttaattagtagtatgtgatgtatttacaattatgtataagatattacacaagaaaataatttgttagttttgtaaaaataaaatccatagtccaatctttacacaacaatggcaacaaaacactcaagaaaggcaataggcataggagtgggcagaaaaagactaaaccgaaaagatcaagactgagaccgaaaagactgagatcgagaaattcggtccagacaatgaaagaccgaatttcagttcggccaattcagttagtctcctcggttaaccaaatagaccgaataacaaaaaaaaagtctaaatgcaacctacaatccactgagttcaatatgattaaactatagttttcacatccctacttcttctaggcatgcaacctaataagagtctttattcatacgtgcttacgaattttttttgtgatttttgtgttgaaaatttctattatttctttgcatatatgaactattgttgaatttcggtcaggaccgagaccgagaccgaatttatcggtcctgatatttttgttttgaaattcgatttaactttttaaagactgaaagattgaagttcaagaccgattttcggtcagaaccggatgtcccctccctaaataggcatcattacccataacaaattcacacaacacgggtcgtgccatagacacgaaacgctagccaccacgccaagcgcccaaccccaactccaactccaacccgtcgtgctcaccgagaaaggcgaaattgaaaaccaccccaacccgagaaaattgcatatctaccatcgcataagattggcttcgcagaaataccatcacttaaatcggcttcgctagaataccactcccaactagaacggcttcgccaaaatgccattttggacaaaaatgaccctgcatctatctcttccacctccggcacgagcaaacgacaatggtgcgcggcgcggtagcggcaggtgagatgaggagcgaacgacggtggtcttctccggcgagttcgtccgcctcacctagcctcgcggcccccaacgccttcagtctccgcgacacgccgcctccgtcgccgacgagttcgacgaatcatccccattgccagtgagttcatctgttgcctcgacacaccacccccatcctcaacgagttcttccgccgcacctcaacgcgtcacccctatcgctggtgagttcgtccgctccgcttccgtcaccgatgagtttggccccatcaacgttgatgacgtcggctatggcctcctcttagcgcggcaggcatgatgaaaaggtggggacgacgaggagggcagcgcccccatcgtcgccgacaaggtggcactggtggctgccgacgagctcctccaacattggcattggaggaagggagaagaaccagggttatttttgtccaaaatgtcatttggcaaagccgttctagttgggagtggtattctagcgaagccgatttaagtgatgtatttctgcgaagccaatcttatgcaatggtagatatgcaattttctcccccaanccccaantccgtcggccgcacgagcggcggaatcctccaaaccgcgtccgcgtccccatnacccccgcgtcaccgcctcctcctcctccgccgccgttgcccttgggntcgcggtntcctctcctngncgccttgccgcctc

SEQ ID NO: 1800 - DNA, 2000 bp, Oryza sativa
attttttttctgattacgttttttttttcatatactccggactgttctagataagattgtgcattttgttaaaaacccttcttaaacttgcaatttatatttaggtccgctaggccttttctcaccgttcgtatgtaatcggacggctatgggacagttcgaatgcgtggcatgttctccggccgagaatctggtcggtgagctattcgtgaatgccacgtggcccaatcaatagcaagggttctaaccctgcaatcggtattaaagataggtttaagtctaagacttgatatgcgtgctttactcagtgtggtagtttatataaggcgtcagtggtgactttgttaatcgcaaaatataccgactcagtttttagaacgtgtataaaaaataggatgtacatgtgtatcttcatataaattagagagaatcccttatatgccactgaaaattggtctgaacccttatatgccattgaaaattggctcttcccttatatgccattgatacaaatttgcacaccctctcatgccactcccgtcagttgaccgttaattctcaaggaaaaaagacgtatttacccttctaagtataggacatgcctaacaactcagagagggcaaatatgtcttttttacttgagagttaacggtcaactgacggtagtggcatgagagggtgcacaaatttagaccaatgacatataagggaagagctaatttttagtggcatataagggatcagaccaattttcagtggcatataagggattatctctataaattaatagcacacacacattatgagtgtttgcgtttataggagatatctaactcctccgtcacacaataaatcaatatagaatcgtgggcacaacctagctagtggaataaatcgtctatccagatttgttgtatattatgttctcttcgattctacggagtactatattggttttcgcgatggatagagtactgtcttactacaagaaatggcacgtaggagtaggcagatgggggtacgtagccacaggcgactgcagtagtggcgattacgtccacgtcactgcacgctctcctgtgagcggcacacacgcgtaccacgtggccgctgccacgtaggcggacagcgacggccgccgtacgggtggatggaaggatagctgcacgcagctgggcagtcagtgtcgtcgatcgaccgagaccgatcgatgagaatgcatgagatccaacggtgcatgcacgtacgggggtgtcgtgattgattgatcgatcgatcacaaccgagcgttttctagatctttctgcgcctacggcggacgaaattttaaaaatcttgaaaagtacggcttgatagtaaccttcgtgttggtcgagcttccggacaaaccagccaatgcaaacttcatttgtaccttttcccacttttattactttgaacgtatttggttcgatcttatggacaaccaggttcaaaactccggaatgaaatttccaattttttggttttatcgaacccatcctccataggataatatttcggccaaaaattttgaaatttttcatttttttatgaatttgacaatatttattcagatttgctcattttatgttaaaaacaaataatttcgtccgaaatttcagtcaaattcatagggtaacaattccctagggtaaaaacataagatggacttgtttggacgcttcatcatgcacgctccctatggattttatgttttttattatagggtaacgctcgcagcgcccactgccatgtgggccccacccacacgtcagcaccaccatccgctcacctacactggccccaccaccccccacccaccactacataaatccccccccaccccccatcgccacgcacccgcgtttcatttccatttccacctcttcttctccttcgcgcgagcgacaagcgcactagccgcggcggagatgtggagctcggattccgaggcagacctcaccgccgccgcggccgcc

SEQ ID NO: 1801 - DNA, 2000 bp, Oryza sativa
  N_region (1491)..(1491): n = any nucleotide
  N_region (1493)..(1493): n = any nucleotide
tatcctgatacaatcaaattatattgctccttaagcacagcgagtactgatacaatcactttttttttcaccttcttataatagagttctttcctctcttttttttcccatgccccatccaattcagttcaagatccgtaactaaggttgtgtgactgttcattggtgtccctagctagatgtcttgctcatcggggtatttcaccaaacacaacgaaactcagcatatggtatgcctacgctaccaccagccttgtagttcagcgtcgtacgtgctaccatacgcggtgtgtccacacgtatgtacgtacatagcacacccctgccatcttataagaacatgcatgtgggggtgcaaaagatgaagcgaccatatcctacacgcttacacggtgtgtatcgctcacatacgcctcagtcaccatccgaaacacacagacgccggcagcgctcgcacttgcaatcactaagctcctagtgcacgacgcaataattcgatcgatagtatatatattactctagatatccacttttgcggtcttcagctaaatagcaccctcgtcataactcatgtatttatttaatttaaacattcagaaatatacatgagtggtttacagtactttgaaccggactaactgtcatacatccagtttacaaatgaaccccttaagactgggcaaataacacattcgagcagcattttgtggaaaagggctaaaaagaaaactaaaaagcaatcaagtccttgtcccatggcctgccttgaacgtcgacagcaaggtgatgaagctggatgccggcggaggaagaatccaggtgagctgcataaggtgaagccaccgcacaatccctaaaaagcctcatagttatggaggttcaggcgatggcgagcaatgcaacgaatcagcaccaccccaaaagatttccatcggagatttgagatgaagtcgatgtagaggcagcccaaccaaaggcaacaacttgatcttttcatccaccggcgagaaaaacctagaaagcatggcaagctgcaaatggaaccaagtacgtagcttacccaaatagggcctccacatcacggaggttgaaggcacctcggcatagctaaaatatatacttcagccgctacgagatgattcttcgccagagatcaagaagatgcatggctacccccttggaaagacctcactggagatcaaacaaaaggccgacacaatatgtttttgtcccagtttggaagtaccccagctgtcccagtttggaagtaccccagctgtcggttaggagtagaggtttgacggcgtggagatccacttctagaaagtctagcgataactactgctgcttcctagagatgaaagccacctccgaccacctcgtgcaaaagggaaatatcaatggaattgacctgactaaacaggagaagctgacaaagaagacaacgattactactacttctactagacaagcaaggacgcacgacccctntnacaccctccgttagtggtgagccaccaacgagaagggatgagaggattcggcatagctagaatactttagttgttgcgagatgattcttcgccggagacgaagatttccccacagggtaatcatcgacgtaccaactatcgatcgattgaaatggagtgtatatcctactgtgactgcgtggcagattgtcgatgagggtgagcagccgcatgtacggctcagcctcagccaacgatctcgtccttgccggcgcacaaaaatgggctgcggacctttcgctttgcggaattaattcgaggcccatactgtgcagctatgctagggggagaaagtacaccgaaggtccctcagcttgtcatcgagttcccccaaccgcaaaaccggatatcccgtgtcccttaactaattcaaaaccggtcataatagatcattgggtggttttgaccccggttttatcctacgtgacggctgagtcagcgtgggacctatataaaccccacatgtca

SEQ ID NO: 1802 - DNA, 2000 bp, Oryza sativa
  N_region (1258)..(1258): n = any nucleotide
  N_region (1275)..(1275): n = any nucleotide
  N_region (1282)..(1282): n = any nucleotide
  N_region (1296)..(1296): n = any nucleotide
  N_region (1341)..(1341): n = any nucleotide
  N_region (1641)..(1641): n = any nucleotide
  N_region (1856)..(1856): n = any nucleotide
tcagttatttaaaattttgtgtgcttcttacttcagctagtgccattgcaagaagcacatcatgaacatatggcctagaatctgggcgtcgtagagccgcctgaccaatttccaaaactagcttctcttctccaacctgaaatgaatattgtagcatgtaatacaccatttcattatgataatggtacattcaattttaataaattcaagctgctaggtgtcttgtattcatgatcacttagaactcacaaacatcataatggtgactaacctgcatcccctgcattttacgctacccagtcctaagaaagggcaaagtttaaaacctacgcgctcctcaccacattcctaaggataatttaccctgaagttagcataaaagttttctttattagttaaacattattgatcctaaatcttcttgatccctttcaaatcattcagtgaattgagaatagtattctgacaaagaataaggcagacctataaagaaacataccgggcatggtcatggtgacgactatgactatgtcatgtaacataaaaggtgacaaacctaaaccaaacttggtggttttcctttatttgttcacaataataaggatgtctgtgttacacattacctcctgcaagacacaaagtgcagcaggcaaccaactccaaggtatatgaagagaggatctgggtggaagcttttcttttatgcttcctgcgtactcctgttcaaagagaagtttgtctctcacatctaccagcagagcctaccaaacatgaaagaaataagcaaagattaaccacatgaattctgcattccctacattaaacaaagcagtatatccaaatatatttccagaattccttgattcagcgagcaacctgtctgcaggtagacacctctgccatgtacccgtcttcaatttctgcatttttcagctccattgctgctttgacaatctcatctttctcagccttctctgtaacaccaagaatctgcattggccatttgaaacatgtcactccaaaaatcagggaggcgtgtcacgcgtgtgaactaccagtgcaaattacaataggcatcgtggtgcaaacactaaagttgaattatggtcaagaaacgactatctaatctgcaactgtatcattcgaacagagaccagccgagctaaactagatccatcgacgatataagaccacatttccaaaattcggatccataaacagtacgagtggccaaaaaaaaaaaaaacctgatagcaantgacggggatttccacnatgggcncggcgggggcctcntgcctgttcccttccggggccaccggcggggctttggcaaccttngcgcgcgcaacccacgcggccgcccttcgccgtccgccagccaggcatccacccccggcgtgtgcggacgcattgccatttcccaccccaacacgccgcgtcgaggacccacatgcgaccccggggacaaccgccgccgccgcggccaccgtcggcatcgccatggctggcctgaagacctcacccccccaaccctagcccaccctcgccaacgccaccatgtgcgagcggatggatgctttagggttttgggaggcgggcgagtcgtaggcccccgcgaataaagggacaaagcgtcancgaggtggaggaggagaggcgtcgtgaaggcgaagccggaggccggagagagagagagaggaaggtcgatgatggcgatggacttggtccatgcgctttgtgctagagcctagacgttgacaggtgaccctcccagacgccgacgcgtgtccttacccaatgggcttcgtttctgggcctacatgggccaggccgaaaacttgcttggtgtggtnaagtgggctgaattccaggcctcacaaacggaggggaaaaaatccgcttcgtcgcgaacaaatctcgcggaggggggaggggaactggtggccggagtggcgccttcgagaagattcctcatcccccttcccttctcttccctc

SEQ ID NO: 1803 - DNA, 2000 bp, Oryza sativa
agtaattaaaataacagctgcggcagacatgcagcgctccattctctctctgtatcagctgtatactttatgttgcacgctccctgtgtgcatgttctatcttaattttcttcagtatgtacacgatctgtgcgtacgtgtaatcctatacgttttatgaattgcatgttgtccaaatgtcttggtcctagctactagctactccagcttcttgctgaggaaatctgcagtagtagtactccctcgttgtgatacgcaacaaaattgtttaatgtgatcttgctatatatagaaaatcatctctattattttacaggcataaaacaagcccactctaaaaacaattagtgcagccggttgtcttaatagacccgtatgtgaaaatcgttttttacgagcggttccttaagacaacttcatgtatcattatcgtagtatgtcaaaaaagatgcaccacactatgcacagtcgtacaaaatggcactactacacaactgatattttatcgggatacccatttcggttagatttagaacgggtactagagatatttttaagtaccggttctaaaagtccaagtacaaaaacatctttaattccggttggtgttacaaccggtactaaagatgtctacagggttagtttaaaaagaaagcatccatatccatgtctgatgggtggagttggtggatggttacacgcgtgagggctgaggtgagagatcttgagttcgaatcacatatcctacacattttttttatttcgtatgcatctttagtaccagttatttcaaccggtactaaagatcgagatatttagtctcgatttgttagtaccggttctacatccgatactaaaaacggttcccaactggtgttagaaatgggttctccactagtgtggcaatacatttacattcacacattaagaattcacattgtcacccatattcacattgacactgtcttttaaagtataatttaaatgttcacattgtgaatattcgacaatgatagggagcccaatccctatctacaagtctaaacctaaaattaatttgatcgacatgagctaatgaatagataagcgcactatctattgcttgaaatggtagatccattaatttccttttcatatatagattgtaaaaagttgtcgttggctgattggaaatagacttgggcatgaaacctataccctctgcaactccacgtaatcgaaaatcatcctggaatagaccccaaggatgaaatttagaccaaggaacgaaattgggcatctataagtgtgttgggagacaaaaataaacggtttcatagagttaaatgatcaaagttggaacaatattgcaatagttgatgattaaattaattaatgtggacttctctaaaccatatataggctgtgttcggcagccctgttcccaacactaacagtacgcacgaaaaacggagcggtccattagcgcgtgattaattaagtattagctaattttttaaaaaaaaatgaattaatttgatttttttcaaacaactttcgtatagaaactttttgtaaaaaacacaccgtttagcagtttaaaaaatgtgcgcgcgaaaaacgagagaggaggttgggaaaaggggtgccaaacatagcctgtattgtgcgccagatactggtaagggcattgttgttcatcctcgaaagtggcacaaatataaatacgacattatttcttacacgaaaacgaaacagggaaaactaatttaacaaatagagacatatgtagcgctgccgctagctagctttcagagtccactttttgagagagctcaatccaatgtgtggtttggctgcagcgacgaaccagaataatctcactctgctggtgcacccaatccaatcaccaaatccaaaggaaattcaatgtacaacaaaattaaaagaacatcttataatttgtctcctcctcctgcatatgcttgagctatactagcttaactagaggtaccagccag

SEQ ID NO: 1804 - DNA, 2000 bp, Oryza sativa
aggagaagtaatagacctgtaaaggagtagattgctggccgttgatgggatatctaaacactataaacaaaaccccaaatagaatcccaatgacgattaagaggagtgacgataggcatgtcgttaagcagcatggtcacgatggttggcgggacttatggagagtaaaaaataaaccccaatgataatcatgttcgatttttaaaatctcaatgacaataaggaggggaggcagtgggcggacttcagaggagtatagtggcaaagccactaacgatttgacgagacttacagaaagtaaaagagaacacaaacaataattatgtttgatttctaaaatcccaataacaataaagagaggtggcagtggacgagtcgtagaatagtaaattggcgatgtttgacgatacttctaaaaattttgaaaatgaaagccaacaagacaatgaattctaaaaactataaggcctaatttttaaagttcaaaaaagtatgaatagaagtagtgttaaattgagtaagcaaataacataggaggaagggcgataatgcttgtcgccgggcgaccggcgtggggggagccggatcgggcgctcccccggtgcgcgcccctcccccatgtgctacctgttggcccacccacttcttcctcccctttttcacaaaagatgtttcacctagtatccatataatgtttcactatttatagatctaatgttgcagtgaattaaaatactcttttgcaataaaaaacccacatattttggaaactctctattaaggaaaattggtttattgtttgttctataaaaaatgtttcacctagtgtactcacaatgtgtcgctatgtatagatctaatgttgcagttaacgaaatattccattgtaacaaaaaaaacccacatattttggaaacctattaagggaatttggtttatttttttgtccaccgaaaaatgtttctgtttaggatggaaaaatacgaaaatatatccctctatgtttagagagaaaataagtgcgagcgtgccagtgtaccaagatacacaatgtaaacaaaacatagggaacattctctttattaatcttaaaagatcataaatataaattcccaatgtaatatatatgtatgtgcgctccataatttgtcattggacagatctaacttgtgcgatgtggtctcctggttcctggggcctcgataagctcccagttaattacctccgcaggtttaggcctgtaagagaacctccattaagctgcttgtggtcgtctcgtcgtcttcgcttcacgttctccatgcatggttgtgatgatgatgtagatgtgtgtgtgagagcgccggcagcgatccgtgcgccctgacgacgagaaccaaccaaaagaggtgttctccatagccgctgccgtcatccggcgccatgacgccagcgcacatcgacttggccgcacgagtgtactactccatactctagttgatgcctctccatgcatgcgtatgtacgtgctacatatgaaataagaaggaaacagatcttaattaattttaccttggaagaccatcgattccatctccctcctcgtgctcccctgccggacgccggttcgtccgaagccgctcgccaccgtcggtgtgctccggccgcgcacgcgctgttgctccggtgctggatgatggatgtgttgatgacgagggaagattgtgttgaggatggatggccgcgtcgaggatggatggctgcgttgtgtgtcgatcgcttgtggatgctagatgcgttggtctatgaatgtgtggagaagttcgtcaatgcccctggctgccgaggggttgacgtcttatataggcatctgaggtcggtgctcaccgcatctgcacgccgtttcctccgcatcaagttcgctgtagataaggcttgatcgaccagtttgttatctgttcatattcttctttgattttatctcttagcttctcccggcgtcaaatatctgagcatcgggg

SEQ ID NO: 1805 - DNA, 789 bp, Oryza sativa
  N_region (5)..(6): n = any nucleotide
  N_region (10)..(10): n = any nucleotide
  N_region (33)..(33): n = any nucleotide
  N_region (37)..(37): n = any nucleotide
  N_region (53)..(53): n = any nucleotide
ggggnnaagnggggggctaatgggcgatcgatngccnagcgatcggatccggngcccaactccctatactcctccctcttctccctttctcctcctcccattctcctctttctactacagtagaccacacaaaatttttttgaaaaaccaaaattagaaaaatttatgtatagaaatactatatataaaaaaattgaactcaaatttaaatttgaattaggtatgtaaacttttgacttataaactttaggtgtataaactttagatgtatagaaatactatatatatagaaaatatcggaaaactgatcgctctgggcgaagcatttccgtgaaattagctcatgcttgacatcaaagcaatccgtaaaaaaaaaaagaaagaaaagaaagaaagaaaaaaccagcccttggtcctacacgcgtactactctcgtgatctcgtccaagactacgcttgggcacaagttccgtcaagcggcgacggcgatatctccccctctcttcattgaagatcgacgaaggactgaccccaccaccaaccctacaggcaaagcacacacctagcccgagtcactgcccgtgggccccacccaaaaaccagcccgagtcactgccagtgggccccacccaggaaaaaaacccatcgtgaggcactgctcatggggcccgcaccgctcatgtgatctacccctctccacgcatcattcacacatatacccctcgccgctccgcttcatcatcactcccacccctcctctcctctcctcttcacacgcagcgcgcggca

SEQ ID NO: 1806 - DNA, 2000 bp, Oryza sativa
gtgaacgaatgagcgacggggagaggagctcaccgactcctggatctcgtccttgacgatgtagaagggatcctgcgcggaagccatcctgttcccccaagctcgcgaagggaacctggagagggagagctcggccggatcgccggagcggggagtgacgcggccacctcctccggctccgcccactccggtgtggcgtcgcggacgaaaagggcggagacgaagatcggggagatgtctacacacaccaattcgtgggctggcctccgatcctccttgctgggctttaggcccatgtgatctattgggccgtaaataatccttttattgcgcattattttgagtaaatttgtatttcgctgggtaaataatactccctctattccaaaatatagggcacaactattttttaaagtggtttcataatataaggcgtgcatgcatgcatgcaattaattagcacattctctcccctaaatcattattattttaaatcctatactcacaagatcttcaattctattggttgcatgtattgtattaattggggtgattcataataacgatgagatattaattatttcttggtctttgggataagggtggttatgctttatattttggaatggagggagtaaatacgtactaggttataagcagagactttactctataccccctctgtactcgtaaagaaagtcgtttaggacaatgtttaagtcaagccttgggaatacaaatcataaataactctcaagttgttgagtttgaaaatataaaaaatatatgaatagatttatcttgaaaaatactttcataaaagtatacatatatcacttttcaataaatatttttatagaaataagaagtcaaaattatgttttggagaccgtgtcgctgtccaaaacgacttcctttacgagtatggagggagtactagtttgcaccaaaaataagtttacaatgtgtttttcctatacgtgtgggttggtgtgtagtaaaactagatgtgtaccccgcgcgttgctgcggaagaattatgtaataatatagtagatatgagttctaaaattttctttcaaaccaactatatgatttcttttcatgtgtttatatattttttacctttattaattatccaaatgtcataaataattgggttgtatggtgtatcttttggtggaaagagatgcaatttacacttttgatgaatcatccaaagtcttaaaagaattgagttgatgtggcttcacgacagaagagagaattagcattaactacacgtagtggggatgaacttgatagatatatatagatataggatttgttttcgtttgccataatatgaagagaaaataatactatttgtttattaagcctgtaagaaactctgtaatatagtaattttgtgcggtaaggatatattatcagtcgctgcagaaacgctatagggcagcattttgctgggtaaataggattgaagcaaaataggtgaggaagccaaactgattactttgcaatagtttgaagcaaaataccaaaaattttatttttgccattgacacactaggtgagcaattttgttaccacgtccatgtgctgatttaaagttttttttttaaaaaagaaacttattttttttctttgccacaatataaagctaaaatatttgtcattaactgatcctgttgcaaacaatgaattttaccccaccatagctaaattaactcatgattaataaataagcctgtaagttacagaactgaagaaactctgtaataataataattgatcactaagaatatgatcagtcgccgccattgatcactaagctagtgcagtgtaatggcaatggacgccactaccatcaacaatggcagcgatcccatccccttccccttcctcgcgccctatataaccacagctcgccggcgatcgatcactggcaccatcagctcccacaaacccagctaaccaagtttaattgccaccaagctcac

SEQ ID NO: 1807 - DNA, 98 bp, Oryza sativa
gaggcggtccacggctcaccccgggacgacgaggacggcggaaacgatgaccggagcggaggaaggcggcggcgcggctcgggtcgacgaggacagcg

SEQ ID NO: 1808 - DNA, 94 bp, Oryza sativa
  N_region (7)..(7): n = any nucleotide
  N_region (9)..(9): n = any nucleotide
  N_region (11)..(11): n = any nucleotide
  N_region (29)..(29): n = any nucleotide
  N_region (31)..(31): n = any nucleotide
  N_region (34)..(34): n = any nucleotide
  N_region (66)..(66): n = any nucleotide
  N_region (69)..(69): n = any nucleotide
  N_region (72)..(72): n = any nucleotide
  N_region (85)..(85): n = any nucleotide
aggtccncngncgccgatccgggcggaananaancctcgccgccggatttggccccttgcctcctnctnctnctcggcggcggcngtgaggagg

SEQ ID NO: 1809 - DNA, 2000 bp, Oryza sativa
ttacaagaaatggatcttgaagacaattgaagattcatggaatttgttccacaagaagtttgtcgaattatggaataaacacaaagatgggaatggggaagcatacctgccccctatatacaacagctcagagcttttgtgccttgcacagaagaagtacatgacaagcctatttcatgacagtcttggatttggttcagcaaaaatgatcaggtaaataaatgttgaatagtataggaagaggagattactgcgaatattggacacattctattgagccttaggagcccgcatatataggaaataaatagggtagagataaggaagtattatatttaacatggtattagagcctcaggggccagtatatagatacatgagataaggaaggattacagatatggaaaaaatccacataaatcaatcatatcctaatatgactctaactaccatatactctaatattaaacagtacaattatatagtctatactactaagttaatttgttgaatcttatttacgtctagactatgaagatatactagacctgccctttttaactgtaaggaactcaaaggcacgctaatttaggccaaaagtagaggtttccgatgtcaattttgatgcagcacttctttttcataaatgtatgtcagtatgtggtgtcctaaaagagatgttccagaagaccacctttgacaagcataaagtatgactgaaaaccgtcataaatggttgaattgaggcaattcaggatattatgttgtgagaagctaagtgtaaagaacttaaaatcacatttaaacaccattttcaaattttttatctgtattccgatgccttgtgcatgatcctcaagcgacttctgtttactaaattggaccatacatatgtaggagaattgttggaattgctcatgttgaggattttgagtcgattgaggatgccagcaagagagcttcgtgtgagcgacgtgcccttaattgtgcaaaggcaatcctgaagggaagacgccagtttgaaagcatcgggcaagtgattgtgcatgtacaatcgtttgatcgggactgataatgccaaccatctacacgacctttctgattgaggagacaaaagttttcatctgtttaccataagcgattatctgtgcctattacaaagcagaattggccagttatttgtgcttttagtactttggatcatgaaaagtgtgtgcactctgcaagatcgatgttttttttcaccacttggctaagccttccaccagcttccgggcttcttagtttatgagctgaataatggaagttcagcacaaacgtttgtccatggatatggacgagtgtgttattacaaataaagttgatagttttcggcaaatagattgttgttgttttatttcaaagagatgtagtcccccttttgttccttttcatcacttaggctgcgttcaagcgcaggagaaagagagaaagatagttttgttttccgcgtgcatgcttcccgaactactaaacgatgtgtttttttgcaaaaaatttctatatgaaagttgctttaaataatcatattaatccatttttgaagtttaaaataattaatactcaattaatcatgtgttaatggctcacctcgttttacgtatctcttcaatcccctccttctcaaacacacccttagacctgattacttacagcttgtacaagttatggttggaggttcagtaatttcagctgtaccttttcactcttcttttccatcttaacataaaccaggcaggaccgcaggagttgttttgttggcacaatttgcgagttggatggggaagcttgatatatgaaattgtacaggccatcaaagtcaagccgctctcatgtctcatcatcagtcaacagccacgggaagtcagaaaccgatggaagaatggatgtcaactcatcagccacaataatcgaccgatcgcctcgcgctcttctcctcctccggaatctcggatggtcgg

SEQ ID NO: 1810 - DNA, 41 bp, Oryza sativa
  N_region (4)..(5): n = any nucleotide
aagnngtttaataggcgaacgttggctttttgaatcccttc

SEQ ID NO: 1811 - DNA, 2000 bp, Oryza sativa
ctccacttgggcatgttcttttacattgctgatttatcactttatttttgtactttgattatagtgaacttcatgattgctggcgtacttttaccatcatgttctcccatacaacttagactgcgcagggtgcaatgctacgattgattttcttttttaccttttgaatttaattgtacaatgaattggatgaatgcccaaaaagcaattggaagttttctgcagccagtcttagttttagcacgattagatgtgagctcatgaaaatttcgtcttttgtgatctcaactgctcaaggttcttttgctgccttttctttggactcaactttgactaagttctttgagctactgatgggcattgatgtttttcttggtgcaggatacttgataatgtaacctaaaaaagcaggatggacaatgaaactgaaagaagcaaagttgtgatgatgagatgagttaaactactggctgataacaaagttgcagtaatttctatgatccccctcatgctcctactctgtctttatatctctttatttgttttttttttcctttgcaactgtgcccttgctttggaacaaaactttgataaccatttaacacaatcgtcaaagcagaaggaaagcttatttgcaattcccttttggaactaatgacatctgtttaagtaacaacgaccaacctcaaaacttctgctgcaacattgtgtactttgttgctagactggatgaacatctagctgatgttctgttttagcattgctttacttgagacttgagagagcctgctaccagtttcacttaaccattcgtgtttatcttcccaggatttaatatgctggaattaggaagtctgaacaacattttgtggaggctactttattaaactgcggtgctgctctgtccaaacttgcgctaactgcgggagagaaggggggctagcgtgaaaagaagaggtaaagaaagagaaaggcaaaggcgcgacatgatgcctcgtccaagctttttgttgtcacgctgccaaagaggacaaggatttggccctgcttctcttcttcttcctcctcttcttgcggtaagatcactactactattaccatcaccatcaccgcatcatttgccaaaccatggaccagcttgcctttttccaggttgcagctgcctgacgcagtttagccagccactgtaaagtgcaggtccatttatctgacaaatagagtatgtgagcttaataattgtacagttttttcaaggtcaattttaggggagtaaaacacaattagttttggaggggaaatagcttttgacattgctgtgagatgaggggttggtttggtctgtggcctaaataggtattaccaaattttgtcaatgccaaattttggcaagttttggcatgactaattttggtaagtcaaaattgtgtttggattgaagccaaaatagcctaagttcactattgaaatggcatattttcttaagcatgccaaaatttggattcaaaccaaatagacactaaacactgttgaaattgacaaatattggtaagtctaatttattcctcaaaccaaaccagcccgagatggtttgtgtaggtgaactggtgaacagtttggcctgcatctgcattggtaggggcctaggagcagacaagaacagagcaaaagtgaaaagtggaagcatccagtactgtcaatctgacactggcgccacagctctcgcgaccactcctcatctcacacttaccgaagcaacaataaaaccgttctatcctcgcttcaaaaatcgatcaaaaaattcaaaaatcaaaagtgaaagaaaggaaagcacacgatgcttctcttcacccaatgcagatcgatgggggtcgtaccagtagcagagatcatggctgtgagcctgtgattgagtgatccctttcctccatgccaatcttgaatctttctagctaaaagaatcatctgtgctcttgtgctcgcagctagctgcacagtggtga

SEQ ID NO: 1812 - DNA, 1733 bp, Oryza sativa
  N_region (58)..(58): n = any nucleotide
  N_region (673)..(673): n = any nucleotide
  N_region (827)..(827): n = any nucleotide
gttacatgagacatggtatgacggatcgtggggctcctcaccgggagaccgcgcaggnccccctttgccggttcggccgggggctttgggttaggttctaagctcctagtctgtggaaagttcgcaagaatggaagaagcacaagacacgggcgatgtatacaggttcgggccgctgagaagcgtaataccctactcctgtgttctggtggatctgtgtatgaagaagctacaaagagctggagagccagcgagctcttactctagaaaccctcttctccctttgtgtgcgctcccccttttctccttccgaatccccttcctaagtgggccagatcctccttttatacctcaaggggataccacatgcccaatctctctcttttgtctggggacttatcctctctttactcaaacttcacttctcttcataaatggacggagatttgtaatggttgccgtccgaatgaccttctgatgggacggcccatacctacctccacttccgccggaagcaggcgcgacgtgggaacatggctgtctgctgacgacatgaccagtgtcagaccggtcacaaatcggtcattcttgtccaccacgcgtcagtttatcaatctgcatgttcgcccttcttcatacaatgtcttgcttgtaatggttaggatgaagcctgncatatatctgaccgggaccaacgtgtcatctccaggagctaacacgctggctccggctagggacgagtgcctggaggcactcatcctgacgggatggggcgaggcgtgtgtcagaccgcctgtcgccacctaacccacgatctgaccggtctgngactggtcacagaccggataaacgagcgcgctgcactgcgttacatgcggcgtgacgcgctcgttcaaaccgcaataaatgcggttaggtgagccccgctgtgctcacctaacccatacacgcggcgcaaaacctacaaggggtcagggcgcctcagccctcggggccgaaacgggagcagtccgacccctcggggagacaaagagagaggggggggcggccacatcaccctcgggcccgacccccccgagggggtcaggcttcgtgggtgattgctcctgcccaaacctctagtcatgatactcccggtcccatgtcaccgacagtagcccccggcgttatgccagggcgatcgccctccttgagggaagcggtcgggcgtgacgccacttcctaaggcctggtgacaggtgggaccggtctccacagttgggcagaaacccaacggtcgcaaatcacgcacatcggcaatggttactcggctgtcaataatgagcggtctcttcaagactgccacattactcgagtagcacgcgaatcgggacgagccggttcgttttgcctggagatatggtgatggcacttcggtcagcgagcgcaattaatgcacgcacgatatgttccatctcgactgccacaaccgcatatccacctcatgcgccgcaagcgggcgaacgggattagtggaagcgtgggcgcgagaaacgagggagcgagatagtgggcgcgagaagcgaggagccgggcacagcgttggcaagggtataaagacgccgaggaggagatttgcttccttcctttcgccattattccccttgtcttcgccgcttgcgccctaactcctcctttcctgtgccctaccttcgccacacgcgctcgctctcaatcatctcttcctccggcgtc

SEQ ID NO: 1813 - DNA, 915 bp, Oryza sativa
  N_region (3)..(3): n = any nucleotide
  N_region (5)..(5): n = any nucleotide
  N_region (9)..(9): n = any nucleotide
  N_region (757)..(757): n = any nucleotide
  N_region (883)..(883): n = any nucleotide
aantnaaancccccgggggggggggggggctcgtactcggccgcaattgtgttgaagcccggctagaaggaagggccgaatcccgaattgggaagaggaaggagatcgagaggggtaagggtagaagagagagaatgacacgtgggctccacattcttaattgtggaagggccaagttaacgtgccaagccagtgaaaaacaccatgaaaactgttaagggagtcaaattgcatcgattttaatagttggagggtcaagatatctgatattactgttgagggatgcgaataagatccgaccactaattaagggtgtcaaagtggacttattattttatcggctggtttattttgggccgcgaaaaagtgggtgttggttgtccatctgggcagaggcctgctatgtttgggttttggtctactcttagtccattacgcttttcgaggccctcgtgcacgagcatattctcaggcccatctaaaaattgcccgaccaacggttgggctgcgggcgtgatagaagtccacagaacaaacccgttaactgtagaacatactggactgttcaacgtcacggagggcagggtctcaccaactcgcgtcacccgccgacgaccccactctcccctcctggcgctggcggtggcctctgcgtaccatccagacccttccagaactcccatccgatctcaatccaacgtcccagattggcgcaccccgaacattctcgaaacaccttcaaccccaataaaaccantccccctcgcctccgtcccccaactctttgcaaaagaattccgagctcgcaaggcgaagaaatctcgcaacaatctcatcagatctcgagatctcatcaggtttggtttgttcccgtcggattttncttttccactgttcgatcttcctgttcgtgcg

SEQ ID NO: 1814 - DNA, 2000 bp, Oryza sativa
cagttatttaaatccagaaaatattggtataaattttattttatctttttttttttgcaattgtcatttagacaatttgggacaacttttgaatttgcaaaaaaatttaaatattagctattatttgtttgaattcaattcatacgaatagtcaatctttttttcaaagttatatatgtctctattggaagatggtattggaatagggtctctttttttttaaacaatagcgtgcttgacaatacaccacaaccgaataatgttatagcaaataccatgaatctagagtatcctgaagtcaagagacctcaatcgtggttcctctcgtgcgtaaactctgctaatcccataggatcaatagccttgataaggacagattgagcatatataaggctatgtttagctcttagggttgggcattaatcccttgtacatgtaaaataaagcgacttgaacaacttttttatagaaaaaaaattgtaaaatacacaccgtttaacagtttataaaacgtgcttgcgggagagtggaggttacgaaaaataagaaacacacacagcctaatacatcatttaataataggcaacaactaggagctacaaatatcatgctcccttcagcttttaatatttgacgtagttgacttttgaatgtacctttaactattcatgtaatcgtgttatttaataattttgtgcaaatatgtaaaaatacgagtcatacttaaaagtacatttagtgaaaaaacaaatcacaacgaaaataatattacacatatattttaaaatttaatgacgttaaatattaaacataagagggagtactatatactccctccttatttcttattttaatgtatgacgacgttgactttttaaccaacgtttaaccattcgtcttattcaatttttttgtgcaaatataaaaatacttatgtcatacttaaaaaatatttgatgataaatgaagtcacaataaaataaatgataattacataaattttttgaataagacgaaaggtcaaacgtttatcaaaaagtcaacagcgtcatacattaaaatacggagggagtattatgtagtgtgtgcaaggcacatttctttacgtagaaacaaatcttgtttttcttatttcactcatcatcaatgtcaggcaaaattcacccccattatttacctttgtacatggcctaatacgattgttttgaatcgaaagaggttcaaataattacacttgactaaatgctagtagtagctatcatgttgatccagggatcgtggcttggggtggtttccatgagaatactctcgaccaacttgcattattcctcctttttcctctttcagacgattcagacaatgaaacggacgctacctacgggctatggcagcattgcatgcatgttgccaacttgccaaggaggcttgtactacttccgcagtatcttatcctaaaatgagttacttttttacctaccatattttctcaactaatcattaatattcttcaattaatttattcaacaatttttttctcaatcaaccataatctttccttcaattatttatacctatttccttaaaatttatgttcatattaaaaatacttacaattttgaaggaggaagcatccttttttagcccgattcccgaagctagctaccgtgttaattcgagctactccactatttagagcaggcacaataatagactataaatcagttataaacatattttaaagagataaaaaaaagagaaaagagcagcagactatagatatgtaaccagctgcagcacggattccaagacgtaatgtgtatatgccagttgggattatgtattaatagtgtagtaaacaattattatatgaattggctattatattggctatagatgatttagagctagtagttagctatactattaaacttatactattaaacttgctcttagcttcattccatcccactgcccccaaactgctgcatctacggcaaaaa

SEQ ID NO: 1815 - DNA, 2000 bp, Oryza sativa
cgttttgcagccaagaaaacatttagtaagatactataaaccctttatcctagtgatttaaaatttcaccaatttgcacaatttacaataatcttcatcctcaaacaaggtgccgttccatgttgaaggagggcagccttcctatctgatagttgctggccttgtcttcacacctttgacagaaccatttatagagtaagcaactgatggctttcccttttaaaccctctgccttggtattgggaagcttatagttgtcaatttctgttggtttgcagggaggagtgcgaagaaactctaggggttagatcaacatgcttgcaggttacctttccaaagctctgaattttctcatcattattaacatattatcttcatttacagttgaaattgctggcaaaggcacgctattctctatcaacatttgaaggggagcaaatcgttattgtatcacaggtatgctgcattcgatggttgtaccattgactagtcctccatgcttcattgttattatcaagtcatcttcaattcaccaatggtatctaggttttggcacacgaggttaacattggctatgaacacatgggcaatcaacaagtaaagctcttccacctttgcttatactttttacgagtttgaattaaatcctatgcgttctattaaccaacaatattatcaggtcattaagctaaatggaaccgtggtaaagaatattcaccatcttgcccaccttgttgacagtaagtacagcctcatgctgaataaccttttagtagtaatatcttacaattcatgctcaactttccatggctaaatgtatgagttttcagactgcaaagacaagttcttgacgttcgaattcgaagacgacttcctagttgttttggatcgggaagaagcgactaccgcatcatcagatatcctaaaggaacatgcaattccctctgtaaggtcatctgatctatcagagccatatgtcgacacagagcaagaaatccaaaaaccaaacgatgattttggtgacagccctgtcacaaactatgaaatgggagttgactgtctcctctgggcatgaacagccaaggatggaatttgaatttcagttcaaacagtgacaatgccggtgaatttcatgcatctggatggcaggaaagagcatttccccaccatgttgaaatccactccatagaggcgaagccggagtcatgtttgttagtgtaggaagttcagagttatgttgtaccttagaaaaccacacaaatgcttgattcatcatcaatttttttaggggatgggactatgggactgtgggagattgggggagggctgtagaatttggcagggtgtaatcctgtaattttttgggcatgcaataaatcgtccagaaattttgttgctttatttttacctcttgtttgtactcccatcatttttagagaacattttatgagtgctagtattcgatattcacataaaaaatttcaagtttcccagtactcccttagttctaaatacaagcatatctactattcgaactttgtttcacaatatgcatttttaatataagcatttttagcatgatttacaatactaatcatataattcacttgctgcgctcccccattttaccttcaatcactctctcatcctaacaatccattatttaacgtgggtaccaaagtattttctttgttaactttgatctcatgtaaaaaaaagataaaatataaaaatacttatattttagaacgtataaatactcaaatattaaattttttatgcatcagagttcatgaccgttgctttctgatctgacgcttaataagtatcctcatgagtaatctgcaccaattttcccatccctttcgcgccgtaactcatcatcggccatcgccgccgccgccgccgccgcctttccccttccggcggcgtcgtctccattccactcccaccggaacagtactcccgacttgcctgagcccgagtctcttctgtagggc

SEQ ID NO: 1816 - DNA, 832 bp, Oryza sativa
  N_region (160)..(160): n = any nucleotide
  N_region (247)..(247): n = any nucleotide
acgccacttcccggccaacccggcctctccccatcctctcgtctcctctcctcccttccaccacgacgcgaccgacgcggcggagaaacccgcgaagccgcagtccagccagcgaggggccgccagccgaagctgaagcgagagctagggtttgctccancccttgaacccgcccgcgcccccgccgccacgaggccgatcgaggtgcgtgccaccgtaatctccgcgcgtgtttgtcgtggggttnggttgggtttggttgggttgggtttggtgtggatcagggaatgcgggatctggtggggtttcgtgcctcgctcgctcggggatttcatttggtggggtggtggtgatcccatcctcccccactggattttgatggatgcgacccccttccgctgaaatcggagggattttggttgccatgcgctgctccttctgtccgtacggttcggtgaatcgggagttgtagattggtggtgatgatgacccagtagttggttctgatgctcaatactcgctgcgatttcgctcccctttatccaagggaagggaagggagaggggcttcctttgcgttcaaatttagcaaagtaggaattgtgtgagattggtggtagcgctcacttttttcagctctagatcgttagttctgcataccatgaagattcttgtatcaggagaagattattatatttattctgtggagaacgatatcagagatgatttgtgggggtgatttttggctgatttctgctctgcagggttctgcttctgaggctgtcaagcctggcggctaattgggatggaccttgtgggatcgctgctggtga

SEQ ID NO: 1817 - DNA, 2000 bp, Oryza sativa
  N_region (298)..(298): n = any nucleotide
  N_region (409)..(409): n = any nucleotide
  N_region (416)..(416): n = any nucleotide
  N_region (419)..(419): n = any nucleotide
ggcactactcatcgattaattaacttgtactcaagacactgatactgatcaatcaatcaatcaatcagtggttagtgctcgtccgatatagaaaggcaaaaggcgtaggcaagaacgaggagaggacggacatgaggttgcatagccatcagaaaaggaaaagagacgggagagagagagagatcacggtgatggccggagatgcggaggatggtgacggcgaaagggtgcagctgttcgtcggccaggtgcccagctgcatggcggaggaggagatcctcgccgtcgaggcggccanggcgttgtgcacggcgatggacagcgccgtctcgtcaagaggaagatggctgggccccgcgggccggatgccgccgtcgtggacggcgcgcagcggaagcacgccgccatngccgctncgnccgccgccggcctcctcactgaataagggaagagggaagagagaaaagagaagagaaggagatgaaaaaaacgtgcagctgacatgtgggtcccacgtactttttaaaaaaaaattgctaagtaggatgccacgtcagcaaaaccacctatatatactgcctagtgactttgactgaacggttttgtatagtttaggggtcgagatttctggttttgtggttaaggaatctcaaaaaatctcgctgttaagttgagggatctccagtgaacttattccaacatagtattcatgattcaattcggcggagaaagtccatttactcgccctcacttatagcccgaagcccgattctgattttcatccatgaacaacacaacagtaaaactacagatatcgaagcttccacaatataaatcgatgccaattgactcctttaatggtttgtgaaacaccaggaggtggtgtggtggtgattaaatttattttttaatcagttgttaccctgttctttattatgtgagactgttttttaacttttgttcggggttagctctcgtgctcctgcaagtgttagaagtcaccttgccatggcaatcagatgatcaaggagaaattttattttaaaaatgtgaaataaattaccaagtccttaaatttaaaccattatataacttagatatatgaaattataaattacatgtttgcgagtatattgttggtttaacgtatcacagcagatccattcctcgtttgactgtggatggctgccgatatggcactccacgttaatacaaagaatgtattcaagtgatgtaaaacttacactaaacctcttcttgctatagggttgaatcccctttcctcaacgcatgaattccccttgttcacggtgaaatgtactccatatgatgtactactacattaatctaaaaagatatgatagaggcgtctcgactggaaaagtttggaagaacatagcatcgattccaagcacgcaagctgcgaaacaacatgagcccaaaaaacccaattgtccattaatccatccatccattttcgttagaattcagccatgttgatcagggcaacaagaagacgaccgcccacctcaccatttccacgcgccgcccccacctttccagaaccttccctcgtcccaataccgtcgaatcctcgccgtcgatccccaatccgtgggcccaccacaaacccgcaggcgccgcatcttctctcttacccccggctccaagccaaaccccacctgaaccaaacccactgccatctgggccccacgcctcccggccccacatgccagcgacgcggagatgcgaatattcccccccttctattctataaagaatacctccctcctccatcgccgcatcacatcgcaatccaaaccttcgtcttcgtcttcctctcgccgctgattcgattcgatccgatccgatccaaggtgagttccctcctccgatcgcgcgctcgatcttggatccgcgggtgcggaggattgctgtgtgcttcgcgggatctcgtttgacgctcgcggggccggatttggtgcaggggaggggaagca

SEQ ID NO: 1818 - DNA, 1059 bp, Oryza sativa
gggaggggaggaagagagggaggggaggaggaagaggattggatctgagaagagcaagagaggggatgttccaatcttatgtaaatatctgtctgggacttaaccgatcagatgtgggagagaaatatttactcccggttgataacttcaaccaggactaaagatcgatctttagtcccggttggtaataccaaccgggagtaaagatcacttgatctttagtcccggttggtgataccaaccgggactaaagtggtaatttttatagtcccggttggtagtatcaaccgagactaaagattctcgaccccctgacatacatctgacaggggatgaaccgggactacaaatcatctttagtcccggttggtgttaccaaccgggactaaagatcaaaattttttaaaccgggactaaaaatcgtttttagtcccggtttttaatggaatcggaactattgtgaaatttggtcgaccgaccaaagatggtttctccaccagtatttctagcactcattccttatcactgtcggttctaggagacgctggggattttttagatgggtgtttttgtgctagtgccagaacaatgttcattgccatattaatgcaaaaaggatcatattaacaatcaatggtgtgtacatgtgatcaattgatttaggaactatttgttgtgtaagatggatggtctttgttttggctcttgtaacaattatctaccatggtcaaaagtttggttccaaatttacgaagataccggtatatgctacaatgagaattttgtcagtttattgctgttaacttttcttttcgtgtagccgttatttaatgctgataaatgaggtgtgttgacctcggcaagccaaccaccaattagtgactgcatacatggcctgcataggatgcagctagctattgaaatattaaaagttcacctcgaaaaacacatatctacacgcagtcatgcatatataaaacgttacaaagggtcgatttagcgacgtcgcgctgtggaagaaaagactagagaagattgacaagtgatcatatgagagag

SEQ ID NO: 1819 - DNA, 2000 bp, Oryza sativa
  N_region (1559)..(1559): n = any nucleotide
taatgatctctacagtcattcatatatgaaatacgttgtatctcatttgtgaaaatagattccaatagttgtacatcaaatctaattctgttttttataaatcgattgtatacaaaacacaaacacatactatatggaaacaaaagctcagagttgtatatcaactctaattctacagcttcgtgtaaaattacctaggaaagtcagctggtccctcttaaaaatttccttgacatagttccgaacatcatgtaatcacttcacctaaaagcaggtagcactgatgagccaagtcatatttaaaagcgcaatgaatttgatcctgcccgttgctgttgagagctgatctgtacccctcctcaagtatctatacgcagcttcatactgctaagcgctaaaaacaccctggttggtttggctcgcacgtggcgcgtcgtcctacgcacgtgcacggccccacggaccatcattcgtagggctgcgcgcctctctccccctgcctgcgcggctgcgggcctgcggcttccttcgctaggttgactactcccaccgactggttttgcgaacggcccacgcacgcaggtggcggcacactcaaccagccagccagaacaaaaaatttacaaccaaaaacggaggcaagcacagcacgctgctgcaccaatttcccttgctgttcctcctccctcacatccgtcctctctcctctcctctccaagagacataaaaatattgggaaaagaatcccactatctcatgacatatgagaagagagagagatagaaagggagagcaattcaattgaggccatccacaagacattcctcctctccttgactcgtgcctgcagctagctactcgagacatccaggagctcctcatcctccttgcctctctctcttctccttgtgttgatagcgagaaatcgttggcgaggatcgagcaattgggattcttcttgcatggatgcggcccactggcatcaggtaattaagctgcggcggctgatctgcgctcgatcctttctcgaatcggtgcatgcaacaccggcgacatgtctacaattaagatctctcaccgggggcccggccgggtcgattttggcttctgctcttcttctggatcttgttgatgtgggtgtttcttggtcgatccttcttgtttaatctgcctgtgccttgatcttggcgcttgcttttcctctggtgggatacggtgatctctattctctctcggctttgtttgctcttgggaaccgccatggccaaccttttattctttgtgcagatctatgcacggatcggccatattcttctcgctctgtgtgtatgtgggttagtttctgtcttctccattggcttcgagctgagggctcttgttgttgttgtttggggccttttaattctcttgctccctcctctccttccccttttaatccttgaaaggagcacacgacgcaccgcttttcttttcctttgttcctcgctttctttcttatcctccctttcctttttatcttttcatctctcttttcctcatggcttttctctccacccttnaccctttcgtctctctcctcaagcccacaccttgcatcaaaagagtagccatgtcttggaggatgatgtagtagcagcagcagcagtactgctacgccacaaacacaaccctacaagagcacaaacaaagttgtgtgttttgtgtggtggtgtgttttctctctcatctttactttgctttttttttcccgctttatttctatctttcacctttccctcttctagctttaatctcgctttgtatccatttgcttggttctttgttgcaccataaggatcctagctcacatcacacctcatgctcattcatcttcccccattcgtctctcatatactacatgttcttgcttcttggttcttgctaattgtctagtattgcataacttagttctaggtttgtgttgatacttgcaattgcaacatctaatggagtgcaacgac

SEQ ID NO: 1820 - DNA, 1169 bp, Oryza sativa
  N_region (960)..(960): n = any nucleotide
  N_region (1019)..(1019): n = any nucleotide
  N_region (1035)..(1035): n = any nucleotide
cttctatggctggtgtatcattgccattgatggacgactttgttcccacatcggccgtcaccaagggaaagactagaaagctatgtcatcattaatttttttctttatatgatattttccttttcctctgcctcactacatcaactggttcgccgttgactagtgagttgggggctacatatgttatatcatattttttttaataattttcataatatttatcttgattgcttgcgacataatctgagtacaaaagtgcctattgagttatggagttctatcttcctatgctttccgtttggtttgtcgatggatagttgcctttgggccgattcctagcacccggcggctcgttggatgaaccgagtaatgcaaggtgctaagtattattcggaataaatcaaaagcatagagataagataaatttattgtcacgtcctgataaattcatcccgaaataaaaaatcatcctctaaaaagaataatagaattatataaaattcgaaaagaaattggcaaacactaaaatacgtgccagaaaaattcgaatgtggtccgaagaatttttgttaaattctccttggtctaaaaagagccctcaaattttacttgaattttcagagcaccggaaatatttattaagcaacaacgactatgatcaaagtttactaaaaagaaaagctaaaaataatcctccttcctccctttgggccaagtctggcccaaagtcctctctctctctctcggcccgcggccaaagtcctctcttcctccctctctttctctccctctcctcctttccctccttctcttggggcctcctctccttcccctcggcccagctccctcctccctctcttccccaggcctcctctccctcttctcctcctgggccggccgcccggcccaagccgcgccacccagccaccccatcctcccgagccgccccccccccttaangcgcgccgcacgcgcgttgcacgcgcgcttgaccgtttggggccaaggcgcctgtcgtnttcctcccgcacggcntcctccctttcccgtgaaccctaagctcctttcctccctcaaatccgtgcgatttaatcatgggattccaaaattaaatagggagaattaatccccattgattcctctttgatttcccccgttttcccccttga

SEQ ID NO: 1821 - DNA, 430 bp, Oryza sativa
cagtgaaaaattgaaggggagagctagctactgcctaccagtagtagtagtagtagtagtagtagttagggccaggcaatcaggattagcacggttaattaggtaattaggacagtttcggctcggtgaaagacgtgaagccccaccccaccgtgggggcgaggcgacggaggcttcggccgcaagccgcctcggcacggctctcctccgcgtcgagccttataaaagccgcccctcggttcctcccccccaaccccaagtccattctctcgttcccaaaccctgcatccttctctttcacacaagcctctctctcgccggcttcggcgtccgtctcctcctcctcctcttcgtctagccttgtggcggcgtgcggtgcggtgcggtgaggaaaggagggagctttgaaggtcgggggagggcggaggag

SEQ ID NO: 1822 - DNA, 2000 bp, Oryza sativa
  N_region (363)..(363): n = any nucleotide
  N_region (1770)..(1770): n = any nucleotide
  N_region (1780)..(1780): n = any nucleotide
  N_region (1809)..(1809): n = any nucleotide
aagaatgaaaaaacggaggaatagaaaaaacatagaattatgatagaaatgcaagtataaaatagaggattgcaaaacataggaaaaacacaacaatgtttgtttgattggatcacatgaaaaacacatgaatcggataagagagatatactcaaaggatttttaccaagaggttggacctcttgctaagtttcttctaaaacctatatgcaataagccattccataggaattttgtaggatttgggaaacttcaattctttaaatcaaagagctacataggaaaatttcttataggatttcaatcctatgaaaattcttcataattcctttgattcaaaggggcccttaatttttaccatgntggtaaatttatagtccctattcctttattaagatagtagattttatgatctaggggcgaatcagtccgaaacgaggatatggtatgcacttttagaaatccagcgaatgtggattatccgacatttctatcggattatccgataggccgtttgtcagataatccaaaattatcaacaaatgtaaccactctatatattgcatataatataagttggttcatccaatgacctaatttatcaattaacctagatttattagcctaaggctttcattgtctcgtgtcacacttgcgtagctatatttttatattatagacataatgtatttatgttgttcagcacttaagtacataattattacaatgggtcatttattaactattgtattattgttccttgtattgctaactcgatgttgtattgattgcatatacatgtaacacccgataaatttaatccgtttccgaaccgattccacaccagctccgcaccatttccgacatccgaaacaatccgctccgcattcgcatccgcatccgtacactatccgcacccgctccgaatccgcttaaaaaatatggtttaggatatggtatgaaggccatccgtccgaatccgctccattttcacccattttttctcaatttttagcacgttttttaaactgctaaatgatatttcttacaaaactttctactttaaaatatcaaaatgactttctcgtcttatgctgacttcatcttcattttaatatatctcaaacaccacgatagagttactactaaataaaagactcctttgacttaaattactgggcggattaggattattacggcggatgattgacttggttgtagatacaaattgaatattataaaattaatttagtataaataacttaaatcaaacagtctaaataatgcaacagaaaaacaatttgtttcaataatgagttatatctgttttaataattcggtaaataagatgaaaagcagctgaaccatcacggcagtaagccagtaaacgtggcgttttgatagcgaggcgttagttcgctgatcacccaatcaccattcggtcttccattcactcacctgtcaccacccgtccacccccgcgtgctgatgcgacgctgtcacaaggcacacgtatgcagagcccgagcgcgacgggggcgctagggctagcggcttgcgtgcgcatggcgtcagcgtgaccgccgccggccgcaacagctgcagcagctggcacagcgtttcgaaaggaaacactttttctgttgagagcgcgagctatgcggcgagcttttatatatatttccccgtagcggagagaggaaaaaacgccaagaaaccatctgtcgcttttgaccccgggaagcagcagcagcagcagcggcggcggcntatcggggcntaacggaatcgaggtgtgttgccgctatntaaagaggaagaaaataggccccaaaccaaaccaccataccctactacaaaccataggcatcgccggcaagggaggtcggaggaagaagaaagggtcgtcgaggtgttcttgaattctgaatttctgatcaagtcgatcgttcgccggcgacggcaaaggtggtaactggtagtactatatatgacgacgt

SEQ ID NO: 1823 - DNA, 2000 bp, Oryza sativa
aatagtgtcttcataatagatgaagaataaatatgattggtagagaaaagagatgatgtatttattaatggcatactttaagaatccatgggttgtagagtgtagtttctattgtgatgtcttattgacatggcactatagacactgcttatgaatactatgggtttggactgcccttagaattgaaaagtaatagctaatcacaatttcaaaatgtcggaatccagtcatcacaaatgacgatcgaagatggaagcagctgtagaatgtcaacaggttacaggcccctaatgtcattttcgctctaatgttacagttcatcaatgtcaatcaatgaatatggtttaggccatgcttagaaggtgggttttttattgcgagtttgtacggaagtttgagttaggcttttcgagtatgacatatgttgttttaattaaggccctgtttagatgggactaaaacttttaagtccctatcacatcggatgtttgaaaattaattataaatattaaacgtagactattaataaaacccatccataatcttggactaatttgcgagacgaatctaatgagcctaattaatccatgattagcctatgtgatgctacagtaaacattctctaattatagattaattaggcttaaaaaatttgtctcgtgaattagcttttatttatgtaattagttttgtaagcagtatatatttaatactctaaattagtgtctaaagacagggacttaagttaagtccctggatgtaaacaccacctaaatgttggcagtttgacattcagtgcatttcaataaatagccggtgtggtatgtaagtacataaccaactagtagaagattttaatgcacatgacgggtctataattcaattttttgcagaccggaaaaacaataacgttacagcaaaatatgatggttagtcctaaatacatctaattattatcaaacgcaataatcttcaaccacatatgctaagttattttaagctataattacccatggttatagtcactaatcacagcgtccaatagtcacaaatgaggataaagaagatggaagcagcaacatgtaacaggcaaagataagcatttcactccactttgcagcaaagtcaatccatgaacatcagtacatcacataggtcatgtttagaaggctggatatttttatgagtttctgtagaagactgagcaggttcaactaaaacctaacttgccaagtgccaactcaggcaacgtaatcatcaacaacaagtcgcatgtggtgatttcatcaatcttaagatatgtcggctctgttttcaaaggtgtttataggggtagcgcgtttataggagtaaatgtgcacgtgcatataggcgtatgcgtttgtgtttcgaaaaaaaaaagttaatccataaatatgatataggtcatgttcgaaaggctagatacttttatgagtttctgcagaagattgagcaagttcaactgaaacctaactcgacaagtgccaaccaaggtaacgtaaccatcgacaacaagtcgcttgtggtgatttcatcaattttaagatacgccggctcggttttcggaggtgttcgtaggggtagcttgtttataggagtgagtgtgcacgtatgtgtaggcgtatgtatttgtgttttgaaaaaaaaaagttaatccataaatatgatgatataggtcatgtttagaagtctggatatttttatgagtttctctagaagattgagcaggttctactgaatcccaacttgcaaggtgccaaaccttgatgattttatttataaaggtatcagttccaggctacttcttggattccagttcataaaccgtttgtcctgaatccctgaccttcagacaaatcagaaggtgccaatgcagaagagacactaaatcttggtttgttttcatcacctccaagaaacagaaaattctcctataaaaccgaagtgatcactctcctcccgagctcgaaggagcaaca

SEQ ID NO: 1824 - DNA, 2000 bp, Oryza sativa
ttgccgtcaccacggccgcgcctgaaaccgccgccgcgtccgccgttgttgccgccttgtcccctgccaccgccaccaccgccgcgccctcctcgcgacacggtgttggcagaaggggaggagttgttctgaagcagatccaggcgtgtctcaaagccaacgagcaaagcatatagctcgctgactgagattgaatctgcacgcccagcaacggaggagacaaccgagttgtagtcgaagtcgaggccgacgaggatgtaggagacgagatcctcctcgtccagtggattcctgcagaagacatctcatctgctaaagctttcatcttacccacatattcagcgacagttttgttccctttcttggtggtggagagcgccatgcgggtgttgatgacgcgagctcgagactgcgacgcaaagaggctttcaatggcctcccagacttctgtggccttgccgagcgtggccacctgggtgaggacgtcgcgagagagcgacgacagcaagtaactcaggacttgttgttcctgcgcaacccattgcgcaagagcaggatttgccaccttctcagtggtcttcccatcgtccttggtgatgacgatggtggcttcaggcgccttgttgctcccgtcaaggaagcccgccatctgagcgccgcgcaacgtcgctaggacctgcgccttccagagcacgaagttgctcttcgtcagcttctcagagactgattgcccatggagagcaaatggaatggagctggacgaagatgccattgatttcggagagattggatgcgatggagggtggaggctctgataccatgtgcggtgaaacgatgcccttcctctaggctcgcttacgtgttatataggcacgggaaaaacccccggcgtggtgtttacatctcaacagaatacatccttatctcaagtgtttagttacaacaaactcctaagaagattcggttctatctatcctaatagaaccaatattatctaacatgccaaactactggggccggggttaccgtgccccagcggtaagcatggttaccgcatggtaaccgtggcaaaccgtaaaaagtttatcaaaattttaaattattttttaaatttatttaaatttaaggagctaggttaccgcggttttccttataccatactctctccgttaaaaaaaaactaaccgtggaggggtgctcctaggttggcttttttttggatggaggaagtactcccgcggtaagcgcggtaaccggtggtttgaggaaccctgatcatcataactagtcaaagaagcctattcgagcagaaatgatcgatatactccgacaatcctactcacactcgacactgtcactgtgcaagagacatggatttaacaccgggcaacgcttgagcttgagagacggctagtatgagctagctgagaagaccgatggtgtcatgtccgtcgtgcaacacgtaacagtgacgatagcaactggatgatcctctccatcgatcgctagtcacctatctatagctaggccagccatgggctagctgctgagaaacaaagtaaagtagggtcccgtgtctcccagtcgagttgatcgatcgatcggccattcctcgcaaatgtgtgtatacgatgccattcaagttcgcaaggcgcatcatgtctctgatccactgattatgcttacgcgatcgatcgctaattcgctagccaagccaccagggcgcgcacgcaccggccagccaccctcgcgggcgcggcatctccttggcgtcggcgtgcgtgcatgcaattacacgcaaggaagttaacgtacagaaaaaacacatcggtcgatcggtacgagccgggcgcatgtggtgaggccggcccggcgctcgtacgttcgctcgtcgggcgagactaccgtgagtgcgtgcgtgacagatcagcgcggccccgccctagctatagctagcccttttcacgcacggtacggctgagtcgacgttggatcgatcg

SEQ ID NO: 1825 - DNA, 2000 bp, Oryza sativa
  N_region (375)..(375): n = any nucleotide
  N_region (387)..(387): n = any nucleotide
  N_region (411)..(411): n = any nucleotide
  N_region (418)..(418): n = any nucleotide
  N_region (833)..(833): n = any nucleotide
tactatgagtgataaaacaactcataacaaaataaattataattacgtaaattttttgaataagacgaatggtcaaacatgtgagaaaaggtcagcggcgtcatctattaaaaaacggaggtagtatttcaaaagaagttcaaataaaaaagacgaccaatttgatcatctcgtccatcggagtataggcatcattttgttttgcagaaagacttcaggtcaaactcagtcccatcttaacttaagaaaaaaaggactaataatctccttaacccaccatcccatcactcaaactaaagaatcctagaaggctagaatttactttgacagtaacaacggaatggttatgctctcttgaagtcatgctggggtcantcaacttggttngcaacttatatatgtcagtatacntttctanggttctagatagccacatggggcatattaaatctattcaaacaatctaatggcacaatgatatgcctatcacatagctgtgctcaccattttcaagtaatacatggttagttccattacaaaccattggttttcccctcaaattccaaacaaattaacctattctaaacaaattatatccagtggttcacagaaaatcaaattgagtaatcacatggcagtaccaaagtccctaaaagataaagtagtgaaaccctcagaatatgatatgatccccacagctctcaatgaagataatatcactaaattcaaccttctgtttcactgcatgacaaaaacaagcctattccaacatgaatgctgaaatccatgctaattttggggaaatcaaccacatagatgaaccccatgaatgnctgcaggaaatttgcataccaaaatgctaaacatgaaatgtgaggtggtttgttttgtagctaggaggttttgctttgtgcttgagcacaatctgaacctttgataaaccacaaaaaggaaaaaaaaactaaaaacagttgagatgatgtgacttcacaagataagagagaattaacaataacttagtggcttctaagtgtataagatattgagatttggactaaactccacttggtggatgcaatttcagtctcaggaaagtccaaacctactatgcaattaaggtactaaggttaatgttgaggctagaggtgactgaagttgacctgcaaacaggctccgcaatagcgatcaagaaatcgtaggcttgtttgtataggggcgaaaacgtctccaggaagatgcggccatcggcgcaggcccagagcggcctgttcgcgtgatccggcttcagctctagcttggtgaagtccctcttcttcacctccctatcggctgcaccgaatcaaagttccaacccccacaaaacaaaaatccccaatcagttcaatgttccgtgcaaaccctcatacattgggggaggggcggtgagtttagggcggattcgagcgcgcggtgttaccatcgcggacgtcgtcatcgacgtcatcggtgtagtccagttcggcggtctcgtcaatcgacctcgacggcgccgaggacttgtgccgcttcggcgcgcgggcgcgatcgcctgcagaggggagaggggggaacggtgtaagggagatgcggtatataggacagaacgggggggcgccggtgccggggatggtgccgcttagggtttgcttcctcaccgtcgccgccggccatggccggaagccctggagcgaggagcgaggagcgcggcggcgcgttggcggcggtagccggagaggggagatgttggcggcgcacggggcagtttcgtcttctcgtcgccgcgacccgctcgggctgggaaatgctttatcgatcgatctgggaattctggagtcctctatctgtctcttaaatctgacgagtgggcccaggggcaaaatcgtccgatgggaagaccgatcaaacggttcagccggccagaggcgtaaagggaaccggacaaattcctccgtcgtctggtagcttcttctcgcggctgcgcg

SEQ ID NO: 1826 - DNA, 2000 bp, Oryza sativa
  N_region (419)..(419): n = any nucleotide
  N_region (423)..(423): n = any nucleotide
aacatcgtccaggaatcagccgaggtacacaaattgacaatttaatatacagattcatcaaattaactaaaacgataaatacttacttaagaggcacttagtcctcaccatgaagaaaactgcagcggaaaataaaatctagcgaagctctggctccactcccacaggcagctcaactggggtataagccaaacgtcttctccttctggattctttttcttcaactgaggttgattgattattgcaagaatgagcatatgacatactcagcaagccacacagcaaatatgcaaagtgcacgaggataccaaaggatggcataatataggctcatttgcaaaagcagcatttagcaaaacatttaagagaagtaaaaacagtggagtaattaatcagaaattttaatcaacactgaacancacncccatgctgcacaggcccaaccattctgcagcaggcccaaccattctgaacagatccatcaccacggctgtacagatctaactccaaaccaggagctaaacaaattattaccagttatagcatccataattattgtgagaggtgtgagactaatcacgaaaaacattgctcaacccgcccataaccgcgggcacggctattcgaatagttttactctggccagaggtgtaccactgtacccagaagacacagccccacatcatgtcaccatgtgcctcagtaccaccacggtacctcggaaaggagctgtgacattacccctcgcacaacacaatccaccacagtgcaccattcctggatcataatcacccccctcaaaaaccagaggcatggactccccagcgacccccgtgggcttatctccgccacttctcagtctggtgctctgcaatgaaccatgctatacgaaaggtaaagccgttgcccatgctggcttgtggttggcacggttaatgtttcacaacagtagctcgcgaaccggtccttaattgtcatgagcacgactctcaaaaccatgtgctcacaacccaccattatcaagttttagttggcaagtaattaattaaccaatcacgattgaccatcgtgaactatcattaagccaccattaaataatagtgaataataagttatcccaatagtgtgctaatgtttctaagcatggctaagcaattatatctaatatctagttgaaccaatatatatatagcccaactagtcaagttataatcacccaaggtatcaaggaataaagtaatcaagtacaaaagggccataacaaagaataggttcacaccacccagtgacattcaaaaataaatgcacagttgaaataaatagagaatttgaatataggatcaacatgctcaaaggaattgtgtttgggatctgtgtgacttgccttgcaataatcggtcttcaattaatcttcttgaacacttccggtgcactcgcgaaccttcgcaacgatggaaacgacaagctaacacgcaaaaccaagaaaaagactaataaacaccaaataaacaatacataaaaagtaaacaaacatgtagattataattttagatgaattatgagacttgaacggcctcattctgacttcatatgaatttattatgaattttacaagattaaatctaattaaagcccatttaaaaagaattaaataaatttaattcaatttatggacaattttaatatgtagatctttattttataaaatttttgcaacttgaaccacattaaactgagttcaaatgaattagttatgaatttttaaagattaaatcggattaaaacacttatatggattttaattgaattatgacgcaataatgaattatttttgaaaaggaaaaagggatttattgcgtcagcggctagggtttgcggtggactgggcgcacggcagcggttcacgggaacggacggccgagatcaaccctatccaaaacggacggccgagatcaaacggtccacgaccggctcacggggaacggcaacgatgacgtcag

SEQ ID NO: 1827 - DNA, 66 bp, Oryza sativa
ttttttttcccccccccccccccccttctcaccacaacctgctagcaagctcagagctagcagcag

SEQ ID NO: 1828 - DNA, 2000 bp, Oryza sativa
  N_region (50)..(50): n = any nucleotide
  N_region (179)..(179): n = any nucleotide
  N_region (212)..(212): n = any nucleotide
  N_region (215)..(215): n = any nucleotide
  N_region (474)..(474): n = any nucleotide
ttttgcccggttttgctgacgtgccatcctagtcagcaaaaaaaaaattnaaaaaacacatagggcccacatgtcagcttcacatcttttttctcctattttcttctccttctctcctcttctcttttcttactctctcttctcttctccttcaggctgcaggcggagcagccgcgctncgctgccgccgtcgtcgtcggctctccaccgtngtngtcgccgtgggtaaggctatgcggcgcggccgtctggcggcggagcggaggcagcggaggcagcgggcggagcggcgagcacggatgcgggcggcgcagcggagggcgagcgcggcaacggagcagcggaaggcgcgagcacggcggtgggccgagcagtggagcgcgagcaggccgcggacagagtagcggagcgcgagcgcatcggcggagcagcggccagcgagtttgggagagagggggaggcggccggcgaccnaggaaacaatctcttcctctgcctcttccccttctcccgctggtggtgcctctcctagcatcgtcggccacccgcgggggcacgacggtggtagcggccgatcacggggagctcctcgtcccatccactgtcttccgcttcgcctagctcgccttccgctgctttgcccaccgccgcgactcgccccgccgccaactcctccaccgcaactcgccttccgctgcaccccccgcatccgtgctcctccgctgcacgtaatagcatatatacatgtgagtgtgcttagccatatacacatgcttggctaatatatacgtctgcatgttatcgggcggcaaaccaacaagaagctagctaggctatagctggtcgtctccatgcatgcatatatatgctcgtatgaagacgcatgtactacatgcggccgtctgtacccggcgtatatgcgtatgagctacgacgtcaagtgctaccgcgacgtcagcgaagacgacgagggtcaccgcgcccgcgccgaccaccgtccatgacgccgatggcacgccgagcgtggacacgctcctactgcagctgcgcgagctgggcgtccgggaggaccatgggatcaggccggcgacgctgccgccgtcaccactaccgctgccgcggcacaggaggagcgcgagcgactggggtgcatcgtcagccagcacttcgagccacctatgcacggcaactgcgacgcctggccgatgccgccgaacagccgcgccgtgtagcctcgcccacggcgacgacgacggtggagagccgacgacgacggcggccacggcgcgcggctgctccgcccgttagcctccgctccgccgccgcgcttcgctgccttcgctccgccgccgggctcgcccgccgtccgctctgctgccgcgctcggccatcgcggctgcgcccgccgccagcctgaaggagaagagagagaggagagaagagaaaagagaagagaaggagaagaaaagagaagaaaaaaatatgtgcagctgacatatgggccctatgtactttttaatttttttttgttgactaggatgccacgtcagcaaaaccgggcaaaaatactgtcaagggacctccggtgaatggtttgagtaagtttaggggtagacgtttctggttttgtggttaagggacctcaaaaaatctctctgttaaattgagggacctccggggaacttattccaagaaaaaaaatccaactcggcccaatatccaaacctaatgggcctcctcctccagcggagcccaaaaggtgagaagaacccggcccgacccgacccattacccaataaccaggcgggttggctaggaatatcctcgcgtcgcgtcctcttccgcatcggcccaatccacccgcggcggcgatctctctctaccccgatctcctctcgccgtcggcgtcgcccgggtcgccgccgccctccgccgcgcagtccgcagctagtaggtgggggggttagccttagcgtgagaggcctttgccgccggctgcg

SEQ ID NO: 1829 - DNA, 1328 bp, Oryza sativa
ggctggaaagatttaggcaattgcccgtgtaagcttagagaagaaagagagggatcagattgagacatcactgaaggtcggaagagaacttcctgcatctcaaagcggagaacgatacgcaaagatacaagagccagatacgtgctctcgagcagcagatttcgcagctgaaggtatccttggactcgttgagggttggtgcccctcccaagtggggagcagacaacagaaccaacgcgttgcgcctttctgaagggagaaagaatggcagcgctcaaattttggccaatatagcagcggtaccccaggatttcgattttgacgacatacagcgtgaccgggagtgcgtcatgtgcctgagcgaggagatgtcggtcgtcttcctcccttgcgcgcaccaggtggtctgcgcgaaatgcaatgacctccatgacaagcaagggatgaaggagtgcccatcgtgccggacccccatccagcgcagggtgtgcgcccgcctcgccggttgctagacttcttcatatacaccattttgttttctctttttatttgttttttttgattgatttgctgagcttgccttggatggatggatggaagattggatggaataatgagtggtggtgagagtggttaaactttgagaataatatacatggttggtcgcacatcaatcaaaaccccgcagagataatggataatgggatgggtgttggttatacatgatgtacagagcgttgtcttctgaatgcttttccttttggtttatctttttttcgctgagcattgcaggcaatcagaactagttcttgtcaggtaagagtatcaaaatgtgtttgaattttgatgcttctgagctattccatttatcctgggaatcctcactgaactgaggtttcggttcatggatgatgttaataagtctggttgtactatgtggctttgtctgattcgccattgacctcattgtgttccaagagctcttctcccaattttggtggtaaataaacaaacagattcctatgaaatttcttatatgaaatactgtgaaatttcctgcgttgcaaatgagagtttgcatcataaacactcaacgcagcagcatcaagagcttcattgtcttcaattttcagacgatctctggcctacgacgaaggcacggtgtcttcctttccatggaccctccaggtgaaccccacatgtcagtggaatggctcacgcgtagtattttccctagtccatttccacccttcttcacatcacagcgagaaaaaaagagcgaattaaaagcaaaaaaaaaaggaaaataaaggagaaaagagtggcgg

SEQ ID NO: 1830 - DNA, 2000 bp, Oryza sativa
aaactgagtaaaagcagggtgttgttagaaacgtgagaagtatgtactaggccttgactaactaaattggagattttgcatctaatggtgcttaatttagcaaattttactttcttattccttgcaagcaaatgactggagttcaaacatgcacactgtgatcagataatagatcaatggtagatatattgtgaaccatgatacttgcattcattttatctctctatttacaaacacccactgttttaacagtttgtcaggtaataaaggcctttgcggggtgcctactttacctgcttgtgcattattttgggagaaaggagggctgaacagaactggtaaaattgcactaggggcctcgcttgggtttgttctacttgtcacactcatagtggtctacatattgtgcatcagaagaggaccgtacgattatgattttgagttcccccaagatttgacttgtgagtataccacatctcaccttcatactgtgggtcaacctcatatatgactttaagattctttagttttgagtgattattgttttccattgtaagttagtggtagccgttcttttcttaaactatacctaaggccattcatatcagttgtcatgtcatttgaaaaaattatcagtgttcctatgttcctattaacgcaagtaacaatgtttcagatatatcaacctagagtttagtatcccttttatgaacaagtaatcactgtttacaaaccaatttcctgtcttcacaaatgtctaccatgtttaaatttgctactttctcatcctacacagcgatatcagcaatctctgcaaaaaggaataggtatcagagggcgaagtctgtaatgcttgccgagatggaggcgcacggcccggacggttattataccaacgggggcgctcactgaattgatgggcaccggaaatggatatcttcacaggttgttgtatttctacttacagagcaaacactcattgacaattgctggcctgaagcaaggacagttgtgacttgtgactcgtgaacacaattcaccagcatcatcaacatgacgtccctgtaacttcagtcaagcatccatggcattattttgcagttacactcacagcttaattacaaatgtaaaatatgtgcatgttttatgtgtactataatacgatgaagtggtggtggggtggtagtagtagtttggtaatagtagtaggggtgccttattttttgcagaggctttgctgtctcgtattagctttagctttaggcgtgtgcactccatcagcaatgtaaatggaaccaggttgggtcaggacagattcaggcgttgaaatgcttggggggtaaaagctggtgtactcataggtgtattctttctgtataaaacctgacttcgttggcactgtctgacttcaggagattgaaaacattagctttggatcagagtgttgttagccacttttgattatctgttgcttacttgcgtgtcatccagagtcatagacgactcaaattctcacctgctagtatttcaattgtcttcagaatgtgctctttaaacttaatttttccttctaatcgaaccatttggtctggatttagatacttgcattatatcgaagttgtactgcatgaaaccttaagcaatgatgtaataatatcgagtcatctgtaatgtctgaaaccttatttagactatgcagtttgcagttcatattaaagcccacgtaaaataattctcagcccaacaaaatacaaagaataattctaagcccaacgagcccaactgcgcttcccaactatcaaatctgcaccatccattcctcatcggatgccttcacgccgccacgtagcggagagcaaagcaaaaccctagctagagccacacccagaggtatagattccccaccccgccgcctccacgcattccttcgcccaccaaaaccctagccgcgccgccgccgccgacgaccaggtaaggaaggagatccgccgccggcgccg

SEQ ID NO: 1831 - DNA, 2000 bp, Oryza sativa
  N_region (49)..(49): n = any nucleotide
  N_region (74)..(74): n = any nucleotide
  N_region (172)..(172): n = any nucleotide
  N_region (319)..(319): n = any nucleotide
  N_region (322)..(322): n = any nucleotide
  N_region (383)..(383): n = any nucleotide
  N_region (392)..(392): n = any nucleotide
  N_region (439)..(439): n = any nucleotide
  N_region (446)..(446): n = any nucleotide
  N_region (449)..(449): n = any nucleotide
  N_region (501)..(501): n = any nucleotide
  N_region (504)..(504): n = any nucleotide
  N_region (523)..(523): n = any nucleotide
  N_region (536)..(536): n = any nucleotide
  N_region (551)..(551): n = any nucleotide
  N_region (558)..(558): n = any nucleotide
  N_region (590)..(590): n = any nucleotide
  N_region (595)..(595): n = any nucleotide
  N_region (733)..(733): n = any nucleotide
  N_region (741)..(741): n = any nucleotide
  N_region (761)..(761): n = any nucleotide
  N_region (769)..(769): n = any nucleotide
  N_region (799)..(799): n = any nucleotide
  N_region (805)..(805): n = any nucleotide
  N_region (812)..(812): n = any nucleotide
  N_region (815)..(815): n = any nucleotide
  N_region (819)..(820): n = any nucleotide
  N_region (826)..(826): n = any nucleotide
  N_region (845)..(845): n = any nucleotide
  N_region (861)..(861): n = any nucleotide
  N_region (863)..(863): n = any nucleotide
  N_region (931)..(931): n = any nucleotide
  N_region (939)..(939): n = any nucleotide
  N_region (941)..(941): n = any nucleotide
  N_region (986)..(986): n = any nucleotide
  N_region (988)..(988): n = any nucleotide
  N_region (990)..(990): n = any nucleotide
  N_region (994)..(995): n = any nucleotide
  N_region (1001)..(1002): n = any nucleotide
  N_region (1005)..(1005): n = any nucleotide
  N_region (1009)..(1009): n = any nucleotide
  N_region (1011)..(1012): n = any nucleotide
  N_region (1015)..(1015): n = any nucleotide
  N_region (1017)..(1017): n = any nucleotide
  N_region (1021)..(1021): n = any nucleotide
  N_region (1026)..(1027): n = any nucleotide
  N_region (1029)..(1029): n = any nucleotide
  N_region (1035)..(1035): n = any nucleotide
  N_region (1039)..(1041): n = any nucleotide
  N_region (1051)..(1051): n = any nucleotide
  N_region (1053)..(1053): n = any nucleotide
  N_region (1057)..(1057): n = any nucleotide
  N_region (1059)..(1062): n = any nucleotide
  N_region (1065)..(1066): n = any nucleotide
  N_region (1068)..(1068): n = any nucleotide
  N_region (1070)..(1071): n = any nucleotide
  N_region (1074)..(1074): n = any nucleotide
  N_region (1081)..(1081): n = any nucleotide
  N_region (1083)..(1083): n = any nucleotide
  N_region (1086)..(1087): n = any nucleotide
  N_region (1091)..(1091): n = any nucleotide
  N_region (1093)..(1094): n = any nucleotide
  N_region (1104)..(1109): n = any nucleotide
  N_region (1112)..(1115): n = any nucleotide
  N_region (1117)..(1118): n = any nucleotide
  N_region (1121)..(1121): n = any nucleotide
  N_region (1128)..(1128): n = any nucleotide
  N_region (1130)..(1130): n = any nucleotide
  N_region (1132)..(1132): n = any nucleotide
  N_region (1134)..(1138): n = any nucleotide
  N_region (1141)..(1141): n = any nucleotide
  N_region (1146)..(1149): n = any nucleotide
  N_region (1154)..(1155): n = any nucleotide
  N_region (1157)..(1157): n = any nucleotide
  N_region (1161)..(1161): n = any nucleotide
  N_region (1163)..(1163): n = any nucleotide
  N_region (1165)..(1165): n = any nucleotide
  N_region (1169)..(1172): n = any nucleotide
  N_region (1176)..(1177): n = any nucleotide
  N_region (1180)..(1180): n = any nucleotide
  N_region (1184)..(1184): n = any nucleotide
  N_region (1193)..(1193): n = any nucleotide
  N_region (1196)..(1199): n = any nucleotide
  N_region (1202)..(1202): n = any nucleotide
  N_region (1207)..(1207): n = any nucleotide
  N_region (1211)..(1212): n = any nucleotide
  N_region (1214)..(1215): n = any nucleotide
  N_region (1217)..(1218): n = any nucleotide
  N_region (1220)..(1220): n = any nucleotide
  N_region (1223)..(1223): n = any nucleotide
  N_region (1226)..(1226): n = any nucleotide
  N_region (1230)..(1230): n = any nucleotide
  N_region (1234)..(1234): n = any nucleotide
  N_region (1237)..(1237): n = any nucleotide
  N_region (1239)..(1241): n = any nucleotide
  N_region (1244)..(1245): n = any nucleotide
  N_region (1259)..(1259): n = any nucleotide
  N_region (1269)..(1270): n = any nucleotide
  N_region (1273)..(1274): n = any nucleotide
  N_region (1287)..(1287): n = any nucleotide
  N_region (1290)..(1290): n = any nucleotide
  N_region (1294)..(1294): n = any nucleotide
  N_region (1306)..(1309): n = any nucleotide
  N_region (1312)..(1312): n = any nucleotide
  N_region (1318)..(1318): n = any nucleotide
  N_region (1320)..(1320): n = any nucleotide
  N_region (1322)..(1322): n = any nucleotide
  N_region (1324)..(1324): n = any nucleotide
  N_region (1326)..(1326): n = any nucleotide
  N_region (1328)..(1330): n = any nucleotide
  N_region (1335)..(1335): n = any nucleotide
  N_region (1338)..(1340): n = any nucleotide
  N_region (1343)..(1344): n = any nucleotide
  N_region (1346)..(1352): n = any nucleotide
  N_region (1354)..(1355): n = any nucleotide
  N_region (1357)..(1359): n = any nucleotide
  N_region (1361)..(1361): n = any nucleotide
  N_region (1365)..(1365): n = any nucleotide
  N_region (1367)..(1370): n = any nucleotide
  N_region (1386)..(1387): n = any nucleotide
  N_region (1389)..(1391): n = any nucleotide
  N_region (1396)..(1398): n = any nucleotide
  N_region (1401)..(1401): n = any nucleotide
  N_region (1409)..(1409): n = any nucleotide
  N_region (1412)..(1412): n = any nucleotide
  N_region (1418)..(1418): n = any nucleotide
  N_region (1443)..(1443): n = any nucleotide
  N_region (1445)..(1445): n = any nucleotide
  N_region (1447)..(1447): n = any nucleotide
  N_region (1450)..(1452): n = any nucleotide
  N_region (1454)..(1455): n = any nucleotide
  N_region (1457)..(1457): n = any nucleotide
  N_region (1459)..(1460): n = any nucleotide
  N_region (1476)..(1476): n = any nucleotide
  N_region (1478)..(1478): n = any nucleotide
  N_region (1484)..(1484): n = any nucleotide
  N_region (1492)..(1493): n = any nucleotide
  N_region (1497)..(1498): n = any nucleotide
  N_region (1500)..(1500): n = any nucleotide
  N_region (1502)..(1503): n = any nucleotide
  N_region (1506)..(1509): n = any nucleotide
  N_region (1511)..(1511): n = any nucleotide
  N_region (1514)..(1515): n = any nucleotide
  N_region (1518)..(1519): n = any nucleotide
  N_region (1522)..(1523): n = any nucleotide
  N_region (1525)..(1525): n = any nucleotide
  N_region (1527)..(1528): n = any nucleotide
  N_region (1530)..(1530): n = any nucleotide
  N_region (1535)..(1535): n = any nucleotide
  N_region (1540)..(1540): n = any nucleotide
  N_region (1545)..(1545): n = any nucleotide
  N_region (1560)..(1560): n = any nucleotide
  N_region (1565)..(1565): n = any nucleotide
  N_region (1567)..(1567): n = any nucleotide
  N_region (1571)..(1571): n = any nucleotide
  N_region (1574)..(1574): n = any nucleotide
  N_region (1577)..(1577): n = any nucleotide
  N_region (1579)..(1579): n = any nucleotide
  N_region (1590)..(1590): n = any nucleotide
  N_region (1598)..(1598): n = any nucleotide
  N_region (1601)..(1602): n = any nucleotide
  N_region (1607)..(1607): n = any nucleotide
  N_region (1613)..(1613): n = any nucleotide
  N_region (1615)..(1616): n = any nucleotide
  N_region (1618)..(1618): n = any nucleotide
  N_region (1622)..(1622): n = any nucleotide
  N_region (1625)..(1625): n = any nucleotide
  N_region (1628)..(1628): n = any nucleotide
  N_region (1631)..(1631): n = any nucleotide
  N_region (1633)..(1634): n = any nucleotide
  N_region (1636)..(1640): n = any nucleotide
  N_region (1647)..(1648): n = any nucleotide
  N_region (1655)..(1656): n = any nucleotide
  N_region (1662)..(1662): n = any nucleotide
  N_region (1664)..(1664): n = any nucleotide
  N_region (1835)..(1835): n = any nucleotide
  N_region (1842)..(1842): n = any nucleotide
  N_region (1848)..(1848): n = any nucleotide
  N_region (1857)..(1857): n = any nucleotide
tactcgcactctggggttggggaaaaaatagagcaagactgagtactanccactgtactcagcaagtcataccngaataggggtatgatgcagggaattatcaaaggagagctagagtggttcatttgcataaagcgagcatttataaacagaagttgaaagaattaaacanttgcaataattaattaatattgatcatccgctgtccaacgctatcccacgttgcaacaggcccaaccatccacctatactatccaatttcattagactaaactagggtgagactaatcacggtgaatctggttgaccgcccataacngcnggcacggctattcgaatagttttactctgatcagaggtgtacagctgtacccacaagacanagccccacnacacgtttccgtgcgccgacatgccaccacgacataccggaaagagnccgtganagnacccttcgcataaccccctctagccaagcacaccacacctcaggtttcaccnccntccccagcgggcgacgggnagtcccctctcgngcctaggtgaatccngaagccncataggccgtcgcagggcccatccaaactccntcacncccacccttgcctggatgcgtcagctagagaaaagctacactacaagcccagccgttgcccacgctggcttgtggtaagtacgataagttcttccagggcatcccgcgaaccggtccttaactgccatgggtgcgacnagcaaaancatgcacccacagcccaccntgtgattnattttaattaaccaacaccaaagcggtggnactaanccaacantancatnngaaccnacagtctaaacattaatangattttccccactgtntnctagttgaactaagcatggctaagcaactcctagtccaacgtctattcatgttataacccaagctaanaaaggagnanggtaccaaaatagcatggctgtaacaataggtaaacatcccatantnanattnnaaaacnnatntagnanntgnangaanacatnngngacatntgcnnnatagtatcancntgancnnnngannancnnganttgcctngntcnncatncnngagcaaaccnnnnnnacnnnntnnaantactacngnancnnnnnaanaaccnnnntctanngncatncnangcannnntctnnatntacngagactatnaannnnctnaaacngagnncnnannanttngtnatgnattntanannnttnnctgtgatttactgngacttgaatnngcnnaaacggagctcgnatnaatnagttatgaattnnnnaanaattcncngngntnannnctatnaannnatnncnnnnnnnanntnnngngtcnannnntcccagcggctgacgnnannnagggnnnagnggcgccgncangcgggncccactcggtcagcggctcaagggngngnggnnnanngngnnccgggaccacgcgggngntccacngccggtcnncggnncnannggnnnngntcnnccnnggnncngnncngacgngcggnggtcnacccggctcggctcngacgngnccgntanggncnagattccgccngccaacgnggnngaatnggacgngnngngagngangcnggntnngnnnnnctcgaannccggccnnctcggncncggcgatggcgacgacgcgcgggcacacgttgccggcgacggcaaccagcggcagaggcggcggcgctaagcggcgtggctaggaaggagagggaggggagtacgaggggagagggcgccgtcaccgaggtgtggccggcgcggtaggagacgagcccgacaggcgaagcncacctgncggcangccacgggngggacgacggcaaccggcggacgggcttcggggtgccctaaggaaggaggagagagagattagagagagggagatgaaccacggcggccggcatccatggccgaaggcggcggtagaggtagaactcaccggagcgcgagggg

SEQ ID NO: 1832 - DNA, 2000 bp, Oryza sativa
  N_region (1184)..(1187): n = any nucleotide
  N_region (1402)..(1402): n = any nucleotide
  N_region (1453)..(1453): n = any nucleotide
  N_region (1527)..(1527): n = any nucleotide
  N_region (1817)..(1817): n = any nucleotide
  N_region (1847)..(1847): n = any nucleotide
ttattctaatacatgaaatccattcatttttaaccattcaagtgcttgggaggagaatttagacagttcaaacttcaatttttgaccattgaggtgactgaaaaatatttttttcacttcaccttggtatttgcttaacaatctgaaaagtaaattttggaatagatagtgagagtggattttaaactctccagagacgatgcttcattgtttacatgtcactcaaatagttataaaaatataaaaaaaacattaacatgtggtatatcacgccacaaacatgcaagttaaaatgtaacttctacgtgttgtaacgaaaaaacaatacgggatattctcttgagagtttagggggtgtttgggtgagagggactaaactttagtccgagggacttattttttggtgttagatgtcggccctgtatagatgggactaaaacttttaagtccctatcacatcggatgtttagacactaattataaatattaaacgtagactattaataaaacccatctataatcttggactaattcacgagacgaatcttttgagcctaattaatccatgattagcctatgtgatgctacagtaaacattctctaattatggattaattaggcttaaaaaatttgtctcgcgaattagctttcatttatgtaattagttttgtaagtagtctatatttaatactctaaattagtgtctaaatacagagactaaagttaagtccctggatccaaacaccacaaactaaagtcacccaaacacccccttagaatagcatctctctcttaaccctagctataagctaggcagagtagtattcctactagtacaggctatatcgcttactccctttgtcctaaaatatagcaatttttgcttggatgggatgtattctagtactacgaatctggacaggaggcttgtctagattcatagtattaggatacgtcccatccaattaaaaattgctatattttgagatggagagagtagatgaatagcttatatttcagtacccaattaaagagcattaactagtatacaccccaaagtgagtgataaattgataataatagagggatagctgttctgaggctatagatgtgtgcatcactgcacaaagtgatcagtgtgtgtgaggaccatctctacaactagttgtactatacttagcaannnnatgctctactcttcacttctactctcatccatacatacatgtcatctaatctatatattcatcatgtagggtagaagtacttctctatggtttggcctctttataagagcctgctttcccctcccttgcagccttttgctagaggagcacactacacacactacccagagcctctctagagagataaacagtttgcttccaaaaaaaaaaaggangaagaatctctagagagagaaacagagagagagaagagagagaagagagcntaaattcctcatagcaatccaaaagtggagtccctgctgcatagctcgctgcaggcaggcaggcatcttgtctnatgcttttcttctcgctaccccctctctctctatctctctctcgccttttgcaccattaccagcagcagctagctactactgcagcctgcaggcccctccctcctcttgctgctgtgctgcctcgagcgtttattgcgtgaatgctctttctgttgctgcaattcatttcatagcccatatgatgatctctgctcctccaacctagctgtgcataactcccatagaatcaacagctagcccacatgtttagatcagctgttgcagtgagccagtgagtaagtagtgctancactctcaccagctcgatccatcgatcaanccaactaaagagtaacgagaggtatgtacacttccatttgatttttgtaattttaagatcagctgcctcatggaggttagatcaggctgcttcttccatctctaacttttctttctttgattcttggtaggttagctacgacgacgacggtgt

SEQ ID NO: 1833 - DNA, 2000 bp, Oryza sativa
tccgtgtttattctattgcttcagccttcagggtcatggaaacgattctaaggttgggtactatgggagagaaggatagttgattgtcacgcccagaaattcataagtaatttccgaactaatttgtgcattaagacccttcgtccaggacttaaccgaggtacacaaactgacaatttaatatacagattcatcaaaataactaaagcaaataaatacttacataagaggcacttagtccttaccatgaagaaaactgcagcggaaaaataaaacctagcgaagcttcagctccactcccacaggcagctcaactgggatctaaaccaaaggtcttctccttctggatcctttttcttcaactgaggtttgatgattattgcaaggtgagtacatggaatactccgcaagccacacagcaagtatgcaagtgcacaaggataccaaaggatggcataatatagggttcatttgcgaaaagcagtatttagcaaagatttaaaaatttgtaaaacagtagagtaattaatcatcaatattaatcaacactgaacagcacacccatgctgctcaggcccaaccaaacctgaacaaccaaccccggtcgtacagatcaaacctccaaaccaggaattatccattctaaaccaggagtcaaattaattatcacattgttatcattaatgagtagtgtgggactaatcacgaaaaacattgttagacccgcccataaccgcgggcacggctattcgaatagttttactctggccagagatgtaccactgtacccacaagacacgattccacacatgttgccatgccccgaagtaccaccacggcactgcaaatggggaaatcgtgacaataccctttgcccaacacaactcaccacagtgcaccattcctggatcataatcaccccctcaaaaaccagaggcatggattccccagcgacccccacggacctctcgccgcttctcagtctggcaccccgtaatgaaccaggctatacaaaaggtaaagctgttgcccacgctggcatgttgttggcacggttaatattttacaacagtagctcgcgaaccggtccttaattgtcatgagcacgaccttcaaaaccatgtgctcacaacccaccatatatcatattttaattatcaattaattatcataacacgattaaccatcgtgagctaccattaaatataaccataagtaatagtgaagcataatttatcccattaatgagctaatgtttctaagcacggctaagcaactataaataacatctagctgaaccaatccgatatataaggtcgatgctagtcaaattataacccataggaaaataaagccatcttcggccataattaaatgagaaaggttcaccacccgatgacattctaaaataatgcataacttgaaataaaacattagctttaaacggattcaacatgcttgccttgcgaaaaagcgtcttcaattcgtcttcaggaacttctccaacgaacgaacgatcctccgaaacaacggaaaactaaacctataacactaataaaaaccaaatgaacagtacaattaaagttcataaataggtagagcttgaatttagatgaattatgggacttgaacgacctcattccgagttcgtatgagttagatatgaattttacaagatttaattccaattaaacctattaaagaaaagactaatccaaattgattaaacaatttacagatgatttatagctgagacaaaagattaaaacatcctccgaaaatagattagatcgtaggtaacatatattaaaaaggaataatatgtcattgaaaagagataacaaaatttatattgattttgcaatggcttgagatgatgtggatgtcagcgataacatcatcaccggcggatggctctggatagcaacgaggactgaacggcgacgctccgacgataaggggacagctccgggagagagaagacgcgacgacgaactcac

SEQ ID NO: 1834 - DNA, 2000 bp, Oryza sativa
  N_region (1020)..(1020): n = any nucleotide
atgtaaacacatcggctatcatgcatcggcaacacccaaccgatcatgcattaacccaaacacttgggtaatatctcttcaagtacttgccattaagtgctcgtccataaacttttccatcaagtccttgtaacatataaactcctttggacacaaccttatggatttgaaacggtccttcccaattcggtgactgtcgcgcccggaaaaataccttttccagaacgctagtgtattaatccccgtcccaggaaaagctggggtacaccaaacaaacatgatacaaaaggcacatctttattatatcgataatatttacattattacaaaggcacttaaggcctgacaaacagaaataatcagcagcggactagcgggccgacggttccatcttcacaggcgctcaactagggtataagccaggactccacctacgacttcttctccaaagcttctcttactgaagggggtaaagatagagcaagaatgagtacaaccacaatactcagcaagccacaccggcagatgcatgattaatgcaagggggtacaaggggataataataggggttaagttttgcagtaaacaacatttaaaagttacttcattgcccaaagctattttgtaaagatgattctagagctacacaatgttattaatcaaggctgtgaacccacacgaacctgccttaacccaaggcctacgatgattcagaccgaactagccaccagacccaggtcccagctcgtcccaagccaacccagcccaaccatttcacattttagttgttaagcggttttaagaattaaaacactaacttgagtacattgctaggcttgcccataaccgagggcgcggctattcgcatagattatactctgatcagaggtgtacatcattacccacaagacacgtcttcctcacgtgtaaccacgtgccacataccaccacggcatacggacggacgatgtgacatagttcccaacccatcctagccatagacaagagtaccgacccaancccgcctacggctggaacccccgagacaggtaggtaggattgagcccctagcagcagaacaccggccctgtgccatgacatctcaactaccgagccgcagctcgtgtagccttcatttgtcctagagatgtccatcgagccccgacttcgtccatctccatccgtgtacctttgtttatgaccaaactgagccacaaacttagccttacccactagacatgtggaagtatggtagtgctttgcaatagaggcctgagcttaatccttatagtacccgaggtacgactaacaaaacccaaccacgcacctcgagcccaggctaaaaccattttgggggttttgaatagagggggaggtgtgtgtccaattccaacataaggcaaccagtccatagtgtctaaatgatatgagaattcccaaagtctaaagttataaaaccacctaatgttgcctaattaatcagcgaagcatctacctaagttcatactagtggaaccataaatagagtacccactagttggggttttgtttatcctagggtgaacaaggtaataataacaatagaaataataataaggtcataacaaaggtaaataggcatggctaaataaaacagtgataacgcaggaatttaaataaagagataatgcattaatttaaatcaaaataattttataaactgggattcaatatgctcaaggatgatgtgacttgccttgctcagagagaatggccttccgaacattcggcgacgaccacgaaccacgcttcaggaacctctggaacgacagaagctacacgaagcacacaagcaaagctacaagcctataaagaagcagtaacaatacataaaaaggaagcacatggttctttagtttaatgctgttatctggagatttgcggattattataattaggttttgcaattataaaacatgtgtaagcgctagcctagaaaagacgagaaggctgcgctgttg

SEQ ID NO: 1835 - DNA, 2000 bp, Oryza sativa
  N_region (1033)..(1033): n = any nucleotide
caaaactcaccgtttagcagtttgggaaacatatgctaacggaaaaaaaaaagaaggttgctcgttcgatttttctgaaaagaacttagccttacttcagcattgaccaagggattggtctggtatttttaaaatgttcaaaaatttagtagcatattttatttgctactcagcatgattacatgattgttttttggttctaaagcatacaccttgtcttcagaattttcaaataatgaccataatgccctgctatccaatcaatgttccgtgttttcccccatttatgttcgcctctttgttctaaaatacttgatatcgattttcagttaacacaaaggtcgacatgcggttcaatgtaaaagaggctcagtggcttggtgagagaatcaaagaacggatattacaaacggtataaaaaaaatcttcctcttttgcaaatcttcattgtcattttttctgtattgtctcaagaggttgtttatatttgcttggtatacacaggaaaagaaccggataaataaagatggggagcttgtgatatcttctacaaaaactaggacacaaaagtaaatgttactcagttcttttgattgtcttgtttggacagcaactgacacaatttatccttttaggggaaacattgaagatgctttgcagaaaatacaggtatgctttactcatttcagttctttgtcaggaagtaatttgcagaggcttcatgttattgtgctcccctagctttttaactaaacaagtatctccttaacaggcaatcattgatgctgcatcctatgtacctccacccccttcagaagagcaaaagaagaaggttgaaaaaatgtaagctgctattttttcttccatctgctcccttcaatttccgttgttttcagttattttatttctttagaaagtccaatgcagtcatcattacttctgcaatgtgctgatgatgtttgatattttattatccagttgtagattaataatactatttgtgtaattgaatgcaccaagtgtgtatagatcngctttcttaaaaaaatgtaacaagtgtgtgcaagtagctacatacgcttctataaaagataccgcattactctccaaagtgcaaacagttagtagcggttgagattagccaacctttgaacttgtgcaatgttagtttttaggagatcaaagaaacatttttgcatatgcgaactctgaatctttgtagtcatatctctagctcacacttgagaactataaattgtcgaattacactcgtttattcagttgctgctgtgtatttcatttcagtgctgcagccgctgaaaggaagagacttcagaagaagaaagtgctttcgcagaaaaaggaatttaggaggaacaggactagctgggattgactgcaagttattttgcttaaaatcatacctgtatttcgtgcccttttgaggtgattcaagcttcccgcatggtaaacccttattgctttccctgccttaatccccattttttggtcccaaaatgttcctatcactaatatcaatgtgatagtaactcaggttctgacaactagtatttgctccgcgtggttcttgagcgtggagatagggctcacctgatccttgtggcagtaaatatccatgcgcgacaggaacaagttccaaaccggtgaagacgtattggtgaatatggcgagtttcagagccagtttttgctccatcaattggaaggtagcatctgacgggaaaacactgccttttgtcctaaaatgcactgtttgtcagtggtcctgatccctgaacttatcacatgcatcacatgctactgtaacaatcattcacccaattataaagtgtttgcgtgcctgtgctaaacattgatgaactttggcatatccacatatgcacagttaggaacactggatgcatcgcgcggtaacaatgggcatgggtacgggtgatatgcgtgttaaaaaaagagagtaggcattgtgctgccaaggcg

SEQ ID NO: 1836 - DNA, 2000 bp, Oryza sativa
atatctcatttgaatgcagtctaaacagcaacttttttgcgcaatgtctagtacgattctctagtgtaggttagtgcggtgtactgtaaaggagtaactgttttgaaactgaatcaagccaaagacctgttttatgactgttgtacttggatagactgattcagatatctgttttatgactgttgtattgttgcagataaactggaacctctccagcgtgaatgctgcaatggccgtgacaggcgtgtgccagctttcccgtaagataaggtctgttactgcaaaaccaatcctcagcttgctgatttataattccagatgtgatttctgataaattagcaactttcgtgttgatctcttacgattcgatatgtgatttctgacaagttaacaactttcgtgttgatctcttcttttacaggcacgattacttctctgatgagaagagtgctactgcgtcgctggaaggatgataggaagaagaagaaattgttgtcatggaatggaacactaatttcattatcagtcgaccagcacagtgttcactgtgaatgtgtccgcttccatgataacaaatttaacaatcccatgtgtgtgtatgatcattatgaattgggctatgggtatgaaatgtttttataccctttggtatacagatagtaagcgagtctgaacttaactgaaacggacttggtttgagttcagctcgaagtacactcgaattaaacttaactcgaacggccttaactgaaacgagagagctcccttcctctgtgccatacaatatgtttgcaatttcggtttgaaattcccgaaatttcatttcggacttccggcacgaaactatttcgcctgaaattatattttctttctgaatttggtcaaattttattcaagttcggctaaaatttcttcaaatttcaaaaaaaaaaaactattcaaccgagaaaaaaagctcctggaagaaggaccaacagggagaggcacaaaagcggtgaaccagagcacgtaacttactccacaaatacctaaccaatgttccattcttcctctcatcttgattttataacttttagacctaacaaacattattcattaaccaacgctgcgtgttgctttgccctctgaaactactggaacggcaaatagcagcaattgcctccttcttcttcttttttttccccctcctaacaacacggggaaaatgcaaacgctttgcccggaaaactcatcataactgatagcggagagctgcgaatatatgccatcgcgttagctttttccaccggagttgtttttttctgactcctctcgcggcgaaagacgatgccatctgatttcagtcgctgcaggccttcctgccaagtagtagcttttgttgcgtttttcctatcaaacggcagtaaattaagtaaaaggctggtaattattaattaacgtgaggcggcaagactttgttgtgcaaaagcaaagcggcagaatgttaactttgggtaagtttcgaagtaaaatcgtgggggcatcgatctacagggagctggaataaaagaccatggaaatgatggaaaagttggaaggcagcagcacatgatcagatgatctgtttgaaattgagaagcaggtgttccccgatttccacccatgatctgtgtacagtacgtatgcgcaagttccgttaatttctcacgcatcagttacagcctcatcttttcgcttatacttatatacttatcaaccaaaagttaaattttcaatcttaaatttagacttgattttgagattttttttcatcgaagtttatttttcagcttttacttttatatcgctaagaacacgtatataaaagctttattcataaattatttttcgtttgcatatatgtcgtttggcttattccatcgataagccaaatgatggatgaggctcaaaatgatccacttagatggatgagactcctctcacataaagttagagggacatggctactgacatatgggccc

SEQ ID NO: 1837 - DNA, 2000 bp, Oryza sativa
aattgtactcttttattctcataaatacttccataatttattttcttaaattaaattattttaaagaaaaaaaatattaacattttcaacccaaaacaaatatattatgaaaatatattcaattattaatttaataaaactaattttatgttataaatattacttatatttatctacaaacttagttaaatttaaagtagtctgattttgaccaaagtcaaaacgacttataatctgaaaatggagggagttcaaagtatacttgtcattgggttataatgctatttttctgattaaattaagaaatataaggttatattgggtttagagtcacaattgtattttttttgtttaatgatatgattgaatattaataagtacccagctctaatggttgcagagttcagtttagtacattatcaaatctacaaatccgaactcttgaatatttgaaatttatatgtttgatcaactcatgtgtgcttctacttaataaatataacatcatggtttggagtaacaatttttttcttgatagataatccataaatttgaaattacagtatacaaagtcgaactccgcttaaattctttttttaatgatttagttactaaataactctaagtacttaacaagttgtaattagtttgttcatccttataatctaagtgaattgaatgaacaatgattcgtacagccactatcgataatattttcacattatatctagacgaggtatagatgacttataaaaatgttgtctaataatatattacaattaattatttaagttatatagataatatacatattgtatatatggtattccattaagctgtctactataccgtttggtaattaatacggtattcttctctcatctccattacttaaaaaattaaattctacatgacattctcttctctctctctctcttttttttcacgaacgcgtaaaaaaattacttcatccgtttcacgatgtaagactttctaccattgcccatattcatttagatgttaatgaatctagacatatgtatgtgtctagattcattaacatctatatgtatgtgggtaatgctagaaagtcttacattgtgaaacggagggagtacacgtcactatattagaaaaaatacagttttgttacacaacgcaactgaccagatcggtcgttgccggttacaaggaaggagtattctcttcttagactaagatgttataccattattcatgttctaattaagggctgtcgcataaaaaaatgctatacttattcactgtctcctgaaataatgtgaaatatttcatttgattatcatattagtatagaaaaagatttggtagatctatagatagatgatctcaccattatctaaaaaaaatagatagatgatctcatatttcgaaagttcaatggctcagctagtacaaaggaaactttcttccgtccttgtattccaacttcctcctactaactacggcgtattccaaaagccttggccaccattattgcgtggcacagcgaaaccacagacaccatttatcgatcactaatcttcagcattaacgtaaggaaaaaaaatcaagaacagacgcttaacttttaatccacccacgatcctctgggatcctaattttaaccacccatatccgctaccatctttcttctactgcctctgcctccagtaaatttaggcccccttcttttccgtttttattggtgcaacgctccctcctcacgcatcactcgtttcccatcgacgatcgagcgagcgcgcggtgcgagcccgttccgttccttgttccttgcgatgagaggttttaaaagcaagcgtgcgaagtgggtgctctcggaattggactcggctcgtccgcacccctattaaaaccacgcgaggaagttttcttccccgtcgtcacctcccgcttcgcgaaccacccacccgtccgtttctcgcctcgcctcgcctcgccctccctctcttccttcttaa

SEQ ID NO: 1838 - DNA, 49 bp, Oryza sativa
  N_region (3)..(3): n = any nucleotide
  N_region (5)..(5): n = any nucleotide
  N_region (11)..(13): n = any nucleotide
  N_region (36)..(36): n = any nucleotide
  N_region (42)..(42): n = any nucleotide
  N_region (46)..(46): n = any nucleotide
  N_region (49)..(49): n = any nucleotide
tcncntcaaannncccaaaataccgcggagtttttnagttgngganccn

SEQ ID NO: 1839 - DNA, 2000 bp, Oryza sativa
tacattctgaattgcaacattttagaaaggaggaggtaactcgtaggggtgaaaatggaacgagtattcataagccgtccgactgatctaaggctcacagtctcacacggaggatataggagagagaaaagaatactcggtacaatgcaagtttaaatttgaattcactacaaattatgtgataggatataaaataagtgtatctttgcttatgttccgtattatcaaacgtgtagtaaatatattataaagttaaaatattgactaatcactattttaattatgagctcacatgtatactgcatattatctttttttttcttggtgtatcgttttactccctccgtttcactatataagtcattctaacatttttcatattcatattgatgttaataaatctagatagatatatatgtctaatatttatttgtgaaacggaggaagtaacacctaggtttaatatttatttgttaattagagatacaaatatatatatatatatttttttttctgaatttgaaacaaggggggaaaatatgggatatgatacatgataagtaataagttatcaaatactatctccgtcgtaaaataactttatttttcacccattccgcacgtaccaatgtaaaagcaaaatgataagaacaccctccactattaaatcccaatacaattgtttttcacttaattcagttctagtatttgttccattctttcacaaacttcaatacaatgattgctcaaagataaatttagtatgggataaagattaccttattttgagatgggggagtactatatattctctattccaactccgagcaagtgagcaacaaatatgggagaggatacataataagtaattatttcacgggtactattcgtttatgagaaatgacagagtcagtgttacagaaaagtatacttcttatacctatatttatgactaccgggaataacgtatacctggtcctttatggaagagtatgttcaaaaatagatgtcagactctgatccgtatgctacaaagtcttatctgttcatagcctatttgaatcacgagttctatttagacaagaggttgtttgtccgtataaatacaaagcccctagggaggagagtgcattggatcataaaccgtaaccacaagccatatcccatatcgaatatcaatcgggaggaaaccctaaatctagtctttgattacaagttgctagtttagtcctcaccgaaggtaagctggtaggccaaattagctagcttgctcttcctttataatcggtgtaacacatctcatagcagctgtacatataaactagattatggctattaccccatttcggatgcttgaccgcttgaaccaaccagtataaaattcattatcttccgttttcttttttccaatattagatataccctcatacgccttttaaaatatcgtcattgagcttaacctttcttaatttttaggggcaattgtaaattcaccactattttgaatcgttattgtaagactgctactaaaaaattgcaaaatgctattagaactgccattaaaatggcatccttgcaaaatttttatggataaaaaaaatgacgtacgtgatccgacagtatccatcctgtaccgctcgaaaaaaattattgagcttgccgagccgagccgagccgagccgtgagccaggaaagaggtgaaaatccacacaaccaacctgttaattatctcccctatccaaaattacaccaagccccctaatatctcggcggaatcctctccaactcccctcccctcacctctctcctctataaaaaccctcccctccccatccacccatcctcctccaactccaacggatcactcaccttgcctcgccctcgccctcgccaccatccaacgacgtcgactcgtcgccggcgacgactccggccgcgcacatacgcctggtaatacgtactacgcgggaaccaaatcttacgcacgcgcgcacgaacgc

SEQ ID NO: 1840 - DNA, 2000 bp, Oryza sativa
  N_region (1964)..(1964): n = any nucleotide
gtagtgggctatactgttaaacttactcttaggatgagtttgacaaactgagttggaaatcattcgtcacgcacgtaaaacggagtgacttattcgtacatgattaattaactattagctttgtttgaaaaataaattaatatgattttttaaagcaattttcctaaagtttctttttgtaaaaaatacattgttttgcggtttagaaagcatgcgcgtggaaaacgagtagggtgaagttgggaactgacggagctcgtggctcctcaccgggagaccgcgcaggcccccctttgccagttcggccgggggcttagggtgaaatctcaagctctcactctctctgtatgtggtcagattactcgtcggcaagacacacgagacacgacgatgtatacaggttcgggccgccgcgaagcgtaataccctactcctgtgttttggtggatctgtgtatgaacgagctacaaagtgtccgctgacttctcccccgttctcagctttcaatccgggaaaaaaatcccccctctaaatgggcaaggtcctccttttatatctcaaggggataccacatgcacctttctctttccaaactggactgttctttttctctttaatgggcggagatcggtacggtttccatccgaatgacacttcgatgggacagcccacacctacctccactcccggcggagacgggcgcaacgtgggatcgtggctgcccgttgctgacgcgaccagtgtcagactggtcattcttgtccaccatgtgtcagtttaacaagatgcatgtttgcccttcttcgtgtaacaccttgcctgtaatggttaggataaagcctggtataaatctaaccagggctaacgtgccatctctaagagataacacgctagctccggcttgagacgagttgcctagaggctttcgtcttgacgggatggggcaaggcgtgcgtcagaccgccagtcgccacctaacccttgatctgaccggtctgtgactggtcacagaccggataaaagagcgtgctgtactgcgttacatgcagcgtgacacgcttgaccagactgtaataaatgctgttaggtgagcacagctgtgctcacttatcccatatatgtggcgcagacttctttaaggggtcggggtgcctcggccctcggggccggggcaagcgtaacccgaccccccctcgggggaaatcaggaggagggcggacacctcaccctcgggcccgacgtccccgaaggtgccaggccacgcgggcgattgcgtctacctcaagcctctggtcatgatactcccggtcccatatcaccgacaggaacattgagcaaagaacacagacttacggagcaaagcaactacactattgattcaaaccatggtgtttatgcagctgcataggattgccaggtcctaattggctgattctgccactaactagaaatactatacttatattagaactcacgttagatagatagagtagagcatatatagggggtttagcccctctctcctaaacacccccatagttgtgaactcccccatttagatccgagtaccatcttcttattggccttgtttagattctaacttttttttcttcaaattttaaacttttctgtcgtatcgaattttcttacacacacaaactttcaacttttccgtcacatcgttctaatttcttcaaacttctaattttagcgtggaactgaacacagccattggcttgtggcgtgtgtgagatgcaatgtgattgaattttttggaataccctcctttttatttgagaatttttcgtgcagctgtcaaacgctttcaatctggcggggtttatttgtgaccctcgatcggtcaatggccagtagcaatccatccgtccgttcaaatccctctctgggaaacggacgaaacgggagaggcgcggaaaacccccaccccccaaatcggagcgcgnaggcgccgaccaagaaaccctacgccgcttgggcgg

SEQ ID NO: 1841 - DNA, 2000 bp, Oryza sativa
  N_region (661)..(661): n = any nucleotide
  N_region (683)..(683): n = any nucleotide
  N_region (749)..(749): n = any nucleotide
aagggcattgtcgtgagtagtttttatatacatcttctcgtgagatttttaattatttgcataccctcgcattgatatgcccaaataacctgacacgttatcttttgatgacagaacgagatgcttttgtttctgttcatctctcattctactatttattttaagaactgttacaatatactggtagtataaacaatctaagggtgtagattgattttagtacccacttaaatcgactatagtataataggggtaaaatggtttatttttcttatgtgtttcactagttatctaacacgggttaatgtttttatgtgtttgatgaatctatcgatccaatcaaaaacatttggttgtgccctgtattcagccatatccggtcagtaatccgatctgacatacggacaataagaattactatcggagtgaagatataacacgaaataactactgatcattttctattttgcgacatattcccaacataaccttatttatactagcaatatatactaccagtatattgtatagtaaaagtcatcttatttaattccttttcattctgtgcatcaccagattcaaacttgtcacctgatttgctttatttgtcataactttttttttttgtaaagggaccaggtgctaaaaatgtgttacaatncaaagccaagataaggtttcanagttcatgcggtttgtttttacaagacgtcgtcgcagcttacatcagttgcatgtacatatatacncctaccaattaagtaattaattagagcatcatgggtgtgttttacactaatggattgacatcctccttgatgattagaatcaacagagtcactttcattctagaaggttcgtctactgttttccttccaaatgttgaagtgacatgcacaactgaaacaaaggcaaccatacagcctgaatggtaccttcggtttgctggagtacaagtggcaacttctttttttgaaaagacaagtggcaactctgttacaaggagatttaaacaccaggaattaaactcatcaagacaagcacaatggacaattcctcctgtaattaaggccccgtaggctgacccgcggcagcggctcggctaaccggcaacggcaacggtagggtgacgctaacatggtgttcgataaaatggtgacgagagacatggtggcgtggagctgagtaatctagccaaacactttctatacacatctcggcttttataggagctagcttccatttaagttggagtttagagttgagagttagaatttagagttgtgacaaacagggtctaaaaagtgtgacgatgaacgactacgaccagtgattcttttattaccaatacctcccaatcccatatgtaagttcattacagcatgctagctaagctataaaatctctctgttccctcgctgatatgaactcactggtaagttttatcttattttttttctctcttttgagccctcagctcgagctgaagttttcaatttgaggcgtagaaaagaactttaaaatgcacatcccttctcttctcctctcttttagctctcattttatctgaccaagtaccatatttatagatcttgtcaaaatgtactccctgatgaaactgtactaggttggatgtatttatttatcaacaaccatgtacttgcaactcgttgcgagacctaaaccagtactagactcgtatttaatttactacctccgtcctctaatataagtgattttgatattttgcttgcgctgtttaaccacttgtcttattcaaaaaaatttgagcaaatataaaaaacgaaaagttgtgcttaaagtactttggataataaagcaagtcacaaataaaataaataataatttcaaatttttttaataagacgaatgataaaacagtatatacaaaatgtcaaaatcccttatattagaggacggagggagtatttctttgttaacaatttaaactttcaccaggctaataatcagtataaaaa

SEQ ID NO: 1842 - DNA, 2000 bp, Oryza sativa
ttcagggaacaggtctgtcagatacattgaagccgattggtgaaatagatgcttcttccactctacccaccatcggtcaaatactgcacttctcaacatccttagctttatgttattgatgctgcctagaggtggtccttctatgttcagcaaccgatccatcatgagtgttgatgtgatttctcctctactttggatcttgtcggcaaagaacaagctaatcggcagttgacatatgccgaattgccttgcagcacttgtcgaatgatagaactcatagatcatttggatatttttgccttggtgaatgctgacaggaaggatgcaggggctgatggctgttgagtatacttctctggatttctcatacttctcagagttgatttcttcaaaccgaaagtcgcctggtagctcaaaagtgccatgtccttcgtatacaaaccaaattctagtgcttctggggaacccatcataaaaattgttgaaccactctctgaagggctcagccgatagcttggatacggtactgaccgatgctgcttctccaaaggacatacatcggcatgtggtgactgtttctccatcatctttgatgatcggctcaaaccttggaaaccttgcatcggctagcggtggacgtttggcaaccatcctggtgtgcaagttcagccaaatttgaagtagccaccatggacctccagtgccgattaatgctctaaaagctattttggttgttgtagtgttgagagtttgatacagtagggccacagctcggaccacagaacaagaacttctcgagccacatcatgaggaaaactgcgtgctctcttatagaaatcggcccggtttccatgttctttgcaacatagcttgactagccgcctatgcttttagtcttaaactcatgagtgggctggatgttcaagctggtcaggttagccgatgaggttatgtctaggccagtaatcattatgatatccaggagagttggggtcatcggtccttgagagaagaggaaagcgttgatggctgtggaccagaaatgagtggcagctaccatcataggctcatcctttgccatatctgctgcagtcaaggctaaggcttgagatatgccgatttcttcccaatgggtcattttgctagccgacatcctcttataccaagtgggccaactcttttcggccgatggccaagatttgaaggtgtttttccataagctcagatttgggttggcaaatctaaatgggattcggttggtttctccattaatgaactctgtggggtctgggttgccgattgggccaaggaaaaactggaattcatcggttatgctaggaactgctatttggtaagagagatgctacagaagcaagaaaatcgaagattgagcgggagaagaaccaaatctgtgcagtaaagaaaaagattcagccgataatacttacctcgacgtattcggtggccaatgagctcggtggactggtggaagtcgacattgctagcgatgaaggttgggattgcagagaatcgcctttgggtcgccggaaatttcgagggtgtcaccggagagctcaaggaatagattggggaaagtttgttgctaaagcggttaaaacggaagctgacgccgtgaaaagtgcaaagcggtggttactatttaagagggagcacggtaacggccaaaacagaatcggtaatggaagctctagttttaattggaaagggaaattgagcaaatccgccacattacaaatatagcggacttggggggcatgtgttaacgaccaaatttggtaagacatgaaccaggttcggcatcgagatcgaagcggattcggcagaaagttagattcaaagaacagcgtgcgcatcggctgagaaggcatcggttggagtctgaatcggctgaggatgatcggatggaggacagctaatatagccgatggggctgatatagccgatacagccgatggggttaatacagccgattccagcgg

SEQ ID NO: 1843 - DNA, 2000 bp, Oryza sativa
  N_region (896)..(896): n = any nucleotide
  N_region (914)..(914): n = any nucleotide
  N_region (963)..(963): n = any nucleotide
  N_region (973)..(973): n = any nucleotide
  N_region (976)..(976): n = any nucleotide
  N_region (979)..(979): n = any nucleotide
  N_region (989)..(989): n = any nucleotide
  N_region (993)..(993): n = any nucleotide
ctccttgctcccaaccaatctccctcgttttccgcacgcatgcttttcaaactactaaacgatgcatttttttgtaaaaagtttctatacgaaagttgtttaaaaaatcaaattaattcatttttgaaaaaaaactaatacttaattaatcacgcgctaatggattgctctgttttccgtgcggaggagatgggttcccaaccctacgttacgaatatagcctaagtcatcatcgcatgcagtggtatgaatgaaatgatcattctacccttatatactatatagaaaagaaataaaaaaagaagatgaatggttcacacgtgtatgatcgttttagaattgtcacttacgattgctgtagccaagcactgatcgtataaattcctttgttggccatccatccgcaacaatgctgggcttgggctggcctgttattttttctgtttgtcttttttttcttttctatatggtatatatggggtagaatatgatcatttcattcataccgctgcatgcgaggatgacttggtatactcaggtggcatttttttggtccaaggactatattaacccaaatggttaatttggaggacttgtttggacgacttgaaacatcgaggactaaactgagcccgaagcgaaacttcagggctgtattggctattcacataatataaaattggaaaaattggttatatagcatcaaaagttcacgtttttggttttatagcaccgaaagataccggttcactttaataacacccaaagttcaccatgttcccatttttagcacttccgtcaattctcgatctttttcgtccgtcttgatctagccacacacacgatatgacgtttctaccccctcacaaggtaccaaggtagaatgcatgtcaatngaggggtagacgtcatantcgtgtgcgtagttgggtcaataacgatcaagacggacggaaaaattgnacggaagtgnctntanatgggcaacntgtnaaactttgggtgctattaatgaaccggtatctttcggagctataaaaccaaaaacgtgaactttcgatgctatataacaaattttgcctataaaattgtagtggttaaaattttaaaatttaatctaaaatgagaataaaatgatttattcaaatgttatcaatgtaatcgtatatctagattaatggattcgtgaagatagaaacacacagctttaagaaatcataaataataaaagctaatgctgtaaatttaaaattcaaactagtaatatgaatttgaatttcgcctgcggcagacaagctggagggcaaagtggcaaacgatggagctgataattccgcctgcaccgtaaaagctaactttctaacagtgtgtttacatgatttaccatataatgaaaaccagtccattatctaaaaaaaatataatgaaaaccagtaaacatgaattaatttggactttgctttgatggcgctatccgtttcacattgcagatcagaggagccatcacaggagggatgattccacacagggttgagttgcgtgtcatgatctgaactcaaagtattagcgatctcactacaacgaagaaattggcattctatataggccagtgtatcattaaattgttcagcacaaagaggatgccgctatagttatagacttatagttaacactgctgcatcttttgtgctacagcacaattgtaccattcctacggggtgtacatttcccccttaataataataataaagaaaagaaaaacttagctgattccacagttcagagtaactccagacatttggaaaaatgaattttacggcgcatggttcaaattacgtctataacacgggaaggcgtaaatgtgggtttacgtcaaccctgctcccggaattcgctggtgcagtgtgggcccatgaactaatgtgggcctaaataggcccaaatactcatgactagaaactgagctaagcccacaggggaagagggggagacgcggcgag

SEQ ID NO: 1844 - DNA, 2000 bp, Oryza sativa
  N_region (29)..(29): n = any nucleotide
  N_region (32)..(32): n = any nucleotide
  N_region (39)..(39): n = any nucleotide
  N_region (41)..(41): n = any nucleotide
  N_region (43)..(43): n = any nucleotide
  N_region (117)..(118): n = any nucleotide
  N_region (120)..(120): n = any nucleotide
  N_region (123)..(124): n = any nucleotide
  N_region (127)..(127): n = any nucleotide
  N_region (132)..(132): n = any nucleotide
  N_region (145)..(145): n = any nucleotide
  N_region (678)..(678): n = any nucleotide
  N_region (701)..(701): n = any nucleotide
  N_region (709)..(709): n = any nucleotide
ctcattccacggctcggatcgggaaaacntcncccaacnangnccggcggcggcggccaatctcgccagcacgccgacgtggccgcgcgcgagaagagcgaagggcgcgcgggctcnngnttnnccnaaccngtatggtgttgcnacgcgcacgcggtgaagcgggacccgatggtcgccgcgtttgaactcggcggcggcgctatgcggcggcggaaggggcggcatggcgcgggagcgggttgggaggccggcgactggggcggcagcctgggaaggttcaaggggacacggggagggtcgcggcgcaaggaatcggcgagagaagggccgacggcggtggattgcggcggcagccatcgccggcggagaaaaggggaaaactcgccggggcaacgggagtccaattcaccggggaaggagcttctacacggctccgggaactcgtttcaagcaacgggcggcgacgagctagcctaggggatcatggcgacggcgagtgatgcccgggacatggcgagggcgcgcggcgagctgtggcgaacggcggcttttgcatgcgcgcagtgcgccacagagaaatgttcgtggggagctcaccgacgagagaaacagcgtcggcggcgcggatggagtcgcgcgagtggacgcgacggcggggcggcgcggcaccgaggntgcgcgccgaaggaggagggagnagaggtgncgatggggcagcccggagctccccgtcacgcgtccacgcacgcaccggctcctccggtgctcggcggcggacggcgacggcgagagcggggcgagcagcaacaatggcgcggcggtgatggaagtgaaacgagaggaggattcgatgggaggggcttgggtttttatagcggaggcgagtcggtttggggaggtggaaaccgacttggcagtcgagcgctcggctggcggtcacgggcgacgcaagagcggcggacgacgaggatgcaaagagcggcgaaggcggtggatcggacggcgtgacttgaatcaagggagcgcgaggggcaatgcggcgagctagtgcgtggtcaaggtggggcgtcgagctgctgcggcagcgtcagcggcgctctgaccgcggcgcaagcgacagaggtagggcgccggtctgggaagggaaaaaggaaaaaaggagagggggaaggggacttggtcccttgccgctttgggtgagggaggaagcagaggcgcaagctctggctcccgtctttttgtggttagcagtgtggagcggcttgggatgatggcggtggtggcggcaaaagcgggcggggccgggcggcacgcggtcacgggcggcgtcagggctgacgcggcggcgaccgagcggctggccacgagcgagcgcgcgcacgtgggaaaccgatgggcggcggcgaaaatcaaatggcggcggcgggaaggttcaaaccccggcggcgggaatcggcaaggcggcggtggtcgactggcgagagagagaggaagagagacgacgctctctcgggcggcacacatgcacagcacgtgcgaggaggaaggaggagataggcagaggggagatgggccgaggggaacatgatcggcccacaaaacttgaggaaggcgatttagactttcacagaggaggctgatttggagagaattggagtttggatttggattcaaatttgatatccgaactcgagggttcagggaggaatcaaggaatggattcgaggtggactcggatatttgtggaattaggacaagtatttggtggggattcaaaggatgcgattgaatttcggagtttgatttcggagacttgagtcggaattggaatcttgaggtgggcgattttgatggcgatgagagggaacaaagatggagattgaattgagatccatggcacgacttagactctcactcaaagaacgaaatttttgaaattaggattttgccgaaatagtttttaacgcctcacgaaaagcggagcgttacaaaagagg

SEQ ID NO: 1845 - DNA, 122 bp, Oryza sativa
  N_region (8)..(8): n = any nucleotide
  N_region (12)..(12): n = any nucleotide
  N_region (14)..(14): n = any nucleotide
  N_region (17)..(17): n = any nucleotide
  N_region (35)..(35): n = any nucleotide
  N_region (37)..(37): n = any nucleotide
  N_region (42)..(42): n = any nucleotide
  N_region (47)..(47): n = any nucleotide
  N_region (49)..(49): n = any nucleotide
  N_region (61)..(61): n = any nucleotide
  N_region (77)..(77): n = any nucleotide
  N_region (89)..(89): n = any nucleotide
  N_region (92)..(92): n = any nucleotide
  N_region (101)..(101): n = any nucleotide
  N_region (103)..(103): n = any nucleotide
  N_region (106)..(106): n = any nucleotide
  N_region (108)..(108): n = any nucleotide
  N_region (110)..(110): n = any nucleotide
aagggttnagcngnaancccgggcgcgggcggctnanggccngggcnanctggcagccctngggcgcgcccgaaagnggccttgccggnacngccgacggnangcngngnacccgggccccg

SEQ ID NO: 1846 - DNA, 967 bp, Oryza sativa
  N_region (5)..(5): n = any nucleotide
  N_region (17)..(17): n = any nucleotide
  N_region (57)..(57): n = any nucleotide
tcatntacgcgaagacnttgaagcctccgtcgtcgtggcgcgcgtaggaagtcgccngtgtgatcgcagccactacgcacccgcacgctgggccaggagtcgctgcgtgcgaatctccccccaaaaaaaggaagggcgccgagcgtgcgtaccggacgtgccgtatcttcggcgcgctccacaggctcgcgtgccgcgggatcactcgattcgatcgtcgcctgggtcgccgtctcgcttggattcttcgcgtcgcgcgagaggccgggagagttcgggcgccgcgcaccacgcgcgcggaggcgggacgggacgtacgccactggccacgtaacgtaacgtgcccgtccgcttccgcgcctcctcgcccgcctgtgtagcaaactagagagaggcggcgcacggatcagatatatggtgcacaactgcacaagtctgcacatgggtggagcccgtgattccggtctcggacgatctggtggatccggagcccacagatatggaagaaacgatatgggtgagaaccagtggattattatttggatttctagaaccatcctatgctgagatttcttcgtcgcccggtggccccggcgggcggcacaccagacaccaaactccaacaccgagggcggaggcgggcgaaatccgtttgcgcgcaaccgacgcgatccatccatccacccaaccagccacgccttgcaaacggccaaaaaaatccagcagacccaccgttttccgccgtctcaaagaaatcgccacggttctcctcacgcaaaaccacatccgcacttcgcgaaacgaccgccttgccaccgcctcgtgccgatgcgacccacgcgcggccgcgccgggacgagggcacggccgtcacttcctacgcgtggggatcaccacaaccaaagccccagtgacgtacgagtactcctgatgtgggtggggccagtgagtcagtgggcggggcaca

SEQ ID NO: 1847 - DNA, 2000 bp, Oryza sativa
tctttttattaggtgcaagcatgcaaaagatttctgggtgaacaaaagaacaaccaaatcagaaaccaatcttggttatttaactggggccttacctttgctatagattttcattcatgaattcaatcatgaatgcatgagaaggattagagcaaagatagtagtgggctataagccagctataaacgtaaaactcacgtggattggaaaaagaaaaaatataaagggtattcactctcatgaataacctagaactacacacatgcttcaacataaataaataaattaaatgcgtaagtgggagaaagatagagaaaagaaaaggtgaaaacaattttaatatgggcttaaagctaacagtgaactatactaataaactttcttcttatcgtgtagattattgtagaaatattattttaatagtggattgaaatatttgggtttgtagttcttgtatgtaatgtagtcatatgcatgcatgcaggacacgacatattaagctaagcagatatccgtcgacagcaagttcgtgagttgttcacctggggctcgatagctctgtcgacctcccacacgtacctctgcaagcaggactcgaactgcaagaacgcatgcaagtatataagttagcaggtactccctccgctccgtttaacaatgtaagaatgttagaatgacttacattgtaaaacagagaaagtatatacgttaaccatccacaagctctattccgggggtccgagattactggagcacgtgcggtgttgggtttagtcgcacatcggtaattgatgatggaggagcacgacttaaaaggtgggggcggtcctcacccatcagactagtcttttggttgtgtaggcccagaacctaaagttgtggctccggttgagcctgtggtggagcagccccaatgtgacctgggtagcccacggttagtgggccgggctgcgcactctaacaagcggctggagaggatgatgatgtgtcgaggcgcacgctggacccgccacatacgacggacgggctgccatggctgtggcctgtgtccgctggcgacgtggacagatgggatatataattaacgtgtgtgcagatggggtatataattaatgtgtgcgcctttgtccgctggcgacgtgggcagatggggtatataattaacgtgagaactcgtagaaagtgggatatataattaacgtgtgtgcagatggggtatataattaatgtgtgcgcctttgtccgctggcgacgtgggcagatggggtatataattaacgtgaaaactcgtagaaagtgggatatataattaacgtgtgtgcagatggggtatataattaatgtgtgcgcctttgtccgctggcgacgtgggcagatggggtatataattaacgtgagaactcgtagaaagtgggatatataattaacgtgtgtgcagatggggtatataattaatgtgtgcgcctttgtccgttggcgacgtgggcagatggggtatataattaacgtgaaaactcgtagaaagtgggatatataattaacgtgtgtgcagatggggtatataattaatgtatgcgcctttgtccgctggcgacgtgggcagatggggtatataattaacgtgagaactcgtagaaagtgctcaactagtacaggtatacgcactgtgaatggccttaccgttgcgccatgcacgcgaggctgacgtggccacgagcgtccgacgtggcaactttccacgctgtacaacggccaagggcccacctgtcagggtgagctgcgacatcgagctgggagcctgggagggagttgagctgttgatcggtggttgagtggagtccagctagcgcaccgagaaatctcatttggggaaagtttccgaaatccccgattcttctccttgtaggaaaaggcattgacttgccccttcctccttcgatccgcggtctagccagctggttgctgattcgctgcttgttcggattgattcgattcgtcgt

SEQ ID NO: 1848 - DNA, 2000 bp, Oryza sativa
agtataaaatcctggctccgccactgacagcaaggggcatggtgaccaacatagccctagaggagttcggtgactggtgcacggaggagatcaacgataagctccagaagaaatttctttttggactttttttattcctagaccagtttgaccataaaaatatattaaacatggattatatattggttcatccgtgattattggaaatctacattgatccaggggtatcgcgagaaacgcccaggaatttttttggctagctccataggtgatgggctaggtgacctgaattcgaaactttacctcttctaattatttgataataattagaccattccttaacatttgcgtctttttatccaggggtaccgcgggcgccattcttcgcctaaatgaagaggttcttcgccgttcgaaggagtcgatgacgttaaatgctccaacaagtgtttctgaaattatcaatatatatgaactgtcgtgacatatctcgcagtcccagcccagtagtcgggtcagtcagcgctgcataaacaaagtttggcttggtcataaaagtgttcactattcagagtacactgtactagcctgcacttcacatgccggccacaattacggcgttattaggcgggacatgggcataggaaaaccggaaaggtgtccaaggcgttgcagagaatgtagtgtgtcggtcataggctgcaagcgagtgcactcccacttgcacccagggatatatattatcgtcatgcatgtgccttatgctcttgtcaagcaatattttttggcaagtttttgtccaggcatctagctttccctccaatgctatccatttctctgaacctagctaattgtcacggtgtgcaagatttctgcttgagatctgatggacatcttggcagggctgtgtctgtgtgtgcatgcgtcaagacaaacagcccaaattatatgcaacctgggaacaaattaagtgtgataaactgataattcatcgaccgcgctctcggtcgtgaactagtaggtcccggtagctagcacgacatgtgtgcaagaatatttgtctgttctgcaaggtaattggaaggccatgaagttccccaattcttcggcaaagcagctactattcccgtttcaaaatataagcatttataatatttaaatttcatacacaatataagtacttttttttctagagaactgatttcaatgcatgagaattcaaacattttgcacccaatcaaatgcttaggtggagaattcaagcaaatcaaaatttgacaaatcagatgcatgattgtaaatggttttatactaccttaaaagaagatagtgatagagacagcgaatccgccactgaaaattttacatattaccctttaaacttcttaatattaaaaattaacatgaatattctctataaaaaaagatggataacatattaatacattatatttttttcatagtaaagcacgggtatttagccagtaacttaaaactgattatatcacatgtttttctaacactgttcctgcctggtccgaatggcgccaagctagagtcggtcaagcgagagagctaaattgggctgataaaaaatttgcattgctcccaatgcgtttcgtccaaagtacagcgagccgccgagcccatccagtatccacgcattccgcctgcccgcgcggccggccgcggctaccaccctccacccttcacggcttcgcacgcgcccgcgcgccgggcagatctagatgctatacccctccgcctgctactgctagctctcccccccccgtcccatgcacgcggttgcacgcgcccacgccggccgtagcatccgttccactataaaaaccccctccggaaccccacccctccacattctccatagcttggccaccgtagtaaagccggcgagctaattctagttctagccagctacacgagatcatcgctgtgacgggcggggcattgagagggcgcgtgtgccggccggggtcgat

SEQ ID NO: 1849 - DNA, 2000 bp, Oryza sativa
  N_region (1878)..(1878): n = any nucleotide
gtgcgagcacggggaggtgttggatggagacagatggtggatattgtttggagtggggcagtgatccgtgggtgtcgctatcggtggcttcccattggctgcggttcgagaggggtggatcgatgggcgcaagcatgtggaggcgttggatggagacggacggtggagatgggttgggagtgtggcagcgatccgtgggtgtgggtatcggtggcttcccatcggtaggggttttggtagggtggatcgatgggcgcgagaacggggaggcatcggatggagacggacggtcgagatgggttgggagtggggcagcaatccgtgggtgtgggtatcggtggcttcccattggctagggtttgggtgggggtggttcgatgggcggaagcaccgggaggcatcggatggagacggatggtagagatgggttgaaagtggggcagcaatccgtaggtgtgggtatcggtggcttcccattggctgggctttgggtggggtggatcgatgggcccactggttagttggcggcgcgtgcgtgtggcttgtttttctcttactgcttcaatctatttttggttttgctagtaaaggttaaattgcgaggggaacgagcgagagtgtagtacggacggagggaaatggtaaaaacacaattttggaaatatagaagtttaggagctccgttaaaaatggtaaaaacacaaatggtaaatatacaaatgtggaaatacaaatttgctctaatttttatttaatttctgaaaatgcattatttaatgatttttaatcccgaacaaaaattggggcgttacagccagtcatggatttgtaaaaattagattcatgccattcttagagttgtcggtttagaaatactttatgccgttatcatcgggatagcaaaagcacaagcccatctcacctgtgtttttttattgtacaattgctaagatatgtctagttttgtggaaaagaattattagtttctcttcccgacttgcctaaatcttcccttattattgatgcaatgcaaataaaagaaattccagaaacaagtttctgcatagacactgcagcggtccatgtatgccgaaaattcaaaccctgctgaaactgtattgttagttgagagcaaaatattagcctgccagatccaacatatctcaaaaaattcaaaagattaacagaacatccactctcaacaattcattcagaaatcccaaacgacatagcctttccattaagattagcaaaccataacgattacagcatcacaggataaaataaaaagccagttcacccatcaaacctgaccaaaacatctcctaacctacggacatgaatttaaaaatgtgctagtagccaagaacacagacagaagaagcgcgattggacaagatgatgcccccaaacctaggccttctcgcccctgatgcggcgcgcgagctggatgtccttgggcatgatggtgacgcgtttggcatggataacacagaggttggtgtccttgaagagccccacaaggtaggtctcggcagcctcctgcagcgcaaccacggcagagctctggaagcgaacataggacctaacgtcctgcgcgatctcctgcaccagccgctggaaggggagcttgcggattagcagctctgtgctcttctggtatgtgcggatctctcggagtgcgacggtccctggcttgaagcggtgtggcttcttcagccctgccatcgtcggtgctgacttgcgtgccaccttcatcaccagcagcttcctcggcacattgctggcggtggacttcttcgccgtctgctttgtgcgggccatctctcaccgaaggagaaagagaggagaaggaggaggagaaggagaagaattcanggtgagatttggatttggagcggactcaaggtgaatttgcgggtggtttgagtggtggatttggtgggtatttgtaggggaaggaagaggcgaggcaggagtgggggaaatctttggggcgg

SEQ ID NO: 1850 - DNA, 2000 bp, Oryza sativa
  N_region (1848)..(1848): n = any nucleotide
  N_region (1892)..(1892): n = any nucleotide
  N_region (1948)..(1948): n = any nucleotide
  N_region (1950)..(1950): n = any nucleotide
  N_region (1994)..(1994): n = any nucleotide
aaatgcagcggaaaattaaaagataactggagctaagccttgacttggaccgcagcgggatcaccactccacaggcatcctcgacggcacggctaagcctactcctcggagaagccaccatctgacgcatactcaaactctggggtttggggaaaatagagcaagactgagtactacccactgtactcagcaagtcataccggaataggggtatgatgcagggaattatcaagggatagctacagaggttcgtttgcataaagcgagcatttataaacagtagttggaagcagtaaaacaattgtaacaattaatcaatattaatcttccactgtccaacgctacaccatgttgcaacaggcccaaccatccacctagactactcaaattcaatagactagactagggtgaaactaatcatggtgaatctggttgaccgcccataaccgcgggcacggctattcgaatagttttactctgatcagaggtgtacaactgtacccacaagacacagccccacgacacgcttccgtgcaacgacatgccaccacgacataccggatagaggccgtgacaggacccttcgcataaccccctctaaccaagcacaccacacctcaggtttcacccccactcctcgcaaggcagcggacagtcccctctcgtgcctaggtgaatccggaagccgcataggccgtcgcagggcctggatgcgtcagctagaggaaagctacactacaagcccagccgttgcccacgttggcttgtggtaagtacgaggaattcttccagggtttcccacaaaccggtccttaagtgccatgggcgcgactagcaaaaccatccacccacaacccaccatttaacatattttaatgaagcgacaccaggatggtggctctaatccaacatcaacactagaacctgaagtctatacattaatatgatttcccccattgtgtgctagttgaactaagcatggctaagcaatccctagtccaatatctagtcatgttatatcccaagctaacaaaggaacatggaacaaaatagcatggctataatagtaggtaaacatcccacggtaacagtataaaataatgtagtatttgaaagaaaacaatagagcatttgcaatataggatcaacatgttcaagtgacaagcatgacttgccttgctctgctgctggaggaacctcggcgactatttcaaagtacaccggagcgtcgggagagccggaatctaagcggcatacaaagcaaacaatataaactggctataagactactgaaacaaagaacaaaaccctttttaatggattctatgcatttttcttgatttactgagacttgaatgggcttaaagggagctcggatgaatcagatatgaattttagaagattcactgtgtttttactataacagaaaaaatccttaattgatttattgagcaataaataaatcccgggagagagaggggcggtgccgacatgcgggccccacatggcagtggctgcgagcgctggtccaggggaaaaggggcgacgcaccacgtggtgacatgtggcgccgacgtggcacgcacgtggcggcctcgtggcagccacgcgggcggcgggatcggatggccccgatctaccgcctggtagatcggacggcggatgcagctcgcggccggcgcgcacgggcacggctcaagccggcccggcggccatggcgcgcggcggcgaacggccggcggcggaggacggcggtgtcgtggcgacgcgggcggcgatagcgacggctaagcggctaggcggtggcccggcggctaagcggcacggaaaaaagggaaaaaggggagnagggcctcaccgacgacgatcgacgatggcgaccatggagggcnatgccacggcgaaacgagctccgggaccacctaagggatcaaaagggatgagttananagggagagggaaaccatggatggctagggcggtgaccgaaggcnccggcc

SEQ ID NO: 1851 - DNA, 2000 bp, Oryza sativa
  N_region (14)..(14): n = any nucleotide
  N_region (157)..(157): n = any nucleotide
  N_region (1542)..(1542): n = any nucleotide
  N_region (1546)..(1546): n = any nucleotide
  N_region (1935)..(1935): n = any nucleotide
aaaaaaggaaaacnaaaatgaaaaggggaacgggggagactgcgctgatgacatcgcacctatgcatggctgcgacaccaccgcgcaagaccgccgtcgaccacatctgcacctcgccgacgcacggccgagccccgccggccggcaccgggcctgngaatcgccgccgaaaggccgagcccgccggtcgaccgagccgtgccgccgccatccggccgcgctggtcgccaccagccatgccaccgcacggccgggacggccggccatgcccgcgtcctggccgcgccgccgccgtgtgcccacatgccggccacatcgccaccgcatggccgtgtccgcgttgctgccgctgcacggtgtcacgcctagaaattcccaaatagaattccaagcagaatgtgcattaaaatccccgtccaggaccggccggggtacacaaacgacaaagttgacatacagatccacgtcttacaaatattataaaagtcttacataaatgcagcgaaaacttaaaggataactggagctaagccttgacttggtctgcagcgggaacaccactccacaggcatcctcgacggcacggacgagcctactcctcggagaaaccaccatctgacgcatactcgaattctggggtttggggaaaatagagcaaggctgagtactatccactgtaatctgcaagtcataccggaatgggggtatgatgcagggaattatcaagggatagctataatggttcatttgtataaagcgagcatttataaacagaagttgaaagcagtaaaacagttgtaataattaaacaatattagccatccactgtccaacgctaaaccacgttgcaacaggcccaaccatccacctatattattcaattccattagactaatctagagtgagtctaatcacggtgaatctggttgaccgcccataactgcgggcacggttattcgaatagttttactctgactagaggtgtacaactgtactcacaagacacagccccacgacacatttctgtgcgccgacatgccaccacgacataccggaaagaggccgtgacatgacccttcgcataaccccctctaaccaagcacaccacacctcaggtttcacccccactcctcgcaaggcaacgggcagtcccctctcgtgcctaggtgaatccggaagccgcataggccgtcacagggcccattcaaactccatcacgcccacccttgcctggatgcgtcggctagaggaaagctacactacaagcccagccgttgcccacgctggcttgtggtaagtacgaggaattctcccagggtttcccgcaaatcggtccttaattgccatgggcgcgaccatcaaaaccatgtacccacggcccaccatttaatatattttaattaaccaacaccggagcggtgagcattaaccaacatcataactagaatctgattaatgtagtccctcattgtgtgctagttgaactaagcaaagctaaacattccctagtccaatctctagtcatgttacatcccaagttancaanggaacatggtacaagatggcatggctatgacagtaggtacgcatcccatagtaatattataaaacaatgcagaatttgaagggaaacaatagagcatttgcaatataggatcaacatgttcaagtgacaagcatgacttgccttgctctgcagcaggaggaacttcggcgactatttcaaggtaaaccggagcgtcgggagagccggaatctaagcgacatacaaagcaaacaatacaaaagctataagactactgaaacagagaacaaaaccatttttaatggattctacactttttcttgatttactgagacttgaatgggcttaaacggggctcggatgaattagttatgaattttagaagatttactgtgtttttactataaacnaaaaaatccttaattgaattattgcgcgataaataaatcccgaggagagagagggggtggcgccg

SEQ ID NO: 1852 - DNA, 2000 bp, Oryza sativa
  N_region (181)..(181): n = any nucleotide
gaagggaaaagctatttttcagacctctgtagaaggatctgacagtgaaattgccatcctttcatcttatttttctttctcactgttagaagaattgactggcattcattatttatcttatgaagctatcaaccggtaccctaacaaagttgttctgaatttaaaattaacccagtcagtngaaagagtttttgccattgtgttgtttctggtaaaggtgatatcgtgaccatctttttcattacataacccgtggttaaaatatttctgtattgtcattattctgaaggaaacattctggtaatcatggaaggaaaaaatgatggaatttaatatgtttcaacggtagatgtgcatggtattatccacataagctaatgtgtccttcaaatttcaggtgcaactttttgaactacaggcggaatatgtcgtgcttccattgtgaacacaaccgtccaccagatgaatacaccaacagccaaatggaagctaatcaatctgttccacgaaagcgattggaaagacctgctcacaaatctgaagtttgtaatgcatggaactttgattttgatgacaatgaatcagatggtgctgatgttgcagcatttgagtttgctgattcatcaaaggccaggaatagcttgtctgtggacaacacgtcttctagaggtggttctaagttctctgaggacaacgaatttggaattaatgaaacatggagagagggaacagagagaaggttttcagaaagagaaagagttggttttgatgactttgatgacgaagaggatgatattgatagttacgagcttgatttatcaaagggtggtcagacagatggaatgtcaaggatgagttatttggactttgaagatgcttgtgactcggcagacctaaatgggcgtgctaaaattaggaactctaagcacggtgaagaggaggatataatagggtctcctgaggatgaggaatttgatcacccttccctgagatctagtcatcttgctgcttcttggaggaaacctgtaagctgcaatggttccaacaaccacagaagggaatcttttggctcggagagtgatgatgggattatttctgatttggatggggatattaatgaaggattgaaattgtaaaggaggccataacaagcattatcctagaagagttgttgttaggcataatgaacttgatgatgtaccattttcagatatggattgtgacataggtggctgtgttcagtcagataggaggaacaggttctcaacaaagttcagtgatgaattccatgccagggcctccaactcaaataggaagaaaatgaatgaacgattcaagagttctgatatgcgtgatggtcacccgccctttgataggactcgtacaagaggtactactgaactacatgatggctcaagagatctacagagtaacgcaagaagaaattgggttaaaagtggtggatttgatgataacaacaggccgctcaggcgtttgaacagaagataggggaatccagttactgtgcagtccttccaactagctgtcgtattagtgttctccgatgtaaggtgcagcttttttaattggaaacatagagctatgagattgcatgcagatctgcggttgatctcaatccaaagatccacatgctaaatttcctgcatgcaatacgggattgatgctattgaatcccaaggtccggctaaaatgtgtgcctagaatatatttctagccttttctccccgactaagcatttctggtcttgagacaaagatgtttaagcattcccagtaaaataaatgtgtaagtattcatcatggttagggtcgtatgaaaagaactgttctcgattttatacgaatttctgttccatcgtattttcaaggagagggaagtatgagtaagagcttattcacatgatcacgtcatatgcttcaatgtgatgtgttgcttcttgtaataagtctgcaatggtgatgtggcgactaatgtggaaa

SEQ ID NO: 1853 - DNA, 442 bp, Oryza sativa
  N_region (220)..(220): n = any nucleotide
ctttaaaaatcaatggccgggaatattttgtaatattctttgtgccctaatgtactctccggaattttccgtgaattttcggagctcgagaaatagttttaatagcacaaagatcattgcatcaatttaaataaaaagaaaacaaaataaacttccccttcctccctttcgggctcggccaaattcctccccttccttcctctcccgcggcccgcgcgcntcctccctctctcgggccggctcccttcttccttggcccgcttgcaaaagtctgttttgcgtccctccttctctcccttcgccgacaggtgggaccggcggtcccacccgtcagctcctcctccttcctctggctggccggctgcaaccgccatggccgcctgagccgccccacgtcgccgcaaaatccggcgacctcccgcacccgagctcgcatccaacc

SEQ ID NO: 1854 - DNA, 37 bp, Oryza sativa
  N_region (4)..(4): n = any nucleotide
  N_region (6)..(6): n = any nucleotide
  N_region (9)..(9): n = any nucleotide
gggncnccnacggcggcggcagcggcggcgccaacgt

SEQ ID NO: 1855 - DNA, 2000 bp, Oryza sativa
tatggcttctagatggatactatacatatgtaatactgttgtttgctactaataagtcaagttggggatagcttggtctgggaatatggtttctttgtttgattcatgtgtaggtgacttgatgcctcgggagagtatttgcggtgatggatcgagagtcgacttggtggtaaggcgatgtccgtgactgttagatatcatgcgagatactttggctagagttcaatgcacgtggttggtgatgattctatatggcatatgatggaggtattgtgtacgtatgggttgtggagtcgaatttggaaggagtacaaatttggtatgattggttatgtaaagtttatttcttgtacgagaaggtttcctagggtgattagaacttctagtatgagtttggttcgtggctttaggctgcctacctcatatataaatagagagggagcgtgagacttcccggtatcgcttctaagagaaattgagtttctagtttagttagggttttgagtttagtcgaaatttttgtaaggagtgctgttggtgtactttgtaaacacagagaaaagcaataaagttgtcatctactttgagagttcttctatttgtgttttcttgggtgccggcggtccaaccggcggagacaccggcagtcagaccggtggcatcgcgtcggtcagaccggcggaggagcggtgctcatcaaaccggcggcggcgacaggagctggcaggcgatctcagcggttcgaccgaagttccaacttcggtcagaccgacgttcttcaggcagtcagatcggcatatacacttcggtcagaccgcaatctgtcgaatttgagggtaacttttaattccgctaaaagttttggtttttgggtaagccaaccattctcccccctttggttggcttagttcttgtgtttcgatcctacaaattgaattaggctctgttaagaccccaccgtaaaatttttcatcctattatattgaacgtttgagcacctgcatgaagtattaaatatagggtaaaaaaataactaattgcacatattgcgactaatttgcaagacaaatcttttaagcctaattgctctatgatttgacaatgtagtgctacagtaaacatttgctaatgacggattacacctctggatctaaacacccctgagtgatttttcaggtgatcgtcagttgcgctctgtttctagctgaggtttggtgtgtattgtagagaactgatttagcttctcatgatgcttaatttgcataacgttttgcccctggagggcatttccttttgattaaattataatttagtggatgtttttatcagtttactttttggtgctgtatggtgtctctgagatggtttctgaaccattgcatgccttctgatcttactgggagaccatcatcaacgttgtccaagaaacgaaggaaaaaagaggaaccgtttatatttaagaaaaatatatagtgaaaattactgttgaatccaaaaatagacttttaaaaatttgtctacgtcattaagactcaagagtaaaaaaaatttactcccagtaaaacttttactcataattaaatttacaagtaaaacttttacccttgataaaattaacaaattccatgcatctatttttatctaatgataacttttaggtttgcaccacatattttcggtttatctgtttcaattttaaaagctgagcagttctgcagttgggacttgcagcgcgaggggaggagagagaatacggctttttgccgccactgccactcgtgagacccccaatcctcgcatgccaactcacctgtgttgcttttgccggtagctatatggggattttttttttgttgactactagtctccgtttcagcgaaatcaagtgatggaatggaatagcgcgaaatggatttttcaaccgggtttagatcaattacctttcaccttctcgtctagaccagccaaagccatagccgaaactcacggtcacggtgcgt

SEQ ID NO: 1856 - DNA, 2000 bp, Oryza sativa
cccatccctatgcgctgcaaattaaccccccaggtgattagccatctaatccatacaattaactcattagttagttgcaagttgagcctatacataactgaccaatagattttagttttacgtgattacctgagttaattaatgtaactaagcgatgtggttgcaagtctccaaaactaaatcggataaatagaaatgatgtattgtcattcatgtattcaataaattcggtgctatttagttgcctaattttaaaaaatgattcttttatgttatattaatgtgcattcggacatacaccctctatcctaaaataagttcagtttttttacatgaacctagaagaatgtgttgagatatatctaaagtcatatcaacaatcaatttatttacatattagtgcaaaataaccacaaaattcaaaatataattatacgaggtgcaactacacatattaaagcgaacaagaggtgaggtgaggccaatctgccactcagcatgaactgagccatcaagatctacaccattatctaccgagacgctggcgagttcttacatctcatgaccagcacaccctatcactaaatcatggcttcgccactgcctctactcctctatatgataccttatgtacacatacctatctccctcagctcgaaataacgtgaacccagatgtatactgaaagatattttcaaatatggatgcttacatgcatgagaagataggacaatatctcctcgataagaaagactatgcaattcgactcagctttgaagggactacttcgcccatatcctatttaggaattctgagtcctacttatttaagagacgatttttgctacaaataaaaggcttccgaggaggggagcgtatcctatacacacaggctcttgcgtgtacacaccgtgtataccaactaaaaattatcacaaaaaattctaggaaaattcatacatgtactttcaatataattacatctacgtgcaaagtcgtatcttcaaattcattctacatagagaataacaaaaaagataaaattctgacaaaattgcaaccttaaaactgtcagatttttttttgttacgactaaaatataatgaatttgacgttaagattttaaccctaggtataatacaattgaaagtatgtgtatgattttttctagattttttggtgatattttttaagttggtgtgcacgtgtgtacacgtgaggacctgtgtgtataggatatgttgcctccaagaagagaatggcttataatattaagcaatagacatccacaagccaccatcttcacgacgattctacatatagagagagcccacaagtagctgccaactacattgctactgtaacttctaccgagattagttgttaggctagacgagagatcccgcctcatactttatatatactctgtgtgatactagatcccaaacagggtttacatttttggatcgaaatttctgaaatttcaaaaatttcggttctatacaaacccccgatacgatattattttggtcgaaatttttaatttttttatattttttcgtgaatttggtaatattttgtttaaattttattaaaaaaaattatataatttcagcccgaaattccaccaccgataaaaacactaagtccttgttcgtttctgcttgtagcggaggataaaattttagattatcgtgccacatttttaaactgctaaacaatatgttttgtgcgaaaactttctatatgaaagttgttctaaaatatcagatgaatttatttttcaaatttgtaataattaaaactcaattaattccacgttattatcacctcattttacgtgaaacacttaatctttatattcatcttcaggagattcaaacaccacctaaaccgaaagattaaaccattatcccaagcctctctcgccagcgtgcgccgccgctgccaccggctttccgtcgtggttcgccacacgctggcccgcctccatcgcacaag

SEQ ID NO: 1857 - DNA, 2000 bp, Oryza sativa
ttttcatggctcgggaaaaaatataattccctcatttcttctcttatatatcaaagaactttacaatgttctgtcgatgtgtcatatcccttaaaaatcatttataatatgggatagggagagtaataaaagcatcgccggagctgatccctggctccctgcttgtacttgcacgtacggtcattgtctcattgatgttcatagctgtacaatcgatgcatatcatgcatatacgttatgggcaatggttatcaagttgcaaaacgcatgaaaaacatataaagataccgtacacctgatcaatgaataagagggtggaacccacaaatgcgtcactcaactggcacgcgaatttatgttgattataaaacataatattttatcagcaacataaaaatgaattcatggataaaattttatatacgtgtcattaatgattttaaaaccaatgttagaaacaaattacaattgaaaaaaccttaaaatcaacttaaaagttgagttttaaaatttaaaatttggcaactgcctataagttgaaaggcaacaatgaggctgtttgttgcacaattttacacgaggttagatttaaaagtgcgattggattttgaaggtgtgaggaggaccaagaaatgatgcaacatgccattatttagagatgatggctatacttctaatcatggatggaaatttagcaatacaatttgcttctaaaaatgtcttatcattcgagttatgttagcaaccgttaatgcttttgcgatgcagacatatgggctgcggaatgtataatattaatagcttggttatagcttttaattaataaataaatgaaaggttaggattatcctaatatctataaaagattggattttatttagcacaactatttatttcattttcatagatatatttgtacgcattgattaatccttccgttatacactagaatgaatcatttgcaacatctcttagggcagtcccagccctccatctaggatggtgtctatggcattaactacattgccatgtaggacttttagtttatgtggcactatattaattgagagagagtgaagagaggaagaaactgggtctcatgcaagacacaacttcaacacgagaacctatgcactagacactatcaagttttgcattgggagagaattatcaagttttgcattgggagagaatattgtcttcataatagataaagaataaatatgattggtagagaagaaagatgatgtatttattaatggtctaatttaagaaagtatgggttgtagagtatagtttctattgtgatgtcttattgacatggcaccatagacactacttatggacaccataggttgggactgcccttagtacctgttcctttcaaagcggctattgctttgggcaactcctttttgtttgttaataggtttactggacggctaaacggagtatgttttatataaaaaataaatttatttttaagcttatattaattaatacctaattaattacgagctagattcacctttgtttccgagcctgtaaccgttgattcaagctacatgtggacttgctttttttagtggtttaactgttaaccgtttctgggtccgttacagacctgacaggtagacacgtagctgaaatcagaggagtccaaggtccaaatccaactggcatgcccagtcaccacactgcttctgaacacctggacggttcgatcgtacagtcaaacctgccaaacagcgtatccacctggccggacagcggaatccacatcctcccgcgagacccggcgcgcgccacgctatcgcgacgttctcgtcgatcgtcctcctcacaggtcacagctcacctcgacttgaccactcctacacggccctttactatttagtacgactccgcacgctgcatgcgcagggaagacgactagccaaggcgccctcgcctcccgccgccgaccacgcgcgctatctgcatgccaagttgccgagcta

SEQ ID NO: 1858 - DNA, 2000 bp, Oryza sativa
  N_region (709)..(709): n = any nucleotide
  N_region (820)..(820): n = any nucleotide
  N_region (1266)..(1266): n = any nucleotide
  N_region (1900)..(1900): n = any nucleotide
  N_region (1910)..(1910): n = any nucleotide
  N_region (1933)..(1933): n = any nucleotide
atccacgtcttacaaaaatataaaagattacaaatgcagcggaaaaagagaaaagcgagctaagcctgaagacttgactcctgcagcgggcgactccattccacaggcatccttgacggcagcgacgaaaccaacctcttcgagacatcttcaactgagaaggacttcaactctggtgtgggggaaaagagagcaagactgagtactacccactgtactcagcaagtcacaccggaagaggaggtatgatgcaagatatatccaagggaggctaaaggttcttttgcataaagccggcatttcaaagcagtagttgaaagcagtaaaacagttgtagtaattaatccatattaaccaatcactgtccaacgttacaccacgttgcaacaggcccaaaccaccacctgaactaaccagttccaaaagctaactagggtgaaactaatcacggtgaatctggtcgaccgcccataaccgcgggcacggctattcgaatagttttactctgatcagaggtgtacaactgtacccacaagacacagccccacgacacgttcccgtgcgccgacatgccaccacgacataccggaaagaggccgtgacaggacccttcgcataaccctctctaaccgatcgcaccacaccttagggttcgcccccgtccccagcaggcaacgggcagcccccctttcgtgccgcggtgaatccngcagccgatcaaccggacaccccggccgacccaactccatcacgcccaccctcgcctgggtacgtcggctagagaaaagctacactacaagcccagccgttgcccacgctngcttgtggtaagtacgataaattcttccagggcatcccgcgaaccggtccttaatcgccatgggcacgtctagcaaaaccatgcacccacagcccaccatgtagtgtattttaattagccaacaccattgcggtggcactaatccaaagctattgccaataatcaagtctatgctttaatgtggtccccttttgtgcactagttgaactaagcatggctaagcatctcctaaaccaacatctagtcattttaatacccaagttatcaatggcataagggaaacaacatatagctgagtaataggacccatcccacatgatattgtaaaacaattgcaatatttaatagaaatgcgggacatttgtaaattaggtacaatatgatcaattgcaatgtatgacttgccttgctctcgcactgatgagaccacagcaacgtcttcgagnaaccacgaatcgacgaaacggccgaaatctacgcgacaaacaaagcacacaagcaaaacatgctataagactactgaaacaggaaacaaaaccatttttaatggattctacacatttttcttgatttactgagacttgaatggacttaaacggagctcggatgaattagttatgatttttagaagattatctgtgtttttactaataaagaaaaacccttaatcaatttattgcgcaataattcatcccagggctgacgtcagcaaggggtggggcggcgccgacatgcgggccccactggtcagcggcacaaggggagagggaggggtactggcaggcggggcccaccgggcagtggcacaaggcgggaggggcgcggctggtggctcggctcggcttcaagccggccggccggttatggcgagggcggcggcgcgcgcgcacggttgccagcgacggcaaccggcgacgggaggcggcggcggacggcgcaaagacggcggcggcggccgaagcggcggcgcgagcgaccctagcggcggcgctacacggcgggcggcgcggcaaagggagagagaggaagagagggagaccgatcctcaccgaggggctcggccggcgcgagggaggagcnacggcgaacngcaacgatgagagacgggaggangacggcgacgggctccgggaggacctagagaaaaggttgggaggggttagagagagggaggtggtcc

SEQ ID NO: 1859 - DNA, 2000 bp, Oryza sativa
  N_region (140)..(140): n = any nucleotide
  N_region (303)..(303): n = any nucleotide
accaaagacagcaattgctggacggcgaagtgtaaagggtgacgaaaccagggatgacgtaatttcagttttcaaatggtccgtcgtgccacattcgcaattaattccaagtgtcccctcctccaaaaacaaaccaaatnaaaatctctatctgaatactggaccaaaagggaccaaaaataaaggcattaaaaaaaaggagatgagaaattattcatcaccaaaatggggacaggcacatggtgcgagccaaaccccatccacagcgtcgtttactcggatcagactcgctttctccacgtncacacgcgtacaccatcaatgcccaacacaaggacagcgacatcgcttcccgtactgtcatttgtaattaacacgcgattaattagcataaccaaagtcattacgagagtgcttactgagtaggagtaatccataaaggctgggttcgttcctagggttcccaactactccctccgtcccataaaaaaacaaatctagaaccggatgtaacatattctaatactgtgaatctggacgaatatatgtctagattcattgtaataggatatgttacatccagtattagcttgttttttaataggatggaggaagtactctgcagtgcatgtgaaacgaaactatcaattaacgcatgattaattaagtattagctaacttttttaaaaaataaatcaatataattttttaaaacaatttttgtattttttttttacaaataacgcatcgttaagtaatttaaaaagcttacgcgcggaaaataaaagagattagttggaaaaacagagtaacaaactcaaccacttatggtggaatcagaattaagtcataaccatcatatatgtattctttctacccatcaacagcagtaagacgtttcttataacctcatcaatttcaagatatatcgctttaatattttgtagattgcttattagaacagacgcacatttatatgaattagtgtacgcgtttgtggtgtgtttgacgaaaaggttactaagggggtgtttagatccaggatgtaaaggtttggtatgtcacatcagatattatatagggtgtcgtatagagtgtttggcactaataataaaactaattacagaatccgtcagtaaaccacaagaagaatttattaagcctaattaatttatcattagtaaatgtttactgtagcacgatgttatcaaatcatggagcaattaggctcaaaagatccgtttcgcaaattagtcgcaatccgtgcaattatttttttaaaactatatttaatactttatgcaagtgtttagacgtttgatgtgacatgatgtaaaatttttaggtgggatttaactgcctcatcgtttggcctttttcgtaataagccaaaacggcttattagagaataaaaataaatttgtaggtaaaacttttatatatgtgttatcggtgacttaaatgtcaatgctgaaaaagaaactacgttgaaaatatctcaaaatcaatattaaaattaagtttgaaaatttaaattttggttttttcttttagctgaataggccatccgatgggtgcctaaactaaggcctagcagatcaaatacacaacagaagtagtagcgtgcgtagcagtaattaacatgtgatcgccacattaaaaaaacgaagcgataataatcagtggtggccggaggcatcaatcggccgggctcgcgcacgcgcacgttgtcctcgcgtgcctggctcggcgggcccacccgcggttgaattcccgcacgttttccgcctggtcgccacgcggtcccggagaccagacgcgtccgtgtccaggtgtgggtgtgcgcgtccccccccgtgggccccacctgccagcctcacccctctcccagtatatattggctcggcgactcggagagagacaagtgagctcggagtcggagagagacacaagccaacctcgaactcgaagcagagcaaacgcgaagcagagcaagcgcc

SEQ ID NO: 1860 - DNA, 2000 bp, Oryza sativa
  N_region (348)..(348): n = any nucleotide
tcttcctcttcttcaaccattcaatactcgtaactcgtagtaacatgacaaataaaatagggataattacatatgtacccctactttaaaagccaattgctgttttacccttatttttcagggtttgcatttttacccccactttttaatctgaagcaaccgtctaccctcacttgtgacagccgtttgatgggtcccacattgtgcgttaaagaaatacaaaggaaaataaaaaaagggtaattatgaaattacctttgtacccctgagagtggatagggttgagtgagtcttccacccgtgcgtacgggtaaagaaacagtagaatcctagcgcgcggcgcgcgangcgacagcgagagcgcgcggcggggaggcggcggtggccgagggcttgcggccgcgccggcgcccgctccaggaggtagacagcccgcctcttcttcctccgcacggaacagtgcctgcgcgcgcgcacaggacgggaagccctggcggcgcgcattcgctccgctccgctcgtcctgccaccgctcgcggtgctgctcctcttcgcgctcctcgccgtcgcggtggcgcgggcacgcggccgcggatggaggaaccatgaggggaggaggagagcaacctccgcctgccgtctgagcgcggcgtggcggatgacgcggtggcggaggacgacgccgccgaggacaccagatgggccgtcctcatcgccggctccaacggctactacaagtaccgccaccaggtgattttgctcgcccgcaacccctcgaaaacaaaccacgctctcgccgcgcggttaatcgtggcggcacgtatggtttggtttggttcggtttgatccttcgcgtgtgtgcgctcttcgttcggtttgatttggttggtttcacgggattggttccatctccaccaacgcgcgcaatcgccgcagaagtagaaaccctgagccgtttcgtgttgccgcaaattccaaacgtctgttaaatctctcgttaatctgattcatgataaacgtaatccacaattaatttgagattactgccgtgaagagagaattcgtcgtgaagagagaattcggcgtgcaaaatcacacgaagctgaaaaaattggagcaaaattgcaataaccactgagagcataattgtccttttcctctacaagtaacacagataaaaccggctgttagaagcaggggcacatggctgcttcagattcaaaaagtaggggtaaaactgcaaactctaaaaaagtgggggtaaaacagcaattggcttcgaaattggggtacagatgcaattgccacaataaaatattatccacatatggcagtgttcgtttctaaaaaaaataagaaaaccattaacgcatagttaattaatttttaagtattataaatttgaaaattttatttcatattttaaatcaacttttatatataaaattttctcatagaatgtacctacttaaaaccatggtaataaaaaatgaggtaaaatttatatcttaacgagaaaaaaaaattagattcatattactatcaaacttacgtaatgaactaccagtgattctttgagattacgacagaatatcgctgtatcagttcacctccctaacctttgcctctcactcacacaaagtgcaaaccatattttcgtcggtctacttctgggaattcgttgtgagcgtgcgtcgcaaccaaccgtttctcacaacagcaaccactcaccgaacgaacccggcccctgggccccaccgttgcagcccaaccacacaccgaccccacctcatccctggccccacatgtcatccacccaaatcacccacttgggtcggggtgggtcccaccacatctctctctctccctggctctgattaatttctccccaaccccactcactcgccgcgtcggcgaccaccaccactcgagctctaaatggcagccgccactagatctcgccaccatcaccgacgacggcgacctcaccgccgccgggg

SEQ ID NO: 1861 - DNA, 2000 bp, Oryza sativa
  N_region (1347)..(1347): n = any nucleotide
acggccgccctcggctcgccgtcgatggcgaacccgccggaacccttcgacctttgcttccagaatgcggcggtcagcggcgtgccggacctcgtgttcacgttccagggcggcgccacattgacggcgcagccgtcgaagtatcttctcggcgacgggaacgggaacggcacggtgtgcttgtccatcctgagctcgacgcggctggactcggctgatgatggcgtgagcatcctgggaagcttgctgcaggagaacgtccacttcctcttcgacctggagaaggagacgctctccttcgaacctgcagactgcagctcactcacctaatggctgcgagatttgctcctgtttcacgaaaagtacttcgaggtaccagtatctcactgtactaaatcgttttcaatcgttggatctagttggacaggatgtgcattgttaaatccaacgatcggaaacgatttggtatcgtgaagtatcagtatcttaaggttctttttattggaccagagcaaatatcaatggctgctgcttcttcctggaagcatatatatggtgattgatatatgtacacatgtatgcagtgaggtgtgtgtgtgtttgtgattattgccagaataaacgcagctatagacggcatgtgctgcggtatgttttactgtgctcttcagtgtgtgtcactcactcacctgcgtgtgcttgtcatcataggctgatatgatgtcagttatatgtgaatgtgagtgcagacaatatccagtcctgatctggagttcatgtgtctaatggttcatcaaatggattcattttgtctagcatagtttcctgtggcagaaataatgctatgaatgctgttctgtaaaagtaaacataccataccagtggagtgcatacagagtatggcttcatacctcaatttcaagtggtgatacatattaacagcttcagaaacaaacaaaaaaatgattattaccgcagtcaaccctaacacacagaaatcagtaatcaaacctttaaaatcaagcaggtcaagtaccacatggtctaaaaaaattgaaacacaattgtaacttgtaagacatcttttcacggcattttcgcatattgtcaggagactttgtttaagatatataatcttgccttatgactactgcacggtaagaacaaatatgacaactggaaatcttaacagcaacataaggatatgtttgacaaagacaccttgcattctgaaacacccatgcactggtgcatggatgctcagacaaagaacttccacaaaagccgcatcacactgccctactcgaggtaaataatcacatatatgtagcatggagagtgatcacnaataaacataaaattatcatggcgacatcagacttaaaagtacaggagcagaggcattgtgaaacatggtactccctccgtccaggattataagagattattccctatttggcactcattaaggaagagaaaaaaatgcatctagtaatatgtggaagtacacattggcacattaaataagctgcagaatgtacttatttggagtaaactattgcttttggcaggaaaaagagcatctaaggacagtgacttgatctctgctgtactggataaccaaaatcccctgaatcatggacaaaccaaggcgccattatccactataattgtggccagagggagtacctttgttgctcggagaaattttcctttcaagaagactcgaaagaagaatatgtacgctttatagtgcccaggttttagcaaaatgccaagaaatttgatcaattttaatcatactgcagacatgtgaaaataccatatgggcaaaaggatagtggttcaacaattctaacacaaggatctaaaaagtaaatgaacagattcactcaaaaaagagtgctagtaaaagtatgtcaagcttgcttattactgtaccataaaaaaattgcacggatcaaagtgacaaataatcagccttcagggttcacgcagag

SEQ ID NO: 1862 - DNA, 1015 bp, Oryza sativa
  N_region (36)..(36): n = any nucleotide
gcggcgcgaggcgacggcgtgcggcgaacggcgacncgggcctcggggcggccggatccgtggtcggcagccctggtgccgcgggatccgaggtcgtgaggcgacggcgacggcgggggctcggcagtgcgaggcgacgacgtgcggcggacggcgacgagcggaaccggcgacgcggccctcgatgcggccgggtcacggtgacggcgggaactcggcagcgcgaggcaacggcttccggcggacggcgacgccggcctcggggcagccggatccgtggtcggcagccccggtgccgcgggatccgaggtcgtgaggcgacggcaacggcgcgaggcgacgacgtgcggccgacggcgacgaggggatccggcggcgccggcctcggggtggccggatcacggcgacagcgggaactcggcggcccaaggcgacggcgtgcggcggacaacaatgatcgtttttgagtttttcgatgttgttattttggatttggctgttgattttttttctggatatccggcaaaaaaaggtcgtatagtttccgaccgaatccgagttccgacggataccatcgctactgtattcgaattcgtatccgagaaaaactatccgaattcgtatccgaatccgaaaatatccgaaaaaaatccgaccgcagcaatccgtattcgaaaaacaggatcggaattcggaaattatccgtaccactttcatccctacatataggatgtagattgtgagtacacgtcaactcgcgtgaaaaaaaaaaatccaaccaagaattttattaactgttgccgaatacgaatatctcgttggccatccatgtagcagtcgggctgggccggcccagcccagaccagcccagcccaccaggaagaggaaactgagtcagagtcagacatgggctgcctctaatatacagtgcgtcgagcccgaagatgatccgtctccctttcttctccccaaagaaagaagcgagagagagagagagaaagcttcgcaggcgacg

SEQ ID NO: 1863 - DNA, 2000 bp, Oryza sativa
  N_region (541)..(541): n = any nucleotide
  N_region (548)..(548): n = any nucleotide
gtcgcccacagcaacctcgcccaccgccatgtcatgggaagtggagagaaggcaacggcgaagcatcgatgatagaagcttaccgaccacgctgcctatattcactgagagagtcattttacaccagttttaatagttgggagtcaagatatcctaatagttgggagtcaagatatccggtattgcagttgatggatacaaaccagattggactagtaagttaaagtgcaatattataagttcgctttaggttcctcaatttgttactgagtccgagactcagtaggtcccacttgtgtcaaccaaaactgaccattatattatatttggttcaagatgttattttgagttgtgagatgagctgtaccgacgaatctcagactcgataacaaattaagggacccaagtaatcttattgaagtgcaattatacctttagattgtatatacatgggccataaatcagtatgggctgaaaacacacttaaaaaggccgaaaaagaaacgccgttgccggggatcgaacccgggtcacccgcgtnacaggcnggaatactcaccactatactacaacgacatgcttgaggcaaaaatgctcctaaaactaacgtttgtttcactaacactgtagcaatcgtcgtcctaaaaatcttttgcctattcaacggttcagaaactagtgactgtatggaagcagcaacaagtccgttccaggtaaagatattaaaatttatccacaaatataagaatttatagagtactacctaccattcacagaattcatagggtactacttctcatttactcctttctgagtgaattacacattgggctacctcttattaccagagttacacattggactaggggcaaagtaatatttgcactttgcactagacaacttcacacaagtttcagattggaccagtgtttcctcaatctcccttctcttctcttcctcgttgagctcgttgagctgaagccactatacgtgagcttgagtttgagcactaccatgtcctcccttgtattgatagctaaaattagcatgctaggtgaggtgatacgattagtttaatttggtcattagcatactaatgatcattgatagcataacgagaacatgttaggagagatgataatagcagcaaagagaggggcaacggtgatgggctgcctgacttggagacgatgagggtgtggtgaagagtgaaacaaatggcaaggttatgtagtccaaagtgaaaatcatgactaagatcctgtccaagctgcaacaagggtaaaaaatacatgacccaaactgcaatttactccttttttatcttagttcaaactacaatctcaactagcaatttatagaaaatttatagaaaaatagttcacatctacaatactaaataaatgcactgtcaagacttattttatggtggattttaattaaactagtttgatgttggagtgaaatgcatggtcggttcttatagttacacggtggtatcacctaggtcccacatcgtgtaaaatacataattagattcataattttggtttgatgtatcacaataggcccaaacctcgtttgaccatgtatgactgcactactgatgtggcgctccactggcacacattttgcatttacccccctccccccaacaataggatgggttgcacaagagagtagacgctagacagtgaacacaagtgtggatccagccatgtccactcttagcgatgccggtggtggtccaggtgcgcgatgagcaaggtaatgggaggttccatcaccaccgatgcatagggtggctagtgcagagcttggaggccagggatgggtggggcagcgtagtggtggtgtgaacctcctcctcttcacgtatatcgcccccttctctcctcccccttcctgatgtagccaccagtgcacacctccacctgtccgacagcgcagaggcaacgccgatggtcgctagcaccatgtctagtgtggctggtgctcag

SEQ ID NO: 1864 - DNA, 2000 bp, Oryza sativa
  N_region (1814)..(1814): n = any nucleotide
  N_region (1817)..(1817): n = any nucleotide
aattagtgagctatggtgaaaatgatttactccaatgccatttgcaagattagtagttgtatggatctaaagcgatcacaaacaattaatgagctaaggggaaatgatttactcctataacatttgcaaattagcagttgtattgggtctaaactctaaagcaaccaggtattggatttgtgtaattgcaccttcggctttcctggccctattgtagaacggcacggccgtgtagactacgcctccaagcaccatctgcaccctgagaaaaatacgagagatatcaatcgcaatggttctcagaacagcagtacaatacggtatttcttcccccaattcctaccaaattggaagcatcggtaacggcgagaacccaagctgtcggtggccggcgtcagcggcagcggcagccaaatccgccggaactatgtcagatttccccagaacaacccatctgaccacacaaaccaaccatcttaatacaagcccttgacctaaaattctccaaaaatcaagcaagagaaagcgctgttcttgctcagagaccacatacccggagtcgatgccgctcgaatctcccgcaccatcgccaggattcttgatcccgctgcatcgagacggagcaaatccaacaaatcactcgatttcacatccaactttggttaaaggtaaaattctttagaaataagcaaccaagggaacgcataccttgggtcttcctggccgggttgcgcggcggctccggtcgccggcagcgtgagggttgccatggggagagatcaattaggggaacaagcggtaggtggacggagggaagaaacgacccatatgttattgccgtgttctatcgtgtttctgatgaagtgattagtcatccgcattaaaaattcgataaaaacgacttggagtagtagaggaggaagaggaacgagtacaatttacgcatgaggattacctgatgatcaatcaatcgctttcgtgacgcagaccttaattacctcccgtttacgtgggcctgatgggccgacttggcacgtactccttcgggacggcccagcaattcttatgctggcccgggtcatattttagtcctcccctcttggtccagtactcccagtcaaacgcagcagtgtcgtttcaaaatcgcaaggagaattcagagaccatcaaatacttggcggtggaaagtttcagaaaaagcttatcgatgatggtgattttgcgattgatctcccactgattgcgttaggatttggattaaatatattgcctaacagagccaacccgattccgtcggacaaaaattaccctaaacagcggcggcgtcacaaagtcgtccactgtcggccacataattaacccgtgcagtcgtcgtcttctccattactcgtagtattaagtagtgacacttcactgtcatggccccaaatagggccactaacgaaatctcgctgcctctctcaccaacgaactgaggccgtcagatgccaaaaccaacggggtagatctcttcaacttgctactgccgttctacagatacgggagaataactccttcagctttcctttcgcctgcagtgtttccattcaaaattaggattatcgcctttgactttccgtaaaccgaggtcgccgcctgctgctatgtgcacgaccatacgttacagcaaaaccgattgcttgtcactgagtagtgggccccaatttgtgtcttggcaatctggacccacagtatcagtgactgcatacaaaagattaggtcattctgtagctttaattttttgggcactcgtagcgtgtgtgctctccagctcnacntccacgcattcccccccaaacctttaccaaacccaacaacaacgaccaatccactccacgtctccaccccaattccaccaccaccgccgccgccgccgccgcggggtactcacaccgatgcgcgccgccgtcgccgccgccgagctgccaccgccggatcgtcgctaggtgttccgcgccgcc

SEQ ID NO: 1865 - DNA, 2000 bp, Oryza sativa
  N_region (1913)..(1913): n = any nucleotide
  N_region (1962)..(1962): n = any nucleotide
tgccgctgccagtggggcccgcatgtcggcgccgcccccccccccttggatgacgtcagccctggggcaatattgcgcaataattaattaaggacttttctttattagtaaaaacacagtttatcttctaaaattcataagtaattcatccgagctccgtttaagtccattcaagtctcagtaaatcaagaaaaatgcaaagaatccattaaaaatagttttgttctcctgcttcagtagtcttatagcctgttttgcttgtgtgctttgtttgtcgcgtagatttcggccgtttcgtcgatccgcagtttctcgaagacgttgctgtgatctcatcagtgcgagagcaaggcaagtcatgcaatacgtttgatcatattgtacccaatttacaaatatcccgcatttctattaaatgttgcatccttttacaatgtcatgtgggatgggtcctaatactcagccatttattgtttaccttatgccattgataacttgggtatcaaaatgactagatgttggtttaggaaatgcttagccatgcttagttcaactagcacacaaatggggatcaccttattacatagactttgtctattggtatagctttagattggtgccaccgcaatggtgttagttaattaaaatacactgaatggtgggctgtgggtgcatggttatgctggtcgcacccatggcagttaaggaccggttcacgggaaaccctgggagacttaccgtgcttaccacaagcgggagtgggtaactgcttgatctgaagtatagctcgaccctttcctaggcaccggtggcgagggtgggcgtgatggagttgggtcggccggggtgtccggttgtccagctgccggattcaccgcggcgcaagaggggaccgcccactgccttttgaggggtgggggtgaaaccttagcgtggtgtggatggttaggggagggttatgtggagggtcttgtcacgatttccccctttgcagtatcatggtgatacttcggggcatggcgacatgtgtggaatcgtgtcttgtgggtacagttgtacacctctggccagagtaaaactattcgaatagccgtgcccgcggttatgggcgatcaaccagattcaccgtgattagtctcacccctagtttagcttaatgaactggtgtagttcaggtggttggttgggcctgttgcaacgtggtgtagcgttggacagtgtttggttaatattgattaattactacaactgttttactgccttcaactactgcttttaaatgctagctttatgcaaaagaacctctagcctcctttggttatatcctgcatcatacctcctcttccggtatgacttgctgagtacagtgggtagtactcagtcttgctctcttttcccccacaccagagctgaagatcttcctagttggagctgttttgtcaaagttggtttcgtcgctgccgtcaaggattgcctgtggagtggagtcgcccgctgctgaagtcaagcttcccggtttagctcgcttttatcttttccgctgcatttgtaatcttttctatttttgtaagacgtggatctgtatgtcaacaattatcgtttgtgtaccctggctggtcctggacagggatttaatgcacattcagcttagaaattctggttcgagaatttctgggcgtgacacgggctccgaaactacacgcgaaacgggacaactcaacaaactgcgaaaataaagccctattaatgacctctaagcgtgccattagatagatctcgagatttgaggaattttggaagttgaacggagtcaaacggatttacggttgggaagatattgaatttctaagattattggatttttggtctaaaggaaaaggatttaattaaatcctttttggaaaaggaaaagnaaagaaaaggaaagagggagggattatagacttttcctcgggcggctanggcgcggcccaagggaaaaggagcggaccggccgagct

SEQ ID NO: 1866 - DNA, 2000 bp, Oryza sativa
  N_region (735)..(735): n = any nucleotide
ataaccgcggtcacggctattcgaatagttttactctgatcagaggtgtacaactttacccataagacacagccccacgacacgtttccgtgcgccgacatgccaccacgacataccggaaagaggtcgtgacaggacccttcgcataaccccctctaaccgatcgcaccacacctcagggttcgcccccgtccccagcaggcaacgggtagcccccctctcgtgccacggtgaatccgaaagccgatcaactggacaccccggccgacccaactccatcacgctgttgacgaaaaaatcgaacacaccggcctgggagatctgcttagctcctgtgcaggtccaaaggttgatgagacgcgggcgtgccaatcagtttgatcctgcaactgacaagatatgcaaattgtagacaaaacaaccaatcggctgacaagccgatggagtaattccagccgatattagccgatgccgattccagcctatctcgatagggttttgataaatcagctatatatccaatgtagaatctgacacttgatattaataatgatataaaggcaatcggctgatgatgatgtaataaaataacaatgtaatccagtataaaccaatcagctagcattgatatgataaataagcattgatccgaaggttaaagcacacatcggctggtggtccgatgtcatgaatccacaagattagattaatagtgaaccttgttttcatcggctnaatccaacttataagtatatgcaatccttatgagccgatgcaacgtccagataactcacaggctgaaaccccgatgaaacccttattggcagtcaaaaagcaggctagagattatggttctaagcacgacttagtagatcaaacttaactgatgcagcactaagtatgaaaagaaacataatatctagacaatcaagccgttgactgattttcagggtggtagatgcctaggctaatctaatctagcaagacgatttagccgataccggcaaaaactctaaaacgagaagcagccgatagagctaaattgatatgctaagactagattaacagagacatatgataaataggtaggcaaatatatcatccaaaccagagcaatccaagaggtcgaatgtactgatgcagccttgaacgacgcctacgtagacgatacaattgcctggaccggcggaacattggacttatcccttagccggagatcgaagacgatgtagccccgcgtcagctgccaagttccgccgaaacgtaaaaacaaaagtagaagtaaaaagggtggcgatgcgccgaattgtattgatcgtagtgatagattacatagaccccgggtgtacatatttatacccatgggttgatacaagtccttgtcggacaagaaagaatccttcctaaaaataaaaggaaaagataaagtccttataggacactaaacacactttcctaaagataaaaggaaactaacaaactatttctaattaatagataacttgccatgccgcattctctttgaactcggtctcttctggataagcttcctctagtagatcaatttccttaactgaatatagcaagaatccgacaactgacgacttgacaactctcatcggcaaatctcaggacttcgaagccgatgctgactctaagccgatgactactccgggcttaccaaatttcactattaacacacgcccaccctcgcctgggtacgtcgactagaggaaagctacactacaagcccagccgttgcccacgctggcttgtggtaagtacgataagttcttccagggcatcccatgaaccggtccttaatcgccatgggcacgactagcaaaaccatgcacccacagcccaccattcagtcgcattttaattgaataattacgaccatgaagcatggccatatgtcttgagcacgcagctcatcacgatactaaaaaggtctaatactgcaattatcccatcaactgagctagtggtaattaagc

SEQ ID NO: 1867 - DNA, 2000 bp, Oryza sativa
gtatggccaatttgcattaattactctattccttcataccttgggttattataatttgactagttgagctttatatattggttcagctagatgttaaacattagcacacaattgggataactaatgtttcactattacttaatgatggatatttaatgatagctcacgatggtcaatcgttggtcaatcgtgattggttaattaatgtgccaactaaaacttgataatggtgggttgtgagcacatggttttgatggtcgtacttatgacaattaaggaccggttcacgagtttcggttgtgaaacattacccgtgccaaccacaagccagaatgggcaacggctggacactttgtataacaaggctcattacggagcaccagactgagaagtggcggagataagcccacaagggtcgctggggagtccatgcctctggtttttgagggggtgactacgatccaggaacggtgcactgcttttggttgagttatgcgaggggtcttgtcacaactacactaatggtgacatgttcaggcatgggctacatgatgatatggtgacatattgtggagttgtgtcttgtgggtacagtggtacacctctggccagagtaaaactattcgaatagccgtgcccgtggttatgggcgggtcgaacaatgtctttcttgattagtcccacactactcattaataataatgtggtaattgatggtaattaatttagctcctggtttggaatggtacattcctggtttggagatagatctgtgcagccgggtatggttgttcaggatggttgggcctgagcagcatgggtgtgctgttcagtgttgattaatattgatgattaattactctactgttttacaactctcaaatgtttgctaaatgctgcttttgcaaatgagccctatattatgccatccttttggtatccttgtgcacttgcatatttgttgtgtggcttgctgagtatgtcatatgctcaccttgcaataatcaatcaaacctcagttgaagacaagttgcaaaggagaagacgtatggtttataccccagttgagctgcctgtgggagtggagctggagcttcgctagaccgtaattccgctgctgttttcttttcttttgtaattatgtaaagttattattatgatggatttgtatattaaattgtcagtttgtgtacctcggctgattcctggacgagggttttatgcacaaataagttcggaaattactagtgaatttccgggcgtgacaggggaggtgtgtgtatcagttccatcacaagccaaccattccataatgtccaaatgacatgagaactcccaaagtctaaagttataaaaccacctaatgttgcctaattaatcagcgaagcatctacgtaagttcatactagtggaaccatgaatagagtacccactagttggggttttgttttcctagggtgaacgaggtgataataggaagtgctaaataaaacagtgataacgcgggaatttaaataaaatggtaatgcaataatttaaattaaaataattttaaaaactgggattcaatatgctcaaggatgatgagacttgccttgctcagagagaacagccttccgaaccttcggtgacgaccgcgaatcacgcttccgaaacctccggaatgacagaagctacacgaagcaaacaagcaaagctacaacctataaagaagtaataacaatacataagaagaaagcacacggttctttaggttataacaaacattaggagacttgaacgggtcgattcgggattcgtatgataaagatatgatcatacgaagtttaatgctgttatatggagatttacggattattatgattaggttttgcaattataaaacatgtgcaagcgctagcctggaaaagacaggaaggctgcgctgctgacatgcggaccccacatgtcaacctaatggacgacggtagaccaagtacacagagacgatccacgggacg

SEQ ID NO: 1868 - DNA, 2000 bp, Oryza sativa
tgaaagaagaggggtgggcacgggcatatatgaggaatgattgttgggtggttcggaggcccggttgagagggatgagcaagcggaggaagccgcctcctcaaaagatggaagaagccatagccatagccattgccagagagatttgtacgggtacaaggaaacccatcattccttgcttgcttgcaaattcatgcccacagccatgggaacttgcatcgatggacagacagacaaatctctcgttctcctgcccacctttgaatttttgtcctccctcctcctcctcttcttcttcttcttcttcagatcttattctaattaatgttgttaataactaattgatttaggttcatatatgaatcatcagcttaaatttgttgccatcaattggagtacaaggtaggcgatagagtttgttgaaacgcagattgaggacagacaggataaaggcaacttaacagagcactctgctctgcttaattctgtttctcctcttcttcctgttgtccgtcatcatcgatcttgggcacgtttaattcaattttacattatgctgccgatcgatccatcgagtagaatgaatatttgttacatacggatgaaactctaattaataagtcgtatggtataggaagaaaatatacaagtacgtacataggacggcagcagctcatgacagtgcaggctatttgtgtactagtataactgcctgtatatgtgaagcgagacatgaattttaatggagaggcccctcctcttgcttcttgtcttggtagcttccttttttctgtatatggtcccaatcaatttgcaattggacattcatatcaaaacaaccacgcaccattctagtatttctactacccctgtcccctgtttctgttgctacttgctagccagccatggagacacaaagctaatctagtactgtactgtaccctctactccatccgtccaaaaaagaaaaaactaatttaatattgaatgatacacattttctcttcgttaaactaaaaaatgtcttatccaataccaggttggattttttatgtgacagagggggtaagtaactaggtgtattgcgttttccgatgcatatgtatatgagcactccctttgttgaaaaaaaaactcaacctaagaggtgatgtgacccctcttagtataatgaatttgaatagaagattgtcttgatttgttttactaggagggttcacatttccatctaggttatgggtctgtttagttcccacgcaaaaacttttgactctatcacatcgaatgtttggacacatgcatagagtattaaatatagacaaaaaaaaaactaattacacagattgtgtgtaaattgcgaaacattgctccatgatttgataatgtggtggtacaataaatatttgctaataacggattaattaggcttaataaattcgtcttgcggtttacatgtggaatctgtaatttgttttgttattaggctacatttaatactttatatgtgtgttggtatgtccaatgtgaaatgcagaaacttttcacccttggaactaaacagggcctaagttatttttgagaggaagagagcacgtaggaaatcaaaatggcaatgcaaaggcaggtacgtgatgatacacacataatcgaatcgaatcgatagatggatagatagtgatgaacagtagcaagtaatagtgcatatcattcgtatagatgagtgagagagatgatcgaagaagcagtaggcagtgacaatcatccttccccctggcgcccagacacaccatcatatcattcgttccattgctcttgcagtctggctgttgctgctgtacacactagattagcatcgaggactaggagtagctgctgccactgccatgacatctctcctatatgtaggcaccgcaggagtatatacaggcagagaggcagcagccatgaccatgaacactacaaggaaggagtagatagctaggaattaattaattaagctaa

SEQ ID NO: 1869 - DNA, 133 bp, Oryza sativa
  N_region (3)..(3): n = any nucleotide
  N_region (29)..(29): n = any nucleotide
  N_region (116)..(116): n = any nucleotide
  N_region (121)..(121): n = any nucleotide
gantgccgcgggtggccgcccgtagtccntttcgtcatctccatcagatctgggtggccagaggcggccgtcgtggtcctctgcctttgccgagagagaggaggcccgaggggganggttnaggaggaggagg

SEQ ID NO: 1870 - DNA, 1644 bp, Oryza sativa
  N_region (36)..(36): n = any nucleotide
  N_region (45)..(45): n = any nucleotide
  N_region (547)..(547): n = any nucleotide
  N_region (615)..(615): n = any nucleotide
  N_region (742)..(742): n = any nucleotide
  N_region (860)..(860): n = any nucleotide
gttctttttcaccttccttcccttccccacttttangttggccangttctccctttatatctcaaggggatacacatgcacttcttctacctactcttcttttgggtggggaccaccctatcttgaccaaatcttgactcgcgcctccgcctggaagctaaatcaccgcttgtccttgagtgatgcccagcgccgtcactcgtcggacacaggggatcaccctatcatttcttcattaatgggaggagatcttcaatggccgctgtctgaatgaccctccgatgggatgggtcatacttacctccactccaccggaagcagatgcaacgtgggagcacggttgtctgccgatgacgtgaccggcgttagtccagtcacagaccggacattcttctccaccacgcgtcagtttagcatgccgcacatctgcccctcttcatacagtgacttccttgcaacggttgcgatgaagcctggcatgaatcgagtcgggactgacgtgctaactccaggagttaccacgccggctccagctcgggacgagtgncaagaggctctcatcattccgacgggacggggcgaggcgtgtgacaggccgcctgctgccacgtaacncgcgatctgaccggtctgtgaccggtcacacattgcgaccggtcacggaccggatatgcgtgcgccgtgctgcattaaatgcggcatggcgcgcttgtccattccgcaataaatgtggtttggtgancgccgctgtgcccacctaacccacacacgtggtccaataccacagggggtcggggcgcccagccctcggggccgaaacaggagcagcccgacccctcggggagacagaggagggggtnggcacgtctccctcgggcccgacccccccgagggggtcaggccacgtgggtgaccgcggctgcccaagtctctagtcatgatactcccggtcccatgtcaccgacactagtatacagaaaactccatactgttctgcacctaagattgggcagctttgagtgctttagcggccacatgcttaagaagtcacgttgcaccgtgccaggtttaagtttttacgttttggaacataggggctgtttggtacagcttcaactcctaaatattacttcaggagttgagtctggagtggagctgtggagctgcataaacccagctccacaactctagtacattttgtgagagagcttcacccaactctactcccagttttagtggagctgaaactgtttagctgagctccagcttcaggagaggtggagctgaaactgtgccaagcagaaccatattattccattattttatccaacaaatcccaatttcccggtggaataaacggagcacgacaggaacgaagagagacagaagaaaaaaaaagaagggccccaccaaatttacccccactaccgcaacggcagtttccgtattcacctccccatactttcccctcttcctccccttccaccaccacccccacccccacgaacgcaaacccccacaagtaccacctcgcaaatgctccattagctcccgaaatccaaaccacccccctcctcccctcacgggctcacggcctcacccacccaccaacccatccatccaactccgcggcggcggcggcgg

SEQ ID NO: 1871 - DNA, 228 bp, Oryza sativa
tttactaaatcacatgaaattctcgggaactccacatacgtatttcatatatgtatttcatacatatgaatagagacaatttcaacgaaagttcgaatttgccaggggtccaaatggaatgaaaatgggtatataaaagaccaacgaaacgacgagtgagaaggataagggggagtagtaggaggagctttcattgaagtagagggagcataaaaatatgtatttgct

SEQ ID NO: 1872 - DNA, 916 bp, Oryza sativa
gttagaaaataccctctctcctccgttggtggctgacaactttcttccctcttttcattttttttcttttccactctcccccaagtgagttctaccaaccacgagtaagtaaactccaaagctagtagacagtaaattttaaaaaggcaggtaaaaaaagaaagcacacacactctctcttaagcgtcacttcagaggttttaacagcttggttagaaaaggatatcccaagccctaatcaccatgttaaagccatcccatcctaaaatttttcaccatgtcacatcgatcgtttggacgcctgcatatagtattaaatttaggctaaaagaataattaattacacagattaagactactttacgagacgaatcttttaagactaattgctccatgatttaataatgtggtgttacagtaaatatttcctaataacggattaatcaggcttaataaattcgtctcgctgtttactgacggattctgtaattaatttttttatcagtgctcaaacactccatgtgataccctatataataaccgatgtgacacgataaaattttacgacgtgaatctaaacaccctagttaagagagagaacagagataagaaaaaaagaagagagaaagtccaaataggagagagtaaatctagaaagtgggtgtggtatctttcccaagattttcttattcttcttcttctcctcctctctcttctcctcttcttgcacctcctcaccttctcctctcctctcctcttcttctccatcaccatccacccatccaactggtccaacttcctccaatcgtttgcttcttcttcttcctcttctcgctgttcttggtggaggaggagattagggtttgattagggtagatagagagagaggggttgggtttggttggtgtttgtgtgg

SEQ ID NO: 1873 - DNA, 2000 bp, Oryza sativa
  N_region (530)..(530): n = any nucleotide
  N_region (532)..(532): n = any nucleotide
  N_region (1922)..(1922): n = any nucleotide
tgcaagtcgatgtgttaccaaagttcaaattcttgaggggattctactctcctttgaagagctcacaatgagccgagtcttttctgaccctatcctctgaggctgcacaaatgcactactccttccaccaagagtatctcttcccttttgaaggtgagatccgaccttcacaaactccttcaatgtccaactccttcacaaactcctgggcaatagggccaagtggttcagaagtaaactcaaaatcatcaatgtgtatccaactcatacaaaattatttcatctagagggtgagtaaatagtttgaaaaacttcggcactgtagaacccatctaaagttaagatcttcttgcaacttctctttcacaataaaattcaagaaactcaagaaaagatgccggggacacaaatttttgttgttcatcaggtagatttggatggtcattagcctctgggtttggatggagtggcatccccgattctcatgcttggggtgtggaaactatcaattcagacttttcttcttcttntncttcttcttcttcttcttcttcttttgcagtttttgtttcgactaattggactacaagaaataagatggacatagagaagaaatttgtctcacaaccctactgttgtgctttacatatgtaaatgtatttcactagtggaggaagacagcatgcaaggttgatctcatatgctccatggtgttagaatgacttcgctgcttccagtcatgatttaagcatcttaaagtttcagcttttgctatgttctccaaaacgccgatcttcatgtggttaggtgataggtcctgttagtgctcttctcctgtggactgtggtccttggatcatcgaatgcccaattattcaggtcatggaaaacctggtactgcaggccatacgacccatactgccatgtatccccatgatttttattgcctatctgaatcaggtctaagcaaaatcatttcatgaatcctctcaattgtattggtctgactggatgttgggaaggtggagtcttgttgttgggattgaagtcatccaattgcttctcattctcaggaaaaagttctctggtttgcgaggagtggatgaaatgaacaataaggctgcgacagagtatcagcaactttgtcgatctcactgaatgtttggactatgggactgtgaccttcttggttatttgctgggattaatgcttccaatccttcctggcctgacttgcaacgaatcacaaataaaagttccaatggagtaatttaatatccaatcaagtttaacaagcttgcagttcttaggacgaatatcgcacaagttaaaataaggtgcgaaacaaggaaataaccaaagataaattatatcacaattctttggagaataatcggatttcaacttcttttttcactccagaaatctggattgttctatcgattttgaacaagttttgtcacagccgaatctgagaaagtctgtacaggcagacatcacacaagtacatgacaggaggaacatgggaatcctacaacgatgcagagcaagcaaaaagaaaaggtgtgaaaaaaaaaaaggaaactaataatgatgttttcctctgttcttgtttcacttctggcacgaaaccaaaactgtctactatcagctaaaagaaagctcgcggctcgcgacgccgcttctcacgctggcagctcgagccgcaggccgatgcgactcgactccgcgctcaagccgctaaggtcgcagcgcgcctccgccgacgaaggcctcctcgaggcgcgcacgacgagcggctggaacccgagcgtgagctccagcccgacctcctcctcctccccctcttcgtgctccaccggcacggggctctgctcggcctggctcacgtgtgagccggtctcgacctcggtatcctccgatnccgcccgcggcggcgtcacgtcggcgatggccatgtcgttgttgtcaccgtcgtcacatggtcgtcgtcgtcgtggtc

SEQ ID NO: 1874 - DNA, 2000 bp, Oryza sativa
  N_region (388)..(388): n = any nucleotide
  N_region (1863)..(1863): n = any nucleotide
  N_region (1996)..(1996): n = any nucleotide
aaaatcttaaggaagatcaccgttagtagtactagtaaagaaaactcaccaaattcctgtaaccacacagtaacaggatatccttgcagaaacaccagtaaactcgacattggatgaacagaattacagcaatatgcatcaatcacccaaatttcgaatagcatcagatataagcttcaagcagtgtgtaaatatgtgaaactctgatctatgaaccaatccggtagtatccattgagatcggcataagacgagagcatcaaacaaactcaaattcatgtataagacagcaacaagttgtcctagaaactccagtaaatttaaacaccatgtggatgaacagcaatgcagcgatatgccagtaatcactcacatttcgaaaaaccacngatataagatataacatttcaaacgctgtaaactctgaattatggaaccagtgcaggagcatccattgagacaggcgttgaacaaacagcaacaagatcaaatgaaacgacagtagaactgtagaagcatgcatcattgccaacaagaactggaattcaagatacagtaaagaaaacaggtattcatctttggaatttccagcctaaacaggcacccagaagaagactgaaactcccttgaattgctcaaagctattggccaaaaacactctcctgaacaaggtccacacaataatagatcaagaggcatctcgcaaggcaagcaccgaaccatggtattcgacatgcctggcacgcatcagaatcaaacgcaggcatcaccaaattcatcacaaaggttacatgacgatcgatgcaagtactaacttcccagttcccagcaaattaacagtgcagaatattgctaacacatagcgaatatactagtagcaaaatagtactaattgcagatcaactacgcagtaagtacgatcatgtagcagagcccaagaaaagcggaggcagagtcgagtgggggtcgaagcggaatcacagcggggagaggagctgtccgatggagggcttggggtcggagttcatgccgatgacgatgacgagggggatgaagccgtagtacgccgccaccttcgccgtcttcatcgtccacgtgctccacttccgcaccgagcgcctcgccgccgccgccgccgcccgggacggatcctccgcggcgggcggcggagcgccgcccctcctccccgcgggcttcgtcctcgctctcagaggcccctgcgctgggttcgccatggcgtggggtggtggtggtggtggtggcgccgctccttcctcctcttcgtcgccgtgcgggaaaaggtaaagtgaaaactaaacaaaaccctactggagcactcggcgagagcgagggaagagagctgctcttgtgggccttcggacgtaagcgggctggtccggtggagaatacctgggcgcgtggagataggcgctttgcgggaaaaagtgcacccaaggtccctcaacttgtcatcgaattacaaaattgtcccccaaccacaaaaccggatatccggcgtcccccaactaaccacaactggtcatagtccctcggcggttttaaccccggtttcgtcctatgtggcggctgactcagcgtgggacccacgtgggccccacatgtcaggctgccacatcagccttctctcttccccctcctctctcccttcctcatctctctctctcccttctctaactcagccagcgggaggaggagggcggcggcagccggcgacaggcgacgtggggggaggagcggcgcgcgggctcctccgccggccgccgcccacgaggcccacgaggcggagggacggcggagggtgacacggcggcgacggcacggcatcggcctcgtcggaggcgancgcggcggccccaccctcctcgaccgcgcggcgcgcgcggccgctgaggcgcgcaaagagggcccccgccgtggcgtcgaagtcgggcgtggagacggcgaggtgggcggcggcggcggcaacggcgggggtnggga

SEQ ID NO: 1875 - DNA, 2000 bp, Oryza sativa
  N_region (734)..(734): n = any nucleotide
aacattcgccacccgaatatggtgcatctgttgggtgcttgccctgagtatggctgtctggtgtatgaatacatgccgaatggcagcctcgaggaccgtctcttctgccggtcaggcaccccaccgctgccatggcagctccgtttcaagatggcagtggagatagccactggcttgctctatctacacaagatgaaacctgaagcctttgtccaccgtgatctcaagcctggaaacatcctccttgacaaagatttcgttagcaagatcagcgatgtcggcctcgctcgcatcattccccggtcgatggatgagacggtcacgcagtaccggatgacagatgctgcagggaccttctgctacatcgatcctgagtaccagaagactggattggtcaccacgaaatccgatgtttatgcgctcggcatcatctatcttcagatgatcactgcaaaagatgcaatggggcttgcttacatggtctctgatgcactggaggaaggaacatttgaggggctcttggatcctaatgtcaccggctggcctgtgcaggaagctcagaagtttgctgagctttcactgaaatgctgtgaactccggcacagagaccgtcctgacttggaatccgtcgtgctccctgagctgatccgtcttcacacattcgttgcatcatctggagataattcttccatcgaccaaggccaccagcgttcagtcagcgacaaggtaaaacnaaaaaaaggaaccatcttttctctgcaaattctcaaatgaaggcatcaggatatctccaatatgtgttctgaacttctgaagttatgggtgtttcatctagactaatattgttctactctaaatgcaggagttggctctggaaaatgacttggccgagattctgaacgatgggctagtgaagggggcgtcatttgcagcataaaagtgcaaggggccagtagatgttattctgtcaaagatactggaatctgcagtagttttgattttgctgtaaatactaccctagcccagaaatttttgaataattagatcatttgggaaacgtgtactaacaacaacctgtaaattgaacacaatctatagctctcatctggtagcactgttcacttctatcaactgccaatgggatcaactgaaaccgatttgagcaagggcttgagatcatgcctttatcaggatcaggaatgccagaaatcttttaccctgatatatcacattcttcaagactgttgtataaagaaaagcttagttgttgaactcgcaatatcacaatgcatttgccaaattgtgcagaaagatgcttttacatgattggatgacaaagcctatttcgttttgttgatcataacaagccaaataaacctactgttttgaatgatgattaagtccaccatcaaatcaaaccataggtgatcaataaattttctgttggcggcctgcatgattacatgctagtggtatggggggaaaagatcggcgatggcaccaaaggaagaaatcaccaccattgctctggtctctggtcccatcgtccactacagacaaacaacttccatgttgaaggcttgaagccaccgtttctctagaccaatgagaaaaaaatgatcaatgagattttttttttcatcacgaatttatatgagagatagtttagcaacattgacatttcctttcacctcatttgattttctaattaaaaaaaactgtaaaatttgtgttttccatatattatttagaaaatcgataaaaaaaatctagcctctatatctaaaccggatgtacacagccaaagtattttccacatttgtcccattaaaactcatcaacttaccaagaaatgtaaccattccccttgataaccacgccaaaattttattcacaatagtatgtttttcaagaaatagatttgaacccatttttatgtttctaaaaagggacatatttgaaacacccattttgttaattgttataaaggaaatggaaag

SEQ ID NO: 1876 - DNA, 2000 bp, Oryza sativa
  N_region (1840)..(1840): n = any nucleotide
catattgatacaggtagcaatgccaatgacaaggtcgatggtgagtcagcgacacatagggagtacaaagtggcgacgacaagccgcccaagcaatttttgtactagtccccggctttataaatagcaacccataaagcttggccataaaaaaatgtctacaccatacaaattagaataatacacccacttctacttggagttgccacgaagccctcccacctcccaacgtttctcccattgttcatcacctccgtgagcacaagtgaccttcctcccaagtgttgctactaaacctacttggctttccactattttgtcgttgacaaatcacagcctcctcccttgttagctaaaatccaaagccccatggctcgttcccaccgtttggagcttgaggacccatatcatggcttatgtgcactcaatgcttggccttctatcctcctctctgcagctggttagtacattgggatttaaagttttagcttaggctaggcttaggcttggctccaagaaacttatggtttctcaagccccgcccaaaatcttgtatggcccatgaccatgtggagttacctatgtgccatgattacaaatctatagtaaatatttactagaagtacatgatgtccatagcgctatttagttggattgtgttcggccgttatccatttatatgataattgatacatgttgagttgggatttctagcttaatcaacgagccctatctatctatatccggcaatgagctgagcttgagtgaacttggatgcctaggctcaagcccaacatgttttccctttgagcttccaagcaagtttggcttgagctcaatcaagcttgagctcggctgatgagtagaataacatatattttaaggataatatattgataatcatattaatagaagaggagaaaaataataagacaaatacacgatgccaatacatactacctatttgtgtggatacttaatgtgtagtctctctactagtttttcagacaagcaactagactgatttggaacttgagctttggcttagtctcacgctcatttgtagcttgagccaagctcaaataaagcctagggcgagttgagctcgagctattcgtgagtctcaagctattttgatagccctatatatacgaatattagctggataccgagggagttcccatgtttaaaaaatgtagccagttaggtggtttatattgtcgagaccatagatcgtatttagagtttgtacttttaaaaaaaacatgcaattgaaaatattgtgaactctttagtttaagttttaaaaattcaataatccaaaatttggaatagataaatatgaagttgtacttaacataggctctcaattttgtattttagtcatttaattatgaaaccaaaattaataattactagattgtaactgacgtgcactaaattaggctgtgtttgaggagaggagatagaggagattgggaagatatgcaaaacgagatgagccattagcacatgattaattgactattaagtattttaaacttcaaaaatggattaatatgatttttttaaagcatctttcctatagaatttttttgcaaaaaaaacgcaccgtttagtagttcgggaaacgtgcgcgcagaaaacgaagcaaaactcactcacaatcatctagatcacccaggaaagaacacagccttagtgttggcaactagtaagaagaatgtggtatggttcacttgatttgactacaagatggtaaagacaccgaaaagcaagtcctgaacatgaacgctaacaataagaagattaaatcaaagcaaagctaaagctaaagcccnaaaaagaaaaagcaaatgatgcctcccagctctcactcgaactgaagcaaggtatcaatctccgtgtaacttgagctcatgctatatgccgacgaccttacctagcatgtaatgctcttacacacactcgtctcgatcccgtctcgagtgaccaccatag

SEQ ID NO: 1877 - DNA, 1952 bp, Oryza sativa
  N_region (1)..(1): n = any nucleotide
  N_region (3)..(4): n = any nucleotide
  N_region (10)..(12): n = any nucleotide
  N_region (15)..(16): n = any nucleotide
  N_region (20)..(20): n = any nucleotide
  N_region (24)..(25): n = any nucleotide
  N_region (28)..(30): n = any nucleotide
  N_region (33)..(33): n = any nucleotide
  N_region (35)..(35): n = any nucleotide
  N_region (43)..(43): n = any nucleotide
  N_region (53)..(53): n = any nucleotide
  N_region (56)..(56): n = any nucleotide
  N_region (58)..(58): n = any nucleotide
  N_region (62)..(63): n = any nucleotide
  N_region (72)..(72): n = any nucleotide
  N_region (75)..(75): n = any nucleotide
  N_region (82)..(85): n = any nucleotide
  N_region (87)..(87): n = any nucleotide
  N_region (90)..(91): n = any nucleotide
  N_region (98)..(98): n = any nucleotide
  N_region (101)..(101): n = any nucleotide
  N_region (104)..(107): n = any nucleotide
  N_region (113)..(113): n = any nucleotide
  N_region (120)..(120): n = any nucleotide
  N_region (123)..(124): n = any nucleotide
  N_region (126)..(127): n = any nucleotide
  N_region (129)..(130): n = any nucleotide
  N_region (137)..(137): n = any nucleotide
  N_region (139)..(142): n = any nucleotide
  N_region (154)..(154): n = any nucleotide
  N_region (171)..(171): n = any nucleotide
  N_region (174)..(174): n = any nucleotide
  N_region (187)..(187): n = any nucleotide
  N_region (198)..(198): n = any nucleotide
  N_region (202)..(202): n = any nucleotide
  N_region (204)..(207): n = any nucleotide
  N_region (212)..(212): n = any nucleotide
  N_region (217)..(217): n = any nucleotide
  N_region (229)..(229): n = any nucleotide
  N_region (232)..(232): n = any nucleotide
  N_region (234)..(235): n = any nucleotide
  N_region (242)..(242): n = any nucleotide
  N_region (253)..(254): n = any nucleotide
  N_region (257)..(257): n = any nucleotide
  N_region (262)..(262): n = any nucleotide
  N_region (270)..(270): n = any nucleotide
  N_region (274)..(274): n = any nucleotide
  N_region (276)..(276): n = any nucleotide
  N_region (279)..(279): n = any nucleotide
nannaaaacnnnggnngtgnacannaannnagngngttttttnaggggggggnggnangggnncccccccanggnaaatatnnnntnggnngattganttnaannnngagaantattacnagnntnncnnatagggngnnnnttttccaggggnggtttaagggacccctntgngattaccctttgngggattattgngagnannnnttaanattgngggatttttagnagntnnggtttcnaagtccctttnngantaccntttagggncaanantgngaattattcggaattaaaaataagaaatattagaaatagagtatagagtccatataggaatttaaaactaactaaaattcagaaaaaaaaaaggagcctccacgttcgttctcatgacctagaaattctcacattaatcggagaaaaagaaaaggcagagtccatattaaaatacaatttagaaatagctaaaatttagaattaaaaaaataaggaatattaaaagaggagactatagtccatatagaaatacaatttagaaatagctaaaattcggaattataaaataaggaatattagaagagaagactagagtccatatagaaatacaatttagaaatagttgaaattcagaattaaaaaataaggaatattagaagaggagactagagtccatatagaaatacaatttagaaatagttgaaattcggaattaaaaaataaggaatactagaagaggagactagagtccatatagaaatacaattaggaaataaccgaaattcggaattaaaaataagaaatattagaagtagagtatagagtccatatagaaatacaattaagaaaaaaaatagaaatttggaattaaaaaataaggaatattagaagtagagtatagagttcatattggaatttaaaaccaactaaaattcggaataaaaaggagcctccacgttcgctctcatggcctagaaattatcacattaatcagagaaaaagaaaaagcagagtccatatagaaatacaatttagaaatagctgaaattcagaattaaaaaataaaaaatattagaagagcagactagagtagttattacacattagtagttttgaaaagttattgcaaaatttaaaattacgttgtcattgtaatatattttaataatataatgagaaaacatatatgctattatatgagagaaaatataatgatgctagccgcgcaatctgcgcgggccatcatgctagttagatataaataaaaataaccggtaatgcacgtcaatctggatgtgtatatatgtgcacagcaacgaacacctcgcgaagtactgagtgataactaaagtatacagcatgcatgtaccgagaaatgtatacgatcgatcgaccttagagcagacgtctagcaataatatttgtatacaagatcctaatatataaaaatacttactcaatatatatatgcgcagtcagcagaaaagaatggacatagctaggtagctagctgcaaaacaatatatatgtgtgtgtacataaacgtacaaaattggaagatgatgaatatattgatgcgcgactagctagcatgagagtaaatagctagctagtcgtaaaacccttcccaggatgcatgctcatacatatatagcgtgcattatttaccagcatgacagacattattgttaattaacccacaccccatattagcaagcttgcaaacactagtagcgagttaattctgtaataattttagagatatgcatcatatcatatccctcctccacacccaaattaaagctagtgacaactcacgcgatcgatatgatggagcctggaggctggagctgtatatatagacatatgaaccacagatcgatggagaggacacctgcgctatagctagtcgtagttgtgaagatcgaagttggttgtgtgattagatagat

SEQ ID NO: 1878 - DNA, 2000 bp, Oryza sativa
  N_region (471)..(471): n = any nucleotide
ccataaagttaaaacccactataagtctaaaactcaacatacaactatgccacattatcaccatctagcaataattacatattttacctcatacaaacataaaacatcatatacaatttatttaattgtacaaattaacattcaagcatatttagtcatcacccttcatatcatttgcacaatattttaacaaatctatctatcacttttacaatatttaacatatacttatcttatcaatatgtttcacattaaagcacgggtatcatttgtctaattaaccctgaatggtttcattatttttttccattttactcctaacttggattgtcaaaaaaaatattgagaattgcttagtgattcccggcaacacagtgccggggaaatcacctagtatttcgacgataagtgcccttgatttggtcactttagtggccacactgtcgttagcagggttggaaattttcgganctggaaatttccgaaatttcagacccctccgatacttttatgttggccgacacttctctttttaaaattttttttcatgaactttggtgatatttgttcaaatttaactaaattctgtttaaaatttcagaccgaaatttctaaaatttcagtatatcggtgacctccgatcaaactcggctaaacccaaaaaagtaaaccctggtcattggtgctggatgtcacggctaccagtcctcacctgggatttggatcaggtgcatgactgcaacttaagcagtagcagtacacatcattggatacaagatggatggcctagatcacgcattgcactgtttacatcactgtagcaataaatactgtagcacggagtactgttcatagggttttttgaccgggaatattgccagggttttgcccagtagtttaaattttagaaatagaaatatttacaaagttacagggggatatacaaaagaaaagaaaaggtcataaaaactttagggtctgcaaccaatcagaaacagattgtttaagaggatctttcattctgcacagatgcataataatttctttcttgaagagcaatttccatgattggaaggtaggttgtatattttggaaaatgagtcacagggttattgtagctttgaatctaaaccgttgatcgaaaaatggatgaccaaagttagtgcagtttttaacttaatgtgactgcacctgatccgaattccatcacctgcatgatagatttggtacccggatataggagatccatcgctcaatgatattattgctacatacgacatagtttgtcaccgccaaatttcatatctaccctattactagttgtaggtctcgactagacgagctcttcagtgacggatcaggcaaaaagctgagacgtgccttgagcttttttcttttttggtttcatctctctccatagaccatgctctcttggctgtgtacattccgttggataaatggatgctctcatctaagtcacccaggtcttgtgcaagaaactgttacgcctatcaggctactgttgttgttcttcctcttactgtgcactgacttagctccgaggtggacgcaccaaggccacttgccaatttgccatggtggagcgttggaattgcccttacatgctacaagaaaaaagaaaacttcggtcaaagcattaaccattaattagagtttacaaaccaacaaactcatcagtcatatagttgtaccctccaaaacccccaaaagccaatgttacatccatcttccactttttataaaccccttttgtgtgtacatgttcactacaccacctttctctccttccctcttgtgctcctccttatcttctatctcttcttcttcccctatcttttcttctaaagaacatctgcaatctccagcttcttctgttctgaagcagtggctttttgtggtttatgcacaccattggcagctgctactgtttgctgcttgtgttgtcagaagctaccttattgtttcggtcatcatcggcg

SEQ ID NO: 1879 - DNA, 2000 bp, Oryza sativa
  N_region (651)..(651): n = any nucleotide
  N_region (751)..(751): n = any nucleotide
  N_region (753)..(753): n = any nucleotide
tgtgtttccccttgctgcccgtatccgattccaaactgtggttgcccttgtcgacccatggattgatgcaaactttagtttttagtaataatagcttttttttcttttcaactcgaaattttgaaaatattttataggtgcgcattaaagaaattcaataaaaacaccgcattatcgaaagtgttgtcagcgtgaatctaatgatatactccgtagttttaatattatcaaactatgtagctttgaacatatacttagttgatatgggcagataggctgcagagcaaaaaaataaagaaagaatggaggaagtagtataacttagcatttgttattaggaaaattaatactaactctataagcaacttgaaaccatacctaatagttagttgaaaggggggggggaattaggcgtggtgttaatgtcaatataaatatattagcaaacacggagtaaaaaaaggaagcccattaattcatacgatggcatccatatgtaaattgagaaatttgcaccagctagctacaaactctacaatactgcaaataaacttccgcacaactatattatcttcgattattttgccgcttcttagaaataccacaccatggtcgactaattcaccacttcttagagaaatgttatgtgcncataggcatgaaccaattcacattgttgggtagacctaacaaattgcctccacctgatgtctctctaaactccaaaagccattatccatggcagtgccananactccccccccccccaacatcatgtacaccatcttcttttaataataatattattattacattgatcaagaggggatatacagtaacagaatccacttgcattgcattgccattgcctctctcacacaaatcccctctcatcccacaggaatccatccgccgtagctgtattatagtaaccttttgccatccgtggcttcctttggttggctacttgttgacacgtaaaatttattcacgcaacaacaatgataaccgtcgtgctttcgtgacgacgaacgactagttttcaagcaaactagcaaagatcttcactttcgtggaagaacccgactgattttcagcgcaaaccagtaaaaatcaaccgcaccctagataactaggatttggccaaataaacaagagcaaaagtacgatgaaaacggtagaagaaaataatataggatgataattgttccagagccctaccaagtgcaaaatccatagtatatagtaaaggaatacgctgtactacatatatagaaaactctaggtaaatccgtgattaattctatctaatcaaaaccgtccttttttaacaacagcttccatgcagacgtatacacgcctcagccaaaagtcgcctccatcctgcaacgctgctccagcccaagtttcagaatttgtctccccttgctctggcaacaatgtgatcctgtgtggctagacttcaacaggcatatcatcaaacatagccttgcatccaaccccagccacataaaatcaaccactaaagcctcacatccattgaatcggcaaaagctccatcgctgcatgctagctgcttgaactgacaaaatctgataattgcagcctcccaagtcccaaccttcttctctagtttctgcagctccccagcaactcgtacacctcccggtgcatcacaaattcctgcccttgtcaagctaaccaattcttaagcaaaccactaaaataattacaccaactattctatataatttggcctgtctaaaatgacctaaccaaaagccaaattatgctactaacactactaaaactggaaacggccatccgccggccttcttatagcctcttttccacaattgtgacctccaacctctcattcgccagtacactcccctgagctccccaattaatcctcccattaatctcgccattaattagccacacctgcaaatctcactctagctcctcgatccattcatctgtagcttagctagctagat

SEQ ID NO: 1880 - DNA, 151 bp, Oryza sativa
  N_region (3)..(5): n = any nucleotide
  N_region (7)..(7): n = any nucleotide
  N_region (31)..(31): n = any nucleotide
  N_region (39)..(39): n = any nucleotide
  N_region (42)..(42): n = any nucleotide
  N_region (44)..(44): n = any nucleotide
  N_region (49)..(49): n = any nucleotide
  N_region (53)..(53): n = any nucleotide
  N_region (57)..(58): n = any nucleotide
  N_region (65)..(66): n = any nucleotide
  N_region (81)..(81): n = any nucleotide
  N_region (130)..(130): n = any nucleotide
ccnnntngggacttttaaagggcctgacttnttacatgnccngntcctntagngttnngggcganntgtacaaaacccctnaatggattggctctcatctcatcgatcctgctcacccttcctatctctnctcctcctccccaccccaacg

SEQ ID NO: 1881 - DNA, 2000 bp, Oryza sativa
  N_region (1313)..(1313): n = any nucleotide
  N_region (1357)..(1357): n = any nucleotide
  N_region (1381)..(1381): n = any nucleotide
  N_region (1425)..(1425): n = any nucleotide
actactccactctacttgtcacgtgttttgcaaaatgcaaaatgcgagaagatgcagtaatatactccctcggtctcaaaattactccttccgtttcatattacataagtcgttcgatttttttttctaatcatactttgttaaatttgattaaatttataaaaaaaagttagcaatatctaaaatatcaaatcaattacattaaatctaacattaaatatatttcgataatatgcttgttttgtgtcgatgatactgctatatctttttataaatttgatcaaatgacttataatatgataaatcggaggaagtaagagaatttgatggatcgtatacatcatacacaagtacacatccaattaaaatcgaaagtcctaacgggcgatcgatcgctgggcacgatcagtccccctccccacatcgatcacccccttcttcatgtgattttcttttttggcaccgtattactttcctattttaataaatttatacacctaaagtttgtgcacctcaagtttacacatctcaagtttaacagagaccccaaatttataagtcaaaagtttatatatccgattcaaatttgaatctgaattcaaatattttttatatatagtatttctatacatctaaatattatacacctaaagtttatagacccaaagtttatatatccgatttaaatttgaatttcaatttgaatttaaatattttttaatatataattttttctaacgtttgttttttttatttgtttaaaaatttatggtgtagtaggaagagaagtaggggaggaggaaggggagaggagtgtgtttagggggatggggggtgacacccgcgcattagtactacccaattaaaatccctttatgttatgaatccaattaaaggaggctgcaggtaacaggttacgtagagtgggccagcaacaaatattgggcctggcccagtggcagctcagctccaaatccacaagcgcctagccggagcagcccgaccgccatggcactcctcgccgccgccgccgccgcccgccgcttctctcgcagcctccgccgcttcagctcctatgccgcgtctggaggagaagaagcaggaggagtgcccgcgggcgtggtggagcccggagtcccccgtccgcgcgccgccggacgagcagttcgctgcgtgggtcgcgcggctccggcccgggctttcacggccggggggaacctgggcccgaaggcgaatcctccctccgcgaagccgcgaacccggggaccttcggcggcttcggcggcttctttgcccgggttttcggcaagggnccgggttctaactcggggggctgaaccggggcttcttcgggcgncgccccgccgccgcggagaacctngtttacgacgtccttgccggggcttcggccccgacctccgggtnttcaacgcctgcctccggttctgctgcgcccgccgccgcctcttcccggtcgccttcgacatgttcaacaagatgcggtcgctcccggcatccgccgcctgccgcccggacgtcgagacctacacgctcctcctaacctccgtcgtgcgccgcgtccgccgcccgccggcgtccatggtctacctccacgccgtccggtccctctcccgccagatgaaggcctccggcgtggtcccggacaccttcctcctcaacctaatcatcaaggcctatgcccggtgccttgaggtagacgatgcactcaaggtgttccgtgaaatgccgctatacggctgtgaggccaatgagttcacctatggctacattgtcaaggccatgttccagaagggcaggactgacaaaggaatggtgtactttcgggaggcgaggagaagggatttgtgccgactggtggcgtgtacatgacggccgtgtcagcgctagcgttggagtggagatttgaggaatcaagaaatgttcttatagatatgctggattgcaagaggaagccagatatgatcacctacaggacactg

SEQ ID NO: 1882 - DNA, 2000 bp, Oryza sativa
actttaaatatccatgcatttattgaataaaatcccacatattcaacctccttcctccacagtgtcttttctccgtgagctacactggccctaataaatgtgcatcttattgttcaaactagtaaaacagcttcttacttaaaagcatgcaccaaaaagggcaatcaaaattcaatatgccaagtaacaaggccaccaaaattcatctatacaaaacgacccctgcatgggtactgttttataacgaataaccaagtattcctatcttccacgaatatcatccaccatataataaataaataatcagccagcaacaaaaccgccatgcttagtgaccgcggcgttctgaagaaaatcacgcaacgggcatccaagcgtgacgccagtggggatctgagctccattcaacctaccaactgagctcggtaccacgactcccaacacacctccgcgaccccagatcaggatccacgcaacggcaccaacctaaaccccccctccccttcaaaaccctaccgccacccgcaaaaccccaacccgtagaccgccgaccccatcccaaccctcaaaaccaagccgaatcacccaagccatccagcgcagcagatcgaggaggccccgaaacccgcggcggcgcgatccggcccacgacgatgggaggggatgatggtacgaaccggagaggaggggagattcggggattggggcggcgggatccacccccagcgcggagggagggagggaggcgtcgatcgcgcggcggcggcgaacgcaggcggcggcggagtgaggcggcagagctccgcgaggctccaccaccacgcggccgcacgagcggaggagtaaggaggggtggggataggagaggaggaggaagctggtctctcgttaacctacctcgcttgggtaagtacggttttgcccctgggaggaggtgaaatcgctacgtgcactgcgcgtgccacgtggggggctgaggcggatggatgggcccagggcgcagtgagggtggtttgacggtgtggcttaatgggccgtcgagtgggcagatggacatctgccgggccaccgggagcaggatggctgggctgggctcagcttttaaacatgtacgctttgaaaaaaaatccaatctggctgaattccatgattctgaaggccgatactctagaccgatgatgacttcggagtttaccaactttcactattaacacctaggcacgacctcttacgcatggtgataagatgacggaagaatgactacgcttttaagggactccctccgtttcaaaataaactaatgtatcacatcttatattatagattcgtttattttggaacgaaaggaggagtagcagagaagagaaatgaaaaaaaaaatgcccaggcgtctccaacccaactcaagctcaataggtaactctccagcccatcaatgcgggaatccgacccaccaaccaccaccagtagatacctttcctcttgtcccaaccaccaagcaatcgaaccagtacactaccagagtctagatacactgccgggagtggattctaatccatcccctcgtatacctttttcttccaaattcgatgcaaatagttgtgaaaaaatctgaaaaaaaatgacagtgtagagtataatgatacctactagtccacaaaaattcatgttcaaattcgatctacacatcgagaaacaaaaaagacaaatttagatataaacaatacgctactattcatacgctgaatttgtcttttttatatctcgacgtgtgagttgagtttggaattaagattttgtgaagttgtatatatgtgttgtatgaatgttgtcaaattttttcagaatatttcataaccatttagatggtttttgagcaaacgagggaacattccctcgacggattagaatagtttcccatacactgcccccctcccacgtccccacctaccgcgctgctcacagtataaataagtcccctccaggcgcctttctccccg

SEQ ID NO: 1883 - DNA, 2000 bp, Oryza sativa
tcaaggtgttgaactatacataatgtcaggacggagtttacaaatttactttctgttatcaaatgcaaaacaggcaaatagaggagtataaattctcgtaaattgtatagttctatttcctttttttgttgaaaatattctagttctggaaccttatgtttcctggttgctgggtagatacatggatttgtgtttgttatacatgcatgcccatattacacaggagaaatatggggaattcggcagactttgcatctgctgtatatttggtagttaggtttctttaaagttgccaacttaattattcaagcttcttattgagttgtgcttgttgcttgggaaatgtccgaaggtatgttgggttctgatagaatcttactatgctgtagtgttttttagtattatagtaataatagcattctttcttgagatgccttttgtctcaatgatctaagcaaaggtggtgaaccactattactggcaggatgtgtgattttattgtgtcatgtatttgtttggcttttatacatattgatgacattgagccgttttgttcttcagagtgctatgatcttaccatcagcatatagtggcactgtagaaattgttgataagtatttgattaataccgcaggtttgagcatcgggaagagaacaggaaagattgcttgaggacattgtatgctgtagtagaagatgcaaacaaggccaataagttggctgatgatgctagaaatgcatatgttaaaaacagacttaaggccaatgctcaattcatggaaaggttgaaggtgaagacacagaaattgagggtagctgcataaggggctcctggagctacacgctctggaacaattcctctttcatgatatcagtacggtcattttgcaacaaaggatgcggcagtgagacgtagaacgggagcaaaaatgttttgttgtaatttacatgtgttgccttgtttggacggcctgttaggtttatctttagctgaagctacactttttgaatttaccgtgaccgagcaggcctgtttacatgatcgcatagtgaactggctgtatcctgatcttctctacaaataacaaattgcttctgaaaactcagtccgttatccttggcgaaattcattttagcagctatgttcttaaatgcgagacctataatttcatccgttcgcacaacagatcagggtttatattaccggttgaccactaaattttaagccccatcggtatcacggttttgtctgttggcttcttttgggctaatctccctttgcacatcatttgtagctaaaaaaaaaaaagattatgtcaagtaagaggccttgtgtttgcagttctgagctcttgatgcacgaactcatgaagaggattgtgccaattacatggcttcttatgaggctgcaagaattgttggtttcgacatggatcaccatcagcccataatacttgtgcattgtgaagaagaaatatgagacatgcttttctcattctaagactttattttctttcggcaaagatggatttttttaatgctcttttttatgaattgccatgttgatttcgaactaccaaaattacgaaatgcattctcttcaaaatattcaaatttcgccccttgaaagtttatccatagtcctagggcctgttcactttgatgccatttttaaccttatcaaattttggtaaagttgccaaaaaagggctacatttagtttgctgccaaattttggtaactatataagaaatactgccaaaattttagtaagttaccaaaattttagcatacttgctaaaatttcggtaatgctaaaatttgataaagtttttttttatcaaagtgaacatgcctctatttttaaaaactttatcgattctctcgtgatgaggcagctttgtaaactccgacctccttggcacaacgatgaggtgtacattttctagattagtcctccctatccttgataattacgcacgctcacttctcaccattaa

SEQ ID NO: 1884 - DNA, 2000 bp, Oryza sativa
cttaatcaagaaactcaatttgagaggtttttatataccggtaaatattcgttaccgtattcgttccgtctcgtattcgctccgtatctgtattcgataatattcgatttcatttacgtatccgagttttcgattacgattccgattccgaaaaaaaatatgaaaacgaatatgataaagctagtttccgtccgtttctgatccgtttttatccctagtctctactatactgcaatataaattatcgatacattaccaagagatacactcgataatgagtgtgtcccgtgttcaataacaacaaactcacaatttattcttaaaaaatagttggagggagtcaaaatctcactttttttaatattaccgcattgacctgaaaggtccgcttgcaatcccatttaagttatctcccaacaatcacaatgaacatgaaatattaattcctcttgcataggagccaaccctaatttaccgtatgcttgaaagttagtctctctaatgaatcacacgagtggggatattatgcagctagagaaccgaacttgtataatcattctatatgtttttcttactccagagcaactcttagcacaccaaaatgcctcagagcttcactatgatctcccatcatagttccccacgtttatagaagctcgcccctcttatgatagtaaaaatggaaaaaaaagaaagatcaataagaaataatgagaagagacaccaatgtacttacatgtaaataagaaatgagagataagcatcataagtatatgatatagtgagaagttatactttttagttgatgccaaccatagtagtttgttgaagatgaacacttttgagggctgcaaaagtgctcctcaataatgagcaaaaagattcctaacaaccaaagggaaatctttctgcaatatttttcatgtagtactaacttgtagcggtacgtgtcattatggaagtaaaaacacccaatatacatttctgaaaacgacagtgttctctaagcatattcagttcccaacaaacaatggctgacaacctttacaaccgaattcatcaccaatatttgtgagaagaagtgtcaggactcaggacaaatgctcgaatcaaggccatctctgttgcatgattgctgaagaatattgcttacatgcatatccagcattttcagatgatggaaatctttccaatcagaacatatacactcattacgtttgctgttgacaggctatcaagatgataaataccagccattacacttttggtaattcgcttcgcagtgctctcttctcctagaattgacacaggaaaaaaccaagaatctgtctgaaacctgcacatgaatctgaaagggagaatgcattaggaaaccgatgtggacatgagcatttctttcttttgcaagctgcaaagcttgtgagttgggcaagaaaaagacgcattcgctggcgcccccaattagcaaggagttagagctgcgatccactgaattttcgcagcgtaatgccgtgtgatgtgaagagagaagaagctgtgggtaggtcacgggcccacctgacaagtgggcccatcctagtatccccagcttcactgttcacacacatcaatgcatcaccagctgtagccttcgggccttcggggacgcgtggtgtacgaagagcagtaatgcagcttctaatctcagctgttaagctgagtgattaactcttaagcaatcacttagtagtactgttagctcatgaccagctggtgagctgcgcaaacatcaatttttttttcttctcctcattcttcgtcaacatataagtacagctctatcgctttcttctctccagtcgccacacattcttcgctaccacctccaagacaagttgagcactgctcagcttggcagcttgccatccaggaggaagaagatattctagagataatctagagagatcagttgcgttttgcgaggctgcgtgagagagatcatcattatccagcaaaccacc

SEQ ID NO: 1885 - DNA, 2000 bp, Oryza sativa
  N_region (930)..(930): n = any nucleotide
gcgctggttttgtccaccgtggcgctttgaccttggtcttcgttgctgagtcaccatcgccacgcgaagctggtgggacggagtggggcagcgatgagcggacacgcgggcggagtggcggcacccgaagccggcggggcggcggagccaagcggaggacgccagcctcatcgtcgtcatcttccggcgtagggcggaggacgccagcctcatcgtcgtcatcttccggcgtagggaggaggcgcgggagctggagccggaggcggaggaggggctccgctagaagccgctgctgtagaaccgggagcgcatcatctcgagctccagctccgacgccgcctcggccgcgtcagtttagccgcgcccccactccgccgccgacgccgccttgtcgtccatcatatcgaacgttgacgcggccgcggtcatcgccttggcactccccgacagcgactcgtccggggcggccctcctgcagccccaccgccccctgcggcggcctcggctcttgcgccgccgcttgcatgacccgccgcatgacgccggcggggaacctgacggtgacgagcagcaggatcgccgctcccttcctcctcctcctcctcctcctctctctctcagggcggccagcagcggtccacttcgtcctcgacctcgccggcggcggcgagctgttctccttgccagcggtggcaggggcatgggcgagagaggatgagctcgaggaggatggagaaggcagtggagcggcaccgcacgggccgctgcttcccccgccgccagcgcccgcccgcacgccgctcctcccccgccgcttgcgcccgccggccgtcccccgtgcaattgcttcccccgcctgcgcgcgcccgcaaccacctccgcctccggtactgaagccgccattgtcgtcgtctacttgtcttcatccanccccaaacgttgttgcgcctagatgtgcgccgccgtgtagccacccctttcccctcgggcgccgattgccgcgccgcgccgatgcgctcggccattgcccaagcggagccgaagccgccgctggcgccccctccaatcggcgccctgaccttctcctcccggcgccactcccttccctccctccctcctctgcccggcgccgccccgattcctcccctctgcgccgcctcccggccgccctaccaagccgccgcaccgcgcagcctctctcctcctacgcgtggctcctgcgcgcaaccgcgccgccaccaggctctctctccctgccgccaagctctcccccttccacgctgtcggccccctcttccccaccgccgccggccatcacctgcgtcgccggcgcccatcctttgctgcgcgcgcgtgacagcgtgcgtgaggaggaaaaaaaggcagagagagaaagagaacggcaaagagaagaaaccgtgagaaagagacaaaattaaaagagaaaggaaagaaaaaggaagtgggacccccctgactcctcctccctgtgaagccatgaagggagagagatgtgacgtggcaacttgacacgtggggcccacgctgactcagctgtcacgtaggctaaaaccgggctcaaaaccatcgaaggacctattatcaccggttttggtaagttaagggaccttcgatatctggttttgcggttcgaggacgttttttaatctcggtgataagttgagggaccttcagtgtactttttccacagaagaaagtggaacgaaagcccaaccaaattattatccaggcccagccaacggcgaccacaaaccgagcagataagcccatccacagatcgggtggctcccgtttgccgcctaacggcaacctccccacccaaaaccaaacgccgtcacctctcaaccccgccccaactcaaagcctcttccaaatggccctcacagccgccgtctccgtccccttcgccgtcacccctctccgccgcctctcctcctcgacgacgacgagggctttcagcttcagggtgtccgcggcgg

SEQ ID NO: 1886 - DNA, 2000 bp, Oryza sativa
  N_region (1684)..(1684): n = any nucleotide
  N_region (1985)..(1985): n = any nucleotide
  N_region (1991)..(1991): n = any nucleotide
  N_region (1994)..(1994): n = any nucleotide
  N_region (1999)..(1999): n = any nucleotide
tgagtacttgtagctttagaaaagacaagatgaaaatgctatatgtttgtttgggttcccgatttttggtttacatttgagttagagcaagcagagaaaaaaaagaacttcgtctagtgcaaccattttgagcttaaccgctaaaaatacaaaattaagcacgaagtacccgtacgaagcaccatcactccgaccaatctacatggtttcatttcaaccaaggcatcacaaaaagcaaccttccaaacgatacacatgccaacatgttcagttcatatcacactatcagacagtgtttggaaacaagccaaaatggacccctctaatccattaaacagcaaaaggtgtgtatgtccattaccttcctccaacaaatgcaaaaggcgcgaaccatagaatcgacagcccagttgcccaagacgatgatctattcaacatagaaaaccaacacgcagaagtttcgtatgatgatggatgggattcagattttcagagtttgcgttcggtgttagctaatggtacgctatgagcgatgagatcgacagatcgtcctagatgaattcatcactacctattcccaactttccatcacatcatatcacatcaaaaacttttctacacacatacactttcatttttttttcaaactcccaactttcttcaaacttccaatttttttttaagaactaagcacaccctcagaggaaaaattggtctcacaaactgccaatgtgggtaaagtctggaagagttttaattgaagctataacgaacggagaataaaactattgctcgcagatgaatcagtgacgaacatgacaccgataatcgcttcctttctcatgaatagtactgtttggggaacttatagctgaagattattctagaagttgcacctcccataagctcctctaaatagttcatattttcatttagattatgagaagttatagttatagaataaaaagtaatctactccatccgtttcatcatgtaagactttctaacattacccatattcatatagatgttaataaatatagacacatatatatctatattcattaacatctatataaatgtgggcaatactagaaagttttacattgtgaaacagagggagtagaattcagaagctgagtttttcttcgtattctcacccgttacttagagttggtttggtttgaggcctatattggccttaccaatatttggcaatttcagtagtgtttattgtctatttggtttggagctaaattttggcatgcctaagaaaataggccatttcaacagttaatttaggctattttggcttcaatccaaacacaattttacctttgccaaaattagccatgccaaaagttaccaaaatttgatattgataaggtcaatttagggcacacaccaaaccagcccttacaacttacactttgttcagagcaacaagcctacctaccatgcctcgccgcgggtcgctctcccgagccgaagaagagataagggagagatcgtgcgagccaacccgggggcgacacctgttcccccgcgctgggccccaccgcggcgacgaatcgggcgcgacgccatgcagccgtcgtcgtcgcatcccggccacttgccgtgtgacgacgccggtcaaattttcgcctcgacaacgacgagcacatttgccgcctttcccttncccccgcgagactgggacgcgcgcatccaacacacccccaaccccgtcggagtcgagccgagccgagccgcgccgcgcggcggcagcgctggcgaacaaacaggcccgccgagacagggacttccgtggttgggagcgcgtccacgtcgcgcgccccgcgtcgaatacctcgagccgcacggagctcaaatccgcagcctggtggggaggggaggtgggtcgccgaaagcttggctgagattcgcctcgcctcgccttctagctcgcggccgccgctagcgcgagtgagagactgagagtnagttangtngtgtng

SEQ ID NO: 1887 - DNA, 2000 bp, Oryza sativa
  N_region (1094)..(1094): n = any nucleotide
  N_region (1101)..(1101): n = any nucleotide
caaccttccactattctacttccaaaccgagatttctctcaaccaccctactccaccctccaccaaatgaattgtactttgacaaaagaaattataaatttactctctgcagcaaaatggcacgctgatgtaaaatagtagcaggaaatgtgcaaggtaacaactgcctgatcagtataagttgaaaactccgaaatcatccagctatgggatttatggttgttatagatttaaaaacctccatattgattgtttgtacagaatgatggatgaggatgcaatttcaaaggaatatggttgatctggaccccatgagacaatgcgaggatcactcctgggaatggccaaaaagattctatcatctatggcacacagggctagagtcaagggtgtgaccttagatacagagaaaattaattatccgatcatgaaacctctaagttgcatgcacacctcatgagtaatattttaatataccaaagttgcaatattttgtaagtgaggcaacaggattcactaaaaatcgttaacattaataacacgttcatacatttctaacaaaagggatctcaggcttgaaacgatgaaaaagagaagcgcggcaacaagttacccgtagttcttgggcgcccagaggaaggcaggccccatcaccggagccgcggctgacacctgcgcaaggaggagcatcacggccaccaccgccgcccaggcagccgccatctgatcggatcgggcccaaattagacaccccggaacaaaaatcaggacaactgatgacaaaaaaccgatccgcaccgccaagcacagagatctgagagagatcttaccttggcgcgaagagaagcagggaacccggattggggatttcggactcgtgcaggctctcgccctcctcttcgtggcgagatgttgttgttcgtcgttgtggaagaaggggcaagttgctaaccacgattaccttttttttttcgcgagagagactggcgtgtgggtccggaagtggacctgagtgggccggcccaagcccagacagcattaggccccaagcgtattggggctttttggctgacctggcctgatgtaggatgttnaattttnctttttgaaatttagaggatgtttaatttggttttgaaatttatatgttgcttaaatgattaattaatcagatgtgggttgtattgaatattttcctactggagtaataataatatggaaatatactaacgcttctatgctgtgaactgtgttgcattgcacgtctggagaaacaaacaaatattgtaagaaaaatgtgtaaaaccgctaatagaatatactgatactatggatgaagcttacattacatcataccaagccaatgggtgtaaattttgcttgaagagttcgaatacaccttcgctttctctcactgattaactaacctttattctcaagtttttctcaatgcaggtgagtcatccaaacaaaccctcttcggagaataactaatggagctaaatttctctagagactcaaccagatacaatattcattgtgtgtttttttttcttctcttgagactcaaacaagctaaattattcattatgcatttttcctatttatgcactgctaaaagattactgcaatgttaatcctggagtactctttttttttctgtgaaatttggaggagtgttattgtttcatctaaaattactcttaaaaatgtgtttgaggaaaaaaaatatttgtgtacagtacagcagaagcagactagcagagtgggaccatagggcaacaggagaatccgacaatgaccaagcagtgaacctcgaccaccaacagatgaaggtgaagagcaactgattggccatgagtccagagatagcattgaacacaggacaaacaacctgaattctatctccattgatccacaaagaaatcaagaagcgaacaaaaaagcaaggcactgcattcccctgccactgctgagcagtgagcacaaatcacagacac

SEQ ID NO: 1888 - DNA, 1427 bp, Oryza sativa
  N_region (3)..(3): n = any nucleotide
  N_region (21)..(21): n = any nucleotide
  N_region (36)..(36): n = any nucleotide
  N_region (45)..(45): n = any nucleotide
  N_region (47)..(47): n = any nucleotide
  N_region (50)..(50): n = any nucleotide
  N_region (58)..(60): n = any nucleotide
  N_region (62)..(64): n = any nucleotide
  N_region (79)..(79): n = any nucleotide
  N_region (81)..(82): n = any nucleotide
  N_region (85)..(85): n = any nucleotide
  N_region (88)..(88): n = any nucleotide
  N_region (90)..(90): n = any nucleotide
  N_region (93)..(94): n = any nucleotide
  N_region (96)..(96): n = any nucleotide
  N_region (98)..(104): n = any nucleotide
  N_region (106)..(108): n = any nucleotide
  N_region (110)..(112): n = any nucleotide
  N_region (119)..(120): n = any nucleotide
  N_region (122)..(124): n = any nucleotide
  N_region (128)..(128): n = any nucleotide
  N_region (130)..(131): n = any nucleotide
  N_region (134)..(136): n = any nucleotide
  N_region (140)..(140): n = any nucleotide
  N_region (144)..(144): n = any nucleotide
  N_region (146)..(147): n = any nucleotide
  N_region (151)..(151): n = any nucleotide
  N_region (154)..(155): n = any nucleotide
  N_region (160)..(160): n = any nucleotide
  N_region (163)..(163): n = any nucleotide
  N_region (165)..(165): n = any nucleotide
  N_region (168)..(168): n = any nucleotide
  N_region (173)..(174): n = any nucleotide
  N_region (213)..(213): n = any nucleotide
  N_region (305)..(305): n = any nucleotide
  N_region (1318)..(1318): n = any nucleotide
acnttgggccaagggccggcngcccaggctaacgtnccggaaccntnccngtttcgtnnngnnnccttgccgcgtttgnannggnctncnaannancnnnnnnngnnntnnnacccatnntnnnaacntnntannngaangaangnncgtnccnnaaccnaancntcnaactnncgggtaacggcggtggtgttccggaacattaaccgggancggcgaggcgcgcggaggcgatcaggctggcgtgcagcgacgccgtgccttgcgtcgcatcgtgctcagcgacatcgacctgcgccgcgagnacggcggcggcgaggtgcagaccgtctgcaactgcgccatgggcttcgacgacggccgcgtcagccccgccgccgactgcctcaggaccagcccctgcggcggcatgtcgccggacgactaccaccccgacgacaaagacgacgacgacgaggtccggcataccgagctgtgaactgaactgaactctcatgcgtgaatgctaagatcgatcggcttaagctcaatgaagcccttttgaccctgctattaattacagtagtagtaattaattaattataattaattaatcctactggtgctttcctttttgttacagtgtgctttgtaaattaaatgtcacagtattatatactcactccgtttcacaatgtaaggtattctagtatttctaatatattgatgttaatgaatctagacatacatatctatctaaattcattaacatcaatatgaatgtggaaaatgttagaatgacttacaatgtgaaacgaaggaagtatctcattatgcttgacgtgcatattcgtgcattttttacaacattctcgtagtagattatcaaagaaaaatgataggtagattatctactccctccgttccaaaaagaccttatctaaaagtaggacgaaacataatctagtacaacgaatctgaatacaataaattatgtcccattttaattttagatgggtttttttgacggagtatactgtaataatttagtatatccgataatgtggtatgtgggcctccatttccatggcccataattctcaagtacgacctggcggcccaaagaagtggtaaagccttcggttggtccgtatcaccactcttcacacacggcagtaacaaccaacgctcgagattgctcctgctgctacgatcggacggtcaggatcgcgcagcaccgaccgccagtaactgttttttttttccctcgtggcagcagcggtagcctatctccgtggaggtggaggtggaggcccgtgcgtttggcggccgccgccanggcaacgtgcttctcccgtccacttcttcccaccccccaattcaaagccaaagccacaaatcccaacgcgagcgagagaagaggaggggagcagcagcagcagcagcag

SEQ ID NO: 1889 - DNA, 2000 bp, Oryza sativa
atgttccatgagattattttccctcgttttggaactccacggatggtgataagtgacggagggtctcattttatcgataagaccttttgaaactttttgcaagaacttggggctcagcacaacattgccacttcgtatcatccccagataagtggacaagcagaaacgagcaacaaacaaatcaagaatattctgcagaagactgtcaatgagattgggaaggcatggaagaacaagctacctgatgcatgggcatataggactgcttataagacgcccatcggcatgtcaccataccaccttgtctacggaaagacttttcaccttccagtacagttggaacacagggcgcactgggctatccggacttggaacatggacttaaagaaagccggacagcacagaaagatgcagctctctgagctagaggaatggagggacaaggcctaccacaatgccaagatctacaaggaaagaacaaaaagatgggatgataaatgaatcaagcacaaggagttaaaagctggggacaaggtgctgctgttcaactcacgggtgaagcttatcggacatggaaaacatcgaagtaaatggatgggtccatataccatcgtcgatgcttcatcgcatggagccatcacgctatgcgacaacgaaggtaacatcttaatggtatccaacttagtggtaagtattataactaatcatttccactagtgttggtgaaatatgtgtatgcaggtaatttgaggagaaaacacatccgtcatgtcaaaatgcatctctgcgcattcaggacgcgtttacacggattagtggcccaataagtcaataaaaccatttagaattgggccaaaacataacccaggtggttagaggcccaataagcaacctcccggcccaaggagaggctgggaggagagtttttgggttcggccgaaccaatcatggcgcttcccgccatctgctttcaccgggacggctcggatttcttcccagaggtggttgcagggtgttttagacaattcccatgcccctaaccgttatttggagcctatataaggaggagctcactcacattccaatagacacaactttgagctgaattacaacaggctctattgtatcttttgtacattagaataaggtagagagtgaggggaagctctggaggagtgcccggaagtttggcgctcatccgacttctacctcgacgagtgtagcttcttaggaggaattctggaggagtaccagagttgtcggtacactctgctccaggttcggagaacttcttctaaaaagtaagcatttgtattcctttcttatgttatttaattatttagtctaagtaagatagatttccatctttgcaggttcattgtttagtattcatactaagtgctctagtactaggactctagataaagaaagaagttcctgtacaagtattagagtagtaattaataacttagacgtggtgtctaggttagagattacctttgtttgttgtgtatcccacggatttgtcagaggtaggcggcaggtggtgacagccctgaatcctgtctcagtaatcctccatgttcggatacatcatagagctatagccggaaccacgctggtagaccagcaggggtcgatgcccgaagcaacatataggaaattacctttgcttagcttagataattaaaacacatagaaagtcctctctagcctacctagcctaccttgtccttggattgtcttatccttaggtggattacacacgttccttgagttcgatatccttttggggtcacccgaaggtgaagtgatacagcggtattccgtgcgcttgcggatttatctgtggtcgtaagaaataccaagaaatatttgtatgcatgtaattatggatgaaaaccaccctccacgcgaagagaaacacacctctggccaatctatgggctaactaatcatatgaaactaacataattgaagcgaatttagtatgcaccgtc

SEQ ID NO: 1890 - DNA, 2000 bp, Oryza sativa
cggtagggaagagcccaatccccagtgtcacaggaccacgtacaggagcacccgaggcggagttaccggggcatcgggtcctctcctccgtcatcgcagactaccattgccctctatcctcttcgactgctcaccgccaccttcccatggactgtcggtgagctagagctcgccgactccctcatctccctcctcttctccttttgctgccatggtccacaagagccctctcatcaccgacctcccaccgccgcgctgtctcccgcggacgggcttgccagtcgctgccactctctcctccattgagctcctgggaaagagaggggagaggtggagagatggggaagagaggggatagttgaggagaggaggaggtccacttacatgtggaccacatgttttttaattttctttttgctgactaagatatgacgtcagcccaaaaccaaccatccgtactgtcatggaacttggcttggccggtttcgtctgtataaggggtgaagatttttggtattacggtttagggatgtcaattaaactccacgaaaactgagaggcgatatgtggacttgtttctttctcgttttctcccggaataagttcatctgaggtcccttaacttatcgacgaatccgattttcgtctttcaaccagaaaatcagatataataggtcccttaattatcaaaaccggtgcaatataggtcataaggaggtttggacggcggttttagctgacgtggtgcctacgtggctaatttgactcggtcttcatctaacgcggcattgacgtggcccttacgtggcaatttgatccgaaaaaatagtaaaacccgtgggaaccatatgttagcttcacatacacaataataaaaaatggtgggacccatgtgggccctgcatgttattctcaatcccctcctcttcttcctcctgacctcctctctcccccatctcacctatcttcacctctctcccctctcctccctcctctcaccgacggagatgcggacggcgtggaggcgcgacctcctccactcccgtccccatgggcttaccgccgacagccaccgtgcctgcttcctctgccgctggtcgcaggtgcatctgagcaagaggagccacatgcgggaccagactgtcagcgccatggatgcagctacatggctagggaatggctctaagctgctgccgacgtgcagctcatgggcgatacccttgcagtcacgtggcgcgtgtgttggaggaagcaacggagacggggaggtggccgcgtgtcactgaggaggacgggggcccggcgaaggcaagagcggcaaccgtttctgaggaaggcccgggggcaaaaggcggtgctggagaacggccaccggaggtcgaggcgagggggaagcggcggcgacggcaggaacatccggaggcggtggaggcaggcgtggcgggcgacgaggagaggggtggcggatgcctgtagtaggcccatggggggcgagagtggaggaggctgcgtcttcaagccgtccgtttctccgccggcaagaggagggatgagaggggagagagatgaagacatgggagatggggagagaggaggaagaagaggaagggattgagaccaggggtttatgtgggccccactattcttttttattattgtgtgtgtgaagctgacatgtgggttttataggttttttttttcagatcaaattgccacgtaaataccacgttatatgaaaaaccagtcaaataaaccacgcaagctaaaaccaaaccaccggttttgacaattaaacgacgcattggttgacaagttaagagacaccagatgaacttattcctttttctcccgtagcgcgcgcggcccacagcctacacggcccacctcccgcgctaccccccagtgggcagtggcgacgctatcctctccatccgctcgcggctcgcgctcgcccatccaatccaccgcaagccgaagcgtgagcaaagtgccctcgagcc

SEQ ID NO: 1891 - DNA, 2000 bp, Oryza sativa
  N_region (921)..(921): n = any nucleotide
  N_region (924)..(924): n = any nucleotide
  N_region (932)..(932): n = any nucleotide
  N_region (939)..(939): n = any nucleotide
  N_region (948)..(948): n = any nucleotide
  N_region (958)..(958): n = any nucleotide
tttagactaaaataattcaccaaacacttcaccggttcaccctttgtcctattccgttctgcagagaaaacagtgcttgaggttcagagttagtagaagctgcaactctcagctttgctagctagctagaagcagctatatatcccttatcctcttatcgcctctcaccctctagcttccctctccactgcctccctcgctcgctatctcctgcctaagcgctaagctaagcgacctgcagttctgcaatgctaaggccaacgtagagctgccgcttaatcccgtctcgcttgattggtttctgacaagaacgagattatcgagaggtttcaattcattagcttagcttagctaattagcttgagggacgccagccatggcgcccaaggcagggaaggccaagccgcacaaggccaagggagacaagaagaagaaggaagagaaaggtgcagcttaactgatggctaactgaatcttcttcacttcccatctgaattttcatcgaattcatcagctcggatgattggtttaatttaattcgttttcaagacaaaagttattttcagatgcaaggattaattaattaagctagcttgcctctttcaatatttgaaagttcatattgtttcagtattaacatgtgagtggtttttgcgtggaaatattgatatgatgctgctgcagttctgcccaccgtgctggacgtcaccgttgagacgccggactacacgcagctgacgctcaaggttagcgccggggcgcgtattatctccgtcttctcgcatggatattttcgcgtaattaattaattaatatggaccacccagtattctgaccagtgaccactgtaactgaatatgtactgttccttctattcgatggccttaattgtgcttgcatgttaaacgacaaaatttagtnaantcctctcnagctttnacttgcaanactttcaacntggtttttttaaaaaaaaaggaaaaaaaactttgtttaaagcgaaagtgcctaccacttttctcttagaaacttctatatttatttttttcaattgcacagaaaacgtgtttttcttgtgctaattagcaatggcgagcgaccgagcataagcggcaacttaacaaagctggcaaagaatgaccccactcgttgaaatgtacatgatgagaatttttattttctatacgaacattacacaaaaaagttcatgggcaatttacacatcctaattatttttgagcaagttagcaatggttgtgttagcttaagtacatagtaccattttgtgcaatggcatgtagcctactgattatagtaacctcagtagcgtcccaattcccaaggttttgagttcaaatctcctagtgaattttagattagggctgtgtttagttccacgctaaaattgaaaatttgaagaaaaaagttagaagtttatgtgtgtaggaaagttttgatgtgatggaaaagttgaaagtttgaagaaaaagttgaaaactaaacaagactgggttatttttggggttaaagttccgagtttaaatctcaaatttcatattgggttgtttgtgtggctaaattatcaatttaaatatggtacttataattcgcagtggtaggtgccaactcgctgcctagctcattttgtgtttgtggtgctttgttcagggcatatcaacggacaagatcctcgacgtccggaagctcctggccgtccacgtggacacatgccacctcaccaactactccctgtcccacgaggtcggtcagaggatcccaacggctcacatccgcctcgagattcgtgcccactgacagcctgtactttctccctctctgccaccaatgcaggttcgtggggcccagctcaaggacacggtggaggtcgcctccctgaagccgtgccacgtcagcatcgtcgagggtaagtctgaacgagcaaatcccgtatttctcgaggaccaaaacgcaaaaaaataaaaaactcaccgtctcgtctc

SEQ ID NO: 1892 - DNA, 2000 bp, Oryza sativa
  N_region (1890)..(1890): n = any nucleotide
atatgatctcgccactaaccccaatgggcttgacctgtgtgaatcgctaaagcatctgaggaaaaaaaaaagatctatcggattcgagctctttccgccagatatacgtgccgaaccccagggcctttttcactagctgaggaacactttcggtggagatggccacccggatcttatagtaagtgtagctactagaccttgcagcttcttcgtaggtagcgtacactttcgccatggtgtctatatagctcagcagtgagcgaagcattcttgttggggtcaacacttttttagttttagcctgtaatataagcttagattcggccggccacttttcgatctaactatgatgtgcagatcttggccctgaattgttattgtaagaaatagattagacagagtgctcgccattcaggtgagcaatggttacacgaggacaaacattcttcccccaggaagtcacaaatctcaaaaggtttttgacgggtgaatgcttatttcttttttcttaaacgcaatccacattttttttcttcttttgattagcgatactatttgtgcttaagatatttaccatgcaaaatggcttggagagagagaatgtctggactgaagttaaggattatttggagagcttaaaattctgataagcaactgattagtagccaactttgacaatctggaaaagctgggttttctagtttttgacttcaagttcattttctagattctacaaatacagtttctcagaatctggaccaaaagctagactgttttagatagtttttgattctgatagaagttgcaacagccaaaagctctcccaaactcccaaacaggcccttactatcaagtgtcattgcatagtactttgatagttgatggataggctccgaaaaaacaactgcgagaagagtgttgcttgcacaatatgatccatatacaatggctctgcccatcaggttattttccaaccaatggctcccgtccctttgtcacccctgagatcactttcttggttgaggtggtggctttgatctgacatgttagcataaggtcactcgccacaccaccattgtaaatgctcttaagcagcctctctagcgattccataatggtgagtcagtgacagagcaaaccatgatttgagagaaggagcatatttggaatgctatgatatcttggtttcatacagggttcaaaatttaggtgaagtatctcaaatttccaactgttttatatacaaaacaatttattcgatatacgtttttttctctcttcgaagagaacaaaatacttgcatgaatatagtttaggtccatacatccataccctttttacatgggcacacaatccatgcttctccccacagcccaactgttagctagaagaagagattacatgacatgagcaaaccatcgattctattcttccgtagtgctaccaggatcattgctgtgtgaaaactgaaaagccataacgaaaaattccatagtgctcacgaccaagacgtgtgccactaaaaactaacgagtacacgagcagaacgtgtgtgtgcctctcgagtcacgagctgctgtacaccaggtatgcagatgggggaggaggagagtacgagactaccggatgtaaaccagaaaaaatccgtaaaaaagccctccaaaatactactcctcctactgctgctgctgctgcaaaagcgaaagaggattagctgaaaccgggcaaaagggagggcgtttgccacctatttcaccacacggccgcggcgttttgtgtggccttcgtctcgtgttatctcttctcttcttcccaccccctctctctctccttctcctcccttccgccttcatcatcggcggcaaaccccttcttccatccatttccccnaccgaattcgcgcgcgcgcgccccgtggctgcggcggaggggaaggtgaggacggcggcgggcacggccacggcctccgagccgccgatgagattgcgcgccaccgcgac

SEQ ID NO: 1893 - DNA, 2000 bp, Oryza sativa
  N_region (1214)..(1214): n = any nucleotide
tttctccatgcgcaaatcacagttttctccatgcgcacgctttccaaactacgaatcattaaatatcatactttaaaaaaatataggaaagttactttaaaaaattaaattaattaatttttaaagtttaaaataattagtccttaattaattatgctctaatgtcttaccttattttgcgtattttctcaatcttttctttttacctcctctcaaacacggtgaccaatgagcactgagctaccactagaaacctaaccaattgagctacatttacttcgctagtatgtaatttataacgtagttctcttgtagaatatatgtttgatcattcatattatttaaaactttttacaaatatatggaaatatatagtaccgttatgacaaagtacttttagtgataatagaaatcacaataaaataaataatcataatattattttttatgaaacaataatcagatgtaaattaataacggcgtatattaaaatcggagggagtactctctatttgaaagcacgagcttccgaatatgatctgtagctctatcctactcctctataaaaaaaaattcaaactggtccagattcatccctacagtttgattttttttacggagagacactactacaggaatgattttccttgacgggggtcattttagattgcaaacggcgtgtaagtagttgcgtctgcgaaaatcgtgctccattttcacgtgcgactctttaagatgactgcacaaaaaaaatcaattatcgcaggcgggccacttaataggtccgcatgcaaaaataggcttgttttcgcgtacggacctgttaagtcaccgcacacgaaaatagcctctcaacttttaatccgccgtcgctgccccacatgcacccactctcatcgctatctccttagatcccatctcacacctgctcctcccatctccctctccgcctcctcctcccatctccctatccgcctcctcctcccactcctccctctccctatccgccccctcctcccactcctcccatctcccagcgacggcggcagcatcggagcggattcgttgccggccgccgcagtgaggatggatccatcgcctgtgaccgcgaggggatccgtcgccggcgacagcggggacgacggcggcgggccttaggcaaggcggcgatgacgacggtggtgacggcgacgatggcggtgacggtttttttngtttcgattttttattttcccgtgcacacgtgaaaatcgcgattttcacagacacttcgttccagacgggtggaagattcgcatgctcgaccgcacagaaaaatcattattgcactagtgggagtatatgttagcagatttgtttcgagcctaatcaacttttattatagttcgtgtgtgcgcctggatcaattatttgtgaactagagagagctgtaccaaagctgaacctaagaacctgattatttgagcgggcgtccactgtctagctttactagtactactattgatcgagtcaatgatcgctctactagtactactattgatcgagtcaatgatcgctctactagtactactattgatcgagtcaatgtaacgatctgtttggtggcatatgatgtattcttgatcagcaaaacgtatgcttgagctgcaagccgatgtataatcaaggaaatgaaaaacaatgagttccacttgccatcttgggaccaacaatatcttttgatctctccgaaccagagactaccattaaattagacgagcttcagaatcttctagttcttccggcgaggtgaatggattaactcttttttttaaaaaaaatccagaaacatgaataccaagttcgtaaaacacgagagaatcgatccaccagccgaacgactgccatcttcatcagctataaaagagccgacaaatctaggtgctccgcacagtgatacagatcacttgcgccatcacaagtcgcaagccaaaaccatctcactgactagctcgagctca

SEQ ID NO: 1894 - DNA, 2000 bp, Oryza sativa
atatctcaaggcacgagtgggagagcacggcaacgaacttggagacgtcgacgttgtcctcggccgcctgccgcggcggtcaagagggacgcggcgcccacaccgacgccggggtcggttggggccaaccggagcctgaccgaggcggaggacaccgaggtggacgcggagcggggcccgatctcggcgacggccgcgcggcaccggaaccgccactcgtcgacgtgccgccgcagcttctcctgctgctcgagtaagactgccgccgggagcaagagcaggcagagttaggggagtgagtccaaccgtggtacggagagagagagagggaggggaaccagcgaggtgcttacgtgacgccatcgccggcggcgaacggtggtcgccggccgtcgagcagatgccgcgaggggagggaaggggagtttgaggaaatcttacatccaagcccttgcaatctccccaaattcttcttctgctttgtgttttattcagatgaacccccaaatttacgagaaattgtaagcgtggctctatcctttgatgcgagtgggccgataaggcccgtgaattgtttgggctctttctcgaaatttccagccgattgggccgaaacaagtctcccgtcacggttgccacaggccatccagtttgtccgattgggtcccttttgagttttttttgttcacgtccctcaacctcaaaatcggattcaaagatccaaaaacttatgaaaccattgcaaaatgagtcccttaacggtttggatggcgttttcgtgctacgtgatgcttacgtggtgttgttgtcctggtctttaactgacatggcataggttatcgaaggcccaaagcccatcttgatttttaccaaaaaaagatcaaacgaaattacaaatgcaaagtcaaaatcgttcaaaaaaagaattttcgtttataatggtgctgtttgttgatgtaacagaaagtattgcatttgtttcatttttttttgtccgaactttgtctgaaccaaccttgaaatggacgatcacatgagaatgacctcggttacgtcaatagaataaaagtgaccgaggacgaaagaattgcggttgacctgagcagcatttttgacaaagttttgaccctaagttgttatgttgtttcattggcatctgtcagctttgattcttgcctttgagttgagaatcaacccaatatacatgcatggaacggtacgatcgagtattattagtttattacaataccttctaaatttttattttttctttttatttgaaaaggtaaaaaaacacaagcgctcataccacgcacacactcacacatattttttcaactctgatatcgtttgcttcgtgaagcacggatacagcaacttaattactaaacaaacagtgccaggtgtgcagtatttctagacaaagcaaaggcgcatttgtccaaaggaggggagattaattaacttaagctctctggatgatctgttcctgcttcctggacagaattctcttgccgattggaacaacctagctagcatttttcttttaaatttctatcagcattattcgttgtcaaaatcgtcatcttggtttggacgatcaaatgccacttcgcctccttctcgtacctgctaaattcgtgcacacacatggacaaatactaatagttataatttgccgaatgatttgcagcctaatactcgtagattagcttgggaagaaatcaaatgatgtgagctccaggaaatcatcggatttcttccccctcctccaagaaaatcaaagctaccactccgtacatcaagagacactgacatgtgggccctacagagaaaaaaaatctccgcgcgccaagtggccccacgccatcctagcttcctctcctcttgaaatagccgccgctgctcgtctcagttcgactcttcaggtggaagccacaaaacgaacgcgaactcgagcggcgaagaagaagagagagagagataaggcggcggcagcg

SEQ ID NO: 1895 - DNA, 2000 bp, Oryza sativa
aaagcctgacctggagattaacagaaagctgagttggagcagactgtcacccactctggcatccacaggagatgtttggcagcttgttgtacagttgaagtggaaaatagtacgctataactggaatatgttcggtagccacgaaaattagcttattactaaactgaacagttagcatgaaaagacatactagactttcgttagctaaaaagtgcaatcatcccaggatggagctacatatatagacatcaggataacaagtctccacggtccatgcatcccaacatgcatgtttgtctgaagtatacttcagtattgaacttaacatcgaacatttaggatgtattaatagctccagtagcaggtaaactttcacctgaaacaaagaatctctgtctgatactaataattagcctaactaggattaatgagaactcagtatagtcagtgcaacaataacaatcaagttgcaaatattgacaaccacatcacgatcaaattgtccttcccctgaaggcacaaatcaaagcctgaatacacgcaaagaatgaaaagaaaccagctgagataatgccactgcaagctgaaagacattaccaacagtccaacactgtcattttctttgtctgccagcctgaggagagggagctacaccgtcttcagacactcagagccacataataaaagatggacgaattttagcaaacctccgtcctactatcgttttgaatttttgtttgtaacgtctaactattcgtcttattcaaaatattatgaaattattacttttttttacttactttattattaaaagtattttaagtatgacttatcttttttatatttgtactaattctttaaataagataaatagttaaacgttgtaagtaaaaagtcaaaacgatatctaatttgggaccgagggagtactagcatgccccccatagtgttcttttagagcctataaatttcccatgcttcaagccgaaaagaaaatagctgtagcttccctggaaagaaaaataaacctaaactctctctttttctttaatagtagagcacaacatgggaggtccccactaaagtctcaaactctcttagcttaagagcagcagttttctttttttaaaaaggagaatttttagaggaattttgtaggattggattaattattgtaaaaagcatgtgaatttcttgcattcgaagcaagccttcagtttcctggtgtccaatataatacctagataaggtgtatgtagtgaatttattcctaggagatgtaaccaaattggtcctcggaaaaaaagaatgatcatcttaaagtatgaactccaatatgccctaaacttgcggcacaagctgagtttcagtcgtatcactgtagcccaatcacgacatattatcatctactaaaaggaattcccataaccgaatcgctgatcatgctagacaaacactccgatgaccaaaagactaccagccaagcgttttttacacagcagcaaaaaaaaaaaatacacttgcttctcattacgcacagatccaaaaatgaaaatgaaataaagaaagaacaaaagaaaaggaagaaaagaaaagaaaagaaaaggagagcatatcgtaggtgtgcatgtcagcaatgaaggatttgattgccaagtaaggcgggttgagagggagagatggtggagagaatcaaaaaacgcaccctgcggccacaaatccatcttgtggctctccaccctcctccgtgggccccaccacctccacccccctccctccctccttaaaactatccccaatcccatcgcctcgcttgtgcgaatgaaaagatttcaagaaatccaaccaaaaatctcgcgctctcctctcctcctcctccgcatgagctcatcggcgttggcgttggcctgtcgtctccgggaggagtagtgcaggcggcggcggggaattccgaaacggagtttgttcgttttggagcggagtggtgaggtgagtcgtcg

SEQ ID NO: 1896 - DNA, 2000 bp, Oryza sativa
cggcctggtccaccgccgcttcccggtggggcccatcgccaacgtgccctacttccggcgggtcgccgccgcccaccaggtccggcccggtcgctctccacctaactgcagccgaccacgcatccctgtctctgagcttctcttgccgtggttctgaatttatgtgagctgatccatccttgcctgccattcattcttgcagatacatcacatggacaagttcgaaggtgtgccatatgggctgttccttggtcccaaggtgaggagatgtgtctcatgctattcatgctttgcttcctcgtgccccatgctaccatggatgcttgttggcttactcctgctccaacggtgtccatttgtcgagtagtttgcatacttgcagtactcctttattgcaagcatgaatttgtgattgggaagctaatgtagaatttgaactgtgttgatataaaaggactggaaattttgaaatgttctaagatgtattacaaatatttgtgatcgtcggaaaaattgtctgaaatgttctaaaatgtctctgttttatgtggttgacaggagctggaggaggtgggtgggattgaggagctggagaaggagatcaagaggaggattaagaggaaagagaccttagatgcgatccaatgagagctacttatcacacatttttttctttttatttgctgtcatctcttattagtttttgcttcagtggcaattgtagccttgtaatatgcttttctgtcctgttaatagaggaataatttagatagatatttggaagctcaatttggacggtggagcacacaggtattagaaatgatgtgctggggctgaatggctgatgcttttgctagtactgctggtaatgatatatattaatcagtaccattctgaatttattagtctggttgagtcgtgctgctgacagtgaggtgttcactgataaaatgtgtactttcttttatattctttatttgccgacattctgtatctcttgttcacgagatgtgccggatgtaaatatgaaagtgatgcatggctgattactttttgaccgtgaagaagaattaatgaagcttatgcacactaggcggttcctccatactgctgaatggctgttcattaaggccctgacaagtgacaaggtcacagactgacagttacttcttgaggtcaaggaggttaatgtagtttatcaggattaggttgcaaactgacaaggaagatattgtccgttgtgtttctactcttggtgtcaagtcgatcctcacaggatcacggtcgtggcattgctggtccttggtagaacaaggtagggcaagcgcaatgttgtgatctgggacctttcaaatcagatcctagtgattgtcccctggttataaagaactgcatgttacggttactgcatgattagttaggcataagcatgtgacgaggatcctcgtcgtgatattccgtccatttttcaatgttgatcaagcgtggcagatctcctgctgatctgccagcaactgttgctaggttcagagtttgcttgatcttgtttaagctcttcatcggcgttttttatgtttgaagtcatcgtttaatggcatactactactatactagtgatgtcctgtagtgcattagaaaatacagaatgggccacatactcaaacactgttaccggttgaccaaaacaaggcatatatcgaaattcacacactgcagacttgcagttgttgactcatgtaactttacccttctcttaggccgtgtttagttcacccccaactcaacggttttgatgggcctaaggcccaaatcaacggttttgatgggcctaaggcctgaaaccatgtcgaacagttcgatgggccgaaccatgacgagaaagcccacctgcgacactggacagcaacggcagccagccacagccaactcgccttatcccgtaatccatccatggcataaagctccctcctcagctcccacctccgtctccgcgcacgctc

SEQ ID NO: 1897 - DNA, 2000 bp, Oryza sativa
gtataattttctcctcacggacgaactaatgaagaattatatatgtacacatcaacttgcgagaaaagaatctcctatcggagtagaaaataggagaatcgaatcgcaccgatcacatcatcagtcacatggctccacctccaaggatcaaggctttccacaacaagtggggatatatagcaacaaaaaatgcatttgatcatgttcttttgctaaatatatacttggtccatcagtacatgtatgtgttgattgctgattattacaagtacatatataccaatgcatttgtttttcaaagtgcttcttattaccataaatttatggtagaaacctactccatccgtccatagaaaaataaatctccttcagtctttaaaaaaacaaatcctaaacacgggatttagttttttttatggaatggatgaactataaactaaattaatggtcaaagttcgttttcagagaaaatcacaccaagtcaaatcatgccttataattaagaaaagatacagaataaagtatatatagattggaacctaattactaactagtacctcttgtgccagagacagccaaattatctgtcttttatattcatttttataaatcatgttctgtctattaaagccatattccgattaacgcatagggaaagcaacagggattgcctttaaacgctcatgaatcgccaaaaagaagggcaaattagaatcagccgcggcacacacacggaagaaatgtctttcactgaatcacataaagaatctttctttccattggtttcaaaaaaataaaataaaaatgaagtagtgggatactaaaaccatggacagagagtcatgcactaaaaggttggagctagattgcttgatattattctctctcagaaaagcaagatatatatgctcctcgatcgatcttacaaccacacacattctttccagtgatggaatccgatctttgcaactagctatttggagacagtgactgaatgttctgaaccaaataattgcacttattacagctctttctacaagtaatattttgattgtttgtttgtttgttcttcggattagctagcttatgcataccgcgaccatttgatcattaatattttcttcagatgcagcagcgtcctcgataactgtgagataaacaattgaatatgtaagcggtaactgaaaattattttcttcagatgcagcagcatccttgataactgtcagaaaaagaatcgaacatccatgcagtaatttaaacaggaagtctgaacatctttgtaaactgaacatgatttatgtatgagaagtgcattttcatttcctcgagggaacttcatatcccttcacgcgtctttaattatttctcgaatacaatgctaataattcccgctaaaaatgaactaactgcgaacagggttcactctatcgggacagccctttgtatcgggggtcaccgaaatcccgaaatttcggttcgaagtttccaaccctgactgcgaatacgaacaaatcttcattacgcgttctaactaaacatccataggtggagtccagatatagctatagcttggattggatctttgaataataggacagagatggagatcgatggaacatatgcgcgataaacaagctgaatcgcgacgcgacaggagcaaattaagagatagaaagagagctaataagctagctttagctagcagagatcctccgcccacctcccggggacagaaatgtttgttcctcctgcctagctgcatgctatctctctacctcatcactcacctccatcgttttgacccttctccggaaaagcacaattctcccggccacacccacgaccatggaatcctctctctcttgctgctgcccacacccagctagctgcctataagtagcgcccattctcacactcctcctcatctcatctcagcacacactaacacagccggcctgcaagcttagcttagctagctctcagttaacttgtgatca

SEQ ID NO: 1898 - DNA, 2000 bp, Oryza sativa
  N_region (1524)..(1524): n = any nucleotide
  N_region (1565)..(1565): n = any nucleotide
aggcggatagagtgatggacgttcttcagtttttcttccagtttgcgagtatctatcgcttctaatgtcaacttaaaccagatccacttccaaaagttacatcttctggtttctcttttcctctttatcttgtcctcaagggaggatgccaacttctgtaatgatgcaaaggcacattaatagtgtagtaatagtcacttaagtatggcacagattacaacttctacctcaatgtattaattactcacctgaagtgccttgatgtttccaatgtcgtgtactatgtgatacgattggtatgttcggtagtgctttgagaagaagtggtcagcataacacccataagttccatgatctgggcatagtggaattcctcgaactaaaatggtatattggtcaggccgtttcctgtgatacttcaaatgtgcaattcttctgctggacatttctttgtgctcctggttcaattcaagatgccagtgccacatatgtattgaacagcatagttatgtaatagttgaaacgaaatcaagaatacttgcttaggaataggatagtaaataaaaaatagcaaaatattttcaaatggtgggtgatcaaaatttcaacatcaattttcacaactgaacaggggagaaaacacaacaggatcaattgtaagattgtaacaattggatcaattgtaagatttttataaacacgtaccttatgaagcaaatacaccacatagaatgatatgaagcagaggcatgcaaaatgcacccaaagcctgttgtgacaaagaactaactcagttaagagattggcaccatgctgattgctaggcaatacttatctgatgaactttcaactcctatgtactatcattaacactctgtagtctatcagcttaaacaagatatgccagtgtcccttgtgaaaacttgtattgaaagcaaaacagcttgctctattggagaaaactactcatttaaattggaaattataaccagagagcaattcatgaacgtttgattcacaagaatgggtttcctccactgatctctgaaacactagcattttcgacctgactactctgactctgaagaatacctggagaggagggtgaaaggaagctgcagaatagctaacctgttagaaccccttgccacattggataccgtgaaaagttccattgaatttgaccttttggtgtcttgtagaccttcacaggaataatttgttggtgcaaggatgaacaatccaacgattgagcaaacagcgaagcacttgatcctacattcttacaaagaaattagtaaaatactcctattgagagagcaagcagagtaacattagcaattttctcagagtagatgcagatcagtagaacacattcttacccgaatttgaagaggcggacgacgacgagcgcgtcgaggccgtggcgccgcagcacgtcgtcctcggagagccggagcgcggcgcggatccaccggaacgacggggtcaaccgcccgtggccgagcggcagcccgcccccancgccaccggcggccatccgccgcgcaaggtacaccggcgcnttgccgggctgcttcttgagcaaggagaagagcgagagcgccaccagcgccaggcccaggttgatcgccgccgacgccagcaacccctccgcgtccatccccgccgcaacctccgccgcctcgacaaccccgcggcggcatcgcctctaccacggaaactagtagatcgccggtgtgctggccggagccggcgacgtggcggccggaggagagccgggggtgaaacgtggcgcggctcgagctcgacacgtgcggctcgcgctcaaatggctcggcccactcaccatcatgggccaaggcccatctcaccccgggtcggctcggctcggctcgtgttgcgacgcggctcggctttagccgcggatttgtgtgggcacagaggcgataggccaccatcggagaaggagaggtcgccgaggaagaggaggaggaggg

SEQ ID NO: 1899 - DNA, 2000 bp, Oryza sativa
  N_region (87)..(87): n = any nucleotide
  N_region (1418)..(1418): n = any nucleotide
cttgagctaggaagcaccagaagctcagttctagctgatagaccattaagtgctccattcatgtaaggcctgcatccttttgttttngttttatgtctataattcacagagaaatgaggatcatgcaacaaatacaggattaagggcgaatagtgctgagaaagtgtgaggtctcttccctggccaaactggctaaaaggtgctgagaagtctctccaccgataatttcagctcgtcagtcattcggagcttggtgaagcactaggaaggcactttgcaacattgtatctctagctaagcttcaagccttcaactgcagaatgtgtaagggtgcaaccgtgtacagtaggcttgcacaggtgagatctgtctatagcggtataatagcctaattgtgtatatatgttagccctgaagcgtgtagttttcctcacccaatacctcggtcgccttggcgcgcaaatctttctctagttaaaaggctgttcttagtaatgggaaatggaaaggaaattttgagtgatgctggattgctggttgctccctttttcctccattgagttcagctggtgatggcattctcgtttctgtcatctggcagagaaggcactactgccccaagtgacccatggcatagccagaaacagaatgctccatcagtccatctgatgagatatgtgtgaagaggtttcagctgagctgattatagtgctgtaaagcggcttagcactatgtaaatcatgtgttatgcaccatgtatcatgtatgatccttggaagttctggatgcaaaagtgagttgtgcacttgccatgtaagttctctatgatgaaaaaggccaagtgtactattgtctatgtatatcatttcagtttttgcataactgcaatcggtaaggagtgaaagcctccggatacctaccgggatttgaatatttgatcatgctagactaccccaaatgtgaatgctacattttgtttgggttaagggaattagttatttaaccttgtttggcaactaatctagttagtctagtaatgcgtttggccgtttgcctatcttcataaaaatcgatgagtttgttcatctcacgctgttgactttctctttttttttcggggagtagggttactaatcttggactacaagggtgtgctttaagtaagtttatgataattatttgaggccgtaaagtaaaaagtgtggagtatttcaggaaatgctgatgaataaagttttttaaaaaacaaaaatcgcttagtaagcacgcctatgataatggtgcaccgattgctttttcatcggttgagctacgacttgtaaaagaaaaaattaagcaacaaaaatagtaaaacttttatatatgtattatttgtgaatttaaatttcaagacggaaaaaaaaactgcttttaaaaanccctcacatcaactatataataaaattttagctgttgctgataagttaaaagaaaagtattaaattgtaaaattagtactacattcaccttttcaatatataatatcgttaactttttaatcattcgtcttattaaaaaatttaagtaaatattttttatttgttactaaagggactttaagtattatttatatttctaaattttgtaaaaaaaattaaataaaatgaatggtagttacttcctctgtttcacaatgtaagtcattctagcatttcacacattcatattgatatcaatatgaatatgtgaaaaatatgaatatgtgaaatgctagaatgacttacattgtgaaacggatggagtatatattagtaagaaaaaaaatataagagtgtccccgcccacatcgcatctccggtgccagatgctcgtctcgccttcgccttaccgcaaatacttcggggcttccggcgcacgcaaaaaaaccgcaggttttcttagcattccacagccgaaaaagcccccaaacaaaacagccaagcttgctcggtcgctgcgcgctatctcgcctcgcgacgacg

SEQ ID NO: 1900 - DNA, 2000 bp, Oryza sativa
acaccaacttgatgtgtcgtccattttggagtttcacgtgtgtgttgaattcgaccaggagagctgatttaatacaacttggaagagatcgagctttccgcggttcaagttgcgccgatatgttagcgttggagaaggatgcatagaatgcatacaaaatcttgtaaaatcgagaaacttggaggaatggatgctatttttttcaattgagaatgttccattggaatcaaatccatgtctaatttcctgcaaaacacactaccaattttcatccaagtgcacaaactgggatcgctggggtagaaaatgtttaagcagactatccgtatccctgtctccatggctgtatgcttgagctttggaagccctactaaacccatgatgcatccacatggaaaaaccagcccttatatatctgaataagaatcatgtctgaactctgacgagaggatcgatgatgaaaaaagaagtacataagtaaccacgtacgcgaaaatttaattcatgattcagccatgtctctgtggaaggcaacaactagctagctagctgcactctcagtccaagggcttgggcccaaccacctccatcgtcgcacaaataatccatggctgcctgacacagtgagcccagggccctagcccgaagcccagggtcgtcagacattggctccgacgcttgctagagtaacgtaagaggtaggcagatcatgcagtatgtttcttttccaatgccatccattctcaagtaaactgatgtaacagtgttgctgtagtacgtgtatatgttacaaacacgaacagtgctaaatagaaagcattacctatcacttgccagggatagatctagagtctggacagacgtacgacaggaggaaaatcacttacttggatgggatgatagtttgcttcctgcaaaggatgaagtagatggatagaaaggatgaagtagatggatagaaaaagcttatgaatacgagagtggaagtagccacgggacatataagaagaatcaatactcggttggtggttgtagtaagtatactcccttcagactgataatacttgtcattttagataagggtgaggtcaaactttacaatctttgattatgaatcatttttaaaatatttatctttcatatatggtgattacatgtatagattagtcttaaaaagtactttaataaaatcatatattttttaacattcttatacatattataatgaaaaataatggtcaaagttgtttttttgagaccatgctcttgtccaaaatgacaagaattatcaacccggagggagtactttcttaactttgaagaaagcacggctagaaaagcaaatttccagacgatgacatttttttcaggtaggtaggcctctccgagctaaatgaccacctgcgaaaatgacaaccgtgaggtgaaatcgttgtccacctgcaaaaatacacttaagttgatcagaagttgataactatatataccatgtaggccatataaaggaaactgaacgagatggtctttgtttttttttaacgaatcgcactagagagtgtaaagttctactgatagagtaggaaaaaataacaaaattacaacccttgaagatggtaaccaggaaaaagaaaaaaaaagtatactaccactcacacacccacaacgccaacacatagactcaggagaaggctagcatcagaccagccaccgctaagtgtaaccgacagccactaagccgtacaacggaacacagccgacatcgcccaaaacccgaccattacaactgacacaaaacacagctctatctaaatctttgggattgagggtgagagggtgagagagaagaatgcagccattctccccctaagccctccaacgtggccaacttgcggaagctaggatgccgacataagagaatatgaattagagagagcttgcaccaattgcttgggagattttggcaagggggtgcctacacggcatctctaacgagaggagcg

SEQ ID NO: 1901 - DNA, 2000 bp, Oryza sativa
  N_region (1771)..(1771): n = any nucleotide
  N_region (1882)..(1882): n = any nucleotide
  N_region (1894)..(1894): n = any nucleotide
  N_region (1910)..(1910): n = any nucleotide
  N_region (1957)..(1957): n = any nucleotide
  N_region (1985)..(1985): n = any nucleotide
  N_region (1997)..(1997): n = any nucleotide
ctcaaggaggtacaaaagctaaccggatgcatgacatcactaagcagattagtcgctaggatgggagaacgagcacaacctttctacgctctattgaagaaacaagacaaatttatatggacacaggaagccgaagaggcatttattgcactcaagcgctacctatcaaacccccctgtacttgttgctccccaacctactgaagaattattcctctatattgccgccacgccatattccgttagcactgtcattattgtcgagagagagaaagtacagcgatcagtttattacgtcagcgaagctctccatgacgcaaagacaagatacccacagatccaaaaactgctttacgcagtcatcatgacatcaaggaagctgcgccactacttttaagctcacagagtcaaagttgtatcctccttcccccttggagaagttgtgagaaacaaagacgttgtcggccgcattgcgaaatgggtagtcgagctaagccaatttgatgtccactttctgccgcgaacagccatcaaatcctaagtactcgctgacttcgttgccgattggactatgccagacaacaaatcagacaaccaaggcgacaacgaaacatggacaatggcgttcgatggcgcactcaacagccaaggaccaggggcaggatttatcttgacgtctccttccggagatcaattcaagcacgcaatccacctcaacttcagggcgaccaataacactgcagaatacgaaggactactcgcagggatacgagctgcagccgcacttggggccaagcgactaatcgtcaaaggggactctgagctagtcgcgaaccaggtgcacaaagactataaatgctctaaccccgagttatccaagtatctcgcagaagtcaggaagctagagaagaggttcgatgggatcgaggtccgacacgtctatcgcaaggacaacgtcgagccagacgacctagcacgacgtgcgtccagacgagaaccgctcgaacccggcacctttcttgatatcctaacgaagccatcggtgaaagaagttagcggcgaagttagcccgaacacccccgacatcagctcggaggtcaccgaggcagaacgcgccattgctgacatcgaaaccacagacgactggcacatccaattaatcaaattcatcagcagcaaggagttgcccgaggacgatacagaggccgagaaaataacccgtaaagcaaagatctactgtatggtcggtaacgatttatataaaaaagcgctaaacggggtacttctcaaatgcgtctctcctgacgacggcagacacctcctcctcgacatacatgaaggcatatgtgggtcacacgccgccggtcggacattggtcggcaaagcttttcgacaaggctttttctggccaaccgcccttaaagatgcatgcgacatggtccaacgatgtgaagcctgttaattccacagtaaacacacaaagctacccggcgcaagcgctccagactatccctctgacttggtcgttctcgtgctgggggctagatatacttgggccattcccacgaggacagggcggctacagattcctattcgtggcgatcgacaaattcaccaaatggatagaagcagtgcccacgagggaaatcaaggccgacaacgccatcaaattcatcagagggatattctgcagatacggagtaccgcaccgcatcataaccgacaacggctcccaattcatcagcgccgacttccaagattactgcatcggnttgggagtcaaaatatgtttcgcctcggtctctcaccctcaaagcaacggacaagtcgaaagggcaaacggcatagtactacaagggatgaaaacccgcgtctacgatagnctcatgtcacangacaaaaagtgggttnaagaactcccatcagtactatgggccgtacgcaccacaccgacaacntccaataaggaaacaccattcttcctcntgtacggctccnagg

SEQ ID NO: 1902 - DNA, 2000 bp, Oryza sativa
  N_region (56)..(56): n = any nucleotide
  N_region (1442)..(1442): n = any nucleotide
  N_region (1487)..(1487): n = any nucleotide
  N_region (1514)..(1514): n = any nucleotide
  N_region (1602)..(1602): n = any nucleotide
  N_region (1611)..(1611): n = any nucleotide
  N_region (1614)..(1614): n = any nucleotide
  N_region (1618)..(1618): n = any nucleotide
  N_region (1701)..(1701): n = any nucleotide
  N_region (1859)..(1859): n = any nucleotide
  N_region (1885)..(1885): n = any nucleotide
  N_region (1999)..(1999): n = any nucleotide
accatcttcatctgtgtttgcttgaagcacgcagttattacatgtagttgttttgngcccatcagttacaattttctttggtggtttgcagttctccctgtggccattgacatcactgttaacctccctgaccagtctcatgtcattctcaaggttggcagttgcactcttggtgacatgttttttttttctgattctactgaaactcacttttgttgctaagttaaaccacagagaacacacacacttgacacttctacagaaaaaaaatggattttgtgcctgaatttcgtagtagagagcatacacaaattcataaactcagtctaatttggaatgaaaacttgagtttgtaatattcaaatgtacatcaaatcaggttgttctggtaaatcggcttagttgagctgttttctggtctggtgcaggggatttcaactgacaggatcattgatgtgaggcggctgctatgcgtaaacaccgcgacgtgcgccatcacaaactactccctctcgcatgaggtatttactgtttttcaagttaattaactgagcccttatagtttggtttgattagtttgttgataacatattagaacagtaaaagtctattccagtatctgcttcctcctcctaatgtgaaaaaagataaacagcaagggaactaagctgtcatgtaatccacatgcatgtatgaaactcctttggtatcttggttaaggaaagtaagatccatacatgtataaatgaacacgttcccttacacaccactatgtgaatgcctcatatagtgcggaggcgttgttttagcaaacatactcgtgtattatctttcgagattaaatcccaagacaatatgagcacccgtatcctcctgccaactttagaactgctcgccgccatcctcggactttgccggttggtggctcgctgcccgataaactgttgtgaagatcgatcgcaagacgttcgacgtcggggtcatcctcgttacatggttgatttgaaaagagcgcaacacacgggttttcgagggaacggcctcgtcggtcacgcaactgtgtgcgaccatgtgtgatgaatgggaaacatggaaatcagcagggctagttacctcgttgaatgttgttgcagcgccagctttagagagattacagactttgtaatttgctttttgttgtaaaggcggtgctctgacacactgcatttgtacagtttttcccttttccataatatacatcggtcggcattctacgccgtcccggcgaaaaaaaaaactttagaacttgtattttaatctaaatatccacatgtcaaaaccttagtattttcaccataaaacttatgttgaagtttgagccgaaaatttcacacttcggcctttttaaaacttcaaaataggtccttaccaaaaactattttgaaatatgttttgcaaaaggnccaaaatttgaaattttcgaaagtttgagtgtaatgccgaaaagnaaatgaacttgatagatcccaaatatntataagctacaaatgatgagtttgtaatgctatgtgaacaatattcccctaatttttgattatttttttcagctccgtgatggtcgcntgaaggatngtnccgnatattgcaacattgaagccatttacactcaccttggtagaaggtagaagcaataccaccctcaattacctcataatcaccggntctctcttttttcaatttctctaagaaattttaatggcgcataaggttttatagtattgtcaaacaattattatgttgtatttcttttacctaaaaatggtttttatttttttcaattttgttaaaccactctacatttggaatttccccatttttgnttttttttaactgaaaaaataatgcngaggagttcgacgaggagagcccggtggcccacgtacggcggctgcttgacatcgtcgcctgcaccgcctccttcggtccgccgcccccgccgccgccgccgccgtcgccgaang

SEQ ID NO: 1903 - DNA, 2000 bp, Oryza sativa
tcttaacatgtgtgtgtagctgacttatagtctgctattgtaccagctctaagacgtgtaataaaatcctttttcggcgatgtccatgtaattattgtgaagtttgttgtaaaaggggtagataaaatgcccatgtccttatttctaggctaagacataaatattgttcacgatgttagcatgctacatgtactaccctagtatcatcaaagcctttttaacctaccagtatcatccctaataaattaggtaccaccgtattatgtacttcctccatttcaaaatatatctaatcaatgtgtacaactgtacacatgccctaaaagcataagaacaataacgataacatgactattactccatccgtttcacaatgtaagtcattctagcatttcacacattcattttgatgttaatgaatctagctagatatatactccatccgtttcacaatgtaagtcattctagcatttttcacattcatattaatgttaatgaatctagacatatatatctaactagattcattaacatcaatatgaatgtgggaaatgctagaatgacttacattgtgaaacggaggaagtagaagacatcagacttattttccacagagcaacctcaagaatataaatggagttgtgagtacttgttagggttcaaattatttgacttgtgttaaccacaaatgttacgcatgcacgcgtacactctgagtaggacctaaggaatttttcaccgaactccgtccaaaagagtttgttagagaggtacacatccatgaatttggagaagtatatttactttcctattttttttacaatattgtacatacaacaaataatttactttcctatttttttttacataatgcacatacaacaaataatatactctattatgtgataaaaaagtaacagtaaataataataatataatttcaaagtcatttcttaatggggaggtttggacacgagtcacaacccaacccataaaccccatccactcaggagcttctctcattcctcatggcctctccctccctcctaacccgtttccttccagataaggctatataaatacccatcatctccttcctctcttcctcgctctccccaacccctctcggcctctcctcggtggtcgacggcttcaccggaccggaccggaccaccgctcgccgccgggcacccccgcgccgcggtctgtatgtcaaaggtgacgcccgccgcctcatgcacccgccgttcgccgttcgcgcggtgacgcttaggttcattcttgcccggtgcgcgccacgtgtttgtggatatgcccgcccgtgcgcgcgcgcgcgagagagcacgagcacgagcgctagtgaccagtgttcgttcattgtccgtgctgctctgcgtgcggtggcttggctctaggttcttgggcatggtggtggtgggagttgctgtgctatgtagtgtgtgggctcggttccatttccgtggctggttcgcgcgaattggcggcgcgcgctgcagctgtcgcggctgtactgtaacacttttgaattgatagtagcgttggctgtgtgtagtgcggttctgcgttaggctcttgcttttagtgattgaatggcggcgggtactctgctttgccatgtttttcgatgctctgagtgaaatgaaatgaaatgaaactgaattcgcttcctgtttgtggtcttgctgaaattggataagagagatttttgggtgagagattgcatacatgatgggaagtcttgcgcttttccttaggtgtgctattcttttgctcatgatatcttatgcttgtagtgctctctcaattgttgtttcagaatattgtggtgcatttatctcgtactgttgtttgtttacctgattactggatatcggttctcattgcctttttgtctaacaaagttatctacactcgtgcagggtacagaaacaatcaatattctgatatagttgctgggaatttcaatccctaaattcaaa

SEQ ID NO: 1904 - DNA, 2000 bp, Oryza sativa
attcggtcaaaacgcaaaaggaaaagatgttctgagagtcatagtacaagttggctcgaatagctctcaactataagtgtgtgtttaacttggaaaaggctttagtaatttatcagatatcacttgagtacaaaaacactacttgagtacaaaaagactactcgagtgggaaaacactacttgtgtggaaaaacgctacttgagtgggaaaacgttacttaagatgaaaaacactacttgagtgggaagaactacttgagtgaaaaaacactactcaagtgggaaagtactacttgagtaggaaaatactaatcgagtggggaagtactactttagtaggaaaatactactcgaatggtaaagctttgtttgagtaagctaagctaacgctaccgacaagttcagtataggtgggaaagtatgttttccctgtctatcctaagaatgaactcaaacacaaaatgtcatgtctcatcaagtggtattttatattaaatgattccttgtccttgctacatggccttggctggcttatataatcttcaaccatacatgcgagttttcatacatgcgagcttactttaatgcccttacaaagtttacaaacttaggggcattttagtatatcttgaaggtcatcatggtcttttggcgccaactggcagtagtggttataagtagatcccacagaatcttctttcggcgtcttccttatttaagcagtactttctctcaagctccttatagtttctttggtcaaaatgcccttttcatcttgggggctcgaacattcctttctaatctattgaccccttagacttttactgtcacaggtagaaaatccacacaggtaaagcaaactactcgagcatcgttagcttagcttactcaaaacagagctttaccgttcgagtagtattttcgtacttgagtagtactttcccattcgagtagtatttttctactcaagtagtaattttccactcacatagtatttttccactgaagtagcgttttcccactactcaagtagcatttttctactcgagtagtattttttcactcaatggtatttgacaaatacgaaagccttttccaagttaaatacttagttgagagctattcgaaccaacttatactacaattctaagaacatcttttcctttggcgttttgaccgaatgaggaggatggcatctatcccctgatataacaaacttgtgtttaacttaacatgaacattttacccattgcatttcccaaattcagattaggtgtagttatacttacaactgcatataactttagccgtccgttagatttaaagctacatcaaccatgtgaacaatgttctgtgctacaatatttattgctacagtactgtgaacagtacagcacacgatctagatcgtcccatatgcatcccattggccatagtgcatactacgaggacatattcggtgaaaacggattaagtgttagaaacttgtgaaaatcatacctaaatgttttgtaaagtcataaaaaaatattagagatatgtgtagatatgaaatacattctcacccaaatctcaattcaaaactcaactttgtttaagagaaaaaaaaagacaaatttcgagtgaatagtatccggttgttattcatctgcttcacttgcagtcactattgtggctgattcgaatctccatttttaatttctagacattttttttctctaaatggtgggttcacaaaatttcgggcccagtccaatctatcatcagattccttttatacaatatgtccctataaaaaaatatatcctcaaagatgcaaattgttggatgcaggtggtacactcgtattgagatttgagaggcttacacatatcttgtctactacatatacggctccgtataatactatcacgtgttgtattcgccaatatactttgcgaatacgtacaactcggttgcattaaattcgatcgaggctttcgctcccgccacacacgcga

SEQ ID NO: 1905 - DNA, 2000 bp, Oryza sativa
caataagattagccatgtaatgtccttttcgccttcattcgcatgcaccagataagttcatgcaccaaaacgagcattttacaagtttgtgcactagattgcacccacatgacaagttcatgtactggtgatgcaatttactcttaaactaatatggtgttttggatgatactaaatttttctataaaatttgagcaaacttaaaaaatttaccaaggaaaatgtcagggttacggataaggcataccatttatcctacgacttatgaaatataccaataaggtataccttcacgtgtacgtatcgtttccgtatacgccgttaggaatctatctcaaattatggaaaatatctctatgagttaagaaattgccggagtccaactcagaagggggtaaagtctttgttatatcgtgccagtttacatatccctaagacttacttgggggtcaaggtattctacggtattacttgggggtcaaggtattccacggtataaaagggacccttagggggaggtgaaggctatcgcatctcaccgtccacacatccaccaaagtttacgaagctggagtgcacggagccaattcgccgagagatctcgtcgaatctctcgactacgatctcgtcggtactatctgtttcgactactctctttgtaatctgttctcatcgtcatcaatctcatataaactggactagagctattacctgataaggggcctgaactagtataatccttgtcttctgtttgcttgatgtcgtactacgtagactctcgttccaacgtaccccaatacttaactcatccgatccgcaagtatccctcgtcgacagaaaaaaaaatcaaaatggcttataatatgaagtagagggagtagaaaagtagtactacctccgtcccaatataagtgcagttgtgggttttcatgtccaatatttgactgtccgtcttatttaaaaattttataaaaaaaagtcacatataaagtactattcatgttttatcatctaataacaataaaaattctaatcatatttttttaaataagacggacgatcaagcgttggacacgaaacccacaagtacacttatattggaatagaggtggtagtgatcaaagttttatagaaaaacaaaaaatattaacaatattgcatactcgctccatttcatatacttttttttagtttaacccaaatttattgaaaaatataatagtattttcaacacaaaacaaatatatgtttaataaaactaatttaatatttcctccttccctaaatgtttgacaccgttgacctttttaaaacatttttgaccgttcgtcttattcaaaaacttttgtgaaatatgtaaatctatatgtatacataaaagtatatttaacaataaatcaaatgatagaaaaagaattaataattacttaaattttttaaataagacgaacggtcaaatatttttaaaaaagtcaacggcgtcttgtgggatggagggagtattttatatcttgctaattttttctataaacttgatcaaacttaacaaaatttaactataaaaaaaatcaaatgccttaccatataaaatggaattattgtaaatggaaatagaaggagtattaaattgtatatttaatatacagaggtactccctccctaaatgtttgactccgttgacttttttaaacatgtctgaccgttcgtcttattcaaaaacttttgtgaaatatgtaaaattatatgtatacataagtaaatttatcaataaatcaaatgatagggaaaaaattaataattacttaaattttttaaataagatgaaagattaaatatgtttaaaaaagtaagcggaacattttgggatggaaggagtattagccccgtatgcagtagtacagtacacatctgtacgctagagaggctcgaagcagagagaccaaaaacgatatccaacagcagcggccaccacgcgcccaccgctcccggcgcgcgccaca

SEQ ID NO: 1906 - DNA, 2000 bp, Oryza sativa
gcatacgcacacaaacagcgaatacatgtcttaacatacgctaaaaagataatactaaagacatccttaacgtcattaaaatcctatgaagacgccctgacatacgtgtaatatactgtattagtaggcaccattaaattaatactagtgggtgaagttgtatacccatgactactctatcaccacaccgctcgtgcatcctcatgttgcattagacttgttaaaaaaacattcataatagtaagaaataatcagacgattataagtagcaacactctcattataattttaatataaagttatatataattgataagtaattttttaatgaaatcaagataattacattagggtcatacaaccatcttcaaatcattttcggcctctatataaataaggtcctcatcggttgtatatggcttgattatataagctgtaatggtttattagtgataaaaaataattatggataaaacttttcatatgtgtctttagtgacttaaaagccaatactgaaaaacaaactacattaaaaaaaacatcaaagtcgactccaaataaagtttcaaaatttaaactttggcagcggcttataagccatagaacaaacgatgaggccctcagatccatagggctcagaaaacaagcatctatacttctttaaatgttctcggtggtggtgtcgatccattctgccttcccaacgccaccaccatctgacatgtgggaccaaggtccaagccaccaactccaaggaggtctacacgagggcaatccatccaaacgtaccaggaacaattggattttgttgggatccaatccacgccaccgagtccttcgttgtccggagaagacgggagaggcaactgccacggtcaccgactcatcgtcccatgccatgttgaatccaatggcagccgtgtcatcgtcgtcctcctccgtcttcaagcagtggatcgagagctgtcgtcgctcgatatagggccagcgccacctgatcgagggctagtgtcgccgggaggtacatgctagctgaatctggcggcggggtgcccgtcaacctcaatccctcgcccttcttctccctccaaggtgccctctccccttcctcatcagcgtcctctgctcttcatgagaggggaatgcccattgtggagaggctcggcatcctcggcgccgcctgagggaaccgctgtccactactgttgtcgccaaaacaccaccgagcaacgggggtcgccttggcttcttccttgccattccctaggttcttcgctgccgcgtcgatcggtttcttcctcacctcgacccgagctcgctgcgtgccggctagggaaggaggagaggaggggcagcacggtggcagctggtagaggggctggcctgccgaagaaaccgaggggaagggaaagtggagaggagggtctttttttttccttttctactatttttttatcagctgtcctccgcattcctttccttccttaaattcccatgtgcaggagtactacgcaataaggaaagacaacatacaattcacctaattcttcacttagactaaatatgtacttaattaacttaataagctagaaatacaatttattttccgttgcaacgcacaaactcttggctagtatccaaaaattatatagaaacaaagtgtaaaggaccatcaatccaaagacactcaataatcgtctcccatacatttggtcctggataaaacactccctgaccacgtgctccagtggctgacacagcaccacaaccaaatctcatcaacctggcttctaaagatatatgctatataaaatatattctagtaaaaaacaatttatatagtatgacgttatatatgcacatatctgtgcatcagaattggttagtccattttgtcagctagtgatcgatcgagctatatatgcatatattactacggatcctatgctagcgaagatcgagctcactacacagagagagtagctagttagccgccggcg

SEQ ID NO: 1907 - DNA, 2000 bp, Oryza sativa
  N_region (69)..(69): n = any nucleotide
ctccagtgatttggaaccaatctgaagagaaagtaagctaagcgccagtatgatatgaagagagaaaantagaacaaaaaaaacaagttgttgagagctcagaatgatgcataatacaatcatagacattgatctcagatgtccagacatagaaataataaagcatcctcatccagagcacctattctcaagggagaaagcaatttgcgtataaaaggaagaagaaataagaagaccgaatagaggtgatggtttccctcgatgccaatccagatggaaggcatggaaactgcagacatatcaacatggcatcagttcagaccgcccgtctgcttgaactctcctcatcggagaaggttcaaacaccacatgtacagcccttgaaagttgaaccaaacggggaattatactacctacatgagcaataacaacatctagaaagacgaactaaatcagacatagcgaggagcaacacgagcggccgccgccgccgcggcggtgtcgaggacgacgaggagaggaaggcggttgagttgtcgtcgaaggtgggggttgtatatagacgaaggggaattagggtttcttctcgagatgggctttgggcccaaataggagtgacgcagtaggccggcgattagattgggtctgttacgaaattaggctctctcttttttctttttcctgaaggagatcgcggccacgtgccgcgaaaatgacctgtgtgtagggggtgaaaacggtacgaaaacagatgaaaacaacctttatcattttcgttttcatatttttttcggaatcggaaaccccagaaacgaaaacggaaacgaatattatcgaaaacgaaaacggagcgaaaacgaaccggtgtggatacggtaacgaaaatttatcggaatacaaaacccctcaaactgagctccacagcaaatatattcttctataacttcatataatttgcataacaaatattctaaacaaattacagcaaaacactatggtacaaggtataaactattagtgctttcactccatcatcagtacatactacatagtcatcaatcatcacatatcagcaacacatatcagttcatcaatatttcagtacttgaagcgtacacagtaacaaagagtgatagaggtggagccgtggaggttgaggaacacctgctgctgctgggctaatggctgctgaaaggcgaggcgtcgtgcatcagtggtggtgaggctgtcggcggtgtggccagtggccggcgtcatcggtgtcgtccgcgtcggcggcgtcggcgtcgttgcctcgtcggtggtggtggcggctacgaaaatggtgggggcaaggacggagcgagagagaggaagggcggcgagacggcgggggcgaggtcgcgaggagcccactagccgaggccggcagccaggcggtcggtggtggcgtgctcgaccccctggaggctggatgcgccgcctctctcgatctgtctctctcatctctagcctctgtagggttagccagttagggacctagggacttgggttgggcgggaacttggggaggaattatggactatttggatgggctttttttacttcggaaattccgacaaactttccgaaatttttccgaccgatttcgagttccgacggaaactgctattatcatattcgattctgtttccgaaaaaatatttccgtttttgattccgtttctgagaaattccgaaaaaattccgaccggttgattccgttttcaaaaacaggtccggaatccggaaaaattccgaaccgttttcaccctacttgtgtgtgaggcggagaacgccgccgcaacggacaagcaaatccgggccgccgatggaggcagccggccgcgctgggacgccgcaaaaaccgcagccactcgaaattcccagcgccgctccccgccacaagtccgcgcctcctcgacgaccgcccgctcgaaacaatctcccgctgcgctgcggcggcgcttcgagggcagggcg

SEQ ID NO: 1908 - DNA, 2000 bp, Oryza sativa
aaatctatcgagtgaggaaaaaagaggaccggtatcgccagtgtgccaccattgatttcaatggatcttaccaggcctaatctaattccaagaatttctttgatttcgatcgccagtcaatagaatataggagtagtaggaatgatcatagtcttgcaagcacaactgttttacccatatcttcacactagtaaaccattgctttaaaatccgaaccactccgctccacacagtaaaataaactatgaaaccaaaagctaacaaactcagcatttttaattctcatctgctacttcttataatatcaagttctcaagttcaccacataggaccaatattattatgaatctactccctccatctttaaatacaattgttttttacaatttaaatttgtccaaagctaccttttaccatctcaaccaatcacaaccatgtaccacttcactatacttgttttcttaatctccatatatacctctaaagatagctatactttgggatggagaaaatagggaaatgtctcctagatcatatatctactaattctttagaggaaaatttgcaaaactcaccccataaaattacttgaagttttacgttcccccacataaatcatttgttgcaaaaacctccctaatatacacatatttaaccgaatcaatttgttttcataaattgtgagcagttaacgtgatcttaatcaaagctaaggctgtgttcggcactacactttcctaaattctactccctcattatccatgcacacgctttccgaactaataaatgatacatttttttaccaaaaaaaatcgtataagaaagttgcttttcaagttttcattaaatcactttttaagttttcaagctaatacttaattaatcatatgctaatctaccactccgtttatgagctggggaaagtttcctaccccaagagaaaacaacctaaatacttttaggtactgtttggctaatgggataaggaaatgatttcccactcaccaaaagacatctttaaatcataaccattcattctctctcttccatttaatcctaacccttcatttattttctaatcccaatctcccctttatttcccattatctaaacacacccttaggagtataatcttgactttatttttttttgagattccataaataaaattgttgatgagagattaaacaatgtcgcacttatttttgctatgtacggtaaaaaaatcgatgaaatataaagaataaatcaaatacaagtacctcgataagattgactcagctagcttagtctgggggtacctctacagtagcaataatagctgatttggttaagccagtgcgcactgggtggttgttacatcaaaactaagtggagtggtgggcatttgaaaaataaataaattacaggatggaatgccaaactgatggtctttataactttccatcattgaaaattttgaaccgtgtgttcaaaccaagtagagtggtgggtatttataacaaagtaagggtgtgtttagttcacgccaaaattagaagtttggttgaaattggaacgatgtgatgaaaaagttagaagtttatatgtgtagaaaagttttgatgtgatataaaagttggaagtttgaagaaaaagtttgtaactaaacaaggcataaattacatggtggaatgtaaaactgatggtttttatagctttttccatccttcaaaaagtttgtgccgtgtgtttggatttctcccacaagggctctcgtgtcaaaatgtgccgtgccagtgtgtgggggcagggggtaggcaggccacacccacaccaccgagtagagcgagtgtacagccaccacgcgtgtccacccctcgcacgagagtctctccaccactcgtcgccgactcgtgcgagcgagagagaagccgctgactgcaccgcaccgcaccgcaccgcacgcaccccaaacgctatccaactcttatccccttcgatcccccctcaaccacggc

SEQ ID NO: 1909 - DNA, 2000 bp, Oryza sativa
  N_region (1428)..(1428): n = any nucleotide
accttccactgtgtttgtaattctactttgtgattataactcccattgtactttcactgtgctttttatggaattagttcaactcccattaaatttcttctaagacttggaaggaacacttgatgggttattaatttgtaacttaacacgtaatagtagatttctttaattgaaaaacctcaaaattcccttcactagctctcgtgaatctaaatattggggttggatcgattggggcaccttccatattcttattggagctagtgacattcttccacatcgcatttgttcccattctatttatgtaaatctccttcagaatacaataacggaacactaagcagtaaaataattagtgaagggaatttagcttccaactttaacctatatgatatatcgaggttttcttattattcttggaaccagaaatcttgacatttcccctattcaatatattctattttttcgcatgaaagatacagtataattttcaatagattttttagtgatgtatggaagatagagagtttaatttctcttcaaacatactcaggcccccttttattcaaaggaatttcataggaattttagaggatttcatttctataggaatttttactacaaagccctttgaatcaaagaaatggaccctatggaatcctatgaaattcctatggaatgcctcttcccatacaagttttgaaggaattttatcaagaggtagaacctcatagaaaaaatcctttgagtctttatctctccttaaattcctgtgtttttcctgtggtccaatcaaacggtcattcctacgtttttcctgtgttttgcaatcctctgttttacacttacattcctgtcaaaatcctatgtttttcctattcctccgttttttcatttctgtgattcaaaggggccctcagtgttggactcattttgttttttttcatcatctcaaacatagagacgtagataaaaatacttgctatatgtatgtgatttattagatgtgatattagtaattttcaagcaattcaaaacgaaatacaagcactatatttcttttcttttgatattattttgtcgacttcaattgggaacttttagtagaagttgatggagatatattgttgttgttgaagcgcaaaggaaacaatgcaagagaagagtatttgggacttgtagcctagaagactacagaagtctgtgctctcaaaagtttttttttttcatatgaccttttttttttaccttagtagaatccaagatttatctccaaggtaagcatgccacgtggtccaatcattttgagggcaaggcgccggcttgagaatgttagctttcaatttccctgcaaaccggacgtccctgtcgatgatgcagtgttttacatcgttttggcctttggctttggactttggccctgtttanataccactagaaaattttacacactgtcacatcaaatatttgaacacctatataaagtatattaaatatagtctaaaaaaatactccctctgtcccaaaatataagagattttagagggatgtgacaccttatagtactacggatctggacaggctttttatccatattcctagtactaggaagtgtcatatccctttaaaatccccttgtgttttgggatagagagagtaactaattgcacagattgcgactaatttacgagacgaatcttttgagcctaattgctccatgatttgacaatgtggtgctacagtaaatatttattaatgacagatttattaagcttaataaatttgtctcgcggtttactgacggattatggattatataattagttttttattagtatccaaacacctcatacgacatcttatataatatctgatgtgacactttaaaattttacacatccctacatgtaaacacccctttattgtggaaaaattgagtggctgccaaatgagtcatcctttgccgatgatatcttcgtcaaattaaccaccttgtggca

SEQ ID NO: 1910 - DNA, 2000 bp, Oryza sativa
cctaaaaaattatgattaggaaaatacagtggttaaccccaatataataggaatctttgttatccaactagtttggcagcacggcataccaacaaacaagtactactaattattgatcaccacatttgttgcattgatttaatgagtggataaaccaaaactgatagcaacgatttagtgatgaatttatcctgagattatagcacagtcacacacttatcccattggaaagaaaacggtttgcttgcacggcagagcctttcaagaattgaatagctccagtgatagccacacgaaagggacaggagcgatttgctgatggtgaccagtggaacaggcaagaatgtagtgcacgtgttatccatgaaatccctcacatgtacacctaaggtttatcactaaatacagtaacacacaaatacacaatgcatataaacgtagacttttgagtcaacagttttgtttatcacgaaatatagtaactaacactcaaatacacaatgcatagaaacgtagacttctgagtcaaccgtgttagaatagcttggccaaagatgctcgatgattcgaaatcttcggtcaaaaagcttggaattcatagtataacgaccactgtcactatgctatttggttttaggtagagaaaccaagagttcttcgattcgaaattaggttggttcctcaacctcctcacatggatcggaaggcttcgattcgaagtcgtccgattcacatcggtgccatctacctacccatccccattccccaccgcccacgcccaaccctatcaaatgaaacgcgagattgcaaccccccaaagagaagaaaacggcagcggaaatggcgacgtcccgatcccccacgcggcgtgatggggaagaactcctcaggcgtacgcgcatcggcagcgtcgtcaccgcgaaagcgccccccaaaagagagaggaaatgggtcccagaaaagcgcaaaagggacggaacttggggggttgcttgcctccgcaactgtcgcttggcttgcgcgcgtcgccggcgacgtcgaagccgccggaatccgggaggcgccacgcctgggcgcccccgccgaagcagcatctcgcggcgcgtggcgtggtgatgatgcgtgtggagacgaagccacgcaacgcaacgaggaagacgacgagcgtatgctgggctgggccttatccgaaaacgggtgtcggcccatatcaacccaggacgttcggcccacgttacttgaccacaaacgggattgcggacgacgagcggcccacgacatttgggccttaaccggattgctgacgtgcgtgatagtaagtctattttgcctccctcatgttctctgcgagtcagcctgccacgtcaacaggaaccaccctacaaaccatctaagggttgatctgctacggttttcgcttattcgaatcgtttattagcaaataaaaatttatttatgagtaaaatgtttatatatgtccataataacttaaagcaaatgttgtaaaatataagcattttaaaaaaacaaaaaagcaaattcaaaactaagttctcaaattcaaattttggctcataaatataagcataaccaaacaataagaccgattttcctccattttgcggttgagggaggtaattcaatcaggagcagagatgagaaatgtacaatagattttatctgtgtaggtgcgacctgttcttgttgggtcgagacgggattgcggcttacgtgaggcccgctatatttgagcctgaacgggatcgcggctgacttgggccgtaaggtccgttgtagttgggctggattacgataggcctttcattaggcctttatgagtcttacaagtgggccaatccattcggcctagaggcccatttgtcatgtagaaaagcgctcgccattatcctgtccgcgagcacacgaaggcgttcgttatcctctgctgcttctctgcggtttgagcgagcgagggaggaagaggaggggaggagacgaag

SEQ ID NO: 1911 - DNA, 2000 bp, Oryza sativa
  N_region (633)..(633): n = any nucleotide
  N_region (666)..(666): n = any nucleotide
  N_region (847)..(847): n = any nucleotide
  N_region (850)..(850): n = any nucleotide
  N_region (856)..(856): n = any nucleotide
ctctgagaacgttataccaaataaaaatgtcacatgtcccacaggccttaatttcttcaggaaaatgtaatgttgagttttgctcccttgaagaaaaaatagaaatggctaaataaaggcaaatcatttaagctttaattccacttttcaccacaatacgttgtgcaatgtatgtctacaatgatcatgatgcaatttgactgatgaaatgctgctgcttaaataatatatgtagataagccacatgttattacatatcctatagatccatgtaatataactaaatagtcgttttagttactttaaaaaggctatctgtagatcatatcaattggtggctatttgattcctttcgttctggacaaaatattgaagcttattttctaggatctcttatgtggacttccatgttactaaatattctaatgaggatgcattagcatagtagcccgtaacatgcccagcttttagtaagcacctatggacttttagttttggccatgaacgtccagggttcaatgttctaaaccaaacacgccgctttgttgagggtcttttttttttttaccttctactgcatctttactaaaccatgtacgttgtcacccattgtaggttggctcagttgctgtnactgctgctgctaagctgcaaatacatgatacnccccgtaaaggttagttgaatgctttgtctaatttgttgcctggcatcttagttacaattactccataaaagatcgttatctgtctttgtacttgggagttcaatgctctgatgtaaccatttcgacaaaaatgaaacctggaaacaccttttgtcttcgtcaattcatcttctggttccngangtgtcngttttgaggggaaagaaaaggaatctggaaacacattttcagtttaggaaaaaaatgtgtgagactttgtttcttcttgaaatgagaaacttacatggaaaaacacactcttgacaggaagaagaggacgtctgcgaaagagcgaaaagaggaagagatcttgagcattctgcctgaatcgtggggtactttggctgcagtactgccccaatctttgaatcagtattggagaacgctaccagacatcaagtgcaggatgaatggtggataatgttctgtataacctaggagttcttttgcacacaaaccttttatatctagactgcactggtactggaaatcaggctactgttgtactggatgcctgaaacgtgtacataatcagcagctgatgtctcactctgatacttctgtagtataggttgactaaaatgtagcagttatatattgtagaacagctttatgcaatgggttgttgacagttgacaccttaagctaagttggaatgccatcatgaatcatgagatgtgcactcttgtgatgccacttgccagcaaggtcgggtgaactgaacgtgctgcttttgctctgtactttctagcaaaggttgtttcattaatctcctcatttttcatgtgaaattttcaagggaaatattaacacgaagattttgtgggaatcattttactccattcaaattttgttgttttagactagcagctgcatcattttgcttatgtttatacttataaggtaacttttgaattttaaattttaattttggagttgattttgtagttttgttcattgtagtttattttacaacatttggatttgaattgctaaggacacatacgtaaaagttttgctcatttttaggttgataataggggattcggatatgcatatgcataaggggcgttgagtatattacaggttgtttggatgttaaggggagaaaccctggtagttagatacccatggcgattatttatgtgaaagtagtcccgcaagggaaagagaatttgaaacaaagccataaaaaatggaaaagtctaaatatcctagtaaactttgatttaggtcggggggtgggggtacgcgcggcgcgacggtaagcagtcgacgaggatgctgtaggtgt

SEQ ID NO: 1912 - DNA, 2000 bp, Oryza sativa
atagaaacactgagctcatgaagattaacaaaggaaatgcgatctttactgaatcacccttctttaaggaaaagatatatacatagtgctatcaagtaacactgagctacatgtattacaactgaaggttaacaaatttccttggaagggattttgactgaatcgcctttggtgaaggaaaagatttacacattactagtgctcttgagcagcagtgggttgcatgtgctacattgaacatcaacaaaaaaaaaaatctcctaagcaatgtttgactgaatcatctagtgatgtagagagaaaatatccagataagagtagaagattccccttggatacataccatgttcttcgacaccttaatctcagagagtagatcagacgagcacttcgaccttcttcttccccttgaggaagacctccctgtcaacaagctcacgcatgtatccatcaaactccacaggaactccaccattgagcctcttcatctccagaaaccacttgctatctctcgcccagagttcctcaaacgcatctaggtaatgcacactgctgtactttgccttcagcgcatccaacaagaccacgttgatgccctctcccgcaacatacacctgccttcctcctccattgagtctctcctcaatccttcttctgaggttcccatcattgccaccaacatgaacagagtcaaaatctacttgcatccttgatatgataccatcaacaatgtccatcaagcttggcgccgtgcgtattgctccctgcggtggacggaggacatgcatcagcttcgcccatcgcacacattgtaccaataattccctggctccacgtccccaaatttcctaacgatcaggggatccctcgacttggagaacttggtgggcgcaaccctgctgtcctcgatgatgcgagactccaagctgaccctgtgctccccacttgtcccaatcctcccagaaccgcttgtgttcaacgatcccgaccacggattgcaggtgctcaatgtcaatatagaaggcgaggcgcttgccctcctcgggcatgcccccggcgtaggcggcggcgagacagacgctgagatcgaggacgagggtgcggttgaggtagcgggcctcggcgatggagcagaggagactacgaagataatgcggcatgggcttgcaccggtcgccgccgccaaggtaagagaggtacttgcccgcggcgaactgggagcgcgagagcgcgggtgggggcggcggggcggtggcgttggtcccgccgcggcggggcttgcgggcgagggggccggagtggtattccccgatggaggtaacggagtaggcgcaggtgacggggtcgcgggcgacggagaagcggcggtagtccttgtagttggcggaggcggtggatcgggcgcgccaggccatgtcgcaggaggacgacggcgggtcgccggggacggggcggccgaagcggttgaagtggacgtcggggaaggcgtcgatggcgcggcgcatcatgaggtggaagagctgcgggtcggcgcagtcgagcgtggaggtggtgtcgcagctggcctgatcctgctgctccaggtgggacgtggtgggcgtcaaggcggcggtgggaggggagagggagatggggaggttgcggagggtgaggaagaggaaggcgacgagcaagagggcggcggcggcgtgggcggaggaggtgatgagggcgccccgccccagcaacggccggctcgggtccatccggcgacggcgacggccgacggcgatgagatctggtggctgattgtgtaataaagccccgtctgcaggcggcggacggtggtgaacttgtttctaggaagacgacgaactgttcctcttaatgggcctaacatgagtgggcctaagacgaaggcccatgatttggcccaagaatcgcatctcgtcgtggataagacgataaagcaacattgtgtggggatagccatagccctgcaccgcacctcgaatccccaa

SEQ ID NO: 1913 - DNA, 2000 bp, Oryza sativa
  N_region (1878)..(1878): n = any nucleotide
  N_region (1900)..(1900): n = any nucleotide
  N_region (1930)..(1930): n = any nucleotide
  N_region (1950)..(1950): n = any nucleotide
  N_region (1969)..(1969): n = any nucleotide
ctatactaaagctatgttctttccctcattttctatataaaagttattttaaaaaatcatattaatctattttttaaaaaaaattagttaatacttaattaatcatgcaataatacgagcttcgttttacgtgtcgggctagatatgggcccagagcttagaggtgaaaccatccatccgaaatgaatgaatattgtctcaggcgacacctaggcgtcctttttctcctcgttggattccctctcctctccgtctgtggtggccattggtctagaggatggtcgggtttatctcatagtcaggtaaatcccgttgttggtcctctcttttttctttgttgtgcagatcgaaggaggtggtggcgtattcctcctccgtctccatcttagagttctccggcgatggaagcacttgctactccttgcttttggcatatgcggtccggttgatgttcaccgggttagtcccacgcgccatactacttttcggtgtctgcaacttaaagttctccaatttcttttgagaagaggttgcgccggccgttcacttcttttcggtaaccactcacataagggcggtgttcttctccttgggtttcggtgtcagatttgtaaggggcagctgtgatttgtttctttggccaaggtagcttcaaccaccatagtagaggcctcaactggattcgctccttggctatcttttgccatgttttcctcttcaccgtcgccgttagcacaggccaaatcgccgctcccgtggaagaagcagacaaaggacccaattgcttttgccccgttcttttcaagttcttttctacaaattttcgatgtatgctcaatttggccgttactgaggggcctttctacaaattggatgttcttcccgttgttgtgttttatcatgtgccttttgtatctaaacttttataataaactagataaattgtctgtgcgttgtaatgggtgaacactattttaattttgttattgttatacggtttaattaaggtgaaattcactgtgagaatttgcttggatatattgtttttcttaaaattcatgagctgcaattagtagtccgattatctcaagttagcctgtatgtttttttaaagagatttcttatacgactacttctgtattttaaaaaacgaacaaacttaaaatccgactcaaatacatatatgtatttaaaatcgaacgaacttaaaaaccgactcatacacggatgatataccaaagtaccagaaaaacatctcaaattcttataaagtaaagatatgtatcaaagtaccagaaaaacatctcaaatttttataccagtaacacatgcatgaccttaaaaaaaagaaatgaatgaacattctccaacctttgccacagcagagacgccgtctccaagcgaaatactcctactccgtcgacttatcaacggtctagatcgccttaagattcgtgcgaagaagagaaaaaagaacaccttatccctccctaccctcttcctctgccaccaccactcgaggagcctcctcggtgtctcccgatccgccgccgccgccttctccggcgatccggcagccgcatcctgaacgctcgccttcccgttgcccccgccgcctcgccgcggcgccctcaccgccgcccaggcctgacctccaaacccgggaagccaccctctcctccatccatggcgtccgccgccgccacctcgtcgtcggcgtcccttcgcctcctcaccaagccccccaagcccctcctctccaagccccacctcctcaccctctgcgccccggtctccttccagcgcctcgtcgccaggtccagcgcgtcgccgaccccgtccccctccgccgccgccgccgccgccgccgcctcgggntccggggtcgatccggcgcagnttcccccggggctgcgcgaaatcgtggcgnttttccagtccgtgccgganccggggaaaacggtacaancagctccttgcctaagccgcgcggctgccgc

SEQ ID NO: 1914 - DNA, 2000 bp, Oryza sativa
agcaactatctcataatagtgcgtcgtaaaaaacatgtaaaaaggacagcagtgactttaaacgaacattacaccttcatttcgactctgatttgggaaattttatatcgtcacctttcaaacacatcaaacttgattctagatcgacgagaatcgtcgaaataaggcttaggccttagaccttgtaatagataaggctcataccggaagtgcttctctccacctccatgaacttgaacacatatgtagccttagccttatgtttcctctataaatatacatcatctaaaacaattggattttgtctagttgaattttgtatgcgatacaccttatctctagtcctcggttgtttagttgaggagtaatttagaacccccaataattgttgtgtagatttatctggttggttagatgtatcacttcaatcacatctatttatttgtgctttattactattcacaatattcagattatatcttagctcactattgtaatgttctcttgtttgcactttagaaatcatcaaatgcatgtcatggttggtacaacgtcattttcggtgtagcgattgcatggtgtcttgcagtcttgtacttgttttagttaatagccactttccaaacatcacatttgatcaaagcgagatttatcctctcaccaaaagatcgtgccaaaagagaaagcttcatgacattaaaatgtgtgtgcctgcaccgatgtgtcaatccatgaggacggctgcctggcatcgttccacatataggtgggggtgtgcacttcctgtacgtgagcaagtgcgcaagtcacaacgccgttgatacttacgttgtgcccccttgcgatggcgtagcaaatcattgtgatttattacgtcttctcttctttgttgttatctttatttaaatgttttgtgcacaaagcacttgattaccatggaaattatggacaacaagagagtattacatgtgtatttttatcacaggggaagacaatttcagaggtggcaatcaagcagtgcctagtactactgagtgagttgacaaaagaatctttgctttgatttttcactctcctaccacaaagtacaaaccctccagacgggtggcatggcccccgatccctattccccggcggggaattcctctattagggtgagctaacggggtgaattcatcccccttggggccggaaacagccagaatcaaggtccatcgggtgggccggggtcggaagctttccactaatcccggccccatatccccatgggccccccgagatatgttgggtcatgagaaagtaccatgccatatactccgaaataatagcccaacagcaatatgtataccgaaggtccctcaacttgtcatcgagttacaaaatcatccccaaaccgcaaaactcagatatatgacaaccctcaacttacaaaaccgttcatttttttcattttaggtcctttagttttgaaaccgatttcaaccgacgtggcggctgagtcggcgtgggccccacatgttagtgtggccacaacatctctctttttcacctcttctctcccttcatcatctctctcccttctctgctctgcaaggcccgcagtgcttgggcggtgggcggcggtgatggcggctatgggcgacgcggcgctggggaaggggagggggaggagctggagcaggaggccgacgcagaggaagacgagtgcgcggcggccgatgacgcgaacggcggcggcacagaggagggtggcaacgtggatggggatgggggcggaaggttttcttcacaccggggacggggacgggatgccagccccgttgcctgtgatggatcttcctgcaaaaccgcacttccgaaggggtgactctgcaaggaaggtttttgcctccttttgttttgcgtctccttatcagagtggattggcctccacttcccttttggccgtccatctctcctctcctcgctctcgctcgctcgctctctcgctcgctgctccc

SEQ ID NO: 1915 - DNA, 2000 bp, Oryza sativa
aaagccggagactacaggagccaagtcgtcgggtgatctagtcgaatcaactcgactacgatctcgtcggtaccaccgagttctactattccccttgtaatatgtgggtctttccatataatcccataccaactggattaggggctattacctgctaagggggcctgaaaccagtataatctgtgtctcttgtttccttgatgtcatactacatagatcctcgtatcagcataccccaatacctctatatccggtctacgggtacccaccatcgacagcgcgtgagctgctggagttcttaaggagctcgccggcgtgctctcctgagctcttgctgttgctagtcactaccttattcaaacatgtgggtggctgtgtggctttggcttccaggaaaaagaagggtcaaagaaagatgtgtattcggttggatgatctcagccgtagaaacgaagggatggctgagattgaggcaaatccaccgggtggagttggcctcaactccagtggatctgtacccgttccaaccctgcttttcaagaaattactgaaataaattgatgaaaccgggggacgtgatgccactatacacggatacttttctgcagtgacaccgatacacaaatgcacgcactggttgctaattgtcgcccagttgctatcagtttttggcagtctcagccggcagcattgacccaagactgcattgggatatttcctccttcagaaattttaccattcttcgaaaagtacctcgagacatctaaattttacactaatttttttaaagatacttcatccgtttcataatataaaactttctagtattacccacattcatatatattttatgaaactagacaatatatgtgtttagattcattaacatttatatgaatgtgtgcaatgctaaaaagtcttatattatgaaacggagagagtactaaattttacactagaaaaatatagaaaaatatagtaccttcggatggtaaaattatccttcctgcttactacggtatatgtatgaatgtatgtgtggctctccgactctattgttgccttgttccctgaccttctctcctgcaggtttgcagctctagtttctgctcgccgtcgacgggccgtctcgccgaccgccggccgccgcagggttattctaagttacgttagcttcagtttcgccgatccaaggggcatcattcggaacatgcaagttttcccattttcagcagaaactgaacggtaatttcatgtgaagattgcgtgtgaaattcttgccacatctcttcctgcataggggttcaagaaaagttgatacatatagtactccctccttttctcatattgtaagtcgcaaaagttaaacttctttttaagcttgatcaaattaaaataagataatttttttatgattagtattttgattgttattagatgataaaacataaatattaccttatgtgtgactaacttttaaaatttttttacaaattttttaaataagatggacagtcaaacgttagacacgaattcctacgactacacttattttaagacggaagttgtaacaattagatttaatctctctactatgtaaaagcgctcttttggagggcttagggcgagataaaatttaggaccatttgtttcaacactatagccaagttctcaggatttttagaaaaacgtgtactactcctagcaatattctcttctccacacatactaatctgtcccaaaaagaatcaaacatagagtttgacttttttttttggtggagggggtactattcatcagaactcattccattcgagtaattcgttttgtgcccacacgatctgcaacaaatgtgacaatccctagggccaaattcaggtaagcccaaacataatgagaacaacccccttgttgatagcagactggcttaatttcaaatcagaactgtactgcgcggctgactgttagcaaccaagtcaccaaacaacaagaatttcacc

SEQ ID NO: 1916 - DNA, 2000 bp, Oryza sativa
  N_region (836)..(836): n = any nucleotide
  N_region (1395)..(1395): n = any nucleotide
tgtaaccatggcaaaaagaaaagcctgaagttttgcaattacaggtgaatggtatgtggatttttcttatatatgaagaaagtggacgttttctctaggagaagagggggtgcagtttactttcaaaaattaacacataagatctaaaaagtttaaatgcctcattttactgcacttttacaacatcaatgaagatactcaaaatgttataagatgatttgatcgaatttgcagaatgaagtaaagtgagtaataatactgcagtcaagttgagaaagttgcagttgaaacaaatattataggactaagcagcctaagccaaaggatgcaacacagatattcagtatattgattccaacgaccaatcctacaattgagaaagatcccaagctcaatgcagcggtaacagtgacaatggtattctgttaagaatcatcaagttctaccctaacaaataaaataagttaatggcactggctaaaggtaaatgaaacttataaggaacttgatcgaaagtgtcagtgatggataaaaatctaagttgataagctcaaaagaattggttgtaagctgctacatactccaaatgatcgatttctcttcctttttccaactgggcaagttgcaaggataaatgaagagatggttgtgaatgaagcccttgttctgttgtttcttagttcactgtcaaataagtaacccactacaatctattgatttgcagtataaccttagttatttttatgcagcaaaaatactatgtcaatgaataaccaagtacatgttcaggtaaaaaaacatacccaagtacatgcgacataaaagaagcatagacnaaactaatccaaacagcaggatagggtcaggaactctggagagcaaccacacttgatctagtaagatgcagcaactaaaggtcagtgctgctccaaaggttcacattgccacatgacaataaacatgttttagctgcagaaaatactaatgtgctgttcagtcgtttcctagcatcagttcctacttcagcaaatccttatcagacacaaactacatgatcgtggaattgtggtatcgattacaattgtgcgtccacagtccacataggctggattcagcaagatttgacgcgatggtaatatgctttcgattctaagcattcgactacaccactcaatatttccacaattccattccatcacaattttctttagcacagcaatatcacactgttgcatcacgcagacacatagaacgcacagtggaccaaaatgccacaggtaggatgcatcagcctaggccctagggcctaggatgaactcacctggtaagccggcgtctcgagcagcggcgacggggtcaagtagccacccgcgcccgtcggcggcgatgggggtngggtacagcgcggcggggtaacggacgaggttggcctgggggtcgtgcacgacgggggccctgaggacggaagccgaaggggacgggtggtggaagcggagcgagatccaggtgaggagcacgaagagggagagcaggaatgggaacgacgccggccgcttcaggaagtggaccagcgacgacggcagcgagggggacggcgcggcggcgggggcggcggcgaggggcgtcgtctgcgtgtggatttgcagcgcgatggctctcctcgggttcgccatggatgggtgggcggcgagctgctgctgcttgctgctggtggtggtggcgctgcccggactcggccgccgccgcggcgagctgttggtggcgagacgggcccgtcactaacccatcccgcatatggcccagcccaattaactctcagtctcgttgggccacacgcaaagcagatatttttccgtgtcgcaaagctcctccaatcgagaccgttgatcacgaaacggacggctcaaagttgttctccgcttatcctcttcctcttcttcttcctcaaacccgcaaaaccccaagccccgagctcacacaccaccaccaccgccatcgcc

SEQ ID NO: 1917 - DNA, 2000 bp, Oryza sativa
ttagaacagattttgggcagtacaagaagtcagaacttgattcctgctgatgatggagtgtttgatagtttgcaatactctgatgctccaatgtttctgcctggttcatttgacagaactggtgtggtggctgaaaaccattatgttgaatttggtgctagtggaattcagaaccagggatttcagcatacaactgaattattggcacataatcaagtcgctctaaatgtgcggaaccatatgaaggacaaccatgttgtcttctcacattcatcaggtgcttaacaacgccatttcatttacaagcttctcttattattacccaaaattatttcagaaactatactgtccaacttctgattattgttttctcaataaaaggcagccagcatgcctcctctttgtatgaagatgaagcataatgctgcagagggtcccaacttctaattgaaactactattacttctgaacattgcagatgctaccattattcatacagtgaatgagcaaccgcctaaccggagttcaaatgcttcacaatcatggttcaatggggctctatctgccttgctcgattctgttcctagcagtccagctatggctgctgaaaacataggtcttaacagaacactgcaacgcatttcgagctttaggtcacaacaacctgcaagagaagaagttagcagtactcttatcaacaccagaagaagaggcggtgggctaattttcatctcgttaatggttttacttgttgctatcatgtggacctttagcaatgggtctgcagtcaagcttagcaaggggttatggaagtttccctctacataataggatgcacccggttatcctggtggccagtgcttcttactacttcaagtactaattcttgttttgctatcctttcctctattcctttacattgaaaaaggcaacaatctaggaaaatattagaggattatgtggtgttagcacttactttcagaatattatgcgagagatgttaaaacaaaacaaaatgagaaaaagaaacatctgaggtgaacttctggatgtttttgtcctcatcattttgatgaaagtatatattgaatgtaattaaacgatgatggattgttgagaagtgcagttgctgtgcacgataaatgaaaaatccatttttgttgcaaacttgattttcctatgtggctgcccctataaatgtgtaaaaaaaatggactactgctagttgatttgcctcattagagttgtataaatataaatttagactccaatgatccaatcgtcaagtttgtgcccatcttttctgtcgaacatgtttctatgtttctactactatatgatgaaatgatttacctgtgctggatcagatattttccttatctgtgtttagatttgacacggaaattagataggtgtgagttttgtcctccttattttaatattattatagtttgagcttgttagccacaagtggcaaagacgatattgttcctttttttcattcctgaggccaataagatattttattaatcagatgaattaatataatttaaaaccgtgcattgcataggattgagattgatatcctctctaatcaaatccatggtgcctttctcactgtatgtgggtccagggataatcggaccatatgttagtaacaaagttacgtgacttcgatggcagagtatcctgatccagtagacagatgtacggctgttaaactgccagagtagacagcgtactgtttgcacgaatctcaatgcgccgaagcagcatttggaccgttaaaactaaaatggataggctgaggggaaaaaaaccaaaaaggaaaaaaaaagaaaaatctagcatagcatatcccccttgaacctcttcagtcaagtgcgcctcctgcttatctccttcacgtcttcacaccctcttgccgtttgtctcactacaacctcgtcttcttcgtcttcctccccgtcgagaatcccgcagccgcggcaaaggccacc

SEQ ID NO: 1918 - DNA, 1693 bp, Oryza sativa
  N_region (153)..(153): n = any nucleotide
  N_region (224)..(224): n = any nucleotide
  N_region (227)..(227): n = any nucleotide
  N_region (233)..(233): n = any nucleotide
  N_region (243)..(243): n = any nucleotide
  N_region (338)..(338): n = any nucleotide
  N_region (340)..(340): n = any nucleotide
  N_region (383)..(383): n = any nucleotide
ttgtattcttatttttctaattttagaatttagtttattttttatttgaaattttagttaatcttatattgtgttctatatgggactattttatcaatattcttatctggttttatgaatttaagttatttctaaattatattcttagtttgnaactcttatttttattttttttatttcagaatttattttattttttattctggaacattaattgaccatgntgnttctgntttaaaatgnatatcttatttcatattcctaattacttatttcgaattttagttatttctaaattatattcttacttaactcctatttggcctttttctaatttngnaaatgaacttctattctaaattttaattaatctcgtattgggnttctacatggcatcgttctttcactattctttatttttcattcagaatatcgggttattactaaactgtattcctaataaattgtcacgtgaagacggcgatagataaccgacacctatgcaatgttagaggtgttgattatcaataagaactaggagtatagtatgtgactgttcggttcaaaacctgacacatataacagcgtatagatatcggtgcttgttcacaaatcaacacctatatgtagttacatgtaccgattgtagaatcgacacctatatggcatcttatcggtgtcatctgacagtgctagtgacgaattcggtattgaagatcagtccaaccgatgttaaagtggattttatgtaccagtgattgtgaatttgggatctgcatctccaccaaaccgggataatcttggtcgttgtaacctgtcaagatgcacggtatgcatatatatgtagttttctcgattaaggagggcagcgaccggcgttatcatttccaaattgttagttttcattgcctccagcaaaacttgtctggacgacaatagcagccacagatcacgctcagacacaaatcccacaccaaccgcaaatccgcaattaggtgccaagttgtatacttgtatatgtatggaaaccaagactggacgacaagcatgtctattagccataataatgtattccctacgattataaacatggaaagtttactacgagatttaattaaactttgaagatattaaccatctcttctatacgcaataggtttatgatattatggtatagaaagtttcaagacaatttttttaaacacagtatgcacatacaggcgctcatatacatgttgtccactcatcttcacgaacttacaccctagctacccctatcagcacctccgaaaacgtacagggcaattttggattgatgaaaatcattagtgacgccacgctatcaagttctcactgccgatgagtactttgtctaccgctaaaaaaataaggcaacagtcgtaaatacgagtactcgtgctaagacaaggaatctaaccaatcgagccttcgcattttcaagacaactctatacacgccatttgtcttgttttaagttgatcatttcagaagttatatatcgacggcggaagtttaaaaattatgttcaaatcttactctaaacatcaaatatgtgtgtgtgtctgtgtgtgtaagcgtttaatatttttcataagagggactagactatgccacaccacgttatatatattttagcgaaactctaaccctcagaccttcagagccactccaa

SEQ ID NO: 1919 - DNA, 2000 bp, Oryza sativa
tgccaaaagcgaaagcatgagagagtaggtcaagcgaccacgacatatggagacaagcatatacactacacatacttcctttttttctggatcgatttaatttgttatgtacatatatatgggttgatgtagccttgatgtcttcagttcatgcagtgcaaagaaagaaagggaaaaaaagtttccttcagttttcagggttgatacattttcggttgttgcgtgtatataagcttctgctctagaagctttatcatctttttagtttttacaggttgaaatatgacatggcatcattctaatgttgctgttgcttgatgctgaattgatcgagttgcatatggataagagaagagataagatgagatgatatggtgtttattgtggttgcaaatgttgcatggtttgcttgcttcaagaactggtcgagcatgaagtgaaagacaattaagctccgagagtaatttgctactagtattgtattccaagttgtataattcttttcttgtctttgattaattaactagaggatctgacagtctcccacgggcgcaaacctattttggactatcgattttcgtaatctgggctcttggaagggcattgcttgcttgtctgttaccgtgatcacgagcagctcaagtatgatgacaaaagctcccaatttatccgagtaaactaatcgactatcgctgttaatgctgttctttttcttgtttttgcctctaaccaatgattacctcaagagcaccatgaacagcccgtgattagctactaataaacctgttgtttgtgatttttttttgccaagattaatcccattttcttttggtacgtggtgcatgagcagagctcagctacagcagcagaagagctgatatatgggtctcgctggtgatggcgacgccacaacctcgagtcccgacgaaaccaaacgcaaactgacgcagatcggctgttaggatgggtttcagattcagataaacccaccaccatcacattctgcaatcaaattcgaattgcaaatgcagatcaaaacgccagaatccgatgtctgctcatttacttactacgctgggagggagcagccgtgcgtgcttggtgatcggtgatggtcgacgcgccctcgtgatcaaccgacaaagccgtggcacgaggagagagagagagagagagagagagagagagagagagggagagggatttctagggttcttgctgctgctgtgcatactccgatcccatccaacccaccgatttcgcaacagtaaataaagtaatcagtgagaaagaacggggaccaggctgtcgatgcaggagaggagagtgaccccccacaacacagaccaagaatctacagcgagagggacagacagacaggcactctgatgcatgagagagaggacgagcttgcatctctgagggtgtttcttgggggtgaatagtttacttagccccaagcaaagattcctgctttgttctttctttcttcctgattagttggttaatccttcatctttcatcagcttatgatgatctgggtagtggtggagggaggagtgcaggggcagcaagcaaggaatgtttactgtgctggttcttgcatcttgacccaaagctctctccttcttcttaatctcctcttcttctgttgctaatttctcactaatttattccttagctaccactagtccactgccttgtggtgtactgtactgtactaaccagtaaccactagtggtactagtacaagctttgcttggctaacccctcttctgccgcctcctcattgccctcttcttctccctccccacatgggagtgtggctgctcatggcgtggtgccaaaatggcggtcaggccccgtcgccttcctgcgggaggaggagcggcgccgcgcgccacccgagatggttgtgatctgtgattctctcgcattttggcgcggctgttcttgagttggctgttcttggtgtgaggcgcaataggggaggaagggcg

SEQ ID NO: 1920 - DNA, 2000 bp, Oryza sativa
  N_region (489)..(489): n = any nucleotide
  N_region (501)..(501): n = any nucleotide
  N_region (549)..(549): n = any nucleotide
  N_region (552)..(552): n = any nucleotide
  N_region (554)..(554): n = any nucleotide
  N_region (559)..(559): n = any nucleotide
  N_region (1235)..(1238): n = any nucleotide
  N_region (1281)..(1281): n = any nucleotide
  N_region (1300)..(1300): n = any nucleotide
gattctcttagtatttagggatggagggagtagaagttttgtaaaggatcactaaaatatttatccaatcaaaggatcctacggcctagaccatctggatccgaaatcggacggcctatgtttattggatgacgtggcccaataagaggtattacttacttccttcactactttcaattcgtacaaaatccctcaaaaaaaaaaggaaagaaaaccccccttttcacactaacctctactctcccccgtctcagttcccgatctgcagcggcggaggagagagagacaccgccgccgccgccgccgccctccggcgaactcggccgggaggcccacggcttgggacggacaccagcaccaccctccctctcttcctctccttcctcaacccccaacccccgacccccgacccccgacccccgtctcggttcatccgcgcggcctccattccatctcggcggctcgaatccaaccgaaggtacgccgctngtttcccccccntagccctccctttcaaatcttccggcggcgccgccgcttcgtgagccnatncncggcntggattcccttttgagttgggttggttagataaacccttccggatttttttttttttggtttcgtgcgcgtggttgcggtgctaatatcagttcgtttatttcattgaggtttgggggttcagatgaactcacatgtaccgattaatggtgaagcttgttgtggagtggcagtggcggggatttatcattgtgggaaaatgtaggataatttcttagctttcccttgtccgtaatcactttatactactggagtagaacgtagaaatccgtgcacttcggatttcagagcgtttgccttgcttcagcgaacaattttacttgttcatacgtgttcgattgctcaagggatgataacgacccattgcaggtgttatcgttagttcagatgttagattgttagggggataaaaggtgttaggtgcaaggtcatgcatatctaagttatgttttcgtgcatttgaagtatatatatatttatgcaaggtcatgcatctctacattaagaatgcagtggtaatcttatagatatttatttatgataatggcttttgtatgaaattagactccttcactgtatctttgattccagtagagtatgtgttcacttatgctggaatgacaggataatatccactgagaggctcaactgcatgtatttcaccagtagagtaaacnnnncaatagttttttttttttttttagaaaaaggcagccccccagnttttgataaaaggcttaangagttcgtacaggcaatagttaagtctggcattgggtaacaccacatctggctcttcgcttatctctcttcataactttaaccagtccaatgttttgtgctccttaagtagtgtcatcaactatggtaatttttgttattcttagctcaggatccagatgttagttgcagaggtgttcagagcaggagcatacatctctagattttcgcgacatgcatgccaagtatatactgctaccgaaactctttatagggacagaaatttacttgtcaatgcttttccctgcattaaagtacagttacttgccttgagagaggggtactatgtataatttctggaacaaaattgtaggagaaaatcgcttcatagttctgtttttatgattttccttgacatgggatcctctctacttatttatttatttttatttctgtttagttctttattataaaacttaacgcctgttcatttataagttatagcactcactgcgattataagcctgcttaccctttttttataattaatttattttctaatatctgagcgaattttcatctaatatgttgctttctggaattcaggttgcaagattttcgggcattagctgtgcacccattctcaattcagaagacctcaatctctggagggcagcagaaaactaaggtcttgctgctttattcaaacccgactgatagcc

SEQ ID NO: 1921 - DNA, 2000 bp, Oryza sativa
cgtttgttattgcttcttttgactgtcggcactagtagcagttgatgcaacgtcatcctgacgccatcaccggttattatagcaaatcgttgcatcattaccgctgcctgtaatacccggttcctatcacatctacactgtaggaaaaatgaatactgagctagcagaaaaacccataaaccttgacagtcgtgcaatatgccacccttggctgcgcaagattaatgatagaaaacctattttttttctaaataattgaatgatttaatttaactattataaagttgaaaatagattaaaaatagtttttaaaaagttcttatatataatgttatagtaaaaatcacaccatctattgagtgctcgaaaaagtgttgcattgatccattatttctttcactaaaaactaataggaaaatcttgggagaatttctcgtaagttactggagtggtaattcttacctgcagcgtacgaccgtactttgtgctggacgacagataccatgtggagtacaaaataacaaatcgtaaaaatggccacatgccacacaatgcaacaaagattattcctccctctttttctttgtgtgtgtgaggttgagatagagacatacataaactacacaagagggtagagtagagtactactccgttatcacctgcctgccctacttttgtattattttgcatactccagtatatatttgaatgacctaaaacttaactgcatgctaatgtcatgcaatttattttagccactgtgcttggacaacataagttttgtcatgcaacctatagattttccaaagaagccagatcgggctcatatgttcatcatccaaaattttccgagcccaaggtagatttttaagaaaaccctatgttttctaatcaaagttttagaaaatcataagtattatgacttgtagtagcatataatcacatgttttgtggtctgagtgctttacaaaaccttactcttattcaaatctcgattaattttaacatacctgaaacaatgtcattcaatatatagcgaatagttgaatcaacaacttaatgaaaaaaaatcaataactgaaaattttcatatgcattatatatttttaaaattaagcaaatgcatcatatacaaagtgtaagaatgtgtcttatgaaactttataactataattcatgggattatgtgccagcagtcataatatcaagtgttttatacaactttgatcatgtagtatggagtttcctggaatttactcaatatatttttcaaatatcaagacaattagcatatcaacactcctcggattaccgttggtttaaggatatgttgttggtaggcgatggatgaaacggaattgaagacaattattgggagtgaattaatattataaaactgataaattgaactattcatttaaaaaaagaactaataaagaaaagttttttttaaaaaaaatttgaatatgaataatttataaaatatttgtgttaaaaacatgaagaacatatgtaaagattagtcttaaaaagtatatttcaataaaatcatatatttactaatatttatatatattataacggagaatagttatcgagttgtttttttttgagatcatatttttatctaagtattatcaacctgttactggaaaggagtatagtagaaacattgtttatttagtaaagaaaaaccctagtggattagtggaaattactgcaacagttacaggcttacagcggagtaagtagtgtagtactggtgattttacaaaagggccctcaacattccagcgaaatcgagggtaagccctgcgccgcaccaaataatctctcggcttccaatttttccacacaacacaacacccataccctctctctcctctcctcccgatctcgccgcgccgggaaccctcgccgccggccacccccgccgcctccgccgccctcgcgccaggcgaatccgcacggcccccgctccccgccgcctcctccggccg

SEQ ID NO: 1922 - DNA, 2000 bp, Oryza sativa
cgcgacgcgacgctgcgctagaattcgatcgactaaagctgagcggggtggtggttacgatgggggtgtcgacgagcgtggcggccgagatctcgcgctcggtggcccgccggcgaggtagaggcggcgagatttggcggtggtttcgtttgatcctgacggcttcggccggcggcggccggtgtattgcccttccccatgcatgctccagcgccgagcaaacccgggccccctaacgacgctacccaccattgatgccgcacgcgccttcgcctgcgcaggtcctccgcctgtcgccccgtgcggcctcggacctgccaatttctaagaatcgaaattgtcaatgcccaaaatatggctcaatttttcttgcatatttcttaagtgtataagaaatgagatcggtgagaagatggcatgcaaagctggggaaagttccaataaaatgttgctttctctctccctcaggagctgaggggaattttcttatttagagcggtaggtgaggaagttagtgggagttacctttcctcttttttcttgcgaaattggacgatacactagtgttttcttgagatcatttgtagcaagtgctgaggcatctcaagaggaggagctggtaaggggctggtcatcttcaatctcacgcagtcaagcctgaaatcatccacctgtctcacgagtcatgccaaggatccccgcaaaaaaagagtcacgccaaggatggcctctggctcagtgttctgctccctctgagtgcaaagaggtagatgctgccgctccagctcgtacggcattggcttgtcaaggtagtagtagcgtgcatgatggcagattaattggcgggaacgggtggtttaagaggtggcattatggcatggggaggcgcaggcaatcttgtgcctgttaggccagcgggttctgtcaatgctaaaggacaggggccacgcgagcagcgcgttaaaggcagcaagctcctcagtggccgcttcttgtgcataggtggcatcctcaaggagaggtgtagtgatggcagcagtcgggcaatgtggaggcacagagagggaggaggagcaggagaagatgggagggggagatggaggtggcattggctggggaagaagagggggaacaggtcggagaagagaagcagagatgtgatgggctggcacaggggggttggggtggggcacagatcacggcaattgtgtatttgagggaaaaactgatggatggcgaagcagctaattagtgttgggcaattcgctactgcagcatgaatgaagttggctctttgaagtaatagaggttgattattcttgcattgctattcaacagactgtattggagttggtggaatggttatatcttgtatttgaggtctttgttttctccattcactagtgtccatgaacatgaatatgcaaatattctttttgctagcagtggttatatgtatcttttattttgttgttgaagtaacaggagtatcttttgtcatggtaatcatatgatattaagtggtaactttcctctctctcttttggtaccatggcaaagttatgttaaataacttccctattatactgtaggtggtcatattaaaaaattgaggtggtaaaagttgcaactatttaatcatgtcgaattccaactcatcagagcgacgagagtaccgagaaccaacttcaccttcaccatccacgtcatcttctagatcaaggtataacattgactcgtttcttcttcttctttttttctcattaatacaatggaattatcaagaaaatcttgtaatttgcaaagttagattaccaggttggactttctacattaccatattgtaattccttgtgtttattttaagcattctccatctctttatttcatgcatttatttatgtactttgatggactggtatcgcaatcatcatttttacttcttctctgctatatagggatagaagtgatcttgcggaagtagatgatcctgaaagtgc

SEQ ID NO: 1923 - DNA, 2000 bp, Oryza sativa
tatgatataatagagtggactacagtaagtcctaggctagattcaccccattttcaaaaccggctataaccgtgtttttaccgggtacaataaaggcatgcacacaacaacccatcaattttaaataaacttataataatttaaattttggataaatttatatggtttctcacgttttgctgtgatattgtcgccgagatgtggttggctgcaaaagtttcaaacatccctatatcaccatggatcatatagtaaaaatacgtggtttagttttgttttgacacaatatactagacacgatataaaagtgagatataacttgaatgtatcaatgtgcttgtaactgatatgcacaggtgcatgagggaacctcaaattagccaacacgtacatttgcaatttgcaaaggacaaaggaccgctcaatgtgatagccaaattaacatgataaacagagatagcaggttcaccttcgcttctcttgagttgtccaggacaagatgttgtcataattgctactccctccgtattttaatgtataacgccgttgactttttaaccaacggttgaccattcgtcttattcaatttttttatgcaaatacaaaaatacttatgtcatgcttaaagaacatttgatgataaatcaagtcacaaaaaaataaatgataattacataaatttgtttgaataagatgaaaggtcaaacatttgttaaacagtcaatggcgtcatacattaaaatacggagggagtactaactcccgcgtcctttctagttaaaattgtttactgaaattctattggtacaatgaaaaacatatatacatacacatgtcacattggacttgagaattgaagccccagaaaagagtagcaatggagctcctaattattttcttacaaaagaaatacacaccacaaccacctctaatgcctccttggaacctaggaatttggttctatatgaatattgaaccaatttctatgaaaatcattacattttaatttaaaattaatgcatttagaagagacttacatttttgggacactactcaaatagatatattttatctcatatacaattaaaattataagttgacaaaatagttaatatgtttcaatggttggccataatactcgctcgcaattgtccaaataaataaagccctcatgaaatagaggattgatttagtagtacttctagcaaaactataagttctatcaacatcatgtgtatctctaaataaggcatgtccatgcaaagcttgcatgcaactattaaatctagccatttgtttctaagtcaagcaacctcctcaatatctcagagaccacatgagaaaatgacaagaagttctctccgtctatttgttttcctaacacaatatgcatggtcaattaggcaacgtagctcttatatcgtttttagcatgaaaacatgccaaattttctatacccataactatttcatgattttcttacattcataatcattatatatcgccagtacattaggcccagcaagatgaataatgccatctaattttccacggctcgatgactgccacgtgtccagttcctccgaagcagccatcctcagccgtttgattcgcgtataaatagccacgggcacccgagcccaccgcctatttcaccacccgcttcccctcccaccctcccccatttgttccaccaccagctggacggcgagacgaagcggaggcgagggcggaggcggagcacccctcgcggcctctcgctttaaggttcgtgctctctctctctctctcctccgccgaatcccccaggcgctaacgctggaccaaatgcaggaggaaaccctagaggaagcgagttggtggaggcggcgggggaggcgcgatgacggggccgcggggtggcggcggggaggacccgccgcggacgtcgtcgggcgcggcggcgtcggcctcggcgtcatccggcgtgccgaacgagccgctgaccccgacgtcgatgc

SEQ ID NO: 1924 - DNA, 2000 bp, Oryza sativa
tcataggggctacacacaaggatttaatgccaactagtatgacttaatggatgaattccatgtggctggttcagcaatgtgctgaactgaatatttgagtttgcatctaacactgcaatgctaatttgatgtctaggaaactgatacatgcgctaagaattacttcctctgtccctaaatataagggattttggttggacgtggcatatttagtacagcgaatccgaacaggcttctgtccagattcgttatactaggatatgtcacatccaaccaaaatcccttatatttagggacggagggagtatgtgattaaatgaacctcacttcactatgctgtgctggcctgctcaaatgaatattggtatgacacgtttggtaggttttagaaatagtggaagttttttttttcctttttccctttcccctgcattttgtaaaatagaatgcgcaaacatgctgaatccgataacactatctggctacctgcatgtgtgactgctttattattttcttttcgaactcggaaaacaaccatgttttgttttcactgcaccaatatcttctgttcaatccatcctcaaaattctcctttaaagtaggccgtattcagttggttttataatcatttattcaaaaagtgggtctatcgatgtttccctgttccttccaaacccagtttccagtttgttctccctcaggaaccagttttaaaactggattgttgaggctggtgatgttttgaaatcaggaccatgtacttgatggttactttgataaatgtcagtgacttcttttccaatattcagtttcaatacctcgaaactgtcgtgcaagtgtggtatgtttttatgcgatgcactatgttgttgctgaggtctgcaatgtgcatgtttatcccaagattttagtcactattctgctatgcctgtttctaaccaactgatatgcttctcaactcttcatttgcaaatttgacagagaatttgtagtttgtaagctcaaaacagtagttcctcacttgggaaccacttactcagaaacagtaacaataaataatgtttgaacagtccaagttcccaacaaattaccatattttttattgcgtttagcatggaactgattggaatcaggagatcttgaaacgaattggaggtcatagggataaacctagctccacgaagagaattagagatatccactacctcactggaagtataaaatagtagtttttctcatctcaccatagatttcctacccttatctgaagggacacacttgatgtgcacaaacagaacttgtgcatgatgaaatgttaaagtttctgacaaataccaaattatgttgtttcaactttatttaagtttgacacaagacctggtatccattattttattccataatctggttgggataattgctttctgctgttttctttttacttttttttaatccctagtcccaatggtgttttaatttatgaatgcagacatggtgatctaacaccataatcataagggccttgttatcaccagcacttctacaacctcaatgacacagccatgctcagcctaaatggttttgcttggacacttctggttaccttgcatcttttagctcacccgctgtatcttgcatgctgtgttgccaagtctttttgttgagcaaaacaaagtcgtaaaggtggccttttttagtgcctgtcaactgttttagtgaaaggccgtctagaaggttgtcaacattaaagatatgtagtgattaagagtacacagaaaaaccttcagcccaatcatgtgtttggatttatggtaaggtgaaaaatttggctacttttgtactactattaatgaatccatctcaagttatgtccaggtaaaataaaattttagtgctgaaagggtccataaaagtcttacaaaacacatttgtattaatttccctatcatgtttacaacatggcgcaggtttacctagtgctttttgtatgctacttgtgc

SEQ ID NO: 1925 - DNA, 1925 bp, Oryza sativa
  N_region (35)..(35): n = any nucleotide
  N_region (38)..(38): n = any nucleotide
  N_region (52)..(52): n = any nucleotide
  N_region (67)..(67): n = any nucleotide
  N_region (69)..(70): n = any nucleotide
  N_region (76)..(76): n = any nucleotide
  N_region (78)..(78): n = any nucleotide
tttttggggggttcccgccgaaggggaaaaggaanganggggggccgggggnaccccgaaggcgagncnnaacaancnaaacccaaccgcgcctgttgcgttgcaactccgttttgttttggcgcgcgcgcgagggaaaggaagagatttcgcgggaaaggggaggagaaaagattacgggaaaggaggggggacactgggagggagacggggggatttggccattttacgttttggcccctgacctgctagtgtatttcgctgttttgtacgaattgtaaaacagagtgtcgagtcaaactctgatccatgttgggactaattcgtactgtaggctcgtacagtgatgggtgggtgtattggtacgctgtagttagtaggtgagcagggtcaaggctcacacaattttatatcaaggttttgacagggttttcattgagaattgtaatatatatataatatagaggtaaaccagatagtagctcattaattagttaggtctgtgttttcgaaaaaagaaataatgtatttagatcgacgaaccccttatatctattttaaaatgttggtgaacgacgtaactatattttcatatcaataaagatagctaaatataattgccccctaaaaatcacacaattataaaaggtgtagggaaaagaacacgtttttttattcaaactaaaaaaatattctgtattgcctgccaaaatcgtatatactcatagaatgtgtacgcagcattatgatcccatttattaaaggagaaactaccatagtaataccattggtcaaagtgtttccgtattgtttagttgtcaccagtacaaccacagtaccactgcattgaacaactgaggggtcgatttcacacataatcataatcacaaggaccaaaacgcaaaaatgcacaataaaaaaccgcgaggagaaaacaaaacagagcacaagcagaggtaaaaaacaaaccaaaaaaaaaaaggtttcatctagccaacacccagagagagaaaggacccagtcccattccccattgccgccgctgctccctcctctcctttttaccttttcccctgcaggcttgcagccaccaccaccaccattcccctctcttctcctccttctccctagcagccaagccaccaagaacccaatcccccattgctagggttcctcgcttcgccgccgtcctcccttctctccacggcattgcctccaccacttcccctcctcccctgccgccgcaaccattcattcttttccttcattctccaaggtggtgtggttgcttgttcttaatgcgtcagagcaaccggcctcattgctgggtaaggaggatgcaagattgcaagtgtataaagattgtgtgtaggttttttgttttgtttgctggttgcatctggggtttgtttttcttttggtttcttggtggcttggatggatgagtaaaagtttctgctttttgagctgtgtttttgtgggttgaagctgtgataatacactagtggtagttgggctgttttagtgaggggggaaagatggtgcttttttttacctgcatgattgggtgttaaaagctggtgaggggtttaaccaactctttggatcccttactaaagttgccatttctttgtactagctggatttttacctgcttgcagggaggctcaaagattcggtccttaacttgccattccgtgcttatttcaggttggaaggagctgaaaagttgggggttttatggtgatgtgtggtactgtggagatcagctgaaagggacaagtgttgtgggtattagtggcagcttgttgtgagagccttctggtagatacactctacacttccagtccatttttgctgcaagaaatgcttcaggtgctgtgtctttgaggctcagtagcttccaatctttgtctggagagcag

SEQ ID NO: 1926 - DNA, 2000 bp, Oryza sativa
tactttctaatcttgcgaagatgtaagtcgagaagattatcagtttacaggtgacaacgtggttaaagtcatttacgtgtttgagaaaagtttttgggtggttcaaactccaaagtaaaacaagacataataactttcttagatcaaagtgaaaagatagtttaaaagatattacaaagtgaaactaataaaaggtagccctagacccaatttataccccccttcattttttttcagatttccaccgtttgggtagggtgggatgagtgctgagcgaaattactaaataaccctcgccattttgacgcctcctctgtcgtgcgtaccatgaaccccccacctcgtcagttggcctccgccgatccccatctatcccgcgagcgagcagggcggccgtcgttcgtcctgctgcttccgccgcatccatcaccctggtgagcacgtcctcccgccacccgcagcctacgccgatccccccatccattccgcagcgagcgagcagggtcgccgccgccgccgtttgtcctgctgctcccgccgcatctcgtcctcttccccatctctctctctctctctctctctctctctctctctctctctctctctacccacgcacttcttctcagaattcgccttcacccttagcttctgctctaggaatttgtctttaacgttaatactagtagcagtttgatggttcccaaaaaggtttggggggttcaacagctgaaccccatgccccatgctagatccgccactggggaggtgagaatttagattcggtttgtgagttttccatctgctgtgccttttttttttcgcggaagcgaaactttgatgcctttttggtgtcggttccattttctgattcgggttttcggagtacgccagatttgggttccagcagtttttgatttgccgtgcaaggtgactgtaggttgatgtgtgccggaactctgcgatcatgcgagtttccttgtgatatttttggtttttggatttagtgagctggatgtagaattttttgtcggatcctaggacgtcgggtttagtcaattggattctgtggcttgaagttgcacaaaaaacgacacatatattccgttttgtttttagctttttattaccgggaactgatcgaaaccagcgtctggtttttttggctgcagcataaagatacccaaaccgatgtttctcttttctggtactgtgttctgattggcgattgttttctcaaggatgtccattatagaatccttgtgcgacgttgccattaggggctatggagtatggtttgatccaggcagctccatagaatcctggaattgtgtcaagacacggtccttgtcacaaataccagagtcaattctctggactttggtgaatattagctgctcatttcagtgcttgtgcttgtagccatgtgctagactgtatgatcagtttttcatgagcaattcttggtgtattgttttagctgaataaaattggatttgattcgtccagggtgaccccagcttgttagcttttttgtgatatatgctcagaattctgggtattgagtgtctatcagggcatcagagcacgtcgtaggtccaccaactgttgaacatttcatcagtaaagaaaatgagttttacctatactatgtcgtagagaaaatgagttctataccatatgatggtatgatgttgctgccagagccaccaattagaatgcagtgagctgtttggactgggtctttttgtgtgtagagtttgagcgcagattttattggtctcatttggtggctacgtaagtaaaaacgaatatttatttgtatggatattcttgttcaagagtgttttgaattggtctgcctttgagctacaaagcttgcattgttgcaaatggagtcttcgctaagtttacttagagatttccttttttttttcagcacacattttcttctctcctgaagcaaaaatcacccaagaccagccctacaaaacctaggggtt

SEQ ID NO: 1927 - DNA, 2000 bp, Oryza sativa
taagatctcttttgaatgaaatatattaaatttgttggtttattctaatgagtaacgagtggtatcggagtattagtcgatacgcattagatttaccctatcagctatgctatgaatatgtataatctttactccaaagcacttttaagcgcaagtaatttatactgtctcggcacactgcccgatctatcccaatcgcttagcttaaatatattcttgaaatatagattatatatcattgatatctacagccgatcgagtggatctaactcttttctcgttacttacttcattgccgatctgacctgcgttacatcggcttggtgctaaatgatatgtcatcggcagtccagccgatcggctatcgtttatggatttaactttggattctttgtttcttgttggttgcaggatcaaactaactagcacgccctgaacctgaaggcaaatctttggacctgcactagagtaaagcaaacctcgccagtgtgtgtttttcacatcaacaccttccaatccttgtacacatgtatgattagcaggaggttcattttatcgcatgtcgggtgcatttttatccgtaaatggcctgcatacgtatatttaccaaaactagtggaaggggcagtgatgtcgacgcataatgggcgtagctgccaacatgaatttgccgcgttgaacgacggacttgacgcatgcattgcgaacggcacgggtgcagccgcaactacaagccatagctcctttcctttcttcttcttcttcttcttcttccttctttcttctttcttccttctttcttttcttctctctccctccatggctgatgccaaaaagtggctcggtcggccaatgacagcgtgacgaccgatggctcgatgcacgaaggtgcactcgaccatgatgggatgagctcgcacgggcttgtgtctcgcgaacgacgaggccacaagacgagcgtggaggccgactgctagtgcgtgatggcttgctcttttgcctgtccctgtctggaacgatacgacacatcttgtgtggagataccccaatcggcttgcgccggcgactccaagtcgacagttgcggtgttcaccaggaacggcaaaaacaaaacgggatggagagagtatttcattttcgtaattagatcagcgaatgcaaaacggatctacgagttgtcatccttctatgtgaattagaaaaatgtgacggtgatgtcatagatctaattttacaaaatttcagtggcacccagccaatatcacgaatagtagtggtatttttctaatatagaaaatttacgatgatatggatccaatctatactttttataaagttaaagttatagtccactaagttcaacatgctaccacgccacatcattacccactaccaaaaattacatattcaacctcatgcaaatatacaacatcatttacaatttatttaattctacaaatcaacatgcaatcatatccagttatcacctctcacaaatctatctatcatttttatagtattaaacatatagttatcaatatgtttcacattaaaacgcaggtatcatctgtttgttttatgataagtactgataaactctgatgttttattattttttttcttttacttttagcttaattgtcgaaaaaaatattgagaaatacttagtaattttcgtggcaaaacgtgagaaatcatacagttaacccatccaaacagtccgtaaagcccgtaagaaaaatggcatatgagaatacacattcggggaggatatggcacagggttttaaaagaaaaaccatcaaattaactcaactcgccccaaattttcgaggggagattttttttttcctttttaacgtttttacacctcatcatcatcaggcctttcccttccctttctcctttctcgttgtgtgggttctttctaggccctaggacaagccaagaagcggcggaggggaagggaggaagagggcaccagccgcaccggccggcgga

SEQ ID NO: 1928 - DNA, 2000 bp, Oryza sativa
gacggaaaaagtttcgtgtgtattgtatcaggaccaatgagacagagcccaccctgacaccttgctagggcggaggcgtactgacgttgccacgcagttgcaccaactcatggacccttgtcgaggattagagcattagcagttggccaccacattttgccgaacctaacgtgccatgtgagcaaagaataatgttagctacatgtttcacagcaagtcacttatagtgggtcccactaatatcaccttttttcacttttcatctcccctttttcctatcttcctctccccaatggcggataaagcgaggcgaggtcaaggcgacaacgccggcgaagcggcccacgcgtcgagggcgatgacgttaggtggagtggcaaggtcggtggcgcgggagcagttgacgagcgaccagatccatccctcgccttgtccccaaaagcagtggcaaggttggcggcacgggagcgagggatggcgaggtcggcggtgctcctcctctttgcattttccatggtggaggaagtgaggcggccgcggccggtttggcgacggcaccacctctcctcctccgactggcagggtacggcactgcaagagcttggtggcgtacaaaaagggggcgacggggcgggtctagcgctgactcatctacctcgtccatgactatggccggcgttggccttgagctcccctcctcagcaacgagcccggtgacggtgcagtgtggaagcaggggcgacgattttcttggctccctccttccctccccgttgacggtctccctccctagtcgtcgagacaagccgagctttctttcctccctctctcctttccctagcgacgagtgtgggctgccttaacgatgctgccaattttttatgaataacatgtgtcttagtttggtcacgcgttcttagtttggtcacagaaaatattgacgtggctgagaatctcctacttataagcttgagtaaggatgggaatggttagggtcgatccatttatgcactaaacctatccgtaaatttgtcataacggatttgtagggtcgctccaaaaatataaatggatcaaacggatcaatttgtcctaacggatttgtagggttgctccaaaaatataaatggatcaaacggatcaaaccattagaacctaaggttcaaggggttcgatctaaaatgacttcacatgtataaatgtttcaaaaatttgtacaaagttgcttcgctatataataattcattcctacaaaattcaactaaatttaacaagtttttaaagtgtgaacgcaagtttaaaaattttggatccgagttttacatgtaactagaatttttgggtcttagcaacacattatgggccccacatgtatgaagggctcaaaatttacacaaagttgcttctctgtgcaataaattattccaccaaaattcaactgaattcgacaagtttttatagtgtgaacgcgagtttaaaaattttgggtccgagttttacacatataactagaatttttgggtcctagtaatgcatcgtgggccccacttgtataaagggctcaaaatttatacaaagttgcttctctgtacaataaattatcccaccaaaattcaactgaattcgataagtttttatagtgtgaacgcgagtttaaaaattttgggtccgagttttacccatatgtaataagagtaaccgatccatttggatatctatgtataacctattgatataatagactcatggtggatcaaccctattaaaccatggataaacgaactcacttaaaacggtttaggttcaatccatatcctaaccattcccatcctgaccgcttgaggctgaatggcacataaacgtaccgtgaaagttcttagctgaggagagaagcgaataggccggcgatgggcgtggacgcatggtgcacgagcaacgaccggacgagtgaatgcagctgaggcgggaggaggcggtgtgggggaaggaggcgcacagca

SEQ ID NO: 1929 - DNA, 740 bp, Oryza sativa
accctaaaaattttcttttcaaattaaactaaacaggttcttagtttatttaactttttttataagtatattctcagcttcaatattattaacgttgtcatattggagtacgacgcgaataacactcatgccgagaaaatgatctattttttaaatatcttttaagaatctacaaattagtttttgaaaagatttaatcctgacgttttatattataagtcattttaagaaagtttacgatagaaaatttaagcaatatctaaagcacaaagttaatctaattaaaattaaaatttaatactacatcttaataatatgttaaagcgatttataatataaaactgaaggagtgaaatgtaaaaaaaaaaaaatcctgaaaggcaatgcacggcggccatcatttccatggtcacgaagaaggcgcaagaatccaaagcacacattcccatcacacacaccaccgctccgctccatgtcgcaccactacccatgcctccctccccagcttcttccacctcctgctcccctcgcctacccacagctgttcacatcactcccgctcctcgagaacaccactccctcctactagtagcttctctctctctctcttcttcttcctcgctttgcttgggttgggttggagcggtgagacgagagattgaggggaggagaggagaggacagcagctgcccctcgattcgattcttgagtgatcatcttgggcttgggcgttggcgcca

SEQ ID NO: 1930 - DNA, 2000 bp, Oryza sativa
gaccccgtattttttcttctcacttcacttacatgtgggactcacatattatttttatgagtgtatttcagaaaactgcaactatagtgataaaactatcagtttgctgtaacatgtaatatatttcggtttgctgcaacaatagcgtggggaaattatcacaagactgcaacttttactctatttttattttgctgactaggatatcacgtcagcgaaaccagctatccatactgctacacgaccccaaatacacggtattgtatatgttagggctgaagatttctggtattggagataagggacgtcaaacaactcaatataaaagttgaggtactaccggtgaacttaatcctggtaaaatttcggccccggaaggtggatatgccggcccattacaccccaaaccctagagaaatccatccactaacttaaccggtggaaatccaccactccgggccgcctcccgtcttctcttctcgagcggctcccgcgccgcctctccttgttgtctcgtcgcgcgccggcgcctcctctcgtcgcgcaccggcggcggcgccagcgcctcccaccgcatccgcctgcttcccctaaggcaccgcatccccttccttcccagtgccggcgccgcctcccttccatcctcggtgcaggcgcctcctcccttcatccccgctgtacagtgctgcacagagtcgaaacagtcttcttcaagcccagatccacggcaccaggtacaccttgatcctctcctcacccgcttctcgtgtgtggacagaagcatagcagttgatatgccatacatgccttctttggggttctttggtggaatggcttgatacattctgtttgagatgcttgatttctactgcattttaactgtatatacttttcaatcaatgtcttgtctagttccatatatgtacatggatatcttttctcctgctgttagaacttgtatggttaagttcgctgcaaagtgattttcttgattctttcactattcagagcgtatgttagttcatctgttgctaagttaagatcttaaaagtctgatcaaagaaaagaaaaactcagaaatggtatatatcatagaactctaagttgttagttcagtgtttaacttgcaatgagatgtttttataaatgaagagttaattttaatcatgcctggaatttttacaagtttataaataaagaaaccatccgaagttttattacccaagcgatgcatttcaagtatgaaaaataagtttggaaataggtttaaatttattgtccttactttttgtttttcatcatcttagactagatgtttttgttttcatgaaactagaaactcaaaaaagatttatagtgctgtgtggttatagcactcatgaacctattcctatcatatttggtcttgatttgtttcagtttattcatcaggttggttggggaatgcagttcattagtgagatatcattatcagtgctattcaactactgcaattcattatcagcagccactgtgttctgctaaacacatgtggtgctcaggttatgaacttgataggtgaagttaatggttgggtcaatatatctcaactgtggaaacaacgtagcacatgtatctgctcatgaagtttgcactttcggtggcaaataaaatttaatttaaattgtgtactttaagcatttttactgaggagtgagaagagatgtttcccagtctaagtttccatatattcctatgacatctatatttttgttgtttcatctgtgctccagttgctataacctggtttgctaatttgttatcaagaaatcgtgttgtctttcttttgtcttcctgttttgttaaataggccactgtagtgacactggtttgttattgaaacaaccgtgtataagtcaatttcgataatttttttttggccaaatgattgttatactgacttctgctgttaccatgttactatttaatagattttgtgagttctagctactagccaagaa

SEQ ID NO: 1931 - DNA, 2000 bp, Oryza sativa
cccggtgaggagccccacgctccgtcaaggaggtataaaccaaaaatgaggcaagcacaaatcaaaattgttgaacatgggccataactacctttacagatgcatatacattgcatcgatttgtatggttatgaatggaccaccatgtaccctcatgtcccaagtgtgcttgctgggggaagcatagcatttagaacggtttcgaaatcaagaggcagacaaatgaagtgagctctccaactcagcacaaggcaggttttttctttgttggtacgtacaggacaagagggacaacaagaaaggacccacaataatttatactctatgggttttcatgaccgatttcgcaactagattttctttgttattaataggtgtcctttcatacaaaagaagataaaaatgcaacattgatgacatagttgcttccatctttaaaactattattacttttaagggtgcacttgtctttatcttctggttaaacaaaaattgccataaattgcacatcctgcttaaaaaactatatcataatttttgctggctacttttttccaagtgtttttgaccaattatataaaaacatgtacacacaaaataatacgaatgcatgaaaaatatccttttaacatcagcttaatggctcctttggaacgcatcagcttaatggctcctttaaattcaagtgtcttgttatcttaaatcctacagatagaaaaaaacccaaagaaacggtagaaatgatcatttggattgagtagaaaaaaaaacataggaatcaaacgagactgacagacacagaaattttttttcccaagaggtggcacctcatgttgataatccttcataattcctatgacttgacacaatctaaaagaatttaaaggaatttgagcaattattcctttgttccaaatggttacataggatccaatctatcaaattttttctcaaattccctttgttctaaaggggacagagttgaaggaaaaaaaacaaatccatataatcgagtaaaaattgtaatgcatatacgtgtggtcgcataggtgaaagttattagcattctaagggctcgtttggaatatatgattttcaaaatacgtaaatgaaaaatacaagattggaaggtcctaacacttcaaaccatatgaattgaaaaagtttcaaaaaaaaactacaagaatgactgtttagatggagcacgggaaaagcgttggaatcaaaaagagagaagaataagcacaaatgattttttttttttccaagaggttagaccttatgttaaaattcccttcaaaatttctatgttttgggccaatccaaagaaattttgtaggatttttggatggctattcctttgatccaaagtaccacattggggattttttttaataggattgaagtcttccaaaaatccttaaaaccactttattccaaggagccttgctataacagtaaattgtttattgcaacacaaaccatacatatcttgcgttcgtacaaaaatatatgcatcttgttttgctacgccgacaatcccagcctgaaaataatttgattgtcattgctaccacatgagggtgatcagccagcccagccctcccctccaattgaataatcaccaactaaccaacgaccatatcaagaatcccaagctcctgtcagcgttataataatcacaaaaaaaggagaaatcccaggcatgtaaaatctcaggtaaaaacaccagtaaaaacccaaaaaatttatctcgactttttccatgatccatctcgtgcacatcgatcaaatctctccatctccatctctctctctgcccacaccacaccaccatgtgtgcccacatctcctcgaccaggcctctctctcctactacatcaatcctctcctcttcttctccctcctcagtccctatccactctccttcctagcagcagcagcagcagcacacagcgcggcaagaaacagggagcttcagggtgagaggagctagaatg

SEQ ID NO: 1932 - DNA, 2000 bp, Oryza sativa
  N_region (468)..(468): n = any nucleotide
catttgtgtcctagttgaactaagcatggctaagcatttcctaagccaacatctagtcattttgatacccaagttatcaatggcataaggtaaccaatatgtggctgaggaataggacccatcccacattacattgtaaaagaatgcaacatttaatagaaatgcgggatatttgtaaattgggtacagtatgatcaaacgtattgcatgacttgccttgctctcgaactgatgagacctcggcaacgtcttcgaggaactgcggatcgacgaaacggccgaaacctacgcgacaaacaaagcacacaagcaaaacatgctataagactgctgaaacaggaaacaaaactatttttaatggattttttgcatttttcttgatttactgagacttgaatggacttaaacggagctcggatgaattacttataaattttagaagataaactgtgtttttactaataaagnaaaagtccttaattaattattgcgcaataatacccagggctgacgtcagcgaaggggggggcgccggcacgtgggccccacgggtcagcggctccaaagggagggaggtggcgcctggcaggtgggccccaccaggcggtggctcaaaggggaggcgagggaggcgctggccgggctcggctcggcctcaaggccgaccggccgaccaaggcgaggcggcggcgaggcacgaccaccgacggcggtgaccggcggtgcgggaagcggcggcgacggccgaaaggaggcggcgcatggccggagcagcggcgtggccggcgctcgcgggaaggtgaggaaaggagggggagggaggactcaccggcgacacggcggccggagcggaaaacgaaggcggcgacgacgacccgacgagaggaggggcggacgagcggcggcgacacctagaggaggggaggagaggagttagggatgaagaaggcaaccgcgacgaccaaagtggctggccggagacggaggggaatggatagctcaccggctcgcgagggagatggggttccggtggggttccggcgacgcgaggcggtggccgagatggcccacacggcggcggagctagcggcggcggcggcttggcacggcggcggccctagtggcgacggcacgcggccggagatgggcgttggcggcggagctcggcgagcgcggcgcgacggcggtagagggcgtgggagaggacggtgaatggggaatgagagagagagctcgagtgagggttttatgggcgagggaggggcggaacgccgggatgccctatttggccggtgacgtggagaggtggaggagagagagagggtgtttggggatttcaaatcccccaacacttgcggggcgcgcgcgcgcgggagatgcgggggagagggcggcgacgtgggcgcgaggtgcgggcgcggagtggaggcgcgacgtggagtggagaaggcggcggcgcgggcgggtggagctccggctccaacgaccggaggtaggggacgaccgacaggtgggccccacctgtcggcgcccgaaagagaaagggagggagggaggacttcggggaggggaaaggaggagcgggccggcccaggaaaggggtgccgagcgcgatgagagagatgggccgacggcccatctagagaaaaaggaaggaaaagaaaagaaaaagaggagaaggattttcctgggattaaatattgcactttggtgatttttaattggttaaaattatttccaaggctctgaaaattccactaaaaatcttgttaatgcattggagcatggggaactcaagaaaaattccaccacgctatttccgattattaattgcatttattaattatggaattagctctaggttaattaagataatttcttcggacgatttatttaacaaatatttaaagcaaggaaaaagggggaaacttctgggcgtgacaggtcagcacctaggctcgtctatgcctactcccatgccgccacgggcttcgcggcat

SEQ ID NO: 1933 - DNA, 2000 bp, Oryza sativa
agggtttaaatctggacgaatactacattcatccacccatggtgtacgaacaaatgtacttcctggtgtcatcgtaattcttttgtgtcctacaacaaaaggtaattgatgtctcatacttttcctaggaccctgattacaagttgaaatactactagcatgttagttccatcgccgtacttgtacaacattaacacgcacatgcacgttgctccacggcattgaattttagggccacggttttgtgtgaagtcgatggatgtgtgttaggtacataatctgttccaaaaaatcacttgcccatgacattcattctgtccaaaatggaattactttcgtgtgctctgctctaagcaggacagtgtactggcacagctagtgcgctgctcaagttaggtggagaaggtggcattcatttcataatgtttcatccatcacctgcatggatgaaatctcacaaactccagagcatttcaaaacaattatacgaagttttcagagttcaaagattcagtgcaaacgattatctgaacttcccagagctcaaagattcagtgcaaacaattactccatctgaagtttccagagttcaaagactcagtgcaaacagttatctgaagttttcagagttcaaagattcagtgcaaacaattacttgcagtgtctcttgcaatttatgtgcatcttccaatgccaggattgctgggtgctttgatgcttcctctaccttggctttatgcaaagcaaggaggagaggcatcatcaggtgtaaaagtgctaaaaggaaaaaaaataaaagaatccaagaaaagaaggaaaagcactgaaagaaaaaagggcaatgttcaccacacttgctaacagtggtgctgaactaagggccatatgtgatatgtggtactcaccaagggaaaaaagttcatttggagagtaaagcatcatttaacactgccagattgttactgtgcaaaaatgtgcagcagtaccagcatatgtcctaacgtctaattactgcttcaggactggcttatcatcgaagtttcagttttgatcctaaagcaattggtggaacagtagatcagaagcaacattctgaagtaaaactaaggcctgtcaaactgatttcataactcctaattaatcagtagaattactaatcaaacttaaggcgtaaagcagcacattattctaagcctaacaagcaccaatcagagtgtgatcccaagaaagcagaggagcagggcactggtgtgtgtgtatatttcttttttctgaagactcaacagtgagaaaaagtgaacgctgggactgctagtccttggtcttttgcctgctccccgtttccagctgaatcgttggagacacacctgtccgttgatgcctgcagctacctcatgcttctgccagccacccgtgagtgatgtgcagcgcagggcaagccagcaattgtactagtacaagttacagtagaatcagaggatatatacttgcactaggcctcactggtcagtatactgtaataaggttctcttgttgtttattatccgttctgttcttgagttcgtcagtcatctgagcaagattttctttgctattccagtcggtgactgcctaagctaggtaaggtgcagttgattagatttgttgtttggttcttgtgaaatggtagtagtgatgtgcatgagtgttcttcagttaacatgattgtttttttttgtcttgttactgtcagttcaagaatggagcaagctggcaagaaatgtgatctttgatgatcacttcctcttcctgatgatgatttggttactttctggtactatcaacacacatcaaagccttgattcctctgttgcttgtacacactgtccttgatcgtagtagaaggagaaggtgaaggaatcatcagagtacagagattaatttcttgcagtacagattgatttgctctgcttctctgctggttcttgctgatcaagaagcatttgatgagagcttctcca

SEQ ID NO: 1934 - DNA, 433 bp, Oryza sativa
ttttttgatcggactcttttttttcatccggtttttttcgtctggttttttacggatgataaaagcacctcttgtttttttaaaagtaagcagagattacggccagttggaccttcccttctggaaccatccacggccttccaaacccctcccgccaacccccgtcttctctctcgaaccatccgtccccaaaatccgccttctccactctccaccctcgtcctcgagcttcgtcgaacactctagaacctccataaatacccacctccaccacactattataacaacctcgcctcccttccctcgctcttcccaagtcacagctacgcacgcacgcacgcgcaccacgaaccagcacgcgcaccacccaatggcggacgacgcgtacgacgacctcccaatggccggcgcggaggaggaggtggacgacgtg

SEQ ID NO: 1935 - DNA, 654 bp, Oryza sativa
  N_region (49)..(49): n = any nucleotide
  N_region (55)..(55): n = any nucleotide
  N_region (83)..(83): n = any nucleotide
  N_region (114)..(114): n = any nucleotide
  N_region (122)..(122): n = any nucleotide
tttttttttcccggaaaagcgggccgggccgccgttgcctttttgggcnaaggcnaaaagcgaggggtcctggttgccgccgncccttccccttgttcgcggggcccggaggtnaggtaggngccccccccccctccgccatccctctctcgcatacactctcactcctccctcctcttcatcatcctccaccacgttgccggcgcgaattggcccgagcgtttgggattggggacgtgggaattcctcccatcccgtcctgcttctcgtggagagagatttcgcctgcggatggattccgtacgggctctctctccgcgccgccagatccaggaggggagttcgtgcccgcgatacgctccagtgggcaatccggtttcgctttctgtaggttagctgggcaggcaattttcccatgaattgatttctgggattggggggcgagtttcagtcatctttttccgcgggataaattgatgtttgtttttgtgttcctaccgcagtaagttaaactatgcatcggtaactcgtcgagatccattgatgtgctgtaatatcgtacttaatactcctgatttgataatagctatgaagattttgtgtctcctaaagagcacaaaaatgttaatatgcttcgactgggacttaggtaga

SEQ ID NO: 1936 - DNA, 1484 bp, Oryza sativa
  N_region (2)..(2): n = any nucleotide
  N_region (4)..(5): n = any nucleotide
  N_region (7)..(7): n = any nucleotide
  N_region (146)..(146): n = any nucleotide
  N_region (162)..(162): n = any nucleotide
  N_region (222)..(222): n = any nucleotide
  N_region (261)..(261): n = any nucleotide
cnanngnaatgggcttgtttatatttttaccattccaattcatgtttattatttggtaaattaataattatagggctatatttagtttgttacaaattttgataatgtctatgaaattttaacaacattatattgagcacatcctnctaaaacttgaaaatnttgccaatttggctaattttggcatttaccaaaattaatgaaatgattcattttagcgtncggtcccgtcatgttattgtcttatatatctcggccgcnacaaaaattttaatttttaaacttcattttaattttatctgaatgtttttgtatcgtagtttactttgatgttgcattagcttttaaatcgttaagagcatggataaaaaaagttttattatgtttatttgatgttacttcgttcatctcatattatcattggatgcatcaattgcaacctcagccaactccaattttacctctcatcatatcaacggtgacacatgaatgggaaatatttttagggtcactcttaatatctacttgttgacttatcagccccaatcaaaatttgatcttagagtaacttctaatgaatcaacatcaagagtggtgttaattttatgagaatatagctggagtaaaaccgggcggttaacattctggatggcagactttctgctgccgagggaattgaagcagtatgagtatgtacgggagagctagcgagctgatgagtgggagagtgcaagctgcgacctgtagctagctagcattgatttcgatcgggggccaggatgcttcggcatccgttttccatggacactcccgcaggctacagctcatggagtcacgtgctcgtgtgcatgcattgcggttaaagtaacggggcagattcttttaatttactagtagcccccctctttgttttttgttggaccaaaacaaaactagtccatcgatggtttaattaagtagtaaattttttagatgcccccaactgatcttatgcttggtgaaaagaaaaaaaagattaagcagagtgctctgctggagtaatggatgagagagagagtgtgtgagtgaggtgcaagtggtggagcatcaatccatctgaatgtgggtgggcagaggatggatgcagtgcatggggcacgttgggggcctgcttctgtgctgggttgcagcttcctctcttctctctcgctaatcctataccctctcacgctaattaatcgcttcaccacccttaatgcacacagcttttgtcaaacattgtttttgtgcacacacatgtagtagtactgggctcgtaccactccactgctactgttagtgcttgctatgctacaccctacacacacatacaaacacactctctctcctcctcccccactctatattaattacttcacaacaacccttcctgttactggtgagcgacttggagctcttcaaagccccagcactatttctcctcccccttcctcctcctcctcctc

SEQ ID NO: 1937 - DNA, 1625 bp, Oryza sativa
  N_region (1)..(1): n = any nucleotide
  N_region (15)..(16): n = any nucleotide
  N_region (23)..(24): n = any nucleotide
  N_region (30)..(30): n = any nucleotide
  N_region (32)..(32): n = any nucleotide
  N_region (34)..(34): n = any nucleotide
  N_region (43)..(43): n = any nucleotide
  N_region (53)..(54): n = any nucleotide
  N_region (57)..(57): n = any nucleotide
  N_region (70)..(71): n = any nucleotide
  N_region (82)..(83): n = any nucleotide
  N_region (103)..(103): n = any nucleotide
  N_region (107)..(108): n = any nucleotide
  N_region (111)..(111): n = any nucleotide
  N_region (120)..(121): n = any nucleotide
  N_region (127)..(127): n = any nucleotide
  N_region (129)..(131): n = any nucleotide
  N_region (134)..(136): n = any nucleotide
  N_region (148)..(151): n = any nucleotide
  N_region (153)..(153): n = any nucleotide
  N_region (155)..(155): n = any nucleotide
  N_region (162)..(163): n = any nucleotide
  N_region (165)..(165): n = any nucleotide
  N_region (171)..(171): n = any nucleotide
  N_region (175)..(175): n = any nucleotide
  N_region (177)..(177): n = any nucleotide
  N_region (181)..(183): n = any nucleotide
  N_region (185)..(185): n = any nucleotide
  N_region (192)..(195): n = any nucleotide
  N_region (203)..(204): n = any nucleotide
  N_region (210)..(211): n = any nucleotide
  N_region (213)..(213): n = any nucleotide
  N_region (216)..(216): n = any nucleotide
  N_region (220)..(220): n = any nucleotide
  N_region (224)..(224): n = any nucleotide
  N_region (229)..(230): n = any nucleotide
  N_region (233)..(233): n = any nucleotide
  N_region (236)..(237): n = any nucleotide
  N_region (239)..(239): n = any nucleotide
  N_region (250)..(250): n = any nucleotide
  N_region (252)..(252): n = any nucleotide
  N_region (254)..(254): n = any nucleotide
  N_region (259)..(259): n = any nucleotide
  N_region (261)..(264): n = any nucleotide
  N_region (270)..(270): n = any nucleotide
  N_region (272)..(273): n = any nucleotide
  N_region (275)..(275): n = any nucleotide
  N_region (280)..(280): n = any nucleotide
  N_region (282)..(282): n = any nucleotide
  N_region (289)..(293): n = any nucleotide
  N_region (295)..(295): n = any nucleotide
  N_region (297)..(300): n = any nucleotide
  N_region (303)..(307): n = any nucleotide
  N_region (311)..(313): n = any nucleotide
  N_region (320)..(321): n = any nucleotide
  N_region (323)..(324): n = any nucleotide
  N_region (327)..(329): n = any nucleotide
  N_region (332)..(334): n = any nucleotide
  N_region (336)..(336): n = any nucleotide
  N_region (345)..(346): n = any nucleotide
  N_region (348)..(350): n = any nucleotide
  N_region (362)..(363): n = any nucleotide
  N_region (375)..(376): n = any nucleotide
  N_region (381)..(382): n = any nucleotide
  N_region (386)..(387): n = any nucleotide
  N_region (390)..(391): n = any nucleotide
  N_region (395)..(395): n = any nucleotide
  N_region (398)..(399): n = any nucleotide
  N_region (409)..(410): n = any nucleotide
  N_region (414)..(414): n = any nucleotide
  N_region (425)..(427): n = any nucleotide
  N_region (429)..(429): n = any nucleotide
  N_region (432)..(436): n = any nucleotide
  N_region (450)..(452): n = any nucleotide
  N_region (457)..(457): n = any nucleotide
  N_region (465)..(466): n = any nucleotide
  N_region (470)..(470): n = any nucleotide
  N_region (473)..(473): n = any nucleotide
  N_region (475)..(477): n = any nucleotide
  N_region (483)..(483): n = any nucleotide
  N_region (485)..(487): n = any nucleotide
  N_region (495)..(496): n = any nucleotide
  N_region (498)..(498): n = any nucleotide
  N_region (505)..(506): n = any nucleotide
  N_region (508)..(508): n = any nucleotide
  N_region (520)..(520): n = any nucleotide
  N_region (522)..(522): n = any nucleotide
  N_region (539)..(540): n = any nucleotide
  N_region (544)..(545): n = any nucleotide
  N_region (547)..(548): n = any nucleotide
  N_region (553)..(554): n = any nucleotide
  N_region (558)..(558): n = any nucleotide
  N_region (560)..(560): n = any nucleotide
  N_region (569)..(569): n = any nucleotide
  N_region (571)..(571): n = any nucleotide
  N_region (577)..(578): n = any nucleotide
  N_region (588)..(589): n = any nucleotide
  N_region (591)..(591): n = any nucleotide
  N_region (597)..(597): n = any nucleotide
  N_region (599)..(599): n = any nucleotide
  N_region (605)..(605): n = any nucleotide
  N_region (607)..(607): n = any nucleotide
  N_region (610)..(611): n = any nucleotide
  N_region (620)..(621): n = any nucleotide
  N_region (624)..(624): n = any nucleotide
  N_region (633)..(633): n = any nucleotide
  N_region (641)..(641): n = any nucleotide
  N_region (643)..(643): n = any nucleotide
  N_region (646)..(646): n = any nucleotide
  N_region (654)..(654): n = any nucleotide
  N_region (656)..(656): n = any nucleotide
  N_region (658)..(659): n = any nucleotide
  N_region (661)..(661): n = any nucleotide
  N_region (673)..(674): n = any nucleotide
  N_region (687)..(687): n = any nucleotide
  N_region (696)..(696): n = any nucleotide
  N_region (700)..(700): n = any nucleotide
  N_region (710)..(710): n = any nucleotide
  N_region (717)..(718): n = any nucleotide
  N_region (739)..(739): n = any nucleotide
ngggggggggccccnnggggggnnaattgntntnccctgtatncccccccctnnggncccccccctgggnnaaaaaaaaggnnccccccccccccccttgtgngggnntancccctctgnnggaatnannnaannntccccccctcgnnnntnanaaggggnngngggggnttcntntttnnntntgggggnnnncgggaaanncccggnntntantgcncctntggannttntcnnangggggggggcntngnggggntnnnncttttntnncnaggantnttggggnnnnncngnnnnatnnnnnggtnnngcccctnngnnaannnggnnntntaaaaaaanntnnnaaaaaacagggnngaaaaatggggnnattgnngccnnccnntttnaanncccccgaaannctcnaataaaaatgnnngngtnnnnntaaaaaaaggggcnnnccttnaaaaaatnngccnaanannncaaaancnnngggaaaanngnaaaaggnntntttttccccccnanaaaaaaaaaggggaaannattnnanntttanncccntnaaatttttncnggtttnnaaaaattttnnancccttngnaaaggnanttnnaaaaaaccnnaangggttgggnttaaaagncnaanggcccccnantnnanggggaaaagggnnattttttcccttnaaagggggncccnggggtaaaanctggggnncccccttaagggggttccccntaacccgggggggaatccggggttttttttccccccccccccctcgcggaagtggctcggcaggtggcgaggccacggcggcatagttggattcgccacgtcatgttaaaggaaaaactttagtcaaattatacataggtatcacatcactcaaataagatgataataatatggaagaatctcatttacacttgttttgtaagttagaagatccgttgtactcccttcgttctaaaaaaagaacctacgatgtgacatagttttgcggagagagtatctggttttcctgtttaagaatgaaaattggatttaagggctatttactttggtgctaaaataaaccatactaaattttgacaataccaagactttggtaaggttagcaatattgtcaaattttggcaagatggctattttggatgcgttcattttgttgccaacatacatgctactcacacatattgctgtgcagttgctaaattttagttattactgtgcagttgccaaatttctgatatatttatcaaaagttagtaagaaactaaacatatgcaacttaaaaaaaaatggtatgatttaaaatgacatcaaagtgaaagttaagggatctcaaatgagcttattcccgttccggtttggttggcgtagcgaatttgtcggccgttcgacgagcagctggctgggccggctcactcacaccagccgcatcgaggcccaactgagaggctaatgggcctcggccctcgggacggtttgcctccggctccggctgcggatggccaccaccaccaccaccatcatcatcggtgcccgccgcggaagaggaggagaaagggaaaaaccccgcgctgtgtagggttttaggcgggtcgaggtggagggggga

SEQ ID NO: 1938 - DNA, 2000 bp, Oryza sativa
  N_region (1656)..(1656): n = any nucleotide
  N_region (1735)..(1735): n = any nucleotide
cagtggaaattgtgtatgtttagaacatcgaaaacatttacaacgaatcatcaatggagcaatatatgtggcagcatcaaatctctgtaattcaagtgcaaactccaaagtccaacaaatacctgttcgactgcactccggacgatcagtagttgacgactcgtactcccagtagcaatcctgaattcctgattttctgatgctattgctgcaactccatccactgccttccatacgacatagccccagctgcatcctgcataacgtgaagcaaagtctacagcagcatagtactggagactataaaactcacaaaacacaatgcagtattgcagtgaaggataggaagagccatcggtcgtcatgtcgctgtttgctttttcatcaactcggctagctttcaattccttcgtccctccctccaccatcgccttccttgctttgctggctgctgctgctcgtcctatactcatcagtcttcagtaataaacgtctccatcactcactcacctgctctctccttctttctctgcctgtgtgtgtctcctctgtgtagtgtatctgtgtgtgcatgcacagctcactgcacacgcagtgatgaggccccaaggtgtgttggtgccgttgcaagaccgacatgtgggcccatgttagtgttccatttgtgtgaactatgctgctactgtttgatagattatctttggtgatatgataagcttggcagttttaggaaaggaacagggtggcaacacttctgctaaaagaatgtactttcatcagttcaagtgtttgttaattgccagaaaggaaaagtaaaggtgtttttacataaaaagttttggaatttataatcacttccagtttcccatgtgaccttgtgctctctatgttcaacaaacaatggcttgccttaaagtatggctgtatgctaactagaaatttgacatctctattgaactaaagtaaacaacttttaaggtattaccttacatccacagccaaagagagaataagtttgcattaaaaagaagagctaagtggcttattaagcagatctgaccaattagatttctaaaaacccagcaagcaagtaaataaatgccactccaaagaatcatagttgtaaccatcttcttatgaaccctacatgctcctttaaaacacatgaattttataaaaaataataatatataaatattaattaaaatttccataaaaattacacgaaacttctgctttccaaagtaggtttaaaattccagctagtcagcaccttctaagttatactccaagaactgataagtaatgacagggaaactgataaaatcctctctcatgatactacttcctccattctagaatataacaatttagtactggatgagacatattatagtactacgaatttagacatgcatatgtccaaatacataatattattatacgtctaatccgattatagattgttatattctcggagggagggagtagtaatattttttagtactgccaagtccaaacttcaaagctcccaacaggccttccccagtctctttagacaatgttctggagagactacaaaagtgatgttttacccacactattctaaccgagagagagaagagagagggtgctctgtatgtaccatgcaaaaanaaaaattttactacaccgatggaggtggtggggtcaggaagagaagaccctcacccatgtgggagggtcagtgagattntagaagagaggaggtagaattgtagtagtagaaaagaggaggagctagtagtagtagaagaagaagagagcagatagaaagaaccctttcttaaatgcagggaagtagtggcttcacttgcaacggtacaagaaccaccatcacttccctaccactccactactagccactggccattgctcctctcctcccactcttcttctccatctcctctcctctcttctctcattctcttccctgcaacttgcaaacagtgctctgcaga

SEQ ID NO: 1939 - DNA, 2000 bp, Oryza sativa
  N_region (344)..(344): n = any nucleotide
  N_region (349)..(349): n = any nucleotide
  N_region (369)..(370): n = any nucleotide
  N_region (374)..(374): n = any nucleotide
  N_region (376)..(376): n = any nucleotide
  N_region (387)..(387): n = any nucleotide
gtgtgtgtgtgtgtgtttattttttgcaaaaacttctataggaaagttactttaaaaatcatattaattcatttcaagttttttaactaatacttaattaatcatgagctaatccaccactccatttgcgtgccaagaggaagactcataagaacacaacctaatcacgttccttatgtccctagttgtttcaaagataatgaaagctttattgaactcaactaattaaattacacatgatataaacatggcatagttttgtaaagttagatctttggccaaaaaaaaaaggtcatttcacacctattgttttctaattggctttactgagccacttacaaaantttgnaatttttttaaacctaattnnagantnggttttggaantttttttcatcgtagttttcttttctatcattggcttttgaattgctaagaacataaatataaactttttaactataaattatttttggttgcttcgttcattttttcacggcttatcagctgcaaagtaaaacagtgggtctattgtcgaaagagcacacatatttcccccggtattctgcgtgttggtaaacagaaaattataagaatatattgaaaacctaagattcaagggctaaccaaattgtacaagttactaccatgatttgtattgtgcgatatattgagtggggccatgatatataattatctttgtaacagggaagatagtttttgcaaaatctgttgcattcgaatcaagcaatatttgttaataaaacctgacatgacagtagggggggtgcatttaaaggagaattgtgaagcaagtgactaaaaatagacccctaaaaggtgttggctggcgatgagatgaggaggggagaaggaaacaagtgagaccagcttctaatttgaaagcacatgtgggaatcgggccttgtggggtgcgggtagccgttaaggccgcggggtgactcctccgccgcaggatgcagatccgacggcccagatcccacgaccgttgcgtttaaacaggagaggccgggtgagcccttgccttttcggccaaattacgccttcctacctcccctattttatctctcctttgtctcccctctcctccgctcctccaaccaccgcagctcgcactcgcagctaggcctctcccctctgctgcttcttcttcttctggagcatcgagagagagagagagagagagggggagagaggtggcagggcagcaatcttcttcctcctctctcgtcttctagatcgtgtaaggctccttcttgcggtagattgatgcgttcttggtcggaaatttgggctagaggaggagattttcattttgaggggttttttttgatgtggttttgcgttcgatttggttccctgagctcgttttcccttggatctccgcttggatggagacgtggacgagtaattcagggaaaaagattagcagctagctgaaatcgaatcgtcggtactctagcctgtaggattggttcaagattagatctttgatgtttttgatgggttcttcctcctggttttttctaccaagaacggaggaaactcgacagggagatgattccgcttcttggaaggcatgttcagcaacttcttggacagccttcctttttttgtgggtgttttttcttttcttttattttctgctgtggaatttcttcgatctctccaccctgacgagagagttcaagcacagcaagtctctcgagttggaattacgagggttctaatctgtttcttctcttggtttctgccatatttgacttcttgggggtcgtttcgtggtcaaaactggaatttttaagacatctagcgaaatatcaggagcgaattcaaataataatgtcttgccttttgtagatccgcgtggctcgtaatgctacatgttcatatcgctgcctgtttcttcgatttctgacaaaaaaagcgttcgtgttctgacaaaatttcggtttggtttttctacagtagaacgtcag

SEQ ID NO: 1940 - DNA, 2000 bp, Oryza sativa
tagaaaaagtataatttgactccctcaactatcgcccgagtatgattcatatcctcccactacaaaacagatacatcgacccctacaattatcaaaaccaatgcaaacaatgtccctcggtggttttggctgaagtgtcgcctacgtggcggttttggctgagtctttgtcctacgtggcgcgtggcattagaataaaaaaatatgggacccatatgtcattcataaaaaaatatattatgggacccacatgtcatccttcctctccttcccttcttcctcccgtctttctctctcccttatctctctcccagcctttctgatcgaagcggcggtggcggcggtcgggagcagctgcggtggtggtggggagcggcgacgatggcggtcgggagcggcggctgtggcgatggggacgaggtggttgggagcagcggcggtagcagtggggacaaggcggtgggaaggggcggacgtgggccagtgctcgggcttgacggcggtgcagagtagggcgacctcggtgagcctcagcatgtcgccgtggcggtcccggtcggtgacgatctccacatcgaggatgtctgtcgaccactcatggctcagcgccagttgcgcccactccgccaggtcgtcgtcctcgtcgacggggaccttcccggtgaccacctcgagcagcacgagcccgaggcagaacacgtcggcatgggaggacagccgcctcccgcacgtgaactctgagcacttggccgccgcgagacgatgaccgtggtgcagaagcagcgggtagaacccgtggtcggtcaacttggccaccggcaccacgtcgccgccgctgccgggcgccgggaagacgacgagcacgttcgacgacttgaggttgccgtgcggcggccggtggacgaggtcgcctggctctggacacgcgcgtgcaccaccaccggacgccgccgtcgctccctaccgtcgtccccaccgccaccgccgccgctccagagagagagataagggagagagagggggaggaagaagggaaagagagggaagatgacatgtgggtcccacaatactttttattgtgtgaatgacatatgggtcctacatatttttttttgtttttattctaatgcaacgtaagcgctacgtaggactaagactgggtcaatactgccgcgtaggcgccacgtcagccaaaaccgcttccaaaaccacacaggaatatattttgcaccgattttaatagttagaggagtcaatatacctggttttgtggttggaggttatgaatcatactcgaggcatagttgagggaggccgtgtttagttgcaaattttctcttcaaacttcaaacttttccatcacatcaaaactttcgtacacacacaaacttccaactttttcgtcacattgttccaatttcaaccaaacttccaattttgaactaaacagcagccggagtcaaagtactttttccaatcagatttgagccgatcatgatttgaactcttcaaaactactagtaattttcagttcgaattcatgaaagttcacatcatgctatacctacacctagcatgtataggactggactgtattggtactagtactacagagtatcatagccgtacgggtatcatagacaagacaatacagaaagtacagtgtcctggaaacgtcaatgatcaaatcgaccatcaatccctcctcacctttcggctttccatcaaccggaatcaaatcggatagcgaagcaaagccaacggaagcaaagtaaacagggcattgccgtttctggagctcccctactgaaccgcctcgaaagcctcctcatcaccattcctcttcctcccatggcgaactcctttactcctcctccacccccaccgcctcgcccatccacaccgacgccaaggcagcgcttgttcttgttgttgttgttgttgttggcttcgctttgctgctaagctagctggaggaaggaggaggaggaggaggaggcg

SEQ ID NO: 1941 - DNA, 2000 bp, Oryza sativa
tactgttttgctcttgtcattttccacttaaaactgaagcagttctctgtttctctggtgtgattttatggcttgctgaaaaccgtccagattcatccaacgtctcaacctactccaattgcaagctactaaagcaaaataccgcatacacctatcgtccaataaaatacctaatcttaactgtgaatttggacatgtatatgtctattcataactaggattagactatgtttgagatgaaggaaatagattcaaaatccaagtgaataaaatgcaacattggttctaaatattaagaaattaggtgaattactgccgcaaattatcaacttgattataaaattaaatatattataagtaaatataacaaacagctaaatatattataaagtaaatataacaaacagctaaaacaaatgatcaaagtaaacagtaaaagaaaaccttttagaaaaacgtactcctcttgatggggtaaataatccgtttcaataatgtttcaataatatatccgttgtaggctgagttcgaagatgctgatggagataagatttccctcgtttttcacgtgtatacttttgaagctactaaaatatatgtttttttttaaaaaaatacagaaaaattggttcaaaaaccatattaacctatttttacaaatgtaaaataattaatacttgattaattatataataataactcaccttattttgtgtatctacttcctctgtttcacaatgtaaattattttagcattttctatatctaaatttattaatatcaatataaatatgaaaaatgttaggatgatttaccttctgaaacggatggagtagtaattttctttttacctctccaatcaaaggcagccgtattcttgagaatctaccacgtttatagcggtagtaacaattttggtaaaaatctcgtgcatttttctagatgctctggtgggatctgagaacgcctacccctacacgaaaccggaagcagcatcgtgtacaaaaatactctaccactgtttacttctgtagcatcacaggctgaagtgacatgccaagcaggcaacctacggcccacgcgtaggtccgtatatttactcctatacgcgtagagtacacggtgcagtgtatagtacatagtactaccgctcctcgtatcaggttataaaacgttttgactgcttttttatctaacgtttcaccattctttttcaaaaatatataaaatattaaaataaaataagtcatgcataaaatacaaatttatattttactatataacaaaataaaaattactaatcataataaaataaaataaaataaaggttaaactttggataaaaacccataataataattaaaaacggagggagtagagtagtacaggcagcacagccgcagggttgcagcagcagcagctgcctgcctccctttctctgacatccatgaatgggttcgagccgagctgaagctgaagcagaaggagaggagagaggaggtggtgtactggtgcgtgtgtgtacgagtatttcagaagccaaccccctcccctccctctcgctgctgcgtctctgattttgatgcatgcaaaggacgcgcacaagtgcacaagagcgtgagaggagaggagaggagaggagagagagatggtgctaccgatgagctcgcgtcagtagtagtacagtgtgtgatttcactgaaactttgttccccaccgtctccttccgcttctctcctctcgtgagatcgagagtgtgagaggccggtggaggaggaggaggaggaggaggaggaaaggtgaggtggtgttcttgctgttcttgttatttttttcttttcataaattgttgttgtttgttactagaagttgtttggaagaagcgaggggtgtgggggtgaaagtgtcgtgatctttttttttcttcatttttggtgagtttgttaagtttcgtggcgattttgcaggtgggatttggatttggatttggattggcggcg

SEQ ID NO: 1942 - DNA, 2000 bp, Oryza sativa
  N_region (304)..(304): n = any nucleotide
  N_region (374)..(374): n = any nucleotide
  N_region (1613)..(1613): n = any nucleotide
ccgtggtggaaatggagcaacatacgatccaaaaaaattcctaatcaaagttactccttaaaaaacaaaaaattcctaatcatttgttttttcctatgaaacaaatttaattctatgaaaaactaattaaacttactcctgaaaagctagtatcacttttttccctataataatccagatccctctcctgcaccgtgattgaaatgcattaaaaaaaaatccccaaccactcgtgatagattttaagaatggaaacatttcctcatatctccatagctaacatttccaatctaaccatcccaanggcaccgaacgaaacaatcggggaaaatcccagatcagatcaggggaggcaaggagacgggggaaccctnacctgacctcggatctagtggtgggcggcgccggcggcgccctgcctctcgagctcctcgaggtgggcgaggtggcggcgctccttggggaggttgatgaggtaggagaaggccatgaggcgtagatgacgtggaagagcggctccggcgagctggtctcgatgtacttgtcgatgtagcggtcgacggcctggtcgctgctcttcttcacgttctcccagctcagccgcggcttcaggtaccccggcacctcccgcaccttcatcccccggatctcgctgatcagggctcgcagcgccatggatggatctctccgatctcgatctctcctcttccccttcctcgcaacgtcagggctcgcggctagggtttggtggcttccgagacgggaggaggaggaggaagggtgggtgggtggtcaagggatggatttgttcgctacggggtggggatgggttgggctgggctaggctgggccgacctgggcttgtgtgacagacatgtgtagaggctcactgtttcggaaaaggaaaatgtataccgaaggtccctcaacttgtcattgagttataaaatcgtccctcgaccttaaaaccggatacaacgcatctctcaacttacaaatccagtgcaagttccctcggtggtttttgactccgattttattcgacgtgtcagctgactcagatggtcggtaggatgtcctccttccttcaggcgaggaatgcattgacctcaagcataggatggcgaggtcgggctcggcctcctcctcaggcagcattgaaaatattgctgaagaccgaatttcaacgcaaaaatatcataaccgacaaattcggtctcagtctcggtctcggtcctaaccgaaatttagcaacattttcattaatgaaatttttcggttctaatatttttgcgttgaaattcggggttcacctttcaaaaaccgaaatgaccgaaagaccgaagaccgagaccacaaatttcggtctaaccaaatgcccacccctacttgtcgaagctcttgctaccggcaaggagaggagtagggtgcggggactagggttacgacggctgtggggtggcttcactgatgaagataaaactagcatgtggagagagatgggaaagaaagaagatgggagaacggaggaagaagatggaactaaaatgtgggtcccacgtctagtcgtctaggggtattttggtctgtatgataaccgaaaatgtgaccgntaatggtatgattttaattttgtgcgaattcgaatgacatgaatacgactagatgaattaaataaaataaaatttacctgagtgggcatatttccaatcaacccaaaaataaaattgcaaacacgcggattgcgagcgcgcgcacgagctaggaaagggagggagttggggagcttagctcgcgcgcggcgcggtggatcgcatgcgcgggcgggctaaaattagcgggagagggaggagttgatcggaaaaagggaggccgcgtcgcattgcgtcgtcgtcgtcgtcgtcgtcgttgtcgtccgtagcgggagggagggagagagtacgtgcgggcgtccggaggtctcagcgcacgcccgcggccgggccgtcgcgccgatcgcg

SEQ ID NO: 1943 - DNA, 2000 bp, Oryza sativa
atggtttcgacaaacaggggaaggtttttaggggtggagaaatatagttgattgtacttggtaaactcgcatgtggggagggctagcgaatatgtatacgcatttcggtatacttcagctagggctgactggaatcatcgaccaatcgaaactgtcaagattttttttcaatgaatgaatgaatggatgggacatgttgcaactagcaacttgcgatcaagtctaatgcatgttttcttatatataaaaaacaatctagaatatggataaaagagttttggataaaaaaacgaagggaataggtgtccctagagccaatggtctttggagttggaatagtgggtaaacaaggattattggcacgagaaaattagtgttatgcacattttaaactaattttagaggatcgaaacactttattttagtatgcaaagttcgttttatattaaatttcaagagtataggtagttcacattacagtatcgtagctataggaatttgctattttagcacaatcagtatcgcttatcgttgtttttggaactattagagcaagtttaatagtatagctaaccacgggctaccaattataactaatctaatagccccattcatacaatagttaattataaaaatatagtacaccataatacccggtcccacctctcataaacacgtaacgtgttggagtccgtgttgcaactggctacaaatttgtagtccgttttcttctctatattctcttttcttctcgatatgtggttatagctggcttatagcttgctattgtacctgctcttacaaaactaattaaattcgtttcataatcaaggaaaaatggtttatatagcgcgttgagactaacacggcgaatcatactaccggacctgtacgaggctttcatattatttatagggttattaaaactgattatttactctataatttaaagaatacatttcctaaaaaaactttctcttctaatgtattatttagactgtatgtttaaagccgtttttttagtttatttcttaaaacaattgatttattcaatctaaatcaaagaaagcctaatgtacggcgccatggaatttcaattgcgtttgaccatatattttattattattatgtaaatatgaaaataataaatcacgcttaaaatattttaacaataaaatatatcataacaaaagaaaaacaatattaacatatttttttataaaaagacaaatgtctaaatgtacattaaaaatcaacaacgtcgtaccttgaaaatataacagtatttgtagtggtatatatgcaaatacaattgccaccaaaaaggagagaaaaatgactgggttgcaaagctgataatttggttgcgaccatttttctaaaacaacaatttaatttctcatctgctatcgtacaccatagcaatgccacgtgttagaatatgttcacactgaaataatgaaccaacgtattcctctctatcttttttttctcctcttaaaaaatatttttttagtataaatccctttcttacctgtgccggctttaaccaacgtattcctctctatcttttttttctcctcttaaaaaatatttttttagtataaatccctttcttacctgtgccggcttctccgcttgttgcattttactgtccccatgcagacaatgccaaagggataaacagagctaaaattggtgaaaattcactcgaatccaaatgtaaacaacccatttttctcctgttccaatcccatccattccattccattccttctccctgtgctcggattcctgttcttgcagctgatccctagatcttcctctttgcccgagaattttccgcccaattccccactccgattcctcttctttcgcccaaattttggctcaacatttcgcagcgcaatctcgagctgaatcttggggggtaaagctttgcttcttggaatcttggtgcggtttttgggggagatttgcgagcgtttggagccgagaag

SEQ ID NO: 1944 - DNA, 105 bp, Oryza sativa
  N_region (4)..(4): n = any nucleotide
  N_region (58)..(58): n = any nucleotide
aaanccccccccccccttggaccttggtttgtttccttcccacacgcgcacacacacngacagacaagaggagtgagggggaagaagtgcttgacttcaccacca

SEQ ID NO: 1945 - DNA, 2000 bp, Oryza sativa
  N_region (439)..(439): n = any nucleotide
  N_region (456)..(456): n = any nucleotide
  N_region (460)..(460): n = any nucleotide
  N_region (1236)..(1236): n = any nucleotide
taagaggtacagacataaggtaaaacaatgagaaaaattaagcagagtgcatgaacatggaagtcattacttgattgaaaagcccataaccagctagcaagcctagcaagcaattatgactgaaacctgtaatctgtgaagaagggcatcaaacattaaacacaccatgttcaagtttaaatatccataaaagaagccatgtttctgacgatacaacaccagcacatcctgaggaaattagaccatcatgcttgattacatatatcgaagcaaattgactagtgagatggtttaattaatcaacacatacatgatacgccacccaattctattcaataccagtatattgctgcatgatcttgaataatcatgtatgagagcttgcattatttgttcttactagtacatgacctacaacggcatggaaacatgaatcatnaaatagcttaccaaggnactnatcctcatcatcttcttcagagctcccgacgtcgctactgtactcatcactgctagaactattgttaatgtcaagatcaacatgccgaacctgtatcggttcttgtgccttcggcaccattgctggcaccacaaccggcatctgttgcacactggcccgtggctcctcacccttgacaccagccagaatgccatccggcggtagagtgatcgggtccccgggtttccatccaggcggcggcaacgggatttcgagaggcagcgccccgttccgccacccatgcggatgcggcacagtgattggtagcacagctgcctcctgggttggtgaaggctgaaaaagcggagtggcatctccctctgctgcagtcctctcctttgcttcctgggatttcggcactccaacatccaaatccgcaaattgatacagctgcgacatcctcatctcattttcctgaggagcaggcggcaacgccccacgcagaggcagcccagcaccatgctcaggcggcgcgaaggtcgtgtagcttatgcggtgggcgtacgtcaggacgtcgtccaggttgagcttggagtgcagcgacgcgccaaagtcgccgtctgacaccggctcggggtcgtccgccgccgcggcgccgcgcgggcgcttggggtcgcggcggtagtcggcgtagtcgtcgacgaggcggtcgagcacgtggtgcgcctcgcggagcttcttggcgaaggcgaggatcgaggcgtccttggcgcgcgcctcgcgggcgaagcgcgacncgcgcgtcctgcaggtcgagggtctcctgcagctcggcgacggcctcgaagagctgggtctggagcgtgttgagcagcgacagcgcctccttggtggaggagatcggggccgggagcggcggcggcggcgcggaggacggcgaggggaggaaagtggggagtgacccccggtacgccgagatccacgcggcgcggctcggcgagagctcgaagaggttggaggcgagcgcggagatcagctggaggagcgcctgcgcccgcgggagcggcggcaggagcggcagcagcgacggcgatgtagttagggttggtgcagcggcagcggcagcgcccacggccgccgccgcgctagggttgccctgcggcggcgaggaggtgggattccccgcagccgggttgggcgggagcgacggcgacgaggccgtcagccccagccgcgccggcgaggggtggtgcgactgcatcatcgcggcggcggcggcggcgactgcggatgcaggagacggacgcgaggcagaagctactagacaaaatttcctcttaatgggctaatgggcctccaaattgtattatatgggctttacggcccataaaagcccattaactcggccataaaacaccatctcttctgactccgccgcatcgtctccccaatctttttggcgggagagcaccacagcgccgcctccacttcccgcgcaattcgcaagagaagagccatggacggcgggtcctccacggcggcgaggtcgtcggcggcggag

SEQ ID NO: 1946 - DNA, 1156 bp, Oryza sativa
tcatactctagctataatctttatttttttctgctgtgagtgtgtttagtttatgccaaaattgaaagtttggttgaaattgaaacgatgtgacagaaaaattaaagtttgtatgtgtaggaaagttttgatatgatggaaaagttggaagttcgaagaaaaaaattgaaactaaactcggcctatatcaaatattaaaccttacaccatcaaatcaagtctggtgcaaacatatcactgttaaaccttgcatcatcttagcctagataaagaacaagtaaaatagtgggatccaaatccatctgaaacaaaaaaaggagttctttttcatgggatgcaattactccacttgagctaatcctccctttcaaacacaattacattttgaaggcaactactccactgttcactcctcgtcctcttgtttttttttggcttcgatccctgtaaccgtactgcacatcacgtcatccatttaagaaacagctcacaagaactcgacaacaattcatttttctcacagtaaaatccgtactacttggagcaagcaacgaatccaatccaaaacccaaaaacatttatttagaaatgcgtagacttttttcttttcttttttctgatggcacgcttaaatatagagagacatggagggagagcagcgcacgcgtgaacgggaagcgagagagaagcatggccatccaccatgtctgcatctgcatggccaaaaaggggaggaagaagaaatgagatgacaatgatgatgatgatggtttcatcacccaaccctcccttcaatccaacttcacctccacaaaaatcctatccattatccaccaaacactcgaaaatttccatcttttccagttaaaaatcaaaaatcccctatccttgtttgcttccatttcgtcgcggatttggaccacgctgcaaccaatccccatccagaacgatcccaatctccgatgggaagattctaaatttgcaatccacccaagaactccactacgagagcttccccccaatcataactccctcgctcgctgcatccccagttccccaccacgacgacccaagaaacgcctcctgaattcgtccctacccgcgccagatcggagctcgtagcaataatcatcgggagagagagataaagaggaag

SEQ ID NO: 1947 - DNA, 2000 bp, Oryza sativa
gaacccagctagccacctctaatgatagaatttctccgtggatgccgtctccagacatggcagcctcaggatttgaaaaataagttttgtattaccaacacgaaaaatacaattttacgccctcccacctcccaccctttttcaccagtacaatctcacggttccagccgttcggtactgcccactcaacgtcctagaattggtaccaggatacacatgcttgacggtaaaaatttattgggattttatcatccttaagaattttctgttataaaatttggtacattaaaatataaagtatctcaagatatcaaaaattttagtgtaaaattgaggtactttcctaaggaggcaacgactacaaaattcctcatatatgtatgctagctagccagtacttttttttttttgaaagcaagctagccagtacttcgtgcaggtaaaaaaccggccggtgcagctgccgccgtcgatcgacagacgaagctccggcgccggcgagcacgccgtcgtacgtcgcatcctgaaagcccccgccggttatcaattctgctgatatatatggtggacgttacttgtgcgttgcaccggcgaccgctactacgtatatatactacgtccgggccggcgatcgatcagcttccgccaccaacggctcgaccgccgccgccgccgcggtctccttttcacgacgaaccccggcataatattgttggtggcgcaatgggcagcgagtggtgatgtcctcgttggccggcatcagcagccgcggcagggagaacgacgacgggtcgacctccgactccgacgtggtggcacttgtgctctccgtggttaccggcggccgcctcttgcgcttgtcactgtcacgccgccgtggttccccgcagcagcagcagcagcagaagaggcggctgaagaaggacgccacggcgtcgcagagcgagctgcagcactcgtcgatgctgcagtcgcagtcgcagcagcagcagcaacagtcgcagtcaccgcagtcgcagcagtcgcagtcgcagtcgccgcagtcgatgctgatgtcgtcggacatgtcggctatgggcggcggcggccggcggcgagagcagctcgatcgcagtagcgatggatggatgcagatcgatgagcaggtgaagagcaaatcaattgatatatgaatcagcaggaggcagcgatcgatcacatatatagcaccgtatgtatacaagaaccgagtcggggtcggatttggacgaccgattatgatggaccaacccaccatgaacaatgtgtatgcatgcatggaagcaagccaattatttataacttccatatatatactctggaggtagagaaaaggaaaggagcagtgcttctatggaaattgcaagctatactccagcttgcaaacatatatggaatcatggatttccttattatttcctcatcgattaaggtgcatatatggaatcgtggatttgagatggcggtcaaatggatcaatttttcttttaaaaattactagctactccctccgtcccaaaatataagtatttatatccagattcatagtcaaaagttattacattttgggataatacttaattaatcacgctataattaactgtttcgttttccgtgccgagggaatggtaaagcaaagccaaccccggttagagcaagtttaatagtatagcccactactagctccaattcatctataatcaatgtaatagtcaattcatacaatagttgcttactatactattaatatatggtctcacctgccatacacatattgtatcttgaaatccgtgctacagctagctacagatatgtagtccgtcattcttttctatcatcttttatcttattaaaatatatttatagctagttattccgctattgtacctgctcttacctctccctaaaaccctcccctctccatctctcctctgcttcgtctctcctctcctctccgccgctgcatcccctccaaaaataaa

SEQ ID NO: 1948 - DNA, 425 bp, Oryza sativa
cccccccaagtccaacaggctcgtccaggccaatcgattttgttttcctttctgaattgggccctgtcgcgaagcctgccacctgaattgggccgtaagcccgtaacctaagctctacgccgaaggaaagcccaaactctaaaaactcctccaccaccgcgcggcgggaaacccgctcctcccccctcctccgttcccgcgcacattttttcggcatcccacccgccgatttttttccggcatccaacgtcgcacatccatccacgtcatcgatccgcgccgcgtgccttccaccaatcagggcgcacgtcccctcctctacaaaaccatctccccacgtctcctcctttccccacgccgcaatctcgcgaatcccaccgcttccgtttcctctcctctccccgagaagaagagagcagcggcag

SEQ ID NO: 1949 - DNA, 2000 bp, Oryza sativa
  N_region (304)..(304): n = any nucleotide
  N_region (881)..(881): n = any nucleotide
  N_region (1043)..(1043): n = any nucleotide
gtatctgttgcatgtacttgtatgtatctcgtcatcctcactgtgtaaattttgccgtttctttccttcttcacatgacggcactatagtacgtgcgtagaagtgtaatttgtttgtttgtttttttggaagacgtactgcgttgtttaccgtacaggcgtacacaaccatcctggatttctctggtggacaagtacgtgtacgcccatgatacggggaaacacttttaactacctaggtggagtccatccatttattacatgtcaaccaaataggtatgaaaaaaatttagaaaatttaacangataccttcatatgtaaatgtcacatcacaaacatacaagtttaaatttaacttctacaagactctagcaaaaatatcaaatcaagtttgatttgatatttttgttacaacttataaaagttaaattttaatatatatgtttgtatattgatatattatatatcaatatatcttgttaattttttataaccatttaatcgacatgcactaaatgagtgattaaaatccatcgccatgatacccccaggttgttcttgtatgtgtgccctacaggcttttaggagtacattctaaccccatgcccgctgcacagtaattgacgcggcccatctgcgtggccgtcgacgtatccagtatatgggtcaatttggatcacagattatgcagtggtcctaaatgggacgggctagaggcccacaatattttttcacgttacatccaaatttgtgtggcccgattaggatcgctgccaactattcccttcgtctcaggattttgagtttttgttttgcactatttggccactcatattattcaaaaaattttagaattattatttatttatttttgacttacnttattatccaaagtactttaagcacaaattttcgttttttaaatttgtacaattttttaataagacgagtgatcaaacagtgcaagcaaaaaactcaaaatcccttaaattatgggatggagggagtagtcagtttggcaggccgaaaaaaccgggttcccnaaaaattttagcaactttataggggtcttaaattgatttcgagttcgaattatatccttaaactgtaaaactgatgttgagctcgcattttccaaaaaaggttaaataatatcttaacatagtatgtatgtttattttagctgacgtggcaatatagtcagaaaaaatacatgggggccacatgtaatttaacttcaaccttttcccatatatgggctccacattttttttactaggaagccacgtcaaaaaaaaaaaacatccatctatattgtcttagaaccttattttcctgggttttaaaagatggaggttcaacatttatagtattacgattccaggatgtaattcaaactcgacgtctagattagaaaccttaatgaacttattcctactagaggctctaatcttttggcccaatcaacgtatgccaaagccaaaatttaaatttttgaacttaattttgaagtagtttttgagttttttcaatcatagtttcttatacaatatggtcatttaagtcgctaagaacataattgtaaaagttttaatcacaagttatattttttcgctactacgccaaatagcgtatattccgcatatagccatccgatgaggctgccgtttatagggttctaaagaaaaaggctggtttgggccgagcaccagataagtcgggccgatctcaaacagaggcggtggcatggcccagtccagaagaaatttcgcatctccaaaaatttccacccgcgaaaactccgtgcgacagtgcgccgcccaccaaattcaaattttgaacgcgaaaacttcccccgcgcgtcttcctctcatgcttaaatctgcgcaaatcacgcgctcctcgcaagcaacagtgagtttgaacagaacaacgcgacgacccttgcagcgcacgaccccgcggactcgatccagatctagggcttctcgtcggcggcg

SEQ ID NO: 1950 - DNA, 2000 bp, Oryza sativa
gcaaaatgatgtgatattaacgtatgattgattgtgttttaattattataaacttgaaaaatatagcaactttcatatagaaagttttcccacgaaacgcaccgcttagcggtttgaaaagcgtgccacgaaaatcttaatctttatccaactcttgttggagaaaagaacgagacaatattatgattttctaacattaacttttatatcgcgaaaaatacatacatagaaggttttacctgtaacttatttttagcgcatatttacgaaaaaaaaagtaataaagtcgttttgggggtcgagataattgtacgaattttgggccttggaagattgtgggccaagatttataatttttcagcccaataaatcctttctggtttaaagcgggctgcctaaatataatgggctggtccgtatacgtgggccatgattcgataagggacataaagtgaacttattccaaccctgaatacacggcccgctgttagcgttcatcggatcagcatgcctacgacttcgattaaatctgagctgatggtgaaagccacgaggcatcagaaattcagaatggtcccttgaaagttcaggatcaggaacaacgtgcaatcgtcatgtctgcccgcgaagtgagctgagaactcatcatatttcagatcatgggaacgagatccccagcagaggatctgcatcccaagatcatgagctgcacaattatcttagttagtatttctaaaatgtgttttaaattatattgattagccgcacgtaaaacgtaatacgtgaatagcatatgattgattaagtattaattattaaaaactaaaaaattaattaatttgatttttttaaagcaacttctatacgaaagttttcatacgaaatacactatttaatagtttaaaaaatgtgctaatgaaaatcgaagaaataaccaagtcgagacagtgtttagaatgtgtgccttagataacacaatgttcttctttgcagagcattttactttggcttcaggtttccactgtgctttcgtcttgcctgacgctgaatcggacggacatttttttagagaagaaatcggacggacataaattctatatggactcacatgtcagctacacaatgcagaattaagagtaaaacaaccaaaggaacgcccgcacatgtaaaaactcaaaagaaattccacttgtcagccataaccaatttaaattttaatttgtgttgattttcatgtttttacatcatggtctattttttagcattggcttttaaatcactaggcaagtatatataaaaaatttaccgagaaattattttatcattaataagtgttccggtctataataagctataggcgaaacaatgccactgtaacggtcctagcgactattctgttccctacctagatactccaatatttagtagtagtgccagatgcataataagatgataacattgacaagtgctcataacttaattttgaattattttcctcaatgccccatcaagtgtatcacaacagtttggtgatctctcttttttttcatagataacggtgatctatgtgacaacagtattgatcaatgctatatcaatttcttaatggtctatgaattcaaagaaacaaagtattggcagatcatggagtcgttgggtacctacatagcttaaatgcaaagcttcaactaccctataaaagcacttcttctatgattgaacggcaaaaatacatggaatttcatcctatcgtcactgccatagccgttttctccatcccattttgccattttctattgccacttttgtcagtggttgtactagattagctaactgaagaagaagaagaagaaggagaaggagaagacagtgtcggcggcgaccctcctcgccggcgacggaaaacgaccggttttgacgtaaatccacaaggcgttatgagctcgaagatgactgtgcatctgctgctgaattattgagctctctcttgtcgacaagag

SEQ ID NO: 1951 - DNA, 159 bp, Oryza sativa
  N_region (10)..(10): n = any nucleotide
  N_region (14)..(14): n = any nucleotide
  N_region (16)..(16): n = any nucleotide
  N_region (29)..(29): n = any nucleotide
  N_region (32)..(32): n = any nucleotide
  N_region (37)..(37): n = any nucleotide
  N_region (41)..(41): n = any nucleotide
  N_region (51)..(51): n = any nucleotide
  N_region (64)..(68): n = any nucleotide
  N_region (70)..(70): n = any nucleotide
  N_region (130)..(130): n = any nucleotide
taatgcggancaangntgcgtcctctctnccntctancttnacccttgatnctcgatccggatnnnnncnggagaagcggatgggagtggcagttacgggatggcgtgaggagagagaaccggatggggncgggagaagcggatggaaccgcagccagt

SEQ ID NO: 1952 - DNA, 2000 bp, Oryza sativa
  N_region (161)..(161): n = any nucleotide
  N_region (280)..(280): n = any nucleotide
  N_region (318)..(318): n = any nucleotide
  N_region (629)..(629): n = any nucleotide
cggctcggcgacggtgctcctcctcgggtgaacgacgacggctcgaacgggacgatgagctgctacaagcaagcatgcacgaggtttgtgaggtcaaggagatggtgtatgcgcgagaaatcaaacaatggctcaccgaggcagcggtaatcgacgatganggcgaaggcgattctagatcggcgccggtgaagaaaagatgcgttctccgagtccttcacatctccggctggggttcttgaggcgtattgaagaggaggttgaggcgatgacgatggcncaacggcttgctccgaggtggtcaagaatggccggacnacgacgatggttgaagcggcggcgctccggtgcgtgctccagggcgtcgtcggcgtggtcgcgttccggtggctgtgatgcacaaaactgggacgtggtcaaaagagaaatggttcggcattgtgtggagagaagggaacgcgaaaaacctggagatgaactttacccaatcagcgatggcgatggtcgtcgtttccacggccggcggcaaggtttggggcgatggagaggcagagaacctcctccctcggtttcttcgggctctgagtggtgaatggagaatggcaacgcgtctgggaggagtagagagngagaaaaggggaaaccgagatcgacgacacgttgcggccacgcgtcggctcgctcaatctctccctctctcggctggagcagtggaggaagtgatggacagagtcaaggcaagcttaagaggctgtcaggtgggtctaggtcgtggcaaactaggctaggtgagagggttgggtaagattctgggtaaacttgatttttagatcatttttcggaattattttctcctctaactttgtagcttcataacttgatgtgtggaccaaattatctagtgttgaatttactggaggtaatgagcatacaaaaataatgggtagattaatcacagaaattaaacaaagatgggctgttagaaagctagattgaatttttaggaggcctaaacagaggaggaaaattctagaaaaattatatttaggcatgataaataatctagtatttgaataaattattttacatgttcacttatgagcagttaaatgtacttttggatgaagtatggctttagccaattaaaatttaatttgattccttttagttttctgctttgactgattaatttgtggtattaaacttagttattaacttgtaccaatattatagtgaattgcttgtgctaaacattatctatctaattttttccatgattttaacttgcacataatattttagagaattaggattactttactttgtatatgtgttcccacttcataattgcacctaatattgttacagggattacattaaacttcttttgggctgagaagacgatatttgagtttaatattaagtccacatgttatcacccaagattaactatagttttgtttagtaattttaacccttttagtttatgctcatgagacatattatgaaaagcaagaccaaaatccaaatgcacatgagactcgagcctaggcatgcattatgcacatgtatgctcatatacttggtgacatttctagtctaatgttgggaatgaaaaggttttattttgttctcaaattttaatcatgcaatgatttaagttggtcatcacctaaattaaaacggaaatttttgactctaaaaattggagaagttaacctctaactattttgacaagaaattttaagtcctgaaattttgggtttgttacacctgataactccgattattaaatatattgttaattggggttttctccgggttaaccaaggcaaattctagaagccattttttaatgatttgaaacctaagggaagggaaaactctaggtgtgacaatacttttagtcggaaaagttattgcaatgcaacatgtttcgaaaaaggagtaagtagtcagttgattcaagacctagagcgtctgaatttggggatagtgga

SEQ ID NO: 1953 - DNA, 2000 bp, Oryza sativa
tcgtcagtttatgttgtttagaaaatattaatgataagcgtagaaatttcttttaagttgccttattgttcaaatttttttttaattgcttgcactatgccagatcaacccatctttgatgcctacctatgacggatcaaaatgtatcatcatggatgatatcatctctgatgggttaaagtaaatcctggcgtagatgaggctcaagaaaatgccctgttacagtaaataactcatctatgacggatctatataaggacccgatacataacgtttctaacgagctcacatatagggccgtcatatatgacctattactcgtggtgggtgttgagttttcacccgtcacgagtgggatacttcaccttaaacgtgttcaaatcttataccgttgatggtgattaaaaaaaacccacccccaccctaggggcccgctagcctgctcgccccttctcctcccctcatcttctctctcttatatcttcctccgccagcgcacccatccctcccgcctgatcgccacccgccaccctccctcccgacccctggctgtcgcggccttcttcccatgattgccgtccaccggatctagcctccacgaacgttgtcatctccttcgcccactgttggtggtttgctcgtctcgtcagccccgagctccttggcgccaggtccggtctccatgtggttggggaccaacggatctagacgcctccatgcatgctccgcttgtcgccttcttcgccctctgtcccaaatcgtcggccaccacctcatccagatctgctcaagcgccgacaacccgccttagcacctttgacaacccgcatcagcaccttataacttataagtagtgggagaaggtgctaaggcgggtcgtcggtgctcgagcggatccgtatgaggcagcggttgacgatcttgggacagatcaacgagaatagaacacgaataaaaaactttatcgagtagtggtttctcatcattgtcaagctcgacgccagaaactgtcattctcttataaggtgcgctaaaatttaaattttaaaactatttttcataaaattttattttaaggattggtttttaaatcattaagaacacatatataaaaagtttacctataaattattatttctactaataaatggtacgacttataagagcaagtttaatagtatagtcaactattagctccaaatcatctatagtcaatttaatatccaattcatacaatagttacctataacatatactccctccatttctaaatatttgacgtcgttgacttttttaaacatgtttgatcattcattttattaaaaaaaatcaagtaattattaattattttcctatcatttgattcattgttaaatatacttttatgtacatatatagttttatatatttcacaaaagtttttgaataatacgactggttaaagatgtgctaaaaattcaacgatgtcaaatatttagaaacggaacgagtagtatacaattaatacctgatcctacttgtcatacacatatttatcttatagctcgttactcttctctctcatattttatcttctcgaaatatatttatagctaatttatagtccgctattgtacccgctctaattagcgtcaggcgaagcttctcaacagaaaagccaagcaaacgtttcgggctacgttcacctgtgatcagaccggcccaaacaatgatgggccgagccaggccggggccgggccgggttcccataaatatttaatgctacggttgaaaatggctgtgccacagacaggtaggtcccacgggcacggccacatccccctccccccttcttccatcctcgcatcataaaaatccatattcttctccttcttctccctccgcgtcgcattcgcatcacccccccgaaaccctagacccaccaccaccaccaccatccccgagctcgcggagaggcagcgagagcgagaggtagctgctagtaggcgtcgggcgaggag

SEQ ID NO: 1954 - DNA, 197 bp, Oryza sativa
  N_region (5)..(5): n = any nucleotide
  N_region (16)..(16): n = any nucleotide
  N_region (19)..(19): n = any nucleotide
ttgancccagttcctnaanccttgtcttcacaagctgagggttgtcacctgttaagttgcatgcatcacaatttcacatcatcttagcagacaaaaacagtgacataaattaacacaaatagaatcaatattccaagagaaaggggataaatattgttcttttttttctttacctggactgcaaatcttccacgagt

SEQ ID NO: 1955 - DNA, 2000 bp, Oryza sativa
aaaaaaaaaacgcttcatgggcccatcagaaggctaaatgggcccatcagaggcttcgtggacagaggcctagatgggcctagataggtaggggtggcaacttggcccatcagaaggccaccggccgactctaactcccactcccaccggcggcgacggcggcgagccgagttccccatcggtggtggcggcggagcttgcggggaaggaggaggaggaggatggactggtcgaaccttggtggggaggggccgccgggttgatcgccgagcgcgtcctcgccaacgacgtcgccgactacatccgcttccgcgccgtgtgccggccgtggcggctgtgctcggtggatccccgctgctcgcagagcggcgccatggacggccgcttcctcccccggcggtggatgatgcttgacaaggcggcgccccaagccgtcggctgcttccgcttccatcaccagaatatgacactcctcaacctgttcgtctgttttgctgatgaatgatgatacattgcagcgagcggcttggtaccttggcatagttattgtttcctcagctcagcgtggctggggcaccaagcaaccatgacgcggtggcttgtgccagcaatcatcacacgttaaggaagcaaaggatgcagggctggcgagggaattttcgagcataatccaccgccagggagatagtggaccttacaccgatagtagcagtggcggtttccgcttatacaacttggcaggtaatggtgttgtttccttctagtttcaactagggagtgcatcaactagaaacacaaaccaagaaccaaagctacaaatgaaatgcctttctaagcttgaccctacatttgcccacttggtgttggtgatccatgcatgtagcatgctggaaagtagtactagttaagctttcaatttatcccttccctgtggtttgctcttatcttgttttgcctaaccattcaaacatgtcattaatcagttccaatcttttcttctggtatcaggataattctccagccatgtaaattttatttgttcatgctagtggacgaattgccatctatcatatgatcacatacacctttttctttttccgtacatgcaaattgcagcatatattccggttgaggtgtggcaatcataaaagccacctccttgaccttgaatgcaacaacatatacctatttggcttgttttaagatgagtcatctcctaaagcattttggatttacaggacttgatgaacacatgacctgaaaggggaaaaactggtccaaactccaaaaagagttacctgactgctaatgcatcgtgtggaggcaagttctggcaatattgtaccgaacactcatgcaagtgtgacaagatcagtgcatcaaggttacctgtcaagcaagatcctccttgaaatgcttattgtgcacttttatttttgtagagagagaggcttcatatacagatatacttactgctgcagtacttcctttctttgtctgcatcttctccttcttctttatgtgtagaattagtatagacattcttactcttttgtcagcagaatatagtgttctgtacttattatagaagtctcagtgatcagtcaccatgcaacaaaagaaatagaaatactgcatatagtttcagttttacttcccactcgattttaacatgaggaagcattgtcttgcctgaaacaaagttttctaattacttaatcactctgtatgtacagtcagttgggccttagttttgattcaataattgatattgttctctagtggttgttttctactgaattgtccatagtaagaaatgcgaatcgctaaacagaaaaaggtattatactataggtagtcttatgataccacatctggtggacgacaacaacttgactttgcatataaataggcagtcccaggatgatctttccgcagcactccattcatttatctggttctgttatatatctctcaacgtaacctgattaagttggtgg

SEQ ID NO: 1956 - DNA, 2000 bp, Oryza sativa
ccgccctggcaaggcctccgagaacctaaggaaattcgcggctggggacgcccagagcggataaggccttgtcaggtaatgcagacacgaacgaccatgtaagatctggtcatgtaagagttctcaccatgcgtattaatcaagccgtgtaatcggaaattgggttttccaacttcacggctaggggctagggtaagtgttttttcaaccaaggcaggtcaagggtccaagagccttatcctccgaaaatgattctccgacaacaaggatgggggctagggagagtgtatgactcaacaaactgactgatcgaagtcggtaaaagagaagacgctcgtacacaaaacattggtctgtaaatttaattcattttcagttttccatacatattataacatgtcaccctttgaacagttttccaccacacatcctatgtcttatacggatacaaccttaggatataggaggagtttcgcataaggaaggatgaatagagttctacatggaaacgacaaggactactcggattgtatcaatattggttttcctagttctacttggataaggggacacctatataggtataaatacaagaccccctaggaggaaaggggacacgcaacaatagatcaacatacaagccaacatacgccaagacaagccgccgaatatcaacatcggagataagcttagtagtccccatacggtacctacgactaccgtcaggagggatctagcactatctttgatctcgccggacatggattcgaggaggaagactaccctgttgtcgattacgtgtctgcacttcagaccgccatattgataacagatagataggctaccccaaatattgttctggtgtgattatgatgaataagagcaacgaccggcttcggccaacaggagtagggttattacctgacaatttaagggcccgaacctgtataagaatcctcgtccctatctcttttacctcagtctcgcatataccctggtgccaatgatccccgtactatgcaaataccggcaaataccatagtcatgacatcagacatcgacaaggctaacaactatccatgtcaattcgtacaaggaagtacatacagtacaagaactaaaaaaaatgcaaaactagaatacaatttctaaatatgcaccgaagtactgtaaaagtgtagaaaaagtacaagactagactaaaattttattagaatacctaatgcgatatgtcttcataattttcactcttcatcaacagaaggtagagaacctgaagctaaatctgaaaaatgatattatataatgtaagtgatacaaattatgagaacttaattatttgtaggttacaaagcaatgcatgacatacctctaggtaatttgtgcttgcgcgtcctcaaagcatgataatgttctataatctgatgatcttcaatgctagtaaaaacatcccgctcaatatagcaaatcatgcagtgattcatccattcatcattcatcttgttccgcagctcagttttaataacattcatagctgagaaggctctttccactgttgccgttgcaacgggcaaaatcaaggctaattcaattaagcgatataccaatggaaaaactgtgtgtctatcagtttggaccatcttagcagcaagtttaccaaggtcagagcagcttgagaaatccaaatcagatctcacattagagataaatgtgtcaagttggtctctaaggactaaacaatcatattcagaaaagtcatctgcataaatcttagcaagttcaatgagcttatcttcatcatagttggcaaaagaattccttggatcaaggcaagcaatacatctcaatagctgagtagacctttcagcaaaacgattgtttaactcaacaataatttgatcaagtaccacattaaatatgcatgtccggccggccgctcgccgccctgcgcagtcgccactctccaatcggcaatcggtgatgtgagagacagggaggag

SEQ ID NO: 1957 - DNA, 2000 bp, Oryza sativa
  N_region (815)..(815): n = any nucleotide
  N_region (819)..(819): n = any nucleotide
cccggcgcggcggcgcggctggaccgccgcctcctggaggcgtgcgtggaggccagcgacgcggtgcggtggtgccccagcgcgccgcactgcgggcgcgccatccgggtggacggcgggggcggcggcgaggagcggtacgccgaggtgtcgtgcccctgcggcgccgtcttctgcttccgctgcggcggcggcgcgcactcgccgtgcccgtgccccatgtgggacaagtggggcgccatgcgcggcggcggcgaggtcgacaacctcaagtggatcgtcgccaacaccaagagctgccccaagtgctccaagcccatcgagaagaacggcggctgcaaccatgtcacttgcacctgcggccagcatctctggtgagctcgacacgacatctatcgattctccatgagattgatgtcacgccattgttggatggatgcagctacgcgtgcggcgcggcgacggggacgttgtacatgcacatctgcaaccgctacaaggaggagggcggcggcggcggcgtgaaggtggagatgaccgccggtgggcggcagcggctgcggttcatgcactactacgagcggttcgagatccacaccgagtcgtacaaggaggagcaggggaagctgggtccggccatcgacgctctggcgcggcggctggaggcggacgccacgctgccgtggtcgggcaccagggacgcccggtggccgtcggcggcgcaccggcggctgctgcggtgccggcaggtgctcccgcggtcgtacgtgctcgcctactacatgttcggcggcggcgcggcgacgcggcgcaancggnaggaggcggcggcgcagaaccggttcgaggatttgcaggggcagctggagcaccacgtggaggtgctgtccaggacgctggcggcggcggcgcggccggccgacgcggcggaggtcgtgaaggcgaagcgcgacgccgacaacctcgcccgcgtcgtcgaggggctgtgcgccgggatgtaccggtgcgtccaggacgagctgctgccgctgctcgtcgagcccatgaacatcgccgcgtaccatccggacggcccggccatggccaaggagttcccgccggcgaccagcgtgaccggcggagcaccgccggcgacacgccactaagccacaacgtgtcgagttcattattactatacgaagcaaggttgtaaacggtcgatgggtgaagggaagcaggtggttttgggaaaaattctattgtccaaacatgtttgtggtttggcatggtggatttttggattaattactagctaagtagtataggaaatatcctatattgatacagaggaaatgatggattattttgtgctgattaattagtctaattgttcgacgttgtgcaacgtttctggataacttttcagtatacgaacacttcaaatgatcagacctctcaataatttgcagccaaccaaacgggtccaacttcatcttaaagaccctatcctatgttgtttgtggtctgtttataggaagtcggagctgctcttgagagcttggtttgtttataggaagtcggagctgctcttggtagcttggcaacgatgacctttgttttatcctccagttgtaccgtcgcaagtttttagttttttctccgtgtgggttttgctcggtttcccccttcaaaccgtgcttaagtgagttttttgggtccggtttcccttaaaaaactgggccaagtctcttattcttaattgaaaacaggctctccctatcctcttttgaggtttttccaaaaaaaaacaattgtcggtgacacataaatttggagatatgaaaacaaagtgcacgaatggtaattaacacacgtagattttgagatatcaatgtaaacttttttttaagaaaaaaagaggaacaactacagatgacacaaatacatttggggatgtgaacgtaaactgaaaaaagaaatagcacaaacatggtgagaaaagttaggaaaattgacaacca

SEQ ID NO: 1958 - DNA, 2000 bp, Oryza sativa
  N_region (1781)..(1781): n = any nucleotide
actcagtgtcggccaactgatcactgaagctctcctatggcgatccttgccacctcctgacatgcatggatgtagtttcttcctccagcttcgaacatcactgaggggatatcttcactattactgttcaaggtgactttgactcggcacttctcttcatgaagatcatgaggaatctgagcataaaaaggggcagtccccaaatccaatgacaaaggacatcgtacgtaactcctggacaaatccctcaacaccaaacaagtactcaggcttgtagcgcggcatctaaagacaagtgaaaggagggagttaagacatttatccaattaatagcacaagtttttggattaatttgaataaagttagaaaatcaaagtaaaaaggtaagtagatcaagtaaaccaagcttgcaagataaattgaaaacagttggaaacaaggttacaaattttatacttttgaataacaggttccaaaagaaataaaagaaagttataaaatcaacttgctaaatttattttattgcagccacgtaggcgccacgtcggcgccagctcggccaagaccaggtcgagtcgaccccggtcggcccctccccgtgcgcgcgttccaccgcgagccgtgagactgcgcgtgggcccgccgcatccgttccaccgcgaaccgcgcgcgtgcaccgcgtccctcccccgcccgcgcgcgtgcgcggcgtgctcgctccgcacggtgacccatgtcaccgacaagcgggtcccacccgggaccacgcgtggttagcccggtccaccggccctctctctcctcccctcccgcgcgcgcgcttgggccaccttgggccggccggcccatttagctcggccggaccacttcgttcctctcgggccgcgtcctagccgcccaaggaaaagtctaatttccctccctgttttcttttcttttcttttctttttcaaaaaggatttaattaaatccttttcctttagaccaaaaatccaataatcttataaattcaatattttcccaaccgtaaatccgtttgactccgttcaaatcccaaaattcctcaaatcttgagatctatctaatggcacacttagaggtcattaatagggctttattttcgctgtttgttgagttgtcccgtttcgcgtgtagtttcggagcccgaagacccgcagtgcgaggatttcgaggatcaagctccagatctcgagcaaggcaagccacctttgaacatcttgagcctatatttgaatttaattatgttgcttgaaaaatattatgcattgatagggtcgcacttaatctgttgtcccgtctgcaaggcagattggcggacctacctaatttgttgcatttgatccttccttggttaattgatatatcatgtccccttgtaaccatctagttgcgtctcgataaatcgtgcactctgcacgagtatcgacggccgccttcaaacataaaatctgagtaacttcttgggtaaaacttgggttttacaaaagacttggaaaacccgacacctgggtcggtgcttgcgaactaaatgaatttctaaaaccgcggaccggggaacgtaccgggtgtacggtttcccgctcttgcacttaaggaccgtttccttggaatttcatccaaacataagacaagtacgaccacatgggtggaatgggacacccctggcagagtaactagattatcaggggagccttgatgccgagagacatgtggattcgccggggtggtgtcggggaggacccctgggcttcctggcacantatggtctaggacctaacctgttgttggtctgggacccctctcgtcggcatatggtaaacctgtgtcggctttggaaatgccttgtcatgaaagcttggaggtctcccgacgtggctgatccccacgggctgggtgatccgggttagtaatgtcgtgtgggtaaagtgtaccccctctgcagaggttaacaaactgttcaaacagtcgtgcccacggtc

SEQ ID NO: 1959 - DNA, 2000 bp, Oryza sativa
  N_region (451)..(451): n = any nucleotide
  N_region (465)..(465): n = any nucleotide
  N_region (583)..(583): n = any nucleotide
  N_region (622)..(622): n = any nucleotide
  N_region (634)..(634): n = any nucleotide
  N_region (1303)..(1303): n = any nucleotide
aaatatgaatccgcattacgtttaataacatttggatgattaattgactacattttaaataaaataaaaaattttaaaccatcataaaaattcaaatgcattgtcaatgtatgtcggtgacatgggaccgggggtatcgtgactagaggcttgggtagccgcgatcacccacgttacccgaccccctcgggggggtcgggcccgagggtgacgtggccgcccctccctctgtctccccgagggttcggccgctcccgtttcggccccgagggctggggcgccccgaccccctgtggtgttggcgccacgtgtgtgggttaggtgagcacagcggcgctcacctaaccgcatttatagcgggttagacaagcgcgccacgccgtattcaatgcggtgcagcgcatgcttatccggtccgtgaccagtcgcggtatgtgaccggtcatagacnggtcagatcgcggnttaggtggcaacaggcggcctgtcgcacgcctcgccccgtcccgtcggaatgatgagagcttcctggctctcgtctctagccggagctggcgtgctgactcctggagttggtatgtcngtcccggtcagatccattctaggcttcagcgcaagcatngcaagaaagtcnctggccattgaatgaaggttgaaacgggcgtccaccgggagagctgacgagcggagcagaaggcgtgtgctgtgcttgtcagaggtcacttccggctgtagactagccctcattgtaaaaagaatgtttcttttcttaggcagcttaaggcccatgtggtgacccctgaccagataaaaaggaggcccaggcctaggagaggagggagagagaaaaaggaggaaggggggagtgatttctagagcctgaaccctctctggctctccggctctctgtatttcttcacgcacagatccaccagaacacaggagtagggtattacgcttctcagcggcccgaacctgtctacgtcgcccgtgtcttgtgcgcttcctctctcactgacgttcctcagatcgagggcgaagaacctcacttagcgcccccggccgaaccggcaaaggggggcctgcgcggtctcccggtaaggagccccacgctccgtcaatgtatgttctggagctaacatagctcaatcattgacacacacacaaaaaaagctcttattaggttaatttaaaattataataaatgttattttctttaagaaactagtcaattctacacacaagcagataaacacagagctgcagagcacacaaaatacgagcgagtggaagctttatttcntttggatttgattacaagctacaaaaggaggtgcgaggtgctcgagggagctctatctcactttggaccttcagggtcctatttatagacggaggaagcttctggcttctactgcaagataacttacgtcgtaagccggcttctctcctaagctggctttcgacgcaagttttcttttgtagtaagctttccattcatattttaattcgtcttataataaaaataggtttcataacacttttctaatttattgacaccgtattctttctgttgttgaatgttacttgtataagacagcggtggtatttgcggtcttgcggaggcatacgagagaagggcggttagttttgcgggcaaaaactaaccgcagtccctatccacgacaagcgcagaaagcaaaactcaccccccggcccccaccctgagccttgagacgcgagcccacgggccgacgaccgcgcgcaaccacagccaccgcccacaaactccagtacacaccgcccgcatccccccccattcccctcatacccacacccgcgacgcgattcccccgcacaccgtcttcgcaatctcctttggtcggctgcccaatcctcccttcccttcctctcctcaaacccccccaacccaaatgctcccctccgctccccgtccccgcctcccaaaaccctagccctctcgccgcgcgctccccccc

SEQ ID NO: 1960 - DNA, 2000 bp, Oryza sativa
  N_region (1008)..(1008): n = any nucleotide
  N_region (1730)..(1730): n = any nucleotide
  N_region (1732)..(1732): n = any nucleotide
  N_region (1736)..(1736): n = any nucleotide
tttgcttttacttagctgctggaatcaacctgataaatttgaatacagtccatcttgtggtagtactattatagggatgataagataagaaccagacaacaaaataactctaaatgctgcattcttcatatcctactgaaacaataactctataataccagtatccgaattaattaggagtcctggtcatcttctttgctacttcccccgtttcacaatgtaagactttctagcatttcccacattcatatagatgttaatgaatctaggtatgtatatgtgtctggattcattaacatctatatgagtatagacaatgctagaaagtcttacaatatgaaacggaaactattctttaaagctgaacaatatttgtagttattctagctgctctagccgcaacagggagaaagaaaagaaatgtaatgccaaaaccacctctaattgcacgatctaaatcatcgatgccactgccactgaatagtacactatggcaagcgagattcactgattgaatagatttaaattgcacaaaatccttccgcaactcattacagttctgggttaaactgaacttacaagattaagatcgacctaagcgctactagtcacccaatttccatttcgaatcatttgatttaccatcttccatccgaatttgagtaatcttacactacagttgagcagcataaccaatcgagggccaatcaaacagaagatggggatcatgacctggtactcccactcggcggcgatggccatggcgagcgtccgcgactgcagcttgagcggccgcttcgccggcgacttgagggtgcggtagtcgagcatcaccgaccacccgttgccgtcgtcggcgcgccgcacggtggcctcccggtagaaccgcttccccaccaccgaccccgtcatgaacgacatcggcatcgccaccgacgtctcgtcccgcgtcgttaccgccgccgccgccgccggcttcttcaggtagatctcatctccccttccccngcccgcctcttccctccctcccggagaggaggacgcctccgccgccgtccccagcagccgccacctcccccccgccgccgccgcggatcgctgcaggaggaggcggcggcctgcgagtgtcgccgccatgactggtctcgctccgctgtttgggcctaagctgctgttctagtagaggcaaataagtctgtttcgtctccctcatctcttgctcctgtaaatcgtctccctcaactgcaaaaccggatatagcgccgctcccggaaggctttttttgtcttcggaaagtagtgaaaatcaactccttcgatcgttttggaagtggtttctactgacatgacagtttgaccacggtttaacttgctaagtcagtagatgggatccacgtgtcagcgactttcatgtcacctcatcttcttcatcatctctctctctttcaggctcattcggtttaaaggatttttataggattattgtaggaattcaaacattaggatttttttcctatatgcctcattcctttcattcctataaaatcctatcaaatacctaaggattatagccttacaagcttattccatatgattcttattatcatgagataagacctcttagaaaaattcctaagaaataagatgcatctaacatcctaattctttaccttccctgtacctttgatttgggaatcctataaaccgaattagccttccatctgtcccccncnctcnctctctcatcaggctcaataactaggcccatccgcaaaatcggcccgatgtttgaggcccaactaggcccagagaaggttcgagacgcgtggagcagcttcgtctccgcggcgacctaaaatcgcgaggactacgaccaaatcacgcaccttcgctctcttttccattgcagagccctcacgcttccgcaaccaccaccgcgtccgtgatcccatccacctccatcgccgccgccgccgcgtatgcgccgccggtgaccgggat

SEQ ID NO: 1961 - DNA, 823 bp, Oryza sativa
  N_region (1)..(1): n = any nucleotide
  N_region (26)..(26): n = any nucleotide
  N_region (30)..(31): n = any nucleotide
  N_region (35)..(35): n = any nucleotide
  N_region (50)..(50): n = any nucleotide
  N_region (62)..(62): n = any nucleotide
  N_region (68)..(68): n = any nucleotide
  N_region (71)..(71): n = any nucleotide
  N_region (73)..(73): n = any nucleotide
  N_region (84)..(84): n = any nucleotide
  N_region (103)..(103): n = any nucleotide
  N_region (106)..(106): n = any nucleotide
  N_region (111)..(111): n = any nucleotide
  N_region (119)..(119): n = any nucleotide
  N_region (122)..(122): n = any nucleotide
  N_region (124)..(125): n = any nucleotide
  N_region (127)..(127): n = any nucleotide
  N_region (134)..(134): n = any nucleotide
  N_region (154)..(154): n = any nucleotide
  N_region (166)..(166): n = any nucleotide
  N_region (172)..(172): n = any nucleotide
ntgactttgaaagtttgccaaggagntggnngacnatatatattttcaantgcaatgttcanaaaggnttngnaaaatttgggnaattttgggggccccccgntangacantatttttnccncnnantttttcncgaaaatttgggaaaaattngtttaaattcanctaaantttgtttaaaatttcagacccaaaggtttaatcttgtgtataatacatgcccacgcattcgcgcgggctaccctcctagttagtatataatgaggaatactcgacctgatgagatgcatatgctgtgcatagtttggtccaaggtggacgaccacctttggagcaaagagagagcacaacaacacgatgccttcgtacggccgacctagctacccaagaaaaacaagcccggataccataaaagcagagtgtggttgagctgcctgaacaagtaccgtgtggttgatcctcctcctctcccccccataataaactaaccatctctattcttcttctgcaccaccatcgccagcagcaatttccctttctttttcctttccttcctttgctcttttctttgcttgcgagttgcgacagtgacggagagagagagagagagtactgtagcaaagagaatcggtgagagagtgagagcggcaaagacaaaaggcggcgagggcgaaacccccaagaatcaaggcaagaggggaagctttgcatttgcccggccgactctcttcttggttcttggttgtggcgtcggcgtctccgtgttgtttgggctggccaccgttgctcgccgttcttgggggcaggcaaacggcaccggcg

SEQ ID NO: 1962 - DNA, 1764 bp, Oryza sativa
  N_region (7)..(7): n = any nucleotide
cctacanttattcccattttcctgttgaattggggtatgccattgtatctttggctacaaatagaagttactgataaggccagattcaatagtgcgttcttttaaattgatactgacagatacacacttgatataataatgcttatttgtgatgcataagaacatatatgcctgcacttgaccttattcgataaggtcaggcaaccaaacatgccctttctaagtttgtctttctgtgatctttctcagtattttatagttgaaattatctttagcagaactgaggccacctctacacttgaactgagcagaatttataagagtacatgaacagatttttctacacttgttcttttttcttgctgttaggctgggaaagatggccaatgatgatatatgctgctgtttgtgattcatgtgaatagatttttgctctacacttgttctcattttcttgcggtttcttttttcctacacttggtcttattttccttttccttataccttttcttttgctacatttgatagatactactggtaagaacagataccaatgatagtagctaattcacattcttcatatatctgaggccattgttctgcatttatttacctgttggaaatgaggctcaatgatgtcaaatttctgcacatatttgctacattttcgagttattgatgtcaggcaaatactatcaagttccttgttcatcttttgatatcaacagatgtactcactttttttaggtaaccacacttgattttgacatgatcaagtttttatatgaaaccgatacactctgcacttgctcttttggtaaagatcatactactattaagtgttgatgctcttgcaacctggatctctgcaactcagatcctgtactatttcaaaggtacatgttatcctgtttacttttactatgtttcaggaaaatgtgataatggaaaaacttgtgagatcaagtgtagatatactaaggttgatgagtttgaagaacatagctgaaacagatggtttagttttgtatgcggttactaatttgtttatcaaattggttactgtaaaaaatttgccatgagcacgtatatttgtatgtttgtttttgaattgtcaaatgtaccagtgtcgtcaataaaattatgtacatgatttttgctagaataatcactcttgcgtgttcatccaggccatttcgttacatttgataaaaaaaatgatcatcagtgctgctcattggttttaaaaaatgacaacatcagtaaagcatacatacccagtacatcgattctctaagagaaaaatgagcttaggaatattagtaggtgggcacagacccagagtaacataatttaatctatatatctacgatggattaaacttatcacacataaatagattagggactaggaaaaaatctcgtttcacaaactttatggggtaacctaaccacccacaagaataggtatttacacataagatgtatccatccaaccaaacaacatctcctgcatgctaccattccatccgccccttgctgcaaccaaccaaacagcatctcatcatatccaggttcatctcatccaagcaaccaaacacctacatgtgtatcctctaaaccaggctaaacttagcctggatgagggagatgggccaggctagagggatacgagcaaccaaacagacccttactgcataatcttcaccttctgtaaaccctctcactgagcaattggatatagggagtaagtggaaatggatgc

SEQ ID NO: 1963 - DNA, 2000 bp, Oryza sativa
  N_region (840)..(840): n = any nucleotide
ttgccccagaccgagctcaaggatggggatatagttgaagtgaggatgtagctgatgcgccatatctcctctgcccagggttattgataaaattggtttgaggttcaatcaactatgtagggtacattacctgaaaatcaacgaccctagggtcgtaacagactgaagattaagaaaacgtagaaaaccaacagcccaatacctcaattgtacagtccatttgtcgataagaatccaaggatgcgggatttatgtacaggaagtgctatatctgtacataaagctaccaactgtatgtatccttgtttatggttaaaatgtaaatttctgtaagtaaagttgtagtaatattagtcagtagttgacagttttctaggagctgcaattgttctgtacataatggtgaaccgttctatggcttgatcaccttggtactgagctagtgattgatgaacatggagtgagatatgcgcttggtctgtaaattacaaatcagtatgaatatttggacttccgatgataatatttttgcatattaaaaaactaaatttttagcactatgggagatgatgtctaaaactgactttttttccccaaacactagcctagagcccgtgcgttgcaacggaaaaaaacaaattgagtttctaccttattaaatcaattaataaacatttatattagtttaaccagtgttatgatttttcttattaaataaataggtgattttgaaatttggaaaaaccaatagttaaataggggaagacttgtcaaaagttggtgtaatagtatagattgtgaggtctaagtaaggtggaaatagataccaccattactaanattttaaatagtactttttttttcttaaaatataagtatttttagctataaatctggacaacagtatgtccaggtttatagtttaaagttactatatttttggaacggaggtggtagcagtatttagtatagataagtactattggtggtagtagggaaaaaaaagaaaacaaaatgttaccgctagtagttttttttgttgcccgccaatcaattctcagttcacagatggaccaatttcacaactgctaagatcgatgtggtccaaataattatccaatttaccaaatcatcaactactagtactccatccgttttacactatactccctccgtcccataatataaggggattttgagttttttttacgtttgaccactcgttttattcaattttttttaaattattatttattttatttgtgacttactttattatctatattactttaagcacaactttccgtttttaaaattgcaaaaaaaatttaaataagatgagcggtcaaacgttaaaagcaaaaacctaaaatcccttatattgtaggacggagagagtaagtcattttagcatttttcacattcatactcatgttatgtctagattcattaacatgagtataaatgtggaaaatacttatgaaacggaggaagtaataacaaacatggaagcgattattcacgatgttctaggaggaaaaacttcaaaacatgcatccgctcgcctctccaaaaattaatcgcctttccaaatttccatgggagagccgagaccgtcgtattcaactcctttgctaagcgtctccgggccccacatgcagtgacaccgcgagcgccgcaagtagtaacaaaacacaagcacagctaatccagattggcgaattgaacggcttgcatgacacgccccgcgtttccttccactcctgcgacgccgccacgtctcccccctttcacaggcagcgttcaaactttcgaaaatgagaaaaaaccctaggcgagccccgctcccaacggtcacatctctcgaatcccctcctatataaacccctccgccgcccaccccacctccgcatctcagctcagtacttgatccaccacccacaaatccgccgcgcccaaatcaggaggaggaggtaagaggagaggtaggtgccgagaag

SEQ ID NO: 1964 - DNA, 2000 bp, Oryza sativa
  N_region (474)..(474): n = any nucleotide
gtggcgtgtacagtgaaggcctcaaatcatggagcataatgtctaatgtatggtccagtttatgtcgattggagtcattgtcgtgcaccgtagatgatagtagattcatagtatggagagtaatgtatttcttagattaatatttagatgaagcattgtacttctagtcttaaaatataacaatttaaacaaagagtttatctaaatttgtagtactcgattcgattgtgttcagttcagtactatattaatatattttagaatggaagaagtagtactgtactctctccatcttaaaatataaaaacataggactaaacgagacatttctgtttaggttcatagtattaaaaaatgtatgtttcatccccgtcatatgttcttatattttgggacggatggagtattttgcttgagtaccggtatgatgatgatatcattgtatctgtacgggtaggagccaatagtctgganccccacccattctctgtcctccacggtagttgcatgagatcaggatggctagcgacttcagattaaggggttgtttggaagataatctagttctaaaaaaagggagagagaagacaattaatctcacttttctacaaaagtttatataattatatgtgatttgttggtcacacttgtaataagttgtggtaaaatgagctttttacgagtgtacttgatatatcttaaaacgtatagcatacgataattatggcacgaactaaacaccagggctaagctggtcaaatcttaaacaccagtgttgcactcaaccaaacataacaatggcctacacaatatcctagtggccctgccaaatgttacacaaaccaacaacaatactgcacttttctagttactgttagcgcgacaatgaaattgagcttaattagatgagatttttatgatgaaattatgcggcatatggctaccggcaattaataaaccggactttctttcaggcagcagcccatgaagaacatgagagtttgaagtcctgtggaactagtcctgtagaccactgtgaactgtggctgataccatgtggccttcacggccgcaaccagtattgattctgactggaataagttcacttaccatccctgaattttacatcgagtttgcatgacatcctaatctctaatatcagaaatctttactcctcatgtaattaaaaccatgcaaacctacttctctcctgcctcgccccatcggctggcctgcgagacgagaaaaagtgagagagagaaagggagagagagggggtgatgatggcatcctgattcctgatatatgggctccacgtgggtcccatgctgactcagccgccacgtcggataaaaccggggtcaaaaccatcaaaggacctaaagtggacggttttttaagttgagggatatcatatatttggttttgtggttgggagactgtcgacgggtggtaccgcgactaagttatttagatggtatggggattgtcgatactagggtatatgtgagattgaggtaaaagagatggagacatagatttttatacaggttagggccccttatttgacaggtaatagccctatatcctgttagccgaagccggtgttctcttatccatccatctagatcacacaagtataataagagatcagagattgtgctagatctctcttgccggcttttcataggcacgggatggggtatgtctaggctaatctctatcatctatcgatatttggcggcgtgggtcttgttggtcttgtggcttatcccatattaagacttggtaaatggtggattccgccgagcttaaccgattactgctgggtatgacagtgacgattttgtaactcgatgataagttgagggactttcggtgtactttttcctatatatatcgagcctcggagaactcccataaccctaccgtgcgccgccggtcgttgtactttgccaaccgaaagtcgtccgtcggcgctgctccacctcatcacacga

SEQ ID NO: 1965 - DNA, 2000 bp, Oryza sativa
  N_region (511)..(511): n = any nucleotide
  N_region (518)..(519): n = any nucleotide
  N_region (526)..(526): n = any nucleotide
  N_region (623)..(623): n = any nucleotide
  N_region (740)..(742): n = any nucleotide
  N_region (763)..(763): n = any nucleotide
  N_region (1454)..(1454): n = any nucleotide
gagctgcaacacttggaggtagagagcttctgctagtgctctgttgggtgcccacatcaccctacaagatgaaggtgtctttgatacctggttcagcagtcgagggatatgaataaagatcgatataagtctactttgactcccttaaaaagtgacccgaatctaatccatgaccctaaactgcaaaaccagatatctcgaccccaaactattgaaaccggtgcaatttaactcccttggtggttttggagggcggtttcgctgacgtgtcgctgacgtggcggtgttgacctagtctatggggttgacatggcgcttaggtggcatttaaattaaaaacatatatgtgggacctgtttgtcattcacacacatacaaaattgtggggcccactgacatgtggccccacatgtcatcctctctctctttcttcttcctcccctcctcctcccttctctatttctttctctctctccccttcggccggctgcggggagcacggctgcatcgncgccggnnggcgggngggggctagagtggtggcggccggcggaaagctgaagcggcggcggcgggctggaggttccagatggcaacaggcagctcatgccggcaagagcggnagaggcggcagtgccgacgtcgacgcgacgagatcgagcggggaaatgcggtcgacggcacgacactaagcgcccgaaccccagtctcactccacggcacggcactcacggggaacnnncttcctgctccctccgccgcntcccgccgtccgtgataacaagatccggcgctctggcctctccgccgattgcaacaacaagatccgggcatctggcgtatgcgacaggctcacgacatggccaacatcgagcctgtcaagctggttaggggcgagggccaccatcgagctacaccatttagcattgcaacgacgacatcgtcaagtcattgctcgagctcgctgcgtggccgtcaactcccgtgccagccccatcatcaccaccaactcatcccccgttgcgtctccttcaactagtgctgctaaggccacaagcatcacaaaatccagaaataaaattgattcatttagcaactaaccagagataaaattgattgttagtaggtcgttcactatccactgaagaataggatgagtaggcagaggggagtacaccctcccggggatactcgtgcttgcgtcgagcggcactgacccggacatcacgtcggcgatgagctggctcaggtcgctggtgaagcaatcggtctgcagggcgagcgccatccgtcggcgctcccaccgccgccgccgcttcaacttccgccgctctggcccccacccgccgccgctccagcccgtgctcctccggtggcccggccagctaaaggggagagaaagagagaggagaggaagaggggaggaagaagaaagagagaggatgacaaggggntcccacatgtcagtgggccccacattttttaatgtgtgaatgacaaacggttcccacatatacatttttaattcaaatgtcacctaagtgacacgtcaacccacagactaggtcaataccgccacgtcaccgaaaccaccctccaaaactgccaagggagtcaaattgcaccggtttcgataattcgggggtcgagatatccggttttagggtttagggtcatggattagattcggctcactattaagggagtcaaagtggacttattccataaagatcctacaactagtaaagggagcgaaagtgaacttatttcctagacacggatgatgggtatcggtgacaagatgggccggaatgcaattctccgccgatgagccgcgactagctgggccggcccaccgcgttcttgcgcgggcgaggcacgcgtccgaatgctcgcccaatccaccactcgtcgccctccgcttcgcttctgctccccccccaaaaccctatgcagaggaggacgaagtgagccccggccaccgcccgccgccgccgccg

SEQ ID NO: 1966 - DNA, 2000 bp, Oryza sativa
ggaagccctgggccgaaagcaaatttaactaaatcctgtcaattttaatgcttataatgttaagaaatttgtttataagccttcttagccaaataaagttgatgaaaaattattttagcctctaaatgaaattatttcaaaaccagatatcggctttaatggcttcatctcaagtcagagaattaattttcgtaattgaaaggtgattatttatatgctaaaagaataagatcttgaattagaactccaacattgtggtattagagcttaactttagcctactcaattccttattcacatcatccatgtgattagaagccatcggtgccatcttggttcgacatgaacaatttcgagtcaaataagcctaatctaatctgtttagcttcttatctttattgcttagtgaagattagctcatattcatgttcaattaaagttaataagattgaattagggttcatgatgcactgcattgaatataagacagtttagctgagtattaagttgtggatgagaagtactcaggaaactaacccaaatggctttgctactatacattccagtgaaaaaagatgagctgtgtacatatgtgtgaagataccttttgtggtttggtgaaaagggtggcatttgtggtgaattgctgtagtggtagtagtactactccctttgtcctattttaactgcaaccataagtttccgcgcctaactttgatcgtctatcttatttatttatttttataattatgagttgataaaacatgaataatactttatacgtaacttatgtttttaatttttttcaaataagacaggcaattaaagttgtgcacggaaaattatggctataattaaaatgagacggagggaatagttgcttgagtttggatcgttggatgaagaaatgaaattgacagcagctggtgttgaattgggatttgtatcatgtgcagttagtactatcactgcaacttagggcatcctcaatgtatgttgcaaaagtaggtagtaaggtgggcccatgtaagatggtaatagtagattgaagatgcaccacaatgtatatatgtgtagagtgggtaataaggtgggacctatctgaaaaagaaccccaaacatgagccatgtcacaattaaaaattaggtaggacccaccacaaagtgctataacctgtagcaagcttatggcttggtagtagttatttactacttccacgatgtatcttacctagtagtaagaatattttaattcctaatacccacttctcccctacattgtggatgcccttatgcagtccactgccacatgttagatccgaatctaacggttcaaatgcatccggatactgtagaacactgtaacaagaaatattcaatattcttgcgtcagtactgtagcggaagatctggtccattcatcaccaaaatgaacggctgtaatcgcatgcagtagtttaacttgcggtcgctattcctactgcaggtgatcccaatccgttgaattgatgttttgtggctgtgtggtgtcgagaaatgaaattggtatagcttaagatgtgcacttgagaatataatattagcaagccttgaaagggaaccaaactaaactgaagaggagggatggagggaaagccgacctgaaaatgaaaatgctttcagtttggctccaaaccaaaacgaagcggggatttggaaatttggatggatttgggaatttgggtgggcgcggagctcctgattcccagcgagcactgtggaccgtcggatccagcgagatggaaggctcaacggacgagatgagtggctggagtggcgccaagtaatgaatgttgtttcgcggcatccaagagaagagattgcgcgcgagcggggagcgggcaaataaaattggatttgggtcccccaattcgattcgattatataagcgcgtggcggtcgccgagtcggcggcaaaacctcaatctcctccaaatccatagccctcctcctctcctctg

SEQ ID NO: 1967 - DNA, 2000 bp, Oryza sativa
  N_region (1306)..(1306): n = any nucleotide
  N_region (1381)..(1381): n = any nucleotide
atactgcatatagtttcagttttacttcccactcgattttaacatgaggaagcattgtcttgcctgaaacaaagttttctaattacttaatcactctgtatgtacagtcagttgggccttagttttgattcaataattgatattgttctctagtggttgttttctactgaattgtccatagtaagaaatgcgaatcgctaaacagaaaaaggtattatactataggtagtcttatgataccacatctggtggacgacaacaacttgactttgcatataaataggcagtcccaggatgatctttccgcagcactccattcatttatctggttctgttatatatctctcaacgtaacctgattaagttggtggttatggagcatttcacaagaggagtggtgctcgggatgccttccatccaaagatgccattcactgtcatgtcaaatggtgatgcttctgcatattcatactcctctttgatttatagaacagaagcaggaaacgaggcatagttttggctaaggctactataaccatattcaactgaagtttttgtattacttattgtgtttagcatggttagagattctgacaaattctgagaaaggtttgattttgtcgttatcagggccaggtgcctataaatttctgcatcatgacgttgcatctctcttttaacatggttttacgccccttctgtgttgaatacttaattttgtgctgtgaccgtgataaattacttaattttcaaacaggcagagcgcccacagattgatgtgcggaaggcagtgatccagtgtaaagaggaatcacggtgctcaaaatgctgccatcctgcagatatgccgatcattcctgagcaggcaatggagttcctctctcgaacatggagcccctcatcatcagatttcttccaagtattctcactcagtttcagttccgtttaccaacgcggtgtcagcatttactaaattgtagagttactctattattatctccatatctttctatgtatcgttggttagtttgaaaatcgagattgaattagccaacgtcatttttttaaaaaaaaatggagggagtattttagagctcacatgcacaaaagtgctttcgtaagcttaatcattaagcatggagatattttaaggtttggtttttatgcacacagacccttagaacatcatctgaacaccgtcagccggagaaggcaatcaaaagacgaagagggaaatgaagaaaaagatgaagagagacatctggtcccggtcaatttcagggaggcaaaagccaattcttcaaccngacatgggtatgccagtgaatggtctcagactctcttaactcttaactctcggccaacacaggagttgccttccnatatatgttcaattcttgcttgtctaacagcgtgttctagctagtgagatgcctagccccataagcgcaagcataagctaaaagcaaccaacttgggtaaggacacgacacaagcagtataacaacaataacatggcacatccacaggatagtacaaattacacagtaactgcagtatagtatactccctctgtttcacaatgtaagactttctagcattgcccacatacatatagatgttaaagaatctaaacacatacatatgtctagatttattaacatctaaataaatgtgggcaatgctagaaagtcttgcattgtgaaacggaggaagtagttggtatcttgtcagatttgctaatgaatgctttgttttccttggatattagcaactcaacgctggctacatgaaagcaattcttcgaggtcatttcttgagtgctgtttcggtcactggacgccagcgaaagaagaggaaagaagagctcaggctgcacgcagcacaggcccgcgcggctgtctcggttgctcagctcgccgcagcaatcgcaggcattcgtgtcggtgtgcgaactgaggccggacaacctgaagtatgtcgaggctgctgacagcaaga

SEQ ID NO: 1968 - DNA, 1114 bp, Oryza sativa
  N_region (952)..(952): n = any nucleotide
atataccattagttccaactatatatgtaaagaactaataaattcttaaggcctaaaaacatgtagtggtggtttatggtccctcgtcaatcgtaagcccatcctcactcccacgccctctcgagcgagttctacacgcatgatgtcccttccgctgcatgaatggaagcacgcccccgacccccaccacccgatcaaaatcaatcaaccatcattccgcggcgcttgcctatggacctcctttcacgtctagctctcaacttgcatggatgtaacagcatgtgcacttgccaataaaaaaaatatcaattaaatttatagtgtactcttttttattgtacaatctacaccaagacctagaattgttggattattttcataaggccacgtgttcctccccacatacgcctcgtcgagttgtcatcttgtattcctatcaaatgtattgcatcaactgccgccaccgctcgatatccagctagctgcctaggtgtgctctaccaatttacttagcaccagccccatctcaccataaatgctaacctatgtcccctatcgagcagagccgcaaggggccagcacatgacccatctgtcaccgccatgattccatcaacatctagctgttgatggcctctctgtgacatatactatggatgctacacggtgcccctctatgtgcctggccatcactcccgaccgttagctctaccacccctctgttttccgttagcatcttcacccctaatattttcgtgtcttggtccatatcctccataaacgaaacatcacaaatttttattattcgcaatttaaaaataagtagagaaaacatgggaatgcatagctaccttttgagaggtctgcatgtcctgcaccagtgaaacaatcggaactaccaagtttgcactatttataggaattgtattgagttgctcgacgaaaagccggcnaacgatctctatgcgcaccggtgcatccatgcctggttttctttgccccctgccaccataaatacacacccagctgcaatatggatcaccaaacacctcgatccatccctctacccttcaagaaacaagaaagacaacaccaacaaactagctagctcacca

SEQ ID NO: 1969 - DNA, 1354 bp, Oryza sativa
  N_region (698)..(698): n = any nucleotide
  N_region (705)..(705): n = any nucleotide
ggaggagaggaggaaggggaggagttggagaagagagttagagaggatagatttgaggagaggtgtgagattcgatctgtctaagttgtaactgtggaggagagaataaggtatagggattatatactacgtgtttaattttagtcccgattggtagttggtgatctttagtccggttatgacatcaaccgggactaaagatcctcggccctctgacatacatctgacagtggatgaaccggaactaaagatcatcttttgtccctaaagatcaaaatttttataaccgggactaaaaataatctttagtcccggttcttcttggatgtggaactatcgtggattttgccggaccgaccaaagatgatttctctaccagtgagtagctcagaattactatatataccttaatttatatgatgttcacaccttttcttttacaaaataggataattaaacctaacctctacgtccaaccgatgtacacagccaatgcgatgttcacataactactagtagtaattatttatgctggcgtgcagttgtcttcttctgttctttggtcatatagtagtttatgctgtgtattccatagttaattactgtacgtatatatatatctgaccagcaacctcctgccgcaagccctggcctgtcaattgacgcaacgacatgtatcattctccacgtacgcatgnctctctngcgtgttatcgaaaaagggctaggtttagtgaagaaacattgcgtgctttcgcgcacctgggtgttatttattcatatcactgtagatcattccatgggtcttaaacatatgatgctacacatggcgaatactaattttccgtggccacgaagcgctcaatattcgccatgtgagccatccatgtcaaccattgcaaaagtttgcagctgaactggacctggttctactggtcccaatttatgatggcccattagtcacccaacttaggtacagcccaaagaccatagcccatgaaagcctccgcattgactcctcggcccctattgcgtcactgggcgtcgcctcccctttctcgatcacccgcgtattattatccccttattaatagccgcaacccccagtaatctcccactgacattacgggcccacaagtacgcgtccccaccagccatagactgctcctagacccgtcgcaccgaagctcccctgccaaatctacgcacgcgacgcggccatctctctcccttctcccccaacctccattagccgatccaaaccacctcaaagccccggaccgcatcactctccttctccccccccacgcccagatccagatccacccggcgcggcggcggatccgtcgaggaa

SEQ ID NO: 1970 - DNA, 104 bp, Oryza sativa
  N_region (11)..(11): n = any nucleotide
  N_region (79)..(79): n = any nucleotide
attcttccccntcacctcgccgcctcctccccttctcccggccgccgacgaggtccagaccgtggagcctgccgcggcngccgcggcggcggcggcggcggtcg

SEQ ID NO: 1971 - DNA, 2000 bp, Oryza sativa
  N_region (1817)..(1817): n = any nucleotide
  N_region (1940)..(1940): n = any nucleotide
gtcccatacaaaactaccaaccgaaatccatttcattctcgcccctcgtgagatcgcggcgttatgctcgcttccacgccctgcgatcgcagtatcacactcaccactcagcgatgttgctcctctccgatcgacaggtcttgcagctccaaacatgggatttagcaaacaacatcagctccagtcagtagtaaaaaaatgtttatgagaatcctaaacagaaattgagatgtgaaaataataatctctccaagagattaggtaaatttgacttcctaaaaataaaaggtggggcccatacaaaactaccaaccgaaatccgtttcattctcgcctctcgcaagatcgcggcgtcacactcgcttgcacgacctgcgatcgcagtatcacgctcaccactcggcgttgtcgctcctctccgatcgacaggtcttgcagctccagacatgtgatttagcaacaataatcaactctagttagtagcaatcaacaccaaccagcaagcagcaatacattagtagctccagaaatttgttagcaactctacagtcagcagcataagcaccaacagcagatccggtacaacatatgggcacctatcaatacttgagcaacaatacaatgtcaaaaaataaaacatacaatttgcatgtcaagcactatctatttattcctagcattcttgttagacaaaaatggtgcgattttagcagcaactttagcagcagcaaggccatttaacaattttagcatcagtagcaacacatctagcacatagcagaggacatcagttttcagtctgcatcagtttttagcaagcatcagtttttagtttgcaaatgcattagcaagcataagagaatcgtcacgccgcgcgtgtgcaccgtgacagcgtgctccgccgttgacgttggcatttttttactcagaacagaactagaaacagtagcaacagcaggatgaagtactattttccctcaacacatagcaacagcaaaaacaacaacatattggtcatgcgttgttgcatcgacgcagaccgacgggagtggatgtgtgaatcaggcgccggtcaaatgtgtgaatgggagagccacaaaagactctgccgattatgggagagatgcgtccggtggcagggtagctagaggcgatgatgacggacaacctcgcgacgaagttgcaggctggaaaatttcaacgagggcgcgggaactgccacaagcgctcgcgagaggtggattgggagtgagagcgcttctttattcgtggagaacgagaaacctggagatgggaatctgattttgggttttctgcttagggtcactgttggattgatttttttcaacaaaacctcaaaaattattggatatggatttgttttgggtgctcttcgcatgctctaagagaggagagagagaaatgagctaacatgaaaagagatgacacttttgtcattttctcacataagacgttggtgttaaaaaaatcttgatgataataacatcatggtttgaattttagagtaattcaatagccaaatatcaggtttcatgaatatttttcataggaccgatccaatttacctaaaataatcatctaacaatgcacatttacgaaaatctctctctttccatcctgcgtcgcctcctatcttctattgagagaagtagtagcagaaaccgcctatccgacgccaaaaacacgagcacagatccaacgggccaaggtttttttgcgcttgcgaaagctaaaaacgaagcggaaggcctccactctgctcctctccctccgcacccccaaacaaaccaaaaagnaaaaaaaatgaagggttccggctaaaccctccctttcaaatctcccccacgactcccatttccaccccccctcgccgccgccgccatcgccgccgccgcggcttcctccaccaccattccaantcccattccccggggcccccaaaccaaaaccctaaaacccccccgggggggcggcgccag

SEQ ID NO: 1972 - DNA, 2000 bp, Oryza sativa
gaattagtgacgaagagcaccttgagacagtaataagcacagattccaactggtgggcaaagcagtggacatagaaagcatacggattttcattatgtatcagtagctgcatgtcgttaaattcacatctcatgtttgaagctccatcatacccctgtcctcgtagtttagaaatagataagccatgctgagcaagcagaccaaccaatgtttccttgaatgcagcaggtgtatcctctgtgagatattcaagaccaagaaatctttctataaccttccctttcttattcacaaacctgcaaaccacaaattagaatatgttaaggtggctcaacaatgaaatggtagttgctttcaagtagagaacatataaacaacttaccttacaaaaactgccatttgatatttctctgccatatcgtgagaatcatcaataagtatggtgaaattaccatctccaatctctccaattatcacttctgtgacctcttgtgcacaagcttttgcaagacccttttgaatcaatggagaagttatgtcaatatttccaacgacgttcatatcaaaagccctttcaacctctttatccctcttcttgtacaaatctattaactctagaagattgcccttgtttatggaggttggtgattgaccaggaccactgaaggccatgccttgcattaggagaaatcttgcacaatctaaagaagcaatgaaacaaattctatatgcacttccaatgtctggatggttagaagagagctcatgagacttgctttgatagccaaaatcctcaagacctttccttcccttactgtgatcactggtacctccaccaaccttgtctttggtttccccatgatacccatcaattgatctgtgtcgattcaaatcagaagttgtggcatctggattaaacttcttggtaacattagcccttttcttcagccctgtaggtgtgcccgcaccacattcaagagtcctctttggcacaggctgataatacctcctcattacttaaaggttaaaactaacctgagaaacatatacattatcaaaaattaatatatcaaacacagtaacacagatccacctaagatttacccccacaacaatatcataatttcgcacataacatgctcaaatgttaattcagaattgccacaactcacaggtcctccaatgcttacaatccagaagtgacaactaacgagatttgaacaggagtataatacctcctcatttcttaaaagttaaaccctgagaaacatgttacattatcaacaattaataaataaaaaaattccacctaagattaagccacaataataccataatctctctcataacaagttcaaatgctaatccataattcctagttgctacaatgctacaacaaacaggtccccgaatgcttacaatctgaaaactacaattcacgagagctgaatgggagtacaagtagaggactcagtaccaaaatccctcgccccactccgccggcgcaccggcactcgctgctgcccctccagctccagcctccgcaacccaccgacgtcccgacgcctccgccggggaatcgagcctccgggagacttctcagggcggaggcggagcagtcgccccacgccgccgcttcccctcccccaaaatgcgtaatcaccgaattgccactgccggctagggttttcccgccgaaatggagaaaaccccattgccgaatggaccacgcggccttttaactcctcgaaggccttcttgggccgctttccgggccgcgggcctccaccacccgtattcccgtggggtctagatccatcccggcattccgaacaacggttgcgaatcctttccgggcggaaagaaaaacagagcttgtcagacagatccgacccgaacaccatccgcttcgccgccgcatcaattcggcgagaggcgcattcgaatctggaaagcaccaaaccctagcttcaccaccaccacgaccaccaccatctccc

SEQ ID NO: 1973 - DNA, 2000 bp, Oryza sativa
  N_region (85)..(85): n = any nucleotide
  N_region (1648)..(1648): n = any nucleotide
ttctcctcctctttttgcctcaatctcgcctctgccatggccgccttcccctcaagctcctcaaccaacgttgttgttttgtccnttgcttcttcttcctcctgggaatccaagccatactgataacttgatttgcacttattattatgattaattcatcatataattcaaatgatggaaccttgagatgtgatgatgaccacggttgcagtgtccatggccctgagaattcgacaatgacatgcctttgtggccgcgatgaatgtcgtcggcatcgtggggtcggccgcatgggaagaggtggcaatggcaatgagtcgaggacattgtcatcgattaacacattgtcgcctcctcctcctcctccttctcctgatgatctccccatcatcggattcaacatcacctgcaaggagcttagagccaatgtcgctatgattgacgggctctctaaaggatcccaaggccggcgacccctatgacatggagtatgaacgattgatagattattgtattagcatcaagaatcagagacatgcgatcaagcattgcatgatcgttggataaagaaagctagaaaaaaatgtagatgcatgcatgtattgatgaattctatgaggcgaatggggaatggcatgtgggatgatagcaccatggatgtaggatcttcggagagattagaaaaagtataaaactctaaattaaccatatggcccctaaagatagtgctattagtttgttaattttagagttttttttcttcttcttcttcacttctctttccattacctttttaaaataggcagttaaagtaagattaagaatccactagaaacaatactgaccagaaaaacatcatactctatttagcatcacagtaatagattttatgtctcgtgatttggatatttagtccaaatataaagcagaggtgagactttgatggcaaaaggtgctactccacgagcaaaggtggaaaaagattgatgctccatgagtatggtattttgacaagattacaaatttttgttgatgtcggtgagcggtaaaatacacaccaatacaatcacttgataatattcaacatggaaaatggtttaccttatctagtgggttgtttttttttaaaaaataatggattacattgttgcacggattattgtgaaatttcgtcaaaaagggtatttctattggcaaatcgtgacaaaaagtatattttttaaaaaaacattttcctcccagtgaaactcaaaataggtggagtatgtattgtttcgagaaattggacattccaccaccgccaaaagagggttttgctcaaatgccactccgcggattggattcgttaaaaagtcacttccaaccaatgccaaaccattgtttttccatattcgtcattttacaggatttctacctttttcggacttgacttgcccaaaataccccttcgttcagttaaacaagatgagatggacgcgcccagcgggccattggtaacgaccacagggaggaggaaggagggcgggttggatgcggcagatgcgacgggttgtgcaccagttgttgtcatagaacggtctctccgagctcgtcttcggcaagagcggcgcgtcatcggcggggacgacatcggccgccgcgacggggncggggagagctcaggtcttcagccgtctccttcaacaacaataaacggacgacaagtttagttcatgtaggcaggagatggagatggcaaaggagtaaccgacgataatcaaagggatattttgatcaggtcaactgcagaaaataatagaaatattgtgaaatgacgaatatgacaaaagaaacggtttgatatcaatttggagtgacactttaacaaatccaatccaaacagtgatcgaacgtccaatttcttctattgtttctgcgggtaaagctgaaactccccaaagcaccagttcgtcttccgtcgaaaagggaaacggaccgcctcctcaccggcggcggcctcc

SEQ ID NO: 1974 - DNA, 2000 bp, Oryza sativa
  N_region (625)..(625): n = any nucleotide
  N_region (1588)..(1588): n = any nucleotide
  N_region (1698)..(1698): n = any nucleotide
  N_region (1731)..(1731): n = any nucleotide
  N_region (1734)..(1734): n = any nucleotide
  N_region (1794)..(1794): n = any nucleotide
  N_region (1862)..(1862): n = any nucleotide
  N_region (1997)..(1997): n = any nucleotide
gggtagtaagttctagggagttattatgagtagctgcactcgtaaattatacaatatggagtagtagtaaactagtaatgtagtatggctcagctagcatttggcttacatgttctattgtttcaactaataaaattatgtcatcagctagcccctgctcattgctttatcttgtcagctgacacattcttaattcacttgacatgcagcttggcctgcaccacattataaggagggacatattgatatatccaggctatgttcctgtacctgaagtacattacaaggttttccattacgggctgagatttggtgttggtaattggagctttgacaaggctgactggagaaatgttgatgtggtaaacacgtgctgggccaagttccctgaaccacctgacccaactactgtcatgaaagaagatcaagctgcacgggagagggatcttctcagcatcgcgtgtgggagggctttgaacaaagctctatattggcaccacaagagcagagattgccctcgaccaagcccagttgatggtgcctctaagaaattccagaaagtcacagcctccaacgatttaggaggaggaaacacggagcagtcattcatacataacattaagcnaaaatcccacattgatgtggctaagctgaagcctatcgaaagagttgcagccactatatcatctgtacatagagcaaggaggctagctagatcttcaaggatctggataattgctgtctgggcagcatcagttgcagtgttcttattggtgatctccatgtttttcactgatcgaaggagaagtgtttcgagatcgaggatttccagaagccagaaggcccacgtctgactacaaaataaacaacattgcgatcatgaaatgtattcctctgccaatacagtacataaaggggtagagtttgggagctctagaggctgacaacacatctgtaattgaagccatcagaattagctttggagacatgtagagttgcatgttcacttttttttttgacaagtttgtgttcgtagatagcaaattttgctaccattggtgttgtatttgatttatttagtgttcttaacatgatgtaaacaattatatgttgcagttctctttgatagaaacaatcatatgctgtttttatggagagattcagtgatatatgtgattgaccaaacatacaggtacagtaatttgattttttacggaatagaattttattacttaggtcttgtttggtacaactctagatccatgatggattcaaaagtttgtatgttaaattatactacatccgtttcaggttataagatgttttgactttagtcaaagtcaaactactctaactttgactaactctatagaaaaatgtagtaatatttacaacaccaacatagtttcattaaatctataattgaataagttttcataatatattagtcttgaattaaaaatattactactttcttttacaaaattagtcagatttagaataatttgactttgacaaaagtcaaaacgtcttacaacctgaaacggagggagtagcagtttaaaatttatattttatttaaaacagnaataaatgatttatctaaatgttattaatgaaatcgtagattcatatctttggatttgtggagttagaagtactcagttaaatcttggatctggagctgtgctaaataangccatgtcaagatatgctgattttttttttgcntgnaaaaaaaaaaattccggtttgcgtaaagggtatcacctagtaacaggctaaatggctaanacgcggcccatgggaaaaaagtcccctaagataatcatacagcccactagtatattagacaccacctnactcgactcgaccgcggccgcggcatttcgaattcccaaccccgaaaatccccaggccccgaaaatttttcgcgcccaaacccaccaaaccctagacccaacttccggccggcgaaagccgccgccggcggccgncga

SEQ ID NO: 1975 - DNA, 2000 bp, Oryza sativa
  N_region (1850)..(1850): n = any nucleotide
tgaaattgctgtgatacataattcagtagcaaaactgatattccaattacaagatagagttgaagtcagtagatgccaggtattatctggcttatttgatctattaattagttttctgtgatgtttctgtatacgacagatctttccatctggtagctataactttttcagaatggacacgaggacttgaggagcattttttctgttctgttttatgacgtgttcatgccttacttccatctcccatgcagatagcgaagaacattacaacaaacgagatggcaaattccatgagatacagttatctaagaggtccaggtggaagattcagaaacccatttgaccatggagcgcgcaagaactgctcagaattcttgttaaatggatacaatgaggacattgaacgtcttgatcatacgtcacacactgatgaggaaatgggaatgatacagatgacaaacgcagtcttctcagaatggcgagggcccttcccaccatggtaacggcactggccattcttgtgctgaatcacatgctcactcaaaatctcacagtcaagtaagttcatctcagtgttgtgaccacagtaagaagaccgatagaacaccattgggcctagggctgggccttggacgaaacagtgcttcccggcagtatgtccggtctcttctcccattgtgatttgttatatgcagatcatgtgtgtgctctctgtagattgtatgtgttcatgctgaggctccattatttatttagctgcttgtgacataccacataggtttcgctagcttacgttaatattgttggggtgctagctgtgtgaaaattcagatctattagatccagtattttttgtggtgaatacataggagatgaaggtagcaaggtgctcatgaatatccgctgatccgcagttcagaaatgtcttgtcgctcctgaaaagagggcaacaattttgtgcagatgcagcagcatgaaacatcttcattgctgtgtcccttggtgtcaatataactccagcattttagcttctggatcttacatctgtgggaaaatgtagttgtaaactaagataattgtaaatttattagcaaattctgaatttagatactcttgttgtgatctatagctgtactgacagtccagaaagttgtaataacaaaacaaatatctgaactcttgacgtgttatgaactctcgtaggacctacgaatggatgatgcatccgttcgaaaatataggtacttgtgcatggtttttaaatgtatacggacgatatgcatatttttggaacagagagagtaatagttttttttttccagttattccccatttaacgtatctggcactggcagtacgacattgcttgcagcttgtatctgagtatctcgagttaatcactttttagcccatgaacattcagttcaggagtgaggagtatggtacctcatgatttttaagagaaggatggccttgtcggcttgtccccaccagtggatggctggctgtggccggagaggaccaaagaagtttgcaactcttccctgcttccatgttaccgacacttataaataaattcttaaatttaaaatacacaagaatttcaagttcatgcagaattttccctgtattgaaaactgaaatatctctgcctatctaatctaaaactgaaaaacaaataaaaagaaagaaactttagaactcgcaacttgggctcggtccagctccagcctccaggacccagatgccctcgtggtccagatcacccggcccggcccatcctacctcatcatcacgcaacgcaacaacactgacctacccagacagcgtccacccttccttctcccgcngccgctccaaaacccccacctctaaaaccctcgccggcggcgcacccccacccaagctgagcggccaaaccctcgacaagcatcgtcagcagcagcagccgccggagaagtaaccgccgccgccgcggtgggagagagagagagagggag

SEQ ID NO: 1976 - DNA, 2000 bp, Oryza sativa
  N_region (252)..(252): n = any nucleotide
  N_region (1722)..(1722): n = any nucleotide
tctattgccgttgagctcattcctatcggctggagctttccagtgctactgctaaagctcgttcttgatccaacgactaaggcggaggcaacgaggattggaacaagcagtaatggcgggaacaagcctcgatttccttgatcacttgatgctaccacctcgactatcatggcctagcttatgttctccttgtcatctgaggtcaccgttgaggtgttctccttgtcatctgaggtcaccaatggggaaaanagggggaagatgcaaaaacccctctttactccttaaaaagatggtttaacttcttttgaaattaaactttttattgttgtgagtcttatgactgataagctaacaagtagacgatgagagtgtaagctataatgtttgtcttgtggtcttgtacgtgatatgtttgtacacattgggtaacagaagaataattaagttcaacttggagtacttcagacctcaaatgccacattgctagatcattacttcatgcccatcgaattcatgaacaatttgatggctcgatttggttgccgggatcgatttagatgttaggacttggtacccctagtgtaaatttgaacttagggccggagggagtacttgggtatcgtagcaaagcactataacagattagacctttctattctgaaacagacatgtagagtagagtagatgaggtagcacgtttctttccttcatttccgccaagtttgatcgtgccgtttctgttcatttcaatttttcaaggatctggtactatttgaggtaattaaggacccggtgatggcatcgttttcatccatggcaatgcttttgtggaggttggtaaccaaatcttgacagagaccttgcagttcaggctttgagagtcgaaagccatggcactggaacgcatcatcggggtaattagcaagcacgtcggtccatgatgatacgttccgacgaatcattgccgacagaaaggcacgctgaactccaaaccccaacaaactttctccatgcgaccatgcctactgcatcttatgttggtccatcaatggcatggcatggcagatggcacatctagctagtagttaaatcgtccgctcgcgcagttgcgccggcggatgatacaagaagcccacgcagcaatatgctgatctgtttgccactcacgcttgaatgaatactagtagtagcagtactagtagctttgctattactgtagatctgtgcgtacagccgcagcacggtggtagcaccatagtagtagcaccgtaccggcacgacggacgagcagtgaataagctcatttatgcatccgtggtgtacccatggtttccctgtaggccacagtactacgacctatacggacgcaacgcgaaacgggcaacgacaccacgtccgcggccgtcggttgacgtgaacagcggcacgatgcgtgagcggttgacgtgaacagcggctgcggctgcgcagccagcgaattgaagagaaaaaattcctccccaaccgcgcgtcccatgccgtaccccacccttcgctgcgcctgcgccgcgcacttcctgcccacctcaacatgccggcagattggcagtgtggcaccaaaccacgtcgcgcgcgcgcgcgctgctgctcccgatcgcgttcgcgttcgcgtttcggtttgaccgcgcgtctcgcctagatttccacgggtaaggtgaaggtaaacgccgcgcgcgccangcaccaaacacccagaagaacgtggtttctggccaaccgacgtcaaggaagaaagggctcatggccgcgcggcagcaccacccgcacattaacgcacgccacccaccgccacctactcgccactcttttactcggcgcgccttgtctctctctctcagtacgaggggagtagtagtcagtagtcacagcagtagaagtagagcgccggtgccgtcgccaccgcggcgggggtaatgcatgcgctcgcactcgcactgcgcctgctcctccagctgtcg

SEQ ID NO: 1977 - DNA, 2000 bp, Oryza sativa
aggagatgatggagtcacgtgccatcccatccgtttgggatgccacggccacttaggctgactcgtgcaacaagaacaccaccaataactaaataactactccatccgtttcgaaatgtttgacgccgttgactttttatcacatatttaaccattcgtcttattaaaaaaatttaaataattattagttcttttcctatcatttgattcattgttaaatatatttttatgtaggcatataattttacatatctcataaaaaaatttgaataagacgaacggttaaacatgtgctaaaaaagtcaatggtatcaaacatttcgaaacggagggagtataataagagcaagtttaatagtatagccaactattgatccaaattatctatagctaatctaatagtcaattcatacaatagttaactataaaaatatactacaccattaatactctgtcccacctctcatacacacataacatcttggagtccgtgttgcagctggctacaaatctgcagcccactttcttctctctcttctcttttcttctcgatacgtggttatagctgatttatagcttgctattgtacctgctctaactatagtattatatataccaatatcttcatcttaaaatataataactagtaaatgtttattttacgaatataatggctatatatcgcctctactctacgggcttgttcactttgttaccatttggaaccttaccaagttttggcattgccaaaatttagtaaggttgtcaaaattttgccaagatttcatatgtacttattaaaatttagcaacaaactaaatatagctaaaattttgacaactttatcaagaaaaaatggtatagttgaaaatgacatcaaaataaacaggcactactaatagagtactagaagaagtaagtgctaccgttttccttttttttcctcttcccttgtccgcgatttcttttgtctcccagtcaaccctcttcttttcataaaaaacaatttattccgattttcacattatcattaaaaaaagcaagttttaaattgggttagtggttataacctatatcttttcactcagccaaataaacttttgcatagaatatgtatgttcaatatatcatgggaagttttaattctagtattcaaacaacgaaaagaatataagtgggtaatcttttttgccgtatataaaagtttattttttaattgatttataaaatttggaaagaaaacattgaataagttagaaaaaaatctacttatttgtccactatattattattttatgaaaaatttactcgtaaatttacacagtacacgagttgtacttgaatcggagtaaagaagttgtagcattttcttggaagcatgtcgttgaagagcatgagcgctgctcaaccaaatctccattttctaaatcaaccaagccttgacctagcttgctaccaccattcgtgcacacacattctctctttctctctcagcaatggcaagggtggcaacctcaaaaccctagggcccaaaccctccagaagatctggaacatccagccagaaatccgacggcccaaatcactccggccgttgtacttaactgagccgcagcccagcttcctcctctcttcttcttcttctcgcctcttctcttctcttctcttcccccacactctctcactagcttagcttagctaaaaaaaagaagaataaataaactaaaatgggagcttgaatccctcccaaatccgcaccattacgcgcaatccgtacacctgctcgacccgcacatggacctttcttctccgattcgcccgctctgagcaaccgggatccgtttctgctgcccattttttgttctgtttttgtttttggtttcttgggggtggaaatcttggccatctttcttgcgactgtaatggcgggggttttagcttggtgagacactgtagatctcgtcgtcttttttgatttgggtttttcggatggtgacggag

SEQ ID NO: 1978 - DNA, 2000 bp, Oryza sativa
gaagtttggcgcagaccaggagggaaaggagatccacctggtgctcgaattctcaagttggttcggcattgccgtctggatggcagatcatggagcaattctgccttccaaaggtccaggttttttttcgcggaccgctttccacgtcctttttcgtttggtttcattatatgaggggattgggggggggttccaaacttttactcaagaacaagaggggttggtgagctgccccctccatgagttgtgttttgtggcaaaaaccatggcttgtgaaaaagccttggaattcattaacacgaaacatatgcctctgccagctttgatgccaggtagagtgagtataaaaaaaaggctaaagaaaaagggcctcagtgcctttcttagttgttctgtttttttccccctgtaaattttctaagttgtatgtaatgcttttggaatgtgggttgctcttgagtgcattgtgcatagcatcattgtctgatgagcattggctgtaacacgtacggttatggttttgcttatctgttccctttcttctctctcgtttcttcatatacaaaatgcaaaatacaaacacgaagtgctaattaattatggttatggaaagcaacaggtcttgcatgatttggtttagctgtcaaagaaatcatgagatggatggaccatttggtcaccaaaaaaatctgttgttgggtggacctgccagctctgcttctgccctaccatgttagtatcatccatcgttctttgcaattcctctgctagcttgacaagatcagctgctgctgcctcttgcattgaaagctagtagctgcttgattcttgacaagccactaagctagcctggacagtgtcgttgtaggctagatgtgtcggcacgctcgtacaggtttttttttctcgttgtggggcccacatgtaattgagagggttcgttctgatagataaggggcggacaggtttgcgagctgcgtcgcatctacccaactgatccgacagtgattgtttgctttggcgttaagcatgggttgattagagcaagccctgttagactgatacatgggccccgctgcttctccctgttcactgtgtagagtgtaggcgcaagcaacaaaggttccctagactgttttgggtgtcactggtttggcggttacagcacaaccgtgcgattaccgtgaagtataccgtaattttaaaaactgagaaggttactgtatgtaataaccgcgatagcaacatggttttgtaaaccttgcaagcagcacacgctatgctgtttaattagttaagcatctctagttaagttagatcaaatttcatcgtgaaagtgacaatttgaaatttaggcttttagctgccctatattggagtgcagtaatttacgttgtgttagttccacgctaaaattggaagtttgaagaaattagaacgatgtgatggaaaagttgaaagtttgtgtgtatgaaagttcgatgtgacgaaaaagttgaaagtttgaagaaaaaagttaaaatctaaactgggccttagagggaaatcattctttaggaccccttagcaacaaatgaaaactggagaaatattgtaggattggatacctatagataaaaaaaactatttggtcctttggaacaaaggaacgattcttccaaattcttttcaaattcctaatcaacgcaccatttcatatggatcttgaaggaaaacaagtataaggttcatcctcatcatcactgggagcacttcccttcctgtacatttggggcaaattttcaagcccaaacccccaaatccacgaatccactccgaattccgggattccgacgcatctgggctcatttcacggcccaaattcactaggtcggtgcggcctgcacggcccaagtagacaagtagtagcgcccatctgttcgcccattcccgaacccgtcgtctcgtcctccacacaaaccctccccaactccacgaatcccgccgccgccgccgccgcc

SEQ ID NO: 1979 - DNA, 2000 bp, Oryza sativa
  N_region (814)..(814): n = any nucleotide
  N_region (1622)..(1622): n = any nucleotide
  N_region (1706)..(1706): n = any nucleotide
agaaaggtgaaaggtggtggcgtggtgcgttctgagaaaggtggtgtgtgttctgtgcataaagcggatgcgcaaaagcgataaataaaatttggggcaattgcttatttgaccccgttttgaactctagctaccaatttgaccctactttttagggtttgcttatttgaccctccttttcaaaattgaagacacggtatgacgctattccgttaagggcgtctaatggtgttaactgaagcccaaaatgtctcgcccaaaatatctcttctgcccttacttatttgaccctattacatctgggaccctgccgtcagttctatcttctccaatcctttcttctctcttctcctctcctccaaggatccatcacagggagagacggacgacgagccggcgccggccctagtgatgacgatgaggagtggcggctgcgagttcttctcctctcctccacggatccaccacagggagaggcggcgaaagtcgagacggcgagccggcgccggccctggtgacgacgacaaggaggaggagtggcggcggcgagtccgggcggtggatctcgagctgcagtcggcggatccggcgctgccgctgccacctcctccctccatacgagcgcctgtgccggcgtcagccatgccatcggcccgctctgcctggcctggacaacgagctccccctcgctggcgggctggaagcggcaggggtggacttcctatgggtcgaaactccaccggcaccgccgcagatctgcgctcggcgcagccgccctccctctacaagttgacggcggcgcggatccccttcntccacggccggccgccgcggccggtgctccctccctccaccagcggcaccgccgtggatccgtgcttggcgtagccgccctctcgccgcgagttgacgccggcgtggatcccgtccctccacggccccctgccgccgccggtgctccccccctccatcagccggcgccgccgccgatccacaccggcgcagccgccctccctccgcgagttggcgccggcgcggatcccctccctccatggcccgccgccgccgccggtggtccctccctccaccagccggctctgccgcttaccttccccgccatagctccctcgccggagagaaaagggatatgatagagagagagagaccgggagagaaaagggttagatgaggatacagttggagggtattttagtcattatgaaatgtgattttattttttctctttttttaaatgaactcttaacggtgttgtagaaacagggtcagacggagtgttcattttcaaaaagtagggtcaaattggtagttaggcttcaaaacagggtcaaataagcaattgtcccataaaattttgatcagaaattgactgtacgtctacgtgccctcacacgaggtgaccactcgcaggatatgatagagagaccgggagagaaaagggttagatgaggatacagttggagggtattttagtcattatgaaatgtgattttattttttctctttttttaaatgaactcttaacggtgttgtagaaacagggtcagacggagtgttcattttcaaaaagtagggtcaaattggtagttaggcttcaaaacagngtcaaataagcaattgtcccataaaattttgatcagaaattgactgtacgtctacgtgccctcacacgaggtgaccactcgcangccagccccagcccacctgcaggttgctgcgtagcccaagccccgactcgtggcatcgcactacacacaccacccgtgaggactgaggagtctcggagaagattcctccgttccggttggccgcgcgccgtgcggccgtgcccaagccaaaccgccgcgtcaataatgcagctacggtcaagtctcctcctcttcctcatcccccctcgacaactagcccaccgccaccgccaccgccgccgagggcgatccgatatgcatttgctgctcccgtagaaggcgcgcgtcgcagca

SEQ ID NO: 1980 - DNA, 391 bp, Oryza sativa
  N_region (3)..(3): n = any nucleotide
  N_region (5)..(5): n = any nucleotide
  N_region (15)..(15): n = any nucleotide
  N_region (19)..(19): n = any nucleotide
  N_region (31)..(31): n = any nucleotide
  N_region (33)..(33): n = any nucleotide
  N_region (35)..(35): n = any nucleotide
  N_region (47)..(47): n = any nucleotide
  N_region (50)..(50): n = any nucleotide
  N_region (53)..(53): n = any nucleotide
  N_region (69)..(69): n = any nucleotide
  N_region (76)..(76): n = any nucleotide
  N_region (100)..(100): n = any nucleotide
aancntggggaaaanccgntaggcccaaatntntntcgggttggccntgntgngcccaatagcctggtnacctggngatattgcccccaaccccaagaangccaaaatccgcgcgggaaacagttcggcgcccgcgcgccaaacttgctccaaatcgaagtattattttctctcgcgatttctccgatttttttttctagcgataaattaattaatgctcctctcgccgcgccgggaaagcatttaaatctccccctcctccgcgcggttctcccaacccaaaccctaccacgattcctccccactcccaatccaatcgccgcggcggaggcggcgggcgcgcgtgcacaccaggtgttcgacggaaggcctcgccgggtggggggcgaag

SEQ ID NO: 1981 - DNA, 2000 bp, Oryza sativa
  N_region (759)..(759): n = any nucleotide
aagccttgcaacatgaaaaatataactatgaattacttttattttacgaattcctgtttgtatcctatgagtgtatgccaataaatagcaatactagctagagaatttgaaataatttatatgtactttcacaagaagtaattgcaaatgaaatatttattcacgggaaagagaaaaataccatgggtgaaatgtgactattgttggccataacatgataacaacgtgtatggaacatttattgccaccaataatttcaaattttcttcaaacgtaagaaacagtgaaaaccaaatctcaattgtttctacattttcaccacacacgcaaacaattattctgttccagttgcatcacacacaaaacaaatgctttccccatcctttcaaaacgaattttgttttaccccattcccaaattaaaaaccatcgaaacaaaagggaaagaaaaaaaaggtaacaaaacaacaaccaacgactagccgcaatccagccgttggcattcaaaaattgccgaagcgggacacaaaggcggccgacgtggaaacggacggcccagatcgcgcggatcccacgcgggccatctccccgccgtccatttcacacccccgcgccccctcgcgtccccgtcctttttgcagaaaccaccctggaaaaatcgccaaatagccatccactcctcttctcatcttcccctctcttccgaaattccgccgcgcgccgccgatgcgcgtcgcggccgccgccggcgaagcccccntcctcctatgcgcgccgccgccgccttcttccatcgacctccccgcaggcgcctccctccgttctcccacctccgcaaatcgcgccgtcatcgctcgggccgggcggcgtccgcagcagcagccgccgcggtggttgagttgagggcgtctggtaaggatttcgggccacccagatccaggcaggcagcggcagcagcagaagccgcggaagggacgcgctcccggcggacgaggcggcggcacggcagaggcgtctcgcgtccaggctcgcccgtcagcaaggcgattggtgatctggtatatatctctccatctctctgcttgattaattgttgctttgggatgttgcttcgttggtgattgggttgaagtgttgtgctgatttgagtttgaatatggaggaggtgctatgctatacgatataaaccgacttacgagcccagataattcgtatcactaagatctgtgttatatattttttgtctggtaaattccacagcgaaagtcagacgcttttagcaccaaataaacctgaaacccagacagaggaggtccatatttttagattatggataaaccaggagataattcacattttgcagaaaatacaatcctcaaatctaaaaggagaaaaaacattttactaccctaaaactattttatatattgcagaaagcttaaggtttactccccctaaatgtgaaattagctacttcagtagttcggacttcggagggtagaatgagctaataagtagatttgcagaatagtttacggaagcaaagaggagtttttccccatttgcaagttatccacttgactgcatatcaatcaaccatctacatatacatcagggtgaatgatgcattttttagttttcataaagatgtacaacgagggggtgtagacacattatcaccccaactctttttttagataaaatattatacaatccatctctataataaaacgaaaatgacatgaattctaccccaactcctttgaaatgagaattcatgttcttatgagggtagtcaatgtcctgtcctctatgcatccctgaatgcttctattgttacatcttgtgacaatatcttcattcgtccaattcttttgcagcttatgattgcttctcccttggagcaactccctgaaggcctcactgaggcttgacagtataatgatttttatatcccttggaggtttctactgcaaagtgaggattgattgtcttcactca

SEQ ID NO: 1982 - DNA, 2000 bp, Oryza sativa
  N_region (1121)..(1121): n = any nucleotide
gaattgctcatgttttaaatattgtttatcattacaccaatagaaattatacaccaataaaaattaattacatgcaacacattcaatcatcatattactgtttacacaaacaaacgaaattcttatagataataattattttgagaagacctacaaatcttatgagacgatcaaaatggatggggaagagtagtttgcgactcgggagcagtagtattttccatttataaagaagacttgaccggcagctgggagaggaaggaagaagacaatgcagatagagttggcacgaactccaacccccacaatgttccatcaacactcctgtctccactctccaccaccctcaaatccccaaaaccccatagtagggtccaaaacgcaaaaaaaccccatccaccccttaccacctgccctaaactgccaaatccccaaaacccagggtgcaacacgcaaaaccgcaacccccttcgcatttcgaaaaaagaaggccaccggccaccccaccaccacctccaccacgacgcacgcttcgagcgccgcttcgcctctccccgctccactctctctctctctccacagcgtttgtttttgctcgcgagaaaaaccctgcggaaaatcgaaaaatctcgcctcccctcttcgtcccctcccctcccctccccactcgccgccgaagcttccggtttttgttcctcctcctcgaaccctcgggagagatcgcgtggtgagcccgctcgaatcttttggtatatctttgttcccgttctttccatccatccctgcttttttcttggccgctttccgtgtaatgccggtgccatttccgcctctttggttttccccgatctgtggtttcggtcttgcccggtagagattcgggaacgggaagcgcggcggcggttgcgtgacggtttcttgagggttcttgagaggtcttggttcggttcgtgcttttatctttggtggggtgtgagtccgtgcgtgcgtggatgtttttcttttgcttttgcgaaagtgaaagtgtgcttgcgaaaagggggtaaagcgacgagcttgctgtgtgcgcgcatatgtagctgctggtttcttgcgaatggttggggtggggggattttttngctcgattcctggttttcttgccgggttcagatctgatcttttttctgctctctcttgtgtgttttttcgagttgtttgtggttgctcacctcttgtgcaccggcaatggcaggcttgagcagcgtttcttgctcggcggcggcggcggcggcggcggttgctagatctccggcgtgacaccggtcggaatgggctggatgtcgacggggacgacgttcgggcgttgatggcaggtgaatccctggacgaatgtttttgcatttggtttggtctccctctccagatgtagatggggggtatatatgttgtcttgagttttctattactatattggagcatggtcaatagggagaacatgcttgttcttgccgcctgcgctggaaatgttaatgcttctctgtcctttcgagattattattattctttaaagtcgcctactttgcagtgcaagaactcatttttcacctcttggtttagtgatttacttccctcagtggggaacggcaaccgtcctttgttactttgagctagtaaatgcgcgagatttacctggtttgtccatgattgctccaggtgtggtgttcccatgattgatgatgtggagatactgggatggttcgagatgaagaaaatgcttgtgaggtgctctgttgagagaaaccttattacctgatgacttgttaattcgaaggtgccaggttcttcctgttcattttgatatcgttcatcatttttgtttccgacaaccagccattttaaaacttgttcttatttatgatgttgcagttattctagcacaccagttgctgctggttggatctttttctttcattgctgagtaggagcgtaggagttggttggttcaagaatttcgttca

SEQ ID NO: 1983 - DNA, 2000 bp, Oryza sativa
  N_region (1238)..(1238): n = any nucleotide
aggcaacaaagcaggttgctgacaacttgaagttacagttagagaaggcggcatctgagagtgcagcttctgcaagaggtcacagtgatgcagggaaggtgtatccactccctgacaccgaacggaaatgcagttaccatactgggcagccggtcgagagcgcaaaaggaaatcagtccgcgctaaccacattgatcaagctgaatcaggcaaaggcattcctaaacatggatactgtcatgacgattaagaggcagatagaggaggagaaaggatcacttgaaaaaactcgtgagaggttacagttgaacagagcgaaggcttcatcacttgaagcagacttaaacaaaattgtttcacagttacaagcagcaagaggccccaaacctactcttgaaccttctgatatctggttgcagatgaaacagttaaattcagagaaagagaaacacaggaagattgctgatgactcgaagaatgagattggcgaattaaccgccacgattgagcacacaaagtccaggacgaagaccctacaattcaggattgtcatggctgaaaaattgaaggaagcctcaaggcgcggagaagctcttgctcttgcagagagaaagaacctgagcaatggggagcacgaggccagtaccgcatccgatgtcacactttctgtcgaagaacactcagtgctggtgcaaaaagcagaagaagcagatgccgcgtgtaggaagaaaatcgacgcggcaatgcaagagctggatcaagcaaaccggggcaaactggaactcttggaaagagtagaggaggcaatggctgcagttgagaccagcaggaaggctttggaggaagccctaaagagggaggaatccacgaacaaagcgaagctcgtagccgaagaatcactcagaaagctgaggtccgagcaaatcatccagaattggcggcccaccggcaacagctccgtcaaattcaagacctcagcagcgacgacggcggcggtggtggctcaccggagagccggctccgggatctacgacgtgaacgggctgagcctggtgacggcgacgcccaagagcacgaaggcgatgtccatcgggcagatcctgagcatgaagctggaccaccgggagctcgaggtcgccggcaagggcggcggcgccaagaagaaggtgtcgctggggcagatcctgagccagaagtacgacgccctgtcgccgctgaggatcgatcacggcggcgcntcgcgcaggcagttccaccccaggaggaggaagctggggttcgtcgtgtacgcgctgctcctcgccaagcacaggcacaggaagaagaggcagcccgccgccgccgccgccgccgactcctcctcttgcacccatggcagcttcagcaccaaggctgtgtattaattagcaacatttttttttcttctggatcaatgagtagtagctatgcagtgtaatagtacagacttatgaataatcagcatgtgtattagttagttctatgcacaaagttgaaattcagcagctactccaggttgtaagtatgtacaaacatctactgttcttgcggtttcgagagaaatttcaaccgcggcgatgaatgctctgttaaatttactggatttgggccgtagctttaatgtgggccgtgagacccagaaagcccatgcatgaaaatgtggagtccttttaggccctgtttgaattcctgaattgggccttaaattaggaattcaattggaggcccagtacaattcaatactcctttactacacggatcgcggtcacgtcacgtggtccatagtccagagtcccgagcgcgggaaagggcacctcttcccgccacaccgcgcgcctcttcccgccaagacgtgccctgttcctccccaaattctacccccaaatccgaacccgccgccacaatcccccgcccattcccggcttcccgctcctctctctctccctcccctccggtcgcgcgtcccgtctccggagcagcag

SEQ ID NO: 1984 - DNA, 2000 bp, Oryza sativa
  N_region (1382)..(1382): n = any nucleotide
ccgatctgttctgcgtccgctgacggcgtgaacgcgggcgagtttggtctacggctaggctgcagaattaaggtctgagcccaatccccggcctgctccactcatttcattggtgtatttgtttgataaattattagaaatgtctatataaaaatgatggactgaagttgaatgggacgtgtgtgtatatacattatatagcagtgcatgaaatttgattatgtcgagatacttgctgccggcggatgaagttcgatggttattatacttcatatttggttccttacagttattttgaaattagaacatttgtctcatttatttgcttgatcccatcttcttgcaggctacagccatccctgggtttttttaagtgctgcacttctatatatatatctaggtaaatttcaacccctcatgttcactttctcgagagaatccattttctttgctttaatttcaggtagtatataacctgttctgatgcttcttgtgagatttcatgtttgattgattttttttgaacatattagcaaatatacgtgtgtcactgccgtgttttgatatttgatttagtaaatatctcctataatttttcactgccatcactccaggaatattcaacttatgcttgtcatattaaaaaatatgaggaaaaacagtatattaggatcttgtaaaatagcatgttggaccctagtagaacctgggccctagtagaacctgggcgccgtgaaggccatggtcgcaaagctgatgatacgcaggagatgtaaaagttagcctattaagttgaacaaatcatattgttttacattgtttcagacaaacctgatctgaagttagcctattaatattttatctgaatttaactttaacattggttatccagcgactatcaagcatcacccttaaaagtgtcattgataagaatgaattatacctaaatctgaccaatttgtcacatagctgataatacacatgtgaagcgtactgcaccgataatagttacatggaatatgtagattctcattgcccctggttgctgacagtctaactccttaacattcatattcattctcatcttgaggttggtcatttctaactccttaacattcatattcattctcatcttgaggttggtcattttgtttgctctgtacctatgagatttccccttgcgctgtgaaacatatgccatgtcacttcacggcagcaagctgaggctttgttctaattgtaggttcaatatatcaagagggtggaacctaattgataagtgtgcaccagatcgtggtcagactaattcacggtaaggctgtgtctgtttctcaacccttgatatatagtgtatgattgtgttgtgttgggtgtatcctggnagaaaaacaaatgcatgtctgagattgtttcttcgagattattaaaatttagctgtcaattgagattgtaactatggtctatattacattaacgcatatatatgcttatattttttttcctttttaatttttttagatggttcgtccatacaacttaaatgaatatatttaattcattcattgtataatagaaatatagggcgtatagaccgtataaaataccaaccatgtgcaggaattataatgccgatatgtatacgcatacgcacgccactcaaagttttattgtgcctacgcaatatcatagtctcgtaaaattttattgtgcctacgcaatatcctagtgttgtactttacgttacatatatttgatgtgcgacatgaattgaataaaagttcaaatacacagatcatataaaaatattttttgctaacatgaaattttataaattatttaggacaaaaataaaattgcagcgtagcgtttagcacaggcatattactagtctccttaaatccatctcctttggctttcccctctaacaccgtctccctaatcccagagtctacctaccccacccctcttgttgccgccgcctctccatcctctcacgggcc

SEQ ID NO: 1985 - DNA, 2000 bp, Oryza sativa
  N_region (278)..(278): n = any nucleotide
  N_region (280)..(280): n = any nucleotide
  N_region (450)..(450): n = any nucleotide
  N_region (589)..(589): n = any nucleotide
  N_region (616)..(616): n = any nucleotide
  N_region (626)..(626): n = any nucleotide
  N_region (635)..(636): n = any nucleotide
  N_region (665)..(665): n = any nucleotide
  N_region (676)..(676): n = any nucleotide
  N_region (731)..(732): n = any nucleotide
  N_region (737)..(737): n = any nucleotide
tggtcggcgtgggcgcggtgtccctcgccgtcttcgccgacttcgcggtagcacttgacgtcgtagctcatacgcatatacgctgggtacagacggccgcatgtacatgcgtcttcgtacgagcatatatatgcatgcatggagacgaccagctatagcctagctagcttcttgttggtttgccgcccgataacatgcagacgtatatattagccaagcatgtgtatatggctgagcacactcacatgtatatatgccattacgtgcagcggaggagngnggatgcggggggtgcagcggaaggcgagcgcggcggaagagcggcggcgggcgagcgcggcggtgggcaaagcagcggaaggcgagctaggcgaagcggaagacagtggatgggacgaggagctcccccgtgctcggccgccaccaccgctgtgcccccgcgggtggccnacgatgctaggagaggcatcaccggcgggagaaggggaagaggcagaggaagagattgtttattggtcgccggccgcttccccttccctcccaaaatcgctggccgccgttccgcgcaaccgggttagcgctccgctanactgtccgcggcctgctcgcgctccantgctcggccngccgccgtnntcgaaccttccgttgcttcgttgccacgntcgccctccgntacgccgcgtagcctcgcccacggtgacgacgatgacggccacggcgcgtggtgnnaagantacagcctgaaggagaagaggagagagaaaagaaaagagaagaggagagaaggagaagaaaagaggaaaaaaaagatgtgcaactgacatgtgggctctacggtgtttttttaaaaaatttttgctgactaggatgccacatcagcaaaaccggacgaaaatactgccgagggacctccggtgaacgttttgagtgattttaggggtacacatttctgattttgtggttaagggacctcaaaaaatctcgctgttaagttgagggatctccggtgaacttattcccccaatttgtacagttttttttctccctaattatttgggcctgaagctgtgggcctttccgatcgagctgtaggcccggaaccttggcgagtggtgatgtgataacgtgtggtgggcacagtagccccccgaagaaacacagcgaagctcccatcaaccgacaaaagaacactgtaacttttactccaccgtgggagggggaggaggagcaggacaggcacgtgggtcccacgggctgattgaatttcgtggccccaggtatcaactgcgatcgggccctcacacccatgcagcagcagcaggaggcagcagcagcacagtcaaattaacaatggaccgctacgtcgacttcggtatagtactggatggctgctcgctatcaacggctctttttcaaacattctcccgagtatttttattttccggcgaatcctacattcctaccattagcacattagaatgtttttcaggtgaggaggtaggtactcaaactttgtttagatccagagatggataaccaaaatgctcctgaatattagcactactggagtatggagtactaactttctgtagagcctgatatgttacctgcaatggatttgttttttttttctttcctagaatttgaatgtttgaactttgagcatgagtgcgtgcaattggttgccgtgatctgagtttaaactcgaaagtgtgcctctttatccacccgttgcagcgttgcaggctctccaaacgatcaaccgatcaagtgccaaaagaagcacgggaaactaagctgcagtgaccacccacgtgccgtggcgaccgctctctgacccctcctctcccttcccgagcctcacacacacacacacccaccacaccaccccggccgcttccgccacttcactccactccacatcacgcggccgcactccactgaaacccaccgctcacccaacccccccgaaaaccccccaacccaagcgcccacca

SEQ ID NO: 1986 - DNA, 1068 bp, Oryza sativa
  N_region (47)..(47): n = any nucleotide
  N_region (50)..(50): n = any nucleotide
  N_region (52)..(52): n = any nucleotide
  N_region (68)..(68): n = any nucleotide
aaacccccgggggggggggggggctcggggcatgacgtcacccctcnggntnttccgcggcttcgccncggggcccttaacccggtcaccaacgtggcagagggagagagccaagaggggagcacaggctgaacagccataaatgtgcgatgccccaactgtccctcaccgcatttaatgcggtaagggcagacgtgcggcgtgccttacgaacccttgtccatcggatgtgaccggtctgtgaccggcccgtctccgtcacatccgatggatagggcaatcatgtcctcacgtcgcccttgtccccagtggagtgggggtgggtatgacccgtcacatccgagcgccgctcgaggaagggctgttgcgtgtcattgttcatttatgagggaatgacagggctatcccccgcgtcaggcaggggacggcgccgggttccactcgagaatcggttattgcttagcttcgggagaaggcccggtttaaagcccaaaaagtggagtggggttcccccccggtggagggtaggtagaggcggcacatgtggtatccccttaagctataaaaggaggaccctgcccattgagatagggggacgactcccagaaaacctgagctcgagaggagaaggagcaggtgcgctctctggggggaagaaacccttgtaaaactcatcaataatcccaaacacaggagtagggtgttacgctctatagcggcccaaacctgtataatcccactacgtgcaagcttgccggtaatcttagggacgagcgagtgatttccgagagtttccgagaggcgggcctccgcccccggccgaactcacgaaagggggggtctcacgacctcccgctatcggggggccatccctcgacagctggcgcaccaggtagggggcggttgcgcgttccgagaggaagttgttttcttccgtcccaagtttctccaggccttagccgaccatggtcaaggtcctggaagtagaggaggaggcggtggcatttacccccaccccgtccaggagtggggattccggcgagagccgaggtcctcgtcaccgtcgcc

SEQ ID NO: 1987 - DNA, 2000 bp, Oryza sativa
  N_region (1469)..(1469): n = any nucleotide
  N_region (1475)..(1475): n = any nucleotide
  N_region (1477)..(1477): n = any nucleotide
  N_region (1481)..(1483): n = any nucleotide
  N_region (1486)..(1486): n = any nucleotide
  N_region (1494)..(1494): n = any nucleotide
  N_region (1506)..(1506): n = any nucleotide
  N_region (1508)..(1510): n = any nucleotide
  N_region (1516)..(1516): n = any nucleotide
  N_region (1520)..(1520): n = any nucleotide
  N_region (1537)..(1537): n = any nucleotide
  N_region (1549)..(1549): n = any nucleotide
  N_region (1558)..(1558): n = any nucleotide
  N_region (1570)..(1571): n = any nucleotide
  N_region (1575)..(1575): n = any nucleotide
  N_region (1588)..(1588): n = any nucleotide
  N_region (1596)..(1596): n = any nucleotide
  N_region (1613)..(1613): n = any nucleotide
  N_region (1624)..(1624): n = any nucleotide
  N_region (1626)..(1626): n = any nucleotide
  N_region (1647)..(1647): n = any nucleotide
  N_region (1665)..(1665): n = any nucleotide
  N_region (1908)..(1908): n = any nucleotide
ggtacggtagttgaaaactataattacgtaattaagagttcgctaaaataaatcccatgttgtagaggtcaggataattatattgtattagaccattcccaacccaaaacactagacatagtttccataaactccacatcatcaagaaactagtactagacattactcttccaatgcaaacaccactattccatacttaaatttaatgctatttatatcacatgatgtcttggatgttgtgtagaaactatatctcatgcaagacatgatttccttctctttcctcatttatttacttgccacatcatttttcatcctaggtgacaacttatttaatgctatggacactatcctagtcattgggttgggaatggccttactccctccattccaaaatagcacaactactcttaacccaaaaaacaaaaaataattattatcatattatagtttgaatgatcctaataaatataatgcatatatccaatatgattagataacatgagagtgaaggatttaaaaataataataatttaatggagaagatgccatagttaattgtatacttgcatgcatgccttatattatggaacatctaagaaaattggttgtgctttatattatgcaatggagggagtgtcttaaaaaatatactccagtttgtaattctaacatattaccatgttaattggataaaaattatatatgttagatggtggtggattgaaattataatggttgatataattatattcgaaacacaaatagcatatgtggagattgaagctataagatgtatttcaaatagaatcctacttaaatctactgtatgcaaatgtatctttggaaaaagctacgaattacattaagaaaatgtattttctaatatacactttctctatcgtaaaatatagctatctatagcatttaaaaattatcataaaatataacaacttctataccaatcacaaccttcgacattcaaattctccacctagtccttcttaacccaaacatttcttttctcatttaattttatctacttttttaatcccttatatccaaacttaaaactttctatttagaatggaggtaattctgtatatagattaccaaaggtacaagagctaagaatcgtgcatcaaattcacttcggaaaattacataagaaaaacatttgctagtttgttctacataaatctcgagaattttcacaacggaacacgaagctaggagaatttcacattttataaaacttttataaaatgattaaaaaatattgaaaaataaattaaaaaaatctaaagtcaacttcaaattaaaaaattaaaattaaaattttggctaataaacatagcaaaagccgaaagatgagactgaaagctacccagatcaaacagttctatcgctatagaggatccgagcaaaaaacagggccggccggccggcagaagaacacaccacaccantaccantncccnnnccnaccccacncccccccccctngnnnctcttncccnacccagtgtactatacngccctgcccttnaccactttnacctccctcctnnagtnttctcctctggtntccccctntccctctcctttcggcnaccaggccacngngcttccctccccttggttccngtagcgttccgaataaangcccacctgcctttccttgaccattaccataaaaagagcttgctcccaccgcctctctctctatctccccgtcgctagctaccagcagcaacaagtacactccccccactcctcccccacacgccgcgtacaactagctaagcagaggagagggagagagagagaggtggggttttgatggaagtacaattctagctatgttcttgatcggggccatgatcgcggatctctagaaagttctanatcttccgtgcgtggtgggcgggtgggggtgttcttggtagggtaggtaagtgctgctgcaatggaggaaggaggtgggagtggcgtgggtg

SEQ ID NO: 1988 - DNA, 2000 bp, Oryza sativa
tgcacatgtgctgctgcgcaatgcagagttggccgtagagcaatgttgtgctgtactactagtctactggagtactactgcagactggactggccgtcgccattctactagcaaatatcacatttgtaacaacgatacactggagtatgcacagtggtgtaccgtgaaccagcatggacgtgcgaatgcacagtgtaacagcaagtgtgccccaggcagaggtagcaagcccgaaagtccaacactacactgcataaagttataggattctcccacacatgatgagtcgcacgcagctactactcctacagtagcagctagggacaatttcttcttcagctcaggctcagctgctgagccggtcgcgcctcccaacgcataggcatgctcccgccggccccgtctttcttgtccgccattacgccaaccggccgcagtaactcagcgtactactcgtactctactctactccctccattccaaaataaataaataaataaatagataaatctagggtgtgtttagttcacatcaaaattaaaagtttagcccttgtttagttccaaactttttcttcaaactttcaacttttctatcacatcaaaacttttctacacacacaaactttcaaattttctgtcacgtcgttccaatttcaaccaaacttctaattttgacgtgagctaaacatagcctagccctgtttagttctaaagtttttttttccaaactttcaactttccatgacatcagacctttcatacacacacaacttttcagtcacatcgttccaatttcaaccaaacttccaaacttcagcgtgaactaaacatagcccaaggcaaagttggaagtttgtatgtgtacggaagttttgatgtgatgaaaaagtggatgtttgaagaaaaattttgaaactaaactcgggcctagcactgaatgtgacagattctaatacaataaatctggacagagctatatctaaatatatcacatctagtactaaattgattttttatgagaaggagagagtactccttttctttccctgcttttacgcgctgcagcattgctccctactgcatgctccctaccctcttcgttaaaaaaaaaaaaatcaaattctggccgtaaacctgaaccacgctatacgtatttaccatgttttggctccctatgagttaacggttagcatgtaatatatattggttttaaaaagtaagaaagttatcttacgtgatgttgcgataaacgcacggttttataaatcttgtatatgattttgtagtataactcatgtataactagatatatataattatagataatcgaaaaataacatgttcatatgtttataatcgttaaaagtcataacgtgagtcagactcaaacagttagtagaccgtatgcataatatttttctttttggaccgagggttactcccaaccggaaaacagatccctgactttgcagtttgtagttgtaccatgtgggggccacatatcagtgacacaactatatgtcggtggtctaactacaaactgcacaaaggctaagtttagatccaaacttcagtctttttccatcacatcaaattgtcatacacatataacttttcagtcacatcatctctaatttcaaccaaaatttaagctttacgctgagctgaacaaagccaaagtcaggaccatcattctcccaacccagacgagccaccatgctagctgctgctgctgctagtgttgcccagtgaccttgcagctcgccatgctagctccgctgctcgctgctgctgcttttgcccaaagctgcacaacctgcattgcctctcgcctgaccctcttgcctcatctgtgtctccccccttctctttttcttcaacccctctttatgctcgtttctccattgcagctcacctccatctcctattctcctcctccttgttgaaggagttcgtgtgcctctaccaagaacaagaagaagcctcttgcatcggcag

SEQ ID NO: 1989 - DNA, 2000 bp, Oryza sativa
tcccatgcatatctggatcattcttctgagcctcgcggatttgatcgagcaaggtaggcttggcttctagagtagccaagaatccatggctaacgatgcttaggttcagggcttccatctgttgattaagttccggtggaatgccacggacgccaagagtgttgcaacagctttttcgactcagcacgtctgcgaccacgttggccttaccagggtgatagtggattcccacatcataatccttgatgagctctaaccatcttctctgccgaagattcagatccgactgagtgaagatgtatttcaaactcttatgatcagtatatatttcacagcgattctcaatgagatagtgccgccagatctttagagcatgaaccacagcggctaactccaaatcatgggtagggtagttgccttcatgaggccgaagctggcgggaggcataggctaccacgtggccttcctgcgtgagcacgcaccccaatccttggcgcgaagcgtcacagtacactaggaagtccttgcgagtatccggtaagattaacactggcgaggaaaccagcttttctttgagagtttggaatgtcttctcgcattgcggtgtccacacaaatttttcctccttcttcagcaactgtgtcatgggttgagcgattttggagaagttctcgatgaatcttcggtagtatcctgccaaacccaaaaatctgcggacttgagtgactgtcttgggttgcttccagtcagtgacggcggtcactatttcagggtccacagcaactcctttagcggatatcacgtgccctaagaatttgacttcggacaaccagaactcacacttgctaagcttggcatacaattgatgttcccgcaactttcccaacaccagacggagatgctgctgatggtctttctctgattgtgagtataccaggatgtcgtcaatgaaaaccacaacaaacttatccaagtattccatgaacacttggctgatcccctcctcctgagatagatttcagtggttggttctggctctcccagagctccaattgaacaaggaggcatttgcttgcacacacatgcacccagttgcatcagactcgcatgaccaggaggcagaggaagccagaacaaggctcatgctcatcatgcacgcagaagccatttctctcatgctttcagctgccaagcttcacccagcacggcttgcggttcgctcctcccgtgcgtgcacagctcaagtgaaaccgcctcatcacttccatgtgatcatcctcctcctcagctcccagaatcctaggggcataaataatctagccgtggcatctccattcgatcaccctcatcgatcgatccgcccgatttggtctggccagctttcgtcttctgatagatggttgcttttatacacctgaaactaaggcaattaaagcttaagtgtaagtacaatgcccctctttgttttcctacattttagcatctgtttatgaccatgatgatgatgcattgctgcttttaaggttaaggtgcacatcgaaaagatttgctacttgcttgtagacaagaatcgcataaaatgtaacaatggtttcagaaaggaaatgctcatactaacgaaagtttcatgacacaatatttcagatctttcaaggaggaataagaatcaacctgtcaagtaaaaagttttaatatttgtatgatcagaaagggcatacaccaacctaaatttgctgtgtaagaaagtagctagctgtgccaaatcattgtcacctcagtcagatctgccacaagcacgtacacatatatgtgaaaccgactagctttcttgcagctggaaaaactccaacgtacaacagtaaatgatataatctcaatatctagatataaaatatcctttttggaaacttctacaacgataatatatatcggtttgtcctaaaaactctttttttgttccaacaggtaagacttacaagtagcagaatagtttctacaat

SEQ ID NO: 1990 - DNA, 2000 bp, Oryza sativa
aaaattcgcgaggaaggggcgcgttcatatatagttgtggaggcggggagttgcacgtcgcgtgtgggatgtttgtgtcactgacaggtggggttcatgtaatgtgggggcagggtgtcagtggctgggttgggtgaggaggtggggggattgaggagacgtggggtttggacggcggtgaagggctaatccaacggctgggatggggtcgggttggctggctctgactgagtctgtgggccctttgccagaggcgtgatgagttgggaagtgtttgaaagggtgactttttggggaagaataaaatgaggaggaattcgaatggaaaaatggggaaaggagaaatgtagggacaacttcttcaatatacagttttacacgcctgttgatatataagttaattgtttcattacttgttcagaaggattgatggttttacacgcgtccatataattgaactcctgacttatgacttaaaaaatattttcaaaattttaaatgtatagaaatccaacatatatttattcacgtttaatatttatatttctcttctataatatactcctggagtatgtgttttggtttctggactgtttttttagttaaattatgttttgtggttgataaaaacgattgcaatatgtcccgtgtgatttaatgaagtattaccaacaaaattgttgagaatgaaacgagagggagagagatgagtaattctcattgatcaaatgtttagtttatacatagggaaatggtttcaatcagaggacgtgatggttgggtgtgaggagtgtctgagagaccgaggatgtgcgactaaggccttgatcccaaaaattttggcaaaaaacatcacatcaaatatttagatatatgtatagggcattaaatatggggaaaaaaatcaattgcacagtttacatataaaatgcgagacgaatcttttgaacctaattacgccatgatttgacaatgtgatgttacagtaaacatttactaatgacggattaattcaggggtggatctcaaaaaaatagtagtgggggctgaataaactacatcaacataaattgaaccttcagtccacacatcctatgaatatatggaaaaaaattagtgggggctttggggggtctctgtcccggggcggtactagggtctcaagacccccattgtgaatacgcccctgagttaattaggtttaataaatttgtctcgtagtttacatgcggaatctataatttattttgttactagtctacgttaaatattttaaatgtgcgtatgtatattttaaaaattttacactcaaacacaccctaaaccgctgtggttccttgcggtagagtagaagggtgaggtgcctattcactgggtcaatcccatctaatgatatggatgaaaccatccaaaaaatcgtaacacttcctttgactgaatccaacatttgatcattactcacttattattcacttattattgttctacatacatgttaagagaatcttagaaataatatttaatatttatatttttcttatatacaagtcatgatatactttcggagtatgtgttatggcttccggaccaattttaagttcaattttaaggtaggagtattagcaacaaaacaactccattcctttagcgacagacaattcaaaagccaagttctcaaaaaaaaaaatcaaaagcgtgtaaaccgtttttaccatgaaaatatctccgatgatgcaagactcgcaggcgggcccgatggcgagccgaatgcctctccaaaagggttacgtgggacccattcgtcggtcgaaaaattcagacggcctaacattactatgggcccgtacgtcatccaccgagcgctacccgccaaatgttagccataaaccctgagccgttcacgtttcccatcccattctcatcatcctcaccctcccccgcgccgaccccccgccgctgccgccgccgccgctaaaaccctaaaacctccaaccttaccc

SEQ ID NO: 1991 - DNA, 2000 bp, Oryza sativa
aaacatcatatcgaatctttggacacatgcatggagcattaaatatagattaaaaaactaattgtacagttaaggggaaatcacgagagggatcttttgagcctaattagtccatgattagccataagtgctatagtaaccccacatatgctaatgacggattaattagtcttaaaagattcatctcgcgattttcaggcgagttataaaaatatttttttcattcatgtctgaaaaccctttccaatagccagtcaaacatccgatgtgacacccaaaaatttttcttttcgcgaagtaaacaggccttaggcaaggcctggtttagttcccaactttttctttaaacttccaacttttccatcacatcaaaactttcctacacacataaacttctaacttttccgtcacatcgggtttgtttggtttagtgccctaccaaagtattgatagcgccaaaatttaggcatgttttggcactaccaatattttggtagggtagtatttaaagtgaatgagtttggattatactaattgaaagccaaattttatattatagttaagaaagttttagaattatgccaaattaactatgggcattaccatttacttgcctccaaaccaaaccattaaattcactatttaagctaccaaaaaattggtagggcacattttagcatcaatccaaaatgacccatcgttttaatttcaattaaacttccaattttagcgtgaactaaacatacccttaagagcaagtttaatagtatagcccactactagctccaattcatctatagccagtctaatagccaattcatacaatagatgcttactatactattaatatatggtcttacctgtcatacacacactgtgtcttggagtctgtgctgcagctggctacagatctgtagcccgctgctcttctctctcatcttttatctcattaaaatatgtttgtagctggctaatagtctgctattgtacttgctctaagcacaattgaaaaatcttggaagtagggaacggcttcttctccctcaccacaaaatgaacattgaacaaaccaagaaaaaaaataatgaaatgacccatttgccctgcattccaaagcactcacattcattgccttttgagcttgacccacaccactctgagggccctttgaatagcagggtagaaaaaacggagaaatagcaaaaacataggattctgacagggattgaagtgtaaaacagaggattgcaaaacacaggaaaaacataggaattgtcgtttgattggagcgcaggaaaaacgcaggaatcggatgaaagagatagacttaaaggaaattttccaagaggttggagctcttgctaaatttcctccaaaatccacatgtaatgtgccattccataggaatttcataggatttaaaagctttaatcctttgaatcaaagggctaaataggaaaatttcctatagaatttgaatcctataaaatttctgcattaaggccccctttgaatcacaggaatgaaaaaacgggagaatgggaaaaacataggattctgataggaatacaagtgtaaaacagaggattgcaaaacacaggaaaaacataggaatgaccgtttgattgagccgcaggaaaaacacaggaatttgaggagaaacacaggaatttgaggagagagaaagactcgaaggattcttaacatgaggtagaacctcatgttaaatttccttcaaaatttgtatgggaagaggtattccataggaattttataggatttcataggattcattcctttgattcaaagggctatataggaaaaattcctataggaattaaatcctttaaaatttctatgaatttcctttaaatcaaatggggcctaaaagggggccatgaatctttcactccactctgctcaaatatagcactccactccctggtcagtgctacttcactctcccacttcgaggctacaagcttttcttgcttgctgca

SEQ ID NO: 1992 - DNA, 2000 bp, Oryza sativa
  N_region (736)..(736): n = any nucleotide
gagacctgcgattgggggtcgtacagagattgatgctatgttgtgcgtataaatccagtaaaaagttactagttgactcttttcaaccatttttctgtataatttatatgatttgaatggcatcgattcattcatctgttgttcttattacgcatgtcacctagtaatgaatgtgatctcagtttcttgaattcaatgtttattttttcggcttgtttagagcagatagatttatttgttcttggattaaaaaatggaaaagaaaagagcaagcaattcagtattcgtatcacgtatatgggtttatatgtatgttgagacttaggaatctctgaacctgaagtgcaaatgagcaatatatgtttgatcaagattttctcttccgccgtagaccatttaatcaattgttgtcccaataaagttggcagataatagggtggtgacacttttcatcactcgtcacctcgtgatgcgtctatctaggtgtaagcactgatcaatgcatgtgttgtggatccccggccttcaataatatagaactggccggtcctgtttatcacttctttggtggatagacatcgacaagaacatttttttggttgcaagcttgtgacatcttgcttgaagcacagagttttgatcgatgtggggcagaatttgtgttgcccattcttcttgtctggagggagttatcctgttgcctgacctacatatcagcaacaggcctgtagttgcngtgtcttttgcagttggacgtgtgatatgtgatagataaccaagtgccagccaattttattgtgcaaataagtttttgacgattttgtagttgcaagatttgaccaactttgactcctccagtttttggagtatgcaaatacaaaccttatattttcttatctatattgacttgagaagactgggttatagaagcacatgatttgtttgttacggatgctgtgttatttttacactccttatgtaaaatgtatttttttttcagaaaatagtcgtacagtacactggcaatttactttactataaatctattattggtcagtttgaaagacgtttcttatatattattcaatttctaatatagtgatattctcgaagtagtatgttctttctatttctaaaagaagaaacatcactatcgttcgctagtacatgttattatgggctttccgacagtgaaactgataagatcatggatgatatgatacttttgcctcctccatagctgtcaatggtctggtccctgcgtttctgcatctgatttgtctaattttgcatattggacatcttcattagtaagttatatgttggccttctttgatagaatttagcattctattttacaaagtgtgcaagacctactcttctgttgtcttagaccattggataattttgttttcccctttgtatgagcaagtcgcttaatgggagctgaatataagaacattgttttattagcagtttacatttctggctttcaagtttcaagatcatttactactgactattgccctttctgtactctctttgttttttaatatatgacaccgtttattttttttagatacgtttgttcattcgtcttatttaaataatttatttaattatcatttattttaatgtgacttgatttatcatcaaatgttatttaagtatgactcaaatatttttatatttgcacaacacttttgaataacacgaatagtcaaatgtttgtcaaaaaaatcaacgacgtcatatattaaaaaaggaggtagtactagattacattttccatgaatgttgagatgaatcaatgattaacttgaaattttgggtcactgaagtctgctttaagtttgtactacagataatgttcctgctgtttctttcttattctcaagtgtattactagtgtatgtgcatttttctcattttctcacttgttcttggaaatgcagtcaggtcttcacccttgagggaattgttttcattatcttatcaaa

SEQ ID NO: 1993 - DNA, 2000 bp, Oryza sativa
  N_region (1775)..(1775): n = any nucleotide
  N_region (1778)..(1778): n = any nucleotide
  N_region (1911)..(1911): n = any nucleotide
gatgactggtccaactttattggtaaagttaattgtgtcaaaataattatgagatggagggagtattatgcatcaaaatttatttaaattcgtggagcatcaagtattggtgaccaaactatataagattcgatatgtatggttaacaatttaatattgtactcgcttcgttttaagttacaggatgtattttgttttttaaagtcttgaccaacagttacttcattaaatgtatccttttgaaaaaaaatgataccactcgattcgtattcaaaaatacttttttataattatatttttcgtgttatataaatattacttgttggccaaagtcctacatcctatattttaaaaccaagggagcagtaaacatcgttggtgaaatctagaataatgatccatagttacaacgccagcaacaaacacggtataaaacagtaatcatcgatcctgcaggttttgtttgatcctttgcacgttataaatttcacataaccatggtttgaacttggaaatgttttagaatttcgagtgtaacatttggagctaaaaatgagttcacaattaatagacgtatattaagggtttaaatgagttcacaataaaggagggtaactcatctgggtttaaaattcgttgtccacgtatattaagtacacaataaggacgttttcagtgggatttattgatggtattgggagttgctgctggtctctactccctccttccaaaaatataaggcctattcctttttcatcaaaacatcaaaaccaaaaagcaattaactcactcaccatatagcaaaaccaatgaacatgtaaccaataagtattagaatggcttcttggttttcaatcaacaatttaatttagcacacaggactcatattttttgagaaatcgaagaatgaaatatgtctcatatttttttttgaaggagggagtatttattttcttctttttttttttgagaaactgcgtacttcatccatcccataaaaaaccaatctaatactagatatgacacatcctaatacaatgaatctggacatacatctgtccagattcgttgtactaggatatgtcacatccagtcccagatttatttatttttggacggagggagtaagtagtaactctatttaagtcacatttgtacaatcgtcctcttgagaagatagaataaaacccttaggaacaaataccctgtaaaacagctagagaaacaacttcttttacgagcctatgtgctaccatattcgtcgagcaatgaactctgaaagacgtttaatctggacttaaactaacttcatgattctataaatagaacggtttagttctgactaaaataccgtcctagtcatttccatagcatcattattcaattagaacggtctccatttcttttaatgtgggttagaaacgtattagtgtgcgtatgttcacaaatgcttcattcattataaaaacttctgctagtagaagcaccagtgatgcgtggtagagttgtgggtgtataattttacccaccataatttaaattctggtgcccacgaatattacgtatatgcaaatgaactttcgaacatgattttagtgagatcagtgatgtgtcgctagtttccgtctcttagagcatgtgttaggggacatattagtggggtgttacgtgtgtagtggtgtgtgcgtgtgtgtaaaaagaaaacttccgctatataagtaggagtatgaaacatgtggagtagattcggatgaaactgactttttttttttttngcngtgatgataatttgactgtcactgtcagtcgttggctagacgttaatactcctacttccgatagattataaaaccaaacccctgcagcttcgcctttgctcgccgcgtcttcccttcttctctctctctcggncttaactaaacccgaatcttttctcttaatcccgggcgcagtgcacgaatctcaaagcggccccggctccttccccttcaccggcggcg

SEQ ID NO: 1994 - DNA, 2000 bp, Oryza sativa
cgctgagcccctccgtttcatactatactgctcacgatgagatacagtaaccgcgcgctttgctatagctgcatgttctgctttcgaattcgctgtgcacgacggcgatctctcatctcccgcggctcatcccgcgaggagaaaaaaaagaaggcgaggataaccctgtgacgcatgcgggcaaacatggccacacgtagaaacagtctcgttacttcgttcaccggtgatttttcatttttcatgctttggctgcctcacaggtcgtattctgctcactgttgcatggttaatgtcgaagcaaacggggaggtttgcttttttgtcgagcagtcgttgtcgccccttgccgtcggaagcatggctaattaagccaagatgacagccgtagctagctccgctttgtccctgagtgtttcggaagcattcgctgtccggccacagatacacacacttgaatttgctcatattggttaaaagctggaacgctttttgcaagggtttcaaaaatggaagggaagaagacctccgttgttaccgatccaaataccgtctactagtttattgccggctagaagctagaaacgtgtaacaagtccatctcacagctgtgtaagtgtaggttaggctttggcttttgatccattgatggcgttgaaggttggcaagagaacgttgaaattttaacgagaggcttctaacggtagttgcaacggcccacgtattgttgacattttcgcatttcaacgtctcgagctacaggaacgatagcgtaaactacacttattgagtggtatagacataatcgcacagtgacacacaaacatcacgcacgcaaaatcacggcatattgttccgcagctaggcgctgcaaagacagcaacaatactatactacacagcttcgttaacacgatctttgacggtctctgaaacagtgacagggacagttcagaaggttgaatcctaaacacatcggttttcggagctcaggcaagtctctagcaaaaaaggaaccaaacagaagatgcctagagggaaagcgtatgtgccgcagtgattttcttgttaaatcacactgctaatatggcttgatgttcttaaccgtttaagattagagcctcattatttggcttatgatttatatgccaatattaatatttgaattctaaaacttgattttaaagttgatttaatattatttaaaatgtaatttttatattaacttttaagtcgataaaaacacatatacaaaattttaattataattattttttaactattaatgtgccattatggcttataataagaagtaagcaacaaataagaacatagattattaacccaattattagcacgattatataataaaataaattaacaaatagcctggaataataataatcttaaaaatacagtagaaaaaatgtagtaatgttttgtgagagaacttatttttagatacttgaccaaaataatccagcaaaaaaaccgggcagactgtgagagattagagataagacggcgccacggcggacgccctttccgtcctttttctctcgcgcacacgccgttagacaaccggagcggcgaccagcgcagtcaaacccccccctagccgtccttccccacaccggctcaccgcaccgccgcgaaagcccaaaaacgcaccggagaacccacccaaaaaaaccgtaagggccccaccggtcagcgacaaatctcgcacacgccacggcgccacgtgggaatgttcccccaccctcgtcctcgtcggcccaaggctaaaagctaccgccggctacgcgtccccagcgcctccctcccgtccctttaccgttaccattaccaaactcgtcacagttttaccgctcctctactcatctcctctctctcttctacctcacttcaccaattccttctcctcccatctcccaatcccccaccgcggcgcccaatgcagcacaaaccctagccctccctccccttgatctcgcgcga

SEQ ID NO: 1995 - DNA, 2000 bp, Oryza sativa
gagatgatgtatttattagtggcccactttaagataccatgggttgtagagtgtagtttatattatgatgtcttattgagatgacatcatagacactacttatagacactataggttgggactgctcttaaagctgcgtttcttggagttttggtttagatttttagcagcacggggaactagaaggttattagtaccatattgttgtttgactattaattattattataaaattaaaaatggattatttagctaaattattttacaattctgtatcgatttttttctttacaaaatatactttgcgcagttcaagaagcttactaacacaaaatgagaaaatagcctagctagccaagaagtcgttttgggggtgtttgattttagccacactttatcataccacacttttggctaccgtagacatatgtttagttcaccaccacaaatgactcgccacacttttcaatagcatgttctttatgtcatagactcaactttcttatcaactttatacacttttatgactagcaatttattcaccacaattttatgtcagtcacaacttacaacttacgtaattgtggcaaaaaaatatggttggtagtcaaacgtacccttagaacgataagacaatcatcctaatataacgggaatataaactataaattgattgcttgtactatgagaaaccacaacaaaaaatacatatatgttacctttttaggcatgttaaatttgtagtccagaattaactttactaaaatattgacatttttttaagtactccacgtgttcgatttgtagcataatcaattttttgtagggcttttacgagagaaaacattggaaagtcccaaatcctgctaggatagcaatgataagtgtatttttggttcattactttactgaaaattgataatactataattaaattttggtaaagttgaaaatagcaaccaattgctatttacacatgtaattacatgctatttacattgcaattatactctaactatatcattgttacatttgaaatatttttgagggaaatttctatcggatgttggataggtagtagtcccattaaacaagcccattggatcttttaccgcattcccagatccacgaacccggaaggaagctatcccagatctagtattccgaaagcgaccaccgaatttgttttccctttaaaaccccccaatgaatttcctaatcccccttttcgctttatttattctcttccaaccaacaaaaatactcggcgaaatattttccgcggcgccgcgcgtaccgttcgtccgtcgtcggtggagtggaggctgccgaactgtaaagctcacgggttgggcgaatctccactcctcactcgccccccactgaaatcgccaaaaacccaactgaaaaacccccccaccggaatcctcacgcacacacctcgccgcggaagctgtggcgtccgcgtaggagcagctgtttcttttttggatccaatccaatcggtgagagcaattctctctctctctcttgcttgcttatagcgtcctggttaaaaggatgggggggttcttgatgttctttggcaagatccggtgaggccgctgctttgcttctgtgaggcattcgtggtggcattttctgtccgggctttgggttgatctgtttcgctggtgagaagcgcttttaactttgccttaggattttgctgggagagcttttcttctgcttgattctttgctgccagcagttaaatccaaatctttctttcttttgctgcgttatatagatagagtatatagtatgctggtaaatatggcagttcatgctcaaagttttccccattgtccactttggggtcagctactaggtctaaatcgccttggatttagctgaattgtttgtatagatttgcattgcattcaccctcatggttagtaaaaagagtgaaaagaaaaaaactgatttcttgactgtacaattcctcaggataagcagcc

SEQ ID NO: 1996 - DNA, 2000 bp, Oryza sativa
  N_region (1071)..(1071): n = any nucleotide
ttgaagatcgccatctatctacaattgttggcaaagacagatcctcttgtgctgcaacgtggagttaccaaggcagttgcattgaattttgatttgccagttagagctgtgcagcaagtatgacgcagtggacaggattatggtgggatagaaggtgtgataaacaagttgctcacaagttgtggttgcaaaagagtacaaatagatatggaatctatcagagacgtgcctttgagagatcgcacaaccattcaggatcttgccaatgcgctcggtgtgaagtagtccacacttcataggcattttaaggaaggccagtttcgttgcctacacgcattaattccatacatgcatgcatgcgttacgaggaggcgtcagcgagattaccaatggcactagctctatgtgatgattaatatggcatttttggtttttgctagtgggatgatcaatttgggaaggagggagtatttctttagttagcaattattaatcattaattcaggattaggcagcaagctcgctgcgcaaccccacgagctcgtgcgttgccacgagtttgcttctttgatatgcggcagtagtatattttttccagtatattttcaaatatcactttgtgtcttttgtccacggcaaaacgaggttactagagcacacataaaaatggaagataggtgaattttaatactcttatctggtacattagtgagcacacttggtttatgagcttaatggttatgaactcaccagattcaaatgtcgccttctttagcgtgttaggggaaatgcatcttgcccctctctaataatgtattttgtattatctagttataataaaacctcacagggcatattcttttaaatatgttatttctttcacaatggctcgtacaatgtaagttattgcataatgcaaatattccattttaaaaatagttttggttgcctttggtgattggagtagctagttttatttctttctaaagtttcgaaagtacttacaattagcatctccatgaaatgccacaaagcactcaaatacttccttcaatcataaatatttgatanttatgacaagatttggttttaaaactcttttaatcaatcttatattagaataagtttacaatatcatgggatggtattttccaaggcaagactagtatttgtgcatacattttcatttgagaaataattgattatcaaagttttaaaagtctgaacaaatcttaccccaaaacatcaaatatctaggacaagattttgtcggacctctaacacttcaaccatcaataatatcttgaatgtgtgggttagagaaaaaatacggtatacccatatttaccttgaaaagcactattaaaatatcatagattttataaacttaatataatataaaaatgttgatcaaagttttaaattttaaccaaatgttgtcataacatttataaccaaagtgagtagtttattacaaatctaccaaaacgattggtcgaatatattcgaagtactgaaatcactacaataaatactaaaaagatttatacaagataactaagtaatggatagaagcaacttttttattttgcttaacttgcaagggaaacactgaaacatccataattacaacaattgcaaatttgccacttgtttaaatcgttattgtaaaactaccactagaaatatgtaaaattaccactagaacgatcattcgatggtatccttacaaaattaaaaaaaacagtagcaaatttacaaatgtcaataaataattctccacttgaatatttgaataggaaacataaataattttgcttgaataatatttgaagggagagagaggctgaagccctaaattcccctcctccgccgaccaaaagccctaaaccctaaccccagccaacgcgtcttcctgcccatccccggcggcggcggcggcgtcagcggcggaggtcggcgactagtaccagcgaggaggaggagaagaaggcaaccgg

SEQ ID NO: 1997 - DNA, 2000 bp, Oryza sativa
  N_region (7)..(7): n = any nucleotide
  N_region (1411)..(1411): n = any nucleotide
  N_region (1431)..(1431): n = any nucleotide
tgtagantgaggagagatcgagagtgtctcggctttcatcaagcggtatattcatcatcatttcgtccatcttctagctgacttatactccatccgttttgaaatatttgacaccattgacttgttagcacatgtttgtccgttcgtcttattcaaaaacttttgtgaaatatgaaaaattatatgcctacatagaaatatatttaacaataaatcaaatgataggaaaagaattaataattacttaaattttttaataagacgaacggtcaaatatgtgctaaaaaatcaacggtgtcaaatatttcgaaacggagggagtatacgctaatagaagcactagagtgtataagtggaggcattagtagctcaagtggtatcgtcttaataatagaaaaacagagtagtcgtttgtttttaagttgtttttttttcttaaattcctcctgatctcgttcggaacttggaaatatcacttcacaagtgacagtttgatttcctcttgtgtttatgcattattttgtgaccgactaagggcgttttcaatattctcattttctaacttatactttctaatttttcaacttatactttctctttttttcacgtgtatattttctaaaccactaaacagattttctttaaagtttatgcagaaaagtttcttaaaaaattatattaatctaatttttggctaataactaaataatcttcgctaattaatcactttgttttacgagtgataaaatggttttcaaccctcgacaccaaacacagcctaacatgtgctactagtacgtgaaaaaaatatgaattttcagaattcccagaacacacgtttgttgtctcgagaaatgaataattaataaatacatgggacaaaaatataatcatgctagcaactaaataaaaaagaggaaataaaaacaaattcaaccccagagagagagagggagaggaaaaatggggtgcccatgcggccctgcccaatagcgttgctgtacctttcagctttataatctcgcccctcgcgagagagactccccccatcctgcagactcgccccactctcttgctcagctcctcttcatccagtcctcaaaactctctctgatctctctctcttgctgaaaattctccgcacactccggtgggcttaagcggtggcggcgtctcgcctgggtgggcgagatccctctcttgctcgtccgcaaggtcgctccccctgcgagtccaatctactgacgagctgggaggagcaaaggagggggcaattggagctccgctcggttccaattcagccccaattttgagcccccggctgcggggttcggccaggttagctcctgttcttgcggaattctggctctttttttttttggggttgaaaggggatgatctgggtggggtngggaatggtggaattctggnttttttttttttgttctttctttggctggttttgttccgtggggattgaattctcggttctcgtcacctcaggagtggtgttcgcgctgcttgttttggttgatctgtgaattatgggggaagacaccaccttttctctcgtttcttgcacttaaaaatcgtctttggtgagctgttgtgcttggggagctcttgagctgagcaggttcggtttaatctttgattgggttctatacttcactgtttcggtgttcccctctgccgaatttgggaatcaagaggttctgatccatcagtatcactcggctttctcgtcattgcatatgtacaaaacctgcttttttcaatcactcatgtagtcatgtctaattggtttgtcttttatcatcttttggtgtaacttgtctgtgtcactaaccatgccataatttttttttcatgggtactatgtgatcgatttcttcttcttcttcttcttcttcttttttaaatttttacctgtcataattcaagtagtagcagtagtaatctaatctaaagcttccaaattttccggtgtagttgagacg

SEQ ID NO: 1998 - DNA, 2000 bp, Oryza sativa
  N_region (509)..(509): n = any nucleotide
  N_region (619)..(619): n = any nucleotide
aggtcctcgaaggtatgtaaacgcaaccacctcaaaatgatcgttcatcacacagcccttcagcagcatgacatctgacggcacaaagcgagatctgaatcaagcaaacgcatgctgttgctttaaccactgttttccatttctgacgaacattgcaggagtgaacctgtcgttgctttcacgagtaatgtcgtcgaggctcgcgcgaggaacctacaacggcggcctcctgtcgacagaggccgggacgctggcccgtgtagttgcagacgcgacgattaccgcggcgggttatctaggcccggacctcctgctcaacatcactctgctgccacctcttgtcatctgcatagcctccctcgttgcaacattctgcacatacaacaccctgtactaaggaagttgcctctctctgcacactgtagagccggttaaactttattcatgctcacattgggttgtattttacatgtatctgcatgcggtagcattctttgtttgtacaagtncttaaacagttcaataaaatgttcttctgtaaatcctacagatgttttctcgatgcatgtttacagtccttatgcattttacatatgtattcatttttcctatatctgtnaaaaaaatttcttgatctgtaccaatattatgagttatgaggttgaaaagacacatgcaccatggacaacattttgcgtgaaggattgccgttcttttctattgaatttgatgcatcgattgtgaccgcccaataactctagtgccaactgcgggggcatgaccgtgtccgggttcaacaaagggcatgtgtagttggtgaaataaaattttttgggtgtcacatcggacgtttaatcggatgtcgaaaggtgttttcggacacaaataaaaaaaataatttcattactcgcctggaaaccgcgagacgaatcttttaagtctaattaatccatcattagtacatgtaggttaccgtagcacttatggctaatcatagcttaattagactcaaaagatttgtctcgcgatttacatgcaaactgtacaattagtttttctttttatttatatttaatacttcatatatgtggccatagatttgatgtgatattttttggaaactaaacatggccaaactctgcagaaccgagctgtttcaaggattgggacaatcgtttttatatgggccgtgcccctgaatctgcacctgcagactcgcgcctgactaggtcgcaatgcaaccagaaaagggacgctagatctgaagcaaagcgtcggccacgttcgttcgacgcaacggaggtgatctcggtggtggttgtggcggttaactccttcttacccgttctttctcacgcttgtggcgtgcattgtcaatcagacgatcaccgtggctgccctgtgctagcgtgctgtactgtggcatgtaagatgtcacgcgtgagcctacctggttgcgaggcgatttgctcgagcatgtcttcagtgcagacgatgctgaaaccgctgtgtcgccgaagctgaaagagagtgacgcttatcggtcaaacgtcctccggcagacgttgaccacatttctggctgaaaatccagtgttctttttgcttcgcctaatttcggcaattaatatatgtgttctatgattaaacaaagtgtgcaaggcgtgtctagtcagtagtcactggtgtgcagtaagcacgatcaacttactaactgatgctgcgaaagagagcgtttcaaacgtgaactagcatcagctgcagctgtcaagcccaacccatgcaacaaccactgccctctctcgtactctgcagcagcgtgactatgcgcgctatataaaggatcacattatctcatacttggtcacacagaaaattaaaccgtactctgatacttcccgtgttacgcctgtcacagcttacttacattggtcgccaatggcgtccgacatggacaccacacgagcgctggccatcttagcggccacaagctttgttgca

SEQ ID NO: 1999 - DNA, 2000 bp, Oryza sativa
agataatcgtagagctcactatctactattagcctatcttaaagtcaacatatataatagattagctataagattggttacacttttcttccctatctctatctctcacttatatatttattgtttttttatcttggagtttgtgttaaactagcttttgtatgagagccaacacatttaattttttattacctctctcatccacataagcttacagcaagcttatagctctagctcacattatactcgctctaacactcaacaccgacaaccacattgtttagggagaagctgtctagtgaaagggtggggtggtccggtaccagagccatccgagggtggaggtggtagtgctgctataagtctaaaaataataagtctatctactctttcggaattgtaaatattgaatgagatgagcatatttttattaattttttcccccacttctcgattttcatgcggttgttcttctaaatattagactttcaaaaggtttttctaatgaaccctttttttgttttttcaaaggtcagaaatcatcaatcatgatagtaatatattatggtcaataagtaacttttttggttgaagtttgattacttatgctgttaaggagaaacacaagagaaaagtatgatagaaataggatgttgtgcctgttttttttcttgtggctatttatttggtatgaataatttgctgagatttatcctaaaatttaacaaccaacaaaatggctcgaaaaggagccagcttattattgccgaccgttcgtcttattttaaaaaattatgaaaaagttttaaaaaaatagtcacacataaagtgctatttatgttttattatatgactagaaaaaatgcccgtgcgttgcaacaggtaaagacgtttttttatatataacaactattagaagccgaaccaataaattaaaataccgggatcactatatattataattaaaaaagttaatgaaaatcatttctttgttttgggccgaaacgttattccttcctttcttttaaagaaagtcctagcccagtttcagtacctccccatgcttggcctataacaggcccaagccacaagcacaagtagagtcgttacattcgtaggcccaactcacatagtctactgtgatcttcaacctccggaagatattctatgcatgcacgatgacaaagccgatccttgtcatcaaatccaaccgaatctttcttgatctcctaaaattggttgagggcttttgatccactcgatctcttcttcctgtttccctaaaatcagagagaattcacaaaaatcaggataaaaaggcgaagctcgctggtcggccatcttcgatggaaattaaatccaacaaatgaaaaccttgaaagagcaaatcatggagaaaataatgagttaggagtggggaatcgatttttgtaatcaataataggaggaaacttacgggggaggcaaatcgcggcggtgctagggtttggcccgggccctaagagcggtaaaaaagggagatcagattgcactgagtagaaaaatacggagaaacctaatcggactaaaaaaccggcgagaaaaatagacgaaaaaaagaaacatattcaattaaaactgaaaaccgattcaaaaaccggatgacgtaccaaaatctcgataaaacattttcaatttttataatagtagagaaaaaatagacataaaaaacatatttaattaaaactgattcctcaataaaatctgaaaaccgattcagacacggatgacgtaccaaaatctcggcaaaaatatctctaatttttataatagtagagatataataataaaaattttaattataaaattttttttaaataagatgaatggttaaacgttggatacgaacgacttattttgagatgaatgagatggagggagcagcagatgtctgtttatgtttgtgttaggtagggcccagaagagaagaggaagaggaaggggccatggcgccgccacaa

SEQ ID NO: 2000 - DNA, 2000 bp, Oryza sativa
  N_region (41)..(41): n = any nucleotide
  N_region (1970)..(1970): n = any nucleotide
attttgttagtaatgcgctgtatgtgttaattgattgcgcnttttttttttgcattacatttgaatttgaccgtattgttccctggtagctatatttatggactttattgttttgagtattattgtagctagcaagtcactttcatccatgtagtttgagatggacaagcggctcgctaaaaggcgaaagctgatgtttttttcttttgggccattgctttcttcgctgctgctattgtgactttgtatgccaggtctagattaatgaaaagaagacaggaaatatttgactgcctaaatactagaatttattacaagaatgattcaacctgccaaaaaaaatgttagagctcctttacttccatttgtgtgaagttttgaggggatgtgaatcatgtgacttgctttgtgataccatacatgtagccactgtttgtttgaggggtaggttgatttttgtaattgctagattttacaaaactgcaattatttggtcaaaactatcactttgctgcaacttaactaggtatttcacaaaactttaactagttgcaacattctgataaatcatgtactgttgttaccgttctctgaaatgcttagttaaagttgcagcaaactgaaatttactcaacgttatttgaacaactagtattgtattggagccattgatggtacacatatatgggcaactgttaggaagtctatggaggcttcttttcatgataggaaagaacatgagaacactctctctcacttttggtacagcacaacataagcattgtaaatacccaatgaaaatgttatggaatttagaaccagacattaaagaaaggaatgagactgaggctctgttcgttccctagggttcccaactccccaacccttgttttccgcgcgcacgcttttcaaactactaaacggtgtgttttttgccaaaagttgcttaaaaaaatcatattaatccatttttgaaaaaaatagctaatacttaattaatcacgtgttaatgcgaacatcgttttacgtgccggggaggaacccctcctcccgaacagagcctgactactgaagccacatctcaacaagaactggatacagaatggtagatttgccacctatctcctgtcttcgtgataacttaacgcatagcggagcggggataggggcctgcctcggtgtcggtgggaaggctcacactcagccctgtgaattgattttggacgtcctttttgaaatatgagggcggattttggatttttcatggaggcagtttctgaagttccctttgattcttttttcctaggaaaaaaggttcgttcagtctgaaccaggggcatgttcttgaatgagaggctgaaagacctgttaatgtgtcatttagtctcagctgggcctgttatcaggagtaaatcacccactgagtccaaatgtttagagtattgtatgctcatcatgatgctgtaatttaactgttatctgcctgttctgtgtaatgtttcatcttccattttcatattcctgtaaccattgaaccaattcaatggaataagtctctgttaacattgattcaggttttagaaatgcattcactggtaatttcaagctggttcgaaattcttgaactttaacactagttcatatgtttggagcatgtagccatggtcagcaactgcaggaaattcttgaacttgaactagtgcagtgcaaacaagacagtctctagtaaatcacctatatcatacatgcatataacttacacatatttccatattatcatcttttgtaatagatgcaatagttctgttcacctttttctgacaagtaattctctcaaaactatcatgatcgttccatacagaagaatttcctttagtttgtccaatgaatgaatggagaaagggctgtgctcaatttactcatagttctgttttgacacagattggagtatgattttgaggatctgaatnaaagaagtcagtaaaatcatttgtctctca

SEQ ID NO: 2001 - DNA, 2000 bp, Oryza sativa
  N_region (194)..(194): n = any nucleotide
  N_region (199)..(199): n = any nucleotide
  N_region (257)..(257): n = any nucleotide
  N_region (259)..(259): n = any nucleotide
  N_region (261)..(261): n = any nucleotide
  N_region (263)..(263): n = any nucleotide
  N_region (268)..(268): n = any nucleotide
  N_region (349)..(349): n = any nucleotide
  N_region (540)..(540): n = any nucleotide
  N_region (623)..(623): n = any nucleotide
  N_region (633)..(633): n = any nucleotide
gctcacgtttacggctaattataatttcagtggtaagcgacatacccatcgtcagtgagacgtccgtggtaacttcgacattcttaaattataccaaccaagtcatttggatgtgcttatatgggtagagtggttaatctatatcgtcacagttttctaaagatactcatggagtagagtatgcgttacggttnacttnatcattttttaaagtaaaaactactctatattggtttactgaaaactggtaaaaaccnangngntctcngtccacgcggtacggaaacaagctaataatgaccagcttccacaaatcgataagacgataaccagccgaaaaattaatggncttggtaaagtttggtgtacgtgtgtttatagcgatgagtaacaaattctggagtatatgggtttatagcgatgagtacgggtgtactgtggtaaataaataaaggaaaaggcaaacccgcaagctggtccagtccgtaaataaaccaaccgcacggccaatgctgacgagaaacgcggtacgtacgggcnccgagccgcgcagcgagcgaagccgaataaataaggcgcaaatgggaagcgaaaggaggcaggcagagaaagttaaaaaaaanggaaaaaaancggtggcgcgctgtagcggcgtgcgggtgcgggatgcatcatgcatggtgggattggtggtggtgtcgtactactgctgtttcgtttcgtaccggaggagggagaggggagggagccgggcgtccagaggaaggaatcccaaaggacagcaaataattgaggcgagacgcgagcgtgtgggccccacccgacgtcgtcctctcatctccccgttttacccttcacacagatcccattacctgcctgagcctggcccaatccggtcaaaccttttgcctcacgtagtataaaaaaaataatactgacccgttcatctcatttcacgttaaaattaaaagtttggttgaaattaaaacgatatgatgaaaaagttgaaagtttatatataaaaaaattttaatgtaatgtaaaaattaaaagtttaaagaaaaattttaaaactaaactcggcctcggttaaactcgaggtgtacgagcagtagcagcgggttgcgtcgtggtgggggtggtattatagcagtagggctgtaggagtacgcacaataatgcatgtgccgtgagtcaccgtgcaccatctccccggtgaggtgcaccgggacgaacgaacgaacgaacgaacgctggtgcacgccgcggtacgagtacgagtacgtgtggtggtggccgcagcagcggcagcgcccccactcgtggtgctgctgggtcctacagtgattcgcaccaccaccaccacgcccctgcctcctcccgctaattacccgccgctgccacccccgactcccgtacgttgccgccccaggacgccactactgcgtacgcgaacccaacctcctccctcccgtgcgtgcgtgcgtgcgcgtgcgcgagattgcttggcttccccttcccacgcgtcgcgtctcctctcgcgccgtctcggcctcgactcgatagtcgataccccctctcctcctctcctcttcacctcggtctccgtctcctcttcaaaccttcctccaccttcgtttccccctctccccttccctccccttctctcttccccagctcacgccgaccgcgcgatccccctggttggttggttgcttccttcatccacttttggccgccgattcttccatttctcgattccgatgaggtttacgtgaagaggagttgaagagaggctgcgtgaggtgccgtgcgtgaaaaggtaaacgggggggttgtgatcgatcgattgctgtggatgttgtgtggagtttttttttgggttgctgatgcggtttgatttgatcggggtggtgtggtggtggggtttgcagatccggagaggggtggatcgggttttggccggcggcgagtggcggcggcggcggcggtgttgagag

SEQ ID NO: 2002 - DNA, 2000 bp, Oryza sativa
ctcttgtgcagcaatcactggccgtctcccgctgaatagaacatgcttgggtacacccacaaggcctgcagctggcggtaccagtttcttttgaacacgaggttgtcatcagtgttaggatcccacacagcatctgcatcatcacccaacccatgcaggctcaatggctgagagtagtgagcatagtacaagcagttgctcctccctccccagcgctccgggttcttgaaagaaaatggaggggctcctgcatcacccccaatgaagagtgcccagttctccagcttcttacctccacccattttgcaggcttggtcgacatgtccagacggtatggcctgtagaggaccggtgctccaaatgaaaaacttatgtagtggtcaacaatgagaagcatgtcaccacaaaccacaaaccatggtctcatatacggacattcattcatgttatcccaccagagagtttttatcttttccaagcgaagaatgggggccaactgcaaagtgtacagactgtattcaatcacagcgatgagctgaccattgaattccacaatctgatcgacccgattaacgggcagcttgagctcagaccaagagtcacttccaactggccaatcaaacagggaggactgagtgctgataatgagatgtgagttaggtgacgtgataggagccgtcagaatgccacagtagtagaactcatcacagttctcactgaatggaaggcgtggaggtgaaacctcagcaccggtgaacacatcaacaacaagacaataaccacggcggcagcagatgagctgaccatgggaagaacctgcaaaatgcatcctctgcagagtttcttgaggaatctggcagcggagtggggtgtttcggttggctagatcaatgacctcacacgagcgtagcttgcgatgaccattgctgctataaggggctttgacgcggacattgggtcggacgaggaggggtgggagtatggtgcgaaagttagattttgatgggtaggatgagaaggcagcacgccaagaatggcaggtgccagtgaaggcaaggaggtcaaggaaagagcccaatagagcaacaatggagtgaagcaggccctctgggagttctgcccaaccttcgatcacagacgtggcagggggtgctgagccagaggcttcagaaaccttgctggggctttgcatgatggagtattgctggactccctgcaacacataatgaattcaaaaaccaattagaatggtgaaagcctgctagaatttcagctaccaaatatatgcggaagatacctcaatcgtcattatacactgaaaataaaaggcaaagatcttgattccagcaggtacattttttatgttcagggagaaacaatagcatacaggaaaaacagtagctcgtttttcttgaaaatgcatgcatgcctgcttaaagtttaaaactttctatgtgaagcccatcattgtattcaaataatgtaaaaaaaaaggcctgaaatattttctgttttgatgcctatctctatttgagggtcaaattatgacaaaaacaaatattttctgttttgaggccttcctcaatttggggatccattcatgcatggcatcaaaatttctgttcaggaatcaccacattgcatccaatttcgcgcattttgttttcacactagtagaggcacgcgcacctatacgctctcataaacctacgttttttttttcacgaatgcgcaaaaggattgcgcgtcaatatattagaagaagatagtagagtttggttaaacattgcaaacgatcaggccgttctcataaacctacgtgatcaaccatgtcaatctagggttcttcgctagcacatccaacaacaaaatccagtgcaagatccacccctaccaacgcggggtagatctcaccaccacaggacgggacgcgcttctcggttaggatcggattcggagacacgagtgacacagacacacacacgaggagaaactgagaa

SEQ ID NO: 2003 - DNA, 1672 bp, Oryza sativa
  N_region (5)..(6): n = any nucleotide
  N_region (9)..(9): n = any nucleotide
  N_region (21)..(21): n = any nucleotide
  N_region (23)..(23): n = any nucleotide
  N_region (30)..(30): n = any nucleotide
  N_region (40)..(40): n = any nucleotide
  N_region (55)..(55): n = any nucleotide
  N_region (57)..(57): n = any nucleotide
  N_region (62)..(63): n = any nucleotide
  N_region (65)..(65): n = any nucleotide
  N_region (68)..(68): n = any nucleotide
  N_region (72)..(72): n = any nucleotide
  N_region (74)..(75): n = any nucleotide
  N_region (77)..(78): n = any nucleotide
  N_region (80)..(86): n = any nucleotide
  N_region (88)..(88): n = any nucleotide
  N_region (93)..(93): n = any nucleotide
  N_region (97)..(97): n = any nucleotide
  N_region (101)..(101): n = any nucleotide
  N_region (106)..(106): n = any nucleotide
  N_region (108)..(108): n = any nucleotide
  N_region (110)..(111): n = any nucleotide
  N_region (113)..(113): n = any nucleotide
  N_region (116)..(117): n = any nucleotide
  N_region (119)..(119): n = any nucleotide
  N_region (139)..(139): n = any nucleotide
  N_region (143)..(143): n = any nucleotide
  N_region (147)..(147): n = any nucleotide
  N_region (149)..(152): n = any nucleotide
  N_region (154)..(154): n = any nucleotide
  N_region (162)..(162): n = any nucleotide
  N_region (170)..(170): n = any nucleotide
  N_region (172)..(172): n = any nucleotide
  N_region (178)..(178): n = any nucleotide
  N_region (191)..(191): n = any nucleotide
  N_region (194)..(194): n = any nucleotide
  N_region (201)..(203): n = any nucleotide
  N_region (206)..(206): n = any nucleotide
  N_region (212)..(212): n = any nucleotide
  N_region (222)..(222): n = any nucleotide
  N_region (226)..(226): n = any nucleotide
  N_region (234)..(234): n = any nucleotide
  N_region (238)..(239): n = any nucleotide
  N_region (241)..(241): n = any nucleotide
  N_region (262)..(262): n = any nucleotide
  N_region (265)..(265): n = any nucleotide
  N_region (271)..(271): n = any nucleotide
  N_region (279)..(281): n = any nucleotide
  N_region (287)..(287): n = any nucleotide
  N_region (294)..(294): n = any nucleotide
  N_region (299)..(299): n = any nucleotide
  N_region (302)..(302): n = any nucleotide
  N_region (304)..(305): n = any nucleotide
  N_region (307)..(307): n = any nucleotide
  N_region (315)..(315): n = any nucleotide
  N_region (318)..(319): n = any nucleotide
  N_region (321)..(322): n = any nucleotide
  N_region (338)..(338): n = any nucleotide
  N_region (345)..(345): n = any nucleotide
  N_region (353)..(353): n = any nucleotide
  N_region (355)..(355): n = any nucleotide
  N_region (370)..(370): n = any nucleotide
  N_region (373)..(373): n = any nucleotide
  N_region (376)..(377): n = any nucleotide
  N_region (387)..(389): n = any nucleotide
  N_region (392)..(393): n = any nucleotide
  N_region (400)..(401): n = any nucleotide
  N_region (412)..(412): n = any nucleotide
  N_region (420)..(420): n = any nucleotide
  N_region (425)..(426): n = any nucleotide
  N_region (429)..(429): n = any nucleotide
  N_region (432)..(432): n = any nucleotide
  N_region (435)..(435): n = any nucleotide
  N_region (439)..(439): n = any nucleotide
  N_region (442)..(442): n = any nucleotide
  N_region (448)..(448): n = any nucleotide
  N_region (466)..(467): n = any nucleotide
  N_region (476)..(476): n = any nucleotide
  N_region (480)..(484): n = any nucleotide
  N_region (492)..(492): n = any nucleotide
  N_region (494)..(494): n = any nucleotide
  N_region (498)..(502): n = any nucleotide
  N_region (504)..(506): n = any nucleotide
  N_region (509)..(510): n = any nucleotide
  N_region (512)..(512): n = any nucleotide
  N_region (514)..(514): n = any nucleotide
  N_region (517)..(520): n = any nucleotide
  N_region (522)..(522): n = any nucleotide
  N_region (528)..(528): n = any nucleotide
  N_region (537)..(537): n = any nucleotide
  N_region (539)..(541): n = any nucleotide
  N_region (544)..(545): n = any nucleotide
  N_region (547)..(550): n = any nucleotide
  N_region (552)..(553): n = any nucleotide
  N_region (557)..(558): n = any nucleotide
  N_region (565)..(566): n = any nucleotide
  N_region (571)..(571): n = any nucleotide
  N_region (574)..(574): n = any nucleotide
  N_region (576)..(576): n = any nucleotide
  N_region (578)..(578): n = any nucleotide
  N_region (585)..(585): n = any nucleotide
  N_region (587)..(587): n = any nucleotide
  N_region (593)..(595): n = any nucleotide
  N_region (600)..(601): n = any nucleotide
  N_region (603)..(608): n = any nucleotide
  N_region (616)..(616): n = any nucleotide
  N_region (620)..(620): n = any nucleotide
  N_region (626)..(627): n = any nucleotide
  N_region (632)..(632): n = any nucleotide
  N_region (634)..(634): n = any nucleotide
  N_region (636)..(636): n = any nucleotide
  N_region (638)..(638): n = any nucleotide
  N_region (640)..(640): n = any nucleotide
  N_region (645)..(645): n = any nucleotide
  N_region (655)..(655): n = any nucleotide
  N_region (657)..(657): n = any nucleotide
  N_region (664)..(664): n = any nucleotide
  N_region (667)..(667): n = any nucleotide
  N_region (673)..(673): n = any nucleotide
  N_region (677)..(677): n = any nucleotide
  N_region (685)..(685): n = any nucleotide
  N_region (689)..(689): n = any nucleotide
atacnngcngtggggggagananataaaancccccccccngagcggggaagtatntntacannangcncggngnncnncnnnnnnngngcccnaccnccanctccnangnngnaannangggggggggggggggggggngggngtgncnnnncnacaaaaanaacacagngnggaggngtatatggtggtnganaaaaaannnaangaaganatttaatttntttntatacccncccnncngtggaaagagaaaaggcgtgnttnaaatantaaaaatnnnaggagnggggganttttngananncnaaccaggngcnnannggggggaaaagtaganaaaaggngcatgagnanacagggataaaaagnaanccnnggggagtggnnnagnnaaaaaannaaaaaaagggngagaaganaagannggnganacnatanagncacganaggtgagagagagagagnngtgagaganaagnnnnnatgtagancnaacnnnnnannnacnngngngannnngncactcngaggagagngnnntanngnnnnanngagnncgagaanngaganatncntnagagagngngggtannnagagnnannnnnngagcacanggangagagnncgtcntnanangngagantgagagtgancntacatanacncatctncacngactcacngtanctgaccagccgtgtgtctctctctctctctctctctctctctctctctctctctctctctctctctctctctctctctctctctctctctctctctctctctcttttttcaactgtgggggagaaagaaatgatgtgaggttcttgtcatgcctggctagatgctgcagctggctcatgattaatactggctgctgcggagctgtggtggggaagaggtattttgttctcttcttggcaatttgttcagtctgtgccattgtgtgacagcttgaacttttgaggagaattcgtcctggtttgccctatggtaggtgattttttggtgaactggtgatgttgcagttcatgaatttactcaaggattggggcttggtgcgtgcccggaactgaagagtggaggaggattgtgctcagtgcctcttcagtcagaggtatgttattgttagctcctttggtcattttcctgtttgcacttcagtgttcttgcctttgttagtttattaagaaaagttaggactgtttgcttgtgagttgtgaattatgttgaatttggccgctctataaggtgtgattttcattggtcgccgttccaattcgctgaagatagagcgtcctgttttcaggctctgcaaattttggtatttgtggtcgttcatgttaggttccaagcttatgaatttcctaatatttggatttaacttagaaactgcagtatctgagatgcaggttaggaaaaggtggcttaactgaaaattatgtatgttctatatggtttgcttcctgctcatacagtagatactctaaattgtcagctcttcttgtttaattacatacattcactatcatgaccattttagctagttgcttaaaacttgagttcactaattttgctcttatggattgctgctcaggtatatgaacaagtgctagttctacagttaatatcagacaagtcattggccgtaagcttcctaaggcaac

SEQ ID NO: 2004 - DNA, 2000 bp, Oryza sativa
  N_region (1118)..(1118): n = any nucleotide
  N_region (1598)..(1598): n = any nucleotide
  N_region (1609)..(1609): n = any nucleotide
  N_region (1612)..(1612): n = any nucleotide
tgcatctggtgatacaaaaccaaattcatggaccttgctggacttcggttagtcttctatactctacagtcatacgtaaaatggttagatttttcgatgcgcaaatctgcggctgacctattacccttttcactcttaacaggcgatgttgttgtccatatatttcttccgcaacagcgagcattctacaacttggaagagttctatggcaacgcaacctccattgaactcccttttgagaagcagttgcagtgactgctgttttcatcttctcctggagaaattgcaggtttccacaaaaaccgagcagcattgcgccatggattctccacgtcttcctgctcatatgtgacgaactgctcggagctatagatttgcatggtctaactcgccaatgtcacctggtgactgctcgccaagttcagaagtgaggcaccatgatgccaacattctccttatctgttgttagactacgtgaatcattgtattaactatcacattagagacgataattattggtgccaagaggagtagaggccaagatgtaacacattgtgccagttcagatttcagacgcgaggatgcagtgtgcaagttcaacttaggcatcctttggaatgaaggaatttcaagggatctttgtagtatttggactaaattctatcaaaatccagtaaaattactccgcggtaaaattacttggtcgaatcctgaaaaaatctacgcgttagatacgtgccatttgccggtgtaatgttgttatctgttgctatctgaaatctgataagagttctgacgggttgcaaaacttgcaatgttcagagtgttctctgaattcttatatctgaatttctgaagactcaactgccacgggagggatggcgcagccggagaccttgtcgctggccgggcggcgggtggcgttcacgacgccgcagaccgacgccggcggcggcggctacggcggccggctccacgccatcctgcggcagcgcggcgcgcggccggtcccggtgcccaccatcgccatccgcgcgcacgacccggacatcctccgccccttcgtcgcgccgggcggcctcgacgccttcgcggcgctcgccttcacctcgcgctcnggcatctccgccttctcccgcgccctcctcccgtcctcctcctcccccgcgcggcggccgcggcaccccgtctccgacgccgccaccgcgctacccttcaccgtcgccgccctcggcagcgacgccgacctcctcgacgcggcgttcctctccaggctctgcggcgacgcgggcgggagggtgtcggtcctcgtccccgacgtccccaccccggccggcctcgtggaggcgctggggagcgggtccggcaggcgcgtgctctgccccgtgcccgacgtcgtcggcctacgcgagccgccggtcgtgccgggcttcctcgccgggctggaggcggccgggtgggtcgccgtgcgcgcgccggcgtacgtcacgtgctgggcggggccgcgctgcgcggaggctctggtggacgccgcggcgcccgacgccgtcgtgttcacctccaccgccgaggtggagggcctgctcaaggggctggangccgcggggtnganctggccgcggctgcgcgcgcgctggccccgcatggtcgtcgccgcgcatggccccgttaccgccgacggcgtcaggaggctgggcatcgaggtcgacgtcgtcggcgccaggttcagcagcttccatggtgttctcgacgccctcgccgcgaaactcgaatcagattgaagcactaccattgttcgtcccaaatccgaatcaattttagatttctaaaccgaatcttgttgcgagttcttctcctacccatccgcgtctcggggcttggaatcgaatcctcgccaagttcggatcaacgaactgccctcataagcccgcgtcccctccttcctcgcgtcgacgccgcaccgcaccgcatctccgctcgccgccgccgacgacgacgag

SEQ ID NO: 2005 - DNA, 2000 bp, Oryza sativa
  N_region (344)..(344): n = any nucleotide
actagcgactagcgagcacgtcaaatttgcacaggcaactcttggaagacggttgatctcgcaaggtaacaacgactaatgtgtacagcgtactacagataatcatgagtttgtattgaacattttgacattattgtaaagtatggtttgtcaacggtttgtttaacttttgacctagttaacgtgaaaacggttatctgtcgcgattgtcaggatttacgtgggccgcattgggggcgggctaacgagcaggccagcttcgctatctccggccggccgggccacccgaagccgactcgaggggcataggcccaccacaattcgcacctagctttttttttttncgttgcagcaaaaggttttctgaatctactgaatttatctagtcacatatttcctcccttttttaatatgtaatgttgttgttgttttagatacgtataatcatttgtcatattaaaaagtttatgtaattattattcattttattgcgacttgatttatgctaaaatgttttttaagtgtggcatatttttttatatttacataaaaaatttaactaagacaaatggtcaaacatttgtcagaaagttaatggtatcaagtatttaaaaaactaaggtagtaactgaaatatagagagtgtgatctgtagcaaaagtgatcagtactacaactgtttggaaatgtaatcaaacagcgttgatgaaatactgaagctggctttgatcattgcaaacgctaacagaatgctatagcagaacgcaacccttctcatgttgttggtaagagccaagaaatgcgttaggcatgtcctgctgcttaacaacttaaattaattgattacataaaaacgttaactcatccaggtatagcaaagtattattgaaagggattaccaatgtaaatattaaaattgtaatataattatagtgtaacttacacataactataatataatttgtttaacacattatttccactaaaggagtacacgtgaccaaattgcatcacccgtggttgcgctatgattttttcctttcccgcttgcagagtcttaaagtaaatataacagattaaaaatacataaaaagttacatacatattatattataattacatacaagttataatattttttgaacgactcgcataagacggtgcgaagttctattgatagagcagaagaaaaattataagattacaaccctggaagttgtaactaggaaaaagggaaaaatataccaccacccacacaccgacaacgccaaaacactgaacaaggagaaggctagcaccggaccggccaccactaaccgtggccgacctccgctaggccaacaaagaaaacacggtcgggatcgcccaaaacccaactcttacaatcaacacaaagccccgctctatccaagtattcaggagttaaggagagagggtgagagagaagaatggaactcctctccccttaggccctccgacatggccagcttgtagagactagttaggatgccgccacaagaggatgtaatctagagtgagtttgtactaattggttgggtggttttagctaggggatgcctaaacgatggatcatagcaaaaccgttacttgaatactgaagctacctttgaatctttgatcatggcaaaagcttaacagaaggctagagcaggatacaaccctttcgtgctgttacctgtcggtacgagccaacttagccaagaaatgccataagcatgtcatgttgtttaacgaattcactagcttagtagtagcttaattaactgcctaaaagataaaaaggctaataaaacggttaactcattcggagacaaactcgtactgcaaagcctacgtgaaaatcgcgtttcccgcgctctcgtggcgcaccttctttgtctgtacaagaagtctattatataccccccatcctggccaagaccacacctcgccgtcgccaccacctccctcgccgccggcagccgagcgggtcggtgccg

SEQ ID NO: 2006 - DNA, 2000 bp, Oryza sativa
  N_region (525)..(525): n = any nucleotide
  N_region (585)..(585): n = any nucleotide
  N_region (592)..(592): n = any nucleotide
  N_region (756)..(756): n = any nucleotide
gtccattgctttaattaagattcctgcttcataccaatcatgcaatctcacttaaaatactaacctccggataaataacaagaaccattattcaaactaagaaattttctcaatccaaatcatgctttgccaaccaatctctgttgaagcctcagacataaactatcacccggaagaattattgttaatcatgaggggcagcctccagcttagctgtcctggaacagtggttatgcatccaatccgaaacattatggagaccagcggtgtcagtctacacactgacaccacggatcaggattaaacaaaacctgttcaaacgcatcaaaaatacacatcgaaaagcatcgaaaacgagacgaaaaaaaaaagccctactggctccaacattatgaacagaatacggcgatacactaaaccatacagtacgtgatacgccacgggagcaggggggaaatgggggcccaacgcgtgaatcacaccacgctggatgcggggcccgctcctctggggtagccggggtangcgcatgttgtaccgagcgatgctggagccctggcccgcgccgtatctccagtggagccntgtggancggggctggccgagttggccggccatggcaagaaggaagagcagtggatcgatcgccgagacacgagcagcggacggccgcgatcgcgtcgcgtgcagcgtgctctgctttgccgcgatcggcatcggcttgcgtggccccccgtcccgtgctgccgcgttaangcggcgaaccgtgcgggccggcggggcactacgctgttgctgccgcgctgcggttgccggccggccggggtccgtgtaagtggtggcagcatcggatgaccataggcacagtaggcgataggaccgcctccttttgccgcacaaaggcgggaaatcctctatcttcttctgataagttcggtaaaaaaaaaacttctggccagtttactaccacttcgctagccctggaaactcgctggaaaagagggaggaggagtttcaccggaagaggaaatagtagtgggcacgtgggaaaatctcgatagacaacggtggaaatgccactaggattagatttggaacttgggaattaaaacagagggaatgttgtgcattaatatgatatgaaatcatttacttcccgtgtatttttgtcaataatggtatctgtagagttcatttttttatctggtatttccttgcacaaaatggagtttataaattataaggggagccaggccaaggtatgccttctagacatagtatttccttgtttcattgtttgtattttaccaaagtacaagtatagtagtacgaatattatgtacaactctgaaggctgaacttgttgcaagcagggcttttctgcctacagagctactacgtgtatttttcttgttaaatctacacacatgacacacctacaaagcaacattctgttgtaactgaaaacccctatctgtccaaatgcaaaagcctgagcctgctgctgtgaatgacagcaggatggacagaaaaaaaaaaggaacccaagcaacaacacaaggaggaaaccagaacatgcagacaacacaagcaactggctcctctcctctcctcctaccgttcagttagcagagttaacaatgtgattagctgcgtactggaggactactactagcggacacaaagccccactaaagtattcattcgttcacaattcacaagccgtcaagcactgtgccattatccccaataagtagtactccaccacgccttctctcttcttcctctcctctcctctcctccgcttcacctccgtttctttcatcgtctatctctttctccccaacacagcgggcgaaccaaatccgtcgtctcgccggggtccgggaccacctcgtcgcatgcgcgctgggtcgtagacttggccgccggcgatcgccggagttggggagcgcggcggcggcggttccgctctcgccggagcgaggggtgggtggagg

SEQ ID NO: 2007 - DNA, 2000 bp, Oryza sativa
tttgaaacagatggaattttgtggctcgcccctgcaggatagattatggacagcttgaacgttcaccgaccgtgtggattagccattgattagctacggacacgggactataaaaacacagaggtagaaaaaagcatgaataaaacgtaatgctcaatggattcctataaaatttcaaaacacatgaaagtttcataaaactagcgggaatacataaaaaacgtaggaacgcaaagacatcagaagaagaaaatatgaggtaagacctcatgcttatttaccctcaaaattgcactacaatagctcatcccataagaatttcaaaggaattggtaaaagcaaatactcccaccgtttcataatataagactttctagcattgctcacatttatatagatattaatgaatctagacacacatatatatttagattcattaatatttatatgaatgtgaacaatgctagaaagacttacattctgaaacggaggaaatactttgttttaaaggacttcgtataattattttctataagatacaaattctatggatttcctatgttattcctttcccaaatattcttatggcaagcacaaagcaaccgtagcagctatttagaaatcagaagtggtttcagagttttatgtagtactttgcagcatgctaagcatctctagcaaccttttcatcccactgtttaaatcaaaatttagtaattatggataaaaatcgcacaccaacagtccatccatcccactctccaagtcatccgctaacaaactccttctctcacttgccaaacttaactagcctactcaacttggctattcgtgtcccactacattctattctctttcttccttcatttgggagcggttggcgttgacgggagcgcctctccctcgactccgcctcaacgcgcctcctcgctaccgtggcctcccgctcgccgtcgcctctgacctcgcacgacctccaccgcctcctcccccgtatggattcgactcaggattcgtcgccgtctcctccatctactttactggagacggtgtggggatgcctacagcgacaatggggttgggagtggatggcgagctcgagctccgttgtagcatgggcaccgccacaatgtgcagtctctagagccacctcgccctgttcaccgtgcccgccaacaacctccctttctcccgcgttggttacctcgctccacgcactcatggatcttccatcgttgtccgctgtcaccgtcgctgttcgcctttgcacggacgtcaccaccacagagatggagagggccaaggaggagcttagggatgcccccagtaggagaagagggaaaggggaataaagagaaggaagaagaagaggtagtagatgataacatatggataccagtagtatagacttagagtagaaatgatagatggagagattattgaagttagcaacgagtttagcttgccaaaccaattaaagatatgcttatataggtatttggagagtctgatttggagtctgttggagatgctctaacaatctaactaatttggccatgcttttttagccttttagcagccattcagaagtattgagttcagtatttctactttattatttagaacatttgttgcaagctatgtgttaaagtctttcttcaaatattttattgaaacacttccacatttttttttggcatagtttgtgttcactgcaaaaatcactatgatggtcatgacttcatgctctctactttattgatgcacaatactagtacaattaattaaaagaactagtaataaataagacagatatagtagtattagcattcaggaaaacatttttctacattttctgcagcagcagaccaccgttcgacagtcgccatcgtccaccctccaatctccatcgcttcttccctctaaccacactccgcactctccccctcccctcccgcctccccactccgtccaccccgccgcaccgacactctcctccg

SEQ ID NO: 2008 - DNA, 2000 bp, Oryza sativa
  N_region (98)..(98): n = any nucleotide
  N_region (185)..(185): n = any nucleotide
  N_region (241)..(241): n = any nucleotide
  N_region (293)..(293): n = any nucleotide
  N_region (713)..(713): n = any nucleotide
  N_region (716)..(716): n = any nucleotide
aaatgcacgaaaaaattcgggattggaagagaagaactcaaagaagacggattcaacaaaacaaatcgagacgtatgtacaccacatgatgaaaaagnaaaaaaaatccgccagatccgccgccgaccaccgcatcagagtcatcttgctgccaaggggagctcggggagaaggagggaggcgtngagcggcgacgtcccccatggcggcgctggaggaggcagggcctcgcgccgacgancgccgcgtccgccagatccgccaccttggccgggtcgtcgccgagcccgtcnacctccttcctggccgcggcccttcgccgccgcctcgaatcgctcgccgctccagggccttgcgccgacgaccgccgcgtctgccagatccgccgccaacaccgccttgcccgggtcatcgccaaggcaacctgtcgtccacccccccgccacggaggatgccgaggtgctgtcggccacggccgcctcatccggcgccgcatccacagacggagccgaggccgcggacgaggaggacgagcggcgagtgcggcggagtgggaagagaagcggagctggcgccggacggggaggacaagcggcgggtacggcggtgcgatgagaggagccggaggggatggaatggataggatcgaatgggcggagtgggaggggaagggtaggtggaggaaattatttcttccactcgcccatgctaancgnacccaggtcacgcgcactgtaggagtagttgccttgtatagcgtctccatccaattaaggccctgtttgtttcagcttttgattcttataatttagattattaagccagattactataagttggattataataagctggcatagaataagttgtgagttgtttgtttgtctggattattgaaggcatagattattgggtctgaaaggctaaagtctataatgccctcagctatctgttcagttaatgatataggtgggtaatttttctcaagtatgtagaggtagtgggtctttagccactcaataatctgaaaaaagctcctctagagcagcttatcagattataataatctgacttatagattataataatctgctataataatctacttgtttgtttaagcttactcctaataagttagattataataatcctaaactgaatcaaacagggcttaagccacacatatatgggtgcttacactctggggtgagtgtttttgggccaactttttaggctaagggtacgggacccatagcttgcaatgtgagaggcctcagtgaacttgattattccaagtctgcgggacagaccatctctgatagcttccttgttagctctgtccacaaggagcacactgcacacgtctcttgaaggtttcgaagcgctgaaccatctcggcatggtcacgctcctggttgaaagccttgcaccactgcttatacaaggcccacagggcatcatctgaaacaaggtccttctcttctgccacaaagatcaccctaccttcgccgtcgacgtggcaggaaacgcccctaggctaaacgcataggcctaggcaaaattaggcccaaaatccctacagaatgtagactgatcatccggcccattataccaaacgtagccataatccacatggatcatacagaaactacgatccgttttggcccaacacgtttagattagcctgaaattttcatcagaggcctaatccgaaggagatccgacgaaaatatccccccctccggttcgcgtgacctcggttggtggtctccccttctaaaatctcgccgagtccacaagcgcatttaccagcagctccactcccatccatccccgcgaccctcgctgatctcaccaccaccccgacccacccgcaccgccccaccatcacatcgcccgcgtgagattgctacccaaaaatcctcacctccgacgacgaattgaggaggaggggagagagagctcaaaaaccctaggaggaggtttgaggggccagatcg

SEQ ID NO: 2009 - DNA, 2000 bp, Oryza sativa
  N_region (112)..(112): n = any nucleotide
cgacggacgatttatggcgcactcgacaaaagatgcacaaactaaactagaactagaagcaatataaaaaaaacgattcgattgattgattgtaggatattttttacaattnaacgggccttgtcccttatataggggttggtcttgccctctacgggccctcctccacgtccaacttgggatagaaactaaaggaaacccgaaacatgtcttcccaagcaaagaaaactcgagacccgataaaactgattcgggctcggactctgtcggtcagaccggccacatgccagcggtctgaccggcctatacacggcagtcagccggcctccaaaaggaaacatcggtagatttttaaactttggcaattttccctatttcgactttacgtgccaaattcaggtgtacacacaatctctcaagcaggataggcttaggctgtcctgtccccgtaagccatcactgaacgctgaaaacaatagaacacgacatttgtgaaatgattgctttaacatcttttctttggataacatgtcgcacattgtgtttgggatgcgtccttttgctttcaacaccccctccttgaaatgctaaaaataattttggtaataggctaagggaggtgtctagatttatttaaaaactgattttatttagaagtagtgtcttatattgatcaatttggtgttgttgccataatatagttgtcaacaataaaaaattgtttaacctcatataggttatcttcgtatatttcagttagctgcattcttgatccttgatgatttcataggagtagtaggatactatgtatagtagaactacagttttgaatttggtagccacgggtcttttgttaccgtttagatgacgtagttcatatagaatattattttagattctatgtttttttattagatattcagttggatatcatcatgaggaagctgagagttgtcccataacatggagttttttttaaatttatcttgtttttaccgtgtgtctattaacagataatttcttcgtcccaaaatataaacacatcctctactaaatatctactccctctattctataaaaaactaacttctagatataaacttggatatacatatgttcagattcatccctaaaagttatcattttagacatagggtgtatattttaggacgaaagcaataccaagatgaatcattttcattattaaaaaaatgaactgattgttttttttcagcagcgagcaatagcagggaaggagacatttttcacctgcctagtgcccttagagcaggtacatagcaggtctaatagcctgcttacctaatattttaacatatactgatagagagagaaaaatcagagagagcaaatgggacgacaatctagtcgccggctcaagcacgagcgcctaggcactctggccccctgcagttcgggacaaccaatagagaatcagaacttgaacatgcagaaattaccaatacctgacaggatatcttagttaaagcatgagtgtagtcaattgttatatctaccatcgtggtttagttatctcttaaatgattatactgaattttggagccagcagttaactctactattgaatttgctcttaccgcattcctcgattctccaacccaacggctctcgcattcatacactactgttgcagctgtcagcctcagtccgatgacaaagcagcgacaacctttttttaccaaattatctcctctccactgctacactccactccactagctcgccatttgagaagcttcgagctcacacagatcccagttactagtggtactggagtacctcactctcaccacactcccttcgtccctttctcctctctcaccaactcaaagctctcgccgaatcccacccaaagatccaaacccttttccatccaagaacgcgagaatccacccacccaccccgccgacgcccggcgatgggcgccttcgcggcggcgctgctggccctcctgctggccg

SEQ ID NO: 2010 - DNA, 2000 bp, Oryza sativa
  N_region (830)..(830): n = any nucleotide
agtacacgagtgctatagtgaatctgtggtattgtgtgctagtagttctcgggccaaccgttcttgtattgttttccttcaattctcaaggaagttggcgtgcaagaaaagagaaagaaacatatttcgttgttaatttatgttttgatgcaccattctgtctattttggattgatctcgccagttcctttaaaatcaaaacggtactaacttttaagcgaagctatgtatattctttccaaattaacaaatctaagatgacaggattcttcacatgaaagcttccgttttgaaaaggcagaacttaatcaaggaaaaaaagcagcacttttgttgtctataactcctttttagacaatgtgtctaccatgaatcgtgttatttgaacatactaaattttgagagaaatggattgatttgctcggccctatgcatttaatactccatctatcttacactattatgtcatttttacactggtgcagataatgaaaaagaaacgccaacgatcgatcagatattttttttttggtattgacgcaagctgagatcactctcctcctatcatagaaattaaattactaatccatcgatctcttccgtctagtcagcaagaacataataattttaaccatagcaattagctagtcaaaacgatcaataagacgataacaaattcgaccacatgatccccactatataacaccctttttatcagcctcaaatccaggtcaagtcaggatcaagtgattctaatcctatcaagggaccccgcttgagatgacggctcaaacaacatcaattgacaattgtagcaaatcccttttctngattttgatccaatcaatctagtactccctccgtttctaaatatttgacaccgttgactttttagcacatgtttgactgttcgtcttattcaaaaacttttatgaaatatgtaaaactatatgtatacatataagtatagttaacaatgaatcaaatgatagaaaaataattaataattacttaaattttttgaataagacgaacggtcaaacatatttaaaaaagtcaacggcgtcaaatatttaaaaacggagggagtactatttaacaactaacaagctagttttcaaaaacttaagaaggtgtgtgcctgcatgtgggtccaggccaaagaaagtagcagcccatgcattgcactgttgcagtgcaggctccagaggcagcagctgcagtagcttacctttgcagtgggagagggaggaaggctgagatttgatgagaaggggggatatgcagatgcaggaagcatcacattatgggctaatcatgccaaatgcaaaggcaccaagccacagctttttaccaccccctccttccccctttccctatctttctcctcatcatatgtgtcatgatgcattgcacacccacacacactagctacactagctaacccttgctatgcttgcacaaacacctaaagacacacctttcaactttcacctttttaccacttcaaatattttattctcacacatacacacacaaacaatctctctccatcgatctcactctcactagcaaagctctatatttatcctgccttgatggttttgttgttgccactagctagcaaagcttatttatgcttgggggtaatgacccatacctaagaacaaaagttgcccttttgtctccaaagggaactagtcaagcagaagaggagatcgatcagcaactagcatagtttgatcccaagagagatcgatcgattaattagcaacaagccaacgacaagcttagcaatttgataacaatggcgactagtgaagccgcagccatctccaaccctttcgctcctctcaccaaccatcagcaagaacaccctcctcctcctcctcctcccgccaagaagaagcgcaatctccccggcacaccaggcaagtgcacaacacaattaacctcaaaatcttccccattttgctgtgtttgactcgactgatcaacgg

SEQ ID NO: 2011 - DNA, 2000 bp, Oryza sativa
ataccttgtccttatgtatatttatttcctagacacttgtaggctagcaatcaatattttttatttttctccttatcacttatatgtgggcctcaagtctattttttaaaacttttttttatactgggttgtcatatggacatcatgtaattaagccaaaaccaccctaaaacagccatggatttgttttgtatatagttttttaatacttgggaaagcgagctacggggtatctagttttgcggaattgctcaatcccgggcgaccggcgcagggggagccggatcgggcgctcccccacgttcgctctccccccacgtgaccctgttgggccccacccacttctccctcccctttctccacaaaaagatgtttcacctagtgtcctcacaatgtttcactatgtatagatttaatgttgcagtgaacgaaacattccattgcaacaaaaacccaaatattttggaaactctctattaagggaatttggcttattttttgttccaccaaaaatgtttcacctaatgtactcacaatgtttcgctatgtataaatctaatgttacagtgaattgaaatattccattgcaacaaaaaacccacatattttgttattttctgttccaccgaaaaatgtttcacctagtgtactcacattgtttcactatgtatagatctaatgttgcagttaactgaaacattctttcgctatttgctgaaacattgtttttatataaggtgaaacaacacccgatttaaacgagtgaaacattttcgatctactttgtgaaacaatttcgatatacctggtggaacatcgtgcaacatttaaaaataattcaataataagcttattttttttcgtcaggatatatccatgcgtggtcttgttttaaagatttaattgcaatgaatttaatggtgcaatcggatcatgatttggataagtaatttaagagaaaaatcagtttaaagtagttttacacgtaaatcgggcgctgacgtcaattttaacccgtttgcatcgggcgcccgagccgagggaattttttttatttatacttttttttattaaaatatttacaaaaataatttgttgtttcgaaaatttacaaatctaatcgcctgccgccctttgggagggcgatttttaaaaatcgcccttccacagggcggcaagggacctaaatgtaaattttccagcataacttgttagctctataattttacaatttaaaattatattatataaagtcagatgaaataaaactttatatcaaaattgtagagctcaaggagatctacaactttgtagttaataactttttcatttaagatgttttagatatctaaatattcgttacaaaatatataacacattttaaaaaatctcagatctacatttcaaacgacattggatggagataaactttatataaagttgtagatcttgatgagatctataactttgtagtttatcacttttccatttaaaatcatttggagtatcgaataagcattattagtttttaagcaattaaaaccggtgggaagggtttgaacacaaataaaaattttgtatttaggtcccttgccgccctttgagagggcgatttttaaaaatcgcccttcttaagggcggcaggcaattagatttgtaaattttcgaaacaaaaaattatttttgtaaatattttaataaaaaaagtataaataaaaaaaattcgagccgaggcgtcaccctagttttgcggtggaggggtacgaattagactgggtcaatagttgagggagttgcaatgacttcattctaacgggcctgcacgtatgctacagttgtgcgtaaggaagctacagtccagttctggcccagcccagcccatgtagaagaatagaaggtgacatctttccttcctccctcgcgggcggaggcgctcacacgcaaaaaccctaaaaccccagtctacccttccttccccgccgccggcagccgggacatca

SEQ ID NO: 2012 - DNA, 1760 bp, Oryza sativa
  N_region (8)..(8): n = any nucleotide
  N_region (103)..(103): n = any nucleotide
  N_region (154)..(154): n = any nucleotide
  N_region (188)..(188): n = any nucleotide
  N_region (190)..(190): n = any nucleotide
  N_region (1538)..(1538): n = any nucleotide
  N_region (1549)..(1549): n = any nucleotide
  N_region (1561)..(1561): n = any nucleotide
tgttgccncgtcggggcctgcttcgcccgccagcctgatctccgtcgtccagcggcatcgtcgtcggtgagcgaaggtgagagcatcggcctcttcttcttcntgctcgccgctctcgtctaccacgcacctaccattcctctccttgggttcngttgttctgctgttctagatctggaagctcttcncncctttttttttcttggattaacattagtactagtgataacagtttcaccaaaaaaaagagagaaaaatttggggctcaactggacccgcaatgtcatgttgctggatctgctgctagtttctggatctgcagtagtggcattgttgccatctgtgttggagctgatttcttttcttttcttttctttttcttttcttgggtgcagcatattctgctctgttcatgcttcactagatttatttattatcaagttcaaggttagaactcgctatatagcatgggcaaatcaaatctctggagtagtaagaattcttttcacaggtgagttggagggtggttgggggacccgctttggagtgtgttgcaggttatgtagtagtacatgtgtttgcaacattgcttcttgttgaaactaatgctgtgccatgtactacctgccggccttctttgctgatgctttaagctaaatttagaggagtaattatgtcggtggggggaaaattgttgtttattccacagcttgcgcgagctgaaattggtttggaacaatgttgtgcggggacgcatttcttgctaccgtagtcactgtcgatcttttccgcgggatgtttttaatacttgactgtggttttggttgctagggaggcatctccatcagttctgcatgttttgtggtgcttgtctgtactcggattctttttggagggaactaaagattactttttcgtgataatacgtgatatcggaaacatgctgctcaaactagtattggtgctgctaaagcaaaactctttcctcaatgtgggctgctagattgagtatttttttaaccattaataaagactttgggccatctttaattgtccactatggctcatatatttcctagaagtttactgttgttcattctaagaaaagaataactgcaccttttttttagactatgaagctttataatcagcatttgtagggactagcttcagttcgaagtgtttttttttagttaggacattggtgcttataaattagaagacaaatttattgtaggatctgatgattacgtggtgtaaacatagaatgcccttaatagattactgctccttttgataaggtaaattatgtcattaatgcacaatgttagctgttctactgctagtttcccgccattagctaatgtattttcttcgaaaggaaggccattatgtactgttcaaacctcacagaacacaccacaaaaggttcttctatccacgatctctttcatctctagcagtacgtgcatgtaggacaatttttgtctcatgtcaggcttgcatttttcatgatattcgtagtgcgattgtttccnctgggtgacanaatgttgtatcngatttgcgcgtttcttttttttttttttacttcagctatgtgattttgtttgactctctgtttttaggtgctgatacaaggtgttgtctgagtctgcaaatattgatgatgtgcctaaaagtttgacagtcttgcttgaatacacagcagcattacttggttacactctgaaaggtgtagttgcctttgttggtttaga

SEQ ID NO: 2013 - DNA, 1037 bp, Oryza sativa
  N_region (7)..(7): n = any nucleotide
  N_region (44)..(45): n = any nucleotide
  N_region (56)..(56): n = any nucleotide
  N_region (58)..(58): n = any nucleotide
  N_region (106)..(106): n = any nucleotide
gacgacntacaaaacgaattacataaatgagagcgaaagggccnngtagcctaggngnttacaagagcctcagtagcacctgagggcctggggttcgactccccgngggagcgaattttccaggatttaacggcgttgtgctttcagtggtaggcgacgtacccatcgaattagaggcgcctgtggtgacttcgtcaatctctccaggatttgccggcccagtcttcgaagatgctcgtaggggtaaggtttgcgttgcgcgtgcattgtgagtgtctgcattgtactgtgcctaattaatctataattagaggcacatgtgttgactgtagcaatcactataggtttttttaagccagtaatctaatctgataattagagtaatgtttactgtagcatgcatcatgagtgtctgaattgcactgtgattaattaggctataatagagacacatgattaattacgctcaatagagacaatttttttaagcctaattaatctataattagataatgtttactgtagcatcacataggctaatcatggattaattaggctcaatagattcgtctcgtgaattagtccaagattatggatgagttttattaatagtatacgtttaatatttataattagtgtccaaagatctgatgtgatagggaaatttagtcccatctaaatatgttctcaatattatgagtttctgacaatcgggtccgagaacccagagagacatacctgggacccaccgtacagtgggacaggagagaaaacctccccggatcctgcccctcctcaccgtctccactcccgatctccccgctccccgcgtcccgtctccgatccacccaaacacccgcaccgccgcgctacgcgagcacggcaccgcggcgcggcgcgactccgcaggcgacaagccgaggagaatcccgcgcccgcccgcccgcatcaccgccggatggccgccggccgtcgccggtagggcgataggcgggtagatccagatccggcggggcgggatcatatacaccccgcgc

SEQ ID NO: 2014 - DNA, 1622 bp, Oryza sativa
atttattttgaaacggaaagctttcattgtttttttttccgttgcgtcggttcgtcggtcataggatcagcaaaattgccgactagccatatatttgatgtttcaaactatatttgcaaacatacctttttctttcttacaacggatcgtacaatacgctatcgtaatccgagcggctggcagtgcttgtggctatggcggccgatggcaccgattttgaattttttttattctaaaattgttttcactggcagttctctttagcttgccgcttggttatctagcatatccgtttgcgaaactcgattttcgctggtcaacgaaaacccaatttaactaccagcgaaaactatttttgtagtagtgatttatgatgagatatatgagtgacgataacaatattacaccaccaacaacttaaagactggaaggtaaacgaaaagggagttactgaaaaagaagagttatttttaattacataatggtactgaccagtacactacacgtatgtatatgtgtgtggtgatgatgaagaaagcactcccttctgtgtaaaaaaaattaacttagaaagaaatttgaccctcctagaaggtataatgaatttggactaccttttatgattcgttattttaaaagggatcacatctacatcccctactaggttaagtaggttgccaacgtgacagagaccaaagtgctgctgtgacatttgggttgaggtaacagacaacggcatcacactatagtactatatacaacagtacgcaaataatatccataaatattatacatacagtgtggtcgagatttaccgcttcccgcgtacgttaaaacaacacacatgatgctaatttatgcgtgtatgaatagtaatataactagcaatatatgttcgcgtgtagaaacaaacattgaatttattggtataacaaatgaatgaatttgatgtatatttggtttggaacagacgaatgctccgcttttaagcagtagaggtaagaatttaaagggaaaaaattcattagtgtctattcgttttgaagaaattttaatacatagaaatataaaaaatggagaaataggaatacatgcaaacttgaatccataggattttcccaaaaggttagagtggacgggaacaaaatatatgttttccctctacatcttgtaggagaaattttttctttggttttcctatatctacattcctaataatcaaatagctttcgtaggaattaatcctaaaagaaattaaaatcctttaaaattcatccaaaatgaataggcgtaaatgagttagggaaaaaaaagaaaagaaggaaatggtgaaaaaggaagagaggcccatgcaggcccaccaaccaccggatctcgatgggaggagtgggccacctcttgtccatcccctcaatcctttcccttccttcttcaaagtcgagactcgagagagacaagaggagaagagagagtgtgggcgctcttaaataggagagaaaaagaaaaccaccgccaccgacatcgcctcgcctcgtaacccccaaatccagcgcctcccttcctccccaataatcgaatccaatccatcttccacgcgcattccggatccgcggaccaaggga

SEQ ID NO: 2015 - DNA, 2000 bp, Oryza sativa
  N_region (761)..(761): n = any nucleotide
  N_region (793)..(793): n = any nucleotide
  N_region (1507)..(1507): n = any nucleotide
  N_region (1968)..(1968): n = any nucleotide
aggctgcaggcttctaatttactactacctccatattttaatttatgacgccgttgactttttgtccaacttttgaccattcgtcttattcaacaaatttatgtaactactacatccgtcccaaaatgtagctatttctagcacagtactttgtctcaaaatgaagctatttttctacctaccttcttctctcaaccaatcacaaccattctttttcacctactttctcttttcaaccaatcacacaccttcttcaatcattctcacctactttcttaatacctgtgtcaacctcaaaaatgcttacatttagggacggaggaagtatcatttattttattgtgacttgattcatcatcaaatattttttaagcatgacataaatattttcatatttgcacaaaaaattttgaataagacgaatggtcaaaagtagcatttttggtagagcgctgaatctactgcaagagagatcaatataccttcccgggctcgggctcgtggccgttccagaaaacgtacgtctcgatggtgttgaggccgcccatcttggccgtcttgacgagcttatcccacatctcgggcgggctccgtgggtagtggatggcgccggagaagaagaggtccctcttgccgtcgatcatgagggagcgctcgtcgtaggagacgacggtgcccttcttcgtgagggtccactccgccgcggcgcccgggaggagcagcgcggcggcgaggagcgccgccgcaaccgcggccgcgangcgggcggccatccgaacctgcggcgcgcgcncgggggggctctactacgaggggggaacggccagcggcggcggcgggtagggtggggtggggcggggtggggttggcggcgacgcgggcgaggccgaggaggaggaggcggaggccgccgctttgaagggcgggaggggcgttgcgcgggagtggccgcgcggcaatggcgcgtcgcgggtggccatgcgcggctggcaccggagctcgcggcaattttgcctacgacttgttccgtttggccacgagcccacgaggttgatgacgacgaagccgaagagttgttgatttttttttcaatttttaatttttaatttttaatatttacagaaatattataacggcgaaaatatttacagaaatagaccatattgtccaagtaaagagcggcaaggtgacttgtgtgggaggccactcagcgggcatgcgaaaattatatttaccccttgccacccttgcacgcacatggcgttgtgtgccacgtcaccttgccgccatctacttgggtggtagggtttatacctgtaaatattttcttcggtataatatttctgtaaatattaaaaaataaaaacttaaaaatgaaaaaaaaaatcaagagttgttcatgcgcttcatgggtcgacggcccaattgaagttgtgtcatatgggccgaagcccagaaaaaagcacacacgagatgacagatttgaccgggcccatttgtcagcganaccctaagcagccattcccaagcccaacctctccgccaaccatcccgccacgtcaaccacctttccatcccaccatggccgcgccaccacacccaccaaccccgggtccatctcggccgtcgatctccccaaccgacggtccagatacaccgcacggttcctcctctcggcttccttctcccaccaacctccacactccgcccgcctcaaatccccccgcttcgccagccaccacccgccgccgtcgccgttgccgtcgtcttcgtttcgcagctccaccacctccatggcggccgccgcctcctcctctctgctcgccgccgcctcgtcgtcctcccgcgcggcggccgtgtccgcccgccgcgcccccagcgcgagtccggccgcggcggcctccctcccctcgccgtctcgcgcctcctgcgctcctcccctccgcgcttccgcagcgaggaccctcngcagccgtgtcgtcgcgagcgcggcccccgct

SEQ ID NO: 2016 - DNA, 519 bp, Oryza sativa
  N_region (5)..(5): n = any nucleotide
  N_region (9)..(9): n = any nucleotide
  N_region (11)..(11): n = any nucleotide
  N_region (18)..(18): n = any nucleotide
cttgngttntngattctncaatcctttggtcttacgagctttgatgtcttttgcaaccagttacttttttccatatgtcaaattgtgtgctcatggaatttctctagagaattgatgtacatgctccattgattattctcctgtctttcctcgtgtggctggtgtcaaaccctaatttgcttgaggtggttgtgacaattcgcatcatcaatacctggttaattggaggtggttatgacatccttgctcacctgtaatgcgtgattaaatattatatgggaaagtattattctagttttttttgcaaatcaagatgtttttcccttttattatcgaaaaagatgttccccctacccgtgttcaatttttaaaattctattctgaagaaaacaagatattggtttggtacttgcatttaactctcaagaacatgtcagttatagtagcccaccgttaagacgtatgatttatgtcttaaaacataatatgtttttgtttcttatagttttgataaatttg

SEQ ID NO: 2017 - DNA, 2000 bp, Oryza sativa
  N_region (1351)..(1351): n = any nucleotide
  N_region (1353)..(1353): n = any nucleotide
aagctagctactagagctgtagttaagctcaatggcccaatgtcattagtgctactgacagtgtgagctgcaacatctgtaattagcaggaccagcttatcccaaacagtagcaatgcagtgtcatacagtattgattcctgtgagcactgtgtaccattcatagggcttgtggtacacttgtgctagctagtatgcactgacaaatcctgatgatttccatgcgagttgaacccagcacatggagctttttgttcaggttaccgattgatcgagcagctaagacctcgagcattatgagatcgataagcatagcaatcgatcccgtgatcatacatgcagatgatgcagtggcgtgcgtgacactataggtacgttgttgctgaagccgaacatgcgatgctgcgtgcccgtggcgcaatgatccaaaagattacaggcttgcacgatcgaccaactgtttttcatgcaagatgttcagagagacagatagtgatatgtgtgttgttgtgtagatgcatgggcctcggctagaaatgctatttcataccgctacctcgtagctaccacggagagctatcgatcgaatgctagtttgtagtaggggtttgagaaatgatttgtcaattgcaatttggtaggggacaggtgccagatcagtgatggttgttgatcagtagtgtccgtcagaaaagatatgtgggtttcgatcttcagtttttttaatgaattaacgactaatagaacttttctacgagactacaaattaaatatgttcttatagttcttctggataccaaagcaaacaatattatcagggatagggaagaaattagcacgttctgttcgtttttttatctgaacctgaatgcatggcgacgaactgaacaattaagctcaaagtgaccgaccgatcatgttaactgttaagcagtcaaggtccagtgctgataaaccacatgagagagagagattctcagatcccatgtcaacacatccattcacagcagatcgaagctagattctttgcaagcgtgctgctcgtcaagcatgcagcgaatcaggggagagattaaacaagttgggtgcagataaccttcactgcagaacgacaaaaaggcccggattgaccatacaatgtaccatatcaagttatgcgattctgtcggtaattagcatgcatcaaagattcttcagataagccaattcgggttaatcaatccgaccgatggtcggtatatacaaacattgctcctcactactaggtgcagtccaggaattgctgtaaacacatgggcacttaacacacccagcgaagcagaatgcataaaaccaagtgttgttgttttttnantttgaaaaaggccaacggcccggcttatattgaaagcccaggggtataaccaagtgttgtaactgagaaaatgcacattttctcaacaatgcaggttattaagtcttttgtttcatggtcacattttaccacgccacattttaattagacgtgtattagtttactatcacaattgtgcattgctacactttttcaacaacatattctgcatgtcataggcttaattttttttgtcaacttttgtcacgctttgtggctaccaatttattcattattttctttttgtctatcaaaatttgctaaaccttagttgtagtaaagtgtggctgacaacctaatacatcgtaagatgctagccaaaaagttcaaagatgcaaatgataaagatgaagtactgaactgggctaaacacaagttcagataaggcccgatttgtggtacttaccaagtgggccaactacacaagaaattgggccgtcctccccggcccaatcgacccaataggtaggtactgcttccatgtattgggggaagcagagagatccccgaaatcaaacccctcctcttctcttccccttcctcctgcgttctagggttttgcctcccagcggcgactcggcgagcgagaccaccggcaagctcgtcgg

SEQ ID NO: 2018 - DNA, 2000 bp, Oryza sativa
  N_region (1471)..(1471): n = any nucleotide
  N_region (1719)..(1719): n = any nucleotide
  N_region (1721)..(1721): n = any nucleotide
  N_region (1730)..(1730): n = any nucleotide
  N_region (1741)..(1741): n = any nucleotide
  N_region (1743)..(1743): n = any nucleotide
  N_region (1761)..(1761): n = any nucleotide
  N_region (1769)..(1769): n = any nucleotide
agcgtgattaaatttggcatggttttcctaactaattttttactttgattttttcattactacgatgttcctagcaacaaaaccacaattatatgaaaataaattcaaatgtcaatataatgatattatttttgtaaaataaaacataatttataataaaatagtatttgttaaatatttagatagttgaattttaatacgtgcataccttattcagtgacacgggtggagtaatgtgttatgtatgatttatgaaaaatctcatttgtactctagataaactcgatactataagctatcgaccaagttttaacgatttttagccggcttgaaatgtgcatctccaactgtttgtttgaaattcgtcgattttcattcaaaatcaacgataaatcgatgacttgggtggagttcaaaatttgatttataaggaatcgagattatgtgcttgtttactttgtagccgctctcaaccttacctgtttttttttttcacatttttgtattactaggttttggtatactggatgtgtttaatttaaagccttatcaaaatttggtagaattttttaagtagaaactaatagaattactaaagtttaataaggtaatgttggtaagcatacgtttggtttatcttatcaaaatttaatactccatccgttaaaaaaaaatcaacttctagagtttgaattttgtcccaaaaaaccaacttctaccctcctacctactttcagcacgtaaaacgataagttttatcccttcaataccctttatctacctatcatttttactgtttttttcaatgattaagagcattttagtcattcaccatctccactaattccaccttgggatgctagtaatgcaatttttttggacggagggagtataagattcgaagtgagaatacaatgaaggagcctaacaagcatgatggcttgatatataagatccatccaacgcatgcgcgttttatccgataatatagggtctgttcactttgatgctattttcaaccatactattttttttaagctgtcaaaaaaatatctacgtttactttattgccaaatttggtaaatacataagaaatcctggtaaaattttggcaattttaccattttgcaaaaattttggcaatggcaaaattcgataaggtttattttagctacaatctgaacatgtccattgtactataatggtatgttagcttttatgttagcttttataacatgcatgtaaattgacacgataactgatagatagtactcttttttaagtattagagtggtcttatttctcagtctcttggtcaacacaacatccacctgtttctatcccaaccattcttaccaacaactaatggaacgtttacctcgcgataaacgtatccaaaatggtcaggaagctcaatttttttttacacggcatgaaattcacttgactgaccggactagagagagatccnaagagtagatcggggcgtggagaaaaagaagtccgatagacccggaccccacgagtccagtcattgcaaaacagcgcccacccacgaccacgacgaacacaaacagtaagaaccaccaacgaaaccgatctaacccaagcgaactccccactccacccgcaagcaagggtagtagactagtagtaggcgaaagaaaaaaaaaatccccccaaacgagagaagcggcagcgacgacgacgacgacggcnanagcagcagngggggcaaaancngcagaagcaaccccctcntcggccgntccgccccatgggatcgaggccgccctagggttttcccccaggttcggcccttcggtttcccccttttcggccgcgcgcgcgcggggagccaccaaaccctaggacggcaaacccggcgcgatcgcccacggtggaggcctcgtcggcggccgagaggagccgctccgggctcgggtcggggttccggtacctcaccggcgccgcctccgggtggtgggaccggtggatgg

SEQ ID NO: 2019 - DNA, 2000 bp, Oryza sativa
  N_region (1909)..(1909): n = any nucleotide
aaactaagctaaatcgtcgcattctgagtgttgatcgcatgcggacatgagctttccatgccgccagtgcccggaggctacaatagcatagacgaggagctcgaagtcgctaaagagaagcgcaacactaccccagaaccatgactcgacgcgcacacgatgcttcatccatggtcgaccacccgtgtgttagctaatgtacatcttaggtggaccgtctcccatgctcgatttttctccatcttccgctcctcctatgcatattattttattttttaaatttaaaataattaatacttaattagttatgcattaatgactcacctcgttttacatatcttcttaattttcttcttttccctcttctcaaacatggtctaaacttagggaatctagatacggtgacagtaggatgagaaagaggcacccatcataatcgaccttattcggtggcaccaaactcactgatcacgtctccttggttgatttgagcacatgccgagaggaaaaagaagaccaacgacgatggaatggggtcagtagttgatttggcctgtgacaacggataggagcagtggtgagaagaagcgagggagagagaaaaacgagagagctagaggataagtgtcatcttactattattttaattcgctaagataaaaatcttatgctcttcaatttaaatatttatcgagataaaaagcatcgaatgcgaaaaaaatataaaactttcataaaagaaaatataatacaagataataaatgacctcaacctataaagagagtgtgtaataccccttacaaagtgttgtggttccaatttacactcgttaggcttacaaatatcagtttatttgtttgtcacgcaaattttcgtctgtcgccttatgtgcaaaggcaacagtatttttcgcccatccattattcccatgctacaatcatcgggcccacatgttataagcatcatttacatgccacacatgtagagtagactaattgtccaagaacaaatttgcttttgtggtcatagaacacatcattgatgcttatgatcaggcttagttgcttcgatattttttttaagatcaaacagtactcatcccactactacccggtgcaacgcacgggcattttgctagtattagttaatatacttaacactaatgatagtaattaggaaagattctggagatttttttactaatagattgaaaatattttatgttagatttgaaaacttttgatttaagttttaaattttaaagtcaaattttaaaaacttcaactcagattcgaaaactttcaacttgagaatcgagattagaaaactttcaactcgagaatcgagattcgaaaactttcaagttcagattgaaaattttgaaaactttcaatttgagatttgaaaacttttaactcgagattcaaaaaatttcaaatcaagatttgaaaattttcaaatcgagattcaaaaactttcaagttgagatttaaaagctttcaagttcagattttaaaattttcaaatcaaaatttataaactttcaaactcaaaacatgctaaagataaaaaaaatcagaaaaaagtgggaaagaaaaggaaaaaaatggtaaaaaaaggaaaaaagagcaaggaggcgcgcgcgctggcacagcggcgctgggtcttctaggcccgaaacgcgcgcgcgtattagcgtttccgctttagacccgcaaccaaaatacccagcccactaagcctgacccgccccggcccggcctggaaggtccccgagcactgacgcgggcacggggcccactgccgacgtgccaatcctggatcccacacgctcacgcgagcagagcacgaccgatctcgtctcgtctcatacaaaccccgcccgcatccgcacccggatctgccacngccgcggcttccctccccccctcctcccgatccacccctcccgccgccgccaccgccaccgccgccgccgccggccggcgagagagacagg

SEQ ID NO: 2020 - DNA, 2000 bp, Oryza sativa
aaatcatatataaactttacatgtgaaaagtttacctgtgtaaagtttacatataaaatgttactgaaaattactatgtaaataaagttagtatatgtaaactttatacgaataaagttacatgtataaaatagaattgtttatggtagattttagtctaaatgagaaaagaaaaggccaggatatgcttcagctagctagtgggcccaggatgattttgcatatacataacataaggctatagagagacttgtgagtaagagcaggacacgcacgaaagaaataggcagcgtcttccccttccctttgtggcgtaaaagaaaagaaaatctcccgtctcttcgtctcctccgctccttgcgccgccaagaagacgagtcgggggcggcgatctccatctggcgagcagagcaggggaggggaggggatcctggtgagcctctttctgattcatctctctctctctcccatcgggactggaatttgcttgcgttcgttcgttcgttaaccctagcttctattctagatctggaagaagctcttcccttaatttcagagccttaaccttaatacaagtaacagtttgtttgttccccgaaatgtttgtgaacccccatgtcccaagttggatccgccccctggtttggaacaccttgcacttttcaatttccggtgatttgtctgtaactgtgtactaggatagtctcttagtaatctatccatgtcaaaaatccttggttgttacgaagaaagaaccattctggaagatgctatgcaattcatttcctaattcttattgcttttgtatctgtactacctgaccttatttcttagtttctttatacctagcttatattctctatctgaaaaatgtaactagtattgtgggtacaccaactgtaatttaccctcttccttatttatcgagaaatcttccttcttatcaatcttttattgccctatcttggattcttttcggtttagtttgtttctaatttcatgttagtaacggatatgaaatgtgggagaatgccaaattttagtgggccttttagattacacgctttctgtttcgtttatgcatatatttattctatttattgtaatttgatatgttcagtgaaaagttgaaaactttgacgcaaaatgaccttattctgattctttaatgcactgttttccttcatagtataacttagtggccactgaaagaaatactgtggatgaatgcctattgatagtgtaacctatatgctatctgcttttcctcgtcaaatggagatgaccgaacaccaatttgtcttagaggatatatatggaacatgagtgaaaatccattgagttttaaagaagtacaatgccacttcatcaacttttgtacataatcaattggctaatcttttcccctgatgccatgttgttgtttgtcatcatatattgcattcacagtcagaaatttgaagaacatattagatgcatattaagtgtcatggttgatattggctttcatgtttactggaataaaatcccttctatccttaggcattataacttacttccaaataaaataaactacttttggtaaaaatatattttggaagagacctcccacatatatattgctacctctactgtgggctaggtagacaatcatgagactggatgcatcatgttcagttctttgtggcaaaatccgtaatatagaagatatacaatgtgatgaaccttcacgctcaccttcagccacttttagggtggttgccttaattgtttgttatgtgttggtttcaagtttgagtgctgcttttgtttgcatcatatcatttttcattgagtatcagtttgaatgatatctttaagatgaaactctgatcatttatttgaaaatcctggcagtttttcatgtacggtaatcataacttcatatattgattatttttcaggctcagtcttgcgactttcttgctgtataatgagatcatatctttgagtgctcaatg

SEQ ID NO: 2021 - DNA, 2000 bp, Oryza sativa
  N_region (21)..(21): n = any nucleotide
  N_region (95)..(95): n = any nucleotide
  N_region (548)..(548): n = any nucleotide
  N_region (563)..(563): n = any nucleotide
  N_region (590)..(590): n = any nucleotide
  N_region (629)..(629): n = any nucleotide
attctactctcaattttattntttcctggagtttgtaggcacaacaaattaagattttatgccaagagaatatttttgataaaaatactaataanaaccaaggctgcatatatgtgtttttttactactactagatttttttgtgcttgaaaaaggtgaggaaatgttgccaaggtcattgccttatcttccaggggaatagcttaaaaccgtgtgaacgcctatatctttatggttgagaagttctcaaagaatctgcccgcgtatatagaaataaaagtacaagactcgtcattttcacgctattttgttccaaatctatttgatgttgaaccactccttgggttctatatcttgtgagctagcgatggatactttttcttcatttcctttttataaaattgtattcattatctagtactataagatatatgtatcttttaagtaagtacacatttgcatgcatttattaatttgaactacttctatttttaaagataaatccaagtctaaaacattaaaatatgatggatattacctacatcccntaagactctcctttnccctttaatatgagatgtaatagctangatgagacttaagtcatatcctctaaacctgctaccgantcttgattgtagagtagggcagccaggaatataatggcaactatccacaatagtgttgctgatggtgatggagattgtaaaatcttaccttacctacagagatcatgatttttttagacttggaaagaagaagagaaaaagttaatggtgtataaaaacaagctatacaaattgaaagaaaaaagtgcatatatctatatctaactggtctaatttactcgagaaagatgtgaggattcgaatgaacatctttacaaagagaatgctccaattgtgatcacatcaaatgcaatgtgaaataactttagtttcggcataaatgagaaaaggggttcgataacgaagaatgatatatgtattcagagcgcatttacactctcatggaaacaccaatgtggcaacctatgatgaatattataatcatgtgaataagcttaacatagttttaaaaaattaaattataagagaaaaaaatgccacattggtgtttactgttactattgttaccatggatccaccaccataggatgcgtgggctcgtcagtggatcatcaaaatgagaccctcactttacattttttttctcttataatttatttttttcaaactatgttaagcttatttacataattattctaatgaattatacacatttttttttcatattttggaaaatacatatttctaaaaaatatattactagagcaacttgttttaagatagtactccaagttgttaagcttattccaaaaccatgtaaataatccgcgacaataataatccgtttggcaatctaaatcaaacggcgcatataggggttgtttggttgatggctaagtttactatacctcactttgccacaagtgtgttatgccacacaaagtgaggctagcaatttgttagccacaagtgtggctaagtttggtaagaatttgagtctataacgcataggcccaatgactagtaaagtgaggcatgacacaagtgtgacaaccaaccaaacaatatactaacaaattgtgacatgtctaaggtttggcatggcaacctttgagagccaaccaaacagccccataatacatcgcagcaaatcaaatgaaaatacaactcactttttgcagcaaaccccctcacgatcacctaaatttcgaaaagatcctcaaagccccaacccttcttctccatcgcgtcgcctataaatacccccctcgccttcctctcacttcttccgccattcccctctcctcctcttcttcttctccaccgaataaacccccgcaaaaaggtggtgagttcgagagagagagagagagagagtggaaggctagggttagggttagggtttcctcctcgccgccgtcgcgtggcgcg

SEQ ID NO: 2022 - DNA, 2000 bp, Oryza sativa
  N_region (417)..(417): n = any nucleotide
ctacagacagtctttagctaatatttttgtatatcgcaatgggcccatacgatgtgggatgagctacacctgtccatacaaactaaggataggctaagagtgtgaattgagcataaaacattagatctaaccggttttccgttaactaactatttatttatttatttttttaggaaggaggtggctacgcttcgtgcggcattggagtggggagaagatgatggatgactcaaattctaaggagtaaacacattttgaaagtacatctacataattatgataagcagtaagttattcctgctaatccaaatactccctccaactcaaaataagatgcgcaaccactttttcaacgtttcataatataaacatgcacatgcatgcatgcatgtaattaactaacaccatcattctttnatttttgttaaattagagatctttagggtgatctagtgaaattaacccttttttttaaaattagagatgtttaatttcattggatattaacccccattggatttctccaccctcaagttaactaacacctccaagatcttgaggggtggagtatgcaatggattgttttattgaagtaatccaaacaaacaattgataataattatttcttggcctttatattagtgaagattgcgccttatattttgaaaatagagagagtaataatagctaaactaaatgagtaataccccgcaatttaatcaatggctaggggataataacctatgattatggtctagggaaggtacgagcattaatgcaattagttgtaacgtacacctggattagcatggacaaacttaatggagaatcttggcgatttgatgaatactcttgatatggagttcagccttcttcgtgcttcatcttgtttaacgcgaacgaccttccttccaaaacagagtcagagtctgagttcttattccaccgagatagtactactagtattattttagtgttcgaaatggaagaaaataattagtattgagcattgccctacattacgtttttacagggattccactattgtgtagaaaccaaaatcgtgtactttacatataagtaatatcttaattagatagtaaatcctttttctttgcgaggcatattagtacacttcctttcttggcgaggcatattactaattcctttacatacttttcttattaggaaaatctgtttcacaatgtcttccattagaaaacgacaaatatattgctattgcagttttcccacattttgcctttgctgctttaaagggctgatatagtttgacatgtagtgatatcaacaccttggaattagaaaaataactactctgtggctccctaattactctttactttttttttctaaataggcttagaaaaaaaagtactacaaagggatgaatgtgtatttactattcaaccttagcctccttgaaaaccaaaaaaaatgcatagaaaatagtttaattttccacatggaaattttggtaggctttaatccatcaaatcaaccacactaattactccatcatttaatacggcctcatggctatggaccgatggacatggaccatgctggtacagtatacgtgcacagtagcgcacgtgcttcacacctgccggtgcatagaccgcgtccacgcagactctataccctctccttcctcactgtcctttcctttccaaaataccatttcttccaattcgcagctgttgcgatgaattaaaaaaaaatggccaaaaccttgtaaaaagcaaaacccactcgccactaatcgacgccattggcgagagctcgagcgcgcaacaccaccacgcggtagcctcccccaacctccacctcctcctcctccgcccgccccagagccaccggatggcctcgcttctgtaggagtagaggcgtagagcccagcgcgagggaaggcggcgattgatttgatttgaccaagattggtcggccgtgccgtctggtctgaggagcccggctctggg

SEQ ID NO: 2023 - DNA, 2000 bp, Oryza sativa
gagagtgacactctcagcataatgggctggctctcagcataatgacgctcgtcggaataggcttgcgtggcggcgtggacaacccattcaataggggaccaagcataatagtcgagcagtcgtgggctcacctatcgagggtagaccatggaggaagaggactatgatagagcttgatggtgtcgtgatgaggaaaaggaacacattgacaggaagcgaaggacctcgccagaacttatggaggaagtggaggaccatgatagagcttgagaaggaagaggaacacattgatgatgagcttgtccatgcaagaaacaactatgacatatagctattgctgggaaagaaggggtcatggtaggctgagggtcaaggatggatgtttttcttatggtgaatcacaccttattttcatcactatacacgcacacatttgcagtactagttacggtcacttgacatagtgctacattatttctgtcctcaacaataaacaatgcacattttctcgttcggaagtgtcgggatcgaggtccaatctcacccacccaaaatgcttgaagtcagcagtccatactttgccgtttatatgacatatgctcaatctaaagacggataaatcattgaatacctgagcatcatgccagcccacctaaaatacttaaaatcgaccattttctccatgatgctagttgatgatttagcacttctaaatggagaatatgtcatcctaacccatacattacgaattcagagaagaatctcacatatcactatgaattcatgataaatgagaatctaaaaatgacaaatcatcatttttctcatgcagttcaggaaggaaaccacaaaagcggcatagacgttccccttgcgagccatatactatgcatgcgaaagattttattattttttaaagatttcataaaaccccatatttattgtcaaatttgtgcaaaaccgctgatattttgtcttgtgtctcataaccatatattttatggtctaaatgtttcataaaacaccatctttatttaaatttcagttgaattcaatatatctaaaacaatatattttaaaatggtaaatagttaaaccgacaacctcaatcaagcaatcaacaactaaatgtttcatatacacgttatatattttatgtttaaaatttttagtaaatacttgacaacaactccctccgaaaaaaaaggagataaactctaactatctgatacagcagctagagtttactttttttttctttaagaacggatggagtatatatatatatatataagggtggggggttttcaaaactttaaagtgttaggtgccgctggttataatacctgtggttttatatgcaacttgcatcataattcataatgagtggggtttatcgaaatttcgctctattttgaacgaaccgagcaaataattcgtgattcgagcaaatataaatagacagaaacacccgcctttcctttccttgcgcgcactccctcctcccacccaccttccccccttctcctctttccccttcacaccttttcgccttcacctacacacaccggaatccgagatcccggtgaccgcgtctcgcacgcgtccccctcccttccccgccgccggatccagcccccgcgcgctcgccggagtcgccgccgagctaaaccgcgcacccgtcccccgcccccgcccaggccgagcccccgggtctccgcgcgcacgtgggggggacggcgccgacgccgacgccgcgccagatctgagagatccgcaccgacgccccccatcctcgccttccccgaggcgtcacgccagatcccccagatctggaatggtggtggtgttgttgctgctgctgctgccgtaggtatgcttaggtgagtccgtgatcctcgggactcggtcgccgcggcccgcgggtattggaaggaggcaaacctcgtcgtcggcggcggcggcgtgaggtgctgcggagaggtggtcggggaaggaag

SEQ ID NO: 2024 - DNA, 2000 bp, Oryza sativa
  N_region (1939)..(1939): n = any nucleotide
  N_region (1974)..(1974): n = any nucleotide
tccatggtcttggccaaagctccctactcacccttgcccgtgaggggcttgttgaaggtatgtcatgaggaccttcggccaacccgctgaaaccacctgggctatcaagaatcgtctaagtccatcaggcgaagaccttgggcgaagccagaagggtgaagactaaggggtttgtcatggggccgcgggcgaagcctagcgacgaaggtcaacgggttcaccaccaagctcgatgatcgaccgaaagcttaccaagggcgaaggccttcaagcaaagcatgaagccgtcgccctaagtagagaatgccttcggctgagggccagggaggcctggcggaccgtggaggcccttcgccacctaatgggccggcccagaaaggccgccctagggtccatgggtacaaaagacaatgtatacccactgtaatatccctataataaagataaccatgtaaattcccatataacaacctaaccctagaggtatgagcctatactagcattataaatagccccctagggccatataatgggggatccaaaattttttaccagttaatatactactttactgtccaaatacacctaaccaatatccacgttcttcgatgtgacgtggttgctgttcgacaacagtaatagctaagaccctcggaatcccggagccatattttttttacataatagattgaaaaaacggcctctacattctcttggatgtgcacagacaaggagccatgttatagttcctcttgtggctataaactctgttcttagcaacatatatcatgaaaataattgagtcagtggacaaacgcatttagctaaaaccaaaagtcaatgtgaaatgaacgagatatcaaccaaagacatctacatgtagtgtgtatcccaaaggaaaaggatatcgtcactgatcgacccggccggctagctcgcacgccaacctagctctttatttgtttatttattttgcaaaacaccaagctagctttttatctaccttataagagcaattataatagtatattataagctagctaaatgctgaggtagaggagaaaagagaggagagggggataagctgtgtgtaaacttatagccggcttgaacgcaagaaccaagaaactctgtgagagagataaatgggccctatattaattataaagagctaactattactccctccattctaaattgatctacatatttcatagggacaccaagaccaaaaaaaactaatgactctctcatactatatttaatctagtaacaaactcgatgcatgcaccatccccactattccctagctaatagtaaataaagatattgcatgtgagttataaatacttgtgtgcattgatgcatgcatcaacgcccatttactccaatgcacagataacgaatagacttaataaatgaacacaaatatatagatcatttagaaataacctaaaaaaactatatgtagattaatttggaatggagggagtatatgagtaagctaagagaagactacaaagaactttatagccaacatgttggctgtattattaaccttgctttaattcaccaatctatctatctaccctataattcacaacacatcttagactgtgttcttttccatgggttccaacccacccctcgttttccatgtgcacgtttttcaaactactaaacagtacacgttttgcaaatagtttatatagaaaagttgctttaaaaaatcatattaatctatttttaaaattttttatagtaaatacttaattaatcacgtgttaacctatcgctccattttccgaatggaggggagggaccactccaaaaagaacacagccttgctcatcatcatcattggacaaatccaacgtgcctcatcactctgcccttatccaacggtcctgattcgccattctctcaaaaaaaaaaaccntcgccagttgccgcccgcgcggagcatccatcctntctacctctagtgcgcccaatcccgg

SEQ ID NO: 2025 - DNA, 2000 bp, Oryza sativa
ttactaatacttaattaattatgcactaatccatcgctctatttcacatgcgtgtagaagggtttacgacttgcaccgcccaatacagcctaagagagtatttaagaggaaaggaaaaaaagaagattgagaatacgtaaaccgaggtgagccattagtgtattattaattaaatattaattatttcaaacttaaaaaatgaattactataattattttaaagtaaattttctataatttttctaagaaacgcacagtttagacatgagcatgaaaaacgaggtaaatcttctctcaatctcgttgcaaacttacaaaattagaacaagtatgcaatcccacgtcatacttgtcatctgcagttcttcactccccccaaattatattactcaaacggatatgcttgcgtctttgcttaacaactaattaattaattcgccgtagtggcacatacatttcaggctaatgttcatggactgatacgatactatatagtttgctggtcagactgatattttttttattggacaccggccgggcgggcacctcccatctcctttgttacaggttcaggaagcagtgggcaatatgcagacagggacttgtcccctttactcggaagtggattccattgcgtagatgtgcacgttctctttctttttctctacaatattttaacttgtggaatccgatactccgacgttattggtgcacgaggaacgtctgatcatcgtttccatcagttgcaggcggtgtgcacgagcgacgtttgatcaatccatggcgtacctgatcacctctttttttctaaaaaaaagaaaacacggcacaaacgtaaaccctcacgaatgacattcttatctatacacatgcacgccctacacttattaacatatccgaattcttgaactttaccccctccgtttcacaacgtaaatcattctagcatttttcatattcatattgatgctaatgaatctaaattcattagcatcattatgaatgtgggaaatgctagaataatctagattcattagtatcaatatgaatatgggaaatgctagaatgatttacattgtgaaacggagaaagtatatttataattgacgaaaacattgtatatgtctcgtcgtcgatggataggtttcagtaggaatttctactgaaacctatccaatgatgatgagacatatgctaataagtatagcccgtgcatgtgtatagatggtgaaaactgagaagagaaagccttcgtttttcatgcacatcccaaatactagatgtagtatatttttaaaaaaaaatctataaaaatgttgctttaaaaaaatcatactaattaattattcaagtttaaaataattaatgctgaattaatcatatgccaacagtaacagtgcatctcgtctatgtatcttcttattttctctcctctcagacacatcgtaaatatgatatgcgtgtaatgaaaagaagattcgaccctgatgcgcggtccggatatgtctctccaaaacacaagcagatggagtatatctttagctaattaagctatagctatatagctcgcagttggtcgcacgtcagcaaaactagcgtagctatagctaaggctcggttgctgcacggatggatggtccaacctgacgacgatcggtcgacacaccggtgcggggcccaccacgccacgccaccgtgtccactctcctcctacactgcatgctgctgctgacgtggctcccgcatctgccgcgcgctataaattcgcggctccccgagctctcaacctcgtcgtcgccgcagcagcttgcgatcgatcgagagctagaagaagcagcagcagcagctacttcttagctcgccgtcgccggagctagctcgcgtgtgaccaccgccgccgccgccgccgccgcacgcagcctcagctcgatctctgcactttgttcgatcgccggccatggggttggggcgagcgctgagcgacgcgaagccgtacgtgg

SEQ ID NO: 2026 - DNA, 2000 bp, Oryza sativa
tcaaacaactgtaattgggcaaccaggcgaaccaatctggaatcaagtaaagctctgagacagttatactttaagctcatgggcattttgatggaacctttttcttgtatactatcatgctcataagcacttgacatcaaacaggactttcatatgctagttgcaaaccctcgcaaacagaagttgtgcattcaagtaaaggattcagttggtctaaccgatgtcactattggcactggagaggtagggtttcatcttttgcaaagtttgtttcaattgaaagttttccttagtatcctctctaagctgatgtatgtgatattacttggaaatttgtagtttagtgtactgttttacagcagtttgctaggtcaagcaaacatactatatcagtgatgagtgaagtgtattttgtttgtatttttgggtgtcctttgttgaagtggaacgtgtttctgagtatattctatttgccaggttgagttaggatcacttaaagacacagtacctacagacaaaattgtaactttatatggaggatggggcttactgggaaacggtcaaaggggaagtactccttcgcctcacatacaaagcatatgtcgaggacgaggaagatgaaggggtaaaaaatgagtttgctgcgggctatgtttcagacgaggatgtgctagattatgtccaagacagtacaagtaagcaaagtgacatggatggtaaagagagagagaccttcatggatctgctggccgcgctgcttgtcagcgaggaatttcaaggcattgtgtcgtcgtctgaacccggaagcttgagagatagtgagcaggctgctaaatccagagatggtgaaaatgctgcagcagctgctgatacagggactgtatccaatagctccacaggtaaccaactgttgaattcactatgctggttacctgcatagtattgttggttggcttgtgtttagatttccattactacatcaccttgattgattttctgattttgtttgtgattcagatactgctctagtgtggcttgctgccataacaagtgtgatggtgctggtctcatccaaccttggtggttcaggctatttcaacccttgaagagttgatgcatgaagaatctgatctgactggagtatttggacgatccatctgtctgaatctgatcatccgcagctagtagcagaggtcgttttgttttgattttttttaactttatttttgccgacaagtgtatattccattcccatgtatctaatgttgcagaggaatcaaagaatggcttggcttttggcggctgtctctcctccctttttctatttcatacgattgacatgatgtagcatatcctttttgtgcaaccatccacgcacatgatttaatttgtgtgaatgggaaatttggagttgcgttcatctctcctcttggaattggatcaaagattgcaccattcattcatcaatagatagcagattagcagaagacatgatttcgtttgttttttttcctaaacaaaattaagggagcaagtgcaggcatgctgaatttcgtttctttttgtaaaactgatcggttaccgacaaaattcaaagaaattccatcaaaacctatcgaattccatcgaatcatcgctcgactttggttatcagtctttttttgagaactggttatcacttatcagtctgtgcccgtcgagaagaaggtcccagatgaaacgggtttgggcacactgactgactggcgggccccacgtgtcagcaacgcgaaaggtcaggagagaaatggcgggaatgaatggagccatttcccgcgcgttccacaacctcccgcctcttggtttccccaatctcccgcgcgcttgctcttcctgggctttttagtctactcgatctaactccaaatcccatcaaccccgccgccgccgccgccgccgccaccaccgcgagacgcgagaggagagtgaaagaaagattcagagagagagagagagtaagc

SEQ ID NO: 2027 - DNA, 1057 bp, Oryza sativa
  N_region (3)..(3): n = any nucleotide
  N_region (5)..(5): n = any nucleotide
  N_region (9)..(9): n = any nucleotide
  N_region (20)..(20): n = any nucleotide
  N_region (34)..(35): n = any nucleotide
  N_region (40)..(40): n = any nucleotide
  N_region (116)..(117): n = any nucleotide
  N_region (624)..(624): n = any nucleotide
  N_region (667)..(667): n = any nucleotide
  N_region (956)..(956): n = any nucleotide
agnanggcncgttatcccgngccgtttttgggcnnacgcntaagcccgtaggccggcacggcacggcacgtttgctctagcgtgccggcacggcacggcccaggcatggcacggcnnatcggcccatttatttttcctacgattttctaattttttccatatatttctcatattttttattttttgccacattttatctatttgtacccatatattttatgatatatttcctaaattttcctcacatttatcctatatttataatgttttcctttatattatgttttttctgccttttttcttttttcccctcaaatttcaatttttatgggccacatgtaccagtgggcccgctaccagcacacggtccgctacagtagccgtgccggcccggcacggcccagcacctccttgggccgaggccttggcacgtgggccggcacggcacggcccgctacaggagccgtgccctagtgagccgtgccgtcagtgtgtcgtgctgtgctggggcgggccgcctgtttggcctgctataccttctcctcaccatgtagatgagagagagagggggatagatagaggagggaggctgacatgtgggaccacatgggtcccacctttttnctattatttttgtgtagctgacatgtgggtcccacgatttttnattatttttccgggatccaattcttacgtaagcgccacgtcaatgtcacatgggacgaggacctagtcaaagggagccacgtaggcgccacgtcatcaaaaaccgggtacaatactgctgagggaccttttctgcacggtttcgtaagttgagggatgagttgtatccggttttgcgaccaagggacgaaaatcggactgggcgacaaataaagggacccaaagtgaacttattcctactgcacgtgctcgtctcgcccgagcagaagagtcaagagaaaaaaaaaagnaaaaaaaaaggagaggtgaggtggcacgcgtgagagtgaggagctcgcgaactccaaaaccctaaccctctcggagcttcacatcggcggcggcggcggcg

SEQ ID NO: 2028 - DNA, 2000 bp, Oryza sativa
agatacatgtcagcatattttcctacttgaaagagattaaatgaagagagagagcaaagctatctattaacctggagataatctatagagaaaaacgaggcaatggattagagagctatagatacccatgtagacataccattgaagtggtttactattaatctagtctattgctgagatgtacatgttttatagatagcaccttactttaccattgcgggtgctctagtagctccgcaaatcccactttaatatccttcaatgatttcacctttcctcctcttcccctattacatctttcaccagcaccaaaccctagcagacgttctctagtacttcctccgtttcacaatgtaagtcattctagcatttcccacgttcatattcattaatatcaatatgaacgtgggaaatgctagaatgatttatattgtgaaacggaggggtactatttcctcaaatcttgttccacagccctaccgagctaggtcacatgcaaacatcgtcatgtgcataatgtcttcagtcttcacatcatcatggcctcatggggcattaggacagccttattgccaacatgtctattggcaagaatgccactgaaaatatcagattaagcttccatagtttgtcccaaaaatgcttgtgtcttttgcattttttcaaaagccgggtaatataatgaaaattggcaaatattgctactgtggacgaagcagacagtctgacccctccccttcacgtcgcaccactcaaatatgaatatcatgctgcagtgagctgaagatcactctggattattctcacatgtggatgcatgtaaagcatgcaaaaccttcagatttcagactagacagcgcatcagatttcaatcagagcatgtgtttcgctatgcaacctgtacgttcagaacttcagactcttgagtgacagcattcagatttcattagaggcagcaagcgtttcactaatcactatccgagttttgcgttccgtgatgaagttaggcgtaggtctcatcagattatttactactgagtttttttttatttttgaaactttttaatttttaaatttaaaaataaatcttttcaaaatttatttataagatctaaactttttgtcactctaattgaattggcatagcaaaacaacactatcacgagtgttattttaccatgccggtatgactggcgtgacaccgttatctcgctttgtttggtgtgttagtattgttttaccatgtcaaatgggctggcgtgatttaaatgttcagattctgaaaataagttttagaacggtatattttttaattaaaaatttcaaaaagaaaagatctactactgaattgttgaaacgtattatacgctccatacttcaggaagtatataaacttttttaaaattcagtagtatacttgtatttatggccatacgtatgtgtttttcatgtcacaactttaataacttctatttaataaatttatatgtttacgaagtgacatatcacatatttatccatttaattaattaatttttaaaaaagaattaacagctatttagatgaacgagggtttagaatacttttccacgcagatggtgatactatatatattgagttgactgttcaatttaactcaaaagctaacatgatgagtgaagaggagcagttcaatttatattcctagcactactaatgcacacggccgcacgtcggcgccggcgacagataccatcaaaccacaccgcgttccaacgaggagagatcagaccagatatatatctgatatttatctgcatgactagtattctctcccttttatattataaatcatttgattttttttaagtaaaattttgttaagctcaattaagtttatattaaaatttagcaacatcaaaaatattaaattagttttatcaaacgtaagattgaatttattttgataatatgtttatttttttacttaggaaaaaaaaccaaacaacttataatataaa

SEQ ID NO: 2029 - DNA, 105 bp, Oryza sativa
  N_region (54)..(54): n = any nucleotide
  N_region (58)..(59): n = any nucleotide
  N_region (72)..(72): n = any nucleotide
  N_region (76)..(76): n = any nucleotide
  N_region (82)..(82): n = any nucleotide
gggagagagagggaagcttgcaggctgcagctaactagctaggcaaggagagtnaggnnatagatcaagagngatnttgagnccgagagagagctagagagagat

SEQ ID NO: 2030 - DNA, 2000 bp, Oryza sativa
  N_region (65)..(65): n = any nucleotide
  N_region (511)..(511): n = any nucleotide
  N_region (1233)..(1233): n = any nucleotide
tataaacttaaaaattggaacggtgcaggtctaaatggttcaaactccagtacagctagttctgnttttgaatctcttccattggcaatcaaatggctaagggaaactgctcaacaaaaccaatctacttcatatcaggtgaaaacttcttatataccttcatttttgttctcccaattgtttgtatcatgtaggactaatttttcttccaaccatacctagctactgtaccatagtcaggacacagggatatcacataattcattgtcagcttagcacatgtatatgtagttgtgtagtgaccatcactgattcatcattcttgtctcttgtgtacccttccatcccttcgatgtgcttgcgtgtgtgcaactgctagtgaatgcacagttcttttttcttttttggttctgcttttccatgatctggaatacctagtaattgtttatgtgcatgtgtttattttatgtccctttaattatgttatacctgttgttttttatgttttttngtctctagcaggcagcagctactttcaaaattgatgctgatacatttgcatttgtacactttgaccaggtcttagttactggctccctgcatcttgttggtgatgtattgagattgctcaaggagtaacttcatccagagtgatgcatagttcagattgaaatggctgcttgcagtagcacaagctggccactacaacaatttatgattgggatacaaagcgaaaccacctgattggaacttggaagaattaaagaatgaaagtcgtcttgattcagatactaaccaactgaaaacttgtatttctccaattttcgtgtttctgcctttccaggcagtgtgtgccttgtagtctactgttgttcagaagagtgccacccaattgtggaatgtacaaacattgaataattatatgatgtcactgatgccattttttagacttacctggattggattcttcccccaaattcccattctataaagcaaaatgctaatagcttatacatttatatcccctgttggaagatagaaactgaaggtggcatattgacatcgttagcattttcctgcaaatacatgttattgtatttttgggcaaaagcagactgatacgggtactctgtctttttcagaatacatttttggggctgaagccagatcaaaaataatttgcttgtagcttgcctgtggccctgagcaaaggaagatttcacactttgggtnagacatacatcttcccccctgttattccagttcgtatacaatagttactctgggaaactgtctgttcggatcataccatgagctagtttttgttcttgtgccttttgttcttatgtagcttatgtgtcatctttctttgtttgtgaagaaccattctttttaaggtcacatttctctaaaaggccaatgacatgcatgctgtttaattttatcatgtgtgcaaatggttatacatttgtttgtttgtgttattctcggtgcactaagaatagcttggtcaacttcttcctcaaaagagaaaaatgaccggctgataacaatggcatttaaataactcttctgtaaatgtcttgggctattgttagtcactaactattattgcaccctaaatatagtcaaacactttctgtaggagaataaccacaaattataaccatgtgaggagtctccaaagttagcattgtgatgtggcacatctaatctcatctctctgaccatttcctctggcttagaggtggagttagacccaagcctcttatatttcttccctagcttcagcctctcccaaatcaggtttccagaattgcatattaaagcctcccatcaacttcttgcacacaccctccctttggctttcatctgcatctattcagttgcagattgagagccaaagacattatcttgattctatcaggagggttgtgctagcgaattcttgttagcaacaaattgacatattgctcggcacatccccaccgagaatacca

SEQ ID NO: 2031 - DNA, 2000 bp, Oryza sativa
  N_region (273)..(273): n = any nucleotide
ggtcagcagggagagccactgtgttggttgcaatagatccacttggagttgagaaagctcaagagtggtttatacagagacccctactacaactgcagcactttagagatatgtcaattgatcccaaagtcagacctacaggagatagaaaagcagacgaatcaattccatttaatttcagttcatcctatgtgtaaagatacttcttaattttcaaatagatttcagtaaaaaaaatgactgtctatactaccaaatgcaggggaatatttngttttaccgaggattggaatcagctcttcacaacttcgccgcccttttcaacccttcaatccaattttcatcaaatcagtcaaaattatgaatccaaccaaataaaaaaattgaatactatatattgaccgaaagcacctaacctaacctattgtgcattcaaatatagaggcaaagtaaaaggatatacatttcattagagaatctgataatctatcaataccaacataaacattcagaataacatttatgtttatacctctaatttactcgcacatcccgacatcaggcatgatccgcctctgccccacctctcacctggaaggaaggtctatggcaatcagggtggagagcagctgaaaacggcagccatcgtgaggaagacagacgaattgatccgtggcatttaacatctaaaataatacagattgcatcaacggggaattttacccctttccctctacctcttgcgcctaattagcttcattagtactacatgattcggtgctaaccaccacagagcaagttgcgcatcagcctgcttgtctggaggctccaaatctgtcatacactggaatatatataaatagaaatttaaaaacataaaaaatgttccaccttatgtagcaaaagaacaaaagtgaatcacttggtaacaaaatcaattgtctactgcttcttcaggctccatttctcggagagaccactcaaaactcaacatgatgttttcggttatctggcgtttaaagattaatagtatgattatgtgaaccatgttaacgaattatgtttgagtgaatggatgcaaattaacagacaaattaacagagagagaaccacacctgagaggagaggtcggtgccggtgatgatggcggcggcggccacgacgccgttagtcagcatgggagaaggtgcaagcaacctgaggccacgacggctgtgcgcggcgaaggagaatcggcgacgacgactgaacggcggcggcgcggaggagatccctgaggcagcggggagaggggaggtgggcgatgcgagggagaggggagtgcggcgaggggaggtgggcgacgcgagggagaggggagaggggagtgcggcgggtgaggcgggcggcggaggtacgacgtggggagggcggcgcggcgcgacgtggggatggcggaggttagcggcgcgcttttttttctatttttcttggtgcgtggttactttcttagggatgacaggtgggtcccacgcaacaacggatctgaaaggggattgcaggattaagaatgaactcgtactttatatatatatatacacacacgttaagctacttgttttatgtggggataaaatccagaatcaagagctaaaagaaattaaactgatcctaataaatggagcagaagagaaattaattctttccgtaaaatggacaacctctataatactagtactcacacctgtctgtagccatcaacgcggactcccctgacagagtggccccacccaggcgcgtacctccctagtaaaaacgccgcgccggaacccgtgagaaaataccggcgaaactcgaagaccaattaaattcgaccgttgccgttcccccgtttaaaaatcacttgcccaccgcgatcccttccatcgcctccccatccatccgaattccagtcaaaccaacaaaccaatcgaagacatcacgcgaggagagaaaaaactagccgttgcgctactcctccg

SEQ ID NO: 2032 - DNA, 2000 bp, Oryza sativa
taaagtttcaattggtcagcaccattttgaaaaacttggtgattagctatgcatactctggttttggggaaagaccgcttgagtaataactttgatcagtgatatttgtagtacaaagtacaaacgagtttggtagaaacaaactcaaaactaactactcctctagctagtagaagtatatcgatctctaactctacgtacgttcagttagtcgtttaaatatctgtaacacgtacgttcaacacaagatccagagcatgaagggtatcgatcggctgatttctcggaacttcgtttctgcatgtttatttggtacatcgggtgtgtcatgaaatttgcatattttctcctctggctatgatctctattagtgtggcatcaccattgtgaactgatctcctccagattccaatttaggtgtgtaataataatctgctctgctacacgcctacacagtgtgatcgaggttaactaatggtaaaaatgagtgtataaacatctagatctagttcatccctacgttatagattaaagtaattaatttctaaccgtgtggtttgcagtcgcaagagaacggtcaaatgcatatagcgtcatagcgagtcacaccttaatttcaggtccagttctttcagtcgcaagatatgcgggtaatgcaggtcaccagtgctgcgttccactgtcattcttggcagcttccttcgttttctcttatgcgttttctcctgtacaactgtaattttttttttcattgttacttgtaccgccggtcactcaaaagacaaaactgatatttgtaacaatcagacaacacagcagtcagtccatggctatcagctagtagatgcacgtgttctttgtctaagacttaatcttctctttctttacaaattatccgttgctcgaccactctcccaatccaattctgaatttgtttcctgggaggcatgtaacgcaatttgtcagacgatgtaacatgcagtttgtctggcggcttgacgactgctattactgatctctttgtttctaaatatttgacatcgttgactttttttaaacatgtttgatcgttcgtcttattaaaaaaataagtaattgttaattatttttctatcatttgatttattgttaaatatacttttatgtatacatatagttttacatatttcacaaatttttttaaaaaagacgaatggttaaagatgtgttaaaaagtcaacggtgttaaatatttagaaacgaaggaagtacttagtaatgtgaccgtctctacttaatatattgtaccttgctagtgtacttattatccgtgttggttatttatgattgatgatccatccaagcatttctcttattcttctaatggaaaacattgtagttgaaattaagtaacaaaattagaacttcttcagttttagtttacaaatttacagaggcatcatatacctgtttcagttcattatcaaggcgattagtactctgtatcaatttgcgcaatgacactaagtgcgaggccagttaatcatgttgccagtgtgaagctaataactgaatcgagtgactaatgatcatcagctgactagctagctgggtgtgaatgtgtgtatggtagtgtatggcatccactgagatacactgatcatacaccaattatttggttccagaaaagcaagaaaaaaaaaggaaagaaagcataaagcaaaccaaacccaacacaagtaacatcacacaccgccctctaaaacgtcaagaaaggcgataaccactagcactacaacacactactggtcctcatttcacaccaaacgcgtccaaactcttgtgtgctatctacgtgctgcattgttgtggtctttagctctggaccattcagtgagctactggtggatcaagccatgcaaaaagcactagagcaagccctataagtaccaatggccatctcctcactctcatcacacagctgcactacttgcactgaagtagctagagcttgcaagtaa

SEQ ID NO: 2033 - DNA, 2000 bp, Oryza sativa
  N_region (1108)..(1108): n = any nucleotide
aggattcatctctgtactggagtatataactatacctgcattgcagaagtaagcttgctttcttagctcaataatgacattcttgcatgcatgatcctgaagaactagctagctggagtatcaggcaatattactataatcccaagttttgcacagaattaacccatgcagtctgaacattggaaaggccgtgtttacagctgctaaatatatatatatatgttctggatcacatgttttcagatgtttgccactgtctagtatgctgtgcagaataattccactctgatgctggttggtcgctgccttccatcgactgtatcctgtttgcacatactagccagcgatcgagcagacagtgcgtttcagacgacataaacttttggcattctgaattgttccgattccgtcttgtattaatcagcttcactagccgtcacaagacagcatcttgcaaatctctgttaggtacacacaaccgccattaacaagtctgctagactctgaagaaaagctgctagtgcgtgtataaacaaagtctgaactgaactgaacttaagcttaaacttaactgaactagtgggtatcatctttgagaatgtggggatcatgccaaatatttttcagacgagagtgcttctgctgctgctggccgttgctacgtctaattaatattaaggaaagggataaagctaagccatcgatgagggccatgacctgattgatcggtgtggttcgggccatacgtcgccatccaacgtgtacaaattaaactccactaatcagcatcaggggaaggccaagcccgtgctattcagacactggcccatcccggtacaagcgtgagatagaaagggagacgaggacgtcttaacgaaatgagatgaccaagttttaattgcagccgtttcgtccactctaatacacaaatcaataaactttttttttcaagaaaatgatactatccaaagtgaagggaatatcacgatttctagtttgcaatcgcgtcacgtatccactctgaattcatgtcggtttccaatcacgagagcgagcggctgcttgaccattgattagcatgcagattaattaattaattaaagaaacnaaaggagaggggtgatcaggtttagttgttagtccactactttattataacgaaagcacgatctgacaaaaatgttaggaggcctggcaattgcaagtggatagcgctaggaaaaatggagcatccagtgggatttggaaatgtgacccgatccattgcacatttgcactcaactgtttcgccctctccttcttcttttcgaagagtatcgtacgatccatttgaattttgaaatgcagaaatttaatagggctcacagaattttcccaggaaacaaaaaaaaaaagttcatttttccgggctgagctgtcttgggctgtaggaagctgacctttgatgggccggccaatgggaaaggctacacatctcacgacggaaaacacggaggcccatcagaagcccaatcgagaggcccaactcgcaacctggaagaaatcgccgccccgtccagtccagtctcctctcctctcttctcctctcccgccgccgccgccgccgaacccgccgatctccatcctgcgagcagcggcggcgctccacctttccctccccaaatttcaaaactcgattcgaaatctgccacgctttattcccgccatctcattctcacctacccaattgtctcctcctcctcaaatttaggttgaaaaagatattcccggcgcctccccacaatcagctagctctacaaatacctcccgcatgagctccatttgcgccatgagatccctcctcgccgcctccaccttcctccgctccggcgcttcccctctgctgcggcccctttcccgtcctctcccttcccgcctgaatctttcccgattcggtccggtgaggccggtctctgcggcggcggcggcggcggacaagtctcgaggcggaggcggctccg

SEQ ID NO: 2034 - DNA, 2000 bp, Oryza sativa
  N_region (1979)..(1979): n = any nucleotide
ggttgggcgaaagttgcctatgttattaagcaagctgatatgttgcccgctccaccatcaaaggataatgacgaatatgcattgcagacttgtgtcggctgaacataccgcgttaagctgcagaatctgttaatttcttttctttttcgttgttgagtaaggttgctgaattgtacctactcatgacatgtgtacattccctaccgtctgaatgggcaagcccggcctattcttgtacagaaatgttcttcagctcatctcattttgctttttctgttgaaatcttttgtaccctatataggttggaactgcaacatgcagtattgcaggcttgcgctgcgctcctgtgtgttctacaaaagaattgtgtagcttgtcaatgcaattttgtgctgacaaattatattcgatttggatttgttacaagacaatttaccgatggctctgtgattttgttctctttcgtcgaatgttgtcacgggaaattgtttcgatgtgtaaggcgtgctttggctgcatttggtaccgaactgaaccgaatggcccataaatcccatgtacgttttggaagcatgcaacaggagggatttgcatcctttcacttgaaaatagcaggtgaatctgaatcaaaatcagaacgttcctgtgtactccctccatccctgaacctggtttttatattttttttaaggatggagggagttaaattaggtttttatatgttgggagaagagaaattcttaaaaatcctatacatttatggttttttcctatactatcttaaaagcggagttgttttttttccatccccttatgctaacatgctcagtgcattagtacataatcaccgtcacttcttaaatatatgggcctggtccattgaagttaatttgatctatttctaattatatgtgtagtatctgttataggccgtttcccccgttcctaactttccatcacataaaaatttttctacacatataaacttccaacttttttcaggaactaaacacatccatagtgtacgtagtaagggtgtgtttagttcatgtcaaaattgaaagtttggttgaaattggaacgatgtgatggaaaagttggaagtttatggggctgtttggttcacatactaacgttgcctaggttcaccatacttctcttagctaaacttgccaaaggtgaggccttcaaaatctaagccacactctagccaacaaaataaaaccatgctacacttttcagagtcagttacatgtgagacctagattacaaaagaggaatcttgccacacttatgggagccaaccaaacactcacctaacatggtcaaacttgcctaacctcaagtgtggcaacttatgaccatcaaccaaacagcccctatgtgtgtaggaaagttttgatgtgatgaaaaagttggaagtttgaaaaaaagtttggaactaaactcagcctaagtactccttaggagcgaagaaaaaacgtttccaattttgctccaagcaaggccaagtttttcttcaaactttcaacttttccatcgtattaaaactttcctacacacatgaattttcaacttttccatcacatcattctaattttatccaaacttctaattttggtgtgaactaaacacacccaagtactactattttagagggggtttgcttggaaacaaggcgggtcgtttcaaacaattgctactttgggcgcgcgcccactcaacaacagaaacgaggccaacgcggccgccctctcccccaaaaacaatttcaaacctcgcttcggccgccgagccgctctgcactgtcccccccaaccccatccgcctctccctctccccccatttcaaatccgaaaatctccaagcgctccgcggcgtcgcgtggtcccttctccgcgctctcctctcctctcccctccccttcttccgaaggcggcgaaacccaagcagagagcgggcgagatctcgcgcgggcncggcggcggcggcggcggcgg

SEQ ID NO: 2035 - DNA, 1363 bp, Oryza sativa
aaaaggggtaaaaccccccccccccccccttctcctgtgttcatgcatgcatgctcgcccgccgagggcccggttgtcagcatgccggccgtaataatcaactgatctctacacgtacggccacgaacggcacgacatagcaagccgagagctctcttgatcattgcgcccaggaacacgacccagtacaggtacgggctgtttggttggtggcctcggtttgccacaccaaaccttaggcgcgccataatttttcaggctagtgtttatttgcgtgtcgcagttaagtcaagccatactttactagcacattggcccacgcgtcatactcttatttgctacccaaagtctgtcatagttatggctaacaaattattggccacactttgtgtggcttgccacagttatggcaaatcgagttatacatatagcctccatccaaacagcagtagctccgtgtaacactctcgagcgggtgcgggcgtggcgatcgatcgaacggcaaaccaggcgtgtcccgtgtccgtccgtggagaggggaggggagggagagggagaccgggcgcatcgcgccacagtttggccggggcgcgtgggcgatccccaccactcattccccttttcagtcacgaacagtgtccgcgagatgcggcccacgctggctactgttgcgcggggacatgcagagcccggccggtagagcaatacatactatactttgcctgcatatgcccccatctcgctaatacacactagccacccagggctctctcacacagtctctctctctctctctctctctctctctctctctctctctctttctatctttctctagctagctatctagtggatctctttcccatctcgcgcgcccccatagcccttttgtccagggccaatatatcctccggccacgctcatgctgcctcctcgccacctctgcctttccctctttgctcgcggcaaaatccacatgcagttgtagacttgtagtagtagttagttgtggttgtttgttgttttggctttcaaatcaggaacaacgacagatccgaggctttctcgaatcgggcaggtccatcaaatcggaagccagccagccatctaatcacctcatcacatcaaaggggaccaaaaggatatctctggtggctaccccctctcctccggccactcgtgtaaaatttcccttctgatcctgcgctgtgccagattataaggccattgcgtagctcgatcgaagaaagaagcaggccagccacagtactgcctctcttgtcgatcgatcgacagccacagcctgcaggtgtggggattcggctggccgtcgccttcgtcttcgtcttcgtcgtcgtcctca

SEQ ID NO: 2036 - DNA, 2000 bp, Oryza sativa
ttattatctacagtactttaagcacaacttttcattttttatatttgcaaaaaaaaattgaataagacgagtggtcaaacgttgcaatcataaacttaaaatcccttatattgtgggacggagggagtatttaattagtaccatatgcacagcacgtcagacacatctattgcttttatacctagaaactaatttcattccaatgctagtagtgctcactttgcaactcaagccctaactgagttccagttttatttcccccatactttacacagtacattcctgtttttcactttttggtagaattccagttttatttcgcccatactttacgcttcatctgtgatcacattttttgcaggcaccaaaggcgttatattgggtgatgtccttctgcaagtacatggatatctccatggatttagtcgagtcatgcttaccatcttcctctctggctatcctgcaatcctgacccttctgttgtagttatacataggtttacaaaatcggttaagccttagaactgttagcttttgagcttttcttctccattccatgatccagggtttataacttacgaggtcgcaatggtgctagttgacacttgacagtgccctgaccctgaaatgctgcaagtgcagtagctctagtgggattctcagtacagctacgcttttggtggtaaaatgaaatggagtagagcgcgtactgttgaacattcatgtgagtttttcatcagggacttgcggttattttcatgcgagattttcttaaccctatcttgtattttggtgtgttgagccagtcagagactacatagtgggaagctggcccataaaagttaaaataatagatttgacagtattatccatcagttttatgggagactaaattttacatatgcatgcgcgttcatgcagtatgcagtcggggttgtttgaaagcctctgacgatatttcaagtgtgtacagaggacgcacatacatgtgtatttatgatgaacgcggatgctcaaaacgggcacattcactccgctcttaggagcacatttgaaagactgagctataatattttaagattgttagattcattatgggtgtctcattgttgacaggtatattgtctatgtattctaggattttgaacttagatggattggtttcaccataacaaatttaataatcagttaagttaagctcaccttcataaataagagcaattgttggtcaaagtattgtcgcaacaaaacaaaatgtgttctacattttaaatccgagagagtaaggatgtgtttggttgcatgcctcagaacgtatcagattcgtttggttcatatcataattatggctcgtcacatttcctctatatgaccccaaatgtcacaaagtcattcttaacaaaacttgtcgctagcattttgctagccacactttatgtggcagcacaccttgctcctttggtgtggtttagcaaaatcacttagcaaccaaacaactgcgtttggatcacatgcgtctgtctgtgattttcaaatgatcccatggcatcctttagaatggaggaatttaagagaaattgagctaaactatgtgaacatcctatgaagttactgcattcaaggcgcccaacatgaaatctattcaggttcccaagttgtctgctgcttccgtaacgtcaaaattcgacagatttctggctggctaaaacacccacaacggcataatagcctcgctcgtcaaaacattcacccatttttagcttggtcatcatcaaaagtaggatcaaatcaacaatctgccttctcttcagccactcgatcccaacggcatctccaacgattcctacttgcaaggacagccatggaaatcctccaggttccccaggttacttataccacagctcgaatccgttccaaaccaggccatttcagtaccctcctctcacattttccccaaataataatagaggaaggggaaaaacacatttgcagccacatcat

SEQ ID NO: 2037 - DNA, 2000 bp, Oryza sativa
acaagttaacaacaaccatcgcttgtttttttctttggcatgttaatgggggcacactatattcacctgtgcgcgcgtacttgtaccgatgttcactagatttggcagcattttctttgctgataattctttttccggattccacccccatttaccttgttttctttttactgccaatatttttgggaaaatccatctgtttccagttttgtgaccgaattatgatgcaaaatttccacagggttagttatgcgaattatgcacaaacacatttaaaatcagtatccaattaccgttattacacttatgggttatctgaatatctgattccaattaccaaagcttttagaaacggcccatttactaacccgtccagtgaaagcccaatcacagtcatgggctgcgccattagcccattattcatgtgaatacttctattcacagggaccactacgtaaaagtcacacctaggttttcacctcgccgtcccactcccacccacgccgccgccaccgccgccgccgccgccggtttaattggccggagcgcaatctctagccgccgccgccgtcttccccctgagaaagcgtcgattccgtccgggggtgggcagcggtgggactcgtatccggacggccgcagattcgttgagcgacccgcgctgctggttagtccaaaacctttttacctgagcccctaggtttgatggttcttgatctggagaagtttaggggagaaatatggctgcgatcaaggattgcagcctccgcatttgctctcgcaagaaggtggggagtagtagggcggattttaggggcgattttgcaacacgtgtgagattgatttttttcccctgttaccgacggaactgtgactgtttcatttgaagttattgcattatctcgagtgaaaattcttgttccagtgcaggaatttagatgaactgcacaagctggccacgttagccatgtgatggtgatattggtttgatctttgtggacttgcttagtccaatcaggatctgactgtgttcataaatgtagtgttggtgaattgtattctccattatgtctggaggcgaattacttagtctgtacatgcaactggcaggaattgattcgttaatagttaccaaaaacctggatagattggatgggcattggttaccagagctcataatgaccaaattggcttcctcagataactttgtacgaacactgcccgtacctgttcctgatggcatttcattatcaataaattccatccttcttgtatgttgaccaaaaagatgtaaggccgctatcttgatttgtgtagtcatggttttttcagttgggcggtcatcccgaccgattaaattgttccaaattagtagctggttgtttctttgatttgtaagccatgttggttctttctgaattaatagttggttttcccgcaaaaaaaaagaattaatagttggttatttctttgatttgtaatccaggtttgttctttatttagaaagcgttaaacctctattaggagagtgtagtatatgcaaggcatataaaattctttacgtttctattgccgtttctggaaatgttacggtagctctattccgcatatgcttcctaaccattggtcatactattgtgtgctacagtattttgtttgccacatgttgggtgttgcccttgtatttatatgacatccatattgcccttgctttgattgaattgacagatggtagctactaccctgctttccctcgaggaactaatccaccgagagtcgtgtgttcccgtgattccgtaatattttagaatattgtggaattagagaaaataatgttaattgttattaaatcataataactggcagttagtgtaaaagtttgtactgtttatgccatatcattactcttgcatgtttttttatatgttgacgaatatgctaaaaatatgcagtttttcattctgcaggttttagtcttgttggcatccttctgttaagga

SEQ ID NO: 2038 - DNA, 2000 bp, Oryza sativa
  N_region (1792)..(1792): n = any nucleotide
agagcaaggggctctgcctcatgccggtggcgctggcgtcggcgatatcggcacagaaggggacgtcctcggccgccgtccgaccggagaagaagaagaacggtgatggcgatggcggcggcgacgaggaggacgtgaagggagagtttgacgcaccgaggaggcctcctgtcggccggccgaaggagatgaggtccagagtctaagctagaacctctgctttgttcaggagagatggagcttaatttagatcctaacactttgctacttatatgtttattattatgaaattttaattgcaagttgcaactggtgatctcgaactacattttgccggtgattagaaaattgttatatggaggttagttattaaatcatatataattatattttgtattgttgcggtccttgcggacaatgccattcagtaccttgatatttgatctatatagttcacaaatttttgtaaattatgtctttaactcatgctggttatgatttgttccgagtttggtgagacatattggatgaagtgccaaaattatatatatttatgaaatcttcgtgaccaaaccatcatgaattcttttgtgcagtactccatttgttcctattataagatgtttcggcctttccatcttttgtctaacattcatatgaatttgggtatgtatatatgaaacataaatacatggacggtcaaatgtttaacgctacgtttcacaattttcacgcagttgaactcaatttcaggaagacggcatggttgtagctagtaaactgaactcgaactcaatttcatatcaactttgaggcacaacacaaggcataatcgtatcaactatcaaaagaatagtgtgatccgtttcaaacgatgttcagatcgctcgaattttggcaggattggttccttcatggatcgagaaattactcgaattacgatcagagattggttgcctagttcttcctcgacagcagccgcgcccggagctcggcggcgtcgacgtcgccgaagcgattctcggggacccagcagccggtcttgggatccctcatccagaagatctccttcgacgccgccgccgccgccgcaccgccggcgccaccctccgccgccgagatcctcgccgccatcgaggagccgcgctgctgcaactctgccgccgccgccgccgcgtagccccggcggctgcaacacacaataacagatcacgtcatcagtgacctcgcagaatgccttccagaatccaagaaaccaagcaagaacgaacgatccaagaacccatccaagatcatatacccagttacccacccgagcgagagcagttgtccggcggcgacggcggaacgcggcattgcgctgctcctcttctgtgtcggagagagagcgagagagagacgcggcggcgagaggtgtcaggagaagagtggttgtctctgcctccggcgcggcgcggcgcaaggtgcaggtccaatatataggaggcggatgcggcgctagggtttcctcggcgccgccattgcgcgccgcgcgcgatgagaggcgagccgagcgcgcgccgcagcagccgccgcgggggcgcgccacgcgcctcccaattttttcgcgttgccagcaacgaacagctgacggccccgttcggttgaatcccagcccagcccagcccagtacgagaaggacacgcgagaagtttgggctcacaaaattgggccgggcccactaagctttgcggcttgaataagtctacttctcctccccactgtccacttcagtgactctactagtcgagtngtcttcatcttcgagaagggagaaatttcagagagattttttatttatttatttttggattttgggatcggcggccgacgctgtcgagtaccggagtaggggagctcgccggagtaagctcttctcaggctgtgcgggggtggcggagggcggcgcggcgcggcgagggggcatggacacgatgaggggggcgctggagcgggcgagg

SEQ ID NO: 2039 - DNA, 2000 bp, Oryza sativa
  N_region (1932)..(1932): n = any nucleotide
ttcggggatgaaagtgtctggttttgaagttgatggacgatttttagacttatgcaaaaatccaggggtgtaaaaaagacatttccctttttcttaatttagaagcccttttttcccttcagaaatactagttttctgttttattttgtgtagatctgttattcttgtcactttgaactcatatttgttcgtccaatatctgaaaagcttatatttaacctattgcagttccgatagtcttcagaggtgtacatctagctatggaagggataatgttagaaccattctcaaaggacttacaggacgtggggaggattcttcagatctatacgattttattgaatgcaatccaagtttggattattcaaattggtggacacaacggaagaagtttaaaaagtttaaggaccacaaatggataagaagcaagagacattctatgagtagactgagaacctcaaaggtatggttaagataaaagtgcgccaatgtacatcaccgcccctgatgttacccattcagtgggtcttttgtatatagttccagtgggtggttcagccgctagatctcatgggcgttgggcagcccagtaccggtggaggtaacattatccctatcttcccctcttactcagtactgtagctcagttggtcagagtttattggataggactaggatgggtccttccctctctatataaggagagattgtattgtggtttggattaagcaatgaaaatcgattagtctaatctctactccctcaatgttcttctccctgttctaaatttatatcccttctccagtagctgacgctgcctggatatcttcttggcggtggtgttttgaatgaagaaacattagattgaaggtgatagtgaaactttgataagtcacaagaatcttatagcattagaaatatcataactgagattgactggttccaggaagtccactcgaatgcgggatatgttaatgttctgtttgtacgtgtgcattatttgtgttactttataatagtagaatcactagcatgtactgtatcaagtatcatgtctgttacttttgtatctcggcatatgttctccaacaccctttgctccttgaattttcatgtaacttttgtatcttaacatatgttctctaacaccctttactccttgtttaatttgttcgtacttccaccaccgactatgtttggtctctcttgtgaaacttacatgtagtctgctcgttctttctaattatgcgctcaaacgttctgaacgtcggcactattatgctgatttttttttaaaaaaagaaaacgaatagtaaatcaaaggtgaatacatgaaaactgtcgaatatttttgtgtatattttattattttgtaaatttgtgtagtctagtttgcaaaataggatggacgctgttggtcgggtattcagatgtaaatgaagggcaattgaagggtatcccgatgtatatccaaaacttttgataagaaaatagatgtataaataaatcgtataatataatatgtatgtatatatatgagaaaagaagaaataaataggccacattaaaccctagaaacaagaagcctatcgttctggtctcctgggcctcactccccgcttcactcctctgatgtgctggccagccgcgtcaaccgatcagcacaggtacagagacccgtccccaagccacggccgccgcaaccacgccacgcaccagtcggtggtggtttggattgtcagctatactagttgatacctgtaccggaaaaagtatactcttgactctctcaactattgtccgagtactctaagtatcaaaaccagtacaaacaatgtccctcggtggttttgaaggtggttttggtctacgtggcggtcttgaccaagtctttgttctacgtgacgcttacgtggtattagaaaaaaaacnaaaataaaagaatatgtaggacccatatgtcattcacaaaaaaaaataatattgtggacccataacgc

SEQ ID NO: 2040 - DNA, 2000 bp, Oryza sativa
aattgtcgaatgtgtagaagatatcctgcgtcaatttccaaaaggcattgaagaatctaaaaagcctaagaatttttatcatttgctgcacttatgtcatatctacctgcggccaacccataagtgtgttgggactaatcaaaatcactcaaaggtacggttttttcatcatctagtttatttaggacagaggtatgttggttctaaccaaaaggaaaatgaggaatcccgactgctaactcgccagaaggattgcttccaagatgagcaattaccaattcgatggcgtcaagcagtacaataccatgaagcaggagttcaactgaagaaaagggtatacagcatctatgagaaacattctctcttggacataaagttcagtaatggagttctagaagtcccatgtcttactatcgatgagaataccgagtctctgttcaagaatttaattgcatttgagcaaatggattctcaatatgaaaactatatcacagcttatatcgcttttatgtctcagcttgtaagcacttctgaggatgccactctacttactgagagagggataattgttcatatgctggataatgacgatgaagtgtcagctatgttcaccaggctcagcacacatttgatatttggttctgatacctaccactaccttcaaactttatcctatgttttggaggaccattaccaaagcaggctgaacagatggatggcttggctctggcgtaatcacttcagcaatccatggttagcattaggtgtgttggctgcagtggtcgtcctactctgtaccattgttcagaccatattaacagtcctagcctacaggcaaccccattgatgatggcatttttattctctttctaagtgaacacattcctatttcttgttcaatttggtactggtatatatgttatctggtgagaatactactgtgacaggtatgtatccaattgaaatatgatgctagagtaaagtgcaactcaccttagatcatcccggtataaagtgaaacacgatgtaatttacctggtgcgaagtataatgtactagaaaaacagtaatttgcatggtcttcgattagtaatgtgaaacctatcctacttaacattcttttcaaataatgagaattccctttgcaattgcgtgacttgacaccattacatgtttgtatttagagttagaattataatgtgtgcaattactgtgtttgttgtttaaaataaaattgtacttctttcaacatttttgtatcaatcaataccactggaatctaggccactacaatcaacagtgtagaactaatttttgctcataaccttcgtaatttctaatccttgagagcaaacttgatgatttcttttaaccttttatgtactttagtttaatataacaaacataagaagtcttttaggaatatatagctctcttgtgcagcattgcaatagaaactactcacaattttacatgatggtatgcttgcatgtgtaatatttgtactaaatttactaccctccattgaaactaacatcattttctgggaacttctattctacatattaagcaacaggacaaattatttatttagcaatagtgaactaaagggtttgttcagattgatgccatttcaaaccatatcatttttttggtagaattgccgaatatgcgcatccatttagtttttttttgtcaaactttgataaatacataagaaattctgccaaaattttggcaatttaaaaatttggtaagatttattttggctacaatctggacagcccctaagaatattgtgggggtccctttattttcccacgtgcatgctttaaatagaatctactagatatttgattccccctagttcgctatgctaagtgcatttgatcgaaactataccatgtgactagagttgggatcacattttacattactatataaataggcatgcgagctgcttatttcatcatctcgttttcacttccttgcagcgaaag

SEQ ID NO: 2041 - DNA, 601 bp, Oryza sativa
gtactgaaaatgaaaagtctccaagcaaatagagaccggggaagggagagaaacaaaggaataaaagctacagcaatttcgcctgctttatctcatccaagaaaaatatttttgctgctttgctgaattgcttgctaggatatgtataacaaacgaggtggttagcgaaagggataccacagccgcaaactctccggtaaagcagccgctgtgatgatgacagaatgacaacttattactaataagctcttaatcctgaagattaacgcattccagctcatccgtctcctgacctttgcttgtctgtcccttcgcttcaacttctctctctcgctccgaataaaaacagcagaggaaaacgtgagcagaaaccgcagagatattgatcaaaagctgcgtttttttcccttctttttttggcagcaagttaattccaccctccactcctccatgttcttctactagtggcacagcagagcggccacaaccgctcacctcaccactccttcctccaatttcgcattcaaggcgactcctttggttagagtagtagaggtgcacgaaccaagaaccagaagcagaagcggaagcagaggcagca

SEQ ID NO: 2042 - DNA, 2000 bp, Oryza sativa
aagattcatgtagttttttgagtacatactcgatattctctgctatatatcttgtcttctataaaatattcttcaggaacaattgagcagtgagcactcgagtaggatgtggtcgagtacaccccattatcgaaaacgttctcaacaaatgttgagttgtcgcacccaacctaccaatgaagaccgacgacttatctcatatatagcgccagctacggctggattatttgagaaagggttgttaatggataattcctcatgaacgttgtcggcttgatcacccgacatggttgcgaacagacatccggatatgctacaagttgggtatgtgagtcatgctggccacatgagatacacatgtaatcagaaactctagcgcccctccaggtgatatacgcctacacctggtcctcaaccagtagatcgtagcgatctctcaccacctaaaaattcatcttcaggtgatcgagatacgcctacacctggtcctcgaccagtagatcgtagcgatctctcaccacctaaaaattcatctccaggtgatcgagatacgcctatatctggtcctcgaccagtagatcgtagcgatctctcaccacctaaaaattcatctccagctgatcgagatacgcctacacctggtccttgaccagtagatcgtagtgatctctcatcatctaaaaattcatcttcgcgtgatcgagatacgcctactactagtacttgaccagtcggttactgcaatctctcgacatctaacacgacaatcaacattgtcgtgatagtgacaaccaagaccgactagatcgccgttgtcaccaggacgacgtccaagactaacgacatcaggacgacaatggacaaggttaacgacatcacatgacgacgacgaaactcgagatcccagacttctagagggcctgagaacgagttagtaggtcgaggagccaaacctccaactacgataattattccttgtctttgttgtcattaggagacagttcttgcaggtcacgagaacgtcgtcaatccattactctggattcccttcaagtggttgaggtacgactacgactagtcttcgattaacaatgtagtgatcctcgtatcacgacttctaatggtcggggtatgactacggctggttttccaccagcaaagtagcgctcctcgtaccacgacttataatggtcgaggtatgactacgactggtcttcgaccagcaacatagcggtcctcgcaccacgacttctaatggtcaaggtacgactacgactggtcttcgaccagcaactatacaccaggtctttacccggtgtggaagtcatctcatcacttcatatacgtcaacttctgtaagtgtttatatgtgcaatatttgtctggtgatcctcctttcttatatcaccttcgtcttgaagtcagtcctactgtccctttacgatgttctaacaaacctccgagaaacctaagggaatttcggctggggacgcccagagcagataaggtcttgttggattataagagccgaacaaccatgtaaaacctggtcatgtaagaatgctcaatggatgcgtattaaccaagccgtgtaatcggaaattgacttttccaacttcacggccggaggctaggatttgtcaactttagcttggtttgttataagattcaagctgtctttgtggaaaatagtttttccataaaaaacagttgggggctaggaagggtaccaaactccgtttgctgagggaaactctagcgagcgtatttttttattgccgcacatatattcaatttattttcaatttttccatacatattgccctttgagcgttcgctcaggggctatttctatttaatattctgttctgagaattgatttcaggaaagtcagacatcaaaacagtcaagtcagattttcaaggctttgtcgcaaactttgcaccttctcgattactcgagaacggttgatggagcttgacaagtaatatggaatgaag

SEQ ID NO: 2043 - DNA, 2000 bp, Oryza sativa
ttgtgcattgtggagaagaagacgaacataaacactccgtgattgtatcagtaaactttctttgccatgtatgatcatcgatcactctctggacgtccgactatcacgagcggttcgtccgtgatctgttgagtttattatacgactacgagcgtacaacggacaggctggtccgtgatgatccagcgcaatcatgtgtaccaatcggccctactacaaaagcgcgaagctttgctttcgcaacccagagccgtgccaaattgcagctgatgtacgcacatcgtataccggaaagaactgttcgtcatgaagagcagaagacgtccgttgacgctgacggagaaccaggcgtgttgatgacttgattgcaaactcgtacggatgctgatgccgatcgatgcccctgctacacgattgttgggtcaccgcattagagcaagtctaacagtacagaatactaccagctccaattcatttataaccaatctaatagccaattcatacaatagttgcttactatactattaatatatgatcccacatgtcatacacatagtgtatcttagaatccgtgctgcagctggctacagatctgtagcccgctgcttctctctctcatcgtttatcttagagcaagttcaatagtagagagagttaactgccggctccaaaattcaccacattatttaagagataactaaacaacggtagatacagcaattggctacacccatgctttaaccaacgcatcctgtcaggtgttggtaacttctgaatgttcaagttctaattttcgattggttatcccgagcggcagtggcagagcccctaggcgctcgtgcttgagccggcgactgaattgtcgtccgctttgttctctctgctttccctctctttatcatatatgttaaaatattagataagcaggctttatacctgctcttattaaaatgtgtttatagttggctaacagcgttattgtacctgctcttactgcgtgacttgatttctccttaaaagcatcaccggccaaccgtgctggatagcatagtgccactgttgtagtatgtcactcgagagaggagcagggggagcacaagtgtcatgattccaccaattccctagactgtttaacgcctctctctccgtgaacctttttcagtaggagtactagctgacccatgatcatgccacagcccacagcacgcgcctagcagtaaaatagtggcaggggcagtagtactgtattagctggagcggtaaatcaagaatgtattatccttctactgcagctgaacaacccagattgtactaacctgacctgtaaatcaataagagatgctagaattacaccatttgaaacaaaaaaaaatcgctcggagcaggaatcctttacgctgggcctgaaagacgccacggagaagtggagaaagcaaagcaaagcgccgtttattactgcacgcgtctggggcacctgccctggcaagcatggcactggtactgtcacggcagtatcatcacccgacctcacagtctcacctcgatggggggcccacacactgtcgcagtgtatcgagcgggacccaccacctttccgacgcacccggctccgcctgacacgccacgtgatccgccgctgacacgcggggtccacgacgcggacggtgtccacgtgttcgcggctgggttttaaacgaagcaaaggaatagtactactccctctaccaccccgacagaaagattcgcgccaagtcaaaaccccgggcccgtgggtcccaccttccatgtctgtactggaagcgagcggtgcgggggacgggcccacctggcagcgagagcgaggaacccatgtgtgagtgtgaaatgccccctcgcgcccggttgaaaccttgccgcactcgtcggcagccgcgtccacacctcggctgctccttcccagttcccccactccactgccaccaccccctctgcttcatcggggaatgcgaccgcgcgctcga

SEQ ID NO: 2044 - DNA, 1263 bp, Oryza sativa
  N_region (29)..(29): n = any nucleotide
  N_region (50)..(50): n = any nucleotide
  N_region (68)..(68): n = any nucleotide
  N_region (73)..(73): n = any nucleotide
ttaggaaaaaaaaagaaggaaaaaccatnatttgcaaaacgcaatggatnttggatcaaattacaagntaatncatgggattcaaagttacttgtttgtcgattaaccaagtgggatattgttctgtttcttgatcgagaaatcattatttttaagacgagccaagaagttagaagtgtgagttgttgattttgaccccgtagtcccccaaggatggggccatatggctgtttggtagatcatgttcccaactggcactgctgatcattgtcatgtgcaaatcacattatcatgtttcgttttgcaggttcgttaatatgctaggataaaccaaaatgtgataaaaaatgagctaaacttaggacttgattatcgcaaatagtgatatgctaatagccattgttgactggttcaatatgtagtagaacagcaacgaaagctctactagaagatccaagaatattttgggagctctattgctatacacgcaatgtccagtgtagcagagagggtaaatctagtggacgagatgtcacaagtgaataacatctctcgtttgtcttgtttgtttgctggcacgtccggaatctgacgtcctgtggagcttgtggatgctgcagagttgtggctaagaggccacacgaaacatatcacgtgactagacaggttgcttgcttgctatagtgtgcacttgttgcacataaatatgattaatggcagagcagtttgttaattggaagtacaacgcaaatttcaactgtttattaatggcaattgccttttaggttggatttttatgctacggtaccagcattacttgcaacatttttggatattcttcactccaactccagcgaatattaatgtgcatgtttcctaggaaagctgaactttttcctggagaatacattgccggtgtgtagctcaagtatgggctgtgtttggaagcaacaaatttgttttggccacaaatattaagcaagaatctcgattacttgatgcccttttttgcatatccaaggcataaattgtgtttttgttcttttctctgtgaacaagattattccttcctcttgtcaaagattggtaaatacaatagagattcaccttttatatggtacagccatcattgttttggctgctaagtgccaacacacatgcacaaaagtatgtattctctggtttatttcattagattgtatctatgcgaacacaagtactttttaagcttgtttgttccttatgtggcttccgctaatattg

SEQ ID NO: 2045 - DNA, 2000 bp, Oryza sativa
ggcaaaattgtgcagcctacagcccgccaaggaaacttattttgcacgcactctggcatcatatgtataggtaaaggcagagatgacacttacaacgttgaagacagcaggagcaccagggcctgttgaaccaaattaagtgagatgatgcatgccacatagtgttgtgggtgagccataaagagagatgggaaagacagttccataccgatctcaagatcatgccacggatgtgcagctactgatctcctcgacaaggaggacaggatcctctcgttgagcttaggggcgcgcctgggctgcccagcagcagcattggtgtcctcttcactcatcctcctatgatcatatcataataggaaccatagatcaagcatcaatatagctgctatcagaatgaaaaaaaaaatatatttttaattagcttgagctgcagcctagcaggtcgagcaaacatctagcaaaaagcagagttgcaacttgcaaagttgctttcttttcccctaccggaactaaatacagtcaagctgtatacagtatacaaccccctgacctgaggctaacatccatgagatgagcatccgaacaagatacagtcgttgatccgattgatcttaacacctacctactacactcagatcagatccagggtcatgtatgaaccccacccaatccctttggaagcagaaaccaaatccgcaacaaactaaactcgatgtaatatagcttccgctcagattggacgcaacccacagaaaataaatccaagtcctgagaaatagcgcggatgaggagggggaagggagaggataccttggattggagtggcggctgaaggggtggaaggtggcggcggcggcgaagaagaagaagaaatgaaatgattccctgcactgcactgcaccctccgtctgaggaaacagtattaaagacgggtgggatgacaatttctacttaactccctccttccaacgttttaatacaaaatgagcccctaatggaagtacttgtgctaaggctagtgcgcgtcttgtgtgccaatctttggactgggagctcccatgttttggcagcaagtgggaatatccaatatcgcccctgaactttatatactcatcactaagggagaaactttttattctttctttgtgatggtagaaaatcatgtccctttcaaggcttttgttttaaaatgttttatttgagaggaattgcttgaaattacttgcacctgctcaactagtacactactgaattaaagttgacctgatgcggtttgtgttggtcatcgcattcgcagacaggccgatcaacattcgaaaaagggctcgggacattgcctgccgagttggttggtagtacagtgttccaatcgatccccatgtccatccatgtgggctcttgtttgacagcgccaagctcagttcaagtggattcgattagatcgcgattccatatttccatgccgttttggagttaactcggtttttggtcggtcacacaggtaaactagaaggcaggttgaccgctccaagctgcatagtccttctcacgatgctcttttctgatcctcaagacgctcgagcatccaatgctctcttctgttgtccgtagtacttctactcagctatctcagctacaagagtggatatcacacagaattttgactgcgtttgttcgtgtgatataggggtgcgtttttttacaaaaattttctataggaaagttactttaaaaagtcatattaatctatttttgatatttaaaatagttaatactcaattaatcatgcgctaatggctcacctcgttttgcatatcttcccaatctccttttcctcaaacacacccttatactctagtagtaaattattaggattttttttatcttattttctttctttcttgcttgcttgtgtggaaatgtgaaaattgagcgtctcgcttacaaatattacaaaagtatgggcgaaatgaagaagcaaaacggcaacggaaaaa

SEQ ID NO: 2046 - DNA, 2000 bp, Oryza sativa
ttgaacatacttcaaggttaaaccaagtggataggtacctgcagatgatcgtagtttgctaatgtcagggcagaatcgtttgggcctttttcaattccaaatgtggggtttctaacatgaaagtatcataggaatgagtaacgcaggaacacacctcattgcaattctctttcggtcatccacaagaagatgtgttttgctatcgacataagcaacgaagaacgtcaaaacaatatcaatggcaaagaatatatccacaatgttctcaactagcaaaagcttagatggtaagtccctcaggaatgctagttcaaacggacaaatccaggcagagtaaacaactaggactataaggaacagctcccaggatctgagagacacacagacaaagcaaacaaagatcatgtcagcaactgctgtttacttatatgccttgcagcatgtgataggtacagaaagtgcagtgtgaacctcacctgtaccggggatcataaggcgatatgatgaacttctgcaacttgttggagtggtttatagttgcaccaagggatggcagtagctctacagtgaagctatcgctgctcctcttgatctggagtccatcccagaactggtggaagcaagattttgagtgagcttgggtcatggttgctttgctgttcttgttcttggccacccaactctgtttgcagagggtgtggaggctgggtctttatatatatatatatatgtatgctgcacatgatgaacatgcagggtcaaggtgaggaattttaaaaagaagggaaccggaaactgctcgtgtcctgtaccttacgaggaaaacaacggacagggcatgcgtgttttagatgggagatgtgggaagctgttagctaagacaagtcggcagattctatcacgagacagagttgacttcttttggtagatgatcagctgcagtcaaattaactcctgaagcaatttatttccagctgatctgcaaggatagattctcttgcgaatgccttctgttgagcaagaaccaacaggctcctctccaaccatttgctctggtgaatgtgcaggctccttctgtggactggtgctctcctcgattcaaccaagaacagtctgtggtgtgtattgttttgctggtgtgttgtgcatccagtccttgtgctgaagtggcaattgtgactagtaattaatttctggatagctatgcttcttcataattgttacttttgtagtagccattggttcccaagtcaaaggttaaaaaaagaactcgtgcatcagtaagtggcattctgttaatctcagtcaaatttacttctgacatatgtttttcttagcactgccatccacatgtttgtgcaaatgtgaacaggacggccggaatcatggatgtcatttctgccagtaatctgcaatggacttaatcgttgggtatattcttttggtagttgtgttcaactaagatttgttttagtgggggtgaaggatccattctctacgttcatctcaactaattaaagcagatgaatggctaataagatcatccacaatctcttgtcagtcactcagtctaagtagcctccgtgttctgatgcctaccagttgctgcaattagtgtttatccggtgcactgattgggctgcctgttttcatgggaccagtgaggaatgaacagactgtatctccattattgtgatctctggcaaaagtttcacttgtttacaatcttatttgaagttctgtcttgtatcgcgttcttggtgaatcagccagtacttggtcagatggtacccacttcatatcttgtgctttgcaatggaccccgaagttatattctagacaaaggaaaaaaccttcttcttggtacactaattgttgggcttgtcgatgttataactgaataataagcgtatgatttacttttgtaatgattttgctggctggatatagcacttgctaattgctatcctgacagatgctcacatgtcatgcagggtact

SEQ ID NO: 2047 - DNA, 1735 bp, Oryza sativa
  N_region (1)..(1): n = any nucleotide
  N_region (11)..(11): n = any nucleotide
  N_region (13)..(13): n = any nucleotide
  N_region (27)..(27): n = any nucleotide
  N_region (31)..(31): n = any nucleotide
  N_region (33)..(33): n = any nucleotide
  N_region (39)..(39): n = any nucleotide
  N_region (52)..(54): n = any nucleotide
  N_region (58)..(58): n = any nucleotide
  N_region (60)..(60): n = any nucleotide
  N_region (63)..(64): n = any nucleotide
  N_region (66)..(66): n = any nucleotide
  N_region (72)..(72): n = any nucleotide
  N_region (79)..(79): n = any nucleotide
  N_region (87)..(87): n = any nucleotide
  N_region (135)..(135): n = any nucleotide
  N_region (143)..(143): n = any nucleotide
  N_region (148)..(148): n = any nucleotide
  N_region (154)..(154): n = any nucleotide
  N_region (166)..(166): n = any nucleotide
  N_region (177)..(177): n = any nucleotide
  N_region (188)..(189): n = any nucleotide
  N_region (194)..(195): n = any nucleotide
  N_region (200)..(200): n = any nucleotide
  N_region (203)..(203): n = any nucleotide
  N_region (211)..(211): n = any nucleotide
  N_region (216)..(216): n = any nucleotide
  N_region (219)..(219): n = any nucleotide
  N_region (228)..(228): n = any nucleotide
  N_region (234)..(235): n = any nucleotide
  N_region (240)..(240): n = any nucleotide
  N_region (251)..(251): n = any nucleotide
  N_region (257)..(257): n = any nucleotide
  N_region (261)..(261): n = any nucleotide
  N_region (267)..(267): n = any nucleotide
  N_region (270)..(270): n = any nucleotide
  N_region (294)..(294): n = any nucleotide
  N_region (300)..(300): n = any nucleotide
  N_region (305)..(305): n = any nucleotide
  N_region (307)..(307): n = any nucleotide
  N_region (324)..(325): n = any nucleotide
  N_region (327)..(327): n = any nucleotide
  N_region (330)..(330): n = any nucleotide
  N_region (339)..(339): n = any nucleotide
  N_region (349)..(349): n = any nucleotide
  N_region (353)..(353): n = any nucleotide
  N_region (369)..(369): n = any nucleotide
  N_region (379)..(379): n = any nucleotide
  N_region (388)..(388): n = any nucleotide
  N_region (393)..(393): n = any nucleotide
  N_region (407)..(407): n = any nucleotide
  N_region (415)..(415): n = any nucleotide
  N_region (439)..(439): n = any nucleotide
  N_region (446)..(446): n = any nucleotide
  N_region (450)..(450): n = any nucleotide
  N_region (454)..(454): n = any nucleotide
  N_region (459)..(459): n = any nucleotide
  N_region (486)..(486): n = any nucleotide
  N_region (492)..(492): n = any nucleotide
  N_region (496)..(496): n = any nucleotide
  N_region (514)..(514): n = any nucleotide
  N_region (518)..(518): n = any nucleotide
  N_region (543)..(544): n = any nucleotide
  N_region (556)..(556): n = any nucleotide
nccttaatccnanaacctttttaaaanggantncccaangggaaaaaggttnnntggnanttnnanttaaantttttanccccaaanggttttttcaaaaattttaaaccccccccaggagggggtaaaaatccngggggaanatttngggttnaaaaaaagcccnccgggttaacntttccaaaatnntgtgnnatttntanccccgggnacccnagnttttccccnaaaagnnttttnaaaccccttanaaaggncccntcccgnaanccctagggcccccgttaaacgggncccccnaaagnangcccgggggaaaagttnncnaangggcccccnaaagccaaangttnccgaaaccgtttcccnggggccttgnctttccccnccttncccgggtcccccantttggggncccccccaaaaggcctggccttanccttttnaaancggnttccnggggggggggttttaaaaaaatggttnggtccngggnttaaaaaattgggtttangggntttccccccaattttttgggaattnnttttgggttttngggggggggggggagagagattaattgagctgtgcagagtgtgatctgtgcgcttgtaaagataaaattcttttttatttttgtagatacagagaggaaaaaaaatagaggaaagttgagaccaagtgtcagttcagttcagttcagttcaaatctttaatctgaaactgaaagagaaacataagtatcgtttagttcagttccagttccagacacagttcagaaattcagatttgaatatgcaaatcaaagtcgccccctttcgtttcaaattccttctacgatctgtgcgggtttcgtggtcaccgccacatccaataacatgacatgcagatcctctgcagaattgctgaaacagtaagcaatggataatatgagggtccggatccacacaataggttgagttctttgggttgtgtttcaagtggccaactcaccttcgtttttctcgtgcacgttttccaaactagcatatacttaattaatcatgcaccaaacaaagaatcatattaatacatttttttaaaaaaaatagcatatacttaattaatcaatcatgtactaataagtcactctattttatgtgtgagagtaattagcttccaacgataagcaaagaacacagcctttagtgtctactactacatcagcagtactgcagacaattgaacacaaaatatgtcgtgcgcgctcctgctgatggtggcgacggtggataggaccttttcgtgactaaaatgaaaaatacagggactgaagcttagggtgatctaaaactctaaactttccatcacatcacatcacataaaaacttttctactcacataaactttcaactttttttccaaactaccaactttccccaaacttcggaactaaacacagccttaaaaatccaagagagggatgataatgaaaatgttctgttccgatggaccagatcgcaaagcagcccatcacgagagtatcagatcgaacggccagcatcgactcggggcccacctgcaggcggatgtgtcatgcaaagcttcggattcggatacgccctcggcctcctcaccaccacagccacgaggaggagaagacgacgcgccgccgccacagctcgcgtcgcgtctgcgctctcctagcgccgtgcgggggtttagctagggttttccgcttgcggcggcggcggcc

SEQ ID NO: 2048 - DNA, 2000 bp, Oryza sativa
  N_region (40)..(40): n = any nucleotide
  N_region (48)..(49): n = any nucleotide
  N_region (51)..(51): n = any nucleotide
  N_region (53)..(53): n = any nucleotide
tcctgtcagaggttcgaagttcccagaatggtgtatcacnttcaccanncnangcaaagttgaatcaaactatggcaatcatgccaatgacatcaagtggtccagtacctgctccaactacaaacttgaacataggaatggactactgggccaacacagctagctccactccagcaatacatggtaaagcaaccccaactgcagctccagggtctatggttccaggagagcagtgggtgcaggtttgttctattagcccttcccttcaagaaccgtgcacttgtaatattttcttcccgttgtagtattcgctgctgtgcttcataaatgcttttctccacttagggttccgttagcaaccctccattaagtactataggatgaacagtgcatttatcggtgtgggatggacggaaccctaatggcgatggcatttatgggacaaaatcgcttgtacgatgacattttatggaacttgcactcattgatagcatttcttggatttgggtgtttgtcaatggcatttcttcttaggtacagacattcatcagaaaaatcgtggtgttagtatggagtatgaatttcataggcgcatttcaagttaaattgatatattacaactttttattcttatttgggtgctcttcacctctaaaattatgtattttctatctcaatcctttcattttggcatgccatcattcaaaataagatgttgagtccttatatgaaatacaaaaaccatagaaatggcacttaatcatcacaatcctatggatacaaacatgaagttttcagtttttctggcaaatggagaaattagtcgtgttgactctcccatgattcaggatgaacgggaactcaaaaggcagagaagaaaacaatccaacagggagtctgctcgcagatctaggttgcgtaagcaggtatttgtttgtgcatttcaagctatactggatagaattatcttttgtagtgccttcaattgatgaagcctaacttaaattctgcaggctgaatgtgaggagttggctcaacgtgctgaagttttaaagcaagaaaatacttcacttagagatgaagtgaaccggatcagaaaggagtatgatgagcttctatcaaagaatagctcattaaaggtttggtttctcattcttcgctctcttgctattctgaaatatatactttaacactgtttttgttttttgttctgtaggaaaaacttgaggacaaacaacacaaaactgatgaggcaggagttgacaataagctgcaacattctggtgatgacagccagaaaaaaggaaactaattgagctatcgtgcaatgctcctgagcataaccctaactagattattggcaggcgcaactgtagtatgtgtattaacttcatacttattgcagttaattgttaccaggttgtgataatgttaatgccaactttgtgtggctggttcctgtttcagatctgtcttggcttatcttttagaagtcaagatatgactggcaatgtaggttgtgacccagttcactgtatctgttagaaatagtttataaactcatgtttacaaatctgtattgttgactactattgttatgtacacctgaagatgaaccagtattttatataagatgcagtcaggttgaacagttggttttgcttgtgctgatgtctaattgtcttataaactgtttgcttgcatcggtattgttcctgtgcatttactttacttgctataatttacaaatagagaatcttgtgttcgtggaagaactcagaacttttccaacctttgaataaattttgtagtttgttttactgactcttttccctattgtttcttccatcgagactgagctttgcttaggctacggtaaatagggaagcagtgctcagaagcattgtaactaagcacataaatttattgtctgtggtagtatttgtttcagcttttatattgtttctgatcagatgtttgtttagcttttagcatgatta

SEQ ID NO: 2049 - DNA, 24 bp, Oryza sativa
tcagtgaggagcggttgagtggta

SEQ ID NO: 2050 - DNA, 62 bp, Oryza sativa
  N_region (2)..(3): n = any nucleotide
  N_region (25)..(25): n = any nucleotide
  N_region (32)..(32): n = any nucleotide
  N_region (41)..(42): n = any nucleotide
  N_region (62)..(62): n = any nucleotide
tnngaactaaccatttcggaattcnaatttgnaaaccatcnnttgaacgacgatacgaattn

SEQ ID NO: 2051 - DNA, 2000 bp, Oryza sativa
  N_region (476)..(476): n = any nucleotide
  N_region (807)..(807): n = any nucleotide
  N_region (1248)..(1248): n = any nucleotide
  N_region (1283)..(1283): n = any nucleotide
  N_region (1289)..(1289): n = any nucleotide
  N_region (1749)..(1749): n = any nucleotide
  N_region (1754)..(1755): n = any nucleotide
  N_region (1758)..(1760): n = any nucleotide
  N_region (1764)..(1764): n = any nucleotide
ggaggcactgacgagtcaatataatgtagagcaagcagtagaggagggcaacaagagagagtgctcacgacaagcacggaaaattagagcagagatagcagtgttgcaagcaagacttcaacaagtggaagatgcccactccagtgcacaacactgacaagatgttgtaacagagaacttgaactcccatctcgagcgacatcgtcaagctaaagatcgaaaatctgagattgcggcgcacttaaagcaggcgagcgtgcaccaaaagtctctccaagatattatagactttactaagccagacgagtttgatctatctcaatatagatatgtctacaatttatttgattttttcatgggctgctcattagatgagtagatgctagtttcaaaatcttgtttcaggtttgaaatagctcttcagatattttatttgtttccaatatagcggagtgaactcctttattgttttttcnatataattttgatttgcaccagaaaagcacagtgaactccttcaaatttaataggagcgttgcattgttaccaacaatatttgtgcactggcttcttccctttttccttatgtatatacatttcctcacataaaggatgctcacgttcaattttttttagtggctttactactgtagcagtaacagtaacgccactaattcttcacgattctggcttagccatggatttcaattttttttttggcttttaaaagaccagcctccccgctttagaaattatagcgaaatccatggcaacagtgtaaatgtcgataaatataccatagcgaanattcatcttattaataagatcactgtaggaaattcgttacagtgcaaaattattgggattaatcgtcgtccgaaaatcttggacacgggtgtaacccaattaaataataaaatcactgtagaaagcacattgcagtgtacaatttatagcattaattgtcgtccgaaaatcatggacattggcatgatccaaccatatattaagtaagggaagtgcttctatgcttctttaaaaaaaacctggcacgaaaattaaagcacatcaacagtgaggattaaaagttgattaacagagtaatcccctttaacgaggggtaattttgtcctaagaaaaagctgaccatatctagcccaccctgtccgcatatcagaatcgactggttcctccttgacttgcacctttgacggaggcgccatcttcgccgccgccgccggcaccgcnatcccaccgggtcgaacgaacccatcttgcccgangccggnacgcttgccggcggcattcgacgacagccttgtggcgtccatgctcgcgcatgccggcgcctccgcgggctcctctccttgacctgcagcaccgtaaacggaggcaccatcttcgctgccgccgctgccatcacttcgtcctctccctgttcctggacgtcctcgccatggctcccggcggcggcgggggccgcggggcgggaagcctggagggcctgcagctagctgaagcgggcgtggatagaggactggagggaggagaggtgggagtcgaggtcggaccagcggaaggggaggaggatgggcgagtggaggacgaggctgtcgcaggcctcgcggaggcgttgcttcttgccatgcagcgtcgcgatggcggcctccatctgcgccggccgtcgtcatcgccatcagagatggttcagggcacagggccgttgccgtggcggcggcggcggctgtngcatnntcnnnatcnccatcgatcgattcttcgtgcggccggtaagaagccgacgcagtttatatataggcacgcggccgcgaacagtacgagacggataggatcagcgcatacaaccaattctatgtaaattcaaaagattgtgatcagccttgtgttaagttcagttcaattctgaatgcatatcaggtatcaccatatactgaggaataaaatggacatggaagctttggcaatctctgccgagaatc

SEQ ID NO: 2052 - DNA, 2000 bp, Oryza sativa
acttaagaaaattgcccatctggtgctgtggatagattaactgttagtacaaagctaacaaatactccctccatcaaaaaaaaaaaaccctgggattgggttgtttccaaattcaaattcgggattgaaatttttttgggatggggggggtatttcataagaaattatctaagaagcacttacgcataaggcttttggagaaatcgtacttttagaagcatggcacgaataatattcagattcagattttttatctcggtttcagttagcacacttttcaaacaactaaatggtttgtttcgtccaaaaactttatacataaaagttactttaaaatatcaaatatatccatttgtcaaatttgtaataattaaaacttaattcatcatatgctaatgactttcccgttttacgcgctaacttaatcttcatcagttttaaacaccacttaattcatacccctccgtttcacaatgtaagtcattatagtattttcacattcatattgatgtaacatcaatataaatgtgggaaattttagaataacttatattatgaaatggaggaagtacatccaatagctggtcaacattgctgtttctactcttcttcacctgatgatttattttgtgatgctgctccgaagccggtcgacggggaaggctaagaggatcatgcctgctccgccgccgctgccgtcggcggcggggaggcagccatcgctgaggagggaagacagcgccgccgccaccgctgccgccgccccaccgtcaccaagagaggatcaagtagagcaaattgccatagtttcatcaagagttctttttttccttgtaatttaggtttgaccaagatttgactcacacatcacctgctgcttgttcttgcaggtgtgcccaatctgcctgaccaatgccaaggacttggcatttgggtgtggccacatggtaaactgaaaattcagactaattcagagttttcttttttaacctcttaacagatgatgaaatctattcaaatatgtagaaacatttgtttgatcggattgtttctgacatgcaaaattgtagagaaaaaacatttgtttgattggattctctttctttgtgaaaacaacagtgctgcagggaatgtggggagagcctgaccaaatgcccaatttgtcgacagacgattcggtccaagctgaggctgtactcaggatgatcaaatgcttatggactgatggaatggagcttaaatctgttcttaatgtacagaatgcatgaacatatcgtttgtgagaaatactcaaatcaaatgcatgcattggatttgtgctgcgagataggggaccaaacgaatgattagatttgtttttggttttgttcatgttgatttgtaacaaaagaatcaagaatgtggtgtggggtaaagctagctccatgtgcataagttttcttctgtcttagctccttgtatagttactgcgaaatagaacgaatgacatacaatgatacaacggggaaataaataaataaataacttgaggagaggaaaaccgtaatttttttttcttatgttgcttggggagatttgcctctggtgatgaaaacaatagatttctttttgttatatttgtttatatcaaattgtgaattttgagttatgtactactactgagtattgtctggagtttgaccaattatattctgctagttatctactgggatttcttgtaaccgtcctgatgataaatagtagcaatgctgcaatgcactgagccattattctcgcaaataaatgggacataaattggattgatttgaagaccaaccgtttctgcagcacgccctttctgttgcttcttcctcctcccttatatattaccttcagcgtttcctcgtgcaaagaattccaaacaaagagcccaaatcattacgctgctgctgcttcttctgacgcatcataatacagagaaagaagctcattgcattctcaggttcagaaagaaggaaaag

SEQ ID NO: 2053 - DNA, 2000 bp, Oryza sativa
ttttgtgatgctgctattatacttgcgagatactactattttgtgatgctatgatacttgcgtcttgatactactttgtgatgtcattgagacaatatggcatatactgacttcctcgttatattcctgagctccaatgacttgctagtttctactttctccatttcacgatgtaagattttctagcattgttcatattcattcaaatgttacatatgtatgtgtttagatttattaacatctatatggatgtaggaaatgttacaaagcattatgaaacggagggatctagtggtctactggtcttcccttgcatggtgaaagaacttccgttacatagtgaaagatttaccgcggcaaactcacacattagcctttctctcgtttaaccgctggtctcccagcctccgcctcccaccgactcctcgccgccagccgccacagccgcggaagctcatctccgccgcaatctaacgccagcgccgtcgtcccttgaccaccgccgtgccgccgccggcggccgtcggtgtcgtgctgcatctactggctactgctaaagcaagtggagatccgacggatgcaaccacgggcacacgccatgtgaggggacatgaggtgggcacgtgagcgaggggcacatctgtctgtatcttctccctcctcctactcccacaaaaaaaaagccgttcttgatggcgccatggagatcttgggccccctcccaatggcggaatcttctcggcaagcggcaattgatggctgtacttgggtgaaccgcgtcgcgaccagctcggctgcgaactgttcctcgactactactactacagtctctacttgcccttgctgctgcaatggtggtggtccatgtgaggtgaattgatgagctaaccttgtaataatgtttctctgaagatctgaagacttcttgcaaaagcaatataatgtggagttggaactctgaacttgaagtcatgggtgttcttggcttgcacggcgagagatttaccgctgcaaacctgtcaaaggggaaaatgtggcatcggctagtaaagttcagatcaccagctagtgaattgctgttcttcagaaacatcttggcaacgtttcaggttgtggttgggcacaaggaacagccgaacaggagcagattgttgggctaattaaacatctgcaatgtgcagcagggacaaggagaaacatgatgagagcattggcatttttctaacaattcttaagtgacagtttggcaggggcaagcgtgccacatgacatggggatcgtctcatcattttgcttttctcggtctctgggttaatcacatgagctccaagtgtaccatgtgtctgaactctgaaccacttgatgaataggattcctgtaacatgtttgatgtttctttggaagcctcaacccaagaaagaacacacacatgttgacttgggcagtcattggagaccctggtataagcaaggagatgcctgacatgaataggatgaggcacacagaaacttctgcagattacagatcaggacatgaaacgctatagtagcaaagtactatggactagtataatccatttgagaattgagatgagattagcagcaaacgggaatagaaagcaaactgaaacaggcatttatttgggcggcattaaacctgacgactgtttctgtcctgataaatgttttcaagtttctgaccccaagccagatttatggccaatataacagcaaccttacacagttataccactaatttattgccgttttatcagaacaaagcaaatgtgcaattaaaccccataattgcagggaaaatgaggccatattgttatcactgaaaccaaaaaggtttaattttctcttctcattttctcttgtagtaacagtttgttttcttcttgtaccgagagctactactttacctttgtgcttttacagcctttctcagcgcggtacacactacacgctgctgactccggtgaccatagagaaaggcaa

SEQ ID NO: 2054 - DNA, 2000 bp, Oryza sativa
cctgttacattcctctgcttcgtgcaaaaacggatcgcaaacaaaacgaacaattcgaacaacacttgtgtatcctagagaggaacgtacatcgacattgctcagatacatgcaccaaccaacaagtcagagtttttcaatctgtttatcaaccttattgcattttggtaaaaaaaaagacacacaactaacccgagctctttatgggtgcttgtgtggatgagttagtcagtacttcttccgcaccgagtgccagatgagctttatctggtaccacaaaggagatatcccatgaactccccttgacaaccgtgaatcaaagacgttgaattcacggcgtcgtaaggagtccagaaggacctgggctggtacccctgggaggagtacagggattgcttccgctggcacagaagaggccagctcccgcgccttctgcaggtgagcatcagcaacagatgcaaccttgaaaactgcatctgggagctcatctcccatcctgacctctgatcggccaccttcccgtgtaagcagaccgcactcctcagctatacttgctgggatatacggtatcctcccttgcttactcacatggtgaggcaaagccttgagtagcagtagcagcccactagctttgcctatgtgtgaggcggcatgatcagcgatagttgactgtatcccaccagcttgcaacgtcatgtaaaggatggtagattgggtgtcctctgcatacctctccaattcagaaattgtctcaggaatggcataatcatcccggtttgcatcgtttatccttgcctccacagacctcttgagccaatgcttgctaatcttgtgctcggacacaacagaagagagcacctgggcaacagggtgctcaaccagcttgtttgcaaagaccttgtcgactacatctttccaccagaggaggcgcataaggccagtcttagggtccgagacaacatccatggcctttgccgtctcaatgttgaaggctcggaaggcgaatgcagccttgcgcatagctggaggtaggtggagaaggcagagatagtggtgataatcatagttgcgaacttgctgcacacagtacgagagggcggttcgcaggttaccacccgctgcagctgtactacccatgaactctgtttgagatgtgaaagaggaggtcctgcaatggagatgaaagcagacatttaggtacattccaatagtttttttaaccgaaatcacttattacaattccctactatgcataagtaatgtaaatgataaatactagagaaataatagatagaacgtacacttggtgagactacaaacaaagaaaaaaaatgtacaaaaaaaccatggtctccctctgtgcattgcatgaattccagattagaacaagcatcttttgtagaagaacaagtgcaggtgaagtgttggtatgatacttgtagcacaaatagagaaaagcaggagacacagaacaaatagtagctatagaatgtgcatccattatgctatgaatttatcccttccccattatttgggatatcactatttttgttttcatttgccacgtcataaaatcacaggaattgtattttttttgttctctcttcatcctactcaattattgcggagagaagtatgtagcaggggagtagatgaatagaagaaaagtagcgatggttgtgatatataggaaatatagaaggaatcattagatagttgagaaagatggtgccgtaatgtgagcgagagagttgtggctggctgctatggcaattagcagcaactagcaagggctgaatctaagaaaattagtactccctccagtagccttgttattgtgcggtgcagaaagtaacagatgaactaggggttgaagccatagccatagaatagatagattaagagggaggaggggaattcgtactcagtagtttccgggctttatgagtgaaggaggttgttgccggaccggacttgagtaggaggaggcgcaggcggtc

SEQ ID NO: 2055 - DNA, 722 bp, Oryza sativa
  N_region (20)..(20): n = any nucleotide
  N_region (24)..(24): n = any nucleotide
  N_region (48)..(48): n = any nucleotide
  N_region (212)..(212): n = any nucleotide
ccttaaagagcttcaaaaantcgnagcggtccaaggtcctcaatgagntaagcccggcgccgtcgtctccctgctctttcatcagtagtagctggtaggcatgcgccgccgcgattttgggtggggatattttgaatcggagggcttggctcctggcgggcctggttaatttggtccgtgaaatggtccttggagtgatttgatctgcgggngcctatggatttcccggaagcaaatcgtgatatgatatccaagattgatttgatagtttaagtgactgttttagactgtgtggataccgtggctttcgttaaccgctgttttctgggcatgcagagtgcagagtttccttgtaagctgatgttgtttaaatgggcagaatgttacattgttcgttatatagtatcttgatgtactagtggatcgctatttatttcctgggaaaaagcactttacatgcttaagctgggatgctgtttagattttgatttcctgataatcgtgcgaaacaatctatttcttatagccatttctagagaagatgaaatgaggcaacataagttacatttggtgtgctgtcaaatgttatgttatttggtcaggaatgtaccttctctttgagcaaagcgcttaagggtgaagatcagtagtttagataatattttctggatagaagatgagcacatgttctagtcttcaattaaaaaataatcttttagcta

SEQ ID NO: 2056 - DNA, 2000 bp, Oryza sativa
  N_region (549)..(549): n = any nucleotide
  N_region (553)..(553): n = any nucleotide
  N_region (555)..(555): n = any nucleotide
  N_region (557)..(557): n = any nucleotide
  N_region (1422)..(1422): n = any nucleotide
  N_region (1991)..(1991): n = any nucleotide
tttcaaccaagagaaataagactgtaatacccgttgcaacgacgtgtgatgaccgcagaaaaatcttaatcatcagcactataagtacaattattacagccttagtggctcgtagaatttgtttgaccatgcacatcttttttgactcgcttttcgttgcacggccctctaattaatctgtgtttttgcagtggaaatctactggagacttacaccttgatcatattgataagaggacgttgctgtcagatgacatttgcatcttggccagatggctctggagtggttgcttggtcacatgtattgttcgtcgcatttgtcctggaaaaacgtgtgatgatctggtgttgtgtcaccatatttattgtccaatctttcagaaaaaaactattattattccttaaataaaaatattatcattgtcatatgttgttgttactattatccagaaatgggttaaaatgctcatagcaataatggcatatagcaaagttattttttaatagataatggaaataaaattctcttgccggatagctggatcagctnacanananacataattattaattctcttgctggaaatcaataacaaagttatttttttatagataatcagtaacaaagatagctggatggatgttgaaaaggtggagatatattccaatttttttagaaagaaatatattccaatccggagtccaaacttttggtttctcttgctgtagctagcttgttaatcttttcctcctatactagtaccagtaattaattaattattagtatccagtaaccaagccaatccccaatggatgcagtagacctttgaccacctccctcttcaagttagaatcttcttactaggtgctaaggttttgacaaaaccacaagaaaatcaaagctaacctagctaagcaaactgagagaacatttttgagtccccaaacccaatcaaaaatcccaaattttatactccctccgttttttaatagatgacgccgttgattttttctcacatgtttgaccatttgtcttattcaaaaaatttacgtaattataatttattttgttatgagttgttttatcactcatagtactttaagtatgatttatatcttatacatttgcataaaatttttaaataagacgaatgatcaaacatgtaagaaaaaatcaacagcgtcatctattaaaaaacggagatagtagtgacagtcaaattcaaattccaagccgtcccagcaccaagagaccttctccagtactctactgccttaactatttttccttttgtattatactaacgcgtttctctctcctccctctctctgaccattactctctctctctctttctctctcctcttttttttttcaccaaccatcgtaattgctgactttgagagaccaaaaaaaagaagcnaaaaaaaaaaggaagaaaaagaaaaaggaaagagaagcagacagaaggagaaggaagcagagcgagagtagttgccagaaaaccaaacaaaaaaacaagccaagaaaaggccacctcagtgagagagggaagggagggagggagggaggagggagagatctcctgctgcctcgcgatttccggcggcaaaaaggttcgattttgatccccgtctccggattcgcccagccccgatttgcccttgcggcgcggcctcgctggtttctgcaagtgatagagaaagatcccgattttaacagtggcagttcgtggcccgcccgcttctgcttctggttttgggcgattcggcggttgctggactggagggagtcgcgggtgcagtgttctggttcggatctgagcgggtgttgggtgttttcaactctaattcgggcgagcaatgagggttcttgatgcgtgacctgatgcgggaggcgtattgggagaagatctcttgaagttttttttttttgggttttggtttttttggggggtttccttggagtggagtctcttgcccggatcgccanactcgttct

SEQ ID NO: 2057 - DNA, 2000 bp, Oryza sativa
  N_region (417)..(417): n = any nucleotide
attatgctagtacatctggaaatgttaaagaactgggagaagaatagcataatccatgttccacgccaggaagcttcccaatcatgcccccgttctatgataaacaatgcagacaaaaaaacaatctatgatcagactataatcgcatgatatcgaattataatatttgctatcttccaaattgttcaactgttcaaattttttgcgccgtctgtccatgatgagctcctcaacagtttgttttcagatgcagggtctgtctgtctgtcggcggcggtgacgatgaagatgaagcttaacagtagcatttgcactgatgacaattagattggttactagatcattttggtgttgacaggatggttaccatggtatgatcttggatgaaaaaaaaaaccatggtcctgcatttttttngattggaacactgacaatatcctcattgaataagtttattaccattagcatcatctgtggtggtgcctcagctttcatgaaatgaaagtcaatccatgatcaccatcgattgtgagaggctaaataatacagtattgatgttgctgatgaagattgaacaattcatttgcacaatgaacaagcaatggggaatatatatatatatattgaagaaaggaaaggtaaaaggtgagaaggcttactgttttttttatttttcttttttcgagatgagaaggctgcatctcgataagctagagagaggacggttaatcaaatgtttaggggttaattagccttcttagtcgtgctaaatcgatcaaaaagggggtaacacagcacgtgacagacatgtgggtcccactggaactttctatggggcccacgggcgcgcttgaccgcgattgggcgatggaggagtcctatctgtaacgggtagaaaagtcggtgtgcgcacagcacaacaacacctgttcccttttacaccttttccccctcccattttcccctattttttaaattttacttactctctccgtgcagtcatgattttccgtacctaacttttaccccgtacctaacttttaccgtgtgtcttatttaaaaatatttttaaaaaaattaaaaatataagtcacgagtaaagtattattcatgttttatcatctcataacaataaaaatgctaattataatttttttagaaaaagacagacgattaaaagttaaacgtgaaaactgatggttgtactatttttgaacggaggtagtattaattaattaattataaaaaaagaaaaagaaaaattccaccaaaccaccccttcctcctcctcttcttcttcttccccgcaacgaggtgaagtggaggagacaagagaagctcgaagaagcttgcagccgcattggtcgtcgtcttcttcagctctcacctcacctcgctcaggtaatgtccattcttcttgttgttgttcttgctcgggtggttagtcgagttcgtcgtctgccacctttgggttgggggcgaattttgatctgggtaaacgagaggaagaaaaaacaactagtatttgggttaggtgggtgtccatctccctcctcctcctcctccacccatgtgaggcgcataaataaaatttaaggaagaagccacggccatggcggggaccatggtccgtcgtcggaatacctccaaccccgcagtcggcggcgacgaccagaccacgcatttcttttccttttttcttttttctcgaggaggagcaggagcggctttgctgttgcatggtgtagtgtagccaagccacctgggcgggcctcgccggatcgccgtccacgtcccggcgaccggtgaccggccgctttcggccgcgggcaccaccaacctccctccctctctcccaaaatctttgcatctttcccgagtccgacacgtgaggacgattttcttgcaatgccgttgaattggtactagtagtataagagaggtgggggttttgatgctcatttcttgggtggattggggggagtgcaggtggggaggag

SEQ ID NO: 2058 - DNA, 2000 bp, Oryza sativa
agctaaatcgacttttcatcacagcatcacaggattcaccgcgcatacggatagctaaaatccgagaaagggctaaatttgagccccgggtccacaggccagtgagccaatacgcagcatcagtatccgctggtacatgtgtcattgcaaggatctactaaggaaaaaaattacggagtgagaccccagcggttgccccacgggaaaagctgaacgatcgctttgttcttatacccgtgtcacctttttctcccttccatccacctttgtgtccttgtcttcatctccctcctccataggatgccgtcacaggctcacagtgaggcagcggcagttcattcttggtgagctgcagcagagccaccacctgttgtcactggaggtcagttcagttcagctcactcacctcacctcactggctactggctactagtgccttttcttgagttcttgaaaatcttgcttccttctattttactcttgcccttttggatcctttgtcaatgcgcggtgtgagcacactccatcttcttctttgtttgctggctgggaaaacgatggggaaatctagagcttgggctaaggacctaatgggtttggagctagttagatggtgatgtttttggcttaattgcttaactacactaacatgcatgccgattgcagaagccgctcttgctaaactgctggtgctcttaagggatcctgtcttcttgtttcaccgtggagcccttttggggttttcgccatcagttctagctgatgtaccattttcacttcctgctgcgcagaaggaagcttattttgagttaatatttctagtgggtttagagttagacttctgagctctgactgcttgtttctgcatctttcttttctctcatcttcttctcttgccctccttgtgaattgtatatttgtctagatttagatgcaatcaatttgcataaatactgtctaaatagatattgtgaggttgggcctcactccagttagcaataaaacttcgttcagaggttttaaggtttactactatattcgagttgtccaaaatagtaaatgccatcaaaatagtaggccctaaagattgtcgagacaaagaagaagcatttcgtttttagaggtgtttaagtacttcagttcttttgacttctgagaggacgtacctgagtcacataaatgcctttgtaccggctggttttaattgcatcggttggtgacgcttctggatcaaagtgataggttcaatgtcaatgggcttccactattggagctgacacagaagctaaaagttgacgggcaattctgttaaaatttgttttaagaaactctatagctgtattttgccaaaaactttaccttttgaagtggtaggtacaaagagagtggaacagaacaagcttcactatatcctttactttcttttctgagctgagcatcgctttctgcattgaaaggaaaatgatattatggttagctgatgaagaaacttattaatcatgaatagtagattagatagtggtcaatttctattaacatggcagataattaacagtactttacttctgaacaatcattggttaacaaaatacttgctgagctggcatacgccagccaaagtttttattaagcttagaaagtgttcaaagggatttctttgttttagtccacgagtccaaattcttgtatttttcaaccttgtctcatggaataaaaaactaacgtgtatacgatataattatatgaatttaactgggataaaatacaacttgctttcagattatgttagcttgggatagttttgcaaagatgacttgatacacacaatttcagtttcttaatagaatagcacccaaggaaatgttctgtctgtatccaccttttgtacaatttggtgggaatatatcttactaacatttatatttcttattaatttctagggagtttagaacggcgttgaatattgatagatatttagcatctcactaatggataataaa

SEQ ID NO: 2059 - DNA, 2000 bp, Oryza sativa
  N_region (196)..(196): n = any nucleotide
  N_region (198)..(198): n = any nucleotide
  N_region (212)..(212): n = any nucleotide
  N_region (227)..(227): n = any nucleotide
  N_region (1459)..(1459): n = any nucleotide
gaacgatttttatgttttccctaacaaatttatttggtgtttttaaaatttcacatcatctaccacccttcttgaatttcctggatcctttggggctgtaattttcagatataccaaatgttttgacctagcaacgacaagatacagtggaggagcaaaaaaacaaagtagcctgtgcaaagcatgcacaaagaananacaatagaaaggtnttttttgggtggcanaaaaacggttaaggtttcaacagttgaaagtaaaaaaaaaaaaagaaaacacacacacaacgcggaatgtgaaaggtatgggcattctctagaaggaaggagcgttcaacgtgtttgtcagttgacaccgtctcaatatgcgggctttattcccaggggtcccagctgtcatccagcaaggggccgtttagttcccaaaaagtttttccaaaaaacattacatcgaatatttggacacatgtatgagtattaaatataaataaaaagaaaaactaattgcacagttacgggggaaatagcgagacgaatcttttgagcctaattagcccgtgattagccataagtgctacagtaacccacatgtgctaatgacggcttaattaggctcaaaagattcgtctcgcggtttcccggcgagttctgaaattagttttttcattcgtgtccgaaaaccccttccaacatccgatcaaacgtccgatgtgacacccaaaattttcttttccccaactaaacacagcaaggtttaaccatgcaccacttagcaatacaattattacaatctattaaaagcacattaacataacatacaacaaagtaaataaataaaataataggaacccctacactaacatgttacaagtcagctgtaaacacatgtgaaaaagagaagagaagagaagagaagagaagagaaggaaaacaatctatatattggtagccagttgtagcacagactctaatactgtacagactctaataacacgtgagtgtataagaggtgagaccatatattaatggtgtaatatatgattatagctaacttagctattagatcagctataaatgaattggagctaatagttggttatattattaaacttactctcatatgctttccctttctcagctccagctcattcgctattcgaagaaaaaaaaaactaccaccaaaatacgcaaaaaataataccagtactagatctcgactaatcccgcgtcacgaacttgctaatcagtcaataaacctaatcaggagacaccaaaccaccgaaaaaaaaaggagagaaataataatattcgcgcatccatcacgaccccaactcgtcctcaatcgcggccacccgccgacccagcgacgacagcgcagggaagaagggaggacgcgacgcgacacgagcgcgagaggaaagcggaggagatcgaggagaaactccatttccccccccctngccttctccgatttccctcgcgtggaatccccttggactcctccccctcccgccgccgcgcgagccgggcacggcgagcggcgccgccctgcccccgccgatctgctctgccttctcctcaggttcgccgtcttgttggattcgcctttttttgcgttcgtttcgggcgccgtcagatccccgcgccgtgtttggtgagcgtgagctaacggaatggcacggccagatctcgtgggggggatccgaggcggtcggcggatgctagatctggggcggggagctgtacgatcgccgccgcgttagatctggtcccgttgctcgcgccggattccgctgcttttgttgttcaaattgttttggtttcgagctttacctttgcgggctattgggttggatgctccgtgatgcttcgaagctacgggagaatgttagtgatgatgcttttttggatcttatggacgaattttatacaggggcttgcaccgaggaggaggaggaggagagagctgagcagaacaagctagattctcaaggaagggcg

SEQ ID NO: 2060 - DNA, 2000 bp, Oryza sativa
  N_region (186)..(186): n = any nucleotide
  N_region (1991)..(1991): n = any nucleotide
cgatgacggcggcggtagacgcgatgtagaggcggcgtgtccggcgcgtagcggcatggtcgatgcggctcgtggtggccggcagtctagcgcttgggtggcggctgatggtgggcagcggcttccggcttcgagtcggcagcgcgtcgaccagcttggggggggcgtcggttcttccgccacccntccccacctcccaccccctatgaaaccaccattcttctcttcctttctctctgccttcctttctctcttccttcccctccccctagtgctcatctctctgtggtggtggtgaagtcgcaggtggtcgctgaagttgattggtttgtcccgcgaagcccggagttcttcgccggaaatatggttgacaccgatgtctatgtgccctctcttcatatctcagttcctctccaggccgaccatgcctccttggtgccccctccattggctatttgcttacagatctggcagtgctctttcggtgcttgaggagtttgttcgtccgcggtgttggtcttgtctgtctgtagttagggctcttaggcctcgttggtgctggctgtgtgaacttgttgaagcgccaattttgaagcggtgtgcttacctctatggtgcgagagttgtttcctcttacttcttggaggtcctgcacttttgagtgagtccgggggcaaaagccctgcttagtcgtccgggatcggcaatatcgacgcctgccggtgctgtttcctccttggaggtgttgccttgtggactctcccctccttgtgtgaaaacttagtccagctgatgggcgggtgtcgacaacggcttatgtcgttgttcacctccttggaggcttcgtcttagggtttttgctcttccctcggccttctgcggtccgtagtcgtttttgccttcaggctttctgtgtctctatgtgtaaggtttttatcggttttactttagcaaaccgtatagttgtatagtttttggtccggtttttcttataaacagggtcaactctattttgtaatatttgccgcttccacttaaaaaaaactgactaaaagctgtgaattgtttcagtggtcaaaaaggttattacacgtttggtgtgatggtggagaaatggtctactgcgcgcatgatttttagcttcaacggtggtaatgccaacgaaaatgtaaccggtcagatactccgaagctgcatcctaaatgcaggtcctctcactcactggccactgggcctgagcactaaatccacattctctggtcccacacctgtcaccgtcccatccccacctcggccacagagagtacagcgtaatcaacacttcaataacaacccacatttccacaaattgataatccttacgcgggaacgacgaaaaaactctttcttcagctaccatttcgaccctgcagtcatctcactgacgggtgtgccccaccagatgtgggccaccctatatttattcgaaatttcgaaatcaaatcggtgcgagcgatgagccgatgagtagagtagttaacggttaatcaggagcacacataggagtatactcgagcgaagcaccgcacccgccgccacctcaccgcccgacgacgacgacgaggccactgcgcggtggggcccacatgtcggcaccaaaataatttcgtcttggtctcttctccctctcctcctcgccttctcctccccccatttcgtcggcctctctcgagtcctggactcctccctcgccacctccccaaattagcagaagccgcgcaccacgcgcacgcgcacgtccgcgccgaggaggagctggcctcgcgcgctcttcgaggagagaccgcgggggaaaccctagaggctgcgccgccgctcgccgccggccggccgcggcgggtggtggggcagggcctgacgacgaccggttcaacaagcagtaagatctgaggttttgggggtgggattagggttgttgccggggtttgtttggtgttgcggcggcgccgcgnagggggttc

SEQ ID NO: 2061 - DNA, 1493 bp, Oryza sativa
  N_region (707)..(707): n = any nucleotide
  N_region (1040)..(1040): n = any nucleotide
  N_region (1043)..(1043): n = any nucleotide
aatcagtgggcccattatttatgccattagatctgttatagataacacaaaactaattaaatctatcaaaagaaatcaactatcctcccaaccctccagccgtacgtgcgtatatagtatgtacgtacgttttactcctcccaacatattctcaagtttcaccacctgccgcctacctctgacaaatccgtgggatacacaacaaacaaagataatctctaacctagacaccacgccatagttattagttactagagcacttagtatggataaggccagtgaccggcatttgcatagcaaatttctctagtcctataaaaattgatcttcgtttaatatagctttgataggacctgaatagattgagaactctgcttggtttctgatatggagactgtctaattcccaagagaccacggcgtttaagatttgaaaaactatactcgcctgattcacaatacatcagcatatcgtgaattatgcccagatttgaaaaactatactccttaatttgaaaaatgtcgggaaattagcatcagtgttccatcggttaagtggttccctctaggtttctttccgagacaaaaaccctagcaagcatctcatcttttccatcactcaagtttttagggattaaacatgatttttgatagttagcctttaatctagtaccttgagcaaaagattgaagcagaacttttagagtnaaaagctccttcccacaatccttaacatagagctatagccggaacttctcatgtctagatcccgtccgcaggtggtgacgatctttggtgaacgtcatttaagggtatccaaagccaaaaaaaaaaaaggtgtatccaggcttggtttaagcacagtaggtggcaaaattaccagtacttacaggaaataagttaaatacatttagttattttgtgtgattattatctaaaaaaagttattttgaaaaaataaacactccagcggtctccacgcctgagaaattagtattatcgtttctaaaaccactttacaatagcttccattgtaaggtngtntacgagtcatggaatatacgaatacgctataccttcatatgtacaataaagctccatatacgataagaaaatcgataagagattatggaaataatttttacggcaagtacatagcagtgtactactcgaaaaaggattgagacggtaccatatcgtgcaacattcacatggatgatagaacactttcagaagcataagaacttaacatttgccttctacatcactacgttcagtcaaaaatttatgaacattgctgcgtatttcatggaagcttagcaagtaggtagtgattcgattttggcacaataaacaacctttttgttcctacgctaaggcaaatgcaagaagaaaaacaacacctttgtccgacccgtcctcctgctccaggcaccagagcacgaggcggccgtgggcatcggcctgcatgagaagaggcgccaccgcgccacc

SEQ ID NO: 2062 - DNA, 1252 bp, Oryza sativa
  N_region (1)..(1): n = any nucleotide
  N_region (6)..(6): n = any nucleotide
nccccnccgccccccgaacctcgcaggtaccagccggcgacgatcctgacgatgctgcaggagatggggaagcaggtgggcgcggggaaggggatcgactggagggcgctggtgcggaggacgagcaccgggatcacctccgcgcgcgagtaccagatgctgtggcgccacctcgcctacggccacgagttcgtcgagagcgtcgagcccgcctccctgccgctggttcgccactcgccgagatttctgttacttttttatatatattcgggaaattgttgagattttatacagtagtagaagtagatctcagcttgttttcagtgttggttgttcgtttctctgatggtgctgtgctgctgtgaccgataattcgtaggacgatgggagtgatctagaatgtgagattgagattgtccctgctccgggtaatgaagcattagctgaggccacatcgtttgccaaggtatcactttctggaaagaccattatcttgtacaaccgaagcctataatttcgtatagcgtggatgcttctttcgagtataagatgctaaaactggttgatttccccttattttcgcacctttttttttctgtgtgattatgtagttcttgtgtgtgtgcgtgtgtcattttgggttcatacgaggcagttgttgcacatattatttgattatggtcgtgatctcctattttatcaccgttcagtatctatctgataatgtgtagtgtttctattattgttggcttccgcaagcacagtttatgctttgacactaacataggttgttgaataacttagtagttatgctagtgtgtatagtttgagatagacagaatatgggcaaacatattcaaaggctattattgatgctcaatactggcagtgttcatagcttgattggtgcttcattatcaactggaagatagtgctccgtgtgtttttcactacaaatagggcaataaaaagttcctttgtggatgtgaaaatgcatgggaaaaatgttctcttttttcagtgtgtggccttccctgccatctaataatttacaagttaaaattgtgtgtagtggcacacttatagtgcttgcaggcagtcttgaattacatgtgtctagaaagacataaaagggcaatcaattttagtttatggaaaagattgtcgtatggaatgtgatgcacaaaaccacctaacctctagtttctttggcaattttgcatggtattcttttgaggcctgtggttctgtg

SEQ ID NO: 2063 - DNA, 2000 bp, Oryza sativa
  N_region (1117)..(1117): n = any nucleotide
gacatgatagccataagttaaacaatacatagagatgcagtttttttatttttatttttatttttttgatatatttttcacacttgggagaatacaggaaccaaccatagaaaaaataaactcaaatagacaaaatatgtgacttgtagaattttccaaagctctatcgaaaagtcattcgggtgtcatttattaaaataggcgtaactttctcatacggactcagaatcaggcaaataatatatcacggacatctacagaaaaagttacatccaattctccctagcttcgcaggttcagcgatattaaaacctccaaattccgcttgcaagattgtgttttcgaggagagaagtttttcggtagagatttggaaaattccacaggccacatatttcgtccgtttgagtttattttttatatggttggttcttgtgagttcctaagtgtgaaaaaaatgtcaaaaaaataaaataaaaataaaaaatttgcacatctctctcctctgcactagttcggagagagaggagaggagaggaaaaattatacaggtcacatattatgtccatttgagttcattttttctatggttgattcttatgtgtccctaagagtgaaaaaaatatcaaaaaataaaagaaaaataaaaaatttcagggggggtgccagccaatctggcgcgctccccctagccacctcagcatcgccccgccacgtcggcagggggacggcgccagccactctggagccaaaaaggaccatttctgggataagtttttttaggggtctatttgcaaaataagtttttcaaaaggaccaaaatgtgaaaaatccagatttgtagcacaccacggcaaaccaaaaaaatatatttacccctttacttacaccatagccccagataccagacctctccatttgctaggtgcaccgcgctgctcctgctctattgcatgctgatccggccacgtccatgcttggcgacggcggcggcggtcgggtgcatcggatgagaaggtgaaggcggttacatcaccgccgacaagggtggtcagctcggaggcagtggatcgggcaggctgggttgcatgcgacgagcttctccggtggccgcggtngggggggggtgaagctccgtccctcttcacatctcgttggcattcggcccatactaatgtaagtcccacaaggtaatgtaagtccatcttgtgcatagaaaaattattgacaaaaacacatttcaccaacttgtccttatatgttaggaaaattctacctagttgatgcgggatatggagcaaaacctggatttttacccccttttcatggtgtgaggtatcacttgaatgagtgggggactaatcctgtacagaatgagaaggagctattcaatttgaggcactcatctcttcgggtgaccgttgagcgtgcatttgggtctctcaagaggtggaaaattttagatgatgctactccattttttccctatccatctcaagtggatattgtggtagcttgttgtattattcagaattggattatagaagatggtggtgatgattttattatatcagaggaagaatggatagccaactacaattatgcaacatcaagaagtgggcaagctagtgagcatgcatacatggttcagttcaggcaggataccgcagaccaaatgtgggaagatcgtcaagctcactatggaaattgaaaattttaggtttgtagtctatgtatttgtatggaactctaagacttatgtactcctttttaagacttatgtatttgctgacatatatttgcttgctgaaatttaaggtttgctgtaatttgtatgcttgctgatatttatagtggtttctgatatttatatgcaaactgacattaatatgtgtgctgaaatttgtattggttgctgaaatttgtagcggtagctgaaatttagatgcaagcttaaatttatatgtttgctgaaatcaatttctttatacatgctaggca

SEQ ID NO: 2064 - DNA, 1065 bp, Oryza sativa
ggtttgcacgggagagagagaagccgggcgggaggaaggagacgaccgggtgggtgggaccaccggtcgggcgcgcggcgtcagcgcacgtgcggcgcgcgtgcgcacgcgggaggggagtggctcgggaggctgggtggggcggcttgggccgggcggcgtcccaggcgggaggaggcgggagaaggtgggccgggaaggagaggagggaggggcggcccagaaggaggaggagaggagggagtgggctgcccgggaggggaagagaggcctgggagagagaggggaaagagagggaggagagggagactttgggctgggccgagaaagagagagggaggactttgggccagacttggcccaaaggagggagagggatttatttttagtttttctttttagtaaactttgataattgtttttgttgcttaataattatttccggtgctctgaaaattcaagtaaaatttgagggctctttttagaccaaggagaatttaaccaaaattctccgggccacattttgaatttttcttgtacgtattttagtgtttgccaatttcttttcgaattttaattaattctattattccttttagagaatgatttttaattcgggatgaatttatcaggacgtgacaaccagcatcgctccgcggtttcggcggagaagcagttcaagttcttggccaagcacttttgctgatagcttttggctcgggggagaacagacgcgaagagcaagtactgttcaacgtcggcgacatcccgtacaactacaacgccatcttcggcagtgcgaccctgaacaagttcgaagccatttcccaccacaattatctcaagctcaagatgcctgacccgataggggtgatagtagtcaaggggcttcagccttcggccgcttcaaaaggcgatctagccataatcaacagagcagtgcacaatgttgaggccgaaccgcatgaccggccgaagcacgcgccaaagcccactcctcatggcaagataataaaggtgcagattgatgatgccgaccccacaaagctcgtatcactgggggcg

SEQ ID NO: 2065 - DNA, 2000 bp, Oryza sativa
tttaatttccttagttgccaatctaaatattgaacataatcaaacagataaatgagaaaaagtttaattttcagctctctgattttccttagttttctgatttttttatcaggaaaacacactcagaaagctacctagtacatgatgagacgaatcttgaggaggtaatgttctatcctatactagatagctatattttaggacggagggagtagtagttttttttcctcataatttcaaaagagtagtaccgaaaaataataatttccatcttgtgaagtgggctcaaacttgcaatgtggtttgccgacagaggtatcgtgaggcaggtacggtccaacaagaaaaatattatagtcaaaactgtcttttccatcgttttttttactccatcctgtcaatttacggctccatttcagagtcgatcataacggatgagatcgaaatgacaactttgaggaagcaacatattttaatccagagtgtaaaggctaacgatggatcaaactcaattgtttattgcagtagaaaggaaaatgcatggctaacattctttcacaaaggaccacaaccttttaaaatgatctcgtacgtactggaagtactactgctaacaacattagttgatgacagtactaatctcatgtaattaagagttttccgacttgacctcgatcagttggtcaattatgttaatgaaaaataggacgcctattagtctattaatttagcttgattaagggggtatttggaagagaggggctaacataagtccttcagaggacttatgtccccctaattcttacactcatcagtggatatgatatgagtgaaacaaaagggaagtttgattttctaaaccctatcgtctctgtccattcactagctagaccagcagaagcagctggtgagtgaccaaacacttcacatcctatcatagctccctaccctaaacttgacctctcaatcgccggtcaatcagtgtatttcttcagctgaagatggtgtttgaattttcctgaaaataaagatgaagataaaaattaagtgttttacgtaaaataagatgataataacgtgtgattaattgagttttaattattacaaacttgaaaaatggattaatcttatagtctataacaactttcatatagaaagttttcgcacgaaacgcaccgtttagtagtttgaaaagcgtaccacttttatccaaaaatttatctagtttttattagagagaaaaaaaaagggcctaattctcatcagcattgtctattggtgcagacgtaggagtatttaattttcactccatttttatccattgtccacgactcttgttgggagaaaagcaagagagaatcggagagaaaagttgcacagtacagtaaaggagtgttcctttttgcttactcctaccggactatcacgggcaacgatatgatttttacaaatactttaatacaacatagtactatatggccatattatagtttaatgtttctgacctttattaccattttccaatcgatattgatatattttcgtcaatacaacaaaagataatatcttgtttttctactactctaatgtgaactcatgaactcttaagtatacaatttttatgttcaatgcactaatcatcccaatctcatattactaattatatataaatatgtaccttgcattagtagttgcttagtatacatcaatatttagaaagtgcttctatagaagttaaaatgcctttactgtgaggcaatttttgaaatgctaaataatacctctacaatatgaaattaacaaaatatgctagacatacctctaaagcgtctttaggtaaaagtattctaggtgattttgcaagtgcctctaaaattccagaaattcatataacagagcacaaattctgcaacttccacataagagatcgagcacaaaaatttcacatcacattgcagagcacgaggtgaggatggattcatgctcctgagagagggtgg

SEQ ID NO: 2066 - DNA, 1684 bp, Oryza sativa
  N_region (886)..(886): n = any nucleotide
  N_region (933)..(933): n = any nucleotide
ctagtacagtagtacttgtggttgctgtgtatgttctcgaaggaccgggcataaactctcatgctcttgctgatgcaaaatgaaatcaatgggcacctacagttcgtttgtcaccagtgatttcagatttgtgttgtttgtactaccatcagttaatttactacatgctgcaatgatttattgcagccaaagatgttcagattgcagaaagaacaaaatacttgaccgttactcgtcttctgaaagtctaattgacagtgattgctgcaggtgttctcttgccgactagttctgaacataatgagtttcttgtcgaatttaattaaagagtagcattctgatttctgaacatcaaacataactatattgggatgcagtttctgaagagatgagacttctcaaacttatccaattatccatatgtcctgatcctggcaagtggaaagcattccacaagctgccatgatgtattttagctatcacccaaccaaagaatcgtaataagaacatttaatggtgataatcgaattgtttgtatattccatgtttaaatctgcagttcaaattcagcatatgggttttgtagctatcccttttcctttctgttgtgcctgtcctttttatcatgtgacttgttgaactcagaactctgaagcgtggacgacagagtaacattgcatcagcaaatatctcacacagctaagcttttttcgattcaacaacctcttacgtttgctgtctgctgtcaatggagagggaccagatcagctcaaggctctgtctcaccctgttcatttgaactttttttttttttactgaattaacagacaagttctgaatttcactcagaactcatgtaaaagaggttcttgtgaacattttatcnccatgattataggtagtataaccaaaactgtcattgcgtagtttganaggactcatcgcaattgcgattacttgcgtattagacaacaacatttgtattggagttagaaaactctcacacctttcttgcaactcacctacccacaacaaaccttcagagcaatataggtggagtgattaagtaaagaattcaaaattcaactagtatcatacataatttgacagccatttccgaagacttggtatcaatacatcatcagatagccatggctaaattcagaggaacacacacatgtgaactatatatatgcatgatgcaatagtccttctgtacaaaatgattcttcagttaccaatagctatcagctgatgcctctctcttccatctgttgatcactgccacagttcgtcagttagtttgaagcgatctcaggaagacagaaggtatctttctttctctgcttaattccaaaaattcactagaaaagatttcacatacaatcctgatgagccagaagaatgcagctttgatctctgtctctttaagttactgaaaatttgattcaacatagactgaattttcagactaaatctgtctctttagtctgatgaatattcagactgaatctgattgttcccttgctgtgatcataccctgaattttcgctgtatccttggtgacatcaacttatcctgtcctgacagcaagaaaaagcaggccttgtgaatgctgcaactgacacttgcatccattcttcttgctttcatgtgtcactgctagggcaagggtgatcaccac

SEQ ID NO: 2067 - DNA, 104 bp, Oryza sativa
  N_region (28)..(28): n = any nucleotide
ttctcgggggccccctggcggacacgangcggtgtccgaggcggtcaaggtggcggcgccgttcctgctcggggcgtcatgtagccccggccatggcggggagc

SEQ ID NO: 2068 - DNA, 2000 bp, Oryza sativa
  N_region (893)..(893): n = any nucleotide
gctcatcgatgcattcggtgccaatgccctacaggccgctacctatatcgttcacgggctcaacccaaatcgaaagccccgccatgaagttcgatgacgcggacggccaccatcagcaccgatgccatggactgtgaggacgctacatattcatgaggagttatatggcggaatggattttgatacctcgaggggatgttcccttattgtgtgcatgctactcaaatggttatagaaaaaaaataaaaaaaattgagaagatgtattaacatgtgatatagcactccacaaacatgcaagttcaaattcaattttatatctcacaacgaaaaaaataaatttaactgtgaatatttgttaactagttgtagtttaatttgtttttttcgtaacgagatgtataagttgaatttgaatttacatatttatggagcgatgtatcacatgttagtatatgttagtacatgttacatatttttttaatttttttcataatcatttgagtgacatgcaacaaatgagggatatacccacgagggataaaaagagttacccttaaatgacaaccgactactatcatcagcgctgagatagcgtggatgctgccgatgcccggtatgctcttttttctcctcaatactcgcgtattccacattcataaaaataaaaacaaggcttctaacgacaccaaacaattcataacaacgaattcaagacactgcgggctatgatcgatccatcgaggaaacaaagcatgaaaaacgtatatttagcacacttgcacagccgcttgcctttgctgatcccagcctaatgtggccttataagccttaggcccaaataggtacgttttttttttctagtttttccctattttgtgacataaaaatagntcggaactttatatccaaattttgtatttaaagactttgatttcttttactattttagccgttttaaatatttttaaattcgagtaaaattttgtattaagtagggcgagacaccacctctccccctaagaacatgcgcggattagcatccccgtacgaggaattgttcaagaccgcaagctaatctagtactccctcaatactcgtaaaggaagacgtttaggacaatgtttaagtcaaaccttgggaatatatattatgaataactctcaagttgttgagtttgaaaatgtaaaaattatatgaatagatttgtcttgaaaagatacttttataaaagtatacatatatcacttttcaatgaatatttttatagaaataagaagtcaaagttgtgttttggagaccatgtcaatgtcctaaacgacttcctttgtgagtatgaagggagtacagttcatttatgcgtccagggatcagttactacatctgtcttaaaatataataattttttgctataaatctgaacacataattattttgattcatagctaaaaatatttatattttaagacggatgaagtattagttaagctaccgcgccgtgcatggcaacacgacgaaacaccagcagcacccccgtgattttgggtgttccccggtacgcctcatggcgagacttgatataagtgcatctgtgcatggctcgcgagacctgaaaaccgtatatgtgggcgtgtggttgagaacttgattgggatgatgatgagacccggtgggtcgaacaacaagcgtacgtagacgagccaacgcgcgtacgccatttttcccggccctgcgtcacacggcattcttgtcccgtatccgcgccccgcgttcgcatcgatcgatcaaccggccaaccgccccagatatggcctctcgcgcgcgcggggacccaagcaaccaccgggcaaatccaacgcccaattcgtcgagagatttttcagctggtgcgtagacgtcgctaacccccatcgcctgctagtataataagatgacgcctacgtcgttccgtgcctgaatccgtggcacagctacgtacgtacgtgcgtgctcgttacacgt

SEQ ID NO: 2069 - DNA, 2000 bp, Oryza sativa
  N_region (215)..(215): n = any nucleotide
  N_region (249)..(249): n = any nucleotide
  N_region (692)..(692): n = any nucleotide
  N_region (745)..(745): n = any nucleotide
  N_region (897)..(897): n = any nucleotide
  N_region (932)..(932): n = any nucleotide
  N_region (954)..(954): n = any nucleotide
tcattgtgtgaacctggcatgccaaagaatgcatgccatatccatagatctttagatgcaactgcttccagtataattgtaggctcctttttatagcccctatacatcccgtgccatgcagtaggacaattcttctagctccaatgcatacaatctatggaacctagcataccaggaaatcctctgctcgctccaattgtaagtaacctagcagnatcctgttcattaggcttcctcatgtactctggnccaaaaacctcaacaactgctgcaacaaactttctcaaagcttctagagcggtgctctcaccaatacgaatgtactcgtccaaagcatcagctggtactccataagccaacatacggaaagccgctactaccttctgcagacaagataatccgagcacaccggctgcattcctcttctgcttaaaataatcgtcatgttcctcaacagctttcattatgcgaagaaatacatgaagcctcatccgaaacctatatcatgatgcaattaaattaaattagcaatactataaaacacgacacataaaaaattacataaacattatagagaacatgcgaacctgcgtctaaagatgtttggtccaaacgttggattatctgagaaatagtctttgtaaagaagattgtgccacaatagtctatcccgatgcactacctcatgtccntgaacagatccaattcgacccggattatttactgattcctcaatgatcatttncgcagcaccaaaaaatagatcatgctcctcatccgacgaagagggatcaatcaattcgttcattacgaactcattaaattcatcatcggactccataccctgcacgcaagactgatcaatttctactgatgttaattgaattcacacaagantgcagtaccaatcttcctctacatggcgatagtgnacgcacctgttggatgagtggncggcggcggcgtgatgacgcaacaaggaggcgcgcggcgtgcataaacgatctgccgacggcgacgcggtgcaacgagaggcagcgacgtgcagaaggaagcagccggctgtgaacgacgtccaagcgatggccggaaaccagcggcggcagcggagaaacgagaagtcgcggagtcaaccggtccggaagaacgggagccgtgacgtggacccttttgaatatggagagtcaatatttagctaggctgttggttttacccctctgtttgggatcttttttcctttttacagacctctttactctctaaacttagctaatcatatacataatctcttggagttgcaaataggttgtaagaagaatgcccccacgatgaccttggtccacacagagttatttttccctttgacagaagctgaatatcatggcatagcatcctactatttccaggatgaactgacaaatgccggtgtattcgaagggcgtacttgcgcaactgatgcaggccagtagtttggcagcttctaaaattttgttcattctgctagtgcatcaaaggaggttgcgttttcttctcaaacattgttagtgatctgcaacagactttgggttcacacgatagggctgaagtgttcgtacaggggtgtcatttctgatcatcaatatggcatgagtcattttacacatgttctttcttctgttttattcgatagcttacactcatacaatttagttttggaaagaattaatatataacctgttgcatgctcatgattctctcataaaaaatatgtgcccataagtagcgaaagaactcctctacacattatcttcctaacttgttcacatgtaaatgccatcctacaagttggccaaaatggacaatgtcggtcatgggcctcacctttttaagtacttcatgacaagaaacaagatacccaatatagcaccgtgcactttgtttctgtgctcctcagatagctattcgattcttggaaatccttaggctacccaccatagtaacataaaatcctacataatttc

SEQ ID NO: 2070 - DNA, 2000 bp, Oryza sativa
  N_region (322)..(322): n = any nucleotide
  N_region (989)..(989): n = any nucleotide
gagggtcccgggtgtgcgctactcctctaaaacagcccatttgaagtgtgtaagcccagttgatccattccaacttctccatatataagctaaaatcccctcacactctccctcccagccaccagccccaagcaatccaccacaaggcgacagctgctcctcgacgctagatcctctcccctcactctcttcctcaccctgctgccagccccaggccgcccatcacgacgcgcgattgccccaatgcagtcacagcaaaaggccggaggcggctgctcctctgtgccggatccactccacaccagctttgactcttcaccgnggctcctcacctcctcttctctgcgtctctgtgccttctcgtcggtcgtcgactcttcaccgtgttgccacgctgtcgtgctttcttgtcggccactgaactcttcacttcggcacatggccacattgttgccgagtttccttgacaccacacctccagccaccgtctagcccctagtcacctttgcaaggactcaaggctcttgatgtggcacttctagtatgatgctacagaaaatgttttgctgctatattgattttagtgtgagattgggttttctagattctgttgtaatcagatctgggttttcccctaatttaaaaatctgtgttgtttatctccactttgaagtgctattattgtaaattgtgttgtgttgtttgaagggtgatttgattccatatgggggcctgtcaggttgcgaggccctagaggggccgagagtagggattgatttcgccccgttcattcttctggggcccgggccaaggaaacccgtaggaaagcggggccgggacgtttctgtccaactcaccccccgccttgccccgttgccacccctactttcacacatctttcattttctacaattcctaactaggatatacgtaaattaggcctataacacaacaaaaaatgttgcatctcagtatgttaactatatttngtttttaaaaaaaaatcgcatggaactagcgttattttatgtctttctccaaataatatttttttagtaaaatactactagccaagaattacaaaacttgtaaccagttaagaacaatagaggttagaatatcatttaacgtacaaacatgtagaaaaatctcattcctaaaaacatcaaaccaactcttaatcaggcaagacgttgtcgtaaacctttcgatttgtttgtttccaaataggccaacaagcaaaagatatgttctcaagaaaaccctttcttctaaactatagccttgctactagcatttgacagattcccaaattagtattccacctaattccaagatgatcctagtagctcttgctaaagaaacatgaaaaacaaatgcattaagggtttctcttggccccacgcacaaagcacaagatagatctacatcctcctgggcataatgctttctgtccaacttttgtcttgtgttcaatttgtcccttagaagtagccacatattaaaaaaatcacatggaacagtattcttttggtactgtgggggcggtggtgggaggacggggtgggattggttcatccatttgggatgttggagttggagcacccaaaacacaaaataatgacttggtactgaagattcttattgagaatttgcaagagatgttctaagcccttgtattccgggagaaacttcgaacttccaaaagtacttatattttggaatggagtatatttacttatcatacttcccttattaaagggttaggtttggagtatatttacttattatacttccctttattaaggtgttaggtttgttgttaatggcatttgcaataagatgttttctttccttactatgaggttttacctataacaaggtaatagattatatcacccattggatcaaacaccaatgaactgttcaaatatgcttggagctccttaaaaagtccttatattttatttagaattttcaatgttatcatttgacgatct

SEQ ID NO: 2071 - DNA, 2000 bp, Oryza sativa
atttgggtaggaaagagaattaaaacaacccttacctttttcctttaaaaatatataaatagtattattaaaattaaggggacgggacggctcgtagtatacaatcaagacgccgatattaggaaaagacttaatatgaaataattagaaggggtgaggttttaaacccatatcgtctagcccactaccttgtggagctagctagaaaacccctaagcatttatgattctccttatctcttcatcctcgtcccgctcctcatcccatagataccgcgtagtttcatctcgcgtgttccaccctgctcactccgtttgtgcgcgttgcgccatcccaccgtgtgctctagatcctcacgtttgcgttgcacaccccacgcgtcagggtggaaccagctcatagccaccttcaactaaccattgttgaacacatagtaaaaaaaaaatctaatctctatgatacatggtgttgttttaagaatgtttggtttgctaaacccaacacaaattatgggtaggaaagagaattaaaacaagccttacctttttcctttaaaaatatataaatagtagtatcaaaatttaggggacaggatggctcgcagtatacaatcaagaagctaatattagggaaagacctaatataaaataattagagggggtgaggctttaaatccatgtcgtctagcctattactttgtggagctagccgaaaaacccctagacatttatgattctccttatctcccgaggatgaagaaatcgggccagaacatcattagagttctgaattgctaaatttgcaaagaatgaagaatgtgcatcgaaaataataacatattaagactgtggtagtattactagcacggcaattgttcgatagttttcttctaaactgacacgatgatgcccaatcacaccggaccatctcgtgggctcgtggcaaatgttcaaaccggcccggttggatgcagcattaggccgacatgtaaaagctctgtatgcttgtagcccacaacaaaaactcctcgattacgagcttacggctaactccattcggccgtggacacaacggaggcctctacaagaatccaagacgcaaatgctcaaatggcctaatgaacaaagaaagggacaaatggcctggtgaccgagacaatcaggcagaacacaggagaaatacccaagaatcccttctctagaacagatcaacgccatcaaatatactccacacttccacagatcgacacgcatggatgccggattcgacactctttggccgatggtacgagctggatttgcacgcagcctcctgctacatttcgtctgtgtcgtctgtgcgctgcagtgcctgtgtgcccaccacgtactctccaactatacatgcaaaggcagccacacgtacatacactgtagtttcacccgctggctacgcccacagtttccaactcccattggacccatgggaaaagacaagcttttcatggtttctgctttgtactgatcatacagaccaacagtgctaccactgccacagtagaacaaatccgtttagccattgtaccgcaagcctaatgcggacaggatgagtacattataatctctgttagtatagaccaagcaacaattagccacgccgagtttactgtggcttagccattaaattactgtggcgttgcccatttgtagcctcatggctcggtcactccctccctctctctctctctctctcttcacgggagggcagtgtggttttggtcggattccgccaagttaggcagcacatgcgctcgccttcccctgtttgtccatagttccatacacctgcaaacaacgccctcctttccctcccttaattgtcggggcgctctcgccgcccgcgcgccactgcgctgctacacgctacgggataagccaagcttgcttgctttcgtagtcgctttgctcgatcgctcctctcgatcccatcctagattccactcggttctgcttctgctcctt

SEQ ID NO: 2072 - DNA, 2000 bp, Oryza sativa
tttgcttccaaatagtgggtaccatgccagggttcgccattcgcgttgagcacggttcacgtgtgcaaccttggttcacaggactatagtcagtgttcctcatatttagatttagtggtgaactccgtgaaaatcatttgctgtgttcggtgaagctcataccaaaatttacgacgcaataacaaacctctcatttgtgccattccgtggaggcaaccgaagggaattaccggtttgtcaagcagtgtggatatttatagaggccgttggatgtagttgtcgcggcaacgccgcagcttcctgtcaattgacaatctttatcactgtttgctttcattatgaagcatgtttctttagtctagttacccttccttttaacaaggatggtacaatgctttcacttattttgtatggcgatgtacttgggattattcccctgatccctgactatctctaataaaaatgttcttgagtcttaaaaaaaagaattcttagttctaaagctgcagaaaaattgaaattttcttgcacaccttaagacaatgttttagccttgatacctgcaagttatgaatttagcccatctttgtagtttatcatggttgactctctaatacttcgtgatggtgaaagctcttccaatatatatgcatggtcttaaaaaaatcataatgacgtatttcacgaaaaataagaagagatggcaaaaatgtatataagactaatatattgcagttgttctattgaaataagaagatctatcaaagctatgaagaaaatttttgtattaacgtttctgcttaaaaaaactttacaatctacttggtctaataaaagttgttatacatccatcctaaaatataataatttttagcattcatttttttttcaaaaacatatcaattccaagttgttgggttctgtatttgagaaaacaaaatcaaaacttaactatttgatgggaaacaccatatgaaatcttgcaaatttcggattggatcactttgaaattcatgcaataccccataaccataacacctcctctcctccctcctcactcctaccgctgccatgacttggtcaagtgagcgctcgatgccccacctcctgtgtcgttgtcgtccaccacactaccacccggctaaactggtggtcgaaaggtgccgacaaggcacccctagcaagcctcttctccctttcctagccctccttctacttaagggcccctttgattcgcagcatagaaaaaacgcaggaataggaaaaacacaggatttgaagtggtaggattttgaaatcctatgggaagagaaaacagaggaaaacataagaagatccctttgatagaggcatagggaaaaacaaatgaatctgcacatcacttcatttccaagaggtctgacctcttttttagtttcctttgaaatccactgataggagtgcaatcctatggaatttatacttgccttttctatgaatcaaagaggcttgaagaaaaaaaatcctttggaatcccattcctccaaaaatcttttagcattcctttaaatcaaagaggccttaagccagattcaccaataccacccgccattaacgttggcccgctatcttccttcatccacgcggctctctagcattgttgcctacccatgtccattatttctcattcatagtcgtatcactgtttccacaacaatccatttaaacccgttgataccctctatccctaaaccctaactttgtcagggcattgcatgttattaaagcttcgttggagtttaaggagaaggagctgagattgtgggagcgcgaatcaccgaagcaaattgtgaagtaagaaatttataaggttttaggcccaagtctaggataacaaccatttatccattaaaagaagtactcagaataaatccccttaatcccaaggggtaccgtgaaaaaaaggagtacggctaaaccctcgcgagtccccactcttcctctccccgttctgcatcacc

SEQ ID NO: 2073 - DNA, 2000 bp, Oryza sativa
  N_region (1889)..(1889): n = any nucleotide
tttatttctcaactaaactgttcttagtcttttgtaaggcatactgcacttttcttccctctgccttatgtcgtagttatccttgtgcaaggataagtcagtttgaatttgccttgcctattggatattggatattctagaaaaagatgatgcttttatttatttgatcagacttttttaattttgcattattgaagataattatgatgtcttgtttatctttatcttctatttttctatttttgcttttttgttcacttggcgcatgttctaaattctaatatgtaacccctctagctgacttttccccttaaaatctggttcgttgttatattattttatttttcgttgctggtggcaataattgactttacaaaccatggggaatgttttgggttcctgcaggtatgttgtggatgcagccgatcgagagaacatggctattgccaaaagcgagctccatgatcttctgagcaagccttctttgactgggatcccattactagtcattggcaataaaattgacaaacctgaagctttccctaagcaaagcttcacagacgtaatgtaagtacacgctaagctattacagaccgataaggttttcttacgcacaaacctgtgttcgacaagttatatgtgacattgcagggggctaaagacaatcactgaccgagaagtggcatgcttcatgatatcatgcaagaactcgacaaacattgactctgtcatcgactggctcgtgaagcactcaaaaaagaagaattgatctaaatttttagcttttgaagtacgcagattctctctttttgcatgttgcgtagcacttggcctgtaaattatgcaagagttattgttgatcagggaggttgtgttcataattttgtaacctgctttggcattatattggcagactgcatctggtattgtgcacgcatgtgcttccttccgacttacaagaggttccaccctcgtgttgcatacttgcttggtgaatttgaaattatgcgtgatttgtggatcatattgtttactttggatgaaactaaagggagacaaaaatgttgataaatcgatgctgcaatgaattgcaaatttgtgcttgagactctgagagtaataatatgtagcatgagagaaatatttaaactatgtatttggttcttttaagtgaattgcatcatcctgggagaacagttgtataatgtgtgcaggtaagtaaaggtgctggagcaccaccttgcaatttcttgtacagtttgttatgaaattagaagggatttctacttgtacaatttgatatgaaattagaagtgcaaaagggaaattgcacgttatgagaagaaatggtttagggaaagtacgttcatttgctatcaagtttatctactcgaagaattttctatcggcatacgttcgtttactatgaagtttttctactcgaagaattttctatcgaccgaggtttgtcttcccccgggtctgttttccagtgttacaagttacaaagctttgtttccaacatttttagattccaaatacttaatttaatctatgatacgaataaacatatcatctcacgtattttctctgttttttaaatatataacgttgttgatttttacaaacatgtttaaatatttgtcttattcaaaaatcttacacaactacataagatataaatcatgtttaaagtatttttagtcataaaacaactcacaacaaaataaattatatgtacataatttttttaataaaacaaataattaaatatatgttcaaaagtcaactatgttatctatttaaaaatgaaagaaggaggcagtatataccagttacgagcttcaaacaacgggaaaacgaatttcaaactcgtttataagaaaacnaaaaatcaaactccaattgaccaagggtgaagggggtcttgactctagttctagtcgccgctgtcttgcggcctcctccggtccaagccccctgatcccctgacctcaaag

SEQ ID NO: 2074 - DNA, 2000 bp, Oryza sativa
cgcaagtattagagtaataattaaaaacttagacgtggtgtctaggttagagattacctttatttgttgtgtatccaatggatttgttagaggtagacgacagctggtgatagccttggatcccgtcctagtaatcctccacgttcggatacatcatagagctgtagccgaaaccacatcggcagaccagcaggggtcggtgcccgaagcaacatatagggagttaccttcaacttagcttagaaagtcacagaaagtcctctctagcctagctagcctacctttagttgttcttggatagtcttaaccttaggtagattacacacgtttcctgagttcgatatccttttggggtcacccaaaggtgaagtgctacagcggttttccgtgcgcttgcggatttatccgtggtcgtaagaaataccaacagctgtcaatgctggggtttggcatggattctatagatgatgtcttggtagcggttggagggtattttcgacaattcgcatcagcccaaccgtcattacctgcctataaatggaccacaccttctccactctttcacacactcaagcaagaagctcttgatctctctctcaattttagtttagtactatagtgctagtggagtagaatagaatagttttcttagtcatcgagtcttcggaagatatcgggtatagatctagaagcttttctctcttctattgtaagacttattgaattaataaaatattcttctttatattcttttaagataatggattttcattaataatgcctctaattcttttttatatatcttcggtactttacttcatctgagtaccagctttattttttacttgtatcgatatagttgtgtagctagcttaccagagagatgcaatggtgtaggtttaatgtccgagtattcggttactctatgtcggatgcatgtttatagagtagtatttaataatataagcattgtgcttagattattaagtatcattatctgggcatatatgttgcggaacagtagaggtgggccgctgatggtgatagctcaatacgagtattcctccattttagtatatattcctaagacactttcataggatgggtactcctctgtatttgaccctgattggatggccatgacagattgtcgtaaggaactcggcaatcagggggtggtctctcgaaacaccaagacaatgttaggggtattggttgcatgactgtatagtagcaagtgtaaactacagatattagaagtataagaacaaattcttttcttattctttcaccacatagcctagttttatttaatgagagtgttggaggtacaccatgagggccttcggccgagcctaccgcaaccaacaacctgggcaacagactcaagccggaggccagcggtgaagatcgagagggcagccatatgggcgaaagccacatggcaaaagccgtggcttaaaaaacacgcgggctccgccaagcatgaacttcgtcagagggtcgtacgggcaaaagcctaggcgcgaagacacgggcttcgccatatatcaaaccccaccggaagaaggcccagtgggccgttgctccttcggggaatttcaataaactgttgggccgtgccatctagcccagtaagggcccgtacatgtaaaggacaaaatatggctaaactgtaagacacgcttcgccagatgcaagagcagcagcaagcgtacgaagcagcaagacaagccaagacccacactcagcagctctacgctcagccctaagtttttcccccacacactgtatcgtctccggtgtacttcgccaagcccgccccggccgttgccgtacgtccgactccgcatgtaatttcggcgccggttcgcccggtggcaccttcaagcacagtacccggaagcctaacttcacacgccacaagctatgatggaagcaacttcgaccttagaagcaaaatttcaagccttcttgcaacaactcaatcaaccccacaa

SEQ ID NO: 2075 - DNA, 2000 bp, Oryza sativa
cttctagattgagtgtctagattctctgtcagcctacgcttgaccagaaggtggagtgttgttttccacgctgcgcagtacaacagacatatctgttggtttgatcagcctattctcttaagtatgtctactaaccagactgttttgtttgataggacatgaagatttacattccagtggcgcccgaagcttctaggttgtttgtttgctagttgagctgattatactcgcaaagtacggtctatatgtcaagttcaccatatactccctgttggccgtgagcttccaggtcatgatgtcataaactatgaacctagtggcgcctatagctgttttaaccacattcaaatatcaacgaaatgccatatatgattagcttttgtgatttgacgaatatttgaatccaggtgtcttcctctaggctgtcccacactaaacattctttcgttttgaggccataaagattgcagaggccaagagcctcggtgttttgttgtctaggcaatgtgagtcctagaacctcaccgtgtttccgttctcaagagtgatgatggtcgcaaacgcaaaatgatctgtgtatccagctggttaccagatccggcatgcctacccaaggtatctccaatgccttccaatattcaaaccaaagccatcgcaaacttaaaaaacgctcttgtgaagcgacgcgacgcatatttaggactcatcaaccacaaagttctttcggtttgcacacttttttttccaattcaactgcaagttttattctcgcatatttttaaacttagttataaaaagacatggtacgaaatataggtcaagattcattggcatacagtcactagcaagaattttagttctctctctagtctctactggtaaaaataagtatatagctcgctggccgctgcttgagctaaaaaagaatagttggcaacttgctgctaatgttcaccatttctgaaatcttttgacctccaacatttgagatgccacctgtaaaaatgcgagttaaattttgatcttcggaacatgcagtggactatcccaattaaggacccagcaagtgttatcctctccgtttgaataatcggcggtgaaaaaaaaaattgaagcttcgtggcagcctcgactctgaacagaaacggccaacatggacaacgtgcggtgccactgcgatccctcgtgcaggcgtgcacggtgcagcaagctagctagcgatcccgtgggtctcgtacttacctcttcacgacgaacggtaatccagaacaaccgcggcccgggatagcattcgagacttgcgcctcgcggaatttaccagctgcttccacgtgacagagcctcacaaaatccacctgcctcgtcagactggtttgttgtcacgcgtacgtacgtaaatttgttctcacgcgcacgtaaaagacaacaggaatccaccgtgacttgcttcaccaccaccctgcatgcatattccattttccagagggaaaaaaggtgttcactgatctccagctgttcgcatggttggtgccctctccttcccgggtagttggggaatgaaatgacgctgggattgcacggttagtaaagtgtttaaactggagttcttactgcttgcttggtttaaccacaacccggtccctctggtgtgcgggctgggctaagctggtggccggctcagtggccctcgctttatttactccttaagaatcgttcgcttcagctgaacctctctccgccccgcctccccttccgtctctccgcgctccagctccacgccaattaaaccctactcctcttgcgttgcgttatctgcggttccgtctcccactactcgcgcacacgtagaaacggaaggagaaacaaacaaaaggcgccgagtaacgcagatagagagttgtttccgcaccgagcgcgtccgcggcagtgtgtgtgtgtagcggtagcgcacgcgcggctcgcgggcgcgccggttgcaccagctgtgcgttgcggcgacg

SEQ ID NO: 2076 - DNA, 2000 bp, Oryza sativa
aaaaaagttttattgatagagcagaaaaattttacaatattataatcctgaaaggccgtaactaggaaaaagaaaaaaaatataccaccacccacacaccggcagcgcccacacacaggtccgggagaatgctagcaccaaaccgaccgccactaagcgtgaccggcaccactagtccaacaacggaacacagacgagatcgcccaaaaaaacacccttacaaccaccacaaagcccaactctatccacgtcttccggatttagggagagagggtgagagagaagatggaacatctctcctctctaggccctccgacgtgaccaacttgtagaaactaggacaccgctacaagaggatgagaatctagagcgtgcttgcaccaattgctcgagtggtttcgacaagggggatgccattcgccagggatgaaaacggtcgaaaatagttggaaacaatacattattttattattttttcgaaaatgaacggaaatggtcaggaaatttccatatttatgaattcatctatttagtgtcaacttcaatgccacactaacataaatttaaaaaactaaaatttgaaaatagtaaccatcggtaaaaatattattatcatattagttttccgaaaacggtatcgatacggtcggaaaattcccatatcattttcacccctaccatttgcccctattgctttgagcatgtgttgagggatatttgtgtcttttgtgtaatcaaaagaaaactttaattttacattttctaaacctacatttggaaaactattacaaataacatggcatgaaagtattttaaggggcaaatcttaccaacttttactagcgtgtcaaattcttttccgaaattcaaactgaacttggagtatttgggagtgggtaggaagtaaagaaacaaactactcgtaaatacctgcatgttgctgtcttatcaacatgtgagtgcctggcagaattatatttaaaaaaaagacaaggggaagatccttcctcttgctcaacgagattcttgcatatacactggagtactctctatacatttttctctcttgcgaacacatgcaaacacaaaaagctttaaccgtagctttgttcagtcttctactgctgctggccattctcccttcccagtgtcacactctcaaagtctcctctcctccatcaggtgttacctcctgcagatcctgattggaatttggaccttctcctcctcctcctccaccacctcctccttcccagtctggtaaaatgtgcaggccataaagccctcgcaatcctagaacagttgcatttctaattcatgtatagtaggaaagaaatatatatattcctgctctgttctgttcttatcttttgctttgagccaaaaaggttagagcttttgtgttcttcccccacaaatatcccctagtgccttttgtttggccgtggtgtggaaaagcatatgaatgggggagcatctcaattggcatactgctgttgccccccagcttagctatccctttccatccctgcaagaacccttctttatagatctgtgcccttgctgttcatggaaccctgtgattgaggtctctagttttagtgtttaattaagctctccttgccttgccagcttttggatgatgcttacatcttactcctctattggttcttggataggggtttcctcatttggtctctcactcgcggtgtaaacaaagtatatgctccaagtaagctgctacttttagctgcttctctgattcttgagtgatctccaaggtaaagctcccctcacttgcttctagttgctgttcttggtttgagcaagaaattcaggctgtttttggagcagaaatggattgtagcagcattctctgctgcaattgatgctggtggttggaagaacaccaaccatgctgctctgtgtagtaagtagtggtagtagtagcttgtaaaaggacggtccattttgcagtgcagaaggagagggaggaggag

SEQ ID NO: 2077 - DNA, 1885 bp, Oryza sativa
  N_region (3)..(3): n = any nucleotide
  N_region (24)..(24): n = any nucleotide
  N_region (44)..(44): n = any nucleotide
  N_region (67)..(67): n = any nucleotide
  N_region (103)..(103): n = any nucleotide
  N_region (121)..(121): n = any nucleotide
  N_region (309)..(314): n = any nucleotide
  N_region (316)..(319): n = any nucleotide
  N_region (356)..(356): n = any nucleotide
aanaaccgcgggcggagcccaagntgcggcgggttccgccgggngaaagccccggggctggtgctgntccttcgctggggtcccgcagagccccgaacttcgncccttccctccctccctngggccgccggccacggcggcgtcttcctccccggcgccgggtggtggtgccgggaggaataagctgccgcccaagtccccctcgatctcgtcgttccacagctcgccgacgtcgtcgaggctcgccggcctcggcggcctcaatcgacccgcggccgcatcctcttcccccggccgcgtctcggcccnnnnnncnnnnatgatctccgcgcccccgctcccgctcccgctcccgntcccgccgccgccggtgacgcccgcggcggagacggtggtggtcccggcggagacgtcggcggcggtggcgccgttggtggtggcgtcggcggaggcggatgcggcgggcgacgaggcgctggatctgaggcttttccttcgcgggagggacgggagtacgtgcgtggtgatggagctcgactccggggtgctctgcgacagcagcgccttcttcgccgccatggcgccgccgcgcgggcccgccggtgacggaggagggagcggcaggaggatcgaggtggacggggtggacaatgtggaggcgttccgcgccgccgtcgagctcatgtaccagcctgatccgctgcggtggctcgccgccgctggcgtgtcgcgctccattgatgtgctcgaggtgagggaaacgaattaagcttaagcagcttctcttaattgattttgtgttactagtagcatgatgtggttgcaaaagaagtagtactacttgcaataatggatggcattttgttacccacaacagggcaggaaatttagtgggcattgcaaccaaacaatcattcacggtacattgatgttgtgttccttatatgttcattttccgaagccattttggtggtagataatccagtgtggtgttaccaaaatactccattttcacatttttttttgataggcgcacaagttagagccccagcgtttgcctttcagcttataagccactgccaaaatttaatttggaaacttaatttttgaattgattatgaggtttttttcattgtagtttatgtttcccagcattggcttttaaatcgctaactagttcacatatataaagttttacgaacggaatattttttgatcgctgataagccgttacggcttataatcagcatatgccaaacaacgatagctctagcattcgagtgaaactaatatgatatgattgtgtgagaagcatttgacctgggatattagtgatttaatatcatctaatgcttttattaaaccattgctttcatgtaagttatgcaaagtgatatgtaagtatataattataaccatattagatgttgtagatcactcactttctatgtgaattgtttgcatgctggtattgtttgtttaatatgttaaatcatggattagataataatacaatcactataagtcttgtaaccatacacattctatggcttgatgtccattagatcacattctacagctatgaaagtcagctacaaatgcatttagtggtttgaatgcatctaggcccgcaattaaaagcaagtattcctgttgcccataattgctatctagtgatccaaataaagcagccaccattgctgtccaatatctttgtaacatcttttcaattctagcatgtatatttctcaagtggggatttacagaataatatgttattaaatgcttctttcttgcattggtaatgagtttattaaatgccaactaattaatcacgtacataatttgtttattaatgctttaattgcaggtgtcttcatcaatc

SEQ ID NO: 2078 - DNA, 2000 bp, Oryza sativa
cccttgctggctcaaaacaaggtaatattgcagtttagcacatatctgttattctagtatcattttactgttcatttctggatgtagaattctactgatttccccattctctagaatgatttcaccaatggcttttaacatatctattgcactctgttgcttatatcatggaaggttacctttgtatgattgcttttgcaatttcttggacttacctgaataaaaaagtgaagcatcacattgtcacatgttcaatcaataattggtgacaacgctgcaattttccctgaaagatctcatgtttgaacctttcttctatgaattaatgcttgcaatatgttctttctcctcttccttttgacatgctgataggctgatagctatagatgtttccttgtgcaggaggtttcaacatcagtgggttgtggggagtatgaaggtagtaataatcagagccagaaccaacaaatggtgtgtttagttcacaccaaaattgaaagtttgattgaaattggaacgatgtgacggaaaagttggaagtttgtgtgtgtagaaaagttttaatgtgatggaaaagttgaaagtttgaagaaaaaatttggaactaaactcaggcctacaggtgagtaaacagggtgcagcaacgcagaaaccacagaggctttctaatgccacaccagcaagagaaaagctgaagggggataatgcgaaacgtataggatctagaacaagcccacgatcatccacgtcccctacaactgaacctaaccaaacgaaaaccagaaggcctaaagctcagcaggtacagattggtgccgagcgcaagtccagtgattcaagaagaagcagaaaaaaacctgctccaatttccagcatcttgtctcatttgcacatcggctacctgtttgcctggccgcaatattctccagatgatagcacggcaatctgctgtcattcgcatttctgtgaacggagcagcaagatcaacattcgaaggtgagaccttgcaagtacatgtccactgttgaatagcaactaagcaagactgaagtggtgttccttgcttcacctctgacaccattgacacattagcctgccattgagtagttaattgcttttgattgacttgactgagtttgtgtcctctccactctccaggaaagtctcagcgagtcatgtgttgtgttacagcttgtaacatgagccaatgtgttaatgtttctgtaaagttggcgtagcgccatggccattgacgctataatgttagtaatgttgattagtgcatggcttatttggttgcacatccatttttcctaccatcacatattcttcaacctgtactgcttgttatttagatagctcactccaattacatattgcaagcttgtaaatatttttcaagaaggcatttcattccttaaaacatttttccccaacggaaaccgttggccggaattgatttcgccttatttgtagagaaatagcatacacagaacagaatgtactgatgtatatacgagggttaacgacgttgtgaaaccgctaatggttagtttgtgaaaactgatacagtatgttttagctgttttttttacggtttttactggtttttggtaaaatggtgaggagcggtttttaatttaaaacggaaaggtaaaccctgggagtacaattcagtcgttcaaagaaacagaaaaaaaatcatcagtgcctcagaggcagaaatcacctgtaatatgtgtataatcattgttgtatgtgtgaagtatatatttccctatttttggcatagctaaattaatcctttattacacaaaatctatggccgtccagcgtaattatgcactcctgtccactcgtccaacaacaacctgctaaatttgcgtcttgcaaagatcacctgttcatataatactctgcagggctcccctctgaaaaaagttgagatttcagacaattaacatcactaggagagaaatcaagaaacaagctagccagca

SEQ ID NO: 2079 - DNA, 2000 bp, Oryza sativa
  N_region (900)..(900): n = any nucleotide
  N_region (903)..(903): n = any nucleotide
  N_region (918)..(918): n = any nucleotide
  N_region (1060)..(1060): n = any nucleotide
cactcgctactggcaccagcaaggactgcctttttgtcttcatgagtgaccttcttgactatgcacacttttcagtattgtctcgagatttgctccgacgtcatctactttgtcgcaggacgttgccacgagaagttgttccagtatccctgatgcgggactaacccatcatcttacatcttgacgacgaggggcgatgatctccatatcttccttgatggtgttgccctcctcgtccctgtttcatggctgctctagtgtgatgggcaagtaaagtgctaccgcaacggtgagtttctccaacggcctgctccatgataggagccgtgatgatgagctcctccaacagcctgctcctcgctaggagcatctgaaggaggttgttaagcacatggctttggtgtggcggttatgatgatagtttggtggatgaatttactagtgtggggtagactaataatagaatgatgggagtgataactaatagaaaatcatagtttctatagtaaaatccaagagccttacaaattaaatgggcatttctttaaggactgtgaattggatattttgatagtactaagtagtgaaatttccggggtggccactccgtacggccgacgccgctcgagtctcgacggcagccgtccgtgctcatcgtgggcttcaggcccaacagatgatgccccttgctcctcaaggcggcccacgcccgaaaaaaaaaaaaaaaaccctcccctccgctggcggggcagctttcccctcttttcccttcaaccgcggcgcggttttttcccctctcccgcgcatccgccccgcgccatggccgcctccagctcctccgccccgccctcgccgacgcctacgacatcccgtgggtggagaagtaccgccccaacccgngtngccgacgtcgtcggnaactccgacgccgtcgcccgcctccaggtcatcgcccgcgacggcaacatgccaaacctaatcctctccgtaagcgccatttcctcgaacaccttgcgcgcgctctcgctaacacccaagcagcagtacgacgaatcgtttntaacctttttttttttttaactatcgttttctacaggggcctccgggcaccgggaagactacgagcatcctgtcgctggcacacgagctgctcggacctagctaccgcgaggccgtgctcgagctcaatgcctcggacgacaggttggtgcggccgtggcgtggttttgacttggcgaactgtagccgtgcggcgtgcgcccgtggtgtggactgggtgtgtgacggactgacggttgattcgtgcttttgcaggggcctggatgtggtgcggaacaagatcaagatgtttgcgcagaagaaggtcacgctgcagccggggaggcacaagatcgtcatcttggatgaggctgacaggtaatgccaccccctagtgcggatgatgtgacaccattgctagtactgtgccttatttagtccagacatgccaatttcaccacggattgctagaggttaagatgtagtaggattgtagtgataccaacagtgtgaaaatggagaaacctagtggctgctccatctctgtaagagcaaagctatattatctcgtagagatgatttttttttgtgaatacacaaggattgtgcatcttttacattaagactgaggagttgtataacatttacaaggtgaaaactgaaaaaaaaggcaaaaaaaaagggatgctagggctgaatcttgtgtcatgggtgttgcgacctaaatgaccaaagccctgctaagcgccatagtgcagcttcttccaccaccacctgggcaatttccggccaggacttctgatgattgttgaagtagttatgaattaaagacttgttcattatgatttttaagcatataactactgatatcaaggatatagctagttgtttctgagtttgcctcacatgcacttgctacatgcagcatgacatcgggagcacagcaagcactgagacgaaca

SEQ ID NO: 2080 - DNA, 2000 bp, Oryza sativa
  N_region (1181)..(1181): n = any nucleotide
agccatgacaagctgtcaagtccatttgatgggatgggtgcattctggaaaggatagttgtagaatcttttaggacttatagaagatatttctctccatgagcccttgtcatttttcagtgcacgcatttcagactttagtttaacaactgtctgtctctgaatttgaagaagacacatttcgacttcttcatgaaccaaagtattaacgtattattcagctttctgtctctgaacaaatttgctccacactcacgctgcatttcttgggtttatccttatgagctgaaaatctgcatacttgataattacgctaactatttctgatggtataatgtgcagctaagaagctaaggcgggtgccaagaccgacgcctaaagcctgggcgtcatcatcctcatgctcctcaaccaggattttaggttgagggtatcagtgtcaactcaacactcatagcaacaattaattacatcctgtagtaaacttataacgagtatgaaaagtaatagaagaatgctatgtaactagatgaaattgaattgttatctaagtaatcgttgttctcaaataaaaaatccttaattaattgttactatttaaagaaattaatcaggtggatagcttggtgagtgagttagaacaaaattaagatgaaaatcaaatcggaagttggctatttttttggctggtaagggcaagaaaaaaaaactcactaacgctagtttcagaagcagacgttgcattggcgttgtcttgaagaaggcaaagagttaggaagacgtgtaggctgcatctatctattttacttatttagccaaagctcaaaaaacaatatattgaccggtgtcataaggcctcttggtgttacacgggaagtcatcgattgtccatattctctaatgaaaattattttagcttattaggaaaaaatattttataggtagatatatgtcctaacgatttaagagcaaataaaaaaaactacgttgaaaacatcgtaagatcaactttaaatttaagtttaaaaaattcaaaaaataaccttggcttcaaattaactagggcattcgaggagactctgtaaattaggacgaggtagctggaataagctgagactgtaaccaatgtgaaatgaaggatgtgattaggaggagtcatatcccatgaatttttttaggacnaaaagtaatgcccagcgagacgttcgatcgttcggttgtctacgtggcaattatctatggcgaggctgtacgggagcctgtttgcatccggtctccactaatttcctttttccggtagtactggcctgtaagcgggccacccatgtcatagactacctatctatccgctttctccgtaccgagcaaacggctccgtgaacctggtcttggtacacccgtgagagctacaggcctacagtccacggggcacgggtgcaccgccaaaccctcgccctcgtcgtggtggacgagcaaaacccaccacccactccgctcctcctcctgcaagcttcctccctcctcgcggcgaggcgagccatggcggcgccgttccgttcgtctactgccgccccaccgacgccctctccccgcatctcctcttagctcgatcggcttgctagctcctcggccatgtgctctaatggcgatttctcggtttgttcgcaggtgagagcgctctcctgaggcctgagggcggccttcgacgggaacctcggacgcctcaaaggttgctactacctctcctcctcctcctccccttcttcttctccgccgcgtcgatccccttccccgatcgatgcgtctacgcattggcccccttttgcatgcgcctgttgcgtgattttcctcccttaggtttgggtgattcctcctgtgtggaacgcttggcgatggctgtagtactgctaattaatttggccatggaatttttgaaggaagggcgcttgctgcgttgctgttgcctttgggaatttcccacattttattttattttcggtg

SEQ ID NO: 2081 - DNA, 1409 bp, Oryza sativa
  N_region (172)..(172): n = any nucleotide
agcaattcagttactaatacggtctcaacatgtcactaaccgaattttattcaaaattttgtcgatttgatcatcaccctcagctaaccaaattgattgaaataacttaacaacacaatagaccaccaaggtttcgttcagaaagaggatgtgctgggattgattttttaangaaacttctatgttaagaagtttagcaattcgagaagattgttaatagaaagtgatgaagtagttgtttcacatagttgtttagaacgcactctaagcccaacagaggaaatcctactttcttacccatcccaatcaaccccacttctccactcacctagacaccacacggagcgccacctcttggcattgcctgacgagcgatcccgcgctgcctactccgcctctacctgacaaccaagccatgtgtcacctcctggaagttgcgccaccgcttctccgcatctgcctgaggaccgagctagcgttgcattctactgcgatgccgaagaacccgagcccgagtcagcgccactatcctccaacccggcctacactcgaacgtcatccaaagcttgaggcatgcccgccagctgcatctcctctagaggctcttccttcactcagcctctccaacgacgatgacgacaccggccaacattggaggatatgcgatttttgtgtgcctaatttgttttgatctaaaatttataagggaattgtgtaattcttttgaattttctaaaactttggtcaggatagagactgaaatgtttggtctttattatttttcaagatcactcggtctttatgaccggaatgtcaaaaataaaataaagattgatctaattgaatgtcaacccctactatatatatcttactttggcgcatgaatgtatagggcttgttcactttatcgcgttttggcattaccaaattttgatagcgttgaatgtgtttggttggatacctttccaaacattgatgacgtttttgttagaggaatttttgggaactaccaaattttggtagaatgacattgataagctcatgcttagtttgttgcagtaccaccaaattttgatagcattgaaaatagcgataaagtgaataggcctgtagacgagatcagaggcccaatttgaggcatattctctcaacaaaattgagccatgcttgggagttgggaacctctcaaaatgcacctagaattaacctctcactctccaacagaatgccacactgaccacaaaatatagagctaaaaataacctacgcaaactacaccctcaaggcctcaactgcctcgacaaatgttgtctataaaactcccgttcttggcgatcctcttcgctttggaggagaaccttagccctcgaaggcctcgagccctcccctaccttgttctacctcctccc

SEQ ID NO: 2082 - DNA, 2000 bp, Oryza sativa
  N_region (53)..(53): n = any nucleotide
  N_region (56)..(56): n = any nucleotide
  N_region (58)..(58): n = any nucleotide
  N_region (62)..(63): n = any nucleotide
  N_region (65)..(65): n = any nucleotide
  N_region (534)..(534): n = any nucleotide
  N_region (554)..(554): n = any nucleotide
  N_region (594)..(594): n = any nucleotide
cctaccaagccggctcttccggccccgctgccgccgacgccggcgagccccgncgncncgcnncnatcgatcgcgccagctggaaacccaccgacgccggcgcaggccggtgcgccgccgccatcgatcgcgccgggaacgggaagcccgccgccagcaaacgacgacgccgccggcgccgggggcaagggaggcgggggtgtggtgcgtggcgaacccgacggtggcgagcgcggtggcgcagacggcgatggactacgcgtgcgcgtcgggcgcggactgcgacatggtggcggcgcctggggcgccgtgcttcctgccggacacgctcatggcgcacgcctcctacgccttcaacagctactggcagcgcaccaaggtcgccggcggcacgtgcgacttcgccggcgccgccatgctcatcaccaaggatcccagtaagtacgcagccatgtcgatcgtttgcattattgggccaaggccttcttctgctcattaggcccaaggacggcccattcccatttaacttgtttntttacttttcactcgatttnaacttccccctccatttcatgttataaaacatttttcctnttcaaacatatttagggttcgaccatgtttataacaacaaataatttcataaatataatattgaatatattttgataataaatttgtttggggttggaaatgccgctatatttttctataaagttggtcaaatttttaaaaaaaaagttgataaaaaaaattcaaatatgaaaaggaaggaatggtagttctgaaaattttctccttttctgcatgaattttattgatgaattttaatgggttttgattattgtcacattgttttgtttcattaatttgtgtaggttatgatgggtgccggtatgtgtacatgtgatgtggtacggatctcttcgggaaatgaagatgttttgcaaggcttttgggcaatcgaatccatgggtctcctgcacaagtatatttaccgaagtaaatatctcatttttgaatggtcggacagtccacagtatcagagtcaaaagcataccactttgtatggtgtattctctgacgtccacattcacaggctagttgttctattaaaaatgtacaaatagatgtgctagactattattaactgtgtcaccattgatccggttgcagtagtacaaaaaaacagcgtattaaaaaacagtgtgttatatcataagaaacttatgggcttaaaaaattgcaaatcttccacggaaagaaagtaactgaatttattaaaaagacaggggcttaaaaaattctaagcaaaccggtaaaattcggaagcatcaattaatcataaaaatagaagaaattcctacttttaataaagaaagtactatattattacttctgtgtccgtccgagcacacatgtgcagctcacagctcaagacaacatggtcgatccgtttagcggagggtcgtgctggcacgacctgtctagccaggctgtgcttcagttgctacccgggttgtcatgccaacacaacaagtgcatgtgtgagccagcacgacatgacccaggaatagcgcatagcttggcccgtgcgacacgatgggaccgacggagtaaaggaaaacggaaaaattgaagaagccaagggttcagggaagaggaagcgacggaggatgcttgtcgacatagatctgcacggtagcatcgtggtatggccaacccaattcgtgagcacaactactaagcatagcgatcactatggactcaccagctcggggcgaagaaagtaggaagtgaagggccatggcattgcttgacgatgaggatgaggaatgtgctattaatgagcgggggatctcatttgtgcaacatgtgccgaagtttgtgcaacatgatagaacagactctattcatatttttttttcttagtatatgttaaatttgggctaaccggcctcaacacagtccacgtaaactaatcgtgccatgccaactca

SEQ ID NO: 2083 - DNA, 2000 bp, Oryza sativa
  N_region (419)..(419): n = any nucleotide
tctattcgcagatgagtagatgtttgaaagaagggtatagtcaccactgccctggaacgctatctccttgacggtgatctcacctagtttagtttgccggtacctgcaacaagcactgagtaatgccctccatatcacagcatcaggtttcacattcattgtctttaccaagtcatatgcttcatccagtagcccagctcgtgacaaagtatccaccattgcaccataatgttcaatcctcggagtgatagaatactttgtagtcattgcttcaaagtattgacgagcctcttcaaccatgccggaatggctgcatgctgtcaagagtgcaacaaatgtaaccccatcaggaacaagaccttcactttccatctcacgggaagaacatcaccgcatcagatccaagaccatggtgctgncaggccaccaatcattggtggttccatacagagacatggtttctctctaatttggtcatgaatatcccaattgccacggtcaattcttccacattttgcatacatatcaacaagtgatgaacttaaaatatgggttcatttccaatcccagttcagccattagttgatgaacccacataccataacaacgggcaccagcttgagcacaagctgataggactgaggagaatgagaagccatcaggcactagacctgaattgaccaacttgctgaaaatattcattgcatctttcaggcacgagttccttgctgtacctgcaatcattgaattccatgagaccaaatccttgacaggcatcctcttgaaaatctgatatgccttgtctatctgtccacacttcaagaatcccatgagcatcaaatttccataaaagggttcggcactccactccagcattagccaaaatagtttgcaagcttccatcacgcgaccatgatcaatgtataatttgaagagattgagttactatacgttgattagatagcaggccaagtttaacgagatgggaatggatttccatgatagcatagatatttgaacattttgcacaagccttgagaaggagcacatatgttctgtaatcagggcagaaagcagtgaaacgaagcatactgttgtaatctgtcagtgacttttccggagatcctttctccaaagaagctcggaggatggcattagtgtatggaaagatggctctaactggatatctcctcaaacagtttgtgtaggacattgtgcaaataagcttctcaaatgcgatcactacaatgcagacacaaaataggcaatttcaccaggcaggtaagtgtataaacattttctgcaacctaatgtaattcacagaataccatcaacgagacaacgataaccaggcaacatggataagatgaaattcaaacatcatgctgaaaattcaccctgctttgagtagtgaacatgcttggttcacacaagatgattgcaaacccattccaaatcacaactcacaacacttgattaccaaacttattcacggttcacacatcaagtagccaaccccggatctagatcatgaccagcgtacattgctatgaaggggacatgctgaaagaaacacagaaaaaaaaaacccagaatttttcaggaccgctaaaactaggaaaagggaagatacacacaacaatcaaaatgcacgaaaaaaaaaaggggcaccaccagagctaattacagatcaaacaaacaagaaggcctccaatgccccaacgcagcacaggtgctcgacggaatgcctgaacagagactaaccaaagcaacacaagccaatgcccaccggcagcgaagggatgacgcacctgagcaccccgcagggccgagcaagatccaccgaggcggcggcgaccaccgggttccgggatcacggaagaaagaagaaggcaggacgaagcaagagatgggaaagcgactgaagcaaggtatatgcccaacccacccacggagatgcgcggagcggaagcgtggggtgtgctcaggaacggacaccc

SEQ ID NO: 2084 - DNA, 2000 bp, Oryza sativa
  N_region (19)..(19): n = any nucleotide
  N_region (104)..(104): n = any nucleotide
  N_region (106)..(106): n = any nucleotide
  N_region (110)..(110): n = any nucleotide
  N_region (115)..(115): n = any nucleotide
  N_region (121)..(121): n = any nucleotide
  N_region (148)..(148): n = any nucleotide
  N_region (153)..(153): n = any nucleotide
  N_region (202)..(202): n = any nucleotide
  N_region (213)..(214): n = any nucleotide
  N_region (221)..(221): n = any nucleotide
  N_region (278)..(278): n = any nucleotide
  N_region (282)..(283): n = any nucleotide
  N_region (304)..(305): n = any nucleotide
  N_region (322)..(322): n = any nucleotide
  N_region (346)..(346): n = any nucleotide
  N_region (363)..(363): n = any nucleotide
  N_region (368)..(368): n = any nucleotide
ttctccaaacgatctctgngaaaatcattccatcaattcatgtctataaactcatatggaagttctattcaaaatcccttaaaattgaatgaccactatatctntncctngggcnaaattnaccacaattcaacccgttaacctctgngtaanttccttcaccatttccctagctctgtcctgaccttttcagctatagttngccatgtgggnngcccggnacgggacggcccaggcccggccgtgcctgggccgaggcttttcgggccggcacggcncganngacgcaccgggccgtgccgtnnagcccacgtgccgcacntcacggcccaggcacggcatcaanaacgcctcgggccgtancgggncgagcccgaaaggcatcgatgggccgtcgggctttttcctcagaataagtctaaatttcctccctcctattgggctgtgacatatgtacagctacaaaaagtctattttacctccctcttctttgggctggggtatataaatagctaaaataagtctatttaaggtccctattctttagacagttacatttatatgtctatttttagtccccatactttatgtaccgggcctggcctgccggcccatcgtgccgggccggcccgaccgtgccgggccagcccagcgtgccggtggggaggcccaggcacggcccgacggtcgggccgggccagcacgggcccgatccaagtcgggccgtgccgtgcttgggccgggccaaaaaggcgtgccgtgggccgggccttcgggcctcgggccttatggccaactatatttccagcccactgccactgcaccccaacaaaggcagctgccccaaccgagtttattacgtgtgccacacaatgcccctaggtgccttgccatcactcctcccgaccattcgctcgaccacccctctatcttccactagcatatccccccggcccctaatttgtttgtgtatgggtccatatcctcaatgaacagaacatgaggaggtgactaattctcataattattaataagttaaaaaattacgtggagaagagatgggaccgcatagatgtcgtacgctagcgaaacaaccaggaccgccaaacttgcatctacttaaagcaatagtatgagtccctcgatgaaaatgcctaccaaagatctccatgctgcaccgcacatccatgctaggttttcataccggtccataaacactcctttagggagatgctcgagcaataggcccaagcagaactaggttttccccaagtccttcatctcaagctcaatattaagataagccattgcttgtttaatgtcctgtgtggtgccaaggatatttagataattgacatagaccgagatgatacaaaatgcattcagggatttctttataaacacagggggacaatcataattctttgggaaacctctctttaggagatatctatttaattgattgaatcacatccttccggattgttttgatccgtacattgatcgctgcaggcgaacaatatagatgttgcaatttcctttcggatttgggatcttgagtccttcagggactctcagataaagttccaaatctaatgccccatacaagtatgcggtcaatagatccatcaaccgcatgtgtcggttcacatgctccatgaacagatcatgaggaggtgattaattatcattattctaagtttaaaaaacataagtagagaagaaatgggaccacatagctgatttttgggaggcctgcatgccctaggctagcgaaacaaccgggaccacccaactagcatctgtttatagcaattgtataagaacccctcaatgaaaaagtctaccaacgatctccacgcatctatgcctagtttgcttaccctccctccaccataaatacgcacccaactgtaacatgtatcaccaaacatatcgatccatccctgtaccagtcaagaaacaaggaagattacaccaacaaacaaactagctagcca

SEQ ID NO: 2085 - DNA, 1721 bp, Oryza sativa
  N_region (1147)..(1147): n = any nucleotide
  N_region (1165)..(1165): n = any nucleotide
tggttaccgttgtcaggtcataaggtccgtaaggcaccgaactcgaggacaaaggtgtttcgtgtgtccaaacattgtcgacgatgatttcgtggtaattacaactattcttttcatcactcctcagtactatcattaacttaactatcccaaaatggatgtacataggaggatgtaaggaaatgtcaattcgtacaatggattgacacagtcagagttacttcaagtggcgggccgataacgcaacctgaaccgaccatacagttcattcatgcttggatggagtacgaacatcgggtggaaattgcaagcttagactggaggaacaatccattagggttacctaaatggtccgagtgtccaaagtgtgggtgcagagatcgctggcaggtggctacatcctttgctgaacaaacatttcgaaggagatattttgtctgccccaatgtagacaacgatttcgttgtatgtctaaccatttacaaaatccgctatgatttgcacaaaattactacccaaactgaataacattactatttttacagggcaatccaaggatgggtggatttactcgatggatcgacaatgtcactccatcatatcatggccagaagataacagagtcagaaacacaagtagagtatcaacgattgaaggaccacgagaatgcaatgcattctgaccgacctagaaggggccgataggttaccgcatgcttgattcgtcgggatcgacaaatttgtaccgtgtatcgatggcacttcttatctatcttatcattacaatgtttaattatggtggtgattttttgtatgcgtaagactaagggcctatttggattgctaccaaaaacatgccctaccaatattttggtaatttgaatagtacttgtgtttgatttcgattgaagcctattcattggtaatacgtaatctagatttgagattatgtagaacattcttcactacaattttacattttggcagcaaaccaaatatgatcaaatgcaattttaccttaccaaatatttggtagtgccaaaacttgcttatattttggcactaacaaaatatttgtacggtaacattccaaataggccctaaaaaataataaaattgtattttaccggtcttggagattttaatcntgtatagttttcaatatnaaaagatttgataactattgatatttatacaaaaatataaagcacagtataaaatcgccctccccagggcggcaagggggccgcctgcaaaattccaggccccccgccgcccatttgcaggcggccccccgcacagtacaaaatcgccctagcggagggcggcaagggggccgcctgcaaatttcgttgacggccgtcgcccgagagcgaacggccgtctgccacgtcactttcgccgccctctgggatggcgatttttaaaaatcgccctcccagagggcggtaggcgaccacttctgtcaattttcaaaatgaaaaattatttttttaaaacttttaataaaaaaattaaaaataaaaaaaattcttcccttttctcctgtgaaaatttacatggccttgttgtgcatttgggccttttggtgtggctcgttcgttcatttggcccgaagtggggagggggcccagttaggttaggatgctttttagttgggtaaccggttacattacaccgcggttggttggcaacttggaatgcagctgcaaaggggacggg

SEQ ID NO: 2086 - DNA, 2000 bp, Oryza sativa
  N_region (191)..(191): n = any nucleotide
cgcgcgcgccgcccacgctgaagcccaggaggtgcacgtagtagaacgtcgccatcctggggttcctccccatcggcgtgaaggacgcgcccgccgctgccgccaccgcgccggcgccgaacgttacggtggaggaacggttggaggagggcctcaccgacgaggtccggtccacgaggcagtaggagaanctccggccgaagctgcgggcgatctgggaagggaacgacagcctgcaaggccgaagcccaagagtcccgaagcggcgatgaagagcccctcgttgtcgtggccgcacccgatggccaaccgctgcaagcgggcgccccgcgcgaaggtgagcgtctcggaggcgaagtccccggcggtgacagagccgtcgccgtaggctacctggtagaggcaggagttgcggcgcctgtcgcagccggcggaatcgaggcggcggcagatgggcgcgacgcagtccaccgcggcgtaggagccggagcggcgcgggtcgaagaccctgccggaatgcgcgtagcagtggcggcagggcgcgcactggagccagacgacgtcgctgccggtgtcgagcaccatgagcgcggtggtggcgggcgtgccgaccccgacctgggcgaagtactccccggtcccctgcgggaggccggacagcaggggcgccgcgaagccgccgcggcggcgcgggcgcgtggcattgttgggtgcagcaagcagggcggcggcgcgcgcggcgtcccgggcgaggaggtgcgcgagcagatcggaggcggtggcgttgagcgcgaagtgctcgcggtgggcgaggcggaagtggagcgtggaggcgttggtgcggggcgcggcgaggctgagctgctgctcctgagtgataggatccggggagagcgggttggcgagaagggattgggtgcgcacggccttggagaaggcggcggggagaggcagcaacagcagcgcagcgatgaggaagacatggaacgccattgccgttgaggggagcatctcgatctcgatcggaggtggtggagatgaagcagaggaggagaggataattgggagagagaggtggccggcggttgctagctggggaattaaatgttgtttcttcttcttcttcttcttcttcttcgcggtggctgatcgatcaaagtgaattgaattgaagtgaaagccaacagcggcggctgccacgtcctctactggatcgatagatcgatccgcacttcactgcagcgacttcaattcgaccaaggatgcactgggaaaatcatcacttgctgcctggatcttgcacaagtacacacactcggttaattaccagcagcagtttacagtctacaaggaatctgggcattcgggaatcgggagagcgagatgtgccgtgtgcgtgcgtgtccgttgtttcaggacacacaccatgatggcaatctcccgttgggcctaccagccgaaaagttagctaattggcccatggcatcattttgggcccaaatgcatgtggtcccgacgacagaaggcccacaatgtcgtccgtccagcgcagcgcaaaactgggggacggcaaccaatcgcagcagtccatgttccgcggcgcgggtggatcggcgaggactccatcttccccggcaattccggcgaaagcatctcaaattggtaccaaatggcagccatggcgagcgcgacaaaccgccagaggcacctaattttggcactggtcgtccccagcagagcagatgaacaagagaggtgcctcgcaattcccaaaacgaaacgaaacgaaaggaaacaaagcgatccttcttgcgctccggcgccgccgtctccccctcgcgcggttgcctgagccaagaacaggatcggaggccaggccccatgcatgcatgttaattagtctgtcactgatcacttcatcccattagccattagctgtttctcatccagacggacgcgccatccaacacacatcgatcgatcggaggttgattggccgg

SEQ ID NO: 2087 - DNA, 2000 bp, Oryza sativa
  N_region (433)..(433): n = any nucleotide
  N_region (1346)..(1346): n = any nucleotide
  N_region (1355)..(1355): n = any nucleotide
  N_region (1386)..(1386): n = any nucleotide
  N_region (1394)..(1394): n = any nucleotide
  N_region (1402)..(1402): n = any nucleotide
tagaatatgttgccttagttgccagtcatgtctaagttttgaaaaatttaactaacgcatatgcagctatttggttgcgtcatatgtatggaaagattcatttctaataaattataccccatacgtcaatgataaaaagtgtgaaaatattttcttagaaaatgtccggtagctattattgttgaaaatcactaaaagctatcttatctgccccaaaataaatactccatccgtcccataatataagggattttgagtttttgcttgcaccgtttgaccactcatcttattaaaaaaattgaaattattatttaaattttttgtgacttactttattatcccaaagtactttaagtgccaacttttcgtttttttatatttgcataaattttttgaataagacgagtggttaaaccaaagtaagtaaaaactnaaaatcccttatattatgggacggagggagtacagttttatactgtttatgtccaacgtttgacgacatgtcttatttgaaaaatttttacgattaatattgtttttgttattatatgataaaacatgaatagtactttatgtgcaactagttttttttaatttttttaataaaatttttaaataaaataaacagttaaacgttttagtaaatccattatttagggacggagttagtacattaatttcaatctgcggcacgcaacgctgccgcaaaacttccgtccatatcatttcaccgtgtaaatatgatttcaccttgggcccctttagttctccaaatttttttctcaaaaacatcacatcgaatctttagagacatgcatgaaacattaaatatagataaaaaaaactaattgtacagtcatggaggaaatcgcgagacgaaacttttaaacctaattagtccgtgattagctataagtgctatagtaacctacatgtgctaatgacggcttaattagtctcaaaagattcgtctcgtagtttctaggcgagttctaaaattagttttttcatgtctaaaattagtttttttccacgtaatacaaaaattttttttccccaactaaacacaccccttgtattgatcgggaagaaaacggggatctactgacaggtcacacagctcgcagcaatcagccgctcgctgcggcgctgcctcctgcccagactcgtccatcctgtggctggctggctgcgcgcaccgcgcggttgccacgcaccgcccgacgcacacctccccgtgggtggagtcacgcctcacgcagtggctcccacaccacacacgtcgacctcgaccccacaagccagtggcgggaacccagcgggtggtcgcccgcccgccaacccangcggctgcncggggcccgcggccaaagggacttcaacgcntggtcccntggtggtntcgctcgcgccgcccgaaaagcgcaccgtcttttgatgcaacgcgatgtgactcgcccgacccaactcgggaactgaggccacgcgcggggcccgtttttgaccggtcgccaccgcgaccaggccaagtcttccatcccatcccccgccgcgtgcgctgctgttcctctgggccgcctaaccctttcgcgggctgaaagtaacctgaaaccgcgagaagcccaacaagacaccgcgaggtccatggcgcatttgccgcggcgatcgagccgtttactctttaaaacccgcgcgggagccgatcccccgcgcgcggcaatcggggcattcgccagccacacctctctccatcctctcgttctctctctgtctcctcttctctctcccccgacggagaggagagaaggcgaggagccgggggagatgggatcggactcgccgcccaagaaatggggcctcagggagcagcgcgaagcctacctccggtggttctccctcgccgacgacggtttgccccccatcgctgagcacgacgccctctttatgtttttgtcttcctcgatctttgccggtgaaaatgtctctgaatctgttggtgt

SEQ ID NO: 2088 - DNA, 2000 bp, Oryza sativa
cgcagtcatgagcggcatgtgaatatgtcatgagtatagacttgtgttttattcttccaaaagctgaatttaaacttcaaaatgtgatgtgatttgtggattatgtccttgctgccatggaaggtaataaggagctatgttatatgtgattaacacctactttgatgcccatttgctaagtgtaagcttactgaaatttaattgaaaggaaatctgaatttgaaaatggtctttcaaacaaaatatgctttatgctaaaaatatccattgtaagctttactttgaatatgccatgcatgtagagtattaggcttgcttggtgcttgccagtacaatttatttgtactgactcctgcttgaattgttggtttgttgtatgcttagacttggttgcaggtgagatcactcttgagatgtatgatttcacaggggatgtttcgttcttccataatggttcttactaggatctaccctagtcagttgcatgaaagatcttttgggtagaaaatgcttccgcgaacctaactatttggccggtcggccatatatatctaagtactatgttgtatgatactaactaagacttagaacttagaactccttatgttagagatatcatgtgcttggatgaaagtgtttagtgtgttccttttgttaggaggatattaaacatgagtatgagttaaagatatttgagacaatgtagatcattagctattttgtgtcaagtctcctgaatgtgtaacacatctgatcaccgccatcgagtggtttgacaggcacatctcgggctgaagttaactggcaggctaaaggcccagcaattaccaaatttggttgttaacaggtctcatatatctttctctcgcagcgtcgaatgccttattatgtttgatggaagaattgatttattctattcatccttcaaatataataaggggttcggagtacttccgacacgaaccaattgtagaaaatcttataatttattagaatcattgtggttcttaattttccctcaaattgacacaaccatacataaccattgcatcatttttaagtgaccacatatcaatagacttccctctattctatgccatagcagtacatagatggttttaaatattatattccttactattaaatttgagttttaacactcgggtcgacaaaatgtatttaaaaaatatatatcacacatattataggatgcgaggtctagaatatatctactctatttttattgattgatatgtaagtacatacaacaaattgtgtcaaatgtgaactaattaaaaaaaggaataaaacgcatttattagcaataacctttttgagatttgttaaaataagagcccaacacattcaattaaaaagaaaaacaacaccttactttttaatttagacttaaaagacctatgtcttcttaaatgatgaagaagattaactttatagataggtgcttatatagattaattaaatatttcatattataaactaacaaatatcttaaaagaaatatttaagcaatgattcatgaatgcccacgcgaacgcgtgggctacctcttctagttaaaataacacgtaactaatgaattgattaatgaggagaggtgctgactgattagcagaaagtaattatggttaccagttagtgtaaagacaaattcgagaaaggaagcatgcatgcggaacactcgatgagaggttggcagaggcggcttgctagagaccgaccatatcgattgggtggccgggtgtcatggagtggagccacgtgacaacacctgcttgcctttcgccagcaatgaatcccccagccatccttccatccagttcccaggctataaatcccagccacccttccatccattgccacatcgctcagagaaacacgcacacaagaaacacaggagtgagggagaagaagataagggaagagagagcgagagagagagagagaggggggtagcaaagcaacttagctagctttgctag

SEQ ID NO: 2089 - DNA, 2000 bp, Oryza sativa
gcgtcatggttcacctctttttctaaacaagttttggtccccgcaactgtgagatgagtagtctccgtccgattttaagagtcgttttcgtctataatatttgatcgtttgttttatttgagctaaacataaagtatttatgttttattatctaataataatatgaatattaattataaaaaaaattaagtacaatgaacgagtgaatacagaaatagggagtagtactgattgcaggccgcagcatcaaaaaatgctttccggttaacctacctccgctgtcaccatgtacactaagtaaaacagcaggacaagacaactaatcagtacggagtaatcaactatggtcagatttgattaaaaaacaacaacagatttgatcggcgaagcagtagtataaaatgaaggagattgaagaaaacgagaggagatcgatctagcttgggtcgcagtacgtcgtaccttcttcgaatcgaatcggtggccgtgtccggcggcgggggcggcgcggccatgtgttaacgcgagctggctgctggccaagtgtcgagcacctgtcgttctcatgcggacgcgggcggtagaagctcacaggctagccggtgaccgtggaggaggcgggccgacggccgtcgcggccgttaaccgaaggcatatatatacgcgcgcctattacgatttgttttgtgacagatatgcatttgctttcgaacctgacagacgtgagacgtggcctacatagcagcctcgcttccgcatttgaatgctccatctataccaacaaacgtttatttttcaccaatctagcacgtaccagtaaaaaaactagaatacgttaacttcattaaaatataatgtaattatttctctctttatctactcctaatacatttatcatttacttttacaaactctgatacaatggttgctttataaaattttcttttataaataggaggatccaaaagtgatcttattttatgacgaaggggtagtaaattataagttatgttctaaaatataaaatctgatcacataagctgtttacagtagcataaatcataacaatttaacaatttgtttttcaattggaaacggttcgtattgtggttgtttgggcacttttgtaagccttgcatatctattgagtaatgcctgagtcgcagcatcaaggtctgacctaaattaagcgaagacgaccacttcgcagtattgtgccaattccagttttaaactatcgcagacttgttgcatagctttcgactaagcggcaggccgatgtaacttatgaataagccaattagccaacattaataggaggtctaattccgcaacgaaaaagcccaagaaacataaaacagttccgatgaaatccatggagctattatgagatagcaagcactagctcctagcacggcttcataaaaaaacaatcaaattctataaatttaagccgattaagattagatataaaattatcatgatcggtagaaggaaataggcatagaaattaaactagagatggtatagaaaatgactggagtgatggttgtgaacttgtgatccattgagatgaggaagtacgctaaaaaatatttatattgtggtataaattttgaacactagaaatatgtatattttggaacagaacaagtatcatctatcgataggattaaaaaaccaaattaaatatattcacaacaacatctgagtcaatttgtagtaaaatttattcgaattctatcaactttcgtcggtaaccgattcattcctgaaagcccggtgcatctgcaaacagcgtttgatccgatccggccggattatcgttcgttcatctaactgcacgtcacgccctccgcgtgtgcctccccttcgcccgctcgctccgtcgttaagccagatcgcccgccgctccgtgccctagcgccgccgccgccgccgccgacaccggaatcgccgggcagactgcgagcgcggagccaccagcgtggggcggcggg

SEQ ID NO: 2090 - DNA, 2000 bp, Oryza sativa
tggcgtactggtggttttccaaagttcctaagtggattggagggctccatgagcttcacgtcttgaaacttgcagtgaaggaggtgtcagatgatgatatcactcttcttgcacaactgccttccctgacaaaccttggattgcgcatgcgaggagcacctaagcagaagataattatctataagaaggcattcccagttctcagatacttcaaattctggtgtagcacaccctgcctggtctttgaggcctccgtgatgagcgaagagctgcggaattagcgctacaaaatgccattgatatgcatcctggtcgtcctagtgttaaggtcgtcagttgcccgcatacacagttccattctgacatttccgattaggaggaagtggacagggataacatatgccatctgaacaaaacctagtaaacgtcgctacttgataccatacttgtagtagtaactgtatgcagaaatttttttattaatgtgaaatacaacagaaaatcgcagagcaaacatgatcatctgctaacagcattttgagtactttgatggtaaacaaaccccactgtttggatgtgctgctaggctgctagctagctatcgaatggccttatactattgctatttagtggccctgaaatcgatgtaatcaccttctgtcttcaggcaccacacatttcactacctgttctcaggaaacacatcctccctctgtctctaaatataagtgattttagtaggatatgacacatcataatacaatgaatctggatatgcttctgaccagattcgttcgctgtactaggatatgtcacatcacactaaaatcttttataactaaaatcccttatatttagggacggagagagtatatatctgccgcatctgtagctgcagagctgttgacttgtttttgcactctgagaagatgaactatgtgatgtcatggaacttcctgaaattatcatacatcgaggattcctctgctgcaggttgctgtgagagcaactgcagcatgtccggaacttggcaagtgaaaaataaggttcgccaggcccatttgtggacaaaagtgatttcctgctaatactattccaggactatatttgctattgtttgtgtgtaccgtggtttctgttgtttatttgatcacttgagaaggctaaccctaactaatctcttcaatcctgcatacaaaattgattttttttccccttttcgcacgcaccgtacgtgttgagcagtatacccataaaaatggcacaaaacatgatgattgatgaaatcctgtatgtatgatatgatatgatatgacgaaacacgaaactgcgatcgagtgattgatattgcacgttttgcttgatcttgatcaacatggaaatggatcggtctgatgaactcacgttgtaactcctcactattgagttgaacatggacgaaattaatatggtgatggatcagcgatgggtttataacttcacctatcaaaactaaaatattgacgtccacgaatatcatgcacaaggggtatgctttcaatctgaattttatggggttaagaactgccgctgatcctcgtatcttgaatcatatattagggacacacttgcggatatcctccgtgagaatgtgtgcatgcgtctttggggttaaaagggaaaatgacaagggtatacctaagcaagaagaacctataattttgtagttgtgttccatccaatatgggaaggaaaaatgggaccgatggcaagcatgcacaaaaggaaaagcgaagttaaagggcaagctaaagatggaacgtgtggttgggacgaagcagtgggggatccagtccctcttccccctctcgccgctctcctctatttatagcttacatatgcgcgcctcacaacccgcgacgaacaccgaggagccagcaagagacaaacctgaccaaatccaccctagctacaaattttcttggccgcgcgcggcaggcagatcgagcaggcgagcgaag

SEQ ID NO: 2091 - DNA, 2000 bp, Oryza sativa
tacaatatcttgcgcaatgtatgcgcttcgtgtgttgctgataaagtacacgtaccgacgtacgcgtataaatctgtgtatttggattcgaattcatcattacattcaaaaagcaaaccaaaacaaggtcagtcgtaattcaaaccaaaatacgactgaaaatagtaatattgtcgaatatattcattcaaccacgtatgccgtgcataattccaccttccgtgtatctctacctattattaaaagtttaaaatgtttttgccatcatcttcgtacgtcgcaaatccgtcatccgttcagagtcctaagcgtgtttgtagttatttccttccgcgcaacgtgttttaagccgctaatcgctcgtgtatctcttcatcagtccgatccttattatctgtattctttccaaaaatcacagcccagtatatattaagccggtacatgttgtagtcaagcccacgtttccaactgcccacgtcacacaaggaaagagtacagccgtatatcatgcaaagctgcttctgatctattaccgctatattctgcctcacgtatatacatgcatatacatctgtttactctataaacatgtaaaccaaaattaaaattttacaagtctattactattataaaaataaaagatatttctgcggtccatcatccatgtttgagtcggttataaaaattgaagatgtttccacggttcgtcattcgtgtttgagtcggttttaattttatgctttggttttaatctatatcaattctcttctctatctctatctcttctattctctatctctactattataaaagttgaagatgtttttgcctgtattttggtacgtcattcttgtatgagtcagtttttaagtttatttgcttttagaaatatatatccgtatttgaatcggagtatttgtttaaaaaaactcgcatgctaacttaagatgatcggactcctaactgcagcttataattttataaaattacatatatatccaagcgaactcctacaataaatttcatcttaactaaaccatataacaataataaaattaaaatagacttcacccgtccaacgatacgggcattttttctagttactcactggtagagaaaccatctttcgtcggtcggccgatttccacaatagtcccggatgcaataaaaaccggggctaaagatgatctttagtcccggttcaaaagggtaacgggcatatttgatctttagtcccggtttgtgttaccaaccgggactaaagatcatctttagtcccggttcgaatgctgtcaggacctgtcaggcccccccgggatctttagtcccggttggtagcaccaaccgggactaaagatcttaactttagtcccggttgagatttgaaggataccaaagattcaaagggttaggtttttctttttttttctagggtaaaaaattcaaagttctaaaattcaaacaaagagacttattttttccaaaagagtaaattcatagtttaagaaaggaatacggaaatatgaaaataagagcttctgttcgtaaaatttgtacaaaatgtcgattgattcgttgaacgagggaagtggaaagacaaagagggatagggagctcgcctcctttttttgaatcgccgaaattgtacgacgacccttcttgttccaggcatacgactctgagacgtgacggtgtcacttttccggcccggtaaagtgacagttatataaataagaataagaaagagaagcgtgatgttgtcagcaatcaaattatcgtaaatagatagtacggttgcgttgtttcaatttctgttcgtcggtccttgggttacgaaggtgtgggcttactaatacggagagggttccgaatgataaagtgtcatgaaagttcgtgaaagaatgttcttgtttttcgttggaaaacccaacgccacggccacaaaacgaaaaagtctcccgtttgttttgggagcagagctttaaaaggatatagttacc

SEQ ID NO: 2092 - DNA, 133 bp, Oryza sativa
tggaaagaaggcgcgggtgcaaactttgaagagtgaattcaaggcactatgcatgaagaaaaccgagaccatcgatgagtttgcaggcaaaatcagtggcctagcaaacgcaatgagtggtcttggtgcaacc

SEQ ID NO: 2093 - DNA, 2000 bp, Oryza sativa
  N_region (864)..(864): n = any nucleotide
  N_region (914)..(914): n = any nucleotide
actattctccggttttaaatagtgaggattagagcttagtagcgtgcagagcaataatttcttgtccaatttgtttaatatcaacatgcaagttttacactaattgcaatcccttcaattctagaattttgctttattatttcttttgatcataaaagtaactactttagattaaaaaaaattacattgtagcacttcagagccaatactgatatgcttcgaattggcattttctgcagccattctttgcgccagtttccttgcatgtgctgttggcggtaatgaaagagctgaaacgatacatggtagagagaaggaaatattcagcatttcttgcttcccaggcgacatcttcctgatcttttggtgattatcagcagccctgtttcatgcctagtactatcatccacaccaagtctgatatagatggtagataatctgcaacggttcagccacagctgggggacgcgtcttcttaccatcaagcaactgctgggcagacaggtagaccaaatggtgtgtgcctgtgaactcgcagaccaggtgaagatgtgagggaacccagtttttgtcacaaatacggcgttcttccatgaaaccagcttggtgaggccttaactgatcgtcgggtatcattcacattttttggtgaggccttaactgatctctgaaactacagaccgctatctaaagccaatgcatctgtaaattgttgtataatttgagagcgcttgacaaactccccgcagaccaatgttggattagcagttaacacgaacttttacgggtttgatgtgtgtgttcacgattgtttttcatctgcaacgcatgcatgggattccccctctcgtcctacaacggcanacccggacgaaggaactacccgtgtggccgtaactgcatctccgcccggncagagagagagagagagagagagagagagagagagagagagagaccgctagagtaacatgtgcgaaaagacctgcaccattcggttaatacaatttccaaatcatagaaataaaaagttaaatgattcggataggacatggacttcaatcattaagaatttattattttgtacaagagatcttaaaaattatatgaaatactccatccgtcctaaaatgaataaaactagtactacaaatttagaacggtactaggttttaggtcctttttaagttcccaaataaaaattttcactctgtcacaaaatgtttggacacatgcttggagtattaaatatagaaaaaaaactaaattgcgagaagaatcttttaagaccatttgctccatgatttgacaatgtgatgctataataaatatttgctaatgacggattaattaggcttaataaattcgtttcgcagtttacaggcagaatatataatttgtttttttattagtttatgtttaatacttcaaattaatctacgtttaatacttcaaatgtgtttccgtatatccaatgttacacactgaaaactttttacctctggaactaatcagggctttagtttatttaagtttgagatggggagggtaaggttataataggattacaatgtaagtttacaaggctacaatctttgaaatttgataggagctatttctccggaacgaacgaagcatatatggaaaaatcgtaatttttcaatactacgatatgtaatattttgaaaattcttttaaacctaatgagccccgtattgttaccgtggcagcctggcagggtgcaaggcaaccaccggcgtccagggcacaccgccgcttcgcgacgaccgccatcggcaaccgctcgctgtcgctgcagtagactagcgcggacgctccctccttccctccatcccaatccgtccccttcacttcactcccattcccatttcctctcgctcccaccaagaccaaccaaacccctgtttctccctcaaaacctccctctctttcccccccgaatgctcgagcgctgcgcggcggaatcccctactcccctc

SEQ ID NO: 2094 - DNA, 2000 bp, Oryza sativa
  N_region (1518)..(1518): n = any nucleotide
gatttcagttttcgaaatactcctaattaatgttgaaacggtgagaaaaaagaagtgaatgtctaatggtacagattaaggggctgtttggatgctatatataattttcattttcgaaacaaaactatactataaagttttaaacaataagctttggcacatgtgagctaatgcacattttctgtttcccactgtgtgttaaaagagtgtgaggtctagatatttgtaaattgtgaagaattgtcaactgaaatggatccagatattagaacatatgtgaccagttcctttcttcatgtccatgtcaccatgtgagttttattttgtcaaacctcaaaagcccaacttaagctcacgtgcgtgtgatttatactgtttgttagagagatcacccgtgaggggatcaagttagttgattccgtgttcaaccaaaattttcgctttgtaatcttatatttttttttcaggttacgatcctccggtattgtaatcttttaaatcctctggtattgtaatcttgtaattttttttctagttacgatcctctaggattgtaatttttttctgctctattaataaaacttcgttaaaaaaaattcgctttgttctgtttcttccttgtgattccgcgcgttatcttgcagaaaccaaaactgaacagttctccgcgcagccgtgtctggaattctcatgcaatggaatactagatcggaacaagcatgcaggcacgagacgcatttgaacagatcggagattaagctgcaagccaatgcatgtattgattaacggcaagatcatgcacattatcgcaggaaggagaggaagaatttacggtgctctaaagaccaaagaaaaggaaaattctgtctgatctactgatcaagactcgagggcgccgtgtccttcccttcctgatcctacgcgtggccccgcgccggcgccgccactacggcggccggcctccgggtggatgagcagcttgaacctgccgtcctccttgcacggctgcagcaactcctgcgacggcagccgcatctcccgcagcacgagccggccggcctcccggtgcgcccggaggctcagccacggccgcccgcccttgccgatcaccgatatcggcggcgggaacgccctcccgctcctcgtcctcctcagcaccatcacggcgtgctggttgtcgtcgtcgtcgtggcctacgccttcgctgctgctgctgaggaggacgtggtgcggcctcttgcacggcggggccagaaagtcgaccgcggcgacggcggcgccgacgtcctccatggcgggggaggcggcggtggcgtcgtcgtcgtcgtccggatcgaagctctcggccccaagtgcctccgtgaggaggtcgaggccgccggagtacgggaggaggtgcggcgggggccttgattgtgtggcggggcgcggcccgagccgctgctcctcgggggctttgtagcagtgcagcggtggtggcggtggtggtggcgccatggacaaacggacggacgggcntcgcgcgcgcggcggttcacgtggcggctagcagagcgcccgcacgcgggtgggcgcgagctatatatatctgcgatggcgagagacgagacggcgagatcgcgcggcgccgatcgatcgagagcgagtcagcgggggcggataggggagaacgaagcgtgcgcgatctgatcgaccgatctctctcgcgcgcgcgcgtgccgctcttgcactagagataagactacgtggcacgccaaaactgtcctgaattcgtggcaaacggaaaacggaaagaacgtcgcgcgcggacgcagccgccgcgccgagatgagaagaagctaggcaagctagaagcccctataaaatagtaccattcacctcactatatcattgatcatccgagtcctaactgggtctcactaagcgaggtaagtagtgtgttagtggaaatggcgacggcgagggcgagggccgcgctggtgtttgtggctctgctgcag

SEQ ID NO: 2095 - DNA, 979 bp, Oryza sativa
  N_region (28)..(28): n = any nucleotide
  N_region (35)..(35): n = any nucleotide
  N_region (38)..(38): n = any nucleotide
gtggactaccgaacgcagcatacggganggaggantcngggaccgggtcgttgctgctcctcggtcggtaagcctagcctcatgagtgatgatgactagtctactggagtagtactagtggcctcgccagctccattggttttgttttgcaacttcaccacgtcggcaattaccgcaacaagccgacctaacggagggggtgggaacatgtatgcaccgaacctggtgcatgtccacgttcagcgtactacctctcaacttggagcatctctgcttattagtgctctgttttggccggggtgcactgcacccaaataccaactagcaccaccagaaatgtgtcctccctatactttatactctaccagccgactagagtatactagcactactcctactttatccgtttcacaatatagacaatgctagaaagtcttacattataaaacatagggattatataattataaatgaaaaaaattactaataaaatattagtacagaattccgaatgcgtacgtacggtatcgcacatccgctgcagcagctgcggaattaaacaaaccgggaatgcgtccacctcccttgaactcaatccaaataaataataataaaaaagaaacccacaattccgggcagatgcctctgtgtctgcaacacggtcaatccacgcgcgcccctaaccccaatcattaaccccgtatgttaacgcacgccataaacgcagacgcacggccaccgtccgttcctctatgcgcacaaatctcaaagctccccacgccgctttcccctcacgctcctgccgccttccgcgaatggatgcgccggtggactcctataaaacgcaagctctcactcgccgcagtccaaacaggcaaacgcactcgcatctccaattcggtccgaatttttccaaattccaattgctcatcgcgcttcgaattcgttgccgagatccatccaatctttgagttaagac

SEQ ID NO: 2096 - DNA, 2000 bp, Oryza sativa
  N_region (1731)..(1731): n = any nucleotide
  N_region (1733)..(1733): n = any nucleotide
atgcaaatagccacaagccgtccttgtattccccttgcacgtttgcatcattggtgtggcttgctgagtacggtggttatactcagccttgctattattccctcttttcagaagtgtagtgcttctgagctgaagacgaagttagaagaccaaggcttagaccccagttgagttttgcctgtggagtgaagctaaagcactgctaggatggcctttttccgctgctgtcgttctctttctttgtgaggactaagtgcctcttctgtaagtatgttacgctttatttacgtttggaactgtatattacttgtcgttttgtgtgtaccctggctggtcctggacagggatttaatacacaaaatagtctggaaatttgggttaaatttctgggcgtgacaacgacgagcgtcaaggtcgaggaggcttcttcgccttcgcgaggcccgagagcaaaaccaggtcgagtgttgctatcgcgtcctgctctgccaccaccgtcgccgcggcttacacgtcttcttcgccgccgcctcgcttctctacctcgcggctgccgcgccgccctcctcctctcctgcctcgccccgccgaccggcctaccgcctacatgcagagagagagagagaagaaaccgaggaagagaagagaggaagagatgactcagcctgacatgtggggcccatgcgggtcccacgctaactccgccgtcacgtaggataaaataggggtcaaaaccaccgaaggatctattgtgcccggttatgattagttgagagacgttcggtatttggttttgcggttgggggacgattttgtaactcgatgacaagttgagggaccttcggtgtactttttccttgttgatttgggcctgcatgaatgattgctacaaggccggcccaatgtgagtcccacccatatacatagataggtccttaatttgcaattgccccgctctggtctgggaagaatgaatgaataaaacgtacgaatggtggggagggatgatcggagagaggaaatatatggagcgtgcatgcacacagctgtcgtttttgtgaagaaacacagcgttattggtgttgtagaggcaagcaggcaggcaggcaggcaaggggaggggcaggaagaagggaagaattgaagaggctgaggctgttggattggaaaccgtttccaattctccatcctctctatcttcctctcttccttctcctccggtccctctctctctcccccctccatctccatctcctctcttgtatgtatgtatgtatcttaattgttgcagctagctaagaacatcaatcaaattcaaatattacatacataagcctattgattgatttgcttgctgcagttagcctacttacgtgtatgcatgtcaaaacaagacgaaataacaacaggcatgcatgtatgtatgcttattttgccgtgctagacggcttttgattcgtcttctttgatgggcattcatccctttcagctccaacccctacaggtatatttgtatgcgttcatccaattcaactatcatcattccatcttttctttgccattatcttgttttggcgtcaacattatcacataaaactagacaaaaattcaatattaccacaaacagttgcctagccttttttttgtgctgaaacacatgcatggctttgaatttcaaattcaaagctcataattttatataaatttatattctaacatgtttacgaaacncngtaattcattatcgaaagcgcataccactgaggttatcagaattttacactacttcaatattactctactaaaaaaacaaattttcgtatatcccttaatgctctgcttgttttgcacaaaactttcttctagctttgggaatgatttctcaaattatatgtaggataattttcatgtcatcgtctggacatatataatttcatattgttcaaagacatgctctatgcttgactcttgttttgcaaatatcctgattgcagttgatg

SEQ ID NO: 2097 - DNA, 2000 bp, Oryza sativa
tgaatggcccatacttccatcatcatgcatgatagtactagtttaatactggtttataataccagtactagcagtttggtatgcgatcgtttggagtgttaaacataagtgatcaaataattaaatcatttggcacagtttgccttgagtattcagttagcaattaatggccaaaaaaataataatagagagagaaggagcaattgccaggtagttcgatcgtctggtggcttgtgccatctctttaatataaaagcagatggatcgatcaggatcggtttagcgaggcattaccatgtgctcgatctgctgctcattagctcgccttgcttaattagtctggttacaacaactgatcatgtggagtggagtcctgtactgcagtcctgcaggctaatttctctcccgagttttgattatatattccggtgggatgtagagcttaatacagtggacattgttgtactcatgtaattttaacaattgtcaagctctacatttcacgacagttgcttctgcaattttcgctttgaaaaaaaaggtgtacaagcaactggcgtgaaatgtggagcttaaggggtgcaatttcttcgtaacattctgatggtcaaagcaagaggcgatgcagtagtgcaggagtttggtagagagcagttcagtgcttgaagcattttcaaaatgtttaggcaattccagacacagctgaatatgagttgctaccacttagaaaacatgtatggatgcagaaaaacggtaaagagagaagggcaagcaatgggtgtacattgtgaagtggggttgtggaaatttgcagtggatctcccagaacaagaagcatgatgatcatggtttgctaccacagaaattgcttttggcaacagagagagagatgcctccggaccaatcatctgattctgactttttcttatgttccagaccacaccatccaaccatcatcaactcttctctgctctgctctctctctctctttttctttttgagggatgacatttggaacgtttaataagaagccaggggttgaacctagttaaaaaaaattgattaaattaaaaacatgtctagctaatttacgtgctacgcaatttatcttccaattacaatacccaatagagacattctctaaaccaaatcctcgactgtgtgttcgctcggcaggtcaggttccgtgtgttgtcgcctcctggctagaccgctctctcttcctcttgtggcagtcggcttcaggattggtggccaacctctagggcctgctttatctgagcatctccgtgccggtttcgactctctgatacttctggtctcttggcactatggaaggaacggaactccagagttttcgattctacgctctcttcggtctcagtggttctagagtatatctgcttggaagatcatctgtggtctttagcgtgcattgctacttttggagatttattgaaaatgtaacgtggctctaccccttcccaccaatcggagtttcatagccgccgtagtagttttttttccttcctagctacaatttttgttttgcttttcttcattcccctagcataagccgatctggctgattgcgttgtgtatcaaaaactatttttcctctaatatattaacgtgcaattattttacgcgttcgtgaaaaaaaatagaccaaatctcaggacatgacattcatcaactctgctctctttcttcaaagagatacggagtatcatgttttgttggtctcctgttaattacgactactcggtgggcctcaaattgggcctggcatgtaggcctgccacgagggccatacaaagcccaaccccaacaaatccaggcccagtatgacagtgtccaagtcaaaggtgcgcgcgcgaggagcgcgggccagattgcggagccgagtccacgacccgatcttggctccgcccttgccgccgcgcgcggccttctatataaaccgtacctgccgctgcgtgctccggcgtgcaaccgcc

SEQ ID NO: 2098 - DNA, 2000 bp, Oryza sativa
cggctcaccgccactcgttggggacgcaccgtcggaggcagcatcggcacggggatcgattgcgcgatgtgggatgaaaacggaggggatatagatagataatgctcgtatcatatttgtgttcatattctttaccgatataaaaacaaatacggatagctcgaatacagaaacaatacggattatctcaaatacgaacaaaaatcgaatatgatcgggcacgaatacggaaacatttttttctcggaacacgaaaaccaactcaacttctaatagaaataaatatcaacatatataattagctcattttatataaaatgaagtataatttataattttttaaaaaaaattaaataaagtatgtatatattgatgtattgcatatcaatcactttgcaatcagaaaattaaattaaacaactttttttcaaaaaaaatccaagataaaaagggcatttacttccctctcgccctaggcccccaaaatggtaggaccggccctgattaggcccccatctttttctctattcatcatcagccaatgccaaaatttaaattttaaagcttaattttgaagatgaatttgaagtttcttcatcaaagtttattttttagcattggcatttaagtcgctaagaacatatatataaaaattttaccaacaatttactgtattattattttgctaatatgccatatggcatattatccgtattatccttaggttctgcgaagacaaatggttgggaaatgtaaccctgcgagaacagtactcgttcctctacaacattgtcaggcacaaacatgcaactatcgaagatgtctttcaaaatggatatcccaattttcatggagaagggatcaaattggatcgaagttagtcacatggaacaccttatcaccacacatcgctaatattggtttaatttaggagcaagatgagtttccatggaagatgacccctaatggacagctccatatggagtctcattatcatctctagtttatagtgacatctcgaatataaatagacgcccttggaaactaaatatgccattgaaggttaagattttcctttggtaccttcatcgtaaagttgtgttaacccaagacaatctagctaaacataattagcaaggcgatcaaaactgttgtttatgtaataataaggatacaattaaacacattttctttgaatgcctcttagcccatttagtttggtccatcatttttgtggcgtcaagaattactccacccgatagtgtttcacaagtggtcactagttggctttcgggttttcaaaaagatatgtaaccatatgtcctgttaggggcgactgccacatgctagttgctttggttacgtaagaactatatagtttttgatagaaaagttatttatcacacatacatgtcatatttgtaactatccattggatgcacacctaggttattcttaaaaagccgagctcgtgggatttggttattgcgacgtgtctacacttggagcgggtggtcaatgagtgttttaactagggacataggtggtgatctagtcttaggatgatggtccttgatgcttcttgtacttaatttcttttaaattggttcatatgtgtttagttgtgtggatccttgggatgcagaggctgggagtgttacttagcgtagtaatatcaccttgatataattgaccgagttcaataaaagattccattgtcaaaaaaaagcaaccagttaccatgactatgcacccgacacctggcttctcgctaatgacatgtgattgggagaaatgcgtggtggcccaaagacttggcacatatgcatgcaaccaactaatttttgaccacaaagctcctgcggtcctaggccatcgccttacactatttaaagcaatcacatcccactttcataatagcaagcagctcatcaacctaggttagctacttcttgttgcattgaatcatccatcatcaaatcattgggatatatattcca

SEQ ID NO: 2099 - DNA, 2000 bp, Oryza sativa
aggaatctgtttctaccactcacaatatgaagggtaccataggttatatacctccaggtgcaagctcttcctttctatacatgatgtccctcaataaccttttatcctttttttatgtgaactatgctggcttatgccaaccagaactttattactttgataaacattactaaggatcacataatttatatgggggaaggtgggaaagaaaaagaaataaccttttatactaaaaaaaataatatctttcttggtgaaattttatggtcttcgaggtggtatcaagaggtactctcttagtccgaaaataagttgattcctactttccgtagaaaatttaatagtgaagagttgaaaatgtcaaagtacgtgtccctcattgatagaaagatggtattgtaaggtgattagtaaggggtactaaagtgaaaaaacttataaatttatgcatagtgggtagataagggtagaaatcggcgtactttagtttagactaaaattttaaactacagaaacaacttatttttgaatggatggaataggatgttttgtagtgtaaaacttggtattttttggtatagatatcaaactttaaattgaaaattgtggtatctaccgataagtccaccagggctgtaaaatttttctgtttctcattaattgaattttctattgtttcgtccagaatacggatatggagccaaaacatcgacaagtggtgatgtctacagctacgggataatgctccttgagatgatcacaggaaagagtcctgtagatcaaatgtttggaggagagatgaacctggaaaaatgggtgcgagcgtcaattccacaccaagctgatgaagttgttgacaagcggtttatgatgacaggttctgaagaatcctcagctgatgggcagcaacaacagcaggttgatactgtggactcgaaactgctgttggagactcttttagttcccatggtggatgttgcattatgttgcgttcgggagtcccctgactcacgcatcagtatgcacgatgcactgtctcggctgaagcggatcaatgagaaaattttcaagtctctcgcagtgtctacaccttgatttcttgaagaagatggtttgctgtgacggccaattggagcatcatctgaactgtcttttttacgtataaaatttgttttcagtgctgtagttctaattaattaagaatggagatgacaacactgaccaagagcacatctagctactaagggtgtttcagtctcagtggcacggtcaatttttaagttattgtactcaaatgtaattatgtaaatacttaccgagttattatacccatgggctgaaagttttgtaatagttaaatgaacacagctcccaaattcttgtaccaatggtgcaattttctttttgaaaaaaaaagagagagaaggaaatatataagagtagttgtaccataccatggaaataaaataattgacagttactttcttgcaaacctatgtgctcttcttatcagatgtccagatctttaatctgtttagaagttggttcaatcctttgacccacaaaatgcttggcaaaacctgttatccaattgtaataccctgtgcttcaaataaatacttccctcatttcataatgtaagactttctagtattggtcacattcatatatatgttaatgaatctagacacacttatatatttagattcattagcatatattgtaaaatcaaaggtgtttttgattattattctgtgatgaacaattggcatttgagattattggttttgatatttggaatttattcacgaagtgattttggtgatgattggatttgcaggtgaatcgcaggttctgttatttcatgtgaccggtcagaccaggctctggtagccggtcagaccggcgtgtatcgcgcggtcagaccggcccagcccgcggtctgaccggccgactctgtgtcggtttcggtttcggatatccgtgattatttcatgatt

SEQ ID NO: 2100 - DNA, 2000 bp, Oryza sativa
ttaggcctgaacagtacttcagcccaatacttttaacagcgtggcccattgtgttccttagggacttaggcatattttgctttggcaatattatgcgcacaacagtgttgcccaatgctgatcaaaccctttttatgcggtcatataattctttggaattattgcaatgcaaattaaaaaggtgcccgacagaaaggcgttatgctgtttttgcaagcttttttaggctacaaaagctgtttgggttaactaggaatgacttgtttttattataatcatttccttggcgtgttatatgcctgttttcatggtaaatagtcatggcctaggctattcgacttatttattaccataatctttataatacttgatgggtaatctttagaatttttattcggatgcctgtcaagtgtgttcattcgtgaaccttttagagtgtaaaccactcggatttcttttattgtggctaaaaagcagtcggttagcatgcctattttggcgccgcatatgcttttgtcatataatgcacaattgtgttgttattttgtctttcaactatatgtttagtttgttaactaatcacatagttgggggctacacctaattaggtgcatctattcgatgcaccatattcttcttcttttcgccctttacagtccactcggcaggttttggcttgaagagtttgaagtactcggattatcatctttgagaaggctacgatggtcgactgcaaaggactcgggggctactgtggagattatgggtatcccatatctacacggcgatggtattcgaactgggtacaggatacctaacgtagatagaatatcttatttgtatcttgggtttgtttcttaacttgtgtatcatggaaacaccctgaaacttagtcggttacgactgtatcttacctatattttcatattccgtaagggatataggttatcttttgtaactcggactccttcccatatataaggggggtctgggcgcctataggggcatatgttggtttttcccgaatcacacaatcaataatacactcggcggattcatccccggacaggagtagggtattacttcttttataagaaggcctgaacctgtataaatcctttgtctccaaacccatacactttcctagcttgatagccacccccttttattattgccgaaatctagtttcgacaccgataggcttcgtcacgacgggttttgtccatggaaggtaatcttgcctatccccagtccccctcgctacatgccagcgcaattctgagtaataaaccttaactgcaatctgttttacatattacagtagtgggcgagatgctgttgcaattgccttctgcgaagcaaagcttctcgcggtgttgaggcggcagcaatggacacatgaaaatctgaagcgcaaagacatctgtgtccttgttaggaatgcaagatcagcggcataccgacgagcactggcaacaattgtcctggagcagcaagaggatgaccttaagtttctctagtctgtaaaccttaagttgcttagttatcaatgttgaatcctttttcagaatcctttataactatctgattcatttttgaggagtgacgagcaacaaatatgcatttgctcgagtggtaaaattccaacttcccagtaaaatgtgaatctttttcccctttcataaatcagttgccacatgcagtctgggcccacatgtcaatagcacaatcaaatggcaaaagcaaagatatacaaagagggtgtatctgtctgtctgtctgtctgttctgttgtatcctttcttcacggcaaacgcatgatttttacagaagggtgttggtcacctttgctccctattttgccgggaaaacgtctggggaacaacttgacctctcatttcccgccaaataaggtcagccctctcctttccctccctattcaaatacatctcctcacttgcttcctcccttgcagattttcagacaccaccctaccccaa

SEQ ID NO: 2101 - DNA, 2000 bp, Oryza sativa
  N_region (270)..(270): n = any nucleotide
gtctccctgacaggcctctgacatgggatgaaccgggattaaagatgatctttagtcccggttgtgaaatatcaaaaaaaaaattagccgggactaaaaacaatctttagtctaaaatctgccgacccagtaaagatcacttctccagtagtggagtgtccgataataattttgcagtctacaaaaaatagataaaataaacagaaaaatagaagtattctttgtgataaggaacttgggctgatgtacagatgcaatcatggatcagtnaaaaaaaaatccaatccaagttcgatctaccagatcatgcatgactacgtactgctctctccatttcatattacaagttatttttggtttgttgaaaggcaaacctatttaggtttgacagaattgtagaaatatatagcatcagtttactcaaaagaatattcagctgatattataacgaacagtctccaatttgaattccagaaggcacgtgctattttaagtcattcagaagattggtttttcttctcatctacaacgacaccgaatctagactcataagaactttggatactccatcgcccaatccaataaatttcaggcgtcaaaagatgcgcatccacaaaacgaaaacaaattaatgctgcacatctctatcatcgcatctgcgactattaatttagcggcctagttaggacacactcgattttgtttgaaataacactagcacgggatcagtcatctcaatcgggcagcaagactcatctccgtcggcaagggctcccgtcaacaagcaaatgtcactgatgtgagaaaatatctcaatcgagcatttgaccatcacggatgacagttatcttaatcgggccaataataacgcccgtcgaagataggtttgacccagcagatgagtcaaactataatagttaggcgtctgtcacggatgactaatctcaatcaatcaggtttactgctatgctcgtcacggatgatatttatctcaatcgggccttaaacacaagcctgtcacggataggccggcttgacccagcagttgagtcacttttatgaattatgtttttcttggaaaaaagagaaaaaaaatcatccctttcaacctcccaccaaaataatgaacagtaggataactacacagaacaacatggtggagtatttatagtgtgtgaaatacatatcggttactgccaatgaatggacaaaggtaacaggcactcaattatctcaatcgggcatattactaagcccgtcgccgataacagacatcggtgacgggccttaaattaatctcaatcaggcttagttttagcgtccgtcaccgataactatcatccgtaatgggcttatgtttgtggcccaacaaagattataaagataattacaatcggtcctaaacgtacgtccgtcacagaagagtcttatcggtgatgggctctagatacatgcaactcgattatgtctgtacgagtatatatttgacagtgtttattttgccccgattgagatgactaagtcgtgacggcccccaaaacctaggcatttgagaggccgtcacagctgtgagagaatctgtaccagtctaaataattcagttgaacttgcatgtttctcaggcattgtttagatggatcgtattatttaagcacggattgtaaaagctattacgcatcatggcatattatgcgcctttattcaaaccccatccgatctatgcaactttattaatctaatctcacttgaagttatatgatgaattattaataagttgaagctaatatagagttccttttcattttggttagtataattaaaaaaagtgatgtattcaccatatgattagagtattgatatttatagtattagtagaaatagtccgtgcaacgcgcgtgttagcgactagataagtataatacctctagtttatgtttaatgtggtggatcactttatataagtctataatcttccaccgtatctcatcgtgatccaatct

SEQ ID NO: 2102 - DNA, 2000 bp, Oryza sativa
  N_region (1985)..(1985): n = any nucleotide
tatgttggtgatggaacatcttcagatgagttctagcttgctgtcatcttcagaagttgagaaacatcaactaaagtcgtgaaaaaactaatctttctcaggagcaaattaggccacttaagctgaaaaacaaataccatcggatacatgattggataaatgatgaccgtctgatcaatcatcaaatacgtacgtgcattatccctctggagccttctagtgtctctcgtcacccacttggcaagtatgaaaagtaagcaagcaacacagttgggaacttaatggtccacaatttcatatgttgggtacttatgaaatttaacacatggaccaagtgaagcaaatactatctccatttttgtattatatgatgccatattaacttttagatatatgtttgactattcatctttttcaattttttttcaaataaataagatataaatcatgtttaaagtacttttagtgataaaacaactcacaccaaataaattacaaatatgtaattttttaataagaaaaattggtcaaccatgtgtctatatattaacgacgtcatctattaaaaaatgttggttatatatgtgacctatatatgggcaacttcatagtaatatttagggcaaagatcattttaattgcaagagaaaaaatcttcatctttaacaaagatggcttctcatatggtcgcgcaaacgtacgattttgagtggctagtacggatgaaagcatcatagagtgatgaactgatgatgacagagctgatttatagatgatcaccgttgttgtggaaagctaagtgtgccgcgtttttttatccttgcttgccatttacgatcctcaacatgtaaaaaaggaaatagtaagagagatcgaagtcgaattacttgaaagaaagaaattataaaggttgaatccacgaccataatatacaagcccaccatcctcctctctcctacggggctggctgccacgagtccacggccactggccattggtctactgtcgagcagtgtttgtgaaaaataaaaaaataagtttatttgaattttttaaagcaacttctgtaacgaaaattttttaaacgaaacaatatttaaaaaagcgcactaatggaaattaaggaggtagccaagccgatcccattttagaacacggccttaaaaaagcatcaacatatttcatttatatagttgtacatttaaatctccaaagacgtaaataatattacaaaatatatacatatatatatttgcaaacgtcaaagttccgtaaaattctagttaataatctgttttcctattaattattgaatgatactatttccgttcgatgaccatactctatttcacaacgctgttgacaaagaccaagcttctacttctctacgaaccacagagtaaattataaggttagaaatccttgtgattttattttcagatttatctctactactcccccaccatcctactttcccactatttataaacacaatcctgtaaaaaaaacatattatctaaaacaaccgctaaaaaaccagtgttttaccaagaaaaaaatgaatcaataaatctgaacccataaaaacatcaaacccaaacaaaatcccatatgcaccctccgtctcaaaataagtttatttgtgggtttatatgtccgacgcttgatcgtccattctattttaaaaacttaagtcacacacaaaatattattcatgttttaccatttcacaataaaaatattaataataaaaaaatttaagtaaaacagacggtcaaatgttagatataataacccataaataaacttattctggggcggaggctagagggtgtagtgtaggactttgtggacttttcaaagtttccaccaaactcgacggagtttatggatcctcacaaaatcacaggttcaactccaacccagtgaacccctccacctcgcgcgcgccttcctccaccaaaccctaaccctcgcaaccccancccgcgagcgccacg

SEQ ID NO: 2103 - DNA, 2000 bp, Oryza sativa
caaatcacaaaatattacattcacatatgcacatccacatcctcgacatccacatcatccacaaaaatacactatggaacaaaaatgacacaataatattcacatcgtccacgaaaatcacggaatattacattcacatcttgcacatccacatcattcacatttccaagaagactcattttaaaatcccacaacaattcatatcagtaggtatgttattgctaaaaattgaaaagagaaggataaacacgtggcaaaagtgaaggataaacacgtgacaatagcaaagtaaatgcagagttagaaactgtagcattcagtacctagtgttgtactaactagataataccccgcgcgttgctgcggggaataataaataaatttcaaagatgcaccaagagcatagtagcacatgaggaggaaagaaaaaaaaattaatcctaagtgattgacttcgtaaagccttcatattatggaatggagggagtaaaaattatgtgatgagctatctccactttggtagccgtggttaaaaatgcaacagaattgcaggtgaaatacatagttgctgaccggatagatctagtattggaacaataaaattaaagtctattacctcgttgctgaagaatgaaaaatatacaccatcaatagaattatgcagaactatatgtttaatgtccatatgaacctttctaaagaaaatctatacgaactgagactggaaggaaaatatataggtggtgtactggaactgatatcctcattgacttggtagccttgtattctgcataaagtatttcgtagtacagctctccctcactgatccatttagctcggttttagtacctcagtagttaatcttgcaatagaatgctaataagttcttgaataagttgctgaaatatcatatttttattgcggtaagaaatgtacatttagccacaagtaaaaattattatttatatgttgtcatatgatacgccaccaggaatgtgcagttgaggcatgtagcaaatctggtcgatccatgactaccatacaattacaaaattgataaccatcactaaaaagactctcattttatatttaaacatctacatacatagtccaattatcacggttagctggggaatcataactaaactgttaaacgatcatagagaatagtagaacaaattcctgcttagctatcggagttgggaaaaggattacctctaaaatatataattaagttctcatccttcgttaactcctttctgtgttcgtagctttcagaaaacttccgaaataccaatattactaagctgattcagagtcacaaaaagagtctatatccagatcagttgcatcagcaccttatatataccgagatatagcttcaccagctaaagatcataattgaataccaattaaaaaaaacttcatcggcttagcatgcccatacattcttagatctgattgggtgacaaatcaaccaatggatgtatatgatattgttttccatacccttcaaccgcttaagagacaaatcaagagtaaaaatcaactaagtcagtaatcatgggcctaaaacctgggaaacaaaagaggatgggaaactacagcaacaaaaaaaatgtgttagacagtcaaactgggtaaataatgctactatatcctaaatatgaaccatagtacaaaattgaattaaatattgataggagcaatcgaaatggtgtgcatgtaaaagtgaggttctattttgatgaacaaaatccgattgagcaaacaaaaggaaaggggaaattggtgtgtgatcacctgtgttagatcattggagtgattggagagataatagtgtgagatgcatatgaatcaagccagcaaaaatccaggaacaggagcagactgccagctccaattgcttggtagatcgatggatacgcaagagggataaatttgatatagtggcagaactaaaagagggataggaggagaagaaaaggcaagccattaat

SEQ ID NO: 2104 - DNA, 2000 bp, Oryza sativa
  N_region (1512)..(1512): n = any nucleotide
gcactgatgagtggcaggttttcttaaagggcctttctgcagcagcaacttccctgtcaaacaaagaaaaattcagagattactggagcagagaaaacattcgaagataaaattactacttcctactagtaaagattgagagatagagtggagtgatattgatccaactgtgttgtttcagtgaagcaatataaagcagtaacttcacctacagcttcttgagtcattacagtgacccttatgagttatgacacattgaggcaaataaaactgaccatttcattgaactgtaagtctgtaacgaactaacgattcccagaataagatgtgcatcaacgtcctagatgccaaccaaaacaatatacgccagaaccacctacagctttgatatcttgaacaataccacaattgtaataatctgtttatattgtgccaaacctatttttgtttttttcctcccttcccttcaaaataagacaaaatggtacttcgtattccaccctcccaaaattaatgaaaatgtttattttgacagtatgaatatgcggcaatacaccctatttatctggaaaaaagatagtgcatttgattaataatttattaatagatctggttggttcctttggcagccaacgcagcttcagccatcagtgattcagtgtcaaatgctaccatacaagaatgtcaggtaccataaacttcttggaactatatacctataatcaactagaaatctacaaaactaagcaaaattgaagcaagaacggaaaccaaattacctgtggccgagagcgctcagctccgttggcggcggcatctcctggcggctcccgtccatggccgctgctgctcctaccactcactaatccgtagcttcaccggatccgccggccggcgaggagaccgggcaaccggcggcggcgcgtccgagcctccgaggcgaggcgaagcgaagaagcggcggatatggatgcgtcggcgaggccatgatccatggcccatgggaggcccaaataatccgcaggcccgtagaacttcgcagtccggcccaaatattgagttgggcccataattttcggcccacatggagagaccaaactggcccacgttgaaggccataagacgagcaggagaaggggagagagagggcaaaccgacatcgccggagaggtcgccggcggcatcgtcgtcctccccgtcgccggagatcggacctcctccacaaggtctgcgctctctctaccctcccgccttctcgcgcctaaaccctgttcctcttttttttttcttgataaatttctcgatctcttgtgtcatccaaccctaaccaagaaacgggcgcgttcgctagggttggaatttccactggatttttgttgttagatgtgcttgctaacaaagtaacaaccctagattgatatggttgattaggtgggtttatcaatcgtgtcatgtaaatcaacgtgcctcttctacttttggggttgatttttttaatagaaaaatagtacnctttggatgagcggtgttgatttttttaatagaaatttggaagccaagcatgagttgattgatgtacaaatggagagaggaatcagtacgcaaaaatacactcagatcatttttatgcgcgttatttgattacacagtactgaagtgctccatagaaaagctcaaaactgtactatgcaggaaaacatttcgattagagaaaaaaactagcccttttcctctatgatattgtatatttgtatctccctgaacataaaaatgcacctggttgaattgaaatcttctttcccattgtataatgacgatttaggctcagttcgtttgtgatggttctcaacctctccttctcgatttccgcgcgcacgtttttcaaactactattttgatgcgttttttgtaaaaagtttttatacgaaagttgtttaaaaaaatcatattgtttcatttttgaaaaaaaaattagctaatacttaattaatcacgcgcta

SEQ ID NO: 2105 - DNA, 2000 bp, Oryza sativa
  N_region (467)..(467): n = any nucleotide
  N_region (1931)..(1931): n = any nucleotide
aaggtgtgagagactggggaattgcatgtaactcagagagctatatcccataagacaattggcaacaggtgcttcaacttgttggatttgtgtcaaatggttgttgagtgcttctatgttcttcatcaaaccaactagctctagtcatccggttgccactcttgccaacgtccattcaaagccggttaagaggaggggagttaggcataactcttgggatgggtcgtcaaaagagaatgagtaaattcaaacgaggggatctaatgtctctctaactccacttataactaccaagtaatctatttacattagcactcatcatacagaaaggattcaactttaaggttgttgtccattcaggagggggctaccagaaaagaataaggaggtccgagggatgggtcaagggtcaaagtgtaacccagtatttggaagacatgaccaaagcaatggagagggcaaacaanggagaaacactttctgaggggtacgcatattctctcaatcacacaacggaaacaatatccaagaagaaatgagaggaggtgcacgaagagagttccctaagctacattaccatgctaacaaaaaagcaagatgaagcaaggaaagaagttgcattagggtagtagcaaacaaaggggaaggcaaaggactaagcctatggcgcatatcttgtgggaggctaggaagatccagccatcacttatcatggatagcttgattattttgaaaaaccatcaaatataaaaattgcattgctacaacctaatgctttctaatatggtcccacattattcctttgcaaggaataaagtggttcctattataactattcttttgtagagataaatattacatgatgttcccaaaatggcattacctagcgattgtgggaactccacctgaatcaagcaagatgttttgtaatacggtatgagatgaatccacctaaattgttgaatgagaacacaaccttctaaaatttgattgttttccaaaataatcaagctatactgctaatttgagaagatatctacaaacacttggtaattacttctactatgtcatccttatcataattatatgcaattttcgtgttataactatcctgctctcgatcggttcagctggctacggctgcggaccagcagctcatagctcatcagctccgctgccgctagccacagctgatcgaatccaagcaaaaccccagataaagcaagaaacgtgcactagtactccatctgtctcaaaataagtgttgtttatatttaacgtttgatcgttcgtcttatttaaattttttttatgattagtttttttattgttattagatgataaaacatgaataatactttatgtgtgactatttttaatttttttatatttttttaaaataagacggacggttaaatgttggacatagatacctacgtctgtacttattttgcacttattttaattttgagaaagaggtagtattatatcggtaacaaagacaagaaaacaattcctcttacgacacgaaggttggtcaagcaagagtcgtccgatccgatctgagccccccccaatccccagctggcgcgccttacccgcgcttgtcgtgtcgtgtcgtgtcctcacgtgccgtgccgcccgggaatttccccttcctcctctcgcggcgaatccaacaacaaagttgcgcgttgccgccgctcatctcatcgatcagctgcaaaaagcgctactactagtgcacacgggcgacaagccacacacgcaaaaatcgttcccgactcgtggcgacgcaaggccggcgacccgtacgtgtggcgcccacgacgagacgagagagagagagagagagagagagagagagacagctcgtgtggtctcgtctcatctggagctgagccgagtagccgacgccttcatttccattntctcctctcggctctagcttggccggagaacacgaggcgtggccgcgtcgtcgtcggaggagggagcag

SEQ ID NO: 2106 - DNA, 2000 bp, Oryza sativa
atttactcataaaaaaagtagagattttaggggtttgtaatcatcccgtacatgattgataaaaagtgtgcatactgttttttttttctttaactattgaagaacaagtagttgttgattgggtaatcaaagaaaagttcagctacttgtcctagcaaagatgaagtagtagtaatactctctggatggtacagtttcaattatttgcatgacttaactgaatgaagtttactctgacagagatacctgttccaattcaaattaatgcaatttatatctaactgttgccaaataagattgaacgcctgttcttttcttatccgtctatcccacataatcatgttaatcatataccaataatacataatctgcatctgtcaaatttaaaccgatcatgccaaatcgattttcttgatgtgacaggtgtaatctgtcaaacttaacttaaaagcctccgaaaagtcacatgcagatgagtatctggctccctgtaaattagtcatgcaaatagcctgtgctcttgatataagtggatttagcattgcttgaactgtggcctttggcaagccagcaagctgtgacatattctatggctaaaacttgttaattatttacttaattcatctacctatttctgaaggtaatgaagggtctcatgtacacgataatcgtgttcagagaacgccagaatgggacggattggaagctagctaaatatctgaaggtgactagtagaaagctgcattttctgaattcatctgtgccaatttacagccaaccaaatgtcccattttcgctcaccgcgtgtatcctgcgagaaccttgacgtttgtggcaaactggcaacctaaccgtgaggcctgccttggctcgtacaccctgacgagttcttctcacaaaaaatgaaaaaaaaagtttcgaattcagcacagtgcatgattggtttcaaatatgtactcccccgtccacgttacaagatgtcttggcatctctatctttcgtgttagattcattaacatctatatgaatttagatacatatgtaaagtatatacgtagatccatatataaatctattcaaaatccaaaacatattataatatgaaacaaatgaaatataaatctattcaaaatccaaaatatattataatatgaaacagataaagtaactttgatagacacaatataatacaaatacactgacaaaactgagtgagcaaggtttggtattagtcatgtgcacataacactagagttaggttaaggtctttaatgacagccaaactctgcagaactttttttttggtttcaagaggatgaagaaacatatcttgacacatgcagctcttaaaagaaaatctaaaagtaacatgcagggtgatgccatgttattaggtttgccacatgcagctgaatgatacggtgcctgcagctgcacccagaacacgctatcaattgccacaagtagatcgtagagataacgcctcatccatttcatatctgaaagaaaccaatgatagatgcaattcaatcaccgttcacataattcattttgcagatccccatcatgaaagacacatgtattaactacatagaggatgtaaaggtgtaacatggatgaatttagagcgcaccactgatcctacaaatagcatgcaaaactacagccgctcaacacaaacacctggcctatttttaggcatcctcttccatctccagagaagtgagccccagcctcatgtcacaagggaagcactagccaccatagaactctctctctttttctccttcctcctaggaggatcccaaatacaccaatcgtgtcttggattttcccaaacacagcgcgcactctcgcccttcacctctcctccctctcacccttccattacatggatcagggagggaggaaggaggcctgaagtggcgcagagtaggcgcttgtaaacaaatccccccatttgcttcttttgcactgaagaatccctgaagaatccagca

SEQ ID NO: 2107 - DNA, 2000 bp, Oryza sativa
  N_region (256)..(256): n = any nucleotide
  N_region (1850)..(1850): n = any nucleotide
gaactccggccaaggagagctcttccagagcaagagtcgacgacgacaccatgcgcgtgctccatcgccgcctccattggtgacgatgtcctgctgcttcatcgccgcctccagcgcccacgccgtcgggccgctgcggggagtcttggcggcatagccagcggacgaaggaggcggcctcgcgagcgcggcagcgcaagaggaggtggccaccgccgctctagcgccaacccccctgcccgtcgcagttgccgcnacgcccgacccctctcttcctcttgcagactcgcacgcaacaccggccccggaaggtaaagagaggggggccactgccgccgtcatcaccaccactccgcccggccttcgccaccaccgccgctagcactggatctggaagttgcggggctacggcggcgcaacgggacgaggaagctgcggcggcgaggggcggcgcgagaggacgtggccaccgccgctctagcgcccacccccctgcccgtcgccgccgctgccacgcccaacccctcttttcctctcgcagactcgcacgccacaccagcccccgggaggaagagagagatgagggggggggagacgccgccgtcgtggccaccaccaccgtcgccatcaccaccactccgcccggccttcgccaccgccgccgccaacaccggatctcgaagccacggtcaccagcgcatggcggagggagagagataagagagagagagaaagggagggagggaggaggaagaaggggaggggaggaaggatgacatgtcgggcccacatgcctgtgggtcccttttttgaatgacatgtgggcccataattttttgttccacgtaagcgacacgtgcacgaaaaccgggtcaacaccaccacgtaggcgccacgtcagccaaaaccgcttgcaaaaccacccagggagtcaaattgcaccggtttcaatagttcgaggagtcattttatccggttttctggttaagggttacgaattagattcggccgacatttaagggagtcaaagtggactttttcctctggtaaaaatagaggggtaagtactaaaatataaaaattgggctgggtgtatgtgaacccccttaggtttattgggctccgcccctgcatttattgcatgttatctgaatgattatgaaaaaaattgacaagatagatcaatatataatatatcactacacaaatatgcaagttaaaattcaacatctacaaattgtaacaaaagtaacaaaataaactcaaattagtaaggtaaatttgcagttaaatttgttgtttttattataacatgtataagttaaattttaacttgcatatctgtggagtgatatattacatattaacctattttatcattttttttattttttttcataaatacaccatcattccaaattgatcatgatatatatttatgcaccaaacccaaaaataatttaaatcacatcaataaagacaccatgcacacattctctcacaatgcatgtatcgattaaaacaccatgctaattacatcttagcatatacacattctcccattgctatattatctgtattctgatgaaatccgtatccatatgattatatgatgatcaatttagaaaggagagagtatttagttgacatgtaataaactggtgaaaaaaaaaattggatagaagaagatagagctgacacgtgggttttaggtattttggttaaaccagtgaaaccaaaatatatggcatcagtggagggtggaacggcgaacaggtcaagctccatggacacgcgttgcgcccgcgcgcggcaaaggcgagttttcctccgcaaagctacatggagtncgcgccgccctcattttcttctcccgcggcctttggagagagagagagaggcgacacccttcttcctcccccaaccctttcacccgcccaaactcatccatccatcgatcgccctacctagctactctcgatcgatcgaccgcccgcccg

SEQ ID NO: 2108 - DNA, 2000 bp, Oryza sativa
  N_region (1016)..(1016): n = any nucleotide
caaattctatttttttttacaattaaagtgttcactatatttcctagcgtagccacttcatgttacagtaccatcgttgaagtccattgattatcacaaattttcatagtagcaatctacgtactgattattttttgtagtggtaaatcactgtgcatgttcttaacaatagccaaacattagggagcaattatttttcttctgacctgaccatcttgcaaaattcctgtcaaaattgtcctttgacatttctttgtattgccctatctaatgacaatgtcaacatgctgtaaattcattacaatgtccatccgaaatatcccagattaaggactttgtacaatgtacatttatgcagggttcttctcctggtcagtatccccttcctaacattatcagttggtgccatatctttgtccaacatcgtgaagatgggatctttgccacatgaaatcctcttccagctctcattaaccatttgcttctgctcatatgtcatcggtctggggccaatacccaatattctctgctccgagatgttcccaacaagggcccgtgcaacatgtgcaagtttttgctcacttgccttctggtttggcagactactttcaatttactgcttcccggtgatgctaagtaccattgggctcagtggggcatgtgcgatttatgcattcgtgtgctgcttggttctcgtgttcgtctacttaagagttccagagacgaaagggtcttcccttggagctcatagctgagaattttcaagttttcaagacaagaatgtctatagcagatatgtgcactatgttcagtattcaaggatgacccaggctgagtgttgaatgattgcttgctagtccgtgtacatagacaaatgtaggtttgaatgttgcaaattttgtcctagttaggagaattggccatagatgtttgtactttgtagttgttcattgtctttctgtgctttggagatacataaaaaaggaaaatcatacatgggcttcttttgcagtacnaaaaaagtaatgatgctgtatacagacaaagattacctggtagttaagtaggagtaatactcttcaatgttaacatggtgattcagcactcctggtgaagttgtgacatttctgatgctatttccaggctcaagcagtgtgacacatctcatattcagaacaccatctcatgttcagaacaccctgcttttgatcgccctcatggtttgcaacaccagaaacaaggaacaggaagctgtttcagtttactaattttaaccttgttcattgtctttctgtgctttggagatacataaaaaaggaaaatcatacatggcttcttttgcagtacaaaaaaaattatgatgctgtatacggacaaaggttacctgtagttaagtaatactcttcaatgtaacatggtgattcagcacttctggtgaagttgtgacatttctgactctatttccagtctcaagcagtgtgacacatctcatattcagaacaccctgcttttgatcgccctcatggtttgcactccagaaacaaggagcaggaagctgtttccgtttactaattttaatctttgcctaatttgctaccctgactatttttagtgtgtatttacaggacaactgccacatcacctccctcattttttttcccagtgagagagaaacaggcagtaagcaaatcctgttaatccagcctaatccattgcatattttgcatttgcaccatttgcacgtctgctgtgaagaatctgccattgcattacctgtagctgcattgcattgcattgcattgcatcatctccattgatcaccttgttgtctcagctgcattatcctatttttagctcccaaatctgcctgcctaaccactggagcagaagaagccattgacaaaaggcacaaggaggcaaagcccccaaagaaaggcaggaaaacattagagaagctggaagaaaggtagaggaaaggctgtgaccttccaccaatttgg

SEQ ID NO: 2109 - DNA, 2000 bp, Oryza sativa
taccgcgacaccatgaccatcaacgcgctggcgcggcagacgctcatcaacggcggcggcatcttcgagatgaccgtgttcccgcggaagcacgcgctcgccatgtcgtcggcgttctacaaggactggagcttcgccgaccaggcgctccccgacgaccttgtcaagcgcggcgtcgcggtgccggacccggcgagcccgtacaaggtgcggctgctcatcgaggactacccgtacgccaacgacgggctggccgtctggcacgccatcgagcagtgggccaccgagtacctcgccatctactaccccaacgacggcgtgctccagggcgacgccgagctgcaggcgtggtggaaggaggtccgcgaggtcgggcatggcgacatcaaggacgcgacgtggtggccggagatgaagacggtggcggagctggtcaaggcgtgcgccaccatcatctggatcgggtccgcgctgcacgccgccgtcaacttcgggcagtacccgtacgccgggtacctcccgaaccgtccgtcggtgagccggcggccgatgccggagccgggaacgaaggagtacgacgagctggcgcgcgatccggagaaggtgttcgtccggacaatcaccaagcagatgcaggccatcgtggggatctcgctgctggagatcctgtccaagcactcctccgacgaggtgtacctcggacagcgcgacacgccggagtggacgtcggacgccaaggcgctggaggcgttcaagcggttcggcgcgcggctgacggagatcgagagccgcgtcgtcgccatgaacaaggacccccaccgcaagaaccgtgtcgggccgaccaatttcccctacacgctgctctacccaaacacctccgacctcaagggcgacgctgccggcctctccgccaggggcatccccaacagcatctccatctgatctccatctcatcagatgaggctgctccacggaggcgccagcgtggacaagagtagttttacggtggtctttaccggtagtattttactttcaataattgccatgacacctacacccggaggtgtcatggaggatgaattcgttgtgtaatttccctttcagttcctaataaagaataaggaagcatatggttgtgtagcattttcaagcaaatcctccatatatctaccatgttttgaattgaaaggactgaattaccgaaaatcctttgatgaacattatctgaagacttaataagttggattaatgtctaacaaaccattaagtgatttaaattgtctgtaaactgatggcaacaatatgaacaaagagcaaaccactagtgaatgtgaatcaagccaatagaactcatctcaggtcataactgaatgatgtgaactgtcagtaaactgaggctattcttgatgcctttctcctattttcttatactaaacattttaatcaggcaaaatagcattttctaagtttggttagcctcctaaaccgacgaaagggagcaatccgagggaagtggggcccaccgtttcttccccgccccaacctcgcaacggtctcaacacttttctcgcttcccgccattttctcgtcgcctcacactcccctcccctccacacatacacacccaacgctctcccacacctctcgcagttctctcttcttccccccctcatctccgccgcctcgccgcgaacgggacgccggccaagagctcgaagctgatgagagatagcgacggcgaaggggccggcggcggcctcccgcgctcgcacccgtcgaacctgccgctgccggcgccgcactccgacccaaacctccagttctccgggacggacgatgacttctccaaccgtcacagcagctcgtcggcgacgggcggcgcgagccccgggtactactccgactacccgtccagcttcagcggcgagtgctcgccgtacaacatgtcgccctggaaccagaccatggcgtcgccgtggtcgcaccacagcgacgcgtcc

SEQ ID NO: 2110 - DNA, 2000 bp, Oryza sativa
tcatactctcatgatcaaggggtcattatcatttccacatataaaattgagctaaacttctacactggaagttggctttccacaaaaatatccatccaaataaactcctacaatgagttatgctttcttctcctggaaaagttattggcaaaaagaaaatgagaaaaggagggaaaggcatggctagagaaaaaaatgaagaaggaaataaaagcttgctctcaacacattgggtaaagaaaatatagccatgtcccctccacaatcatgccaagagaaccaatttggagagaaagtgtagaaaaaaggaggatcatttctttatttcataattccacaaaatattatactttctcattttccaccataaataaagacccttgatctaggagtatgattgatgatcttcttgagtccatatttttggctttgcaatacatatgatgtaggtatgtcaccagtttatccctaccaagctccacatatcagccatagaataggggtaaattctggcacactttgtcttggtgaggatccaaaagaaaatataaatctttgagagacaagagaggaagtcaaatatgaggaacatagctagtttgcaaaagttcataaaaatcccatgagtctgacagagaagcaagaaggactggaatcaagatcgttccatttatcaattactcaagatggtaagatagccactgaaaaagttcataggtgcaggtatggttgtgaatggtttatatgcttgattcatctcttgaagaaattcattctacattaacctttactcagggaaaagcaaagggctaagtgtggggggttttgttggcggttgttaaatgccgattctataccgccaacatctgcataaagtttagataatcaaacatccaaaatagtgataagtgcttaatctcatatattccacaagtgttggtatatatttgtatgcagatgataaaccccggtgttgggaggaaaatcggactaaagtgaggagaattatgcatccatacaaggaggagttgtgaacttcatcgaaacatcagtaaatcaaccaaaaactccaagaaatagataaaggaaggtccagggagtccaccgaccgaaggctaggccaggagggcccagcccaggttcggccgaacccctggtgatcaccgttgatcccaggttttggcgtggacggtcgtgatgcattcctgatggcggctgcggggcatttctgacaattcgcatagtataatcgtcaaacctacctctatataatggcttcacctcctcacttcatacgcacttccaagcttgagctgaattataagaggctatattgtactatattgtatactagaataggaagagagtagagtagaaggagtcgaaagaattccggagttgccggtaatcttctcctacttttattctatctattactctgaatttaatataatattcttcttgagtaatttagatttatcttgtgagaattacctcttggttaattcctaattagcatacgggattattgttccctataaacagctaaaatatagtgattgctatggtgagttataaacactaaagtagatattaattgcttagacgtggtgtttgggtaattattatgcagtaatttctgcgtatcccacagtacgttgaggtgggtgtagaggtggtgatagccctcgagatcactaaagtcatccctgtccgggtacgcagtagagcgacatctgggaacagcgggttgccagtgcctgaagtattgcgttaggattaaaattaagctttccctagacactgtttctcactagtaaatcctctctatcctggcctattatttgcttggtgtccttggatgaaccagaggaagctctgatcacacacgttcccttggattcgatacccttggaatactccgtagaggaaagtgctacatcggtatatccgtgcgcttgcggattttatctgtaaccgtatcatataccaacacacgt

SEQ ID NO: 2111 - DNA, 2000 bp, Oryza sativa
  N_region (1727)..(1727): n = any nucleotide
  N_region (1783)..(1783): n = any nucleotide
  N_region (1786)..(1786): n = any nucleotide
  N_region (1799)..(1799): n = any nucleotide
gttgatggaggagtcgcgggagatcataaggtgccggcggagtgggaaaccttttccgtcgaagcataaagatcatgagcagattgaggattctgagggtgcaaattctgctccaattttgtcatagaaagctagaactttgcctggtcagaaaaaatgagggcatatgcagtatgattttcgtgataataccaagggggattctactcttggaagtatatggctgcttgttaggaatatttgtgtagaaagacaggagggtgtacaaacaggttggtgactgatgaaattaaattgcattatcattttatctgatctctgcaagtcattttggtttgtgcacagtagtacgcactggcggcactgcaaagccacatttacatcaagcctttgtaaagtccaactatatcatttagccaccacttactcacaatcttttcatcaaatcattgcaaatctcaatcacctttcttaaaagggcatagattgctgaatttgattttgtccatactttttacatataaaattcaccaagtatgctgcaacttgttgctgatttgaattttaattgtcaatggctcctgtatttatgtccatgcttatgcctcatggttggtattgcacttttacagttgtcgtaactcagtatctccctttttatggcatggagataactggatgcactacatttccttaggctgaggtcttcacttcttggctggcaaatgttttatggtgtttgtttggttaatgtggtagagttacaaaacagataacatgatttccattgctggaaactttttgtgtaacattatgcgtgcaattgtcagtttccagaatgagaatcaagctttcgtttgcatgcaccagtggattatttaacttaaatttctctgttgaagtacttgtcctgttttaacatctacacaatcggatgaacattagttgtttatattgcgccttaactaatttagataatcctagcttttttgtttgtttgtttttgttttttttccttggcagggagatcatagtttgttttggtgctgtctgtcttggtagtaagcagtatgacaatcgatcaattgcgagaaattagatagttgtgattggcagatgccatagtcagggcattagctctttgtgctattctgtttgttgtgattgctgaattagatcaagaccacattcagttatgtcaaccagggaagagtgttcgttgttgtcaatgtttctgtaacttgattttcttgtataaattttctccaactactgattagcactctctccactcgcttgcaaaaggtacagtgtgagattttctgatatcacatcttctccttcacattttctaaatttaaagctaacaataatttcttcatttcttgcttttgcagagattagtatatcactattcccaaactggtgtctactctttaccgtctttcctggagaataattgctgcaagctttggaatgtgtagtttttttttcatcgagtaattcatccacattttcaaaagcgcggtgcttctcttctttgaactggattatcgagttagcttgtgaacttgtcagaatcttgtatacgttccaatcatgggacacagatctatgtgaaatcgtaaattctgaatgtacacatttccaagctatctcgacattttcactttgaaatcttaaaccaaatcatttgaccaacttcacaaaattctacagaaaagatnggagaatttgcacgccttcatagatgggccgatagcccatctgtattgcagcccantanaccggaaaaaagnaagaaaaggaaaaaaaaagaatggaaaggcaacaccgcctatccctccatttcccaaggcggcaacgcgcgtcgcacgccacgcggcaccatttcgcttcgccttccccggcaaaatctccccaaaaaaattcgaaaccgcgccgacgcctccgcttcacgaaaccccaaccggcgacgcggcgcgctcgctccgacgacc

SEQ ID NO: 2112 - DNA, 1105 bp, Oryza sativa
  N_region (2)..(2): n = any nucleotide
  N_region (5)..(5): n = any nucleotide
cngancgtgaacgaacgcgaacgaacgcttaacgaacgcgaacgaacgcgaacgaacgcgaacgaacgtgactgaaacatgaatgaacgtgagtgttagtgaacgaacacgaacgaacgtgaatgaaacgtgaacgaacgtgattgaaacgttaacgaacgtgaatgcacttgaactaaaagtgtgagaacgaacgcgagcgaaatgtgtacgaacgagataattaaactattgttgaacttaccatatatatatgattatatatacttgaaaacatgaaatacattatatgttcctttgcatttagactaatacattttttttgcatgttgcagagaagacgtcgtcgttgtcgtccctcaagccgaagtggtagctagccctcgaaggaattcacgcaggcaagtgatgtaaagatgtgattgttagagatataatataagattgttagatttctaatataagattattagattattagagttagcatatgtgagtgttaaagattattagattattagacttagcatatttgagtgttagagatagttagagatttaatataagattcttagaggtttaatatacgaaacttaattagacttagcatatgtcagtgttagatatttaatataagattattagagatataatattcgaaacatatttgattgttagagatttaatataagattattagagatgtaatattcgaaacttaattagacttagcatatatgattatctaccgtacaaatacacgacacttagacttagcatatttgagtgttagagatagttagagatttaatataagattattagaggtttaatatacgaaacttaattagacttagcatatgtgagtgttagagatttaatataagattattagagatgtaatattcgaaacatatttgattgttagagatttaatataagattattagagatgtaatatttcaaacttaattagacttagcatatatgattatctaccgtacaaatacacgatacttagacttagcataaatgattatttgagttttaatacaagattagtagagtgttaatattacgcttagcaaatatttcttctatgaac

SEQ ID NO: 2113 - DNA, 2000 bp, Oryza sativa
  N_region (114)..(114): n = any nucleotide
  N_region (120)..(120): n = any nucleotide
  N_region (245)..(245): n = any nucleotide
  N_region (252)..(252): n = any nucleotide
ttaaggaaatcaatctactaaaggaagcttatccctaagtgactgagtttaaagaggatgcggcatggcaatttatctattaattaggaatagtttgttagtttccctttatcnttaggntagtttccttcttatccgacaaggacttgtatcaacccatgggtataaatatgtacacccggggtctatgtaatctatcctcacaatcaatacaattcggcgcatcgccaccttttaccttttcnactttantttatcgtccggcgagacttggcatctgacgcggtgctgcatcggtgttcgatctccggcgaaagggtaagtccaatgttccgtcggcccaggcaattgtatcgtttacgtcggcgtcgttcaaggctgcatcagtacattcaacctcttggatcgctctggtttggatgatatatttgcctacctatttatcatatgtctctattaatctagtcttagcatatcaatttagctctatcggctgcttctcgttttagggtttctgccgatatcggctaaatcgcgttgctagattagattagctcagacatctaccaccctaaaaatcagtcaacggcttgattgtctagatattatgtttcttttcatacttggtgctgcatcagttaagtttgatctactaagtcatgcttaaaaccataatctctagcctgcttcttgattgctaataagggtttcatcggggtttcagctggtgagttatctggacgttgcatcggctcataaggattgcatatacatataagttggatttagccgatgacaacaaaggcttcactgtttaatctaatcttgtggatttcatgacatcggacctccatccgatgtgtgctttgaccttcggatcgatgcttatttatcatatcattatttgctgattggtttatactggattatattgttattttattacatcgtcgtcagccgattgcctttatatcattatctacattggacatatagccgattgcttaaacccctatcggcatcggctgctatcagcatcggctattatcggcatcggctggaactactccatcggcttgtcagccgatcggttgttttgatctactatttgcatatcttgtcagttacaggatcaaactgactggcacgctcgtatctcaccaatctttagacctgcactggagttaagcagatctctcaggctggtgtgttcgatttttttcatcagtatctagcatcgatccacatcagggccatcctagttacatctacatgattcatttaataacctccttaattgatgctaccataatggttttattttggtactaatcaaaacacacttttgaacaaacttgagaggataagcgttggaatcggtacaatatttagagtatatttgccacagcttcagctctatcaaacggttatgcttcacttaaaaaggaagtggatgaactgattagagttctatcacaaaataaattaaagaaatgaagtaaagtttaagctacttcatagctctattctatactcaactcctgaagttaattaaatttataagagatggagttttaccgaacatgcagtactctcttagctagaaatatgtggcgtatccgcatagactgggctgggatagagaacaaggcctagttggttttgggctagaattttgacgagcctttttcacaaaaaagagaacttttgatggaccatcaggcatcagcccgagccccaaactgggccaggcaccatcagtcatcatctctctcggtctcggatagcggggatgcgctttgcgtaaccacgtaacgcgcgcacgtacacggcacggtacccccactccctggccaccactgcttcgcctcgacgagatccatacctcccgggctcccggacgcgcgcgtgctagctcgctcgccgatcgatccatcgtctccacgtacggccgcgcgaaggcacgtagtgaggtacgtgaggcagcagcagcagcaagc

SEQ ID NO: 2114 - DNA, 2000 bp, Oryza sativa
gaaagcataaagtacaagcgaagggcaatatagtcattttgggagaattctaatggtcaatttagagtcaactcacaacatgggtataaaagtgatcaaaataaaaactcaagggcatacagaggatgaggcaaaattcaggggcacgtaaaggattaagcgaaaacccatgtctctaaaatatgtgacctcctatcatgtccatgtctctaaaatatgtgacctcctatcatgttgaattatccacacacctcagtatacttctcaggattaccacttgaataggataaggttaaacaaccacaaagaatagctatcaggtcattgtcaagatccattatccactcaacagtatctgtaagccaataaattccatgaagaaaatcaataattcattcttgatcagttggtcttatcctgtcccacaaaaaggataggagaagcaacccatcacaatccatcttttataagccaagccgggatgatgtctgaataagtctaatcagtcgcattgcatagaagaagaatagaagcatttgaagcctcctcctccaggttgcagcaaaagcacaggaagcagcgagatggaaggcaagagccggcgaccggagataaccgtcgtgccggcggcaagcggcggcgccgccgccgccgttgatgcggtgaaggcggcgaacaaggagcccatcagcccgggctcgccgtccctggcgagcggcgccggcaaggagagcctgagccgccatgaggccgccgtcgtgtccctgcccgcgtggaagctcgacgcgctctgccaggagtccggctcgtcgccggcggtgatgagggcgcgcttcccctacttctgaatttctgaatttctgatgaagccatgagctttttgccatcttcgtacgtgtgtgtgtgtgtgtgtgtgtgattgtaactgtgttgttcatggctgagtaaagaattatacttcctacaagcggctgtgatgtatatgtgagctgctttagctgacgcgttcatctttggacgctgtaaaaactaaaaactgccagtttttcatgtagcatcattggaaaaacatagccatctgtttgcgttgaagtttggtttgattctcacttgtgggcatgtgtttggtaaccttaggatgtttgcgaacgatgtgcactgatatatgtgtaacccaaattacataggagtggtttgttttgtaaaaaaatatgtattacccctctattctaaaatataaggcacaactatttttttatatatttcataatattagtttacttaaacgccgtgggaatggctgagaattagcgcggcgcgtcattgacttttttcagaaaaacctttgctctttccgctaatagcgtgtacatccctgttaacttggcctgtcggacctcatgctagtataagttatatatgcatgtatacattaactatcacatcttcgtcctttaaatttgttttattttaaatcctctactataaagtcaccaattacactgcttacatgtacggatgtgatccaatcgagagtacgattaaattctttcttagtcattgttttaagaatggttgagccttatattttaggataaaaggagaagtaaacaagctcaaatagataaaaaatatataattagaactataatatccggaaaaagaaatccaaattcaaatttaaaatccaaagttagaaatttcactttgagttcaagccatcaaaccaatcggaaaacgattggactcctggaccataaccggcaggtggtttgaaacctgatctgatttcagaacatcaaaaaaaaaaatatacctatattttttttttcccagggccccgtatacataaatcgctcgctccccgtatagaaaccgaatcgccacctcggcgcatccacgcaacccacccgtcgcgagtcgcgagcagatcaaaaaccccatcgccgcggcgatcaccggagggaccaggccgggcggccatccgtactccgccgcga

SEQ ID NO: 2115 - DNA, 2000 bp, Oryza sativa
  N_region (691)..(691): n = any nucleotide
  N_region (828)..(828): n = any nucleotide
  N_region (832)..(832): n = any nucleotide
  N_region (865)..(865): n = any nucleotide
caaacaagttaagaaacaccaatgtgataaggaaaaaaaatatttgtattgtagcaatcaacagtatggcttggctgtggacgagtagtaacaagaagatgataaattcaatttacagggcaggtgtttacctgaggaaatttcggagcaatctttgttgcttcctcggcatcagcaagcgcaccagtgatattccccattgacaatctagccctagacctgcacttagcatcaagcattcatttcagttaacgcaaactctcattctcacttcccaatagtgcaacgaaggcagcatttcctaagagaaaaacataaattgtgaaaaattaagctatcacacatactcccaatcccaaacactcgttctcataatcaaagctacagaaaggacctgcttctgtacgccaagtggagaccgccaccagcattcatctcgatagcctgcagtgcatacaagcaagcaacaagttagaaattggaacaggaacactacatgatagtacctgtagcacgggagatgcagcttccttgacgccattttcaagagaaaagaaaaaacaaattggcaagcacactttgcttggtaagaatggggtgaatcctctgcagagacctcagtcaggagggcttccgcttcggcggcgccacccttctcgagggcggcctccgccttctcacgcgccgcgancgcggcgagccccgccgccgcgtcgaatccggagtcgccgagcaggtgctccaggagctgcgcggcgcgcgcggcggtgcccacgtggccgaaaaacgcggagcagcagccggagacggaggcgccgaagtttgggnccgncccgcagcggccgaggcaaccgcaggaggccangtcgaagcgcggcggcgcgagcccctcgagcgccgccaggacctcgcgcccgccctggcgcgcgcacgtgcggttggtgcagacccgaatctccaccgccgcccccgaagctctcgccgtcgtgggactccggcggtggcgcggggaggcgaaggagcaggagaaggcggttgcagccgctgccgccatcgccgccgacgaactctgatgaggcggggggacacggaggtggagtaaagtaataatacgtttttttaaagggtttctttgcaaatttccgcggacattttccgggtccacgagccaaaccggatattctgatctcaataccgacccatgtttttggtgggccttacgaaagcctgtctctagcgagcccaactttagtgggcctaaatacggttagggaggatgtgcggcccatgaaggctcggcccattatactgcaactaggcccaatacctagccattcagagtttcggacctgtggctatcgcggaagggagcggcggcgaacccagctcggtgagtcgtcgtcggcggcggcggcgacggcgacggctaggaccacgtgacgcggatcagctcggaggcagcgacgacccatctctgatctccctcacgttcagaggcgcgaccaagcgtcgagggggagcgctcgacggcgaggtacgcgtgtgcagatccccttcaactctaggtcgcaacgaagcctcgacagtgttcccaaattttcttgatttttctgtcacctgctagtttgttgatctgcttgatttgtttgtcgcctgctagtatgttgcaactatcggtgctaatcgatttaggcgattcttgcacatctttctgtgttgactcgctggtgttagcctgttaggagtgatgctctctagctgttcgatgaaatgcctgataaaagcatctttccacgccaatatatctatacatttattcgcacgatttgttcccctttgctaatgtacctatcaccatcgatttgcatgcgataggatcattggatcattagattactggtgaatgtcgtataatgatttttaccatacaaagtattgaacaagaatgcaagtggcttaatggttcattgttctttctgatttctttttggtttgtagag

SEQ ID NO: 2116 - DNA, 1406 bp, Oryza sativa
  N_region (27)..(27): n = any nucleotide
ccatcacaaataatataatgtatttanttttttatgaagaaaaagaaggagcaaaaatgaaaaataagaaaaaaagacaataataattagtaggagtacctaccaaccgtggactagtattacctgctgaccaaccgaccttgcaaaggaggcttatatatatactccagtaaaagctgcctgtttcatcgatcatcgatcacagacaaattaaagcatacagcaattgattcagagtagttagcttaactagctcctctgctttaattagtttgccccttccaggtagagtatatatgggtagtataggaggagtagcggtggtgctggtgggcatggcggcgatgctggtgggcatggcgtcggcggcgacctacaacgtgggcgagccgggcggcgcatgggatctcaccaccaactacacaaactgggtcgcccaaaagaggttccatccaggcgaccagataggtatgcaatcagaatcgtatcgtatatatcgattggctgggctgccggtgaatacatatatatggtaatggatggggatggttgcagtgttcaagtactctgctcagcggcacgacgtggtggaggtgaacaaggcgggttacgactcgtgctccacctccacctccatcgccacccacaccaccggcaacgacgtcatccccctcacctccaccggcacccgctacttcatctgtggcttccccggtcactgcaccaccaccggcaccggcaacatgaagatccagatcgacgtcgtgcaggcagattcctcctccgccccggcgcctgtggccaccactactcccccttcgccgccctcctccgccgccacctccctcaaggccaccgccgcagctgccgtcctactcgccgccctcctcatcatggcttaattaattaatactcctagctgctagcttatttgttttcttttccgatcctgagagagccatgtatactaccagtcccagctagctttttgcttgtatcctcatccatccggattgattgtacttatatgattagtattttagtctttagaggaggcatttgattatatatatgtctagtactatgttgattatctctcatgcattattattatttaattaattgtaggggaagttcattaggagtactttcgattggtcaacaacgcaagcaacttaactaactaacaatagagtcatatataacatgcaatgcaaattaatgtatggatcacctgattaattgggccgtcgttccattcccagccgatcgatcgcttcaactattcgatatatatatagctgctatatatatataagcaggatcggttattaatttatcgagattgattgattgatgtatggttatggccggcggtgtggtgatggtgatggtggtggcgacgg

SEQ ID NO: 2117 - DNA, 20 bp, Oryza sativa
tatatatgagcgggagcaat

SEQ ID NO: 2118 - DNA, 2000 bp, Oryza sativa
tgtagagaacatcaagcagagtgccaactgtggagggaggtggaagttatggtaatttccacttttccagtcatgcaatcaacttggttgtggacaaagtcatagtcttcagggcagtcttaatttgttaagctaacttatgttaatgatttggtgtatgtgggtattgaggcacccattgaattcttgtacaaaccatttgcacatcctcggtttaaaaaaatgtgcatctcccttatattaaatgcaatatgcatgcttgttgagaacctctgtatgtaatagcaagctgctaactgtttttaaagttggaaaattaattaccatgcaattgatggtttattagctgcaaccagggatattagagggaagaaattcatttgttgctgggaaagatctgagtgccctatagttacaaacaaacaaaagaagaaatgctgttttaaaaagatgaacacaggaagcaacttctaactttccatacagcgtacaacaaaacaaatgttatgtgttgttactaggttcaaagcaacttcctcacttttgcatacatgcagatggaacatgaaggacatacatagacacgtcttaacttaaacaacatatatagacaggccttaagtatgtgatttactacttgttcgcatgtgccttacggaagtgttcgcacgtgccttacgtaagtacatatattgttgatctccacgcacacagcacaattgagtgcacgcattggtgcacagattgtccatcgcgcaagaacacacggaggcaatgcagcatgcctacatgcaaagatgaatgcactagagcaagcgtagttgcgcctttctgcgtcgattgttagtttgttacacaatgataccttcaaggtggtgtcataacactgtgctacgtgctgcaacactcccttattatccagaaatcctcaacgccgagttaactacagaaaccagacctaagacaaaataattccgaaacccctaactccacgtaaggctccacaaacatagcagatcgccatccgaattgtctaaacggatgatcccgaacggcagtaagcaaccagcgaccagtacgacgacctaattagatcagcaccatttcaccaccccggatcgacgcatgaatctaacgcgagcaagggcaacagctctaatctctcaaagacgccggagaaataccttggaaggaggtctcctggccctgggcggcgcacaccaccgacacgccgcgggcgcgtcccgagcggagccggacgaccggggcagcgcggacgccccggcactgcgggaagaggcgacgctgcggggttaccgcggcgacggcgacgggaggagacgcggctggcttggcgacggagacggcgagggcggaggaggccatcggcgccggcggatgtggacgggcggtggcggtggcggtggcggttgcgggttcggtgaggaaggcgacgagtctggtggggatgagactgagtgaggtggacagataagctggggccgcgggtcccccgctgggccgagggatgatccggcccattacgggagaaagcccaaacggcccgtgagcccatcatctgggacgcggagcgagcaagcccaccacccacccaccctgcctcgctcgttgccggcgagcgacgcggcgacgcgccattgatttgcgcgacgcggaagcctcggcggcgcgtcgggttctcctcgttttgggggcgcatgtgcgctggcgcgcgagaagcggcgagggagaaggccgatggccacccatgccatgcgcctcctctatcttcgtcgtgtgggggtgagactgagaggagggggggcgctccgaggacgccggcgagcgaggcgagcagccaaccgcgcataagtttaagggcagccagccatgagccaccctccgagatccggatctccgcgcctgcgtaccatcgatctggcaacgaagcggcctgcagcggagcagcgcggcagggaggaagaagggaggaggaggag

SEQ ID NO: 2119 - DNA, 2000 bp, Oryza sativa
tttttatgaacctaggaccatgatttttttatgataaaacatatttttacaatggtatatactactattggtgatagtagatgccactcagtagtaaggaggcacatcgatcaacatcaccaacgagaagaatgtggtaatccatagcagaggaagcattataatcaatatacggttgaagttgtggcggccaaggttgaatgaaggatatgatatggtcatgactatttaattcctacaaatgagactttcagtgttgttaactctaagcccaaattttaatttttgataatcatgtcttcatagttcatatatatgggtttgaaagtaaacttcatgaagttttaaatatctacctaagcacatgttgagaggattcaccaaagtatagtctatgtgcatggcaataaatgtagcatcaatttcaatcgttgggcaccctaccagggcctgtttggaagattagcccagggctaattttgagagctaatgtttagtcatgaattggtaggctaaacattagcttacgatggcatgtttggaaccatgggctaattcaaagctaaaaggtggagagaaagtagaaagagaggagagagaaggagagagagagagagctgctttgctttttgatggtcccaacacaaaattagccccattagcaccccttggaggggctaatgttttgaggggagctaattcatattagctcaaaattagcccacatgtttggatcattgaaggctaatttgaggctaaaaggtgatggctaaacattagcccatggaaccaaacagagcctagaaacctttgattctacatattaattagagaggtgcctacaaaatcattattatcttacgtgcaacatagcgtgtgaacaaggaactatgatcaactttttatgcacttcacattttaaaaaaatgagtgtaataaaaatctgtcatgtcagatgacaaatatctttcaacaaccgaatcattctctagtcaagttttctctgcttactcttactccctctccattgcacattaatagctttcaagcaatgaacatcgcctcaagctccaaatgagggtggatccttatggtctacactacttgaatgccaattagaaggatttctggtggtggaatctatccactcggattcaagtcctaaacttaacacatgtgcttgtatttatagctaattaacgacataaccatcgatagtgagacgactgcagcgtcttcataaatttcaagatatgtttgaaggattcatgaaggtattcattgtcaatcaactagtgtattatagcgtgtcgatcctttgtacaagcggcacgcaaaggcatgccccagcatcagctaattaattaatcaatcgattaaattaaattctagttggttaaagatgcaatatatgtttagctagcacttgggcggaagcgcggcagaggagttggtggagtagtcatctattaactagatagtacttcgcgtgttgctgtgaaaatatgtatgaaattgacataagcaaattttataagataaaattaagtgacattggattggtgtgcgtataaaatatagtacagcttaagtaaacgaagaaacgtacaactttgaaattttattaggaaaactttacattcatcaagtaacaaaggaggaagctatgataataagttgataccatcaacaattattactctattttgtggtaaaaatagaataacttgatatagcatattttctcctgaataaaacgtaaagggcgcaatgaccgtaatatagtgttggctggtaatctattcttgttatttttgttatgttttgttttggaagatgaaacaaagttttattatgtatgcattcgctatgaaaaaccatgtctgtcttgttagggttatagatatcacatactcaattaatagtaatcgattaagctcggcgggacacaccacatactaagtcttatatggaatcatacctcgtatatagaaggacaa

SEQ ID NO: 2120 - DNA, 2000 bp, Oryza sativa
  N_region (368)..(368): n = any nucleotide
  N_region (1069)..(1069): n = any nucleotide
  N_region (1762)..(1762): n = any nucleotide
gatctaaataatgcatcagaagatgaagatgaagatgttggtgatgtgtgtgggcaatctttgaccatggctgcaaatgatgtgtgtgggcaatcctcgaccatggctgcatatgatgtgtatgggcaatcctcgacaatggctgcatatgatgggtttgggcaatcctcgaccatggatgctcctttaatccaaggcggatttacaagtcttttatttggagttcagcgagattcagccatggctgctagaaagttacatttcaattaatagcatttggctcaacctacaatgagtaggctttttttgaatagattttggtgtatccatgaacctgtactcttttaccgtgttgcactatattttantttcattttgcattgtgttacactaaactatcattgacgttgtcagttctatccataaatttggtagctatgtatgatatatgaattatctacattgtttctgaaagaccagcttctagacatcacattctagatttgaacttcaggatttcagatcacacaatatttcatattttatttttgaaaggaatcagatgaataatcaaaattttcaaggcatcaatcacattgcagatttcagaacatccaacatgccatatgtatttcaaataaaagaaatacattgtacagattacatagcgatctgagtttccttgcaatttgaccaaaaatgcggtccaaacttacagcatatggactacaatccttgcatactcctaagagtatacagactacattgtatggattaacagcgaaggctacattcatcaaactacaatccttttagcaccatccacttctgcctgctgtatttaccatccttttaggcaatcaattttcctcttttgtattttgcacaaggttacaatagttctcaggataacttgacatctggcaaaactagttctcaggatacaaggtgttctgaatctttacaaactcctaatagtgtatatactacatagtaggaattacaaagaaaggctacattcattatcttgtcattgattgttctatgtcacttcttcagcatcctctcnttcatgctcttccaatcttcaattgccattcatgccgcaccccatatatctcacctgcaattctgcattggcctcaagttgccagctgccaagtgtgccaagaacaaatatctgatttttgcaactgattgtgctgccatgtagtgcatataaaagaaaaaagagagaaaccaaatgtggttcagttcagatttggctctgtcttgtagtgacagaaaaagagaagccaccaggtggttcagttcagatttgtcagggggaagccaaagccttatgtttctctagttgtttcaactattttcagtggaagtgtcacagctgaatatacaacatgcaacatatcttactcctccactatgcaatttattcagtgtgatactcaagtttcagatttttgcctgttttctggtgacctattcctagtcaattttgatgtgagcctactaccccactttgcaaaatgtccaacaattttactgatatgatgattggtcggccaggcaccgagcgagttgccaagacagaatgtatgttttgtttatgcaaaacaaaaaccgattgtctcaaactagtactaattaacactatcaagctgcaatgatagatgctaggcttactacctaatcacatgaaaaccaaaactgagcaatcaaaccagaatctagtgaccatgattaactaccgcaatgaaanccaaaaccgagcaatcaaactatgaaactcccaatgcacgggagggtgccgcctggcccttccaccgtcgctaccctgctccaggcatgggagggcaccgccactgccctgctctaggcacgggagggcgccaccactgccctagctgtccgagggagccgccgccgcattccgtctccacgcgcccaacagcggatgagaaaggggcgacgggataagaaacaggcggaggggaacg

SEQ ID NO: 2121 - DNA, 2000 bp, Oryza sativa
acactattaatctatgaggctctaatgtccaataacaattgaaaattcctccaatagaaaggtatttggaagtttggccatggacccttactaattctaagctacattgttacataatccttcatgtgaaatcttgactaatcttaattgaagcttcaataaaaaaaactaaaaaaaaattctatacctactacatatttacaacccattacattctaaatcttaatgtacaaacaaaccatatcactatccgctaataattattacatcttaatactcatgcaaacattcccacatcatctactacaatttattaaattaaagctccacatgcaagcatatcaaattatcaccccttatcatttctaagatatctcaacatataccattcatcatttctataatattaagagtacatttatccttgtattcggcagcaaaagcgtgggtcatcattttattacttctactttggtggtcaaaatatctatgcatgatcctcacactatagtttagatcttaggacccatatttactctttttttttaataaagaaaccaacactaatataccaatttcattgaatatagcagaagaaaaggtattgaaaaaaaatgtaggagaaaggaaagcactaaggaagtagaagtgttttgctcctactaaagccaagttttggcctcctccttgatttgtcctccgagagatgtgacatacagttctttgtgtaaaaaaccctatgattcctttcctatcaaatttcccatgccgtaaggaggatgagggtgcaggcttcttttttcagtagtcacatgtgactataatgtgataaaacattttattagatcataatttggttggaactctgttttattgttttatcatgtactccctccgtactcgtagaaagtcgtttaggataatatttaagtcaaaccttgggaatataaaccatgaataactctcaagttgttgcgtttgaaaatgtaaaaattatatgaatatatttgtcttgaaaaatactttcataaaagtatacatatatcacttttcaataaatatttttacagaaacaagaagttaaagttgtgttttcaatactgtgtcgctgtccaaaacaacttcctttacgagtacggagggagtatgtattaaaagaaatacaataatcctctatttctaaataactacaaccaactaactgcaattattgtatactaagtaagttcgattgaattaagtaaaatataattttgctgtggggtctccagtttagacctgaccaaagacttgaaacttgaattcttgaaagatgtaacgcaagcatatgttgcggtcaagttgatgcgcttaatttgcctttggctctctacacattcaaaaaggggaattcaaacgtatttacaaagtgtaacattctagatgaatttgctgccttgtcaaatgtcatgttagtctgatagtctcatgccttgactctgctgcatcaacttattatattcgagtgataactaatttgccttcttttcgaggacctaaatgctaatttgcttgcgaacagaacatgggccaggatattccaaagatattcgagggctggaaaacatgggccatgcccaacttgagcaaaacggacagcccataaaccgggagtacctatacatctttcgaaagatttttatgatcgtatcacatagatttttaatctttagattaaaatccgatatatataataaaaggcaaaaagcaattaagaaacaccataatggatactaaattaccatatcctcaagaaaaagaccaaatccaatacaaaatttaaaatttacatgcgaagattcaaaaattacagtgtaactaacaaaagttacagtgtaagtttcataaattacactgtaacttataagaaaaggcactgtaaatttgagtgagaaaatcgagtgagagataagaaaaaatctttcgagtgagatatagcaaaatcgtaaagggatatattc

SEQ ID NO: 2122 - DNA, 2000 bp, Oryza sativa
gcgaggagattgctgagtactgaccgtttgttgctgcaacgttttcctcatcacttatatggtgtagtcccagttgcatgtgcacaattattcagccctaattatacattaagtttgtacttatctcatgtgaaaaagactctgccagatgctgctcctgctgctgcagatccaaagccaaattctcattctggcattatctttctctccattggagactcttgcagtgcagttttgttttcttccgtgtattgtttgtgtcctggacattccattttgcactgtagataatcatttttgtttgctcaaaattcacgtgttcttggcaagatgtttcagacaattaagtgagaatcctgtcggcacgatgggatgtgtctcacctaatttctctcttgatgcctggcaattaagcacgaacagttagagccaaccatggcactagattaggttattccattggataattgcgacgtctccacctgtaatttggctgcctgcataggtgcatagataatccagagaggtcaaccagagtggttgcaatagcaaagcgacaatagattaaatttgattgatgctgggtagtagtacgaactaagattgatgtcacctaatacatacagtacagggctacctactgtagagataagagctcaattatctatcatacggctactgtcatcctcaccaaactcctaactgaacaagtatcaaaatctttttaagtcaaccatgaaagtagaattggaagtgtaaacagtacagctcacctgctatgatttatttgctttttctgttgtaagtgttaggactatttcagtatagccaggaagatctgacaataagattagtacagtactgtacctttgatagagtctcatagaagttagggtgtgtttagttcacaccaaaatttaaaatttgtttgaaattagaacaatgtgacggagaagttgaaagtttatgtatgtatgaaagttttgatgtgatagaaaagttggaagttcgaaaaaaaattgcaaataaacacagccttactcttgatcatacacaatctaaaaactaacaggatgttcagactctttctttttttttctttttttgccaacttaagtgaagcattacgaggtttaacgcacatttatgcatggttaacagtaaagaaacgaacttagaatcatatgccgttgcttacacgcgcaccaattgacacctacagtaaacatcaagtgaccatttcgggcatgttactctttcccactactagtttaactatcactgatttatttttgaagcaagggtgtatcataatttgagggcagtaatagccgtcgaatgcactgttaaaaaatagagaaattttacagtcattaagtacttcaaaatacctaaaatttgcactaatggtattttagtttgttaccgtgttaaaatattggcaaggtctaaacctaggcaacttttggtagcactagcagtgccaatttctttgacaacttatgtgtgttgttgacatatttcggtagtaaaccaaacactagcaaagttactatttaaaataccaataatttggtagggcatattttagcatcaaactaaaatggccctaaaaattttcgtgcctcatgatgctccatgtaccaaattttacactgttaccttctggtgatgctaaaattaacccaaaaaattagattagcaggagtccggcgaattcgcgtggcaacacggtaattaaatttactctcgatgggcgcacgttgcggtaattgtaaacgaggggtttaaaaagcgcgggagacccgctccaccttccctcctctcctctcctctcttctcttctcgacctccactcctctccacccatcgcggccataagacgccacctccccttcccaccacgccatcaccaccaccaccaccacctcaccgccgcctcgcacgcagacggcgaggcttccggcgcggcggcggaagagtagcgcgagcgagctgag

SEQ ID NO: 2123 - DNA, 1655 bp, Oryza sativa
  N_region (46)..(46): n = any nucleotide
atttttccttaagaagtcaagaacccatttttgtgctttgttcctngctttttatatggagttattatagtaaaagccttttcttttccattggtcgtgtagacgctgcagcttcggaagatccgctcttcgtggaggttgaagccgacgtttggaaaagcgagcaaggcaagtcacatcatccttgaacatattgaatcccagtttataaaattattttgatttaaattattgcattatcgctttatttaaattcccgcgttatcactgttttatctagccatgcctatttacctttgttatgaccttattattgttattgttattattaccttgttcaccctagaataaacaaaaccccaactagtggacactctactcatggtaccactagtatgattttaggtagatgcttcgctggttaattaggcaacattaggtggttttacaactctagactttgggaatattctcaacacctggacactatgggatggttggattattatggaattggattcacacctccccctctattcaaaaccctcaaaatggttttagggtgggctcggggtgcatggttttgatagtagcacctcggccatataaggaccggtcttcgggcctctgttgcaaagcactaccgtacttccacatgtctagtgggtaaggcttagtttgtggctcagtctggttataaacaaaagtacacggatggagatggacgctgccgggggtcgatggacatctctagggcaaatgaagcctacacgagctgcggccgggtagtcgagatgtcatggcacagggccggtgtcctgctgctaggggctcagtcctgcctacctgtcccggaggttccggccgtaggtggggttgggtcggtactcttgtctatggctaggatgggttggaaactatgtcacgtcttccgtccgtatatcgtggtggtatgtggcacgtggttacacgtgaggaagatgtgtcttgtgggtaaagatgtacacctctaatcaaagaataatctattcgaatagtcgcgccctcggttatgggcaagccgagcaatgtacccaagttagtgttttaattcttaaaacctgcttaacaactaaaatgtggaatggttggcctgggttcgcttgggacgagctgggacccagggtcgggttgccagttcggtctgaatcatcgtaggccttgggttaaggcaggttcgtgtgggttcacggccttgattaataatattgtatagctctagaatcgtgtttacaaaatagctttgagcaactaagtgtcttttaatgctgtttactgcaaaccctaaccctttatattattacccccttgtactcccctgcatttattctgcacttatgggtgtgtcttgttgagtacggtggttgtactcagtcttgctcaatttttcccaaacccagaagaggagcccctagaagatgaaggctttggtgtctagctcgtgcctgccatcaagcgcctgtggtcgtcgccctagtcttccgctgtttttcgtttgtcttcttgtgtgctgggtcttcgccgcccatgtaataaattaattaattatgcttccgcttgttaaactctgaattgtatcaacttttggtgtaccttgcctcctgggacaaggaata

SEQ ID NO: 2124 - DNA, 2000 bp, Oryza sativa
  N_region (1128)..(1128): n = any nucleotide
aatacgaattatactatcttactaaaatattgacgaataaattaatagaaagggaaactataatagcccgtactattgatggtgtgtgggcggcagccttcaaacaaaagttacctcatgaagagagtatatctcaactggttattgtaagtttgtaactgaattactggcatatatggcggggaacacggtctatgcacgtaagttttttcgtgtatatcacaaacaattctagaaaaattttattacttttagtggcattacatctatatgtaaaattttattttcaaattcattatatatatgaaaaaaaaaacaaaattctaacatatttatattattaaaactataatattttttacggctaatataataaatttgagctaagactttacataaagtgtaattttattcgacgcggatataaaatatatatttttagattttttttatgaaaatttgttagctgacatggtgtgtacgtattcgtacatatgatatatccctgcatagtgtgtgtcttagactctttgttccactagtattcgtttaaaaaagtaaaggaaaaaagtataccgtaagatccctctacttgtcatcgagttataaattcatcctccaaccgtataaaactagatattcggtgtcccttaacttatcaaaaccggtcagaataggtccttcggtggttttagcctcgcttttagcctatgtggcggctgattcagcgtggtacccacatagaccccacatgtcaggatgctaggtcaatctctctccctttctcctctctctctctctcacactttccttctcctcatccgatgccacgaggagggcagcgccgcgacgacggccgacgacggcacggtggcggagaagctcatactcttagtgatgccgctgccgccgaggaggaggaggtgaggcgagagcccaggggtggtgggcacgtcgtccatgccgaactgggtgctctcgtcatcgaagtggtggtgctttgcgaggggatgtgccagcggtggtggtggaggaggcgaagtgatgtactccagcatgtgaagcggcggcgtcggcgggctcatggtggcggaatagcggcgtcagtgggtgagcacgactgcgganaggcggcgtaagcaggtgagagcggcggcgacggcgggcaattgcggcggcggcgagcgagtgcggctgcggatggggaaaggcggaacgccgaacgacttccgcagcgctcggctttgtcgtcggcggcggctccgggcacgggcggagcaaggcggggaacgcggagcagaagggcgggtgagcggcggctccgagcggcaaccatctccgagagacgggctcctcccctgtcggctgctggccgccggcgcccatcgctgcggcgcccggccccgcctccacctccgtgcccacctcatgtcgcgcgtcatggagacagacacctcgtcagcgtggttcctaggctcgtcgctccgtgtcgacgcactcgtccaggagggcttctcggcgccgtcgacatagcaacctgataagagtgagagagagagggtgctgacatggcatcctgacatgtgggtcccatgctgactcagccgccacgtagaataaaaccggtgtcaaaaccaccaaaggatctagattgaacggtttttaagttgggagatgtcatatgtctgtttttgtggttgggggacgattttgtaactcaatgacaagttaagggatcttgggtgtactttctcaaaaaaaaaaaagagcccaaatatgcctctctcagaccaggccgtcgtatatacgagcccacccccacagagtccatttcaaacccccaacgtccaaacctaacggaacggatcggcgaatcccatcaagataactctcccacatcctcggcgcgagacgtgaacgaaacgtcccaagcctaccgccgccgcgaggatctctcgaatcgcgcaactcacagcagagggagaggaagaagccgagcg

SEQ ID NO: 2125 - DNA, 1320 bp, Oryza sativa
  N_region (4)..(4): n = any nucleotide
  N_region (6)..(7): n = any nucleotide
  N_region (769)..(769): n = any nucleotide
  N_region (857)..(858): n = any nucleotide
  N_region (930)..(930): n = any nucleotide
  N_region (1042)..(1042): n = any nucleotide
  N_region (1044)..(1044): n = any nucleotide
gggnannccccccccccccccccccacaacacaagcccgtgcaatgcatgccaccaaatacgaagagacacaattagtacagttctagatttgccagacaagggccctttcagcatcttgttcctaatctccgcgtcagacatacacattctgttattcttatatcttaatcagacagggcgcagatgggattgcatcatttcgattagttaatttgcaacgattacgactcaggcactactgttgactacagttggttaattttgttgaaaaataataataatttggctggctgttaacactgttttatcgtccttcatgttgggcttgactgaaaacgtgaaacatgatggttttaactggtgtatgctaaaaaataaaaaagcagatgggccgtacagagaaaaacagagcgggaatgaagaaaatttcagagttcggcggccggccgtgcgctcgcgtcaacacgttgtactggccgttgattctgcagattccgcgaatcgtgcggatgctcgccggcgcaacccacctccgccggaatctgcagcatcaacggccagtagcgctccacgtccgaccaaaagcagcatattccacggttcccccgggtcgagatgcccagctggtaggcctattttcttgacaaatttgaattttctggagcacgtcattgtcaagtctcatggacacacaggacatttgaaaaatactaccacaacataactaaatttataaaagaaaatcatattttttgatatactattcntgttgacacaagctcattttttaaactttggatgaaaaattaaaagcgtctaaaattgcgtagtaataaccttttcgtcgacgaggcnnaaatcggctgcacgtgttgctcgccttcgcacgggcggaaaccggaaggagacccgcgccgttgtttagttnggggagagaaggagagagagagagggcgagtaaatacggaaacgaagccgcttgctttcggtttcctcctcccccatttccttggattttgcgaggtttcctcttcctccangntctcgaatccgagcagagaagaagcaccagccggggaaggcacgggaaccctaggttggctgcgccgccgcacgcacgcacccgctccctttcgtgctgctgctgctgctgttgttgccgccgcctgcatcgtccccgatccgccggccagccagctagctagcgagggaggccaggtgaggcgctctcggcgttcgttgcgcgtgtggtgaagtcttcgggtggtggggatcgcgaatgcgggtgggtttgggggaatttctgtgagggtggtgg

SEQ ID NO: 2126 - DNA, 2000 bp, Oryza sativa
gattttacaagtttgtgcatttttgtgttaaacatatatttgtttgggcattttcttaattattctccagattataaaggatggggtccacatggctgtgagggaccaatatgcaaaaaggcccttgaggtttctaggaatcaacccgcagtcctaggcccatatgtcagtgtgtttctacaattgtaaatggatccctgctgttaatctaattcaaaggagacatccctctgctctagacagagcagagctagcgatggctgagctcgatccggcggcaaacggtgtctcgtttgaggttgaggtcaaaagataaaatgaagagcaagctctcgcgattccattcctctagttttcttggttaggggacatcggagtagcgccgatggcgagtgtgagcggaaggtgttttcgggtgatggtgcatgtgcatctacagtcatgtattggttaagtgggtgcatgcatgtgagtatttgaggtttcatggggtatataacatggttgttggccggagttgatgaggtccggacgatggcggcagcacacgaaaatggcttggcgacggcgcttcactccgggatgacgtcgacggcttgatctaccaatccaactggcatgcatgaggtcatacgttgttagcgaggtctcagggatgcttcatgtgcaaagaatcagacaatggctcaccagagaaggcggaatcgaccatggcgacggtggcggattcaaatcggcgccggggaagaaaagatgcgttctccgtgttcttgatgtcttcggctggggttcttgaggcgttttgaagagtaggtcgaggtgagattcttggcgcagcggcttgctccgagatggtcgaggatggctagacgacaacgatgattgaagcggcgacgctccggtgcgtgctccagggcgtcgtcggcgtggtcgcgtttcggtggctgtgatgcacaaaacgggaggtggtcaaaagagaaatggttcggcattgtgtggagagaagggaacgcgaaaaacatacagatgacctcgacccaatcggcgttggcgaaggtcgtcgtcactacgaccggcagcgaggttgaggatgatggagaggctgaggacctctccctcggcttcttcagctccagagtgatgtgtggagttgggcgactcggtctggaggagatggaggcatgactcagtgacttgaaggcgtcgacacgtcgtcaccacgcgtcgacgcgtccaggactcggtcggctctcgatctctccctctgtgtttcttggtcggctgaggatgagggacagaggaagggcgagctggagaggctgccaggtggggccaagtcgatggaagctaggctctaggaagagaggtatgggtaggagtttgggtagacttagtttttggataattttcggaattatttcttccccctaagtttgcaactcaatatcttaatatgtggaccagaagaattagtgtagattttactggtggtagatgtttatatctagattccattttctttggttgcacttaaaaataatgggtagactgctcacagaaattaaacaaagataggctattagaaagctagattgaatttttaggaggcttaaacagaggaggaaaattctagaaaaattacatttattccatgataaataatctagtattcgaataaattatttcccatattcacttatgtgcaggtaaatgtacttttggatgaaatatggttttagccgattaaaatttaatttgatttcttttagttgtttgctttgactgattaatttgaggtatcaacttgagtgttaacatttgacaaaaagtacagaggataagtttgtgctaatcactatctacataaatttttccatgattttatcttgcacaaaatattttagagaattaggatgacctttgtttgtatatgtattcccacttcataattgcatctaatattattatagggattacattaaacttcttttagactgaga

SEQ ID NO: 2127 - DNA, 2000 bp, Oryza sativa
tgtattttatctataatcccatattccgttaggatatggactggtattttgtaaagcggactccttcccctatataaggagggtccgtgtgcctctcggggcgcaattcttttctccaatatatataatcaataacatactcggtggaatcatccccggacaggagtagggtattacttcttgaataagaagacctgaacctgtataaaattccttgtctccaaacccatccactttgctagcttgatagccacccccttttattattgccgaaatcttgtttcgacactccaatatgtctaaaaatcatgttttggtgctttttgaactttttcattccggtgaaaaacaacacacccacgtgtgccaatataggccaatattggcattaattgacaaaacttcaccgcgcgagtcacgagtgatttttcgacacggacgaacccaattctctatagtatgtccaaaaacatgtttgtgtgctttctgaactttttcattccggtgaaaaacatcgcacccacgtgtgccaatataggccaatattggcattatttgacaaaagttcgttgcgcgagtcacggagtgatttttcgacatgaacacacccaacatagttcaataagtccaaaaatcatgttttcgagctttttgaaatttttcattccggtgaaaaacatcgcacccacgtgtcgcaatatatgccaatattggcatcaatagacaaaagttcgtcgtgcgagtcatggagttatttttcgacacggatgcacacaatacactccaatatgtccaaaaatcatgttttagtgctttttgaactttttcattcctatgaaaaacatcgcacagtttgcttcttccttcatccgggctaggcacgtactccgagcacgcacgtgggccaatataagccaactttggcattaattgaaaaaagctggctgcgcgagtcacggagtgatttttcgacacggacgcacacaatacactccaatatgtccaaaaatcatgtttcgatgctttttgaactttttccttccggtgaaaaacatcgcacccacatgtgccaatataggccggccatattggcattaatgacaaaagttcgccgcgcgagtcacggagtgattttccgacacggattcacccaacatactccaataagtccaaaaatcatgttttggtgctttttgaagttttttattccggtgaaaaatatcgcacccacgtgtgccaacacgggccaatattgacattacttgacaaaagttcgccgcgcgagtcacggagtgatttttcgacacggaatcacccaacaaactccaatatgtccaaaaatcatgttttggtgctttttgaagtttttcattccggtgaaaaacattgcacccacgtgtgccaatatatatcaatattggcattaattgacaaaagttcgccgcgcgagtcacgaaatgatttttcgacgcggacacacccaatacactccaatatgtccaaaaatcatgttttggtgctttttgaaggttttctttatggggaaaaacatcgcactcatgtgtgccaacataggccaatattggcattaattgacaaaagttcgttgcgcgaatcacggagtgaattttagacacggacgcacccagtacactccaatatttccaaaaatcttgttttggtgcttcctgaacttttttattccggtgaaaaacatcgcacccacttgtggcaatattggccaatattggcattaattgacaaaacttcgccacgcgaaacacgaagttattttttgccaagaacgcacccaatacactccaatatgcaaaaatcatgttttggtcctttttgaagtttttcattccggtaaaaaacatcgcacccacgtgtgccagtataggccaatattggcattaattgacaaaagtttgccacgcgagtcacagagtgatttttcgacacagacgcacccaattctctacagtatgtccaaaaac

SEQ ID NO: 2128 - DNA, 2000 bp, Oryza sativa
gtgcttctccaagagtgcaaggacaacaccatggtcctgcatgatgggggctaaatcaggtgaagaaataatgtgggggaacacagagaaagaaggcgcagaatccgcatctaggcttcttcttctgcttggagtgagcggcttgcaaggagtgtcaaccttcgcaggagggtggccaccttcagatggaatcagatcagcagcatgatcagacgccattagttgccttcacagcctcgtctcacccggttccgccgagcgggagagattgcggctgcagcttctgtggacaacaacatcacacgaccgctgacgacctctgttctcttcattgtatctccccctatctccacggtcaggctctctgcttctgctagaggagcggccaccaaaccgcccccatagcgatctgcttctgtgcctccttcttgatctttgctcttgatgatcatcttcctcatcatctgaatgccggtcaggttctggtaagggcctgtaaggctccaaaggcctagagaccatcctgcttcttgctgcatcatcagtctcaccatagcgccactgataaccacggtagtagcgagccaccaagtcctgcacagaatcaacatgtatgatcataggataggttagtcccttttttctcgcccaaggagctggctgctctggctccaaatccgggaaaggggtgtcaactggggcactttcagcatcatggcgggtgatggtgaatcttgacgcctttgggatggagcttgggtctgaaatccagatccacacatcaaaagtgctgttgttgttgcgacggcgggagtattcttctacatagtgcactgaacatcgagggccaatgagcttggccacagcctcctccgttcttccatgcattggaatgccttcaatgcaaagtcgcactctgaaatggatgtccactgcttccgcattccttctctcgtcccacggccgaaagaagtactcacgtccgcttcttgtcaccagtcttggctgctgcagaactgcttcatgatcactgtgattggcgaaagtgatgaagaaatcttccgggtggaacttggtcacttggatgtcgttgcggtggatgcggtacgcagtgcgaatgtcgtctgcaaaggtactgagctcaacacgccctcccttgccagtccaggccaccactgatcttgcagtgaagagggtgcgcagcctttcaacttctccagtagcagacatcatgcagtggctcaactcaggcctggagactaggtcactggggacctcggccattgccgaagctggatggctggtgggaacagaggggggaacctgggatgttcttggagtaggaagaagaggagggaaatcttttttggtagggggggaggtatgctggtcctggtatttaaagagcctctttctgcatgaagaagataaatgaccaatacctagacagaaccaacagcggaggggatctctgcagtcttgcaccctatgctttgtacttggcaatggaagcatttaccttccatatgggtgaggaacctcaatcttcttgaatgctcatctgaggggttgttgcggggattgaaggcatggggaattggagattcgcatttcctccaccagtacttgggttttaccaaatgccaatctgttgatggttgggaggcgctctgctcagagagccgctgtgcagtaactctttcaacccgcctctcctcccccaacctggagaacaccgggggtttaaggcgagcctgcagcggtagacgagatgtaactggtggttgaacgtctctcaactggttagtcgctcgaggagcttgactttgcaagatcttgcttgggggctgggagattcgaaatgacggccgatgcgaaattgcagctggctggggatctttcctcagtacagtggagtaaagcgagcgatccattcttgagaggtctagatttgcagcttgacctgtaggcttgggcaaaagattttgaactggagaaga

SEQ ID NO: 2129 - DNA, 2000 bp, Oryza sativa
  N_region (418)..(418): n = any nucleotide
  N_region (508)..(508): n = any nucleotide
taaatgtctttgactcccagctgggtggcatatatagtacactgtactctctacagtaattaatgacataatatttgaagtcagcataacttgctagaaacgactaaagcaagaggtgcgcgtgcagaacaaaatgctactctgactcagcacactagctagtaactcgttgaacttgtacaaatattatcaagaaaaaactctaggaaatttagattgtgatcactagtcaagagggctgtgcgattgatcaggctatatacataatcatagattccaaaacaaagttgtattatatatatagattcttatagcactgctggagaaaggggcatcactcccggttggtaaccctctaaagtcctggttttgcaactggaccacgaattcaagactaaagatgttaaaataaccaagngtaaagattgatctttattcccggttaccaactggaacaaaagagggtagcgccaggctctctaatccctattctcctcttttttttttnctttttcattgttctttgcatattgattttacaccaaaatcacatagatcaacatcacaaaatcgaacattgacatcacaaattcacacatacatcacaaatccaccacaaatccagacatacatcacaaatccaccacaaatccacacatacatcataaatccacgtatcaattcgatatacaaatttactaacacaatacactacaatttactaaaatatttttatatatatttttttaaaaaagacgagtgatcaaagttttgaagataaatagtcctattgacagttactaaaaggggaggtgaatggagtacgtgttatggctttatgcaaatttggcgtgtttgatagaagagaatatttgtgactacctgagaatacagatgtgatttgcatagaatagtgacaggctctaggtagtagatctgaagcaaaatattcgctaaatcaatatactcctatgttgttattagtgcggtctcactcaatcaccacaaatccctagaccttaattcagtcttgttcccagttgttgccaaacgacgaagccgtaagtagggatgccagtagttagtcccgttacccgtataaaaacccgtttactagttcatttcttacacgatagtataaaatttagaagaaaaaataaactagaagagagatatataagcgggcttaaaaaaaacccgcttgcatccctaccgtaagattattatatacgacaacagatgatcttccaaataggaggcctattctctcgtgataggtagaagggatcaacaactaattaattataccgtagtgcgtgcttactacccattaatcaattattataccgggataatgaactcagtctaaaatctctgttcatgttggtctaatatatattatcactaactagtctgatcaaaataatgcagaaattcctattctaaaaaaaaactgcagaaatcaaggattcaagggtgtacctgctgaattgctccggttgatcggatcagcttctgaaaatccacccacggatcgtaactcgccgctcgccacacgcccaaaccagtacaactagggcggcggtgcgcgccaacgccaatcgatcggccggtggtggcggtgacgcccggtgccggcgccggccctcatggaaacgagaggattggtgcgaccgccggagtgcgctccgatggccgattggccgcggcggcggcggcggcaccgcgagtcggcgagacgacgcctgatcaggccgccgcttctcttccccaatccctctacctcccggtcttgtactgtacatcatttaggcccagcaaagcccacgtagtccgttttttatgtgggcctcatcagtccttcctcgcaactaaggcccatttagcgaaacccaggctcgttggcccagttctcccctccgtcttcagttttctccaccatgagaggactgctacagagttgtggagtggatctccgcctccggtgagctccagctccg

SEQ ID NO: 2130 - DNA, 2000 bp, Oryza sativa
  N_region (595)..(595): n = any nucleotide
  N_region (613)..(613): n = any nucleotide
taacgtcggtcatatgcatatacagctcgaccagacgatcgccaagaacgctaagaatgcatcccacaaagagagtagtggcctcattgaatgctttctactggtcagcagtaagaactcccataggttttgtcacaccctaaaaatccccaaatgtataaattgttgcttaattggaattattagaaatgattttaaaagtctagaagaaaagatctaattttaaataataaattccaatataaaagtgggctagataaaattttattaaatacttcatttgattctatagttcctagatttttctgagatttatttaaggcaaggaagtatttttaataaatggaattgcatttcatgaataatttaaattgaaaaaggttttaaaagtcctcttttggctttgggccgaaagtcggcccaaaaccccctctctttctctccccggcccaatcgcgcccggcccagtccgccaagccgagccaccgctcgctcctctctctctctcccgctgacaggttggggccacctgtcagggcagtcgtattcctcccgccgcagccgcgccctaatgcgcgcaagccgccgctaacgnccttccaaattcgaccgntccttttccgatccgatcgaatcaatagaggggaaatgatcccgggataccctatatcttttctctttcggaatcgtcatctaaattcgtttggaaatcgtgggattcgagctcgattcagattcctttttcctcccgaaccctaaaccttccatcgccgtcgccggtcgccgtgggcctcaatcgccgtcctctagccctttataaggaccctcgagacttcctctctccgccgccaccctcgccgtagctcgccgccactcgtagtgctctagccgtgtcaagtcgtgcgccgccatcgccgccgcaagtccaaccgtgcgccgccgccgctccagtcatcgtcatcgctcgggaaggccaccgtcgggttcgccaggtcgtcgccgtcctcgtccacccctccgtttccgccaaagatcgccggagcaccgccatcgtcgtcgacccgatcgtcaccgccaattcaaactcgtcggtgtcgccgtccggttgccatccgccgccgtccgtgcctcggtaaggttcgtcgcgtcgcccgcttcacgtagatgccttccgtttgcgccatcgcgccgtcgttcgccggcgagcgtgcgtggccgagccgccaccggtggtgacgtcatcgccgacgtcagccatagaccgcggtagaccgattcgatctcggccgttcgtttccttagaccgtcccgtgcacctggtccaccgtaaacccgagcccgctgacgcaataaatctcttttccttttcaaaaataattctttatcgcgtcataattcaattaaaatatatataaatggtttaaaccaatttaatctttaaaaattcatcttagctcggatttagttggttcaagtctttaaatttttctaaaattgatatctacatgttaaaaatacccacatgtactgttcatgagtgtttatgtgctgttttggtgattttgttcttttctgcttagattccgacgttcccggagagtccgagtttgcaggagaagattttgaagagttccaaggccagcaaggcaagtcacacagatcccaaaagaccctttgagcatgttgatcccgtctaaagctattatttctattcaactattgtatttatttttgaatgtcattgggtggaaataacctattgccttgttatagccattttgttattgattacctattctttgtcacttggttaacaattggattagctaaaacattatatggttttagctaaagtgaatcggatgcttagccttgcttagagacactagctcatataaatgggatacttatgattccctattatttaatgatggcttaatgatagttcacgatggttaatcgtgattggttaattaattaatgtgccaactaaaatctga

SEQ ID NO: 2131 - DNA, 2000 bp, Oryza sativa
  N_region (1428)..(1428): n = any nucleotide
gctaatgtggttgcagatgccttgagcaggaactatgctgtgaggttcaacgtgatttggaacatctgaacctcggtatagttgagcacggattggtggctgccctagaggcacaacctacactggtggagcaggttcgcatagctcaaacaagtgatcctgagataacggaactcaaaaagaacatgagggttggaaaagcccgaggttttgttgaggacgaacaaggaacaatctggatgggagaaagattgtgtgtacctgaaaacaaggaattaaaagacctgatactgacagaagctcatcaaactcaatattccattcatcctggcagtactaaaatgtaccaagacctcaaagaaaagttttggtggataagcatgagaagggaaatagctgaatttgtcgctctctgtgacgtctatcagcgagtaaaggcagaacaccaaaggccagcaggcttgcttcagccactccagattccagaatggaaatgggaagaaattggaatggatttcattaccggtttgcccaggacgtcatcggggcatgattctatttgggtagtcattgaccgactcaccaaagtggctcacttcattccggtgcacactacctactcagggaagaagttagcagaactttatctggcaagaattatgtgtttacatggtgtacctaagaagatagtgtctgatcgagggagccaattcacttcaaagttctggcagaaattgcaagaagaattgggaacccgtctaaacttcagcacagcctaccatccgcagactgatggtcagactgagcgagtcaaccaaatattggaggatatattaagactttgtgcgcttgactttggtggagcatgggacaaaagcttgccgtatgctgagttctcctacaacaacagttaccaggctagtctgcaaatggcaccctttgaagcactgtatggatggaggtgtcgtactccgctcttctgggatcaaacaagggaacgccagttgtttggtacagaagttttaaatgaggcagaagagaaagtcagagctgtcagggaaagattgagaatcgcacaatctcaacagaaaagctatgcagacaaccaccgaagggagctcgttttcgaagcaggggaccactggtggagaaaccatctttcgtcggtcggccgaattccacaatagtcccggatgcaataaaaaccggggctaaagatgatttttagtcccggttaaaaagggtaacgggcatatttgatctttagtcccggttggtaacacaccaaccgggactaaagatcatctttagtcccggttcaaatgctatcagggcctgtcaggcgggatctttagtcccggttggtagctcggggatctttagccccggttggtaacaccaaccgggactaaagtcccacccctatantatataccttcttcctctccaactgcgtgcaagcttcaaaatctcttcaaaaaagaggggaggtcatgccaaaatttctagtgaatttattttggtgattacgtacaaatcggaggtgcctaaaaggtttgcaacttcatcctccaatgtttttttttgtcatattacatttgcaactatgttttgtacacttttttgtctccaaatttagttgtaagttgatgagaaagaaaatttgtgtggggaagaaagaatatatagaaatttagttgatttgctaaagaaggttttataaaatagttgagaaagaaaatatagtgaaagttaatcttaaataatagaaaacaaactaaaatgaaaattaaaagaagtaaaacacattaaaattagtttaaaactttagaaatagtaaataagaattatttggtgtaatattttatgatttttgtatgaataaagatatgtcattattgtatgactattgaaagagtttgtaattatcttataattattgtatgactgtaattattgtaagaataattatttgtgtacgattttttttcgacttatgt

SEQ ID NO: 2132 - DNA, 2000 bp, Oryza sativa
atcaaaggggtgaaaactcagtgatttactacggtacaccgtacaacaggcttcacaactggcaccatatgacgccacggcctttactgatttagcataccagcatggtggaaggactcatgagaaaagtatccaagtctcaaaacgaaagcatgttctagtttacagcagtaacacgactatggcaccaacgacgggggaaagagaaaaacggcaatacagtctcatacagaatgcaacacatttgcttccaggaaaagaatgacaagaaaatggttgaccatcgccaacgggaaggaattgtaggcagaggagctgtagcaaattaacgccttttcgctcctggggattgcagtaaccggcctgtgtttctcagagggctcgcgacttgacgatgtccatgctcatctcactcgggtcagtggcctgcagctccacctggatgccgtccagctccctcttgaaccgatccttggagctagcatacagcatcttgctcctcacccttgatgtatcaggagccctgcagagagtaagatgcacaaacacattgcctcagtgttacaattgaaatagcattatatagttctgttacattgggcgtttgacaagctgatggatataaacatgttttatgatgcttacagttaataatctaactgtcatgatttattcattattcaaataaagaagaaactggtagtgccaaacagcttgcagtgtttagagacataatcctgagatatgttgattaattcctgaagttatcgatccacaaatccaacatatgggaaaaagatcaattcagtgtctgtcaggctgttatctgtaattgtaatataaggttgctttacatttttttggcaaggaattcaattttctttacatgctaatatcagtttcttaagatccatggcttgggtgaacagtgaaacaatgggcacaaaagagctttagcagaaatgaccaaaagcagcattgttcctttagattattggcactgttcattgtctcactgacctcatttccctatcaaaattgttccttaccgtaaaagtagataatatgtctaataatcactagtggcagtgaggcattctcataaaaaagaacattttaagtacaggtagcgaagacattagtgctgataacaattttgataagcaaagagatgcctgatatcaaagtgtctaattttagatctatgatgctatttttagctaaaaattgataggctaataattatgcctctttcttgttcctgtttcaacctaatctaagctaattttacacttttgtaaaatagaaactatgaaatatatttctgcgtttccctttgataatgaatttgaagtgctaatgtgcttttgaacaggtgacaaaagtgcagttaacccatcctataaaaaagtgtttcgttacacctggtaagtctgaagatcgaagggaacaccaaactgcaataatctaacgtaagcaggcaattgctcacaaacaactcaatccaaattgagacttttaggtcagtaactgccacacgtaagatcgaaacaaaaccaaacataaaaaatatgctatgtaaatagaaatttacatgttgatgaaatcaacaagaatatgacactatgttgacaggggaattgttaccaggagatgaagaatatcttgctcttctggcagttttcatcagtgacaaagtcaaaatcaaataccgcgtagcggcactcatctgctggtaagcaggcagtgaagtcgtcatagctctcacccggctgccccaacctgtccaccaccacctgctggaccttctcattgatcttgaacacgatgaagcggaagctccttttcgccttaagttccaggaacttgagtttgcattcgtcacacacggccattcccgacgccgaattcgacttacatatccccacaacatacaccatttcgttaatggacagatcttgatcaacattctgaacgaaagagattgaactgcactcacc

SEQ ID NO: 2133 - DNA, 2000 bp, Oryza sativa
gttagtcgtgaggcaacgtctgcaacttccaggaggtgaaggttgatcaagattatatcaataataaggattatcctgagcaaggcaagtcatcactattccttgaacatgttgatcccaattgcgaaattgttttgtttgcaaataaaattgcatgcaatgatgaacatcctacttgtgattatgccatgccttgattattgtttacccttaaatctttgtaaccatgtttacgtatgagtccctagtcaactatgacaattgcttaggaatgctattctagaatcatacatactcatatttatcaaatgctatatgcttgggcaattacctttgggaaggtaattgagatgcggcatgtggagacatgagcgccacattgccatgatgttgatgacatgatttgtgaaaggagaaataaaattaaaacaactgttttcgactggggtggacggaggatttgggtggtatctggaaaaggctagtaccgtccccagtcaattaaggaccgagccatgaagttaagcatgaaacgacccccgtacaaccgtacttctcgaatgggtatagacctagcggattagatagccgagcggaggcagtatcccagcatagatggttcacccctgagtgaggcaggtgcgctacgatgggacagccgttgaggtagggccgagaagcgtgccctacatcggtgtcgccattggtaggactgccatgagtgtgtaagagagagaacttaacttgaaccataatttaatatgcgtgacttctctttcccgggagcgccagaactcctctcactgctagaaacatggacgcctagagtgcatgaggatttaagttcatggagcgggtactgccaatgcgaggttatcgaaaagctttgccgtgatgcgtctcatgtgttgggacgaggctcatgtgttgggcagtcgcggagtgcgggtaaagtgtacatccactgcagtgtgagtaaaccaaatctattcgaatagccgtgctcgcggttattgagcaccgggacatgtattacacttggctagactctaaattcttaacttgtggggggatgggatattgcatgatgaattttatgctgatggagccacatcccgagaggagggaaggtggacatcctcagaaaaccatgacgattcaatggcgggaagctatccttgggatcacaatggatggtggacagaaccgtcgttgtttaaagtgaacactggtactaaaatttgatcagtctatgctaggttttaggcttgtgaaaagaattgtaaaattagctttatgcaaaagaacctgaagccattccttgaaataccctctatcatatgcattgttgttgtggtggcttcctgagtacggttgtactcacccttgctattcatatatcttttaggagagtgttgaagagaagcccttgtcggtacgcttgcgtatctaacaagatgatcggagtgcggtcttgttctaggtctcgttccccagtcgactgcctgtggcatgttaaccgggcccttatattattttgtcttccgctgttgttctctgatagttgttggcctacctggccctaatgtaagtatttaactcttttagcctaaattcattcgtgatatgttgtgatccaactatgaatgtgtgtaccaactactgatccagggattgatacggataaacacagaagatttccgattcccaaaattgggggtctacactacgttaacggcgcggttagtcaacgtgcttgacaccgacgtcgtctaagctatccaccctaacatcctatgtgccgttcctatcctaaccacctcgttaaaaaccagttgtggaccctcagatcttcgacatttcaccgaaacaaccgctgcttcgtggcctatggtaagtggtttctagaaaaatctttggggttccacctttcccaattcagtctctctagggtgaggcccgtgattctgcagccgtaaaaaaaaacctagctcgattcc

SEQ ID NO: 2134 - DNA, 2000 bp, Oryza sativa
  N_region (121)..(121): n = any nucleotide
  N_region (350)..(350): n = any nucleotide
  N_region (352)..(352): n = any nucleotide
  N_region (357)..(357): n = any nucleotide
  N_region (359)..(361): n = any nucleotide
  N_region (363)..(363): n = any nucleotide
  N_region (365)..(365): n = any nucleotide
  N_region (367)..(367): n = any nucleotide
cgcggagagaacccgtcgccgtcgccaagggtccgacgaggtccagccgcgaggacagcggatccaaccgccgccagccggaagcgccgggctcggcctccaccgcctgccaaatccctcngccgccaacctgatgatgggttgataaatctccaaagcgatcccttttaggactccttgccagtggtagcatttccaaattatgcattttggtccctatttaacgccgtgtttaattccaaaataattcttcaaactttcaacttttccatcacattaaaacattcctacacacaaactttcaacttttctgtcacatcgttccaatttcaactaaacttccaattttntntgaantnnncntntnggactgctagcaatgttgttagcggtctgaaaatttccatctaagtccctacgcctttgaattgtatcgcccagcccccactctctcccctctgccaatgccaattcactcgctgtctctagaggcagcccacactgcacccatgccccttccgttgttctcctccactggaatctaggcccccaaacggcttcgccatggcttattgtctcagcgaccgcgcgaaagttgggggtttgggcagttggttgtttgcgattttcactgttcgccgtccatggtgccatggcaatggcagcccgccaccttagcttgaggatggcatcacttggggcgttgatcacggtacgtatgtttgccctccgttggatctggtacaaccaaacaccgctcgacgtccctcaccaccaaaagtcagtgcaaatgagcccttctagtttttgaattcacgaattgataagtatcactatatttggtcttggatttgtggataagtatcaagtcagggatgtccggcgatgaacttactaacaacatcctgtaaaccaatacaaggtatatcatcctgtaaacaatataaccaagtctcttagctatgtaaaggaaaaaatgttggttcagttgaatttcatggcatactttttttctttatttttttgtgactttacatgtcctttaacatgtggtttgattatgccatgccatgcagaataatccctgcggtcgcaacattagtaagaaaataatgtgcacaaaattcattcttgatcaattgatttactatagctatgttttccagggggaaactagttgtcctaacgtatgtttagttgttcgaatgataaaatttgcacttttagttattattccatcttcactttactatgtgttggccccctttttgggttaaggttatcaatcacatctagaggtttaaaactctatctattggctccatttgctccttttctagatgtgccaaactgccaataagagcagtgcatggacttttggttcttcatttactgttgggtgtgtgttttgaattgcatgtcaaggttcatcatttgatttgtgcttcgttgctaatatgctttatttctggctatatgatcaatgtaatttattatataaaggattgtaatttttttatttattaaatgatctttattttttttatagtgataagatatgtaacttatgcactttgcatgtttcaggtgaaatttcatcaatataggaaaatagattataccatcagtttttgcacacggtgagaaatttaaaccctttatttctaatgggggttacttcagttcatgcatgaacacataatgcactatcttgattccgcagcacatacttgaagttgttcatcttgggttgaaagaaaaaggtcaaaccgattgtattaattttgcagcaagccaacaaactaattgactggtggctatgctaatccttagcttaattgaggttttttagtctggttttggttggttccggcggaaccgtggatgatcgcccttgccacatacttgtgccgaaactattctcttctaggactaataacttcttcattctatgacttctcttatttctcagcggatgaaatttgactaggagaggcacc

SEQ ID NO: 2135 - DNA, 2000 bp, Oryza sativa
  N_region (1695)..(1695): n = any nucleotide
  N_region (1712)..(1712): n = any nucleotide
  N_region (1729)..(1729): n = any nucleotide
gcacaacatggaggaccaaatgtagccatcgcttgtggagatgaactggatgggatgtgctatcagcctataactttggccggcaatatgttcacatatcctcttcacctatctcgaattcattgtcacctccctgatggacacaacttcaacaatactgacgccttgaggaaacatgtggtcgccatgtcccaagttaccaacaacggatgctcgttttcccttgtcaaccagatcgacaaccaccactagctcaaggagaggtaaaaggggaaggagaaggaaatgggaaaaagagacagaaaagggattggcttgtgggcgggtggatgttttgctcctgcctaatttttcttgatggtttcgacgcctagcacaagcattcttgtatgtattttcacgtttatatgacaagtaacatgttgtacacgtagataatatggtctaaaaaaaaagaatgtatagaatgcctaatctaggctgtaagcatccttcctctctctccgaatctccttaaaaaagcaagaggccgaaagttaatagattctcatgaggaataatttggcatcaaactttttcggttgaacttatctagacccaaccaatgaataagtattcactttgtatttggcagtcattttgatttttcacaataatccagaaattttcatccctattctcaactgaaaaaaaaagaacggcaagcctggtaaaaatggattttcgctcatgcgtattaactgtatcaccgtttatcagtatatatgagtttgcgtaccatgtaggggttgttttgttctctaccttaccaaatcattggtaataccaaattcttgacatgttttggtactaccaatttttttggtaggatagaaatttattatacatgtttggattactaccaatatgatgtcaaatattgatgatataaagaagaaggttctagattagtgacaaattgatcattggcattatcaataatttggcttcaatccaaatccatactattactattcaagataccaataaattggtaggacacattttggtatcaatccaaaatcgctcgtacttcctgcattgcataaaaaaataaatctaatatgagatggagtacaatttttttatgaagggagtactacctctatttcaaaatgttattaactttaacacaatatcttattctaaaatgttgctatttctctatctaacattttctctcaaccaatcacaatcattttctatttaattttttatctatttttttctccaaccaattataatatttttccaatcattttacctgttttttaaataccgtttccatataaaaaatgctaacattgtgtgacggagtaatatgagcgtcatcccagttcacagatgcagctgctgctcccgaaccgtaataaaggctccaggcctttactatttctctcccaccttttgctccccaccaccacctacctctcccctcttattcctcctcgcctcctccccgcatccgtacaccggcgcgccgctgaattcctaaccctagcccttgcctccgcctctcctccatggccgccgcccccgcgtccccgttcgcgtagccctccatgggatccgcccgcgccgccgacgacgaagggaggagaccgaccgggggagaagaatgaggtgctgcgccagccgcgtggcgtccgccgggtnccgggccatgggatttncgggtggggtgaaggcnacttcgctccgcagcagccgccgccgccgcgagctgccgtcgccggccccgttctccgagcccttcaccgaacgcccggcgatcctatataattaactggccgccccgcgccgtctctcctccgctgcatcggtcgccggctctagctgctgaccgccgtgcgtagcgggcgcccgcgccgctccacgcgctgtcccggcgatctcgcctggctcatctcgctctgcttcctctctgcttcctgattcgttcgtgcgcgtggggtgatctg

SEQ ID NO: 2136 - DNA, 2000 bp, Oryza sativa
  N_region (1799)..(1799): n = any nucleotide
cgtcagataataaacacccggtggattcaattccccaaacaggaatagggtattacctctcattgagagggtctgaacctgtctaaatccctgtctctgcatccatccacttttaggtctcgtacgctacctccttttcatattgccgaaaatttgtttcgacaaaaacacaatcagtaatctttttcagcaaaaggtcatcggcagttttgatgcactgcacagagctgaaaagtcgttgaaactactcctctgtaccagatatctaaccaaaatcttttatattttagatcggatggagtatattggcataccgtgtgcccatggcttcgtttcaccggcctttcgtggaaggatagtgtgatcgctgccatttttgcattttgcagttgcaacgtcggtctcacagtcgtcccgctatatcgttgttgacgttgctggatgactactataggctacatccatctgtgcagagtaattggtaatttaaatgcctactatatattataacgcacaaacctctaaagtttggtggacgtgaacatgtttacacctgataattaccgtgttaatacgacctcagtagacaacaacttaaacaaaaaaaaagattatgataatagtgaaaacctagaaggtacaatcgaaaccttcgtatttgttgacacttgagcaatttctccactcctaaatactccctctatctacttttgatagttatatttctaaatctgaaaattttatttttgataggcatatttcaatccaacaacctatcatcttaatgactttctcggatttaatgcgtgactctttattcttccacacaagatttgctacatgggtatcgagaaatgtaaatattaatgaatcgcttgtttacgagaaataactagtagcatatttaaatagatgataagtagaattacttatccttggtctgtgtgccaagatgaaatatgacttttaaaaatagatggagggagtatatctccacctatatagactaaaaaggagaaaaagaaagaaagaaaagaaaccatcgatcatccatggaccatggttcaattcgtggcaacttaaccatgaagataggaaacatggaagggctactattattatactcaccgtggatcgaccataaaatccacggagagcgggagagcgcaggggttgtctcgcgctagcgcactcccatctcctcgtctcacctcatcttctcggcgctaataaaaagggaccctgagacttctccgtctcaggtcaaggcgacccgacgacgtgacgagagaatctctcctctctctctctctcgctctcgcgtgaggaatcctcgtccgtcccggtcccacgctctctcgctcgctcgctgacgtgcgggacccaccggtgctgctccgccagtccgcgtgccatccgcgggagccgcgaccgcgaccgcgaccgcgaccgctggcttccaccccaagccccccctccccaacccgtaaacccctccagcagcagaggcctttgcagttgcttcgccttctccatctctctgcttcttttgtttgtttttctttcccatctactccgctcctccgccgttgcctccccggctcgccgtcaccgggagacgcgaggtgaattccgctcatctccagtcccttctcttattttcttgcgatgatcttgcggtgttgcagaaaatagtttaaaacctgcgcctgttttcatctcatcctcctctcttgtggtttcttgatgagcgcaggcattgcttcttctcccatgcgccgccgcaatctcatctctcngttttttttttctgttttctgtttgcaaggtcctgacctttttcaaaggcgcgaaagattgtgtttttcatcgtcttggggggtgtcttctgtgatgtgctttcaagaaaccctcttctggtttcttgctccacggcggcggtttgagtctccgtctcactgataatccgatttggagcgcgattgcgattttggaggggt

SEQ ID NO: 2137 - DNA, 2000 bp, Oryza sativa
  N_region (108)..(108): n = any nucleotide
  N_region (1923)..(1924): n = any nucleotide
  N_region (1929)..(1930): n = any nucleotide
  N_region (1933)..(1933): n = any nucleotide
acatggtgaacgacgtatgcatgcagcttgaataatgtgcatattgatgagaagccaagaaatcaacaatcacaccattagttactcatcaatactgatttttttttngttttgcatatgcgctcatcaatcacgaacgaagtgagtagtactgaacacataaaagcgttgtacctctaaaacctgtttgcttctgaatgtcaatagtccatcacggatctcattcttaagaacattcactaggtcaattgaactctcacagcacttcagaggccctataataaaaaccgttacttttagattctcagtgttttaggtagtcagtacaaaatgattatcattaggggtatgacacttaccttcaccttttggagttataacctctgatccagatagaccaacaatatcgacaacactgacctttccctgaaacaaggttaaaacacagaacaattaattccaaaagccacaaaagattaggatgctatatagcttatatagaggaaaataataatgtttaccatgacttgcctaccatataaatggccactatgaataaaaactcaactctgtaatactaattccatggttctatgaagtaatctagtaaaatgaaaaaaaaaagtagggagttaagaaagaattatcaccttaaatatattcatgccatgcatttcaatattctcgcctgcatacttgtatggatgaacattctacagtacaatgtaaagaatgggagattagtcagtagataacagtcctttccatcagtatatctatgcacaaagagccaaccatggccacacaactttgcaatgaacaagaaagtgtagacaaaagttccacctttgacgggacaatctcgactgctggtgacggagggtgtgactctctctcgggcacgacattaacgcagtgggctgcagctttttcatgcgacaggaagccggccaggcactgtgagagaattgaaggtgaccgcattgcctgaaacgaccaaatcataatgacggtgaaaagaaatgtaatgcagtagcactgtaatgatggtgaaaataaaatgtaacaattcttcgtaatgtcaatacaatcaaagtgacgacaaataaagtgtcaaattatcaaaatcttgggcatgtaaaatttctttctactgggataactcttcttgaacccttctcacttccaaaggacacagaaaatcaacaactggggcacaataggacacccattcctaccggatgagatttcatagccggaaaacttacagctacatcacacatcaagagtacccaaagtagaggggaaatcgcaatgagctaaacccccattgaaatgccaaatgccacaagaaacggcccaaagacctgttgtcaacagctaaaactatagagccaagaaacatcacatccaagttccaacatcacaaattcaagagaagatcaagacatctcgaaaagagggagagaagatgaaggaagaaacacttacttgtacgaacccccaagatctgtccccaagaatcacagacaggttccaaagaaaagtcgggacaaaaacgcaaaattaatcaatcaagattacgaacaggaggggggacagatgatatgagatgagcagaagaaagatagagaaaagctaatcaaaacaggatgcggaagagtggtggcgagtttggcgactggtgagaccgaagaaactgcgaactgcttttctcagtgccaaactgccaatgccagtgcccccatcgatttgcgagataattacggaaatgccactagctccggggccatcgatgggcccgccccggcccatccggcccacgcgacgcagcgccgagaccaacggccagccacgcagcctcctcgacccgtgtggcttccccttcgctttacgcgcgcggcgcgaggaggcgccccagcnnggcgnngcncggaaaagggggagagctggagggagcaaagcatccatctgcggcgtcggcgtcggcgtcggcgacg

SEQ ID NO: 2138 - DNA, 2000 bp, Oryza sativa
  N_region (86)..(86): n = any nucleotide
  N_region (222)..(222): n = any nucleotide
  N_region (445)..(445): n = any nucleotide
  N_region (962)..(962): n = any nucleotide
  N_region (965)..(965): n = any nucleotide
  N_region (1455)..(1455): n = any nucleotide
gagccaggggtcgagcggctggtaggtgaccggcgacgacgaggacctgtgacgacgttgcttgccgccttgatgagtcactgcangacggggacctcgccgatggggattgaccaccggaggaacgcggcggcttgaaggtggagtgcgacggtggcgcgcgaggtcgccgagggcgcctcctcgctcgcctgcgggaagccgggaagggaagttgaaganaagggagagggaagaagagagaggaaagagagaggggatagggaagaagggaggtgaggctgacatatggggcccacgtgagccccaccatttttaattattttgtgtttgttgctgatatgtggggccacgggtttattatttttggattcaaattgccacataagctccacgtcaaatgccacgtgggacaaagactaagttaaactagccacgttggcgncacgtcagccaaaaccgccttccaaaccgccaatggacctggtttgcactggttttgatagttgagggacctgttgtatctggtttttcggtagaaggacgaaagtcggatttgttgacaagttgagggacctcggatgaacttatttcccccgtcgtaggccttctaccaagtagataagcccactaccaacccgtccaaaaccgcagaaaatcagcagtcctcaccaccctatggcgtccgccgccgttgccgccgcggccgcgccgctgcggcgttcgctccttccctccctcaacccgagctgtctcttctcctccctcgcgtcctcctcgcaccgcctatctctaccgcgcgccctccgccccgcgggccctttgccctccgatgtcgaagactcggacgattcgaatgccggagacggcgccggcgaggccctcaggaagagccgcaacgacctgaaacgggaggctcgtcgcgccgtgcattggggtatggacctcgctaagttctcccntcnccagatcaagcgcatcctcaggtgcctatccagcctaccttcacatccgattcttggtagtacttcttgttggagggcacctagtatgtgattcttgtttctcagggctgcgtcgctagatcgcgaggtgttcgacgctctcatgctcgtgaaggtacatcctttgttctggtaatagcttgtatatccgttgttcttgtaatagcttgtatatttgattgcaaatcacgtttttgtctgttttcttgttttgtagagatttggatcagatgtgcgggaaggaaaaaggaggcagttcaactatatcggtatctttacttactgggttaattggatccatgccactgcaaatatgtcaattcaaaaaaatgtcactactattcagtatatcggctacgtggcactgaaaattgtggaaattggatccatgccactccatcacgttttccgtcaaaaatctttattagcccccagctgcacgtgggccccnacctcccttccctctcttctctttcctcttcctctctctccaccaccgtagatgcggcaggaggtgtcgtctccgtcgtctccatcattgtcttagagaggtcgggccaggctgcgcctgcgtcgtcgttgttgtcgagcacctcgtctcggagccggtgagccacgcggtctctgtcaccgttcaagggaggaggaggtggtggtggaggaggcatcaccgacgactgagtacccatccttgccaccgttgccgaggacctccatgatgcgcggctaaggcagcggcagctagaggggtgcgctatcagcaaggaccctctcctcaattaatccatcgctagtacgctgctctgatggctcgcttcgccgtcgtcgccatcatcgtcaccctcctcgccgtcacggccgctgtgcaggccccgggagtggcccccatcccggcacccaagatggccccgctgcctgctcccccgacgaggtccccggccaccgcttcctccatcccggcaaaggacaagagtccatggtgcaacagtcacaaca

SEQ ID NO: 2139 - DNA, 301 bp, Oryza sativa
  N_region (49)..(49): n = any nucleotide
atcccctgatttgcccttttttcagaaaataccccctcgttttagcccnttattatttcgcggagtggtcccactgcttctagatgcgtggacggtggatcaaggcgtgagcccgaatctcaaagcgtcagcgcctcccaaaacgaagccctccttgctcggctgttcccttgctcccctcccgactcccgtcccccgccgccgcgcgccgccgcccagagagagagagagagagagtgagataccaagctcgaggacagcaccacgcgcgacggcgagagagcgtccgtagcccaaggcg

SEQ ID NO: 2140 - DNA, 2000 bp, Oryza sativa
tgatttgtcatctgcaacgtaactggcattcaaaagagaactaggtactaactgacaaacatgtgcaagaagagatccccacctactgttctttggggcccaccacacatgcactgatcagattgacaagtacacacagtggctggataatgcagctagtggcacgtaatagaaagtcatagcgtaaattcaaaggtgtttttgattattattctgtgatgaataattggcattggagattattggttttgatatttggaatttattcaagaagtggttttggagatgattggatttcacaggtgaatctacaggtactgctgttatttcatgtgaccggtcagaccggcggtacgtgcgtggtcagaccggctagcccacggtctgaccggccgactctgtgtcggtttcggtttcgggttggtttgttcggatatacgtgattgtttcattgttacgacttctagatggatactatacgtatgtaatactgttgtttgctactaatgagtcaagttagagatagcttggtctcggaatatggtttctttgtttatttcatgtgtaggtgactcgatgcctcgggagagtatttgcggtgatggaccgggagtcggcttggggataagacgacgtccgtggtggtcagagatcatgcgggatatttatgctagagttgatgcacgtggttggtgaagattccatatggcatacgatataggtattgtgtgcgtatgggatgcggagtcgaatttggaaggagtccaaatttggtatgattggttatgtaaagtttgtttcttgtactataaggtttcctaaggtgtttagaatttctagtatgagtttggttcgtgactttaggctgcctacctcgggtataaatagagggggatcgtgaggcttcccggtatcgcttttgagagcaattgagttgagtttagagttagggtttcgagtttagtcgaaattttagtaaggagtgctgttggtgcactctgtaaacacagagagaatcaataaagtcgtcatccactttaagagttcttcgatttgtgtttcaccgggtttcggcggtctaaccggtgatataccaacggtcagaccggcggcaagcggcggtcagaccggcgtcggcgacaggaggcagcgacaaggttcggcggttagaccggtagatcaacaccggctagaccggcggctacgcttcggtcagactaatctactccggtcagaccgatctccatcgatttcgagggtaacttttatttccgctaaaagttttcggtttttgcgtaccaaccattcatcctccctctggttggcttagttattttgattcgttcttacaagtggtatcagagccttattttcttctttggatttttatcgatctagaatttttgccatggctgcttctgttaggttttcaactaagcctcttgtttttgatggaacagatttttctcattggtgtagtaggatgcaatcttacattatggctgaagattatgatatttagagaaaagtttctcatccttatgtgattcctgaagtaattaatactattgctgcaaaaactgagtttgaacaaaattgcaaagctcgcaacattcttttgagtgggatttctattatgatcgtgttgctcatcttcaaactgcccatgagatttgtaattctttgagtaattttcatcaaggaacaaataacactaaagaacttcatcgagatcttttcaaaaaggaatacattaaatttgagatgaaacctggagaagctttggatgactatctttctaggtttaacaaaattttgagtaatcttagatctgttgattcttcttatgatgctaattatccacaatctgagatttctcgccactttttgaatggtcttgacatgtctatttgggagatgaaagttacatctattcatgagtcagttaacatgtctactttgacctttggattcgctttacacaaaattgaaaacacatg

SEQ ID NO: 2141 - DNA, 2000 bp, Oryza sativa
gggccggcgatcgccagacggcccatcaggggcccatgagcccctataacattatgtacccctataaatgtcccttttataagggtaatcatgtaaattcccctgtacaacctaaaccctggtagtaagaacctgtaatggggctataaatagtcccctagggccatgtaatggggggatcccaagtgaaattcaaaatttaatacatttcatttttccaaccactgttgagtaaccacgtctttcgacgtatgcagttgtcgtttcgacaacattatgtatctgctagcatactgtttggtagcattaaaacaaacaaacaaattaaacaatagtaataatgcttgttcttttttgtaattattattactgtttgctctagggccattcacagtgcaaaatactactacgagaagcctcgtagtgccacataggacagagacacatgtctcaaatgactttctccccacagtgcaaagtagctttttagagatgtttcagtcttgcatgccagaccccttttttttaattatagtccccatattttgtaatttacaggaaaccacaatattttgccccaaacaccacataaattagaaaaagaaatataaattttgcacctccccttcgctcgcaaggaggccaccctctatctcctccgtgcaccgcgcaccctctcccgaactgcaccgtcggctctccttcttccccgccccatgccgtagtcctggatctggtcagtgagcttcaacctcggacatccaagggaaaaagtgggggtgatctagtactactatggtgtttagtccacatctctatggtagttgcttttgcaccatttgtagcagcctcaaagtatatatggccaatcttgcaatcacctactcattgtttgttggtgcctttcttatggaagtatgtgctatcggcattgtgatattgtcatcaatgacataggcacattcgagaacccatatgtcttagtttatctatcaggaagaccattgaggagcagagaagttagtggtgtcaatttctatggggcaacttagcctaacaacatatgtaaattttacatcataggtccacacccaggatgatgttgaaggcacgtttcctctaatttcagaggataaacttttggattaaaatgacacgcttttcaaactgctaaacggtgcatttcgtgcgaaaactttctatatgaaagttgatataaaatatcagattaatccattttttaagtttgtaataattaaaacttaattaatcacacgctattaccacctcgttttacgtgaaacacttaatctttatcttcatcttcatcttcaggagattcaaacaccactggcttggatacgatccatatagatgaatcatgaatggcacgtacaaacacgtccagtggtggtggcaattaatgaattttcatacaactttatagtaatccttattatatgctgatgttggagttcagatgctttcctgctgcttattattgaatgtaagtcattgatattgtttgatttgtcttcagttttgatgtgttctttgttcttggttttcttcggctatatgatatctctcggctatatgctagcttcaaaattttcactaaggtggccactaatagaataaacaggtggctgaccgtatagtgagtccaactcaaacagctttcatgagaggtcgcaacatcctagatagggttgttgtcatacatgaaactgttcgtgagttgcatcgcaggaaattgagtggggtcatccttaagattgactttgagaaggcttatgacaaagtaaaatggcctttcctactacaaactcttcgcatgaaaggtttctcgccaagatggatttcttggattgagtccttcatttcgggaggaagtgtagcaatcaaagttaatgatgacattggacggttctttcaaacaaagaaaggccttcgacaaggtgatccgctatctcccattttattcaatattatagcgg

SEQ ID NO: 2142 - DNA, 2000 bp, Oryza sativa
  N_region (828)..(828): n = any nucleotide
  N_region (1072)..(1072): n = any nucleotide
  N_region (1075)..(1075): n = any nucleotide
  N_region (1077)..(1077): n = any nucleotide
gatgaagagatgtcgaagactgtggagttgggatctaggttcagcagtcgatgcctatggagtacgttggaccgccgctgcttcgcttccgctatctcatctacttcttttggtattttgtaatgtacctgacaatgctcggtctatttgggtcccatttgggctacccttgtataattaatgtatagttcaacctgtataacgatgtcagcttgtgatatacaactgtgccatgtgtgtaccatctactgatctagggaatggtactgtaaatcacatggggtttcctgtgtgtaaaactgggggcccacatgaaccctagggcacacaccatctttgtcttagcgcacgacacaattacaggtccgaaggtccaaatcagacttatactggaagatgtatattacttgtttttcatattcctgacaacttagaaggaattttaatgttggaccagcaccatctaaaagtatactccataagctttccaacaaggaataacgggtcccaatagtacttttggatcaatggctatgcccatttgaagttgatgctctcagaggtccgaatccaaattcaaaacgtgtaaaattttatctcttacttcttgggaaagatcttgatttggtccctaataaatttctttgatgatacattcatttcttgcactcggtatttttcccttctcccaaattgttgggaatctctccctctctcttatggaaatcactctctaatctccctcatgcaattgcttactagttccctataagtttcatgcacacacacacccacccactagaatattacaagtagaaaggaagaatngggaggtgcacacatggactacctcttgctttctcggcagccatgacacatattttcattcctctatcaattacttatatacaaaaccgaactgcatatgtgcagaatgaaagatcctttgaaacaaatagtttttaattggttacaaactttgtaaaatcttgggtcctctctgtaatttaacttcctgtaaatattttgcattttaatggaaatacagtgttgggcaaagccgtggcagtcnttntnaaaaaaaaaaaaaggtgagcaagcactgcatggatatacatgcagctcacacgactaacaacccaactaactcaactaatcaatcttgcatgcacacactaactcaacacatgcaagctaaccacctgatctatccatgcatacacacacattctcacaatgtgtttgtgcacacaattctatatgctaacaaacacataaatggaaaattatttccaacaagaacacactaaacttataatgcagtaacgtttattcaaatatataacacataaatcttacatagaaagcatgcaccgttggttgatgaacacataagatagccatggtcatattcgagccaatgttatcctcataaggtagcatttacgatcttctaaaaaagttaattttaatggtaaaacgtgtgctggatttgtgcgtaatatacatgagatcactaaagaaaacattgagcgaatgaacgaaaagtatataattgtccgtagtgattgttgaaaaaactaacttttgaaccaaaagatcttgtttggttatacttgcataaagaccgatttcctactatgcgaaaatctaagttgatgtcttgagctgctggtccttttaaggtcaataattgtttcaaattaaaaataattcaagaaaattgtaaatattcaccttaacaacacttaaacttcaaatggccataacttggtcatttgaactcataattggaccgttcagatctctaatttttccataagaagtcaagaacccatttatgtgctttgtttcttcctcttatgtggagtttattagagtaaaagcctttttattttgggttaattggatttgtgcgattacaaattttctcgtttggaaaaataccactggtattcgtgaaacttgccatgtgccattgaatttttttaaaattcgaa

SEQ ID NO: 2143 - DNA, 1247 bp, Oryza sativa
  N_region (3)..(3): n = any nucleotide
  N_region (10)..(10): n = any nucleotide
  N_region (13)..(13): n = any nucleotide
  N_region (18)..(18): n = any nucleotide
  N_region (24)..(24): n = any nucleotide
tanctaatgngtntgtanacatanagggtgccatatatatattttgaagagaatatagggtgccatatagtccctgcatctagccctccttgaatacagaactaaatgttgtgtaattaagatccacaaatattcagataccttacatttgttagagttgcttggaagctgagattacatgactatgatattcagaattaaatgctgaacatttgttagagttgcatatagagctaaatgttgccaagactaatttgttgcaaatcgtaacttcccaaaagccattacaggttatgttttaaagcctcaatacatggataccatagccataaaatatttatacttattctctgttcccattgtttaacatgtaactgactgaaaagcttgctcactgtattttgttatcaggtctaacttgagcaacagaacaggaatggctaagtgggggtgtcaagactcaagaagttcagaaagtaaaatacttttcatgccacatgtaagaatttacttacaatcagacaattccctagtctaactccaaattacatacccgaaagttgaagcagtgcagggacctgatgcatctgccctgatatcggttctcgttctccctgatagtttgagtaataacacctacagtgtgacccatgcctgtattgattatcaggcgccacaagacatgggctgtggatgccagatgattggagaagagaccagccagcatcgtgacactgctgagtctgatacacatcatgaggtaatcagcactttaaaattacttgatccggttacttatgttaggtcatcaactgatggtttcatcagcaagcatagtaattctatatgacacaggagcacgtttctagaggacagagactttcatgattctattttccttgtttggtatcaaaggtgtttagaaccatgtagcttagttatataaatatgaattaaactataagcaaaataactatacattgtctaggaagcaagtcctgttgactgcttcaccctgcgttgtttttcctctggacggccacgggcggctagccggggaggcgtggcagaccgcatttggccggcgcggcagcggcggtaggagtgctcggaggccagctcgacgcatagaggcgcgggctagtggcagcggaggtcggcacggcgcgaggaggcgcagctggcggtagtggaggctggcttggcgcgaggaggcgtgggcggtggcgggaggctggcttggcgcg

SEQ ID NO: 2144 - DNA, 2000 bp, Oryza sativa
  N_region (1555)..(1555): n = any nucleotide
tgatcttggaggcaggagggctagcgtggcagtgctcgatcagagttattacctccataggcggtgggtctgacaagacggtaggcgatggtcacatcagatcgggtgaggccaattctcgagttcgatggaatagcgggtccatagatctagcgctatacgtggtagacctagagagatcgatgtctttagcagtcacccgtgctctccctaagtgtcataggtggcaagctttgcaggaggggacttgtagttttggctagagacattggcttggtggaggttggcaaggtgtgcactactccaaccttgatggtgtgcatgctgtaggatttagcggtaaccatattgaggttcttttgacaacaaggactcctgaaaacggcattgaatcgaactcaccacacctacactaccatgttgaggttttgccttgctcaggcctgaaaacggtattcgcccaaatcattcacatgttgagcttctttgtgacgcctagggtctgaaaatagtgtggacccaacttattcatacgttgaggttctttgtgacggccaggacccgaaaacgttattggacctacttcatttagttgaatcatacttacactgtactttcattctcgcttcaaagaaaaaagtttgaaccggtattatagatcaactgatagcttttctatttaagctgatgttgctcgaggttggcaattattcgtgttacgctgctggctgctgctgccggccgctgatgctgcagtgctattactgctgctgggctgcttgcttggttgggcctgctttgcggcttgggctgctagctagcttgctttgctcttttttcttttcccccaattatttgcggggttacattcttgttcgactctagtcgataggaatgcagtaaatgttccttagatttgacaaagatttccatgtcaatttttatttgagtccgataaagcgcgtccaggaaatccacgactggacaacaagcttaaaaaagttcaaattccaggcagctatagaaatctgtccgcgagtacactaggggtatgtttagtttgcgtcaaaattggaagttttgttgaaattgaaacaatgtgatggaaaagttaaaaatttatatgtgtagtaaagttttgatgtgatggaaaagttggaagtttgaagaaaaaatttagaactaaattcagcctagaaaaggtcacacgatatagtcattgcaattatcacggatccaggtcctatacagtacagcagagaagaactgtagctacagcgttctctcctccactgcggaggatccaaattgaattgtcacatgtccccaacgatactgttgtgtggtgttatccggaagtttgctccctattgtcttaaagaaaattctagaagttctcttccataattagctttcaatccagttttagaggatggttgtcagtatgttaaatcataaaacgccatgtagtgggacatttcaataccctactctgtacttaatcttcaataaatttgtgtccttgataacgtgctcacccccccccccccccccnaaaaaaaaaagtccggattgaaaatcatccccggcggctactaggctgccaacctttcattatgctcgaccaacgtggcgaacacgtgcgtacgcgcaggagcagggcggcgcatcacatcacagcgaatagttggcagcctatttcaatagttaaatatttggagtatcattttagcaaacacacgacaatgctggcgcataattggaaatggattttgtccagccgcacagcctgacggtatcactcacgcacaccaactgctcgctgcttatatagcctcaggtcattggatacgtaacatactgttcgcaacgctatatatatcgctatcttggcagccacgatcccagcattccaaataagctatatagatcatcatcaagactacgtattattcactattcagggcatccatcgatcagagaagagagacgagcgatcg

SEQ ID NO: 2145 - DNA, 2000 bp, Oryza sativa
  N_region (965)..(965): n = any nucleotide
  N_region (981)..(981): n = any nucleotide
cgttgacgacaacaattaattgtgcgaatcccactggatcgttgggtacccactggcaagcagctggtttgacacagtatgcatgatcagtagacggatcgatgcatttacgcggtcgatcgattttgtcgcagatttagtcatcatccaatagggaatcaaattgatatgatcactattttcgcctagttgatcggtgatgggtacaagataacagaaatttaagggaaaattagttaatcatagtactgcaagtagcaatacgataatgcatggtacacaaagtacaatcttacgcactatgtacagcgtgtacttggggccgcgattgagtaggtttgaaattaattagatatatagtgatggaaaagtctgacacaaattctctgaactattcgctctctttggtttgaaaggttcggtctcagtctcgcctacacactgtcagtgcaaatgacttgcacacaacatcgttcgagccagctagcgagatgtttgtcaggtcaggaaaatagttctcaaattccactagtcactggtagttattagtacctaacaacagtactggttgttgtgatgtctcgctctgtattacaaaaaaaatgcttaattacctaacaaattaccaaatgaaaatgcctttacacaaaaacactccagtggcaatctatggagctgaagaagttctaattgtacacttgcacagacagaactttacacacagaccatgctgtcatgtattgacgcgtacattattattttcagtgtagtagaacattgaagtcgatcattgctaattatcgtgaggacctttagtgatcctcaagtataatgctagccttgatcattgctagttttaaaattctgaaataaaaattccgaaatttcggatcaatcgatcgccgccccaatccctcgccatccccaatctccccaataggaaactatttcaaccaatttttttnggaatttttctttttnggatttagcaaaatttatttcaatttgaccaaatatatttaagagttcaaattatttcaggccgaaattatagcaatatctaaattttgtatgttatcgatgcctcgataggataaggataggattaggaaaaaccgatatattaagccctgatcataggtgatgtgcgtgtgtttttcaagcatgggtgcaattgaagaattaaaaaataaggatgtgtaccgttgagacaaaacggtttggtcactagttttttaaccccctcaacctcaagcacatggtttgttgcaaactactaaaataataagcattcttatattcggcaaccaagatttggtttcaacaaaatattcagcaaccaagatatacggggatctagtttatccatgccatctgctgaacagacccatgcatccttcaactaaaatgatttattaatcattacatgactaaaatcataagcttgctaaattatgaccatgttgggtataggatattatggttgttgttgaatccttcggaagcattttaatatcgaaggaagtgttcaatctttttgagggaaaaggaagtgttcaatctgccaatgacaagttcacaacaaggatgcttcctaggaaaggagaaaattgaaatgagagtttcaaagacattgtaccttttgtgatatttcctgaaaacatgaatggaaaatgtcactccatatgaactaaagacgctcattcctttgctccaaacaacattagttggtagcaacttagcataaaattcagttaatttacttagtgcactgaccaaacatcctcgtctactcttgcatacacaacacacaactactccctagtctcaagtcacaacccacaacaaggcaactactcctagctagtaagcatcaatgcatggtcaaagaggtctatataaaccttgctatgtaagcatgttttccacacagaagaaaaagcataagctacacgcactaagtacagacaagagatcgacaaacataatctaattaatca

SEQ ID NO: 2146 - DNA, 2000 bp, Oryza sativa
gcgattatggtcggcgggaggccgcaacagccaatcgatctcgcctctttgcgcttccgttggaaccctatttctccggcgatcacccccctcacgatctccgctgcactctgcgctagggcactccggggaagacgaagcagcagtggatgacgaaagaaaatgagaaaaacagaggggcctcgatgaaaaaaaaacaagtgtggccggtgacacacacggtgcgcgtgagaaaaggcacggtgcgggccagctcagctgtgcacatggcatgccacgtcggcgcgaccacggtcaaatgacattttggaccggcgatggtacatttagcaagtttagtggcctaattacacgatttacaagttaatggacctagatgatatccgcccgcaagtttaagggccgctactgtattttactcaaaaaactatactagaggtaaacgtgtgacagtacaagaccagtcaaagtctttccaacgtctctcgcatgctgtacgtacgtactataacacgtagtagtagaaccgtacgtacgtcttcgtgagttaggtaattaatatgcggctacacgagaggaaaaggccaaggaaaatcattggaaagttcattgcaacgtgccaaatattaatattgcctctgtgcatgctcaacgttatatcttgtgcctccagctgggcatatattatggtatgatccttaattttaatcttgaaagaaactacctttttaccatttctttaattctttagataagaaaaagaaaaatattctctagaaaccatatctgtcacggtatccaccttgtcatcggctatgtcagtgttactcgaagctttatttctaattaagggtatctttactctatgtgtgtgtgtatattgatatttctcaaccaggttatgaatagggcccactattgttgttgtaactttaagtattgcattagagttagaaaagggatgaacctagctttgggttaagccctcaaccggttcgtggagtgttgtggaaaaaaatggtgacggttacctctgacgaacgtcctccgtcaaatgtgagtaaagtcatcagcgaccactaatctctgactaggaccaaaacacgtcaaaggtgacggtttgaataccgtcagagatgacctgattcggcgtagtgtgcatagctttatatgagcctgtacttaggccttgagctatggccgaggtagcccggttatgatccatcattggttgggagccatcacaactttgaaagacacattttcggataatgtgatatggatacatatgcacacacactagaatactagatgataccccgtgcagtgcagacggaatattggtgtgtgcaatgcagttgtaaaatttcaatacgtacatacgagaaagattatatatacacgctgatatgaactatagaagtgtcatccaatgtgttgtcaagtgatggtgtaacttctttacagtaataacgttctacgctagctaagtaaatcactgaatgctaagttatttactaattagtgatgaatagtagctacaaaatggattaagcataggaatgatccaatatatggctctctttttttaaaattatgtggtttaatgcatgttgagctattggctataggatatataaataagccagaaaaataaacatcaagttgcattcactacctgcccagatgaagaaagtatgcagctgagctgtgtgccaaagactattaaagtacagtgtgaatacatgcatggaaagtttgcgacaattgaccacttaattatatttagtggaagtaattaacatctactagaagcaacgtgacagtgcaggaccaagtctaaagtgtctttccaacctcgatctctcgtaatcgagcttagctatagctctcatgatttaactgctataaatacctcagcaagcaacaagtctcagcacaagacattaattaattagcttgagaaactcatctgctggatcgagcttctctgttaatta

SEQ ID NO: 2147 - DNA, 2000 bp, Oryza sativa
  N_region (595)..(595): n = any nucleotide
cagggcctattcgaaaatgtgttgggcacggatgcgtcaaacgtgggtggtccctggccgttggatccctgtcaacgccggctcacccttcgtcctcgccgttgcaggggacgaccgacgacggtgatcgcatggatgtcggtgccgggagctcatcagcaacgaggtcgtgcgcgagataatcctcgctaggatttcccgtcgctgagcgtgagaagcatcgtggactaatccgcaggtgcagggcgagcaaaaccaataagaattttctttctagttgtcctcgattaagccaaattaggaaccaatcttctcgtcacgctacagagttcaactaattcaccttgaaaagttgatggtcacaaactcactagatcttctgctcacaaactcactaggtattgctgtccaattaattcagttgctctatgttttcggcaattagaatttcggaatctatgctagatttgtcgagctcagttcctcaggatcttgacatgtgaattctctgtctgctttcatttttctctgtctgaggatttcaacttttggattactgcgacactgatccatgctttgttccttaattagttangtgttgcgcgagctatcgacttcaaaataatatgctttttttttgtgatcgactgatcgccatatacctgtacgtaatgtgagacgaaaccactattcaattttgcagctgacgttgtgatgttgatgcctgatggtgctctactgctctgtttcctgcgttcccgaaaaatactgctctgttaatctgtttccagcgtaaattaaaacaaacggccaatgataatcgtttttaattttttggccgagtcatcacagactcacagtatgtcaacaactgatgtcagtacacccgttctttgttattatgacacatcactgtcatgaaaaccacctgataggttaacaatcagaaccaagcagtttctgattctgagacccattcttcagaaatctggaaattctacgatatctatctgcctgactatctctatctcgatctcgtccaggattgttcttgcgaactaatggttgtacgcaaattcgtctccctactgcagtctcagtccaagtttcctctttgatgattcttcgaacttatcgcgtagattgggactcgcgcatttagccgaggaaacacgcttagcagcaagactcgatcagctccgatcctcacgttgaagcgatgaaaaaaaatcacctcgaattcgatccaggcggcgagacgtgaccaaatcacgtacaagtcgtcgtcgaacagacctggttgtttaaactactaattctaaactgcagagggtcagagagaaagatcgtacgaaacttgtactgctaatcatgcaataagcatgtgttaatgccaggacgattcactggggaaggaatcacaccgtgggcatgctgttgactagcggaataataccactgatttaagtagggtcatatattgatatatagcataactgctaactgccagttgctagtgcctcttcggctcttccagctgggagtcgaaacaaacaaaagagccgtcgttaagcacgtccaagtaattaaattagtacgtagtagtaatccctaagctaaaaatatggccagttgtagctgacagctaggagtaagagatgggcaagtagagagtatagagaggaaggagagaggaagcaatatgggagaacagtagtgaagcctcgaaccggctcggttcagtccaactcaaccacgtagaaacgtgcgggtttacacggtggcgaccgcttcaaatgtgcgggagctttgactggtccccagccagctcgcctataaacgcgcgcacgctcgagccagctaccacggcatctgcttgagttggagcaacacaccaagaaggccagagagattcagagaactacaccgagaaggcgagattgtttgcgtggttggtaatttggccggccttgatcgatcgagcggagaagagaagagaa

SEQ ID NO: 2148 - DNA, 2000 bp, Oryza sativa
  N_region (879)..(879): n = any nucleotide
tatccatgattcaattaaaactactcagatctgagttggaagtgccatgtgatcgatcattacttcacggcatcacggcgagctggatgacctgccatatgaccagcaagcttatcaagttatcatcccatttcagaatgttccgaccttgtttagttcctaattttttttcccaaaaacatctcatcgaatttttgaagtattacatatagataaaatgaaaaactaattgcacagtttgtatggaaatcgcgagacaaatcttttgagcctaattagtccataattagatataagtgctacggtaacccgcatgtgctaaagacggattaattaggcttaataaaatcgtctcgtggtttccaagtgagttatgaaattatttttttttcattcgtgtccaaaaaccccttcctacatctggttaaacgtctgatgtgacactcaaaaattttcttttcgctaactaaacaaggcctcaaaaccggaattcacacccacccacaatcatctcctcctagaaacaattcagtcagtcagattcaccgcggtcaactcatcacgtcagttaaaaccaggcaaaatatcgcctgcgacctcggggtaatttggtgtagcaagttattaagggacacgttatatttgatattatgcttcaagtacatgatttaaactcgacataaatatgggtagcctaaaatgaacttattccttttaggcgcgcgtgtgttcatgctcgctgttggacttgtaatctgtctgaactctggatgcccccatgctcaattaatcagctctgagttggaagtactctatcagagcatcactgacatgcttctaagataccttgctgtatcatactaccacctccatcttttnatatatgacaatggatagcctaaatttgaactagtcatcatataaaaataaactggagggagtatttgataaccctgctatatgtagggctcttgtagaggagattttgcatgcatgggattaacagggaacgacagaggaaaaaaaaacattttctttgatgaagtatatatgtggtctaaagtttacagcttttctgggcacatgttcgttgttgttatcgtcacgtatcgtcgtatcgatcccatgtatggacgacggatcattccatcacggcgagctggacgatcgacctgccatatatccatatgatcagcaagcttatcaagttatcattccatttcagattgttcaaaaccggaattcactccccccacagattcagaaatcaaccatcacaatcatcatctcctcccagaaacaatcaaataatcagagtcaagtctctggaaaattaaggaactcacaagttgcctccaaagaattacagtttttcgacgatccaaacgtcatcgctacatcgtctgaaacctgaacccaaaccacaacatgcagaggagtacaaaaatgacgcaaattgaactctcttctaacggaagcatcctagctagctaagcatgcacctagacacagtgcagcatgaagagggttgaccgggtcgggtttgacttgggaaaaattaaactagactttgacagggatatatggatcaatggaagctgcgaaaacagcaggcagctcatggtttcgagctcgaacgattcgcagagagcgagcagaggcaaaaactcttgtcagcccacaggaaaatttgctgccatgccggcgtgcgtatatatatcgcatgcaagctggtttgcatggcattgtgcagtgaacaagagacaaggacaagaacaagctagccggtcgagatcagtttcagtttcaggcttagctagcacagcaacagcagcgtcgatcgatatgggccgttggttgaagccagatgtacgtgtgccgatcgatgtgatatatatgtgattcttcttgttgattgattcgatcgatcgtagatggtgtatatgatacaggatcagtgaaagtttcagggttgttttttttagtttggaggtaattaa

SEQ ID NO: 2149 - DNA, 2000 bp, Oryza sativa
acacatatatacatgtatctagaagttcttacaattaggcattttatcacataaataacgctccctccattaattctaaatataaggacacaactacatttttcacatatttcatcataatatacataagacatgcatgcatataaacaattaactagcacctcctctccactaaattattatttttaaaatccttcaagatctctaattttattaggtacatacattgtatttattagagtgatctacataaggtgacaataattatttttagtcttagtgttaaaaggatagttgtgccttacattttcaaacgagggagtatattacagattaaatttggttaaagctttatatatagaaaaacaaaatatttcatatattttaaaacagggaacattagtaaaatgattatgtcagcgcctcaatctccgcatgcagatcatgcagccaaccatgcatctccatcggctgtgcgttcttatttccttttgttctgtgcgtggtcgagtttgtcactgacaagagcgtttgaatgtgtcaaagtcagctgcgatgggatcgagagcttcgaagtcgtcgtcttctgtgtaattatattcatcagtagtagtagatcgatatgctagtgctggtttgcgatagttaattagtgcaactaagagttaattactactccctttacctctttaccttaaaatatgacttaactagtgctctacgattaactagtgctctacgatgtagaattgtatatatatacacacataattaactagcatatctctttcttctaaattcatttttgttaaatcctccactctttaacatctcttacattcggtgattccaggaatacacgcgcacacacacgtcactacttcacatgcaacaccgcactcacacatcctcgaatacgcgtctaacacatactcaaagggatggagaccagcgatatatttttgatctcactaaatttctattgaaagtccacttgtgtgtataatgtttgtgggtatcaggatttcaatcctggtgggtggagtcatgcatctatgactccaccatccgccgatgcttcccgcttgatatcgcttacataggtgcatgcattgtatgtatttgttgaggtgattcaaacaaaaaggtaataataattctttgttgatatttatgttattgatattgcatcttttattttatgatatatctagtaactcttctctcctagacgatccagatgttaatatgctcatcattaggtaaacatagggcctatttggtagagctctagctcagcctaagtttcagctccacataaaataggagtggagctggctggagctatcgctatcacaaaatgaactagaaagatagagctaggtttatgttgctccacaactccactctgaacgtagctcttagagttaaatttagaagttgaagccttaccaaacatgccatcaatactgtgaattttcacaggccaagaacagtgaaagaacaaaattttgatctatcgaggagctagtagcgctcttgatttaaagaccctattgtttagaacattaggacttatttagagcatagaagctagtgctaattacttctgtaagtacatgagctttgtctctttggtaaacagttctttaaggcctcaacttgatccctacttaatgaagatgccaactaaaagactaacgtgtgtgctgttaagaaactattgttgcatatggcctcaagcactataaatacccatgcagtcctgcacccaacactcaccatttcctgcactcatagagttagctaacaatggcacgcactaagcttgcagctcttggtttcgttgttcttttaagcattggactagccagtgctgcaagagtagaaagatattctagttcccaaggttctggcacaggaggtggagagggaggaggatatgtgaacggtgggggagcggggaaaggaattggggctgggtccggtagcagcaacta

SEQ ID NO: 2150 - DNA, 2000 bp, Oryza sativa
acagatcaatgacgtgcgcccgtgcagatgcaatggaaatatatatcggccacgttgccacttcttctaatataataaggcaatgtcgttgcctactatgcacgatgtgagctaatcacacgaagtggacaacaagttcgtcatgtgatttgttgtctttctcctttgtgtgtcgaatgacagatctcacaattatccaaaaaattttacaaaaaagcatttcactgagctttgtgcgtactccctccgtcccacaatataagagattttgagtttttgattacaacgtttaaccactcgtcttattcaaatttttttgcaaatataaaaaacgaaaattgtgcttaaagtacggtagataataaagtaagttacaaataaaataaataataatttcaaaattttttgaataagacgagtggtcaaatgttgcaaacaaaaaatcaaaatcccttatattatgggacggagggagtaatagataagccaacatatcgatattacattcgtcttcctaaataaaactaacatttatatttggttgtgaatttttttaatattaaatttggaccatgatatacttttgcacatttccattaaaatttttagtaagataaatgatcatatattacgttaaaaatcatcaccatcaaatatttaaaaactgagagagtagtttggaacacatgtttaagttacagttcatttaaacttgaaatgttggctattattattgatcccgcatcaaaaatcaaaggcgtgatgccacattttagattatccaatttacagtacattgctgatacaaccgtttttatggaccgccacttcgaaaaagcaaatactccatccgtcccaaaatttaagtatttttagcacagtgccaagtcaattattttcaaatttgactattaatagcaaaaaaataaaaaaaaagattaatcatgtaaaattgatgttactagatttatcattaatcaaagtattacaatatgcaactctttttatttaaaacattttatatttatagatattgttggtcaaagtagcatctcgaagactttgtcggagtccaaaagctcatagtttgggacggagggagtaatacttatctcaatctctagaaacttatcaggactaaaaaaatcaattttcaaataagtaatgttttttttttgtttcggtaaagcaaagcaaatactggacccatggttttaaggctagctattcactcaatgattcttgccgataaaattcatcacaacaaaacaaattagagtctggaggtatagatttgttgagaaaaaaggaccgtgaataaagtattagacctaattaagtatatacatatgcaacatgtaatatacctacatgtattgaattcagacaacttttgagtatgtacttcaatacccaggagcctccctgtgcccaccccggaagcaagcaaacaaggaagaacaataccaacagcattttgcatgtaaaatgggtagatatgttagcattcctaaacatttctgtaaactctataattcaaatggccaggaagaccaagagcattttgactgtaagatggacagatatgttggcattcttacactacccattttctataactcaaactagaaatgggtcgaggccagttctgaattataaaattagtacaaaaactaaaataactaaaatatatatttctccaaaaacgatttggaaaaatcatacataaatttaattatgataaattgtgatttgttcagatttaagcatgacattgtgcttgtaagttatatgatattatatggagcatgtgatgattttttaggttttcttttaagtcatttactaatgcaaacatagttggggtctagcttgggccaggttgtcaaaaaactagtataaagccacacagccagaagctaaaatttccatccataaacacatcagactgccatctccctcaactagttgcaaaatcacacgtcttctacttccatcag

SEQ ID NO: 2151 - DNA, 2000 bp, Oryza sativa
agtactctgaggacctaaggtgggagaggcaacaaacaggccactagatgtaaggtcaatgggaagataagggcatggcatttgccgctgcgtactacttatctgtcacagacggtgatccaagggcagccatgatggagtactctgaggacctaaggtgggagcggcaacaaacaggccactagatgtaatcatgtaaggtcaatgggaagataagggcatggcataatgatgcaggttattggaagatcactactacctgtttggccgcttgaacaatatatatgtggtttaccctctgtacatgtaataatgtgaatttgtgaacatatgtaatgtatcatctttttttttctcggtgtgatgaacttgatgaaatccatagcaattgctttctttacatatataagtatgacgaattactcatgttatgatcatggcattttcggctggtgtccatctttatcgtgaaattgtccattgagcttttgttaaacttttcttgtctatgtcctgaaatatgggtttcgccaatatgtaccgtggggcttgagaactctcggcgacttctatgttcgaatagtatttttcatgctaatgaaaaaggcacgtgttacatttgcttcaaagcgttacatggccgttctacttaatcttattatgtgttgccatgttagtggtcaaatctggagaagtcctattaatgattggaaggttcgattttagttcatatttttacaacgaatctttcatgataggtgtacttccttggaagaaatatgctgcatgcgcacagaatcaaagagttgctaaaattggaggtagaaagaacattaaacacgctctactgaagcctatggaaatcggacgcatttaagcgcattcaactcaagtacatgaaaccaaatacaggaatctaattcaaatcagctcgatttcccatataaacggcaaaaataatcctgcctgcaaacgtgtcctaaagatagtcccaatttgcatatgctcctcatttcatttgctcctacctgaatttctgggactgcaattggcaagatccaagatgccggtcacatgatccaaactggagtaaaacatggacacaccttaggcccgtagctcaggtcttcgtcaatgacaattcgaaggcctcttgtttagttgcttggcacgggcatcaaatacgtttcaaactgctaataagttaatacagtcttcgttcagtgcttatccagtatactgtgcagctgaagtggacctgtcagcaagtaaagccaagaggccaatagggaataattaacaccttactgtaaatgacagttgatactaatgtaatgccataacttctataggatcactaagggtgaaacctcataataaaaaggataatgtagaaatatactagtactaggcaggaggccaatgtgtatcacacccatgaaaactgttcgaatatttttggcagcacacctcaagagccaagagttggtaaggttcacatacagatggttcatttcaatgccaatatgaacccagctcatacgactcaaaaatgtcgaacccttgcctggttctatcaacaagggaataagtattaatattttgacaaggctgtgagacaaggatgaccagctcgatctcttagacttcgaatttacaccctaaaaaattttcaagctaaaatgtgatactcttcaaagtttcaaaacaggagaaatatctctacaattctcgactaaaagaaagcaacttacagtgtgttgtccaagtgaatgggctagttgatgccttggggttcggtcttccacttgacatagtatccacttgcatagtcgcattagtagccaatactcatgggcacactgacatcgcgaacctccctctcccccttctataaaaactcagctgcattgctaagttcttccccatccattgcaacggcaacatacacacaccaccaccaacatagcttcttttgtcactgactacagtatcacaga

SEQ ID NO: 2152 - DNA, 2000 bp, Oryza sativa
  N_region (226)..(226): n = any nucleotide
  N_region (1461)..(1461): n = any nucleotide
ggtggaacaacaaatgaaacgaattcccttaataaagggtttccataatatgtggctgatttgttgcaacaaaatgtttcaattcactgcaacatttgatctatacataatgaaacattgtgagtgcactaggtaaatcatttttggtggaacaacaaatgaaacaaattcccttaatagaggcttaatagagggtttctaaaatatgtgggtgatttgttgcaanggagtatatggtggagacacatggaagttggtggcacggacacgtggtggggcccaggagcacgtgcacgtctggggagagcacccgattttgctctccccccgccggtcgcccgaggtaagaggattctcgttaaaaactatgtcagtaatgtattaaactgaattggttgtcttgctagaatcttagtaaaaatggtacactactaatagcttatttcacacgataataactcttctttacaataatattaaaatagagtttctatgataatattttttttataccagatggggtgaaagtaattttttttaatcataagaagagggagtagggggatggttaatttacctaatgtaaacaatatgttgatctcttataaacatgtacattttggcagtggcgatcctaggtacattttcccggtgtcctcagaccccggataaattattcaattctaactaaattatatgatgataactactatataagtaaaaattagataattattacgcattggacccctggtaatttttgttctaggttcgccactgcattttggcaggattaaaaatatactaatagaaatcgaagggcaatcaagataaacagaaaagcaaaattgctctgttataagctgtgaaaatttgagggggaaaaagatgtagctaattaaattgtggaaacccccatatatcgtttcgacttgtgtcaatgtctacgggcgtcgctaatgggtgggtgatcgctgtgggtgatcaccccccatctccccctgacacgctcctctcccccttcctcctctccttcttttcctacttaccaccataaatttttaaaaaataaaaaaacaaagttaaaaaaatttatgtatagaaatactatatataaaaaatatttgaattcaaatttaaatttgaatcgggtatataaacttttgacttataaactttggttctataaacttgagatgtataaactttagatgtatagaaaatactatatataaaaaatatttgaattcaaattcaattttgaatcggatatataaatttgaattaggtatataaacttttgacttataaactttgggtctataaacttgaggtgtataaactttagatgtatagaaaatactatatataaaaaatatttgaattcaaattcaaatttgaatcggatatataaacttttgagttataaactttagatctctaaactttagatgtgtaaanttgagatgtacaaactttagatgtataaatttactaaaataggaaaataaagtaatacggtgccaaagaaaaaaaccacgtggaggagaggtgagcgatcacccattaggaatctcgaatgtctacagtctacgtacgctgcattcatccatgatccatccggagaggaaaatgacaaatcaacagtcatgctaggagtgctgtggttatctcaccacatcttttggttgctactccacttgctataatcgtgccatgccaaaaaaaataaaataaaatccttggtcgacctagcccggcccagttgcaaattaacctgtatctctagttctctacacagactacacaaggccactaggtcgcaggcacgggacgggacgcatgcacatccagaaacgaaatcacgagtccatgtctccatgagccttgttgctcgctataaattcccatcgcgctcgcgtcttccagtatagtcgtcgtcatattttaccctgctttcctctgccactcgatcgccacggctcgcaggacaagaggcc

SEQ ID NO: 2153 - DNA, 2000 bp, Oryza sativa
  N_region (1533)..(1533): n = any nucleotide
  N_region (1583)..(1583): n = any nucleotide
  N_region (1585)..(1585): n = any nucleotide
actttgggtctaaattcaccgtacatcctcacatcccgtacaaaattgatttattttgggacgaagagagtatttcgttgtggtgacatgtatttgcagacattattgctaatatacgtccttttcataatcattctagatataaatcagtgtgattgaaatcttgatcattttggttctccgtaacttctagaatcctattcgaaccgatgcttcttgtcttcttgaccacaatactccctccgtgcaattcgtacacacaatttcacattatgttgcctatacaatattaggttggatcaacccaatatcgaaatgttagcatttgccatttagtttatcttaatagacacttcgatccatcttcacatacaaaaaaacacacaatcccatattaagatttctatacaacaaacgctattctagtcacaccaacaatatccgaatatcacacgagaaaatcccaaatttattcgtcacggaagacgcttggatccttcttcacacgcaaagccaccaaggcggcagcagcagcagcaaccattttcacatggataccgaaaatacccctacaaatacccctaggtccacctcgactcaactgtcatggaagggcaagaccgtccattcccccaaaaaggccacgtcacccaccgtggatggtagagctgcttggtttttaacacaccaccaccaccaccaccaccaccgcaccgctacactactcggctcggctgcttcttcttctccttctcctcatcctccacatcgctgcggattcgagcggcgaggcttggattttctcccggcgagatctccccggcggccgtttcgcgatgcctgaggcaaatgcgggtgggcgggcggcgccggcggcggagcagcggagcaaggtgggtggtggccgtgggagaacactaaagatttcgctgctgcttcgttttgtttctctgggttcttggggttcgtcgccgtgttcatctgaacttggataggctggacgaattggtgtttttttttgttttttttgggggattgtgggttctgatccgaagaagtttggtgtcctgctcctgcgcgtgagcgtaaacggcgtcaggaaattgctcccggatttggagcggattcttgccttgtaggaagatcctatcctatcatatcctatcctacctgagctttgcgagcgtttcctgaaatctttcctgtgcatctgcaagaagccatttatctctttcccttaaaacgtagtctcctactacaaggctgattgacttgtataaacgctactattagcccgtaataacacggtaattcttgtttggttcaaaatcttggggtaatgggtaagtttatcctaatccaagcaagctgtattttctttccgggatatagcactgtagatatctttgcccacttaaaaaaaaggaggtatatttttacttataggtttgagccaaaggtgtatcttttccagactgatcattagacttgtcaagaattagggcgatcattagttcaccacagcgggagccnggagtagaggtcaggtcagtttttgtttggtcaggctgcagtgtatctgnangtttcgtaatccggttctgtgaattacttgttgcagaccttcagtctgtggtttccagtcgtcgagcatagactaggcaaaggttactgtttcattggtttttgtttttgcctttttggttgtgatgtctttggtgcaaggagtattattaggagttcaattgcaagctgtatgtaattggttaactttttttttttggcaaagcttcttagtatcccgataatgcgaaacccttggttttgtgattagttgtgttgcagctgcttagctcttggggaagatgtaactcagtgaatttgtgctttgttccaattcacatgccattgcctaaattatgtaattgttcttggatgccattgtgttttgagacagagtgctgaattttcaatcttgaattttgtccagaacacaacag

SEQ ID NO: 2154 - DNA, 2000 bp, Oryza sativa
  N_region (1575)..(1575): n = any nucleotide
  N_region (1580)..(1580): n = any nucleotide
  N_region (1660)..(1660): n = any nucleotide
  N_region (1662)..(1662): n = any nucleotide
  N_region (1673)..(1673): n = any nucleotide
  N_region (1683)..(1683): n = any nucleotide
  N_region (1713)..(1713): n = any nucleotide
cggcggcgcagccgtggaaggctgtgcacggtgacgcaggtggaggagctgaaggcgatcgtgcggatgctgccggtgtgggccaccgggatcgtctactgcatggtgctcgtccagcagccgctcttcccggtgcagggccgcgccatgcgccgccgcctcggggtcgcgttcgccgtcccggcggcgtcgctcaactccgtctacgccgctgccatgctcgtcctcgtgccgctctacgacgccgcggtggtgcccgcggcgcggcggctcaccggcagcgagagggggctgaccgagctgcagcgcatcggcgccggcatggcgctatccgtcgccgccatggccgccgcggcgaccgtcgagggcaggcgactggcggccgccggcgaggtgagcatcgcgtggcaggtgccgcaatacgtgctgctcggcgccagcgcggtgttggcccacatcgggcagctggagttcttctacaaccaggcgccggactccatgaggagcctctgctcggcgctcggccacatgacgtgctcgctcggcagctacctcagctccgtcgtcgtcaccgtcgtgtcccatgccaccgcgaggggcggctcgccggggtggatcgccgacgacatcgacgacggccacctcgaccgcttcttctggctcgtcgccggcctcagctcgatcaacctcgtcgtgttcatctgctgcgcaaagcgatacaagtacaaggattcaatcaattaattgagaattgctgatcgaattgtgaatctgtaaattgtaatcagctcatgtgttctttagtttctgtacacgggaaaatttatgttttctcattgttatttttggaatagaaatcaagagctctgtgaattcactgggagtaaagaattacagctcaaatggcgaccacgttgactgtagcaaaaccggcaaaattgcaagacagataacatgtaaataaagaaaagaaactaaaccaacgtgcatccgaatttcttatctcacatgactctcgatcaatcatttctctgtaatgcttttcgattaggatgccattaatttgaagagtaatagattcttccattatgtaaagatttgaagacaaaattgttagttcagtttggttctattgtaaacaagtgaaagagttgatctattgtttgctacttttatttttcagtacgagcgtgtacaagaaaacctgtacctttcagcaaaggagataaatttgagtttctgctcggtcatggatttgaatcaatcagtcattcgctgtagtgcttattgattaggatggcatttgggctgtgtacatccttttctgggtgtagaggccagtttaatccattatctaaaaaaaatcagtttgactctgaagaagctttatctgcatgaattaatgcatgattacatcattgcactggactcaattggtaatgcagagacaactcgtatgcagcaccaatgcactttaagcctcatctgaatcttttgataggccagatgaatttccccacattgcaaacatgccaccgttgccactacttaactgaacaagtgaacaatccactnatctnatcatgcttcagacatctgcaatacccaaatcaaacacgaaactgcgatcgatacgttaaaattccttctcagctggttngnacacccactancactttgganttgataccaaaaagctggttagcactaggnaacaaggatgctaagtgcagctccattacactagttagtgacttcaccattgcagagcagaaaggagaaccaggctccagtagccattttcagaaagtggaatatctggatagaaaactagttagcagcatcagaccagtgcatgcgcagccgcccactatcatgccgacttcgcctatcggaaatagtataattcatcgatctatcgctttaaccgcctataagaacatggcaagaaaacatggactgtgcaaccagcacaagagcagggcagtaacttctgtgag

SEQ ID NO: 2155 - DNA, 2000 bp, Oryza sativa
cctgtattgccatatgagagtttactgtattatactccctccgttccttaaaaacttgtcagttgtcaccatgcactattcacattttaacttgccactcgtctttttttttcccaaagaaaagataccgtgttatcaaagtatgtgtaggattctaacttatataagaattaatctttcgttcatcgtaatttaaccatttaggaggtgttaacggttaagtggaatagtaatagtcaaagacaagaatttagaaacggaggtagtagtattcaacccttgaaaatactggatttgaatagttttacagtggtctctagtctctaccactgaatactgatcagcacaactgcaagtctgaacttactttccttgtggttataggaattttatcgtccagcacacccctgaggtaccgcgcggtaccaacaaggtacaaaatttgcgccgttgatttgcacagatctaacggttaggaattcacggtaccacgcggtaccatttgcatcctttgcgcagtaccacctgaaaacgtttggtgcaagagcactgatgtcttttcacaatatctggatcgatgagtgctggagtgaaggggtaaccctagcaattagtcctaattgagccgccgcatcgcaagggcttctccgccggcgatgtacaccgcttaaggggaatggtggctgcttcagcgactcagacgacggcaactgctacggccgcagttgcttccggcaatgtgatttggggcggcagatgcttccggcggcgatgtgatttggggcggcagatgcttccggtggcgatgtgatttggggcggcagatgcttccggcggcgatgtgatttcgggcggcgacgtcggcgagatttggggcgcgatttagaaggtggacatttgttcggcggctagggtttatgatgtctggtcagcgggtctcacgtctgattcgggagagaagtcgcgcaaaatcaaaggatggagcggtgccttgcttctttgcctgttcctatcctacccccgtaaaatcaacggctggatgggttttggtaccacgctgtacatgtaccatgcggtacaaaatgcaggacgggagcagtgctcttgtggttaacatgggctttaaagtgcaagactttaacttgcattgtttgtataaggtcaaggatctttcaaaggaaatatatgttacatttctgaataattacatttgttggataactaatgtgttatgtgtcgaaattctcactaaatttggtcagtgtatatattagggtctcgtgagattttaaactttttgctctgtcatgcatgcataaatatacacgaaatgaaacagttaaaaattcctagttaccaaagctgtcctaatacactacttagtactaaagtgtagatgtgctttcttctcaagctctctcagttgtgttacaaggatcgatgtatttggagtagctacagctaattccaacattttcgatttatattaccagggattattttagagaagtaggttgaacaaatgccaacactttctgttcccaacatgtattattagaacaccaaaaatgcaaaaccatagcagtgaaaacctcaattatgtgtagtgccttacacaagaaagacatatatatagcccgattataaaattctcattgttcttgaagtggaaccaataataagagaccaaaagggtttaggcaggtcagtttagcatggcaaggcattatgagacatcagatagtggtaactgatacacaagacaaaagcagcctctaaatcaagcagtagagaatatcaggtacacccaaagcaactccatgcatgttcctttttcttaccacaacttagctagtggagtggatgaaatggaatgttgcagctgaaacaacatgagttctataacattttgagagttcttgagttctataaatacgaagtgaaattgcgagaactaatcaaaccacagattcacagcatctcactctccagaagctatc

SEQ ID NO: 2156 - DNA, 2000 bp, Oryza sativa
  N_region (540)..(540): n = any nucleotide
  N_region (580)..(580): n = any nucleotide
  N_region (583)..(583): n = any nucleotide
  N_region (621)..(622): n = any nucleotide
  N_region (1245)..(1245): n = any nucleotide
aggtagtggtctattgtggtgtgcgtgatttggatgcgtataggttaatggatggatttgatgcatgtgggttggatatgttgatgagatttgaccgttgactcgaccagcggctaccacgtcatcggtgctggtcgatctcgatccaaaactaactaatcgtgtcgtgctgtactccctccatctaaaaaaaccctggtttccgtgtctaacgtttgatcgtcctttttatttgaaaaaattataaaaaaattaaaaagataattcacgcataaagtattaatcatgttttatcatctaacaataataaaaatactaattataaaaaaatttcatataagacggacagtcaaacgttgtcacggaaatctagggtttgtctttttttttttaagacggagggagtatgtatgtactaggatgttgttcatacatcttgaagggcaacagctggatagcattctgcaaatattgcattgtcgtttgcgcaaggggcagggaattaggccactcatcttccttttgggtacttgtctatcncaaaagcgaattcccatgagtatgtttgtttttttttttnggngataacagggcaggagatgcatgcatgttagctagctnncctccgtgtgctgcgctgccggtatggtaaaatcagtgtgggaaaacagattcgtcacggaaaaacagagcagtactctgctttcaacagcttcgtttgttcgaaacagaggacgtaaaaaacagagcattattgctctctcttcatggcgcatgcatggatgcctggataagacgataagctaagacttgtcaatccgtttttccgcatgcagagacatcgcaaaagttggcctagaaagtgaccatcattgatcgatgccatataatggtataaggccttagtggattgtaggccgttcgattaagtttgaatggtggattggtgcatgcagtagtcagttagtagggtcaaaaaagataggtgaactatgtggttgactcctagcaaatcttaaatctggaggcctctagagtctactagactcttggtcccctgtctcttacatgtaaaaatataagagaagatagtaagtagcagaagaagataaaaatcctcatattttgttttataaacactgtcaaaccactttatatctatctacaatgttgagcactctatcactatataactttacaatattctgagttgtaaaaaaatctttacaatatcaacacaacatnattatggtgattcctatattatgagactgtcatattgttacgctttatcttaccaacatttttttcacaacagacccattacaatatctcattgatcttcgaaactatgtatgcctgccgattgttataagatcatctattatatctattcttatgtaaatgggtattcttgacagcatactcattcatagattataaattcaaatattttttatcaactattactgtactttttggtaaaattgtatatatgttatattttacattaaacgattattacagtttctgatggtcgcgtaacgcacgactcattggctagtcgactattaaagcagactagtcgcgggaaaacatgaggatgcaaaaacagagcggacagatggtacgaaacagaggacataaaaacagagcatttctcttcatgagaaatggttgattaattaaggcaaagactgacctgtaatgtttcatcccttgttttgcaggtgcaacccatcgatattccatagaacaaggctttagaatggtaccttcagaaacagaggattgatgaatgcagctgcaagcacagcacgcagtatatatccatgggtccaaaaaagcttgcaagttgctggctacaacgacacgcctaatgattcctgagcaaggccctacatacatctacatggatatgcatctctatatatacgaacttacctgcaactaatttctccaccccaaaacacaacagcactccacacacaattacacaa

SEQ ID NO: 2157 - DNA, 2000 bp, Oryza sativa
  N_region (158)..(158): n = any nucleotide
  N_region (383)..(383): n = any nucleotide
  N_region (417)..(417): n = any nucleotide
  N_region (1041)..(1041): n = any nucleotide
  N_region (1060)..(1060): n = any nucleotide
  N_region (1982)..(1982): n = any nucleotide
tcaactcctggagttatatttaggagttggagctgtaccaaacatgccctaagatgtactccctccgtttcaaaatatttgacaccgtttcaaaatatttgacaccattaactttttagtacgtgtttgaccattcgttttattcaaaaaatttaagnaattatttattcttttcatatcatttgatttattgttaaatatactttcatgtacacatatagttttacatatttcacaaatttttttaataagacgaacggtcaaacatgtgctaaaaagtcaacggtgttaaacattttgaaacggagagagtatgtgtattttaatagtcaactctttaaatatttaactaataaatattttattataaattatattttatntgatgaaaattatatcattggattgttatttaanttacctttaaatgattatgattctattgctaaaaaaatgtagtatataagaaatttaaatataaagattagttttaaagtctgtgttaagtttaatcgtgttttattgagttggagggatggagtacttgttaaaatactggtaagtcaatgctgtttttagctacatccaccagcctcgttgaatgttgatccaaacagttgttctgttccattttatatattactctctccgtccctcagtagatcggatcagagttgagatttcacaaaagaataccttacgattggggaaagtaggaagcggtttgggcatgcgctgcacatgtgagcagttgtcagttgagcaccatgtttatgatgataagctcggacgtactttcttagtcccaaaataaaaatcaataaagatgtaacatatttcagtactgagaatcttcacgtggagatgttaagcaccataaatctagacagatttgtgatagttgtacgagataatctcttatatgccactgaaaattggtctgattccttatatgccactgaaaattggctcttcccttatataccattggtctaaatttgtgcaccatctcatgccactaccatcagttgaccatgtgtngaccgttaactctcaagtnaaaaagacatatttgccctctctgagttgttaggcatgccttataattagacgggtaaatatgtcttttttccttgagaattaacggtcaacacatggtcaactgacgggagtggcatgagagggtgtgcaaatttggatcaacggcatataagggaagagccaattttctatggcatataagggatcaaactaattttcagtggcatataagagattctgcctagttgtatatagcagtgcggtagtattatctgttcagtaggcccgaactacaaaaaccacattgaatctagtcccatgaaagttttcatatttttttcaaaacttctcaagttgttgaatttttttattttcctgaaattttcaatacaacttttttctaaaaaagataatttctactacctccatattttaatgtatgacgccgttgactttttatctaatgtttgactattcgtcttatttaaaaaatttatgtaattattatttattttattatgatttgattcgtcatcaaatgttctttaagcatgacataaatattcatatttacacaaaatttttaaataaaacgaatggtcaaacattgatcgaaaagttaacggcttgatacattaaaaaatattgagggagtactatatctaaacggcgacgtggcagcgggtcgcgtgagcgtgaccaaagtgttttgttttaaaaataatttaatttttggaatgtttttcttaagaaaagttatcgatcgaagagttcgattttaaatcttaatggcataaaatttccaagatgttatcaccaatcatcccatggcataacggatctgaattaaggaatctactactaaaaaaaaaacttggccattagttaaccagtcgggtataaataggagcaagaaagcaaagagaagaggaaacagcagnagagaatgcagagcaacc

SEQ ID NO: 2158 - DNA, 2000 bp, Oryza sativa
  N_region (53)..(53): n = any nucleotide
  N_region (66)..(66): n = any nucleotide
  N_region (623)..(623): n = any nucleotide
gatcaatgtaatggtggagtatatatgacagatgggcacgcatggagagacanatcatatgtttgngtatcttgcgtcagcttccactgatatagtattatgtttaggagatggattttcattcatcgagagatatccctcgcttttttgtcataaaaacaatttttaaaaattgaactatatattttaacgtagagtcatatatatatatgtctcgttaatttatcttgtccattcttttttttttgactgaaaacatatttccatcatgtcatctaaatagtcataaaaaatttaaaaaatttaaagttacatgtgtacggagtgatatgtctcatactaatctatcttctcaattctttttaaattattttgatggaaaagctaaaaaccatcgatagtttttatcgatttcacacatatttcacgcaccacacgcctggaccaactaaggaatgaacattttctgatttgaattgaaattacactttaattaccttgtaattatactataattacatgcaagttatattgtaattatgtttgacaatttttttttaaaaaaaactatgggtataattttagatgcacccttttttggactgtctatgtagtatttgacnaaaagaacccctaaaaaatctcacaatttttcaaccgtcatattgctttaatatttgtgtgcacctacctaatgaaacataacctaccattcctcatctcctctcccccttagcggccccacgacacgagcttgagtacttgatgccgctgccgccacctagcctcaatggcttgcgggaaggcgtcaacggcgcggcgagccccaccggctggcttctcccccttacctccctccctttcctccctctcctactcaagctggtgtctccccgtcatcggatccatcacaacagctgcccataaactagctttgcccttgccaccaacaccggcccatcaccctcctccatccccatggctccagtgccgccgccaccacctcatcatctgcccgtgtccaccgcccaccgtcggcccgcgtcatccctctaagctcagtgatctccctcctcttcccctagccccccctctcctcatccaaccctcaccctaacacgggaccctaaaccttaactcttctaccttcgttggggttgctgaagctggcggagctagggaagaaggtgttgtcagagcttgaggaggagaactgggatcgccggagcatgaatcataaagcaagtatcaaggttagtaatttgtaagattttggctcccccaaatctatcgtcagctatttagctattttttattgattattttaaggtgacatgaggatatggtgagagggatgaaaatactttcccttaaatgtatcgatcgatggctaggaaatatgaagtattttctctatctcaaaataagttaatttagtatgggatgcgacatctgttagtactacttcctctgtcaaaactaacctcatattaggatgtaaacatttgtatgtccagatttgttgcactagtatgtatgacgttgactgtttttttaaggacggagggggtacgtactactagctagctagatgccgacggatgatgatggattggaaaggcaagtaagctggagtaggtggtactagctagctaggtgtgccacgcactcgcactgcacggagtagtactgctgctgcagagaggcgcacgacgactataaaaggagagtgcaggtatcttcctatagtagctagctaattgtattatactagcttgcttgttcaattcaatcgagcagtagctaattgcatagtgatcgatcgatctgtatagatggtggtggccggcaagaagcagggacggcattctttttctgcatcatcatcgtcgtcttcgtcttcttcttgttcagtagtgcagctgggtcatcatcagcgcccacagggtgaggaccctctcatcggcatcaaagcagcagcagcaggaggaggaggaata

SEQ ID NO: 2159 - DNA, 2000 bp, Oryza sativa
  N_region (844)..(846): n = any nucleotide
  N_region (1057)..(1057): n = any nucleotide
acttacattatgaaatggagggagttagaaagttatatacgggccaagctccatccatgcccaggcggtgtggcccatcttggtctgggccatgtgaaccttgcaaagaataagttcactttgactccctcaactaataatctaatctgattccggatatctcggaccccaactattaaaaccgatacaatttgactccctcggtggttttgttgacgtggcatctacgtggcggtactgacccggtctttcctatacgtggcattgacatgacacttatgtggcattagaatttaaaaagagtagatgatatctcgcgctttgctgtgagatatatgttagataatagagaaatgatgaaatgatttggatcgaaatattatgaaaatggtttgagaatgatgatttgagagagagggaggaggaagggaagaagagaaaggatgatatgtgggccccacatatcaatggccagcacaatatgttttgtgatatatacggagtactttttaattcaaaatgccacgtaaaacgccacgtgggaggaagattaggtcaacaccaccaagtaggcaccatgtcagtgaaacggatcttcaaaatcatagggagttaaattacaccagtgttagtagttggcggtcgacataaccgatactgcgattgaaggatatgaatcagacgcggcgagccaagaggacttattccaccctgcaatcgcaagcgccgagtgggcccaaattatactggatcggttggatgaatttttttattaaaatatttacaaaaatattttttttgtttcgaaaatttacaaatctaatcgcctaccgccctttgggannncgatatttaaaaatcgcccttccagagggcggcaagggacctaaatgcaaattttccagcacaacttgttagctctgtgattttacaatttaaaattatattatataaagtcatatgaaataaaactttatatcaaaattgtagagctcaaggagatctacaactttttcatttaagatgttttagatatccaaatattcgttacaaaatntaaaacacattttaaaaaatcttagatctatatttcaaacgacattggatggagataaattttatataaaagttgtagatcttgatgagatctataactttgtagtttatcacttttccatttaaaattatctagagtatcgaataagcattattagtttttaagcaattaaaaccggtggaaagggtttgaacacaaataaaaattttgcatttaggtctcttgccaccctctggaagggcgattttttaaaatcgccctcccaaatagcggcaggcaattagatttgtaaatttttgaaaaaaatatttttgtaaatattttaataagaaaatgtataaataaaaaaaattttggttggattgaatggcctcagcagtgaaaagtggacttgttccaccctgcaatcgcaagcgccgagtgggcccaaattatactgaatcggttggactgaacgcctcagcagtgggggaatttaactatttaccacttttatatttgtcaattatccaaatataccttttaggttcacacttaataatttgtcactggagagaggtgatttctttaactatttgccacttttaactacatggcgagccatcgtggcatgtccgcatgaaaaacgacatggcatgccagcagtgaggtcacccgttgcgacacaggtcgcgccagcgctgacttgtccacccacccatttcgaagggcgcaaaccccccaaacctccggattccggaacttgtccaccacaccacctcgttgctcgcatctcttcctgatcccccccgttggattcgattcggggcgtaaaatttcctgctctgcaatccgtcgcaatcaagcggccgctttccgaggccccgggctcccttcccttcgcatttatcctcgctgagactcgagaaacaccgcgaccaggagaaatttcagcaggagcagg

SEQ ID NO: 2160 - DNA, 2000 bp, Oryza sativa
  N_region (70)..(70): n = any nucleotide
aaaggatcaatctttgcctatttaaaaaataaaatctgcttccaacaaaatattagtccggccaaatctncctatccatctcggttctcggttctgattccgatcgcttgccccgccgcatgcgcgctccatccccacctgcggctctctcttccctgttgacgtacggacctcatccatgtcgtccctcctccctacttggcagccctcttctattagcacccctcttctcccctacactctatccctccttcctggcatccctctcctccccaaccctccttccctcctccccagcgtatctatgtgtaccgctaaaatttagttgaccgatcaacgccataaacaaattatgttaactctataccataaatcgattcaaaacttaaaaagaaattatcacttccatctacctgtgtcatttcctaaagggcgccaagcatgaataacaatggtgttatacacgaactgtcaaattaaattatgaaataaattctttttgccacatatgtcgtaaaaagagctgcttgtctactttggtgtttggagcagtatggctcctaattcatatcagtatacactttatcaatatacttcataaatttatattttcttgataccaaaaagaaaaatgaactttatgatagaaatttaacggtcaaataatagtcaactgatgaaaggggtatagaagggatccaaattgaaacttagggatatgaaagaaaataaacaaatctcaggagaatagaagggattgggtgaagtttcaagggtacatatggaattttctcaacttggagattcgtgcatacatctaccagtccatatctattgcaaccgttcattcattttctgtgttccgtattctttaggcctgattagatcttctggcaagttttttcaccctgtcatatcaaatgtttgaatgcatgtataaagtattaaatatagataaaaattaaaactaattacacagattgcgtgtaaattgcgatacgaatcttttaagcctaattgctatatatttaacaatatggtgctgcagtttatagacggattatgtatttttttttgttattagactacgtttaatacttctatgtgtccgtatcttcgatgtgacaaaggtataaacacggcctttgtaacctttgtaagactgtgtttagttcacgccaaaattgaaagtttggttgaaattgaaacggtgtgacggaaaagttggaagtttatgtatttaggaaagttttgatctgatgaaaaagttagaaatttaaaggaaaactttgaaactaaacacggcctaagtatagtcatgtcaactggacccacacctgtcctaatagctggtggggatagagtggcagtatatccatccccaaaccacacgcgctgtccccgtcatgcgtgttggtggtatagtactagtcagccacgttcagctaatctgatgcacaggaactcccctaaagccaagatttctcactttaaaacactgaaatgcacagtattcgattgaagttttataggttttcaatggtagtgcaccaccttagttttggtgctagctccgccccaataactagtacatcttttctagtaccaggatcttgtgttggtgatagagagggccagcacatccatccccaaaccacacgcactgtcgtcttctttccccaaccttcctctctactctccctccaaacatccatggcgtcttcgccgccggtgttgaagtgttgctgccgttttcctgtggcaatcaaaacctcacgcacggataggaatccaggccgtcgttacctcgtgtgcgctcgtgaggtgaatgcccatacatttgttagattttctttttcttggtttgttgcactaactgaagcagttgggaacagaaaagcggctaccagtctatacctgacgaaatcgcgtgcgcactccaggccaagatggtgcacgcacctgcgaaagaggcgatcccgctgctgacgccgtacaag

SEQ ID NO: 2161 - DNA, 2000 bp, Oryza sativa
  N_region (368)..(368): n = any nucleotide
tgctctagtaaatgctaagagtcgattctgagccgttgtcatgcataacaaccatactcctttctctttcctctatgtcaccaaatttacttgcatggcaatagagagagaacactaataaacaccgttgtacatgcccttatacatgacaacggcttaacaacgactcttacactataatatagaaatatggttgcatgaggataaaaatatggaaagaatattaacaaaaggaatattttttgagttaatgattagagtctttgtcgtctcaactattataaagacatggtctctaaatatcttgtattgtttaagagaccatacctgtctctaccattgaacatgcccttagagctaagctaganttgccctcgtatgagtcgatctttatttgttttctttctatctgctttcagccattcggtcaagttccagctttccaagatggcgatcttatccttttcggtaagatatctctaggggaaaacttgtacatactctagaactgaatagaacactacttaatataaagaatctaaacatgctgttttgtcatgattcgttgtaatatatggtgttctatctaatcctactgttagagatatttgtgtgcatgcatatcttattctgtttttgccgtttatctctcacaatctattccgattttgtttctataagtcggttgagatattgtggagaggtagaggctatatgtacacatgttgcgcgatgaatctttttatcgtgttgagctatccctgctttcacctacattgatatattataggacggagagagtaaatgttataactttgatgaaataatcaaaagttcaaaacataagcatacttgtagggtattttggtaagttttagtctagactttggtactttccaatacctaagtcaatgagaaatatcaaaatttgtattaaaaaatatgataaccttttaagagatagggagaatacgaaaaatgagatacttagggtatctacttatataatccactcgtatatttttacgcctcgtaacaatacaaatgaatgtgaatacgtaaatttaactaagctgttgtcttctctgccatcgttaccaagttgtcactttcttttgtcgattgacagagtctcgtgcaattgcaaaatatatactccacttcgcaaaagcgcatcagacttgctgaaggaaagcaacctctcgcagtctgcaataatggtcgatgtgtggctcgaagttgagtcccaaactttcgacactgccatgtcagcaatcactttccaatgcttaacaatacccactttcatgggcggaattgctgacgacaaaatcgtggaggagaatttggggaaactgaagaaagcccttgaggtttacgaggcacgctcgtgcaggttcaggtacttggccggtgatttcatcagcctggcagatctcagccattttcctatgacgcactacttgttagctactcctcatgcatcagtgctcgatgcatacccacatgtgaagtcttggatcaatgatttgatgaagaggccggctgtgaagagggtgagagagcttatggaggcatgatgagaaaaaggagatatccatcaattaatcatcagtctgtaggtatgaaatgtttgtcatttctggtggggctgttagttaattataatggcttaatccagagaaaggaaggaacgacattcattatcttaattaaaaccaaaaaatgtcacgcctccatgtgtccacgtagcttattatgcagctttgagttgagagacttaattccaagttgtttcatgatttgatcagattatttaaaaaaaaaaatctctgctgttgagatatgcatctccggatctccccatgagttgaccactacagtgctctgatcaactcgctataaaagcgaccaaccccttgccttcgcctcaagtcacacgacgccatcaatcaccatctacacctctagagagctaattaagctaaggaaagagaaaa

SEQ ID NO: 2162 - DNA, 441 bp, Oryza sativa
  N_region (113)..(113): n = any nucleotide
  N_region (270)..(270): n = any nucleotide
  N_region (280)..(280): n = any nucleotide
ttaaagtgaaccggtaactttcggtgctataaaaccaaaaacgtgaactttcgatgctatataaccaattttgcctaaaaaaaagattgttaagttgaatgaacagatttgcnaaatctcaaccatgaaagtaacatttatatatggtcgtcgatcatgaaacgtttgatggtttctcgttgacaacatataggcatataacgtttttccgagttgaaccaatgtgccctacatccatataccggcacgaggtatatctttccgtaaganccatagagcnaaaatgaattattgtattagagacattgcatccatgcatgcagagcaaactcatttagtataaatactgcctaatgcaagcgttaatcatcacctctgcatacagtctcagatagctagccaagctgagcaggactaagatcactcgtgaattcggagata

SEQ ID NO: 2163 - DNA, 2000 bp, Oryza sativa
aaaatactttaagcacaacttttcgttttttatatttgcacaaattttttgaataagacgagtgatcaaacagtgcaagcaaaaactcaaaattccttatattataggacggagggagtattagacacgttgtaacaatctgttgcgtggattgttttgcttttacttgacatcaaacttatttatgtgagaagggatttttttttaccaaccaatatatgcatcttttttaaaatggaaactaaacccctcaaacaacctaaaataaaactaaaccatatgaaattcgctcatataaatatttgaactcagaattttaggatgctactcaggtcacgacaaccgctaacaacatatcatttagctaatgacatcaaacttgttgacttaaatatagatggtagacaatataccgtcaacacgtgacttggtggatcttaaaatatgtcggtccataattcaaaagtgcttatagagacagaatatgcatatgtacgttcctatataagtgagtgtgtatgtatatatataagtacctacacctatctttcgtttaaaataaatagataactatttccccttaacttaatcgtcggcgaagagctattttcgctagcgggttttaacccccatctctccttacaattttgcaaacgaagggcgtatgtcaccgccagcagaaaaaaacaatgtgtattaaaaattatttttctagtagcagtagaaagatctgcatgcttctcactccaacagtccaactcgaaagccaatcactgcagcagtcaaccaattcccgagaacttcactggaattaagacatccatgagacgtacatgtccattcgtgatcgtgtcggttcttcctcccgtcaaacacgacttgacctgcaataatttcaactaagctggatagctagtacacatattgcatccaccgtttgctattcatcagccgcgcgcagtccaattttaaagtttcaaatttatcgtagtttattttttaatattaattttatataaaaaagcatatataaaagtttttgtttataaattattttttaagtcgttaataaatactccctccttccctaaatgtttgacacctttgacttttttaaacatgtttgaccgttcgttttattcaaaaacttttgtgatatgtgtaaaactatatgtatacataaaagtatatttaacaataaatcaaatgatagaaaaagaattaataattacttaaattttttgaataagacgaacggtcaaacatttttaaaaaagtcaacggtgtcaaacattttgggatgaaggtagtattatgtcttataatcaactggtagtcgaaacggtaggttgtttcagtttctaactatgaacctctaaacataaacaatacttgtcaaagtgtatggaaataaaattttagtttggaacgaaggtagtagttacttgtatgcataacaatgcttactcatccgtccccatcacgtgaaaaaaaatcttttcttcacataaaaaagaaaaactcatccatccccaatctatatcatatctatcacatacagtcatacagatatgcagcaatgcaagctcagctagtcagctctcacagacaagtcgaaacttctatcacagatttctggtcgatggatcgagttagcctaacttctccgattgtacaagagatatgcatttgttcgcccaaaattgcggctgaatttgtatgcaatcagtgaatatatatccacgcaatttgtcaacttgaacacacaattggttttccttggatacatgtgtggaaatttcaccgaagttgattttcagaagcaagtgaaagagtcagccatgacttagacgcgtttacctccttctggctctatttaagcttgtggaatcgaagcaacctccatttcactagcatctagcaagtgcacaacacatctataaatcgtagtaaccaccttaggtgagatgatggtcatggcgatgatgagaagggtggtg

SEQ ID NO: 2164 - DNA, 897 bp, Oryza sativa
tttttttttgggcagctgacaagtgacgacgttgagaaatttgctgagtgtggcacgaaatacactaaaaagatccatctgtataatggaaaatgtttatttatataataagagtaccagaaggatctcagtgtaaaagttccagaactgcaaaactgtgaggtttattaggtctatgatattaagaaatactagaaggatcaagatgtacaaattccacaactgcaaaaaccgtgagatttatatatttattgattagaaacatctatagtcagggaccaatctgttaagatgaggacgaacaacagtgacatctgactagttacgtgcctgtgcattacaacggatccagagatatatatacctgtttttcatgcgttttttatgagtgattttttttaaaggggggagggagcagtttttctgggaaaaggagggatgagaacaatggtgcttctaagaaaaagaagggaaaatccgtggtatttgaagataacctcgtgttaattaccccggtgtcactttcagtcaccatcaccactttcgtccagttgcacacgcgcgacgcgatgcttcttccccttttctctttcgaattgtatccaatttgaccacgaaatttactcactcggaattcagaagatgagtagcctgcaagcgtagtagagacgaagaaccttggtgaccaaggcagcagcagcagcagctagctagctgagtcaacgaaaggaaaccacctgagcagttcagtcgtcgtcttcctcctcctaacctccagctataaaaccagctcgccccagatcaatctgatcatagcaaaactagcaagcaagcaagtgagcaacaacgaacacgtacatacatacgattgagaggaggatcaattggagtagtaag

SEQ ID NO: 2165 - DNA, 2000 bp, Oryza sativa
tctcgcggtttccaggcgagttatgaaattagttttttcattcttgtccgaaaacttcttccgacatccggtcaaatatccgatgtgacacccaaaaatgttcttcgcgaactaaaaagggcctcattagcacttgatcggtaaatttgaaacattagcactgcaagaaggcgatcgatttgaagcagtcaaattctgatcacacagtaatttaaataaatctatatgccaagacacatgcgacggcagcaatatattttccttttttgctaaagtaagtacgtagttaaattaagcagagatctgcaaatgcctctcttttgctacggtaaaactaagcagagaagatctgtaatttcagtttctttttgtcagaacacagctactgcactttgtattgaaatgatcgtgtcagcgtgtctctgcactcatcccaatctccgcatgcatcgcgtgttcttgcttgtttcctgtgtggtcgatccaatggtcggatctccacttatcacggcgtatgaattcgtcaaagtcagctgctgccatggatcgagagcttcgaggtcgcctctacaatgtcaatttctctcttgatatatataattatattcatcagtagattcttgttctgattttgcataagtcaaagtcaattaaacagttagtaattctgctaggtatagcagtgtgagtcatcagtcatggagtgtaatcgagttggtggtttgtttactatagtttcctgctgtgttcaattaaatggtcgatctttcatacacgatctcgatcttgatatatgcacacatggctagcgtaatcatgctgatgtttgcactattaacaaaaaagaagaacaacgttatattttggagctgtatgaaggtcttttgatttgcattttcagttatatatatgaagaatgtttttagaaatacttgtttaacctaaacatttttaagaacatatataggagtgctataatgggctatattttgaatccaagtgatttcacggtttgagaagttattggggaggtatatatataatttatatatatgaagtatcatagtaacaaaactacagtataaatatggacatctctgtatccctttaaggactacaaaagaaatctctctaagttgcattttacatggttcaattctatgatgaagatgattgtacgttcacaactagttacctccatcccaaaaaataacctctagaacgaatctagacaagtgcttgctcggatttatccccagtagttgattctttctatgacgaatattggtgtaactttctagtgcaaattacacaactatagattgaattatacttgaaagtataactgtgtcagatatatacatttttaacatcaatatatatggttaactgtaatcaggacctaccctgaccagattgtgatgaagatgtttctctctctttataacttggttacttccagactgatgtcattttctgtagtagtgtaagccttcaaagcaaatatggtggctctttttagcctgatctaaataatataatataatagtttatatataacaatatactccctccgtcccaaaaaaaagccaaccaagtacttggttggcttttttttgggatggagagagtaggttatagcaacatgagtttgtgacagaaagaagtataatagttagcgaggttagatatatttatatgttcgagactcagtacataacagtaccaacaaataataaaattgtgattcacacagttatatagattgcttcttcaagtaaacgagatctttgctagtacaattttttcagcccaacttgacacctaattattacctacagaggtttgctaacccaaaaggccaaagtggctctattaagataataagtaacaagtgttgcatatggcctcgtcaagcactataaatactacccatgcaatccatcacccatcacccaaaagtattcatctattctttcactactcagaataatctcaca

SEQ ID NO: 2166 - DNA, 1717 bp, Oryza sativa
agagaaaatttctagtttggagaggcaactagaagaggctagagtaagctgcaggacgagatcattaagctacaaggagaaaaggaacgagcacttgataatttgcagcagtcaaacacttcaattaagacatttgaagaggaattagagaaacagagagaacataattctattcttcagcttgctaatgacgatctgcacaagagcatcgctaacctggagaaggaacttgaagacaccaaggttagttctcatgctgaaattttagcactacaagaacagaagaacaaagcactgtcagacttgcagcagtctgaaatctctatcgagaacttcagaatggagttagagcaaggaagagagaaaatttcaatcttggatctatctaatgaagaaatgaaggataacaattatagactgaaccagcaattggaggagataaggactagtctgcatgctgagattgcagctctacatgaagagaaggatgcagctcaattagagttacagcaatctctggcttctgcgaggaacttggagacggtgctagaaaagcaaacagagaacctttcaactctacagcacgctaatgataacttaaagaagaacaattgtaccttgactgagcaattcgaagtaatcaagattgagctgcaggaggaggttaagatggcacatgaagagaaggatgccacactaacacaactagagaagtcagaggattctatcaagaatcttgaaagtgagttggcacagctgaaggaggaactatcagttcagatggaaagcaattccagcttgaacaagcaattggaggaggcaatattgaaagtgtcaaacttaactgaggagctcgagacagttcaagctgagactgccagtaaaattaatgacatggaaactaacacaaaagatttggtaaatacaattgttctattatcttctcagaagaacaaagtggaggagcatatgaaaattattaccgaagcatgcatggagaaaatgtcatttatgaaagatttcgaagatcaagtaaagcaaaaaattacagatcgtgagatagcaattgcttgcctccagcagagcctcagaggaattattggcagctgccagagactccagtatgcatatggagaggtatccacaaaggcatcacaccttgaggtacttaggaggaatcacctcgtgcagatagatacattggagaacaaacacacagaaattatggagaaacatcgtcatttaggggaggaaaatacatctgcaaacaaagagaacagaaagctacaaaatcatgtccaagaacttgaagctcagctccagctagccaggcagaagcttagagttactgaggcagaaagcaaaagcaaagaagacagctatgtgatggcagtggaaaaatcacatagagagatccagtatcttgaacagaaaatacagaaatattctggacagatcaactcactggaagaaactctcgtacaaataaaaggaaatgctgagtccggaacctccacactggttgatcaattggatcagctagaatcacatttcaataagagtttttcccacttctctgcccgttcatttgcatgcagtgaagagctcaagctcttaaggaacaggttacagcaccatcttgctgaacagaaagaattggtcaagaagaatgatgtgctaggtatgaggttgagagagaaagaaaacgttttgtcag

SEQ ID NO: 2167 - DNA, 2000 bp, Oryza sativa
acctattctttgagacgggctggtgtcatttataacatacagaaatctgtctcaatcgaaggttgtttatctttcagtttcaatacaaatatcttgtcaagtcaaaataaaatgtggcttcattaataagaagatgatagtactagtggagcacagtagaatactggactaaggagaagtcaacttatgcaggtcaatttttttaattgtcaagaacatggcccaagacatcaatgacataacttaaggacgaggatgcaaatataggtacaaagttttcagctcttcagcatgcatataccatatcaccgctcttcctctactgaacccttctatcagtcgtgctgttcttcttactggcatgccacagggggagatctttaaatcctcttatgcttctggctagctagatcagaagaatcactttaaatggtattttttctttccctcgtgttatttttgtccataagagatttcgatatcatgactaacatggataggttgtcacagttaatgcattcttttatacattctagctggagtacttcaatcttttgtatgcagtttgctattttcttcagttctgctctatggatatatctattacctctatgatcactggttgcggcgctgtaaacttatgcttcaaactatgttatttaaaaaaaatatttagtaaatatatatttagatgccatctttatatagttaaaaaatttgctccctcgctctccataaacacaatggccagtatctttgaaagctcaaagctttatcttgactgctattatttccagctaatctaatatgtcaagtttcagatgtgaacaaattaattttagtttcgcagttgcttattatttggatggagtatttggtgaatctaaggtctgatttggaatgtacaaatttaggacaacttctgtggaaattgaactaatttacacgaaactcttgaaaaattcctaccttttctaaaggaggcctaaaaattttggactcaaccacctcctccccaaagagataacattaccttgatttttacaaccattgctttctcaaaatttcccagttttttatttcatattttactcccatgtttatatttctgggtcatgtgcagcccattagggctgaaagcagcaggcgacctccctagggccagcagcactgcaggttaacagtaccattgtggttatcattcatgcgtggttactgtttacagtcggtgttcaaattaaaggtagaaatgagatcgattagttagctacttcctctgttccgtattataagtcattttaggtttgtcctaagtcaaacttctttaagtttggtcaagtactaatattttcaacacagaacagatgtactacaataatatattcaatggttgattcaatttgaggttgtagatgttgctacatttttctataaaattcgttaaacttgaagaagtttgacttaggacgaacccaatatggaatggagggagtgtttccttaaacttagcgatatgtgccttaagagtcaagttatcccatctgtatgaagataggggttatatcctctttctcccttgcccttgtggtgcactgcctcaatggcattttcatgatacttgggtccagggacaccttacttggactgagggttctagtcccagcatgctcattatattatatataaacgttgtacaagtagcaacgatcatgaatacacaacataactttatatatggttgtaagtaaagcatgcaataaacttgtaaccattatctgttaagtttcgttgtaaataattggactggtgcatgagaagttccaccattagaattgaatatatatcatttcacatttagtttcagggtcaggcactatgtacccaactacccattttatagttcattatgttgagatttcagcagtatgccaagctaatctccaaatttattcagcaggtgaggtgaagaacacaattagatagcacttcccattgagaaa

SEQ ID NO: 2168 - DNA, 2000 bp, Oryza sativa
  N_region (90)..(90): n = any nucleotide
  N_region (260)..(260): n = any nucleotide
  N_region (271)..(271): n = any nucleotide
  N_region (275)..(276): n = any nucleotide
  N_region (282)..(282): n = any nucleotide
  N_region (913)..(913): n = any nucleotide
  N_region (1004)..(1004): n = any nucleotide
aaaatggaaagcaggttgaaaatgggcacatggaaaagcgcagctggactgttgagatcgaagtcaatactcctccgtccttaaaaaaangataaaccgcagttttctgtgccaacgtttgactgtccgtcttatatgaaaattttttataattagtattttcattgttgttagatgataaaacatgattatactttatgcatgacttatttttttaatttttttcataattttttttaaataagatggacggttaaacnttggatacggnaatnngggttngtcttttttttttaaggacggagggagtactacttacgcaactactactaccgctggtactagtagcgttagatttgatatatatcgagcagcaaccaaccggcgagttccaaaagcctccgatcatccaacgccggccacacgcgagcgtacgtgcgagaagactctgaccgactcaaacaacggatcctgaaatcatctattgtggacctcatcatcactgacccccgacaattagtactaggagaagaggggggaaaaaaagatccaaccgtcccgctgacttgcggtgtgtggatagcagaaagcgtacgtacgttacgtagcagcagcagcagcagcagcagcagtgggcgtgagccgtgaggtgagccacggcccacgcccacgcgcgcgccgtgctgaagcaggagcagtcgggatgctcgcgttggcgcggcgcccacgtgaaccgagggcgccacggctctctacagtctagtacaccccagccacacccgcggctgcggctgcacggccgatcgattcggtcacccaaactgcgtggcagcgtggggggcgcgcgcggatggacaccgcgtgagtgcgtggccgcgggcgcggcgcggcgcgacgatcggctacgcgggcnttggggttggggacttggggtaaacggggaacgcgtccagtggcggctacgcacgcatggaggagtcctcttcggcgccgcggctcgcgantcgcgacgcccacgtacagtaggccactacgacccgttctccaggctgatgtctccggcgccgagcaacttgtgccgttggggagtaatggggtgtaaatggcgcaacgtaatactgctacttgcgagttgcgatttcacaaaactatagctacattatggattattgtcgttttgtaacaaaactataaatttaagttgccacatgatcactgtagcctattgagttaataattccctgggacatactcccttcgtctcttaaaaaaaaccttctagcaatatgtagatagagtatgtacagattcatgatagaaattcgtttttattcctatgtctaaattcgtagtcagaaaatcatttttatatgacagagggtgtacaatgctatatagatagaaatactctagaatatgtatttttcatgatactattttggtgttaatatgtggttttacgatattataataattttgacgctaaattcttagttttgttactatatgtaattttacaaaacaatttttattttttttcaaattacttcgattgctaggttttgcttctataaatttattactttcacaaactatagctatatatagattgtttctactcaaacgtactcctttctgcgaaagaaaaataaaatccttttttaagctgtaaagttgattttttttatcaatataaatttacggtaagctcttcttcaccttttcttataggcacctttatattttctatattataagatttgtcaaagcacatgaatgcatcacggtgaagaagaaaataaaacaaaattacatccatatataaacataatatagtggccaaattgctttccattggtgcgtacaaatttagtcaaactatctgcattattattacaacataaaagactattttaaaaggtatagaaaacaaaaggtgaaaaagaagaacatgctattttctttctcgatggttgacaaaggaaaccaaccgatccaag

SEQ ID NO: 2169 - DNA, 2000 bp, Oryza sativa
tttaactaattaatacaaaatgaccaataattaggaagctaaatgattataattcttaagttatgtcatatttttagtttattagaatttttgttttatttataattaaatcaataatttaagatccatattacctatatttcactgtataaaaataaaaatatgttatttgaacatagacacatatcctttgcatagtaacaaaaaagaaaaaaaaagtataacactaaaaaatgacaataagtattatatcaccctaaagcattgtacgttcttagcagttcacttaagacgtcacatgttatgtcttaaataaaaataaaaccttataagttggaagaaagaaacatctaaccatcagtttccacttaaataggtgatccattattttttagccaataggtatactattaaaaaaatcttaagccatcatgtattatgtcttaaaaattaggaaaagaagagatattagaaaatatgagaaaaaaaatcagatcatcgattttcactttaaaccatttagaaaaatagaaaaaaaaacacccctccacttcgtcctcccccacacatgcacaacacagcactacccatcccctttcctctcggcttgaactgtccactcttcctgttttttagcatgaaataataaaaaatattaaaacatgcataacttttaagatacgtatctaacctctaatctaactattgttgtattcatagttaaaccaacaatctaaaaatccataacgcctatattttgaactggtataaaataaaacaagaaatagaaaatgtcaatagggactaattaaattcaacaatttggagaaaatgtaacaagttggtaaaaaaatggttattacaaaattgatgttccattttcataacaatttttgaatgcttatatattaattttttttaggtaatggaatataatatcccggcctttactcaaaagagctacatccaattattacatagaagcgttcaagaatatagtgtaaatctaaatgaatagaacacatcgtaaagaaaaacaaagaatctagcctaacataaggagatcacaattattgaagtctatttgtaaatctccaaccataattggtaaaaagttgcataaccgtagtctctaacttccggcatgcaactttcagaaactcttcatcttcatcacacctttgtagttgtgtccaaaaccggaactaatgaattgctttgaaaatgacctgcatataggaaaatgatggtgatttatcaaaaatcatatcgttcctactcagctatattgcccaacaaatggcagaagctccaacaagtatcagtttactcattttcttatcaactcccaaatgccacgcatcaagaatatgagatatgctaactggaagattaaaaccaaaagagaactggactactctccatataaacttcgcaaaatgacaatctatatatattatatatattaatggccttacatctatcttgtatcgtagtattaccggtttctctgcatattattgcatataagtcacactaaggttgaaaagttatatttgttattattaaagttattttttttgattcatcagaactagctattttcttttaaaaaagatagtataaataacacatattacaaaggaaggagtaattgctaaacccaatacggtgataggccgcccctcttgtggtctctgagactgagtcacttgcaatatctacatgtttcatgtggagtaagtcaaatcacctcgctcgctttgcttcgacgaaacttcgacgacgcgttctcaccttcttccacgatgaaacggcgggaaccatttacgcgccacaatcgcgccaattatataagctgagccacaccgccatagaccaagcaacggtaaacaagcacacatccacacacaagcacacatccacacaacggcaattaatcattgcagagagctagcagctaggttagttaggtgagcagtggctgcaaggggcaagcc

SEQ ID NO: 2170 - DNA, 2000 bp, Oryza sativa
  N_region (666)..(666): n = any nucleotide
  N_region (733)..(733): n = any nucleotide
  N_region (743)..(743): n = any nucleotide
  N_region (1849)..(1849): n = any nucleotide
ttttttaataatgtattaaaacccgggcaatacacaaatatgggtgtacattaccaacaacattcagagagtgtaaagatacactccttacacagagttcactcaattaaccagcacctaaaaagcacttaggctcaaacccctaacaaaacaaaccccaaaattattgcaacaagcatcccaaagcctaagaacatcgcaaagaagtgcatcactcttcatcgtatcaccatcctccttaagcaacaaagatcactgatgagcccaatttgttcctctgaaaattaattacctgcaaacatgaattaaaattgaaatcttaaacatcacatcatatctacaaagctaaaccgcctaacacaaagctgcaattctaacaaaaaattggtactttagcctaggttgtaaatccataagctaactttcaaacatattagcaactttttcacattatctgaccaaacgggttgatgcggcttgacgcgtatgtcaattgtcccacacctacgtgtatattaggaaaccggtgaacatccgcccatttattgtgtgctaaatgaatgattatgaaaaaaatagcattgtgaaaaacatgatgtaatatatcactccacaaacataataatttaaattcaacttttacaagttgtaatagaatacaaattnaaatccttaaagttgaattaatcttacatgtttggtgtagagatatattttaatatatcttattaanttttttagcnaaaaatattatagttatgtagttaatatgtagacatgtttggtaggcctccaaactccaaatcctagctctaaacttccactccagtgggagctggcttctgttggagttgtagaacagctgaaaagtgtttggctagcatccagctccagatctgaaattgaaaaaaaaatggaaaaaaagcaatccccaatctggacaccgtcccgcgtgcgctgccctgccgccaaccgcgtgccgtccacccacgcactgcccgccgcgcgccatccccgactgcgccgttggctgccgctagggcgtcgtccccccactgccgcgcgccgcccgcatgctgtccatgcacacgctgcctgccaccggccgcgcccccccaagccgtcgatcccaccgcctgtttgcctaccgtccggtgggtaatgggaggaaaaaagagagagagagagaggtgaggaggtgagtttggggtagttcagtggtatttttgtataagtgtagtggtttttttaggttggagtagagctgtagggcagcaaaaatctagctttaccccatagtttattttttaaagtagctctgctaacttcactcccaaaaacggaggatctagaccgtatggtacaactctggctccagataagtaggagataagtatgagttgggagcgagagttgtgccaattggggcctaaattattaggagtccagacggatgactagaatccctctccttccaactccctccgccgtggtctgtctgtaattatctactcacgttcatgacctggaacgcgttaattaagttggcgctgttacactgttgggcaacatcagcacagcagtgcatgagcagttgagcacgatgagcaaaacaaacgaacacgactccacagtgcctgcacacggaagtcctgaacattttggccttcttccatcgtccagtctttcccttttccctggtcaatgtccgtcatctccatgcccaagaatccagccagccttcatggcattgcggttcattcaagttgccctgcattttgtcaactaaacgaggacatattttatttccccgagaggtcttccacagattccatcatataaatattgntggtcatgagtaattaagcttaaggtcggagagatgctgaggattactataagttttcaggacgcagcatcttttttcgtttccccatgtcgatcccgtttgttaattagccagcaagaagggaatccgcgtccgaggtttctgagctttg

SEQ ID NO: 2171 - DNA, 552 bp, Oryza sativa
  N_region (2)..(3): n = any nucleotide
  N_region (6)..(6): n = any nucleotide
  N_region (14)..(15): n = any nucleotide
  N_region (17)..(17): n = any nucleotide
  N_region (19)..(19): n = any nucleotide
  N_region (26)..(26): n = any nucleotide
  N_region (36)..(36): n = any nucleotide
  N_region (44)..(44): n = any nucleotide
  N_region (51)..(51): n = any nucleotide
  N_region (55)..(55): n = any nucleotide
  N_region (60)..(60): n = any nucleotide
  N_region (63)..(63): n = any nucleotide
  N_region (68)..(68): n = any nucleotide
  N_region (71)..(72): n = any nucleotide
  N_region (80)..(80): n = any nucleotide
  N_region (82)..(82): n = any nucleotide
  N_region (84)..(84): n = any nucleotide
  N_region (86)..(86): n = any nucleotide
  N_region (90)..(90): n = any nucleotide
  N_region (92)..(92): n = any nucleotide
  N_region (99)..(99): n = any nucleotide
  N_region (104)..(106): n = any nucleotide
gnnttnaagcatcnntnantcgtatncagtcatgtnacttcaanaaacgcnaacnatcancanatgcnatnnccttacantnantnaagnancaagttncaaannnttaccccaactacaagctctaaatcatatatagtcaatataatagccaattcatacaataattgcttactatactattaatacctggccctacctgtcatacacacattaatgtcttggagtccgtgctgcagctggctacagatctgtagctcgctgctcttctctctcttcctttatctttttaaaatatgtttatagctagcttatagcatgctattgtttatatttttaaaatatatttatagctggcttatagcctgctattgtatctgctctaatccatgcatggttaatggttatcgaatctcctttaatttgatcgtcgcacatggcgccaagtcgatctcatgaagaggaaattaaatctcccgccatccgccgctcgctataaatacccgcgcaaacctatccgctgatcaccaccacctctctctctcgatcgcc

SEQ ID NO: 2172 - DNA, 2000 bp, Oryza sativa
  N_region (1023)..(1024): n = any nucleotide
  N_region (1026)..(1026): n = any nucleotide
  N_region (1028)..(1028): n = any nucleotide
  N_region (1031)..(1032): n = any nucleotide
  N_region (1034)..(1034): n = any nucleotide
  N_region (1037)..(1038): n = any nucleotide
  N_region (1040)..(1042): n = any nucleotide
  N_region (1050)..(1050): n = any nucleotide
  N_region (1053)..(1053): n = any nucleotide
  N_region (1060)..(1060): n = any nucleotide
  N_region (1199)..(1199): n = any nucleotide
  N_region (1201)..(1203): n = any nucleotide
  N_region (1208)..(1209): n = any nucleotide
  N_region (1213)..(1214): n = any nucleotide
  N_region (1220)..(1222): n = any nucleotide
  N_region (1225)..(1227): n = any nucleotide
  N_region (1229)..(1229): n = any nucleotide
  N_region (1231)..(1231): n = any nucleotide
  N_region (1234)..(1234): n = any nucleotide
  N_region (1236)..(1236): n = any nucleotide
  N_region (1239)..(1240): n = any nucleotide
  N_region (1242)..(1242): n = any nucleotide
  N_region (1244)..(1245): n = any nucleotide
  N_region (1251)..(1251): n = any nucleotide
  N_region (1253)..(1253): n = any nucleotide
  N_region (1256)..(1257): n = any nucleotide
  N_region (1259)..(1259): n = any nucleotide
  N_region (1266)..(1266): n = any nucleotide
  N_region (1268)..(1269): n = any nucleotide
  N_region (1273)..(1275): n = any nucleotide
  N_region (1277)..(1277): n = any nucleotide
  N_region (1279)..(1282): n = any nucleotide
  N_region (1284)..(1284): n = any nucleotide
  N_region (1287)..(1290): n = any nucleotide
  N_region (1293)..(1293): n = any nucleotide
  N_region (1299)..(1299): n = any nucleotide
  N_region (1301)..(1301): n = any nucleotide
  N_region (1311)..(1312): n = any nucleotide
  N_region (1315)..(1315): n = any nucleotide
  N_region (1317)..(1317): n = any nucleotide
  N_region (1319)..(1319): n = any nucleotide
  N_region (1321)..(1322): n = any nucleotide
  N_region (1324)..(1324): n = any nucleotide
  N_region (1326)..(1326): n = any nucleotide
  N_region (1335)..(1337): n = any nucleotide
  N_region (1339)..(1340): n = any nucleotide
  N_region (1343)..(1343): n = any nucleotide
  N_region (1346)..(1346): n = any nucleotide
  N_region (1351)..(1351): n = any nucleotide
  N_region (1354)..(1354): n = any nucleotide
  N_region (1361)..(1361): n = any nucleotide
  N_region (1363)..(1363): n = any nucleotide
  N_region (1366)..(1366): n = any nucleotide
  N_region (1371)..(1371): n = any nucleotide
  N_region (1379)..(1380): n = any nucleotide
  N_region (1383)..(1384): n = any nucleotide
  N_region (1386)..(1386): n = any nucleotide
  N_region (1405)..(1405): n = any nucleotide
  N_region (1407)..(1407): n = any nucleotide
  N_region (1411)..(1411): n = any nucleotide
  N_region (1419)..(1419): n = any nucleotide
  N_region (1422)..(1422): n = any nucleotide
  N_region (1430)..(1430): n = any nucleotide
  N_region (1439)..(1440): n = any nucleotide
  N_region (1458)..(1459): n = any nucleotide
  N_region (1580)..(1580): n = any nucleotide
  N_region (1619)..(1619): n = any nucleotide
  N_region (1635)..(1635): n = any nucleotide
  N_region (1646)..(1646): n = any nucleotide
  N_region (1649)..(1650): n = any nucleotide
  N_region (1652)..(1652): n = any nucleotide
  N_region (1657)..(1658): n = any nucleotide
  N_region (1662)..(1663): n = any nucleotide
  N_region (1665)..(1665): n = any nucleotide
  N_region (1670)..(1670): n = any nucleotide
  N_region (1673)..(1673): n = any nucleotide
  N_region (1675)..(1677): n = any nucleotide
  N_region (1683)..(1683): n = any nucleotide
  N_region (1688)..(1688): n = any nucleotide
  N_region (1694)..(1694): n = any nucleotide
  N_region (1698)..(1698): n = any nucleotide
  N_region (1700)..(1700): n = any nucleotide
  N_region (1704)..(1704): n = any nucleotide
  N_region (1708)..(1709): n = any nucleotide
  N_region (1712)..(1712): n = any nucleotide
  N_region (1714)..(1714): n = any nucleotide
  N_region (1717)..(1717): n = any nucleotide
  N_region (1722)..(1722): n = any nucleotide
  N_region (1726)..(1726): n = any nucleotide
  N_region (1728)..(1729): n = any nucleotide
  N_region (1734)..(1738): n = any nucleotide
  N_region (1748)..(1748): n = any nucleotide
  N_region (1750)..(1751): n = any nucleotide
  N_region (1753)..(1755): n = any nucleotide
  N_region (1759)..(1761): n = any nucleotide
  N_region (1768)..(1768): n = any nucleotide
  N_region (1771)..(1771): n = any nucleotide
  N_region (1783)..(1783): n = any nucleotide
  N_region (1785)..(1786): n = any nucleotide
  N_region (1792)..(1794): n = any nucleotide
  N_region (1801)..(1802): n = any nucleotide
  N_region (1804)..(1804): n = any nucleotide
  N_region (1811)..(1811): n = any nucleotide
  N_region (1814)..(1814): n = any nucleotide
  N_region (1823)..(1825): n = any nucleotide
  N_region (1827)..(1829): n = any nucleotide
  N_region (1831)..(1833): n = any nucleotide
  N_region (1840)..(1840): n = any nucleotide
  N_region (1842)..(1843): n = any nucleotide
  N_region (1848)..(1848): n = any nucleotide
  N_region (1855)..(1855): n = any nucleotide
  N_region (1857)..(1857): n = any nucleotide
  N_region (1860)..(1861): n = any nucleotide
  N_region (1863)..(1865): n = any nucleotide
  N_region (1868)..(1869): n = any nucleotide
atccatattttgaaatccagttgtctttaaattgtactatcttcatctcaaaatataaaagattttaataatgtagatgcataaccaaaatttaaagacttttaggatggaggtaatacatgttacttgtcattgtcttttttcttttcttggttgtgtacatcttgactataagagaccgaaagtatcatgatataattattttaattttaataaaggaatttatttgcctctcttctaatctaagtcatctaagtatattttttgttgatatggatggccatatttttttatcctattgatgtagaattaaaaggaattttaaagtagtaaatctactatctagcactattaatgtacaatccaagttttcccattccttcaaattgacatgttatatatcagacacattactgacatgtcctaaaattaaactatttggagagggtaaattctaaaatccccttactaccagcgccacgattatggggtgtgagggtgatgatgtggtcaatggattaactttgggaaactctttttaatcacttaggtggacgtacactcatttattacatgtcaactaaatgattacgaaaaaaatctaaaaaaattgacaaaacatattaatatataatatattacttcacaaacatatatatttaaatttgacttctacaagttatgaatatatgtatatatgctagttagagtttgatttgttatttttgttacaactgcgaaagtccaatttaaacttacatatttgtagagtgatatattacataacaatctatcttttattgtttcaaagatttctttcataaccatttagttaatatgtaattaataaatgagtaaacatacattcaaatgattaaatcatgtccgctaatttctctttgtcaaattcctattagattagtagttttccacgggacttttgtaatacctgtacgttctaattaagtagacctaagagctactaatatatatcagttatgctgagaggaacttagctttcanncntntgnntnctnngnnnactgcganganatatcantgttatatatgtgtgtgtaatgtgtggtgagtacttataccaaggtactatgtagacatacctatcacgtattaaccatacagaaaaacatcaaaatgtgatacgtgtgaggaacagactgagtccgctacgaactgtnannntgaanngcgnnaatctnnnagnnngnanaancncgnnanannaaaaanantcnnanactacgnanncagnnngnannnncngannnnaanacgcgnanaaactcgctnngananananntnangagccgtcnnngnnccnctntctangcncaacacncntcnagctngcatgggnnagnncncgcgccactgttcgcggantngctntctcgcgnacnggagcacnggagagagnnaacagacacagtcaacanntacttcttgcacatcggttaatcaagcaaccggtcgagatgcaaaatctagccttcgtcatagtcacattgcttgcagcgcttgccatttctcgctgcaatgctgcggcgaccgtccggangcagctcacgcacgccgacgccgggcgcggacggcctgnccgcgcgggagctgangcagcgtcatngcnntncagcnncaanntntccgngcngnnnggcggntttcnagctcngcgngngcgncggnntcncncgngaccnacgncnncgggnnnnntacgacggantnncnnntgcnnntggcgcntcngcaagccgccgnannccgatnnncgcgtgnngntcgcacnccngcacgcgannncnnntnnncgcagtncnngcacntaagccncncanncnnngannaggctctcccttacttcgacccgtcgacatcctccacgctcatccgctgacttcctgcgactctcacgctgtgccaggagcctgccggttgcgtcgtgcggacagcccaaagttcatggcctgaacatcag

SEQ ID NO: 2173 - DNA, 2000 bp, Oryza sativa
  N_region (1660)..(1660): n = any nucleotide
  N_region (1679)..(1679): n = any nucleotide
atcgctcattggggcgccgaggttgccattgctgcctccatgtgcgagagccatcgacgccactggatccatctgcgggagacatcgccggatccgctcatgggagcccatgcttgtcgtcatctgaaccaatggatccggccacgggagccatcgtcgttgcaactgacaaatccgagcgcgggagccaccgccgccgcagcctatggatctgcacagtctccgccgtcgccaccgacagatctgcccatgggagccatcgttgtcccagctagcagagcagcccgccggagtcaccaccgttgagggggaggatgccacgatgccgcagcggtggagaggggagtaggaggggctgcgggtggcggtggtatagagacagagaggatatggagggtgtgggaaagagacggagagtagatcgaagtaaaataataaacatgggacatgtggaatgggagagaggctcgagctcagcggattatttcttccaccccgttcggctcaacgttgttttctcgatatgtgtcagtttaataaaaaaaacgcaccggtggctatttcataggtaccagttaaattgtgtgattgaaaaaacatgcactgaaacttatatttggcggttttttattaaacaacaccaataatgtgttgtaagtgccgattttagtttagactcatatgagagattagaaggatggggagaaagatcacatgtgccggttttatattaatcgacgtctcatatcactttttttatagtgaaaatttctttaaaaattaaataaatctattttattcatttataataaaaaatacttaattaattataccctatccctcgtcttgttttaagtgacggtgaaaagctaaagcaacttgcacattagaactaagctcaagtatttgagtgaagccatggatacaagttgttctaaccgatgacatctacacccttcatctaaaataaatcaaatcttaatgtctagattagaacttgtctagattcataagaaaaactaatttattttgtgatagaaggagtatgccaatataaaaggcatgtgttttatactcctccgtcccattttaagtgcaaacataagttttcacgctcaactttgatcgtccgtcttatttgaaatttttttacaattagtatttttattgttatgagatgataaaacatgaataatattttattcgttacttatgtttttaatttttttcaaaaatttttcaaataagacaggcatttaaagttgtgcacggaaaatcatggctgcatttaaaatgggacatacgaagtattaatttgtcctaattaaactgactgcatatattccaaaacacaagtgaatttgtcaatgtaatcattcgtattttaggacaaatatacaattaaagtttaactaaatttgtagaataacatgatcaacatctataataccttattaggctacgatcttcacttattcctcacaaaaaaaaaactctttccactacaatagcatctagaggaaatccctgttctagccagctctaagcaatatatactactaccagctgtatcatatattaatcatccacataactcccttctgaattttcataccccatcttagtggagtaacatgcatctatgaccttcgcctatatnaaaaaaatgtaagtacaangaaacaaaaacgcttcccaaaaaaaaaagcccaggactacacctttttgtccccattttttttgtaatgatccttccgaacattttctccatagaccatttggaaatagctggcgcagtgatattttctattcgtcgtccaaaccctcctctccgtctcatctctccctgcgtgcggcggtgtgtgtatgtggccaacccaataaatacccgcgaaagggttgaggcgttgagccgcgagctacgactcaggaatccggcgccgcaggccgaggcgatcgagccgggcgtatctatcttgtacacacagtaaagctgccag

SEQ ID NO: 2174 - DNA, 2000 bp, Oryza sativa
  N_region (456)..(456): n = any nucleotide
  N_region (1910)..(1910): n = any nucleotide
atgtgtgacttgtctttttaatttttttcataatttttttaaataagacggacacgttaagtacggaaaccaagtttatctttttttttttttttacggggggagtatgtacttactagtattgcatttatgacgcggcgcaacctccgattcgttcacctccctccctttctgtttactcggcagcagatatatacgccatcttgcagaagctttccctcctccaacttccatcacaatcccaccaaatccttgtcctcacgtcaacgatcgcaagccatagctccgatggatccatcgtaccctccctccgccaccgcccgccgcgccgccgccatcgcccgccacctcgccggcctctcccctcgcgacgccgccgccgttgctgcagcgctggagccctccgcgtgcctgagctacgcgcccccggagtcgtcggagcccgcccctgcgttntcgccgctggagctccgctcgctcctcgacgggcaccacctccgggagcgcgactgggcgttccgcgcgatggaggagagcccgctcttctgccagcgccgcagcggcggaaaggtgttcgtgtctccggactacaacgagggcaaggaggggcagcgggaggccacgatgcggcgggtcggctacctggcgcggcggggcgtgttccggggctggctcacggagccggggcccgacgccgagctccgcaagctcgcgctgctcgagtgcctcggcatgtatgaccactccctcgccatcaagatcggcgtccacttcttcctctggtacgttcccctcgcccccaattttgtctcaaattcgccaattcctagctcacattatattgccaatccccaatttcgcgctcaattcccagttttgagctctgctatggcagtctttctggtgcgatgaatttaggatcagccacggcattgtacgaccaaagacttggcaaaggcttggtttagttcccaactttttctttgaacttctaacttttacatcatatcaaaactttcctatacacataaacttttaacttttttctttaaacttttcaattttaatcaaacttttaattttgacgtgaaactaaacacagctagtctggtcatggtgtccttccgtgtctgcataatactgaacttactgcaagttactagtagcaagtaaattattaggatttctaggtgtgcaagcaatccatgagaaaagtaaacggaagagaaatatttgaggatggatcagatctaaagtttggatccaaacttcagtccttttccatcatattaacctgtcatacacacacaacttttcagtcacatcatctctaatttgaaccaaaattcaaactttgcgctaaactaaacacagctgtagcgcggcagcaggagtggggtcgtttatccgtgagcagaattgcagagtacctgcatcctgcaacacatgcttccatagtggcaacacataccctatccctgtagtctcgaattcgtgtatagcgtgcaggccacaaagtggcaacacacacagctaagcaaccaaccagttataaagcgaaactattataatcaatttaattaaagtcttgtttgatgaggcccaaaccagcccaaggaggatgagccaggaaatcgaactcgtttcatgcttggggagggttttgagacttgagagtaagtggctttgagagattcacatgtccagtacggtagttttcaagtttgttctgtgctcaggccaagcatgtctcacgtgtcagttttttttttctgcgtttcaatatttttcttcgtttgtcgaaggttcttcttaaaaagtatatttttttttggtccatttgcttgagacttgagagcatctcccgattcgatatatgtttgtcaacttcgaagctgctccggtgtctnatctccgctccgcaccgcaacgactccgacggtccgacctcttcttcctcgcttgatctcctctggacaccgaagactccgatggaaccc

SEQ ID NO: 2175 - DNA, 2000 bp, Oryza sativa
gcgacatggccggatcggtgacctatacctaccaaaattagtgtcactgttgtctctagactgtcatatatatcgccattttgtgttcgcgttttaatttagtagtcaataaagttggagctgctttttgaggccaagaacaaaactgtcactgctcagcattgacctagctgtatcagccgctgaatcgtctgaaccctggagctagtgctattcatgtaggtaggcgaaagccattaatctgaatgagattggcgaccctagctagttctaatagcgttgtgaatgtgtgattacgacttgagctagctgcaaactttgtgctgttagtagtcagcccaagagctagacttttgtgggggagaaaatggcgaactgggactgtgagtgaataataatctacctaccactctctaatgatttgagagatgttagcattgcttttctttcttcctctccctgatgatatatgcatatgtcctctctttttcccttttttcagtttctctgctctgctttaggtacagtacacacatgtagcttggatatatgcagggtggttggttgcatgcaaatgcagctagcgaccttagtgtggaccaatataatcaagctagcatgcgcaacagaaaaaaaaagccatgaatatatgcatgccgatcgatcagggcaatcagtgtccgacgagtagttgcgttccattccatgcatacacgtacgtacgattgattgttgcttctgagcaactcaagctagatcagaatggtgatgatcatcttttcattcatttggtttggtacgtcatgctgaaaacttcagcaacaaaaaatgaaacacaccggatgctgacttgctgtccgtgttgcattgtagcaagatgggggaaaccaagcaaatcgataaatcgacaatggacgcgattaacacgatcaattgtcgttgtgagcagcatcgtgcaggtcgttttcgtctgtcctgtctagtcttgatcatgctgatcgattccacatttccacgcccatagattgtctagtggaaaatgctagtagctaatttgttgatgcatatggacgtgtgcaaagtaactggatttgataccaaattcgacgtcaatatccttagtgcgtctagctacttacatgtactcctatatagctttcaccaatagtgcaaggaatgtaaacaggttggatattacatacatatatccaatctgattggacaagatatgataaggggacaagatatgataagctcttttcccctctgtatttccgtggttgtggatgcatatttttatgattccacccatttcatattataagttattttggatttatcccaagttataaatttaatttatagtaaaatataacaatatttctaacacaaaatattttagataatggatatgagtccaacgcctacatccacatacgtatgtacacaatagtagtaagttatcgtaatagaggaacaccaaatcacaaaaaaaataaaatactaaaagaagatagctccaaatccttttcggactattcaaacttgctcctttattatgtaccatcaatctagcatatcactcgcctatttacactactacagaacaataataggtgtcagttgggaaccccacataagtaccaaattttccatcaacacctcttaggtggtactgatgaggtaaaattaaaggtgtcgattctgaaaccgatacatttaaggttccatgaataaaaagaaaaacttagcacccacagaccatgccacattgaagaacaccttcatgatttatccacatagcatcattgatccatccaacaacaatatccccgcacaaatcacacaacacaaatcaccatcaatccatccaacaagaacacccccaccaaaataaagaatcatacatcacaattcacataaattgattacaaattttggcacaaatgaatagttccatcactccaattagaagtctacctgatctccgccatggagtc

SEQ ID NO: 2176 - DNA, 2000 bp, Oryza sativa
  N_region (573)..(573): n = any nucleotide
  N_region (600)..(600): n = any nucleotide
  N_region (1711)..(1711): n = any nucleotide
  N_region (1929)..(1929): n = any nucleotide
  N_region (1941)..(1941): n = any nucleotide
  N_region (1960)..(1960): n = any nucleotide
  N_region (1968)..(1968): n = any nucleotide
  N_region (1991)..(1991): n = any nucleotide
  N_region (1994)..(1994): n = any nucleotide
  N_region (1999)..(1999): n = any nucleotide
ctgccaaaacttatttcaaatctgacccttttgctcaactccaaatcgtgtggcgctgaatttagacacctcagcgccaaatagcatggcgctgaatgtacgttggcacgctgacttagtcttccatccaccgtggcacagcattcagcgccaactgacgtggtgctgaggtgtctaagttcagcaccacatgatttggcgttgagcaaaagggttagatttgaaatagcttttggcagcggtttatttgtaaaaatagtttttttttgtaaagagtcaaattgtcaaaatttgtgccaatgaagtattaactgttcaccgatccgtttgcagatttttctcatctgaaaaagaaaaaaaaaggaaaaggtagagagagatgttggcgagtaacattcgggagccgccaagtacaccaaagtactagtcgcaatatccattttccaccacctttaacagctttgacatgcaaagatatgcgcccacggggcccaaaatccgcgtcaccaccgcgcgcgctactctatttcctcgttcggtctccgtagtggaaacctcctccgcgtccgccgnaccggccggcatctcgggccggacttngcgcccttctccttcgcctctcacacgtacgcacgcacgtacaccccgcacaaaaaccccgagaatttccgtgtcaaatcacatgcggccgcgatcccgatcgacgcctacgacgacacatcatagttttttaaccggcgaatccactgccactaccccatcgatcgatccatggatccatcgccgtcgcgtcgcagaaattctcacacacggacggtcacacgtccgtccgatcggtcgatcagtgcgcgcgccgcgcggtgcacgcaattagctagcgagcgacaagacgacgtacgggttaattaacccagcaaatattctaacatggactaatcatatcaattcgtgtcgactagtcgatcattcgcaggggagacgtacggagaagccgtatagggctgagttctttcccgagtcatctcgatcgtattctacgtacaattttttttaaactactaaacgataccccataaaaaaatactaaacgatatgttttttttaaaaaagtttatgtacgaaaattatttaaaaaatcatattaatctattttttaaaaaataaataatacttaattaactataagaaaatacgttgctccgtttgcgtgtgtcgaaggtgacctcacctctcgagcacagcctacatcgactccgagacgtccaaatgggagggaggcatatattctcagcccaagccagtggctggctctagctggtaggggcgaatctacattagtatgagcggtgtcaggcgacaccaacgactttcggtaaaatctatagcggaactgcttatctatatactataatactatgatctaagcataattaacatactcctccatcccacaatataagggattttcagtttttgcttacaacgtttgaccactcgtcttattcaatttttttttgcaaatataaaaaacgaaaagttgtgcttaaagtaccgtagataataaagtaactcacaaataaaataattaataatttcaaaaaattttgaataatacgagtgatcaaacgttgtaagtaaaaactcaaaatcccttatattatggacggagggagtactactgcttgctggcggtgcttgctccggccaccgngcctagctagctgtggagcacataacatgcacgtcggcctctgccgcgtacgtagtatcttctcctcccctgtatactgcaaaacgctcccttccaacgcctcacctccctctcgccgtcgccgtcgccgtcctcctcgttgtcgttgtcgtcgtcttcctttgactccccttataatacaaggagagcgcgcgcccattgcatccatttgcttcatncccccatccccngggcctttttagtttggantccgtcgntcgctcgcttgcttcgggcggcngcnaagtna

SEQ ID NO: 2177 - DNA, 2000 bp, Oryza sativa
caagaacagttaggtttcaccagctgtggagaggtgatactgtaagcgattaacaatcagacgggtcgagcagacagacagaacagattgttctgaaatccacatgtcacacgccagcacgaatgacaaacgctagtgcgagtagaatattgcgagggggaaaagtgatcgctactggcgaggagcttcctagccggctctgcatcctgacagcaaaatggggattgttcttttgttcctgtgcagcatcaccatggataaccaaaatagtgtaccccaccaccaccactactctcatgctgcatggagcagaaaatgcttcaccaaacacacatggaaaacaatggttttttcctttactttttttttcttcttctgatggagttaaaccatcgctgtagccctgcatctagctggcctgaactcccccgttaacgtcgcaatccagaagtcatcagtcagtctgtactggacagatcccaatggcacctccaacgaaaatcagtttaaaaaaaggcggctcgaattgatggcatagcgtcacaaaggaagcaggcgaaccgagtataaacatgcagtctttcagatataggctgtgtttagggcctgtttggtacagctctaactcctaaatattgctctaggagttgagtctagagtggagttgtggggctgcctaaacccagctccacaactctagtacattttgtgagagagctccacttaactccactcacagttttggtggagctgaaactgtttgtctgacctccacctccaagctggagctgtgccaaacaggcccttagatccaaacttctaacttttttcatcacatcaacctgccatacacacacaacttttcaatcatatcatatcaatttcaatccaaacttccaactttggaaggaactaaacacagccatatccccgttccaattatagaatcggtttgattttttttctagttaattttttaaaattcaatcaaatttatagaaaaatctaacgatatttttaacacaaaacagacataatatgacaaaaatattcaatgttacgtatgatgaaactaaatttgtgttgtagatattgctaatcttttcaataaacctgatcaaatttctttgaaaggtttgactaagaaaaaagtcaaagtaacttacatttgaaaacttgcatttactttggtttgatctgttcatctaactatttgcaaaaacatttccacatccaaaaaaagtgttactccctccgtctcatattattagtcattttaaattttttttctaatcattttttatgtttgattaaatatgtagaaaaatatagtaatttttttaacacaaaaccaatatttcatcaaagtatatttaatgttgaatttgatgaaaataatttgatgttatatatgctgctaatttttttctctaaacctaattaaagttaaaatagtttgattaagaaacaaaaattatactacctccatattttaatgtatgacgccattgactttttatttaacgtttgactattcgtcttattcaaaaaatttatataattattatttattttattgtgacttgattcgtcatcaaatgttcattgatcatgacataaattttttcatatttacacaaaaattttgaataaaacgaatggtcaaatattggtcgaaaaatcaacggcgtcgtacgttaaaaatggtgagagtaatatatatgaaacggagggatactttcactagagctaccgcgccacccgctcacaacggcacagtgtcacgcgcgcgcgccagtccgggtgcgccacccaagtcaaccaccgcccgctctctctcccccttcaaaacgcccccacccaaagccaccgcacctcgccaccaccgccccaagaatagcacccgcgtttcatgcgctgatcgaccgatcgacccaccagctaagccacccgcagccgcggggcgagccaagcccaccgccgcagccgcagccacagcc

SEQ ID NO: 2178 - DNA, 2000 bp, Oryza sativa
  N_region (704)..(705): n = any nucleotide
  N_region (722)..(722): n = any nucleotide
  N_region (741)..(741): n = any nucleotide
  N_region (751)..(751): n = any nucleotide
  N_region (757)..(757): n = any nucleotide
  N_region (764)..(764): n = any nucleotide
  N_region (770)..(770): n = any nucleotide
  N_region (775)..(775): n = any nucleotide
  N_region (779)..(779): n = any nucleotide
  N_region (786)..(786): n = any nucleotide
  N_region (795)..(795): n = any nucleotide
  N_region (991)..(991): n = any nucleotide
  N_region (1157)..(1157): n = any nucleotide
  N_region (1353)..(1353): n = any nucleotide
gtaccactttttctattgtaaatttggtacctcttagtacctaggtactatgaggtatcaaaggtactatgagatattaaattttacactaaatttttgatacctgatggtacctcttcaagaaccgtagaattgtttctgttgacgactctgaatccgatttcataataggctgtgtttagttctcctccaactacccctaacttccaactttccattacatcacatcacatccaaaactttctaacacacataaagcttccaacttttcccaaacttttaactttttttagtaactaaacacagcgatagtttctctggaattcaaaaagtaattaatgtgattgatggttttgtcgtcgccgcctttcagacctcaccccgcgcgcgcgtgcgcacttacgggctacgtacggcggccgatggtgccaactgaacggtgcaaatggaaaacacaccatctccaagcaccaagctagccatcgtaatgcgaataccttcatggtttacgcacaaaccggtccaacccgtcaaccaaaccatcccgatcccctttttgcggctgtacagttgtacgtggggaggccatatgtgtggatcctgtgcataatcaccccgttgaatccacccccttcgtttctcgaaagaaatttgaaaatatactttattttttcatatattgcatttatatacctggctgtganntaatttacaagatatanacccaatccacggaacggnttgacgacgnggaganaagaacntgatgnatcanccgnttcccgntaaccgggnatacggtaccacgccggtccgcgggcgtggtgagcgcggcaacgctcccgcatgccagatgtgtgggaccggcgctcccacatgccgcccccatctcggtttcccgaattggatccgatatcctctgcacgaaaaacggagcagactattaacatataattaattaagtattagttattttttttttcaaaaatgnattaatatgatttttttaaacaactttcgtatagaaactttttataaaaaatacaccgtttaggagtttgaaaagcgtgcgcgcggatgagttggaaaaattaggggaagaacacatctctaagaacacgcgacctgttcggttccgcgcgttggaaccgcgcganagcgtcggtcccgcgccgccattctgcggcaccgccgcgttcactcatcctaccatgggctccatggctcccgtgcatcggctccgcggtaccgactcggtcccgcagccagttgtgcgggaccggctcggtcgcgcatctcggttccgcgcgaaccggctcgggtttccgctcccgcaatccccagtctgcggtnttcgtcatggctccgcgcatccgttcagcggattgggtatatttttgtaaattaatcgcagccaggtatataaatgcaaaatatgaaaaaataaagtatattttcaaatttctttcttcgtttctctccctcttccttcacggctgcgcgtgacgtgcggcgtatagtacgagtctccgccgttagaggccgtgattcccattccccgcacgcgccgccacgcgacgagtccactcgtggcccgcgcgcgtccctgtcaccccctgtgcgctcgacgagccgcatccataacccgtcggttcaatctgatggaggccggcgtcccgcgcacttgcgttttcccgcaaacgcgatcgctctgttcgtttgctccagtatggctgcgttgctgctcctatgctctgcttctctctcgtgtacagaggagcaaagcggtaaacggtctaatccgtgaagtcagtggtacgtctacggccgtcgactccaataagcaccgaatagtgagtaaacaacaatcttagctgcgagaaacagccaacgacttgaatggtcggacgaccaaaagtttactctcattaacaaaaccgagctcgatacaagtacaagtgtacagaccacccgttcatccgttccaccgtgcagtcacg

SEQ ID NO: 2179 - DNA, 2000 bp, Oryza sativa
ctcaattaacattggttatgcagaaaataaagctgcagttaacggaatcagattaaagaaggaaacaactgctcattttctgtaagacagcatcacggccttcagatctataaataggattaggcaaggtgattagtgatacattatgtgctgtacctgtttcaagaacacaatgatgagctgtaccatcatcaattgtgaaataattaattaaattatcattaagccccaaaccgagccaagccaagccaaatgaatgattgctgtggtgaagggcgacgactagtcagggatgagtcggatggatatgctctttatgtgatgcggtgcccaggaaacgcggcccaaccaaatcagggtcattaacgtcaaatcattctctgctaataatgcaaggcaccattgtttcttctccaactctctccctggcggctgcctcctctcctcttcttgctcggttccccctgtataaaagagaaccccgtcttctcgctctcctcgcatccactccacatactaccactcaaaaactctctctctctacccaaacaggttttgagaaagaagtggaggacagatccaaaaagttcaccttttgattatccaaacaagtttggagtttgttacctgaatctcctcttcttcctgtcaccggaaggtatgcagttcctctctccatatcatcttctagcgtttctttctacagattcttgattgctcgcttttttccattattctcttttgctccaacgtaggggtagggccacatcagttggacaagtagaaattgatggcacatcaattgagtagatgcggaaatttctggtttttagttaaagtttagaccatgccgatgccaaagtgctgccgtttaatcgaatacaacgatatatactcttgcaatggcatgtgtcatgaggtgtttgggtttggcgaggctcagttttcattgaatttcccctccttcccatgtggccgtatcaagcctaatctttgaaaaatattcacttcatgtggatgcggaatcactagatgcagcttgactccatgcaaatcctaactcctgccatgtgcccatgtgcctgtcccttatcctgatttgcatctgaattcatttgctcagtaatttgcttgttcagtgcctaatccgatagacgtccaaacaaagttttaattaggagcagaagatccagcaatgttattttttctgaatttgtaatgtcttggtttctgaattcgtaattgactatttttattaatcacctttctgaacctgaacgaaagatgcataatgattcacatcggttgcaaatttactgaatatttcctcttatttctagtgtgttattcatagagttccgaaactcaatttcccttttttaaaaaagcttctgatttaccattccagatttctgataagtacttagttaaagttccttattatattaattatctatattatctattacacaacacgttgaactcatgtaagttctgattgattatagggaacacttatattatataagtagtaggtataattatataaaaatgcagttagtactacaataagctttcaaaattcttcgtagtgacttttgtttggttaaagttcttacagacttccagattattatacgtaccttgttagcgacattcaattactgaatctgatgcctggttttgtttgtgcagggaaattgataaaaaaaaagcagtgaaagcctcaaggaatgctgaaagatgtgcttgcatagaagaaattttccgtgtgagataaagcagattgctggttcactagtgctactgatctgctcaagtcttgatgtgagtgatcaactttcctgcactaattctacaccatttagactccgaaacgacgatgatataagaatgttgttctccattcatgatcatgaccttggggaggatggctaaagaattgcagtccatctgattggtggtcaaaacatagtgctgagatttatatctttgtgggc

SEQ ID NO: 2180 - DNA, 2000 bp, Oryza sativa
  N_region (1236)..(1236): n = any nucleotide
  N_region (1253)..(1253): n = any nucleotide
  N_region (1292)..(1292): n = any nucleotide
  N_region (1294)..(1294): n = any nucleotide
  N_region (1297)..(1297): n = any nucleotide
  N_region (1501)..(1501): n = any nucleotide
  N_region (1904)..(1904): n = any nucleotide
acccatacgtaattaagtactccattcatatattttaatatatgacgcgttgacttttaacaaacgtttaacctttcaaaaaaaattatgtaattataatttattttattgtgacttgatttatcatcaaatgttttttaagcatgacacaagtatatttttatatttgcataaaaattttgaataagacgagtggtcaaatgttagttataaagtcaataacgtcatacattgaaaatacggagggagtagctaggacgtatatatgcgcgatattctcttgatgcagatagtcgcgtacacaacacacgtactacgtagagatctcggtcgatctcctctcaactctcaagtctcaagtcgtctcagcaactctctcagccttcatttccatcatgtttccttgtctttaccattccaccgatcgtttaccaagaatatacttttctactgatggagtatatatatttgtagtttactgtacattatttgtagttttgtaccattaatttgtactactagttaacagtctcgactagattactccatctgtaccataaaaaaagggcagatttttctttgccttgtgctactagtatgcgtgtctttattgactcccagggcaatagattagtactactatacttctaattaagcttgcatgattgctagattacggtcataatggctagcgaaagtacgtacgtacgtgtgccaaacctgcctgcctgcctatatatctgaacagagtttcaacaaaagtactcctccaaatgatgcactacggacgtagtattattctatagcagtacagaactttacatgtgttggaaaaaaatctaaacaagataataatatttacttgttccgtaacatttcgatcaaaactcaagagctgctagttgttattatgggcggcacaaaagcgaaaatgagctggttgtgggctccaatgtggttgacgatgatatataccagcccatgggcttacttttgggccttcttatttggagtgtacaagaacaatttaggcccttattagttctcaaaagtttaggcttaattagttcacctgcgtttttctcttctatcttcgtcttagctgtgaagtaaagtagtaaaccatatatgaaatggatatatactgccaggaaaaaaaaacacgtgaaggataataattatgtctctctggaaattaagtactccagttcctctcgcatgtgcagtttgcttcanatgcatgcctgcctganacttgttcagggcttgcttctagatgataatccgggaananganttttgatcactcgaaggggatatcctctcgttgtttgcatatcactcaaatgattataaaaaaatttgaaaaaaattaagaagatgtattaatatgtgatatatcactccacaaacatgcaagtaaaaattcaacttctacatctcgcaacgaaaaaaaacaaatttggctctgaatatacgttaactagctgcggttcaattngtttttttcgttacgagatgtagaagttgaatttgaacttatatgtttgtggagtgttatatcacatgttaatacacctttccaattttttttaaatttttttataaccatttaagtgacatacaaaaaacgaggggatatcccctcgagagattaaaacagtttccctgatgctccatataatactactactactacaagagtaagcgcccagcgttcatatcatatgcatgcttaaaagcaaagtctagttcttcagataccaaatcatccaagatgctaaccatgtcttaaagctctcgcatggttcatataaccttcaacatgtagcacacgcagttgatctatcgatcgatcgatcgtgtctttgctttcaagcaaaattaacaatcgatctaagaangaaagaaaagctaagctatatatacacatgcattctctcatctctaccatgcacagcagcagcagcttgtatcatcctactagtagtagcttgcaa

SEQ ID NO: 2181 - DNA, 2000 bp, Oryza sativa
aaataagagaggtgatgaggtggcatcctaatacgtggggcccacgtgggtcccacgctgactcaaccgccacgtagactaaaaccagggtcaaaaccgccgaaggacctcgggtgactggttttgtatagttaagggaccccgaatatctggttttgtggtttgaggacgttttttatcccgatgacaagttgagggaccttcggtgtacttttccccaatagaaaaatctgcgttgaatgggctagtgtaagcctaatttcactcgaaggaaaagagatgcacttgggcctagactctgggcttgcgagccaaggttagcaaaaaggtgggccggctggcgtcttggcgagcagctccggtcgaagtcctaccctcctgtgagctgtcgatcgtgattcgtgcaccaaaccattcgtcggattgtcggaaggtagcaaaaggaggcacagaccacaggtagctactccctccgtcccataatataacaatctaggatcgtatgtgatgtatcatagtactataaatttggacatgtctcctgtccagatttgtagtactgggatacgtcccatccgattctaagttgctatattttggaacggagggagtacagtgaacggataggttgccctccgtacgcccatgtggcagtcacgaagcgtacagggtgttactctttcccgttgcaagaacgaaaaattgctgtcaatttttgggaccagcaatccctttctcaaataatatgcacgagcaactctaagcgagatctttcattagcttatgcaggcaaaattgctgcgtccgcataggttagccggtgtgaggttgtgctgattggcaattgaccaacgcagcattcacagattcactatcatcatggcacaccgaacatcacatctcagcgaacgggtgctccaccaatgcaccaactaatgcacgcacaaatgcatagcgcaccaatgcaccaactaatgccggtagtttgatcagatatcccagatgtgatcttgccgatgggttatccccaccagtatagaagtgtttagtcacactgaagtttggatgtttggttgaaattagaatgatgtgactgaaaaattatgtgtatgaaaagtttgatgtgatggaaagttggaagtttggaaaaaaactttagaactaaataggacctatgactacaactatctctcggttgtcacgaagaccccgacgtgttgtcacgaagatcccaacgtgaacgtgacggagaagagtataaaaaaaaacacgatccgcgctgaccgccgcgccgccaaccggcaactctcgcactcgcacgccgggcacgcgtttcacgtgtcgaagcgaagcgactgcacctgcacgacgacgacggaccggtctcgcggtctcctccggtcgcgccaccccgttccgactcccgtcctcaccgtccccgaccctccgcccaccactccctcggtcacttcccccaccccacccacccaccacgccgccgcgactcccccaccgttccacgcgcacgcgaccacaccactgctctgcacgcgacccgggattacactacacggtacacagccgcgcgcgcggactactggccagataacgcatcgcagattcgcgggaacacccctcgtggcgcacgacaactattcagtagtcaagtactagcgccagccaaagccaacacgagtttgcacgggcacgactccgcgccgcggcggccgtctcgtcctctctccacatcatccccgttccctcgcacaccacagcgcgcgcccgcccgccagccatcccgctgccgtgccgtctccatcttctatccctcctcctgctgctgctgctgctgctacttaccccgcgatttctcttcctcttattactcttcctctcggctctcgctcgctcgctccccgcgcgatttctccacgccgcacgccgctcgcgagttagggatcgatctcgtcgggggcgggcgggagagggagagggaggag

SEQ ID NO: 2182 - DNA, 2000 bp, Oryza sativa
ggatttcaatcttattgaaaaatttcctaagaagccctttgaaacaaaggattgaatcctatccaatcctttgaaattcctatggaatggacaatcagattttggaggaaatttatcaagaacttcaacctcttggtaactttcctttaagtctatctctctcattcaatttctgcatttttcctatggttcaatcaaacggtcattcctgtgattttccttcgtttttgtaatcctctattttacacttacattcccatcaaaatcctacgtttttcctattcctatgttttctcagtcatgcgattcaaaagggccctaattatacgttatacgttaattggggaggatttttactgtccttgatagtggccggtaccaaatcgtggtcgttcgatgagcaagatcaaacggtcgagcatgagcggtaccgctactttgcacgggggtaccgctcctccttccgcgtgcaggagtaaattgaaagagtaaatatgtactttcgcgtttatcctcttccatgatgctctcgcctctcgtttttgcatcgtcaaagccccaggcggcacggcgccgtcaggagatcggcgatgcccaaggcggcgctaggagctccagccaggctctcgacggtggcgcttatatcagggtgatgctcttgccagcggcagttaggatcttaatgaaatctcaagaggcaaagatcaggggtccggcgaagctctcggcggtggtggtcagaagctcggtgatgccccccagctgcgctcatgggctactgggctagaagatgctgccagttgcacagctgacttcccgtcctttaatttcagcgaagctcaatagctcacccacctatttctttcgtggtacaaatatactggtgttgatttttggtggaaaaaaacttcgttgttactcttgcttactatggttattggatcgattaattactgttatattccattaagcaataagcatctagccaatagccggctcaagatggcggcaggcacagcggcctcgatgagagggcggcgggctgaatgcggcggcgcccgcggcggcctcgatgcgccggcggccgcggcggcctcgttgcggcggcagccgcgccggggtcgatgcgatggcgccgcggcgggagaacaggcttgatacggcggcgccggggaagcttagatgcaacggcgaggaacggatcattagcccgggcacctcattttcattagacgatcctacccccattaaatcaatgattagattagattggtatctcgtacgttatgacaccccataatatctctttaaggatgagaaagatgcttttaattgggtgtcttctcggacaagtcaacctgtcaaacgaagggggattctaattctaacaggtgatctgttgacgtggccagtctctggtcagacgcagcctccatccccagaccccagccgccgccgcccctctcctctccggtgaagttgggttgcttcgtcatcgtccaaccacaccatcccaaagccgccgctcggctgccgccgccattacgtcactactggaacttccttccaggcaacccaccacccgccaccgcacctgcccataaaacccggccacatccatcaagcagcaacagcaactaccagtttggaactaccatcccccgtgaccacctgcccgctttcccgcacaaagttcactagtagttactgctccaatatggagtagtactaatcctccgtatactcgaatcccaggatctctcccggtcggatgctcactcgtcttccccaccactcgtcgccccttgtcttcccctgccgcctctccgccgccgccgccgcccggacgctctccaccgccaccggcagcaactccaccaccgtcaaggttagacgcttcactcctcactggcaaagctctcgcgatagtatgtttcttggatgatggatccgtgatctgatcagtgctctggagagtggtctctgtgggtgttgggcgc

SEQ ID NO: 2183 - DNA, 2000 bp, Oryza sativa
  N_region (146)..(146): n = any nucleotide
tgtatagttaaggaatcccgcatatctggttttgcggttcgaggacgttttttatctcgctgataagttgagggacctttggttcactttttcctccggtaaatataagttttttatgctacctgtgcatgccgcacagttttttngttttcttacggtgaacctgtgcctcaattaatttcccctacttcgtgtcctcactcactcaactttccatgtggtattactctattctttttggttaccaaaaggcaaatgcatttctcagtgttctattccaactccttttgggcctattaagtatttacgagtcgaaacgagacccactacagaatccggagtatcgatccaatgggcctatacagatttcagcccataaaagcctagtcgctaggccacctcgggttcggcggccagttgggcccacagctaaaaggcccaaaggaggtgggacccacacgaccggcgtgccccacacgtcgccacgtcaccgcccccacgtctacgcgctcttgtcttggacttggacgccatcgccgccgcttctcctataaaacccccggccccgtggtcgctgcggccggatccatttcccagaatttttttttcttctaattttcttcttcccgtttcccgactcaagtcagcggttagggttccgagatctccgcctcgcacggcagccatggcggtgagcatcctgctctctgtttttttttctctctctttctcttgattgtattgttcgtgtcttcatgaatctcgtttggggccggatggtggtggctttggcatttccgatccgagcattttgttgtgctttggtatcggagcttgaacagatttggggtttatgctacgggttcttgatttgggtataagcttagtgtcggccgcatctggttgactacacgggaaagtagcgattcgtggctggctccgcctaatggtgtttggtagaaatgaaatggactggcattggtttggcagattgccaggaagcagccattaccccattagttatcacttgccaagtgctacccggccaaatctcgattgtactactttagccagcattttagtcctgtatgagctatatggaattactgccgcagcaaatctcactgtagattgttctctgggtgctggaaatgtttaaaagatgcggtctcctagttgattcctacagatggcactgctgataagccatcagtatgatttatctagcttgcttgtttagttgatatatagccttattctgtctttatgcctacttgcttatgccctaggaggctaggactgataaagaaggccatttaaactttggttcgttacttgtcctccttgcagcttaattagtcactagtgactcaagtatgtaaggagacaaacattatagtggcttccttgctggtgggcaaaacaataccaactatgctggattgctggcttataatgtatggtgatattgaagtattgaactgtatgctatactgactagaaagcaagttgcaactataataagatttaatagtacacacatactatgcacataagcatataggcattgaaaagcttcatacagatggtcaatattgtccccaaaaggttgtctggcgttaccctatttaaaaccgtttgaaaagaactgggagcagaggccttgcttacgtcacaggatggaagcactgattcctttgtgtagattgggactgcatgccgtttattagttaggtctatgcagcaattgttcccattggatgtgagaatggttagttgcttacagctcctggcaaactacaatgattttataagtacaattggaccatttggtatgattcaaactgtctgtaagaaattgggcatttggacatgcaaagtttgagggatgaaacaaagttcacatttgcattaacctttttaagatcttataaacatttacggtgttatttgtatatattagcacaccaccatcagatcactgattagaatttttttcc

SEQ ID NO: 2184 - DNA, 2000 bp, Oryza sativa
gtgtctacaataatcgacccacattttcgcacatggctatttaagaggcccacatgcaaaaatctatttcgcagacatacctcttagggagccgtatacgaaaatagagctatttttttccaaacaggcctcttaagtggccgcacgggaaaatatattttcgcaagcggacctcttaaaggttcacctagaagtttgagttacctcctctgtccctcttagcactttaattttttttcaagtcatccttatcaccaatcctctctctcacctcctttccccatactcctctctctctcatgactcccctcctaggcggcagcggccgacaggcgggctcatggcgacgggcagcagtggctagtgggctcgcgacagtgggaatcagtcggacgaaaggtgcgcggtggcggtccggcgactgtggatctagcgtggggcagcgggagttgaagccagcgaggggcggtggctgtcccccatccagatccggcggtgatggccatcccccgcatagatccgcgcggatgcggcggcggtggctggaggagcagggcggcggcgacgaaggcgtgaggagcacgatgtcggcgggtggacgggctctacccggatccggcggcaagctggcaacaactgtccccgctcggatccgtgcggatccatcggcggtggcgggagaagcacagtggcagcgggcggcgagcgcgcatcgacgggcgttttgattttttgcgattttttcctggattttggtttttgtgtgcagacgacataagcacccgcacacgaaaattgtgccacccgtataaaaaaaatatgattttcacatacacttccgagcagatgggctggaggcccacacacgaaaatctcttttggccgtctgaaaaaattgtttatgtactagtgacacacaagcatgcgtggacttatctgcacgattttgcgactatgcaatatgaagaaaaggttacatgggaaaacaaagtttttgggtattcacgtgaaaacctgaaaaattctgaataaaattttatatacgtaggtatattatatatgtatatatttaactggggctaatacttcattctcagcttttctttcctcaataagttcacttatccggcgggcacttttcctgctgcattatctttatatattttttgatgaattttatctatatttgctgagcgaattactcagccctaaaatcctgcgtccactacgagtcgcatgggggcctatatatgcagagcgatgccacgacgtttgaaatggtgcgtagctctatagtttttcagtctcgttaagcagtactttctccgtcccaaaatataacttgtagccctcaagatttatctcaaaatataaccaatttatccaccaacattctcttcccaaccaatcacaaccctccaccattaactttttcccacctaccttcactattcatccaattacaacgccctccaccactcatttctatactttcttaataaccgtgttctgaacggagggagtagttgataattaggttgtgtattgcctaattaattttatgcgcctttaatttactgcgtcctttggtaagtcgatcacaggggatgtttcgtccggtgaggcgtcgctgcaggcggccggcggccgaaccaaccgccggccaagcacgtgcaccggcggcgcacagcccatagccgccaatggataaaaaaaattcagaggaaaaacaacacagggaaaggtcacaagctagtatgggaatatatatggattaggtttggattggggatcatttgtatgtttctttggaaagagatttgattaattgcttttctttctttaatttggaccaggcagtgacgtttgcagtaatcgcaatctgttggttccatcttatctcatcacctgtcctatatctaggggagctgttcatcagctgagattcccatcatctcgcaaaactacaagcagctcagctcgcaaattaactgtcggcc

SEQ ID NO: 2185 - DNA, 163 bp, Oryza sativa
tctcttctcctctcttctctattatcatcatcatcatcatcatcatcatcacttgcatatcgaattattaataatatcggtactgtatctagccattatttttactcccttattgctactatactccttacttacttataattagctcttctcctaccctaga

SEQ ID NO: 2186 - DNA, 2000 bp, Oryza sativa
  N_region (710)..(710): n = any nucleotide
  N_region (719)..(719): n = any nucleotide
  N_region (724)..(724): n = any nucleotide
tgcattacatttacaccagttttatgcgaagtgagagcaacgctagatgcaaataaccaaacaccgagtctacgtgcatctacacggtgacacgagctgttcgactcgattgggctatatatgatgatcctcttgggttcacctcatcaggccaaatgcccatgcaaagaagtcgcccggtgagtcaaaacctctgaaacaattggtccagagatggcgagacttaaaacattttgtttactccctccatttactttgataatcatattccctctatctacttttgataatcatatttttaaatctgaaaaatttattttgatagatatattttaatccaatagcctatcctctcaataaatttctcagatttaatgtagatctctccattttttcacataaaattagctacatgggtatggagaaatgtaaatatttatgaatcgtttgtttaccgagaaatgactagtactagtatgtttaaataaatgataagtagaattagttatctttggcctatgtgataagatgaaatatgattattaaaaattgacggaaggagtaaaaaaaagcttcacctactaccgcaaatcatcattaactaccaccgctaatccggggagcagataccggaaccgaactggatcctgtcaccagggttggttgttggagcctttggaccaatcacgcacatccaaatcggaaaaacnaaaaaaaancaaancaaaacaaaacggcgagctagcacgcgaggccacatatgattggtggatcgccacataataataccatcccctcctccctctcgtctcttcctcctcctcgcgccgtcgctctcgccttgcctcgctgtcgctcgctcctcccaatccgcgctgcccccgtccctcccttcccacacgctctgccctccaaataaagtaaacccgcgcgagccgccaccggtgaggctcccgtcgccgtccgtaccccggctcccggcgaccgccgccaccaccacccagggtccccgcttcgtaggcgaggggggaggaggagacgacgccatggggttctgggaagccttcctcaactggctccgcaggtacgctcgtcgaagctcgctcttgcttggggcattgacgggggaggggatcgatcgatcgatcgatgcgtcggggatctgggttaggattagatagttttactggattggatggttttgcggcgcgcgaataagtatggtattgagataattttttccttttgcaacgttgactaacgggaaatgttgtttttgatgggtcgatacacgcatacccgcgtttattcccgatatacgtaggggaatttggcttcttgtggtccttttctgtttttccaagttcagatttggccccttttgctacttacaagtacgctgtaggaacattgtatggcagaagcttttttatctgttgaacaacactatcaaatggagtatcgtataagccaatcgaagtattatcagggcgcgtcaatcactgtattaattgaacgtgcctgcccaactgtattcattcaacgtgtcaatcaaaaattcaagggaggtgaggggatacagaatttgcagagtgattttgtatgtaacagaggggtctactctgttaattgtcatgaatattcacattacaaagttcttgtatcatggactgtagaattaggacgatgttggccatgcttgcactgaatttcaatcattggtatgaaaaagagttgtggtaggctatgattagttccacatctacctaccggcggtggccaagtaagttagtatgaaaacaaaggagctctcatcacatgcactgattgggtagtggagaacttcctttgtttctttgaggcactacttcgacgtaatgacatgtgggccaacttctggtttatattagcgagtaaaatggatatgctttgttactaatattgcttgatgaggattcaacatatattcctttatatgcagtctttttttcaagcaagag

SEQ ID NO: 2187 - DNA, 2000 bp, Oryza sativa
  N_region (868)..(868): n = any nucleotide
ggacctcactaaaatggatgaaattctctggatttcagacatttcagtccaaatctatggaagatgagttatcggccggtattgaaccaacaattgctgacgatttataactggttttaatactgggttttgaaccagcgatgagtacccatcactgcgatgacaatgttttaaagataaaaagttaaatatacaatgttacgaagatagcatcgaccctgagaggatgtcaaagattcataactggtccttgctgctggttttgaaccaacattgaggcccttgtttaggtcctaaatttttttttccaaaaacgtcacatcaaacatcttagacatatctatatagtattaaatataaataaaatgaaaaactaataagttcatcattagccataagtgctacagtaacacacatgtgctaatgatggattaattacgcttaataaattcgtctcacggtttccatgcaagttatgaaattagtttgttcattcgtattcgaaaaccccttccaatatccggtcaaacatccgatgtaacataaaaattttctttccgcgaactaaacaaggcctgagtatatgttactacagtaatatcgatttggaggggaaaaatgtaaaatgggcaatggcaacaaatttctcttgattgatttgatctaacaacagaaattaagtgcaaagtttagcagaccctggtccaatatgcaattaaggtgagaaaaggggcgcaaagtgcaattccactagaaaaaaaaggaaaaaagaattaccagttggccaactgcacacaagcgaagactcgatccagggtctctcaggcctacaagcccacgattaagcccccatcccgtaatcccccangctccatcgatcgtcgccgcagccgattccttccaaatctcttcacccgattgaggatacatctaatctgagctctctagtctgcaggtaatcttcagtttctttccaaatctttcctggtccattcaaagtgtactagttcttgttctgtttagttctctttttttttcttcgttttgaacgttggttgagttcttggcgacgcacgccatgattgaatagaagtagcttgtttgcttaagattacttggggttgtgtagccatcgcaagattagaaagatttggtcatcttggggtcggggttgacttggggatgaacgaggagaaagaattaattgcgcattccttctgctgaaatttcagatgagtttggtgtttgagctgtagggccttgctctgaccagtgatctgtcacaatcgagtagattcttaaacaggaaatgtgaaattggatttgctacttggggaaaggagggaaggtgattttaattttaggcaagttggtggttttggtttcttggtgaaacagacaggttgtgggacgccggtgggcgttttactgaagaatgtcaatcaacacaaatatgtcaatgatttgaaaattttacttaacctatatcagtgtagtttgtaatctgagtaagttaattataactctgtgttttgataaccttaatcaagaaattgttttgctaagctgtatgatgatagcactatggatgcaacctacttggatactgaagtaatcagcttgtgcttcacttgactattccatctggttgtagtctgttgtttgtgtcatcttatataatatggcattgtgatctgtttattaatattaagcgacaaaaagaataaagtggcatacaaaaattgagtgaactcctacaaacttttagtgagagttgagacccatgctatgcagacaacaaggaatttctcttgagtacatagactgtagtaattacttagtagtcatatccagattctgaaactataattcagtacttctgaaaattttgtatgaggagatccatcttatcaaattcaagctgaaagaaggtgcaatatattcatattggtgtgcattattgccttaatcattatattctgtgttccacttacccagat

SEQ ID NO: 2188 - DNA, 2000 bp, Oryza sativa
  N_region (635)..(635): n = any nucleotide
  N_region (1442)..(1442): n = any nucleotide
atgtttgaccgttcgtcttattcaaaaaatttaagtaattattaattcttttcatatcatttgatttattgttaaatatacttttatgtatacatatagttttacatattccacaaaagtttttaataagacgaacggtcaaacatatttaaaaaagtcaacgacgtcaaatatttagggacggagggagtataaaagtctcatgtttatcctctacctgctttttatgtacttgcacgaaaccttttgatgcttctaatgaagaaatcagctcgcccttgtatttccatctgttattggttatagtcagactcacagatgacacctgcttagcactaccaccatacctataccaatcaaagctgaactgtgatttttatgaaaattgtgtaaaacgtatacctctgttttatggcagtacactaaccatctgctgtaacacaagataacgatagcaggggcttaacttggtcatatttcttgcaattgtaaagatcaaactgtgcattttcagtcttacttccgatgattctgactgctgattttcttttgccaggctctaacaaggttatcgcagttaggccgtcctccgtcacctctgtacagcttcttatgcaatgtggaaggctttctgnttactgatatagcttagatccatattgaaccttttagatggctgattagcttcagtcatcttactctagatgttcagatttgtactgagtaatttaggcctctccagttttgcaccttcttagagctagttgtatgtagatgattctgttgcagcattacccgtgaactctaatggcttgtttgttaacctggctggatgttccattttttgcgcctggaaaatcaaagtgcaattgccctccttctgaaggttcacctttgggtgtcatttctctcatttcctgggaagatgttggaatgatgctgcctggtggtgttagccaacgttggcctgaaagatttgcctcattggcagaatgcagcgagtattctatcgtctgtaactgtaagcacaaatgcttcgaagtattgctttaaatgaaaattagtagaggcacaattggtgcttcgatgggcaaccttggactttcggtgcagcttggtgccttggtcgagcataataacaacacgtaaggtacgggtttaggttgattgcccttcccttgcacgcaaagatgctaataagagttaatgatggctatgaagataagtttatctgatggatgcttttagaagtgatgctcgaaaactctattcgaaagtgtcgtcctatcatatccaactcgaatcaaataatcacatcattattcgcgagatgagcgtagctcagtttgtttttatccggtggaacataactgctctttccatctcattttaaccataagtttctgtatctaattttgattattcgtcatatctattattgntattagtagtgcttatgtgtagacttatgtttttaatataaataaaacggacgattaaagtttggcacgaaaaattatggctgcacttaaaatgagatggataaaggagtatttatatcgagttattgataggtctaatatttcaacgatgctcatgtacacggtggcgtatgtgagtgtcttttttttaatttttttaataacaaatactcagggttattccctaaataactactactctactcaggggcatagtagcatagcatagggtatcactcatggcggccaaattcccaccgaactgaacctcttccttttttttttcttgaccttttggcaaaggagaagcggataatactccttttgatccatcctactggacccggtaatgatagcgtctggttttaacaagtcaccgccgcgcgcgtcgctagtggtggcctcctcctcgatcgcctattaaattctctccccgcctcatctagggtttggccctccgtgtaatcctattcctatctctatccattactactctccagtgttcttttttccgtaccc

SEQ ID NO: 2189 - DNA, 2000 bp, Oryza sativa
cgccgccgcagctgtggccgtggccgtggccgtggccgtggtggtgatcatcgtggggcttgtcgtgggcgtggaaggggcaggaggaggagccctcgtggccgccgccgccggcgacggccgcggtgaggaggagcaggacgaggaggcccccgcgcattagggctagcgaccgcggcggaatcaggaggaggagcggcgcttgcagacgccctcgatggtgacgacgaggacgagcacgaagaggaggacgagtatacccactaccacaccgaatgttaccacgtccatctctctctcctctcccctaattatatattaccgcccctcaattaactccaaaaaaaatactgaaaaaataataattaaccagcgttaactgcctctgctgaaaattttcggatcgcggctcggatgatcctcgagtcgatcgaatcggaagcttctgccgtacgcttttgtgtcagtggagaacaaagtgagtgttcttggagcactctgtagcatagcagacgagacgaggagatcacgcgaaattcagaggagatatctggtttggtttgatggtgagattgtacggactacggagtatgactgaattggacggttgattggagaacgatgcagggttgcaggattgcagttgatggaggtcatcagggaagcgagatgttgcaagaggagggcgtcagtgaggcagtgaaacgagcaacgcaaggcacaaaatccatgttcatttctatagagttcaggaaaagctataaagttcagagactggtcgatcatggcgaggacgcccgggatgcattcgagtactaaattacttatagccacaaagttccagcgacagcggtggtagtgcggatggccggtcgatcttttggacttccggagcaaaagttctccgagcaacattcgatcctttcgtgtcattctgactaagatttagttccaaactttttcatcacatcaaaatttttctatacacataaacttttaacttttttattacatcattccaatttcaatcaaacttttaattttgacgtgatctaaacacacggccttagcgaaaggtgcagccggccgggctctctcgaacacgtaccgtagctgctgacgaactgagattagctgattagccccatcctctgttcttcgtaaccaggagacatggcaccgcttcaccgacgctgcccatgaattatggagcttcctgtctgtgataggcggtatcatgtgatgagaaaccgataaaagccttgactggtacgtggaaccgatcaagtaatcctcgaagtaaacagatccaggacttatgttgccattctagaggagtagtagacatgttcaggcttgatcactgtgaatcactgaactctccaagcacaggacattctagtacgttgttcgatcgccaggtgctttgcctcgaatggactgggcgaaacgaaagaatggacaaaagtcacaacactcataagctcagaacttccttctctcaatcccggcccatggtcgatggataaggtaggggagcttcttccgtcggtactggggttcccatgtgctgacacgagtgccgccctccctcagcacacgtgtcggcagggccctccacgtggcacccagccccaatggtgcctgccagagaccacaagtcaagcccctccgagaaccgtaaagcaatccggtcgatttaactctcgactctttcgcactacagactacagtcactgtcacgttgatctgcgagcaaagaaatccatggacgccacgtacaagcttggcaccagatgccactgccacctagctagtacacgcctgtataaaagcagcgtatctctcgcgatgtcaagttgatgttggtggatccagagtagtagcactttgcttctccctgaggtctcgtcttcttttcagctcagaaacaagccacaggcttcagagaagacatccaattggtgctgattccatcgatcgatcgggagaggagagag

SEQ ID NO: 2190 - DNA, 2000 bp, Oryza sativa
  N_region (1005)..(1005): n = any nucleotide
  N_region (1026)..(1026): n = any nucleotide
tgtaggcacaacggaggcagcagctccccacaagagttcttggagttcctgaccaagtttcagactgcctccaggaacttctcaaagaggcagatgacatggttccgcaacgagaagatttaccagtgggttgatgcctcgcagcctttcgacgccattgcgcagtttatctgtgatgcttaccatgaccgtgctgcaaggctggttcctgattcactggaaatgaagagggagagttgcaggcacgagagccgtgatctcaagacctaccgttctgagaacagggtgttccgtggggatgatgattgttgccacgttttggattggatcacaaggacacagaggaagtgacctctactgctctctcttgttatctcttttttttcttccccctcttttcccgccaggaaactatcctgctgctgtgtttggagatgttacaataggaaatttcagcctttttttgtcagaaaaatacagatacttgttttgcaaatgttataccaaaagtgttttcaactttggaattcaatgaaaattcactagtgtttcttcagcatatttctgtctgtattaactctatgaaaagaagatatatgacattacagcttagagggtgttttgcttgtgaatgtgagcatggagtttgcatggtctgaaactgaagttggaagcatcacaaattttgtgagattcagagtactaaacagatgggagacttcacttcacttcacttgccgtgttacctgtatcactcttgctcggttgtggacgctgtttgtcaaccttcttgtacttgtgctgcagcacggcaatgtggttaatactaatatttttgtatctgaaatctcccgtagtgcttagtgctgtatttgtcaaagcattgtacccattactgaagaagatgtgcaaaaccaaaatgtgttgctgtctgcggtcgcattatcttcctgctttcccccaatcaaacactatctgcaatttgcaatggataagagataaaancaaaacatagcaaaaggaagnaaaagaaaacggccgggagattgaaagatgacttgttgggctaccagccatgtctgatactctgatgcatcatgcatatggtactctcaagcaaccaacgcacaagtggcagcagagtacatataattctatccccttgtgtaaggcaaccgttggcatctgatctgagtatactactgcctccgtattttaatgtatgacgccgttgacttttcgacaacgtttgaccattcgttttattcaaaaattttatgtaaatatgaaaatatttatgtcatgcttaaagaacatttgatgatgaatcaagtcataataaaataaataataattacagtaaagtttttcgaataagacgaatggatcaaacattgggaaaaaaagtcaacggcgtcatacattaaaatatggagttagtacaacatattgtgccagaagaagttcctctaattacccaaactgacatggcatatgttgccctgaaacatgttgtaaggcaaggtcaatggattcaactggaagtcagattaaggattaagtagttagcacaactgcaattgaaggaccagaatatatacaaggttgaatgattgcacgtgctctggactagctttctggtcagctctttggacggtcacaagctctgaatataacaactggtgcactgcgttttattttcttgctgatcgatcattagtcagggatccaacgttgccaatgatctgtagcacaactaaggagatcatcatcatatatatgatggtgcggtagtaaccgcgtctgcacctaactaaggaaaaagaaacatgtcgttttcggctgtagcagagaaagttgcagggcaacccaaaatatgtatagccaacagaaatactgttccaaatcttatggttatatgcaatgatacccaccaaacattttggagggatgcactcgacataatttgctctccatgaaaaaggaaggagagaaggaaa

SEQ ID NO: 2191 - DNA, 2000 bp, Oryza sativa
  N_region (153)..(153): n = any nucleotide
  N_region (251)..(251): n = any nucleotide
  N_region (257)..(257): n = any nucleotide
  N_region (1041)..(1041): n = any nucleotide
  N_region (1724)..(1724): n = any nucleotide
cgccacaacgagatggtggcgtcgggcgccgtgacgagcgcggcggcgacggcggcgctgctggccttgctggaagcggcggcgccgctgggcttgctggacgacagcaagctcgagagggcgtacatggagaagtacctgccgctggtggcntcgggcatgtcggaagacgacgcggacgcgctggtacgcgacatgatcgacgctgaattcgtcctcaggttcacgtcgccggcgtgggggcggcggcngccgcngtcttcgtcctcctcgtcgttctaccacatctcgtctgcgactgcagcaccagcgacagggtcgtgatgtgtgtcgccgtggccttcctcgtgctgataatggcgtacaaggccttgtaccatctccgggagcgcgcgagggcacacgacgccctcgccaagtcactggccatcttccgggaggtgacgtcgcggccaccgttgccaatgccacctgtttgatgaaagccccggcacctgaagtcacctcctctaatttttttatattagtttttttttctaatgccacccgtttagttaggtacgttttttacactcgactataacatgcggaacagctaaatttccgtcgacagaaatcagagagcaaaacttactaattttccacttttagattagattagatctgagatgacgtcagttggagagagaaaaagtagcaacgcatagcgataccattttttcctaggttacaatgtaattatttttttatattacaattgcatgtgataatatttttctaagttacaatgtaattatattttatttatatattactattacgtgtggtaatataattatgagtgaagatgtagttatattactaatatattatagttgaatttgtaagttttctaattctttagtctctctggtttttagctatgccgtaaaatttaggcaaaattggttatagcatcaaaagttcactttaatagcatctaaagttcacctccctcccattttaacacttccattaattcttgatcgttttctgtccgcnttgaatgttattgacctagccacgcacgcgatataatgtttctaccccttcacaagtccaagttaaatgtttccgtgattttttttcaccatatataactcaatgtttcaccagtggtcaattgcaacatttgaccgatcgatttttttttaagatcggctgcccgattcaaagattctttcggtaatcgcatgttgttttagttaggaaaaaaattaggtttgattatcatatcggatatacagacacatatttcaagtattaaacgtagtataataacaaaaaaatatagattccgccagaaaactgcgagatgaatttattaaacccaattaattcgtcattagcaaatgtttactgtagcactacattatcaaatcatggcgcaattaggcttaaaagatttgtctcgcaatttacacgtaaactgtgtcattgattttgttttgggaactaaagaagtcctttcttagtgtaagtacaatagcaggctatgagccagctataaacatattttaaagagataaaaaaaagagagaaaagcagcgggctacatatctgtagccagctgcagtatggactccaagacataatgtgtgtatgacaggtgggaccaagtattaatagtatagtaagcaactattatatgaattggctataatattggttatagatgatttggngccagtagtagactgtccttttaaacttgctcttaaaaaaaaccattgataaacctgccacgtcaggccgaccatagttttctccgtgtcgaccccattggcggcgacgcgatgcgtgtcgaccgaccgacctaccttaaccccccggggcccccacctcgccgacctgacccgggcccggacggacgccgtcctcgccattccatctctcctcctctcctccgctccgcccaccaaccctcccctcctctcgcctactactaaaatccaccatcg

SEQ ID NO: 2192 - DNA, 2000 bp, Oryza sativa
  N_region (284)..(284): n = any nucleotide
  N_region (333)..(333): n = any nucleotide
  N_region (336)..(336): n = any nucleotide
  N_region (390)..(390): n = any nucleotide
  N_region (468)..(468): n = any nucleotide
cgggtctcaagttatggcccgtcacaaatgaccatcatctgtgacgtgcaccaacttgaggcccgtttgagataacaactaggcccgtcacagatgactcatcagtgacgggctatatacttaatctactcatcgggcattaactaaagcccgtcaccgatgactatttttccatttttcatatgaaatgttatatttgtaagttgactatagcaaaataattaagtgcagtataataattcattgtattagagaaaataattttacgggtagtaaatgatttnaaatggaaaaaatgtcaacaacaaagttgtataacttatcaagatttanaanttttagtttggtcatttttctatataacatttttttttgaacagtttgaatttnaatttgaaaatatgacaacttcaaacaacattttcaaatactaaatgatttcaattgaaaaagtcatcaacaacaaanttgaataactcatcaagatctaaaacttttatttttgttatttcttcatccgacgaaatgttagtaatattattcacaaattttacatatatgtgttatagtttataaaaccagataagagatatgtcaattttgtgaacaatgttactatcactttgtcgtatgaagaaatgaccaaaataaaagttttagatcttgatgagttattcaactttgttgttgatgactttttcagttgatatcatttagtatttgaaaatgttgtttgaagttgtcatattttcaaattcaaattcaaacggttcaaaaaatgttatatagaaaaatgatccaaaataaaagttatagatcttgatgagttatacaactttgttgtgtgatgactttttcagttgaagtcgttcactgatctaaaattctatttgaacttttcaaacttgaatttcaaatttcaaattgtttaaatagagtcagatggagaaatgaccaaaatgaaaattttgcacctcgatgagttctacaactttggttttggtgacttttccatttgaaatcatttaataaccccaatttaacatcctggcctagggcataataggattaatagaatactcgtactcttccggaagccaatctctaaagaactttgacattaagtgtgcttggtctggagtaattttgggatgggtgaccgaccgggaagtttgaacttccgcgtgggtgcacacgagtgagggctagccaaaaaataaaatttatttatttttggaatatactcatatgtgacgggcattaactctagcataagttaatgcccgtcacagatgactcatctgtgacgggttatagttgtggcccgattgagataggtcatctgtgaggggctatagtttgattggtcgtctgggtcaaagctatcggtgacgggctttacttagggcccgattgagatagaatcatctgtgacgaccgtttgcccgattgagatagctcatcacatcagtgacttctagcctgtgatggacgccatgcccgattgagatggggcttaccgcccgattgagatgagggtatccattctagtggattaaaggtgccgttttttgacatattaaaggtttcggttttttaataaaaaccagcacctatagaataagtgttggtttttatttagaaccggcacctataattgtttaaagatgtcgttttttttgcaatttcaacccacatgtgcgaaaaggcctatatgtgtcagatttagcacttctggcacctatagtgtcgagaccaatttgatgttttgtagtaatgtgagtaagaagctattgatggttaaagttttacaagtttcactaaatctgatcctaaacattaaatattcagaggaagtatattaattaattagccctgcaagttggcactgtctatttaagcattgccccggggtctccagacggtagcaagcgaccaaggttagaataactcaaggatcaagtttgcaactgatcgaatttgctagctagctggtttca

SEQ ID NO: 2193 - DNA, 2000 bp, Oryza sativa
ccgctcatgtcgttgaactccgagttgaggatggtgtcgaactccacggcgaagaggtggttggtcgcgttgccgttgttggcggagttgacgagccccatgaactgccccggcagcgccgaggtgaggttcttgctcttggcgatgatgaacgccatgccgtggctgctcaggtcctcgaacgcgccgatgatgccgatgacgaaggccgtggagaaggactgcatcgccgtgctgttgggccccctctggaactggagcggcgacgggaagaaggcgtggcccttgagctggttcgtgccgttggtcagcatgagcagcccgttcgaggtcaccgttgccatgccgtcgaagctgaggttggcgccggtgaacccgttgaagacgaaccgctcgtcggtcgccgccgccgggcggaggcagccgaggccgaggaagaggagcaggacaaagaacggcatttctggtttgggaagcaccatgccctgcacttcgcctagtgctgagcttcaatcagtgcctcaccaaatgcccaagctttgctgcttctattgtgtcagtcaagtcacggccccggtgtttaactcaggttactctcagccacctgttcctttttccttctgttggtgcgtgtgaagcggaccaaatgtaaaacccagtagtctagatacggtctgggcgcgattgcaactttcagtctcgtacagattggtgatgtgtcgtgagaacgaggggagtaaaaattctcccctctctctcgagtaagatcaccaacccttcattcactcattgcgcgatcatcataaacgacggctgaaacggggtgtggaatggagtggacgctatgtgtattgccgtgatgcggatgccaattagcctcaacgagacagtgaccgccgatcatgcgggtcaaaggtcagcggtctcaagcgtccggtcctcctttccggccgcgtctccgctgccggcttccctgcccccacaaaacacgcacaaagtcgccgagaacgccataactatcgacgcggcgggcgctcgcctctcaactactcgtaccttgtgaatgtgatccagcatcccagcacacagcacgcataggcacagcccgtgcagacctgcagttgcagctacagcccggcggccgcgtccgcacgaagcttcgtcatccggctaatcactgccatttcatcagcccggctgatatatcctgtgggtcacctcgtttgtccgttccactcgcctcattttctagggtcgttgaggtgtttggaatcgcgagtcggcaccaccaagctacctagcgagattatttaaacatgacattttcatttgactatgttcagtgatgggggtcctttttctttatgctgcactgagatgagataccccgacgagatatttttcctcggaaggaagaaaaaagaagggcgaaatggctgcggatgagtcaaaagagtgggcgtcagtgcgtcaccaacccaatttcgtcgtagtttgctgcctagtgtgtcctcatttcgctgtgctgtactgtactgtgacgcattgacgcttaaccgctcactcctatcaaactcagcttaattgttgcttatgatatgatactattttatctgtatttccttgactacgattcgcaggatcgtcgaaatctgaattgtttaatgcacgccccttgtggcctcatctgtaaccaatttgagtagaactactaccatatgccctgtgttagttgcaactccctctcgagcacgatatttctaaggccggtgcagtctgtctgtctgtgtagtgtagcgaggagtgtgaacgatgtgatgccactgccagtatgccacacacaaccagtaaacctgggataatggttggtgtccggtgttcatgcattgactcgaatagcgagtcttctgttcagacatttgatgctatgactcgaatagcggtgactacacatcatatgccctgtgctaattgcaactcccaaacggaagcaaatctcc

SEQ ID NO: 2194 - DNA, 716 bp, Oryza sativa
  N_region (32)..(32): n = any nucleotide
  N_region (93)..(93): n = any nucleotide
ccccaaaacgcacgacatcccggctccgccancgctccaccttcccaaaaataccctcaccgagatgcccctccgtctcccgtctcagctgcngatttctcccaaccatccgcgtaattatccgcagcgtcgagggcatatatggaaaccggcacgccatttcgaaatatttcgccaagtggcgcacggcttggtagtttcccacataccaccctaccctattcacaaatcccacaaaaactccctatacacagagtctctctctccccaacgccccagattatatgtaataataatatcattattatctgaggggttaagtgaaaaagcgcactttttcctatatcatccctagctagccctttcgtgggagtaaagaaaggaagagaagaggaaaaaaaaaatctcgctttcgtccgcgtcgcgtcagggggtaggagaggaggaagccgaggctccgcgagctcgcgaaaggtaagggtttccgccttatccgaatcccgaatccgcccccaaattcctccgcttcccgcgcggatttcgccgccgggcggcgagatccgcacgattcgcgccccgatctgctctgacccggcgctcgcctcgccggattcggcccccgttttgcagggtttccgccgccggggtcgcgcgggcgttcgagcggagcggaaggggaggagacaggagagggagagggagagggagagagagcg

SEQ ID NO: 2195 - DNA, 2000 bp, Oryza sativa
tgtgctgtccagggtccaggctccaggctcgcttgcaactgtgggcaaatctcgtggtatttcgtggccgctactccaccatttcatgctaagcagctaatgcctgtcgggctaatggcatcacgcatttcattagctactgacaaaaaatgatattctctcctcctgatgatggttgccagcagtgagcgttacagttaagcttgttctccaaaaatatcatattgttctactacttgcagatctcccattctacatggcaccaaatttcaggtgaactgctcctttccaatggagccttggcacgaaagcgacctggatttttcgaggctgccactacgtgacaacaattgtgataggcagtttggtggtggccgcatgcagctgcttgccttgactgaaaattgattttccagcttgtgaccactgtttctggctgtcagcttgctccggagatacataccatgtgaccccatggatcagtggcatggaattcctttggtgttttcaggttgcttgaatttctgggaagcttcctgttaggctacaacgttaacagtgtttgagccagttcgtttttagtactccgtacatttcaatccgtggtaagacctgaaaaaatttcacgtgtgtagccatgctctgatttaagcctgttcggtcgctttgtacagcagtacaggccaggtcatctgcattggttgctgggtgtccgtatacgattttacctgtgcctggtcacctggccttgctgccttgcatatgataagctgtatcccagtgaggcttgactcggagtaaactagtgccattctgaaacgggcgcagccgcggaaattacgctgttatggtggttgcagacttgcagctcatggcagagcgctacgcggttcacatcttaatcaatcgaggaagccatgttccccactgacgagcagcagccagctaccgagcatggtgcgctgttacccttggacattggatactttggggtatcattacgaaattgttactgacgcagcaacgttgtagggctagccgggcagcggcatctgtttcccgattgcagtaaatgcaagtgacgagatcgaggcaaacatgagccggaactcttatcttttcgtctatgcttatactccctccgtacttagagagtcgtttagaacaatgtttaagtcaaatcttaagaatataaatcatgaataactcttaagttgttgagtttgaaaatataaaaattatatgtatagatttgtcttgaaaaatactctcataaaagtatacatatatcacttttcaataaatacttttatagaaataagaaatcaaagttgtgttttggagactgtgtcgctgtcctaaacgacttcctttacgagtatggagggagtacttatcaaccaaaatttaaattttcaaccttaaatttaaagatgtttttaaagtttttttattgaagtttattttttcagcctttgcttttagatcgctaagaatacatatataaaagttctatttacaaattactactttctccatttcacagcatcaatatggatgtgagaaatgttagaatgacttacatcattttacaaatatagcgtttggtggggccgctggattctggaagtaaccgagaatgatcaaggaaaactcgtcaagttctggcacttgtcagagtgaaatttcggaatactatcctcctgataattcgattactagattcctgataattacccggacgggcaaaccgtgtcagggaattcggtttgtgcatccaaggcacgaaacgggtgaagtgaacagagcggcacgtcggggcgacaagggccccaccgttcagtttcagtggcacgaagcgacgcgacgcgtgttcgcatgacccgccgcattccgcggccgtgccgaaagtgtgaacggtgaacctctcccctggcccgcgggccccaacccccaatcatcttctcctggccttcagcctccagctgatgccaactgcc

SEQ ID NO: 2196 - DNA, 2000 bp, Oryza sativa
tccagcaagtgggtgagctcggcccggcccggcatgtaggttgggccaagcccagtcatgcctgagccgtgcgtggccaaacgacccgttttgccatctataatcatggatcatcttacttttgatatcagaaagtcatcaataatggtacacatttacccaaggcatatgtgcggtcacgggtcatcaggggcagagctagagtattgaggggtgcccaggaacccagtaaagaaaaaattgtagctatacctgacatattttcaccatgtgtgcatcccccacaatacaaatttagacacccgcattagcttaaatttgatataaatcagagtaaattaagcaagtggcaccctccctccatctcgctccagctccgatccgccttgagtcgtagttccgtaccagtgctttggagtgacatgcatgtcattgccacatgacttgccagcgttcgatcagtacgtagttgccggaacgtacgcatccatgcactgatgcacacaaactggagaaggctagctgtatcgtacctttgcaccactgtcactactagagaaacaattttttcatttatacggtcaaaaccgattttcacgagcacttggatggtctgtctgtacccaagtgtcttctaaaatcagtacttctacatgtgggtagaacaaagctgcatgcgaaacttcatgtgggtgcttaagccgtctgactgcaaaaaaaaattcccacaaaaaataatccaaaatcctagcagctcccgtgccggtggctgtcaccgctctcgtgctcagggtttgtcctcgctgtcgcaaatgccctcccccactcccatcgccgcctctgatccatgcgtatgggagggggagagcccatcggatccacctccactgagctccgcatcaccggatccactgctgatgtgcttcccatcggggctcgttggtggtgagctctggtttgatgtgttggatgtatactccaggcctcagctcattttgcacgtgagccagcttaagctagcttgttatttcgaacaagctaaaacaccagctcggcttgttagaaaaacgcaacgagccaagtcgagcctagtcgagttggtcacgagtcaagccaagtcaagttggtcacgagtcgagtgagctaacaagccacgagtttttccgtccacccctacccaccgttggatccaccgcggcagccgccgctccctactgccggatccgttgccgctgtgctccccaccactggatcccccatctccgagcaaccttttgtcagatcctccgccaccaagctcatgccccttcctgttcctgcctactgtcagatgaagtggtcatcggctgctcccgtccactgccggatccctccagcattgatcgcactcgcgtgccaccggcggagaggaggaggagaggagaggtggagagtaagtggaggatggagagaatgaggagagagaggggagacttgataatttaaggatgggcttgatcttgtgggccggtggcatatggacctcttactaagaagtcatcttaagagacctacaatgcaattcttgaaccgcgttcgggaaagtgatttttcaagtgagagcaattttggcttgcctacaccttaaaggggtcttgtctgagaattttgattttgtagtagtgtgctataagtacatgtgtctagctttttcgttccaaaataaataaacttagtatggatatatcacatcttaatttttttaaaaacggatgaagtagtctgtactctgtactctgtacacctacttctatcagctgatcagagtcgatcagagagacaacgcaaccaaaattccaacttgtcatccatgcatgcatcctccacgtagctagccctatactctaccttaaactctccactggataaatacccctacaagcctaagctgccatggccaaccccagagagatcagctagctagctagccagcactctgcacagcacacaacgaaacgcaa

SEQ ID NO: 2197 - DNA, 2000 bp, Oryza sativa
ttataatatctatatatatatttagatttgtcttgagaatagttatatatataatatataattcacatgttgttaaattatgctaatatctatataaaagttaatggtcaaaggtagacattttaatttaagacaaacctaaacaatttgaaaaggaggaataacatctacctaaatagtagacgagacactatttttttctctcgtgaacttcactccaaatgcgggtgctttcgttgcaactttcatggatacgatgacaatctaagccgtcgataacactatcagaactatcaaaactgtctttaatttggaacacacactactaaaaatcatagttaagagatgtagaaggtatttccaaataatccacctgcctctaatacaatacatacatatgtagaataaccatataaaaatagaccatacatataaatagatgaccgtgcgcgaatgacttaatatattcctgtgaaaaccttttcaccagcggatgacttaacatattcctgtgaaaaatttttttcgtaggtggaccactcggtgtagctgcctataaaagtatttttcccagtcaagcgtgttaaggatcatccctcctgcaaaaatcgattcctcatgcgggagtactgcctcacgaaacattttttagaggtggtcgacttgatttagtggtccacctgccgaaattatttttgcagtagtgatgtattgagtgctttcttaataaaattgaagggttagattagatagaatcacacattgcattgccatgaaaccttgcaataaagaagccacatatggttgtagatatagcattggaccactgaacagggctgccttgatatacatgaaacagcaactcacagtaggggcgtttttctaagttcctttcccatgtttgcatccacttgaattccaatggtcctagctaagggcactgtgccagtacttgacacgtacggtgtgctatacatgtatagcgattggaggacttattagtcgtgttaattatccatccagattcggtgatggttatgcacatcaatatagagcaggtcgaacctaagagagagttcaataaaaacttgtccaattttcatgcatttccgtgagtttagattatacactactaaaaatccggatacctttatacttttctcataacttctcgattttatctctgtttaagtattttgacgtaatttgtcctggtttttacatgaaaattttcacatgtcaagttaaaaagaagataagggtgagcataatttgcctctatttttatatgaattttcacaccgttaagtcctcttaataaatgaggcagagcaagctttagtttaaaaaagtgggggtaaatcataacattgaaaaggtcaggataaaattattacgtactggagttgaaaacagaagaatgtaatttactattactgttaagactaactctcattcacatacagccgaactgttgaagtagaccgtaaagtgcatcaattcttcatttgagtacgatttgagaattggcccaactttaaaacaacttaaatgaagatttgaggattaagtgaacttaaatgaagattgatgcacatgaatatttgatgaactatccaatttgttttaaagttacttttgcgtgttgttaggtaaaaaaataaaagaactgttagagatattgtatttgtatccggttcggtttctctcaatcctatcccgattctgtttctatgagtcaggtatagagataaggatgtaccgtccctatatgtactcgtgtccgtgatcaatctaagttatcgcgttgactttatacgctctcatggtatcagattaatctccaaattcgcttccgcctctctctctctcgacatgcgtcgcaactcctcttcgcacccccgcgccgccgtgtctcccacgccgccgcgcaccaccgcgccgcctaccgccgcaaccttgccgcgccgccttcttcctcctcgccgcgccgcctcacg

SEQ ID NO: 2198 - DNA, 1525 bp, Oryza sativa
  N_region (21)..(21): n = any nucleotide
  N_region (30)..(30): n = any nucleotide
  N_region (45)..(45): n = any nucleotide
  N_region (1320)..(1320): n = any nucleotide
ttgattcagattgactgaccngtctagtgngtattcagaaattcngacatcagggacgtataatatgaatagacatgtgtagtactgacttagaccaccgtcatttctaatgccctagcaaacaaagaagctatataccagttgctttcgatgtacatcatgtacatgttgaaacttgcagctacaagctatcggagaattcatcagttgggttgggtaaagaagcaaatattgtttaaagctaagtaaaattatttttgtaaacataaagtgctttcaataagattttgtgctagcttttacgtcccacccttttgtgattagtctactcgatgaccggcatgattacattgctatttccaaatgacaagctagctagcgctatcttttcttgattagtctactcgattagcggcagcatcacttgcaaatgataagctatctgcacgcaacacttcattcatggtaagtgtgcatgatgcatgtatatgctttgaaggttagtataagttgtgcagattaaaattatgtgcaatcaaacactaatctccaaaaattccgtgttagtggtcaaacatttttaggtttttccataaatctcctaacatatatatacaaaatttaatctggtatttagcatacttcccatgagatataaacagcaatataaaatttaagaagtcaaatgtttttactttttagtaggcagaaacagaatgtagaaaatgatgtattagaatgattatttgatctcaagttgtacatcagtgataatgaatagaaaatgaatttaacatttaggagtagcagaagaaaaatatcctaactggtcaataattgaagtatatatgttacactaattataaatcaccgaggaattaaataatagatagggttgaaaacacagctcctttgtcttgtcaactttacctcccaaaaagcaacgtcactaattaactgatcagttaccaaccctgtacttttatcatagacaaaaaccagccaaaaacactaccacaccaccggccgctagctccaattggcatcaaaagtctaacatgattaaagataaggtacacatatatctactaacaaagcattacggagcacataatggaaaattaaaagttaaaaaaaccgctgttaatattatacgcataaacaaagtcatcagccgcctcactggccaagccaatggcatctctagttgcctctcaactttggtcacatgctttgaattccaactcatcatcgacccttatgttgcaatgtgatgcagtgtgcaccctcatcatgcatgcaaagccaacaagacaaggngaaggaaaaaaaaagcatgcgtgtgttagtgatatgttactactatataaacccctagcatagagtgccaaaggccattgccgcagcagcagcagcacaaatcaagtgatccgtagttgctgcttcttcgaattctcctctcaattcaacctgcctcgatctcgctctcgctctcgctctctacccgagtgcaccattaaggagg

SEQ ID NO: 2199 - DNA, 1930 bp, Oryza sativa
tttttttacccgggggcacttagggcttatcatttgcatttacgtgtagcaattggcagttatcttaactgcaagagggggaaaaaaggttagcacaaatcttttagccgtcatgctattgccatgtagtggtatgaactgtttgtgatttatatcacccttgttatttaaccccaagaaatgatctggatggtagactcattccaaaagaaattattcaaggtgagatgatataggtagttctgggacaacatctctgggtagcccttaaagttcatatcatatcaagagcatgaagttataagagtagttcttctcatctgactgatgtgtgatatggtgacgattgagtttttgcttgtggtctcacaattatgggcaattttagggaagtaggcaggtgatgttgtctccgggacaatttaatttcccggatataattcatggcacattgaattcaataattcaagtagtaccttcttgtggtatgaccttggtccagttaggtgtgctctcaggatacagctcacagccacaccgaatggtagtatttttttttattttttagataatggaagctttattgaactcagtcaatagtatatcaggcatagttgttgtcctgtgagagactgtaatggagcatgcaaatagaatggacttttggacaaacactgatcaagttaatgataatgccagttgcattcaggacagtatttccgctgtaggatggatgcaatttggatagattaagtttcctttggtcacgttgctcgtctttggtctatgctaatatgttttaggatagatttcactgggtaggtattgaagtttctataagctggttccattgacttaattgcaagttctgtatgccaggtaacactggtagatacattttggtatcaaaggtaacattatactatagttatatgcctatatttatgattggctagaacttagaaggggaaatgattagattgcatgttgtttgtgtcatgctaatggaaggtggtggtccttgaattcgtacttttgtgttattttggtaggagagtgtggttcaatgttcttaaatgatgtttggagtggatatttgtggtcctaaacaagaagtagatgtgcttcattttggatctttggagagctcattgtcatgaaaaaaaaaatgagatgtttccatttacagtgaaagaacagtttacatgtcggcacatcttttcccctggagcaaataagccatttgacacaataagtaaattgtgattagcagtctctttattctttatcacctatacatccagtggagaattttgttccatgtgctctcttgtgggaactaattttattttggtgttcaaacataaattccctgaaaattgactaggcagttttgtgagcttccatgcaactattgagaatggatagcagttatgtataaagttagtttttcaacttagataaattgacctgcacaactggcagtgtgctctaggctctaacatactacatagatttttttttgaaaggatactacatagattttttatccttcaaaatccaaaattcgacttaaaaatacatcttaagaagcttttatggttatgtttgccttgtaacactcaatggttccagctttgttgtaattaggatccaccatattgaggcttgtttttaaaaaggaattcttttttggtctctgttttgatagtctatatcacgtgtcatagttttgtgatatataattaatattttagttaaccaaataatttacatagaaatgagcttactagtgtttctgcgttcgataaaataactatggcttcatcataatatttttgtaatttaatgcccctgctagaacatgtatttatttcaaaggactaaaatgtattctttgatgttttctttgttgcaaaaggttgtggaa

SEQ ID NO: 2200 - DNA, 2000 bp, Oryza sativa
acgaagtttatagaaatacatagcaatttttaacacaaatatactagcaaaatatatttaatgttagattaaacaaaactaatttgatattatatatgttgctatattttcatataaagttgagatatttaaagaagtttaattttgaaaaaagttaaagcgttggagcgagtagaaaatttttggacaaattatactctaaaagtgtgccacaaaacgatctacaaataatcgtggcctggtaatctacagatacttaaataatcttgagtgaggatgataattgtgggccctactaactgccatccaaagtagaggcaaatgactggctcgtttcaaaatatcaaggacaaaatcgtaaaccctactttaaaatcacaattagaactaaaagtgagggcaaaaatgtgattgtccccccccccccaaacaaaaaaaaataatgtgtgagctagagggtttacatgccaatatccctccctaattctgttggaaaaaaaaagtaatgtgtggagctagagggctacatgtcaataaccttaactgccaacattttatctttacttttttttcctttaagaaaaatgacagtaggtaacaaatatatttcagaattcaggaaatgatatatgcagaaaataatgctaataataaattaatgataattttctttaatacaaatccgttgcatcacacgagtcatatgctagtctaatccttaaaaatcctagaaacattatctaagtcaacaaatcaacaaataactaatattcttacatcagctactataattcttcgatgttgaatagatgaataattacgaattaattaaattgtaaagttgaaaaatcgattttttctaagaaattcacatatagaaagtttatataaaatcacaatgttcaatagctcggaaatcgtgcaaatctgctcactaaaaaaaatgctgactctataccgaatacacatccctatacgtataagtctataggtaagaatttttatatatagagaaaataacccgcataagtttatagagcatatggtaattgtgcatcatatgatattaggataaaatgaagaaaatataaaggtgagagtagagttttggataagcaaaaaatccatccatccatcctttaaagccgttggcggcgttggccggcccaacgacatcgacggccaaatcccccaatcccaccttccggaaaaccaccaacccggcagcggttttccggcagccactgccgccggacagccagccaccaccgttgctggctactcactctcacagccacagtgaccgactcggctcgcctcgcttgcagctgcacccaacccaacctcctcgccttcctcctctccttcctcttctcctcttctctactccactctgtcccacgcgcgcacacacgcacgcagcttcctcggccttggaggggtgaaggggggagggaggaggagcagaacgaaggatcttggggctcgggttggtcggggtatggatcggctcggcgcgggtgtcctaatgccgagctttcttggcaagatccatggccgccgcgcgagaaccctcgtctcgtagacagccctaaagccctcgcggcaggatggtcggagcgcgtaggtcagccttctcttcttctccttcttcttctccctggaatttcggtttcttggatttgcggttgcttcctccagggtttcgagctccgattttggggggatttgatttttttttctttttgtcgatctcatcttttgtgattaggggagttttcacatccagatcttgcttcgtgttactgaaaaaagaataaacatggttcgttcgtttgtttgatttgcaggcaaatcgacggggaggaatcaagaatcggggccttcgatcgctgcagaaaccgccatggacagctccagcaagctcgcgcgaatgcgcctgtgatagaagacttgtagttggagagcttgcagagccagattgtggaggagaagcagcg

SEQ ID NO: 2201 - DNA, 990 bp, Oryza sativa
  N_region (1)..(1): n = any nucleotide
  N_region (8)..(8): n = any nucleotide
  N_region (14)..(14): n = any nucleotide
  N_region (41)..(41): n = any nucleotide
  N_region (81)..(81): n = any nucleotide
nggggttnggaaangttcgttgtaactccttcatcatcggnttggccggttaaaacgctgggaacttggggacagcatttnccggcggccgcccgccgacgatgaccgaggcgacgactgctggccagagttggctcgccgcacggcggcgccgccgtgccggtgttggattcgacgatcctgtacatggagagagagtcggatatgggatgccttctttctggcctcgaagcacaaaatgggccttgtgctccgaagtggacctaatagggcccttgaataactggaccctgtccagattaactgggccgagccacgaaaggcctgagccattcagccgtattcagcgatgccgcttaagatgatcccagtagattcctagttagacactacgatgtaaacctgagaatgaaatcactaattactgattcaaccctttaaatcttcatgcaatcagtaagttctgattcaacactctcacatctaaaacaaaagattaaacccttttaccacttcaaaggaaagagcacgtaagttgacagctactttccgttgcaggacatggtcgcgataaggagatggatgatgcatatgcttgtttctttaattaaggatcttacatatggttgagaaattgattgatcataagtaacatagccaactgagcttcagcatgggtgctccaaccatatgtaatcagggaaaaaaaaaagaatactccagcaataagtcagcgtagttacagttacatgaaccggtctaaggaaaacggatgcgctcgtcacatgaacgacaaacaaacccaaatgtaaactttgaaattaccgtatctatgaagctaatcaaatggaaagaacaagagaacgggaaaataacaggtgcactcggggaagaactcaacctccagacacctacaaatactagtcgacgagattgcacgaaatggtgaagagcctgtgagagtagagtagagtcactctagtatatgcg

SEQ ID NO: 2202 - DNA, 2000 bp, Oryza sativa
  N_region (1308)..(1308): n = any nucleotide
acaaactttgtacgcataaattttatggtgccaaaactttatgtaaaaagtaatttttgaatcggattgtaaaaaaaaaaagtcgaaaaaaaatatccttgtgggctatgagctccatttgacttggttgttcgacaacataacattgattcggagtccaccatctccactattccgacatgtataccagttatgttatgtaaaaggaagtgtttgggctaaagcctaggaaatccacctcttgtctctatcccaactccaaaccctaaccgctcaacatcgcatgcgtagttattggaattcaccgagatcatgaaagttcagagatggagaagaagctcaatggtgtatgaaccatgaaccaaaccgagatatcaggaacttgtaatattatatccttactttcattcaaagtgtcatggtaacaaatccatttgtgtggtatatagtagaatagcacataggtaatacatggtacttataggtctgaactataaacatttaatggctaaataagacgtgaagaaagataatgtaaccttcacacctctctgtaatgtgagtgcatatatatccgctgggttatcattcacattctaaacttgtgcataactaaaaataggagaaaacacaatttgacagtttaaaaacaatgtgacctcacactatttggtaatgcgagaatgtgagcacacgtctgtcgggctaccactcacatttacatccgtgcataacagaaataggataaaatgtaacctgacagcttaaaaaactaaaaaaaaggcactccatcctatttttgagttttaatatatgacaccgttatgtaaaagtataagttaagatcatagtattgatgataaaacaagttagaataaaacaaatgatatttatataattgttgtgtataagacgaatagtcaaatatcacatccaaaatcaacggcattatacatccaaaatcagagggactaatggttaaaaacctaaattaagtagggtcatcaagctcaaatttgatacgcgtaactcgaaaaatttccatcttcgtcaagagtgagtgtggacctgtttagttcgtgaacgaaattttttggtatgtcacatcggatatacgaatacacatttgaagtattaaatttagactaataacaaagattccgtctggaaactgcgagatgaatttattaagtctaattaatccgtcattagcaaatattaactgtagcaccatattgtcaaatcatgacgtaattaggcttaaaagatttgtctcgcaattagacttaaaccgtatcacagtaatangattaaaaatgttttcacccgttgaaacatacaaacatatttccctagtaagaaattataaattaaagattagttttgaagaccgtgccaactttaatcaactttaatcacgtcttataggatagaaggagtaatatttatatgattgttttgcataagacgaatagtccaatattacatccaagagcgagtgagtgaaagaaaaggaaggtacacgcatggcacgtggcctttaaaaatagataaaacgtgacgcgtacaggtcagtgagtcactccctgacagggtgggtcccactccaagttagccaaaagccgtacgtacaccccaccatccgacgtcgccggagggagagaagaagggagggccgagggagggagagccgtcgggaactcgctcactctctcactctcactgcctcaccaaccagtcaccgcccttatcctttttccctctaaggtctaaaccacccccaatcacgcgggacccccattcgccgcgcgcgcccactcctccgcgtcgcgtcacccatggcctcccgcctcctcctcctcccccgccgccgcagccgccatggcggcgccagcctcctcctcgcgcggctcctctcctcatcctcctccgaggctggcggtggtggggcggtggagaaggtgcttgtggcgaacaggggggagatcgcgtgcagggtg

SEQ ID NO: 2203 - DNA, 2000 bp, Oryza sativa
  N_region (1315)..(1315): n = any nucleotide
aacacaactttgactatttctataaaaatatttattgaaaagtgatatatgtatacttttatgaaagtatttttcaagacaaatctatacatataatttctacattttcaaacgcaacaacttaagagttattcatgatttatatttttaaggtttgacttaaacattttcctaaacgacttttatgattatggagtagtatgaatttgcacacctatgcgaattatgagccatagaaacacgagcagccaaacgaaaggagagccgaatagttgggccaaacctcccgaacgaggcccacaggaaaaccaagcataaacagcccggttacggcccatataacaaaccggcatgcagcccacacccaccgcttgtacaatcggtacaggtacaaacgtactcctccacgaccgcgtaactctcgttgccacacgctcgccgtcgccgatttggcacgcgcgacacggggagatttggcacacgctgtgcgcctgtgcggtctgtcgcgtctcgtagcggttggggcaggggccgttcggtttcgcggtcaagcgcgtgacgtgaggtcgcccaagccaagccaagccaatccaatccacgccaatgagacgcgactccacttgccgcgcccgaggcccacggcgacgccgacgtaacaaccgggaggagccgaggaggaggaggaggaggcgtcgtcgcggcaacatcccatcccatcccccacacctcccacacgcggacacgccaaacaactccggtttggactcgtctgaaatcccttcgcaaaaggtgtgttaaaaatttagttaaaattaaaacgatgtgatgaaaaaattaaaagtttatatgtgtagaataattttaacgtgatgaaaaaattgaaaagtttggaatcggcctcgcataccgccccaaccccaagtcgtcgcctcctcaaattattggcgaatatacaaagcggcaagtggtgtactgaccgtacaatcctactactcgtacgcctcggctgtactttgatcccaccaccaccaccaccaccactgagatgacgcgaggttcgcagttccacgcatcccaccatcaccacaccacgacgacgacgacgatgccgcagcgcgcgtgagcgatcacaaaaacgcctccgtcttccggcctttttcccgtgagtgagagagctcgcgcgcgcgcgcgtgcgttcgcctactacattctttcccctccaaccttttcgaggtagtatatttttcctcgtcctccccgtgctcttgattctctgcctcggtttggtattttggcctttttgatcgggagggcngggggccaatttgatttgccgttcatttcgatttgatttgatccgatctgatctgtagaatagacatcacatcaggggtatggaggttggcgtgagcgaagctttgaatcccgggtagccgccggagagattgcgtcctctcgccttccctccctttgattcctgctcgcccgccgctcgtctttccgctctcgccgagacacggtgttcggcggccgcgcttgtttggtcgctgcctttttatgccaaacccatccgctttgagagattggcctgtcgttttcctgttgtttggtgtaagattccgtcgctcttgaaagctcacgatgcgaaaagaggggcgatttttttatgtttttgatttatggtattgagggttttttttttttgcttgctttgttgatggattcaggaggaggaggaggcggtggcgattgatggaatctgatcgaatgccgcttcaggctgggtcaatcgagctggctgcaacgatcggaggtttcctatcccctcgtgaaggtgtcaaatcagtatccttgtgccggatggtttggggataattttcgtagtgagttcataatagcgtctcatttgggattcctctggttgattcagttccctttgcaagtttgcgggtttgttcacggatttggttggcttgagatcgatcttcattcattgggag

SEQ ID NO: 2204 - DNA, 738 bp, Oryza sativa
aatcatttgctccttccttaaccacctctcctactcgtggatttctttttgttcctttctttctcctctcctctcttcgtaccccctgtcacgtagttcttgtttactctttccattaggtgtcacaggtttcttctcctcttatccttcctttccatcggttcttgtacttggtggtatacccctagctgctcgcctttgtgttaatttggttggattgggagtttcttgttctctctttagccttgagcgatcttggtttcttgcaattagcctttgactgcttcttcttcttccacttgccgccggcagctagaagtggtccatcgtaccaaccctttcgtcctcattgaaccattccgcctcgctcccagctccattactagaagcactagagctagcgtgaatgcgtgatccttgatgcgtagttagcagctagctcctgcccccaatctgccatctccgcattgcgattttgagtttttgagattgtaatttgcgaacgatctcggttgtgctgagagcttagcgttgacttcgatgggtgcatcgcgttcgatcgccgattctgatttggtcgcgtgatccgggggtgatcggtgattactccgagcgggaggggagatcgtctcttggcgcggttgcgcttcgccgcgcggagggagagacattcgcggcgtaatccgaaggtgtttgttggatcgaggcgtggtgtccgagaaagattcggagcggcgg

SEQ ID NO: 2205 - DNA, 2000 bp, Oryza sativa
  N_region (152)..(152): n = any nucleotide
  N_region (798)..(798): n = any nucleotide
  N_region (1478)..(1478): n = any nucleotide
  N_region (1511)..(1511): n = any nucleotide
gtctcgccggccggcggagataacgacggcttggagaggcgcagcctcctccacttccgccccctcgggcctattgccggcagccgctgggaaagaagcagcacacgagcgtcagccggagggaggagaggagcggtgcgcaggcgcgggcntgggcgccggccggagggaggagaggaccggcgcgtgcactcggccggcggaaggagaggagacgcgggcggaggccgaggggagcgggagaaatccgcgacgcgctccgcgtccacatgctctctcacggcgccccacgcccccaccgattcaccacctacctcgtcacgtgcgtcaaccaccgcctcctccactcgccaccaacgccttctcatcctcgagggcgatggcggggtcgagaggctcctcgacctcctcgacgcggctgacgccgccgtcgatgcgcgggcagcgcttgagcgcgaggatggcgcggtcgtcgaggccgtagagatggacacggagcgcggcggtggtgcggcggaggcggggcgtgaggaaggaggagaggcggaggtgcgcggcggagacggggcgcgaggaaggagaggcgacggtgcgcggcggcgtcggggaggcggagcttgatctcgacctccatcacggggggcagggaggagaggggaggctagggtttggggttgcaattgggattggtagggaggccgatgcggtgggacttggagggcgcggcgccgggcggtgggtggaggaggaggttggagttggagggcggcggggtcgtggtcggagtggatgaggcgntgggggtgctggccgccgccgcggtggcggtggcaacgcagaggtggtcttcgagctcgtcacgatcgaaggtggtcttcgcgcgccgccgctccagccgccgtctccccacttcgcccgctgccccagtgcacatcgtgaaaaagagagagaggataacgggaagaagatgagggatgggaggatgacatgtggggcccacgtgggtcccaccattttttttattattattttgtatgtgaaacagacatgtgggtcccacagggtttattattttttcggatcaaattgccacgtaagtgccatgtcatatgaagaccgagtcgaatttgccacgtaggcgccacgtcagccaaaaccgccatctaaaccgccgagggaccttatctgcaccggttttaatagttgagggacctgttgtatctggttttccggttgaaggatgaaaatcggattcgttgacaagttaagggacctcagacgaacttattcctatccgaaatttctctctttgttgtatgttactagtaggttggatgaatattggtaagagaggagacccatatttctcacctactactttcgctggccggttatacgaaacaacattggtgcgctgcctgcgctgcttctagggaaacacttgacgaaaatgattggtaaaagtatgggcaaccttntccctagtttgcaccaacagcaagacgaaaggnaaaacagagacttatatcaagatgatacacgcactgaattttctgcgccgaaaccagtccgcgatagtccaataccgaggacgctcctcgctttctgttgcaatgtttgcccaaaaaaaaaaaagagaagagagcaccaaacacaatttgtttatctactggagtgaacaacagaacaacgtcgctaaatttcttgttaggaagaatggccaagaaggcaagaagtatgaacaagagcaatgaattttatttccccttgttgaattcaaaaacttgagagacttaaacttgggccgacaagggaagcaacgccacacggctcgtgtgaagtgcacatatatatacacgatggcgccaaacacatttctcaactcaccaggcgcaccgcaccatttctaaatcacatagtgctaaacccgccccctcttaattatatctccacttagcaaggtgtgtggttgcgagcttaaaacgcacccacgcagggcc

SEQ ID NO: 2206 - DNA, 2000 bp, Oryza sativa
caagggatgagttcatcttcttctctcttattcctcctcctcatcaacctgtttctataggatgactaggagtttgtgggtggctagtagcttgcagttatggtaggacagagtgtctatgtcccgctgtagagctgtggtgacaggccacacataacagtgataggctcggcgttagttcttttctcaagttggtggttgggagtcgttagtttcatgctggtgagtttttcttttctttcctaattgtagcctcctagagttgtaatattgtatattttttcatgctatattaatatgaagcctcgcagctatctcatgtggtttgttcaaaaaaaataacatgatcaattgttgtttgttgtgtagtggtctctccggtgtcactatcggtgatttgacaaagacactcccaatgttgaatggtgtaaagatagtcatgtctccagtctttgcacatatatataatacatagagtcaaagtttaagatcaaaggtaaccttaataagcgattgaatgctctatgtgatggaaatgtgcatgacgtctatagtcctttctaagactctaagagtgagttacaaaccgcctttgctacctgtacgttgattgagttttagaaaaatcgtagttgattgatcaatcatcaatctgttgttgatctaagggctatagctctatcttgtacctcgagccaagagggagacatgataaggagagggatatgtcagagaggactcgcgacaacgtcctggtggagatgggcgggcggtgggtgggggtgagatcatgtggttaggttgcaagggtgatagatctagcagcgtgagccaccccgagatgaaggagaaaacacatatggatttgttgatgaagagggtgatggcagtgatgtggagggaaagaggacagggataggaaaggcttgtccagcctcgccggtgtcagcgctggcagtgcaaagaggaatgccatcacacgcgagtcaaagttgggacttagaacgttggtggcacaagagacgggatcaggagagggggaggctatgttaaaattagattgttacacaaataacaatgtaatctgagctatttaataaactatatataaaacatcaggcaactaatgaatggtcaagccgttatcaattattctggatggtaactccctgccttcgatgcaggacggagtgtagcgggggcccctgtccgaccatcccttgcgataagagtttttttctttctcagtaacttatatttcctgtatttgtgttttttgtttcttttttttccttgacccctagcaacggccctctgaccgtttgcgttgtgtaaccaaactctgttgtcttcttctaatatatttgactgtgcaatcatttagcgcgttcgcgagaaaaaaattggtttggatggttaaatcttactagaaaccagaacaagataggctacgcaattagcaatggatggttggcattaggtcatctaaggtcaaaccgacggagatacatttgctgcataaatagcaactagcgtaatatgtgatgtgatgtacttcctacgtcttataataagtttattttttagctacttatatttgtctagaaataagttaatttttagaataattatttgtatcggagtttatgaaagtaaaaagtaattgtatttggagtacataaagtgaggaagtattgagatttgataaagtagaggtattttagtttttttttattggtacgtatgagattagtgaaaaataaatttatttgggaagggatgtagtacctagctactcttgtaccagctagattaagtataaaccaaaaacaacgggagtagtagtagtaagaatgtaaaacggttccaacataacgcaacaacggaacggttggatattcggttgggaggagaagggagattccgtttgagtaggttataaatagcaaggaatacatacgtacgttccaaatcatcacaaagcaagcaattaagctggc

SEQ ID NO: 2207 - DNA, 2000 bp, Oryza sativa
gaggccgcaccggtcgatccacacgtgcccgcgacccgggcttcaccgccacggcgtcggcgtcgtggccgcggcacccttccacctccaggttgcagacgatcacatgctcgcactcccgcagctggagccccttgccggacagtgtcacacgctgcccgcggccgtcgatggtcttgtacgacgacacgcgcagtcccgtcgagaggtggatggtgcccgacacgtcgaagacgatccatagcggctcgcgcctccggcaaccctcccggagcgacccgtccccgtcgtctggagatcgagacccatttgctacgttgttagatgcagggagatggaatatgaataggcttgtgtgtgttagtgtacgtgccctcgagggtcgtgacgtggtagacgtcgccgtggaggccgccgatggcgtggcggccgaagccctcggcctgaccggccatgacgcgcagcgaggagtccgcggtggcgtacggcatgaacacgactccctccacggatgccggtggctcgcccccgcactggccgtcgagttgaggaggctccatggctaccgactacgaggaggttttcgcgtcgctatttgttgagtcgcgcgcggggaaacgcctgctgtagtgctgtttactgctggaatttgttgcgaccgggccgtttggcccgtttccgcttttgcagcggcgcgcgcgtttcgggccggcccagacaagccgccaaccggaagtccggaagggattaacacaggtcaaacagagcgttttaggagtttgcagggtcgttgcattgcatccagcacgagctcgttactatctgcatgacgttacgagcattcgatttcaaactatcattcaatctcgatcgtgatgtttttacctcccattgcccggaaacgtcagtgcatttaagcttgtccctaacataagttttcgctgttagatcgtttaatgttcataacatcacatgagactaatcttgaatgaaaaatcagttgggaaactctccccctttgatcaatcttagctaaaaacatcacatcggaatatcctctttgcctgaaaaccctctctaatcttctaggccaaaaaggcaaaaaatcggtcatggcccttcccatttttgtactgtttgatgaaagttttaagtaatatcatcgtgcgagacatccgacagtgcgaagtttggtgtgtcgttgtcacgtaaccttccctcgtttcctcatattcctaccgccggttgcgggtcgtctttttctcgcccgtttcatgggctccctttcatgtcagcatcggattgcgtccgaacaaagtccactcaaactctcaaaggaagatcctgaatggtctccgatcgaagctgtattggctatctgcgaagtgtcattgccggctcagtggatacacacacaggacacgaatgtacaatcactaaccacgcagcaggtacgcaataaccagcgttagtttaagcaaaaaaagggtcgtcgattacgtataatttccgctcgatagagccaaaaccgaacgtgcccataatccccccgtgcgtggatttacgtgacgcgcgacagcgcaattctctcccacttccgatctcttcttccgcttggactcatcgccgtgacgtcgacgttccacgaggaaaaggacggcgtcgaagccaccgggcaacttctcactcccgctcgcgtctctgacaagtgggccccacgcctcgctttcttccccccacctcccgcccggctgatggcccaaaccccaacaaaacctcctccgcgaaagctacaatccaaagggagtcgttaccgtctcgccattgtcctcctcctcctccgcccccacctctctttcctcgtgccttcctctttcgccgccggccgtgcgcctcttaaagccgctccccgcccgaaaccctacctcgggaaccctaccgcgcggctttgacccagggataatcccactactggctactgcattcgcttatctcgctcg

SEQ ID NO: 2208 - DNA, 2000 bp, Oryza sativa
  N_region (1389)..(1389): n = any nucleotide
taattgcccccttttcggtgcaaactatctcgtcagattagtcgcatgcatgttccttcgttgaattttgcaaagttagttgtagagagaagttcttgggagggtggatgctacggtctcatcttctctcttttcccccaacaagcgagctagcgaaggggaaaatggggggagcagaagaatatccatgttaggttcgcgtgcttgcctctcggctgagctctagctgttacggcgttcgtcaggatggctaatccgtctcgccaattagaagatggataggtcgtagcgttagatggattacttgatggttgatgcgctgcccatttattgttcgtagcaggttctgtcttctcagtccgtgtgagtgtttcatcatattggctaccaagatgatcactcttcgtttatcaagagagtagggtgagatctcaatccgttgcaactgatgagtacttccttcgtctcagaatgtaagtatttttgagttagacacagatattaaaaaagtaggtagagatgattggaggagagttgtgattgatggggaagagaaagtaggtgaaaaaaatggttgtgattggttaagaggagagagtaggtgaataaatagcttcattttgggacaagttactgtactaaaaatagatacattttgagacggagatagtagtatacttcacttactaccgagtacggctttagttttgctacctccgtcctaaaatatagtaacctaggatcggatgtagcatgttactactaatctagataggcagcatgtctaaattaatagtaatatgatgtgactcgtttagtacaatattgatatattttaggatggaagaaatatataaatactgtttttttattcgaagtagttggcccatcatttctgaaatagatgattgatgccatgacgccgcttgctttctagaactactagtaattttaggtgagagctagtactgatgcgtcagtctaagataatggacaaaaaagggctacaggctactattgattatcacattaaaactctgtacgacagatttttctgattaaatgatagccatatgcccaacgtgctgcttgtctaaactgaaacctgacatcactcacagtatgcccagttgttgggtggtctattattatttataaattataactctggcatttttttattgtagggcaatatgttttccattattttccattaaaacctctaatctgcacttccactatctgctcaaaatctcaggctactttctttcctcttcctcaggacattaacctggtttacttgtaagaaagtaaagccatggactcctcataccagcatgacaagcctctgctggatgaagagaactcctcgcaagtggtttgttcctntctctctctctactctcatagcgagatttgtctgatttttttctcttaaagagaaaaaaatatttggccaaatttgaggtgccttttctgctttcatcaaatggtgtgaaaatactgctttcagctgatgttttgtttctgtttaatgctctagttctagagtgttgcgaaagtaaaaaagaaatatagagtgaagttcagtcggaaaattttctcttacttaaaattattttatatggttgcactagtatggggcatggccgactggggcatgcaatccaagataaactttcaaatgttctgtctaaatatatcatccttacaataaggacataaagtggtagcaatatattactaatgtgaccataagaatggctaggcccttgcatactaataatgtttttagttagtgatactttgcagtttttttggatgatcagttaatttgcttccaatgtatataatataattttgttcttaggataaattttcctggaaatatatagaataattccatctacattaggaaaatgcacaattctctattgaaacatctataccagtgatggatgacactggcattaaaggctatttgtgttttttacttggaa

SEQ ID NO: 2209 - DNA, 2000 bp, Oryza sativa
  N_region (763)..(763): n = any nucleotide
  N_region (1015)..(1015): n = any nucleotide
  N_region (1017)..(1017): n = any nucleotide
  N_region (1037)..(1038): n = any nucleotide
  N_region (1057)..(1057): n = any nucleotide
  N_region (1067)..(1067): n = any nucleotide
taaacatgtgctaaaaaatcaacggtgtcaaacatttcgaaacggagagagtactactatactgtgtacaattccaaagttttcagtttgacatgtacactgtaattgattttcgtctctgttcgtaaatatttattagcaggcactatttacatttcaactttgatcgtccgccgtttttaagagaaaatctatacttaccatattatcaaaatgaaggtgtattacgcctgaaatataagtagtaatctttcgttcatcgtagtctaaaccatttaaattattaagcgaccaaaaattgaaatagtgatattcaatagtgacaagtatctcgaaacaaagagagtaacatacataatcatcctctgtaatggtgtgtaagctcagaatcactaagtggacttataattttgctccagttaaatctgttgggcaaatatacctggaaccatggagagaaatcagagcaagggagattggagaaggtagttttggtttggtggcacacagatctccatgtcggcctatgccgcctatcatcatcattccactagtagcaaaacggacggccctggaagctggaacaaacagaagaaaacagcaaacaaattgcccctacgcgacgtaggcaaagccagccaaggcagcccaccaattattggtgggccccactaatcagggacagtaaaccggccttttttacccgccgcaccaacggcaggcgggcgctccaggaggtttcgcttcgcagtgaaaaaaaaangaaaaaaagaagaaacggaagcgaatatcctacggcacttgggcttggctataaaaaggagccgtctttgacgcctgaacgaattgctgcgccgtgctcgaacagatctcgatctcgatctcgatctccgcacgcaccaaggcgaagccaattccactaccaccgctcttccttcttctcactccttctcgcgactgcggcgagggtgagtctcctgtcgtgagaatttcggtctaccggcggcggaggtgntnttcgcgtcgtcagacgtcgnngatcataggtaaaggttgntcttggctcnggttctcttatctctggttgttgataatctatatggatctatggtttgttgattcgtctgtatgtgaaaaacatcatcttgggttagcgaggggtgggtttcagattctcaggtcgagtctccagtacactggttgagtgctcgtttctagatctgtatttgttctgcaacgcgaggtgttgtggttgatgcgattcatgcgaaaacttaatctgtcatacatacttggaagggtaaaaaaagaaaaaaataatctcctttctactggagatgcatagcgtgggaattataattagcctcttgttatctgctagcctggttgttgagcgaagctttcggatccaaccttttaattcagggtagctttatgtagtacagaaaactgtgtaactgtattgtgtttcctgttactttcttttaaaacaagttctggttgaaaagcgtagaaacagtcttaactggcatgtcttgttttcatgcatatgtgctgtgcagtagattaatccttttacctagaacttctcaattgagttttatgttagttgattccaactagtagttgtccatgactgaccttattgcatcttcttcttttggcagaattactagacttccaataagaaggaaacaccttagggaatgcagaaagatgtgcttgcatgctagagagctaccttgtgagggaattggcagggtagcaagccatatttctccttccacaactcttcatgacattggaacacaagagtatatacagcgcttgctccatgtgctctcgcactatggggttcgacgtggcaactcaaccatcttcttagatcaccatcttggtggagacggttgaagtcacctatcatttctaggctcctggttaccacactttgagctttgggattactgctttctttggcgtgatggcggagcagagaggaa

SEQ ID NO: 2210 - DNA, 2000 bp, Oryza sativa
  N_region (924)..(924): n = any nucleotide
  N_region (1766)..(1766): n = any nucleotide
attaatcaaactaattagtagattatgtagttaaacaaattcaggcaaattcaggcaagtaacaagcacatgtcgataattaggtttaacttagagcaggtacaatagcaggctataagccagctgcaaacatatttcaagaagataaatgaggagagagaagggtagtgggctacagatttgtagccagctatatcacggattccaagatgcagtgtgtgtatgacaggcgggaccaaatattaatagtgtagtatgtaactattgtataaatgagttattagattggctatagatgaattggagctagtagttggctatactattaaacttgctcttacctgttagacgcaatgattagcatatgaacctgttaaggaataaatctcgtgcatcaattttctttgtgttgccacatcttccatcagaaaaagacaattctcataatctacaagttggtgggctcatgttactgaacatgaagggactactttagtgctaaaaaaatttcctactcattaagtatggtaatgtttaactacataatctgctaattaatttgattacttgtatgccaattaatctatagccattgatttagtttggatggtctggattcaagaatgtcacaccgtgacattagtgtgtaatgtcagaggatacggttccgggctcgactagataataaaattcatcatcgtcaacctgtttgaagtattcagcatttgatcaaggtaaaggaatcctcttaatcatcatatagcaaaagaacatactcttatagccattaatgcgtctcatgcaccatatgttgttaatcatttggcctctctttcagagtttatctgttagcatgtacaatatgatgatcgatgtgcgttgtgaaagcaattgacatacatattgtgttccttgtattatatngccgtcgttctttcgccttttccctatccctctctcaatgtgaatgcccatatatttgacatacatactgatttggtttttcatattttccagcgaagaagctggagagctaaaccaaacactgcttgagaacgaggacgagagccgcacaatcagtgagatgggtgatttgctataccacgcgatggtgctgcttagggtcaagggcgtgaggatggaacaggtcttggaggtcctcaggaagcgattctcgcagtctggtattgaggagaaggccagtcgcaacaaatcttaggatattactcacagagtggatgggtttaccagtttgcttatgtcgtatcggcattggtgccaagtgtgtaccattgagtagtttggtcttcttaattagaccgaaggttgtgaattgtgattatgctttaattgttctccaataagacactgagcaaatacatgtctggaatttgcagtgctgttcttgctgtcgccaataaaataataaaatcagctcataagtaaagcatcttcctgatttgatgatctttttttagctatgttgtgaaaccgctgctcttatttcaacgccgtgcaaagttcaatctcaacaggaatctggggaaaatgctacacatacaagtcgttagtatactacacttttattaactgtattagttaagcagggttcacaaatttgttcgaattttgtcatccgaaatctgaagctctcctaagcagatcggtttgcgctgaatttcatttgaaattcaacgaatttgttacatcgcctctgagatgttcacagccaagtagtagcaaattaaaggaaaaggacaaaaatnaaaaacagcgtgcaaacaaattccctgcaatagattaaaaaaaaaatcgagcagtcagttccataagaaagaaaatgcccgtaaatttgagaaatttcgcgcgaatttacacaaacgcgtgagccgcccgaaaataccccgagaactctgaccccggtcggactcccgactccgagacgagacagagaaatccccaaatccccacgtctcctcctcctccgccgccgccgccgc

SEQ ID NO: 2211 - DNA, 1520 bp, Oryza sativa
  N_region (6)..(6): n = any nucleotide
  N_region (20)..(20): n = any nucleotide
atccantttttcaaggtttntaataattaaaactcaattaattacacgttattaccaccttttttgcgtgaaacacttacaaacaccacctaaaggtgtgttggagaatactacctccgtttcaggttataagactttctagcatttgcccatatttatatagatgttatatgtctagattcattaatatctatatgaatgtgggtaatagtagaaagtcttataatatgaaaaggaggaagtagcagtaatgggcatggaggattgcgctctagtttgtcttcgtcgagaagaaatatcacttcagcgaggaagtgagtgtgaacataacttttgttcgactcaactaaaaattgtctgatcggcttaagtaaaagtaaaaaacacttggttaaagatagcaaatatattattatattctgacatgtttaacttataggtctatctttatcttgcgacttatacattatgatactatctccgtcccataatataaggatttttagaatagtgctaaatcaaacattttttttaactttgactattactagtgaaaacataaaaaaatcaatcatataaaattgataaaattgatgttactagatttatcattgaacacaactagattccgtaattctatttcaaaaaagagtgagactcaatctccttatgccatcccaaaattgatgctactagatttatcattgaacaaactatcataatatgcaactctttttatttaaaacatctcacttttatatatattgttagttaaagtatacctcgaaaatcgtttcaaaatttaaaaatacttatattttgagacgaactaagtacatttcaaatttttacgatcacccggaagatttccctactccaaaatcttacaaaattttaaccatcagattggaatccaacgtcccacatccatccgccgccactcgtctcgtccgtctctctctctctctctacgaaccacgcagctcgactcgcgagctctcgccgccgccgccgcctcttcccccaccgcacgcgcttccactccgccgccgccgccgccgccgccgaggctccagcactgccgttctccgcctccagttcttccctcccccgtcatcttcgtcgtctcgggtgtccggtgccaccgcgccgccctcctgctccatctccggcggctcctgctgcccgccgcctccaccgactaccccctcctccgccctcccgatctccgttccccgcgccaccgcccaccgcggggcctccgccgccccggccgcttccgtctaaccctggatccccaccacgaaacctaactagtaagcgccggagcccgccgcctcctccgcctaagttcgctacactcgctggagatggagaatgttactggagaaggaatctcggatcagatagagaggttagcgattattaagattttgccaccattttttttcagtcgaatgttgtgtagcaaaccgattgattttcctcttttttctttcagatttcaaacacagctacaa

SEQ ID NO: 2212 - DNA, 2000 bp, Oryza sativa
ggtggcatggtggataatttttcacccaataatctagaaaaagctcatctaatgagcttatcaaattataataagttgggctccagattataataagcgaaacatggcctaaagttaattgttttgagaccacttttctttttgaaatctgaaattaaatattgtcctgataggctgataccctacatgtcagacagcaacaaaggcagctcccagtcaggtttgggcgattgctcgagctccgccgctagctgccaccttcactacaaattaccaatttgccatcgatgtataaaaaatagtaaatcaccgagaaacacaattaaccgtttaaacttgacgatgttgtttgctccgtcactaatattcagtggcacaatgggtggcatatttcaatcgtatacgagagaatttcactcactcttcccattatcgaaaagtagttgcaagtattactcgtatgatcgtatctcactgcaagttaactaggtacgaaataatgattgatggtaagatgcaaattgagctatgttggttgcatatatatattttgagcatacacatgtgcaacaggacggatgggcctcccagacacaaaattgtgcaattccacaagcttaggtggtagtatttaagggtgttttattggttaagatcattgaaacaatatttaatgctgtcttcctctagttttgatatgcaagcttcactttccatgttcatcgcacacgccattagacccatatatttacatctctttgtgagattcacaagtcatgattggggatttacatgaagcaggaatttctaatgtaactgaaagaaaaggaatgactgaaatagaagttgtcaaagtcaaaaagataaaacctcaaaggctattcacgtttttccttctcatacctctccaccatctacaggagtcatctcttctttctttctcctctagtccttccatagtgcgtcatccatactcctatagaaaccttgtgatcaactaactattcatgtaccagtcagtagaaccaaccaatgactataaacgtaattactaattataggaagctcgagagtatagaaaacaaataaattaataaactttcagatttttcaccttatttagttgttagttgaaaaaaacacacgttagcaatatcaagtattttgttatatgtttgatgtggttgtaggcttgacacaccatagttaaaatcatagatttggaatcaatgtattttaattttagaagtacggtgaatatatacacacacttacttatggtttgggagatatttgatacatatgggaatattttaagcctacgtgagattcatatacatgcaaatatagtgattcgatacaaaggagcgaaattttaggatttttgattcctctctctcgctggttttgatggttttggagtccatctttcacaaaggccaactctatcattggctggcgccgcttcgtttggggacctgttaggattatagtagggtttcctccgctccaaatctccctcttgtaggagcaacaggtacaactttcctttttcatagttttttcccttcacagttcctttgcctgtccccggtaatggtcttttcgtccgttgtgttgtgtaatatattaacatataatttttttacgcttttgcgtttttttagtgatgtgacgatgatgtatatggaccgtgtgttctcaattgtatactttcaaaggaactagtaccattcgtattgttgagaggataaacacacaagcgtttaaagtttttaacattgatgaaggggtagtaaacacgcgctgcaaaaaggtgagacaaggtaaagccgagagacgagtggtattaagttcgctcaaaaataaagttataaaaccagggaagcaaaggcggcccgggaaaaaaaagaacccatcgcggccacccgcctcgttcgcttccatcctctccgcagtccgcacccgcgcgcgcgcgctcgactcccgcaccagccgcg

SEQ ID NO: 2213 - DNA, 2000 bp, Oryza sativa
  N_region (1635)..(1635): n = any nucleotide
  N_region (1647)..(1647): n = any nucleotide
  N_region (1762)..(1762): n = any nucleotide
ctttgttctagtcctccagaccaaagatggtgaattggcttaattcttaatctgaattccactaggcaaaagctgaataaggacgcctctggttgagctcctctcgaaccacttcccactacaaaacccctctttttccaaaaagctgagaaaggaagaaaaaaaaaatgaaaacgtggccagttagcaaatagcccctccaggtttcagggttagcaaatagcaatacctacaaaagggatcagtgcaggctgatggaaccatatggtcattttagatgtgcattttggagcttgatcagagtgttctaaacttcgtagtgctagtagtttccactttccagtgttcttggtagtgccaaagatattgtgcataaaatgaagagacaaacttaccatcttttagtaaaaatatattttttacaggatgcatttcacctttcttcagctcctgtattgttttattttgtattttaaacctaactatttcaatacaccaatcgtcggttggttagaaaatttatatagaaaatcaatatggtagagttaaagccaaaacaagcgacaatcatcacaaacaatagacactaggccatttgtctatcgacctaagtgtgtacaataaaacatcacaatcgcataatttttcattcgcctctttgaaactacaagtttcaaaacacaggcaattctataatatgttacttatatgtcacattaccgtatattgttcaaggatctaggctgaggagtaggagtaacttctagtttatttacgagtgcaaacaatagatcccatgagttatttccagcaatcatggctactaaataaaaacattaaattgaagggacaaaatgagaacataaggaagaaaaaaaatatcacaggtagatagtgaagaaaccataagacaattacgggcctgttcactttgatgccaaaaaaaaccttaacaaattttggcatagttgtcaaaattttggtaacttgccaaaattttgggaggattttttatatagttaccaaaatttggcagcaaactaaatgtagccacttggcaactttatcaaaatttgataaggttgaaaatgtcatcaaaatgaataggccctacatatcactgaagatctataaagataaagccatcttaccagtatagtcaatttgcatatgagcgtttgatggaactcatcacatattcgaaacctttgtgtccgtctcacaatgtttttcggagtgaaatatgcaaatatgaagttgaaaagcatgcatcgatacaacatttttggagatttaaaaaaacaagtgcacgctttactagccgcaaaatcatgggtaggctaaccaacgtggttctccaacctcgttaaaaatagacagtgggcgattccaggatagaacgccatggatcaacgaccgcatatactcctttctattcaaagatttttcacctcctgtttcgcaagcataaaaaaaaacgagaatcacatgcggcaaaaaccaagaacatgaggacctggtgataaatatgcgtatttgcgagcgccaacgcttaacccaccgaaaaagcacaggacagtagtggtgctttacgcgcaaccttccattatagccccaaaaatacagacacacacnaaaaaaaaagcngagaatttgtgtgcaagcatccccttatcgccttcccccttgtgtctcctatccttcgccgatcgaatcatttgagcttgtgggtctcctcaaccatattcgattcgtgagggangggatcgagctctgttgcggtgttgtagatcattatcactcttggtttgtgattctcggaagtcggaagtgttcttcgcaagctcgattttcttttttttgcgatatttttttgtatcgttaaatctcgaatcccgacgggggaggtggttgagtccgagttcgatgctccggggcctcaagatccagtctcgacgccgttcttgagctctccgtgttgatctctgcgccgcgaaggg

SEQ ID NO: 2214 - DNA, 2000 bp, Oryza sativa
  N_region (1919)..(1919): n = any nucleotide
atggagcaaggaaaggccgtagaaattcaagaccaagagaagaaattcagaaggcggaggaagaaaaccacagagaataaagtcctcgatcgcaaccatgcgacccaggacaggctggggttcagtacctcctgcttctctctccatggttccgcgactgggaagggcgccatcctcctgcagcttcttcagcgatgcgctggtagaggtagacttgtcgagatccattgctgccggggatcgccggagaaaggaccgagatgagctagctagggtttttgtgggagcggagaagacgagggacacttggaggctggagagttttttcacaacaggcggacttcaaattggatccccaaaactcccttaaatagacgcacttccgacggtgtgaattctaaggaaaggagagagatggccgccggaaatttctgggtctgttacgcgcggcagtttttcggacttcaatttaattcactcatgaccgttgagcttcacctggcgttgtcgatcactccttgtctctcggtcctcacaccgagaacgatgacaacctcgacatcagaagtcgcgatcggttttgcgagttcatttaagtagaagtcgggggctactgtcagggttacgggtaaggtataccctctacccttcgatatacgtcacatatcgatatggtatacttacgcgtatatggacgttttcggcatacgttaaggaaattcattatggagtttacagatggaaggagtcctactcggatataaatgggtcgtcattgtatcgtaccgggtccgatgtctccgagttctacttggagaccagttgacatgcggtataaaagggaccccccgggaggacctaaagcatcgaatcttaccgccaacacatccaccacagcctacgaagccggagcctacaggagccaagtcgccgggtgatctagtcgaatcaactcgactacgatctcattggtatcgtcgagttccactatttcctttgtaatatgtggtttccatcatataatcccatatcaactggattagggctattacctatcaaggggcctgaaccagtataatctttgttttctgcctactcgatgtcgtattacgtagatccttgtaccagcgtactccaataccctctatatccggtttacggatatcccccgtcgacaccctccgtcccacattatatgggattaggggttaaaagcgtgtctcataatataagggatcgggtaggcagagtactaatccaaaccgacatataagaattgtttttttaaaaaaatatatttcaacatcgtattgcaataccttcgaaagaattgctcaggatatattgagattgacgaagtcaccatagacatcttgctatcgacgggtgcattgccttatcactaaaaaaaataattagccgtaaattcgagcacccgtgttaaatctagaatttaaacctggagggccagttcgaccacaagaaacctaaagttgagttacgctcacttcgcaatccacagtaatacataccaagcttgctctgtgtaagcacagttttttgaacaccctacacgatggtctttaaaaaaacgctaccttcatcaaaattttgacatcaattaatgatcatgtattaccaaaattttgacaatgctaatttttgaccgaattttaagttaacaacatttcgctaaattcacataggaaaaaatacaagttacaaaagtccaaaaggagaccgtggatgacgactacctggcacgacattgggccaccaccccaaccctcccaaccactgccagatgggacgccaatacacagctcagcacccaaccccaaaagtcccaaaaaacccagccaattcgctcatttccattggacgcagccaaatccgcgtccgcaaagaaactagtctangccgccgcctcgccaacctccccaagccggccaccgccgcacgggctccggcgacgaacgagggcgctgctctcgagcgcg

SEQ ID NO: 2215 - DNA, 2000 bp, Oryza sativa
  N_region (1475)..(1475): n = any nucleotide
  N_region (1501)..(1501): n = any nucleotide
  N_region (1508)..(1508): n = any nucleotide
  N_region (1510)..(1510): n = any nucleotide
  N_region (1827)..(1827): n = any nucleotide
aacaagagctcatgaagagtcatcttttcttttccttgggcagtacctcctaacaagattgatctgtttagataggtccatgatggcctttttattgattttgacaacatagatataatatatggattaccttcttatgtgcacctattctgtcatttctgtgctaagtcgtgctatcttgctatagaattttgcattcatctgaattctctgattattattgacaggtacctcatgcagcagtccatgaaaaataccagacaaggctgacttctattaaaaagccatttggagtatcgccaaagatgtcctttccactccagaaaaatcaagagatctattgacaactcgtggaactgaacattccattagcatatgtaatgctatcagtgcttttctagcaagagttatggtacaattatacatgaatttgctgtaaggctctgattagacattaaggagaaacgatggtactgatcattttgctatccaaatctatcagatgatctgtagaaacaagcgatccctgtgtgatggttttgctatttgccgcccaaatctgcgttgaaaatgaaatgtacagtttttagactactttctccagggaggcacttgtgcatgtcgatgtcttacatctgcctctcttctgggcagcttccaatctttacaggtgggtcgtggcctcgtgggtgcaggtttaagcggtgtgctaaaacttttgtgcttatgtttttgtctacttatggcgtcttttagcacatagttgctgtgatattatgcttgcagacctgcctctgcctggccacgaattgttatgtggcggtggaggttggccggtcaccgcgctgcacctttcaagtgtgatctgtccatcacttcagcatacacgttgacccagctgctgcatcaagccgaattccattcgattgtccaatagtactcctttgcaataagctcggcttgtgtcattttaacggtcaatcacgctcacaatatgccgttcatgtcattgtcatcatcacagagtgtgccgtctgcctaatgtatccgtacataaaaataacatatccatgcatacttgccgttgttaatttagtactaatgtacacggagaaaactatgttaagacaccagataaaaaaaattataataacgtgttaaaagagggattaggaacgcgaacaacacagagagaggaaagggaagtctttgaaagtctgagaaggaagcaacaactgaccaacacagtaggtggcaccaaagaaaaccgcaactccaaggcaccgtcgacacgaacttcacaagaactccaccgagaggagaggagaggagaggaaacgacgacacctcctccggcgcggcgagacgaatctacgcgtaccgagtaccgacgcggcgaccgcctcgctccgtccctatcctcgccgctccggctgattccgtcgcggaggtatatccaccatctctcgcccctngcctgcgcgtctcaaccctctctcanatcccgngntccctcctccgtttccgatctgcagcgcgcgcggccggcgaggagtcctgggagggcgaccgacgcagtcggcctccttccatctcggttcgaatcgaatcgaattgaaggtattcctgattgttagtatcttttgtaaccctaattcccccgggccgcttgatgaggagttttggcgtagattggaaatccatccgaagttggattggtttttttttctccaattaaccccatctagtttttgcgttcagattttttttttgacgcgtggtgtagtactaataaattattagtaccggtgttttcatagggaaagnaaaaattgggggttcaaccatgccccacgttagttctgcccttggcgcttactgttcaattttgaccttcagagggtagcttttgtactttttacgtcgacttgtgtcgtaatctaagactaacttctcaattgttttttttttttgtgatgattttgttagcctgccagtga

SEQ ID NO: 2216 - DNA, 2000 bp, Oryza sativa
  N_region (1090)..(1090): n = any nucleotide
  N_region (1121)..(1121): n = any nucleotide
gagggatttgtcggcccatagaataaggaaagggaaatatacaggttttttctttaaaaaaactggaaatatacagttcaacctttgttgttactgtacgctgataaacagtgaaaaaaaacgaagcaatcaaaagcattttgtaggtgaaaccctttcaccctttgcccgtttgtgttgtgcgcttgtgccacctcctaccagacacatcatacacagaaaaactggcttattgtctgcttagatcaacttgctgcggtaaattttttggtataagttttgatggaaaaagatttagcattgcaattttataagttagtatttagatgcatggtaaagttttgccattaattgctgccgcctctcttatgcacggggcctgatttttttttcttcagattactatcaaatgacaaatgccaacttgcctactttttacatttattttgctaaaaaatgttctaaaacggtaaaattttaatcattttagaggatctaaaccggcccttagctcaatgctaaaccaagcacgcacgtgtagtgtaaagcaccacgaacgcggtcgatgtgatctcccatcgtcccatgcctgatgctgatgcctccctccatcacacgcttccgctgaatcgcactctgatcgcgccccgtccacaaccacgagccgtgtcccgtgtacgtgcatccgcgtggagcgggatgcgggagcgcaacgtcgtaacgcgcaaagaacggggcgcacgcacgccctggtgcaccggtgcgcgggcgcacagctgccgcggggttggcacgcatcaacgggccggggagtcgtcgtcgtcctcgcaaagaaaaaaaaatccccaatcatttcgaggtgatcacctaccaaatcatcatcacgggcctgtgcagtctgtgtcgcggtgtatgtgcgcgttactaccggtttcccctccgctagtaatcaccgattttccccattgtgtcacatgggccttttgctttgtgatacggtcaggtcatagacaaattcacaagagccaaaaaaaaaataaaataaaataagagagagaaagatgggatagtgaaagacgagatggatatnggtgcggtttgaaaaaaaaattaactgcctngcagcttctcctaaaattaaaaactctctaaatgatttagtttttgtctatattctgataaaatgtaatggtagaatctaaaaaattatatagaaaaaaaaggtggaaaacacagtatttcgctaccaatcagctgcttatcataattttaaactatctaaacaggccgtatgatcatgtatcctcgactgcagatagggcaaacacacatttgcataactccatcagcaagtgattagattagcttaattaataccattttcattagtaggaaagttgattagcttccttaaccaccactgctaagctcagtcacctggctatagaaaaagccaataccggcagctgcctctgactcgtctcctcgttgctcctccctaccctagtcgatctccccttcgcctcgtctccccgtctcctcctcgcgagctcgcccgcccgccgcctgcgccgagcaccgccgatctccaccccggcgagcagtagcggcggccggcgtcctgctgcatcccgccggtgagctcacgtcctcttcctcatttctctccacccgcgccatttctctttgcacttgaccttagcttctcttgtagatgtggaagcttttgtttcggccttaagcttggtactaatggcggtttgtttgcagagaaatttgggggttcagctgaaccctctatgcgcgacgatagatccgcccttggggagtagggaagggaggtgaggtgaggtgaggagataggaggagttgagaaggcgctgattgttgggaggaggaggaggaggaggatggtggaaggccccaagttcgccggcatgatgggcggcgtcgtcggcggcgccggcggccatgacgacattggtgggaatttctgcgac

SEQ ID NO: 2217 - DNA, 2000 bp, Oryza sativa
  N_region (1939)..(1939): n = any nucleotide
agaaggcatgtgcatgtacacgtccactatgttatcagcgagtacactgatcaatgctccacggaacaggcaatccgaagcctcgaacttagcctcttcctcaggagaaagaggtggttcacttcgtttgccccgtgaaacatagaagcactgcatcgctgtcaaccacaatagtgcacgtgctttccatctcttatagtttgaaccatcaaaagcatgtggtttcagtgcagcagcaaagccaactaccgaaaatgacccatcaggtttttggattgttggaaatatagtcattaatcggcatattttaatccaaaaagttaaagcaatgatcatggcataagcagtgtagggtgatcttaacataaccagtagcatactatgcgcatcatgaatgtcaggaacaggaacataccagtaacgcgataacatgctagaggcatcatgtagaacaggaacaagaacattagcgcacatagtatagcatcatgtagaacaggaacaagaacatagcgcacatagtatagcatcatgtagaacaggaacaagaacatagcgcccatagtatagcaatagcgctaacaatgggaacaggaatagcgctatggtgaggcagaattgcctccgttgttgttgtcgttcacgggacctcctgacgcaccagctcctgtcggcggcgtaccacctccgccagcagtggcggcgacaactccagacatggcgatgagcaatcgtgcgggaggcactccccaaaaacctgatcatccacctacccggtgcagatctcaggcgaaggtgtggtttcggaggcactgctccttccaaacgccgccagccagtcacgccacgcccacgcccacgccccggcgcgcgcgcgcgcgtgtggcattccgacccccacctcaactggtcaacagggagcctccaataactccctatttaggttgagatatttctcgcttaaatcctgaggtggtattattatcctcaacatttattatgggcctttgagatttaatattataagttgggcctagcccaattattctaacattcttaaggctaaagctaagacctagtcaaattgtttcagcttaatctaaagtgggagtgaagctggctaaagcgctattacaaaatgaattataaaaatggagctgtgtttaaactgctctagaatttaactccaaatttaaattttaaaattaaatttagaagttggaattctatcaaacgaacgaatgtaggctgtgtttagtttctgaaattaggaagaagtttagaaagttgatagtttggaaaaaaaagttaagagtttatatgtgtgtaataaagttttggatatgatggaaagttaggagttgaggaggaaagttaagtgtgacctaaacacagccatattagttccaagtaatgctccgcggcctccgcctccgcaactccgcgttagcatatcaccggcgaccgtggaagaaccaccaaccaacgccacacaatgcctccacgcactgaccactcgtgctacgacaatatctggcgctcgcccggtcaaacaccacaaggccaccctcccgccaagcaattaaccaaccagtacaactagtattccgcattccactcgatgcacccgtccaaaccacgggggtaggtgagtggtcactcaccaacttttttctctctctctctctggagaattgagcgcgagagccggtcagccgttcgatcggccgggtcacccaccaacacacgcaacggcgtaatcacacgcttataagtagcggtggttgacgcctgcgctcggtagcgggtgagcaagcaagccgatcggcagccacaccgcatatcatacactcatacacatttcgctcgaccgatccgcgcgcgcacggagaagatgtgggtgacgtcgatgccgcaggtgtgggacgaggagggggtngcgaagggcagcgtggtgacgccggcgccggcgacggcgctgctggggtcgctcgcgggat

SEQ ID NO: 2218 - DNA, 2000 bp, Oryza sativa
caaatttaacagggtctaaatcatggtattgttgtctaataatattactactacttcatccagtcatgcctggccacaaattttgcaaggattgcatttagatatgctactgttagtaacaactagcctattctttgatgtggtatttctgatctgtattctgatattgttttgtaggaaaaacagaatacattgctcaggaaaaaggttgctggattgaaataaggacagtgatttgttctcagcaacaacaaggtatatgcttgctgacttaccctgttacttactctgataagattaaggcaataaggttctgtttgttcattccaaattgccaaactattttggctgctcattttgttgcactatttccttattatagtgattattccttgactgtaagtgtaattatttgatagaatcagccattttgataaactcccatctttgttgtactatctgtatgcatgcgattgtttaaaatgcattataagggcattgtctttgctgataattatttttgctgttaagcaatacacacaatagtggagcttgaactaataaatctcaagaggggccaaaataagattgcggttctttggaatttatagacattggagttatacaaaacacatgactaagcaatacatgagtacagcagctctaaaacaaaagcatctatactaaattacaacattaccgcatacttatgtttcttcattatatattcttgatttctacactctaatcgcagcgacttgtttcacaattaaatatctctaaaaataataaaatcaattaagtagatggaggaattaacaagagaatgcacccaattatgtactatatatgaagtactaatcataaaaatcttcaaacattggggtgggggtcgggtgagagcatacggatcttgctagcctagtagaagctctatccctgcgtaggctgtatatatctctttaggaattctcattgtgagcaagttactttgtattatgtatgaaatggtaatttgtaaggttccattgtgctgccaacattaccaaaggtgttcgtgaatcgttactagtactagtagtagtacagttcaattcttcaatgttttaaagctagctatcagtctatcactgcacgctgaccacttctcaccttctttgctagtgtgcattggttataagaaaagttgggagctatgagccttgagtataatctcgagccgaagaagctgctttcagggctgacaatcctgttctcgctcctcgttgtaaacagattcgatggtagacaccaagaaagaaattgtggaaacatttgtgtaaatctaaaaagacgaggcgcacacgttatcgtttttgaaactgccatcttaatggctgaagtatactacactcctgtattatcttttgtggcattcagcgaatcaaattcgttccatattctacttgttctctctgctattattatctaacaaaagcccaaatttgctaccttcagacctcagtctccaactgatagttgatgataggcgttaggttagtttactggaatattggatggattgagtggcaattgatcgatacattcgctgaaccaaaaaaataatattccagcaagcacgcaagcaatagtttacctctcatctcttccattgctcaacttatgttctgcaagttgatacgcatttatgtgttttttgccgattaaattattacgggatatataaatatagattggccttttgatgggcccatttggcagggactcctcgtcattattcttgtgaaagaagtctaacttcgaaatgcaattctccaaatacaaaaatctccaagggattagaccgcaaaaaacaactcgagtacacatctccgccttccctttctcctcctctctcctcttcccctctccaagtctcccggtctccttcctcctctcttcccggccgcctcgcctcgcctccgccttcccgatcgcaattcgcctcctcctcctcccac

SEQ ID NO: 2219 - DNA, 2000 bp, Oryza sativa
  N_region (476)..(476): n = any nucleotide
taaaacaacgtatttcagttgccttttgctttatttgtttaattaaatcattgtgttaaacttattacttaccatgggttaactcaagtactccttttccttactgtagctttacccttcaaagtgcattgcattcattatcatatttgagcatgttttatgttgtcaaggacattctgcattggcggcattgctaatctacacatgttccctactgttaaactgtcatgattcatgactgtaaatgatcaattacttcaagctgcatgcacatgcctatacatgatttaagtgtgatcttattcagtcagtcgatttccaatggattttgctgttgttgtgacaaaatttactgcactgaggctaacctctcaaaagactccaataaatgaatccaaaccacttcctaagtgtcgcactttagcatgcccttgttagctgcacaactatctatgggtgcattgaaatttcaaacnaaagagctgaggtgcatatttggaacataattatggttcaccaggtgcatgtattgcatgtttttttgtgaaggaatatgtagttgcgtgattccgcaaagttgaacatcattcaacattgagtcacttttgaacctccttgtgtgccccctttcatttgttgtaaatagtactctggtgacacaatgtatgcatttggctaagcctgaaatgccattccataatctcccatggacagctcatgctgtggtacactttttttttttgaggatgtaatttacatgttttgtcatttaagagattgtgaaatgtgactggttaatggatagatttttcttacttctcttctaaaagtattgctgtccgttttaggtggtcagcctttgttgacgatgggaagatcaaggctttcaatgttgaggtagctccttctgacttcaaggtttctggtgccgaggtgatcttggaccaaatctgatccgagtaacgaaattctgtcgttgtttgttttctcatgcagcatgcatgcttttgctgtagtaaataaacgaaaactcgactactcgagtatccatgtaaagatgtttgtagtctgccttgctacgcccagaatatttgttttcctgttacaaatcagcttgccgggcaacatgtttgtcagcattgacgtgagctctaacttcaactggattaccaaattggttggttgagctctgtccttgactatcattttagctggtcagaaatatgaggataggaaaaaagaagggagcaggtgaagaactgatgatgaagttggctattgggtttgtcatgggagccgaactgattgatcattttccatcttgactgaatggagaattctactagtaccaagttactctcaccagtaaatacattcgatatgatatagtatattatattacaacaaatctgaataagtaggttttaatataataccatgttgctatattttggtattatgggaggagtatatgctagtagtattaaactgtctccagtcacctaggccttgtctaggctgtgtttagttcgacccaaagtttgaaatttggttgaaattggagacgatgtgactgaaaagttgcgtgtgtatgaaaggtttgatgtgatggatagttggaagtttggaaaaaaaactttggaactaaacacacccctagttcccaactttttcttcaaaatttttgtgattggtgagaggccttccaaatttgtaactttccaactgctcccacaccgagggctccacttgtccatgggccccacttgtcagtgacacttgtccggtgcggcagtgcctacaaggaatataagccgccaagctccatgtcgtcagtgtgatgaacacagcaccagcattcacctgcagcacgactggtcactctctataaagtataaacaaacgtgccccgcctgcgcagccacctcagcacgcgcgcgaattcggagcagccgccgccgcccgccgcagtcgtcgtcgtcgccgccgcctcgccggaa

SEQ ID NO: 2220 - DNA, 2000 bp, Oryza sativa
  N_region (871)..(871): n = any nucleotide
  N_region (1761)..(1761): n = any nucleotide
  N_region (1770)..(1770): n = any nucleotide
  N_region (1831)..(1832): n = any nucleotide
  N_region (1839)..(1839): n = any nucleotide
  N_region (1845)..(1845): n = any nucleotide
  N_region (1848)..(1848): n = any nucleotide
  N_region (1857)..(1859): n = any nucleotide
atgattcggaaaacgtgctttcagataacgatggaatagaagttggtaaacaagagtgaaaacaagctcttacgaaatgaccctatttagaaaaacgcaaaatctaaaccgagaacgctctcgatttagtgttaaagagcgacgtactcattcgtgagagaaggtcaagcgctaatagtgcgtgagagaaggtcatgtgctgctagtacagctacgtgagaaaaggtcctcttgttactagtgcacacaatgcatgtctattttttttctttttaagaattttctctcaaattacttatccgatctacaatctgattacaccattacgtttgttgcaattaaatctttacaataagatcttacatgattatattatgatgaaaaactatttatatttataaattacttttattatatacataagttacttttatcatatatataagttactttgagatttgactaaattacttctatacattcataatactctaagttgattatgtttattattgtttttagttaattttatattttgtggactttataaatcttctctacattttacttgcgaatttactctacatagtttcttatttcagctcactcaaaatataattatttctactacagagagttactccccccatttcataatgtaagtcattttagcattgcccacattcatatagatgttaatgaatctagatatagttctaaattaaagtttctttttgttataagttacttctataatatatgtaaattacttttaagctttactgaatttacttttatatatctaagaagtaacttactgaaatctgagtaagtagacttcctagacatatcaataaaagtaatttttganttttcatcaaaatataatccatgtgagatcttgttgtaaatatttaattgttacgaatacaatagtgtaatcggattataaatcggatgagtaatttaagagaaacttctaaaagaagaaaaaaaaacatagatattgagtgtactagtagttttttttgggaaagaagggtgtctctctttaccactattcagctagcactctcgacgtagttgtgtccttagaaaaaccactgaaaggaccttagttagaaaatgctaataacacgaggaccgaagtgcacacaattaattcttttctgaaagctcataaaattgattcaaaaatttaagcaaagagtacatatagaaggaaaaaaatattcccagtacattgccttacaaaaggatatagagttccatcgtttcgtttcgtttcgcttagcgtatccttattcttacggtttattcgcaactaaaagttttttataactataatttttatatatgagtcagtaaaaaataagctttgataaacttaaaataccacaaaatatttcaaaattataaggagaagtaaaaacgaaacgagataagtttgagtagcacttgcaatcccaaagcttatgctgctgacctagttagaaaatgctatttgcacaaggacccgaatgcacaaaacggactagagaactcttttaaagcgaagtcagcagcagtagtcagttccactcctactagtacttctctccaccgtacgcgagccgagccgatcccgatcccgagcctgagccgagccgaggagctaaagcctccaaaactcgcccagtctccaaagcgagagacagctcatcgcccattcgccctcgcgccgcgccgcgccgcccgccgccgcctcgccttgcctcctcngccgccacnggcgctagagccgacgctgctgcagcggagaattcggtgccctcctcctcctccttccccnngcgcgcncgccgncgncgccggggnnntccggagttaatgcgcccgtgaagaggcggccgcgtcggcgtcggcggagagagggagagggagagcgagtcttttgtgcgggtggttggggcgtgggcggtggcgtgttcaaggcggggagctacgtttcctgccggagg

SEQ ID NO: 2221 - DNA, 2000 bp, Oryza sativa
  N_region (82)..(82): n = any nucleotide
aagcggtttggtgattttatctaacgtggctgcttacgtcgcatttcattttagaaaaagaataaacaaagctattggtggnacccaacatttcaacaacactcatctctctcctcccttctttctttcactttccattttctgatttcaatggcgacacacattttctttcagacataggatagggcattataagttctgcaccgtttctcttagtacgtgtattcattcatgagagttaagatgtgttattttcgcaacggctattattggaaaaagaaatcaagtgtactatagtattttctattgtttattggtaatccaatgtactaaacaaagagattaagtaaatacaccatatctttttactaatacaaaaagatttatatgttcggcttttggacgtacatctttacatgtaaggataaaaatagtcataaaaattctcgatcgatctagaattgttttcgtatgagtggtaccgtttctgaccattactattttaaacctaaaaaaattggtttttctaagagtgaattacaccttgagccacctttgattaccattgttacaatttggactaggctaaagccaaacttttcactttgggccaggtatctttacatgatgtttcaatttggactcccttcttcttcctccaactctcttccccctctctccccttcaatctgtaaagtcttccaaagaattcaaagggtagtttgcattttcaatcatcgactacctagtgcttgtggcttaatttcaaggacagcggagggtgcacaacaagtattcctactggtagcaactagcatacgaagaagctggccggcaatgacagacagttgctgctactttctgaactgacgataagaactaagtcaagtagcagatagccatgctcaagctcatgctcgacctccgctagtgctacatgttatgctgcacgcctgcgctaaatttccacatgtgtcgctcgagcttcaacaagttttgcaacgctcaagctccgccttcgtagtgccgcctgcatttgagctcgaaatcaacttcggcgggtggctaccctatgaagaagggttttgcttcttgccttttcatgcactacacctgatcgagaaagagaccttgagctgtacagagaaaagagagtaagaaagggagttggaggaagaagaagagagtctaaattgaaaccttgtgtaaatatacccggtccaaagtgaaaagtttactttttcactggttcaagttacaacacaggtaagaaaaaatagtccaagatgcaatttactctttttctaatttcgttcggtgtcgcattaatctcgatacttaatattttaattgataaatattatcaattattaaacagataagcgtcgttttcgaagatacgttaccgattccaaatgttctcatccttattcttatcgacttttgtttttctccatttgaccaaagcgttttgagacggagggctttgttgttcagccagcaaataggggagtgtttccagtgtttttccaccgaagaaaggcgaaaaaaaaaagagaaggcagcgaagatttctctagaaagagagacgattgtcccatatccaccgatgccggattagatccggtggactccaccgatccacgggccgggggcccattccaacttgcccagccactggtgggcccaccggccacctcatttccctcaccccccaaccaaaaagataaaaaataaacaaaaagtttaattcgccgccacgcgctttgccggaaagccccaaaagcccgaccaccactgccgccgcgccgcctcctcctcctccgcctccgccgccgccgccgcccgccggccatctccgtcgatccaccgtccggcgagcagacagcagcccggcagatctgcccccaccacgggatcgaatcggcggggggaaccgaatcggggagcgcgggaggcggggagcttagtttgagctcggtcggcggcggcggcggcgg

SEQ ID NO: 2222 - DNA, 2000 bp, Oryza sativa
tttaaagtgatccgaatctaatgcatgaccctcgaccgcaaaaccagataggatgactccctgaacaatttgacagcggttttggacggcggttttattgacgtggtgatgttgacctagtattttttttgaatgacgaatggggcccacatagttttttattttaatgcctcctaagcgtgacgtcaacaccacagaccaagtcaacatcgccacgtcagtgccatgtcagcaaaaccgtcgtccaaaaccgctaaggaattcaaattgcactggtttgaatagttcggggggtcataccggttgtgcggttgagggtcacggattaaattcaggtcactttttaagggagttaaagtgggactggttcctttacggacacgggacataggcgagttttgggccatatagatggcccgcataggatctctatcggtaccaggctgacttctccagcccgtacggtcaagaagcggcccaagtaaccagggtcacgtaggcggcaggccagctggccattccagatagacaccgacggtgaaaagaacggcttgactcggttgcgttgcagcctgcgtttttccactttgaaccttcgtgctctcgcccgtcgcgtctgactggttactattactcgtatatacgtaatacctccgtattttaatatatgatgccgttgacttttcgactaaaccattcgttttattcaaaaattttatgtaaatataaaaatatttatgtcatgcttaaaaaatatttgatgacaaattaagtcataataaaataaatgataattacataaattttttaaataagacgaatagtcaaacgttagacaaaaaatcaacggcgtcatacattaaaattaaaatatggaggtatatacgtcatacgtatattgtacctgctggattggtcattggcaacgcgttactacatcttaccacatgattacttataccccgtgccgccgtgcgtacgtgcgtgccgttgaaccgttccggttaatcgatcagctgcttctcacaatcaaaattctccgcggtctagttgtctatagttataatcgccgtgtcgccggctcacacgtactatgcgcacaagtagcacaagtacaacgacacggtctttgcgacgagcgaattggctgcaggatgcagggggtatcctccgccgctcgtggcgttgacggcggctcgctcgcgggtgaggatttgttacctcttcccagaaatcgcctgacccacccgcaccgacaacacatggaacgtgcgtgatcagcaacccctttttttctgggaggaggtagagaacgtgaccagcaatcttgggagtgagaactggatgctgtgtactagtactaatctcggatacttggccttgtgaacaggctagctaattggtctcgattgcgctttggttagactggttaaaacggttgacacttacactaacccgtaaacatacaataatttcagaacattctaacggaattcaccatgagaagagaaacagagggaggcgggggtttgaattgaaaaaacacggtcgcatttgggagcgggcgttcgcgtcggctcggctcggccgcatccacggaatcaaatcaatccaacgagcgagcgagcgaacgaaccaaccccttcttcgcctcggcttcgcttccccgtcttttccttccgcctcaccaacctcgtctcgtctcgtctcgtctcgcctctcgatccttccaccccacgccgccctctgccatcatcgtcgtcatcccatccggattgccacccaaccaatcgccatttgcttctcgctttccctctcctcccccaaccactccatcatcattcgcaatccaatctcgctcttggttggcgtcgattttgacgcggtctggttcgtgaatccgacggagccgggtgatctgcggcgggacttgcagatccgagcgggcggggcggggcgggttcgctcgtcggatgtgtggatcctggtgaggtgaggcg

SEQ ID NO: 2223 - DNA, 2000 bp, Oryza sativa
  N_region (1439)..(1439): n = any nucleotide
  N_region (1465)..(1465): n = any nucleotide
gaaaaaggaaaataagatttcaactaggaatacaatttatatataactaaaattggtgtaaaaaataaagactattaaaagaaaagaccatctaaaacacatgacgagattaattaagtaacagacttataaaggagtagagtggtggcggttgatgggacatctaaaaactattaataaaacaccaaatagaatactaaagatgattaaaaggaaggacgataggcaggtcatgaaacaatcggtcaaggcggttgccgggacttttagaaagtaaaagaaaaaccaatgataatcatatttgatttttaaaatctcaatgacaataaaaattagaggcaatgggcagatcgtataggagtacaatggcagtgccgtcgatggttggtgggacttctagaaagtaaaaaatgaattccaacgatagttatgttcaactttgacaatcctaatgataataaagagtaggcggcggatgggtcatagaggagtatagtggcagcgtttgacgggatttctcaaattatataaaatgaaacccaacgagacaataaactctaaaaactataatgtccaatttttaaaggttcgagcttctaaaaagtgaaaagataaacaccaacgataatcatttttattttaaaatctcaatgataataacaaagagaggcagcaggcgagccgcagaggagtacaatgacaaagtcgctgacgttttagcggaacttctaaaaagtaaaaaaaataaacctaaacgataattatgttcgatttttaaaatatcaatgaaaagagaagaggcagtggacgaccatagaggagtataatggtagtatttgatgggacttctagaaattataaaaacaaaaccaaggataataaactctaaaaactataagatcaaaattttaaaggttccaagaagaataaatagaaacaatagtagaccgagcaagcaaataaataaggatatgacagaagtaaggggtagtagctggtgtaactttttaaactataaaattagaattacaaggatggtaaggtttggtctttcaaagtcttaagacaatgagataaatatttaataaattttaagtaaaatcatattaaaaaaatatataattttgtatgggtgctagccgcgcaattgcgcgggccacccagctagttataaaaattgaagatgtttttgccggaattttggtacgtcatcagtatttaagtcggtttttaagctcgttcgtttttggaaatacaaatccatgtttgagtcggattttaagttcgtttgcttttggaaatataaaaaggagtcgcataagaaatttctttaaaaaaactcacatgctaacttgagatggaagtcggactcctaattgtagctcatgattttataaaaaaatatccaagcgaattcccacagcgaatttcatcggagntaatccacataacaatattaaggttnaaataacattcacccattgcagcgcacgggtattttttctagttaatatacaaagcaaagcttttgcgctcctttttttaaaaaaaactataggttcttaagctgcaatttctgggtccgtgactcagtgttgaaggtctgaatttctctgccaaagacagcaccaggaacgtccagaaacgattaataaaatgcatgggagaagaataatttgatgcacctgatcttctctgaacatttttccaagattggtgaacctgaagccaccaaacactgctactactgcagagagagagagagagagagcctttgacccattagtttccatatcataatactctttactttctgcttgcttactctaccaaccacatcagagttagttcatctcctccttgaccgcgtttccatcactgatcaccatggaggcctcgcctcactttgctataaagcccatgcagagtgtgagaatctacccacaacaacatctggatcatccaaagaaaggaacagctgcaacttttttggtcagaaa

SEQ ID NO: 2224 - DNA, 2000 bp, Oryza sativa
acggttctcttcattcaaatcgtgcatctaacggttcatatttatttgatgacgtggctcttcctggtgggatcatgggatacccttttcactaatgtagattggtgcgtaattaaataagagatttcaagaggcctagtacgaggttgccttttttttttttacggagggagtatattagccgtgtacttttgaggagttgggaacccctttcctttcgcacacaaaacatagcaacagataaacgcatagttaattatgtgttagcttaaaaaattgaaaactgaattaaaatgatttttatatcattttttctattttttcaaaagaatacactgtttagtcacacatagagtactattcatgttttatcatctaatagcaataaaaatactaatcataaaaaattttcaaataagacggacggtcaaacgttgaacgtgaatagtgtaaaactacacttattttgggacggagggagtagtttaggaaatatgcgcgtactaaactagggagtgaggttgggaacctcaaatcaagaacacaggtcttaaaaaatgcaaaggttccggatctgtagttctgtactttttttcctgtactgtgaataatgattagcaggttgtattgggaacgaagcgatttgccatcaaggtacttttctctgaaaggtttagttccaggtgtactgtgtaattaaccaagctgattttttgcctatttgaagttgaaggcttgatcgttgcattcgacctgtcaatcatactttaatgcctttagtcccagcaaattgaccatctgtttgtacacagttttgaaccaagcttggatggttaaggtggtggttgacaggttgttgtactctaccctggtttgacgtcttgtgtgtcacattgatacaacgaattctttcagaggttcagggtatatatgtggaaaaaaatgtttatagtgactgttaatcttaaaatctgattatgtaatctatttattcattggttttcatatggagtggtcgagtgtcccgtgtctaaactgactttatattcgttttaggaaaaaggaactgcttgtatgtttttattggtttaaatagttaatctcaatattctgtagaatacatcatagtaacacgaatctaaacaatcaatatttaattatacttcctctagattttttatatgacgttggctaattcaaatttataccagctaacgtcatacatatacgtatggagatagtatttttagaacggatatattatagctcaaatggcacggcagaattctcctaaatcggaacttgattatgcatttttgagtttatgacagacactttgacaaattcaaccaatgtgaaacaaagaaacagtcttccagtcccatcgtttggcctaaacagccaaagaataagccaaaatttgaatttttgaacttgattttgaagttgattttgaaatgcttttaacgtaatttttgttaatgttggcttttaagtcgctacgaacaaatctacaaaagttttacttataaattaattttaattttctaataagccaaataagccattttgggtaaaatggcaaccgatgggagccttccatcgggcagctgctgcgttgggtcagctataccgtttgtgaaagtagtatagggtagtaaaaattcaacgaaacgatattttttttcctcccttacccgacaaaacggccaaacccaaccgcctaccataaaagaaagccccccgatcccccgcaacatccatccgtccatccccgatccaacggccgatccagcttcacgcgctttcgatcgccataattacgcaggccgccatcgtcgtcgtcgtcttcgtcgtcgccattatccccatttctcccgtatcctctctctcctctcctctcttctcgagcgcggcggcggtggtggggaggaggagggccagcggcagcaagcggcggcggcgacgcgatgatgatgacgcgggcgtcgatgggggcg

SEQ ID NO: 2225 - DNA, 2000 bp, Oryza sativa
  N_region (121)..(121): n = any nucleotide
  N_region (163)..(163): n = any nucleotide
  N_region (186)..(186): n = any nucleotide
  N_region (189)..(189): n = any nucleotide
  N_region (193)..(193): n = any nucleotide
  N_region (361)..(361): n = any nucleotide
  N_region (865)..(865): n = any nucleotide
  N_region (987)..(987): n = any nucleotide
  N_region (989)..(989): n = any nucleotide
  N_region (1014)..(1014): n = any nucleotide
  N_region (1110)..(1110): n = any nucleotide
  N_region (1116)..(1116): n = any nucleotide
cagagagcttagctagctgcgacgcacgcacggtttgtacaaggtacagtatagtatgacaccgaccgtcgcgaccaccaacccggccgccgcggcggcgacgacggcggcggcggccgangtgaagccggcgaagcgctccgtcggcctcggcctccccggnttccgccattattgcccggcctngcntccnacggccagccccgtgtcgcgtccttctgtgagtcaccaccgacgaccagtagtacagctgcttgctcactgctgatagtaggcacagcgtcgttgtgctgatacgtccgaagtggcgttttaatttgcaggcaagaggctggcgaggaacgtggtggccatggcggcnggggaagcgccggcggcgccgctcgccgcaaacgcggagatcaccgagttcatcaacgccctcaaacaagaggtagatatacacaaacacactctcagctgaaattacgtgtcaccaatcgctttgtatataccattgttgcgtgcagtgggacaggattgaggacaagtacgcggtgacgacgctggcggtcgctgcgtcgctcgggatgtggagcgccggcggagttgtatcggtcggcactcaaaaacatgctcacacttgcatttctttctttctttcttaattgtgaattgtgtaggtatacagtgattaacttgggtttttgcttgattgccttgcaggcaattgacaggcttcctatcgttcctggtctcatggaagctgttggcattggctacagcggggtaagaactactccctccatcccctaatacaagagattttgatattttgtttgtattgtttgaccactcgttttattcaaaaaatttgtaccaaatntaaaaaaaaaacaaaaggttatatttaaagtactttggataataaatctaaattttttttaataagatgaatggtcaaacagtaaaagccaaatgtaaaaatcggacggagggagttagatncncgtcagagccaaaaactttgtttcnagaagtttgattactgctgcattataccaactgctttgggaactgttcaagtctgaattttcttacttagttcattgctgtcatttttccgtcganttccanctccttgataatatgttgcttctgatgcagtggtttgcataccggaacctgctgttcaagcctgacaggtacgtcatcaagcacaactattttatccaacctgcaaagtgcaaaggcttgacagatgtgagtcctaactcaaactattgtgttgaattgcagggaagctttctttgcaaaggttagggaggtctacgaggatataatcagcggttaacagagatactacttatatacaacttcagttcaagggaggctgctactggattaattatctgtactgtatcacagcatagcatctaatttaattgctcttactcaatgtatgtctatataagttggacattactgctaaataacatttttcagaatgtttactcagagttgaaattctttgtcaattgtccttttttttttcctgtcaagctagtagcatatctctttccctttttttttagagagagggaaagggacagagccatagccatgggcatgttaccctgttccatcatgattggaccaaagaaatgcagattcaaacactcaacaatttacacggaagcacgtccaaaccgacagagagttagcgtcactaatcaattttattatcattcgcggccagttcacagttacacaatctcacgtcggattcaaggacaaagttgccactatttcctcttgacttaatcgacctcgctcccattaacttacacatgattagtcaaatcacgcatatatacgtgctcgcctcaaatgcaaacatgatcgatcacctcgcatatatatatataccgctcgagctgttcgtcgttgcaccagccagcggcgagaaaatcacatttgcattcgcatcaatcaatcacaagctacctagccgagcgcgg

SEQ ID NO: 2226 - DNA, 2000 bp, Oryza sativa
  N_region (939)..(939): n = any nucleotide
gcaaggtatgctctagacacccttcttttagaatcattcttgtaccaattctcagactcgatcagaatctttatgtgctgcttcatatcgctacacttactttggttgttatggcaatgctgtgcaacacattggtttacagtaagatgaaatctgaaaccaatggtttccattgcagttacagtgatgttcttctgatcttaggaaggcaactcgtacgctcttgtgaagtatcaatcaatttgcaagacttggctcttcgtgatatcagcctcaagatttgatcaagcgctttctcttctccacagatcagcagcagtagtgatgctgtaaggtgagcctgctatgcctgaggtccagatgtctcatcacagtctttgtacaaatgtacatacttcctgcaacggtgttccagcttaagcctgacaactgctaatcagtcctgctgtggatgccaactaattcatcttcaacaacgtcgttaccgtacatccaattggtactccctaggattttgtccttgaagaagggaactcaaattggtacaattcatatgaattgcacaattcatggtatcagagttggttcgacatttacctgctgcttctctcaatctctcttgagagtgaagatctggatgttgttttgcttcatccatatcatggtttctgtatcagtcattgctctctgacggagcctgggtgtcagattggctctgtggtcctgcccacaacttgtgcagcaaaaagagatgaacatgctggtgctcaatgaccactcatcaatacaggatttttgttgatccaatccaatccaccgaaaagttgtgtcgacttggaggagtatgaacacccccccttcaggcttcagtatccatccttatttttttgttggaagtctggttcccttgcgtgataggtttcatttcagctgttcttngtgtttcattgtgatccagattttttccgaatgtacctgcatcatctgttacggccaccaaaaattgcttgatgtgattaagcttcaatgaatccatacagaaatattggtgtttttgtgatgcttctttcttgagaacatcttctggaaagaaaaaaaaattatgggggatatcagtcaccattttgccagacgacttgtctcactcgaatcctgaagtcccatggttgtttcagttcttgggagaacttccattttcatcagaatatgaaaccaaaatatgaatgcttggggttcttgaaagctccggtctagatgatgctagttggtctattagcatgaaccatccaatgcttgaattttgatatctctacattagtctgttgatcggagttgtttactggatccaatgtaccagacccctccaaagagatgatggaaactgctttatgagtaagacctagggtttgcaggtaaagatttgacctcaggtgctaacatgccaaccgttgacgaattgagatgagatgctttctgaagcaaagcaccatcttgcacgtcccaaaagtacaggaataatttgcagcatatattatgtaggggatttcgcgcaaactgctagtaataaactgatgaaaaccaatgaaatccatacaaatcttgttaaaaatatattaacattcaattcatttcattttaaacttgacaaaaaaccgagcaatttgtattttcgacctagtaatccggacctgtttccatcggttttaggaaccctgcttacaaatcactaaatttgaaccaaaattgcaacattcatttagaacccctttaacaaattctaaaaaaaattacaaaaagtaataaaatcaggtcaacctaaaccaacagtaaataacaaacaaataaataaataaataaattgaagaacatgaaacgagagcaagtgaagaagacgcaaagtcatattcattccactggttggtggacctgccgaaccgaaccgaagctcaccggagaccagaggccgcggccgctggagttcgccggcggcgagcgagggc

SEQ ID NO: 2227 - DNA, 2000 bp, Oryza sativa
  N_region (216)..(216): n = any nucleotide
ctttcataggtcacacatcttttctgcacactttgtcctcactcgtgtgcacccggaaagaatttcccggtcggtcccccatcccaaattgctccaggccaagcacgcttaaccctggaattctttggagattggcttccagaaaagaagttgcaacttgttgatatgagtattctattaatcctattaagccctagaccgggatgttacaccctnacccccttaagagagatcgacgcccccgtcgatcaaccctaggccaggaacgtcatctcttggccacgtccatgtgtgataccattttgtaacgtcccgccttcccccaggccgggcccgcttacatctgatagctttcataggtcatagactgccctcacagaccaacacatatcttttctgcacactttgtcctcactcgtgtgcacccgggaagaatttcccggtcggtcacccatcccaaattgctccaggccaagcacgcttaaaccctagagttctttggagattggcttccggaaaagaagttgcaacttgttgatatgagtattctattaatcctattaagctctagaccgggatgttacacaaagggctagcatcaaccctttaaacagaccaggttgccaatcatgtaagactgtgtattacgcacaccatagcctcagcaaaagaaaaggcttctcacggagtggattctaatctctcgagaggatatcctctcatgtatcttttactttcaaatttgatacaaatagttgtgaaaaattctaaaaaaatatttggcaatgtagagtatagtgatatctactaatcccaaaaaatcaaattcaaattcgatttacacattgagaaacccaaagaaaaggcttctatcatcactgtcagtcaagtaacttaaccagaataaaacagagggaaatatgaatttgtcagctatttctgtcactgcagctctcaccattcaaatctagaggtttgaccatatgatctatcatggccaccaatagataaagtgaggtcttacaaactaattaaaaaatgcagtacatcactacatccacaaccagttgccctaatagtccaatggagggcctcggtgacagttgacttacaagcaagcaatagtttcttttcgtagatccccatcaaccaaacaaaaaacaacaaatctgagcactgggagagctccactacccccatcatctgaaacaaaaattaatcacctatttgcactgctaaattccctagcttccagacctagctaactgatacctaccagtggggaccacctgcaattccaagaatcaaactgtcatgggcgcaactagtggtggtgatttgtctgaggggagccgggggttggattaacgcgcgtcaaccgcctaaatccaagggggtgcaacatgattaccgacgcttctcgatccaatgaccctaggtaatcacgcgacctccccggccgtaatcccatgtgctccaggcagccgagtctcgtgacctcacgtgacgcttccgcctctagctctcgatcgatcgatcccaccactaattatccactcccaaatgattgtttagtggcccgtatcataagaccggccacgtcgtgcagctagtgtgacttgggagagacagtgtaccggccatttgccagatttgcttcctcagaaaaatagcagagtcggccgggtttgcagacttgcagagatcggaagaatctttctctttcgaaatgttgaggatttttggaaggaaaacaaaagggaaatggagatataggaatcgtggcatttaaggcggcacggtgcagcgtcgtctgtgggttgcaacatgcatcggcatgtgagtctgcctcgggaggcgcgcgctcgtcgatctcgtggccgccgcacttcctatttaagcaccgccgcgggtgacaccgtcccctcctcctcagtactcagatacattacccgcaccgcctaattaagcgctcgcatctgaagccatttcgagggacg

SEQ ID NO: 2228 - DNA, 2000 bp, Oryza sativa
gtgaagacggctggtcggtttatatagagaagggtcgcttgatcagggcgcccgcacgatctctactgtgcgtaaccaaaccggataagtcacgtgtaacttatccggactccacgccgttttcacgcaccggatttttcggaacgtttcgaaaacaaaaacgaatccgaatttgcagcaaaacaaaactgcaaaaggaggctgcatctgcgcaaggtgaggaaccaatttttggcggaccattcgacgcgtacgtcgtgcacacgcgccgcctgccctgcgaggcgaggcgagcgagcgcgcgcgtgtgttccccctcttctctccaccacacatgcttcaagtggctaggagggcatcctcccttttaaggaggtccccctctcttagaataagcaaggtggtactaaactccacatgcatgccatcccatgaggtgggcttttgtgattttccaaagaattaatcttcgagtgggctaaggcccatccattaattccaacagaaggcgtagacctaataagaagaaaaattagtatggcaattcttttaaaacttttatagccatgtaagcttctttaagtcaaaattttaggtaattactaattttaaatgttttaagatgctttattaatatagcatgatacacttttggtctattctattatctatacttgcatggtatatattaccatcgttagatttagtatgtttagaaaaaaaaaattaggtcggaccacccatattctaaatcctagatccgccactgtcggtggacccaatattttaggctattatttcggccgaaatttttcatttttttaatttttcatgaattttggtaatatttgtttaaattcaactaaattttgttcaaatttttggaaatttcagactgaaattttggtatttcggtgatgccgatcaaatcgtctaaaccgaaaagtttaaccctgtgtacaatacatccccggctaccttcctagatctatataatacctgaggtgatacaccaaaactttatgccgcttgtaacacaccctcggctctctagcttgtgccctgaaagcggcgattgctgtacacatgtgctgcatgctagagcccaagaaagtcttagctaaaaaaaattatgaaaatttgtaaaataatctttctataatttttttaaaaggcacaccttttatcagttagaaaaacatgcttctgcaaaatgagatagtagaagatggaatgaggtagatccaaacaccatcttaggttgagttctaaactacaactccaaatcacaatttcctcgtttttcgttagaacgtttcccaaattgttagtgttagggttacggataaggtataccctctaccattggatgtacgctatacggcaatatggtacatctgcgcgtgtacggacgttctctgtatacgctaaggaaattcatcacgaagtccaccaatggaaaggttcctacccgtataggactaggtcgtcactgtatcgtgcagggtctgatgtctccgagtcctacttagagagacctgcgatataaaagggaccccccgggaggacctaaggcatcgaatctgatagccaagacaaccaccatagcctaagaagtcggagcctgcaggagccaagtcgccgggtgatctagtcgaactaactcgaccacgatctcgtcggtatcatcgagttctgttattccctttgtaatttgtggtttccactatataatcccataccaactggattagggctattacctatcaagggggcctgaaccagtataatatttgtctcctgttttcttgatgtcgtactacgtagatcctcataccagcgtatcccaataccctctatatccggtctacgggtaacccccgtcgacagtggcgcgccaggtagggggccttggtgctcaaggttctactactatgacatcaagcttcatcgacaacagcgtcaacaccggccccatccaaggagtccctacttcaaca

SEQ ID NO: 2229 - DNA, 2000 bp, Oryza sativa
acaacgccccggtgatcggctcctaccccaaccacgccttcacccacatcgtcgacgaccacgccctcgccttcttccacgacgacaacgtccacgcctgctccatcatgtgacctaaaatataatcttatttaaaatcctacatgccagcgacagatacatatctgaccaaatcgaacaagctaagtgacctaattagtggtgcaaaataagagatgaaaaaccaaatctaacttcgtcgatcatctagtaatggtcaagtagttgctcagcaatccaacgtgcaaagagtgtggtgatatgatagacaaattaacgaataggaattaaggtcgaactaagcttatcaatcgacaagttgttcttaattaattgcactatgcgaccctttttcttatgaacatgaattaaaaggaagggagcagtagaactggattgctaattaacccgctatccttttgaattgactattcgacgggcatctgcatggtatcgatgcttgctgttgacagcacaaggggaagaaaagggtggccctgaaaattttcaactgttgatgctagctagcggctgatctcgctgaggtatctgtgccagtaatttttgtctgcggataggacaacatggagaggatgactaggaaaaggagcactgttcaaactatccaaatgtctccaaccaaaagtgatgacccatccttgcatatgtgcgcatcagtgcatatgttcttatgctggtgtggggtgaagattctggtgtgaggggcaaacggtgacaacggaaaagaaggttcgaatataccctgttccctgattacaaatacagttatgagttctgaccattggattgtatacatatgacaaaaagagagtaaacttcagttcacacatcagaccaaattgagtacaggtgctaccagtatttggctttcgaagatattttacattgggacagcgagaggagtaagttcagttcacacatcagaccaagtttgatgcagctgctcaatgctctgtttgttcgttttgtcagggaatatgggctaacagtgacccaatctggattggattcctatcaataaataaacaaataaatctggattggattgtggaaatgataagaacacgcgtgcaatttgatccactttttatgcgatcaatttgggaggaaatgctctttcgtttcgctctcacaaacctgtgaacaatttccaccctctgaactttcagcattgttcttgtattccccacttcctgaagttcttaattctgtcaccaaacgacttggcatgcagaacaattcagtccctcacgagatacagaacaagaagatatattatcttataccccatgggccaggtaggtacaccagcaacaatgcaaatgccgtcgcatcgcatctcagatacttatgcccactaagcttgaaccattatgttaacttggattaggggtaggctagagattgcattggggcttatatgataacactacatatacacataaaccacaaaatcaagctatcaacattcctcatctcgttgatgccgacttatatctgccctgatagcgcctaattaacccgtgaacaacgtgtcttttcatcgtccaagtgcccaaccaacacatgacaaaagcaaaacgagtaaataaatttatttagctgccaataaacaaaggaaactggacctgcccgtgtcgaatcaaatgctaataactcgaatctggaacaaaattaacgccaaaaacaacacaaaaaacgactctttttttttctccaaactcgactcggctttgagagttctaatcttagccaggctccaccccaacctgtgctgccctgttcgagcgaagaacgaaagcgacacgagccgtccatataaatccacgccgtcgccgccgaatctcgcgaaaaagctcgcaaatttctactcggggaagaagaagagccctctccaaaggatctcctcgcccggccggcggcgatggcggccgcggcgc

SEQ ID NO: 2230 - DNA, 2000 bp, Oryza sativa
  N_region (695)..(695): n = any nucleotide
  N_region (1713)..(1713): n = any nucleotide
atagcccacagatgattcagcaggcagataacacaggtagcagaccaacaccagttacagaccgtggtccaagagtaagccttcattttttccacatatgatttgttctcgtttcctagaaagagttgttttttcaatcaaaattcgctctaagatgatatatgcaaatagtttcgtaccaacggtgcataataactttctactacatagaattcaatcacaaaaaagatgcttctcatttgtttcttgaaatcaagcttctaataacatgttattcatttctgcggtgatattatcaataaacattcctaaattcccatcatttttttttgcagagagatctaaggcgcaggtaacaagcaggatgtgtatctatcccttgaaaattttactgtgtgtagattgcagtaaatgaaggtacttgtgatctgtatctcactagctagaagccaactgcgtttccccaatttgttgtgtgtgtaccaaaattttataggactaataacatttgacatggttttgtttttgaagaagcgaagatagtaagatacatcaattatctgtcacaaaagggagattcctcatgtattctggatggatgtaacttatgtgatgtatttttactatttctggcataacctaaatttcctgactttattcgagttatgatttcattttatgcttgctattttttnatctttttagatgctctccttttgtgatttatatgttgacattctatttcagattcataatcagatcagatgatttttttttctaatttgggtgattgaatccacttacagtttgagttatgatcaccaattatagtggaactaccgggcaagtaaccctgtatattggagcacaaaacttctcatacacttgctcgtttttaggatgcagttttgttaacatattattcttatcgtcatgtgtcagtttggtcagctccagattgggcaagaactggtaccttctcactgtaaatttgtgataccgggatgccagaagttgtgctcggtttgtctgtaaatctataattgatacggagtacaaagtgttttctgaggttactgcacatgagttcattctacagcaactaccattgaaaacgacggggatacttgattgttctttgttcatgcagctgcaggccagcagccgtcactcgatatcatattcatgaaaaatttatgcgcattttactgtgtttttgtcaatcgatcgagagagatgtttcgtccggtgaggcagtggcgactgcaccagctgccggccaagcacatatatgcatcgtgaaatttccgagaaagaaaacaacacgggagaaaggtaacaagaagtaggctgtgtttagttcaaaccaaaattggaagtttggttgaaattgggacgatgaacggaaaagttcgaagtttatgtatgtagaaaaattttgatgtgatagaaaagttggaagttcgaagaataattttggaactaaacacggcgctagtggaggactagctctggcatctcactggaccaggataggattaggttgagaaaggtcacaagaactagtggaggactagctctggcatctcactggactagtattaggttctggttgggatcgatttcttcttcccctttgttgctttgaaaagggattactttattttctttggtccaacgtagtgacgcttgcagtgtttacagtttgtttgntttttgccgagatgacggaaggaggtcatccgaatgttattaagatagtggaaaaaaagttagagtttttcatcgacagccgaaaggtcttgcacccaaaagcgcacgttcctaaatcacgcgccaactgctcgaacacaaactaggaagaagggaccaagcaacaatttgtttattccatctgatgactgcctctcctatatctaaggagagctagctgttcatcagctgagactcccatcatctcgcaaaactacaagcagctcacctcgcaaattaactgtcgg

SEQ ID NO: 2231 - DNA, 2000 bp, Oryza sativa
tcttataagctttattgacatgttaaatctgccctttatgttaagatcttgttgcatgtaagtatattaggctttctgtttgatatattttactcgctttactatcttagtatagagtggtatcagagtattagccgatacatgctagatcttcctgatcggatatgctatgaacatatatagtcttgttattaatatatatttcgatataaactgtctcggcatggcgaccgatctatcctaatcacttgatttaagtatatatcgatataaggactatatatcgttaatatctacagccgatcgagtagatttagttctttcttatttattaatgactgtcgatcgatgcatatatgacatcggctcaaagataaatgatatgtcatcggcacctagccgatcggctatcgtttatggatttaaccgcggtttctttgtctttatttcttattgattgcaagatcaaatcaactagcacgctcatacacctaaaggcaagcttttggacctgcactggagttaagcagatctcccagacctcgtgtttttacatcaacacacttatactgggtatcagtcaacacctactaggtatcaggcgataccgcagaggtatcatcatgttcgaacacctactaagtatcaggcgatacctcatatgtatcatcatgtttgaacacgaggtatccgccgatacctagcaggtatcaagcgatatctcagaggtaccatcctgtacgaacgggacaccgtcacgtagaatttccctttatatttagcaaatatttgttatcatatttgttccgtttcatattcatttcgtatctatattcgattctattttcttattcgggttttcaaatccgattttgagaaaaaattataaaaaacgaacgtgataaaactagtttccgatttcgaaaaagaatagtgcctttatcctaaaatataacaatttatatctctcaagatttgtctcaaaatataacaacttcttcaccagcattctcttcccaaccaatcacaatcctttaccattcacttttcccacctacctccactacttatccaatcacaaccctccaccatttaggccctgtttagttcccaaaataaaaattttcacgctgtcacatcgaatgtttggacacatgcatggagtattaaatgtaggaaaaaaactcaattacacagattgcatgtaaattgcgagacatatattttaagcctaattgcgccatgatttgataatatggtgctacagtaaacatttgctaatgacggattaattaggcttaataaagtcgtctgaatatgtaatttgttttgttattagactacgtttaatacttcaaatatgtgtttgtatatccgatgtgacaactaaatccaaaaagtttccccaactaaattaggccttacttctacctactttattactcactccacccctaaatataagggattttggttgaacttatatatcctgtctagattttgtctagattcgcatacttagggcatgctcactttaatgaaaaaaaaaaccttaccaaatttttggcatagttgccaaaattttggtaacttgttaaaattttggtaggatttcttatatagtcatcaaaatttagcagtaaactaaatatagtcatatttttagtaactttatggttaaaaaatggcattaaagtaaacatgccctcagagggagtaataaccgtttccgtccgttttcatgcgtctagcctggttccgggtccggtcccaccgggaccatccccgtgtgcgatgcgaactcaaaaaacggctcgacccagcgacctggggcgtccgtgtccgggtccgggtccgggtcggaccgcgctgcgcctcctccctttatttatcccgtgcaccgtgcccgccgcagaagtagtagagactagagaggccacaggcggcggcggcagcagcggaagtctctcgtctcgtccgtggagaaagggggaagacga

SEQ ID NO: 2232 - DNA, 2000 bp, Oryza sativa
gaaggtttgcactttcagttatatagatgtatgagcccccacaaagttctgaattcagaatttctttttcaggagagaatttgttgctatccccaaacaacagaattatatgttgacacatatcaaagaccttttaatctactatgtcgagcaaactgtacttgtgagttgtgactcatcatagaaacaatgtgcttctttttaagctcatcattttttaaaaaagaaaaaacaagaacaaacaaactcactcactccagattcatccccatctccaaccctcagctaactaacaagggcacctttctagaactgctaccactttatattgatacatattgtaagatataaaaacctactttatgttcatgtcaggatgtattttcgacgaggaaacatcattttcatggacaaggtactctcttccacagaatgccttgtcaatgtattcctctcaagttcaagctgtagttttttcagtgagtacttatgccatttcctgtgggccaaaagggaaatttgccaagggtgatagagatgaaaaccttgtgagagcactaacaagtgagggatttaaaatggcagagaatcatttgggattgcaaattgttgggtaaagatgctttgtgcagcaaaagagagaggggaggagaaaaagaggggttattgacatgacaccaaatgggcatcatgttttaattaagctagcaaagctagccatctttttaacaagacaaatggtcgtaaagcaaaatggaggaggaattttgtagccattaggcacccaatttcagttttatttgtgcggccataaagccaacaaaatcacaataccaaggcgcccctggctcttatctcaattttcttttgtttcaagttctttaatttcttatcttaatctaagcttcaccagaacattaggtgccaagatttattttatctccgcatttaggtaatagatttagctgatttctcgcattaagaagacctaatttgcatgcaactcctgagcctgaacatttattcaggaattgaactacattactgaccagttacccatcagatgctagcacataattaagctataaccaacttgttaacatcaaattaatcagccaatcacaatctctcaaactacacggactcaatgattgggctgctaactagttagttaaacacctggtcctggtgcacaacacaaaagagcataaatgatgtgtttctgaatccaattacacacatgatatgcaggggaccatcagaagttgcagtcatctcatctgaactgaaaccttttcagtgaacgatgctgtcatctgaaaccttggatcccaattcccagcttgtatgcatgtctgtaaatgaatatgcatcttgacctgatgagctatttgctagatgttcccatccacacgtcccgtccaatggacggaccagatcggatgatttttagccatcaggaaagcagcatgatgcacgcatggttgttatgcaaatgtgcaaatgcaaaagttggccgcaagaacagcacatacatatatactactactccagttccctagctagatatcgccaagtgtaaagctagaaatatatgcgtgcatcgtcccgacaaaaaacaaataatattctccatttccctggacagagaaagagagagagagaattctagtgtgagttgagtgagatagtgtgtggagcatctgctatataaaagggagagttgtagtgtgagttgtggtaagcaagagatagggataaggggaagaggaggaagaaggaggaggtgtagggagaaaccggagcaacctcgaagctagtccaaactagtgggaggttgtctttccggcaagccggagcccggagctatcgatcatcaagctttctaccccgaccgacgaggaagaagacgactgatcaattgatcaaaccgatctctccatagctaggtagacaggaggagaggaggaagaagagggggagaggagacttatcttgat

SEQ ID NO: 2233 - DNA, 2000 bp, Oryza sativa
ttgaatggaactcttatccaagttaaaagagcactccccgcgtcgctacaggatgattatatatggataaatggctttaaaaatacatgcaagttaaagaaaaaaagagtacgaacaaaagaaaattgaagaacatgaactcttcaatcacttgggagattctttctactaaaagttaaaactgcataaatgcatcataattacaaagataaataacatgtatatagaaaagaattaaaggattttagcatcagtttcacatcaattggggccttcttatggctctctaacaatgatccttgtttgagtgatgtagatcaatgatgttgagctattagttcttactatatataatatataggattctttcagccatatgaacacactgctctttattccaaatctcatatatactactctgtttcataaagaaccaaacccaagtgttcagattcaaacccgggtttgaattatttttttttggacggagaggatggattctttcagtcatatgaatacagatccctttattccaaatcatgttactgcaaggaagaaactcactcgctgttccatctgaaaattaataaactactggatttgctttccataccgagctatgaggtgtcctgcccaatcactgaaaacccccaactccttcgaccgtgacagtggaagtttcagagaagcatccaagctaaccacatgtagaaataggtcagcattagccatattcttttaggtgcaggaggcgattatttcagtggcgttaagctgcttgtgctgtcgcaaaccacaggggatgaacggagacggttccacggcgtcgttcgatggcaacagcaggcagggacacagctcgtccattttgacttttttgattgctttggagtacggtcttgttttctcaatcgatagatcaaataaaatccctatcaggccagcggcggtgtttttaacctaattgcattctgaagtcagtctctaggctccagtccaccgcagggtttacaatattgatgataactgcttagttgttgcggttatttcgagttatgaacgtataaacaaaaaattgatagtattaaaaatggtaaaatatcttaatatgtgtggtaaatatcagtttacagtactaatgatagccacgtgtttattgcggttattctgacctgttgaccgaaaacgtatgggtaaaaatttgatagtattcaatagaattattatgtaaagatatcttattgtcgttggtaaatatttattgtcccactctttacctttaagcgcaactcatttttaaataaaattttggtaaaaaggatgtagctatgcaccacactcttcggcttgcgtcaatattctacatttcacctaaatttattgtgcatactcaacgtctcccttctcatacgcccctcttaaccgtaaccccgttttcgtagggcattgatggtactccaatctatcatccaaattacttcatgacacatgaaactaacagaagcaccttatcgtattcacttcgtttttttacaagccaaccacagtgccatcaccactcaactaatttatctttattctgttttttttattttcaaaaattatccggtaaatccatttccaattttctcgaatatgtaaaagaactccaaaatcatttctccaaagttcaagggcctctggcctccacctcaccaaacgccgaaacggtgaggtgaacaaccacgcgtctataaaaaacacttgtctcctccgcctcccaccttctctcttctgtactcgctttcgcagctcctcttccccgcctcctccgttgaccgccaccgttgacctccccgccggcgaggtctccctcgccggaaacccccccgcctcccaccttgtcttcgcggcggcgttctcccgtcatctgatcggccggcgcctttggtctccgcctgcttccgggggctactcgattcgtctcctctcgatcccgctacggctcctctgcttgctcg

SEQ ID NO: 2234 - DNA, 2000 bp, Oryza sativa
  N_region (1965)..(1965): n = any nucleotide
aagttactttgactttgttttattttggatcacctaaaacaacttttctcaagcacatcaattacaattactttaagcacatcgacacccataaaccggcatgtcttcacaacttacacataagtattcattgcaagattagaaagtagatgtggctagacaagtaatttggggtaatccaaagtacaacaaaggtaatctatctaatctaaaataaaaatattactagttagagagtagtccaaagtgaattttgataataaagagaaacacctaagcgtcttccggttaactccgaaaggttgtgagctagccaacatgggttcggagcctcaccccttctatttatttgatattaggttcttccctaatattcaccttttttatttttgataataaaagatggatttaaagtgcaattacatttaattttctgtatcttttggtctgctaccactctaccagtaccatattaggttattccttaatattcgtgttttttaattttgataataataaatgaaataaagtgcaattaaatttaattttccgtccccttctccctcctctctgcccgctcgagctcgccgccgcctccccttcttcggtcacattgtcgacgaggcgtggcccgcccagttcatggtggtgaagagatctccgacgtcgagctccatgtggcagagggcgacgggatcggcggcgcttgagctctctggcgtggatccgacatcatgcttgctggatctagcagagctcgagcgccaaacaggtccacagatctggcatcatgctcgtcggatctagccgagctgccgctgtcgtcggcatcttcccggagatggcgtcgatatgttcagagctgttgtcatcaatgcgaatcgagttggcttcctccttggctaccgccgccgggctccctctcctccttccctggcagcgtgggccacagcgaggtgtgggctggctatggcgacgacaacctctagctcgttgtctcgtcggtagcctccagttcctcctttttctcctctacaacttcccggaccatacaaatcgtcttctctctctcctagaaccaccattcaaccactgttttctctgcatgaacctctgtcaccctgtgagaccactccaaacctttagcgtggtatctgaatctaagtgtaacttaaaaccacgggtgtgagacaccgcattgtaggtgtgtttggttgggtggatgaactcggatgggagatggccacccgatttttttgtggtgtttggttggaggtcagggtggatggggcagcccaaaatagggaatattccctcaatatactggatgagtgcatccggccgatttggctggatgaagccatccagttttggtctgggtgatgtgtcatgttctgattggctgtggttggtttgattttctgttaagcaagctccaaatgactttttctcctaaaccgttttatctaatttatgatttgattacaccattatatttgttacaattaaatctttaaaacaagatctcggatgattatatcttgataaaaaaattatatgataaatgggtctcactaacttttggttgttttcatccatgctatatctctccaaccaaacaagaaattagatcgccatatccatacaaaccaaattaaaaaaataaatcgtcatattcaataaaatatggatggctatatgctatccatacgtgaccgtaaacatagaatggtcttatgggacggagggaccagggagtactcctcgggggtcaggtcatcggcggggtgcgtggattgcgccacttgtagaccgggccccacatgccagacgcatcgatgcttcgctttgtttacgcggcgcgcctctctttttccttagccaccaaggctcagaaaccgcctacaaaacggcgcccggcgtcccacggatcaagcgaccccctaaaaaaccaaccgaaaaagnaaaaaaaaagaagcagagaaaaaagctctcgcggc

SEQ ID NO: 2235 - DNA, 2000 bp, Oryza sativa
  N_region (1734)..(1734): n = any nucleotide
atgagatgtcagcacaaacatgtacattggccccagtatcaacccaccaattagtagattgattaactgaaaaaacagtaggtaaattaccatacccgcttccatctccagtgttgccaatggtcacattagcagacttagaagtctgccctgcaggtgccttcatccccttgcgttgtggacacttcctagccagatgaccaacttggccacacacaaagcaagtcctctcatcctgattaggattgttgttgttcttcttctgcttcttgaagttggtggtctgctgagctttgtatttccccttgctcttgttctgggccttgtgcacaacattggcactggactgcccaccatcgcccttagacgcggcatctttttcccgagctttctcctcaacatcaagagacgcaatcaacccctcaacggagtattcctgtctcttgtgtttgagtgcagtaccgaaactcctccaagatggaggaagttttgcaataatgcacccggccacaaaatttgtcgggtaagacacacttaaggagttcgagttccttagccatggtttgtatctcatgagcctgttcgactacagaacggttgtcagccattttgtagtcatgaaactgctccatgatatacagatcattgctagcatcagtagcaccgaatttagtattcagtgcatcccacaactccttagcgtcggtcatatgcatatacacctcgaccagacgatcgccaagaacgctaagaatgcatcccacaaagagagtagtggcttcctcgaattgcttctgctgttcagcagtaagaactccttcaggtttgccagtactcacccagaagcatttcatagctgtcagccacagagtgaccctgatctgccatctcttaaaatgcacaccggtgaatttatccggcctcagtgcatcggcaaaaccagccatagtaaaatcacagtgcctataataaggtttttggattgttgagattatgggcatataatgatttaatttattccataaataaatcatgacattacagatgaaaactagcatgaacgcatcattagatctacacatgtaaactacgcagaataacatgaacagatcaaatatgcgcaacatattgaacacgtaccgaggtgacgaaaagaccggctgcttggtcgaaacttttcgcaggtgtctacgaaggcacgaaacatgcgagcgaagaggaaggcgagccgtcgtgaacgaacagggagcagtcacgcgaagcgcttcccaaaaaccttattgccgccttctcccggtgcaggacgtcaaaggcagaggttccggagacctgctctcccgatcgctggtgcacgccggcgagcgggatggagtagtctacgagcgacggcgcagtacagagtaggaggcaaaccctagattgattttcgcatatattgcgtgaagacggcgggtcggtttatatagagaagggtcgcttgatcagggcgcccgcacgatctctactgcgcgtaaccgaaccggataagtcgcgcgtaacttatccggactccacgccgtttgcacgcaccggatttttcggaacgtttccaaaacaaaacgaatccgaatttgcagcaaaacaaaactgcaaaaggaggctgcatctgcgcaagggtgaggagccaattttttcggaccattcgacgcgtacgtcgtgcacgcgcgccgcctgccctgccctgccaggccaggngagcgcgagcgcgcgcgtgtgtttcccctcttctctccaccacacatgcttcaagtggctaggagggcatcctcccttttaaggaggtccccctctcctagaataagcaaggtggtactaaactccacatgcatgccattccatgaggtgggcttttgtgattttccaaagaattaatcttcgagtgggctaaggcccattcattaattccaacaactgtcgccaccctgacggatggtacatgtccaggcggggggttgtgagcg

SEQ ID NO: 2236 - DNA, 2000 bp, Oryza sativa
  N_region (223)..(223): n = any nucleotide
  N_region (257)..(257): n = any nucleotide
  N_region (886)..(886): n = any nucleotide
atgaagaaaagtctacattgcagagctgaagaatttgctgtacaacttttaacaggtgcctagtatgcatatgcattttttttaaacacaggttggtttgcttgcaagatacgcggctttggcccatctttcaactaaaagttatatttcaatggaaaataacatgaagttaacgaataagtgaagataatttcgtctgaaaaactgaaaacaatttgaaagncacaaaaagagaaagatatcctgaaaatgactangacaggaaggaaaatttcccaaaaacaagtcattggaatgggaacaggctaggagattccactacttcagctaggtgtcaagcaattatcatggccattagaatggaaccggcaaaatgtcacaagctgtacttggctccactacctctacctctacttggctagtgctcaaagtgtcaagtaggcatgatggcattacaccagaacagaggaatgcataaagctgtacttggctccactacttatggaaatatagaaagtttttttaatggctcaattaaggagaacatatgatctttaaacattgaaatgacatctgagcactagacagcacccctacacattgaagtggtggcagcactgcgttcccttcctttattctcttccatggtgttttgccatagtcctccaaagaagagaataaacagataataatggtaatccaagtagtatcacagtttggggaaagaatctaacagcaattaaactcatcaaattctcttttccttatcagaaaaagaggacgctgaatggggcttacctaaataaacaaggtgtgcaaagatgaacatttgagggcgcagacacttccacgcaggtggtgaagcatttttttctgctagataacnaaaagaataattagaaaataagaagataagaatatcaagcaaggcaagctttaatgtttaacaagtaatcaccaaatcgaacacgcaaaaaatgaattgatagttttggcaaataagaatcacttgaaagtgctaagattccttttttttttcttttgccctataagggcatggttcccaatttttcacaaaaaaactccatcaagatgttacatttcatattaaatttttttaattgccctctccaaaaactagatgttactgtaatgccattataaatgttacagagtaatttctgtttttcatttagaaaaccataggatgatacataaaaataatcataacatgctaaagagtatattgtcatgcagactctgcagatcggcagacaggaggacgaacactgtttattgaccgataagattgctcagcaacgtaatcttcatagatccacttgcctcaaggtttcttatgtttcagaggaatagcataaatctagtgatctataatattttttgagtaaactactgtggacaaactatcaaactatcagcttgaaagaaaaaatcatatcatgaaaaaaaataatggtcttctactgacaaaatgtttgtattaataaccaaaaagaaaggacctgaaaagaggtgtattaacacctccagagagttcaatagcactggtgacttgcatctttcccacgcaaacagttcttttaagggggaaaaaaacaaatgcagagggattatccttagaacttgatggaagatacatgaagtacagcgtcagcgtgtatagattctattgcaaactgtttatagaagaaaataagacccttggttggttatgctgcaaaagttgttagctactttctgtagccttttcagttattttccacggcatacctgactaaaaaacacacatactactcatgtctcacattgtccattgaggttgcaagacacttgaccagcaggctgctggccactataaatagaggctcgtactaccattgccaagcaatcagcccacagctcaccgaagtgcattagctcaccacgactagctagagcactcattggtgtgcaaaatattactgtctgctcctctaaac

SEQ ID NO: 2237 - DNA, 1891 bp, Oryza sativa
  N_region (474)..(474): n = any nucleotide
  N_region (979)..(979): n = any nucleotide
aacaccagcaaagctaggatatcattatctacgatctccagttcgtagttttcatccttgcaagaatctggatctggaaagcaaacagatgctcgatttgacgtccattgcaatggcatggttagtgtgccaaattttttttaagtatacggacacacatttaaagtattaaacatagactactaataaaacaaattacagattccgtgtgtaaactgcgagacgaatttattaagcctaattaatccgttattagcaaatgtttactgtagcatcacattgtcacatcatgacataattaggatcaaaagattcgtctcacgattgcaaactgtgtaattagtttttttcttctatatttaataatctatacatatgtctaaatatttaatgtgataaaaaagttaaaagtttgatgtaaaaattttgaatctaaccacggccgaggtatccattgcatatagtgacatgtcnttctcactgtctctcacacacacatactgacacactgacagtggggcccactgaatgcagcacgtggtttccgaggccggccctgatgatgaaccaaccgccagctgaagcctcagctccagaagaggagcagtacgtgcagggataacgtactctctctcactcaccggcctctgcagccactccatgcttaaccgcaacaactaccccctctcttccaaaatacgtatactccatctatatcaaaataaactaaatttagcataggatatgaaatattctaatactttatttaaatttatagtgcgatgtatatattacatattatgtttgtttactttaaaataaatatagtaattagatatatgtctatttataatagtatgatgtgtcttatccgattttaaattactatattttgagacttatagtagtactcccttggtccgaaaaaggataacttctgatgatgaattgtttgtctaatttatctctaaattttatntttttaaagaggatgtaatggagatcgagaattgcatatactgctcatctactgcttcatctgtatgcatgcactgcacaatagtactagtactactagtagtagtagcactgtctctcacttagctgttgctagctgtcccctttccccccatcatgtgacttccatccttgttcctagctgcatgcaataccttttcccattaaaaaaaaatagtactaacaaactcttcttctctaactaactatgtgactaattacaggttaaaccatctcatctcttatatcacccaaagcccttccacatgccatcaattatcacacattgcaacttacaccttaacagcttgcaacaggtaataatactgtgtgtagttagtttgcttagcaaagttggtgatgacttaaaaaaaaagaatcaggctagacatggattaagctttttgtgtatgagtgtattgtcatgcatgcatgggtaggtatactatggtagtagtcctaattactaactaccaaatctcttggatcttgatacacttgttgcatgcatggctctaatcacatgcatgatgctaattaatatgctagctagctttatatgatagcttgcactcacacacacacacacacaaatgcattgcatatatatgcccccacaattgcatacttgcatgtgccatctatctttccacaatatatactcaccttcaccacctatactcaccttacacattctctctttgctatctctacttgcacatgtcatacatctagacaaggacactagcttagctatagctagctactagcctactactagtagtagcctagctaggaggaggaggagctaggatggcgcagttgccgccgagggcgccgagcgcggcggcggcggcggggcaggagtggtcgg

SEQ ID NO: 2238 - DNA, 2000 bp, Oryza sativa
  N_region (347)..(347): n = any nucleotide
  N_region (399)..(399): n = any nucleotide
  N_region (517)..(517): n = any nucleotide
  N_region (537)..(537): n = any nucleotide
  N_region (697)..(697): n = any nucleotide
  N_region (701)..(701): n = any nucleotide
  N_region (724)..(724): n = any nucleotide
  N_region (1507)..(1507): n = any nucleotide
  N_region (1512)..(1512): n = any nucleotide
actgctctcatgttgaatggttccaagccaagctaacatttttgcttacaagctaagctaacccttttgcagtaagcaaattcaggcgccatcaccgtattcgaacgtcgtaggcggcaccgcggccgtcaactccgacgagctggccgcccattgcaattcaaaactaggctgccgggggccaggtcgtcgtggagccatagggtaacacacacgaacgcgtaacatttgcatttgcagatggtgaggagaaagagaataaaaacggggggagagagagaggcaaaggcaacacgtccgcacgcccgccgaccacctcaccacgacgcctttccgctcgcctttcntccccaaaaacgcggcacgaagcgatccttccttccttgtttccgaaaattngccacgaagaaacacgtacgaaatccgcagggcagcttagcgttttcttcttctccgatccgatcggattcccctgcccccgatcgcgggagctgccatggcagaaggcgacgcctangccgcctcggccgcggcctncgcggcgtcgccgcggacccccgcgccgccggagacgccgtcgacgcagaagaggaggcagcgcgggctcgtgtcgcgggtgtggaaggggatattcgggcggcgcgaggacgtcgagaagctgctccaggcgctctccaaggaggaggaggccgtgcgntccngcttccgccgccgcgcccgcgcntcccgccagtccgcccacaacgtcctcgccatcgccgccgcgctcgaggtatccctagttcccaactcccccgccgttccccatccggctaatcccattccgctctgcttcctttattgtagcaaatataaatgtcatgttcgtccagacgaatcgatcgcttgtaggttgggtcgataaaatcgaggattgataaaatccagttccatatgaaaatcctgatgtgatacagctttgggaagctaattaggcatcgattatcatgacatacagcctgctaagataaattatgccgtattattctgcaattttcatgtcgtgtcagagattgtatgatgcattgcattgctctagttctagtgacaccattaggcatatgcctgttgttagattagatcagggcgaactgtgttttttcacagggttgtatgtgtaaggaaatgcttatttctcctttttggaacagattgcggctgttggatatgcgattatgactacaagatcaccggacctcagctggcagatgagagcaacccgggtgctgcccatgttcctgattcctgctttagctgctctcatttactcaactattacaagcgtcacgaaaatgcgtaaggaatacttgcatctgcattgtgctgtatcttactgctgtgtatgttctgttgtgttcaggtgttaatgcagcattaggctctactcccttcgtcccataatataagggattttggagggatgtgacactcccctgtccagattcgtagtcctaggaaatgtcacatncctcnaaaaacccttatattatgggacaaagggagtagctatttttcctatccctagaagttcagggagacaaaaaaaaactatgagactgccatgtttcctgccagattctccagatgtttttgagttgaccatgttacttccacactttatttttttgtcatttgccgaatggttttgtggaacaaccgagttacgtctagtaaactgctccaattaatacaccctatcctttatgcctaaactgcaatactgattctatcttgcagttgacaacagagatcaacatactcttgaaaacctccgtgctgaaagacaggctaagattgatgagttgaaggagagaacgaattactacactactcaacaacttatacaggtgggcttgttgcctacttgctctatgttatggccacccaagtgtgctatttttttactcttcccctttgaaaggtttacatcttctaactattgctgaaacttcgttttggtc

SEQ ID NO: 2239 - DNA, 2000 bp, Oryza sativa
gtacaattcatgtcatgctagtatactactctgttaaaaaaaacacattcatcccaacatgtttgtccagattaggattggtttttttttatggaggggtatgtgttttgcatggatgtaaatgcactgtattgttctaaaatctaaaatcttaagtgtacaaaaatattgcatacattcttagatagatagaaatattgcataccacttacatctcttgaaaggaagatatatattggttcaacctaaaaggccacgcatagatcgaacaatcatcacaacatagctatatttttaggaaattttattttgtgaaagttagaaataagtcataatcaacctgggactcaatccaccaattcttgtatgtggctcatattaatcacatactcaagcaagtatattcatgctaaagtttccacatattcacacttcatgttttagggaaaaaaataatcacctttcttttactaaaaaaaaatcacccataacctttgtcaagtcgatgtactagcacgtctacatatgccatattgtacttctcttccaacacatggacactcagctcaacaataggatttaacaagcatgttctcattttaattttgtttggtaaatcggccaagttaaaaaaaagggtaagttgaagtacctattggacctactgttgcagttaggggtgataatgggcctaatattattttctacgaaatttgagggttagattttgaaagtggagtggactgaatttctatatattttctttactcaaaaatatattgagattgagttcttttcttctctttttcaactcacctctctcgttttccacgtgcacacttttcaaactactaaacggtgtattttttaaaaaaaaatatacgaaagttattttaaaaaattatattaattcattttcaagttattcttatctaatacttaattaatgatacattaataaaccaccacgtttttcatgcagggaggtccacctcacgaacacagcctgagtaggattgtgaaaggacccattacaaccctgtagtacatgccacaccgtttgacacctatttaccggaaacaacacatttgtagtgatatggatctaattaaccttaccatatttagtttcaaagtgcaaaccttaaaaattagagttatttaagtttcaaaattcatacccttaaataaaagtgattttaaggccttaaggaggaggcacctcatcttaattgtattatttatttattttgtaggagcactgctacacgtactaaatttcttactaaatttgtgtagtatatatttatacatcaacactagattagagaaataccgagagatgcaatactctgttcgtactaaaaagtgtgtaccccggtccatcctaccgtaagaaaaatttgtaactactatcacatatatacttggttgattgagtttttgagtgtgattaaaaggaatcattttgcaaattgtagcgatctggccctccaggagaaatagctgcctagctacaaagtaggaaacatggttggttttgtccttgtcgtggctactccaagcaacaccaaaaaaaacgcatgcagctaagctaggcagaggcagcgctttcggcaggaaatcctacggtaagtcggtaatccatcatcatatcagcggagacaaagtgcggaaaaaaggtttatcaaaattacccgcgacaccgatcgaatcaccgcgggggcatttccggaaaccccgtgctcctccgaaagcagtagtggcagtgggatgcccctgacagcgacatggcctgggccgtggtgatgagtgatgacccggagaatgagagaggcgactgtgcggatatatatgcagcgatagctcactcggttgttgcatcgatcgcttcatcactcgctagctcatcactgcgagcggagacagctcaggagggaggaagcaaaagaagagagagagagatcaagagatagacgaagagatttgtctgtgtaaat

SEQ ID NO: 2240 - DNA, 713 bp, Oryza sativa
ccgaatttcagttatttttaattgtatttctatatggactctagtctcttcttctaatattccttattttttaattccgaatttcagttatttcctaattgtatttctatatggactctagtctcctcttctaatattccttattttttaattccgaatttcagctatttctaaattgtatttctatatggactctgctttttctttttctccgattaatgtgagaatttctaagccatgagagcgaatgtggaagctcctttttctattcctttaattatataatagataatttgtatataggaaacttttgcatcaaatacaccatttactagctaaaaatgagttggtccctctttaagaaacgaaaacgcagctccagcattaaacaaatggaagagcaataaatcttagaatgactatcagaaagaacagtctaatctattatgatgtaatacggcatttttattattgaaccaaccagagagaaagatgtgaaggtgcatcagtagtgattaacactgaatagttacggggggaaaaagtccattttaaattgggcctaacatttcatcgctccacgattaattaaatagtggtgatattagggttctattgaacaattaatcatagtgctaattactattgactagacattattagtgacatgttagttgaggaaattgacaaaataatgaatgaaaaataaaaaa

SEQ ID NO: 2241 - DNA, 2000 bp, Oryza sativa
ccccatcaaattggaaacatttcatctcaacatcagcacggatcttaagtggctgtggtgtcatcctcctccttatattcttaactagggcatccttaacctcaggggtgacagcaggcaccaccttagtcacctgccagtaaatttaagcatattgtaaggaaaaaaatacttaaaatgtaatcatgccaaagttagttttagaatgcatttcaacaacacagtattgttatgatgttagttcaaatacaattgcaaaaatagttagaacacaagtcagtgcgccaattttttcttgtcatgtataatgcgtgaacagctattaaccacatttaccaactctaaactatacaaccacatattgtctcctgtaaactctagagagtgtaagccaatataaaatgcttgaactacatacacaatgtaaaaggtataaaaatcgcccaaccatcaaactacataggcatgatcaataaaacaagacccaccaagacaggattaaccactccacattatatactataagccactaactacttactatatcccacagcaaataagttccatatggggcaaattcaataatgccaaataaagttcatctaaaaaaggaagtactacctaattaccccagaaagattactgtagactagtagtacagatgcataaacacataagatttaagtgaattcagcacaagatatcagcctaagccgtctagacacacaaactactacttctcatatctatggttcatggtatagcacaaaaaaaattacacatttaagcaagcgcaggcatgagcagcaagtctttgatggtttgagaagaaaacgaacacaacctcctgtccgtcagcgccggtctccttctcctcgtaggtgagtgagtcgaggatggcatcggggtcggcgacgatgagcttgaaggcctcgaaggcatggccgtacttgcggtacagcggccatccgatgcgctggtagagcggctcgaggtcgatcccgagggtctcggcgacgtggcgcatgatcgagtggacgagcttggacttgttgtacctgtcctcgcaggcgtgcgcctcctcctcggagaccctgcgcttggagaggtcgatgtagcccttgtcgcggtcgacgcggagcacgatggcgggctcctggcggccgaccttgatgagggaggagatggagcggatgcggcggcgggagagctcggagaagaggatcatgccctcgatgttgttgtactcgaggagggagacgtaggcgcccatgtcggcgatgtgcttcacctggatcatcaccgccgcgtccacctccgggaaccgcggctcgtacatccggcactcgaggttcggcatcgtggccgcgcgggcgtcgccggagtcggagacggaggagcggggaggcggcggatctagggtttggttgggtttttgggtgttttcagacggagagaggcggcggcggcggcgggggaaaaggagagatggcttttgttgcgcctctcgagctcgggaggaaaaacctgatgacgaacgacggatcggacggttcacgcgggtggtctggtctctctctcgtatcgtatcgtatcacgtctcatctcgaatctcgatacgcctttcccttgacataatacgtaactagagatcgtttgcgtatttctataatacgtaatagctttacgtttggcgtaatgcagtgtccggcaccggcaaaggcggcagctcgtgcgtgtcacgcgagggcatcacaccgatccgaatctccttcctctcccatgccgccgcctcttgccttggaagggaggaaagaagcgaagagaagagagagctagcggcggcggcggcggcggcggcgaggcagctggttgtttgttgttggttccctctccacggcgacctcattgcctctccatctctctcgagaaccctccgcgcggcgacctagctccaccgtcatcgcagaggaggggggattaggctgtagtagtgtgag

SEQ ID NO: 2242 - DNA, 2000 bp, Oryza sativa
  N_region (199)..(199): n = any nucleotide
  N_region (236)..(236): n = any nucleotide
  N_region (241)..(241): n = any nucleotide
  N_region (253)..(253): n = any nucleotide
  N_region (267)..(267): n = any nucleotide
  N_region (276)..(276): n = any nucleotide
  N_region (285)..(285): n = any nucleotide
  N_region (336)..(336): n = any nucleotide
  N_region (347)..(347): n = any nucleotide
  N_region (356)..(356): n = any nucleotide
  N_region (377)..(377): n = any nucleotide
  N_region (660)..(660): n = any nucleotide
  N_region (1389)..(1390): n = any nucleotide
gtgataaaatacatttatgaggtgtgtgtcttttttgccgattagggtttagtattaacctatgggttgactgttttgacctaattatttggggtaacaaatgtacatattaatttacaccaaaatttcagtgacttatatatattaaatagtacctccatgaatttcctcatgattttatattgcaccaattattttnaaatattcaatgagttcacctacccttaagtattctnatttngaatatatattnaaatggtagaaaanttatatttnagtttagantcaaccagaaatgttatgtttaggcttaactttcattaacatttctatttnggactcaaaantaaattttnattatttatctgaagtaaaanttcgaaattcgaattttgggtatgttacaatgtgtttatgaaaatgggctatgggaatggtgatggatatggagtgtggtgaagtatgatgatgatggtgatgatgttgcccagtgtgggctgatatgatggtgctggtgatgacttgggtatcggagatgagagtatgtatatgaggttgagatggtgaatattatggtttacttacgttactgttttattaattgaattgtgaactcctttacaaatgattgtgaactaaaatttgctttatactaaaatnagctacaaatagcctttctttgatttatgtcatgcatgatgtagtatgttaggattgtcttgtgcttgccggtacattaacttgtttaatgtactgactcttgtacgactggaatatccattttgcaggttgattgcttagtcttctgagtgatttgtggaaatcgttgcttcttctaggatcggatccaaaaggagtattctccttgtcggccgcttgtggatttgggtagccaagctttcgcggatcagtaaatatctggccgtttggcctaactatttagataagaatgtagagtaaagtttacttatgtttactccctatttattctgattgtcatcgcttagatgaaagtgtggaactagagcttttcctgggatctagttctgcaccggtatgagttttgagcatttgggatgtcgtagagctttagcgaattttgtcgagtctcctgagatgtgtaacacatctggtcgccatcttcgtgtggtttgacgagcatgtctcaggctgaaattgactagcatgctaaagtcccagcaatatcccctatgctctctactcggcgcttcaggttctatattaagtaggtcatttgacttgataggggagcgatgaggttggatggttactgttttacttgattattattagaccccatccaactaaatattccgcgctatcattttaaataacttacataatattaacctgggggtgccccacaanngagctgtcaataattaatgaagtacagttcctagctccaggctgttacctcccaatggtggcaaagaaaaataatattgtctttcataaggcaatgtcgcaagcaagaatggatctgcagacaatcaaagcaagaaaaggataaataataaagaagtaaagtgttgaatgtcagtgatccaaaagagaattaatcaaaggaatatcattatagaacaaaaaagagagaatatttcataatttctttaagactaaggcaagctgcgaaaagcgaaatattccataaatttcagcaacaagcatggaattttgcatggaaccagcagctcaaggggtagcgtgcatatgcaatagtgccggtctgcaagaggaattaaccaaaccatttgttgattggtcatgcaagcaccccacacccccatgcacgcatgcactaaggccttagcttagcttagcttgttctagctaggtaggtatttgatccagccggccagccagcttgttgccggcaagcgggggagcgatccgatggctgagggtgcggcgagtgccgtggcgaggcgcagttgctaggacgtgtgaagaaggacgtgcagttcatcaaggaggag

SEQ ID NO: 2243 - DNA, 1713 bp, Oryza sativa
  N_region (921)..(921): n = any nucleotide
  N_region (933)..(933): n = any nucleotide
  N_region (999)..(999): n = any nucleotide
  N_region (1026)..(1026): n = any nucleotide
  N_region (1028)..(1028): n = any nucleotide
  N_region (1163)..(1163): n = any nucleotide
cactacatagagcttgtgtccaatggaaccagtgaagtactgtagtactacttgaaggatatttttggtaatgagaattggatcatgtaccatttccttctctcactatatagggaaagaacagggtaggtacactttagccaagtgctaatcacacatgctttgagatctggacatgcatatggatggtctggattgctggtgcatatgcaccaaggttcatattatccaactcctatatatatatatatatagacacacacatatacactataagtacttttaagatattttttaatgctgaatggaatgtaaatgatatatttagacaacatagcgttatagatgatgctgttgacactactagaaaaagcatttcaccaatgttgggtatttattttcacaggcgaacatgaccctcagagctaaatagtcgcctacaaaaatacaaaccagggggaagcttgctgtcggaccacttaagcggtccgcctgcaaaaatacccttcatttttgcaggcggaactcttatatggtccgtctccgaaaatagacttggaatataaatagagtcaacctagagcgattttttctaagtcctctttctccctcactactcccccatcccctcccctcacctctcctctccccggccggaggtggcagcggctctcggtggcgggtggcggcgggtctcattggcgggcggcggcgggtctcattggcgggcggtggcggctcccggcccctccctccctcccagatttggccggaggggggcagtggtagggtggagtggcggtagggcggccggcggtggctccccttccttcctccctccctcccagatctggccggaggggggaggggggaggccggcggaccggagacggggcactgcgtcgcgtgcgcgtggcgcgnagcggccggcancggctccccttccttcctcctagatctggccggagggggtagggggaggcccggtggccggcggcntggggcggacggcagcggagtgtgtcntncgaacatttgtgatgcgtttgatttgattgtgaatcaatatgatgcttctatgttaatctgtgatgcttttgtgcatttgatttggttcgatggtgaatctggatggtgaatggaaggagatgggaaactgctgntactggccgaaacagcggtgggcggtggctgccctttttttaatgctgggagctattttcacaggcggaccagttgtccgcctaagaaaaccaactatttttacaggcgttcatttgcaggcggaccagttgtcctcccgaaaaacatgtttagtccgcctgaaaaaaatgtttttttgtagcagtgtgagctcaactataaatacaacacttaagcgtatactcccgctaacgacgacaccactgacttttgaacatagttttgactattcatagaggttaaaatccactctcacatttactctcttttgtctgcctccgagatcgatgtcacgtgaaccatcactgtttccagtcgccgccaccactcgcactccacagccaccatagttgacacttctccccgttgatcacctcaagagcagtaacgtgtcgctccccacgtatacgcctcccatggctctctaatcaatatacacatttctctccctagttagctcaactgacgctacatgtacacggcgccggccggtacgcctccatgaccgcc

SEQ ID NO: 2244 - DNA, 2000 bp, Oryza sativa
  N_region (659)..(659): n = any nucleotide
  N_region (726)..(726): n = any nucleotide
atatatgttaatgaatctagacatatatatgtgcctagattaattaacatcttagatgaatgtaggaaatgtcagaaagtcttataatctaaaacggaggcagtacatgtagtaactaaatggcaaaacatctcttatcacaatggttgcaactatagcaaataacacgcaggggcattttgtgccatttagtgaaagtagcctgaattcagaaatggcaagcgccattgactgaatatgcacaatccttgtagggataatttttagaagctcaatattatgaatcggcgatacatattcatttagtgtttgcctattagacatggtgagttggcagtaactagaacatcagttggtcgatcccaaggccaatacagaagaacatatcatttgttcttatcttgccaccacgaaacaaagactggtcaaactgtaagcattgatttgagacagcttcttgtctagggatggcaatttcctccgcgggatcgggggtgggtgtgattttcaacccgcggggttattggggacggagggtccgtatttgggtggggaggggacaggagaaaacatttcacccccgagggtgacccgtagggccccggggtatatataaacacttaaaatatagctcatagaagaccaaaaagcctaacctnaaaaaaaaactgggatatataatatatataatccatggcgaagacgagctagctgcacgtggcagtncaagtttgggggagattataaagagtgatgaagacttgcaattgaggaggatttggacccggcgtccatggcaaagttgcaagatacagaacagattcggtggacgtagagtcgtagactcttgccagcccttggaacaattaaacgattgatttccactgtgataatgaagacaagtctcttactgtctgatgatgacttgcgtagaaaggtatactccctccctctcatttcaaacgtatccatcagtttttgtgttcaattttaatcttttgtcatatttaaagaaaaactgaaaaaattaaaaacataagtcatgtataaaatgttattcatttttttaaatattaagaattatgtattgaaagtaaccaacccacaaatattttgtttagctagcctgcacatgggcatgaattaagtgaaattagatttaataatcgtttatctgaagccatataatttctatcttgttataattatcatatattatatgaagttctaaaagacactagaaaataaaatatgtgtttcaaatatcagataaattattcgaaagatttttgcatttgtagcatcgaatttgtttggtcactgtacaatccacttgcactggcctttactcaatatgccctatggtgacaaatagtaaggcctagcggactcctctcatcctctatcaatgcattattcttatctcattaagaccggtttactcactctctacttgctttgctttccctcttattctagtttgtgcaagaaaatttttgggttccaaagtataaataaatactacctccgtcccaaattagttgtcattttgactttttggttgcaatatttgaccatccattttatttaaaaaattagtgcaaatataaaaaataataagtcatacttaaagtacttttgataataaagcaagtcacaaacaaaataaataataataaacattacaaacaaaaactcaaagcgccaagtattttgggatggagttagtacattgtaaaatttgtctatctctagtagatgaaaattgtttggtgataatggttttcttgcacctccaagtcatcatgttgcatggttgtaaaacttgtatatatgctgggacatggaggttgccatatgatccattgtagtagtgtttacagtttcgatcaagtttagttaatctttctttttatgtctcagtgtatcgtaacatataaatagattccaaacttaattcttcaagtgaatatgtacatggtgacatgtttatagcaagt

SEQ ID NO: 2245 - DNA, 2000 bp, Oryza sativa
  N_region (1663)..(1663): n = any nucleotide
aacccttatcgatctaaacccctactttaacgtatttaatttgtccaaaataaccataatcgtgaggatgtatctagataccgtattagtattaccctgtagatacatttttaggattaaatttttatagaccggatggagtaggcttgatctccttgtgtgcatttgcagggacgaatctaaagtagaagtgtcggtgttaggcgacaccgatgactttctataaaatctatagcaaaactgtttaactatgttataacaccataatctaaataaatttagtatactatgatagcgatagacacgttatgtcacatacgaatcgattttctggatcagtcactgtgcgtttggttggcgtacattgtgttcatgtgggtcgatttattcgtgttttatttaattagcgtcctcataatctcattgtgtcattgagttgcgtgccctatggcaccatgggatgacgcgaaatgaggaagccttggtgcccagtatgtgcttttgtggctcgacgatcgtggcgtgcattctggccaaactagtttgcacggtttcgttcttcactttcaattgtaaactcgctctcttgattgcccatgaaatattttgagttcgtgtgtgttcagggctaaccacttagaccactaattagaatatatttatgccttgtctagtagggttgtttcagctccatttatcttagattccaactaaacggtttaacctctataaaaaaagagcataatggggtttagaccacttcactccatactttgttttcgaagttacgacggccacatcaaacagactcttaatttttttccataataaactattggagtaccagtaattaataagtatccattaacttttcatccaaatctcctccaagaaaaacctgaccttcccaagttcaagccaacaaccctgacagccgcatggacatacctagaggtggtaataaatccaatattttagcctatgaaatatgagggttgaataaaaagagttaaactaagattttttttagagaggggcatttttatcttgcctctatatccaatcggatatatgcatcctcattaagaaacttagcctaacgaacaggtaacttagtcctcaaataacccaatctaaaaggaacttagctttcaaataacccaatctgaaattcgctcctagtgaggttaccgcaaccactaggcttcatgccctttcacaatcattaggtcttgtacgtttaatccctcctataagaaaattgagggatttttagagggaatttatttcatatctattggggtaaaattataccccttcaattttcttcgttctcttaaactgaggattaacgaacaaggcattacggtctagatgggttgtttaacaggggttcatggcccctaatccattactgcccctactcccaggcataccgtatacgctcgccgcgccggcacgccattcccttctcgtcaggtcacgcgtccgaaaccgaccacagctggaagccgatccgatcgagattcagcgtgctcgcgatcggctccccatcggcttaaacccaccacaccgaccggccgctcgcggcaaaagaaaaaacgtatcgcgcattcgcacgcaacgtgccattttttgcacacggcccgcggttaataagggnaatgggctgtagtgtactcctccaaccttttcgcgccggctgtggaccacccgcggacgcgatccccgcctcgcgtcgtcgtcgtcctcgccgccgtcgctctcaccaccaccacactatattagcatttgatatttgctcacgtgtttcaggcgtctgcactgctactgctcgtaggtagcctcgcttgccccgcccgtcacgacgagcgaggcggagacaaacgagagggatttttaaagggccccgggtccaacggggaagagagagagagagacaaccagacgggagcttgtcggggaggagagagagagagagtggtggtggtggtggtgag

SEQ ID NO: 2246 - DNA, 2000 bp, Oryza sativa
  N_region (354)..(354): n = any nucleotide
  N_region (548)..(548): n = any nucleotide
  N_region (558)..(558): n = any nucleotide
  N_region (568)..(568): n = any nucleotide
  N_region (570)..(570): n = any nucleotide
  N_region (1205)..(1205): n = any nucleotide
  N_region (1226)..(1226): n = any nucleotide
  N_region (1283)..(1283): n = any nucleotide
  N_region (1352)..(1352): n = any nucleotide
  N_region (1451)..(1451): n = any nucleotide
  N_region (1649)..(1649): n = any nucleotide
  N_region (1803)..(1803): n = any nucleotide
tgaaatgtttattaaatgctgtttatgcaaatgaaaccctactatgccatcctttgttatcctgtgcacttgcatatttgctgcgtggcttgctgagtatgtcatatactcaccttgcaatcattcatcagaggaagagttctacagtgaagcctgatggtgtggaggattaggtgtagccctggtcaagctgcctgtggagtggagccgtctgcgccgtttatcttatctttccggctgcttagatctttattgattgagaggaactatctacctctgtaatgacattttattcgcttattaattagagtaataattgtactctattatcaatttgttattgtgtgcctcggntgattcctggacgagggttcacacacatgtaagcgtttggaattttggatagaaattccgggcgtgacaagttggtatcagagcccccttgaccctaggttatgccaaatggttacccatagaagccctctaaaaatattggaaaagtagaactgattctcctccccttctcttttaattaaaccaaactaatngcacatgcanttcataatantnttttagtggttctcattcaaaatttattccagtgttattagtactgtacatctattactgtactaatggctcatttaccagcaaaagttttacaatattgttttatttaatcttgctgcaatgaaataaatttagcatgttgattttataactttcttttatttcttttggaacctgttgttcaaaagtacaaaatttgtgaccttgtttccaactgtttcaacttatcttgcaagcttggtttactttatttacttaccttttactttgattttctaactttattcaaattaatccaaaaacttgtgctattaattggataaatgtcttaactccctcctttcacttgtctttagatgccgcgctacaagcctgagtacttgtttggtgttgagggatttgtccaggagttgcgtacgatgtcctttgtcataggatttgggactgcccctttttatgcccagattcctcatgatcgtcacgaagagaagtgccgagtcaaagtcaccttgaacagtaatagtgaagatatcccctcagtgatgttcgaagctggaggaagaaactacatccatgcatgtcaggaggtggcaaggatcgccataggagagctccgcgatcgctacagtgatacngttggccgacactgagtatcnctactcatcctcgccaaccgacagggaagtgaccgtggcagctaccttgagactganggaattgagaatgatgctaccacaaggcatttggttgagatgctgtgggctatggatgaaacccgtgcngagactgtgttagcagctcaagatcgtgaagaccggaatcgtggtaagatttgcaagctagaggacaaggtggatcgtttggagaaggaactagccgcnttgaagggagaagcaccaccgcagaaggccagggttcgtcttaccgcaaggaagagagctctatttgtccctcgctaccaattggcgccaaaggtccgtgtggtggagaaagaagttaccccagccctagcggatcctccggtcgtcaacgtaagtgatgatgaaggagaagaatccaagcgcacccattccaagatngagtggggagccactcaagatgatgaagacgagccgaacgagccttcaatcaactccgatgcccggaagacctagaatgccttgtcaaaccgttgtcttagatcgttgtgttagtttgcttgttttaagtttggttgtgtgtgtgcgtcttgcntgtgatttacatcagtggtgggatgtaagtgcatgcgtttgtttgctttcgagtgttaggtagttggtgagtttagtggtgtgagagtcttcagttttgtaataatgaaactcacttaagatcaataaaagttaaattaattctctgtcctaagtagttttccccggtttctcttcttgtgctcctgcccatgccag

SEQ ID NO: 2247 - DNA, 2000 bp, Oryza sativa
  N_region (44)..(44): n = any nucleotide
  N_region (194)..(194): n = any nucleotide
  N_region (417)..(417): n = any nucleotide
  N_region (441)..(441): n = any nucleotide
  N_region (1549)..(1550): n = any nucleotide
  N_region (1600)..(1600): n = any nucleotide
  N_region (1854)..(1854): n = any nucleotide
gcttcaaatgtgccatacctcatctcaatgatcttttgtttggntctccaggcctttgcatagcttatggtgtacttgaatttgttctcgatgtgcctaataattgattttggttcaaagccaatgttaccaacaacactgctgtacatctcacttgccacaaaagctgaagtgatgtttcggtgatacttctncaccccttgtaagtagcacttgtgctcggtcacaatgctaactttccaataatcattccatttacccttatatgcatggacacgccacggacaatcttccttcatgcacctcacttcatacacataatttgttgacttgaccaccctaaactctctctgcaaggaaactgcccaatgcttcaccgcctccttcatctcatccttatgagcataccttgcaccntcaattacctcgttctccttatantcccagggtacatgatcaccctctgatataacaagtccagagaagtcctcatttgcccaatcagtggccattacatcaccttcctcatcggatgatgcgtcgtcgtccgcttcctcattatccgaatcttccctctccatttcatcaacaattatacggattttttccccttcatccgccatgcccatggcctgctcctcccttggttgattttcctcattttgcatcgatggtccaacaacatcccctgcattgataggaccctctacatcttcggtttgcattgaaacatttatatctttctcttgtaccgacacaaatataacgaggggccatgaccgttcaaaagccatttccacataccgtctccaagcagcagtgctgtccatcggcattagttcccaaaaataaccttctgttgcacgactcactacaactgatactgacattgtgtagacttcttggtctattctaaatcctctcaacaaccaactataaattgactgaaatgttctctccgcaggcctatcgatgcccttagatgtcattacaaaatctgacagatcaacaccatctggaccaaatctaatatttccttcaccgtgaactatctgaaatgtgaccttatttgacattgtgcctgatgaaaacaataactgcgttaacctcgcatttctgtactacgccctaagttacattctctacaatattgttctccaaaattctaaaagtaggttacattctccagatcaaactaaactacatcttacaattaacactactgtctatgtctcaattcatactattatattctatgctctggatctacacatatgtgctgtgtgctacagatatgctaaaatatatggaactaaaactaaaacgcaacatatatactcaaacataacatattagtacaaatgcaaaagatgtatgggagcaaacctgtgatgaagtgagcgaaccagcagggcttcgccgctccccttctgctgccctcccctctctctctttcgttttttttggatttttagtgaatataatgaaatttcagagaggggggactgggctttataggggggaggcaaaaatcgccctcccccagggnngcaagggggccgcctgcaaaattccatgccccctcgccgcccatttgcangcggccccccgcacagtacaaaatcgccctagcgaagggcggcaagggggccgcctgcaaatttcgttaacagccgtcgcccgaaagcgaacggccgtctgccacgtcattttcgccgccctctgggatggtgatttttaaaaatcgccctcccagagggcggtaggcgactacttccgtcaattttcaaaatggaaaactatttttgtaaaacttttaataaaaaaatttaaaattaaaaaaattcccaaaangcgcgtcccccgcggctggttggtgggccggcccagtatatacagcgtcgcgtgggctctcgcaagccgtgggctctctctctctctctagtccgcttcttccctgagttcttcgtcttccccaacctcacgcgctctagcgcgca

SEQ ID NO: 2248 - DNA, 1527 bp, Oryza sativa
  N_region (79)..(79): n = any nucleotide
  N_region (121)..(121): n = any nucleotide
  N_region (130)..(130): n = any nucleotide
  N_region (176)..(176): n = any nucleotide
  N_region (189)..(189): n = any nucleotide
  N_region (219)..(219): n = any nucleotide
  N_region (223)..(223): n = any nucleotide
  N_region (225)..(225): n = any nucleotide
  N_region (237)..(239): n = any nucleotide
  N_region (243)..(243): n = any nucleotide
  N_region (245)..(245): n = any nucleotide
  N_region (248)..(248): n = any nucleotide
  N_region (257)..(257): n = any nucleotide
  N_region (259)..(259): n = any nucleotide
  N_region (261)..(261): n = any nucleotide
  N_region (264)..(264): n = any nucleotide
  N_region (270)..(270): n = any nucleotide
  N_region (282)..(282): n = any nucleotide
  N_region (303)..(303): n = any nucleotide
  N_region (306)..(306): n = any nucleotide
  N_region (308)..(309): n = any nucleotide
  N_region (312)..(312): n = any nucleotide
  N_region (325)..(325): n = any nucleotide
  N_region (330)..(330): n = any nucleotide
  N_region (345)..(345): n = any nucleotide
  N_region (347)..(347): n = any nucleotide
  N_region (354)..(354): n = any nucleotide
  N_region (447)..(447): n = any nucleotide
  N_region (460)..(460): n = any nucleotide
agctgcctgggtggttgctggatgctgtaggctgcgagtgatagagagcaatgctccaaatctttccagtttaagcttnagcggaaatgttaaactctcacttggagacccattgcaagtnaagagattnagcatgatccatccaaaggttgtctgttatgcccgtggcgagctgncatccgcgtatgncaaatcttgagactcttgccatttactccnatgntnaggtactccaannntgangnatnaggcgtttnanantgngcgttnagagtagttgtnaagagtaggggtatattatangantnnaantgagacatgacanacatngggcaggtggtcaananggccatnctccccaatgctgcctacaaaattcctctaccttaagcacctcaccatttccgttagctcagcagcctcctttaacacgtcgtatgattattnttctcttgtttcnttccttgacgcgtctccttccttggagacattgatcttgaatgtaaggcactcttcgctcattccatcctgcaaagatatactcctctatctgatcactgatctcttggatatgtatactttatttgacttatcttttatcattatcaggtatcacaagagcatatgaagcatgaatcggttcttggagattcctcgcctttgaggcagatgccggaacaccgccattgctacctcaagagtgtgaagatgacagggttcagctccgcgaagaacttgattgagctaacatgttatatcctcaagaacgcggtgtcactcgagtgccttacattggacaccctttatgaaagggcatgtagcctagtggttacagtgacctgagtagtaccccaaggttctgagttcaaatcttctatggagcgaattttagattgggttgtttccggggctaagttccctatttcaatggccgtatatatccggttggatgtagatgccgggtaaaaaaaatacccttatctaaaaaagaaaaaaaaaacggtgttaggtgttctgaaaatttctagaaggtgttatcccatgggcaaaagtgttgtcagggaagcccatagggcggtcagggctgttacaacttacatccaggataaagttcctgatacagttaagttcactgttcagagttacttcctcgtgcttttcacgtgtttttaatggatgaaactgctaactcttaaacatatacttaatcattcgtcttgtttaaaatttaatacaaacatatgaaaatataagtcatacattaagtaatctagtgataagccaagtcacgtcataaataataattacttatttttttaaaaaaataaggagagatgatggagatgaataaaaggtgttttctatggctgaattatcctttttgggggttattcccgactcgacagtataatatcatgtaaaatctataaattctttctgtcttaataaaatttggtcggtgtacttgcgccgacccggcaaaaaatggctgaattaccagccggcagcaaggatcttctagttgga

SEQ ID NO: 2249 - DNA, 2000 bp, Oryza sativa
aatgatcgaagaaaccatcaacatcactactcacgggtaattcagtacccgttgcgtccacttttgtttggcatgcatgttgatcgtcgtgttcaaaccaacatgcacattccttcttgaaacctctcataataagatgtgactttttcatatgcatctacccatgctaccttgttcttgaaatcaatgaataggcaatgtatactctagttcattttgatatggcatatttctttgcggctgaaataaatctgtcgagctctttgaagaatatgttgccatgtctcataacttcatatatccaagatctctctatgtaaagcatctatggaaaaaaacaagaagtgacaaacgttaattcataaatgacttaaatgtgatcgcatatttctcattacatcaaataataaaacttgacaattaaattatatttctttacagtggaaggaattgatatttatcacaacaatgaacaaaactggctaaaggaaataaaacctcttgacatatgtgaagaaaactagaagtgctaactttctttctctctcctccatcctcattgatcactatatctctcttaatattaataaaaaaacagaattgtccaaacctatctaactataaagttgatgcccactaactactaaagcaaaacatgcaagtgtgccacatcattcactcggtagcaattattatctaaagtattttaaatcagatgcaagtgtaccatatcatcacttagtagcaacaggtgtactggtgcaagttgttagcatgctcgacttaaaaaagtgagctttcctcctcccatttcccgtaaaccgtagaattagcaaaaaaaattgtttatatttagttgaatgtagtgcaactataaactcccaatctactaaatgtgtctatagattattgtattaataatgagcttaaattgttatgattattttaagaaacacagtatgaacacatgcgcccacaatgtacgcacactcacccgcgcccacaatgtacgcacactcaccctacgcctatgagcaccggatgttctacactgaactagcatatcttcagattgacaaagtcaccacgagcgcctcgttgtcgcctatcattaaaagaataattagccgtaaatgcgagaacttgtgtcaaatctaagatttgaacccggattaagctgattccaccataagaaacctaaccagttggacatgcccaacatcttttagataggtgcaaagctgatagtcacattagtatatcacacatatatatactcatcactaatatatataactttgaacgatgtaaaatcatatgaatctttattaaaagatgaggtttatttgtaaaccatttttatttatagtgtgattataaaattttatgcacgacattactacatttcctcattttattctttaatttgttgttggatattttttaaatataagtcaatgatctatttgtaaatattttttcccaaagaaaagttacgtacatagaataaaagggtctatttataaaatagttttttttaattgaaggtatacagtgtaaaattatatccacaactttactatctttttctttgtaggccgaggaagcttctaaataaagaattactactttctctatccaatggctcatatttcttctgacaattttgtcttcatatgaatccaaaggctattattttattaattatgaggtttatcctagttgatttttagattcacttatagatatgtgcaagatttgaaggttgtgaacatgcactaaaggcgaggaagatgtcgactgctctgattttattatagtcataccccaatccagatattaaaaatgttatacatactgtttggagctttaacttatctggtgatctggtcgtaacaaggacccaaagccaaggctacaagccaaattatcacacatacaaaagggttggaagcagcttagctctccttactcccagcagagcaaacaccactccatgt

SEQ ID NO: 2250 - DNA, 1722 bp, Oryza sativa
  N_region (22)..(22): n = any nucleotide
  N_region (1066)..(1066): n = any nucleotide
ttccataaaatacttgcggcantttttagatagtcccttaaattgattgtggagggtaaaacacatgctctatatatcgttatcaatagtgacgggtctggttaaccagcgcgtgcaattagttgaccggtattttgcacgtgcatatactctacatattatacgaatatataggaggtcgtgtacgtctttaacaagccacgcagtgttaaaaaagaaaaaacaaagccacgcagtgttgtttcagcagagagagagagagagagagagagatgcgttcttccagaggtgtcattcgccattccgtgtggtgtctggtgtttgtatggtcatggcgggttgcaacagctcaggatcaacaagcaccaaaaactgatccagtcgaaggtaagcaagccagcaatcatgtacggtgtgtattgacgcaccacgtatgtctatcttctttcgttttttgacatttacatatttaagatgtgaaatttaataaattatcatctatagtcgatgacatgtgagcactcatatatcaataacctaaaagtgacgaatagttaaatgtctcttggttttcctccatgcgtatagttagattgcaggagtagtaatttgtggttgtgctcgatatatgatgtccctcgcactactacagaacacctgttagagcacctgttagagcatccccagtagatactctctcccgtcctccttacatgaaatagcgtatggtgggagaaaatccacctctgtagcggatacgccgtttgggcatccaaagatagctcatgcgctatcccgaagagagaaacgccggatatggtctttctctctcctcacgcaattccacaaatggtgctcccaccctcatcagatcgagctatggaggggtgaaggaatgaatgtagagaagagagagaggatgcgctagtggccaccttagtcggccggtcctgagcgtcgccccatgatcatatgagccggccactcccgacatcggtcacatgcgcctgccctgcacccaccgtcggccaaagcgccacgcgcccacatatccgactctgccctnccccctccttctatagactcctctaagtaggcagacgcccgtggcatctcccctgccgtcctcactgctcctgcgcttgtgacttctccccccgccacccgtgccgaccctccgcacgcctgctcgcgccgctcctccgcccatgccgccaagccacttctctccccatcgcgcgccctgttactcccacccattgaactacccgtcggtggtcagccctcctcgtatgtccttcccatcctctcaggctctcagcattggatatagaagagagagaaaggtgaggaagtttttttagaggttgaattatcaaatttctcaacagttcttctcatacattgtctatttttgatttttgggagtgttgaaaggtagttgaaagatattagtaaaatataggtttttggtacatggagaatgtaatatgaatgatctattggaatcaaaaggaaaatggagtaggaaacatttttgaatggccatccaaatgggaatatggaggatgaaatttggataagctggggatgctattagggaatgatacatgtataggtgccggtttctattgagaaagagttagaggaatttgatttcattaatgacctagctatcatccatatgattattagtggtgagttaattagtaaacatcatcc

SEQ ID NO: 2251 - DNA, 2000 bp, Oryza sativa
  N_region (329)..(329): n = any nucleotide
  N_region (344)..(344): n = any nucleotide
aaagctcacgcagacttgctaaatggcgagctgctctttttctgccttgcatgttcttattacatagtagtcctataagattttataacattaatggaaatatatgtgcttgatcgcatctctgcaaaacattagatggaaaacttctgctgtctgcaaaaacattagatgaaaaacttctgccctgatgctgcagtagtacaagcgctattgcaaatcgtcagcgctataaagatgatcagattcccctctcgacgtcaatcagctggtccagccggcatgagcaatggccatgtcaggcgatcaacagttgaattaacccaaatttnacccccccccccccnttgaactgttctgtctgcacgctaaacgatagagagtttgtaataaaccatgatgcgttttccaggcaatcactcgactctaaatgaattaagtctgcatcccagctagagccatgcattagaggcaaacattctggtttgcactccactgcatacagacgatcatcatatcgatcctcttcttcaatcaatgccgtgcccatttctcgcgcattgccttttcagagtttcagttcctaggacggagcaattctggacacaggcttggacgtaaaacctctactcagatccgtccgagaaaacgttcgctttcagatgatctggtggcgaggccatatcgtctttccgaaacggtgcaatggcagcggagcggatgggcttaactcaccttcctattgcagactagacacaggttagctcatactacatactactagctacgtactaatggcgtcgatctacttcagtaggcaattgaagttttttgcctactgctactgatgcatggctaattaaacaccggtgccagtgccaaatcaccgcagcacgtactgtgcgttccactgttcaggacttaatttgatcgatactactagcatgcatatctaagtatatacccatcgtagctagccgtagaatagtaacagcagcatctatctgcaacccaacgtaggccatggaaatacgaaatcaaacaaaagcaaagcatcgattaagtctcgttgagagccatgccatcgatcaagctagtacagtaaataagcaactggcaggtgcctataattttatgccgtgatgtgacatactgacattcacagcaagttctaaagtctgaaggatgtgatggtgcaagtgaagacagtgggaatcgtctgaagtatattgtatctacattagctatcgctgacacgtgggatcgggttcacctgttagccaatactactgtaagtataataccgtagaggatccgtgtccgaagtagcgaagctaattttgctttacagtttacagtgatggtggtaaaaagaacacggtgaattcttggggaagacgcacatgcggctgtgtttcgatcgaatgattcccctcacctcacagcggtggtccttctgtactactgttgcgattgggcaccgggaacagcggaataaatggcaaaagccatccctgcgctcaggccttgcaattgcaggttggcggaattttacagagtgttccattagtctctctaccccgtacatcatcatcacccttcactgccagtactgttcctttttctcagcctcccgtacaatgttcgcagcagtaagctgttgatctggtgggtagtaagttggactaggacttgatggcgtgataaacagtactggattagtacgtgattaaggatggcgagatcagagattcagaaaatggattggagacttccgtttgtcctccttggaaactgacaaacatttttccaggagagcaaaagctttactgagaaatgggaacgctaggaatagagtacctaccacaaacgagcaaccagctaatttcagagatcactttagccgcgactcgtagcaacacatacagggcccaacaaacagcaaattaaatctgggacgatcgcctgcacaatctgcagggggagagatccacaaatcggcc

SEQ ID NO: 2252 - DNA, 548 bp, Oryza sativa
  N_region (9)..(9): n = any nucleotide
gggggtttnacccccccccccccccctgtgactctgaagctgcctctcatctcctctccaatctccatccacatcgcatccatcataaatcccccacacccttctccccaaccaagcacctaccaccattcccaatccccctcttccaatcgccatatgcaagagccccaaatccgctattgcatttgtttcatttcatcggctgccgctcctgagaaacagcaatctggataggataggtggtcgcctgtatttagatccggacttttgctagtggggggagagaggatttaggtgaacgagcatcttgattttgaccaatctttgcctgtctcactgattgaccctcctcctgtgtgcttggttctttaaatcccgcgtggtgggtgtggggaagaggagaggagggaggcaaaggcacgagcaagaacagctgcttccgtcttcttgctcgctggtattcaaaaggtgagctgttgttcttgccatgttctttatcagagatttttgatgtatgtgggagcagattcttgagctccttgaagtga

SEQ ID NO: 2253 - DNA, 2000 bp, Oryza sativa
tggatgcgtgttagatcggttgctttaccgcgaacatttgtgaggtgagtatttctggtggagagctgcatcaaaatgctgcctgcccgtttctgacactccggtaggtttctgaacttccctggtctgcctgccctccttgttgtctgttgcaatgggtgaaacgagcaggatgactttggatggcggcatgcatgcatgatagagcaaacgacaactaggggtttatcttccctcttatgtattgatcaatctggttttggcataattgtctcagtactgaccttatagtggataacggtaagttgtaaatatagttgaaaccgctatacgaattcaggcaactttgacgtgaaatgtggattcaagtcaagtttgctactccctccattgaattacttgtcatcttgggccaaacacacaggctagggtgatgttcaattgtgttacttgagactgtcttacccctaattaatatactttaatttctactgagctgtccacattactatgctagtccagcttgttcaatttcatcacaagtagacatggtgcgtggctgaacaggattgtgctagtggtcgtgttacagccaagccaagctctagacgaaatatgctagtggttagaaataaatgagttcattggagcaatatacctactacttttattaggggtaatttgggaacataatacctacaaaacataaaaagctattcaaaaacaaaaccaataccctaaaacatcatctaaataaggatggaggggggtacatctcatgcttggcacccaagaaacttgatactccctccgttccatattataaatcgctttgacttttttcctaatcaaacttctttacatctgaccaagtttataggaaaatgtagcagcatctacaacaccaaattagtttattaaatgtaacattgaatatattttgataatatgtttgcttttgtgttggaaatgttgctatatttttctacaaacttggtcaaactttaaaaaagtttgacaaaggaaaaagtcaaagcgacttataatatgaaatggaaggagtatttaatactccctccatctacttttgatagtcatatttcatcttggcacacagaccaaggataagtaattctacttatcatctatttaaacatgctactagtcattcctcgtaaacaagcgattcattaatatttacattttttgatacccatgcagcccaatcttgtgtggaagaatggagagtcatgcattaaatccgagaaagttattaagatgataggttgttggataaattttcagatttggaaatatgactatcaaaagtagatggagggagtaattttgtgggagaaatagttttttttttagtctgactatatgatttggatgtacatcactgccaattaataagatggtaccatatgcatatgttctatctggtaccagtgaaacttttttaatgcttgaggaaatgtttcatctcaacatgggggaaggtccgatcttttgagttgcatgcactagctagttgaactaaaagcttaatctgatggagtagggcaccaggcaatttactctttacttcaacactccccctcatgtctagattcgaaatcaagacctttggccttgataccatgctatgaattgcgcttgtattcattacagcccaatggtgcagtatatataaatatggtgtatacacaataaaacccctaatcccccaatacaaagaggaaaacacaagtactaattatgttaaatacaatccaggtgccatagacaatggggaatgacagtccaatttagctcttgggtaggtgtatgctatttttgatttatgttgtttgtgaaaagagtaaaaaaaaaacagtttcatattagatccctctctgtgcttaatgttttaccaagccttgctttctccaagttttcttctatcaagtacacactaagattcttctttcttgtgcaggatttttgatacatttgag

SEQ ID NO: 2254 - DNA, 2000 bp, Oryza sativa
  N_region (1775)..(1775): n = any nucleotide
  N_region (1793)..(1793): n = any nucleotide
  N_region (1914)..(1914): n = any nucleotide
ccaaatagggtctcgcaagggaggttgaggccttagcaagaagaaccagccatacgttgtatttctagcactggagccaatgagggttggagtagaaacaaatggctgggacaacttattcttgggaagacttagatactattataagaagacattggagtagtacctggtaggctttgagtataaaggaaacttcagagcgaaaaccgatgatttctctcaaccttcatagcgaaaacttcatagaaaacttcagagcaacgggatgggggtggttcccttgatctttacaatactactagactagctcgagataccgctggccatcacccttgcctcgttgctagcacatgatgcatctccaacagtgctagtgcacgctaggcgctacattagccagctcgacggctcgcctagtgttctgcccgttggttatagcccttatcatgctcattactgccatcccaccgcttgcctacgatggctctgccgcttcagttatccatcgcttggtcgcataacgagcgggggagtgaggagggagccaactagagtcacttagcagcccaacaacataagaaaaagcccaatgagcctaaggccacgttctaaacagctagttaagcttagctattcatcattttccgttaacatgcttttcaaactactaaacagtttatttcgtgcgaaaactttctatataaaagatgctttaaaaaaatcaaataaattcatttttcaaatttgtaataattaatacttaattaatcatatgctaatcgtatttctcgttttatgtgtagctaatcatccaaacccaatagccgaaaagaacgcggcctaaaaacttaattaactcatgtcacaaactccaaagtccatatccattactcggtgtcctttgctatcaggttaagggcagggcaggggcggagctagaataaaatgaagagggtttcactcgcttgctttactctggtttgaattaaatttagcttgatacaagtgcctaagtttaaactgacaagaaatatatatggtgaaaatagataaattatagctaaaatttttttaaaccggattcctgacaccccgtagctatacatagctccgccgctggggcaggggatgagggaaggacggatcgtacaatcatcgagagcgagatatggcttacacaatccttcgtcctaccaaacgcatcgatcctgcatgtagcacgatgaacaaatcaacccaaataacgtaccgtcgattttactagactcgtgttatcgttgccacatgaccaagccccaccaacaccacatcccccgttgtcatttctaattccagcctttcgaaaagaaaactaacaaaatcgtgtgcaaaaactcgaaacaaacaggccggcggccccatgattgcagccagcaaggaacctttgaactcacactatcgagcaacgacacctcagatcccctcttgtcctcctcccccaacggcaccaaccggtcggttcacttcactagcgcaaagtagttcatttcaacccacccaccaaaaaccaaaaaaaccatttcaattttcaaatttcctcctcctcctcctcaaacccccaccacccagcccagccatccccaaaccctaaatccgccgcccgccgccgccctcgccgttgcgccattccggctgcgatggggttcgtggatccggcggcgccgctgctggccacgtgcggcggcgacaccgtcaagctgttcgacgtcacggtcgagtccggcgacccctgcgtnctcgcctaaaaccccggngccggcacaccccgtcaacgccgtccgctggaaccacaccagtgagtacccccagcctcgcctcgccggctccaccgcgtgcccgctcgtcccgcctccggctctcctttcccctcccccntccccttcccagatctcccgagttgggtttacttttggcgtcgttcgcgcgaggatctctcggtgggcagccggagcctcccggcc

SEQ ID NO: 2255 - DNA, 2000 bp, Oryza sativa
tattaaaaaataatatatgcatactcatatgaaagtatttttcaagacaaatctattcatataatttttacattttcaaactcaacaacttgagagttattcatgatttatatttctaaggtttgacttaaacattgtcctaaacgagtacggaggaagtacaaatttactcaaatgtgcgtgcgtacgtagttagtattacctccgttcagaaacaaatgtcggtttttactttgaattaccaatctctcaccaactgtatttttataaaataatctgattatagtatcaaaattgtatcattagtttgtaatcataaccactttactaatagttaaagtttactactgcttgatcagatcaaaactaacaaagatcaaagaagtacaaaagtgatacggagtgctatataaaatgcgcaaacaaacttatcgtgtgccttatgcgacaactcggagacgtaatgcgatcgatacaccttccctaggaatgagctgaggttgacaaggcatcctcactctctcttctctataatatttttaaaatcctgattaggtgtccagttagaatcattaacctaatactacgaaagagctgaaagtagtgtgaatcttagaattctgggccttttggaattgtgtttagctagccatatctcgaatcatagaaagcgactgaactatttagctaacaccgacaggcagacaactgaagaatggtgtccagatagctaccagaacaatagcatttttttttgtcataacccagatgagtttggttaagctaacggattaatttttggtacggttgatacgcatgcagtgatgtagatgatgcgtgtgctctgagaattcttgatacatcagcaaaagttctcccgctgttaaatggaatagtagtatttgttggtgtgtatatgttcaggttcttgtttctgaataaggtaaacaatgacatgtttttgtcatgaaatcagaaaagatagtactgctgattgaaccccacgcgtgtagcgtgcttattttccaacgaggaacaaattgagaaatgttggagataaaaggttagaacagttaggggttggtaagtttgcttttttcccaactacctcttgttccatcttccatacatgatgcatgcttcaccgccaatatgtcaatcttctgatagcagctcgcattttcatttataacaaacttgtttaactatgaaaaaattaagtagctaagaatgtaagcacagattcataaccttattcagttctgttgtctgatctgaaaattcagactacaaaatgaccagaaaaaccaaagatcagcattatattcggatcgcataaatgctgagaattaaggtagataaaccaaaacataacatatactatagattgctcatccttccccaccatgtgtcattaagaggactcatcatcactgacatcagatgaacttgttggtcaagtctcccccagatgattatttatctccgatgttcgtggccctgataaccaattaagttttaacctacaggtatgttttcttaatgctggtgctactaattaaccatctttgagcatttaagggtgccattaatttgaaaaatacaactaggtaagctagcttggtggtgtattaagacatgttcatatgctattatactataaacatcattaatgggtatgtagacagctctgtttaagaaacattacggtagtgggctttattttgcagggtcaaggcatatccatctatgttcatgggatattcctagtatagaagcatccattttagtcaacggtgtgtataaatacggcatgtctcccgtacgtgattcatgttggcgacctcttctcgctcgcaactaattaatcaattatccgcggttttaaattaatttgcgtcctagtacttactactcagagattcagagtctagcttgttaataactgaacaacctagttgatgcgtttggtaactaactagctagcagggttaggagga

SEQ ID NO: 2256 - DNA, 2000 bp, Oryza sativa
  N_region (1723)..(1723): n = any nucleotide
  N_region (1843)..(1843): n = any nucleotide
  N_region (1856)..(1856): n = any nucleotide
cattacttgccaacaaaaattatcacaccttgactaaggtgaggtgatcaaattgttagccacaacttactaagcctaagggaatcttgccacacttttttgagccattgacacgtgggacccaatttgttggaggggaatcttgtcacaactgtggctacaaccaaacacctgtcaaatttgcctaaccttaggcgtgacaaactatggcaaagtgtggcttgcaaccaaacacaccctttctctagagttaggcaatgcaataccctttctctagagttcatcagaccagtcaaagatgcttagtttcagaccgcggaccaacgtcccggccatatcggcccaattttgtctccggatcgaccaaatcaagcaaggcccagatgaaagaaaaggatcggggatgttgagcccgtttcaatttacccagcctattagctagccaataatgagtttcccttttatccttatgaaaactactcactccgtcctaaatatttaacgccgttgagtttttaaatatatttgaccgtttattttattcaaaaatttttgcgaaatatgtaaaactatatgtatatataaaagtatatttaacaatgaatcaaatgataggaaaataattaataattacttaattttttttaataagacgaacggtcaaatatgtttaaaaaagtcaacggcgtcaaacatttagggacgaagggagtattatgccggtgtagctatggaagacaaattttgagccattctttctaagaaaaaactgcataccattatagtatgggtgtttcgctatagagaaaaaaacagaaagactgggtggcattttctgaactaaaaaaattgggtgccgtatctaaaaccgggcgacctcttttcgtgtggcatattattatattttaccggagaaagaacattataaatcctcctttaggaactgatgaaatttgtgtaatttccacaagaattaaattaattcctgtaagaaatacggtatcttgtactaccttgtatcttgtactacctttgtttttaatagataacgccgttaactttttctcacatgtttgaccattcgtcttatttaaaaaatttaggtaattataatttattttgttatgagttgttttattactcatagtattttaagtgtgatttatatcttatacaattgcataaaatttttgaataaaacgaatggttaaacatgtgagaaaaagttaacggcgtcatctattaaaaaacggaggagggagtacgtagttgtaccactagaattgatgctttgagaaaagacgtacttgacgacggagaaaccatgtgctctaattacgcattaaccaccatacggagtcggaccaacggttgtagtactgtagaacggcggtttactattattgcgtgccatcaacagcccacaggccaactccccgagcccaatttaaccgcacgggcccacctggttgtgacccgacagagaaacgccgggcccacgggcagtctcgttaaaaaccgctttgcttttttccttttcttgctctcgccgtcaccctcacccacatcacaagagcgcttcgcttcttctcctcttccgcatcgcatctcatctccttcctccaacccaacccaacccaccgtactagtattgactttggtttattttgccctcccttccattgattctactcctactcctactactttttttttggttttngtgttttggtttgcttctactagactactactactccactcgtctttgcttgccttttgtcacccactgtttaacctcaattctcgtgctctgggaaagagtctactactaggttaaatnagttttaaatttncctttctccccaaaattggaattggtttcggtttttttttgggggaagcaattcggccaattggcttggcggatttcgatttggtgatagggttccatggttgctgcggcctgattcgaattcctgcttgtttttcgtgtgtag

SEQ ID NO: 2257 - DNA, 2000 bp, Oryza sativa
  N_region (1705)..(1705): n = any nucleotide
  N_region (1748)..(1748): n = any nucleotide
cttatagtaaacttaatagccaattcatacaatagttacctataaaaatatattacactattaatatatggtcccacatgtcatacatacattatgccttggagttcgtggtacagttggctacaaatctgtagcccgctgctcctttgtcttctctttttatctcctcaatatgtgtttatagctggcttacattatgctattgtacctgctctaagcagcttatgtaagtaaagcgataaacatttataaatacccggctctaatttaaatcctaactccacgtaaaattgcgcgggaaattaagtagtaatttctcacaagacataagaaaataatagcatgatgatatatagggctggatggaaaagtttggtgactcttagctcaggcggctcgttatgtttctgaaacgagccaagcttgctattttagctgttttgacataacgagctaggctgatacactcatacacacgagtccccagactgtcagtaagcaaagatacaggagcaaaagaaaacgtctgatgaatggtccataggaagagaggagaggagaggagcgaggaggaggctgtatccagtagaggacagcttttgccatttagagcccatcactgccaacaaaatccttcccttcagcttctcttctagtcttctcttcaccttcttctcatcctcttcttctcctcctcggtcaaaccgccttttcttctctcccctatcctccgctccgagggagaaaaaaaaccaagaaagaaagaaagaaagaaaaagagtactagtagcacccggagagttgaggaaagggagtaggcggagccaaatctcgtttctctttagttgttgttagtacccttagtggaagaatctctccccttttcttgtgtttcttgggttttgaagttttttgttgttgggaggtatgaggaatgaaggcctaacctgaggcaagatcttcgttttccttcatttgtgggggtgtttgttggtggaaacggatcaagaaaagccggaatttcggttctgaaatcgtcggttttgatatcggtttctctctgttgattggagagagagggagagagcaaacgcatgatctgtgtctgattctgacgggccttgtcgcggtccgtatcagttcatccatcccaacttgctgttcgttttgtgtggtggtgtttcgcttttttgggaagagaggagaggaagcaatcattcggcggcgacggccccgcccacttgaggtaccagttggaaatttccccccttttctttgtgcttttgtttttgctggtttgtgcttatctcttactacttgaggtacatctttttgaccaggtttttttttgtggtaacggcgatttttggggataaagtttgcatcttaggtcgggattttttcttgtttcagtggtggaatgtctccattttgagcgaaattgcgtcttttgtgggttcatgtttggggatttgggggaaatcgtgcggcctggtttgctgtggtggggaatttttttcttgtttcagttgattggtttctccatttcatatcaaaccgtgtcttttgagtttctcgtgcatatatggagaggatatccatggttatctagaaaaaaaatgcaaagttttcaacttgctctgtaatggactcttccaacgttttgcattcatttcttgagctcctcaccttggttttcttcatnattgtgttcaaacctactctgatcttggttctgaacttctgangtttgtctggttactggtcatgtaggattgatggctttgtggtctggtctcttgctaacttcttgtgcttctgtgattctgataagcttttcttcgtgttttgtgtagagataacagtttttttctcttatcaattatgctatgagatattccatgtttaatcaggactaactaatgctgtattacctgatactcgtttcagttaaacttgattgctctgtcgcatggccagcagtagcgaccatggatccc

SEQ ID NO: 2258 - DNA, 2000 bp, Oryza sativa
  N_region (406)..(406): n = any nucleotide
  N_region (428)..(428): n = any nucleotide
  N_region (430)..(430): n = any nucleotide
  N_region (501)..(501): n = any nucleotide
tcttttaatatttctattttttatttttaattttagttgtttcaaaattgtattcctacttgaactctcttttaatttttctaattttggatattatttttgttattctgaattttaattaatctcgtattgggttcttatatggattcttctttcaatattgcttatttttaattccgaatttcagctaattttaaattgtattcctaactcttcttttgttcttttgctaattttggattttttttattttgaattttgaattttaattaatcttgtattgggtttttatatggactcttcttttaatattcctaatttttgattccgaatttaagctatttttaaattgtatttctacttggactctccttttcttttctaatatttaatttatgttatttgnaattgattatctcgtatgggtncntatatggaaacttctttcaatatgctaattttaattccgaatttaagctatttttaaatgtatttctactnggactctcttttccctttttttttctttttctccgattaatgtaggaatttctagccccacagcgaatgtggtgcctccttttaaagctgttttaataatataatagatagaaatgggacatgcaacattttgaatccctgcacggtcttttaatgctaaaagggcataaactatgctattttcgtgttgccaaacattgtccaggcattccttgtggctgtggtgccaactgttaaaagttttaagatatcttcatcagcatctaatgcaggatgcttagttctaactacattgttctgagagaagcaactactatttatattcttaagcaacatctttgacatgttaaagctgtcaaggtccattatatgctgatggtgtcaactgtgcttctgatccaagagaagattcgggaaggctagctacaaaccgctgtggaatcaaatgaattgagttctgttctgtcaacactgcttattaattactggaaaaacagtgcaaaaccaccttgaaatcataaggcgtgatcttatggcaatctgaagtcattgtcgtatttttctaagataataaaagctttattaaactatattaaaactacattgagatgatacaattaccgtatacatgcaaacacgattgattattcaacaaattgagcctaatacctcctcctatacgctataattggcatgtgtcacgtatccagtttggtatggcagttgagagctgtggaaggagtgatcggcatgttcaccagctctgattggtagtacgattttacgacacgttgatcagccagcgacgccgagaaaaccggttgatcgaaagagatagcagcggagacatcgccgatgggccgtgagttgggccgtgagatcagatggtagcgcggcccacaacgattctaccgagagcgagctgtaataataacttctacccgtagagtaggcaggcagccaccgggtaaattttgtagagtcgtcagtcgtcgcctcatcgggacagcctttttaccgtttccggcgtgcgcgctgacgtggcgcgctgtcttcccgcaccgcagcgacaaaacctcgccgcgtgcttcccgtttccattctctctctctctctctctccccgaccgcttcccgaatttttctgcctattctttctttgtttcttcttccccctttcgccttccccctctttcctgattccccacctcctccctcgccgccgccgccgccgctgactcccaccgcgaccgcctcccccgccggcgcggtttcggaggaggcccggcgcctgcaggaggaggagggagggagggaaggagggcctggcccgcctccgccgccgctgcctcgtgcggttcccgacgccggccgtactgcgcagcgctcgcccacgccgcgcgcgccgcggtggggcatggtggtgaggtgggagggagggagctgggggtgttgaggcggagggggaggaggaggaggaggaggtgtggttagtgcgac

SEQ ID NO: 2259 - DNA, 2000 bp, Oryza sativa
  N_region (247)..(247): n = any nucleotide
  N_region (280)..(280): n = any nucleotide
  N_region (364)..(364): n = any nucleotide
  N_region (410)..(410): n = any nucleotide
  N_region (862)..(862): n = any nucleotide
  N_region (875)..(875): n = any nucleotide
  N_region (879)..(879): n = any nucleotide
  N_region (881)..(881): n = any nucleotide
  N_region (951)..(951): n = any nucleotide
tcaaaccttgggaatataaatcatgaataactctcaagttgttgagtttaaaaatgtaaaaattatatatatagatttgtcttgaaaaatactttcataaaagtatacatatatcacttttcaataaatatttttatagaaataagaagtgaaagttgtgttttggagaccgtgtcactgtcctaaacgacttcctttacgagtatggagggagtactagatatctctttctgtgtaattaataatngatcgatctgacctactgttacgcttcgcaacnacgttcgcatatcttatggagtactagttttgcatgatgtatatctgaaatacaacactatgcaattcctagttattatatcgntgtcatatcggtgggtgtaactaaccaaactagaagtctacaagcntactgctaaactataaatgatcagtacactttggtgctttaggttgataattaataacgcttgtcttatcatgttcgatcaataattttcatcgtaagatcctaatgatatcttctgatcagtgtagtgtatatatactataaaatgggcaagataatgcatcttgctaagagctaatccactcatcaatgtcatagtaaaatacgacgcgttaggttgccagtcatattttgtcatagtttactatgtccaagattatataggtttcactaacttagcaactactccattcgtttcatcttatcaatcgttttgacattttatcaaatctatctataaaaataattagcaataatactaaattagtttcattaaatataacattgaatgtattttgatatacatcgttctcacgattgtcatcaatcataatacaatgagcaagataatancaccatctgctancatntncatggacaagatctccttctcagctacaacatctccttctcgctttgagtgatttcgtactaagttgatnaactggacgaaaggggagccctcaatgctccacacgccaccatcttgaagtccaagcaaatctacgagtacttgcatgaagaccgccaagacgaccaaaattggaaaataatttggaaaagtaaatctcctccgaagattcagttcttcatttggttattatccaaagaacgcctccccacaaagcagaacctgtaaaaaaagaaaattgtttcgtccgcgaactgcgatcttttggtgttttagaagaaactgcttttcatttctgtgttgattgttcttttgctcaggcgttctggtcgaccattcagattgtcccaggactgacaagctcagccaatctcgcaagtttaggccgcctagatggcattcccatcaagcacttcagagtcttcttctttctctgcttttgggttctgtggaaccacaggcatgatgttgttttcagggggctgcaaacatccttgcgtagactagtaactaaatgtatagatgatgcaactctttgagcagagcgtttcaattcggatgataggggcattgtttcctcgtggaaggaaacactagcgtctgcttttcaaaactctgtaatttaacatgtaactgcaagtcttccttcattttataaaattcaggtggggaaactcccccgctcccccctgaactttctaaaaaaaaattatacaatggacaagataataccctccgctaagagctaaatccatatgtcacggtaaatttaaccctccgaagcattaacaacttttttcaatctcaagttgagcatcacgtgcattaaagaaacaaaaagagataaaattaatctacataactagagatgctattgttcaacgaaatcttcaatgatctaaaaaagatgctaacacctagacataataacaagttaatactaattaatgtcaacttgaatactttattattacttccggactactctcctctccgagatagtactatatatttgcacttcatgctcccagtggatcaaaaaaaatacattggtcattggtgttctgctggattcattct

SEQ ID NO: 2260 - DNA, 2000 bp, Oryza sativa
  N_region (298)..(298): n = any nucleotide
tttcataggttgattatggcgcattggcacctagttgagccgtgaaggattaattacggggtgtgtggatacatatttagctgccacaaccactcgcctctcttggctcgactctagtcataatgggcattgtcgaagggcaaaacctatcttccttattttgctatgagggaaagcacatttaccggtgtaacacacagccatagtattggtacttttctccataaatctatctcaagttcatagatctggctgatcaacaaaggcatttttcctactttagctttggtgggtctanttttttcaaacgacatatctcatcctaccaccgagtagactaactcactgcttttcttagaagatttctcaatttttttctacattcgaagctgatggtaatcaagcagtattagctatgcggacaacccctgattccctaatgaaatcattctacgagaagcttcatagatgtgttaggtgggttgtaggacagtaagggagtaagctatcaaaatgatatatgatatgttcaagttgtcttagtttttttttctttgctgttcttttctttattagttatggtaatatattaatataggtgtagaggccgaatgtaatttatcttcttgataaagtatatgtattctaaatatatacatgacatatatatatacaccttggtttgtccacctcaaccaaaataggatgtaaacaaaagtattagaagcgagtaaaacagaagatatcgtgcacgggaagtccataagaaggtcaaaagatcaatgcatatcatatggcactagtactacccaaatataatcccaagctacctcgctagatgcaggatatgagaaacaacattatgggtgtctatcttgatagggatggatatatatagaaaatgccagtttatgagtgtaactaacttaaatggagtgatattgctttaaggcttctttgaaatgcatgatttcaaaaaacacatggataaaaaaaatacagaatgttgagtatgttgaatcccattggatctataatcatatgatttctcaaaacatgtgtttacatggctcaaaggaaaatatatgatttttgagattatgtattacttagattaagattaaaagaagacagaaatggagatgttgctttggaattctcttaaaatatgggttggagctcatgtttaaagttctttagaattggggtatatgaataaattgcaaaggaattttgcaagcccaaatcccacaaaccaagcaacctccttatgatttttttttcctaagaatctaatccttcaatccaaagaaacataaatattatcataacatctttggttgtatatagaatatatgataaaatcatgaaaaccagattaaagaaaatctataaatcgtttggaggatgttatgaaaatgagattctgtggtacgaagatagtgtagcgagttatgataatttgaacgtattgtactatagggactactcgaaaacattggctacaacagcatagcctacagccatgtagcttggctatcttcaaggcaaccatccagactggctacagtagtataagtgtagcagcattgttgtacaatctaatagttgtttaagattatcatatatatatatatatatgacaatcactatttatatatatgatatctattttcagtatctacgtaagttagatctttctatgatacacgatgagccgtttgtttttgggatccttggaacttgtattgtgtgatgtccactggagtatagctgggtggggtagtaacccattcggaaaaccccactaatccagtccccaactcccaagccgcggccaagccatttttcaccgttcaccgtggattcgagttgactcgcagcgtgccgcgtccgagtccaaagccaaactgtcatccatccgcatcacctcaccggtataaaggcgcgcccctcccctcgccgccccgcgtcggatgccgccgccgcgaccgcgaccg

SEQ ID NO: 2261 - DNA, 2000 bp, Oryza sativa
  N_region (1185)..(1185): n = any nucleotide
  N_region (1190)..(1190): n = any nucleotide
  N_region (1198)..(1198): n = any nucleotide
  N_region (1353)..(1353): n = any nucleotide
  N_region (1373)..(1373): n = any nucleotide
  N_region (1383)..(1383): n = any nucleotide
caaaatttaccgcgtttaagaggcgttgcttaacatacttgtgtgtattttctgagttctgaattgattctgcttgtttaggttccagtgttcttgaacaatgccagctatgttagtttttactccctccgtcccaaaatagttgtcattttaggattcaaattttgtccgaaaaagcttgccactttagtgtaacttttattgcatcaatcacctccgattcaaaattttctctattctacccccaattatcctcttactcccaaccttatatcatttaatattgggcactatagtcatttttgctaaaccttagtttttgctaaacaacttaaatgacaactattgtgggacggagggagtattttctagcaatgaacagtcaagtattgactattctttatattggtgtgattttttttattaatgttgaaatgcaaatatagtgataaatggaagtcatgttaaaactaaacatatacaagttgtattaatagaaactcatatccattttttgtgtagtaatagtatcatagtatttagctctgtttcctataaatacattgttataaatcttattcgtgttcattttgtttttactagcactgagatgagatgaattttctgcttgtgtgtaggaggtaggaacacttgttcatatgtcccatgattttgctggcagtcttgaatttctcaaaagtgctttattctgataccacactaccactcaccttattagaccgtggccgttggaaactttgacatcattggtgcatcttattttttcgactatgttataaatcacaaatttatgttattgctgagttgcttatattatccaatacaaaaaatgtttacagccatgcacttctttatttctatatccgcggcaagacaaagcatttaggtggaataaaatccaactagaaaagtaattgttgttaatgtcttttacaaacattccatcatcacaactttattttttcatgtgcaaaatctgctaccttttatttgctggggttattgcgagtatcaatataggtacatgaaattatctaattacttctttgttcttgtactcactttaatttgtttcctaattagaaatccttttggctatcttattagatttaaatcttagccatagagatgacccccccccttcccaacacacacacacacaanttcanaacttctngttcattttaatcctattattttatcggtcatataatttcaagagagtattaaaaggcagatatgattttcctggatagtggacagtctggtacctccgtttaaccttatttcatataatcaacattgcactacatactctacttgatttatganacttgcaatggattgaaaanttcttttagngtaacagtaccaaatttgcataatagtagcttactcaattttcagttattcatgtaatgttcatatttctggtttactattctggaaactggattttgtatacttctgattattaactgctaaatactagctttgaatgatatatcctaccttttggcaaatttttgactatttttcaaggctttcccctttcgcctggatgactttctgacaatatttacatgtctattggcagctgcggatcttgtggataccctctgaacctttcatcttctaaccgaagcacatctgacgtaggatcctcataccaaaagtctgtgaagaaaggtctgatttcattcattactgttgatctgagccgatttactcaggtagacgagatatcttgctttcccctcacctggcgtagctatcggccaaaaactaagcttctctgccgaaagtgtggggcatctattggctatgggtatggtgaaccagctgttctgtgcagctttgatccagccagttcatcatctagtacatcccaaaagtatttaataaaaatccaggctctccagccttcggatagtactcagtagtctgtcaacttcagccaaaatttggaaagagaggaa

SEQ ID NO: 2262 - DNA, 2000 bp, Oryza sativa
cggtcttgagccgagccgggtcgccaccgcccgtccgatcggccccgagggcgatctgggccgtcggtcccgtggaccggcggtggaccacccgcgtggtcccggtccacggtgaaccgccccccctgagccactgccgagtgggcccgcgtgccggcgccccttttcctccctctcccgagccgctggccagtggggcccgcatgtcggcgccgcgtcccccttgatgacgtcagccctgggatttattgcgcaataaatgatttaaggtttttcttttatagtaataaacacagtgaatcttctaaaattcataactaattcatccgagctccgtttaagcccattcaagtctcagtaaatcaagaaaaatgtgtagaatccattaaaaatggttttgttccctgtttcagtagtcttatagcctgtttgcaatatttgccttgtatgtcgctagattccggttcttccgacgctccggtgtacttcaaaatagtcgccgaggttcctccagcagcagagcaaggcaagtcatgcttgtcacttgaacatgttgatcctatattgcaaatgctctattgtttttcttcaaatattgcattgttttataatgttactatggggtgtttacctattgttacagccatgctattttgatatcatgctcctttgttagcttgggttataacttgaatagattttggactaggaattgcttagccatgcttagttccactagcacacaatggggaaagctcactaaaatatagactttaggttcaattggtaaggttggtttagtaccaccattttggtgttggttaattaaaatgaatcacatggtgggctgtgggtgcatggttttgctagtcacacccatgacagttaaggaccggttcacgggatgccctggaagaacttatcgtacttaccacaagccagcgtgggcaacggctgggcttatagtgtagctttcctctagctgacgcatccaggcaagggtgggcgtgatggagcggggcgggccctgcgacggcctctgtcgcttccggattcacctaggcacgagaggggactgcccgctgccttgcgaggagtggggggtgaaacctgaggtgtggtgtgcttggttagatggggttatgcgaagggtcctgtcacggcctctttccggtatgtcgtggtggcatgtcggcgcacggaaacgtgtcgtggggctatgtcttgtgggtacagttgtacacctctgatcagagtaaaactattcgaatagccgtgcccgcggttatgggcggtcaaccagattcaccgtgattagtcttaccctagtttagtctaatgaaattggatagtataggtggatggttggccctgttgcaacgtgggatagcgttggacagcggatgatcaatattaattaattattgcaactgtttaattctttcaacttctgtttataaatgctcgttttatgcaaacgaaccactctagctctcctttgataattccctgcatcatacccctattccggtatgacttgctgagtacagtgggtagtactcagtcttgctctattttttttcccaaccccagagtatgagtatgtgtcagatggaggtttctccgaggagtaggcttcgtccgtgccgtcgaggatgcctgtggagtggtgttcccgctgcagttctagtcaaggcttagctcttgttgtctttcgtttttccgctgcatttatgtaagacttttatgatgtttgtaagacgtggatctgaatgtcaacattgtcgtttgtgtaccccggccggtcctggacggggattttaatgcacattctgcttggatctatcggatctggcgtagacactatctccttgcttctaatagttttgataataacttcaaattatctctattcttcttggtatatttggaaagctaaaaatgatcacttcttcagaaaaaagattgggaacctttacaaatttgtaatgcctccaatg

SEQ ID NO: 2263 - DNA, 2000 bp, Oryza sativa
  N_region (722)..(722): n = any nucleotide
ctaaggctgccaaaactgtcaagaggataaactgctagtggttagcgattagaagtaaatttggactgctgggttgccatatgtctacaagctacaacaggcgcacaagggaaaggagcactttattctatatttcatcaagcaaaaaacccttgcatgttcaatattctaaaaatcggcgcagtcatcacctcggtggtttttaggtgcctgatggtgagtccctgctgccctaatttttctcaccgtcgagcacctagctaacagccaccgatgcagcaagggctctcaacggcgagagatatgtaaggagaaaaattaggccctaatcggcgtgctaggcagggtagccgcatttacctctaaccactactacaaaatcctaaataggggaccgtgtgcagatttctaaaaaaccatcacatttaacctcttcacaatcttcacatgagtctaagattaaaaaacgatactgacatgcctttataggtgcaagtttaattaaaaaaaccagcacatataaatacatgtgctattttttttaaaaaaaatcagcacctagaagaatatatgagtaccggttttctaaaaaccgacacgtttgtgaaagccgagccgatgaaaaccgagctgacctaatttttcttctcgccctcctcacatatctctcaccattctcactgctctccgatccccttttctgtcctcgttgcctccgccantcctccccctctcttttgctacctccttgcctccgccgaccctccccctctcctccacctcccttcccctgtcttccgtcgccccttctcctctcctcctctctgctcggggacggccagatccgccgccgcgtgcttagggacagccagatccgccgccgcacgctcgggggtatccggatccgccaccacaagcacggggcagcccatttaacgactactgtggctccctcaactccctcaaccaccgtgtgcttgggggcggccgaatctaccaccgtgcacacgaggacggcctactcacaacagcggcttcctcaactccctcaatcgccacaggcacaggggtggctgctcaacgacgacggtggctccctcaactccctctttgtgttctcctctgtgttgttaattttgctcttgaatgttgattttataattgtgttcttggatgttgatcgattttagggatgatggagagttgcttgatgcatcggctcgaatcgagcaacctttgttttggattcgggactctcaaagatgtcggttcctaaactggcacctaagattcctcctcatcagtgccacctatgaggtgccggttggaaaatctggcacctacgtaggattcccaactggcacccattagggtttatgtagtagtgaatgtttaattattagtatatatcttggtttgaaagtaaataattgtatgtaaattatgtttatgcaaaagttttcaaaattgaatttgttgaaactcctacctttctcaccaacgaacaataggttggcacttccaaatgatgttttgcatggacaagattggttgtgaatgattgatctacgaatgctaaaaggaaattgtgcctaattaggagtttgtaaggctgttttagcaagagataaattcttataatcgcaagaaaaaatctgcacctgatttcttactcttcttgccatatagtacctttacatgtttgactgattccaaattaattcccaagacgcataagctttccaattaatctatactactactacaaagataaaatatatataaaaaatgtcctccgtcccataatatatgtgcttttgggtggatgtgacacattctaagacacattctaaagaggatgtgtcacatccaccaaaaaatccctgagtactttcttagtgtttctatattatctaaaaaaaatatgctatttgttaatctgcactatatattaactgcagggtcatcgatcatcattggacaccaattaagcaacagca

SEQ ID NO: 2264 - DNA, 2000 bp, Oryza sativa
  N_region (110)..(110): n = any nucleotide
gctgcacgatgccgtcgacggaacaaccaccatcgtggtccaccgcgacaagcaaccgccgccagcgccgccgctctcgcacccgcttgccgcacatggtcgaagaggtnatcggtgacgatcggcggcgcagtggcgccggccatggcgcagtctattgggaggaggaagcaagcgaggggcggatctggcctctgggtccgcaactccagcggccgcccgctcgccgatgccgctccgtccatcgcctgccaccgttgccgacgccgatccagacgccgctccacaggcacgaagagaaagagggagagatagagaagggaggagagggaggaagaagaaaggataaatagaggatgacatgtgggacgcacatgtcagtgggtcccataatttttttttgtgtgaatggctcccgcatatttttaaaaatttaatgctacataagcgccacgtcaatgccgcgtggtacgaagaccaggtcaacattgtcacgtgtgcgccacgtcagtgaaaccgccctccaaaatcatcaagggagtcaaattgtatcggtttagacagttcggaggtcaagatttctagtattgcggataaggtatacgatttagattccgtgttcatttcagggagtcaaactgtacttattccatatttccaagcctaactgaaacagaatcagcccattatgaagcccataaaacaggtaacaaattcagtgcgctattgttccaactgatgtctgcttttctttcttttcagattcatgccagccatattcacattaactcaaggattcaatgtcaatgactagcattctttttacaagcatgcctatttgttacttttgctaattgtgcagcagcagtgacgaaacaacgcgaagaggttattctaattgatctagcgtacgtaacttacgtgacatatagacaaagaattgatccaaggcaaccaccacatgtccacgtgattgatgattcataatagtaaacaactgcgcattattgttcggttaaaagttgactgctacaaatttcatatgaccacgtcaagctttataaaattataaaaagaaaactttcggcgacgacctcagtggtggttgcaaatatcggaattagattcagtttgtacaagttgtaaaaaaaagaagatttgagttcgtacacatacaaagtcgttagtccacatgagtcatcaaaactcacaaaatacacagtttcaaagcttgttcctagaaccgacaagtagaatgaactggtcataataatgcatccctaatctatttttttaactaaatgcatccctaatccaagcatggcgtcagtaatcccgaagctgacatgtagggattgtaacgcgagtgcatgctacatgcttgacatgggcggcaggataggtcggaaagtgaagaatacccagccacaccaggcgccgtccaatcgctgcatattggcgacttttgggcactttcccgtcgtctttgtgatgggtcgggggcacaaaacgttgcgtgcaaaagacagcggcattgctactcgatgtactgaacccacagtaagttcttgttggctaggaattttcggagccatcagatcattcatgatcaccgtacatgtaagttgtgcatatggattagtacattaacgacgtgttgattctgtaaccaagaggtttgttgtttgtttgttcagatggaactctgaccaaaatccaggcacgcgtgaaacggtgacacgaaaaatgcttccagctgatttccaccggcaacagccagtgagggagtcagcggcaccgcccgctcgtccccgcagtcactgactggtggggcccactcgccacgcagccatccctgacgtccgcgcgttacaccatccgcgtcgtagttaacacctccgttactccattccttccaaaagaaaactcgaaacctccccctctccggccgccggcgagcggctcatccatccaccccaccttggccggagacggcggca

SEQ ID NO: 2265 - DNA, 28 bp, Oryza sativa
  N_region (7)..(7): n = any nucleotide
  N_region (21)..(21): n = any nucleotide
atttggnggaattacggatgnggttgtc

SEQ ID NO: 2266 - DNA, 2000 bp, Oryza sativa
tcgttcagaaagatgtcggagactctgtgggtaaatttcattgttccagttagatggtgagataagtaatcaagagctatataggctggtggtaaatctgtgcatttcacacttatcaggatatattacatagattttgaacctatctagcactaatatttttttttggaaaatacatatcaacagccatcggatacttacatttttcatatgtattcatatacaaaataaactttcaaatctctatccttgcaggggaaaaaaaccgatccattataattttgaagtttgaaatggattaatgtaagttttctattcattctggcctttgtgtgtcttcgacacaacagccctgatccattatactaaaaagttcaataataattcaaagttcaaaaaataattattaaaaatatgtatttggcttcaaaattacatgggcaatccatcctaaagtgttctcaccaatgtattaggataatgtcgaccccacgatggagtttggcacttggtgttgcacaaacgaccttgtcagcggtggaggaatttggagcttggcactgaggcactagtggagtttgaagatcagtgcactgcatggacgcactgagtaatggtggaatttcatgctcaggtaggacgatatatagaggtatgttttcctaattgaggaaatgaagctcttctcacaattgagagagattacaagataaagaatacaatcgtgtttggaataggccagattgtgcatatgctcatcgcggtattagtgtggccgtttttgtattggtcatagcctgaagtttgtaccaaaactaataaagttgacaaaaggtcaaaaagcacttacaccaaaagtgagacctttctaactcgcaatgaattcaattgttgaggtttgctagctctagaattcgactcaaaaaggagaattgtccaatactcgaatagttgttaagctattgagatttgctagctctagattttagctcctgatgtcctacatgccagtgactgaatggatatgcccacatgaactttcatcaggggatgtaaactacttgccagtgactgaatatttagaaagtggaactgtcttagcagaaaatatagctccaaaataaatgttttatgcgagcttaaaatataaaattaagatattgagcagtgcaaagagactaacccagcggtctggacaagggtaattattgtgagacaccaaaaatccttcttccccagtatggagacgaagccaccaagaaggataacagtggtccataaaacaagaagataacctagccccttgacggccatagacatgtgtcccatgaacagcgcgtagttgttgatggagctaacttcctcccactctgagtcatcaacgggctccattccactagtcattcttcccttgcagatgtgcagagtggaggtcaactgcaagtctgcaacgcaacaaagccaatatgtaagcccgcatgctcagaactctattcgttgtatactcgtacataataaagcctggagatgcacgccaagaatggaaaaaaaaactgatctacaagaagcatggtcattcttaacataaatatgtccatcctattaaatttaatcagttttgattagcatcaagcaaggtaggctgactttggttttgtcaaaatctgttcagttgattgtttgagaaagtcaaaggaaaaaaaatcatatggtgaggaagcaaaggcctcggctagctggctggagttagtgtaactaaagaagaacagcccagatcagtggatcacagatgttaccgtaattcgtaaacatataatctggttgtcagcataaataattgttggtgccttttcgggccaatacagattcacctaaatatttgttgcaaatttggcctagtgccaaattgtggtggtcaacaataatattccgttttctcaaatcgaatcccaatagatcaagttgacattatatatgtgtacgatgggaaagcaaatacc

SEQ ID NO: 2267 - DNA, 2000 bp, Oryza sativa
acaaaacggaaaggcccagctcagccaagcacgcagacgcaacggcaacgggaaagagaaaccaaaagtggaaaatggccgacgctgccgtgtgggccccacgtccaggtgggggccctatttattccgagcccgatccatcacccagacgacacccaccgcgcaaggaaacgaagcgcggtttccgtagcgccgccgccgccttcgccgccgcgggcaccactcccattaagaccggatcagctctctctctctctctctctctctctctctctgtccgttgcgctcgtctcctcctctcgccgcgccgccgccccccgcccccacgatcgacgactcgccgcgccgccgccgccgccgccgccaacgcatgcaggtagtgatcctgatccctcgccgccggaaagcggcaacagtttctccttgttccgtccgcgtgtgcttcttcccgccgcgcgccgcgcgctatttgctctttcgatcggcgggcggttgttaattttgtgggttgatgggggtgtagatcatcaggacgaaatttgccttctccaactctgctgctagagcgcttcattcgggagagggcacaacgcggatcgaatgcgcacttccacatttatttccttttctctttgttattaccaaaaacatttttcttcttcttcattcttttattttttttggttcctggtagttcgattcatgccggaatagattccgttggtcactgtccaatgtccatgtcccctgttcctaattcctttgtgagccttttctttttcatctgacgtgtgagttgagttgtcagtcgtgtttacactaatccattgcatttgtccatgtaaagcagatgatttgcttttcctgggtgagttatgagtcacatgcaattgcttcttaacctgcacaacctctaaattaagccaaaaggcctagtcatgttatccagattacttgtactggccatctaaaaaaaggattactgttgttgtttgttcttcaagcgattgatactgacttcgtgtcatattaggacatccagatcagttaaatggatggttttctacgtcaggtattacaaagtcagctctcatcttattgtctaaccacataccttattgttttgaatgaagtcttaacacatattatgattctaacttgatccattagtgatatgtgctttttggaagattctaaatatgtggtctctgttttccttgaaaggaactactttcaacatacgtggtcatgtaataatggaatgtattcctagaagtcagtacaagtgtgcaatccgttcaaatcattgtctgctacttttctcagcgtgttgtcgtcttatcctattccaacgaggggcaactcctatctgtttttggtgggcttgtggccagctgggttgataaacattgccacatgttcaagtttttgttcagtgctgagcgcaagcaacaaaccaaaatggggggaacagtagtttcttgttttgttttctttaagttgaactaatattttttttaaaaaaaagacacagctaatggcttatgtatgatattagttttttttaggatcataagttttgcaccttttatggtccatatttaccatcttattaatttttaaccattgtaattgtgcgatatacctgctatgtcaagtaagcttttgttatgtactaaaactatctgtctgatttaatgcatgcaagcctaattttgttccttgctacaagttatgatattttttagggtggttcatcgctacaagctattcctgaagaaagtgtctttactttttaaaatttcttattgtgcaagtatagaactcactgggagttgtaatacctcacggcatgattactgtgttggaaaagagtacagctgaaacactctttctttttttttttatcaggggatgatattgtaggtaactatattttgatgtggtacaatgcaacttcacatggtctcagctagttttcagctttttctgtaggcaag

SEQ ID NO: 2268 - DNA, 2000 bp, Oryza sativa
  N_region (993)..(993): n = any nucleotide
ctactttcagacctggccgtggagtcttttggtggttgaagagatttgtttgtccgcgttggtggtccagtttgtccgtagtcagggctcttgggcctcgccggtgcttcatgcgccctgtggctgtgtaaacctgtagttgtgccgagtgtggagcggtgtgcttatcctctactccctctgtcccataaaaaaccaatctagtactggatgtgacacattctactacatgtccagattcgttgtactagctagaatatgtcacatccagtactagattcacttttttttaggacggagggagtacggtgttagagttttagtgttaaggtggagtcggagctgctgcatcatatcgggttcagccaataagctgggcaacgataacactcaccactcttgctctagcttcttggagatcctgcacttctcaagggagtcttgggtgaaagctctgcctggtcttccaggatcggtgacatcgacgcctgtgggtgccgtttcctccttggagatgttaccttgtggactctctccctttcgggtgaaaaaccagtccagtttttgggcggacgtcggcagcgacctctgtcgttgttcacctccttggaggcttcgccttgaaggttttactcttccctcaatcatttctgtgggactagtcattttgtcacaggctttttatgtcttgtgtatagttttgccggtttcctttagcaaactgtgcagttgtatggttttcagacccagttttccttataaaaggatcaactctcttcttctaatatatccgataaaactcttaccgtcaactgtttcaaaagattaggaaaatatcgatgcaatttaaccaatcgaagaacaagcctatctggtacgtaaaaaaagagaccaccttgtcgtcgacaccaacgggacctcgtacgtcgtgggccagctcgccgtccgttgtggcagagagagatgctcgagtccctactgttcacgggggtnacgaggttgccgtccagacgacggcagtactgtccttgacagcggtgaaccatacggagaaggagaagacattgttgccgtcgtcgcccacctgagtgaagccgcagctgtaggagaaagtgccgtacgagagtaccggagcgttgcccttaaatttaggggttgtttagatggtgctaaaaccttttcagtctccgttacattgtatgtttggacgctaatttgaagtattaatcgtagactaataaaaaaaactaatttcatatataataactaatctgcgtgacaaattttttaagtctaattaatccataattattaaaagtttactgtagcatcatattgtcaatcatagcataattagactcaaaagattcgtctcgtgagttagttaggaaatgagttttataattagtctatatttaatactctaaattagtgtctaaacatcctatgtaacaggcaaacaaccccttattcctcatgttcttatagtatactgtacacctggatctctcaatcgatcccctttaccagtacactaaacattgatctcgccttaattaattaatttcttgatctcaagaggacaacagaccccctggcaaggacagatcgaaaaacatcgctcgccgaaccattcaattctcactgaaaaagcttaattaggagtagtagctagcgtgtgaggaagattcataaccatatatcatcttaattattagccttttctgatttagcttattcacttaactcttcattactaagctagctacacgaggcgtagctagctagtacaggccccagcgagcataaatagcagcgtcccctgcttcctttcctcgtcgtcctcagctctcatctgcatgcagttcacttcacacacaacacggcttagcttgctcagcttcactgatcttcttagctatagctacttcactgtgcgtgctagctagctagctgctttgcataggttgatcgaactaattaactcaccaaattagcta

SEQ ID NO: 2269 - DNA, 325 bp, Oryza sativa
agatgaggaggtctcacactccaagctcgcgccacgtgtacggcgagagctcgaatcgatcgcgagacggataaccatccgggggagtgtgggggctccgatgcgggacacctggcgcgggacaaaaggcgaggtggggcccacgcgtaccagggcacgagaccgtggtgccacgtgtcggcatcggctccggtataaaaggtcgccgcgcgcgccgttgttctggaacacacacactactgcgactgctagtgctctggtcttacattcgacgaactgatcgatattcgatacgacgtctcctcctacctggagcttgggaaaa

SEQ ID NO: 2270 - DNA, 2000 bp, Oryza sativa
  N_region (591)..(591): n = any nucleotide
tatattgcaagatcattacgtagtattccatgctacatgatgaacgcatatgcatggtggcccatatatatgaccgtatctcactgcctgattgatggaactttgacagcttctagtacagatcaatcagtgttaaactccgtcccatactcccattcccatatatttgcctgtgttctgtatgctaatagtatattggaatgattcaggatttattctgtggaataattcatgatttctgacttactgttactagtaagacaatggtaattgccaagttcttctgctatgatgcatccattgaactaccaatcagatatgtacttgatagtgcaatgacaacgggtgtgtggtttcaatcttgaggtcccatgtttaattcttaacacgctcacaaatttattcttaaaaattgtttggagggatgtctctccctccaaatcttgttttttttaactaccaatcaaggaatcaacacaagaaaatatgttcacaatttcttcttaaaatttatttggttggaggggacatctctttttccaactctcggttttttttttgtttggtgaactaccaatcagggaaccaacnccagaagctaaaaaccaaactcaccagtagctatagtatatgcactatgcaagctatatcgatttttttttttgaaagaaagaactgtaagtatcaatttatttattttttttgccaaaactcatcagatcaatacatgattttgtcagcaacaacctgaggaagaacttgagcgcgatgtcggccgcgggctcccccttcatggcattccacgcgctcagcaacgagcttctcttgctcctcgctgaaggtggcagccgcagccgcaggaggatcctcctccacgaccacggccgcaggcgcggcggcggtcatgctcgccgccggtgcatcgctgctgctgccgctgctcatctcgtcctcctctccgacaaggaaggcagcagagagcaacctatcgacgtctcgaaaggccaggatagtgggcactgcgactctgcgagtgttgcattgtatccagcagagagaggtttgatcacctcatcacctcaccaggtagcaaaaggccaagatttcgctggattgacgtccggatccatggatggctcacgatcaaagggatacggctgccgttatcggcaaagggcagagaatatctgcaagtacagacaggcaacaccgacagcagaagcatgcaaccgagccttctccttgaaactttctgagtaaatttcgcaaaactatgtatacttgtaccaatcataaaactagcaagaccgtgtatcatatggttttgtgataatttgataaaaatatctgtatttttgcaaaatttactacagcattttcccttcagtttcactggatcttacttgcacgaaatctttaaaaatcgatggtggatgttttattttttttcttagaacttctaggacttatttaatttattaagtgtcatgtagcaatttaggagcgtttttaggatctccacgtgccggttcaagagcgttttatagaaagtttaatggatttttagtatataatagatctttgtatccttcggtttcacttattctcacttgcatgaaatcttattaaatttacataaaatttcacattgttgacgctataatcaaatccaaatcattcaattttttaatttccctttttgttttgaacatcaatttgcccattttatgtctgtcaatttgtccatttttttttgtttgagataggaagagcagaagctaatttagagcagaggagaggaatgggccgcccagcccggcaaccaatttaagcctgcaacaccgaggcccataaggcccatatgccctcgctctcagcacgcgaggcctccgatagcgcgccgccgtgtccgaatcgcggatcggatttgggcttccgttgccggcggcgctagggttttggagaggaggcgaggcgatcggaggcgggggatcggagag

SEQ ID NO: 2271 - DNA, 2000 bp, Oryza sativa
atcttcacagtgacagtcaatttaatttacacacattttcttttgccttagtgtaggaaaaagttaaggataattattagttgattatcctgtaaatttcttacccttcatgtttaatttcatatcaatctaaattctagagttctttggctctcacggcattttcatgtaataaatacaaatgtagtctcgtgttgtatcacttgatataactatctgtattgagaggtaaaatgaaaattatgttgccacacttcctaaatccaattaataagtgtcttctgagcttccaatatgttcactgatactgatttgaagatatcctctgaaacatttttttaaaaaaactcactaataccgatggattgtgcttggacaggtccattgcaattaatactccggatgtgaacctttcagcggagaatgttattgccacaatatgtcttcttttgactggtagatttgtatgatcaaatatagttgtatcatcaccatggacattactctgatcattatgtaaaactttgattttattttttatatgcattggtgcttcatctttagattgtaaagtgtaagagttttgttctcagcagaatctgtaaaacaatgtatggaaaattactcatcaacggcattcactgcaaatgtattcataggtttttttttcttacataatcattgattcagcctgaaaacaaatgattagtctacactaatcaagcaatctatatgcaggcggcgcgccattggcgtgccccagcatctagtacaaataacgagcagatgttccttaagagtatatgtcccagagtttgcaatagttccccctgctcatacagctctacacatccgcagtggagccaccgtggcgacacggcatgatgcgccgccgctcgacgacggcgacgggacgccgattcaccttcttcggcgtgtcgatcacctggatcaccctctgcttcttggcggacgcggcctccttgtagccgtcctggagcttgcgcctcgctgccgcaagcttcgcgtcgtccgcgcgtgccggcgccgcctcgtgcttgttcgatgctgtcttcctcggcgacggcgctggcgccggcttgtgagcggccgccatgtccgtcttcttggcgtgatcagacgcggaggcggtcttggtcggtgccggcgccggcggcttggagctgctcctggtcaagtgctcgtcgacgatagccttccagttcttgtagagcgcggcggcgaggccgcgcaccttctcggaggagtgcttcctcctcaggccgctgatggtcttgccgatcctgctcgcctccagcgtctcgaacgtcatcggcgtcgaccgcagcgcgcggagcaactcgaccacggtctcctccgacgagtcggagctcggcctgccgccgtcttccccgccgacgagcttgcccttgatcctctcgacctcctcggccatggaagatttcttggcgcgtcggagctcctgctcgtcgcagagccgaaacacgtcctcgaacggaatgtcgcggcccgcgagctccatggtggcgaaggcgatggcctcgtcgagctgttcggctcccatcgagcgaaccatctccctcaccgccgccgccattgcctctccgccggccatggcaaagcacgcgagatcgctcagattggagcaatgcagcttttggtggaattgggaatggttggcgccaaatttatagggaggaagaattgtctcttcttctccgattcgaattcatggcgagcaccggactcggactccgactccgattcggattacgctggaaacacgcacgcagtcgcgtccatgagttcgaaatcgaatcggagaaggagtacaagtatttcctcccgataaatttggcgccaattccttctccgcgctcatccaagaaacagagacacgagtggaagcagagcttttgcttggaatcgatctttctttcgatctcgcttctcgcatcgcgttcgggttgctgccatcc

SEQ ID NO: 2272 - DNA, 2000 bp, Oryza sativa
tctgtgcgtgtgcgaaataaatgcatagatcgaggggggtgagcagttcaatgtacaatcaggaacatccttcagatatgaatttggcctgtttgattaaaattttctgtttcctacatacatttgactttgattgcctatctaacaaatatcacaaataccaaggtttttaaaattgttagctagtactcaagcagtcacagacctactactgattatatatttgtatgccctaactcgcctgattgtgtagcataactggaaatctagaactatactgtaatagttgccttatttatgacctactagatctgttcttcctttgtagtacactgaggaatatatacctcctacatgtattagatgttattagcagcgtgtactgaaatagcccccacgtgatctattagatgtgttaacactttggaatccttagtcttgacagccttgtgctacaagtattgtgcctgaaggagatacgggtatgtatgtggattgtgattagtcctattgaatctatgcatagaagagagaccatcaatactatttaaaaagaggaattggttctggttctatgcatgatcagatttttcattaatgggtttagaatagaccatctacacatgtgctgtttataggattttttttgtgtaaaatattgcattctttcactgttgcatatgcatatattagttatcggttgatcttgcattattatatgtatacaattatttagattagataatgattacttgtttaaactcaaaatttgtgtatatttatttcgatccatcacaactcatgggatgtgatgctagtttatcataatttaaaatgtgcatgattatccttgattcagatatctatatccattgccatcaacttcttatttgttttgatgcgtgctcatattgatcatgcttttagatagcaatatcatacaagtatggtactgccattattcaaatgtttttgagcctcagcctttcccaccccttgtcactgtcttggggcaatatttaactattgaagaattaactatgctttgcagggcacctgtggggcctgtttgcaataagaaaccccgtggctactaatgactactaatacaactcacagtcttaatcgtgtgtgttatcatacagggaggctttcagacaaacattgaaaattcttgctgaccatattattttctttttcataaataaacactatcaagggtcaccttttgtgggcttgcttatttgcactgaagatgaatttggaaaggtactaaagtactagtggcttagaatttggctatgcaaggttagcaggagaaccggtattgctaatttgtgctaaggatgaaattggtaggtgctgaagtactaaatgatgggagtttggctaggtaaagcttgaaagagaaagtcttcctaggatatgatagataaatcaaggaatttgttgctcactgtgcccaaaatcttaatacaatgatacacaaagcttatgtgtattcgcgaaaaatgtgcccaaaatctaaccaaccaactgctaaccttgctaggcaaggtaggctaaggaaccaaacatggttgctaattgctattgctttctgatcaaacattctgttcgatgattttctcctgtagactttattacaagatccttttagttacacttttgtgatgcatcatgcatgcttacagttacttatatctgcaattttttagtatgtctactaatggctgatttcttcaattatgaattccctgctctgctgctggtacataaaactgatgctagcatcttatgtcggatgactatttttcagaacaagtttagacattgaacttaaaagtaaaactatagcagatcgattcatctgcacaatttattagtttgtaacatgggaggctaggactattacctaatcgagaatgcaactgacaatgtttgttattcttattttgcagtgttggaaatatcataagttttgggacaagcaagagagg

SEQ ID NO: 2273 - DNA, 2000 bp, Oryza sativa
  N_region (836)..(836): n = any nucleotide
actttttaagtatgtgtttgaccattcgtcttatttaaaaaattttaagaaattatttattcttttcatatcatttgattcattgttaaatatacttttatatacacataattttacatatttcacaattttttttaataagacgaacggtcaaacatgtgctaaaaaatcaacggtgtcaaacattttgaaacggagggagtatcttttttttcccagcctggctcgagaggcatattgccttgccaaggcattcaaccatgcccagcccaagctcaatactccctccgtttcgaaatgtttaacaccgttaactttttagcacatgtttaaccgttcgtcttattaaaaacttttgtgaaatatgtaaaattatatgcctacataaaaatatatttaacaatgaatcaaatgataggaaaagatgtaataattacttaaattttttgaataagacaaacggtcaaatatgttttaaaaagtcaacggcgtcaaacattttgaaacggagggagtatatcacagctcaggtgcccaactaagcagctctcccaagatcaccaaccattgaagccttaatttgcacgtagaccggtccaagccagtgcacttgcactagtgggaataacccgcatttagcgtggagcggcatgtgtgatttgggttggaaatgggagttggaagcgacggaacgcgaggcacgagggaggtatgtcagcgtcataacttatcccgtcgaaacggaatcccgtcgtgtagtagttctcatttcactcacctttcgctccattaaatttttttttaacggtgagattgccgagtttatcggcggtcgnaggcgcgcacgaacgctgaagcagtgaagcagcatgtcggacccgccggcggacagctgcgacttcgccgtccacctcgtcaggacctcgcgctccgcccaagccatcttcttcgccgccgtcgtggcgtcgtcttcctccactccatcaccatcgtcacctcaccctcgtcctctgctgccgcttctacgccgatctcaagcgcccgccgtggctgcgcacgcaccggcttgctgctgccgccaccgccgcgcccgcgcacaagcaataggctgtgatggcgccggggcggcgaagagatgcggggcgcactcgccgctggtggcggcatcccgagttacgcgcaccgcgacggcgacggcgacgttgagtgcgcggtgtgcctacggcgaggtggagcagggggaggcggtgcggcggctgccggcgtgccagcacgtgtgttccacgccgcgtgcatcgaccggtggctgcgcgcctgcgcgcgagcgccacctgcccggtttgccggtgcgcccgccgccgctggaacggggtccacgcccaccggaggtagtactcgacgtcaatcccttcctgatgtaagttgcagctaatcttcgaagaaagcttcgatgaaaatttgtaactaaacggagatggcgagatcttgctgagacttttcaaaagtaatttgaatccaacaggttcaaaccaaatttaaacaaatttcatatgattcgataaggggaagacactgcagactgctctactgcaggaaatttcttcagaacttttggggtccaaatctagctgacccgatctcgtcaacgtcgccgcccaaatccaacggcacggtgatgtgacacgtgggcagggaaggctacgttttcctgttttccattgaatccaacggctctgatctctcctacagacaaacagctcagtgaaggcagcgtacgcctttttgccaagtctttgctctcgtcatgtcgctaccaaaatgagatcgaaatgtggacttaaaatcaccaaaattaatcaacgaaattgaccgacctgatcgcttgcttgccgctcaaattaaccacacgcatttgcaaccgcgtttttggttttgataattacttctgcgattgttgtggaggaggaggaagagagaggaaagtgtcgtgtcgtgtcgcc

SEQ ID NO: 2274 - DNA, 1630 bp, Oryza sativa
  N_region (10)..(10): n = any nucleotide
  N_region (981)..(981): n = any nucleotide
gtaagcagcnaagcactaatccacgtcgtcttccttgcttgcttctgtgtattcatgtcgtcttccttgcttgcttccttgcttgcttgtcttccggtggtagtcggtgcgtgcaggggacggctacctgacaacgcgcccagggcgtgggccgcgctccacaagctctccgtctgctgcccggggctcctccacgccggcgtcctcctcgagccctccgatgacggggcaggcggtggcggccatcgcctgcacgccgccgtcgccgctccagccctcgcccacacgccgtcgtcgccactccggcccccagccaccgccgccaccaatgggtccgaaggggggagagaaaagagagagaagggagagagagagagggagaaggatgaagggaaggagaaaggatgacatgtgggccctatatatcggtgggtcccataatatattttgtgtttgaatgacagatgggtcgcacagatattttttttaattctaatgccacgtaggtgccacgtggaatgaaaatcgggttagcaccgccacgtcagtgccacgtcagcaaaaccgccctccaaaaccgttagaggagtcaaattgcactggtttcaataattcggagagtcgtcctacctggtttttaagttaagggtcacgaattagatttggtgaacaattaagggagtctaagtggactttttcctattccaaatagaaatcgttacgtccgtttggtttaggtgggccggaccggaaacggataccccgtaatcaaatcccggcccagtagaaaatgaataccaccgttccattccatcccacgcgtaacggagagctctgcccggcgctcctcttgcccagctagcggcggcgctcacccgctccgcgcgcatcgccgccacggctccccgagcccccggcgccgctggccacgctctcccagcctcctccaccccccccccaaccttacccgggctttgccgnaaccccggggttttgccctgacgaacccgatttagcgggaagaatatttgttgggttttgagccctagatgcatcccgtggagaatatttggtgctattgttgtgcagggctgcatcgcgctgctggcccgccaagcaaaggcaagcttgatctgtttgtgcactgactttgatttgtttgtgagctgaatttttctctttctttttttttctgttaaatggtgtctttctttcttcttctcgtttctgttttttttttccttccagcgagggaactttctttagttatatgaagcataaaggactaaagagtggctcttcagtactccaatttttcaatttgttgatgcatattgtcctacatttaccttttaatttagtaatgtcatgccccattttatacatcgacgatgcttcaagacaatggttgtctgaaatttgtaatgaacctgtatgctaagcactgctcagttaagtaggcttttcatacatagtctaaccaaacgccgtaatgcaaatggacaatgtagccaaacacatttaagtggctttggacatgtaaacaaagctattattcgggctccatccgatcaaatttctgctgcatctgatttcagtaatgtcattgctgcagaagccagccagtgaa

SEQ ID NO: 2275 - DNA, 2000 bp, Oryza sativa
  N_region (13)..(13): n = any nucleotide
  N_region (44)..(44): n = any nucleotide
tatatttaaattntctatttatttcaactgtgcatttattttcnaatgtcactgggtggtgtgaatctattcctttgttatggcctgtttgcattgattactttattccttgataccttgggttattataacttgactagttgagctatatatattggttcagctagatattagatatgattgcttagccatgcttagaaacattagcacactattgggattacttatgactcattattatttaatgatggcttaatgatagttcacgatggtcaatcgtgattggttaattaattacttgccaactaaaacttgataatggtgggttgtgagcacatggttttgagagtcgtgctcatgacaattaaggaccggttcgcgagctactgttgtgaaacattaaccatgccaaccacaagccagcgtgggcaacggctttaccttttgtataacatggttcattgcggagcactagactgagaagtggcggagataagcccacgggggtcgctggggagtccatgccttgttttataagggggtgattatgatccaggaaaggtgcgctatggtggattgtgttgtgcaaggggtattgtcacagctccttttcgaggtaccgtggtggtattgagggacatggtgatatgatgtggggctgtgtcttgtgggtacagtggtacacctctgatcagagtaaaactattcgaatagccgtgcccgcggttatgggcgggttgagcaatgtttttcgtgattagtctcacacctctcacaataattatagatgttatacctggtaataatttgcttagctcctggtttggagttagatctgtacagccgggtatggttgttcaggatggttgggcctgtgcagcatgggtgtgttgttcagtgttgattaaaatttctgattaattactccactgttttatttctcttaaatgttttgctaaatgctgcttttgcaaatgagcctatattatgccatcctttggtatccttgtgcacttgcatatttgctgtgtggcttgttgagtatgtcatatgctcattcttgcaataatcaatcaacctcagttgaagaaaaaagatctaggaggagaagacgtttggcttataccccagttgagctgcctgtgggagtggagccggagcttcgctagattttattttccgctgcagttttcttcatggtgaggactaagtgcatcttaagtaagtatttatcgttttagttaatttgatgaatttgtatattaaattgtcagtttgtgtacctcggctgattcctggacgaggattttatgcacaaataagttcggaaattactagtgaattttcgggcgtgacagtagtactcagtcttgctctcttttccctcgcaccagagttgaagttcttctcagttggagccgtctcagagaggttggtttcgtcgctgccgtcaaggtttgcctgtggagtggagtcgcccgctgctgaagtcaagcttcccggtttagctcgcttttatctttcccgctgtatttgtaatcttttatatttttgtaaggcgtgggtctgtatgtcaacaattgttgtttgtgtaccctggctggtcctggacagggatttaatgcacattcagcttagaaattcgggttcgagaatttctgggtgtgacaccatgtcacactgagatataaagtgagtgaggagtcataacattatctatcttgccaaccatcaagtatctgtgatgggcaataaagttactttgacgatggtatacaaggacatctgtggaggcacatcacgtaacttccaaatgacatgactcactctgatcccaatagaatatccaacaaaaacaaacactctagagcaaccgataaggaattcaaagaaaacccatccatcgcatctataaatagacaagcacaatgtaaacccacttcatcattctcacaactcaaacattacagcaaaagcataagaactagaaacccaccaca

SEQ ID NO: 2276 - DNA, 2000 bp, Oryza sativa
gatggcgggccaaaagtgaaagagagagctttgggcaggattcgccccaaaaagatggagatgattaattttagttttatcattttaattaaccctgaaattggttgttgttgatttaaaattataggttgctctgaaaatttcagtaaaaattgagggaccaatttagagcatggagaatttaagaaaaatacaccaagccactttgaatttttggatgtattttagtatttgaaatttatttgagacttttattaatttctattattccttttagaaagtgacttttaatttgggatggatctatcaggtgtgacataacgataagagagctccaaattaatttcaagacccaaattaatctcgcgttagatgttttctttcaccttcgagtagacaaagagctctctctgtgtgttccatcttcctttggttttggttctccctgagcagacttgtgtccgttcttctgtttttgcgctgattcagttgttcctcgatcctgaatacttgcacgcatgagtatttgggataagcatgcctccggaacgccatccaccaccagagtacctgcactggtagacatgcggttaagtttgtatcatttgtttcaacatataataagtaaagctaaacatatgtacttctagcttgttgatgtgtaacataagcatggttatatacaagctagtgatgttctcatcagtttggatatttataaaaaacagcaataatgcacacgctcacatatacacatacacttacgtaataatataaatacacacacatacactcattaatacgaatgcacatgcgtatatactctaacccatacggtccaatatatgccttattacacatcactctctagtctctacttgcatggaagcacgctttatctaccaaccagcttgttcagtatgccaccatatatagattatggcacacatatcctccataaatcatcattttagtatatatttgctttctattcttgtatgtcataatgtcattcatcaaacttgtagcttgacaatgtacgtatatatagagggagagatatgagatatgatgaatcgaatttgaagatgctcggcatacccggagcatgtctaggcaagctgttgtccggcctggacatttctataattactaaaacttgaaaaaaaaatccaggaagatattaggcatttgtcattttgccccctatgttcaatttttgtgggttgttagtttataaaaatatgcatagtttatcaagatgggactgtaatctccaagcttgggatgagcagcatatatattgtgatggttgatagcatatggcttatctcataattcatgacatcacaaactattgggtaaaggcattataataggttatagcaacaaatataaaattatgcttagctgtgcaaaattatctaattgatgactatttctaaatacacatcatgggcaaaaaggtgcgaaaagttagtggcagagtacataaatttgaaaagaattataagtagttccgtactcgacatataacaaaactaaaatattcacacatttcatctccgttactttatgcggtgtataacatgagtgtacaagctagacaaaaatgacaacaaaaatacaacttttttgttgtaaaagaaaaacaaacttatcccatgcagaaactttatgacgcaggcacaaataaagccaagaaggaaaaacatctaaagtgtagggatagaaaatttctgaactaaaagaatatgcatttttctacaaaacacaataaaagcctagtatacatatagatgtcttgttaaccgactttgtgtatatatacttttttttttgcacaactcaatacactttataggatgtctattgtttatactccaagtaactttgtaactgccttacattccaagcggctttttcttggctataaaagggacctcatgtcttgggaaatcacatcagttgagtttccattatcctttcaataaatagcc

SEQ ID NO: 2277 - DNA, 2000 bp, Oryza sativa
  N_region (168)..(168): n = any nucleotide
ttgtgccaaaggcgaatctttggtggcatgaggatgaaataagttctaagttattgcatcatcgccttttcgatcttatggtcccataataattttacatagagttgtgtgctactcattcgtgtattcatacaaataggtccatcatgtgttcatcacattatatcnataacacttgaatttaacataacaatccatcactcataaaatcaatccatcctctataagcattcgaaggaaagacaagtataagtgttgagtgagttggagtgatgatggtccttgtcagattctatcatcgtagtggcataaatgtatgcaatacccaaagtttcaagtgagaaaagaacaaatctcacattttgagcagtggcatatccactgtgtgggttttgtcaaccgtaccactaatagtttttctataccaacactagttaaagactacgatcgaaatcctggtgataactatagctcctaatctaatggtcggttgctcgttactagtccaaagggatatttttttatcagttacgtcttattttcttacaatattactatttatcatttcacttcagaaggggaaaaaaactcgccttcaattttgaaattgtatcacagaaaatgagagtttttatttttccattgtctgttaagaccttgtaaccagctgaatatcatcttgctaggataccgatactcttcttattttttttatcgaaaccactctttgagacctgtgtggccatacacaagattacctagatggtgacaaccgatgtgcgatatttgtccgcacaattcattcacatatatacattctgacatagagtctgcatggattcacgaaaccaaatcaccttccaaaaccgctatgaagtccgttccctctgcttttcacgaaaaccatcttaaaaaccattgactagccgtgaaattcaattaacttttaccaaaactttaaaatctagttaaactcttttttcctagctcgaccaatttactgagcggttttgtgatctcaacccaacaaaaaaacctatttaagtttccgcgaaaaccaagtggtttcgtaataaaccatctgcgcacacgcacagaagcccacaaccttccccgcgcgcgagtaccagcctcgtcgccgggcaacccaaacgtgcccccgcgcgtgcgcgcgcggctccgtgctccgctctccagccacctatctattctagccccttacgttacggccttttacgttactacgtacagctaatctaccagctccgctttccatgaacaccgccaaaaagcccaaaacctcccttgctctttgcagctcatgctctttctttctttgcccgacgccaaattgccaatgcttcgattcacgccttccattccattccatcccagcctcctaacaaccagtagcacattgcttgcatgcctaccttcgaaaatcgcagagcacatgaatgcacctgcccaggaccacggccactgtccgtttcttcctcctcgagaaggagcaactgatcgaactgcgcacgcacgcagtagctagcatcgcatcgcccgtttctgttgcgagaaagaagcaagcaaagcaaagcgaagcgctgatcatgcgcggcacggcgcagcctgcggattcagtggcatcgtgcagccggtattgcagatgagacaagccgggagatggatgccgttggtggagtgcccggcggggagcggggcttgctagctgtgtggggggcttttcgtcgcgaggagtgcacgccaccgtgcaggtggtggacgggacggaatggctataaaatgggggcgccattgccaagaatcccaagaacaccagccaggaatcagaagccagaagcagcaacgctcgctctgattctttctttcctcctcgagctaggtgcgtagttgtcatatttgatcgatcggttttagttcttcttgtttaattttgattgcgcttgtagcagcaggaagtagttttaattttggtgtgatcg

SEQ ID NO: 2278 - DNA, 273 bp, Oryza sativa
  N_region (256)..(256): n = any nucleotide
cgtcgcgcccgccgcgtagcagttgcaccgcgcgccgccgctacccgccaactcacacctaccaccctcccccctcccccgcgcgcgacgtgggctcgctgcatgagcccatgggcggacacgtcgcctcgccacctcccccccgccgccgccctccgccgagcttaaatgcacccccgcttccgcctcctccaacgccattccccaccaccacctgtcgacggcgtacgactactatctcggtgctttgttgctngcttcttccagctagcc

SEQ ID NO: 2279 - DNA, 2000 bp, Oryza sativa
cttgcgtgagctctgaaaccagcttaccaccgttagttccagctcggttttctttttttccccttaaaggtttcatgcgtatcgtgacagatgttacataatgacaaattccccagctggagcacctttatccctgctgtttgcatgaaattagcttgtcttgtagttccctccagcaaaaagaagtctgaaacaaaacaacatttcgaaaaaaaggcatccatgagttagcatttctacagttgtctatagaggggaaggctgcacgacaaagtttccaggcttggaaacaacctcttatgtaaaatttttcgtatgtatcagatgatttgtttgcgttacggcatctccacctaacatcaccttcatcatgcgcctatggtctttctcttgcctgttttatacgtaaaattggaaacgacagaaacttttgccatctttattaaaggaaggcaaatatgcaaatataggcatcaagatcacagttagtggattatcatctttgtaggttaacatgtcctaccccaggggagcttatactcaagtactccatgcattttcatgaaatgagaaaaaacgatttttaagagaaatgtactttcttgtatttatgccaaatggcaaggactgaaagggaaaaactaagaaagggaacgttacagtaaggctctgtggggactggggacttcagagaaacgtgaaccctgcttccttcctctgcatgaacataacaccagaggtttccagcctttcacacagttgttgatggcttcacacaattcatctctacctcctgactctttataaggacccccagcatcaccacaattgcacaagtacaggcattagatccacaagaacacttgggcaggcaagcacctctttgatctttaagccgttgttatgttctatttctgagcatatggtttctagttatattctttttcttcattcgtttcatatctttgaagtgttgatgcaaatgcggtgaacaactatcaactgtgtactctccaagtgaatgcgaataatcatttcctgtgagaattgtgggctagataaacgaatgaaatgctgttttatctatgtcatgtgtggaaatttagttaattttccggtctttttatgcattgagatgggtatgctgtttttttagttgggtcccatcatcttgagaattctttcaaatttccttttctttatcctatataaaggatagagaaggcgtatgcctaggtgcaccaaccctgaaagttttattctaattgcgggaatggtttgtaatttttgcttgttcaggttctttttcgtggcctttcttttttttccccttattttgcttagtctttcacagtccaatttttgggaagtagtatatcttagtttggtcctaaggcaccatgttgtactgcaggaaaaaaaagagtaattgtattctgttttttccttgattactatatccctgttttaattaattttgtgcctttgttgtttgatgttggaacttcaatgcccataattagtcatttgacttgttttgggttttgacgctatcttgagtgccataggaaactggtagaatttagtaataattttatatagactgaatgttgagcccaccacaaatggtttccttctgtacaagtatttaataactcaagcacaggaaacatcagatctctaatctaaaggttaacaatgggctcaagcaggagcagtagttcagctctatctgtatatttagaagggctggatctacctgtccaccagcttttaattttaccctggcagctggataacttcttgtctgttaatttcatttagtgctgtgttattttcttcttgttgttcaggatggatgcttttgaatttctggaatttcgtattttgttctatctctttatgaaatgacgttatggcacactttttctgcatattcttgatgaaaataattacctagtcatttttttagttgcaggtttgtctgggactttgagtac

SEQ ID NO: 2280 - DNA, 1161 bp, Oryza sativa
  N_region (3)..(3): n = any nucleotide
  N_region (12)..(12): n = any nucleotide
  N_region (15)..(15): n = any nucleotide
ggntgccgacgntancggcggaaaatgaggaagggaaaggcccgggacggcaccatagctagccttgccgcatgtgggttcaccgcggaagggcgcagccgccgccgccgtctccgggtgacgacttggaccatccacaacgaggtgccttccgacgccctcgccttccttgtcgtgccgtgcgaggtccccttccgtgaagtaagggtacggctagcagagaatgtcggtgcctctgctgccaccatcactgcagtcaggtacagcctcgcgcgacgaggacctgttggtgtcggtctccttcgatgaggagctcgcccacatgcgcgacgagtacgaccgtctcagggcaatgcatccgttcgcgagcttccagctgttcgtctccaccgctgttgcttatacctcctcccgtcgcgaggcgctcgaggtggcggagttcggccgggctcgacggcggcctctcccctctctgccgctgccggcctatcccctctttgctatcgctgaagagaagagaagagaagaagaaaagagaagagaggagaaaagaaagaagagacttatatgtgggttccataatttatttttttaattttgctgactagaataacatgtcagcgaaacccgaaaccagagatctatactgccgtggaatcgaaattgcacggttttatatagtttagggataaagatttctggttttggggtttcgggatgtcatacaaacttgtcgtaaagttgagggatgactgatgaacttgttccttcagttacacgcgcacgcatggtgatacggcccacgagagatcgggcccaatacaggcagcggcggccgaatgcagcagcgcccgtaacctcgtacgtatcgcctcgtgggaagcggccgaggccgcgcgcggcggcaaccacagcaaaccacaggtgtcgctcggcgtccgacacgagtcccgcatgcgccccacgcggcggctccagcacccgcctccacgccgccccatgcacggcgcctccccctataaaccccaccctcttctccctcctcaccgtcgtcagtccacttctcactagctcgtagacagtgctgcacgtgggttagctacttagctctttctctgcattgctggcttaattttgcagctgcaggtgtgctcgatcccc

SEQ ID NO: 2281 - DNA, 1031 bp, Oryza sativa
  N_region (7)..(7): n = any nucleotide
  N_region (16)..(16): n = any nucleotide
  N_region (114)..(114): n = any nucleotide
ttttttnggttttttngggggggggggtacccaggaatagcatgcaaaatttgcaatctcaatgtttctagttgatacttgtagcgttagttcgtcacacatgtattggactantggtagcaccatatgggacactagtaattattttttccagattcgtcacaattttgctaccaattaattaggctggtgatgacacatatagatatttgtgcttctgcaagcaagtaatctaagtacattttgagcatgtaaatcctcctggctggtgctattttccttttaaacgagtggacaaataacaagtgcagtattggcgcgattaaattgtgtgaggtaaattaaaaaaaaatctccacatttcatttttgtttatacttaccagtagcacattgttctccttactatacataaatatgtgaaccccttaattaagcccacaggacaatgtaggtttcttggccggcataaatagctaccagaaaaaagctgttaatccaaaattacaaagccatcatttccaaaatctttatccaaagaattcagttccaaatatgtctcattagtaatggatattaatccatcccattctcacactcaaagagatcaacagaagtgtgcacacaaccaaaagggcaagaaacgccactgcacgcagccaaaagttcagcaagcaaacacaccgagttcttgttgcacccggcgcccgaggacgtggtttgcgcctccgccgccggcgtgatcctgcgaaaccggcgtgtccgggctccaggagcccgcggcttcgtcgcggccgccatggcaaaaccgggggttcgctgttctttctttgcctgacgaaatgtgtcgtcaggtggtgcactcctcctcctcctgcttctgctgctgtctgaaaagcctataaattggaggatttgatggctgctttacacacaaatcatccatccatcgatcgatctcgcattcattagcttgaattagctagttggttagtgtgatagtgtgtgtcgatctggtgtgttttgatcgag

SEQ ID NO: 2282 - DNA, 2000 bp, Oryza sativa
ttgggaacctggacaaacgaactgagccttagaagcagtagcggcatgcacgacgatggatagaaaaggagaggagggatctagccacactgcttggatctgctcgtgagcaccgaagctcgttgctcacgccctcctcgggagttgccatggcatgggaaagagaggatgtccacggcgacgatgacgacgaagcagcgacagtagaatctcatcggctacacgcgcctagatccgctcgcttaccccgaagctcgctacgcctgtggcctcctcggcggccatcatggcataggaagaggggccttccacggcaatggcgaagcaacaacaacaaaagttcgctagtcatctgctcgccgtccctaaagcttactacccatgcatggcttcctctgcaactaccatggcacaggaagagggtagatgggaaaggacgccgagagagatgcagcctgcaggggacgagagaaagaggagagagttgagagaaaagaaagagagaaggagaaagaagtggagacaaggacatgtggggccccacatgttgactcaatctgtttgattaggtcaataagccacgtcaataaaaattatcctcaaaacgattgagtgattcagtttggactagttttaatagatagaggattaaaatatttgatgttatagttaagggaataagggatatgattcgcattggacctatattggaaggtgtcaatggacttgtttccacaggcaaatgtgcgtgcagccgcatggcccgagcacaaaactgagctagcgagcccattaagatcaccaacccagttattttcatccatcgcacttctagattggacggaacctatatatataccggtggtggttgataatttgacatgacgaagttaaccaccattaaagcatcatcaacatattgaaaaaaaatcttgccaaaaaagaaaaaaaacagacccacaatatattccatccatcctaaaatataacaacttatgattaaaaaccgaacatctataaaaatacatgtctcatgtctctaattgtcaggtatagctcgtcgataattttcattcgatgcaaattacattcatagttgttcataatacatttttatgaaagttattaaaggttaaattgtactgttggagatcgtgacattaacatgcactagaggaagtatatatgtacaagtaattatctttatcccttgcaacacgtgagtattatgatagttatattaaccatacgtattatctttgaaattgaaattttaggttcttgaattatatctaccatcatcttgtacacacatcaacgaccaaaatcatccatgttagatccaaaatggcatacatgggcgcgcataaataataaaaatatcacaaaattctccgtataccactttgtagtttttatatttttctggaaaaagagtgtccttatctgccgtcgtagaaagtaatcctagacgacacttcacttaatcacttgttttttgtgggtggtattctacctcaagagtcattcatgctcgagtgtacgtcatgccgtcatgacatcattcctcgttaattactcatcctctaatcactttcttctttggctgactcaaaaaagaaaaacttcttttcgattcttttaatttctctcacactttgcgtttccaatagagaatgaatggccaaacaaactaaagtgaaactcgtcaaaaagaataaaaaaacaaaaataaacaccccaaaaaagattgtactgttggagtacaacacgagatgagccaaacgtgagggaaaaataaaagaaaaaaaaagaaaaaaaagggtgaaaatgaaaaaacgccaaaggccgaaagacaaccgtccgctttagtttctcgtcgtctcctcatttcgcacaaaagaaaatttatttattcatttatttattgttcgctccaaatgccaccgcttcgccttcgccttcgattcgccttctcccccccgaatccaaaccctctc

SEQ ID NO: 2283 - DNA, 2000 bp, Oryza sativa
  N_region (1326)..(1326): n = any nucleotide
agtacacagatgaatgtagcctcatcttctgtactacggctgtactactgcatttgggttgtctaaattcaatgggagacaaggctacgtgtagcccatggacgttcctggagtagcatcttttgattcagaaataaaatagcactccattattcgtactgaaaagaagtagtggcaacattttctaattctgaagattcagtttgtttccacttaaatgaatgggtcattttatatagattattagtaaaagtactaaaagtaagttattcacaaaagtcaaattttgtgttttatgatttttcaaccagccaaagaacattgaacattctaaaatttatgcaaattttggtgaaagaatagaacattcttctgccggtccatgcaacttttccatggtaaaaaaaacccatatcgaacttatttcattatagtataccataataactctgtaaggctacaactgcatactatgcctttccatgtgagaagcataggactatacaggtggcatagtttagtacagtgcccttccaagtttcatgtgacaagagatagcaatcactactgcagttactgcacaacttctgatttgttgagtcatcattatgtgttaacccttcacagaattttaagctttgaaagaaataggtgcttgatgatcttctaagcattcatattttcttgacctactaaaattcatttgtctgtttttcccaaatcaagggattttatgcgtaaaaacttccccacaaaattcagttgaatggtgtgtagatcaagtaaagctgttgggcgttagctgagtgtgggatcttgctgacacattttattgtttagataatgaaaatcttttatatcctcggtctcaatcatcagacacactaccaaatttagctgacacacttgctttccaatttcatatgactaatgttttatctatgcaacattttctctacctgactaaaatgcatctgatagcaaacaattcgcttgttttaaggcgtcaagaaatcacaaaacaagaacaattaaagggccaaaaaatggccaaaagcagacaaaaaatagcacaataattaatctcgtcagtttagcacctctaatcttgcaaaataccttcagtgaaggatctcttttcagtttagttctgacattgttatgccaaaaagctctaaggtacaattttttcttcctaacaaactcttacaaacgctgacgtggcatactaaaacctttaactcgtcttaaggcgtcaagcaatcccaaaaaaactgtcagaagattgcacttaattagtcatcagaaatcaaaatcttgcaaaangcacaacgaacacatctcctttctgttgaggtgacactgaactttacgctctgaaaactgaaagcgcataacaaaatcgccttttaatcatcacgaattgtcctaattcagcttgcgtgttaataatctcttaccagatttcaacacgaagggtaataatcttgtcgccatgtaccaaccctcgcaacattttgccgcgcttttgcgtgggcgatgcgccaacttcccacgctataaataggcagccagttgaaccgagtgatctcatcttcatctcgcagcagagttggagactttgagctctcaactgaaccccaatctgcgaggtagcattgttcttctcatcgcctcctagctagctagcaaattatttgatttctgtagttatagaggctttttagcgtcattcgtatcctgcttaatgctccaaagaagtcaaattcgtgagattttggggatttgctattcggataggggggataaaaatcataaaactatataaaagtctcgtgtttgagtcagagtagtagtagccaagaaaccaagaggtcaaacagcgaaatctcgcggtgtttcgagtaggattttgatcttgagataacccgccctgattaattaatcggttaattggtgtcgtgtttgatctcaaaagcgcaggtgggagaaggaggagg

SEQ ID NO: 2284 - DNA, 2000 bp, Oryza sativa
aaaaacggatttattataagatttcataatcaataaaaatatattaaaaaagaatcaataaaaatctgttgaaaaaagaggagaaaaaatttgaaggcaaatatgatttgacacgaaggaggcaaagtagacttattttaagagagacccatagacacagtaaaagtaataaatggtgttaaatggagaggaaagtgggaatcaaaccctggtggccgaaatgaaaacttagatagattgctacacgtgagaggtaattacatggaagatacatataccatatcaaacgtggttttggggtagataaaaaaaaaccccggtccgactgttaaccggattaaatccggattttagcgacgcgtgtggtatgacggacaaaaaaacatccagaaatcaaacgtattttttaattattaggtatatagactagaaaaaatgtccgtgcgttgcaacgggtaaagtctattttaatcttaatattgttatatggtttagttaatatgaaattcactgtgggagttcgcttggatatatatattttttgaaaatcatgagctgcagttaggagtccgatcgtctcaagttagcatgagagtttttttaaaacaaatttcttatatgattccttttgtattactaaaagtgaacgattttaaaaaccgactcaaatacgaatatgtatttccgaaaccaaacgaacctaaaaactgactcatacacggataacgtaccgacataaacatcttcaatttttataatagcagagatatagatttcttacacattagtcatcagtctactattgaataatcagataaatcaagtattttaagtaggaacaaaaatttttatgaaaattcgtgtataagtagtaccattttgaccgtttccgattttagcccgtaaataaaattcgattttctttctattcctttagcacataatacaacctacagtaaatagttaaattggtaaatatataaaaaaatccattttaactcacttaaactattttgataaagcgtttaaccccctaaataatttttcatcctgttttatacccccacccccgaactattgaaagtggttccgcttattttctaacagcatttcttttttttatctctctcgtataagttatatacgtttgttcgactaccaatcttcgttgttaactttctcaatattcgtgccgtgtattattacgccaataccgtaaactagcgactatggtttgtgtgtgttgtatcattacctaattagagctagctctgccaccactgccattctacctgtattttaaacctgcatccgcaactggcacgccatcgcctgacggctggactggagtcgtgaagcgaaccggatttgttctcacgtggatatggtgcagcgctgcacaccgcgaagcttccactggcaggtggtccccggctgtcagccagttctacggccgtcgaagaaacgttccgaggtttgtttagcacgccggtttccgttcgtgcgtggggacgtgggggttttgccccactttccaaaaccacctattcctccgcgcgtgcaccccgagccgttaacgtcaccgacacgcgggccccgcgaaacgggtgaccccgcatggcagacaaagtaactcgcttctggagaggtggggccctcggtcgaggttcccgtagcggacgacggggaggggaagagaagagaagaaacggctactcctccccgcgcgccgcgcgcggctgcgttggttttggggttttggagcgttgcggattgccacggcgcacgccaccggtggcgcacgctttacaggtggctcccccgccgtctcccccgcgtgccctcctcgccgtcgtcgctcgctgcccatttcatcccccgcacggcacgcgcgggacgaaagcaaagcacgcgcacacactcaaacccgcgcctcctccgctctcgtccgtcgcttcggttcggttccggctcgatcggggaggttcctcggggcgacc

SEQ ID NO: 2285 - DNA, 2000 bp, Oryza sativa
gggaagagaaaaacttggcatcctcttcttcccgcttgcttaagtgcaaccatcgcggttaagtacagtgctcgacaaggcacctatttacgtaggacgttgcacacacgtatgatatcgccgtcttgtaagctttatacaagagagagcgcgcacgcattgaccaactttcaatccccggtcttcttcgcggctaggaagatttttctttcttaacaacacgccgtgaagttctatattatagagcaataagaaaaataatcttctaaacgacgtctttgaaaaggatacgatattgagaatgctgccaccacacgtattagggtgacaggatgtggttttcatctaaaaaaatccattagagggtaggaaagatcactcaacaacgcctcaagagaaaagctgtaggtgcccgtgagcgtcggcgttgctggcccgaagagactaggctttcacctgtaaccctcctaccccttgtgtcgagatcgcttactgtacacagaagccaccatcaactacactccttcgatgcacagacactgcgccagcacctcaccaccagccgaccatcaaatagaagctcgacattcgacgcgttcaaatccatcaagataagtagaagagggagagggtgagagaaaaatagaaccctctccctcgcactagttttcaaacgtggtcattttgtgatgccaaggcaccgcctcaagagaactagcgtcttgatcgggactcaccataggcctgcaacgtccacgtcacggcgctattgtcatagccaccttgactagactgcacgtgtcatcataggccgtctgtctacatcgccgtcacctcgacctattgctccttagcgccactggaactacagccagagcaccgtctgccactctagctcagttgccgttggttgcggcctcccgtcgcccacgcctcaccactctcaacgccgtcaccgcatcggcctcttaccgttgatgggtgtgccaacctctacgcatgtaggaagatcgaccaaatcttctgttaatatagtagtagtgactgatatgtgaatccgaatccatatgttagtatgtactattgtaccaataatactgcagataatccctaccaatttttcagtgttcgagaattgaaaccggaaaggaggacaagcgaccagaggtgatggcgcagagccaacaagtggaagataacctgctgatcgatcgatcaccgggcggtgttaggttgcctcgttgaaaagcttctggaatttgtactgtctagtccatctggcgtgtactttagaccggccttttcccctgtctcgatggttccgtgatactactaataatccaacatgctaatctctatcagtacaaagattaacgcgtcactaaaaaggccagctcattcaagatgagcatcccgttgtcttatcaatcgatcggttcatcctttgccgtgcatatccgtcaggtactagatcttgttctctctttctttcttcttttctttccattattccatacaattaagcagagaaaattgtctcgacatccaaaagcttaaactaaccacgaatacggacagcaagtagtagtaacattcaagtcccattttttgatcaggtggttgccgaaaagcgaactgaagttggcacaaaagtactactcctatgtacgccactgactcatcgtgactgaggacaagacaaaccgtacgcgcatcatcccccaaatcccgagattttcacagcgaaagtcagcacatcaaagaggcacgcagcccacacacacaccagtacaccacaccaaccttcccggagcctccccttcaatgcctcgcctctgcctatataggcaggagcaaagctactgggtgacacacaaaccattgatagcctgtgcgtctccaagaagaggcttgccgctgccgccattggagccctctcgtttctgctcgagctctgcatttcttcagtaggaggaggaggaggaagagttggagtcgcc

SEQ ID NO: 2286 - DNA, 2000 bp, Oryza sativa
atggggactaatacccctgatactcaagagatttttcgcttcttggcatcctttcacatgatagcaatatcagctgtttataacaagttaggtaccctaggaagttgtagagatgtaatgccatctccctagaaaacttatttttatttttgcccttctgcaggctactccaggggatccagttgtggacaagtatatatccatggggcttggacgtgaagctgtctcatttgctgtgttgaactatggagataatccagcgaaggcatgctttttcccttatttatcttgtgatttatcattaccttctttcaacatatcatcaagaacaaaaaccattgctttgataactcaaaaaggttttcaaaggtcaacaagatagctatatacaatcagtatttgcagaagcactagggtttcttcttctagcaaaacagtgattgccattctgtccagttggtagtttttgtggaattcgattttctacttctcagggagatagaagtgtcttctgccattctaatcgccacgagcatttgtagacagtggaaaaaaaagagagagaaactgacaaggatgaatcctatgtacttgcaggtgaaggagtttgtgaaatcctacaacgctctccacgagatgggcttcacatcctcaaatgttcccgaactgctggccatccacgacaacgaccctgacaaagttatccagcacctgatcggcacatcatagtccagaacaaaactctccacatattcccccatgtataggtccatcttacgctggcaagcgccatacatgtcgcgtttttaatgatggtttcgagtgctagctattgtacgcgtatttccgctacgagtttcatgaactgactattgttgtgcttcccaagcggtttcataaacttaaccttgctttttgtgtcggatatatagagccagtaggtgatgattctgattgctgaaactttggttgctatacgtttgctactcctttttggtcgattcagcaatttcttcccgccgttgttcagtaagctccgaacgctgtgtgctgcacagcagcagccagattcctgtggcaatttgctggctggagctcactactggatagttcatgtccgtggatgacggttggttgtcacttgacatggtggcaaaatcactcgttcaataacgtgacgaacaacttccagatggtaagtaaacacgctaacaattactacctcagtcccaaaataaatgcagccatagttttccacgcccaactttaaccgttcatcttatttaaattttttttaaaaataatttaaaacataagtcataagtaaaatactgttcatattttatcatctcagaacaacaaaaatgctaattataaaaaaaattcaaataagacgaatgatcaaaattgagtgcgaaaactcatgactacacttatttttggacggaggtagtgcacctttttgcatgcctaaagcactggtttgggcatactccgtatgaaacaagcatatgtactgtggtgctgcagacaagtccagaatatgtgtcggccggtgactgttccatccacacactaagggcctaaatgtcattgaagaacttatcgtttgatctagaatcgaggatcactgttcaccacgctatcttttttctgctgaggatgagctttgcatcactggacagcaacaacgagcatgaacaagaacaaacaccacaatccatccccatctccttctctcccccataacgaaatcgttgcaatgctgtctcaatttctctcattaaaagaaaacaaaatcgttgcaatgccgtctcaatttctctcagaaaaagggaaaaaagaaaagaaaagaaaaaagaaaattacatttccagcccaacaccacgatctcccatctccttcctctctcccgctataaaacgacggcatgtcgcgccgtctcccgcctatcgccgatcgaagcttacgagctatctgctcttctctctctctccgcc

SEQ ID NO: 2287 - DNA, 2000 bp, Oryza sativa
  N_region (22)..(22): n = any nucleotide
  N_region (877)..(878): n = any nucleotide
  N_region (931)..(931): n = any nucleotide
  N_region (983)..(983): n = any nucleotide
  N_region (1725)..(1725): n = any nucleotide
  N_region (1734)..(1734): n = any nucleotide
  N_region (1788)..(1788): n = any nucleotide
cttgttacaagaaaaaaaaatncttcgcaacacaaagcaaagatgccccacaattatttctttttttttggatggattataccctactgtcagcaccatttttatttagagatgatctataaaactttctaggtacatatgccactgtactccctccgtttcataggtttagatgtttttgttgtgtactaagtcaaatttcattaagtttgatcattttttttttggaaaaaatatagtgtaaagcctggcccaccattgataggccacccaagttatctttgacctgtttcattacaggctcaaccggagtcataacttatctttgacctatatatccaagagaccgtttgatggataaagattaccttatattttacacagttctccccatagttaatttaagatggagactaaccacaaaacatatatatttcctccgttccgaaatattcaacacttggttattttacacggtcatgagagccatatttcttaccatgatctttttttagcagagcaagaaatatatatttttatccgagtttggacgggtgtattttatttctaagaatgacaatgcaatttcatagcgtcccattagcatactatcttctaggggatgcgatgtagttacaagctcacgagccaagggactatgtcagttactggtttgctatatatctttcaacagatttcatctttaaaatcagacggaattttcaccattgattttacgtataagatccttgcttttctcgtttgatcacaaacagactgcaactgatagagagccatgtcatgtcctggcgtgcgtgcagcaaccagagcagggccaatcaggctggcaactggttaataagtgagacccagctgnnacagttacgtaataaaatgatccagcaaattaaagtatgcaatatgcctattnggtattataggtatacatgagcttaatgacgttattagaaaaataaattgangccacatttcaaattacagtgtaatgagaatgttgtaagttattttaagctacgatgtaatttatataaaattacattgtaccttgttaatatgcttgtaactttttaaatctagaaattttaaaacaaaattcaattatattgtattttctaactaagatacttgtgtacgtctttatcctcttagtgagctttatattgttctaatagccaagtgtagggtggttttaaaaatccatgtgattttcccttgaaaatttcttgacaaaacaatacctagcaaaaaacgattttactattccgcttacaatagattttgggttaagtttcagtcgtagaatcttctagatgtgttattgcagaccgaacttatggttaaactcaattagtacaaaacaccaaaaataaagtttactactattttttctctatatttatgacattttaaatgtttatcatttttaatattttatttaaaatagactatgtttatttattagaattgtgttaagatttgaactccaaacctttcgacagtttaaaagaaatatatatccgaggctgtttgtttccagtcgagtcaagtcaccagccgcatccatgcctaacctaaccacctggcagaacgcctgttctactcgacgtcgcccacgcacacgcccgacgcgcagaatctccgccgaagcccacgtccgcactcatcctcatccaggtggaaagcaaaccggcttcatgccgctcnacccccatnccagcacacgcgcatgcacgcgtcggctccccacgttctcacgcgtcgcgcatncaccccgctcacacgtgccccctcgacgtgtcgcgctcgcgccgcgcgcgcctcgcctataagtccaacgcttgcctcgttctcctcctcgctcacccaccacaccgatcatttccaactgaaacagttgatcaactcatcgcctctcgagcaggcgagcacacacaacacgcagtgatcgagtcgggctcgagcgacgtcgtacgctgaga

SEQ ID NO: 2288 - DNA, 2000 bp, Oryza sativa
  N_region (788)..(788): n = any nucleotide
ctcggcgagcgacatgttcggaacggagcagaatgaatagtgtgctacctaatgattacattattcgagtagcaccttaagatcttaaatttaaccgatttggctatatctcactcgaaagatttttttcttatctcactcgattttctcactcaaatttacagggtattttcttgtaaattacagtgtaacttatgaaacttacattgtaatttttgtaagttgcagtgtaattttttaatctttgcatgtaagttttaaaatttatattggatttggtctttttcttgaagatatggtaatttattgtccattatggtgtttcttagttgctttttatcttttactgtgtctattggattttaatccaaaaattaaaaatctgtgtgatatggtcataaaaatcttttgaaagatgcataggtactcccaatttaattcttcatccgagcgaattttaaggcttagttaaagaaaaaaaaacttactaataaaggcccaccaataaaaccacgcgcgatcggaataagttcacttcgtcacccttaactgtgatcgaaatctaatccatgaccctaaaccacaaaaccagatatatcgacccccaaacttatgggcgccggcaactagcaaggagaggatggcacggaggaaggcccgcccgccgccgtcgtcgccgcctccgctcgggcctccctggcgcccatcgctatcgcctctgctcgatcctcctctggcaccaccgccgctcgagtcgggtggccgccgccgttttgggatgccccgtngcccggcgtcgtcgcctctgctcgagccgagcggcctccgcccatgaggcgcgcggcgaggctaggtgtgcgcggcgtgttggcctcggagggtggcgcggacggcctgggccgcgcgagagcgccagaggccggctcgatctggacgccgatctggatgtcgccgcggaggaggttggcgtcgaggtcgaggctgttgcgtggcgcctggaggcctccgtcgtttgtgccgccccgtcgcccgacgccgtcacctccgctcgacctgcctctagcgccgccgccgctctagccgggtggccgccgccgtttggcctccccgttgcccggcgccatcgcccatcaccgcctgtgggagacgtaggggaagaaggggggagagagagaagggagaaagggaggaggaagaaggaaggaggatgacatgtggggtccacatgtcagtgggacccacaattttttttatgtgtgtgaatgacaaacgggtcccacaattgtaatgccatgtaagtgccacgtcaacgccacgtggatcgaagactcggtcaatattgccacgtaggcgccacgtaagcaaaaccgcctcccaaaaccgcgcagggagtcaaattgcaccggttttagaagtttgggggtcgagatatctggttttgtggtttagggtcatggattagatttcgaccacagttgagggtcatgaagtgaacttattcccgcgcgatcaaacgtgttaaggatccacgttgcggcccataaaggcccagatgtctctactatttcttcttctagtgagctccatcgaagcttttaggcgaggcctaccgctgtggctaagcggcggcgtgtgccagcccaacccccgacgacgacgacgcgtggcgacggccgccgcgacacccgccgccacgtcgccccgccacgcgccgccccccggcgagctcctcctcctcttttataatcccagcctcgtctcccccgcgatgaccacccccctcgccgcgccacgtacgccgcatcgcatgcgcgcgctttccctcgccagagcaagtagcccgccgcctcttcttcttcacctccgacgagcccttgcacccgcgtcgtcgtcttctccggcgccggtgctgttgctgcgtcctgcggtttcttgttcttctttgtttgttagcgacagggcggcggcggctcgccggagcagcggcagcagcaggagaa

SEQ ID NO: 2289 - DNA, 2000 bp, Oryza sativa
aaaatcttctatattttataacggagataatatccgtgatcttccacttataaggacaagcttggaaggcatttttatagcttcgacttataagtcgcatgatcatgatatagcgcacaaaattaggttatcatttattttaattacgtgcatgggtgggaagagtaataatgtcccccggcgatactatggtgtatgatctgctatacatgatggccaagccaccaaggactcaacagcttataattgtgacgataaaatgaacgaccagatattctttctctaacgcaaagggacatttttttgaaggatttcaatgagaatatagaacctaaaccggatgaaaattctatgctgtcacgttaatatatcgtttacacatgcctccctatcatgccctatcttcactttagttcttttttaaaaaagatattcagaagacactctctacatttcttctctccctagtcttaatattttctttagaaaaaaaatacatgagagatgcacgcacaccctaaactataaatcgaactgtcgctaatccctgatctcataacgttatatataagaaatcgtttaatgatcagttgatcactactcgatcggttcttgcgctctccaactgaattgatttagcagattgaaaatggcgctctagctacatcttactgtgtgtgtcaccatctgatcgatcatgcccttttgcactatgtttttatttgctgaatagatgaatggttgagtgattttgtgattactattaaggtacaaatgaatgaactaagtaatacaaagttgaaaaatgaacacataatagttttttaaaaattcatatatatatatataagtgtttttaaaaaataacaccatttagaagcttagatagtgtgtcatattaatccaccatgtatctccttagttagtctccttacggagtaataataattagatatatggctgtacgttccacaacttctgccaaaattgaacggagcatgtacaggtcatgaaaactacgggggtgaactttaaatgtactttctccgtttcacaatgtaagttattctagcatttctcatattcatatttatgttaatgaatttagatagatatatatatttagattcattaacatcaatataaatgtgggaaatgctagacttacattgtgaaacggagggagtattataacgacttcggtctggtcaaatctttacaaactgtgccttggcggttcgctctggagtcacatataatgcctgctattggcgtgtgctgggatgctttgaagatagagtttgctgcttacgtacatagccccaaagtccaaacttagtgccagatatatcggcaggacgatgaactagttgcggaaacgacgtgacatacctaacaaaatttcggagttaggagcgatccaaccggatataccgcccaatcagcaccgatttctatagcacgattggccagttgcaacttgcaacgagccaacgacgtccactatcttgacctcatcccgtcgactccatgccaatatgccatggcactatggcagcatctatctagctaggtcagatgttcacccttgcagctgcagttgaggatgctgcggcccagttgagtgtttggcaaaaagtgaaaaagggcctggatattcggcctgctaaagaaaccgttctccgagcccatacgtgacaggccttacatgtgtgggccgtgcaacctgctgcttgctcggcccgaaccggccggagacatcctcaccgatgacgatgacgatgagcaatgagcagggaaagccagaggcaaacgtacgtggaggcaggaggagtggtcaccgcgtgcatgcgcgccacctccccggtctgccgactctggcggctgcgcccgcacgcacaaatgggagctcgtgggctccaggaaagaccgaacactgcactgcacaacacaagcgtcgtcttcaggccgtacgtgacaaacctcagcaggcgagtgtc

SEQ ID NO: 2290 - DNA, 2000 bp, Oryza sativa
tctagtggttgtccatgactgcgggtccattatatacgttggttttcttataaactatatgtacagtaacaatcacgataatttaatatatgtggtctcttagtttatgtgtgtgtacggtgtgtgtatttatttgtttctttgcatctccataatcatggttattttgaatggtttgtttttcaggctaccgtgttcctgcttccctcgcttaatgcttatgtgtcctgccagttgcattatcacggataactgatcatatgccattttatggcttcagtcataatatattgttttactaagtttgtctacatgataaagagatacacatggatctctcctaaataaagtcatcattgatgtccacatgcattattatgtatgttaatttacaagtgataaaacacatactactactacacccaagatgtggtatagctcaaacacaccccaacgtagtaatttttctagtgagagaacaatcatatatagcaaaatatcctattgagcctggcgataataactcatagtaataattttattatgtaagaagtttgtttttagttatcacacacactgggtgcatcttaatgctatatatttatttggccacacaaaagtagttcttcctctaatgcctttcattctcaactttcatcatttatttgtcctttttgttaggttccgtcaacctaatatgggtgaaaagacagttttctattaatatgttttaatgcaagatctgtgatttttatattttcttttgagttacaatttttatactagcttattatgcatgatggtcgaatatctctcatgaaccataatattattttagtaatcaagtgtgatgcaaaatcctttaaatttagtatattacataataaaataattttctcaatttctacttcttagcttataggctgtgcgcatatagaatttgaattttagaagttttaaagttgattttggttttttatcatatttatttttagcactgacttttgaatagctaaaattgaaaaacttatcgtaaaaaatattaataatgggtggctccgttaattccggatgcatcttaacatttactgtaaaaatataacctatggtttacttatatttaatcaacaatatttattgttaaaaagtaatagacaagagaaaaacaatcttttcttccatctattaacattatgttaatggacaactaacggaaagggcaaataagatatcaaatttaagaataagtgtataagaggggaagccaattttgtgagaataaataaggaaccgatcaagtctagaggacacataaagaattttctcatcatggtgttcatataactagcccgttgaactgtgagattgaatacttttgggatagtgaaagaatatttgacttaatatttttcttgaacactacaatctgctatttgtttcacatataaaaaagtgaatattgcatcctcaataaatgatctaacataaggtacataaatatctaaatctttctctattaatgggtcatacatggatgcatatatcttagtaaatatctaaatctttctctattaatgtgtggattcatacatggatgcatatatcttcaataagtgagtagtaaatatctaaatctttctctattaatgtgtggattcatacatggatgcatatatcttcaataaatgagtagcaaatgtttaaatcttttctttattaatgtgtgggttcaacatgcatggatgcatatatctttaataaatgagccaattaaatatgaggtgcacaaatatccaaatctttgcatgcataggctctctcttcaccattgattttacatccaatggatacaattcgagcaacatgtcaacttttcccctcgatggccttatataaacccaactatccccaactagaagatacacaccacaacaatatagccactgtattgatatcaagaaaaaggtctatcctagctgctttatactaaagcaatagcc

SEQ ID NO: 2291 - DNA, 2000 bp, Oryza sativa
gaccttcccctcaacatctcacgtgagatgctccagcagaacaagatcctgaaggtgatccgcaagaaccttgtgaagaagtgcgtggagctcttctttgagatcgctgagaacaaggaagactacaacaagttctacgaggctttctccaagaatctcaagcttggcatccatgaggattccaccaacaggaccaagattgctgagctcctgaggtatcactccaccaagagtggtgatgagttgaccagcctcaaggactacgtaacccggatgaaggagggccagagtgagatctattacatcactggtgagagcaagaaggctgttgagaactcccccttcctcgagaagctgaagaagaagggttatgaggtcctgtacatggttgatgccattgatgagtacgctgttggtcagcttaaggagtttgaaggcaagaagctcgtctctgccaccaaggaaggtctgaagcttgatgagagtgaggacgagaagaagcggcaggaggaactcaaggagaagttcgagggtctgtgcaaggtgatcaaggaggtgctcggtgacaaggtggagaaggttgttgtctctgaccgtgtggtggactctccctgctgtctagtcactggggagtatggctggactgctaacatggagaggatcatgaaggcccaggctctgagggactccagcatggccggctacatgtctagcaagaagaccatggagatcaacccggagaatgccatcatggacgagctccgcaagcgtgccgatgcggacaagaatgacaagtccgtgaaggacctggtgatgctgctcttcgagactgccctgctgacctccggtttcagcttggaggaccccaacaccttcggcaccaggatccaccgcatgctcaagctcggcctgagcatcgacgaggacgagtccgccgaggctgacgccgacatgccgccgctggaggacgacgccggcgagagcaagatggaggaggtcgactaaacgtcatggacccatggatgccattctgtcccttctagttatccctctcctagttctcttctcatagctatctgactgctgctgttcgctttctttttggtacgttggatgcatcagttttgtctttgtcttagctcttaaacaatgcgtggtaccttgtcatactgtttgcgttgcaatgctactagccgaagtatatgccagcttcttattcatacttataacgtctttttttatcaaattatgttggctgaatcccttggagtgtgccaatttccatcttgaacttgagtattccaagtagctgttgtgagcagcccgaccagtattctggaacttcttcctaataagcctggttgctgcaaattgatggaatgatggaccattgtttgcccgcagtatgctggaacttcttccatctgttattgtatggctagatagtggatggtaagcttagtatgcctggttgctgcaaattgatggaatgatggaccatttttagcctgcagtattcttgaacttcaatttgttagtacaaggctatttagtttgaatgagtgatggaatgtttgttcactgttgatgcctgcaagatagaatgcctcgaatgtcttcttgctttgatcaattaaccatctgcagggaatttcgttgtttcaatcatctttggtcgacctcgagagctttctgtttccgtttcaatcatcttttcgttgtttcaatcatctttggtcgacctcgagtactacttagtagtagtggaccagtaatttctgcccctccgctctagcacaaacccaactgacgaactgatccgccggttgagagatggagcacatatgcgtttttgcgttgtgaggacatcgtgaggtacgtgtcggctgatctgctggctgagctcacgtgcatctgtatcggatcggaggcagaggttagaggtacgtgtcgattgcccgtcgtgagtacttcctctgcttgacacctggtgcactgcc

SEQ ID NO: 2292 - DNA, 2000 bp, Oryza sativa
  N_region (60)..(60): n = any nucleotide
  N_region (1844)..(1844): n = any nucleotide
ggtgggcgtgatggagttgggtcggccggggtgtccggttgtccagctgccggattcacngcggcgcaagaggggaccgcccactgccttttgaggggtgggggtgaaaccttagcgtggtgtggatggttaggggagggttatgtggagggtcttgtcacgatttccccctttgcagtatcatggtgatacttcggggcatggcgacatgtgtggaatcgtgtcttgtgggtacagttgtacacctctggccagagtaaaactattcgaatagccgtgcccgcggttatgggcgatcaaccagattcaccgtgattagtctcacccctagtttagcttaatgaacgggtgtagttcaggtggttggttgggcctgttgcaacgtggtgtagcgttggacagtgtttggttaatattgattaattactacaactgttttactgctttcaactactgcttttaaatgctagctttatgcaaaagaacccctagcctcctttggttatatcctgcatcatacctcctcttccggtatgacttgctgagtacagtgggtagtactcagtcttgctctcttttctcccacaccagagctgaagatcttcctagttggagctgttttgtcaaagttggtttcgtcgctgccgtcaaggattgcctgtggagtggagtcgcccgctgctgaagtcaagcttcccggtttagctcgcttttatcttttccgcagcatttgtaatcttttctatttttgtaagacgtggatctgtatgtcaacaattgtcgtttgtgtaccctggctggtcctggatagggatttaatgcacattcagcttagaaattctagttcgagaatttctgggcgtgacaccgcggggtggtcgtcgtcgtcgcgcccgacctcgccgccaccgcgctggatccaccgcgcctgacctcgctgctgccgcttgccgccgtcgtcgtcgccgcggggaggtcgtcgtcgccgctgtcgacgggtggtaccgcgactacggtatttggatggtatagggatcgtcgataccaagggtatatgcgagattgaggtaaaagagatggagacatggatttttatacaggttcaggcaccttatctaacaggtaatagccctacatcctattggccggaaccggtgttgctctttatttatctggatcacacaagtagaatatttgggaaaacctatctagttgtcgtcaacttggtggcagggataaccaacacgtagtcaacgacagggtagtcttcctcctcgagcatgaactcgtcgagatcagagatagcgctagatccctctagccggcctccgtaggcaccggatgcggtatgtctaggctaatctctgatgtcgagatctggcggtgtgtgttggcttatgtatatgttgtgtcttgttggtcttgtggcttgctttttctcctcctggggggcttgtatttatacccataggtgtccccttgtccaagaagaactagggagaccaatatggatacaatccaggtagtccttgtcattttcatatagaactctatttgtccttccttatccgaatctccttctatatacgaggtatgattccgtataagatatggtatgtggtgggccttgtcgtgcttagtcaactactattaggtatgtggtatccataacactaacagccccgcccgtgtgttggtatttcttaacgacattactagaaatataattcccagcaatggcccagaaatactcctggtatattatggttacagagttcatccacaagcgcatggatataccattgtagcatttcacccgagaatattccaagggtatcgtattnattttatcccgtgggaagataatgtagagagaacttgactaataatttatatattacttgtgataatcatattctaagcaggggttaagataatccaagggtagagtgacacacaagcattaactactcattctcataataaatcatctaaacaca

SEQ ID NO: 2293 - DNA, 2000 bp, Oryza sativa
tattaatttgctaattcaagtgatgttttttttataagattagggtgaagattaggccggggacgcaggaattttacaggaatttcacatgtaatagttcaaccatagtaggaactagaaacatgaaaatttgtgggttgcaaacaaagttccatctacatcatcgtgcatgtatcgagccaaaggcaggatctacctatacccatgtaagtccctctagtttctgtgatttcctccatccagaaagacttgatttctagcatttataatttgttaaaaaaagatttggtttcttttgtttttgtggggaaaaatacttgatttatagcccctagcttacctaccatcggtctataaatcatgaagttttattccttcagtaccccttatactaatgccatttttctattagtgagcggcacttttgtttttcccccttaacaactaaaatacttgggattactaggactcaagttttttggggaataaagggagtgctatatatgccttgaactatttcggtttatcttttattgtgtttcactatttatttgtatgtggtatggtctctttgttaagctagcaagttccatgagtttatatatcaatgtacaatttggagtggtatatttgattagcccgttttccttaggcaccgcttgttagctaactgctaacatacaaaagtaattaagtatgtataacattgaaaagatggcgagtcatgagagagagcaatgtggcaaacaaactctatactaacattcaaaagtaaagtactaacatacaaagcttgttagcttgtagctgatgaatagcatacaaaagtaataaagtattaagtacatggagtataaagttatgtagctaggaccacaaacaacacatgatctatgcatggtatgcatgcaaaccatgcacttactgcaagcaagtaggccaggacatcatggtttattattaactaggtcattagacaattgcttgcgttacacaatgtatagaagaaatgtaggatattaagctaaaatacaaaattctccagcaggaaaggcgccgaaagtatacttagtttgctagcaatggatcgagtacttatctactgatctagtcatcgatccatgcatccatccatcatttaaccacgtagcatgtattggctggaatcaagctatcacatatatgcgtgaatctaaagcaaaacaaactcctcgatatatcttgcatacatctggagctaaccgtccattgattagctagctaacttagagatagattagcatgtatgacacatcaaattgaaatcatgatgcatatgcatggtataggagaggacaaataaatatatggttcaattaacaagcaagtcaatttgtgacatgattgatacgttacgcaaataaactacaatactttatcttggttgtctttagcataagaagtgtggaatgcatggtttagccttgtgagccccacatatataaagcttgttgtttcactagaaaagatacacgctaggctaaaagatttcaccaaaccaacaagaaactaataaacctttttttctctttcttcaactttctttcgtctcccttctcaacaacacagatgtcatagaaaccagaatcttttgggcctatataaaccaccccaccttgcatagtatgttcatccttgtgtcatattgtgttcatcttcatactaccaaccaattagtgctaataggtagcattttctgcagttgcagctcaagtaaggtaatgcacctactagcttattattcttgtgcctagtattaattagtttctatactggtacttgtgaaaatttgtgatttgagcgatgctatttgatttgtaattaagctagctatctcttttttcttggaccgcaatgtaacatcgtgttgctaacttttaaactataaaagtaagataaagaagtaacaaaagtgtgtgcttgctatgtaggtctattattcggagcaacaaagggaagga

SEQ ID NO: 2294 - DNA, 2000 bp, Oryza sativa
gcataccgcattagcactgaatgttatcttaacatgttatcccaaatagtcccttctactcaaagacatgtacatgttcttgcccaaaagtgatgatttttcactagcatatattcttttcggttactttccagcgattttgccacccttttgcatgggtaagttggcagtattttatcatggctaatatactaacctttacccctttactgccatgtgcaccctaagattcctatcttattctacctcacttgctagtttccttaaacaaaaaaaacttccctgatgcatatgatgagttcacaagcagtaataagagtttgccggctcttgtattttattactatttttatggtttcttcagaaagttaggcatgtgatgtgaacatgctcttttcaacttagcaaaactgtacagtaatctaaatcttgacaatactggttaattcactgattgcttctacagctgtattttccccagtagggtcttcttttctaatgtcctgattagtgttcacaacgtgacccaccttgcaattgtttagtactctactaatctactgtgaattactgtggaggaagttagtgcagtgccttgtacagtgcttcaggctacaccccctacatagacctgcctaaaagtttgtttctttgtccatgtgcagcagcacaatatcttgtcggatcgctgttgtactcagtaatacgctaaatactactagcagggaaatgtttaatggtttgctagatgaaatgatgcatcatatacagcacagagaggaacatgacaacagggatagtatatgtgcagttatctgtggcagtctgctactgtaacagatctgataaaatcaggtgaagatgattgtgtagggtaaataaaagaaggatattctgaaggaaatcattagcaggtcatcagtcccaacaaggttggattaccaagagcacagagcatgtttcacctgcatcactgctgtatctgtatgatgttaaattgttagcttttctagaaagtcagacttctgaatcttccattgccaagatgtaaagccatgcagtaacaaaacgaaacaaaacacagtgagttgagcatagttaaggagtttaatttctcaaaaagtactactcaatgtaccggactactggagggtaggcttgacaaagcttagttcagctacaagtttgacataattgccaaattactatctagtactaggaatattttaattacaattctgcagtaaaacaaatttggagtatttatttcgcaagatggtctgaacctctgcagagcagcagaaacatttcagaaggtaatactcagaggagagagcatgtcaaagcaatacagtaaacaaacaccagcagcagacgctgttaacttctgaccatcctgaaccaaagcagtacaaaaaaacaaactttcacaggcactagaataccgtacttaacaatgtataaaagttggattaccgagagaattacatgttttttcccacaacccaagagaggagatgtttttttttgacagcagcaactgctctaattaacaattcagggtgaccctatggcaataatcagtacatcaactaggggataaacatatccaaatgatgacatcaacagggctccatgccatcttcctcccatcttctccttatagcttataaaactgcacatattcctttctgatccataacttcaagaaccaattttttttcttttgcacaatccaaatcactcatcacttgctcacactcaacactactactcaaacaccacacccaaatcaaatccgttgtttattgcaaaagaatatcctataaaagctaattagattgtttaattgttaatttggatccagatctccaaagcctctgagatataaacaaattgtggggtttccctcctctacaatcccaaggccaggaggaggcgccaccgctccaaaccaagtcctcacctctctctctctctctcttctcctcttctctacg

SEQ ID NO: 2295 - DNA, 2000 bp, Oryza sativa
cccaagcccagcctaaaaccattttgagagttttgaaaagaggggagaggtgtgcatccaattccacaatagttcaaccattccataaagtccaagggatatgaatattcccaaagtctaaagttataaaaccacctaatgttgtcttattaatcagcgaagcatctacctaaattcatactaggggaaccatgagtagagtgcccactagttggggttttgtttattctagggtgaacaaggtaataataacaataacaataataaggtcataacaaaggtaaataggcatggctaaataaaacagtgataacgcgggtgacggagctcctggctcctcaccgggagaccgcgcaggcccccctttgccagttcggccgggggcttagggtgagatctcaagctctctttctctctgtatgtggaaagattgtctgcccgcaagacacacgagacacagcgatgtatacaggttcgggccgctgcgaagcgtaataccctactcctgtgttttggtggatctgtgtatgaatgagttacaaagtgtgagctgacttctcccccgttctaagctctcaatccgggaaagaatcaaccaaccccctctctatgggcaaggtcctccttttatacttcaaggggataccacatgcacccttccctttccaaactggacttttcttctctttatggacggagatcggtatggttgccgtccaaatgacactttgatgggacagcccatacctgcttccactcccggcggagacaggcgcaacgtgggatcgtggctgcccgttgctgatgcgaccagtgtcagaccggtcattcttgtccaccacgcgtcggtttaacaacgtgcatgtttgcccttcttcgtgtaacaccttgcctgtaatggttaggatgaagcctggtatatatcgatcggggttaacgtgccatctttgggatgtaacacgctagctccagctggggacgagtgcttagaagctcacaccttgacgggatggggcaaggcgtgcgtcagaccgcctgccgccacctaactcgcgatttgaccggtctgtgactggtcacagaccggataatcgagtgcactgcactgcactccgtgccggcgtgacacgcttagccgatgtgcaataaatgtggttaggtgagccctgctgtgctcacccaacctacgtacatagtgcaaacccctcagggggtcggggcacctcggccctcggggtcggggcaagcgcaccccgactccccctcgggggaaatcaggaggagggcggacacctcaccctcgggcccgacgtccccgaaggtgccaggccacgtgggcgattatgtctgcctcaagcctctggttatgatactcccggtcccatatcaccgacagtagcccccggcgttatgccagagcaatttcccttcccaagggaagcggtcaggtgtgacgccacccttaaagcctggtgacaggtgggaccggtctccatagttgggcaaaatacccaacggtctcaatccatgcacattggtattggtaactttggttgtccataatgggcggtctattcaagactgccacaccacttgagcagcgcgcgaatctgggtgagcagatttatctcgctcggagatacggtaacgccgcttcggtcggcgagcgtaattaacgcgcgcacgatacaatccgtttcgattgccacaaccgcatatccacttcacgcgccgtaagcgggcaaatgggattagtggaagcgtgggcacgggaaacgagggagcgagatagcgagatacgagggagcgaggtagtgggcgcgagaaacgaggagccaggcctagcgatggcaagggtataaaagcatcgagaaaaggatttgctcccttcctttcgccattgttcctcttgccctcgccgcctgagctctaactctttctctgctacgccctactttcgccacacgcgctcgttctcaatcatctcttcctccaccgcc

SEQ ID NO: 2296 - DNA, 2000 bp, Oryza sativa
  N_region (1039)..(1039): n = any nucleotide
  N_region (1093)..(1093): n = any nucleotide
  N_region (1096)..(1096): n = any nucleotide
  N_region (1099)..(1099): n = any nucleotide
  N_region (1102)..(1102): n = any nucleotide
  N_region (1110)..(1111): n = any nucleotide
  N_region (1114)..(1117): n = any nucleotide
  N_region (1131)..(1131): n = any nucleotide
  N_region (1145)..(1145): n = any nucleotide
  N_region (1206)..(1206): n = any nucleotide
  N_region (1208)..(1208): n = any nucleotide
  N_region (1740)..(1740): n = any nucleotide
  N_region (1770)..(1771): n = any nucleotide
ggcaagggcaacctgtcataactatagcaactccaagctaaaggggtgtaccgtgtggcaccaaaaaatcgagaatactcaaattgttgttaccttataggttgctcttccatctgtgcacctaccaccacatatgaatatttttttatttagacacttctaagaatttattttaaaaaaattatttctaagaaatggataacctcaagcacaaaagcatgacactgcacactaaacgttggccttgtacatttcaaatgggatttaaggccattcctaacccaatgactaggatggtgtctgacggagctcgtggctcctcaccgggagaccgcgcaggcccccctttgccagtccggccgggggcttagggtgaaatctcaagctctctctctctctctgtatatggaaagattgtctgccagccagaaaacacgagacaccgacgatctatacaggttcgggccgctcagaagcgtaataccctactcctgtgttttggtggatctatgtatgaatgagctacaagtgtgagctctcttctcccccgttctaagttcctaatcttgaaaagaatcaatcccctttaccccatgggcaaggtcctccttttatacttcaaggggataccacatgcacccttctctttccaaactggactgttctttttctctagaatgggcggagatcagcacggttgctgttcgaatgacactccgatgggactgcccatacctacctccacttccgccgggggtgagcgcgtcgtgggaacacggctgtgcgctgacgatatgattagtgtcagaccggtcacagatcggtcattcttgtccaccgcgtgtaatcttggcaacgtgcatgtttgcccttcttcacacaacatcttgcctgtaatggttaggatgaagcctggcatatatcgatcggggctaacgtgtcatctctaagagataacacgcttaactccggcttgagacgagtgcctagaggctttcgtcttgacgggagggggcaaggcgtgcgccagaccgccagntgccacctaacccttgatctgaccggtctgtgactggtcacagaccggataaangancgngcngtactgcnntgnnnncagcgtgacacgcntgaccagactgcantaaatgctgttaggtgagcacagctgtgctcacttatcccatatatgtggcgcagacttcntnaagggggtcggggtgcctcggccctcggggccggggcaagcgcaacccgaccccccctcgggggaaatcaggaggagggcggacacctcaccctcgggcccgacgtccccgaaggtgccaggccacgtgggcgattgtgtctgcctcaagcctctggtcatgatactcccggtcccatatcaccgacagtagcccccggcgttgtgccagaacaatttcccttcccaagggaagcggtcaggtgtgacgccaccctaaagcctggtgacaggtgggaccggtctccgtagttgggcaaaatacccaacggtctcaatccatgcacattggtattggtaactttggttgtccataatcgggcggtctattcaagactgccacaccactttgagcagcgcgcgaatctgggtgagcagatttgtctcgctcggagatacggtaacgccgcttcggtcggcgagcgtaattaacgcgcgcacgatacaatccgtttcgattgccacaaccgcatatccacttcacgcgccgtaancgggcgaatgggattagtggaagcgtgggnncgggaaacgagggagcgagatagcgagatacgagggagcgaagtagtgggcgcgagaaacgaggagccaggcccagcgatggcaagggtataaaagcatcgagaaaaggatttgctcccttcctttcgccattgttcctcttgcctttgccgcttaagctctaactctttccctgctacgccctactttcgccacacacgctcgttcccaatcatctcttcctccaccg

SEQ ID NO: 2297 - DNA, 2000 bp, Oryza sativa
  N_region (898)..(898): n = any nucleotide
  N_region (1052)..(1052): n = any nucleotide
gtaaccgtgagtcatcacagaacctactgtgctatgagcttgttcctaatggaagcctagaggcttggcttcatggtatggccaattgagtcaactatttctccttctgaaattgctgcataagttccactcagttgcagttgaatgtggtccttcattgtttaattaattagtggtgatcatgtaatcatgatacaccttgactcttgagtctctgactacttacatttttttcaggtacattgggagctagccgccccttggactgggacactagaatgaggatagcactagatgctgccaggggattggcataccttcatgaggattctcagccttgcgtaatccacagggatttcaaggcttctaatatattgcttgaggatgactttcatgctaaagtgtctgattttggtttggccaaacaggcaccggaaggttgcacaaattatctctcaacacgtgttatgggaacattcgggtaagcaggttgaccaccttgaagtactccccagatgtttctgctctgcttttgcttcatatagctgtcgtgctttcaggtatgtagcaccagagtattgcatgacaggacacttgccttgtaaaaagcgatgtatatagctatggagttgttctacttgaactacttactgggaggaggcctgtggatatgtcacaaccttctggccaggaaaatctagtgacatgggttagatttctttctgctcttatcttcagctgttattgtattacctttttatatctgaacatggatcctttagtatgataattgtcatctgaagttcactagccatgcatgttagatatttatcgatatatctcgacaaggcaaacaaacaaatggacttagagcaatattactactaatctgtttccnttttcgaaaaaagagagacattttttatgttcctctctattcatatgcattgtgtacatccttgggtggaaagcagatttatgtgtgagtaaatttacacttcaacatttttttatgcctgttgtgccaaagcgccatctatctgtttgtttcnttttgtgcctatgtttatgagcttacacaaatgtttcctgatctttccactaaaagccttgtgtcacatcaacctttgctggccaatttgtcaggtttgttcattaggtttttgaaagccaactctcaaacgtcaacgtatttcttgtagacagtaccaaattcttatccctgcataggtgtagagatacttatttgctcaattttgactacgcaggcacgaccaattttacgagataaagatacgctagaagaactagctgatcccaagcttggtggccagtatccaaaagatgattttgtgcgagtatgcacaattgcagccgcctgtgtttcaccggaggcaagccaaaggccaacaatgggcgaggtggtgcagtcactgaagatggtccaacgctctgagttccaggaatccataccaacacctccagcacgacccaatgttaggcagtcctcaaccacctatgaatctgatggcacttcatccatgttctcttctggacccttttcaggcctcagcccctttgagactgagaacatatcgagaacggctttctctgaagatcttcacgaagggcggtaacagtggtggtttgtgaagctgttttgggtagagcctcagagtctctgaccacccatttgaaggctggtggtgcaagtgacctaaccagttttattgggaggtaaatcctgtaaattccatttttattcaccacctgcgaaagaccaaattgttacaagaacattcggtggctttgtatgatggaaatgattttgttccaagttcttttttgctcctatagctcctgtctcatttactgtatggatcatagacatttaattaggtgatgtggttgtattcttcagtgacaaattgtggtactgtagctcgtgtcctgattgaacagcagagagctgcgctggtgaccctacacgtgtcatgccc

SEQ ID NO: 2298 - DNA, 2000 bp, Oryza sativa
ttgtgcagggaccatggagaaaaaagaagtaaccatttcctcaattctcagtgcagagctttccttggtgtccctgtttctcctcctcatccgacctttcggctggatgtataaagcattgctgaaagctactaatgcttcaggagcagagcagctctctctatcgtcttgttcctacgcgtcatagtattgaatctatttctcttgtattgtcgccataatccattaattgtagttagtacgatatctattcttctctattacaaaagaccacacgcaaaatttatactccaaaagaacctttcaccaatttcacagaaaaacttgtggtgcttacacaagtactaataaagctgtttgggtgtcgagaaattcaacaaagtaggctgctttttacacccatctttcctactgttgttacgctagcttgttctccctttcactctctcttcagtatcctgtcgattctttgtgatggctacagttcgattcgtatcggcgctagcaacaaaattgcggcactggcacacatcgatcgatacggacgatggaaacggagacgcggctgttgtgtaatggcatcttaacaaaggacggcgaaggaaacacggaaacatttaggtccatataaatgccttgtttatatcagctgatgagaggaggaggatgacagcttgaaaagaaaactgtgtgttctagaagcaagcaagggtaggagtacataattgtgatttatgaaaggccctacgggaaatttaaagctgcagacatgtgctcagggaattaaacctgttagttctctgatactaaagagcttaacaagtactaaaattactaattgtctagtggccattggaacgacattgccctgcatgtgcagcatccttagagttcaagccgtttaatccgctaagattcatactgaatcataccagtaatcatgtccgccattgttgcggctttgcaagtaggcctacttaattggaaggcctgatgagagacacaaacagttggctattttgcttacacgaaatctgttgtcaaaatgttagtagtagtaagctcccagctaaaggcaaatgccattcttcaggtcgccttcacaaataaccaactatcccacgtacaagcatcaccggccttattttattgtttctcccagtgagatgtttggcacaagaatgaaagaattgatgctggtactaccaaactaagaaagtagttgagattgtgaccattatcttagcttcagcctgttcaagtgttcatacgatggataagtgattgattaactactaatttaattatcactgtgggttatgcaggactgatgctaaaatgctaaataatggctctcccaagacgaaatggaaaagaaaagaaaagaaaagaagagagatacggcgaattccatttcaccagctgtaccccacctttgccgctcgcttccacgtgggccctaccttttgacccccccacgtcagcggcgcagccagatcattccaaaagcggaccacatccccacgaaaccccaccgcgaccgacccccccggaaaatatactaattacaaacaggtccctcgtgggctcgtgggtatatataaggctctttcagttggctccctcgtcgtctccgttaccacgcgcacactgccactgcgagtgccgttcccctcctcctcctcctctctcccatggcggaatcctcgagccgccccacgaaaccctaaatggcgagccggcggcgccgccacgcccctgtgccgtagcctcgccgcagcgagctggtcggaaggtaatccccgcttcgcctcccatccccccgcggaaccggcggatcttacctcatttggcatcttctctggatccactgctgatctgttcctccaccgtcccaaccgcctcacagatttctctcaatccgtgtagaacacagcgtcacctctcgatccgccaagtggtgggggagtaggaagcgtgtcttctccgggaggcgcgcg

SEQ ID NO: 2299 - DNA, 2000 bp, Oryza sativa
catggttgcattacttatagcttccttatttgtagacaaagcggattcggaattgtctttccttccaaggataacttgtatccatgcgcttcagattattagcctgttaagtcctgcgaattatgttcccgttgacccattcaagatgtcactgcatggctccatgcctccacctgaagcaaatgcagatgtagaaaaccatttttgtgaactgtattactgcaatcatatcattgatatcacacatcgatcagtgcatacccaagttaatctgtgtattgactagaaatggtagtactgtttcagttcagttattttgtgtcttttgttgcaccattttgttggttgcccctagctaacaggtttaacttctgctgatcgtcatttatccatctcgcaatgatattaagatgattatgtcaataaaagcactgcagtgattcaaattttgaatgtacgtaagatgtaggttggaaatagggaactcttttagcatgtgaaatagacatctgtgttatttggatggtgaatatagtcgtcacgcgtcagtagtatgtaaattatatccactgtgcccccaggttaattgacaaacctcatgttttaagtacgagttataaacgttcacatctcaggctagaaattagcagcaatgtgtagggggagcgcacatggaggaaggagaacaagatattagagattaattatccttgctgatctttattcatacgcacagcaatacttaaattgaccgactaattaacaagtcctacaacttatttctactgcagttaaatcaactattgtaatcctaagccaactaacttgcgaccaatgtggtggcctgcactggctatgtataggtgtgctcaactcaactgcatattcgtgaaaagataggatggctaatatgtcatataatcataggttttcttcctcacagtaaagagaacgaggcacagatgacttcttcaacattacctcttccagaatttcggtatagtatttcactaatcttgtgctaaacattttaatttcttgctgttacttagatcaaaacattcttgaaatagatgttccctatttttcgccattccaagagatattttgatctgatatctactccctccattccacattataagacgttttggcctctacatccttcgtctagattcactaacatctttattaatttggatgcatatataaagcacaaacatagatctatgcatgcatatgttcataacccaaaacgtcttagaatgtgaaacagaggaaatatgtactaattgtataattcattagatggatcataccatcatgatctaaatccaatctgtgttcaatgtcatgtgccacctttaattccaaaatttgaatataaaaattagaaaagtgtagctgaggcatatttttattttactttatttaaactgctgtaactctaaatattaccaacatattgtgattaatattttaatgtttataataatagcccatgctatgcaggggttaaagactagttcttaacatcagatgtggaaacatatttattctagtctacatcgatatctgttactcaatttaatgttttgaaaacaatctgtattttatctgttccactagttctgtttcttgactaagaatattcaaagtcaatgctgagataaaccaacatgtgatatggacaaggaactgaaatgtacctggctctcattgctttcctctgtcctctttaaagacgttgcctttagaccaatacttctatcatacggcacacgacagtcgacagcaatacaactgggttagtgcaatggtcatctgaccttagatagttgtacaattttgaaagaagaaaaacacaagtccttataaaaaaaagaatcagcagcatccagagaattgcagtcctcttcttagttcttatacgctaattggggggttaaggaaaaaaaggagtgggatttgcgtgcacatggttgttgctgtgtacgaga

SEQ ID NO: 2300 - DNA, 2000 bp, Oryza sativa
  N_region (1108)..(1108): n = any nucleotide
  N_region (1135)..(1135): n = any nucleotide
aaatagagacaaagaaaccataattaatcctataaacgatagccgatcggctaggtgccgatgacatatcatttatctctgagccgatgtcatatatgtatcgatcggcattcatgaacaaataagaaggaactaaatctactcgatcggctgtagatattaatgatacatacttcctatatcgatatatacttaaatcaagtgattgggatagatcggacgccatgccgagacagtataaatcattagatcgaaatatatattaataatggaactatatacattcatagcatagccgatcaggtagatctagcatgtatcggctaatactccgatactactctatattaagatattaaagcaagtagaatatatcaaacaaaagcctaatatacttaactgcaacaagatcttaatgtaaagggcggatttaacatgtcaatcatgcatatagaataaaagtagttaaatcaggtaagatcagctgaaaccccgatactaccctaatcggcaaccagaaggcaggctagaggttgatattctaagcacgacttaatagatcaaactcaactgatgcagcattaagtatgaaaagaagaacaatatctagacaatcaagccgctggaagtttcatagagtggtggatattttatataatctaaatcaacgtcgagatctaacctaatcggctgtactctaccgacagatgctagccgattgtaagttagataacgatattgctagagattatataagatatttgataactcgacggattacataaacaagattagagtatcataatgatggaagcactaatcccgataacgcaaaccgccataacaagttttacctcttgttgaagatcgaaaccgatgcagctcaaccggaaagcagaactcgtcgaaataaactaaagcaaaagggtggcgatgcgccgaaattgtattgaacgtgtgttgttgattacatgaggctcagggtctatttatacccgagaattacaatatatgtgtccatactagacacgactattatctctaacaaactcgaagatatcataagtctttacggcagacttttgcccaacatatctctaaggaattncatagatatcctattaatcgatacttntgccttctcaggactctatccttgcatggcaattaccatgaagcacattaactcaacttgatgatgtacaccgagtcgtattgttggaatcggctgtatcggctaaccccgtccgactcaaactctgccgatcttatcgtagccgatttggatggcagccgattcttgctctgttttcgcaacagtctccgtcttggattcctcttcgatctgaccttcatccccgatactgaggttaccaaatttggtcgttaacacatgccccccaagtccggaatattttggtaatgtttcggatttgccatatccatttccgagagaaactcgcacttgccgtcttcccgaccgttatcgctccgctttaaatactaaccgttgcccccgagaatcttcacaccgtgactcccgttttcaccgcttaagcaaattccgtcttctctctctctccggcgatttccctcggccagatctccatccgcggcgatgtcgacctccgccggtccgtctgctgcgccaccaaccaacccatctgctacaccatcagccgagtacgcagaggtctgtatccactggctacatccctttctcttatcggcaaatcgattttctcttgtcttatattgctttcttcttctcggtcgctttggatttgtagcacctctccaatctagtggcggttcccagtttgctgcacgactaacaatatttccttggtccaatcggtaatcttgaccccactgaattcatcatatccgaaaccaatagaacccccttcaggtcgaccaacccaaacatgaatcattggaaaaacacctttaaatcctggccttctcttgagaaaagctagcctgcatggtacaaacgg

SEQ ID NO: 2301 - DNA, 2000 bp, Oryza sativa
  N_region (691)..(691): n = any nucleotide
  N_region (1039)..(1039): n = any nucleotide
  N_region (1045)..(1045): n = any nucleotide
tcaacctcccctgcctctagggggtggtggcgagggttgctagtgaagttgggcgtggtactatcatggaaccaaattttggtaactcgacgaaggtgagaaggggcacaaatcttcatgcacatggaaggtaactgttaatagcaagattttgttcttaaaaaactatatgtgtataggaaacgaaaacattagttgtgttagtgtcaaagccaagacccggccactagggacggttacctaggccgaccgactcatggtaagaggcagaaatatgcgtcgtcaatatcaaacaatacctaatatcacaaaaataatccacaacatatgtgttcaaaattcatcggcacctgttcgacaagttttagatgaactaccaaaatattaatctaggaattagtagctttataataaaacatcacatgtgacatggctgacggttgtggttagaaaattttttataaaaaaaatacatttgccctgtatgaaaagcatatcttctagtagtagcataatgtggttggtagcgtacaaaaaatctcatatgctcatatacgcttctctcttaccttcacggctttgctccagccgacactaaacttctaactttacatctgtatacacatcaccaaactacggctatatgctctttcggtttcacttaaaacaaatacacctcctttttctttcntttttttccctttgcctgatcaccgcagaagatcctggccgctacgcaagtcgacccctctcgtctccgccttcacgtgaacccacaccggctcggctcagctcagatcggctccagccgtcagccggggaagcctcggctctggcccccctcctcctccgcgtgagcgagcacgtgcgcggcgcgtgtcgctgggggatcgggaaggcgactcagggggggctcgtgacgccacgtgacccgtgcgcccccgcccgaggaggaggagccccccgtttgtgctgcaccacgtccccgtccacccccagatcgcacgcgacgctgacgtgaggggaccacggttaggtnggcccnacctcgcagtcacgcggaggcggggtagggtcgccgggtgagctggggggcccatcgggcgcgtgtgcgcgtggcgtgacgaggtggtgggaaacgtgaactctatttaaggaaaaacgtgacacgttttcagggcacccccctatccccggcgctaatgctaatgactctgcccttccctcactcgtgccgtgtccgccacgggaggctgacgtgtggggccaacgagggggcggggtggtgggggccatgtaggcgtgactcaggcgggtaggttcgtgggtgcgccatgacgcggctggcccccaccccgggtgattagagcagctacaatagcagactatcagcgctataaacatattttaataagataaaagataagagagaaaagctgcgggctacagatttgtagccagctacagcatggactctaaaacgcaatatgtatatgatatgtgagaccatatattagggcacccgtaatggttatctataggctctctaaaagagatctatgtcagcatatttttctacttggaataaattaaataaagagagagagtaaagctatctactaacatggagatagtctgtagagaaaaacgaggcaatagaagagagagctatagatacccatgtagacatactattgaggtggtttactattaatctagtctattactgagatgtacatgttttatagagagcaacttactttaccattgcgggtgctcttaataatatagtaagcaaatattatatgaactggctattagattagttataagtgaattggaactaagtattgggctatgctattaaacttgctcttatactggatgatgatttattagcacctaatgcatgtgttaaccctccgaaaacaaagtggggggggggggcgagtaggcgacacgagaaaaggcgtgcggggatttagatgtgggggccaacg

SEQ ID NO: 2302 - DNA, 2000 bp, Oryza sativa
tgaatgtgctaagagaattcgaatcaaagaaggtaagataagtcctggttttgcctttatatgcatgagttggatcatccagtcaaaactgaagttagtatttctcctggtccatttggttcattcagaactaacataaatggccattagactattttgcttgtgtctgaaatcaattcctaaaattcttcaggaggcagagggtgaccaaattttgattaaggcatcattcctggctgagctacaaaggcgaatattaaaggccgaggcgacagtccgagaaaaggatgaagagaacgagatgcttcagcagcgacttcagcaatatgaaaaccgatggtcagaatacgagcagaaaatgaaagcgatggaggaaatgtggcagaagcaaatgcggtcattacaatcaagcctatccgtagcaaagaagagccttgctcttgatgagacgcctaggatgtccgactcatcggtcgaccagagctgggagagcaatggggttcacattggcagcgcgtcgcagctggttccacgcaccgttggacgggagatgaatgccagcatcagcgtcatcagccgcttggccgaagagttcgagcagcgcagccaggtcttcgctgatgatgccaagttcttggttgaggtcaagtccggacaggccgatgccagcctgaaccctgacatggagctccgcaggctgaagcagaacttcgactcatggaagaaggacttcggctcgcgcataagggagacgaaggtgatcctcaacaagctggggagcggcaacgaatcgtcgcccaactcggtgaagcgaaaatggtgggggaggctgaacacatccaagttttcatgagctaccatgtaatggtgtagaagatgcggcgctggtattttacaaagccggcgaggttggttgctagtgctagagtttcttctcaactgagtattggtgaaagcccagcgttttgggctggatttgtgatttgtggagggcgagtttgtatagttcttccactgaggccttctttgcaggggccaaaagaaccactgagttgtgatgtaattacttgttaagatagctgctaaacgggaggagattggagattgttcagtgccgtttccttctcttgtccgatctcagcttgtaggtctgtagttttgtagtttgtatcaggtattatcatcactgaataatgggaaaatgtatctgcctgtgccaacgcatttctccttggtcgctgcttgttgcaaagttgcaatgtgctcgagcatcttatcagtgctttttatgtgggcccacctgtcagttatcatgttttttttccttcaaatttttataatatcttaaataaatttcccaaaaatacaatcatttggttaaaaccctttgtatgactttagccgagttctccctcggtcccaaaatataagtgattttaaatagatgtgatgcatcctatattcatattattaagatgtgttaccctacaaaatcatttatattttaagacgaagaaagtattttataaaattataacaatggcaaatggttttataaaaaactgcaacttaattctttgtgtgtgtgacatacgggccaacttgcaatttgcatgtgtaaatcagtaaattataggtcggttcaaaattatcacaaacaaggttgtatttcctttccttttttaaaaaaagaatcatacactgccgttgcagctctcggaaaatatcgagctctaatggttttgataaaacatttctaaacttttaaactttatttacgccgtgtttagttccgaaatatttcttcaaacttcaaattttccatcacatcaaacttttctacacacataaactttcaacttttcacgtcgtttcaatttcaaccaaactttcaattttagcttgaactaaacacagccttatttatgaaacaaaatttcataatactcttggcccgaaacacacgttggctgcctctcactgccactcgggccccaccc

SEQ ID NO: 2303 - DNA, 2000 bp, Oryza sativa
cacttaggtccacgaatttgcaaagcgcgcatcgaggtctctaaacttggtttattgtatcatcccgatccaaagcgtctattgaccgtggtcttgcgtacgtggcacaccacgtggacgataatatggtgttttttcctttccccttttctttttcctcctattcttttatcttcttcctccactaaagccacctcgagctcccccgcgtcgaacaggccgaagaagagagaaatgaaagaggaagaagggagaaaaaataaataaataaataaataaataataataataataataataataataataataataataataataatgtgccatgttgtcgtttacatgtcatgccacgtaggcaagaccacggttaaacaacgctttggatcaggatgatacaataaatcaagtttagagacctcaatgcacactttgcaagttcgtggacgtagataaaacctgcttgtatatttaaggaccgctagtgcaatttactcttataaattttgaatccatgtttgataattaaatagttcaaataatctataaatgtgattatttgtattaaaaaggtaagcatgaaccactacaaagatagcaaagataatatttgtgtttaataatattgacgctgtttttgaaatgaacatcaaatgtttcatattgttatagcaaataaaaagttataacattatagtttagtttggaaggctatatatgatctagaaaaggtaaaacaaaaccgccaccaatataacgctgtaacatctagtcattgtgacttgttggagtgcgaggaaacaattctagactgcattgccatcaggcaacaggtaatccaactgtccagacatggcattttcagactagtacttttctacattgaacgggactagtgcattagaaaattttactagcgacgaagacatgatgtggttgatttaaagccgcgtcctaatattccatctggcatttttttctaccgcaacccaagtcatgttgactcagcaggatgcgaatctagcaatatacaagtgagaaacagctgaagaggagaccaaactaccaaaacggacaaagtaattctacagatggatagaatcaaatttatttgatgggtacttcttgcaatttttgactatttagttgtggtgtttaaaaatcaaatgtcattaattaatgacatgaaagctcaacattgatttgacacgattttgtttgtcatcctaataatttaataattcttaattcctaagttgtaaccgatatagtttgttactatttggataattacatgatggcaaaaaatgttgttttactttctccagttcacttgagtttgttggggaactatctaatagcgagttgatgtagtatatacacaccagttatactagtatttcattatgcaaaaaataaaattccataaaagaacatttttatggaattttaatttttttaattcaccataaaattttaaaaaataaatttaaggacgaaataatttggaaaatttcagacaacgctgtgtgtacataactgttcgtcctttttacttacagttgtcaatcacctgttgtactttacgagatttttagcacggtatcattccaaagtaagattaatatcatgttcttgaaaataattattgagtgattttacaatacttgaggacgtatcgagcaagataccacaatttttaggtaaatttacactagaatatctctaaattgtaatgcgaagtagaaaaaaaaaatcccctaactgttactttcagaaagggaagcttgtggaaaaccggggtagctagacacctgacttggggtttagggtatatagtccagcgtggttgtggtctcaggagatccaccgtgcaaaatatttataagatgcttacctagctaccgtgtaagcacgattaaccggtgttcgaactacaaaatatacgctacatatgctcttccaacttccttgaaggctgaagttctatacctgtg

SEQ ID NO: 2304 - DNA, 2000 bp, Oryza sativa
  N_region (1669)..(1669): n = any nucleotide
tgggtgctcgtatcatatctatggctaattatgttttcaagtcacgtcgagttatgatttagattttattttttagaaacacaatacaaacgcagacgctcacaacacacactcacccttataaatgaatatgcacacaccctatctctattagaacctctgaaagactgtgccgatatatttaatgaatttacaatgggcgcattgctacagataggtacatcctctatcacggaaaaattaattagctgtaaatgtgagcatctgttttaaccacagagaatcttactagttgagttatgctcacttcgctagttttctttttctcacaaggaagagtttagaggtggttagaattggttttctgctaggagatcaaggccggcccatgttcggcattacgccagcacgggcgcatgggccgcatctggaattcggagttatcttaaccggatgttggctttagctacatttcttctttacaataataatcatttgaacagatcaaggccaccctgaaggcggaagcagaggcgtttcaattttttcttcgtgatacaataatgagtggcacagcaaaaggcaaagccagctagtcacattctgaaaaccttcatacatatacaaatctggttttcacgtgtgaaaaataaagcaggcatcactcatttccatctatgaatattttatatgttttctcaaaaaaagtgtttgttcattgttaatttagtttacgttcatatcggaacaattcacggtcccggaaaaaagtgacagataacagttcacattcagcgtttatagagaggaaaaaaaagagtgataagcatagttcaattgattaggtttcttatattagaattagcccatccgggttcaagttctacagcctgtttaggagagtttaagattttgataagccgctagttggtaaccaaaatttgaaattctaaaaaagttgagttctctatttctagtttattttctaaaattctacgggccaatttggtaaagctccaactcataaatttaactctaagagttgggtttggaatagagttgtgcagtagtctaaacccagctctatctctttattacattttgtgagagtgcttcgaccggctcaattcccgttttaggtggagctgaaactgtttagatggactctagctcctcctaaagctagagccatgccaaaacatacgccacaactacagcttcttaatatctggatgaaaaactgaattgtttatgggagtttctaattttgggagaagatgcagctgacagaagctctcccaaacagacttgacacggatgctcgcatttgtagctcattattcttttagtattaggtaacgtgtaaccattgacagcaagacgtccatggtccatctttcaaatatacttatagaggtaaatgtgccataagcatctgcatttgtaatgtatttcgaaaactgagattgcgtttatacaacgaatcactagactatatgtttcaataattcgatgaataaagtgaaaataacaaggccttagacgcagcggctgtggttaccagtcacacattaccttaagaaaaatgattttaacatgtgggataagcaaagggaatgattttctttttctaaaaactaacaatcccaaaggaggaaggaaagaaacnaaaaaaaaaaaagagcactgactttcgtgtaaccaaacggcccaatgcaaatccatccccgaatgctcatcaacaacgagtgtgcaagcatccggaccgaaatacgcacgcattacacggatgcaacccaaacccaacacggcaagtcgcggcccaccgtattctctatctctctacgcgtatatatgcatacgcgcccctcccatcctctacacgtacggttacacaaatccatttcccaaaagaattcaaaatttaaaacgtacataccacgcagcagctagcgcgcgcgctatagcttttccctccaacacacaagtacgtatctccc

SEQ ID NO: 2305 - DNA, 2000 bp, Oryza sativa
  N_region (222)..(222): n = any nucleotide
  N_region (226)..(227): n = any nucleotide
  N_region (254)..(254): n = any nucleotide
  N_region (256)..(256): n = any nucleotide
  N_region (261)..(261): n = any nucleotide
  N_region (263)..(263): n = any nucleotide
  N_region (270)..(270): n = any nucleotide
  N_region (406)..(406): n = any nucleotide
  N_region (1390)..(1390): n = any nucleotide
acatttattcttctttttcttcctttcttaagaggataataatttatcatctagaaagcaccagtaatatggtgtcgtattacgtcgtgggtacataattatatcctatctatatgtgtgcgatatttatgggttttcaacataaatttaaaaaggctagagatttcgacaacttgaacatatgttaggagactctgcatttacgaaattgcgagtatgctnaagnntgggtctctttagcatatgttaggggntnaaccnanggttgtntatgtatgggaaatgcatgcatagttgttggcttcttctgtcccatgaaaaacagaactaatacgagatttgatacatcataatattatgaatctgaacagacgtattatttactaggtttgtcttttatgagacngaggaaaatatgtacgtacgatgtatgcgtcttccatccaacggaaaatattattgccattttcttttaaaaaaattaaggtaaagaggggaaaaaatgagagattttatttgtgaggacagagaagtccatccacttgccccccaccctacgggcactatcttttaagccaaactaactccattaccacctccctcccttcttgcattggagtagcagcaaagcaagctgaacaagctgtccctcccgggaaaaacacacaggagctgaggtgcaagatgtctgcttgattgcctcctgcttcacttcactgcttctcttccttctccctctcctctctgcaatcttcttgtatttttctccctagctctcctgcatcagcatcagttcttgcctgtggctaaggatcttttgatcttcaaagggagagaaaaggatcttgcctgagcttcagtttcttgtaagttcatctttcctttatgttttctctgttaggttgtgttgaagttgttcagacctcatctcatgaagttgttcttccattggaaatgtgactcaattcagagagatggtgttatctagctttggagcagtgtgtgggattggtgtttagggattcatcagtctgtacatttttgtttggttggttcactacttatcttgagaggaaaaaaaatcttaccagtctactggattttttttcttggattgatggttctgcagtgcagccatttccagtttttgtatacacactttattccaagttcatctctatgaacattaatttcctagttctgttccttttcttgaattaggttagtcttgagggtaaaaaaaatctccctttttttctccactaaaaaatctggttggaaatcagttaatcagaaccacctccttttttttcagtacactccaatctcatcttggtccaaggaaagcaactgtttgctcaaacctgtggtctgcagcatgcagttcttngtttactcactgtttgactgccttacatgtgcaaattccttaaaaaaagagctcaagattggatttttatttgcaccccttcatgtggtttttcctccccactgcaacctgataagattccagcctcactagtgcttgtacccatggtctccctacaacccatcccccattgtctcacccaattattctcactgtctcctcaccccaagatgctgctcttgtgctttgcaggtgctgcctcctcctctgtgtttgtgtgatccaatttccaacttggaggagttcttggtttcctggcattgtgctttcttggacccagagcttgacaagattgggtcaatagtttgccaatctagagagagagagagaatacttggtttcttggcaagggggacaccagggcatagatctttgtagttaatagttgctcttgccctctggactgaggagtaaatagttgtgtgccagtggtctcttgcttcatcttggtcttgtggttctgattttctggtgattgttggagacttggaggagtaaagtaaagggtgaaaaaaagaagggaaataagaagaaaaaaaggtgacagattgaggttgttcttagtgtgtca

SEQ ID NO: 2306 - DNA, 2000 bp, Oryza sativa
  N_region (1725)..(1725): n = any nucleotide
tcatatcgtatagcacataatatgttcatatgtggtagatttagaccacgggtaacttagagaaaagatataagagaaaagagagaggaatacatttgtgaatataaaaacaactgattaacatggcatgtgaaaatcagtttgttgatgttgcgttacagaggaacaaataacagcgtagtataaaaaattgttgcgatgcggtttcttgcataacatggagcccaaacaaatactaggtttattatacaaaataatcagtaaacattttgaatttaaaataaaaaaagaacatctacacccatgctttctcgagtacccctacacttatctacttaacatgtgctttctctattagatctaagatttgaacttaagaaacacataaaaagacaatcagatgatatagcatataccgaaaaagttattgataattgggtagtctactataataaacctttgattaaaatatcggatatcgctaactcaatcctttgtttggaaaaatggcatgatatatcgaagaaaattacatgaggccggtcctaatcttctggatggcatgtggtgcttgagctaagtcatcagcgctatatttgatctgatgatgttggcaaaagtggcaaacacgttgttggtgaccaacaagggagaaaccggggaaaagaggaacatggcgagaaagatgaggaaaaacgtggaagaaggatgactagaaagataacccagcatgaacaattaattaatacgatggatgtggaaatcacagaggaatttcttcttcgttacccaatggatcagatttaatcatgatttgattgggtagtttaggatatgccaaatatgtccccacctgtgtagtaatctacaactatattcacctgtaagcgtagaatccattttttttcaaggaacaatgcattgaagtgataaacaatatagattgattcagggaacatatggcacatccttttgcacaaggggaacaaattattgggacaaaacgacctagaggatgagagaatatcaaactcttccttattcctttagctattattaacaacacattatatggggatgactatgactcctagtcggtatgcatcatccgacaaaagtgcattttcattcgatggattgattcatcgcccaagctaacccatggagctatggtttcttggcaaaccgcccttagagacccgcagggggggaggaggggggatatatcggatatatgaagtgactagagtagaccaagtctattagcgatactttgaactataactttattaatgccgaaagcaaaagataaaatagcaaactatcctgatcaagtaccatatgaaaagaacattgcaagccaagtcatgccaatctaaggagcgcaaacaaagtacgaagatcacggtatatacgagcactccctacagaaataaagcaaactttatgaaataattagggcatatgactcattgagattttaagtcaagcaagtagctagactagactaatctagatagcttaccatatttatatcttatcttactgaaataatgcacaataattagggaaaaagtaatattaccaagggacaagatttatatacttaataccgttgagcactgaagaaagaaatagaaagggtgcaagggttacaggagagtgtgaacatgtagctaagggatttctcataaatgtaaaagcatttttgttcttaaaaatgtntaaaaaccatttcccatcttacaatttgtgattgcattttttggaaaaaaaaagagaaggaatcccaaaagtgcccaacacaaagcttcgaccattgccgtcccaagcgttcaaattttccacctcgaggcctacgggcggcctgtacgatttacctgttggttcggtcgctccgttcctccggcttccgcctttcctcgtcgcggctatacggctattatacctaccagccaccacaccacccttctcccacacttctccactgactcctcgag

SEQ ID NO: 2307 - DNA, 797 bp, Oryza sativa
aaacatatatatgcatggttcagcaacagggccatgttaaaaaaaatgggtcagctcgatcttcatccggttggtaaggctcagccggccacgtggctgagccatctttagtcccggttggtgttaccaaccgggactaaagatcgatctttagtcccggttatttcactcgggactaaagatagcgatctttagtcccggattggtagtcccggtttggaaaccgggactaaaggggggttacaaaccgggactacaaagggtttctccaccagtgaaatgcgagcacccgtgtcaaatctacgacttgaacccaggtaagcaagttccaccacaaggaagctaatgatcagttcagctacgttcacttcgtcattaaaggtaggttgtagaactgatgatctgtacaatggtcgaaatatatgattcttccaaaaaaatgatctatgctaaatggatggatttcatttgttgctaccttgggtttcttcgagcatgtgttagtgacacactcccgcacggacgtgcttatgatgcgttatgcttgtatatgtggctttcaccctaatgatgataaacaagcgcaatgataagctgaagcagtacataattatgccccctaccccgctaatggcatatatgtgctttccttcataactcagttaggtatcaagttcttcattctctactctgtcgtggcatgacttttgttgctttaatttctagcttgctataaattcctgcacctcagtcctgtcccaaccatcaaattcgtcttgatcaaactatcagagcac

SEQ ID NO: 2308 - DNA, 2000 bp, Oryza sativa
  N_region (3)..(3): n = any nucleotide
  N_region (5)..(5): n = any nucleotide
  N_region (8)..(8): n = any nucleotide
  N_region (11)..(12): n = any nucleotide
  N_region (14)..(14): n = any nucleotide
  N_region (19)..(19): n = any nucleotide
  N_region (21)..(21): n = any nucleotide
  N_region (24)..(24): n = any nucleotide
  N_region (26)..(26): n = any nucleotide
  N_region (32)..(33): n = any nucleotide
  N_region (35)..(35): n = any nucleotide
  N_region (39)..(39): n = any nucleotide
  N_region (41)..(41): n = any nucleotide
  N_region (45)..(46): n = any nucleotide
  N_region (55)..(55): n = any nucleotide
  N_region (77)..(77): n = any nucleotide
  N_region (95)..(95): n = any nucleotide
  N_region (1072)..(1072): n = any nucleotide
gtncnagntannanatccntnatngncatttnntncaanancttnnaggggttancctggggtttcccccgccgggnagcccgggagccgttggnaccggtcagcccgggagccaccgccgccggttggcccaagcatttccgccaccgcccctggccaccgactgtcgacgccgccgcctccccggctgcctcgcgcacgccgccacctaggccgccacctgtcgacgctgccgcctgcgagccgcggccgccgcccgcgagccgacgccaacacgccgtggcccgcgctcgccacccccgcatgctgccaacgtagacgccgccgccgccgccacaaccagttgtggccatcggagaaggatggggaagatgatggagaggagagagaacgggaggagagaggtaggaaggggtagttcaatggcatttttgtgtaaatatagtaaaaaaattaaagggtaatgggtcttttggtgtggagttatggagcagcaaaaaactagctccacccccatagtacaaatttctgtagcaactctactaacttcgctccaaaaaaaaaggagaatcggtactatttggcacagctccagctcgaagtaagttggagttgggaattggagctgtgccaaacggagccttaatgggcttgggtgatgtaaatggatagtactgtgcatgcccgtcctttccacatcatgatttggtaggtgtaatggacatccagtaatttttacctttgtatatttgggtatggataattcaactaaatggataattagggggtgtggctaatgggcgatcgatcgcttggagagatcgatccccatgccccccctgtacacacctctcctcccttcctcctccccttcttctcttcctactacactacaaatttaaaaaaaaataaaaaacaaagttggaaaaatttatgtatagaaatactatatataaaaaatatttgaattcaaatttaaatttgaagagggtaattaaacttttgacttataaactttgggtctataaactttaggtgtataaactttagatgtatagaaatactatatacnaaaaatatttgaattcaaattcaaatttgaatgggatatataatttttgatttataaactttgggtctgtaaactttagatgtgtaaacttgaggtgtaaaaaatttaggtgtataaatttactaaaataggaaagtaaagcggtgcctaaaaaggaaaccacgtggaggagaggggggagacccgatcgcccctggcgatcaatccccattagagcaactccagcagagaccctaaactcagcccctaatcagtttttgagggtttagagataaaaactagattcagcagggaccctactagagcccccaaagtgaggaggaccctagattctcctcccaagcccccagtcctgggggttccgagtacggcccccatcgactttttttcctggcgtgaaaaaaaatccgcttcgcgcgatctcgcctcgcccgcgcggcactacgaccagatctcctccgacggccgccatcgactcccccacccacctccgccaagatcgccccaaaaaaggtgaggattttttcctacctttgttgtcgtcgtcgtccacagggccttcgacctccgcttgcacgcctggcctccgcctgcatgccagccgttcaaacgctcggccatcgtccgcctggccacacgctgcttgcctgcacactgtgttagagtccggatattctttgtacatgtgataatgctccatatagctgtcggacagagtttgttgtgttagttagaagcgatagaacttatccatgtaatctaggttctcacaacaaactctgaaccgaagctatatacctcattgtaatcctggcacccattttgtggcaatcatcaacacgtaatctcctcaccgtaggagttcctcgcttccacatggtatcagagcctgttgctagattagattagttcgtctttgtgtttctgc

SEQ ID NO: 2309 - DNA, 2000 bp, Oryza sativa
  N_region (828)..(828): n = any nucleotide
  N_region (890)..(890): n = any nucleotide
  N_region (917)..(917): n = any nucleotide
  N_region (1305)..(1305): n = any nucleotide
tatatagaatttacttaaaaaagagtccatataaaaatataatttaaaaatatctgaaattcctaattaaaaaaaaagaaatattcaaagagaagactagactccatgtatatacaatgtagaactaattaaaatttggaactaaagttagagtccataaagaaacaaaatttagaaataactaatatttggaattaaaaaataaaaaatattgaaagaatattttagattcattatggaaatacaatttacaaataacagaaattcagaattaaaagaaatatgggaagaggagtctagagttcatatagtaatacaatttaaaaataattggaattcaaaattaaaaataagaaatacttattgaaagaaaggtttagagtccatatggaaataaaatttataaataatagaacatttaaattagaaaataagaaatatttttaaattagaaaataagaaatattggaagaggagtctggaatccatatagaaatccaatttagaaattacaaaaattcaaaatttaaaaatagttagtaactatcacgtatatacaatacaatatgaatattatatgtgatatacaatacaatatgaatattacatattggttggtgctgttaagttagtacaaaatttaaaattatgttgctattttaatatattttaattatattatgtgaaaatatatgctactatgtgaaaaaaaataatgatatacaatacaataaaaatatcaccacatttgttagttcaacccaagaatttaaaattatgttgtcattttaatatattttaataataaaatatgaaaatatttaagcnaatatatgagaaaaaaatttaacgatactagccgtgcaatctgcgcgggccaccatgctaanttttttttttttgacaacagaggtacncaagcaactccaacttcatttcagacgtacacagaaaacaggtacaccgtacacgaacacctttactcataggcgtgcaagaccaagtactccattcacatcgcatacacataaaaactcataaatctcacgcaaacaagaacatcataaaaataaatataaaatataagatactaaaataaccagagcaaaggagatcactaagatgattcactcatagttatacgaaaagaaagaagcaacagagagctcaaccacaatgtttcagttccagacaaacgctgcgacggcgagcacagcggcagcaacagcaagtgagcagctcccaccggcggccatggggcccgtcgccgccgcgccgttgttggacgatccgctgtactgggcngtggcatcctcaaaacagctgacgatgcatacgacgaacagcacgagcttgcgagatgaccggcttgggagaagaactgctccatgcttgttctgcttttgcttgcctgtctcagagttcagatctcagagctgagacgatacacttgagcatttcgctcaaattgacaggatttatatagaattgcctcaagttgacatggtaaacatagtacacagatgcacaatacaagtttgtccatttctctacatcgtgttctgctcgccaggatgagttgggtttgatctggacggctggtttgttgctgcatattcgtctgaaaaattcaacaagcagatgaggtgctggctttgtttctgatgctagagttccttcctttttgtcacttgtaagttgtaactttcactatccatacaacaaacgtaacaaaatttccttttcagagaacaaaactgatgatctgattgacaacgtcagttcttatgtgtgttggtcgcatcgcatttatcaatgagcttagatgatgcctatgttcagctgatgcctgatgccatcagccacagccatgtcgatacgctggctgattagctgatcgatgactccaatgtaagcatggaaaccacctagtacatcatatggcactccggtgatgagaggagttcgtgttttcttggggcgctgcgttgctggagttc

SEQ ID NO: 2310 - DNA, 2000 bp, Oryza sativa
  N_region (1038)..(1038): n = any nucleotide
  N_region (1042)..(1042): n = any nucleotide
gacatgtattagggctccctttggcattagagtgtattctcaaaacaaaattatttgtgctttgggatatattatgagctgttatcgtctttttcttgagttgtagagaaaagtcttaatagaatcagtgacaatctccctaacccactctgatagtatccatgttgcttccgatgcttttttcagttgggccgagtactatgccatgccaactgatggtgggattctttgcttacgctaaatcattggagatacatgttgacaagaaagagcttgaaggtttgtcagtatgaaatgttattttttttcctactcttttttgcaactgattggcctggtccatccatataatcctacgtttcagtcggtcttctgttatttttcttatgcaatcttacaagaatatttagatactaactgagtaaaacttatctaattgttaaattggtgatctgtaatacatcgaagatacttttctacaatgaacttcataatagttctgcgcagaccttttagttctcatctctcgaatgccattcttttaccaatgtagatgcccaatggcacagccgtgaggatgtcaagaaagcactaacatttgcagaatacgagaaagctcagagaacaaatgcgctcaaggtcaatcaaatatgcaagggtgttgagaaaaggcagagcatctctgctgacctcaaaatcgaaagtgaggagcctgctccaatgttcgttcctgggccctatgcgattgctcaccacctcatatcatcatgggcttttgaaggagcaccaaaggcacctagctccttctccaacctatgagccttgatcctgttattcattttcactaaacaacacaacaacaggagatagggaataaaaaattttagtcccatgtatcatgtatgccttagtttcttgttagtgtagatgtgaaatgtgtccattgccggttgtaataaaaggttaagaaaagtacatcacgttcactggaggatttggggggagtacagattacagagcaagtgtaatattttagcntacnatttgtaacagtgtatagatgcagcacagatgtgctgatgtttgtatcttccatattcaaagagctggcatcaagtgtgaaattttgccaggtttgttacaagttgaggacatcttttacatgttgactggtatagttctgcttggagaaaactggaatattcaagttaattttccacatgagtacatctgtttgtcatgcaagtgaatcaagaattcttgtgcaggggttgatttttcagtgtataggggtatgaaatgaatgtagagagtgatgtgcctggacttttgttgctaatcataattgaagcttctccttgaaacaagcaaccacatgacatctttgactaatctgttgcacaaaaacaataattaacccgcatcaatcttcaactggtcaacataaaatctactgttggacagcaacaccgcagcaccttgtactaattttttttatgctttcatccaactactgacaaagaattctcgtcagtttttcaagttcagaacaaaggcaggaactctgattaggtgtagcctcatatacagtactaatatatgctaggagcacttaattaattgctgttcctctctaggtagtacttaattaattaggagtactaattttgcacttgtgacacgttttatgttgattcacagtgacttgattcagcacaagagagtggtcacagcaacatgtgcaaaattgtcattagacgaaacgtatcaagctctaattgcagccgaagaagcagaagcaaaccatccaatcagctgcacagctagtcaacacaagctagtcaaaccgttgactaccactgtctttgttgcgcgccagatttttccacggtgcacagccgcaacgagatggagacatggatagagtaataagcagcagtagccatgcaacgcaatgcaacacttgaatcacttgcagcttggaactgatctgatcagcc

SEQ ID NO: 2311 - DNA, 2000 bp, Oryza sativa
  N_region (89)..(89): n = any nucleotide
ttatacgctaaaaagcaaaagaggattttccggtggcaactgcagctgctacggataatatagcaccgtcaaacacctccttagttaancaatagcattttttaattataatcgacagaaaccatgggtcctggtcatagcatcatataacatgaagtggcagaaaagaaaataaaatgcaactggaaagttagatttgagacgtgacataagctatctttcttctgtgcaaatctatcgttaacacttaacatgtctttcactttcctcatggtactcatccctctactatcccatctgtaacccattcatatatggctatcagcttttcgccattcctgtttatgtcctatcccattaaaaaaagttaaatccaataacaacattatagaccaacaagctataaggttccaaaccgtacatcctcttgatggataagtagtaacatcaataaggccaagcctaatgttccactctatccagtggtctaaagcctccacatcggagccgaactgagttggcaatcaagcgcgtggtaccacaaggtcggacgatgcttgtagaggaaattatttctctccgttcttcggctcgggagtcgcgaagcctcgtgttggcttagcccggtgttggctgtgcccggagcaccatgccacacctcaccctggcggtccttcctcgtgtacctatctcgcttcatacacattgtttgagtggatgtgtagttacacttaaatatatatatatcaagacatggcttactaagtactacctgctctttgatcagagattttacttggtatgattataatcttcatacaatctaatttctccacaacgttgtcctgtgattgttttacagcgatactgttggctaagtttttgtaagttttattggtacagggagcgatagttaacattttgagagaatccactatatgacaccgagtttactccgttttaacaatttgccatcgactttgtctctctttataaatggcactggctttgtcattttttctataatatgttattggggtgaatacttttcaaaataataccttcaaggcttataagaggttacaattaattgatctactagaagtttcaagaaaatatatgttacaattaattgatttactagaagtttcaataaaatatgaatttttttatgtagccttctacataatatagaagtgtgtgtatatttcaagattttcattttacatgtatgaacttaaacaaaatgtaatttatgtttgttaatatagtactctcgtgttaatgttcttttctgtactgctgtacatcatcattgacatgctataattttttttctaatgcggctatattctatgtatgtgatttctctttcatatgctacacattttttttcaaaaagcatgaaagaaaatctcacacacaagcttctaaggctaaatacaattttttatatttgttttaaattatagtggatcgaacaattgtcaacacctgtagtatgtctcaaagagcattttaggcaattcttgaaaattattgtagaaaacaacaaggtcagtggtatatatttacaaaaggagataaagtcgatagcaaacagttgaaataaggtaaactcggtggcatatgatagattatctagacatgcatattttcagattcgtaataaatataccacattcagttctagattaatttattttggatgaatgtataacccttacctaacatcagatttgggccggacacatgcgaatacagcatttcagattttggcccatcacagaaagcccaaatggtagccaagcccactcgaccaccccacaggcccacacccacactctcccagtcccgcaccatccataaaccgccaccgccccacgagccgcagcgccgtctcctcctcctcccccgcctctccactttcctcccctccctcccgcctcccaccaccaaaatttcccccactttcccgcctgtctcctccagtccccgca

SEQ ID NO: 2312 - DNA, 2000 bp, Oryza sativa
agtagtggtagtggactggtgcaccggtggcaaaaccgcccgaagcagcaggtggcagtaaaaaactggcactgttcccctttttggcacgctgcaggcttgctgcgtcgacctattcgcctcttcccaccttgaagcacccatatcacgaccaccagcacgaggagtgcaaccaaccctaggtcctaatcccaaacgacttgtttgacaagagaagggaaggatattcggagtttgaaagagagttggtagagggattggggataggagttttatttttactccatgtcccttgtttggttgtagagatgagaggtggagggaacaaagaatgagtgcatgtactacttggaaaaatgaattttctggatcacgaaaaaatcacattagctctggtttgaataagaactaggattaaaaatatctttagtcccggtttaaaaacccatggtacttttttaatcttaccaaccggaactaaatattattttcaatcccggttcaaaacatgtcagatccccactatctttagtctattaccaacaggaactaaatatccatctttaatcccggttgtttataccaactgggacccaaactaaaaaaaatgccgaaaatccaaccgaatcccacgccctcgtccttttcccctcctctctcctccaccccctctcatcctcccctccttctccacctcatccccatctcctccccctcccccttcccctcctccgaagatggcgacagcgagtggcggcccagcggaagccacggcggtggcggcggcgtcggcacacaaggttgcgggcggcggccgggcggcctcccgccactagattcggtaggaagggaggccgggcggtggtgaccagcaggattttgtcaattgttttaagatgtttggaatgatttgtaaattttcttgtagtttattttagatttgtgaatgattttgtgaatgacttgtggattgtggatgattttgtggatgggcatgtgaattgtggatgatttgttgtgcatgatttgtggggatttgtggatgaaaataaatgcaagtagcaaaaaaaatgaaaaaaaactaaccaaccgagataaaatgccgtggtcccggttggtggttaagactaaagatttatttttactcccggttattttaacaaagactaaagataaacatttttagtcccggattaggcgtcctgatttacaacccgaaaataaaagggtttataaaccgggactaaatggtaggaagactaattcgtgcggtggagttggcgacggtgttggtttggtacggggagcgcacgaatacggcctgtggtggctactgtacaattcgaaatacgtagttgcgcgcctttaatttccacctacccaaagcttgcagacggaggggagctaggtgcctgtgcatgggattattaatcaatctagcttagatcatccatgatttgttacctacctagctcctaattaaattagctgtggtagaaaatctcatatggttttagttcttataaaaaaaattaaagtgctcctcgattgaaaacctttaagggcgcacattttaaattttactatttcaaatttaaattctcaaaaatcattagaaatttcactcagaatttacttccgtaccacgtcgaaacttgccaatctccaagttatcaattgaattaaaaactaccagtgtgcaacaggcaccacaaaagggtcatcagagcgaccattagtttgttgtctccgtctggatatttctaaccttgataagaataactaaaccctctagattgattggaccgactagcgacgacgtcgacaaatttgataaataaattaagcaaatttttttgctccccagtcccagatcgacgtcgatcgtagtactagcgaaagtataaataacgcgtaatcctttgcacatagaaggggcatccaaactagcaacttaattaggcacctaattaactccgacgatcgatcgataattaaga

SEQ ID NO: 2313 - DNA, 2000 bp, Oryza sativa
actgcacaacctcctctcgtgcgccaccaagcccacgtgagaacggcatgcctgctggtgcttttcacgtgaccttgtaatagtagtgatatgtttatgcaattaatgatccacatgaccatagtccatgcccaaacttgcactactaatccccattgcatgcagccaagtaattgccctgttttcttacacgaactgaagccaaaagcaccacgagtccacgatccgctctgccgatttcgatacatgagtttgctcctaactccgatccacgcctaccaaacagagtcctttacgatgtcgactccgaatccacatcttctccgagtcaagtttgatctgcgtcttcttctgcattgaactcaattttatcgtcttccttgctgcgtcatcgtctgcatcattaagcccatggcttcctgttcgtctgtaagccaacacgtgtattttgtgcatgtgtatagtacatactccatacgcactgtccgtgcctccgcacgcaccgcagtcgcagccctcgtgttcaccgtccacgaccccgtcgtcatcggccctacacgtccgccgcgccgcgccacgctcgccagtttcgcccttccatcagtggcctccctgccgccgcggatccgcattcgccgcgggcgtcgggcacgccgtacatggcgctacccctccaatctctcctgtcgccttcggccacgcccggccccgtcttccggtcacgttccgccatcgccggtctgatcgcgagcgaggtcatcgcctccgcaatgtcctcattgtcgccatcgatctcatcgccacggctgacgatctcctgtcgatgcgcgatccctgcctcgtgtttcctcctccacatgtcttcttgatccaatactgaaaccttcagctctgataccacttgttataaaagttagtcgatatagcggaacaacgactaaccttcccgatcgcttcaatcattgatcacccaagacatgccagatgacgacacaggaacacacgatatttgttaacgaggttcagccgaagcctacatccccggggctctgattatgggcgctcctccccaaccaatatagctcctagctgctacgagtccatggccacgccgacatcctctccctgcgtgtctacgctacattgtagtcgctatggttatattgtggtgcccccctctctatttaagagagatgccgggttacagaattcgactctaactccaccccctaacacctattacaattccaagtccaactgtaaccaaataggactagtatattcaacacctattctaacagatgcaaatgcacgagataagaagagaaacaaatagggtagcacatgttttaactcaactgacaatgagtactaggttttatgcggagtggagactttgttctccttcaagaatcctatacttcttaaatcaggaacataatccattattcagtcattaataaaactctctttaactagaaaaaaaaaagaagaccgttcaaacacaagaaactcttttaaacccttagggatgtcctctcatatgtcttaaaaaaccatataaatagctattaaaaattataaaataaattgacaacattcgtacaatatatataaatatcaattcataaaattttaagtccaaaactcaactcacacattttaagtacaaacccttcaaacactgctcttctgaagttgaagcttgggaagcaaagcccacaatgcccgcaaagcttatggtccagtcgaaagcccacagtgccggcccattaggctaagtaaggccttgggctccaggttggccagaatttgttggcctactacacgtgattccagcgttggaatcatcacgattctcgaggcggcggcgggtgccgaggtcacggactcccatggcggatcatgtctcactgttcagaacctcgcttctcgctttgacttcgtgaaccttgtgcagctccgagcttgttcgccgccgccgccgcgccgtgcgtgca

SEQ ID NO: 2314 - DNA, 2000 bp, Oryza sativa
  N_region (20)..(20): n = any nucleotide
  N_region (1010)..(1010): n = any nucleotide
ctgggtacaacgaagttctntggtcctccaacatcttgtccaatttatgggcctccttttcactttcgcagtcttccctggcgtcctgcaacatctgaccaagatcatccgcaacgtcgttaccatcagcagctatttcctcctcgcccgtttgatttccttcaaatccaacatactgagcaaagtccggaatattgtcgtcttccacttcatcttcttccatttcaacaccttgctctccgtgggatgtccaacaattatagcttggcatgaaccccgactcaaacaagtggaaatgaatagtcctggatgcagaatactccttctgattcttacacttattgcatggacaacaaataaaacccctttgcctgttagcttcggccactctcaaaaaatagtgcacgccgtcaataaactctttggaccgccggtcagcgtacatccattgccgatccatctacatgagtcaaaaaaaaccgcacacaaataattattcttacaataatgacagtcatacaataattataagatatctttattcatacaaaaatcataaaatattacaccaaataattcttaaaaactatttgtaaagttttaaactaattttaatgtgttttacttcttttaatttttattttagtttgttttctattatttaatattaactttcactagagttttccttctcaactattttataaaaccttgtttagcaaatgaactaaatttctatatattctttcttccccacacacattttctctctcatcaacttacaactaaattttggagacaaaaaaagtgtgcaaaacataggtgcaaatgtagtatgacaaaaaaaacattggaggatgaagttgcaaaccttttaggcacctccgatttgtatgtaatcaccaaaataaattcaatagaaattttggcatgacctcccctcttttttgaagaaattttgaagcttgctcgggcagctggaggaggaagaagacatatatataggggtnggactttagtcccggtttggtagcaccaaccggggctaaagatcaccgggatcattagtcccggttggtattaccaaccggaactaaagttaagatctttagtcccggttggtgctaccaaccgggactaaagatcccgggggggcctgacaggccctgacagcattcgaaccgggactaaagatgatctttagtcccggttggtaacacaaaccgggactaaagatcaaatatgcccgttacccttttgaaccgggactaaagatcatctttagccccggtttttattgcatccgggactattgtggaaatcggccgaccgacgaaagatggtttctccaccagtgtgatttttttcaattatgtaagaatgctactcgaatgataattctatggtatttttgtaattttttaatagcagtcttgcaataacgtggaattcaaaccaatggtaaatttgtaattgcgtgtgtttttgatacaggaattttgacaccactactatttagacccatcactgttctcttatttttatcagttagctcttttgtggatcttcttgtgtaaagtcaggtaagcttcctcggatgccctttatcaattcattcattcatgaatgtactcgtttgtttttcaaaaaccacacaaatcgtatacagctgtacatcgtatatggatttttccccatcaagcatcctctcgttttcttgcattttatctagatataaaaaatatattataaaaaatatgagatatatcagttcaaggatacgtataattaaattggatttctaccagctgtaacaaaactctaactaagtatccgtatacatggttatgtttgttaaagctaaatttaaagctgtatattcgcggagtgatatgccatatgctttataaaaaaaaatataaatattcaatgcctaaaactcgatcttgttcatcgaacacgtacgcaccattagtcgactgagctcgagagctagtcga

SEQ ID NO: 2315 - DNA, 2000 bp, Oryza sativa
atagagccacataagccatgacacaatccaacaagcgccacaaaagtcaagagagatctatagctacctataatctcgtcgagttccaaattgaggaatctgacgattgctagcagagtactcaatcgaggaatctgatgattgctagccgtcaaccacatgcttgacttttatgccgctatactgtcagactcctccccattgtacttgtgagagattgattttataatggcatctgcttcgaccaacaggagtagcgctattacccgtcaaagggagcctgaacctatacaaaaatatgtctcccgtctattttaccacaatcttgcatatgccatggtatcaacatcctcaatacattacaaatatcatagtcgggtacagtccgttgatagaaagggggagggggattatcttgttagtagcttttaatgttgactcccttagcactagaattagctttcagatgtgcatatctaattatggtttcaatccaacggcataaaatgtgacaaaccatagttcaccttatgtaaatcaacaacgttccatcaaattagtatagttccttctcaagatcaaaagtaaacgcaaaggacggttacatagctttagtaaaagaaaataagaaaattgctgtggttggcatggggctatagtcatctggactgtgtggaaggccagaaatacagcttacttcaaaaacaagagaattaaagatcctactgaactaatacatgaaggtttttactggatcaattcctgatccattatgcagatatcggaggactagcgaagaatactgcagctggggttggcgctgctaatgagaggttgccgttaaattatactccctccgtattttgaccaacgtttgatcatttgttttattcaaattttttgtataaatatgaaaatatttatgtcatacttaaagaacatttgatgatgaatcaagtcacaataaaagaaataataattgcattttttttaataaaacgaatgatcaaacgttaaacaaaaagtcaacgtcatacattagaacataaagttagtataattcaaagatatggatgaaggtcacaagcaatgcgcttgacgtggtgcaaatctggagttattgagctttccattgcatgtctgtgattgtaccaagtcaatcgacgtttgctgttttctttgcaaatagtcctagactaagttgcttgcagttgcaggattatggtggattggtgacggagttggtgcttatggcctttgttttctgtcaggggagttgtctgctctgcaggtcatataaactctgtaaaagtgtatattggcatttcgtcgatgaaatgggagaggatctcctctcttttttcaataaaaaaaagtaaatgcaaaatatatgtccgttgcaccgatctcctttccaaaccgaaagtttccctgccggcgcttgatccgtcacaccgatgacgcgacgccggtagaggcccggtacctgttcgaacaaccaactgatgtgcggctcctccgcttgcggcttgcctcttatcaacgtatcgccgtttccgtcatgcgtgatcggtgatcgatcaccgagagagaccggacgacgagtcgagagagctcgcgcgcgcctcgatcggcgcggcggtgactcgagcagggcctgaagtagctgcacggctcaaggcggcactccatcaccggacaccggggtccagactactcgtttccgttggagaaataaccacctttatccatgttgcttatccgtgaattgcaacagcattgattgttcgcgtttaattcgcctcggccatgtaacctccgacctgatcctcttggacactataaatagaggccagttcaggcaatgcaagagcagagaagcagagtacagcaggcagctcttcttctctttgcgaaggttggctacttggccagccattaggaaacaagttagtttggagaagaagcagagttgagactgcatttgcattgctctgtag

SEQ ID NO: 2316 - DNA, 284 bp, Oryza sativa
  N_region (19)..(19): n = any nucleotide
gctatatttttaaaactantaagaactttataataacattataattatattatagtagtatttttttttaaaattatggatatagagagtcccatagagagtccgacttgtttctctctctttttgggcaagtcgcaatcattgccttgtcccgcaccccacccccaccccaaccccgcaagcaaataaaggaggaaaacccgctcttccgccgccgccgccgccgccgcagagtccctcttccgccgccgccgtcgccggagccctaaccctagggcggaggg

SEQ ID NO: 2317 - DNA, 2000 bp, Oryza sativa
  N_region (203)..(203): n = any nucleotide
tgcacccccctcatcccaacaatgtgtacccccaagcagaccatcaggccgagcaaaggtaacaaggccaacagagaagcgcacagccatgaggattttcttgtggtgcagcatgtttagttgacaaatttgccctgcataacagcgttgttaactacttcaaggtgaaacagaatgcactcggtggccagccacagcctatnctcttatcacctattaatcgtagcaggcaaggggtgacgtcaaaagaaagttttgcaatttgctttcatagtttcattccattttttcgataatttcaaacgaaaaattaagttgttttgtctttttttttccttgagatgctgatgttggacgagtagttctccaattttggccacctattggttgtgattttaatcttaacttcttcaggacactgcgctgataagtatcgtcattgggaattcccattttggcaagtagttttataatttaccgctaagttttcgttcttatatcactcgttcatgttaatgtagatactgaaatcaatggttttactattgtttaccataatgttctttgataaaacatgataggtcgtacgtatatcattttcgaacatggtagtatattgctactatagtggtgcaccaccctctgttttgctctagcttcgccactgaccacaatctgcgaacatggtgacgcttctggtgtagcagcatccaccctccatgagactgctctagtcacgcatgtgctggtgccgcccgtcatctcctatggcttggttcaaccaaaacttcgtccttgcagccaaagatgacgaaatctctatcttcatctttaaaagtagtgctctggtgttatgccactccgtacaacaaaatataaaaatatcattttttttctacaatgatgattgttaattacttctgttataaatattgtttgaaagaccagcaatattgtcaatatccaactttcaagctagcaaaatgtatgcatatatttttttatgaattacctggcaaacctatctctagttgtgtcatatacctatagtcccatagtgtgacttttggatgtacatcgttaatctttagaaaaatataatgcgacatctcagtactatttcggttggtcacaagaaaatcatattattatatgtactagatttttcaattatacaaagaaaataagtagtcaaagttgatttttgtaaattgtgccaattttaaaaaatgatacattttcatgactggagggagtatacttgcgacagtttagcaataccaaacaagaccaacaattcaatgcacttgaccaagtatttgaacccaatacactttgtatgaagcaagcactttaaactaatacccacttcagctatttcagatgtctagtcaaatggccagcaaacgttaaatgatagtgtaattatatttatattagtacctcatcagtgtcttgaagtccagaaaaaaagagggtgagtccaaggtatacctccatccgaatgatgctatgcctgaaaaccttcaacaccgtgtgaattatggtgagagtaatttcgccctacgcaaattatgccagtaacgttctctatgcattcaaggcatccatatatgtagcattcatgtgagcaacacattttttccatatcatctatgttaaaataaagcagtatgaaagattcatcaagaaaataaggcataagccaacttccaaacttgggagtgcttatctggttatctaccatccatacgtaatcgcctagaacttcaagccaagcacatcatcagttgcacactcttttaataaagtacatatgacaaacaacacacctaccttaagttttttggatgcagtcatgttacacctttcaaccctcttctatgttctaacagccaacttcgtttttgcatcacaggctataaaaaggggtggcatccatagctgaagggacacacctagaaaatttaatagaactttacaaattgagtgttatagtg

SEQ ID NO: 2318 - DNA, 2000 bp, Oryza sativa
  N_region (981)..(981): n = any nucleotide
gtagaaaacttttactttagagacactttagagatattttcagcacattttattaaattatatcttgtagaagtattctttcgacactttaaaatgtacctgatatgtaaatgcatttcttgagatattttaaactttgtacaaacacttactttttagaatgataatgtaaactgaagaactaaatataaataactcaaagcacaaacatacaagtaacgacataaggttgagttcgctagtgcattgaagataaaaatgatttgtccaagagatcttgagctcaaggatttgcaatagcaagggaaaaatattttactccttttttacattggtttcatagggttgtggtacaatttaataatttaatgcctctaccattttatagacattttataaaatgtctctttgcgtttcatatggttgtggtataatttaataatttaatgtctctagaaaatgcccataccattttatagatattttataaaatacctctttgtttgtacagacaattcaccgtaagtgtcactagaaaatgcctctaccatcttatagatattttataaaatacctctttgtttgtagagacaattcaccataagtgtctatagaaaacgcctctaccaacttatagacaaatttataaaatacctcttgtctgtggtgaaaaatgcctctaccatcttatatattttataaaatgtctctttgtttgtagagacaattcaccataagtgtctctatagaatgcctctaccaacttatggacattttataaaatacctcttatttgtggtgaaaaatgcctctactatcttatagacattttgtaaaatgcctctttgtttgtaaagacaattcaccataagtgcctctggaaaatacctctaccgacttatagacattttataaaattcccattgtttgttgtgaaaaatgtctccaccatcttgtagacattttataaaatgcctcttngtttacacagacaattcaccataagtatctctagtacatgcctctaccatcttatagacattttataaaatgtctcgttgcttgtagagacaattcactataagtgcctctaccaacttatagacattttataaaatgtcttgtttgtagacacaattcaccataaaacacttcttaggtattttattttaaaatgcctctacagtattgtaaaaacatttaaaaagtgtctccacaaagcatttttcttgtagttggctcttattttggggttggtcttgccttccataggtatctctccacgtcccactaggtgtacaaaccaaataggactaaagaaaaccttagcccaagcaagggaacttgagaaacgacaaaatcaggcacggagtcagactctgccagtctatctggccacatgccgtcagttagaccggccccacactgtctgtctgaccggctctatgacgatagtcagacttgtcgcgcgtagcaagctaggtccttttcaaatttggctatattttcctattttcgctttaggtgccaaatttagggttttatgtcacatactccatccaagataaaaaaaaatctaaatctaggacgaagggagtaggtgaatttgtcatattcgatggagaaggaaaaaaaaaagaaaacttggaaaactgtctagagccttcgcacatagttttcgaatacgattatgctttaaaaaaacaaatgaattcacaggtaatagcagctaaacctctcaaatgtaataccagcaaaaccgtttaagaaataccagcgaatccttagaagcacctcaaataccaccatactttttatttttcgtgacgtgaaatggttacgttgttgcaaacaaagcatattattttgtctatagtatgaaaatcttgccccagcgatctctataaatactgagaacctctagaaagtactccaaactatcatcagccatcactttcccccaccttatcaatctgccctcctgaccctagaggtgacca

SEQ ID NO: 2319 - DNA, 2000 bp, Oryza sativa
  N_region (1573)..(1573): n = any nucleotide
  N_region (1850)..(1850): n = any nucleotide
  N_region (1892)..(1892): n = any nucleotide
atatctgggccttttgccagaatcccagctgaaatttctgtcggtttccatcagtagaaaaacaaacccaaaaaaagagaaggtaaatctttgtcgcatctcgccatgtaaaaaaaagtactccgtactctataatctttttttatagggatggattacattagcagcaaaaggcttgttttggttactactactacgcatcacgcccagaacgtcgcgagatcgcccatagaattatccctatacgtggacacgtagggcctatctttttcccgtaatataccgtatggctactaatatactccctccgttttaaaatatttgacaccgttaatttcttagcacatgtttgactgttcgtcttattaaaaaaatttgtgaaatatgttaaactatatgtgtacatgaaagtatatttaacaatgaatcaaattatatgaaaagaataaataattacttaaatattttgaataaatattttgaataagacgaatggtcaaacatgtattaaaaaatcaatggtgtcaaatattttgaaacggagggagtactccgtactaagatttccatagagatagggtctacttcctctattgtatattataaattctttaatttttttctagtcaaattttattaaatctgatcaagtttatattaaaatttagcaacatctaaaatatcaaattagttttattttaataatttataaataaatttttatgtatatatttttagcaatttagaaactaatgataagaaataaacttggatgaaaaattaaaaacggaaataaattttgatttcatgcaagggaaacaccggtgaggccgtggcgtggccgtagcggtcgtctgattgggggaaagcgccagacttccttttctgccgaacgagacgtcgcgtgccgatacggctggggccacactccggtacacgtacacgacgagacgacgtccgtgcgacgcagcggcggagagatactagtaggagtagtactacacttttgcttggttcttttcctcgcggggcacgcaaggtgcggtccaccccctcctcgcggccattgcgcctctctctctcgccgaagtggtagaggcaacgcagcagcagcagcagcagcaagtgtccctgtgtccgtctccgcttctcctcctgcctcctgcagtctcgtctccaccgactgcaactaaaaccctcctcctccggcccctctcaactgcagagcgcgaccaccacctcagacaaacccgaggttttcttcttcttcttcttcttgatcgatgcagccagcagccatcgttcttgcggggaaagggttcttttttcgttttcttttttttttgtggctgctgatcggggattatcaccaccttcgcgcgatctctcgtttttttctctgtggaattgggggtggtggatggatggttgatactcctgttcatagatggcgatggtccaagtttatccctttttaatttttattttttttcggatttgtcctgttgctgtagttgccgtttcttggcttcttgctttcaatgccttctctcttctccttttctctttcttncttttttttttattttttgttgttgttgttgttgttgttgttgttgttgttgttgttgtctgttcttgggggtaatggtgtcccgatcgtattggacaagccttcgtgtatgtcactgattggaattggagtgtggagttagacgccgacaggtgaggcagatgaacaagagttccaacccaaaagttcactcatgaagtgttgtgtaaatagaagtaaatataagggagaaaatactagttgcttgggggagttgggattctccaaaagattgtgntttttttcccttttcggttacgcttggtgagaagatgaattnattttggagatggtggacgacgcctatatttctgttttctggctatctaattctgacgatggcgtctcatgtttttcaggtgcgtttcgcgtgaagcgggttttaagg

SEQ ID NO: 2320 - DNA, 2000 bp, Oryza sativa
  N_region (1125)..(1125): n = any nucleotide
aggcggatttcggggcccgacgcggcggcggcgcaccggagagaatgacgccccgcggcggcggcggcgaggagcggcgagctggtggtgggtggggaatagggcaaggggatttttattttttttttattttttttcttcttcacaaaatgcgatgggccaatgggaaaatggaaaatgaacggctatatttgcctgtagtttgctgtactttgctggctttcctaaagatttgatagtcatcaatatttgtaaaaatattttgtaaaattttaagaagggtatgacattgtggcaaatcacattttttatatgaacttaagcatgtgagattatggtcaaagttttaaattgtataccaaatattgtcctgaatattaaatttctacgagaactttatcctaaagattatcctaaatattaaatatcaaattttatatcaaagattttttttattggtatatatgctctcctctcatcaatcttttttttccttctatgttatctatttcgttttcttctccaactagaggtgagtcatcgcaaaaccaagctttaaaaagcagagaaagaggacatggaaagagaagaagaaaaaaccgagttttaggattttgacgggttggataatacaaaacgtgataaataagtagacataacatgttttttatagtatgaataacatgttaaaccacatgttttttgaactcataaatggtataattattttaaaaatatatatatacatgtgaatttcttacaatattgtttaaatccatttcactttataatttaatcattcatttataactgttaacaataatcataaattattcagctactcagccatatgtagcacaaaacaacgtggacatgcaaagaaaaataaaaaaaaaacagcactacattttaacttcgtgccaaaaacgttaagcagtaaattataagtaatgggtaacactaaaaggaaaaaaaatattcgcttcatccaataaacacaacttaaaatatgatatgatgaacacagataacgttttgttgtataataaatctggatagttcatgtgtactatgaattctggttggttttttatgggacagagagattactgctcgttcagatgnttatagtatttggcgtccgtttaaatgttgctatattttaacggggtaatagtaataaacccgttttgttttccccaataatgccaaacatcacacgctaagcctgcctgctctgctaatccccctacgcaacacaatccccttctctccttccccggaagaagaacaaagagcagctgaggcgagcaagcaaaggcaacaccaagaaagcatccaagatctctctctctctctctctctctctctctctctctctctccctcccttccacaacgctcgcctctgttcgtcctcctcatccgcaaccaccccgaaggcccaaccaagatccacaggtgaggtgagctctgtcttgtttgccgatgcttgacttgcttctgcttggagggtgtccgggttcttgattagatgcgtttccgggtgcaatccggagaggatatgttgctgaaatcacggtgttcaatcgagaaagctactaacttgattgcttgattctccggctgctcgctgtattgttctctcttgtttttttgttttttagttcagactttagagatcagagtgtgcgtgagctgttcttgattcgattcgatcactctagctagatcgaacctgcctgtgtggctaatttgattatgtagtttgtgcaattgaagaggcggacccgatttggggggcaaaattggttctttttttttgtgtgtgttctgctcttgcttacatctgcaatctacaactctgaatcttctgagcatctattttctgtccatttacattgctgtcagtttggtttctttgagtagtaataactaactagagttagcactttttgtatgtatagatggattgttccaatggtgaggttcagcatcagt

SEQ ID NO: 2321 - DNA, 2000 bp, Oryza sativa
tgaggcgaggcccaagagatttcagatgacggcttctttgatgggtgaagatgagatatgtattggcggtgctatagggtggttaaaatgtttgaatgtgaactttttgtttctcgtgtgtacttttacacttagtcatatgctccttggcctttttaaaagttatgcatcctattttcccaacttttagggtgcatttgggagggcataaggccatcagcaatgcgtgtttctagcccgtgccctcgtaaacagtgtgctccttccgtcaccgggccgtgccccaggcgagaggcacaacccccacgcgggagatgggtggctttggctctgtcgagaagtgaccctctctagcgggtggtcgtgagacccctctttgtaagttcagccgggggaaaaggagcgctgatcaagagcgtatatacgcctagagtgctcagagtctacgtgtgagactggggattatacaggttcgggccgcttagaagcgtaacaacctactcctgtgcttgggattatagttggcttttacagagtttcttgagctccttggagaacctagctgttcttcctcaggctcaagtggtcgagagtcgtccccttttttcggtgggcaaggtcctctttttatagttcaaggggataccacatgcaccgcctctacctactccttcatgaaaggggggacccacaccgcctggaacggactgccattcgtgccttcgcctagaagctaagcagccgtccgtccttgagtggggcccagcgccatcccccgcctgacacgggggacacccctgtcattcccctttaaatgaatggagacttttggtggttcacctcacgtggagggagctcctgacgatgcatcgatgggacggagcatacctgcccctactccaccgagcacagggcggaacgtgggggcaccgttgcccgtccaatcggacgtgaccggtcacaggccagtcacaatccggtcatgcccgattgacgtgggtcattcaggcggtgccgcgcgtccgccctcatcgcattaaacgcagcgagggacggttgggacgtcgcgcattaatggcgctcagcctcacccttcgccctactcactttccccgccacgtggtggccgggcgagggcctcggggttaggcaccccgagggcctaaggggtgtgatgtggcaccccgaggccccctagttgcctcagcgtcgtccggggaaccttggggggggggtgggcgaggcttcatggtcgcgtggctagacgggaaggagattttccttatgttcgcatacccccgtgcccatatcaccgacagtagcccccggcatcgcgtcagacagcggtcctctcagggcggtctggcgtggtgcctcatgacttcccgtgccgtgatggtgggtcccgctgggattccaaacagccgccgtcggctggcccggctcgagcgccagccatgacgatggcttggccgctattaactgcgccactcacgggggcgcttaattcgggaaaatcgaggggtctgccagatcactcccataattatcacctaacatcacctcgactcccccgctgtcaggcatgcgatgggaccgacggcatgcccgcctagccacgaccgtggtcatcgcatgccccgcgccgagcgcgcgactgacaggcgcattaagcacggggcacgggtttagtggggcgaacggggcgagtgggcgcgagaatcgacgaggcaactgcagtggcgagaaacaaggaggcgggcgcgggcgaggcgaggataaaaaggaggggagatggagaattcgtctccttcctttcgccgatttcacgctcgcatactcgctcctcagcccccaacgcatctctccctccaccgtgctccgcgcaccaagctcctcgccgactcccgccggctatcatggctcaagacgctggcaacgccgttctcccaacagcgcgcattacggcagagaggcatcttagcctcatccgcaagatc

SEQ ID NO: 2322 - DNA, 2000 bp, Oryza sativa
  N_region (555)..(555): n = any nucleotide
gaaccttggtgaacagcttgttctcggggttggaggtaacgaagccgacgtagagtgagccctccagtatagtcaggatctcggtcgcacgtgggtgaatgtgcggagggttaagaccatagggcgcatagtcgacgcgggccaaagagatgcccaaggtgttgagcccagagatctgggcgacgttgactcctgtcacggccgatccctgcctgttgctggtgtttccagccatgtgaaggccggagaagaagaagtcttccacggtgatggccgctgggtccttgcatgcaaatccattgactagaactgcaagtttgcccaaacatgtagaatagttcaatcggattagttaacaacaaaattaccctgtttaaccctaaagacaagtacacgctatattactgatttaaatgcacatataagtaaaatatatggaaactaactgtagcatgtttgcagtattaccttgcgacatcttgtcagcgacgcagaagtcctggagttggctgggatcggaggcgaaagcattcgaaatcgatacagccaggaggncaaggaggaagaaccatgttgaggccattaggagtttaggacactaatcactaaatcaagtgcgtgtcaattttagcaggaaacaaaaggatgcaacgcaaagtttcttgtgatgtgatgaactgatgatgatgctttgctgtgtgcttcaaacggggtgagagatacccagtatatatagagatggagtagagtaggaggatcaagctggcttgtgcttgctttgtgttgagaaagttaattggatgtttaatatgtattgaggtttgaagaaatggtctacgccaattctctggtaatttggaacaagtctgaataaacgtgttgtggcctgcctgcagcagcggctacagcaaattcagtaagaagctaatatagcttctgactgattcttcatcatgtgtaaattgtgctctctccaggtggactcgatggtaacggcacctgcttaaacaaattacgtcaagcaacaatttaataatggctatgcattacgcgttcgtcgttcggttaacaaattctgtttgggaaaactacgttttaattaggtatcattatcattgagaaaggcatgcagcagttagcaccacaacaaggtgtggattagtcgatgtactcggtttcaaggcatgcagagtcttaataaattttgatatgggagtccgtcctcttatatccaacgtttaattaggcataattttgtagatagtataggcgtgtagtcaatcctctgtcatttcggttggtcgaaggagttttaatcccgtcttcttggaaggaagcaagcaatgaaaagcaagcattattatttccttacgtgcatttttctccggaacaaatatggtgttaattttaattgctatgatgagataagaatattacaatggagatcggaccattgtcaatcgatgatcaggccggccggcaaacagcaaaccagtaaagaattaatatgatccatatatccaccttggacaacattaatagccacggctgctaagtctgcagatacagtactcatccatggcttagacttcttcaagcacaaagcatgtatgataacattaataagatttatttcaggatagataggtatatgtatctgcagactgcaggtgcccatccacgcaatattatgtatttatgtatgacgccttcttcctatctagctactagctagcagtgactcgttcttggtgctgtacgacgcatgcatggcatgcacagacagacaatattctctgtcatcacaatcattaccagagatttcagagttcaataggctattctgaaacctgaactccccctataaataccagctttcctctcaatccatgacattcttcatcatcagttcatcacaatatatatatcatcagagcaatctgctataccataagtattcttttctatagagaactctctgcctcctccaggctccagct

SEQ ID NO: 2323 - DNA, 2000 bp, Oryza sativa
tagagaagaaaaggagtacgacaaacggtatctttcagatattttccggccactgccttgcgagtggtttgtatttcgtttcgtcgatgaggatgctgtagtttgaagttcacgcatgtgtcttttgcagagatagattagagcaaaaattggatcacgtgcgtcagtacatgagattcatcgatcaaaactgtgaactcggagtgaccattgaatcatcggttcattgcacattcacacaggggcttcgttaaaatatcgtcgtatcatgtaacatttcttctacttttgcgtattggagttaaatcttaaaatcatgatcttaggctatgcacgatcacctaatttctcttatacagaatttgatggtgtactgaccggatgaagaagccatatggttgccttagatgcgtcggtgtagtagttgtgaggcgacggtgatgaagatcaccatgcagtgacggcgatgggaattcgcccttcactccccttcaacacgccttaaaatcggtagtttgagggtttggagaattggcttagcgtacatgagtcgtcgctcgtgcacggggttaaggttccctttttatgcgtattgaggggatcaggggtgattccttctcgaggaaaatgacgcttccgatcataaagctaaagagagaaacgtgtgagagaatgcgtgagactcgttcctcaatgttagggatcgcgtgggctttggtgggctaagcccaacgctctcctttctggctcggtggccagacatcaaccaacattgcgtactcgttttgcacatgtactatcttggtgttatgcatctatttatatatgccctctgcgttccagatttccgggcgtccccaacctgcaatggaataagttcactttgagtccctcaaatactgctccaatctgattcatacccctcaaccacaataccatatatcttgattcttgacccttaaactatattggaaccagtgttttcgctgacgtggctcgttgacttggtcaacccctacgataatgtggcagcccagtcacaaattagaagtgggcccatatgtaagtgactagagagagaaaaaactatgacccatttgtcatactcgttgacactgtaccccttatatctcccttccctctcctgctctccctgatcgacaatgccgattggcgaacgagggagcggtggcatgggcctggggtggcaggtggcggcgatagccaccagcaagtgccggagaggcggagagggggctagggaactggcgtgccgccagcactaggggttgggggttggggcattgccgtggcagcggaggaggtgcactgaggagaggaggggtgggtaaggagcagatgaaagcggagtaatggtcgcggcgaaggaggagctcgagctccatgacgtagtagagagagaatgttagtgggcccacatttatgtttttttaatttttatatgccacataagcatcacgtcaatgtcacgtaggacgaaaactggtcaacaccaccatgtagacgcacgacagcgaaactgctcttcaaaaccaccgaggaagacaaattgcatcagttttaatagttggagggtcaagatacccggttagtcaaggcagtcaaagtgaacttattcaacctgcaatccctctgtctccgaacgcaggcccgttggcccagctgcgcaatgcctgctgccgtgctccgtctcgaactctcgatcccctgtaacctgtttctcgtcttcctactcctttggactactagcccgacgcgaccaaagctgaatcaacctatggatgcagtggcccaatgcccactggccagctggtccactccgtcgatctcgtcttcttcctttccacggcacacggcagcgctgacggaatcactcactggccactcaacttgctactcatacccgatgatcaactgagccaatatatacactcgttctcttcagacttcagtgcaagatcacgattcacgagtccgcg

SEQ ID NO: 2324 - DNA, 2000 bp, Oryza sativa
  N_region (1249)..(1249): n = any nucleotide
tgagactgtatcggttaggtctggtcttctgtcttagacgatatatctctacaattacaatgttgttttaaatatatgtggtatgtccatcatgttttcataggcttatcggcttattgagtattagattattatatacaatcatcggttaggtttgacctactacattattgttgataatctaagtattgttaagtcgataggtttcttacctatgttttatcggagtgctagccaataaattatttgtgcaccagacttccagccaacgtaagttttaaccactgagccaacatttaatattcagcataaatatcgtcgattggttcatcgggcatctacttcattatattataatcggctgattggattgtttgttaaagttctatcattgtttatacaagtgttagaatctatatcggacatatagtcgattgttcaaaattctatggacattggctagtatcgatatcagctaatatcgctacatttgcttgttagccgatcggcttttcgatcatttacatatttatatgtcttgttagtcgcaggatcaaactgactagcacgcccgtatctcatcaataatttagaacctgcactagcgttttttttcggagacctgcactagagttaagcagatctcccaaacaattgtgttgtttttcgcgtcaatggaggtgagtgttacatcgataatggtgcgcttgcgaattttagatgtgaccgtatcacaacgacgactatgtagttttttttttttgttagttctcaactttatctttctctttttcacacgcatgttttctcaactactaaatgatatgtattttacaaaagtattagtaagaaagttactttagaaaattatattaaccaaaattttaagttattttaattaatacttaattagttatgtattaatctatcgttttccatgttgcatacgaaggggaggaggagttgagaataagtcacatcaacagtaaataaagtcaaactcgcgacaggcgtggccgacctcaaccacacccgaccgtccactgaaccgggacatcctcacggctctccccaatcccctatcccccaaacccgtccagatccatcgtgccagctactatagctcccaaacaccggtcgtaactcgtaaccccgtacggagcgtgtcggtgtccggtgtccccccgtatctccgtgcccccccaccacccacccacctacccccgtcacgtgccggccatcccaaccnaaaccagctcgttttccgcgagaacccacggccccctcggtctcccctccgtctgcagggagccagacacacggggtcgcggccctacgtgccttgggccgtgcggcccccatcgccgtcctcatcctgatcctaatcccaagcgaccgcggcgcgatcacgcggcgaccaaccatttctctcgtcgacgagacgacgtgcccgccgctcgccaccccccccaaccgctcgcgcggcataaatacagcacgccacgcccatccctctccctctcaccaacaacagtaacccaaccagagagcttgcggaagcgggggtttggtgcgggcgcgcgcgtgtgaggggggagagaaggccaggaggaggcgacgccgtcgcccgagggaggcaaaaatccgatcctcctcctgccctgctcgctcgctcgctcgcctgcgctgcgcgcacttggccccgtcccgtccgttcccgctcgccaggtgatttcttgcagccatttttccccgagattacatggtttgtggggttagttgggtgggtggtgatgccattgttgcgtcgaatggcccgctggggttggatttgaggtcgcaatcctcgtcggtgtgccccgaatagagtgattcttgtctgcttcgggggatctcgatttggggattaggagaagctttacaatcttctcgatagtatacaagattttctttctgatttatctgctgtttttgcgctcaaaatgtgcaggcatagaaag

SEQ ID NO: 2325 - DNA, 2000 bp, Oryza sativa
agtcctccgatgccggcatttgccaattgccgtggagaccttgttaaaggaaattgtaagcagagagatgcgatgggaaggcatattgctgaccctctgcctggagaattaggaggctggtgtgtgataaataaagcgtccgactagttccggcatgtgtttctagaaagattctgtgctgttcgtgttgccattttactctgaccaggcaaatcgttcgtctgttggttgttgtatgtatcccggccattgtggtcgccggcggtgtgcattggcatttcaggtgattttgtacatatgcttcttcttccttagagttggttgatgatgattctcgtctgaacaatgaataggaagtgtagcaagatccttgcgatgcatggggggtgctagcttatgattcttgttgggtacatttcatatgtagaaaatttcacaaattcaataggaacattgtgatatactagtgaagagccttttcactggttgagtaaatttttaacctactgatatatgtatatgaaacatactactagtttttatttatttatttttgtctgaatagtgttcagtcggtttcctttcaatttcttatcttacgcacacatgccgaactcgggttgctatctggcccgtcccaagacgagttctgatcggatccggcccagctcagccaatgccaagctgcagatgatgaacaagaagcatatggccttatcttatcttttcgtttatatttatacttatcagacaaaatttaaaattttaacactagatttaaaactaattttcaggtttttctcattaaaatttgtttttcaatctttgcttttaggtcgttaagaacacgtatataaaaattttattcacaaattacttctcatttacgaatatgccgtttggccaaacaataggcatctgaaggtgcaggtgacgggagcgaacaagttccagggcctccttccattctgctcaagcagcagcagggggaggaagaagtagttaccagcagtttattaattaggccaagtggacaagatcgatggcgcagaaaacgtacccttccacaactgtataatctagattaaattttacaaaaactacatgtattttacattatttataacaaaactataaatttaaaagcttgtttttttcgctgggatggtgaagaatgccgacccgatgtatattaaggaaaagggaaaaactgtacaaacctcctcgggaggaggcacaaatgtagtgcatcaaaagcaccgcctttacaacattaagcaagtttcaaaggctataatctctctaaagctggtgctgcggcaacactcaatgagctaactagccctgctaattttcaagtttcccattcatcacacatgatcgcacacagttgtgtgaccgacgagcttgttttataaaattacaaattcagcgtctccgtttatcacgaaactagacatacttcgtgcaatatatccatcaacacagataatctctatatcggtaatcactaattagtgagcagatcatccatcaacatagataagatctacaattaattcgttacgaatgaccggtttcgtagtggtggtggagagggaggccgccgaccaaaccaaggtcctgcggccgggaaaacgatgtggcttttagtagcaggagtcggcagaaagcatgttggtcggagaagaacatatgccgtacgttttgtacaggtggtgcatccagaagaatctcgatcgcaactagcggggacgtgtgtccagtcctggtgttccgatcgatcgacgtggtgtacatgcatcgcgtccacgtaacagccattcatgcatgatgatcgtctttgtccatcgaccaaagtcgtccaagtgcagcatatatataatcggatgcaactcgagcaaccttacttcccatcatacgcactgcaagcttagcttggtgaggatcgatcgatcggagaagatcatcagattgataattaaagtaagaaaggtcga

SEQ ID NO: 2326 - DNA, 838 bp, Oryza sativa
  N_region (110)..(110): n = any nucleotide
  N_region (715)..(715): n = any nucleotide
  N_region (757)..(757): n = any nucleotide
ctgggatgcctcgccttcgacgacttcgccggtgcgctgcccgttgtcaccggctctgcctcagctctcttccccaggcttggcggctctgggcccaccgttcccatgcngtcattactcaccccccgtcagccctggcatgcatggttgtggccccgcctgtcagggagaggggtctccaaagagagctttttcctgaggagccattaatgtcgacgcctgcttcgtcgtcaccggtgcgccctgacgtcgatgcttcatcggtcctggcgcccgctgagcgggatggagattttttcaacttgccgggagcgcgcctcgctccctcttttgtgtcgactttgctcgtccctggcccattggctgtctaccgccgccgccgggagctcacttggcccgcgggcctttcctctttttgggctgggggtggaggagtgggctgacccacggtcgctccttgccgacccagtcactctctcttcgccgcgcgaaccttctcaatctccacggcacgacaaagcagctggcagcccagaggcggctgttgaatgggccacggctgctccccgccagcccagtcactccatcttcaccgcgtgtctctgctctgtctccaccgcgcgatggagtggccatcgatccggaggcgtctgctgccgcgccggcggccttggccgatctggtgggaccaccgccttcgtcgcttcttgggaancgtccccgccaaccttgacaccgacatcgctcgtccccgtanactccaaggtggagtgagcgccttgccgcccagaatggtgggaaacatatccacacgatcactagagcacaacgggtggtg

SEQ ID NO: 2327 - DNA, 2000 bp, Oryza sativa
agcagaacccgtggaagatggcaccgacgacggcgaggatgagtcggagaaaaagaagaagaagaagaagaagaaatccaaaagcaagagctccgatgatgatgatgatgatgccgagaagaaatccaagaagaaatcgaagaactcggacgacgatgaagatgacaagaagaaatccaagaagaaacccaagaacccggacgacgatgaagatgacaagaagaaatcgaaaaagaagagctccgatgaagacaacgacggtgccaagaagaagaagaagaagaaatccaagggcaagagctccgatgaggaagatgatgaaaagcccaagaagaaatccaaaagcaagagcaaatcctcctcctccgacgaagaagatgagaagaaatcaaaatccgagggccaagccgcggccaaaccaaaggaagaagacgaggaaggcggctcggcatcggcatcggcatcgacatcggcgccgaagaatgagcaccactcgggcaccatgtcgctcccggacccggacatgatcgcgcagccggtgatgcaggcgctgaacccagtggtgaaggcgctgtgcggcaagacggaccacgccgacctgtgcgagtcctccatcgggcagctgccgcagcagccgccggcgcagctggacgacatcggcgtcctcaggctctccatgaacgcgctgcgcgccaaggtgcaggaggcgatcagcgtggcgacgaacaggatgggggcggcctccggggacgaggtgtccaaggacgccatgggcgactgcctccagatgtacgacgacatgaaatccaacctggactcggcggacgcggcgctcaagaagggggacaaggacacggcgcacaccatgctcgactccgcgcgcaccgacgtcgacacctgcgaggacggcttcagcgagcgggaggggctcaagccgatcatgggcgacctcgacaagatcctcgccgagctctccagcaacaccatcgccattgcctccgccataattgagtgactcatctcattttctctctgtctttctccctctgaccgtcttgaacaaacaactgaagtgtatgtagtatgtaccgagtgtttcaaaagctgaaactgcattatgtatctgtaccattatgattgattattatgacttgtgaaattgtgaattgtgattatgacatccatccccttttttaatcttgggattcttggttaatcagattagttaacttgtcaatggggaggaatttcctataggcgccaacattaatcagcaaacaaagtttcacacacacacacaaattttgttcagaatttgtttctttcaacaggggaaaaaaacccagaatttgcagggaaactttcgtttgattaataataagaatggagaagctttttatcagcatattaaatttcacataataaaaaagtcgtttgataagtaagagtggggaagctttatcagcacaggaaatttcgcaaaaaaagaagattcagaattttgctggcaaagcttttatttgattagtagcaatgagagtggaaaaaaaagaaaaaaaaataggggcattccgagaattgaactcgggacctctcgcaccctaagcgagaatcataccactagaccaaatgcccttgatgatgaattattaaataaattataccaattcaaatgtgtccaatatattttggtgtaatcagcatttggagatagtctcctgtttctgcttgtaattgattcttcatttcataatcagaagaggagagtgtgttcttgttctaaatcccccaatctggattttcaaataagctgcagcatctcagacaatcaaagaggtaattaagtggctaaatgctaatgccatcaatcatggaagagtactcaactaacccaagttactgacaacatgacctcatctcactgctaacacgaacctggtactgaacatttcgttcaaattctgaatttggtgcgagaattgtgaccataagcaatcaag

SEQ ID NO: 2328 - DNA, 2000 bp, Oryza sativa
aaactttagaattccaaattcagaagtactatttatgctcacattgaactctccatttgttatcgttattaacttaaatcgaaatattataatttaatataccgaaataccttagtgtgcagccttagttatacaaattattgctttaataatatcaagatatgaacaaattttccttagtctagtttagaatttgagaactaatatacccgatataacattagtttgcaggctcaactattatattttcataatttaacaacatatcagaattcgtatttttcccctttattcaattcaaagatttagaatttttatagcaagatattgtagattgttgtcttgatcgtagattatcataatctaataattccacaaattgtcttaataaatatcgtgtgataattagtttgatctcaatcataaatttttcatggtttaaaaattcctacaaatatatagttgaatttggtttgtacacagagtcatagttttcccatgacttgcatcatgttgtattttcacttttgcgtcatgttagtggccttaaatcctgtagacctaattaattaatattctctagggttagagttaatcatgggataaaaaaaattaaaaatagatatagtttaagataagcacgtcaagaaaatagaccaacggtataccactgtgcctcacgttaaattaaaaaagaagtctttttctcaatacattctactgctacaaatatgatgctcagatttttatgattagcttgtgagttcaaagcaagtgcctaatagattgaggatgtggtgcttacaatcgaacttcttaactgcaattagtcaaactgacagaaaacttttatgaattaattactgatatgcagtgaccacggatggacttatttggggcaagcaaactttgtaaatcaacatctcaatacataaaagttataatatgatcatataaggtaaataccaaaaattgttggcctgcttaccgggtcactgcatggatgagcttggctgcacgtcttccgtcgtgtcgcgatgcgatgatcggccttgcgagcagaacgtccaggcgggatgaaagaagtccgctcgtcaccatctccgggcggccatgccagcgagcggaactggagtgcaaagaaggaagtcctcacgtttacgagcaaacatacgtaataagggatgagatcgatacattaacatgtgcaaatctaaggttggatctaatctagatatgattggactttactgagcccacggtacataatatacggttagaatgctaatcgatggctatatatttctagttaacgtgagggctcgtagaaagtgtccaattagtataggtaggtatagatgtgtatagatgtgcaaatctaacgttggttctaatctagatgtgattgggctttacagagcccacggtacataatatacggtcaggatgctttaatctattgaatcgatggctatatatttatagttaacttgaggactcgtagaaagtattcaattagtataggtatagatagatagatagatagatagatagatagatagatagatagatagatagatagattatgacaccgttttacttgttgggaaagcagttaggcaatacccagcggtccatcctaatcgaacgcataccgtgcaagctgaccaatcctggtggcggtaaaaatattctgcacgctttgttgatggtttgaaacaaataactcaactcggaaaaaatattatgcaaaatttacaattgtttccctccaaaataacctaactttttgcgaatttgggtccacaaaacgtgtttgccctaaaaatattgaacaatattaaagggcaaagagtaaaatgtgtcgacattacgtgggcggcgtgttgtttgtctgatctctgatgacgaatagatatccgagctgaataaaaatgtcaccatagtatagaactccccataacttaagagttagtaggattgtcgacaaaagtaggagg

SEQ ID NO: 2329 - DNA, 2000 bp, Oryza sativa
tagctttctactttctgccaaacaacccgtccatggtttgaatccaacaccctaagttttggccacttaatttgtgtcatgcatagattgaggtagatcaaatcatcgttttgcttaaacatcgctttgtctaatcttattttctttgattcatgttgacctaactatagagacggtaaaatgttgcaaagggcataacctaggatttaggtttggttttttcaagtcgaatcgtcattccaagatatgattgatagcattgctctatctttcttgcacttctatgatttgggacttggtcgattcatgcacttcatactcctctgcataccataaagttgatatcttgttatgtttcgcatttgttaagaggaatgtttggcatttcatactactgatgtgattagtcttggtcaattagattaatttgggctgccaatcgtactgtcaatatcctttaagtggtacatccaaaactccctatgatatgttgtaccatcatttttaggtggtataaattcctcgtgaagtccatccttttgtgatatattaggtatgtagcctacaatatatgaaatcgctttgctcacatgtctttgtgttaatatgcttcttatcttggttggagtatgttgtttcttatttggttgtctatgaaaacattttgatactttgatcaattagtcacacgtttgagtgcctattggttgctcaatcggcatatggttggagatggtagtgttgaaaagttatactggattggcagtttaactaggaaaatgtggaatggttggttgcatccaaaaaccgttcatactttgtaaatttggatgtttttagctattcgaattgggtggtttttaggtgaactaggcattaaaaccgggatgagttggaccgggtggagggctgatgattttttgtagtgggccaaaccgaggtccaattccttccatcaaggcttgcgtcatcatttcttctttttgcaaagctcctaaaaaggggcgctaggtggggactcgacctcgggtttccatggtgtaggcaacctagaaaggaacatgcatcctagatgattattttgatattgtagttcgatcgctcggttgaacagtcaaaccacttgaacatcgcttagctagttcactttctagttcaattgattatactgcgggtgcctatgagtgaacactctaaggagcaccgaacacctataaatgtgttttgtgttgattgacgtgatgttttagaaatgagttgctaggagttacttataggattgtagctaatgtacaaaaggctacaatacttttatgtgcactagataagcaaggaaaatcatccatagggtggatgacaagcaagtcttgcctttgccctgggttgttgaggtcatcaaccactatgttttgctataggccaattagaccaatgcccatgtgtcgggttaaggacttgcacctcttgagggtagccttgttcgtcccttgcctcagccatagagcacatggagtctaacccatgccaatactaagggagtgagggtgtaccacctagaaaccatgagctgcttataggggaaccttagaataaagggttccatcaacatgctacaacctttgagaaagaaccaaaacactggccacatacttgagtgtagcaaatagtggcaatgaaactttaaccagacagataactgatgcataccatctagaagatccattccatgtttgattcttttccctaactatagtgggtatgtaaataaagagtcctcgacttatttaaacataactacaattgctagagacaaggtgatgcttgtaatattcaatagaccagtaacaatgcaaaactgcagcctgtccagtttttttttttttctttaaatggtaataccatctacttaaaacactacgatatttcttgtcactgttgtaataccattaatgcaagactttccatgcatatggtgtagtgtaattaattgcttactagct

SEQ ID NO: 2330 - DNA, 1790 bp, Oryza sativa
  N_region (79)..(80): n = any nucleotide
  N_region (601)..(601): n = any nucleotide
  N_region (606)..(606): n = any nucleotide
gaatgctgactggactgcaggtatatgccacgtagaccaaaaccaccgtggattggatcgagagggtaattcatcctgnntgtatagtggggggtgaagaatgtccggttttatggtttaggggggtaatcgggacgacccgcgatagttgggcggtaattcgtacttttttccaaaattaaatgcagtttgagatgtgatactcatacaaaccagcgttccttcagtcttaggagatgatgggcatgattagcttgaaacagattgcactagcgaaattcttttctttcccttccaattctagtttagacttctaacgatgaacgtttcaatcaaccaacagccaagtggaccctcaagaatattgttagcaatcttggtacgatctagctgatatgccttggaagcttcctgctacgtaaatgtacaacatgggtgcgtatcttcaatccaccaaaacaataatagtacgtgtgacgatctttttgtcccaaacactcaaacagcccatgttgaagctgttggctctggtccttttctgttttggattgaatcaactacctctttttctctaccaaaaaactggaatcgtgtgtgcccntgggntgtggagttaggctctcacgatcaataccgtcattcagagcagagcccagctgtctcgggctctcggccccgtacaattatccacacgcgcccgccatcgacctcaccatgcgatccttaactttgtcattttcgggaacgcattatgcatgtacttggaacactactgtactagtttctcacattttgttgcctaacttaagaagctcctccatttactctacacatgcccgtgttcattcatgcaaacagaaacgaccgcagcgaaggaaactcccgcgcagatcaggctccgccactgtaactttcactaagaattaccattgatgttcgaaaaatagttgataatcaaagaaacgttattagccgttcgactcaaccatgttattggctctgctgctgcacaacagaacagagcatttaccaagtcaaatcatggccagtcgtggacttgaaagtacgccacattttcgcgctgcccttaacttatcaaatctcagagactacctacaaacttccgaaaacgacggcagaattccagcagaatgcatgcacagcaattaacagcctaacagaagacgcgcgtccggaaatcaccctgccgtgcacggcaaacaccaaacggaaatgcatcagcgatgccccgagctgaccagctacgccaaacgccaaaacggtataccccgaaattgcagttgcaaggagccagggaccaatggaccatcagcccatcgcgagaagttaatggtgctactgtactatccaacacgtagttaattgtaaacactgtactaagcagtatacattttgcagacaggacaatacattatacaaccatacagtcatacagatacagatcagtagctttgcaacaagagaaaatcttgtgcatgcgacagcctgttttgactgccttttgttttatattgggtgaggaatcatttgacggcccgggttgtgttctgtgcaacgagacaatcccggcattgatcccttttttcccctggattttaaccgtgtgcaatttgggaggaccacgcacttgcggtgcacgcttgccatctccgttgctttataagcttgcagcgcgcgagccaacgagagaaaccggaagtctcttttgaggttgcaacgcacgcacagtttgcatccgcagcttagctagcgagtgacgagatcacagg

SEQ ID NO: 2331 - DNA, 2000 bp, Oryza sativa
tacttcaggcactggcaacccgctcttcccaaatgtcgctctactacatacccggatagggaggacttaagtgatctcgagggctgtcaccacctctacacctacctcaaacgtattgtgggatacgcaacaattattggataataattacctaaacaccacgtctaagaaattaatatctacttcagtgtttataactcactaaagcaatcactatattttagttgattatagtgaacaataatcccgtatgctatttaggaactaaccaagaaataattctcacaagataaatctaaattactcaggaagaatattatattaaaatcagagtaataaatagaataaaagaaatgagagaagattaccaacaactccggaattcttccgacttcttctactctactctcttcctattctagtatacaatatagtacaatggagcctcttataattcagctcaagcttggaagtgtgtgtgaaagtgaaggagtgaagctccttttatagggcagttatgacggttgtgagaaggggaaatgtccgaactgccccgcaaccgtcatgaggagagcatctggagcgtccacgccaaaccctaggatcaacggtgatcagaggagtttggccgaaccagggagtttagccgaaccagatcaacggtgatcagaggagcgaacctgggctgggccatccggggctggccttcggcttgtggactcccctgactctccatttctcggagttttggggtgagtctttgatattttgatgaagttcacaacccatcctcgtatggatacatgtttcttttcacttctagatttcctcccaacttcggggtttaacacctgcatacaaatatacactaacacttggtgaaatatgtgagattaaacacctatctctatgttggatgttttattatctggtagatgttggtggtatagaatcgacatttaatagccgccaacaaccacacatttcatttaggcttggatagagtacgaacatcgggtacaaattgcaagcttagactgtaggaacaatccattagatttacctaaatggtatgagtatccaaagtgtggttgtagagatcgctgctaggtggctaccgcctttgatattgtggatccacaaagtgaatccgcacctccttgtattgccctgagcaataaatatagttgtcatggcgaaaagataattgattttgaaatagaagtagagtaccaacgattgaaggagaatgaaaatgcaatatggactgacgaacgatggtgaggaccttcttttgcggaggcgattgtgaggcggcctaatggcgatctggcctccatgggggatctctccttcgcggacaagtgggatttctcactgggattggattttgcctcccagatttggtctcgtctccgatcaccggttaatttttcccgctctccctcatccgctttccatttggtggtttgtttttcacatttctccttccggctttctatggattctatggctattgccctcaattgctgtcttcggggaaatccaatgattttcgggttcgacatctccaaaattcctgttatagtttttggtgtcagataggaaggtaggtctctggatgtactccttgaaatctttccaaaataagttcttcaagcttcattttcacttatggaggaatggaggtcctgattggtaccgtgagtacacactatgggttcttgaagaggaaaattcttggactaaagttggtagaaaatcaaaacccatctcaaatggtgtcattcgacctggggtctcgtttgctaatgtgttttcctctgaacctactcggtctagagcagctgtactgattaaaaaagtttttgacaccatcaaggattccattcttgatcctaatcggccttccgttcttcctgtgaggaaattagtttttgactgtctggattttcctagacgaaatgttgttcaagtttctggcagtaatttgcttcacg

SEQ ID NO: 2332 - DNA, 963 bp, Oryza sativa
  N_region (784)..(784): n = any nucleotide
tgatttgggttcaaaccttcttttgactagaattcttttattcaattttgttttaaaacccctttttattattattatgaaattgtggtccaagaaacattcccaattttgcccttgaacctaaaccaaaataattccaatctcattagaattacttgttaatccatcctttggattttaaacctatcctttggattctcaatccaaatatccaaattcctccttttgatctagccactaatttaatttctgtggcttgatttccttctcggcacaagaataaaattattacgaatattgtgaataattgctcttgtgctaagaaaatagattatatctttgtcatccaaatttcctattagcctcaaacaattctttgaaatccatgccatatattttgaggctaaaaccctatttatccttctccaattatctttttcccactttcctatttacatattaaattttattcatatatccctcaccctttcatttgagtgcatcaaataaattccattatatactacttctaaaatattgcactcaaataattaggaaatctctctttgaaaattatctccaaaataaattcatctcaaaggttagccacttaaatttcttccaaatattaatttagattcaaactccatccctcaattccctacacaaattagaaagcctttctattcatttgggccgaattctccctctcttccttcggcccagaccggcccaattcagccgagccgccttcctccaggtgcgcgtgccgtgcacggcgcangccgccgccaaccgtcgtcgctaagaaatcggcgacgtgctgtcttctccacgtcgccgcagccgtgtcttcgtcgaccttctcctccgaaccgcctctctccaccaccctcgacccctataaatagacggcaaacctttccttttctcccccacaaaccaagctctctctcttctacc

SEQ ID NO: 2333 - DNA, 2000 bp, Oryza sativa
  N_region (1841)..(1841): n = any nucleotide
  N_region (1868)..(1868): n = any nucleotide
  N_region (1872)..(1872): n = any nucleotide
  N_region (1966)..(1966): n = any nucleotide
gaaagagagaaaggtgaaattgcctctaaaattttcatcaaacttcatttcaaattttatcttctcttttaacactggtggctagttcagttgattggtgcatgtgcgtgcctagtgttcgaatctccttcctggcaatgtttttctcttgataataaataaattgggttggcctgattgggacatggggtggagacattaaggagttttcccagaattatttcagaaattattgtaccaaaacagattccaataagggaatatcttaaaaacctacattattaaaaaaataatgtcttattaaaaactacattattagaaaattaagatttgtgctatactagatacatgtacatataggaaacatggtaattacagtatggttagtaattataactatattgtaaccatataaataattataactacataattaagtaattaactacttagagctcgaacctagactcgttgatagccctactccattgggtctttaacaatttctcaagcgtggatagaagatacatactgaaatgtatccatatatctctataatctctgtggaaagaaagaagagaagagagaagcagtcatttggattattttccgttcacaaactcacacagccacattgctttacgcggaaactagcttgcggaaactaattcgcaagacgacacaactttatactacgtcgctagtcttcatgcatcccatcaacacgcgtccacttctgatcatggaaaaaaatgggaatacggccacacggttgtccctttgcttttcttccatattaataataaattaaaaaactatgatttgaaaaaagcttcggatcggtcgactcagcaattagattctcatgcaaccacgtgcttcctattacgcaaattttgctataggatatcgtaacttcacggttgttatagtataccgcacaaaggtaacttttagagaagatattttataaacgtgataatttgtcaatagacaccataccgattaaaataataattcgcggttaaggaggagagaaaaatcgtgtgaaatgtcagaaatacccatggtcccacctatcagttctctcatctctcttctttcgttctaccctccgtcagtgccataggggtcatcgctgccgataggaagcagcacgcactgcacgggcaggatagggaggtgttccgccgcttcttccaatggccatggcttcgtcatcaacgagaaaattgacatttagccactgcaaggatgggtttcgctctaatgccattccgtcaaggatggatttcggcgaaattggaaaaacagcgaacaagcgtgttgcacgagcgtgacgatggcattttagcgaagcaacttggcggaattgcattacagcgaaacccatcctacaaagtgactaaatgtcaattttctcgtcatcaacacattcgaggacatcatgggtgccttcgtcaaggctacgtagcagcgctcaacccagaatgcgtgggggcatcaagacaacatgcgccggtgccggcacggatgccgacgtgagggccagcccaggcaacctaaccgacgtagacgctgaccgtatccttgcctagctcgacgcccatctaccggcgtccatgctgtacataagcttcggcaatatctcgcatctggcggcgaagcagacgctactacgaaaaccttttttcatgcgggcgggaaggatctttgcatgcggacatgcggttacgccaaccgcatgggcgagaaagtctgcgaaaatcacgcttttcacatgcggtcgcttataccgtccgcatgcgaaaataaattcggcaaacaaaaaaaattaaaanccaaaaacccgaaccctagccccccgncgancgccgtcgtcgccggcgccagatctgtcgcccccgctgcccaccatcgttgccaacgctggatcggccttccccggcaaccgctgtcaaacggnaccggatcggctactcatcatccgccatcaaagt

SEQ ID NO: 2334 - DNA, 2000 bp, Oryza sativa
  N_region (116)..(116): n = any nucleotide
  N_region (121)..(121): n = any nucleotide
tttgaattttgaagcgatttcgttcaaggttcaaaccaagctgatcacaagccagagagagagagagagagagagagagagagagagagagagagagagagagagagttctctctngtgtnttgtgtactacctgatgaagatgatgcgacgaggaccatggccaggaggaggagcagtgctgcgtggaaggccttcatctctgactctgacgccattggcttttttttttccttgtgacttctgctactgctaccggtgcttagctgcagctttgtttcttttaggtgtaccgaatgggagtgtggcgtttatagtgttgttgttcgtattatttttggaatcacttactacagtaagttgtatggatatggataacgggaacgggtttaatttcaggagtaattggcattgatactgctatattcgtttgtgctgatctttaggattatatagtggccttgtattaagggttgtaccaaattggtacctaatcaatagtaccaattaaaggtgatatttcggtgcattttaatttgtcaattttcacgaggaaaaaaaaagcgcatatgctccgtatggcatggaaaatgtttagatgggtcatagtcaatccaaagcatatgttaaagatgttatagcccataatgcaagtagccagaacccaacagtcatagagaggtaatttctagccttaccaaataacgaagtgagattagggcgagaggtcaatcttgtactacgtactgattggaacgaggggaccgcaacaccaagctcaagccatgagctcctagacacgctgccccaacccgcaccctcatctcgcagctgcgccatgctccggggtgttgcgtcctttcttgtagaagagtcatgtctccttgcataaggacacaaggcgttgcttgtttggcctgattcctacaaggagtgccggggtacgtgacacgatggagcattggccatggactaattcaccaaatggataataataaaggaattgctacacttcagtcaacaaaaaacctacctctaaatcttgcaaattttagttcactggatgtgtttcgcaattcgtgctccagctgcttcttctccaactccgacgaactcctcttcttttccggtgccggcgacaacccaaactccggcgaagaattagggtcctggggtggggtggggtgggaagggtgggagggggagggggaagaaggaagagttcgccgggcttaaagggatggccgggggaggcggcagcccggcggtgggcggcgaggcaccggcggcggcaccggattcgcggggctggaggacggcggtgggccggcgttggtggcgggggcatcttgccgccgacggctcgaggaggatggaggggggaggaggaggggaaggacgagggggaggaggctggccgaggggcctcgccggcgccgttgacgccctctggccagccggcgaggcgggcagcggcgcggtagggcggtggcggctgggaatcgcgtgcgagagacaggagtagcggtggcggcgcgatctggatgggggaggaggagaggagttagggttaaggggtctgcacgaatcttgaagcatatccaatgatctaaaatttgaaagataggaggtgggattttctgtcaacatatgtgtagatgcactcttataaaagacaataaacatcacctgatctatgattccttcaaaaaaaaaacttacttgaatgtaacagtcgacacttgacaccactctcataaacttgcttcattgagcagttggctcaaatgacgttctgacgttgataggcatgtgattgtttcattctcaattaagttgaatcaaataggccctttttccctttttgagtcaaacattcttagaaaaaccttccgcatgctttaatatcttgttggctaagtcgagcttctaatgagacatgcatacaattgtattactttgtttttttaatataagacatagttgtcattcacatgctcc

SEQ ID NO: 2335 - DNA, 2000 bp, Oryza sativa
ctttgtcggatgaagaaatcaccaaaataaaagttatagacattgatgagttatacaattttgttgttgatgactttttcagttgaaatcatttagtatttgaaaatgttgtttgaagttgtcataatttgaaattcaaattcaaattattgaaacaaagtcatatagcaaaatgaccaaacaaaagttgtagatatagatgagttatacaactttgttgttgatgaccttttcagttgaaatcatttagtacttgaaaatgttgtttgaagtaatcataatttgaaattcaaattcaaattattgaaacaaagtcatataacaaaatgaccaaaacaaaagttgtagatcttgataagttatacaactttgttattgacaattgtttcatttgaaatcatttactacccgaaaagttatttaaattgaggagggaggtaaaatggacttcttggcgagggaggagcaaaaagtctgggccggcagcccaaagagggaagaggagggagagagaggctgcgggctgagagagggagagagtaaaattttgggccgaaagaggcccaaggaagagagatgaattttaatttgtttcatttattttaataggttaaatgaactttggggtattaaaattagttattgaactccgaaaattcacagaaattttcagagaataatttagaccacgtagaatattacaaaaatattttcggccataatttttacaggaaaactttattttcctcattaattcacttgattaaattgctttaacttttaatactccctccatctcataatataaggcgtgcacgcatttcaagattcaacttttaaacatttgaccaacacttagtataatatgaaatgaattttaatttttaaaaattataccattagattgacatttaaatttactttcatatggttataattttgttgctacaaatcttaaatcttatagtatatgagaaattataagctaaagattagttttggagaccgtgccaactttaaccacgccttatattatgggatagatgaagtatatttttctagaaatgcattatatatatctatgatgtttgctttgtgccccttatgacaagttaatattcgtcacgatgtcccattgaaatactttatgatgatttctagttggcattaacgacgaacacatttttttcgtcactaagccaccccatctcatactaatcgtcataaaatggaatgtgctaatgacgaatagctccgatgtcatgaggaattcgtcacagaaggtcatatttcttgtagtgattactgtactgatcacctaatcgtcagaaaagttttacaatataactctattatgatatgatgaatctagtatttttatatataatttataactcactgttattttacttggtcttgaaatttgttaatcaaaagtatttaaaaaaacaattgtacttaaccatttcagttaaactttcaagattagtttattttattttattttattttgattttcttgttttattcaaattaaatcaaaacttgtgctgttaatgggatacatgccttaactctatcctttcacttgtctttagacgccgatccgcaagcccagtacttgctcggagttgaaggttttatccgggagctatgtacgatggcctttgccataggattcaagactgcccctctttatgaccagatcccccatgatcgtgatgaggagaaatgccgtgtcaaggtcaccataacaagtgatcatgaagatatcccatcggtgatgtttgaagctggtggaagaaggtatcacatgcttgtcaggaggtggcaagggtcgccattggagaactccgcaacctctacaacgatcagctggtcaacacggagtatcgctaccatccttgccaaacccatgatcgtacccaagccagctacgtggatcctgagggacttgaagacgatgctaccttgtgccatgtggtcgagctactttgggc

SEQ ID NO: 2336 - DNA, 2000 bp, Oryza sativa
aaacctgtgcaattggcttggaactagccgatctgtgccctctggacacaaatgccatcattctgggagactaataagtcataactggagccatgggggcatagctaccttttgtgggttatctttgggacctgcttctaccggaaaacatcaagacatgtgatttatgctgtacatgcatgagaagcttcaaactctgtatgatgcatacttatccatgttggtttgtaatagcagcccacaaattcacttgtccgtaaccagtttgaccgataatggcagggcttgaatgttcatgcaactacccacttgcacaatatggatagtaggagtacaaaaggtaatttaccatcccatcacaaatcatagggatgattttaatggaaggttctactttctgtttagcttgcacatgttctatcacatatactggtagttatgcatctgtaattctattccacattcaatggaagtctctttctgtttagaatgcttaatgaaccaatagagatgaaagtattgagatcatgagttgtgcttaaagtgcaacagcaagctacatggaaccgcagcactcaagttgctcattaattgtactataagcaacaaaagtcgcaatcaagttgcctttgttccttcaatcatttttttccctgcatgcaagtttgtatgtcagatacaattttgtaaaggaaaagcagtgagttccattcttataccaaggtattctcactcatgtgtattgtatttgacaaaatacaaatttagaacctatcatgatctttctcgttaatctatacaaaagatcaactgatcaatacttgcaactgtttcccacaacgacagggcctttggctttggacggacaagagctgacatggaaccatcctcacagcctcagcctgtgatgggtgttgccactggtgggtcacaagcatatcctcctcctgctgctgcatatccacctcaagccatggttcctggagctcctgctgttgttcctcctggctcacagccatcagcaccattccccactaatccagctcaactcagtgctcagcaccagctagtctaccaacaagcccagcaatttcatcagcagctgcagcaacagcaacagcagcaactccgtgagttctgggctaaccaaatggaagagattgagcaaacaaccgacttcaagaaccacagcttgccactcgcaaggataaagaagataatgaaggctgatgaggatgtccggatgatctcggcagaagcccccgttgtcttcgcaaaggcatgcgaggtattcatattagagttaacattgaggtcgtggatgcacacggaggagaacaagcgccggaccttgcagaagaatgacattgcagctgccatcaccaggactgatatctatgacttcttggtggacatagttcccagggatgaaatgaaagaagaagggcttgggcttccgagggttggcctaccgcctaatgtggggggcgcagcagacacatatccatattactacgtgccagcgcagcaggggcctggatcaggaatgatgtacggtggacagcaaggtcacccggtgacgtatgtgtggcagcagcctcaagagcaacaggaagaggcccctgaagagcagcactctctgccagaaagtagctaaagatgatacagtgaagttgtgacattgatatacattgtcctgtgaacttagggcctctaaaactcagtgctcttgtcaaaactattcccatgattgttggctgaaacgggtaatctgattaggtcttaggctttcctaatgttagttctgctctgctatggcagcagtagaaaaaaaaaagattgtgatttggtaggtgatttgcaactaatgtagtaactgtaccttacctttcatcagtttctaatccaatactcaaaagtgctggcatgtggagacccttgtatgaattgagtgtttgttcatgtcatgcatcagtctgttgcctcatttatcagtcatc

SEQ ID NO: 2337 - DNA, 2000 bp, Oryza sativa
  N_region (1991)..(1991): n = any nucleotide
  N_region (1997)..(1997): n = any nucleotide
atctgaggcacactttgagcaatcaaactggcaaacacggtcagctgtggcattgcaaggtgatgactcatatgagtcatctgggcaaccaacactgcagggcaagcagagtctagaatttgcaggtttacatgtcttgctaccactgccaacttcaccatggtttgcgtattcatagtagccatggctgcatgaatcagatacacaaatccccaggggataccgccattggtagtgctaatgggccactatgcccccagcacattggcttcaacgatgtctcggccggcaccccacaagtgaagtaatctccagccacaattgcataaactctgagcccttttggtgcaagtgtactgttctgaagtgtgaagccccagcaagccacttggtgatcaagactcctgatgccacaagcatggaaccgcccaccgaccacggagaccattgcatccatcggaactatgttcacatcaccatcatcagtagaactgggtgttgacatctgctgcatctccaagctcctaccccagcagaatacctgcgcattctccagcaccccgcagacatggtaaccacctgctcctatagactggaaccgcacattcctcggagctagcccaatgacaccactaaccgattcatcgccccagcagaaaaccgtcctgttccgtgcaaataagccacaattgaacacagaaccagctgaaatggccgatacagctccggtgacggtatgtgtggcggtcatgttgtatccccagcaatcaatcaccgatgtatctccattcacgctgtgaaaccccttgacagatgttcgtagggcacaaaggtggttgtctcctgcactgagctccgagtacatggctccctcgaccatcggctgcggcacaccaatcttgacataggagttgctcccccagcagtaaggctgattggtgtcgagcaataggccacaggcaaacccatcccccgcagtaacccctacgaacgggatcctgctgggggcaccgtacacaacggaggcatccgcgccgaagcaggtgaccaagtgagaaccatccgagttgagcccgcagaacacggggccgtcctcgccgtaggacacggcgatggacgccatggatccaaggccataggcccaactgggcagcaagaccaggcagcagcacaatgctacaacaggcacaatgtccatttcttgaaacttggaggggtctacacaaaattatttttcctgcaaaggttgcaacattttgggctaagaatcagcggaaatcaggcgagtcttattataaccgaaacgaaaaggttggaactttttttttcctctcgctctctctctctctctctcggtgcataccaatcagggatggtgcagcggctaacgtggcgcatcggggttcagtggaagcatacaatccccaatctttcgggataaaatgcgactgctggtgctcctccacctttgcaacagcagcagcaaacgaatcccaatccgcagcaaactaacctggatggattgaacagagagaaaaaaaggcttggattagacatactcctgtagctagcaaataaaaggccagagcttttagcctcaagacaatgcaagaaatctactacatttgatgaggaagaaaaaagtttgaaacgaatctagcagtatctcggattggatctccactccaatcaccgcaaagctcaccaactcaccagcgcatgcagctcaagtagtagtactagtagtagtagcagtagtagtgcactagtactactaggggagacagagagcgagtacctcggagcagggggggcggcggtccggcgaggcgaggggaatgtcggcggcgaggcaatcggggaaggggagacgacgaccatgtaccaagaagggaagcttttcttgggagagcaggcgccacgggcattgcacggcggcagcggcggcggcggcggcgtagccgtgctggatccccggggaagaggagganagggcncgg

SEQ ID NO: 2338 - DNA, 2000 bp, Oryza sativa
  N_region (182)..(182): n = any nucleotide
  N_region (977)..(977): n = any nucleotide
  N_region (1987)..(1987): n = any nucleotide
cattacaattttatttttacagaacctttcctatgaccccaaatttttacactaacgggtacgttcacgtcaggaaaactcatattactgacggtatctcatccacgtcaaggaaaattccaattgttccgacggttttaaaggatcgtcacacaaattattttttctctgacagggttttngactatttgccactctcccgaatggcgtgttctcaaatgccactctcccggatgacttcgctattttgccaccgggagatagaatgtttcttgcctgtgtgccatttttgagcctgcaaggcaccacgtcactcgatatgaggacaaaataattgtcttaccctttttcttcatttctcctcctgtcattgggctccggtgagctccccgcctcgcactcctccctccttcgctctgctccttaccttcccggcccctactccattccactgcggccaacaccggcccctgtcttttcttttgtggcctcatcggtgcctcaccccatcaccgtcgacttcgcattcctcctcacagctcttctacactctcccccgatgtcggcggctgcgccaggtccaccctcagggcttcccctaccttgtcattctccacccagcgccaggaggtcggttcggcggtggtggtggcggtgtcaccggctcacatacagggaggaaggttggagaagagagacccgagctagaggaagaagaagggcaagacagttattttgcctttggatcgggtgacgtggcgctttgtaggctcaaaaatggcacacgagcaagaaatcttctctctccgatggcaaaatagcgaggacatccgggagagtagcatttaagaacacgccatctgggagaatggcaaatagtctaaaaccccttctctgactggtggttgcatgcatgtcactgagtcagtaaaattagcgaccgtcaggggtattctaatttctgatagtgtaatagnatttaaacattctgtgagtgtatgatttaaaaaataataatttaggagagaagagatgttaattaattgtcatgcatgtatttatgttttatattatgaaacacctttaaaaagcatgtgtcctatattttggaatggaggagtactactacatgcaagcgaagatcctacaattcaagcaaagcagtccactaaatcgccgctcgctgtaattgcgtaactaatgatgccgtcaaacaatacatgtacgcacttgattctacaagaactcagaagaaggctgcactacttgcagtttgcagccatctcccggctagagcgggcctggaagacgacggtgggctcgccgaggtcgtcgtcctgaagctccccatccacgtgtcatcgtcgtcgatcgtcgccgtctgtggcgtacgtcgagcaggttcaggggtttcctccgtggcggcgtcgatcaagtataacatgggacactttctcgtcagcccgagcttctgaatgggtcttggattattatttaaaaccaccatgtgtgacacctcatttgtgcttttttttaaaaaaaaaagaaaaaagaaaacagcatcgatgatataattaagtacagactttacaaataagtgcacaaataaagcgaaagggcatatagtatagtggttgcagttatctgagtagcaccccaacgttctaagttcaaatcattatatgagtgaattgtctcaatttaaaatgggaaaaagtacgaattaccccctgaactattgtggttgattgaattaccccctaaattcgaataccaaatatttctcaccctaaacttttaaaactggacgaattacctccctactccaaaccataacggttttggtcctacgtggcatccatgtggcgctaacgtggcaatctaattagaaaaaaattaaaaataacataggccccacatgtcatatggagtagtgcactagtgctaaattgctaatctctctctctctttcttccctctagggtcncgggtgcgacgtg

SEQ ID NO: 2339 - DNA, 2000 bp, Oryza sativa
tagaactcataataataaaaataagtacccaaagttaaacaatggccttctcatcaaaacaatttggaaatgcaagctgaacatgcctagtacaaatgaggggaaagacttaggactagatgaattttgcagacaacatgaatgaaaaggtaattcctaacataaatgaaaaggttattccaacccatagcacagttaaatgtagcaattaagcaccataaatcaattattacagaatgggcatccaatcacacgaaccgaccgcaacaagcatcacaagattgaacttactatgagcgcacacaactaagattactaagaagaattagcactaagatagaccaaagaaaggccttccgtttctgtcagggatccaaactaattgcgattcagggagaagagtggggtcgctaccggaagttggacggactcgaggagggcggggatgagggcgaggaggagaccgacaggaaagtgtacgccatgggccgctcgtcggagctgccaccgcacgggcgcaccggcccgtcgaggcggccgatgaggctgcacgagttcctcgggagccccctcctcggcacgacagggggaggccggagcatggacatgcggtacgccacgctctccacctcctcccgccctcctgcgtggagggaccgccggagcgccgcggccgccgacgagcgccccgactcggcggcgccggcgagggagcgcagcatggggacgtttcggggaagtgaacggggagagagatctgtgggcccccactgtgatgcccttaatatccctgaacggaaaaacaacgggtcccccaaacctagagtaaatttccaaaactacatgttttatagggttaagtggtagaaaatcacacatattttgatccttggcacttaagtacatatattttggtaatttagttttacaaaaccacactatcgatgaatgtattcacctgcgagatgacgtggatgttttatctaggataaggacgtgacatcctattaatttcgtgcgatggcgggtaatatgatgtcatgtcctcgtccttcatgaaacagtcacgtcatctcgcgagtgaatccattcattgaaccaaaatatatatacttaagtgccaagtgtcaaagtgtgtggttttctacaacctgaactacaaaacgtgtacgttttgtgaaatttacaaaaccagtgcaaacctcgatttacaaaaccagtgcaaacgaggtgtcagtattatcctcggttttagctgacgtgttaactacgtggctaatttgactaattctttgccctgtgtggtattgatgtgacgcttatatagtacccctcattcccaaattgatcctcatatataaatataagtttatgcaccaagaccaaggataatttaaatcatatcaatcaaggcaccatacacatatttttccacaatacatgcatcgattaaaacaccatgccaattactcccatgcagcattaattgtattctaatgaaatccgtgttcatgcatgtatatgatgatcaatttgagaaattttaaattctattatatgatgatcaatttggaaaggagggagtagtttaattaaaaaaaataaaaggagcaaagctgaaaactaaatctatctatatctatatatacctaatttaaaaatacataaggcttccgccttcactttcgtccgtcaccccttgcttccccctctctcccctccctccttcctggtgccctgatcttcacacgctccccctgcccatggcccctcttctccctgacgtccttcctctcccacctctcccggcgaccctcctctcccgcctccatcctccctcacgacaccccacatctatacctcgccgcacgtcctccccctttcccacgacatctctactccttggcatctctcctctcccctgcgtatcctcctcttacgcattcaagaaaaacggaacctcctcgttcgggaacacgttttgatgtactcacccgtcc

SEQ ID NO: 2340 - DNA, 2000 bp, Oryza sativa
  N_region (643)..(643): n = any nucleotide
  N_region (669)..(669): n = any nucleotide
tagtgcatggctacgtcaacgcgcgaaacttaacctgagcaggtatcggcatgctgtcatgtacagtgaggcgagctcttggtgaggcgagctcggcgaaaagactgaacctgagcaggtatcggcatgttgtcatgtacagcagacggcaatgtcttcatcgcacgacaacagtgacgccatgcgggatgcggcaccgaccatcctcggagtatttcgttctaataatagtccaaaccaacgacttgcgaagggaaaggatgactggatgacgaaaccgacatgcatgcattgatgaaccagtccaaaccgatctggtgtagtacaatatatgacggggtacgtaaatcattagccaaggccaacactacaaggacgtttccctcctcctcccgcatcgccctccccaggtgactcgggaggcgacaccgccaacttcctcctcctcccctgcctcgccgccgcatgagcgggtgccggcaaagccgtgcggccgcaaggacagcggcgacggggccttgtctcaccctccacgcgctcagcggccaggggcgttgctcggagcggcagaattggtggccagatccaggccgggcccagccggatctggcggaggggtcactggcggcggggagtaaaggtnacggcggcaacgcctggtggcggacntggcaccttggggtttggcggcaacggtggcggagtcccccagatccgcgccaactcggtcggacctggatggcggctagcggctggcggtcgcggatgtggcagcggttggcgatggcggctggcgacggcggcggtggctatggtggcggtgttgtggtggatgctgactgctgaggtggtggatggcgaagaggcagcgaatgtgattgcggcggcggtggctggcgacgacggctggagacaccgagacggcggcagcgacggacgtcggctgcggcaatgaaggtggcggtggaggcggcgtctggcggctggcgacgtcggcggatgcggcagcggctggcgacatcgtgcagatggttgccggcggcagcaagtggaggcggggaaggagtgatgtgaccatggctactacggatacaaccattgttcacatcatggatgaacaacaagatatcaagttcaagtcctccaagtgctaggatccaattcggccacctgctacactgctgacttcaaacagccaccgaatctgcatacgacctccgtttttgacccgtgagtacttgatggaaagctctcggagtcctctttccaacggatctagccacatcaccaaattccaccctagccatctgcaaataaagaaacaaggtgctgtaacacctgtcatgggcctttgggcttgtaactttgtttggaaccccggcccatgtgggacccatgttgggggcgccccaaccaggtggagcacgaccctaggcaccctaggtcgtcctcccacatccataaatagctaggtaccacttcagggtttctcgggttttgtttagattaaagtttagcttcgctactttgccgtgtaatcccgtgatcggttagatcgacggtttgctcgttacggaaccccaatttatcatttgtattgaattcctatctgcaattcagattgcttttatcttgttcttgcttgtttcttctatttgcttacaggaataaggttgatctgcaccggcaagatcaacaacccacggagaggtgtatcgatcgctaagacgcaatacaacaacgtcttgtacggttgtagtcgggtcgtcaacgtttctcccaaagtgtagttatctacaactcaccgaaagatcgggccacggagatgatgtgaccatggctactacggatacaaccattgctcacatcaaggagtcgggcagcggagaaggagaagactaggtgtgggtgcggacgcgatgtcgtcggctggaaacgggcgatgacagacgacgggcgcttagccgaggaggcgtgacagacgaccgcacttggccggc

SEQ ID NO: 2341 - DNA, 2000 bp, Oryza sativa
ttgagatgagcatgatgggtgagttatcgtactttttaggattgcaaattaatcaaactcctcaaggtacatttgtgcatcaaacgaagtatacgaaggatcttttgagacggttcaagatggagaattgtaagccaatttcaacatcaattgggttctacagctatgttggatcctgatgaagatggtgaagctgttgatcaaaaggagtatagaagtatgattgaatctttgttatattaaacttcttctaggccagacatacaatttgctgtgtgtttgtgtacgcgttttcaagcttctcctcgtgcttcacatcgtcaagcggtcaagcgaataatgaggtatttgaatcatacacttgagtttggaatttggtattctacttcatcttctatatgcttgagtggatattccgatgttgattttggtggttgtagaattgataggaaaagtactagtggaacatgtcattttcttggtacatcattgattgcatggtcttctaggaaacaatctagtgttgctcaatcaactgccgaatctgaatatgttactgctgctaattgttgttcacagattctttggcttatttcaactttgaaagattatgatattacttttgagaaagtacctctcttttgtgataatactagtgctattaacattgctaagaatcctgttcaatattcacgcacaaagcacattgatatttccaaaaaaccaaaacatttttaatgggtttgccaatgtgttcatcaagggggagattgtaaaatcaaaggtgtttttgattattattctgtgatgaacaattggcattggagattattggttttgatatttggaatttattttcgaagtggttttggagatgattggatttcacaggtgatctacaggtactgctggatttggtccggtcggaccgagcaggtgctgccagtcagacaggcgtgtattgcacggtcagaccggcgcatcggccgacactgtgtcggtttcggttctgggttgtttgtttggatatccatgattgtttcatgattatggcttctagatggatactatgcgtatgtaatactgttgtttgctactaatgagtcaagttagagatagcttggtctcggaatatggtttctttgtttgttccatgtgtaggtgactcgatgcctcgggagagtttttgcggtgatggactgggagtcggcttggggataagacgacgtccgtggtggtcagatatcatgcgggatacttaggctagagttgatgcacgtggttgggagattccatatggcatacgatggaggtattgtgtgcgtatgggatgcggagtcgaatttggaaggagtccaaatttggtatgagtagttatgtaaagtttgtttcttgtacaagaaggtttcctatggggattaggacttctagtatgagtttggttcatggctttaggctacctacctcatgtataaatagagagggagagtgaggcttcccggtatcgtttttgagagcaattgagttgatagttgagttagggtttcgagtttagctaagatttttgtaaggagtactgttgttgcactttgtaaacatagagagaagcaatacagttgtcatccactttaagagttcttcgatttgtgtttcaccgggtttcggcggtctaaccggcatctcaccggcggtcagacgggcgacaaggcggcggtcagaccggcgggtgtaaggcggtcagaccggcggcgatgacaggcgcggcaggcgatctcggcggttcgaccggagttcgatctcggtcagaccgacatgttccaggtggttagagcggcgcaacaccttcggtcagaccgcgatccgtcgaatttgagggtaacttttatttcggctaaaagtttgggtttttgggcataccaaccattcacccccctctgggtgccttagttcctgtgattcgatcctacatcgcgcactttttgcccgggtgtgtgggttgg

SEQ ID NO: 2342 - DNA, 2000 bp, Oryza sativa
ttgcttgcgtagtacccgtagatgatagtgcccttaggttgcttgtgacacttcatgagatagaagaaagtagttaaattttgaaatgagtaaaactattgaaatgcattaagtgagttagtattacgtaccggccaatacatatatactagaagcttctcccttgtttttgtttgttctccacccctgaacttgtagtagttatacgcactgtatggaattttttaccgtttcgcattaaggaccgttatttaattataatacattaatagtaggcatgcaagtatgagaatcacttactattgtaagatttgtagaaattatttatatgtcttgtgagaataatcaagggggtccaagactgtcactatgccggtcttcgggtagataatgaaacatatgtaatgatcgctacataatggcgatgcagttagtcacatatgaaataacacaggtatgtacaatgaaatatacttgacttacttgaagttgtacgcaaccatgatgactcttattttggaagtgcaagaaagctcgtccaatatactgtacgacaataatcatcttctacttgtgcaagctcttcttgtattccgctatctctgtaggagtcttgtccttgagctgctcggagtttggtgatagtctcacggtatgctgagtttgacagatccttgttagatccagaaatccgataggtttccctaaattctcagcatccatgttttgcatactataatagcaatttgttaataattgatcacatacttattcatgcaataaataaacactcatactcacaagcaccatgcaacaacgtagtttacatccatcttttctcgacgatggatggcgtgcagatcattgaaatcaagccaaatgaatccttcacaggctaaagtttttgccagtgatcgaattgttagattagttaggcctttcttgctggcttccatgtaccatttatgtagccttatctcccatggagcctcatcaagtgcataatctggcagaaaagcttttgtcgacgagtgatactcgcggatcggaagaatagggtattggggtacgttggaacagggatctacgtagtacgacatcaaaacagacaaaagacaaggattatactagttcatgctccttatcaggtaatagctctagtccagtttatatgggattgatgatgatgagaacagattacaaaaagagtaactgaatacgcgatgccgatgagatcgtagtcgaggaattcgacggcatctctcggcgagttggctccgtggactccggcttcgtaaactttggtgggtgtgttggcgatgaggtgcgatgcccttcgcctctccctaggggtcccttttatatcgtgggataccttgaccctcaagtaagacttggagatatgtaaaccgacacgatatactagagattttaccctttccaagtaggacttctctaatcccttaacttcgtggagatattttccataatttgaggtaaattactaacagtgtatatgggaaccaaccgtatacttgaaggtataccttattggtatatttcataaattgttggatagaaggtatgccttatccgtaaccctgacagtagcccccgacttcaacttaaatgaattcatgtcctcgcatgcgacttctcctaatagagcgttgtcgtactcgttagatcaatctcggttatataaccgtagagatatagagttatcgataacgctcttagggagcctatctatgcgggttttgaatttaaattgaagtctgaacaatggtcctcaatgggcctcagaaattttcggtggcaatctctcccctttcctcgaaatgcgaaccgtcaagtagtgcgcttatttaatgggattttgggatccattttgagtccgtttaccaaaaaactctcattgttcccccgcttccccggactctacgtctccctaatctcctgcgcccttcaccagtgatcttcttccggcgatcctcccc

SEQ ID NO: 2343 - DNA, 79 bp, Oryza sativa
ggtgccggaagaggagcttgcgggggagtaggtgtaggagcacgaggaggagtcggtgcaggatcctgaggaggagtcg

SEQ ID NO: 2344 - DNA, 2000 bp, Oryza sativa
  N_region (1435)..(1435): n = any nucleotide
  N_region (1453)..(1453): n = any nucleotide
  N_region (1494)..(1494): n = any nucleotide
  N_region (1942)..(1942): n = any nucleotide
  N_region (1960)..(1960): n = any nucleotide
  N_region (1963)..(1964): n = any nucleotide
ataacttcttgtattttattaggagttgttgcccctagacaattttttctctactattcgtaaaatctgatcccgtccttgatacattgacatgagcactctcatcgccagtttcatcaattacagagagtccttaccatgctcgtgattgcatcgtcgtcaccaaaatggcttatccgcctacgtatgtacaaggtcgacactataaggacatgttttcatccgcctatgacatggccaccatctatctcggtgctagggttctagacattggtcctactccagaaccactgaaggcataggcggaaaaaaaaagacaatgtccgtgagcataacatccaaccaaccaaaaggaatgatgtcgtttagcggagcaattaaaacgagtcaaacaaaacagttatagaataaatattatatgacgtggaaccagatcatgtcgtatcccattttgagatctatacgcacgtcaacccttatcctaagaatgccctatcctacctttagaagccacctaaatactcatatgataacatatttacacgcgcgagtttcaattctcaccgtacaaggcattcgaaggagtaggatattatgattttgatttgtttagagacacaaatgcactccttttatcaaaagtgcaaaatagatagagttcaagtataatactctataagtttcgtaaaaaaaagattcccatacttttaatgtttttaatgctacaatcaaaagatagtaattcaaatcacaaattgctatgtcacaaacatagaacaattatccttttgagtcgggtttgtgctaccgctactgcactctcaattccatccttagtattatgatatatacacaacaacatattttgtaggccatatagaaaatcctcggtagctcctagctccgtcataaacttatataaagcagtatcatttagtataacacgaaatcatcataagataattttgaaaggaaggtaattatcacaagatgctacgctattaactcgtgtttctgaacttatttttcccatatatcataatcaaaatgagaaggaacacaagcattagtttttgttaccacgaaaagccccgaacgtgtacatcacttccttgttttaagagcacaacaagcatggtacgttcaaccactactacaagtctacaactaaagatactccccttgtttgaagcaactatttttgaccctcccctttcttttaaagctaaacaatttgttggtgttttgttttgaggcattgtaaaggaaaaggggaccaaacaaactgctgctactaatatgcgtactacacccatcaccataacaaacaagaaacaataaagtgccagaaaaagagagaaaagaagaaggaaaagaaaagagcaacaaacccagatggccgcacctgtcaattacttgtaaaaacgacacaacntgctcccagttaatcagnttctttaatcgggtggtgtctatactaatcgtcccctctcnttcacactctttctctcgctggtctccgtcttcgtcttctcctcctccaccctctctctctctctctctctctctctctctcctcccctttgttccgccgcttcccctctctctctacctctcgcggcgaattcgccgagagggcgcagggaattttattaggagaaatcccctttttgtatccgtttctccggatccgcacacctcctgttaatccgccgattcttctttgatttgttcatattcgttttttttatttttttccctttgtttgcctttttattcgttcgattgtggggggagggaagagtttggtcgaccggatttcttggtggtttgcctggatctggcgtcctagaggccctcgtgcccgaatcccgattcgattcgcctcggcgcggcgccgctcgcctcgacgggtttggatctcggggtgggattagagggnaaaggggggggggggcanttnnccttcgtttggttgagaccatcggagcagcaaggag

SEQ ID NO: 2345 - DNA, 2000 bp, Oryza sativa
  N_region (978)..(978): n = any nucleotide
  N_region (1257)..(1257): n = any nucleotide
  N_region (1273)..(1273): n = any nucleotide
actaggatacacatctgacggctatgcagttggtagggatgctagctattaagtgacgcactatgatacacattcaacgaggatagagacggaagggacactagttattgaatgatgcactaggatacacattcaacaaggatacatatggaagctaggacgctagctatcgaatgatgcactaggatacatttaacgggagataccgatggaaggaacggtagctattgagtgacgcactaggatacacattctacgaggatacagatggaaggtacaccagctatcgagtgatgaactaggatacacactccgcgggggatatagatggaatggatgccagctattgagtgatgcattaggatacgtgttcggcgggagatatagatggaagggacgccaactattgagtggtgtattaggatacacattcaatgaggatacagatggaagagataccaactattaagtgacgtattaggatacacattcaacgaggttacagatggaagagatgccagctattgattgccatattaggatgcacattcaacgaggatacaagtaaggatgctagctattgagtaacgcactagaatacacattcaacgggagaaacagatggaagggacattaacttttgagtgacgtactaagatacacatttgacgaggatacaaatagaaagcacaccaactactaagtgacgcgctaggacaacacgttcggcgtgagatacagatggaagggacgccatccattgagtgacgcattaggatatgaattcggctgaagatacagatggaagggatgccgtccattgagtgtcgcattaggatatgtatttggctggagatacagatggaatggactccagctatggagtgacgcattaagatacacattcaaggaggatacagatggaaggcacgccagctattgagtgacacaataggatacacattcaacgaggatacntatagggatgccagctattaagtgacacactaggatacacatttaacgcgaataaaaataaaatagatataaattgatgagtgactaccaggatatacattcaacaaggatacaaatcaattccaaaacaaccgtgctcatagaaaaaaaaagacttgactgaaagtaaataggacctagaagcaatttgtgacctagcaagggtataactgcaatccttgcaaggggcgtggaacctacagccttgttttgtttttgtgtacgtcggtaaagaaaggnaaaaaaaaaccccganaggtctacaggcaataaactgtagtggcatttctgaaatatacccgtaccaacaggggcaaagctctataaatatatctctctctcccttcaacaagacaacaaagaaagatgcaagagagagatcagagaaaaagaaacagagttggtgtgggatacgacaggtcccagaaagaaaaaaaaaccccctcattttctcttttatttctacaccttcctctcctatcccctctctctctaaaagcaaaacacactgctcactctctctcccaggtctctctctcttggagttgctgttaaatggtacagggcctccttgcctttgccttggtggagaaccagatgcctttgatgtgtgagtggttggtgtttccttctctccccttctcctcttccccccccctctctctcttctctcttttttttatataatcaactaatttcttgctaatttttttcctttgctcctatctctcttatggctgtgtgggagtaggagagagaaagctgggatggatagatagagaggaagagagggaagccaacaaaatcggcagtagcctctcccccattttttttctcccctctctctctattcttcttctttctcctctccagcaaccgctctcctcagtcctctcctccccaccaaatcaagctgctcttcgccgcggaggtcgtcggattccgggccctctcaccgcgtggatctgccggcggggagggag

SEQ ID NO: 2346 - DNA, 1071 bp, Oryza sativa
  N_region (8)..(9): n = any nucleotide
  N_region (14)..(14): n = any nucleotide
  N_region (20)..(21): n = any nucleotide
  N_region (23)..(23): n = any nucleotide
  N_region (31)..(31): n = any nucleotide
  N_region (43)..(43): n = any nucleotide
  N_region (231)..(231): n = any nucleotide
  N_region (555)..(555): n = any nucleotide
  N_region (905)..(905): n = any nucleotide
  N_region (918)..(918): n = any nucleotide
ccggttcnncgggntccggnnanacgtcggnagcccccttccngccaaaaattcacacttaatcaaaattaactactcttatcagtttatcacaaacctgtttcactatttgcactgtttgttttgatgactgcatgttacagtacaaaggcccccatttttcttacatagaagtaggtaaaataagcctgagaaaacatgctctaaaattttgtagttgcatgtctttantgattttttttggcatcattggttggctacgagctgattctaagtaaaaacggcttattagaaaaaaaaatttatgtttaaagctttttatatatcaagaagaaattgcgttaacataccgtagaattaacttcaagattaagttttaaatttaaattttggctcttgttcatttgttttgtagggcaaactatgaggcttgattgtttccttactccctgttggcggtatggtatgaggcccttcgaccaaaatctgccaaaggctatgtgaggagtgggaatccaagcccgagacgctaaagttagtcggggcgaagccccntcccccatggcgaacactatggaacaagtacagcgagaggcgaaggatcgtgtgggtactctgccaagccggaggcctcttgggcgaaggacgcagggcgaagagtatatgccgaagggagacgacttcgccaaagcaagctccccccgcgagggccaaagaagccttttccggcccatcaagcctaggggccattgggccgacgatcgcctaacggcccatcaggagtccatgaacctctattacactatgtactcatgtaaatgtcctttcataagggtaaccatgtaaattcccctgtataaccaaaaccctaatagtaataacctgtaataggggctataaatagncccatagggccangtaatggggggatcccaagaaaaattctctaatcaatacactttactttttctcaaccactgttgagtaaccacatctttcgacgtatgcagttgtcgtttcgacaacagctggtgccgaccgtgtggacctccgagcgaaaccactgagagc

SEQ ID NO: 2347 - DNA, 2000 bp, Oryza sativa
  N_region (470)..(470): n = any nucleotide
  N_region (478)..(478): n = any nucleotide
cggcggcggcggtggctggaagaaggcgcgctggggcttgtaggggtcgaggatgaagtagtggaagtactcccagttgccggagaaggcggtgcggcagctgaggatcatctggccgccggtcatggtgctcagcatggacaccgagtggttccgccccggcgccgccggcgacgactggtcgcggggctccgccgcgtgcggcgacagcatcccgacgatgatcacgatcgacgggatggcgatgaacacgaacgggatcgagatgatggtcagccgccggagcaggtccttcttcttctcctcccatatttaattatgtactttaaatttcttgtagaaaatgcttcagttttgctcttcttcttcctcctctctctcctcgaagcctctaatttatcgtgtggttgacgagttggcgtttcaaaattaggaagtgaccacacctgaatgcagatgagaaatttggngatatttngaccaaatgtatcaacgatttaaacttgctcgtagctactccctccattccataatataagagacagccacttttcttagatgttctataatataaggttttaaactataacatattttttattaaattactactttttttaaaatccttcactgtcacattctttaactttattggatgcatgcattatatttattaggatgatccaaactacaagataataataactatttcttggtctttgggttaagagtggttgtggcttatattttggaagggaccacctatacatttgtcgacaaattttctcctaaaaaaataacagatgtaattatagtataattgtagtgtaattacattgtaacttgtatgtaactacagcataacttgtatataagtttcacgtaattttgaatcgttaaatctattacaagatttgtttaggtgaggaagaaaaaaatcacagcacacacatatgtataaggatttgttctcacaacctccattttaccgaaataacatattacagagagatttttgaaagttacatacaagttacactttatttacagtgtaattacactacgattgtagtgtaattatatttgtcaaatttttaggagaaaatttgtcgttaaatatatagcaaaatcgttttcgaatggagggaatagtaatttggaatgaaccgattggtcgtttccttgaatatcaggctctcgatcaggacgccgcctctcgacagatcaaatgaagcccatccagaaaatgggcccatcaggcctgataccgacattatcaggttagaataagttcactttacgtccctctattttgttgcttagtccgatttacgtccctgaaccgcaaaccgggtatgacccgtcccccaacccccaacttacgaaaaccggacaagcgagatccctcggcagtatgaagggcggttttggccgacgtggcgcctatgtggctaatttgactcagtcttcatctgacgtggtattgacatggcgctgacatggcaattcgatctagaaaaatattaatccatgtgggacccacatgtcactttaacgcacaaattaataaaatgatgggccccatgtggatcccacatgtcattatcacccttctcttcttcctctcctccctccctcttcacggcgtcacgaggaggtccggtggtggtggccgacgacgcgacaacgacgaaacgggagaaggctgggtgtcggcggcgagagcgttggggggaggggctccgcgtggggggcgccgcccgccccgagaagctactcctcgtcttcgtccgcggcgccggcgcagagcccgcgcgggggctcgaggagttcagggccgtgcacgtgggcggagggatgcagcagcagttcggcgccacgcggtggcgccggagatgtcgccactcgccggcgggaggcagcggcgggcggatctccatggcagaagcggcatcgcccatcaacaaccggctcgccgcgggccgtcagcggcggcgccg

SEQ ID NO: 2348 - DNA, 2000 bp, Oryza sativa
ggcatctccaccatccttggctgggttcgccgcctccactttggtttgcaccgtctcaaattttaagatgaaattgctaccagatcattgtgcacaacttaaccagtagaatataaatataaatatatgacactatctacctttaacgtgcgacttttacaactattttttctattaaaaatataataacaatactattaaacaaaattataatattttaaaattactttcaaagaaatacctaacaatatgatttttatatttttaaactaaatatcttgagagctactaacaagtcagagctttaataatggataagccaataatattatttgaagttttttttaaaaaaaactggtgactaatctttaagcaattccctatattaaatagggaggtaatatataatcatattcacttaagatggaaacaattctaaacccttgagaggacatccctctttatttacatactattcaaatttctataaaaaatcaataagatatattaatatacgatagatcattcctcaaatatacatgatcaaatttaatttatacacgtttaaataaaatgtaaatttacgttaactaagtatatagtttaatttttttttcgttgaaacttgtataagttaaattattttaacttatatatttgtgaaatgttatatatcacatatatttatgtatcttcttaattctttcttatatttttttcataattatttgaataacatgtaaataacaaaatctactcttatctaatattaaaagttggttggtgagagccatttataacgccattcctcatctgctgagagtgccgttgctgctagtgaaacggcgagaaagttggtagctccatcaattcaatgacgaatgtaatcttgactacaacgagtagtatagcaagaagaagatgatgaaagaaaaaggttgaacgaacaatagaaagccaaactatagttatgggatatttttttaaaaaaactagagttatgggtggaagcaataatggataccagcaagaacaaaaacacctgccaccggcatagtgccaagcttagcccagccagctactacaagctttgtttctttctggtgcgattgtggtcgtcacgtaccccacacacgtcacatgtgcaaccccatgtcctacccttttcaagtccagtgggggtcgagcgagccagaccatgcatgcatgcatatgcatggcctgcctcccgtgcgccgcccgcgtgacgaagcatgcacacaacatgaggtggagtcgcagaggccgcgtcgcgtcgcgtcgtgacgtcgtccccaccaccggagcaaagcaaagccgaataaggggggtgttttaatgcagggtataaagttttagcgtatcacgtagcatattatataagttatcatatgggtgttcaggcactaaaaaaactaattatagaatccgatagtaaaccgtgagatgaatttttttctaatatattgacgtgcaatccttttgcacgttcgtggaaaaaatcgtgagatgaatttattaagcctaattagcacattgttaaattatggagcaattaagattaaaagattcgtcttgcaaattaatcatgtaattagtttttttttatatatttaatactttgttcaaatgataggtgtaaaatttttgtacgtgaactcaacagggcctaacgcagcctttttcaccgccgcccacgtacggctgtcccccccgcttttgctcatctccgctcgccgccggcaaccgccaacccgcgctgtccagtccgtgacgttttcaccgtgcgccggcccgctcgactcgaggacgaagccgaaaagcgcgaagattctcgcgtcgccatcgcccatcgcccatcgccactgtacgtgctgctcccttgcttaagatctctcatctgcactgcactgcatgcgtccagtgtcgccgccgcgccgttaaaactttctaccgctgctgctgcgcccgccgcgcgccga

SEQ ID NO: 2349 - DNA, 2000 bp, Oryza sativa
acaaatatttttagcataatgacaagtcaaacattttcaactttgagtattagtaggaaaaataaaaaaaaagatcactcatgtaaaattgatgttactagatttatcattaaacaaactatcataatatatactctttttattgaaaacattttacttttatagatattgttggtcaaagtagcatctcggaaaaccgtgtcagagtctaataatacttatattttggaatagagtaagtatgtattatcatacctgaagtcttagatttgtaaaatgcttgtgaaggcatgacaaagagattggagcttttttacccaaactttattggaagggatttatgtgcattgatacaattgtttacatttagaaacaattatacttcctctgttctaaaatataatataatcagcggcggagccaaggcccagccagtatgggcaagcgccccggctatgctgcatacatccatgcattagaactaaatatggtgcttagccattagcctagctgcacatgcatcattagattggtattaattatcatacttagtcattagacagcagcccaattttacttctatccatgataaaatgttataggtatttgtgttttcttgttaatttgttatccattgttaggtttgtccaggctaaaaaaatttctagatccgccactgaatatagtactccctccattttataatgtaagtcattctaacattttccatatttttattgatgttaatgaatctagacatatatatctatgtatattcattaacatcaatatgaatgtggaaaatactagaatgatttgcattgtgaaacggagaaagtattggataaaatatatcccggtattaagaatccagtaggaggttgttatatgggacatagagagtagcatttttcagattctggcccaaaacatgtggcccaatcggcccagagagatagaacacagacagatagaggaagagagagagaggaggagcggatttctctcttcgtctctcctcgcactcgcagtttagtccgtttcacgagagggaggagagagaaacgagagagagagagagagagagagagagagaggcattagctcatggaggaggaggggaggaggagctccatttccccttttgttcccctgcgcattccaagaagagagcaatctttctctctcccctggtacgatctgttcctgtggctctccctcccttttttttcttggtgtaataggggcccaaatctttgttcttgttcttgccatgtgatttctggccttgaatctttagtgctaaccggttagggattgtgtgatgtttcgattgcatttggtcctgtggtgtctcatccttgaaagtttagaatctggtttatggatggatcaacgcttgggtgatattggaagctgcagaattattctttccccacaaattactcataataaatgtatatctataatctaagatgaaaccccaagattcactgcttttgttccaggagaaaatgtatattggtgcatgctgtgctgcatgatttccatggaatatatattgccttgctatgttaaaactaaaggttaacatttttatttttgagaaacttaaagattgacatttgaattcatgcatctaagtcttggaaacataatggatatcatggttctaaaaatcagtaaataatggatatcatggttctaaaaatcgataagcattattcagtattcactaatcaccctgatggtagtgagcatacggtgtagtcatcaattatactgtaagttggtaacagccgcctgttccttgtatgcaacctaatatacaccctattagacgcgttttagagcatttacggttattgacataatctctagtctcataacttcttatgtgtaatgggctggaatgcccaataatattctcaggttcagactagctgcagggttcaaggacttaatttacctatacattgtcgtcaggtttgtctggaatg

SEQ ID NO: 2350 - DNA, 2000 bp, Oryza sativa
ataattggactaggcccgatttattctattaaatctcaaaggcccataataaatgttaaggataataataccacctcaggaattaaacgaggagtatctcaacttaaatagggagttattggaggctccctgttgaccggttgaggtgggaatcggaaagccacacgcgcgcgcgccgagccggccgggccggggccagggcgtgggaatggcgtggcgggcgtgcgttgcgcctgcctctaccctttttgcaaccacgatcccacgatcccacgattgcctccgtaacggcgcgtgcacgatcccacgatcccacgattgcctccataatggcgtgtgcggcaactggcggaatcactcgtgctatataaggaggccgctaatccgatcagaactctctcgcttgctttctcttgctggtgttcttcctcctccgcgcgcttgtgctgcctctgttctgcctccccgcttctgatcgcttgcgtgcacgagagatcggaacgagcagggcctccggaaccataccttcgcctgagatctgtaccaggtaggcgggtgatcaagtttttggggagtgcttccgcacgactgctctcgacttctgctctgttcgtcgtcgtctccaccatgtctgcacctggagccggcgcagctaccgccgtccctggagatggcgcgccgggagccggagccgctgcgaacgtcaacgtcaacggaggcagttctgcctcacaatccagcggagagacattctcggggtatatctttctgctactgttaactcattctttgatacctctgttagaattgcgttcttggtatgttcatgatgcttattatactttaagcatgctctggttatgttacattttatcattagatcaccccacattgttcatgccatgattattgtcataatattttgaattaaaatatgccgatatatgaccatatttctaacaggaactatgctaaactactcaatttgagaaaatcataaaatatattcatactaactgaagaaggccctcatagaagcacttccacggaaatttcaggaggccaaaggccaggaattcacatattaatcgggaaagctaaaatttctcacattaataataaaacaaattctcaaatcaataaagagccaaaatgctaataaactaaacagttttggtaaaattatggcaccaccttttcggttgatttcaatcaattttttcatcatgtgatgcaaactaaagttttgtcgttgtccttttgcttatatgatttaagcagataataacagtatcctgaatataagaaaaaattacagcaaattttactgtgtaagaaaactacgctatacatatataaaatttacaatgtaatatatggaatttatagtgtaaatactgttgaaagatttgaactttttttatataatatgacgtcataagtatagccaggtcataaggtactccctccatactcataaaggaagttggtctaggacaatgtttaagtcaaatcttaggaatataaatcataaataactctcaagttgttgagtttgaaaatgtaaaaattatatgaatcgatttgtcttgaaaaatactttcacaaaagtatacatatatcacttttcaataaatatttttataaaaacaagaaatcaaagttgtgttttggagaccgtgtcgctgtcctaaataactttctttatgagtatggagggagtatatgcatcaagttgggcatttaatacagagacttatgtcttaatggcaaagattttctgacatataactttcatatctttaacaatacataccctttgttttggtttgattttcaaatctacatttataccaaattgtatactgatatagatatgcatccctccctgcatattaaatatttttttgtcttggaaaggtggagggagaaaattaatccaagcctttaatacataaaccatcctatgctcaattgattatttgatcacacgaaaataa

SEQ ID NO: 2351 - DNA, 2000 bp, Oryza sativa
cggcaacccggggtggtctctcgaaacaccaggagggcactgttagggggtattggctacatagttgtatactagcagatgtaaactaagattgagtgtatagaagtataggaattgattgcttttctatttcttcttccacatagtgtaggattgtttaatgagagatatgagttctttgcttcgtgtcactctaccgttatgaatatatcaacccctgcttagactctgatcatacaagtagcatatatacattattagcatagttctctcttacaatgttcccttggcattaaataaatacgataccttggaatactcccaggtgaaatgctacaatggtatatccgtgcgcttgccgattccttctataaccatatatatactaggaccaatttctggcgtcattgctgggaattcatatttctagtaatgtcgttaagaaataccaacaaggaccaaaactatataaagaagaatattttattactggataaagtcttacaagggccatacccgaattctccggagactcgaagaactaaggaagactattctaattctaatcctactagcactagagcaaagtgagtaaactaagagaactttttcttcttgaatccttcttggtgtgtgttaaaatgaaggaggggaggtcctattatagcttgagaatgacggttgggggcaccaaaaccggtacaaccgtcattgggaggtcggtagtaaccgtcattggcttgggccaaacaagaccctgctgaagcgaacaagataggttcaatctactcaaatcgtgtttgctcagtacaggtattcctccacgttagtacatattcctaagacaaatttctggggagggtactcctccgtatttagccccggttggacggtcatgataggttgtcgtaaggaactcagcaacccggggtggtctctcgaagtaccaggagggcactgttagggggtattggccacacgattgtatactagcagatgtaaactaggatttgagtgtatactagaagtataggaattgaatgctttctaattcttcttccacttagttagaattactttattatgaggatttgattagctttgcttcgtgtcattctacccctatatgaaaattaacccctgcttaggctttgacaattacaagtaacatatgtataaagtgtattagcatagtccactcttattatcttcccttgggattaaaaatacaataccgtggaatacttccgggtaaaatgctacaatggtatatccgtgcgcttgcggattacttctgtaaccataaatataccaggacaatttctggcgccattgctgagaatgaatatttctagtaatgtcgttaagaaataccaacagtaacttagatataattctataaaatttaccttttctcacagaaatcacatatgtgccgatttactcactactaccgaatcaatttttcagatgagaccgcttttaggttgtaggcagactataattatcaccgtatgcaaaaatcgctccccctcggatcgttcaaggacagcttacgaaaatcaattttcgcatccgggtgtcttaacaggtccaccctcatcaaaaaaatacccctctctcttggcactcttttttctcccctcccctctctctctctctcccccacttcaagtctcccctccactcaagtccggcatctctccctctcctctccccacactactacatataccctttttccaaatagtcaaaacacatttttgcaggcaagcaaagcgctcacccactcgtagatgtctatgaagattagtaattttcgaggcgcctagctgaaccgcatgcgaaaatgaattttgcaaaaaacaaaatttggcaaaaaaattccgaaaatatcaaaatctagaaaccctagccaacccaaccatactgctgtcgtcggtgtcactatcaacgtcaccacagactaaagcacgcttctctgcttccctcgctggagt

SEQ ID NO: 2352 - DNA, 2000 bp, Oryza sativa
  N_region (411)..(411): n = any nucleotide
  N_region (421)..(421): n = any nucleotide
  N_region (429)..(429): n = any nucleotide
  N_region (444)..(444): n = any nucleotide
  N_region (446)..(446): n = any nucleotide
agcgtcagcgtcaccatttttgaacgaatgcaagggacttacttaaatacgtttacttttggactcatgtatttatttttggagatggtacatgtcatgccctataatgaaatttatgttggatatatcaaattgtctacatgatgcatatccttcttattacttgaagttaaacatgtttatgttaggtgatagatagatagatagatattgtaccagtacactactcttctatctccaagatgtctgaaatgcatcattcacaaaagaagtgtgaaatatacccaatgaactaaacataaacatattttatttgttgtaatttagtacatgtttccaacatatctcttacaacaatttcatattgtcgcgaccaaaatttcatattgttcaaacctataccaatccctnccccccccancccccccnaaaaaaaaacttcancnaaatttcttcttctcattttgttacatttactatttcatattgtcgtgacgcatggccggtcaattatctagctaggttgatgtcatcaaagatattgtatttattgtcgtatatatcttctcacctcacaaatttgactaccaatcatcaccattgatgaatggacgcaaggggctaacaataatatttccacatgcgtaagaccctataataacatttggacaagaataaccagtgaactaaaatttaaacttgtttgtgttggttaaataaatatatacaatataacattgcacgacatcgtgtatagtctaacatttgtgaaaagtatcccgcgaaagaagatgcaacattattttccacaggattagaaaaatcttcatgttgaaacacagacatggagcactccgtatttccaatatgtgtaattatggaacaaatccgatagttttgaaactagaagatgcaatgcttgctccatctctaacatttatatgagagatagatacggcgtatatactcaccatctatacggcatccgtaaacaaactaatagactaaatcataaaaaaagggtccatttggggattaaaatatggagatatcgtgagatggacatatgatgcattcgctatctctaacatttatcgaagaaatcaacatagatcattcatactatctctaatatttatggaactagatacatatatttacttctgtttaagtcaaacaatactatgtcacgagatagatggatacgacgcattccgtatctctaacatttatgaaacaaaacggatgcactaaagtgtaaatagctttcttcccatggttaaatgtgaatatggcgagggagggatttggtgccatctcccagtctctcaacatttattgagccaatctgatggactaaaatgtgaataacatttttccttttggaacctggacatgtttttgctggatgggtgtataaatcttggaggggctagtgtagtgtacacatgtaccagacccccctcttctctgtagactgtaggggctcttggctttctctgcctgcctctcctctcccaccctctcttttgcccctttccagttgtccatgcccccatctttttcaccaccgtctctcctcttctcctcccctaggtacagtcccccccggtttgcaatttccgtcatctccgtcgtccaaagttgtaagttttactctctctcccttaccaccaccacactctctcttggttggaaacggaggccaagatagatgggcgtagaggcaagaattgtccccaattcagcgcccaaatcgctctcgtagggtgtgctagttggtggtacgcgagtagcagcagcagcagcaatgcttgcttgtggagtggcaaggcagcactgcagttcctggcttttgtgcatcgcctatccctgtcttgtgtgtgcgtagatcaactgaattttgtgttttgcgcagggaaggaaaggtggtggtggccatgcagcacccccagggtgccggcgacccgccgtatggcgtcgtccccgcgccgccgacc

SEQ ID NO: 2353 - DNA, 2000 bp, Oryza sativa
  N_region (1329)..(1329): n = any nucleotide
tgtcattatccgagagaagttatcctcaatccataaattaatcatatggattgttaaccctggataaagccgaatttctcaaatgatgactctttcaatgaaatctgagacacgaatgtcaccatcttatctcgcaagggatcaacactacgagaatatgcgggctagcttatgtttctcagtttctgcacttctgtacagttgcagacgatcgacgggtttgtaatctgaacattgctcctgacttgctactaatgaaataggtttgacttgaaacacatgccagcgtgtttgctcagcttgatgaatcagtgacctcctgtctgacccttctgttttttaggagatctcaggcttccaggttacacatcgcatgaagattttgacctatatatatatgagtgtaagaaatatattgtactatattcatggctgtgtgttgttcaaactagcatgtccgtcattcagacgccgccatccgattgacagcaaatcgaggaaatatgaatacgaaagtaaacagctacggattagtttttcagtgggctgtggggacgatgggttagttaggacttaatgaagtctacatgttgtaatcagccactggattgtgtactaaaaaaacatttatacgaatactagctggtgacaatagtattatgtagtgattgattctctactgttgcaccaatcatgattgcgcatcgctgaccgaatggtttatgtaatggtttcctggagctacagcgtcctgtttgtttgtgttggggcgtggcagtgtcgcgctcgttggtccgcagcgaaggcagcgactgcagaagcgacggatagaggtttgcgtgggcgaggcgaatgtgatgggctaagttttgtcgttggcaagatgggctgagagcgaagctttgtgaagcgataccgtgatgggctactttttgtcgctgactagaaacgtcgtgatctggtgggcttattgtgagcaacacaagatcgcgtcctgtcggcccatggttttactgatttagacatgtattttggtccggatactctaaacgaaaaaaggaccagagcgctaatgttattgtccatcggcctcttgttgcagacgggcttaagaagagtcaaagtaggtaggagtagagcttaatctccgttccaattttgtgcacgtacaaaaaaaagatctccggaagagaaacacaacatggaaacataaattttgatgttaccctgtgcaaccctgcaacgcggcgctcgacccaggccccccggtcgcacgcatccgggccccgtgcgcgcggctctcacgccatcgcgccgacgatttcgttncgcgaggcaacgacgtcggcgcggcacaccgggcacgtcgtccccctctgcagccacaggccgatgcattccgcgtggtaaaacgtgcccaaacggccgcagccgccggcacggctgtcccccgccgtccgcgaccgcgaccgcgagcctccccttgcagatcgcgcagagcgccacgtcgtcgccccttgcctccgtggcggcggcgacgtcgatgatgacgacctcctccttgttcagcaacccttggcgctccccgttgggatcgccggtggcgacctcgaaccgccggccgattaagcatcgcacggtccaggagatggcacagatcgcggcgatgagcgcgacgacggcgaggaatatctcgaggcctgacagatcaaccatcggcgagagttcgttttcgtagctaggtacgtgttgctggctcgatcgtcttggcgagtggtggaaccctgcacgcacgcgtacgtattaacgtataccagtacgtgctccggctccaggtacgtttgttactcctacttgtttcctatactgatttgtatttcgaaaaggtttgtttttttcccagatattactgcggagataattaaacagttcgtatcagaggagaaaatcgttgtggctgatctccacgtctttgttactcccacaaaaatatgaacaaa

SEQ ID NO: 2354 - DNA, 2000 bp, Oryza sativa
atatgataaaagtaacttacatatataataaaagtaatttacaacatagatatttcttttatcaaaatatagtcatgtaagatattgttataaagatttaattgcaacgaacacaatggtgtaatcggatttgatgttaatgaatctagatagatatatatgtctatattcattaacatcaatatgaatgtgggaaatgctaaaatgacttacattgtgaaacggagggagtacttctctgtttatatttgaaaccgggcaatgaattgaaaagaaaagggaacagaacggccttgtgaacgcggccaccggagccgccagcgcccggcaggacgatttgccgaccagcaacggaaggcgatgtgccgtcgagtagccaagcgatagatctaaatgtacaaaaactttttttaatgaagagtggataatatcctaaataccaaccttacctctaatcactaagttagtaaagtactaaaatgtccttatgaatcaacggttcaaatcaattctactagttgtataatactacgagtagagagtaccgagcatcgctctttattttttgggaatgctatgaatctggaatcgcatattaggtttcatttatacatctatagtcaaattcatgtacacacaaaaaaagccgaccctaaaaaatatgattgaattcccagttagatttgtatttatctatctgtatagattttattttagtggaaaggtcgcaaggacccggcctatattgaaagccaaccacgagcagagtttttgctgcggttaccagctttacaaaatggagcacagaaagcactcggagatgattaagtaccaacagaccaggggtatattaagggggtgtttaggtgagagaaggactaaactttagtccggacttattttttttgtgagagggaccctctcacccaaacaccccctaaacctctaaagactagacggcagcaatctaaaacagaccgaacgccaaagcattgcacggggctagcaagatcaaccaactcctattctattttgtcttagagcagctcctccctccttaaacctctttaccagcttctctagatcactcttattcatctccagccgatgcagaggactacactgcaataagaaagagacaatttggaaaggtagtattaggggtgagtaaacaagtttatccctgaacatgatgttgtttctcgttgtccatatatagagtccggcaaatggcagcaagcagggcatttttcacaactatatgtttaattcagctctaatgtcagcaaggataaagtcatcaaggttaagaggaacatgatcccagttcagcacatctctacagaaacaccaaacaaaatgcgccaaagggcagctaaagattatgtggtttgtagtttctagatggatagtggagaaaaaaaactaattttaaaatcagtaactagagggtgagcgtgcatacggtacggggtcgaccacgggccacggccggcggggagcacaacggctacagtttatacttattttagtgctagaggagacacagacagtaatacacgctacttccttcgtttcataatgtaagtcattctaatattttccatattcatattgatgctaatgaatctagatagttatatatgtctagatttattaacataaatatgaatgtggaaaatgctagaatgacctacattgtgaaacggagggagtagtatcaattatttgaagagttcagtgacattgtaccataaggacgaaacgaatactccactttagtggcatgtggtttgacttactcttgtttcgtcgtcacgcgccagcccgagaacgggtccaatggaggatacctcaaatacagactcagactggcagtataggaagttgtgtcgttgctcctccagcaggagaagccgatcagtacacagtactgatatcacagtactgtatcagtatcaccttgcacacgatcgatcgacgctggctcgccggcggcg

SEQ ID NO: 2355 - DNA, 2000 bp, Oryza sativa
ctgctttcttttcggtgtgaggactaagtgcctcttctgtaagtattttacgctttatttacgtttggaactgtatattacttgtcattttgcgtaccctagctggtcctagacagggatttaatacacaaaatagtctggaaatttcgggctaaatttctgggcgtgacacggcagccgtggacagtgcaagggcgacggcggcatgttgaggtggcagctaggctagaactccaacaaaaagaaaataggaaaaacaggggtagggtgacttatatatgggtgaagataaaagaggttgggccggaggggagagagtcggcagggggagggaggggagaccgactcggatgggccaaggggaggcggggagcgcgtgaacaggagagaggggcggtggccgaataggattaggattcctaaaaaggaaaacaaatgtgtgttgacaaccaaatttggttagagcaagtatcagattcaaggttaagattgaagcggatttggcaaaggagatgttctcgaaaacagagtatgcatcggctacaggggcatcggctgaagatagcatcggctaatgatggatcggacagaagacagccgatgcagccgatctcgccaaggtggttatataatcatctccgggattgatcaacgtgctgcgcaagcattgccacgattgagataagctcacggataggcaattgtatctattaattaggatattttgaatactttctttagagatatttatcggcaagagtctacctaagagacttgttcgcatcttaatggttgtaatagttttagattctcgtccggcaagaatacattatgtactttgggtataaatatgaccgagaccatgtaaacatcaaacgacagttcaataacactttcggcgcatcgccatcctttttttcattgtttcgacgagttcttgcgttcgggttgagctgcatcggtttcgatcttcaacaagacgtaaaaaacttgttatggcagcttgcgttctcgggattagtgacactctaatcttggttatgtaaattgttgagttatcatatatgctacataatctctatcggtattataatctaaccctaaatcggccagcatctgttactcggaggcagcagatagagttagaggcagcagatagagttagatatcgttattgatctagattatataacatatctaccatctcatatagattttcatcaactggcctagatcttgtgattatcattgtgcttaatgctgcatcgtttaagttcgatctattaattaatatccataaatacaatatctaacctgttttatgattatcgatagggatagtatcggggttttacccgatcttacctgatttagctacattattccctacatgtttacttgatatgctaaacctgccctttatattaagatcttatcgcattaaagtatattcggcttactagttggtatattttgcttgttttaatatcttgatatagagtggtatcggagtattagccgatacatgttagatatgtttgatcggctatgctatgaatatacatataatcttcatctcaaagtacttttaagcataagtgatttatactgtctcgactagctggtcgatctatcccaatcacttggtttaattatatcttgagaaggaaattacatatcattgatatctacagtcgatcgagcattgactttatttcgttttactcttcattgctgatctaatgccaataacatcagctcagcggttaacgatatgtgattggccctttgtcgaacggctatcgtttatggatttaactttgtttttcttgtttttctttcttgttgattgtaggatcaaatcaactggcatgcctttgaacccaaaagcaagatttaggacctgcactggagtgaagcagatctcctaggccagtgtgtgtttttcgcatcaacacacttttggcacgcccagagggacacgagttgtaacgctttca

SEQ ID NO: 2356 - DNA, 420 bp, Oryza sativa
  N_region (41)..(41): n = any nucleotide
ggagagagagagagagagcgccggggagggagggggagatnggccgagagagattcggcccatcgaacccgggggaggcaaaatagacttttgcagaggaattgatttgggaaggatttggattcgggattgaactcgacgatagatcggggatttgagatctgagatggcacggacactagacaacaagcaaagaaacagatttcgtaaatagagtttttaagagatagttttcccgctaggcgccacgacggaacgggcgctacaagacctcctctcctgatcaccgatgcacgccggtgagcggaataaagtatactacgagcgatgacgcagtacagaataggacacaaagcccttagattgattcccgcatgtgttgcgtggaggaggggactttatttatatagagatatcaaa

SEQ ID NO: 2357 - DNA, 2000 bp, Oryza sativa
ttttgagttgtgagaagaacaatacatgcatatgcaatagagcaatcatttattacatgtatctactccacatctattacttctattgtgggatatggttaaatctgtagaaattttaagtatcaatgtttctttgaataaggagtaaatatgagaaaacatcaaaaaacaaacaaacatggcagcattgagccatgatgcccctgtgctcatctcctgttagctctacaagtcgtgcactccacttttccaccttggtgacaacaagaaggggctaatagagatagaaacatataactaaaagaataatggtgccaagaaaaatatgtcattcaataaaaaaacaaaagtgtatcatgcatgaaaggcacttgttccaaaaaaaagaagcacatttcttacataatcaaaccatacctagaacacaccccgaaatgagctgtaaacaatggaaaatatattagtgtaaaatacataaatgatgaaaaaaaatagagaatacatatagattatcctgttatgcttcatagtgatttgcttgttttagtacatatgacatatggtagcatccatgcatctgaaaattctagacttctatgttatatactcgatatcttttaaacagagagtaaactttcactttccacaacaaaaagagagaacataattttgagcgctagtgtacaaattctgtttgtttctctaccactatatgcctactataacacatatttttaagaaaaatatagcaagaaccacatatatcacctacatctagacttcttcatttttatctaaatgataatcattactgcgatatcactacatcagtgctagttttatcatctaggatattcggcacctatattgctttgaacatctgaagagaaatgataaaaatcttggtataaaaagagtgaaagataacatagaaaattgattatgttgtggcatttgcatggataattcttttagtttggccttccacatcatatcctttatgtgattccgtcgtattccatcccttagagtgaatgataagattgctcaaaaggaaagtaaacaactaacgtttgttgtacatttgtatttttatggctgcaccatttaattttccacgtcatatgtttgatctgtaccaccatattctatcacataattaaagaggacaagaacaaaagtacgtgtcatatgcatttatccattcatgactcaattctttatccttccacatcatcaactccacctccaactcattctatccctaagaataaatgaagagataagaaagcttaagatagaaacaaatatcatgcattgtacatatgaattcaaccatggaccaccaccctcgtccaaatgtagccacataataaatcaataccaaatttcaggtgacctccctaggcatttcacttttatttttggattttcttatgctagtattaatgccatcattttttttcattctagcccttcaatttttctacatattcttttatgaagtactcttacttttctaactacacctctcattttgtctaatggaatataagttctatgtgacctcattcaacaattctatagtcaaaatatttagaatcaaattacccaaacgtttttattgattatagcctaagataaaaaataatcgaggcacaatttatgttaagacatggtaggacactaaggtatgatacaatcaaacaaaatcgagattaagcttattcatgagaaatcccactccacaagataaactaactataccagcaaataaatacacgtgatgtctgattgagtgtgatgtagacacagttggcaaccaaactaggagccggtaccgcaccgcatcgcacctagaacgactcaaggggtcgaatacctgtgggctacgattataaatagtcacttcctatggaaagaactcttcacccaaaaaatttcccgtacaatcgctatagttgaaggcaagagacccttgtaatttccaaaaatattct

SEQ ID NO: 2358 - DNA, 2000 bp, Oryza sativa
gaatggcaaaccctgtatggtacccactatcgaaatgaaaaacgtcaccccatcgttacaagttaaccaatttttttaaccgataatcagcagtaaaaaaaacttccattcgaaatacctttctaaaattttttgtagcgggccagcagttagttccaccttttcagtgctgatttgaattttttggcccgctccgatataagggtgttacacgtacgtttgcttgtgcacataataatcgttagtaattcattcgtttgcacatggatgtacagctatctagcgagttgcgctgttgcgttccactgtcacgcaaattggcaaccaggcaaaattcggggatcgaatcaaataggacgtgtgtgcttcatgccttcatccaatggtggctgccctgctggttggtggtacagtgaagcgcgctggtgcatgattttaggatgtgagcattatgcagtgcataattaattaagtactccctccatcaacttttgatagtcatatttcatcttggcacaatgaggtgtgttcggcaccctctttttctaacccctctcgatcgttttccgtgcgcacacttttcaaaccgctaaacggtgtattttttgtaaaaaaatttttgtacaaaagttgcttaaaaaattgtaattctcacaaactctccgaaacctgcagccacagccggccacagaaaattcaccgagtcagactcggcttgccttgccacatgcccaggccagccgacgccctgcttgcatcaccaagccgagccgctgcatgctgcacagtacgcatacacacatgcatagcacaacatgcatcaccacgctactgcaattcatagtaggcacacatatatgcatgctacagtaccacgtgtactgtagcaccatatactcttactttccaatttccttcgcgaacaccgacgcttgcacgcacacctcgtgaagcccgttgcaaagatttcacccacacggtatccatccaccgtatgccatctcgtatccaacttcgtcacccggtatccttgaccgtctggacctcaactcctcactgagtctagaacttcaattctccccttttcaagaagtatgcattttgtatatttctccccctttgacaataatttcatcaagatgtaagttataaaaatctaaatacacccatagcatgacccatcaatattaataattaagaatttagcaagaaaatgttgacacatctagctttttcctaactattgaagttaccaaaaattcagtaggacacgtgttggcttcaattcaaaacaaccttaatatgagagaacgtacctaacattaatttcagcacgcggaatatatatcctttgtttcttttaaatactaagatatcttttccacgtttcatccatggaatttaatattaaatacatatatcctttttttaaaacattatcctatctgaatggatatataataattcttccatggataaaataaacaagagggtttgatatttttttcctataaaaaaattacatgataaaccttagtaacgaagcaaaccctagttgggccgcctcgagatggcagcccattccggcccaggacacgagccatcgtcatcgggggtcgtctactacttgcttcctcctccctactccgcctagtctactactctacttcgctctccgccgccgccgccgccgccgccgccgcccacctcgtctcgacgccggtgagcactctcccccgctggagatccacgcgccgctggttggattagttcgggctagggtggagcgagattggatcgttggatatttggtttttggtttttgattttttttttgttgaattgttggggggatttgactggattttcctcgtgcaggatgaggatggagggttcgtcgccgatggaggaggaggaggaggcggcgaggctggcgggctcgcagggggagtcgccggcgatgctgcacccgaacggagacggagacggcgacggcggcg

SEQ ID NO: 2359 - DNA, 2000 bp, Oryza sativa
accaaatctatactataaaacatttgttagtaccaaaacttacccaagatttagcacttacccaagctattttggtatgattttaaaccaaacaagtcaaacgattcacgggtcacgacccatcaaaacagaacaaaacttgttcaaaaaagaaaagaacaagcaaaactgaaatcagtttttagagaatagacaatgaggaaacttggtaatgatgcggacgacttgttaaaaaaaacataactgcaatctaaatagagaatagacaatgaggaaacttggtaatgatgtggacgacttgttaaaaaaaaaccatagcaaaaacgaaatcagtttttttagagaagaatagacaatgaggaaacttcgtaataatgtggacgatttgtttgaaatgtattattaaaaaaatccgacctgccggattcgaaccagcgacctaaggatttatctgcacatactacagtcctccgctctaccaactgagctaaggtcggtttccgtttgtattttacagatttctgttatatccaacataaaacaaacaaaacaaagataattcatacaaccacattacatccatctccataggctgaaaggattaaccgcttgctgtacaacgatctgataatacagacgactaaaatctcttcaaattccatgcgaaatgaaaagccttcaccatacaactactttcatggttgatccatcggccaagaatccttgcgaaggtagaaacgcttccatcttgtcagcgccactttcattatcttcctttaatctattccgtgcaaagtgtgatttctctacatcattcaatctccacaacggtaacattatgcacatcggacaacttgcaggatttttggatgcacgatgatcgatctcgaggtgaggatgttgattcagtttcgaacagtactatctttaactaatattttttttcattgaacaaatgaaagaatttcaccactacccccaggtacaaattttagccgcgtggaacactctccaccgtggtaacaaaacaacagtcctctactccattccaacaattctacccgacgttggagcaggccgacgtgtcggggtctacgagcgccggaaccaggtatttcctccggtgcgccccccccattcgcgttgtagctggccccgctggccgggtccaccagcagcgacccagcgtaacccgggtacgcccccttgccgtacactccggcgcacgcggtggcggcctccagcggcgcgtcggcgtcgccctggaagaagccgttgccgaacgggttggtgacggtgccgacgatcatcgaggcgagggatatcaccatgccgtcgacgccgacgtcgccgttgggcggcgtgaggggcgccgcctgcgggccgtacaccggctggtggtacggccacgcgcactggccggggcactgggtcgccgggttgcccacccacacgtaggcgaaccgcccggcgcgggaccgcggcgacgcgccgtgggtgccgcaccggctcatgcagaagccgtcgacagcgacgtcgtcggccgtgagcaccacgttgatggcgcggctcggcgagcctcgggcggcgagcctgacgaggtccttctccccgagccgcttgccgagggagtacgactggtcgagcacgtgctggccgagggacagcgccgggaagcgcgccttcgagttggcgtagtacttctgcgccgtcttgaaccagctggcgacggacggctccggctgcggctgcggcgacggcggggtggacagcgacgagacgaagtcggtgatcaccgcgcgctgcggcgcggagaagttgccgtaccagatgaggttgacggcgatgcggccggagaggagcgcgcccttgtggtacgtcattgtgatgggctggtcctgcaccagcgcggtgagcttcctcgacgcgacgcacatctggaagagaagcgcgcacgcgagcaggcacgctgcaaaagctgcggaggaagccgccattgg

SEQ ID NO: 2360 - DNA, 2000 bp, Oryza sativa
  N_region (1882)..(1882): n = any nucleotide
  N_region (1889)..(1889): n = any nucleotide
  N_region (1968)..(1968): n = any nucleotide
  N_region (1971)..(1971): n = any nucleotide
  N_region (1975)..(1975): n = any nucleotide
  N_region (1978)..(1978): n = any nucleotide
  N_region (1983)..(1983): n = any nucleotide
  N_region (1986)..(1986): n = any nucleotide
  N_region (1989)..(1989): n = any nucleotide
  N_region (1993)..(1993): n = any nucleotide
  N_region (1996)..(1996): n = any nucleotide
  N_region (2000)..(2000): n = any nucleotide
ttaaccaaattatattcatattttgcttgatttgatcgagactaattatattttcagctcctgctgttagatttaattgggtaattaatccatttaaatcaattaaatcaaataaattccaaggctcattatgctaggaattcatgtgaattcattcttctatgggatatcaatgggatgaagagttttgagaattaatccatttgattaaggaattggtaacttatatcaattagtcctaattgatggatggttgatggttgtgtagtggaggatggttcatggctagttgatgacaattagttgctctattcctcttcctattccattggtaacttacatcaattactcttaattgattgttggttgatggttgtgtagtggaggatggttcatggctagttgatgacaattagttgctccattcctcttcctattccatgactcttactcttcatcttccattcctcttataaaatgggaatggatttgatctcccgcgagaaaaagaagacacactttcatccattttccaaagctgttgttgctacggtaatcccatcccgacgagtgtgtgcacacgcgttgggagagtaggcctccgaaaccacgcgttgctgcgacgtttgcacagacgggcgggcgatcaggtttttggggagcgcaaggcgcgactactcactgttcgtcaacatctacttcatcttcaccaacatgtcgaacactggagacaaggagaaggagactcccgtcaacaccaacggaggcaatactgcctcaaactccagcggaggaccattcttggggtataaccttattacattatttcaattagaagttttactgttaatgttcatcgcaatgtcaacattgtgtcattatgtgattgttgatgcttattcaacgttaagcatgctcatgttgattacattcaccactatcactggatcaaatcctattgtaaatatcatgtttattatcttgttattttggattaaaatatgccgaattatgaccaaatttccaacacctgcttcttttttcttcggctcaccgactcaccaccctcaccccttgcctccaaaacactggattgctgcccacccttgaaccgtatgaagtgatgaagatcagctaaagtagtttccttcaaggtttaccaaaccgtttaggatagagttaccaccaacccactgttatatagtttggggttacggccaccccacggtttgacagttaccatgaggtataccttggtttcaaaaactaaaaccacacatggtaatcgcgtgataaccacacagttttgtaagccctagtttcctctcaattggtgtattaatagcgattgcattgagatacactgtgctaagtgtagctataatatgaaaatcaatctcaactcatatgaaaacttgtgtacagtattgttttaaaaaaagttcaactagatgaaaaaaaaatatatcacatgtaggagagatgatgatggacaagcgtgtaaaaaatctatccaaattcaactacatttatgagatataaacaaggaataagttcactttaggtccctctatttgttgggcagtctgattttcgtcccttcaccacaaaaccgggtacaacccgtcccccaacttacgaaaaccgggcaaacaaggtcccttgatcggagtatggagggcggttttggccgacgtggcgcatacgtagctcctttgactaggtcttcattccacgtggtattgacatggcaattttatctcgaaaaaataataaaaatagtgggacccatatgtcagctacacaaaaaataatttaaaaaggtgaggcccacatggtcccacatgtcagcgtccctcttctctctatccccctctctctncccctanactgccaggagagaagggcgagcggcggcaccgagggggtgacgggtggagcagcgatggagcggcccggcgacgggcnatngacntcngagcnacngcnggcngcnggcn

SEQ ID NO: 2361 - DNA, 2000 bp, Oryza sativa
atgccccttgttatgctgatttggagatgcaacaaaacccaagtgagaatgagagccacatagccaaattgagtgaaagagataaaaagagtgtgttgtctgattccaccaaatatggggttgagagcatccacaatgagagtgagagaaatacaccacacaaaaagagaggattagagtgcaaagcatgtgaggatgtttttgattctaacaaacttatctccacttttagtgttgtctctcctaatgttcaggtttgcaaagaaaaagatgaagagatagttgtcaacccgatgaaatgtcaagaagataaaagaattgagaagatagaccttatggagaattacccaactactgccctgagtattaaccatgatgataagggaggtaaaaattcagaaacgacacccacattcgatacgtctccacaagagctgaaaggtaacaaagacgaatcatatttctgcaagcatgaagagttggtgagtgaatttgttgatacacttgatcaacgtgatattttaattgcaaataaatttgatcttgtggaactgattactcatgatgaagtctttacaaaaatattgcctgttgaaattttgtgttatatcatcctcgataaacatgttgaaatacacgatatgcttgagaaagtttctgaaatagcttcgctgaaatctttgaatagtattcatgtatgcaagtatacttttaatttgattggtggatatgctgaaaataaattctatatgtgtgctatttgcattacttgtgacaagcttgctgatttgaggttaaaattagtgaataatcatgcttttgaaccttcttatgctcagcgtaagttgaacaaaatgtttggtgcttgttgtttggaaccatttatgtcaccgacatgtgcatatttttcttctgagacactaaaacataatggtagaaatgatgattctttgaaaattttctcatccatgcttgaaatggttggctttgaaactaatgaatttgattgctcgaatatgttgcatgatacaaaatcttggaatgcagatttggtcgatgatgatagggatgaccgtcgggtggcaatacgcactgctcctttcaccgatatccaccggcaagacacgaggcgccgtgcacaactccttcccccctcctcccaaaaaaaaaagacgtgaatattagggaaggacctaatatcaaataattagaaggggtaaggcttcgaacccagttcgtccagcccaccaccttgtggagctagctggtagacctctgggtgtttctccacaactccttccccgacctcatcctccgtacagcgttgcctcgttgcacgctactcgcaccgcccctcatcgacgggtagtcctccttgctcattcaagagaaaagaagaagagggagagagaaatcccaaccatcaatgacgccacgtcgggctcatagctccatcgatacaaccattgcgcggcttcaatccatcgccgccctggccgatgattgtcgccagtcatcgaccacgccgtcgctactacttcgctgcccatttctagggttgaggagagaggatggggaatgaaggtagggacaaaattgtactctcacatcatcacatcattaattttatctctccgattcatccggcaataataaaataaggccgtgggtgtccagcagctaattaccagtcttttgtgatgtccgacagcatatatatattcttgcgatgtccactagctaattacacgtttttttgaatatcttgtagcaaattttacctttttaatttgggatgaatttatcacgacttgacatcccatgcccacatccaatgtgctctccttctcgtacacctgaacaagaatggaaagtggccaacaacgttcgcatgccatctcaacatatcttctccatgtatcagtgcaatccataggcataagctcccaaaaataacctacaagttgacggttaaccaaaacataaagtactataaggcc

SEQ ID NO: 2362 - DNA, 1713 bp, Oryza sativa
  N_region (12)..(12): n = any nucleotide
  N_region (25)..(25): n = any nucleotide
  N_region (196)..(196): n = any nucleotide
  N_region (774)..(774): n = any nucleotide
aaaaaggtaggngaatatatcatcncaaaccagagcaatccaagaggtcgaatgtactgatgcagccttgaacgacgccgacgtaaacgatacaattgcctgggatggcggaacattggacttaccccttagtcggagatcgaacatcgatgcagcctcacgtcaggtgccaagtcccgccggacgataaaataangtagaaaaggtaaaaggtggcgatgcgccaaattgtattgatcgtgaagataaattacatagaccctgggtgtacatatttatacccatgggttgatacaagtccttgtcggacaagaaagaaactttcctaaagataaaaggcaagataaagtccttataggacactaaacacacgttcctaaagataaaaggaaactaataaattattcctaattaatagataacttgtcatgccgtattctctttgaactcggtctcttctggataagcttcctttagtagatcaatttccttaaccgaatatatcaagaatccgacaactgacgacttgacaactctcatcggctaatcttaggacttcgaagccgatgctgactctaagccgatgactactccgggcttaccaaaattcactgttaactgtgggcaaagaaaccttatttatctatttatttcattcggcaaagaaaacttctatatctcttctttttatggggcagataaacatgtggtcatttatgattatcacctaaatattaataatgataatcaagcatgattcgttggtttggagtnccaaaaccttgccaagttttagcactagctaattaattagaatttgaattagtgtgagaaaaaaataatagcaaaccaaacatctatttatacctatcattaaagttttcgaaattttgatacggcaaaaaatcagcttcatgatcattccaaacatacccgcaatctttcaagatcaaattaaccagatttaagagtaaattacatcagcggtacacaaactggctagataagtgtaatctagtgtatgaacttgtaaaatgctcgttttgatgcatgaacttatttggtgcgtgcgtacaagaccaaaaccgtacgacaatgttaatcttgctgattttgttattgattttaatgctatgtaaacaaatatcacgtagataaagatcaatttagcaaaacatataataatgcatattgattgcatgaagaaaaagataaaaaattgagtaacgatgcaagcgatagtaacaaaggaagataaagtagaaaccaaatttatacatataacctttctactatatgtgcaccacgcatgtcatgtaataatttataatgttcaacttgaaaaatcagccttgtcatgccattttggctttgggatgtacgcactaaacaagttcgtacaacaaaataagtgttttacaaatttatgcactagtagactgcatccactaagttgtgtatcgttgatgcaatttactccagatttaatctacagatatgagatatccaccaaggcccagcccattttgggcgctgaagcgagcactttccactacggcccagcccgctttgggatagcgaaagcgagaaccccagaagcccgtggaagcttcggaagcggcgcggcgcggcgctgggcgggggagaagaccagagcggcgaggaaggaggcggcgcccagcggggagagcgagcggctcgacgccgacggcc

SEQ ID NO: 2363 - DNA, 2000 bp, Oryza sativa
  N_region (191)..(191): n = any nucleotide
  N_region (194)..(194): n = any nucleotide
  N_region (299)..(299): n = any nucleotide
  N_region (342)..(342): n = any nucleotide
  N_region (391)..(391): n = any nucleotide
  N_region (601)..(601): n = any nucleotide
tcgacaagaacccagcgaggttgggatcatcttttcctccacctctgtcgaatgctgctccaactgctgctcttcctccgccctagtgagacatcggtgagttatcggcttcttattgacaaattcaaatctagaaaacttgtacctatttgtgtgggaagttttgaatttttgagttaaagtttttgganacnatgatatggaagtttagggattttggtatgaagtttccggaattcttagcagaaagttttagattttgaatcgaaagttgtgtgattcaagttgaaatttttagngtataccgtagaaagttttagtctatccagttaaaagtcttanattttggattcaaagttttacaattcgaattgaaaatttcagaacatgngtacaaagttttagattatgaatccaattttttttttgtaacttttggtttgatgttttgagatttctaaattcaaagttgcagaattgaatcgaaagttctgtaatcggagttgaaaggtttcaccacgatagagacgcatcgaaaaaaaactctcaaatcaaacgtgatgcttagtgtcaggggtaacgcgctgtcgtgatgcagttntgcacgtcagtaatggtttcatgtgggctgcactacttgctgtcacagcgcatatgcactagcaagcagccctcctgccaagcagcccatgcgactgctggggcagggtatggctagggatgataatgggttaaggcccatgagttttttttttcaaaaatacttcttataatccttaaacacttttgactaaaaatatatagaaattaagctcacccttttacattttgtacgctgaaatgttattggacccattgcatgaccggtcgagacagcaaatcggcccaggtagatgagccggccctgtgcagagggcccaaccggcgaaggtagtcagtaataagtgagctgacggtctgtttgttggacggagtttttaggagggatttagagtctagagggatgtggctattaactgttttgtttagatgggggacataggaattttggtgggatgaggatggggaattgaggaatgaactccctccttttcaatatctgggtaggggcaggtaattgggagggaattcctcctttacttcgcgtaaacaaatctcagccatccgttttctttaatgatctaatctccaactaaactccctatcaatttctatcacctctaccaaacaagagactgggatgaaaaatcaaattcccatcttaatctcaccgtcaattccctcgtgtaaactcccaatcctcttccctcaagttgccaaacaagccgtgagtgtgagatctgccaacatatacgttctctctcttcgcttacgcctactccctccgtcccaaaatatagcaacctaggaaggaatgacagtccacatacatcaacttagaagggtcacattccctcctaggttgctatattttgggacggaggttgtaatttacaagttcagggggtgtttagatcatagtgtaaagttttagcgtgtcacattaaaatcatggagcaattagactttaaaagattcgtctcgcaaattagtctaaacctatataattagttattttttaaatctatatttaatattttatataggtatttaaacgttcgatgtgatatggcgaaaaattttaggtggaatctatacagggcctcagatgcaaaggatgaggacaaattaagccggcttcatgcgtggagcaagccaaccaaagcgctcccgctgccctccacgtctcagcacgcaccacccctacgtgtccccaagccgagcaacctcctatccatgcaaaatactagagcggcaatgcaaatctttgctctctctctgccaaacttgtgttcttgcgaccctgctctgctctgatacgtgtctgaagctgaaaacgatcgaagagaagatcggtcgaggttgccgaggaggaaggaaggaaggaaggaagaaggcga

SEQ ID NO: 2364 - DNA, 2000 bp, Oryza sativa
tgactcttcaccttttgaatcttgagtttttcttctagccaaatcttgagctaatcccttgcgagatactgtatgtttttaatcccttgggagaacttttgtatgtgctcataatctcttagatgttccttattgatgtattccagtacacttctattttttatgcacttgggtttgtatttgttcatcatgttgatggttttttttttctgaagttatagactgttccaattgatttttttttctgaagagaagaaattatctttgttgctgttcaagagatcttccaaataatatatagttttttcgttcttcattatgccaataaatttttagttgctctttccatgttgatatatttcaacccatatcctattttgttgtacatagatctagatctattttttttcaatccatgtgatactttggagtaattgatttctcccatgacagtaattttttttgttgaagataaataattatccttctgtccgtttaggagtctttcggataatggctagcttttttctacgtgatttccataatttctaagtttccccttttatgcttacatatactcttacctatatctattctttatgtacttcgacatggatctagatctattattatttttgtggatggaccattggtctgataatttggaatgggtcatttcaggacaagaactttatgtttaggatatataaataattttgcgtgattgtatagtagatatttcaaatcatagttctttttgttcttcactgtgtttataattagttacctgttcttaatttatcatggtgatgtatttttatctagatctattcttttctgttgatggtcatttgaaagtgacattttagaataattggctttctttcatgagcattcatactatttttgtttgcaaaccgtcaaaagataacccaaataataactagttcagttgttcttcaattatcctccattttttagatgaagaaatggctgaggcctctagttgattgtctgacatgtgaataaatatctcataatctaccatccaaatacagatcagataaaaacaatatgatttcaatgtggtgaatctcctgaattttgtatatatgtacttacttttacaggtctaaacaatcatgtattattccagggcagaacactaatgtgtgtaataccaaactttagaaaaaaaaatattcatgtgtcttttgttcaagaccaaaaatatgaagcatttctattgtcttttatagagtagttaagtaagaagtgagcacaaatcttcgtactgcagattggttacaatattgagcaaatgagcatatttggcttacttagcatattatactatttacactatgtgcatatctcatgtacgtatgcaatcggcgggaaacaattatagaactcaataagaaaatggcttgtacttgctttctttcacagtactttcctatttaaagttggtatcaacgtaattactactccctccattccaaattgatcttataggtacataaagaccaagaaaagctaataactctctcatactatatttactctagcaacaaactcaatgcatgcaccatccccaatattttctagccaatagcaaatcaagatattgcatgtgggttataaatacttgtgtgcatagatgcatgtatcaatgtccatttactccactgcacaaataacgaatagactctaataaatgaaccccaatatgtagatcatttaggaataacctaaaaaaaactatatgtagatcaatttggaatggagggagtatatgatatataaatgaaatctttttttttttgctatagcatggttcagacatcaattactgatgcattatttggaattgctgcccgtaccatgatatccacaaaaacttcttagtacttctattcagaagtgtgaataatacaaagctttgcactaatttatttctctaacatataataagtcactgaagttgttgtgcagtg

SEQ ID NO: 2365 - DNA, 2000 bp, Oryza sativa
tgttgagagcttgagctttcaagccgttgggagcccataacccatgaaagacaagaaaattaatataagaatcaggtggtatatgctactgcctttgcatgtatattagcatacaaatttgttttagacagcagtattggaaaaatatagtgtgattatgtagtttgcccccaacaaaaaagtgggacaatgatgatacagcatgaaaattttgcaccctcccccacacccaaaacattatggtgctttttcatgctcttccagagtgcactatgaaaaggatgtttgtaaaattcataaaaatatgaacttgtgtatcatgttcacacctaacttcaaaaacaaaagcacaacataaaaagaaatatttgatatgcgatactatttttgtaacatcatgatttaaaatcaatatatgaagatcttcccaggttgtcttaatcaaagaaggcagtaattggattctcagatgaaatgtgatattcaagggcaccatagttgatctgcgacaatggaatttcctaaagttggaaaggcaggaaacataataagattcaatcatgcagctcaattaagataataatccaatttcgtttcgaatctgaaccataggatctcaccagagccagacccaccctaatcaagagaacaatcaccaggcaggaatgactgtcttcttaagctttgtattgatttcagcagctgcagaaattaattccagaaagacctagattattctaggctgataaaaatgatctagtaagacaatcatggatctgttcagagctcaagaaaaatttgctattaaatatctaccttttcaaactgcccctatatggtggagccatggtcaaagaaaaataatatggattcaaggatatatctctaattgtgtcttctccatttgtttatgatcctcgagaaaatggtaggaggaaggcagacaaggtgatgagatggctgttttcttctcatgttgcgtgcatggatgtctttcagaggtaagaacaaggaacccacacttggtttagcacgtgggaaatatctgatgaaggtgatcgggtcgatgaaggtgatcgggtccacatcataggttcaaaacttggtgtggttgagcatccaatattccctacttcagcgctgttgttcaattggatgtcctgcaaatggcggctggtagtaagcagggcagatgtagttccacagaacaacctgcatgcaagtatgcaacatatatgccaggttattatattagctagtagtatataataagtttcttggttactactcgtctacttgttgaagttcttgccttgatcatggatacttcacatttccttctaacctctgctttgtcatttcatacctgatttcagtgtgggaacacagaataaacacattagtccaagcaaataagttttcaagccaaataatacaaaattacagctcaatcatgtggttaccttccataccatctttctgcctaagttaaaagtgtctaaccaggaatcaatacgaagacacaagtgttatgatagccctcttatcacccaaagcacccttcttaaaaaactatatctggcagaaccaagcacaacattacacatataaaacaactacgagcacaagacaaaggtagggaaaaaggattaggtgaagtttctgtcacatcacatgatagtcatactgtttgccccaatagacagcattcctaagtcagcataatcaaaggctcatatacatttaagtatggacacagccaacaagaatccttacccaggaccaaggacatgcaattgcatgcaccagaaacgagggcagattagtcttttctcatccaaaaaaaatgtatcgtggttctgttccttaatatggttcaaaacaccactatatataacccatgttctggtgaccagtgacctgagaaaaagctcagggaccaagtagaggcaactcatctgccctctcctactaggattgtcgtcctacttcttatccat

SEQ ID NO: 2366 - DNA, 2000 bp, Oryza sativa
  N_region (604)..(604): n = any nucleotide
  N_region (744)..(744): n = any nucleotide
  N_region (927)..(927): n = any nucleotide
  N_region (947)..(947): n = any nucleotide
aaaactgttgcaagttttttaaggaaaaaactttcaaatctaactatagtataattgtaatataattttactataactataatgtaactcgtatataagtattaaaataatatatgtaactttatatctaaattatatagagatgataacgtagttacaatgcaattacacaatgcagttatagtagggtgcaactggagtataactaacatgtaactcaattaattttttaaaaacatgcaacagatctaagtggctagcacgcacggcttgtgggatggatatcctaggttcaagcccttgcaaggacacaccttaattctcgcgcagatttttttttccaaatctcgcacgaatcatggcgtggatcgcacggccagaaaatcaaaagttttcagcctccaaaactgtcgacggctagctagcaaaaccgtaaaactaaacttactgtaaaggagaaacacggaatctcgcggaacttgatcacatagggaaccctagctctctactatataattagccaagccatcatggagagagatcaaaatctctgccaaatttatttcttccttcccaaatgaggggtgcagtccaccccccctcnaccccatgtggtacaatgtgcagtggcagtcccccatcaaggcaagcaagcaaccatagtgatcaatatgctagctgcacatatacctctctctctctctctctctctctctctctctcttagctagctagcaacaaacnagggagctagggttttcttggctctgttgccataagcagcaagtgtaccctgtccctggagagctcctcatggccatggccaacctaacaaacctagctgccaagatcggcaaggaggaggaaaccgggtgggcccacactgtcagagggtggttacaagtccacacacatgttgctttccanggtgccttgtgaggggcatncagagagttgctataggctacatacaccttcctcgcaattgcatgtagtgttcatgattttataccatgcccatgtatatatagctgcactgtgctctgatgagtaatactgttgcattatattgcatgagctacatacactgatatctctgaacttttgtgtgcgtgatatatgcactgttgcagtgtgtgttttgtgtcacaagctaggctcgtgtatttgtgcagagatcgaccagagagtatatgctagtgcatcatcattgcatgctgcaagtacacacatggatatgcacactgatctgatcatcatcatcatgaagtcatgcttatgtctgcatccgtttcttgctttgactcactatctgatcctaattacacactgatgcaggggtaaatgtaaaactagactagctagcatattagttacagttaaaaatgtagtttgttgctttctggatatttactactccctccatctacttttgatttgatttggagtagtacactgatttgatttgcaggagtagtagtgtgagagtgtgtgacagagagaaagcattgtgtgttgcacattactacaagctctctctcctatatatgtctctccttctgcacctcctgccttagcctttgaagcaagcttagcacttcacaaggtatgtacatagcacattactactcctgccctatctatctaccctgttcatgagtaattcaagaaaaaaaaaaggacaccttttctagctagttcttcatcctttcgcagcaaagagtttttacatctctagctactagttgttcctcttctctacatgaaattttttctacttctgattgcaccctttacatagctgtggggggaaatccaatttgagcacccatgccttatgttgattttaacaaaattcgtccatgtatcgatatgttcataacttggccatttctgttcttcttcttcttcttcttcttcttcagtttcctcttgtgcagaagaaggagaaacaaaagaacacagaaattaaattaaactcgatcaggaaggtatagcag

SEQ ID NO: 2367 - DNA, 1461 bp, Oryza sativa
  N_region (23)..(23): n = any nucleotide
gtacaataaataaatatattttnatttttattactttataagataaatctatatatgttgttctagtgcctttaaactaatattttaaaagttactgaaaggcaaagttataaaaaatttgatttcaaccttatccaaaacattaagaataataaaaccaataagagtaattacaaacttacactatttaatttctctacctactttctattctcaaccaatcataacctttgtcacatttaatttgcctacgttcatcatcaaccgtatgcaccattcatacattttgctggtctgtagctactattgatctatgcgtttctataaatgaaagatcattttttataataatatctaaatcagttcgaaccattgcatagtagtcatacctgaccagccgtgttctccggcaccgtagtcgtatgaacgtacagaatgatgagccctattggacaaagagaagcaggatagtctcatccagaaaaaaaattggtggagaccgggtgtaaaccggttcccgtgcagccccgacccccgatgattgccgcgtggacaaccgtagaatcgaacgtctcactatgtatggctccaggcgcagcgcaaacaggacggaggagccgactcgctcgatggctccgggcccatcggctcaccgcctcaccggctcacatcgcatcatcgacatctcttctcagcagcagccactgccgccgacgcagcctatctcatccgtcgtctgcatggcggggcggcgatagcgagtggccgcgcccccacaacccatccctctcgtcgaccgcaacgttaacgacgagttcgccctgtttgccggcggctagcgcagagatgtactccatcttcccgtgggcagtagctgctatctcttgatcgagctcacgggcttctttcttaccatggtgcaggattgatttgattagttagtttgatctgggcttctgcattcaaactttaatatagttgttaattgctacatttcaatgtatgtagtctgaacgtttgcagattctaattagatttgataaagtactaatattcattttggtcctttaccatttagatttgatacatactgaagattttggagatttaagcatttcatttcttcatggtcacttggtcagtgcatatatttcagtaaaagagtgtcaagttcagttgaacaaattaacatgtatatcatacggttttccggccatagtaaatggcagatcgacttttgttttttttctggggagatcgacttttgtttaacaacagtgctttactaacattatctactacctttctgtctctgaacaaatttgctccaaattcacgctacatttcttgggcttcatctatatgaattgagaatctgcatctatatccgaaattttgacaatctaacccttttagaaaacttatttgaagagtaaaccatgccaaaaacttattttaaaa

SEQ ID NO: 2368 - DNA, 210 bp, Oryza sativa
  N_region (110)..(110): n = any nucleotide
  N_region (117)..(117): n = any nucleotide
  N_region (122)..(122): n = any nucleotide
  N_region (137)..(137): n = any nucleotide
  N_region (148)..(148): n = any nucleotide
gaattggccagggcccccggaaacccaggggggcggggttcattgaggttaattcgaattcgaggaattcggggtggccctggggttcgaaggctaaggcgaacaggcgncgccgcnggggncggagtccgaacaanggaaaaacggnagattccggcccccggggcccttccgggccgagccgccgccatcaagcccatcagtcccgcc

SEQ ID NO: 2369 - DNA, 2000 bp, Oryza sativa
  N_region (1541)..(1541): n = any nucleotide
gtgccctgggcgagcgccccctgctgggcaaggagcggaaggagcgccacgagggtggaggcgttgggcctgagccgatgcatctgcatctgcatgctgaggaggtgagcaaccgcgtggtggtacatgccatggtgcgcgtagccggcaagcatggcgttccaggcgacgagatccctggcgggcatggtggcgaagatgtgggcggcgtcgggtaggcaagcgcacttgacgtacatgtcgaggagggccgttggagacgaaaaggtcggcctggaggcccgcgtggatggcgtggcggtggatggcgcggccgcagtggtggtcggccagcgcagagcaggccttgagggcgaaggggaaggtgtagttgttaggggcgacgcggtggcggagcatacggcggtataggtggaggccatccgcagcggcggtcggtgaggaggaggagtaggctcggatgaggtcgttgtaggtgcgaacgtccgggctggggatttgatcgaacaggtggtgagcgcgggagaggtggccgctggcgatgtggtcctgtagctggaggaggagcgacgccgacgccgacgccgacgctcgaggaggttgcagtggaggtggatggaggcaggcggtggtggaggagaggcgacgagcagcatggtggcgccaatggaagtggaacgagggcggcatttgtggtggcggcgcagaagcagaagcagcagcagcaagagaacggtgacgcatcgcgcccgctactcctcgctgccggcgggacctaccctacataacgccgaccaaacgccgccgcgaggaaagattggtttggcggcggggcgatctggcgccggatgaggtcgggcggcgctggtgcgcatttgcacgagcagctggtgtacgtgcgctgccgggccggagtggagtggaggaggaggggagctgggttgctgggccgcgagaagaggatggcccggcctagcgaagacgatggcctgctgggccagtgtgttttcagccgggaataagtccatctccaactataagatttgtttcttggtctacatcgtctatgtgacaataaaagaagggaaaaccaactcaatagacatatatcagtcgacccctctctctttatctctgtagcgttggatgacaaaagcgggcacctccttatttttacatacgggtcttctcttagcagttagaaaaattaaagatgtttctatatatagcgtatatattggccattcatcaaagagattttgacaaataacttcccggtggtgaattcgatcggcaattaagctggtataaattaaagaatgaaagaaaattatatattacctctggtactgtttgtaatttaggcatgcatggtcgatgtgcatgcatgccgttttcccctgctggttaaattagcttttctcacaaacgggcgtggcacatcgatcgtccgtccgtgttcttgtaatctagctcgccacctcgacgtagctatctctatctccctttgaagcgcatgcatccaatagtacgtacttttncctttttcagtatccctgtggcgtcgcacctgcgtacgatcgacgtgtagtcgttatctgtctcgctagctaggaccaatataatctcaatttgcaattaacccaaaacgatcgagcgaccaagaaagaatcaacgaatactacgtgatcgatcgagtaagcgtagtgtacgttttggtaggaacaagacagcatcgatcgatcggtgcatgcatgcgtgcgtgcgatatacgagttagctagctagctaggcgacatggccgcacctacgcatcgtccagacgcccatacacgtatgcatacgtgcgtcatactttaattacttgctaatggacttattacttttgcttgctttaattttgcccggacgttgcaggcagtaggtaatgaagtgcgatatatagcgcgcttgcattgtcgacgagcgaggggagctagctagggaattgaagtgaaggt

SEQ ID NO: 2370 - DNA, 2000 bp, Oryza sativa
atattttttcacaaacatgtgagttaaaattcttctgatacaatttgaaacaaaaataataaatttgaccgtgaattacacgtttttatagtcaaatttgttatttttgtttctacttatataagttgaatttgaatttgcatgtttgtgaagtgacatatcacatattgatctatcctactaaattttttcaaattttttatgattttttaagtgacatgcaaaataaggggatatttccttaaaggatgaattgggtttcccgttatctgtaaatccaattttctttcctacgtagttccgaggacaataatagagccatcgatattactccctccgtttcaatgtaagtcattctaccattttctacatttatatggatgataatgaatctagatatatatctatctaaattcattaagatcgatatgaatgtgaaaaatactagaatgacttatattatgaaataggggaagtattagagagtcatacacaaattatgtggcggcaatctgtgtatgactatgactacagcttaatcctatatacatatacaagtcatccccactaagtgcaattaaaactaatttcctgttttgagagtaagccacgtcaccttgattcattccagccatcggattgctcataaacgtttggatagcaatcaatcaatcaactggagatagcaatcaaaataaacatttagcaatgactaattaaagaggcccacctagccatctcttaattttgaaacatacagttggaataccaacagcaacgcatgtagtaccccagcagttataagctctttaatcttccattgaagttattttatctcctgtaaccggtgaatcagatgaacagttatgcctttatatactctctcattcactaggactttgttcctgatcgatcatctgcgcttgacagtctttccatgcatccagttgatttatttgcccactcctctgctcatgctgatgcttcaacagatcaacatgcacaatccgctttggtcatctctctcttgcttgcttgctcatggatttatttttctttttcttactaatatcacttcttgtttagttgtagaatctgaagagaagaaaagaagtagcagtttcaaatatttcttattttctgttctttgtgaaggttgcagatcttatagagagaattgaagggttggtgcattactatattcacataccggttgaaataaataagaacattttttttgtttcagttggttaaaataaataagaatacttttttgtttcagtaggttattgacatcttcgactgaacttttgaaagtttctacttcattaaaactatagtttggaataagcaattacatagcatctttgtgtaatcaccatgacgtatattgtctaccatttttctttcttgcaacatagcatagaacaatctatgttagtaccattctatttattgcatctgtgttcaattggccttggttccagtaaaaggaattgaccattcactaaacaatcagcgtattctgttatgattcaaatttcagttgcttattattataacattgttggtgaagtgttcagtgtatatcaatacgatcattcatacctaatttttcatctttacattactcttatattcccacatcaatgcgcggggtgtcatctagttagagttcgtttagtgctcatatatgcgtggtggacgaaaccgagatctcgagtcagtctcagtcgtcgtggtcataatcaatcatgcgtattcaggagaaaataaaaaagaaaaaaaaggaccagctgatggactgccgctaccctctctttagtcccggttgataacaccaaccgggactaaagatctttagtcctggattggtagtcccggttttatctcggtttgaaaaccaggactacagagggttatgaaccgggactaaaaagcacttctccaccagttataagtgccgtgctacttacgtgtcagggtctcagggacgacta

SEQ ID NO: 2371 - DNA, 2000 bp, Oryza sativa
  N_region (1214)..(1214): n = any nucleotide
  N_region (1365)..(1365): n = any nucleotide
gagctaggtaagttgctattgaatttatcacacctcattttgatttcttagaaaaatattaaatgtgaaatttttagtacatgaaaattatagagctcagagtccgattgttagcataggagttgccacgaaaattttttcctaccctatcccttgaaacaacaacttagaggctgtgttcaataaatgtgtggtttccaatcatctatgcatgtaaaagggagcgatttattaacacataattaattaagtattagaaaaaacacttaaaattggaatagtattattgttcaaaacaacttttgtatagaacttgtttgcaaaatgcatacaatttagtttgagaaatgtacatgtagaatccgagagagtagaaattgagaaaacgtagaatcaaactcaaccttaagagtggccaaggctatggaacgaggtaaaccattagcgtacgattaatcgagtattaattattttaaatttaaacagttaatttatatgatttttaaagcaatttttcctatagaatttttttagaaaacacaccatttaccggtttagaaagcatgcgcgagaaaaatgatatacttttcctcctcttctgcttggagcgaacatcagcaaggcgttgaccgacatcactcgatattactttctccatcccaaaatgctagtatttggtggacacgtgtattaagaaagtaaaatggttgtagaaatattatgactgactgagaaaagaaagtagatgaaaaaaaaaatgaagaatggttatgattggttgataagaggtgatatatgtagaaatttagataagtcactatgctgaaaatatctatattttgggacgggggtgtactactaaaccgattatcctagaagaaattaaaaatagagtaaagtccatcaccggtccctaaacttgtactgttgtgtcatcgcggtccctaaactcgcaaattgaccgttcaggtcctcaaacttgttcaattgtgtcatcccggtccctaaacttacagatcactcgtttaggtcctccaacttgttcagttgtgtcaccccggtctctaaacttggatttgaatatcatctgggtcaaatagaacggtctaaagactttatatttaaaaataattcataattttttcatgtgaactctaatgaagacaaattttatatcaaacttgtagctctcgacgcgatctacaactttgtanctaaattttttttattttaagtcattttttgtcccaaaatgtaattttaaaattaaaatttcaaaatctataaacatgcaacaatattttaggaccctaaacagttttaattcaaaaacttatcaactacaaagttgtaggtcgtgtcganggctaccattttgatataaaatttgtcttcattagagttcacatgaaaaatttatgaattactttttaatataaagtttttaaaccgtcctgtttagggaccggggtgatacaactgaacaagttggaggacctaaacgagtgatctgcaagtttggggaccgggatgacacagtcgaacaagtttaaggatctgaacggtcgatttgcgagtttagggaccgggatgacacagcaatataagtttagggagcggtgatgaactttactcttaaaaatatgtcgtaggtgtagtgaaataataagaaaaagcacacgaaaacactcccggccaattgcagtgaggtcacgaagccatacattccaagctgggaaaagtcgagcaacttctggaagttcttcttcttccattgcatggaactggaaacgctgcccatacgcttcttttccttatcgcgttggccatatcatacacacgcctcactcacaaactccattataaataggcctccctcccccacgtatcgatcatgccctcagcaagatcaagtgcacgttcgatctcgacgtcgccacgcgaaatcccactggacggacagcgttcttgaatataatcttgatcgatgcggccgccgg

SEQ ID NO: 2372 - DNA, 522 bp, Oryza sativa
  N_region (16)..(16): n = any nucleotide
  N_region (21)..(21): n = any nucleotide
  N_region (24)..(25): n = any nucleotide
cccaaaggggcccccnggtanccnncccccccccccccatctctcaatctctctctcactcactcactgtcactgtttgatggaatgccgccttggtgagtggtggggattggcacttaccatcggtggagaggggtgagattcgcatcgcaccgggaatcaacaggaagtggcctcgccgccatctcatccatcgcggtcgcgccaggccccgccgacgaggtccgggccgcacggcgctcgccggaccacggcttggtgctgcccacgggcgcacccccccagccggcgcagatggagccgctcggcgctcgtcgtcgcacgcgtgctccacctcgccgtctccgccatcgccggcacccactcacacgctccctcgccgggagagatcggggagaagagaagaatagaaagggggattagggtttacctcagccgccggcgatttctccggcacgggggagatcctggccgtccaacagatcggacggtcgacctcgctcccgcgttggcccgctgtgc

SEQ ID NO: 2373 - DNA, 2000 bp, Oryza sativa
  N_region (361)..(361): n = any nucleotide
  N_region (383)..(383): n = any nucleotide
ggcgactatctaagcgcccggcgatagcacgcgttgcacgacaaaaaatacattttgtggcccccgcaactaccctcatcggatctcatgtctcatacttgtgttcccaccaatgttctgcaggccaaacggttcctcccgcttcggattgcgccgatgtgcttggttgcctggccggaatgttggccagcgtcacgtcactacaccggcaatgattcaccccaggagagttcgagagctccaccagctgatttcgagctcgcgctgatcgacctcatgcatgcgaacgacgcccttgccgctggatcgatcttctctcggcacgaatcaagcttctcaaacctcaaaatcgagttcttgntgctggggtcgacgccctcccntccgaactgaagcgaatcgatgtatggatggagctccttaatctgtgactcgacataacccaccgctcggtttgctctggtatgaatcagccattgcctagctgcaaaacccatctttcttctttgctattctcttgttttttttcttttctctcatttttgcttccgtgtgaatggagatggataaaaggataaaccaccagtcattttcttttagttgctgtttctggtgttgatttcaatctaaagctgtgcgggagatgagctaggaaagcaaaaaccaaactctttctttttcttcatcggtagactactcacgctcatatgacagcacaaatggctacaaagatggagtacattcttgatcgtactgtgtatccaaaattaattgtttaatagcttttatgtagttagcacaatagccaatctattgtattagttagctttactctagctataaaatgatgtggcatttggtactgccgggagtgggcaggatctcccaaaatttggtgcttgatttgctaatgtacgtggcaggatctcctgtgcggcgaaatatcttgcgtttgtttaatgtcttgcggttatcattaatcctttatttagagagacattccttcatcaaccgtgcaagcaacctaggtttttcagttttaatttaatagtggcgtccaaagaacaaacacacccgctgtccaagctgctaatctactgaacgttaaatttaatagtagtactatttggcaagtccatttcaaaggatgacaacactaaacgcggcgaaaatacagattatccaactaaaccttattggggtgttctttgaggaatactccctccttccctaaatgtttaacaccgttgacttttttaaacatatttgaccgttcgttttattcaaaaacttttgtgatatgtgtaaaactatatgtatacataaaagtatatttaacaataaatcaaatgatagaaaaagaattaacaattacttaaattttttaaataagacgaacggtcaaacattttaaaaaaagttaacggcgtcaaacattgtagggtggaggtagtacatttctcttaagaactcgttttctattcttcttcttggttcgttgaaccacaaagatcagtgtatccaacaaccgattctgcactgttctctgaacatgcgagaggctctcatacagtatggaccgatgccgatatgccatcatcaggtgtgctgtgcgtgagcagttgccggctagtttctgtgctgattgttggtgacatcacatcataatagaagtaaagtaaatttctctctgcatcgcaggatacgtgtttgcaacgtgccattgctagggataaatcacactgtgatcgatcgagatggcacgaacaaacaacactctaccccccgacaccatgttactccatctggcggaacatgattaaacaatggctgtgcctgtatctactatatgtgcatcgaggagattaagatctccgtgatgaggtttgacaggctgaaaagctgcggcgtcccggctgtgacgaggccccagggaatttccctcgcccgctactttccaacacctgaatgacacgcagagccgccgcccacacggacgg

SEQ ID NO: 2374 - DNA, 2000 bp, Oryza sativa
tggtccatcgtccgtggcgccctcatcgtcgtccttgacccggcgagatttccgtgcaggtttaaggtatttcagtttaagattattgtaatctagattattaaatcagattactctaagctagattataataatctgatataaaataagttgtgagttgtttatttcttgggattattggagacatttaagggtagagagtatttagccacttaataatctggaaaaaaactcctctaaaaaagattattggattatactaatctggcttatagattataataatctagcataataatctacttgtttgtttcagcttactcctaataatctagattataataatcctataagctgaatcaaacagggcctaagtttaggtgctggtttagtttctaactttttcttcaaacttttaacttttccatcacatcaaaactttcctacacacataaacttttaactttttttaaaaaaaactttcaatccaattttgacgtggaactaaacacaacctaggttaggtggagtcgtggagatcactagctgtaggcctgtagcaagtctgccgacttcacaccctgctgcagcgttgggaagacatacgcgaatattagagaaggacctaatataaataattagaaggggtgaaactttaaatccagattgtctagcccatcaccatgagaatctagctaaaataccctgggtatttctccggcgttgggaagacggataaggctgtgttcgggagtgagggttgggaaccttactccctagcacacaaaacaaagcagtgtttagtgcatgattaatcaagtattaaccaaaataaatttgaaaaatatttttttaaagttactttcatatagaaaatttttgtaaaaacacactatttatcagtttgaaaagcgtgtgtgtgaaaaacgagggagatgagttgggaaagtgaagataagaactaaggatatgtttagttcatttcaaacttccaaaaattccgtcacatcaaatgtttggacacatacatagcaattaaatgtggacgaaaaaaatcaatcgcacagtttgcatgtaaattgtgagacgaatcttttgaggctaattacgccatgatttgataatatggtgatacaataaacatttgttagtgatggattaattaggcgtaatagattcgtctcgtagtttacatgcgaaatctgtaatttattttgttattagtctacatttaataattcaaagaaaggtgtgtccgtatactctaatttttttttgtgaaaagtaactaaacacgtccagcctaaatccacccagaaaccagagccaaaattgccctgtttggctgttcacacggattgatcattgatggatccatgctgatgaatagtgaggatgttgacgggcgcaactactactacgtactggcgtagtagtgcactggagcagaacagaagcatatactgtatattcctatatccctagttgcattttgtcgatcccaattcccaactgctcactgattacagccttgattacgaccccgggcccaattaatcaacccatgcttaataaattcatcaccaaacaaaaaaaatcaaaccatgcacactgcgatcagtcacgtactaagtggctcgcgtcgattcccttgcaacgctgcaacagggcggcgtgccggcgagaggaaacgtgtgttccgttcgccgcgtccggagcccgcggcgcgatggcggccgcggcatccacacgtacacctccccaccgccgcttctctttcgcggacgcgtgtggagctcgcccgccgagcggtcgccgtcgccccagaatttctctcgcgatccgatccgatcagacgcggtagaatcccatcaggcaggcaagccgcgcgccccggtatatttagacgcgctcgacgccgcggcgcgcgcctcagtttgagctgagctgagctgcgagctctctctctctttctctcggcagctggttgccacgccttg

SEQ ID NO: 2375 - DNA, 151 bp, Oryza sativa
  N_region (5)..(5): n = any nucleotide
  N_region (24)..(24): n = any nucleotide
  N_region (62)..(62): n = any nucleotide
  N_region (105)..(105): n = any nucleotide
  N_region (107)..(107): n = any nucleotide
gattncaggaacgtccaaagtttncggcgatttacccgtaggttttgctcaacattaagcgntcgtttaccttagtacgcctgcgaaacgcagcaggttttttangnatcatcgttatttgaacaaaatcgatctgctggatgacgacggc

SEQ ID NO: 2376 - DNA, 2000 bp, Oryza sativa
aaaaatctcaaatcgcttaattagtttctgcaaatttcaaccaaaccactcctgaaacgcagcagcaatgaaaatttcaaaaatgaaaaattgtgtaccttttcccagagcttggtgtgctccaagcagaagccggcgacgacgccgccgccgccgccgccggccttggcctcctggtactcgatgcagaggccggcgtcgaggccgcaggagacgtggaaccctaggccgcacctgggctgcgagcactcgagcgcgcagccgccgccgctctcgcagacgtagcacgccgtggcgaagcggtgcgcggggacgcgggagcagtcgacgccgtcgcggccgtcggggtcgcggaagaacacctccggcaccagcagcgcgcacgcgatgtgcgcccaccgcgcgtccgtcgtgcgcttcatcgcgccgcccctcgccgggcagaggcagcagcgtggcggcggcggcggcggcttgttgcccttgctcttcttggcggcggcggcggtgcagacggagcagaaccagtcgccgtcggggatgaacgaggcgagcgggttgccgtagcaggaggcgtgcaccatgaggtcgcacccgtcgcagaacacgatggggtccgacgggtcgccgtcggtgctcccgcacaccgcgcagtgcacgccgtcgtcctcctcttccacctcctcctccgccgccgccgccatggcctcttgcgttggctctcgcgccactctctctccatcccaggagtcttcttcccgtgctgcttcgttgagatcaatcgctttgcaagctttctcgagtgcttcgacttcagattgcttcgcactaatagcactgcaggattgattgcattcctgatctttcgattctctgcaagtgtttgatctttgtttcttcgacacttgctccttgatttcttcatgattgataggcttctccggaatcttgggcttctcttgaatcttggatgcttcagctcttgcataatcatcttccacaccatttgccacgctcgaattggtggtggcgccacgtttattggatccttgaggcttggcttctttaacagcggcgacgcgagctccatccgactccttggatggaggcggcgatggcgggagaaacggcggcatcacgcgcttattgctcggtaggcaaaccgagaccggagcggcggtgtccttcggggacggcggcgcgcgggcgctcttcttggccgggatgctcggagaaacggcggcgtctctcggcggcggcagggtgttgacgagatccttgaacgggacgcggggagaagcgtcagtagccgccgccgccgccgtcgcgctgacgcgcttcttagcagggaccgggatgctcggagaaaccgccgccttctccggcgccggcgccggcggcggttgcggcgcgtgaacacgcttcctgaccgggaccgggatgctcggagaaatagcagccttatccgccgccgccggtggcagagtgtcgacgcgcttcgtagtcgggactgagggagaagcaccactatccggcggcggcggcggcggcgcgtggatgcgcttcttggccggaagacacgccggcgcgacggcatcatccaccggtggcgcataggcgcgcttcttagccgggaggcacagagcgaaaccgcccccctccaccgccgccgccgccgcataagcccgcttcttcgccgggaggcaaacggggacggccgccgccgccgccgccgccgcctccagcatcggcgggcacaaccgcttcctcgccggcaggcacggcgccatcccgagactggagccgccgacgtacttgaaccgcttggaaggcggcagatcacgcacgctcccgctgccgacggcgaactccatggacggaatcgagaccggagattttgctacacggggaagaagaagaggaggttcgcggcgggtgatttgggatcgaaacgaaccgggggtttaaatgactgaaaatttcgcggtcgaatcagcgag

SEQ ID NO: 2377 - DNA, 2000 bp, Oryza sativa
  N_region (283)..(283): n = any nucleotide
  N_region (290)..(290): n = any nucleotide
  N_region (293)..(293): n = any nucleotide
caccatcagcggcccacctctattgtcccgcaacatatataaccagataatgatacttacgaatctaagcaccgtgcttacattaataaatactactctacacctctgcagatgatatagagcaaccgataaatcagacactaaacccacaccgttgcacctatctggtaggctacccacacaattataccaatacaaatgtaaagaacgagtagtactcatactaagtaaagtaccgagaatatataaagaagagtatttcattaattcggagagtattacnaaagagnatngataaactaccagagccataccgaaattcctccgaaagctctgaggactccaagaactattctatactacttccacttagcactaaactactaaataaagtatgaagaggaatcttgagattgcttgagtgcgttgagagagtgaatgagctcctccttttataggacagttatgggggttgtagccatgcgagatgtccattttacccctgcaaccgtcattaagagagcatctggagcgtacacatggagggccaagctggttgggtgctgccagggttcgaccgaatcagggcccaacaggcctccagcttcggtctgctcactgacaggtgggtcctttaggcggttgtggcagttaaagcagtttccaggactgttacacttgacttgtgggccctcttatccttaaacttgcttaggagtgaggtttcttcactttctctttattttatttgctaaattcctgcaacacattattctccaagtataactggaactatattattctgaaataaatatgcattgcaagcatagctaattctctattattttagttatattgacggtcaaaatttatctgtaatgaccgtcaacacctacctagagtgttcgattccactgaccaagaatgatgattgcctctagcttcaatcaacccgagtgtgggcctcacatctccctattgagagcagctcaccagaaagcccgaatcacccgtctgaagtgttcaacccaccgattcgatcgtcaatcacttctaccgctgtcaacccaagaaccacatctggtcatcttcatgttgaaagtagccatcaaatagttcagaccgccgcctgaagtgtttgacccaccgattaaattttattgatcgctgccgtgctccaccttacgcacatgtccctccctggacataaaccgcaagcggcatgtgtggggcaccccatcgcctctatccatggacctcccatagactctgattccacttggtacaaaaccagcccataaattaacatcggaaaccaaacacagaagaaaacattataggagattcaaagtttcaaacacaatgatgacactaaggagcaattgttaacgaggtttagccgaagagctgcaccaactcatatcccacactggcatcgcaccctacacggctgctcctcgctggtcacatcatgcatggtgtgacgtgtgtgccgcctccatacctcatgcaccacatcttcacttggctgcttgtgggtttagagttacgtttggactgctcttggcccacatcatgtggcagatccaggaatttgtttttgttggtgtcatagcatgtctacgagtgtcaaattatgccacatgtatatcatgcgaatctgttcacgccattgaaaggcccttgtcttaggccctatttgtttcagcttaagattattataatctagattatagaacagattactataagctggattataataagtcgacatagaataagctgctagctgtttgtttctctgaattattatatgtttgttagttgttagtcacccaataatctaaaataagcacatttagagtagcttaccagattatagtaatttggcttatagattataataatctatcataataagctatatgtttgtttcagcttactcctaataatccagattataataatcttaagctgaatcaaacagggccttagacata

SEQ ID NO: 2378 - DNA, 2000 bp, Oryza sativa
  N_region (71)..(71): n = any nucleotide
gtgggctcaccgccggcgagggcggccgcagaggaggaggggagcggcggcggcggccaacccgggcggtntgggtagcatgtgtgaccttgtggcccgaacgggtcggcatcagcagcggtacgaggatggccggcggctggtggccgggtgggtacagcttcctccctctccatcgaattattgttgcttttttttaatttttttttctccttgatttgatttggggtggattggattgcggcgatggctacgcgcgcgtgcggttcattgcgcctcttgacctaacctaatgcgcgtgtacgaggcgatggcattggtcggattgggttctatgaattggatcggtggggatgccatccctgggtgtggaatgtttctcgcggcgatttgcatatgctttaattttttttctctctctgggaaacaagcactatcaccaactagtaagatagcttgatgtgtgtgagcacttagctaagaatcttagttgcaacacctgatgatagcgacatcattattctgcggcccattccgcggtatatccatgagaatgatttttagcagcatgtgttaagcctattaggaatggggttatcctccaatgtcaagattgatggatgtgagtttagtttgatagatacatttctcagtgtatgtcgatgtcgctgcatattgctggttacgaaaaggtcatgaatcattattggtagtcaaagcgtttgttcctgataggtgaccaatttctgtttttaggcttactcttagttaagttcttctgtttttctaagctagggaagcatttctgtgcattatggcatggcaagctaacgagtttgtggtgctattatctgttgcacttctcttaggctggtggatcagtactcaggatgagatttttgtaaatattaaggaattatagtagctaacctgaaaatgttaatcaggagatgacagatggggcagctaatcagatctaaacaaaggaaatataactatagagtgggggaatgaaagctaaccatattttcatcgataatatgtcttgatattttagttattgaccttccctagatctttccttttcatagtacaaaaaaattctgcttatgcttgttgagatgcaggttgggaggtgcacctacagcatttattggcaggaactagctcaagtagcaccttttacatgtatatacattattgtgttgtaggttagtgttgcaatatttgttgccttaatatatatatgcacactctaaggactactggtttcggctctttctgtgacagacctagttcttctctggatacgattttaccatgttggagaactatatcaattcacatgtattcagtatttttcttttacatcttgttagcttgtttatgttggacaaaaaacctttgtgaatcatgtggccgtgcgtagaagttactaataacatattctgtttctatgtagtggcttatttacacattctctgattaagttcattatctctacagatgcataccgttcaggtatagaactagtaatgatgaaacttctgatgatgaaccgaagaaaattgttgaagttctcatgataaactctcaaagtggtccaggtctcctgtttccaaaggtaatgttcccatctgaattagaatcaagaaatacatgatgatgaaaaaaatgtttataaattgtgtacgcataagtttgccaaactctttatgggcggttagtttacatgaaattgcaagaaaaaaaatcaaatataaattttgatgatttatgatctaaatttggattggcctttacttgatatgaattgctataaatttacaaaaattgcctgttttgacatgctacactgaagcgctactgcactatataccctatactatgagcaacatattgatatttcagttagcccataggtggaaaagtgtcgctcttggcatttatcatgttctttctgcctctcagatgaatccatatgaagtttgaatgaaatg

SEQ ID NO: 2379 - DNA, 2000 bp, Oryza sativa
  N_region (221)..(222): n = any nucleotide
ttggtgctccctgatttttactgctttccttctcttgttacaaactcttttgtgggtttatgtgttttggctgtgtacatcctagttatgcagaggccgggagttttcttagtatggttctatcaacttgatgtaatcgtctgagattaataaaagcttcctttataaaaaaaaaacaaagtgaatgcaaccataatagagaaatgtacgaagattctccnntgagatagcatggcagtatgcaatttacaaaatgcaggttatatgagtgctaagaagtttcagcaacagtactgttcattgaacatttggagtaagcattgagagaaattcttctgttgagtaagggagtccataatcttctaaaacaacagctgctgcttcataaggtgtctttccaactaatttgtgagctttcttgctatcccactttttcccatttttgactagaaacggtttcagcacttgacttacaacacaatctgtcaaatgattaaaacaagataagaaaatatgactttgagataactgaacgaagcaaaggttaatgataaacgcaagcaaattttgcaacattttaatcacctgtgtttaagagggtaccatctaaatccagaatgacatgggaaataagccgagcaatgggctcgggagttgccatttgcaaaaattggaagagcctagtgcagcaatagacaggctatttgggaagcccaacctgacaaaaagccaaaatattcaggccaacatgacattggtaataagatgtaaccatagaagaaaattgatgttaagtagtagctcatatagtagccatataagttaagtagctgctttaacataaaaggtgagtccagtaatgcgtttaagaacggatatcatattttcaattaattataggtttaaacagatcttacactatgttcttataactaaattagtaagaaatcagaattaaaaaaaaagggtttcaagctttgatggaaaatgagtaatgttcgtaggcaattagtatacatacatattaagctatgtttagggtcatcatcaaacaattggaacaattaaacacttcgaaatttccatacacgtgggcttgctatattttgtagtaataaacttggaacttgtttcaagctgagattttgttcaaaattgctgctctgttagtccccaactgatcacacaagttcactcagtttactcatcaagctaacgaactaaacaatggtgccatgccatcaacactaaaccgaactctacgaggtggcaaaacactgacatgacacactaacgaataaccatccaacccatgtgacgaaggtgagctcaaaaccaggaaccttcaccaacccagcagcaacagtctactgcaagacagctcgaaatttggttgcatctccaactcgcctgctttggggcgtccggctcaaccccaccacgcttgggcaattcaccgaacagctaccgcgcagaggtgaggtgactctataccgtctcagcaacagccaacaaggggcgatcccacaatctaatccaatcccacacccacctccctcgttcccgtagctattgaacatgcaccgccaacgcacgcgaacctcgctaatggaaaggaatcaacggcgatgtatacgcacgccgggcgcgctcggcggaggagaggaccggaacgaacgtagcggccacagtggaggaggcttaggagggctacagctttcccacacgtgaggcagcggccggtgccctgcccagcagctacctctccagctggcttggcggagggagggggataagagcatctccaaccgtctctttaaatctaactctccaaatgtctatttagctaactctccatttaattagcaagtcaaatttattatttactccaacagtctctctatctgttctctctattgtgagtgtatgatagtggaatccacatgtcagcatcacctctttcttcctcattttgtctctctttttcccggaaggactac

SEQ ID NO: 2380 - DNA, 2000 bp, Oryza sativa
ggcctagatcgatttaaattagataggggactgacatgtggggctagggggtatttctgacctctcacaccgtatctctctgattcaaccgaaaatgtatattttataagtgtggtgtccaacaacaaatattcacatttcgagagtgtatttcccaaaagattgacttttgtcgtgtcctgaagttaaaactgtaaagtcatagtgacctgtagcaaaatttatcaaaaaaataagttactatagatgtttgattgcataacatggtttgatatataacttgatcaacaaggcactgtagacgttttaaaaaaataacatgattaaaaaaagttatgcttcaaacatctaatagtcattactttttaaaaaaaaaagtagtggggatgatacacagtgaatctactaccatcccaccaccaactccctctgttaaacatccaaaaataaggatgtgtttggttcgtgggatgggtcgggttaggatgcgttggtcctatttttaaggttggagggatgtatggagtgggatgaacccagatgggaatatacctcttagatccaaatccaattagtctgccaaaatcggctgaaccaatcgaacccacttcgacggagcgaattgcgttagcatctcagcgaggatccgctactcctgccgccaccatgggccgcccgtccctcctccgccgcctggccaccggttactgctgctccttcgcgcatgtagtccgctagcccactcaggccattcatctacctcaacgctagtcaatgccgctcgagacagtcgtccgcttgcctgtcagtctacactgcctccttccacctactcgctcgcccgctcgccgagtcaccagccgcgcctctctccacccgctcgtgaagctcctccttatgcctgctcgctcaccagcgcaccactcctccgtccacacacgccgccggtcactcccacactgctcctccttcagccgcccgctattcgccgcccctccttcctctgcgagttgtgagcccctcttctcgtcggccaccaccactcctccacttgcaggtcgccgccagtctccactgctatcctccacgagctgcaatcttcgggttctctctactcgctgggaataaacgtcgtgctaacgtggctccaaacgtaattcatcccatccctgcctcatcccttctaccaaacaaaaaactagaatcaccccgtcctacaaaccaaacaagcaagtagggataatttcatccctaaaatcagggattgtttcatcccatccccatatagtccccaaatcaaacatatgctaagagagcatagggctaaagggctcacctatgacctttacgttgattatattttttttcttctaatacatattttttaaaatttctaataacatatagtcattcaactagtgtctacaaaaatcctttccaaattgtttttcaagttatagagcatcaaagcaagccagcatagtaatttagcttatggagaatcaaggcaggacaacaaatttaggtggctatattctacacaatatcatcatgccaaataataaaaattcaaaaacacggcgaagcatatatgacttccactgaaatgaatagctccatcatatttactataagaaatagataaaagtatgatatccaaaaacaagatatgccatatcaaataaaatatgcccacattaatgttttctagagtgtccaagatgtgtgcattaaatatttgtctcttccaagaatccaaaatgaaggtatatgtgcatatccattttggatgtagagtagcaattaaatgagtaatgcaacacccctaggtgccacacatttatcaaacatgacagtcttccacactacaaatagccatccaacctttcccttcctcctcacccaacccaacacatccaattcagttcatggaaaccaaaattgcatccactgtgttagtcttgctcctcctcacccttggtaagttcactcaccactca

SEQ ID NO: 2381 - DNA, 2000 bp, Oryza sativa
caaagtttgagccagatcttggtttggatcctattctggatcttgttcttgttggatctgagtggcaatttaagatccaaagtcgagcaagcatgtggcaagacaatcttgttgtaacctccacacgctctgtggaccaggatgttctttcacctagtgaggtaaggcactttcttcaatgaattgtagctaagctttactttaggtctgatagtttcttggtttattttcatctagttttcagaattttattactgtataataaggtgactgcctggtgaaccgtttactggttgattgccagcactctatccaagactgacataaagatattagacaattggttaatatgtgtgcttctcctatcatgcctaactctttgatattcttttgttcattgctgtttctaggctgcaaaggtttttgagtcacagcttgcggagtcactattggaaggtgatggacagctcgcgttcaagaaactcgcaactgcaacactcgaaactttgatgccaaggattgaaggcaagggtgaatttggtcaagcacggtggcgactggtttatgcaccgcagattccgagtttactatctgtagatccaacggttgacccacttaaatcgctggcaaacaatatatcttttgctactgaggtcgaagtgcaacttggaaaacgccttcaggtatttagcctttttacatttttgaaaaccgaagcattttaagcttactggcataatgttctgtatgaatatcatccgacctgaatcgctcacatcgttctgcaggcctctgttgtcaggcagatgaaagattcagaaatggcaatgcagtggtcactcatatatcagctaaccagcaggctccgtgttctcttccaatctacgccgtccaatcgacttctcttcgagtactctgcaacatcccagggttgattcatttttgcccactacacagagcaggagctgtggaatggcagctggtctgtacaaagatgtggcgcaccgacaccgatcaattgttcttgtagataatggaagttttgataggcaggcagttgtacatgtagacttgctgatgtttttgctctttgttgtatctacattctttttctcggaaacaaagtttctgggtttgtacataggtagcaaattttagctcctttagctagttaacgtaagatgtaaagaactacctgcataaattatatgaaaatttccaatctcgtggagtcgatggatgtgtggtgagagcattctcaaatggtaggtatagcatggcttcatttggtattgtagtaaattatgataatcttggtgcgactgttttttgatatttcagcatttcacaaactatttctcttctaatctgtttcccataaatgtaagtatcgctatgtttaatcgttgtaccaaaaattggttgtttcatgttagatcccgtttgtatcctagatattgggctgaactacgccatcagattctagcattttgggtgcgttcggctcactcctgagtcattatgcatgattgcaaactaaaggagtaagtgtatttgcctcactctcttgcttctgattgaatcgcctccctcaattgtaaaactaggtataacatctctccatcctcgaaaaccggtgcaaatcaactccttcagtggtttagggagtgatttctgctggaatggcaggccgatcatgattggcttgctaagtcaatgggtgagactcacatgtcaaccacttcctcgatcatcttcctcacctctcctcttctctctctaaatgtgtgcgagagagagagattgggttataaggcccaagaggttgggctacaaggcccaatttgttatagtaaaataggaaatataaggaacccgaatggttcgcctttttctgatagacgctttcctctcctcctcaatttatccccttttctcctaaacagcgccgccaccaagcaccattggcacatgtagatcccctagttcgttctttgctt

SEQ ID NO: 2382 - DNA, 2000 bp, Oryza sativa
  N_region (65)..(65): n = any nucleotide
  N_region (1239)..(1239): n = any nucleotide
  N_region (1241)..(1241): n = any nucleotide
cttttacctttttccttactaatttcctcaatctaaataatgcagctaattagagttactttttngtttcagtgtgtttttttctggtgtttctgttgaatcattcaatcaaaaagggactgcgccagatcttagtgctattctgtgaggcgcatttttcaatactgtacattcttcagcttgatttagtttccagtgctttggagcgtagtggttccctaacaatggaggtactctcacagttaggtgcgcactcttattttctgtaatcatgtattttctgtactgattcatcacctaagaatcaaagatcccatctatgcttatttggagagacaacatttttgcctgttacatatgatcaagggatgcagtttatattgcacaagatctatattgataattgtcatatgcagcattccctaccttaggcgccaagtgcattaggctagaaacagctggggttatagttaggtatgattgagttgttatctctagtttagtactccctccattccaaaatataagacacaaccaccttaacccgaagaccaagaaacaattattatcatctcctagtttagatcacctaataaatataatgcatgcgtccaatagaattagagatcttgagggtggagtatttaaaaaagtaataatttaatggaaaagaggtcctagttaattgcatgcatgcatgcatgctatatattatggaacatctaaaaaaaagtagttgtgcattatattatggaacggagggagtattatttagattctatgtcttgtggagcgctctatataagggctgccaatggattgaatgaatcaaacaagagttatccctagtctatcctttctctcatcctcctccctacatgcccctcctgtccatacttctgcttccatttcaccatggtaccttggctatcaaggcccagggccagaacccccagttacccacaattactccgtagagttggtatactgtgagcagcacaaacgggtgtcagtggataacatatgtgcagattgaatagaattcatttgaaaattagtacaagtaagctgtggcatgttatcttaaataacagatgcactcacttattgaactactgttgttatttaggtttatttcggtgtaataggcattgctagggcctgagtgatcctagttcatttagttgaactaaagcatggggctggctttcattcctaattaattctactatattgttngncctgtttattatttcctgttgtgggcgtacacattaactaagcacctatttgtgggtgttctactattttgtggttaaactaaagcacctatgcaccatccatgtttgtcataccatttgtaaagaaaattggttctctgatacatccgacaggtctttcaaataaatctacaacaaaggatttcatgaaaattggttcaattgtgtgcttttgtgctgtccatagtcatggttttaaaatgctttttgcactctccgcggttcttcggcatacaccttctactcctgttgggttcactatcttaaaggctggtctgaacaagtcagttctgctgtcagtgtataactcgcaaaattcgcgaaatggtcaagctgatcgaagtacacatggtatgtttccgccatcacacttttctttttttttaaataaaaaattggcaggatatttgtgtataaattctagaacatgaacaagtttaatccacctagatgtaattcacaaatatcattcttcagttgtttattgatattgtaattttattagattggatagatgatactgaattcacaaataacatgaactctaattatctctttaaatacttagattggatagatggaattctttattgatattgtaattttatattttattatgtttaggaattagtgctcaaagttgcatatgatattgttgatatccaaactgacaagtaatggagtaacatgtactattaattgagtctatgtttttatggc

SEQ ID NO: 2383 - DNA, 2000 bp, Oryza sativa
  N_region (1173)..(1174): n = any nucleotide
  N_region (1180)..(1180): n = any nucleotide
  N_region (1195)..(1195): n = any nucleotide
  N_region (1207)..(1207): n = any nucleotide
  N_region (1307)..(1307): n = any nucleotide
  N_region (1733)..(1733): n = any nucleotide
catctccactctggccacccgtggccctccatcgctccggccctccccatgcttctccttcgctctcccctcgtgttcctgacgccaacgtctccccttcaaccgcgtcgccgccgccgcctcctgctctcgctgcgctgccatgtactcctcccacgggccattgtctcctcctcgcgctcttccgccgcgccatcctcctatcctctgtcctagtctcctcctcctcctccgccaccaccctcgccgccgttggacctcctccgctcccctccctcccctggcagcgtgcggtggaggaagccgccgccggcgactccgctcagcgaaaagaggcgaagaaaaaggccgccacagcggcggcaacaaagatacggacctcctcctctccccttccccaccagcggtcttccccacctgttggccgccctgccgcctgcccagatgagcacagtgagagaaagatgatgaagggagaggaggggaaataagagagaggtgatgatatggcatcctgacatgtggggcccacgtgggtcccatgctgactcagccgccacgtcggacaaaaccggagtcaaaaccatcgaaggacctaaagtgaatggttttgttaagttgagggatgtcatatatctagtcttgtggttggggaacgattttgtaactcgataacaagttgagggaccttcgatgtactttttcctaaaaagaaccaatagctaataatgctcatcatccatcgaacatattaattcggcagcggcaatgacctgggcagccggtggtcacccttatcgacctagctccttcctatctccctccaacctccaacctccagctctcaaccttagtttctaaaaccttttagacttgtatccctatattcttcttcaattccaccgtccaaacatttgaaagatgtaccgaatatactgtgtttgaaattggagcaaaaggctgttgacataaacttgagccgtagtttataagccaaaacaattgactaaatttgtgtatgtccaatgtttcttgttctttttcttttgagtacaatgcaccaacggtacttaaacttgtcaggaggtttcacttaggtccacgaatttgcaaagcgcacattgaggtccctaaacttgatttattgtatcatcccggtccaaagccgcgttnngctgtnttcttgtctacgtancacgccacgtgnacaatgacatggaattttttttatttttttctcccttcttccttcttttttctgtttcttccttcttttttctcggtggtgagagatggcacgagggganggattgtcgcagtggtgaaaaaagaaggaagaagggagaaaaaaataataaaaaatccatgtcatcgttcacgtggcgtgttacgtaggcaagaccacggtcaaacgcggctttggaccgggatgatacaataagtttagggacctcgatgtgcgctttgcaagttcgtgaacctaagtaaaaccttccgacaagtttaagtaccgactgtgcattttactcttttcttttttttctttctataattgaaaacgggagactattggtgctgccgtagaaccaaatttgttttaaaatgatcttttatccgctgatctagaagctaccaaccgagaaagatcgccaaaaaggattcctcctgatccgtcatccgtgtcgtgtgtgtgtcgtgtcgtcccttccctcccaaactcgcaccaaccccangcgcctcgcacatgggacctctcacctctctctctgcctcatcctgcgaaaataagaaggaaagaaaaaaaaattccgcaccgcacgtcacccaccccaccccgcttccaaatactcccagagtcccgcggccgcagcgcactactactactacttctgcttcactctctctctctccccgatcccaatctcggagagagagacgtcctcatccatccatcccatccactcgagttgatcgatcgcccggacgccgccgcaggggcc

SEQ ID NO: 2384 - DNA, 629 bp, Oryza sativa
  N_region (8)..(8): n = any nucleotide
  N_region (18)..(18): n = any nucleotide
  N_region (35)..(35): n = any nucleotide
tcaaaggnatcctttaanatggccttcgggacaanaaccttaaggcactatattaccaaatgcgtataatagaaatggtaacacgaagctacagaactgtcttgggtggctctatgcacaaccatttcccccattccgtttccaacctctattaccatacctacccaaaccattttccacacaagagatgtatgtgtacccatcatgccatcaccgtcggatgcagatcggacggcggaggaccctcccaaaaaagtgacagcacagtcaaaaacggcaaaaagtaaagagtagaaaccgaagagggcaagccaggtcaaaacccccctcaaatcggaaacctacaaagcctacacctacacagcctagccttcttgtcctccactaccactgtgcagcttccttcctccgccataaagcagaggagagagagcctcacgtgagaggcctcctcggtctcgccgcgctccccccaaaaccccccattttgccatcatcgcctcgtcgccgccgccatccgccgccgtcgtcgccgtcgtcgccggcgacgagtaggtgggactccctttcgtccatgttccaaagatgtttgtgtttgtgtgggcgggttttgtggtgggttgggtgca

SEQ ID NO: 2385 - DNA, 2000 bp, Oryza sativa
  N_region (363)..(363): n = any nucleotide
  N_region (553)..(553): n = any nucleotide
  N_region (581)..(581): n = any nucleotide
  N_region (621)..(621): n = any nucleotide
gaagaatttgaattttagaatcgaaggttcataatataagacttctcggctcttatccatttttcgaatttttttagaatgaatacatgattcaatttggcagacagagtagtaaagattcatcgaaaacttacagcagcttgccaaacaaaggctaatagaaaaaagagtacatatatgacagcataaaatccacgattgggttgaaaatagcggcggcagtcggacgcgacgacaatgggacggcggtggtcgggcgcgacaacgacggaactggagggagaagagtagcacgggtagagaagggctggagatgggatagccagcctaggaggctggccaatattggccagtgggtggacntggatggagaggcaattagcttgaagagttgaatagagagtctgttggagaagtgtttttggtttatttgccaaatttttagcttggagagctgagtagagaagctgttggagatgctctaagtggcagggtatcacctgtggatgcatttcggttgttgtgcgtactatttgcttctcacttgaagacnggagagttttggcaaactggagaagatnggccagcctaactactacttcctccgtctttaaaagattnatctaggagagatgtgatccctcctaggttagtgtatgtgggcacccctatgtccacagtccatatatattgtcttaggaggggttacaccctcctagattgattttttttggacgaagggagtagacaatttcagaagcacggatttcgtcatgtttgagctttcaagatctccaaagtattgatggagatcacggccattcgcgccgatgtactgtacgtatacatgtgtggagtaagaaatttggagtgtcagagaccaaaagactacacaatgatgcattcattgccggtgcttttgttttataatctatagtaacaaaacagcatcatcttcctctccatggagtagaatacacgaataacgcgatcctttttttctcatccacatctctccattctttactccaacatggccatagcatgtcggcccacgagagactgggaaccaagaaaagtcaacacaaccataccatacccgggccacgtggacaacaccaccacccaaagtactaaagcccctactgacccacccctggtgggccccaccatgtcagcatctcagcaatagcagtagcactagatatttccagatctaaaattccccgggataacgagatccgacggtcggatggacgcccacgtcaccgagcctaattaagcataattaggccccgctcggtgtttggatccaggacttaagtttagtctatttatttagacacttatttagagtattaaatatagactatttataaaactattatataaatgaaagctaatttaagagacaaattttttaagcctaattaatctataattataaaatatttattatagtatcatataggctaataatgaattaattagatttaatagattcgtatcgtgaattaattaaaaattataaatgagtttattaataatatacgtttaatatttataattaatgtcaaacacctgatattataggtcaatctaaacagggtcgaaacgtcactcgctccgatctaatcgcggtgcttgactcgtctcgtctcggctcgaatataaaggcagcggcgccacgccacgcacgcgccccgtgctctctccaacggcgcacagcgagcgaaaccccgcgcattggacgcgaatccgcaccgagcaggaggaggaggaggaattccgaacttatccccccacctccaccaccacaaccgccgcccaccgccgattcccaaattccccgcgccgccgccaccgccgccgccgccggaggaatttgttgctgctgctgttgttttggcgagtcctggaggtggtggcgcagtggtgcggtgtggtgagtttggttgtgttggtggtggtggcttgcgtggtgaggctgagccctaggg

SEQ ID NO: 2386 - DNA, 2000 bp, Oryza sativa
ccacattagctttttcgggatggtaatgaatgccaagattgtaatccttgatgagttctaactatcttctttgcctcagattcagatctaattgggtgaagaaatatttcaagctcttatgatcgatgaagatttcgcatcagttgcctattagataatgatgccaaatctttagagcatgaactacggccgctaattccaaatcatgggttggataattgacgtgaagcataagccaccactttgccctcttgcattaatataaaatcaagtccgtgtcgagatgcatcacagtaaatatgaaagctttcatgaatatctggcatcactagcactagggctgctttgagcctttttctcaattcatgaaggcttaattcgcatatctcagaccactcaaatttgtgttctcttttaaagagttgagtcaagggccttgtgattttagagaagtttttgatgaatcgatgataataatcagctaggccgagaaaacttgtgacttcgggaacgttctagtgttgtttccaattaaacacattttgtacatgttggcggtatgtcatgagacccttcgaccggtcctgctgaaaccgtgcaaccaatggagggttgaagctcaagacatcgagtctgtgggggcgaagcccacatggcgaagactatgaagcaaagatggcgaagggcgaagaatcacgctggtatcccacaaggtggaagacattttgggcgaagactatatggcgaagaaggtatggcgaaggcggatgacttcgccatagcaagccgaacttcaaggaggcccaagaggccgtctcagccaatcaagcccgggggccactgggccagcgttcgccagtcggcccattagaggcccatgtacctcaattacactatatacccatgtaaatgtccctttcataagggcaaccatgtaaattcccctgttaaacctaaaccctaataggggaacctgtaatagggctataaatagacccctaggccatgtaaaagggggatcccaagaaaaattctcaatttaatacactttactgctttccaaccactgttgagtactttcgacgtatgccgctgtcgtttcgacaacagctggcgccgaccgtggggacctccgagcgaaatcattgagagcgaatgccaccgaagagggtcgtgaagaagaaggtcgcaaagcgaaaggagaccgaagcaggagaggagatggccgccgaagaaggagcagagcctccgacgtccatgggcgaagctaggggagcaccatcggcttcggcaccggcgccgcaactgccaccttcggctcctgccgcttcgtccgggcagaggccaaacacggtcgacacggcgaaggcagccgcggcggcaagggcgctccagaccagggcggagatcctttcgacaagccagctgctggtgccccaagccgcttcatcacagccggcaacggcttcgaccgcgctcgccgctgcacaagtcaaccccaacctcgaagcacaaggcgaagccgacatggaggccatgcgacaaaacatgacgcaactccaagacatgctttgacaaatgcaagaacagcagtaggcatacgaggcagcgcggcaagccaaggtcgcttcggtcccaatcctctagtattcggcgggctacattccaccccaagtccacccacaagcatcaatccagccccttccgccacaagccatgcaagcgccagtgtacttcgccgggcagccttcggccgcaacaatacacccgaccccttatgtgcagccgcaggctcagccggtcactatccaagtacacccgccaccacctggccggccaaagtgcacccagttggttgccgtcgagccagcctggttcgagggtttcgccttggagtcaaggaccgcagttcgacttcatcaacactgctcaagcaccaaccattcgaccacaggaaccgacatcaggcttcggagcaaaccaagcgccaaaccaggtcg

SEQ ID NO: 2387 - DNA, 2000 bp, Oryza sativa
tactaccctttctgttgctctgaactgccgagttcttgactgtcagattgtggacggccataatggggcattactgctacataactgaatgctgctcctactcggttaagtaagtgagaaagaaaacacagtggatattcccagatttgtagtcgtagactcgtacgtgagaaagaaagcaggtgattgcgactcacttgcactgctacgaagaagctccaaatgaccaatgccattttcctacgctaataacagtctccggttgtgctgaaaaaacgaaatgtctacgattaattagcccccgctacacatcataaaagaggtgttcaaaacaaagaatcgtgctatacgtccgactctgcttctttccacgttggtcggacacaagtcttacatacaagttgtatgtatagcagttttccaaaacaaatgacactgtttggggatcaaattaccggccggtgagtaattggtgaaaatcatgagtaaccagctagtgaaaatatggagggagaatagctactttagtccctaaagtttctctgtaggatcagtttagtccctaaccttttaaatggtccaagaaatccttaacctatgtcataaggcctagaatagtccttgggtcaaccaaaatcatcatatggatatgccatgtcatcattcatgtaaaatctatgatgaattgtccaatttatccttacgtatatcatagaaaaataaatataagggtgaattagacataactataggaaaaaaatacttcttttttcacccttttgaggtatatgtttgctcttacatataccatatattttttttaactttttccttttgttttttattttcctatgcataagggtaaattggacaaatcatatagattttgcataggaaggtgacatggcatgtccacgtggcgattttggtgggaccaaggactatattagcccacatgacaaatttaaagaacttgtttggacaatatgaaagattaaggactaaaataacccatgagcgaaactttagggaccatattagctattcattaggaaagcgtgtaatttctacttttgattaacattttcaaatctatggctaccgatcctcaaaatctgtagtgagatccgagagagtttatagcatttagccatttacaacatcttcaatttttttttaaaaaaagaaactctaaaactattctatattttcaatcagctacaagttatagtgcatattctagaaaatgaactagaaatcagttagacccctatcaaatgctttttagaatctaagggcatgttaagattatagccaaaataaaccttaccaaattttgatatttgccaaaatattggcaagatgacaatattgccaaaattttagcaggatttcttatgtatttaccaaatttgacgataaactaaacgtagacatttttgtggcaactttgcaaaaaaaataatatggttgaaaatggcatcaatctgaacagccctaaagttagtttcttgaaacatgccacgagctgaagggcgcagaggtccaaaactaaaatgaattagagttatagagctaggaaaaagatactgaatttttacaagagattcaagcactctactcttaaaagattaaaagaaaagaacagcaatgaataggttatgacttgagccaaaacaaaaaaaaagagaaggcaattggagagacttggaacaagacgaagatggttgtagctgtccgaagctcctcaaacagggggaacgattgcttggagtttgggctgggctgggctgggctggtgacaaggagtgtgatggatcaaggcccacacaactactccagtagtactacattggagggataggtccctgggcgttcccctcgcgttgcgctctagactgtgcaggagagaccaccccctccctccttctagaagactagaaccctcgccatcctccccttcccccaccctagcgtcgcggcggcggcggtggcggcgg

SEQ ID NO: 2388 - DNA, 2000 bp, Oryza sativa
  N_region (1661)..(1661): n = any nucleotide
gagcttctcgccgctgcccgccgccgcccggtccaccgggaacgacccatcggcatccgccttcggctgcacatcacccaggccatcacacatcataagaaggcaaccccaaccttccccatggcggggacaaccagccagtgacttactccgacgaactcgaggtcgatttggggcttgggcggcggcgctgcctcctccgcggaggcggctccggcggacgcgttcggcgaggcggcgttggagcacctgatgcgggccgcccggaaggggccactgccagagctagccttgcggtggcctcgggtggagacgacgcgggaggaagggatggccagcgagaagagcgccgtggaggtggagctcgtggccgccatggctttccttccccttctcttttggcgagcacgtggcctcgaacgagacggtttttttttatcggcaggaggcgcgtccacggtggaagcctcgcgcgccacacggttggctgcgttgcgtcgcttctcgcgggcttctttccgttttctctagggcccaaaccaagacgaggcgggccgcatcgttgccgtgggccagcgcacgcgcgtcttcccgttgttgggccgcgtgcatgcgcgaattgagattggaaaaagtacaccgaaggtccctcaacttgtcaccaggatacaaaagcgtcctgaaccgcaaaatcagatatgcgaggtccctaaactacacaaaaccggtcacctgaggtctttggtggttttgactccggtagtcagcgtgggacccacatgtcagcgtgccacgtctatgtggcgttctcttctttttagttatctttgctgcgggggagtagcatcgggcggcgccgcgcggggctgagcggcggccggcggaggcggcgtgcgatgggcggctggcagagagcagatgggcgcggcgggcgtgggcagcggccggcgagggaggagctaccaccggcggcggcggcgtcaccgcgatcccacaccttacccctccacctccacctccgccgctgatgtagcaaacatgcgcacgccgcattccccccatacacaccccgaacgcggcgcccgacgccgccgaagacgacgcatgctgacgccgctgctgctgaagacgacgacgactatggcgacgggttcgaggaggaggaggacacgcacctccgttatggggatcgctggtatcaagcagcaagcatccatcgtcggcgagccaccgtccgtcggtcttgtcatcccatcagctctcccgtcagcaacaagcgcatcttcatcagcaagcagcgagcatatccagatccacaggcaagccgcaagatccaacgccaagctgttaaatccacagacaagaagcaagctagcagcaacaagtagcaagtgttagcttcagctataatcctgtgccatattatcggttactgtaacgcgtctagcgttgtcgtttcttcagtttcgtcagagtctgtttctctgttttttttctcatgtaagccgagtcttccgggtcgtgcgtcgtgtgcgagtcatccgggtttcagcgtcgtggtcgcgtcatcgtgaatgatggcgtagtggtgttaatttgagtctgtacaaattggctatatatatgagcatcagaaaagtcacagcgagtaagcggcaccnaaaaactctgttcgtgttcaatcgttcttccgagaccagtgaattcgcgtgagagagagatagtgagtttacacaaatcttgggcttggctttcatttggtatcaaagccatgtccgctcccaccggcggcacgtctcgtactccccggcgaacaggccatcggctctcgccgtctcctccacggccacgcaggcgacagctcgtcgtgcagcggatcgttaaggaaggcggctcggtctcctatccaacgctcacacgctcaaattactctgattgggcggtgttgatgcgagtcaatctccaggctcaaggtctatgggatgctgtcgacaccggcg

SEQ ID NO: 2389 - DNA, 2000 bp, Oryza sativa
  N_region (949)..(949): n = any nucleotide
gttttttacgttctatttttttttatctttggtgccacgtgagctaaaacagcttacaatactatcttagagttgtatttgtactgaatatgcaagttaagggacatgttatatatggtattgtgattttatgatgtaattcaaactcgacgttaaagttgagatagcttaagtgaacttgttccatataataagatgacgaatcagtttcggaaggttgaaaagcccatgtagctccgaccgaccgagcccaaattctaccggaatccggcctgccaccgtttcgtgtactgcgtaaccgtgccttcttttgctttctctctctctctagtccctcctcttttggtggtctctctctctctctcttctctcgcctcacttcgcatcgcctccaccaccacggttcggctcggctcggctactcctctctctctctttctctcccctcctctcacctagggcacgcgcgccgccgccgccgccgcctccctcctcctccccgcgcgatcccgccgccccccgatcgaccccgccccccgatcgcccgaggtcagcacgctcccccttccctcaaccctcctcctcctcccctcccctccctatcggctccgattatctccgccgccccgttcctcggggctcgttgcggcggcgccgccccccgatctctgcgcgctggtggttccgctgcaggtagatgcgttcgagtttgtttttattgttattattgtttgttattattccgtgcccttgttttgattcggtcgcggtgcctgtagcaatcaatcgaggctggattggttaatgggatcggtggcgccgccgattggttctgggggctgattggatgggtgctctgtggattctctaagctaggttgatgttccgtacaagggtggtttgcttctgctgcgctgctagctcttgattccgttgcctgcagagtttngtttttttagttttggccgtttttgtggtgcttattagagagcaatcgcgtctaggaggtcaaaaggctttgtgatttttgacgacttgtttccttaggaattagtattgaatagtagtaataaataggtaatattagcttagcagaaatcttgatacaatttccttttgttaaggttgctgattataatcatgggtgaattgacctttcatcttaaaaaacaatcgctcttatatctaatcttgctgaagcgtgcagtatctatctccttttctatattacactggatcatttaggttttagtggtgctcattaatcatgacaacacagctgttaagcggcaaatattgctatgctgtatgatcaatgtacatgtgagctgaaatctagtgctatatcagttcattatgatgagtcaccttgtgtttgaagttgaaagtggattaatcttggtaccgtactttatcagcagcgaagttagatgtgtcagttattagtgcttccttctcgatctgcatcaagtaaacagctacatgtttagagccataagtaacggcgaggcgaataaaagatttccagagagtatagcatgtgggcaaataagctattaattacgcatgtagccaaacttgttccggttttatatatttcagtatgtctttttctctctgatgattaggattatcgaatgcaattaatgtaatatttcactttataactgaatcccatttttccccctttgtatgtattggaatcctgtatatgaaggtatgtgaagattgcagagagtatacagaagaagtatgcacaattggagatacttgccatctatgataatgaaaacatagtctttcttggaaatgaattagatatgcattcttttctgggctttaatgattgttattaattttgttgtctagactgttaacgttatgctttatgattatttttaacgccttctgtttctaatcctggaacatattctttgtgtttcagtaaaatatagggcttcacgattgctgggaatctacctgcatagcttagttcaaac

SEQ ID NO: 2390 - DNA, 2000 bp, Oryza sativa
  N_region (980)..(980): n = any nucleotide
tggtcaaacacgtactaaaaagtcaacggtgtcaaacattttgaaatggagggagtattatttactggaatgggtagtaagtaagtggaacaactttatagattagtgtgaatgggatatgattgtttgttatgggagtaaaaattggaaagtaggcattggatttcatgcataaccaagtttttgtaaacaaactttttgttcaaaattgtcgagtaaaccagaacggagtgatcagtacgtgtgttagacatctcaacttgctaaaggtatcacggatggtccaaaatacgacagggtatgacacatggatgctaatataacacactcgctaatcctgaaatgagagtagggcctactctttttctggcatttctctcttcttccaccattgaccttggggctcccaaccccatagttgtttacgttgttctcgaggtcgccatggccatcgttctgctcgtgtcaagcagctaccatcgagctccccaccatcgtgatgcgctcgagctctttcacccaaactccattgtttagatcgccctgatcgtcgtcgttcatctctgcccagccgcggtcatccagctctccggcccccgtcgctaccctaaggctctcgctcccagtcaccgccattcctaggggctttacgaagcttgaggtccagtggcccggcgacgtgtggatgacaaccaaacggtggcagaagagggtgttgtgatgggaggaggcgttgatgacgaggatatgtatggcagtgagcaggaccgaggtccgagggaacttcgggtcaaggcaagcgccagaggtaaccaacgtcaagctcggtctcgcccatgggaaaagaaaatggcaaaaaaaaagggaaaagtgtaaaataaattgtggtggcctcacttgtcatttggtgcagggctagtggtgatgttgcatcacgtccgtgtgacacgccatgtcaaattttagaccgaagttggtanatttagcaagcttagaggtctaaagatgtattttctaaatttacggatctagttgaaaccaacacacaagtttaaggaccgacagtgtttttacttttttttttctaagttgtcttttcttccaagaagggtgttgtttcttctaaggaagagttcaccttaacaactatagatgatacccaagagcaagggccaagcaccatgaacaccatgtctgccatgtccgcgtgcataaacaccgtcatgaacgatccaagcaccagctttgccttcgcggcgccgtctccgtcgccactcacacccatggccttgaccgctactagctttgcttcctccaattgtgacagtttgtacttgagtttgtatagtttggcctcctttttcttcaggccgtttagatggtagcctctcagacttgagaagtagagagtgagcgagagagaggccttataatatcttttgcagatgtttgaataattgatacaatatcaggagcgaatatgaaatcaaacttgatatggattaacgttaagatctttccgattgaattggaagctcaagtgttcaattagtatagacggatatagatacagacataaatatttttttccatgaaaagcgaaattgtacaaaataaaagttaaacattcttatattgttcttgaagaggccatcaaatttgaaatgcgtggaaatttaaaagataaagaatgacagcaaagctatcagattgcaacaacggatcacatatgcacatccccttgactaatgcattctgatcgtatccatttaatatatgactggagtgccaggttaatccatatcatgtttgattcatatcaagttgattcataatctctattgatatcgaatcatttattcaaacgccagccaaatcagttcaaatatattataaggcctcgcgctctctctcaagtccgaactcaactacaaaccgttacacttggaagatgcaacggtagtagcaacctacctgaaccagccggcatcacggcggcc

SEQ ID NO: 2391 - DNA, 2000 bp, Oryza sativa
ctttgcgatgcccgggtataactgttggccgtcgaccaagacttttaactatgttcttcacatgcttgtgtgtaagaggcagtacgaagttgtccatgaggtctacttgagcgcgtcaaggttgggagtgacattggacacctgctgcttcaatattcttgtcaagggcttgtgtcagttcggcaaatttggcgatgcgatttcgctgttgtatgagatgccgaagcaaggttgcgtgcctaatgtgacgacctactctacattgatgaatttcctctgtcaacatggtcaggtggacaaagcattcgagctttgtgagagaatgcagaaggaggatattgttgcagatgcagttgtctacaatattttgatcgctggtctttgcagagaacaaagggtaacagaggcattcaatttgtttaagtcaatggttcctaagggatgctatcccaattcagggacatatcaggtacttcttgatggtcttttgagctcaggaaagtttgtagaggcaaagggccttgttagcatgatgagggcagaacgtatgaggcccggtttctcatcattcaagttactgatagatggactctgtagtgtaaactgtttagacgacgcgcatcttgtcttgaagcaaatggtggagcaaggtttcgttcctcgggtgggtacttggacaaaacttgttacatcaatgtgctagattgtggtctcatgccagtgatttatggaacaactcaaatattcaaatagtaatatttctgatatggtagcttggtactattggggtcttataatggccaagaccttttcactagggctgtatgtgatcaggatctaatatagatcgggattgtgtgaagctgggaaaggtattgttcgttttggtaagtttgtgagattagataattatttacaaaaagtaactatcttttgtccactatgagattgaaaatgtgaaatatctgaagagaatgtatataattgcagctgatcttcactcttatagtcttgccttctggccttcccatcattttcttctgaatctggaccttcttgccattaaatttcatgcatgcaacctgaaagatgcacatgatgaggtattttgttgtcttttacatcttatgatattgcctttttttttcacgtccataccgtttctttctgggaacagtgtttacaaaatagtttttcgcctctttcctttactatgtgattgttgaaccatccatcatgccagtacacctatcttcctgccttcctgggtttcactgacatctgagaccctcacagtcttgttgaactgtaagtggtgaaaatttttcaatcacaatgatggacccagttttttttttgttacagttttcagagggtgtactataaggaaaagaatctggtgcggtaaagaagtaacttcatgaagaagtgaagttcaggagtcaggattaaaggataatagtggttgcatgagcaagaaattgcctgtcttctgttttttgcacgaagcaacttatcgggcatggcatgcatatctatatgttcaattcgcatctctggattgcccaacaaaccaacagttgtctattggttgatcaggaactagtctgagatgacttggtcagttgattgcaccaagtaaaagcgactaatgtgtacggcgtactaaaaataatcatgagtttgtgttggacactttgacattgtaaactatgattagtcaactatccgcaccagaaatcttgaataaaaattgcatatcttgcagtacagtgctggtacagaagtacagaactattgcctattacagctaactttagtcttacaatttctcctgtctcattaacttttgatctggtgaaacataaactgaaaaataaatcctttggtaaggcgatttctgtttatgcctccagtgttttagagctagtagttgcaatgtcatactaatggtttgacaaaagtgcaggcagcaacaggggatctgagaacgacgtgtc

SEQ ID NO: 2392 - DNA, 2000 bp, Oryza sativa
ctatttgggcaccgttcttttgccaggttcgggctaggtactcttctagatatttgcgaccatattttttaaattgttaaatattttttcgagataacgtgttatatagaagtgcctttatcaaataaaatgagctcattttccaaactctccaatattaaaacataattaatcatgcttaatagtccacatcgttttgcgtgtaaccaattaactcagctaaacatcataaacaaacgggtttaaaatatcttgacaacattggcctggcgtttgaaagcaagaatttggagcacattcaagaggataaatggtataattttaggaattctaagatgccgcacatgaaaaatgaaagattccttcaatagataactttgcaatggttgttcagagaaaaattctgcaaacgataccgctgtcatcttctagcaacaatgcatgtagctaagaaacaccccgaaagctcaagtgggaaactgagaaacaactaaacaagtgaaccaatcatcatttaaatggtcaaaagaagaagtctgaaaagtatgatattgcattacaaattttccattggcgaattggcctgaagtgaagtgacgagacaggctctcgctgggagcattcctcaagattcaacgactgtcactgaactgaagtctgaataagcccattcccatcatcccatgtaatgtgatcaaacgagcacacgattttcaaatgagcagaagaatccattgtacttctccgaaacctccttatccactagtcaaaagatgactacggttgtgtttattccttccaaagttgaaagtttgggttgaaattggtacgatgtgactgaaaagttgtgtgtatgacatgttgatgtgatggaaaaagttgaaagtttggatctaaacacagcctacttatcatcgacgatgccgtcgaatgtcgccaagttgattgacttggaaaacctaagatcttgtccatttctacaaggtatggttcatgttttagtgagttcctacgggaccattcgcaaattattggatatggttgtaacttggtatagtggatgagcgcactgggccaatgaagaatcattatctttgaccccctgattttgtttttgcggcaagcattatttttggcttcactgatagatttatcccagttcctttcgatggaaaactggcatgtcggtaacatgcaaattacaaaagcatgctgatacggaactttcaggcatcatcacttctctttcagtggaactttttatttagagagattgtgatgttgttacgcacgttatgattttgttagagtatagttggagagacattaaagataaagaaaacaagttggagagaaattaggattggattgattcatatcgagctcttcttatctcccatatcttagggtgtgtttcgttttatggccatctaaagtctaacctttttttaatctaagtccagtccccttcgtcgacacgcacccctgacctcatattttcgcttattttcgcttatacttatgtttctcggccaaaatttgaattttcaattttaaatttagagtagattttgggtttttttaagtttatttttcagcatttgcttttaggtcgctaagaacacgtatataaaatttttattcataaattatttttcgtttgtaaatacactgtttcgcttattcccacgttaggctggagctgacaatgaaggagtttaattggactatatttccacatcgtttagatgggccatattaggctggaagctgacatttcggccggggggtatggattgagttgggccgaagaagcccatagtacaacctgcgcgcgctgacgtgtcgcggtcgcccgcgacttcggcgcgggaagcgggtggggccatatggcagcgagacagccgggccccaccaccccccgggatcgtttgtggcgcccaccaccccacctctccctcgggccgaaagagccgctcgctcgatcggccggaacggag

SEQ ID NO: 2393 - DNA, 2000 bp, Oryza sativa
tcacgaaattttgggcccaaaggctaatattaatgatttttccccaaggctaataatgataaaatttgcggcccaatcctattttaatttattcctctacctcttttacaaacccaaccctctctagtgtggaatatttaatttgtttacaaactttataaagaatagtgtgttgtaaagtggccctaaaaatatgcaaagatttcaaagctacggacgtaccaatgggataggcgtgttgatttggatggtacccacgtcagagtcagtccctcaacatccataaaattttatgatacatatataggatattagtatgcactcaatatgtacgagcttgttcaacagatgtattagaaatgataccttgtgatggatgtaaagccaaacagattgctttcgtgccaaaagaccaaagattgtgtaggttgtaagagatgcgaatttgccttcccaacaaattttttaagtgcccgcgtttatttaggacctgagacagcccgcattatggctcaatctcattgatacattataaaaaatttcacttgaattgtctgattcctgtttaccaaagaaacatgtgctcaaaataatcgcgcacaggttttcctagtcaaaacttatgttgtctttatgactttatcatcagttttttttctttggttaactatactagttgttttgccgatatctgcgggcgtgtcacgttaggtgcggtggaccaacaacaccaagatacggaatactaacgtcggccatttgatttttacgccggccttgctaaccaagtactcctacgtgacatgtatatactttttttttacatgaaacatgtatatacttttcacttgtcaaattcgatcgtacaggttggatggttagtaacacatgcatatagtaagttgtagataattgacagcaataacacagcagaaatgtagaagtatatcgaaaaatcaaaatttgaaaaacccacggattaggctatgatgaacagttgcaatccaaaaatccaatagtagtacactactcctggagtactacatggcagtactagctgctccctccgtcccaaaatataaacatttttagcatgtaaaatttgtaactttgactattaatagacaaaaattaaaaaggatcaatcatgtaaaattgatattagtcatcttttggctaaggctaatacttatcagccaaaatttgaattttcaaccttaaatttaaagctgattttgagattttttttcatctaagtttatttttcagcctttacttttagatcgctaagaacatgtgtataaaagttttattcacaaattacttttcgtttgcaaatactcccgatgttactagatttatcattaaacaaactatcataatatgcaactctttttatttaaaacatcttacttttatggatattgttggtcaaagtattatatcgaaaaccgtgtcaaaatttaaaagtgcttatattttgggacagaaggagcaggatgtttgtttcatacaatgggtttgtgggtgaaatttgggttaacatcatgacatgtgttatgaagtgatgatgggaccattccatatgttaataaattagtatttagaactttcgtcgacttaatattattatatgagatggcatatgtggaggaaatgggggctaatgtgacagtagtgtttgggatcgtggcaaataatttttcttagtactagcactagatgaattaatagaatataaaaaccgaacatgtcgatgtcgtgatcgaccttgtggagaaaatggtaagcaaatggcatggcgagtggagacgatgagagagatagagttggtgagaaggaaggaccgaaggagccgcagctcgcaccagcacaagtcaacagttgagctcctccatccacttgactactcctacttgagagagagagagagatagtgccattgccactgcatccaccattcaatctcacacctccgggctccggcaagggagacagag

SEQ ID NO: 2394 - DNA, 2000 bp, Oryza sativa
  N_region (614)..(614): n = any nucleotide
  N_region (680)..(680): n = any nucleotide
  N_region (682)..(682): n = any nucleotide
  N_region (1019)..(1019): n = any nucleotide
  N_region (1313)..(1313): n = any nucleotide
  N_region (1532)..(1532): n = any nucleotide
  N_region (1590)..(1590): n = any nucleotide
ccaatctcactagctacctcctatgtacttgtttccactttatatcgcagaaattgcttggttcttacaaacggaggaggactatatagaaataaaacatggtacgagaaacaaataacaaaaataaaagaaataaacatggtacgccaaagagaagtatccactatgcaatataaaatctactgaaatttgttagttttgaatcaatcaccaacatctatactatacgttggacattgcagaaaatagtccaatcctataatttgaactattgataagaaaaagataagcaaatgcgagattacatgagtaatagttgggtctttgaacggtccatgtttgataagaaaaatataagcaaattgaggttacataaatgctagttgggtcaaaaggaaatcctaagcttagcaaaagcaacctagaaaagaacaagaagaaaaatgaaaggactagaaagtgcaataagattcttgattaataaaaataaatcaaacttgaagattacgtggacaaattatccctaccaagttctccacataaacaattttgtcaaatttgaattggtcctagttgttgactagcatttaagtagctttaaacataaataattnaaaaagatagttcatcccgccaacaaagatcaataattacacataaacacgtcgacggagtaaaananaaaattcctactatcctattaaataaacaaactgtttaaccccaacaaaaatgatctaatcacagaaccgcaaaatagctacttctgaatcattatcatcctcgtcagcatcagtgagctagagctgctaagaggaacatgaggacatgcatgaactcatacgcattggccaccccatagcatggagcacgcactcgttttgacttattttttaattaatttattattaatcaatcaattaaaacttcataccacacacaaacagaaaacattaccccaaaaaacccataaaaattaaaccgaaaaacgcccaaaccaaaaagataaaaaaaaaacncgccccctctctaatcaacccctcccctaaccttaccaccacccaaagccctacccgccccactcacacccacgtgggccccaccacccctggccccacgtgtcagcgagtggcagcgcccgtcacccccgcgttcgctgtgccttcccccttaatcaaatccagcggatatttttgacgtccgcaaggacaaagtctcgccattttctcctccgttttgttttttttttcgttttcttttttcttcctcgctttctctctctctctctcctcctctctcttcttcttcttctntgccaaatcccatcgcgaaggcgagagagagagagagagagaagaaaaagtgaggggattacaaactcgcgagtttttcttttttttttttgtttattgtgtgaatttggcccacgtcggcggcggcggcggaggagctaaaccctagccggaggtgaggtggtggtggtggtggtcgggaagtggcggcgccggtggtggggcgggggggcgatttgncgcgcgcggccgagctccggatcgccggatttgtgcgtgagcgcgtggagtttgtgcngtgtgctcgtgttgctgttggtggtgagttgtgaggtgaggtggggtggtgtggcttctgctgctgctgctactgctgctgctggtgcttaattttgctcgggttcgtggggttgggaagcgagggatgcgatctgggaggtgttcgggagctcggtgttgcttaattccggtgctggtttgcggtggtgcgcgcgcggcttcttctcggggtggatttggtggtggttttttttgttgccctcgttgttgcgggtggatttcggggggagggagagtttgagggatgactgctcgttcttgctcaattccggtggatcttacggtggaaggatggcgagctgagtaaaggcgcgcgatatcttgctgcggtttgtgcggagcttcggagcactttgtcattgctggcaa

SEQ ID NO: 2395 - DNA, 1263 bp, Oryza sativa
  N_region (3)..(5): n = any nucleotide
  N_region (62)..(62): n = any nucleotide
ccnnncccccaaaaaaaagggccccaaccctaccttatcccaatccgcaagcatcctctctnaccgacatgcgggcccatccccccgtgccgcgtatgacgtcggcttccccttccgttccgttccgtcgccgcaagcccaagccacgcacttccacgtgggccccacacggcccgtgcccctcacgcccggcccacgacgcaccccctctgccacgtgggccccacgcgaccttatgctcctctctcactgcgcgtggggcccacacgtagcgttccgagcgctgccagctggggcccgccacgacccgtttacctcactgcgcgcgggacccacgcgggtctctgccagtggggcccacacgcctctcctgtccgcgacgcaacccgtctctctctgtaaggagagggaaaaaaatacaaggcagaaaggggaaaaaaaaggaaaggaaagagaaaaaaaacgcaaggcgagagagggagggagaggagtcggaggcagcggcgcgggcgaggcgaggtgagagcgagcgatagaaatacgagagccgggaggagaggcgaggagagagagacacagataagctcagccctaaccctagctccccgcctcgccgccgccgccgccgccgccgccgcaccgctccccggggagcgggacgtcgccgccgcggcgcctaggtgggtatctcccctcctctctctctctatcccgctccttgcttccttgtttgcctcgcgttgggttgggaagggctcgtgatcggggcgggggtctcctccctagggcttgcggcggtgggggcgatggggggatggtgcggtggatcggggtggggagggggatgaacgggcggtttcgtcttgtccgggcggccgatctgaggggggagcggtggtttggttggttggtctcgtccgtagtgttgattgcggtattgatgtcacaaagggaggaaacctcgtcctgagctggaattggctgtgtttgtggcgggtgcatcggtgtggatgactcaaaggggtgattgcgtgggttgggatgcgatgggaactctgttctggagatggtttactttgaagcaggaattctgttgattagatttgcgcatagattgctttggttgatccattatagtgcacttgtgcattgtgctggaacggtggaatgctatcttcaggttgcttacatgagtttactttgtttgcaggtgtggttgactcagcatatttgttccgtctgccagccgccgcccctagggat

SEQ ID NO: 2396 - DNA, 2000 bp, Oryza sativa
agccttgtttggtttcactaattcatatgcttatccgattcgattataagcagaagcataagcactataagatcctgcagaaaggactagcttaatttgaaattacgatattataattatatgcattcacaactattagcacattcacaagtagtagcgaatttgcaacaattgtaaatagtgggtggtgatcaatgaccatactctgttttttaatacaaatactgaagaggaaatcatatgatactgtcgagggaaggccctcgatagcgggaggtcgtgagaccccccctttcgtgagtttggccggaggaagaggctcgcctcttagaaatcgcgtatccgcccctaaggctactagctagcttgcacacaatcggattatacaggttcgggccgctgtggagcgtaataccctactcctgtgtttgagattatggttaagagttacaagggttccttaactccggagagatttctccccttcttctcctagagttcaggttttctgggagtcgtccctttgctcggtgggcaagatcctccttttatagttcaaggggataccacatgcaccgcctctacctatccttccctgggagggggacccaccttaccttgaccgggccatgatccgtgccttcgctcagaagctaagcagcagcccgtcctaagtgggacccagcgccaccccccgcctgacacgggggacagccctgtcattcccttataaatgggtgaagacttgtggtggtccttctctcatggagggaaccccgaattatgccctgatgggacgggtcatacctacttccactccgcctgttacagaagcgacgtgggggcacggccgcccgttcaatcggatgtaaccggcaacaggccggtcacagactggttacatccgattgacgtgggtcagctaggcggcaccgcacatctgcccttaccgcattaaatgcggtgagggacagttgaggcgctgcgcattgatggctgttcagcctcggcccccttcctgctcgctccccccgccacatggtagctgggcgagggcctcgggacaaggcagcgggagagcccgaggggcacgacatggcaccccgaggccccccggccgcttttgtgactcgcgaggcgcgggagtagggctaggctgtagagccacgcggctggatggaaaggtaactttcccccacttcgcatacccccaggcccatctccgacagtagcccctggcaccatattggacactgacctcctgaggtcggtctgatgtggtgcctcacgacttcccaagctggggttgtgggcccgacagggaatctaaggaaatgtcgccgagtggccaggttggcatattaaccacggcagcagtttgccgccactgaccacgctgatgatggggatgtttaaggcgtgaaaatcggggggtcggtcaggccacgcctcgattctcttgcccgctactcatgcggcggtagtggtgacggttcactcaggttgtgtccgtgaccgttgtgcgccctactccgagtgtgccgctgataggcgcactaaatgcagggcgtggattcaatgggcgacgtgatgagttgacgcgggaaacgaagagacaaccgtgggcgcgagaatcgtgggggcaaccgtgagggcgtgaaacgaggaggtgagcgtgggtgaggcgaggataaaaggatacggaggcaaggatgttgtctccttcctttcgccaactgcccactcgtcttctcgctccttaagccctaacattctcaccacttcacactattccgcgcgccaagccctccgccgcttctccgccggccatcatggctcaagacgctggcgacacggtgctcccggcatcacgcattatggcggatagacaccttagcctcccccgcaagatcatgccggaaggcgccgtcgtgagggcgggggagttgcggccgcggccgctgtatccggagcgatccgtgcacctcttgtccttcgct

SEQ ID NO: 2397 - DNA, 2000 bp, Oryza sativa
  N_region (1052)..(1052): n = any nucleotide
  N_region (1424)..(1424): n = any nucleotide
taatcacatcgagaagcacactagccatgccctcctcaccttttcccttcatagtggccatcccatcctgtcggcgtaatttgccacagttctcatgtcctcatcctgtggtaaagcccccgacccacccaggagctctattaaacatcatcttagtgaaatagtgatgtcatgcatggtaaaaaaaaataatgatgatgtcatgggcaactgtagtgtcattattagatcaacaaatacggaagtgaaatgaagttcatccatgcatacacaggggttattgtataggtttgcggctatccatgacgatagatgattaaaaaatagcgtgtatgtcagcttcacaggcatagatatgtaatgttcatctcttatttatctgagagtgacagaatttgcatctctttaatagtgattgacatacgatgtggtccacgcaaataatgggcccatggtaagatccaaccataaccatgactaactaggtgtggctgagggagaccattgagcgagctagctattcaaccatcgagagtctaggggtggtaagcccaatgacgtgacaaaagggtcgcatcgccatattgctcggtggtcttcttcagacacgctcgactagtcatggttatgattggacctcgtcgtgggtccaccgccatgtggatcatgccatgtcgtccactgattcttaagaaagggacacaatgtctgcctcagaaaaagatggtgcacagggagcaccccttgccatcgatgctaacacaattcgaagaaaccatgaaacaccgtccgatgtttttgaataggatcagaagtccgactactcatcatgtcatgttgagatatatagagagtgtttgggagagagggactaaatctagggacttatttttttggagagagggactattagtacctctcccaaacaccctcatagttacaaggaagatacctctgcctagaattaccctgagaaattagcataggctggctcgggacttgtctctgggctgggtcgctcctgctcccgccgtggttaaacagtggaagtntggaaccaacggtagtttcgaactttcgatgaataagaatcagtgtcacataatagtcttgatacaaccattccaaagacgttatagcaagaaagggaaatctcgcaaccttcaaacaccagccgtgatgcacgtttgtctgcgttacgctcgaaaaggaagcgagaagcgaactagtggtccccaactcggcaaaaaccatgatctcatgacatccatcaataccgccgcccccacgcgtctctgctattggtggtgttgacagcccaaggcccaagtgtcacacgcctttcgccaatctgccgtggtgctaaagcgtacaactattctgtcaccgttaacattcggccaaatcagaaagcattaaaaagnaaaaaaaaacccagagggaatcgaatgacggcatgacggagttacaaggcggagaaaaaaaaggtgctacttttaccctagtgatgaaaggagaattttacatagacttgagttttacacatagaccaagtctatctagtatagcgaaataatagaaataaacaataggaatcggccactcgatccgcgacaacgagattccgccgccgagaggtgtttgtgcaccggaaatttcacccctcttttttttgggccaaatccgcgtcggcatcggcatccgcgaggcgtcccaatcccaatcggcaccaccccctcctgccccgtgacgccgccgtgccccgtgccgtgggctcgctcggctcgatcctggccgcgacgcgacgggaccgacccgaactctctccaaccctcctctctataaataccgcccctccgtgtctgtgccgttcgatcgcacccgtaccgaatccgcgcccctgaaagttttgcatgccgctgtcgaagtcggcttccgcgtaggtgtggtcgtcgtgtcggcggcggcggcggcggcgggaggaggaacgaggaggacac

SEQ ID NO: 2398 - DNA, 2000 bp, Oryza sativa
taaatagatgggctaatttgaggctaaagtgaattagccccccttaaaacattagcccctccaaaaagtgctaatggggctaattttgtgtggggagtatcaaaaagcagctctctctctctctcatctctttttactctctcttcaacttttagccttgaattagcccatggatctaaacatacaaccctaaactaatgtttagcctactgatttataactaaacattagctcttataattaatactgggctaatctttcaaacaaactgagccgtcagtcgtcactgtgctaatgaagtaacccacccctagccctagcaagcgtcctgctttcgaattcacgtgttaattgattttgcgacgtcacggtcaggccgtcagggtagagaggtcggtggttggtggatgcctgtgagtgacgaaaagttcctttgcatccaagctatgattgccgcgcgcgcgggcacgttctggcgagttctttttggatgtagctagtttgttcggtgaattctggttttactgccattggccacctaaggtgtgtttagtgcacactaaaattaaaaatttagttaaaattggaatgatgtgacggaaaagttaaaagtttatgtgtgtagaaaaattttgatgtgatgaaaaagttgaaagtttaaaaataaagtttggaactaaacattctttaattacataagtagaatggaatgccgcaccacattctttaattgctatcgtgctaaacatttcattccgagttttacgataggccattatttaattctacgttctaatatgcttgtcaggttgatatacaacttttagttttggtctgagataatttcttttccatttccccattccttttgcagccgttccttgatcagtaaatatacctattctgctcattttgcccttgttggagttgagctcacgtatcttcacgtcccggctcagcggattgcctcctggcccaacacctgctccatccgccgctcctactctgggcccatgcttctggcctgacccatcgtgcaaagtgcgaacgggctatctcaggcttgccgatatacagcatcaattcagcccaaccataacacaactcccggactgcaaaatttgatgggccatactaccactacttccaattacaaatgtaggcccattcgcagattcgctattgatgcagatcgatcacattacgggcactagagagatccagttttgttatccgaatttcgtatcttgagctttgattccggaagataacaacaaaatcttctagattcacacggcgattagcgaagagattgggccttctagctttgacatcgcaacgtatggctacgagtcgacccaaaaaaatcttccatcatttattttcttagaggaaaaggccaaacaaaatttaaaagggaaaaaaaatctccaagcattaatgacgctttaaattactaccccttccgtgcctatccatccaaaatttcccgtttcgtttaaacttcgttgcgagctcgagcccgaacccgagctcaccgcacccgtcgcaccgcaccgcaccgcaccgaaccgcgcgcggcaggaggagaccaccgtcctttcctctccgcctcggcctcgctccctccggccccgaccgacggcgacccccgcgaccgccgcttcctccccgcccccgccgccgatctccgctccggctgctccaggcggcgaccttctccccctcgcgccactggggggatccaccccggagtactgagcatctgttccaggtaatccctaacccccactggcggcgggtttcagcgatcgaatcatcagtatgaccgcgagattccgcgtagttcctgcatgtttcggagtatcggagtaggtgttggatttggttccctgcgcgctgatgtgctaatgctgtagcctccgcttgtttccatctacagggaaggggagcggcggcggcggttttggtttggcgttggtgagttgattttgatggta

SEQ ID NO: 2399 - DNA, 683 bp, Oryza sativa
  N_region (45)..(45): n = any nucleotide
  N_region (67)..(67): n = any nucleotide
  N_region (88)..(88): n = any nucleotide
  N_region (150)..(150): n = any nucleotide
  N_region (158)..(158): n = any nucleotide
  N_region (199)..(199): n = any nucleotide
  N_region (203)..(203): n = any nucleotide
  N_region (218)..(218): n = any nucleotide
  N_region (343)..(343): n = any nucleotide
tccccatggtgagtagatattaaccatccccgttacctaataggngaattcactacggggaaacggngaaaagccccattgccatctntaatccccctcaaaaggagcacgaatctgcacggcccacacagccagccgctgccgcctgtngccgccancaccacaccaccgcctcgttgctgccgttaacaaaccaacnaccngaaaaaaaaaccatngggcctcgtcttttcctccatttcgtgcgtgagcgtgaccttggttgccgcgtacaccaccaccgcctcgcacttttccgccatttgtccgactccacccgcggcttatccctcctttttttttnctttttcccttgctctcctccgctgtttgcttccccgcctcgtcttctcggttttttccgtgcggtcgaagcatcggttccttataccatacctttgcccccgttcttgattcggttcttgccaacagctttgtaacttctcgggcgcctcattggagtttctttgtgagattcgcaagggggagaggaggagtcctttggtcaagcccctgtttctccatttctggttctctgtccgtgcagatttgctgaggaagtagttcttgggttcatcagggagcgagaggtgcgggatttgaaggggaagccgcggggcggccgggcctgggcgccggggccc

SEQ ID NO: 2400 - DNA, 2000 bp, Oryza sativa
aattttgttaagaggggtgagtttcgaatcgggatcggcgagcccatactttaagaggatatcttgaaataatttcaccgtaaccttaatttacgctaaaatccctaaacatatttatattcgtggacatggcgagtacatgccacgtttcttctgctagtaatttttcacataaatttttttttctcagcaagaaaggctggctatatactccagtgcagaaagagtgaaaaagactacaccaaacaagcatgaggcgtgtggaggcatgaaaacagtacgtacccagggcacagcagtgaaaacatcgatctcttcaccctgcatggtgtctccttaaaatctgatcgatcgactcccaaaaatataagtaaaatactcgagtcaaaatgcatcagtttgcatgcatagtgaaacagcagcaagctggtcttccacaggatactttttgacccattcctcctatacatgcatgtaattaatcacaaagttgcaaaaaatacaatactatgattgtgtatttgtgtgtactatatataaaacaaataaattaacctagtagtaactgatcagtatcgatcgagagtcaacaaaatatatgtagactacgacgatacgtgtgtgccttcctgttttcttttgttcttatctttgggccgcactatacgctgcatctatactaaacagtagtgaaaaatctacctctccaccactcaattattacgccggtctataataattcgttgtataaattacggggcaacagtgaattattcatgtgctcttgcgtgtaggattgccaaacaactgtttcatggtcagataaatgaaaaaaaagcgacaaattggtaacaataaggaaatgttaattaatttatgacatgtattactttcattaaaaatataatagtttctgactatacatgtatctcggaggtacataaccaaaaattcttagaggaagtataaaaaaaatgttttcttgttattggctaccgaggtctcccaaaaatccaatgttgtacaaatactatattacatgtcaatttgaaattgtgttaataagtaaaaaaggacactccaatttctccatatcctcaattgaggaaatataaaaacaaaatttgtttaaaaaaatgtttcagggaagtataaaaaatgttttattgttcttggctatgaggtctcccaaaaatccagtgttgtacaaacactatattacatgtcaatttgacattgtgttaataaataataagtcaaaaaaggacactctaatttctccatatcctcaattgagggaatatataaacaaaaattggaattgaaagttgaaaccatgcaccactagtctctctctctctctctctctctctctctccccttccatctctttctctcccctagcaattacactacgccttctccataaatgcgattgcaccctctcaacactccgcggcaataactccttcgcccccctctccacattctcttccacctgtgttccccttttcttctcctcttcttcttcctctcctcctcctgatcctgatcgagaagatctcaccttgatctcttgccgtgtgatctctagctctcgctagccctctgaaccttgcagtttgttgtttgcacccggtgaaacatcttcttttgtgcaggtaggagagacagcaaagcagagataagagttctatatttgcatgtagttcttgtcttggatctcaactggctggctgtctcctctctgcagcaaggttcgttgggctagcttgtgtgctagatctgtttctacttgcgtttgcgttgcttggcaagcaagatgatatatatatatatatctatatctatctatctatcattctatctccctacatatttagagctagcactttgtgtgttctttgggtttgggacacactcatatacgcgtgttcatgagtggaaatggaaggagctgcaagggcaagaattagggtttgagatataggagtataatg

SEQ ID NO: 2401 - DNA, 2000 bp, Oryza sativa
cccctctctcacctccatcgcacgacggatccgacgacgtttgaccgcggatggatccgaccgcggtggtggcggtcgaggacggatccggcggcggcggttcccgccgacccctctcggctccctcccgcggtggatctaacggcggcggcggcatcggcggcgaccgcatgtgcatctgacagtggtccggtgcaacagcaaatccggcggctgctgctccccatccccggcgtggcgacgcgaccaggagcggcggtgggcttgggagccggtcgtggcggaaagcggcgatgccgacgacgacaatgacaacgacgatgacaacagcgacgacgaggcggctagggttagggtttggattttatttttgatttgggatgttgattttgtggggattgttgattttgatttgggattgcaattgagtgattttgtgattcatgtattttgggaattggggacaaaggtgttgggagcaatcgaccgatttgctcagggattttttttaaagacggatgactcagactcaaacaacaatgacggacgaagcacgtattttttttaagtaggtatatagattttacaagatatttttttgccaggtccgattttttattaagaagaaagggtgcctaaattacaattgtacaacaaacaaggttgttgcggcttcgacactaaacgctttctaatgatagccaggctacagcttcttaattttgcctcgtcaattttctccatccactcatctttgacaagattgacgacagtttccttgacctagaagcaaaacgaacttgtaaaacgaacttgtaagaccaatttgactgggatctttaatcttaaaagctggatgggcatgttcttgcaatcccgtgtccgatgtgatctctgacgataaaaggaagggtgtgtttagttcacctccaactaccctaaattttcaactttccatcacatcacatccaaaactttcctacacacataggctgtgtttagttcacaatgaagtttggaagtttggttaaaattggaactgtcgaggggtgatccactctagcgggagattcgtgagacccccctttcgtgagttcggccgggggaagaagctcgcctatagaaatcacgtatccgtccccaaggctcctagctagctcgtacacaaccaaattatacaggtttgggccgctatcaagcgtaataccctactcctgtgtatgggatttagactgagagttacaagggttcctgatctcgggagaacacttttacttccctcctccacaagctcaggttttctgagagtcgtccactttctcggtgtgcaaggtcctccttttatacctcaaggggataccgcatgcaccgcctctacctactcttctataaggtggggacccaccttatctggactggaactcgacccgtgccttcgcctggaagctaaaccacagcttatccttgagcggggcccagcgccgtccctcgcctgaaacgggggacagccctgtcattccctcattaataggtgaagacttgtggtggccgccgtccgaatgaccccccgatgggacgggtcatacctacctccactccgccggaagcagatgcgacgtgggagcacggttgtccgtccagtcagacgtgaccggcgtcaggccggtcatagacaggtcattcttgaccatcgcgcgtcagtttaacacgccgcacgtctaccccactacattaaatgcaacagggggcagttggggcgctgcgcgcattaaaggaagtttctccacggtaatccgcacaccaagcccctcgtcgtttctccgctggtcatcatggctcaagatgccggcgacgcagtgcttccggcatcgcgcattacggcggataggcaccttagtctcccccacaagatcaagccggaagatgccgccgtgagaacgggggagtcgcggccgcggccgcggtacccggagcgatccatgcacctcctgtcctttgct

SEQ ID NO: 2402 - DNA, 2000 bp, Oryza sativa
  N_region (158)..(158): n = any nucleotide
  N_region (945)..(945): n = any nucleotide
  N_region (947)..(947): n = any nucleotide
  N_region (950)..(951): n = any nucleotide
  N_region (1130)..(1130): n = any nucleotide
  N_region (1132)..(1132): n = any nucleotide
  N_region (1139)..(1139): n = any nucleotide
  N_region (1157)..(1157): n = any nucleotide
  N_region (1170)..(1170): n = any nucleotide
  N_region (1195)..(1195): n = any nucleotide
  N_region (1253)..(1253): n = any nucleotide
  N_region (1257)..(1257): n = any nucleotide
  N_region (1308)..(1308): n = any nucleotide
  N_region (1311)..(1311): n = any nucleotide
  N_region (1317)..(1317): n = any nucleotide
  N_region (1322)..(1323): n = any nucleotide
  N_region (1334)..(1334): n = any nucleotide
  N_region (1355)..(1355): n = any nucleotide
  N_region (1400)..(1400): n = any nucleotide
  N_region (1424)..(1424): n = any nucleotide
  N_region (1433)..(1435): n = any nucleotide
  N_region (1438)..(1440): n = any nucleotide
  N_region (1442)..(1443): n = any nucleotide
  N_region (1445)..(1447): n = any nucleotide
  N_region (1449)..(1453): n = any nucleotide
  N_region (1455)..(1456): n = any nucleotide
  N_region (1458)..(1458): n = any nucleotide
  N_region (1460)..(1461): n = any nucleotide
  N_region (1464)..(1465): n = any nucleotide
  N_region (1467)..(1468): n = any nucleotide
  N_region (1471)..(1471): n = any nucleotide
  N_region (1473)..(1476): n = any nucleotide
  N_region (1478)..(1478): n = any nucleotide
  N_region (1480)..(1480): n = any nucleotide
  N_region (1482)..(1483): n = any nucleotide
  N_region (1485)..(1486): n = any nucleotide
  N_region (1488)..(1488): n = any nucleotide
  N_region (1490)..(1490): n = any nucleotide
  N_region (1492)..(1496): n = any nucleotide
  N_region (1498)..(1503): n = any nucleotide
  N_region (1505)..(1506): n = any nucleotide
  N_region (1511)..(1515): n = any nucleotide
  N_region (1518)..(1520): n = any nucleotide
  N_region (1523)..(1528): n = any nucleotide
  N_region (1531)..(1532): n = any nucleotide
  N_region (1535)..(1536): n = any nucleotide
  N_region (1538)..(1544): n = any nucleotide
  N_region (1547)..(1552): n = any nucleotide
  N_region (1555)..(1555): n = any nucleotide
  N_region (1560)..(1568): n = any nucleotide
  N_region (1570)..(1572): n = any nucleotide
  N_region (1574)..(1575): n = any nucleotide
  N_region (1577)..(1578): n = any nucleotide
  N_region (1580)..(1580): n = any nucleotide
  N_region (1583)..(1585): n = any nucleotide
  N_region (1588)..(1588): n = any nucleotide
  N_region (1590)..(1590): n = any nucleotide
  N_region (1592)..(1592): n = any nucleotide
  N_region (1594)..(1594): n = any nucleotide
  N_region (1596)..(1596): n = any nucleotide
  N_region (1602)..(1603): n = any nucleotide
  N_region (1605)..(1607): n = any nucleotide
  N_region (1609)..(1609): n = any nucleotide
  N_region (1611)..(1612): n = any nucleotide
  N_region (1614)..(1615): n = any nucleotide
  N_region (1618)..(1619): n = any nucleotide
  N_region (1622)..(1622): n = any nucleotide
  N_region (1624)..(1624): n = any nucleotide
  N_region (1626)..(1627): n = any nucleotide
  N_region (1630)..(1630): n = any nucleotide
  N_region (1634)..(1634): n = any nucleotide
  N_region (1636)..(1636): n = any nucleotide
  N_region (1638)..(1639): n = any nucleotide
  N_region (1641)..(1642): n = any nucleotide
  N_region (1644)..(1648): n = any nucleotide
  N_region (1650)..(1651): n = any nucleotide
  N_region (1653)..(1657): n = any nucleotide
  N_region (1659)..(1670): n = any nucleotide
  N_region (1673)..(1673): n = any nucleotide
  N_region (1675)..(1676): n = any nucleotide
  N_region (1678)..(1680): n = any nucleotide
  N_region (1684)..(1684): n = any nucleotide
  N_region (1686)..(1686): n = any nucleotide
  N_region (1689)..(1693): n = any nucleotide
  N_region (1696)..(1696): n = any nucleotide
  N_region (1698)..(1698): n = any nucleotide
  N_region (1700)..(1700): n = any nucleotide
ccgtgccaaccacaagccagcgtggcgcaacggctttaccttttgtatagccatggttcattgcggagcaccagactgagaagtggcggagataagcccacgggggtcgctggggagtccatgccttgtttataagggggtgattatgatccaggaanggtgcactgtggtggattgtgttgtgcgaggggtactgtcacagctcctttccgaggtaccgtggtggtattaaggcacatggtgacatgttgtggggctgtgtcttgtgggtacagtggtacacctctggccagagtaaaactattcgaatagccgtgcccgcggttatgggcgggtctaacaatgtctttcgtgattagtctcacacttctcaccataataaaagatgctataactggtaataatttgtttagctcctggtttggaatggtatattcctggtttggagatagaactgtgcagccaggattggttgtacagaatggttgggcctatgcaacagggtatgttgtatagcgttggattaatattgtttaaattactacttaactattttattaaattctgaaatgtttattaaatgctgtttatgcaaatgaaaccctactatgccatcctttgttatcctgagcacttgcatatttgctgcgtggcttgctgagtatgtcatatactcaccttgcaatcattcatcagaggaagagttctacagtgatgctgatggtgtggaggattaggtgtagccctggtcaagctgcctgtggagtggagtcgtctgcgccgtttatcttatttttccgctgcttagatctttattgattgagaggaactatctacctctgtaatgacattttattcgattatttattagagtaataattgtactctattatcaatttgttattgtgtgcctcggctgattcctggacgagggttcacacacangnaanngtgttggaattttggatagaaattccgggcgtgacacaactgttgtcgaaatgacaactgcatacgtcgaaagacgtggttactcaacagtggttggaaggaaacgaagtgtattgaatcttgaatttcttcctttttctcctcctcccattacatggccctaggggactatttatagncncattacnggttcttactactagggnttaggttatacangggaatttacatgattacccttacnaaagggacatttacaggggtacataatgttataggggctcatgggcccctgatgggcngtcnggcgatcgccggccctatagcccctaggcttgatgggccggaaaggcttcntcngccctngcggnngcgaacttgcnatggcgaagtcgtcttccttnggcagatagtcttcgccttgcacccttcgcctgagacgcctctgncctggcaagtcactcgtacgactnttcgcctcnnnccnnncnngnnncnnnnncnncncnncgnntnncgncnnnntngntnnanngncntnnnnncnnnnnncnncagannnnntcnnnggnnnnnntgnnatnngnnnnnnngcnnnnnncgngcaannnnnnnnntnnngnntnngncgnnnccntncnancnatgctnntnnngnanncnncannatncntnngantgangntnntnncnnnnncnncnnnnntnnnnnnnnnnnnctncnncnnntggngnttnnnnnttntntnttcccgggccgaacggaacagtattgggctttcccttcgtgggctttttactgtgccgctcggacggtgggaatttaccgtttcgcctaccctttgcgacacgtggcgctttattactggtgggtaggcgaacggtcgcccgggtgagctatatattcccaccgctctttccttttcaccgccacacttgccattttaccgcgtgcgttctcttcctccatttctttcttccatagcatctcttgacccctcaagcgtttcggccattttctttcttcgccatcgcaaacgcactgttcg

SEQ ID NO: 2403 - DNA, 2000 bp, Oryza sativa
gtaagaaaggaaaagaaattgaggtattgatcttctcgagacggctattgtgttcatttcacttcagtggcatgttaatgttttagttggttccatgggacaatcctttttttatgttgatagtcggtactggattataaagggcaaggtatgcatttgcatgaattctgagagaagctatggacttcatgagagaagctatggatcaacatatatagtttaaacaaaacttaaaagagcctgggagtacctgttgaatttttttttgagggaaactacggcagacgtttgacgccggcctgaactttattgatagttgtttgtaaaacaatgtacaaagaagggaattacaaaggggataagaaaagcactaaagcgggtttttttttgaaaggaaagcggcaagagtattgcctaatatattagaggaagagaaattaaaagtaaacactaaagcggttttgaactagggattttgtattacaagaagattatcaacccacgaaattaggtgaggtttgaggcgaagggggcatctgtgagaccagaggaggagctcgttgatgcagcactgtcggagacagcgatcgaattcgtccgtgttgttgaaggctttgttgttttggcatttccaaatgttccaagtgatcgcaaggagaattgtgtgccaaatccgttgaattttgaacatgcaggtaatgaaaaaatataagttgaagtaaagtggaatttattggttggaaaaaccagcatgatggaatcatgtaatccatctcgtgtatttgcttgtagtagcaaattatttagttaagccaagttcaatgtctttctgcatattggcaaaggttgtaattgatgatcatctttgatagattggctggggtcagttactctctgctacctgtcatttcgttggagaatggactacatggtgcatggtttgcaagtgtcagtctacagcaaattaagttttagtcccgttgcagtttcatggtacttattcagcgtgtaatatccctgaagacaagctaagagaatggagttccagttagattaggatatatacatggacatcttctgaggtaatgaatcattgcatggtataagttttttcccatttaaattgttcccttttaaaactattttcttatacttgattgaaattgaagctttgagaatatttgtatgagaatcggaggagctgtttagcagcaacctatgagtaacatcagatgattataagttttttttaaaaatgcaacattataaacactttctcaactggagtaataattattgtcatgacactgcagacatgaacagcatggtatttgccttggtatcttacccttttttttatccttgtttgggggcctttttattttagtgcttaaaagtagtaatcgagcaatcatgcaacacatattgtatgtcttagtccctttctagtaagaggcagtgcaacacctaacacttcatttaactaaatggacctccacattacaatttttcattaatacataagccaagttggtttgtttgtcctatactcacctgtattttttctcgttcatgccttgtaattagtatggtttccatttttcaatccatttaagtttagtatggtctcaaagttgtccttttaaccagaatatttaatggttactatatgattggggctcaatgtgtgacctctttacagcccaacttatccatatcgtactgtgattcatcttatgtgtattagtatattccaatgtttctagaacatagtcataactattccaatggtacgcaaggaatgagttcacatgcactatgatctcctaaaatagtagctaacctaggacaacttgtgcaagattgcataatttggattgcatatgtcgtgatctcgatcttctggtgctgcctaccatcctatgtatactaattgcactctcttcagggaaccaactatatctaacacttgtcttgattggaggagcaatctaggcaaa

SEQ ID NO: 2404 - DNA, 2000 bp, Oryza sativa
  N_region (117)..(117): n = any nucleotide
  N_region (435)..(435): n = any nucleotide
  N_region (563)..(563): n = any nucleotide
  N_region (1116)..(1116): n = any nucleotide
tggcggaggaccgcccaccagcatctaggcgctgccgtgcagtcatgaccaatttggccacatcgtccagccaacgttgggctggagactccgggtcatgggcgacgggcgggtgangtaggagcgcgcccgcagcttggagcgcgccctggggcgtgctgccgtcgccgtagacgaggaggcgacgctccccatctcgccgcccttctccacctcctgtgggtgtcgaagtcgcggatccttcggccctctcgagcgccttctcccgcctaggactttggcgtggagggggcggtggagtacgagctcgacggcgtgggtttggctccccgtcgtcaccgctcatactcggggagaggtcgtgcgcctttgctggctcggccattgggctgaacaggaaaagcttggcgcacacgaaagagtgcgagagctcanaaaatccctcgcagagccccctacctggcgcgccagatgacggagcgtggggctcctcaccgggagaccgcgcaggcccccctttgccggttcggccggggactcagggagagattctaagctctctntatgtggaaggctcgcgagacaggaaacacacaagacacgggtgatgtatacaggttcgggccgctgagaagcgtaataccctactcctgtgttttgggagatctgtgtatgaaggagctacaaagtatcagccagcctctcccttgttctgggtttctaatctggaaaagtctagtcccccctctcagtggacaaggtcctccttttatatcttaaggggataccacatgcaccatttctctctttttttgtggggacttacccccccccctttttcataaatggacggagatttgtatagttgccgtccgagtcaccttctgatgagacggcccacaactacctccactttcgccgggagcaggtgcgacgtggaatcgtggctgtctactaacgacatgaccggtatcagaccagtcacgtcggtcattcttgtccaccacgtgtcagcttagcaatctacatgctcgcccttcttcacacaacatcttgcctgtaatggttaggatgaagcctggcatatatctgaccaggactaacgtgccatctctnggaggtaacacgctagctccagctggggacgagcgcctagaagccctcgtcctgacgggatggggcgaggcgtgcgtcagatcgcctgtcgccacctaacccgcgatctgaccggtctgtgactggtcacagaccggataaacgagtgcactgcactgcgttacatgcggcgtgacacgctcagccaaaccgcaataaatgtggttaggtgagccccactgtgctcacctaacccatacacgcggagcaaaaacccacgaggggtcggggcgcctcggccctcggggccgaggggggttcggcccgaccccctcggggggactaagaggagggcgaacgcatcaccctcgggcccgacgtccctcgggggtaccaggctacgtgtgcgattgtgtctgcctcaaacctctagtcatgatactcctgatcccatgtcaccgacaaatatggttacgacggtattgtaagagcaggcacaatagcatactataaaccaactataaacacacatcgagaagaacaaatttgtagccagctgcagcacaaatacaagacacaatgtttgtctgataagtgggaccaggtattactagtgtggtacatatttataaacaactattgtataaattgactgttaaattaactatagatgatttgaatctagtactattaaacttgctctaaacctctttgctcattacctgggtaagaagttaggtccccatcgtttggttttttatggaataaaaataaatttataggtaaaacttttatatagatgttcttggtggcttaaaaatcaatgttgaaaaagaaactatattgaaaatatcacaaaatcaaaaatttaaattttggctttttcttttactgattaggccatc

SEQ ID NO: 2405 - DNA, 2000 bp, Oryza sativa
tcctctcatgtcgcgcgcacggctctctcgcgcttctctcggtcccaggtatgcttccactccctcgtttctttatgcattgtggatgcagtgtatggatgaattagatgtatggatgcagtggatgttttttgcattgtatagttggaagaattagatattgccatgcagtggatgaattttgcatgatttttgggggaaatgccatgttgggatgcagtgggctgtgatggaattaatttgtgatttttgggggaaatgccatgttgggatgcagtgggttgtgatggatgtatttgtgatgaatggccaatgatgattgctcaagaaccacagaccctatacacttgtgattttttgggttttttcaataagaacagaccatctacacttgttcattttatttgggggggaattgcagtatgggatgttttgcaaaatggatgcatttttggccggcctcactcttgttcttgtttaggtttacatgtgggtttttaatgcataagaacagaccatatacacttttgatttttgggttttttcaataagaacagaccatctacatttgttcattttatttggaggggagtggcagtatgagatcgttttactgttgcatagacagactctagacttgttcttatatggttctttgcaaaatttttgggatatttttggtccaatgggatggatgaattgatgtgggctgtgatggttgaattattatggctgtttttatatggttgtttcttttttgcataaggacagaccctctacacttgttcttaatttcttttgggggtgggggcagttgcaaatgatggtaattgatgcataatttctgagcaaaactgaggccaaacttattatatgttatgacttgtgtttttttaggtacaaaaataatatatatgtgacttgtgtagtatgggctgttttgggtcattttgagggaattgagatggatatgcatagaaatctgttattaaatgaagttactgaaattatggcatttaggagaatatgaagtgtcccggttgccaaatctggtttggtcgggttactgcctgcacggtaccgaccaagacaaattggtaaacagaacatttcgttcaaatacaacatttctagaaatctgttatcgttaccaatatcctagattgttttcaaggtcatttctttatggaaccccattcccataaatttattatccaaagatggttgctgtatctatgggaataagggttccataatgaaatgatcttggacgcaatctaggagtttgctgatgataacgttagggatcttggataggaagggttttggttgccctgtgtgttctatctgcgtctgcctcgtcagcagatatgtagcatccatattccttagggccggagcagacgggatctcgacctcgacatccatatcccactagaacttgctaccgttgccactatcttatggtagtgacattgatagcaagttcgagtggaatactgatgtcgaggtcgagttcccgggtgctccggccctattgagcatggatgctatggttccgtcgacgaggcgtacgcaggtaggagatagaggtatatcaaaccaacagagaatgtgtgtagatgcaattttgtgtttaaaaagtactttctccccgtacaacagtgacataggacatgtcgcagcaaggcgaaccgatgtcgacgaccactaataggactacatcaagccggaatcctaggacccagaataagattcctaaggaagtctacaccataacagaggtggacgatgttggatatccgatggctccgacgaaagctgtcaaaaagttccctacgatatgcggagtcctagggaggcggaacttcactattctgaaggaccacgttgatctggtccctcaagaagaaaaagaagaggcctggaagcagttcaaggaaagcttccgataccctacagaggccgaggctggactcaagcggcaggctatccgcaag

SEQ ID NO: 2406 - DNA, 2000 bp, Oryza sativa
  N_region (1170)..(1170): n = any nucleotide
  N_region (1206)..(1206): n = any nucleotide
  N_region (1232)..(1233): n = any nucleotide
  N_region (1235)..(1235): n = any nucleotide
  N_region (1250)..(1250): n = any nucleotide
  N_region (1289)..(1289): n = any nucleotide
  N_region (1291)..(1291): n = any nucleotide
  N_region (1330)..(1330): n = any nucleotide
  N_region (1681)..(1681): n = any nucleotide
gctcacttgtcagcacaaagtggtgttcatagtggctagccttcatcacaagtgcatttcacatttggcttcttttttcagcttagtgattattagttggccagtcagtctgtgaaatttatgtggagaaacggctatgtggtgtgtttttatcatgacttatactataataactatgttagttcaggtataaccggttatcctgataatatagtatgcttggtaaaattctcgttaatcatcgaaattctcttggctctttaatctttttcgtgacggtgtttatcaagcttgcaaagttgcaatgccagcatcttatgagatttcagcagaatgttgctgtttggaaaggtagttgttttagttttgcagttttgtgaagatgggaaaaattcatgtgtccggttaagacctgagctgcgtatattgaaattgcagatttctgaagagaagcttttgaactacagcctgaactgattactgaaccaaattctccatatttcgggacgaagaaaccttaaattttggaggaatttcgaccgaatttgaataaattctggcaaattttggacgaaatagctccgtacagtgtactacctcagtttcatatcatagatcgttttgatttttttaatcgaactttttaagtttaatcaaacttatagaaaaatatagcaatatttctaacactctcaaaatatattcaatattatatttattgaaactaattcggtgtcataaatattactaaatcttttttcaaatttggtcaaagtagatatgaaacggagggaggaaatttcgaacccaagttggaaaccctgctcatatgggcccaaatttcagaccgtcgattcggaaataaacgggccggataagatgattttggctgccgaacacgatcaaagttaaattaaataaaaaaaagaaaaaaacaaaaacaaaaacaaaacaatccgcaacttgcagattgcagaagcttctccaaccttcgattctcttctccaccttcttcttcttcttcttgccccttctccaagcatcgccacccttcgccgccgccgccctaaaatcgccgcgagagcgcgcgcgcttctcccacccggcgaccctgagagtccgaggcgccattgaacccctgacccccccacccgctcgccacgatgtcangcgccaccgccgtgtccaggctcgcgcgcgccgccngcgccgcggcggcggcgcggggccannangttggcggccggganccgctcggggccctcgggtcgctcgctggaaacgcttcngnttccgctggtggtggggcgaggaggcccgcgtggttcgngccgcccatgggccggctcggtggaggcgggctgctggttccgccgccgccgccgcagcggaggctgttccaccccacgcaggcggcgaggtacagcacctcgtcgtcgtctcaggtctgggttcgcttctctacgcccgtgcaattatttttctcttgtcagttggttgctatagtggtggtgaattcaatctcgcggatgctgtacatgtgtcggcaatgaggctattgtgaatgaaactgttagtttagttgcgaatttgcgatacatgtttgataatctactgcattaattggatactacggtttacatgtgtaatgttctgctatgctcagtgatcatgttgcagntgcatatgcaaaagtgtttagtttcaggcaatttaggatgtgcaatgtgtcagtgtttaacaatttcatgcctagaaaaccttgaaggaaagcagttgctgatcattctataggtttggtgaaaactgagaacagctatgtatcagatttgataaaacttggtgattactatgaaaactgagaacatatggtttgcagtttgtggatatatagtcatatatagacaatatgggaaagttccctcttgccaacaacagctgactaatagatgggtaatttttttcggcgaccaaacagataactccaggagaatttactg

SEQ ID NO: 2407 - DNA, 1303 bp, Oryza sativa
  N_region (14)..(14): n = any nucleotide
  N_region (166)..(166): n = any nucleotide
ggttaaaaaactgnaatatagacatagttttagcctagcttaaaacttgtcaaatttaaacatacaaaatttaaaaagtgccttctctaaagattcataactaggacatgtaagttttttttttaaaaaaaaaaaagactatacatgcggttacatgtaattaatngaaaaaaaaccaaagatttaattgaaagtcatcagtctttgggaccaaatgaaaacccattgcagacgcaatgggcaaacagactaaattaacttcgatccttagatccctctgccttgggtaattaaacttgggtcaattcagtcaagactatatgagcatgatgatgttactacagattgtttaagaggtcaatatccctgtcaaagatgctgtcacaatttaatttggtagcacagacaacacttgtgataactagcctacacatcaggttccttgaatcctaggcaagcttcaacagtcataactaagaaatatttgttcatacactcaacatagcattcattaatcatgttcttatttggtaggcctgaggtcgaagaagccgtccacaacagcattaataataaaacttttattgctgttcattatttgcccttcttttaataaatgaatgggaaaattctcctattttgagttcagccctttgcttacgataccagcctttctcaatcaaatggctcaaaattaataacagtttcaaggaggccccctgatgcaagtgcctagactggtctgaaaaagatgcagagatgaaaaggagagaggcagctaattttaagtagtagaaagtgttccttttgcaacaggttctttatttttttattttataaggcaattaactactgagggagcaatacatcattgaatgaaaacaaacttgaaaaataagagcaagcatgcagtacaatttattcagaaaatccagttcgagaatggttaaaaaaaatgtgagtgacaggaaacattaaaggcaataacctgaatttcccctgaaattattagtactctattaattttggacgctctgcaacctgtagataattattcttgttcagacttcagaggatcctttaggagaccctgtccaaacaaatttcgttttcagtatacctaattacttgtcccagatcataacacctatgggaaaaagcagatagtagacgactcccataaaaccaagccatacctacggcctaggcaaatgcaaaatataaagtgccaaatggagagcaagattcagtactagtgaagcttttcttgcattttcattgggtcactgaagctcatgctgcc

SEQ ID NO: 2408 - DNA, 2000 bp, Oryza sativa
ttttaaaatcaaacatgagtattattggttttttttacttttacctctaaaaattggacctatagtttttagagtttattgtctcgttggatttcattttttataacttttacaaatcctgtcaaacgctgcactatactcctctacgacccgtccgccgcttactctttattgccattaagattgtaaaaatcgaatataactattgtttgaatttatttttttactttctaaaagtcccaccaaccatcggcggctctgccattgtactcatgtatgactcgcccattgcctctcatttttattgtcattgagattttaaaaatcaaatatgattatcattggattttttttttgctttctagaagtcccgccgaccgccataaccgattgcttgactatctgcccgtcgtcattccttttaattgtcattattattctattttgtgttttattaatagtatttagatgtcccatcaaccaccaccattctactccattatagccctgttacttaattaatttcgtcatgtgttttaaatggccttttctttcagtagtatttatttttttattaccaaatttagttatttataaattgtgttcctacttgaaatcttatttttctttttctaatttcagaatttattatattttttgttttgaattttaactaatattgcattgtgttattttttattttcaatgtcagttgtttcaaaattgtattcctacttgaactctctttttaatttgtctaattttggattttattttattttttattccaaattttaattaattttatattgggttcttatatgtactcttatttcaatattgcttaattttaattccgcattttagttatttttaaattgtatttgtcgacgggtgatacccgtagaccggatatagagggtattggggtacgttggtacaaggatctacgtagtacaacatcaagcaaacagaagacaaagattgtactggttcagaccccttgataggtaatagccctaatccagttgatgtgggattatatgatggaaaaacacagattacaaagggaacggtggaactcaagggatccggcgagatcgtagtcgagttggttcgactagatccctggcggtttggctcctgcaggctctggcttcgtaggctgtgggggttgtgttggctctgagattcgatgccttaggtcctccccaggggtcccttttatatcacaggtcaggcggtttccaagtcgaacttggagacatcagaccctacacgatacattgacgacctagtcttgttcgagtaggactcttttcgtccgtaaactccgtgaaggatttccttaatatatgcagagggtatccgtatgcgcgtgggtatgccataccgatatgcgacgtatatcgaagggtaaagggtatacctaacccgtaaccctgacagtagcccccgacttctgcttaaatgaactcgtgtaaccattcgcgacttcttgtgtcgagactgttgtcgttcccagtgtgaggaccgtagagacatgacgtagtcgagaacaccatgtgaagcccaatggtcacgattgaatttaaactgaagtctaaaaaactgccgcgcgtaacagacccagaaatttccggcgggcatctctctcctttccttggaattcacaccgtcggtagtgtgtctatttaaaggaattttggggatccattttgaagtccgcctattgtgaagaaaacatcccgcctgcaagcgttcttcgtcttctccgctcccacaagaaaccctagctcgtcttaggtcgcatggttacgatcgaggactacattctctgcggttttctccctacaccttccgaatttcttctcttggtattgaacttctatggtctttctccggcgatctccgatcggtgatggatcttggcaaatcatcctccaccagcgcgtcgctgaagaagcttcaggaagacggcgcccttcccggtcgtggaa

SEQ ID NO: 2409 - DNA, 2000 bp, Oryza sativa
  N_region (215)..(215): n = any nucleotide
  N_region (1400)..(1400): n = any nucleotide
tggacgatatgcatgttggcggcttgcctctttttttgttgttgttgttgtgtttgttcatgatgatcgatcagtggctgtctgcgtcacagtcactactgatgctccctccatttgacaaccaatgcaaagaatccagaagcatgatcgatcagctgttactgctttatgaaaaaggaagaggggatcgatcgctttcttgctttcattttttnccttcctttctttctttctttctgttagttccattcaagtatgaatgattgcttcgttcaagatgttttattacccgtgtctcttgagagtgttagtggctctagctaattaattcccactactgagtgctaataactcccgctaaagctaagctaagctaagctagctgcatctttgtgcatatactgtctgcgtctcctattgttggcaacgtcgtaattaactttagcatcttatgatggtgcctgtctgcctgctcgaaatcgaaacggatggatggcaaattggcaatatggcatggctaagcaagctagcttgatgcagcagcaagaaagcaataattacttatttaaggtggttggatatcctcctatattcttatcgtgcttggatctgctctcagaatatccaacctagctagcctgcaagcaagagagtgtagctactcgatccgatccaatgtctctcatcacggatgagtctcctagggattgctcctcctacaagcatcagcatcatcatcgcgccatccatggtcgccgaattagccgccgcactctggtggtggcgtcctcagcggtggtgtctctggcatcgctgtcgctcatcctgtggctcgtcctccgcccatcccccccgcgcttctcgctgctcgccgccaccaccaccgccaacgactctgcctctgtcgtcgccatcaacgccgccttcgccgcccgcaaccccaactcccacaccgccgttctctacgaccgcctccaggctagcgcctcctacgccgggctccctctcaccgccccctcgccgctgatcccgcccttcttgccgcagcagggccagggcgacgccatgctctccgcgtcgctcacgtcgccaccggcagcggctgctgtggcgggagggcgggcgctgctgaggctgcgcgtggaggggcagctccgctggaaggtggcggcgtgggtcaccggacgccacgcgctcaccgtcgactgcatcgccgttgtggagctgcagccgacgccgacgccgtcgccgagcgcgatcgtcggcgtcctccagccccaagatcaggccggctcccgctgctccaccaccgtcgcctaataatataatatccatcaaaaccaacaccacaaaccatgcaaactgatcgatggatgcatggaggaacagtcctagttctngtacatgtacatgtattctctctcgcgttatgtatgtatatgtcctgtaccgcgcgcggtaaacaagtaataaatcaaagcaatctgaatcgtacaacgtatttcatgtgttgctttgatttttttggctttcagctgtggtgctctgtgtcccaaaagtaggagtgccgtacttgcattttggttttaatttcttttgttcaccacaggtctggtctggtcactctcactcactctaattaaatcgattttttattattactccagttcattcggtgtgtgaatgtgaatctgcctgtgttgtgtatgcgactatgtgcttatgaaatttcctggagtacacttaagggcggccgattttcgtcgtcataaggaacggcgcaaaggaaatttcggcccatacatatggcccatccataggccatctcagtgtctaggccagtccagtccagtccagtccaggacggtccagtccggtcccgtagagcgccggcgcgtgtagcttcctcctccgctccaggctccagcgagggagggagggagaccaccgtctccgccggctttgagagagaaagagaaagagagagagagagagcggcg

SEQ ID NO: 2410 - DNA, 2000 bp, Oryza sativa
  N_region (1913)..(1913): n = any nucleotide
aatcgctcattcaccctctctctctctctccccttctctcttccaacttattttgcagcctgctgatatcttactgtacatgctctaatacgaagtacttcgtctgctccaacagttttcagttaatccctcgtccttttttaatgctcacgcaatcgtttcgagatcccacaccgggcattgatcttagctccagttccatactcctacatccatacttcttgttccatggatcttagacagggacagcactctctacctttccctagcagtaggctagtacagctaggatctcgtttccgcgcgatcaatgcttctcactgattggacaatgattgccacatcacttgatcaacaaagcatgctggctggctggatgcacgaaaccagatccatgctttccatcacgttacacagtgcccctacgtcccaacaaacgcagccaagaacacacacatcaaaaaaagcattaatcgatccatccatccggcaataaactccaagagatcttcgatacggttgcacgcctatatactctataataaaactgtcgtttatcgcacaaaacgacggtggatgtgcacatctaccaccgattcgtaaatcctaaaccgcgttttaggaggatgcagacgacgaagattatcatcggttgttgatcgcactcaacagaatccatttcggttctgcaatacaatatacgcagcggttgaaggagccccaccatgtaaccatgttcatacagaaggtcagcgtctccacggccgtagtgttggcggatgaccaaggtccaaatgacccccaatctttagtcgtttcggattctttttggcagccaatctccggggtctgatctgtattgtatctgtgctttaagccatcctgtattacgcgtcaagaagccagacaaaaagctctcttcctgcccaaaaggtgacacaaaaaatgaaccaactattgtctactgcgggacttccatttgcaagtgaaagttttgatctaaaaaaaagtttggtgcctaggtagtagttagattcacataagggaatatatccagcaatggtgacaacttgtacgtggtgtgtacagctgatcactgcaggagaattgagaccactctgtcgtagctttgcgtttttttgtgcgtgtctgattatcagtcgttgttcccgttggcttaagcgagccttaattctgtggtacagcaaagataggtaagttggtgattcaatattactgataaataaagccttttgcaaccatcgatggttgacacaccgctacgataattacgccatgatggcatctacaggccaccgaatctgtcgacggttacggttccaggacctggtcgtacgtccgttgtttactctgtcgtgtggcatcgcaaaaaagaaaacggaaactctgcatccagctttgtgatgtcaacatgatcctaccttcagctaacctgaattaaagattcttgatcaccgtttacaggtaaggagtagctccagctaacacctgtgttcgtgaaaacgaccggtaatacgcagatggtaaaacacactgttagccttgttgcaaatctaagtcagctacagttctgtgcaaatcttctcaggcactattgttgtacttctggttgttatgctatcaaaatcgcaacatcaacactagtacgtactgtacgtaggagggagggattcaggatcaacgcccggcaaggcaaagctttgtcaacgtgcatctctcgatctgagccgttggaaatgtaatcggacgtacgagatcgcgccgggatctcgtagcgcggttgcgaacttgcgatgtcatttgtggcatcctccgttttttctccttgtccgtaaacaaaagcaatggaaagtctcctttccaaattccaatattctgcttcgcttgtttgnttcttccctcctttcctcttctgcttctcctcctcctcccaccgccgcatggtgtgatcagccaagaaaaaccatccatccacgcag

SEQ ID NO: 2411 - DNA, 2000 bp, Oryza sativa
cgggcgggtgcgggggcgcgcgcgcttctcccagttcccatccaaaaaaagaagggatccttttcatttcattttggtagcgtggcgtggcgtgtggggtccggttggcagtgagtgcggggcgggggacgcgttcacaccaagccacggcagctgacgcgtggggtccatcatcgtctccctccggcgatccacagatagatagagacgcctgggctggggctggggggctacaaatagcaaggacgagtgaagaggaggagaccaccccactccgctgtcgggttgggttttgagatcgaaaatttttgagatttcaaaacctcctccattccctcccttcctcgcccccaaaaaccctagccgccgccgccgccatgcctgatctcccctgcgacggcgatggcgtctgcatggtctgccgcgtcgcctcccctcccgaggtcgatctcctccgttgctccacctgcgccaccccgtggcactccccctgcctctccaagccccccgcccttgccgacgccgcccaatggagttgccccgactgctccggggactccaccgacgccccgcccccggccccggcaccgctcgcccctgggagtgccggccaactcgtcgccgccatccgcgccatcgagtgcgacgccaccctctccgaccaggaaaaggcacgccgccgccaggagcttctcggcggcgccgcgcccgccggtgccgacgccgatgatgacgagggggacgacgtcctcgaggtcatcggcaagaacttcagctgcgccttctgcatgaagctgcccgaacgccccgtcaccgtcagtactcttgcggggcctttcccccattcttcctcttactacttgctttgcttatatgtacgatgatttatcttaacgctagggtgatgatgggggctatcctatcccctctcttcacacatttatattcattacttacattagagttgtatcatccctgattatccgtcaatcttattttgagttgacgctgccatttattcttttctgttggttcaatttgcatttcctgttatcgtttaaggtttctaactagttgaaatgaccatgtaccatttctacatgatattgtttgcttttgctactcatttcttatatttcttatttacgctaccatttgaattccaataacggaacaagtcttctaaaaaggcacccacataacctgcttaggtgctaggcttacatcctcccaccagaccactcttaactgattatcatgaaccagatcatcgatgttacgcacctcgtagagtgatgcttacatttctttatttctattaattgagactgcaatgcttgttacaattcaagtttaacttgttgaacacatcgattgcatgccctttctagatgataattgtttgctttggtaatgccaactggtatgtcactcctaattttcaccacatgcacacatttactatgcctagatatgtttgttttagctcataccaaatccaccgtacaattctgataatgcaaacagtattctaaaaaggcaatccacgtaacctgcctaggctctaggattaggcttacaccgtcctgccttgccagcctagctcattacatcacccaagcggctgcctaatcagtcactagacatttgtatgtggtacagctagcttctattgccatcacatgcttgttcttctggattgatgcaataccttgcattgttaaaagtgctgtcttgttcttttggggtattggtttaaccttccagtttctgcacataattcttattttgatccatgcattgtaggtaggtaaaagttcttgctattctgtcaattcattggacccttttttttttgggtagcgtttctaaccatcagattctacttttgtcttgggcagacaccatgtggccataacttttgcttgaagtgcttccagaaatggatccacagcggaaaaaggacatgtggtaaatgccgggcacaaataccagcaaaa

SEQ ID NO: 2412 - DNA, 2000 bp, Oryza sativa
ttcgatcgatcttatcatgcccagattcttccctgctcttgcatagtgttcctggcatattcgcgttgtgctcctcatgatggatctcctcaccttttgacggctttgttacctaaattattcatcagagcgtgagctaatgcgtcggccgcgttggacactttggcaaaattacctgataataactgtgggttggtttggtttgtgatctaaatagaccttaccaaattttgtcaatgccaaattttggcatgactaattttggtaaggtaaagttatatttggattgaagccaaaatagtctaagttcactattgaaacggcctattttcttatgcatgccaaaatttgtcttcaaaccaaatagacactaaacactattgaaattgacaaatattggtaagcctaatttagacctcaaaccaaatcagccctgtattaaaaaaaagatttgaaggaagagatatccctccaaacattttttaagaagaaattataaacatgttaagaattgaatatgataactcataattgaaaccacacactcccatttctaataataactgtattaatcatatggatgtgctgtgacatggcatataaccttatttttttggagaggtatgttccaaaaacatgagaggattaattatgtgcaaaaaggagaaggcagtttgtcagtgatcacaagtgttcttttctttgccaggagaagaaagcagcttgcgttggtgtttatgtatcaggttgagctgcattgatagagcccctcttgcaacttgtctgattagatttatgagaacatggacagccacttgaaatttaagtaggaccttgaaaccaaagaaatatctttccttggcaccatgggcagaaccgcagaatcttccagaaggtcctagatggcggagcggagcctgttggcgagctgtcagcaggctgcaactctcctggccttctggggtaggttaggtagactggtttgtcattacagtgtttttcttttcctaataaataataaagacacctcgggctcctttggaacaaagggttttaaaaattttgaagaaattcaatcatatggaaagctttccactaaggccctttcatcgaagaaatagtaaatacataggtatttgggaaaaaatttaacataatacctaacgtcttgaaaaaaaaaccccctgcctatctctctatagtttgtgtctgttttcgtgtgctttatccaaatagtcactcatgtggcttttcttcaattagtaggatttgaggtagccctcacagcctctacattttacttgtttcataatcctgtgttctttttgtttactatggttttgttttctttaaaaaaataatttcgttgaaataatcaaacttaactcgaatttacatcatacaatcaagggtaagaacaacacatcccattgagtaggcttcactagaaggcctcatttccaaagctgagctaatgaaggagggagtttatcattgacatgtgaggttcatcatttttttttaagattgaaataatctgacatataggtcccacgctatctcagtcgccacatcagctaaaactatgatgaatattgtcttggaaccaaatgtgacccagttgtgtaagttgagagacgggcggttcagggacgaatttcaaactcaacaactaattaagggacataaggtaaacttaatccccgagcatatgatcagcccaatccaagcatggttacatacggcccattagagcaactcgcgcggtgtccaacccagcaagcaaaggtaaccgaagccgcgttcgcctccttcctcctcgagtcgtcaactccgtctcgcaattcccaaaccgcaccttccaatcctccgagcaggcaaaccctaaccccgacgacccgcgccccacgaaacccctcccctccgcccgaatcactcgctgccacccccaaattcggcatgcccgtccccggaaaccctaggcactgacctcgccggag

SEQ ID NO: 2413 - DNA, 2000 bp, Oryza sativa
aactccaaacacacgaaactcatcttcaagttccccggaagtcactcggggatccaagttgccaacatacaagcgggccatcgtgaacaaatccctgaagtaagaaaggaaccaattatagctcttccctaaatatatttctacatgaatgcaagaggaccaaaagataaatgttacaccttcagaccataaactatgacttgctacaagctaattcaagaagcttttcaagctttttactaagagtgcagttctgaattcatttcatccacatagtagtaaagagctaggtgtcagaaatctgaagctgatcgacacaacatgaaacagccataatagtccacagtatcgactttggagattcttacctattgcagtaatccttaacccaacctcggacctttcaggtttaatcagtactacctccgtcccaaaataagtgcagccataaatatgcgtgctcggcgttttgaccatccgtcttatttgaaaattttataaaaaatatttaaaaaaatagtcacacataaagtactattcatgttttatcatctaataacaataaaaatactaatcataatcttttttcaaataagacgaacggtcaatcgttggatatgaacagtgctaaaactgcacttattttgggccagagggagtatgagttaaaaagaacatatatcgcttaaagtgaagcatcacagattctccacaggacagcaacacagaactaacaacatccaatttcatacccttgcgcacaaaccaaaaatagcccaaccaaaagtagccctaatcgagagccgcccaaaaaagaaaaaaaaatcacatcccgtcacgagatgagctttcctacggttcctcaactagaaccggctgacggatcgaaccacataagcaacgaaaccgacggaatcaaagtggagatgggtttctagggttccgaaagcggaggggatcgagggtcgtggacactcaacgcatgaggtgaaacttcaaggtgcatggagttacctgcgcgggaagggtgcgagcgacgatggcgtgtggacttggcaccggcaagtccccgccgcggcggccgcggcggtggcggtggcggcggcgctctaggggcgaggagacctccgctcccgagcgatacgagggggaggagagtgacgcggccagcgtggtggtcgagcggagccgatatatattgggccgctggtttcacgcgtggcctcggatgggcctagcggatgctatccatgaatttccgtgggcttcacggcccaacaggttgcctatttttcttttggaataagttcattttgcctccttcaactcatgtccgacgtcctgctgctcctgtcgctccactgaggtcccgccgccgccgctcccgctgcctcgccgttccggcgaggtcccgtcgctccggcgagctcccgccatccgcctcgccgctctcttcatctcgctcgtcgtcgagaataaagagggaggagatgagtaactgacatgtaggctcaaaatttcttttcctttctatttaggtttctttttactttagtgctacgtaagcgccacgtcgatgcacataggataaagaccaagtcaacccgtcacgtaagtgctaggtaagagaaaaccgcctccgaaaccaccgagggagtcgatttgcaacggtctggttttacggttgaggggtgcgattcaaccagacgcatgagtcgagggagataaagtagacttattacttttcttttctcttgaccccctgggcgaagcaactgccaagtgggccctcacctcgtcgtccccgccgcgtccgggcgcgtcgcgtcgggcgcacgcacgcaccaaccgaccatcacggcgccaccgcggccacgtggcgttctgtacttatacccccctctcccgcgatctcactttcccctcatctccgctccattcccccctcccgtgtcgcagcgagaagcatccatcggaattctcgtcgaccaccgcaaccg

SEQ ID NO: 2414 - DNA, 2000 bp, Oryza sativa
gaatcatactcgggccatagttaagcgagtcaaagtatactttttcctaccaaattcggggagtgtattaaattttggcaagttatcttttgaaattttttgctatgatccattcattggctctttgcagctgagttcgatgcggttaactgtcaagcgtcaacaagagagcacattttttacatatgaatatgttgtgtcacattgtctttcgttatcggtttgatcaaatatagcgtggcaaccatatatctcttctgaggtttaaaaatatgaaacatgtttgttttatgtcgataaatctttgttccatgtaaaaacagggttctaacctactaaattagtgcttaatagagaaaatcttaggttgggcctgatatttttatcaaagtttcaactttttttaagataatgatcaaagttttactttagaatatttcatattcggtgtagctctagctctaggtgactaaagtagatattgagtatggggtcttgctaacgtcatcaatatcctcatgtactcatggaataggagtacgaggcagtgtgctagcggttttttcccaattctcaacattgggatcaaaaggcaggtgaatgcttggggcaacagaggtagtcgagcttcatgtgcagctgaggcaaatcttaagcttaaaagagatggcgagctagcaatggttgtagtggtggggaaccagaggtggagaagagagatataataaggtggtttaaatccaaaaaagataaaagtacccgactagtaaagatattgatattggatagtctattggatatagccctggtttgaagtgagaaaaagttatgtataaacataatttattttataatgtgagacggttatatggttttttgtgttcagctcacccttcttcttcgtcttcgatggccccctcaccatgaaaaagtaccacataccttccccatagcccttgtatttctatatgcatgcatattgtgttatcacaaatcaattggttcatagatatacataacttcaaagcgatcaatcaactaaagaagattaaattaccaatcatttcagaatcatgacgcatgatattgacctcattgatgaggtagagaggcggtttgcgtctcttgatcttaccgcggaggtggaagtccacgagctccttgtccgtcggcacaaagtggaagctaggacttaactgtagccgtgacaccagctcatgcttccagctcaccactagcaccgccgacccatcaccgtcgttgccgccattttccattatcggataatgtacttatgtggcttctaagttcttatggcaatcaaattgaaaaaaaaagaaaaaatatagtggggcattgctataataaactagtatttatatacgctaaaactaattgtagttattaactttttttggtaggttcttgtaaatgtttggtgtttccaagaagggaaaaagaaccaaaaagaatacttcctccatattttaatgaatgacactgttgactttttgacaaacgtttgacttttcgtcttattcaaaaaatttatgtaattataatttattttcttgtgacttgatttatcatcaaatgttctttaagtatgacataagtattttttatatttacataaaaattttgaataagacgagtggttaaacggtgggttataaagtcaacggcgtcgtacacgggagtacagaggagttgaacccgaccgaggcaggaggttacgggttacctggttcgagcgacggaccgagaaaacaccgacccgagcctagggtttggccttccccatccccctccgccgcgccgcacgtgtccaccacactcccaaagccaaaggagataccccctccctcccttctcttcctctcctcctcaccgcagctatcggggagcgccgccgccgccgccaccgccgccaccgctaggctttccttccccttcccccaccagaagcttctcgccggagaaggaaaggaggaggagag

SEQ ID NO: 2415 - DNA, 2000 bp, Oryza sativa
  N_region (1135)..(1135): n = any nucleotide
ggaaagcttcaatcctttgaatcaaagggccaaataggaaaatttcctataggatttgaatcctatgaaattcctatataaatcctttgattcaaagggtccttacattttactttctacttctccagatatttgctgtccagtccttaaaagtttggtccctacatggaacagagttcctacaaaatatcaacttgaagctaagtcattgaagttacctcacgttaaggcaatatatctgaggtcaacatcgaagaaatcctgtcctactaactgaaaggaactcccgtgtattttttcccttttcgttgtcgtccatatacttattctgcaatattgacgtatcgaatacttttgatcaccgatgacatttcaacgccgtaagaaatatgttcaccttgggtgtgtttagttcacgccaaaattggaagtttgattgaaattggaacgatgtgacggaaaagttgaaagtttgtgtatgtagaaaagttttgatgtgatagaaaagttggaagtttgaagaaaaagttgggaactaaaccaggccccttttccatggaagaacacaactgagctgtccaaatcaagaaatcaatttccacaaagacaaaacctgtcacatggaattgaaggtgccaggtgaagtttcaaagttaggcagcaccttgtaagtcgcatggaatctgatggtccttttgtggtattccattctcgcaattaatttctatggaataatttgttatgtgatgtcaacatcttctacactagcacagattcttacatctgtaacgggtccaataaaaccgttatagattatgtcatctgtaacgggtgacattggcaactgttatagatgaccagaacattcttgagctgttactgaagccgccttatctataatggctcctaatcaagagccgttacagatgtaagctcctttatctgtaatggcttcctcattgccccggccgcacaacccttccccctcccgctcttccgtgccaccacagtccacatcatcattacattcctgcaacgcgacgtcgatgtgctgccgtgcagtggccatcggtagagcagggatggccggagtagcaggaggctagcagagatgaaaccagattggatgtttttngttctttctattataaatctccacatatgtaacagcttacgagtttagtttatattttttttaagctgaattttcacatatgtaacggctccacgttttgagccgttacagataactttcatctataacggctctctagcccttacatatgagtcttcacgtctgtaactgttggtctgtaatggttagtccaaccattatagatgtgatttttgagcccttacagatgtagtgttctgtactagtgtataattgtaccttaaaccactgtaatagtttgaataggtcaatgttttattaaatttgatttctctaaatagaaatttgattgtagatttttttagaagagatgcaatacattctaataattaagagtgttttttaagagttaccaccctttttagtacaaatttgtgcactaaggtggtgaccataaaaaacgtagtaattagatagtgtaaaccagaagcttatcaaatccatattatgctgtatgggtagaaagatatttgcagcacagactgatgtcaggtcatgtttcttctttcaaaaaaaaaaagtcaggtcatgttttgccaaaaaaaaaaaagaaagaggaaaagccccaaccccctaggatgcagacagatatataatcagagaggcatagaggggaagagagaggacccaaagtatccatggcttctatgtcttaaactttgtctactcaatgagcttcagacatgtcttggacaaagcccatgtcctccctcctatgcaccatcctctccccttgttcttatccttgaaggctttcacaaactagccatggcgagttcgtctacccatggcttttctggtgttaacctcacccttgatggaaatg

SEQ ID NO: 2416 - DNA, 2000 bp, Oryza sativa
aaatttataataattaatacttaattatgcatacgataatggccttttggtttcacattcttttgcctaatcttaatttttatctatctcaaatagggtctaaaccattgtttaccatcaaaattctatatccgtgcgttctaaaggtgcctaaaatgatcaatattagagcacaccttcacttgttccatcttccatctcccccatgctctctatatttttttcatttctagttatttttattcaagacaagagaacaaacgtacaagtcaaacaaatgcacatgagcaaatccaatggatatagggataggttagtttaatcatgtgatacaatatcttattactactagtagcttagtttatgattccccgtgacctctcttaattcccctccctcctcttgaccaatgtagcacagcagcagcaacagtgtcgttatgtcagacagtccagtgtacagtacacaaccattttagtacagactgtatccactgttactgaagtattagaataaggggcagttgagattgacgttatttttaaccctattttcttttaaaaaattgttaaaaatatgtttgcgtttagtttgttattaaatttaaaaatacataagaaatcatattaaaattttgataatattgtcatctgaacaggctcaaaaagtctgatcggttgcaatagaaataacaaaacccataatttaaattttagaatttaattataaagttgatatttaacgtagtttctttagcattgatttgattttaagtcgctaagaacacatatataaaagttttacacgtaaattatttttagttaataagctattatgttttataataagctttttggtaactactaaagaccatatttttttccactttaacttttgttgtgtactactcattttgtgttgctttacttcaaaggtagcctgcggtactctatttcagatgctctccgtggttcataccggtgagttttcttttttcttttttgcctgggcaccgtgattatttgagataatgccgaactccctctgtttatttctttatgatattcgatgaactaactatcaagttttacattcacttccatatctttgatattcctctagatacaacattagtgggaaaaaaaagtaattaagtttagagtaaaaatttctaagcaaatttttaggttataatgctacacatttcttttggggttctattccgccttatatcgggcacattcacaataacatactaatacatttggagtataattttaaaggaaaaatatatatgctaatacattttagaaaaaaaatcttttactgctattgaaattgtacgaatatgcgaattgcaatcacatgtttcaaaactgaaaaaaaatacgatggcatggatggaattaacccccgaaagttgttgccaccaacatctccctgttatgaagttctccatttccctccatccccacaaattacaatcaacagggaatattctgtgttaaaacaccctttttcacttttctagccgttcacttttttttaccacagtagtttttttttttaactctaccaccatcagtttgaactggacaaacggacactcaaaaccacacacgcgtcgcgcccgcagcaactgtcggtcgcgaacccccgggagcgtgtggggagacgaaaatcgcgggggacccacggccttctcctttttttcactgcaaccccctaaccccacccactgacacatcctccccacgctacgcgcacacacacccaaaaagaaaaagaaaaaaaaggaaaaaaagaaagaaaaaagcttgcacccgtgggccccaccagctgagctagctcccctccgcgtgtgtgtttataggcttatagctgcctctcactccccctctcctcctctcctttctctctctaaacctctctctcctctctctctctctcttgagttcttggttgatcgccattgccgcggaggagctagaggagatgag

SEQ ID NO: 2417 - DNA, 2000 bp, Oryza sativa
  N_region (1309)..(1309): n = any nucleotide
  N_region (1479)..(1479): n = any nucleotide
  N_region (1482)..(1482): n = any nucleotide
  N_region (1485)..(1485): n = any nucleotide
  N_region (1545)..(1545): n = any nucleotide
cgacgatttcgccggcgagagagtgatcacgatttggctgcaggggcgtccccgtctgcccccctattcatttttctgatttctgtggttgctgccaattgaactccggtaggttacaaacgaagccacctaacaaagcgtcatcttctagtaactgaatttttctgtgaccgagtcgaagtcgaaatcgatgtgcaatgatttaacagacgagagcacaccggtgcttagatttccatattgtttagtcaactaacagccggtaggattcgagtaatttcaactaactgcatgtttgagaatttccattagagagttttgttaccattacatcgaagtcctgtttagaaagtaaaattaatgaaccagagattgtgttccaaacaggtctcgatgaatttggttacaaagaatacaggctgcaatttaagtagtctaattttaactcttaaactatgctcgaagtctatttattatgatgaaaagtaaaagataaactattttttatatctttgggttaaacgcatatatgtattaggtttcacctattttacattctgccactttttttttgctaattgctatataatcccactagtttagcatgaagatgatataatgccattctgttgtgttagatgacaccaacaccattaatttattgtgaattgactttgttaggcactatgaattataaacgcacattgctactaccttcgtcctagaatacttgattctttagaattcaaattttatcccaaaatacttgtcattatggagtactagttgtcccattaatcactttctattcaaaagttttcccattttaccctcaataaccattccacttcctatcatatattatttattaagggatattatatttttttattaaaccttaatatatactaaacaatctagaatgacgactattgtgggacgaagggagtaaaaaatatgctcctacctcagtttgagatgaggggtatttatgtcgtaatagaatgccacggaactttcaacaatttttacttttcctaatttcaaaatttaaagatacattctccaatccaaggacaccgtgacagttagctggttttcggtggtaaattgacaattacaacatgccctaatagcaaatatacaattgtttctacaattattacatataaaaatgttgagtcatatttttgtcacggaactacttttacgtcacatgtctgatacgttttacaaatgtaaaaaaaaaaaacaatggccaatggttactacagagaaccgagctactagcagtttttctcccggtganacaggaagtaaaagaaaaaaaaaacgacccactgccaaatggttgtatcaaagcatcaacaattcaccccccgcatgtgctggtagtatgacggcgtataaaacagcacatggaaacagatgaaccacaatcatatggtaaaaaacaaaaacggaagctcaccttcccancgncangtcccggctccccatgcgaccgcgcctatggacgggcgccctgcccacgccactgccccnaccgtcgcacgacggccgcgtcggtcgccacgtctccatctccctccacaccacctggtttcctcttcagtttcctcctcattattcctcctcttcccccctcgccgcttacaacatccatccccaaacccgcattcaaaacaagcaaccctcctcccgaatcgaacaaggaaacagatatcgcctctaaaacccccatcgtctcgtctcgtctcgttcccctctccatcttccgcggctttccgcgcgatccaccgatccggtttccccgcgccgtgcccggagtcggcgctccattcccgcgccgggttttggggtggtgtgttgatgcggcgggattcgagccctggcctgtgagttgggcgtcggctcggcggctgcggggtcggcgcgggcgcggacgcggcggatgtctgctatgaggcggcggccggtgctgccgactcaccaggacg

SEQ ID NO: 2418 - DNA, 2000 bp, Oryza sativa
ttgagcggtacttttagccttgtcaatttgtaaagttcacaatctctatttatagatccgcacccgcctttatcgagttagatatgaaattatccatctttgcaactggtattaaggtggtcgatcttttagctccttatcggcgtggaggaaaactcagactatttgggggagttggattaggtaaaacagtactcatatgggttggaaagtctttagtccaatgacagcaaaacaaaagcgagcgtagacacttgttttgtatttagcctccttactaatgtatgtaccgaagcagtccctttgaccattccaacgtttgttcggcctttctttttagaacagggagggggcattgatccgatcgatttctgtatcgatcatgatatacgtaataactcggacatctatttcaaatgccaaataaaacgcgtcccaagcagaaatatcacaagtaccgccgtgacctggaccgtcgcaaggaaaactatatccaaaatcttttttatccggcattaatttggaaccgagtgcatctaaagtatcctttactaaaatcaatgtagttgtatgcaaacctaaagcaatagcatgatgaaccaagaaatctccaggtcctaccggtggaaaggggagaaagaaaatatgtgcgaagaaagcgagagggttcgacgacttagccgagcgttagcgaagcgtcattctcatagcgaggtgcttcgagttagcaaagcgttgtagtagcgtcagagactacatagttttggttcgttggaaaggctcgcagcgaggcgtaaatttctaaataggtaaggtatcctagggtgtatcaccggtacccaagtaactagttgatagtagatgcccgtaattctgacagttgtgcttctagcacagctattaccatatcatctttcttcttcatgcaagttgtccccaaatagtaaccccggcggctacacaactctctcagctcattcatattcttccactcgctctcactctttggactttttagtaccatagattttcctaatgggagtgaggtatgtcttgtgataggtatcatatttcttaaactgtaacacctattagtgcttggcgtacttagagcaagtttaatagtatagacaactactagctccaaaacatttataatcaatttagtcaattcttaccataattacctataagagcagttacaataccagactactctctccgtcctattttaagtgcagccatgattttccgtgcacaactttaatcgtccgttttacttgaattttttttgaaaaaaatgaaaaagtaagtcacgtataaagtactattcatattttatcatcccataacaataaaaatgcaaattataaaaaaaattcaaataagacggacgattaaagttgggcatgaaaacttatggttgcacttaaaatgggacagaggaagtataagccagttataacgcaatgtgtgtatgacagataggaccatgtacatatactacactattaatatctggtctcacgtatcataaacacattacatcttgaaatccgtgctgcagcttgctataaatctgtagttcgctgctcttctttttccttctttttcttcttagatgtgtttatagctgactgctattggacctgctcttagatgaagatagtcagctacacagaaaaaaaatgcttatattggtagacggaggcgataatccttgtcatacggtgattgatcgtaaggaaatttccactttgccaaacaagaccttttaagtgggcccgggaagcggcggtaatcgcaccgggaatgggccggggcccgctcggctaatccgcttattaaaagggcccatcttaccccggcccccaatactcccccgtggccgcccgcgcctcgaggccccgacacacccgctcccccaccacctcgcgctcgcggcggccaccggcgcggcggcggcggcggcgtgccttgccttgcctagctcgctggtg

SEQ ID NO: 2419 - DNA, 2000 bp, Oryza sativa
cagtaagaccgtttaagtttcttaattagtgacatcatgtaacatgaattttgatgtttcttaattaattaactggaagatcgagaacaccatgtactactagtaccattttaccaggcctgtttgaagttgaaggagcaggtcaactgacgagtagaaatgcctctgttcgttttcagtccttgagaaattcagactttcagagtaggaaacgcattgattacgcggccaaatgaaatacggcgcccctataaacgagggatgcatacagtagtacagtactcgggatctgattgcaccgtcaaaatcaaaatcaaagcagttgaattctactcggggttaaaactaagttgacgattcacggatttgtttaagcaggcatcgtggtcgccatgacgcatgagcctttgaccctgcaatgcaaccaccgttttgaacacaagaattttgcgtgtcactacggtttctcgtgaaaggctttgtgtaccgcgtaggattgctacactcgtcggctgtgaagaaacatgcatggtagagcaacactactcctagcatgtttgtggtagagctccaacttctaaatttagtttcaggagttgagtctagagtggagttgcggaactgtctaaagtctaaattcagcttcaactctttagtttattttgtaagagcactctacctaactccgctcttattttaggtagagatgaaactgtttggctgagcttcagttacagaagaggtggagctggagctcctgtgccaattgccaaacaggcccaataatctcatccagaatgttaatgtagagagtggagttgtgagtgcatgatttttgtttggaggagctttagattacgagaaacatgggtaggaattcaactggtgagaatatggagaagttgtaaaaaccaatttttctttcctagtttattttttattctacaatcacaacttctcataatctgaaaaaaaaaagtttatggagctttggattcaaaggagaaaacgcaacccaaaagttcctctaacagaaaagcccataaatattgtgcacacacgatacttcataggaatctagtgacatcaaggtacttcactcttcggttgtgttaggggggtggagtggtggacacaaacatatgtgtgcgcatatattttctgcgtaataaaaaaatctagtaataaagtttgggagtacctatgcatctttcgaaagatttttatgatcatatcacacagatttttaatctttagattaaaatctaatgggcacagtaaaatgcaaaaaagcaactaaaaaacaccataatggacactaaattaccatatcttcaagaaaaaaaccaaatctaatatatatttcaaaacttacatgcaaagattcaaaaattacactgtaacttacaaaagttacactgtaaatttcataaattacactataatttacaagaaaacacactgtaaatttgagtgagaaaatcaagtgagagataagaagaaatctttcgagtgagatatagcaaaatcgataaagttttgcattgaaaccaaacaatctcatgctccaatggaagggaactatggaagtcctatgtaaatgggccaaagcccaaagtaatacacaaaggcattccaaattcgggcctgcacaagtaaaccgggcgatccagaccgtccgatttggcgcgcagaaacccgatccgcatcccgcgccgtcgcctcaccgctatccctcatcacccactgacaagttgccccacacgggaggatggcccacacgtcagtgatagagggtccgttccagggggcccacctcatttggtcccaggaaggtccttcctcgctctcctctctgtcttcctccgatccacccaaccaaccaagcgcccgccggcctcgtcgcgcgccgcccctccaccgcccgtctccaatgccaccgccgccgcagccgcagccgccgccgccgtcgtccgcgtagggtaggggcatcccgccgg

SEQ ID NO: 2420 - DNA, 2000 bp, Oryza sativa
  N_region (1374)..(1374): n = any nucleotide
  N_region (1435)..(1435): n = any nucleotide
aactacactgctccgatgatctatttgttaactttttttaacgatcaattaatcagctaaagatttacttagcttgttcggttggaaatgcagattctggaccacgaagacaacgagatgatgaggccgatgaagattgtgcgctagtacgtgtccataggaattatgtatgcacttcagtaacataattttgtgccatactcctacataggattgggatcctctgacgttctgacgacgtggtgactgacatgtgagccccaccgcttgtgggcccacctgtcagtgaccacgtccgtgtgcagttcacgttagaggatccggttcctcctatatatgtgtatctacccacgtgaacatacacatgtgcatttcaaagccatgtcaccatctcaattagacattccatttgcatttacacgcacgtattagtgtactaccattctagaagtactacattcgttttatattataagactttctagcattacatgctaataaatctagacatatacacatgcctagatttattaacatctatataaatgtgggcaatgttagggcagtaacagtgcaagcacctcgtttgagttacctcgtatgtcacgtaagatagatacacaacgaatctacacctcccacgatacaggttactatacgagatccccaaaaccaaccacccaacccattctctctcctacttttccctttctctctctctctcactttcccctgtctctcagtctcacacactttcccctttctctttacaggagtggtacacgcgatggtggtggtcgactggtcgttgtcgtcgtcgccgacgcggcgtcgtcgttgcccgcggcggcgcgtgccatccccgccagcccgactctcccttttcccggcgcgccgcctgccccaacaccaaacagcggcggcatccttaggccttagcgaagaagcggcgatgcgtcctcgccccgccctcctcaccgacggcggcggcgtggatctggagcggatctggcctagagctcgacagcaccgaccggacctcacccggcgcggggtggtgccgactggacctcgcccggcgcgggtggcgccggaggacatggagctctggcggcggtggaagaatccgagctcggcatggcatcctcctcccccggctttgtttcaacttttttaagaatccaagctctgcacatgtgtttgtttcagcttttgaagcatttgttttagctttttcaagtgagttcctcgcgtccttgttaagggacgaaagccttagcgaaggaacgagggcccacaccctctctcctccacgacatcacacagcctatgtggagaggttaaagcagcccgccacggtggtacactgtgaanggccttagaaagtcttatcacctgaaacgcaggtagtagtattctatactgcagttttgtnttaaattttttaaaaaaaccataatcatgtgaacagaacagatagtactgttatctgttggcacttagggctttttggcgaccagctgctttgagattcggacaggacacgagtcgcacgaagggacatgccccttccggatcagaggggtcccgtgctatccgtgttaaatttccttgcaccacttgcgttgttcgaacgcgacggcgcggcactgatcgtgtctcctcccctcccccatccgcctcactcactaaacaactccgcgtcgatcacccaaccacgcccgccgccgccgccgcctctcgccggagacctcctctcaccaccaccgtcgtcatcgtcgtcgtcaccctcctcctcctccaccgctccgggttgatctacttcgaaggtgagaaagcggaaccctagctagcttccttgtggttttgagggttttggtgtggtttagttaacctgccccgaaatccttctctctcccgagcttggattgatttttcttttttcattttccaacgttttcccctccgattgctctggattcggggttccagccgagcct

SEQ ID NO: 2421 - DNA, 1991 bp, Oryza sativa
  N_region (65)..(65): n = any nucleotide
ggccgccgccttcggctggcgttcccgctctcgatgatctctctctccctctctaatcttccctnatttttgttccttaaggtcctcttgaagcccgtccgcctctcgccgtccgccgtccgctgctcgccgcggcattcgctgtcggtaaggaaccccctcccatccctctctctctctcccatactgtcgacgctgttttgtcgcgtcgcctcgctttggggccgtgccgccgtgcgtcgccgtatagccgccgccgccccgccgctgtctgccgcatcgccgccgccgtccgccggtcgctgccggtgccgcgctgtcgccgcgtggccgccaggaacgtgtcgtggggctgtgtcttgtgggtacaggtgtacacatctgatcagagtaatactattcgaatagccatgcccgcggttatgggcggtcaaccagattcaccgtgattagtctcaccctagtttagtctaatggaattgattagttcaagaggatggttgggtctgttgcaacgtggtgtagcgttggacagtggatggtaaatattgtttaattattacaactgttttactgctttcaactactgtttataaatgctcgctttatgcaaatgaaccgctctagctaccctttggttatatcctacatcataccccctctttcggtatgacttgctgagtacggtggttgtactcagtcttgctctacttttccccaacccctgagtttgagtatgcgtcagatggtgtgttttcggaggagtaggcttcatccgtgccgtcgaggatgcctgtggagtggtgttcccgctgcaatctaagtcaaggcttagctctagttatcttttattttccgctgcatttatgtaagacttttataatatttgtaagacgtggatctgtatgtcaactttatcgtttgtgtaccccggccggtcctggacgggggttttaatgcacattctacttggcatcttgggtacctacctcgccaacatggtggttgaggcatctggaggcaccgctaaccacgcctgctaggaggcggcatacctgatgatggccaggcttcgtgaccgccacagctacaccttccgcagcacggcataccgcttccaccctcgccgagcagatgatgacgacttcagtaccttccacccgacggctggcgagaacgacaccaccttcagccacattttgtgccgtgatgaaggggatggacaggatgcactctgacctggacaaggcatccaaggccttgaatgatggaaaacttgtgaggattatagccttgaaggatgagataacgcgcctgaagtaggagaacgctcagctgaggggtctcccagctccaggaggggtccggatccgcaccacgcccggcaagactaccactgcacccgtgcgcactcagcttgcgcccaggaacccacctcctccagcaccttccgcatcaccagcacctctcgcagctccagctctagctcctgctccagtgtcagcccccgtgtccgccctctccttcgctccagcttcagcctttaggggtccagccagtggcaatggaggttggttgcctgctactcccagtggcagccgcgaccgcaacagcagttccagcagcttagagccgggcagtggcgagacgtacctgcaggactccaagagccgctcagagggaccaggagacgagcaggaggacgccttcgactccactgaccgcaggagccgttccgagcattaggctcattttcagttagcatatcgttctgcttagtaattgtctgttagtttgtgtgtttaggtttgttcacttgtgggtcagtcgacggtcgatatcatatgcctatgatatggctgtcctaataaggatttgcttgctgttttaagtgttttaatttagatcagaacaattgcagtttaaatttctatttaataaagcttagttcctgagcatctactcttcccctccgtctgctcctccttcag

SEQ ID NO: 2422 - DNA, 2000 bp, Oryza sativa
tgatcgagtactgcgacgagcacgccaacgagaactccgacaccgacgagcagaaagaggaactcaagaactgggacaaggccttcatcgacgagctggacgaggacgacggctccttcctcttcttggtcctcctggcctccagctacctcaaaatcgatgggctcctcgacctcacctaccagagggtcgccgacaatagcaaggccaagaccaccgaggagatccgcaagaccttcagtaccatcgagatcgaactcagcgacaaggaggaggaggagcagcagcaggaggaggagatccgcccggagaacgtctgaatcttgaagtatagtactcacttcgatctcttaacccgcagtgtttctcgtcgtgtgatggcgccatggcggctgtctcgtagttgtgtgtgttgtggctctggtagatttagatcgaattggggagttcgtgcatcctgtccaagaagaacagagtcgatcggttgtgtcgttgaatgagttgaactgctggatcgcttgcatgaagtgaatattttgaccccaaattgtttgctacgtgcctctatccgattggttttcatgcagtttggattctggtgtgagttgaatttgaatatagaagggagaactttctctgaaattctgaatgctgcgtttcgtttctgatgcatggactgatccgtcagtactgatgccttagtctgttgtttggttaactaaaccaactacctgcatgtctgaattcttctgcatccgaagcattttcgtttcagatatgcatgtggactgatacccagtatattgcattcttcagcatctgaagaatttcatttcagagatgtatggacttactgatttggtagatgaagaagaagacggccacggcgatgatgatcgtgacgccccggccgaccgtgacgactgtgcccgtggcaggagaagaggtcgccgggggcacaacaacgaccaccccaggggctaatcaaaactggcgatgcagggattgagacgacgacgattggaatgaacggggacgagactttgggcgtggccgcggcgaacaacgtgcgattgatcaagactaccgccgtgaacgcacacgctccccgcgccagcgcgacaggggagggcacagtcaccatggcggccggcgtcatcacgctggtgccaccgacgtggacaacgtcaccgatcctgtctaccccgagccacacctggcagagatctctctgccttcccgccagcaggagcttcacaccgaggtttgcatatttcgattgctgcatgctttgcacacttccccgttcaagatgcaggaaatcccggcgtgatcagctgcttcgcctcgcgcttgtcgctgataaggccatggctgcgccacctccgacggcgatggaggacctggccatccggtcttccactgggactgaagcctggttcagcggcacggcatggaagccagtgcctgttgcgcgtgtctttggccgtatcagggaggccttgccggccacgccagcggtcgaaacgccgacaacctaccagcaaattgaggaggcgctgatgcgccttgagctcgctgccgctgcagctcgcaccccaggcgatgacactctcctaccacagcccatgtcaccggcacctctcgcagcgtccccgcctcgccgcttggaagatctggccagcgacgctgtggccgacaagattctgccggcgccgctccccggggcgctgcttccccaagagatgacccatatgccagccacccggcccctgtcggcgctggagccgggctcgctgccggaacgcgcatcctcgccatgcgccatcgcgggactgttcacctcgcctccgccggctatcattgcgtcgccgctgcgctcgacgcttccatgtctgcggccggtcgtcctcacaaggaaggtgaagctccggccgaggcagcatagccaggcaatccggcggagtgagcacctcgccaagcaacctgcaagaccgatg

SEQ ID NO: 2423 - DNA, 2000 bp, Oryza sativa
atccagatttacaccttaagacatgatgtgacaaatgttcaatgcctaatgccaggattaattctggcaatacggaaggtgatacgcttgaaggtaactggcgccaaactttctgttgtgcagatgatataatgcattttcactgaagaaaaattctatcttttgcagaacttgatttatggtctggagaagttcttgtaggattttattagaatgctggtaggaattttcatcccacatatcaagagaaatacaagctatggatattcatggtaaggataatgcaaaacagtaagaaagccagcaggtattacaagactatgggacaagaaagatgcgaagaatggctccaccaaacatgactgaatttttttatgcagatgttacccaagatacacaatcttgctgcaagttcaaggtggaaaccaaacacatgtcagcaatattcgggaaagcaaccatggtgataaccattgtcaccaaaattgagccaattaataaatgagtggttgaattgactcaaggcctcaagcatatgagttccatcacagaacataagggaactctagctgtaaggaactatgtttggtcctgggtgatgctgacgcaaaatgtttataacaatgcatggtgcgttgatagggaactgttttgatcccttgagatgaagtgatgtccccttgtttgtaaaacccatcaaaatagttatgagtaacctttaaaccaatttgcgccattcatacagcatacatataccactccacgaaatcttaggtctaaactcaactcgcgcattaagacatataaaaaagaagacaaattcagcgtatgaataatagtggtactattgttctttttcccctcaatgtataggtcgaatttaaacatgatttttggtggagagatagatgttactaaactctacattgttaaaaaaaaaaactagatgttacccgtatatcacatatgcacaaaggcaatcatcaacaaggtgacgcagtctctagtctgtacaggagagttgcttaccgtagccaaaatgtgatgactgatcaaccggggtcaccgtcttcactcttcagttcttcacgaagcaatcgcgaccgccaagaaaccgaaattctttaagatagaaaaccaaagaccgatggttcggtctaaaccatcggtctgattgtggcgaccgatctggcgtggaggtagccggtaggcagcggcgcggcggctggattgcagtgcagaaggcggcggcgcggcggagatgcgggagtaggacgaggtaccgcgcggggagccgcttgccgtcgcggtggactcacggaggacgccggagtggtcggagcgaaaaggcggcgctgattcctgctgctactagacgccgacgggcgacggcaagcacgaagggaagttagcggcggtggaggtcggactcctccgggaagcagtccacggagggttttgctggccgctgccgacgttgagctcgacgccatggctgcggcctttcgagccttcgaggaatagtagatttgggcccaataattgagtgatttggcccagtccaggaactagtaagtactctgcagagtacgcagaaaaatagtctccacgttggtgaactcgttgcttgatgggaacgcatgcaaaggctctgatcgacgctgatctcaaatatttcgaccaccattgcccgtattcctcggtgtccatctttgacatctgctgcaccctaattggtatctactcctcatctaatcgaatcgcaactcgtcatgtataaattaactccacacctcctcctttatcttcaaatctcaagattactctgccaaaatggcgcctggtcataggcacggctcagtgccaccagtggtgttactcctactagtagccactgtgcttggctccctctgccttagcctcaccgcttcacccgaaggtacatgagaaatcacgtacgtgttgctcatgtgttgtgttttttttatagaactttgaca

SEQ ID NO: 2424 - DNA, 2000 bp, Oryza sativa
atgcacgtgggtcagtgaaatgggagagctggctccggagtccgggaggtgccgctgagcaaggtggacattgccggtgacgaggttgacctctacggtagggtgcatttctcagatatttaaatatttatcacttttaaaatatgatgtttaactatttgtcacttgtagtctatgacatataggctgaatgataaattcttaattatcatttgtatcatttgtaagagcggaaaatagttaaacatttatacattttttgcgactacacccgatatatttgcatgtaaactgaccaattttctcactccgggctgctttttgttgctcataccaccgatacaaagagcgtcacatgtgtactacaacgggccgcggtgcttgaagaaaggagaggctaaggatatgttcagaaaaacttaagattttaagagatagcttattgatctaccttatgaggatctaaataagatggatttcttatagcttttaacttttactccatccacttcaggttataagatgttttaactttagtcgaagtcaaactttttcaagtttgactaagtttagagacatatataataatatttataatactaaattagtttcatcaaatcaataattgaatatatttttataataaatttgtcttgggttgaaatgttactacttttttctacaaacttgatcaaacttaaagcagtttggctttgatcaaagtcaaaacgtcttaaaacctgaaacggagggagtacattatttttgaattatataatcataacttcttataatgtagaataaaagctactacattcgtcctaaaatataacaatctataattgaatggaaaatataatagtagagtatttgaaagagcatctcatttttaaaaaagaaggggcggtgggccatcaacgttgcagtagcgaagtcagtcattggtcggaagtcttgagttgaccgacgacgatatatttccgtgcatcggacatctgacaaagaaccatgcctcatattatcagtttcgaaatagagatatcgtcgtgcacagtggtaattaaggatgtgtcgttttagcgtgttgattcattgccgagctcatattttcctctcttaagtctcctatcggttttttattagatttggaacaggagacggcacaatcaacatttagtggcttctaccaaggaagcaaaaaacgcagaaatgcacctgcgtacgcatcagctgcaactgaccacatatgcagttgcacatgagagctttgatagtggccattcgcccattcctgttggtcacgatcaattcacgaactcacgatgcgtggtgctggtggtggctccaacgaccgtgccgctgccggctggagccaacatatcgtgtgaattagctagtcaggcagtcggtgagcagtcagaaaagtatggtcctctgatttgcaggagcgggctattggtacgggcgattaatcatacacagcccatgcttacaaataaattgccgatgtcttacagcgacctgcattattctcgtcgctccctccgcattgcacgcaccctctaggacctctatgagatgcatgtacacaccttccgttgcattgcaagcatatatgcatctatgccaagccatcacgtatcgcatgtgtagggattagagcataattaattacaccggccgaacccatgcacgcatgctacctaccactgttgatgacataatttgctaatggtgccatccaggatatcactatagagagataatagagatacatgcaaatgagcatcttcggatcatcatggacacaaccaatcaatcaaaccgttctgttaactgttggcagcgatagctagcattgattgattgtgccatcgatcgaccttggccgcgcgtatataagcaccgccgcatccccatgagatagctccacacacaaaactgttgcactccactgcgctatagatagctacgtgctgcattcgcgcgcgtgtgcatgc

SEQ ID NO: 2425 - DNA, 2000 bp, Oryza sativa
  N_region (1660)..(1660): n = any nucleotide
  N_region (1665)..(1665): n = any nucleotide
tatctctcagtacgacacgtacgtacggtagaaagatgtgcatcccggactattgagacggtttaggtatcatgactcatgcggggctatttggttgccaattttgcaccctgatagaggattttttctgcatttaatttgacaatcggacacttttcaaaaactaatttcacaaataaactgtagccaaaacttatttcaaaaataattctttttttcaacgccaaatcatatggtgctgaacttaagacatatcaacgctaaatagcacgtcactgaatgcatgttggcacaccgactcagtctcccatccgtggtggcacatcattcagcatcagttgacgtggtgttgaggtatctaagttcaacgccgtatgatttgacgctgaacaaaagggtaatttttaaaataagttttggccacggttcatttacgaaattagttttcgaaaagggtcaaattatcaaattaaatgattttcctaggcggagacttcccagcgttggtttgcgtcctgagtggctgaagctttgcctcatctgagctgctcagacgacacaaaatcatccaacaagcatgaaataaaatcatctaacaagcatgaagataagtgcccacgcaaaacgagataaatcattagcacataattaattaaattttaattattaaaagcttgaaaaaatgatttatttgattttttttatagcaacttctatgtagaaagttttcgcacgaaacataccgtttagcagtttaaaaggtgtggtaacgaggaaaaatctgtatcttgttggagttatatgtatcatgtgagacgtgattcgtcattcgggcatgttactcgggttgccaaccattgttacccttgtaatgaccaaaattttgttcaacggccgatgtgagcctcaactattagaattttgtccgctgctctagaattttagtaaagttgcagtgttccatttccattaaagcgaattgaagacaaaatcttgggagagttgcttatgctattgtttagtttgatatatcaataaaaagtaccaaatcgtaatcgaagaagttttcaacaagagataaggtctaaaggtgtaagtggcgtatataaatgggaattaactaggaatggttagttatgtattagttgttgctcaaatttttatttcaatatgcaacttgaaaccttcatgtgtgattctcttcgtacacttcttaattgaaaagagctcataccattttcctttctaaaaaaaataccaaaccttgggtaaaggcccccgcttactagtgcagcagtaacccgtaggaagtacttcctctgttaaaaatataacgattcagtttaggttaaaagtcttttgaatcacatcagttgtcaattttttaaattttgaattgcatggattcccttttcaagcatcattggctataaaatcattgaaatacttagaatcataagaatattataaaatttgaatcctagaaatccttatattttgttttggcactgtggtgagcttgctattaccaaattttgtagtaaaacaaacagtaccattaaatggtaaaaaaatgtaagaatttgttaggcatcaattcaaataatcccttaatccaaaatggcttgatgatttttcgaaagttggcttgaacacaggnagacnggagacaggatatatactgctttggtgggtctatttaaagcatttgtcagaatggttggaatggttgcacacgaaaggagcacttggtatcggtagcttaaataatcaaacaatggaaatttgtgataccttgaaccttgttacaaatagctatctgtctgatcctcaaattcaagctagtggggttaagagcgagttgacactccatatatatctttcatgtacacctctgaaacgtaagaaagctcatctgaccgcagtttagctccctcttagacagaggccagagggagaaagagagagagagagaggagaaggctgagactgaacattca

SEQ ID NO: 2426 - DNA, 2000 bp, Oryza sativa
  N_region (1464)..(1464): n = any nucleotide
gtgtctgtaatggtagaacataatggcactaccatcagtatatgtaatggtagtgctattatggtagaacacaatgacacttttattacagatactaatgtgtaaagcaataagaggatgtgaccatcgccaataactactgtcgatattttcttgttgcgttcggtagagtgagattgcgagtttgtttgtttcgttttccgcgcgcacacttcccgaactactaaacaatatgtttttttgcaaaatttttctataggaaagttgttttaaaaaatcatattgacccatttttgaaattaaaaatagttagtattcatttaatcatgcgttaatggctcaccttgttttgtgtatcttctcgatactcttctcctcgaactcagtctcctctaaatttaaattggagaacactcgcccctcctctttctatatcatgactcgatcaatccatcttgtttaaccactagtgggacgctactatatctaagttttacgttaccgttggtaaccgcgccgttaccggccttaccgcgggggtacggtaatagaaataccgcggtaacctccttaaattcaaataaaattaaaaaataatttgaatttttgataaattttatacgggtttgtacggtttttcacggttaccacgcggtaaccccggccccggcggttttggaaaccctgactatatctcatagagcttatcggaggtcgccaatgcgcaaaatctatttaaaaaacatctaatagtgtatcggaaacatatacaagtgaatggacaaaaattaatcacatataataaaaaccaacaattattcatatataagaagatttcaacgtgtacttaaaaagttaggtgagaatttatctggttgaaacaacaaagtgcttgacaactaagagttgaagcctcaattattgcaccaacgataagttcacctactttttttctctctcctcccaccttccatggaaaaatgtgctgcgcacaaaaggaatctatggccactttggtgtgcagccaaaaacatccagaaaaacctcttgtaggagggcggaaatgcgttcccacagctcacctctccgcagaagatccttgtgtctgtatcgtccacagagccaagcccttacaccgccctgtgaacagtcactgacaatcctggcccacgcacgggtgggtcccacccgtcagtgaagtggctcaggcgacatggtcgcaggcgcgcctgtgggtttcgtctacactagtcgtcgtcgagaggcgcggaggcaacgccgtgtggtcgccatcgccatcgccttcctcctcctcctcctccgccgccgcgcgcttcctcgccaccgcgcgcccagggccatcggcggcggacgccctcgcccacgcgcgcgagagaggggggcgagagattatcggacgagtcgctttgcggagctttctagaatggtggtaagggctcccgntccccccctccgaagcctcctcttcctctctcctccaatctccatcctgctgctgctgcatgatgttagtttggccgtgccgcggcggacgaccctcctcgtcgttgttcgtggattgctccgtgcacgattaggttgtgggtttccgtttgggattgggatggaggggctcctctggtctgtttagtcgcgaaagaatgatactttcttgtatgttttgctgcattttggatcctaaaattatctgatactgtattgatgtcgcgcttgagaattcgattttgcgatgtcgcgtgaacagttcgggcttgcggagcgtggaggagcagaatatttccccccttttgatttggatttagggtttaactgtttggctatccccttgaaatttgatgagggctacgtgatataggggtgcagtatgcctcatacaagatgctacattcaacccgattcagtacttgcgttaatttttctcctctgaatcgccttgttttcactgttagtcgggatatttcagacgtgttgcttaattt

SEQ ID NO: 2427 - DNA, 2000 bp, Oryza sativa
  N_region (800)..(800): n = any nucleotide
  N_region (1742)..(1742): n = any nucleotide
tcctttttctattccttaaattatatatttaattctgaatttctattttttcctaattgtatttctatatggactatatagtctacttctaatattccttatttttaattccgaatttcagttatttcctaattgtatttctattatggagtctatactctacttctaatatttcttatttttaattccgaaatttcaggtattttctaattgtatttctatatggactctagtctcctcttctaatattccttattttttaattccgaatttcagctatttgtaaattgtatttctatatgggactctagtcccctcttctaatattccttatttttaattccgaatttcagctatttgtaaattgtatttctatatggactctgttttttctttttctccgattaatgtgagaatttctaggccatgagagcgaacgtggaggctcctttttctattcctttaattatataatagatgtttcagcacttagaaaaaaaaatgttacagttcttaaaaaaaagtgaaacatagtgagatagttagatgaaacaatttaattcaatatatacaataaacgatttaagtcattgaaacacttaaaccttgtatacatcaaaacaaaccccgtgtatttgaaaatattaaacactatctaaaatccaccttcaaacatttgatacacacacacaaagaaacatcacaagtacactaactgaaacattgtttttgaaccattgaaacatcaacaaaacctgtgtgtcgaaaatagaaatatagaacactatcgaaatatccantgacatttgatccaaacacaaaagaacatcacgagtatactagcttgaaacacagaaaaaaaaacacacagaacctagtatggactgcatcttccttctctccgatgaacacaggcttgctcgcgtaggtcttctccaccactcccatcatcggatctgtaggaggagaagggggagggcggcggagatgaggagagagtgctcctgggggagagagggagccggcgagcctacaccaccaccgccgccgccatcacctcaccgcacgtgtgtcgtcctccgcgtcggccgccaccacggggacgaagccgccgtcaacgtccaggaagacaaaaagcggcggcagatccaacggagaaaacgacgctggcgagattgacgggagaggagactgtgcgggtgaggtcggctggggagagacggcggcgcaagcgagagagctcgtgggagaggaggcggcgccgaacgggggagaggaggcgagccgagcgaggtgtggggagccaagtgacgtggaatgagacgtgcgagcgccggatatttttctctctcatcgggcacccgtgaacgggataagcattatcggacacattggcgtggccttcattcaacatggcgcctacatgcagctccaccaatagcagctccaggagcttcacccttggtagtggccgacggcagtacggcacaacaaaatttcagagccgatagcacaacaaaatttcagatggttgcctgcatgcaactagaaaatccccacgagcaaagcaaaaacaaactggcggcatccgtcgtgtggctctccattcacctcggcctgtggcgacctccgacgcccatgcgcaaccaccgtcgtttttcgccatgtccaaagttagcgcgggctcgtataagagatgccaccgccgccgccgccgccgccgcctcctcctcctcttcctnctcctcctcctcgttgctccaatttttagaccgaataaaccggaccccttccgctggtaggggacgacgcatcgatcgatcccgacgcctttgcgcgcgcgcgcaaaatcgatcatttgatacatatctcgcgtgaatcgtcgactggtggttgcattgtgttgcaatgagcaaaggcgcgatcatcggcgcgtcgaccgtgctggtggtggcggtgtgcggcggtgtgcgtggtgtcgttcaagaacgggtcgagca

SEQ ID NO: 2428 - DNA, 2000 bp, Oryza sativa
  N_region (33)..(33): n = any nucleotide
  N_region (37)..(37): n = any nucleotide
  N_region (39)..(40): n = any nucleotide
  N_region (43)..(46): n = any nucleotide
  N_region (48)..(48): n = any nucleotide
  N_region (58)..(58): n = any nucleotide
  N_region (233)..(234): n = any nucleotide
gagtacgtgcgtgcgtacgcgtgacgacaatgngtangnngannnntnttgctgctgntgatgccgccgcgatgagagtagacagccaggggtctggttatataggcaggcaggcacgcggtgaggcgacgaggcagtcgacgattcgagcgcggagtccgtgtcggaaccgaaaagagctcggcacggattatgttgggctcgatctgtctagatgtactggctaaggcctnnacgcccgtatccgggccgccgtcaggggttagaattttgaaaaagtatatactccctccatattttaatatataacgccgttgactttttaaacaacgtttgaccacatgtcttattcaaattttttatgcaaatataaaaatacgtatgtcatgcttaaagaatatttgatgataaatcaagtcacaataaaataaattataattacataaattttttgaataagacgaaaggtcaaacgtttgttaaaaagtcaacggcgtcatacattaaaatacggaaggagtacgaggttccttatcttgtcatccctcgactaacaaatccgggttagtctgtgttcctttgaaggggttgggaatccctcccctccgcacgtaaaacggagcgatagattaaaacatgattaattatgtgttagctgtaaaaaaaaacttttaaaatagattaatatgattttttaaagcaacttttatatataaactttttgaaaaacacgcaccttaaggttgtcagtatcccgattcgtattcgaatatcttacgatactacgatcctatcaagccgaaacgataccgatcacacatagaatcctaattttcataatatctcgatcctactattcattactacacgatccaacgaaatcttaggtagtatcccgatgttagggttacagataaggcataccttctatcctacgacttatggaatatacgaatatggtataccttcacgtatacggatcgttcccgtgtacgtggtagaaatccgttccaaattatggaaattatctctacgagtcaagcgatgtccaaagtcctactcggaaatgtatagagtttctgttataccgtaccagatcaaatatcctcgaatctttcttaggggtcaatacgatccacggtataaaagggaccctcaaggaggggtgtgaggacatccaattccatcgccaacacacccaccatagtttacgaagccggagtgcgcggagccaagtcgccgggagatctcgtcgaactcatcgactacgatcttatcggtatcatccgtttcgtctattctctttgtaatctgttctcaccatcatcaatctcatataaactggactatggctattacctgcataaggggcttgagccagtataatccttgtcttttgtctgcttgatgttgtactacgtagacccctgctccaacgtaccccaatactcaactcatctggtccgcgagtatcactcgtcgacacccgattctacgatccctacgacactacaaaatattatttaaaataacatggtttgaaaataatgtaaataaatatgctcaaatttatataaaaatcagttaaatatatcaaaaccaacgtggtttttctttgataaatgtctctatttgcatgacatatatcattactacatttattttatatagaatggctatatataattaatataaatattaattaaacttaaaaaagaaaatctcatattattccgatactacgatacgatattactttaaacaaaacgatactacctagtatctcgatcctgacaaccttggataagttaggaactaggaggattcttagacggttttaactcggttttatctgatatagcagctgagtcagcgtggaacccacatatcaggaagaccacatcatcaccctctttctcctcttctctcccttcctcctctctctcactctcctctgggcaagtgaagtctgccgcccggcggggcgaggcggaactcct

SEQ ID NO: 2429 - DNA, 1906 bp, Oryza sativa
  N_region (142)..(142): n = any nucleotide
  N_region (250)..(250): n = any nucleotide
  N_region (279)..(279): n = any nucleotide
  N_region (290)..(290): n = any nucleotide
ggcaacctcaacacagtgggccctaagtctttttgctcattcctaggcatcttgatgtccactctagccttcaaactgtactctgttatggcctttctaagtacttctactgaaggaaacaccatgccaaccttaaaaactnggttcttaacatcctctgccatgaaagccttaaactttaatctcacttcaccatcatcatctgaatctgggagctgcaaatcttcatcatcagtggaaacttcctccncatcagaatttctaactactatttctttncccttcaactnactgcccttagctttcttccaaaactttgccttgcagtcagataagtcttcaacacccacatcaacattgtcaacatacaagtcatcatctgcatctgatatatcatagtcactatccacaaaatctgggtcatcttctaagctaccatcactgtcactgtcatcttgtttgtttggcaccttcctatcagcagttgacatcttcctaggactaagcaccttaggcaattcactaataggattagctactacatcatcccaatctacacctgcaattgtgtcaccctgatcaaagtagataataaaattcttaaccttgtgcacaactgatttcatcacttcaaagtcagccctagtagatataaccctaaggccatcttcaagagtctttccagggagcaaccaataagccttaaaatctggagtcatatcatacccaagcatagctaaaaattcatccaaacaaacaatatcccatgttcttgcttcacagtggtcaatccaatttatcgtttgatctacatatgccctgttgctaccctgaccaacaaaaaaaccaccatgggtgtacctcagcggtgaatttaccatcatcaggacctgcattgcaatcctaattagtggtattactcttatgttctagcctactcgagaacaatgtcaggataatcatcctaatggaaaaaataacatctttttgcataatcaaacgccatattcctttgtatctatctaccaacatcaatcaatacatgctaaccttgcagattaatggatgaaattgaagttacactcactgtacaacggaggcccttccccttccaggcggaaaatcatgccgcctccccgcgattatagccggtgggaggccgcaacagccaatctcgcctctttgcgctttcgctggaaccctatttctccggcgatcactctcctcacgatctccgctgcactctgcactagagcactctggggaagacgaagcagcagtggatgttgaaagaaaatgagaaaaacagaggggcctcgatgaaaaaaaacaagtgtggccggtgtcacacacggtgcgcgtgagaaaaggcatggtgcgggccagctcagctgtgcacgtggcatgccacgtcggcgcgaccgcggtcaaacggcattttggaccggcgatggtacatttagcaagtttagtggcctgattacacgatttgcaagttaatggacctggataacatccacccacaagtttaagggccgctactgtattttactcttgataaaacataacacaaactaaacaaaaattacgttgtcctttgtagcttggagtcatccgttttgacgttcatgaaaacagtaaaatctcaactcagaaagtgttgactcggatttgacgattgggtcgtggttgccgactcctccgcccactcggtttccacgcgtcgtttattacctttgcagacggtttcacagagctggaaacagctccgacctccgaaccgacccaatcacaaaccaaccagattcacccaaacgccgaaccaaacttcgcatccccgaatccccgatccccaaatccctaaccctagcctcgcccgccgccaccgccaccgccgccgccgccg

SEQ ID NO: 2430 - DNA, 401 bp, Oryza sativa
  N_region (20)..(20): n = any nucleotide
agacaacttggtcgcttttngtcgagatctcttcctcccccgttccgttttttttctctctcttttcaaactccgcccctcctctcctctttctctcccacatcagcagcagcggcggcggcggcggcagagcgaagagctccacttgtacgcacgggaatccaatccgctcgaagccctcgcgccgtggagtgcgtgccggccgggcaggggcagtgcggaggcccgcgcgcgggtagctggcgcctggcgctgcggcttttagcatctggtgctttgcgcgttcgctggaagctttgcggccaccgcggccagatgcggttgattgtgttgtagtggttgggtttttttgggttggaacgccgagtcgccgaggaggaggaggaggaggaggggaaggg

SEQ ID NO: 2431 - DNA, 2000 bp, Oryza sativa
  N_region (605)..(605): n = any nucleotide
  N_region (723)..(723): n = any nucleotide
tctgaatttctgagctatcgctgcttctttattgcatatcatgcaactaatcaataatcatgttggcatgcaatgtaggatataatgaccagtactgtccaagatttttagtggcggtccccgaactcgattttagaataaacgattaatacttttaaaaaactagcttcttctaatatattgatacacaatccttttacgtgctaacaaaaattaaaacatgttctctgaaagctggcttcaacttaaatatccaaagtttcaaacaaactgcaaatttaatttcaaatatttccgctcctacatctttttgcaacgagatatttaaaagctcgaaatgacatttgtatatatcgatatgggtaaaatattcgccaccagcctcgtcttcactgctaatatctctcgcaaaatcaaatcccccaataactacgcaacgtgcggggctcaaacggtgtacaggatcgagctcccagaagaattgagagctgacagatcaccagatacacgcattgattatcagatttaggagttctggtactactgatccagtgatccgtgttgaaatggtacggcgcgtacttgctgtgtgatgtgaaattctntttgtctacactctctaagtttatttttccactcgtcttatttatttcaaaataagtttatttataaataattattgaatcagagtttataaaagagaaaataaatatattaagaatngataaataaaagaataattgcataatgcattagtacttggagaaagtgagggtattttttttttcattaacgtatggggacgcataaaaaattgaacttatttagaaacagatgatgtagagaataaagcaacagaatgaagcaacttaaaaataatttgtgtatagtagtatctagtacctagtagtatgttcttaacatatttagaatccaatggtaaacacaagctacgcgttaaaaaaactttaaaatttttaaaatgaagtttttgaattccagttttggctattgttgcgaagacaagtaagcgacgagagacttcaataaaatcatgtgctgcgattaacaaacgagaccatagataaggggtgaggatcatagctcatgttgtttgacggtttgactctcctagtttatcatcccattggtactaaattaaaaaagcaatcgcgtcgttacttcaaggatccaaatgatatggacaatggtttctcaatggtaattgtttaacacgttcttttatatttatgaaaaaagattatgtaaattctttcatactaggccagctaaacctataattttcgccccaaatttgctagtgtatggtcatgaggatgtataaatagtttgtttttttaactcaataatcatttaaaatacctttggcccaaataatccagccagccacaagtagtactaatagtaattgacaactgacaaccgacagttattgactcattccaatttccaagtcttaacagaggtgaaatggtccatagccttttgctacagagaaaatcaaatataaaaatatatttcagatattacaactatctctctgcacttaaaaaatatctcgtggcatcaataacatcaccatcaaaataggaaaaaaaaagtagacattgtcttcatgtccaacttatatccattcgatttaccaaaccaattcgtccaatttatcaataactaccattcctttggaaaatcaaataaaccaaaaaagattacacgaaaaggtgagatcatagaaggggaaaaaaaagatgaattgagtattgaactttaattctctttttttttcctttttgcaaagtgaaatgatgaaataccgaaacatttgttggttgtctcctccgcctcgagccaagacccacacctacacaagagaagagaagacgaaaagccaaacgcatcgccgccgatttccccaaatcggaaaccgcccctcctccgccgcgcggcgaccctcgcgtcccccagcgcagtcggcgccg

SEQ ID NO: 2432 - DNA, 2000 bp, Oryza sativa
  N_region (1050)..(1050): n = any nucleotide
  N_region (1183)..(1183): n = any nucleotide
actattgtagtgctcaccctgatgatacgatctatattggaatcaaaacaaaggaacatgagaatgtatgtccttttactgccagtattagcatattagtttaaaacagcagaacacacattaacttacaaatgaatcatactggtagcttcacgatcagaaaagtttcttatgtaccatcgtggtgagttaagctgcaaatcattcagtaatggtacaggcatcaatcaaatgttacagtacgttctcttctatagaagaaaggctataatatgaaaatgagtacgaaaaataacagagaaccatcaggggatatataagcagcacattgatctatatcacccatgtgtttcaaaatacagactaggcaaggctcaactgcctagcgtgttattcataggttgaagaaatcatactgcaaagcttgtattgaaaattaccatgtggatgcatatgttttttctcttgagaatagaagctgcttgcaactccatatgaccagcccaagtcccatcctcaagcatagagtcacaatatttctcaaacggttcctcgtcctcaatgaatggctcaaaatccacacggtgctcctgtaagatgcatacaagaaagattatgaagtgtaaataggccaatgcttgcttgcagcatgtcttttagataaaagaacaacccagcctggcagcctgtactctacgcccagatcagatgtacacagccaaagtttgcagcatgtgcaataccttattgattcaatggcaccctaattacagttcttaagtcacagtgttacaagatgtttcttggtcatagccaaagcttgcagtatttctaataccttattgattcaatggcaccctaactacagttattaagtcacagtgttacaagatgtttgttttggtcatctcatctgatgcataccttaatgtattgcacaatcattgcacggtacttcatgtgctcttcctcgttgccttcgagctggtcgcccattgccctgcagactacgatgagtaaccatataacacaagactgcataaggcatanactattccccctttcataaactaacggtactctaacatatcgtacaacatcgattagcctcttcttgtaaaaagtggcaagaatttgagtaatggaatcgaaaagaagacctaaagaagcagttgccatccgnactaacttcgataatcttaaaccccagcgagtccagctgcgcccggaactccgtcatgtcggccttcttcgcgaacttcttctcctcctaacaaatcaatcaccaaaggaaaaaaaaacgagaaaatatattagctaaagctcaattccccttccaccaaaaacgatccaatctccagctgactgaaggcccggggtattactgcatcacgcttcggcttccgggctttgggcgccgccacggctaccttcttcttgttccgagccattacgacacgtgcggtagtagtggagtctcgcctagatttccccgcggcggcggcggcggcgagggggaggggaggcggaatcgcagatagtatcaaatcgtactctaccagaagcccggagaagaaatcggatgggaaaaggaagaggagaagagaagagaagtcgtcaggtgatatttcgtgggccaaatgggccgggccgtaacacctcaatccccaatctgctacggcccgtgtgtgaacgtgacacgtcatcctatttagaatcgaataccgaacctgaacgtgacacgtcagatttaggagtagaaacgagtacactctacacgatacagatccaatacgagaccgacacgtcgtcagcgaccaagtaaaattcggtcacgaaccgtacgccaccaacctgtataaattcatcgaccgccaagcctctccagaacatagcacaagccaaccaaacaccgcacgatttcgtatccacacatacttctacgtgatttcgtttcgacgatctcgaggcgccgcggcgtgacgtgacgtcgacgacaa

SEQ ID NO: 2433 - DNA, 2000 bp, Oryza sativa
aaatattgaccaataggtaatacaagtaaacattctcctgagttaacccacaaaagtgggggctgaacaaaagttctattttaacatttccgtgttataatgcagatattagaacctttgaaattcttcttcgcacctatgaagtacgagaaggtggtttgaagggtgccacaaccaatgaagagtctaatgcagtgcctcttgctcagaaaaaaagaaaacttcttgctgctgcagaaactttagatgttaagcagaattcttctagtgttatggttaggccttgtagcactgctagaggacacactggctacctgacatttgcgaggcttcgtgtgcatggaaactaaactgatcctccatacaggtgagtaggtatacaagagtagggatcaaaattatgtcctgtttaagacctataaattgatacaaactgccaatttatttctacctagccacacttttattactcttttagcgtagtgcttttgtgttgagttgtaactgtttgctcttgctctgtaacttgatagggaaacttgtggactcacaccttcataatagaaggaaattgagtgtgcaaccccatgttcaggtattctctcaagattgatttggagatgatcattctttttctgaaatactgttatggccatttgctgccattgctgatagtcaacccaggttcacctgtactgaactgcatttacctgtacgtcgagctgtgggccttgcatttgttgtaatggtgtagaagtatttccccagagttcctttttaggagtacttgaggaagtattgggaggagtacttgaggaggtattgggaggtataagatgccatacttcctgaaggacagtaaaaacgctcttgtttaacctggccaagtgggctgggcatgtttggatttcacgtttccatgcgttgccagaaaaggaattcaaatatctatcttttttaataaatgtgttttcacaggttgccgaaaaaaggtgtggtatgtttctgtttgattgattagcaccgcctaacctctttttcctaaaccatgtaatacagttaatttaagtcctattggatgaaacaaataaaccagagcggtgaatgtacgaatatacttagacaaagtcaaataagagacatgttgccattgcataagtttaggtgatatcgccatccaagtgattgagtagttgatatagatcacacctaaaattctaaaatagactagttatgccattagcctccatgcacaagccataaataacttgactagatggccagctaattgattagtaaactatttatataggactgttgttttaaaaaaaatacagattttgttgtagtacatggcgactttttggtttacttcctgaacatcttaaaagtgaatatttggaggaacacactcttaaaaaaacatgattattcgctactttccagtcgcataaacctagacgttaattatgatgttttagactaggttgaagttaaacttttataattttgattataaatgacttcaaaaatacttagtttaaaggcactagaacaacaaatatagttgtatatatatcatagaaaaacatagtcaaagatatatttccgagactgttattgtgcaacacgtcaaggataccatggacattaaaatatatatttatgattaaataggagagtgtattcttcctacatcaaaattcgcacaaaaagagaactctaagttgcagtgtttccctatcaagtatcaatcgcgagctgcataacttatatagtgataaggagaaaccgatggggatttaaaggcttgatgcgatgacgctcttgcaggagaaaccgatggctctcccgcgtgtctcgcgtgacgctataaacaaaccgaatatacaatgcgagcaacgcagctataaaagttggcgaacgacatgtagcatgcattccaagcagagccagaacagtgcgtgacaccgtaatgccgccggagaagcaggacgcaa

SEQ ID NO: 2434 - DNA, 2000 bp, Oryza sativa
gcagctactgtaataagagcatgctctgcgttccatcagtattggctcgcgctgtttgcaacaataatttagagttcaagatgatgaagtcatgaaactaagttgccaatatacaaagatgtagtatcgttcatgctccttgccgttcatcccatcattattttggtgcactctcgcatggatactgtaaacttgaacttgcatggttatgtggcgatgacaagaggcacagccaaagttgctgcaaactgctacagctcggattggctgaaacttccgggggccgtttcgtcttgccgtggttaaactggtacagctcggtttggcctgaaaggctactgttcttcatgtgctcgagttcatgcctcccgtagatttatttatttttactatccccttgcccaacaaaaaccggagattttactataccaaaatgctaccctggtttcatgggaacgaaatggaaatggagattttggttaaagataagcagcaacattttacgattttctgaattgtgtgctatccaaaattggcttggcatccgtcgtttcctccatcgcagtaagagcatctccaagagactggctaaatggctctccaagctaaaatttagtgaacttgggcaaaaaatctactccaatagactagctaaatggttctccaagccatccggctggctaaattctccacctcactagccaaagttggccagctaggacggctggctatctggtgtgggtcccaccccctctctcctctctctctctctccccctttccccatcccatcccggctccttccctgcccgccgcatccatccgtccagtgctcgccgttgtcctcccggcgccgccgccgtcatcatccttccggctccgccaccaccgtcgtccgtggcgagatggcgcagcccatcgtctttccccgaccctccgggatctggagcggggcggcgacggcaacgacgacgacgagccagtccttcgcccgcacaatgccgtctccatcgacgcactccgcgccgccgacctcgaggcaatggcggcagggtggggtcagggcgacgactacgcggagtcccccgacgacgacagcacggaggacggcgcggagtccgccggcggcgacgacggcgcctcctccctccctccctccgctgcaagctccgcccaacctccctcctctgcagcggacgctccgctgccaccgacgccggccaccgcgcattgacgagacgccggccaccgcgcatcgcgtggacatcatcgagatggttgcagtgggagaagagaagaaggggagaaagaggaagaagaatagataatagaggctgacatgtgggccctaattgtcataggctcgtaatagagagggtagatggagaggctgttggagtgaggaatgagtttggtttgccaaatcaattggagagctggttatataggtgtttggagagtccgttttagagagtctgttggagatgctctaagccaaccagtcgatatcatcgccgtcatattcagcaatggacgatgactgatgatgactctcaagagaatgtgtttagtccaaaccctatgccgctgaatgttgatgctgttgatgcatgcacctgccgaaggccgagtttagttttaaactttttcttcaacttctaacttttctatcatattaatgtgtttagtccaaaccctatgccgctgaatgctgatgctgttgatgcatgcacctgccgaagaccgagtttagttttaaactttttttcaaattctaactttttcgttacatcgtttcaattataaccaaacttttctacatacacttccaacttttttcgttacatcgtttcaattataaccaaactttcctcgacacaattccaaagtgcacttctccacttcactcctcgtctcttgccgtcttttgtccgcaagtctcgtgctctcactctccaccttcttcttcccagcttctctcgtctcggctcaaggctctag

SEQ ID NO: 2435 - DNA, 2000 bp, Oryza sativa
cgtctccagcattgatctggcactttggcacacacatggtagatgatcttctccccgtcttatgttgtgtcgtcatccgaggtgcaacagcgatagggtacagagatatcatcgggcgtcttgtgtgccaagaagttgatataggagcgtccaaatctagctagatacaagcagcatgacatcaccaaccgctgttgtgccactggcagcgtgctagttgacgacatcggcaacggggcctggcttggggcatcacgcctacatccgaccttgactgctgccacctaacgtgtacttctaaataatgttttcatcgatattcaaggtcttccacaccaacctatagattggtgctatcttggttttgattgacaatatcgcttatgtccacatcttactcgttctctagatggacactatggatttgtgagtgtgtgcctatatattggtttgctcgcagcgcgattattgtagggtatcacgtctaaacaaggttataggttatggtgtttatggtcgattggattgtgctaatactgggaggcattatggcactagctcggaacaagagaataacaatactatgagacttcgcttaggtggtgctcgtcgagtaccgtttcctcaactcctaggttatgaatatccagatatcacctagtgtttttccctttgcaggttggctttttggctgaccctgtacatatttctcttgtatttctgctcctctattaatatacgaggcaaagcttttaccctcctttcaaaaaaatgaatatctggatttagccttagctagttataccgggcaaatagcagtttcctcttccttgttgggggtgttgtctagacttttaagaattgctctctacagtgaaaacctatggtttagtctttgttgatcggatcatgacaacatatgaacatacctgtgttcttatcttaggtgctattttaggggaaccttagtcgtagtccagtgttactttggtccacgacgaggaaccttttaaaaatctgttgtatataaattacaaatatatttgcataattatagaagtcaaaagttgtatgaaaaatccaattccaattatatataacccttcctatatagccccgttcacttctcagctgggccttttttacaggtacctttcagttgggccgagcctgatacagctccaggctgaactggccgaaattttccgggacgtcagatgcgaaacgaaaggacaggatcagaactcagaagctgactccaccgaccttccctgccaatgccggtgcgtccccctctcaaaaaggttccggcccaaactcgagcagatttgggtcctccctcctccgcctcctccgccgccgccccctgtatcccaccggctcgccggagagtccgcctcgccgccgcggcctcacgggcgcgtatccagcctcgcggagagcgtgcggaaccgcgacccgtactagggcagcgcgagagagaagctgctgcgcctgcgctgcaaaggtatggctgttactgttcttccgaggggtctctaaatttccggcgattcgaagcttctaaagcatcccggatactgtatcctgtaggctgtaggtagattccgacagtggaagcgttagccgtccccttgcgctccgctgccaattggtagtctcagaatgtgtagatgcagcgtctgcttggggaatagggatgctccctatttgcgctagcctgataggacggcacttcagttgcaatctgatatcctgcttagtgcagaaaagccaaacatggcatgtgaagcgtagaaaatcagaagtaattttgtaacttctcttgctaggtctacagttggagctcttgctgctgcttggaagacttcggacaagaacctaagatcatggtgagttcataaattcacttcaggtcctgttaagtaaccatgtgcaagtttgtttactttgacattcggttctgttcaggtatgtttcttctgttctgtggtcatgtg

SEQ ID NO: 2436 - DNA, 2000 bp, Oryza sativa
taagacagttgcagggcttgatgcgtcagggagtgtggtgaggaaccagcttgcacagaacattgtacaggagggtagttccagtgtgatttcaaggacaccatgtcaggagctaccgctctcaattaggttgacggaccaacaaaacgagcatcaccttgtgaatggttcgtctaattctgagaacttagtgaaggtacctccatctcagggtggccaggtaactggtgccaagaagcgtaaatctggaaatgtgaggaggtttgagcagaataaaccaacacaaggacaaggagaatgtggagcattagtggtggctgaggatgttggttccactgaaggagaaactggcgataagaaaaagacagagggctgtcctaaccgagttcatatcaccaagatcatcaagccagtgcgatttgcagcagctgtgaacaacgatgtgcagcaagtttcaattacattcaaagcactcaggtattttctgtaatttcttttcgtagttataggcctaaaatttctaaatctcagacatgttttttttgctagctgatattgctccctttctgactacttttattacaaaaaggaaagtgactatatctagcaatgaattattatttggctacaaattgagtgctttatgtttcactcatttagagatgtcgcaaaaagaatcctctggtctcttcactaatcaaataatatattctgcatttttttatgaccatttttatgtagttattcatattgttagtttgatatgtttgaactgtttttctaaccaagtgtttcgacaggtctgatgggcaggaagtcatggtggacgacaaagtaattgaaagcaaataatcccttgctggtacatcccattgtcttctcctattacttggatgatgagggaaacatctaacgccaaaatgctctcatgttttttttccagcttattagctactacgagccagtgccttcgttataatccgacttcgtgagagatgaactgaaggaactgggtttagctgcctgtgtatttaattagcatttgtgtgtttagaagcttgtagctctatgggcttgataatttagtctggtcttgcagtaggttgctaaatgcaagaaatgtattgcttggtctccccactgattgcttattcgcgccatcttatgtgtaacattttgaacagtggggagatatgtgtaatctatgcttagggatcttatgtttcttttctctatgtttagttatttgggatcgtcgtgacctgcatgcatcttttctctatgtttagttatttgggatcgtcgtgacctgcatgcatcatagacggtaatgactgagaagctcgtgaatttcgtgtgatgaatgcatatccagtagaactgaataaactgcgtaatgttcgttctctgtggatctgtgatgttggcgggtcaagcttgaggtctatactggagactatttcagactgtttaactggttttcttcagagtcccttctcatttcttccgcttgatacttgtcttgttcaattgacacgcttcaacatttgcaacttgtcttgtactttttaaaatgtgcttgttgtcatgttacgatttatctttgtgatttctgaaggccttacccgagtcataactcataaatacaacgaaaaaaaacagatgatttgggccatttggcccatagctatgtcatgtggtgattcctttttggaataagttcatctaggtcccttatcaacgaatccgattttcgtccttcaatcgaaaagataccctggtcctcaactattaaaaccggtgtagatgaggtccctcggtggtttagatggtggttttggctgacgtgacgcctgcgtggctaatttgactcaatcttcgtctgacgtggcattgacatgacgcttacctggtaacttgatccgaaaaaataataaaactcgtgggacccacatgtcagtttcacatacaaaataataaaaaacaatggtgggacccac

SEQ ID NO: 2437 - DNA, 2000 bp, Oryza sativa
  N_region (421)..(421): n = any nucleotide
  N_region (452)..(452): n = any nucleotide
  N_region (454)..(455): n = any nucleotide
  N_region (465)..(465): n = any nucleotide
gcaaacaacgcctcctttccgtcgccgggtcgtcccctgggagagaggcgcgacccctagcagaggaacgcgcgcctcggctgcttttttggagccaccgctcagggctacgtgttggaggagggcgtggctcgtggacacgactcccgctctacaaatttccccttccaccctcggtctcgtcgctggcagtggggatgagtcggaggcgacggcgacggcgacgacaagcgacggccgccaccatctcctccccgatctggccggggcggggagggggggcagatccgcccgctagggcgccggatctaccgtccccgaccggcgacggcgcgaggcggaggagatcggggaggcggacggtgcaaggcgaaggagagcgcgcgaagcggaggaggcggatggcgacgacgtgtcggcnaccccgggcccttacgccgctcgctgtcgancnngggattcccntgcgcggccctccgtcggtcatcgcacggagacgggcggcggcggtgggagcggcctcacgacgagagggagaggcgacggcggcggagggaggcggccctcgcggccgccggcgacagtgagcgggctcgcggcgagagggagaggcggggaagcgaggacgggcggcgacgggagaacgggagagagggagacgagaacgggagagatgggagtaaagggggggggagagagaagaagagaagggtggtatagtaaaataaaataactacgtcgaaaatacttctaatcggccgtccgatccgaacataaaaatcggatggctcttgactgccttctctaacactcgtgaccgcacatcagcacatgcgctgcataccacctttgccagtgacttgctactgcatactccttgcttgcatgcattcatttaacattattcagaacgatttttttcctaaattacttatccaatctataatccgatcacaccattgtattcgttgtaattaaatctttataacaaaatgtcatgattatattctaataaaaaatagtcatatgtttcaatctgttaacattcttgatttcatacgtaatagcgatatgtttcaatgtgtgtcttcaacatgtttcacaaaatttccaaaactaactgcaccactctctctccacctcatccatacatgcatgcatgcattttaacaagtttcaaaatatttttttctcctaaactaattatccaatctacaatccgatcacaccgttgtattctttgtaattaaatctttacaacaagatatcacatgattatatttcgatgaaagaaaaacatatgtttcaattcattaacattggttgttgcatatgtgatagcgatatgtttcaacgtgtatcttcatcatgtttcataaactttttaaatgtttcagttgctgattttttttgtttcacactaaataacttgatgtttcactcgttagttacctggaacatttaactgactgatttttttttcatgctgcatactcaagtggtgtaatgacgcgcagcgtccgatatttggtggaatatcggacgtccgacgcggagtcttgtgggctttctgggttagggacactcgttaagctaccagtgatatccttcattgtggggagtttccctacgagtgtcctcagttagtaaaaacactctagaaatggctcacattgtagatgccatcactgcctcaccaccttatattagtcacgtttgacggatcagtagcccaccgctaaccactctcgcctcctcccccgtctgtactgactactgagatggaagcgagcaagtgaaagagagagattcctggcttcctgcctcacgcgcacgcacaccaacctcaagccatcgggctctctcaccccgcacttctcccaccgccaccgaggcacggctctcgaaccttcccactgcttcctccctccctcccctcccctccccgcgacgagacgagacgagaccggcggcggcggccggagtcaagagccttccct

SEQ ID NO: 2438 - DNA, 2000 bp, Oryza sativa
  N_region (724)..(725): n = any nucleotide
  N_region (733)..(733): n = any nucleotide
  N_region (738)..(738): n = any nucleotide
  N_region (750)..(750): n = any nucleotide
  N_region (782)..(782): n = any nucleotide
  N_region (784)..(784): n = any nucleotide
  N_region (786)..(786): n = any nucleotide
  N_region (806)..(806): n = any nucleotide
  N_region (821)..(821): n = any nucleotide
atgacggagtacatttgcggttcccttaatatttgtatcaaccactgtatcaaactcttccgctggaacgctccatgtcttgttattcttgtttattgtaccagcgttgtttactgccacaaacctcaacggttaagacttcttgaaagattgctttaatgtatattgtgaaatggcgtacaaatatgtgattccacaatctattccaataaagagaacagattatgatcatctactaccaaatagcctgtatttgccttcgagcagaaaatgtaaccaacctatgatatcaggaacttgtttcttttccacaactgcctttgccaactcggccatgttgctgtcagacctctacaacagaagcacaaaacattacttgagaactcaaaactgttaaaaagagtaagataatagaacataggcaacttatattaggcgttgttctgacaaacaaagaattaaaagcaccattgataagctattctattggcatccataccatgttgtattgtttcaacccgattcactcaagatcaataaaacaataaatcgtgaacaaatttagcatagtccagtcaactcatagcacaattctcaatcaggaaagcaacaaattctcaatcagcagagccccatcggcttctagttcacgattaagccgctatatgactgctactacggtagcggaattcgatatctccagcgagcaaaaaaaaaaaaaccnngctctagngttcnctcgctatccangcacagcccgactgcaagcaccacggcgaaancntngaaaagggttgaggggggtnaagtgaggttaccangtcggcgacggtgaggaagtggcgggccggggtggcgatctcggcctcgagggagcggacgtggtcggcggagcggccgcagccgacgacggcgtggccccgccgcgcgagctccagcgcgagcgcgcggcccagccccctgctgacccccgtgatgagcaccgtcctcggccccgccgccgccgccctcgccgctgccacgccgccgccgccgcccttggaccccgccgtcatctcctcctctcgtcttgcgcgtggaggcggaggcttcggtgtccagatattttttcgcttctctcgtgggccggaatcccagcccacgtaaggcccggctacgtacggtcgatccggcccggcccatacacccgccgccgccgctatctcacacgtctcgcctctctccgcttcggcgcttggtggcgtggttttggggttccagaaccttctcgatccctcctccccctctccgcctccgcctccgccctcctccgctccgatcgccgccggctcgtcgccggtaacgtaaacgagtcctcatcctccctctcttctctcttcctctgtagctctctcgattcgtttgccctctttttttttatttttgccgtagtaggcggtctatttcttgtgttggtgagatgctgtgatttctttgggatgttgtgctaactcgagaagaaggagacacagtttattgtgggtggattggattggattgctgctttagcaattttgattttgttggtgctcctagacctactactatccaatccaagaactagatgtgcaaagacgggacgtagtcgttttgccggcggattaggatgagagctattagtttgttttaactaggttaattgtactatccctaggacgatattggatggctttgaactttcaaagttatgacataatcaatattcttggtgatttgtgtgatgtggtttttgttgccatattaccatgtagtaggagtacaataaggtccgcatatttcttctcttttctttgcggatagtcggcattttcttcttccaatgtgcctatattaacttaaaccctactgttgcagctggctaattttcgttgttcctcggttgctttatttttgctcctatttttttttgttcatttctgcatttagatgacctagtcaatgtatggttcaggtttcataag

SEQ ID NO: 2439 - DNA, 2000 bp, Oryza sativa
  N_region (1651)..(1651): n = any nucleotide
  N_region (1838)..(1838): n = any nucleotide
  N_region (1840)..(1840): n = any nucleotide
aataggaaaaatataggattctgataggaatacaagtgtaaaacagaggaatgcaaaacacaggaaaaacatagaaatgaccgtttgattgagccgcaggaaaaacacaggaatttgataagagataaagactcagggcttattcggaatgcaggattgaaaaaatataggaataggaaaaatatagaaataggataggaatgtaagtataaaacagaggatttgaaatatatagtaatttcatgcgaataggtgtggatggagtaaaggaaaaacataggaatctttagaagaaaatagatgcactattacaaaattatcacatactactaatgtgctttagttgattgatggcatgatttggctcgttcccacgagaagggagagaaaaaagaggtcaacgtggatgtttttcttcctgtgatcttccagtgatatgactagcgcaggaaatttccctatgtatttcctacaaacgtttttctgtgatccgaatgacgccacagtaaagcaatccataggaacccaaatccttcatttttcatgtgtttctcctccattccgaataagccctcaaaggattattaacatgaggtagaacctcatgttaaatttccttcaaaacttatataggaagagacatttcataggaatccataggattcattcctttgattcaaagggctatataggaaaaattcccataggaataaaatcctttaaaatttctataaatttcctttaaatcaaatggggccttataatatgaaacggatgaagtgggattttaatcctatgaaattcttttataattaatttctttgattcaaaggagcttttaatgtagtattgctgcattttaccccatttctctccaaatttcaaactaaaccccaaaagtctcccaaccaaaattcttgtggcaaacatgcccagaaccagaaaggcccagaaacctgcactgcatgcattcatggcgagaggtcgagcacagcgcaggcgccacacatcgcatcgcatcacatgccatgccatgccatgccatgccaccacgtttaccacccccaccgcatcagtgtgcatgagcaagtttaatagtatagccaactaatatatctaaatcatctatagctaatgtaatagctaattcatataatacctggtctcatctatcatacacacatttcgtcttggagtccgtgctactgctggcgacagaatcgtagtccgctgctattctctttttctttatctatttaaaatatgtttataactggcttatagcctgctatatctgctctgaccccaccaccacaaccccaaacccgtcctcctcccgctccggctcacattaatgacgccatgcgtccggcccccacgttacagggcgctgcatgctacagcatccgtttccgtgccaaccctgcatgcgtgtctcagatatgtgtgatctcgcacagccccacggctgcaattgcaaactggggggatttgcatatgcaactacactatgcaatgcaaagcagagtacgcgacatcgatctgtatcgatccgcagctagcgggtggccgctagtccattattacttcacctgcatcgttagttcctattgttcccaccgagccacatgccagatacagtagtaccccnaccccggttgtactgtacttcaggcccattgaaaccgattcttcatccatcatggcgtccatgtagtaaacccaagcccaattacgagaccatcataccactgtactcctactagtattatccatccatccattgcgtagaagccacttacgaggtaatcatggccatgcgatagcatgctggcgtntnggggcgaggcaggcaggcaggcgcggctttcttgggcgtaggtttaccggctttggggttcgatggggtttcgtttcggctcggtttacggtgcggtgtgtgtatagcggccgccatgtgggggcccggcaaaaagggcatcacgagggggcgccggtgg

SEQ ID NO: 2440 - DNA, 2000 bp, Oryza sativa
  N_region (1736)..(1736): n = any nucleotide
  N_region (1743)..(1743): n = any nucleotide
gaggaagacaacgagcgagggcatctaattgctgccggcttgagaaggagggcgtggcgaataaggcccaccgaggcaagggggtcgctggcaccattggcgacttctagccaagcgcgaggtcgagcagtggacgggcatgctgatggaactaggactctaggagcgaggaggggggagaggtggggttagagttagagtactatacaaatctcaaagcaatcggatggtgcaaaatttataagattttcttggagtgtttttgtgtgaaatgcaaataaattatcccttttttaagtaggataaccaattgattatccatggattccatggatgatctatactactattaaaagatagtattggtggtggtgagtctgccaccagcaccatcacttacatgtggcccatgatattaggattttgggcagtcgtttatattatgtagactgcagatctttaattttctaagcatgatatttttgtttgtttcttttagatgaaaggttgtgtttcaaccaattaaaaatatagttttttttaaccaggacttaatattgctattttcaatactgttgcaacgcacaggcatttggctagtatagtaataaatatataaaaaggcattaaaatgttgttttaagagtaatattggagacaaacaaaaaagggtttgttggaactatgccaccctatatttgcaaaatttgagatataccacccgtatctccgacatgtaggacccacatgagtcaatgacatgtggaccagggtggcatatcacaaatttcgcaaaatttgtgtggcatggttcaaattgtcccaacaaaaaatgtgtaacatagaccaaaagagactccatgtattataacatcataggagatgcaaagatactctatacattataatatcgtaagatcaaagtactctatatattataacatcgtaagagatgcaaatagacgagcacatcacattgactactctaatatatgcatgatcatattgacaagaattggtaagcagagttgtcaagggatgtcatcccgacgtcaacacgatggcctactactagagaggaggaagaaatagatctagcctattgcttgttttcaatttttgatggttcaactcaacgtattagatgtttcactagttaggtaaaaaatgttgcagtgattttttttggtattctttttgccgaaatcattcggatctactgatgtttcagtggtccaaaaccgatgtgtcatatgttgtaccaaaatgtttcaagtgtaagttgattgtgtttcatcgtttagattgttgatgttcaaaagttgagacatttttgttcgaggaatgaaaccttttttttctaaaatgataaaacatgcggaacactttgcaacattttacgtctgatctgtagtcgccaccgtaaattataaattaggttaaaaagtgagctactcctataaattagttcaggaattactctcatatatacatagccctctaatattggtcggatggaatgttagattttcttttacctcaccgcctcaccggtaaacgagtcaccggctatcctggccgggcaccccggtctaaaaggcccaatcccatatgtggaacaccgaacgtccctttggacggaccagattgctccgacctcaccgtctctcttctttctccccaatccctatagctctcgcttcgtcaaattctccggcgtttccagttcaaaaatnaaaaatnaaaaatctccggcgcaaatcctcctctccgccgccgccgcctccacctccaccgctcgccccctcgccgcgcctccactcctcacaccacgctcctcctgacctcctccctcgcgcttctccggcggcgcctcgctcctctgcgcggaccgttgcccctggccgagcgcggcgcggcgcgggccgcccgcggggggatcgggctcgggtagaggcgggcgacctggcgggggaagtaaggggtcgcgcgtggcgggg

SEQ ID NO: 2441 - DNA, 1804 bp, Oryza sativa
  N_region (8)..(8): n = any nucleotide
  N_region (22)..(22): n = any nucleotide
  N_region (37)..(37): n = any nucleotide
  N_region (41)..(41): n = any nucleotide
aattttgnataaattaaatccnataccacccccgtcnatgnttttccatccttcccgtcacactttccgtccttcccgtcgctctttccaggaggctgagggcacggaggctggcgttgtgggcggcagacggcggagccgccgggtcaaggaggcggagcggcggatttgccggcggacggagacgacgggtcgaggaggcggagcggtggagttgccggccggcgtcgtcctccgctcctcgctgccgacccgctcctcacccgctacggcgccgtcgtggtggacgacgcgcacgacgggatggctctcaccggcgtcattctcagttagtcggcccattcatcttgaagaaacagcaaccagtcatatccaatttccatcccagtccgtcgtcccctagctgccggcatgccagccacaagcaaccctcgtcatgctgcatcaaatagcaacctcgtcgtcgatctgcatcatcaagcaacaacagccgtttcggcatctagtggttgacattcacccagcagaagcccggccggatttggcgctggatgcggtgctcgttgaagccgcccgtcacgtacggcgcctcttcccgtccccatcgcatcgctcatcctcaccgtctcctcgtcctcatcgtcaattgcggtaacctcatccaagtcatcgcccgtcgtggcccatcgtctacaagcagcaacaagccagcttcattccggcggtggcggcgggctgaaccacggtggccgtggctttgtgctgctgatgctgcgccgcaagctgctctcaaccacgcgtcccctcccatggaactcgtcgacagactgcaggcacttggccgtgtcctcctcggcagacggcagaccaggcacttggtcgaggtcctcgagtccgcaaaaacgcgcgtgccggtcttgacggcggcgccgcggcggagtgggccggcgcgggacgagttgaggaggccgaagtcgaggccagagaccatcccccgagaggcgctggtcgtcgagttcggcggtgctttcaacggcgaagtagaaagacggcacgtagttaggaaattaacgggggaaggacggaacatgcgacggggtggtatggatccaatttaccaaaattttagtggcacctagccgatatcacgaatagtaatagcgttttattaatttgccacatttgcagtggcatggatgcaattaaccccattttcaatcgcgcgtccctcaagcggtaaaacaggactccgtaggtagtcaaacggcctggaaactaaccagtgcagaatcgcaggataccataacctgaataaatcatacacacaaaccggaaaaaagaataaagaaagaaagaggataaatggtagccaatttgtgttagggcgcagcagccagagccgaaagcttctgaagctgatgcgatcaaacctcaaaagaccatgggcagccagcacggaagttacaaaccgaagccgcgcggcgcgcatacgcatcagaaaggcgcgcaataacggaccacccatacggcggccgcgctctgttcgcggcgtccctgcgcctgcatcgcacgccatccaaggctgcatagcacgacgcatacatatctcacgcgccctttttatctgcttataaatgagatagcccacatagcagcgctgccgtttctcctcttctctcgttgggggcaaccgaacttatccaacaacgatccatccattggccaagtggctgccgtgctgcacctataaattcacatgcaccggcatgccactccacacaactcagctactcgaaagaagcag

SEQ ID NO: 2442 - DNA, 2000 bp, Oryza sativa
  N_region (517)..(517): n = any nucleotide
  N_region (519)..(520): n = any nucleotide
  N_region (522)..(523): n = any nucleotide
  N_region (542)..(542): n = any nucleotide
  N_region (785)..(785): n = any nucleotide
  N_region (795)..(795): n = any nucleotide
  N_region (808)..(808): n = any nucleotide
taagtctaatttgcctccatcaaggggagaggtgagagaagatatgatggatgaagacactggcacgtgggattcacatgttgacttagctagtcaacggggtcaaagttcccacatcgaacgaaacgcctccgaaaccagcgaaggagacgatttgcaccggtttttaaaaatagaggagatgataaaccaagttttacagttgagggatacgattcagagcaagagttgagaaatgcaaaatatacttattctatctcctcaagccgagcggtactctctataggtggccaaatgggccaggccgagatatgccggcccgggcacgatagcactgtagccggcctaggcacgacaaggcatggcccaagtacgaacatgacccgtcggctcacaaaatttttcccatttgccctaatattttcatatattctgtctattttctctcattttcctcaattttccatatgttgttttctatctcccatttacatcattttcccccatattttactgntnncnnctttacttttcccttttcnattccttttcacatttttcttttttggccctcatattcaaattttgtgggccaaacgtcctaatgggcctacaccagcccacgtgccatatttgggcccgttccggcacgcacggcccgtggcctcctgggccgtgcttgtgccgaggccttagcacgtaggtaggccggcggcccatttggccacctataagtactctccgacaacctctcggcccttctgccacaaattctcaccgacatnaaaaaaaccnaaaaaaaaaaagnaaaatcagaatcgaattttgccctcagaacgaaacgcctcgtctccccttccaggcgattagggtttcgcccatcttccggaggcgcgccttgccgccgccaccgcggcgatcccgctccgtcccctgcaaccgacctcccgctcgaccagggccgtcaagccttcatccacgcgcgagcggcgtcgcgtaggcggggggtccgagcgagcgctgagcgaggcgtccggaggggatcgatccatcccgctctagggttcgcgagcgtctcgcgtgtgagtctctcttatctaatcctctcaatctcaatctgtctaggctgtagatttatgtaccaccctgttgctagtttttgtgtcccgtttaggtgcttgaaattagtgatagatcctttaggggtggaatcgaatcatgtaggtaacagcggaatttctggtgaaatttggatggttggtggtaggctatcaacgaggttatctaatttttttgttcagctagctagaattgagggaactgtgcagcatcgagatgtggaaggtttaattgttttaggaagagtaaatgaaaaatcacatcgtcccattgggatgcagtctagggcagacaagcttgtacaaaagttcaaagtgttgcaatagctcgtttcgttggcgcgaaacaattaaaacatgcacagaccgctggcaatgtggtcaatttggctgattcggctgccagctcagcaagcatgcaaggggtgggcacgaaagatttagaaacttggaaaagcctccctacattcctgttccgtgccatatgtgcgccatttgtgcgggctgttttggctacacgacacgccagagtgagtagtaatcagactctgggtcaacctaattaatgctacaatttccattggtttaggtatataggtaggctatgctgtcattactggtttgatctactgatattgcaatttcatctcatgtgtaacatgagaaatgggatttagctatttcaggttcaggctagtttacatgtgattaattggtgtctaatgaaacagaagatcagcagacatacacccaatagctatagccatagctttagcctgtagaatattctgcaaaataggttccttatgtttcaattacgttaaggttgatcaaactaacagtaccttttgtgcttttgttcaggtttgcattcgctgaaag

SEQ ID NO: 2443 - DNA, 86 bp, Oryza sativa
  N_region (25)..(25): n = any nucleotide
  N_region (28)..(28): n = any nucleotide
tttgtatatgccgattgcaaacgtncgnaatgggtgtgtgtgtgtgtgtatacaagttttcagacttttagacgactgaagcaagc

SEQ ID NO: 2444 - DNA, 2000 bp, Oryza sativa
  N_region (58)..(58): n = any nucleotide
atggaagtttactaataggatatatgcttgataatccacatatttactttatagttgnttccctttatagcatttactgctttatggtgaagttaacgagtaccacatccacattattgtaataattaatggatctgtgcatcacatgatgcaaggatttttattccattatctaaaaaataaattttgtatatacaaatcgatgaagttaattattgcattcaattgcattaaaatagtaggcttagaataactttttagaatatttcaaacacttgaaattgggacaattttacacatataagtagcgccacgttgttacataagcctatatgcatcaaaagccttaattttgataagatacctaatggacaattgaaacttaggcgttatcagttttgaaatattctaaaacctagctaggggcacataaatgaaacattaatattgaactcattcacttgatccattactcaacgcacttctcacctgttgagtaatgatcttaattaaatgagcccctctaaagtttgaggcaaattaattaacacattttgttcatcatctccgagctatatgtatcctcatgaaactgatctgctggtcattgaatcaaattaactttaatagataactaatgatttctcttcttttacccatagtttttagccaaccccaaatactttatcattgatgcttcacatgacatgatcaatcccgcaggttagatcaattgcatcagagtttatatgtttgttaaaaccttgctcaattagtacgtataagatagagtaaaacagttggactctatatatcacattaactctactttaaaagaagaaaataaattacccgtgaaacgacaaagggctggttaattagtagcacatgttaacaacaggtatgtacctcgattattttaggaaaaaaaagaatgcaaggttaattttgaataatattagagtaaatatattaataggaaggaggtagtgtgtacctcaatcgctcatgcttttaggtgaggggtcatcatcaattatgtttcttctaggaatgaacaaacaaagagagatcaagccggcctgcaccaaatatattaccttttcaattctgacactctcacaaaaagtattaccagaatggcgacatgctctgaccactgcgctaatgtatgaccagcaaccctggttaaattactgtcaattttggatctttcaccagcaggcacacagtgtgactttctgagcacagtgacgattattaattatcatatggtccttgcagtgataaataatggtcaactgcttgtcactttctctgtgtccacaagtggtgaatatggtaaacttgtatcatatatatctgtctttactgtccttagcaatgttttgtccttgactacttctgattaagggcttacgcgtaacgtaccctaatttgcattttacagccaaccaagcttaataagcaacagaatcaaactgtagcttgtttggtcaaatcaaaaccagtgatctcgatcagctaatcaatttgacatctgaacttatcttttagaaatagctcacaatcaagtcactatagctgcctacaagctttttgttgctcttatatatgcgtacggcggctgccctcttgcagttgcaccttgcaaccttcatcaaataaacaagaagctaggtcgaactacacctcaaaaacaattcttttgagtgcacatacacatatggcatcagatccctcctccggccacactaatttctaccgatttgttcgccggtggctggcaaatccgctaggtcaccaccagcaccatcatctccggcgaagcaccagtactgggatctcatcatcaacctaccctaggatcatcccaagatgcccatcatcatcatcatcggcgcaagaccgggatcgccttcgagacaagacgatgatcctagatgtagaaggagggatcctaatgtcatcttctaccttcccttacttcatgcttgtgg

SEQ ID NO: 2445 - DNA, 1462 bp, Oryza sativa
  N_region (467)..(467): n = any nucleotide
  N_region (557)..(557): n = any nucleotide
  N_region (568)..(568): n = any nucleotide
  N_region (572)..(572): n = any nucleotide
  N_region (615)..(615): n = any nucleotide
tctgtcattcacacataaatatattgtgagacccactaacatatggggccacatgtcatctttctccttcccttcttcctcctccctctctctcccttcttcctcttttctcttccccttcgacgcaccccgggagcgggagccgaatcagcggcgacggcaggcgagggccggagtggcgacgacggcgacacaaatgcagatcggcctctccgccagccgacaccgcgcgcagctgctcatcttcgtgtaggggagaggggagaggaggtggcggaggacatggcgacgggatagaggataccgtcagcggcggtaacatgagagcggttggtgaagtggagaggcagcgcggcggggcgaggaagctgcggcggtgaggaaggcacaaggagcggctggggggaggtggcggcggccggcgcggacggggagagagagagagggggtggatggggctgaggtcnccggcgaggtggcgcggacatcctgaagtggagaggctgggtccttcctctcgagcgacggtggagagagagagagagagagaggggggnccccccccatnttcnccaccaccaccaccccctttcccactaatccccctgcccttcnctctacccttctccaccgtcgccgccatcaccggatcgtgacgacggtgccgcgccctccaccactgttccggcccctcacaccaccacctccgctccagcgcgcacactcccgcccgtcgccgccgtcgccaagcccgacccctctcttcctctcgcatgcaacgccggcccccaggagggagagggagagggggccgccaccgtcgccgccaccactccacccggccttcgcgccggtcttctccaccgccgccgccatcactggatctggatgagaagaggaggagggacggccgcagtccactgctaccgacgcgcacgcgccccccggtgccgcccaagccgtcgccccatcggtcaatgaaaaaaagagcccacatgccagtcctgatctgactgagctcacgatggcccactgtcagctatctatttctcaccatcctcagttgagttagcagtgttgaccacggtcaaggtgccacgtcatcggataccgcccacaatactgccttcggagtcgatttgtaccggttttactaaatgggggagtcgtcttacccggttttctagttaagggtcacgaattagattcggtgaacaattaagggagtctaagtggactttttccttactgcttaattatactcacggcccatttccaaaaagttgcgctcttttgggccagaggcctattcccacttgacttccgctcctcttcctccagcttcgagagaaatctccgaacccgccgcggcgcacaccggaatccaccgccgacgctccggcgccaccgagggagggggtgaggaacgcgggggagaagcgtcgtaggcgaggtgccggcg

SEQ ID NO: 2446 - DNA, 873 bp, Oryza sativa
  N_region (10)..(10): n = any nucleotide
  N_region (12)..(12): n = any nucleotide
  N_region (34)..(34): n = any nucleotide
  N_region (43)..(43): n = any nucleotide
  N_region (47)..(47): n = any nucleotide
  N_region (66)..(67): n = any nucleotide
  N_region (70)..(70): n = any nucleotide
  N_region (73)..(73): n = any nucleotide
  N_region (76)..(76): n = any nucleotide
  N_region (80)..(80): n = any nucleotide
  N_region (82)..(82): n = any nucleotide
  N_region (88)..(88): n = any nucleotide
  N_region (98)..(98): n = any nucleotide
  N_region (114)..(114): n = any nucleotide
  N_region (121)..(121): n = any nucleotide
  N_region (123)..(123): n = any nucleotide
  N_region (129)..(129): n = any nucleotide
  N_region (134)..(134): n = any nucleotide
  N_region (137)..(140): n = any nucleotide
  N_region (142)..(142): n = any nucleotide
  N_region (159)..(159): n = any nucleotide
  N_region (165)..(165): n = any nucleotide
  N_region (170)..(170): n = any nucleotide
  N_region (176)..(176): n = any nucleotide
  N_region (179)..(179): n = any nucleotide
  N_region (184)..(184): n = any nucleotide
  N_region (188)..(188): n = any nucleotide
  N_region (191)..(191): n = any nucleotide
  N_region (195)..(195): n = any nucleotide
  N_region (197)..(197): n = any nucleotide
  N_region (204)..(204): n = any nucleotide
  N_region (208)..(208): n = any nucleotide
  N_region (214)..(214): n = any nucleotide
  N_region (218)..(218): n = any nucleotide
  N_region (220)..(221): n = any nucleotide
  N_region (223)..(223): n = any nucleotide
  N_region (226)..(227): n = any nucleotide
  N_region (229)..(230): n = any nucleotide
  N_region (237)..(237): n = any nucleotide
  N_region (244)..(244): n = any nucleotide
  N_region (249)..(249): n = any nucleotide
  N_region (259)..(259): n = any nucleotide
  N_region (269)..(269): n = any nucleotide
  N_region (271)..(271): n = any nucleotide
  N_region (276)..(276): n = any nucleotide
  N_region (282)..(282): n = any nucleotide
  N_region (294)..(294): n = any nucleotide
  N_region (296)..(296): n = any nucleotide
  N_region (302)..(302): n = any nucleotide
  N_region (304)..(305): n = any nucleotide
  N_region (312)..(312): n = any nucleotide
  N_region (315)..(315): n = any nucleotide
  N_region (317)..(317): n = any nucleotide
  N_region (320)..(320): n = any nucleotide
  N_region (327)..(327): n = any nucleotide
  N_region (331)..(332): n = any nucleotide
  N_region (337)..(337): n = any nucleotide
  N_region (339)..(339): n = any nucleotide
  N_region (349)..(349): n = any nucleotide
  N_region (360)..(361): n = any nucleotide
  N_region (363)..(363): n = any nucleotide
  N_region (367)..(367): n = any nucleotide
  N_region (375)..(375): n = any nucleotide
  N_region (384)..(386): n = any nucleotide
  N_region (388)..(388): n = any nucleotide
  N_region (395)..(396): n = any nucleotide
  N_region (402)..(402): n = any nucleotide
  N_region (406)..(406): n = any nucleotide
  N_region (426)..(426): n = any nucleotide
  N_region (430)..(430): n = any nucleotide
  N_region (432)..(432): n = any nucleotide
  N_region (434)..(435): n = any nucleotide
  N_region (439)..(439): n = any nucleotide
  N_region (441)..(442): n = any nucleotide
  N_region (445)..(445): n = any nucleotide
  N_region (449)..(450): n = any nucleotide
  N_region (453)..(453): n = any nucleotide
  N_region (457)..(457): n = any nucleotide
  N_region (459)..(459): n = any nucleotide
  N_region (463)..(463): n = any nucleotide
  N_region (466)..(466): n = any nucleotide
  N_region (481)..(481): n = any nucleotide
  N_region (486)..(486): n = any nucleotide
  N_region (493)..(493): n = any nucleotide
  N_region (495)..(495): n = any nucleotide
  N_region (499)..(499): n = any nucleotide
  N_region (508)..(508): n = any nucleotide
  N_region (512)..(512): n = any nucleotide
  N_region (515)..(515): n = any nucleotide
  N_region (517)..(520): n = any nucleotide
  N_region (522)..(522): n = any nucleotide
  N_region (527)..(527): n = any nucleotide
  N_region (532)..(533): n = any nucleotide
  N_region (544)..(544): n = any nucleotide
  N_region (552)..(552): n = any nucleotide
  N_region (555)..(555): n = any nucleotide
  N_region (561)..(561): n = any nucleotide
  N_region (570)..(570): n = any nucleotide
  N_region (573)..(573): n = any nucleotide
  N_region (582)..(583): n = any nucleotide
  N_region (594)..(594): n = any nucleotide
  N_region (602)..(602): n = any nucleotide
  N_region (615)..(615): n = any nucleotide
  N_region (629)..(629): n = any nucleotide
  N_region (634)..(634): n = any nucleotide
  N_region (649)..(649): n = any nucleotide
  N_region (656)..(656): n = any nucleotide
  N_region (663)..(663): n = any nucleotide
  N_region (682)..(682): n = any nucleotide
  N_region (710)..(710): n = any nucleotide
  N_region (715)..(716): n = any nucleotide
  N_region (718)..(718): n = any nucleotide
  N_region (728)..(728): n = any nucleotide
  N_region (736)..(736): n = any nucleotide
  N_region (759)..(759): n = any nucleotide
  N_region (774)..(774): n = any nucleotide
  N_region (806)..(806): n = any nucleotide
aaaaaaaaananaaaaaaaaaaaaaaaaaaaaanagaggaatntacntctgttaagaatgtataannatnagnggnaagngnacaatnttgcataaanaaaagagggggtggtnttttttncnaaaaanagaanaannnnanatatttttataacaatntggttngagcncggggnttnttttntttnttngagnanacggggngganaaaaanaaananntnttnntnnaaaacanaaggggngcgtnttttttgatnaaaaaaagtngnaaaanatgacngggggggggggngnagagtngnnagaattnaananaanaaaggtntctnntgaananagagatgtanggggggatctnnanttanaaaaaaanagagggggnnnanaataaannattttnaganttaggtttttttgaaaaagngatntntnntggngnnatngggnntgnaaangnattnaanatttgggttatactnaaaangggggananaaantttggtttnaaanggncnnnnanagatnggganntattttcccanttccaatnggnaaaaantaaattttnacnaaaaggggnnaaacgtaatgngttataangggaaaagggaangggggggttaaccnaaaanaggggggggaacaanaggggantaaattncggaaaaatggggaaaggnaccccaattttcccgaaaagttgaagtnacccnnanttttaaaaangccttttnggaaaggaaacccggaaaaaggnagggccccgaaattngcaacttgaatttttccgggaaaaaggccagnattaaaaccccccccccttacctacggggatagtgatacgatggcgatggcggccgcttccgcttcg

SEQ ID NO: 2447 - DNA, 2000 bp, Oryza sativa
ccatcgtttttaggtggtgtagattgctttaaggcaattttatcattcttaaaaaaatacttagagatcttgcttcaatatttatgcaacacctttgctatcgtaagtcctaccccacctgttggccacacctccccaaatggtcgtttcctctctccttttctgtcactgttgttcctcaaaatgttcctatgctatgtctttaagagactggattttaaactcttgagaagatatcccctcattatttgcatatcactcaaatagttataattttctttaatatatcactccacaaatatatgaattaaaatttaactttcacaaattgcaataaaaaacaaattaaactacaactaacacatattcatagtcaaatttatttttctgttgtaacatgtaaaagttaaatttggcattgcatgtatgtttgtacaatgatctatcatatcatatattgatctatcttattaaaaaaaattattaatatttaagtgatatgcaaataataattggacgtcctcaggagagtgtagaataattttccacgtctataccatctctcaccgcctaggacaatgatatagtcctaagataagacctaactttctgttgagagagaataaggtgtatctttgattcttctataggaaaacatgtattattaatttattagttaaaaactagctaacatttatacgcaattttcagcagagttaaatatagaatttgaactggattttgtataccatacattttaggacatgtgcaaaatagaatctaatattagctcttaattaatacatactcatttagagactatccttagcttctacaaaagttaacacagcaaaatctcttaaccattagtacaccaaataattttttattactctcattttctcaatccacgtgcaacaaaaatttctttaataaatgctataagagtcgactttaaaccgttgtcatctctctctttcatgtttccaaagttacttgcatagaaaacggagagagccgttaataagcaccattgtacataccctaagtagaattggatttgacgtatacaactattggtttatgtcttaatttagggttgtatacaactgtatgtctttatttatcgttcatatcgctacaatttagaccactataatataatggtcaaaatttctctcgattaatgtaagagtttctagcttctagaacagatgtgatggagctatctagctatataatacaataatagacagttacatttattattttaaataaaaattagtacatattattataacatattttcacaacgatctagtaatgtcaatagtattggatacaccattaaaaaggtaattggatctgccaattagcactcaaagcagtgtaaagagaacacaaaactcactataaatacaccaagactataaacgtgagcacaaagctgtcaccaagtagtatgtgaatcctccacgactataagcgcgagctagtatcttgaaaggaagatatgcatcccaaatggaaacgagatgcatttcaaatttacagtaagcatccctatggttgcattgacaacaagagtgagacccaccataaggagcaatagctatggcaatgcctacaatggttaagtctttggtagaatataagatgggtcccattgaatcccaccgaagaaaaaaaaatcaattcctaaccatcccatacaaggcagaaagctagagaaatgaatacaacagtgaaaaaaaataattttatattttcatgtgatcacacttaagcttaagactcttttggattgcatggatcttaatgtgtgcccctacaatagctaaagttataacatttaatgtttaaggcttacattttactaaattgtggttaccctaacatattaatccccccaacccagggatatataggcacatgggctaggggggtcaatcgtcgtgacgtcgtttacacgtaggacgggagaagactcggcccggtac

SEQ ID NO: 2448 - DNA, 2000 bp, Oryza sativa
  N_region (168)..(168): n = any nucleotide
  N_region (551)..(551): n = any nucleotide
ggcggtgcatagtgtggcaattagtggttgcgggcggtctggggagattgttgtcgacacaatctctaaaaccgagtttgttaatattttttctttaaagtattgatgttacgtaggccaccatccgtcataaaaagaaatactccctctatcggagatatgggcccnggggtatgtgaggtagaggagaattactcttcctctggccacgtggcttggccggatggccccactcacacgccacgcgtatcatagaagcagcggggggggcctcggggtacgacgtcgccccctcggggtacgacgtcgccccctcggggtatgacatcgccccctcaagccctatcgcaccttcgccccgaggccctcgcctggccgccacgcggcaaaggggagcacaggctgaacagccgtaaatgcacagcaccccaactgtccctcgcggcagacgtgtggtgcgtctggctaacccctgccagtcggatgtgaccggtctgtgaccggcccgtttccgtcacatccgatggatagggtaatcatatcatcacgtnacccttgaccccggcggaatgggggtaggtgtgacccgtcaaatccgagtgctgctcgaggaagggctgttgcatgtcttcgatcatttatgagggaatgaccgggctgaccaccgtgtcaggcgggggacggcgctgggttccgctcaaggatcggttatggcttagcttccgagagaaggcacgtcttgaaggccaaaaaggtgaagtgggtcttttcccccctttccccggtggagagtaggtagaatcggcgcgtgtggtatccccttagaactataaaaggaggaccctgcccacagtgcaaggaagggaacccgagaaaacccaaacttcggaagagaggaggcaagagtgctctccggagtaaaggaacccttgtaacttcatcgataatcccaaacacaagagtaaggtgttacgctctattgcggcccgaacctgtataatccgtttgtgtactagctcattgatagtcttagggacgagcaaacgaattccgagagacgggcctccgcccccggccgaactcacgaaagggggtctcacgactctctgttattgagggttctccctcgacaccctccgtctcacaatataagggattttcagtttttgcttgcaacgtttgaccactcgtcttattcaaaatttttttgcaaatataaaaaatgaaaagttgtgcttaaaatacagtagataataaagtaagtcacaaataaaataattaataattttaaaaaattttgaataagacgagtgatcaaacgttacaagaaaaacttaaaatcttttatattatgggacggatggagtaatctctaagtagtcagttttaaagtaataaaaatactgagataaagttggagtagtcgagtatcgcgtaaaagaaagagaaatctcccgtcacttcgtctcctccgctccttgcgccgccgccaagacgagtcgcggctgaacagaacaggggaggggcggcgatctccatctggcgagcgagcagagcagggcaggggaggggatcctggtgagcatccacatcctctttctctttctgattcatctctctcccacctcaccgggactacttttgtctggaatttgcttgcgcgcgtgcgttcgtaaaccctagcttctcttgtagatctggaagaaagctcttcttcctctttaatctgagagccttaaacctctattcttaatacaactagtaacagtttgtttgttcacccaaaaagtttggggatccgcccctgttagtgttaaggggttttccgtcttgcccttgccaaagtctagccttcaatactgggggtctagggatggagctgtcgggcagcctcagatgcttgcacaaatcactgcattgtaattcttttgtttcttttattctgcgacaggtcgtatattcacctaccttggagtaattcgcatacgtcacaagttaaa

SEQ ID NO: 2449 - DNA, 430 bp, Oryza sativa
ttttttctttttttctttttttgatgtgtgggtgtgggtgcagcagtggtagctgtttttgtttccaaaaggtgattttttttttgggtggggggtgttgttcagatgaacacccaaattgccccgcgtttgggcgagcgagttgtagtgcttgttggaaccaaatctgtgatctttgcggtttatgctggtactatgtttggtgtgatctcagaaaatcgaattttatttgggttgcttttatggttggtaccgatgattttggcgaagaatcgtggtgtgattgtaggaatgggaagctttgatccgttcggtttgctgtaggagcatgcatgcttatgatctctcttggggttcctcctttgcaggtaattgcttgccttctgaggaactgcgggagggaccgaggagtcgtggagcgactcttgaa

SEQ ID NO: 2450 - DNA, 2000 bp, Oryza sativa
agagggaaatggtgcatgtggtatcctcttaagatataaaaggaggaccttgcccaccgagagagggggtttttctttttcttggactgaacctttccagattaggaacccagaacaagggagaggctggctcatactttgtagctctttcacacacgaatccaccaaaacacaggagtagggtattacgcttctaagcggcccgaacctgtatacatcgccggcgtcttctgtgcttcctgtctcgcgaaccttccacatacagattgggagcttagagtctcacccagggtccccggccgaaccggcaaaggggggcctgcgcggtctcccggtgaggagccccacgctccgtcacatagaaatatatataatttacaaataactaaaatttgatattaaaaataattaataactaacacgtatataaaatacaatatgaatattacacattagtagtttcataaagttattacaaaatttaaaattatgatgtcattttaatatatttgaataatataatgagaaaacatatatgatattatataagagaaaatataatgatgctagctgtgcaatctgcgcgggccaccatgctagttttaacttgtttccgttaacatgttttcaaactactaaacgatatatttcgtatgaaacttatgtgtaaggtaactttcaaacatcagataaatctttcttaaaaatttaaaataattaaaactcaattaatcatgtgctaataacactctcgttttatatgtcgtgcttaatcttatctttagcggatgcaggctaacgggaccatatatagagacaccgacgtgcaatcccaaggcgcaacgggcacagattgtgactggatggatgacaattaagcgcaggaactgcctacaggaaccgtgcgcaaacatttggccatgagtaattttacggtttactattttttctgttataaatttaatagtaactcttagtatctacatactgtaatggtacctttaaaaaaccgtagaattgctctttggccattgcgcagccgtaaattcatttcatcagcgcggacttcaagaaataggccgtgtaccggccagactaattaatgctcagcgtgctgtggtgcagaggtccagagtttggtcttcggtgtgtgataaccgtcatgtaggcctcattttgatgggcctcaatttccaacccatctacgtgttcagactacagaggtagcaagcagcatacggtcgcatcaggttgaggacgccgacgccgtcgccgttgccttgttcaccagaggcgagggacgacggaggtcggatcgaaggaggggagcggtggtgacgactgccgagaaaaaaaaggctgtggcttcgcgcgattgtcgacggcaaggggattgtcgatcccgatctcctcgacgatggctgcagtatcctccactccactttggcaccattgtcccacacgattgctgaccaagtgaccagtgtccgttttctccgacaaactcggcgtggccacagtcctccaccgccctccgcatggaaacgaacaaaccccataaaactatagcagagaatgtacactggcaggctcacgagtccgaggtgcatgcacgctcttttttatacacctagcgccccgacgcgcctgtctcctacacggggccccggccccatctgatatctacgatgcaacgtacgaggccggcaatggccacccgccggcaagtggcactgttgctacgtgtcgcccccgcgcggcaaagcgacgacacgggcggcagctccgtcagtcaccgaagccttggtgtctcctgccgcccacgcaccctctttcccgtgcttcgtgtgcccttcgatcgacacagctcggctgaccccatgataagtagccagcgatggcgaggcattggaagtgacagttttgaacactgcagcgtgccagtgcgtgtgtgagaaaaatcgcaggggaagtgaggatggaagggcacatgttgggga

SEQ ID NO: 2451 - DNA, 2000 bp, Oryza sativa
  N_region (164)..(164): n = any nucleotide
aacttgatttacaaatggtttgaaaaacttgacacctgggtcggtgccttgtgaaagaaaatgagttttaaaaacaaaactcgcgacacaaggccattcctgggcgggatgcttgtgcggtcactttaaggaccgattcctttggaattacatccgaacatatnacaagtgcgaccacatgggtggaatgggacacccctagctgagtaactagctaggtgttgatgcgaaaaaaacacactagcctggaagatctgcttaactccagtgcaggtcctaaatcttactttcgggttcaaagacgtgctagttgatttgatcctgcaatcaacaagaaggaaaaaaaaagatagccgatcggctaagggccgatgacatatcgttaatcattaacccgatgttattgacattagatcggcaatgaagattatagcaacataaagttaaaacgatatataatctttttctcgaaatatatttaaaccatgtgattggaatagatcgaatagtaagtcgagacagtataaatcacttatgtttaaaagtactttaagacgaagattatatagacactcatagcatagccgatcaaatagatctaacatgtatcggctaatactccggataccaccctatatcaagatattaaaacaaataaaatatatcaaacagtaagcctaatatactttaatgctataagatcttaatataaagggtaggtttagcatatcaagtgaacatgtaaagattaaaggtagctaaatcaggtaagatcggctgaaaccccggatactatctctattgatgatcataagacgaactagacattatggttatgaatattacttaatagatcgaactcaaccgatgtagtattaagcataagaataaacacaagatctaaacaagttgatgaacacctctatgagatggtaccgatatcgcagtctcgttggaagtggttcgcaccgttttttctacgacacgctcctgtaagatgccattgtatagcggtgccggattggggtgtgacacatattttggaaaccctgtattaagggaattcgttttattttttgttccacaaaaaatgtttcacctaatgtactcacaatgtttcactatgtatagatctaatgttgtagtgaactgaaacattctttcgctattttactgaaacattgtttttaatataaggtgaaacaacgcccgatttaaacgattgaaacattttcgatctacttagcgaaacaattccaatatactttgtggaacatcgtgtaacatttaaaaataattcaataataagctaaaaaaattttgttggaatatatgcatgtgtggtcttgttttaaagatttaattgcaacgaatttaatggtgcaatcggattatgatttggataaataatttaagagaaaaattagtttaataaaattgctcagcagttaacccaccgtacaacaaaatcaatcagtttctttcacgtaaacaagctcacagccattgcgtacaaggatagagcagcatgcacaccggagctcgtcatggactccaaccaccggcgccggagttcagagccagggccggtgcaaccagctggcctcgcgcgtcctcctcgtccgatctcacgagaagagaccgcgcgatgaacgaggcgaccctggattcgggcttcgttatgtaggggctgtgagacgcaacgcaagcgagatcagttcgaaatgagaaagaggagacgaagaaatcgagtcggagaaggcgtgggtcgggacggacaggacaagacgaggcgaagctgacaaatcaacacgtgaattctgatccgatatggacacgcaaggactaacgaaaatctactagaaaaacatcttaaatttttataatagtatatatagagagatagccacaagaagaggaaaggaaggagattagattagattagcgacgaattcgtcaaacccatcatctccttcgcgccgtcgtcgaccaccatcacc

SEQ ID NO: 2452 - DNA, 2000 bp, Oryza sativa
atatgtaaaagaatttgttcccacgacctccattttaccaaaataatatgttacaaagagatttttgaaagttacatacaagttacactatagttacagtgtaattacatacaagttacagtgtaattacactacgattgtactgcaattacatctgttaaatttttgagaaaaaatttgtcgacaaatatatagcaaaatcgtcccggaaatagagcagacggcgcagaggacggatggctgaggattacatatagacttttccagtttcagccaaaaaaggaaaaggatatttaattaactgttccaattaaattaaccaaaatgaaataatttttcaattgttaaaaatacttccaatactcaaataatttcaagaaaaatcctgaaaataattggacactcaaagtatttaacaaaattaaaaccagatcatttaatgattaatttattgatgaaataattgctgaactcttcttttgtattattaaaattaataattaagctctaaaaaatccgagaaaattccagatagtataattaatcatggagaattcaataaaaattaagtccagccaagttttttatttaggaaatattatttcccctatttaacttcacttgtaaattaatgaacttttaatataaattctattaataatttattaaataatttatacatcctgaaacggaaaatgcggcgtgtggcggcgtctgtgaggcaggttctcggcatagatccgtgaacttagccagaagtggttgtggctcggcaccttcgacaccatcgaggaggtcgttgccatgttcgacgttgagctgctgatagctgattcagtgtcgctcctcctccccacatggtcgtgcgcaacgcagccatcgatgtcaaagtcgtgggctagcgggagaggagaggagacgaaggaggcgagaagcaggtggggagagagacgatggtgatgggtgcggatgaggacgaacagcggcgaatggaccagggtcgcatggcggggttcttccacctgttcaaccgtcaggcagatccaactttgttgacgggttgaatagcagtgaagaagagacatcaagaaaggcaaggttgggatgtagcgaggcctaggaggtcagatctggtggccacgggcactgcgagcgatggatccggtggcagcaggcctcgagagctccagtagcagttgatgccgtgacgacggtgggcttgggtgcatagatcttcccttttttccaccacgattgtatatgtgagtttgcgatctgattttatatacgtatgaaccaaaaattgttgaactagatccaaattattgaattgaatttgtgtaacgggatccaaactgttgtgtgtttgaattgaattaaagttgttgaattatattttttagcaattggtaattgcgatggaactattttcttgctaaaatcatttccagaataagccacccatccctcaaaagtaatttgtgcagacggacggctttaggccggaccgcacataaaaattgatttttccctaacggttccttaggtggacggcatgtaaaaattggacttttacagctgaactgcctttgaaaatcaacattcccacattgtttacgtatagtggtaaaaccgcattcacaaatcatagaaagctcttttgtagtatgaaaaggaactagagttaccgatcaacgtgagaggagttgtttaacaaaaaaaaagaaaaaacccggaaagctgagaggagttttttaaataaacaaaagggggaaacctgagagttgtgatacgatgcgtggacacactggacagtggatatcgaaaaacttttgctgtcgtgaatccgtcgtctcgtctctctcgttgcgtctccttccaccttaatttgcaacattagttcctttcttatctccagcgcttaaccatatacgcgaatccagcagctatagcgtcaagcagcaaagcaagcaatagacgacgagcccaccttgccgtcc

SEQ ID NO: 2453 - DNA, 2000 bp, Oryza sativa
  N_region (824)..(824): n = any nucleotide
  N_region (1083)..(1083): n = any nucleotide
  N_region (1088)..(1088): n = any nucleotide
  N_region (1536)..(1536): n = any nucleotide
  N_region (1543)..(1543): n = any nucleotide
  N_region (1989)..(1989): n = any nucleotide
  N_region (1996)..(1996): n = any nucleotide
caaaagccgtttcggctgtgttgtgcatttggtgggtaataaagcaacgtgtatggctgtagtttgtatacgatggtttgttgtatcgatcacagggtgcacgggggaggggatggtacacgtgctgacaatcgaacatgacgtgttactttgatcaagtattcctttttaaaaaatggatgcacgcgcgttccttccttttcttttcaccacccagggtggatttattctaacttatatggtgatatttgagcaagttttataatgggatgaatatcgcctttaatttaaatcgggttatctactcattaatgaagagataacaaacgcaaaatatcacatctaataaacaaacctcaattataaaacacagccttacactattattgagagttaggtagaggttgccccttacaaaatggatgactcgcgcttttctaacttctctcctccacctcattatctaatcttatgtggtaaatttaagggcaatatgtaggggtttataatacttgctcttagactggtctctttcgtccatgttctgaactttttaccccctcttttttcatatgcacacactttctaaacatttaaattgttttcgtgcttgggtatggatttccaatccatacatctgaacatagccatataggtagtggtagatctattaatccttggccatatattgcattctactaattattaaatatgtatttactagtaatgtatctgtacatcgtaaatattaatttatgggtttatagtgctactatataattgggagtaaagaaagtatagtttacttctttcgagagagggangggtggtttcatgtgtggaagtagggtgtagtgatggtgggaagggagtagatggattactatgctttaaatatacaagttacatgttccatgtgttagtgttacaatgggattgaataaaaatatgatttactattttttatattggtttcttataattttagagatatgcatacatcttaggccttccttgcaaaactatagaaacgaacacaacacaaaagcatacatagcattattttaaaaagtagcaagaatnaaatnagaataggctagaacataattatattagagagatagaatagaggaaagttttctacgaggaattggccatcttaaaagaattttataggatttgaatggtctagcattttttttttcaaatataccaaataaaataatttcttacatgatttgaataatataaatcccctctcctcctccccacatcatatacaataagtaagtaatagtctagaacaattttggctctcattaccaatagtgctcaccaccgactcattcacttgtgcatgcaatggcactacggctacctcaccattatgcttcaccatcgactcatgcacttgtccccgtatcaccctatcctatatatcgagctatcactacctacctccacctcccatgcccactttgcattctaattcgacatcgccaacattttctccctagcaaataagagaaccacagnaaatagngcaagaaaactagtctcaagatgtacctctctttcaatttttttaaaatgtaactttcatttttaaacatataataatattaacttttcaatataatatttgatcattcatcttatttaaaaacacatgttacatttattttactgcaatttgttttattagtaaaagtaactaattctattagtaaaaatactttaaacacggcttgtattttttttcaggcgtctgctaaattattgaataaggcaaatggttttataattgttaaaaataacattatatatttaaaaatagatgtagtaatagtaaaccttaaatgcttttttcaatgaagaataaatcaatattaataaggttgccaagggaagagaactgtgtgaagcgcggtggtatgtgccagtcactgtgcaaaaagcctctgtttcagccccaaccacaaaaaaatnaaaaatnaaaa

SEQ ID NO: 2454 - DNA, 2000 bp, Oryza sativa
  N_region (705)..(705): n = any nucleotide
aaaatgtcagtcgactgtggtgaccgctatggcagcgctgtctttcatcatccggccaaatatataactcaccctaaacaccgacgaccatcccgtaatcagggtttaatatttcgttttctccatttctgaaattttggaaattctactccggaattgtttgccttttttttaaaacaaaatttggtcaaattttttaaaagttaccaaattcacaaaaaatattaaaatatctaaaattttggctgaaataatatcatatcaggtccgatagaaccgaaaattctgaaattttgaaccctgcgtacaataatgcaatgcacctatgcgcccttagggcaagtactatgatgcttgatgtggtgcccctaaaaaagttatatatgattgaattatgaggtggaagaaataagttaggatagagaaggtgaaccacccctcatacaaggagcaacctttgcatcaaacctaagaaaaaggagataaaaggaagaggggattggacaaataaataaaataaaattatttaggttagtatactataggtagtgttaatgtagatgtggtgtactccctccatcccataatataagggattttgactttttgtttgcactgtttgactcttattaaaaaaattgtgcaaatataaaaaatgagaagttgtgcttaaaatactttggataataaagtaaatcacaaatnaaataaataataattttaattttttttaataagacgaattgtgaaacagtgcaagcaaaaagttcaaaatcccttatattataggatggagggagtattgtatactccctccgtactcgtaaaggaggtcgtttaggacagcgactcggtctccaaaagacaactttgtcttcttttttctataaaaatatttattgaaaagtgatatatatgcatacttttatgaaagtatttttcaagactaatctattcatataacttttatattttcaaactcaacaacttaagagttattaatgatttatattcccaaggtttgacttaaatattgtcctaaacgactttctttctttatgagtatggagggagtatatcacctcttatcttacatgaataaaatttagatatgacaactaccctttaataaaacttgcccttaacaccataacgcctcgtcggcatgatgttagcgccttcttagtgacgaggtcggcgaggtgcctgcggcctgcccaggtcggatggtggcagcgggactgaaagagtcacggtggtggaggcgatggtccgggcgtccgtacggaacctcgtcggagacgatacgtcgcacaggatgtagactggtgtgtttgccaagagcaagttttcaacactcctctttcgttttccgcatgcacgttttttaaactgctaaatgatgtgttttttttaaaaaatttctatataaaagttgttaaaaaaattatattgatccatttttttaaaataatagctaatacttaatttatcacgtgctaatggaccgctccgttttatgtgcatgggagatgattccccagacccacctccaaacatacgaaacgtctaagagcacccgcaatggtaaaataagatgctctctacaaaacatgtacatctaagcaatagactagattaatagtaaaccacctcaatagtatgtctacatggatatctatagctctctcatccattgtctcgtttttctctatagactatctccagattagtagatagatttactctctctctttatttaatctcttccaagtaggaaaatatgctgacatagatctcttgtagagaacctatagacaactattgcgggtggcctaatgagcgtccagtggattcgcccccagtctccacttcagagacggtcccacctgtcatccgctcatagaaaccctcgcgaaactacaaaaacccctcgtctcctctctcttctctcgccgtctgccgccgccaccgccgccgccccacctccgaatccacgc

SEQ ID NO: 2455 - DNA, 2000 bp, Oryza sativa
  N_region (1488)..(1488): n = any nucleotide
  N_region (1560)..(1560): n = any nucleotide
ttatgatgtaatggcttgtctcggttcaattatgcattacaattagatttggtctttatatcagagtcaataggtgatattttgatactcctttcatattagtccggccaatctaagtttgagacatttatctcacgagctaatggtccaatctgtacaaaaccacatgaattttgagatatggtacataaaccaaagtattatgatcataaagtttcacaagaccacactattaatcattttaactgtgatgttgtcggagggtgaactccactagcgggggacagtgagggcccccctttgttggttcggccgggggcagcggcgtgagattcgaggactcggtgagaaaggcagtctagagggggtcgaaccccccgagaacgatgagacaaaaggagtttatataggttcgagccgctgaaaagcgtaataccctactcctgtgcttagctgattgtgtgagaaattacaatatctccttattggagtagaaggtgttgatgatgatgggcagaggactgctctaaaaaaaagggctcatcctctccctaggtaggcttggacctccttttatatcttaaggggttaccacatgggtctacctagcctatctatggaggataatctcattaaatgcatgtctcattgcttgccttggaagtctcttgcacgccttgccatggcgtggggcccgtcaaatttatctggctgacacgggggacacgcatgtcattcgatatttaatgagtgaagacttttggatcctcacttgcgtcgggaaacgtaaaccctatcctaaccgggttaggcaaaccgtcttcggctgtgatgagaggctaagcaacctctcatcatcgtgacgtgacaggggatgtcagatggcacaccgcctgacatgcaaccagtgcgcaggcgcactaccttggctacatcggtcattcgaccggtcacaatccggctaggcgcaccacgtgccgcatttaatgcagcgtggagcgctcggtcacactgccttaaaatgcggttaggtgggcgctgccctacacacgcggcactatgtgaagggggtcggaggagcccgacccccagacttggagggggcggccgtcgccctgcctcgggcccgacccccctcgaggagagggccacgtggctaccgggggcagcctcctccctatggttctgatacccccggaaccatatcactaacagatgtaccactgttttataaattctaaaatgagtaaagtccatcaccggtccctaaacttgtaccgctatgtcatcccggtccctaaactcgcaaatcgaccgttcaggtcctcaaacttgttcgactgtgtcatcccggtccctaaacttgcagatcactcgtttaggtcctccaacttgttcggttgtgtcaccccggtctctaaacttgtttagttggatgatctaaacgagtgatctgcaagtttagggaccggtgatggattttactcntctaaaatcattgcttaaatttatgaatttgttatcaatcacataaatattacatctgtttttaaatttttnatctataagtatatcagaatggttaacggtgtggttttgtaaaactttaggatgataatacctgagattatgcgtcgcgtgctaaaattaatgtggttttgcgtaatttgcattatatataatatgtagtgttttatgaaaattattattattcttttgaaaaaaagaatagtgttacacacacgcgtactccgtgccttcccgtcggaggaatccccggtattcaaccgagtcgccccccatctgaggattaccaccacctccacggctccacctccgcggcggcgtaatccatccaactcgcaatagatatacagtccccccaatcgacggaaccctaattctctcccgcacgcgcgtcggcgatccgaggggaagtagggtttggaggaggaggaggggagaccaccggaggtaggcgaatcccccaaggccgggca

SEQ ID NO: 2456 - DNA, 2000 bp, Oryza sativa
gatacaggtgcgcacggccaatttcagaacacgaaaagcagacatttttttggacactttttagctgaaattagtcaagattcatctgaactgagactgatggaccgaacaggacacgctgagatcgccaccgccggagagcgagacgatgcagaagggcaacgtgatcgcggtcctcgccaccaccttcttctacctctgcgtcggctgcttcggctactccgccttcggcaacgccgcgccgggcaacctcctcaccggcttcggcttctacgagccctactggctcatagacttcgccaatgcctgcatcgtgctccacctcctcggcggctaccaggtgaagctgcgactcaaacttctccaaaatcgcattgcttttctctgaaaaaactatcctgatcgaatcctgcatgaactcgatgcatcagatgtttagccagcagatattcacgttcgccgaccggtgcttcgcggcgagcttcccgaacagcgcgttcgtgaacaggtcgtactccgtcaagatcctcccgtggcggcgcggcggcggcggcggcggcgcggggaggtacgaggtgaacctgcagcgggtgtgcttcaggacggtgtacgtggcgagcacgacggggctggcgctggtgttcccctacttcaacgaggtgctgggcgtgctcggcgcgctcgtgttctggccgctcgccatctacctccccgtcgagatgtactgcgtgcaccgccgattctcgccgtgaacgccgcggtgggccgcgctgcaggcgttcagcgtcgtctgcttcgtcgtcggcacgttcgcgttcgtcggctcggtgaaggcgtcatcagaaagaggcttggctagctagctagctagtagcgagtaatttagcctggtcatcgagaacgaaatgtaaagctagctcagtgtgccatttcatctgaagtaaaaaggcgcggtgaactgtacaatacatatgcagaaaaaatgataaacataagatgttggttattacttcctcggtttctaaatatttgacgccattgattttttaaacatgtttgaccattcgtcttattaaaaaaattaagtaattattaattcttttcatattatttgatttattgttaaacaaactttcatgtatacatatagttttacatatttcgcaatttttttaataagacgaacgatcaaatatgtgctatgtcaaacatttagaaacagatggggtgccaaagtatcagctactcagaaattctgacaaataatgatagctgtttgttactgtcccttccgtttatacccatttcatatttcatattgtaagtcgcttaattttttaagttatttttttaagtttgaccaaagtcaaagtattatctaccgctttgaaaatatgtaggggctaaattcgatcgatgtactcatgcacgcacgtggaaaacacacacaattatagttgtgaacgcctactctctctggtttttaacgtttgacgcgcttgatttttggtgtcttcgatatatgtcttattaattttattttaaaaatacaaaaatataagtcatggtaggagtatatttaacaataaaaaattatagtaaaacaaaaaaacatgaactttttaaaataaaaagaactagaggttaacggcgttcaagcattaaaactagagagtaacacttgccagacctgaggtggtactaatcatgggccgaactcgagtccaatgtggagttggactccgattatagacgtcgacgcggctgggccggcagctaatccggtctttggggccccatgtatataacgtcgtaacagaaagggagacagattccgtgtccggtttcacatcccatcccacgctgtcgacacagcttccgccgcatccctcccctcgccgtcgcaaaatcccccccgccgctcgcgccgccgccgccgagagcgagacccgcacgaggagccaagcatctctgcgttctacagctccgggccaccggcg

SEQ ID NO: 2457 - DNA, 2000 bp, Oryza sativa
ttgaagaaaaattttgcaactaaacacggccttagtactccctccctttattcgttttgattttgattaaaatcaaattgctttaaatttaattaagtttgtattaaaaaaataaatgttttcatcccaaaatatatttaattactagaaaaaatacccgtgcgttgcaacgggtgaatgctattttagtcttattattgttatacggtttagctatgatgaaatttaatgtgggaatttgcttgtatattcttttttaagaaaatcatgagctacaattagaagtccgactttcatctcaagttttatgtaagtttttttaaaagaatatttccaaaagcaaatgaagttaaaatccaactcatacacgaatcttaaaccgtatgaaccgttggatctgcatttccaaaagcaaacgaacttaaaaaatcaactcaaatacggatgacataccaaaaagtaaaacctcttcaatttttataatagtagagatagctttaataaaacaaaaagtaaattgcatcgtcggtacacaaacttgtcaggtgggtgcaatctagtacacaaacttgtaaaattctcgtctttgtgcatgaacttgtctattgcgtgcggaggaaggcgaaaaagacactatatggataatcttattgatttagggcatatatttgagaaggttgctattagagatgtacctcttcaataaaaaaaatagaataggatatagtgatagcagaaaaagattaaaagacgagcaatgatataaatgttagaaatatatgaaattcatcatttccatgatgaaggatacaatatagaccaaatttataaatattgaatgtcttatgcatactcactacacgtatgcacgtcacatcctaatcaacgtcaacttcgtaaaattaacattgccaacatattttggtcctcattcgcacaaactagacaagtttatatactgaaacgagcattttacaagtttatgtactgaattgcacccaccaaaatagtttgtgtaccaccaatacaatttactcaaatttagatcaaaatcaaaacgactttgtaatccgaaacagatggttgtaatctgaaacggattgagtaatacctaatcagcctaaaaggctggggggccggcccttcagattcttctctcgtgatgggccgtagtaggcctgatgggacacatgcccaatcttttcggataggcccaatctgatttgtatctttttggttaatttttttcagtttatcacttgatgaattcataaatcagaaggttaaattggatccgtgaaaagaagaaaacaaaagtgaaagcgaatgtatttttgtagtcgaaaatcgtttctatatttgcatatcaaatttgggttgcgtgttcatggagggacaccggacacgcgatgaaatcatctgcgcatcctgtactttcaatttttcctgtgtcatccaataaaaaaaactaattcaaacaaggaaaaccaagtgttgaaacatggtaaatgatttaccgttggatcgaccgatcccgttctctcacttcaacagccatatatattatattaggcccatccacgaacaaatcgaaccgtcgaagtgactctgtagccccgtaactggaaatgaattcatattcagatttgctagtcctcacggccgcacgctctcgcatcctcgcgtttcatcctcctgtccgtgctgtggatggcctcaatgtttttgttcattgtttctcggtaaaatttctgcaacttttgtttgcgaattcaaacttttgtttgaaacttttcgtgatttcgctgacccccgaaatttttcccatttccgataggttgaaccattttgatcttcaagactccaactcgtactcggtttgtagcccatctccgactcggattacacgtaggcgcgcgcctatttatagctgctgccctgcccgtctccttactccattagcttgctagcgcgcggcacaagagcagtaagcgaggcgc

SEQ ID NO: 2458 - DNA, 1665 bp, Oryza sativa
  N_region (6)..(8): n = any nucleotide
  N_region (10)..(10): n = any nucleotide
  N_region (13)..(14): n = any nucleotide
  N_region (18)..(20): n = any nucleotide
  N_region (24)..(24): n = any nucleotide
  N_region (42)..(42): n = any nucleotide
  N_region (50)..(51): n = any nucleotide
  N_region (62)..(63): n = any nucleotide
  N_region (78)..(78): n = any nucleotide
  N_region (89)..(89): n = any nucleotide
  N_region (114)..(114): n = any nucleotide
  N_region (117)..(117): n = any nucleotide
  N_region (119)..(119): n = any nucleotide
  N_region (134)..(134): n = any nucleotide
  N_region (145)..(145): n = any nucleotide
  N_region (148)..(148): n = any nucleotide
  N_region (154)..(154): n = any nucleotide
  N_region (1355)..(1355): n = any nucleotide
  N_region (1558)..(1558): n = any nucleotide
gggttnnntntcnntaannnattnctccgggggggatctaanccacccannggtttggttcnncctggcccaaatttngtctctggccnccgttgggcgatccccatccggggncanangtggccccggggtcnccttttccacngantgtcgntcgccggtggcatccttcctacccacacctcatcagttattctgcgttatccctcaaaaagtttgggggttcaaccgaaacagggttagatctccctctgcccagctccacctactttcaagttgttaattttgatttccgtttttagcagatgtaatttggttactgaatctcatccaaacacccttagaacgaaaaatgtaagctcacataatttgtactcatccaaactcacataaatttcttaagaagaatctagaccacaaactacccatagtcacacaaaatatctttttatcaaggtatattcttataagtaatttttattccacaaaattttctaaaggacatactgtgacacttggcattaatctaatttaactttttttctttatcaggttataaattttctaagacatttgtgccacttggcatgaatctaatttaacattctttctttatcaggttataaattgaaaccattgaatgtactttgtcttcccgtctctaaaacattgtgatatatctataatattttaatatttttaagtttaaaaataatttagactaataatatagatatttaaattaggtaattaataaattcaaatcaactatagtttagaataaaaaaacaaaataatatatgccaagtacaatctaataacaatagaatgttagaaacaatatgaattcaatatttttataaattttaagtacgattcatacataaaattaaagaaaaatataaatttatatataagtgagaacataataaaatgcaagttaaaattattaaaggaaaaatattattaataaacaatgatgttgatgtatttctaaatattttcacgtattatttattaagtgtcaatgattgaaatggatgatttaccatgtaacagattaattattaaaattatattgttttcatccgttacaatgcacgggcattttactagtctatataattgatcgctctatcaataaaccttaatatcgacaagtaaccacaacgttaagccattgatcgacaacctaaaagctacaactgaccataaatttcactggcttagatgagatgtaaacacataaataaaccataaaaaacgagaattcggagatgatggcaccccaagtccccaactccaaaccattttccggacaaaaaaaaaacattcaactctaaaccacagaactncatgagaccatgtaactcaagcaaatctgactaacaaagataactcgaaatcaaatcgagaaataaatgcagatttgctaaaaagacgtgtgtgaaccggtcccaaattctcacaaatctgatccatgaaaatctgcagccgttatgaacttccaaatttggttccaaactctgaacttttgctcgccctactaacccccctncacaaatcgcccaaaatccgaacgacgccgccgccggaatccgccaccgccgccgacggaagcaagggcaggtcaggccgtcgtcgggagggggggagaggagaggc

SEQ ID NO: 2459 - DNA, 2000 bp, Oryza sativa
cgtttttctctatagattatctctaggttagtaaatagctttgctctctctctttatttaatctcttccaagtaggaaaatatgctgacatggatctcttataagagactatagataaccattgcgggtgccctcataaacagggcccaattttgaccaacagttagttacagtaattaatgaactaaattgagcttgttgtaaacgtggacctaatctttctgcaactccaagtccagagactgcctctttcctgcttcatctcctctagctaccaactcatgcgtcaaagcataattatgttaagaattcccattccttttggattccaaccgacgcatcctcctctcctgttcctctcctgctacactttggtcagtcagtcacagcacacacaaaaacaattgcaacttgtgtggtgtttacttgctaacacctcctgacagcaacatgccaacgaattgattgctcaacctggattaacagctagccacatatatatatgcaagtaaaaaaaattgtattttatataatgggcgaatcaaatttcaacctatcccttttcatggatttaattttctgtcccttggttaattttgtaggtggtgatattttctttgctagctaggtctcctttttttttgttcgcaattgggtctaggagagttttcacctagaaattcgttagctgaccttttccttgagagaactatattgccatgacatgcgctctaatagaaccctacttgcttccttgaagttccttccctgcaccttaattctcttctagagggaataacccaacagaaattatttctcacacaatcacaagtagggcttcaacattttggatttttcatgagacaaaaaaatgaaagaaaaaattaaagcataatttgaattgcaggggacaaatctgcaagaagttcctgccccaaaatccacacaattcatttctagattgaacatacatataaacccaatttcttctcttttaaagctccaccattgatcggcgatcggacgacgctccaagcccggggagtcccgtggaccagcagggctggacctaccaaaaaactgaccaccggagcaagctagctataggaagtgggggccagtccaaccagaacaaaactcagcttaggaaaggaacatgaggatagctttgttgcaacaccaccaaatcagccttgtggccttgttgcaaccaaactgcagagaatgcagaatgcaactccactgtggtgtgcctgtctttgtagtttgtaccatatgggagtaccaagcagacccagtagattcatgtccctgtcctcctcttctcaagacactgccatgccaagccaagccaaaccaaagcctaccttctcaacctcaccaactcaccttccctttccacacacatggatggcagtggcacccacaccttatattcctaccccattttgattgcttcctcccctcctctcttgatttgaagcccaattcttctccattaatctctcctccctctcacatatacccaaacacacatgcatatatatacatatatatacatgaatgcagctaactagcatatgtgtctgtgtgtgttcatcagtgatcagtagtgttcttgttcttgttcattggcagctggaggttcttgttcatttgccttagctggaagtgattaaatcagtagccattgttgtttagtggcgccattaatcttcagttatcagtttccattccgggagatcaggcggtggtcagctggcacctgcatgcatatgcaggctcattgattgattcgattttgggaagagagttattagtgatcgatcttggctggatcgattgagcttgatcatccggtggtgatatttctggattcttgtatatttgtgaggggtgtgagctgtttgatcgatgtgctgtggttgggcggcggcgtaggatgagcgacgtctccggccgcttcgtggtggccgcggccgtggtcgccgtgtcgctgg

SEQ ID NO: 2460 - DNA, 2000 bp, Oryza sativa
atccgccattttcattgaatagaaaaagagtaaaattgtggacatcacatttttactcttttcactttgtacacttgtgtacgtaacatttaattgaccagaactttatagtattaatcttatatttgaatacaaaatattactcaggaaaaaaagagacgttaaagttagcaaatggccatgaaaaaaaggaatgttgtaaacataactcaggataggaatagttaggatatgtgtcaaacataatcatttttactgagtttgtagatacatttttcaaccggatcaatccaccatgagttcatcatatcgatatgttatttagggttacccaaatggatcatttgcattattaatagaccaataaattcctaatatatgcatgtaaaactttaaaaaaaattaagctcgtgttcacaccaaaaaaatttatcaaattcagttaaattttgttggaatgatttattatacagagaaataactttatgccatttatacatgtgatgtccacaatatattacaaatagatcgagaaattctcgctacgtgtgtgtaaaactcagacccaaatttttgaaactcatgttcacaccataaaaacttgttaaatttaattaaatttggtaactttgtacaaaccttggccatctatacatgtaaaaccatttttgggttgaaccctttagacctaggttttaggggtttgattcttttatctttatattttaaagcgattctgaagatttgttagagtatatctatgaataggattaatagataagtggatcgaacctaaccgttctcatcgatcatcatgaaacataatcacgctaccaatatatacttgtagcgaaatagtaccacacaatctcgataggaagatgatcaaactgcaaatataatcacgctatcatttgcagtaggaagcaggagatgaaaagaacagatctactataagttgaaaaatcattcatttttccaagttaaagtcgatcgtggccgtggtcgtcgctctcctcggcgacttgatctcggagttcgccgttggagctgctcttggttgagggcatcttaaagtaggagtgcaagctggtagaccaacggatccactaaccacttgcgaaaggtaagtaaattaactaggcctatctcttttcttaaacttgggcctactttcctttcctgtatgggcctcaaatccagctccgctggatttcggcggcccactcgtctacttcacgtcacgtcctcctctctctgtctcccaaccaagaactcgtccacgtcacgtgggccccaaaaaagtgaccggggatgtagctggaccatgggccccacgcgtccgacgtggcacgcttctcctctcgtcgccgcctcgtcttctcaacttccctcggctcgcggcggcgtcggccgtgaatcctccgccaccgccgccgccgccgccgccgccgacgagccctaccacgatcgcctcgccgcattcccggggagattccgccgccgtcggcttcttccccgtgctcccgcggcggcgttttgagctctctctcccctgcgggttttccgccctttttgggcacggatgagtgggatcacattgcgcgatctctagctcaagtctcggatttccggcggttggtaggctcgtactaagctgcctaaatctcggatatcctttttttttctttctaataatgctggattaaccctaaatttcggcgagttggtatccgattcctacgctgattgagtgattgggttggatcctgacacggaaggggaaagtggttgtacaagtcgggaggaggagttggccgtttcgggaactgattccttgctatttttggctacaagttcgccgccccgggcagctgcttggccgtcgcgacgcagccgcgtctgttcgatcagttcagctcgcgcggttttaggtggggaggaatcctgttcgatttcgccggttgcttgtggtttcgtgtcggaggcgggggcggcga

SEQ ID NO: 2461 - DNA, 2000 bp, Oryza sativa
accccgacaaaaaactcgatcagtcgaggcatcaacatggcggccgtccagcactccagcctcgcaggttaggtacagcgtacgtgtgagattctgttctcacttcgtcaaacaatgcaagacgagctagcgagatcgtagcacgatccatccttcgatctcctgtccatgttcagcctcgcgtgcagctttgcatgagcacttgagcgatcggagcgagactgccacagatatggatgtagggtggtggtggactggtggttgccgcaaaccatgatgcaccatgttaattgctaagctaggagtagattggtgcgtgtctgctgctgctacaccgtgcatgtggtgccgttagcagtcagcctgtccatgcatgcagcggatcccgtgatgtcgccgcaagccccatatcgtggttagtttctgtcgagaatggaagtcaaatctcgcatagatgcttagcgctgacaaagggaagagcggcttaatttctcatccgtctgaaactctgaatttcgtttcgtgtaatgatcagagatctgttgggctctctgcatctctgtacagttggacgtgcaaactggagcgacaaacgggatgattaaaatgcacattgcagcaatgcagctggcaaatcatggttcaggataaatcgataaaggcagatcgagatgctgagatgaatcaggaggcgatgcttcctgagcaacctaaaaacaagttgaaaagcatgttgctgtcatctaccaaacgaagctagatataagtttgccccccttgacagtccagggaaggtcggtcaagaattagatagtgatgcgtccgtcctgcagagaaaggggttggtgaggaaagcatccgtttgacctcaggttcggaggtagatggatgtacatatcgcttacctgtgaacgttggttccaactaccactccactagttccgagtatagtgctattgttcaaccgaactgccctttttctaacatgaaagagggactgctcaactgaactaataccaccaacgactgagctagactgagtgtgtgtgattgacaccaacatatactcgattccaacaatccaattctcaaggtttacaaacacagttggtcaccggttacgggttaccactccgtcgtcgttaagcgaggttactgctcgatgtgtgtaatccttttacgcgttggcgaaaatactttacgatgaagagaaggggcaaaaccaagcatatatttgtcaaacaatttgaatactacctttttttcgattttgctttatatgtgttgataaattttctcaaaaaagatcgttaaatttatatataacataattataacttgtacttatgtaactacaacgcaaatttcacgtataattttaatcaattagaatttgcctcaagatttgtatactcgaggaaggaaaaatcacaacacacgcatagcgtgagaggattcggtcctacactttacggaaatagcatattatgatgggatttttaaaaattacatacacaatacaatataatttatactgtgattataatatatttacaactgataaatttttagatagataagagagaatttatgtatagatagtctcaaatttttttaattaactgacaaacctgataataagaccgataaccgcaattatcgacccattttaatgttggatcaattgcgtgtcacagattgagtggagccggaaacgctgtgggcctgctcgagcgagaggcccggcacgtggtgggctgaggtgttgggccgtggtcacgtgggcctccgtgataggcaggccgatgcttccgtggcagctgcaaaaagatccctcgcgaagtcgatctgacctcctcagcctccttccccaacttgttccacgcagaagcaaagcaacgccggtaatctctctccgccggccccgccgcctgccgcaccgttcgccggggatctagggaaggatggagagcggaagctacgagggcgtcctcctgggc

SEQ ID NO: 2462 - DNA, 2000 bp, Oryza sativa
tttcctccccctgtgtaacggattaattttcatatcctagcggtaaaaatattcaaaagttttcgataaatgatataaaatttttctcactttagattttgcctgcgtttgttcaagctcctttgcatggatcttctcttcagatttttggtagaactgaaaacaagacagcactaaacctggtcagcataagggggaaaaatgtaaatgaacatatggattagcgcaatgcatttttgggtataatataccttcttcctcttctcagcacgctcctgcaacctgaaactaaaaccagtggcagtagcattctagtgttgagccacttctcagggagtattagtactcctgcaagtataaatgagcatgtttaatttcttattaacaataacacaggagataaaaaggagcaactatgaagaaaataagaatgctttacgatgtggtggagtgcacatcatcctccattctctggcagaatctgttgcaaagcattcgtggtgttctcgtttgacctgatatgaaagatcaaccatttcaggccacgcaaacaccaaacagcgccattatgaactatcagcggagcggcaataccattttctttttggcaagcatcacaacttggatgcacattaattgtgttgtgctaactaaacaacaactgaaattgcaatccagaagaaagaaaaggacggccaaaattggttggtgacagattgacactcgctcttgggcttcagaagaagcatcatattgaggtgtgcccagtgatccagatttaacaggctatatcacatcacagaaatctgtaattaatttttactaaattgcaactaaaaattgacaaaattgtaacttgtagaatatcattgaacttgatgtctagattatgttcgggatcaggatgaaacaacaaaacaaaaagggagcacacaaatccgtattatttccatgccaaattccgaaattggcttcaaaaaatcaaggaaaaggaataaattggtaggtcaccatcgatgtcgtaggagattcaggatcagcgatgttgatagacgctgggatagcctcgtcgcctcctatttaccctcatcatggttggggaggatggccgacgttggttggtatggcctagatgccgcctaggtcagttcgtcctgggagcagcggtgcgagcagcggtggcggcgacagggaagcggcatggcgaggaggaggacgggatgagcaacggctgggaagcgcagggccggccctggccctatgaagccgaggcgatcgccgggggcccatgatggtggaggggccaacacctaatactagtagtctagtagtctagtacctcatccgatgttgagatcaatgatctttattcagaattaaaggtgtgattcttcgatgttcgcgcatgagattctgaagttcgttatggatgcagattgctatccaaatgctttagttgcctattgaaatctcttaactgtacctatgacggtagcttcagctgaaagaagtttctcaaactttaagttttgaagaactatttgagatcaactatgttacaagaaaggttaaatggcttggctatgtgctcaattgagaaggatatcttgaacactattgataccgttattgatgattttgcatcaagaaatgcccgaagaaatatcttttcatgggagcaacggatatgatggggttttgttcttcattaagttaatgaataatgatattagttccaagttacaaatatattgttatttttatttcttcataattaccagacatgttaaatttaatatatggatgtatttgttatcgttttgcaagtaaaattattatctatatatcataaaattttatatatagtttaggggcccatcgcgatgagttcgcttagggccctcaaaatcataggaccggccctggggaagcggggggtgctgggatggaggcgtaaatggggaggcagcgcggtggatgcgagcgcagcagcgactgag

SEQ ID NO: 2463 - DNA, 2000 bp, Oryza sativa
gcttatagtctactgtgcctgagcccactccccggcacacaaaacgaaacagcgttttaatgcgtaattaattaagttttagctatttttttaaaaaaatggattaatatgattttttaagcaactttcgtatagaaactttttgcaaaaaaacgcaccgtttagcaatttgaaaaaagcgtgcgcgcggaaaacgaggaggaggagctgggaacttgtactaccgaacggagcataaaggcaagttttataaaagaggtggatgttgcatctaatcttgaccacatcatcaactaataaatgtagaggtaatatgtacaatatatcacatctatactaattctaatacactagccccaatgtttgtttgcctaatctactcttcctctctctccttttgtcttgaattttgtgtggtggttgcatcttgcatgagatccaccgcaatagtaaagtaaggtgctttctataaaacatgtacatctcagcaatagactagattaatagtaaatcaccttaatagtatgtctatatgggtatctatatctctctaatctattgcatcgtttttttctatagactatctccaggttagtagatagttttactctctctcttcatttaatctctttcaaataggaaaatatgctgacttggatatcttgtagagagcctatagataaccattgcggatgctctgagaggtggctgcatatctctttcatctcttctctcctccacctcactattttagcttatgtgacacctatgagactatgctttatgctcatagtacttgtcctaagagtggtaatatctcgttgggtggtgcactccattccagtccacactccgcgctcccgtgatcgcgcatcatacttaaccacccccaccccgaccccgcgcttgacccggcatctttggccggtcatacacgcggggggcctttgcctttggcacccggcgcgcgtcccgtctcccacgcccgcacccgcaccaccgcccaccaccaccacgccacggcagccgcaccgcaccgcaccgcaccaccatccttcctaggaaaaccccacccaccctcaccctccagttccaccgtcgtctccactctcgccctcctcacgtcacccccacccccaccaccaccactctcccacctcggccggcgccacctccccaccccagccctcgccgtcgtgcccaggcggcgggccctgatccgcgagcctccccggttgttgggggctgggggtgcatcgatccaggttggttttcttctactcggccaaagatcggatttctctactacctaatctttgatgtgaggagcattaggtatacggcggcgatctgtgactgttcgtgctcgaattgcgggtgttcgttctgtgttgtgtcgtgctactaggattgaagatgtagtagtagcaattgccaccgggattgtttgcgttgacgtgatcttgactcggctacttgtcttgtaaaatctgcaagaaacttagcgttgccggatctggctcatacggtatatggtgatgctactttaacttagtgacatcttggatggtcaatttaacttaagaaatcagtttcgggtcgcaattttgtcttctgtggaactgaatcggctggtttttcagaagcacggccttctgaattctgtgaaatgcttctcatttaggatactgctcttccagccacgtatgaattacatgcggtagcagctagctaaccatgtactgatatcagtttaaagtagcatttgttgttactttctgttatcttttgtatgaaactgaatttttgttaacggcaagtttttttctcgcacctgcctcataagctgttattctgttgtttagttcagatggttgccttcatacaaggaagctgaacagaaagtagttcgtgcatatttagtactcttcagatgtctgatgatatttattgcttttcagttccgtatctagtggacccttctctgtcgaggtactaaa

SEQ ID NO: 2464 - DNA, 2000 bp, Oryza sativa
  N_region (546)..(546): n = any nucleotide
gcttgattttgctatgccatttaaactcatgatctcttttaaaattaaatggccaacatgatacaagaaaccgatcttaataagatctctaatgcttgattttacaatgccatttaaactccctttgaacttctcttttaagatacaaccaacggaatactagaaaccagacttcataagatctatctccttcagggagttagtggtgttcagtctgatgcgcttttgcaatgccatttaaactccctttgaacttctcttttaagattacacgaccaacggaatactagaaaccaaccttaataagatctcttttaagagtatctccttcagggaattagtagtggtgtctgatagctattaaagagggtaacgatcaaatgcaaagcacaacgcaacagtgccatttaatgaagacacagacagacaaatcagaagaaagaccatgtggtggagtaaccctatactctggaaagtagtgaaacttaccatactatcaagctactaggaaacaatatttgcaagcaataaaaactcaagaatccnaaaacacctacgcagcaacgatttctttcccaattttactgttgcgcttcatctttttcaaattctgagcatcctgagaaaatgaagcaactggggtaagattatatatctcatattacgaggttaaacataattacattcaggaagaaacaaacatgaattttacataaatttatttagaccatttcacataaaggatgtgcatgaaaagttagcactagcagcatagcaaattcagagacaactgggaaaaaaaaatgaaatgtgctttccctataatggaagagggaacctggcttctctatttttaaaaaaaaaactgaaaaaaatccattacgctaacatttttactcaaaatacaggctagagcttgccaaaaatggcataattactaatgaattatcactaaggccaaactcattcatgatgtggggcgaaatggcaagaacaaatcaccttccttccggcgatcttgcaggagcgccgtcccatgcaaagcggctggaacgtcgaaatcctccgcctcgccgcgtgcctctggaacaatctggcgctgccgccagcagagcctctccctgaacacaccaacgcatcaatcgctggatccgtggagacggccagacgggagacgagtgagcgagcgagcgaggactggttaccatggaggacggcggcgctcctgagagcggcggcggaggaggacagcgacgaggccttgtggacgagcgcgcccagagcccgcgcggcggacgccatggcggcggagcgcgcgcaccaggtgctcgacgaattgcccgcttccggcggcgcgggctggcggaggaggagaggagtcagcaggacgcgacgcgagcctggatctggtgggattagcgggggacggctcggatctctccacgccctcttccctcagccgttggatcgaccatgtcctggttggtagccttggctctgacagctgggccaggtgactcgccacgtggcctcctcgtagggcggaagtgtcagctgcaatctgattccgataaaacctgacttgactgagttgacccactactacactactatgactcgtgggaccccacagactcgcagagcgggcacacgcgtcgcccatcggatgcgcgccgcttaagatccaacggtgtaggaggctcgtgggccccacatgtcactggaatattcgcgcaccgtctcgcctcttctcgtccttcctgccgctgttggcgtcgggcattttccatccccttctagactcccgccgaacaatccactccgcccttcatatgcgcgcaccgctcctcccgttgtttccatcgacagaagagagagttcagatcaaacgccgaagcaattcttccgcaagatttcgagtgatcccatctcaatccaagctaaaccgagagattttgatttgttgctgtagattgattgtgtgaggagaggaggagcag

SEQ ID NO: 2465 - DNA, 2000 bp, Oryza sativa
  N_region (1698)..(1698): n = any nucleotide
ttaccttaacttaggttgcaactcagaacagcccgagaatgcaaccgacaacacggacgaggcaaacaccaataacagcagcaacagcggaaccaacggactaacacccaacaccacaggcgacggctgggaaccaggacgaaaccctactcttcacttcacttcatcttcagcttcagggcggaggaactatatatatttatatagagcaagggtgagtactttcgtactcagcaagtcatgggaacttaggtgtttaatgcaagtttggaagagaggcaagattgttttacgaatcttttgtttgaaagcattttggactcactaagtgatttacctcctttttaagtttgggtcgaaaagagacttgcgtctcgattcgactttaagagatgcttttcaacaactcaaatggtaatgtaccgacctcccgggtcagatcattacttctcggctcctcgagccatttcacttgattaatcggctcccagagcctttttcattttctcggactcccagattccagctgcccagtcgtacaacaatccgcttccactcgggaagcctagtctatgatgcccgtagacatcccgaatcacacagattcgtttctgaccactcaggtcatccatctgccacataggctgattctggcgacgattcccaatccacaacaacttttcacaaagcacaggcaaacaaatctacgcaacgggaaccacctcacatccgcccatgaccgtgggcatggctgttcgaacagttagttaacctctgcagaggggtacactttacccacaagacacgaacttactccagacaatggccggtgtcagaggttcgtgacaaagcctttcctaagccgacccaggattacctcatgccacatagaaggatcaaatcctcccataaatataggccatttcagttttcacaaatcaactccaaccacctcgatcggtaatctggcaagcttcgcgttcttgccctaccaggaacccgggttggctccaaccgaccccgccccggcgttccccaactattggcatgcgaggtttccctgaatcgactagttacttagccagggtgtcccattccaccttgtggttgcactttgttatgcttgatgaatttcccacaggaatcggtccttatatgcgaatacgggacagtgccacgcaggcacaacccccgcatcgcgagttttcataattcattttatttttaaacacaccgacaccacatgtcgggttttcaaggcttctcaaacccatttcccaatttttcgacaatcaacggtgtatgtgggatatttggtatacgcgctcagagagcacggataccgaggtaccacaagggtggagcgacaaggaatcagggtagtggctcggatcgaagagaggaggcgtgacggcggccggcggcggcggcgaagctcgtcggatcggggatgtggtcgcgcgagggaagggacaagggggcgcgaactcgggcttagccgaaccggtacgcgaccgcgatgcgcatgcggtgacgcgggacccgatggtcaccggcgacgcatgcgcggcggcgttttgcggcggcggaaggggcgacacggtgcggaggcaaaggagaaggccggcggccttggggcagccaggggaaggtcaaggggattcccggaaccttggcggagagaggaatcggcccaanaggacccgatggctgtggattgcggcggcggcaatcaccggcgagcaaaagagggaaaacacgacgagacgacgagggttcgattcaaaggggttggaacatctccggggttcaaggaatccgtttccggcatcggattgggtggagcggcaccgagagggctagcgacgagaggcggcctccggaacagagcatgacggccggcgagctagcgcgcggcgcaaaggcggcaagcggcggttcgggggtttccatggggatcaaggaggatgacaacgagaggaattaggcggagagctcac

SEQ ID NO: 2466 - DNA, 2000 bp, Oryza sativa
  N_region (339)..(339): n = any nucleotide
  N_region (701)..(701): n = any nucleotide
  N_region (778)..(778): n = any nucleotide
tcgactcaccatcgatccatctgacggttagttccaagggaaagaagaaatggaggcttcacgcaaggtgttctcggccatgcttctcatggtgctgctgcttgcagccactggtacgtttgattgctcctatggcttgggttttcaggtgagagttcagtaccatttttgatcgtggttgggtcgattgcaggtgagatgggcgggccggtgatggtggcggaggctcggacgtgcgagtcgcagagccaccggttcaagggcccgtgcgcccgcaaggcgaactgcgccagcgtatgcaacacggagggcttccccgacggctactgccacggcgtncgccgccgctgcatgtgcaccaagccctgcccctgatcgatgaaccagcagctagcgcagcagcttgtgccgccacctcgcgcatgtgtcatcgtgtcgatcgatcggatcctagctgccctatgaatgaataaaagtgtgtggcttatgcgtggttttctcttggagaactttggcttttgtggtgttaagttcgatcgttttgtgcatccaccatccatccatcctcccattctgcttgttctaagattatactactacttgagaaggtgatgcaaattgtgctcaacagttaacagctagtctattaatactgcaccgttaattttttaagcaaaaattaaataattacttattttttnatatcatttcgttcattgttaaatatactttcacatacatatatagttttacatagttttacatgtttcataatttngtttaataagacaaatagttgtggtgtcaaatattttaaaacggaagtaataattattactacctgagatgatgttttaccacacacgatggggtatgtgtttttaccccccgttgggttgaagtgttgtctagcgattgatgctgcccggtgtcacttgctgacttgcatatgatgcgtacacgtgctgaagcccggcgttgtgcgtgtatgtattggagggggctgaagactggcccttaacgctaaagcatttcttgttaaaatgggccgggcttcattttaactcgaaaacaacctcaatgcaaaatgcaccaaagtcatcaaaggtttgttatggacctattcgtaaacaaataggtccaacataatttaaccttcatagagtgaacaagggattgttcgtaataaacacggaccaaaatttaaattaagggaattgacaggggccgcgcgaacgcgtaccccctctatcacaaattatgacgtccactctcccacttggggagatggtaaaccaacgcgctcaccaagtgcaatgtgagccattgatctaggccacggcccttcttgatcggccgtcgaccccgtccaggtaagtatgttgcaacgaggcaccaccagcctattatatagcaagcgctcccacccccatcgcgtcgatttgtcgaggtggtactaaacgagagctggccgtgctcgagaaggattgctattgcggccacagggttgggccttcgttgcgtgggccttactctttttggtgggctttcgcttcggactccgcagcggcgtgtggaccggcaaggcggagtgtgcactagacgcaaaggccacgcgcccacgtgaacccaaagaaagcgtggtccaccgagcggtggaatattcccccgcacccgcttcggaacgagcacgagagatgcggatcggtcggacccccacggtgactgacgtgtgggaccacgcaccgtacggcgagtcgtgggccccggcgtccgcatcgccacgagccggctcagcgtgaacccgttccacaggaagttgcacacagacaggtgggaccgggattgggttcagtatggaccgggtccacgcctcacctcgcctcgggcgccttcttctccaagccgccggcgtcgtcgtcgtcgtcgtcgcatctgggagctcctacaaataggagaaacagtcagggagaccaaaccctaaaaccccgcatccactg

SEQ ID NO: 2467 - DNA, 2000 bp, Oryza sativa
  N_region (499)..(499): n = any nucleotide
  N_region (1064)..(1064): n = any nucleotide
catttccaagttcagtcctgacattgccccctccatggcaacattcttgtcctcaaggatgaaaatctagatacataccctgaatcaccgtcgcatcttcccaagttgcatctgctgggctcaagttttgccataacactaaccactgagttactgctaccatcttctaggcaccattcttctttgcaaaatagcaacaggttctgttttaatttgtccatcaggtccggcagcaggaaggttggccataggaattgcatgagtcccaaggtgtcttttcagctgacttacatggaaaatagggtggatctgagcttcagctgtatcgaggagtgatcctctctagcgggggatcgtgggatcccccttttgtgagttcggtcaggtgaaagagctcgcctctagaaatcacgtatccgccctgtaggctgctaggaagcgtgtacacctcaagattatacaggttcgggccgctatgaagcgtaataccctactcctntgtgtgggatttagattgagagttacaagggtttctccacttcgggggggcgttcattattctcttcttctagagctcaagttttctcggagtcgtcccctttctcggtgggcgaggtcctccttttatagctcaaggggatactacatgcaccgcctctatctactcttctatatagtaggggcccaccctaccttgatcggaacatgatccgtgccttcgcctggaagccaaaccacagcttgcccagcggtgggacccagcgccgtcccccgtctgacacggggggcagccctgtcattccctcattaatgggtgaagaactgaagacttgtggtggccgccctctcatggagagagcttcgaatgacccctccaatgggacgggtcatacctacctccactccaccggagacagatgcgacgtgggggcacgggggctcatccagtcagacgtgaccggcgacaggccggtcacagaccggtcattcctgactgaccgagccagtcgggcgtgccgcacgtctgccctaccgcattaaatgcggcaaggggcagttggggngctgcgcgcattaaaagtggttcagcctaggccccctccccgcttactcccccggccacatggtagctgggcgagggcctcggggcgaagtggcgcgagggcccgaggggcatgacgtggtaccccgaggccccctggccgctcctgcggttcgcgaggtgcaggggtagggccaggctgtagggccacgcgacaggatgggaagatgaattcccttcactacgcatacccctgggcccatatctccgatagtagcccccggcgcctcatcggacattggcctcctgaggacagtctgacgtgacgcctcacgacttcccaagctagggttgtgggcccggcgaggaacctaaacggatgtcgccgagcggccaggttggcgcattagcaataatggcgatttaaccaccactaaccgcgctgatgattgggtagcttagggtgcgaaaatcggggggtcggtcggaccacgcctcgactccctcgctcgccatgcacgagatagtaccgacggtgggcccgcctagcttgcgcccgtgaacatcgcatgccctgcgccgagcctgccgctgacaggcgcactaaacgcggggcgcggattcagtgggtgacgtgatgagtggacgcgggaaaacatgaggcaaccgcaggcgcatgaatcgtgggggcaactgtgggggcgtgaaacgaggaggcgagcacgggagaggcagggataaaaggatatggaggcggggacttcgcctccttccattcgccaactgctcgcccgcacactcgctccctaagccctaacactcttgccactccacgctactccgcacagcaagcccctcatcgtttcaccgccggtcatcatggcccaagacactggcgacgctgtgctcccagcatcgcgcatcacggcggataggcaccttagtctcccctgcaaga

SEQ ID NO: 2468 - DNA, 2000 bp, Oryza sativa
  N_region (1915)..(1915): n = any nucleotide
ttgcagtacaatcaccttgaatttatatatggagaaatggaagaacgacgacgtgcagttttcagagtcagaaatgtgtgcagattgcaacaaattaaggtagagtggttcagactgagcatgagtgataagaaccaggcaactaagatttaacataataatataagcagcccatacagttgccagaatgggaccttttaatttgttctatcggaattccactaaaactaaacaagaagtatatgcattaattaatttattcttaacctgaaaatgcacgtggtgacatttaaaacggaaaaaaaaaacttgctaactgaattaaagtgtatggtcggcataactctgaaaagaacacatgcataacataacttccaagttcctatactgcttaagtgcttatgtcatatgtacatactactatcaaaagtaatctaacctagaatgaacaatccaaactctagaagagcaatattgcaaaagttttagttgacatataaagatttttaatatatacttccaactgaacctgtagattggaatgttagagtatcagccccattgtatctgcaaacaaataataatttttgaataaaacttttatatatgtgttcttaaggatctaaaaccaaaggctgaaaaataaacttcgatgaaaaaaccccaaaatcaactctaaatttaaggttgaaaattcaaattttggctgataagcataagcataagcgaaaagatgaggccatatatatggaagttggagatatattacgatatgattgatttgcgtggactcattccttataccttactgtgtaactcctatatatataccgccaccggccatcttagactcaatacaacgtgtgtatctctctccctctactattcaacatggaatacacaagtaaaccgacggcacaaatacttggtacattcgcacacatataatatctgcataaaatacagttataagttacctaccaataagaagagatgtgcatgttgaaaatttgcagcctacaactggcattttggggggttcatcacctgcctaactcacataaaggctccctatagcatgagaaggacaagctcacatgagctcaaccagataattcgtgggccccacactcctctcacaatccctaccatctctttccctctcctcccccactcctcctatccctctctctcatctcttcaccctttaaaaagcaagctagtgtattgtgcccacccttgccctcctaggctacacctcaccctccctctctgatacacatgcatacatacacaaagatacataaatacatatatacatatacatgtgtactatacctacaacaacacacatctgctccacactagtatatagctactaggtaagtagctaggccaattacctttggttgcaagccaaaagtaagtatccatcctcatccttttcctcctcccaccaagaaccttcatagtaccaccaccaccaccactcatcacatctcacactcattgcctctttcttcttcctccccatctagctctagcccctctcttgttcaaacaccttcatctgaatctcttgagcctgaattttcccaacacaagcaagcactacaattgagctaagctatagcacacacacacacacacaaaccctgaattcccacttcctaagttcctatagctaagcatatagtagccacaaggagctagctaattcttattagctatagctccagatccctcacaattctaaatttccaatcccaaaagacccaattaaacaagagatagttgcctcctaatccatataataagccctcaaattaactagtagccatatactatcaatagtaacaaggcagcacaagcagcataccataagcatacatcgggtcaaagccgaggtcaagtncaccggcaggaggacaagccggcggccggagcccagaggaggagctgaggcatcatcgatcgatcgatcggcatagtgcacgtac

SEQ ID NO: 2469 - DNA, 2000 bp, Oryza sativa
gccatggagtctcctcagagttctggtgcagaagagtggggcttggagagaaggccgtcatatgtcaaggatgatgaggacaattcagcttctcagtcagaggaatcgagtgaggaaaatagtgaacccatgaacgaggagtacgatgagctgctcccagattattcaagggacaattctgggtccagccctcttcagatgatggatgatgggagtgacgataatgaagaagatgccgaaggggatgaagatggtgaggaagatggagaggactacgatgcagaacagcatgttgacgaagacaacgacgatgctgagatgggcgaggatgatgtcgaggacaatgacgatggcgatggtggcggtggtggagcggagaacggtgacgaggatgaagacggtacatcatattcttccgagtatagcgaataaaacgaatgaattaagaagtctggccttttgaaggtcacgtggcaaccaagtgatggtacggtttacatctggttctatctagctcaaacagatggtttatccatacatagtagaggattatcggttttgtagaagtgtattggtaatttaccaacatgtagcaggatgtatacacagtatattcaatgtcggaaatcattcccgtacaaagttacctcgtacggcaggaaaagttaagaggggaagcccgataaaatcccatccaatatggaacccgctgtctgcattgcattccttgctgcgagttctaatctcgggttggcctaacatgatcgtactattctttatgccgaaggcgatagagatgtccggattgatactcccatgcatgccgagttcatctctcctttggttgagttgctgggcagatgtagcaatgccgagtagtcgatccggcttgatgagaaggcatcgccggtaattggtctcggtggcgctttcgttatgggggttatgggctgttaattttgttaaattaaccatactaaaatttgacattataaaaaattgacatggtagcaatctaagaattgccaaaacttgtcaatgtcgaacaaaatttgaagaacagaaactcaaactctaatccgagataaaaacaaagaccacatgccaaatcgaattccaaaaacgaaacgccctttgaatcatagaaattaaaaaacacgagattctgatatgaatgccagtacaaaatggaggattgttaaacaccaaaactgatatatgaatggtcgtttgattggaccacaggaaaaacacatgaattagatgagagagatagattcaaaggaattttttcaaaaagttagacctcttgtcaaacttactgcataacctacgtgcaatgagccattccatagtcccaccaacttcaaaaccaaattcgaaaattcaaattttagctcttatttttgagttattaggctaaccaatgagactcatagtaatttttggtaggattttggaaaactccaaatccttaaaatcaaagctctccatggaaaattttatataacattttaatcgtataaattcttgcgtaaattctctcatcgaaaagtttggacccaagctgcaaacgtggcaggctggcagctgacgacggatgagcgcagaatatttccgacccaaccgaaccaactacgcgtccgtccgtctcacgtgcaccgagatagcgcgcgcgccctccaggacgttctggaagcttccacacccatctccacactcctcttctctcctccctctccagactcttctctctcccctcttttcttcccccctctctctccccccagcatcgtaccaaaccacacaaccgcagcgacggcaacacgaagctctcctctccggcgagaatagccaagaacgcgacgcgaccacacccaagaggccgaacagatcgagctcaagaaggttttagcccatggggatggattactacaagatcctgggcgtcgacaaggccgccagcgacgacgacctcaagaaggcgtaccgcaagctcg

SEQ ID NO: 2470 - DNA, 2000 bp, Oryza sativa
  N_region (86)..(86): n = any nucleotide
  N_region (126)..(126): n = any nucleotide
cataagttcgaaaagtatcctagtgattccaggagatcatgcagtagttctgtcatgcagtctgctcttcaaatttgcatgtctgntcatagttgttcatagctctgtcaaatctgcatgcttgtncatagttctgtcaaacttgcatgtgtgttcataggttgatgaactgaactctatatggagtggtgggggaatgtggatattttttttccctggtataggtcttctgtgagcaactgcttttgaattttttagtaataacagtgaacttccaaggctggaaaggtattttggttgcgttctgagttctcatgctgatgaaattccgtggttggtttagtgacccgatctgatgatgatccttagagttgggctgatgcaatgcgaggacagtttcgttagtaaaaaactgcaatttgtagttcacaagattgtaacagtttgtcatggttccctgtcgctttcttagtggtctggatgtgcttgaaatagttggatatatgcaaaatgggctgatgtgaatatgaaagatcgtatctttatgattaaatatgaggtatgccctttgatgttgactttaaggttgctgccagggtgcttttttctttctttcttttttgttttagctagttttgaaagcaattcttggcatttgttgatagaatttttttgataggaaaatacctgtacatttttttgttaaaatatgattttcaaaaccttaaatgagccttgcatggttgtttttctcaccttaatgattcctcggtttagctctgatatcattgctttgttcttcatatagtgtgcttctaggagactatgatgccttttgttttcaataatgtttttcatgcaactaaacggtattcttttcactgcagcaccagccgagaccattgtcactggaaatgatgtccctctcttgtcttttgctgaggtggacttccttgtcttttctgtgtttgttggcaccactttcaataccatcttcgcacaatatttgcaagaagaagttggattctccttttgttttagagagatcgtcttgttctgattaccattcctcttgtcttaattaatcttcacttgactgatacctgattatctacctcatatagtacattgttatcatccactcaatttacatccatactagtatgtattaagattttttagaaccattttgctgcaaccacagtatgattagagcagcccaacgtttcaaaacactgtttcctctaggctttttttaagttgactacggtttaacagtccacagtagtgtgcaaatacatttgtggattacattgctgactttttattcaagagcaaaaacaacatatcacccttatatggagaatcggataaaaaaatttggagtaatcttcttttttgttgtaaatatatttgtatctttttaataatcatgtaccaaagtaggactactgttttccctaaaaagaagttaactctgtatattttctagcatcatttatattgctacaggtaagaatgtccaacaagtcctagttgaagccatgtcctagtagttgacatgagggtggtaactggtgacaacctttgagtatttgtttagtaactttgatcttgcagtttaacacaatcggatttgataggactctgaataacttaaattatgcaccaaaacactgataatctgaattgagccctttaacaagttccatctttggatatagttccagtcatgctgattactgtgtttcctatctctttgaagtattaattacaagtattactagttttcagagagaaggggtattcataacagtatgtggtttactatctgtctaagaggtgctcacgattcatgaaattatcaagcagagtaggatcttgtcttgaaaagtgctatgacaacagatatgtaaagtcaaaaactttttctcttataggttgcagaaaggcttgatgaattccatgcatctggaaccagaaatcaaaattacatggcc

SEQ ID NO: 2471 - DNA, 2000 bp, Oryza sativa
gcctaacatgcaagtatgccagatcaacttactaaacacttaaaactcaacatgcaaacatagtaactattacattctaaaactcggcatatacattataaatcatcattctcaaatcattttaaaaatatttcaatccaaatccatccatcatttgtacaatatttaacatatactcattcatatattctaccgcaaagcgcggatgccatccagtataactcaaaaatagcccatgacatggggttttagttatctattggattgtgctgatgcgaaactgataaagccaagccacacatgtatttttgccacatggtcagggacagatagaacgaaatagagggagtgtcactcccttactttactaaagagggtgtttggatttagggactaaactttagtctatgtcacatcggatgttagaacactaatttggagtattaaatataaactacttacaaaactaattgcataaataagagttaatctgcgagataattttttaagccaaattaatccataattagcacatgtttactgtagcattacataggctaatcatggattaattaggctatagatttgtctcgcgaattactctagggttatgaaataagttttgtcattagtctatgtttaatatttctaattagtgtcaaacatccgcccccagaccgaatttagactgattcgggtgcttgagtttggactgaggtgatgtacatgcggttagaatagataaattatagtataaaaagaatggattaggctactggacacccgcacctctcctatgtagctccgcctacacacaagtcagcttagatgcaacatacaaatttacttgcaaaacatacacttcattttcttaatttgtgtgaaaaatttctactttgccgttagtgttgaatcttaatccctaactacccagattgaatttccaatctttttattgaaaaggaggcaagtgttcagctagtcaatcaattaaatgaaggttggaaagtataggtaggaaagccgaaaggggtgaacccaatgggaacaaaataaacagctgagagaaattgcgagctgcaaccttacaagttcaaaatgggaatgggagaagaaacaactgtgagccaaacatgaaaagaggggttgatcatcaaatattgtatgctgagactctctagtatgagaagcagcttcgagcaccatattttggctggctctacaatctaggtagttttgtttttttattatttccaaccgtttctacattatatagtcatatagatgaccacattgttgaaatagcatcatagatcattggggcataggtggtttctgcggctgcactcaactattgaccgatcttgtcaaaggtagagcgacttgctagtcatagaacgttataggtgtacttttttattacaaacatatggattcaaacaataacggctaataacagaatttaacaatcattttattacggttttagataatgaaagtaatttctagccattgcgatgatcatgaattacttccacctacatgtttcaaatgacttcttaattaatggattgtttcactcatttctacaactttcacttccatgttgcatgattgtagacaaaattaacatgttcaattcatgcgttccaagcatgcgtgccgtacttattttcccgcgcaaaaaggcaaagcgtgacctggcaatctagcaaaacctccaagtctcataccgtgggccccacccaccattccccccatccgggcccacctgcagccgcacattgtccccgtgccgttttcctaattatatttacctccattgccactcctctttttttttctcctaatatttaccaccattgccattctccccctataaatacacgcacgcaccctcttcttccacctcgagccagccatagcctcctctcctctccacgcgacgagcaagtggaggagcggcggcggcggccggcgatcgagctgctcgatcggcc

SEQ ID NO: 2472 - DNA, 2000 bp, Oryza sativa
gcgagaccacagcctaaaaagaggcctattggacgctgtacattttgacagcaaagctcgggaaaccggcgaaagtgtgaagctggaaacgctagaaatgaaagccctaaatactagtagtactgcaccatggagttgagtactttggctaaagatgagtgtttgtcatgatcccatcgatggctttggaagaatccaaaggcaaagccgtccgacgcggggcaagaatcagcaacgaacgagtagcgtccagggggatgaaaacggccacatgctacgggtggtttcgcccattacgaggctcgttcgttcgtgctcgcgccatggcgcggtgtcgcgttgtcggatgatcagcgagccggggctgccgttgtgatcggctggatttctctgcgattgcaactgaccgagccatccgtccattgtcttttgtctccattccattacgcacattgacagacatattagtactgtggtataaaagcactgcaactcgtgatttaagattcaggatcgtgatttaagatgctatttaaagatccaggatggcatccctgttccggtggtcactcacgggaacagcagccttgctgatctctcttgctgcagtcgtattcattgaagacggtattcacaatgctcccgggagaccaactaccatggccacgaggagcaaacgacctgtcaggccgccaatttgcgcgtacgtccggacgccagtggccccgccgctactacgagtcgtgtgaactgtgaggctgtgactgttccggtgggcccagcttgacccatgtgctactgttacgatgcacccgtttcttggcccacgttactaatacagatattgcaattggcccacgtaatacagtcacttgggctcggtccagtctagtactcgtaggaggccctggctgcagcgctaggcctaggcgacgccggctagaacggtccgctgctttgcccatctccgtgtgccgcgagaaggcggcggcctacggaaacggtgaaccttcacgtgccgcgcggcccagccattgcccgtgccggccgtgcgcgtgacggcccgagacgacagtacgccacggtgtcggtcgggcggccgcgcgcgcggccacgtacacggcgcagcgtggcgcggcaaaggcgcaccttttcccgcgatgccgtggatattccccggcaccgaccctataacttggaaggcgtattcctttaaaaaaaaaaaaaattggaaggcgtggcgggcgacgctaccacaggtgtggaaaaaatctcttctacctaccggcacgcgcgaaacgagcagtttctatcagcacgtgatgcatcaaactcgttctatggcggcaagcatacacacagcgataaattccagatgtacacgcgcgtataatatactagcgcttgttaatatattttattataacgtcgtttgattttaaacatacatgaatgcaaaatctacaatagcaaatacatatttttgtaaataagatgaatgataaatatatttctaaaagtcaatgactccagacatattaaaaactgaaatgagtaccactgccatcgtacattcgtagtacaagataagagtggtatgaagtaaaaaaataattgtggtcaaaatattgtactatgcaatttgaatactgcatcaccgtagttttacaagaaatgtatcactggcacttcttggagtgggtcgacaacgacagtatagaaaatacagtgtctcgacgggcatcgtgtcgttttattcgcgggcgccgacttcatacacaaaggagaaaactaaagaggggatcccaaataatattcccaaaccctaaagccctcctccccttcccgtggcgattcgccggtccgtcccccaagtctagggtttatgttcgctttctccccacgcattcctcccacccgcggcgctccctgatctggtcaagcccaccagaatccgctctccagagttggtgggggcggagggggaagggaggggcggc

SEQ ID NO: 2473 - DNA, 2000 bp, Oryza sativa
gtatgatgatttcatcaatttcaagatacatcgtccaatctctcggacatatggttatttcgtcaatattgagatatacccgtccaaatatgatatcataaatactataaaacgatataccgttcgaacgaaataactaatgtcaacataatacctaggtaatagatctgatatgggggtattatgtttggtattggaatccggtacctactataccatacggacctcagcatgatacccacgtaccagatctgatactagtaggtatcatgtctaactgtaccatgatgatgtcagttattttattgtaacagtatatcgttctgtagtctacctcctatgatatatgtacatttgcctcctatgatatatgtacatttgcatttgtgtgtgtatcaaatttggtagaaaagaaaggaaaactttacttgcatgcaattgtccaattgaccaaaataactgttatctaattttacctcttaggcgtagaccgttaagcatgtatatcgcccgctttacggctttagacgctagcttatctagtacgcagaatatctgacggacgcagaggattgagacctggaagctaggctaaactaaacaggtagcgaaacgcaaccctttccttgacagttatccgattacgcgcctttctatcaggcacagcagcacgggcagccacaagattcaactaaaatttagttaactgcacgcctctttttcgtttacgtcgccgtcgccctatccaaattcgcccacgtttgatatagatgcataactgcaaagcgagaattccatttcttcatgcgtcaattggtccctctcgtcttctcctaggccacactattcttgaccatacctatgaaatcacaaaacgtatacgaccttatttggaacaagtttttatcaataaaccctttttgattttatacacgacaggaaacaattattctaaaattttctctactgtattgctaaccacttattttagctagaactttaaaaattttaatatattctcataattaagtagataacacgtgacaataatataaatcaaacgatttgacaagttttccggaaggaaaaaaggctgcaaaagccgatctggctgagtgcggttgtgtaactgtaacttttttcttctaatatatcgacgtacaatcgtttttgcgcgttcacgaaaaaaaagctgcaacctgcaaaattcaaaggtttgcgtgggagcttagctgaattccgccgatcaaattctgtttccacaaaaattgtccgctccgacggcgtccgcgcacacgcgcacgcacgctccccgcgccacaaaaccgggggaaaacgagagaaaaacgcaacgaaacgctcgccccgcaccgcacggaacatcatcatcatctcgcgctctcacgcggaccccgccgttgcggccgcctcacgacgcgagcgcgccacatggacatccaccatggcgccaccctttcccctctcctcgcttgtatatattcggcgcgatgccgtcgcagccggtgccttcgtttcaccctgctcggaaaaaaaatcctaaaagcttaatttctttctttgttcttattactgtctcacgtgagacgcctgagctcaactgaatttctggccccctcttcatctccgtgagcttcgctgccctttttctttgccttctcttggtggtttaatttcatcagttttcctccatttccttctttagccattgttccgattgccgtctcttgttgcatgtgcattccttctctgaaccgtgcccccccaattcgtccgcgagctatacaaatttggattcgttttgttcgtttccagctcaccctgtaaatcgtttctcaagtcattcaggcatactcacatcgcacaaacatatatataccccaagattttgaatccatcaatttgcagacgccataggcgtacaagttatccattcaagcgctccaaaaatttgccaagaagtttgccttaaatttggattc

SEQ ID NO: 2474 - DNA, 2000 bp, Oryza sativa
  N_region (1926)..(1926): n = any nucleotide
tttcttgagtcaatgagatagtaaacaatatggtgcgcattaatcattcatgtgatacaaaacacaatgtaaaaaacataagataagtacactctcatgaagagggaacataaaccttttaagttgcgattctctttttttaaaaaaaagttacacggttctgcaaaaaccatttcttcagacgccgttctttcttgttgtctaagcaaaaggactactacatgggccagcacatgtcccttaagaagtcttttggaacctatgaattttgtaggatttcacagtaattggtttaattcatacgaaaattctctaaaatttctctattccaaaggatgcctccatcattttttttgtaaccatgttttctttttactaaattcatttatttattcttctaataaaaaggagaagaaattaactcatcggcccattctcctttagctgtttactgatttaacttctttaaagtagtgcattttcctgttctatagcccaatctgcttttattgggtttactactttactctgtattatagctttcgatgacgcagctttggcttttttcccatgtcctgatgatgcagtttgttctgcgccttttgatagtaggtcattgctttccatggtaggtatgcaccatcaccattgtgctctctgtgtacctgccaaaaagatttacttgcagataaaatttttcattttagttttgatttttacaatacaaagaataataaaagttacaccgataaattatttttattcagttgactcgtttatttttctatggtttattagccgtagagcgaactgtgagagccttcatttgcgaatgaatatacgcactgctatgtgggctctctctttttccgtataaaaacataaaatctttctgtcaagtcatgattaacctttaccttttctatggagaaaacagatagcaaccaacaaccatggattgtttttgaaacactttttaaaattttgaaaagaaaccatccaaaaacctattgctatatttaaacatctctaatcatactattttaattggcaccagtaaaaaaaaccatgacatggcacccgcaatgacgtggtaggctactgcccttgcggattgatgagatcctctgcagtcactttaccgtgcatttatcacatgtcagtgataacagcacggagcagtcaactgcataggatcctgatccctgcctttgcattgtcttgctactccccttcggatggcgtggtaaaaaaagtttactttttcaataaatttgggggtttatttttagaatcaaaaatttaaaatggtttagtaataatgaaaatccacgtgcatatattctactacagatgttcaataatgtgtgcatggaaaatctaatggtttggattcctgcacaaatttgattgcatgccttccaaaaacgtacgtctaaatttcaaaaaggaaatactttatttggtgcaatcgtttcgcttattcatatgcttatcgacaggtttattagcaattagaaaataacttatacgtataacctttatatacgtgtccttaacgattaaaaacaaatactgtaaaataaatcattataaaaaaaatcacaaaatcaactctaaaactaaattttaaaatttaaattttgacttagcataagtaaaaagatcttattgtatccattgaactttactccccccgcattagaaaaaacaaatccaggtacggatatccgtgtatatgttttttttatacttctctccacttcgcaccaaactattttatccatatacaaatatcgtccttaattatatttttttatctaaaaaaaatcaaaagaatagcttctcctcgagtccacctcgacgccgccgccgtcgaaaaccaataaaaaatcctctccacgcccgcaaaccccagccccccantccccccacctcaccgccggcgaaccctagggggggatcaccggagtcggcgaccggcggcggcggcggtggcg

SEQ ID NO: 2475 - DNA, 2000 bp, Oryza sativa
  N_region (954)..(954): n = any nucleotide
  N_region (1354)..(1354): n = any nucleotide
aaaactccagacacccctgatgtaagcaacgtaaaggtatgtgacattgcagctcaggtgtatcttggaacagttgattatgcatatagttgtcttggctttaactcctgtatctactgtattgcaggcaaagtacatcaatagatattacaggcatgcacatcatctgatgtaattgcatcctatcttgaaatgagctatccaacttggagagctgacaccgaaattttgaaagccgtgggagagattcctggcgacatcttcaaattgggtctcttatagacccggggtgaaaacttgttgcaccttaactctgtactgcagttttcgtcagatcctgccattccttagagtatcgcttccttcggcattcttttttgttgtgcgtcgtgtaacattctgggaatagattatgtaaccatcaggccgtacatcttgtaagagcaaaacaattggtttaggaaaaatgctgattcctttcaccgtcctgtgaaggttgcttgggtgcaaaccccttgattttgtcttaactggtcttgcttgacatgctatattgctgtttgtagtatccgtggcctgtcgagcaccgatcttcctcagcttcgacctcgcctcccctcgtctaacttcattgttcttttttttttcagataatgtttgcattgttcttttgaaatgttacattcgagtgtcttttcaaatattcctatgtaaggggatcaattagtccacgtaaaatgttgaatctgactcggcagtgtaggttccggcgtttttttcgttcgatgttggtttggcgttgaaatcgcatgattttatgattatgattattatcagagagataaagctttctcatccaagtagaaacttagaatttgccagggttgagccgaatgggccggtgaaacccaagttagcaagctacaggcccatcaacattcggccgataccatnaccaacaccaccgttactctcttccccaaatccccaaatcttcctcttgactcgtcggcgcggaagggcctggcctggccgggatgggcggccggcggcgaggctgagcgtcgggcgtggccccgcggtggagcggcgcgtcgcgtcgaggcgtcgggcggtgtctagcagccggtctcgcggcgcattgggccggccccgcgcggtggagcggcgcgtggcgtcgcggcgtcgggcggggctagaagccggtctcgccgcggcgcaccgggtggccggccccgcaggtctcggcggcgcatcgggccgcgcgcgcgagccaccaggagccccggcgacatgcactgggtggcgcatcgccgcgtcgtcgcggcggcgggcggccgggcggcgacgcgcngccccgggttcaagcggggatgcgcccatcgccgttcgttgctcgaacagatcgacggcgaggatcgaagcgtgtggtggcgtagccgatacgcgtcgtgagctggcgagccacgtgggcccgcaccgcgtccacgtggcttccactttccctccacgtctcctcctgccccttgctaatccttccttgcaggggaggggaatctgccgctttcctcatcgtcggctccacttccacttcctcttcctcctcctcgaggacgaggaggaaattggcagctggaggcttggagcgcgctgcatcatcccgcccgccctgctgctgcggcgatcgccggagcagggctgcaggggatccccacggccgcagcagctgttgttatctggtaagcaactaaagctcgctatctgctcgacggaatgccgcaccgaccaggaaccaagtgttgcttctttctcgcttgatcttctctttggtagatgagtaaatgaatgcacctgcacttggactcgagtttgctgtgttactcggcgttaagcagcaattttctgttcctcctacttcgtttttcgcctactattcctccttacttattttgaataatagaccttgaactcatacttggaagcctgcagattctgtgtgg

SEQ ID NO: 2476 - DNA, 2000 bp, Oryza sativa
  N_region (362)..(362): n = any nucleotide
  N_region (368)..(368): n = any nucleotide
cgattactataaacttatagtctattatgcactactctgcaagctctacgcatccatggttcctgatcgcctattcgaataacagtttaaaaattgaacttttgcacgtttgtgctaatattccctgaaatatagtaattcgaaattcggggcattacagtagagttcaagtattcacacagtcagaccgtcgagctaggtggtctgactggtcacatagtcaacaacccacttcgccaattgtctttgaatatcaaaacccagttatctcacatgccaattgtttatcacaaaataataatcaaacacgatttaattttatagaataaacttgagtataaaacatttcattctaggtgcantgcacntaataattaatttatataattatggtcttatttcaaacaaatattaattgtttcaaagaaaccatgaaaagagaaagacaaagaacttagcttcaaacaattgttgatattttgcactaccaagccaagctaagttctttaaaagtgtggagaaaatataaaattatggaacttttacagagagaaaaaaaatccaatctttaatgtacaattaatttggttgtcactatatcatatgagaggatttaatcacaacagacattgagtttctctcgcaattttcgtttgtatccataatttacggtacaattttgctatatatttgtcgacaaattttttctcaaaaatttgacagatgtaattacagtacaatcgtagtgtaattacactgtaacttgcatctaattacactgtaactatagtgtaacttgtatgtaactttgaaaaatctctccttaacatgttatttcggtaaaatggaggtcatgggaacaaattctttcacatatatgtgtgctaggatttgttttcttcctcaccaaaacaaatcttgtaatagatctaacgattcaaaattatgtgaaacttagttacagtgtagttacatataagttacagtgtaattacatataagttacaatgtaattacactacgattgtactataattacatctgtcaaatttttgaggaaaaaattgtcgataaatgtataggtagtccgtttacggtatgtataaagctagtgtgtataatatgtagctagcgatagtttattatttactcgaggaaaaaagatgatccaaaagtcgtactccctctgtcccagaatatagcaacctagaaccggatgagacatatcctagtattatgtatgaatttggacatggagatgtcccagccggttctttggaatgagttggcgacccagatcatgctgctcttgagctttattaggatacgtcccatctggttataggttgctatattttaaaacagaggggtatgaactaatcaatctctggctcaaaaagggtagagcccttagatttccccttaatctacgagacaacggtggaagcgcaacagcaaggagaacgtggcgctgacgcaaaaagcagacagcttatcacttatcactacaatcatccggcaaggaaaggaagcacatggtttggaaccgtacttaactaccgaatcgcctgatcccaaaatttactactgacaatactctcggatgcaaaaaaaggtacggtcacatgcgcgattcgtcactcgtcagttctcaaaacttttagctttttgtttggcttcttgttgaaagtggatataaaccttgtactccttggttcttagcaaattagctacctactaatccatagctcccacaacaagtaaggatgcactgcgttcgccgactcgagagtgtgtgctatcagtgtttggctttgactgccaccagctctcgctctccttgttcccaagcttcatagccaattatgcgtgatcgatcgtctagctagctcatgtaagtttcttcttgttgttaataacgtggaatgcatacatatatacatgtatataccttaatcttcaagtacagcaattgcaggatttccctgacccatcagcag

SEQ ID NO: 2477 - DNA, 2000 bp, Oryza sativa
  N_region (61)..(63): n = any nucleotide
  N_region (69)..(69): n = any nucleotide
  N_region (72)..(72): n = any nucleotide
  N_region (76)..(76): n = any nucleotide
  N_region (84)..(85): n = any nucleotide
  N_region (87)..(87): n = any nucleotide
  N_region (91)..(96): n = any nucleotide
  N_region (98)..(98): n = any nucleotide
tataagatttcacacattatttaaggagaaaacccgacatacgactaaaatgaacctccannnaattcntantcangagtacanngnttgnnnnnngnggtgcacaagttagtcaaaaccgacttaaaatgggaccaactcgtcctaatctccataacgacccaccagtcagtcttctggctaaacgataggccaggaggtagggcccaggggtcgcccgaacctccattggcgcctctgatcctggccttccatgtggacgtccctgatagttccccaatgacggtcaagggcgcactgacctccacaaccgccatacaaccgtcatttcaagatataaaacgaggaggccttcacacttcacaacgcataactttgagctcaagtagagtacaacacacaacttgataaggtggtcttagtcccacgcccgtcatcgccatcttcgcgcccgctgctctagcggtgggtgcgggtggcagcgtggttggggaagagagaaggaagaagacagaaaaagggaggagatggatggaaaatatgatggaagtggtacggtcccaattttgtagaattcaagtggcacgactacgaatagacgaattgtaatggaatttatctaaatatgtatatttgtaatggcacgggtccaatttaccctagtttttacgtgtatgtatatagtttatatgtgtacgtatatagatggcacctgcatatataaactttgtatgtataaaattttatatatacgtgtataaactttatatgtataaatttaaaacgaattgaaaaattacttgaggagcagggccaatctgaaaaggaaaacaagcacacatgcctcataccccatgtttttttctcaagtaaatttttaattcttgggtttaatatttgaagagttattataccaggtattgtggttgagggatacgaattagatgcgacgtatattttgagggagttttgttggactttttccatcatacacgaatcagattcagttcactagttaagggagtcaaagtggacttgttcctgacttcttcccgtagtggattcagacccgggcttctgaaagcccatacagacaacagcccagcataatttagccccagtcctcgagtgacgccctaactaaaccctactttactactagtcgtcgatctcctcgcgactttgcccgccgccgccgccgccgctctccatcccgcgagaagctcgtcgccggcgtcccgctgcatccatcctctccggcggtgagcgcccgcacgcgtgcacatcctctctctcatccctctcgttgtacccaacaccccctattttttgttttttttttccctcgaatttgccttaaaccttagcttctctcctagatctggaagcgttcctctgtgccttgtatgtgaaccttagcgagctaacctctctcggcagtcttgtctgctagcagtccgatcttcttcgtcatcgataggttttgatgctgtcgcgtgcgcttctcgatttcgatttctccatgcctgtgactttgtatcgaaatccttgtgttgcggataggatactcgttcttggatgataatccttgtagctagattcggtgccgatgttgctgggttggggatttcaattcgtagcttgtagggttgatgggtttcattcttgttctcatgatttgttcaggtaaaaatgacgcctcatgtgaatttgtgtgtgtaagtaccattgcacttcacctctgcttacaatgtcaatggagctctatatgaaatataggtatgattagatctgtattgatagcacaacgtcctggttacttgttagtgattcgatggttggttttttagacaccattttttgcttgttggtcagtgagatgtttgtttgatgctatctttgctgcatgaattatcgttaggtctttcttgcaactttctgtcaatttattttcgaacccatatgcatatagatcacctgatacattttgttgtgaccag

SEQ ID NO: 2478 - DNA, 1974 bp, Oryza sativa
  N_region (7)..(7): n = any nucleotide
  N_region (10)..(10): n = any nucleotide
  N_region (12)..(12): n = any nucleotide
  N_region (25)..(25): n = any nucleotide
  N_region (32)..(32): n = any nucleotide
  N_region (38)..(38): n = any nucleotide
  N_region (47)..(47): n = any nucleotide
  N_region (53)..(53): n = any nucleotide
  N_region (68)..(69): n = any nucleotide
  N_region (76)..(76): n = any nucleotide
  N_region (79)..(79): n = any nucleotide
  N_region (89)..(89): n = any nucleotide
  N_region (93)..(93): n = any nucleotide
  N_region (539)..(539): n = any nucleotide
  N_region (542)..(542): n = any nucleotide
ttcccgnggngnctgtcatttagcntgtgatntattangtgtttggnattatnaatatgtgtaaatgnncatgttnaanattttatatntatntatatatatatataaaatattgtttagcagtctgaaaaataccacaacctaataagaacggagctttattacatttgacaaaaagaaaaacgtgtagcgttagatttaaaagcttttgttttgtagaagtgaaataatgaggagatggtggactagactggaaaaaaagcaagcaatcccatctcgtatagtcctacacttcctattcatccccaaacaaagcgccgcgctaaagccgtaacgtagaaaaaggggggacagaatgagagcggcggtaagcgcaccccctccccacagctgctactcccgccgcggcgccactctactggacgcgcgccatgtgctcgaccatatgccgcagaggcgcgagccgccccgggccgctggcctccgtgccccgccggcggccgcggccgcgtcctcccggaggacaccaccgctgcgcntgnccgggcgcgccgccgccgccgccgcctgtccggccgcttcaggtactagaagggatggagccttttttcttggttgttccctcatagccacaagacacgtcgtcctcgatggctctggggtgaacatttgcggccttttgtctggatatctgtgcctgggtgggcgctgcgtggttagatggggcttgagtatcgggagattgtggtttaggacaaagtcttttggtggtcactaggtggggaagtgaacgcttaataatggcatgaaagtcttgggggagcttgcaactacaaaacaaagtacggaatgaaaccaaacgattgctccattgaccattaggatacatagtacattttggttaactgaatcttgcaattggggacaaggacactcctagcgttgattttggagcgcatacaagttaattgagtattggtgccaaatgccaaagggattttgggagaaaaagaaggtatatgaagggataaggcctaaggggaaatgtgaaggcttataagatttcaatgctctcaatgagttgtaatttcgtttctgaaattcttacttgccttcagaaaattgttcaaaagtatcctgctaattcatataatgtgtatagctgtacttatcaattcttcagctttatcaggggtgtgacttaaatttagcttcacctcatcatcaggactgcacttgaatagattgtttcagtagtatacaattatacgtgaggcttggattcatgttaaatactgactgaagtatgctctgcctatataatttgataacacatagataaaagaggcaggagacaaatatcccttgatcgaactgtaaatggaatctttgttgtccggcataagaggttagagctatttgcaagttgtcgtttttcatcttcctggagtttgcttcattgtagtatatactccattgcttgagaatccgggatctcttagcccagacttttacttgccccaagcaagcctgcttcctaaaatcaagcaaggaataaacccttgctagttgcttgcattattcttgcaaaaagccaagcatgttcatcatataaaaataagtatagcttttcatgtatgccacattcagaggttaaccattcttgttgagcacttcctgcatgctttctcagctatgctatatttatccagactgcaccgtcatttagcatgatgtctaaccattgctcagttccttatttgttcaggatactcctgccaattccaacagcctttcgctcaacaactcgtgtgcggttgacctcacctgcattcttgccatcaagacgaaattttgaaggctatattcctcagagctgctcaggttcatcattgcagatctatagccggtcatccctgctatctctctcaccatcttcagctctcatggtgtcctcccagctgaactcttcgg

SEQ ID NO: 2479 - DNA, 2000 bp, Oryza sativa
  N_region (127)..(127): n = any nucleotide
cggtagcacggccggccaggggcgcgcagacggggcggcgtcggcccctagctcctctcgactgcgcgcggtcaagtgacagcgacggcagcggcagctgggcgagcgcgcgccgacagggcggcgntggcggcgtcggcccctagcgtgccaagaagaagtcgtgagaaagagaagagacgcattctccagatctaaacgatcctaagggtatttcggtcatttcgcgagcttagtgtgagaaaaaaattaaaaatataaacaaataaaaaatgtctcaaaatagcccaaagtagcattttattaagaaacagtctctattgagtggcatttttataagaacatcctagagagcggtcttctgttaaagccacatctactaagtagcatattgttaagggcatgttcactttgaagccattttcaaccttaccaaattttggtaaagttaccaaaaaagtggctacatttagtttgctgtcaaattttagtaactatataagaaatcctaccaaaattttggtaagtcaactataccaaaattttggcattaccaaaatttggtaagttttttttttcgcataaagtgaaccggcactaaatttctccacctagatctgcacctgcaccagtacctgtacttgttctacttcttgttgtgcgaagtccagacccaattccaggctcaatcgtatcggcatcggtctcaggtaatgggcctaattccaggcccaacagtaagcaatgcagttcggtcatgggctcttcctcctcctatgcgtatagccgtataggaatagtcgtgtcgcgcctggattaggaccgcgctataaaatttaaaaatcaaggggttttttcgcaaaacgacgcgccctaacaacccaccccgcaagtcggcaaccctagccaccgccgccagtcccctcctcccccgcgctctccctctccccatcacgccgccgccgccgccgtcgcgtcgccgtccccgacgcctccgcctccctctcccgccgttcgccgcctcctttgccgaccgccaccgccccgcgccgccttccccgcctccgcctccgcgcatcgcaacgcaacctcaggcgcagaggcggcgacttgactccccccctccccgccctctcgctctagggtttcctcccttccccgtcatcagccgccaccccaccccctcccccgccgggcttcgccatgtacggtcaccgcgggtaagccaagcccctcctcttctctcttattcctgattaatctccgcaattccatcccgccgattcatccattgctttctttttttcctacaatacttgcttgcttagcgatctcatcaatttctcgattcttttagggataatttctaagtaggtcactttgctttgctaccatgatatgatatgatatcatctgcctaggatttaggatacatgtacagcttcccccttacaagaccaaacctctctccccccaataaataaataaataaatcggaggcagtaatacatccaaattgatgtttcatcaactgcaccagcatcccaactgtggtttgtaagattcttttctactgatatgtgtcatccagtagtttgagtatttcttctattcatatgctgtcaacatttaattagtttttgtttatgtccactaatgcgttcgcatttcgactccattcacctttttaagccttaagtcatgtttagattactagtatttcttatctgtgcagttatctttatgtttgggttattttatatgaaatggggattgagagatggggggatcgtctcctttttttttcttttctctttttgggactctggattatctgaagggcaatgatgggaggcgggggggtttcggatgggtacgagggatcaaagaggccacgaatgatcgaatccaatccatacttcgcagtgaccgcaggcagtcccttggatgtctcaaagagggccaggatgatggaaccagcccctccctatttcggagcc

SEQ ID NO: 2480 - DNA, 2000 bp, Oryza sativa
taatttagatgaaagtttaccaaattttaatattacccatattttattcttatatatatttttctattgtattatttaaatgaggtctaattctaaaattaacctagataattttggaggctcgagggctctaaaattaattaaaatatcctaatatggcccttattattacaatagcacattgaatgaacttatttgcatagcaatatattttacacggataggtttaatccaattattctataaatagtaaattgagacttggtacaatattaatctaattgtttaattaaaactcacatattcttatttatatataatcttaatgtatttatatgaccattattttatatgagtgattttcatgtcatgaggaagttggcgaaatgttgtgagtatcactctatatattccggtgaattacttatttataaacacgatcattataatggtgatcatcatttcatgtgttcttatatttcatgtgagattggattcaaatgaattggatttaatcttactatttctttagctaattgtgacatcaagctatcaatcatggttcgaatatttaatatctgaattgtaatttataatagaaattaatatttgactttactatcttgtgcataaatattggtagggttattaataaataacatattctcgtaaattatatctattgcttaaatttagatcttttctttactttctttgtgatcatttacggtttggcaaccaatagcaatcataacaaccagcatggtgcaaaagttttaaaaagttcaaaattttagtgatttttattgtcaggaattttcaggatattacactctctccacactcttcaagctaagctctctcatactctctcaagctttagtttagtattctcaagctagtggagtaggaagagttcgggtatggctccagcagctctcatttcttcttttgtaagacttgtactttatttagaatattcttctttatacatttctagtattgtaatactttccaagtatatgaatgctaactttactttatatccgaattatattgtttatattgctagcttatctgggagatgcaatggaacatgtatagtgtttgcttatgcaattactctatgtgatgacgatgatattagattagtatctggtagtttaggcgtagtgtctagattacaggatatcattatttggggttatatgctgcagatgagaggtgggccgctgatggtgacatctcagtacgggtactcctccgcgcgtgtatatagtcctaagttaatttcatggggagggtactcctccgtatttagtcccggttgtatggtcatgaagggcagtcataaggaactcgatagtcaggggtggcttcttgaagcaccaggagggcattggaaagagggtattagctagttaatcttatagctaggatgtatatataatatgtatactagaagtatatgaatagattcttttctattttctttccacttaactcagataatttattatgagaataagtagtcttatgcttgtgtgtcactctaccctttgcttatattaacccactctacaagtaatatataaattattagtacggttctctctgctataatcatcccacgggattaaacaaatacgatacccttggaatactctcgggtgaaatgctacactggtatatccgtgcgcttgcggataaactctgtaaccgtaatataccaggagtatttcgggcaccattgctgtgaattatatttctacttatgtcgttaaaaaataccaacaaccggctcgaattgagccgaactcactaagcaccatcactcccaaatcaaattgaaaaccccaaatcatccacaaatcatcaccaaaatcgattgacatcacataatgaacataactcaacaacaaaatcatccacaaatccaccaaaacatctaaagaaaatctacaggagacgtgggagggagaggggctggccctcgggct

SEQ ID NO: 2481 - DNA, 2000 bp, Oryza sativa
ttcctattttctaactaacacattaatataaaaacaatcgatctaattttttattcatttgaactactaatttataatttggtagctaaataatccaatactcatattactcatattttactatacaaaatttggaataaattatagatccatatccttaatttgcatggaaactaatatataacattcgattggtttaaactggtatattatttataattaaataaataaatccagatctatattaccatagtatataaaaatgaattacatcacagatccttatcctttatacgacaaccaaataacagtgaatgattaacaaaaaaaggttacatatataatcttaaatcattatatgtaataaagatacattaaaaaccatctaaataactcttaagacatctcacgttaaattagaaaaaaaatctaagaaaagattaaaagaaaatcatcttagcatcagttttcacttactacatctattttctaatcattttcgagcgatcaattattttcagcaattagatatattttgaggaaaaccttaaaccgtcaaactaagaaaaaataaagcacctaatcattagttttcactcgtatactaaaaattagaaacgcaaagtccccttcacattctgctcccctcacatgtgcacatcacgatccacagttgacccatgcactttgcatgtcatccaaatagcaatgaaatacgagaaaaaaaattgccagcatatattatatcattataagtcactctataaacatatatagctaaactaaatcaatagtaaccaaacaaatcatagaagcatgtaatacattacattccaatataatgatgcatgcacagttagatatatttagttgtacgattgtgtttacgatcggtgcgtgaagccccgcatactctacatgatacattcatagatgtgtttcacagcacggaatcttattgaagaaatccataccatccaattcatgtgtttattgttaataaagaatgaggacccacatcagtcttaactacttaatatatcaccaagggtgattgaaattttctcaaagttgagatgaaaggtgtaatgctctatcattattcataatatcacaaattttgaacttatatttgcagttgtattaaataaaatagaaaaatattattagagagtaaatctaaccaattggagaaaaaagttagaaaattttgcttcttacatttcacttagattgaaaaggctactgccataacaattgcgttagataattgaaacaactaactaataggttagaaattttacctaagcaatgctgagaagaaaatttatggagaaattatacttttgaagcatgccagatattctttgattagtattccgcactcataagtgtctcaaccgtagcctatgatgcccgcccgcgcgaatgcgcgggctaacttcctagttttattaataagctattagtttagttataaataaattgaagctagtagttggctatactatactactataaaatgaaatcaaatgaagtttcataaatacactggcagacttaatataataaaatatatgctcatgaatggcatgcacgcagaaaaccgacaccgttgcatggagatgcatgcaaagagacacaagaaacacgttgtcatggatctcggtgcatccgatccacaatcgtaggcgttgtctgactttgatcacgcatgaacgccacgtaacgcaacggatatgcctcgctgcagccgtagaatataccacatgaaatcacgagcagtcaagctcgcatgtgatgtgcaacccggcccccctgcagctcatcgatcgatcttacacgtggtagctatccatcgattaatttcatcgtctcatctctcgccgcctgtatatataaagaggcctcactctcagctactccactcaggcactcatcgagctacattttgctaactatccagtaccaagaacggagctgcaaggaagagacgtacg

SEQ ID NO: 2482 - DNA, 2000 bp, Oryza sativa
aactgtttctgaaccatgttcggactctcagtcatgtaatttttataatttgccttcacaagtgtcatcttggctgccaggaacctggagttgaaaaagaattggccagtcttgacttgaagagattcttcaaattggccttgattgttcaaacaacaggatcttctgctatgtccattaaaaaaatgcgggcaaacaacagggaagtaacattgcctccttggctctctgaggaagatatcagttatgtagcaagtgtgtatgcaaaaactggcttcgctggtggtattaattactaccgatgttttgacctgtaagtatgccatttttaaggtaccaaatcattgtgtgcagaattcatacatgtcaaatcactcgaattatttttctccagatacctaaattctatccaaaagaagacacacatacaacctgtttaacgttgcaatacagtttttgaactccctgacaggttactagagagagaaacatgaagcacaatatcacattttttcctttagatttacctgttgtcactgattgctgtgtatcctgtttgtcttactgcatacgttgcttggaattaacttttttttttagataatggtgttgcttggaattaactgttgtccaattcaatacctctatactactatgagatatcatagcatctgttgtgtgtttttaaccaggagctcacaacctatatgaactgcagttaacagatctcggagagatgaaattcttgtttgcataacactttgtgagggtggatatgtatgggtgggtgactgggtgtgccgtgtgctgtgcgtctttttggtttctcagtcttgtagtttgtcgggaccttttccttttccttcttcttaatataatgatgattcgcaattctcctgcgtattcaagaaaaaaaacacttatggtaaatatagaaatctgttctgaactacacagattatttattcagtaatttccatattgaatattttgtcaccagtcatgatcacaagcatgcactcccatggacttgagaactgcatcaacatacgcagttgtgggttgcatgatatgatcatataatcctatgtagcaggaactcataacctctgacctgcatgcacaggaattgggagctgatggcaccatggacaggtgcaaaagttctagtgccaacaaagtttattgtcggggatggtgacctggcttaccatctcccaggagtcaaaagctacatacacaagggtaggttgaagaaagatgttcctatgcttgaggaagtagtggtaatcaaaggtgctgggcacttcatccagcaggagagagcacaggaaatcagtgatcacatctataactacatcaagaagttcaatacgggtgtttcttctccaaaatcatcgaggttgtgagataatttactgctgtaaagaataatttcaagagaataaaggatgtaatgctttaggctgatggtgtggttcttttgtcatgctgtgtttggctaatgctgcagagcttttgtaatgccaagtttggctatcttggcaaacaatgaaatttcaagggtctgaatgaatttaaaagagcttctaggatgcctataaactaattcctatgctccctccgttttatactaccacttttgattttctttttctttttttaagtcaatttttttaggtttaatcaaatttatataaaaatatagtaaaattttcaacaccaaacaaatgtactatcaacatatacattcaatgttaggtttgatgaaactaatttggtgttacaagagttgctacaaaactttgtcaaaattataaaagtttgacacaggaaggcaggtgtctgtcttgtgggccatgatatgccggtttttgtcttatgggccgtatattttgtcacttgaccatgcgctggagtccatttcttccccgtcaccaccacctccacctcctcgatcgacgcatccctccgccgctcgcagctctcctccggcggcc

SEQ ID NO: 2483 - DNA, 2000 bp, Oryza sativa
  N_region (88)..(89): n = any nucleotide
gctggtacttagcgtgtgaccaaatccaatcatcatttctagctctctttcagcgtgtgcacagcttggagctttgtccctgggaaanngtggctgcataggattatcgctgaggaggacttggggcccaatgtttatgtcatgacagtgctcattgacatgtatgcatagtgtggaagcatttccgaagctcggagcatcttcacttcaacagtatggatagcaagaatgtggtctcatggaatgcaattagctggatatggccttcatgggccaaggtgctgaggctttgaagctctacaaggacatgctggatgcaaaccttattccaacaaacgctaccttcctgttggtactctatgcatgcagccacataaggttggctgaggaagggcgcaaagtcttccagtcaatgaccgatcattttgcaataattccaagtattgagcatgcacatgcatgatggacctccttggctgagctggccagctcaaggaggtttttaagctcatttctgaattccccaagaccgctgttggacctggcttaatattgcttggtgcttgcatggtccataaggatagcgatcttgcacaaattgcacccccagaaaacagcggctactatgttctgctctctaatttacttgtagtcaagaagcaaatctctgaagcagcggcaaaaggcaggaagctggttaaactaatcgagatagttgacaagccaaacttcctcatggccggcgactgtgcccatccacagtgtgaggccatacttggaaaatcttaacttcaaagacgatttgacgctaggtatcgacctgagacagagctagcattgtacgatgttgaggaggaagagaaggagcatatgtttgaaagtgcacagtgaaaagctggcaattgccttcggatttctcagcacagaaccgagatctgaaatcaggataatcaagaatcttagggtgtgcctggagtgccacaacgccacccaagttcatatccaaggtgacacagagactgattctggttagggaatagggatgcttcacggttttcatcatttcagagatgagtttgctcctctggagagattactggtgtgattcacctgaaatgcctcgggtgtctaagcatatggtgattcaggcctccactgccgcattgccgcgatggcttcgtcccccatctctccctagaaaactatttaaaaaaataaaaattgtagataattttagaaaatgtagaggaaaatcagaaaaatgtaaaagaatatgaatcatgtagaaagttttggcatgatatttgctatattatggacattgaacaaagtagaaatccatttccccctcaagtgagcctaatggacttaatgaacagtgctcactattggcctagcctttttgtttttttttctattttaagtttcaatttcggcttgtctgcaaaatatggtgttagattttatttttcacaaactagtactataaattaggtactacctatatgatctttttttccattttttacaattttgaatttgtccaaactaaatgaatttatggatagatgatagctcttaatttgttgatggatgacataaattgaagggaaacaaccacctctattatagaagcttcttaggcccaacatttaaggcccagccgcccagctggcccaacgcaccaaaccaatcggaatattccattcactcaccgcacgacctataaaaccaatagcgacgtgccacgttagcccatccacgtcgccccccctcccactctgccctcgccgacacgtgggcccaacatagtaaccggtcccacgagccagggaaagaccagaaccagctcttcctcctttttaatccacccaccgttcccactcctccgctccttcctcccctctcccgattccccaattcggaggccaagcctgcaccggcaagcggcggcggcggcggcgacgaggcgagagggttcccttccgcggagccggcgg

SEQ ID NO: 2484 - DNA, 2000 bp, Oryza sativa
  N_region (353)..(353): n = any nucleotide
attccatcgcgtttcgtccacagttaattattagcaatttaaaaaatataacttgtaagatgtgtttatagttacttcaaaactagtgttaataaataaattacgaaaaaaatttaaaatcaactctaaaattaagttttaaaattatagattttagctgcggctgatcctacgatacaggagagagcaaatgacatagcacgagtacatattggactgttagttatactgatgtttttttttggtctgaatatgcatgttcagacttgggagaggacagcatgtgaatgtttgggagcagcaactgtttgttcttacatggtgagtagacgactgagcgaccaccttaaagngatttcctttttttttcctcctgtcaagtactcatatgtagtactgtacaatatatgacactgcacaacgacctacatgtgagggcacttgtcataccagccaaagaaggcctaccagagctagctacagtgtcatttgccagggccctcggtgaaatgtatttcccgatgacttccaatttaatgggaaaaggggagccccggttggcaatgattaaggccatgttcggtttagaggggattgagggggaataattccacaccacaataaatcccctccaattcctccctcgtaaggattaaccaaataaggactaaatgtttttcgctgggagcaatcaataaatgttatccggataaatatatattaagtaatataatgatgaatagatatgttaaaatattatggaaatgatgtaaggtgtgataatcacatatgctttgcatgttgatttgtagaattcaatgaattgtaaataatgttgaatacttgtatgagtttttatatgtaattattgttagtgaatgatgagctagtatatttgtatgttgagttttaaacttagtgggttataactatatagaatgtatagatgtcttagttttgacatgtggaatatgggctcgagtgttattgagagaacgagggataaataagggaatgagcacttttggggggtaaataggcattttatccacagcaatcctcatgttacaagacaggtatgaaaggttactcctaccctttgtttatttaaatcaatgttgatgatgtagcacttttgaattcatggttgttatactttttcaccttttagaaaaaaagctaatataattcatggttggtttttaattatatttccctccttaaaaaagagctccaatttgcttgtgaaaacaaagtgtttggtatgtttgcccaaaccaaccatagcaaatttctggaaggtagcaatccaaacaaaccctaagtaccccactataccaaaaatgtaatacgaggtaccacatcttggaaggcatcaaaccaaaaatactatcacatccgcattcacatacctctaccatacaagttccttttttgtcacaattcagaattacatttttgctgacgcaacaacaaaatagaggaattacataatttgatttatcatgattgatttgggtaacataccaaacaccaaacagttcaaggccctatttgaagagtttctatcacctcccgcttctcccagagcttttcgtccagattctaagaatctatagttgtagactaaaaaaatgaactgaaaattagaagttgaaaaacctatttttttttcattatcaaaaactggttaccaaccaattatttcttacaatcttaacattccccagagaggctcctgtaattttgaactttaggaggcaaaatactagcgaaatagtgaatcggcccatcatttggtctgggccgagtaagcctcgaagagcccaaagcccaaacggcccaaaactcgagcctgataaaaccacctcctaatccatccccgacgccggtgggtcccctcccctttccccctcccctccggcgaactccgagctcttcccggtgagcgccgccgattcggccggagaggctcgccggagtcgcctccgccctgccca

SEQ ID NO: 2485 - DNA, 2000 bp, Oryza sativa
  N_region (1476)..(1476): n = any nucleotide
cggtattttccaatcgaatggtcagtgtataaatgatgtgatatatattaatccgattgtctaaaattatttgagatgatgacatggctgagttatatacataagtttacaagtatccctcatatatcaaaatctataaatatttttttacaaaatcacttattcaatatatatgcatgtggtttgctacgggtttagttgtgttttgatagttactttttataaatatgcacaatggacgtggcggtattaactcttcaaaataaccttgttgtcatagtaatatgaaagttatgccaaaacaacataggggaaacactcaacctaccatatcgctcaaatgattgttgacctgtaacacccaacgacctttatttacagttgctatcgaatagtaaaatacatattatcgataatatagattgagaatagtaaaatactaattaaaaatgatttgtaaattgcacaacgcatggaatatatttgatgttcaaatccaattattgaattagacaatgtattggatgtgagtcaagagcttcgatgcttcattccctcgaaaggatacgatatgcttgagcgaacaattaataatgaaagatacatgcatatcgtcatcttgatataaataatattttagagagatatatatcgttcaatgacccaaaatttacaattgtttttgtttgcatccatgaatcaatatatcaattgattccacggatattgaaaaggacacgtagtcgtaaatgtgtattatagatttattggctcattttaaagtacaaacttgcaaaaaaaaaataaaatccttggatgatgtcgcatgggttatttgggtgctcctcatcactaaggacaccaaagaaaacatattttttaatctgattttgggggcctgtctgtcattttcaaatgcatttgttgcgaagcaaacaagcaaagagaaagtggaaatttgctcttacccctgcaaaacatgtatcctacctagccgcatcctccgatcgaacaagacaaagcaaatgctccacccacagttccacacgcaacggccagaacaagatcacgtatgccatggcattgccatgcctctgcttagcgcttacgcttcccggctgctggtgatcgatcgagctgggccgttcgctgcatgtgttcacacgggccacctccactgcaaccaatggtaaaatcccacgtcatcgtaaccaaggtgcgacccacacctccacgtcatcatctccagctcgtgtaggtttcgtacgtgcgcgtagaaaaaacgcaccccatattcctaatccagacagcacacaggtctcctcccgaagatggcgtccgttcgatcacgcggtggttcggatcggacggctcggaaacaccggacgcgtagccccttagtcggcgcggacgcgacacggacatcctacggcgcgcataaatcgctacgcgcattaaaccttaccactgtaaagntttccttttgggtcccacatgtcattggaccacaggcaagaacgctcctctccctccccctctgccgcggcggtcaaaaccagcacgcgccgaaatcccgtacttcccactgacacgtaggccccactgtcattgaccgttacaactcaggaaaaaaaaggggaaccccacccaccagaaacgcagcccccagcaatgataagtgggcccagaggaaatgtggggcccacgggtcagtgggacgtggccgtgccgtgcggggggcgaaaggtacggtcgctgaggagaggctggcgtgggcggtggagcgcttcccacagccctcggcggccgccacgtgtgggccgcagccgcatctcttctctctctactctcccaccctccacctcccgctgcttctcctgttcgtctcctttctcagtaactgcacccacctccacacctacacgcacacagacaaacaaagccaaaccccccgcctcgcctacatctcgcgctctccgccccccgcccgcctccactct

SEQ ID NO: 2486 - DNA, 1275 bp, Oryza sativa
atatcgagtgcttaacaatcaccaaccatgctgggagagaccaaaagatggctggatgaaattaaatgtggatggatcctttgacgctagctccggtaaggggggtcttggaatgatcctcaggaatagcgctggtgatatcatcttcacttcttgcaaaccccttgaaagatgcaacaacccgctagaatcagagctgcgtgcctgtgttgaagggcttaagctggcgatccattggactttgcttccgattcaggtggaaacagattgtgcctcagtggtccagcttctgcagggtatcggtagagatttttctgttctagccaacatcattcatgaagcgaggcatctgctggtgggtgaaagggtgatttctattaagaaaatatgtcgtagccagaattgcattagccatcatcttgcaaatacggctagagctgattttcttgctggattttggttgggagagagttgtaatcttatctcacatttattaagcgagaactttatgagtgagtaatatatttctttccccccgcaaaaaaaaaaaaggggtacgtgttgatgtgcatgtgtgtgtctggactctctctataacttgtacaaacttgaactatactgtttgcccgttatattattttgtcggccgattgtacaggccggtttttatatggcccaagtccaaagcctgccttttggctgcgtgaccacactcatgtgatgatgtgataagtctgctagcactagcagacgccttcacggaccaacacaaaagttacgacccaaaaacaaactctccgaccgaacgcaacagcgcactgcatgccaaccgaccgaccgaccgagcccgggccgcggggtgggccaggtggccatccttccagacgcttccgccccccatcccacccactgacgcgtgggccccacacccacgtgggggccgccgaggagggccatcggtcgccgctttgaccggggaggacaccgtcacccactgacgccgtggggcccacacgtcagtagccccgtactagtacgttttttgcatgctttgtccgggatgcgcggcgcgaggcgtggctccacgtgtcctcctcctcctcccccacagcctacgtgtgcctgctccggtgatgtcctgtgtcgcgggtacgtggcggccggcgaccgggcgcgccctcgatatatcaggccgcgccccccctcgccgccgcactcgcctgcccccacggcgagcagccagatgccaagatcctccccgcggctactcctccc

SEQ ID NO: 2487 - DNA, 2000 bp, Oryza sativa
ataggtttgataatacaagggctgacatataaatagataggggctgacatgcaaaaacgttttggagtggctttcactgtgggtagtgtgacctttgtgtggttctatcctacgtggcgtcttgagaccatagttacttgtggctaccattgtacatgccctaagggaagagatccttcgagtgaaacagctaaagtgattgacagttggccgcgaaaacaacaagggagaaaatggtttaaactaaaaattagaaatagttcgcatggcttaaatgcgtgggccgaggccttatctcatctcgaagccatcagcccactccgtcgtcttcacatgggcctccgttttgctttgtgctcacgtcgtcttcaaacgggctgggcgggccgcttgtatcttgagttgctgaacaaaagagaatagggacatttacaattttaccactatttttttcacttttacaagtatgtcactcgaataacagttctggtgatattttttaatacttcggtggtagccttacaataattattcaaacttctaatagcgtcccataaatagagattacacttatactctctctgtcaaaaaaagaatccaatcttcgagatgaatctggacacaatatatgctcatatttattcttagaattggatttttatgagatagagaggagtatatttgagtggtgagaaattgtaatagcagcccataaactgacaaacagagataggggactgctaatgcgcgggtgatcgctgggaacgatcacccgcacccgctccccctatacgtacgtccctcttctccccctctcttccctactacagtaaaccacaattttttttaaaaaaaaataaaagttagaaaaatttatgtaaagaaatactatatataaaaaatttgaattcaaattcaaatttgaatcgggtatataaacttttgacttacaaactttgggtctataaactttaggtgtataaactttagatgcatagaaatactatatatagaaaatatttgaattcaaattcaaatttgaatcggatataattcaaattcaaatttgaaactggtatataaacttttgacttataaactttaggtctataaactttaggtgtataaactttagagtatagaaatactatatataaaaaaatatttgaattcaaatttaaatttgaatcggatatataaacttttgacttataaacttttggtctctaaactttatatatgtaaacttgaggtatataaactttaggtgtataaatttactaaaataggaaagtaatgcggtaccaaaaaaaggaaaccaggtggagggagggaggggggaggtgatcgccaccccatccccagggcgatcgatcgcccaacagcatttccgacagagataacatttccatctatgattgacgagagtatgaataatcattgtttctgcgcagtgacttgtaagttagactgcttcctccagttttaactacctgtcaatgttgatcaatataatttcagcttggatcatcaacaaattttgattggtcagatcataacgtgataagtatttcaacccaaaaattggtagtcctacatgttattgagatatcgatggtatatctcaaactttgcaaaattataatagcatggttccaatttaaaaaaaaaaaagctacagtacacttatttgccgtgagactacatcacgagacaaatttatagctacaattatcattgtactcaaaagttgttgcgacttgatcacatcccagatgatgtttacttgggagccaacaaggatttctagaattttaaaatccgcgcacgaggagcgcgagctgcaacgttgcaccttagaatgacgcgcgacaaagctgaaagctccttaaaattatggacgcccacgacacacacggacacgcgttgctacctcgccattggagaaccagtttgctctagctgctccggccgcgacgccgccgttgcaccggccggca

SEQ ID NO: 2488 - DNA, 2000 bp, Oryza sativa
ttgtacgaagccatgcggcggtgtcccccctcgctggcgacgaagtgggcggccaaccggtgcgggctctgacgctgaactccatcaacgagtcgaggccaccgaaattggaggtgcggcgtgggcggagtgtattcccgacggccggcaagagcaccgcggcctcctccacgcgccgggtgcctccccactcgcggtggcgcgcctcccagccggacgaggccgaccggcgaggcgaagcgcggctgcgcgggcgggtcgcggcggcaacgctggttcctccccattcgcggcggcgcgcctcccagccggacgagggcgaccggcgaggcgaagcgcagctgcgcgggcggacgcggttctggagcgaggccgtctcaggctgcggggcctcctattaaatggcaattgttttgcctgcgtgcgggcccaactagagcagccgttcgattcgttttggacggctttgatgcatggtatgtcacgttgtgacttgcctacactaaagctgagtccgtgtggacccaacttcctctcgaactttatctccttctgtagaatcctccgcctccgcttctctctctcgtcgctctctccgtctttaccgtctctccttcgccactccccagcggcggcgcgccttctccctctcccagcgacggcagcgcgccatccactcccttcctcccagatccgactggatgaggggagggcagcggcgtggaggcggcgctcccctccccttactttctccccgctcctggatcaggctgtaggaggggagcgatggtgggggcagccaccgcatgcgacggaggtggcgctcctccctccctagctcccagatccggctggaggagggagcgatagtggcaaaggcggcgctccctcccctccctcccagatctggccgaagggggagggcagcatcggctctagcgacggtggcgcgccttctccactctccgactcctcggcgagcagcaggtgcgacgatcttaccatggatgagcagcgggagcggcggtggcctcggcctcaactagcaacaggagtgacaccgtccagtggcattggggcagcgggagcgacgtcctctaccttgacaagcagcgggagcggcagcatccacgtccttagctagcaacaggagtgacgctgtccagtggcgtcggagcagcgggaacagtatcgtcttcgtcctcgacgagcaaggaggagcgggagcggcgatagactcggcctcaggcccagcggcagtggcggtgtccccgacgagcagtggcctcgacatctggcgagctcagcattctgttagtatttaatttgttgtgatttcattgatgtagacattgttctttgattagtcttttttgctcgtcaacttttttttctggaaccgagttggacccaatgaactatatggactaacaaaaatttgtttggaagcatacctagggcgatttttgatttttgatttttggatttgtttttgtctgttctttttctgatattttctgatctgattgtcatggagacggataacgcgtacgcgggctcacatattacggacgaaaatcgtgtgtgaatgatgtgacgaaaggaaaaatacgaatagttatataagattaaaataagataagatataccgaaagaaaacaaactaattaattaatctctccaaaaataactcctacaggggtacgattaaactgagtaggagtagctaattaagctgtgttggcgttatggcaaagtaacgcagaagcaatcgaaaactaattagaatcagattggatttggagtacgaatcggagttgctcggcctggttctcgcaataaatacaaagagcaccaaacagctcgccaagcaccaataaacgtcgtttcaacagttgagctcaccgcgcaactagcgagcgagttcgtcccgtccgtccgtgttcaagctcaacagcaatccccgggccccgcgtgttcgacgagaaacaaaccaacat

SEQ ID NO: 2489 - DNA, 2000 bp, Oryza sativa
ctgaatacccgatacaagtagcaggccaatatgtggatccagcccgaggtagaacgtgcttggggctggtgggcggcgctagccaccctggcgccgtggtgggaggggttgcgccagcctccagcccgaggtagaacgggctgcgcgcggcccacccaggaggggtgcgccagcctggctggcgtcgtggtatgaggtacggcgccagtatggctggcgccccccgttgccacatcatacattgcacgtatgccctaggtgccacggtggcatggagacggcgccagttgtggccggcaccaccatattggaggacggcgccagccactctggcgcaccaaaaaggaccattcctagaataagtttctactaggggttcatttgtaaaataagttttcaaaaaggaccaaaatataaaaatttcagtcacacaccccccccacccccacaccccgccgcgcacaactaggacactgttgacgatgaaatttggtaaagcatgaatcggagtcaagatccaatccaaagcggatttgagagatgtgtgataatttcgggaacagagtttgactaggacactgttgacgatgaaatttggtaaggcatgaatcggagtcaaaaatccaatccaaagcggatttgagagatgtgcgataatttcgggaacagagttcgcatcagctgggatgatattggctgagtccgagttggagatggttaccgattggagttggaattggatgagggagtcgatatagtcggtatcggtttcaagatgaaggcttcaatgatattgctgggcaaggatgaggtccgtgattagacagttgtatctattaattaggatgtgatgtcattcctttagtgatattttggtaagggtctgcttaagggacttgtttgtcggttagagttaagttagggaagtttgagtcatgtccgatatggacaagttgtattttcgggtataaatagatgcccaggaccatgtaaataattaacaccagttcaataaactctcggtgcattgccacacttttactttcataattctcgatgagttcttgtttcgagtcaggctacatcggcttcaatcttcggtaagaggtaagacttttctgttatcatatatcttagctaatctaagtcgatatatctatttaattatattgattataccttatgaagggtaatatcaatataacttaaatagatctcgtcgattcagattagctaccatcctgaaaaggcaatcatcagcttgattgtctagatattatgtttcttttcatacttagtgatgtatcagttaggttcgatctactaagccctcgttagttagtcctggaaagtgtggattaatttttggattaaagtggcacgcttttcaaactactaaatggtccatttcatgtgaaaactttctatatgaaagttgttctaaaatatcagattaatctatttttcaagtttgtaataattaaaactcaattaatcacattttattaccacctcgttttgcgtgaaacacttaatatttatcttcatcttcatctctaggagattcaatcaccacctgagtcatgtttagaactataatctctagcctattttatgattgctaatagagatagtatcgggtttcagctgattttatctggtacaattgttttacctcaatcttatcttgtttaacaagttgtatctaccccttatattgggatctccagtatttaaggcaaaatttgctacaagacacgcataaaacgtgtaattggctgagggacatcgcaaaaacgtgacactgctcatggacgttgcaaaagttgtgtaattcaccataggacacgggatgcattgttttattatttttgggatgaaagtggtgagatttttttcgaaatgcctagattgcccctgagtgtcaacggcttgagtgttctacgacatcgccattgtttgcctgtccatcttcctgtttcgtgtgtgcgcctacgccg

SEQ ID NO: 2490 - DNA, 2000 bp, Oryza sativa
  N_region (365)..(365): n = any nucleotide
gagagagagagagacaatctcgacacacattatattcctagtgtgtatggtgaactactgtcacatctccggttcgttcaagaaaaaaaaaactactatcacacgttaattgcacgagctaccatgcgacagggtttcggactttcaacagggaggttttgaactaccgtgcgactaacgttgacgctagaaatcagtgttggctagctgtaatagatgaacttgctggtaattccatctcggtcattacatgtaccacaaaatcacatcgattatggactaactagcccgccgtaattcttttttttcccgggtcaaccaaaggttgtccgactaatttcattaagatttggggggaaaatacngtaaaatgttacaacgacattacaatgccgcggtagatagggaaggaccccagccaatcaagaatgagaaatgaaagcagggctaaaccccgtaaacagtcatacgattactcgcgaaattgggagaaaatcccagccaccctccagacagcaatttcctcttgaatatcctccgcaagttgttccggtgtcttggacacgtgttggaaattttttgcattacgctccttccaaatcaaccaacaaattagcatgaatgcactgtcaaaatccgtcctatagctcgtccggaaacaacgtcttgtgccagccactgacgccagcgagcccgccgtaattccattgcgcgtacaagatctagattaacagctgaccaaacaaagagcatgcatggtaatataccaaactagtaataatgacaaattaagtggcgatcaacatgagctcgctagtcttgtgcggcactatctccggcgtctcctgtgcggcgcttctgtcgcggcggctcctcctccgtctccggcgccggcctcttctgcacgaacacgagacttgctgctgacaaggttgcggagaacgcttgtgcttccgcgatctccgcctcggccgttgcggcgtgcttctgcagcgcctgcacgagctcctcctcgcccgcgaaggccgccgcgcacgcgtgaacttctccttcaacgcggtcatcttctccaccacggcgtcctcgaacttgatcgcgctgtccaacaacccggccctacggacggcatcaccgccggaggagtcctgcaggacccgtgatttggtggactcgcgcatggcggtgatcagcgccgcaagctccggaatgacggggtggtctctcgccgccatgcacctgagctccttctccagcaagcggcgcgcggcggaggcgatctccaccgcctccgcgcggcgcgcgtcggcccacgcgacgttcttcctgagcaccgcctcctcgggcctccctgtcccggcgaacacggccagagccctcctgagatccagcacataggacgccatgttatccgccgccgactgggcggagatcactgcgccttccgcccatcccacctgctccggcgagggagggtcggggtcctcaaggtactcggtggcttcagacagcgctttcgccgtgatttcctcgcactctcggtcgtcggcctcgtcctccgggccggcattcatcagctcgtcgatgaggtcctggaggtcatcgtcgacggcgggcggcatgtcgtccgccatgatcgatgcacgcaccttgtggatcgatctgagtaggcgggtgtggatcatgcggcttcattccatttatagaccccagcactgcatgcgtatccgactcggagtagctctgttctttacgcaatcggagtcggactagctagccgccgccctagatgggctggccctcgaaacattccaccttgggcttcgatttgtctgtgggctaacaacatacatttcggcccacattcatatccgtttttgctcgggtgggctgggttagggactcatctgcaatttcgaggattcgaggaggggttgtttgtctctaatcgctctcgttccccatttcgctttggaggcggcgacggcgagaggcgagaggag

SEQ ID NO: 2491 - DNA, 2000 bp, Oryza sativa
  N_region (362)..(362): n = any nucleotide
  N_region (419)..(419): n = any nucleotide
atagaaaaagacgacggctaattgattcgtaattcaactcatcagaagaaaaaagatgtagaaatccaacggaataattgaattgctatttacacacacacatcattatcatctaaacacataactaatccctcttacatatatcgtaattgctaaaccatgttcaattgaaaaattgagataaaatcttgcgaatttctaacctttagagtttcacaagatatatatatatactccctctcttttttaaataaataacgtctttaaacacatgtttgatcattcctcctatttaactttttcctacaaatacatcatacttaaactatattttataaaacaactaaaaaataatatttacntaaatattttaaagaaagtcaaatatgtataaaaaaaagggacactctgaatctacngtattaactaactatagatcagccggcgtcgtcccgctagtggccaacgccggggctgggcaccgacccgagcatcctgctgctgcgagctccggtggtcgccgccggcggcgacagcggcagaggtggtctcctcgggagcagcatctcctcctccggcggcgaggacgacgccgtgcttcttcttcctgcgacggcggcggcggcggcgccggcagaggatcccatcatcatcgtcacggcctcctgaacaatctccccgccgtctcccggcatcatcctggcttgcaagaacggagccgacgatgtcagcagcaagaagaccaggagcaggacggcggcgacggcggtcatggacgccatggttgtcggtcaagaactcagaattggatcgatcagggctagctatggctgaattcttgtgtaagattgatcaggttgtacagctgaattcttgtgtttggctcgtgcaggagaaggagatagcagagcatatttataggcagaggaagaggaggatgaagaggaggagatgctagtcgttgccccagtgcccgcgaatctagccggcatttcgattgttttgccacgtcattatggtcccgtttgagttcactgaatataaagatttttttacgaacacataaaacgagaaaatcgttaatgtacgactaattaacttctagttattataaaattaaaaatagatttaactgatattttgaaaagtaacttctacataaattttttatatgaaatataccgtgtagtagttcaaatatcgtgacaacaaaataccgaggtaaaaggtttatcttaattagaaacagagctatgctaattgattaggctatgtttggcaacctgggttaggaacccatgtgctgcgcacggaaaacagagcaatctattaatatgtgattaattaagtattagcttcttttaaaaaaaagggatcaatatgatttttatgcaattttcgtatataaacttttagaaaaacatattgtttaacaaattggaaaacgtgtacaaggaaaacgagagaagtgagttgaaaaaagaggggaagaacatagcctaaagactattagaccctgacttgttaacccaaaaatcatgcaaaggaatagcaagtacggcctcggctctattagacggaccctgacttgttaaccaccgtcctcgtcaaaaactagtgcttagtactaccccctacgtgtgcgacaatggtgcgtccccgtagaacaggggaatcgagtcaaacgagaggggctagagtacaaaatgtactaagatgctactgtgtaggaaaaggaaaacgagggggaatgcgattcaaatccgatggaaatattgaaaccgtgccggaattgaaatttggagttcggtcgccgtcgccgccgcctgcctgccggccggacggacggcgagtttaattgccggcgtatttggaaacttcctcgacagagatcgagagtcagaggaagcttctagttctgcaagttgcaggtggctgtgcctagttgctttcagggtatatttatttctgtttggcaagctaatacccagggcgaacac

SEQ ID NO: 2492 - DNA, 673 bp, Oryza sativa
taatgtaattggggggatcctaaataaaaccccacttgcattgggccatatatgtatatgttcaaaagtcccaaataatttaaggtacagaaagtacggaggaaagaaaaacaggacacaataagcacacgacacccagagcaaatgcatatcgatctaaccttagctacctacattgacaacatgcttaagcaagctggcccctgctctctgctgctttccgttggttcgttggttgcatgagctaatggctaatcacgatggacgtaagtctttggactaattgaagtcccaaagtgagaaatcaattagtgccaggcataagagtcagagctagagacagaaaggaaggatgtttgcttgcttgagcccacaattaatctcacttagcttagctagctagctgactcgatatgatcgatcatgcatgcatgctaatgctatggtctttgtgtacttgtctagtttatttatcacttaaattaattagccccgttaaataatattagggctctctcttcctcttctcctataaaaccacccccaccatagccgtccatctaacctatcatccaaattaaacatactcttgtggccatcgtctagcttagctagcttcttcctcctagctcagctaacgaacgaggagtagtagctaggaagagagatcgag

SEQ ID NO: 2493 - DNA, 1924 bp, Oryza sativa
  N_region (317)..(317): n = any nucleotide
  N_region (319)..(319): n = any nucleotide
tcgcttgtttgacgctgttttggagcggtgcaaggatttggctgcgtcattcgatcgatctcggccgttgatttgctagtgctcgcgtggtgcgggaagcacttgggcgtcgctcgagcgatctcggccgttgatttgctgcgctgttggatttgaaaacggcgttttaacacagctctagcttcagccccgtttagcacagctccagctcccaactctaacttacctggagctggagttgtgcccaacagtccaaatcctccgttttttggaccggaattggcagagctgctccaaaaaattgtactagggggttnanctgggtttttgctgctccatagctccactccaccccaaaggacccactactttttaatttttttagtgtatttacacaaaaatgccaatgaactacccctacccacctcctctcctccagttatctctcatcctcaaccatcctcccggaggcccaagtcccaacctgtggcggcgtcggcggtgacggcagcagcgacggcagcaaggcggcgagcacggggacaaggcgcaagaggcggccggccggcgggcagcgagcgcgacaatgaggcgcgagaggtggccagccggcggtgggcggcgcgcgcggcgacgacgtgcagccggcagcgaacggcgcagctgggattgggctgccggccggctagggttccccttttttttcaattttttttcattttttttccgatctatagctgaaatctagccaaacacttctcaacgattctctaactccaacaggagttagctcccactggagtaggagttggagtttagagccctaccaaacggggccgaatcatctccacctctccttagctagaaaccaacaaaacagtttcagctccatctaaaatataaagtggggctggttgaggtgctcttaccggatgaaagaggtggaactgagtttagacggttccacaagtccactccagattcaacttctagagttaaatttaagagtttgagccatacgaaacggccctgaagaaaaccgcattacctacaaatatttttacaaaagaaatgtttatcttggaaccaaatgctttgtcttagactccgttcgttctctcgatttggagagatattttcagcgcacgagaaaattaactaaatactattaactattataaaattgaaaaatcgatttatttgagtttttaaacaatttattacatagaaacatttttttgaaaatataacatttaacagattaaaaaacgtggtaataaaaaacgaagaaattgaagtttgtagttgagaaagaccagagcaaaataggacacagaggcccttgacgatttaccagagcgaaatggagaactcaaagcccaaatcaaagcaacattaaggctgtccagcccggggatgggccctatacgatttcagcccattatatgatcgtcggtcgcagcagctaatgggcctccatccggcaccttcccgttgtccgcctgcaacgtttttgcactaatttcgctgaaacccgagttccgagacgctcacaggtagtagggtactctactccgtaccgatcccgccggctgcacgacgccgacccgacacaccaccgtgtcaagccgcccgcgcgacacatcctcccggcgccgcccgtgccgcgcgcatgcaaagacgaacgccgcgacgcgacgcgtgccgaatgccgtggcgcgacgcgacgcgcccaataaatagcaggtctcggctctgctggtcatggctggctgccggcgaccgacgaccgagatgggggaagtgtgcaagcgagtggcgccgagcgtgcgggaggaggaggaggaggaggagaatggcgacggcggcggcgtcgacccggcagcggagtcgtcgtcggcgaagctgtacgaggacgtgccgg

SEQ ID NO: 2494 - DNA, 1466 bp, Oryza sativa
  N_region (2)..(2): n = any nucleotide
  N_region (5)..(5): n = any nucleotide
  N_region (9)..(9): n = any nucleotide
tntancctngtgagctgcaaggcaggttggctatgccttaatgagttctgttggctttaattagcaaagatgttgtcctgcagagcattcttgaaggaactcacctttgtgagcttgactgttggtcgcagtctatgaagattttgggtgaatcttctaggaagcttactaaagacctaggagtatgacttatacgctccacccgaggggtagtctacagacggtctagtaccagataagactttgagtgaaacttgcttgcacaagacttgcaattcaaggcgtagtccattgttcaagttgtgagtaagtgtagcttggagttctaggtggatgttcaaccttaattggtctccatcgaaccgctggtatataaacagtacattggaaaggcaatctcagtgggattttgagatttggtgggggattgttggaattaataaatgggtcttagcccactcgaagattaattctttggaaaatcacaaaagcccacctcatgggatggcatgcatgtggagtttagtaccaccttgcttattctaggagagggggacctccttaaaagggaggatgccctcctagccacttgaagcatgtgtggtggagagaagaggggaaacacacgcgcgcgctcgctcgcctggcctggcctggcagggcagggcagggcagggcagggcagggcaggcggcgcgcgtgcacgacgtacgcgtcgaatggtccgaaaaattggctcctcacctttgcgcagatgcagcctccttttgcagttttgttttgctgcaaattcggattcgttttgttttggaaacgttccgaaaaatccggtgcgtgcaaacggcgtggagtccggataagattacgcgcggacttatccggttcggttacgcgcagtagagatcgtgcggcgccctgatcaagcgacccttctctatataaaccgacccgccgtcttcacgcaatatgtgcgaaaatcaatctagggtttgcctcctactctgtactgcgccgtcgctcgtagactactccatcccgctcgccggcgtgcaccagcgatcgggagagcaggtctccggaacctctgcctttgacgtcctgcaccgggagaaggcggcaataaggtttttgggaagcgcttcgcgcgactgctccctgttcgttcgcgacggctcgccttcctcttcgctcgcgtgtttcgtgccttcgtagacacctgcgaaaagtttcgaccaagcagccggtcttttcgtcacctcggtacgtgttcaatatgttgcgcatatttgatctgttcatgttattctgcgtagtttacatgtgtagatctaatgatgcgttcatgctagttttcatctgtaatgtcatgatttatttatggaataaattaaatcattatatgcccataatctcaacagaaatagctagctagcgctatagcagcttgcttatagcaagtgtggtga

SEQ ID NO: 2495 - DNA, 2000 bp, Oryza sativa
aaatgaatatgaacaattgaagcacataaattatgccaattgtttaaattctgtcctactaaaagctctcctaaaagaaatattaagtgaaacaagagacataacatttgcaattgaagcattcctcctacgaactatagcatataacgacggatacctatctttaaaagaataattccctacccatttatcttcccaaaatttgacttgtacaccattattcacaatccaggaacccatatttagaaacttactcttaactttcataagaccagaccaaaaatgggaatccccttgtttcttctcaacctgactttaggattgattataaagatatttcattttcaatagatcctgccacacaccctgctcgtttatgagcctaaacaaccatttactcaaaagatattgattttgaatttcaagattatgaactccaagaccaccctaatctttgggttgacaaatcatatcccatttagtaagcctatacttcttcttgtgttcatccccttgtcaaaagaaagtgatctataataatcaatttttttgaagacctccttttggaatctcaaaaaaagaaatcataaacatggctaatctagaaagcacaaaattaatcaacaccaacctccccccctccccatatgtttacctttccaactactaagtttcttttcaattctttcctcaactgttttccaatccttgttactaagttttctaaaatgcataggaataccaagatatctcatagggaaattcccaagcttacaaccaaaaatagtagaataaagctcttgacattcctttgcctgaccaaaacaaaataattcacttttatgaaaattaattttaaggccagataatttttcaaaagtcgatagtaacaattttagatttttggcttgtagtagatcatgttcaaaaaaataagagtatcatctgcatattgcaaaatagaaagaccatcatccaccaagtgtggaataatcccactaatttgaccatcatccttggccctcttaattaatatagtaagcatattaacaactatattaaaaagaattggagataatggatctccttgtctaagacccttataagtttgaaaattagaaccaacttgatcgtttacttttatacccacatgtcccccctagataaaagaggcaatccattgacaccattttgaccagaaacccttcatccttaaggtttgttgaacaaaagactactttaccttatcataagttttctcaaagtcaatcttaataattaccccattcttgtttttgcgatgcaattcatgaatagtttcatgtaaaataacaactcttttcatgatatttctcccagtaataaaagcagtttgagtactactaatgactttttgggcaaccccaattattctgatctttttcatatatatatatatgaactatatagtatatatacctattttttgtccaaaaatcttgggtatacatctgaatgccctttaattatagctgggctgcccctggtagaacctcgtgtggttgtatttattgcttaaaccagcgggagataattaaactccgagtaggagtcgtattttaatctcattttacttctgtaataatgtaatttaatatcgagaaataattagagtagtcgtttcgaaaaggagtccaattagaccatgggagaaggtttcgaaaatgagtccagttaaatctcttcacgacgtacgtacgtttgtacgtactcaaaactaacgcggaaataactgaaaatcaattgaatttggatcagattcggactccggatcaccgcatccgtcttgtttttgcgcggtttcacgcaataaaaacagaccacctctcgccgtgatccaagcaccaaacgctaacgttccaagagtcttggggtccaagacaagacaagacaagaaacagttgagctttgcaatccgcgagttctttcgtccgtgttcaaacttcaaagtagagagatca

SEQ ID NO: 2496 - DNA, 2000 bp, Oryza sativa
ataaacctatgaggttatgagaatagttttccagacaaatctacatatattacttttatgttttgaaatgaagtattttagaaattattaatagttaaagtttcgaaagtttgactaaaaagtcaaacatcatactgcaggatttatgttttgtgtttttttgtctaaccttaggtgtgctcatattcagtaagaaaaagaactttctaactctacccctattcagttatgtatatgcagcgctctttcagatttcgttcaaaaaagagagagaattttcagaatttttctctctaaaaggcataacttttcaatgctattaccaagcccattacaaagaagatcatgttacatcaccgcggtttaccacagagaagaggagaatgcagagatgcagggtcttgcagttctcgttcaaaaagaaacacaaacatttcagaaaaataaatttctgaaaggcataacttcccaatgctattaccaagcacattgcaaagaagatcatgttacatcaccacagtttttacagagagaggagaacacaaagatgcagggagaaagtgagaaagttcaggccttttaggggggagggtgagacaggtgatctgaaggaacaacaaatcataaaatgtttgcgtgcatggggtgctaatcaagcgtccataatgaaacagtccacaaatgacgcaggcaattaaccattaatttctcaaagcgatggaagagtgaaagaaagaaagaaaaaagatcgatttgttggatgatctgatgggaggagttgctgctgctgacctcggattagttcagtttctctctgatcaagtagtagtaaacacgaagactcttttgacaaaagcttggcccaattcagttccttcaccttgactccagtgcaggcagctgatgccaaactgctaggtgacaaacctgcatgaactcatccaatcattatatatttacgtgctacgtgcatgtgtatgatgcttgcttgtcacctaaccatcaatccatcaaacatgcagtcaaggtgtattattcagtatatccacttctgaattgtaacagtacatacaattagtgtgttttacatgactgaatgatgctttgtagtatgatgcagagaagtgctaacttccttacacttagatagttacatgtatgaaggacagaaatatacgattgcaaatcttcaaagcatttctaattgcaaatttgttggtgtacatgaacatgaaattctagttaatacctgaattttctgtaatgggacatacacaggccacagtgttgcagtcacggacagggtttaccttcccgttttggaagtgataaccgctccccactggtttgccgaaaaccagtaaaaaccaataacttttggtcaactccgtaaaaatactagctaaaatccatcggttttacaaaccgaccatcggcggttccacgaaaatcgatcggttttgttaaccctggtcatggaagcatcaagcatatttcccgtacatgtgtacacaatagagttgtgacatgtggacacaacagttaatctactactatactagtattctgaaactctgaatttgtggagctagtcaagtagacagatcatactattccccaatttctttcagtgggacacgaaccatgctatgctctctctgggctaacctagctagctcttggctgaaatttccaatcatcttgcgtgtgcaagacagcaaagtctcctctgcacaaagtaagcgatttagctgcaaaatcccaatagaaaatttgcaaaaaagtttgatgcactcctactacatatagagagacaaagaccacacgtaggggacaggttcttcaggtcccaggcttcaaccagtatatataaagcattaagcaggcagacatcttcttcaggccaccacttcaaagctaaggatcagaagcactgatcgatcagcatttttcagctagctgatcgatcagttgggcttcagttcagtgaagttcttgac

SEQ ID NO: 2497 - DNA, 2000 bp, Oryza sativa
  N_region (655)..(655): n = any nucleotide
  N_region (1835)..(1835): n = any nucleotide
tgctgcacacacggcctaggcacggcccaatacgactcgggccatgctggactggcccgaaggcatgatagcccatcgtgcttctccacagaataagtctatttttcatccctcaactatgtgggctatgttcatatggctagaaataaatctatttggtatttctctcctttttgggtgttgccttatatggttatttaagtctatttttcatccctgtactatttttcttcgatcgtgccatgccgggccaacccaccgtgccgagggtgcagcccaagcatggctcggctgtgaccgggccaaaatgacgtgccttgggcgggccgtgggcctcgggccatatggccatctatactaataatgacttaaccgtaacctgatctttatcctcatctttctctccagggttatcttcctttcacaacaacacggacacgcggtgatggaactccttgtgcgtggctcgctttaggctgtgttcggaactcaagttcccaacccctctcactcgtttttcgctcgcacgcttttcaaactgctaaacgatacgttttttataaaaagtttctatacaaaagttgcttagaaaattcaaattaatccatttttttaagaaatagctaatacttaattaatcacgtgctaatggacntttggtttttcgtgcatgggagatgggttcccaaccccctccaacgaacacagccttactcattccagcggcatggaaaaagaaggcaaagaagaagatggttctaacgtgtgggtcttgcttgtcattgagggaatagtgaggctatgagcttgagattggtccttctggaccagccttgctgtagcagaaaaagaagagaaatgagaaacaacagaatttacatatatattacgtactttttttattatattagtataatcacataaataaaaaatattcttaattgccaaaaaggtacaaaaattttcagaactcagaaaaacgcagccaaacctcacgaccaaatgtaatcttacatgaatacaaaggatggacatagctatcattatctgctctctacctcactttccgtgaggcaaatacgcatctaatggcatttaattcagctaagcatcatgcttacattaataaatgatgacactaaattccccttggactcccactctttggatgaactagtaaaagctaccaccggtgtccaggtgacaccgacgactttcggcaaaagttatgcttaaaatgcttattcatatattataacattatattctaaatataattagcatactataatatcgatagacgatacccaaagatgattcgccaatgtatctagtacaacatatcttgagtatttttttataaaaaaataatgttacggcaccagtgcaccactgataaatctgtttgattattgaagaggttaattaaactaatatttaagtgatcatcatatgaatatccggataaaagaaagtgaaaatgaaatgaggtaattttttaatagaaaatggcagtactccgtccgtaaaaaaaaaatcaacgtaatattagatgagatattttctaatacaacaaataacacatcaaatctattacttaggttgattttttttttatggagtacagcctatctggagtagcaggctgaacggcatcgtaaattgaaagcctcgtcagagcaggctggtcctcgaacccttccgaaccatccagaagaggagcctcccgacggctaggatgcatccacatccactcatcaacggctaagacgcgccctcctctctccgaatttttaccaacttttactgctcgcatcaaatggagcgcgggccangcgggtaaaaaaggaagcgaagaaatccggtggtatttatattttcgagacccaaaaagaaaaccacgaattcccaataaagaaataggcaaaattccccatctcctcgtctcctcccaactccaaaccctagctcccaccccctctcgccgtcgccgtcgcgtc

SEQ ID NO: 2498 - DNA, 2000 bp, Oryza sativa
  N_region (1351)..(1351): n = any nucleotide
  N_region (1366)..(1366): n = any nucleotide
  N_region (1378)..(1378): n = any nucleotide
gctgaagccccgctaggatcgcctttttccgctgctgctgcttttgtttcggtgtgaggactaagtgcctcttctgtaagtattttacgctttatttacgtttggaactgtatattacttgtcgttttgtgtaccctggctggtcctggacagggatttaatacacaaaatagtctggaaatttgggctaaatttctgggcgtgacaatcagcaccaagacagatggttaaccccagattgttgaccagagaacaaccacaacatgctgggcaaaatgtcaatcggctgactcaggagcaagttgctgcaatgttcttgccaaatccgacaatagccgacccaacacagccgttgccgactcagcaagcacagccgaggtagcagacagttcatccgactcagcagcaaaacttacaacatgcgtcagcgagattgagaacacctgacaatcggccaatgcagcatactgtgaaccaagttattcctgaacacttggtccatcatgtacaggccgatcaatcagttgtgcctcagattatccctgaacatttggtacgtaatattcaaccgaacttctagaactatcaaggaagaaatttgaattatcaatatcagcctctgtcacctcatgtttagtatcagcaggcaggatcgcctcaacctcagtttgctcctcagttcaatcagtttgagctaatgcagcaacaaacacaaggagtacctcagcaaacatcatgggctgatatgattgccgatgtaatgagggagcaggttgggttcaaaccaaaagatactggaaatttgtatcggcatccttatcgaatatgcggcatattttttggaaattcggtaagtggtctcctagtagggaaggtccttatcgaatatgcggcattgttcgagggaacgcatattttttggagacacttcaaggggagccttttcagcgagcaatcaacgggaaatacttgaagaaatacttcccgagcgtttggcaagacgcttaggaggtgctatggccagtaattggattatcgccctaagaccaaaaacatgttctatgcttttggattcacgttgttcataaaaaaggtagggggggcatgtgtttacacccaaatttggcacctagagattaaatagaaaaaattgccaaaatttggaagtctgccggtttcctccgagtagggccagtctgaccgccgtgcgttgggcggtcagaccgccggtttagggctggtcagaccggcggcatgtggccggtctgaccggcaggtccgagtccgactgtgtttcgtcgggtctcgaggtttccttgctcgggaaggcatgtttcgggtttcatttganttctaccccgagttngacgtggaaganggcctgtagagggcaagaccaacccctatataagggacatggccggttcaattgtaactaatcaatctacaatcaatcaatcgaatcgtttttcatattgcttttaattttctcttagtttatccatctttgtcaatttgcgctgtaaatcgtccgccgccgctgcgagagtgcgacacccctttataggtttgtcctgaaaaccttccgttttgcccacgagacgggtagttatctagaaatcggctccgctagccgatttagttatcaaaacccatcttggtctagcttttggctagatcgaggtggttggcgactccatatcaccgcaagtcgtttagttgctgcgatcgtgcttgtcgactttttacgaaaagttgccaacaaacccctctggatcagagcaaatccactcaactgcacgcgtgtgcatgtttcagaaacggattcatcgcaacagttggtttacgatttcgtaataagttgaaattagactcggattagatcggtttcatgcaattaattaatatatactaataaaatagatgatcgacaaagcatattactaattgatttctccgtgcaaaccggtcgctagctcgctggacagttgtcgtcatca

SEQ ID NO: 2499 - DNA, 2000 bp, Oryza sativa
agttaatactacgtaaaaaaaatcaatttccgtataaaagaaatttgtaataaacatattgtttagtaatttgaaaaacgtgttaacaaaaatcaaaataaaatatactccctccgttccaaaatatagtaatattgtagtaaaacgaatctagatatacccctgtccagatttgttgaactagtatgtgtcccatcaagtacaagagtgctatattttaagacggagggagtacatcagggatctcggtatcgaattttctcattattcgggctataataggcctggtttagttcccaattttttcttcaaatttccaactttttcatcacatcacaattttcctacacacgcaaacttccaacttttccgtcacattgttccaatctatgttaccctgatacggggatacggatacacgatacggggatacatggatacgtcatttttcataaaacacggatacatgaatacatctatatatgtatatataaaacagaaaatacaaaaatgtatagattctagcaaggaaataaagcccaaatgatctcaagttggtgaagctatgaagcccaaataatgaacaggcagactgctaacttgccaataactgagagcaaaccaaaacatgcatgtttttacaactaaaagagtaatgattagacaaatcggaggtgctagctgcattagtacttccaataacaaaatttattagatctaaatagagtacttgtggtaaaaataatacataaaaaatatataaaattacttgtggtaatttaataaaaaatttattaaattacttaaattttttgaataagacgaacggacaaacatttttaaaaaagctaacggcgtcaaacattttaggatggaggtagtagcttcgttcagaaaaaaaggaaaagaaaatggaaaaagttaatcccagaaccaatcatggagaggtagaaatgggccaacgaactttcctcaccgaggaacgaaggaagctggtgtctagcgacggtggcgttgtgccctgtgatggtgtccgcgttgtgtccagtagagatggtggaacgccttgcagaggtggcgctacagccggcgtccaggcgtatggcgacggcggcgctacagggcgacgacggcagcgctacgttcgatgttcgcagcgctgacgctgggagccgcgaatcgagccccagccgagaaccacggaggcaatacgcagcgcagatgattaccaggatgaaacaatgaatcgattgtgtagttctttgatcgcatctgggagttatcagaccgtatcagggacgtatcctgctttttttctttttcggaaaatcgcgaaattggctgatacgtacggatccgatacgtatccgtatcctattacgtatccgatatggatacgtggttttttaccgtatctaaatatcatagattttaatttcaatcaaattttcaattttaacgtgaactaaacacaccgacatgcagcacttcaaacttcctagcggtgaacattcaatacaccgcaacaaaaaaacggcagcttcacactttcacatccagcgagacctgctatagcgagcgagtgaacaactgaaaagctgacagcccaccaccactccaccagtggaccagcaaccaaatcctcacatcctgaggggcttacccgcataaatcccctcctctgtacgcgtgcgctccgttccgtttcgccatttccaacccgtcgtctcgccttcgcctcgcctcgtctgctccaccatccaccaccaccacgctacgctttcctcctccccctccactccagattttgctcccctcgagaccaccaccaaaagcagcagcaccaccgaaagaggaagcaaagcaaagcaaagcaggcgaggtttcagtctcccaggaatccccttccaagaactcccacccgattcgaagcgctcgaggaggttctttgctcaatcagagtggatcttctgctgggaggattgggaagagcgggggag

SEQ ID NO: 2500 - DNA, 2000 bp, Oryza sativa
  N_region (473)..(473): n = any nucleotide
  N_region (499)..(499): n = any nucleotide
  N_region (569)..(570): n = any nucleotide
  N_region (580)..(580): n = any nucleotide
  N_region (584)..(584): n = any nucleotide
  N_region (592)..(592): n = any nucleotide
  N_region (595)..(595): n = any nucleotide
  N_region (613)..(613): n = any nucleotide
  N_region (616)..(616): n = any nucleotide
  N_region (620)..(620): n = any nucleotide
  N_region (622)..(622): n = any nucleotide
  N_region (828)..(828): n = any nucleotide
cttcaacaccctttaaaggatggcgcatgtaacatgctcccgagtaataaatcttccgggtgatatagaccaagtgtagctcataagaatagcttctgatctgagtgattatctcttatggggtactccaaaatagatataaaaattgaatcccgactggcgcaagtagtcggttgatagcccttgtggggaataatgaatagtccagccgttaagcatatgaaatcgactcgtgaccataaattcatgttgaatgtatccggaacaagtccaaattgaagatatgatccttgtgattgagttgataagcccctaagcatatatggcttgtccttctgtcatagtcaaaattgtccattggcaatagctgatgcagtcgacatgaaggcaagatgatgaacatggggatgatatcgcccgtcagaggtgacaaaaatgttggtggtggtaaaaacggtgacaccaatcaaagntgatgaagtcgcatagccatggaggngaagaaaccagtcggcagcagttaggtcagctagcagtgaagatgaagacgcccaacaacaacgacagannagtcggtggngacnaaagcaanccnacgatgaagacgtagacncgnatcnanggtgatggcgaaatccaccaattatgaagatgaagaaaatagtcggcgatggcaaacgcatccgacggtaatgatgattagcggcaacagagatagccggctatgatgacgaagttgcccatcaacggcagcagagtaggctatgttgaagagacttgacaggatgttgatgaagataaccatgtcgttgatccagtcaatagtantgtagcagtccatgataacgatgagatcctctatcggcagttgcatagtaggccaaccgtgaagacgaaataacaagtcggcgatgaaagtcggtgatgacaaaagtaaccgacggcgaggacgtagtcaccccttagcaacggcggagacgtcagggccgatgaagtaaacgtgctggtgatgatgtcagtgacaacaatccatcaaaccattgagaagatatcgaagcttgagaagtttccttgatgtgagcgtgtgcataaagaaaactgatgcaatgcttcttgatttacgaagatgactgtagaacttagtgttacagctgttgtagatgcttcacttggaggaaagtagatgttgttgtccaactcgtctaaaccgagctgattggttgataactccaaactcccgaacatgtagattaaatcttgaacttgatacttgagaattttggagtagattatggcagcgctgagaagccaaaattgtcggtgaaataattgaagttgctgaagtagaacatctgctccgaagcaaagatgaagacaatgactcctggataaattgattgcttcagcttgtcgaattttgagagtcttgtatttgtgtagctcccgactctttggttaattgggaaacaaactgaacatagagtcgagaactgtagcttcttgtcatcgagtagtcatcacttgagtgaagatacatgttgaagatgtccgagtagaattcttgaaaattggaaaaccacttgttgtaataatataacacgacatcatagttgataatgcatgccgagatgtcgaagctcctatagacgtcatggctggtgaaatagcaaaacttgcgaagtagcggcaattgagtttgccgatgccgaagataataaagatgaagtcgctccaccatggtgacaaagttgcaaagccgtgataaagtgaacacgagtccagtggcaacagaagaaaaccggtggcaaagacgtgtagttgtgaagatagatactccagtcggcggcggcataaccagtcggcgacggaagacgatgatgtccattagtagtggtagcggtataaaccagacatagaggcgagggcactagtcagcaacagacgagacaactagtgatgaagacgataaggccaatcaacactggcagaatcatgcagcc

SEQ ID NO: 2501 - DNA, 2000 bp, Oryza sativa
  N_region (1441)..(1441): n = any nucleotide
  N_region (1466)..(1466): n = any nucleotide
  N_region (1471)..(1471): n = any nucleotide
  N_region (1569)..(1569): n = any nucleotide
  N_region (1581)..(1581): n = any nucleotide
  N_region (1589)..(1589): n = any nucleotide
  N_region (1636)..(1636): n = any nucleotide
  N_region (1650)..(1650): n = any nucleotide
  N_region (1674)..(1674): n = any nucleotide
  N_region (1695)..(1695): n = any nucleotide
aagctatcaaatttaggctgagaaggagaaagaaaaagattgagtagatacgtaaaatgatataagctattaacacatgattaattaagcattaattattttaaacttgaaatatatattaatatgttttttaaatcaacttttaagtaaaaaaattataaaaaaatgtattgtttacaatgtcgagaagtgttcgcgtagaaacgaggagattattttcttagtgtggttcgaacgaacaaactttttggccacgttcgttctcagtagattggaagaagattcaactcgttacgtaattaagcatgtgatttccggtattgttattggatgatgatgtaattattatgtgatattattgataaaacttgcaaaaaaaatgacatgtgatttctagcatacattcttcatatattcttcctggtacccactacaaccaataacttctataaagcaacctccaggttaagccacgtcatcatcaccttacagccgttggatcaagtgctatctctgttcgattcatgaaccagacagaaactcaaccagtccaaagtccacccaggcacacgatgaggactactggataaaccatatttgccgggtcaaccaaaatccacaatagtcatggttcattaatgagagagctttttttatctcttgtgcaacattcgtattactattatctacttaatcgtggggataaattaaatggttttttttgtttaaatagacttaacaaatattccctctgtcttgaaataagtttatttttaatctgtcctacacatgtatataccaatataaaacaagaagaaaaataaaaatactcttacattatcaaatctcaatgtgattattccttacatttttctcccactttcgtaaactccaatataatgatgactcaaaagtaaatttattttggaacaaatgaaagagggtaaaagtaaactaactttatataagttaggacaaagtgagtagtattggcttacaagaagtggtgtgagctatacagtaaaacatttttttttaaaaaaaaactttgctgttataatctgttgaaatagctactaagaacaaattgttttagattgtagctagtgaattatgtgcggactatttgtgtcatgtttccgaaagtacaatttctaactaaacaaactttatacatcagttaagataagatgttcaacaaattttagcaaaagtagcctttaatttatccctataaaaaaattgagcataatacatccaattatctataaagaatactatatccgtcttgtgttcttaaaaaaaaaactccaaattgtgatctggataaatacatggcaaatccaaagagcccaaaattttgaaaaacatttatgccatttaaggtagtttttgttagaaggacaaaggaagaaaaaaatctctcactttctactcgcanacgcttctcaaacaattaaacgggnttctnttgcaaaaaaaaagtaagaaagatgctttaaaaatcatattaattagtattacaattttaaaataattaatacccaattaatcatacgctaatatctnaccttattaagnaggttctnaatcttccaattttccctcctctaaaacacatcctagagtgacttangagtatctaaactngcttatatcagcctattttaaccntaacttatatatagagccaantcacatagttagggcatccacaatgtggtgtaaaagtagtccataagcaatagaatatttcattcagccacctattaccattgtgcaattagtccatatagaaaaaataacaaaaggtatccatatgcatatggactacccatatggaataaattatattatctatccctactcctctctcttctcctaatgataccttgtatccatatacattatggagattgtcataggtaaaaactatttatatgggtcccatctatatggatcactttgccatatacattggtgatgccctttagagctca

SEQ ID NO: 2502 - DNA, 2000 bp, Oryza sativa
  N_region (1799)..(1799): n = any nucleotide
ttcaagagctttgccattgatggaaggagactgtttttaactccatcacattttatgagaaactcatccagaacatccctacataagagtcaattcgcataatggattggtactggcgaaagtgttttattgacataatttgaactataaattttgggacagagggagtactaaatttttgtgacacgttgcaaccataaactaggccttataagttgtttaccatcgccgtaaacaaatcgtaaaacatctctgacactgtgtttgtgatattacctgaaagattcaggatgcttgggccaaacggaaagatttctctcgtctgctggatctactttcagatacaatcgatccaaccaatccaggatttgggtatcagatttcacctggtcatttccatacccttctagctggaaatgcttgccgtcaatcaagttggtgtatttttgcttctctccaagatgctgttgaaaaaactctcttgacacattcatcacgttatccatcagagcatcttctatgccatggttagttacctgagaacacaattgcagatatagaatataagccacgacatcatgttatttaaagaagccaaggcagttcaacaaaaatctatcaaaggtacactgactacttattaccatgaaaaggccccaagactccatcgcctgccggagtttcaccgcctcattggcatcaccatctggttgggacaggcgaccaaggtcaacaatggggaatgatgcagtggctgcaatggtcggttggtcttcttgttgcacaatgtactgtcttggcacagatttgcttctcatgccggcaagctcctgcacaagtagtgttgatctcacatcctccatgctcccttccatacggatgtagctcaggtactgtctcaggacttaggttgttcaatgctgttgagttgatacggagaagttactatatatgagtctgagaccatgtacgaaaaaagagtaaaaatactgccattgttgcacaagtggtcatgtaatgaaaacaatttatacctggtataaaaaaatgctgtaagttgcaaccaaattgctgaattaaccaaaaaaaaaaggcaatttgacatttatggagcagagttaggaactgcccaatagtggctgacaattaagatttaaattcaagctcaacatctgattccctaacttcaatataagcacctagagcgcagctgtgtactagcctggagttggcaggctgtttgttctatccttaggtagttgggctaatttctggtggcacagcaaccttgtttgtttatttattacttgtaacctctccttggtcttaatttgggcggcatacttttgccggacaatgaaaaatataagcacctagaagaataaagattcaatataccatgtgaatcagaaaaccactccatgtgttacacaacatacaacatgccaacttcaacttgagaggttgagcaaccgatgatgcacagcacaggcccttaaatttaagcttgtgataacgtcctttccagaataacttaacatcttgaaggagcatattaactgaacctggcaatatcgcttcttttttatttggaagtggcgtatttcacatcaaattctatgacatcttgtttcttttaaatttgaaagtggtgtacttcatgacaatattgtttcttttttatttgaaagtggtatagttcatggcaatcttgttcatcttctactactttgaaagtggcatgcttcatatcaaattctatgcaaggaaccctaataccgtgtgctgttttttttttnaaaaaaaacgaacgattcttgttcctacgggatttttcttcctgttttttggattgcacaaaatcaatcctgaaaacattgcacattcgcacagtactaatcccaaataaatttcccccaaacttttcaaagaacaaaaaatttaaccgaagctgctttggcacaaacctatccgccccgattccctatctgcgtaagaag

SEQ ID NO: 2503 - DNA, 1698 bp, Oryza sativa
  N_region (3)..(3): n = any nucleotide
  N_region (8)..(8): n = any nucleotide
  N_region (11)..(12): n = any nucleotide
  N_region (19)..(19): n = any nucleotide
  N_region (27)..(27): n = any nucleotide
  N_region (30)..(30): n = any nucleotide
  N_region (34)..(34): n = any nucleotide
  N_region (39)..(39): n = any nucleotide
  N_region (50)..(50): n = any nucleotide
  N_region (59)..(59): n = any nucleotide
  N_region (91)..(91): n = any nucleotide
  N_region (101)..(101): n = any nucleotide
  N_region (103)..(103): n = any nucleotide
  N_region (105)..(105): n = any nucleotide
  N_region (111)..(111): n = any nucleotide
  N_region (142)..(143): n = any nucleotide
  N_region (155)..(155): n = any nucleotide
  N_region (162)..(162): n = any nucleotide
  N_region (169)..(169): n = any nucleotide
  N_region (171)..(172): n = any nucleotide
  N_region (175)..(175): n = any nucleotide
  N_region (177)..(178): n = any nucleotide
  N_region (180)..(180): n = any nucleotide
  N_region (182)..(182): n = any nucleotide
  N_region (184)..(186): n = any nucleotide
  N_region (188)..(189): n = any nucleotide
  N_region (195)..(196): n = any nucleotide
  N_region (205)..(210): n = any nucleotide
  N_region (212)..(212): n = any nucleotide
  N_region (216)..(216): n = any nucleotide
  N_region (228)..(228): n = any nucleotide
  N_region (235)..(236): n = any nucleotide
  N_region (239)..(239): n = any nucleotide
  N_region (250)..(250): n = any nucleotide
  N_region (253)..(254): n = any nucleotide
  N_region (262)..(262): n = any nucleotide
  N_region (266)..(266): n = any nucleotide
  N_region (282)..(282): n = any nucleotide
  N_region (287)..(287): n = any nucleotide
  N_region (294)..(294): n = any nucleotide
  N_region (297)..(297): n = any nucleotide
  N_region (309)..(309): n = any nucleotide
  N_region (323)..(323): n = any nucleotide
  N_region (326)..(326): n = any nucleotide
  N_region (330)..(330): n = any nucleotide
  N_region (336)..(339): n = any nucleotide
  N_region (370)..(370): n = any nucleotide
  N_region (401)..(401): n = any nucleotide
tangatanagnnaaagatnataataantantacnctaancagcagataantttataatngaggagcaagatcatacgcagcagtatatgtntattctctangngnagaggngagagaatatatttttatatatggggggggnngaaacaccctcncaggggnggagagncnnacnanngngngnnnannaacggnnaaatatttnnnnnntngtgnaacaagagaaantttgtannganaaagagaacgnacnncctaaaanttgnaaacccccgaaaaggnggggntttttcncanaaccccggaaanttattttcaaaccnttnttgntaaggnnnncccaaaggcaatttcccagcatatcactcgnacccaagtactccagagaacaatgtcaaaanttagctgttttgctgtttagcttagtgccaggaggacgccaaaagtctttccatcagctccatttgtttcgccgcatatatggggcatagttcttgacagacagtgattggcacgttgttcatcagtaggtacataccaacagaaaccttccaaaccatgccaatacattcttcgtatatattcctggctattcggtaggtcagttctgaatgagtgagtgataatggcatctgtttctgccataaaataaacgaaatctgcgacgcaaatgcaacgttgtgatgatcacttaaattagtaccacccagatgcacatggtgttttaccacgactgacctcttgacctctgagatttattgattagattataacgtaatcgttgttaactgcaaaagctgcacttgccactgttcctttcttgactttcagagttcacagcatagttcagaattcagaaacgaagtacaagcggttaattaagtactcactaattaacaatggagctgtacgcactagtagtaattcttttcgagcaatgaaagctgtctgatgggcgctggctatcaatgtatgtcactgtgttgtcatttggcagccaatgtgagttgtaaagaggtagtatagcgtcttttcgagagcaaaacgccgtggcacgatcggtgctacaggccaagtcaggcggttcgtcatgatgaatccaactcaccaaaaataattctggtgcagttttatttcagtcctctgctcttgcatccaaagagctagacttccctgaacaaattggcatcgattttaattaccaaacggtaacggaatgaatgctgtgactaaattagctggactgctggagtagactctgacctgcatagaactaactactataattagttcgagattccataaaaatcaaagaagctaatcagttcgtcctctcggcgcagcctgcacataattgaactgctaattttattctagtcggaagcacatttaggtagacctgccttccatagtcttgtgtggcgcaatcattatcgaacatggctcctgtccccaacaccatcatctaaaaaatggcttttttactctcaacgtcgagtccatatatacggccttgagctagcgcggtggtggtagactggtagtggcagtagtgcaaatccacagctcagcattttgcctcccatggcgtcctccaccgccattgcccttgctctcctcggcattgtgcttcttcttcccggcaatgccttcgtcgtggtcgcctaaccacgcggcggcggcggcggggactacagg

SEQ ID NO: 2504 - DNA, 2000 bp, Oryza sativa
  N_region (1388)..(1388): n = any nucleotide
cacgacaccgaggcggagaatatttgatgttttaagttcgattcgaagttagtagcttgtagactttttgttccactgcttttgttgtggcgggtaaacgggcacgcccgcgggcataaggcgcccgcgggcaatgggcatgggcaaccatccttacccgtcatgtagtaatgggtatacccacgggcacaaataatctcacgggcatgggtatggataggcactacccgtgcccgtcacgcccgattgccatccctaccacccatacacaattgtctttctttcaacttgccgaaaatactttatgcaatctattttgttcagcatttttctgttttggcatcacaaccgaatactcagtacagtccagaaagatcaccggtataattatacagtatacatggacaagtaacgatcaatctgatttttgataaatcatcaatcaataacttccctaactccaccatttttcttattttcttgaattttttttgggctatcttatagttttacacctcgctgctaatccctcctgctactcgcgtgcgcggggccaaccgcccataagcggtgcgccggttaatcaaaatttgggcgctgtggtggtgtgcatgcgtggcggttagggtggaggggctgctcccggtgagagggctgggaacttttgtaaaaaactcctcgtgttttcacggaatatcgcatacgtcctcggaccgcctgacatcccgttgtatttctttcatataaccgctcgtctttcaggaaaatacaatgcgaagaagagaaaattccgcttttaggggtagatatgtaaatataaaaactatagggggttttctgcaaaacgtcctacactaaccccccaattccgaaaccctctccccattctctcccttccctctcctctcctcccctcccctcccctcccacctctcctctctcgacgcgggttccggccggagctgccgccggagggcggcggcggctaccggcggtggcagaggtggctcaaggcggtggctgcgcggagggtggagccagcggcgggcttccctccctcctcccagatccgatggaggcggaggtagaaggcggaggcggcgcgaagggtggacgccgcggcggtgggtccgctgggaggggtgagggcggtggcgtcggcggccctcccctccggatctggcgaggcggctacgtccgcggctggattcggcacctccgccgtcgtcgctgtggtgcgacctcccccgttcccgaccccctatattggataaggaggggaggagggcgaaggggagggtgaaggcagttttggagggcggctacgccgggaggggggatggcggtggcggcggtggccagatgcggacctccgacgcgcgcggcgnacggcgcgaagacggcgaacggtgagtcaccttcccgcctctccctctccctagcctctgcgtctccctcttcctctcctcccttcccctcccacctctcctctcttggtggagtggtggcgtggtgcggggactgccgttgccgacgaggccagctcggagtggcggaccatggcgcgagggagtgtccaacacgcaacccctcccatctgctgcctccgtgcctcctcctcctgtgctgacggctccggtggaggccctcttcgatcgccaccgccaccgtgccctgctacccccttccgcttccctttctccacccgtgtccctctcctccgagtagcgttaccggccgcagcccctctcctccgagcagcgttaccggccgcagcccctcctcctgagctggctgtcggtgccatgccgcgccgctcctcggatgagtcgatgatgccgcgacactgagccttcgtcggagagcatctgatttggccctttgtgcccaggtatgctcagcccaagtgttgtcgttgacgccggattgcacgtctccttcctctgcttgtcgactatcagcaggtcggtttggccactgcaggtggagccgtgaaggta

SEQ ID NO: 2505 - DNA, 2000 bp, Oryza sativa
  N_region (1)..(1): n = any nucleotide
  N_region (14)..(14): n = any nucleotide
  N_region (29)..(29): n = any nucleotide
  N_region (162)..(162): n = any nucleotide
  N_region (174)..(175): n = any nucleotide
  N_region (177)..(177): n = any nucleotide
  N_region (199)..(199): n = any nucleotide
  N_region (202)..(202): n = any nucleotide
  N_region (206)..(206): n = any nucleotide
  N_region (210)..(210): n = any nucleotide
  N_region (233)..(233): n = any nucleotide
  N_region (236)..(236): n = any nucleotide
  N_region (324)..(324): n = any nucleotide
  N_region (1652)..(1652): n = any nucleotide
ngccggcccaaccngcggcgaccgcgtcntcggtcgataaggaggaggtcgaagagcaccttccgcctccgcctccaccactggttgcccgggagaactccacctcccgctgccggccgcccgccgcttgccgccgccggcagcgcccgagcaagctctgcntgtcccgtcctnncncgccgccgccgtgctggtgagnagngagngagngagggagagattgggatatagtnganagggaagcagatcctttgacttaactgcacatgcagttgagtcactgacatgtaggtcccactttgctatggcccacatgtcagtgantcaactgcacaacagttaaatcagaggatccttttccagtagagagaggggtggagaactggcatgtggggtctactgatttttttttaaaaaaaagctgactgcactgccacgtggatccaaaaccactccggattgagtcgaggggttatttgtctggtttcaatagttgaggctactagtaccttttatcctgaagatgtggggcatatgtgcattcgtgtctacgaaatctggttccatcaccgtcaatgcatcttgtcaccctgaggtgtgcactatagctatccatgggaagaaccttgatgtagaaattggcaagcgtcaattcagagtgaccatttatgaatccatgtcttcctccgttctaaaatatagctatttctagcacattaccttattccaaaataaagctatttcttcatctacctagcttctcctctcaccaatcacaaccattcttcttcactactttctcttttcaaccatcacatacttcctccaatcattctcacatactttttaataccagtgacaacctaaaaaatagttacattatagaaaggaggaagtacatggtgtgcatgcttgcatgtgctattggtcttaggagttcaattagggcccatgtacagatgcacgtggcaatactgcagtagcaacttgcggcatgtgtatttgccttaggcagtgttatttcccttcaaacttctaaaaattctgtcacaacaaatatttagatacatgcatggagcattaaatgtggacgaaaaaaccaattaaatagttagcatataaattgcgagacgaatcttttgaggctaattacgctatgatttgaccaatgtgatgctacactaaacatttgctaatgacggattaattaggcttaataaattcgtctcgcagtttacaggcggaatctcactggtggagaaaccatctttggtcggtcggccgaaatccacaatagttccagttctattaaaaaccgggactaaagatgatatttagtcccggttctaaagatgtcaaacgttgtcaggctccccgagatctttagtcccgtttgtgttaccaaccgatctttagtcccggtttgtaacaccaaccgggactaaaaatcccccctttatatatgtcttattcctcctctagtctgagcaagcttcaaaatttctcaaagaaagaggggaggtcatgccaaaatttcttgtgaaatttttttagtgattaaatacaaatcggaggtgtctaaaatgttagtaacttcatcctccaaatgttttttgttggttatattacttttgggagctatgtttcacacnatttgtctccaaaactttgttgtaagttgacgagagagaaaatttgtgtggggaagaagaatatatagaaattttgtttgtttacttaaaaaagttttattcttatattaaaatatgatgaaaattaatcttaaaaaatagaaaacaaactaaattgaaaattaagagaagtacaacattaatattagtttagaacttcaaaaattgttaataagaattgtttgttggattattttataattattaattgtatgagtaatgatatgtcattattgtatgcttgtcgaaagagtttttaattactttatcattattgtttgactgtcattattgtttgaaaatttattt

SEQ ID NO: 2506 - DNA, 2000 bp, Oryza sativa
tcacatatgtgcaatgttaaaccatgtaagcaagaaaatttatgtataagacacatggaaattttaaatgttgcatgagaggctgataagatgggtccaggctcacatatcagtgaggcattaaaaggcatatacaaaatagaaccaaaatgctgctggttacaatttacaaagcatagaatcagaatataattgcacacatgagtatatgacaaaaacagaatagcaggaaaccccaaggtagaagagtgaagtttatgatttgcctcagagtacatgcaatccactcgttgacctaaagttgcccatggctcccttggattttagcaattagtaaattatcatattcaacttggtttgtaggaataaagcgccaaattaagcaactcaagcctccacacaagagtcgggatttaaattgaaatgttttttcatattaaaaaattataggtctttgccattaaacacattagatgtctacagtcaatcattctcaacaatacataaaataggattttcagtcaccatttaataattcgtacaggaaaaggactctttgtcaacagaaacacaagatgacattcatgtggtatacctcttcaggggtccaatttcctttggtggaacgccgtgtcggaccggtggtcctcctaaatttgcatggacaaagaaacaaaacaaaatttagtacaatatacattacgatagtcaaaagagcttttagccttttacccattgagaggtcgtcgcctttttggttcattgctgatttctccttcttgaggagccgacggaggtccagaaggctctccatccttatctggagcctttccgttatcgcttgtcatcatgagtgaagacaatcaatcctcactttgcagtagaaacctccaagggatataaaaatcattatactgtcaagcctcagtgaggccttcagggagttgctccaagggagaagcaatcataagctgcaaaagaattggacgaatgaagatattgtcacaagatgtaacaatagaagcattcagggatgcatagaggacaggacattgactaccctcataagaacatgaattctcatttcaaaggagttggggtagaattcatgtcattttcgttttattatagagatggattgtataatattttatctaaaaaaagagttggggtgataatgtgtctacaccccctcgttgtacatctttatgaaaactaaaaaatgcatcattcaccctgatgtatatgtagatggttgattgatatgcagtcaagtggataacttgcaaatggggaaaaactcctctttgcttccgtaaactattctgcaaatctacttattagctcattctaccctccgaagtccgaactactgaagtagctaatttcacatttagggggagtaaaccttaagctttctgcaatatataaaatagttttagggtagtaaaatgttttttctccttttagatttgaggattgtattttctgcaaaatgtgaattatctcctggtttatccataatctaaaaatatggacctcctctgtctgggtttcaggtttatttggtgctaaaagcgtctgactttcgctgtggaatttaccagacaaaaaatatataacacagatcttagtgatacgaattatctgggctcgtaagtcggtttatatcgtatagcatagcacctcctccatattcaaactcaaatcagcacaacacttcaacccaatcaccaacgaagcaacatcccaaagcaacaattaatcaagcagagagatggagagatatataccagatcaccaatcgccttgctgacgggcgagcctggacgcgagacgcctctgccgtgccgccgcctcgtccgccgggagcgcgtcccttccgcggcttctgctgctgccgctgcctgcctggatctgggtggcccgaaatccttaccagacgccctcaactcaaccaccgcggcggctgctgctgcggacgccgcccggcccgagcg

SEQ ID NO: 2507 - DNA, 2000 bp, Oryza sativa
  N_region (1969)..(1969): n = any nucleotide
  N_region (1977)..(1977): n = any nucleotide
atgtgtcgacgaaaaagctcaagcaagttcaccagcaccacacggagtagaaaattttcacgttttctaagcacatgcttcccgaagtatgtgtgtttttataaaagaatgatctataagaaagttgttttaaaaaatcatattaatctattttttaagtttaaaataattaatacttaatgatgcgataacgtctcatctcgtttcgtgtattttcactatcttcttctttttcacaagcatacgcctcatgtgtactgcgctaaaggaggtgggtcaaaacagttcaccaatttttccacggatcaagccaacctggatatatacatagtattcccttttgggtctaactcaacccatggagtttttcaaccaaacacttacaaaaatagaatggcccagtccaactcaccaaaatcctccaacaaaaagcatgctaggttagatggacaaaagggtgctgcagtgacaagtatgactggcagagtgcttctaggcactgttcaagtgcaactacacattataattatagactctccatatactctagggagtagctatatttatgacgccatatttttttataaaaaaatagccggcatgtatttatattataaatttctaatatgtaattttagtgtatttacaatgtaagtcccaaaattatatatgtaagttctaaaattatatatgtaaatcctaaaattatattaattacatatgtaagtggtgtgtaagtgatatgtaactacaatagaatcacactataattacatatgtaactgcagtttaaaaacagacattgacgtgagctctctatcttccttggcttctccttttctggtccttttgcctaccatctgtgcatggcatcttggattttactccgtaatgattagatattagtatgtcctggatagtgtatatcgatgtatagtatcaacaatagtagtaatgatggtgttagcagttttggacatgcacaaatcgctgaactaattgtacggtaaaagatcgactgtaaactaattgctataaatatgacgccatatttatagcaattccgtaactctatacgttcttttttatggttttatgtgaaattcatgcaaacaagtgaacaactaaacactgtactaagtcctaactaccgacaacacaatcaagtacagtagatatctatttccatatatacatttcctattgtatgccctaaatgcatatccaatcagccatcgccgtggtccgtggtaccaaacccaacacataaacagcgacataatgcagtcccattcacgcgacaggttttttttaaaaaagaaaacacacacacacactctctctctctgtgaagtcctcaaaatcattatagaatatttattttggttaggcacggaaatgtatatattgagttaaattgtaagtaacttgcatataaatttattaagaaaaggagagaaaatacttcacctacatcattaatcattaatatattaaacccctagagctaccctttttctccctttttggattttttttggctcctcagtagttgtcctatgtaatttgcaggtgcagaagctcctcgattgggtgacatgattttttttgcgccgtttcctccaccggttgtgccagtctcgtcctgcatgtgtgtcacgcagaacctttcttgtagtaaatgacgcatggtggtgtttataaaaaaaaagactcctcgtgtttggacggaatagcgcgcacgtacttccaccgactgacaccatgttccgttttatacagtacacccctagcttttaaagaaatgcgacacgaagaagagaaaattctgctcttaggggcagcactgtaaacatgaaaaacacaaggtttttttttttccgaaaaacaaccaaatctatccccttccctcctatccccaaactctatccatctacttccttccctgcccgtcccatctcttccccangccgcganagcgctgtcgtccctccctcacc

SEQ ID NO: 2508 - DNA, 2000 bp, Oryza sativa
aaagcaaaagctaacactcaaacttaaatttaattttaaagttgattttaagatatttttaatataatttctttttaatattgatttttaagtcgctgcgaataaatataaaaaagttttacttataaattaatttttatttcctattaaaccaaaataacttatgagaaaaatgagcaaccgatgaggctcttgcaagaaaaggagctgcacagataacttcgtgtcttttatagtagtatattgctagatggcaagagtgaggcatgtttaatctgaaagcctcgaaactaccgtattatactaactaaggtgtgtttagattcagggagtaaagttttggcgtgtcacatcggatattatataggatatcgtatggggtgttggggcattaataaaaaaaactaattatataatccgtcagtaaaccgtgaggcaaatttattaagcatatttaatccgtcattagcaaatgtttactgtagcatcacattgtcaaattatggagcaattaggtttaaaatatccgtctcgcaaattagtcgcaatctgtataattagttattttttagcctatatttaatactttatacatgtgttcaaacattaaatgtgacgaggtgtaaaattttgggtaggatttaaacaccccctaacgatgatattatttaatgggaaagcggtgccgaaataaaggcaaacccaacacaacaccaaagccaaagaaatgcgccgtcgatatgataaggtcctttcatcatgcacaaggcgctcacgctccatctttgcttcagaagtcccaactgatgtttatattggtagagtacgcagcccggctcatcaatcgtgggctatccaggttatattgggtctgctccaccacagatctaaccagagcaacaactttatcccgagcctacacaaccaaaaaaaactagtctgatgggtgaggaccgcccacattttaagtcgtgctcctccatcatcaattaccgatgtgggactaaacctaacaatctcccccgtcacatcaacccatgtgaccccgaagacttgttatccgacctccccaccatatgaccaatagaaatcgttccggttccaaacctgggctcttataccacttgttagagtgcgtagcctagcccaccaaccgtaggccacccaggttacattgggcttgctccaccacaggcccaaccggagccacgcaactttaggtcatgggcccccacaacccaaaattggttatatagcatcgaaagttcacgttttttttattttgtaacacagaatcattataatatattttaataataaattgagaaaatatatatgctattatatgatagaaaatataatgatactatccgcgtaatttgcgcggaccaccatgctagttgtaataatgataactaatgcgccgctaattaggacagaccgctagcgcgagggccatggggagcgcacggctgtaatagttaattaagcaggtggtgcgtgcccactatgaaccccctatacataacctgtatttggttttgtggatgttgtgctttatgctacacgaatctcagaacatgtatggacggctggcatcaatggcggatttgccatggtcggcggggtctcgatcccctactaccggcgttgcaatcatgggagcccctattaataagccctcactaaaatttgttgccatacatgtattataggagggggttataattttgtatagtttgttcagtccctactattagttcttcttggatccgcccttggctggcatactgcgtgtataaaacccggtcctgttgatgaagaaataaaatcgatccttatttgtgctgtcgtgagaggagaggggagggttgtcaaccgtgagaattgctacctgctgcttactcccactgcatgccatggccggatggtagcagctaccagctgctgctgtatcggggtaggcggatcacattggcaagtttggtagagctaagaag

SEQ ID NO: 2509 - DNA, 2000 bp, Oryza sativa
  N_region (33)..(33): n = any nucleotide
  N_region (41)..(41): n = any nucleotide
tttcactttcatttgtcatttgctcgttttcantgcttttnatgcaccattcttcccttggttttcaggattagcatgaacttattttatgttactagccaaacaatacctatgagttacaacaggttattcaaaatagctaaaataatatttcattcttattgggaaaaaaatattagcttctacttgagaaacaagattcttcatcttaaaaaataaaaagaaaatcaatggctccatctgctttaacaaaatgcccttttcatacttcttaccgtaaaaaatcgtcggtggtgtttccttttcacaaaccgaaatcgcaatgtaggccgaaattatctcgaggccgaggcccaacaaaagtttgtgtccgtggccgtggccgtggcctgcttcatccgggcggcgtgcggcgcgtgcagttgcgggcctcgcgagcgagcgagcgagcgatctccatccccaacctcaacaatccccttcccttcccccatcgcgcgatgctggtggagtgtggcgtcgcgacctagccctagccctagcgccaccgccaccgccaccgccaccgcctgctcgctcgctcgattcccggctccccgtcgctacctcgctacctcgccgcgccgccacagccgccggcgccgtctctcaccgggatcgggacaacaagcgccgcgccgttcagtcaggcgacgggggcgtgcgtctccgctctctggggggcctcgacgtcgcctcgccggtgtttcggaagaccgtcggcctggttggtatctctgattgcttgattactgctagggaatggatgggtggatgtcgtcgacggggtgggtttagctttagcggattagcgcgtatcacatcccctgattccagtcgagtagacaggataatagcaggtggagggtttgaattttttagttatataaaaggataccttacgttggtgctgtttgatggattggtagaggtggtgctattcttcccttcatcagaatgtcaagcggcttgcttcgtgtgtagattactactagtatttttagggtttgggtgcctgctaatgtcaccgaataggtttcgttagcttcttattaatgtttttaatgcactttgtcgcgatatggatagcgagaactgctatttgtgccgttttgagatggtgtgtgtaatttactatgtcgttatgggatgttttttttttggtctattcctttggctcacgtgtccctcctgctgcaatactcatttttgtttgttggatgatcagttgtttgaaccgcttaccttttttataggcgcatataaaagtgatttggtggtcctggagtattcatttggtcatgtattctatattttggaaacttaagttttaatggattaatctagtggaggatgtagtcaagaattttcttttgttggttcctaagagatttcttggctcgcaagttgcaacgcgaattgggctctcatgtattttactattttagaaagcttttaattatcacagatatagtagccgaacagattggatatagctgtgtattcgagacatctgtttgttatcttatacagggcatgctccgccactgaagtcaaaatgtagggagatctgttaagttgtataccatattaggcttagtttattctttaatctttctccatttgttctgctaggaactgagctatcccatggcatcaccacaagaatccaattccttgtgcttgaagcgcaagcttgttgatgactgcctgtcaaaagagtgcaagtctcgtcgcatcaaaactgagaagggaccatcatctgattcatctgccaagcgctgcaaatgctgttgcactcgacctaaccttgccagtgattgtgtcaattacctaaaaagtggagtgcccagccgtgttatgttttacaaacagggttcttggcacaattttcctgagcagataatgaagtctctcattggaagaatttagaagcaataaaatctagtgttgttgctgtg

SEQ ID NO: 2510 - DNA, 2000 bp, Oryza sativa
  N_region (44)..(44): n = any nucleotide
  N_region (61)..(61): n = any nucleotide
  N_region (86)..(86): n = any nucleotide
  N_region (92)..(92): n = any nucleotide
  N_region (103)..(103): n = any nucleotide
  N_region (136)..(136): n = any nucleotide
  N_region (162)..(162): n = any nucleotide
  N_region (198)..(198): n = any nucleotide
  N_region (212)..(212): n = any nucleotide
  N_region (333)..(333): n = any nucleotide
  N_region (566)..(566): n = any nucleotide
  N_region (589)..(589): n = any nucleotide
  N_region (607)..(607): n = any nucleotide
  N_region (632)..(632): n = any nucleotide
  N_region (723)..(723): n = any nucleotide
  N_region (756)..(756): n = any nucleotide
  N_region (824)..(824): n = any nucleotide
  N_region (923)..(923): n = any nucleotide
  N_region (933)..(933): n = any nucleotide
  N_region (1310)..(1310): n = any nucleotide
  N_region (1336)..(1336): n = any nucleotide
  N_region (1372)..(1372): n = any nucleotide
  N_region (1461)..(1461): n = any nucleotide
  N_region (1601)..(1601): n = any nucleotide
  N_region (1685)..(1685): n = any nucleotide
  N_region (1741)..(1741): n = any nucleotide
  N_region (1784)..(1784): n = any nucleotide
gtctgttcaagccgacgcagtgctacttgtccctggactcgacnctgctaattcaagccgntggtgatgcatctacccgaagctgngacctngccgagatacnagacatccttgatttgcaagcttcaccgcactngagcgggctaaccatggaggaggtcntcgggaagccgccctgccggagcgcgccgaggatcnccggagctgccgcngactgccaagacttctatcagttctcatgccggaggtcaagcatcacgcatggcgtcgaaaccagcggatgacgatggaggcaagtatggctgcagtacagaggaaggacgacgggagganggcgagccagtgctgttggatggcaacaagctagctaatgcatgttgattaagttaattattgtggcaacgtggccaaccaatcggaggacgacatgtcatcgctgctacagtgccatgcacaaaccaatgcgtgggctgaagaagtcctgttggtttttcttatttgtcccaaatgagatgccgagctttgattaaatccggccgccgtctacatcaaccatcttcaataantcctccctgattcttctctaatntaatctcgacgcaactgntgtgacgtcaagtcgttcaagctangcaactccatgcatgtcttcaccaacaatctacatcgacacgttgttcaagaccgacgaggctagacgacggagggtgggcgaccaacacnggcgcacggaccgacgaggccatggatcgctgncggcgctcacacacacacacacacacacacacaaacacaatctatatcatcatcacaaccatgcatgnagaacgcgaagcgaagacgacgagacgaccacaagcagcttaatcggaggttctcttgcaggcctagacctgcggaggtaattaactgggagcttctcnaggccccagnaaccaggagaccacatcgcacaagtcagatctgtccaatgacagattatggagcgcgcatacatatatattacattgggaatttgtatttatgatcttttaagattaataaagagcatgttccctatgttttgtttacattgtgtatttaggtacactggcacgcccgcacatatatgtatctctaaacaaacgagatctcagatgttattttccaccctaaacaaattggcacgcccagtgggacctggttctcctcccatcttcgctatgctgtggtcgtcaagctcgtcttcgccgttcatccaaccaacaccaacatgttgcatgatgatcttcaacgtggagtgtacctgaccaaggctccttcttgcaggnggactttccatcatcgagaacacccngacgccctttgtgattcagtttggatcactaccacnggtgacattcttcgagtatggctccaaggtctacatgcaacaagctcaagatgtgacccaattccaggaggcccagtctaagaagcaangcaagcgtgcttctgccaaggcgaagaaggagcggcgaaccctcatgcttgaagcccggaccctcttgaaggagtccgttgtagctgagattaagggagacatccaagctgcacagaagctgcgtgtcaaagcttccaanaggcgctcaagtactgcatccctgcgtgcccctgatccagccgctactccaaagcggcctaccccaactgtgcaacacacagangtggagctgcttgaggctctagaagctgtctccgacaatcttcgtcgacacatttngcatgctcgacgggcaaacagtcctcatcccctgcgcaactanaggaggaagtatcgcaaggtgcagcgtctacaccaactcgttagctcgcgcatcgcccagagctccgtcccagaggaagactggtctcttgacacatctgtcctcatcaagaaggtgttcaagttctcaagcattctagagccaccttacgacttgttccctgacgaatgggcatgtgagccaactaagatcaaggagaaagtcagacgagccatc

SEQ ID NO: 2511 - DNA, 93 bp, Oryza sativa
cgcactgctacttctgagtttgctattgttccaagcgagataactgggatctaacaatctggtatcagagccaccattccccaccaaattcca

SEQ ID NO: 2512 - DNA, 2000 bp, Oryza sativa
  N_region (996)..(996): n = any nucleotide
  N_region (1007)..(1007): n = any nucleotide
  N_region (1019)..(1019): n = any nucleotide
  N_region (1022)..(1022): n = any nucleotide
  N_region (1032)..(1032): n = any nucleotide
  N_region (1109)..(1109): n = any nucleotide
  N_region (1141)..(1141): n = any nucleotide
  N_region (1245)..(1245): n = any nucleotide
  N_region (1247)..(1247): n = any nucleotide
  N_region (1381)..(1381): n = any nucleotide
ccgatagtggtgatcgtgttgatcgtctcatggtgagtgtgtgtcctcctgtcctcctaggggggcttgtatttatacccataggttcccccttgtccaagtataactagggaaactaatatggatacaatccgagtagtccttgtcgtttccatgtagaactctggttctttcctcatcggaactcctcctatatccgaaggttgtttccgtataggacatggtatgtggtgggtcctgccgagatttagtcaactactattaggtatgtggtatccataaccatgacaactataatttaatatacaaactttaaatttatcgtggttttgagatttgaagttgtgccaaacaagatttaaatatctttctcatatttatttacaagttattggaaggaagttttcaaattgatctagtgcaaaagtgaagatacacaacaatacaaacgcaagattttttttatcaatatatttatgttactataatattatattaaaaaataattcaaattttcaacacgcgtttacacttacactaaaaaatcgtttcttgcacagtgaacaaatcaaaagccctgaaaattaactgtaatccactaaaaatatgtcaacgcaattttagtttttcctcacaaataaacaccgaaatttctatacatctatcgcaagattttttctttagagatcttgcaatttttttgaccattggatttttattgagattcatgctaggaacctcccagaaaaatgcaaacgcacgagagaagggagtcaacctcataacctcaaggtcacacgggttgttttcgtcggatttctcccgagttacagttaccagcacgggctctcgctcactactaggagaacgtttttccctactgtcaaatccgattttgtgtgtgcaggtgggcggtccgcacccacccaggggtctgcgaaaattgtaatttttgtgtgcggcaacaaaaatccagaaaaaatgaaaaaaaaaaantgaaaacctanaattcggcggtngcnccgccgcctnttccttgtcgtcgtcctcctcctcgtcatcctcgtctttggccgaggacgccactcccgtcctcgtcatcgtgggtngcggcctccgcaccgcccgccatcggctccgngctcccctccggctgcaccgccgctgacgcccctcccctccaccggatctaggaaggggaggggaggggaggggagcgcttgcccgatcccgcgtgggggagancngccggccgccagatccgtgctcccgctggcctccgggctccccttcgaccgcaccgccgtcgacgcccctcccctccgccggatctggggagggaaggaagaggaggcgaggggagccggatcccgcggggganaggggggagagggcggccggccgccgccaccgaatccatgcggggacggccatcattgccgaatccgtgtgagggttggccaccgctcgccggatcccccgcgccgtcgccacgctgctgctaccgccgcgcgccgtcaagactcgggaggagaggagaggacgggaaaaagtgatagagtggagagaggagagaggagatgagaaaaagaggagaggacagaagaaaaagagatagagaggagaggagaggagagaaagagggaaaaatttaaagtaggtagaagggaaagagagagtgagtatttttacgtgcggctctcttaaaaggtccgcacgtgaaaataggtttattttcgcgtgtggtccattaatgggaaaataagctcatttacgcgtgcagtccattaagaggaccacatggaaaaaatcgatttttccgtgcggttctcttaaatggactgcacgtgtaaatgagcttattttcccagacgggaacaccgttatggtccgtctgaaatctaaatgggtccatatccaggaaaatcattttttaagtagtgtcagcctcagatcgcttgccagccatctatcccattcactggcgtccgccgccgccg

SEQ ID NO: 2513 - DNA, 2000 bp, Oryza sativa
  N_region (1321)..(1321): n = any nucleotide
  N_region (1419)..(1419): n = any nucleotide
aactacaacaacaaaaggtggtggttcaccaattgagcgatccataattggcacatgaagacgacgttgttcaatctcagccgatcgtgcttgtagacgcttggcctttgcagctgactgaaaggcaaaagcctgggacaaggaatggtaacctattaaaataaatactccaaaactagagaaggaaaaggttaaacagatagacaaaccattcttgagttgttgagttcgtttgcacagtgtaaagaaccatttagttacagagatctaaccgtgtcctttttaaggaggatatttaccatttttctttaaaaagcatggatcatagccagtgaccacatgacctccaaccaaactcataaaattccatatatagacggcagaaaatatcaccaaagcataaataaataaatgcatctattgcaatagcttgctaataatacgagcacgggcactcaatgctatctaaattctacattttaagctaattgcactggactataacactgtattaatacagagcaacgctgttagcacagatttaaacacagtttacaatatccaatctgtatggcttgcatcagatgctcaaattaatattgttccaatttctccaatagaaaaccgagaaaatgagacttcatcgtgataagcaagatgtatatcttctggaacaagttggaaccgcgcagtatatccgcatgaacgaaaaacaggatcgccacgagctacatttaatcgccacctaaacgaaccaactcctacagctaccacccggatagcacactcgccagagcgtcaaaatcctaatccatggaagctcacagcctcacgccccccaccagacagaacccaacatgaagcccgttcacttgtccgtgcgcccgtgcgtgcgtaccttcgggttcttcctctcgccaccgtcatcgtcgccgccgccgcccttccccttccccttcttcttcctcgccttcgcgccggacttgtgctgccggtgcgccttgtgcggctgctctcccccgccgtccgcgggggccatggagcgctagggttagcggcggagggcgtttgcgcgcggcgccgctgcggcgaagagagcggcggtggagaaagctagtggggaggaggaagcctggagggggaagaggccgagggttttggggagagggagagagaggcgccgcgtgtgatgggccgagcggggtaagcgctactatgggctgggccaagaaggcccaggcccattttcacgtcacgagattcggacatgccacgtgtagcgcgcaggggtcgcaccggccaccgcgccgggaaggggaangcgtgccgcgtgcgcggcgcgtggccgcctgcgacaaagccaccggcagttacgcctccgcgctcctccttcccaagagacgcagatctccaccccgnggttgcctcgcttcccccaaaaagtcttctcgtgagagctttcccccccttcctccacccaacaaatccccagcctcccagattcgtggcggaggctgcggcctgcggctgttctagggttagctctcgctccgccggcatttctcggtattttttctaactagtcttgtttagggcagcgcccctccgtaaatttttatagcggttgagttttctgggtagatgctttgttgatatagaatggacatggttccggttgtctgtagcgcgtggattcccagctagaatttctggccttatgttggcgtcaagttccaataaaatggaatgtttactttaatgtgcttatcgtagagatatcagatatgttttagttgcaaatgattttttttatttatgattttgggagctaaaactggtgcacaaactttttttttgtcagtaatagattggctatccgtctctagaacatgacatttacctgatgaaacagctaatctgttaaatgtggttgtaagttgatatcttttgttgtattagtaggtagataaagtattgtaagggcttgggtttgcaaccgg

SEQ ID NO: 2514 - DNA, 2000 bp, Oryza sativa
gattcaccggggtggtgtccggggaggacccctgggcttgctggcacagtatggtctgggacctaccctgttgttggtctgggacccctctcgtcggcatatggtaaacctgtatcggctttcgaaatgccttgtcatgaaagcttggaggtctcccgacgtggctgatcccctcgggctgggtgatccgggttagtaatgtcgtgtgggtaaagtgtaccccctctgcagaggttaacaaactgttcgaacagtcgtgcccacggtcatgggcggatgtgaggtgattcctagcgtagttttgtttgactactgattgtgaaattgctgtcgtgaaaatgggttcgacgtctgaaaaatcagcagctgacgggatcagctaggcccgggtggccgtttgaaaagttgttggcccgggtggccgtttaaaaagctgttggccgggtgccaatcttgtttcaattctaaagagctgatacattgcacatactccgaccggacgagacgcactgtctcatccgtgtcgtttgagaagcactcacctagttgttttagaaaagagttcaaataaaaccaattgcaaaaacaacagcctttccttgaagcctgcattaaacacttattttcccctggcttgctgagtactcccgtactcacccttgctctagataaataatccccccccagttgctgaagaagatgaagcggatcctgttgatgtggagttcttccaggagcaagccggctacgatgagttttagggtttcggcctagttcccaagtcgcgcctgtgatgattggtccaagtcctggcttccgtttccccttttgtattgcagttgtgatattctgtcttcctgtgataccagcactgtttcctgggactggtatcgattaacaggttaatttggagcgtcacgggctagttccagtcggggctagttcggggcgtgacaatatctttacaaatatacaactttaaatttgacatttacgaggagaaaaaacatatttgaatgcgaatagtgcattattcacaagaaaattgttgtttttatttttagttgtgtatgtcaaattcaaacttgcatatttattatggaagaacacgttttcaaaaagttatatgactatataggagatataattgtctacaaggatgaaaatactctcacctaatataacgaataattcacttgatgggcatgtcatcgcttattaacacacttgtgacattttgtgctctttaatttatggagaatatggtttgtgctcatggttgggatttttcttgaaacaaagccaaaatttattgtattatcggtggagagcatctaaaaaactgccgtaagtttttctagtaaaaaaatttcagatgtaactatagtataattgaagtgtaattacatgtagctgcactataaccagggtttgaaattttagtttgaaatttccgaaatctcgcccgaaatttcggtaatctcgccccccgccggcatgctcaaatctcatccgaaatttttggctttttgcaaatttttgtgaatttggtcaaattttattcaaattcattcaaaatcaatcaaaatttcaaataatttcgttccgaaatttccaaaatttcagtaacccttggcataaagtccaaatttgaaattgtcaaccttgattataactacgttgcaattacggtataacttacataaaacttgtattcaactgcgctttggttaggttaggtagtactgaaatcttatgcgtaacatgtataaaaatttctttccagcaatatttttccttcatgtataaatctcaagatgatccgatggtcataaatccgaaagttttaggggggaaaaaaacttgtggaagtttttttggcaaatccgctgtaaaagttacacgctcgtgatgagtgccgtggagtgctgtatatatagagatcgcgcagagctagctgcttttgccaacaaccaagaagctagctagtgatcgcgaag

SEQ ID NO: 2515 - DNA, 2000 bp, Oryza sativa
  N_region (1991)..(1991): n = any nucleotide
atacgtacctaggaaggtcgcagccatggggttgccacctccaatgctggtaccggaggtccgtcctcccgtacttctcgcacgccgactgctccgacatcaccctgcacgcgctctccctgtacagcgggtacgccgcctcgtcgtacacccacctcccggagaagaggtcgcactcgccgccgccggacgacgacgacgacgggagctttattgacgccggcggtggaagcggcggcgcgtgaggcgtctcggcggggtcgccgttcttggtggtggcggagacggcgagggcgacgaggaggagcagcaggagcagcacgagcgagctgaagtggctccggaggctgacgctgacgccccaagccctcgtcgccttcttcgcagctgcagcctcgcccgccgcccgccacgcgtactcctcgaggctccccccctcgccgccggtgacattgctccggttcttccgcggcggagtgctcccggtcgtcgtcatcgacgacgacgacgacgaagaagaaactaattcagtcgtgaattcgatcggtggcgcgcgcgaacggtttgtttgctcactggcacgcgagatcgcgatcaaatacaaatagctcgcgtgcagctgcatgcatgggagagtggggagtaggttcagctcagtggtcagtgcagtgtttcagcgtgctgtccatcgcttacagcacaagtatccctttgattaggtgagagagtacgttcttgctgcctatacaactggcctcgttttggtgcacctaaacttcgtcaacgaatcaaatcaacgtagaaatagttgctattgggcattggcacatggcatatttgcacatttgaagaaattatagtactaatatcgtactgatggagaagacctgagaagtgattctgacgaataaacaactagtggattggatggagccgggaaacgatcggaaagctaattactattggcacatcgcatatttgtacatttgaagaaattatagtactaatatcgtagtgatggagaatagctgagaagtgattctgacgactaaacaactagcggattggatggagtcgggatgaaaacggtcggaaacgattggaaaatcgtctcaacctttttttttttggaaatggaattaaaaatggtaaagttagaaacgaaaataaaatcggaaatataaaaaagggaaacagaataatatggacggaaacatgtcggtacaaatcgaaaactggtaacaaatacgaaaacattaaactataaaaaatatatttaactttgtgtaactatgtaatacatataaataacttcaagtttatactatataaattacaaattaactctattttaaccatgcactcaagttatggatttaattaaagagtcaatttgtctctaaattgcgggtaaaatagcgacatactctataatatcgacatatttagaaatacggtaattactatattataagaaacggtaatctccacaagaatacagtaaatacggaaatgatcggtacaacatcaaaaccattttaatttttatttatatttttttaccatttctatttttatttcggtcgattaccatttccatatggctcggtcggtacaaaatcagaaacgaatatcggtcgaccgaaaattttcgttactgttttggaattcacattaccgttttcacccttggatggagggtatttagctttctgtctgaagaaaatctgttgattactactactggtgttgtacttgatttgtaaagtgaaaattaatttcttgatgtcttgcaagtaaaggtttttgcgggaattggggcaagtaggagtagtatatatgtggagcagatgaccaattaccaacatcgtttggtgaaggttccatgattctaacaaaggtcaatagtacacatacttgccctacaaactagtgctaactacagagattgattagattaatagagctactaatgaaactttaagtttggntttcaggga

SEQ ID NO: 2516 - DNA, 2000 bp, Oryza sativa
ccaaagatggtttctccaccagtgtctgcaccaaatagacttgcgttgaggacctatttatgaaataaattttaaaaaataggttgaaatgtactccctccgtttcacaatataagtcattctagcatttcccacattcatattgatgttaatgaatgtagacacacacacatatatatatagattcattaacatcaatgtgaatgtgggaaatgctagaataacttatattgtgtaacggaggaagtaaatacttttcttacaacttggcctttaggctagcctctttggtgctaaggacctatttgtaagaaaaaaattaattgacaattttttataaaatttattttacaaataggttcttggtgctagtctatttggtaccaacatatctacatctcggttactagggagcgagttgaggtatctacatctcgatttctagggagcgagttgaggttatcggtgccagtgtcattgacaccaagacgttgaaccttggctccagcatcacgcatcgagaaaagagtatattcatggaacaagctcgtttaggagtctatacgtaaaataagctttcaaaaaagatcaaagtgtaaaaaagttcagtctcaccttgtcagtctttaattatagacatttaagtatagaccaaaatccttatatgctaccgaaagttcacaagtttttatatataccattataaattagctattcccatatatgtcatcaaatggaatttccgttcacccaagagtagaaatagtgttagcatttttgaaaaataacaaaattgcccatagactccctttcctgctatgtgaagcacaaatcaggatgagttgcacttgaaactataactaaaactttagcaatcattactgatgcgacacacaaccaatggctggatgcaacgtttatttcttctcttccatttttgtagttaatttatagataatagaaagaaattgttaataatctctttaaatggcactaataacagtaatttaattaattagttatagtctaatgtatctaactggatgtaagcatacaatttagaaaaaaaaatacaaaacaatctctcggcttagcaaactgatcgtgtgcttaatttagtcgcaaaaaataggtatacttaacttcaaatttgcgtgcttaatttcatcttgtcatggaagtaagtaatttcatgatacagacattagttgattaaaaaaaaatgcatccgctttatatattcgtagtaagaaaactaagataaaattgagaaatttctagactattcagctgccttttcctgagccagagaggtggagttgtagacgaacaccaacaattaaggaagataaaatggagagacaatgcataagaaagaacggaaaagaattctaagggtaattttgtactttccatgccaactaaaatgatcagataacgtcgatggcatatgatgaaagaaaaaaattaacgtggatggcatatggggaaagaaaaatattatttagtggcatatatgggaataccaaattttcgatggcatatgagaaacagatgaactttcaatggtatataaggaattttctcactattataagtcttctcgctagaggatcctattcgacaccgactcgacggctggcgcgtctgcgccacaatcttattgtttctttcatgaatttttggacgtattttagactttaaatctttcagcccaaattttaaactttcattgtaaaattcaaaactatcaactcaaatataaaaaaaataactcaaaattgaaaacttgaataaatcttgattcgaatgttttcaaatttgagttgagagtttgaaaccctaagttgaatgtttcaaatctttgacttagaagttttcaaatctgagttgaaagttttaaattatgctgctttggcatcaagtttaggggcattcccgtcatctctcttccaatgcaaccattgagcggtagcacgacgggcagacgtcacatgggg

SEQ ID NO: 2517 - DNA, 2000 bp, Oryza sativa
taaagcacccaatacatcatttcgctggtgagcttgtacatctcagacctgtgcttcagcatgcggagccctccaccattggcaccaccaccagcatcatcctcatcgtcatcgcagcgctccacctcgacggcggttaacacagcgaacagctcctcgccatcgcgatgatcctcatcggtgcggaagaacctggcaatgcagaacttgccggagcccaggttcacgaggtccgagctgacaagattgagggcgtctggcggtgtgaactccataggaaagctgcgaagcagcggcagctcgccgccatcaaggtccagagcggagagcaccaagctcctcttcctcctgtctctggtgctgtgtgagaggccaaaccaaaggccgtgctcatggcaatactcggcgagaccaacaaatggcagcgtccatcttgtggccactgtgctccacgcatggcgcaccgtgtcgaagcagtagatgccgccattgtcgtgcgtggataaccagatgtccgtgccaccgatcacagcgtaggagtcgacttcgaagtcggacagcggcggcggcgggagcgcgcagcagcgccaatcctcgttcaatccatcctcatagatgagcccatggaagcttccaccgtcgtcgacatcgaggatgtagaggtcgtcgccgacggtgacagaggtggcaggcaatgtcacctggtaggggagggcgggcatggtgcggacggcgtgctcgccggggtcgtagaggacggtgcggcagctctggtcggcggcgaccaccatgttgtggttgcctccaaggaggaagaactccatgttctggttcccggacaagctggaggagggagggtagaaggtcatggccgggcatggcaggctgccgtactccaccgcgtcggcggcggcggcggcggatggcaccggagatggacgtgggaggaagaagcggtccatgtctatgttccgcagcgtgtagttgctgcggcgtggggcgaactcctccagcaccagatgaacaaaccgacgaacactcatcgtcgatcgatcggatgaatcgatgatcgtccccaaaatgaagtaatcttactaaagattgattggattgattggattggattgctctggatcttcttctcccccaccacgaataactagggttttcacgaagccaaacgatctttctcgttgcaaagcgacttatccgattcggttacgcggagtggagatcatgcgggcgccctgatcatacgatctatctctatataaaccgagctgccgccttcacgcaacacacgcgaaatcaatctagggtttgcctcctactctgtgctgcacctgatcaagcgatctatctctatataaaccgagccgccgccttcacgcaacacacgcaaaatcaatctagggtttgcctcctactctgtgctgcgccatcgctcgtagactactccatcccactcgccggtgtgcaccggcgatcgggagagtagatctccggaacaatctacggtttgcctcctactctgtgctgcgccatcgctcatagactactccatcccgctcgccggtgtgcaccggcgatcgggagagcagatctccggaacctctgccttcgacgtcatgcaccgggagaaggcggaaataaggtttttgggaagcgcttcgcgcgactgctccctgttcgtccgcgatggctcgccttcctcttcgctcgcgtgctgcgcaccttcgtcgacgcctgcaaccgcgagtagtccctgccgagcaaccggtctttccgccacctcggtacgtgttcgacatgttgcgcatatttgatctgttcatattttactgtttagtttacatatgtagacctaatgatgcgttcatgctagtttatatctgcaatgtcatgatttatttatggaataaattaaatcattatgtgcttataatttcaacataagcgaatcggatagtcaccggcggcggacagatgatgggaaggga

SEQ ID NO: 2518 - DNA, 2000 bp, Oryza sativa
  N_region (1227)..(1227): n = any nucleotide
  N_region (1485)..(1485): n = any nucleotide
ccagaacagatatggacatgtggctggatccatttgaaagtagacttgataagctttccatgaagtacttgcacgcccaaatcggagttcgtatgaagtcgtggcggccgtcagaagttggcgctgccctgcagtccgaatccaccccgcgcgaatcctcttccctttggatcctctccatcgttcctgagtaaaacacgagtgcacgcgtctccggggtataaagacgaggaatatgaactcaagaaagaactcacctgataatttagttgacgtgcacgagcgcgggtaataggaccatcatgctgtacatggggggacgtggatgtatcgatggtgttgatgtcctcatcatcactattcaagggaatgctaagctggcagtgcaatgcgacaagcaaagcctcgacatggtcgagcacacgcccagcccacctgctacagcagagccacccaagaaagtgagcaagacaaacaagacgccgataccagacggcgcaatcaagatcgttccactctccagtgccaaccctgacaagaccgttaagatcggggcatcactaggagagaaataggaactcgtgcacatcaccttcctccgtgacaatgctgacgtgttcgcttggcagctgtccgacatgccgggggtacctagggaggtgattgagcacaaactcatggtgcgacccgatgccaagccagtaaagcaaaaactgcggatatttgcaccatatcgaaaacaagccatacgagaagagctcgacaagcttctcaaagctggtttcatcagagaggtacttcatccagagtggctagccaacccagtcatggtgtggaaggccaacgggaaatggagaatgtgtgtcgacttcactgacctcaacaaggcgtgtcccaaggatcacttccctcttcctcgaatagaccaactggtggactcaacagccggttgtgagttgttgagcttcctcgacgcttactccggctaccaccaaatcagcatggcgaaagaggacgaggagaagacagcattcatcacgccgttcggggtattatgctatgttaagataccattcggactaataaccgcaggaaacactttccagcgcacggtgtagggcgcacttagcaaccaactcggaaacaatgtcgaggcctacgtcgacgacattgttgtcaagaccaagacaagcgactcattgattgacgatctgcgggaaacgttcnataaccctccgacgatatcgcctcatgctaaatccagagaagtgcacgttcggagtaccatcgggcaagctactcgacttccttgtctctggcagaggaatagaagcaactcccgagaagatcaaggcaatcgagaacatgaatgtcgcctacaagactcaaggaagtacagaagctaaccggatgcatggcggcactaagcaggttcgtcgctaggatgggagagcgaggacaacctttcttcgctctgctgaaaangcaagacaaatttatatggacacaggaagctgaagaggcattcattgcactcaagcgctacctatcaaatccacctgtacttgttgcccaccaacctaatgaagaattatttctctatattgtcgccacgccatattccgttagcactgtcattgttgtcgagagagagaaggtgcaacgaccagtctactatgtcaacgaagctctccacgacacaaagacaagatatccacagatccaaaaactgctctatgcggtaatcatgacatcaagaaagctacgccactacttccaagcccacagggtcacagttgtatcctcctttcctctcggtgaagtagtgagaaacaaagacgttgtcagccgcattgcgaaatgggtagtcgagctaagccagtttgatgtccgctttgtgccatgaatagccatcaagtcccaggtacttgccgacttcgtagccgattggactatgcctgataacaggttagacaaccaaatcaaaaacgaaacatgga

SEQ ID NO: 2519 - DNA, 2000 bp, Oryza sativa
attacgccgtgtcgccaaccccgcgattgccacggctatctgctctcgcctacctgcaagagcacgtacgctcgagttcgtcctgtcatgttcatgtctgcctttattttgccagtggaacctactagtaacataaatatcagcatatcgccgtcaaattatccaaccatcacatatacagtacgtagacagcgtcgtgccggattaacgagcggctcgatcctgatcaagtccccggttaaagttaaacaggatgtagtcacgtgcagcgtacaacgcaaagcccagagaacaaaaaggaacagaacagtcaggatcaatcagcctcgccaccgttttgtcttttacttttccttttcttgttttttgcatggcatgtggatggatgaagaatgacgcagcagtagcattagtaggagtactttacaattaccggctttatacaggacaagttaacagaagtagtccatgagctgcacccgcggcaccgtggccggcgggcctcgcggcgcggcggcggcgcgctccatccgtcggcggcgctgctcccacgcgctccctgagccagcaaagcaccggttcaccgcctcgagccaccggaggaacaccgcctcgacgacgtggagccggcaggacctccacggcgccgtgcagccgtctccctcggcgccgccacgctgcggcggcgcgacggggaaccttgccgggctcggctcggagtagcaccgccgcaggacgatggcgcggttgagctgcgcctcgaacgccatcctctcgtactcgtccagcagcgcgctgtgccgcccgccgcagccgtcgctcacgtcgaggctgtaccgcgccaccacgccgccaccgccgccgctgacttcgtcttcctcccttgctctctccatgtgtacagtagccgttgccaactgcgagtacacgcgcgtgtaccataccaccacattgcgagtggtatttaggcagcgtggtggtccatgccgcggcggctacaccatttttttggagcgaaagcttgtgcgagcttgacgtcgcaaggacggcaaggatcggtactactactaccggatgagcttgtttcgtacggattcttgtcaacgaagcacgcatacatgcatgatgcatcgcatgcatggttgtagccgtagattccgatgaaaatgagacggcgatcttatctcgtctagctaggcaattttggttagccagtagcatagtggatagagagatttgttgccaaattgatggatgattcttcgctgagctcgaatgttcgatgttgtaaatattcagtgagggacatatacgcaaggaaccaacaaaaaacttgcaccataactgtcatgtacgagattccacctctgtcgcttttattcccttggagagaaaattccatgctctttactctttagcaaaggcataatgtaaagttgcacactgcaggtgcattctgcaagcaacctgctgaattttgagctgagcacaactttttattcctgaagtagtagtaccactaccactaccacttgctatacttgctactgcatttgccgtttactatttttttaaaaaaaagaaaaatcagcgaggtaaccttatacgacgatttcagaataacatacaaatgatagttgtgcagaaggtatctcagttgccaagcccaaacgctccagaaggatagatgctccacattgcaggctatttttaataggtcccacaagtatctcccctctctgccttttcccaccgatggaggaagctgaggtgccggggcaccggacggaacggcggcaagacggcccaattgatgaatggatcctcgagcaggaagtgccaagcagagcgcggcgacacattgccacatctccttgttaagggcggaagtcgcgggataagacacaaatgatagcgccaccaagctcgctagatccagcccggggcttgtcggatctaaccttgggcaatggaggtagctcgtcgggcgcgacgcaagg

SEQ ID NO: 2520 - DNA, 2000 bp, Oryza sativa
gcgcagacgatctcaagaagggcaatgccgaagctgtacacgtcggagttacggttgaagctgacctcaccatccttcatgcactgtggatcaatgtatccttgtgagcctatggcagttgtcttcagcgttgcattgttcgggttcgcgacccttgacagaccaaaatcagcgagcttggcgttgaaatcgtcgtccaagagtacgttgcctggtttgatatctctggtgtatgatatatgggtagcactcgtgatgtaggtacaacaggcctgacccaatgtccttggctattttatacctgttagaacattaattgtagttaattagctacatggattgatcattaacatgcttaattaattatacatgtactaattgaacacataacagaagttcacacataaacaaagaaaatcgatcacattatgtctaatgattatatatatataatcctaatttataagtcgctctgcgctctcctcagcgtcagtggttctggagtccatccactcggagggccatctatggtctctagctagcgttgccgcttttggggacttgttaggagtttgtgtctaagcttcagctttttttattttttttcctttcccctagcataagctggtttggctgattgcgtcgtgtaactataactcttttcttctaatatattgacgtgcaattcttttacgcgttcgaaaaaaattataagtcgctaaatcttgaaaaactataattgagaacggtccaaattatccaaaccgattacaactcagtattttttttcacctagaattttgaaactattaaaacaatattcccccgtaccaacttcgactacacgttcattaattatgattttcaaaattaataaatcgtgaggcataataaactaagtctcccatgcaaatacaactaaataccacttagtttcaaatgtcgtatgtgtgtgtgtgtgtctatatatatatatatataataaaaattgaagatgtttccgcggtttgtcgtccgtgtttgagtcggttttaattgtatgttttagttttaatctatatattttctctgctattataaaaattaaacatgtttttgcaggtattttggtacgtcattcatgtatgagtcggtttttaagtttgtttgcttttgaaaatacatatccgtatttgagtcggtttttaagatcgttaacttttggtaatacagatgaaatcatataagaaatctgtttaaaaaaactcgtatgctaacttgagacgatcggacttctaactgcagctcatgattttctaatatatatatatatattcaagcgaactctcatagtgaatttcatcataactaaaccatataacaataataatattaaaatagacttcacccgttacgaagcatggatattttttctagtttagaataaaatgtaacaacattagattgaaaaatggaagtagcagaattttacagttatttacaaaatgtaataattttatcctaagtacagcgaaatggaatcatataactttgagagaaaaaatgactagtctattgtaagagaaatcgatatcgaggcctagaaattggagaaaaagataatgatttgtgttgttatattatgatgggtctagacaatatcaatcactattggagaagtggtctttgctagattgccaaaaaaaatcatattagccccagttaaaaagcacactagaacaccagtcgggactaaagatcctttttagtcccatttaaaaatcatgtcagacccccattatttttagtcctggttggtgttaccaaccgggactaaagatggatctttagtcccaattagtaacaccaactgtgaccaaaatatataaaaaatcgtgcagcagccccgagccggccagccttgtccttatctccttcggagacctctcattttctaaccatctcctcctcccccttcctccccttcccctgtcctctccctcccctccccactcctccga

SEQ ID NO: 2521 - DNA, 2000 bp, Oryza sativa
  N_region (1046)..(1046): n = any nucleotide
gaggtcccgcatcttgtggatgagccacgctgagcgcttcttcatgtggctcggcggcttctgttgctctgagctcctcaaggtttgacacgagtgatcacccacccaattcagtaacaagcaaagaatctgaagctaccattgactgctattgttgaatgatgatgatgatgttgtttgtgcaggtacttgagagccatcttgagccgctgacgaatcagcagttgatgggcatctgcaacctgcagcagtcgtcgcagcaggccgaggacgcgctgtcacaggggatggaggctctgcagcagacgctaggagacacactggcatcggcggccgccaccgtggtcgtcggcggtgtaggcgccgacaacgtcaccaactacatgggacagatggccatcgccatggccatgctcaccacgctggagaacttcctcaagcttcggtcaaacatcaatggcgaactaaattgcttattaccatggcgtgatgcgatgatatttttgtgtaggctgatctgctgaggcagcagatgcatcggatcctaaccacgaggcaggcggcgcgggcgctgctcgtcatcaacgactacttctcgtggctccgagcgctaagctcgctgtggctggcgcggccgagggacgcgcgtcacggcatggcagagcgcgcatcgcaccgaccgcgcccccggcggcacggccaggtacgcgccgcagccactgcatcccgctgtcggcgaccacctccccacccaccggccggcctgcccaagaggagaaaagtgagagagagagagaaagagagagaggaggaagggagaggaggggaaagagatagggtgatgacgtggaatcctggcatgtggggcccacatgggttccacgctgattcagccgtcacgtcagacaaaaccgcggtcaaaaccaccgagggacctaaagtgaacggttttgtaagttgagagatatcatatatctggttttgcggttgtgggacgattttgtaactcgatgacaagttgagggaccttgggtgtactttttccnttgaaagttgggacaaattgagggacctatagtgaacttaaccccccccccctaccttttcttttcatgtgcttgacgggccgcgaatgtcgcgtttgacatgtgggcctgtgggggcaaaccttagggtgtgtttggataatggaaaatgtggagtggaattgggattgagaaatgaatgaagggttagaattaaatggaaaagggagaatgaatgattaagatttaaagatgtcttttagtggatgggaaatgatttcccattagccaaacaggaccaaaataaataaaaatcacccccgtggcatgtgcccccgcaacacagaattccccaattccccttctcccatcccaggaggagccgccggaaccctcaccgtccccccaagatccaaccaatctaccggtagacccggtgttgtgccgtgatggatccattaggcggtcgccgccgccgtactgctgcatctgagagtggaggaggatggatgaagggttgtaccagtgtgagggcgagagatgtaagtcacctccgatcccttcaaaacccaccattttttttcttgtcttggcttattttgtggcaacacatcaggccagccagacacataatttaccaccagatctgaatcgctcccgcggttgtaatgtataggatgtatgtatgtatgcatgttcatctgtttgtttggttttccctttcactagattcattctttcttagcacaaagcacccccccaaaaaaactctcttttcgttgtccttgtggatttctcagaattcggcgcagctgactccgattcgtttttggtgttagagagacaccgattcggactatgttatgttaccttttgtgaataaatatagtactagtgtatatgtgcaccgcaatctcagagttaagcatcatacatagtctttgtttgtgtgtttgctgcatgtacgacgacacc

SEQ ID NO: 2522 - DNA, 2000 bp, Oryza sativa
  N_region (222)..(222): n = any nucleotide
  N_region (639)..(639): n = any nucleotide
  N_region (875)..(875): n = any nucleotide
  N_region (1631)..(1631): n = any nucleotide
  N_region (1634)..(1634): n = any nucleotide
  N_region (1638)..(1638): n = any nucleotide
  N_region (1640)..(1640): n = any nucleotide
  N_region (1643)..(1643): n = any nucleotide
  N_region (1645)..(1646): n = any nucleotide
  N_region (1648)..(1651): n = any nucleotide
  N_region (1655)..(1655): n = any nucleotide
aatcatcttgccaggcattatgcaaagaacatacaaagttctgcagaattagaaaactaaaacaaaatgacaatggctaatctttaaaacaagcaccggcattgatgactaacgaagaccattcaccatgattaacttgctcacctagccgtacaaccaagatattttcaagagaggcttataatctttttaaaaatgtgctaagcaagaacttgcaagtangagataaatactgaaggcgctctctctctatcttcacattagttagactcaagattgaagctcccgtcgtttcgcattcggattataagccaaaatcaaaatttaaatctttaaacgtaatttataatttcttttaaagacttttcatcgtagttttttctaacttggtttttaaccattaattaacacatctacaaaatttttacacaaattattttttccattgcgaatatgcgtattctgcatattgaccatttaggccaaacgatcagggcctgaatattgaaataatcaatcacttgcacaaacatagcctaaaatattcttaacacatctaccaaaacttatattcttcagacatatcaataggccaaatgaattctcaccaatttcttgtggtggtaacagttggttctnacacttaatctggcatccagttgttcggcaggagctacgacacgacatatctactcatgacttagtcaaggttatcctcagagctagggatgctacaaaagagctggtcatcaacaccgtaacgcctaagatgtatgagtgatctggcaacaaagatgaatttgcatttcgtaatacaaacatgaaccagtcttgtaataaacatatcttttttttttgtttacttctacattccnggtgtgtggcgttatggcattttaatcttgaatgaggcatttgcttaccattatgacattttggtccttggaacagtgctgtgtggcatgtttatatgatgcaatttatgagtaaccctttcatctaattagcattagtgaaatttaatataaccatagcgttagtatgggtattttactaatgaagaataaaacatcttaggtctttttaatagtctgtttggtcaagatgaagattgttgtcggtttgtctagtgtaaaataaacctaaaattgcgtattattcacggagcaatgtatgtattattaattggctggcattctctggataatactgtggcaagtttttacttacaataggagtatgtgactatgtgagttcattaatctcagctgaaattgaaataagtaggaaatgaaaaatggtgacagtgatgtctgcctattgaaattaaccatagattgaagggacatttcctgttcttaatcttccaaatcagtaggaatgtggggcaacaacccatcttaggctccattcggtagtatcccaactcctctttctcgttttccgcgcgcacgcttttcaaactgctaaacggtgcgttttttaaaaaaagtttctatacaaaagttgcttaaaaatcatattaatttattttttaaaaaaaaatagctaaaacttaattaatcacgcactaaaacgctgcttcattttgtgtgccggggagtgagggttgggtagagccttagagctgntanagcnangtnanntnnnngacnagaacagaacagaagaattttttttactttgaataaggaaagcactgcagtataaacaaagataatcttctacaataaactgacattaatgcagaacaagcagatactatagcagagtaatgtctggagatcactgtagaacaatggaaatgcagaacaataggaaaacttggcaagcaagaagaaaaggattagcagccgcgtggcttcagacgagaagcctataaaaccgcagcaatctcctcctcaacgaatcttcccacttgccctcttcttcttcccaccattcccaatcccatccaaaagtttccagaaactcatcctcctcctcctcctccccctccc

SEQ ID NO: 2523 - DNA, 2000 bp, Oryza sativa
  N_region (685)..(685): n = any nucleotide
ctggtccaaggccaaggccctcctcctccaccatcgcccggcagctggtgacacggcggcgcacggcaggcaagcccagtgagtagcaagcacgcatcgtgatgtgacattctagcttagcttccgtcgtcttcttcttcggctgtgtttagatttaaagtttggatccaaacttcagtcttttttatcacatcaacttatcatacacacataatttttcatttttcagtcacatcatctccaatttcaaccaaaattcaaactttgcgctaaactaaacacagccttcgtcaggtcatcgccgatcagttaatactcctactaggctactactcccagctgaattagctgcacaattaaatatcggagaagacgacgagggtgacttgttgggcctaagtgggccgtgtgccgaacaaatggcccaagtctaggacaatattttttgggccgtgatacgacattttgccacgagggcccaatatggatattttttgcattttgctccctgatttgaactgtatttctgcattttttgacggcatctcatccaggagcccaggtcggcgccgccgcacacgcgtggcggcctcgccggcgactcggctgctcagagcggcgcgaagaaaggccgcgctggagtctgcagccgctgcgtgtggcagagtagagaccagccaggganagcgcagctgtcagcaacctataccagccagtgagcttgctcgcgccgttcgccggggcgggggaagagaaccatctggcgacaaagcacaggtgaaatccagtctctgccaagcaatctctaattccccccatggttccctaattgtgtgtgtatttcccatcattagtgctgttctaattcatcatttgtgctgtttgttctcaagcgtattgctgagcgaatagaatgcccaaagtgcttctaatttgtatgcataggaattcttgacctgtcaagttacacactgcatgagttgatatgggaacgtgcggatagaaaaattcgtattttttggcgaaatttcatgaaacttgattgcatgttttgttctctgcgtttcattttggaatttggggttcaactgcagttgaaacgagtcatctcaaattcgttctgaacaattcccttcacgctgttcaaacgaaagcaaagagcctctcttataaacatgtttgcaatccggtggggatgatggcaatttcaaagcttccgaaacctgcaaggcaaaagtaaaaaatttcacattggaaagctggcttgatttgaaagccctataattttttttagtataaaatctctgtttcgaagtcaaacaattctgatcctgagtaggaatcactgatttgctaagctgaaatctgaatttgtttttgcactgaaattttatttggaaattgctcaaaaagaaagtccagtacatgtttagaaaattcctgatttcaggaaacttttaagccgaaaacctgagttggaagttgttcttgggaatttaccaattagtgtttttttgtaattataaatacaaatagtaaggacaacaaaatcctcccgctactttgtgacctaactgttggtttgcatattagaaacacccctcgtgctaaatccagtagtttatgttgtctgttagtttttgaggcaaacttctatatttgtgcaggtggctgtgatgggaacataagagaggctcttatgaacttctaattcatactagtagtatatttatgcttattatacatgctgacttgcaaccttttgctttatcatgctactatctggaatcaatattgttctaagtaacaacattttgcctaatcttaaaacaggaagcatgtcactggttaaccggccgctccctgcactgtatggaatttgcacggcctcggcgaagaccagagcttggtggctctgcagagatggcaatctcccatcaacaagtcgaatttcttgcacagagccatcgaatgggggttctgtcatggagttggaggta

SEQ ID NO: 2524 - DNA, 2000 bp, Oryza sativa
gtcaaagcttcgctcttcccctagacctccatagcacgctgcacactagctttttgtgctctgtgcgatcctagccgctctgctgccactcacgcctatagagtagcatctttccgccccgccatcctgcaccaacctcctagctccctagtcgttgtgctgcccggcgatagcatcgactagaagagccaatatctagccattatgctacccaactggctagaaaataaaccaataggtgaatcccacataattttatttcttttctaaattttatccactagttcactagtacataatgcaaataacctaatgtggcattttgatcaactctttacctaggtcattacccctcttaatagtacgacaaagctagaaataaaccccacataattttatttaccatctttgttccattgctttgtgcgatcaattttaatccttggtagtcctaactcaaagtataccactcaaatagaatagttagtccacaattagcgcttatcattaattaccaaaattaacaacgagggccacgcacaaggaaaaatgatgtttttggcagacctttaggtgcagacgggtcttcggtccgcacgtgaaaatctgctttggctcgtctggaaaaaatgtttttgtactagtgatcactgggacatctttgaaccaccatcctgttcccatggaagtttcacttcacccaccgtgcctccaccaccttcttattgtcaataatcaccgccacctccccgtccctcgacccccactcctccccaagcacaccactgccacctcatgctctgtcccgttgtcccgaaacctgcatcgtgtgctgtgcactagcaaggctgccgccgccactccccccatcggtgccggccatcgacagccgccttggagagaaatgggaaagcggggagaggtggagagtgatgggagtagaggagagagtagggttggaggaagaagaatgggaatctaatgacatgtgggttcggtcaatggtgactcaatgatatgggttcagtcaactgccacataagcgaaaacaggagactatactatcatgggacctaatgtacaccgttttgttaagatgaatagtgaagatttatggtattatagtttagggacatttatcaaacttgacataaaattgagagatggtaagtggacttattccctttctttgtatgggctggaattactggaacacaaggaataagttcactttccatccctcaactttacgtcaagtttgtttgatatcccttatctccaatactagaaatcttcatccctaaattgtacaaaaccgtgcaatttgggtcccataccagtatggatgtctggtttcgctgacgtggcatcctagttagcaaagaaaaaataaaaataatatgtgaggtccatgtgcaagtgaaataagaagaaaaaatgtggggtttcgtccgcgcttcatggcctaggagagaagggggaggtagccggcgggagaagggggagaggaggctggccgcggtcacgtttgcatgagaaggggaagaggtggccgacctcctctcactctttttcttttcctggcgaggctggagggtggggcagtcggcgaggggagggtgcgggtaccgaaggcggcggtaagagagcggaggaggcgtgcaatggcgctggtggttggagggttttgcagcgcgtcgctggtctaggggcgtctacaagaagtactaggaccaactggaaggctaacaggagtcgggaggtgggggactcacgacggccatggtagcagcggtgagagagtttggtcaattggaaacgcatgagggtggcgaagcgtctcgcacgggcgggtcagctcgggactgaacagcagagcacaagacgcataggaaagcggtggcgagcgaggagggggagaggacggtggtcggtttctcatcgagcggggcggcagctggggtttcgtccgcgcatcacggcagcaggccagcagcacg

SEQ ID NO: 2525 - DNA, 2000 bp, Oryza sativa
  N_region (171)..(171): n = any nucleotide
  N_region (173)..(173): n = any nucleotide
ttttatatatacactatacgcatatatataaactttatatacgtatgtatataaactttgtatactgtatatacaaactttatatatgtgatgttttttttttaaaaaaacaaagaaccgaagaaaacaaccataaaaaccggcgaaaaaaaaagaacgcgggcctcccantntgcgcggccgccgggccccttccccctcctacgcgcgccacgcgtccatccgcgcggggtgagggggcacgcgaccagtcgccaattaggaatttcggatgaggacctcgtgtttttcgactgaaaattttacatttaagcccctttttattttttttcataaataggcccctaaagttactatccgtaagaaatacttcctccgtaaaaaaaaacccaacctaagaggagatgtagtgtccagattcgttgtactgggaggggtcaaatcccctcttaggttggtttctttgggatggagagaatcacaaaataactcaatctagattcgttgtcttagaatatgtaacatcctatcctatattgagttattttgggacggagggagtagacgacgagcccaaatcacgtcaaatgtggtataagatcttcacagtctacctctcagccaactcatgtagtagttagctcttaactataaactatatggttcccatgtttctctcacatattttcttggttcctatgcctaagctagttttaagcataccactcgctttccctctctctctcctctctcatccacgttagcattcaaccttctaacggccttttattatacttgctcttacagtgaaaggtactactaaggctgtgttccctcacctctcgcacagaaaacagagcgatggattagtgcgtgattaattaagtattagctaaaaaaattaaaaataggttagtatgattttttaaagaagctttcctatagaaaatattttttaaaaaataccgattagcaatttggaaagtgtgcgcgcggaaaacgaggaggagaggatgggaataggcagtgccaaacacagcctaagaggaatctagtatgtcatatcggatgaggcttctttaaagattccagcaccacaagctaggccatcctcacaacgctgcttcccgccagattccaactctcttcctagctgctttttcatataggttccatcttcccacctgctttttttagctttttttcagaggaagcactcgtgtccatgcaaagcaccgagtatctatgccaaggtccgagggcccacaccttctcttctccacggcatcatacggcttagatggagcggcgaatccactcgacatcaaggcgcactgtgaacagcctcatgggaagagagatcgacattagtcttattggcgccgagccatttaacctaggggccagcctctaaaaagggctccagaaaaggattcatttctgaaaatagttttttaagatctatttatgaaaatagtctaaaagaaaagctaaattgtaaaaatttcagtgttcctcgagctcctctgctttatggtctttcatgggccagccccaaacacactaatcaaatggaccgttctcctttgtgggtttccatgggccctacccaaacgaaacctccagatgggccgtactctcggctgcccatgggccgggccccaacggaacgcacggataggttgggcttgggctggattggacatgacgccatttgaaggcccatccagacagcgagagcggcgccgcggccgctacttctacccgccgccgcctctccactccactccactcctcatccactccctctcgccgccgcctgcgacctcgccgccgcgcccgcctcacctcacctcgccggagttcccccacggtacgctccctttcccttctctcgcgccgccgtccggatccgccgtgtcgtaatcaccgcgttctataagaggaggatttctcacgatttggtggttttacgtagatcggggggcatccggggtggg

SEQ ID NO: 2526 - DNA, 2000 bp, Oryza sativa
  N_region (624)..(624): n = any nucleotide
  N_region (1033)..(1033): n = any nucleotide
  N_region (1066)..(1066): n = any nucleotide
agggaggttgttccgaaaactcaaggtatgtatatatcccaaaaatattcggcatgctgggtcaccagtactcggtatttgccaaaatttaataattgctatgagaacacctagaaatggaacccacaaacaacattctactgataagcttgtattcattaaacaggtagcatgagacctggaactgcgcaggcgacaggaggatccttagccaagccttccaaaagacggtagaaatagaatctgacgaagcatccatgcaagtttggcaactgtgatgtaactcaacttttgcgctgaaacacacggggggtagtttaggaggtgctactggtgttttctgtgtatctgtataagtttcgctggtcgactcaacaacgtatcttggttaaagattcatgatgagcagcgaacatttgtaccatttttgtcacggctttcatgcggtaattccgtttttctttgcgcgctgtgggttaggggaaaaaagtaatcctgtgagaagaaaagaagttaccctgtgtgtcagtgagtggcctggacatctgtgagacaaattttagtccctgagagcaaaaggaaggggaataaaggcaaaacctgtgagaagaagaaaaataagcnaaaaagagatcatcatgcaaaagggaaatcatggggaaaaatatcaaaaatgagaagaatagccaaaaaaaaaacacctgcaaaaaggaaatataaaaaatgagaagattagcaaaacacatcctgcaaaaaggaaatattgtggaaaaaaattattagcaaaacacatcttgcaaaaaggaaatcctgtaaaatggagaagattggcaaaacacatcctgcaaaaaggaaatataaaaaatgagaagattggcagaacacaccctgcaaaaacacacctgcaaaaaggaaatatcaaaaatgagaagattagcaaaacacatcctgcaaaaaggaaatccctctgtgaaaaaaaagtgagaagattagcaaaacacatcctgcaaaaaggaaaccctgtgaaaaaaancgagaagattagcaaaacacatcctggcaaaanggaaatcctctgtgaaaaaaaagtgagaagattagcaaaacacatcctgcaaaaaggaaaccctgtgaaaaaaacgagaagattagcaaaacacatcctgcaaaaaggaaatcctgtgaaaaataaaatgagaagattagcaaaacacatcctgcaaaaaggaaatcctctgtgcaaaaaggaaatcctgtgaaaaataaaatgagaagattagcaaaacacatccgcagcaaaaaggaaatcctctgtgaaaaaaaatgagaagattaaatttgcggtgagcgtggatcgaacacgcgaccttcagatcttcagtctggcgctctcccaactgagctatccccactaacatggtagattgcgcatttatttgtactgtattatctgagaaaaaacatgcctatggacatcgcacgcaatgctcataactcctttacaacggtactcctgagttctgacaagtatatgagtgaactgatgaaagtgaaagcccaaagttggtaaaatggagtacttctacccgtgactgatgaactgatcctctcattcaacgaaacctgtgcaaccgcaagaataaaggactgacctgacaaaaggacgctaaacctgcctgatttaaagcagttgaaacaaagcaaagcgctttgctgttccagaatatccttaaaaagaacgcagaatgatatttcgaaggtacacagtgtatctacttgcacctctgacacaatgatggctgatgcagcatcatgccttccaccctctccctctttctagctggcatctggctcctcttatcatttccccttttccacaaagaaaaagaagcttaaaatccatggccctacaagaacacaagaactcaagcaccatttctccatgccaacgcgaatcacataagagttcaagccaaagctaagaggccatgagatcagct

SEQ ID NO: 2527 - DNA, 2000 bp, Oryza sativa
tccagtcaactttgatatatggatgcttttcttctgacttcagcaaacgcttccaccaacctttcttttctttctggatcgaacagattatgtttcgcaaacccatctttgtcttagttttacttccctatatacaaagcaaaatgatagttagcccactaaaagttcaaaataagattgataatatatgtcatcaagattggctgggaagttattatcatcagctagcagctctaagaaaaaagaaatccagtgatcgacttcacttatttgtttgctcagtttcttattttggtgatactacagtttacaacatgcattagtaaatgttttcaaatcttttatagaagtcatattcaacgaattgtgtggattcctactttcatacaaatgaaatgtgctccattaaagaataaagaccaagcaacagccaacacattaaatatatattacttatatgatcatctcattaacattttaagttcatccatgcaagatcaacccaaaagtggaaagtgaataaagttagtacatgcccaaatttcaatccagaattgaaatccacaaatactcctacttacctctggcagtacagaatcaaacagctccaaagtgaagctaaatggttccccattagcaacagctaagaagctaaagaggccctgaggttcagtcttcagcactacatctttagcatctggcagtgaaatagtcaagtaaatcttctcagagcgttgagcccacagcacctcaggttgacgactgcatgccattgaaagtgcagccatataagacaaaaataaatgcaaagtttgtcagttacaaggatatagtagagaaatgaaaacagggcaagaaaaggtgtgtcgacaaataacagttctatccctctatacatgaatacattactcttaatggtaaataggatactgtctcacagggaactgcatgataacagattgcagagaacggagagaggagggggggcgggggcgggggtgatggaatggctatagtactatagtcagttatggccccatcagttgccctaataggctgaagccaaagccaaagccaaaatttgaattctcaaacttaattttgaaattgattttaagatattttaaatgtagtttctttttcagcattggcttttaagtcactaagaacacatatataatacttaactcacaaatttttttgataggtacttaacttaagaagtactagaaatcaaacacatacatcaattgattacaataaacacacgtgtcacgatgcacagattatagctaagtccaaacctttatctcaagctattggcctataaaaaaggacaagaaacagcaacggtactagttaattgccaaacgcatattctattagcatgttatgtgcatcttgtttgacagatgtcagcatgtctcactaactttagcatccattccaatgtaacagtagacattattttctagattacaggacatcaaaaatggccgtcctgctttgatattccagcaatgaaacatcataaacattataagaaaccactaacaattgagtatatagttatatactgggtaactacatatcctcatttgcagtaatcccacaagcctttgtatttctaagataacaagaaccgacttcaacattcttgttagatacactaccccaaataagaacaactgaggcagtacataatccgcctgatcctaccatccaatcgaactacatatgtaccattcaatccatagtacaattaacgccctatcaatctcggtgccaagaaacaagatcaacccaccaattcagaaatacacattcggattcagatcctaggaagccgcgacacatcgcgagtctcagcaatccaagaaacacacttcccattgggcaaaagtacaagaaccaagaaaaacccaagaaagggccaaaaccccaacacatggccagaggggaggaggggtaggggagggacggatgaatacctcatggcg

SEQ ID NO: 2528 - DNA, 2000 bp, Oryza sativa
  N_region (296)..(296): n = any nucleotide
  N_region (400)..(400): n = any nucleotide
  N_region (803)..(803): n = any nucleotide
atcgacggggatggctgggcgcgcgccaattgtggcagacttggtccgccggtggaggagccaaatgtgggcgatcctgagcagcatggcgtagccctcgccaacgacgtcgacgtggtccttccacgccctctcgcctcgccccgccccgcccgccgcgtcgaggtggagcagagcaggttgcggttccgcgggtggtgcaccgcctctccccgcccgtgccgggtatccagtacgccaaggacgacggtggggtgtcggggtggccgtggcgcccttggacgaccagcggggcncgagtagcgccgccgaagccgccgcgccagatgccgcaaatcaggagcagccgcggcgtcgctggagatcggcatgggtgaggtggtgcccgggaacgacgtgnaagcggaccgcgcgccgagacggagtcgtcgtggccttcaccgacgaagatggcctggtcgtccagcgcgaacagtgtcatgttcgccaacctctcgagctcggcgaacatgacgcgcgtggccagcgccacgaagccgtagtggtcgatggcctcgcggatcatgatgcgcaccacggagcggcgttgatgtggtgttggtggtggcggtgacgatgatgcaagccgtgggagagcgcgcggtggcaggggcggtggagagctcggagcaggggaagccgggaagtagtccagggcgatgtgctcctgtaggacgcagcatcgccagcgcgaggagagcaccctcccgtcgtcgtgttcgtggtcgcggcaggttcatggagtggcggctgcgacggcgccntggagtccagatctgacggcttggcgaagggaggaggaggctgtgcggccgctgcttgctacggggagtcgatcagcgtcggggttgcctcctgctcctccgccgccgctcctacagcagcgatggcaggcgcggcggcgaagtggtcgagcaggtgcagcgactgggcgtcctccgcctcgatttgggcgtgttcgcggcggagcggtggtgccgtgggggcaaagcgggtggagggggacggccactcctcatcccgccggtgagtggtggtggtggtggtgggacttgggaatgggacgcggcggtggttaatgaatgagagtgaggaggagggaaagggaagagagagagagagagagagaggcggaagaggaggagagccatcgatgcgggcttttggaaaaggatccaactcgcgggccgggtattttcttgcgtaaggagccaaggaggtggtggcctgtttttcatccttgtccatcttttcgtctctctcgagaacatcccgtatcttacttgtcacgaaaatagtcatatttttttctaaacaaatattaacaagatagattaatataaattataccacttcataagcatgcatattaatataaaactagtttaatctatcttgttattgttttaattcacgttcaataccggagacgtatagcttgttgaatataaaattgatgatgcttttaattttaattttgtggttatgtttgaagttgaacaattttgttgtttgattatattggtcaccaaatgaaggatcgatccatggatccatcgtttgttttgcgttttaatttgctatataccacattagcgccggcccgtacgttgtgtgtgtacatgtgcatgcgtaataatcttgccgacgtggcgccacatgacgtccgttcgcccagtctgcgcgcgacacgtgtcctacctgggcccgctccacgcgccagttgagcgcctgtgccaagacaaatatatgggccgagtccctgcacaaaaggaaggggatttgttgggcctagcccaactctctttcattcaaatgcccaagcgcccccggcctgtataaaggcagctacggctacccatctctctctctctctccagtctcctcctccttccttcttccacctcgctccccttccaatccctctctcccccaccgtttctccctcccgcccgccatcc

SEQ ID NO: 2529 - DNA, 624 bp, Oryza sativa
  N_region (2)..(12): n = any nucleotide
  N_region (15)..(15): n = any nucleotide
  N_region (20)..(21): n = any nucleotide
  N_region (25)..(25): n = any nucleotide
  N_region (29)..(29): n = any nucleotide
  N_region (32)..(33): n = any nucleotide
  N_region (35)..(35): n = any nucleotide
  N_region (41)..(41): n = any nucleotide
  N_region (45)..(46): n = any nucleotide
  N_region (52)..(53): n = any nucleotide
  N_region (55)..(58): n = any nucleotide
  N_region (61)..(62): n = any nucleotide
  N_region (65)..(66): n = any nucleotide
  N_region (82)..(82): n = any nucleotide
  N_region (86)..(90): n = any nucleotide
  N_region (100)..(103): n = any nucleotide
  N_region (106)..(107): n = any nucleotide
  N_region (112)..(112): n = any nucleotide
  N_region (114)..(115): n = any nucleotide
  N_region (120)..(120): n = any nucleotide
  N_region (126)..(127): n = any nucleotide
  N_region (137)..(137): n = any nucleotide
  N_region (140)..(142): n = any nucleotide
  N_region (154)..(157): n = any nucleotide
  N_region (161)..(161): n = any nucleotide
  N_region (163)..(163): n = any nucleotide
  N_region (171)..(171): n = any nucleotide
  N_region (177)..(178): n = any nucleotide
  N_region (182)..(184): n = any nucleotide
  N_region (195)..(196): n = any nucleotide
  N_region (199)..(199): n = any nucleotide
  N_region (206)..(206): n = any nucleotide
  N_region (210)..(211): n = any nucleotide
  N_region (221)..(221): n = any nucleotide
  N_region (223)..(223): n = any nucleotide
  N_region (226)..(226): n = any nucleotide
  N_region (228)..(229): n = any nucleotide
  N_region (232)..(233): n = any nucleotide
  N_region (246)..(246): n = any nucleotide
  N_region (248)..(248): n = any nucleotide
  N_region (254)..(254): n = any nucleotide
  N_region (257)..(257): n = any nucleotide
  N_region (260)..(261): n = any nucleotide
  N_region (263)..(263): n = any nucleotide
  N_region (275)..(276): n = any nucleotide
  N_region (297)..(297): n = any nucleotide
  N_region (300)..(300): n = any nucleotide
  N_region (317)..(317): n = any nucleotide
  N_region (325)..(326): n = any nucleotide
  N_region (332)..(333): n = any nucleotide
  N_region (335)..(335): n = any nucleotide
  N_region (339)..(339): n = any nucleotide
  N_region (349)..(349): n = any nucleotide
  N_region (354)..(354): n = any nucleotide
  N_region (357)..(357): n = any nucleotide
  N_region (381)..(381): n = any nucleotide
  N_region (383)..(383): n = any nucleotide
  N_region (403)..(403): n = any nucleotide
  N_region (407)..(407): n = any nucleotide
  N_region (409)..(409): n = any nucleotide
  N_region (413)..(413): n = any nucleotide
  N_region (419)..(419): n = any nucleotide
  N_region (425)..(425): n = any nucleotide
  N_region (435)..(435): n = any nucleotide
  N_region (438)..(438): n = any nucleotide
  N_region (440)..(441): n = any nucleotide
  N_region (447)..(447): n = any nucleotide
  N_region (449)..(449): n = any nucleotide
  N_region (455)..(455): n = any nucleotide
  N_region (459)..(459): n = any nucleotide
  N_region (461)..(463): n = any nucleotide
  N_region (472)..(472): n = any nucleotide
  N_region (474)..(474): n = any nucleotide
  N_region (476)..(479): n = any nucleotide
  N_region (481)..(481): n = any nucleotide
  N_region (484)..(484): n = any nucleotide
  N_region (486)..(487): n = any nucleotide
  N_region (489)..(489): n = any nucleotide
  N_region (497)..(498): n = any nucleotide
  N_region (500)..(500): n = any nucleotide
  N_region (502)..(502): n = any nucleotide
  N_region (504)..(505): n = any nucleotide
  N_region (507)..(507): n = any nucleotide
  N_region (511)..(512): n = any nucleotide
  N_region (520)..(520): n = any nucleotide
  N_region (522)..(522): n = any nucleotide
  N_region (524)..(527): n = any nucleotide
  N_region (532)..(536): n = any nucleotide
  N_region (539)..(539): n = any nucleotide
  N_region (557)..(558): n = any nucleotide
  N_region (561)..(563): n = any nucleotide
  N_region (565)..(566): n = any nucleotide
  N_region (569)..(569): n = any nucleotide
  N_region (571)..(571): n = any nucleotide
tnnnnnnnnnnnaantgatnncccncttntannancccccnaggnnaaattnntnnnncannaannttttttttgaaaaaangggnnnnntttataaacnnnncgnntgggngnnttttngggganngctttttccnccnnnggggttttcccnnnncccnangtttttcnaaaaannttannnggggggggggnngtnttttttncccnnttttgggggncnaancnnaannttccccccccgananaaaaanccngcnntntaaagccgggtnnaaacaaagagggttttttaanggncccccaaaatttttttnaaaaaaannggggcnnanggtnaaaaaactcnaaggnggncccaaattttttaaaaaaacccgngnaatttttcggggaacccccnaaangngggnaaacanagcganaacgataatntgngnnaaatgngnaaaatnggantnnncaggcaggntntnnnnanggncnntntttcaaanngncnanngnaaanngtgggganangnnnngggtnnnnngtnaaaaaaaaaggggggggnnggnnngnngcntngggagggttaagtggtggatttgggcctagaatgatggcctaggaggcggccg

SEQ ID NO: 2530 - DNA, 545 bp, Oryza sativa
gcttctttttttttaaaagatatgtttgatcatttgacttgtgaattgtgattttgcagtttacttgtccgggagactgggagtagctcgttgccatggtcaggcccaactagctctaggcaaaagcttcctgaagcccagccacatatggggtttggatttgatggaccgaattttcccacaagaattattgacagatgagtggcctgaaacacaattgatgagtagacatgatgaatttgaacatttgtaatttagcacttgacactttgcaacgcacaaatgccgatactacataagtatgatgtgtcctttgctgagggtgaaaattcaataggaaggcatcagttcgtgaaaatggaatcaggaaattcataattttgtcaaatttagcttgtgtttttagcccaaggtccatcatgatcagtgcataagcacgagcagctaaggcctatgggcttccatgaagagtaggcccattggttaaaccggcccatttgtcgcagaattttttacctttggacttctattaaccggctttttcc

SEQ ID NO: 2531 - DNA, 1613 bp, Oryza sativa
  N_region (10)..(10): n = any nucleotide
  N_region (129)..(129): n = any nucleotide
  N_region (153)..(153): n = any nucleotide
  N_region (165)..(165): n = any nucleotide
  N_region (173)..(173): n = any nucleotide
  N_region (940)..(940): n = any nucleotide
ttttgtttanaaccaaactgagccacaaactaagccttacccactagacatgtggaattacggtattgctttgcaacataggcccgagcttagtccttatattggccggggtgctacttcccacaactngcatgcacccaaaccccaccgaanaacaggttttangggctttnaaagaggaatagaggggtatgtccaattccaccataagccaaccattccatagtatccaagtgatatgagaattcccaaagtctaaagttataaaaccacctaatgttgcctaattaatcagcgaagcatctacctaaattcatactagtggaaccatgaatagagtacccactggttggggttttttttatcctagggtgaacaaggtaataataacaatagcaataataataaggtcataacaaagataaataggcatggctaaataaaacaatgataacgcgggaatttaaataaagcgataatgcattaatttaaatcaaaataattttataaactgggattcaatatgttcaaggatgatgtgacttgccttgctcgctttcccaaacgtcggcttcaacctccacgaaagcggatcttccgaagctgcagcgtctacacgaccaacggaaaggaaaaaggcttttactctaataaactccgtataacaagcaggaacaaagcacaaaaatgggttcttgacttcttaaggaaaaattagagacttgaacggtccaattccgagttcaaacggtccaattccgggattcgcggcggcggcggcgctagggcgcgggcgaggcggcgggagcggcgggaggaaggggatgacgggtgggccctacccgtcagcgagggtggcgggcgggcccgcccgtcagcggcgcgcgcgcggggaggaggccgaatgggccgcggggagaggagagggagggggaagganatgggccgagccggcccaagagggaaagggaggggaaagggactttttagagcttttctttttataaaaccattttaactttgtttatttcttaataattattatttgtgctctgaaaattccactaaaatttatttacgcattttaggcttttaggaaatatacaaaaatcctccaagccttatttgacttttaactttgcacattttaattgttggaggctttcacacggattttaattattctaggcataatttagaggatgtattttagagtcgttttgggacgtgacagagaagcagcatcggtcagcattgcgtccaagctatcggctaagccctttagggaatggttcaacaatttttatgataggttccccaagaataccaggatctggtttgcatatgaaggatctgctagttttgagctgccaggtgattttcggtttgaagagatcaattctgaaaaatatgacaaatcccgagaagtattctcagcagccatcagtccttgcatccttcctgtcggcattcaccaaggcaagaatatccaaatgacctacgaattctatcacccgacaagtgctgcaaggcaattcggcatgggtcaactgcaatcagcctattctttgccgacaagatccaaagtagaggagaaatcacatcaacactca

SEQ ID NO: 2532 - DNA, 2000 bp, Oryza sativa
  N_region (150)..(150): n = any nucleotide
  N_region (206)..(206): n = any nucleotide
  N_region (239)..(239): n = any nucleotide
  N_region (310)..(310): n = any nucleotide
  N_region (396)..(396): n = any nucleotide
tatttggatttttatttgaattctaaccgaattcaaatcaatttttgcacgtaactatagagcccgagggagttgcggatccaagcgaaggccaagacccgcaagactttgagcaaggcaagtcatcactattccttgaacatgttgatnctaattgcgaaattgttttgtttacaaataaaattgcatgcaatgatgaacatccnacttgtgattatgccatgccttgattattgttnacccttaaatctttgtaaccatgtttacgtatgagtccctagtcaactatgacaattgcttagaaatgctnttctagaatcatgcatactcatatttgtcaaatgctatatgcttgggcaattacctttgggaaggtaattgagatgcggcatgtgnagacatgagcgccacattgccatgatgttgatgacatgatttgtgaaaggagaaataaaattaaacaactgttttcgactggggcggacggaggatttgggtggtatctggaaaaggctagtaccgtccccggtcaattaaggaccgagccatgaagttaagcatgaaacgacccccgtacaaccgtacttctcgaatgggtatagacctagcggattagatagccgagcggaggcagtatccctgcatagatggttcacccctgagtgaggcaggtgcgctacgatgggacagccgttgaggtagggccgagaggcgtgccctacatcggtgtcgccattggtaggactgccatgagtgtgtgagagagagaacttaacttgaaccataatttaatatgtgtgtgagacttctctttcccgggagcgccagaactcctctcactgctagaaacatggacgcctagagtgcatgaggatttaagttcatggagcgggtactgccaatgcgaggttatcgaaaagctttgccgtgacgcgtctcatgtgttgggacgaggctcatgtgttgggcagtcgcggagtgcgggtaaagtgtacatccactgcagtgtgagtaaaccaaatctattcgaatagccgtgctcgcggttattgagcaccgggacatgtattacacttggctagactctaaattctttaacttgtgtgggatgggatattgcatgatgatttttatgctgatggagccacttcctgagaggcgggaatgtggacgtcctcagaaaaccataacgactcaatgacgggaagctatccttgggatcacaatggatggtggacagaaccgtcattgtttaatatgaacactggtattaaaaacttgatcagtctatgctaggtcttaggcttgtgaaaagaattacaaaacttgctttgcgcaaaagaaccatagccatcctttgaatttctctgtcatgtgcatcattgctgtggtggcttgctgagtacggttggtactcacccttgcaaatataaaattaatcagaagcgggagatgaagcctcggaggatccctatgcctactatcaggagggagatgaagacgatggcgtccagtaggtcttagtacggtcgttgcctgtggcaatggcatgccgctgcctgaattccgctgccttatctacttctgcttttggatgtattccggaccgctcggtccgatgatttaaggctatgcctgcgggcctatgatgtaataattcgtatcagacactcgtgtatgtgcacttggtattccagctatgaattcgtgtgtaccaaactacttgatccagggaaatggtactgtttacacgattgattcctgttataaaaacgggggtccacagagctggtatcagagccatacgactgtaggaaaagaccaaaaggcgcccaaccccttttctaagttggccaagggagaaattcccatttagtaatactttcaaaaataaaaacgctatgtttacaaaactcggtacaattttcatcttactcttaactattttctttacaaaaacaagttttaccctcaactgactttgggtttttcttaaaatt

SEQ ID NO: 2533 - DNA, 2000 bp, Oryza sativa
  N_region (9)..(9): n = any nucleotide
  N_region (41)..(41): n = any nucleotide
  N_region (54)..(54): n = any nucleotide
  N_region (80)..(80): n = any nucleotide
  N_region (110)..(110): n = any nucleotide
  N_region (113)..(113): n = any nucleotide
  N_region (234)..(234): n = any nucleotide
  N_region (268)..(268): n = any nucleotide
  N_region (1242)..(1242): n = any nucleotide
cgcactcgngaaccttcgcaacgacggaaacgacaagctancacgcaaaacgangaaaaagactaataaaaaccaaatanacaatacataaaaagtaaacaaacatgtanatnataattttagatgaattatgagacttgaacggcctcattctgacttcaaatgaatttattatgaattttacaagattaaatctaattaaagcccatttaaaaagaattaaataaatttaantcaatttatggacaattttaatatgtagatcttnattttatataatttttgcaacttgaaccacattaaactgagttacaatgaattagttatgaatttttaaagattaaatcggattaaaacacttatatgaattttaattgaattatgacgcaataatgaattatttttgaaaaggaaaaagggatttattgcgtcagcggctagggtttcgcggtggaccgggcgcacggcggcggttcacgggaacggatggccgagatcgatcctatccaaaacggacggccgagatcgatcggtccacgaccgggccacgacggacggcgacgatgacgtcagcgatgacgtcaccaccggcggcggcgcctcggcggctcgacagctcggacggcgcaagcttgccggcgaacgacggcgcggcggcgcgaacggagggcaccaacgggtagcggacggcacgacgaactcaccggtgaccaaagcgacggcgggagaggaacggacggcgacggcgacgaagaagaagcgacggcgctcttcggcttgacgacggcgacggtgctccggcggtctacagcgacggcgaaggggcggacgaggacggcgacgacttggcgatcccgacggcggtcttcccgagcgacgacgatgaccggaatggcggcggcgcacggctggagcgacggcgacgacggcggcgctagggcacacggcgctagggcgtttccgacgacgagaggcgaaggcgagggtggcggcgggtagagaagagctcgggggtccttatataggtgcaaggaggcggcggcgaaggcccacggcggccggcgacgagaaggaaagattggggaaaaacgaatccgaatcaaactcgaatccgcctatttccaaagggaattgaccagagtttctataagagaaaaggaagaggagatcgaggagattatttcccctcaatcgattcggccggagaaggaaaggcgcggccgaattggaaagcggcggcgncgcggctcggctagggtttcgggcggcggcggcggctcgaggaagacgaacctgacaggtgggacccaccctgtcagcgacagagagagagaggagagcagcgcagcgtcggcggactgggccggggagggagagagaaagagagaggttttgggccggctttcggcccaaagccaaaaggaggatttaaaaacatttttctatttaaattattcatgaaatgcaattccatttattaaaaatacttccttagctcaaataaatcctagaaaaatctaggaattatagaattaagcaaagtatttaatgaaattttatctggccccattttatattgagatttagcaaattaaaattagatcttctcttttaagcttttaagatcatttctaattattccttttaaacaacaatttataatttaagaatttttaaacaagaaaagctcttaacaatcataattagatcattattgatcaaataattactgaactgttctttgtatcatttaggaattgagctctgaaaaatccgagaaaatttcagagagttgacttaatcatggagaatttaataaaaattaaatccatccatgctttaaatttaggaaattttatttcccacatttaacttcacttgtaaattaaagatcatttaatataaattctaataataatttattaaataatttataaatcctgaaacaaaaatcaggatgtgacagtgtcgtccaagatgagttggaaggaagggttcaa

SEQ ID NO: 2534 - DNA, 2000 bp, Oryza sativa
  N_region (1501)..(1501): n = any nucleotide
  N_region (1507)..(1507): n = any nucleotide
  N_region (1509)..(1509): n = any nucleotide
  N_region (1595)..(1595): n = any nucleotide
  N_region (1623)..(1623): n = any nucleotide
acctaaccctgtacacgtgggctgataagtggagggggtcgaagcagctcgaccccacacgagggcggcctcctccctctagctgggaggggcagtcgccgctccaccccaggctcgaccccctcggggggagccacgtgggtttgggggcggcccaaccccaagctgggagggggcgcgccgcaacacctcggggttgacctccatcgggggagccacgtgggtttgagggcggcctcctccctctagctgggagggggtagtcgccgcgccaccccgagctcgacccctctcggggggagccacgtgggtttgggggcggcccaaccccaagctgggagggggcagccgccgcaacaccctgggcttgacccccctcggggggagccacgtgggtttgagggcggcttcctccctctagacgtgatacccccgggcccatatcaccgatagtccccttctgtgtcgtgctaggattttatctctaggaatctatcttatctctacgattatatcttatctctataatttatatttgactcttatctctaactgacatatctgtacttctgacacaaactctatagaatttatagttggataggcagctgcttgttctctaagctgaggacgtgggttaagggtgtgtttagttggcaaaaagaaaatttttgaatatcacatcggacgtttgaccagatgttaaaaagggttttcggacacgaatgataaaactaattttataactcgcctggaaacatgtatggagtattaaatatagattaaaaaactaattgcacagtttccatggaaatcgcgagacgaatcttttgagcctaattagtccatgattagctataagtgctacagtaaccaacatatgtccaaagattcgatgtgatgtttttgggaaaaaaatttgggaattaaacaaggcctaatttgtttggttgataaactgagtggaatgcctgaacaattatatgggcttagcttggtggaaggaaaagtaggtggaaggaaaagtttgtgatgatgttacctgacaagtgcatacctgagttttttttaagtcgtggctgagctaatggatcggaatcactcgtgcagtttcaatagcaactactccatccgtttcatattacaagtcgttttgctttttttctagacaaacttcttcaagtttgaccaaatttatagaaaaatataatattattttcacacaaaataaacatattatcaaaatatatttaatattagatttaatgataccaaattaatattttagatgttgtgaaatttatctacaaatttggttaaacttaacaaaatttgactagaaaaaaagtcaaacgacttataatataaaaaaggagagagtaaatattaagctactggctactgcacgcaatagcagccatccatttttttttggtgaacggtccagatcgtaggtacagtaccaaaacatacgtacataacactacttgctaaagtggtntcccantncctaattatagatggccatgtaggccgcccagcacgacacggcccaggcccggccgtgcttgggccgaggcttgtcgggtcggctnggcccgaccgacgcactgtgccagcccntgtgccacactcacagcccaggcacggcccaacatgacttgggccgtgccgagccggcccgaaggcacgatggcccatcgtgctttttctcagaataactctaattttgccccctcctattgggctgtgatatatatagctaaaaaaagtctattttacctccctcttcttagggctgtggtatataaatagctaatatatgtctatggtccctattctttgaacggtgacatttatatggctatttttaatccctatactttgtgtgctgggctggccctaccgtgccgggccagcctagcgtgccggtgaggaggcccaggcacggcccaacggtcgggccgggccggtacgggcccgacctaagtcgggctgtg

SEQ ID NO: 2535 - DNA, 2000 bp, Oryza sativa
  N_region (256)..(256): n = any nucleotide
  N_region (309)..(309): n = any nucleotide
  N_region (1482)..(1482): n = any nucleotide
ttcatctttgcataggtctaaaaactaaaaacataaaggtgaccacgtgattaagaaaaaaaattgtcgtaaaaaattgacaacgatcaaatagacagaagattccatttgtcgagatcgatttactacaccctgattagtcattttgacttcaacttagctactccagtctcatactaaaataaaatggggtcaccatgtcctatacattcattaaattagatatatttcttgacgaggacttcagattttttcntttttatttccgaggacatgcggcagacctagggattccaccatgccttggtncttgagccaatccaaatgcctagccctgtttagattctaactttttcgtcacatcaaactttcctatacacaaattttcaacattccgtcatatcattccaatttcttcaaacttccagttttagcgtggaactaaacatagctcgtttttatgttctcccaactcgccactctcgtttttcacacacacgcttttcaaactgcaaaacggtgcattttttaaaaatgtttttatacgaaagttgcttaaaaaaacatattgatctatttttagaaaaaaataaatatttaattaatcacgtgtaaatggactgctccgttttccgtatgtacagcttgggttgagaacataggcttccgaacacaactaagttcatgactagtaagatgagatttcaggcttgcggatgggttccacaagtctgaatttccgtccaccatgataataccttgctaaattaaaacggttcgatgaaaacggacgaaaaccatctttatcgttttcgttttcacatgtttttaattggaattgaaaactctgcatatggaaacggaatcgactattatcgaatacgaaaatgtagcgaatatgaaaatgtagcgaatatggtaacggatatttattgaaatataaaaagtctttatactgaacctctcagatcaaccaagagatgtatctaaatattttttctaaaacaataaatcaatatctatatcttttatcaattaataatacaaatagttgtaaagtgtaaactatatttatcaatagctaactataattacaaatagtatggtatgccctagtagcaataaaaaaataatcattagacaaataaaagctaaagtactgaactagaaaatatctctatttaattaagtacctcaatacaatactcattccctcacggtaaaagaaaaaggcattctcattacctcctctaggagactaggactgcaataaatctttcattataaaatttcacttgggagatagattatcacatggtgaactgccaccaactactccctccgtcgcataatataagagattttaagtttttgcttacactgtttgatcactcgtattattaaaaaatttttggaattattatttatttattttacttactttattatttaaagtactttaagcacaacttttcgtttttnatatttacacaaattttttgaataagacgagtgttcaaacaatacaaacaaaaactcaaaatcccttatattatgggacggagggagtatttcacaatgcattcatttgccatcctctcgatcgtgagtttatatatacagacagacaaaagcctacataattcggtcgactcgtttttcctcacccctaaggccaataatgccaaaagaaaaaaaccctaagatccatgagcaagcatatgcagtgttaattaattactccctccgtttcgaaatatttgacgcaattgactttttatcacatgtttgaccattcgtcttattcaaaaaatttaagtaattattaatttttttcctattatttgattcattgttaaatatatttttatgtatgcatataattttacatatctcacaaaagtttttgaataagacgaacggtcaaacatgtgtgctaaaaagttaacggtgtcagatatttcgaaacggagggagtgctagtattttgattaattgga

SEQ ID NO: 2536 - DNA, 86 bp, Oryza sativa
  N_region (10)..(10): n = any nucleotide
  N_region (22)..(22): n = any nucleotide
  N_region (53)..(53): n = any nucleotide
  N_region (60)..(60): n = any nucleotide
tcgatgggcnctggatctgcancctggttgggctcctggcccggtgttttgcncataacncttgctgctggtagaacaccaggaac

SEQ ID NO: 2537 - DNA, 2000 bp, Oryza sativa
cttgaatcctcgctggttacatggtttcggcaggtcaggtcggagggtctcatgacataccgccaacagcccctcacgggcaagggtgagttaggagcttcggccgagaattaggagcttctgccctgccctgcgctgtgtgcgccacccactaccgcttgcctgcctctacctgctccctagctacacgcaagggagcaggcagaggaggaaggcgacgaagcttttaggttaagtttaggttgtttttggtttggatttgtcaatcttaagtttgaaaatttaaattgtcttcatatagagctttggtcaggtatgtttgagtcttaattacatactcaaacgtacgtaattatgtactcgcattatgtactctgccggtgctcttcatctaattagactggtatgaggcgccccctttcgaccgacgctcctgccgaaacctatactggagtcctgcagaaaatgtgtacactttttgcatatgtatttttatggttagtaatgttttgtagctttcgccttttgcgaacggcgaagccatccttacttttcctttgggctgcaacgaacagtgatgggcttcccttcgtgggcttagcattgtgcggcccggtcaatgggaatttaccgtttcgcctacccttgtgacacgtggcggcttacgattgggtgggaaggcgaatcgacgccctggtaggttatatatattccacccccctttttcaccgccgcaccccagtcattttcaccgcgagctctctctctcttcaccctctctcttcatggcgctcttgagtcgctagaccctttcggccgcttctcttttcgccaccgcccacacttttcaccatggtcgctcgcaagccaaacccagcctccgtgacgggccctgatcctggcatgatcgatgatgacaccaccgcctatctgggggcttcgcttgttgacgaggaggagttggcgaagctggtcacctctggcgtgttggcagaaaagcaggccgctgccccgggaaaggctgtggtgccgaagcccggcgacaaccggacggtagttttcaccgtgttcttcgaggcaggccttcggtttccatgcaacgtcttgttgccggagatccttcgcctttttcaggtggagctcccccaactgagcccatcggctctcatctggatcgccatcttcgactgggcgtgccgaactgccggattctaaccaaacgccgagcttttcggcactgttttttatgctcgggagcgtgaacttcaatgttcgccctgagcgctccgatctctggccggtcaacgcctctatgtccaagtgggatcgccactggatgtcaaagtggttctaccactccatccccttcgaggccgggtccgacgtggcgaaatctctccaatggcggcacagagcgatcgcgccgaacaagaagcccaaggtcgccgtcgatggcgctatggaagcccgtttcgccctgcttcgcaaggtctgctcccgccttagctgccgcgacctggtggaagagttttgcatgcttcggatcttccctctctcccagttgtggcaagtcgaggtgaactaggacgaggaggtcgatggcctaccaaaacttgtcatgctagagggggcgaatagtaagcctctgctttcctttgtgtacctgtctttcgctcttttttgcctgttcggcgcctaatacgatgacacattttgtttctgtagtgttaactcttgttcaggccgaggccgaagctcggaaggtgatcggcgatgtgccgatcacagaatacggccagctgcttacacggcaggcggccggccgagcgaatcgcgtgtacgacggcgatctcccctcccgggagaagccctccaaggccgatggcgacgaagggacctccaggaagtgaaaggcccctgcctccactgactctgatgccgatgatgaggacactgtcaacgaccgtgacggcgaagaggagggggaggatgagggggag

SEQ ID NO: 2538 - DNA, 2000 bp, Oryza sativa
  N_region (167)..(167): n = any nucleotide
  N_region (169)..(169): n = any nucleotide
  N_region (208)..(208): n = any nucleotide
  N_region (888)..(888): n = any nucleotide
  N_region (1540)..(1540): n = any nucleotide
tttctccttcgtctgggcaagccggcgggcggggcgaggtgggagaagaggtcgggcggccggcgaccggcgacgggcgatgcggcagcggcggccgcggcggcggtggcgatgacgacgacgtgggaataggagggccgccccctatgccgccagcctccgtcgcntntccaccagctcccatggatgatgacggcggcctcctcgntctccccgttgcgctccccatcggctcctcatccttcgtgctccgtgaggacggcgtctcgcgcgccgctgacgaggctgccgccccgcgctgcttgccgctgctgttcgatctgaacctgccggcctcgtccccgtcggctgctgccgccgccgaagtcgacgagatggattggtgttgcgacacgctgctccacctctagcctgcacatcaccaaacaatggcagcaatcgccggcgaactctagcctacgacgacgacgacgacgaccaaccagcaagcaacaagaattggaaatttgttactgggttgctgcgctccaatccaaccatcaccattgttgctgctgctactgcgaagaagctctaccatctcctccatagacacggataattttctttttattttcgttttcctccatctctttttcaccactcaagatttcgtttccgccgcctctcttgtgcatctctgtatccaaaggggatgctgctgctttcagctgtaccaatagctagaaaatggtagagaagatgataaaatttggttcaaaatttgtaacgtaaatgttatcggaagacgacggggacgaggcgggcaggttcagatcgagtagcagcggcgagcagcgcggggcggcggcctcgtcggcggcgcccgagacgccgtcctcgcagagnacggaggaagaagagccgacgggaggcgcaacggggagagcgaggagaccgccgtcgtcatccatggcagctggtggagtggcgacggaggccggcggcgtgggggcggccctcctgctcccacgtcgtcgccgccgccgccacgtcgcccgtcgaggtcagctcagccacgagagagagaacgaacagaggggcgggcgtcgattgctcacagtgtatcagaagcgtgcgcgcggaggatacggtgaggaggtcgacgagcgacgaccggaagtcgaacacccgcgcctgcacgacgatggcctccacgaatgacgcgtcccctgcgcgcgacgacggcctccacggtcgcgcccacaccctctcccctcctccatgcttctacgtcatcgtcagcgccaccggcagcagtagcctcttctccgccggaagcggtggtggtggtcaatcaccgaagcaagttagctagagtcgatcggctcggtatttgatttggcttcgattgcttcgccgcgtcgaggccgacggatgagggggacggccgccgcggccatccgcgcgacggcatccatcggcggagccgcccgtcgcatcggccctcctctctgccgcgctccttccccgccagccgccggccacgccggctctcctncccgccgcgtcgaagacgcggccaccatccacgcccagggaaaaatgagagaggaagggagagaagagggaaagagagagcggtgacatggacactctgacacgtggggcctaggtgggtcccacgctgactcagctgccacatgagacgaaaccggggtcaaaaccacctaataccttgaggttttgtaagttgagggatgtgatatatctggttttgcggttgaagaatgattcggtaactcgataacaagttgaggaaccttcggtgtacttttcccaagaaaaaaaagaagatgaaggcccgattcaaatacggcccaatataagcagcccaatgttcaaactgggctgtacgatcagcgctcgtcggcccagatctaggcggagggggaacgtgcggggggcccacaggccgaagcagcgtcttctccacaagctcaggctcgcctcgccacgcc

SEQ ID NO: 2539 - DNA, 2000 bp, Oryza sativa
  N_region (1)..(1): n = any nucleotide
  N_region (195)..(195): n = any nucleotide
  N_region (1460)..(1460): n = any nucleotide
ngccgcccttcaccatgccgccgtgccgcccagctccacctgcgccgctagggttaggggtttgggtggggaatttttcacggggcagagggagaaagagaggggagaggtaactgccacatcatttgccacatgagtgtgccacggcagatcaaagaggtaaaaccagccgaaattggccacgagggggttaantgtccggattgaatagttcaagggggtattatgtctggtatcgtagtttagagaggtaaagcatactttcgcaagagtttaggggggtaaatcagacttaacccttatatttatctggtgcaggagaaagttgagttgaaatggaatcgagattagttatcccggttcaattgccaggcatgcaacttctgttgtctttccatgaatgtgtttttttaaatagttttaaagaataacacatgttaggaaaagagaaaatccctcgtatatccctgaaattttagctaatctcctctgtgcccctgaattttgcttaattccgtataccctctaaaatttgattttgatatcttccatgtcccttctgtcagctgccgtctaatttctatatgaccattttactctttggatgaacatagaaatttatgagttacataattgaaaatgtaaatgtttgtcgcatgagactattatagttatgagtttgctgtgcgatacattatttatgacaatttatttttagataatgaaatgaaacatatgcatttattttttaaaaaagtcataaaaattgaggagtattcgtacaaacataggactaccaacgtccacggtatttttttatgaatgctcctgataaaaaaaaatccattgccctattaaagattcaaataaaaatttaatttattacattttttattttcaaaatttatgtcaaaattttccgcactaattatttaatctcattaattttacaaaatgcacatattgtgcactcaaacaaaaattttaattgttcttcaagcttatattcaaacctaaatcatcaagggcataaaagacatttgcaaccagacttaacagtgaaacaaaggaaaatgtaatggcaagggtatggaagggatcaagttgaaatttcaggggtatagaagggatcgagaaaattttaggggtatgaaaggaattgagtgagttttcgagtgtatacagggaatttactcataggaaaaacacatgaatagaaaaaatataggaattgaagttgcaaatttctttaatcgtataggagtgaaaagcataggaaatatgaagatggagccctttgacagcatcaccggaaactaacaaatcaaaggaaagttttcaacatgttgtgcttcttgcttatttttctatgagattgaaccatttgaatgtagtcctaggaaaaatttcgtatctttcctatgaatcaaagggttccatagaaaaaattctttaggaanttaaatcctccaaattttctaccgcaatccttcatttcgggccctaaaaggcaggaaattcagataaatagttttttttttatcatgacatcacctaggatttaattaggctccacccatacgttgtgcttcccattttaagtattacctgtctacctcggagccaccggttctcatggctgcttccttccataggttaaaattaagtaaaaatgctagcatctctgcatcaacatgacatcccccttaagaaaagaggacgttcagtgctactacactgtcatcaccttcaggaaaaacaaacaaaccagttttggatagtgaagggttttggacagcctccatcttcaagtttacaactaccatggctttaggtcacatattgaacaattgaaagattgcttcgagctaaaattttcatatagtacttagacaccttaaagtacaaaaccaatttagtcagttcagtacaactcaggatggagcatctttgagggagagaagcataacttttgttgctacatatatgtgttagttaac

SEQ ID NO: 2540 - DNA, 2000 bp, Oryza sativa
tgagaagaagcaattttttaataaaagaagacgctatgaaaatacaattgacgtaaatccaaaaggcctgtgttgcattattgcctttgtcgaatgagataattcaacttttgtgacagtgaattggtattgtgttgacaccaaaatataaagtggatatgctcttagtttgttgctgctaactgaacaatcccttattagcaggatgttcacgaaaacaaaatatacgtgcacacagttggtttagcaggatgttaacgaaaacaatcccttattactgtcaagtgtcaaacagcagctaacttaccttttttttgtcctggccgaacatgtctaaatcagcacaaaatcaaaatactccaatgggtaaagaccattttatcagtcaccaaataactaactgaaaattctatgatgatattatttttttcaatcctaaaaacttttatactcataatatttcttacaaggaaaccatttgtcaatcacgagaacaatgcaactgaattgattaggaggatggccgagaaacttacagcaagccgatgagcacgacgaatatgacattcatcacttgtgctccggtgcatgtatatcccttctccaggatcagcttggcatcataagaaatccccagggagtagccacagaagaggagcactatgaccgtgcccatggccatgccggctgcgacgttctccggaacgttggagctgtacgtgctcttcatgacgcaacctgcatttgtcggaccgaatgttcagagacatggcgacatgtacacaaagttaactgaagggaagactgaatgtttactgttctgctgcgcgaaggccactgcgaagctgctcaggaatgtgacaagaagatggacaaaattaccgatcttgtcacacattctcaagacgaccgacgacctcaccggtgtcatcgtcgtcacctcccaaccggatcggaatcacaagcccatatcgtccccgtcactgccccaccgcttgccgccgtctccgcaccatctagacacaggcagagaaatccacctaggagaaagacgagagggaaagaagaggcgaggggacaaagaggagacgacaacctgtcaagcgagaaggagagatctttcttttagacaacggcagcgatttcgtggcggcgttgtggtggccggtggagtggaagaggaagaagcggcgccagcaagagaaaccgacgagaaatccgcgcggggaagacgagacggggcgcgggctcgagccgaggtcgtcgtgacttgtgtcgcatcaggtgctgctgcgtgcacgccacctcttctctcgtttccttcttcactaagccacagacccggccactccgatggcggcgtgcggcttgatccctagtcaaacagtacaagcaaaaacttaaactcccttatattctgtagcagtagctatctacaaataattaaacctctctattgcaacggggttagtatcaagtatcacaagtatgtttgtcacccatgagtcatgactagtgtcatgttgtgttaccattaagcccattttgaactatggattttaccgaaagctgtaaaattccaagggaaatgtatgtatgcaataatgcaagtgcgagtatgcaacacacctgcggagtgtacttcatatgcttcagttttggaagggtcccaaaaaagcattccttgttgggtcatggacgcagccttattccctccagagaactttgacattgatcctagtatcctacggcccaaaaagccacatgaccaaactgcccctccccccagcacgatgaccgtcaccgacccccttaactaactccccagtgtacctccacgccgtgggagctgagctgatctgatgatcccttctcacttccaagtactacacgaatgtaacaacttgatgtgacctcagttcttctcccatctcctcttctccccacctcgcgcgcgccgccctgcccagatgtttctccactccctcttgatgcaaaac

SEQ ID NO: 2541 - DNA, 2000 bp, Oryza sativa
  N_region (38)..(38): n = any nucleotide
  N_region (1991)..(1991): n = any nucleotide
tatgtaggcttagtcactcttagtagaaaatagtagantgagggaagctttggaggagtgcctggaagtttggcgctctctctgacttctacctcagtggatgcagcaatctatgaggaattctgagagtactgagctgtcagtacactctgcttcaagttcggagaaacttctataaagtaaatatccgggatccttttttttatgttatttaattacttagtccaagtgagatagatttccatctttgtaggtttattgtttagtattcgtactaagtgctctagtactaggactattgataaagaaggaatttcatgcgcaaatattagagcagtaattaattacttaggcatgatatctaggttagagattacctttgtttgttgtgtaccccacggttttatcagaggtagacggcaggtggtgacagctctgaatctcgtcctagtagacaagacgcggatagacggacacccacgtgattatgcgtggctaacttgaattagttgtggacgccacccacaagctcacccacgaccacgacgtcattcttgtgcttgcaagtggacatcaccttcttcacgctctcccatggttgagccttcatcaagctttccgttggctacctccatcaagcttgccacactgctatcctcgagcatacccacgatccttcgccaagccgcaataggcttgtcttccaaggtgctttaaatgcttttgcaagtgaagaaagaagataaaagagcatgctgataataaagtaactacagttttaacgaaatgctaaaataagtaacggagataactttcggttttactgaaactaaaaacgaaaacatttgatgctttgaaaccaagagctacatgagagtaggtctaggtgatatcaagccagcgggattccctaccttacccttcttcacccatatctagtggctcacgctgtcatgttggccatatccccttcacatttctaacctctccggtgtcatcttcaacttcagggcctctttgtttgtcttctcccccatctctgttgctgaatccaacatcgacctcgcgtttctgtctttttctcatgaccccgaatttctctataaatccgcctcctgccccctaccattctcctaccatcttcaacccccaaaatcctaatttaaagaaaatctattttagtgccatcccatcgacaccaaagcttaacaagaaagttattgtttaccagtgagtcaatcatctccctttctttcctctcttcctgcctccagtccaagatggaaacagatggataggctgttggatctcgatcgaatgacactaatcaatagactgaaatttgaactatttgtatccatccacttaaatttggggaatttcggttgaacgatgcaggaagtataatttttttcctttccatatgctcgctccaaaccactcttcccgtagacaaaattaccatcgtaaaaagggatttcgccaaaacaccactctacatttaaaaaattgcatgtaaaaatatttgtgcggtatttacttaaattgatttaactaagtgcattttggtcaacaaagatgtgagaaaatggagaattgtgagaaaatggcatttgggtgaaaccttctgcattgagactggcataatggaaaatcctaaatgtaaaatggtagtactgtattatggcaaaacccctttttaagatggtataatggcaattttctcggcctgactgacgccggccgacctcgccttctccttccccggcatcggcgaccctgaattgcggctgccctcgcctcctccccgcggccaccgcgtcgtccctccgccggcatcagctcaacgccgccgtcctcctcccttcgccggcgccgacgagccgacgaccactccacgcagccgccctcgcctgctgcatcgaccctgagcggccgcgccatcgcctccgcctccgccgaccgcgtttttttcccccgatcggggcccngaggaggcc

SEQ ID NO: 2542 - DNA, 2000 bp, Oryza sativa
tgggttcaagagatggattctccgacaacctctataagtgtttgtatatgcaatatttatctattgatcctcttttctaatatcgccatgtcttgaagtcgatcctttcgtccctttacgctgttctgaatgcgtattaactaagccgtgtaatcggaaattggctttaccaacttcacgattgggggctaggatttcgtcaacttcagcttggtttgttataagatttaagttgcctttgtggaaaaacgacttttccataaagatagctgggagctaggaagggtaccatactccaattgctgagggcagatttagagagaatactcttttattgtcacatgtaaattcaatttattttcaatttttaaattcatattatattgtgttacccttgagtgctcgcttggagaccatttgtatctaacaatctgttctgagtattgatttcagaaaagtcatatttcagggttttgtcgcagattatacaattactcgattactcgagaatggttggtggagttcgacgaagattacggaatgtagcgatggtgtacccgccgagataaaaattcttgacttcaacccaaattctcgattacggcgagacaagaaatttagtcgcacactctgtatcttctcgatcgtccgagaatggttaagcgagcattgtgactgttgttcgaaggtcttcggttgagaacattaactcgttcatatgcgttgccgccaaaattttctcaggctcgtttatggtagttgtttagacacaattcaaattcacttatgaactgttgatcttgtttcaatgatgctgagtactccatgtcttctcaattattatcgagaacgaccaagtgagcatgacaactttgacaggaaaacgcggatgacaaacatgaattcatttgagttgaagtcaggggctattgtcatggttatgaataccacatacccaatagtaatagactaagttttcagtggcacccagctgatatcgcgaagcatttttttaatatggcaaaattgcaatggcatggatctaattaaccctaaaacaaaatgctacacaaatacttttagagttacttctaataccgtgaaaaaatattcccatacttttagtactggaaatagttacttctatttttcaaaggtactttgtatgtacacatgattattttttaaaaaaaataatatagtgattacttcaaataaaaactatccaagtttgcatcttctctacatttgcatgttaatttaatttacttcacatagtttttgttattttaagtcatccactgagatgcccctgattttttactctaattttacgcaagtatacaacacaaacagtcaaactatatataggaggtgcggccgttggcgcgcctcagcatcctcaattcttgatgcgacgatcgatcatattttccagataatgaaggtaacttccgatacaaataccatcattttcaaaaagaaaaagatacaaatgccaatgatagctacaaggacgcggtgaatccatccaacgaacatagcttgcagaaaaagttaatcaagagcaaattttgtcaagcaaattgacctcgtttttttcccatcaaaaaaatcgaccccatttacaaattttactaggtaaaagcaattttatcataagccatgacgaattaattaattggcgtgtgccgttcgtttgttgctagtcgtcgtcgttaatccgatgcagataatcccgttcaattcctcaactaatccgacagttaattaacgggatgcaccatgtcggagaagctgctccaaccaatggattaatttaatcggggcattagttaatcattttcttggtccaaatccgccttattaatatcgatcgatggatagtggctcagctcggagattcggcagcagctagctgcctgatcgatcgatcgtcgtcgtcttcatctccggcgagctagctgagctgaactgagcttcgccgcggcggcgcgcgc

SEQ ID NO: 2543 - DNA, 2000 bp, Oryza sativa
  N_region (1393)..(1393): n = any nucleotide
ttctcccaaggatgattagcacttataatctagctattaattatatcattagttgcagatgagactaactatataggacaggacaactgcctagctatatatatataggacttatgaaatgacttagctaaatgatttatcaatcattttagaagtgattgcaagactccaattaatgaaacaaactgttcaatcatccatatattaaaaatattactgaattttaaattggcaaatcatgatatatgggttcttattctctcttgtagctaatcgctgtaatatgtatgatatcgagttaccgatcatacatcaacgctacaaaatcactgttcactaaaccttaagtgagttgccatgtctcgtagatggcaccctccaatctctaaatcttggcttcgccactgcggacacgtacatggctggctatataggtcattagcattaggccatcactcatcagtgcattatcgagagcacgagatggcctcgcggattctgcccggcttcttccgccgccgccgctcttccgccgtcgtcccggcggcgactaaggaggagatgctggagctggagaggcggctgtgggacatcgcccctgcggcggcgtacgagctgcagaagcggcggcactggacgccggagcaaggtggcgagggaggccgagaagcagcggtggatcgccgaggagaagcgccgcatcgagaaggagaccaagcggcagcagcagaggaggagctccggcttcgccgtcgtcgtcgtcgtcgatcttgacaaggagcttggcgaggagttcgagaggacgcggttctacgaggagctccggctgcaacaagccgaggctcgccgtgcggcggcgtccaaggtcgtgacgacgacggaggaggaagacgatgacgacgacgtccccgcccgcggcgacgagggctacctcgagaggcgccgggaactcctcggacgttaccgcctcacgtaggccgccggcgcgctgagaaggcggcgcggcggacagtcgccgatgagatcatgagatcggccgccggcaagacagcaagatgcatgtgcgcggagcggcggaggacgatggaggcctcggcgtcagatcaaccatggcgcggcgcggcagactgagaaggcggagacgacgatgctggtttatcatagaataagatcaaaatcctctcttcatatttattacctgcaaagcacctctttgaaatgtttatcatagaataagatcaatattgtcactacttgccctgagaaaaaagattaattaatactgtcatatttaaaatagatacatccatcttgtgaaaatcaaatatttttcttttacaaaatccacgtaattctaggtacattgaattaaccatcagttttacataaaggnaaaaaaaaagataagttgagcatggcagtaaatgatggccagttcctaatctcggcccaggccagcccgagtcatctcaggccggcccaagccatgtccatcgtctgcctacgcaaaaatgatttggtttttttttatgataagcttagtagaatatttgatcttataattttttcctttatccactctggtaggcttggtgttcgcatttgaccctacatttttttttctttttggtgccacacacatctttaaactagaagttgttgtatttgtgtcgaaacaagatttcggcaatataaagggatagcgcacgagacctaaaagtggatggatgtggagacaaggatgtagacaggttcagaccctctcgatgagaggtaatactgagttgcatgcaccgaccagttcaacccaaaagcttaagctgatgaggaaaggcgggcaattcactttatattccaacactccccctcacgcgcgaccccctcaagcctctatcgtggaatagaagtgggctacaatttttatttaattgcgtgccagccaggattcgaactcgagacctcttcggtggaccatccgtgctctgcagtcggaatcctcg

SEQ ID NO: 2544 - DNA, 2000 bp, Oryza sativa
ctggtgtgttattcctttcttctaaactttagatactcccaccgaattcttcatttcttccacggtgatctaggccttcgaaagtgtggccatacattaggcttaggcgctgtagtgataccagacgcgagtcaaagattaccaagtacattacttctgtgttaaccttgcctcccgacatggaaaacaaagcacacaattatagtgagattaattaagtattagcctaaaaaactttaaaaatggattaatacgattttttaaagcattttatataaaaaacttttataaaaaatttaccgttcagcagtttgaaaagcatgcgggtagaaaacgatggaaatgagttggaaaagagaggaaaagaacacagcctgctgtaccgtcgtcatgttcgattcgtgattcagtttgtgaatactccctccatcctaaattatagggcgcccactttttaaagaaagtcaaactcgatagttttgactaataatcatactaactatatctatactaagggtgtgtttgaggagaaggggattgagaagattgggaagatacgcaaaacgaggtgagctattagctcatgattaattgagtattaactattttaaatttcaaaaatggattaatatgattttttaaagcaactttcctatagaaaatttttgcaaaaaacgcaccgtttagtagtttggaaaatgtgcgcgcggaaaacgaaacaaacaaactcactctctcaccctctcgaacgctgcctaaatagtattatgcatgttatatcactatattcatattttaaaatactttcatatgatgctaatttcatatttgttgggatcatagaataaaataaaatactattcaaagtacattattgaagaccgtgtaaaaaaattataagccttaaaatttgggacaaagtgagtagatctgtaaatgcatcatgtatttttgcaataaggttttcaatgtctctttatctgaagtactggtacatattcgcacacgatcaccaccaaacaggagaggtagggatggcagtgggtcgggtcgggcacgggtagagcgattccatgcccgacccgagacccacacgcccacgcccgacccacgccgccaagtctttcgagcaaaaccccatgcccgatgggtacgggcatgcctgatgggtatccactagataccacataatctgaaaacaaaagtataatttatgttcaacacttctataaatgcataaataacatgcacacacaaatactaaaaacatcaatttcagatctggatctggcataagaaacatgcatacacaaatactaacatcaatttcagatctggcataagatgaacatgctacaaggacggagacacagagtggacgggcttgcctgcgtgcaccgccgcttgctccctcccgtgcgcatgtgcgccgccgcctgcgctccctcccatttgtcgcgccggcgatgcgcagccccctccagtgagccgcgccgacgacgcgcagccccctaccgtgcactgcgccgagagagagacgggagggagtgaggagtgaggagagattagggttagggtaaaatatatataccacttgtataaatgaggatggatattaaactattgaaggtttaatggataattggacatacatgggctataagttttcgggccgggcatgggttacccacgggtgaaatatgaagcccggttgtgcccactaagttcgcggatgacaggttgagcatgctcacggacaaaagaatgtgcccacgcccgtgcccatcgggttgggtatccacggatacccgactccgtgggcatcactgccatcgctaaggagaggcttcaggcttgcggttggcaagatatattctcgtcccaggaagtacataccgcctgcaaaggcgccacctagagatggcaacggggccccataacccgatacccgatgggtctttactctattagaagtcaaatgtgtttcaaatattaaaccc

SEQ ID NO: 2545 - DNA, 2000 bp, Oryza sativa
cttatttttagccaatagatatatttttagaaaaatcttaagccaccatgtgttacatattaaaaattagaaaaaatgaataacaaaagttgtgagaaaaactggatcatcagtttcacttaaatcatttagaaaaaaaagaaaaaaaccgctcatgtcccctgcacttcgccctcccccacacatatgcacaacatggcactaccgaaacctccctacttcgcttgagctctccatctacccttcctgtttttatagcgagaaataatcaaaaatattcaagcatacatgaattttaagctatacatttgatttctaatataaatattgttgtatttatagttaaaccaatgatttaaatatccataatgcctatattttgaactgttataaaataaagcaactaacagaaaatgtcaatagggtctaaattgaactgtttagagaaaatgtaataagttagtaaaaaaatggttcttacatttcactaaaattggaccgacctgcatgttccatttttataataattttaaaatgctcaaacattaatggtcttacttctatcctatagcatagcatagcattatgagttcctccacatattattacacatataagccgcactaaggtttgtagtatatggtttgttgacaagtttatttgttactgtcagacttacaattttggattcatgttaactatgtattttctgatgaaaaagacagtatagatcacacatatcacaagtaagtgaggtataggatatgtctttattaatttactagcaaaatgcccgtgcgttgcactgggtaatgtcgtgttcgataaatgttgattgaatgatttttttaatcacaaaggttttaaacaattattccacgtgtacgtgtatgatatgaactatgttcatgactcgttagcgtgatgattgtatcatgggaggaacaaacggtgaatgccttacgtcacttttacgcaagagtagatggacaaaaatttgtatgattaaaaaaattgtatttaaaataggtaagtttattataaaactaatgaaaaccagcttttgcatatttactcatagtctcgtagtggtgacacgtggatgatatatagcgcatagactttaatatgtcatgtttcgtagaaatttttatctcaaacaaatattagagtaaatatttcgatgattatgatgtgaaaaataaaaaaatagttaaaaaatatcactcgtctgtgaagtagtatgtacctgtacacttatttttcaacggaaatcaatttggtggattagcaaactataggaaattgaacgcaattaacaagtctactataattgtagtttttttaaaaaaaatatcagtggcctggttagataggcttatccctctcgctacacattgcgattgtcgattgaaaaggttaatgagaattttaatattgggattgctatacactataatttaaaagttgatgaaatttttttcttgattttgcaccgaaagcccatttcttccttcttatttagccctacgctagtatgccctttctgttttccccatattagagcttaaaattcgggataaaaaagtccagaaagatcaccaatcggtcagattcggcctgggcggctacaggaggcgcacggtgcaatagatcagttcgcattcgggaaaaaacaacgacaaaaaaccggacgaaaaccaaaaaaacaacagaccaaaataaatcggaacctttgtgtttttttattaggtatatatatacatataaatatatattttctgagtaattgatcataattttccagcaattttaaatggatcaaaataatgccaaataaaattatgtacataatcaaatgaattaattcggcgaaattaaataaaactttattttggcccattacttccataaccggcccaaaaaattggcccgacccgtttagcacatgcgcacgagctgatcgcgcggcgaacggcccatctaacggcgacggccca

SEQ ID NO: 2546 - DNA, 236 bp, Oryza sativa
taaaaatcccctaaagagagagagagagaaacccgcctcggcttgcgaacaagtgtaacaaaaatccccaaatcgatcgaaaagatccccaaaaagaaaaagaaaaaaaacttcttttttattccccatccactcgtagcgggaaagagaagagaggggctctcccggcgctcggagcgcagaagcagcgagccgcttcccgaagggagcaagaaaattcgcgcccagtttggtcg

SEQ ID NO: 2547 - DNA, 293 bp, Oryza sativa
  N_region (7)..(7): n = any nucleotide
  N_region (10)..(10): n = any nucleotide
  N_region (12)..(12): n = any nucleotide
  N_region (17)..(17): n = any nucleotide
  N_region (24)..(24): n = any nucleotide
  N_region (44)..(44): n = any nucleotide
  N_region (46)..(46): n = any nucleotide
  N_region (63)..(63): n = any nucleotide
  N_region (79)..(81): n = any nucleotide
  N_region (85)..(87): n = any nucleotide
  N_region (158)..(159): n = any nucleotide
ggggggnccncncgcgnccccctnaaaaaatttgtaaaaacggngnaaccaaaaaacccgaangggtttgggctttctnnntgcnnnccctcaataattgtacacgcgcaccacaaaccgacggcttcgcttctcttcctcccttcttcgcttctccnntcctcgtgcacgcccaagtctcctcagaggctttatataaagagcagctcgagtccgagattctcccatgccatgaatcgcagctcactcctctgcttccttcctcgctgtttgcttctggtttgattgatcga

SEQ ID NO: 2548 - DNA, 2000 bp, Oryza sativa
  N_region (503)..(503): n = any nucleotide
  N_region (758)..(758): n = any nucleotide
  N_region (765)..(765): n = any nucleotide
cttggcacatatacctggacttaatcagatagaaaacagaaaacccaaatacctctcgttctccttggcgcatcacggcgccatggcgataggactctttctcttgacctcccacatcccacgacaacttcctcctcccctctaatccccaaacacatgagccgctgactgatatgacattgtgtatcacctgtgtactaaattgtttatctttctcctttttcttttcctccattatctttatttttcaggatcaatttccaggtcaaaagagatatccatatacattatatatccagaagttgaagtgtaattgcttgtgaaaatggttcgcaggagactggaacatgatgaaattactagattctacttttgttatggtgaagaacatatacatagaatgatggctgagtatgttctgagaaggtcactccaaaaataactggatgtaagttccatttgctgattttgtcttaagtagatcacctcttccttttttttantatttatttcagtttaattgattttacttttttttttcattcagcagatagatgaggtgatcgactccttaaaaatgctacagatgtttttcatggtccatgcactgactaagcttcgtttattttcaaggtaggctgggcagtaccttaaatattagaatggtgattattctatccatactttaattttaggctttagggtgcaataccatgatcaaaatttacaattatcataattcatctctgcgttattanggttgcncattaggttttctattaatactctcctagttttggaacctctgataaaaatcaaaactactccaaagatgaaaatactactatgaaggttgactttctgtgagaactaccgttcatagtgattgtgcatttacccagtccagatggagcgattggtgctgtttaaaatgttggtcaaaacaatccaatgtacatacaaaatggtcagatttctatgaaaatatagttgtcataggcgttgggcagagaggccgaggcccacgaggccaagtcctagcggataaacagtaccacgagtactgtagcagttggttaggacataggataggattagatagagttagtttgagttagtttcttaagggtcaagtcatatcatctctatataagggatggattgtattcatctctagttaagcaatgaatatcaattagtctaatctctccctcccaataatattcttctccctagcctaaatctacatcccttctccaggagccgacgccgcccggctatcttcccggcggtgtttatcccgtcatggccttgggtcatgacaatagtttggtgtctttttaaagaaagatacaatattgcccttaatgaactttcagtgagcagctccaggagtccgaatcaaaggccttgttgatccccagcgccccatacaaagaggactttcctaacagttgtatataagatcagtccaaataataacactgaacaacttagtaataaaaaacttccctagggaattattgatgctgtcatgctgcagaaccatgttgtacactactctgagcataggtttcccttgatatatcgcacatgagagtcagattgacaaaccaagtcattccctggtcttttaatctctcaaaattcttttttgcgcaatagtgcatcactgtgtcatacatttttctgatagcacctactccctccatcccaaaaagcattaacctaggaggggatgtgacccctcctaggttgattctttttgggacagagggagtagataggtaaataggtgcagatccttcataaaaaggtgaaatctacaggagagcaattgattgcatcataattgaccaatccagtggttgattgagatactttcattaacttagataattattttttattttgtttgatgcctgttttggtttattttagcttgttcatcaaattgaccaatgcttgctctcatccattatgccacttgtatgacagac

SEQ ID NO: 2549 - DNA, 2000 bp, Oryza sativa
  N_region (1632)..(1632): n = any nucleotide
  N_region (1640)..(1640): n = any nucleotide
agtaataaaacattgttgaagttggtgaagaagaagattgaggaatacccaaagaggtggcatgaggtgctttctgaagcattgtgggcgcataggatatctaaacatggtgccactaaagttactccttttgagttggtgtatggtcaagaagccgttttaccggtggaggtaaatcttggtcctcttcgttatatcaagcaagatgatttgtcaagtgaagattacaagatgttgatgggagacaatcttgatgaagtcatcgacaagcgcttgaaggcattggaagagatagagaaagagaagaagagggtggccaaggcgtataacaagagggtgaaagcaaagttgtttcaagttggagacttggtttggaagacaattttgcctttgggtactcgatccaaggagttcggtaagtggtctcctagttgggagggtccttatcgagtatgcggcattgttcgagggaacgcatacttttttgagacacttcaaggggagcgttttcagcgagcgatcaacgggaaatacttgaagatatacttcccgagtgtttggcaagacgcttaggaggtactatggccggtaattggattatcgtcctaagaccaaaaacatgttctatgcttttagattcacgttgttcatcaaaaaggcagggggcatgtgtttacacccaaatttgacacctaggattaaaataggaaggattgccaaaatttggaagtctaccggtttcctccgagttggccggtctgaccgccgtgtgttgggcggtcagaccgccggttgagggccggtcagaccgacggtgtgtggccggtctgaccggcaggaccgagtccgattgtgttttgtcgggtctcggggtttccttactctggaaggcatgttttgggtttcctttggtctccaccccgagttggacgtggaggagggcctgtagagggcaagaccaacccctatataagggacatggccggttcattgtaaaaaaccaatctacaatcaatcaatcgaatcgttttttcatattgcttttagttttctcttagtttgtccatctttgtcggtttgcgccgtaaaccgtccgccgccgctgcgagagtgcgacatccctttgtaggtttgtcctgaaaaccttccgttttgcccacgagacgggtagttatctagaaatcggttccgctagccggtttagttatcaaaacccatctaggtttagctctttgctagatcgaggtggttgacgactctaggatcaccgcaaggcttaaggtgctgcgatcgtgcttgtcaacttgtcaaaaaagttgccaacacttggattagagagatcggactccaaacgagaggaatcgaagccggaaaatcctagggttagattggagagataaactcaaaacgaattcaatttgggtttatccgggcaaaattgatccccgaaaccttaggggaaagggagaggataaggagaaaatgatttcccctcaagcaattggactcgggggcgaccggttgaggcggattcggcggagaacggcggcggctcgggctcggttcggccggccggaggtaggggatgaccccgacatgtgggccccacatgtcggcggctgagaggagggntggggcgncggcggcttgggccgctcggcgcgcgcgaggagagagagatgttgggccgaaaacggcccaacggcttaggggaggattttaaaaacttttccaattaaaataattcgtgaaatgatgtttcatttattaaaaatactttccttgctcaaataattcccagaaaaatctagaaaatagataaacaagcaaagtatttaataaaattttatctagctcaattttgtgttgaaatttttcctagattattagagtttaacttgtaggcttttaaaataatttctaaaaatgatttaaaagatggattattaatttaggcgattttcagggcgtgacaccaagcgccacaaattttcaggaat

SEQ ID NO: 2550 - DNA, 2000 bp, Oryza sativa
  N_region (1770)..(1770): n = any nucleotide
  N_region (1775)..(1775): n = any nucleotide
aaatagattggacaaattataaaagcaacactgatgaggataagttatggataaacagtatttttgaaatggcaagtgtcatctggttgatattctatcattttaattttttttcaaacataatctctaatacatgctcgcgcatcgcgtgggctaccttcctagttatatactaaaggtccattaaacttcctacaaacgctctcaagcctccacgtggcacatctacaaacgctcctagaccaccacgtggcaatgcctaatctcaccgtcaattttcactcaaatcggtggacccgataatttagaccattaggttagattagatgtattttatttaaaaagttgtgagaaaaaacatatcaaccattggttttcatttattttcaaccatccgatacattttagatcatatccctactttcagctaatggacaactcatctttaattgtgctagagaaaaaaaatactctctctgtccaataaaaaaagccaacctagtactggatgtgacatatccaagtaaaacgaatctatacatgcctatgtccagatttgctatactacactatgtcatatctctagattcctttttttacagagggagtaaattacagtccatactatgtattcttaaatattcttaaaagttttcatattatgtcatcatttaaccattcttttcttttacacaatagctaactttacatttcaatttggaccaccctattatatccatctccaagtctgatgactcagcaatcactccgcacactatctctctctctccattttctttttccctccgtttgataactgctaggtatagcaagaaggagcacggatatagcgtcttcgctttttgttaggtcaactcctgcctcccagtcccttcacgcccgacatccccgacctcaatgcaaccataacaatagtgtgcataacgatagtggaggagaaaaagaaatgtcggtgatgacggtaaaggcaaagaggaggaacgatggtggctcaggagaaagagcggtgatgacggtgcatggagtatcagttagtggttgctagtggtctgagaaatttgttgtcgacacaatcgctaactgtgtttgttaatttttgatgatatgtgggtcaccagtcatcataaagaaatactattaactagttttaaaatagtaaaaatattaagataaagttggagtagactatagatggccataaggccgaggcccgacagcccgaccatttggcctggtccaagcatggaacgacacaattattgtcgggctcgtgccagcttggcccaataattgggccgtgcttgggccaatgccttggcatggtggggctgcccagcacggcatggtcaaagaaaaatagttggggttaattctgccttataaggcactgtccaaagagaaggacataaatagacttattccatcatatatgacacaacccaaagagataagagacggaaaaagacttattttgtagaaaagcacgatggactatcgtgcctttggatcggctggcatagcccgagtcttattgtgcctagactgggccgtggatgcagcccgtgggcacggcacagccggcccgactgacctcgggtcgtgcctgggccctggcgtctcgtatcgcgtaaaagaaaagagaaatctgccgtctctctctctcgttgtctcctcctccgctcctttgcgccgccgccaacacacagggcagggcgcgccgatctccatctggcgagcagagaaggggangggangggaggggatcctggtgagccctctttccgattcatctctcaccgggacctggaatttgcttgcgttcgttaaccctactagcttctcttctagatctggaagaagctcttctcctcctccttattaatttgagagccttaaacctctcttaatacaactagctagtaacattttgtttgtttgtttgtttgttcaccgaatagtttgggggttcaactgaacca

SEQ ID NO: 2551 - DNA, 2000 bp, Oryza sativa
gttatatatgtataaaattaaggggttgcacctctctactaacaacagaaaaatataacgagaagataaaacatcccaaattaaagcaatttaggaaaaagtatgatcaagttaccaacagtctgacaatacactttaaaattcagcccttctaaccgagtgtggcaaggcatgataggtatcaaccccatttgttgtcttgaattttaattatatcttagatgaagtggaacttgctaaccgacagaagcttgaagcatatttgccataaagcgattggatgagtaatggtatagcgttcttatatataagtggattttataatgtctaaccccgttgggttttatgtagttttttttagtcaagagagaactttattaatgactaaatagagggttacattcttgatttaacaagtctaggattgatgcgggggcgcacagcctccattccccacacgacctagtactcgttgccatttgtgctaacacatgagcaaccctattagcttgtctcttaatcttgtgcacttgcacccgttcgatacaatttagttggatttctatcattagaaagaagtgcatatctcacacgttgcatcttgtatttagacattagattcaaggctatacctcactcgatgtgtgttaccatatttttaggattcaaagttgttggcaacttttttgaacaagtcacaaaatacgatcgaaacacctaaacgtcatatggtgacacggagtcgccaaccacctcgatctaaacaaagctaaggctgcgttcttttcagtggattgggaactcctttcctttgcacggaaaacggagcggtccattagcgcgtaattaattaagtattagttaatttttttaaaaaaatggatcaatatgatttttttaagcaactttcgtatagaaactttttgcaaaaatgcactgtttagcagtttgaaaagcatgcgcgcggaacacgaggaagaggggtggaacattgagcaaagaacacagcctaaatcaagatgagttttgtaaaattaaatcggccagtggagccgatttagatgaaacagggataaacacccgtctcatgggcaaatgaaaagtttacaaaagggtatttgcactcttacagcgaggatagatgacagttagttcaaaccgacaaaaatggacaaaactaggctagaattaggcagaaagtatatgcgacattgaaaaagtgattcaattggctaattgtgctagaaacagattgtgtggtcaatcgaactggtcttgacccttataaagaggtttatcttgctttctataagacctcctccacgtctaacttagggtagagatcaattaggactcgaaaaaatagattaccaaacaatgaaactcgagactcagactcggacttagccggtctgactagtcacaagtcgtcggtcagactggtcatgtgaaagaaacgtacttttcaaactctgacaatgatttcctatttcgtgtcaaggtgttaaatttttggtgttaacaaaaaccatcgtatctttttcatttacagtagaactcaactacgagtaccaacttatgacgaaaataaaagattcatttaaacgggaataaattcgtgtgcagtggtgggtaagtgtaaaaaaaaaaagccaacaatcccaaaaattcacctgagcattaacctgccaagtcgtgccaggccataccggccaacattacacggacgcatacgtgcacagggcttccacgagaccagccacgcaagcacctcccctgcatcacccaccgtccagaactcgatcgacggcccagataatcccacgtcgtatgactgcaaaaggaagaggagataaaaactcgagaaattaagccctgaaccggaaggaccccgagaggtcgtcgaatggcaactccgcctccctcgaacccgacgacgacgctccgagtcggctctcactgatcgcttctagaagcttccggaaggctccgaccccccg

SEQ ID NO: 2552 - DNA, 2000 bp, Oryza sativa
acaatacagtaactgatgttggaagcagatttcatcaagaaagagagaagcttaaaacttttgcagttctgacttttcctagatgcatgcatgacattgcacgaaactgacacaagaaagagaccatggggcatccatgcagagcatacacggctggcaaatgacgttgccagctgatgaatgccaccctagctagcaatactatgctgactcatcattcagggagagagagagagagagattaattagagttaattaatcagtagtcctacctggcaacgcctctgtacttggagacacccctggagaaaccgctgctccggcggcggagggaggccaggtactcctccctcgacacaccctccatctccgacctctccttctcatattcctccagctgcaataattcacattatcttcagtaataattcagattacacaagtcgcaattgtctagtggtaagttggcaaacttactgggaaattgagcactgtctcaggaccccagtacttaagagctgcaaggtcatatgcacgagcagctgcttcctcactatcataagcccctaaacaccattaaacattgcactaatgttcagaaacagatcaaacaccaacacaataagtagttatgtaacaactagttgctatatgcctatattcttagggataaactgttttcatattgagacaaaccaaggatgtgacagatcaaacaaacaaaatgtgagattatacaagaacaggaagcaacatgcagcatgaatctgacaaaacagggtgtatagacaactagtttgtgggacttacccaaatagactattgagaggagcatcaagcagcagcagcagatcaaggtcacatgcgcatcacaagggcaaggtcccccaaagataacagcaaaaaagaaaggagataaaaaaagcttaatcagaatgtcagccttaaaaaattcgctccactttatagtaataagctttgtactaatggccgatgtatcaagatccttggcagtatacagaagtacaccaaggaccttgtatgtttcactttttctttcattatagtacattatactgtaaaaatactcgaatttcactttctttacagcattttcagataaaattcatgttaaaaatcctaaaaaaaattaggcaactaatgcatgttgcgatcaatgtaccttgcctccctttcttcttgttctgaagtgaagtggagcaattcttgtcccacagatgggcctcaaatctgccagtccaccgatgcctgtttatagacacatgcatgcagcaaatgattccaccgtatattgaatttattaatgattgataaataagcagcattcaagcattagtgtttgctttacaggaggaagaaaaactgaaggagttgaccaccccagcagtaaatgtagatcaaccaactccctacttcccagctaataataattgactcactccaaggggaggagcagcaagaaaaaagattaaaaatgggaattatgagatcaagaaatggatccgatcgatcatgctcgccaacctccaaaagatgaggcatgaaaaggggagcagactcgccacccacaaaacgataaaataactgatgatctctgacatgcaagtgaaaatattcaggaacagattggaaagaagcggctggtaattttgggagcctgaaaggatggaaatgatgcggaattttgggctggaaatcagccattgattaactagcggcaatgcaggatgaattcgcgactgaaatcgagaggggatcagaaagaacagcagaattgggatcagagggatggaagcaactgaacatgcagggacgcatacctggtgactcccctgtagatagaactcctcttgccgccgccgccgccgccgccattggaagaaggatcagccacctccttgctctccttcttgggcctcttggccttgccggtgctcttctccgtcctcggcctcgccctcctcttgcagggcatcgac

SEQ ID NO: 2553 - DNA, 2000 bp, Oryza sativa
  N_region (7)..(7): n = any nucleotide
  N_region (1718)..(1718): n = any nucleotide
  N_region (1722)..(1722): n = any nucleotide
  N_region (1742)..(1742): n = any nucleotide
  N_region (1761)..(1761): n = any nucleotide
  N_region (1763)..(1763): n = any nucleotide
  N_region (1768)..(1768): n = any nucleotide
  N_region (1770)..(1772): n = any nucleotide
  N_region (1774)..(1775): n = any nucleotide
  N_region (1777)..(1778): n = any nucleotide
  N_region (1781)..(1781): n = any nucleotide
  N_region (1784)..(1785): n = any nucleotide
  N_region (1788)..(1788): n = any nucleotide
  N_region (1803)..(1803): n = any nucleotide
  N_region (1837)..(1837): n = any nucleotide
aaaagtnggattttttttttacagagaagaaattgatctctaatgattccagtctaaaatgcacagttcttccctactaacctaataaactgtaaaccgaaattattgcaaaggaattgttcaacagaatgttccagaacactcacgacgccaagaacggagtagaagtcgtcggcgacctcatcctccgcgctgccgtactcagcttccgccgcataggcacagctcctaaggtctctccttccccccgtgctccggctccggcggccggccgttcttgcgaacctagctgaaaccaacggccgggtgcggcgaggagagcaggggatgggcggcgacggcgaggctgtgcgcagcgtcgcgagcgattcggccagcagcggtggcgagggtagcggagccattgggcagcggcggccttctccaactcgatcggaatcgaatcgaaggcggcggcggcggcggttgccggttggttcgtttcttggcggtctacgtcgttttaagtcggggcaccactaattcttctggttcaggctgcctaactaagctgtttttacacgctgggacttgcggctattcatatttcaatattagggattcttaataaattctaccatggaaattccaaaaaataaaagagagagacatgctttgcctggcttggctagcttctcgttgacatattaagacatagctaaattaaggttttagaattgatttacaagtatttttaaacctaagccaaacgttgctggttttattttaagtaccagagaaattatacataatcactaagggtgacagaaaaagcaaaatgaaaaacatagtaaatcagacagcaacagagcttgctaacacactactctctctatgtctttcgtcccgatacaatacataattttatggcaaaatttgctacagacacttaaaaaatgtacaatttactagtagacattataaaaacatgtcacggctaaaagatacttaaaaattgataatttgttggatgacactttcgactcaattggagagagaaatttttcaaaaaaacaaggatgcctctatggtcaaaatattttgagctgaaactagagctaagatggaatataatgtgatggtaaatttagagttgtataatttctaaatttttactatagcatcatgcagtttgaagcatgtggttttaggggcattattatctttcttagaaatttatcgatccaattgaaccgaaagtgttcttgtcacaccccaatccggcaccgccgtacaacggcacctgacaggagcgtgtcgtaggaaaaacgacgtgaaccgcttcctacgaaaccgtgatctcagtaccagtcccaggacatagtgctggtacccatggtgacaaatatgaatcattgcaatccttaaaataaatagaggacttatttaccttaacttaggttgcagcttagaacggcccgagaatgcaaccgacgacgcggacgaggaaacaccaacagcaacagcggcagcggaaccaacgaactaacacccaacaccacaggcgacggctgggaaccaggacgaaaccctaatcttcacttcacttcatcttcacttcaaggcagaggaactatatatatttatatagagcaagggtgagtactttcgtactcagcaagtcacgggaatttaggtgtttaatgcaagcttggaagagaggtaaggttgttttgcanatcntttgtttgaaagcattttgnaatcactaagtgatttacntnctttntnnntnngnntgngtnnaanagagacttgcgtctngattcgactttaagagatgcttttcaacaactcnaatggtaatgtaccgacctcccgggtcagatcattacttatcggctcccagagccatttcacttgattaggcggctcccagagcctttttcattttctcggactcccagagtccagctgcccagcagcaaagcaatccgcttcccctcgggaagcctagtcta

SEQ ID NO: 2554 - DNA, 2000 bp, Oryza sativa
  N_region (292)..(292): n = any nucleotide
  N_region (563)..(563): n = any nucleotide
  N_region (638)..(638): n = any nucleotide
  N_region (1022)..(1022): n = any nucleotide
  N_region (1980)..(1980): n = any nucleotide
gacatattgtagtgtattgggtgcgttcgtggcaaaaactcacttcgtgattcgcgcggcgaactttatgtcaattaatgccaattattggcatttattggcacacacgggtgcgatcgttttcgaccgatgtgaaaaagttcaaaatgatgatttttggacatattggagtgtattgggtgcgttcgtggcaaaaactcacttcgtgaatcgcgcggcgaacttttgtcaattaatgccattattggcatatattggcacacacgggtgcgatgtttttgaccgaaatganaagatttcaaaaagcaccaaaacatgatttttggacatattggagtgtattgggtgcgttcgtggcaaaaactcagttcgtgatacgcgcggcgaacttttgtcaattaatgccaatattggcatttattggcacacacgggtgcgatgttttcgaccgaagtgaaaaagttcaaaaagcaccaaaacatgatttttggacatattggagtgttattgggtgcgttcgtggcaaaaactccacttcgtgattcgcgcggcgaacttttgtnaattaatgccaatattggcatttattggcccacgtgggtgcgatgttttcgaccgcagtgaaaaagttcaaaaancaccgaaacatgatttttggacatattggagtgtattgggtgcgttcgtggcaaaaactcacttcgtgattgcagcggcgaacttttgtaaatttatgtcattattggcacacgagggtacgatattttcgaccgaaatgaaaaagttcaaaaaacgccaaaacatgatttttggacatattggagtgtattgggtgcgttcgtggcgaaaactcacttcgtgattcgcgcggcgtacttttgtcaattaatgccattattggcacacgagggtacgttattttcgaccgaaatgaaaaagttcaaaaaacggcaaaacatgatttttggacatattgtaatgtattgggtgcgttcctggcaaaaactcacttcgtgatacgngaggcgaacttttgtcaattaatgccaatattagcatttattggcacacacgggtgcgatgttttcgaccgaagtgaaaaagttcaaaaagcaccaaaacatgatttttggacatattggagtgtattgggtgcgttcgtggcaaaaactcacttcgtgatacgcgcggcgaacttttgtcaattaatgccaatattggcatttattggcccacgtgggtgcgatgttttggacatattggagtgtattgggtgcgttcgtggcaaaaaataacttcgtgattcgccaggcgaactttggacaattaatacaaatattggcacacatgggtgcgatgtttttgaccggaatgaaaaagttcaaaaggcaccaaaccatgatttttggacatattggagtgtattgggtgcgttcgtggcaaaaaatcacttcgtgattcgcgcagcgatctttcgtcaattaatgccaatattggcacacgtgggtgcgatgtttttcaccggaataaaaatgttcaaaaagcaccaaaacatgatttttagatatattggagtgtattgggttctttcgtggcaaaaaatcacctcgtgattcgctcagcgaactttggttaattaatgctaacactggcacacgtgggtgcgatatttttcaccggaataaaaaagttcaaaaagcacaaaaacttgatttttggacatattggagtgtatacggttcgctcgtggcaagcactcacttcgtgattcgcgcggtgaacttttgtcaattaatgcctatattggcatattttggctcacaatggtgcgttgtttttgaccggaatgaaaaagttcaaaaaacaacataacgtgatttttggatatattggagtttattgggtgcgttcatggcaaaaactcacttcgtgtttcgcgcggcgaacttttgtcaattagtgccaatattggcacacaangggtgcaatgtttttgaccg

SEQ ID NO: 2555 - DNA, 2000 bp, Oryza sativa
gcgattgagtcaggagcaagaaataagggaggcaaagtagacttccactgtgccggagacgtgtagttggggttgcggtttttttttgtatcttgggccttttgaaccagactgggcttttcctgagtttgacggcccaattaatttacctgtccctccttgtttttaattagggccgttttggtttgataccaaaacatgcctttccactttgttggcaaactgaataatatgtgtgttagtttggactaacaccaaatatttggtagtgcctaccttatttggtcatattctagaagtttctcctctatactataagagtttggttttatattggtagcaatccaaatattagctaaataactttaccctacaatattttgatagtgccggagtttacctagaatttggcactaccaatgaattcaggcgttaatatgcagtttactggtgtgatgagatcatgagaagagtgacacacacaggcacacgggtgacaaatgcctaatggttcatgtctccctatatttcacatttttactgcaaaaaagttcttttggacacacctctgtgtgcaaattgtacggcactctggctctttccctgaatggaattggaatcaatatcagaaagttgtatctgatgtcaaatagatcgtataccattaaggcattttaccatacgaacatctgctccaaaaataaatacgtaaagttcaagctatgatcagtgtcatccaaccagctagccatccggcactacaattgacctggcgattggttgtctaacgacggatagaaatgcatgaatgcgaagacacgcaaacagcacgttccaagtttttgccaagtagggatcatacgcattcacatttgcatagcaaatgtttagtgatgtgacctcttaacttaccaaagcaatttaccaataaaacccccacttgctgactggaccaagattcatatatcatgccaagcctaaccatgatgatccacaagagatgatcagatcagatcagatagaacatcagaccccattcttcactccggttaatctacaaaaacatgattgactgacgccaccccatcagcatgtgacatgtcacccgtccaacaatgacacagtttcaacaggtggacacccaaacacctcatcacccattgcatattatcccattgcatcgcatggcttcctcctcgtgcctatccagatcacctaatactctatccaaagttccaaacgcaccaaaagtgaacccaagaagcagcaacggacagtgaaaaaagaggagggcaacaagtcgacgacgatggcaagcagcaactgagcaaaatgcagctgatgacactagttacccaggtggctgtggcctgtgtggctcctaccatggtcaatcgatcgatcacttgccccgcgccggcatcccactcccacccaggcgcgggtggtcgtcacctactccaccaacccggcagctgcaggaaggcgctgcagttgatacgcttgtctctttcccatcattagctttcccccatagcacatgccgctgctcctccaatccacccatttctccctctcccgtaatgcaaaatacgcaatcgctcgcctgatcctcttcccctctctgtcgctcgctgttcctgtgtaacttcaccagttcactcccaagcgctatgcgaaacatgctgtcttgccccttgcccccgactagttcgttcgttaccaactgtggcattggtgtcacaaagaacactatgcaacgcaggcaggattgtgacgtgccacatgtagtttagcggttgcattgacttaagtagcatattcatgatagcaaattttagattgggttaggctaaatttataatttaaaaatattgcatatatccggtcggatgtagaggccgataaaaaatacccttctctaagaaaagatcgtgatgtgccctatgggatccacgtgtcagtgacgagtcatcctgggcgttgccgagctgttcgta

SEQ ID NO: 2556 - DNA, 1995 bp, Oryza sativa
  N_region (68)..(68): n = any nucleotide
tagtttctatcggattggcctaatcagccaaagaaaaaaaaccaaaatttaaattttcaaactttaanttttgagattgattttgagatattttcaacattagtttttaagtcacgaagaacacatatataaaagttttacctacaaatttatttttattccctaataagccgttttggtttattaggaaaaaagccaaacgatggggaccttacttcctgtttggaaagaaaacatgatagggagcagctcgatttaatttaaaataaaatggtagcaccaaaaacaatgttgtacacgtaagacactactatctcgtagtattctcgtcacttgtacacactctacgtactctctctggttctataataattaacgttttggacaaggttgaggtcaaacttttataactttaataatcaataactttaaaaatatttagtttaaagaaattatgacaacatatatagatttgtctttcaaagcactataataaaagtaaacatacatttatttattgtgtatattataataggaaaataaggtcaatgatatattttgtagaccgtgtcattgtccaaaacgttaattaaaatgaaaccggagagagtacatatttttctcccttttttttcacagccagttagcacaaagtgagtcagtcagtgacacagatcagctaccttaaccatcgctgttaggtaaaaaaaaggtaaacggaaaatctgccacgtcggcaccgttaccatcacagagagtccaaccgtctcaaccacctcttggcactaggcgaagatgacatccttgtcaaaaataataaataaaatgaaatgaaactgccctctgagcgctggggcccactgtcagtgtgacggtggagtccacgcgtcctgtcaacgtggcgtgtcagcctatgctgcgtctccgaataatctttttttttaattatctcaagcgaagaaatgataatgataataatgaataaaattaaaagtagtcaactgaagtgaagaggaaccggatgctactactgctagtagtcggccacgttacagaaaccccctccttgtcctacaaatttacagagcggcggagactgaagcgagagcaaagctggtcagtttggggaactttaaaattttgagatgtagctggttggtagcttcttagaacctggaaaaactgggtttctcatattctggtttccaattttttttctgaattccaccgccacagtttattagaatttagaccgaaagcttaactatctaggagagtttctgattctgggagaacctgtagtagctagaagatcccttaagagcaccctaatctcacaaaatttgtgtggtagattcatctgctctgttctgggtgagttcgaggagaaggtgattaaggagattgagaaatacgtacaacgagacgagttattagctcataattaattgagtatcgattattttaaattttaaaaatagattaatatgattttttaaagcaactttcctataaaaaattttttatcaaaaacacaccgtttagtagtttgggaagcgtgcgcgtggtgaacgaggtgttttctccctcgatgttacccgaacgaacgcagagcttggcatgtcaatctcgtcttcttgggcgatttttcttgtgatgttttgtattgatttctcaacttggccgtggtcaattaagttgtgggtttggttgagaagaaacttccccttctgattagttgcgcaatttcgttggagtttgtttggaaaatataggtttggatcactgtcaccgcgattgaatcgagcaaatgtggtctttggtttggtttggtttggtttgttttggaccatttattgacaataatttatgcctctaaagtttaaagtcagttcaacagaccaacggctaacaagttgttgtttccaagtttttggagtttagttcagtttgctttgcaacttttgtttttctcggtcaatatcatgatgtacg

SEQ ID NO: 2557 - DNA, 2000 bp, Oryza sativa
  N_region (1567)..(1567): n = any nucleotide
  N_region (1637)..(1637): n = any nucleotide
  N_region (1832)..(1832): n = any nucleotide
ttgtctaacagtatagacagcgctgcaattcggtgtcgtcggttaagcaagtccaaagggaaaataaggctcataatagtaatacccaatcaacgccagtacataactggcatcaccactagtttttgaattaccagcactttataaaagaaggaagtgatattagtgccagagctagcaattaatgatatttgaattccaaattcaaattttgtaatgccataaacaaatattatgtatccatctcttatggccagactactcgtatgtgtaaaacccttttaggagtactttataaatgctgtgcatactttgaatactctaaaaaagtatactctttgatattaggcagcatttctttcactgtcttgagagactatgatactagctagtattaatttacttgtgttttttttggtttcgtttgcacattcttcttatggctggttactttggatgttttacttggtacagatgtccaaggagaaccaaaggtatcttgagaaatcctgtagtctcaatgggtctcagtgcggcacataacaggattgattgcagagtttcaatggccggaatatattatgaatggaaaataaacaaggagttggccatacataccttcgccgcggtataccgagatatgcagcacgttttggccttcaggcccagagtatgacaatgttgtaggacttctatcaagcaggtcccgtgcaatctccaagcgccccagcgaaacggcgaggtacagcggcgaggcgccgatgccacgatcctccggaatcctggccagctccggatcctccgacacgagcctctccaccaccatcctgttgccgccgcggatcgcgccgtgtagcgccgtctccccgagcttgttcctggtgctcaggatccgtccgttggcggcgccgccctcgtgcgcggccaacgagatgagacggcagaccatggcatggtgcccggctctggcggcgcagtgcagaggcgtgtcgcctctgttgttggtcgcgcctagcaggtgcctcgccctgccgtggatcatctccgcgcactgcacgtactgctcgccgtcgccggaggtggccaccacatggagggccgaatcctggtccgaatcaagagtcaacccttccaggagaggcgacgctgctgctggacgatttgcaggttgaccttgttgagctagatcactactagtactactagtatttgaagctccctcctccggcatgcggatgacgagatgggattcagcagccgcctcctcatggttgacgagaagattctcaagcgccttgcacgcaccagatcgtgcagccatcagcagctgcggatccataatcacaggggaatccatcgcgacaccacgccaatcgtgctctggagagggagatcgtttagggcgatagcagtgcaggcacccgatattgagttaccccgtacgccagctaggcctagcaccgttgaaagaaacaaccttcaaaattgcacgagtgcacgtgacctcaaatagagcccaaaaaattttagcccacagtggtgtacccttgattgagtgtaccaaacngcagaaagaaataaattaccctaaactttcctaaactaaacccgaatctccttttcttcttttttttttnacttctcgaggcttcttgccatctctcgcgactcgccatctctatccgcacaaccgcgccttctccgcccgccgaatcgctcctcagctcagccacgccgcatcgctcctctgcgccgccttcgagcgttttttcccctcccccaatcgagcgaaggcgaggctcagtggcatgagagattgcgacgccctcacntcccccaactccaccagctctcccattgcccctccgccagcgcccctcctccctccgccggcgccggctcgacgacgccgcctctcccctctcatccctgggcggcgagttaacaagctccccagccgccgcgccgtttctccctcctccccatccgtcggcgcatcg

SEQ ID NO: 2558 - DNA, 2000 bp, Oryza sativa
ttcggtttttatatttgtaaaaaaaattgaataagacgagtggtcaaacgttgtaagtaaaaactgaaaatctcttatatcgtgggacggagggattagtaaccttcatccttctcctttttgtttaaaggcagtactaatcttcagaggaaaaaggaacagagaagaacagacgaacgtgccatgggctatgcagctatagcctactaataagtctatgactgggccatgtctctcatggaaaggaaaggtggtgccacagggaaaaggggtgatccatttgtgcccatttaaaaggaactcaagatgagtgtcaagattactactcaagctctagtctgtaatgtgagtgagactcctattaggttcaggatatgaagctcttgttccagtgtccctgctgctcatgcttctgcgtcatgaaggcaaagaagaacagcagccaaggcaaggaaggaggaggaggaggaggaagcaaattgcaagggggatcagtcatggtgaaaaactgaaaaccacagaccattagtagcttctgttgatccctgtcttaatttggaccatgtgcatgtccagttagtttcttcggttcatctctgttgctgcagcagtttggtagttagttttcatgtgctgttgattgctgctgccactcatctggccggccactgtcgatctccgatcttgatttttaagtctttatctagattttgttgatgtatctactatagtcaaataaaaaggcatcattatttaccttaattagagttttgtctggatttcatcccttgatttgtttcaagttactaccttgttatcccccctcccccagcgcattggtaaagctgtggttagctctgtatatttcttgtgctaattaaccagttcatggatgaacacttgcagaaaaattactgagcagctaggaggcgtaattaaagtagtgatgttttgtggatcagtttaaagtgttgtcatgctcaattagcagagcaaataggtgaagaaaagtgtgtatgctaattactgaaaggatgcatatgcatgggggacattggagcacgcctgcttaatttctgaaacattgatctgaacaattaaatttctgaaaaaatgatctgaacaacatgaccagatttcacataagtgctttctgtccgtgcatcatggatgccatgactggctattttcttggcccatgatgatctattaatgctgattctaggattcaaaaaaaaagggattgctcacatacaatatttgcaacaaagaaagtggcacactagcacatataatggcatttggtttgtgcctaatcaagctagcctagtataatcacttcacaattccctatagtacgtagtttttggttacttgtcacaattgtttcttagcttcatggcttacatatggcgcgccaattattttactacacctacgtattttgtcttgatcttaatatactagtataaaacaaacgagtataaccatcacaagtttttccatagcaaacatcttagaaaatatataaacccaacgttaattaatactacattcatattttaatgtacgacgccgttgatttttttatccaacgtttaaccattcgtcttattcaaaaaatttatgtaattatcatttaatttattgtgccttgattcatcatcaaatgttctttaagcatgatataaatattttcatattttcacacaaattttaaataaaacgaatggtaaaacattggtcaaaaactcaataacctcatatattaaaatacggagggagtaattagaaaaaccaagtcctctactaggaatgggctgaggtgacggtccaagcactagacggcccacaggtcggcgcgccttagcccggcccattgatccacgccgcggacctaggtgagacggcccaaacgcggcccgtttaggtttggggtttttggcgtggggagttggggggcaaagcaagcgaagcaaagcagcggcgacacggcggcg

SEQ ID NO: 2559 - DNA, 2000 bp, Oryza sativa
tgatgaaccccaacatgtatgcatgcctgataggtttaatttgggcactggtcggcttcaggtatgttaatgagtttatatgaatcaatttggcttcaagcagaaatgcagctgttattgacttacttcatacaactccataacatacccacaggtggcacataagattaccgttgattgtcagcaattctataaggatgctctcggatggagggctgggaatggcaatgttcagcctaggtaagaatagcaggatatctgattcagcttgatgcaatgcagataaacttctaaatacgtctaaactttgcgaaaaccaattatgttattataaattctaaatacttctaatcacaggccttttcactgctctacaaactaaaattatagcctgtggagcttaaaaggatgctactagcattagccatcaggttctttctaggaccagcactaatgggtatgtcttcttatgctattggaatgcgtggagtattgctgaagatagccattgtacaggtatattctagttctttctttggacgagctattatttgtaactttgaacaattcaaccacagaaattacgattaacctgtcaaaatcacattcaggcagctctacctcaaggaatagttccgtttgtgtttgcaaaggagtacaatgtccaagcagatattctgagcactgcgtaagtagatcacctaccacgatacgatcctatgcttgtatatatgaagaagcagggaagcatcattaaccaacaccttacactgatctctcttatggcaggataattgttggcatgatggttgcagttcctgtggcgctggcttactactttgcaatgatcatcccagctatcaaataactatttgcagaagctagcctgattgtgttcatttgagaaaacaatgacggctcgctgtggagaataagttcagttatgagtgaatattttgctagactgtatatatatgtgcccttgggtttgtggtgaaccataataaggatatctgatttgtatcttagtgcatagtggccatacataattcttaccgtttcaactatgaacaactctaatgaaccagaacatgtagagaaagctcacattccccggcgacgcggcgtgctctgttcctgtcaggcgctccgtccaacagacggtgcaccgtgcaccccgcccatgagctgctggcacccctgtggggcattctgccgaacatcttgcaggcgtacccagggctgaatagcagattatctggctcagcttgatgcaatgcaacagcagccaagagcttcatgtgcatcaaccatttcttggcctcattttttcctctccggagaacaattacatggcaatatggcattcacacaccgttcccttccaactgtggtgtggaagaacaaacagttcgcttcaccggcagcgtggaacttgcaactgttcgacattttgtagttgggaataagttcactttattaccctcaaaactgatcgaaatcgaccctaaaccacaaaaccggatatctcgacccccaaacttttaaaatcggtgtaatttgactctctaggcggttttggagggcggtttcgctgacgtggcgcctacgtggcagtattgactcggtattctttccacgtggcattgacgtggcgcttagttggcattagaaataaaaaaattatgcatgggacccattagtcattcacacacaaaaaattgtggggctcactgacatgtggaccccacatgtcatcctctctctgcctttcttcttcctcccctcttcctcccttctctctttctttctctctcttctctccccttcggctggccgcagggagcacgggcgactgaagctggagtggcggcggtcgggggccagagcggcggcgaccgcgggagctgaagcggcggcggcggcctcgccatcggcctcaccaagtggagagaggagaggagaggagaccaggtgagggaagaacggaggtggtgggt

SEQ ID NO: 2560 - DNA, 2000 bp, Oryza sativa
  N_region (842)..(842): n = any nucleotide
  N_region (847)..(847): n = any nucleotide
  N_region (908)..(908): n = any nucleotide
  N_region (1203)..(1203): n = any nucleotide
  N_region (1224)..(1224): n = any nucleotide
tgtgtttttcactaacaagccttagctgcttcacatttttttagcatatgtaaaacctcacaagtgttgcgtgcacacttatcaaattatttgtgtggctctgtcaacaaaggcgactaattaaacagaacctaccattacaatgaaccaaacttgcagccccgttcaatagcgaaaagagaaaccaacagggacatagattttcaaccatctaaatagttatcaatttttttaaaaaaagacaacatagattagtatatgaaaatatatcactgcacaaacgacttctacaagttataacaaaaagaataaattaaactgaaaatagttatcgtacattcgcatctatatttgttatttttgttacaacttgtagacaaagtaaaattttaacttgcgtgtttgtggattgatataatttatattaatctatcttaccatttttttaaaaaatttatgactatttatatgacatacaggattatcttcttctcgagggataaaatcattttcccaaaccaacaggaggagaatcttttcagctgcacctaggctgaacgtaaaccaacaacaacaacaattaatctgatggcctgtaacttaacatacctggttcaatcttaacacacaaagagacacatgatcacacattccatctggacccgttttcacttcagcaaagatgaacttgggaacaagctaggtcaggaggtgtcaatgcaagggtcccgtagttcgagttcgaggatcgtacgtctctcatcaaccacgcacgccgacgtctactccccgcgatccggcggcggaactcgtcagcgagcacagactggcgccgggaattnacccnaaagggaccagcagcgtctgctacttctttctgctccgggagggtgggccagcgcgcgatnggcggcgccggcggcgagagcgtgtggaagtcggagtgtggcaagaaggccgtacgtacgtgagcggcgccgatggccgcctcgagcgtcgggtacctccagaagttctcccctacggtgtctacgtacgagccgtcgatcgcggcgtcgccgtcggggtcggcacgcacgttctcatgcacgaggcttgggtggtgcatgaccgatcgagtacggcctcgacgacgccaccgaacggagcgcgcggagaagcatgcaggtaacgtgctttgcaatgtgtgtgtgtgtgtgtgtnatatatatatatatatcgctngccgcgcgcggtctgcgtggaggcgcgcacggcaaaggcggcgtattattcgtcgtgccgcggctctccaagaggatcgaaggcggacgacggcgtcgatcacccggccggaggcgccaccgagtgcgcggccgcagtaagaggccgcgggagcgagaacgaagagcagttgcgctagctcctgccggagttggacctggatgtgcgctgctgtccgcctgtaccgcgccgatggacgacgacagcttgggaatggaattcagcacggccacacgataaaacaatatactccctccgtttcgaaatgtttgataccgttgactttttagcacatgtttgaccgttcgtcttattcaaaaacttttatgaaatatgtaaaattatatgcctacataaaaatatatttaacaacgaatcaaatgataggaaaagaattaataattacttaaatttttgaataagacgaatgatcaaatatgtgctaaaaaggcaacagtatcaaatatttcgaaacggaggaagtacgaagtacgagatatatgttgaacgacgacgaacctttgccgtggtctccgactatggaagtagctagctgcatgagaacatgcatgagagccagggactgttgctagctacgtacgaatcacatgcaacgcatagcaaccactctgcctatcgtatgctttttaatatataaatgctgaaatttcagggaaagaaactgaagaaaaggaacgatttttcctatagaggtttttaaattatatgtgctcacc

SEQ ID NO: 2561 - DNA, 2000 bp, Oryza sativa
gcgtaactgccaaatcatccaagtaaggaaatcgataagcacgaagatttctctcaaagacgagaatatcattcagtcttgagaaatgcatgtgaatgaggagccggtataaatcgtaggaactctttggaagaacgaataaccactgggataaaatgccccaatggagcttacgttctgaatatatcctccttgctcgtaagcaggaaagatgatatttctccaaactgaaattaacataagatcattggttcacgaagggtagatttcgcagatttgactgaacacagataaactataaacgaaaatagagaactggatgcggttaagcataccacttcggaaaagtggaaaggcacggtgttaaaccataggcctttaacggaactcgatcacttattagaccgatatatgaacggcaacctctttagcttttccactccctcaccacaccaaccactgtgtgatactgaacacccacacaatctcgatttaaaagagagagactgtaaggctagaattggttcacacatatgtgtgggggccggtccaatcactcggtagatcacgctattatgtcaccttcattgatgatgcgactcggaaggtatccagctgttacgaactatcagatagtcaagaattgacaggaatgaagggaattgatttcagggatcagataaagagggaatttatgaaataagagttacgagaacaactagtcgaacggaagcattagtttctctacgagatggagatggctcattctctagttttcctacgagatataagtcagtttctaacgtactttgaagttcaggaaggagttattaattaagacgaagaagaaccctcgcttggctttgtcccgaaccaaggaggcatgatggcgggcgcgtgcgtgtgccgactgcagagactacaagccgacgccggaagcatcgctttctttcttctccctccattttattcactactaccgcttctacacataaatcaaagaagcattgtggaatagtggcatttcattaatgtcgaaaatgttcttagtgaaagggttgccttccttcttttcaataagaagaagtatttgaaatgaaacaaattcctcttcattctgttgtgctcagcgaaggaactgcgtaagcatacttttgcggcaccattggccgaagcagacctggaagctgatctgcgagtgaatgaaattgaacgattaatatcgcctttcatgctaaaatcggacgatttcgaccttacgttcacgatactccttcctgtccttgcgatgtttggttaagtgttatcaatcagctttactcttcttccagcattcttctaaggtttgcctctaacgatggttgaatagctcctgttgtttttattccattgaattgatttcatgaacttccctcaagctgaaaccggaacgggattgtcatttagcttcaatttcttcagtctcacaagcgggtccgcatgcaacaaaagaaattgtatttgcctactactccgacctcaggaatgcaagcaagcgaggccagaacaaggagtgtcaagaaaaacagtagccgtttactcacaagctaacacgaagcacgaaacacatggattctctgagaaccggactgacccaaccaagcaatcacttgagccattcacaccttggaagagctattcaaaggttttctggctgactatgaggacacctctgcatcccaggagcagaccgctcccccggaatctgtggtcagtcaagagcggcatccgaatcccgctccgattcaaccttgaccccagggatctcctctccccaactacactaggctcaaggtggaataacgaaaggagggtgcgtgcgatagctaaccgattgaaggaaattcctcgcctatcttattctttttcagttccgatcatcattatacgatccaagtcgtggaaaagccgagtgggaaagccgaaaccgaggtaacttaggcgtaggtcaaagcacgggc

SEQ ID NO: 2562 - DNA, 2000 bp, Oryza sativa
  N_region (1238)..(1239): n = any nucleotide
  N_region (1270)..(1270): n = any nucleotide
  N_region (1492)..(1492): n = any nucleotide
  N_region (1518)..(1518): n = any nucleotide
gacgattatatacctactttgttgtttgagattaattatctaccccgatagagtccatcattatgtataaacatttcaaccattgttgcttacaccaagggcaagggcatacaacagggggaagaacatttgtgaactgtaattaatatcatttctatcgaagcatgactctatgtcaggaaaatactagaaaataggtgcgcctttggcgcaccaactaaaaataccttgtgaatatttatactttttaggatataaaaatgttgtagagttatttagaattagcttgatttcttatatatatgagatggagtaaaaataaacgaagcgacaataatcggtgatatttgtgatatttctttttgaaatacaaatgtggaatatttccatttgggaaaaaattctggaaatgtttatttcttggacaaacatattacacttagataaataaaaactggcaaaaaaaatctaagcaagtagaaaatattaatgtggtagtatgcagaatgttttatttggccaactatgtaaacgcttcacatgcaataccatttagcaaatcttcgatataattaacaaatcttcgatattcacattctagtttactccctccatcaccaaattaaaaattgtcctaaaataaataatagggcttatttgattgaaggagaaaagagaagaatgataagatgcacaaaatgagataagtcatcagcgtataattaatgggtattaattatttcaaacatgaaaatggattaatatgcttttaagatcacttttctagataatttttttggagtaaattttactttgggtcaccttttattaccgatatttcgcatttgatcaatcctttaaccaaatgttttcactttggatcgggtaatattgcctttgttactctcttttcatgcatatgaatgaccttgagtacttctgctcttattcgtcaataaactcccttgattgtatatagattgtttctttgatatatgacagtttagatgtatatggataaaacaactaaggatggtacaaaatgctaaggtaaaagtatctgatcgaaagtgaaaaaattagttaaagggtgattcaatgtgctttgaaacgccggtgataaaaaaaagtagcccaaggtgaattttactattatttttatttgcaaaaatcacacgatttatcatttttttactatggaacccatagatgagaaaattaattacatagataccctnngagcccactttgcattctaatttactccatncgttcaaaaaattctcccttttaggtttaaaatttatcccaaaataactaccacttaaagtgtgtgtttagtaaatgagaaagagaaccatgatatgatacacaaaattaagtcattagcgtatgattaatgatgattaatattttaaatcaagaaaatggatatgttctttatgtaaatttcctataaatttttcttttgagaaaacatacgtcatcaatnggttcgggtagcatgcatgcggaaancaagattttcttttcaccttctcacactgtcgaacatagattaatgtactcatcggttatccatattccctaataaaccaaaacggcttatttaaaataaaaataaatttttaattaaagcttttatagatgtatgttagtgacttaaaagttaatactgaaatagaaacaacgttgaaaatatcttaaaatcaacttcaaaattaagtttgaaaattttaattttagctttaactttgagttattagggcaaccaataggttataagtaatataggggcatctgatatgtcatttttatatatatagatagtactatatttgtcatcttaatgcagccttaaatgagaaaagaaaaaaaaaggaaaaggaacgcagatcagagtactactgctgcgcatgttaggaacgagcagcgttcttccaccaggccacgaccattcgtttccaatcccataatcacaagtcgacaagcagagacgg

SEQ ID NO: 2563 - DNA, 2000 bp, Oryza sativa
  N_region (255)..(255): n = any nucleotide
  N_region (266)..(266): n = any nucleotide
acattattcccttgcgactggaggtaggcctccattcgtgccttccaaatgacaaaattgtgtccatcgaaaacaaatggtttcgcagagtatttttcctccatagcggcattcgttgccacggttaggttacaacgaacttaaccgggctctgataccaattgaaagaccaagaacggctatagagtggggggtgaatatagcaattcaaaacttgtccccaaaaatactcatcaagccggatttctcaaaatncttactagaancgcggctatagagaagccggatctagaaaagaagagagatggaattctcgaatctagaagtgaggtgaggagaagatagcaaaactcgtcatcgcgaaattcaaatcgcaagcggaatttaaattgcggaatttaaaaggcgaagacaaaacgaaatgcttcaaatcattttattcatcggtgttgcaaaataaccgctcaactaggagcaaacatacacctttagaggaacattaacacaaactttaaaatctctcggacaaacacactccaaactaatcctaatacaaaagcctctcgggcaaacacactccaaactcacaccgaaactctctcaccgagcatctcaaaaggattacaaaagaagcaaccttcacccttgcatccacctctccatttatagcctaagacctcgtaagacattgtcacaaatgtctttagggcgaaaccctaactcagatgcaatctgggccttaggttgttccttacatcctaaggaagtagcctggattgaagccacgtcgcttgccacatcgggatcctcttttcacaaagagtctgcaccaaattcctcccatgtgcgtgcccgcgtgctcctcaacgtgggccccgtgatctgtgagaaggctcctctgagccaatcagcatgcaccgatcgggagatcgatccgcgtcgtctccgtcttgccgaatcgaaacttgccacgttgcccagccgtgccatgcgcgtcctgtctccttttcctcagcgcgcgcgcatgcccgcgccctgtccggagccgccacgcgtctcgccgagccgctccgcgcgcgctcgcgaaaaccgcgtgggtcccacccccgtgcgcaccgaattccttgccgccgcgtgtccactgcgcgcgcatgcctcgcgcgatttcccgcgcttgcccatgcatggtgtcgatgccatgggccgtcgtcttgtcttgggcctgctcggcctggcctccctgccagctgatccatccatcatcttgagccacgaagaagggctggattggcttggcctccctgccaaccaatcacaacacacatgcacccatgggctagcaagctcctcatgcacacatgcatgtcttgagcccgtgcatggcattcggccatgtgcacgcatgcataaccgaagcaccactgcccatgcttggcatatgcacataccagtgcatgtatacaagctcctcttccattctccattttcttcgcgaacccggcacttgcacttgaccttgcgaactccgttgcgaagacctcctcacatggtgtccgtccaccgtgtgcaaccttgtgtccaatcttgtcacccagcatccttgatcgctctggacctcaactcctccctgagtctagtaccgatccgtcgttgactaagatcgaccccgatcacctgcacacacatgaatcaaacaaccgttgtcttggcacagatgtcgcaacctgaccaatgttagtctacgcacacacttcttgcacttccggtacttgtcaatttcccatcacaaaagaactataaccacacatggtttcacatcactagagtcttgaatagggattccttggaaaattttcagcatagtggataaatccacaaagctactcggctaattgtggactatgcaagattgttttggggatacgagggcttgttgcgtcacatcctgctttccaaatgggatcctcactcggacgaccgatgctctcaacttccgatca

SEQ ID NO: 2564 - DNA, 2000 bp, Oryza sativa
  N_region (879)..(879): n = any nucleotide
  N_region (917)..(917): n = any nucleotide
  N_region (946)..(946): n = any nucleotide
  N_region (1357)..(1357): n = any nucleotide
  N_region (1993)..(1993): n = any nucleotide
  N_region (1997)..(1997): n = any nucleotide
cagacacttgtgtcattggtatcgatattttcttttaggtatgcaaataatctacttgtttgtctatcagcacttcagtataaagaggtatgctaccattgacaccaaacaaagagtagcctggtttctgtatacccacccaagcctaatcctctaagtgccgttcaaaccgttgctgtcagctccttaaaatgttggtcccccaagttaatttttttaatgaaacggcaggaggattggcatttgattaaattagcaaggaagtaaagattccaaaatttcaaagaaaatgccaaggggccaagaagacagtttacagttgttgcctttctagtaattatctagtctctaaacatgatgctccagctgcgtacccaagcttgcacatttgaccctaagttatgtcttctgagaaggattacacaaattgaaaatttcacactagtatcatataaaatacccaaatgtacactatcagtagatgtgaaatgcgtacacgcatacatttgaaataaacaacgtacaagacatctccatgcactcaacgccactcgccactagttctgagttctggccatgcaagtagcatattatatactctcccgagtcaaagctctcaacttacaatattgagaagatgggggccagcatttacctaaggtttggcaataggacaaatggcattatttgttttaatgggaatatttttatgtggttcccaagcttatcaagaaactgatgtgtccactccccaaacagaactacagaagcagacatccggttccaatattagcacaagaccaaattacaagtatgtgtcagctttcaaaccgctcagctacttctcaacaaatatatgactgctatcagtaaatattnacatagcattcattgatctcacttagtctattctaganggttgaaagaaaaatttctgaaaatcccngaagtgatgccctataattcatagctgtgtatttggcataatttactaaaagaactttgttttttttctcagaagcaacggaatgctatgtacgaggaatcatcgtttgagtactacagttttgttacctcagatctcctgggtaatcatctgtccgataaggaggagcgcagaaaataacgtacggaactttctgaacagctggtcctttcaaggagggaatgatcccaagttgagtcaattcactgtgatgatctgtggttgcagtatgaccaaaaattttgcaacctggatgctcctgtaaaatatgcaaagctatcagacatatttttacatctttactagtagaaaaggaaagcagaaaatattatcagcaattcagcatatataccatccctcacattagaaacnaaaataggaattccattcagaaaccatcgttaagcaaggaaaagataaccataatcctactagtcggtgcttcactacaccactgaagattatctttatgtgtttcaaccatgttaatcatcaagtcggcaatgtacaatgaaattcttgatattcagaaacagcagaaaagcagggtaaagggtaccaatgcttaaaaaaaagggtacaaaaagcaataattaacctgctgccatctctccgccacaatccggccaagcacgccaggcccaacaatcagcagatcgtactggccaacgccctccgacgcggacaccgccatcgccgatgcctcctgagatgcgcctgcaatcccggaacgaagaggaagcgaacaaccagcagtcagtttcaatcggataggaccaaactaagcaattaaccatcgcagtcttgccccctccctcatggattccctatcctatacgtccctcgccgatcgagacctgccggattggcaaaaatcgaggtagaagcagaaaagagcaatccgcaaccagatattactaaactaaactaacccgctctctgtcaagattgggcacgtacgtaccgaggggagaagcggcggcggcggcgatggcggcgtgacggganggcnggg

SEQ ID NO: 2565 - DNA, 2000 bp, Oryza sativa
  N_region (758)..(758): n = any nucleotide
gcagaactagattcatccaccattactctttatcaaatggttggacagccatcaatgaagtctaaataaaattaccaaaaaattagctcttttccttcttgttgcgtggcaaaattagtattaacaactagctaagcatctaaaatattgtcaatcctgtgcagctaccttcatctgtgagttcaaggttaaacaaacaaaaaaagttcatggtgattctgattccaaaggattgcgtatagtaatggatactaactggatgtaagcggctggaattttcagaaatattatggaaatatcatacagatgaacatgatttagctacaccagtgctatctgaaatgttggcaaaagcaaatgcacaaacattttgttactgcgatatttatatttctggtgaaaagggtataagaaatggatgacctgcaaccgttggtgctcaccattacctgctctgcagaaatcctttatacaaaaagaaaccccattagtcaatggagaccaaaccactacactagaataagcaatatatgacaaatatatggtactgcatttcaaagttcactagccatacaagggaaatggcaaggtgaacattgttagcagaaacatataaatatgaaacttacctccatgtcatcaacaaatccttcgatagatcgatacggagcataaacaatcagatcaaaatctaaagactggaataaggtaagaaatgtaatgtcatgttctgctggtttggaggaggtaaaatgacnaaaaaatggaaatggcatactttgagaacaatcatctcgttatttagaataatctggtggtcctgttgaattcctttaccaagttcctcagcagaaacatgattttcttccactttgcaagaagaataaatacaagttaacctgtcaagtaaaaaactgattaacttcatatctaactgataaaaaaaatacaaactgaatcatgaaagaccatgacttgcagaggacattatctcttcgagtaggacacaagaaaaggtaatttactcatcaggttatctccttttgtacgttccaatctatagaagatttcttataaaagtgttgcttacataatatgctttgggtgatgttccattacagaccattgcagataaaatctcttgaaatatattattgcggtagcctacagtgcagcaataagagatttttagcgcaggatcatgaggatagcaaaggcacagagtctcggaagaggagtgctttacctggattttgtgagggaacttaaatgctgaacatacttcttgaatcttttgctcataaaatacccgcatcaatcgctcctcttcacaagacagaggctttacacctgagctccctacaactgaataaaaaacaaatgcttcaatactagcacgcttagatgcaagtagtccactgaacaaactcccatggaaacacagaactcgatgcatatatcgtccaaagtagattatgcgagaaactactaaagcagaaaactttgaagtgaatttcacatgaggatgctaatttggatggtaacacattgcgcatctagacatataatcaatcagaatcattaaatgaaatgtaccatgatcaggcgcaggttccgggtacgacagcgacccatcaacagggtccaccttcaaccgcgtcgttccatacttcaccaagaaacaaaaggaaaaaaagatatgagcacctatcatctaataagctcaacaagggagttaggttcagagcgccgggataacccaacctgaacgagcgtctccgtggcccgctggttcgccgccccccatctatccatctgcaaagcagagagaatcaccagcatcacaacccacccacggcatatcatatcatatcacatcccaaagaaagcagccctggcaaacaaaccgatgaggaagcctcaccagatcgttcgtctggaagatccacctctcccgatgcgtggaggtccggaaatccgccatctctccgccgccgcgg

SEQ ID NO: 2566 - DNA, 2000 bp, Oryza sativa
ctcgtaattgcattgttgaataatttctcgttaacattaatatcttccttttttgttatctacactcagtccctcaccattagttaattgtatacaattattcatttattgtgctgccgtatataacaatgaaattgccactctgctgttgttatttcaaatttgtgtttatgcattgaataaacaagcaactgaaaactgctgcgatatccaatgatattttggcctggtttctttctcagccgttaggtttaatatttagaagatctatgtagctcttgtcactgatgaaagcataccatgcttggatggttcaacacagaataaacagtattgctaaacagcaaaacatggatcattcaagtatggctttttgtgcagtacgagttataaactgcagctgagttcttgttttgtaccatcttgaggcttgagccactatacaaaattaatcctagaagggtcctggcattgtggcatatgcaaagttcatatgaacactctatgaactgtagacagcaaatatgataacatctgttttttaaatgataatgtttgattaaatttctattttcaaacttttagatgatatgttaaattgttaattatctgactataatactgttttttggtatctaattatataagtcagggtttttttatgataattttacttagatttacatagagtatagaccttcatctcctgactcttcgggacgtgtactggtgtggattttgacacaatccatgcactacggtgaacgaagtattacagtgctatacactgaacacatattggcatacaatttcgaatataaactggttggttctcacatgactagtttatgtagcgttgcctatagtggttctttatattcaatgcaataaaagcatgtattcgaagaccgtgtatctttcaaagaatatgcaagatgtatcatcattagcaactatatgtacatcctcactcttcagccaatatattccatgtttgatttgcatcttggggtcttctgctgcccaaaggatcaattgctttttttttgggtgcaaacgaagcaaattaccagcatgctaaatacctaggaatttccacttgcaatggctgagtgtcaagctggcaagcatcatgttaaaatttatgaaatcttatttcatctggtgtcacttgatatctccataaccaactgggaagtgggagggaactatcatgttatgccgtgatgataaagcccgaatcacccttcataatccgtcggaataaaattcaagttaaagcaacattctgaaatagctctaactgttagttctatgtggcagatgattattctccttggtaaacatcaatggaaaacaacacatttgatcttgctaggaacatggaaatacatgctttgtgcagcacctaacaattttgaactgtcaatatgcattttgtcattttaattccatgaagttaattgtgtaaaatgattcctagctatttggtcttacccgtttctttttttctttgactttagattgtaaccatgttggcttttgccctgtgactggcaagaacagtattgctgtcaacataacatgaacaatatttagtatgctattagtgccattagcatgcatgctattacctatgcaccatgcacgtcacctgtgcacccatggaatgtgtcgctaactagtcacctaccgacctcacatttgtgtttctttaggagtattggtggtaatatgtgataattaatccaatttactttccaagttcccattgcagtgcttgtattaatgaatttattttatatatgtgctcaccttgtttccatttatgaattattaggcggggcttaataagttaatatgtgataattaatccaatttactttcctttacacttcatgtagttatgaatttatttgatatatttactgaagatgctcttcatattgctaaacctatttgcctatatgaatgtgactatggacttccttctggaatag

SEQ ID NO: 2567 - DNA, 2000 bp, Oryza sativa
ctcccctgcacggagatgtgttgttgagggtgggctgcttttcttttttgtatttgtgtggagtggctcccctctcaagtttagtttagtagtatctagctggtagaataggaatagagtagaaatcaggagtccggtggaatcttaggtgtatgactctacgaacaaaatttagatcttgctacccacggttaaataattatgtgctcatagttggtgcatgcaaaacccaaaacatacttccattattataaacacatacagagactcttgtttttggtgttttttgtgtcacgttagcttcacttcaaggttaagcttagcataacataccaagcaactttgacaaatcttggtttttcttccaatttctcaggcagactatgtgttgaggattgcactgcaaatggttaactccaaaagcaaaaggaactctaatccactacttccacaagactctagcactcctgtcaatctgcaacggcagcatagggttgcaggtcacaacaatgggcttgtaataatgcaaccacatcataaacaagcttcagatggcatggttatgacaaaagatggtaatcataagaaaaaaaacattgttctccagtgcaaagcaccacaaataagaaggcattgtctagtactaaagccattctcaaatgtgcaatatttaccttgacatgttatttttttttgtccatgaataatattttcagcacaaaatttcctttgtggtagaacatggagcattatgaattgaatttttaattatatatgcccttatgcctattttagaggtttaaatgacctgtacctctttcttccttttctatattaactaagaaaataatgtaaattagtgaattttacaatatttagcataaaaagtatgaaaaatgttgcgagcttgtgtattcttcattatttgagtgtagttatataagtttaatgatgtttaattattcacattctacagcttctaaaccagactatatttgtgacatactgatttaacatacacattttacccataccgttttacgaatttttaccacattttacccaaaagtttcatgaacaatccatagttatgtgtaaaacattctagcactctctcactgaaagagcacacacaatttaattttccgcttgacacctttatttttattttttattttgaatgttgatactttctcatgttgttctactttatgcaaaaaaaaaaggaaaaatcacttttgtatcagatgcaggccacatgttggatcaaggaagctcgataaatacgaggaatgggagcatcgacagaatcagcaatcttcctaatgaattgctatacgccataatgtccaccttaccagctttggagcttgtgtacacaggcatgttatccacacgatggagacatctttggacctcatcagcatacctgaacattgatgtaaatcagtttggaaggcatagaggccagaagttctgcaactttgtcaaccgaatgttgcgccaacgtggctcttctttgttggatgctttgcgcctccactctgcagatacaagagatgctggctcttggataacatatgctattaagagaagcagtaaagtggttgagttttctgaagatatagattgtgaacctttcaagttggactatggggttgtggacttcacttctatatgcctgaaatttttggtccttaacaatgtttgtattgatgccaatgtcttctatcccatcaactcttcatgcccagcactagaaaatttggagcttagggactgctctttggaggtccctgaaatctcatctggttctttgttgcacctagatatcgataattgttgtctatttgaagatcttctcatatctagttcaagtttaatgtctttgtgcataaagaaccctcaacacagagctcctatgatcatgacattgccatgcctggaggtggcaatagttatacttgatgagttttttcattctactgatgatttagcgg

SEQ ID NO: 2568 - DNA, 2000 bp, Oryza sativa
catccaatgcccccaattttattcacacaagaatgtttcaggaacagagaggtaagaacccacaccattcccacataaaaatcgcaagttcaataccaatctgaaacatctaaatcacctaaagaaactagagacacttcacattctcacaaacactatgtatctacttgatcaccatccttcactttgctacagaaaatcttgagcatgcatgatctgtatgttgaactcttggatagccaccatcaggctacctgtagtatgctggctgtgcctgtggcgcatacccaacataaggcggaaccggttgatcgatgcgagacatctgctgcattggaggcactgtcataggtccaaacttgccgtccctcttgtccatctcgaccttgtgctgtgtctgaatttacattttgcagtttcatcataagatatcaggaatttaaagcagtgagattattcaggaggaaagtaaaaaaaaaaatgtgccattacctgcatacaagagcaaaccctgcacattgcaacagataacatcagaaatactggtaattggaaagaaagaaatcagatttcagaaggatgaatacttgagttgagagccttacgtccagtagaccatgttagatatgcaggaaatcaactgcgaggcctcggaaagttcttcgctgccaacgatgcaagcgaccagcgaacagatgcaggcgaattgttggagacaaaacatgaagccctaaagtaacaagacagctgtgtttaatcgcagtctgaaacaaatcgggtcgagaagagtccagtgtcttagctaggatttaaagtaaaagtggtccatctatatgtaatatatcaattaaaagggtgatccactatacaatttttactatattaactagcacatatactataatttcaaatttttaggtggtccgtggaccacggtgccacctagctggctacgcccctggaagagtcggatgaacaagaggggagtgatagtacaatgatgcagttgtcgcactgggttgtctgaatgttgaactcatcttgcagcaggaacctggttgaagccaccgagttaccaaagcagcagaacacctgaaacaaatacagtttcatcagctgaatcggttcagcttgaatacattacatgtcaagatcatgtagatcatcgaactgattcagctcgggtggctacagtacgcagatggctacctcggttgcaaggcacacttcggggcagttgctctcgccgcatctcccgctgcatggcatgtacccagcacagcacacatatctgaaacacacacacgcgcgtgaaagggacttaagaacagagaactgcactgctagttaactatgcacgatgaacaaacatatttattttttctagagaagggtaatttttacccggtctctatgtccaatcgaatatatgtagcctttcaaattgaaaacttagcccctcaaacccaatttgaaattcgctcatatagagatttaaacttagaaccttggggtactattcagattaccgcaaccactaagctacatgccctttcgcatgaacaaacatatggtggaaaaagagcaaatttacctcgacatgtcattgtagagcgcacgtttgcgcagcatgtaagacacacatggtccgctggataaggagaaatggatcagataagaaacatgtcagacttagcaatattcctaagctgaagatcgatgcagccatgaagagattcagaaacctagatgaacaaactcaccaccacagagacaagcagcagcctgcagggaaaaaaaagatagagaaaattagatcgactcccaaaaatcatcagaaaactagcactatcattttgcacagggatgacgaatgctcacatgtgaagtcggccgtgatggcgttggtgaggtcggtgtgccagacgttgcggtagctctgccggagctgcgccttgtcgaggtacgcctgcgacgccgccatctccgtcgctcgccgg

SEQ ID NO: 2569 - DNA, 2000 bp, Oryza sativa
  N_region (173)..(173): n = any nucleotide
  N_region (178)..(178): n = any nucleotide
cagcttattacagcatcattgttcgttgatgtgcatgtgatgaagtacttgagttgagacattgttattcttttattccctttttacacacagtattcagtcgcgttagtctccttcgaatatgggggtggtgagataacggatgacgctgatgataactattcgatgatacnaatgnataaactaagcattgtaaagttaaattttattttaacaaggtttcctaaagaaatagaggactaagattttttttaagagagattgtaccgtcgagattgaacaaacgcgaactatattactactgtagccgttctacgagcttagtagcactcagagtttcctaaaccgtcgggaccggggttaccacgcggtaaccgtgaaccgttcaaaatttatcaaaaatttaaattattttttaaatttatttaaatttaaagaggttactgcggtatttctattaccgtacctcggcgataagaccggtaaccatggtaaccgcatcgtttatcagtaatgtaaaacctggtagtagtagcctagcagagtaggttgtgttggtggtcacttgaaaaattgcgattccatgggctgatgcccttacgtgggcccaccacccacccctgacgagtggggcccaccaggcagcgaccccatcacacgtgagaagtccagtccacagctcgctccatcgctgcgatttgcaacacggcgagacggatcaaacgggcgcctgcccccacgaactagacaagcagcaggtcaagcacccaacccaaaatcccagagaaaaacacacaaacaaaaacaacatacaactgcacacaccctgccgatgcagcgaacgtgtccaaataaattaaaaatcccccaatcgatcaatatacgctgcaccacaccacatactcaaaagaaagaaaagaaatccccccaatccccatttccagcgaaatctaatctaatcatctaaaaattcccttcccttcccttccgtccgagccagagcagtagtagtagtagaagtaatgaggaaaagaaaacgaaaagcgccaagaaaacaacgcaccaacacatccacagcagcagcagcagcagcaagcatcatcggctcaggcttcatcaggagaataggttagatgtgagaggaaggaaaaaaatccgaggaaaagtctcgagcccaccccccacatctccactgctgcagctttgcttgctcgagagaaagaaagagagaaagaaaataaaataaaaatctctcacaaatctctctctcgcagccgtcaaaatccaatcttggcgcatccccggccgcctactgttctcgccccccctctctggtaataattgtcaggctggtggttggtttgctgctgctaataatcgagtcttttcctcccaaggagaggcgttcaatttcttggtcaggatttgtggaggtttttcttggattcatttcgtcatctcgtcgcggagccaaagcttttggtttttttttttcctttggttggtcttggctcgatcgggatggatgcggggtgggttgggctcgcgtccaattcgcctccaccaccacaagtacgcttcttttttattgtttccggagtggggattgtagagagctatttcggcaatcgctagggctccgtgtgtgttctctctcgcccactttactctttttttttctatatcattattcccctttgccctccaaatcgaatcctctctcccctcctgcggcgccgcggggagggagcgatctggggagggggaagccgtcgattgactcgattctgtgtcgcgggggctccgattcggcctctgaattgcgccctggtatgtttgccccgcgtcgattcgtgggttcttgccgcggatttggttggatttatttaattttgtgtgatttgttcttgctgttgttgtagggttccatgagggcgtgaggtgaagttggggaagagagagagagagagagagaggggggtagggttgctgcggcggcc

SEQ ID NO: 2570 - DNA, 2000 bp, Oryza sativa
agaaagtaggtagaagtgagtgatggagggttgtaattggatgaatagtggaggtaggtggaaaaaataaatggtggagggttgtgattggttgggaagagaatgttggtggagaaattgttactcccttcgtttcagtttataagattttttagcattgtccacattcatattaatgttaatgaatttaaacactatatatatctagattcattaacatctatatgaatgtgggcaatgctagaaaatcttataatctaaaacagaggaagtatattttaagacaaatcctgagggcttaatattattatattttgggatggagaaactatgtattaagtgttaaattctctagaacaactcgtaagggtgacaaatagtagttaattattttcatagtagcgcattactccaccattagcatttactagagtgtcacattactgtcagtacatttggtaggtgaattaagcggagtactaaagtgtaacagctgcacatgcagtgaaggcccccggacagctatggcaggtgaggaaaatgcagggcgccacggaacagcgcacagcaaaggttgggcagttttaatggccaacctttcctcgcacttcgctgtagcagcactagtactcctacgtactagacccgttatcgctggcccattggtgagttgctaaatcacaagagagccttttcctcctttttttttttcagttggaaagatctgcaaaaaacaggaggctcacagcgaatccaaatccaattccacgatcacaattcacaacgtctccgttgcggctgcggctgctgctgctgtcgtggattaatgcccgtcattagggcggggacatgcagtgcctttgcgtgtcggtgccattagagcaggtttacgaagggtttaagctaaccgaacagcgtgggttctaccaattgtttccacgaattagtgccgtgttactactaaccatccttgtgcttaaactgcatctatgctgcagcaatataaagggagacaatgcacgcacgacgctgcattatgggttaggactcaagtcggcagcagcagcagcactggtgcactatactagtagtgcaggattgttaattagctacatggaattgactcgggtagatcggccgaccaatcaccggatccgtgaaagccgcgcattaagctttgtcacgcactggagtgaccattgcagccttcccatgcatctgaatgctgcctgaaactactacggtcactgatgactgaaagattgcagtctgtcttcactgtgtgctgctgctatacgtaggagtagagtacacctttccactttccagcatgaatgggcatattggcatcgtcgatttgtgccgccacagctggggggtgtgggccactgggccggggcgatggtagccgccgcggaatgggatggtgaggatgagaaggttccaggttgcaaaggccctaaactttagcgtgcacgcgttggtccatctccggctggtgccacacatgtaaaggggacgggccaaccagacgcgtcgcagccgagggcaccagcacacgcccgcgtgccgccgaaatcacacgtaataatgcggcgacgtgacaccaaaaacggcctgggtcgtgcgccattgttgcgcgtgggcgtgcgtgctgccgctcacggcgagtccgtgaatcgttttttcacgtgaaacgagcgaattcaagaagggctcgttcttttcacaggattttcaaaacgtaggaatactacagaaatatatgtgcaaacctatagattaaaaaacacatgaattttttctatgttgttgagcaagccaaccaaaaaaatacaaatattaggttggagtgaattattttttcctatgcttttccctttaaaattggaggaatggaaaactttcctatagttttcctatggtacatttcctatgaaaccgaatggtaggtttaaaacccatttctatttcaatgctttttctttacaattccttta

SEQ ID NO: 2571 - DNA, 2000 bp, Oryza sativa
gcacaggatcgaatggtccacgggaaaggcatctaaaacccaaccatattcaatccatattagcgaggtgtctcaagcggattagtcaacaggagccaaatcgctttgggagcggcaaacgcaggcgctttaagatatctagtatgagtcatgtgctttgcaatgggtgaacttaattttaattgtgcccggaaaaaaaccgttcattgcataatgaacattaaaaaataattgttttcattaacttagcacaaactaatcaaattgtaatatgcagtgcatcatagaaataacagtagtggcaacccatgggtgcaccaaaaactgcccaccccattggctcaatcaaaacctaaaaagcaccaatttcatgactccactacattactgcattatcactatataatcacttgtatatcagacatcacataagtgggacccatttataatatcagaattaaaaaatatacatgggacccatttgtcattaaaaagattgtaggacccactgacaggtggggcccacatgtcagtcaatcccttcacccatctctctccatctctcatcttgttcttactgggatgtctctgaagtgcacgtcccacaacacgtccatcatctcaacgtcagtgagcacggtggcgcggttgctgcggaaaccccaccctacacagctcacctcagccactctcttcccatcgatgctgacccgcacctccccctcgccaccgttgtcactgccgccggttgcctgcaccggcggcttcgggctcaacccggccttcccggaacctacactgccggctgaggacaacggcgccgcgtggggctccgtcgctgtctccgaaccggcgagagaggtccaagtagaatgcaggcaatgaggggtagaaaggttatatggtgtgcgtggatgggtcaatagcgactaaggtggacagaaaacgatcgggaattgatggaagtgttcaaaatgtgaacgagtgaactttgagtactattaaagtaaaccgatatctttaagtgctataaaaaaacgtaaactttcgatgctatataaccaattttgcataaatttttagttaggttaagataagataagataattagattgagggagttaaatgcatatggactaggtacgttatgcatgagcctggactacgggcttcggcccatggttctatcgatagattgatcagataactcgttagagatagcatcggtttccaatatctcctagattcgtgccgcgatattattatttttttttctgaaccttccgcgcccttctggccgcgcgccacgcttcaattcgcctttcaagtctcacccgagaacctctccaccctccgccatcgtgccgctgctgcgtgatcagcgtatatatactgtgcgccgtcggaattaacttggtttcgtccttcgtcgaaatcaacttggtttggttagtttgcggtgctttaagcctaaccggtgcgtacgtatactgaagccattaaattttcgtttatttttcactgcacgtagatatatacgcgttgctaaagggcacaaattaagattaacttggttgcgttggattgattttgggaaaagctgatgcttacataagccaaataaaaatctggtatagccattcaactttcatatatatgtcgtatggcgattttaaaattttactcaattagttttctcttaattagtagtatacctacgttcttttaatatatatgatgccgtttactttttaaaatatgtttaaaaatttatcttatttaaaaattatggaattatcatttatttcgttatgatttaatttattattaaaagttattcaagcatgttatatatttttaacatttgtatataaaagttttaaacaagacaaataatcaaacctacgtcaaaagtcaaatgtatcgtatatttaaaaacacacggaatatcgaacatctatgtatatgcatgcaggcggtacatccacactagtaattca

SEQ ID NO: 2572 - DNA, 2000 bp, Oryza sativa
atttcacataaagatgtcagttctaattttagcttcgggtagccgcttgcacttttggttaaataaagtgttgctattagtacctaattaaattcataaaactctattttccacaattatagatggtggtatactctgttgtccaatacggttagcatggtcctactgaagtgctcttagtataatccttaggtaaactaactctctatttgctagactaactggccgttatttatatatgttcacttggttgtttatattcacttatattctgattgtgaatgcatttcttattatgtagggtggtgtcattttgggacgaagtatcctgttgtcgcatcgagccatctgctatcgcactatcagttgtggatggaaaaaaaataaaaaggatcaaaatctagggagtcaaactaggatcacattcctcaaatcggctataccgttctagattattgttctgaaacatattccatagttttagaagagatataccccctctcggtccacttcctcaatccatcgatgcaagaacttttgagacttagacaaaaacatctttttggctgctttagctatgatactttaagcttaattcaccaccaaaatatggtccaaatgtttctatttgaatgcaaggatgtaaagtcggaacctttttaagttatgtaaacacaccttggatcaagtgaaatatgttgtgacgtgctaattctgtgtttcacaaggatagcttgacattatgctgatgttcaattattggcttcacaaggatagttggtattattatgctttttagcaaaccatggctttacaactataattgttgttagactattggctgccttatctttttgtatggtgcgtcttgagcaatagtcttcatagcttacggaaaaacattgatggaggcataatggcttgaagagttgaagtaattatggttcatgtgctcactaaaaaaggtgtttaatgtcaatgttgaatcctgaacttgaagcagattttctgaaagtgtagctagatgtcactctgtagtaaatatccaacacatggatttaatactgcataacactgcatatatacacatacaagatcaaacgaactgaactgtatgcaggcagtggtttgctaggtgtcatgatatggcttagacacgatttcagggggttgggagctaaagggctatgcttctacttgaattctacccatggtttagtatgtgaggctgccaagtgatcccttgtggatgttccctagaagaattaggcagcgttcgagagggtgagtgagttggtttctttcgttttccgcgcgcacgtttcccaaattactaaacggtgtgtcttttgtaaaaattttatataggaaagttgctttaaaaaaatcatattaatctatttttgaaatttaaaatagttaatactcaattaatcatgagctaatagctcatctcgttttgcgtatctttctaatctcctcaatccccttatcctcaaacacacccttagtgaggtaaggtgaggagcatgatggaatttggttttaaaccattctttcattctcttcctctttgacaaataaaaaatttatagatttaagaggtgattcaccaaggtagtatggatgatgaatggatagaaaatgggcccatatagatgcttcctagaaggactatagagatagtatgaattttggtgaaagttgactttaacccttctctctttctttcctccatttgtaaaaaaaaaagatagattcaaggggtgattaactaatgttgattggttgcatgtgaattactaaagggcccttgaagatgtactctaggcatgtgtgagtagtaatgtaaattatatggtgagaattgtattttaacccttatctcaccttttgagaaataaaagaaagattaaaagagagatgagtagatggtatgttggctgtgattggatgacacatgggtcccataaggatttggtcccacatgtaagagagat

SEQ ID NO: 2573 - DNA, 358 bp, Oryza sativa
ggctactctctacttttgctgcggctctgctttgttttctgagtagtggcggttgcagcagaaacagtggtaggtagcgaatcgctatggagcagcgatttcgtatggtttgggagttttaggaagttcaatctgagtgtgtagtttgtgattgttggattcgtttgtgccatcggaaatggctggcgtctgcataagatgctgcttcatgtggaagctgatttcgttggtagcaatgtaggattggaccatcggtgtgtgtacgcattggttttctgaactaaactgactggcattgatgcgtggaccacaattggaacataaacttcgtgaatgcaagtgttggtacaagcagtga

SEQ ID NO: 2574 - DNA, 2000 bp, Oryza sativa
agtaagcaatatgattaaattgagttcacatatctgggcagagtaaaacatcatataatgttttgaattgtatcacactgagctcggtatacatacagagctgtccataattcgtttagcaaaccacaaagttgaatgaaaataaatagcacacactacacactataagcgtgcgtaagtaaaattaaaagggaactaattttgtacgtgtggaggcacaacagttggaatgaatggaacaatttgtttgtcttgtaataacagaattcggtaagcgatccataggaaggaaatggaaaaactacgaataaatttttaacctacatttgctaaatataaatatatgcatcaatatttactgccatgtgcatatcaaacatgacaggagagcatctagaaatgatgaatccatgtatactgagggcaagctgaacccatacagtctttaaaagaaatttacctttgttttttttaataaccgtatgatgcaatagggaaaaaaccaaggaataatcataaaacgtgttcgatgactttgggtaccataggtgcaacatatgggtagtgaaatctgcatttatatataaaaaaaagcatagctagctgagttgtacccattgattcaggagaataaaaaagatgaaaatggaagtacacacggtccacgtgttagaacgattgatgtataaaaccgaggcatatgtatacatatatgttgagttattgaccgtatgaaaatacctggtaaagctaaccacgctaattcacaatattactaaatatttcagagtatacgacattatgtgttttagattcatacccaggtaggctattctcaatgaggactcgaagaccttgaggtgatgtaatacacatttgaattattaaacgtaaactaataacaaaacaaataacatatttcatctgtaaactacgagacgaatttattaagcctaattaatccgtcattagtaaatgtttactgtagcatcacattatcaactcatggcgtaattaggctcaaaagattcgtcttgtaatttacatgtgtaaattgtgcaattgattttttttatccatatctaatgttttatgcatgtgctcaaacatttgatgcgatgaaattttttgggaagtttgaaggacactaagagcccttttgaattgcagggttgaaaaaatggaggattaggaaaaatacaggattctgataggaattgaattgtaaaacagaggattgcaaaacacaggaatagtcgtttgatttgagcgcaggaaaaaacgcaggaatcggacgagagagatagactcaaaggaaattttccaagaggttggagctcttgctaaatttcctccaaaatccatatgcaatgtgctattccataggaattttatagaatttagaaagcttcaatcctttaaatcaaagaggcaaatagaaaattttctataggatttgaatcctataaaatttctatataaaccctttgccctgcacactgccttggtatgtactactcctagatgcgttgcaaagtccttgactggggagagggggcatcatctgaaaagaaaaaataaggcaatggcagaagagtaatatccggaggaatacgaggacgaaaggccaccgcagagatggggcccaccatagccagactcccaaggtggtaaggaaaggaaaggaaaggaaaggaaacggcctccactccatctccatggatcgtctccgtcgccccctgaattcccgacgatgagatcgatgaagaggccgggaattcacctccagatttgaggggatcgatggtggaatctccttctccctttcccaccaccactaccacttctgctgctgctcctcctcctcctcgtcggcggcaaccaccacctcccgccgctagcctgccttcccccggctaacctcgccctcactcactccactactacttttcctcttccgccccgccccctacatcctagatccatccatgctcatgctc

SEQ ID NO: 2575 - DNA, 2000 bp, Oryza sativa
acgacgtccatttcttgtagattagccggtggtccattacgaaaatgcgtatgattaggggtgcttctaaaaagggaaaaaagaacaaagttagcacaagtttaaatgtaaatatgaactggaacatgtaaagtgtttaaatagtatataccactatgtggtccgcccaccaagcatcatcagcagtaaatgttcctttaattggatcccagcctaatccagttgatttttccttcagttcgatccacaagttgtattccttctttagtgtttcccagtggttctttaattgtttttggtcatgctttttccctgtcctctgaaagaacttcagctgtagatttttgtagccagtagttgacaaacaacccgtaggtctattcccagcctcacattcctcggcacagatctcacaaaaggccctgttgctaaatgtgtcccaatttgccttggatcgaggaactagatccatctagacaatttacattcagccataaacacattttaatgatttatagtaagatttatgtaatgctacatgactttattacatgaaaaatgtttaggcagtaaagatgcacagcaatgtattcagaaaaaaaaagatattcagcaatttaacttcgtgctgtgtaacaactacattaatggtctaaataaatcatgtaggcaaatcacgcaataaaacacatcatactgatattccatcattgtcacctgctaatttatccatcgagaatatgggcttgtcttaattaccttgatcacagaaggctgccaagaagatggcgctagtgtcagggaagaatctgatgacagttgggaagaagagcagcaggggcctaggggaggaagagggccaccgatgcccgtcgccggcggcggagagatggctccttggttcgctctcgctcgaggatagaattcaaacaaaacgattcgttccgtaattataaatggattgcatggtgggtaatttgttatcaaatttaatggcactggatattctccaacccacaaaagccagaaaaagcacctttctatgggctttcggcttttagttatagggtggcttaggcttttttaaaagccagatgaaaaagcctgccctttgtttgggctttagcttttctggctataaactgaagcttaagcctaaacaaagagggtctaagtgatgagtatttgaaacagaggaagtatatccaaagttgtttgggacaaacgtgatgtttcctcgagatgcaaagccccaatcaaggaggttgttgcacagagagatggagtgctactatcataaatcaaaattgtccattgtttgatttttaaatacaaatccatgcacgtccttcatctacatttgcccttaaatgttagctacaatactgaaacatttcaaaaaatatataaagaaatgcaagcctatgatatctctatctctgttacttgagcccaccaccccctgtcaggaaaacaacagtttgcctagaactcacagacataccaataaaactaagtatctgatgtttcaaaaccgtcttagtaccaataaaataaacctattttatctttgcgaaaccatctccgcccacgatgccatcatccaaaaatccaaccccaaaccgatcctctatcctcggtcatcctagcatgcaaaaaattagaaaaccaggggggatgaccctgtgagaactagaaaaaaagaaatgggctctccttctctagtccgccacacaataatgatcttcttttgttcaaaaagttgatttctgttgcaactcacagacatttgactagtatatcatcatacaagcagcatttaattctcctcgtacccatttcaggcatcattcagcacagacagtgcaacgtactcgaggtgacggcggagaggaacaccattcttcatgtcgcagcggagaaagggcatggcgagctgatccaggagctctaccataggttcatcagggacaatagtctcctctctcgccggaactcgg

SEQ ID NO: 2576 - DNA, 717 bp, Oryza sativa
tatatataagttttgctacaaattattattattatgctaatatgccatatacgtatttggccaaacgatcggccgtcattttacctgcaaaaataatttatgtaccaaagttttctattccctccgtcccaatttaagtgcaaccataaattccgtgctcaactttaatcgtccgtcttatttaaattttttatagttaatatttttattgttaagagatgataaaacatgaataatactttttacgtgacttatgtttttaattttttttttcaaataagacaaacaatcaaagttgtgcacgtaaaatcatggactgcacttaaaatgagagggatggagtatataaaactagataagtttaaattttaattatgggtgtgtttagtttacatcaaaattgaaagtttggttgaaattagaacgatgtgacggaaaagttgaaagtttacgtgtgtaggaaagttttgatgtgatggaaaaagttggaagttcgaagaaatattttagaactaaacacggcctatataataataattgatacacaattaatcctgcactaacccattttcctcagcgaaatctccgtatagaacggagccagtccattagacaaaatgtaaaccgtgacgtctaaaacccaaccccaaaaagtaacgaagatcggacggatcgatccattccccttcactccctcgactcgacatcgccggagca

SEQ ID NO: 2577 - DNA, 2000 bp, Oryza sativa
tggacttggactgctgccatggacgatcttgctgatgaccttataaggccgctgaaaccaccgtggatgagacgctgcggtcatctgccggccacctcccctccggccagatttgggagaggcaaggtaggggaggggagtagggaagccagcggtctcctccgtttttgctgccgccagtaccctcctccccactagccagatctggaagcgggaggggagttggggagcgccgctggtgccccctataccgctttcgatgtcgctggtctcctcccatcctaccaccggatccgtcccctatcattgtcaccatcgcattctcacttctcggggggatggggggagcattgcctcctttctcctgtagcactaccgccgaggtccagaactagtcttctcaccagtagggatgaaagcagagaggatagtttccgttcatcaagagaagatacctttcggagcggataattctcgaatagttcggatacagatacgaacatgaacacaaatattttctcccgtatacgaatacgaatatgatatcggatataaggatactaatgcggatattcggtgaacagtgctatttggataaccgctgaagccatgagacatacactatttctttataactctatgaccttcaatctaccttttagattttaaaagtagtccatctcatcacactggtccacataattaatattatttaaacttttaaatatttttataaattatactatattaaaggagctaattatatatgacgatatttatttccattagaagtttaggtgatttcctttgttccgagaaaaataatgttttcatattcgtgtccgatcatattcgatccttattcatattcgagataattcgtatttgttttcgtatccgccaaaaaaatatatgaaaacggatatggtatgagcattatccgtccgtgtcagctccattttcatctggggtcgtgcttagggatacaagcgggccaactcacgaaccctcttataggtaaaattagtaggtaacctgtggattgactcgcgggttacctactaatttgatctataaatgggtttatcggtcgacacgaccacttgtatctctaggcgtggcaagccgagccacgacacggaaatccatgggttaccacttatttgacatataagtagatttgcgggttggcccgattgcatccctagttgtgctaccaatctgcagcccccgagcgatcactgttgtcatcaccttcccgtgctcccgccctcgcggcgccgctctttcaccgaaccatccccacactgtttacacccaaatttggcacctaggattaaaataggaaagattgccaaaatttagaaatctaccggtttcctccgagtgggccggtctgaccgccatgtgttgggcggtcagacagccggttgtaggccggtctgaccggcgggtccgagttcgaccctgtttcgtcgggtctcgaggtttccttgctcgggaaggcatgtttcgggtttcctttggattctaccccgagttggacgtggaggagggcctgtagaaggcaagaccaacccgtatataagggacaaggccggttcattgtaaaatcaatctactatcaatcaatcgaatcgttcttttcatattgcttttagttttctcttaatttgtccatctttgtcgatttgcgccgtaaaccgtccgccgccgcagcgagagtgcaacacctctttgtaggtttgtcctaaaaaccttccgttttgcccacgagacgggtagttatctagaaatcggctccgctagccggtttagttatcaaaacccatctaggtttagctcttcgctagatcgaggtggttggcgactctaggatcaccgcaaggcttgaggtgctgcgatcgtgcttgtcaacttgtcaaaaaagttgccaacacgatttttggcgactccactggggacgagatccgttcatcgtcaactcgacttcgacttcg

SEQ ID NO: 2578 - DNA, 2000 bp, Oryza sativa
gggtggccacaacagagagaaaataataaagggccacgccactgaatgagtgaattttggtcagcgcgtggtgccgaaataacatcttgggctgctgcacacgcactcctacactccaagtgcacgcacgtatcccttcatccttacccaacccccctcccctttgccaccactgcactacgctacggctgtgtttagttcctcccaaatttccaactttttatcacataaaaaacttttatagtatacacataaactatcaattttctctctaaactactaactttctctcaacttctcaacttttccaccatctaaacacagtctaccctacacttttatagtcctactgaacctgcacgtaccaccacactttctcatcagagtctcactgccactccacatcaaccacgaacctactattcccagctctcatatcatagctttccactagaaaaaagttattcgactttttgattgaacatttattttattccctacgaaatactacaagtataatgtacaagttattgtaatactaatgtatctagtttagtgacttgcatatgaatccaattagtccttggtgttttacatttagatttttctcgcatacgactaaaaaacaactcgaagtaattttaaaatgtgactttttatactctcactctcttctaccaaacagaccctaatttcactctcttagtggttcaaaagcaatgggttaaaaaaacaacaaatattgtctactataagtgaaaattctgctagttttatatgggtaagtatttgtcacgccgattgaaagcgagagggaggtgggatcgactatatttaaggcaatttctaacttttaactctatggataaaaagaagtcatatgtagaaaagggtattgtaacttatatagtagtaataagaaactactatggctattaaacttctaactttttccatcacatcaacctgtcatatacacacaatttttcagtcacatcgtaccaatttcaacctaaacttctaactttggaaggaactaaacacaactatataacaacataggccaaatgaaaagtttctaattttgtgttgtatccatggttacaatagtacattttgcatggaccatgtgaggagccacgtattcgcgctagtctatgctcctttagtgctacgaattgaatgctgacaatattgctagtgctatattatgacttccgttacttttgacctaaaccagcagatatacatacgtcttctatcatgacatatttagatcgaaacaaagttggtctatataaaagtttaactagaattttggccaccatagaaaataatttgttaattggtcgatacaaaagtgcctttcttcttttttttttcttcctttttccgaccatagtcgtatatggatgataaaagtggtagctattgagtatgacctgtgggaggccaaatattgggtccttaaaagccaactatactcatcaggtagtatatagaattattcataaaaggcaatttttaactctgtatagtatactgtagtactgtaataaatcaacaaataataatagtactagtagcagagttggaatagaaaaatccaccaaattagtggctgtaccgaacgttattagcgctttaaatgcaaaggagtcccgttcacgaggaggagaggagcatggagatacggaacgcaaacaaattcatcttctcctccgtttcttcttcgcttgtctccaagctgtgtactctactcctctgatgagtagagtggactttgcagctatcgagcttggattctagcgccatctccatctccacctccacatccctactagtatacatcattgctgctgctctgccatcgtcgcgcgcacacacgcagacaagaaagctggaccaaacgggccccgccagcaatggtggtgccgccgccgccgccttcccttctccccctctccctacaccccgcctctgcccgtgaggccaagtcc

SEQ ID NO: 2579 - DNA, 2000 bp, Oryza sativa
ctccaattttaacaaagtttattaaaaagaaaattaaaaataatcatgcttcctcctttgagccaagtctggcccaaagtcttcctctctcctcctcggcccgcagccgaagttcttccttcctccctccctttctcttctctcccgggcatccccccctcctcactacaccataaccaagtattcatggcacttaactgccggcaataaaataaagttagtggcgaactatgtgccggaaatatatcaagtgctggaaataatcttgaacatcatctcatttgccgggaattaaaaaaatatggcagcaaattaagtgccggcaatgaactaatataacaggtcaattgatctgccataaataatttaagacaacacattatctgccgggaattttgttaccgggatttggctagctaaaattattttggcacctacaccaaaaaaaatccacgccaaaaagaaaattgacaaaaaaaaacctaagcgccgccacctcgtgtcccgttccaccgcgcgcgcctcctctgccaaatcgactgcgcacgtcaccgccttctccgccaaatccaccacgtgccacctcgtcctcctctcccaccgcgccccacctcctcctcctctcccaccgcgcgccgcctcctcctcacgcacaccgccgcacaccgccgtccacccaaaccggccgcccacccaaaccctcccctcctccccacctccgactcgacccaacgccttcccatctcctccgccgactccccatcgcctccacctccagtgcctgcctccacctcctcttctgacatcaactccccttattcaggtaaaaatgaaatctcttggttatatgtgtttttcttttttcaaccttgccctgtgatttactcgatttgtctgcatattggtgcttgtgtgatggatttggaggggaacttgtagccattagttgcttagaagtcgagggtaactgattgaccagcttgcttgttctgtagtttaacgaattttgcaccgattgcaatcaaaatttgtttcgggtgtacttagaattgggagaatgacaagggaggtaaccttgaatcatagatcaacaaggtaaccatggtgttgtttgagctaatgaacagtattcccttagcactacatgttttttacctgacatatacttgttgaccgataggcctggttagcctgtgattcactcgaattagtctgcaagtaagcacgctgcaccgcccagattgggctaccagctcactaattttagcacatgtcttgatccgaaacagtgaaccatcggatgctacataattctgaatatgtagctctttggcagcttgtaactctgaatatgtagctacatacatgaacataattcagagatacagtagtacaaagatttcacctaaatttttcagagccatctatgttcttgtagttttcacctgaattctgatacctttagaatttggagatttcatcttcactccctgaatatgtgcatcatggcagcaatgactcttgaagcgttagggctaaatacttgtgttagccaatattacacacatgaggaaccctctgtcttgtatgtctacatataagtataatgcaccttatatgcaagctacaaattgttttgctatatctctgccctgcatataacatgttggtaatttagttgtcttcatcgatcaatttcgtttgcttataagctatgctcatggatgaatatagttttttgataggaagttgatttgtttcaataaagtcagtcatgtaagtacggtaacctgttgtactcctatacgtaaggatttcgttaaatgttatgttgatctggaaatgggcaaccacttaaatgtcataaggaaaatatcttttccccttttgcatctctctctgatgtctcaagcattaatccaacagcaaaatgtttcatggctcggctacccatgtgctcggtatcagattcctttcgatccttcgcgtttctgcggctc

SEQ ID NO: 2580 - DNA, 2000 bp, Oryza sativa
  N_region (767)..(767): n = any nucleotide
  N_region (769)..(769): n = any nucleotide
  N_region (915)..(915): n = any nucleotide
  N_region (1523)..(1523): n = any nucleotide
gtgatagaatccaccgatccactttcatcctcctcatgttgtatgttcctaagcacaactaaagtagaacacttaggtagtataacattctcagaagtactgaaattaaaatcagttaggaatgaattcacctgaacttgtagtttcttggcacgacttcttgtaagtggaccttgaattgtatcctttgtgtttgatgatggttgcttggtacttgaagtagcatgcacggttgggatgtcctcatcatcaaccctagatgctgatgcaataaatcccttttccttttcaaaaataattcattattgcgtcataattcaattaaaatccatataaatgctttaatccggtttaatctttaaaaattcatatctaattcattgtaactcggtttaatgtggttcaagttgcaaaagttgtataaaataaagatctacatattaaaattattcataaattgaattaaatttatttaattttttttaaatgggctttaattagattaaatctagtaaaattcataataaattcatatgaagtcagaatgaggccgttcaagtctcataattcatctaaaattatgatctacatgtttgtttactttatgtgtattgtttatttggagtttcttagtgttttcctcgttttgcgttttagcttgtcgtttccgtcgttgcgaaggttcgcgagtgcgccggaagtgttcaagaagattaattgaagaccgaatattgcaaggcaagtcacacagatcccaaacacaattncnttgagatgtgatcctatatttaaattctctatttatttcaactgtgcatttattttcaaatgtcaccgggtggtgtgaacctattcctttgttatggcctgtttgcattgattaccctatttcttgattacctcgggttataattngactagttggatttatatattggttcaactagatgtattagatataattgcttagccatgcttagaaacattagcacatgattgggataattaatgtttcactattatttaatgatggatatttaatagctcacgatggtcaatcgtgattggttaattaattaatgtgccaactaaaacttgataatggtgggttgtgagcacatggttttgatggtcgtgctcatgaaaattaaggaccggttcacgagtttcggttgtgaaacattaatcgttccaaccacaagccagagtgggcaacggctggacactttgtataacaaggctcattgcggagcaccagactgagaagtggcggagataagcccacgggggtcgctggggagtccatgactctggtttttgagggggtgactatgatccgggaacggtgcactgctttgggttgagttatgcgaggggtcttgtcacaactacagaaatggtgacatgttcagcatgggcacatgatgatatggtgacatattgtggagttttgtcttgtgggtacagtggtacacctctagccagagtaaaactattcgaatagccgtgcccgcggttatggncggtcgaacaatgtctttcgtgattagtcccacactactcattaatagtaatgtgataattgatggtaattaatttagctcctggtttggaatggtatattcctggtttggagatagatctgtacaactgggtatggttgttcaggatggttgggcctgtgcagcatggatgtgctgttcagtgattgattaatattgataattaattactctattgttttactactcttaaatgtttgctaaatgctgcttttgcaaatgagccctatattatgccatcctttggtatcctgtgcacttgcatatttgctgtgtggcttgctgagtatgtcatatgctcaccttgcaataatcaatcaaacctcagttgaagacaagttgcgaaggagaagacgtttggcttataccccagttgagctacctgtgggagtggagccggagcttcgctagattttattttccgctgcagttttcttc

SEQ ID NO: 2581 - DNA, 2000 bp, Oryza sativa
gggacactggcggttagactgatggcatcggcccggtcaaaacgactggacactggtggtcaaattgacagcatcagcccggtcaaaccgacgggtttatgatggtcagaccggcggcagcaacaggcgttagcagggcaatgcacaatcagatcgagcttcactaccggtcagatcggaggtcttcgagccgtcagaccggtgcatctactccggtcagaccaatctatatcgaattcgagggcaacttttaattccgctaaaagttttggtttttgggtactacaaccattcacccccctctggttggtttagttcttgttgtatgatcctacaaattctacatagtggagatagtcgcacgtaatgacagatcatggccatattatggtaagaaggggttccgttctagtgcccggaaataatatttgcagagccagtgtggaaggcctatgttatagagtatataactttgatcgtagggatcaatttctagtcgcatagcttcataataattctgcaatgcttcataataattctgcaaagcttccacataatttccttcagattgagacaacatctattatggtcgttcattctatttaataaaaatctccgctccaaaactatactccctccgtactcgtaaaggaagtcgtttaaagataatgtttaagtcaaaccttgagagtataaatcatgaataactctcaagttgttgagtttgaaaatgtaaaaattataaaatactttcgtaaaagtatacatatattatttttcaataaatatttttatagaaataagaaggcaaagttgtgttttggagaccgtatcgttgtccaaaacgatttcctttacgagtatggaggatgtacatgaggttttcacctcatacggctcctcatagtaataatgtaaaaatagaattaattccatatcattagtagatcgtgccgtttaaaaatgatgagacatgttatctggagtataccaattgtcaatgttagaaatgaaaacggatatcgagtatatgtgcaattaatgcatagtgtccatgccgacgtttgactagaaagagatgctttctctcatcatcaatgatggagcctgctttgttttcttaatttgtcatgatctttcatccacaaatatctcttgaaatttgaagtatcgtttaaaagcatttgcttttgatcaaggaaaataatagtgaatttaataattgtatacttaaaaaagcggttactttatctctatataatagctctaactcctccaatctcctagccaaagtaatccatagaattctctctcatcccgattatattttctctataatttttctttagatctgtataacaactacattattatttttagtttgtgtgatctccatattagccttcttactacccaaccctcactctaattataataccattatttggcaccgaactttatcaaatcaaagtattgaagagatcttttattcatcatcatcactatcacgagttcacgaccgccatcgatctccttatctcagagtatctcagatctgaaaaagtacttacctatattattatttccctaatttcgggctgaaaaatctttccaaaaacaagaagagcaaaccccataacaaaatccgatctccggcagtttccccaaattttgttcgaatatatagtttccaaaggggcaaataacggattccatctcttgatttctactaccaccgttcgcatggaaagaaaaataaataaacaaataaaaaaacccccaaagaaaatccccatcacctcgtcttccccaccatttctctctcctctctcctctcactacccccaaagcagcagcaagcggcatcagcagcgagcacccaagctaagccagcagcagcagcagcagcagccaagccaattcccccaaatcgcctcctcccaaatgcgactcctcctcctcccctgacgaaaccctccccctccgcctccgcctccgcc

SEQ ID NO: 2582 - DNA, 2000 bp, Oryza sativa
  N_region (440)..(440): n = any nucleotide
gccggcggccttgagcttggcggcgagcgcctcggcctcctccttgggaagcccggatcgcaccacgaccggcgccttctccacgagctccttcgcctccttcagccccaggtccgtcaccgcgcgcacctccttgatgatctttatcttcgccgccgcctcgtacttctcgatcttgacatcgaacgacgtcttcaccggcgcgggcttcttcggcgccggcggagccggaggcggcgtctccggccgcgccagtggccgcggcccccgatgcggcgctcgacgtgagcgagaggcggagcttgagccgcaggagcgccgagtagtcgtcgagctcggcaggggagagttccaggagctggtccgctatgcgcgacagcttcgggtcctccccggcggccgtcgccgtcgccgccgccgccgcgttggagaggcggcgnagccgggggatcagcggcgcgaatttggaagcgaagagtggcatttcggtaaatcccgggaattacgtggtgaggggttagggtttttttggcccattcgacacgacccttatacgagaacacaaacacgtagccccaaccattccgccttccgatcacgaaagcgtattcgttctggcccgtttaggacgagcctcgtaggctcgaaggcgggtttcagtttttctctgcggctaccggaggcgtattttccgcataccgtggcccacctgtcattgagagtagtggctgttccgctccgagacaaggactcgccatacgactccacaacacactgcctcctgagtcctgactccccccgagcgccagtctctctctctctctctctctctctctctctcctctcgcacgcctcggcggagcggagcggagagcaacaaaagcgcaaaaaccctcgtagagatcgaaaccgccgcggcggggtgggatcgcgtgttccgatcgtgcggaggcctcccgctcttatcgagaggctttcgatccgcttgcgattttttttctgggatttttttggtgcattttttttcggttttttggttttccatttcaggtggcgcgtgggggatcggtggattcctggagttgctggtcggtggaaatcgtttctcttcgtgtgcgcgtttgcgtttgttctggggtttttgttttgggtggtgggttttgatccggttgctgcgggcttgtaggttggattttgcggtttgggagaaaggtggtgattcgctccgtacactgttgagatttctctgtgactctgcgttggtgttgttgctaggtgagctgcgagcttccgtccgtttgcgatgtgccgatgtttagggttttacttgagggtccatttgatattccttattatgttttagagcacaatctagggttctagactggcatcattacgctgcatgtaaatgtattatcaagttgggggttagggatttaggtggggatcacttgtgattggggttgaaacctgaaagtaatcggagacgtctgcaatgcgttatgtgtatatgtgtttcgggtatgctgctaaagtgaagtctctaactgcctcatgttgttttgcatgttccttgtgtgcggaaatgtcgtatgtaatgttttcatgcttaatataggaattgttctcagctgtttctcccttgtacttagcatacagctcgtatcaaatgtaaaattctgttttgacatggagcatatcagtataggaatttttcaccagaatctgggagttggatcttttgaagaacaaattttgtctgcatataaactgctacttcatcagaattccctaatgcaagaatgcatataccatggcatgacttaacctatataccataccttgtgcagtttcaacctgaagattaccagttattcagtcctgttccttgtttcattataacctgtaatttccagttctacatgttagaaggctgcacattgttcctatttaattgtatagccactttgattgtgataagtgtgaatttttggcagtca

SEQ ID NO: 2583 - DNA, 2000 bp, Oryza sativa
attttcttgaatttgacgatgtttgatcccaaatccatgattggagaaaataaggaaacccttcgcttaaaatcgactgaggactcacgttcctcgatgaagctacaatggagggacttagagggcaaagcacacggaatcgtgctatacaagcagaaggaggaagaagaagaagaactccttctcatgatcaagaacctcaacaagcagtaggagtgattcgatgcgaggtgttggttgttcgtttagttgatgtgcagcccataactcaccaacctacctcctcatccacttaccattgttcgttagtttatgtgtgcagcccagaacttcttggtcccatagggtagttatgaactctcaggcccatcaagcccacatatataaatcatataaacataaaccatatcatcttgcttcacacacttgaaagctaatggccaatacactgaaagccctgcagaagtttaatcaactgaagcaatatacggccagattcaataaatcgatcgtgtggaggggtgaaactatgtcattcttattgacacaagggggttaacacaaatttaaataaacgaaaaccataaatatatccatatgtctaactcgaccataaacaggttcataaaaccaaccacatgcagtccatcatgtgtaaccaaccgctcacatgcggtgtcaacaattctcggcatacagccataaacagttctataaccatgcattcacatgctattaacaatatccatattaagtcaatagcatgctaaataattaacaattcttttaggtgtttctcaaattttatcataagcttgttagactttaaggctcattaagatgtcgtccataacaacaacagaaaaataagcaataatagtaaaataataaatttaaaacaactcatgcggttaatgggattaaattattcaattgcgggtgcatgtcttgcaaccttcaggctcgatgtagtcgtacaacccgtctcctcctagctcggagatttcactcgctccaactacgggaccaatattggcgttttctatttatgaaacaatcatcatgaccttaaataaaagctaaataaaaataaaaaaattaaataataacacaatgtgcaaggatgggttaaaaagatttaaacaaataactttagagatctttgtgatttcggtgaacggcgaaccctaggccaaaactagggtcacgtcaacgggtgcttggattgcaatgaaacggcacagatgggttcagaataattctaggagtttggaatatgtcttggatttcgatttttaggtcaaacggatggtcaacttgatcagagaagaaaaatggaattttctgatttatttttcattaggaaaatcaaagtgttggcggatggcatgaggcccttcgaccaaatctgccgaaacccgtggcgaagactatggagcgagaacggcgagaggcgaggggtcgtgcgagtaccttgtcaagccagaggcgtcccgggcgaagggtgtaaggcgaagagtacctgccgaaggaagacgacttcgccatggcaagttcgcccccgcgagggccgaagaagccttttcggcccttcaagcctaggggccatagggccggcgatcgctcgacggcccatcaggggcccatgagcctccataacattatgtacccctgtaaatgtccctttcgtaagggcaaccatgtaaattcccctgtataacctaaaccctagtggtaagaacctatagcggggctataaatagtcccctagggccatgtaatgggggatccggagtaaaaaactctaaaacttaatacacttcatttctttccaaccactgttgagtaaccatgtctttcgacgtatgcggttatcgtttcgacaacagctggtgccgaccgtggggacctccgagcgaaaccactgagagcgaatgctaccgaggaaggtcatgaaggagaaggttacaaagcgaaaggaaagcgacgccggagcggac

SEQ ID NO: 2584 - DNA, 2000 bp, Oryza sativa
  N_region (24)..(24): n = any nucleotide
  N_region (33)..(33): n = any nucleotide
  N_region (47)..(47): n = any nucleotide
  N_region (49)..(49): n = any nucleotide
  N_region (58)..(58): n = any nucleotide
  N_region (166)..(166): n = any nucleotide
  N_region (176)..(176): n = any nucleotide
  N_region (1049)..(1049): n = any nucleotide
  N_region (1217)..(1217): n = any nucleotide
  N_region (1763)..(1763): n = any nucleotide
  N_region (1768)..(1768): n = any nucleotide
catcggaacactaaaatgttgaantttagggcnaattaagttgaagnanccggggtcngtggtacctgctgagcctatccttgtcttaaataaacatgctctgataacattagtgtgagtcaattggctcttgcacgtcttgcttcttcttaggtgagtaggtganatcttttggngttctttctcttcgtgcgtctccttgggaatgaatgtttgtgctgtaaactggaatactcttcctctctgaaataaatgtcttgcttcttctggttggtaaattgttgattaaactgaaatttaaacatttttttttttgcaatatgtgttctacacaaaatatacttcttccttcaggaggccggacaggaggttgggccgtgttcgccttgatatggaaaaagtacacccaaggtccctcgggttgtcatcgagatacaaaatcgtcccccaatcgcaaaatcagataccgggcgtccctcaactaacaaaactattcgctttggatcccttggttttaaccccggttttgtccgacgtggcggctgagtcagcgtgggacccacatgggccccatatgtcaggaagccatgccagcctcttctctatttcccctcctctctcccttcctcctctcttctctctttctctccctcctctctaggtctctggatggccagcggtggggaggaggtcgacagggcaaggaggtccggcggccggccgacgatgcggcggtagtggcgacacagcagaaggaaagggcggcggcggcaggagcatgggggagatcgaagaggatgacctcgagcacgacgacgagcggagtggggcgacggcgaggccgagcggagcggctgcgcgcgaagccggcagcgcggtggcgggcagagcaggcaggtcgacgaggcagtgacacaagaacgggcgtggcgtaagcgtcggtggcgcggcggagggcctccttgacagtggaggagacgacgggggaagaggagagcgggccagagaggagggatttggagagggatttgtagtggtggcggagggtngagggggagaggggcgagccctaggagtcggagtcggggaggaggagggtggcacggtgggaggagtggtcagcgacgaggacggagacggcggtgaggaggagcgagccgcgcggggagtccgggtcgaggcgggcggcacggtgggcgtgcttgtgcacggcgcgnaggtggctggcgtcgaggtcggtctcggccagggagaggaggcgcaagagctcgtcgtcgtcgttcgcatcggctgcgcgtgctgggtggttgcgggtgtgggggccaccgccgccctcctctcccaccttgcccctcctagtgcgagagcttgtccgccgccgcccgcctccacaactgtaagcctcctcatcataaccctctttcgtttcccgcgtcgcctcctttgccgccgacgcggtctcccccgccgccctcgactcgctcccctcccttcccctgccattctcatccccacccccgccgccgcccacctcgccgtcgcggcgggggtcctcttcgcgcccgccaattgccctgcagcgagtgagcgaggagaaaagagatagggggactgagggagggagatgatgtgccagcctgacatgtgggggccatgtgggtctcacgctgactcggccgccatgtcggacaaaacctgggtcgaaaccatcgagggacctaaagcgaacggttttgtcagttgacggacgtattggggggacnatttngtatctccgataacaagttgagggaccttgggtgtactttttccccttgacatttgggttgaatgggcttgggcctccagagcgggcccacgaacaccaccgactcggcgaccacgcggcggcggcggcgcagagaggaggaaaaaaacctcgcaactctcccttggattgaagcggacgacactccctctccctcggcggcggcggcggcggcggcgaaaagccggccggg

SEQ ID NO: 2585 - DNA, 2000 bp, Oryza sativa
tgaaaaacctggtccctatcctcttctccatccgtgcagctccccgacaccttgaccccccagctgctagagctcctctatggatctatccccactgtttgtgactggattcatcatcggttgggccgttcgtttgtcacatgggcttcgtagttgggctaagccccgagcaaacctactcggcccgattcacccccgacggcccaccaaactagccgaaccactcgcctagtctcgtgccccggtgttcctcgcccacactcccaacgcataaccaaccctagctctcgcaaagcaccgccaccctcgccgcccccaaccgcttgccggcggagttcgccgccgcgccgcccctcggcggtgctccctaccccgcccgcctgaccgcccgcctgtccgtcgcccctccccgcctcgccatcgccggcgccccacccaccgctactcgcgcgaacgcaccgtctcgactagccgacgccgccttgggatcgcccccgcccacctccagatacgcggcccggccgcggagccgtgcttacgtccgctaccacccggcgccgatctccacgacgccccgctcacgaggtagggttttggagtgggaacgacgacgatcgcgttccccctcgcacgccgcctgatttgagctgccccacgcgttcgttcggtcctttctcaggtactcagatcaaaccctaacccgatgcttcgcttgtccgagaggatctgtgcaagtgtgtaatcctggattgatgtgatgatagattaatggtttccctctgcatgtgtttgttgtgtgtatgattgtaacagatctgttgtgttgcccatatcattgttgatacatctcgtgccgagtccatttcaagttcacttcttgtatgtgttgggtataatgctttggtttgtcatgtggcagtctatgcagtgttattagtgcatcactccgtatgtatggacttcaatggatatagtcagccatgaaagattcccttaatatgttgtttccgctcatctttgtaatgtttttggctaaccttgcaatttggcggaatatagttagcaaggtcttttcagatttaataatatagtctggtactggttctatttactctgtacgtcgttccagctcatattattaacgtagtcgaatatattctgtctccatttcccgccaaaattctagttggaacggtttaattccagctttgataataatgtctgttactactgctacgtcgattccgtcaacttgtcgtttctaccttgattacgtggcataattttatctgaaatgattggcttggaaacttcgcatctaataacatctcttattgacacgtgtgacatgttggttcccattgtatataccatttctgctcagctcagcaacgatgttggccaattttgttaatatgattacctgccatatttgtttggctgtgtctgattgatgcacatgttgtatatggacctgctttaacgtaatagtgcattatggtttagtattactattaaaagggatgttcattagcagtttttatcctctttggtggacgtaatacctgctgcacttgaccaaaaaatatgttgctgacatgtgaactctacttatcacactttatgtggctgttaatcaggcaatggatagtgcttttgtctcttgtcgggttaagattcctaatatttgcttctgtaacttttctgactgaataaatttgtttgattgttcctgcccatgttatatgatttattgattgattggtacaaattttgtgattattctcaaaaaccaattcttgcattgtcactgcatatttgtttcttttcttcattttatacgctatatcatgcatgttagagtgaatgccatgcatgataatttctggttttattgcaaatactatgaaaattgaaaagctcacacctgcttccttttatcacctattggatttgcaggcatcaaaaccctgatttgataacattaagtggaattttga

SEQ ID NO: 2586 - DNA, 2000 bp, Oryza sativa
tatctcacatttctcttctaatataacggtgtgtaaaagtgtgcaaaaaatatatcccatattgctcaaatgcattagtcagatttaaaccatgtgagatatctaagttttgaatgtctattacttttgaatcataaattgtatttttcatctatttgtatctttttttaataattaaatgttgactacccccgtgaaatctcatcgtatttctatttttttagtgtgacgtatatatacggtagtcataattttctatgatgaattacgtcacctatgattagtcgattacgtttgctatcaaataatacattaattattgattttttacacaaattggtagagaaattagttacatatggttgtatatccaatatcttttatagcaaagttttctctcttttccgatagaacttcaagagtcagatgtcataggtagcataaaacccaatctcaagtaggtaattttataaatggcataattaaattcgtcatgcaatgttaacggagagaacatagacaaatcgtacttttgaaatgtggcaggtattatttcataagtatacaactaagtttctcaaatgcaacctatgatacatgcatgcgcgcctagttatccttaaatgtgaagttgtagttttatttttttttcaagtcaaagatcacagttaccgtggcttaccgttcgtgcagtaacatgactttaccatgggatttgaaaattcttaatccaaactttcctaaagataaaattcgtatggtttttgacggtcactgcacaattatcacgtttaccgtcgtcttaccatcgaggagttgtaacctccccggtgatggtttgggaaaccttgctcataggcattatagccgtatacaagtttatttcctaactttattggaagataaatttgcataggcacatatacttcttcagtttcaaaattcgctttgatatgcccttattgaacatatgggatatatggaagttaaatacccttccattacctgggcagtgctttgatttgtccgtttactcgttatggtaggtaattaacagaatacgttcggttggcaccgattaaataaactttcatgcaacaactccaaatatgatatcccacgtcacatccatatgctcgcatagcgtgcagtttatttaacgataggaaatatacaatatcaaggtgttaaaaataaaatggaaacaattcaattaactattgtcaggtactattagaccatatgacgtcgtgggagtaagctactaggttatagcacacgttctattaaaaatatatgttgcccaataacatcaaagataatttaagtaaaaaaaccatagtagagagaacatgaagtggtaaaaaaaccattgtcacgggttttggttagtcatatttgattactcgtaaatatttttactaaaataaaagtgattgagtttgaatgtaagcaacttctaacgatagtgcattctaaagtgctaatggacaatgaattatggccagaattgagttcacgacaatttcgaggttttgataaattgatttaaaacgctttataagaagtgtcaatgaaaaaaaagctttcgtaaaatcgtgctgtgataaattaggaagcttttcgaggcggaagcggataagttaaataaaaaagtcaataaattaatttaaagacgttttctaaagtaatgacacgaaaaaggattatataaaaaacgtgccgtgacaagtttagaaaacatgccgtgataaatttaaactagaaaggtagccacggagggagtactctccttcagccagataaaacgtgacgatatataaacggagtgagtagattaacttagttagctctcaccaagtgttatgttaaaaaaagaaaattaaatacaattacaactgtgaacttgacgagtgacacatttaatcaacggtgtgtacggtaacttgttacaatcataccgaaaacccctcatctagccacacggaatagcccacaca

SEQ ID NO: 2587 - DNA, 2000 bp, Oryza sativa
  N_region (1355)..(1355): n = any nucleotide
atgatgtggcattgtgagagaacaaaagaaggaagataatttagaccatacatctaagggttaaaaaaattgagatgatatgggttaatgagagaagaaaagaaaagagacaatttgaagcatagattaatcatgtaagtactaaaagcaattaatgtgatatgacttaatgagagaaaagaaaaataacatgaattaagtaagtatgaactatatagatatataggatattaaaaaaatgatgaagagatatattgaaatattatatgaattatgtgggacgatttaacatgcttacattttaaatatctaaaatttaataaattattaaattatagataatatagcattcttgaatgatgcttaaatataataattgttagtagatgataatgtggtatctttgcatgttaagctttaggaattagtaggcaactttataataagagaggatacaaactaacacaaaccctaattcaaaagggacaattgcatctatgccctcactttcaaccccaactactgttttaccccatttttagggtttacagttttacactcactttttgaaaacgaaccagccgtttgccctcagttttaacacccgttaggtgggccctacttttttgggttaaaaaacaaatggaaatgaaaaaaatgatttatgaaatatcaatttaccattatacccttgagggaatggataagcatccaaccagctctcctctcctaccggattggtccttgcgcgcgtggaggcggcggacgtgggcgcgagcgggcgggtgaggcggcggccgcgggcgcgggcgagacgaaggcggcggcagccacgggcgagcgcgagtcggcggcggccgcgtcgaggtcgccgcctacctctaggtatggcacctcgaggaggtggcgtcgcccctcgccatcgacggcctcttacgtcgggtggatgcgccttcgcctcgactaccttgcgccgccgctgcagttcctcaccaacgcatgcgtcgtcctcttcatggtccagactagcatcgacgatgaatgctagtagtatttgtgatttttgttcaaattttgtaattgcataggtatttgtgaattttttttttgttaaagttacaaaaagtcacaagagatgctcatatttggtcaaaatgctcatcacacaagctaaaatcaaaaaataggagcaaaatcacaccaagctgaaaaaataggggcaaaaatacaataaccaccaagggtataaatgtcctttttctacaactaacaccgttaaaaccggttgttagaagtagaggtacacgactgattcagattaaaaagtaaggtaaaactgtaaaccctaacaggtnaagggtaaaacagcaattgattttgaaaggtgggagcacccatgcaattgccccaattcaaaatccatgtccatactcatcattagtgaaatacatcaccatttttaaccaaaaaaaattgtttatagacatagtttgagatgttattggtcaagctttgcaagttaaaaagtgaaagctgaaaataaccctacttcatttcgatttgttcagaaatgaaattgtttaggctaaataaaaaatagcaaaaaattttaaaggctgaaaatagcttagtcaaagtactagtgctggcgacctggcgtaatagacaaggcagccagagtagtaaactgtaaagtcccccctgtccctgcgcgaacacgtcccccgcgcccgttaacctcgccgccgtcctcctccccctacgtcacactgcacacggcgtagccagcgcgccgccgctttaaaatatttcgcgcgcagccagcttcgtcgccacgccaacgaacgccccccgcgtataaacgccaccgccaccgcgctcttctctctctctctctcctccgatcgatccaagaatcgaagcagagcggagcagcgtcgccgtcgagagagagagagagagagagaggtgttccggcgccgggatgaagctcaggtcgc

SEQ ID NO: 2588 - DNA, 2000 bp, Oryza sativa
tcaacctacaagctcaaagttagaagtatacagtgcaacctattgtacttgcaatctttcgttttccttaactagctatggaatgactattttttttaaaaaaaaaagaggaataaccttattttctttgttagatatctttttacaatgttgcaatatgtgcagtttcatagcacagtccaaagactactcagagctatattgcagggctgactaaatgagtagaaacagaataaatataagtggaatcttgatttcgatgatcataacttatattacctgttgtttcaattacaggttttggaaagaataactgacacaacagtcgcaacagaactagaagtccttattggccttagttcacaaatatgccatgtcgttcctgaagactttgcccgggaactagagcattatcagattaaggaaagatttgtgaagaaactagttgaggcactgaatgcaaatgtgaaacctactgcccactgccccaggatcaggagggtgatagttgagcaagttatatatatgatggaaaacaattgtagctatgcgaactgtttcaatgaatgccagatgatggaagcactcacggtggtagaagagacaccttcaaaggttgaaaagtacaggctcttcatgggggatgcaggactaatggaatacagcatgccactctctaatcttgtcgctagagcaaaggaagaattaagcaatgcatcatgtaacatgattggttaagaagcatcagcatttttttttctttttgaattttagaagcatcagcattcagtagtcacgactagcagtttatgtagatggtactattttgtaatgctatccatgtaggagatctgctaaattaagagttggtatctaaattaagagcgggaaaatggtattattagcattgtacacaagacgaccacgatatatgtgtaactaagagattttgccttgcagcgagaataactgcaggcattgtaatgaatttatctactttggtaccattaacatttagtcttgtaatgttcaaagaatcaacagcagtggatatttcaggcgattactgttctacctgtcaagggcatcgcagttgtagaatgaattggtatgaattgaaacaatacccaacaccacagagttacccacttggccactaagcacttaaccagttccaatcccaagaccaagcaagggaggaaaaaattaattatactccagaaactagcctgtaaaccctaaatctgagcaccaaacacacgggcgccggcgggagaaggaatgcaggaagagagatgaagagatgggaggcgagaaggtaattgcacctgctgttaaggaagggaggcaggatagagctctccacaccgagcttcctctgctgatccgctcgccgccggagcggccatttcgcgcgccgccgctcgcccgctccggcgacgccaccgctaaccccgcaccgcatgaggcggtctgacggaccccgcgaggcccattagccacacatccgtccggctctcacggaggcctacatggcccacgtaacgtaaggcccatgtcgcgctcctcatcttgccgtcgcgtcgcgtcacgggcccaatcacgcttccttgtcccgctcgtcgccttcaaaacaaactccaatccgtccgtccatccatccatccttccgttcggcttacatcgtctttagttctaaagtttgttttttaaacttttaactttttcatcacatcaaaacttttctactcacataaactttcaacttttttatcatattgttttaatttcaatcaaactttcaattttagcatgaaaagtagcacgaagtcttccgaccttagcgacacggcgatgacgagaaaaatggcccaaacaaacggtcactggaacgatcgagcgggaaaaggccaggtgaaagtgagagtgcgaaaccaaacacatctgcatcatgtactggaacaagaggaggaaaagtcagaagaggcgggagctgaatg

SEQ ID NO: 2589 - DNA, 2000 bp, Oryza sativa
  N_region (244)..(244): n = any nucleotide
gcaaggtgttgccaatacatgacagctgatgtgttgacatcgccttgagatggccgatatagattatatcacccttagcgtttttttcattctcatcataatcggttgtgttctgccgatgtatgacagccgatacagattatatcacccttagtagtttttgttcttatcataatcggttgtgttctgccgatgtatgatggtcgatatttggtatatcgcccttagtctaaattgtaatttnatcaatgtttccaacattgcaaaattagggggcctcatatacataaagtttggattttaaaaggaaaattcaatagcaaacttcattatattacatcccaaaagtttgcaaagttgaagttacaataatttgttcatccagacaaatatttttggatggccgatattgccctttgcctaatttgatctacttcatctattatttgggcatcagctgcatcagagccagggatcactttcaaagacttcgttagttcggccaagtgattaacagatgctttcaacttggacttttgatcttcaatagccttgggcagatcagcaagcttctgttcctctaaatcaatttgagcattgcactgttctaactcagcaaggagttctattttccgagcattaagccgatcaatgctaactcgggtagaatctggaccagcttccaattggtcaagttttgctttctcttcattaatagaagtcctgctaacttggatgattgcttcaaggtcctttctctcacgccgattggcaatcctcttttgggctttttcaagtttaagccgatgttgctcaagatatgctattggggtgatagtattggctagttcatctgggattttgtcgtggatgtcgagaaatctgtccctaatggatctgcagctggtcactaaagtctctagggagccttcaagccgtcttgagatatacaacaaagttactgttgtcgaaacgacaaccgcatacgtcgaaggacatggttactcaacagtggttggaaaactgtaaaatgtattaaatcaagaatttttcttgggatcccccattacatggccttaaggatctatttataaccctgttataggtcctccttttagggcttaggttttgcaggggaatttacatggttgcccttatgaaagggacatttacatgggtacacagtgtcatttgcatacatgggcctctaatgggcctggttggcaaatgccgacctaaaggccggccggagtggctaggatagcgaagtcaccctccttcggcaggcacccttcgcccagaatgtacagtcttcgccataggggtccatctcttgccgtcctcgctccattgtcttcgccatgtggcttcggtgtctttgccgtggggcttcgccccgttgaaacttaacactttgagcctggatcctgactggtcgcacggtttcggcaggtctggtcgaagggtctcacgacataccgccaacaagcccctcacgggcaagggtcagatgggagcttcggccaagaccatgcaaaccatgtggtatggtatgaggcgccccctttcgaccgacactcctgccgaaacctatcttggaatcctgcaaaggatgcaagcgctgcatgtacatttatgcctgtggttagtaatgtgttgcagtttttgcccttggcgaatcggcgaagctggctttactccctcgttgggccgagatcaacagtgaagggcttccttttgcgggctcgtcactgtgcggcttggttgatgggaatttaccgtttcgcctctcctcaagacacatggcggctcgtggttgggtaggaaggcgaaccgtcgcttgggtgggctagatatccccccttcccctttttcaccgccgctcccccgtcactttcactgcgagagcaattttttctccgtctttttcctttacagcgcccttagagtcgctaggtcgttcgcctgtccactcttttcgccacaacacacgcttttcg

SEQ ID NO: 2590 - DNA, 1898 bp, Oryza sativa
  N_region (27)..(27): n = any nucleotide
  N_region (29)..(29): n = any nucleotide
acccccccccccccctcatggtatccnanttgattttgcaaatattgccgaataagaaaaggacacttttattttccaaggaaaagtgtacagagatatgcctctattatcaaggggaaaaggagctaatccacacgacagttttaccaaccacatctagtgaatatatggtaagcggattccggcattgtcaaagaccaaaaagagtcatttgtaattataaaccaaaaataaagacatgtcccatcatgaactcaactgtgctgacctggctcactaataatgcaacattatagtacttgcagtttgcgcaactaagacattccgtttccatttctctaacatgaacagttgcaggattctatatattgtaacattacataacaaacaggatttaatatctgccatgatgcatgaatgcgtcaattccatttgcagggtctagcaatgtagctcctcacatcttattttattacctaaagattgcattatcaactttcatagtcaattggttgcctgtttggagtctaaatttcatacattaccaattttattattaatatctatccttcattgttcgtcgcaagtggggaggtgcctaaactcatctaacagccatcttgtatcggatcctttccattcaatcttaatgaatccaacctaaagtaattactctgcgcttctgtcctttatttatcctcttaactatattatgaacagacaccagtatttgccccagaagatttttccaaatcatgttaagtaatcctatatactgggacaaatacattataaagtactaaaagatgcttgcaccactttacttttcttactaattctagagcttagataacatatggtgtatataaagctcatggccactacatccaatagaccaagacccaacctgcagtactgtataatagtataatagtaagtcttccagtctgtgccactacggtgacagctagcatgtgacaaaatcaaccaaatgctttggtgaacttggattcttgtgatacgttaacatatacaatcaaaatttacaagtaaatacaagacaggcaaattgaaataaatacagaaggcaagctggatacgcacctgaagtacttacctccatctaccatggtcaccattatcgaaaaggtgatatgaaggcatagcataagtggcctgtcactcccaagatggttaatccatcaagatatttcatcagacagcaggtatgcagatccacagaaagcatttcaccaaacatgaactgtcctccagcgttctgtcaaacagcaacaggttgatgcccaaaaagggtatctaagttcagacaacgacatccagctgtttcttgcatatcatacctgcacataagttgtacagagaaatactgcacacaacatatctgacactggagtttagcggagtgacagcaacgtgcccacaatatatgacttattaggagttggataatagattccatggagtcattcctggaacatgcataggaacaagtctttgtagtcatgtaaagtattgatatgtccagctcacacagcatgacacaataaaaacaataaaagtctctttctgctctcgtgaactatggtaagcctcaaatcattgcacgtttctttcagacgacaatgctagtcaatttgaaacagtgggatgtgagaaccccacaaggaataaagaagatgagacagatcaatataaaaagacgacttgggcaaagtcttccagtctacatcttcattgataatgctaagcccatccatggcatcactattaggcaagagaagcacagctatatacatcattatgcatagcaaagcaccttattagcattgatccattcacaacttggagtacctcctttctgcttctatctctcctgc

SEQ ID NO: 2591 - DNA, 2000 bp, Oryza sativa
aaaaaataaaccccaatgataaatatgttcgatttttaaaatctcaatgacaatagagagaggagtctgtgggccggcagtagaggagtacagtggcaaagccgttgacagtttgacaggacttctagaaaataaaaagttaaacccaaacgataattatgctcgatctttaaaacctcggtgatataaagagaggacgcagcgagcgggccgtagaggaatacagtgatggcgtttgacagaacttttaaaattataaaaactagcatggtggcgcgcgcagattacgcggctagcatcattgtattttctttcatataaaagcatatatgttttcttaatgtattgttcaaatatattaaaatgacaatataattttaaattttgtactaattttacgaaactactaatgtgtaatattcatattgtattttatatacgtgttagttgttaattatttttaatatcaaattttagttatttgtaacttatattcctatatggactctagactcgtctttcaatatttctttttctaattccgaattttggttatctgtaaattgtatttctacatagactatctgtaaattgtatttcatatagactctaggctcttcttctaatattatttatttttaattctgaaatttttattatttctaattggtatttctatgttggactctaaactcctctttcaatattctttaatttttaatttcaaattttaggttacttctaaattgtattcctatatttactttagactcttctttccttgtttttttttaatttcgaattttaggttatctggtaaattggtatttttatacgaactctaaactctacttttaattttattatgtttattccgaatttttgttagtttcaaattcctatatgggactctatactctacttctaatattccttattttttaattccgaatttctattatttcttaattgtatttctatatggactctatactctacttccaatattccttatttttttaattccaaatttctattatttcttaatagtatttctttatggactctagtgcactctgtcaatattccttatttttaattctgaattttagctattttatattgtattcctatatggactatgtttttttttctcctattaatgtgggaatttctagaccgtgagagcgaacgtggaggctcctttttctattactttaataagataatagatgataacctacgagacaatgaactctaaaaactacagagtcaaatttttaaaaggttttaaggaggatgaataaaaacaatagtagatcggcaaacaaataaataaagaggtgataaagaaacaaggggtagcgattgacgtgagttttaaaaatataaaattagaaacaattcggtctttcaaagtcctaaaacaacgagttagctatttaacaaaacttaagtaaaatcatatgtaaaaaatagataattttgtatgggtactagccatgcaattgtgcggatcacccggctagttcgacgaattcaagcgttttttgggttgcagcgtttggaaggaggcccaaattaaagtggtgatcgaaattgtcaagtgcttgagtagatagagattttgtttggttggcactaccgaagcatgcattgttggagtgggatgccatagagctgcgatcaagatccgacggctcccaatggctctggtgacatgtctccttgacactttccaaaaacggacaattggtcggttgatgttgggttccttatttgtactactccagaagtatataaaaagcggaagttcccaatgcaacaagaggaagacgccattggagtccaattaacttgaataatggcgcgtcgtcgtcttgtcctgctgcttctcatcattggtacgttattatactcatggagtaggatggttaatttgttgatttgcagttagcggaggagtaattaattaattatgttattaatcttgtgttggc

SEQ ID NO: 2592 - DNA, 2000 bp, Oryza sativa
  N_region (692)..(692): n = any nucleotide
  N_region (862)..(862): n = any nucleotide
  N_region (1740)..(1740): n = any nucleotide
  N_region (1767)..(1767): n = any nucleotide
acggggcataccagcccccacgccgtctgacacggagtgagacgtgggtgcgctgccgcctgtcccatccatccatcgccgggtcacagaccggtcaaaagccggtcgcctggcgcacatccatcagtgggcggcgcacgtcctgccacgttgcattaaatgcgacggggcggttggagcactgcccataaatgcgcctggcaaacggcgctcctccccgctcaagcccccatgtggcggccacgtggcggccgagcgagggcctcggggcggtttagcccctcgggcccgaggggcgcgacaaggtaccccgagcccccgggaggcgaaacgggcggtcgctcttcggccgaccgcacgaccccccgaggggggctgggtccaccgcgcacgttgcggaggaaaggcttctcttcctcctagcctaggtaccccccgggcccatattatcgatagagagaaacaacaaacatcgccgccgctgtccgcgaggtctcaagaaccttgactgcgctttcacccactagagggggtgagacagcatgacaacgccctcaggagggagtgacgctcgactgccatcgttgctggctcggccaaggacgggctgggttttcacccgccatccaccgcctgcctatccactgttgacacaccgatgctccactgccatctgaacctccgccagcgtntgggcaccactacaccggtgccccgtgccgggcagcctccgcatgccaccactggctgcgccatgtcacctcgttgtgctggtcgctgcaccggaatggcacactcctctcgatagctgcaaccactgttgccgccgaatgaacctcctcggatcgcgactaaccccgtngccgctaaccgggcctcgccggcctacacagccaccagctgtgccgcacctccgcgcctcctcgcgccgtgggcacctcaccggtcgccgccgttgccgggtgctgctgccgctggctggccacccgctatcgccgtcgtcgccacgagcctcgcgctgccgttgccgccgtgacgagcgctcctaccgcgagctcgccccacccgatctggccgcagggtggccagatccgcctccggtgcgtcgaatctggcccgccgtcgccatccccgccgcgcggcgcagctcgcccctaccatcgccgtctccatccctgccgccaaccgccaccccaccagatccagccggagcggcaaggatctggtggtcaccgccgccgccgccctgggcggctcccctggccccgggagcgagaccctatcggcgaaacgaggagcccgccgccactgtccttgcggccgcgcggctttgccggcagccgctcaggtggcggcgaggcggaggaggaagatgagtgggagggggcagccggagctcgtcgcctcccgagctgcccaggggagggcgacgcgagaatttagatggagtggttttgatcagaatacctctcttcaaatatttaaaaactcgtattcaccatatttcacttagcttctgaaatttgtttttgctcgattgaaatctcgaaatttttttctagcagggtgataattgcaaaactacataagatctgattgaaaaaaaaaacagcacacgcttcagtcacttttcacctctaccatcatcagaactgcacatacgattcagttatttttaccgctcccgtcaaacttgcacgtaatctaaaaaagcccaaaaagttcgcacgttttggcgtntcccacatataccagccaaaaaaaaanggtaaaaggaaaaaggaaaattcccctctgacctgattctatctctcgagcgggctcggctcctcctcgtcggcgttcctccgcctccgccgtcttctccgccatctcctctctcgagctctctccctccccgatccgctccggcatctccggcctccgctccgttcggccggcgcgccagtgtcctgtgtgtcccccacatcttctgccgcaacttgcaaccctagccgcgg

SEQ ID NO: 2593 - DNA, 218 bp, Oryza sativa
  N_region (3)..(3): n = any nucleotide
  N_region (6)..(6): n = any nucleotide
aanctnttaaaagcttcccgggggggggggcgctgagcgagcgcgaggggcagggcgatctagcgagcgcggaggagagggcttctagatgcaggcgccctccgtgatttgaatggagggtagatctcgagagggagggaagcttctagaagcggggtgaggcaaggcgaggcgaggcgaggcggcggttagggcttggtttggtggccgggggaggg

SEQ ID NO: 2594 - DNA, 2000 bp, Oryza sativa
  N_region (1606)..(1606): n = any nucleotide
  N_region (1629)..(1629): n = any nucleotide
  N_region (1679)..(1679): n = any nucleotide
  N_region (1808)..(1808): n = any nucleotide
ttttgctcaggcagtcaggacaatcaacaattggtctgaagaaataaagtactagttaaactagtggtcattagttaacatcacaaacttatatttagtatttgctcttttagtgaccaatattttgttgttaggcacttaggatctttgattcatttatgtagaatctttgttcatttatgtagacaagtttcaacgaagcctttactctctcccttatagtatcaaacaattaaacttctaccaaaccaaatggccaattaatcacttgggctcactcctcgccctacgagtctcgattgattgcgtccatgacccaatcaagtcggacaaataactaataacaggggtagcgagatgtgccttgcgtccttaagccaattgttgccatcatcaagttgtgggggcaaaaccatggcttcttcattttctcgggagattaggggtaaagaagaagagggaattatagcttctaagttgcttttccggtcatgtcatacgccaatgtcatggcataccataggagtaagtataccttcggatatgtgcaaacctactttcaatgaatacattttaatgatgcactaaaatcaataaaactctcaataaataaattattcatatatacctccggatatatgaagcttttaaaggttctttttccactaactaacatcggaccactaattgttatccacttaaaacatgcattcagggcaggtttgttttgaggcttaaatttggcttattaatatttgtgaatttcaatagtgtttagtgtctatttggtttgaagccaaattttgatatgcctaagaaaataggccatttcaatagttaacttatgctattttggcttcaatccaaatacaactttgccttcccaaaattaatcatgccaaaacttaccaaaatttggtattgtcaaaaaattagtaaggccaatttaggggcctgttcactttgatgctattttcaaccttaccaaattttaataaagttgcaaaaaaagtgactacatttaatttactgccaaattttggtaactatataagaaattctgccaaaatagcatcaaagtgaatataccctaggtcacaaaccaaaccagccctcaaccttttatcatcaaaaccttgcggattagcattagcttatccctggaggcctttttttaatcagaaaaaaatctcatcgcagaagtttttttttttgggcaataggtgcttctaacaaatggtaaaagccctagctagccccgaggacacgcaaccgcccttaccaccgtccacccgaaaaatccaacggccaggatgtcccccttggcaaaaagcgggcagcccccgtcctagtcactggccacgtgggtcccacaagttcagcgaccgagcagacacctaaaaccgccgcttacaaatgggcccccaacccttggcgattcgagcccccaaagctcgcgaggtcgaggagctgaagcgagaagagagagaaagaaagagagagatagccgagcgcggagacagaggagagagaaagagagagagagagagaggagaagccgtaagcctagccgcctcctcctcctcctctttcgccgccctaagcntccccccgctcgaggaggggganagctctagggtttcgcgggcggcgccggcgcccgggggggtgcgcgtggnaaggcctcgagatctcgcggcggcgccgccgggtgtgggggtgtgggggcggcggcggcggcggaggcggaggcggtcggtgagttcgttcgttcgctcgctcgctcgctcgatctctcgccgcgggtngtggtgccaatcgagctgcttcgccccccggattcgagggttttgtaaggggccgccccttaatccgtggcgcccgtggaataataagctgggcctcttccccctccttgaggggttagggttaggtttttgaggaattgcgggtggattttctttggtccggcctgacgcgtgaggggggtttgcgcgcaa

SEQ ID NO: 2595 - DNA, 2000 bp, Oryza sativa
  N_region (1567)..(1567): n = any nucleotide
  N_region (1576)..(1576): n = any nucleotide
  N_region (1717)..(1717): n = any nucleotide
cttctagttctttctctctgcaatctgcatttctctgttcagaaatgaagtgattttcagcatcgacgcacgaccaaaatgtcttcagcttctactcgggcaggcgacagtattgcaatggtgtttctgaagttctaaggggatacagagaaattgcgccacgtgtccggctgtcaggtatctatattgtgaccgacgagttcattcttgcgaaggatgaacgatgaattcatctctcttcttcagaaagataactggtgagttgtggtttaggtccgacatctttagctccaataatagaaactgcaatgagaataactcaggactccggctaccagtatcacatcctactgataatagctgatgggcaggtgtgccttttcctctgaacttctgaaaagaagttgccgttttccagaatcttatggacaccttacctgttccactagtttttttttaatccatgtattttgctcatgctacctcaggttccaagatgttgtggtgctaactctgcgaacaatcgggatgagaactacctggaagaaaggactctacaggctcttgttcaggcgaggtacatagtggcaacactaattagattagatgtttctgaattctatctaaaagtactgactgaacataaggtgcaacttttttccctatattaataaacttcggctggcttccgccagcccggcgaaaaaaaaaacataaggtgcaacttactattcttttaaaatatatagctatacttgaatttgagtaaggaaaatgtgtacttatgctatgcactcatttccctctttctatcgtgcttgtcggagtgggcgatggtccatgggatgagcagctgatgcactgtcaggaggatcgacagctgtttgacaatttccaggtgtttgttgggcatcacaacattgatttatatgggaggatttgctcataattaagctagttttgtcttcgcagtttgttgatttcaccaaaataataatgtcaagagaaatgcctgaaaccgagaaggaggaacaatttgctttagaagcgctgaagaagataccgagccagtacgcagccataatcagcaagaggatcaggtttgtagcatatctgacaggaactgaagatacaaatagctggtttcacctgttgctacctgctaggaatgttcttttggttctgaattctgattcattttcctattgtgttgtggtgttcagtgatctggctgcagatgcgccttcaaggatgcctcttcctccccctcctccaaggcctgttatttctacctaataattttcaggacaggtatctttctgaaccaagatgattttcattcaactcaacttctgggaattgaactcgactgaggaaactttgtacaattgtgttgcccgcaggggaaatgacagatgaatgtacagtaccgcaaagctagcccttggattagtttcagagccgggagatactattaacctcttaggggaagggcaggccactgtaaacctttttattttacaaagtggttgtgtaggcaatgcaagcctagtctgatgacttagcngaatactantttaaatttaatataaatttacttcattatatcacttcactgccaatagcttgtgagactcttattttctttttctttttttttttggagcaatggcatggttgaactgtcatgctaatcagtgatccagtggtaagagtntaaaatttaatccctattctaattacaggcaagtcacaacattattatataaacaaagcttaatttcacttttgtcgatttattttaaaatatgtacggcccagatggctatgcacgtactcctatatgggccgtgatttgggcccatggactgggataaggaaagcgaaaggagaagaaggaaatatcatgattcatgaacccaacccaaccaaccttctcctccccccaaaatcgtcgcctcttatccccttccttcgattctcttccattccattcccaa

SEQ ID NO: 2596 - DNA, 272 bp, Oryza sativa
ggggaaaatttggaagggggggggggtcggggggaaggggatcggtcaaatttgacactttgaatggcaatgtccaccctttcacttgatgcatccccatcgatgtcaattagttaggacacaactttaccaggtaagagttggccttcaccatagccacctcagctagaaagtagtgtgggtgggggtggccacgtggtggatggtgatgattactgttgggtgtcaatatggtcgacttggcagatctagcggtaacctgagatggatag

SEQ ID NO: 2597 - DNA, 2000 bp, Oryza sativa
caagctccatcaaacaagatatagatgtgcaaataacccaaaaaagggacagaattctgggtcagtgctctagtgtctttctccgttacatcaatgcaactgcttgctccttttttgtgtatatatgtgatcagcagcagcatttcttgctatggatatgttttgagtaaatttcagaaaaccctctgttttatggtcacagttacagaaaaccacaggtattatgacatgcggcacctaaccatataggtataacagttctaaagtttgacaaaaccctacccttatgcattttgagcacagattacttacaattctaaatcatagtgtgtacatgaaaattttaatttttaagttcttgactaaggttgataattaaaatttttactaattcaaaagaattgttcaagatatgcaaaattaggcctagttctatttttcaacttcaaacttcaactttctcgttttccgttagcacgcttttcaaaccgttaaatggtgcgttttttaaaaaagtttttatacataagttgtttaaaaaagcaaataaattcatttttgaaatttataatacttaatacttaattaatcatgtgctaatgagatttctcgttttgcgtcaaaaatctatctgccaaacggatgatcaaacggggccttaatcaagatttcaataaatgtggggttttatgaaatatttagaccataatacatgtggttgtgtgccacacatcataatatatgtggttttctgcaactttgatcataaaatgtgagattttctgagttagctaaatttccatgttgccctttttaatggtctcaataattttgttgttgcttgttgagtactatctgatattgtttctgacaagagcttcctcagtatatgggttacacatttttcagtcttgatatttgcttctatgggacattatgtcaaagttatctcggtaaatgttcagttttaactaacggcataaggaccccggacttcagagcaacctgtctcaatcaagccgttcataccatgcaaggtgcctgaaatctgaatcaatacttcctttgttggtgaagcatagcactttagagtttgatttattaattcattttcttttgtttcagaactttagacagctgatactccatcaatctgaagtttgaatatctcaagtttctctgattcggcaatcatccagatccatcattaatctcttaatatgcatagttaacttcgtctgctgctcatttttcaccatcaaattcctagccagtgcttcgtaaagatagtaagatggacagtgaagttcagggcatattgcttcttattaaaagcttgttttagtgtgatatggcaaatgaactaccctgaattctggtttcatgaatagattttacacaattatttttcttctagcctgcatatagtagttgtagcttcattaggcggttaaaagaaattttagaagcttgaactctgggtccttcacgtttatgatttgttcagatttagttattgcagtatatctctttttaaacttcgttagctaacgcctgtctaaattgcactgttcagtgtaccagttcagggttctgccgaaatcattctagggccgtgtttagttccaaaataattcttcaaacttcaacttttccatcatatcaaaactttcctacacacaaacttccaacttttctatcacatcattctaatttcaaccaaattttcaattttgatgtgaactaaacacatgcaagtcttacagtagcttctgggtgtattatagaaaactgtattgtttgatactagcacaatagctcaagtaaagtaacggctgtgcgaaagtgcgaaaccaaaaatccagtccacgctgcaaaacaggtcaatgccacctactagtacttatttttcccatgcaaccaccgtgattcaagaataggcagacaacccacgctgcgaccggcaaggttgtactagaatttaggctactcaacattca

SEQ ID NO: 2598 - DNA, 2000 bp, Oryza sativa
tcaaatatttctatggaaggttcaaactttagtgtaatatattatgatcttgtttgctcaggattagagttttgtgcatagttaccaatagaagcaaattgtataacagctaagccatctatatatgatggtgtaaaattaacacaaacacttattgacaaagacacaaaagggacaattgcataccagctaaggaatgtatcggaacattgtagggcatcttttgaagtttcccatcatcaacgtcatacttcagtaccgaaagcaggccattctcatctccaaggtacctgaatgcagcaaaaggatttagcatacaagaaaaggctacaaactactccaacaggtacactggcctaataaactaaagcggtggggaagacaagtttccatatatatagctcacatcagaaatgtcccctctacaactgcaaaagcagttatattgatgtcccacttcgaagaataaaatagttgtctgaactcaagattccatacctacaagatacacatgtattatatgcaaacagtccctagcactggcaacattcttgtgaaatgaggatagagtaacaatatatgattcaagtaagcataactaaacaaaaacagataggatgcttgcaaacttgaagagttaggcaacaattgacatccttattaagtgaaacaacagcacacatgtattatataagaagaattaatttgagcaaaagaattatatgtgaattgctcacggcactacctggatttcattctcattagagatggcaatcagaaacccctggttctgtataaactgcaaaagagaaatgtattagtttgttctttggcaattgcaacaggaacaagtagttatgaatcaatgcagacagttagtttaacatagtaagtagcagacatgaagtagaatgaagactaaaagggcagagcacggccacaaaatttaagaaaaaggctgcagcatgcaagcacaagaaaaaaaaaacagttatccaaaaattccgcagagctttgctgtcctggtagttccaaaaagaagaaaaaaatcctaaaattccgctgttgaaagaagaaaaagcgtgggcacatttgatttggcagagctgttagttgagagatatgcatgggcaaacctgcaaaaacttgtatgggagactgttgggtgatataaggaggccctcgatgttatcgcctccaaagattttaatcctaccgtccctgcaatttgaggtagagaaaaaggctatgatcagcatatatagatttatagcgaagaagaaataactttaacaaggagagcagtaataaaaaaaaaagtctagtcgaggactgaatccatgaatgaaggttgagtatgagaaggcagaagaagaggaacggacagtgtggcgagggcgaggaggcgctggacggggtcaaaggcgaggagcgatgcggtgtacgggatgccgtagtgaagggcgatctgcgcgtccatctgtgccacatctacatgagttcctccctctccctgcagcaaaacagcaaataaagaggaggaagaaattaatattaattgagaatccaaagcaagcaaagcgcagctgttggctgttggatcggagcgaggtagcacctgatgaagagccttgtggaggaggcgcttcatctcatcggagagcagagcagagatggattaacttgccggcgacggcgacggcgacgactgacaggcaagcagcagactgaccgcttcttctcccaactccctttcttctctctcttgtgtggggacggagaagagaagaggcgggtggaacgggccgtgatcggcccaataaaaagaaagcccaaaaaacatccggcccgcgccctcggcctcgatgaaatcgatctttggtttccgagaggattgattcgtaaccgattccaacttcaacacccaacaaacccggcggccgcgaacaaatctctcgcgctcctcctcctctgccgccgcggaacaacaagaagaagaa

SEQ ID NO: 2599 - DNA, 493 bp, Oryza sativa
  N_region (8)..(9): n = any nucleotide
  N_region (29)..(29): n = any nucleotide
  N_region (37)..(37): n = any nucleotide
  N_region (51)..(51): n = any nucleotide
  N_region (59)..(60): n = any nucleotide
  N_region (75)..(76): n = any nucleotide
  N_region (80)..(80): n = any nucleotide
  N_region (84)..(84): n = any nucleotide
  N_region (91)..(91): n = any nucleotide
  N_region (94)..(94): n = any nucleotide
  N_region (101)..(102): n = any nucleotide
  N_region (119)..(119): n = any nucleotide
  N_region (127)..(127): n = any nucleotide
  N_region (140)..(140): n = any nucleotide
  N_region (145)..(145): n = any nucleotide
  N_region (159)..(159): n = any nucleotide
  N_region (167)..(167): n = any nucleotide
  N_region (173)..(173): n = any nucleotide
  N_region (176)..(176): n = any nucleotide
  N_region (179)..(181): n = any nucleotide
gaattcgnntcttgggagaatgaataganatagttgnaaatcgagtaagcncataattnngtgtcaaagacgtanngganaccnaaaggcntancccttgnnactctaaaattgtgacnggaatganaattaatagcgtnaatcntatttgcccgcttngataattnggaaanganctnnnacgcgggccgcccaactatttttttttaaaaaaaacgagatgcttagggagcatatcatccagatggacggtagagatgtccgtcaatggaagaaagtccggctcccatcggaagcctattcagctaaagaaaaagccaaaatttaaattttcaaacttaattttgatattgattttgagatattttcaatgtagtttctttttcatcattagcttttgagtcaccgagaacacatatataaaatttttacctacaaatttatttttattatataataaaccgttttggcttattacaacgaaagccaaacg

SEQ ID NO: 2600 - DNA, 2000 bp, Oryza sativa
gtagatgccttgtccaattgtcccctttgaaatggctatctccttcatcattaggttgatgatgtcaaatcgacgaccctccatgatagcatcaatgacatgccatgcgacaccgcgaatgtcgtcattgttgccacaccttgggcgaatgttgtctctcacaatgcttttgaccacactagggatggtcctcaaacccgccacctttccataggtgtgcctccccccatcttcattaaactaagcatagtgattaatagggaagaggttgtgagtgtgcttgtcatgaagatcatcgccattgttgaaacggatgtgcaagagctccttgaattcacgccaggtgatggaggaccgaagggtccccgacatccatttcatagcatcacactcgccggatatcccacacagtggcatagaactaccggatcaaatcttcaccaaagggttgcttcaaggtaacaatcctatcaatgcccattaccttgaacatcccttgcagatccacaaattccagtgtctcactgatatgtctccaagatatcgatgacaaccaggaggtggggttggaagcaaccatcccacttgtatcacttgtggtcagcaaaagctttgcctacatacacttgctcatacacggctttctgaaaccatgtgtggaaccttggatcagcgcaatcatttggcctctggaattgattgtgatgactgaggatagtgtattgttgggcattcctcaaattgagtgagaattggatggtagagatcgagaggaccctcatcatcactttattcatcatctccttcctcatcatctccacttaccatttatcatcaccatcatcaccattaccactagcttcctcctcaaccccctcaacttcttctacaaattcttcctcgctttgagcatattcctgtctgctcgattcctcatgctcactcacgggctccggcgtgggctctcgacaaccacggtgaatgcgggtagccatcattgagaaacaaggaacaaaggatatataagcaacgattttagaaaacacaaagtgaggtgggaacaaaattttgcactgcctgtcagaggcggttagaccgggcaccaatggccggtcagaccgccgaggagccatcagtcagaccgccagtgaggcgcaggtctgaccgccagtgaggcaccagtcagaccgacaaagggtcaccggtcagaccacccttagggtcagccaaaccgccactgacagatttgaacaaaattttttttaccaccacatagaggattctaaacatgctagaacaaaatttgcacagggtttgagcagagaaacaaggggtttagtctatttcatcaagattgaaggaagggggaaactacccataaccctataaattgaaatagaccgatttgaaggaaaacacaaaagagtgagggattaccagttgaaaggagtgattcacacaaggaaactaccctctattgtgcaaatcgaagaacacctcttgcttcacctagggttctgtggagattatggataccccatacccacacggcatgtatatccgactgggtataggggtaccttatgtagatagaatatctttaagggactcgggttaaattcctaacttgtatatcaaggaaatacccagggtcctagtcggttacgattgtattttatctttacttgcctattccattaggaatatgggctgtatcttataatacggactcctcccactatataaggaggggtctgggtgcttgttggggcataacttttctcccagatcatacgattaataacacactcggcggatcaatccccggacaggagtagggtattacttctcattgagaaggcctgaacctgtataatattccttgtctccaaacccatccacttttcctgcttgatagccacccctttttgtattgccgaattcttgttttgacagttcgcgccaggtaggggttgcgtcaagcttttcgccgattagta

SEQ ID NO: 2601 - DNA, 2000 bp, Oryza sativa
  N_region (641)..(641): n = any nucleotide
ggccggaaacgagacggcttgcactgcctgtgcactcggcgccctctcgtcgtatatgggggaaggatccgacggcccagcgcgacgcccgcagtgttctctccctccccacctcgatctctctctctcgcttcgtggctcttctctcctgcgactgcgagaggaatctcccactcagtcccagattgtttctgtgcggcgacagcgtcgctgcgtagcttctgatatctttgccgccgctgtgtttggcgccattgacgcagccgcatccactcctcgaccagacaagggaggcctttctctctgtgctatctccaaaggcttctgagtcgattcagaggcagagctcgaaaccgaaagggcggcgaaggtgaagccgaccggcgggctgcaaattgcgctcgttcgctcaccggcgacgtggaggagaaggtaatggtggtgacggcgacgcacgcaaccagcttgcttgatgcttcgtcttatctttgctttgctttttttttgtgtgtgtgtgtgttgagttacactttttctatgttttgttttctcgtcttgcatgccgtttcttaccctgttctgttcaccagaaagtcaaagtccgtttatcttggtgtcaaaaataaaaggccgtttccttnctccttgcatcccgctctcgcttctaggcgtatacatatttattttggcacatttttgtctgcatcatttcaggcgccggagagagaggaagaggaggcggagcaacccggtcagcgcgcgcgtaggtggtttgggtacgcacactgtttacacggcgagcaaactcggaggagagagagagctgtggctaacgtagctatctgggggccgtcagttacctgtaagcatcatctcatcactctcactgtgcctctcatttctctctccctctacagcaacattaattaattactagctgatactactactgtacaaaagaaattactaccaccggccaaaagaaaacacacacaataccgtgtttaaaggttatcacgtcgtgtttcctattaaaaaagcgcaaaagataatcagcaaaaaccctaccgggctccacaatgcagtcactcgatagccggtcgctttagccggggcccatatttttctcggtagggatggagcaggaggaaaaaaaaaataaagtccaggcagtacgttgatctgggggagggcgtggggccccagctgcagtgactgtagctgatacacatctgagcggctccctgcctcgtccaccgagctactgctgttggtgtcgtttggagtcttccccatacgcccctgcctacctcgcgtgggtagctgcgcctcatctgcatgaacactgtgcacaacacatacacaaacgggcggagctagctagccatagcacactggtggttaataaatttccatgtgcgcgtaaacatcagaagcttccctgccgcaatgtagctgaccgtattttactactacaacctgcttttcagttttgatttactagtagtatatgtgtgtgtgtcatgtggcatggcgattaaagaatctctgtgcctgtgcccgtcgatcgatctgctttgccccgcgtagcgtttcttccactgtgttagagcagcctgcgaatgcatgccatgcatgcaggagtagctgtgaacgactgtgatgctgccattggcatgggtcttgcttgctttgttatgctggtgctatacttttttgtcgctgcaggctccagtgctccactgcaccagctagccagccagcttgccccgttttgacgccggtggcgaattgaagctccagagaccagagtccctagctatagctatctctcgtacatacgcatgcttgcattgctctctgttgctcaacgagccggaaggacagctcctccgacgcacacgcatgcgcacgtgtgcgtggtcacggaccggccggatagctctgtgctcgcatagtgtaccggatgtcgtgttcgcgtgcttacatgtgagatgcaa

SEQ ID NO: 2602 - DNA, 2000 bp, Oryza sativa
aattcgagcatagaaattatccattacttctggtaaccttctttatgtgattacttttatctcagctgcgtgagtgcatgtagcatatattaacattttaattgtcacatccattgataagaatataccatcaccgaatttgttttcaatgctgattaacatactagtcaggaaccggagataagattgagcttgagggggtttggaaactgacccctacaccctccattaaaaaaacaaaattctgattacgaatctaaatatatatcgtgtctaaattcgtagctaaaaattattattatttatgatgatgtgagtatatatgtaagttagtatttgccacgagaattctacaaactttgcttgcactgcatccttctatcattgcttgcggtggcgaaagcaagtagtacggaatctagagccccactatatgacacttcggtggtctttgccactaaaaaacagctcctttctacctgaaaccgtggaaatctttgcagtggctcgttctaattcaaagttgagcgtgacaatttgttccatagtaccaattattttttcaggtattcgtgcactattgctttgatttctttttttctttatatattataaaaataagagcaatgcaggtacatgcttttattcttgttgcttatgaaactaatagtagtacttggcatttagccaaaagaaaagggaatagtacttggctgagacaacatcagtatagaaattaattggagagcgacatgtataagattcagttccattatttcgggaagaccttgtaaatcatttgtgatatatacaaaaattgccggagtctttgctgtcctccaatcataattataccattttttgattgcatcatacgatagaacaaagaaacccaaccactgcatatgtatgccgttttgtccgtgtgttcagctgtgcggttaccacgtcgtgtcttccctttttgcttgaaatttcaggtttgtcatagttggtgtagcctggacttttttcagatttcactcctgtaaatgtatgcatatgcacataagcaaaatcgtgtttcctagttcagccgaggaccaaatcaccaaaagatacagtagtaagcctgacaaatgcagccttaacaaagattcagctgtcagatgctttgcctgccaggaaatgtttagcagctgacctcgaataattgggtgcttccttcgtttggttatccctgtctgtggattgttacctgagattctgagaatatacaaaccatatgcaagtctcatgcaactatcagatgctgtatggatgggaattctactattttctaattgtgttagttgatccgtaagtcaaaggagaattctaatttctaatcgtattggttagcaagtcagagtattagccaaccttctcagactagctaatcacaaactcatgacctctaatggggtgcaggtgccagtttatcaccggaaagtgcaaacagtaattaccctgcttgagaaccagagacatttagatgaagagacgtgtcaagatttttcagaaaaaaagagttgcgtctggtgctccacattttcacaacaactgtcatgtgacaacgaccatcgtttaaagaaaaagctccgtgcttccgtctccgaccatttcaacctccaaggataatcttttactatctgtattaaatccatttactatctgtattaaatccattcatgtgctaccctttcaaaactcaggaagaggagtcattttgacgtcaacagaagaagaaagaattaagattaactttttttttcctgactggagatgtaaataacgtgcaaaactcatccaagctgctaaaaatatgcatcatgcgtgtgtgtttgttcagaatcaaaccaatcttttgtaccagtacaaccacttccagcgaagccagcagctagagtagcaatgtatgcgcatgagctcagccgcagcagcagtggcgcaggagaaaaacaggggagaagacgccaacg

SEQ ID NO: 2603 - DNA, 2000 bp, Oryza sativa
tgaggcagtggtggtgcttgtagcggcaacgacacacctccaccaaccggtcgaactctggtcgtcatcaccacaccacgcaccgcgccgtggtacaaatccattgttggggaaccaagcggaagcaacggccaataccaaccttgctgcgaagaaaagggtgccaccgaggaagatgtcgtcccgcgccgctgccgaggaagattggcattgctgccgaggaacaaggtcttgaagaggagcgcaggaacattttcgccgtgcgcgcgtgagaaagcatggaccaacgatttggaacaaaaagtcgctccctataagcggagttagggaacctgaactatcgggagattggttagagattctattggatacgatttttgacccaaattttctaaatctgatgagagggaatagaataagtaaactgttggtgatgttctaagtatattcttttaaccactccatgcaccccgtgtgttcatacattttttttttggcaatggatacggcgttcacacaattacttcctattattaatcctacaaaaaaacaaacgcatatatgtcactcaaacatgtgtagataggtttcactttgagaaccctaatcaactaactttccaagcgttaatactccctggtgtgccattgacatggttttggcttcccatctcgaacatttttcaaaattagaggccaaaatggacaaagtttaaaattacctttaattttacccatatatatgtccttgacttcatgtgtctcttgtattttttttaaaaaaaaaagaagaagaagaagagatgatcctcaagtgaaaaggccttgtttagtttccaattttttttttcgaaaaacgtcacattgaatctttgggcacatgtatagagtattaaatatagataaaattaaaaactaattgcacagtttgcatggaaatcgcgagacgaatcttttgagcctaattaggttataattagccataagtgttgtagtaacccatatgtgcaaatggtggattaattaggcttaataaattcgtttcacggttcctaggcgagttatgaaattagttttttcattcgtgtccgaaaactagggatgaaaacggtcggaaacgatcggaaaacagcctcaaccatttccgtaaccatatttttctcggaaacgatatcggaaacgaaaacaatatcagaaatatcgaaaaaccggaaacggaacaatatggacggaaacatgtcggtacagatcggaagccagtaacaaatacggaaatattaaacttataaaaatatatatttaactttacataagtatgttatatgtatacataaattcaatcttatactatataaattataaattaacttcattttagccatgtacaaaatttagagatttgattgaagagtcagtcaatctgtaagttttgggtcaagtatagacatgccctataaatatcgacatatttagaatacggtaattaccacattataagaaacggtaatttccacaagaatacggtaaatacgaaaacgatcgatataacagcaaaaccatttccgttttcattttcatattttttaccatttttatttttgtttcggtcgattaccatttccatatggctcggccgatagaaagtcgaaaacgaacgccggtcgtccggtaattaccgttaccgttttcacctctaccgaaaaccccttccgacatccggtcaaacgtctgatgtgatatctaaaaattttcttttcgcgaactaaacaaggaaaaaaaaagtccgaatgtcttgtttcgattatttactttttaaccgaatgtcgaaattccaatacagctgtaatttcaaccaaaaaaaactgacccatctgccagtctgttcacaccgatgttcacttcatcttccactgacacaccgaccccaccccacccggaccccacgctgacgtcgtcaactctttctcctacctcgccaccaaccctctctctcgagctctc

SEQ ID NO: 2604 - DNA, 1998 bp, Oryza sativa
  N_region (39)..(39): n = any nucleotide
  N_region (42)..(42): n = any nucleotide
  N_region (142)..(142): n = any nucleotide
  N_region (170)..(170): n = any nucleotide
  N_region (172)..(172): n = any nucleotide
atcgttcagagggatcatgtgtgcatctccttttttttnaangttttgtttagtgttcaaattgttgcatgaaatgtttacaatgtcacattgggttctgtataaaacattattttaacttacaactactgcatctgtcccnaaatatttttgaatggaggggagtatcncnttttattttacaaacaattatgtatacaggcggcatgcagactcgaaaactgtactacattttacggattggcaagtgccaacctttgggtaatataggtgttatggtacatcacgattgcttgagactcaggagtcaggaattcaagatagctgcaccaacccattgcaaatttgcaatgcaaaaggaatatatgagatggttggttgcattagtgatgagttccctttacttccaaatgccaaccaattttagtttgtacaatcaatgtgtggtactatcacgggatagtatatgtagcgtaaacctataaactattgtaggatacacaaatggatgtctggaatttgttcacgtccccctgattaatcttttacttctagattaaagtatgattatttttttattggctaaatctcagatgataatttgtgtatcatataacagttttcaggtttgtattacatacagatggtttgcactatatattttctccgctatcgttgtgtctctatctccaggccatttctagtcttctctacatgagccaatgggaagttggcttgcattgaaatttgcatcattgttgaccatagtggaaggacgagtgagtattaacaagtggactcattagtcattagtcatggtggttagtatgcacgtacgctgattaatttgaaacaaaccaataatgatgcccttctccaaatggcactgcagactacctgctctcggctcatttgctggtctgtcagtatcataaaacaaactcatcgcagggcagaaaaaactattatggtcacaaagatttctgaagagctatgtcaggcacatctggaaacctgcctgttccattaagaaccccaaactccaaagtgcaatttcaacatactactaatattctgatgctgaaatccctcaaccaagtttggtagacaataacctaatttaacaatgctgatgttttgtcggttaggtatgcaagcttggctctattagcagctggatgcagtaatcctgagttaatataatcccacaatcttactgctgctcacaaccccaaaaactgttactcgaggttggttgaggtagaaagcctaagacacatataaccaagctgatgttagaaaaaaaaaagctaaccttttcctagttttgcaagctgcagaatacaaagaagccgggagggattaaaattttcagacctgtggatgcaaaaaaggtacagtgattagtgtatactactactactccatttatccagcaaagaaccaagggaaaagttgtgcgtggcattttcacgagatgtcacagtcaacggcctttttgcaggcgccctaaacactagtgtgcgtcactggttgtggctgtgctgtatataacgcagagtgcggggtttctgcagagctggagtggagaaaggagagacctttccattccctctctgaaaaaacaacaatttagtttttgacctgaagggtggtagtagtgggctagttggcggtagatggcattgacactggttgccaagcacagtgcaggttttgttggagcctagtgtggcttcagagctcagaagcagccacatttctgcattcttggatcatttggagctctccttgtttgttgttgggtctcttctctttcctgcttccgagttctgtgaaccagccaactaatctctgtaagttctactatcttgttcttatttctcctgctcctttgcccccaaggatatggctactactgcttgatgtcctgttgcttagagtgttcttggctggttgctttcagttcttgattggttcataccttggtgccaagaa

SEQ ID NO: 2605 - DNA, 715 bp, Oryza sativa
  N_region (9)..(10): n = any nucleotide
  N_region (14)..(14): n = any nucleotide
  N_region (19)..(19): n = any nucleotide
  N_region (47)..(47): n = any nucleotide
  N_region (69)..(69): n = any nucleotide
  N_region (92)..(92): n = any nucleotide
gcctcttgnntgantcacnggggcttgctttccatttccggccaaangggactctctccatttcttccnctttttggcctttgcaaaccccngacattctcatctggattactccgcggcggcggcggcggcgggagcggcatctccgacgaggtatgtgtgtttcaatgccgccgccaatccatttcggctgttctgaggtgggggtttgtggtcgagggataggtggcgccgttttttttcctcgctgcgcatgattttttagggtttgattggttcgagatcagtctccgttacctgtatcccccgcagggttgcggccttttgcaagcgaggttgtgcggaaacgtgtcgtcgtgagaggtgcagttttgattcaaggggcatatcattttctgtttgggaatttaggtcgtgagttgtgatggatgatgatatgtgtggattgatctggcgtctgttcttgatggtttagatgatacagagttagcagattaaagccagggaaatttttagatgggtttttgacatttccatgtatgattttgcaattctaatctattactcttatttttgttagtattgcgtctgaccacatgcataaattgggcagattcctctcttgatggtatcgttgaacaagccaactaagcacaaggagttgtctcgggtgatgagataatttggttaaggaaggtaggaagcagtaaattca

SEQ ID NO: 2606 - DNA, 2000 bp, Oryza sativa
  N_region (1682)..(1682): n = any nucleotide
  N_region (1695)..(1695): n = any nucleotide
  N_region (1716)..(1716): n = any nucleotide
  N_region (1727)..(1727): n = any nucleotide
  N_region (1739)..(1739): n = any nucleotide
  N_region (1743)..(1743): n = any nucleotide
  N_region (1745)..(1745): n = any nucleotide
  N_region (1747)..(1749): n = any nucleotide
  N_region (1752)..(1752): n = any nucleotide
  N_region (1754)..(1754): n = any nucleotide
  N_region (1758)..(1758): n = any nucleotide
  N_region (1774)..(1774): n = any nucleotide
  N_region (1779)..(1779): n = any nucleotide
  N_region (1797)..(1797): n = any nucleotide
gaatatttgaaagcaatatgtgtctatcctcttatctgaatgcttgtacttgttcctcccttccgtccatttatattttaacttctgcccagtgaatcttgacatgacgtgaatcacaacatattgctgattagttcagttcatagtccagaaaccaaatagtggagtaagagccatatacagttgctggtgatgttaatgggccatggaggcccatattcacccacggtggcagcagtggcctgacccacatcatgtaagtacatgatggtaatgggccatagaggcccatacgtacccacattggcagcagtgtcctggcccacatcagtacagtaatcctcgtgcagaacaatcgaatggcccggactcccggttaaaaggatgcactcacaacatctcaaatggcagtgcgatgcactgtgcgctggtgtgtccatatcgacgtgtcgtcgagatctcgttccattgccctccaataatacgaactccactcctgtagccgttgtaggacgtcctccaaggctccaaatccacaacctccggccactattgaaagccgtacctcatccatgccacgaacagctactcacgtgtactactagtactactcctatctttctctccttttttttctgttgccctcaagcacacgatgacccgaataatcgtgaatcatggtgatggagccaagtgtcatcaccgctaataatggcgagatgatcgataaccaaatcccgtttccaactttccatgtactagtaaacgccatcgacaaaggcacaagcataaccaccggcactgcgatgctacgcgacgcgacgcagtgcagccgtgcagcgcgttttgctaccaaccatagggtttagtgtgcgtgtccggaccagaaaatatccaacacatcgatcacctatccaccattagctcgattggagatcgcgcaaggcgagacgcgattaaatgacgaagcctttggacgtcctgctcgtacgcaacagaggactagtagaagaagcttaagagcatcccagcagatcatttaaatttggacttctatatttctatttgaatggtcatccaaaaaagattcctcctctatacctttacccactccaataaatcatccatattacagcattcatatcacactattctatattttactaatattttttaactacccatatatatctaatgattttttaagaggcatatatttacaatggtttgaataggtgttggttcgatttaattgcagttaccactttgagaacactgtgtaccacctttaatcctcttttaaaaccacatcagccacatttaccttatcctctcgctaaaaacaaaacaaaacaaaacaaaatccaccaaatccatcgctcctgggagaccaacagatagtgagaggcgggcggaggagcgacggaggggatgcggcaggatggcgcggccgacgggggcagggcgccatgggcggaggtacagcggtgcaggtggcagggtggcgcggcgacacggacggagtcgcgatgggcaacgcaagcgaagaagcagcgacgccggttgatttgcagtgggggcggcacgggcggaggccggatggtggcggggcctccactccggcgatctccagcacgagcgaaggaccacggcgcctgcattgggggcggcgcatgcgagtnggggcggcggccnggcggagtcgcagggtggcgncgcgcggcgangagcagtggcgngagncngnnnggngncgcncgaccgcggggcctcnactcnggcgatctccaactgcanaccggtatgtccatcctctctattccccttggcacagttcggatggtggcgcgagttcgtcggagctgggcatttgggggaaatggcgtgaggagagagaaacgccaaatatggcatggagagggcttggtttggaggacatctaaaatggcgtgtgtaatggagactctgctggaccgtgttttttcacctccatacgccaa

SEQ ID NO: 2607 - DNA, 2000 bp, Oryza sativa
gatcaagacatttatagctcccacataaataagaagttgtgccacagctacaaagtaggaattcaataaaatatagaataaggatatacaaacaagaactaatcctagcgaaaaagcagaaaaagttgggttggtaagtaataccacccctagaccccctagtagaagaacaaatcccccaaatagcacaagaatttcatgtattggcccaggtaaatccattatggataagaagaaattaatagtataaattttttcatgaactaactaaaactaaaagattcaaggaagaaaaaagggattaggaaatttttttgtatattgtatataagttctttctatagttagaaatcacatcacgaaaatctactctggtttaaaatcaggaataatttgcaataagcagtaggtattcgtttttctttctagttagtaaagaacttttggattctaacaaaaaaattctagtaatcagtaattgttcttgaattccaagatttttcttcgtctattttactttgagttgaattcctaattgtttgaattgtgtaatctcccattatggagattggtaaccgactcataaaggcaattttatatcatatttgtttggtgtaccccggcttttcctgggacggggattaatacactagcgttcgggaaaaggcaattttctcggtcgcgacaccaacgggccgccatgccaaggaaggtttcgctaagtggttgggccgagccatttagcccaataagggcccatacatgtaaaggacatagtgtgccatcaataatgtccctatcataagggtaaccatataaattcccctgtaaaacctaaaccctaaacgggggaacctataatagggctataaatagccctctagtgtcttgtaatacggggatccaaaacaattttcactaagcaatacaattgtttttcacttccaaccactgttgagagaaccacgcctttcggcgtgacacagttgtctattcgacaacagctggcgctgaccgtggggacctccgagcgaaaccactgatgtcaccgaagaagatcgtcaaggagagagttgtcaagcggatggaagatggaagcgaaggggagatggtagccgaagagggagcagagccttcggcctccgagccttcagcctcgcaagagaacaaaagagaagaagagatactcttcgacattgtcaacatcccctacaactacaacgcaatcttcagcaggggcactttgaccaagttcgaagcagtctctcatcacaactacctcaagctcaagatgcctggcccagccggtgtgatagctgtcaagggttcccagccttcggccgtcacaggacccctttcggcaaggaagtccacaccctagaggtcgaaggacaagaaaaaacaaagccaataccaaagcctgcccccacggcaaggttatccagtggcatatagatgaattcgaccccgccaaagtcatatcgcttggtggagacctgagcgaacaagaggttgtcagcatcctggttgtacttaagaagaacattgatatcttcgcttgggggccagacaatgtagggggtgtttcgccagatcttatcatgcaccatctcacagtcaagcttgaagcaaagccgacgaagcaaaagttgaggaaaatgtcggcagatcgccaagaggcggcgaaagcagaggtgaacaagctgctgaaagctggggtcatacaagagagtgaccacccagagtggttagcaaatccggtactggtgaagaagtcgaacggcaagtggcgaatgtgtgtcgacttcacggacctcaacaagatgtgcccgaaggatgatttcccattgccccggatcgatcagctggtcgattcgaccgccgatgcgaactcatgagcttcttggatgcatactccggatatcaccaaatttacatgaacccggcagacatccccaagacagccttcatcacgcccttcggcaccttctgccatctaa

SEQ ID NO: 2608 - DNA, 2000 bp, Oryza sativa
aagtacaaattcaaatgcctgtcagcatcacctctttctttccgactagctgctgtttgtctgcaactcggtctgacgctttgctttgtcatgcattgcgagtagttcccttttcttctgttctcatccaaagaatgatcaaaattacacgatgctccaaaaataaatatggtgcagcttgttggaaagatataagtatgctttaagctaagccatcattcacagtaaaagtagatcatttgcatttggagctgcagtttaggattttagactatggtactacaaagactgaggcaaaatccaaacagcacaagtgttattcacatctactaattactgtacagtttctacttcgctatgagcctatgattgctgtgcaatgatgacttacaactagccagaatatcagatcaaactagttggtatctgcttctcgaatataacgaccaatagccagaacaattttcaccaattggatatcgaaaggctaattcgctaattctaaagcagcatttatcacgggaacacatagattaaaatataattgctggcttccaaaacaaaagatctgatcctctttatagtagccatataccgagcaatcgcagtgtggatgtgatcaaggtactcatcccagtctgaatcatcagccatagtgataccaagtcgctcaacctcttcatcggtgtagtccgctaattcggtaggggcagctaaagggcttcgcattccgcgcttgatgtttaactcgttgatgcccttcatagccttcttgaaattctcataccgatgagccttctctttcttggttatgtatatccggccatgctccttcatccagtcttcgaattttgccttcatggctggctcatccaccgcgttgttgccatcctcgtctgtgtcggcggcatcagcatcgacgatggcctcctccaccttgtcggaacatttctggtcatagtttggtttccccccgttcatctgaacgcggaggtaaccgtagtactcaggataggcgaaggtgccatctttccttgtgaaccttgccatgacggatggctcgatcacgtccctccactttacggtctcctcctccttcctggtatactcccaagctgccacaggtacaaacaggtagggaacgaaacaaatcagtgtattgaatagtaggctaagacatttaacggtaacctctctcaaacagtttgttggcggatggcatgagtcccttcgaccgaatctgccgaaacccatggcgaagaccacgagccaaggatgatgcgaggcgaagggtcgcacgagtgcacgccgaagaaggacgacttcgccatgccgaagaaggacgacttcgccaggaccggttcgccccggcatccagcccagagaaggacggcttcgccaggtccagttcgcccccgcgagggccgaagtagccttctcggcccaccaagcttagagaccatagggcccggcgatcgcccgatggcccatcaagagcccatgagcccccctttacgttatgtaaccctgtaaacgtccctttcataagggcaactatgtaaattcctcagtacaacctagaccctagaagtgagaatctgtaacggggctataaatagccccctagggccatgtaatacaggggagaaaattcaagaaatcaatatacttcgtttctttccaaccactgttaagtaaccacgtctttcgacgtatgcggttgtcgtttcgataacagctggcgccgaccgtggggacctccgagcgaaaccactgagagcgaatgccaccgaagaaggtcgtgaaggagaaggttacaaggcgaaaggaaagcgacgccggggcggacatggccgccgaagaaggagcggaaccttcggcatcaatcgccgaagtgggaggagccccgtccgcttcggcaccggcaccgtctgcttcggcgctgatcacagcattgctgccttcggcccctgccacctctgagcaggcgccaagggtgg

SEQ ID NO: 2609 - DNA, 2000 bp, Oryza sativa
  N_region (714)..(714): n = any nucleotide
  N_region (727)..(727): n = any nucleotide
tgttccagtgcgtgcgcgccggaagtctacatctattaaatggtgaatgacggggatcctccctgtgtcggcctacgtcagccgacatgatttgatgggccctgcacagcagccgatgctcagatgacttccagattgtggcacgagacaaacatttaatatagagaatattttccctcttcactgggaagcacacccggtgcatgtgggaaccccttggagtataaaaggaggtccatgtccagtgaagagggggatagaagaaaaaagaggtggaacgcttagccctagcttgtacaccagaaattcagagactttgtaaactcagaaaaatcatcatacacaggagtagggtattacgctttttagcggcccgaacctggataactccctagtgtctcatcttcatcgggggcccgactcccggccctcgatctctcccaatcctcctagttcctcaattttcactcgctgccctcggccgaactaacaaaggaggggcctcacggtcctccgctcgaggaggtcgtcctctgacatagctggtcatcaaggcgagcactcaaccaaaccactagggatattgttccctgatattattgtacatatacaattttttatcggtacgggctatgctgattatgttttcgtacatctctgatcgccgtgagctattgatcatttagagtgtgttcgggggtccactttcctaanttccacccatagntttttttttttgtacacgcttaacgaactgagtgtttttgtcgaaaaaattttatgcaaaagttgtttttaaaaaaaatcatattaatctatttttcaaaaattttttaaagctaatacttatctaacgaaaaattatttttgaataaaatttttatgcacgtgttattaatgatctaaaagcataggctaataaataaacagtgaaaagacccccaaaatcaacttcaaatttaatgttaaaaatttaaattttaactgataattataaacataactggaaaaataaggccgttagtcgctaaccctctatgccgaacatagctttatgaaatgtcaaccataatcttaggctctcaagcatgtatgttttgttctcttgtagttgtgtaggactggaagagcaagtgccagcagattctgtcagatcatgtaacgtagcctctatttttaaggtcagtaattaatcacagaccgtgcacttgcaaatttgtgaaggaaccaaaacatcggaaagatggacaaagcaccgcagaacgtgttcgaatcaaaagttccaaacaggatgccgagaccggcccgacagaggctcgatcgctagcctggtagtgttttggttaggagactacgtgggataggatgataccatcctgattttagagatggattgattccatttatttacttgtttggtttattggatggaataatctagtttttttatttggtagaagggatgggtagggatgggatgaatgtcgtttggagtaacgttagcaccacggcagaaggagcggagcggcacggcgaccggcggtgtgggtggaaggaggagcggtgaccagtggcgcgggcggaaggaggagtagcgccgacgtcagagacaacggcgatgtggatttgccgctgccactgagccatccccgccctccccgccttcggattcaccgccgccaccgccggggatttgccgccgccaccgccaccaagccatccccgccctccccgccttcggattcgccgccgccaccgccggattcgccgccgtcgcccgagcccgcatccggattctccgccgctgccaccgagccatccccgccctcccctccttcggattcgccgccaccaccgccggattcgctgccgtcgcccgagcccgccttcggattcgttgccgccaccgccggatttgccattgccgccgccgccctccccaccaccagatccgccgcggccgtcgcttgagcgcgccgtcgtcgtcgagcgagcgagca

SEQ ID NO: 2610 - DNA, 2000 bp, Oryza sativa
  N_region (1660)..(1660): n = any nucleotide
  N_region (1668)..(1668): n = any nucleotide
caaaacatttaagagaagtaaaacagtggagtaattaatcagaaattttaatcaacactgaacaacacacccatgctgcacaggcccaaccatcctgaacaaccatacccggctgtacagatctaactccaaaccaggagctaagcaaattattactaggtataacatccataactattgtgagaggtgtgagactaatcacgaaaaacattgctcaacccgcccataaccgcgggcacggctattcgaatagttttactctggccagaggtgtaccactgtacccacaagacacagccccacaacatgtcaccatgtgcctcaataccaccacggtatctcggaaaggagctgtgacaataccccttgcacaacacaatccaccacagcgcacctttcctggatcataatcaccctcttataaacaaggcatggactccccagcgacctccgtgggcttatctccgccacttctcagtctggtgctccgcaatgaatcatgctatacaaaaggtaaagccgttgcccacgctggcttgtggttggcacggttaatgtttcacaatagtagctcgcgaaccggtccttaattgtcatgagcacgactctcaaaaccatgtgctcacaacccaccattatcaagttttagttggcaagtaattaattaaccaatcacgattaaccatcgtgaactatcattaagccatcattaaataataatgagtcataagttatcccaatagtgtgctaatgtttctaagcatggctaagtaatcatatctaatatctagctgaaccaatatatatagcccaactagtcatgttataataacccaaggtatcaaggaataaagtaatcaatgcaaacatgccataacaaaggaatagattcacaccacccagtgacattcgaaaataaatgcacagttgaaataaataaagaatttaaatataggatcaacatgctcaaaggattgtgtttaggatctgtgtgacttgccttgcaataatcggttttcaattaatcttcttgaatacttccggcgcactcgcgaaccttcgcaacgacggaaacgacaagctaacacgcaaaacgaagaaaaagactaataaaaaccaaataaacaatacataaaaagtaaacaaacatgtagatcataattttagatgaatttagagacttgaacggcctcattccgatttcatatgaattagttacaaattttacaagattaaattccaattaaacctattaaagaaaagactattccaaattaattaaacaatttacaaatgatttatagctgagacagaagattaaaacatcctccggaaaaagattagatcatatttggtagatgacatatattaaaaaggaataatatgtcattgaaaagaaagaacggatttatatcaattttggacggctaagattaatcttgcaagcgaacctcacgagataccgactcaacgagtcaattctacgtgacacgggatcacccaaatgatcaaccgaaaccggcgaacggaaccggcggctctgaaaggctctaaactaaaggacgactcaacacagacgaacggacgaagcacggggaacacctcgttcgaacgaacgagcgaacgactcaacaacgaccgcggctaaaccggtagactnggctagtntgagggcacaagctgcgacacggcggcactagggcgacttgctcggctagccgcggcgactcggcggagacacgcggctgggttagggcgacggcacagcgacaacggcacacggctacggcagagcgacgactactcgacaacaaaaacgggagattaaaaactaaaccgagggaaaacggatagaagtctcaccgaaccaaaatgatcggagagggagagatgatgacaacgttccgatagcaacacatggagacgacaacgctagacaaaccgcggattagattatattggattaagaccctagggaaaaacctacaccggcgaacggc

SEQ ID NO: 2611 - DNA, 2000 bp, Oryza sativa
  N_region (386)..(386): n = any nucleotide
  N_region (1649)..(1649): n = any nucleotide
caaacacctttggagtttggggttcgaattcaaactccaaaatcgcgcctccgatgatccgatccggcctccccacgcatagatcgcaactaacctcactagctagccgcggcgcggcgcctatacaagataaacaaacgcgtcaaattgcacggcgccggcgagcgagcgggtcggagaccgcaccgccgccacaccgatcgatcggcaagattggcatgcccggcggccacaacaagcagccggcgccgcccgtggcgaccaccggctgctccgccctcgcgtcctgcctctccttccaccgccgcgcgccgcggccgccgcctgcgcgcgccaacgtcgtcgatggcgcgacggcggcgaccactagagcatccgcggagcantaccggcggagggtgcagttcctggaggaggagatcaggaggctcggcattaggctcgccgagcacggcaggagccccaatggcggcgccatggccaccagagatcgggtgaacagcgcctgcagcggcatcggcgccacggcggccaacaagcgcgtcaccgtcggtggccacggcggcgtgcgggaaatggtgaggctggaaggcggtggctacctgcacgagatcaaacgggtggtgggcatgccctgggagcggctggcgctgcaggtgtcgcagcccgtcgtcgccgagaacgccgccaccgcgtcggaggtgagccacctcgatcgctgtcaagatccatggatgccaatgaagtctatcatccattgcactgcacattgttttcgttcgacaatctgtggcattgtgatctctaggttcttgacaagatgacagagacgagcgcagagaacctgtgcaagttactgtcaaagatgatgccgatcaaggacatcgccggccggaagaatcccggcaaagtcatccgccgctcggcgaggctcagctccggcgacgacttcttggaggctctcctcttcatggaaatggacaagatggaaggactggtccaacaaggcctaaagattcgcatggcctcgacggctgactctgcctcgtccacggctgccggcgacgacgacggcgaccggaggcaccaggcgacgaaggattccatggtctctgtggtcctgattcaggtgagggatcccgagcaagggtacgccgccattggtgaccccatgatcggggtcatggaggcatccctggagaagaaggatggcagggtgaagctggagatgcaggggatgcacgtcgcagggatcctcttcggtgcaagcagcaagggaaggagtaatggcagagccatgatgtggagtgcttgcttgggacagtgcaaggggtctcacaatggccgccgcggcggcggtggcggcgccggcgccggtgatgtctgccggtgcggctttgttcggaacacaaatcgtgttttccgacggtagagattggcattcttggtatgtctagtaaagtaaagctcaatcagcattgtccctgttcttagcacgggagcagaagagacagataataacaatctataataaattttgtgataggtatttataatgtactaataaagtttgtggacgtttcttccattaaccaaccaatcatacattctgacgttaatggtgtatgctgtgctgtctgattttttgnttttttttttgtgatgcatgtcaagtcatttgtagcttttgtttctttttttacagcactgtgttgtgttttgaagcagggatcaatcttggttacgaaatcggtcaaagagaggttgaacgaaaaataaaccgtactcagtttgaattgactaaagttattgagaacttaaaattgttgttaagaagcgaatccgttcaggatctgagttcgagactgatcccaactcggggtcggaaatagatggaatttttttagcggaaaaaatagacggaaaattgtgcatacaaaaattcaaccttgaccctgagaatcagttgtcgacctagattgctagcacgcagcgcaggc

SEQ ID NO: 2612 - DNA, 2000 bp, Oryza sativa
  N_region (108)..(108): n = any nucleotide
caatttcatgtttatactatgatatgaccactgaaaattctgttcatttttggcaggcacgtcgtgagaaaataagtgagcggatgaaaattctccaggatcttgtcncctggatgcaacaaggtctcaacatattttcctcattttgtcccataagttggggtttaaatattatatttttgtaacatgacctctaaaacatccccagttctgtttctgtaattgattttcattggaaaacttttgcttgcttggccaggttattgggaaagcatcagtacttgatgagataattaattatatccaggctttgcaacggcaagttgaggtatgctgtttcaccattggcgctttatgaaatttctttaccctccatatctcagctaatcgctctataatttgctgttatctgcagtttttgtccatgaagcttgaggctgttaatgctcatgtgaataatggaatcgaagcatttccacccaaagatgtaagtcaagtagtaaaattaacagtttaaatagcatgatcattattacaataaaaggtctcaagatatatttgaaagattctgtggcatactatgcgctactggcactttatcttagctccaatctttgactttgaacactgtgttaatatgttgtttttttcaacaagtcccatactctacaggcaagccagctatatgctactaccatatgttttagtttttgaaggcgttatccattgctcccttctgaaaattattaccattttattgaagctatactcctgaatttcaaaaacgtttaggcagggcaaggcatttaatatctgcagaggatacacatcattgaaacattttcctgatttttactctttatctaaccatggcatttgtctgtttgtttagttcaatgtgtttatgtatttactaagtactagtagctctgtggagctttatgtaaacttccaaatttggtttttagtattaaaattgtttattttcttttgggtcttttggttgcagtttggtgctcaggtatacaacacggctcctggattgacgtttgatccacaaacaccaagagaatacgcccagggatcaacaccatcggaatggctccacatgcagattggtggcacctatgaaagagtgacatgaacagaacaaagtcaggatggtggcccaaaataaagcataccatgagttcagtcagaaaccacggctttagattatttttcgaaactctcgtgctccaaattcgatttcattcatagcatggagctcatgtatttagagactgcgagcacagtatttttacatctgtaccgggatacaattctcatcagattcatgtattccacggaatttcggcaggtcacgctcattcgtagcatgaaagaaaagtaataaccatcaataattctcttgctataaatcctaaagcccttcatttttttttgccatcgtatgcttatctttctgaatcttaccagtagtttgttggtaatttgattactcacatttgctacttcgatcttcgatttgtgtttgtactcccaagtcaaagccatcaatctggcaaattttcacaggatagttccaacaatttgcacaaaattcatctgaactcgttctaagcgaaagaacagggtggatgaatctggagcaaaactgcacaaccagaactgaacctcccgaaaaccccgcaaaccgcacgccacgaatttaccatcctacccctgtatcgcagatgcgtctccgttccgtttcgcagtctgttttgcccccacgcgaaatctccttgttgcccttttcccccttctctcttctcccctctcctcctcctctctctctctctctctctactcctttcctctcctctctccttgccctcctcgcccccaatggttgccgcggccacggcgccacctgcccattccgcggcgagcccttgacccacccctgatctcgcggcggcggccgatccggcacccggcgacgtgtcccggcggcg

SEQ ID NO: 2613 - DNA, 2000 bp, Oryza sativa
actttacatttgttattttctgatataggtgaatcggcaatgaatgtacatcacagactgacggtcgaaggagtttattgatgacctgcattatttttttttagtgtggctaatgcccacaagactaagggttttatatgttatccatgcaaaaaccagaagaagtattctacatcaagaactcttcatatccacttgttgcagtcaagattcatgactagctataattgttggacctcgcacagattgttaggggttgcaatggaaaaagataaagaagaagacgacaacattctgaactaggctcaatacaatggacttgtagaaaatacaatagacgaggcgaacggagctattgaagaaaacaacggaacaaatgatcttagttagatgttgagtaacgtaaaggactgcgaaagtgaagaagaggtccaaaaattggagcgtatcttagcggaccacaaaacgtccttgtacccaggttgcgaacaggggcacataaagttgggtatcacaatggaattcatgcaatagaaggcaaaaaaatggtgtgatggacaatacatttggtgaattattgaaactcgtaaagaatattcttcctgaggaaacgaattaccgaaaacaacatatgaagctaataaagagtcttccctctaggactggaagtccagaagatacacgcatgtccgaatgattgtaatattgtattctctatcgcggtgaggagtacgagaacttagaagccatgcccagtttgtaaggcactatgatacaagattggatgatatgaccccgatgatgttgactggaagccttcgaagaagagggttcctgctgaggtgatgtggtatttccctataataccacggctgagacatttattcaggatcaaaactcatgctagaatgatgcactggcacacagaagaacgtaaacaagacaagatgctgagacatcgtgctgatgggtcacaggggcaaaacatcgacataacatttcaatacttctgaaaggatacatgaaacataatgtcgacgagtgatactcagggaccggatgagtagagtattggggtacgttggaacgagggtctacgtagtacgacatcaagcagacaaaagataaggattatactggttcagaccccttatcaggtaatagccctagtccaatttatatgagattgatgatgatgaaaacataatacaaagagagtagtcgaaatagagggtactgatgagatcgtagtcgaggggttcgacgagatcttccggcgaattggctccgcatactccggcttcgtaagcgttggtgggtgtgttggtgattgaattcgatgtcttgaacccttcccaggggggtcccttttataccgtggatcatcttgatccccaagaaaggtttgaggatatcggacctggtatggtattacagaaaatctatcccttccgagtaggactttggaaatcacttgactcgtagagatattttccataatttgaagtggtttccacaagacatttatgggaacaatccgtatgcgcgaaggtataccttatcggtatattccataagtcgtaggataggaggtatgccttatctataaccctgacagtagcccccgacttcaactcaaatgaattcatgttgtcgcccgtgacttctctcatcagcgacttgtcgtactcactagatcgttctcgatatggaccgagaagacaaggagctattgacaacactaatggaagtccgcctggctgatcatgaatttgaattgaagtctgaacaaacgcccttaacgggcctcagaatttttcggcggcaatctctctctttcctcgaaatgcgaaccgttgggtagtgtgcttatttaaagggattttgggatccatttcaagtccgtttgccgaaaaattctccaaccttccaacagtcttgaacctttcatctcccccagttccctaagttttctccaccttgccccggtgatctccctc

SEQ ID NO: 2614 - DNA, 2000 bp, Oryza sativa
ggagaagggcgtgtacctcgcagtacttgatcggtgccatctacgggtttggattctcaacgaatcatgtgagcagatgaagtgggaactgaaatacgacaaggaaattcaactctcgtttcagcgctggaactacgatgaggaaagtgtcggaccatggactttacactacagccgccgtgatgtttatgatggagatgacactaattacaatgcagaagtagcggaaaggaagttcgagtgggactctgacagcgatgatgttctcgacttggaggatagggttcaaaggtcttctcatggtggttttttaatccttggatttcatccttacaaagaagttatctttctagatgaaggatcaagcagaggattggcttatcacttgggtacctctaaggctcaagacttaggtaggttacgccccaattttttcgaccattggcacgtcgaaggcgttaatcggtcgttcgtgtatacgccttgctggattggagagctctctaatgggatatagttatatatatatatatatatccgactcgcagtgttctcatgataattgtatactttgatgtaattgaccgacttcaataaaagttctcattatctaaaagaagttgtatatagtccctttgtgttgtttctcttctgatatcactttgaaatcaagaaacatctttcacatatttcccgatgttccttaacgcttccatttctcccataaagaaaaatgttatcctataacctccctctagatgaaaggttgaggctttaccctcatggcctacgtatcatctctaaccttagatggcccctccgtgtaattggcataagaggttccttaatttttcatctaaaataaggaattatattttttttagggaaagcactgaataaggaattgtatttgatcaaatcacccagcatatcaagttttcataatcttctcttctacaaattaacgcccgctcttagaacaaaatcaaggcaatattccacaaatacgggatttaactttagagtgacacttaataaatcccttaattttatttacacacaaagaaatctaaaaagaccactgtgaataaaggtacattttcagtcctttttatacattaaatttgatactgtagaggaatattatttagaattttcacaatatttatacttgtactaattggggctctgctgcatgaagaataaatctaaagaggtaaaatagttaaaaatttccacattaaccggaaattcccacattacttccaaaaaagacatactcctagctagccatccaatgcacgatacaagtaataatgcctacgagtaacatttagttttcgtgtagatacaaaaataatttaacacggatggacaaatgcccttgctctttttttcaaccataactggacaatttcgtttttttctcactttcatgtccaatattgattacacccctactttttagggttttcgtttttttgcccacacttttttgaaccgaaagaggcgtttacccctagtttagatggaagttagtgggaccggctgtgggggatacggcacccgggtacctcacggtagcggcccaagttaggcttcgggggtgggccaagggcccatgaccgatatagtaagtctaacatagttgggcaagacagggagattatagtaacagatccccaatcatgtaatagaaggcaagtatccaaattgtgaggatacggggtcttgattggcgccggcggcctgagattgtataaagaggccggcgtccttccgaaatcctttgggcttctcgattcattttctttccacgaatacagagaaaaagcacactggacgtagggtattacctcatctcgagggcctgaaccaggataaacacctgcgtcaccatctctccttgatctagcgcaccccataaaatatattgccgatcatagaaatcgacagttggcgcgccaggtagggggcgcttgatcgttttcaaggcggag

SEQ ID NO: 2615 - DNA, 2000 bp, Oryza sativa
  N_region (989)..(989): n = any nucleotide
  N_region (1962)..(1962): n = any nucleotide
cctacaggaaacaaaacatctatgaacgtaccaaactttctatagtatagcttccaagatgaccacgagcatgctttgtcttgcagtatgtgcaagcacccaaacacccaacattaataggaagaatctcgataaatttgttcttccttacctggaaattgtagctgtggtcagtcatcaggaatgatattagtatattacatctgtcagtggtaaaaaggtaatagcacataacattggcactatactagccataaaagattgatacatataacatcatgtacagaaatatgagttgtaccttaggtaaatcaagtgagggcagtgttttccgactcaacaaccgaacctcatggccttttaaggtttcttcaacaacttcaacaacgcggtcaatctgttgcactccaataacgctaataccttcaagctctttcagatcccggcttccttgtggtacacatccagccacaaccaaaggcttgtttgcactcttgcacttcgatatgagagttgtcatggcagactgacttgggtttttcacagtgcatctgaaatggcaaaataggtgtcggtcacaatatattcttcacctctgaagttaatttgaaggtttgcccctacgtgtcaatatatatctcactcttcggcactgcaagttggatttatgcttattatcccaagtttacacagctcatggcatattctagtgcaaaaaatagcgtagctagttttccacaacacaaatccagagcagcaccagtttgaaaccatcacaggttaaattcaactcatgtgtacttttaatgaacgtcaggaggtaatagatggaaagaaacaaataagagaagaaagaaactaaaaccatacgtgttaattagccacaaatccgctccttcgggctcttcagtgatcgcatatccaaacgctgacagctgccctgacatgtactcactgtcactctgcagagcaggaatgatcaactggtnatttaacatagctaacaacagcagaaccattggcttcctagcatcagcacaatgaataagcccgctagaaccacacactatcagtggatcactacttgtttcagcacttcaaccagaatttcttcatttgctagtggaagtaacagcatttaacgaatcatatagcacttcataattcatatcagtattctgtaagctagcgtgccaaaattctgcagaaataaatgtggacgaagcttgcctggttatgcgagcacccgaacgtcttcacatatatcgtctgcaacaaaacgaaaccatcaagcgcatcagattaaacgtggaaacgcagcaacacgctcattggagctcgagctacggcggcggtttcacctgcgtcccggggatccgggcctcgggctgcggccgggtctgcgcgaccctggacgatctcggacgcttgggcttcacggcgacggcggcgagcgggagacggagccccggagccgccccgccgccggcgatcccggccggccccagcacgtcctcgatgtcctccatctccatctccggcggctgctgctgctgcggcggcggcggcgacggcggcggcgcgtccaggcgagtcgtcgtgggctggtggcttccccgaccgagtagggtttctcgcttgcgtcgcgacgacgcgagtgaaagtgggcttctcggtttgggcccgctttgtgggctatcctttgcaggccgagacgaagcccacccaattcgattttttgggccgccccacctttccaccggccgcgcccgcacgcgcgcgagaaccgaaaccgcgcgacgcgcggccacgtccgcccacgcgtgtcgcctcgcggcgacgccgagctcgccaccgcatccactgcggcgcgtccacgcgtacgccgcggcagcgcgccagggcctcggccgccgcggccgccgggcgcttctaaaaccatcgggcggctcagcgaccccncgaatttaacccgtcattaggcgccttggtcgaaccag

SEQ ID NO: 2616 - DNA, 2000 bp, Oryza sativa
  N_region (1496)..(1496): n = any nucleotide
gtagtaccaatgtacattatgtagtaccatacaactcgcatcgctttcattatggacatatcttctgtgttttcgctgtatccattctgtcaggacaagaatccggccaaattaaaagccatgcaaactgacaagagtatgatctgtcgtaaatgttcaagattttgttttattttctctgctgtgattagagtcattctccattcttgtaatggggtgtacatgaactgcagcctgcaggtatttattttgttcagtgtgacgtataaataatgttggcaattaccgggtcactgtttatgatttttcagtgctgctagatcaagtttgctcttccgggctagtaatatttgacgatttcttcagttgtttgtgtaattctcgtaaaaacctgtacaatttacaggaagcaaacaccgcttcagatcgcatggactgggctttggcccatgcctaatgaataattatacctacagtgggccagatttggcccattgcaaattgttactggcgaaagcataattagacttcggacgtcggcgatggataagttgccgcaaaatttgtaactttgttttttggatttttctacacgtcttaaattttcttcagtaacttggttaaacacaaatacaatataattacattgtaacttacattttactatagtataatttttatatataactttaacatagttttggacagttagatttgctcagattcatgcaaatatggaaagaaaatattaatgtgttcaattgctcatggatgaggactttttgggggaaaaattcggatatataagattccctccgtcccaaaatatagtaatttttaggtggataggacatattctaatactacgaatctagataggggtatatccagattcatagtactagaatatatcacatccaaccaaaagttattatattttaggacggaggcagtagtccctttatttactagtaactccaagagggctcaacaagaaaattataccttcgtctaagttgtgagataatcgggtactactctactataacaaactctgtattttctggaccatagggtactgataatgaccatagggcactctattaaccttaggaggctgtgataattatgtcggccatgcaggagatgagaaccaaaacctaattttttttcataccaacaacatttatttttatacaccctcaacgaaagaaaatcccaatcatcagatttgctgtgattattctcaacatacacgaatattaattttactatcttacagtgaaacgagcgtaacttaactggttagatttcttatggtggaaccagtttatccgagtttaagtcctagacttgatacggagctcagatttatagctaattgtaggtgatatacccgtcaataacgagatgcccatggtgaacttagtcaatcttaaagtatgccggtctagtattataaaggtgctcatacttatgcccgtgatctcaaaatntgaaaaaaaaaaatcagctcagacatccaaaagtactcgtaggggcaagatatgcgtttgtgccttcatgggtgagtccacgcgtattacatgatttttattccctatgtcctaaaatataagggattttggagagatatgacacctaaatatgaataatctgtctagaacaagattatgggcatgttagtggagcttaagattctgagaagcaactgctaagaagctagctggtgagaatctggagaagctggaaaacccagcttctgtcttctagttcattttccagattctacatctatagattcttagaatcttggtaaaaagatgggttgttagggagagcttttggtagctagagattataggagaagatgcaactgctaaaaactcctttaaataggtccttttagtaatgtgtcacgacctctaaaatcgcttacattttgagacggataggacaagaaaaagcctggaaaatcagaaaaaaaaaaggaagagcga

SEQ ID NO: 2617 - DNA, 2000 bp, Oryza sativa
tttatttggcctctgtataaaaagcacacgggcactacgctgcggtcaaaaagagaaaagtaacctcattttcttttcttgatttgtgacgttcagttaatcagtttgcatgagtatcgtgtctaaatcaacctaggctagctaccaacctcatgataaaacataaagctacacatgccaataaatattgatcgaccaaaagtgcacactacatatatctccatactaacttggagaagaattctatcaccaattaattaagcgatgagttcggcatgttgctttttatgcacatgtgcatgcatccagcttaattagtggaagaaaacgcatttaggcatcttagagtataggttaaagtgcaacctctatgtggatcatatcactgatcttgaggaacttttggatcacacgagctctttaaaatcgtgttttgcagaaagtttacatcacgacgaccatggcacaaacaactttcacaaccaaaaagaatgtttagggccaactccctaccttatcggtgcaatgtttctttacaacaaaaaaattcggcagatatatatgcatgaaacaacatttgccttatagggcaagcaacacgtgacagtgaggatataaaatgcaattggatgtacaaaagttattatttattgcgatggatgaagttgtttgcttgtgctgtgtaagcatggatgaagttgtttaatttgcgtcgtgtgctgtatgagcattattctcttgaccatctagtacatatgaatattatagaattggaaatgtgggatgaaaaataaatgtagtgagaaagtgaatggctttttcttagcagaaaaggaaaattctaaacccatgtaaaagccatgatcacgtcaaaagttaaaagcattcctcttatcctttttcatccatgaagtagtcaagtagcatacacaaaacatgtggggaaatgtaacagctatattgcaactcaacatatgaaaagattatgtacaccatatgagcttaaaaagttagagcagacaaaacgacagcacatgaaaagaacacaattaggatatgacaatctaaatcatgcgttggaataacaaaaaaaaagttgaaagacaaaacataagttgttgaaaacatttcagctgttcttattgctggaattgtgcttcagtacgttttcttattgtaaggttgaattaatatttaaaagtaaacatacaaaacatattagaacaagtggcctaagtaatgcacaataagatctttatttttgagaaatcatatttttagaagcatggagcaaataatctacggtagtgatataatgaagaagctgaaaaaaaggggctatattaccatggacattctgaagatagtatggacccataatgtggcaatcagtacatgaattcaggaattaaagtaaaaagattttgttccacaacacgattcatttttatatagctttctaatgaattcatatgaattagaggtccaagctaagtaaatcccttgcttttgtataaaaaaaaattggcggccggcagaagccaacctgagcatattcaacaatagcccctatagtttaaatggaggctgccccatttattcaagatctaaaagatgcctccaatctagtagtagtctccatttctcaatccttatttttttagttttctctttcatttcaatatacactctatctttatgactagtttaacactacaataattcaaacataaatatttctaacacatagaattcaaccatatttaaattcacaattgtaaacaccatgttcacaatttatattcaaccatattcaaaatcaaaatttcaaatggaaatgaaaatgacatatcataccatgaaagtctcgacatattaatcataatcaggtttattctaattaataacagatcaaaacactgaacaaagttttagacacaacatgaagttcgatcaaaaattaaaagcaaagccatgtaacactgccaaggacatgcaaa

SEQ ID NO: 2618 - DNA, 2000 bp, Oryza sativa
  N_region (1432)..(1432): n = any nucleotide
  N_region (1451)..(1451): n = any nucleotide
cggtgaattactttgggacaggttacagttagctattcagccagtgtctcaaacccttaataaatgctaatgtttagggcaaatagcacttatcatcaaaactatgattcagatgagatccatcatcgcagcttgtcgccaagaccaccttgttcacttgtagctttttcatccttttccaataatagttgcagatttattcttcaccttgtccctctcatctgctaggtgattcaactcctgtagcagcagatctgtgcaatcctagttcacaaacaatacaaactgcaaaacaatccagatcatgcttgatgaaagcatgctccctgtaattatgaagaaactaattactagtaacatttatgaccattgttccactggtacatgcatgcaagtttgtgtaccataacgtagcgtttttttatcccgatgttgcagactaagttcctactgaggggaaataatcttgtgttgtcttttactcgacatgttgatggacagatgctaatggtgctgaagaggaggctttgcggagagttgtggaagccgaacgtgctgcaacacaggcaggagaaacagctgttcgtctgcgcagtagagctcagcgtctcatggcaaaggctgagctggtggcatacaaatctattatgccctcaggatagatctgagctgctagatatctgactcgtcacggatcttgtttgacgaccctcgactagtgaagaatgtgagtgagatgttcattgatttgtgtgaagagcatagtagccaatagtttgttttcctcttttttgccgcatcatttcaatgctacgtggtatttggctttcgggtaagctgtgggctgtgggtctcttttttcctccccacctgttttaactttgtgaagccaatctttgtagcggatgcttgaactcaactgtaatctcttgtgtacatgatagtggttagttagattgtgtgtatcttttctgtagccatgttttgaaaaagatgaacaaattaaaagcaaaatgaaaatcaggaggaggctaggtaaaacgagtcaactgaatgtatagtggttttcatcctgaagggttttcagatgaaagttactttcgttatgtctacctatttcattacacaaggaaataagtctatttcacctcccttgatatctagctcatgattgaatcgtcttcctcaaccgtaaaaccgggtataacacctccctctctttgaaaataggtgcaaattgactccttaagtggttttgaaaatatgtagcccgctttcttctctcagcaggtggaacccacatgtcagcgagttactactcacctcatcttcttcctcacctttccccttccctcttctctctctgcctcctctttctcgcccttccggcggctctcacgcctgtttctacttcctcattgctggcgcgcantggcatcctctcgcacatntgcgtgcacttcgactccgcctagccgctacggcaccacagccacatccttatgatcattggcagggtgttcctccgactgttcattgtcgtcgtctccaagggcagtgggccggcggcttcttgttggtgacgccgcacggcatggttgattccgcctgtcctggaagggatagatgaacgccaacaccgatactgtccacaaactcaaccgtaaaaccagatataactcatattcgaagacggagaaagcatctcaaatatggaatgggcttgggcctgcagtcggatagaaagaaactgggccagatccggtccaaaagtggcagctcacgcggacggcaccgcacaccacgcgctccgagctccggggtccggctgtgtgagtcgcaagcgactttttttctcttttcaaacagaaagctctggctcttatcgaaaattaaaaaaagagagagaaataaaaggggatcgatccgctcttgtagttgtagagcgttccattccacttccacagcagtggactcagtgagcaacggaggaagcaacg

SEQ ID NO: 2619 - DNA, 2000 bp, Oryza sativa
  N_region (1396)..(1396): n = any nucleotide
  N_region (1638)..(1638): n = any nucleotide
  N_region (1908)..(1908): n = any nucleotide
ctttatagtagatataatgttacagtgaactgaaatactccattccaacaaaaaatacaaatattttggaaacccctattaaagggaattcgttattattttttgttccaccgaaaaatgttttactatcgtatagaattgaaattgttgcagtaaactaaaacattacattcttgctatttgctgaaacattgttttttataaggtgaaacaacacccgatttaaatgagtgaaacagttagtcatcgtgaaagaaatagtttacagagctttcgaatgcagagcttttaaagctaaccgataagtctgcatcatgcaaaaacagcatgattaacagaacagaggtttattgagcaaatcctaagcagtgtcagagtacagatgtgggtatgtagcgttcaccaaaactataacgttgcgacttatgcgtgatgatgcgaagctcgtcgtcgtggccgcgcaccacctcgacgccggtgagcacggcgaaattcctttcatccgactcgaaatcgcagcagtattcggtgcaggtcccccggcgagagaccgtgtacagcttggcgacgcacagcttgctgtcgccgatgtgcacgacgtgcgacgagtacacctcggtgtattcgccgaggtcgacggcgtgcgacgggcgcgccctgcgacgcgacggccccggcacggcgaagtccctgcacccggggtgcgccggcggtggcggctccggctgctggacggtggaggaggagaacaggtcccacgcgccgaggacgtcgtcgtccgcggcggagaagccgaagcagaggccatgctcggggacgtactcggcgcggtcgctgaagggcagcgtccagtcgccgtccttgctccaggtggcgcgcgccgtgtcgaaggagtaggtgccgtgcctcctcgacgacagcaggatgcgcgagccgccgaccgccgcgtacgcgcaggtgtcgccgacggcgttctcgtagccggcggcgtgcacgtacggcggcggcggcatggcgcgccagaggcaaccgtcctctgcctccttcttgcaacggacgagcgcctcgaaagaacggtcggtgacgccgtcggggcgaggtgacaccgccatgacgtacagatccttgccgacggcgagcgacagcgtccggaacttgggcgtgaccatggcgggcaacgcgccgacgctgtgcttggcggggtcgtagacgatcgtgcggccagcatggtcgacggcgatgatcttgtcgtcgttcctgcgcatgatcttcatccacgtgaggttgtccgtctccgaatcgctaccgggggggaaagaagttcatgtcggctggagacaggcggacgtcctccacggccgccgccgccgccgccgccgccgggtctgcgtagaanagacttgatgggtcgattcggcgtagcctctggaaggaggggtctacagcccggaaatcaaccatgtagaggaatcgccggttcttcgtcttcccaaatcgcttcttcgctttctttttttccaagatgccggagcgattattgggaattgttcccaatctgctaatggggttagcatttgcgaacgaggagtagatgcggtcggcgagcgcggcggcgcggcggcagctgctgccgcgganagaggcagcgcccaatcgccgccggcatcttggagcccaggacagcgatgatccggcgacaacttcgacagatcacacggccctatctcccgcaggctacgccgcatcaacccatcacatctcttctaccccaatgatgcactgcccgtgccctaatcgtcggcggcggtggaggacgtcccgctgcctccgacagaggtgaccttctgcgggtcgacggagttcatgcgcaggagcgacgacaagatcgtcggcggcgcaatcctctangaccccgccgagcacgccgtccgcgtcttgccctccatggtggagtacaagttctggaacccagtcgttcgccgtcggcgacgatctctacg

SEQ ID NO: 2620 - DNA, 2000 bp, Oryza sativa
  N_region (1326)..(1326): n = any nucleotide
aaccttatcatgacaaaataaaatacgaatggagtaagagttcacactgtcaaggttttgctcaaggagtagatgattctcgaagcagtgtggttgcatagtctgaaaaacagagaccatgggctctggagaaggtagttaattaattaattaattaattaattaattacactgacgtccataactatcatttcccaaccaaagttttttttctcctccaagcatcacaattaaggactcaacaaggtcaagagggagaaaagaaaaggaatggaaaggctaggataattcttttccactacctaaaagaaattattcttggagtgccgcggaggcaagtaattgtaccgatcgagttccatgattatcgattcggaagtcatatattctctcacccaaattaagatgtttttttctccctttgccaagcatcccaattaataaggactagcctttaggtcaagaataataatgggaccaataatacaaccgcacgtaggggtctccaataataatcaatactctatctgttttatactatataagtcgttttatttttttagtcaaactttaaacaagttaaaaaaagggtcgttttatatttctaacctaaaacaaatatattatcaaaatatgttcaatacaaaatttaataaaactaatttagttataaacgttacaaacttttattttatgaaaacgatttataatataaaatggagcgagcagtggcgtggctgttgtcgccatcggcgatggacaagaggtagcgacgcgcgagccaattggagcccctcgttcggtggcgtcgtcattaggatagcgatcaatctgcctttgaatgtacttgttgtgtttaatttactgtggtaattaactgggtcagtgttttaatcggcgatcgagtggattagtacgtgaggtgtaggtgattgttgtgtgtgtggtcggaggaagcagcggtagcacggaagctggggacacttggctggctagcttgctcttgacaaggttcagttaccgtacaagctttcttcagtaatcttggtgttgatcgatcgggacagatttgatgtggctgtgctgcagctgcagcagcatgcagcaaaattaacacacacaatttctgctatttctactgcttgtgcccctagtgtacaaacctaaggcccattgtttggctatttagaatggtttattaggtaataaaaataaatttataggtaaattttttttatattttttttacttaaaagtcaatgctgaaaaaaaactatgttaaaaaaatctaaaaattaagttaaaaattttaaaatttggcttttnctttaactaattaggctattcgttgggagccctatctgatgcatgcctgccagtgccaggtaggattagaactgcacattgtgactaatcatattccgttagaagctaattagaatgcgatgtgcatatgtgagggggcattattgaggcatactatatgtacaaatggcctcttcttggtgcttatttggtcattcactgtttaataattaaatctgctgtacgtgtcctttcctctaaattctatacatcttcctctatttatataaatagcgtgccctcttaattatatgttcttttcggggttaattacatgtttaatgagcagcgagcacatgtatgtctatatatagcagacatatacgactacgtgttatcctaatcaatgttaaactcactgagatcaaccatgacatattatttttctcttggaataagttcacttgagttcacttaacttgtcaacgaatccgattttcgtccttcgatcagaaaaccagatataccaggtcccttaactatcagaaccggtgcaaaacaggtccctcagcggtttcgatggtggttttggctgatgtggcaccgacgtggccagtttgagttggtcctcgtcttacgtggcgatgatgtggcactagaagcaaaatataaaacttaaaaataaaaaccaaaac

SEQ ID NO: 2621 - DNA, 2000 bp, Oryza sativa
  N_region (1082)..(1082): n = any nucleotide
gaatagagaaagcaggcacatactagagagaactagagaggtgtgtccttcaaaagcctgcacaaagtgtagtgctcaatgatcccacaactttcacaaacactagcccacaatgctctttctctcttcccttctctctctctctcttgtcttcttgtgttacaacaagatcagagcttttgcatgcatccatctctgattgatatgcatgatcaggcacacagccccccagggaggagtgcccttgttgtagttttgcagtgccttgcccacaccctgctgaaaagaggccatataaagcagcatccttggacccattgcctctggcctcccaaacatttttttttttgcatttttgcttgtgtttgtttgctcaagcaaagactgcaagagaagaatcaaagtgtgcaagcaacttcatccctatccccctatatagacaggtaaatctaggagtataatcctcttgagtcttgtcctggttcttggatctctctcacacagtgctgcatgcttccttccatgaatggattttgattagtttaagcgaaacctaccttgcttgtttgagtgtctctcaatgccagcactgtttaactgtagtagaggatgagtggtgggacagtcatttagtagattttaggcacatgcatgatccacatttttataatgcaatgttgtattttggattaggataactgaccaatgagcctatggtttgcctccccagtgaccaatcattaggtgataaatcccatatgcttttgtcaccactcctcctttacactgtcccataaaaaatctactcctatctaagatgagatgtgatgttgggtatgtttagattcattatgctataaaatgtcttatcttatcttttatgaaacagaggaagtagtaataagccataggtgtatgccctgtgtttagaaaaccgatgaaaaccggtgaaatccaaactttcttgaccaggtcagaaagctacaaactactcggtcttttggtcaagtttaaaattttcaaactaaatttaaatttttgtcaaagatttatctatattttatcggtttataaatggtttnaatcggatagtgaatcactcggcatctataatactcctacagtagtataatgagtgagctactactagttgtgtatgggcaccaacaccttgtcattggcactttgcctcctgagtagggcccattgggttctttgatagcctctcctccaaggcccaaaaaattttctgaacccagtgtcaagggtcagggagagctgctcccttgctggccttgagatgtttgcattggttttttccctttccctttctctttggtggtcattaggcctacctgatactacttgtagtgagtgagtgataagttgataacacttctccctgccccaattgtttccttgttcctagtagaagtagaagctggaagctggtctctttgggttttggaaggcttcatctttccattttaggtcctgcaagtgtgctcaacaactcaagcttcactgtcttcttggtttctacctctggtatcagctccttttgttcatctttgtgatgcattgtgttattcaccatgcatcagttcatctggtattttatgaatttatcaaatgagaacagaaaaagaaaagattcttgttttaaaagttggaagatcagttgtatgttagttgcaagattgaatctctttttgttccaatggaacaattctgtgaggatctatttgtggcttgtactgttgattcttttgctactgtgaaggtaaaaactaaaagtggtagtagatgaaaagatcaaaaactttgatttcaagggtacacctagtacaagcctgatttgtcaaaagaacaacaaaaatctcgtgaagaacagtgtgtctgaatgtctgatgcgtgtgtgctgctgctgttcttcttcttcttctcaggttttgattattatcactagtttctgcaattcttggagatttccgaggcgg

SEQ ID NO: 2622 - DNA, 2000 bp, Oryza sativa
  N_region (1923)..(1925): n = any nucleotide
taatggttcaggcttctctcataattgatttttcaacgataaagacaaaagaagttgactacctgtgtagacctttcacctgcacatggaattaatctgtcactgtaaaaaaacctagatttgtttttattccatctggacagagtagaatatgtcacatccaattctaaatttattttttttgatagagagagtatgcaggattctattgtatcatagtcctaggctgggttcgttgttgtgtgttgggaatacatttctagcgcacgaaaaattgagcggtccattagcatgtgattaattcagtattaggtaattttattttcaaaaatggatcaatatgattttttaagcaactttcatatagaaactttttacaaaacacacaccgtttagcagtttgaaaagcatgtgcgcggaatgtgagggaggtgagttggaaagttggagaaagaactcagccctagcgttgttggtcatcctattggacccgctattgatcatcgttttggtaagctgcaacaagcttagctaatcagaggagaccctctccttgggcatatttttacttctactactcaacctatgggtattaggaaccatttccagattcataatttatataaatggactcttgacattaaaataatcaattaaggtatcattagttggatttccaagattaagaatgccacttctatcaaacagataaatttgtctctcgaactatagctttaatttattttcaaggatggtcaataattagatttctactattgcccataaaattgtaggtcctgctcattcagcctctatcataaacaattgttttttggtatgggggaagtcaatcattggctccacaaacagtggtgtgtacatgtggttagggtaagtgctataatgcttcatatgttacccttaaaagtgacacatagaattgggtgatgaggtggagaagagagatgatgagtcactcctaaatcaagaggtagcctccacacaaactccaagaaggatatgggagtattataggtattggtatttgtgtattaggggtgacattgtatatattacctcttaatttatgagtgaataacatagataaatttggaggtagcaatcacatctactatagatcgtgtcactgcaatcagctaaaggaacaaagaatgagaacacacggatcatgatttgtcttggccacttgatgtctcgacctacggagtaacatcctcggccttgagctgaccttgtcagtcctcgtcacatggacactaacgagaataaaaagttaatatggttcactaatagaacatagagccatatacaacacttatactaaatgcaatatccataggtggaacaattatcccttacaacttgatatggattagaggtctatgataaccatgtaccaaaatgatgagaaagattgtaaacaattatcatggtgattgttttcacccatcacatatccttcaaaatttgcagcatatgctgctaaatattccaacatccaactatgttggaattgctagttctgggctatgactctgattgcttatctgtccatacccctttggggcatattgtgattgtgtagattacgtgttatagacaactttgtgtagttgtctaaagaatatgttggttggcaaatcttggttggttggcaaatcttgttcgtttggcgactccgatttttggtaatgccatttatctaagctaagtgtgtaaagactagaaaatctgtcaaaaggttgattttcctttgttagctcacatcctaccaatgaaagcaacacatttaatgcataaacaaagaaaatgtaggatacatttcttcccttccccaaccttaacaaataaagggtgggcaaggctagtatgtcttcattgaatattaccatcattagagannnagcaattttggtatttcgtccacccccgatacaaatgactaaactgaaagattgaaccccactctctctccaatg

SEQ ID NO: 2623 - DNA, 2000 bp, Oryza sativa
  N_region (1674)..(1674): n = any nucleotide
tcgactgttacaccatgcagcaaatgaagctgccgtagacgtcaggcgagctgcaaggcaacaccataccttgtagccaaacaagcctcatatcttagtgcgtgcggttttgttgggcccaactattttggagccgtcgccaattataggtctggaatataaccccctttatttagattttctttcttcccgttaacttaggtgttatagccacgccaaattttggcctatatggaaatgtaattaagtctatagataacatattatgtggagataagaatagtacaccctccagttcttttttaactgacattatagcttaatagcttttgtatgggaaaaatcgacgttttagctcaaggctcagtttcccagcactatccttgcatgcatgcaaacacaatacactcccgaggcaaacatttgttgcttggtttccatctgtgaccaacagctggtactccaggagtaaagatgcatgcatctgctgcttcattttcatcctcgaatgtatttaatatgggtataattgaaaatgtagatcctaattaattactcattggtatttgcaatactgtctaaaacatcaattaaactagaaccggaggggagggagtatatttcttttttctttaattttcaggagttgttttcatactttcaatcaccttaaaactacataagtaatagcctaaacataagttttatctcgctagttctcttcacttacgtaatagttataagtcgtattcttatcttaacttatgtaaccgtcataaactatcacaaatctaaaacatcacaacatattatcattcctcatgaatactactatatttttttcgtcagttataaactttcccatcgtacatggttactatcctccactagtttcatattatatgcaattattcacgaagcatatgtcaaatccgatatatgtttaccaagtcaagcggtaaaactaattctttgtgccccaaccgttccaaggggccgccaattccgcacggccgttcaaaggaggttttgcatggagggaggcgaggcagtccggtaggcaggtaggcgtgtatttgccggaaagcccctgtactctcgctcggagaagagaaaaaaaaaccaaaccccccaacgaaaacgcaagcgaaaaggagaggcgacgcgaggcgaccgatctcgcctttaccttagccaagccagcccagccgcccccacccagcgcaacgagcaggcaggccacgcacacgcactctctctcctcctcctcctctcctcttcttcacctctcctcccctcgcgcggcgcggaagccaaggggaagcaaaggaggcttcgagatttccgcggaacccccaggccaccaccatcctcctcctcctcctcctcttctccccatcctccgcctccacctattacccacatcctagggtttccccctcctcctccgcctcacctcccagtaccccatcctcccaccgccgcagccgcattcgaaggtgtgtatccatcgatccccgcctacccgccaacgactccccttcccgtctcgaggtgcctctggtccggggatcgatccttggttcctcgccgccgccgccgcttggtttcggtggggggtggagctttgtgttgctcggtgatctggaggcgtgattcgccgcgccggggccntggattggttttgttgattggggggagttgggggtttcgatttgggagggagattgaggtggtggtggtggtgtatcgaggggccctggttttctctgctattggattggattgggatccatgatcgagattgctcggtgaagtttttggtcctaggggaattttttttatcggcccggatcaggaatggagggttctcttggggagatctagggttgcttgttctgtatcgtttctgtgtgcagaaaattagttgaaaaaaatcccaaaaaaaatagaaagaggaaaaaaaagagagagggggagagtggaggagagtttggagg

SEQ ID NO: 2624 - DNA, 2000 bp, Oryza sativa
  N_region (1628)..(1628): n = any nucleotide
attttctcgtcaagcaggaaggaaaattattcagagacagtatccgagccatctaaggcctgaaatcgcaccactgtgccgtggtctaagggcgaatatttatggggattaattaaactggcaatggttaacctgcccattccataggcacattacatgagtacttaactctgcaatatccctaatctagtggataattaacataatgcatatgagatccagacagcacatgctctccatctcatcctgccttccctcatttcccctaaatcatttgttgtacagtgttctcacttctcactcagtttgatgagcgtattttttttaagtatgtgaagtcagatacgaatcccaatgggccgacacgttatgaccatgtcgttagtttcagtcaaaaaaaaattactgaagtaaataactaccattagcttcagcttcttactaagtgacatccatatttcaattaacgtatcgacaggttacaaaaccatatgcgtacgtatataccgggaagaacatccaaagttcaaataggatgaggggcacagaatttagttttggatttctgcaatctctgcatgaatgagccaaacgtgttcaaaattgaaaccctgaattgcctgattgggcgagaggaggaggattctcatggtccctctcctgcctgtatgccccagcaaaaacaacgttcaaatccttgtgaatttagctgaacataattaattgcccaaaattgaatgaggcgtcctggactcctggcccctccccccatcctatgcaggttagcacattgaaaccaccctgtccacataggcccccggcacactgtagcgaaacacggcacgtgtcgcggacgatcctaaccgttggattcgtcatcggacggctcagatcgcctcggaaatggattacagtacaatctgtaaatgcagaggatcattgtccttgggttggcacttctgatgtgtgaacagtgaaatatcaagctatggcaatggtagtagcaggttctctagtgatttgtgaacttgtggtagatagtaaaaaaaagggggggttgatgataattggcatcggatcatgtgcaagcaaagctttgcttagggttgttaaaaaggcagatttgacgcaagctgagttgtgccatgtgtgatgcccagtttgctctgctcctgttaaaatatatatgcaatgtggaataagaaattggagcccttaagattaactggtaaccacatgcagctctgactagctaggaacgaaaaaaatatatattcacagtcaaacttatccatcatcagatcatttatgccatgaactcaagaagttcagtaaacttaagcatgacattcagtttatcctaaaaccatacaaggatacatgaaattcagccaaaaaaaagcacataaatttacagcctagaaaaataacccttttttcctccttttttccaatgacagcaacaaaaaggataatacagcgaaagccttcagcatctctccatttgctttcggatcaagcttctctgatcgcttctgcgtcactatttcttctgaaacaatagcaatgcagcgtacaaatttgtgccaaacatctacagttaacgtttccgcctgaatcaccactgnaaagcgcaatcgagaaattctttttggataggatcagatcagcaaattcagaagcagcagcagcagcgtgcacttgaccacgaacaagaaaagaaaattccattccgttacgcgcgcaaaaattaactaatgcccctcccagatcgcgtccgccatggtgcagcagttattgcaggcgacgtagctgcagagtggcaagtaatatattccccctgtatatgcattgcattgcaccgcactgcacgtcccatctacacagttgcaagcaagatcgatcgctcgctcgcacatggcggcgcgagcggatcgccggttgcgagctcgcggtggtctagtggattagtgtggaggaggagaagaggagaggagaga

SEQ ID NO: 2625 - DNA, 2000 bp, Oryza sativa
gaatgaggaggcgattgtctcgtctgttcaagggatccggctcttcatcaagccatcatgacgagtctagcgctcgttcatcagttgatatctcaatggaggacactgaagctccgcgacatctcctgaacgacactgaccttgaccttgtagatgatcgagaaagacaagccaactacatgctgagtaccaggagtatgctcacacgcgagaatactctctggagctgctgaaaaagataggtatggatgttgatattcgtgctatttggaaaactgttggttggtagagatttgcggtggtggtagatgagcctggttctcatttgcttactttgcaatttctgttcactttctcatttccttactttgcaatttagccctggttgtatggtcatgacgggctgtcgtaaggaactcggtagtcaggggtggcttctcgaagtaccaggagagcatcggatagagggtattagctagtatatcatatgactagaatgtatgtatactatgtatactagaagtataggaatagattatctttctcttttctttccacttagtttagatactttgctgtgagaatgaataacttactgcttgtgtgtcactctacccttgaattatcttaacccctgcttagactatgattattacaagtaacatataaattattagtcaagttctctctaccatgatcttcccacgggattaaataaatacgatactcttggaatactctcgggtaaaatgctacaatggtatatccatacgcttgcggatgaactctgtaaccataatataccaagagtatttctacgccattgctgggaagtatatttctagtaatgtcattaagaaataccaacagtatacctcctatcctacgacttatggaatataccgataaggtataccttcacgtacacggatcgttcccgtgaatatcgtttggaatccatcgcaaattatgaaaaatatctctacaagtcaagcgatttccaaagtcctactcggaagggatagagtttctattatgccataccagatcaaatacccttagatctttcttgggggtcaagatgatccacgctataaaagggacccctgggaggggtgaaaagcatccaattatatcgccaacacacccaccatagtttacgaagccggagtacacggagtcaactcgctaggagatctcgtcgaatccatcgactacgatcttgtcggtaccatctatttcgactactctctttgtaagatgttctcatcatcatcaatcccatacaaactggattagggttattacctgacaaggggcttgaaccagtataatccttgtcttttgtctgcttgatgtcgtactacgtataccctcgttgcaacataccccaatactctattcatccggtccgcgagtatcactcgtcgatagtggtgcgccaggcagggggacttggtgctcaaggatctaccggtatgacttcaagagttcctgacagcagtaccaacaccggcgtcgatcaaggagcctctgctcgacattgctgatgtggactcaagtcggatccattgtctttccggtctacaccgttacgctgatctcgattggcccaatcattatcgggaacgagaaaggcatggttatgactccgagaaacgacaccccgctgacaattcctcccactcaagtggagaacggaacatcgacggccccaacacttggaaggaatcctcaagcggccgaattttgtcctctatacaaaagatcagagccgataaggacgaccaccctaaagcagagatcttggtgtcctattcataggacatccaagcacactctcgaggactgcccggtgatactccatgtgaaagctgaactctacgcctgttgggaacgtgggattcagcgcacttcaccgatgggaacacctactacccaattcataaatctacatctcacgatctgacaagctgtaggatatttctcagaccctcaaa

SEQ ID NO: 2626 - DNA, 709 bp, Oryza sativa
  N_region (7)..(7): n = any nucleotide
  N_region (27)..(27): n = any nucleotide
  N_region (34)..(34): n = any nucleotide
  N_region (64)..(64): n = any nucleotide
tttaaanccaaaggtcaaattataatngaattcnccccaaatttaatattaatatataaagctnatataaaattcagctcacgtaagattgcattgaaaaatcccctagtttggactttggactaacacggtagaaaacgatcatgctctttagcttatcagctgcaaccaaaatttaaattttaaatcttaattttgattattttaatcgtagttttttttcaaccattatttttataaatctcgaatcgatataaaagaaaattgaggactgctacaaaacaggatcccgttgcaacgggatagacatattaactattctcttgtacgagtatcacaggtattaggtcctaggtatcacaagtaccgggtaagaggtatcacagatatcaggtaccatgtagctggtaccaaaacaggtatcatactgtcttatagatgatatcctgttacaacatgataccgttgtttgaagaaaattacccacacattatttttctcgcaaatcatcgcttctgaagatcacacaacggaagtccggaacccacgcccaaatcaaaaagaagcggacgccccccaaaaagttcaaaactttccaaaacatcgtgtgcgcggctgcatcgccgcccacccgcctcatcgcattcacaactctcgcctaaaaggctaaaacccttcctccgccggccgaacccgtctggattcgcca

SEQ ID NO: 2627 - DNA, 2000 bp, Oryza sativa
taatgctgttttctaggcctaaatagcttccatctgaagttttttacttttgctataaggagaagaaaataaacacaggacactgattcttaattagaatcagaccaagtttggtaggtgaattcttctagtgtgttggaaggctcgtatgctattattcattattatttttagaactgggccagtagctctatcattccattaaggagaagggacactcatgctagtggtaggacttgaactgggtcgatggcaaggttaaacagcctcccaccaacaggccgctggccttccccaccaaaattgtttgagttatctatggttgttcggtctagaaaatgaattttagcagtactattaacttgtgttatggatacatctgtgaacaggtaccttacaccgccctcacgttttcgtgatgctactggtaaaaagacatcattcacaagtagactaaaggttgaagaatttatcaagacagagtttccagatatggatccgaacacattcttttctatgtttatttggaagatccctgctaaaggacactgtatccaaagaggttaaacctttctgttgccttttatgttcttttagttgctgtttccatgtaagattgtcttttacagtatttcctagcggtgctgtacaaccaccggaccagagactgggctctgacatcagctcactggcagttgtggtgactattggattctgtgcggtttagaatactatagcagaccattacagacgctgtagtgactagcggcttggactacatataataccaggtgcttatttgtagagatattcaccaagtagccagtgccatacaccattcatttcattgtgtgtattgggcgcttcttatgtaggattagaccttctttttggaaaaacattcatttcatataggagactatatttttttgtgacttactatttgattctcttgaagtaattaatatacaacattacttactaaaaatgcctacctgcctgaggacctttctgtgttcctttcctctatctaatagtgaccttctcgtgtaatcaaaatctgatttttgtatggcttacctttttcactgttattttgtataaacttccatattttgaatcttttatgttttaagtagctaacatatcactggaactctaccctatgtatccccgatccacatttttagactttcttttgacacagtctgtgccatcgattccttatcgttataaacactttgattggttttgtactttgatgcaccttcttcaataactttattcagctctaccacttagcatacctcctaactaacaggataatctagtgtagaaatgtgaaaacatcacaggttacctgccatgttacactggaaataaaaatggaaaaagtatacattggaaataataaagtcgataggcaacagtgcttctcagaatgcaatagattctcagtgtactaaccacacttttgatttttcttgtgcctatgcaccatcaatgtcgatatctgttatcatgtgataaatctcctgttacagtgcctctatagtgtagccaataaactatgttctcaatattgtttagccagaatgatatcctatctatttacaaaatacttttgttcatgtgtaatctgggaagtgcttcaagacttggttgttatttttggtggatgcgctttgaacattttaatgtttatcctgtgtataacacacatattttatccataaattagcgacaacgggccctgggctgctcgggcttcagccaggcctggtcctgaaagacccttgtaaccctttatagaaagtaaaatttacaggtatagagggcccataccaggatggtttgtttgcccagcctgggtaaagcccatttctggctccgccactgtatatataggttgttctacacagcttacctcttgcactctctgctcctaaaccctagccgccaatctgatccttgcttctgcctctacctcatcgtggtgc

SEQ ID NO: 2628 - DNA, 2000 bp, Oryza sativa
aactaatcccgtgtccttcaggtttattccccatcgataaaatccttgagaacaatcagaacaacaggacatgtgtaaaatccttcagaagttcaggaattgacacttggaggctacagagcattttcagaaatcagaataactattgccaataatttcaaatttctgccaataagtacaaacgagttccaaaaccagagtcatttgcgcggtagggaacgcgcgtgctgacaacgctgatgtcattgccttccataaattcaaatcccgctttaccgagggaatcctgttacaacttttttttctgattttaattctctgaattctgatgagtctgaatgttttccacttctgaactttgggtcctgacaaggatgaagcaccagaaggctactgacattgttggaaaaaaaaactattttcatcaagcacagtatctcgacatattcttgaaactatttactttttattgagatgctctgtagaaaaaataacatgatcaactatactctgttttttccggtttcactatcttcagaggtaaacaatactctgttttaccccatttctgttaccctgatgtcccttaggtttactcaccatggataaaatacttaagaatatgacatgagtaaaatcatttagaactttaggatagcacttctctgttaaaaaatgacactgaacttctctaaatgatttccatttatgaaatttgggtcctgacaaggttaacacaacggaaggctgctgacaagagaaacctattctcatcgaacacaacatcccaacatattaatgaaactgaattgaacacatggtgcaagatcaaatctatatattcttgatgagatactctgttaaaaatttaaaccaaatgtactctgcttttccccttcagtctgattgtcttctgaagtaaacatgacataggtaaaaatccttcagaagttcatgaattggcacctcgaggctccacatagcattttccaattctgaattttgggtcctgacaagggtataatatcagaaggctaccgacaatgttgagaacataaaagaaaaactatttttatcgtatgtcgacacatattcttgaaactatatattacccttcaatttcattatcttcagaggtaagcaataatctgttttcgtcccattcagttacctcagtctacctaagtttactcaccgtggataaaatccttcagaactttaggatagcacttcagaagttccttatccttttggccgtcagatgtccttgcagtgaaatagctgaaccggcaaattgcctgcatatgcttccctctatatttcaaaaaagtttctgaactgctctgaatactgatgaccctgaatgatttccatctgtgaaattagggtccggacaagggtaaaacaccggaaggctgctcacaatgctgagagcaagaaacttattctcatcatacacaacatctcaacatatttttgaactaaatgaagtgcctctcatcatcaaatctatatgttcttcagacataccctgtaaacggaaaaaaccatcaactatactatctgcttttcccccttcagtttgaatgccgtcagaaatcagaagcaaacagaatatgggtaaaaatccttccgaagttcatgaattggcacctcgaggctgcacatttcattttcaaaatcaccacgactccacgagcaacaagaatacatagcatcagttatagttcaaatttctggtcgaatttggaaactaatccaatcaagttccaaaatctaagtcccatttcgttaaaccctcaaccgttgctccgaagctcgcgcggggcacgcgtgcagacaacgctgtgtcgcgctgacgtcatcgcctctataaattcaaatcccgcattgctgagacgatccacacgcacacttccctcgtctcctctcagcctctcacccacgcgccctcgcttcctttcctcctaaaccctagaaatcctcaggcgatcggatgg

SEQ ID NO: 2629 - DNA, 2000 bp, Oryza sativa
tctcaagatgagggaggtgaaatgacaaatgagaagctattaatgcatgaatgttccccaactgatgatgattttgagagatgtcagattcccactgattctgacattgaaagacttagagaggaagaagataatgaagaggacaatttccaagaggtgtctaacaaaaagaagaacagggctaagaaaacagaacttgcagtgacttcaaggatgaatctaagacaaagggagatggctgctaacccaataaccaaaagaactaagatactcacctagaagaagaacttggagcattaagctacaacaactaattaatccatttgctatatttcagttgttagattcgattgagttgaataatattactattgcctctaacttaaacttaggtagtacctctaaagagagaaaataatatagagactctaaaagcaaggaaattgttcaggctagactaggaaagctaaactggaaaaaagagatttaaaagacaaagacacaagaggaggtggtggagtcagagacagaagggtgagatgataacaagcaagaggaagaaaaagaggagataattatatgagaaatattgtaaaattgcatttttagatcagttatgctgatttaatgtatcacaataggagaaaaacaccttggtaggtctccgctgctgacatggttgttgtcagggttatggataccacataactaatagtagttgactaaatctcagcaggacccaccacataccatgtcctatacggaaacaacctgcggatataggaggagttccagataaggaaagaccaaccagagttctatatggaaacgacaaagactactcggattgtatccatattggtttccctaattctacttgaacaaggggacacctatgggtataaatacaaggccccctaggaggagaggggagacgacgatacacacccacaatcaacagacacgggtaacatagacgtcacaaagctgtgagccaatacaagccaacatacgccaagacaagacgccggatatcgacttcagggattggcacggctagtcccctacggtgtctccggatactatcaggagagacgaaagcgctatctctgatctcgccgggcacgaactcgaggaggaagactaccctgttgtcgactacgagtcagatcttcagaccgccatgtcgacaacagttagataggctaccccaaacattgtactggtgtgattatggtgaataagagcaataccggctttggccaacaggatgtagggttattacctggcaattcaggggcccgaacctgtataaaaacccctgtctccgtctcttttacctcagtctcgcgtatatcctagtaccaacgatccccatactatgcaaataccggaatcgcgacatcaaacgtcgatagttgtcaatggtggtaaaaatttaataagtagtcccctctgaaactcatcatggtaacatatttgcatttagctcctctgctgtttatctctaacctaactcctctctactccatttattatcctctttggactcagagaagggaaagtggtagcgacataagagcatctctaacagcctctccattatactttccaagccaaaatttagccattcatgccaaaaaaaaacatgctccaacagcctctccaatccactagccaaatttggcaagccaaaagccactagccaaccatgggcccctcgcacattcctcctcccatctcctctccggctcctctctcgctaacgtcctgccatcaacgacgccacaaaggagagaggcgtcgtcgccagccgcgaccaccaccgtcctccacgaccgccgttgtcccccgcgccgtcggccgccgccatcctccgtgaccgccgctgtcctccgcgccgtccttcgtgaccgtcgccctcctgacgtcgcccaccgtgacctctgccacgaccaccgccgtccgaggtagagggcgtggggaggaggcagcagtac

SEQ ID NO: 2630 - DNA, 2000 bp, Oryza sativa
tgcggtggcgacggcggcgatcttgcggggcgggaggccgaggtcggagaggaaggcgaggacggcgtcgggcttggagggggacctgaggtgggagagcttcttcgaggccttgcgcgcttgggctccggtgaggccccaggtggcgacgaggtagtcctcgacggcgaagggttcgggggagacgggcgcggcggtggtggagaagaggaggaggcggcggagggaggagaggggagagattgcggcggtgggatgaggatacgctggccggaggaggagagaaatcatatgcctccggaggtggtggaccatggcggcggcggcgcaatggtttgccggcggcggcgcaagggtttgcccgcggccgcgtgaaatcgcaatgtttacgtgcagtaacgttggtgggccatgtttaacggcccatttgaaatggacgaaggccttattttcggctgtgtatgttcgcgtggggaaagtccgctttacgttcccgaaggttttagagcgtcatctaactcgtatagctaggataaaattaagtttctcggtcgttctcactctgtcttaaataaaaagaatttttaaagagatataatatattttagtactatgtgttttaaaatataagagaccctccaaaatttgtaggacggagggagtgtttaagttggttttgacttgtatatcgcctacattacttgttgccttatttttcatcctatatccatatggctcctacacgatgtagaggcaaaataataagtaaataaaataaaaacacccgtggaaattaagtcactaagaatcttgttagaaaaatataaaacaatattatgcattattctaagcactaagattttaaatcatagtactcacaaatactatgcacgcgcgaataggctttcaataaaattttagtggtagatgcgtgtcactgatctctgtctctttgggcatgtcatccatgtaataaaaaaaaccttaaattcagcggttcaacttgggtgtgcaaatatatgcatgagtgtggtgtgtacatatgcatcatccgtgtaatcggaaaaaaaaggcaagagatgagaaagaaactagagcaatataaaattgcgtgtttttgcgtacgcgttaattagaaaagagaaaattttacaaaaactcaggtttttgggtatctataatgcaaaaccccaggttttacaaattgtttcataaaatcctaagttttgggtaaagtgtttcataaaaccccatctaaaagcttatattgtctatccaactaacatatttatctataacaattgtaaaaatggtatgagatatttttttttaagttcatgtacacgtgagagcattaccaagaaatccctacagctactcccaatttcaaacttttgggttttttctaagataaaaaatggatccaacagatatcaaaactatagctctgaaaaaatttgagaccctaattccgtgctttcaacagtagttgatgattatagtatgattttttttacatttaatcaattattgagttaggattatattgagtttctagtgcactaaaaagtaagaaaaaaattaagctagacgagagaaatgtgtgctttgagtcgactaatgtgaatttatgaaaaataatcatatgtaacaatgaaataggagtatttcatataaatacgaggtttttctgaaatattttgttctaaaataatgcgttcttggaaacaaaactcgtcagaaaaaattgcctttggtccaagaaaaaaaaaaggaagaaatactcgtatgcattttgttgcgccatagccgctagtccccggctccccggcccttcccacccctatccccggccgccgccactccctccccggccatcgccgtcgccgtcgccgtcgccgctgcagccgccagccatgctccacctccagaaacacctcctcctcctctccctccctccccggcggccaccgcctccaccctcctctccctccgccacc

SEQ ID NO: 2631 - DNA, 2000 bp, Oryza sativa
  N_region (31)..(31): n = any nucleotide
  N_region (34)..(34): n = any nucleotide
  N_region (65)..(65): n = any nucleotide
  N_region (91)..(91): n = any nucleotide
  N_region (110)..(110): n = any nucleotide
  N_region (114)..(114): n = any nucleotide
  N_region (338)..(338): n = any nucleotide
  N_region (693)..(693): n = any nucleotide
  N_region (698)..(698): n = any nucleotide
aaaaagggaaaaataccgaaacgaatccgantanatcgacgcggtaaaaagagtttaaaaaaatnaaaagaaaactgtcctattccaaagnaaaatgaattatatgtatntggngagaaaaaaaaaagaaaagtccgataaaaaaacctgggcggaaaaaaaccgggtggaaaaaaaacaaatctgtccgacaaaaaagaaagcaaaaaaaggaaaaaaatcgaaacgaatccgactacatcgacgcggtaaaaagagtttaaaaaaataaaaagaaaactgtcctattccaaagaaaaaggaattatatatatcgtggtaaaaaaatcgaccagcgngaaaaaagatagtccgatccgaaaaaaacaggagaaaaaaaaatgggcgaaaaaaaaatttgtccgataaaagaaaaggaaaaagctgaaaagaatctgactccatcgacgcggtaaaaaaaggcgaaaaaaaactttccgataaagaaaaaggaattatatgtgatgcggtataaaaaaaccaggcgaaaaaaaagataaaagtccgataaaaaaacggggcgaaaaaaaaaaaaatctgtcctatccaaaaaaagccaaaaaggggaaaaatcaaaacgaatccgactccgtcgacgtggtgaaaacagggcgaaaaaattccaaagtaaagggagaaaaaaatcaaaacgancgacnccgtcgacgcggtaaaaaaagggcgaaaaaaatccaaagtaaaaggaattatatgtcacgcggtaaaaaaaatcgatcgggcgaaataaaccgggcaaaaaaaaatctgtccgatccaaaaaaaggggaaaaaatcaaaacgattccgactccgttgacgcgataaaaaagggcgaaaaaattgtctgtttctaaagaaaaaggaattatacgtgatgcggtaaaaaaaatcgaatcctattatatctagaaaggtttgacactatgtgaaagtggtgaaaaaaacccttcgtaaaagaaatgcacgagaaaaaaaattaaaaggacggaaaaaagcgcggaggaaaaaagtcaaatttatattcgtcgttttttagtccatttatatatcttctttatctctaatctaatctaatctaactataaaaagagaagtttctacagtatattaaaaaaggaaaaaatgcgcgagaaaataaaaacggtttaaaaaaacacgtgagggaaaaatgtcagaaaaaagcacaaaagaaaacgcgctagaaaataaagtttcgtagttctaattttctgattgttatcgacatggttatgcatgaaaaacgtatattatcattacgttttttcacccgttgcaacgcacgggcatatttgctagtatagtactaatgtataaattaaataaaaaagaaaaaaaagaagaagacaaaaacactcgattgggctacgtatccagcccaaattggatttgcacatgcgagagagagaaaacagcccgagttcatgaaggagacctccatgcagtcacaaaggagacccatgtgaagcatctcaaattgcaaataaataaataaagcaacgccgcaaaatcatcagatggtaaaagaatattttacttaatggaaaaggggggagcaatgctctcctagttcaaaaaaaaaagagaatattttacttccctgaattatttcactagatcatttaactccctaaataatttctcggttcattttacacctcgagcggtatttttcttatttctctctctatatgtcgtaatttgcaatgaaatttggtattatcaattttttatctagtctttctcacaaaatgtcttttctttctcagatttatagaaacattaaaagataactgattgagcaataatttaccatatttcatgataggtaattctgtgataatgcgatcaatatctggatggtaacttatctcaatctcagtaaatatataattcgtctcgaaagccttccacgagagctggatcgctcgagcagctcgagc

SEQ ID NO: 2632 - DNA, 2000 bp, Oryza sativa
actagtatcatatttatgtgtaatatagttaacaaaatgttaaccttatgtgtaatatagttaactacagaaaaataatatatggtgtggattaattgttatttttgtgtttgcaggccggtcccagtgaaaagagattaaagaggattaaattgtttgcaggtcaacgttttattagttcagtgcaatcattccctgattgtcatatttagtcataaattgattgtacatttgtacaaatcgttgaagtagttctatttagatttataggttgcattactatttgaaaatgtgtggcactttatctaagggcctgttcagatttgatgcaattttcaaccataccatttttgggcatagttgccaaaaatgtggctatgtttagtttgttgccaaattttagtaaatacataagaaatcctgtcaaaattttggcaatattgccaacttaccaaaattttggtattgctaaccaaaatttgcaaggtttattttggctacaatctgaacaggtcctaaaagttgatatattcagtactaagtttactattatgttgtttttttgttaggactacaagagaatacatttgtgtatttgacgaaaacccgagttttgtggtccatcaagatctcactattttctttccgaattgtcaatgcatgtgtcactgcaagctgtttggtcgtctatatatgatcaaaagatttatgttgtgtttaatattggattgtaagattttcttatgccatgtatatgtacactttacaactataaatgccttcaacatgcatctcagctcatttggattatactatgcatgtccacacgcagcggagcgcgtgtctcttgctagtatagtatgaagacagactgaggacaacacagccatttgtcatgtatttgtaataaaacaaaaaaaagttctaaatataattgaatctgtgatactttttaaagttaaaattaaggcctaaaagagctttcaagtagagttaaaacatgtggtgtccatcctatgatgtgtgaaacagctattatattagttgcatagttaacacagttatagtaagttgttcaaacacatctcctttttgtcttgacatggtgtgataatatgagtacttaattaaagtaactatagagtcctgtgatggaacttcaatggaaatccctcaagaagacttagtttagatgaccttttttcactagtacagaactccttaactctaacggcttttgccgtgtcgggatcttgcgtgccgtcacagcatcgtcatctcaaacgggccaaaataaacaccgtcaaagatatagtcgtacagacgtaatacatacgcatgcatctaaagcccgtcaccgatgattcctatcggtgacgggcttatgtttaggcccgattgagattatctttgtaatctttgtcagcccctaaacgtatgcctgtcaccaataaatctcaccagtgacgggcactaaactaggcctgattgagataaaattaaggtatcgatgacgggcttagtataaatctcactgatgtttgtcatcggtgacgggctcagtattacacccgattgagataaatgagtgctcgtcatcaatgtccgttcagtgaccgttactaatatttattgcacactataaatacttcacccctcctccccaagggaatggttattccactgttcactattttggtgggagattgagggggcgatttttgtctcttttttccaagaaaaaagaaaattcataaaagtaagtgaaaaatactaatcaattccaattaatttagtaatacttatcttacaaaatgtttatctaatattttgttcacttttgcagcgatggatcgaagttggatgtatagaagaactgtgcgacgtcatagcaaatagtatagaaattgagtattaaattttataaacaccgcggaggaggataggaaaagaagaaacaagattacatatgttgtcaatgtgcatattgcaaaaatgag

SEQ ID NO: 2633 - DNA, 2000 bp, Oryza sativa
ttttttttataatccacccttagtgttggatgtacttcctccgtctcaaaatataagaacttaggaccggatgtgacgtctcctagtgcaacgtatctggacagattcctcgtttagatatattgtactaggaaacatcccatttgattccatattcttatattttggaatagaggtagtatgcaccaaaaccacatcaatattatcaatattgtaagatgcacaagtataaataaaaggaaaaagtccatatacccttaaactatggaaagaagttcgtctagcaccttaagtttaaaaactggatatccaaccccgtaaactttgtaatgcttgttatattacaccataagttaattttgaatagtgtttttttttgtgtatttgctagcttaaatgaacgattttgaatattatagcatgtttacgtattgtcaatcatcgattaccaatttatacagtgataccatactacattcctatgtgaatgcgagaaaaaaaataatggtagaatgaaagacttaggtggagattttaacatatatatccaatgcatatgtcacatagttaaactcttccaacgtatatgtaaattagaataaaatcattttacaaaaacatattaagttttaatatgaaatggtgttgtataatttgcaagttgaatatatgattttaaagtttagggtgctagataaaccttgaatcaaactttgaagggttatttatataaaaaaatatggtagtatttttaacccaaaacaaacatattatcaaaatatattcaatattagattctaatattttcgatgttgctgaatttttctaaaaaggttaaacttaacagaatttgactagaaaaaaatcaaacggctattaataatagcgaagtgagtaatattttttttcatatggtacaacgaagttaatatattttttcctaacaaaaaatagtacattacaactattctaatgaaatagttgacgttatgatacctaggtacagggtatgatgtctggtaccctaacactaaatctgatacatacgataccataggtatgtcagcatgatatatatgtactttaggtactaaagagtatcatgtctcataccatagtaccagatccatgaactatatatggtaccacacgtatcaaatctagtaccacctacaataccgtgctaacgttagcacataattactctgttctataatgtactccctccggttctataataattgacgttttggacaaggttgagatcaaacttttataactttgaccattaataacttcaaaagtatttagttttaaaaaactagaacaaatgaatctttgtggaagaagaagcggttcgccagccgctacattcagggaaacatatatagatttgtctttcaaaacactataataaaagttaacatgcatttatttattgtgtatattataatagaaaaataaggtcaaaggtatattttgtagaccgtgtcattgtccaaaacgtcaattaaaatgaaattggagggagtaagtatttttagttgtgtagaaatattaagaaagtagataaaagtgattagagaatgttgattagagaatgtttgtgattggcggagaagaaaaaatagatgaagaaattggttttgattgtttgagagaagtgggtagataaagaataaaacttaattttggaacaagctagtgagctaaaaatagctagtacattgtaaaacagaggtagttcaaactattccgttggaacggcgtaacaacaattaacccaattttcctagtagtaataaatataaatataaaaccaattcagagaaattcagggaagaaaacgcgtcggctctcgaaccttcttgcattgtgtcgtcgaaggcggttggaccattcggcggccgcaccctcgatccaaaatccccaattcgccttccacgaaaccctaaccctagttctccgtctccggcgggctctaccggcggcgaggcaag

SEQ ID NO: 2634 - DNA, 2000 bp, Oryza sativa
  N_region (544)..(544): n = any nucleotide
  N_region (548)..(548): n = any nucleotide
  N_region (567)..(567): n = any nucleotide
  N_region (570)..(570): n = any nucleotide
  N_region (574)..(574): n = any nucleotide
  N_region (576)..(576): n = any nucleotide
  N_region (579)..(579): n = any nucleotide
  N_region (594)..(594): n = any nucleotide
  N_region (596)..(596): n = any nucleotide
agccacactagcatcacatgattcaaaatagacacttgagatacatcctaacactgtagcaacttactatgaaaatgtattgtttcgattttaatgtggtgaatcggttttggccgttaaatctttagattgtgtacaattgctgttgtgcagttttacctcaatcccttgaatacatcgaagtcacacatgcattcaggtggtgtttgaaaatgataaagatgaaaattaaagtgacacacataaaaagagaaatattagcacataattaattattataaacttaaaaagtgaatatatttgatattctaaaacaacttttatatagaaagttttttatgaatagcttgaaaaacgtgctagtaggaatcgaaataaaatgatttgctctagaaaattcatggaaatgctgtctttctctcactctctctctctctctctctctctgaattctgaatcgatggttgctgacctgaaattcagaatccgacgagacagtcagccaggccattttgtactgtactacatgaatgacacctttatnaacnccaacatgttgacacgaanaanggtntnaanaattcgagaatgcanangcctacaagctcaatcgaagtactgtagaacatcactgcaccactccatgctttgttttttttttcctctcctcattgttcttggggaatgagctatgtcaccatttcaaattcaaaatgtttaatttagaaagatttcgatttcgaaattacttagtagtgctaaactgctaatcactgattaactgagccaatgatcagagcctgtttgaagtaatctacacagatcgcgcgtatcgtccgtatcatctcgtaactcgcggtcactcactggttggaactagaaatgcgttcctaattaaccacacctttgtactattaacttgcactaatactagtaactctgtactagtactagtgattagtagcatttagcacgagaggtagccatggaaagaagagaagcatgcagctaacgcaaggcacaaaagcaaaagaacaccaccctaatcagcactaacgcgatcgctaaagccgattttttctcacagaaaagaagctgaagttgagtgagtgataatactgcactaaagccagggacatcagatgcaatgatagggagagagcacacaactcgttctgcattacatgcaaacaagaggcagatcatacggctaatggtagggcccaccataatagtatgattaatccggttcatacttcattaacccctttatatggtttaagttgtgcaaaactattaaagttaagcaagataagagaatcttaactgacatggctaaattttttttaataaaaagaatcttaatttcaagatttgatttgattttaagtatggtgaaataaagaacaattgattttacggcatgattttttaaagatatatgatcatggcatccggaatatcgtgttatgtgctaaaacgcctgtaatcacaatacatataaagttacaagatactccttccatcctatttttgatcatcacctaaacacagagactgaaacaaccaaatttccatcattctataattaattctcattagttaagatggtatgttgcttcgtgtctcgtgaatagtaccaagttttaaatattgcatgtagttgcatcaataaaaattaatcttgattggttgcatgcagcatattcaatgatgctcatttactctttacacaaacaaataaagagacatttgttataggatgattattttgaaaagacctcgaaaatcttaggtgatgattaaataaggataaagaaagtatttatactttgtaattaagcctcatttgatgccatgacactgtccaagtgtccatttttgctctaagcccattaatccaccatgattaagcggctaatataagtagcaagacgcagccaccgtctcctgccctcttgtctcagcttcagctccggagccacgagctctcaccttgg

SEQ ID NO: 2635 - DNA, 2000 bp, Oryza sativa
gccatgccttcccgtactctgttatccgctgatctggcaacctgacatacattcatgctagtatttcacagtaactatgcaagcgtaaaaatggaagttacattggatacaactgttagctgatcagcactcagcagtagcaggaaaagtacgtacagtgcctgtggaattcgctaacaatactgcgtaaggtgaaggtttgcagtcacacatgcatttttgacgattctgaccaaattcacacttcatcagaagtggagcactcaagctaacccatgcgtgtacatgcacccatggttcactgatgacagccatgaggataaatgtggcatgcgttaaaactgaaaactggaatataagtgaaggaaacaggagagtacaaactcacttttgctagtaattgggcttgaccttttgtgccatatccaggcccgctatggccttcacatacttgcgcaatcttacacttggagtatgtctatttcacctcccttgtgctcttgccctcggtcaaatcgcatccctcaaccgtaaaaccgggtatcgtttttgagggtggtttttttgacgtggtagcctagtcattgaaaaaaaataaaaaaaaatatatacattgggtctacatgttggtgactaattttattcttccttctctaccactcccttctctcctctccaccctctctccacgggcgaggttgatgatctacacgatgaattcatatggtcctcctaaacaactccattgtgtggtacccaaaagccgtcaagctttgcttccacggtcacaccgtctttctcaagtgcttccaccactggtcacgtggcaggtccttccacgacatgaagcctaatctcaccgagtgtcgcatgtggagttcggagatggcggtggccacaataatggaggtgggcttaatagatgcctcgtgtgtggaggaggcagcgtatcaaagttatataggccttataatccaatcaagtttaagaagagtaatgtaatgtaagatacaaatggatcaacgaataatgtttgataagaacaaggatctatttgattgggcttaaccttgggcttcactttttccgaagacacgaattaagtttgataaggataaggttgtgtttgattggactccaacttcacttttttttctaaggctaaagtctaaaataaaaatgggttagagtgatcctaaaaaagaactagagagacggtgtggatgctccataattctgctccaaactccactttcagtagttatatttagaagtaaaagcccttctaaacatgtactaaatacactgagtaagagcacaaggtatgaagatgcacaaggatgagcaacttagttggtagcacaaggtgcattctttcaccaaagaaaagtcttgttcatccccataaatttcagttggtgatgtatttgcaaattggaattctctatgcaacctcgcaagaatggacaacatcacgggcctgttcattttgatgccattttcaaccttaccaaattttggtaaagttgccaaaaaaaaagtggctatatttagtttgctgccaaattttggtaactatataagaaatcctaccaaaattttgacatagttgtcaaaattttgataggcaatgctaaaatttggtaaggttttttttggcatcaaagtgaacaggccccacaacagcatacaaggaaaagtaacggcacatccttttcttgattcttgtccttgctcccaagtcatcagtttccaaagtaaagatcacaccagcacgttggcgatggcgacatcctcaaaaagaaaaaaggaaaaaaagagaagagaaggtcaagattttactagcacgtagaaaaaggaaataaaaactgaaaaggaaaggaaaacgagaggaagggtctctgtccagtccagtccacttccggcccatttactacggagtagtatacaagtctactaccacgccgtcgccggaggccggcctcattcggcaaccaacc

SEQ ID NO: 2636 - DNA, 2000 bp, Oryza sativa
cttgatgctgtgttggccactgatgggttcaaacatctggaggcgagctgtccctcggtgttgactgaccttgtcaaggttgcccgtggaagaaagaattaaaatgcaggtacgtgcgtatcagagatgtcatagctgaactgttctattgtgaaattttctctaggatttggcaatgcatcatctctgtttgtgctagaagttttgattgattcttcccagtcatggagtagtgcatactttgtacaagcccattatttgtcactactcactagtactagctagtattaccttggtcattcttgtatttttctcacgtgttagtacaatactactactgcactgcagaaatatgcttctgcgtttcaagcctttcaggctatgagaacatgcctgttgccactagtaatcagtacgtttatttttcagaaacatttctttaagcaggagaacctgttttttttttttcagaatcatcactagcttcgctctgttcttaatatttatttatgggccatttggcatctgagcaaaaattttcctattgtgcaggtaataagcagagaagatttcaagttgctcctggatgctggcgatgagctgctgcggacttgctgagagcaaacaaatcttcaatttgcttatatgtttgctctatccttttcttttgtgattttgccattggatctgttgtgtgatgcccatgatcatacggttctcttctgcagtgggcaattcgtagtaattagacgcaaccctgtctaatccctctgctactctgtctgtgtagggcctttcatttcagtttaatctgtaattgaaacgggtatatcccggttcagaaaaacatattggagtagttctcgccttcaaagaatcaaatccctctggggaaaatagattgacatttaggaatggagaggcacaatgcagtgatcagttttcaggctcattgccggtcagttttggcagggagatctgaaacaatgataaaccttggttctgaaaattttgtgctaaaacttgttttgttgcaaaacctgattttgcacagttgaactgctgactcaggatcaaatttattccatttctcatttctcataaagaaatttgctcttcaatgtacgatggagtttattttcctttgaacctgcataataatataccggtacgtgttaatgacagcagattggacacagcaggtcttgaactcttgatgaacgaaacatccccggcccaaccgaggatcacgcggcccacatcaaggattcggccgacgcgatgtccacgtcatcgctggctgccacgacagtatggattggacaagctcaaattttatttttcaatgttcaatggaggtttttttttcttttttcagaaaacctagacaacggtatcctgttggaacgggatactcttctataagacatacctgttgtggtaccagctacatagtacccgataactgtgatacctgttacccaacacctgtaatacctaggatctgatacctatgatactcgtgcaagagaataattaatatgtctatcctgttgcaacgggatcccgtagcagccctctccttttttgggctcagaacctccacagatacctgtccgtttgtagaatcccataagaattcgtcgacactgcggcggtgcaatatcattgcaaatctccggctcgtctaaaagttcagttcatcaaggggacaaattaaaaggagaaaaaacgaaaaattagttggatgttcattgaaatttttagggattgatggtttagcccttgttgtttaccttgtttccgaaacatttgtatatttctggtttgcttttgcgaactatacctgttattaattgtagatggtgggtactaaaacagactcctgtaacaagttatgtctctttgtaaatctagtgataaaacgtttcgatttgaaatccacgaagggatatatatatagccggtagttaacgctcgatcgacgcctgagcccagag

SEQ ID NO: 2637 - DNA, 1649 bp, Oryza sativa
acaggtttaggccgctcagaatcgtagtacctactcctgtgtttgggactatgtgtgtttgtgttacaaaaggttccttacatcgagattagctagggttctatttgagctaggttcttttaaaaaatcccccttttctcagtagccggactcatccttttatatcctaagtagagccgacgagtacattcttgcatgggaaagcgactatacttggtcttcttaaccttgtcccatctgttacattagtctgaacataatcattgctactgatcaggcctacgcttgtgccctagaaggacttagtaggggcccgagacaactagagaagactcctagcgccacatgttctgaaactgggctcagtgggcccaaatgagaacaccgtagatttgccacccgccttatttcttcacggcgaagtcatgaactgctcaccagcgctcaacgcatcatcctgctactatttcttcgggtgacgcaggtagcttgattacttgcatgtcatttgagctgtaattctcactgcgccgctctgctatgacttaatgccactacttcttgtcccatcgctgggctcactaccctgcatagaccatcggacgaatccaattgacatgcattgccagccacacctagtaattacatgcctaagcccttctttcgaactgtattagtgtcccgaactgctacatcctcgggactaatcttcttctgggcacgattcacgcccggggcatggtccgtggccgaggcccttaggtactcccgaggtcccgtgcgctcccacactgcttgataagaactcttgttaactttgacaagcttctcgaagatattgatgaaggagtgatggacataaccttggaggatatgctaacatccgaaggtatccactttagtaccttgaatatacagatcttgtaggtttccacactcttcttgataccttgtagatatagatcatttatgtctgggcactcttcttgaggctttccaaatgaaaacctttaaaagcatcggtgccccaaccccgtttggatacgggccttggttctcattcatctccaattgtcatcttccacttccagggtttctgacgtgacaatgaattatatatgtggtaggaagtgattttgtgggcccccggtatcccagggccccggaggaatggggaccccagttcctgtttctccaacagttgcccctagcctcggaattaggatggaaaattgtttgtcgctgggtgcgggccttttcttcaaagccatcgatcgagtcagccttgcaggtcccacctgttagcgaggatgtaacaaggccaagtcccatcggtctcatcttctgtcagggacggttttccaagctttaggccacgatcatacatggccataacttcctactgctaccccatgtttcgaggtgttgctggtgcaaaaactaagcggcgcggtgagggcctaaaaaccctacttcccacagcgattcattttccgcttccttattttcatgtctctcgccattgccccccatctgtgaaatatccatcaccaacctccgccctcaagttccctgcattcactgccacctttcttctccacaccatcgctgccacaagcccttggcagagagcgcacttcccccatctc

SEQ ID NO: 2638 - DNA, 1390 bp, Oryza sativa
  N_region (5)..(5): n = any nucleotide
  N_region (12)..(12): n = any nucleotide
  N_region (26)..(26): n = any nucleotide
  N_region (28)..(28): n = any nucleotide
ggggnggggggnaaaagggggttttngngggggggtgttgagaatgacatgtggggcccatgtgggccacatcattttaattattttttttaactgacatgtgggatcatagttgtattattttccaaatcaaattaccacgtcaatgccacatcagatgaagaccgagtatatttagccacgtcagctaaaaccgccgtccaaactgccatgggacttatattgcactgattttgacagttgagggacgaaaatcggactcgttcataagttaagggacctcagatgaactttttccattcagtcttggggagtctaggggattatcggagtatatgggcctgtgaggtcacgtgctctggtgggcttttttctttttcaaaatgggcctgcgtaaggtttattgatttcatttcggccttttactaatttatgcccaacccaaaactttgtatgggtttcttttagatataagttcagttcaggtcccttagtttgtctatgaattcgattttcatctttgaacccaaaaaatagatatgatgggcccctcaactattaaaaccggtgcaacattagtctgaaggcactatagatggttgttttgtcctatgtcgcacttggactatggtcagcctacatggagcgccacataagcggtcaactctggtcaaacgcactttagaccaactatggttcactaaaacaagatcatcgatcttaatacgtaattgataagtctacggacctatatgatacatatgctcaagtttaagtatcgaccatgtattttactcttaaaattatttccataatcatgcaccagttaggaaaagcttcaacaagcaagcaagccgaacgtatatgcgccgtattttggacaggggagtcaaatcaaccacatcaccatgcatatttctacatatacactggtcattttttttgggtacatcggaaatcattttcaccggatttagcccagacaaccagtatcccaatgagtgattaattacttgtattatactcattgttgccttgttggctctttgaggtcagaaagggacaattgaaaggcctcgattgaacaaacgttaggacatgatgcgcttctatataaattcaaggaacaaaaaagcaagctaattaaggttttgtgttctgcataattaatccattaagtatagtgagatctgaggtgaggagaggattaattaagacaaaatctagccaaacttgtgtgaatctccctctaatccatatgcatgatcccccccctcttgctttgcaaatactgtgagcttaattaattccatgtctctctctaattctgcttttgatgttgcaagttgcaagaagcttcacctctcctagggtttatacaagcagcggc

SEQ ID NO: 2639 - DNA, 2000 bp, Oryza sativa
  N_region (1100)..(1100): n = any nucleotide
  N_region (1103)..(1103): n = any nucleotide
  N_region (1107)..(1107): n = any nucleotide
  N_region (1109)..(1109): n = any nucleotide
  N_region (1117)..(1117): n = any nucleotide
  N_region (1120)..(1120): n = any nucleotide
  N_region (1127)..(1127): n = any nucleotide
  N_region (1186)..(1186): n = any nucleotide
gacaaacaatggcatcaactgcccaactaaatcgccaatttcggtgagatttggtacaaatttgctttggtgagaaaaaaaaacaggaaacaaatttcaaagcagttgctagaaaaaaaatcaccagaaaaacggcatgtttttggctcaaattgatcatcaagcgaaaaaaatttgattcaagcatacaacaaagcaaatctagagtggatactagaaaaattcttaaacctgctcgattccacaagtttctaacggcgattttagccaagcaaaagcgaagaactcacgacactccactagtccacttctccagacgagactgctgctctgtagcgtggagcccccacttggggccaatttatagcggaagcagcggactctggagccaccccttgccgtccgatcctaccaacggcgtcgtacgagccgtcggatcggcagcggaggggtgacaggtgccacgagatatttctttgctaagctcacgcgagaatgcacctggaaaaatgtcacgccggattgcatgcctgggcttgatcagtttggcttggtttacttttgcggtagcgtagcggtggaaagcgagtgcaaaacgaaattagaggacaataatgacaaaaggagtagatggattttttaaaagtcttttgctcgtgtgtgccatacggttcctacaggtcgcaaggcatgacataaaaatggggtggagaaatgctcaattcatggtagaaaaggtacaaaactccgctagcattttcgtcatgccatcatcattcttgttgttgcgaagaaaataactgtgattacgtgaaatcctgatctaatcggaatatcaagacgaaacgaagaaaaaatgcagtgagctacatccacattttcaggcttctttttagaaaaaaatggtcacgccttgtggtcatcttcgtcgcttggtgtttccacaaggaaaatagtgtgacattaccatgtggggagcgtatcctatgcacacaggccctcacgtgtacacaccgtgtacaccaactaaaaattatcacaaaaaattctagaaaaatttatacatgtactttcaatagtattacatctacgtgcaaaancgnatcntnaaattcantcnacctttncaaaaacaaaaaagataaaattatgacaaaattgtaaccttaaaactgttagatttttngtttttttttgttacggctaaaatataatgaatttgacgttaagattttaaccctaggtgtaatacaattgaaagtatatgtatgattttttctagattttttggtgacattttttagttggtgtgcacgtgtgtacacgtgagggcttgtgtgcataggatatgttgcctaccatgtgagctcagagtcaggaatggttgttggcgtgttgctatgatcacacaaagttctaggcaagctaagaactacaactcgcaaggctagttggttagtacttgttcatgtgttactttcaactctggtaggcatttctcctatcaaatgtttcaatagctttgtgttataatcactacttcctccgtcccaaaatatagctacctagtacaggatgtgacattacctattactactaatttggaatgtactaggctgtctcgattcgtagtactaggtaatatcacattctatactaggtagctacattttaggacggaggtagtattagcttagagcgtagacaaagcattaaattgatgtggatattgagcaggaaaattgagtatgcgggtaatgttcattagaaacttaggatgtgttcgcacgagcctgttcccaaccagaacagcgcgcacggaaaacggaacagtccattagcacgtgattaattaagtattagataattattttttaaaaaatagatcaataagattttttaagcaactttcgtatagaaactttttttttttgtaaaaaacacattgtttagcagtttgaaaaatgtgcacacagaaaacgatgggaatgagttgggaa

SEQ ID NO: 2640 - DNA, 2000 bp, Oryza sativa
ataaacatatttgttccacatatgatatttgattagggatcctttagaaatagtaacaaacaacatatagagtctcatgaaagaataatatattcattaaccaataatgagttatctatttcaaggaacaatgtcggataaatatgtaaacatagtatgtgatacaatcatctctatgattgcctctagggcatatcactaacaaaagccgtcactcgcccttcaccaccggatttggttctttggtgccaagccccttgctttcccttcaccgctgcatggtccatcgtgaccgagcatcgcttgcccttcaccgtcatgccatagtagccacttcgtatcccacatcttcaatatcttcaccttgtcattcatggtattttaggtgtaatgatatcacttgagcatcaacacctttgcaatctttgggacctatttctttcatttaactcaataaaattattagtcacaatgatccggttgtcaacttccacatgttgaccaactgatcgcatgtataaaaggatatgaataaatgatgagtattaatcaacaccacaagtgtcatatactcaattatatgctcacatgtaaagttcccaattaaataaaagtgaataacttggatcaattacattcataactaaagtataggatttgctccccctaaatgtatgcatataaaatatttgtgtgaagcaagagtatgcataaaaagatattaaacattgagagcttatcctatacaagaatagaaggcacttatcaaatatagacaataaaataaaaacataccttcatcatctccatgttctcaatgtaaagagactaaacaagatatggctcaaacaaaacattagtctcacatgcttatgtaatcacatgaaaatattatatatgaatatatcaatatgtgcacggatagaaagagtgatacatatagcttgatctccatgtatttcatccttgtgatttaggtacaccatcaatgaacgtttttctctcaactcatatgaagtccagaaatcacctctcacatattccactttcatatccatatgagagtagtagacaaagaaatgcttacaacaatgttagtctcatgtaattggatttgtcattaatcatcaaaaccaaattaatggcacttgaacttccagaggctaatccacaccgtccaggcaaagccctggatcggatgacggtaaggagggttcggccaaaccccctggttcggccgaaccaggagccggcccagtccagcccaatttcagctggcgacctcctttgttgcttctcttcgcagacttgtgaattttggcccaattcatcgtgtcaattctgagttcttggcccattcttacataagtctggttctcgacatcgtccgattgatttatcgtctgtgttgatgtctattctcctccactttatggctattctctgcaaaaaggttagaaaccgaatactagtggaatattattattctaacatatttatgcattgcaagcatcactagttctcgtctattttggtaaaattgacggtcgaaactgatcgataacgaccatcaacagaacacgcttctggcgatttccagctccgcggcgaaaccaggggcgattgccagaatgaagaagaaggtggtggtgcaagtcgctggtggttttaccgatagcgaagggacttccgatgggatgcctacttcgccggcgccgtgacgtgttgcccaccaaaggagacacttgtcgccaccgcttgccagtgacgccgaagcgcctacggggggtagtgcttcggcgccagccgcaactccggttgtggcgattgagtcagtggaggtgaacacttctgggccgagagagtagaaacggtcccttcgacgagccatcagcgggaagggaaggcgccggcagtgacagtgtctgacatgacactcaccaacccgcacctcgtctcctcggatttcgcttctcggccagagatcgcccccttcgtca

SEQ ID NO: 2641 - DNA, 2000 bp, Oryza sativa
ggtatatggtccgaccatttttagccctagctaggaacaatactacctccatcctatattacttgtcgttttgactttttacttgtaatgattgaccattcgttttatttgaaaaattagtgcaaatataaaaaatgataagtaaactacatttaataataaaataagtcacaaataaaataaataataattctaagtttattttgaataagacgaataatcaaacattaaaaaaaactcaaggcaacaagtaatatggggcgaaggtagtacattaacatgggcaaattgtacgtaggattattatcttctatatagatatatgatactatggcacaggtacctgaactggcatttatgaatctaaaatggtacaatggtagtatagcaagtttgagcacaatcacatagagagtaattcttaatagaggggcttacctttaccgcgcactgcaggaagggactgaacacctggcactgttgggccatctaatgaggagacaaagtgttaatctattggagtagcaggattgacagggttaaatgcaagcctcctgttaataggtcatcgaaatggatgacgaaacactgacatggagatccctatttcaggagttgagataaaagatatggtatgattagagctttcactgttaggagcacctagaagacaaagaaataaatcatcaataagttttccgctcaacgtaagaaaactgtagttgagaattgagaaaatgcaaagaaagttgaatatgcgaataatgcgtaggagtagcacctagcctgttctctgtctcatttgtccctaagttagttagctgagaaaatggtgttggtgttagagtgtcaggcaccacatccatcccaatcaccaaaccactcctagatatttatacaaaatggcaaaacaaaatcataaagccagcagatgagtacacaatggagtattatggaaagctaagcatgaatctaaatatggacacctttaatatgtgtatgttgtggacttggggcagcaggcaactatcccataaccactgtagcaggtcaaattcaattagaaaatgcttaattagtagggattattgaatcacatgcttgacaataagtaacttgcaccattaaaaatacaggtcaaggaaatctgtcatggtggtacataataaatcaaagaacgacatttccaagggcctaagggtttcttctgtacaacagtggggatagaaggattttcttgccaggactgccgtgggaaaaagagggcattgctccctcacgtgatggcgatggccaccggagaaccaaccggtcaagcaaaaggtcgtcggtggtggcgcaactgagtggactgtcactgggagaggagaggctgctgcagctcgtggatggcgacggccgtggacagatggaatggagatggtggagacgaaatcaccgagcagaagaccgcggccgtccacagctaagccaaagaaggcgcaaaaacacactgggcaagggagacggcgatgccggcggcggcgctggatggatcgacggaggaagcgtgtggactgcatgcagaaagagaagctgggggatgaatcatccggtggggaaaaaaatagacccccctggagagcagccgaggcttcctgggaagacacgcttaagggcagagatgcttgcagccacaatcgaaaggtgtggacaacatgcaatgattgtagtttctacagtagcaagacagcacgtggcagttcatctgaaatggtattaaaaaaaccttaagttttattgatgatacaaccaggactagacgaacaattaaattcaaaacaacaaaactagccgaacaatgacacgtcgctttcgtttagtaatacgggaccttttcatttttccttttccggcgagacaaataaaagtcgctttcgtaagccaaaggcccaaaaccagcctccgtctccgtgtcacccctggctggccacatcccccaaactccggtgactccggcg

SEQ ID NO: 2642 - DNA, 1224 bp, Oryza sativa
  N_region (3)..(3): n = any nucleotide
  N_region (9)..(9): n = any nucleotide
  N_region (17)..(17): n = any nucleotide
  N_region (34)..(34): n = any nucleotide
  N_region (37)..(37): n = any nucleotide
  N_region (42)..(42): n = any nucleotide
  N_region (54)..(54): n = any nucleotide
  N_region (63)..(63): n = any nucleotide
  N_region (66)..(66): n = any nucleotide
  N_region (88)..(88): n = any nucleotide
  N_region (106)..(106): n = any nucleotide
  N_region (148)..(148): n = any nucleotide
ccncttggnttcaaccngggaccaaaaaaaaacnagnacggnaaccacaaattnacaccaagnacngaagtttttaacaacatgtttnaacaaggccgccaaacgnaatttggatacgatcaaggaaccaaccgggcaaccacaaatntttgcaccaaacaggacaactgcaaccctaaattcctctgaacacgctcttgacagaaccgatcgaaggagaaagaacacaaaatcagaggaaatcatcaaccaaatcagtcaatcaatcaaaaaaaaaaagagatggtcaccttgggcagggcaagtgagagggggaggagatcagggccagagagggaggggctctccaccagcctcctctttattattacagtgatgacctcctaatccaacacattttttaggcagttattaaagagggcttttgcctgcttaattattgcctaggatgctctgtcatcctaattttaaactccccaacaatttcttgttgatttttctctatgctcttttctcccgtgaaaaaagtttcagtggtggtgccatttcgctttcatccaacccagaaatagatcatgaaaaggaacataaaagcgacgaaaagaaatatgcttttttttctaaaagattatttcccatttattctctaatagatttaatcatgtgctgatgacattattatgattccttaaaaaaagcaatgcgcgcgctccgagccggttcacctttttaattgaagtacagcgatatttaccaaatttcgatcaaacgtattatgaattcttaaaaaccattaaaattttcacttccaatttgctttcgtcccgctttgaacctaaaattttttcactgttttcgatcggttttcgtcaaaagcatactaccactagttgttgcattaatgtactataaataagacacatattttatctcgacttttggttaaaaaaaggcatatataacttactttaaaatataaataaatctattttcggtttattttaattaaaacttaattaatcatacgctaatagttccatctacgtacccaaccttaataacgggcctaaagcaggctaacgtgggccgtattacgggccggtttaggctgggcctgagttggtccagatatagtgggccggaatatcgcgaggtgacgctgacgcgtccatcgcgcacgacatcgcccccgtcaccctctctgcgctgctgctgctgcttccg

SEQ ID NO: 2643 - DNA, 2000 bp, Oryza sativa
  N_region (892)..(892): n = any nucleotide
  N_region (896)..(896): n = any nucleotide
  N_region (899)..(899): n = any nucleotide
  N_region (901)..(902): n = any nucleotide
  N_region (905)..(905): n = any nucleotide
  N_region (907)..(907): n = any nucleotide
  N_region (923)..(923): n = any nucleotide
ttttttaaaaaaagctaatctctatactgtgctctcattttaccattgtgaacttatcttgttgattgttgcacagtatgtattagtagcatagtctaaacaaatggtgataataaacattccatagcaataccaaagaaagaaatactagctgataatacactacgccctgtttggtgtcaaacatcatttaagatacagccacaggcataagaattggctaggaaagatggtgccaacagtcaagaaaccgcttcgtcgaagcaatgttgcatcaaagggctaaaggcaacatgactcaaacatgtttgtgaggtgttgttgcatttgaagtttgaactattctgatggcacgttctagtgattcagcttcttggctgcttttgaggttttgcctatcagggattactgcatagcaaggcaaagcatgcttccaggttgaaaatcccttaagttgcccatgacatagatagctcgatatgggcataggaactagctccccagcatgaacgatgatatcaccctccttgcaactacaagtttcttttcaaatttcagatgcaaaactacaacaaaaccgcaagtacaacttccatttcagatttcagatgcaaaactaacaacaaaaccgaaccattccactttcagggacacagtaatcaatcaaattccagattccccgatactacagtaatcaatcaacccaacgacttctttttctcccccctatttccaggatgcagtgcaagagcaagacgaggcgggaccttgttccagacggagccgagggtggtgggcgcgggcttggcggcgaggtcggcggcgtcgatcttgcgtggcgcaggaagcggcgcggcgtcgcccgtggcctcccgcacccagtaactgtacnacgncgncnnctncnccgccgccgccgccgncgtctcctccatctccgcccctcacctgcttggtgggctggaccgggctgcctgcctccgatggcgtcttcgcggcgagacccggcaaaaataattaaaaaaaaaacctcttttgactcgttcaattccttttctttttttggcactcgtctccagactcttcgggaaacttcccccacgcacgtgcacattaatcgaagctaaccacgtggtgattagatagtactgtagattagcattaggtttcgtgttaattaactagtaacacctttttgagcaagtttaaatgtatagcccgctactatctccaattcatctataatcaatctaatagccaattcatacaacaattgcttactatactattaatatatggtcccacctgtcatgcacacattgcgtcttgaagtctacgctgcagctggctatagatctgtagcccgctgctcttctctctcatcttttatctcattaaaatatgtttacagctagctaatagcactgctattgtatctgctcttagtattctcattggaatcatctatacctttgtcaataaaatttgttactacaaaaatttaacagatatagttacagtataatcatgatgtaattttattataactctaaatacaatacaatataatttaactttcaaaagtttcttcatgatatgtttttttttgaagaaatgaaggtcgtgagaacgaatcctctcatacgtgcgtgttgtggcctttttactttctcacttgtacaaattttaaaacaaatttaacagtttaaaattatgtgaaagttacatgcaagttatagtataattatattacaaatttttactgtaattacatccgataaattttgtcaaaaaaaatatataacaaaactgttaacgaacaccttttgtggatcgatccgaacaactctgaactctgaagtgaaatcccttttcggttttcgaatcggactcacacctaaatctcctcatctttttatatcacgagctatcgtgcaatttatcgttgatcgatcgaatcgtggtgaagaaatctgcaacgaaaaccgatggacgccaac

SEQ ID NO: 2644 - DNA, 1643 bp, Oryza sativa
  N_region (364)..(364): n = any nucleotide
  N_region (679)..(679): n = any nucleotide
cccccccccccccgggcttgacaagttcagcaaaaccgtagagaaagtgggctacacctagcttagcctatccaatatccgattcaaaaagagcttggattgctaccttttctatctctgtataaagtcaaattagtcccagtgttgggaagagcccactgtcaaaagatcgttttgctaggatgctgcttgaatctagttacttccaaaaaaaggcatttgggaactctatacggtatggctacaaaccgaatgaagaagtcgtaatcaggatttgatctatctggatcagcacattttattacaacttctttaggagtatgacatagcccccctccctcccagatctggccgaaggagggangggggaggctggccacagcgaatacggcacggggcagcggcggcggccacgacgacgggtcggggcggcggcggcagccacgacgacgggtcggggcggcggcgacgacaacgcgcggggccgcggcggcggctccccttccccctcccagatccggccggaggagggaagggggaagcccgtggcggtgactacggcgcggggcggcggcggcgacgacgacggcgcggggcgcggctcccctcctttcccctccaaaatccggccgaaggagggtggcggcagcgaggcgcgtggcggcgtcggcgagccgcngccgtgattttttttgttcgtttcatggatttttgcaggagggctgttgtcccgactgtgaaaatcgttgattttcaccgttgttgtgctacaagtggtccaacccttcgcttgcaaaattcacttttgtctgtctgcgaaaatactttttctagtagtgaatgttgttctttggatggatatcaccaaggacatattactcgaaaatggaaaggcatttgggcaattgggcttgggatagtcagtgagtgctggcctgctgggtagatcaggggctaagggcatctgcctcaggttattggacgttgttccaagttccaacaacgaccaaagcacgatgttgttattaacagcatccacatctggatgccctgcaacatatacatagcacccatcccatttttccaaattacttcctccataagaaagtatatgatgtacttttataaaaataaaaagtataaatcttgaccaacaattaatatgattacaaacacacttaccaacagttaatcagactattcacatatctctggatgccctcactctgcctcccaccccacctgccatcgaatgctccccctcaagttgcatcgccccacacaaccactcaagccaagtttagttccaatttttttctttaaatttctaacttttccatcacatcaaaacttttctatacataaaaacttttaacttttccgtcacattgtcctaattttaaccaagctttcaattttagcgtgaaccagtccattgatagctccctcctcttggactacctccacaaaacaataaaggccgtggctgccaacatactggcctcgcgccaccccaagtaacattgcttgccttcctcggctcaaatgaggcgagcagaggagaggagcactgctggggtgatagttttgacgatggaatagcaacggtgatatgcgcaggacgcatctcatggtgcggctca

SEQ ID NO: 2645 - DNA, 2000 bp, Oryza sativa
tgccagccgttccaacatttcatcaatgaagggtagcgaaaaatgatccattttagtagccttgttaagcttcattgttaatcccggcatgcaggagttttaagacctctttctttacaacctctcgcattgcattattgagccttcgttgatgttccctggagggaatactctcggggtcaataggaatacgatgggtgcaaagcgcgggattaattcccctgagatcttgaagcgagtagccaagaacagaacgatgcttttccaacacggtgagaagacgttgagtctcatcttcagagagcttgtcactgaatataacaggggcttctctgtcattgtgtaagaaggcatagcgtaggcctggaggtagaggtttgagctcaagcggaggtcgaggtggtggttccatgattggcaggttgagagtctcaccgggatccacttcctccttgatgaaatcggggacctcatcttccagaagggcctcgggagactcatgagggggaactgttgtaacctcgtcggctggctcaatttctgggagagagtcggtcaaggcgatccttgcccgtgagaatggaactgaaaattcattccctcccagcgttattttgaggctatctaatcggggtgtgttgataagaagtttcttaatgggcagctcgattaggatgtcgaaatgttgaatttcaaagacatggaaatccaagatcgcatccctgtcttcaaagcagacaggcacatcttgtacaatcccaaatccttcattgatatttccatttggatgcttgaaaaatttgtttgtcggggtcactgccttatcgcttaaataagcgaatgcaaaagactcggagacgagattggccccgacagttggactatagagaataccgacgttgttcccttccagatggtaaggaatgattcggggagcggtatttatccgaattacttcggatgaaagctctgcctcccttagccattcgtcgctcattacggacgttaactcccggacagtttattgaaggaacccgagttcgatcggatagggaggcagcagaggaacgagtggtctctttttgctaaaatagttcagggtattaccatagtcttcgtcaagaccatccctgaacagaattgcggcacgctccggagtttgaatttcttcattctcaacagacggctgctcaggaaccttctcatcaatcgagctagcagaagtggatggttcgaagagtggctcgattgtcagaggttcctctatcttggacacggatgcctccagctggggttcatcggattgcatcatgcaggaagtattttctagaatgcgatccaaaattgttcttccttctgacggcgttttgtgcatgaacgatcctccggcggttatgtccagatagaatgtagactccttatccaaacccgtatggaaatgttgcagtaacacatactcgggtaaggacaaggttggtccggactgcactaaaatagtgaatctcgaccaggctgcaccgattgattcgtttttgatctgcttaaaactgagtatttctactcgaagggcagtaatacgagtaactaggaagaaggcaagacaaaatctgtctcgcaacttttcccaactaccgtttacacatccaacggtaaagtttaccattgctttgttctctcttgaagggagagcgggaacaatttccaccacaaagtttcttgcctcatgccacgaatcttaaggcacgagcagacttgttcaaagtctcgcagatgatggtagggattttctagatcaaagccagaaaaaggattttccctaaccatactaattagttcgggacgaatttcatagccagttgtataaatgggctctgatgaaggaagtggcttacagaattcgccccgaggagcagacagctcagaaagaggttgctccatagtcaagaagagtttgacaggaatacttctctaggatagcaggggtaaaggtagaataagaa

SEQ ID NO: 2646 - DNA, 2000 bp, Oryza sativa
agcagcagcaagcaaccaagctgagatcgatcgatatatcgagctggcaggagaaaattaaagcggcagcatatatatgcaggagaaatttctccgggctcgcctgatccatcacacgcggaccgaagcaaacccggacgtcgagatcaatgcagctaagggtaaggggtaaggtagatgccggcggccggcaggggagggagagaggaaagaaagggtcaatgcagggggccaaaccgtggggcacatgtgttccccgttccaaggccacatgcatgtgccttagccgctttttgtttccaccacgctcccttctccttcttctttcgccttgccattgtctgtagctccccctcactctcctcacggaagcagggatgatctaactagctgcctgctactaaaacacaaaagcgccattgtacctggtgtgtttttttatatataacaagatgatgtcttctcatttacatgttattacattgtttatccgctgactacgtggctatcctctataaaccgggatttcaatactattatggtggcatcatgatagttggatcaggtggcacaagagattttatacatatgaatatgggtggcgatctagtttacggataattgatagtcattaatctacatgttcttttatgcttggaaagggtgttttggttcatttggctgtatgcatcatatgcagagaccaggggaggattcagtgcggttgtatcatcttagtgtaattgactgagtcttaataaaacctctattatcttagaaaaaaaaggcattgtacatatcatatctttatcaatatgtgcctgcacatgccacataagatatacataccagacaacggcaggttttaaacaccgctccatcaccaagtactactctgggggcggtttcatttatgtctgattggtaaaacttcagctccagcttcatcttttctgaagctagagtccatcaaacggtttcaatttcacctaaaaagaaagcggagggactaaagtgctatcacataatgaactagcgacatgaagcgggtttcagactgttccacaactccatttcagaacaaaaaatgcaccttttcacaaaaattgaaaggatgtggttaaactagcgagtcaacaaatactcaccgtacatgtacggactcactcatatcccttaggtccaaatactagggatattccgattaatgtacacgtgccttcaattatatatccgataccaaagccaaatcaacacatcacacacatcctaaatatatctctgcagccacacgcatgattaagggcatacattgctttcatactcacaagtcacaattcatggtacatgtgtatatatatggagttcaactaagtatatttgtattccaacaaataataattagcagcaacacacactcttcatattcttatagtcccatatggaggactatcctgaaaatgacatatacagtacatcatgtactccaactaataattaacaacaacacacttctcatgcatattaattgtcacttccatggactctcctgaaaatgacaggcaccattttcagttccatccaaaaagtaaagagtgacaagctagaacatgttaataatatataaatttatacagcaatgcatgcatgtttaaccaacacaagttgatcggagagcctcggaggcaaatataatactaagagcggcggtaaagattctctagcagcactagtgtcgtccttgcatgtgtgccattcgttcattcatattctcatcactagtgaaatttacttagattccatctcactcatcacaactatcaaagcttagctaagctactagctgcttcttctcctataagtagggcgatctcactctctcgcagcaagccaattaagcgaattaagcacacatcaattgaccaaacctatctctctatctctctcgagctagcgagctctaggtgttcgacaccgaacaaggcagctagctagtggcg

SEQ ID NO: 2647 - DNA, 2000 bp, Oryza sativa
  N_region (1376)..(1376): n = any nucleotide
catttcggggttcacttataacaatatcaaatcacttaggccctctttgtttaggtttagggttattggtttagacttttaagtcagcttattggcttacatgatttataagtcagtggatttaatgttctaagtttagtgctagagttatacatctacctcatataagccaaaaaagtttctccaacgtaacttttggcttaatagtgttatagtggtttatggctttaaaaaagtcaaacgaaaaagctacttgtttatttagatttagactttttggcttataagcctaaacaaagagggccttagagggtatccgatttttttttataaaaaaaaacattgagagggaatccgaagctgctgtagtttttagtgctacactgccattttgtggtaccaaaatttgcattggcatctccttattaagaactgtaaaatatctttacatagtaatatggagaaatgctgcaaatacttaacgtttgcttgtgaaagtcccaaagttgccatccacacccttattgcaagtacttgtggcaaaggatttttttttcatcgctatctttatactgctagctagtaagtttctaaaagcttggtattattagaatgtattaaagtggatgtaagtggggatgacaatgaaccacgtagagcttcccacggaaatggaacagactgttcattactaccaacttcaacttgatacgtgatgcgtcatgcacctttgatccaatccatatccaaatatatccgaatggcagttgggttggattaaattagttttatttctgcatcaggtagttgactgtaataccattatctgcagttcaagtttgtttctaacaatggcttgcacagcaacacttcctcaaagagctgataattttttttccttgaaaaattaaaattattgcaattcgagaaaatgtagctgtgcatccagcttctaatgttacaactgttattcataacttctaatactctgtttgaatttaatactagtgagaaagatccagggaagagtttatgtatatggatttgctagcgatgaatgtgacaagattagatatctcatcaagagacatttctctgtatatttcctgctaagattgttggaaaaccaaagttgggtgttaatccttgctttcagaagtactctttatccagaaataagaacacggtagcttgggcatccaatagctattcagtgaacacaatttgtcttgttcgacagtacaagaactttacacctttttaagcattgtgaccattgaaattatttttaaaaagtaaagcaggatctccactgtgaccattgtgacctttttaacggagggagtatttacttccttcctttcaaaatttttttngttcctttcaaaaattagtatttgcttcccagaaggtttcagtttcttccttgaccattggcttgtcaaattcttttcagtgctttcctactatgatgctctgccttctttttttctgctctgccaaatgtttgttcttccaactgaaacgtgaaaaaatgttggttgaaagaagaaattacgttggaatatgggcgttcagagttcagttctgtacatcctgagacaagaaattatttattagtagaaggttcatattaatcgtctgccagctgatctactgaatgcaattatttacggagttgctagaaatatggtgctatatgctacagtcgattttttttcagccacttacacagtagttacacctcatttacaccccatttacatatgtaattagtatgtaattttcgaatttacatatgtaattttagtacttacatatgtaattttgagacttacattgtaaatacactaaaattacatatgtaattagggacttacaatgtaaatacatgtcgactattttttttgatggaaaatatggcgccataaatatagcatctcctctcttgcttctgatcaccattatttttcaggtctcgaatacccagacttcgagag

SEQ ID NO: 2648 - DNA, 2000 bp, Oryza sativa
  N_region (1080)..(1080): n = any nucleotide
aatagtttaaataatgttaaaccatatatattcaggaagcaatattctagttaacaaagtagtagcacatacataaacaaagtagtatgacacaacttgagagtagcagcaaattaggacacataaaattgttatggggtgcttattactccttagagcaagtataatagtgagctataagcctactataagcttatgtgaaggagagaggtaaacaaaagagaagggtgttggctctcatgcaagagctagcttaacacaagcttcaagacaaatacattaaatgtataagtgagagatagagataggagaagaaaattatagctaatcttatagctaatctattatatgtgttgactttaggatgggctaatagtaagaagtggactatattattatccttgctcttacaaagttacgatagttatgggggctgatggccactaaacagcatcttattgatatgcgtgttagtcaaaaggtcattgttaatttaatcgttctttcactaatgaccatagtacaggcaacacgaagcacgttgaaacgtacggtgaaactcaaccaattggtgaaagcagcatccgatccattccatcacttgggaacattcacagccctcagcaacgcagcatgctgaaccgtgaactcgaccaacctatcggcgtcaggcacgacgtccaccacggccgggtgtgcgcagaagcgatctgcccaagcagccagattcggaaccttggtctcgttgaggagctcgacgccggcgatcttctccaccgccctgatccatccgaggaatgaccccagagcgatgtccaggtagccgatgttgtcgccgccgaagtattgcttcccttggctgcacttgacaaatgcctcctccagatgctgcagagcggtggacatttcgcccgcggctttgtccttgtcttcttccacggatcctctcaacacccgaatccctggaaggaatctgcatcatcaaagcaagagcaaaaattatctaagaaaacaatcgacatatatgacggaaaatgatataactgattaatgcgcattattgaccatcatatttgttantttttttcaactcgtgtaaattgaatttgaattacatgtttgcatatttgtactacttaccatcttctataactttctgaatctgatatggaaaaacgaggggataccgggatagttaccttgtcatcgatgtactttgcccagaaccgctcgacggcgcggccgtaggggtcgcgggggagtatggacggggcgccattggaggccggccagacctcgtcgatgtactagacgatgatgagagactcggcgatgggcttgccgtggtggagcagcacggggatcttcttgtgcaccgggttggaccggagcagcagctcgctcttcttccccaccgtctcctgcaacatctcgtgctccacgcccttcagcttcagcgccaccaccacgcggttcatgaaggggctcgcccagccgcccaccacgcgcaccgccgccggatcgcctgaactgttagtcgacgacattttcgctatctgcttcttcttggtgcagtgaggaggttgctgctgatgttcatgtgtttatatatacgcaattatggagcgcttttcgcttactatattggaagcttcgacgaccacttacgtgcgtcgttgtgtgtgtcatatggtttatttttttctcggtggcgtgatgcttggagccttggactagtatattgggctgacgtctcttgatgtgttcccttttgtcatgtgaggaggattttctgtggttgctagcgatggaacaatttccacagccactagtcgttgagggcgtgtgacattgtctatccatgtaggtaaattgtgcgccgaggagagaggagggttggggaccatgtctacaccgggtttgcgcgcctccacttgataacgagagcctctttagagaatacaacaatgttgtttgaaaaaggggaagcgcatccgtgc

SEQ ID NO: 2649 - DNA, 2000 bp, Oryza sativa
  N_region (157)..(157): n = any nucleotide
aatcatggtaagagttgtaatcggtagtatctcttcggaaatattgctcggttggtcggtaatcgactatatttatcaattagacatcaatatgatgctgaaagaatttagaaaaaaaaaatcaaagggtatgacgctgaaagaatttagaaaaatntcaaaaggtaatcaatatgatgttaaaagaaattagaaacctttgtcgtcgtcggagcatgccgccaaggaagcggtgaggctgttccttggtgaggaaacttgttcccagtgctactacggagggaggcgcctatggtttcctcccccagatctggtcgacgacatggtgatgatagcgaagcggcatggcatagctgccgggcgacgatggtagagcggggacttctctctctctctctctcccctccctctgtcccctttgcattcgttcgtgacagggtggcgcggcatcggaaacaggtggtgagggcgaccttggctgttgggggcggcgtgacgaagatggagacgagtgactactgagcagcggaggcgtcatcctctcctctccctgcctcgccaaccgaggtggcgcggagcatcagtggaacatcaccgaggtgacaatgactttgggcgttgtggtaggattggagggggcggctagtggggtcggtgtcaaccatggaggtaggaagcatggtggtgatggcggaagacggaggccagtcagcacactgataggtagtgcacgacggcggcgagggtgttcttagaggtggaagggtcgattgtgccggcacactagtggcatgcacatcgacgaagccacgagcctaggtggcagtggtggtggtggcagagttggcgaatggtggtattggctggtcaactcgacatcgcgttaggagcaaagtcgagcgcagtgggcagcgttaagggcagtggtggaggtccgcggcgaaggcggtgtggcttctactagcacgatggagtttgtccgggtggcatgtggtcggtgcttgataatgtcaaggcggcttggcggactagttttgacccttgtctttactcatgggggacggaggagcttgcttttagcagcgagggggcgtggaggaggaagggaggatcagattcgcatccctcgaagagtcgaagtttgcagcaacaaggaaaaacttgaagctagtcttctagtcctttttcttttcggttgattgtttttctttgtatttcagtgttgagatgtcgagtgtatgtacttgtataatgtttggttgtgtatatccatctatgaacggatttctatccattatcttaaaagaaaaaataatcaaaaggtaatatgctgctgaaagaaattagaaaaaaaaaggaaggtaacggtcggaacggtaacactacttatacgaacaatggtctgtcagaaatttttgtgaccgttttcatcgttatgtttgacaaactagttatagagtatacactacaatatcaattaaaaagtgcaaaccaacaagaaatatttttctacattactcagtacaatttttttctgttatggactatgcaacataactactctaatatatcaacgttttgtagataatgttctaatatcaattaatacattactcagtacaaactttttctgttatggactatgcaacataactactctaatatatcaatttatgtagataatgctctaatatcaattaataattgcaaatttgggtagtagattgaattaaaatatagccaaataaaatgaaacatttcagcattatacttagaagaagtataaaattttcacacacgcaaacaaaataaaagtaatgttcgtggtcggcaggattcgaacctgcgcgggcaaagcccacatgatttctagtcatgcccgataaccactccggcacgaccacttcttgtttaaattcctcacattattctacataaagtaatcaaatatgattttctcctgatatttcaccatccgtaccgcacgtgcagggcagacg

SEQ ID NO: 2650 - DNA, 2000 bp, Oryza sativa
  N_region (1390)..(1390): n = any nucleotide
  N_region (1470)..(1470): n = any nucleotide
  N_region (1472)..(1472): n = any nucleotide
  N_region (1530)..(1530): n = any nucleotide
  N_region (1871)..(1872): n = any nucleotide
  N_region (1874)..(1875): n = any nucleotide
ttcgactttattcagttaacgcgttgttaattcgtggtcgatcgatctagtttgtaggtgtagctgccgcaagataatatgcacaagcacatggatcagattaatagctgtcgttttaggcactacgccatttatgtggatcaggacacatgttgcaacttgcaagtgacatgaccgcaagtatatgcattgaactagtctaaaaataataataataaaaatagtctaaaaaagtagtatatgcattgaaccagtcaagtaaacgcaagtaaactaggtactttgatagtctgattgacacagacatatgtagcaactaaccggagtgtgtatggggcacaacgtacgcattcaaaacgttgggcattcaggcatttcagggttatgggtcgtaagtgaaaaaaaaatgtgaccactaatggaaaaacgcagttaatttacagcaagacttttatacccttacctttagttagtggaccaaaagatatagctaagtgataaaacgatgaaaaattcccaataaatcctaagagtacgctttaaaactcaacattattaattgtctttgaaacaagcaagcctaatcaacaattctgattttttttttggtggatggcacatggagcagtgttgatatgcttagatcgaggtcgtgcgtttggcggcgaccttcgtgagcgtggttagcggacgggaaccgcggcaggatgtggtgtgtactttgtggcagtatccttgcctagtcggctttgatgactttggaggtggtaatatctaggtcaacgactgatattctccgatgttactccagttctatttaggttcgatgtcagatgtgagcaaaattcgattagcacaataatcagccgctgatttcacagaagataaggacttcatacaacacaaaattcgattagcacaataatcaaccactgatttcatagaagataaagacttcatgcaacttataagccattgagcagaaacaacgaatggctatgtagattctcgccaaacatagattaaagtttagcaatacctattatctttatcttaaggttggtatttttaattcgtagccattcgatccagccacaacctacgtaataattggttatagcttctttgtagcatatgttgggatgaatttcattttaaaaaatgtgtattgctagattccaagagcataaaaatttgcgaaaattaggtcacctaaaaattacacattcataagcctaaaactgcatcggtatgcaatatacaattttacttatttttaactataatattattcttatatatagttttgatttattaatttgtatctgagcttgagtacttctaaaaaaaaattaaatctttatctttcatgtagtttggtaatatttantttttaggttagaatagtttacaaagtagcgtgcctcgctataagacatgtcacgtgtgtttgtcaactttaaatatganancccttataacatgctttaaggcatgttaaacttgagtatgaagtatgaatcttttcantcccccccccctctcttcttattcccctttcccttttaaaagttgccaactatgcaaggtcaattagcagcacttctctcacgcatatgcaagtagctagtagtgcatgtgcatgggcgactgacaaggagcattctcgtaagaataatcaacaccttatccctatcgatgcctatcgatgtactcgtttacttggaagtttggaagttcacttgccggttcttacattctaaaccccgcgtggtacgcgacgttattagatactacatatactgtgtacctatatgtttctcccactagctagctaattaattaatctctcgtacgtttctatatatatnngnnaccgcgagatcgatccaagccacggtatgctatgagctactgaaacctacctagctactcaaaagatcgatctagcttggcgagcgtgaggtggtgaggtacgtttacgtacgtacgtatactca

SEQ ID NO: 2651 - DNA, 2000 bp, Oryza sativa
ttgttattttatattcgtaaactgccttataatgaatcaacaataagtgtttaatagtctgggaggtaattggaatacggcaaaaactctctgctgttacgtagtctgtcatcactaaattccttcgagacaatcgaagtcagaagagtgatttacctctgtttccatggtgaatacaatgtgttgttgctttgcagtatgtttagctagcacttgttaaactacaagctggactagcagctccatctgcatcaatgctttctggatctccatatctcaccatctgctcgcaaaactatctctttgaagctccctacttccttccagccaaccaatatttcctacacagatataaacagatacacttgatgggtccaaagtccaaactgttactagctccttaattacatcgatgatgaggtacatatatgatggctattcatgatttggcttaactaatcattctcaaacaaagtaaatacaagctgtaattaaaactggagtgtcagcatgtattcgtgaaccctcgttgaacatttaaacaagcttgaactatatataatgatgcgtaaatgggtagaggtatagactaatcaccttgatcttgacttcaggaaaccatgcatggttgcatatgcataaggaggaagatgagcgataatgtctggagagcagacaactgacatgcatatactaggtgcttctctaatgcagaggcttcaatgaaatgacgtgcggcgttccattccctggcatatattcctgccttgtgcttcctttgaattgcttttctgcaaagcccccaaatcggtcatatgctgcacgcagcatcaatcatcaaattctttgcttgtatctgtgtcagatgccaggctagctgggacctgccatgaaagataactaaaggtaaaggtacaaggcaggtagagacatgtacgatccaattggggatgggaatggatcaatcgactgaagatttgtctggttaggttaggcctacatggaagaagattagtacggtaatgtaaaactatttcgacccagtgattgatagaataatcttgggcatttgtatttttcttaagtttagctgcatttcagttcgttagttgtttcctcatgcatgtaataagctgactgaaaataagtttagctgcattacagttcgttagttgtttcctcttaagtttagcctttttttagtcgttgtggccgagctgggaacggatcgtgggatggcacgaattctcagatctagctgtttaatcggtcaagttttgcatgtagcaaactcttaagatggaggtgaataaatagaaggagaaaaaccgaaaagctgcagcggcattacgcaacgcaaaaccagtcgttcttgttgctctgttttcttcgtgctctgttcttcagtccattgttcacgtctggaaatattcagagatagtaggatagccatagatcgagtgcagagtgagggaaatttgctgacaattggtatcagagcgaggttccggttccgtttttgatgttgtcggatgcgcgctacattccgccgccgaggcgtggtggaagtgacggtagtagcagcgagcaggggagcggcagtgcaaatggcgcaacgatgccgctggtgccgctgtccagagatggtggcacagctgcgaggctgccaatgcgacgaggacgaactaccccagctgggagatcgaccccggctacgtgaagtaccgcgaggatcgtgtggccctctctgccatactccaggccattccgcgggagatgttgcgcgggctggcgaagcatgacacggcgaaggcggcgtgggaccccatcaagaccatgcgggtcggtgtcgaccgcgtgcatgaggccaaggagcaagggtttcgccggcaatttgaatcgatgcggttcaaggagggagagaagccggaggagtttgcgatgtggctgacagccgttgttgcgaacatttgcgacattggcggagtcatggaggacga

SEQ ID NO: 2652 - DNA, 2000 bp, Oryza sativa
  N_region (260)..(260): n = any nucleotide
  N_region (285)..(285): n = any nucleotide
  N_region (331)..(331): n = any nucleotide
  N_region (443)..(443): n = any nucleotide
  N_region (567)..(567): n = any nucleotide
  N_region (581)..(581): n = any nucleotide
  N_region (583)..(584): n = any nucleotide
  N_region (969)..(969): n = any nucleotide
  N_region (985)..(985): n = any nucleotide
  N_region (998)..(998): n = any nucleotide
  N_region (1028)..(1028): n = any nucleotide
  N_region (1051)..(1051): n = any nucleotide
  N_region (1229)..(1229): n = any nucleotide
  N_region (1251)..(1251): n = any nucleotide
  N_region (1299)..(1299): n = any nucleotide
  N_region (1383)..(1387): n = any nucleotide
  N_region (1403)..(1403): n = any nucleotide
  N_region (1459)..(1459): n = any nucleotide
  N_region (1471)..(1473): n = any nucleotide
  N_region (1477)..(1477): n = any nucleotide
  N_region (1479)..(1480): n = any nucleotide
  N_region (1484)..(1485): n = any nucleotide
  N_region (1487)..(1487): n = any nucleotide
  N_region (1490)..(1491): n = any nucleotide
  N_region (1497)..(1498): n = any nucleotide
  N_region (1502)..(1502): n = any nucleotide
  N_region (1513)..(1513): n = any nucleotide
  N_region (1521)..(1521): n = any nucleotide
  N_region (1524)..(1524): n = any nucleotide
  N_region (1526)..(1527): n = any nucleotide
  N_region (1529)..(1532): n = any nucleotide
  N_region (1536)..(1536): n = any nucleotide
  N_region (1656)..(1656): n = any nucleotide
tcatgtattgtgagaacaaaattaacattaaaattattatgtattaagtctacatcaccgttgggcagaaaatagacataacacataaagccataactataacattgcaattatcaacgttggtcagaaaaattacaacatcatagcacataattaatgttcctaaaattaaaatctcccgttggttcgaaatttaattttagaaacactaattttcatcaatttcatctatttgcagcggaagatctatatacaattcntataaacaataacaaaactctgttntttactctctgtaaaattctcccgttggttcaaatttaaacagagntaaaacatgcaaaaacaattcaaaattctattgtaattgcatgaaaatatacaaaatacatgttcagaagcatttctcacatttatctattctctaaacaattttcacgttngttcaaattgcttagaaataaacacaatcattaaacatattgaaaatgcttccttcggcgagggacctaaagtgaacttttccggcctttgccggttggcccatggccaccttgcgcgcgggcnagcgccccttcccntnncccaggccgcaacctgggcctgggccggaaagccgccgccgcgcgctccccacttgggccgctttcggcccggccgccgtcggccgtccgatcgctagggtttcgatcggacggtcgcgcgggcggatcgggcaaaccaaaccggccccgaacgccggcgccgaaaccctaggtcctcttctcttctttctcttgcggttgcacggagcggcgtcgccgtcgccgaaaccctagcacagggcccggcggcggcacggcgacacggcggcgccgtcgcactccccatcgccggtgcgcgcactcactcgagggtgagtgcgctgccgtcgagcggttgtgccgcggcgccccctccttctttctcttgcgggcgtgcgccgtgccnagcggcgttgccgaanccgggcggagccnttgagccgcagcgccatggccgatgccctngcggccgccacgccctctattcntttctcttctccgctccctccaccgtctctaaccccttcaacgcgagtgaagagtgagagaccggcgaacgacggagatggtggcgccgccgcgggcccccttgccggcgcgcgcgtgcacccgcgggtgcgcgcgcggctgtcgagtggctcctcggcggtgcctctttgcccctcnccccctccgtggccggcgtcancgacggccggcgacgaggtaagattagggttagggtttcgatcttttngatccgttggatcgtttgcttttctttgctttggatttctttcttctctgtggatgtctatccccgaaccaaactaaacgctannnnngctctgataccattgntagggttgtctattggatcacctaggtttagatctagtcgggtggttctatttgcnatggatgaacannnatanannaatnnanaannaggganngagnggatttagggntgtgaccngtngnngnnnnggangaggaagtccggccggccatcgtcgttgtcgtcgctgggcttgacgtggacggcggcgacgatggtgctcggttccgatggcggtgatgcgcggttgcagcagtcgtacggtgtcgacgncgaggtcgtggcgcggcggtggagtcttcccgtcactggctgcgccccctcgatcggttagggtttatggggtggagtggcggcggcgacgaacctcgttccttgtgtcgttgtaccgtcccgtcctccacccctctttatatggcacagtgtgacgggggcccaccagccattgggctgggcgcccccgatcagggcgcgggtcaaggcccccttgagccgttgggctcaaggggagggagaggagaagagaaaaggaagagggcgcaagggccgatggcagcggcgacgctgctccgctcggccgctccgcccggcggaatcatgcaaaatttccactgaca

SEQ ID NO: 2653 - DNA, 2000 bp, Oryza sativa
cggggaggagaggagaggaaggggtggaggggagttgggcctgggagagaaaagagagaaggaggcccaattcgaacagtgagctttcacaattttctcttaggattttatagaattgaattttgaggagatttccaagggtttgaatttgaaattttgacctagggcttcatggaattttaaaggcaattctaagagaggatttgagatctaaatggcacaaaaacaattaagaaccaaattaactccacatttttaaataacaaatttttaaataaaagcaaataaaatacgggtgctacactttaccaaccaaccgaccggtggctttttggttcatcatccgccgtcccacatgtacgtcgtcgagcctagccagcaaattggtgcatgtcattcatctcactgtttaatccgttgagcgagtagggtttggtgtttctagtggtactatcgaatcgtaaatcggagaaatagtttatgagaaaaaaatatttaaagtgacgagaaaaaagaaaagcgtccgcaaaatgagaaaaaagaaaaagaaattagctagtactcatcttgcatacatgcaacggtagcaaggagccccatttttttttccaaatcgggctaccgagaagaggattgtcgtgcatcttccgtaacaattctccaactagttacacgatctacagaaattgatcagctagccatgtaagcaagccgaacaacgtacgaggcgagggctaggtagctaggatgtcagaaatggcggttgccttagccgtgttgctcgtcggccttgcgccggcgacaccatcgtcgtcggctcagcaatagccgggaatcatttatcatgaaacttcgtataccgacggcatggcagataaatggatggatcgaggacgacatcctgagcaggctgcgccaactcaagccgatcgatgtgttgcctgatacaatatgattgtgttctggaagggtcgttgttctgttgttggtacaaagtctttggtgctgttagtctttggtttgaaaggttctgcaatgtgagctatagtgtccctagctgttagtccaatctatgtgttctcgtttccttgtcttttgttttagcagcagggttccggaagtagattttgatccatcaaggatatatcttttcgttatttacatgtcactcaaatggttataatctttttttttaaaaaagaagacatattaacatgtgatatatcactccacaaacatgcaagttcaaattcaacttttacatctcacaacggaaaaaatagttttgactgtgaatatacattaactagctatggtttatttttttttgttacgagatgtagaagttgaatttgaaattgcatgtttgcggagtgttatatcacatgttaatacatcttcccaaatttttttcacaatcatatgagtggcattcaaataatgaggggatatcctatagagggatcaaaatagtttccccgtgtatgtttcagactttgtatcctgttttggcccagttctttcagtaaaataccctgatttcaataaaaactttgtatattgacgattgtgaggttctagttaaccggagaagacgtagacctgatacaaagtctacctgaaaaccatcgcaagaataattccacatcctgattcctgcagaaaaaatatcaatcttttacaatttttccctctgctaccctatggggcttaaaagaaagaagaacaaagatcaataggcaaggtaatacttgactggtccaaactgaggatgtgctgagtggaacacgtgcttcgatcggaagcattgtcgtcgaaaaaccgcgtccgtggtatacgatgcatcttccttaacaaccctcccactaattaacgaagcgtgtgtatgtattatgcacgatcgatctatttatacggagatcactcagccgggccagttaattaataagtaagcaaataaaacagcaagccgggagctagctagctagctaggatgtcag

SEQ ID NO: 2654 - DNA, 2000 bp, Oryza sativa
gcagctccaaaaggaaaggatatggcaccaccgatcgtagtgtgtagttaaggaagattttaacacgaatttaatcgcggtgattgcgcatagacaacggatggaaatggtctttggcacgatctcctcccgatttccaaatcgagacatcaaaattcctaacaccatgttgtctggcagaaaacatctcacatcttagtttgaaccaagaggttaaaaaagtatgctagtaagactaactatttagggagtagaaatacttgtatccaatggtatatctaggatttagtgtataggtggtccgactaaaataaattgtaaacaccacaattatagcaatgctaatatatacaatattcaagtgtaaataatatagaataaaccaaaaggacaccatgatatattagtaaggtgaattcacgtgatgtgtttgtgatgtcgtcaccacatctcgtgggtaaacagcgaacccggacctcacctcgacttcacagggggatggcacgaagttgtggcaacttcgttcagagagaatgtgttgtcgcggcctgcaagctctcatccgcatgggttcatgtcctatccgagcaaactcgtggcattacagtattttagtacaataccgtcgattatctggatcaacaatattatttatattgttatgtgttggatctacataacgatagcgacacataaaccttgaggtaatactctaatctagttgtgtatcagtatatgggattatcttgtgcctaagggtttgtgtatgatgaacatggcgccattatgatgtgttgtatctatcgtctggagtcaccccaatctcgggactctgccccctcttatgtaagatgataggaaggattaaaaagaaggttatctagtcggttgcaactaaattctcctattctatatctagaagggcttattcactttgctaccattttcaaccttatcttttttttggcaaagttaaaaaaaagtggttgcatttagtttgttgccaaattttagtacgtacatatgaaatcttgctaaaatttaacaaccttgccaaaattttggcaacattaccaaaatttgacaataccaaaacttggtaaggttgaaaatagtagcaaagtgaacaagcccgaagatattcggaatcatcgagatgtagtatcccagtatttgctagaataaggcttgctatgagatatccggggtaccgtgtacactttgtgtcccagaaaaaactcaatcctagatatgaatatgaacatacgtgcgttcaggttcgtacctaagattggtttttttgggaccgagggagtaccccacaaatacttcatttaaacttgtttaaaaactgaatacaaatccatgttctgatgaaatctcgcaatatatgattggaaaatcgttttaaaatggaaaaaaagaaagcctaatgggccggcccgttaactggcagcgacactacttggcaacgagccacgaccacctcccgcggcttgagcggttgagcccaaatcaactgcattggcgaaaaagaattccccaatttgccgcgatagtcaagcgacgacgacgtgctgaggcgatggatgtggcgtcgtcgctgcctgacgacgtgctcgcggccgtcctccgccgcctcccgccgcgtggcctcgcgcagcgtcccgctgcgcctgcaaggagtggcgccgcgctcgtcgtcgactcccgccgcctcctgcgcgcggacctcctcccgctctcgctgggcggcatcctcctcaactgccacgactcgcggttcacacccagttcctctcccgccccaccacgggcgccgccgtctcctgccgcctcgactacaccgtgccgccgccgccgccgccatgccccccatctaatacgtcaagggccactgcaacggcctcctcctctcctacctccaggcatggggaaaacgagtacctggtgttcgaccccacacttacgcccaactatgagttgttcatagtgcccga

SEQ ID NO: 2655 - DNA, 2000 bp, Oryza sativa
  N_region (1842)..(1843): n = any nucleotide
ggggacgcgcgcgggtgcagcccatgtgcctcctccccttgtctcccgggctagctactccccacacccacacccacagcgacgcgcgcgccaccaccaacgcccccggccctcctctcgcgctacctgacgcttcctttcctctcgcatacacacttgcgcggactagctctgttgctttctttccggctacctggaagacgcacgatccgaacccctatccaggaccatctcatcccatctctctgcatgcattgcatggcagctatctttacttgtgtgcctacattctgactgatccagtacacggttttgtatctgccttcttctggttctcggcgcataggatcggatcatcgtatgacacacatgatcgctccggatattccttatatctgcagtgtgctacaccacacacgacgacgcggtaaaccgtacgtgcagactgctgatcgatcgaaaattcgaaattcagatacagtgcacgcaccgcatcgtatggttattatgagtgcacgtacggtatgattttctgaacagatgtttcagatcaaagctgcgtatgtacgtgctcgaactcagataattcagcagttctctctctccctctctctctctactcctctctcaaaacaatagtgcttatatgcgatggtactagatccgattatcgatggagcagcaagctttctactctctccgtcgcataataggtgatgttttttactttttatttgtaaagtttgaccattcgttttatttgaaaaattagtgtaaatataaaaaaaagataagtcatatgtaaagtacttttgataataaagcaaatgataaataaaataaataataattctaaaattttttgaataagacgaatgatcaaacagtgacaaacaaaaattcaaaaagacaagtaatatgggacggaggtagtacaattcaaaagaggataaatagttggctagttagctagtggtagtactagtacagtcagccatggatcgaacaattaacatgctaccgactcaggcgagaatctcatctagctatagccaaagctcctcctctccccgatcttttcaaagaaagcgagagccctttccaggggcaagtgccaccttgtcgagccggccggccgctctttgtgctgtgctcttgctggcctagatcgtcgtgcattctctacccccactaatcccaaaattatgcactgacacatgcattcatgcgtgcacccatccggcccctacttcaccaaagtaagtgtgcgtgtgacagtgtcagacagagtatccattccaaggggataacaagctaactttttgtcggtcggcatgactacggtaacactagcagcactagtgctcatgatcacaaccagataaacagcaatgcccagtcatcaactggccttgcgttatatactacgttcagcaatgaacataacgtcttttttagcgatcgatggatcagaatttgatcgtgagtcgttgctagcttttgggtgatcgatctggatgagaaagcaacaaacgggggaggcatgcacacagcagcggctgcgtgtgtaccgctcctatctatatatattactcgtaggtctctctctcgagacacgcacccggccttacttaaacatcaactggtgtgtgcctttgcagtggctgtggtggtggtggtgcgtggtcctcttctccatccagagacaatccagttcagttcagtttcctctctccctcctgtcctcacctcacgcttgacaagagagagagagagagagagagagagagagagagagagagagagagagagagagagaaaggctgaactgagctgagctgnncgagctagttgtgcgagacggcatggaccgatacggcgagaagcagcagcagcagcagatgtttgcctcctacgtggacgcctccctcctagcagccagcggttcgtgctacttagcttttgcttgctagctcccgccattttcttgcctctccatc

SEQ ID NO: 2656 - DNA, 2000 bp, Oryza sativa
actggcacgcatacatggcccagtccagcagtagaccacagaagatccaacacgaagcagtcaggcccggaaaacaacaactcacggagcacatgaccactgggccccatccatccccttacattgttgcatgcccaacgctaaagaaacagatcaacacagcaccgattcattgtgtcaatgcctcaatggtacatgttaacaactgcacacatacatggacatatgtgcaagaaaagattgtgcaaaccttttgaaattttcagaatatttatagagatatatcatgaaagaaagaacaataaccaatcaatgaattaataatgcatatgcttccaagatgaacaaaactggcgataatatacagatgccatacatacatgtcctcacactgcatataattaatttaagtacagacaaaaattataggcttacacgtctaaccataaagaggggaagaaatggtagagaaaaataatgaacaacaataatggaatatctgcatcatcatgcatatgtgtaagagcaaagaatggtggtggtgactggtgacatggcacaacgacgacatcgatcatccctctctagctagggcttgaggcgtccatcaataatggcggcgatgaaccctagctagctatagctagttaggcctttggtgcctcctcctcctcggccttcgccggcgccgcctcagcggccgccggcgtcgctgcggcctcgactgggggctcggcctcggcggcggcaggtgcgctctcaccggcggctgcagctggctcgtcggcgggggcggcggcctcttcttctttcttctcctcggcttcttccttcttctcctcgccggcggcgtcggtggcggcggcggcggcggcggcttcctccttcttctcctcttcggcggcggcggccgtagcctccttgggcttgatctcctcctcgtcggcggggagcaacgtggagaccttctcgaaggtggcgaacaccgggccggagagcagcgccgggccgaccttggcgatcccctcgctcagttgcttcgctccggggaactctgatcaatccaccatgaaaatttcacgtagctaattaatgatcagcgaaattatattaaaaaagaatttgatgagatgtgtttgttgattatatattaccgattttggcgagatcgtcgacgaacttggtgacggcggcggagttcttcttgatcccggacaccttggccctgtccttgatcagaacctgccaaccatggacacatcaaatgtttcagtgacctatacttaattagctgtaaacttggcagatagtatgagctaagctaagctagctggctggcagtcttttactgatcactactcatatgtgtagggtacatgcatatgcatgacgcatcactgctcatcactgagccagcgagggcgactagacgtacagaacgcatgcagcatgatgcagccaagcatcgatacatcaggatcatcacttcattagttgcatgattagatgggcctaagtctcaattaccgcaaactaatacgtgcagttggcagcactgatcgagttaattaactactgaattagtaggacggatgatacggttggcgtgtgattagtttctgaattatatttaccttgagcggcgcaggagcagcctcgtagatctcgacgaccttgggctggaggtcagccttcttctcctcgaactcgccgttgatcccctcctgcaccaccaccaccacaatcatcagcatctcatcgcaatcaaccagatcgatcgaccagacgaatcaaacgacggcggcggcggcggcggcgtaccttagattcatcaaacgacttgatgagttcggcggcggcagccttcttggcgttgccgcccttggcgaagacgaccttaatcttcggcagaaccttggtcttccagtaatccatggccggctagatcgatcgatctaccactgatcggcggcggcggcggcggtggcgaggctaagcaa

SEQ ID NO: 2657 - DNA, 2000 bp, Oryza sativa
  N_region (29)..(29): n = any nucleotide
  N_region (86)..(86): n = any nucleotide
  N_region (90)..(90): n = any nucleotide
  N_region (93)..(93): n = any nucleotide
  N_region (116)..(116): n = any nucleotide
  N_region (125)..(125): n = any nucleotide
  N_region (177)..(177): n = any nucleotide
  N_region (190)..(190): n = any nucleotide
  N_region (199)..(199): n = any nucleotide
acgacgccaactcacaggtggccgggctncacggcggcgacccgtgcgcggccggcggcgccgcggcggcggcggccgcgttgggntgcntcnacgacgacgtcgccggaggccangccgccgcngccaaacgcttggaggcaggcgtacacctgcaccgagctgctctccaggctnatccccaacaagncgttccccntcatgccggtgagctgctgtccacggccaccgtcgtcgccatgatcggtggcgaggacgagctcctcacaatctcacatgctttacgcgtgccattgctgcagcattgcctggggccggaggaccagtacctgtcgatggagcatggcatggtggcggcggcgcaggagccggtggaggcgtcgacggcgagctgctcctacgttcccagcgacgagaactccggcacgccggtcatggcgtacgacagcaacccgccgccggcgaacatcgcctgacctgatcgatcgacctcacctaactaacctacaaacttaatacatgtacaatactacatcgaaagaatcactagtgaactgaataatctcgcaagcttgaggacacgtggcaacgcacacgcatgtcggcattgtgtaaactacagaactgatgaatatattatctggtcataaagttcacatcaagatcatatcgcaaatgcaacgaaccaaccactgaaatctgaagctgaaattaaatactactcctaaaatgattagatgctttaatttcttaccatactgtctgattaagtcaggaaaacacctgaagagtggtgaagagatagtgcaatcctatgcaaggaagatattactgtaaacatgtaaagatgtgcagtgcagtgcagcatcatctttctgaatctctgacagaagggcactaaagccatgagtcagctggaatgttcttgttacaatcactaatatctatccaggcgattctttcatatttaggttccttagccatgaattaaccccccatcctcacttgtctttattttggaacaaagacgagtagagtagtatgagtgagtgctgccttttgcctttttcgaggttaagcaacttgtgctagttttcttcctctctccatgtgtgttcaacagagcatgcttctcatatgctgatatcttgcaatttgcacacacttctcacctgctgtaaacttgtcactcagctttaaccacaagattacagatatttgttttgactatgacagtatgaccaatgccattggttgcctcctacagtaaattatatatacctaacagaagtcacaaactcatgcttacttgattgatagtggaagaaccttttcttttgcttttgaaagaaagaagagcacattccaatttccaagtagctgtaatgagcctgtaatataatgctgtttgaacaagccagaagacaacatcaaacaggcagcatcaaatcggttgtttgctgaggcctgagggtgacaaataactaaagctttagtatttgcccagctcaagaaatatgcttttgtgagaaaaagcaggctccaatcaattgccggcagcaagccaccatgccccacttcacacctttactcgaagctgctctgaattttcaaatggcgaaacacaaggcaaatggcccccattttgccacccttcctcattttttcaaaagcttctcttttatctatccctctctctttaatttggacccccattagctgagatagctatagccctccttttattcccatcactccattcattgttcttgttcttgttcttgctcttgctcttctctctagcttttgctttactagttagttggccattgtttgcactcgatcttggtggtgatatgagctgagctcttctctagctcatcttcttggtggatcttgtggtgttcgtcttcttggtggatcttgctgctggtatagctatagttcaagattaatggcgactccttaccatgtccagtctccaagaagcatcctactga

SEQ ID NO: 2658 - DNA, 2000 bp, Oryza sativa
  N_region (1859)..(1859): n = any nucleotide
ccgcggcggcggcggcggcggcgcgctgtcgagcggggacgctacgccgtccatgagcgcccgctccgacttccccatcggcgacgaggaggatgaggaggaagacgacgacgacgagatggtgtcaaccggcggcggcggcggcggcaaggaggaggacgcgaaggagtgggtggcgcaggtggagcccggcgtgctgataaccttcgtctcgctgccacagggcggcaacgacctcaaacgcatccggttcaggtgtgttcttgagcatgctcgagctaaattctgcatttccagtgcataactcggttctttgatcagtgaaagactgaaaattctacttatttgcattagtccttagcatatatgattgaaagtttagtttgcgctcgtatgaatgattgaattctggtcgtgctaaatataaattagatcaaagtatattgaattgagatagtaactttgcggtgtaaatgggggcgaaatgtcatgcttaggagctttgttctgaacctgcttctttagtcaagaagcaaactggacaaaagcgagtagttttgacttttgatagccagttaaaatcaaacaagcccctatggatgaggcagtaatttctcccaagcccctatggatgaggtagtaaattttcattgatcattgcctcggggcactggcaatttatggagaacagcacaatagattgttaaatcttcatacttcaactagccatgttttagttttttttttccgattgctctgtcaacattgctattccttctttaccttttgcaataatttttcgtggtctagtttactactggtcacactttgtggcattctatttgtattatttgttttatctattgaaaaggaaaatttcattaagaggtagcttatactgattgccgtaagtcaattttaaacactggatggaggggtgtgagttttaaaattcttgtacaccccaatttcttacttaactggaatcctatttttactcgagggtggataaaaagcacacccgtaccattggatatgctaccctgtatattaacttcactttttccctcactcctatgcaacctcatagccgttacgtattcgctaaatagtaaatcccttattattttagattttacggctggttatgctcataatgggaacaatctggtgtagggttaatggagattacattagaaagtgataccttgattgtcaactctatgacaatggacctcatttaagatttaacccctgatgtgctgcagccaggtcgaaatcctgatgtgtcagcatgcatgttatgtccagttagtagactcagaattttaagccatacattattaaagttaggggatcatgtcagttgttcaccctggagggtttatagggctagaagatctagtaaacaacaggctctatgaaactttaaatttaccagtactatgtgggggcaagtccagctcacacatttgtactttatctatatcattcatttgctttaggggctgcttctgctccaggaagaggtagtattagcatgggatagagacagcaaaggcccacaagccacatctcatctaggtagtcaataaagaagctatatggaaagagagcaatggcacaaagaagcgtaacttcttctgctctctcttctttggccgtttgttattgagaaatggttggaggcttctggtcttattaatatgtaatagggtccctccacaccggcttatcaggggaaccatccaacctggacctctgattagcagcagctttcctaatggatggacttttggttcttatgctgctgcacttgtaatgagatcttaaaaactaccactgcagacttaatctgnacactataaaagaaaattgtgcatgtgaaaatatgcccattataaatttgtagtgttcagattgagtttagaatggttgttttaagatttgtctataagcagggtatactgttaaaataatattcttggagggagttcctc

SEQ ID NO: 2659 - DNA, 2000 bp, Oryza sativa
accgttcgtcttaataaaaaacttttgtgaaatatgtaaatgtatatgtctacataaaaatatatttaacaataaatcaaatgatacgaaaagaattaataatgacttaaattttttaaataagacaaacgatcaaatatgtttaaaaaagtcaacggcgtcaaatatttaaaaacggagggagtatatgtgactcgtcacccgcgtaccatattccttcgattttgctagatattggtcatcaaatttctccccctaatatttgtcgtttttctgaccataggatttgtgctacgattcgtgcacatatgggggtggggatgcagctgcgtcaagtgtaatcagaccgcgcctgtagtcaaatttgggccatccctgtcaaatttcgggctccgcgcttttctgtccatagccgttgtgttttcctcaactctcttctcgctctctttccttctctttttttcttttcccttcagggcctgttttagtttcccaaaaagtttttacccaaaaacatcacatcgattacttagacacatgcatgaagcattaaattataaattaaaaataaaaactaattgcacagttaatggggaaattgcgagacgaatcttttgagcctaattagtccataagtgctacagtaacccacatatactaatgacgcattaattaggctcaaaagattcgtctcgtggtttccaagcgagttacaaaattagttttttcattcgtatccgaaaaacccttccgacatccggtcaaatgtatgatgtgacacccaaaaattttcatttcgcgaattaaacggggcctcattgttccttcgattttggaaaaatgtttggcactatcgtagtacttcatcactgtatcgttgtgaaaaatcggcccataatctcaccatttccagttcggcctatttgcaaaaaggaaaaggttaacttttcatccctcatctggctgagtttcaattacttccctcaaccataaaacgagcataatgtatccctcatcttctaaaaccataaaatgggtataacatatctcttatcttctaaaaccagtgtaaatattgagagtgattttgaatgatgtggcgctgatgtggcactaaataaaaactcatgtggaacccgcatgttagtgaaccaaccactctcccatcacccacatcacatgtcagtggcccctcccattgagcacaacaatgttgcccatggcttacgaatatcagggtttacattaccggttgacaattaaatttcgagccccatcggtatcacggttttcgataaatttcgaccaaatctattgtttaacctttgaaattccaatcaaaacttaattttgagccgtgtagaaacgtcgaaattttgcggaattcgaccggttttcgtcggaattataaaccctgcttacgatgacttcttcaagggctgccgctagtcgtcgctcctgcccaccgaagcagagcgtgcagagttcccatcgctgcctctgcccccgcagagtttgcctgcggagactgccaagatggcggcccttcgtatcccgtcagggcagcggcgggaagagcttgctgtgcagccgctgcttgaggagctcctgcgcttgatcggcctcctcccacacttcttctcatcttcgtcgtaggggccaccatggccaaggaggccatggcgcagtcatccccatcgatttgctccctctgcttgctcacctgccgccaccaatcgagttggaagaccttgaggagaaggcagggaaaccaagagaaagagggtgtggaggcggagggatatggccgcgtccgtacccgctcgctctccaatatcggttgccgatggtttcggtattcacccgcatcgccactcttgccaaaccaagcttgcaccggagttcccactctggtttctagtgccccggtgccacattggagcggagcgccccatcccctccattgcttcctcattgacgcgtctacctgctgacaaaag

SEQ ID NO: 2660 - DNA, 1173 bp, Oryza sativa
  N_region (7)..(7): n = any nucleotide
  N_region (63)..(63): n = any nucleotide
  N_region (65)..(65): n = any nucleotide
  N_region (88)..(88): n = any nucleotide
ggggctncttttcccccccccggcccattttccttccccttccctttctttctcccgggccgnanttctctcctctccttcccgtccnattccctcctttcctcctcccgcctaggcctgccccggcccaagccgagccgcagccctcccgcgcacgcgcgccgcacgcgcgctgaccgcgcggactggtgggtcccacccacccggtcgtcgtcctcctcccgcccggctcctccttctcccatgaaaccctatcaatttcctccctcaaatctgcgcgaatcaattcccttctttccaaattgattagggggaattaatcccatttccttcctcttcaatcccccctaatttccaccttgaatggcaccctcaatcgcccggaacggccgcgccatccccggccaccttccatggccgccggcagccattctcggcgccgttccgccctctcccgtgcccggctagctcccctccgctataaaatgggatcctcttcctctgttctctcattttagcctcctcccgtgccaccccgtggccgcaccgcctctccccgcagccctcctctctctctcccgtgtcgccggccacctccagccgcctttgccgcctcgcccatgcaccggtaggccgtgctgtcaccattctcggcgtcgcagccgcctcctctcccccggcctgccctccatttcgcgcggtgaccgccggaggcgcgtcctcgtcgacgtccagtggtgttgccgccactgcaccacctccagttgccgacgtcgccatctcctccttcggtaccgcggcatcgacctccaccctagcctctccttccacctcaccgacgtttccttcggccactccttcctccgtgcccgtgtgccggccgacgtcgtcgtctcctccggcatcgcagcggcaacgtcgccctcggcctcgcctcccctccacccgtaccccgccggtgtttgtcatcgtcgtctccatccgacgtcgccatcccctcctccggtcggccgatcctcctcgccggcacgtcatcttgctgcgccgccaccgtcgtcggcattgcagcggcgtgttccatgccgtcctcgcatccgtgcagctgctgccggctgccctcgtcgcctccccaccggcccggtcatcatcgccctctcgtcattcccggtcgtc

SEQ ID NO: 2661 - DNA, 2000 bp, Oryza sativa
agcttgaaccatcactcaaattaattaaaggcagatttacccctcgagtaattaaactccaacaagactcatagaaacattcatacaaaaacatttatatgtattacatgaacttagggtttattaagtactaactttctcttattcatattataaaatgttttaagttttaaatagtttcatgtatggacccatgtatgtgttttatatttgtttaaattcatatggatattagtaaatctaaacgatggatgaaaaggccaaaacatcctgttgtcgtttgggtatttaactgagaaaaaaaatttcacgaataattttgaacttctctcaccgaatagctgacgtgcacctaaatccattggtattgtatagagaactcttttaagtcctcgagagatgtcccttcaatatttgttcaaaaataccatccaaaaaagttattaatttttcttaaaaaaatgacaacgttcatacaatatacatatataccactctgaaaaatttaactctaaactcaacttacattgagaaacacacacaaaaaagacgacaaatctaacgtataaacagtaccgacactgtgtgtagattgaatttgaactttggtggaaacagatgtcacactatactctacaattgtcaaattttatcaaaatttttcataaccatttatattagagaaaacgatacacacaaaacattctctcaagtgattaaaatcctctttttggcgacatgtacctctcattagctcatcgatgatgctgtataatcgggtgggagcacctcggatgcctttgcctattgaactgtcaacaacatctagctatcagtgtttattctctttcagtggactcttcttcgaactgaattattacctgaaaagattttagaagaaaaactattaccggcatttcaatgaaaacatgtacatatatgcatatgcaagagaatcaatttagaattccagattcgatggagacacactaccacctcgatagattaggatgactagctagctagctaggattgccttgaatgaattgcagagacacatcaatgaccagttagttaagatcgaccaacaaatatataatttaaaaacatgattttgccggacaacgcattctccaattatatatatgctcctggattttacattttgtccaataaaaaaacatcttaattacaccactggtgtgagagaaattaatttgcttccctctatacatatataatagcaaattaaataatgaattaagctacatattttttcctctgaaattaataaacccaagaaggaaacgaatgaataaattaaagaggagctagcaggccacatgtgcacagtgcagtaaccaatatatacctaaagaacaaaacctgatcgaggagaagacatgtcatccaatcatacactgtacgcgcacacacacatgagacatatatacaccgatctgatctgatccaatccttgcttaattcttctccggctggccggcctctcctatagcttagcttagcttgcgagacttcgttccactagtcttctcctaatttcttcctcctgcaaatatgcgtagtcttctgtcatcgtcgaccgtcaagtgtgtctctcgctgcacacggagatgcatgcacctcttgattgattgctcggtcgactgattgcttcttacacaccgcaactcgctctaattagttggtttagcctgtttagatttgtagtattagaatcgtcacattcaatatgtactagatttatttattttgagacgagctagagccgcttgattattgtcgatcggtactagctagtgctacttagtaagccggctagtggagtactcaatctctgctactactcggctagcagctggctgctgctgcagcagtagaacatcaagagaggaggttaattagctagtacgtagtaccttggctgctttaatgaactcgatcgatccacagctagctagcatagcagagcagcagta

SEQ ID NO: 2662 - DNA, 2000 bp, Oryza sativa
  N_region (181)..(181): n = any nucleotide
gcacagttcatcaattgaagtaaatatttactaatgtgagattcctgtaggtcaccaaactgattacaaagactgcaacccaagtatcatccatgcagaatgataggtgacaaacagatggctttaccggcttcacaatacattgagtaagttgatttctcgccccccccccttccccccnaaaaaataaaatttctgactgactaatatcttccaatgcaacgtacaaatattgatctcataccgttaaacgtgttattggtaagcacgtagcgagatttgatataagttaaattccacattgttttatgtttttctaccctacatctctaccagctttatagctatttggaatataagagttctccatcaacgtagatggtgtcatctagtttgcatttacatggcccccacatcagcctgttgaaaggtgttgtgtgacatgatggacctgacgaactggggtgtcatatgctgatttagtggtatatcaccgatcagttaatcaataagctgcccttcttctacgagctgcacatgtaacagttaatcgatggtgacaaatgtggcaattaatcaatggcgatcaagatgtgtggcctttgatgtccacgatccatcaatatccattagcgtcttatataccatcaatcttgccatgatttggccttctttggatggttgtggacgcccaaaatttgacacattcctgaacaaggttttaaatactggttttaaatattgcctccagcctctaggaaaatactggttctagatactagtttccataagcaaccgtgctgttcaaactgcatcttctaggctgccggatgggttctgttaacattcacatcgccacagtgggtttcttcgactcaagcgctttcatgacaggtttagtcttggtttggtatttgaagcaggtatgctaatttttttccaattacttaagagcttaataaatggtcgtagtcaatctacacacagctagcaacttgggttttggcaccgagtagctctcctctcaatcataacattgttggcattgactatgggtggaatcatgctcgagtgatgagctatgccagcatactatcattgttggcattgactacgcgtggaaacatgctgccagcgctaaaaaattctatcattgactctttaaaaggatattttgggagatagttggtgtatccagctgctactgtttcgggaggactacatatatttaaatattgtatgtgttgttatagttttataaaaaaatcaaacattattccctttttttaaatatccatctaaaatggtaaccaagtaccccttccagctttatagttcttgacgttttggacaatgacatgttcaacatatctttgactacgacttttttttatcatataataaaaaataagtaaatatttaatcttttttttttcgaacggtcaggctgttgccgatgttttatattaagaagaaggtgtcccattttaaggagcaaacgggatcaaaccttacagtgtccagttaattagggaaaactgaacgaaaaccacaactacaacaccacgctaacaactaacctaacctaaactaccacgatggagcccgacacaaggcatcggccaagctttgtcacaatggtgataaaatagcccacacatgttatcgttgccgagcttgccgcccaagcgacacagcagcttcgacttcactgcgatgctaccctaacgccaaaagaacaagcataaacgatacccatgaaggacatcagcccaaacagctaaggaaccacttcctacacacagctaacatcaacaaccttataaagagattgcggtgtgtcatcgttgccgagcttcgtcacacccctacaacgaagcagctctgactctacctagtagtaaccaaataagaatgatgaacacccgccgtagagtaagaaacagaaccaagacagagaagacctcgtcaaacaccttaggcttgaagagcttcagagg

SEQ ID NO: 2663 - DNA, 161 bp, Oryza sativa
  N_region (9)..(9): n = any nucleotide
  N_region (49)..(49): n = any nucleotide
  N_region (57)..(57): n = any nucleotide
cagcacacngtactgaaattaactgacacgtacgtatcctaggctgtcngctcggcngtgagggtgatgaaggaaaggcggcgtgaattcaatcaagctggaagggagcgcgccgtcgaggatcagcgcggcgagggccatcgtggacgccgggatcgccg

SEQ ID NO: 2664 - DNA, 2000 bp, Oryza sativa
cggagaggaaatcgcctgggaatcgcttcgtgcaccgaggggatcatcggagagagaggacggagtttgcttcggcggtgaaaacggaggaaacggtgtgagatttctcggggacaacggttagtatttaaagcgttggaataacggtcggaaaacggcaagtgcaatattctctcgcagtcgacgtatggcaaatccgaaacattatccaaaattctggacttggggggcatgtgttagtcggacagggttagccgattgagccgaatccgacaatatgacacggcatatgttgtcgggttagaatgacgtgcttcatgatgattgccacacatggatagagtcctaagaaggcaattgtatctattaagtaggatattttatgtaatttccttagagatatgtttgggcaaaagtctgctgcaaagacttatggtatcttagagtttgttagagataagaaacgtgtccgatatggacatattttgtaatttttgggtataaatagacccgagccccatataatcgaactaacacacgttcactacaatctcggcgcatcgccgaccctttttactttcattttgttttgacgagttcttgctttcgggttgagctgcatcggtttcgatcttcaactagaggtaaaactcgttatggcggcttgcgttctcgggattagtgcttccatctttatgatacactaatcttgtttatgtaattcgtcgagttttcatatatcttatataatctctggcaatatcgctatctaacctctaatcggctaacgtctgttactagaaggcagccgattaggttaaatatcgatgctgacttagattatataggatatctaccactctatgaaacatccaacgacttgattgtctagatattgtccttcttttcatacttatagctgcatcagttgagtttaatcttatgagtgatgattagaatctcaatctctaggctgcctttggctgccgattagggtagcgtcagagtttcagccgatcttacctgatttaactaccattttctcatatgcttaattgacatgttaaatctgcccttaagtatattaggcttttgtttggtgtattctacttgccttaatatcttgatatagagtggtatcggagtattagcctatacatgctagatctatctgatcggctatgctatgaacatatatagtctcgttgttaacatatacttcgatctatgtgatttatactgtctcgtcatggcgacagatcaatcccaatcacttgatttaagtatatagcgacataaggattatatattgttaatatctacaactgatcgagtagatttaattagttctttcttacttattcatgattgccgatcgatccacatatgacatcggctccaagataaatgatacttcatcggcaattagccgatcggctatcgtttatggatttaaccgtggtttctttgtctttgtttcttgttgattgcaggatcaaatcaactggcacgctcatacacctaaaggcaagcttctggacttacactggagttaagcagatctcccaggcctcgtgtttttacatggaataagttcaccggaggtccctcaaattgacaccgagattttttaaggtccctaaactagaataccagaaatgtgtacccctaaaattactaaatccgagattttttaaggtccctaaactagaataccagaaatgtgtacccctaaaattactaaatccgtccgtagaaggtccctcggcagtattgactcagtttttgcccggttttgttgacgtgtcgcgctgtgggacccactggttagtccaccaattggggagttaatagacggggttaaagggctctgtcctcgctgtttccaggcgttgccgcgacattttcctcttctcgagctgaaaccctagcttaggtcggcggcggcggcggaagcggcggcggcggcggcgggggcgacaagaggaggtgaggctagg

SEQ ID NO: 2665 - DNA, 2000 bp, Oryza sativa
aaccttggtcaactggctgcctgctcctctaaatgttttttttaaaaggatgaactagcatggtgatccgcgcagattacacggctagcatcattatattttctttcatataatagtataaatgttttctcattgtattattaaaatatattaaaatgataacgtaattttaaattttgtactaactttacgaaactactaatgtgtaatattcatattatattttatatgcattttatatgcatgttagttattaattattttaatatcaaattttagttatatctaaattatattcctatatggactatagactcgcctttcaatatttcttttttttattccgaattttcgttatgtgtacattgtatttctatatagactctaggctcttctttcaatattatctatttttaattctaaatttttattatttctaattatatttctatctggactctaaactcatctttcaatattctttaatttttaatttcgaatctcagttacttctaaattctattcctatattaactttagactcttctttctatgtttttttttaatttcgaattttagttatttgtaaattgtaatataaactctaagctctacttttaattttattatgtttattccgaattttaattagttttaaattcctatataaactctgtactctacttctaatattctttatttttaattccgaatttctattatttcttaattgtattatatatggactctatactctacttctattgtactaactttacgaaactactaatgtgtaatatttatattgtattttatatacgtgttagttattaattattttaatatcaaattttagttatttctaaattatattcctatatggacctagactcgtctttcaatactttttttttaattccaaatttttagtattttttattccgaattttcgttatgtgtacattggtatatctatataaactctaggctcttcttctaattttatttatttttaattttggaatttttattatttctaattatatttctatgtggactctaaactcatctttcaatattctttaatttttaatttcgaatttcagttagttctaaattctatttctatattaactttagattcttctttctatgttttttttaatttcgaattttaattatttgtaaattgtattatttttatatgaactctaagctctacttttaatttttttatgtttattccaaattttaaatagttttaaattcctatatagacactgtactctacttctaatgttccttattttttttccgagtttctattatttattaattgtatttctatttggactctatactctacttctaatattcgttatttttaactctgaatttctattatttcttagttgtatttctatatggactgtagtctcctcttccaatattccttattttttaattccgaatttcaactatttccaatttgtatttctatatatatggactctgtttttcttcttctccgattaatatgagaatttctagaccgtgagagcgagcgtggaggctcttttttctattcttttaataagttaatagatgattgaatagctgaattttttgtgataagtattcaatggtacaaagaatgaattcaaaattcaatgcaacaatatgcttcaaacaaccttggtcaactggctgcccgctcctacatccacatgcatgcttcacactgccacctagattaattacttcctcacgaagcaccaagtcttagtcgatcaccaaatcatttgcacgaatatgccttctcccattccttttctagtaaattcacatcaattttaataatcaataatcatccaaacattagtgaaagtagtactatatatatatatgtgtacaaacattacttctgcccaaccacggttagccacatagtagtaattaatcagctagtcagcttacacttgtctacacgcggcgagcgg

SEQ ID NO: 2666 - DNA, 2000 bp, Oryza sativa
  N_region (910)..(910): n = any nucleotide
ctgttcacctctagttatcatgtactattctctagtagtagatatgttaccatttgaggctggcaccagtccctctttatttatttggaactggttttgggcagttagtgtgtcggtgttatgggcccagggtacgtacggagggaaaaggtcgcctcaatcccacgtggtgtgcacccggggctggcgtgctggctatcttccacaaaaggggtcgggctgccctgaccccctccacacaccaccacgcgtgtgtggcagcgcccacccactacatttattgaggagggttaacgcagcacgtcacattaaatgcagtgtgcaggcgcactaaccggccactctaaatcagaatgattgatgtgacggcgggcactcagatatacattctcccccgcgtcaccctccctcacgggcgatacgggaggcggaaaccgccagcgtcgccgctccacccttcctccctctgccgcctcgccgccgcccgagcggccgcggcaaagccgcgcggtcgcaaggagggcggcagcggggcttcgtcgccttcgtctgcctctcccgtcggcgggtggggggcacgcgagacagagaaggccgcccagatccgggccgccgtggccggatctggcggggaggccgccggtggagggtcggcctaaggtggcggcggcagttggtggcggcggcagttggtggcggctggcggcggggaaagcgacgacggtaacgggagtaacggcggcgtcggggaatagtgaggaggcgccggcggcaggaatggagatggcggcggggaatggagggtggcggcgaggctgaacgataacgggtggatctggcggcgaggctggcgacggcggccggatccaggcgttgcgggccgatttggcccccccgcatggcgacggtntcggggcggctgtgttggaggttgcggcggttttgcgaacggctgctgctggcgtcagtggctggtggcggcggtagcagcgacggcagccggctttgcggcgaccgtgcctgaggaggcggcggcgacgtcggcattgaaggcggggaaggagtcggatgtgaggtgacggcggcgacagtgaggtggtggtgaccgtgtcggtggttggaggaggcatggcggcctcggacggcttgccgagggcgtggcagacggctacatcgaaccgacgtagcatcttttggaggaggggtcggagaccggcatgacgcatagtggcgcagccgatggcagcggaggccggctcggtgcgagaggcgcgggcggtggagatggaggccggcttagcacatgaggcgcggccgatggagggaggccggattggcgcgagaggcacatccggtggaggaggccggcttggcgcgagaggcgcagccggcggtcgaagaggcgacctcggtgcatggtggagctgccgttgggtgtggtgcggtcttcggcgcacgaaggttggccggcggggggcgtcggtgcaggggccccacatgtcgacaaagtttgagtggtggtggagcatcggtgcgtcagccgtggattcgtaggtggcgagcggcgggtgaaaacctagcccggccttagccgaaccgacaacgatggttaattccccctcctgagggcgttgtcgtgctgtcttacccctcaagggcggttgccgggcgtaagcccagtcttggctcctttgagccctgacggacggcggcggcggttttccgtcgcttctcttcttgaagacgttgttttggcaaccccttgctgtagggcgatctcgtatgtgttcctttgttggtctagcggcggccggtcacgcttagcggcggccggtccggtgctaaccttctcctgtcgtgtgtgttgacgctgccggtgtgtgggtggtggtatattttttctttttcctggttatgaccctccagggttgtaatcttgtaattttttcgtgctctatcaatagaacatcgcaccatcttgtgcgagtcgttaaaaaatg

SEQ ID NO: 2667 - DNA, 2000 bp, Oryza sativa
catattctcatttttccgtgtctttgtattggcgaatcttacttgttggctctgctttaattcttcaagagagcatgttaaggccctttagattgtcgtaacctgtgcgcgcttccccctttgtttgaagcacttcagagtaattaatttatctagttctattaaatccttgtatccttgtcttcttcatttgctgacatttgtcgtgatcagtttgttctggttcagttaggttggtggtataattttgttctattaactaaaagatctctcttcttgtatgctcaaaataactaaatagcacgattaactgtttgacaatccaatggttccaaccgtacagtctgttttgtctggaattatatgttctttactctgtctgctttgtgatataggctttggctctttgcattagagatttgcagtcagtgctattttggcaactttgcattgaaagataaactattcctccatcgagcggaggatctgccccaagtttttttttccccgggtagtgatgcccccaaggttaatgttgtttatttgcctctgtcaatgtttttcatggctagttggttgcgaaagtgagttagagagctctgatggtgtcacaggggtcaccgggtcagggggtgtcactgattgaaacatgcgtgtttggccgtgttgggttggttgcttgattagcatgtgcctgagaaagttgcacgcccgagacttaaactgatattgtcgtagcttttgcctgaccgggcaagcctcccgcgatcggccccatcgttttacttattcgtggaataaaccaaacaatatatttgtaaacgaaaagtaatttataaataaaattttcatatgcgtgtatttagtgatttaaaagtaatggctggaaaataaacttcgatgaaaaaactctaaaatcaactctaaattaaggttaaaaatttaaaatttggctgagaagcataagtataaatgaaaagacgccgatagttgtttcggtgatgagttgagcgcgtgcgcggcaagccaacgccgccgtcagatccatcggtgcacaggatagagaaatctaagacgtagtcatggagctttgtggaatgggggtttgctagctgtgaaattcttatccccttctaccttgcttttcgagaagatgtcggcagaactctcttgtgattaaaaagttgagcagtttcgcctggatctcaggcgtccgaattcgcacgccggactcatgctaatgatgcgttggagctactcaatttatcaggcctccaatcaaacaccttttaggcaagtcacaaggaggcatcatgttaggcttcttctatccaggtagtaaccaaaacaaacctacaatttgacctattcgtcgtgactgaaacaccacggcacagacaacattcttcatgtttacaacaagttccgtagtaccggtagtctacaaaagcattcaaactgggaacttcgtctacacatcttgcaggttttgcttcagaaactgcccctctaggtccttatttggttgtcctgagaacgagctggattgggctgcaattcctgtggattggacagacgcggagtgaaacccggcccacataaaaatgtgcattcggttaagcccatcgcggattgaatcaagacggaataagttcacctaacgtccctcaactttacatctagtctgtctgtctgaggtccccaattcgcaataccagaaatctctatccctcaactattacaaatcgtacaaaaaagatcccgatgcaatattgacccattttttccctgtttcattgacgtggcatacggtgggttccacatgtcagcataatctcttctcatcttctccttttctttttcttttttctttaggaactctttgtcttgcgttggcgtcagcacctccttcaccgcggcttccatggtgtgtcaccacaacttgttggcccgccgcaccgcacgcgccatcttgcacatctccccgccgtctcgtgggc

SEQ ID NO: 2668 - DNA, 2000 bp, Oryza sativa
  N_region (225)..(225): n = any nucleotide
gatgtgacaacaatccaatatgacttgctaccaaactagctagtcctatatggagttacagtatattgcaaccttatttggcacaaatcacacccgtaccttaagaaaaatatcgaagctaacaccgccggaacgcgcgagcacaaacatatcgcattcctattctttttttttctttttagagaatcgcattcctattttttttaaagagagaatcgcactccnattttttttttgagagaatcacatacgtgatctttttttttttggagaatcttctttccctatatatttcaccaccgatttgtgcattatgagagatgtacgcgagggcacctcgaacaagctagttctccctcgcacgtgcctgcatgtttgggacagtttagggccaataagaagttcatacggtatttcttttaacttattttttgaattctatctttggttgtgtatagattccaacttttttctttaaacttttaacttttccgtcatattaaatgtttggacacatgtatgaagcatcaaatgtggacaaaaagaaaaactaattgcacagtccgactgtaaatcttttgagcctaattacttcatgattaactataagtactacactaattgcatagtgctacagtactacagtgattagccataacttttccgtcatattaaatatttggacacatgtatgaagcatcaaatgtggacaaaaagaaaaactaattgcacagtccgactgtaaaattgcgagactaatcttttgagccaaattatgtcatgattagtcataagtgctacagtaacccatatgtgctaatgacggattaattaggctcaaaagattcggctcgcagtttacagtcggaatctataatttgttttgttaattagtctacgtttaatacttcaaatgtgtgtccatatatgtaaaaaaaaaattcggcatggaactaaacactgcctttgtaaagtttctacgtttctacatggaagcttctacaaaagaaaattttcatctcaaaagttgggtagaatcaagtgagatatagttcgttcgtggcaagcgctctggaatgctagaaaatcagaaagaaacgtgttaattaatattttgaaaattttagattattctcttcatcttaaaatatagaaaaaaattacaaaagcaaccctataagtcacttaaagtttgacgttccatcacataagttattttgttgtaaatgctcacccatctactcaattttatagtaaaaaacaccttaatgcgcaagtgcttaatcaaattaacccattatcgctgatgtagaactaccacatgctaagctagctgagttagtcttgtgcaagtgcttgcattagacttttcatattccattcaacattttggtgcatatagagaaactcagtgcaacaacgtttcaactctcatcagcaattctatttgtggaatctttcaaaaaaggtcaaaagtactctagaattatttaattttagtaaagatcatattgacagttcgcaatttatgaaaacatgtttattcggttaagcacagattaaacacaagttaaagacatgtttaaaggtaaagcttatcatagactcttaatccaaagacaatagaaaaatatataacatttactgcatcgaaataatttttattatctttctttccttttctctgtcctaatgcaaagtttccttctacaaatgttgagagtcaacattaagccattgttattatgcataacaattactcctaactactatccttctctttcttctatgttaagttaccttattaataactctaaaagcctgctattaattatcattgtatgtgctctaatgttgcaaatttaaacaaacagaccatgtaatatataaaataatatattagattattcatgaatgctaggggacgggatactgtaccccaataggataaccagctagcgtcatcagcgactggcaagagcctatgagaggaagcatcg

SEQ ID NO: 2669 - DNA, 2000 bp, Oryza sativa
gccatttctaacacggacggtaaccaatactgactgaaatggtcattggaaacggcagccgaaaatcttaaaaattttcgtaccgttttcaccactaatcggagccgccggatgggggggtcggcctgaccttcggaaacagtcgtgctctgaatcgcgcgtattgacatttccccctagcaactcttcagtactccacaatatcgatgcttttgagatagctactcggtgaatgagacagtccagtgatgctacctgtgagaactgagagcacaaaattcagcaacttcgttattgcgtttacgtgctaaaacgtggtgtttcctgtctctctgtctcgggtttctgccctgctgatgccaccaaagacgaccgttaaggttcgcttcgactggaacttgtactggtggtccgtcggctacacggtcaccattctgagagcaggtaaaataggtaaaatagaaggctataaaccagctataaacatattttaaaataataaagaaagagagagaagagcagcagactacatatctgtagcccagctgcagcacgaactctaaaatgtaatgtgtgtatgacaagtgagaccatgtattaatagtataataagcaactattgtatgaattagctagtagtgggttatattattaaacttgctctgagcatcgtcaatgggcatcggcaattcggcatcctgcaacctgaccagaagtgcagaaaaaaacgttggtgccgttctggtcatcatcgccagcgcggacacgcggaacgcgacgtcggccgccgttcgcctcggtggtacatgcgtccagtgcacgctggcgctcagctcctccagctcgctgcactcctctcgtagacgcggcccccggcggagaacgcgcggccggcgtcgaccacgacgtcggcgccagcagcgaggaataggaggaggcggggaggcgaggcgccatcaaggaacggcccgagcccatcatcgcaggtggcgaggatggaaggatgcagaacgggaaagaaggttgtgcttggagtgtgccaggagagctggagatgaacaagtgaggagatatgccctgcaatagtgcaatttgtcagcgggagaccgaggcgtacccggagaaatgtttggttcatgcctgcatacgtgtggagctgtgggctgggacaacatgggccaaatgggatggaatgtcagatcggggtaaaaggcctagtttcgtagacttgtggccttttgggcttacgagctttgacggccttgggaaaataggccagctgttgggttggaacttggatctggatctgaagtctggaaaggaataagttcatctgaggtcccttaactcgtcaacgaatccgattttcgtcattcagccagaaaaccagatacagtaggtccctcatctatcaaaactggtaaagataaggtccctcggcggtttagagagcagttttggctgacgtggcgtccacgtggttaatttgactcggtcttcgttacgcgtggcattgatgtggcgctttcgtggcaattctatcacagaaaaaattataaaaatcgtggccccacatgttagttacacaaaaagaaaattagaaatgttggggcccaagtgggccccacatccctctcccttctctctcttcttccctttccctctcagggcctgtttggtacagctccaactcctaaatttaactccaggagttgagtctggagtggagttgtggagctgcctaaacccagctccacaactctagttcattttgtgagagagctccacccagctccactcccagttttggtagagccgaaactgtttggctgagctccagctccagaaggggtgaagctggagctggagctgtgccaaacaggccctcactctctctcttcttcccgggagcgccggagcggacgggcgagtgggcggcggagcagcagccggcgacctcagcgaagcggcgcccttgctgccgccttccctcttcggcg

SEQ ID NO: 2670 - DNA, 2000 bp, Oryza sativa
  N_region (251)..(251): n = any nucleotide
  N_region (494)..(494): n = any nucleotide
  N_region (1252)..(1252): n = any nucleotide
  N_region (1260)..(1260): n = any nucleotide
  N_region (1391)..(1391): n = any nucleotide
  N_region (1477)..(1477): n = any nucleotide
gccggggggctgccgctcctcttctgcccactcgccggctgccgaccccctcgcaccgttgctcctgtccctccctctcgtcggccggcgcgcattgcctcctccctcgcagcgctcccgtcggacgccctctccggcagcgctgcgcgcgcagccgctaatctccctcccacccgtcggccggtgtgcgccgccgatgctctcccgccggcagctgcgtgcagctcccccctgccgctcctctccctccntcccgccggccggcatgcgtcaccgctcctctcgcgtcggaggtacgcgtggcgtccttggcgaggtcgtcgccgctccgcttgtgcctctgctctgcccgctgccgccgttgctccgctgcgaggacgagggagagcagagaggaagaagagggagagccgagagggcagggaatgacttgtagggcccacgtgggccccaccagtatttttttgtgtagctgacatgtgggcccacgtggnccctgctatttttaaatgatattttgtgtagctgacaagtgggcccacggttttattattttccaagatataattgccatgtcaatgccacgtgggacggagagctagtcaaacctgctacgtagacgccacataaaccaaaaccactgagggacccgctttggttttgatagttgagggacccgttgtatctagttttctggttgaaggatggaaatcagattcgttgacaagttaagggaccttaagtgaacttattccaaggtactttgacgcgagacgaagctgtggcccaatttgaagccggcgtgaggcccatgaaccaaccacagtttggccccattttgatggttaaaaaaggaataagttcatctaaggtcccttaacttgtcaacgaatccgatttttctctctcaaccgaaaaaccagacacaacgagtccctcaagtatcaaaaccggtgcagatgaggtccctcggcggttttgaggccagttttggatgacgtggtgcctatgtggctaatttgactcggtcttcatctgacgtggcgcttacgtagcaattcgacccgaaaaaataataaaacccgtgggacccacatgtcagtttcacacataaattaataaaaaatggtggggcccatgtgcgccccacatgtcattctcacccctcttcttcttcctcctctccctccatctccctctcttcgtctctctcccctatcctctctccaggtgcgacggagaggcagcggcncacggctnccggcgggagagaagggagcggcgcggcggtggaggcacggctccggcagctgtgggcggaagaggaaggggcggtgggagttggccctggctgcggcagacggtaggacatgagctgcacaaccgaggcncccccggcgccgactccttattgatgtcaccggcgccgccaaggctgacgaggtggacgcggtggtggtggaggaggaggaggacngcggcgcggcgcggttccatgagcggaggctggtggtggtgtttgtgctgccgtcccagccgatgtgcgccacgtgctggcggtggtggtccgccgcgccgccaccctcgccgccgccgcctagacacgtacacaacatcactaataccaaactcctaaatcaccccgcaaaaaacaatcgacaagatagagcagaagtgaagaataagcatccaagactccaaacaacgaaccttggggcttcttgccgctcttgccgccgccatcgacgacgtccacgctggatccattgcggcaggtggagaaggggatcacgatgaaccggtccatccgccgctgctccttgccactattactcatggctagctagccactgctagctaagctgatactatcttggaatcaaattgcttgccgctttggctgaacctgtactggtacgatcatttttagtaaaagaaagggttaattaagaaatggggttcttgacccttgctaaaaaaaaataatcttggaatcaaat

SEQ ID NO: 2671 - DNA, 2000 bp, Oryza sativa
  N_region (1693)..(1693): n = any nucleotide
tttagatttccgcttacttttccattacaagaacttcaatggtattaacaattaagtgctaatcttctatatgatgcactattcaataaattggagattatgtttgctccatttccttttcatttcatggcagacattattatatatgtactagaaagagtggtgaacatttttttttaagatttgatctattattgatttcacacagacatgcatcagctatcaggaccagttggaataattgaaatgctaattgagaactttgcatgcaccacatagtacagcaactactcaagccaagttctatttactagtgaagccatttccaacttatatcaatccatttattaggaatatgcatgtacattgtgtgtttactgagtttttacttgtagaatgtaccatcctagttatatttattttaaataaaactcccttagttgatctctgcaaattaggtggctagcttgtccttgcagtgagttgtcgtagtacaaatttgaaacagtcttcgggcttcagattttccatctacattaattatgaaaatgtcacctacatacatctcaattctaatataagttaacatttgcaagtgggagccaattaaactgtacttcagcacttatcttctttttatttatttactagctatgatttgcgacctgtgggtgagcaatcaacttcttgctgaagtgtcagagaagggtacctgaaggaacagaagatcaacactaacttaaaggctcatacatcatgtaagctaaaatcagtttgttcccatagtttgtgagataaattgcaatccttgctgcttgtaaattgtaattgaatctgttacgattgcaattatactgcttcaacataaatttctcataaaatggaactggtaatttaatattggtggattgtgagaatatcgaagctatgctacagattgaattaaatggaactacatcagttatgttattgacacttatcctgcacatttgacactgatcttcaattctgtattgaaatagtaggtgttgcatagattacttatcattaaatggagtattattataatctatatatctgacccttaatacttttgtctttctgataatctgattcaagtttttagatgctcaacttatcatggcggtcacaagatattttggagtggcatttctctacaagggaaatgccttgcctgttgtagatttgccatcgttttgtctcattttgtagattgtataggagaatttctctttttgtacaactaacctatgtacatggcatttgtaattaaatggaattggtatattcagtactagtggaatgtggatgcatgagaactgttggtggtatattcagttctagatcagtaggatttgattccatgaactatattttttttaacccaatgcagggcacactaacagaatatatgttagaaaaactgatatatgcaaactgcgtatctgtcagtaatccgttaactgtcggtaaaggaccatctgtcggtaacttccgtctgtcggtaattcatttgtaggactgtcgagttatatgtcagcaaacatttatctgtcggaaaagacctttgccggcagcacttggcctgacagaccctatctgtcgggaaaagttatgctgacaaataatttgacagcatataggtcctttcctgacagatatgtagtaagcnaacttggggcatggtgtagtgttacccgggcgaccgttcgcctacccaccaataataaagcgccacgtgtcgcaagggtaggcgaaacagtaaattcccaccgtctgagcggcacagtaaaaagcccacgaagggaaggcccaacactgttccgttcggcccgggaaaagaaaatatataaccaccactcgcaggaggcgaagcgcggcaaaataataatagccgcacaagtaacaaacttcattcgcaggaataatgtaggtttcagcaggagcatcggtcgaaagggggcgccacataccatacc

SEQ ID NO: 2672 - DNA, 2000 bp, Oryza sativa
gtctccttcctcatttagctatttgaacatgaaatactagcacagttatttttcatctgataagaaatttaatactacttatttagatgtttaaaagaagcttggcatttattttaagggcttgaagtagagctcgtattttgatgtaactctcctttaaatttattatgtgactcatgctctgttcaactaagaaacattaatcctgttgtttttctttaaagtttttttttccgaacggaacattttctttacaagttatcaatagaagcttcacactgatttacgtgaagattttggagtagtagcttagtttttttttttgacttagtggatgcattattcccaaacacggggagaagttaaactcactagctcatttatcagtgccatgtacaattgtgcaaaatattattgaagtgaagtatgtgtgtattttgtttataaactacatttgattcctctcaaacttgagaaagttgagataaagaaaaggagaaaacatttcatgtttaaatagctaaaaggagggagcatagacagttaatcctgtacgttccttacctgttggatggtggatccgtggctactgccaaagttgcagtcactcccaatccccattgcacgcctgccctgtagtgcaaatcatatcatattaatttgtttttacaattgcataattgcattgcagcgatatatacgacgaagcaaatataaaagagaccgagtcaatggtggcaacgtgatgtgcaacttggaggacgacttgtgttacatagggcttacatttgtttctttcttcatcttccttttcttttcttaaaaaaacaaacatgaggacaaagcctgcattgtcagataggtttcacactcacacctatggctatactttagtttggctatcaactctcaagtcgacgaggcacatgctatctggacttccaacttttgtcgtccgagcagaaaagaaaattattgtttgccggcgagagaagcacacagaccactatattgaatcttttttataattctcatttaatatttcattagttctctttgataattgaaaaatattgaaattgtcaagtgtcaaccattctttgataataatttgagggtgaatagccaatctagtccctcaagttttaccagacgctaaagttagtccttcaggttttattttgtacatataaatcctttaaaagtatttattttggtttaaaattattcttggacccacttaatatgccacatggatatttctagtcaacgtttctattagaaaattttccctttgcccttaatatgcatacattagaaaagagataaacaatatgaataaatagcactgcagatgtacttcctattatttcaacatgtgcacataaaggttgagcttaatggctatcatatatacacttggaagcacgtacttattttcattttacataaactactatgcattatctataaacaaattcattgcatgcaaatttcaatgaaaaaagactatgtttagctatgtggtttctaagtggatttaaaaataaatttgaactaaaatgaaaatttgaaggtatagcatggatagactaaaagattaaggactaaactgagtctgagatgaaacttggagtaccacatttgctattcatccataattttatggtttaaattggcatcgggagaataagagagagagagaaaagggtaatagttagacatgttgagattataaaagagtgtcttgattgcttcaattttgcgttaccttaccatttcttatatagttgtatagagtatattattagaatattgattgaaattttcagcctccaaacaaccccgccaacccccttcctctgtctcctataattaaacccggcggccggcgaccaccaccaccattacgacgcgcgcgacgtcgaccaaagcaagcaaccaattcctcctcctcctcctcctccctctcctcttcctcctcctccgcgtcgagcgcc

SEQ ID NO: 2673 - DNA, 708 bp, Triticum aestivum
cgagcatgagtcacgagagctcgatgttcaaccagagacgcagagcctttcgaggaggcagaaagatgcctaagaacaaactacccggcaccaatatgtgacggaggcgctgcttcctctgcttctatcctcctctgatgcaaggttgttaacgtctcctcttgcctatgggttactaaggtatttcagcggagaagaacttaaacacgagcttgacgacatcgacaacctatccgcggagaggctggacgaactgtcggggctgtttctcaaggacttcaagaatggccggctggatcaccgtggatggccagttggagggttctcggcctacaaagtgtccaaggccctgatcaatgcttacacaagaattctcgccaagaagcacacctctatgcgcctcaactgtttagatcctggctatgttaagacagacatcaatttccacaccggggttctgaccgtggaggaaggcgcgagaggccctgtgatgctggcactcatgccaaaggaagggccgacgggatcctacttcaatggcacagaacaagcagccttcatgtagcgattgcatttttcttgtgctctgggtgttatccgtaacttatgcctggtgaactacgagtatattttcttaagatgattcatgttatatatactgtactactccctcggtcctgaaattcttgtcacggtggcaattttgga

SEQ ID NO: 2674 - DNA, 1002 bp, Triticum aestivum
  N_region (573)..(573): n = any nucleotide
aaacctcagatctcacccatcccacgccatggacgacgacttcgacatccccgcgggcgacgacatgatgatgggagacgggatgggtgacttcggcggcgccgaagggccggggatgaaggtgggcgaggagaaggagattgggaagcaggggcttaagaagaagctgctcaaggagggcgaagggtgggacacacccgaggtcggcgacgaggtcgaagtccattacactggcaccctccttgatggtaaaaagtttgactccagccgtgatcgtgatgacactttcaagttcaagttgggacaaggtcaagtaataaagggatgggatcaaggcatcaagaccatgaagaaaggggaaaatgctcttttcaccattcctcctgaattggcttatggcgaatctggttcacctccaactattccgggcaatgccacgctgcagttcgatgttgagctgctttcttggaccagtgtcagggacattgcaaaagatggtggcatattcaagaagatattgaaggagggagataaatgggagaacccaaaggatcctgatgaagtatttgtganatatgaggctcggcttgaggatggtactgttgtgtccaagtctgagggggttgaatttactgttaaagatggacacctctgccctgcactggccaaagctgttaaaaccatgaaaaaaggagagaaggtgctcctcgcggtcaagccacagtatggatttggtgagatgggtagaccagcagctggtgagggaggtgctgtgccaccaaatgccagccttgttattgaccttgagctggtttcatggaagactgtcacagaaataggggatgataagaagatcctcaaaaaagttctcaaggagggcgaaggatatgaacgtcccaatgagggtgcagttgttacagtcaaaataactggaaaacttcaagatgggacagtattcttgaagaaggggcatgatgaacaagagccatttgaatttaagac

SEQ ID NO: 2675 - DNA, 864 bp, Triticum aestivum
cagtttccatgaaacaactcaaggtcataatatgaccagcattggtggcacagcacctccgtcgccagctgctggtctacccatctcaccaaatccatactgtggcttgaccgtgaggagcaccttctctccttttttcatggttttaacagctttggccagtgcagggcagaggtgtccatctttaacagtaaattcaaccccctcagacttggacacaatagtaccatcctcgagccgagcctcatatttcacaaatacttcatcaggatcctttgggttctcccatttatctccctccttcaatatcttcttgaatatgccaccatctttgcaaatgtccctgacactggtccaagaaagcagctcaacatcgaactgcagcgtggcattggccggaatagttgggggtgaaccagattcaccataagccaattcaggaggaatggtgaaaagtgcattttcccctttcttcatggtcttaatgccttgatcccatccctttattacttgaccttgtcccagcttgaacttgaatgtgtcatcacgatcacggctggagtcgaactttttaccatcaaggagggtgccagtgtaatggacttcgacctcgtcgccgacctcgggggtgtcccatccttcgccctccttgagcagcttcttcttaagcccctgcttcccgatctccttttcctcggccacctttcatcccgggccttcggcgccgccgaagtcacccatcccgtccccatcatatgttgtcccccgggatgtcaagtcgcgtcctggcgggcggggaaccggggtggctggggagcggaggccccaggtggctcgaggcgagccaaaaagccggggtttcgc

SEQ ID NO: 2676 - DNA, 865 bp, Triticum aestivum
ccaaaccctagcgagctcccttccgcctcccccaagacacaaacctccagatcacacccatcccacgccatggacgacgacttcgacatccccgcgggcgacgacctgatgatgggggacgggatgggtgacttcggcggcgccgaagggccaggggatgaaggttggcgagggagaaggagatcgggaagcaggggcttaagaagaagctgctcaaggagggcgaagggtgggacacccccgaggtcggcgacgaggtcgaagtccattacactggcaccctccttgatggtaaaaaatttgactccagccgtgaccgtgatgacacattcaagttcaagctgggacaaggtcaagtaataaagggatgggatcaaggcatcaagaccatgaagaaaggggaaaatgctcttttcaccattcctcctgaattggcttatggtgaatctggttcacctccaactattccggccaatgccacgctgcagttcgatgttgagctgctttcttggaccagtgtcagggacatttgcaaagatggtggcatattcaagaagatattgaaggagggagataaatgggagaacccaaaggatcctgatgaagtatttgtgaaatatgaggctcggctcgaggatggtactgttgtgtccaagtctgagggggttgaatttactgttaaagatggacacctctgccctgcactggccaaagctgttaaaaccatgaaaaaaggagagaaggtgctcctcacggtcaagccacagtatggatttggtgagatgggtagaccagcagctggcgagggaggtgctgtgccaccaaatgctggtctatgttattgaccttgagctggtttcatgga

SEQ ID NO: 2677 - DNA, 551 bp, Triticum aestivum
tttggagagagggctttcaccagtggagctcaagattgaggacatctcgtatcaacacagtgggcatgccggggtagcaggtagcgatggagagacgcatttcaatgtgcgggtggtgtccaaggagtttgaggggaagagcatgctcaagagacacagggctgtgtatgatctcctgcaggatgagctcaagagtgggctgcacgcgctgtccatcgatgcaaagacaccatctgaagtctagttaaaaccaagatggtgtcatcgacatattgcatcactgataatcagttcttgaggatgattgtaaaattactttgatgggttggtgtcttggtgatccatagcttcattgcatattgactgtaccaggttagcagcaaggacaatgagcagaggagaaagggggtctccttctctaactcctatggaactcattgagcaatatagcaggagtgccttatttgaagatcatgtgtatccaaatgagccatccagggccaaaatctttagctttgagaatatccacgatggtatccgtgctcaataag

SEQ ID NO: 2678 - DNA, 584 bp, Triticum aestivum
agtacacaagaatcacaggacggtcagtgggttcccttggcttcgcagtgcacaccgaggctaaattggggtggctcggagcttcacctgacggcgttcttggttgtgaccccgacggtgggatcctggaagtcaagtgcccatacaacaagggtaagcccgagcttgctctgccatggcgtatcgtgccatactactacatgccgcaggtgcaggggctgatggagatcatgggccgagactgggtcgacctgtactgctggacacccaacgggagcagccttttccgagtgcctcgggaccgcgcatactgggagctcatccacgacgtgctgcgcgagttctggtggggcaatgtgatgccctccagggagctggtgctgctggggaaggaggccgaggcaagatccttcgagccgcagcccaagcaccggctgacaaatctagtgatagttaagagcaggaaactagcttctgaagccaagttgttatgtagggatgttggtggtcatgtagaattcttcccataagtgtagttctggcggtggttgtacactgtattctgtttattcgttaaatgaaaa

SEQ ID NO: 2679 - DNA, 616 bp, Triticum aestivum
ctgggaaccaatcatgaaagtatgctgtagagcagtacacgagcatcacaggacgtcagttgggttcccttggctttgcagtgcacaccgaggctaagttggggtggctcggagcttcacctgacggcgttcttgggtgtgaccccgatggtgggatcctggaagtcaagtgcccgtacaacaagggtaagcccgagcttgctctgccatggcgtatcgtgccatactactacatgccacaggtgcaggggctgatggagatcatgggccgagactgggtcgacctctactgctggacccccaacgggagcagcctgttccgagtgcctcgggaccgcgcatactgggagctcatccacgatgtcctgcgtgagttctggtggggcaacgtgatgccctcccgggagctggtgctgcttgggaaggatgccgaggcgagatcttttgagccacagcccaagcaccgactgacaaatctagtgatagttaagagcaggaaactagcttctgaagccaagttgttatgtagggatgttggtggccatgtagaattcttcccatgagtgtagttctggcggtggttgtacactgtattctgtttattcgttaaatgaaa

SEQ ID NO: 2680 - DNA, 637 bp, Triticum aestivum
gatccacccatgctccatgcctgggaaccatcatgaaagcatgccgtagacagtacacgagcatcacaggacggtcagtgggttcccttggctttgcagtgcacaccgaggctaaattggggtggcctcggagcttcacctgacggcgttcttgggtgtgaccctgatggtgggatcctggaagtcaagtgcccgtacaacaagggtaagcccgagcttgctcttccatggcgtatcgtgccatactactacatgccgcaggtgcaggggctgatggagatcatgggcagagactgggtcgacctctactgctggacacccaacgggagcagcctgttccgagtgcctcgggaccgcgcatactgggagctcatccacgacgtcctgcgtgagttctggtggggcaacgtgatgccctctcgggagcttgtgctgctggggaaggaggccgaggcgagatctttcgagccgcagcccaagcaccggctgacaaatctagtgatagttaagagcaggaaactagcttctgaagccaagttgttatgtagggatgttggtggccatgtagaattcttcccatgattgtagttctggcggtggttgtgcactgtattctgtttattcgttaaatgaaatc

SEQ ID NO: 2681 - DNA, 885 bp, Triticum aestivum
cgcggcaggtcgacgtcaacggcgatccatggccgaacatctcctccggcgccaaggatcgtgtcaagaagatgctcaacatcaaccccaaggagaggctcacggccttccaagtcctcaatcacccgtggatcaaagaagacggagacgcacccgatacgccgctcgacaatgtcgttctcaacaggctcaagcaattcagggccatgaaccagttcaagaaagctgcgctgagggttatagctgggtgcttgtcggaagaggagatcagggggctcaaggagatgttcaagaacatcgacaaagataacagcggcacaatcacgctcgaagagctcaagaacgggctagcaaagcagggcacaaagctgtcagacaatgaaattgagcaactcatggaagcagctgatgcagatggcaatggattgattgactacgaggagttcgtcaccgcgacagttcacatgaacaagatgcatagagaggagcacctatacacagcattccagttcttcgacaaggataacagtgggtacataacaagagatgagctcgagcaagccttgaaggagaagggaatgtatgatgccaaagagatcaaggagatcatctcagaggctgacactgacaatgatgggaggatagattattcagaatttgtggcgatgatgaagaaaggagcaggcagcaccgagccaacgaacccaaagaagaggagagatctagttctagagtgaaacatacattttagctcaaacagggagatgtgcagcaccaccagtgcagagtgcataatggaaccctctttccagatgcttctcagcttgagctaaaaccgtggacagatttgtacaatctactcactagttgctagaggatatcact

SEQ ID NO: 2682 - DNA, 611 bp, Triticum aestivum
  N_region (473)..(473): n = any nucleotide
attatgcaagctcattgataggatatgagccaagtggttactcgaatgagaggcacacctggatatttagctcctgaatggttgacatcacaaatcacagaaaaggcggatgtctatagcttcggcattgtggtaatagaaatcatcaatggaagaaagaatctcgacccttcccggtccgaagagagcatgcatcttattacccttttggaaaaaaaggtgaagcatgataacttggtagatatgattgacaagaccagtaacgatatgcaagcacacgagcaagatgtcattcagatgatgaagctcgcgatgtggtgtttacaaattgattgcaaaagaaggcctaaaatgtccgaggtagtcaaggtcttggaaggtaccatgaatgcagagagcaatatagatcataactttgttgcaacgaatcaagtgaattttcgcattgctgacaatgcggcttcttcagttcnacctctagcctcacatgtatcaggccccaggtgaaatgaggcaatcctgacaagataggcaattagattatgagctggacaggagattttcttaagaatagcaaaagccatgatctgttgtattttgtcaaacaacaa

SEQ ID NO: 2683 - DNA, 751 bp, Triticum aestivum
gagactcatggatatgtcaggaagaagtttcttctcctttcaacaatccctgtcttgatagtagcgctagctgtcttggttttagtgaatgttctggatgtcggaaccatggtgcacgctgcgctctcaacgatcagcgtcatcgtctatttctgcttcttcgtcatggggtttgggcctatcccaaatattctctgcgcggagattttccccacctctgtccgtggcatctgcatagccatctgcgcgctaaccttctggatcggcgacatcatcgtgacatacactctccccgtgatgctcaatgccattggtctcgctggagtcttcggcatatatgccatcgtttgtgtactagcctttgtattcgtctacatgaaggtccctgagacaaagggcatgcccctggaggtcatcaccgagttcttctctgtcggggcaaagcagggcaaggaagccacggactagttgctctgatccggtgatccgcgtcgctggtggtaattttgtggtgtcataactactactacactggttaacctgcgatgctttggtgaagaaacttcaaagagagcagatacggaagactttacatcgtgaggctgaattgtgtcgtcgtaggccggcttttggaagtaggatatgtacttagatcatctgctcttttcgctttggaactttctatttgtgttattcagaatttcttgcccatgtaactagtgctgttatcacaatttatcgtcgattatgt

SEQ ID NO: 2684 - DNA, 778 bp, Triticum aestivum
ctcctttcgacaatgcctgtcttgatagtagcactagctgtcttggttttggtgaatgttctggatgtcggaaccatggtgcacgccgcgctctcaacgatcagcgtcatcgtctatttctgcttcttcgtcatggggtttgggcctatcccaaatattctctgcgcggagattttccccacctccgtccgtggcatctgcatagccatctgcgcgctaaccttctggatcggcgacatcatcgtgacctacactctccccgtgatgctcaacgccatcggtctcgctggagtcttcggaatatatgctgtcgtttgcatactggcctttgtattcgtctacatgaaggtccctgagacaaagggcatgcccctggaggtcatcaccgagttcttctctgtcggggcaaagcagggcaaggaagccacggactagttgctctgatctggtgatccgcgtcgctggtggtaattttgtggtgtcataactactactacactggttaacctgcgatgctttggtgaagaaacttcaaagagagcagatacggaagactttacatcgtgaggctgaatcgtgtcgtcgtaggccagcttttggaagtaggatatgtacttagatcatctgttcttttcgctttggaactttctatttgtgttattcagaatttcttgcccatgtaactagtgctgttatcacaatttatgtcgtttatgtttttgtcttgctcggtcgattcagtttatcctttttgttgccactagttctcagttgccag

SEQ ID NO: 2685 - DNA, 659 bp, Triticum aestivum
ggtgaatgttctggatgttggaaccatggtgcacgccgcgctctcaacgatcagcgtcatcgtctatttctgcttcttcgtcatggggtttgggcctatcccaaatattctctgcgcggagattttccccacctctgtccgtggcatctgcatagccatctgcgcgctaaccttctggatcggcgacatcatcgtgacatacactctccccgtgatgctcaacgccatcggtctcgctggagtcttcggcatatatgccatcgtttgcatactagcctttgtattcgtctacatgaaggtccctgagacaaagggcatgcccctggaggtcatcaccgagttcttctctgtcggggcaaagcagggcaaggaagccacggactagttgctctgatccggtgatccgcgtcgctggtggtaattttgtggtgtcataactactactacactggttaacctgcgatgctttggtgaagaaacttcaaagagagcagatacggaagactttacatcgtgaggctgaatcgtgtcgtcgtaggccggcttttggaagtaggatatgtacttagatcatctgttcttttcgctttggaactttctatttgtgttattcagaatttcttgcccatgtaactagtgctgttatcacaatttatgtt

SEQ ID NO: 2686 - DNA, 619 bp, Triticum aestivum
aaatgtttatgaacatggacacagacaacagtgggacaatcacatatgaggaactcaaagcaggactagccaaacttggatcgaagctctcagaagctgaagtaaagcagttgatggatgcggctgatgtggatggcaatggatcaattgactacgttgagttcataacagcaaccatgcatagacacaagctcgaaagagacgagcatttgttcaaggcgttccagtactttgacaaagacaacagtggcttcatcacaagagatgaactggagactgctttgattgagcatgaaatgggcgatgcggataccataaaggacatcatatcagaagtcgacacagataatgatgggaggattaactacgaggaattctgcgctatgatgagaggagggatgcagcagccaataaggctcaagtagtctttccttagaaatggtgtaccattagcaactgttcttggttccttttttcgctgctgcacggatgagaagttctctttggcgttgttgagatgattgtgtatatcttgtggccttttgctcgtgcatgttgttcctctagtgttttggacctactttcttctgcaagctggtttttgcaagtacatctaata

SEQ ID NO: 2687 - DNA, 498 bp, Triticum aestivum
ccaacccaaagcccgtattttccctgtcacaaaacaatgagttgcagtactgtaatgaggtggcttcagagctgaaatcgagaggtatccgcgccgaggtatgccacggtgaacgtctgccgaagttaatcagaaacgccgaaacacaaaaggtgccgctcatggcggtcgttggccccaaagaagtcgaggccaggacgctcaccatcaggtcccggcataacggggagatgggcaccatgcccgtcgacgatttcatcagcaaaatccaatcggccgttgctgacaaatcttccctgtagatatcccagtctgttaaaacttcagttcatatcgtagagcagtagatcttctgctgcacatacaccgtacagcgcccaccggagtgcttccgacgaaaccgagcgacggaggtccaacaattttgtgcagaattgccatcacgacacactatatagtcagcaacagaagcccagcattcttgattgtacatagatt

SEQ ID NO: 2688 - DNA, 727 bp, Triticum aestivum
gatatagtcactatggcaaagggcatagggaacggaataccggataggagcggtcgttaccacacctgagattgctaaggtgttaacccgcaggagctacttcaacaccttcggtggtaaccctgtcagcacagctgccggccacgctgttctcaaggtactggagaaggagaagctgcaggagaatgcgttcgttgttggctcctacctgaaggagaaacttaacgctctgaaagagaagcatgacattatcggcgacgttagggggaaaggcctccttctcggggtcgagctggtgaccgatcgccagaagaaaactccggcgaaagctgagatcgcgcaggtcatgaaccacatgaaagatatgggcgtgctggtggggaagggcggtttcttcggcaatgtgttcagggtgacgcctccgttgtgcttctccaaggaggactccgacttcatgatcgaggtgatggacatcgcgctttcgaagctgtgaagaggcactgctctcatcgataaataagagatgatctgcgaaacagcacctcgttgtctcgtgttctgtcttgcaaacccatgatgcgcacatgcgatctgcgcctcctgaacattagtatgatgtactgagtaggagctctatgtgaccaataagttcttcgtaataagatattcagatgtgttatggcagcttttatgatacatgtatcctgcattcttcctgctatccaga

SEQ ID NO: 2689 - DNA, 780 bp, Triticum aestivum
ggtagcgcgcactgggagccacttcggggattcgaagggcagggtgtcatcctgatatagtcaccatggcaaagggcatagggaacggaataccgataggagcggttgttaccacacctgagatcgctaaggtgttaacccgcaggagctacttcaacaccttcggtggtaaccctgtcagcacagctgccggccatgctgttctcaaggtactggagaaggagaagctgcaggagaatgcgttcgttgttggctcctacctgaaggagaagcttaacgctctgaaagagaagcatgacattatcggcgatgttagggggaaaggcctccttctcggggttgagctggtgaccgatcgccagaagaaaactccggcgaaagctgagatcgcgcaggtcatgaaccacatgaaagatatgggcgtgctggtggggaagggcggtttcttcggcaatgtgttcagggtgacgcctccgttgtgcttctccaaggaggactccgacttcatgatcgaggtgatggacatcgcgctgtcgaagctgtgaagaggcactgctctcatcgataaataagagacgatctgcgaaacagcacctcgttgtctcgtgttctgtcttgcaaatccatgatgcgcacatgcgatctgcgcctcctgaacattagtatgatgtactgagtaggagctctatgtgaccaataagttcttcgtaataagatattcagatgagttatagcagcttttatgatacatgtatcctgcgttcttcctgctatccagaa

SEQ ID NO: 2690 - DNA, 913 bp, Triticum aestivum
ataggagcggtcgttaccacacctgagattgctaaggtgttaacccgcagaagctacttcaacaccttcggtggtaaccctgtcagcacagctgccggccacgctgttctcaaggtactggagaaggagaagctgcaggagaatgcgttcgttgttggctcctacctgaaggagaaacttaacgctctgaaagagaagcatgacattatcggcgacgttagggggaaaggcctccttctcggggttgagctggtgaccgatcgccagaagaaaactccggcgaaagctgagatcgcgcaggtcatgaaccacatgaaagatatgggcgtgctggtggggaagggcggtttcttcggcaatgtgttcagggtgacgcctccgttgtgcttctccaaggaggactccgactacatgatcgaggtgatggacattgcgctgtcgaagctgtgaagaggcactgctctcatcgataaataagagacgatctgcgaaacagcacctcgttgtctcgtgttctgtcttgcaaacccatgatgcgcacatgcgatctgcgcctcctgaacattagtatgatgtgctgagtaggagctctatgtgaccaataagttcttcgtaataagatattcagatgtgctatggcagcttttatgatacatgtatcctgcgttcttcatgctatccagaaaacaaagcattgccacatttacttgtcagaattccaggtgattcaaaagaataatatgaactgaccattaacatcctaagcaaaaatgtttgataatcaaccggatatggaacattactgtggttaaattacagccatagctaggccttttcaggaagatggtgttattgagggacagaaagaacttgtatatttacattactaagtttttcaagttgttataaaggc

SEQ ID NO: 2691 - DNA, 568 bp, Triticum aestivum
ggatacagaatcttggtggagaaccagccagtgtacattcacccaagcagtgcgctgttccagcgccaaccagattgggtcatttaccacgagcttgtaatgacgaccaaggagtatatgagggaggtgaccgtggttgacccgaaatggttagtggagttagcgccaagattctacaagggtgcagatccaaccaagatgagcaagaggaagcgacaggaaaggattgagcctctgtacgacaggtaccacgagcccaactcatggcgtctcagcaagcgccgagcttgatggtccatcataataccctaccacaagttttggcggaactgtaaatatttgtgctctgctcctagacactgttgcactaggtatttttacctaccggagtctagtcctggataccgttttatcttgagactagttgtatggatatttacacttcagcgcgcgaccattaatgggtgattcagtttttccagtttcggataatttagataatgaaatttgtaactaccaaacgttcggattttgtgattagatccggacgaactggatcaccatcgga

SEQ ID NO: 2692 - DNA, 1067 bp, Triticum aestivum
aagccagtgatatatcgggatttcaaacgttcaaatattcttttggatgcggaatacaatgcaaactctctgattttggacttggcgaaagatgtccctgagggtgataagacacatgtctctactcgggtcatgggaacatacggatatgcagctcctgagtatgttatgacaggtcacctgacatcaaagagcgatgtatacagttttggagtggtgctactagagatgatgtcgggcagaaggtcaatggacaagaacaggccaaatggggagcacaatctggttgaatgggcacgcccttatcttggagaaagaaggcgattctataggcttgtagatccccgtctagagggaaatttctccataaaaggcgctcagaagacggctcagctggcacatgcttgccttagccgggatcccaaggctaggcctctcatgagccaagtggtggaagttctcaagcctcttccaaacctgaaagacatggctagctcctcctacttcttccagtccatgcgccaagagcgtgccgcaagccttggcaacccaaatggtagccaaagcatgaaggcacagagcacctttgcacggaacggagtgcagccaatgaggagcctctcctacggtccgcacgcttctccgtaccgtcagtctccaaggcccaacgacaaacagccctaagactcacctgttcatcatgactggttcaatgttgggttctcgtcgagcactgatgggtaaatggcgcgtgcattggctgtggcctccgttgccgtggatagacagatgccctcaaggatgattagaattccgcagtgaagatttcttctcgttgcttagctttttagctgcttctgtatctattactctgggaacattgacttgggagggggaatcagacagggttctgtttgccatttgaacaatgctcagatggatgcttagaaactcccctgattggagaatcaaccatcggcacaggaagaagagcctggtgcatgtatggctctcccgtttcttattcagagcagatttttttacttgttaaagaaaaatcaaagaca

SEQ ID NO: 2693 - DNA, 657 bp, Triticum aestivum
tcgtgactgaggaatgaccacaaggatgttacaagcaaaattgagaagaatctggaagttttacactctacaaaattaacaagaaatgagcaatcaatcccaagaagttctggtatatcagctccactgcatggtggattgtctcaaaatgatcctatggaagaggatgtggtaaccagacttccttttgccataattgatgacattgcagatggttctcctgctgctttggatggcttgctgcttggggatgagatagtgaagtttgggagtgtagaggctggtggcagactgcaagaaaggcttgtttctgaagccgtttccaatgaggataatcaagtatctctactcatcattcgtcagggatcaccaatgaacttgacaatcacaccaagaaagtggcatggaagaggacttatggggtgccatttccgaatcttatgaagggccggtctatatattcaactgaagaatggcgtgctttcacgtctgcacttgtgctgacagctcttgccgctcaacgtttcaatcgagtcgaagtaaactgataacctgaatgcctgtacttactttacctgtagctgcgcttaaagtacatgccacttgtggaacctgtagttgccttggttacagctttatttggtacattcctatagc

SEQ ID NO: 2694 - DNA, 979 bp, Triticum aestivum
gggaggagtccatggagatgagcggccttcgagctgtggaagcacgagaagccccccaagatcttccccatgcccccgccgctgccgccgctgctggcggcggccggggcggggggctacgacgaggccacgctcgtgccgccgctcaacttcgccatggtcgacgacggcatctaccgctccggcttcccggccgccgccaacttccgcttcctcaagtccctcaacctccgctccgttgtgtacctctgcccggagccgtacccggagaccaacacggagttcctcgagaagaacggaatcaagctccaccagttcggaattgagggccgcaaggaaccattcgtcgagatacccgatgagaaaatccgggaggcacttaaagttgtcctagatgtaagaaatcaacctttgcttattcactgcaagagaggcaagcaccgaactggatgcgtcgtcggttgcatgaggaagttgcagaaatggtgcctgtcttcggtcttcgatgagtaccagcgcttcgctgctgcaaaagtgaggagcaccgacctgagattcatggagctgttcgacgtctcgagcttgaagcacctgaccaactcacattgttaaccaagggcgagtgatcgctcgccccgccgtcctccctgattctagtacatccctccggcggtcactggaccgaatcagcagtgaataatttttggaacccgtagaatgaatccatgagatagtgacgagacctctgcaaaaaaagaagattgaagaagaacttgagagctctattttttccctgctcaggtccctgcagatcctaagaaccagaaagttgtgggtaggattgcaagaggttttctttttcttcggttactcttgcgatgaattcaacattgttttcgggtactgaagctctgtactcgagcagcattgctaggcagagagcttggctcttctttacatgaatgcatctaaattgatc

SEQ ID NO: 2695 - DNA, 873 bp, Triticum aestivum
gtacccggagaccaacacggagttcctcgagaagaacggaatcaagctccaccagttcggaattgagggcccgcaaggaaccattcgttgagatacccgatgagaaaatccgggaggcgcttaaagttgtcctagatgtaagaaatcagccattgcttattcactgcaagagaggcaagcaccgaactggatgtgtcgtcggttgcatgaggaagttgcagaaatggtgcctgtcttcggtcttcgatgagtaccagcgcttcgccgctgcgaaagtgaggagcaccgacctgagattcatggagctgttcgacgtctcgagcttgaagcacctgaccaactcacattgttaacccagggcgagtgatcgctcgcccccgacgtcctcccagattctagtacatctccatgctgtcctccggcggtcactgaaccgaatcagcagtgaataacttttggaacccgtagaatgaatccatgagatagtggcgagacctctgcaaaaaagaagattgaagaagaacttgagagctctatttttcccctgctcaggtccctgcagatcctaagaaccagaaagttgtgggtaggattgcaagaggttttctttttcttcggttactcttgcgatgaattcaccattgttttcgggtactgaagctctgtactcgagcagcattgctaggcagagagcttggctcttctttgcatgaatgcatctaaattaatcagaggcttttggcatggcatgcgactaattgggctggcattggcacacatagaacttaatgagtaatgagcgtatgaatggcggatgatactaacatgtactcccaccgttcgtaaatataagtctttttagagatttcaata

SEQ ID NO: 2696 - DNA, 1135 bp, Triticum aestivum
atcacgcacacaaagcacacccatctcgtgggggattttacggttctgcccctgtccctgcccccgtgcgcgaccgggcgccatcatgaagctggaaatcatgcccaggcagagggccctggaggcggggcagcgggaggaggccatggagatgagcggcctcgagctgtggaagcacgagaagccccccaagatcttccccatgcccccgccgctgccgccgctgctggcggcggccggggcggggggctacgacgaggccacgctcgtgccgccgctcaacttcgccatggtcgacgacggcatctaccgctccggcttcccggccgccgctaacttccgcttcctcaagtccctcaacctccgctccatcgtgtacctctgcccggagccgtacccggagattaacacggagttcctcgagaagaacggaatcaagctccaccagtttggaatcgagggccgcaaggaaccattcgtcgagatacccgatgagaaaatccgggaggcgcttaaagttgtcctagatgtaagaaatcagccattacttattcactgcaagagaggcaagcaccgaactggatgcgtcgtcggttgcatgaggaagttgcagaaatggtgcctgtcttcagtcttcgacgagtaccagcgcttcgccgctgcgaaagtgaggagcaccgacctgagattcatggagctgttcgacgtcgcgagcttgaagcacctgaccaactcacattgttaaccaagggcgagtgatcgctcgcccccgtcgtcctcccagattctagtacatctccatgctgtcctccggcggtcactgaaccgaatcagcagtgaataatttttggaacccgtagaatgaatccatgagatagtgacaagacctctgcaaaaaagaagattgaagaagaacttgagagctctattttttccctgctcaggtccctgcagatcctaagaaccagaaagttgtgggtaggattgcaagaggttttctttttcttcggttactcttgcgatgaattcaccattgttttcgggtactgaagctctgtactcgagcagcattgctaggcagagagcttggctcttctttgcatgaatgcatctatattaatcagaggcttttggc

SEQ ID NO: 2697 - DNA, 564 bp, Triticum aestivum
cataaggttgaatgtctacagctttgggattgtcttgtgggagctttataactggcatgcttcctttcacaaacatgacagctgttcaggcggcttttgctgttgtaaataagggtgctcgtccagcaatcccacatgactgcctgccttccctaacccacatcatgacgcgctgttgggatgcaaacgctgaagttcgcccaccattcaccgagatcgtctgcatgcttgagaacgccgagatggaggttgtgagccatgtccgtaaagcacgcttccgctgctgcgttgctgaacccatgaccaccgactgaaactaaagcaggttagactatcgcagcgggcattagggaagaaaacaggtaaggatgaagaaaagaggcaatgccaatgtgttcatcgttgtcagtgggtggggtctgtgtgcctttaccagtgcgcattctgtcttgtgtaagttgcacacctcaagtaaaagtaatttcgtatagatgttgccttgtatgctaacaaagaccaaatggagcttttccgtgttaataatatccgcttgctcttgtactc

SEQ ID NO: 2698 - DNA, 698 bp, Triticum aestivum
aattgcagcagacagatccactaagactgctgactttggtgttgctcgaattgaagtgaaaacagaggggatgacaccagagacaggaacctaccgctggatggcaccggaaatgatccagcacaggccttatgatcataaagttgatgtctatagcttcgggatcgttttgtgggagcttataactggcatgcttcctttcacaaacatgacagctgttcaggcggcttttgctgttgtaaataagggtgctcgtccagcaatcccacatgactgcctgccttccctaacccacatcatgacgcgctgttgggatgcaaaccctgaagttcgcccaccattcaccgagatcgtctgcatgcttgagaacgccgagatggaggtcgtgagccatgtccgtaaagcacgcttccgctgctgcgtcgctgaacccatgaccaccgactgaaactaaagcaggttagactatcgcagcgggcattagggaagaaaacaggtaaggatgaagaaaagaggcaatgccattgtgttcatcgttgccggtgcgtggggtctgtgtgcctttaccagtgcgcattctgtcttgtgtaagttgcacacctcaagtaaaagtaatgtcgtatagatgttgccttgtatgctaacaggacctaatggagcttttccgtgttaataatatccgcttgctcttctacttg

SEQ ID NO: 2699 - DNA, 696 bp, Triticum aestivum
acagacagatccattaagatttgctgactttggagttgctcgaattgaagtgaaaaacagagggggatgacaccagagacaggaactaccgctggatggcaccggaaatgatccagcacaggccttatgatcataaggttgatgtctacagctttgggattgtcttgtgggagcttataactggcatgcttcctttcacaaacatgacagctgttcaggcggcttttgctgttgtaaataagggtgctcgtccagcgatcccacatgactgcctgccttccctaacccacatcatgacgcgctgttgggatgcaaaccctgaagttcgcccaccattcaccgagatcgtctgcatgcttgagaacgccgagatggaggtcgtgagccatgtccgtaaagcgcgcttccgctgctgcgttgctgaacccatgaccaccgactgaaactaaagcaggttagactatcgcagcgggcattagggaagaaaacaggtaaggatgaagaaaagaggcaatgccaatgtgttcatcgttgtcagtgcgtggggtctgtgtgcctttaccagtgcgcattctgtcttgtgtaagttgcacacctcaagtaaaagtaatttcgtatagatgttgccttgtatgctaacaaagacctaatggagcttttccgtgttaataatatccgcttgctcttgtactcgtg

SEQ ID NO: 2700 - DNA, 649 bp, Triticum aestivum
  N_region (61)..(61): n = any nucleotide
gagctcatggttatttgattgatcagttcttaaaggaccaagtcaatgatcgcactgacanatatggtgggagcttagagaatcgctgccgctttgcattggaagtagttcaagctgtagtcgatgaagttggagctgataaggttgggataaggctctctccgtttgcgaactattcagaggcatccgactcaaacccagaagctctaggcctatacatggcacatgcactaaacaaatttggaattctctattgtcacatggtggaaccacggatggtgaatattggtgaaaagtttgaaactccccatagtcttcgccccataagggatgcttttaagggaacatttattgtagctgggggatacgacagggatgatggaaataaagcaatcgccgacggctatgctgatttggtagcatatgggcgcttgtttttatccaatcctgacttgcctcggaggtttgaaataggtgctcctctcaacaagtacataagagatactttctacctctctgatccagttattggttacactgactacccatttctgccgtccgatgtctagatgggcctttcaggaatgaatccccaccccatcagatcgtctacctcatgtatcagtactatgttcacggaatacggtca

SEQ ID NO: 2701 - DNA, 783 bp, Triticum aestivum
ttgtaatcaacgatttagggctgctgctagaaatgcaattgaagccggatttgatggtgttgaaatccatggagctcatggttatttgattgatcagttcttaaaggaccaagtcaatgatcgcactgacaaatatggtgggagcttagagaatcgctgccgctttgcattggaagtagttcaagctgtagttgatgaagttggagctgataaggttgggataaggctctctccgtttgcaaactattcagaggcatccgactcaaacccagaagctctaggcctatacatggcacatgcactaaacaaatttggaattctctattgtcacatggtggaaccacggatggtgaatattggtgagaagtttgaaactccccatagtcttcgccccataagggatgcttttaaaggaacatttattgtagctgggggatacgacagggatgatggaaataaagcaatcgccgatgactatgctgatttggtagcatatgggcgcttgtttttatccaatcctgacttgcctcggaggtttgaaataggtgctcctctcaacaagtacataagagatactttctacctctctgatccagttattggatacactgattacccatttctgccgtccgatgtctagatgggcctttcaggaatgaatccccaccccatcagatcatctacctcatgtatcagtactatgttaaaggaataaggtcattgatttcatgctcatgtgtatcggcacggtatggataaaatatgtaatcatcattgcattta

SEQ ID NO: 2702 - DNA, 855 bp, Triticum aestivum
  N_region (36)..(36): n = any nucleotide
agagctcagttgtcgcacagacacagtaatcctctnttgagcctggcatactgttgccactcatgctcacaagataaacagtgacaacgacctgcggaccaagctgcaggagctgggctctatgacccaaatgcaggatccgccattactactccttgagaacgagtcatatcagttgtgcctcactatcctccagaatatattcttggacagagctccagatgaagggagcttagaggtcgaaacccaccttgttggactttgcaaggaggttcttgaggtatacttgagcacagcaaggcctgctcacctttctggtggtatacagccgcttggtcattggcttattccggtcggttcgtcaaagcggagggagcttgcagccagggcaccgcttgttgtgtcaacattgcaagctatcagcggtctcggcgactcatcgttcgagaagaaccttggccagttcttccccctactagctggtctcatcagctgtgagcatggttcaggtgaagtgcaggtggccttgagtgatatgtttagcacttgggttggcccaatcgtgcttcagtcatgttgatgctgaagcaccctgtgatatagtatacctccacatgtaagttattctttgttccagacttccagtgtcatatctttctgttgctccgtttccccccattttgttgtgttcattattttagtcgttgtgggaagtggtgtcttgagccgaactgatcatgtagatcctttccccttttatgctcttggttttctgcattgggagcgtgtatgtacaagatgattaaattatatgccttagtatatagttcaccaagttattgggcagttcgttct

SEQ ID NO: 2703 - DNA, 642 bp, Triticum aestivum
atcatgtggacaactgctgtatgcagcttgtgcaaaacctgaacagtttgatgttatggtcaccccaaatctttatggcaatctggtgtctaatgtggctgcaggtattgctggaggcacgggtgtcatgcctggaggcaatgttggtcaggaccatgccatctttgagcagggcgcttctgcaggaaatgtgggaaatgacaagattgtgcaacagaagaaagctaacccagttgctctgtttctctcgtccgccatgatgctgaggcatttgcagttcccgtcatttgccgaccggctggaatcagcagtgaagagtgtcattgcagaaggcaaatacaggaccagggatttgggcggcaccagcaccacccaggaagtcacggatgcagtaatcgccaaacttgattagccgcaaattgcgtgcttttcgagactagtttttttgcgcccctcggactaggccgttagtccggactgattttcgtttattgtagctttagattgtcattttgttcagcgaatcactgtaaatcttccggtgcgttctttctggttttgcttcagaataatttgagcaactcaccagaaacttgccaagttataactggaaataagatcgaaaatataaagaaacgatct

SEQ ID NO: 2704 - DNA, 687 bp, Triticum aestivum
tgccgtgaggttgcgacgaagtatcctggaattcaatatagtgaaatcatttgtggacaactgctgtatgcagcttgttgcaaaacctgaacagtttgatgttatggtcaccccaaatctttatggcaatctggtgtctaatgtggctgcaggtattgctggaggcacgggtgtcatgcctggaggcaatgttggtcaggaccatgccatctttgagcagggcgcttctgcaggaaatgtgggaaatgacaagattgtgcaacagaagaaagctaacccagttgctctgtttctctcgtccgccatgatgctgaggcatttgcagttcccgtcattcgccgaccggctggaatcagcagtgaagagtgtcattgcagaaggcaaatacaggaccagggatttgggcggcaccagcaccacccaggaagtcacggatgcagtaatcgccaaacttgattagccgccaattgcgtgcttttcgagactagtttttttgcgcccctcggactaggccgttagtctggactgattttctttaattgtagctttagattgtcattttgttcagcgaaccactgtaaatcttcgggtgcgttctttctggttttgcttcagaataatttgagcaactcaccagaaacttgccaagttatataactggaaataagattgaaaatatcaagaaac

SEQ ID NO: 2705 - DNA, 795 bp, Triticum aestivum
  N_region (4)..(4): n = any nucleotide
  N_region (6)..(6): n = any nucleotide
  N_region (18)..(18): n = any nucleotide
gcgntnaatgtacatatncattcctatcaatacagattggacagctgtccacagttcctccgaagcaaagaagcctggaactagccagggagtatgcacataacaaacttagtctacccaaagaggtgttccagggtggctttatccttgagaagatcgatggtccactgtctacaggccatcttgtccttgcagacactgatgtcaagaacaacccggcagttactttcaactatttcagccatccacaagatctcagccgttgtgtctatggcatcaagaccattgagaaaatattgaagacaaacagtttcgctcatctgactcctgatgatgatgctggatatgaaatagaaagggtgctcaacatgagcgtgcgggctaacgtgaatctgatacccaagcataccaataccacagaatccctggagcaattttgcaaggacacggtaatcaccatctggcactaccatggtgggtgccatgtagggaaggtggtcgaccagcagcaccgagtgcttggagtctcagggctccgggttgttgatggctcaacgttctctaggtcaccagggaccaaccctcaagccacggtcatgatgatgggcaggtactttggagtgaagatcttaaggcagcggctaggacgagcagctggggtgtagtagattcctgaacacctgccttttatgatgtgtgtgtgacctagaaaagaaatcactaatttttgctgggatccagtgtgaatcaccaatgtaagacattctaggagtttcatctgtacccagtaactat

SEQ ID NO: 2706 - DNA, 730 bp, Triticum aestivum
cccaaagaggtgttccaaggtggttttatccttgagaagatcgatggtccactgtctacaggccatcttgtcgttgcagacactgatgtcaagaacaacccggcggttactttcaactatttcgagccatccacaagatctcagccgttgtgtctatggcatcaagaccattgagaaaatattgaagacaaatagtttcgctcatctgactcctgatgatgctggatatgaaatggaaagggtgctcaacatgagcgtgcgggctaacgtgaatctgatacccaagcataccaataccacagaatccctggagcaattttgcaaggacacggtaatcaccatctggcactaccatggtgggtgtcatgtagggaaggtggtcgaccagcagcaccgagtgcttggagtctcagggctccgcgttgttgatggctcaacattttctaggtcaccagggaccaaccctcaagccacggtcatgatgatgggcaggtactttggagtgaagatcttaagggaacggctaggacgagcagctggagtgtagtagattcctaaacacctgccttttatgatgtgtgtgtgacgtagaaaagaaatcactaatttttgctgggatccagtgggaatcaccaatgtaagacattctaggagtttcatctgtacccagtaactatttgtcgcgtatgatattgcccattaaattgttactcaactcatcttgagcgct

SEQ ID NO: 2707 - DNA, 524 bp, Triticum aestivum
  N_region (49)..(49): n = any nucleotide
  N_region (496)..(496): n = any nucleotide
cacacgaaattcatcagcaacctcgcggatggatatggtacatggtgtngcgagagaggtgttcagctctcaggagggcagaagcaacgcattgcagtggcccgtgccatcttgaagaacccagtaatcttgctactggatgaggctacaagtgcattggacagccagtccgaaaaggttgtacaggaagcacttgagagagtgatggtcagcaggacaagtttggtcgtggcacacaggctcagcacaatccaaaactgtgaccttattgccgtgctaggaattattgtggaaaagggcacacactcgtccctcatgtcaaagggttcctcgggaacatattataacttagttagtttgcaacaagggggcgaccaacactaatatttgcatgatctaccatacatcagtctttttcaaaattttaccttttttagatcttttcgaattagaactgcaagcaagaatgataaacagatcactgtaagctattttncctcccgttgttgtatccgtatatacaa

SEQ ID NO: 2708 - DNA, 686 bp, Triticum aestivum
acaatgcccataatgatgtcaagcctggcatgttcttgtaacccgccgaaaaaggaaagcacctcttgcaacttggatggattttgggagttcgcggcctgcaaagaaatcaaattcgttctcgttctgaagcattacggttgcaggaatgggctgccgagcattgctctgcaccttttcgcgcacctgaattgtgggactgcccaagtcatgctgatatcgatgagaggacagacatttggtcgctaggttgcactctttatgcgatcatgtatggtgtttctccctttgagtatgctcttggtgaatctggaggaagcttgcagctggccattatgaacgctcagttgaagtggccagcgctaccgagcgctccctaccctgacgcacttcacaagtttgttacctggatgcttcagccacagcccgagatgcgccctcacatcaatgacatacgtctccacgttgacaagcttgtggagaaatactctccttaaagccagcttgcatattctgttctgactcgtttcttccttatacgattgcaaaaggggacatgttgtaagactcatgctctaggccttttcatcctttggaataggctcagtgtcaattctttatgtaactttcaggctgttaccgatatgtcgttctctaactcttgggaactatattagtcgcttatc

SEQ ID NO: 2709 - DNA, 697 bp, Triticum aestivum
  N_region (551)..(574): n = any nucleotide
cgggctgtccatcaccggcctgcgcttcttcacggtgtacgggccctgggggcggccggacatggcctacttctccttcaccccgcaacatcctgcaggggaagcccatcacggtgtaccggggcaagaaccacgtggacctcgcccgcgacttcacctacatcgacgacatcgtcaagggctgcctggggtcgctggacacggccggcaggagcacgggcaccggcggcaagaagcgcgggccggcgccgtaccggatcttcaacctgggcaacacctcccccgtgacggtgcccaccctggtggccatcctggagaagcacctccgggtgaaggcgaggaagcacgtggtggagatgcccggcaacggcgacgtgcccttcacccacgccaacatctcgctcgcccggcagcagctcgggtacaagcccgccaccaacctcgacgccggcctcaagaagttcgtcaagtggtacctctcctactacggctacacccggggatccaagaacttgtgaccgccggcctgcgccccgccgcgccgcccgaannnnnnnnnnnnnnnnnnnnnnnnaacccgtgctgattctttatttggatctccttctccgaccactcccggatcaaacatttttagtcccatggatgatggataggatggatcgtacgccgaacaataacagcattcttgtcatca

SEQ ID NO: 2710 - DNA, 765 bp, Triticum aestivum
  N_region (97)..(97): n = any nucleotide
acgcggccaccaagaaggccggcgaggagatcacccactcgtacaaccacatctacgggctctccatcaccggcctgcgcttcttcacggtgtacgngccctgggggcggccggacatggcctacttctccttcacccgcaacatcctgcaggggaagcccatcacgttgtaccggggcaagaaccacgtggacctcgcccgcgacttcacctacatcgacgacatcgtcaagggctgcctggggtcgctggacacggccggcgggagcacgggcaccggcggcaagaagcgcgggccggcgccgtaccggatcttcaacctgggcaacacgtccccggtgacggtgcccaccctggtggccatcctggagaagcacctccgggtgaaggcgaggaagcacgtggtggagatgcccggcaacggcgacgtgcccttcacccacgccaacatctcgctcgcccggcagcagctcgggtacaagcccgccaccaacctcgacgccggcctcaagaagttcgtcaagtggtacctctcctactacggctacacccggggatccaagaacttgtgaccgctccgccgcgccgccggaattcttctcctcccccaacccctcctgctgattctttatttccgaccactcccggatcaaacattttcagtcccatggatggatgatggatggatggatcgtcgtcgaacattaacagcattcttgtctcgattctttttggggaaatacgttttatggtgttctccgatca

SEQ ID NO: 2711 - DNA, 666 bp, Triticum aestivum
cgcttacgcggcgaccaagaggccggcgaggagatcacccactcgtacaaccacatctacgggctgtccatcaccggcctgcgcttcttcacggtgtacggtccgtgggggcggccgggacatggcctacttctccttcactcgcaacatcctgcaggggaagcccatcacggtgtaccggggtaagaaccacgtggacctcgcccgcgacttcacctacatcgacgacatcgtcaagggctgcctggggtcgctggacacggcgggcaggagcacgggcaccggcggcaagaagcgcgggccggcgccgtaccggatcttcaacctgggcaacacgtccccggtgacggtgcccaccctggtggccatcctggagaagcacctccgcgtgaaggcgaggaagcacgtggtggagatgcccggcaacggcgacgtgcccttcacccacgccaacatctcgctcgcccggcagcagctcgggtacaagcccgccaccaacctcgacgccggcctcaagaagttcgtcaagtggtacctctcctactacggctacacccggggatccaagaacttgtgaccgctccgccgcgccgccggaattcttccccaaccccccctgctgattctttatttccgaccactcccggatcaaacatttttagtccc

SEQ ID NO: 2712 - DNA, 700 bp, Triticum aestivum
gtttgtcgtcctcgcgacatcaggccagcaacgtgtgctcgacagtggcatgaatgccggctcggcgacttcggctcgcgatgctgtatgaccacctgccgacccggagacctcgcatgttgttggaaccatagggtacctagccccggagatcggccgcaccagcaaggcgaccatcctgaccgacgtgtttgccttcggcatattcgtgctggaggtcacctgtgggcagaagcccatcatgcaagattcgaaggatgatcagctcatgctggcagactgggtggtggagcactggaacagagggtcactggttgagacggtggatagcaagctccaaggcgactacgatgccgatgaggcgtgtgtggtgctgaaggtggggttgctgtgctctcacccgtttcctgaagcaaggcctactatgcggcaagtcttgcagtacctgaatggtgatatgccggtgccggaactagttccggcgcacctgagcctccagatgctggcgttcatgcagaatgaagggtttgattcgtacatcatgtcctatccttcgtcggtggagagcgttaacagcctcactagccttgtgcacgagagataggatagggtgttaacattggtttctttgtatgtattccttgtatcttgtatatgggcaattaagctcatacttgtgtatggtatatttgctcatcaa

SEQ ID NO: 2713 - DNA, 689 bp, Triticum aestivum
ccagagctcggcgtggcgcatgaacaggcgctgacgggcgagcagatggtggcgttccaggaggccttctcccctcttcgacaagaacggcgatggatgcatcagcttggaagagctgccgcggtgactcgctccctcggcctcgatccgaccaaccaagagctcaatgacatgatgcgtgaattcgacatggatggaaatggcaccattgatttccaggagttcttgagcctcattgccaggaagatgcaggatggagatggagatgaagagctcaaggaagctttcgaggtcctggacaaggatcggaatggttttatctcccctgttgagctgaggacggtgatgatcaatctcggggagaagatgaccgacgaggaggttgaggagatgatcagggaggcggacactgatggcgacgggcaggtgaactacgacgaattcgtgctcatgatgaagaatgccgagcgcaagataactgggtgaacaaaattaaatatgctgtttgctctaaaaatatatatgctggcgatagatgtgaaaccactggttctcagattggatgcactgtctccgttgtaaattcgctgcttgtggtactgttattttctgaagccactgtaagcttgtgtattcatcttagaagctgtttgtgcactatataaacggcaattgccacatatatttac

SEQ ID NO: 2714 - DNA, 598 bp, Triticum aestivum
  N_region (7)..(7): n = any nucleotide
  N_region (30)..(30): n = any nucleotide
  N_region (37)..(37): n = any nucleotide
gacaacncaaagcagcgtctctaatgttancagtaanagatgtcaacatgttcagaacaatgactggctgtcagaatcaaagacctggccagggtggtataggaactggttcaagacataaggttctcaaacatacaagtctccgaagttcaaacacctattatgatagaccagttctattgcgacaaaagaacctgcacaaatcaaacatcagcagtggcagtatcaggcgttcagtatgagaacatcagagggacatttacaatcaagcctctccattttgcatgcagtgacagctcaccttgttcagggatcacacttaccggagtacaacttaaacccgtgcaaatagcccactaccacctaaacaatccattctgttggcaagcttttggggaactcttcactccaaccatccctcccatagcttgtctgcagattggaaaacctgctgggaacaacttgcagtcataccatgacatatgctgaaacacagatagtatcctcatccattagttggtgcttattcatgagtggtcgttgtgatgcttccgaccctttgcaccattgcttcgtcatgtgcatatatacacagtta

SEQ ID NO: 2715 - DNA, 576 bp, Triticum aestivum
tcatcaaagatgacgttaagaaaagaaaagaagatgcattctctcaatggctcttggaagttgctgatttttctgccttgcctggcaaaggagttcaatgtttgatcaatgggaagatgattctggtgggcaaccgtgctttgatatctgaaaatggggttaacattcctgaagaggctgaaagtttcttggtagacatggaattgagcgcaaagacaggcattcttgtagcatatgatggcgacttcattggattaatgggggtaaccgatcccttgaaaagggaggctgctgtagttatacaaggcctaaaaaagatgggcatttatccagttatggtgacaggggacaattggaggactgcactggcggttgcaaaggagattggaattgaagatgtgagagcagaggttatgcctgccggaaaagccgacgtaatccgctctttccagaaggatgggagcgtggttgcaatggttgcaatggttggagatgggatcaatgacagatatatagctaatactccactctaagacagatatccaacatgcatctcaaagtactaagtaaaactaa

SEQ ID NO: 2716 - DNA, 800 bp, Triticum aestivum
tccgcgacgcgtggcgcaaagacagcattctgtagcatatgatggcaacttcattggtttgatggggtaaccgatccccttgaaaagggaggctgctgtagttatagaaggcctaaaaaagatgggcatttatccagttatggtgacaggggacaattggaggactgcactggcagttgcaaaggagattggaattgaagatgtgagagcagaggtcatgcctgccggaaaagccgacgtaatccgcattttccagaaggatgggagcgtggttgcaatggttggagatgggatcaatgattcccctgccctagcagcagccgacgtcgggatggccatcggtgcagggactgacatcgccatcgaggcagcagactatgtgctggtgcggaataaccttgaagacgtcatcacggcgattgacctctcacggaagacgttcagccgaatccggtggaactacttctttgccatggcgtataacatcgttgccatccctgtggctgccggcgcactcttccccttcactggcttgcaaatgccgccgtggctggctggcgcttgcatggccttctcgtcggttagtgtagtatgttcctcgctgctgctgaggagatataggaaaccaaggcttaccaccgtcttgcagataactgtagagtgattccaacctggaacctaacccgcctgtttttgtgtgtgacatttctacttgaaagaaatggatatggcatctgtttgtaactcagtgatgatacagtttttgacacctgtgcttgtaaatagcacatatatacaca

SEQ ID NO: 2717 - DNA, 554 bp, Triticum aestivum
tgcctgccggaaaagctgacgtaatccgctctttccaaaaggatgggagcgtggttgcaatggttggagatgggatcaatgattcccctgccctggcagcagctgacgtcgggatggccatcggtgcagggactgacatcgccatcgaggcagcagactatgtgctggtgcggaataaccttgaagacgtcatcacggcgattgacctctcaaggaagacgttcagccgaatccggtggaactacttctttgccatggcgtataacatcgttgccatccctgtggctgccggcgcactcttccccttcaccggcctgcaaatgccgccgtggctggctggcgcttgcatggccttctcgtcggttagtgtagtatgttcctcgctgctgctgaggagatatagaaaaccaaggcttaccaccgtcttgcagataactgtagagtgatttcaacttggaacctaacccgcctgtttttgtgtgtgacatttctacttgaaagaaatggatatggcatctgtttgtaactcagtgatgatacagtttttgacacct

SEQ ID NO: 2718 - DNA, 749 bp, Triticum aestivum
ctggtttcgacacgcaagatgaagatatccaggaacattgtcaggtctaatgggcaactaggcactgaatcggagattctgaccatcgatataaaaacccggatggaagaaagggaccaagatcacatttccggacaagggcaatgagcagccgaaccagctcgccgccgatctcgtctttgtcatcgacgagaagcctcatgatgagtacacgagggaaggcaacgacctgctgatataccagaagatcgacctggtggatgcattggcaggaaccacagtgaatctgaagaccctcgacgggcgtgacctggtgatcaagctgacagacgtggtaacaccgggatatgagcttgcaatcgccaaggaggggatgcctattgtgaaagaaaatgggaggagaggcaatttgagaatcaggttcgatgttgatttcccgaagagactgtcatcggagcagcggcagaatattaggaaggttcttggagggggagggcagcctcagcagtaatgatgacgttccggaagcaaattcagctctcccatagttgtccatgaaatgcagactaattcagatgttcttctttggttggcttgtatgtctagttacttttggtttgcgggtacttattcctgatctgctcctttgttgaagaaatagcgatagtaattgttgactactccatacagattacggtgtaatgctaatttgttcacttattgagtcacatattacatatgccgaaaat

SEQ ID NO: 2719 - DNA, 536 bp, Triticum aestivum
ggagcgattctacaatcctgattcaggcaccatctcattgcggcttgagtctatttcagactttcggtccaataaagcaaatatggaaatagctgactcttttgcttttgttgaatcggtggccattgcacttgtttgagatactccaatagttgctaaaaccagtgcaaagaaaaccttgaaaacatcaccaaaacttgattggccatggcgcacaaattgtgctccaacatagaaacaaagaccatatgtaaggtacagcatcaagaatgagaaaccaaatccgatgcctccaactattcctgttctgactccttgactcattgaggcttcacatttatcatcatatattcttgtaattcttttctcagaacaaaatgaagcgacggtcctaatactactaattgcatcagtggccacttgacttgcgtcttcatacatcatcttggcatcttgactgaaacccttcaagaacttcacttgggcataaccttgaaggcccactaatggaatcacacagaggatgatcaaagaga

SEQ ID NO: 2720 - DNA, 782 bp, Triticum aestivum
tcacatatcgtcactatgccctctattgaggtgggcacagttggtggtgggactcagttggcgtcacagtctgcatgcctggacctgctgggcgtgaaaggcgccaacagggaatcgccaggatcgaacgcgaggctcctggccaccgtggtggcaggcggggttctcgccggggagctgtccctcttgtccgccctcgccgccggccagctcgtcaagagccacatgaagtacaacagatccagcagagacatgtccaaggccgcatctctaagttcttgattgattgactcgacgagctgcagcccaagaaaccaatggagaaatctagagtgtggcttgattctacacacaggaagtgctcatcaacatcaagctgagaagagtttgaccagtttctttctcgatgctggccggtgtttctgtcgtcgttcttcgcgtgctgccgctgctggcatcgtcgacggacggccccgggcggcaccggagaagctaacctttttagcctgtttgtgttcataaggctttgtggttggttgggttggttaccttggcgcgcaaagtgtggggatctttttgtagcatcgaagtgtagagatctctctccttgcttcaggaagccagccttgtagtggtatctgtttcaccttttgtttgcttctttttcctttatgctagtcgaacaaatattacgaaaagatatggtaacgtgattgtagaaaaaatgtgggtctcggcggagattcatacacaagaagcaataggaaggcggcatccagtcc

SEQ ID NO: 2721 - DNA, 633 bp, Triticum aestivum
ctattacttgtgcacccaaagatggaaggttctttcttcggcaatatggatcagagaaactacgtcatgagtggcgggcatccaaggacacctttctatcaggcatttctcaagttggcgaagtccatatggttgttgcacaggctggcctactctttcgacccaaaggtcagggtcttccaagtgaagaaggcaagcgagttctcggagattcacatggtaagtgttgtgaagaacatcatcttggatgagaatgccgagaggcctagagtcgacttgatggtgatgcctggtttcttgatcgggactagcgtcatacagtctcgagtgtacctttctggtgtgaagtgtgccgactaataagtgttagggttgcctgagaagattccgggcgtttcacacatcctgcaagatcatcgtacatcttgtatgtaatgccgcctctccaaaatgttatttgtatgaaatgtggtagcaacaccttttcgtaaaaaacatagtatgctttggtcattcgaggactgtaatgtgtgctttgtctgttttgtaatatatgtaaatcctgtctttggtctacatataagttatgaaaaattgtcaatgtggtgtggatgtcgctatctgtatggtgat

SEQ ID NO: 2722 - DNA, 636 bp, Triticum aestivum
gatccttggatgattgagccttacccagattcagttttcggaaagttcttcagaagcaaatacctactgcttgtgcacccaaagatggaaggttctttcgtcggcaacatggatcagagaaactacgtcatgagtggcgggcatccaaggacacctttctatcaggcatttctcaagttggcgaagtccatatggttgttgcacaggctggcctactctgttcgacccaaaggtcagggtcttccaagtgaagaaggcaagcgagttctcagagattcacatggaaagcgttgtgaagaacatcgtcttggatgagaatgccgagaggcctagagtcgacttgatggtgatgcctggtttcttgatcgggactagcgtcatacagtctcgagtgtacctttctggtgtaaagtgtgacgactgataagtgttagggttgcctgagaagattccgggcgtctcacacatcctgcaagatcatcgtacgtcttgtatgtaatgccgcctctccaaaatgttattcgtatgaaatgtggtagcaacacctttttcgtaaaaagcatagtatgctttggtcattcgaagactgtaatgtgtgctttctctgttttgtaatgcatgtaaatcctgtccaaa

SEQ ID NO: 2723 - DNA, 710 bp, Triticum aestivum
gtaccaggataaagacatagctggagattgacagacataatcgccagcaatcaatcgcagtacttcagaaggaagctataggtggtctacgctaaatgagagcataccattaagtgagcaagaagatctcattgtttggatgagaactgctgccctcccaactttcaggaagctgtatggcagaattgagaaagatatcaatgcaaatgataatgtaacagtggttatacagaacaactataacacatatagttttggaggatcaaaagcgttggtcctttctactgcatcttggattggagggaaaaacaacttcattggcatggcatatctgactattggtggtttgtgcctttcccttgctatgggcttcttagttctctacatggttaaacggaggaactttgcagacccctcgaacctgtcatggaatagatgaatagagttaactattagactggagtatcctgtctgagaataaaagatcattcaatgggtgaattcctccaattggatctatgggtgtctgttcttattcccattcactgggcttgtcatggctcacaggcatgaggatcttgttgactttggagccctaatagcatcatacatacatgaacagaatgtattgtgatcagttgacttaaaccttatctgaccttatctgaccataccgagagtcgtttctgaatgcttattatgaattataa

SEQ ID NO: 2724 - DNA, 614 bp, Triticum aestivum
gccgagaattatcctgcattcgaggtgaacgccgacctagagggctattccagcagaaggaagatctccgagcaggtgcagaaagggtcggagaaggtcgcgaggctggacctcgagctccagaaaatacagtacgtgctgctgaagctcgaggaggagcacgagttcaagagggtcaaggtctccgagaagcgttcgcggctgctcttgagggactacgtgtacgcaaagaaggacaagaacgacgccggccagaagaagaagagtagggtgcccttctgcggctgcgtgcgccccaaaacaatgaccgagccttaaccgtttcgttctgtaggcggcccaacaggctcgtgctccttctgatttggagctgcagcaagtgatgtctttagtatctcttctgtatgggttgcatgataatgttaacaaggagctcatgcattcagagttttgtccttgttcagaaatgtcctctagtttaactagttaatcctactgataccgttatgaatcgaagcattttgtaattccgttgcccttcgctggttctatatgtctgcgatgacgatatatgagaatgcttctttcagggatataattttcactcccctttt

SEQ ID NO: 2725 - DNA, 716 bp, Triticum aestivum
gagaagctcgccaccgatgctcagggcctgctaatcatccaagcaagcatcgaggaagtgaagcagaaaatcgagggaacttccaagggcaaatctcccatgagctcagagtacagcagtatcagggctcagctgcaggagatcgagggctctgtcttggaacagataggtttcaacagcagtttgtacgaagaaggctgagaattatcctgcatttgaggtgaatgccgacctagagggctattccagcagaaggaagatctccgagcaggtgcagaaagggtcggagaaggtcgcgaggctggacctcgagctccagaagatacagtacgtgctgctgaagctcgaggaagagcacgagttcaagagggtcaaggtctcggagaagcgttcgcggctgctcttgagggactacgtgtacgcaaagaaggacaagaatgacgccgggcagaagaagaagagtagggtgcccttctgcggctgcgtgcgccccaaaacaatgacggagccttaaccgtttcgttctgtaggcagcccaacaggctcatgttccttctgatttggagctgcagcaagtgatgtctttagtgtctcttctgtaatgagttgcatgatgatgttagcaaggagctcatgcattcagagttttgtccttgttaaaaaaatgaggcaatgtccccctagttttaactagttaatcctactgatactgttac

SEQ ID NO: 2726 - DNA, 617 bp, Triticum aestivum
tgtgcagaagaatcaaatggcccatcacctcgagtatcaaggcgaccgcaagggcgaaagctgcagttgaagcagcaggtggaactgtaagattggtgtactacaacaagcttgggttcagggcactactcaaacctgaatggtttgcaaagaagggccgccttataccaaaagcggcgaggcctccacccaagcaacgagacaaggttgatagcattggccgactacctgctcccacaaagccacttcccttcacaccggaggaattagagtttactgccaagcgtgaagctgctaaagtgatcgctgcataggagggagtacaaatcactgaagaagcccatccaaacttttattacttacataagtcttgcaccgggcatgtataacaatcacttgctctttcctataggtgtattccttgtgggatccttgtgtttccttgtcatttgtgctacgcgggaatgacattttcttcttcaggtggcagtagtacctcctggtaagcaccagggctggccagtaaaatatcctgtaacagtcttttgagagatcagttcattgttttttgagagatcagttcattgttttcattaatagaaacttctttctctagg

SEQ ID NO: 2727 - DNA, 797 bp, Triticum aestivum
agaccgctttcactcacgttccagccctgtggactggggaaattgcgaagctcatcaatgctggaaaaatgattcctctgaattggatcacaatgaagaccctgaaggatacaagtgccattgggaaacaaataaaggatgggattcggttaatgggtcgtggtgcagaagaaatcaaatggccaattcatctcgaggtatcaagggcgactgcaagggcgaaagctgcagttgaagcagcaggtggaactgtaagattggtgtactacaacaagcttgggttcagggcacttctcaaacctgagtggtttgcaaagaagggccgccttataccaaaagcggcgaggcctccacccaagcaacgagacaaggttgatagcattggccgactacctgctcccacaaagccacttcccttcacatcggaggaattagagtttactgccaagcgtgaagctgctaaagtgatcgctgcataggagggagtacaaatcactgaagaagcccatccgaacttttattacttacataagtcctgcaccgggcatttataacaatcacctgctcttccctataggtgcattccttgtgggatccttgtgtttccttgtcatttgtgctacgcgggaatgacattgtcttcttctggtggcagtagtacctcctggtaagcaccagggctggcgggtaaaatatcctgtaactgtcttttgagagatcagttcattgttttcgttaatagaaactttttctctaggacatacttcaggaatgtctgccaacactataggacaaag

SEQ ID NO: 2728 - DNA, 569 bp, Triticum aestivum
  N_region (9)..(9): n = any nucleotide
  N_region (29)..(29): n = any nucleotide
  N_region (33)..(33): n = any nucleotide
  N_region (62)..(62): n = any nucleotide
  N_region (89)..(89): n = any nucleotide
  N_region (108)..(108): n = any nucleotide
  N_region (202)..(202): n = any nucleotide
aagctgtcnggggttccccgttcgagccngcgntgatcggctccggcacggacctcgaccangccacgctgcggtgcctcctggccgancacctcggttgtgggcgcncaggacgtgcaggcgctacatggtcggcgagcacggagacgggcggcctggcgctgtggtcgagcgtccgcgtcggcggcatgccggtgatganctacctccagaagacccactcgtcgttcgatgcaaaggctttggaggggatccggcgggcggtggtgggcggcgcgcgagaggtgatcgggctcaaggggtacacgtcgtgggccatcggctactcggtagccagcctggccaggtcgctcctccgcgaccagcggcgcgtccacccggtgtcggtgctcgccaaggggttcctccccggcgatgcccacgaggtcttccttagcctcccggccaggctcgggcgccgcggcgtgctcggggtcgccgcggagctggagctcaccggcgacgaagaaacgacgctccgccggtccgccgagacgctctggggctactgtctggcgctcggcctataa

SEQ ID NO: 2729 - DNA, 569 bp, Triticum aestivum
aattctgggcgctacattatgtgatgctctgtacaaaggggctgtgaagaagggttcagcatacccaagtgagatccacaagaaggatttagggtcaacatttgttaaccgtatgcaaattcatcatagagtagctagaggaaatgaggtggtcattcgcaagggcgccatacgcactgttcaaatcatgacagaaagaaggcaagggaacaagaagatgacccgagtctctggattggaatgctttttgctggatgctgactccttggcttctgaactacaaaagaaatttgcttgcagcaccaccacagctgagcttccaggtaaaaaggggcaacatgaggtcttgattcaaggcggagtcattgaaaaccttgcaaagcacctcgttgaccatcacggtgttccgaagagatatattgaggtttatgacaaaacaaagaagtaggaggggtgtcagactcctgggagtgccgtcataacattgttgaattctggttcaagcttgttgtgtttcagacttgttgtgaaaatgtgaaatgttctctcaatgctatattcgcgtttgt

SEQ ID NO: 2730 - DNA, 648 bp, Triticum aestivum
atcgtttgttttggtcaaaatataagttgcggccctgaccaatagttgcgcgggtcgcaacagttagtacattcatgtattcctcgaaataagtaacgggtttgagttctctctggtgcacaaccgtgaaaagctcacatatataatggagtggacggaatttgatcgcgccaccaacacacctacttgaacacctgttaccactgcgccaaggtctgctctacattgttataggcatgcacatcttatttgaccctgtttttacattcaaattcaagtttatccgtatttgtttgaacggtagtactgtttcttaggaggcagtggaaacacagaccgagggaaaaaaatcctggttctaacacaaggcttctgcatatcttgacaggaatttgatgacaactccgcttcaagtcaagtcttctggctcttgaaagaaagtgagctgacgccaagcaattccaatatattggatgggcggtattcggtgtttggatatgtaaccgagaatgaggatttcttggctgatctcaaggttggggacgttattgaatcgatccaggttgtctcaggcctagacaatcttatcaacccgagctacaagattgtagggtagcatgtttctgtatataagagttttttgacagg

SEQ ID NO: 2731 - DNA, 781 bp, Triticum aestivum
taacaggttcgagttctctttggtgcacaaccgtgaaaagctcacatatataatggagtggacggaattcgaccgcgccacctaaacacacctacttgaacacctgttaccactgcgccaaggtctgctctacattgttataagcatgcacatcttatttgaccctgtttttacattcaaattcaagtttatccgtatttgtttgaacggtagtactgttttcttaggaggcagtggaaacacagaccgggaaaaaaatccctggttctaacacaaggcttcttcatatcttgacaggaatttgatgacaactccgcttctagtcaagtcttctggctcttgaaagaaagtgagctgacgccaagcaattccaatatattggatgggcggtattcggtgtttggatatgtaaccgaaaatgaggatttcttggctgatctcaaggttggggacgttattgaatcaatccaggttgtctcaggcctagacaatcttgtcaacccgagctacaagattttagggtagcatgtttctgtatataagagttctttgacaggcaattgttctacggtattaataccgatgtcatgcgctgcaacttctaaccttgtactattgttttgtttcccgtttttatgcttatggttttgcattctgtggaattcaacagataatagatagaatcaaagattaatattaacacgtctcctgaacagataaggatcatgaaatatgactgtgtagagcctcaagttaaaattaaggattattgaaattcgga

SEQ ID NO: 2732 - DNA, 965 bp, Triticum aestivum
tttcgggtcttgctgaatcaaagagagcaaacggagaaaaaacattggataaattagctgttggacttgaagagcttcaacgaattattgaggatagaaacaggaatgcggtagctccaaagcagaaagagcttctcaattatgttggaactgtagaagaagatatggtcgatggcttcccctatgaagtaccagaagaatacaacaacatgcctcttcttaaaggaagagctactgtggatatgacggttaagattaaagataatccaaacgtagaagattgtgtatttcggatagttctggatggatataatgctcctgtgacttctgggaacttcgtagatctggtggaacggaagttctatgatggcatggaaatccaaagagctgatggtttttgttgttcagacgggagatcccgagggaccagccgagggttttattgatcccagtactggcaagagtcgtaccatacctcttgagataatggttgatggtgacaaggcgcctatatatggcgaaacacttgaggaacttggtctttacaaggctcaaacaaagcttccttttaatgcatttggaacgatggcaatggctagagaagaatttgatgacaactccgcttctagtcaagtcttctggctcttgaaagaaagtgagctgacgccaagcaattccaatatattggatgggcggtattcggtgtttggatatgtaaccgagaatgaggatttcttggctgatctcaaggttggggacgttattgaatcaatccaggttgtctcaggcctagacaatcttgtcaacccgagctacaagattgtagggtagcatgtttctgtatataagagttctttgacaggcaattgtcttacggtactaaaaccgatgtcatgcgctgcaatttctaaccttgtacaattgttttgtttccctttttgtgcttatggtttggcattctgtgg

SEQ ID NO: 2733 - DNA, 755 bp, Triticum aestivum
gtctccgggcacgtcaaggcgtgacgcccaagcgttccagcaggacacggagctgtgaagaagcggtccgccactacaagcggtgatccaaccagttcgagcagaaaggacggtaccggaacgtgctcgacatgaacgcccgcctcggcggcttcgcggcggcgctggcgagttacccgcagtgggtcatgaacatggtcccgaccgtggccaactccagcgcactcggggtggtctacgagcgcggcctcatcggaagctaccaggactggtgcgagggcacgtccacctatccgcggacctacgatctcatccacgccgactcggtgttcactctgtacaagaacaggtgtgagatggacaccattctgctggagatggacagggtcctgaggcccgagggcacggtgatcatcagagacgacgtggacatgctggtgaaggtcaagagcgtcgccgacgggatgaggtgggacagccagatcgtcgaccacgaagacggcccgctcgtccgggagaagatcctcctggttgccaagacgtattggactgccaagaaccaatagcaccagtggagtatagcatctatatagtattgctcataagcacatcgctcagaagatctcaaagttggatcgccatttgttgtagctccatgaactgcttattttatgctctttatttatgtctttatataggaaattcgtctccaagtaagttgtaaaacacagcataatttgtatgtgtcacttgaa

SEQ ID NO: 2734 - DNA, 791 bp, Triticum aestivum
tcggaattcccggggaagaagcgggtccgccactacaaggcggtgatcaaccagttcgagcagaaaggacggtaccgcaacgtgctcgacatgaacgcccgcctcggcggcttcgcggcggcgctggcgagctacccgctgtgggtcatgaacatggtcccggccgtggccaattccagcgcactcggggtggtctacgagcgcggcctcatcggaagctaccaggactggtgcgagggcacgtccacctatccgcggacctacgatctcatccacgccgactcggtcttcactctgtacaagagcaggtgtgagatggacaccattctgctggagatggacagggtcctgaggcccgagggcacggtgatcatcagagacgacgtggacatgctggtgaaggtcaagagcgtctccgaccggatgaggtgggacagccagatcgtcgaccacgaagacggcccgctcgtccgggagaagatcctcctggttgccaagacgtattggactgccaagaaccaatagcaccagtggagtatagcatctatatagtattgctcataagcacattgctcggaagatctcaaagttggatcgccatttgttgtagctccatgaactgcctattttatgctctttatttatgtctttatataggaaattcgtctccaagtaagctgtaaaacacggcataatttgtatgtgtcacttgatcgctaaattgcatcaagtgattaatagaagtactgtttgcgagttactccctctgtatcaagatataagatgtttct

SEQ ID NO: 2735 - DNA, 617 bp, Triticum aestivum
gtttatgaccgaggattgattggcattttaccatgactggtgtgaagctttctcttacttatccaaggacctatgatcttatccacgctagtggccttttcaccttgtatagcaataagtgcagcatggaagacatcctccttgagatggaccgcatcttgaggcctgaaggtgctgttataatgcgtgacgatgtcgatgtcttgacaaaggtgaacaaacttgctcggggcatgagatggaacacgaagctagttgaccacgaggacggccccttagtgcgcgagaaggtcttgtatgctgtgaagcagtattgggttggcggaaaccagacggccgcatcgtgaagaacatattctaacacggggaattctgggatccacctttgaagctggcgtccaggaattgagatatggagtcatcaggtgcgaacaaaaatggcctactctcctccggggtaccaatgaagcaatcaaggttgattggcagcagtatattgttgtaacagttttgtaatttaatttcattcgtcattcggcatgaagttactctggttaattgaaggatgtattgtcaagaaatattattgctttagtttctgtaatgttgctgatgct

SEQ ID NO: 2736 - DNA, 626 bp, Triticum aestivum
gccttttatgagagaggattgatttggcatttcaccatgactggtgtgaagcgttctctacttatccaaggacctatgatcttatccatgctagtggccttttcaccttgtataacaataagtgcagcatggaagacatcctccttgagatggaccgcatcttgaggcctgaaggtgctgttataatgcgtgacgatgtcgatgtcttgacaaaggtgaacaaactcgctcggggcatgagatggaacacgaagctagttgaccacgaggacggccccctagtgcgtgagaaggtcttgtatgctgtgaagcagtattgggttggcggaaaccagacggccgcatcgtgaagaacatattctaacacggggaattctgggatccacctttgaagctggcttcctggaattgagatatggagtcatcaggtgcgaacaaaaatggcctactcttctccggggtagcaatgaagcaaccaaggttgatcgagagcagtatattgttgtagcagttttgtaatttaatttcattcgtcactcggcatgaagttactctggttaattgaaggatgtattctcaagaaatattattgctttagtttctgtaattttgctcatgctgcaact

SEQ ID NO: 2737 - DNA, 759 bp, Triticum aestivum
tcctcgggagaacatgaattacagagaccgcattgcccaccgcagaaagaaaagttgcactgcctggtaccaccgcctaagggatatgttgctccattcccatggcccaaaagtcgggactatgttcctttcgcgaattgtccctataagagctttctctacttatccaagaacctatgatcttatccacgctagtggccttttcaccttgtatagcaataagtgcagcatggaagacatcctccttgagatggaccgcatcttgaggcctgaaggtgctgttataatgcgtgacgatgtcgatgtcttgacaaaggtgaacaaactcgctcggggcatgagatggaacacgaagctagttgaccacgaggacggccctctagtgcgcgagaagatcttgtatgctgtgaagcagtattgggttggcggaaaccagacggccgcatcgtgaagaacatattctaacacggggaattctgggatccacctttgaagctggcgtccaggaattgagatatggagtcatcaggtgcaaacaaaatggcctactcttctccggggtagcaatgaagcaaccaaggttcatcggtagcagtatattgttgtaacagttttgttatttaatttgattcgtcactcggcatgaagttactctggttaattgaaggatgtattgtcaagaaatattattgctttagtttctgtaattttgctcatgctgcaacttctgaatgtttgctttattaccaggtaatccca

SEQ ID NO: 2738 - DNA, 553 bp, Triticum aestivum
  N_region (51)..(51): n = any nucleotide
  N_region (230)..(230): n = any nucleotide
  N_region (311)..(311): n = any nucleotide
catcatgggttccccggcgactcaccaatattccggcggtgtcttcttccntagcaatccacttcccgacccgactacccctttcaagcccccgaaaggtcaacttcaccacccgcatctaccaccccaacatcaactccaacggcagcatctgcttggacattctgcgagaccaatggagccctgctctgaccatctcaaaggtgctgctgagtatctgctcgatgctnacagacccaaaccccgacgacccgctcgtccccgagatcgcacacgtctacaagaccgaccggtcccgctacgaatcgacngcgcgcgagtggacccgaaagtacgccatctaggccctcgaagcgcaacaaaggagcgtcaagactgggtgcggcggagagcgtgtcttttgtcgttagcatctgcgaaagggaggccaggatgatggttgttaggggcagactttcatggtagtgactgatggggggttttacacttgtactacggcatgcatgctggactggggttcatagcatctggctattatcactcttaccacaac

SEQ ID NO: 2739 - DNA, 632 bp, Triticum aestivum
gatctacgagtaatataagggatggaaccacctcaagggactatttctgtttgcgaagctcaaaggaaaaccggggagaccttcttaaatgaaaaaagctccagatcccatcaaatacttaaattgactgttgaaagttctgctcgtgaattcttaggaaaggacaagtcaaccacccttgtggctagtgtgaactttgttgatctggcaggaagtgagcgtgcatctcaggctatgtcagctggcacaaggctgaaagaaggttgccacatcaataaaagtttgctttcccttggcaccgtcattaggaagctaagcatggggagtaatgcacacgtaccgtatagagattccaagcttacacgcatattacaaccttctttgggaggcaatgcaagaaccgcgattatttgtacactcagccctgcaacaagtcacattgagcaatcaaggaatacactgtttttcgggagttgtgcaaaggacgtagttacaaatgctcaggttaatgtggtcatgtctgataaaacactagttaagcatttgcaaaaggaagttgccagactggagagtgagttgcggcagccagtttcaaactctagtctggaagcacaggtgaaggcaaaggacaa

SEQ ID NO: 2740 - DNA, 1075 bp, Triticum aestivum
agtgaggtgagccgctgagtgacaagagattgcaaggggtgagcctgccgagtgggagtgcatcaatgacaccaccatcatgttccggagtaccttcccggatcgacccacggctccaaccgcatacacatttgacagggtatttcattctgagtgcagtacgaaagaagtctaccaggaaggggtcaaggaagttgccctctctgtagttggtggcattaactcaagtgtttttgcgtacgggcaaacaagtagtggaaagacatacactatgactggagtgacagaatgcacagtagcagatatatatgattatattaacaagcatgaggagagagcattcgtgttgaagttctcagcaattgaaatatataatgaagttgttagggatcttctgagtgcagaaaatactcctcttagactttgggatgatgcagagaaaggcacctacgtggagaatcttacggaggttatattaagggactggaaccacctcaaggggcttatttccgtttgcgaagctcaaaggagaacgggggagaccttcttaaatgaaaaaagctccagatcacatcaaatacttaaattgactgttgaaagttctgctcgtgaattcttaggaaaggacaagtcaactacccttgtggctagtgtgaactttgttgatttggcaggaagtgagcgtgcatctcaggctatgtcagctggcacaaggctgaaagaaggttgccacatcaataaaagtttgctttcccttggcactgtcattaggaagctaagcatggggagtaatgcacacgtaccgtatagagactccaagcttacacgcatattacaaccttctttgggaggcaatgcaagaactgcaattatttgtacactcagccctgcaacaagtcacattgagcaatcaaggaatacactctttttcgggagttgtgcaaaggatgtagttacaaatgcccaggttaatgtggtcatgtccgataaaacactagttaagcatttgcagaaggaagttgctagactggagagtgagttgcggcagccagtttcaaactctagtctggaagca

SEQ ID NO: 2741 - DNA, 471 bp, Triticum aestivum
  N_region (64)..(64): n = any nucleotide
  N_region (159)..(159): n = any nucleotide
  N_region (170)..(170): n = any nucleotide
  N_region (172)..(172): n = any nucleotide
  N_region (190)..(190): n = any nucleotide
  N_region (234)..(234): n = any nucleotide
  N_region (301)..(301): n = any nucleotide
  N_region (310)..(311): n = any nucleotide
  N_region (316)..(316): n = any nucleotide
  N_region (328)..(329): n = any nucleotide
  N_region (331)..(331): n = any nucleotide
  N_region (375)..(376): n = any nucleotide
  N_region (461)..(461): n = any nucleotide
  N_region (466)..(466): n = any nucleotide
acaaacaatgagctgcagtactgtaatgaggtggcttcagaactgaaatcgagaggtatccgcnccgaggtatgccacggcgaacgtctgccgaagttaatcagaaacgccgaaacacaaaaggtgccgctcatggcggtcgttggccccaaggaagtngaagctaggantntcaccatcaggtccaggnataacggggagatgggcacaatgcccgtcgacgatttcatcagnaaaatccaatcggccgttgctgaaaaatcttcgctgtagataccccagtctattaaactccagttcntattgtagnncactngaccttctgctnnanatacaccgtacaggagcgcctccgacgaaactgagcgacggagnnccaacaattttgtgcagaactgccatcaccacattatactccagtcaggaacagaagcccaacattcttcattgtacataatttntgacnacaat

SEQ ID NO: 2742 - DNA, 905 bp, Triticum aestivum
gccgctcggaatgtcattgaggcaggattcgatggtgtcgagatccacggagcacatgggtttcgtcttggagcagttcatgaaagatagctcaaacgaccgtactgacaggtatggtggcagccttgagaaccgatgccgctttgccgtggaggtgattgatgctatcgtccatgatattggcgcggatcgtgtcggaatcaggttgtctccgttcaccgactacatggattgcttcgattctaatccacatgtgctcggtacctacatggtacaacaactcaataagcacaaagagtttctttattgccacatggtagagcctcacacgaccattgtggatggtcgcatgcagatatcccatgggctattgccctttaggaaagcatttaatggcacttttattgccgcgggagggtatgatcgagaggaaggcaacaaagtggtgattgatagttatactgatctcgttgcctatgggaggctatttcttgctaatccggatttgcctaagagattcaagctagatgtccccttgaacaagtatgaccggtccaccttctacacgcaggatcctgtcattggttacacagattatcctttccttgatgactcaaatacagagtagttcattcacccaacttcaattacttatgtggttcacttatgtagtatgcaatgatttattcaatatgtgagttcacacatgtgcattgtataattttcacaaataatttatttttgttttccactgtaatgccaaaatatagggatattcatcttgtgacaaattttcgtacgcatttgtttttattttggtacaagggtggattcaattttttcttcattttgaaaataaacccgagagatatgcggttgtagcatgtaatggtttcactcactca

SEQ ID NO: 2743 - DNA, 769 bp, Triticum aestivum
cgcgttcgagggcctctgcaagaccatcaaggacatcctgggcgacaaggtggagaaggtggtcgtctcggaccgcatcgtggactcgccgtgctgcctggtgaccggcgagtacgggtggacggccaacatggagcggatcatgaaggcgcaggcgctgcgggacagcagcatgggcgcatacatgtcgagcaagaagacgatggagatcaacccggagaacagcatcatggaggagctccgcaagcgcgccgaagccgacaggaacgacaagagcgtcaaggacctcgtcatgctgctgttcgagacggcgctgctcacctccgggttcagcctggacgaccccaacaccttcgccgccaggatccaccgcatgctcaagctcgggctcaacatcgacgatcaggatgctgaggaggagggtgctgacatgcccgcgctggaggaggagggcgccgaggagagcaagatggaggaggtggactgaacctgaacctgaacctgaaggagatggaacaacagagtcagtcgtgtctgtccatgggtgagttgagttggagttctggtggtcgtttggtggtcgctgcgtgtccaggtagaagctattattagagcgtcagtgtcgttgtgtttgatgagtgtcgaggtcaagtctcagtgtcacttggtgtcttatggagaagtctgatatgtgaggactgaagggagtttgttccggattctgaagtgaaagagaagggttttgagtctgaaaaaaagtgcccattga

SEQ ID NO: 2744 - DNA, 907 bp, Triticum aestivum
caggaagctgcagcattggtcacaaccttcaatattgaaattggtatatccggtgctatattgactaaattggatggtgattccaggggtggagcagcacttagtgtgaaagaggtgtctggaaagcccatcaagtttgttgggcgaggagagcgaatggaggaccttgagcttttctatcccgaccgcatggcacaacgtgtatcgggaatgggagatgtcctttcatttgttgaaaaagcacaagaagtcgttcgccaagaggataccatggaactgcagaagaagatcatgagtgcgaaatttgacttcaatgactttttaaagcagacacaaaatgttgccaaaatgggatccatgagccgtgtaatcggaatgattccaggcatgaacaaggttactcctgcacaaatccgggaagctgagaaaagacttgcattcgtagagtcgatgatcaatgcaatgacagccgaggaaagggaaaaacccgagttactggccgaatcacgcgagaggaggattagggtagcagaggagtctgataagacagaacaagaggtgagccaactggtcgcgcagctcttccaaatgcgcgcgcagatgaagaaattgatgggtatgatgcaagggcaagaagcaattgcaggaatgggagatctcatggactcgctcaatgctgacgagaaggcacctcctggcaccgcacggcggaggagacggcggagcgagccgccgcggcagagggagctggatgcagtgggtggcgccagtaggccttgagttgatgtgcactggagctggaatttttcactggaagagttgtggattggcatgtaggtacgggtcctgctgcatggtgtaatatttcctgtacattttggcatgccgagtttaaggttaatgggaa

SEQ ID NO: 2745 - DNA, 729 bp, Triticum aestivum
ctcggggacgcgctgcgcagaccaacgcggacgtcgtcatcgcgtccccgagacggcgtcgtggtcaccgcgcgatacgggacgaggatcgtggccgacgtgatgctggacgaggccgccgatcgggcgccgttcgatctgattatcgtgccgggcggcatgccgggcgcgaagacgctgggcggctgtgagcagctcgtcgctctgctgaagaagcaggcggaagcgaacaggccgtacggcgcgatcggcgccgccaccgcccacgtgctcgagccccatggcctgctcaagggcaagaaggcgacgacgtgcgcatccatggccgggctgctcgcggacggtggcgagtgcgagaacagggtggtggttgacgggaacgtgatcacgagtaggagccccggcaccgccatggagtacgcggcggccgtcgtcgagaaaatgatgggccgcgacgaggcgcggcgactggcggaaggcctgctcttcttgagctgacccccgtgaccgtgtggtggagcttcacaggctgttgttgcgctggctcgcctgatcatccgacaataacagccgacaacggtggtggtcatcgtcatctaagtcccgttcattcgtactgttcactgtcactttacatttaacatgtcatcagtacggtagtctccactgagagcgactccggacatggaggagaactacgccacacccaccgttcatcaaattacttga

SEQ ID NO: 2746 - DNA, 782 bp, Triticum aestivum
tcccccgaggtcagtcgtctcgtccgtgctgcgtttctcctcctccccgcattcgccgtctgcggttctctccaccgaacaagctcacacatcaagacaataaatagagcctgtctgtttggggccaatcaaaccaaacaacaagttcatgtctgatctcgacgtccaggttccaactgcttttgatccgtttgctgaggcaaatgctgaggactccggcgctggtgctggatcaaagaactatgtgcatgtgcgtgtccagcagcgcaacggaagaaagagtctgacaactgttcagggcttgaagaaagactacagctataacaagattctcaaggatctcaaaaaggaattctgctgtaatggtactgtagtccaggatccagaactaggccaggtcatccaactccaaggtgatcagcgtaagaatgttgctactttcctagttcaggctggacttgcaaagaaagagagcatcaagattcacggattttaggcaacacacaaatgcccgtgtgctgtcaccgaagcctggaagttgtcgtacacttggtattgtcacatctaagacatttgaattgctagtagtcgtgtgaggcatctgtgtttgatgcacttttacatccaagacatttggattggcatcggtgtgttgatgcaagttgtcctttaccatggtttgtatgcgccagccagtatggcagtatggtttatcccaggttattgtgccacgtaaataaatgtacttcaggcttatcttttcatggttgtgtgctctgttc

SEQ ID NO: 2747 - DNA, 797 bp, Triticum aestivum
gaggagacagatatttcccccgagccgaggtcaagtcgtctcgtcccgtgctgcgtttctcctcctcccccgctcctcccccattcgccgtccgcggttctctccaccgaacaagctcacacatcaagacaataaatagagcctcgtttgtttggggccaatcaaaccaaacaacaagttcatgtctgatctcgacgtccaggttccaactgcttttgatccgtttgctgaggcaaatgctgaggactccggcgctggtgctggatcaaagaactatgtgcatgtgcgtgtccagcagcgcaacggaagaaagagtctgactactgttcagggcttgaagaaagattacagctacaacaagattctcaaggatctcaaaaaggaattctgctgtaatggtactgtagtccaggatccagaactaggccaggtcatccaactccaaggtgatcagcgtaaaaatgttgctactttcctagttcaggctggacttgcaaagaaagagagcatcaagattcacggattttaggcaacacacaaatgctcgtgtgctgtcaccgaagcctggaagttgtcgtatacttggtattgtcacatctaagaccatttgaattgctagtagtcgcgtgaggcatctgtgtttgatgcacttttacatccgagacatttgaatttgcatcggtgtgttgatgcaagttgtccttcaccatggtttgtatgtgccaccagtatggcagtatggtttatccaggttattgtgcactaaataaatgtacttcaggcttatctactcatgg

SEQ ID NO: 2748 - DNA, 707 bp, Triticum aestivum
tcctccttcccgcattcgccgtctgcggttcgcaccaccggacaagctcacacatcaagacaataaatagagccttgtctgtttggggccaatcaaaccaaacaacaagttcatgtctgatctcgacgtccaggttccaactgcttttgatccgtttgctgaggcaaatgctgaggactccggcgctggtgctggatcaaagaactatgtgcatgtgcgtgtccagcagcgcaacggaagaaagagtctgacaactgttcagggtctgaagaaagactacagctacaacaagattctcaaggatctcaaaaaggaattctgctgtaatggtactgtagtccaggatccagaactaggccaggtcatccaactccaaggtgatcagcgtaaaaatgttgctacttttctagttcaggctggacttgcaaagaaagagagcatcaagattcacggattttaggcaacacacaaatgctcgtgtgctgtcaccgaagcctggaagttgtcgtatacttggtattgtcacatctaagacatttgaattgctagtactcgtgtgaggcatctgtgtttgatgcacttttacatccaagacatttgaatttgcatcggtgtgttgatgcaagttgtccttcaacatggtttgtatgcgccaccagtatggcagtatggtttatccaggttattgtgcactaaataaatgtact

SEQ ID NO: 2749 - DNA, 720 bp, Triticum aestivum
gcaacaaggcagacagggcaggagtacgtggaggttttcagagcaagaagcaggattactacagcggcatagccgccgaggtgaaccagggtgcggtgctctccttgagccggagcaccggcactcgtcgcctcctctgcggtccaggaggctgtctgaagacaagagcagcatggagtacactgaggtgctgaagctgcgcgggctcccctactccgccagcatcgaggacatcatcaagttctttgtggagtacgagctgacggaggagaacgtgcacatcgcgtaccgcggggacggcagggccactggcgaggcctttgtcgagttcccgacggccgaggttgccaagactgccatgtgcaaggataagatgaccatcgggacgaggtacgtggagctgttcccgtcgaccccggaggaggcgagcagggcgaagccgcgaggcaggcagtgagcggtgtcctgccagacgctgagcactgggtgtgagaacagctgctgcatctcgttccagtttcagccttttcgctcttcatgctttattataattgtatcatcaatcatgtcggattgtgtttagtttgggctcctgtttctagctttgtggagacattttctgatgcgacttgtctcgaactgcctgcctcttgagggaaaaagtggtgtatgagatactttgctgagtgtgtaactgttaccatcctttgtttaaagaga

SEQ ID NO: 2750 - DNA, 736 bp, Triticum aestivum
caagcggagtttgcgctgcaccgcaacaggcagaacatggggcaggaggtacgtggaggttttcagatgcaagaagcaggattactacagcgcaatagccgccgaggtgaaccagggtggtggtgccctccttgagccggagcaccggcactcgtcgcctcctctgcggtccaggaggctgtctgaagacaagagcagcatggagtacactgaggtgctgaagctgcgcgggctcccctactccgccaccatcgaggacatcatcaagttctttgtggagtacgagctgacggaggagaacgtgcacatcgcgtaccgcggggacggcagggccactggcgaagcctttgttgagttcccgacggccgaggttgccaagactgccatgtgcaaggataagatgaccatcgggacgaggtacgtggagctgttcccgtcgaccccggaggaggcgagcagggcgaagccgcgaggcaggcagtgatgggtgccctgccggatgctgagccctgggtgtgagaacagctgctgcatctcgttccagtttcagccttttcgctcttcatgctttataattgtatcatcatgtcggattgtgtttagtttgcgctcgtgtttctagctgtgtggagacattttctgatgcgacttgtctcgaactgcctcttgtgggaaaaagtggtgtatgagatactttgccgagtttgtaactgttaccatccttcctttccaagaa

SEQ ID NO: 2751 - DNA, 749 bp, Triticum aestivum
gcgtcctctccttgagccggagcaccggcactcgtcgcctcctctgcggtccaggaggctgtctgaagacaagagcagcatggagtacactgaggtgctgaagctgcgcgggcttccctactccgccaccatcgaggacatcatcaagttttttgttgagtacgagctgtcggaggagaacgtgcacatcgcttaccgtggggacggcaaggccactggcgaggcctttgtggagttcccgacggccgaggttgccaagactgccatgtgcaaggataagatgaccatcgggacgaggtacgtggagctgttcccgtcaaccccggaggaggcgagcagggcgaagccgcgaggcaggcagtgagcggtgccctgccagacgctgaggcctgggtgtgagaacagctgctacgtctcgttccagtttcagccttttcgctcttcatgctttataattgtatcaatcatgtcggattgtgtttagtttgcgttcctgtttctagctgtgtggagacattttctgatgcgacttgtctcgaactgcctcttgtgggaaaaagtggtgcatgagatactttgctgagtttgtaactggtaccatccttcgtttgaagaaagcatttgtacctcatgttattattcttttttgtgttgttctgtgggcagagattatctgtaaccttttgattgcttttgttgtattttgattactcatcatgcaaaaaccctcgattatgttaaaaaaggct

SEQ ID NO: 2752 - DNA, 703 bp, Triticum aestivum
cagatctgttattgatgggatcgagcatatcgcaatggtgaaaggtgagattggagatggtcaagatattcttgtgagggtccattccgagtgtctcacaggagacatttttggatcagcaagaatgtgattgtggtgaccagcttgcaatgtcaatggagaggattgagaaggctggaaggggtgtactagtttatcttcgtgggcatgaagggaggggcattggtctgggtcacaagcttcgtgcttataacttacaagacgaaggacgtgacactgtggaggctaacgaggaactaggactgcctgtggactcgagggaatatgggatcggtgcacagatattacgtgatctaggagtccgttcaatgaagttgatgactaacaatcctgccaaatatgttggtctgaagggttacgggttgagcattgttggtagggtgcccttggtaactccaataaccactgagaatcagagatacttggagaccaaaagaacgaaaatggggcatgtatactccaattgaccatccgacccaaagcaacggaacagattagaagcgctaggccaactggacttgcttccattcacatttttatctgatgatattcttctacagttgagtttttgggattatttcaatccatatgttccaggttaattgttttcgaggccatgataggtggaaatataaatatttgg

SEQ ID NO: 2753 - DNA, 398 bp, Triticum aestivum
tctggcatgtttgaggataagtccaacaaagagtcaaaattcacatctaccaacacagctgcaacaatcatcacaaagcttgaagacattgcaaagcgcttgcggctaagactcattaagagagacggtgggttgttgaagatgcagagctcgcaaccaggaaggaaaggcgtaatgtccatagataccgagatatttcagattgcaccaaattttcatctggtggaaatcaggaagaccaatggtgatactctcgagtatcagaaggttgaacatgatatgagaccggctttgaaagacattgtttgggcttggaaaggtgagcagccctagtaatagtgtgactactgagtaagcgtagaaattgcaagaatgtgcaatgtttacatgttggagca

SEQ ID NO: 2754 - DNA, 638 bp, Triticum aestivum
catccagtagctgtacaaccgagacatacaagaagcaacagagctcactaacttgaatgcttttgacatcatttctctttcttctgggtttgatctctctggcatgtttgaggataagtccaacaaagagtccaaattcacatctaccaacacagctgcaacaatcatcacaaagcttgaagatattgcaaagcgcttgcggctaagactcatgaagagagacggtgggttgttgaagatgcagagcttgcaaccgggaaggaaaggcgtaatgtccatagataccgagatatttcagattgcaccaaattttcatctggtggaaatcaggaagaccaatggtgatactctcgagtatcagaaggttaaacatgatatgagaccggctttgaaagacattgtttgggcttggcaaggtgagcagccctagtaatagtgtgactactaagtaagcgtagaagttgcaagaatgtgcaatgtttacatgttggaatcaataatgcacttgtctaatttttgtaggtagtttagtgtgttcactgtcatgtttttattatgaaatgctacttctgtattgaccgttattcaattgaaaacatgactattttaactttggtacttgttactactatggattg

SEQ ID NO: 2755 - DNA, 621 bp, Triticum aestivum
tcgtcggcgccgttcgcatgcgccgccccgccgaaattccaggccctccgcgccgcccgcccgccccgccgacgtcgccccttacaccgcccgcgtcaccggcgtcgcccgcggcgacttcttctaccagtgcgtctacctcctcctcgagcccacccccgaggtgatccacacaagcgaccacttctgcgcccacttcgggtttcagagatcaaccccatatatgccacatgtaagcctcttgtatggggatctaacagacgaagagaaggaagcagcaaggaagaaagtagaggaaatggacagtgaaatttctggactgcagttcgagatctccgagctcgcactttatcgaaccgacaccgaggataaaagcttggagtcctgggaactggtggaggtatgccaccttgggaagaagtgatcggttcctcccgatgatatgcttctgctgtaagttgtgactgctcttggggtcttgtaatattatgttttcacctttaagtgtttgatgtaatgatgtgaatgtctagcacccctgttgctttgaataaggaataatgtgaacattggacctaccttggggcttaccttgccacttgtgggttttaatacaagttg

SEQ ID NO: 2756 - DNA, 651 bp, Triticum aestivum
agaatcttcgcgtgaaagaactgaaacctgagactgcattgacagtaataaatgaggatgctgaggaaatcctcgaaggcataaagcccacccctacacttgtctttggatcacttctgggcctctcagcagctacttttgctttgctagaatgggagacgactttgcagtacatcggtgttcttagtcttgggttgacgatctacctgcggttctcttcatacgagggttcggaggatttcctgcaagacctaaagctgttgctgtccccagtaagagtgggcgcggaagcgttctcatgggcagctaagaagctagagcctaacaagattggcctggcaacgtccccctccacaacggcggtgcaggaccgagttctcaaagctgcagcgaagcacgaatcgaagccatctgatgcggaggagtccaccaagacagacagttttgcctccgaagcatgagaagctccctgtgagcgtgtgaactggatccgtagccacttcgccgtcagtctggtgaattgatgtttttgatgttagtaatggtaccatgagccgccgtgacgacgaccggcattgtaaatttataagcagcagtttatattaaacacttgttagcagaagtcttcagttattggtccagtctcagtgc

SEQ ID NO: 2757 - DNA, 616 bp, Triticum aestivum
agaatcttcgtgtgaaagaacttgaaacctgagactgcattgacagtaataaatgaggatgccgaggaaatcctagaaggcataaagcccacccctacacttgtctttggatctcttctgggcctctcagcagtgacttatgctttgctagaatgggagacgactttgcagtacatcggtgttcttagtcttgggttgacaatctacctgcggttctctacgtacgagggttcggaggattttctgcaagacctaaagctgttgctgtccccactaagagtgggcgcggaagcgttctcgtgggcagctaagaagctagagccgaacaagattggcctggcgacgtccccctccacgacggcggtgcaggaccgagttctcaaagcggcagcgaagcacgaatcgaagccgtctgatgcggaggagtccaccaagacagacagttttgcctccgaagcatgagaagctccctgtgagcgtgtgaactggatccgtagccacttcgccgtcagtctggtgaattgatgtttttgatgttaataatggtaccatgagccgccgtgacgacgaccggcattgtaaatttataagcagcagtttatattacacttgttag

SEQ ID NO: 2758 - DNA, 840 bp, Triticum aestivum
agctttggtgttcagcaaccttatcctggttaaaggaggtttcaaatcttgggcaaagaatcttcgcgtgaaagaactgaaaccagagactgcattgacagtaataaatgaggatgctgaggaaatcctcgaaggcataaagcccacccctacacttgtccttggatcccttctgggcttctcagcagtgacttatgctttgctagaatgggagacgactttgcagtacatcggtgttcttagtattgggttgacgatctacctgcggttctctacatacgagggttcggaggatttcctgcaagacctaaagctgttgctgtccccagtaagagtgggcgcggaagcgttctcgtgggcagctaagaagctagagccaaacaagattggcctggcgacgtccccctccacgacggcggtgcaggaccgagttctcaaagcggcagcgatgcacgaatcgaagccgtctgatgcggaggagtccaccaagacagacagttttgcctccgaagcatgagaagctccctgtgagcgtgtgaactggatccgtagccacttcgccgtcagtctggtgaattgatgttttttatgttagtaatggtaccatgagccgccgtgacgacgaccggcattgtaaatttataagcagcagtttatattaaacagttgttagcagaagtcttcagttattggtccagtctcattgcctctcaccaaaaatagagagaaatgctagcagaacttcacttgaaatttttgtacatgccacaccatgcacaaaaaaagagaggtggcgcaagcagattcattctgtggttaagaatggcaatttgtgtgtca

SEQ ID NO: 2759 - DNA, 641 bp, Triticum aestivum
cttctcgcctgaccgctgaaggcctgattggctcgtacatccacgataaccgtatagggtgcatgattgaaatcaactctgagaccgactttgtggctcgcaatgagaaattcaaggagctggtgaatgacctcgcaatgcaagtggtggcatgcccacaggttgaatatgtctcaatggaggacataccagagagtgttgtcagcaaggagaaggagattgagatgcagagggaggacctgcagtcgaaacccgaaaacatcagggagaagatcgtggaagggcggatatcaaagaggctcggagtgatggccctcctggagcagcccttcatcaaggatgacagcaagacggtgaaggatctcgttaaggagacgatcgccggcctgggggagaacatcaaggtacggaggtttgtcaggtataccctcggcgagaactgataaatgagacagtgacctccgctacaatccatggcatcaggagccgggcacattttgattcatcgtggtgcatagctgctgctagtttgtactgagttccatgtataattttgtatcacttgttaccattgttcctggttacaaacaacacacttttttgcacaccttcaatgtagatgacaggagagatcaatatat

SEQ ID NO: 2760 - DNA, 741 bp, Triticum aestivum
tgcaagaaagcgctggctgagactgggggtgacttcaggggctcaggagttcctcaggaaaaagggcctctcgtccgcagacaagaagtcgtctcgcctgaccgctgaaggtctgattggctcatacatccacgacaaccgcataggatgcatgattgaaatcaactctgagactgacttcgtggctcgcaatgagaaattcaaggagctggtgaatgacctcgcaatgcaagtggtggcatgcccacaggttgaatatgtctcaatggaggacataccagagagtgttgtcagcaaggagaaggagattgagatgcagagggaggacctgcagtcgaaacccgaaaacatcagggagaagattgtggaagggcggatatcaaagaggcttggagtgatggccctcctggagcagcccttcatcaaggatgacagcaagacggtgaaggatctcgttaaggagacgatcgccggcctgggggagaacatcaaggtacggaggtttgtcaggtataccctcggcgagaactgataaatgagacagtgacctccgttacaatccatggcatcaggagtcgggcacattttgattcatcgtggtgcatagctgctgctagtttgtactgagttccatgtataattttgtatcacttgttaccattgttcctggttacaacaacacacttttttgcacaccttcaatgtagatgagaggagagatcaatatattgtccaaaaagg

SEQ ID NO: 2761 - DNA, 641 bp, Triticum aestivum
cgtgggtgatcccaggcgagatattcctggtggaggtccggtcgacggggaatatctgggcgtcgttcgggtggtcgtggggtcccctgacgtgggtgatccccggcgagatattcccggtggaggtccggtcggcggggcagggcatcagcgtggccgtcaacctcggcgccaccttcgtgctcacgcagacgttcctctccgtgctgtgcagcttcaagtacgccacgttcatctactacgcggcctgggtcgccgtcatgacagccttcgtggtggcattcctgccggagaccaagggagtgcccctggaggccatgggcgccgtctgggcgcggcactggtactggggacgcttcgtcaaggtgcagcagccgcccaagaacaccgacgcgctcataaactgacgacgtttagcgcctttgtcatcgtggcaaagatgggtatgggtgtggctttgatctccgtacccgtacgtgtttgtgtctgtgtgttcgtgtgtgggtatatggagccgcagtgctgcttgtggaaagatttgtgtttcttttttcttttcgttttcttttcttttgtggaaaaatgattgttgtttcgtgctgttgtagtacgtccattcgtcattccggattgaataacat

SEQ ID NO: 2762 - DNA, 895 bp, Triticum aestivum
gaggcttacttgttgtcccagttcacttagatggaaccttgcaggatgtaactaaatccatgcaagaaaagaaggagtacctttcaacaatcaccattctccagatatttcgccagctatgtgcaggactgaagcatatgcacagttttgagccaccatatgctcacaatggagttaaaccagacaatgtcctcataactcagaggaaggaacagcctcatcttgctatcttgatggactttgaaagtgctcgcccagcaagaagagctattagatcacaagcagaagctttgcagctgcaggaatgggcttcagagcactgctctgcacatttccgggcacctgaattatgggagtgcccgccccatgccgatattgatgagaggacagatgtatggtctttgggatgcaccctttatgctatgatgtatggaaagtcaccatttgattatgagctcgatgaatctgctggcgaaagcttagtaacagtcattaaaagtgcacaggtgaagtggcctactgagacgggttcgtcctatcctgacactctccgccagtttgtaacctggatgctgcagccacatcctgcagttcgtcccaatattgacgatattatcatccacgttgataaactcattgcgaagcactcaacttgatgagtaaatggaactgcttcaacagaaagaagaaaaggaattcatatgtaagtttatagaacatctgcttgattcattaaaagtgacatgttccttaatagtcattgtatggaaggaaaaaagaggatgttttctgtagcaggcttcaccgatttaagaactggctgttcctgatgtctgtagatgtatgtaatttttgtgccaaagtgagattcaggggtcaataaatgtatcatcat

SEQ ID NO: 2763 - DNA, 770 bp, Triticum aestivum
atggaaggagcaacccaactggcaccattggtgaacctttttctgcatcagccaatgcatatgaaatgaacaacatagatacatatggcaacaactctatttatggtgactcaacctggaggttcacgtcatctgagatagatattcctccttttgataatgatcttggaaatatcgatccagatatcaaatcgaacatgccagcaagttacatgggcaactatactgttaataataatcagacaagcagaggtatcacttcctaggtgagaatattattatagtcatatatatgacttgggataggcaagacacccattatatcaggtattcaggtgcagtactgtgaattggtgatatcagattaatatacaggttagttaattgtttctagctaaccagaggtgtggtttacggacaccaaccaacatgctagaggagcgggatacaaacattttgtgaaggtttcagattttagtttaattttctacgtgtattaggtcttttggttttccaatgagatgtgcagtggtgattgcggcacacacttagaaggtgttccaacataagctggaattctgtcatacggacgacaaacttgtataccagggatgctgtattatcttgcccatttatggcaacattagcttgcgtgtttttcctcttttccttttttaaccatttcatttgttactagaggatttggtcggctttatactagtaaaaactatttgggggtgccaatgccatcctggtccccattaataaag

SEQ ID NO: 2764 - DNA, 682 bp, Triticum aestivum
aacaacggctccgcgacacggccgccatcgcgtcgtcccgcgccgccgagctgtacggcatggagatcctcgccgacggcatccaggacgactgcggcaacgtgacccggttcgtgatgctggcacagggagcccatcgtgccgcgcacggaccggccgttcaagaccagcatcgtgttcgcgcacgacaaggagggcacctccgtgctcttcaaggtgctctccgccttcgccttccgcgacatcacgctgaccaagatcgagagccggccgcaccgccaccgccccatccgcctggtggacgacgccaaccgcggcacggcgaagcatttcgagtacatgttctacgtcgacttccaggcgtccctggcggagccgcgggcgcagaacgcgctggccgaggtccaggagttcacgtcgttcctgcgggtgctcgggagctacccgatgacatgaccccgatgaccgccggctcctcctccaccgtcacatcgtccgactcgtagctccctagaggtatcgaggagcagtaggggagtcggttaatttgtggtcatgtcgtcggcccgctcctccctcgttggcagctggggtaattagttttgttcctcatgtttcttgtcataatacatgtaaaatcgtgccatttgagccagttaagttaatacgcagtggatatacc

SEQ ID NO: 2765 - DNA, 707 bp, Triticum aestivum
gcctcgcgacacaccgccatcgcgtcgtcccgcgccgccgagctgtacggcatggagattctcgccgacggcatccaggacgactgcggcaacgtgacccggttcgtgatgctggccagggagcccatcgtgccgcgcacggaccggccgttcaagaccagcatcgtgttcgcgcacgacaaggagggcacctccgtgctcttcaaggtgctctccgccttcgccttccgcgacatcaccctgaccaagatcgagagccggccgcaccgccaccgccccatccgcctggtggacgacgccaaccgcggcacggcgaagcatttcgagtacatgttctacgtggacttccaggcgtccctggcggagccgcgggcgcagaacgcgctggccgaggtccaggagttcacgtcgttcctgcgggtgctcgggagctacccgatggacatgacccctatgaccgccggctcctcctccaccgtcacatcgtccgactcgtagctccctagaggtatcgaggagaatcggtggagcagtagggacgtcggttaatttgtggtcatgtcgtcccactcctccctcgttggcagctggggtaattagttttgttctttatgttccttgtcataatacatgtaaaatcgtgccgtttgagccagttaatacgcagtggaatatagcctgtgagatacaacatgactgcatgtcgt

SEQ ID NO: 2766 - DNA, 607 bp, Triticum aestivum
gttcaaatagcccaactgacactaaaaatcaagcacttgtcatccgttctacacaaaaaggataagcactctcgaaaggggctccaggacatggtccagaggaggaagaagtacctcaagtacctgcgcaggaccgactgggattcgtactgcctcgtcctgtcgaagctggggctccgcgacacgccggagtacaaggcgcccgactacaagaagacccagccgacgaaggcgcagtcgaagaagagcaagagcaagaggaagagaaagatgaaggcgtagagctccgctgcccgggacagatgatgattttccacactcttcgccttctctttggccttgagaactccgttggcggtagaatccatcgggtcgacaggcaccgatgctcaagatatctctgctcggccaggtctttgcagtgttgtaattttttgatccacttcttctgtaataaccagtcgcttgacatagctgcatgtttttcttgttctgtagcaacagaatgtttgttgatcctaggtctcagctctcccctgccctgttatcaggccaatggattgaggaacaaacgggatgatgattacttgtttcttcatttaatcat

SEQ ID NO: 2767 - DNA, 761 bp, Triticum aestivum
  N_region (7)..(7): n = any nucleotide
  N_region (28)..(28): n = any nucleotide
  N_region (30)..(30): n = any nucleotide
  N_region (58)..(58): n = any nucleotide
  N_region (65)..(66): n = any nucleotide
  N_region (711)..(711): n = any nucleotide
actattncaaacatcggtggaaagccgntnccggagtacatgatgagcaatcttccgncgcaggnngagttgctagagaggtatttctatcctgatcacatgtcaggcgaagagaagatgaaattggagcttcagaaggtcagggatgagttcaagatgtccgagaatgactgtggttccgcacgagttcaaatagcccaactgacactaaaaatcaagcacttgtcatccgttctacacaaaaaggataagcactctcgaaaggggctccaggacatggtccagaggaggaagaagtacctcaagtacctgcgcaggaccgactgggactcatactgcctcgtcctgtcaaagttggggctccgcgacacgcccgagtacaaggcggccgactacaagaagacccagccgacgaaggcgcagtcgaagcagagcaagagcaagaggaagagaaagatgaaggcgtagagctccgcggcgcgggacagatgataatttcccacactcttctccttctctttggcattgagaactccgttggcggtagaatccgtcgggtcgacgggcactgaggctcaagatgtctctgccctgccaggtctttgcagtgttgtaattttttgatccacttcttctgtaataaccagtcgcttgacatagctgcatgtttttcttgttctgtagcaacagaatgtttgttgatcctaggtntcagctctcccctgccctgttatcaggccaatggattgaggaacagacgg

SEQ ID NO: 2768 - DNA, 535 bp, Triticum aestivum
  N_region (11)..(11): n = any nucleotide
  N_region (37)..(37): n = any nucleotide
  N_region (52)..(52): n = any nucleotide
  N_region (479)..(479): n = any nucleotide
ccgagttggtngcccatggtgcccgcaggagccgttncttttcgccggcacnatccacgacaacattcgcctacgggcgcgagggcgcgaccgaggcggaggtggtggaggcggcaacgcaggccaacgcgcacaagttcgtgtcggcgctgccggaagggtacaagacgtgcgtcggggagcgcggggtgcagctgtcgggagggcagcggcagcggatcgccatcgcgcgagcgctggtgaagcaggcggccatcatgctgctggacgaggcgacgagtgccctggacgccgagtcggagcggtgcgtgcaggaggcgctggaccgggccgggtcagggtcagggcgaacgaccatcgtggtggcgcaccggctggccacggtgcggaacgcgcacaccatcgcggtgatcgacgacggcaaggtggtggagcaagggtcgcactcgcatctgctcaaccatcaccccgacggaatntacgcgcggatgctgcagttccagcgcctcacgccccacacccttgccgtgcccag

SEQ ID NO: 2769 - DNA, 795 bp, Triticum aestivum
tgctggcgctcatccagcgcttctacgagcccagctccgggcgcgtgctcctggacggcaaggacatccgcaagtacaacctcaaggcgctgcggcgagtggtggccatggtgccgcaggagccgtttcttttcgccggcaccatccacgacaacatcgcctacggccgcgagggcgctaccgaggcggaggtggtggatgcggcaacgcaggccaacgcgcacaagttcgtgtcggcgctgccggaagggtacaagacgtgcgtcggggagcgcggggtgcagctgtcgggagggcagcgccagcggatcgccatcgcgcgagcgctggtgaagcaggcggccatcatgctgctggacgaggcgacgagtgcgctggacgccgagtcggagcggtgcgtgcaggaggcgctggaccgggccgggtcagggtcagggcgaacgaccatcgtggtggcgcaccgcctggccacggtgcggaacgcgcacaccatcgcggtcatcgacgacggcaaggtggtggagcaagggtcgcactcgcacctgctcaaccatcaccccgacggatgctacgcgcggatgctgcagctgcagcgcctcacgccccacacccttgccgtgcccggacccggaccctctgcatccaacgtttgatacatcttccatgcacggttccactcgcgttttgctttaggatcttcttttcttctaaaaaaatttgttgctggctggcgggaggagggtggtcacaattgacaagccgtatgtgctgccaatgccatgatccgtattacac

SEQ ID NO: 2770 - DNA, 619 bp, Triticum aestivum
cgggtcacccgcaccgagttcgctacagccaggcgccttccacgaccccacctacgaggacgtctgcaccggcgccaccggtcacaacgaggtcgtccgcgtccagtacgaccccgccgcctgcaagtacgatgacctcctcgacaccttctgggcgcgccacgacccgaccacgcccaatcgccaggggggcgacgtcggaacccagtacaggtcagggatctactactacacatcggagcaggagaaggcggcgctcgagtctatggagaagcagcagaaggctcagaaccggaagatagtcactgagatcctcccggcgaagaggttctacagggcggaggagtaccaccagcagtaccttgcgaagggcggtcgctttggcttcaaacagtccacggagaagggctgcaacgaccccatccgctgctatggatgaacgagcctggtgacctgaccagcatggaagcacacaggcagcaatgttatagtcagataacgctgcctgaataatggtggatgtcagctgaatttcactacagttttcctagcttgtgctgttacctaaatgcaaggattgtaagagagaagaaagttattaccattataccttattagt

SEQ ID NO: 2771 - DNA, 747 bp, Triticum aestivum
gcagttcggggccggctgcgtctggggcgtggagcctggtgttccagcgcgtgcccggggtcacccgcaccgaggtcggctacagccagggcgcctttcatgaccccacctacgaggacgtctgcaccggcgccaccggccacaacgaggtcgtccgcgtccagtacgaccccgccgcctgcaagtacgacgacctcctcgacaccttctgggcgcgccacgacccgaccacgcccaatcgccaggggggcgatgtcggaacccagtacaggtcagggatctactactacacatcggagcaggagaaggcggcgctcgagtctatggagaagcagcagaaggttcagaaccggaagatagtcactgagatcctccccgcgaagaggttctacagggcggaggagtaccaccagcagtaccttgcgaagggcggtcgctttggcttcaaacagtccacggagaagggctgcaacgaccccatccgctgctacggatgagcgagcctggtgacctgaccagcatggaagcacacaagcagcaattttatagtcaagaatgctgcctgaataatggtggatgtcagctgaatttcactacagttttcctagcttgtgctgttacctaaatgcaaggattgtaagagagaagaaagttattaccattatactttattagtgttgaattaccattgtaatttagtgttgaattgccatcgtacttaggataaattatggcctgagtaataaa

SEQ ID NO: 2772 - DNA, 713 bp, Triticum aestivum
agctggtgttccagcgcgtgcccggggtcacccgcaccgaggtcggctacagccagggcgccttccacgaccccacctacgaggacgtctgcaccgggcgccaccggccacaacgaggtcgttcgcgtccagtacgaccccgccgcctgcaagtacgacgacctcctcgaaaccttctgggcgcgccacgacccgaccacgcccaatcgccaggggggcgacgtcggaacccagtacaggtcagggatctactactacacatcagagcaggagaaggcggcgctcgagtctatggagaagcagcagaaggttcagaaccggaagatagtcactgagatcctccccgcgaagaggttctacaaggcggaggagtaccaccagcagtaccttgcgaagggcggtcgctttggcttcaaacagtccacggagaagggctgcaacgaccccatccgctgctacggatgaacgagcctggtgacctgaccagcatggaagcacacaagcagcaatgttatagtcgagaacgctgcctgaataatggtggatgtcagccgaatttcactacagttttcctagcttgtgctgttacatacaaaggattgtaagagagaagaaagttattaccattattccttattagtgttgaattaccattgtaatttagtgttgaattgccatcatccttaggataaattatggcctgggtaataaag

SEQ ID NO: 2773 - DNA, 756 bp, Triticum aestivum
aaagttcacggcctgctagaaacatcggcgttcatgatctatggtcatccaaagggatgattgtagacgatgaatacgtcatttggctcggcaacatcatcagagatccttggctggctcgagagatacccgaaattgcaatgggtgcctaccagcctcatcatgcatggtcttcgaagaagggtcatcctcacggccaggtatatgggtataggaactccctctgggcagaacaccttggtatggttgatgaccacttcaaggaaccttctagtctggaatgtgtaagattagtgaaccaaatagccgaagaaaactgggaaagattcgcatcagaagagatgaaaacgttgcaagggcacctcctcagatacccagtgaaggtagagtccgatggtaagatcgtcccgctgcccgaccaagaatgcttccccgacgttggtggcaagatctgcggcgctccgacctcgcttcctgattcgctgacgatgtagcatcacagtactgacttctcttcagggtccaagctggttcttttgctcacctgtaaaacctctctgaatgtcttgccgacggatggtaatctgtgatcacacactgtgtggcgtatagggaaagcacgggctgttcacggtgtgttgtagagttgtgcctttgtaagattttttctacagtctgtacatgagacaggacagggtcattgatagttttggacatctctactgcgaactgttcacaaccattttcatttggtgc

SEQ ID NO: 2774 - DNA, 663 bp, Triticum aestivum
ttcatgcaaaagggatgattgtagacgatgaatacgtaattttgggctcggcaaacattcaatcagagatccttggctggctcgagagataccgaaatcgcaatgggtgcctaccagcctcatcatgcatggtcttcgaagaagggtcatcctcacggccaggtgtatgggtataggaactccctctgggcagaacaccttggtatggttgatgaccacttcaaggaaccttctagcctggactgtgtaagattagtgaaccaaatagccgaagaaaactgggaaagattcgcgtcagaagagatgaaaacgttgcaagggcacctcctcagatacccagtgaaggtagagcccgatggtaagattgtcccgctgcccgaccaagaatgcttccccgacgttggcggcaagatctgcggcgctccgacctcgcttcctgattcgctgacgatgtagcatcacagtactgacttctcttcagggtccaatctggttcgtttgctcacctgtaaaacctctctgaatgtcttgtctcgccgacggatggtaatctgtgatcacacattgtgtggcgtatagggaaagcacgggctgttcacggtgtgttgtagagttgtgcctttgtaagattttttctacagtctgacacacacaggcatgcca

SEQ ID NO: 2775 - DNA, 664 bp, Triticum aestivum
catcgatcagagatccttgctggctcgagagataccgaaatcgcaatgggtgcctaccagcctcatcatgcatggtcttcgaagaagggtcatcctcacggccaggtatatgggtataggagctccctctgggcagagcaccttggtatggttgacgaccacttcaaggaaccttctagcctggagtgtgtaagattagtgaaccaaatagccgaagaaaactgggaaaggttcgcatcagaagagatgaaaacgttgcaagggcacctcctcagatacccagtgaaggtagagcccgatggtaagatcgtcccgctgcccgaccaagaatgcttccctgacgttggcggcaagatctgcggcgctccgacctcgcttcctgattcgctgacgatgtagcgtcacagtactgacttctcttcagggtccaagctggttcttttgctcacctgtaaaacctctctgaatgtcttgtcttgccgacggaggataatctgtgatcacacattgtgtggcgtatagggaaagcacgggctgttcacggtgtgttgtagagttgtgcctttgtaagattttttctagtctgtacatgggcaggacaggacagggccattgatagtttttgacatttctactgcgaactgtgcacgtacaagggggttca

SEQ ID NO: 2776 - DNA, 673 bp, Triticum aestivum
actggggggactctggacctgcatgcactgaatgtccagatcttccttaagatgcaccggtcagattatgctgacaagcaactgaagatcatgcaacaaaccgacgaggaccatacactgacacaactagcaaatgcttggctcgatattgctgttggtggctctaagatccgggaagcttatctcatattccaggacttcgctgaaaagtaccctatgactggaatggttcttaatggcaaggcagtttgctgtatgcatatggggagctttgaggaggctgaaactctattgcttgaagccctaaacaaggatgcaaaggatcctgaaactcttgccaatcttattgtatgtaatctccaccttggcaaaccgtcgtcacgatacttcagccagctgaagctgtcgcaccctgatcacgtgctagttaagaccaccacgtcagcggaggataatttcgagagggcactccaagccgtcgcctgaaacacccctgcctcattccagtttgcgcattgagcatcccctgttccattttgaagtgctttaacagagtgaattgtattggttttgctttatattgttctgtggtaacacaccgctcggccaaccctgtactcaaacacaaacacctgctgtatgaacggatatatatgtagaatctccaatcatg

SEQ ID NO: 2777 - DNA, 776 bp, Triticum aestivum
catgagcaagactacaatgaggctctcaagcacacacacactggggggactctggacctgcatgcactgaacgtccaaatcttccttaagatgcaccggtcagattatgctgacaaacaactgaagatcatgcaacaaactgacgaggaccatacactgacacaactagcaaatgcttggctcgatattgctgttggtggctctaagatccgggaagcttatctcatattccaggactttgctgaaaagtaccctatgaccggaatggttcttaatggcaaggcagtttgctgtatgcatatggggagctttgaggaggctgaaactctattgcttgaagccctaaacaaggatgcaaaggatcctgaaactcttgccaatcttattgtatgtaatctccaccttggcaaaccgtcgtcacgatacttcagccagctgaagctgtcgcaccctgatcacgtgctagttaagaccaccacgtcagcggagggcaacttcgagagggcgctccaagccgtcgcctgaaacatccctgcctcattcgagttagcgcattgagcatcccctgttccattttgaagtgctttaacagagtgaattgtattggttttgcattatattgttctgtgtaacacaccgctcagccaaccctgtactcaaacacaaacacccgctgtatgaacggatatatatgtagaatctccaatcatggcatttgttgtcaacatcggtatcttgttatgttgtgctgggctggctaattcttccgccagtga

SEQ ID NO: 2778 - DNA, 623 bp, Triticum aestivum
  N_region (218)..(218): n = any nucleotide
  N_region (344)..(344): n = any nucleotide
aagcgcttggagattgccccatctgaagtcttatccatgagaaagtctgccgttccaatgagcattctttggcaaatccacagtatttccttgttggcgctgccgaggttttcactaatataggtctacttgagttttcgtacgatcaggcaccagatgccatgaggagtttatgtactgcatttgcgctcgtcatggtctcagcggggagctatttnagctcattcatattgaccctggtgtcgtatgttacaactcgaggtggagatcctggatggatcccggataacatgaatgaaggccatcttgaccggttcttttggttgattgcagggatcagcttngtggaatttgctggtttacatcagttgtgcgatgaaatacaaatataagaatgtgtgatggtcatacctactgtggaataagttcttgtaatttcagattccatattcatgggggcagttcattgtatagactaagacatcacatgagctgcccttctcagaaagtcctcaagaaaaggacttcaattcttctagtgatgtattttagacaaattattagtttggtgagtgtgttttgtatgaaatttgtaacaccagagttatacaaagacaattttg

SEQ ID NO: 2779 - DNA, 708 bp, Triticum aestivum
cattgaagcccatctttgcccagaccgtcggctgcaaagttgattacatcatccataccggtaaaagtctccacagtttcggtcatgaaaaatgtaaactacctgccgaatgcactcaccaagctggaaggtgaggaaaatggtgggtttaccggcatctggttggatgatgaggatttcgttgctgagggttcaaacatgaatgttggctttgtgacaccgaacaaggaacttctcatgccccgcttcgacaagatcctgagtgggtgcacggcaaaacgggttctggcccttgccgagcagctagtggagaatggaatgctcagtgggatatcttcaaggaatgtgagtgtccaggaagggaaggaggccgacgagatgatgctcattgggagtggaattcttgtcaaacctgttgttcagtgggatgatcagatgattggctccggtaaagaaggcccaattgctcaaacacttttcagccttattcttgaggacatgagatctggtcccccctcagttcgtatccctgtcccttactgaaaccccctgcattatagtccttgcaggatacacgtgaacaaagacataaatactgtaaatttcatgtgtcacataaaagctacatgaatatactggcagcagtgttcctgttggtctttgcaaaaatcatttggaaccattcttgtgtgtcaaccttatgccttt

SEQ ID NO: 2780 - DNA, 879 bp, Triticum aestivum
cttcatctggctgtagaaacccagctctttacgctgtcgtcattgaaagtccatctttgccagaaccatctggctgcaaagtgatcacatcatccataccggtaaagtctcaacaatttgcggtcatgaaaaatgtaaactacctgccgaatgcactcaccaaggtggaaggtgaggaaaatggtgggtttaccggcatctggttggatgatgagggtttcgtcgctgagggttcaaacatgaatgttggctttgtgacaccgaacaaggagcttctcatgccccgcttcgacaagatcctgagtgggtgcacggcaaaacgggttctggcccttgccgagcagctagtggagaatggaatgctcagtgggatatctttaaggaatgtgagtgtccaggaagggaaggaggccgacgagatgatgctcattggaagtggaattcttgtcaaacctgttgttcagtgggatgatcagatgattggctccggtaaagaaggcccaattgctcaaacacttttcaaccttgttcttgaggacatgagatctggtccaccttcagttcgtatccctgtcccttactgaaaccctctgcattatagtccttgcagaatacacgtgaacaaagagataaatactgtaaattccatgtgtcacataaaagctacatgaatatactggcagcagtgttccttttggtctttgcagaaatcatttggagccactcttgtgtgtcaaccttatgcctttttaggcatgttaaaccaaaacactcttctactctagtttgctgcacatatacctactattgaagtgtagagacgaggcttttagtgaaatgtttccttttctaaacgaggtttgcgttaatatgacgaaa

SEQ ID NO: 2781 - DNA, 681 bp, Triticum aestivum
tgcgttcacattggctactagagcggccatgtgattcccctatctttatcagtttggcttgtggaagcctttcgggagttgcgtcatcaacttttacatttccattggatcttgtaagacgccgcaagcagttggaaggtgcagctgggagggccaatgtctacaagacaggacttgttggaacgtttgggcatattattcagacagaaggttatagaggattgtatagagggatcttgcctgagtactgcaaagtggttcccagcgtcggcctcatttttatgacatacgagacactgaagtccatgttcacaggaggggcatcagatgaatagatctccaatgtctgatcatgcttgacagttttgacacctgggccagagtagcattggaagtgattagggagggagggggaggaagagatgtgtttgtagcatatggtaggatttaggtggtgctaaattttggagttcataacgtagcagtatcatcaaacagtcttttatgtggctataggttttcttgtagtgcacccaagaagatcagtaagtgccataggtcttccaaaattttgctgtccacccttgttttgtgtatgttcacattttcagttggtaatgtactggctatcatcttcagcctggcgatttcatacctctggaatacggcctctgatataat

SEQ ID NO: 2782 - DNA, 1031 bp, Triticum aestivum
ggacattcttgctggtcggccaatcacggtttatgagagctccggtggaggcacacaccagaccaccatttcccgggatttcacctacattgatgatattgtgaaaggatgtattggggcattggatacagctgggcggagcacaggcagcggcggcaagaagcgaggcccagcgccattcaggacatacaatttggggaacacttctccagtgccggtgacacagcttgtggatttactggagaagatgctcaaggtgaaggccgtgaggagggttgtcaagatgccaaggaacggggatgtgccgtacacgcatgctaacatcagccttgcacagcgggagcttgggtatcggccatccactgatctccaaacagggctcaagaagtttgtgcggtggtatcttgagtactacaatcctgagttggctgtgaagcagaagcagcatggcagtagcaacggcaagggttcacgcggtcggaatggcagcacgagcagcgcaagatgactgactattcagtttctggatggccctcttctgacggtgtgtatcagagttctagtccagtacttaattcatcagattttgagaggcccgttttacccagcgccttcaagtgaaacgaaacaagcatgaagtagttagtgttgaaaactgttgcttctgtttgcttccctgtagctgcgcatcactccctagttccattagttggttcttaggatgacactgctaggaagatttttcaatcattttggggagcaggctgtgcattgcaaagactacgatagattcttttagtgacatttgtaccacgagagagaaggaagtatatcatgactgtttcttttgttcaattgaagtagcttcgatcaatatttagttctctctggagcctgaaccctacatcttactgatattcatgctagtttcctgtatggtggtgcatattgcgtgcacttgtggtataaaacatgtctttgccatgacatcttaaaatctagcttttcctttgtggatacactcatgtgat

SEQ ID NO: 2783 - DNA, 680 bp, Triticum aestivum
ggatctttatagccaagcaggaacgtaaagggggcccacaaaatttcgaataccccaggaacttcccatatcaagatgacagccaagaagcagccagcaatcttaatagccataactgatggtatctcattatacttgttaaacaggccaagtgatgcgtacaccataagtgtaaatagggtgtgcattgggcagatatagtacaacataaaatcattgtcaaggacaatgcaacagaaagccacaaagaaatttagcctccacatcatctgtgcaaatcttgcaatgctaaaatctttcttgatataatagtacgagaaattcccaaatccagtcatccaaacatagcaagcaatgaaaacacggattgcattatatatttctgatgcgccaaaatagtggtacatcagaaataagacctgcatccaccctttccattcctcagtttggtggcgattaagataaagtatggactttccagaaaatgctgatttctcctggtgcttcttaagtgaagtaagtgctgatgctatgatgagaagaatgtacagaaacagaaacagggctctgttgtagttcttcttgggctctggtaatatgttggtccggtccccatgtgtcacaaacaaaacaaaagagggcgcggcctaaaaagacccagtatatagcgcggaggaagg

SEQ ID NO: 2784 - DNA, 640 bp, Triticum aestivum
caaaggactcccctcccccctggtgtacccccagctgatgtctatctttttggccttcttgatgaggagcagaagagtaccctacctggaaactttgagcgacactgggggatcttctcgtttgatgggcaggccaagtacccgttaaaccttgggttaggcaacccggtgctgaagaatgctaaagaggtgccctatcttccgtcgcggtggtgcgtcgcgaacccggctcagagcctcgacaacgcgtcaactcacctgaagcttgcttgcgacatggcggattgcaccaccctctactacggagggtcgtgcaacggcatcggggagaagggcaacgtctcctttgctttcaacagctactaccagatgcagaagcaggatgccaagagctgtgattttgatgggcatgggctgataactttccttgatccatctatgggtgaatgccgctttcttgttggcatcgatgatagcaagagctctgcggttgcctcttgtggcaattgctgtggggtcttctgtggggtgtcgattttcgctttgtggttgttcatgtaccttaggatgatgagctctgcctgatggttgaaatgatctattggggcatgataggcgtgcctttgtgaaatactactag

SEQ ID NO: 2785 - DNA, 454 bp, Triticum aestivum
  N_region (308)..(308): n = any nucleotide
ggaaatgtttgtagacttgcatcctttcacaaacacatctccttacactgtggttgagaccatgtccttggctaaagctcttatactttttcgtgaagttggattaagacaccttttggttcttccaaaaacttccaagagggcgcctgttgttggcatattaacacggcatgacttcatgcctgagcacgtattgggtctccatccgtacctgttcaagagcagatggaagaaggtgcgatttggcaagacagccttctccaacttcttttgacaattgccatagtagctaatgattcggagaattnaccaagcgacagcatcagtacattgtatgggaaccatcgggtggtagtttataccaaccatatacggataagctagttgtattatagcggcaatagcattttctggtatcacattacaatgtatgttgctcctgagagatgttctg

SEQ ID NO: 2786 - DNA, 981 bp, Triticum aestivum
ctttgctttcggtgcgtggacatggtgcttcaaatggaggtgttcttgccggtctggctgcctgcggtgtgatgatgagcattgtttctaccgcttgtgatctgatgcaggacttcaaaacaggatacctgacactggcctcaccaaggtcaatgtttatcagccaaatcataggcactgcaatgggttgcgtcattgctccctgtgttttctggcttttttacaaggcctttgaagacgttgggatcagtggaagtgagtaccctgcaccaaatgctgccatcttccgcagcatggcaatactaggtgtcgatggcttctcatcgccgccaaaaaactgcatcactctttgctacatattctttgttggagcaatcgctgttaacttgataagagatcttgttcccaagaaggtatcgagatttatgccaatcccaatggcgatggcgataccattctacctaggaccatatttcggcatcgatatgttcatcgggacagtgatcctttttgtctggcaaaggctggacagagtaaaatcagacacatatgcacctgcagttgcttccggcttgatttgtggcgatgggttgtgggttttgccccagtcaatgcttgctcttgccaaggtgaaacctccaatctgtatgaagttcctgtcaagaggggtgaacgccaaggtggatgctttcatcgcaacattatcatagaatgttcgtcgctgttgtcaatcaaagattcaggttgatgccagacatgtatgaaatttgaatttgtccatttatttgaaaaaataagccagtgtagtgtagttgatatgactagggtcccgttcggtatccctccgctcctggagcagatggagctgcagttagaaatctcggagcgggcgaaacggtgctccccagatccgcggattttgaggagccggtggattgccgaacaggccctagatataaaactatgcacaaagaaatgaac

SEQ ID NO: 2787 - DNA, 591 bp, Triticum aestivum
gggagcattatcagtttttctggtatcagatgcttcgagctttgaaatatatgcacacagcaaatgtctatcaccgagatttgaagcccaagaatgtgcttgccaatgcaaattgcaaactcaaaatttgtgactttggtttggcgagagttgcattcaatgatgcacctacgacagtcttctggacagattatgtggcaacgagatggtatagagcacctgaactttgtgggtccttttattccaagtatacaccagctattgatatatggagtatagggtgcatttttgccgaggtgttgattggaaagcctctatttcctggtaaaaatgttgttcaccagctggatttgataactgatgttctggggacaccttcattagatgctatttctcaggtgcggaatgacaaggcaagaaatatctgacatgcatgcggaagaaacagcctgcttccttttcgcagaaatttccgaaggctgacccattagcattacgattgcttaggaggcttctagcttttgatccaaaggatcgtccctctgctgaagaggcattggcagatccatactttaatggactagcaaaggt

SEQ ID NO: 2788 - DNA, 617 bp, Triticum aestivum
cgtggagcttccacatagcagcaacgatctggatgagtacggctgcatggcaagttacaatagcgcggttgtctactacaatgaactgctgaacaacagcttggccgaggttaggaagacgctgcagaatgcgtcgatcgtgtacgtcgacaaatactctgccatgctcgagctgttcaggcatccagaagatcatgggctcaagtatgggaccaaggcttgctgcggatacggtggtggagcttacaattttgacccagatctgtactgtggcaccagcaagattgtcaagggcaacattgcgagtgcgacggcctgcggagacccgcagaactacgtgagctgggatggaatccatgccacagaagccgcaaacaatatcatagcatctgcactgatgagtggctactactcgtatccaccttccgatctttcaaaactttgccggccatgaccccatagcctgatctctgatcaaagcacaagtttactcagagatagtgttgctcaaacaaagttattccgctgtcagataacagggcaagtttagtcagagacagtgttgctgacaccagattactcattctatcagttaaaagatgtgtagaatgatacag

SEQ ID NO: 2789 - DNA, 568 bp, Triticum aestivum
  N_region (8)..(8): n = any nucleotide
  N_region (505)..(505): n = any nucleotide
attcgtcntcctcaagctcctagcatcgggcttgtgtactcccagtggcatatgagatcatggagaagaactcagcggacgtgacgcagggcaagttctcgcgccggaacctggtgccccggctgctgctgcggacgctctacctggccttctgcgcgctcatggccgcgatgctgcccttctttggtgacattgtcggcgtggtcggcgccgtggggttcatcccgctcgactttgtcctccctgtcatcatgtacaacatcgcgcttgcgccgccgaggaggtccacgctgtacatcgccaacacggtcatcatggccgtcttcacaggcgtcggggccatcggcgccttcgcctctatacggaagctcgtgctagacgcgggccagtttaaactcttcagcaacaacgtagtcgactgaagtacgcacaactatgtagagactagtttgttaggtgcttagcccttgatttcttgaggtataggcgtatagctaagtaattnagctttgttcctccccttttacatagttattaatttacacgtacgcacgcatgcatccgtgga

SEQ ID NO: 2790 - DNA, 982 bp, Triticum aestivum
gtcaaatcgcccccttggatgagatagtcaaattgaaggagaagtatctgttccgtgttattctggaggagtctcattcgtttggtgtgctcggcaagtctgggcggggccttgccgaacattatggtgtaccgattgacaaaattgatatcatcactgctggaatgggaaatgcattagctactgatggtgggttctgtacaggaagtgctagagttgttgatcatcagcgtctaagcagcgctggctatgttttctctgcctctctgccaccctatcttgccagtgccgcagtttctgctgtaaactacctggaggagaatccttcagttctcgctaacctaaggagcaatgttgcgcttctgcatgcaggactgtcagatgcaccaggacttgagatttctagccatgccctgtcaccgatcgtcttccttaagctgaagaaatcgactggttctctggccactgacctagatcttcttgaaaccattgccgagcaggttttgaaggaagattccgttttcattgtggcgtcgaagaggtcaactctggacagatgcaagctccccgtcggaatccggctgttcgtttcagctggtcacactgaatctgacatctccaaagtgtgttcatccttgaagaggatttctgcgtcggttctttcagatcacgtttgacctggtttcccttccaaatatgacaagggcttggtggtttttgacgccgtgtgtactctaaaggctgattacgtgtttggtaaatgtacataacagttatgtacatttctggatttcatgagttccatatgttgttgtcgcccatacctgctagtgaaaattctgtaaacgctgtggttagagatgatgagttgtgctgtacatttgactaatttccatgttgtaaactaggcatatatgtcttcagtatcctcggcatgcctgaatgtagcatgcactctctgcatctttccttcaccctgagc

SEQ ID NO: 2791 - DNA, 621 bp, Triticum aestivum
tgaaatacaagtcggagggtcatgacatggtcattcttgccggtgatgagtatggagccgggagctcccgtgatagcgccgccaaggggccattgctcctgggcgtcaaggcagtgatcgctaagggcttcgagcgcatccaccggagcaacttggtggggatggggatcatccctcttcgcttcaaggctggcgaggatgcagattcactcaacctcagtgggcatgagtgtttcacgatcgacctccctcgcaagattaccgagattcgtccaggccaagatgtgaccgttacgacacaaaatgggaaatccttcacttgcacactttgcattaacacgcaggtggagctggaatactttaaccatggaggcatcctcccctaccttatccgcaaattggcatgaccgaccgaggaactacatttaaattgtattatctatatgcaatgtcatgaatttattctttataaattgattatttgtaccccttgattccattttgactttcattttttaataaatttgtgatgaaacattaaaaaagacatagcggagcttcgacaataattaagaggggacatttacttgatagtgtattgataatttattagtgaagaca

SEQ ID NO: 2792 - DNA, 703 bp, Triticum aestivum
tgccaacgacgagatcgtgtgagagggctttgccaaacattaggattgtgaacaagcttttggagggagagtggggcctaaaaccatccatgtccctacggggggagaagcattacgttttcgacgctgccatgaaatacaagtcggagggtcatgacatggtcattcttgccggtgatgagtatggagccgggagctcccgtgatagcgccgccaaggggccattgctcctgggcgtcaaggcagtgatcgctaagggcttcgagcgcatccaccggagtaacttggtggggatggggatcatccctctccgcttcaaggttggcgaggatgcagattcactcaaccttagtgggcatgagcgtttcacgatcgacctcctggcaagattaccgagatccgtccaggccaagatgtgaccgttacgacacaaaatgggaaatccttcacttgcacactttgcattaacacgcaggtggagctggaatactttaaccatggaggcatcctcccctaccttatccgcaaattggcatgaccgaccgaggaactgcatttaaattgtgttatctatatgcaatgtcatgattttttttataaattgattatttgtaccccttgattccgttttaactttcattttttaataaatttgtgatgaaacatttaaaaagacatagcggagcttcaacataattaagag

SEQ ID NO: 2793 - DNA, 768 bp, Triticum aestivum
atggaatttacggaatgaaggttgctcttgaggctgccagggacttgctttcctgcatagcgatgaagctaaagttatataccgtgatttcaagacctccaatgttcttcttgactcggaatataatgcgaaactctctgattttggcttggcaaaagatggcccaagtggcgataaaagtcatgtttctactagggtcatggggactcaaggatatgctgcccctgaatatcttgcaacaggccacttgaccacgaagagcgatgtctacacctatggtgttgttcttctagagttgctgaccgggcaacgtgctctggacaagaaccgcccgcctggacagcataacctggtggagtgggcaagaccttacatcaacagcaagaggagggtcatccatgtcctggacccacgattggggtcgcaatattcgctccccgcggcgcagaaggcggcagcgcttgcgatgcaatgcctgtcgatggacgtccggtgcaggccggacatggatcaggtcgtgaccgcgctggaaaagcttccggcggtgaagaaaacatacaagtaggggagggttgctggttccatgtgtcctccttaacctctctggagcatcacctactccttgtaagcaacacttcagggagtagagacagtgaagagctgccggacttgaggcgaagactagcctttgaatctgtcaagagaatgtagaatatatatcgccatgtgtacagctagctggtagcctgttactttgctgtcagcctg

SEQ ID NO: 2794 - DNA, 619 bp, Triticum aestivum
aggcctcaccaagcaacctaacatcaaaccactgaatatgtttttctagagggaagttgcgaactccttagttgccggccaacaaaattccttatgcctaggttcaagttgattagcattgttgtttacgtcgaaaacatagatagtcacaattggcgcatcaccgtcattgtagaaccaatgtacaatgcctgctggtagtgcaatgacatctccttgtctgaaacggtgcactttttggtgctcatctttgaacttttggctttggctttgaccctgtacggattgtgcttgcccatatttttgaaactgtttttggaatgtctctgggcatccagggaaagacaatccggcaaaaccacttccttggatgatgtagactaatccatgagtgttgtggtatcgcggtaacaaataaccatgaggttcgattacacgacggatgacaaatacaccaatacaacgaaattgctcattttcctcatcaaaatactcggtcaggcctgcttgtgacctcacttgacgaagtggtgtagatgcttgtagcctattgaatgcacactctccggaaaccccttggcgagagctttgccatgggttaaactcatgccaaacaaat

SEQ ID NO: 2795 - DNA, 1010 bp, Triticum aestivum
cgcgcagggaggacagggaaagagatgctgaaaaactgagcgaaaaggaacgagaaaggcttgataaagtgtctgcgctcaattctaaggaagccactacccacaaagctcctgctctctctgccaaagagaagtacttatgcaagccaatatcagagcttgacctctcaaactgtcagcggtgcactcccagttaccgacttttgcctaaaaattaccctctgcctgcttcaagttccagaactgaccttggagtctctgttctcaatgatcattgggtatcagttacctcaggaagcgaggattattcatttaaacacatgcgtaagaatcagtatgaagaaagcctgtttagatgcgaagatgacaggtttgagttggacatgctgttggaatcagttaatgtggcgattaagcgtgttgaagagttgattgaaaaaatgcaagaaaattcaatcaaaccagacagccctatacgcatcgacgaacatttgacctctttgaatttgaggtgcatagaacggttatatggtgaccatggccttgatgtcatggatgttcttcgtaaaaatgcgagtgtggcattaccagttattttaaccaggcttaagcaaaagcaggaggaatggtcaaggtgccggtcagattttaacaaggtttgggctgaaatatatgccaagaattatcacaagtcccttgaccatcgcagtttctatttcaacgacaagatacgaagaatctgagcacaagaggtatgcatttatgatactgcaactgaaatcatcaggctgggtcacaatgggagtaccataggtagtatcatgcatgccaactatgcattttagcttatgtggcacacaattaaatgaggaaggagagggttgataccatactatgataccgtattgtattaaatgatgtactattgtgtgtcttgcatggcaataaatgagactgctatgaaccagttatgatactatgataccaagtcttgcatggcaataaatgag

SEQ ID NO: 2796 - DNA, 530 bp, Triticum aestivum
  N_region (60)..(60): n = any nucleotide
  N_region (84)..(85): n = any nucleotide
  N_region (191)..(191): n = any nucleotide
  N_region (194)..(194): n = any nucleotide
accagacagccctatacgcatcgacgaacatttgacctctttgaatttgaggtgcatagnacggttatatggtgaccatggccnngatgtcatggatgttcttcgtaaaaatgcgagtgtggcattaccagttattttaactaggcttaagcaaaagcaggaggaatggtcaaggtgccggtcagattttnatnaagtctgggctgaaatatatgccaagaattatcacaagtcccttgaccatcgcagtttctatttcaaacaacaagatacgaagaatctgagcacaagaggtatgcatttatgatactgcaactgaaatcatccggctggtcacaatgggagcaccataggtagtatcatgcatgccaactaggcattttagcttatgtggcacacaattaaatgaggaaggagagggttgagtatcattatatgatacccgtatacatgataatatgattaaatagtatgtataataacatggactataagatgagactaaatataactaacacagttattaatga

SEQ ID NO: 2797 - DNA, 601 bp, Triticum aestivum
aagaagtattccatggagggttcattctttcgaagattgatggcccgctgtctactggcaatctagttcttgtggacactgatcccaacagcaatcctatcgtcaccttcaactacttcaaacatccacaggatctgagacgatgtgtttacgggatcaagaccatagagaaaataattagtacaaacactttctctaatttcactcccaaagatggtggatattcaatggaaaaactgctcaacatgagtgtagcagctaacataaacctgataccgaagcatacaaatgacagcacatccttggagcagttttgcagggatacagtggtcaccatctggcattaccatggtggatgccatgtaggcaaggtggttgaccagcagtacaaagtgattgggacctcaggcctccgggtgattgacggatcaaccctatccaggtcgccaggaacaaacccacaagccacagtcatgatgatgggcagatacatgggagtgaagatcttaagggaaaggttaggacgagcggctggagtataatagatacttggacattattatcttgttcaccatgtaagaatgtgacttaggagaaaagt

SEQ ID NO: 2798 - DNA, 820 bp, Triticum aestivum
gggatttaaacacaaactggatgactgcagttgagatgctggatgatgatatttatattggtgcagacaattgctgtaacctgtttaccgtgttcaagtccccatatgggttccttgagcccgttggggagtaccatctgggggacgtggtgaataggttgcatcacggttctctggttatgcaccacgcagattcggggacaggccagtttccttcagtcatctttggcacggtcaatggcgccatcggtgtgattgcctcccttccatatgacctatatgcgttcctagagaagccgcagtccgttcttgtgaatttcgtcaagggtgttggtaaccttagccatgcagaatggcggtcattctgtaacgccaggaggaccagttctgcccggaacttcgtggatggtgatctgattgaatctttcttcagtctgagcccaagccagatggtggaggttgcgtgcgcgatgggtgtccctccggttgagctgtataagcaagtgcaggagttgaccaatctacactagtaataagtaataagcatagcaacgtacagtactctagctgcctaccatcatgtatagctctagtgaatattcctactattaactcgttgccagcgtggtacagtagaatagatgcatgctaaaggtgatatttccagttctgggcccaacttcatggccgctcaactgctggtaacccagtgttgtagatgcaggtaacagccttcggtctaattacttcctttttgctttattattggagagaaatttggttgtagctaaggagattgtacatttggttacccttctga

SEQ ID NO: 2799 - DNA, 864 bp, Triticum aestivum
cggagcttcatcatgaacccagatgactacattgtggagtatgccatcaaagtaaccgagagtgcggccggggcttccgccgtaatcgtcaacaactttggagaacttcaagggttccttggaagaccccaaggtcaacacgatcggcccgctcactctgctagccccacgctcgacgggtaccaccggtagcctcagcctgtggaaggagcaggaggagtgcctgcagtggctccacggcaaggagaccgcctccgtcgtctacgtaaactttggaagcatcacggtcatgaccaaggagcagctcctggagttcgcgtgggggctggcgaatagcggcaggcagttcatgtggatcatccggcgtgatctcgtcaggggcgacgcggcggtgcttcctcctgagttcatggcagagacggcaggccgcgggttcatgacgtcctggtgcccgcagcaggaggtgctgaaccacccggctgtaggcgtgttcttgacacacagcggctggaactcgacaatggatagcatgtgcggcggcgtgccagtcatcagttggcccttcttctcggaccagcttaccaaccgtcggtaccaatgcaacgagtggggcgtcggcatggagatcgacaacaacgtccagcgcaacgccgtcacaggccttatcacggaactcatgcagggtgagagtggaaagaagatgaggaagagggcagaggaatggcgggagaaggcaatcttggcggccaagcccggcagttcgtctcaccgcaatctcaaagagctcctctgtgatgtatgcctaagaaatagttcagatcttccatgtgtagtttttttaaaggacttccttggacgactgtg

SEQ ID NO: 2800 - DNA, 503 bp, Triticum aestivum
tgaaatgcttggaactactgacgagaatgagcctctccaggccatgatgaaggatcagtttggtaactatgttgtacagaaagtactagagacttgtgatgatcagcagagagagctgattctttcacgaataaaggttcatttaaatgcactgaagaaatatacatatgggaagcacattgttgctcgagtggaaaaacttgttgctgctggtgagaggaggattggacttcagtcgtcgcagtatccttcctaatggcataggaatgaccatgtacagctaaccatggccaccgagatctaccttctgccgcctgcttttgggctgcttcaagccaagttagaaataaacatgttgtactgagactttgtacattttgtagtttgagcttatagtcgtgtcagggtttggctcagcgagtttatctacctgatgccaccgcggagaagataggcgtcatgtataagttttcgtctaggtgtaaaaaggggaggagagtcga

SEQ ID NO: 2801 - DNA, 686 bp, Triticum aestivum
agacacatacttggtttgatctgcacccatcttcaaggacaaggatggcaaggagaagaccgggttcagtgggcgttatgggaagcaggatcgccgcgccgaggttgctgaagctcagtccgcttgattcaatcttggctgggaatgacaacaaattccatggtggacaattttcatgggtaacggagaacgggaagcaagaaaagcatctcgtcgcgacagtcggcaagttcagcctcatatggaacttccaaaaggtgaaggacagcaaccatcactgctaccgcgaccaggagggcctgaagagctgctactgctacaaggtcgtcctcaaggaagagtccatcgtcgacagccggttcatgcacgagaacttcgcaggatccgactcccctgaagctcccctggttgtcgccaccccaatgaaagttagctccttcagcatcgcaagcaagcgttgattctgaaccgtagtgttagaagttacgggcctctatgcagattggtcactcgtctagttttttctggttcttttcagtgtagagtcatgtacttatttgcttgcggttttagacttgcgtgtttgcttgttgataaaacatatggcctcatcctgaatgttcggacaagagtgtagtgagtagtgttctgtgtgtgtaatgcaaacatcattttcacgcgtgtgc

SEQ ID NO: 2802 - DNA, 539 bp, Triticum aestivum
  N_region (126)..(126): n = any nucleotide
tgtgatgtcagtcctatttgttgtatgcagcctcacgatttcagatgtcttcgctagtattcttgggttcctacaaactggttggtgtattcttctgattgggcaggcaatgcgctccactgattnaagaagactacgctgtgggactccatcatggagctagggagggcatacgacaacatcatgggtcttgttctcttccttcccatcggcttcttgtcgtggtttcccttcgtctcagagttccagacacggttgctcttcaaccaagccttcagccggggcctccagatctcaaggatccttgccggccagaaggacattggggagttcgagtgaccagtgaattcgcataggcgggatacatgttgcaggttcatgtgtcatgatcgatttttgggcgtaggttcctccatggtgtgatcgacccttaaaagaatagtatatggcatgctaggggactaacttcaactcgttggtatagaaccaaggtgctcataaaagtatgtatattttgtcattctgtgccgccatttgca

SEQ ID NO: 2803 - DNA, 653 bp, Triticum aestivum
atgcctggttatctgacggttctagtagttttgaagatggtttccaataggacggcagaaatttgggacagacttacagcttaatgttccgcatcctgaaggccgtctctttcatggcttatctctgtgatgtcagtcctatttgttgtatgcagcctcacgatttcagatgtcttcgctagtattcttgggttcctaccaactggttggtgtattcttctgattgggcaggcatgcgctccactgattaagaagactacgctgtgggactccatcatggagctagggagggcatacgacaacatcatgggtcttgttctcttccttcccatcggcttcttgtcgtggtttcccttcgtctcagagttccagacacggttgctcttcaaccaagccttcagccggggcctccagatctcaaggatccttgccggccagaaggacattggggagttcgagtgaccagtgaattcgcgtaggcgggatacatgttgcaggttcatgtgtcatgatcgatttctgggcgtaggttcctccacatgtgatcgacccttaaaggaatagtatatggcatgctaggggactaacttcaactcgttggtatagaacgaaggtgctcataaaagtagtacgagaaaattccttattcgaca

SEQ ID NO: 2804 - DNA, 782 bp, Triticum aestivum
tctcttcgtttcgtgatctaccagtatggtatagtgtaatcatctcaacattgcacgccccagcacagcatcctggtttatggattgtcatggctggttatgctgacggttctagtagttttgaagatggtttcataggacggcagaaatttgggacagacttgcagcttatgttccgcatcctgaagggccttctctttcttggctttatctctgtgatgtcggtcctatttgttgtatgcagcctcacgatttcagatgtcttcgctagtattcttgggttcctaccaactggttggtgtattcttctgattgggcaggcatgcgctccactgattaagaagactacgctgtgggactccatcatggagctagggagggcatacgacaacatcatgggtcttgtcctcttccttcccatcggcttcttgtcgtggtttcccttcgtctcagagttccagacacggttgctcttcaaccaagccttcagccggggcctccagatctcaaggatccttgccggccagaaggacattggggagttcgagtgaccagtgaattcgcataggcgggatacatgttgcaggttcatgtgtcatgatcgatttttgggcgtaggttcctccacgatgtgatcgacccttaaaagaatagtatatggcatgctaggggactaacttcaacgcgttggtatataaccaaggtgctcataaaagtagtatatgcatattttgtcattctgtgccgccatttacatactactactattttgtgcaagtggt

SEQ ID NO: 2805 - DNA, 679 bp, Triticum aestivum
acttcagacagggcctagttttactgaaactgctatggacggcttgctcaaggaacaaggtcttagcggaaggtggctatgaaaaaatatttaaacagacgttcgagattctgccggatgagcagctgaaaatgtcctacgcgtgctatctatcaacatctgctggtcctgtcatgggagttatgtacatttctacagctaaaattgcattctgcagtgacaatcctctttcttacaaggcgggaaataaaacagaatggagttactacaaggtggtcattcctcttcatcagctaagaacagccaatccttcagtgagcaaagtaaatcctgcagaaaagtacattcaggttgtctcggttgaagggcatgagttctggttcatgggtttcctgatgtacgacaaggccgtgtccagcctgcaagaagcccttgacggtgctcgtgagttgcaaccataggtagatatcagagggaagtttcagttacttcagcctgtaacatccccaggggtatcgccggttctccacccgatgtcttccgctctgagcgtctcctgtttaagacatatccttcatgctgtgccccttggagctttcggttcggtacactcacgagcttgtatacagtgtttgaagtgtttgttcttgttcattgcgtaccccgtgttgtaatgatg

SEQ ID NO: 2806 - DNA, 1048 bp, Triticum aestivum
tctcactggttttacggattgctgatttgtgtggtcaagcaagaaatatccatttcctcttctacctcgaatctgacacagctatgtctgttgctgcggaaatggttgaacagttggagctagcagactgcgatgttactttcattgctgattttattgaccttctgatagtcaatcttgttcctggtcggaaactggcaaatgatgcagcgatgagtccatatgtggaatctaaaacgtgtggaagtgagcaagtaactatttcccagcagaacccattagagatgccacctgattatgtgttagttcaaagtacaatgcatcctaaagatatcagtgcatcgccgaataaatatcttgaatctgtcttaagtgcaactaacctagaggggccaaagtgctctgaggggtcggacttttctgcgcagcttgctgggagttctgaaagtccgagatacgatgggactggtgactgtgggactatgtactgtggtgggtacaaagagggaatccacaaactagactgcaaccatgttctaggtgatgggtcaaggaacatttcgattttccatatagatgaagcatcgcctccttcggagctggtgagtggttgctcgtcaatttccatcaccgatagtcaagatgtgctgaatggggagcttgatttgattgaagtcgagtacaaagattggtttgatgaattagcaaggatgcgggaagaagctatggaaggaggaggacaggagaagtggttacaatataatgaatgatgtttaagttcgagtatcgtgtgtgtcttgtctgaaacatcatcggaatgtctttagatgttcctctgcctcctgcttctacagttttgtgttttggtcatgcaaatgtgggttataataatcggtaggatcattgtcatcgatgtagatttgcactgttgcccagtgcgtttataattagttagttctttagctagctctgagttttcccagcattacaactttgactttgatgtgtcatcgggaaaacgcaaccgttgtagatacacggctgcaga

SEQ ID NO: 2807 - DNA, 761 bp, Triticum aestivum
  N_region (695)..(695): n = any nucleotide
gcccgctcccgctgctggcgccgagctcaaacatcagcatgagcttgtggaagcaagaggaggagtgcctgccgtggctcgacgacaaggagcctggctccgttgtgtacgtgaacttcggcagcaccaccataatgaccaacgagcagctggtagagttcgcctggggcctagccatgagtggcaggcatttcctctggatcatccgtcccgacctcatcaggggtgacaccgcggtacttcccccggagttctcggtcgaaaccgctgagcgtggtctcatttcctcctggtgcccgcagcagcaggtgttgaatcacccagcagtgggcgtgttcctaacacatagcggctggaactcgacactggatagcatgtgtggcggcgtgcccgtcatcagctggccattcttcgcagaccaccagaccatctgccggtaccaatgcactgaatggggcgttggcatggagatcgacagcgatgttcgacgtgacaccgtctcaggacttatcacggaggtcatggagggagagaatggcaaggtgatgaagaagaaggcgcatgagtggagggaaaaggcggtcaaggcgaccaagcccggcggctcgtctcgccgcaacttcgaagagttgatccatgaggtgctagctcctactcctagaccgactcatgacataaagaaataatagtgtacntgctccaaggtttcacaatcccggtttttcggaggaggccggaaaatcccttcttttggaggaggt

SEQ ID NO: 2808 - DNA, 848 bp, Triticum aestivum
ttcaaaagatgggcggattgacaacaaaaataacacatcatgctctttcagagcatcccactcagattttatctgtgatctgtagcttgatatgctaaaagtaacatcagcagttacagcagaaggcttaacctctccaatgtttggttgcttcacttgtgtgatcctaaattctttgattggaacagccatcctggaccatccacgaaaggaagtgtccccctcattgttgatgtaagcatgtaaatgaggaacagcttcctgaatatcttcacgaatttcatatgttgattcaagacgaaagagattaaaattcctcagcaagtaatcatgaagtgtcagaaattggagattgagttttgggagggcaagacagccttctccagaataattgatgctaggaacaaggctctcatcccacatgatctgttcatttggataaagaggaagtgcattaactgcatctttctgggattgacgcttctcaaaaaaagcaactacgacctcgataaggaaatcacgccttccagtccatggatccttctctgaaattattttaagcttattgcaaaccagatcttgcagttccatatctgacaagacaagcagcttctttgttaaatcagcacgcttatggattgaaccaatattacacaaggcaaggtctcgcaacttaggcacttgtttgaatgctagcagctgaaaagcttggaaacgagaatagtgagcttgcaagacatcatcatcactaagctgtgtcccagaatgatcgttaatctcaaagccttcatagaactgaagtaagtccaccaattgtgcaaaaagacgcccttttcatgagcataaag

SEQ ID NO: 2809 - DNA, 793 bp, Triticum aestivum
cttgtagacagcaaggacatcagggactacaacctgaagtggctgaggaggcagatagggctggtccagcaggagccgatcctgttcaacctgtccatcagggagaacatcagctacggcaacgaaggcgcgtcggaggcggagatagtgcaggccgcaacggaggccaacatccatgagttcatcagcggcttgtcggcggggtacggcaccgtggtcggggacaaagggagccagctttctggggggcagaagcagaggatcgccatcgcgagaaccattctgaagaagcctgccatactgctgctggacgaggcgaccagcgccctggacggcgagtccgagagggtggtgatgagctccctcgccgcgaaggggtgggggaagagcggtatcggcgaggtgtcgtcgagcacgaccacgagcatcacgatcgcgcaccggctgtccacggtcgcgggcgcggatgcgatcgtcgtgatggagaaaggcgcggtggttgagatgggcagccatgagacgctggtctctgcgagcaatggtgtatactcgcggatgtacccgtgtgcaggtcaaaaggggcgaaggactgagtttcttttcatgggtttctgatatggctgcagcaattagaaatttaagcatcatttgcttattttcggtcttgtcttgtcgcttacagccgtgtttccctgtccgtatgccgactcatatatttatagtgtcaaccgcggtgcagtggaaagttcaggtgggtagacttttcgaaaaacagaactacaaattactccct

SEQ ID NO: 2810 - DNA, 623 bp, Triticum aestivum
gtggatgaggtctcttttgatacggttaacgatagcagggacaattgcgctcttccgcataaaccggcttttgtgcattaccttcctaagatgcacctgaatcttgagtgcattgcccacagccgataggacaggactccaaataccaaggacaccacgtggcctttgagtaggtgcagtttctagagatattttaagccttatctctgaaatatcaacaagctctattcgtatctcaggatccacttcagtgacagttgagctgctggaggtgccggtaaagcgaagattgttgtagaaatcaaccagtgcccaaacaataggttcatgaatattcaacctccatgtttggtcagttacccgtatatagacatgcgggtagacttgaataccattcgaagttacattgcttacagcaatgttcgctttgaaaacaggatgatttgaatcaggcatgctctcagttgccaaaacaacaggcattatggacaatggcaattgattatcgagttgcaactggcctatgatcaacttaaatctgctagtggtcccagagtcataaccagtcatgtatgagatgaaaaccttctgcagatttaggtataaaagctctcttggcttat

SEQ ID NO: 2811 - DNA, 732 bp, Triticum aestivum
atatgacgggactgataaccaaggaagcaagttgcacagatcgtcgggaacaagtttacagggggcgacagggttggaagtgaccagcgacgaggaaggtttccatggagcatggttccaggggacggtcgtgaaatccgtcggacacaagttccttgtggagtatgacgcgctgaaggacgacgacgagacgacgcccctgaaggaaaccataggggaggagcacatcaggccctcccctccggctatccccgtcaccagcggcttcaaggtcctcgacgagatcgacgcctacaccaacgatgggtggtgggtcggtgtggtatccgaggtcctcggcgaccgcaagtacaaggtctacttcaaggcttacaaggagcaggacgagtttgaggtcgagcagctgaggcgtcactgcgattgggtcgggggaaggtggatgcaggcttccccggcattggagatgtgacggctaaagggacgcacgccttgttttgtacaggagcctgggatgattagtactctacccatgagagagtggcttcactagttatgatgctcgctgaaccgaagctgtgttgtgcgcatagaaaggccaatttgctggcctttctgcattaccattcctgcagcagctgatctagacgttggtcgaccggagactttcaagtaaggttcgtcgtcgtgcttttatgtaaaccgccgcctaagaacaaacctctgggagcatcg

SEQ ID NO: 2812 - DNA, 467 bp, Triticum aestivum
gctgtccggggaattgtccatgacctgacaagatactcagaaacagcaccacctcccaaacggccaaaaaagttgcagaaactgaacagagagagtgatatagtggtgtccacagcacctgctgcaattccaacttgtgcaagattgttaaggaccatgactccagatccaacaccgatgaaatatacagcaaagagaagccaaaagtctgccttgagcagtgcttcacgaaatctgaagtcctctcctctttttggtcttcttctcgtctgctttacagccccttcaccctccgcatagagaatgtcgatatcgaaggaatcctcatcgtctagatcagtaaggtttgatccggaggcagaaggtggaagaaatggttctgtatgatcactatcagcgccggaagagtccgacgggccttttcttcggttacttggaaacaatgtcattttcaaggtttcaccgcg

SEQ ID NO: 2813 - DNA, 598 bp, Triticum aestivum
gatcgcggccggtcgccggtgttcagtgcggagctcttggcgagatgaaggagagcgtcgacacaacggctgtcgtcaaaatagacgacatggatgcgaaggtgttccaaggcattgctctattttgtgtacaccgacaccttgccggagacgaagagggaagaagcaggggaagacgccatgtctcaacatctgcttgtcgcagccgacaagtataacctggacaggctaaagctgatctgcgaagacaaactttgcaggtgcatccaagtgagcactgtggcgacaatcttggtgttggctgagcaacaccattgcagtggcctgaagaaggcatgctttgattttctcagctctcaggcgaatctgaaggcagccatggccagtgacggctttgagcatctgagccaaagctgccccgctatcatgaaggagttgatctctatgctcagcgccttggttccgtgatgcttacctagtgttctacgaatggtggttggtgttcccaggatttctgtcatcacgtagttttagcaatggcagttcttgtatctagacttaggctatcaggtaaggctgcatcattctagggatgatc

SEQ ID NO: 2814 - DNA, 778 bp, Triticum aestivum
ggcgccccgctgcctgatcgcggcccggtcgccggtgttcagtgcggagctctttggcgagatgaaggagagcgtcgacacgacggccgtcgtcaaaatagatgacatggatgcgcaggtgttcaaggcattgctctattttgtgtacaccgacaccttgccagagatgaagagggaggaagcaggggaagacgccatgtctcaacatctgctggtcgcagccgacaggtataacttggacaggctaaagctgatctgcgaagacaaactttgcaggtgcatccaagtgagcactgtggccacaatcttggtgttagctgagcaacaccactgcggtggactgaagaaggcatgcttcgattttctcagttctcaggcgaatctgaaggcggccatggccagtgacggctttgagcatctgagccaaagctgccccgctatcatgaaggagttgatctctatgctcagcgcctttgctccgtgatgcttacctagtgttccacgaatggtggttggtcttcccaggatttctgtcatcaagtagttttagcaatggcagttcttgttatctagactttaggctatcaggtaagactgcatctattctagggatgatctaaagtagtctcattttgtctgttctgttagctgatggcatctctaaaactctcacagttagtcatggatatctttgctctactcagctagcttggttggtagaatcttcggttgactgcaaatttgctaggccatctttttacatacaagtcatttttag

SEQ ID NO: 2815 - DNA, 682 bp, Triticum aestivum
ctggacttgatgtcacggtgtacaatgtgaggcttgcagactccatggatataagaaagaccccggcttgctccttgtgcgatcttgagccgtgtcggccagtcaagaaatgaacttgcatcaccatccccattgtgaagccaatcgtccaggctgccattctccatgtacggatatatgaggaaccttgaatctccctgtatgctataaccccagagtggtacaaggttgtcgtgctgtgccattgagagtgcatcaacctctgcagtgaattccctgtacatcagacacatgtcatcattaagcttcttgatagccagtttgaggccatcaggtaaatcagccttatagaccagcccataacctccgcacccgatgatgttctcctggtgaaagttatttgtagccttcacaatgtcagcgaatgtgaggttactttcttctcccttgcctcgtggcactatcactaatgattcttccgaaccagattcgatataaaaaaaaaaaaacaacgaaccgaccgagaagggtagcgagcggatctctcgcccagcatcccgtgccgcgcaagagcgactcaagagactcatgagcagaagctggctgcttgagatgtgggtagacgagaagcgacgctcctgcagaacaccacacctaagcgtgaagcgttaaaagctggaac

SEQ ID NO: 2816 - DNA, 565 bp, Triticum aestivum
cctccaatcgccaatgaacagacggtagccctattcttcaacctagttaaagctgctatctaagggtacacatctggcctaggtaatgcggttgttaatgtgcacctaaactatgagaagatatttgcttttgttgaaatgaggtctgtggaggaagcaagcaatgcaatggccttggatggtataatgttcgagggagcaagagttaaagttaggaggccaacagactacaacccttcccaggcagctgcattgggtccgagccagcccaatcccaacctcaatcttgctgctgttcacttgcctagacaggtaacccggcgcaggccgtgatcccatggctcatcccagcggtgatcctgtcgtcggcaaggtgtttttggagtatggatgtggagagattggctagggcgagaccttgctgaaggagactgactatttagcaacatatcttaccaagatttacttggcacttgcttgttacaatagttcgtccaaattttcatgttggtggtatggttgtggcatcgcatggtctgatataaacactgcatcgaggtctaat

SEQ ID NO: 2817 - DNA, 692 bp, Triticum aestivum
tagtagcaactatcacccatcagagtcatctgtgtccattgcctcttacagtgcaacctatcatatggaactacgatcattgcctacggctgtatccaactcctgacatgatagtattggctgacaagagtgagcagaaggccttcaaatatacaggaatcacttgcttcaatcctggttcttttgcgaacgacagcacctttgcagcataccgtccttgcactaaggaggttgagctttctgcattagaaagctaatattgaaggtgggacaaactgaagctgtaatcagtaacaaaccgaacctttgatgagctgcctatcactcctgtacatcagccatcaggactggtgtttatgactttagccatataaactaatgagtccgtttcatggaagcgaatttgcaagcatgacaaagcaacgacatccatagaattggtgctgtttctccagcaaatctgatgctgacatctcaactttgtatcacacattcatagcttcagatagttgtggaccatagtgtttgttacttgttagggtgttttccccacctggccatctgtcctttgtgcagtgtttgtgtaacatgatctcagggtgctttccctaaagtcacagaatggtgctcagtcctgtaatatgtactgtttatgtttgccattgttgtaaaccatgctcaccaagctgtga

SEQ ID NO: 2818 - DNA, 701 bp, Triticum aestivum
  N_region (667)..(667): n = any nucleotide
cgctatgttaattggaaaatgggatgaagctatgtattatgtgcttggggatccaagcgctaaacccaagtggtacgacccaatgtcagaagcagttcttttgtgggagagagacaagtctttgaatcaaacccgatataacctttctccatttgcaatttctttaaatgaattgccacttcacatgttgacgctgttgcctcctactgattctcgcctgaggcctgatcagagacatctggaaaatggtgaatacgaaaaggcaaatttggagaaactcagacttgaacaacttcagcggcaggctcgaaggttacaagagaaaggctggcaaccaatgtggttcaggaaggacgaggacgacagctactgctatcttgggggatactgggaagcgagggaaaaaggaaactgggacgggatcccccatatattcggccagagcagtgcatcgaccgggtagtcgcagctataaccctgcgcctctttcttttatggtagtggtgtccacatttcctttacacggaacattgattggcacaaaatgaaaatgtgaatatatgccaatttactggaggtttcacgtagccagaatgtactggcaaatacttgatgagattgtgttactacctctctctcagtttacagggcatgcgcgtgcccctangttgttaatttgatcaacttaatacaagtcgttt

SEQ ID NO: 2819 - DNA, 605 bp, Triticum aestivum
tagtgagaagatttggtggaagccaatcagatccgctgcggttcccgggaaggcctacaacgatgacattgaggtggcacgggagatcaggtcgcagttcgagcatgccgcaactctgcagccaatgtatccaaggtgctcgaggttgggaagatgccttaccaccacaagacctcaggactgaaagtatcctcatcgatgataatctgtggccggccttcagtcggcgaggagttcctgcagtttgtggaggacaaagctacagaacatggcaacctttcttcgacattgcagaagctctacatgtgggaggagaagcttcttgaagaactcaagagtgaggagaagatgagggtgctgtatgataaaaaatgtgaggaactaaaagtcctttatgagagaggtgctgaggctcataaacttgaggcaattgaaacttataccaggaagctatcgacaaaaataagtgttgccattcaggttgtcaacactatctcaaagaagatcaataagctgagagatgaagaattgtggccgcaaacaaatgagctgattcagggttgatgcaatgtggcatgccatgtcagaatgccataaaatccagt

SEQ ID NO: 2820 - DNA, 794 bp, Triticum aestivum
gtcagaaggggctatgttggatcaggcaaaccgcgcaaaggttgaggcttgaagcgattctcctccaagtcacaagctaccgccgaagggattagaatggtctcagagtccatgagagctgaaggcagtgctgaggctgcaaaactgagaattgctgaacagtacatcacagcatttgctgctctggccaagaacaccacgacaatgcttcttccaagcgacgctggcaacccatcatctatgatagcccagtctctccagatatacaagcatataagccagtccagcagcccgaaaggagggaaccaacaggcagaagaagttgaggaagcaggaccgcaagaagagggcgatacgttcggcctgccttctgtgaccagcgcgatgccacccagcacgcaaacaggccatggcagcacgttctccctgcagaagcgtaaagaatgatcagcctgttcaagtaccgaagggaaccctttttagataggagggtgtcactgaaaacagcagcagcatttgaggtttcgagcttaattcatgttatgttgagtcggcttaggttgatatggtaattgaccttacattagttatccaggcgccaaatgcaaaggaggctaggcgactggggagattttgacggcagcctgcaagacttgtgtaatgcaagtatatcgctcacgatgccagcatactcttgatggcaatatttcactgcagccttttattcgtgtgttccgacgtcagttttacatgttcacagtttgcatgtcgtcctactctatttacttctgcaa

SEQ ID NO: 2821 - DNA, 685 bp, Triticum aestivum
gtcttctaatgtgatttgctttggtctgatcctagttctgacacacaagggtggggggagagtgacagaggtgttgcttgtactttcggtgcggataagcttgtagaatttttggagaagaatgatcttgacctcatttgccgagctcatcaggtggtagaggatggctatgagttctttgcagaaaggagattagtcaccatcttttcagctccaaactactgtggagaattcgataatgcgggtgctttgttaagcatagatgaaagcttaatgtgttctttccagatcttgaagccaaagaaacaggagcaccacattcaagaaaaccaatttcaaacaaggcaccgacagtggacaatgcttaacttgtattcagtcacatcgtcatgattgttgtcagctcgaagggggtgatcttatatcccagatccaccagggcatgacattagaagcattcttcagcctggttctcttacgttctccgctacttgctcgcggcactgcattcttgtggatgcagttgttttgtttttgttcgtttctttgcttgattgctgtgtgctctatgtttgagctgagaatatagttatgtagtcataaccgtgccatctatggcacctacgtaaaaaagaaagggattgagttaactatgcatgtaaatttacgacgagtgaagtgaagt

SEQ ID NO: 2822 - DNA, 828 bp, Triticum aestivum
tgtttttctcgcattttcaagaggacgagcggcggtcagcaacaaactggtccactcaatgaggacctcccgggtgttgagaacataacaagatttagctataaggagttggatagggcaactgcaagatttgaccaatccaataagattggtgagggaggttatggaccagtttataagggaacgctcagggatggaacagctgttgcagtaaaggtgctctctttgcagtctaggcaaggcgcgagggaatttcttagtgaacttattacgatctctgatatttcccatgagaatctcgtcaagctttatggctgttgtgtggaaggaagccacaagatcctcgtctataattatcttgaaaataacagccttgcacaaacccttctaggttctcagcggcatagcagcatccaatttaactggagaactcgagtgaatatttgcattggtgttgcccagggactagcttacctccatgacggtgtccgaccacatgttgtccaccgggacatcaaagctagcaatatacttctggatcaggatcttaccccgaaaatttccgatttcggcttagcgaagcttctaccttcggatgtatcacatattagcacaagagtcgcaggaacgctgtaagtgtaaaccatttaatcgaacctgtctgctttactaaatgtttacttgccgttttggggtaaaaaaaaaccatttttggtatatttacttgtgtttctgttctcattatactaaaatgttagtttgtctgatcctttgaagttagtgggtgataggctcttatcgacgtaagcaagggctgcatagggatga

SEQ ID NO: 2823 - DNA, 447 bp, Triticum aestivum
agggatgttcgagaagtacatgggagactgcttggacagcttcaacacgacacggcgcatgatcctctactacgaggacataatcagaaacagaaatgcattattccaggtgcaggaattccttggcgttccggtgaggaaactggtgagcaggcaggtgaagattcatacgcgccctcttccggattttgtcaggaactgggaggatgtgaacagcagactcaacgggacagagtacgcccgttttcttgatggcgcagattacgtgaagtgatgcattcggaattctgatgtaggttcaagatcatttgcaaggggttctagaccacagagtagtggaagtctgtagacctgtagtctccagaggattgattattttgtacaatgaggtagttaaagtgcatgaagcttagagatccatatggaaataatacgggcaaactgtac

SEQ ID NO: 2824 - DNA, 738 bp, Triticum aestivum
ccccggcaaacagctccttcactgtggagtacccgatgtactctacaaccccgggaagcaagatcccaggaagcccgggaggtgtggatccgggaaccgcaaccccgagaacaccgtccccgggtatggtgtccccagacaccccaacatcgagcaaggtggttcccgggaggctgttcgcgaccccgccaacagcaaggtcggagctgttcgacgccgacgatagcgttggcgccccccatatgtttcgacgcatgggggatctcctcggcgaggctgcggcaacaccgcaacagcccgaggaagaggacgttgatgacgacgacgtcttgcatctgatggccagcgaggagccgaccacattcgcggaggccgagcaaaaggattgctggcgccacgcgatgctggatgagctggcgtcgatcaacgacaacgccacttggacactcaccacactgcctgctgggcaccgagccatcgggctcaagtgggtgttcaaagtgaagaaggacgagcacggcgccattgtcaagcacaaggcgcgccttgtcgccaagggctacatgcagcctgagggagtggacttcgaggaagtcttcgctccggtggcaaggctagagtccgtgcggctcatccttgcggtggctgctcaccgcggttgggaggtacaccacatggacgtcaagtcggcgtttctcaacggcgaccataacgaggaggtgtacgtctcccagccaa

SEQ ID NO: 2825 - DNA, 445 bp, Triticum aestivum
aaaccttgtgaagagactctggtccatgtggctgtacttctgaaaagccatgttcttcacgacagggggtaactgatggtgatcaccaattaaaatgcaacgtttgagacgagcatagccatcttcctgccgttgcaggagagttggtataaaagtctctatctccaatatctgtgcactttcttccatcagtaaattgtcatatttgaaacccaattgaagaaagtctcttctcttcaatgctgcatgagtacaagtcatggcaacaatcttagcttgtttagtcattagataatttgctcgctcagctgttgacttcagtaactcaaaagccctgcactcttccagctcttggaatatcgtagaaagatgtttgaaacatcctttggctgcatccatatctttctcaaaggactcaccagtaaacacaggctgtagggtatcc

SEQ ID NO: 2826 - DNA, 664 bp, Triticum aestivum
gcttcgtctgttatggccaactctacagagaaaattagacttgctggaaatcaaaatgtgatggtctgtgagcgaggcaccatgtttggctacaatgatctaattgttgatccaaggaactttgagtggctgagggaagcaaattgcccagttgtagctgatgtaacacatgctctacaacaaccagctgggaaaaagcttgatggtggtggggttgcaagtgggggcttacgggaactcataccatgcatcgcaaggactgctgttgcagttggtgtggatggtattttcatggaggtacatgatgatcccctgaattcaccatgtgacgggccaactcaatggccattgcgcaatttggaggagctgttggaagaattgattgcgatcgctcgagtcaccaaagggaagaaaccgctcaagatcgacctaactccattcaaggaatgatttggcagtggatagcaataggaataaccatgtggctgccaattggtttcaccaatgtggtcgtgtccaggcgagttggctctttgtatgcggtactttcatttaccgttggattcaagctttgttcgattgcctgcatgtattagttcctttccaagcgtagcatatcagccacatattgctgttttgaatcaccttgtctcgagagtcaatc

SEQ ID NO: 2827 - DNA, 805 bp, Triticum aestivum
accttcatgttgggaactcaccatcagattgtgctcttcaaagcccagatgttttgcccatggactttgttcaaaggctacataccatacacatagcactgagctcagccatgcaggaagtagcagtttatgtggggaacagagcatgctcgtagcctgcattctaagccatgttggtggtctgtggtgacatgcttctcttggttgatctctcggtaagcatggaccaactgtttggcttcctggcacctttcaagtcttccgcctcgacttctcggtcgaaccagctaagtgggtgaagatggataagttggacaattgggctctcttccttaccaatgataggagaaaccctacattttcttgcatgaaccccgaaagatggggaggaaagagtaactatatttatgttccaacaaaatcagaagattttgatgagccatggactgcaatagaggttgaacagccggtgcccagctcgactcaccgtatgtcattcagctccgcagccactgcccattgcagtccactaaatagcctctgggtgcttcccagtttggtttacggggttgaccagtgattggtcatcgttgcttgttgcagttgcaaggcttttcttagtctttcacaatgccagtcctgtcgattcctgcttttatattattcaattagccactaggttctgtaactcccatggtttcttgacttgtcaaatgtattgtgtacaagaatgtttatctatattgtctccaggaagtgatcgtcctgcactgatgctatgggattaattgaattcttatgtagc

SEQ ID NO: 2828 - DNA, 301 bp, Triticum aestivum
tggatgcaccaagtatagcctcacgagggtgaactggacagatcaagtggagggccacccacacacgtatcaccctggggaggtgtcggcgaacttgatcagggagctgaggaagtcaaatgcgaaatactcatacatgtttgcacggaaatttgccccagagtgcctcgagccgctgatggagattgcggactcggtcatcctacgtgactaggccagcagcacctcacatttgggtgtgtcggataaactgagatgatgagggttgtgatgcgatgaacaggcacgagctagtccatct

SEQ ID NO: 2829 - DNA, 432 bp, Triticum aestivum
gctggatgcaccaagtatagcctcacgagggtgaactggacagatcaagtcgagggccacccacacacgtatcatcctggggaggtgtcggccaacttgatcagggagctgaggaagtcaaatgcgaaatactcatacatgtttgcacggaaatttgccccggagtgcctcgagccgctgatggagattgcggactcagtcatcctacgtgactaggccagcagcacctcacatttgggggtgtcggataaactgagatgatgaggtaccgaaatgcgcacttgctgctgcactgttgaaagaactaatcttctgtgtaggtgttgtattgagagagttatctctgagtggagtgtacatagtatgaaatccgggagttttaggaattatgcagtctgtatgctttaacacttacataataaagttgcacgc

SEQ ID NO: 2830 - DNA, 474 bp, Triticum aestivum
  N_region (125)..(125): n = any nucleotide
ggtagctcgccgtacctaccgcccccgcgggtgtcatctccgggctttcttactccgcgacctcgttcagtatctctacagcgagaacatagaggagaaggaggggctgatcaaagcgatatccntgggggaacaaagacaagttccagctcactccactcccccagcaagttcttgtgctgtggggagagcatgaccagatcttccccatagagaaggcattccaggtgacgaggcagctaggtgcaaatgttaggctggagatcctgaagaacagtggccatatgccccaggaggaggacacaaagaggttcaacgaggctctcctcaacttcctgctgcccactccgagttcatcgctgtaatacaatttcattgtcgattttcgggaagatggttgacaattcctaatttaagctccattttacctgtaagatatagtactacttagtatttttattggtcaatgagtgt

SEQ ID NO: 2831 - DNA, 388 bp, Triticum aestivum
  N_region (376)..(376): n = any nucleotide
  N_region (382)..(382): n = any nucleotide
  N_region (387)..(387): n = any nucleotide
gacttgatatatctgctaaaataccaggttctccaggcaaacctactgcccgattcgtatcagcccttcgagtctgctgcaatcgtcaaattcttctcaatcaggaaaccgcacagcatgtttcaaatgttgttacttggaaacgttcagtctcgtctctatcatcgtcatctaaaagtccacttacgacttcgatgattcaagatgatgtggatgatagtaataatgattttattgagcaatttgctatggtgtctggaagccattcttctacattggataggctacatgcatgggagagaaaattatatgatgaaatcaagaactcattgataatactcgagctgttgtgaaggatctgcactccaggtttctntgcaancccang

SEQ ID NO: 2832 - DNA, 613 bp, Triticum aestivum
  N_region (384)..(407): n = any nucleotide
tggatggctccagagatgatgaagcacataaccctatggtcgaaaggttgatgtttacagcttcggccttatcttgtgggaaatgcttaccggctccgtgccttatgaagatttgactccgttccaagcagcctttgctgtttttgataagaatgtgaggccggccattcctgctacctgcccagctgcattacgggttctgatcgagcagtgttgggccttgcaagcagataaaaggcctgaattctggcaaatagttcaattactggacaagttcaagatggttcttgaaagagatggaacacttgacaatatgccaagctcaaactgccaggagaatcatgatcccaagaaatggctagcccactggctccacaagctcannnnnnnnnnnnnnnnnnnnnnnntctctggacctccaccaccaaagcttctgtaactaatcttctctcttccaatctgttctagtccaggtagtccttataatgtaaatatcaaaagtttcttttggtatatatatataaaaaagtcccattagcttgtatttgttgtttcatagcatagtaatgtgaagtatcttcttctgggtttctaatcttactttttttgtcct

SEQ ID NO: 2833 - DNA, 417 bp, Triticum aestivum
cgcaagacggtcccgcttcaccgtgtcatgatcctggaggtcagccagtacctcgagaactacctttggccgcacttcgatccagatgacgcgtcctttgagcacgtcatgtccatgatcctcatggtgaacgaaaagtttcgagagaatgtggcggtatggacatccttccatgcccggaaggacgcgttcaaaggcttcctatggcgcgttctcaagctgaaggaagaggatagggatgttagtatggcagagaagacaaactacctcttgtttatgataaacgcatttcagagtttggaggatgaaattgtccgggaaactatactccaggtggtaagcttaaagttgtggcatactctttcttttggacgacttcagatggagctttgccttaatcctgaattgattaagaag

SEQ ID NO: 2834 - DNA, 510 bp, Triticum aestivum
gccttgatggatttaggaacgcagtttaatgttcttgtagcgactgatgttgcagggcgtggtattgatattcctgatgtcgctcatgttattaactatgagatgcctagttcagttgatacatacacacatcgcatcggaagaacagggcgtgcaggaaagaagggacttgcaacttcattcttgaccctggataacactgatattttcttcgatctgaaacagatgcttactcagagcaatagtcccgtccctccagaacttgctaggcatgaggcgtcaaagtttaagccaggatcagttcccgatagacctccaagaagaaatgacaccgtctatgcatctcactgaagcaatctgccgcagaagaggtggagatccttcctgggtataattcagggccaccaactgtgtcgagatttagtacttatgagaactgggactatgtatcttatttttctgtcggtgccataatgcaagtatgcaactgtcatgcccaaacatcgactg

SEQ ID NO: 2835 - DNA, 833 bp, Triticum aestivum
aggccacagatctgatacccaaagtgatcatggtgaaggagtcaagagcagatgtcacgactccagaagatactcacagatcttggggacaagacggccattgtatttctgcaacacaaagaagtcagcagacaaccgtgccaaggatctggacaaggcaggtttccgcgtcacagcactgcatggagggaagtcacaagatcagagggagatcagccttgatggatttaggaaccgcaggttcaatgttcttgtggcgactgatgttgcagggcgtggtattgatattcctgatgtcgctcatgttattaactatgagatgcctagttcagttgatacatacacacatcgcatcggaagaacagggcgtgcaggaaagaagggacttgccacttcattcttgactctggataacactgatattttcttcgatctgaaacagatgcttactcagagcaatagtcccgtccctccagaacttgctaggcatgaggcgtcaaagtttaagccaggatcggttcccgatagacctccaagaagaaatgacactgtctatgcatctcactgaagcaatctgccgcagaagaggtgagattcttcttgggtacaattcagggccaccttctactgtgtcgagatttagtacttacgaggtacaaacatcataacaattgaaccattatcttttcctgtttgcaaatcagcctttctatttctgtaatctaagtatatttggatatttctgtgatgattcagaactggacctatgtatcttattgtactgtgggtgccataatgcaactgtcatgcccaaacatcgactgcttttgaag

SEQ ID NO: 2836 - DNA, 710 bp, Triticum aestivum
ccagagatactcacagatcgtgggacaagacggccattgtattctgcaacacaaagaagtcggcagacaaccgtgctaagaatctggacaaggcaggtttccgcgtcacagcactgcatggagggaagtcacaagatcagagggagatcagccttgatggatttaggaaccgcaggttcaatgttcttgtagcgactgatgttgcagggcgtggtattgatattcctgatgtcgctcatgttattaactatgagatgcctagttcagttgatacatacacacatcgcatcggaagaacagggcgtgcaggaaagaagggacttgcaacttcattcttgaccctggataacactgatattttcttcgatctgaaacagatgcttactcagagcaatagtcccgtccctccagaacttgctaggcatgaggcgtcaaagtttaagccaggatcagttcccgatagacctccaagaagaaatgacaccgtctatgcatctcactgaagcaatctgccgcagaagaggtggagatccttcctgggtataattcagggccaccaactgtgtcgagatttagtacttatgaggtacaaacatcataacaattgaacaattatcttttcctgtttgcaaaccagcctttctatttctgtaacctaagtatattcggatatttctgtgatgattcagaactggacctatgtatcttat

SEQ ID NO: 2837 - DNA, 675 bp, Triticum aestivum
catcctcacttggcgtccccgcagtgccgccaccgcccgcaggctgcgggtgccacccgtatggccaccaccgtgcccatggccatgttacatctgccagccagcgcacctcctggacgccctcatctgcaacgcaaccgccacccacgcctccccattcccgctcctcgtcaccgacgcgcgcctggacgcgctctcggcgcgcattgccaagtactactcgattcagcgattcgtgtcggacacgggtgctccggcgagcaactggacccggaagcacgacgagaggtacttccactattcctcaggtatgcaggcggtggtgatggcgcttggggtgtgcgaggaactgagcctattcgggttcggcaagccggcaggggccaagcaccattatcacaccaaccagaagaaggagctggacctgcacgactaccaggcggagtacgatttctacggcgacctccaggcgcgaccggagatggtgccgttccttgacgaggcccaaggcttcacggtgccgccggtcaggttgtactggtgaggtgccttaactgtgtgtattactgtgttgttgttgtaaaattgatactactacacttgattgacaaaatgtcaatttagccgacagagaattgtaaattaggggcaatggaagatgaaagtctcactgaa

SEQ ID NO: 2838 - DNA, 710 bp, Triticum aestivum
ctcgctctccttcgtcaactccaacatcctccacctctgcgcgtcccgcagtgccgccaccgccgcaggctgcgggtgccacccgtatggccccaccgtgcccatggccatgtacatctgccagcccgcgcacctcctggacgccctcatctgcaacgcaaccgccacccacgcctccccattcccgctccttgtcaccgacgcgcgcctggacgcactctcggcgcgcattgccaagtactactcgatccggcgattcgtgtccgacacgggtgctccggcgagcaactggacccggaagcacgacgagaggtacttccactattcctcaggtatgcaggcggtggtgatggcgctgggggtgtgcgaggaactgagcctattcgggttcggcaagccggcagggggccaagcaccattatcacaccaaccagaagaaggaactggacctgcacgactaccaagcggagtacgatttctacggcgacctccaggcgcggccggagatggtgccgttccttgacgaggcccaaggcttcacggtgccgccggtcagcttgtactggtgaggtgccttaactgtgtgtattactgtgttgttgttgttgtaaaattgatactactacacttgattgacaaaatgtgaatttagccgacagagaattgtaaattagggcaatggactgaaatttgtaagcagaaataaggcc

SEQ ID NO: 2839 - DNA, 638 bp, Triticum aestivum
gcggggatggggagggtgacgaggacaagggcgcgcgcggcaacgccgtcggtggcacggcgcgaccggggaacctgcaccgctacatcgagtccgagcaggcggcggccgggtggccggcgtggctcagcgccgtggccgccgaggccgtgcagggctgggtccccctcaaggccgagaacttcgagaagctcgagaagatcgggcagggcacgtacagcagcgtgttccgcgcgcggagcctcgagacaggccgcctggtggcgctcaagaaggtgcggttcgacagcgtggagccggagagcgtgcgcttcatggcgcgggagatcatcgtcctccgccggctgcagggccaccccaacgtgatcggcctccatggcctcatcacctcccgctcctccgcctgcatctacctcgtcttcgagtacatggagcacgacctcgccggactcgcctcctcccccgacctctccttctccgagccccagatcaagtgctacatgcggcagctgctggcggggctggagcactgccacgcgcgcggggtgatgcaccgggacatcaagtgcgccaacctgctggtgagcagcgacggcgtgctaaggtcgccgacttcggcctcgccaacgtgttcgcca

SEQ ID NO: 2840 - DNA, 691 bp, Triticum aestivum
aggcttttggcctactgtcatcgagcccagtgacctggcgggtctgtcctcacctttgcactctgcatatggtggtcctgctgagatcatcgtgaatggtgtgtccggctaccacttgatccctaccagggtgacaaggcctccactctgcttgttgagttctttgagaagtgccaggttgaccccagccactggaccaagatttcacagggcgggcttcagcgtattgaggagaaatacacctggaagctttactctgagaggctcatgaccctcactggggtgtatgggttctggaagtacgtctccaaccttgagaggcgcgagacccgccgctaccttgagatgctgtacgccctcaagtaccgcaccatggccagcactgttccgctagctgttgagggagaatcagcaagcaagtgatctcgccacctccatgccgaaagaagggtggcttggattcctgcaaagattgagatttgataatgctttgattttcttcctagacgctgctcttttttaagattcaaggtcgagtcagtgtgctagtttggtttagtagcgggagtgagtcgggacagaggaaaatgtggtgtgtgtcagtcggttggtgcttgtcgtatttcttggatgttaccgttaaataataggaacggccttggtgccgtttctgaaataataatagtagcat

SEQ ID NO: 2841 - DNA, 667 bp, Triticum aestivum
gctcgaccatgtcgaagcgaggaggggagctccgcggggaacaagttccggatgtcgctgggcttgcctgtgcggcgacggtgaactgcgccgacaacacgggcgccaagaacctctacatcatctccgtcaagggcatcaagggccgcctcaaccgcctcccgtccgcctgcgtcggcgacatggtcatggccaccgtcaagaagggcaagcccgacctccggaagaaggtcatgcccgccgtcatcatccgccaacgcaagccctggcgccgcaaggacggcgtcttcatgtacttcgaagacaatgctggagtgatcgtgaaccccaagggtgagatgaaaggatctgccatcaccggacctgtgggaaaggagtgtgctgacctttggcccaggatcgccagcaacgccaatgccatcgtttgagagcctgtttcaagttgtgagactgcttatataatgccagtgtgggttgcagctgttttgcctgggaaatagtggaactctgcgttgctctgttttgtttggcatctcagtttcttagtgaacagaagcctgcctgtctgcttagtttaacaactgtaacttcgttgccagagaaaatggtgaactttgcgtatctctgttttggtttggcatgatgagtttatggggagtattcatac

SEQ ID NO: 2842 - DNA, 541 bp, Triticum aestivum
tcgatctggcatgcgagatctgtttaatagttcttttggtgcaacattcctcacagacacaggaaaggaatcatcatttgcctatcacattcatcaatatgcagatatctacaccagcaagcttgagaacttcttgtcatatgcccctgaatcatggcttcatccacctcacgacataaagatcatgccacataatgcaaaggtgccagcgagtttgttcagcacctcatagttcactgtatccatttcttgtggagagccatggtagtgcactacagagtggtttttgtttgtggccatgggactccatactgtcactgcattcggctaggttatgaagaaaccaacacagattggatccaactgaataggccagggagcaaatcaagatgtgcctattcttgactgacgtaagaatcagtctccaagtgagtaggcgattcttttgtacaatatcgctgtacaatattgtttcaactatgtgtgtcttctaaatacatccgaggcaacgtaacaaccatctgcaatcgtgggcaataaa

SEQ ID NO: 2843 - DNA, 662 bp, Triticum aestivum
actgctctcggccggcgaggcggccgatgttaccttcgaggtcggaggcgagacatttgccgcgcacaggtgcatactcgcagctcgttcgtcggtcttcaaggcggagctcctcggccccatgaaggagaagaccgcaactcgcgtctgatcgacgacatggaagccatggtgttcaaggctttgctccacttcatctacaccgattcgctgcccgcgatcgacgagggcgacgtggcggcgattgctcagcatttgctggtagcggctgacaggtatgatatggagaggctgaagctaatctgcgaggggaagctgtgcgatcacatctgcaaaagcacggtggcgacttcgctggcgttggcggagcagcatggctgtggtgctcttaagaaggcatgcttgaagtttctgacgtctgaaggtaacctgaaggcagtgatggcatctgatggatatgagcacctgagcaacagttgcccatctgttctctatgaactggtcgccaagcttgctccttgatctccttgagtctaaaccccacaagatctggatatttattctgctatttatattttcagaagtgatgataatcccactactggtagtctgttaaggacggtaaagtctatgtgaaaaccaatgttgcttgcgtttgctgc

SEQ ID NO: 2844 - DNA, 655 bp, Triticum aestivum
ggactgtaagggaaaggaggagcagctgcagcatcccatgacatgcaatcatgctctgattccccaaatgaccagacgaacctcagacgccggagcatttggagaaccgttcgcttgtccaattcaggagagggccgatcacccgatgattgataaggctatttctgaacagctcctatctgaagctcaacaagtcctccataattccaaaatgatttcgaagaacaagagaagaagtgtgatatggaccacaataagtgccacagtggagttcctccacgtcacaatgatccgaatagccgagtgaacagttccggaaaagaatttggtagcagaaatgcggagggcttgttcgacagatttagtttcaggaaaggtgtggagaggctgtgcaggcaccctgtgtttcagttgagtaggtccatgaggaaggccccagacgtggctgtgtttgatgctcccagagaagcaaggcaagcttgggtatgatatggtagcgagatagtaattgggattgtatgtaatggtaatggagttatttttgcttcttttttgtttagttgattgattggccgttcctctagtttgtgtgagtagaaacggttagccaagccaattatagtttgtaggtactgcagatttcagtgtacattat

SEQ ID NO: 2845 - DNA, 733 bp, Triticum aestivum
aacagaccagcactccaaagttgtctctgtgcccccaccggagctgaatcagcacctcggtgatctcctcaagaccgagaagggcgctgacgttgtgtttgaggtaggcggggagatgattcctgcacaccggtgtgtgctcgcgtcgcgatctccagtcttcagcgcggagctctttggtgtgatgaaggagggcgacacagccggtgtcatacacatagatgacttggaggcacaggtgttcaaggagttgctctactttgcctacactgactcattgcgagaggcaaaagaagaagaggaagatatcatgtgccagcatctgctcattgcggcggacaggtataacatggagaggctaaagctgatttgcgaggaaaaattatgcaagtacattgatgcaggctctgttccgaccattctagcacttgctgagcagtaccactgcaatgggttgaagaaggcatgctttgattttctcagctgcccggcacatcggagggcagtcgtggccactgacggcttcaagaatttgtgcaagagcttccattctcttgtgatggagctgattgccatgccctcgccaccttagccgagtgttgccccgtattttagcaatggtagttcatggtttctagatggttgatatcaactagatctcttgtttaccaatgtgtactggtatgtggactttgtgacttatgttatcaggcagttatcttgtcatgtgact

SEQ ID NO: 2846 - DNA, 718 bp, Triticum aestivum
gaagaaaatgccgagtcaatgcaggttctgcattatgaagttggtcagaagtatgatgcccacttcgattattttagtgacaaaaagaacataaagcgtggtggtcatcgagttgccactgttcttatgtacctgacagatgtgaagaagggtggagagaccgtgttcccaattgctgagggaagagatttacaacataaggatgaaacgtggtcggagtgcgcgagacatggcctggcagtgaagccaagaaaaggcgatgcgctactgtttttcagtctccacgttaacgcgacaacagatcggagcagtcttcacgcgagctgcccagtagtagagggcgagaagtggtctgccacaaaatggatccacgtccggtcattcgacaaccctccagatgttatggcggacacacggtgttctgatgccaatgagcaatgccctagatgggctgctcttggggagtgttacaagaatgcaaaatacatggtgggcacgaaggacaccctcgggtcttgccgcaaaagttgcggggtctgcgatgcttgaacccccgcaccaatcttaactgaatttgcatggttactgagatgtagattacaaaaccaaataggttcttagtagcatggcattagatgtttgctcttcttgccatgcagtttgacctcagagcatctttgatataaagcaaaaagggaattgactttgtttcagaaga

SEQ ID NO: 2847 - DNA, 731 bp, Triticum aestivum
  N_region (53)..(53): n = any nucleotide
aaatgccggaatcaatcaggttctgcattatgaattggtcagaagtatgatcncacttcgatattttagtgacacaaaagaacgtgaagcgtggtggtcatcgggttgctactgttcttatgtacctgacagatgtgaagaagggtggagagaccgtgttcccattgctgagggaagagatttacaacataaggatgaaacgtggtcggagcgcgcgagacatggcctggcagtgaagccaagaaaaggcgatgcgctactcttcttcagtctccacgttaacgcgacaacagatccgagcagtcttcacgcgagctgcccagtagtcgagggcgagaagtggtctgccacaaaatggatccacgtccggtcattcgacaaccctccagatgttatgacggacgcacggtgttctgatgacaatgagcaatgccctagatgggctgctcttggtgagtgttacaagaacgcaaaatacatggtgggcacgaaggacaccctcgggtcttgccgcaaaagttgcggggtctgcgatgcttgaaccccggcaccaatcttaactgaatttgcatggttactgagatgtagattacaaaaccaaataggttcttagtagcatggcattagatgtttactctccttgtcatgtagtttgacctcagagcatcttgatataaagcaaaaagggaattgactttgtttcagaagaatttggatataacctgatggta

SEQ ID NO: 2848 - DNA, 959 bp, Triticum aestivum
cgatttttcccctcctctccgccggcgacggtcctcccgaccggatccagcgcagccaccctcccccctcggatccagcgacgccgcctggcctcccccggtcccaccaccgtaagactcctctcggtccagcgaccttgagcacagagatgcggggagtcggaggtccactgctcactgtcagcgatctcttgagcgacctcgccgtcgaaggaggcgacgaccacctcgacggcggaggcgacgcctctgttccctcttcccccttggcagcgcatcaggtggaggaggccgacccctccgagctccagcggctcttcgcggaagactatgacaatttgatgaagtcgctacaggagaatgacccttcgtggccttccctgatgctgaagttgtgcagggcgttgaagacttccgataagctgctgagctgcgcgaatgtgaaagctgagcagctgctagagaaggtggagaaactggagcatgtcttagagaggggagatcgtgcagtgggatcaatcatagaggttcttcagagcatgcagctcaccgaggatcatcagacctccaaatcgcacccacctagcaagtagtgagctgtggtggcgtagatgttatgtttgattatccaaatcaggattcatgcctttcttgccagcattctagcacaaatccatttactagttcctttgcttcctgaactgaacgaactgaaatgctttatgcttccagggtccatttctctagaagcctgagaagtgttgtggcagtccgccggataataccaaagacgtgcatgttttctaaagatggacagaaaaatatttgtaggaatttaagcctcaatgatttagaagattttcatagatattttgagagattctatttcgtaggatttttttctgctagagcttgttggtttgtaggattgagaactatatatgaatttttatggacta

SEQ ID NO: 2849 - DNA, 530 bp, Triticum aestivum
catggggtgagattgatggaacaccactgaggttggatcctgacgagacaccagggggtagtgagaggtcacatttcaagatcccacctccacctgttcgagatgtgaaggcacacctgctgtccagggatgctgcgaagaagataaaagcgcgaacacatatgtttcacaagccaccattgccatcccctgtgagaggaggcagtgcaagccccaggaatctgtctcctgcagcacagaagtttgtgaggaatgccatcgcaaaatccacacgaaccattgatgagtctctccgtgcaagttacagagggtcgaccccatctgcaggcaccccgaagacaaggttttcaacggacccaggcttgggatcacggtctccttcggcgagaaagggttccacccctccgtggtgatttcagtaaaccccaatgttatatatatccatttcataaactgatagatgctatccatgtattgtatcgggaaaaaatgatggtagttttttcagcctggaaatcttagagggcttg

SEQ ID NO: 2850 - DNA, 669 bp, Triticum aestivum
tgacaaaggaaagaagtatgatttggaggatctaaggaagacaccaaacccgttttacattgaatcagggaagaaagcagacaatgggtacagttttgtgaagacaccatcgccagcacctggtgtggacgagtctccgttcatgacatggggtgagattgatggaacaccactgaggttggatcctgacgagacaccagggggtagtgagaggtcacatttcaagatcccacctccacctgtacgagatgtgaaggcacacctgctgtccagggatgctgcgaagaagataaaggcacgaacacatatgtttcacaggccaccactgccatcgcctgtgagaggaggcagtgcaagccccaggaatctgtctcctgcagcacagaagtttgtgaggaatgccattgcaaaatccacacgaaccattgatgagtctctccgtgcaagttacagagggtcgaccccatctgcaggcaccccgaagacaaggttttcaacggacccaggcttgggatcacggtctccttcggtgagaaagggttccacccctccgtggtgatttcagtaaaccgcaatgttagatatatccatttcataaactgataaatgctatccatgtattgtatcgggaaaaaatgctggtattttttcagctggaaccttagaggg

SEQ ID NO: 2851 - DNA, 530 bp, Triticum aestivum
  N_region (105)..(105): n = any nucleotide
  N_region (515)..(515): n = any nucleotide
  N_region (517)..(517): n = any nucleotide
cacatggtgtcagatgaatagagcagctgtcctctgaagccctggaggctgcccgaatttgtgccaataagtacatggtaaaaagttgtggcaaagatggcttcnatatccgggtgcggctctaccccttccacgtcatccgcatcaacaagatgttgtcctgtgctggggctgacaggctccaaacaggcatgcgaggtgcctttggaaagccccagggcactgtggccagggttcacattggccaagttatcatgtccatccgcaccaagctgcagaacaaggagcatgtgattgaggccctgcgcagggccaagttcaagtttcctggccgccagaagatccacatctcaaagaagtggggcttcaccaagttcaatgctgatgaatttgaagacatggtggctgaaaagcggctcatcccagatggctgtggggtcaagtacatccccagtcgtggccctctggacaagtggcgggccctgcactcatgagggcttccaatgtgctgcccncntcttaatactgta

SEQ ID NO: 2852 - DNA, 806 bp, Triticum aestivum
taatgggaggaagtagcatacgtgatgggtgactgctttgggaaaggcaaaggatctgagaatttttcaagaggcccatttgttgtggaaaaggagtaaaccaccaaagtttcccactcgatacaatttcactagctttgcgatcacattaaatgaacttacccctggattgaaggaaaaacttccaccaacagactcaagattgcgaccggaccagaggtgcctagagaatggtgaatatgaaagagcaaatgctgagaagttgaggcttgagcagagacaacggcaggcacgaaagatgcaggagagtgggtggaaaccccggtggtttgcgaaggataaaggtagcgacacataccgctaccttggtggttactgggaatccagagaaaagagcagctgggaaggctgcccagacattttcggacaactcccaaacgatctaatgataactgactaggctcatgtaggttacaggtcttctggttctctgtttttcttcttgtttttggatccgttggttccatgtttagtagattatactagagcaattaaatgcctttccgcctgtaagcaaaggctgcccttcagatacattgttttaacgtacataataagagtgtcgtttgtccaaaaggtcactctgaatcaaatgttttcttgtggggatttcactcgcacaagttcagagtggtgttatataggtcatttgtgtatatttgaatatgtaacgtgcattgaagcgccaaagaatattaaagcattcatactgatggtgtaccatctatctatggcatcgagatgca

SEQ ID NO: 2853 - DNA, 734 bp, Triticum aestivum
gtgatctgccatggcgagaaaggtttcttaaccgatgggcgcaagagttttcctagtggacacacgtcgtggtcttttgctggacttggatttttgtcactatacttatctggcaaaattaaggcgtttgatcgcaaaggtcacgtggcaaaactttgcatcgtgattcttcctcttcttcttgcttcgcttgttgggatttctagaatagacaactatcgacaccactgggaggatgtgtttgtcggcggcctgattggatatatcatggcagtgctgtgctatctgcactttttccctcctccatatcaccatcaaggttgggggccctatgcatccttccacatgctggaggagcttgaggcaggcaattcaaataatgcacaaaaccaacagtctgcaggtcagcatcatatcggattgaccggccaacaccataacgggagatcaagaaatgatttggaatctggaagtgtgtaactcacccctctgtggaaccgactagcgtaccttatacagtaagcatgccttaaaaacttttttatgtgtgcaccaagcaagtactaggagtttaggactagatttgtgctatctgcacctcaggtttatgcctgttcctcttgtgtacaaaaactactcgctcagcatattctgacctagttgttctagggccacctgttgtatctaaatcatgtgttaacatcatagaccatgtgagtggctggtggaagtac

SEQ ID NO: 2854 - DNA, 639 bp, Triticum aestivum
ccacccttcttgctagtcgaccgaggagattgcttcttcacaagaaggcatggaatgctcagaaccaggagtgcggctattcttgttgccgatgacaaggatgagcctctaattacaatggatacgcctgaagagacggaagggctgattatttagagaacatcaccataccatcagcgctgataacaaaagcttcggggacagactcaggaaagcagtcgatggcggtcacatggttaatgtgaatttagattggagggagtccctgcctcaccctgatgagcgtgttgaatacgagttctggaccacagtaacgatgaatgtggtcccaaatgcgacagccagattgatttcattaagagctttaaagggccagcacagatacttgagaaaaaggggtacacacagttcactcctcattacattacctggtattgcccggaggccttcacactaagcaagcagtgcaagtcccagtgtatcaaccatgggaggtactgcgcacctgacccagaacaggatttcagcaaggatatgatgggaaagatgtggtggttcaaaatttgcgacagtctgtgtttataaagttgcgaaggagaataagaagccttggttatggtgggactacgttgaccgatt

SEQ ID NO: 2855 - DNA, 881 bp, Triticum aestivum
gctgctgcgaggggaggttcgtcgtggagaagaacagcctcaaggtcacggcgccggactctcttaaaggcagctacgagtgcgccattggcaacttcggcgtgccgcagtacgggggcaccatggtcggcgtcgtcgcctaccctaagtccaaccggaaggcctgcaagagctttgacgacttcgacatctcctacaaggccaagcccgggtccttgcccaccttcttgctagtcgaccgggtagattgcttcttcacaaagaaggcatggaatgctcagaacgcgggagtggcggctattctggttgctgatgacaaggacgagcctctaattacaatggatacacctgaagagagcggaagggctgattatttagagaacatcaccataccatcagcgctgataacaaagagctttggggacagactcaggaaagcagtcgatggcggtcacatggttaatgtgaatttagattggagggagtccctgcctcaccctgatgagcgtgttgaatacgagttctggaccaacagtaacgatgaatgtggtcccaaatgcgacagccagattgatttcgttaagagctttaaaggaccagcacagatacttgagaaaaagggatacacacagtttactcctcattacattaccttgtattgcccggaggccttcacactaagcaagcagtgcaaatcccagtgtatcaaccatggaaggtactgtgcacctgacccggaacaggatttcagcaaagggtatgacgggaaagacgtggtggttcaaaatttgcgtcaagtatgtgtttataaagttgcgaaggagaataagaaaccttggttatggtgggactacgtgaccgattttgcaatccgctgcccc

SEQ ID NO: 2856 - DNA, 734 bp, Triticum aestivum
ctgagattatcaaaggtgagggccacggcagtgctgttgactggtggacctttggtatattcttgtacgagcttctgttcggcaaaacacctttcaaaggttcaggtaaccgagcgactctgttcaatgtcatcggtcagccgttgcgtttcccagaatacccagtcgtgagcttttcagcaagagatttaataaggggcctacttgttaaggagccccaacaacgattgggttgtaagcgtggcgccaccgagataaaacagcatccattttttgagggtgtgaattgggcgttgatacgctgtgcgagccctccagaggttccgaagcctgtcgagattgagaggcagactacaaagctgccagtgtcaacatctgaggctagtgcagcacctactggtgcatcccagaaaggctcggataactatttagagtttgatttcttttaatgaacagaatgttcattttttccatttgtttgcataattagaagttgtaggcttttcgcatgcatgtgtctgacagatgagtcgtatgtagatttttgtgtctgtcaagctattttctgctttgtagtgaacgaattggatgtttcaaatttatattcccccaccagttttgaagtcgctaatctttgtgagaatcttcgcgtgatgtgcagaattaaactcagttttgtaacagcttatgctgttgtaaaaaaagttattactgtcagcaactaaggcacttac

SEQ ID NO: 2857 - DNA, 563 bp, Triticum aestivum
acagctgaaccggggtcaaaaacaggctgctgcaacagaagattcaccttcagtacacaccggaggctgtggagcatctcggcgctcttggctttgaccccaactacggtgccaggcccgtcaagagggtgatccagcagatggtggagaacgagatagctctcggtgtcctcaagggtgacttcaaggaagacgataccgttgtcgtggatgtaagctccgtgtcgatagccaaaggctttgctccaaagaagcagctggtccttcagaggctagaaaacggaagcacagagttggttgccaaggacggaagcacagagttggtcgccaatgactgaggcgtgagaactttagcgtatctttggttagtttcaatgtttatgtagtgagaacctttcaccacgaaatgcatgaatcagaagacggcacatcagcttgttcccttgttctggtttcgtggagtatccaccgaattgtgtcctgcatggctcaggtccagccgggtctgtttgggtccgcatggacaaagtacgcggcccaacgcgacgatacaaatggacatg

SEQ ID NO: 2858 - DNA, 578 bp, Triticum aestivum
ctggactcacagagataaatcgcattgtggagatacagctgaaccgggtcaaaaacaggctgctgcaacagaagattcaccttgagtacacaccggaagctgtggagcatctcggcgctcttggctttgaccctaactacggtgccaggcccgtcaagagggtgatccagcagatggtggagaacgagatagctctcggtgtcctcaagggtgacttcaaggaagacgataccgttgtcgtggatgtaagctccgtgtcgatagccaaggctttgctccaaagaagcagctggtccttcagaggctagaaaacggaagcacagagttggttgccaaagacggaagcgcagagttggttgccaatgactgaggcgtgagaacttcagcgtatctttcgttaggttcaatgtttatgtagtgatagcctttcaccaggaaatgcatgaaccagaagacggcacatcagcttgttcgcttgttctggtttcgtggaatccccagaattgtgtcttgcatggctcaggtccagtcgggtctgtttgggtccgcatggacaaaatacgtacaaatggacacgg

SEQ ID NO: 2859 - DNA, 624 bp, Triticum aestivum
gacaccctcagaaacacaacagacagcaaggatgcggtgtatgaggtaatgaaaaaacaggtgactgagattgctcggcagacattccgaccagagttcctgaacaggatagatgaatacattgtgttccaaccactggactcaacagagataaatcgcattgtggagatacagctgaaccgggtcaaaaacaggctgctgcaacagaagattcaccttcagtacacaccggaagctgtggagcatctcggcgctcttggctttgaccctaactacggtgccaggcctgtcaagagggtgatccagcagatggtggagaacgagatagcgctcggtgtcctcaagggtgacttcaaggaagacgataccgttgtcgtggatgtaagctccgtgtcgatagccaaaggctttgctccaaagaagcagctggtccttcagaggttagaaaacggaagcacagagttggttgccaaggacggaagcacagagttggttgccaatgactgaggcgtgagaactttaatagcgtatctttcgttaggttcaatgtttatgtagtgagaacctttcaccacgaaatgcatgaatcagaagacggcacatcagcttgttcccttattctgt

SEQ ID NO: 2860 - DNA, 717 bp, Triticum aestivum
ttgcgagagctggtcctaagtatgcttcagttccaaccaccaatctgaaggatgacccagatttctataatgatcttctgagggaaaaccttcatatcaggcttaggttggtagtcaactacaaaggccttagcattggtgcagtgagagatgtattcgagaagtcacttggcctgcgtttgcgaaagataaatcccaacactgactatcattgcttgaagacctttgcttcttacttcactaaagatatccctatacctgctggcacaaagatcgacttctgccaaacgtccgacggtcagctaataacagaaattgatggcaggcagatcagtgctgttgagagcaaagacctttgcagggctttcttcgacatgtacatcggcgattcgcccgtatcgttagaggccaaaagggaagtcgcccggaacgtcgccggactcatgggaagatgcggcggatgaaagagggccggtgggtcagagaattcttttgttcttccgttacagcatgtggataggaggaaactaggcgagaatcgttgcgtgtacatacgctgagagatctggtaacctgtaaagtggaaagggcgatgttgtattgttgtaatacacacacatgggagatgcgcatctgcctgctgtgcaaggggcctccgtccccattaggatggagctctttcctttttgtagatgagaggagttgaggatgcttctc

SEQ ID NO: 2861 - DNA, 717 bp, Triticum aestivum
cttcagttccaaccaccaacctgaaggatgacccagatttctatgatgatcttctgagggaaaaccttcatatcagagttaggttggtagtcaactacaaaggccttagcattggtgcagtgagagatgtattcgagaagtcacttggcctgcgtttgcgaaagataaatcccgacactgactatcattgcttgaagacctttgcttcttacttcactaaagatatccctatacctgctggcacaaagatcgacttctgccaaacgtctgacggtcagctaataacagaaattgatggcaggcagatcagtgctgttcagagcaaagacctttgcagggctttcttcgacatgtacattggcgattcgcccgtctcgctagaggccaaaagggaagtcgcccggaacgtcgccgggctcatgggcagatgtggcgggtgagacagggccccgctgggtcagagaattctttcgttcttccgttacagcatgtggataggagaaaactaggcgaggatcgttgcgtcgtgtacatacgctgagagatctggtaacctgtaaagtggaaagggcgatgttgtattgttgtaacacacacatgggagatgggcatctgcctgctgtgcaaggcgcctccgtccccatttggatggagctcttgcctttttgtagatgaggagttgaggatgcttctcccatgatgaaagcaaatatacaa

SEQ ID NO: 2862 - DNA, 746 bp, Triticum aestivum
gagaagctgggtcctaagtatgcttcagttccaaccaccaatctgaaggatgacccagatttctataatgatcttctgagggaaaaccttcatattagagtcaggttggtagtcaactacaaaggccttagcattggtgcagtgagagatgtattcgagaagtcacttggcctgcgcttgcgaaagataaatcccaacactgactatcattgcttgaagacctttgcttcttacttcactaaagatatccctatacctgctggcacaaagatcgacttctgccaaacgtctgacggtcagctaataacaaaaattgatggcaggcagatcagtgctgttcagagcaaagacctttgcagggctttcttcgacatgtacattggcgactcacccgtctcgttagaggccaaaagggaagtcgcccggaacgtcgccgggctcatgggcagatgcggcgggtgagacagggccccggtgggccagagaattatttcgttcttccgttacagcatgtggataggaggaaactaggcgaggatcgttgttgcgtgtacatacgctgagagatctggtaacctgtaaagtggaaagggcgatgttgtatattgttgtaatacacacacatggagatgcgcatctgcctgctgtgccaaggggcctccgtccccatttggatggagctcttgcctttttgtagatgaggagttgaggatgcttctcccatgatgaaagaaaatatacaagcc

SEQ ID NO: 2863 - DNA, 540 bp, Triticum aestivum
gcgcgtcgtcgatgccgtcgagcgcgggcgccccgccgccctacgacccgtcgcgcgccaccacgtcgtcgctggacgaggcgtccgtgtcggtgagcaacgcgagcgacctggaggcgacggagtgggtggagcaggacgagcccggcgtgcacatcaccatccgcgagctcggcgacggcacccgcgagctccgccgcgtccgcttcagccgggagcggttcggcgaggagcgggccaaggtgtggtgggagcagaaccgggaccggatacacacgcagtatctgtagcagcgagcgggacaccactgaagcagctaacacgtacgtacgtcaggtgactcaggtccggatgggactcgtaggttagagtgatggtgatggtgtgatacttactgtactaaagctagtgctgccgttagtccattcgtcttgagaggcggcaggttgatggttcatgctgctgcgccttgtgtaaaatgtgtttaccggacagttaccggttcttttttttttggatcggtttgtatgttcctgaaca

SEQ ID NO: 2864 - DNA, 557 bp, Triticum aestivum
  N_region (539)..(539): n = any nucleotide
ccccgctcaaggccatcgacttcggcctctccatcttcttcaagcccggtgagaagttctctgaaattgtgggaagtccctactatatggctcctgaagtgctgaagagaaactatggacctgaaatagacatttggagtgctggcgttatcttgtatatattgttatgtggtgttcctccattttgggctgagactgaacaaggagtggcacaagctatccttcggggaaatatagattttaagagagaaccctggccccatgtttctgataatgctaaagatctagttcggcagatgcttcagcctgacccgaaaatcaggctaacggcaaagcaagttcttggtaagatgtacatagtggtagtgctttcaaaccggcactgtgttatgttagtttcaatatcctcaaagttcccaaaacatcaaatttgtgtaagttcctactgtttggtgctgctttaaacttcagcctgaaccccctttcatgttctgtttttcaatttgcaatgtgtaatctgatagctagaagatcactgnaccagtctgcctggtttt

SEQ ID NO: 2865 - DNA, 578 bp, Triticum aestivum
tcaacagttcactgatttgtttgaaagctgtgatagtgcccatcgtctcaatttctctgatgggaaagtaagaaaaggcctcagttttgaaagcccagatgctaaagggaaacaagatgcaagtgatgacatcatgaatttgcaaaatgaaatttccaaattattagcagagagccaaagtctgaagcaacaagtttcatctgagtctcatcgggcaaacaatgctgagaatgaatgccaagccttaaggacaccatctcatgtttgatttctgagaaggacaaagcccttgtgcagtacagcgaatccaccaaaagattgtctgctttagagactgagctctctaagtcacacaacgaactcaagaaactctctgatcatatggacagggaagttcagaatgtaaacagtgccgagtcatgtaacaacacaatgcaatccgagcttgaaactctgggccagaagatcatgatgcagcagcaagaacttgcacaaaatagaaaagatctggcggattcaaagagtgaattcgagagtgagatccactccctgaggagcactgtctcacaaataaatac

SEQ ID NO: 2866 - DNA, 537 bp, Triticum aestivum
gctatttactgtcaagaggaatggtaccacaccctgatgaaataggttctttatcaagtcgcaaaggtctcaaacagttcactgatttgtttgaaagctgtgatagtgcccatcgtctcaatttctctgatgggaaagtaagaaaaggcctcagttttgaaagcccagatgctaaagtgaaacaagatgcaagtgatgacatcatgaagttgcaaaatgagatttccaaattattagcagagagcccaaaatctaaagcaacaagtttcatctgagtctcagcgggcaaacaatgctgagaatgaatgccaaagccttaaggacaccatctcatgtttgatttctgagaaggacaaagcccttgtgcagtacagcgaatccaccaaaagattgtctgctttagagactgagctctctaaggcacacaacgaactcaagaaactctctgatcatatggacagggaagttcagaatgtaaacagtgctgagtcatgtaacaacacaatgcaatccgagcttgaaactctggccagaaga

SEQ ID NO: 2867 - DNA, 704 bp, Triticum aestivum
aagttgaagcctttgttctgagggctgatgacttgaagtttgtagccacccagtttaggaaactccatagcaaacagctccagcatacctttagattctactcacaacagtggagaacctgggccgcttgttttatacaggcagcttggcacagatattgcagaaagaagctagaggattctttgtttgagaaggagaagaggttacaagcagctattgtaagtgacgactctaccaagctcagtctgggcgcggcactgtacgcctcgcgttttgctggcaacatgatgcggatcttacggagaaatgctacccgaaaggcccgtttgcaggacagggtgcctgcaaggttgttacagaagccggcagaacccaacttttttgccattggagagtaattttgacataccctgctacaagcagaaagtcacaacccaactggtaaagtttgttcttatgccctcatcttctcccagctcggctcagtttatgactggatgctatacatagatagaccgcttgttctgcatccttgtaatttatataatgcaattcaatgtattattgcttttcgttgtctatacatgtgctgtgtttgtatattgaaggtatctatataagcattccacatttattcgtacctgaattggaaaacatgaaactcttgaatgatgttttaggctggaaactctacactgtaactg

SEQ ID NO: 2868 - DNA, 737 bp, Triticum aestivum
atggttcgtttaatgacaaacctgtgatggaatcagctgttggccaattggaaaggatttgtttgagaaagagcagaggatctccttgctgacctgaaagacatacctaagaaggcttgtgatcgccgggtcaatgagtttgtgaagcgtgctagagctgcgaagatccatgcttacataattggccagctgaagaaggaaatgcctgcaatgatggggaaagccaaggctcaacagcgactcattgacaacttacaagatgagtttgcaaaggtccagagggagtaccaccttccggcgggcgacttccctgacttggagcacttcaagcaggtgctggccgggtacagcatcgacaagttcgagaagatgaagcccaagatggtgcaggccgtggacgacatgctcgcgcacgacatcccggacctcctcaagaacttcagcaacccttaccagtgaacttgctgctgacctctcgtcagtcgcaacttattcctcaagtgttgttcgtctgccatgactcatgatggaagtaggcaagcatgagagacccatcgcatgtgcaaggttatgcctgccctttgtgcgggaaaagcgataaacgtgtaacacaacgttcagagacgcgttggctctttccttttgtcttcagtgctgtactgccgtagcctatgcacctttgacaactgttcggaatagatacttggtgggagaattcaagatgaatgggcaatata

SEQ ID NO: 2869 - DNA, 726 bp, Triticum aestivum
ctgtttgtttgtccagacatttacaatgagaaaaatgttaaaccaactgtttttatgtgtatattatgtggcagccgacaacttctgcagaaacgtcagttcttccattctcacagggcacagccaatggcagtggaacaagttttgtcagatcatgacagcgaggatgaagttgacgatgacattgccgacttggaagatagacggatgcttgctgattttcttgatgtcacgaaagatgagaagcttattatgcatatgtggaattcatttattcggaaacaaagggtgctagctgatgggcatataccttgggcctgtgagggcttctcccggcttcatggaccgcagcttgtacaaaaccctcctctgctctggtgctggcgtttcgtcatgattaagctgtggaaccacagcctgctggatgcgcgcgccatgaacacatgcaacaccattcttgagggataccaacccaagaagaagatgttttaattccaaggggggttggttgcttacttttaaacctttccatattccaaggggagcttcattgagggctattctcatttactgaaaatgttgatgttttgccgacctccgccggataatttcctaccaagtcgtttcccctcggatagatttttgagatttttttaaaagtcacttctcgatgcctgtggatgttcagactttgccgttgtcgttccccttttaaattagaaattg

SEQ ID NO: 2870 - DNA, 600 bp, Triticum aestivum
agcgaagtgatcccagaaaccgacaacttctgcagaaacgtcagttcttccattctcacagggcacagccaatggcagtggaacaagttttgtcagatcatgacagcgaggatgaagttgacgatgacattgccgacttggaagatagacggatgcttgctgattttcttgatgtcacgaaagatgagaagcttattatgcatatgtggaattcatttattcggaaacaaagggtgctagctgatgggcatataccttgggcctgtgagggcttctcccggcttcatggaccgcagcttgtacaaaaccctcctctgctctggtgctggcgtttggtgatgattaagctgtggaaccacagcctgctggatgcgcgcgccatgaacacatgcaacaccattcttgagggataccaacccaagaagaagacgttttaattccaagaagaaaatgttgatgtttgccggataattctttcctaccaagtcgtttcccctaagatagatatttgtcttttttttatttaaaaaagtcactctccatacttttgaatgtttagactttgcacttgtcgttccccttttaaattacaaattctcc

SEQ ID NO: 2871 - DNA, 631 bp, Triticum aestivum
gtaatagtgatgaatggcaatacagtggagatagtgatgatgatatggagatcaagagggatgaccgttaccacatcaagaaccggaaggtgaggccgattacagcggcaaatggcaatggaattggacttggggctgtcaatgccaatggcagagggaaaagcgggcttgagaagggaaaggatgcatatccctacctgtgggagactgtcgaggagctgtccaaggagcatccgagtggtgcggcattcaagaaggcatttgaggtgctcgaaggatcaaaagtgcgagccattgaggaaaagctgaggaggtttaggttgatggagatcagacagcagctgcgtaggatggacctgatgaaggagacggtgaggatggtgctcgatgcccttgagagtgctgactgaataatggctgatcgatagtgattggtaaactgttggaagggggaaatcactctttttgtttctagatagactatatgtggttaattacttacttccctggacaaggttgcagttgcctccatcaaaattaggcatagaacatggagtgatggtcttctccttgttattgttcatggatcattgtattttgggattcttaggtgctaacttgtggtttatat

SEQ ID NO: 2872 - DNA, 670 bp, Triticum aestivum
tgatggaggaggcagtgggtatgagaattatggtggtggtgatagtgatgaattgcaatacagcggagatagtgatgatgatatggagagtcagcgggatgaccgctaccacatcaagaaccggaaggtgaggccaattacagcggccaatggcaatgggattgggcttggggctgtcaatgccaatggcagagggaaaagcgggcttgagaaggggaaggatgcatatccctacctgtgggagactgttgaggagctgtccaaggagcatccgagtggtgcggcattcaagaaggcatttgaggtgctcgaaggatcaaaagcgcgggccattgaggaaaagctgaggaggtttaggttgacggagatcagacagcagctgcgtaggatggacctgatgaaggagacggtgaggatggtgctcgatgcccttgagagtgctgactgaataatggctgatcgatagtgattggtaaactgttggaagggggaaatcagtctttttgtttctagatagactatatgtggttaattacttacttccctggacaaggttgcagttgcctccatcaaaattaggcatagaacatggagtgatggtcttctccttgttattgttcatggatcattgtattttgtgattcttaggtgctaacttgtggtttatatg

SEQ ID NO: 2873 - DNA, 641 bp, Triticum aestivum
acattgatgccaatggtatcctgaacgtctctgcggaggacaagacccccggccagaagaacaagatcacaattaccaacgacaaggggcggctgagcaaggaggacatcgagaagatggtgcaggaggccgagaagtacaaggctgaggacgaggagcacaagaagaaggtggactccaagaacgccctggagaactacgcttacaacatgcgtaacaccatcaaggatgataagatcgcctccaagctcccagaggccgacaagaagaagatcgaggatactattgatggtgccatcacctggctcgacaacaaccagcttgccgaggctgaagagtttgatgacaagatgaaagagctggagggcatttgcaaccccatcatcgccaagatgtaccagggtgccggcgctgaaatgcctggtggcatggatgaggatgctccggccagtgccgcaggcggcagcagcggcccagggcccaagattgaggaggtcgactaaatgatagatttagatcgcctactattctgcttgaataatgtgtctctcattgtacggtggattctattatcgttctgcagtttttcgttcgggcatatatacattgccccatcttatgtttaagttgatattgaaaca

SEQ ID NO: 2874 - DNA, 747 bp, Triticum aestivum
acggcgcccaggggtgtcccccagatcaccgtgtgctttgacattgatgccaacggtatcctgaatgtctcggcggaggacaagaccaccggacagaagaacaagatcacaattaccaacgacaaggggcggctgagcaaggaggacatcgagaagatggtgcaggaggccgagaagtacaaggctgaggacgaggagcacaagaagaaggtggactccaagaacgccctggagaactacgcttacaacatgcgtaacaccatcaaggatgacaagatcgcctccaagctcccagaggccgacaagaagaagatcgaggatgctatcgatggtgccatcacctggctcgacaacaaccagctcgccgaggctgaagagtttgatgacaagaggaaagagctggagggcatttgcaaccccatcatcgccaagatgtaccagggtgccggcgctgaaatgcctggtggcatggatgaggatgctccggccagtgccgcaggcggcagcagcggcccagggcccaagattgaggaggtcgactaaatgatagatttagatcgcctactattctgcttgaataatgtgtctttcattgtacggtggattctagtatcgttctgcagtttttcgttcgggcatatatacattgccccatcttatgtttaagttgatattgaaacacgattatttagtactagactagaagacagtatacttggttatctgcagttagttcacatttattta

SEQ ID NO: 2875 - DNA, 759 bp, Triticum aestivum
aggaactggtcgcgcgttctccaaggttctccgggatggcgtcgtcggaggtggtggaggacgaggcgtcggcggcggcgatgctcgccaacggggccgcggacgtccgccggaggagggaccaggccaaggcgatgctgtcgaagcaggccgtcaagatcgccaccaaggcagaggagcacgagcgcttcatcttcaaggtcacacacctgatgggtgttcttggatttgggacattttgctacctcttgggtgctagaccacaggatgtgccgtatgtgtattgcctgttctatgtcatatttgttcctctcaggtggatctactatcgctacaagaagtggcattactatcttctggatttctgctactatgccaacacttttctccttgttatgattctcttttatccaaaggatgaaaagcttttcatggtttgcttctcatttgcagagggtccccttgcttgggcattaattgtatggcgttgcagcttgttgttcagctcatttgataaacttgttagtgttctgatacacctcttgcctggaatagttttgttcactatccgttggtggaacccacaacatttgctgcatgcctccgaaggagagcgcagagtccttggctttgtggcgccatcttcgtggcctggtttgtgtccctacgttcctggtgccgtgttccctgtagggcggcccgggtgggcccgctgcctgggcgggaacgcccctttgtggctggaccggatttcgccgg

SEQ ID NO: 2876 - DNA, 736 bp, Triticum aestivum
aacagagctcagaagcaagaaacagagaaagatttttacagattcctttgcaatttgcgtagcatccagttcacggcgagcaagatggtggccaaggaggcgatcccgctgctgacgccgcacaggatgggccggttcgagctctcccaccgggtggtgctcgcgccgctcacgcgctgccgctcctacgccaacgtcccgcagccgcacgccgcggcctactactcgcagcgggccaccaagggcggcctgctcatcgccgaggccaccggcgtctccgccaccgcgcaggggtacccggagacccccggcatctggacgcagcagcaggtcgacgcctggaagcccatcgtcgacgccgtccaccgcaagggcgctctcttcttctgccagatctggcacgtcggaagggtctccaccaacgatttccagccagatggacaggcgccgatctccagcactgacaagcagataacacctgatgctgagtccggcatggtctactccaagccccgacagcttcaaacggacgagataccgctgatggtcgatgacttcagacgtgctgcccggaatggcgtcgaggcggggttcgacggcgtggagatcccggggcaccgggtccctattgggcggtctggaagcagtctatggtgggcgggggtcggggcgctcgaaacgggcgcttgcggggggatgggctatccaggagggggccctcgccagtgccccgggc

SEQ ID NO: 2877 - DNA, 723 bp, Triticum aestivum
gggagatgagggagatcataagcatccacatcgggcaggcgggcatccaggtggggaattcctgctgggagctctactgcctcgagcatggcatccagcccgacggcctcatgcccagtgatacctcggttggggttgcaaaggatgcattcaacacattcttcagcgaaacgggttcagggaagcatgttccgagggccctgttcgtcgatctggagcccacggtcatcgacgaggtgaggacgggggcataccgccagctcttccatcctgagcagctcatctcccacaatgaagatgctgctaacaactttgcccgcggacactacacagttggaagagaagtggtggacctttgccttgaccggatcagaaaattggcggacaactgcactggcctccaaggtttcttggttttcaatgctgtcggtggcggaactggctcaggacttggttcattgcttctggagcgcctatcggtcgactatggcaggaaatccaagctcggtttcaccatctatccttcaccacagatttcgacggccgttgtggagccatacaacagcgtgctctcgaaccactcgctgatcgagcacaccgacgtggtggtgctcctggacaaagaaggcatctaacgacatctgcacgaggtccctggactcgagcgcccgaactaaccaactgaacgggtgatatcaggtgaatgtcctgacagttatggag

SEQ ID NO: 2878 - DNA, 714 bp, Triticum aestivum
gctcccacgaattacacttgtcattataagatctggccacaaacgacaaactcacagttgcatttagatggtgaggacccccatgataactaaatccaacaccatcaaaagatatgccaaataatggcaccatcattcctccataatcatcaaaggaaacagcagagaacgtttttattacagcatcaataatgatgttatctgaactgctagatataggggggccagcaagcttcagagcgagtcttcttggaggtttacgaaattcacttctaacaagaaatgtaccggcatcctcatccacagtccataaactaaaattttcagatgttttagagccacgtgagtcccatacgctttcctcagaaaattgacctcccgtcaccatatcacttctaatacatcttaacatactgaaatcctctttcgttggtggacctttagatgcaacacatcctaaagcaacaaaaccaggtggagcttgaggataataaaatgatataccatctctacccctgtgcttcttaattggaccaacaatcttataactttctggggctcttaggaaggtatttcaccagtatcacgaacgacacagctgattcggaggtcataccgttaaaacgatgtcccgaataaaaattccttcgaatcatggcgcaaatgaaagtttggggcagagaaggaacctactctggtaaacacaaaacaaca

SEQ ID NO: 2879 - DNA, 704 bp, Triticum aestivum
gaaccttgagcacgagaaggaaaagaacggtgttaaaacaaagcatcttaagatggcaacattggtgcaacagaaggctgatgaaaatgtgctcaagcttgtggaaaaacacaagttagagaaacatgtcgctctagataagattatcaagttggagcatcaactggatgccaagcagaagcttgagttagaaataaaacagttgcagggtaaattggaagtcatgaagcatatgccaggtgaagaagactctgaatcgaagaaaagaatagatgaacttagtgaggagttacaagacaaatatgatgaaatggatgcaatggagtcactctaccatactctgcttatcaaggaacggaaaagcaatgatgaattgcaagatgctcggaagaagctgatagatggtttgcagactattacaactggtcgagcaaatattggcattaaaagaatgggcgaacttgatcttaaatcacttgcaattgcttgcggacgtaaattgtccaaagaagatgcagaagtgactgctggcattctttgtgcgaagtgggaggctgatatcaaaaaaccagaatggcaccctttagggttgcccggttacggggaacacagggagctatctctgagatgtgcgaagctttgaccttaaaaaagttgcgggaaacttttctggggaaaggggtgggtaataaaaacccgggggt

SEQ ID NO: 2880 - DNA, 701 bp, Triticum aestivum
tggggtatgggggtatggacccggatgccgggtctggtcaaggaggaggaggatggagggagcccacgggagaggcgattcgccggcggtcggggcggcgccaaggccgatggaggggctgcacgacgccgggccgccgccgttcctgacgaagacgtacgacatggtcgatgaccccaacaccgacatcatcatgtcgtggagcgccggcaacaatagcttcgtggtgtgggatccgcacgccttcgccacggtgctgctgcccaggcacttcaagcacagcaacttctccagcttcgtcaggcagctcaacacctatggcttcagaacggtggatcctgacagatgggagttcgccaatgagggtttcctacggggacagaggcaccttctgaagaacatcaggcgtcgtaaacctcccgctcatactgcctcacatcagcagctcccttggatcttaccttgaggtggggcacttcggatatgatgcagagatcgcccggctgaccagggacaagcaactgttgatggcagaagtggcgaagctaaggcaggaccagcagaacacgaaggtgcctctgaacaccctggaggataggctacgtgccaccgagcacaagcagcagcagcatgctccttcatggccgtatctgcggaaccggaatctcgagccccgcatgcacgactggataacaagccca

SEQ ID NO: 2881 - DNA, 646 bp, Triticum aestivum
tgtgtaccttggaagggatttcatatttgctttgtgctcttggagatggtcaccttttcagttttctactgaatgcaagcacaggtgaactaaccgatagaaagaaggtttctcttggtacccagccaattagccttcgtacattctcatcaaagggcacaacccatgtgtttgcttcgtctgatagaccaactgttatctacagtagcaataaaaatctgctgtacagcaatgtcaatctgaaagaagttaatcatatgtgtcctttcaatacggctgcttttcctgacagccttgcaattgctaaagaaggtgaactttcaattggaactattgatgatatccagaagcttcatatccgcacgattccgttgaatgaacaagcacggcgcatttgccatcaggaacagtccaggacactggcgttctgcagttttaagtatacccagaatagcatggaggagagcgaggcgcatttcattcgtctgatggatcatcaaacatttgagtttctgtccacacatcctcttgatcaatacgaatgtggttgctccatgattagctgctcattctctgatgataataacttctattactgtgtgggaacagcatatgttctacctgacggagaaggtaccgacaaggg

SEQ ID NO: 2882 - DNA, 684 bp, Triticum aestivum
aagacagcagtctccatggcctccaaggttacagggtaaaacaaacatctacacatttcatcatctttgatttcaatttgtttggctgattggtgccactgatgctggtactaatcaagcaaccaatcccaactactctgcaggtgttcatatccatcgccatgatcctcggggacggcctgtacaacttcgtcaaggtgctcatccgcacgagtgtcgccttcgcggcgatggcgaagaagaacagcaccatcccggtctcggacgtgggcggcgccaaggccaccggcgagcctgtatcgttcgacgagcagcgtcgcaccgagcaattcatgaaggaccagatccccaagtcggtggcgtatgcggggtacgccgccgtcgccgcggtgtcgatcgccaccctaccccagatcttcccggacctcaagtggtactacatcctggtggcgtatgtcttcgcgcccgtgctcgccttctgcaacgcctacgggacaggcctcaccgactggtccctcgcctccacctaaggcaagctcgccatcttcatcttcggcgcgtgggcgggcgcccgcacgggggcgtgctcgtcggcctcccgactgcgggtcatgatgagcatcgtgtcaccgacgcgacctcagcggacttcagagggtactcagctcgggtgcaggcctgtca

SEQ ID NO: 2883 - DNA, 593 bp, Triticum aestivum
  N_region (573)..(573): n = any nucleotide
cgctgatggggtcatcggcgccggcaagaccacgctgatggatgtgttggctggcagaaagactggaggctacattgaaggcgacatctcaatctctggctacccgaagaagcaggagacctttgctcgtatctcgggttactgtgagcagaatgacatccactcaccaaatgtgaccgtgtatgagtccctggtctactccgcatggctcagactgccttccgatgtcgagtcggaaacaagaaagatgttcatagagcaagtgatggagctggtagaactgaattcactgagggatgcgcttgttggactacctggagtgaacggcctgtcaacggagcagaggaagaggctgacgatcgccgtcgagcttgtcgctaacccctctataatattcatggatgagcctacctccggccttgatgccagggccgcggctattgtcatgaggacggtgaggaacaccgtcgacacgggcaggacagttgtttgcaccatccatcagcccagcattgacattttcgaagccttcgatgagctgttcctgatgaagagaggaggggaggagatatntagtgggcctatcacgcagg

SEQ ID NO: 2884 - DNA, 865 bp, Triticum aestivum
ctttcttttactgtgggattaagctgtggtcttatccctttgcaaatcataattttgctcgaagggtgctgtaccaagcagaaaaacactcacagcaagctattggatactccacaacaaatccacttaccagagttgatactctttctcatcagctttactaccctcagagaccccttttcaaaacagtttcagctgattgcatcggcagatcagattatacttttggaagaaacgatgactttgctaggcctgaatatttcaatggacaaaatgcgatagttgcagtcaatattcatcagggatttaaccaagaggactcctggttatgaatagagcttctcttgaacgtggtatgtttagaactgagctcatgcggagctataaggcagaagtagagaccaaagggcccaacaaacgactgaaaatgaaggagaaagtaaacttcggcaaaatggaaagcaagagaggacgagttgacaatcttgatgatgatggattaccttttgtgggttcaagtcttcagattggtgacattataattgggaaagtgtcagagtctggtgaagaccatagtattaagctgaagcatacagagaagggaatggtccagagagtgttgctctcagccaatgatgaggggaagcattttgctgttgtatctttaagacaggttcgatcaccttgtgttggagataaattttctagcatgcatggacagaaaggtgttgttggttttctggaatctcaggagaacttcccttttacctgccaaggaatagttccggacatcgtgataaatccacacgcctttcctacccgtcaaactccaggccagctgcttgaagctgctttgggaaaggga

SEQ ID NO: 2885 - DNA, 581 bp, Triticum aestivum
gacgatcggagaaagaacatcacggatactatcaactcatttgcttcagatgctttaaggacattgtgcttagcatttaaggatgtggatgaatttgatgagaatgcagatagccctcctaatggttttaccctgataatcatatttggcatcaaggaccctgtgcgacctggagtgaaggaagcggttcagagctgcataactgctggcatcattgtgagaatggtgactggtgataatatcaatacagctaaagctatagccaaagagtgtggcatattgactgatgatggcatagcaatagaaggaccagattttcgtaacaaaagcccagaagaaatgagggacctgatacctaagattcaggtcatggcccgttcgttaccattgggcaaacatttgcttgtgacaaatttgagaggcatgttccaaagaggtggatcgctgtgaccaagtgatggtaccaaatgaggctcctgcgttacacgaagccgatatttgggctttctatggggatttccagggacagacggttgccaaggggaatgcttaatgtcaaagtaatttacggcaacttccaa

SEQ ID NO: 2886 - DNA, 742 bp, Triticum aestivum
tcatgatgagtcagaaaatgaatcttgtctggttggaagaacaaagtgctcattggaccggatgaggtagaatacctgcttggttttccaagggaccacacaaggggagttgccaaaccagagaggttcaatctcttggcattcgttccaagtagataccgttgcttatcacctgtcagtgctgaaggacatgtatcccaatggtgttaatgtgctatctttattcactggtattggaggaggagaggtagcactgcacaggcttgggatccacatgaggactgtagtttctgttgagataggcgaagttaataggaggattttgaggggttggtgggatcagactcaaactggcacattaattgagattgctgacgtgaaatctcttactgacgatagaattgcaacgtttgttagaagatttggcggctttgacttggtgattgggggcagcccatgtaacaaccttgccggcagcaacaggcaccaccgtgatggcttggagggcgagcatctgctttgttctaccactacttcagaatcgtggatgctgtaaagtcggctatggggcgaatgtagcctaatcattttagttaatgttttatcatttcatgcttatctctaggatccacaacttcatctatgttaaacattgtgttgatgtgaaggatgtttgtttctgagaaacattgcattagtctttagctatatgatttcttgttgctaactaatttagagcctg

SEQ ID NO: 2887 - DNA, 505 bp, Triticum aestivum
cacacaaggggagttggctaaacagagaggttcaaatctctgggcaattcgttccaagtagataccgttgcttatcacctgtcagtgctgaaggacatgtatcccaatggtgttaatgtgctatctttattcactggtattggaggaggagaggtagcactgcacaggcttgggatccacatgaagacagtagtttctgttgagataggcgaagttaataggaggattttgaggggttggtgggatcagactcaaactggcacattaattgagattgctgatgtaaaatctcttactgacgatagaattgcaacgtttgttagaagatttggcggctttgacttggtgattgggggcagcccatgtaacaaccttgccggcagcaacaggcaccatcgtgatggcttggagggcgagcaatctgctttgttctaccattacttcagaatcgtggatgctgtaaagtcggctatggggcggatgtagcctaatcattttagttaat

SEQ ID NO: 2888 - DNA, 710 bp, Triticum aestivum
agaagatggcatggaggagtatatcaaagaggtatccactgatgacgctgctgaacgggcttccaatatgaggtctcagatcaatattctgtggggtatgctgctttatgagcgctcggttgtggagtttaaattaggactgccagcgtgggaggattgtctgatggcagcaattgagaagtttaaacttggaggagcttcagctacaaacattgctgtgttggtgaagaaccactgtgcaaatgaaactgcccaggatggtttgggcttcaatgtcgatgaaattgtgcaagcctggaatgagatgtacgacattaaacggtggctgcgtggtgctccatccttccgtctcgagccattatttaggcggagaactccgcaactgcatatggcactggagcatatatagtatccatgaagttgctccacgcatattaaattctggggcactgttaccaacaccaattttcttttgtaggtcaattgctgattgggatacaatacatggatttgttcggttgcattttttatacatcgaaagagtctgcttcccggttgcgaagctattcattgcggaggggtggagcctgcccgcgatttggatacgttagttgttttttccgtctgtcttgttcttcttcatgcacaggaagctgtgacttgttactgtattagagctgcattcctccgtaagcttagctcatatacat

SEQ ID NO: 2889 - DNA, 574 bp, Triticum aestivum
  N_region (562)..(562): n = any nucleotide
gagcagggagtgatgaaacaaaaaaagatgataaatctggagataagaagttattagcaactaggaagttccagtatatggaagggaacagtgagccacatccaatctcggactggaggtctaattccgtttcaagacaggatggcgcctcatctgcgagtagctcacccgtgccatcatggaagagtgaaccatctatctccccaccagaatcatcaactggaaatgcattgcccgacaggctgacacatcgtcaacaaatctcacgctttgggcaatcagcctttcagactggcagtttggcgtttgcaggtttacaggattcagcttcatccaccagtctctcattgaaaggttctctgacaagtaacattttaatgaacttacaaaacaagggcatcttgagcaatacgcagtcttccctcgagacatcatctgccagcctacagacttcagtttcctcatccttcatgtccaagactctgccatcggtgaattctgatttaccaggagcagcaccttccaaatccgcatggaaaccgtcaacttggactgatagatngagcacatcctc

SEQ ID NO: 2890 - DNA, 823 bp, Triticum aestivum
aaaattgtgttaggcatatccatcagtgtcgtcttcctcatggttagcatcttggctctacgggccgagtatcagaaacaggaggatgaagaaagagaaggaaagattctttgatcagaatggtggtcagatattatatcaccaaattatgtcaaaacaagttgatacattgagaatattcacgcaagaagatctgaagaaggctacaaatgattttgacaagagcagagaactgggcaggggtggtcatggcactgtctacaagggcattctcaaggacagcagggtagtggctgtgaagcgctcgaagatcatgaacgtggccgaaactgacgaattcgtacaggagattattatactttcacagaccaaccaccggaatgtggtcaggcttctagggtgctgtctagaggtggaagttccaatgctggtctacgagttcatccctaatggcactctctttgcgttcatccatcgtaactacacaagtccacctccctctctggacacccgtctcagggtcgctcaagaatcagcagaagcactggggtatctgcatctgtccatgagaccggctatagtactgggggtgttcaggctttgaactttcctggggcgagacctcctggcggaagtggccgctggggggtcaagggtccccagggtgtggtcgctttggatctgggccggcccgggggtccccacccggtctccggaggggggacaaaaaagacggtcactcggtgggtgtgggagcacggacgggcccctcgccgaagagaggttcccccgcagggtgtgctcggggagccagtggaggcga

SEQ ID NO: 2891 - DNA, 757 bp, Triticum aestivum
  N_region (609)..(609): n = any nucleotide
cagcaatgctgcccgggaggttgaggattcatcagggtgtagtcaatcctcattggccatggtttcttgctcgcaagtgcaggacaccaatctggccttgagctgtgatttacatgtgaatgcggataccagcaagacagaagcacgtgattctcagtcttctatgtgccaggaagactatacttccaccgagggtgttgcatctgctttgtctgaagttcattgccatgcttcttcctccagatttggtccagataaactcttgcagcaggacatttcacaaagaatgaatttgcagatggatattgatgaaacaccaggtaactctatgtttgaaaacaaccagaccatttgtagtacatcgaataatgaaagaccgatgttacagtatgagatagcaccagatatgcctatctctgtgctaacaaatgtttctggagctgagcaaaaactacatttcatgtccgaggctgacttcagcagtcctaattgtttgaaatcagaactttggcaagagatttcgttccagagtcttctttctggagctgatatagttgatgctgattctctttcaagactaaaccaccattcagatacacatttctctgnaggcagaccccattttttggcgggccccaccatcaattatcaatcgcgagtatggggggggtggccgggcccgtgtcggcccctcttttcatggtgtgcgggggggaaaagggaaaagtcgggcggagccccctgtctgggcggcggc

SEQ ID NO: 2892 - DNA, 739 bp, Triticum aestivum
cgggaacgagatcagcaagaccatacggttcctgggtgtgaagtttgcgttcacctcgtagacggtcttgggatactccaccccgggcatgagcatgcagatgaaggactcccaagaccgtctacgaggtgaacgggaacgagatcagcaagaccatacggttcctgggtgtgaagtttgcgtccttcgacctcaccgtggagttcttccggtccgtggtccttgtcgagcagcgccctgcgcccaggcatgcgcccaagagggtcaaatcgactctgaggctggacaagatggataatatcagtcggaaatgggtgaacgccgatgttctgattttcaacaccggccactggtggactcccaccaaattgtttaatacgggttgctattttcaggctggacgtgctctcaaactaggtacaaccattgatgctgctttcaggatggcactgcagacttgggcttcttgggtggccccccgcgttgctctaaaccgaacacttgtgttcttccgcacttattagccctctcattggagtggctgaacccaacggcttgggacgttcagacaagccttacctgtggctacggcactgtccgagtggctgcggcatcctgggcagttggcgcgcctatgttccctcggctaagtcctggggggcccccacgagctgttgggggggatccccccactttggcccggtccggccccgcgctgcacattcctcctgggcgggcg

SEQ ID NO: 2893 - DNA, 727 bp, Triticum aestivum
  N_region (567)..(567): n = any nucleotide
caagcttgcagaacaaacagataagctaggtagcaagctgctccaaggctccaggacaccatggccacaaaccccggcctcttcagcgagtggccatggaagatgctcggcagcttcaagtacgtggtgctggcgccatgggtggcgcacggcatccaacaggtggcgaccaaggggtggcgcgaggccgatctggggtacctggtgatcctcccgtcgatgattctccgggggctccacaaccaggcctggatcacggtgtcccgcctccagaacgcgcgcggcaagcggcagatcgtcgaccgcggcatcgagttcgagcagatcgaccgcgagcgcaactgggacgaccagatcatcctgagcgccatcctcttgttcctgggcgcgctgcacctgccgggcgggcagaacctgccgctgtggaggacggacggcgcggtgctgctggcgctgctgcacgccggcccggtggagttcctctactactggttccaccgcgcgctgcaccaccacttcctctacacgcgctaccactcgcaccaccacgcctccatcgtcaccgangccatcacaatcgtgattcatccatttggcgagctcgtggcctacgaaatgctcttctcgataccgatgattgcctgggttctgccgggacggctccatcataagttcgaggtctaatgcctacttggttcgggacactgggcccggacttggtggggcc

SEQ ID NO: 2894 - DNA, 714 bp, Triticum aestivum
gccgagcggctggtggccccgcacgccaccgcgcccgacgccatcgttttcaccagctcggcggaggtcgaggggctgctcaaggggctggacgccgcgggctggagctggccccggctcagggcgcgatggcccgacatggtcgtggccgttcatgggccggtcacggccgacggcgtcaggaggctcggcattgaggtggacgtcgtgagctcgaggtttagcagcttccatggggttcttgatgctctagctgcaacattttgttctcaacaattgaaaattagctccaggtttagtgctggttcacattgaaaattttgatgtaaactttctttcttcgagtcacaagttatcagcctgatggaatgaacaaaaatataagtcagcaaactcaatgctattccacaccaacctgtcacctagatatcttcagaatgtactgtaaatctgcattctaccaacccagctttgtacctgttaataactgtgatcacaaaaatggggtgatgaaccattcttgatcctcctcctctagaatgttctttgacgtgcttatatgagaagctggatttgcctcaaatctcagctacaccacttccagttcagagaatggtgagccaaccagggcaagtgtgtgtaccgggctcaggttctgcctctggtcataaagatctgagggggttccggatacgccgccaacccggatggacg

SEQ ID NO: 2895 - DNA, 711 bp, Triticum aestivum
cttcgccccggttgttaaaccgggcacgatccgcgccgtgctccagttggcggtctcgcgcgcctggcctgtgcaccagttggatgtctccaacgccttcttgcacggccaccttgccgagcaggtgtactgtgagcagcccactggcttcgtcgacgccgagcacccagacttcgtgtgcttactctcccgttctctttacgggttgaagcaggcgcgtcgggcttggtaccagcgtatcgcagccttcctgcagtctttgggcttttggtccactcgctccgatgcctcactattcgtgtatcatcagggagctgacactgcatatctgctgctctacgtcgacgacatcatcctcacggcgtccgcccccgctctccttcagcggctgactgctcgtcttcgtgatgagttcgccctcaaggacttggggcccctgcactacttcctcggcatcgaggtggtccgccggcctaacggcttctttctgcatcagcagaagtacgcccatgagctcctggagcgtgccggtatgcttaactgcaagccggcgcccacacccgtcgacacgaaggcgaaggtctctgctctggaggggtctctcgcgtccgatggagcattttatcgctccattattggtgcttacagtacctgagctgatcgaccgactgcatacctgttaacagtgtgctcaatgaacccggttatccc

SEQ ID NO: 2896 - DNA, 711 bp, Triticum aestivum
  N_region (389)..(389): n = any nucleotide
ggcggcacggcggcggagaaaatcgggccaggcggcgaccaaaacagattattggcttgaacaatgtaccccttgctggtgacgaatttgagtctgttgatgaccttgatgttgcacgcgaaagggcaaacgcgcgtgccgatgcaatgagaattgaaaggataaatgcgaaagctggggaaggaaaagtcactctgtcatccattgcagcttccatttcatctgggaatcaagtagggattgatacgcatgggttaaatgtcatacttaaagttgattttcagggttcaattgaggccattaggcaagccattcaagcgctgcctcaagaaaatgtctctttgagattcctacttcaagctccaggagatgtgagcctcagtgatgtngatctggctgttgcttcggaaggaattgtatttggttttaatgtcaaagctccggggccagttaagaaatatgctaagcagaaaagtgtggagattcgattgtacaaagtgatctatgatttgatagatgatttacgcaatgccatggaagggcttcttgaccttgctgaggaggaggtccactcggttcagacaaagtcgagctgtttcagtagtggagtggaaaggagcgggttgctggttatacggaaagtgtggaagtgcatgtcggtcttcgtaagaagagtttgtggtcctgattctgaaggtgagaatggaaggg

SEQ ID NO: 2897 - DNA, 708 bp, Triticum aestivum
gaaacaccatttatactattttccttctttgtcctttaagatcactaggttcttcccttgcttatagtagtaaaagttatttcaaacctagacatcgtaagcttgtgcattggtttcactctctcattttttcttcaggtgtatgttattggtggtgatggtagtcaaaggggtgcaggagtgatttttgaagaggtcagaaagcgtggtctcaaagttgctgttgctggcattcctaagactattgataatgacatcccggtaattgataagtcctttggtttcgacagtgcagtcgaggaagctcaacgtgccataaatgccgctcatgtagaggctggaagtgctgacaatggaataggccttgtaaagctaatgggacgatacagtggtttcatcgcacattatgccaccctagcaagcagagatgtggattgttgcttgattccggagtcacctttctatctggaaggtgaaggtgggctcttcaaatatatagaaaagcgtctgaaggagaatgggcatatggtcattgtcgttgcggagggtgccggacagaaacttttttggcgaaaacatgaaggaaatggggcgaatgcttcgggacggcctggttttgaagttggcctggggggctccaaaataatgggtttctgagaaagggaccttttttggtttatacccaaatatagggagccttaaaatgtg

SEQ ID NO: 2898 - DNA, 698 bp, Triticum aestivum
cagtgagtgagtgaaggactgaagaactcctaggcacgtatcagttccgtcttccttcctcgagatggcggcggcaatggcggcaacgacaatggtgaccaagaacaaccgcgcctcgctcgccatggacaagaagaactggttcttgcggccggtccctgaggtcgccttcccttggagctcgcagcccgagtcaaggagcttggacttcccacgcagggctctgttcgccagcgtaggactcagcctgtcccacggcgccccgccggtggcgcgcgagcatgacgggaaggctcggcccgccgacgacgtcgcacaccagctcgcagccgcgggcgaggcgggcgtccagaaggcccagaaggcgaaaaaggccaagaagcagcagctgggtctgaggaaggtgagggtcaagatcggcaacccgcacctgcggcggctagtcagcggcgccatcgccggcgccgtgtcgaggactttcgtggcgccgctggagacgatcaggacgcacctgatggtgggaagctccggcgccgactccatggcccgggtgttccggtggatcatgcggacggaggggtggcccggctcttcgcgggaacgccgtcacgtcccccgttggccacaagggctcggcctttttttaaccgcagagtattaccccggcggggcgccggtcctcccccccgttcggaggg

SEQ ID NO: 2899 - DNA, 695 bp, Triticum aestivum
tgccctggcgccgtgattgtgtgcgaagaagtcgcgagtgtgttggctggtggacgtgcgagctgcacgagattcgggagggcgtgtcgcaccgcgagcgctttggcattccggggggaaaacttccgaaccggcgccgcaagcagatgcgcgagcagttcatgcgccgcacgcgtctcgtcctcaaggactcggaacatgaaacttggtgcaaaaaatttattgaactgtaccaagaacttagagagaactgggaacggttgtactgggatgaaggtttttcaaaaaagattggcgaagattgcgctaattatgactctgctgaagaagatgatctagacttctcaccatacagcaggagaagggagctccagtgttgagccaaacaaggaccttggttctggggaaagcaaacaggggtgaaaatgggaaagggttactcaaatttgtgacaagtttgagttttacagagaacggggaatgagagagcgagcgtgtgtccccttgaatttgggaacaattttgggcaagagaactggaaaaggcggaagacagaaagagtaggggtttcttgggaaactttaaatactctttgtgccatatgggggtcttaatcaaatggggggggttcacagtacgaagtcttaatataacactgtgtttcacgaatacttttagagttgtttacaatttag

SEQ ID NO: 2900 - DNA, 688 bp, Triticum aestivum
ttgtcgggcaaccgtaactatgagggtcgtgtgcaccctctaactcgagctaactacctcgcctcaccacctcttgttgttgcatatgctcttgctggcaccgttgacattgattttgagaacgaacctattggaattggaaaggatggcaaggaggtttacttcaaggatgtatggcccacaaatgaagaaatcgagcaggttatcaagtccaacgtgttgccgaagatgttcgtggacacgtatggttccatcatggagggcaacgacgcatggaacaatttagtggtcccgaaagagacgctctacccatgggatccaaaatccacctacatccacaagccggcgtacctggaaaatataaccatgacctcgcccggaccgccctcagtgaaggatgcctactgcctactaagcctaggggacagtatacacaccgaccacatcctctccctcagggtccaccaagccaggcaaccctggcgccaagtatccgcggaacgcggcgagaacccgaccactcaccccccatgcgccgacggccaacaacacacgccgcgaaagggcgatcggcacaaaagctgcaaccacctaggccgaacctcggccaaaactcccgaccacggcgaagatacagaacacgcctcacacacccggccaccagcaacgacgcagaagcacaccccaa

SEQ ID NO: 2901 - DNA, 616 bp, Triticum aestivum
gactggctactggctactggtagcagcagctgatcctgatcgagagcgatggggtgggcgatcgcgctgcacggcggcgccggggacatcccgcgcacgctgccgccggagcgccgggagccccgcctcgccacgctccgccgctgcctcgacctcggcgccgccgcgctccgggccggccgctccgccctcgacgtcgtcgagctcgtcgtgagagagctggaggactgcccgcacttcaacgccggcaaggggtcggtgctcaccagcgacggcacggtggagatggaggcctccgtcatggacgccaccggcatgcgctgcggcgccgtctcgggcctctcgaccgtcgtcaaccccatctccctcgccaggctcgtcatggacaagacgccgcacatctacctcgccttcgaaggggccgaggccttcgcaagagaccagggtgtggagaccagggatcaagccacttcataacagaggaaaacattgagaggctcagaaacgccaaagaggccaacagggtgcagatcgactacacccagtacaactacaccgacccatctgcgctcccaacaacgacgacaacagccggaccggcacggtggctgcgtgg

SEQ ID NO: 2902 - DNA, 683 bp, Triticum aestivum
cttagcttcctcgggatctttgacggcgggatcattcaacttctcatctttcacgattgttgcactaccatcatcagtaggttctacgcttgctgtgacaatcacagcctctagggctggctcatttgataccccttggcggacaagctgcagagctatcttccggtaaattttctcaatctgcttttgaaggttccgcactcctgcttctcggcagtaattttcaataagggcaaggagggcagcatctgtaacttcaacctgttcaggtttaatgccacaagcctctctagtattcttctccagatagtcccgagcaatatgcatcttctcatcagttatataaccagctattgaaatgatctccattctatccagcaacggattgggtattgtatcaataacatttgctgtgcaaacaaacagaaccttggataggtccataggaacatcaaggtagtggtcccaaaaattaatattctgctcaggctccagaagttcccgcagtgcactcgctggatcaccagaatgtcctctcccaagcttgtcgatctcctctttccatacccgagggtttggtgtccccctcgtttgggcctggcgccctttccggggttggccacccttgtcccgcaggcccctgtttttgtgcatgggggaccccccccaaaatttttcggggc

SEQ ID NO: 2903 - DNA, 671 bp, Triticum aestivum
ggtgaggttggtgcaccgcgcgagctccgccgggatcgggccggacatcttgttgacgctgagctgcagctcctgcagcgccaagaggttcccgagcgaagccgggattgtgaccggtgatgccgttcatggacaggtcgatgacgttgagccccgtgcacttgcccagctccggcgggatgacgccgacgaggttgttctgccacagcagcaggttcttgaggttgctgaggccgccgagctgcgccgggatggagcccgacagcgcgttctcgtacaggtagatgttctgcaggctggcacatttcccgagctccggcgggatcgggccggagagcagcgccgtgtagattgccagcgtgtcgaggttcttgagctggccgaggctcgcagggaggggccccgagatgctggtctcggcgaggccgagcatggtgaggttggagcagttgccgatctccggcgggagcgcgccctggaggttcttgttgccgccgccgcggagcacctcgagggcggccatcctgccgatagaggccgggatggcgccctccagctggttgtcgtacaagatgagctctcgcagagccataaggtaccgatgggtccggaatggccctcaggtggttgtgtttaagcagaactccagttgtcccggccggataggtccc

SEQ ID NO: 2904 - DNA, 664 bp, Triticum aestivum
ttctagatcgcgagcggcgaggtagcgagcgggggagcgggcgagacgtgagcatggggaggccgccgtgctgcgacaaggagggcgtcaagaagggcccctggacgccggaggaggacctcgtgctcgtctcctacgtccaggagcacggccccggcaactggcgcgccgtccccaccaggaccggcctgatgcggtgtagcaagagctgccggctccggtggaccaactacctgcgcccagggatcaagcgcggcaacttcaccgaccaggaggagaagctcatcgtccacctccaggcgctgctcggcaacaggtgggccgcgatcgcctcctacctccccgagcgcaccgacaacgacatcaagaactactggaacacgcacctcaagcgcaagctgcaggcggggggcgacgccgcggtcaagccggcggcgcagaggcctgcctcctcctccaagggccagtgggagaggcggctgcagacggacatcaacatggcgccgccggcgctgcgcgagggctcaccaggttcgcgaattaagccgagaagcccgaggcgccacgggtcatggggctgccgaaccggccgaagcggcgccgggcgccagttttggccggtcttcccgttttcctcccgggggcggtgttcccccgcgaattt

SEQ ID NO: 2905 - DNA, 817 bp, Triticum aestivum
caagagcaagatatactttgcgatggagtatgtccggggcggcgagctctttgccaggtagccaagggccggctcaaggaagatgctgcaaggaagtactttcaacagttgataggggctgtggacttctgccacagccgtgatgtctatcaccgggacctcaagccggagaacctcctcgtggatgagcatggaaacctcaaggtgtccgacttcgggttgagtgccctcaaggagtgtcagaagcaagacgggctgctgcacacaacgtgcggcacacctgcatatgttgcgccggagataatcaacaagaagggctatgatggagaaaaggcagacatatggtcttgtggcgtcatactttttgttctgcttgctggttacctcccattccaagactcaaatttgatggagatgtaccggaagatcagcaaaggtgatgtcaggtatccacagtggttcagttctgatgcccggaagattctatccaggctgctcgacccaaatccaaacacaaggatcaccatggacaagctcattgagcacccgtggttcaagaaagggtacaaaccagcagtgactctggcaacgccacgtgcctcaaaggatcttaatgatgtccaggctgctttcagcacggaccgcaaggatggtgaaggcaacagggcacaacaaccaaatagcccattgaagccagcgagcttgaatgcgtttgacataatctccctctccaaaggttttgatctctctggcctatttgagaaggaccaagagcagaagtcgactcgcggttcatgacccaaaacccgcatcagca

SEQ ID NO: 2906 - DNA, 660 bp, Triticum aestivum
  N_region (446)..(446): n = any nucleotide
gtcaacagtgagaaggaagcattggaagctgcgctgttggcgaacaaaaatgagactgatgggctgaaggaagcaatggcctcagcagctaggcagtttgaaattgaattagcgcatcgtgatcttgaagttgataagtgcaagcaggagcttggagaactttcagcgaagtatctgcatgataaatctgctcttgaggctgagattggaatgctccaaggagttattacaaattttgaaggtgagctagcaaaactgtcacaggagaagttgcagctcgggtctcggattgaagagctagaagaggcagcatgctgcttagattattcagcttccgaggtggtgaagctgcaagaggcaatgaagaatacaaaagcagaactggaggaagttttactggagaaagaagaaaccatcaagaacctagaagcacagctagaaactgnctcacaagagaaatcaatactccaggacagtattaaggagctggagagggtggagggtgaatctgagggaaaactttcctggggaaaattgggcttaagggtggaacttcacatttttagaagccaggggctttcgagaggaagtgggatcccgggaaaggagcttagagagatttgtcggtggggcagagcaatgagcggggaaatttttggg

SEQ ID NO: 2907 - DNA, 585 bp, Triticum aestivum
gtcagggaaagttgagcatttactcctatccttcggttaaagaatgatgttgatttcacttggggggcaaaacagcaagaagcctttgatatgatcaagaattatttgtgcactcctccggtgatgaaagcacccaagcatagagagcctttcaaactttatatcgcagcagaggaaggtgttattggtgctgttttgactcaagataccgaaggaaaagagcatgccattacatatttgagcagacgtttattggacgccgagacaagggtaactatttcagggcttgacagaccagtttttatccggaagaacggcctttagcgtgcgtttggatctgaagaaacaaagcaagatatggctgtcattcctcctaacttggctagttactagtatctccttgatcctttgatgaggtagtcttggcgagtgtttgggcatagagaacataacttggcaatttctgtacaggtttaccgtatccatttattcaggactaggagctgaaattctgaattttatagttcaggagtaactacctcctgatgtaccggtggaatttaatagtttcatcgaatgtgaatc

SEQ ID NO: 2908 - DNA, 648 bp, Triticum aestivum
ggcaacgtgttcttgctttcctcaaggttcgaatgcactatgggcatcctgatgtctttgatcggatatttcatataaccagaggtggtattagcaaggcatcccgggtgatcaatataagtgaagatatatacgctggattcaattcaactctgcgccagggtaatatcacacaccatgaatatatccaggttgggaaaggacgtgatgttggtttaaaccagattgccctgttcgaggggaaagttgctggaggtaacggcgagcaagttcttagtcgagacgtgtaccgtttggggcagctgtttgacttctttaggatgctaaccttcttctacaccactgttggttattatgtctgcacaatgatgactgttctaactgtgtatattttcttgtatgggagggtgtatctggcactctctggactcgaccattcgatatctcgtcaagctaggtttctggggaacactgcccttgatgctgctctgaacgctcaattttgggttcagattggaatctttacagccgtaccaatgataatgggtttcattttggaattagggtaatgaaggctatttcagtttatcacatgcaatgcagtctgcccgaatttcaccttccttggatcaaataggttcatccgag

SEQ ID NO: 2909 - DNA, 647 bp, Triticum aestivum
cagataggaggggggatggatcccgtggaggcggaggagcagcaagacggagccggccggacgacgaggcctacgccgaggcagatcccaccggccgcttcatccgggcacgtgcgcacgctgtcctcttccgagtcctccctcttgcgcgctgccgttcttactttgttgctacaaggccttcgataagctggagggcgatgaggtcgcgtggtgccaaacacggattgatgattctgtcatgggttcctcagagaagatggcacaactgaatacggagatcagtctgttgaagacgctgaggcacaagaacattcagaagttgtttgcctcatggattgatgagaataagaagacagttaacatcatcacagagctctgcacatccggcagtttgaggcagtttcgtaagaagcacaacaaagtcggtatgaaggctatgagaggatgggcaatacagatattgacagggctggaataccttcacagtcaagagccagcgattattcatagggagttgaagtgtgacaacatattcataaatggtcatgatgggcacgtggagattggcgaacttgggctggcgacatttttggctccacggagaatgggaattttaacgggcaattaagattatgggccaaatc

SEQ ID NO: 2910 - DNA, 634 bp, Triticum aestivum
atcctgaatgcagctgcacaggatgtgattgcttcagtccatggtgtcatctctggtatccgtgaaagcataaagttcataaaagcctctgatagtcacgacgaaaagtttgctgagattgctctgcagctggagatccctggtaccaagaccctttgtctggatgttacaacccagtgggacaccacctatctgatgctcttggctgccttggattataggcaggctttcactatactagaaacatgtgatgataactataacgaagcgccttcagccgaggactggaaaaaggttgaggctgccagcaattgtttgaagctgctctatgactcggctcatagcgtcatggcagtagcaaacccaacttcagacatctttttccatgaagcctggaaacttcagctagagctggcaaatgccgcggcacatgaagatccagttgtcggcagcattgctagagatgtgcacgagagtttcgacaagtactggaaagattgcaacctcgtgttagccgtcgctgttgtgatggatccgcgttttaagatgaagcttgtcgagttcagttactcgaagattatggcgtcgaggcagcgaagtatgtcaaggcgggaatgattcaggcatgagctta

SEQ ID NO: 2911 - DNA, 632 bp, Triticum aestivum
cgccacgtgctgcaggaagtcgtcggagtaggtccccttgcgcatgaagcgcgacaggaggtcgtcatgcggcgtggacccgtcgctcttgctggcgagctcgagcttgcgcgtcttgatgacggcggagaggtagcggtcgacgtgcgcgacgctgcgcgccagcgtggtctccatgccaagccccagccacttcttgcaccgccacacgaactccgggaagatgaagcggttgagcgtggcctcggtggcgcggtcgaaggaggtggcgaaggcgttctcggggaggccgcgggcgagcgtctccgggtccttgccgaaggcgaggccgcagatgttgtcgaaggtgaggcggaggaggaggtcctgcaggtcgacgtgcgcgccggaggccgccgcgtcggacaggatggggagcatgcggtggtggatggagcgggagacccagcgggacatggcggtgcggagcgtgcgcgtggtgaactcgagcgcggccgtcttgcgctgcgccacccaggtgtcgccgtcggagttgaagatgccgtcgccgagcaggtcgctgaagacgccgtgccagagggggccttggggtagttgcgaagcggccttgaggacgtgctcaggtcctgggg

SEQ ID NO: 2912 - DNA, 733 bp, Triticum aestivum
  N_region (167)..(195): n = any nucleotide
gcgccgcatcatccttccccgcaaagccggcgccaccgtcacctcggtcaaaccgccgccgttgcatccgacgccggtggcctccgctgcacctgcgccggcacctcccacgccacggacgccggttcaggcgcagcccaacgagactacgccaatgagaacacaannnnnnnnnnnnnnnnnnnnnnnnnnnnnacacgcaacgccgacggcgacagagccacagccacagacgccgcagccgcagcaccaacagagcaaggagatcgtcgtccacgccccggagcagccgccggtggacatggccggcggcgcgtcgccgtctcggtggcccaaggcggaggtgcacgcgctgatccagctgcggacggagatgagacgcggtaccaggacacggcgcccaagggcccgctgtgggaggacatctcggtggggatgcggcggctgggctacaaccggagctccaagcggtgcaaggagaagtgggagaacatcaacaagtacttcaagaaggtcaaggagagcagccggaagcgccccgaggactccaagacctgcccctacttccaccagctcgacgcgctctaccgcaccaaggcgctcgcatcctcctccggcgtccatgcgccggcgctggcaccgtcgccgtccccggctcacgcggaggccgcgccggtcaccgtgctctcgccggtgccgctgtcttcccagacgccgccaacagcggcgcagc

SEQ ID NO: 2913 - DNA, 624 bp, Triticum aestivum
ttcgacgagggaacatgctgaaattgggggaccccgacggcagtgacacccccctcgttgtggaaggctagacatttgggcatgaaatgcctgccacggcagtgaaaagcgctgccatggcagcaaattcgcccgcacccaaaagtcctgctacgacagccgaaaacgctgccatggcagggaattcaccatgcacagcctctacagcagaaaaaaaaccctgccatggcagcagaaaacgctgccatggcagtgtcatctccaacatccacgactctcgacgatgtacacttgatgagctctggcaagaggcaatgagcgatgagctcgcgttgatcgaggagaatgacacatggtctcttactgatttgcctgcatgtcaaaaaccgatcggtctcaaatgggtgttcaagctcaaacgcgacgccggcagcaatttggtgaagcacaaggcctgtctagtcacaaaggggtacgtcaagcggccggggatcgactttgatgaagtctttgctccggtggccagtctggactccgttcgactcctgctcgctgtcgccgctcagttcaagtggcaagttcaccaaatggacattaagaacgcggtccacatgacatatttct

SEQ ID NO: 2914 - DNA, 617 bp, Triticum aestivum
cagatgtgccacagaaatggtgtcatccatcgggacctcaaaccggaaaacttcttatatgcaaacaagaaggagagttctcctctgaaggcaattgattttgggctatctgtgttcttcagacctggtgaacggttcagtgaaattgtaggcagtccatactacatggccccagaggttttgaagcgcaattatggccccgaaatcgatgtctggagtgcaggagttatactttacatacttctttgtggtgtgccaccattttgggcagaaactgaacagggagtagcacaggcaattatacgctctgtggtagatttcaaaagagacccatggcccagagtatctgagcctgctaaagaccttgtcaggcggatgttggatccaaatccaatcacacggcttactgcagcacaagtacttgagcatccatgtttacatgattccaaaaagaatcctgacattcaacttggcgatactgtccgagcaagactgcagcaattttctgcaatgaacaaattaaagaagaaagccttaagggtgattgctgagcatttgtctttagaagaagtagctgacataaagaaaatgtttgatagcatggacgttaacaataa

SEQ ID NO: 2915 - DNA, 612 bp, Triticum aestivum
aatgccttcctaaggacatcagccgccacggcgccagctccggccaccttatcttcaaatgcgccggaaacgtccgggaccccaccggcggcctgcttcttggtggcagccaccgaggacgtgatgccaccagcgacgccccttatcgccttcctgtaggccccaagagcgtcgtacgccgacagcctgagcttgtcgtacccttcggtgagcgcgtcctccgcctggaatatctgcttgctgagcttgtcgatgaacctggccacggactcctcgacgccggtggcgtcggccgggaacgtggtgggcatctccgcgtccatcagggcctgctgcgcggcatcgtcggtgaccgcgccgaccacagcgtccgcggccaggtcgacgggcatcagcggcgggtcgaccccggcgcgccagagagggtcgggcagctcggcggcggaggcgaacccccgcacgattgcgtccggcgcggtggcgtagggggagaggatggcggagtcggagaagagcgggcggtcaggcacggcctgcgcgacgagcgggtcggcggcgaagggcctgagcgcgccagcctcgaccctccgcagcgcccgcgaccggcgggca

SEQ ID NO: 2916 - DNA, 603 bp, Triticum aestivum
aaaaatatatcccaggatggcgatgtcgacggcgacgcggatgctggcgcgccgcgccgcccccgccctcctccgctccgccgccagccccggcctcctccgctcccccgccgccggcacaggccccagccccgccctcgcgctgccggcgctgctgcaggcgcaaggccggtggtaccgcgcatcaggaggggacccgtcaccgtcgttctacgagccgccgccgaccccggccaacctgggcctgagcaatcgtcccggagaataaggcgttcgtggtggagcgctttggcaagtacctcaagacactgtcgtcggggatccacctcctgatgcccggcgtggaccgcatcgcctacgtgcactcgctcaaggaggaggcaatccccatcccggacaactcggcaatcacaaaggacaacgtctcgatacagatcggaggagtgctatacgtcaagatcgtcgacccctacaaggcctcgtacggcgtggagaaccccatctatgctgtcatccagctggcgcagacaaccatgaggagtgaacttggcaagattaccctcgacaagacctttgaggagagggacacgctcaacaccaaca

SEQ ID NO: 2917 - DNA, 742 bp, Triticum aestivum
gccggggacgttgacggactccatgtagtcggcgtagagcgcggcgaggaaggagtggcgacggcgtactgcagcgcctggccctggccgtggttgaactgggcgagcccgcccttggtgaagttgaacgcgttgaacttgggaaaatacatgcacatgttcatgctggtgacgttgtggtagcccatgagcgactcctcgtaggaataaccggggttgaggaacatgcgcagccgcgacagcagcagcgtggcgccggggagcttgttgtcccagctgaagacggagaagtcgaggatgttgaagaaggccttggcgttcttgggcagcctggggtcggtggcgaagctgatgtagctgttgttgcccgtggcgtagtacatccaggaggcgctccacatgaactcgtcccagtagctggtggagttgtagaagtactcgatggcagggttgccccgggagtagggggtgcgcttcccgttggcgcgcgcgaacttgtacaccgtcgccgcgcccttcaccagcttcttggagtaggcggcgttgtcgcggaacacgatggaggctgaggccagcgccgccgccacctcgccgccgaggtccggggccgcgctcgcctgctggaccggccgcgggtacgccatgtcctccggccggttccagcagaagtggtcgtccggcgtgctgccgttgatcttggcggtacccacctgactgtagagcttgttgatggtggaggcgg

SEQ ID NO: 2918 - DNA, 596 bp, Triticum aestivum
ggagcatactgtccacagtccaccctcaacaaaaccaccggagtctgcgatccatacaactaccaaccgcctcctgggcagcccaaccatacttgcggcggtgccgacagatggtcggatgtcatgagtactgacgatgttttctgtccagctggttactactgtccaagccctatcctcaagatcgattgcagtagtgggttctattgcaggaaaggatcaactatccagaccaaatgcttatccaagggcagttgtaaaccaaactctacaacccaagacatcacaatatttggtgccatgctagtggttgccctgagtttagtgctgttgatcatttacaacttctctgaccaacttctgaccaaccgagagaagaagcaagcgaaatctagggaggctgctgtaagactcgcgaaagagaccgtacaggcccgtgaaaggtggagatcagctaaagatgtcgcaaagaagcatgccgcaggcctgcagacatctctcacccgcacattctcgcgcaagaagagtctcagcagctcacatgaatcatctaaagggcatccacctgaagagcatggtgcggatactccgctgga

SEQ ID NO: 2919 - DNA, 587 bp, Triticum aestivum
  N_region (374)..(374): n = any nucleotide
gcgcctgccgcgttcgacgccgaggccggcggcccggcgatcgtggccgcggcaggcaacggcgcgcacaagcccgtccccggcgccggtgccgacgcgggcgccgcatttgtgctggagtccaaagggacgtggtggcacgcggggttccacctgacgacggcgatcgtggggccgacggtgctgacgctgccgtacgcgctgcgggggatgggctgggctctcggcatcaccacgctctccctcatcgccgccgtcaccttctacgagtactccctcatgtcccgcgtgctcgaccactgcgaggcgcgcgggcgaaggcacatccgcttccgcgagctcgccgccgacgtcctcggctccgggtggatgtnttacttcgtggtgatggtgcagacggcaatcaacacaggcgttagcatcggctccatcttgctggcggccgattgcatcgagatcatgtactcgagccttgctcccaatggtcccctaaaagtgtaccacttcatcatcatcggggctgtggtgctggccttcctctcccaattaccatcgttccattcgctgcggacatcaacttggtcaaa

SEQ ID NO: 2920 - DNA, 587 bp, Triticum aestivum
  N_region (462)..(462): n = any nucleotide
atagttctgaagttcagacccacggaaatatgtaaggatctcttgccagtcaggtggatttttgaatcgtcccagattgggcttcagcttgccagctaagactttaagtgctgttgacttcccaattccattggttccaacaagacccaaaacttgaccaggtcttggaacaggcaacctgtgcaatttgaaggtattcggtccatagcgatgggtagtatctttctccaaatcttttggaagattgatgatttcaatggcatcaaatgggcatttcttaacacaaataccacaaccaatacacagctcttcagaaatgaatgcaagtttggccgctggactaacttcaatgcaaagctttccggtcttgacaacggggcaactcttcttgcactcctggcggcacttcttcggcttgcacttgtcctcgctcacgatcgcgatacgggtcaaacggtccgncatctgcggcgactctccgtatacgccgccccgtccaaagagatttccgctggaaggggaagagcgctaccactggcggcgacactagagttaggcgtggaagcggcggcggggaggaggggata

SEQ ID NO: 2921 - DNA, 572 bp, Triticum aestivum
gggggatttcatcatcatgcagctacagctatgtgcagtattctttaccttttcccctcgggacaaaatcacattattttggccgcacaatcctccatggtggtgcaaaatatagagcaactggcagaggctttgttgttcgccatgtaaagttcgctgaaaattacagaatgtatagcaggagtcactttgtgaaaggacttgagctcatgttactacttgtagtgtatgagctctatggtgatgtggctaccgattccactgcctatgttctgctgacatatctatgtggttcttggtaatcacatggttgtttgctcctttcctcttcaacccatccggatttgaatggcaaaaggtggtggatgattgggatgattggaacaaatggataagcagccgtggtgggattggtgtgccggccaataaggcctgggagtcgtggtgggaagaggagcaggaacatctgctgtcaacaggcataatcggccgcatatgggaaatcatattatctctccgattcttcatgtttcagtatggtatcatgtaccatctgaatatctctaatggca

SEQ ID NO: 2922 - DNA, 566 bp, Triticum aestivum
ctccatggtgctcaccaagttcctggtcctcgccgtagacctctctccggaagtactcctgctccccggagctcgccccgggcgcgcgccgtggtggaccggggagcgcaattgcgaggacatcctcatgaacttcgtggccgccgaggcgtccggggaagggccggtgctggtggaggccggcagtatcagggactggggcgacccgaggaacgacgccaacgccggagctggcgtggaggcgatgagggccgtggggctgagctcgagaggcggcgtggggcactgggagaagcgaggggagtgcatcacggagtttcaccggctgctagggaggatgccgctgcggtacagctacgggaaggtggtggaggcggccgtcgccgagcaggggctgtgcagcaaaggcggccgtctcgtccggtgcgaccaggagtagcctcacggcgtagggtggcatttgctacccttcagtgatgtgatcactacacaatctgacggactgtacgatggtgctgtagtataaactgtggtaggataacaatgtgaaaattcagactgtgcta

SEQ ID NO: 2923 - DNA, 565 bp, Triticum aestivum
tcttcgagggcatcgacttctacactaccatcacccgcgcccggttcgaggagctcaacatggacctcttccgcaagtgcatggagcccgttgagaagtgcctccgggacgccaagatggacaagagcaccgtgcacgatgttgtcctcgtcggaggatccacacgtatcccccgtgtgcagcagctcctccaggacttctttaacgggaaggagctctgcaagagcatcaaccctgacgaggccgtcgcgtatggagccgccgttcaggctgccatcctcactggcgagggcaacgagaaggtgcaggacttgctcctgcttgacgtcacaccgctctcgcagggcctggagacggccggaggtgtcatgaccgtgctgatcccaaggaacacgacaatccccaccaagaaggagcaggtcttctccacctactctgacaaccagcccggcgtgctcatccaggtgtatgagggcgagagggcgaggaccaaggacaacaacctgctcggcaagttcgagctctccgggatcccaccggcgcccaggggtgtcccccagatcac

SEQ ID NO: 2924 - DNA, 527 bp, Triticum aestivum
tatatgtggacctcaaaagaaaatgacaccattactgttacactggacaacaattacaacacatatagctttgatggcaaaaagagtttggtgctttctacttcaacttggcttggtggaaagaatgattttcttggtcttgcatatctcactgttggtggactctgcttcttcctggcatttgcattcaccttactctacttgataaaaccaaggttagtggcttataagctctcgtataccgatcatattaagttacatcgctgatctttttttctggtctccatgcagaaaattgggagataacaactacttgtcatggaacagaaactctgcaggccactgatgcactctgaaagttgatttccgcattcaacatcgaacaattggtcttgtggttaacttgtatctttgtacgaaaatagcaatttttgtgtacaagctgttctcaaagtacgtgtatcaagtggacttgtgtgtatgagcaacacgaaagggtgtacattattatactgaaatatacatac

SEQ ID NO: 2925 - DNA, 596 bp, Triticum aestivum
actgagtgacagagaccttattgtttggatgcgaactccgcgcttcctacattcagaaaactgtatggtaggatacgtgttgacctcaaagaaaatgacaccattactgttacgctggacaacaattacaacacatatagctttgatggcaaaaagagtttggtgctttctacttcaacttggcttggtggaaagaatgattttcttggtcttgcatatctcactgttggtggactctgcttcttcctggcatttgcattcaccttactctacttgataaaaccaaggttagtggcttataagctctcgtatgccgatcatattaagttgttacatcgctgatctttttttctggtctccatgcagaaaattgggagataacaactacttgtcatggaacagaaactctgcaggccactgatacactctgaaagttgatttccgcattcaacatcttggtcttatggttaacttgtatctttgtacgaaaatagcaatttttgtgtacgagctgttgtcaaagtacgtgtatcaagtagacttgtgtgtatgagcaacacgaaagggtgtacattattatactgaaatatagatac

SEQ ID NO: 2926 - DNA, 652 bp, Triticum aestivum
cacatatcaatcgacaagacagacatctcttgggaagagtgacagggaccacaaatttggaagtgatgtcttcccaaaaacttccagaaaggtcctcttataggtggaaaaacactcaacgaatctataccgctgagtgagcaagaggaccttattgtttggatgcgaactgccgcgcttcctacattcagaaaactgtatggtaggatacgtgttgacctcaaagaaaatgacaccattactgttacgctggacaacaattacaacacatatagctttgatggcaaaaagagtttggtgctttctacttcaacttggcttggtggaaagaatgattttcttggtcttgcatatctcactgttggtggactctgcttcttcctggcatttgcattcaccttactctacttgataaaaccaagaaaattgggagataacaactacttgtcatggaacagaaactctgcaggccactgatacactctgaaagttgatttccgcattcaacatcttggtcttatggttaacttgtatctttgtacgaaaatagcaatttttgtgtacgagctgttgtcaaagtacgtgtatcaagtagacttgtgtgtatgagcaacacgaaagggtgtacattattatactgaaatatagatac

SEQ ID NO: 2927 - DNA, 608 bp, Triticum aestivum
gtagcagcatcgccatgagcccgccgagtgtgatggggcagttcggggacacgacctacaccaaggtgttcgtgggcgggctggcgtgggagacccagaaggagaccatgaggaagtacttcgagcagttcggggagatcctcgaggccgtcgtcatcaccgacaagaacacgggcagatccaagggctatggatttgttaccttccgggacccggatgcggcgatgaggtcctgcgtcgaccccgcgccggtgatcgacgggaggagggccaactgcaacctggcttcccttggggtgcagagatccaggcctccaaccccacagcacgggggcgctaggagctttcgagtgatgaagtcctttgggcagcagcaggctgcggggatccaaggtgcgctgggcgcagcttttccttcgcaggccaccttccctcattatgccatcccacaaggcctcccttaccatgtctatgggtactctccttattcaccagactacggttatcccgcaaactactacaacatctatggaggaaaccagtacccgttttacggaggagcaggaactggcatggtgacctggaaccagtcccttctatccatattc

SEQ ID NO: 2928 - DNA, 560 bp, Triticum aestivum
aaaaaatttgagataggaatcatgccgcccggggttaatgatactgtcatatgcctcatcccgaagggcaaagatccccaataccttaaggatttccggcctatcagcctatgtaatgttatttacaaagtggtgtcaaagtgcctagtgaaccgcctcaggcctttttttggatgagattgcctctgaaactcaaagcacctttataccaggaaggatgatcacggacaacgctatcatcgcgttcgaatgtttccacaggataaatcactctagaagtaaattcaatacccattgtgcctacaagcttgatttggcaaaggcgtatgatagggttgattggtactacttggaaggagcccttcaaagacttggctttgatcgaatctggataaagtgggtcatgggctgcgtcaagtcggtgtcctattcagtgaagtggaatggtcaactgatggaatattttaccccctctagaggtctcaggcagggtgatcctttaagcccatacttgtttctgctggtggctgatggcctgggtaacattttggaccgagagg

SEQ ID NO: 2929 - DNA, 560 bp, Triticum aestivum
tgcgtacatgagtttgggagaggagcttcagactggtacagcatttgatgaggccgaaggtattgaagttgatggaatcaagtgagcatagatgagctgatgcagtgtccagataaccttgagaggctctacgcggaagttcatctactgaaatctctcaagcatgaaaatgtaatgaagttctacaattattgggtcgatgatcgaaagaagacaatcaatgttattactgaactgtttacatctggcagttttaggcattaccgacgggaacatccacgcgttgatttgaaagcaataaagaattgggcaagacagattcttcatggattagattacttgcacagccaccaacctccggttatccacagagacctgaagtgtgataatatttttgttaatggcaatcatggacaagttaagattggagatcttggactagctacaattatgctaacgcctaaagcaagaagtgttaattggtactcctgaattcatggcacctgagctatatgatgagaattacgatgaactggtggatatttactccttctgaatgt

SEQ ID NO: 2930 - DNA, 560 bp, Triticum aestivum
ttgtcagcagtcttgcaagtttatgagaagacactgatgatcgtgagtgtgagaaaatcaatggtaagagagttaccatatgtatcaaaagcagagagaagtatactgaagaagggtgagaatgcctgtgaatctactagtgatcctcagaaagttgtctaaaagccagatagcccacagcaagaaaagggcaaggataatacaaagccgcgtaatcctaaaacaagtcgtggacagaagggcaagcttaagaagatcaaagagaagtatgcagagcaggatgaagaggaaagagaaatccgtatggctttgcttgcgtcttctggaaaggcttcactaaaggacaatccttcacaggatggagaagataccactgcaaaacaatcaaaaccatcaactggcgaagacgactcattaaaggtttgttataaatgcaaaaagtctggacatctatctcgtgattgccctgaacagtacatcagctgtggatctgactgatgtcaaacgttggtagaagcagagatgggatggatagaagtgctgctcctgttgatgcagca

SEQ ID NO: 2931 - DNA, 635 bp, Triticum aestivum
aaaatcaagacaatggtgataacccagaagatgatgatctgatccgcctacaattagagacactattagctgagaaggcgcggcttgcacatgaaaactcggtgtatgctcgagaaaatagattcctacgtgaaattgtagagtatcaccaacttactatgcaggatgtcatatatgtggatgaaggcatcgaagaggtcactgaggtgtaccctactcaagtactgcctccagcgtctgctcgcactgggtcgggcctaggtcgcgcatcaactccagtgacactcaaacatgttaactcatctccggcctccacatccgcccttccggaaccttgtccggtcgtgccggtttctccgaagatgctttctcgggcttcatctcaaagcaaatagagggagcctggcagcaccagccaccgttcaacaggtaaagatggttggtggtgtgatacgagtaacacatatactgtaacggaggttgcggcgccattgtgcctgtgggatgttgtggcctctgggctgtggtgaatacacgcaggatctgtgatgtgtgtatgatccgtgttgtaacttgtgagatttttctttcacatcaccatgcttgcgaactacgcatgccgggtgcattgtctc

SEQ ID NO: 2932 - DNA, 556 bp, Triticum aestivum
ccggcgggcagaagcagcgggtagccatcgcgagggccgtcgtcaaggaccccaaggtgctcctgctggacgaggcaacgagcgctctagacgcggagtcagagcgtgtggtgcaggaggcactggaccaggtgatggtcgggaggacgactgtggtggtggcgcatcgcctgtcgactgtgagaggcgccgacattatcagcgtggtgaagaacgggacgatagtggagaaaggaaggcatgaagaactgctgcggatcaaggatggagcctacgcttcccttgtcgagcttagctccacttcaagataagatactcatctttctctaccagaaaattccatggaatgaaaggccagcaattcagtgtatttgagtttataggccagttaatgtgggtgtaggatctttcctttcattttagtagatgggtatctgcagacaagcagatgcaatcagacaaactgtatgcaaataattactgattgtcgttcaagcgaggatgccgatgaagcttttccaaaacacggcaataagaagaaattatttgcctgatc

SEQ ID NO: 2933 - DNA, 547 bp, Triticum aestivum
gtcgacagggaaatcataaggtttgaaatggagaagctttcattgaagaatgatactgacaaagcctccaaagaacgactaagcaagcttgaagctgaactagaatccctcaagcagaagcagaaaaacctttcagaacactgggagtatgagaaatcgttgatgactcgtataaaatcaattaaggaagagattgacagagttaacctggagattgaagccgctgagagagaatataatttgaaccgtgctgctgaactcaaatattcaacgcttttgacactacaaaaacagctggatgaggctgaggaaaaccttactgaattccagcagtcaggaaagtcgatgcttcgagaagaggtgactgatgttgatattgctgagatagttagcaagtggactggtattccagtgtcaaatcttcaacaatcggatagggaaaagctactgctactggaggatgtactccacaagagggttattggccaagatattgcagtcaagtcagtagccaatgcaatccgtcgttctagggcaggcctatcgg

SEQ ID NO: 2934 - DNA, 546 bp, Triticum aestivum
gacaaactttgttcttccaatcataatgctacaaactctccagagaaatctaaacgaatttacccttccatggatattcctcaagataagatatctgatgctctggatgatgagttacttagcaaagatggcaaagccacagagcctgtatctaacttggttcaggaattgaatgaacatccaattggtcgtgtcacaccaactgccccaaggacgtcctaccatcggaacaggtttacatccatatcacgcacatttggagatggttcaaaattatggccaggagataacatgtcaactggcagtgctagtggttctaagaaaacacgaacccatgtttcatactcagtttctcctagaagtgatgaactaggatcaaaacacaaagggcatttccggaagatacaacctcacaacatcgccaagactaatggttcaaagaggcttcctggtaatactaggagtgtggagagcagcgcggagtcattggcttgtgttgcaattgtctggttacagttgggtatagagggtgtgagggattatgat

SEQ ID NO: 2935 - DNA, 544 bp, Triticum aestivum
tcgagaatgcatgtattttgtcttgagcatgctgtcgaggttgagaagcaactccaagcaattggtggggcccatgttattcttttatgtcgtccagaatatcttaaaatagaagcagaagcaaggtcgttagctgcagaaatggaagttgagcatggctggaaggacatccatttcagggaagccaacatggaggacaggaagatgatagaagagctcctgcaggatgaggaatcaatacctacaagcagtgattgggctgtaaagctgggaaccaatctttactacagtgcaaatctggccaaatctcctttacataacaaacaaataccatacaacagggtcatctatagggcatttggctgcagttctcctgacaactcaccagtaaaacgggaaaattgcgaggggagtcaagacaggcagaagaaagtagtcttggctggccggtaggtgtgggaaagcatggatgtcaaaccaggtccatccattcctagctcagagaattgaagcagtgaatacgaaggagggctgacaagtctag

SEQ ID NO: 2936 - DNA, 724 bp, Triticum aestivum
gcgtgtggatagagccatgcgaccagctcaccgacgaccagatcgccgagttcaaggaggccttcagcctcttcgacaaggatggagacggctgcatcaccaccaaggaacttggaactgtgatgcgctcgctggggcagaaccccactgaggcagagcttcaggatatgatcaatgaagtggatgctgatggcaatggaacgattgactttcctgagttccttaacctgatggcacgtaagatgaaagacaccgactccgaggaggagcttaaggaggctttccgtgtgtttgacaaggaccagaatggtttcatctcggcagctgaactccgccatgtcatgaccaaccttggtgagaagctgacagacgaggaggtggatgagatgatccgtgaggctgatgtcgatggtgatggccagatcaattacgaagagtttgtgaaggtgatgatggccaagtgagctgccatactaagctagttctatctcgatgttagcagctagtttagccttgaaaactgacagcacttggtactactgttaagtccagtgaatgaacatattgctcgctcttcctttcttctcagggatgttgagaatttcgtttggattttcctgcagttgtattacctttgtacaatgtagctttctttccaaattgagatcatgaatttgctgtagcttatgccttcatggtatcaagttgcatggatgtctgatat

SEQ ID NO: 2937 - DNA, 709 bp, Triticum aestivum
tcgcgcttcgctctcagatccgttctcctccgtctcgcccgcgtgttggggtaggagccatggcggaccagctcaccgacgaccagatcgccgagttcaaggaggccttcagcctcttcgacaaggacggagacggctgcatcaccaccaaggagcttggaactgtgatgcgctcgctggggcagaaccccactgaggcagagcttcaggatatgatcaatgaagtggatgctgatggcaatggaacgattgactttcctgagttcctcaacctgatggcgcgtaagatgaaggacactgattccgaggaggagcttaaggaggctttccgcgtgtttgacaaggaccagaatggtttcatctcggcagctgaactccgccatgtcatgaccaaccttggtgagaagctgacagacgaggaggtggatgagatgatccgtgaggctgatgtcgatggtgacggccagatcaattacgaagagtttgtgaaggtgatgatggccaagtgagctgtcatactaagctagttctatctcgatgttagcagctagtctagccttgaaaactgacagcagttggtactactgttaagtccagtgaatgaacatattgtgcgctcagggatgttgagaatttcgtttggattttctcgcagttgtgtttcctttgtacaatgtagctttctttccaaattgaggtcatgattgct

SEQ ID NO: 2938 - DNA, 542 bp, Triticum aestivum
gagccttgtaaattactgtttgctactcaacttcaggaaaccaacaaagcagcagatgggcaagaggttgatggagattgccagaaaagaaggcattcaagctcaagagaatgcaatggaagagcttgcagaaagagtacatggggatattcgcatggcactcaaccatttgcaatacatgagtctctctcagtctgtggtcaaatatgatgatataaggttgcgtcttaatagtagctcaaaagatgaagatatctctcccttcacggctgtggacaagctattcggtttcaatggtgggagactaaggatggatgagagaatcgacttgagcatgagcgatcctgatttagttccccttattatccaggaaaattatatcaattatcggcctagtgccgttgggaaggatgacagtggagttaaaagaatgaattatcttgcccgtgccgctgagtctatagcggatacgactaatggtaaatgttcaaataagaagatatcgacagtggagtggtccccaaagctggcctgtttggctt

SEQ ID NO: 2939 - DNA, 542 bp, Triticum aestivum
ccggtgctgttcgctcctcctcagatcaaggctgaagtcaagtccgttgagatgcaccacgagtctctgcccgaggctactcctggagacaacgttggattcaacatcaagggtgtctctaacacggatatccgccgtggaaacgtgaccggtgatgctaagaacgacccccccgctggtgtcgacttcttcctcgcccaggttatcgtcctgaaccaccctggtgagatcaagaacggctacgcgccggttgtcgattgccacactgctcacattgcttgcaagttcgaggagatccagtctaagatggatcgccgctccggcaaggttattgaggagaagcccaaggctatcaagtcaggagatgctgccatggtgcagatggttccttccaagcctctgtgcgtggagaccttctccgagtaccctcctctcggacgcttcgccgttcgtgatatgcgccagactgtcgctgtcggtgtcataaggctatccagaggactgctgccggcaagaagccgagggtggcaagccgcttgcaa

SEQ ID NO: 2940 - DNA, 539 bp, Triticum aestivum
cttcaaccagcctggttattctatctgctgccacttgagatatgaaatcatcaaatatgtgcaccactcttgtttcaggaataatggacaaaagtggaatatgctcaaaaattgatttaagggctagaggaaggcatgagacaatgagcaggtacattcactcacctgctgtgcgtcaacttggtccgctttgttcagaactatgcgtatcttgtcatcgtgaccgcgcagcgacccaatcacacgcttgaactcgtcgctgatgtcgagcttatggggatcgaacaggagaaggatgaggtccgacttggccgcaaaccacgatgtgactccggtgaaatcgtagctgcgttgcgttcgctgcttctcccctgataacactccgggagtgtccacgaaggaaatgtgatccagtaacttggcaaacaaaatgaagctcaatactgttagttatttcctacaagctacagaaaatggtgaggtaaatactggcgcgagagagtatatatactggatgagcatctgagatactcaacgtg

SEQ ID NO: 2941 - DNA, 534 bp, Triticum aestivum
  N_region (53)..(82): n = any nucleotide
ctcatccatctccggctacctcccagctaccgacgaatcccaaccatctcacnnnnnnnnnnnnnnnnnnnnnnnnnnnnnnccacgagttcatcatctaccgagcgtcgtcatcccgtcttctttgggggtctccgcgagccgcccgcgctcttggaagccgaggaggtcctgggttcgccatcctgcgtgtttgtgttcgctgaaatatggagatacagacttcagggaagcccattgatatgctgatggagaaggttctctgtatgaatattctttcttctgattacttcaaggagctctaccagatgaagacctatcatgaggtcattgacgagatctacaaccaagttgatcatgtggagccttggatgactggcaattgcaggggtccttccactgcattttgtctcctctacaagttcttcacaatgaagcttactgtgaaaagatgcatggttgttgaaccatctgactcccatacattagagctataggattttggtatcttcggtatgtcgcagatccaaagat

SEQ ID NO: 2942 - DNA, 533 bp, Triticum aestivum
  N_region (531)..(531): n = any nucleotide
aggacacgggcatcttcgccgcggaggagcaccccatgcacatccacggctaccacttctacgtgctcgccaccggcttcggcaactacaaccccaggcgggacgaggccaagttcaacatggtcgacccgcccagccggaacaccatcggcgtgcctgtcggcgggtgggccgtggtgcgcttcctggcagacaacccgggcgtgtggctggtgcactgccacatcgacgcgcatctcaccggcgggctcgccatggcgttggtggtggaggacggcaagaccgagctccagaccacgatgccgccgccgctcgacctgccgctctgtggcctgtagaggtttcctggtgactttctgtacatggcggggaacgtgagtctgtgtgcgtcttacgtgttgtgaattgtgatgctatctgtttgccattccaatttggtattgtaatttggattttcgatttgaaattgtaaagaaaaggcaaggttttcgttacgggcctcctttttatttatatatgaatattagagtnct

SEQ ID NO: 2943 - DNA, 525 bp, Triticum aestivum
gccttgccgtggaatattgctgttcgggccacctggaactggcaagacaatgctcgctaaggctatagcaaatgtattgtctggcgccagcttcatcaatgtctcaatgtccacaatcacatcgaaatggttcggggaggacgagaagaatgtccgagcattgttcagcttggctgcaaaggtggctcctactatcatttttgtggacgaggtagatagcatgttggggcagcgcgctcgctgcggtgagcatgaggcgatgcggaagatcaagaatgagttcatgagccattgggatggtatcttgtcgaagtccggtgtaagaatcctcgttcttgccgcgacaaatagaccgtttgaccttgatgaagccatcattaggagattcgaacgcagaatcatggttggccttcccactcaagatagtagagagctgattttaaggacagcttttgtcgaaggagaacggtcgataaagacatcgagtacaaggagcttgcgacaatgaccgaaggttacagcggc

SEQ ID NO: 2944 - DNA, 522 bp, Triticum aestivum
gataatgggatggtaaggcatcccaacgtcttgaagcttttcgaggtaatggctagcaagagcaagatttacttgttttggagtatgccaaaggcggcgagcttttcaacaaaataaccaagggaaagttaagcgaggatgctgcaaggaaatacttccatcagctcatcagtgccgtggactactgccatagccgaggtgtttatcatcgcgacttgaagccggagaacctactcctggatgagaatgaaaaccttaaagtctctgatttcggtctaagtgccctggccgagtccacgagacaagatggcctcctccacaccacctgtggaactccagcttatgttgctcctgaagtgcttagcaggagaggctatgatggtgcgaaggctgacatatggtcatgtggagtaattctgtttgtgctggtggctggtttccttcctttccatgacacaaatcttatagagatgtataggaagatctccagggctgaatatagatgccctcgccctttttcag

SEQ ID NO: 2945 - DNA, 522 bp, Triticum aestivum
gcattagcatgccctcaagggtggagaacatagtgagaaatcctgaaagtgaatccctgctcatcggcgagcccacgggtgaattccaggatgtgatcctcttcttcgggatcatcgacatcctgcaagactacgatatcagctagtagctcgagcatgcctacaaatccatgcagtacgatcccaactccatatccgcggtcgacccgaagcagtactgcaagcgattccgagacttcattttcagggctttcgcggaggatgtacagtagcgactccattgacaaacagaaaatttatactcaagagagcagaccttaacagttggctggtgattcttctttgcccaccatccagtattcttttgtaggtaacataatcgattctttcggttgtagacggcagcacgttgatatcacagtgatttcttcttcatgtaatgtgttcatagattttgtacatctaactgaatcttctctgtgcttatgtaattagatgtagggtgacagtaatcatgcgtgt

SEQ ID NO: 2946 - DNA, 515 bp, Triticum aestivum
aaaaatgtatcatgtgtgcatgtgtgcaaatgcccccctttttacgggcatcgagcaactacaacaattttcgcatctacaacagctacttggtctgacagctactgattctgttgaacttggtcacattgtggagcctcctgccattagaactgcgacttctattcttcctcttggatggactggccttcctggtggcaaaagtgctgaaccgctgaaagtagatataattggacacggtctgcatatgtgcactcttttccaggctcagataaatggaagctggtattcaacggccgttgaaaccctaccttcaacgacatcattttcatcggatcaggaggtgcaacctacattgcaaaaaatgcggattttagttggacgtccactaaagcagcctccaaattacactagtgaggactttatggttcctgtggtcacaggtgctatgaatccagattatggagttgagccctttgaagataaaggttgttgcaagggtttgaatgaagtta

SEQ ID NO: 2947 - DNA, 675 bp, Triticum aestivum
aatccgtccatcaaccggtggaacggccggccctactcggcgcgctacctagagatcctcgagaagcgccgcacgctccccgtgtggcagcagaaggacgagttcctccgcgtcctccgcgacaaccagaccctcatccttgtcggagaaaccggaagtggcaagaccactcagatcccccaatttgtgctcgaggctgaaggtctgagcaaccgctctatgttgcctgcacccagccgcggagggttgctgcaatgtcggtctctcggcgtgtcgcggaggatatggatgtcacaatcggggaggaagttggttacagtatccgatttgaagattgcagcagtcacaaaactgttctcaaatatttgacagatggtatgcttctgagagaagcaatggcagacccacttttagagaggtacaaggtgattgttcttgacgaggctcatgagcgcacgttggcaacggatgttctgtttgggcttctgaaggaagttctaaagaacaggcctgacttgaagcttgttgttatgagtgctactcttgaggcagagaagtttcagggttatttcagtggtgcaccattgatgaaggttcctggtagacttcatcctgttgagatcttctatacacaggaaccagaaagggactatctagaagctgctatcaggacag

SEQ ID NO: 2948 - DNA, 503 bp, Triticum aestivum
ggtctgcgaggccctctgcgaaggtaacacgcagaacttcggagcagatttactggagaccttgctaaagatggctcctaccaaggaagaggagatcaagctgagagaattcaaagaagagacatctcctattaagcttggcccttccgaaaagttccttaaggcggttcttgatgtgccttttgctttcaaaagagtagacgcaatgctttatattgctaactttgaatcagaggtcaagtacttgaagaacaactttgagatccttgaggctgcttgcgatgagcttaggaacagcagactatttctgaagctactggaggccattctcaagactggcaacaggatgaatgttggcacaaatcgcggcgatgcgcatgcattcaagcttgacactctgctcaaattggctgatgtcaaaggcaccgatggcaagacaacgcttctgcatttcgtcgtgcaggagatcatccggacagaggggtcccgtctctctgccaaca

SEQ ID NO: 2949 - DNA, 657 bp, Triticum aestivum
cacgtcctccgcatcaacaagatgctctcctgcgccggcgccgaccggctgcagaccggcatgcgcggcgccttcggcaagcccaccgggatgtgcgcgcgggtgcacatcggccaggtgctgctctcggtgcgctgccgcgacgcgcacgcggcccacgcgcaggaggcgctgcgccgggccaagttcaagttccccggacgccagagggtcatcgtcagcggcaaatggggattcaccaagtttaagcgcgaagagtatctcaagctcaagagcgagggccgcatcgtccccgatggtgtcaacgccaagttgctgacttggcacgggtcgctcgagggacgcccgcgaggaaaaggtgtctttccaccctccgtcgccgaatcggcttgaagattacaacctcccgttacgtgtcagccttcgtcgggtccggcctgaatatcgagtctaccatgccatatgttgtgacaggagctgtcatacgcacgtccagctagctttatgtatgcgagtaaacggatataaacatgtggggactatacttgcgatggtaacagtatgatgtctagtgtgtagctcgagttggcagcatgctttaggaacctgtttcgtcgttaaacacgttgtgagcttggttttattcataaataaagg

SEQ ID NO: 2950 - DNA, 495 bp, Triticum aestivum
aaactgggatggagacaatgatgctgatgggagagagcccaaccctgatagttctggtgatgaggatttcttaagagagatgtcagagaaggacaacaagatcaagtccttagtagacatgggctttcctgaagatgaagcaaatatggctattaccagatgtggctgcaggagattgtcattatgggaacttgtctgactatgaggttactggtagctgctttgattctttgggagggagaaagagagcaagattgatggaagggagcaagaaaaagcggaagcggtatggaggtgcagcacaaggaaatcgacggcccttggatggtagccatgaagaaccaatgcctctcccaaatccaatggttggatttaacctgcctaatgataggctacgatcagtgaccagacggcttcctcaacaagctattgggccacctttcttctactatgaaaatgtggcactagctccaaaaggtgtatgggcgaaaattt

SEQ ID NO: 2951 - DNA, 666 bp, Triticum aestivum
cttcgtgggcgcgttcccgaccgtcgtgctcgacctcccgtccctcaggttcctcgacctccgcttcaacgacttcgagggcggcgtgccgtcggagctcttcgaccgcccgttcgacgcccatcttcctcaaccacaatcgcctccgcttccagctccccgacaacttcggcaattcgcccgtgtccgtcatcgtcctcgccacaaccacttcggcggctgcctcccggcgagcctcggcaacatgtccgacacgctcaacgagatcctcctcatcaacaacggcctcagctcgtgcctcccgccggaggtcgggatgctccgggaggtgacggtgttcgacgtcagcttcaacgccctcgcagggccgctgccgccggaggtggccgggatgcaaaaggtggagcagctcgacatcgcgcacaacctgctgtcggggaccgtgccggaggccgtgtgcgacctcccacggctcaagaacttcaccttctcctacaacttcttcaccggcgagccgccgtcctgcgcgcgcgtcgtgcctgccgacggcgaccgccggaactgcctccccaaccgccccgcccagcgcatgccgcagcagtgcgccgctttctctgcccgcccacccgtcgactgcgcagctttccagtgcaagccgtttgtccc

SEQ ID NO: 2952 - DNA, 493 bp, Triticum aestivum
ctggccgccgctaattttgcggctcattcgcctttctctgctggggttctcatgccagggcatgcgcgcaacggcgacttcagcagtggaagagccagaagtggggatgatggaagcagtaggtcgtattcggctgagaaggagccctatatttggagatcagcaagtacgcatgcgtggacagaaacacttatggaggcatctgcctttgctcatatctcagaggaagctgcacaagatgatgtcttacaaggtccacagggagcaactcctgtgatttccagtccaatcataaagaaagatgttgccacacaaatgagtcctgatgacagtataatatcgtcctccccaaaagcaaggcattcctgctccagcttgccgtcaggacatgctattagagaatcaaatagtcatacacctaaggttgaagttagggatgtgacaggtagatgatcaagtaactgttacaacaggtgatcacaagcagacatgt

SEQ ID NO: 2953 - DNA, 489 bp, Triticum aestivum
gcgtgccactgggccgacggctacccgctcaacgtgctcctctacgtctccctcctccagaccgtcttcgaccacagggagcccaccgtggtgctagacgaggtggacgagctgctggagctcatcaagaagacttggccgatcctgggcgtcggccgggcggtgcacaacgtgtgcttcgcctgggtcttcttccagcagtacgtggtgaccgagcaggccgagccagacctcgcgtccgcgactctcgccctgctcgccgacgtggcggccgacgccaagcaggggagccgcgagtccctgtcccgtgacccaggtgtacgcacaaggtgctcctcagcgcgctcggcaagatgcaggagtggtcggagaagcggttgctggactaccacgagaggtacgagagaggcaccggcgggactgccacccgccgggcatggagatattgctgtccttggcgcttgccgcaggcaagatcgtcgccgaccg

SEQ ID NO: 2954 - DNA, 525 bp, Triticum aestivum
  N_region (492)..(492): n = any nucleotide
  N_region (522)..(522): n = any nucleotide
tggaagtcttcagttgggagatagttaggtatcttgtccttgatgaggctgaccagatgcttgcagttgggtttgaggaagatgtggaaacaatattgcaacagctgccagccgaacgacaaagcatgcttttctctgcgaccatgcctagttgggtgaagaaattgtctaggcggtacttggataatcctttgacaattgatttggttggcgatcaagatgaaaaactagctgaaggaatcaaactctttgctattccactcacaacgacttcaaagcgcaccattcttagtgatctcattacggtatatgcaaagggtgggaaaactattgttttcactcggacaaaacgggatgcagacgaggtatcattggcattgacaaccagtattgcatctgaggcgcttcacggtgatatttcacaacatcagcgtgagaggacattaaatggtttccgccaagggaaatttactgttcttgtggcaactgatngtgcttctcgtggtcttgatataccaatgntga

SEQ ID NO: 2955 - DNA, 475 bp, Triticum aestivum
cagtggtcctcctctgggagaattgtcaatgtctcatcaggcttttcactgctaaggaacttcaccagcgaagaactgaagaaggaattcgacgacattgacaaccttactgaaaagagactagaggagcttctggatctattcctagaagatttcaaggccaacttgatagaggcacatgggtggccgaccggtggctcgtcggcctacaaagtcgccaaagctgccctgaatgcatacacgaggatccttgccaagaggttccccgcgatgcgcatcaactgtttgacgcctggttttgtcaagagcgacatgacgatgcacatgggagtgttgacgcttgaggagggcgctagcaacctggtaaaggtcgctctcttgcccgacgatggcccgatgggtgcttattttgatagggatggcgtggtgtcatttgtgtgactgtacagtgtaatgaactcagtaccaggtatta

SEQ ID NO: 2956 - DNA, 464 bp, Triticum aestivum
accaggagacctgcctcgacggcttcgccaacaccaccaccgacgccgccgccaagatgcgcggcgcgctcaacgcctcccaggagctcaccgaggacatcctcgccgtggtcgaccagttctccgcctcgctcggcagcctcaatatcgggaggaggctgctaggggaggaggacggcatgccttactggatgaaggacggcaagagacggctgctggaggccgagccctccgcgcccgagttcaggcccaacgtcaccgtggccgccgacggcagcggcgacttcaagaccatcaaggaggcgctcgcaaaggtgccgcccaagagcgcctccatgtacgtcatgtacatcaaggccggcacctacaaggagtacgtctccgtcggccgccccgtcaccaacctcgtcatcatcggcgacggcgacgacaagaccatcatcaccggcaacaagacttcaaca

SEQ ID NO: 2957 - DNA, 460 bp, Triticum aestivum
cgccgactctttcgagaagatcgacaagatcggccagggcacgtacagcaatgtgtacaaggcgcgggataccgtgagcggcaagatcgtggcgctcaagaaggtgcgcttcgacaacctcgagcccgagagcgttcgcttcatggcccgcgagatcctcatcctccgccgcctcgaccaccccagcgtcatcaagatcgatggcctcgtcacctctcgcatgtcctgcagcctctacctcgtcttcgagtacatggagcacgacctcgccgggctggtcgccagcccggatattaaattcaccgagccaaagggtttcggagatcccagtgctgctgcttctggtggcccctggacaccgtgcaatgaaatgtgagcctaatcgaggtgtctggctttgctgacctgcaggttaagtgctatatgaaccagctgttgttagggctggagcactgccatg

SEQ ID NO: 2958 - DNA, 452 bp, Triticum aestivum
gcaacagcaagtcagcagaggctatggtgaaaagcgtcagcaaagagtcgttccagtgggggctcgcggccgggatgcactccggcctcacctacggtctcgcggaggtgcgcgggacccacgactggaagaacagcgcggtggcgggcgccgtcaccggcgctgcggtcgcgctgacctcggacaacgcttcgcacgagcgggttgtgcagtgcgccatcaccggcgccgcgctgtccgccgccgccaacgtgctctccgacatagtttagggagttcattcatatgataccacccgatggcggcggaatggacttgtttaggtgacgtgttgttgcgacttgcgagcgcacttgtcctgtgtttcctttcttacgatctcggtgtagccggttcaaataataactgccatatctcctttcatacataaaggtttggcggctattcgctac

SEQ ID NO: 2959 - DNA, 438 bp, Triticum aestivum
  N_region (347)..(347): n = any nucleotide
tgccccaccccgatgagcgtgttgagtatgaattctggaccaacagtaacgatgaatgtggtccaaaatgtaatagccagattgatttcgtcaagagctttaaaggagcagcccaggtacttgagaagaagggatacacacagttcactccgcattacattacctggtattgcccggaggcctacactttaagtaagcagtgcaaatcccagtgtatcaaccatgggaggtattgtgcacctgatccggatcaggatttcagcaaagggtatgatgggaaagatgtagtagtacaaacatttacgacaagtctgtgtttataaagttgctaaggagagcaagaaacncttggctggtgggtgggattatgtgactggattttgcagattcggtgcccaatgaaagaaaagaagtacaccaagggaatgtgctgatgga

SEQ ID NO: 2960 - DNA, 931 bp, Triticum aestivum
cttttagttgtcacaggtgtatggggtgtatatggatgcaagtgaacttacagacatggtacagtagaaggacaacaccattttggtacagtgtggggtgtgtgtatcgaggcgcggagaaaccccctcatgtgtatcttgcgctttgcatgatctgtgttactggataaaacacgagccaggccgattggaggccgccgagcatagaagtttgtgactggggctgcggcgattccgcggtgattcagcaggcatctgaagtagtgtagccgagccaggacggtcgtttccaggtcttgggcggatatggcctccaactgactccacatacgctctgctgccgcggctgctcgtggccatattgcatgtggggtgagacggcagacacctctgatgtccaacaaacaatatggccacgagcagccgcggcagcagagcgtatgtggagtcagttggaggccatatccgcccaagacctggaaacgaccgtcctggctcggctacactacttcagatgcctgctgaatcaccgcggaatcgccgcagccccagtcacaaacttctatgctcggcggcctccaatcggccctggctcgtgttttatccagtaacacagatcatgcaaagcgcaagatacacatgagggggtttctccgcgcctcgatacacacaccccacactgtaccaaaatggtgttgtccttctactgtaccatgtctgtaagttcacttgcatccatattacaccccatacacctgtgacaataaaagcccttgatccttccccgtgtatttcaccccgaaactccaataaaaccccagcttttatccgatcctactggggaaaaggtggtcgccgatgtaacagtactattcgcgcgccttttcaacaggcctgtttgttgaacaccagtttccggatcaacatttga

SEQ ID NO: 2961 - DNA, 397 bp, Triticum aestivum
ggcgacgaggtcgaagtgcactacacggggacgctggcggacggcaccaagttcgactccagccgggaccgcggcgccccgttccggttcaccctcggccgaggccaagttataaagggatgggatttgggcatcaaaacaatgaagaggggcgagaatgctattttcaccatcccaccagagcttgcatatggtgaggatggctcccctccagtcatccctccaaatgcgacgctgcagtttgatgttgagcttctctcatgggcaagtgtcaaggacatttgtaaagatggcagcatctttaagaagatactagctgaaggcgagaagtgggagaatcccaaagaccgtgatgaagtttttgttaaatatgaaggcaaaggcattgatggatggg

SEQ ID NO: 2962 - DNA, 393 bp, Triticum aestivum
tggccaatgttttacttccattgtaacttgcacaaaaaagggaggagattctgcaccctgtgttagtgatagccaatatctagataagcccctcccaaacatccttataagattcattaaaggcatgtgtaaactttttaacctatctttccagttgtatggtatacaaaatttctcttcaatgttatttcttgcactaaggaaactgaattctgttacagggacccattcaccatctttggcgtgtgattgagctctgcaggagagtaaaaaatatataccaaaacaaggcaatatgctgacaacaaggatgctttatttatcatagggactatctctggagaagaggcaatgaatcaaccacagtgttggataatatctgatatatatact

SEQ ID NO: 2963 - DNA, 606 bp, Triticum aestivum
gtcgtcaccttcgcccccgctggttgtcaccacctgaagtcaagtccgtcgagatgcaccacgagcagctcgtcgagggtgctccaggtgacaacgtcggattcaacgtcaagaacgtctccgtcaaggagattcgtcgtggcaacgtcgccggtgactccaagaacgacccgccaaagggttgtgactccttcaacgcccaggtcatcgtcctcaaccaccccggtcaggtcggtgctggatacgccccagttctggactgccacaccgcccacatcgcctgcaagttctctgagctcctcgagaagatcgatcgccgtaccggcaagtccatcgaggaccagcccaagttcatcaagtctggtgacgccgccatcgtcaagatgattccgtccaagcctatgtgtgttgaggccttcactgagtacccacctctcggccgcttcgccgtgcgcgacatgcgtcaaaccgtcgccgtcggtgtgatcaagtccgtcgccaaatccgcaaacaccggtggcaaggtgaccaaggcagcagtcaaagctggcgccaagaaatagattctgaaacttgtactcctgtttcagatgcccgagagagatt

SEQ ID NO: 2964 - DNA, 392 bp, Triticum aestivum
ctcgtcagggaccccaagaagcggctcaccgcgcaccaagtcctctgccacccgtggctgcagatgagcggagaggcaccccacaagccgctcgactcggcggttctctcgcgcctgaagcagttctcggcgatgaacaagctcaggaagatggcattgagagtgattgccgagaacttatcagaggaggagattgcagggctcaaggagatgttcaagatgatggacaccgacaatagcgggcagatcaactatgaggagctaaaggctgggctggagagggtgggcgccaacatgaaggagtcggagatatctcagctcaatgcaggctatttggatatggtggaaagatgatattgaagtggaaagcaaacttaggggaaaggcataca

SEQ ID NO: 2965 - DNA, 378 bp, Triticum aestivum
gcggcgtcgcaggtggtgacgcccaggacgggaactccggtcaagctactcggccgcgaggatgctagcattgactggtataacctggagaaatcaaaacgtgtcaaggaatttaggtgtggagagtttgatgcttgtattgagaaggcaatggcttgtcaaggaactcctgtaaagagaagagaaaaatatgctcgtagagaagatgctattcttcatgctcttgaattggaaagaaagcagcttgcattgaagtaccagaaccaaggtttcagggcagatgacagctgcagtatcctctttgctgacacagggagggagtttgacgactttccttcagaatattactcaagaaacaacgtccaggatactcagtgg

SEQ ID NO: 2966 - DNA, 582 bp, Triticum aestivum
gagcccggcgtcgccggcggatcgacaggcgggagcccgacgcggcgccggggatggagggccgcgcgtggggaagccggcgaggagacggtccagggcgtcgcggcgcgcgcccgtgacgctgctcaacacggacaccaccgacgttccgcgccatggtgcagcagttcaccggcatcccggcgccgcccgcgggcgcgttcgcggggcccggcggcgttccggtcatcaacttcggctccgactacggcttcaccggcgccgtccttcccttctccgaccacctccaaccgcgccggccgacgttccaggaccaccaacagctcctccgaccgcagcagcagtacaccggcgcaccgttcggttacggcaacctgcagcaagccggcggcgccggcaccggcgccggcgacatgattcagccacgcgctgagctcggccgaggacaggttgctcctgcagagcctccagacagctcagatgcctacttccgccgctaaccacagcgctaatggttacttcgcctaattaaccaacggttaatcgaagacacatcacaagcaaagaagattcatggaccag

SEQ ID NO: 2967 - DNA, 655 bp, Triticum aestivum
gcgctccgcgacacgccgccatcgcgtcggcgcgcgccgcggagctgtacggcctccaggtcctggcggacggcgtgcaggacgacgccgggaacgtgacccggttcgtgatgctggcgcgggagcccatcatcccgcggacggaccggccgttcaagacgagcatcgtgctggcgcacgaccgggagggcacctccgtgctgttcaaggtgctgtcggcgttcgcgttccgggacatcagcctgaccaagatcgagagccggccgcaccggcaccggcccatccggctggtggacgacgccaacatcggcaccgccaagcacttcgagtacatgttctacatcgacttccaggcgtccatggccgacgtgcgcgcccagaacgcgctcgccgagatccaggagttcacgtccttcctcagggtgctcggcagctaccccatggacatgacgccctgggacgccgcgccgtcgtcctcctcctccgatcaacagcagcgcggctagatgatagctagctccatgttactacattactgtcaattcaatcaatatgcgcaagagattcgttgttaatctatccccccctttgatgctccgctgctcgctacaattttcctctgttaatttgctctcgcagccattgggccaaattc

SEQ ID NO: 2968 - DNA, 627 bp, Triticum aestivum
tgagcgcacggctgatttcggcacaaggctaatacagccctatgacactcatgtgactactgacctagttggcacccttgggttacataccacctgagtacagccagtcactgatcgccaccccgaaaggggacgtctacagcttcggtgtcgtcttgctggagcttctcactggtagacggcccgtggaagtgtcgaaagtcaagggatccagggacttggtctcctgggcactccagatgaaatctgagaacaaggaagagcagattttcgacaggctgatttggagcaaagagcatgagaagcagctgctgtctgttctcgaaacggcatgcaggtgcatcagcactgaccctcggcagcgtccatccatagagcaagtcgttgtttggctcgacagcgtgtcaccgtaatacatcatgttattttcccagttctcttttggtcaatgtctagttctttacatgggtgggtgataaaccgtagcagcagagaaactatctgagaactatcagtctagaagatggagcttatctggtgtaaataaccgtggttttctttcttatagacgtcgaactggcagagaatgactacaagtgctgccatttcttgctgatgctctgcgtt

SEQ ID NO: 2969 - DNA, 314 bp, Triticum aestivum
gcaagccagaaaaaccaacaaaaatgtgcatggcatagcaaaggagctgaggaagctccacagggagggcatcaacaatgcaacaaactctgtcacagttgtggctgtgctcttcgccacagttgcatttgctgcgatattcacggtgccaggcggcaacgacgaccatggtgtagcaattgttgtgcatgcggtatccttcaaggtgttcttcatcttcaatgccatcgcgttgtcacattattacagtagtggtggccagatacacttgttaggtggagaccaacagagagcgagtgtggagtgatacaagt

SEQ ID NO: 2970 - DNA, 704 bp, Triticum aestivum
ttttcgggaagttctgcagaagcaaatacctgtaacttgtgcatcaaaaaaatggaaggctctttcttcggtaacatggatcagagaaactacgtcatgagcggtggccatccaaggacagctttctatcaggcatttctcaagttggcgaagtccatatggttattgcataggctggcatactctttcgatccaaaggtcagggtcttccaagtgaaaaagggaagcgagttctcggagattcacatggaaagtgtggtgaagaacatggtcttggatgaaagtgccgacaggcttaaagtaggtttaatggtgatgcctggtttcttgattgggactagcgtcatacaggcccgagtgtacctttcagatgttaaatatgctgactgaaaatgctgcagttgcttgggaagattcagggcgtattagttcctgtgggctcatttagttgcatctgaaatggcgggggactttgtgtgtctgtgtcgtgtgtgatgctacctgaaaggatgttattcagatgaaatgtggtagtctatagcaacacgtttgtgaaagaccttcatatgcttgtctttttaagactagaatgtttattctctctgttgcgtgatgtaatcctgtccagtgtttggtatatatatattgttggtctgatttggatgttgcagcctatgtggtactgcacaacccttttcatgttg

SEQ ID NO: 2971 - DNA, 276 bp, Triticum aestivum
agatgatattgcagagattgtgagcaggtggacaggcatcccggtttccaagttaaagcaatccgacagagaaaagctgctgtatctcgaggacgaactgcacaagcgtgtagtggggcaggatcctgcagtcaaagcagttgcagaggccatccagagatccagagctggtttgtctgatccaaaccggcccattgccagcttcatgttcatgggacctacaggagtgggcaaaacagaattggcgacacactcgcttcttttatgttcaacatc

SEQ ID NO: 2972 - DNA, 272 bp, Triticum aestivum
cgcgtcttcgacttcctccgcgacgagacctctcgcagcgagtgggacatcctctccaatggcggcatcgtccaagaaatggctcacatcgccaatggccgcgaccatggcaactgcgtctcactcctccgtgtcaatagcaccaactcgaaccaaagcaacatgctgatcctgcaagagagctgcacggacgcgtcgggctcctacgtcatctacgcgccggtggacgtggtggccatgaatgtggtgctcaacggcggcgacccagacta

SEQ ID NO: 2973 - DNA, 272 bp, Triticum aestivum
ggctctggagccgctgtctaccctcttggtggtgatgcaaatgctgagcttgatgatgagatgctccagctgtgggagactgctgagaaggattgcaagaatggaacagccaagtcatcatcatctgaacatgacatacaagaggtggaggaggtgaagagtcagtacacttcctttgaaatagcaagaggaagagacctagggatcaacaggctcgagatatcaacagcaaccctggagcctcagcagtcatggaccaaaatgtcttgaga

SEQ ID NO: 2974 - DNA, 270 bp, Triticum aestivum
cgtgccccgcgcggtcttcgtcgacctcgagcccaccgtgatcgacgaggtccgcacccgcgcctaccgccagctcttccaccccgagccgctcatcagcggcaaggaggacgcggccaataacttcgcccgtggtcactacacaatcggcaaggagattgtggatctctgcctggaccgcatccgcaagctggccgacaactgcactggcctgcagggcttcatggtcttcaacgccgtcggcggtggacccgggtctgggttgggtcc

SEQ ID NO: 2975 - DNA, 261 bp, Triticum aestivum
cttctccacaggctccatgcacttcctgaacagatccatgttcatctcctcaaacctggcacgggtgatggtggagtagaagtcaatgccctcaaacagcgagtcaatctcaatggtggtctgggcagtggaggagagggttctctttgccctctcacaggatgtcctcagcctccgaagagctcttgggttgccactgatgtccttcttgttcttcctcttaaactcctggacaaagtggttgacatcctgttgtcaaag

SEQ ID NO: 2976 - DNA, 259 bp, Triticum aestivum
cgcgagctcggggaggacggcttcgccggcgtcgagatccgggtcacccccatgcgcaccgagatcatcatccgcacgacccgcacccagaacgtcctcggcgagaatggccggaggataagggagctgacgtcggtggtgcagaagcgcttgaactttccggacggcggcgtcgagctgtacgccgagaaggtcctgaaccgcggcttctgcgccgtcggtcaggccgagtccctcggttacaagctgctgggtggct

SEQ ID NO: 2977 - DNA, 254 bp, Triticum aestivum
gcacaaataagcaaaggatatggagaagaaattgtcaagcgtcagttgaaagctgtcgctgaaggtgtggcagcatctgttctgcagtcaccatttcctgaaaaaccaactgaattttctggggatcacaaagatttgcctggagatgtatttgatccaaaaaatgaggatgcgccgagcaaacagtcagacaaaacaagccaaggagttccagttctagatgacatcgataaccttcagataataaagaacag

SEQ ID NO: 2978 - DNA, 251 bp, Triticum aestivum
cgcggacgtcgtcatcaaccaccgctgcgccgaggacaaggacggccgcggcatctactacatcttcaagggcggaggacccgagggcctcctggactggggtcccggcatgatctgcagcgacgacaccaagttctccgacggcacgggcaaccgtgacaccggcgccgacttcgccgccgcgcccgacatcgaccacctcaacccgcgcgtccagaaggagctctccgactggctcaactggctcaagt

SEQ ID NO: 2979 - DNA, 244 bp, Triticum aestivum
attttgcgtcgtggacatataacttacaacgagtacattcaagttggcaaagggcgtgatgttggacttaatcagatatcgaaatttgaagctaaagttgcaaatggcaatagtgaacaaacacttagccgtgatatctatcgtctagcgcggcgattcgattttttcaggatgctttcatgctatttcacaacagtgggattttacttcaacagcctaatatcagttgtaggtgtttatgttt

SEQ ID NO: 2980 - DNA, 244 bp, Triticum aestivum
gctatccgaagcttggcaagccatctctcggagcagatgggaagttcgtagtcgcagcctctattggaacccgcgaggatgacaagcgaaggctagagcagctaattcaggcaggggccaatgctattgtgatcgatagctcgcaggggaactccacctatcagcttgacatgataaagtatgccaagaagacgtttccggaggtggatttgattggaggcaatgtggtgacaattgggcaggc

SEQ ID NO: 2981 - DNA, 600 bp, Triticum aestivum
tatgcttcgcctaggattggcgcaaggtcccccaggaggcactttatcttctaggcaaaatttagctggtgcatccaactacctaggttacaatggagttggaagtccgactggagcagcttctcttcagatgcctatcgatccgttatatgttcaataccttgctgcccaagttgcagccagctatgatgatcctttcatggccagtggacatctaggaagttcatacatggatttacttggtcctcagaagggttgccttagcccactgcttcagtcacagaagaactatggctgctatggaaatcctgggtttggccttggttatggcggtagccctttgacgagtcctgttctgccctcttcacctgttgcatctggtagcccacttaggcacggtgaacgcagcatgcgctttgcatcaggcatgagaaattttgggggttcttttggttcgtggaatccagacctggttggaaagatggaaggaaatctgatgccctcgcttctggaggaattcaagagcaacaaaagcagaacttatgaactctctgaaatagctgggcatgtcgttgagttcagtgctgatcaatatgggac

SEQ ID NO: 2982 - DNA, 723 bp, Triticum aestivum
accgtggtcactttgaaggacatggaaatcagattggcatgcttgcctggacaacaaagttggtttcacagggctttgcgtgccgaaggaacacaggataagtttgtgaaatttgactttaatggaccacctgctgaactgaagcatggcagtgttgttatagcagcgattactagttgcacaacacatcaaccccagtgttatgcttggtgctgcccttgtcgcaaagaaagcttgcgaattgggtctcgaggtcaaccatgggtaaagacaagccttgccctggatctggggttgtcactaaatacttgctaaagagtggccttcaagaatacttcacaagcaaggattccatcttgttggatatgggtgtaccacttgcattggcattctggtgaactccatgaatctgtatcagctgccattacagaaaatgatgttgttgctgctgctgtgttgtcgggcaaccgtaactttgagggacgtgtgcaccctttgactcgggctaattaccttgcttcaccacctctggttgttgcatatgcacttgctggcactgttgacattgattttgagaaggaacccattggagttggaaaggatggcaaggaagttttcttcagggatatatggcccacaactggagaaatcgcagaggttgtacacatccagtgtgctgcctgacatgttcaagagcacatacgaggccatcacaaaaggcaa

SEQ ID NO: 2983 - DNA, 243 bp, Triticum aestivum
gatcgaaccagcacgcaccgttgtggggaatgaggtactgggggcaaaagtggcattcttctcttcgagagggccatcacgtgattaccccgacattatcaagcctgacatagccgcgcctggagccaacatcctggcagcagttaaagattcctacagatttaattccggcacatcgatggctgctccacacgtatcgggcatcgtcgcgctgttgaaagctcagcacccagactggtctcc

SEQ ID NO: 2984 - DNA, 242 bp, Triticum aestivum
gaaccacactgatttcatcattaccagcacattccaggaaattgctggaagcaaggatagcgtgggccaatatgagtctcacattgctttcacccttcctgatctgtaccgggttgtccatgggattgacgtgtttgatcctaagttcaacatcgtctcccctggagcagacatgactgtctacttcccgtacactgagactgacaagaggctcaccgccttccactctgaaattgaggagc

SEQ ID NO: 2985 - DNA, 584 bp, Triticum aestivum
aaagggttatcatctccgtgatttcggcaaagaacgaattgggggagattcccatggaatctcatactggtatgatgaagatccgattctcgggcatcgattatatcgtgatattagacaagtggagtatgtgaaggagcatactagataatctaaacgaaaggggttcttaggtgttccagttgtatcctatcagtgggagactgtcgcgacatactttgttgaatttgaagcagcagcagaaaaactcttttcaagtagtaacaggacagaggtctcacttggaaagaagttgaagctcaattatctcccagagatggaaaagactcacaagaagaaggagaagctgctaaaaaagcaacaaagagaagcccttctccttaatagctacttgacatttgatagattcacctctggccgctcccatcgtgaaagaaagcgtgtcacctatactttcgatgattatgaccgttcaataaatgaggccctaaaagcaataaagaaaagtgagaacccggttcaggtcgttgccactaccaacagaggagtacttgtcgcaacacgagaggcatcaagtaatggta

SEQ ID NO: 2986 - DNA, 240 bp, Triticum aestivum
gggacctgatacctaagattcaggtcatggcccgttcgttaccattggacaaacatttgcttgtgacaaacttgagaggcatgttccaagaggtggttgctgtgacaggtgatggtacaaatgacgctcctgcgttacacgaagcagatattgggcttgctatgggcattgcagggacagaggttgcgaaggagaatgctgatgtcatagtacttgacgacaacttcacaactataataa

SEQ ID NO: 2987 - DNA, 251 bp, Triticum aestivum
gtgaaacatccaaacattgtccaattgtatgaggtgatggccaccaaaaccaagatattttttgtgctagagtatgtgaaggggggcgagctgttcaacaaggttcaacgaggaaggctgaaagaagatgttgctcgcaagtacttccaacagctcaatagtgcggttgacttctgtcacagccgaggcgtctatcaccgtgacctgaagcctgaaaatcttcttcttgatgagaacgcaatttaaagact

SEQ ID NO: 2988 - DNA, 238 bp, Triticum aestivum
accttctgttgttttctaatgagcgggactggtgctccctcactaaaacactactcgatattcttaccaagagaagtatggttagtgacgagttatcacatgagactctggagatgctctccgagattcatcttctgaacagggcagtgaaaaggaagagtagccacatggtgcatttgcttgtgcagtttgttgtaatttgccctgacaattccaaactgtaccctttccttccaaa

SEQ ID NO: 2989 - DNA, 237 bp, Triticum aestivum
ctgttgcctatggtgctgcagtccaggctgccatattgagtggagagggtaacgagaaggtccaggacctcctgctgcttgatgtcacacctctttctcttggtctggagactgctggaggtgtcatgaccgttttgattccaaggaacaccaccagtcccaccaagaaggagcaggtcttctccacctactctgacaaccagcctggtgtccttatccaggtttatgagggtgaga

SEQ ID NO: 2990 - DNA, 236 bp, Triticum aestivum
gctccatgagcttcaagatgaaggagctcttccaggcgcagaccccggcggacaagatcgtcgaggacgccaccgccgagaacctcgaggggcccgactgggccgccaacctcgaaatctgcgacctgatcaacaccgagaaggtgaacagcgtcgacctgatccgcgggatcaagaagcggatcatgctcaaggaggccagggttcagttcctcgccctcttcctcctcgagaca

SEQ ID NO: 2991 - DNA, 623 bp, Triticum aestivum
gggatctttcggggagctgtatcttggcgtgaacattcagagcagcgaggaggtggctatcaagttggaatctgtcaaaatcaaggcatccccagcttcattatgagtcaaaactatatatgcttctgcaaggggggatggggattcctcatcttaaatggtttggagtggacggggagtacaatgtcatggtcattgatcttcttggtccaagtctggaggacttgttcaacttttgcaacagaaaatttacccttaaaacagtacttctgcttgctgatcagatgatcgctagggtagagtacatgcactcgaggggctttcttcatcgtgatataaagccagacaactttcttatgggtttaggccgtaaagcaagccaggtttatgttattgactatggccttgcaaagaagtaccgggacctccaaactcacaagcacataccatacagggagaacaaaaatcttacaggaacagcacgttatgctagtgtaaatacccatcttggagtagaacaagcaggagagatgatttagaatctctcggttatgtgctgatgtacttcataagaggaagccttccttggcaaggtctgaaagctggcacgaacaaacagaagt

SEQ ID NO: 2992 - DNA, 230 bp, Triticum aestivum
ctagaaatgtttgagaccattgacaaaggaaatcttatctacaaaattgacgtgttcttgacatcgagcatttttcgcacctggaaagactcaatcatagttctgcaaagtacgaagtcattgctgccatggtctgagaatttgaaggtaatcaaccactgcattgattctattgcatcgaaggcgtcaattgatccgtcagaggttgagtggtcatacacctacaacag

SEQ ID NO: 2993 - DNA, 567 bp, Triticum aestivum
atcaaacacagcaaaccaatccagattaccatcggctatcaatcagcaggaggaggaaatcgctgctcgattggggaagaatcaagaggctcggcgaagatgcaggcggcgaaggagaaggtgaaggacggcgtgagcgcggtgaaggccaagaccaagatcacgcaggccaaggcgtcggagaaggcggaggcggccacggcgaggtcgcacgcggagcgggagctggcgcacgagcgcggcaaggccaaggtggccgcggccaagatggagctgcaccaggacaaggcgctccaccgggaggaggccatggagcaccgcatccacaagcacggcggcggccacggccgccaccaccacaagcacggcgtcggcatcgtggccgcagcccccgccggcgaccggtgccggggcttaccaccctcctcctgccgccggtggccactactactgatcagctacgcagctggatcgccagctagatgggcacatgcgtcgcgtttgtgtgatgtgttctcgatagctaataagtctgtactttgtgatgtttatgtttgacttacccac

SEQ ID NO: 2994 - DNA, 638 bp, Triticum aestivum
gatctttacagctttatagcttagggatcttgtcacttggtgcttcttggttctgatctgtggtgattggatttggagacaaggagaaaacagagaggggattcaggtgactctcagttgtgtgaagatgaagtatatgaagcttggagcaaagccagatgtctttcagacagaggggaatatcaggtttgtggcaactgaactggcgacggatattgttatcactgttggagatgtcaagttttatcttcacaagttcccacttttgtccaagagttcccgcttgcaaacgttggttgcttccacagacgaggaaggcaatgatgaagtagacatttctgacatccccggtggaccttcagcatttgaaatctgtgcaaagttctgctatggcatgaccgtcacgctgaacgcgtacaacgtcctcgcagcccgctgcgcggccgagtttctcgaaatgttcgagactatcgacaaagggaacctcatctacaagattgatgtgttcctctcctcagcatattccgcacctggaaggactccatcatcgtgctgcaaacaacaaagtcactccttccctggtcagagaacctgaaggtgatcaaccactgcgtggattccattgcggccaaggcttc

SEQ ID NO: 2995 - DNA, 227 bp, Triticum aestivum
gaggaatctgatgaagaagagagctatttctctgttgagctgacaccaagcttgtttacatctactgctgataacgcataccaatcaatacatgagttctcaaagcccttgatcaacatgatgaaagctgcaggttgggatcttgatgctgctgctaacgcaattgaacctgatgtagtttacacaaggagagctcacaagaagtatgcatttgagtcttatatctg

SEQ ID NO: 2996 - DNA, 617 bp, Triticum aestivum
aaggtggagtgcataatggtgaccggggacaactggggaaccgccaaggccatcggcaaagaggttggcatcgaaaacatcatagccgaagcaaagccagagcagaaggctgagaaggtgaaggagcttcagctgtctggaaaaaccgtggcaatggttggcgatgggatcaacgactccccggcgctggtggcggccaacgtcgggatggccatcggcgcgggcaccgacgtggccatcgaggcggcggacatcgtgctcatgaagagcaacctggaggacgtgatcacggccatcgacctgtccaggaaggccttcttccgcatacggatgaactacgtctgggccctcggctacaacatcatcggcataccgatcgccgcgggggtgctgttcccgtccacccggttccggctgccgccgtgggtcgccggcgccgccatggccgcgtcctccgtcagcgtcgtctgctggtccctgctgctgaggtactacaagaggccgttgatcacacagaagcggcagacatagagaagaggaccagcatcgtatagataatactagtatacatacatagaataagctgtagatatctgtaacaaacgtgtggtagaatg

SEQ ID NO: 2997 - DNA, 1268 bp, Triticum aestivum
  N_region (195)..(195): n = any nucleotide
ggaccaactgccgctcaaggtggtgagaggaggggggccagtaatggtggtgggttcaggagggatgggagccagtgggtgtcgagaagggagcttgataatcagctgccagagcctctcccgaggccggctcccaaggaagaggatcagagcttggtgaggaggaacaagagaatgctggggaagcttcttgtnggcacgctagagaaatttcagcaagagaacaaaaaactttccaactcagaggcttttatgcgtagatcagaggctcagcagaaggctgatcaaaaggctcgtgaggacagtgaaagattgcggcagcaagagcgggagcaagcagctgagaagcgtaggcgtgatatgacgcttcgtgctcgagtagctgctaaggcagaagaaaagaggttggagctattgtacattcagtggtctgagcatcacaaaaagctgtccagtttcttaaggttatttttattcctggtccaaaagtatccatattgacaattaaattgagggaagatgcgtttctgattgtacgcaaatcttgatgtttgatgtctacaggggtttccatatccactcattatactatatgtttgttccttgtttgattccatttgtatttgcaggacaaaagctgaaccagctatttattacatgccggctaaaccaatagttgatgatccggttattgttgagcaaaacaaggaaaaggtatttgaagaatggaaatctgtgcgcagaacggagctgacccagtttcaaaagcaagttgaggagcagtatctgtctaatgttgagagtcagctcgaaagaattcagaatgcccggaatgctcggagggggaacgtgcctgctaacatgcaggaaatggacaaggagttggacacgcacagggcggagcatggcccaaaggctcggaggatacccgacggtggcaatgacgaggatgatgatgtggatgtggacgacatggccgcggaagacgacctgatggatgaagtgctcggcgttaatgaggcgatcaatgaggacccgaccaagccatctgaagaggctactgatgttgctcctgtaccgcaggaggcacaataggcaaggttatttgcgaggtaggcacttcggcattacgattcttctatatcgttgtagttgccctcttctgctgtgactgtattgttgttgggtttttgtctttgggaatgctgtgagctgtgtttgctgttgaggccatatacatacttttcactattgttattgtcatttgc

SEQ ID NO: 2998 - DNA, 893 bp, Triticum aestivum
cgagtagctgctaagggcagaagaaaagaggttggagctattgtacattcagtggtctgagcatcacaaaaagctgtccagtttcttaaggttatttttattcctggtccaaaagtatccatattgacaattaaattgagggaagatgcgtttctgattgtacgcaaatcttgatgtttgatgtctataggggtttccatatccactcattatactatatatgtttgtttcttgtttgattccatttgtatttgcaggacaaaagctgaaccagctatttattacatgccggctaaaccaatagttgatgatccggttattgttgagcaaaacaaggaaaaggtatttgaagaatggaaatctgtacgcagaacggagctgacccagttccaaaagcaagttgaggagcagtatctgtctaatgttgagaggcagctggaaaggattcagaatgcccggaatgctcggagggggaacgtgcctgctaacatgcaggaaatggacaaggagcttgacacgcacagggcggagcatggcccaaaggctcggcggatccccgacggtggcaatgacgaggatgatgatgtggacgtggacgacatggccgcggaagacgacctgatggatgaagtgctcggcgtcaatgaggcgatcaacgaggacccaggcaagccgtctgaggaggccactgatgttgcgcctgtacccgagcaggcacaataggcaaggttatttgcgaggtaggcactcaggcattacgattctatatcgttgtagttgccctcttctgctgtgactgtattgttgttgggtttttgtctttgggaatgctgtgagctgtgtttgctgttgaggccatatacatacttttcattattgttattgtcatttgt

SEQ ID NO: 2999 - DNA, 636 bp, Triticum aestivum
ccacgtccacaactacgagcgcacatgcccgctctaccagagcccagtgcgtcaacaatgagaagagccactactcgggcaccatgaacgggaccatcttcgtcgttggccggccggcggcggcagccacctgtcggagtacaccaccgcgatccccaagtggagcatattcagggatcacgactacgggttcaccaagctgacggccttcaaccactcatcgcttttgttcgagtacatgaagagcagcgatggcaaggtgtatgactccttcaccatccacagggactaccgcgacgtgctcagctgcgtgcacgacagttgcttccccaccacgctcgctagctgatggtccggccgtcatggagggtcgtgcaataaaattggtaagcagcacaatttatatgtgctaataaacaaatctcgtgggcgtgagtacctggtgtccaaccgtcatggggtgtcaaccaataaaattggtcagctgcactgtttatacgtgctaataaaaagatcttgtgggtatgagttggtgttagatgtgcgcatactaatcatacaagaggcaggtgtatgctaattatgctttgtaactccttgttgttatattatggattagtaaaagcatcacttata

SEQ ID NO: 3000 - DNA, 806 bp, Triticum aestivum
agtacaagttcatcgaggaatgcctctccacggtggaccaagcaccagccgtggctcatcttcacggcgcacagggtgctcggctactcctccaactcgtggtacgccgaccagggctccttcgaggagccagagggccgggagagcctgcagaaactgtggcagaagtaccgcgtcgacattgcctacttcggccacgtccacaactacgagcgtacatgcccactctaccagagccagtgcgtcaacaacgagaagagccactactcgggcaccatgaacgggaccatcttcgtcgtggccggcggcggcggtagccacctgtcggagtacaccacggcgatccccaagtggagcatattcagggatcacgactacgggttcaccaagctgacggccttcaaccactcgtcgcttttgtttgagtacatgaagagcagcgatggcaaggtctacgactccttcaccatccacagggactaccgtgacgtgctcagctgcgtgcacgacagttgcttccccaccacactcgctagctgatggtctggccgttcatggagggtcatgcaataaaattggtaagccgcacaatttatatgtactaataaacaaatctcgtgggcgtgagtacctggtgtccaaccgtcatggagtatcgagcaataaaattggtcagctgcactatttatacgtgctaataaaaagatctcgtgggtatgagttggtgttagatgtgcgcatactaatcatacaagaggcaggtgtatgctaattatgctttgtaactccttgatattatattatgg

SEQ ID NO: 3001 - DNA, 1019 bp, Triticum aestivum
cgccttctgcccatcagtttgatggtagtcgttcagcacactgtttctcccgggtcacagctgcaggattccattctcatcttcctcgctgtgcctggtgcgcctccatggccgatgagtgtgctgggcactgattccatcgcctcggtcaagctgcgcatccagaggttcaagggctttgtggtgacaaagcagcggcttgtgctcgacgggcatgagctggcgcgcaacaactgccctgtcaaggattatgggcttgccgatgggaatgttctgcaccttgttatccgcttggctgacctccgggtgatcaacattgagaccgccagtgggaagaaatttcagtttcaggtggaccagacccgtaatgtcaagtacctcaagagcaagcttgcagtggagggtgatgaggaccttgatagcctggaggatgatgacaagctcgagtacgatggagaggtgcttgaggaccaccagttgattgctgatattagcaacaaggatgatgctgtgattcatttgttcatccgcaaaccagcaaaggtacgaacacagcaagttgataaggatactgtggtcacagttgacaaccctcagaagaaagagaaccttcagaatgaatctgttgtggtgacccctgcaaaaccagctggtggcaagcctgctcctatcgaaccaattgtggttaaccggaaggcgaagctgtcatctgaagtgatgaaaatgattgactcagcaatagctggtcttgagaatggatatacaccagttatgtcagcagaaggttcagggggtgtttacttcatgcaagattcatcaggccagaagaatgttgcagtgtttaagccgattgatgaggaacctatggctgaaaacaacccaaggggtcatccactgtcgactgatggggaaggcctgaagaggggcacacgtgtaggggaaggtgcctaaggggagttgcggattatattctcgaacattcagttggcgatcgtgaatcgggcccggcgttggggttc

SEQ ID NO: 3002 - DNA, 544 bp, Triticum aestivum
atgctcatgacggcgacatcgtccttcgagtacgcgatcctcctcatcatcgctctctgcttccactccatcttcgaggggatcgccatcggcgtttcagcgacgaagggagaggcgtggaggaacctttggacgatcgggctccacaagatcttcgcggcggtggccatgggcatcgcgctcctccggatgatccccaaacgcccattcctcctgacggtgctctactcgctagcgttcgccgtgtcaagcccggtaggggtgggcatcggcatcgccattgatgccacggcggagggctcggattggacatatgctatctccatgggcatcaccacgggggtcttcgtctacattgccatcaaccacctcatggccaaggggtaccgcccgcagcagccaaactacttcgacaagcccatcttcaagttcctgagtgtgctcaccggcatatccgtaatgtgtgtcgtcatgatatgggactgatttatccgtcggttaaatcaagagggtgtttaagtgctttgatttgattgctcgcatg

SEQ ID NO: 3003 - DNA, 1534 bp, Triticum aestivum
  N_region (71)..(97): n = any nucleotide
tgaaatccatccatcacgcccttggccttggcagccgcagcagacgactcgcctactctgcgcctgcctgnnnnnnnnnnnnnnnnnnnnnnnnnnngagccgccgacgaattgggaacaaggatcacgccaggtatcgactgactgccggatcactgtaacaagatgagcgacaatctcatggacaaagttaacgccctgggcgagcgcctcaagatcagcggcgcggaagtcagccgcaagatgtccaccggcgtcactagcatgagtttcaagatgaaggagttcttccaaggccagaacatggccgacaagattgttgacgaggccaccttggagaccatggacggccctgattgggctaccaatcttgagatatgcgatatggccaacaccgagagggtcaacagcgtcgagctcatccgcgccatcaagaggcgaatcatgctcaagagcccgagggtgcagtatctggctcttgtcctcctcgagaccattgtcaaaaactgcgagaaggccttctccgagattgctgcggagcgggtccttgatgaaatggtgaagcttattgatgacccacagactatagtcaacaacagaaacaaggcgctcatgcttattgaagcatggggagagtcaggagaggaactccgctaccttcccgtgtatgaagaaacttacaagagcttaagatctaggggaattcgcttccctggccgcgatgatgagagccttgcgccaatatttactcctccccgttcagtacctgcagctgaaccatattctgatgcagcacaggacgggtaccaagaaattccagatgaaagttttgctccagttcgtgctgccccttctgtacaagtcgacgatgcttttgaggtggctcgtaatagcgttgaacttctttccacagtgctatcatcatctccacaaaaagaggctctagaggatgacttgactaccaccctggtccagcaatgccaacagtgtcaatacacaatccagagaatcgtcgagactgcaggtgataacgaggctcaactctttgaggcactgagcatccacgatgaactccagaaagttctgtccaagtacgaagacctcaaggaacccatcgtcgcagagcctgagccagaaccagcaatgattccagtcacggtggagcctgaggaatccccacgcgctgttggcaaagacacccccgcgaggaaatcagctgggtccggtggccgctctagcggcggggatgacttgcttcaggatctcgacgacatgatcttcggtaagaaagccggcacctcctcccagcaggaaagaactccccggaaggagcagaaggacgacttcatcggcttatgatcaacgggtatatatatctgtccggctgaaacttgtcataaaggtgttgcgtgctcagtgcatttccaaactatgatacaggtttgtgcttgcgcgtctatcttctcctgtatcccggggattgctgtacagtggtagatgtctgacgtggcagtgagtttcatgtggcactcct

SEQ ID NO: 3004 - DNA, 1080 bp, Triticum aestivum
cctccgcacgcccgcacggcccccggcccgacctactcccgcgcgacgacttcgtgcgctacctcgacgactacgccgcccgcttcggcgtccgcgtgcggctccgccgcgaggtccgcgaggcccgcttcgacgaggcgcggggcgcgtggctcgtcgaggccgtcgaccacgccacggggctggtggagcgctacgccgcgaggcacctggtgaccgccgccggggagaacgacgagaaggtgctgccggaggtgccggggctggacggctttcccgggaaggtgatgcacgcctgcgagtaccggacgggcaaggggatggaggggaaggcggtgctcgtcgtcgggtccggcaactccggcatggagatcgcctacgacctcgccgaggccggcgccgccacctccatcatcgtccgcagcgagcttcaccttgtgaccaaggagatctggaacgtggcgatgacgctatacaggtacctgccgctgtggctgatcgaccggatcgtgctcttcatgtgcagcgtcgtgttcggggacacctcccgctacggcctccgccggcccgtccattgggcccttctccatgaagatccacaccccagcctaccctgtcgtcgacgtcggcacctacgccaagatcaagaccggcgagatccaggtcctgccggcgatgaaggctgtgcacgggaacgtcgtggagttcgccgacggcaagcggcacccgttcgatgccatcgtcttcgccaccggctaccggagcacaaccaagaagtggctcaagagtgacgatgggctgatcggcgaggacgggatggcgcggcggagcttcccggagcactggaagggggagaacggcctctactgcgcggggatggtgaggaggggcctctacgggagctgcgaggacgccgagtccatagccgaggacatcagcaagaagaagaagaagccacaccaagcctgaccatgatcatcgtcagaagagcaataataccttctggagtcgcacagcgatcgttgggcgagaaacaatgggtgtgttgtgattaatatctcgaaacttaaataatctgga

SEQ ID NO: 3005 - DNA, 1220 bp, Triticum aestivum
gcgcgacgacttcgtgcgctacctcgacgactacgcggcccgcttcggcgtccgcgtccggctccgccgcgaggtccgcgaggcccgcttcgacgaggcgcggggcgcgtgggtcgtcgaggccgtcgaccacgccaccgggctggtggagcgctacgccgcgaggtacctggtggccgccgctggggagaacgacgagaaggtgctgccggaggtgccggggctggacggcttccccgggaatgtgatgcacgcctgcgagtaccggacgggcaaggggatggaggggaaggcggtgctcgtcgtcgggtccggcaactccggcatggagatcgcctacgacctcgccgaggccggcgccgccacctccatcatcatccgcagcgagctccaccttgtgaccaaggagatctggaacgtggcgatgacgctatacaggtacctgccgctgtggctgattgacaggatcgtgctgctcatgtgcagcgtcgtgttcggggacacctcccgctacggcctccgccggcccgccattgggcccttctccatgaagatccacaccccagcctaccctgtcgttgacgtcggcacctatgccaagatcaagaccggcgagatccaggtcctgccggcgatgaaggctgtgcatgggaacgtcgtggagtttgcagacggcaagcggcacccgttcgatgccatcgtcttcgccaccggctaccggagcacaaccaagaagtggctcaagagcgacgatgggctgataggcgaggacgggatggcgcggcggagcttcccggagcactggaagggggagaacggcctctactgcgcggggatggtgaggaggggcctctacgggagctgtgaggacgccgagtccatagccgaggacatcagcaagaagaagaagccagatcaagcctgagcatgatcatcgtgagaagagcaataataccttctggagccgcacagcgatagttgggcgagaaacaatgggtgtgttgtgattatatctcaagacttaaataatctggaaaactagccgtagcttatctgcgattaccggggaaactattatctgttcgttgccttgtctgtgcacagtccggccggccgggaccagaccaggttaataatttccagatgcgatctgcagatcgatccatgcgcgactcgcacttactgtagcactgttattctttttgcgggttgactatgta

SEQ ID NO: 3006 - DNA, 631 bp, Triticum aestivum
ccgccaggtccggagtcacctgctgcttgagattcccaggtcaactcaacgctgacttgagaaagctcgccaccaacttggttcctttcccaagactccacttcttcatggttggtttcgctcctttgacctccagaggatcccagcaatacagagctctgactgtccctgagctcacccaacagatgttcgacgccaagaacatgatgtgcgcttctgacccaagacacggcagatacctcactgcctccgccatgttcagaggaagaatgtccaccaaggaagtcgacgagcagatgctcaacgtccagaacaagaacagctcatacttcgtcgagtggattccaaacaacatcaagagctccatttgtgatatccctccaagaggactgaagatgtctgtcaccttcatcggaaactccactgccatccaggagatgttcaagagagtcgccgagcagttcaccgccatgttcagaagaaaggctttcctccactggtacaccaccgaaggtatggacgagatggagttcaccgaggctgagtccaacatgaacgacttggtgtctgagtaccagcaataccaggaggctacctaccgaggacgagaaacgaggtgccgacgaataag

SEQ ID NO: 3007 - DNA, 878 bp, Triticum aestivum
ggttcagtggcaatgatgacttgatgaagagagagccagtaggaggaacagggaagttcatcacaaatgtgatgtggaggaacatttttgggcaatctctataccaatttgttggtgatgtggtatctccagacgcaaggaaaaaccttttttgggcttggagggctctgatgctgatatagtgctgaatacaattattttcaacctcattcgtcttctgccaggtgttcatgagataaagttcgagggagatggagaagctcaatgtgctcaagggcatgctgaagaactatgtcttcatgtgtgtcctcagcagcaccgttgtcttccagttcatcatggtccaattcctcggcgagtttgccaacacgacgcctctcaccagtctccagtggctagccagcgtgctccttggcctcgtcgggatgccgatcgccgttgtcgtcaagctcattcctgttgggtcctcctgatgaaaagggcaacccaccatgtgaaggaggtgtggcgaaaagaccgattccataatgtgtggacctgaatcctccatgcagggtcttttgggatgcatggagagcaagcctgagaagagctgcactagacaagttttaaagcctacgagtgtggcagatttgcatcatattgttgtgtaagaagcatttgtatctggtgctgtgctagggcttagggcctgctcgtcagcagacctgtaagattgatgtctggctgggattcagacctgaaaggatgtatattctgtggatcgataaacagaaacctgatcatttcgacccctttattccgtatcggcatatgaccgagactttccaggaatggggtgcatgtagtccagacagactagtgccttatgttggatt

SEQ ID NO: 3008 - DNA, 808 bp, Triticum aestivum
gcatcgctcatccctccgtcaagacgcgtcaatctggcgacctcgaccccccatggctgtgtactacagccaactctggctgaccaacttccgatgcgccccaggtgttcgtgatttgctctggaaccgcagtgcgttcgtcgatttcgtggcgccaagcttcatcacgctgatgaggtaacaatcatgattgatgacaaacctcagcagacatgattccatggtggcagtgaatgctgtcccctgtctggccgaaaccgctgctggcttcgataaacacaccatcatcagttattccaacagtctcaataagagactgctttgggggatccttggtgggtataaatacggagctcaatgggttgtctgacatccctttacccacgtgttcgttgtgaagaactatagaaatgttatgcttcttaagttcactccttggtccaatgccgctgatcaacaacagctgggggcttccaattgcgccggcagagacaataatctcactgcctctcttttggctaagaaaggcttgatgctgcccaccattctcatccttgaattgaaccccaatagcactctgtttctgatgtcctgtgcaagagatgaggttactataacaaaatgattgtgcagcaaccagcaagtacctactgtttttgtttgaagtatgtgttttcctagcttccttcttgtggaagtgagtgaattgcaaaaaacatcgacattgaaggctagggttgcaggaaccacagttctacagttttgtgccaaaaatcactaattccgagtctaattttttgcaaaaaac

SEQ ID NO: 3009 - DNA, 1098 bp, Triticum aestivum
ggaggcggcgaaggcaggacgaacggcttgcactggaacgccgcacagttgacgggcgggtgggcatagaaggcggcgcactgctgccgcgtccgctgagcggggcgattcggcaggcagttgtcccggtcgctgccccgaggcacgacgcgcgcgcacgccggcggctccccggtgaagaagttgtatgagaaggtgaaattcttgagccgcggcagagcacacacggcctgtggtatcggcccggagagcaggttgtgcgcgacgttgagctgctccagcttcctcagccccgccacctcctgcgtgagcgggccggcgagctggttgtggctgacatcgagcaccgtgagctcccgcaggcggccgagctccggcggcaggcatgactcgaggccgttgttgatgagcaagatctcgttgagcgtgccggacatgttggcgaggctggcggggaggcatccgccgaaggtgttgtgcgagaggacgaggacggagaccggcgagttgccgatgttgtccggaatctcgaagcggaagcggttgtggttgaagaagatggcgtcgagcggcttgtcgaagaggcggctgggcacgccgccctcgaactcattgaaccggaggtcgaggaaccggagcgccggcatgtcgagcacgacctcggggaagggcccgacgaagcggttgttgctgaggtcgagctcgtggaggaggctgaggcggcggagcgtgcccgggatcatgccgcagaagcggttggagttgaggtgcagcagcgcgaggtcggcgagcaggccgagctccggcgggaggtatcccgcgatgtcgccgtggttgaggtcgacgccggcgacggcgagcacgcgcgggtcggacggcagcggcgcgcagaagacgcccgtgtagttgcagacgtccgggccggcccagtcggcggtgaggttcttcgggtcggagaagatggcgtggcgcttccaggtctgcagcgccacgtaggcatcctcgatgcggcggctcgggaaccgccacgacggatccacctccaccgccgccgccgtgccggccccctcgccccctccgtcgccggagaagcccggc

SEQ ID NO: 3010 - DNA, 788 bp, Triticum aestivum
gtttgagcctccttccagtaaagaaacagacggcagcactactgaggacataggtcataaaaagatggctgatctctcctcccacttcagtcggctgttacaatcctgtggagaacttgagagctattcagcgttcaccgaatacctaaaaggcctatctccgtcatctttagatatggaactacggatgctacagataatagatgacgacgaggtggaagagtctgaggaaccaagacccgagctccagttcatctcattgctgctggactacttcattcatgagctttcctgcaggaacaacttcgagtttgttcaagctgttctgaaattgtttctgaagatacatggtgaaacaatacggcgccactcgacgctacaggagaaagtgaggaaacttctagacgtccagagcaaggtctggcagaagatcgacaaaatgtttcagagctcgcgatgcatggtcacattcctcagcaactcgcagttttagttgcaggtcccgatttctgaaatcatgcatacctgggagtccatgtggctgttgtacccttctgctgtacctcaccgtttcgtcgtcgtggtaaaagctgcaaggcatatatacggtgttgttaacagagatgaccacagattgtgctcctggtgatgatgtaacagttttgttcctgtattcttttgtaacatacagatgtatgagcactgttcagcgagaaatattcgggaatgtcgcagttgccagttaggcgaaacatcccctaaatgtttattcagcattttactttagt

SEQ ID NO: 3011 - DNA, 846 bp, Triticum aestivum
caaagggtggatctgttaggaatttcctgaataggaggcagaacaggtctgttccactgaagctggcagtgaagcaggcactagatgttgcacgtggcatggcttatgttcatggccttgggttcatccacagagatcttaagtcagataacctcttgatttctggtgataaatcgatcaagatcgctgacttcggagttgctaggattgaagtgaagaccgaggggatgacacctgaaacaggaacataccgttggatggctcctgagatgatccagcacagaccatacaatcagaaagttgatgtctacagttttggcattgtcctgtgggagctaataaccgggacccttccttttccaaacatgacagcagtgcaagctgcatttgctgtggtgaacaagggtgtccgcccagccataccccatgactgcctacctgcccttggggagatcatgacaaggtgctgggatgcaaaccccgatgtccgccccccttttaccgatgttgtgagaatgctggagcgtgtggagatggaggtcctgaaaaatgtccgcaaggccagattccgatgttgcatctcccaacccatgaccttagactaaagcaggcagaatccaggagaagagaaagcaatctggagagaagttaaatcccatgtatttatcatattaatacttttggtacagaagcggaaaagcccacctgagcatacgtgtgtgctcgggcttcacatatttatcttagaccataccatagtccctgtcgtcgtcttaaaactgtcattgtactggagacaggtttatccttaacattgtcagaacattgtcatgcggtttcctctgg

SEQ ID NO: 3012 - DNA, 641 bp, Triticum aestivum
ttgctgacttcggagttgctaggattgaagtgaagaccgaggggatgacacctgaaacaggaacataccgttggatggctcctgagatgatccagcacagaccatacaatcagaaagttgatgtctacagttttggcattgtcctgtgggagctaataagtgggacccttccttttccaaacatgacagcagtgcaagctgcatttgctgtggtgaacaagggtgtccgcccagccataccccatgactgcctacctgcccttggggagatcatgacaaggtgctgggatgcaaaccccaatgtccgccccccatttaccgatgttgtgagaatgctggagcgtgtggagatggaggtcctgaacaatgtccgcaaggccagattccggtgttgcatctcccaacccatgaccttagactaaagcaggcagaatccaggagaagagaaagcaatctggagagaagttaaatcccatgtatttatcatattaatacttttgatacagaagcagaaaagcccacctgagcatacgtgtgtgctcgggcttcacatatttatcttagaccataccatagtccctgtcgtcttaaaactgtcattgtactggagaaaggtttatccttaacattgtcagaacatc

SEQ ID NO: 3013 - DNA, 616 bp, Triticum aestivum
tgggcgtattcggattgggcaaagaatcactctggtgacccagagattgatgaagcttttaaagaagggagaagatgctggccttgccttggtgaagaaagcgtatgtgtacattcacaagaatgggtacaagacaaagttgatggccgctgccgtgcgcaacaagcaagacgtgtttagccttctggggatcgactacatcatcgcgcccctgaagatactgcagtccttggatgaatctgtgacctattccgatgaaaagtacggttatgtccagaggctgactccttcgcttgacaagatgtacaacttcagccaagaggagcttgtgaagtgggaccagctgagcctggctgcggcgatggggccagcggcggaggagctgcttgcttctgggctggaggggtacgcaaaccaggcgcggcgcgtggaggagctcttcgccaagatctggccaccccccaatgtttgaacttcaacttgaagccgtttcttctttcttaatatattttcgttccaacaaagggtgttttgtttgttcctgtcaacatgtttacttttgtccttggagtgtcagccggacttgaaatctgaatcgttttgtggaaatatgaat

SEQ ID NO: 3014 - DNA, 763 bp, Triticum aestivum
ggtattcaaatcctgctacatggcaagtatagaagcttcaagattactggaatctgaaggaacctcaacacatgtgaacattcgtttacagttttgcacacagcagcagctgcagcgcaagctggtgcatccgtcgtacaaatatttgtggggcgtattcgggattgggcaaagaatcactctggtgacccagagatcgatgaagctttaaagaagggagaagatgctgggcttgccttggtgaagaaagcgtatgtgtacattcacaagaatgggtacaagacaaagttgatggccgctgccgtgcgcaacaagcaagacgtgtttagccttctggggatcgactacatcatagcgcccctgaagatactgcagtccttggatgaatctgtgaccgattccgatgaaaagtacggttatgtccagaggctgactctttcgcttgacaagatgtacaacttcagccaagaggagcttgtgaagtgggaccagctgagcctggcggcggcgatggggccagcggcggaggagctgcttgcttctgggctggaggggtacgcgaaccaggcgcggcgcgtggaggagctcttcgccaagatctggccaccccccaatgtttgaacttcaatttgaagccgtttcttcttccttaatattttcgttccaagaaagggtgttttgtttgttcctgtcaacatatttacttttgtccttggaatggctgccggacttgaaatctgaatcgttttgtggaaatatgaat

SEQ ID NO: 3015 - DNA, 1353 bp, Triticum aestivum
cttcccccgatcccagctccacccatggcgctctccatttccgcacccacctcgtctcccttcctccccgccccccgccaggccggcaggtggagctcgtcaccaagctcggctaagcccgcggtttttagcctccggaggccggttgtggcggcacgggccgccgccggcaacgcgccctcttcccccgcaggcgcggtcgtaactgagctcgacgtggtctccagcttcagcgagatcgtgccggacacagtcgtgttcgatgattttgagaagtttgcaccaacggcggtcaccgtgagctcttcactgttgcttgggatcgcagggctaccggatacccagttcaagagtgccatagataccgcattggtagatggtgaatgtaacacaatggagaagcccggggaccggatgtcctgttaccttaccaaggccctggcggaatgttggagctgagctggctcatcaagttcctggaagagtgtccacggaaatagatgctcgattggcttacgatacccaaggaatcgtccagagggtgcatgaactgttgcagatatacaatgaacatgatatcccatcagaacgtctgttattcaaaattcctgctacatggcaaggtatagaagcgtcaagattacttgaatctgaaggaactcaaacacatctaacattcgtttacagttttgcacaagcagcagctgcagcgcaagctggtgcatcagtcgtacaaatatttgtggggcgtattcgggattgggcaaagaatcactctggtgacccagagattgatgaagctttaaagaagggagaagatgctgggcttgccttggtgaagaaagcgtatgtgtacattcacaagaatgggtacaagacaaagttgatggccgctgccgtgcgcaacaagcaagacgtgtttagccttctggggatcgactacatcatcgcgcccctgaagatactgcagtccttggatgaatctgtgaccgattccgatgaaaagtacggttatgtccagaggctgactccttcgcttgacaagatgtacaacttcagccaagaggagcttgtgaaatgggaccagctgagcctggcggcggcgatggggccagcggcggaggagctgcttgcttctgggctggaagggtacgcgaaccaggcgcggcgcgtggaggagctcttcgtcaagatctggccaccccccaatgtttgaacttcaatttgaagccgtttcttctttcttggtattttcgttccaacaaagggtgttttgtgtgtcaacatgtttacttttgtccttggaatgtctgccggacttgaaatctgaatcgtttgtggaaatatgaaggc

SEQ ID NO: 3016 - DNA, 469 bp, Triticum aestivum
  N_region (15)..(15): n = any nucleotide
caaagttcccagatngtcgcgccaaatgcgagccatgatgacaacagtctggacttacttttagttggcggaagggggagatggaagctgttgagatttttcatactactgcaatttggtcgccatctttctttgccatatgtggaatatgtgaaggtgaaatcagtcaaggttaaacctggtgcaaacacccacaatggctgtgggatagacggcgagctctgccgcgtcaaggggcaggtagtctgctccatgctaccggagcagtgcaggcttattggccggcaatgtaaacagtctatttaagcgccatgaatctgccgagcttcacgagtttttgaggcgctgtatgatctgttgtcacttgtaacagttgatttttgagttgtctatattatcgtttacttgccagtgagggtgcgagtgactggtcggtctgacaatgttgtgacggttctgtatatttgag

SEQ ID NO: 3017 - DNA, 905 bp, Triticum aestivum
caacattgtttcgtaaccagaagaagtcctacgccctcaacagcatcatgcatcatactggccaagaacgaggtccaaaacaaggaccgatagaaattcagttggtgtcacagcttctaatgatacacggttatcttgggcagccccttcaatgcatgataaggaggacatttcctcgacaatatcagatccaggacctatttgggataatgaaccaaagtgggacactgggccaagatgggacacagagccaacttgggagcctgaccatcctatcgaacttcctgaaccaccagaagatatagaaatcggaacatctatggaacttgtgccaaatttggatgagaaatgggttgtcaggaaggggcactttcttggtgtcctagtatgtaaccactcgtgcaaaacagttcaaagttcccagattgtcgcgccaaatgcgagccatgatgacaacagtctggacttacttttagttggcggaagggggagatggaagctgttgagatttttcatactactgcaatttggtcgccatctttctttaccgtatgtggaatatgtgaaggtgaaatctgttaaggttaaacctggtgcaaacacccacaatggctgtgggatagatggtgagctctgccgcgtcaaggggcaggtagtatgttccatgctaccggagcagtgcaggcttattggccggcaatgtaaacagtctatttaagcaccacaagtctgccgagcttcacgagtttttgaggcgctgtatgatctgttgtcacttgtaacagttgattttgagttgtctatattatcgtgtacttgccaatgagggtgggagtgactggtcgatcagacaatgttgtgacgtttctgtatatttgagtgattatagagggacgcctccatcc

SEQ ID NO: 3018 - DNA, 623 bp, Triticum aestivum
tatcgaacttcctgaaccaccagaagatatagaaatcggaacatctatggaacttgtgccgaatttggatgagaaatgggttgtcaggaaggggcactttcttggtgtcctagtatgtaaccactcatgcaaaacagttcaaagttcccagattgtcgcgccaaatgcgagccatgatgacaacagtctggacttacttttagttggcggaagggggagatggaagctgttgagatttttcatactactgcaatttggtcgccacctttctttaccatatgtggaatatgtgaaggtgaaatcagtcaaggttaaacctggtgcaaacacccacaatggctgtgggatagacggggagctctgccgcgtcaaggggcaggtagtctgctccatgctaccggagcagtgcaggcttattggccggcaatgtaaacagcctatttaagcaccacaagtctgctgagcttcacgagtttttgaggcgctgtatgatctgttgtcacttgtaacagttgattttgagttgtctatattatcgtttacttgccaatgagggtgcgggtgactggtcggtcagacaatgttgtgacggttctgtatatttgagtgattatagaggggat

SEQ ID NO: 3019 - DNA, 918 bp, Triticum aestivum
gttctagatcgcggcggcggcaatacattgcagaggatgggagtcggtctacaacaatcctaaaaaaccagcgtttatgggttgttaggtccaacgacactggctcagacaatatggcaacataagcgatggagcgagggtaacttatcaattttcctttccaagtacaacgtgttcttgtttgggcatggaaaaaccaagctacggcatcagatgggctaccatatctatggactatgggcacccaactcactcgctacgctgtattatgttatcatcccttcactggccctcctcaaaggcaccccccttttcccagagattacaagtccatggattgcacccttcgtatatgtcttctgtgtgaagaacatgtacagcctatatgaggcactatcatctggagacacgctgaaaggatggtggaatgggcagaggatgtggttggtcaaaagaataacctcgtacctctttggagtccttgacaatctccggaagttatttggactgtcaaagatgaattttgtggtttcaccgaaggtaagcgatgaagacgagtccaagaggtatgagcaagagattatggaattcgggtcatcagatccagaatatgtgatcatcgggactatcacgttactcaaccttgtttgcctgctgggagggctaagtaaagtcatgaaagttggatggaataatatacacttggatgcacttttcccccagctcattctctgtgggatggtggtgataaccagtatcccattctatgaagcaatgttcctgaggaaggacaaaggcagaataccattcccagttacactagcttctattggctttgtgatgttggctttactgccagcaatagtttaaggtcccacaagaggcatcagtgtgtaattaagtactcaaagttgtatg

SEQ ID NO: 3020 - DNA, 933 bp, Triticum aestivum
attttgggcggcgtatctgggagtcggggaaggcttactattgtgttacgaagggaattccttatccatctttgcccaagaaggaaaaaccgaggcgtgtggaattgtacttctcgagttggcgtattagacctgttcaatcgcccaaaaaagacggccagcaacccatggcatgtgaagtaactctgtttcactacgaggatatgggcatacccaaggatgttgctaaagttggtgtccggcacggcatgtggggtgctgttaaaaagctgcagtccggctttagagcatatcagctaatgagaaaatcagaaaacatcctgtcacgcagtgccatcatggctcgtgtgaccaccaagacatgcattgctagttctgatggctccttggatcaagggcccttcagcacagaacaagccagtacagaggacgacaactctaggtcagtccaacatggttttgactggaagtgggtggtggtcggtggcgcggtggctgccgtctgcgtgcttaacaccggaattgtagggaaggccctcttacttggagctgcaagaaagcaggcaaagaagtgatgagcatctaccagcatccacaaagtgagcttcacggccatcagggcctgtctctgtctagaaagtcgcaatcgagaccgaggataaaggaatgaaatatcatactacaggatgcagataattcgggtgcctaattttggatgtgccttttaagcagtatcgcagatgtgtcttgccataaccgattatgtggtatcaggaatcgttagatgacgatgtatctgaagatatatgagttctgttaacaacatttgctaactaacaagtcccaagtttgcacttttcagctttgtacgttccattgggtttttcccgatgtttgctgacgattacctcgtgtggtgctgaattgaagtgc

SEQ ID NO: 3021 - DNA, 950 bp, Triticum aestivum
ggagtcggggaaggcttactattgtgttacgaagggaattccttatccatctttgcccaagaaggaaaaaccgaggcgtgtggaattgtacttctcgagttggcgtattagacctgttcaatcgcccaaaaaagatggccagcaacacatggcatgtgaagtaacactgtttcactacgaggatatgggcatacccaaggatgttgctaaagttggtgtccgccacggcatgtggggtgctgttaaaaagctgcagtccggctttagagcatatcagctaatgagaaaatcagaaaacatcctgtcacgcagtgccatcatggctcgggtgaccaccaagacatgcattgctggttctgatggctccttggatcaagggcccttcagcacagaacaagccagtacagaggacgacaactccagggcagtccaacatggtttcgactggaagtgggtggtggtcggtggcgcggtggctgccgtttgcgtgcttaacaccggaattgtagggaaggccctcttacttggagctgcaagaaggcaggcaaagaagtgatgagcatctaccagcatccacaaagtgagcttcacgaccatcagggcctgtctctgtctagaaagtcgcaatcgagaccgaggataaaggaatgaaatccataccatactacaggatgcagataattcgggtgcctaattttggattgtgccttttaagcagtatatcgcaaatgtgtcttgctataaccgattatgtggtatcaggaatcgttagatgacgatgtatctcaagatgtgagttctgttaacaacatttgctaacttccaagttccaagagtgcacttttcagctttgtacgttccattgggtttttcctgatgtttgctgacgattatcttgtgcggtgctgaattgaagtgcatattgactgcggaagaacctgtatgaagct

SEQ ID NO: 3022 - DNA, 828 bp, Triticum aestivum
ctaaagccggatatattggcaccaggcctcaacatcctcgccgcgtggccgccaagcacgggctctggaaggggcactttcaacatcatatcaggaacatccatggcgacgccacacgtcagtggtgtcgctgcgcttatcaaaagcatccatcctgactggtcgccagccgccatcaaatctgccatcctaacgacgtcggacatcgttaatagcactggtggctcaatcttggacgagcaacataggaaggccggcgtgtatgacacaggcgccggccatgtgaacccgaccagagccgcagatcctggcttggtgtacgacctcagcgtcaccgactacgccggctacatctgctggctcctcggtgacagcggcctagcaaccatcgtgcgcaactcaagcttgacctgtgcgaagctgcccaaggtccatgctgtgcagcttaactacccgacgataaccgtgtcagcgacatcgacgccattcacagtgaagcggactgtgacgaacgttgggccagcaaactcgacgttcacggcgaaggtggacgcgccaagatcactgacagtgcgtgtctccccggagacgctgggattctccaaaaccggagagaagaagaccttcagcgtgtccgtgagcagccacggcttgggcgaggaactgcacttggagggaagcttgagctgggtatcggagaagcatgtcgtgcggagccccatcgttgctgtctccccaagaggcgatactgctccggacccatcaccatgaatgatgtacgtgccgtgaaatcagtaaatgtttactttgtcaacatcaataataaat

SEQ ID NO: 3023 - DNA, 849 bp, Triticum aestivum
  N_region (814)..(814): n = any nucleotide
tctcttcccgtggtccaagcgtcgtcgccctcggcatcctaaagccggatatattggcaccaggcctcaatatcctggccgcgtggccgccaagcacgagctctggaaggggccctttcaacatcatatcaggaacatccatggcgacgccacacgtcagtggtgtcgctgcacttatcgaaagcatccatcctgactggtcgccagccgccatcaagtctgccatcctaacgacgtcggacatcgttaatagcactggtggctcaatcttggacgagcaacataggaaggccggcgtgtacgacacaggcgccggccatgtgaacccgaccagagccgcagatcctggcttggtgtacgacctcagtgtcactgactacgccggctacatctgctggctcctaggtgacagcggcctagcaaccatcgtgcgcaactcaagcttgacctgtgcaaagctgcccaaggtccacgccgtgcagcttaactacccgacgataaccgtgtcagcgacatcgacgccattcacagtaaagcggactgtgacaaacgttgggccagcaaactcgacattcacagtgaaggtggacgcgccaagatcactgacagtgcgtgtctccccggagacgctggcattctccaaaaccggagagaagaagaccttcagcgtgtccgtgagcagccacggcttgagcgaggaactgcacgtggagggaagcttgagctgggtatcggagaagcatgtcgtgcggagccccattgttgctgtctccccaagaggcgatactgctccagacccatcaccatgaatgangtaattagtagatgtttactttgtcaacataataa

SEQ ID NO: 3024 - DNA, 499 bp, Triticum aestivum
gcagaggtactatgtgatagactcagtatttttgttgatggtggtttccaatgcattggaaatccgaaagagctaaaagcaagatatgggggtacctatgtgctcacaatcacaacatctccggaacatgagcaggaggttgaacaactggttcaccgtttatcgccaaatgcaaacaggatatatcacatatctggaacacagaaatttgagctgccaaagcaggaggtgaagatagcaagcgtcttccatgaagttgagagtgcaaaatgccgttttagcatacacgcttgggggctcgctgacaccaccttggaagatgtcttcatcaaggttgcccagggagcacaagcctttagtgtgaatgcttaactagtatatctgattaataggttattgttctttccatttgtgataaatatatggtgtataattcttgtttgaactcgctgtaacttttgtttattataatactgagttgtaaattagtgttgtaaag

SEQ ID NO: 3025 - DNA, 721 bp, Triticum aestivum
  N_region (180)..(201): n = any nucleotide
ctcgtcatcgcgctggtctccggggcgatggtcctcatgctgcagcaagacgagcagcggaacagcgcgccgctgccgccgtactacgacgcgcctgtcgccagcggcggcatcgcccccaagccggccgtgacagccgcgcctcgcacctcaggggtggcgatggaaacaggcgggtcnnnnnnnnnnnnnnnnnnnnnncagggctcggcacgtggtggtgccggcggcaagcggatggacgagttcgtcctgatgagcaagtcgagcggcgagttcgggctgcaggacatgatgaaggcttcggcggaggtgctcggcaacggcacactcgggtccgcgtacaaggccgccatgcgaaacggcatcaccgtggccgtgaagcgcatgcgcgacatgaaccgcgtcggccgccaggagttcgagaaccacctccgcgtgctcggagagctccgccaccccaacgtgctggctcccctcggctaccattaccgcaaggaggagaagctcatcgtctctgagctcatgccacgcggcagcctcctctacgtcctccacggtaagaccgtaattacgatccaatatgattactacggccgtcggtgcaggtagtcggtacaccatgcatagtcgtcgtaggagctaactttgtgcctatgtttgatgagcaatcatcgcaacattgtcaaaaccgacaacaaagtagagggagatgaggtgg

SEQ ID NO: 3026 - DNA, 941 bp, Triticum aestivum
gaacaaaaggcctcctcagatatacttcaagaggaagaagactggtgggatttctttcaacagcacagcacctttaactcatattgatgagaagctctgctatcagatactgcatgagtacaaaattcataatgcagaggtattattccgtgaggattctactgtggatgatctgattgatgtgattgaaggaaatcggaagtacatcaagtgtgtttatgtatataataagattgatgttgtgggtattgatgatgtggataatcttgctcggcaaccaaattcacttgttatcagctgcaatttgcagttgaacttggacaggctattagcaagaatgtgggaggaaatgggtctggtgagagtgtatacaaagccgcagggtcagcagcccgatttcggagatccagtggttctttctagtgataggggtggttgcacagttgaagacttctgcaatcacatccacaggagcttactcaaggatgtgaaatatgtgctcgtgtggggaacgagtgctcggcactatccacagcattgtggtcttggccatggtcttgaagacgaggatgtggtccagatagtaaagaagaaggaaaaagaggagggcggacgaggccgtttcaagtcgcacaccaatgcacctgaccgaatctccgacagggtgaagaaagctcctctcaagacatgatcccatcgccgatgtggaactagctgagccggatgctattttgggcgaccatcaagcctggcatctccgcacaatcatatgacaaagtgttgcttttttccagatagtatatgtgctctcattctgtataagatgaggcaggcttgtgtacacgcagtgagtgtttttgccagcaaactttgcaaatgagttagttacagatgccacctcttgttatcgtactgtgtttggaacattaattaattaatgg

SEQ ID NO: 3027 - DNA, 983 bp, Triticum aestivum
gtacaggtaacatcaaattccctcttcgtagtctggaggcgggagattcggaagccatggcggaggagcagttcctggccgcagctgtgggcgccgccaagagcgccggcgagattatccgcaagagcttttacctaagcaagaaagtggagcacaagggccaggtggatttggtgacggagacggacaaggcctgcgaggatctcatcttcaaccacctccggatgctctatccggaccacaagttcatcggcgaggagacgtctgcagccctcggttccaccgatgacctcacctacgaccccacctggatagtcgaccccctcgatggcaccaccaatttcgttcatggctttccttttgtgtgcgtctcgattggcctcaccattggggaagattcccaccgttgcagttgtgtacaaccccatcatgaatgagcttttcacagctgttcgtggaaaaggtgcttttctcaatggttctccaattaaaacatcgcctcaaaatgagttggtgaaggctcttatggtgacagaggtagggaccaaaagagacaagtccactttggatgatacaaccaacagaattaataagttactattcaagattagatctatacgtatgtgtggctctttggctctaaacatgtgtggagttgcttgtggtaggctagatttgtgttatgagatcggttttggtggcccctgggatgtggctgctggagctttgattctaaaggaagctgggggttttgtttttgatccgagcggtgatgagtttgatctgatggcgcaaagaatggcaggatcaaatggccacctcaaggatcagttcatcaaagcattgggagatgcaagctgaataacttatttctcttttcaagtagaatgaaagaatgtaagatggccccaccaataagtaattaagggctaatttttgtgtagttttaagtggacactatatgcatattttgcaaacatggc

SEQ ID NO: 3028 - DNA, 855 bp, Triticum aestivum
acactgcagatacaccaggtggtattgtgacctaatttctatccacagatgtcctccgcaagtttgcaaagtcacagcttgattatattctaggcaagaacccacaaaagatgagctacgtcgttggttttggaaagaagtaccccaagcgcgttcatcacagaggggcatcaatccctcataacggtgtcaagtacggatgcaaaggaggttttaaatggagggagtctaagaaagcaaaccctaatatcctcgtcggagcaatggttgctggccctgacaagcatgatggcttcaaagatatccgcacaaattacaattacacagagcctactcttgcagcaaatgctggcctggttgcagcattgatttctctagctgacatcgatactggaagatactcaattgataagaacaccatcttctcagcagttcccccaatgttcccgacacccccaccaccgccatcagcttggaaaccgtgaagagtcagatccctgaacatttcataagcatcaaatggagggagcaacagatggttgtttggtatatacagcgaaggccacgaacagaaagcagacaacataagcttacagagtttctacttctgtatcggtatgacggatcagtataaatcatctgtcagccttgaactggaagttgtgtgcaatttgtgaaactaaattttgggtccttgttgttatccatattccgagttcgtgtgtgaagttctttttgtagaaatgctaccttagtaagtcattttgttttataggagtgacttattcgtcacagtaaagaatgtgtgacctttatacagcttgttttgacttgtttgacatgcattatacgcgg

SEQ ID NO: 3029 - DNA, 1287 bp, Triticum aestivum
gcttgccaagggagcttaacttcatcgagcataccagtgacatcggatggaaggagtatcagagggcgaagcctgtgatcgtcgacccgggcctatatagcctgcagaagtctgatgttttctggattacggagaaaagaagtgtgccaaccgcatttaagctcttcactggctctgcatggatgatgcttactcaccggtttattgaatactgcatatggggatgggacaatcttccgaggactgtcctgatgtattatgccaatttcctctcttcgccggagggttacttccacacagtcatctgcaatgtcccagagttccgcaacaccacagtcaaccatgatctacatttcatttcctgggataacccaccaaagcaacatcctcattacctcaccctcaatgactttgacggtatgcttaacagcaatgctccctttgcaaggaagtttggaagagaggatcctgtcctagacaagattgatcaggaaatactgggccgtcaacccgatgggtttgtgcccggtggatggttggatctgttgaatacaacagtgaaagggaaagacttcagcgtcgagcgtgtacaagatctccgcccggggcctggtgcggactggataaagaaactcgtcacaggcctgctcaccgaggaaggtttcgacgactagcattgcgtataaaaagtttgatgtttccagggtaggttactttggtcaaaatctgaggtgttgagccactagctagtcattctgctagctgaagaagcggcacatagtgtcgacgatccgcacggatggagtgatctgataggtgttccttattatagacaaccactttgagttgagttaccgtacagcaggagaccacggccgccgtagcatgcagagtttatacaccactaatagctcattaggttatgttagaagattatatcagcccaaccattattaataatatcggaatttttcggtctctcggcgctgctggctgtcgtcgaaggtggtccgttcttcctgtagaaaccacagggcccgagccatcagcgcatgagatttcgttgtattaattgtggattcctccgggcaaacttctacgttttggttgcgtacatgtattctttgatttcttttccttctcccacggctgagtatacaaaattgccttatgcactgtttcctctcttcctttggtaaatatgcatactataagtttttgttggagcttaaatggtactctgtctgttcacaattataagatgttctactccccggctgagtagct

SEQ ID NO: 3030 - DNA, 860 bp, Triticum aestivum
catttgaatcctattgctaccgatctcttattgatgggatggagcacattgcaatgatcaagggtgatgttggggatggccaggatattctagtgagagtccattcagagtgcctaactggagatatatttggatcgtcgaggtgtgattgtgggggccaacttgccctggcgatgaccatgatcgagaaggctggtcggggtgtggtggtttacctacgtggccacgaaggcaggggcattgggctgggtcacaagctccgggcatacaatttacaggatgctggacgggatactgttgaggctaatgaggatcttgggttgcctgccgactcccgggagtacggtataggcgcgcagatactacgtgatcttggcgtccgaaccatgaggctgatgactaacaacccggcgaagtacactggactcaagggctacggtttaagtgtcctgggaagagtgccgctgttgacaccaataactaatgagaatcggcgttacatggaaacaaagaggttgaagatggggcacatctacgaagaccctcctaatggccatacaagtggcatgagtgacgaggagcaatatcaggaggatagtggcagcgaacaagattagaccctagagccttaataaatgtcttcatgtttctcccggcaataaaaataaaaccctcaaatttgttatgagcacttctttctccaattttgattatacatatgtagttactatttgtagatgatgtatattagtctggtctgagcatgtgccatgtgcaaaaatatattctcatgtactccctccaccttggtttgtaaggtttgcatgcatttcagtaaaaactttgatccttttcaataa

SEQ ID NO: 3031 - DNA, 685 bp, Triticum aestivum
tagcagcagcaaagtgtctgagaaggtggacgtgttctctttcgggatagcattatgggaaatcttgaccggtgaggaaccatacgcaaatatgcattgcggcgctatcatagggggtatcgtcaacaactctctccggcctccagtacctgaaacctgtgaccccgaatggcgaatactgatggagcaatgttggtcggccaatcccgatatccgcccctcattcactgaggtcacggataggttacgagccatgtcagcgatgcttcagtcaagggcacaggccccaggaagctgatgaagcttacatgccatcaaccagcaaaagatagctggctgatccccacgggctccttttgtgcatagacgagtatatagcatacctgtatttatggtcacactgtattctgtttgatgtatctatgcttatttttttgactattttatagggtttctgaagtatgtatgtatctgagttaacatgtaccgcaggcttttgtagcgtcggtcacgtttcttgcaattttttgtgtagtttgcgaaacttgtgatggtctaccagaccactcaagcttctatttttggggctttggttgtaaaagtatgagcattgtaattatatagcagatgaactggcaaaaaacatactgccacttttgaacctttataaatttagaaataaagt

SEQ ID NO: 3032 - DNA, 794 bp, Triticum aestivum
gagactttggattatcgagaattaagcgcaacactttggtttctggtggtgtacggggcacccttccgtggatggcaccggagctgttgaacggtagcagcagcaaagtgtccgagaaggtggacgtgttctctttcgggatagcattatgggaaatcttgacgggtgaggaaccatatgcaaatatgcattgcggcgctatcatagggggtatcgtcaacaactctctccggcctccagtacctgaaacctgtgaccccgaatggcgaatactgatggagcaatgttggtcggccaatcccaatatccgcccctcgttcactgaggtcacggataggttacgagccatgtcagtgatgcttcagtcaagggcacaggccccaggaagctgatgaatcttacatgccatcaaccagcaaaaaattgccggctgatccccacgggctcctttttgtgcatagacgagtatatagcatacctgtatttatggtcacactgtattctgtttggtgtatctatgcttattttttgaccattttatagggtttctgaagtatgtatgtatctgagttgacatgtactgcgggcttttgtaggctcggtcacgtttcttgcaatttttttgtgtagtttgtgaaacttgtgatggtctgccaggccactcaagcttctatttttgggcctttggttgtaaaagtatgagcattgtaattatatagcagatgaactggcaaaaaacatactgccacttttgaacctttataaatttagaaataaagtcgaggtttttgctt

SEQ ID NO: 3033 - DNA, 707 bp, Triticum aestivum
catggcagcgcgccgtgagacgcgcgcgaaggccgtggctgttcgcgttcgccggtggcgcgcgggcgcacgacggcagcaacaagaacattaacgccgtcgttcgcgacacgatcatcaaccagtgcgcgcggtcgtcggcggtgcgggctccttctgttcggcggctgtggtccggcgcaacgacttgctacgcgccgagcaacgtcatgcggctgttcaagagcgccgccttctgcctgcagccccagggggactcgtacacgcggcggtcggcgttcgacgccgtgctcgccggctgcgtgccggtgttctttcaccccgggtcggcgtacgtgcagtaccggtggcatctgccggcggatcaccgcaagtactcggtgttcgtgccggaggacggcgtgcggaacggcacagtgagggtggaggacgtgctccggcggatcggcgcgagggaggctggcggccatgagggagcaggtggtcaggatgattcccagcatcgtgtacagggacccaagggtcaaggctggcatccgcttcagggacgccgtggacgtcgccgtggacggcgtgatcgagagggtgaggaggatcaaggcgagggctggaggcctgatgtggggcatcagtgggatggttactttgacaagtagcgaaacacctctcttgctctgattttccgagacagaggagacaccaaaatg

SEQ ID NO: 3034 - DNA, 785 bp, Triticum aestivum
ttcgtgagttctgggctactcaaatggaagagattgagcaggcaactgacttcaagaaccacaccttaccactggcaagggataaaaaagataatgaaggctgacgaggatgtccggatgatctccgcagaagctcctgttgtctttgcaaaggcatgcgaggtgtttatcttagagttgacacttaggtcatggatgcacactgaggagaacaagcgccggaccttgcagaagaatgacattgcggctgccattaccaggactgacatctacgacttcttggtggacatcattcccagggatgacatgaaggaggaaggccttgggcttccgagggtgggcttgccacctgctgctctaggggcaccggctgatgcctatcctccttattactatgtgccagcacagcaggtacccggagtaggaatgatgtatggtggtcagcagggtcacccagtggcatatgcgtggcagcagcctcaagggcaacaggccgaggaggctcctgaagagcagcagcagtctccctcaaactagccaagagattgatgcaatgaagccatgccatgatcctgaacttgatgcctataaactcaggcttgtgttaatttatttccgtcatcgttggccggaacagttactcatggttaggtcttagggggggttcctaatggtagcttcgacgctggtatgctaccggcggtaggaaaaaaaagattgtgatttgttaggtgatttgaaactgatttagtaaacagtaccttcgttttcgccctagtttctat

SEQ ID NO: 3035 - DNA, 1535 bp, Triticum aestivum
tcatcctccgccgcctcgaccacccctacgtcatgaagctctcggcctcgtcacctccgcattccgcagcctctacctcgtcttcgactacatggtccacgacctcgccggcctcgccgccagccccgacatcaagttcacactgccccaggtcaagtgctatgtgcatcagctgctgtcagggttggagcactgccacaaccagggagtgctgcaccgtgacatcaagggctcgaatctgctcttggatgacgacggtgtgctcaagattggggactttggtctggcgtcgttcttcgacccgaaccataagcaaccgatgaccagtcgcgtggtgacactctggtaccggccaccagagctgctgttgggtgctacagattatggagtgggcgtggacttgtggagtgccggatgtatccttgccgagctgctggctgggaagcctattatgccgggacggaccgaggtagaacagttgcataaaatatttaagctatgcggatcccccgctgaagaatattggaaaaaatcaaagctgcctcatgcaaccatatttaagccccagcagccgtacaaaaggcgaatagcagagacattcaaagatttcccgcaatcagcacttcggctgattgaaacactcctatcaattgatcctgccgatcgtttaacagcaactgatgcattaaatagtgatttctttaaaacggaacctcgtgcttgtgatccatcaagtctgccccaatacccaccaagcaaagagatggatgcaaaacgaagagatgaagaagctagacgtttaagagctgctggtagtagacctaatggtgatggagctaggaagacaaggacgcgggatcgaccaagggctgttccagcaccagaggcaaatgccgaacttcaagcaaatatcgacaaaagaaggctaataacgcatgcaaatgcgaagagcaagagtgaaaagttccctccaccacatcaagatggcgcactcggctatccgttgggttgttcgaatcacatggaacctacatttgagcccccagacccgtcttcgttcagtaccgtatttccgtatgacaagaccgccgtgcctacatggtctggaccactggtcgaccctcctgggggcaaccagaaacgaaaacacaagtcgggacgctcttcgaaacaaccatcaactgcccgtgctcggtgatacgttatgtgatatttggtgcataagaaattcttcaatatggacaaattactcggcaacagttcctggaagctggggagatctgattatacgaccaaggcaagcagcgatgaattttttcaagacccatgaattcattccatgtacggattcttttcaaaccgcagtgtatagatgggagagggagctcagttagtcgaattctgtacattaggttatcctttttgatttcttacaagcagctatatgtcatgttagattcgtttgagtgagtaatggaactttttaggtctacttggcatgccactgcaacttactgttaactcttacagcagtg

SEQ ID NO: 3036 - DNA, 653 bp, Triticum aestivum
tcaccgccggtttcttgtccgcagagagctcgatcttttctgcgaaagacttgcaggaacaagtgagaagtggtgagggaagcgctactgaactttttgagcttggagcagtgatgctccggagaaagttttaccctgcagctatcaaatatctacagcaagcaatccaaaaatgggacagagatgagcaagatcttgcacaggtgtacaacgccctcggggtgagctacaagcgggagaacaaactggacaaggcaatcaagcaattcgagaaggccgtggagctccaaccaggctatgtgacggcgtggaacaacctcggcgacgcatatgagcagcagaaggacctcgcgtcggcgctcagggcgttcgaggaggtattgctctttgatccaaacaacaaggtggcaaggccgcgccgagacgacctcaagtcgcgcgtgggcatgtacaagggggtgccagtgaagacgacggacaagcgatagcctagccgccacggatggacggattcgcggtttcctcagttttgaacagcacgtagcatctgttgtagcatctgtaaacatgatgagaagttgtatgtagcatattggtgtgatccatccagagctggctgctgtagaatattttgaatgttagcacaaaagaaa

SEQ ID NO: 3037 - DNA, 1059 bp, Triticum aestivum
cttgatttggaatcagacccctggcctaagatatctgacagtgcaaaggatcttataagaaagatgctttgcaattgcccttcagagcgtttgaaagcccatgaagtgctacggcatccctggatctgccaaaatgggatggccactgatggagttttggatcctagtgttatctctcggctcaagcggttctctgcaatgaacaatctacagaaattggctctgagagtgatagctgagcgtctttcagaagaggagattgctggattaagagaattattcaagacagtggacataaaaaatagaggcgtaatcacttttggtgagcttaggaaaggtctgacaagatatggcaacgaattggtggataccgagatttgtgatataatggaagcggctgatacagacactgatgtaaccataaactatgaagaatttattgctgcaaccatgcctctaaacaagatagagcgggaagaacacttgaaggcagcttttacatattttgacaaagatggcagtggctatatcacagtcgacaagcttcaacgagcctgtgcagaatataacatggaaggcactctccttgaagagattattttagaggccgatcagaacaatgacggtcaaattgattatgccgaatttgtagccatgatgcaaggcaacgctaatggtggcaatattggacttggacgtccaacaatggaaaccagtctgaatgtgaccttgagagatgcagctcaagtacattaatgcacagattttgttctcttctcattgccattatgtccacaacccaaattgggttgtgggcatgtacttccgaagtacgggaagagaacaggtcgattctttcggcggcatttatcgaaaataagctggtctagctagcagtacagtcattgtgagagacagcgtcgtgggttccatatagtaagtagttgtgtcctggttcatatgactgcaagactggctgctatccagcaggtggaagtaagagggcgtgcggcaagttcgtttgttctttgtgtgatcagttgtgtactttgtgtctaa

SEQ ID NO: 3038 - DNA, 1149 bp, Triticum aestivum
acatcagttcagctaggaactactattccattcactcatttatttcaatataaagcatacaaaacatgaaacctgtctttcttttatgcgactacacatgaaaactactctacccaccaatggcgctcgtatgcagtcggccagcctccctcctactcatcgcggctcttctctccgccgcaaccttccttgccgtcccggccgcggccacggggaagaccggccaggtggccgtgttctggggtaggaacaagaacgaggggtccctccgggaggcctgcgacaccggcacctacaccatcgccatcatctccttcctcgacgtcttcggccgcggcaactaccacctcgacctgtctggccacgacgtctccgccgtcggcgccgacatcaagcactgccagtccaagaacatactcgtcttcctctccatcgggggcttcggcaaccagtactccctgcccaccgcccagtccgcggcggacgtcgccaactacctctggaacgcctacatgctcggcacccgcaagggcgtctaccgcccgttcggagacgccttcgtcgacggcatcgacttcttcatcgagaacggcgcgccggccaactacgacgagctggccaagcggctatggaacttcaataaggacttccgcggcaggacgccggtgcagctgacggccacgctgcggtgcggctacccggaccggcacgtggagcgggcgctcgccacggggctcgtcggacgcatcttcgtcaggttctacgacgacgccgactgcgccgccaactggcagcgacagtgggacaagtggacggcggcgtacccttcggcgcagatctacctcgggctgccggcgtcggagcagaaggtcggttacgttcacccaaagaacctctactacagcgtcatacaggtggcgcagaaggcggccaactacggcggcgtcatggtgtgggaacgctacgaggacaagcggaccaactatagcagctacgccatccaatgggcttgagcctccgtcgctcacatccgtcaccgtgtgtgaatttggtgtatccgtctgtctactgcatactctgcatgtgtttgcttaccttacggtaaataagtatcaccagtgtgagaacggcgtttcggtgcccgggtgc

SEQ ID NO: 3039 - DNA, 762 bp, Triticum aestivum
cggatctaccgacagccgtcatcctcctccagcaatccccatgtgctctctgccccgctccgcctgatcccactcccagcgcatcccccttctcgagcgtaccccattcatccacatccgccaccgtcctccatgccctgcctccggtgtacctgacgacccgattcctcgccaacgaactcctcctcagccccccactttcccggatcctcgtcgccccggccgagcagaaaccggagccccgccgcagatccgcagggaggaggaggggggagaatggacgccccgtcggtggcgctctacaaccagctcaaggctgctcaaccattcttcttgttagctgggcccaatgtgattgaatcagaggaacatgtcatgaagatggccaagcacatcaaagccatcacgaccaagcttggggtgcctcttgtgttcaaatcaagctttgataaagcaaaccgtacatcgtcgaaatccttccgcggtcctggtctggaacaaggcctaaagatccttgaaaaggtgaaggccgcatatgatcttccagtggtcaccgacgtgcatgaaagctgccagtgtgaagctgttggcagagttgctgtatttatcgattccggctttctcgtgtgcagatgacctttatggctgggctagctgggacatttcctttccaaggcatctgtgctgctgttggccccttcggaatagcttgggcccatttgtgtggccgccctttggccacgttttgtcccccttggggca

SEQ ID NO: 3040 - DNA, 1426 bp, Triticum aestivum
gacgagaagggaaaagagccagaggaggctttgaaacagatatgtggtatctgcctctcagaggagcagagagctacaatacagggtgtgcttaattgctgctcacactacttctgcttcgcgtgcatcctggagtggtcaaaggtggagtcgaggtgtccactgtgtaaacggcgtttcaacacaattaccaagtcatcagtggcagatctaggattggggttgaggaatgctcccgttagggtagaaaagcgcgatcaggtataccagcccactgaagatgaaatgaggcgttggttagacccatacgaaaatgttgtatgtatagagtgcaatcaaggtggtgatgacaatctcatgttgctatgtgatatatgtgattcctctgcacatactttctgtgttggtctgggaagagaagtacccgaagggaactggtactgtggtgggtgtagatccagtgtggaagggccttctcatgcacaaacacaggatagggtggttcaccgtggagatagtaacatgaacaccgccgatagcagttctggttcgttgggcagatctacaccaagtggagtgtccagagaccaccaccaataaacgttcagccttctttgcaaggatttgatctgaatctctctccaatagaaacccctgaggaagataagcgagccgagtcacatctctcagctgaacctgtatcaactcctactgggaggcatgcaactcttgataggaggcgtgccttgaaccgacgcattcgtattcttctatttagacctaggactgcaactaatgcttggcagaatagcattcagcatgacagaagcgcaccaggaacagaacaaaatcaacggatcacctgcacctctacagatgtgagcccatcatgttccagggctgattttatgcagagccagcagagtagctcacattttgtacagtctgcaagtaatcttaatcaatgcactgatgagggtggaagcaatttccgagaagtagcaaatgccaaggaccagctgattcctattgtcaagaagagcatcaagcacatttgtgcccggtctccattggatcaatcttctttcacgaatgtagcacggcgagcgacacacactatcttagcgttgtctgggattgcacacaacaaggatagggttgtttctacaccttttccttttcctagccattgttgccacgcctgtgatggccgagagccagcgtttctcatgagaaccatctgctcgtcatgcttcaactcattcgttggtgatgtcgtcagtcacatcgctaatatgttttcttgaagtaggtggtctttttaagctggcatttctctctctgctgtcgtcattctttgaatttatagacacttggaaagattatacggatacgaaggtgttaatgaatgttggatagcttgaaa

SEQ ID NO: 3041 - DNA, 1346 bp, Triticum aestivum
caggtataccagcccactgaagatgaaatgaggcgatggttggacccatacgaaaatgttgtatgtatagagtgcaatcaaggcggtgatgacaatctcatgttgctatgtgatatatgtgattcctctgcacatactttctgtgttggtctgggaagagaagtaccagaaggcaactggtactgtggtgggtgtagatccagtgtggaagggccttctcatgcacaaacacaggatagggtggttcaccgtggagatagtaacatgaacaccgccgatagcagttctggttcgttgggcagatctacatcaagtggagtgttccagagaccaccaccaataaacgttcagccttctttgcaaggatttgatctaaatctctctccaatagaaacacctgaggaagataagcgagccgagtcacatctctcagctgaacctgtatcaactcctactgggaggcatgcaactcttgatagaaggcgtgccttgaaccgacgcattcgtattcttctatttagacctaggactgcaactaatgcttggcagaatagcattcagcaagacagaagcgcaccagcaacagaacaaaatcaacggaacgcctgcacctctacagatgtgagcccatcatgttccagggctgattttatgcagagccagcagagtagctcacattttgtacagtctgcaagtaatcttaatcaatgcactgatgagggtggaagcaatttccgagaagttgcaaatgccaaggaccagctgattcctattgtcaagaagagcatcaagcacatttgtgcccggtccccattggatcaatcctctttcacgaatgtagcacggcgggcgacacacactatcttagcgttgtctggtattgcgcacaacaaggatagggttgtttctacaccttttccttttcctagccattgttgccacgcctgtgatggccgagagccagcgtttctcatgagaaccatctgctcgtcatgcttcaactcattcgttggtgatgtcgtcagtcacatcgctaatatgttttcttgaagtaggtggtcttttcaagctggcatttctctctctgctgtcatcattctttgaatttatagacacttggaaagattatacggatacgaaggtgttaatggatgttggatagcttgaaatatagatcatttctaaatgatgcattctcttttggaactaacttcttaattgacttgtcattagccatcctgacaagtttcaaggcttccagcaagctgctacagtcttcaatgatgatgccctccaatgatcttttttattgcgaacctgtgtaacttgcttttcctttctctcag

SEQ ID NO: 3042 - DNA, 609 bp, Triticum aestivum
agcaatatcccgccggcgttcgcaaaggggcttcgccctcagcccctaccgacaaagtagtggtgatcgcactgctcggtatggcagccaatgttcctcttggcatctggagggagcacaccacgaagttttcagtgcaatggtttgcggcggtccatgctgcagtgcctttcatagggatgctgaggaagtccatcctgatgccgaagagtgccatggcccttaccatagctgcctcaatattgggtcagacaattggttcaagagctgaacgtatcagattgaagagggcaaaattagcagcagagggccatggccatgaacatgctacccggattgaagctccggtgagcctgaaaactgggagctcaggtgctgtccagctctgggacccgctcggccttaggctcaaaggcggcgtgtctccagccctggttccgactgttggtgccatgtattgatgagatgatcatgcttcgttgcggcggctgtgataattgtatcaagaggttcagaaattgtttcttgtattcattgttattgtgtcttgtaaaggattactggctacattggattcttctccccacatgagtttgggtgcaatcaata

SEQ ID NO: 3043 - DNA, 712 bp, Triticum aestivum
aattggtggatcgtgcctcttgtcgcaaagctgctgacacccccagctggtatgaaactgacgtgccctcctgcgattgttgctgcccgtgcagcaatatcccgcacggcgtttgcgaaggggcttcgccctcagcccctaccgacaaaagtagtggtgatcgcactgctcggtatggcagcaaatgttcctcttggcatctggagggagcacactacaaagttttcagtgcagtggtttgcggcggtccatgctgcagtgcctttcatagggatgctgaggaagtccatcctgatgccgaagagcgccatggcccttaccatagctgcctcgatattgggtcagacaattggttcaagagctgaacgtatcagattgaagagggcaaaattagcagcagagggccatggccatgaacatgctacccggattgaagctccggtgaacctgaaaactgggagctctggtgctgtccagctctgggacccgcttggcctcagagtcaaaggcgccgtgtccccagcgctggttccgactgtcggtgccatgtattgatgagatgatcgtgcttcattgcggcggttgtgagaattgtatcagagttccagaaattgtttcttgtattcattgttgttgtgtcttgtaaaggattactggctacattggattcttctccccactatcatgagttgggtgcagtcaataaatttca

SEQ ID NO: 3044 - DNA, 627 bp, Triticum aestivum
ctgcccgtgcagcaatatcccgcacggcgtttgcgaaggggcttcgccctcagcccctaccgacaaaagtagtggtgatcgcactgctcggtatggcagcaaatgttcctcttggcatctggagggagcacactacgaagttttcagtgcaatggtttgcggcggtccatgctgcagtgcctttcatagggatgctgaggaagtccatcctgatgccgaagagcgccatggcccttaccatagctgcctctatattgggtcagacaattggttcaagagctgaacgtatcagattgaagagggcaaaattagcagcagagggccatggccatgaacatgctacccggattgaagctccggtgaccctgaaaactgggagctcaggtgctgtccagctctgggatccgcttggcctcagagtcaaaggcgccgtgtccccagccctggttccgactgttggtgccatgtactgatgagatgatcatgcttcactgcggcggctgcgagaattgtatcaagagttccagaaattgtttcttgtattcattgttattgtgtcttgtaaaggattactggctacattggattcttatccccacatgagtttgggtgcaatcaataaatttc

SEQ ID NO: 3045 - DNA, 710 bp, Triticum aestivum
gtgctggatgtaccatgatcacatcaatgttgtcgttagctatgggaaaacctgccaggaaggacttagcaatgactggtgaagtaacattgactggaagaatcctcccaatcggcggggtaaaagagaaggccattgctgccaggcgaagctcgataaagacgatcatatttccagcagcaaacaaaagggatttcgatgagcttgctgctaacgtaaaggagggtctcgaggttcactttgttgacacatacagtgaaatatacaagatagccttccagaacgagacagaaacaagctagcaagcaattcaaacagagtattcagattgcgcgaggtctttggggcaagactgaatactgaacgaagtttgcagctaggccattctttgcaagatcaggagtaactttttgttgtaatgattgttttttcctagtgccccatgtgacaatatgttttaaggaaattttgacgagaatgtccgtagctagatagctgaggagccatgtcaaataagaaaaattagaggtttgttacaaacccaagaatgtacaagttttgccttttctttaatgattttacgattgttttattatggactttgttggtatcttcaaagtctgtttatttctttccttatattctccaatagacaccgcaggtgtacaccttgagatatgctcttgtgcacacacatacatctgcagctg

SEQ ID NO: 3046 - DNA, 627 bp, Triticum aestivum
gatctagaactagtcctgaaaaatttcagctccactgagactttaaatgccgaggacaaattcttctgtgacaatgttgcagtttgcaagaagcacagaagagaatgaagatcaagaaggctccccatatattggtgatccacctaaagcgctttaagtacattgagcagcttgggcggtataagaagctttcgtatcgggttgtcttccccatggagctgaagatcagcagtacatctgatgatgtggatactgaatactctctctttgctgtggtggtccatgttggaagcggccccaatcatggccattatgtaagcctcgtaaaaagccacaaccactggttgttcttcgatgatgaaaacgtggagatggttgaagagtcaaccctgcaaacattcttcggttcttcgcacgaatactcaggcaacacagatcatggatacatcttgttttacgagggccttggtgcgaagagtttaggttgattttccctgttgtttttcttttctctttctttggagcatgcaagtttactgttgtatgtacacagctatttcaccacctccatgggaaattgttaatctcagagattgtgagtatgaacctgaggaaagccagattttt

SEQ ID NO: 3047 - DNA, 1049 bp, Triticum aestivum
  N_region (742)..(742): n = any nucleotide
tcatgagttcttaaattttctgttgaatgagcttgttgatattctggagaaagagtccagtgctgcgaaggactcaccccaatcatcatctcctgaaaaagttccaaatgggccagttcaacctttggccaatggagttaaaaaagaaccacctgttaccttggtccataagaatttccagggcatactgaccaatgaaaccaaatgcttaagatgtgagacagtaactgcaagggacgaaacgttttttgatctgagtgttgacattgagcagaatagttccattacaagctgcctgaaaaatttcagctccactgagactttaaatgccgaggacaaattcttctgtgacaaatgttgcagtttgcaagaagcacagaagagaatgaagatcaagaaggctccccatatattggtgatccacctaaagcgctttaagtacattgagcagcttgggcggtataagaaactttcgtatcgggttgtcttccccatggagctgaagatcagcagtacatctgatgatgtggatactgaatactctctctttgctgtggatggtaccatgattggaagcggccccaaccaatggaccaatataatgtaagcctcgtaaaaaaagccacaaaccaactggctgttcttcgatgatgaaaacgtggagatggttgaagagtcgaccctgcaaacgtttttcggcttctttcgcacgaatactcgggcaacacagatgcatggatanatcttgttttacgagggccttggtgggaagagtttaggttgattttccctgttgtttttcttttctttttctttggagcatgcaagtttactgttgtatgtacacagctatttcaccacctccatggaaaattgttaatctcggagattgtgagtatgaacctgaggaaagccagattttttgtggttctagtgtacagcggaaaatggaaccttgctccagtgatgatgaaataaggcggcgcaagtcataaagtacgctcgactatactttccaccgacattctcaccaaggaatgtaacaatgc

SEQ ID NO: 3048 - DNA, 702 bp, Triticum aestivum
tgtgagacagtaactgcaagggacgaaactttttttgatctgagtgttgacattgagcagaatagttccattacaagctgcctgaaaaatttcagctccactgagactttaaatgctgaggacaaattcttctgtgacaaatgttgcagtttgcaagaagcacagaagagaatgaagatcaagaaggctccccatatattggtgatccacctaaaacgctttaagtacattgagcagcttgggcggtataagaagctttcgtatcgggttgtcttccccatggagctgaagatcagcagtacgtctgatgacgtggatactgaatactctctctttgctgtggtggtccatgttggaagcggccccaaccatggccattatgtaagcctcgtaaaaagccacaaccactggttgttcttcgatgatgaaaacgtggagatggttgaagagtcgaccctgcaaacattcttcggttcttcgcacgaatactcgggcaacacagatcatggatacatcttgttttacgagggccttggtgggaagtgtttaggttgattttccctgttgtgtttcttttctttttctttggagcatgcaagtttactgttgtatgtacacagctatttcatcacctccatggaaaattgttaatctcggagattgtgagtatgaacctgaggaaagccgcatctttttgtggtt

SEQ ID NO: 3049 - DNA, 1282 bp, Triticum aestivum
ggcgctcgctcgctacttacgctgaccaaatacagattggactagctggtaatctgagggattatgtactaataactcatactggagaagctaagaagggatcagaaattcacactttcgatggattaccagttggctatacttcgtccccaatagaaataataaattatgtttctgctcatgacaatgagactctgtttgatgttatcagtgtaaagaccccaatgaacctttcagttgatgagagatgcaggataaatcatttggcctccagcatgatggcattatcccagggaataccctttttccatgctggtgacgagatactaagatttaagtccattgatcgagattcgtataactctggtgattggtttaacaagcttgattttacctatgaaacaaacaattggggtgttgggcttcctccaagtgaaaagaatgaagataattggcccctgatgaaaccaagattggaaaatccatctttcaaacctgcaaaaggacacattcttgctgccctagacagttttgttgacatcttgaagatcagatactcatctccgctttttcgtcttagtacagcaagtgacattaagcaaagggttcactttcacaacacagggccctcctcagtcccaggtgttattgtcatgggcattgaagatgcacgagatgagaggcccgagatggctcagttagatgcgaatttctcttatgttgtaaccgtcttcaatgtgtgtccgcacgaagtatccatggatattccagccctcgcttcaatgcgtcttgaattgcatcctgtgcaggtgaattcatcagatgctttggtggggaaatctgtgtacgaggcagcgacgggcaggttcaccgtgcccagaagaaccgtgtcagtctttgtcgaacctcggtgttgatgcctccttggtttcaacgcaagtatctgttctacaaattgtcgaagcgaccgaagatctttctgttttcgtgttgaaggaaataataactgaagaataagagaggagaggcgctgctgcctgcctgccggattacactgctgaaggaacaaacccaagaataagaagcttggcttatgtgtatgtatgtatagtgcccaagttgccaagtcatggctttgttttctgatccattttttattttatatatcaaaaggaaaacatgtatatcgtgttataagtattgtataacatgcatctactattaaataaggaagcataatgatttgtagcggtactgcctttttaactctgtatagagctat

SEQ ID NO: 3050 - DNA, 725 bp, Triticum aestivum
ccgtccaccccgtgacaggcgcatctgcgatcccccgattcgatcctcccggccgcgccccgccgcaccccacccgtcgccgcccgccgcctgcgcccttgggcgagagctccatcacgcagccgcccgcccgcccccgtcaggtcgacgatggacgcagcaggcagagatgccaaccccctggccggctaccggatcggcaaaacccttggcatcgggtcctttggtaaggtgaagatcgccgagcatataattacaggccacaaggtcgcaatcaagatcctcaatcgccgtaagatcaagagcatggagatggaagagaaagtgaaaagagaaatcaagatactgaggttatttatgcatcctcatatcatacggctttatgaggtcatagataccccagcggatatttatgttgttatggagtatgttaaatctggagagttatttgattacattgttgagaagggaagattacaagaggaagacgctcgtcgctttttccagccaattatatctggtgtggaatattgccatagaaatatggcaggtcaccgcgatctgaagccgaaaaaccttcggatgggatcgaacagtaatggtaccatgccaaattggcataaaaaagagaagcgtgacggcactttggaaaaagttggtggcgcaaaatgcaggccaaggaaaaccgaaaggcgcggacaaagaagtaggcaggggaaagaacc

SEQ ID NO: 3051 - DNA, 1119 bp, Triticum aestivum
gtgagccagacccacagccatgtttccggatgttccatgccacacaagctcacactaacttgcagatgaataagcttttaacgacgatggcagaatggtatcgctacgctgataaccgcaaaaaggttgtcaacttttgctcctacattataagggggtccttggcaaagttatatgccgccaagtataagctgcggtcaagggcaaaggtttataagattgcatcaaggaatcttagtcgaccattgaaggataagaaagggcagtcaccagagtacaccaatttgctgagaatgggtcttgtagactcagttgatggactccagtatacaaggatgtcaatggttcctgatcctgactatacaccattaccaagcgggtggcgcccagaccacgagaagtttttgcttgaatatataaagctcacagatcaacaaacactggaagagcagcggagttgcattagagaggaggggcttataacaccacaagaccacatttcaatgcttgtatggagctacaagaaaaatgcagttttactaccttcttcaaaagagagtgatgtccaagattccatagaagaccttggttcagacacagatgaattgaataacaaggaactagggcatggaggcccatcagggttttcccacaacctactgaaatgccttgagtgctcaataatttctgtaaaatcaccaaggcttaattatgataacagttggttgctgccactgaatttacaagagaccaactcaccgatggactaaacagactatgtaaatgtgtactactgtcaagcagattctagcattttgctggctggttcataactgcctagctagatggttacttcctgctcaaggacatgacatattgtgcggctctatccttgaagaccattttcaaatgctcagggcatggtgcaagaacatgaacttcaataattcaactcaggatcattttgcttccaaacagtgcatctgcatcaaggccagcagctgctcatacatcattcatgtcttttagtaagactttatcaagcctatgcattaaaatttatgtaggaaatttattgaacacacattctgtgagagcatatcctgcttgttcaaatgg

SEQ ID NO: 3052 - DNA, 938 bp, Triticum aestivum
gagccacctctcaggaaagaagttgttgagtacatgttggatgtggattctcacatgtggagcatgaggaagagcaaggcaaacttcttcaggattatgaaagtgtcgaccccccttgttggagctgctcaatggtttgataagatttgtgaatggaagaacccgctgaccactgtgttgattcatctcctgttcatcattttggttacgtttccagagctgatccttccgaccgtttccctgtatatgttcttgattggggtctggttctaccggtggaggccaaggcagccacctcacatggacactcgtctttcacatgccgagacctccaaccctgatgagtttgatgaggagtttgatactttccccacatcccgtgcacatgatgtcgttcggatgaggtatgatcgactcaggagcattgcaggcagggtgcagacagttgttggtgacttggcaacacaaggtgagaggctgcagtccctgctcaactggcgggatccaagggccactgctatctttgtgaccttctgcttgatcgctgctgtggttctgtacctggttccgtttcgcatggttgtgctcattgctgggttgtatgtgctgaggcatcccaggttccgctgccacgggcttccatctgctcccctcaacttcttcaggaggctaccggcgaaaacggacagcttgctgtgagaccgtcccgtgccaggtaacatcagagtgttttccagcattggcgacggcattgcatggatggaacctgaaatgcgcagacaatttttcttcaagaattgttatctttcgttgtatgttaatttagacttgagactttgatttgttctggagttggcaccaggttgacctgtttgcctgtgttgtttcgacatggattttctcctgctgtcatcatcgaatttcagttgttatgtgtt

SEQ ID NO: 3053 - DNA, 894 bp, Triticum aestivum
caggacatcatgaacctctacgagggcggcatcaagctgcccatggtgcccgccctcgaggagctgcgcaagcagttcccgctccagctcatcaaggacctgctccccgtgggcggcgactcgctgctgaagctccctgtgccacatatcatccaggcggaccagcaggcgtggaggaccgacgaggagttcgcgcgcgaggtgctcgccggcgtcaacccggtcatgatcacgcgtctcacggagttcccgccaaaaagtagtcttgaccctagcaagtttggtgaccacaccagcaccatcacggcggcacacatccagaagaacctcgagggcctcaccgtgcagcaggcgctggaaagtaacaggctctacatacttgatcaccacgaccggttcatgccgttcctgatcgaagtcaacaacctgcccggcaacttcatctacgccaccaggaccctcttcttcctgcgcggcgacggcaggctcacgccgctcgccatcgagctgagcgagcccgtcatcctgggcggcctcaccaccgccaagagcaaggtgtacacgccgtgccgagcggctccgtcgaaggctgggtgtgggagttcgccaaggcctacgtcgccgtcaacgactccgggtggcaccagctcgtcagccactggctgaacacccacgcggtgatggagccgttcgtgatctcgacgaaccggcagctcagcgtgacgcacccggtgcacaagctgctgagcccgcactaccgcgacaccatgaccatcaacgcgctggcgcggcagacgctcatcaacgccggcggcatctttgagatgacggtgttcccgggcaagttcgcgctggggatgtcgtccgtggtgtacaaggactggaagttcacgg

SEQ ID NO: 3054 - DNA, 627 bp, Triticum aestivum
accaagcaactgggcccagatcaagacatgtatgttttcctgctgttcctactctcacaatgttgcgtcgaagggaaaattcatagcgtttgtgtcaagcacaagcagagagtgacatccagaggcagaactgaagccaggaatcgatcttcttgggccagttgacgagttgtttttcgacacatacgacagatatgaacctactaatgacccttcttcggacaattgttttatatcaacgagttatgatgccacaacacactttgagtctaccgtgatggatgttctttcgctgtatacaaagatcaccggaaagacggttgatctcagtgtggatctaagcgctgcaagtgcccccgaagatgattgacaattctagggcagctataccttgcaatttggaaacgatttatgctttgttttgcagttcattgtaggtccgcctttgccctcgttattttgaaatgtgatagctgagctatagtcagataaagttgtatgatgtatattctaatttcctaaattttctattgggaggtcgatagtatgtttaggcttcgaagacagcttcgcctcggccgctacttttaccttaaattctgataagacacacaagacatagatgat

SEQ ID NO: 3055 - DNA, 592 bp, Triticum aestivum
tatgttttctggttttcctattctcacaatgttgcgtcgaagggaaaattcatagcgtttgtgtcagcacaagcagagagtgacaatccagaggcagaactgaagccaggaatcgatcttcttgggccagttgacgagttgtttttcgacacatacgacagatatgaacctactaatgacccttcttcggacaattgttttatatcaacgagttatgatgccacaacacactttgagtctaccgtgatggatgttctttcgctgtatacaaagatcaccggaaagacggttgatctcagtgtggatctaagtgctgcaagtgccaacgaagatgattgacaactctagggcagctatatcttgattttggaaacgatttatgctttgttttgcagttcatcgtaggtccacctttgccctcgttattttcaaatgtgatagctgagctatagtcagataaagttgtatgatgtatattctaatttcctaaattttctattgggaggtcgatagtatgtttaggcttcgaagacagcttcgcctcggccgctatttttactttaaattctgataagacacacaagacaataga

SEQ ID NO: 3056 - DNA, 686 bp, Triticum aestivum
gactcttccccgctttagtttcctcatcccgagcacctccgacgtcacgcgcaggacgtgcaggcatacatggtgggtgagccggcgacagctcgtgccgatctgtcgagcatcagcgtgggcgggatgccggcgttcaagtcgctgcgagacagccaccggaacttcgacgaggcggcgctggaggggatccggcgcgccgtggtgggcggcgcctacgaggtgatcggcctcaaggggtacacctcttgggccacttggctactctgtcgccagcctcgctgcttccctcctccgcgaccagcgccgcgtgcaccctgtctctgtccttgcctcgggcttccatggcatctcagacggccacgaggtgttcctcagcctgcccgcccgcctcggccgcggcggcatcctcggtgtcgccgagatggacctcaccgaggccgaggccgcgcagctccgccgctcggccaagacgctctgggagaactgccagctcctcgacctctgacggaggaaagccagttgatctacatctacttactgtaaaatcctggagcgtttacaagaactctactgctatatgttgctctgttgctgctgcggccacacgaatgcttgtgtaattttcgagtgtcttcttagggatgttgtagtaatgtaacgcctcttaatttcatgaaataaaa

SEQ ID NO: 3057 - DNA, 726 bp, Triticum aestivum
ccgccaccgcgtcatcggctccggcaccaacctcgactcctcccgcttcaggctcctcatcgccgagcacctcgatgtcaacgcgcaggacgtgcaggcatacatggtgggtgagcacggcgacagctcggtggcgatctggtcgagcatcagcgtgggcgggatgccggcgttcaagtcgctgcgcgacagccaccggaacttcgacgaggcggcgctggaggggatccggcgcgccgtggtgggcggcgcctacgaggtgatcggcctcaaggggtacacctcttgggccattggctactctgtcgccagcctcgctgcttccctcctccgcgaccagcgccgcgtgcaccctgtctctgtccttgcctcgggcttccatggcatctcagacggccacgaggtgttcctcagcctgcccgcccgccttggccgcggcggcatcctcggcgtcgccgagatggacctcaccgaggccgaggccgcgcagctccgccgctccgccaagacgctctgggagaactgccagctcctcgacctctgacggaggaacgccagttgatctacatctacttactgtaaaatcctggagcgtttacaagaactctactgctatatgttgctctgttgctgctgcggccacaagaatgcttgtgtaattttggagtgttttcttagggatgatttagtaatgtaacgcttcttaatttcatgaaataaaatgcg

SEQ ID NO: 3058 - DNA, 596 bp, Triticum aestivum
caagttgatgggatctgaagaaattctgctatacctgtggtgaatctgggcattccctttccaagtgcccgaagcccattgaaaatgcggcacaaactttgcgagctgctttgtctgcaaacagcagggacatttgagcaaggattgccctgaaaatacacacggcatttatcccaagggtggttgctgtaagatatgtggtgaagttacacacttggcaaggcattgcccgaacaaacggcaacagtacttcgaatcctcggtggatgatggtatgaatatggagggagactaccaggaagaccatactctgcatggtggagacgatcttgaagatgatttcattgatgaagaagaggtgaaaaccaccaaaacaattaaagcaagcaacctagcagcggcgagaagagtaccagctcaaagtcaaaaggaaaacagctccaaaagttgtaaaattctttggttaaacaatgccgccatttttgtagtgtacgtcgagaatgatcatcttcctggacaattctttttggaggaatcccagctgtgtaacttacaatgcaatgagaatgtatctgtctacactccgatgttggaaa

SEQ ID NO: 3059 - DNA, 1122 bp, Triticum aestivum
  N_region (379)..(379): n = any nucleotide
  N_region (514)..(514): n = any nucleotide
ctcgtgtattcatgtgaggttcgaggtttatatgatctccgagatgcccgaatcgatgtggggattcgacagcagtggcaattgtgtactagtgagctactatttcttttctcacaagctgggctttgtagttgctgtttactttgatcccttgttacccttattactgaacacatgagtgcatgggccatgggagtttgaaacattgatatcatgatatgttcctgtgccgggctgagctgctgattcctacttctgataggtttttcgatggattgtttagcttcctgagtagaatgtttgagttatattttcacagctatgaggctgtgtcatcatcatggagtagctttgaggtcatagcatggctgcagcaatntcattcctcagtatgttgtaactagaacagcttttctctctccttctaggttgcttgtcatggcatcaaagcgcatcctcaaggaactcaaggacctgcagaaggacccgcccacatcatgccagtgcaggtccngctggtgaggacatgtttcattggcaagcaacaattatgggaccccctgacagtccctatgccggcggtgttttcttagtgaacattcatttccctccagattaccccttcaagccaccaaaggtatcttttaagacaaaggtcttccatcctaatatcaacagcaatggaagcatatgccttgatattcttaaggagcagtggagccctgctttgacgatctccaaggtcttgctctctatctgttccctgctgaccgatcccaacccggatgatccccttgttcctgagattgcccacatgtacaagacggaccggtcaaagtatgagacgacagcccgcagctggacgcagaagtacgccatgggttgaagacctgcatcgtggacaactgaaatgtcgcttcaagaaaaaaatttatgggccattgtttcttcgatttgttgctggttgtgtgtaatccgatcctcaaggattgtaaattgcattcggcgtcggccctatcatcaattgccactagtatcggcagacatgcatgcctatcagcctattcacctatgcttgttgggttaaccttcatcagtgttggtgttatttggtaaatgttc

SEQ ID NO: 3060 - DNA, 846 bp, Triticum aestivum
gcgtcctccgtccctcgtcctcgccgtcccccacctctcgctgcaaaagcttgcttgtcatggcatcaaagcgcatcctcaaggactcaaggacctgcagaaggacccgcccacatcatgcagtgccaggtcctgcctggtgaggacatgtttcattggcaagcaacaattatgggaccccctgacagtccctatgccggcggtgttttcttagtgaacattcatttccctccggattaccccttcaagccaccaaaggtatcttttaagacaaaggtcttccatcctaatatcaacagcaatggaagcatatgccttgatattcttaaggagcagtggagccctgctttgacgatctccaaggtcttgctctctatctgctccctgctgaccgatcccaacccggatgatccccttgttcctgagattgcccacatgtacaagacggaccggtcaaagtacgagacgacagcccgcagctggacgcagaagtacgccatgggttgaagaagacctgcatcgtggacaactgaaatgtcgcttcaagaaaaatatttatgggccattgtttcttcgatttgttgctggttgtgtgtaatccgatcctcaaggattgtaaattgcattcggcgtcggccctatcatcaattgccactagtatcggcagacatgcatgcctatcagcctattcacctatgcttgttgggttaaccttcatcggtgttggtgttatttggtaaatgttcattaaaaatgtttgcttatgaccttgtccagatttatcttcttttggttctaggtatgtttcgaatgtatgtatgttcagttttgttgttgttcgcagac

SEQ ID NO: 3061 - DNA, 857 bp, Triticum aestivum
gcacgacaccacaccacaaagcgaggggcggacccggagcaaaaaagaccaccaaaggcaggcgtcctccgtccctctgtcctcgccgtccccaacctctcgctgcaaaaaggttgcttgtcatggcatcaaagcgcatcctcaaggaactgaaggacctgcagaaggacccgcccacatcatgcagcgcaggtcctgctggtgaggacatgtttcattggcaagcaacaattatgggaccccctgacagtccctatgccggtggtgttttcttagtgaacattcatttccctccggattaccccttcaagccaccaaaggtatcttttaagacaaaggtcttccatcctaatatcaacagcaatggaagcatatgccttgatattcttaaggagcagtggagccctgctttgacgatctctaaggtcttgctctctatctgttccctgctgaccgatcccaacccggatgatccccttgttcccgagattgcccacatgtacaagacggaccggtcaaagtatgagacgacagcccgcagctggacgcagaagtacgccatgggttgaagacctgcatcgtggacaactgaaatgtcgcttcaagaaaaatatttatgggccattgtttcttcgatttgttgctggttgtgtgtaatccaatcctcaaggattgtaaattgcattcggcgtcggtcctatcatcaattgccactagtatcggcagacatgcatgcctatcagcctattcacctatgcttgttgggttaaccttcatcagtgttggtgttatttggtaaatgttcattaaaacatgtttgcttaatgaccttgtccagatttatcttcttttggttt

SEQ ID NO: 3062 - DNA, 1036 bp, Triticum aestivum
  N_region (855)..(855): n = any nucleotide
cagtagtgctcttcaatgcccttatagtatctgttaccatgttttgttacatcaaagctggctggctcggaaatgatcccttaacggttgttattggtgaaagtgatccatacgtccacataagcgggcgggaaataagccatcttcatgttgccacagtgctgatgacagtaataatgatcattgcttttctgtcctcaatagctattgtccggcgtatactgatagccacacctgtcctgaaggttgccgcgaaggtcatcggtgaagttcaggcactgatagttttcccagttgtgccgtactttatcctcgctatcttttatatgttctggttttctgccacactccacctcttcagctctggtcaagttgtccgaaatgactgcagtacagattgttgctcatatgatctgaagttgggcaaagtgaactgtgacaactgttgtgggtacagcatccattacacccctcatatcggcattgccatcctcttccacttatttggatgctactgggctactcaattcttcatggcatgctctgcaactgtggttgctggatcagttgcttcttactactgggcacgtggcgaaatatctcatgatataccgtttttgagcgtcgtctcttcgctcaagcggctgatgcgttacaaccttggatctgctgccataggctcgcttgttgtatcagctgttgagtgggtgcggtttatactagaatggcttcgccggaagctgaagctgatcggttctgctggggagagctgctttgggacagtgtcatcgtcctcgtctcagtgctgccgggctgcatagactggacccctatgcttgtaattgaaatgcctantatgggtgcgctcccgggaagggctttaaggtctgggcccgacgggctttttgtgacacttggcctcgggggaacctcgggggggccttcccggggaaggggggccctttgcgccgtcctctgtggccccaattcggccaatatttgcccccggggcggcggcgaacggaggcagccacta

SEQ ID NO: 3063 - DNA, 606 bp, Triticum aestivum
aggatcctcttggatcaagatgacttggagctctatgggcttcgttgcaatcctcagttgatatccaaattgtcggggatgatttgctttgtcacaatcccttaacgtatagtagaggctattgacaagaaggcctgcaatgctctgttgcttaaggttaatcagatcggtaccgtcacagaatctattcaagctgctctggattcaaaggctgctggttggggcgtgatggtcagccacaggagtggtgaaacagaagacaatttcatcgcggatctagctgttggtttagcgagcgggcagatcaaaaccggagctccctgctagaagcgagagactggccaaatacaaccagcttgtgcggattgaagaggagctaggcaacgtgcggtacgccggcgatagcgttcaggtctccatgagaaaccagaatcacagacgactttgactggagcagtattagtttctacagcggcgtacagtggtgtactgtgtacatccttcgattagaaataaaggcactgaccgtataaattcatgacatctccttgtaggagtgcctcgtgcaccccaaattttgcagcctggagtgtatcgcagatgcac

SEQ ID NO: 3064 - DNA, 548 bp, Triticum aestivum
  N_region (10)..(10): n = any nucleotide
cgtgatgaantagcctgttttccacaacctcaagaccctgctcgcgggcgaaatcctcggcgccgtcgaaggcgaggtacgagtggggcgacttgtccatgacgcggcgggccagggacacggggttgcggacggtggacacgccggagacggccccgcagcggcggccgttgccgtccatgatgctggcctccatctcgacggtgccggcgcgagtgagcgcggagcctcgtccggagttgaagcaggggtccgtctccagtcgcgcaccacggcctccaccacgtccagcgcagcggcgccggcccggagcaggtccacgccgatctgcaggcaccgggccagcacccgcttggcctcctcctgcctgtgctccggcaggttggggtccacgcccgcgccgccgtggatggcgatggcccagcgcgccatgtcaaagtatgtatgtgctgggggtggtgtgctgtgctaggtggctgaaggcactgtgttgctgtggctacgtgatgctctgctctttcttgttgagccgtgtgagggttgggaga

SEQ ID NO: 3065 - DNA, 756 bp, Triticum aestivum
tcccagttcatcccatattggtcctgcgaggaggggcggagaaacggaaagcaggaggcggagaggagatcagccagcccttcaagcacagagggcggcgagggaggggcgcgatggcgtccaagaggatacagaaggagctcaaggatctgcagaaggatccccccacctcatgcagtgcaggtcctgtgggtgaagatatgttccactggcaggcaacaataatgggcccatctgacagcccatattctggtggagttttcctagttactatccacttccctcctgattatcctttcaaaccaccaaaggtggcattccgcaccaaggtgttccatccaaacatcaacagcaacgggagcatttgtctggacatcctcaaggaccaatggagccccgctctgactatttccaaggtgctgctgtccatctgctccctgctgtgtgacccaaaccctgatgatcctctggttcctgagatcgcccacatgtacaagacggaccggcacaagtacgagagcaccgccaggacctggacgcagaggtatgccatgtaatgcaagacggcggatgggtcgccggagtccctcttgtaacattctcgatctgtgcgtgtgtgcccgccaggtgtgtgtgtctgtcaaactggcactcgttgctcaactgtgtcacctggcgcagtgacttggaacatggaactggtgttgcatattttggattcagataaatgtcgccacctgccgccaggtcggtgct

SEQ ID NO: 3066 - DNA, 735 bp, Triticum aestivum
catcccatatgggctcttgcgaggaggggggcggagaagcggaagcaggaggcagagaggagatcaggccagaggagggcgagggagggcgcgatggcgtccaagaggatacagaaggagctcaaggatctgcagaaggatccccccacctcatgcagcgcaggccctgtgggtgaagatatgttccattggcaggcaacaataatgggcccatctgacagcccatattccggtggagttttcctagttactatccacttccctcctgattatcctttcaaaccaccaaaggtggcattccgcaccaaggtgttccatccaaacatcaacagcaacgggagcatttgtctggacatcctcaaggaccaatggagccccgctctgaccatttccaaggtgctgctgtccatctgctccctgctgtgtgacccaaaccctgacgatcctctggttcctgagatcgctcacatgtacaagacggaccggcacaagtatgagagcaccgccaggacctggacgcaaaggtatgccatgtaatgtaagacggcgcacggatcgctggagtcagtcttgtttgtaatattctcgatctgttcgtgtgcccgcccggtgtatgtgtctgtcaaactggcactcgttgctcaactgtgtcacttggcgcagtgacttggaacatggaaccggtgttgcatattttggattcagataaatgtcgccacctgccgccaggtcggt

SEQ ID NO: 3067 - DNA, 676 bp, Triticum aestivum
gatcgagccagagggcggcgagcaagggcgcgatggcgtccaagaggatacagaaggagcttaaggatctgcagaaggacccccctacctcatgcagcgcaggtcctgtgggtgaagatatgttccattggcaggcaacaataatgggcccatctgacagcccatattctggtggagttttcctagttactatccacttccctcctgattatcctttcaaaccaccaaaggtggcattccgcaccaaggtgttccatccaaacatcaacagcaacgggagcatttgtctggacatcctcaaggaccaatggagccccgctctgaccatttccaaggtgctgctgtccatctgctccctgctgtgtgacccgaaccctgatgaccctctggtccctgagatcgcccacatgtacaagacggaccggcacaagtacgagagcaccgccaggacctggacgcaaaggtatgccatgtaatgcaagacggcggatgggtcgccggagtcagtcttgtttgtaacattctcgatcagttcgtgtgtgcccgcccagtgtgtcacctgtctgtcaaactggcactcgttgctcaactgtgtcacctggcgcagtgacttggaacatggaaccggtgttgcatattttggattcagataaatgtagccacctgcctgccactt

SEQ ID NO: 3068 - DNA, 769 bp, Triticum aestivum
cctggagctcggttgggggctggccgacagcggctacacgttcatatggaacgttcggccggacctcgtcaggggagagaccgccgtgatgccgccggagttcctagcatcggtccacggccgcgccatgctcacgacgtggtgcccgcaggcggaggtcctcgggcacgaggcggtgggggtgttcctgacgcactccggctggaactccacgctcgagagcatctccgccggcgtgccgatgctgtgctggccgttcgccggggagcagcagaccaactgtcggtacaagtgcaccgagtgggggatcgggatggagatcggcggcgaggtgaagcgggcggaagtggcggcgatgatacgcgaggcgatggtggggggcaaggggcgggagatgaggcggcatgcggcggagtggaaggagaaggcccagcgtgcgtcgctgccaggtggggccgcagaggccaacctagacgaggtgattcgtagcgtgctcctcgccaagtactacaacatttagtagtcgaggaaattcaataacgcgcatgctaaaaatcagtcaactgggatttaactaagtttcagacgaccatgcaacacttttgccatcgtttgcaatattttttcttatcagttgcaatatccgtcttgctggttgtagcatgtcgtccctcatcgattggtagcatgtcatcttaccggttgcaacatccttcattgaaggctatagtatttcagttagaatggttgtcacatttattgttgttgc

SEQ ID NO: 3069 - DNA, 863 bp, Triticum aestivum
  N_region (53)..(53): n = any nucleotide
  N_region (56)..(56): n = any nucleotide
  N_region (63)..(63): n = any nucleotide
aagccccagcgccgcccactataagaaacgcttttcatgcactttaccgtatnatngctgatnaaggtgttctggcactttggaagggcgcaggtccaactgtagcgagagcgatgtcactcaacatgggcatgcttgcctcctatgatcagagtgttgaggtacttagagacaaacttggtgctggagaactttctacaatgcttggggccagtgccatttcaggattctttgcatctgcttgcagtttgcccttcgactatgttaagacacaggttcagaagatgcaacctgatgctactggaaagtatccatacactgggtcttttgactgtgcaatgaaaaccttgaagagtggcggtccgtttaagttctacactggctttccggtctattgcgtcaggattgctccacatgtcatgatgacatggatattcttgaatcagatccagaaggtcgagaagcgcgtcggcctttaaagtgtcgtgctatgctatcctcacctacaaattataatagtgtagctgctttgtacctataaaccagcagttggttctgatatacaaaatctgtacttatttccttggcatatatgctaccatgcttctttgttccttccagaccaaataatcatataatttctgggtaacttttggcagaaaatagtgttgttaggagcagatatgccaccaccggattgaacccatgtcatcaatggagccggacatcaaacaaacttttcattctgtacttgtttaggctttatttttgtcaagtgtcaacatgtactccgtatatatttttggcggggtaatatgtgtggttaattctcgctgttgttgtaatttcttggtatatcaggt

SEQ ID NO: 3070 - DNA, 1157 bp, Triticum aestivum
gtaaatgctcgcacacacatacacttatttctatgaacgcacacacgcacgtcacattcctatgagcacctctgagatactgagccgacacaacatcttggaactgaagaaatcatcacaggcgcctagtaattgatgaaaaccacttctcccaaccaattcccttcttaatgattatacatacaactctgctgcatggtatggaaaaaaaggattttgacgtgcttttgtgcatgcatgtgtacgtgtcaggcgacatccacgggcagttctcggacctgctccggctgttcgactacggcgggctgccgccgagcgccaactacctgttcctgggcgactacgtggaccggggcaagcagagcatcgagaccatctgcctgctgctggcgtacaagatcaagttcccggacaacttcttcctgctgcggggcaaccacgagtgcgcctccatcaaccgcatctacggcttctacgacgagtgcaagcgccgcttcagcgtccgcctctggaagctcttcaccgactgcttcaactgcctgccccgtcgcggcgctcatcgacgagaagatcctctgcatgcacggcggcctctccccggacctcgtacagcctcgtaccggattcgccgagatccagcgccccgtcgacgtgcccgaccagggcctcctctgcgacctcctctggtccgatccccgtaccgcgatgagccgccggctggggcgagatcgagccgcggcgtctccttcaccttctggcgctcgataaggtcgccgagttcttgcatcaagcacgacctcgtacctcatctgccgcgccccaccaggtcgtggaggacgggtacgagttcttcgcggacacggtcagtctggtcaccatcgttctccgcgcccaactagctgcggggagttcaacaacgccggcgcgctgatgaacgtcgactgcctagcctgctctagctccattccagatcctcaagcccttgagagcccaacgtgccaggcaggactaacagagtttttgttactatattgctattagaggctcgattagaatacatggaggtctcatagatttgcatgcacgtatatatttctccttgcagatccatggttctttcgaatcgtttgcttgtaattcattatatatgtgtatgt

SEQ ID NO: 3071 - DNA, 711 bp, Triticum aestivum
agtgttccaacacactcggaaataaggcttgcgaactcgtacttctacgacaaatccacatgcttacttgcctggagattacttttatcagagaaagagttcagcttggaccatcctgctgccaacccctggcccctggcagaggaggaccctccactgaaatgcatgcccccaacacttgacgatcgttgcggaacacgactgtatgagagacagagcaattgcttactccgaggaactccgcaaggtaaatgtggatgcgccagtcctggactacaaagatacagtccatgagttcgcaacactcgatgtgttcctcaagacaccacaggctcaggcctgtgccgaagatattgccatatggatgaagaaatacatatccctgagagggcacgagttctcgtattagctgtagcaaaagatcagcattgtgaaatagagtctttacaggaagcatcggtgcattctttttcacctggtgatgggaggcactgcaagttaaaaggcgaagaacaagttaggcgtaatgtgagtgctgagtacctttcccctttattgatgatccttgtggaagaatgtagtgtgcaaattgtagactgaactcaaagacagatgctcttccgcctcgtagagctcaattctttcattccttttgtaccctttgtgaagtattgaaatgctgggtctcgaaatcaccatttttgagaaaaa

SEQ ID NO: 3072 - DNA, 826 bp, Triticum aestivum
gtcctacttggtgtaagctgtggtgccaacattgctgattttgtcactaggaaagcggtggaagatgcaaagcaatttgacccagtcaaggtcgtagcacaggttctgatgtatcccttcttcacaggaagtgttccaacacactcggaaataaggcttgcgaactcatacttctacgacaaatccacatgcttacttgcctggagactacttttatcagagaaagagttcagcttggaccatcctgctgccaaccccctggcccctggcagaggaggccccccattgaaatgcatgcccccaaccttgacaatcgttgcggaacatgactgtatgagagacagagcaattgcttactccgaggaactccgcaaggtaaatgtggacgcgccagtcctcgactacaaagataccgtccatgagtttgcaacactcgatgtgttccttaagacaccacaggcccaggcctgtgctgaagatattgccatatggatgaagaaatacatatccctgagagggcacgagttctcgtattagctgtagcaaaaggtcagcgttgtgaaatagagtctttacgggaagcatcggtgcattctttttcacctggtgatgggaggcactgcaagttaaaaggcgaggaaccagttaggcgtaatgtgagtgctgagtacctttcccctttattgatgatccttgtggaagaatgtagtgtgcaaattgtagactgaactcaaagacagatgctcttccgcctcatagagctcaattctttcacttccttttgtaccctttgtgaagtattgaattgccgggtctcgaaatcacc

SEQ ID NO: 3073 - DNA, 602 bp, Triticum aestivum
ggacgactacccggcggtgacgttcaactacttctcgcacccgcaggacctccggcgctgcgtcgagggcttgacgctcatcgagcgcgtcatccagtccaaatccttccagaacttcacgtacccctacttctccatggagggagctgctcaacatcacggcggagttccccgtcaacctgctgcctcggcacgacaacgactccaagtctctggagcagttctgcaaggacaccgtcatgaccatctggcactaccacggcggctgccaggtcggcagggtcgtcgacgccgagtaccgggtgctcggcgtcgacgcgctgcgagtcatcgacggctccacgttcaacgcctcgccgggaaccaacccgcaggccaccgtgatgatgctcggcaggtatatgggggttaagatgcgagacgagagggtgcgtgctgaagggttaaggaggagaaaactgtagtccacttgacgaagattggcaggcacattatgtatttgtaactgcagtatgtgaacaattggaatgagttgcgcgtcattattggaagtgtgtgttcatttgtacggttatcaagacgaaatctgtattgtccggaga

SEQ ID NO: 3074 - DNA, 1240 bp, Triticum aestivum
  N_region (1232)..(1233): n = any nucleotide
cttcaatgtcggagggcgccgggcacggccggtggcgcacggcgtcgtgttccacgactcaagagggcggatgcacaaggcgtacctcaacaccggccgccgcaacgagatcatcctctcggcgggcgccatgggcagcccgcagctgctgatggtcagcggcgtcggccccgcggaccacctgcgctccttcaacatcaccctcgtgctgaaccagtcggcggtcgggcagggcatggccgacaaccccatgaacgccatcttcgtgccgtcgccttcccccgtcgaggtctccctcatccaggtcgtcggcatcacccagttcggcagctacatcgagggcgccagcggctccaactgggccaacccgcgccaccagggctccggcggcaaccgccggccgccccgcaacttcggcatgttctctccacagactgggcagctggccacggtgcccccgaagcagcgcacgccggaggctatcgcgcgcgcggcggacgcgatgagccagctcgacgactcgggtgttccgtggcggcttcatccgtggagaaggtccttgggaccgggcgtccacgggccacctcgagctgcggaaccttaacccagacgacaacccggcggtgacgttcaactacttctcgcacccggaggacctccggcgctgcgtggaggggttgacgctcatcgagcgcgtcatccagtccaaatccttccagaacttcacgtacccctacttctccttggaggagctgctcaacatcacggcggagttccccgtcaacctgctgcctcggcacgacaacgactccaagtctctggagcagttctgcaaggacaccgtcatgaccatctggcactaccacggcggctgccaggtcggcagggtcgtcgacgccggagtaccgggtgctcggcgtcgacgcgctgcgcgtcatcgacggctccacgttcaacgcctcgccgggaaccaacccgcaggccaccgtgatgatgctcggcaggtatatgggggttaagatgcgagacgagagggtgcgtgctgaaggattaaggaggagaaaactgtaatccactcgatgaagattggcagggcacattatgcatttgttattgcagtatgtgaactattgtcacggactagaattcaattggaatgagttgcgcgtcattattggaagtgcgtgttcgtttgtaccgtaatcaacacaaaatctgtattgtacgaagannaatggaa

SEQ ID NO: 3075 - DNA, 392 bp, Triticum aestivum
ccgaagcgccccccttaccccggaaccaaatcgaacaacccagagaagccatggagcggctgcagcggatcttcggcgccggcgggatgggccagccgccgtcggactcgccgctgctcgactcctccgagcaggtctacatctcctccctcgccctcctcaagatgctcaagcacgggagggccggcgtgccgatggaggtcatgggcctcatgctcggcgagttcgtcgacgactacacggtccgggtggtcgacgtcttcgccatgccgcagagcgggacaggggtcagcgtcgaggccgtcgaccacgtcttccagaccaatatgctcgacatgctcaagcagaccggcaggccagaaatggtggtagggtggtatcactctcatcct

SEQ ID NO: 3076 - DNA, 1110 bp, Triticum aestivum
ccgcaagcgccctccgaaccaaatcgaacaaccgagagaagccatggagcgacttcagcggatcttcggcgccggcgggatgggccagccgccgtcggactcgccgttgctcgactcctccgagcaggtctacatctcctccctcgccctcctcaagatgctcaagcacgggagggccggcgtgccgatggaggtcatgggcctcatgctcggcgagttcgtcgacgactacacggtccgggtggtcgacgtcttcgccatgccgcagagcgggacgggggtcagtgtcgaggccgtcgaccacgtcttccagaccaatatgctcgacatgctcaagcagaccggcaggccagaaatggtggtagggtggtatcactctcatcctggttttggttgctggcttatcgggtgttgatatcaatactcaacagagttttgaagctttgaaccccagggcagttgccgtcgtgattgaccccatccagagtgtcaaggggaaggtggtcatcgatgcatttcgtctcattaaccctcagaccatgatgcttgggcaggagccacgtcagacaacatccaatgttgggcacctgaataagccgtctattcaggctcttattcatgggctcaatagacactactactctattgcaataaattaccgcaaaaatgagctggaggagaagatgctgctcaaccttcacaaaaagaaatggactgatggattaattctgaagaaatttgacgcacattcagaaaccaatgagcagactgttcaggaaatgctgagcctagccatcaagtacaacaaggcagtgcaagaggaggatgagttgtctcctgagaaattagcaatagctaatgtgggacggcaagatgctaagaagcatctagaagagcatgtctcaaatctgatgtcgtccaacatagttcagaccctaggtaccatgcttgacacggttgtcttttagtctaccactagtgttgttccaaagtctatcattcatgttatgtatccaaagcctgccacaacgcagcaaggcacattcgggttctaacagtttgctcgacagactcaattttctgtagtactatattctgcatgtttaacat

SEQ ID NO: 3077 - DNA, 444 bp, Triticum aestivum
acttcacattctacggcatgatggctgttggcttgacacccaactaccacatcgcctcaatcgtctcgtcagcattctacgccatctggaatctctttcttcacggtgttctatcgatctccccgagcccaaaaggttcccaattttggttggaagaatgggtaattgcctggggtatgccccgtagcgtggacactgtacgggctggttgtctcacagttcggcgatgtcacaacgccgatggaggacggcactcccgtgaaagactttatagagggctacttcgacttcaagcacagctggttaggttatgttgctacggtggttgtggcgttcgcggtgctgtttgccttcttgttcggttttgccatcatgaagctcaacttccagaagaggtagatgatgacgatatagaggcatggtctaaaaagaaatgcattagta

SEQ ID NO: 3078 - DNA, 627 bp, Triticum aestivum
accttcactggattgttactgatatacctgggacaacagatgcttcttttggacgggaagtcataagctatgagagcccaaagcccaacataggcatccacaggttcatttttgtgctcttcaagcagaagcgaaggcagactgtaactgtgccttccttcagggatcatttcaacacccgtcagtttgctgcggagaatgacctcggcctccctgtggcagctgtctacttcaactgtcagagagagactgctgccaggaggcgctgaaaatccagctctcgttgtcccagttatgacaaataaaggcctatggagttccaatcttcttttcgaagtggatactcgtctgctacattacttgctcgtgaaccaatgcttccttgccacattacttgctcatggatctacaaataaatcaaatgcattttgcagattgtattagaattagattgttttgtaagcagtaagattgataatcatgttgacaatgccagtgcagcaagtggtccatgtttgtggttccaagtcgtgtattagccagttatcacgaaatccagggtcaagtagacatcctaactggcaaaaggctttatctactgtatgtcgcatgctggttccagttatg

SEQ ID NO: 3079 - DNA, 549 bp, Triticum aestivum
gattggcttgtaaactgcatggattcttgagacaacaagcagcagcgctgaaaatacagaaaaatatacgccgttattttgcacggagaacttattctcagctatgcctgtcagccattacattgcagacagggttaaggaccatggcagctcgcaatgaattcaattctagaaatcaggacaaagcttctatccatatccagtcccgttggcgtcgccacagagataacttaagttatatgaagttaaagagagcagcattgacctaccaatgtgcttggagaggaagggttgccagaagggaactgcggcagctcaaaatggctgcaagagatactcaagctctaaaggtggcaaaggagaaactggaggagcgtgtggaagagctaatgagccgcttgagcttggaaaagaaactaaggactgatctggagaagtccaaagcaacagaaatttctaaactgcagtctgctcttcatgacatggaacagcgagtggaagaagctgccgcaatgaaggaaaacgaatcagctaaaaaagctgtcgaag

SEQ ID NO: 3080 - DNA, 752 bp, Triticum aestivum
ccagtttccgctcgacatgacgccatcaaatccgtcatcttcgacatattggcgccgcagcgagacggcggcgaccacgttggagtgggccatggcagagctgatcaagaacccgagggtcatgcaaaaggcgacgacggaggtgcggcaagccttccatgcccgcggcaccgtggccgagcatgctctaagtgagctcacttacctacacctggtcatccgggagaccctgcggctgcacactcccctaccgttgttgctcccgcgcgagtgccaggaaccatgccaggtgctgggatacgatgtgccgcgtggtacgcaggtgctagtcaacgcctgggcactgggccgcgacgagcgctactggcccgacgcgcccaaggagttccggccggaaaggttcaagggggaggcggcggcggccgacttcggaggtggcgactttgcgttcctgccgtttggtgccggccggaggatgtgccccgggatggcgttcggcctcgccaacgtcgagctggcgctcgcgagcctgctcttccactttgactgggagtggtcggggccagagtcggcggagctcgacatgaccgaggcattcgggatcaccgcgcggcggagggacaagctcgtgttgcgccctgttctccgggtgcctgttcccggagtctagttgatatataactgtaagaattggatgtatattgtaaaaactgtaattatccttgcatagccaactatgtgtagcatataat

SEQ ID NO: 3081 - DNA, 685 bp, Triticum aestivum
caattaccgacaatgagttgtcgctgctgctgtgttgtctgggacaggaatttcgaaggccgtgtacacgcattgacccgagcaaattatctcgcatctcctccattggtttgtggcctatgccctcgctggcacggttaatattgattttgagaaagaaccagtaggcatctcaaaggatgggaaggaggtttacttcagggatatttggcctacctactgatgagattgctgaggttgttaaggcgagtgtgctcccagacatgttcaagggcacatatgaggcaatcaccaaaggaaatcctatgtggaatgagctgccagtatcagcaagcactctctacccatgggatccaaaatcaacatacatccatgagcctccttatttcaaggatatgacaatgacccctcctggcgcacggcctgtgaaggatgcgtactgtcttctcaacttcggtgacagtatcacaactgatcacatatccccagctggaagcatccacccagacagcccagctgccaaatatctaaaggagcgcaatgttgaaaggaaggacttcaactcatatggcagccgacgagggaacgatgagatcatggctaggggaacttttgccaacattcgtattgtgaacaagttcttgaagggagcaggtgggcccccaaaccatccatgtactaaccg

SEQ ID NO: 3082 - DNA, 684 bp, Triticum aestivum
ccaccaagtgcagccgcgcgtccatgcgctcgactacaagactccgcgcgcgtgccggcgtcgaagccggcccggcggccaacggcgtcgggcgccgggccgctgctgcggcggcggacgaggaaggggaggcggtgccgcccgagagagacgccgactctccctacagctccaaggcgacgacaacggaggaggaggagagtgctgggggtggcggggaggtcgattcggcgtcctctgcagccgcaacgctgcggaggccgtcgccgacggcggttgctggcccctcaccacgcgacaccagatggggtgacaccagctcctacggtgctaaaaagaagcatagagttttttgtcagcttccaaatggtgattgggccttatgcaccgtgattactacctctggtgacgagtctgtactaaaggttcctgaaggaaaagttctaagattgaaaacggagagccttcaacctgcaaatcctgaaattcttgatggagtggatgatcttatgcagctgagttatctaagtgagccatctgtgctgtacaacttgcagtacagatattcacaagacatgatttatactaaagcaggtccacttttggtggccgtcaacccttttaagaaggttgcactgtatggtaatgagtatattaaagcatatagcaacaaaacaatgacag

SEQ ID NO: 3083 - DNA, 684 bp, Triticum aestivum
tcacgctgccctaaaatcagcaatgttaccactgcatcaaccaaggacgagcatggcatgccgatgctagcagaagcactaccccggaaggtcgccgacccattcgactatggagggggaaacataaatcctaatgcagctgccgatcccggccttgtttacgacatcaatccgagggactacagcaagttcttcgcttgcacgattcagaaatacgctatctgcaacatctcgacatcgccggcatatcacctaaacctaccttccatagccattcctgagctaaggggtccaattaaggtgcagcgagcagtcacgaacgttggcgaggtcgactcggtttaccgagccgatatacagtcccccccaggagtgaggatcaaagtcgacccaccaaccctagtcttcaacgcgacaaagaaagtgcacgccttcaaggtcagcatgacgcctctgtggaaggtgcaaggggactacacgttcggcagcctgacttggcgcaatgagcaccactcggtgaggatcccactagcagtccggatcacaatccaagatttctacgccgatgttgcatagtaacgaagaatgttgtatgaaaaataaagattggtgatgttacggattttagcatgaatatagacgactatgtggtaattgtaattgtacttatacatcgtgaggtga

SEQ ID NO: 3084 - DNA, 677 bp, Triticum aestivum
cgtccgggggacttttcctcgcagactcaaggacgaggtcatgaagatcaagcccgttcagaagcagacccgtgccggtccagcgcactcgctttaaggctatcgtcgttattggagacagcgctggtcacatcggtttgggcatcaagaccagcaaggaagtcgctaccgccatccgcgctgccatcatcatcgccaagctcagcgttgtgccaattcgtcgcggatactggggcaccaacctcggtgaccctcactccatccccgtcaaggagtctggaaagtgcggttccgttaccgttcgtctcatcccagcgccccgtggtaccggtctcgtcgcctccccagctgtcaagcgtctgctccagttggccggtgtcagcgacatctacaccgctcggccggttcgaccaagaccctcgagaacaccctcaaggccacctttgtcgccatcaccaacacctacggcttcctcactcccaacttgtggaaggagaccaagctcatccgcagcccgctcgaggagtactctgacgttctccgcgagggcaagcgctactagatgtttcgttgacatttccgtattgacgatgatgatctggtggtgatggatgaatgaagatgtgggagaaggaggaaaaaagtactttgcagatacaagttagcttctttcgtct

SEQ ID NO: 3085 - DNA, 724 bp, Triticum aestivum
tctgggtgaaactacattgcttgcatttccgccgacatggctttcttaagttctgtaatgtgaagaaagagagctgtttctttcccatccctcaggcagcaggatgcatcttgcggatcattgagaaagctaatgccccagtaatatatctgtcgactgatgctgctgggagtgagacgaatcttctgcagtcgttggttgttttcaatgaccggcaagtacctcttgtgagaagaccagagcatgaaggttcggagaaatgggatgccttgttgtacagaaaacacatgggtggagatgatcaggtcgaggccatgctcgacaagacaatctgcgctttgtcgaacgttttcatagggtcatcaggctccaccttcacagaggatatcttccggcttaggaggggctgggggtcgatgtcctactgcgacgagtacctctgccagggtgagctacccaactacatagcggagctagagtgagaaattagtaccacatggtagagattcatagcggcattctttttcccttgacgtgctggtgatatacatatatcctgtaaattggcgtgtacaactaagtgtaaaagagttggtgatgtcttctgtatcagcgtcgtccaccgatttgtctgggcggcgttcgttattcttacacggttagagaatacaatgggagcctttgggttgtgcagtgttttattaaccatgtgtggcaagtgaaa

SEQ ID NO: 3086 - DNA, 652 bp, Triticum aestivum
gtccgtagcaggctaagagatcccggtgggcacacgcgtgctcgtcaacgtctgggctatcggccgggacccgactgtgtggggggagacgtccgcggaatttcagccggagcggttccttgggagcaaggtggatgtcaagggccacgacctggaactgctaccttttggtgctggtcgcaggatgtgcccagcccacggcctcgggctcaagatggttcagctggtgctggcaaacttactgcacggctatgcgtggagactccccgatggcgtggcggctgaggagctgagcatggaggagaagtttggcatatccgtgtctcgcatgcaccacctccacgctatccctgagcccaagcttctggatcacctctatttcgggccatgaatgttagtcccttcatttctaaatataagtttttttagacattccactatagaaactacattcaaatgaatatggacgtcttttagagtataggttcactgctgctccgtatgtagtctataatggaatcttttaaaagacttatatttaaaaacagagggagtactagctttaatttgatgtttgctcgagtgcatgtacacgtattggtttactttcacctcggatgtttatgggttgtactatgcattatggttatat

SEQ ID NO: 3087 - DNA, 646 bp, Triticum aestivum
aagatgctgagcagcaacccagcaaagttcttccgcaggagaaggaaagtcagtttcacaactctcttttttgggtcattctcttcgtctcatccgcgccgagagaccgaccatctgctctcaagaggtcttgcggcaacaggtggtccgagttatcctcaggcccatcacaacccactcgtcagggtgacaatcagctgccctgagaaggggaacactgctgggaagctcgtgatcttaccggggtcgatgaaggagcttcttcaactaggtgcgaagaagtttgacatgatgcccactaaggtcctgacaattgagggcgcagaggttgacgaggttgagctcatcagagatggtgatcatcttgttcttgccagtgatgactggataccagatgatacgcaaataggaggtaaaaattaggcatagaattgcgttttccggtttacaataattagggtgaagggggaatgttgaaccatgcttgtaacagaaaagccaatggtgaaaaaataactggaaatcaccaatggctactccacgacacgtctccaccgtgcaaaagatggtgaaatagggttatgtccagcaaggtatgccttgtatagaaattcttgtctgctgggcatgcagaattttcattgta

SEQ ID NO: 3088 - DNA, 645 bp, Triticum aestivum
gtagaggtgtttatcatcgtgactgaagcctgaaaacctgctagtggattgagtatgagaccctttagggtctctgattttggtttaagtgcgcttaaccaagtcaaagtggcgagatggtctgctccacaccgcatgtggaactccggcttatgttgctccggaagtgctcagcaggaaaggctacaacggtgcaagggcagatgtatggtcttgtggagtgattctgtttgttcttgttgccggttatcttcctttccatgaaagaaaccttatggagttgtatagaaagattgccaaggctgagtacagatgccctcgctatttttccactgagctgaaagagctccttaatgggatccttgatccagatcctaatactagaatgtccatcgcaaggataaagagaagcccatggtataggaagccggttgagagaacaccactgagaaaagacaagacttatgcgagcgaagctgctgcgtctggccttgcatgtcgcaacagttccgacggaccggcgagcatgaatgcatttaatatcatttccctcactcctgggttcgatctatctggtttgttcgatgaaagatatagccagagggaggcccggttgcttctcaaagagcggccagcagctgtatt

SEQ ID NO: 3089 - DNA, 640 bp, Triticum aestivum
cacacgcatattacaaccttctctgggaggtaatgcaaggactgcaatcatttgcacaatgagcccagcccgaagctacatggagcaatcaagatataccctactatttgcaagttgtgcaaaggaagtagttacaaatgcgcaggttaatgtagtcatgtctgataaagccctagttaagcatttacaaagagaacttgccaggttggagagtgagctgcgatgtccagcttcctattccagtcttgaagcgttggtgaaggaaaaagataaccacatccggaagatggagaaagaaattaaggaattgaaggtacagcgtgatctggctcaatctaggttgcaggatttgctccaggttgttggagacaaccatgtttcaaagcgtcccctggcttctgggaggaactttaccttcgatgtgccccagccatgtgaagatcggaaatcaacaaccgaatcatcatcagaagtagttgacaatgtccaaaacttcaggttccaaggacgccgcgcagcacaaagggaagttgggtctcaacagtctgaaaataatgtacagtttgctactccattgagttattcagtcagcagccctccattcagtgggatgcccccaaccactagcagagataacgtt

SEQ ID NO: 3090 - DNA, 640 bp, Triticum aestivum
acaggcggaggattggctccaggagcgcgcgcaatgcagcgaccagagggccgtcgactggggcgtgctcaagcaggaccccgggagctgctgcgcaagctggacgagctgagggaccaaatcacgcggtcctgccaggtcgccgagcagccacgggagcaccgtcgggcgggccgccggccgcccttgctccctgaccttcccgagtccggtacctctgcccgggtatcaccgcccacgctatggtgcccggtatgggcctggcttgccgctgagcccatgtgagccgcagcactctgatcatggggagaggtacgcgaggcagtcaagtgggcggtatcgccagtacccagggaggcagtggtgacaacggtgggattggacatgggaattaccatcagtatgcgtgtgctagtccgcattatctgcatggacagagggctgcgccacaagaagagcacataccaatggccagatacttcgctgggcagcatgaatgctaccgatttgaaaggtcaccatctatttcatcagattatgaccaaaggtctgtggcatcatcgctgtactcgcatcgctcggtgtcaaagcaaagggccgagtattttaggaagaaggcagaacatctctgccggccaat

SEQ ID NO: 3091 - DNA, 635 bp, Triticum aestivum
gcgcgtgctggagctacctgtgtacctcccgggcggctgaccataccgacgcgagcgaggagcgctggagcaagccggccgcggtcgccgcggcgaccctttcccctgtcttcctctcttgcctctggagccacgccaccgggagcccgcttctcgtcgtcttcctcggcagcatcgccggcttatccctgggcctcctcgccttcctcagcacggacgctgatgcaccgccgacgaaatttctctcggcctggctcgccggtgggttcgtcatgagcgtggcgtgggagtacgtcatcgcgaacgagctcctctcccttctcgtgtccgccggcctggtgctgggcgtggatccggcgacgctggggatgacggttctggcatggggcaactcgctgggcgacctcatcgcgaacgtggccgtggccatggcggggcgccgcggtggagctcaggtggccgtagctggttgctacggcgggccggtcttcaacgtcctcgtggggctgggcctgtctctgttgctgtcttgctgggtcgggtacccgaagcccgtaacgataccctgggagcccaggctttatcagacgctaggctgggtagcggctgggcttttgtgggccttcgtcatgctc

SEQ ID NO: 3092 - DNA, 633 bp, Triticum aestivum
gagcagatcttgcggactgctgctacacctggcataaaattcacagaggctcaggtcaagtgttacatgcaccagctactgtctggacttggtcactgtcatagtcgtggtgttttgcatcgggatataaagggtgctaatcttctgcttgacaataatggtgccctcaaaatagcagattttggtctagctacattctttaatccgaaccaaaagcagaatttgacaagtcgtgttgtaactttatggtaccgccccccggaacttttgctgggtgctactaactatggtgccactgttgatctctggagtgctggttgcatccttgcggaattgttgtcagggaagcctatcatgccaggacgaactgaggtggaacaattgcacaaaatattcaagctttgtggttcaccatcagaggagttctgggctaatttgaagttatcgcgtgctacaatcttcaaaccacaacatccgtatcgtcgttgtgtgaatgatgtatataaggacttccctccttcagctttggcacttctggaccgtttacttgctgtagaacctgataataggggtactgcggcttctgcccttgaaagtgaaggttgctgatttttgctgctctcctgttagatg

SEQ ID NO: 3093 - DNA, 628 bp, Triticum aestivum
catccccggcgcgtcggtgaccatcacggccacccaacctctgcccgcccaactacgcgctgcccaacgacgacggcggctggtgcaacccgccgcggcagcacttcgacatggccgagccggcatggctcaacatcggcgtctaccgcggcggcatcgtgccggtgctctaccagcgcgtgccctgcgccaagaagggcggcgtcaggttcaccgtcaacggccacgactacttcgagctcgtgctcgtcagcaacgtcggcggcgtgggctccatccggtccgtgtccatcaaggggtccaggaccgggtggatgcccatgtccaggaattggggggtcaactggcagtccaacgcgctgctcaccggccagagcctctcgttccaggtcaccagcaccgacggccagacgctcaccttccccaacgccgcgcccgccggctggggcttcggccagaccttcgccaccaacaagcagttctcttaagagacgatcataagtacgagtggtttattaatttatactccagcctttttgtgggggatgtatgtctttgatcagtgatcggtgtgtcgatcggtgtgaacgttcggtcatcggtgtgtcgatcgcggtgatatcttcgc

SEQ ID NO: 3094 - DNA, 691 bp, Triticum aestivum
agtcggtgaggaagtgcgtcttcacctcgtcgctgctggcctgcgtgtggaggcagagctaccctcaccgccaccggttccccgccaccgtcgatgagagctgctggagcgacgagaccttctgccgtgagaagaagctgtggtttgcgcttggcaagacgatggcagagaaggcggcatggagggcggcgcgtggccgggacctgaagctcgtgacggtgtgcccggcgctggtgaccgggccgggtttccgccggcgcaactccaccccctccattgcctacctcaaaggggcgcacaccatgctggcggagggcctgctggcgacggcggacgtggagcgggtggcggaggcgcacgtgcgcgtgtacgaggcgatgggcggcaccgccggcgggaggtacatctgctacgaccacgtggtgcgccgcgcggaggagttcgcggagctggagcggcagctggggctccggccgagggcgccgccgcccccggccgccgcgccgccgtcgttcgagctctgcaaccggaagctggcgcggctggtgtcctcccggaggcggtgcacccacgacgcctacctccccgtcgcgtacgactgacccggccgggaggaggagtcgccgcgtgggaggagagaaaatggcgtgcgttgtacagagttgtgccccagtgaataataaagctgagc

SEQ ID NO: 3095 - DNA, 711 bp, Triticum aestivum
gtatcattatggcaaccaaggccacctgagggatacgtggctctggatgtgtggctgtttctgctttcgaagagccccctcttgattgcgccttatgcgtgaatgagagatttgcggaggatgcagtgtttgaggatcagatagtatgggcttcctcagatgcttacccatggggatgctacatttaccaagttcagagcagttcgctgcaattcatggcactccgtcttccaaaagagcagtctgagcagaagcctaagaagatcttggaggcgtatctccagcgagcatcagattaatgatcctatgaggcgaagcagacatgccatgcatcggagacatcaggagcggtataatactccctccatcccgacactatgatagtgtaaaaaatgatctcacattttgggacggagggagtatgatatagggaaatgagaaactttgctatgcaaaagagaagactcagcaatcttgcgcaagatagtttgtctttgatatgaaatattttcgtacagttttgggcggcattatgttattgagcatggcatttttgcggggagagataatgtgctagcctggctttgtttttcggctgttgctgggatttgtatctctgcttgatgcttgtcaatagtgtaaactagtaggtgggaatggctgtaagtgtacattttgtaacgcgttgttatagtgctctttctgctgtgg

SEQ ID NO: 3096 - DNA, 588 bp, Triticum aestivum
acaagacaattcctgttcggtacagagtcagaggatttcctgcaggcatgatgggaagctgatggatagggtgctggcatcatgcattctgtgtcatcttctttcttgctgctatgttgctcttcttcgcagtccagggtgattccatgaagctacaggctatatgtactcttgggctgttagtgttctataagttgctgccgtctggaagtgatcgcttccagccgtccttgttagaagggatgcagacagttaatagctttgtagatggtccaacggattatgaagttttttcacaacctgacctggattggaatctgtatcaatcctgaagaaaactcaagccatccttgttcatagagacgcagacagttaaatagctttgtagacagtccaacagattatggagttttttcacaacctgacctggattggaatctgtatcaatcctgaaggaaaaactcaaggtcattttaaagtcgcctagtatcactggagcttcacattgtacagctctcattcttttgtactgttatgtattaactctttttttttctagctggaactgtttgttttgcaaatgacaaa

SEQ ID NO: 3097 - DNA, 645 bp, Triticum aestivum
tacagatctatgaacatggcgaggaaacaaatggtctgatatcgcctctaatgtctgagagagaagacagtgacattctgaatggtttcgaggggcatgatctttccatgtacccaataaaccggagcttccacatgccaaagcagaaattcgactttgcacaatactatgcatttgacatcacaatattcgcgctcacgatgatctactcactgttcgctccgcttgtggttcctgtcggtgcagtatactttggctaccgttaccttgtggacaagtacaacttcctgttcgtgtacagagtcagaggatttcctgcaggcaatgatgggaagctgatggatagggtgctgtgcatcatgcaattctgtgttatcttctttcttgctgctatgttgctcttcttcgcagtccagggtgattccatgaagctgcaggctatatgtactcttgggctgttagtgttctataagttgctgccgtctggaagtgatcgcttccagccgtccttgttagaagggatgcagtcagttaatagctttgtagacggtccaacggattatgaagttttttcacaacctgacctggattggaatctgtatcaatcctgaagaaaactcaaggtcaatacacacttgtttcatt

SEQ ID NO: 3098 - DNA, 783 bp, Triticum aestivum
cttctttagtagttcaatggcctatgttgttgttcgacccacattgggtgggattaacatacagagttgctgctcttgctatcatctatttttactgcctcagaagccccttgaactttgttgaaaaatctggggaaacatcaatgacttctctggcaaacgagattatttctagtgttacctgttgccatacttgatgctaccttcatcatctggatattttcatccctctctagaactctagagaaactgcagctgcggagaagcatggcgaaacttgaattgtatcggaagtttacaaattctctagctatgtcagtggttatctcaattgcttggattggctatgagctatatttcaatgcaaccgatccattgagtgagctttggcgaagggcttgggtcatccctgccttctggaatgtcctctcatatgtccttcttgccatcatatgcaccctttggtcaccatctcgtaatccaacaggatttgcatattcagaggagacaggtgatgaggctgacgaggaaggactctctcttgtaggcagtgctgttaaaggaacaggagatattgtgaacatgcatgtgtttactgaggataaacgtgcatgagaagttattgacttagtgcagctgtactccttgtggaatactatggaatgtaatcttgtgttatccaagcatgcagatagcacttttgactttgagcgccggaggcaactgcctctcaaatatggttggataacaagttagtacatagcatagtgaatttggattaga

SEQ ID NO: 3099 - DNA, 785 bp, Triticum aestivum
ggccagaatctcctctcccatcactcatacagctaaccagggcagagccatctcctttgctcactgttcacttagttgatattctctacagttactgcttcacacttcgcctctacatggtgattggcagtctgatcctttgggtcgcttcaactgttgccttgtctatgtcgaaagtcatgggggacggcgctaaacctgagacagtatctgaagcgctcacaacatgcatagaggagacatgctccccagcttacaggcacaccggaggtttcaggtttgctattggacttgtggatgatatcgtcacaatcctctccttaggaggcaatgcagtggtttgtgcattgtgtgacttccacaggctcatccaagctggtgagagcatcctcaaggaagacaaaatgggcgagacggaaaaggcacagagcttcaaaaagctccatgccgcgggtaggaagctgttcttcatgacatgctgggctcatgagcagccaagtgaggcctggccatcgttggctcgcatcgttgaggtgcagaaagtggcttttgaggagcttgacagtggaagcggactgaggaaggcaggtagaaagaacaacccacagtccaaggttcttatcgaggaggtgtaagcatatcaacgcagtactgctggaataaccgcactttgttttctcgccacccttttggtatctcccagctgtatcatttgatccttgtgcccttcttcatcttcaagtgcagtggcttaaatgtataaactgtcatctttggaagatgtg

SEQ ID NO: 3100 - DNA, 607 bp, Triticum aestivum
ctgaatagcatttggacagatacttcttgaccaatgtcccccttcacccttcttcttctccttcagtctagaactgcgtggttccattgtcccaatggacgggtccctgatgcacattgacagtgcaagttcgtaaagcagttgatagtgcgacagcatgggaggttgattgattgaggctctcctgactgctgcctctttcgctactctcaaccattcaggagtagctatatttgatgcctcaccgcagttgaaaccatggctgaaaccgcagtgatatgatcctgggaaggtgaccacgaactcccctgcattctgcaccaacctgcagcagggcacccccgagccgacgagcaattcaggggacagcagggtcgttttctgccccagcgtcgcgaatgcttctagggcgttcacctccccggcgtagccgtgcacgcgcacgacgtcctcgaaggcgagcgcggcgtcgcgcggcaccccgtaccaggtcttggcggcgccgaggtgcatgtagttgaggctgtggaggtcgtggtcctcgacgtgccaggcgaaccaactgaagagcatgccgacgtagagcatgggcgtgggaccccaggca

SEQ ID NO: 3101 - DNA, 606 bp, Triticum aestivum
tcgtgcgcgcgttcccagatcggacgctgcagctcatgaccacgcacacgccggagttcctcgggctgaggaatggcaccggattttggagcgacgcaggctacgggaaaggagtggtcatcgggctgctcgacaccgggatctatgcaacacatccttcgttcgacgatcatggtgtccaatcacccccgacaaggtggaagagctcgtgcaaggcggtcaggtgcaacaacaagctcatcggtgccaactcatttactggagataacgactcgtacgattacgtggggcacggaacacacacctcatccactgccgccggcaacttcgtcaccgatgcgtcagaccatggcgtgggcacgggcactgcttccggaattgctccaggtgcccacatcgccatgtacaaggtgtgcaccgccgagggctgcgaagaatccgccgtagtggccggcctggatgcggccatcaaggatggggtggacgtgctctcgctatctctcagtagcctcaccggtgtcagcttcaataaggaccccatcgccatcggcgcgttcagtgctatatccaagggcatcattgtggtgtgtgcggctggcaacaaag

SEQ ID NO: 3102 - DNA, 634 bp, Triticum aestivum
cgacgcgtggggcaaagcggacctccgcgcccacgagcgcaacatctgcaccgacgagtcatgcggcaagcgcttccagtcgcacaagtacctgaagcggcaccagtgcgtccaccgggacgagaggccgttcaagtgcccctgggagggctgcgggatgaccttcaagtggctgtgggcccagaccgagcacataagagtccacacgggagagcgcccgtacgagtgctcggttgtagactgcgggcagacgttcaggtacgtctcggactacagtcggcacaggaggaagttcaatcactactgatttggtcgtcgcagcgctgtaggggggcaaaggctcctcctctggctggtgctgctttgtgtgttgaggtacgttcgtccttcgtttgttgtagcaggctagcagctcacgtatttaattaaccgaccggcggctagtgttaatcccgttcgttaacaatgtgccaagtgtagtctaggaagtagagatagattggggggtaaaaggccagatggcccttcattctttttctccgtcaagtccagtcatgtatgtaatccctttataaagttttatcaattcgatgatgccgaaatctccctcagttgagtgatgtatctaaactaa

SEQ ID NO: 3103 - DNA, 599 bp, Triticum aestivum
gggtatgaaatggtatgtcatgcgatatttcaccacgcgcccagtagtatgaagcaactgatccagcaatttacggtcgaagagcatgcgatgaagaattgtgttgcccagtaacagccaaacaggtggaaaagaatcgcaattccaatatgaggggtgtaatggacactgtacccgcaacagctgtcacaatttacttttcccagcttgagatcaaatgagcagcactctgcattgcaatcattttgtagaacttgaccagagctgaaaagatacagtgtcgccgcaaaccagaacatatagatgatagcaagggcgaagtatggtacgaccggaaagatgatgagtgcatggacttcaccaatgacctttgcagccacctttaggacggttgtggatgtcgctatcagtatacgccgaacaatagctattgaagtcaggaaagcaatgatcattaccactgtcatcaatacagcagcagcatgaaggtggtttatttcccgtccacctatgctgacatatggatcacttggaccaatcacaacagttaagggatcattgccaatccagccagcttttatatagaagaacatcgtgac

SEQ ID NO: 3104 - DNA, 594 bp, Triticum aestivum
  N_region (98)..(162): n = any nucleotide
tgtcggattcattcttgtacagggagttggagaacggcgtgctctgggaagtagatggacaatgggtcgttcaaggtgcagttgatgtggacattggnnnnnnnnnnnnnnnnnnnnnnnnnnnnnnnnnnnnnnnnnnnnnnnnnnnnnnnnnnnnnnnnnccgtgaaggtgattgacattgttgacaccttccgtcttcaggagctaccagcttttgagaggaaggagttttgcacttacatgaagcgctacatcaagaacctcagtgccaagcttgaagatgaggaacaagaatgtttcaagaacaacattgagtctgccacaaagtttcttcttagcaagctcgcggattttcagttctttgtgggcgagagcatgcatgatgatggcagcctggtgttcgcctactacaaggacggagctgctgacccaactttcctctacttcgcacatgggctgaaaaagatcaactgctaattacgctgtatgctaaaatatatatgcagtcgtcagtactattgctcttgtctatggtcgccagcctactctccaatgttcgtgccgaaactatcacaagtttagtgtattaatg

SEQ ID NO: 3105 - DNA, 591 bp, Triticum aestivum
ggaccagcgtgtcacttagagcaagagttaacggaaatgatccttctgtaaatttagtagttacttggttcaacaagacaccgccaaagttatatgactttgaaagcttcatcaacttcaatgataatccactgagcactctagtcctcagagccagatcatcaaaatcttgtcggaagtggaaagtaacactatcaataataactattctcacatctttatgttctccgaggaatttctccagatagtttatcaccgcaatctgttcagtgtagctgcatattcggaagtagtagattcctgccaggaaactctcgggctgcagattttcttggccagatgacgacttgtcatggtggcatggaaaatactccattatgtcactgatacacccttcagcaatttgatagacgcgttcaaccatgaaactgccctctgtatcaatataaattgctttgccgccaaggccaccatagtccacgggaatttggacgttgattgcatagacatgaatccaccagattgagttttaccaaattcctggaaccccacctatctcagtaacttcatttacaatgaatccctccacca

SEQ ID NO: 3106 - DNA, 577 bp, Triticum aestivum
tgtacgggccctgggggcggccggacatggcctacttctccttcacccggtacatcctccaggggaaagcccatcaccgtgtaccggggcagggaccacgtggacctcgcccgggacttcactctacatcgacgacatcgtgcgggggtgcctggcgtcgctggacacggcggggcggagcacggggacgggcgggaggaagcgcgggccggcgccgtacaggatcttcaacctggggaacacggcgccggtgacggtgccgacgctggtgtcgatcctggagcggtacctccgggtgaacgcgaagcggaacgtggtggagatgcccgggaacggggacgtgcccttcacgcacgccaacatcagcctggcgcgggagcagctcgggtacaagcccaccaccagcctcgagatggggctcaagaagttcgtccggtggtacctctcctactacgggtacaaccggggcacgcaggcattcaacaacttgtgatgactcatggtatattagcattggtgtatagtatgtagtcgtacatttgtatgtatgtttgtacttttcttttttgcgtggttg

SEQ ID NO: 3107 - DNA, 569 bp, Triticum aestivum
gctgaaggagtgccaagtacatcagtcatgagatccaattgatggacaacattcttccctggaaagagtggcctccctgtgagcatttctgcaaagatacaccctacgctccaaatatcaattgcaggtgtgtactttgagaaaaaagagccacacaattctggagcacgataccatctagttgcaacatagtccgtccagaatatggctgatggagccccgtcattaaatgatacacgggcaagcccaaaatcacaaatcttcagcttgcagtcagcattcgctagaatattcttgggcttaagatcccgatggaaaacactcgctgcatggatgtacttcattccccggagcagctgatacaagaagaactggtgatgctctggtgtgagatcatcgttcgcttttattacctgatggagatcggactccatcagctcaaagaccacatatatgtccctgaattccctccttgaaggggggagcataatgtgcttgatctgaactatgtccgggtggcgcagcagccggagcaacttgatctccctaaggatgcgggtggcatcgga

SEQ ID NO: 3108 - DNA, 569 bp, Triticum aestivum
ccagtccatatctcggagataagtttccctccgtcggtgactttgtgcagatctaggccttcgtgtgatttcgcgtcatcctcttcgtagtcctgaacataaatgaagaacttcctagcgcggcgcttttcaaacaggcccattaggttagatttcaaggcttcaacatctgtcgcagggactttgtggatcttcccgttgttgtacacgaagctgccatcgacggccttgaagttcagatactttgtcacgctcgtgcggatcaaaacacggaccaatgcaccgttggccatcatgaacttgggcaccatgtcgacattgtactccttgctgatacccagatgttctggagtggtagtcgctgcctttgaatctcttccagatcttggccagattcagggatgtagattctccaccgtagtagtcattccatgtccatgatgaagaaccttgaggccatcgacaggagaggatgccactgaggatgcacatccattgagccccgtccccagcacagatcacgtcagtacaggcaacaggcagacataatatttttagccagcctccat

SEQ ID NO: 3109 - DNA, 706 bp, Triticum aestivum
agtaagccaagaaccagtactgtttcaatgacacaattcgtgccaacatagcatatggaaagcgaggagaagctactgaagaagagtataatcaccgtggccataggctagccaacgctcatgagttcatatcgagcttgccacagggtatacaacactaacgttggtgagagaggaacacaactatctggtgggcaaagcaacgggtagctattgccagggcgatcttgaaggaccctagaatacttctgctcgacgaagcaacaagcgccctggacgctgaatcagagcatattgttcaagatacactggaccaggtaatggtcagcaggaccaccattgtcgtagcacaccgcctctcgacgatcgaaggggcagatatgatcgcagttatcaaagatggttcagttgccgagaaggggaagcatgaatctctcatgggcatcaaggatggagtctatgcatcactggtcgaactacactcgaaggcggcataaggggagttgcagatatttaaagttcctttcttgtttcccgaactaccaaatgaaaaatgcatgtgtcagtttgtattacataaattttaagggcattcgcctgtaattctacttctctatttgttgggcctaagacatcagaggccagattggcccagcatgtgtttcagactttcagttgttgtggggtactagatatctacgcatta

SEQ ID NO: 3110 - DNA, 553 bp, Triticum aestivum
  N_region (459)..(492): n = any nucleotide
gcttgaactacaatctaataatccttggctctcatgtagttcgtccacaacgaacagtgaaatctctagaagctccaagagattcgctttcgcgtggtaaatccttagcatggcgaggcatctccaccgccggtgagaaatccagctagggtttccgcccccgttgacccgatgggcccgggcgcgccgtcgccggaggacgccgcgggcggggagccggaggcgtggtacggcagcatccagtacctcgtcaacatctcggcggtgggcgccgcctcctgcgtgctcctcttcctcctcgtcaagctccgcttcgaccaccgccgcatcccggggccctcagcgctcgccgccaagctgctcgccgtctaccacgccacggcgccgcagatcgcgctccactgcggcgccgacgccgcccagttcctcctcttcgagcgcgcctccttcctcgtcctnnnnnnnnnnnnnnnnnnnnnnnnnnnnnnnnnnctgccgctcaacctgctcgccggggacgccgccataagccgaccagttcgccgccaccaca

SEQ ID NO: 3111 - DNA, 701 bp, Triticum aestivum
atcatcgttaatggagtgtccggtaccacattgatccttaccagggtgacaaggcctctgctctgctagttgagttctttgagaagtgccaggttgaccccatgccactggacgaagatctcacagggcgggcttcagcgtattgaggagaaatacacctggaagctttactctgagaggctgatgaccctaaccggcgtgtatgggttctggaagtacgtctccaacctcgagaggcgcgagacccggcgctacctcgagatgctgtacgccctcaagtaccgcaccatggccagcaccgttccactagctgttgagggagactccgcgagcaagtaatctggccacctcctggccgaaagaagggtgacttggatttctgaaagattgagatttgagaatgatttggtttacgtcctaggcgctgcccctttcaagatttaaggttgagtaattggtgtgctagttttgtttagtagttggagtgagtcgagacagaggaaaatgtggtgtgtgacaatcggttggttggtgcttatcgtttttcttggatgttacccttgaataataggaacggacttggcgccgtttctgaaataataatagtagcatccttcctcgtttccaagaaaatcttttgtcactgctgttgagctctgtaacctctgttacctaatacaattactagatggttcattaca

SEQ ID NO: 3112 - DNA, 546 bp, Triticum aestivum
ccaaatgcatcatataatatcgctgctatcctatccctctgggcccctgttctgttggtctatttgatggatacacagatatggtacgccattttctctacaatatccggcggtatgtctggggcacttggacgacttggggagattcgaacactaggaatgctgagatcacgatttcactctttgcctggagccttcaatacatatttggtgccatcagacaaaggcagaaacagacgtttttcactctcaaagcgcttcgcagaggtttcccccaacaagagaactgaagctgctaagtttgctcaactgtggaatgaagtgatttgcagtttccgtgacgaagattttataagtgataaggagatggacctattggtggttccatactcgtcagacccgagcctaaaattgatgcagtggccgttgttcttgcttgctagcaagatacctatagctttagacatggcagcacaatttagaccgagagacagtgatttgtggaggcgtatatgtgcagacgtgcatatgagagtgcgctgtaat

SEQ ID NO: 3113 - DNA, 544 bp, Triticum aestivum
ggcgcaagagactctgaggaccgactgatggacatcctatcagaggaaggacagatcattaaatgtcacacatgacaataatgcaaaaagtaagtctgtgtatacgagagagatagtacccatcgctttgcagcgcgatcattggcatggtcgtcagcatcacttttcagtaaacagttaagttgagactgaacagtatccttttcttctatcaattccctaagctgtttttccagctgaaaagagaatggagaggtacatggtgcatgaaattgtgcagtcctgcaattaacactgtcacaagggttggaaaatttcagatgcttcagtagtgctttgtcagacatcactacattgacctgtgcatttgtaactacctcctttgcgcaagtcgcaaacagaagtgtgttcctggattgctcaatatgagtgtgtgcaggactcattgtgcagacaatggctgttcttgcattgcctcccaaagaggactgtaatatgcgtgtcagctttgaatctctgtaagggatatggccatttcttccct

SEQ ID NO: 3114 - DNA, 525 bp, Triticum aestivum
gcgccggagcagtcgggcgaccacaagcgcctctcgcaggaggcagacgtgtacagcttcggcgtgctcgtcctagaggcgctgaccggcaaggtgccggcgcagcacctgcagccgctgccggacgcagccggcaacagcgcacagaggaaagacaagcaggcggctgtgagcctcccggagtgggtgcggtcggtagtgcgggaggagtggacagcagaggtgttcgacgcggagctgctccggtacaagaacatcgaggaggagatggtggcgctgctgcacatcgcgctggcgtgcgtggcgcagctgccggggcagaggccctccatggccgacgtcgtgaggatgatcgagagcgttcccgtggaccagtcgccgctcccggaggaggatgtatcaatgtcgccctccattggcatcaccacggacgatggtctcagctactagttttagttcagtatcagctttcctcttccatagctagtagtagcattgaactgaggttgcttcggtcaagtacct

SEQ ID NO: 3115 - DNA, 587 bp, Triticum aestivum
cgcacccattgcccgcctcggcgggtacatcgcgccggagcagtcgggcgaccacaagcgcctctcgcaggaggcagacgtgtacagcttcggcgtgctcgtcctagaggcgctgaccggcaaggtgccggcgcagcacctgcagccgctgccggacgcagccggcaacagcgcacagaggaaagacaagcaggcggctgtgagcctcccggagtgggtgcggtcggtggtgcgggaggagtggacggcggaggtgttcgacgcggagctgctccggtacaagaacatcgaggaggagatggtggcgctgctgcacatcgcgctggcgtgcgtggcgcagctgccggagcagaggccctccatggccgacgtggtgaggatgatcgagagcgtccccgtggaccagtcgccgctcccggaggaggatgtatcgatgtcgccctccattggcatcaccacggacgatggtctcagctactagttttagttcagcatcagctttcctcttccatagctagtagtagcattgaactgaggttgcttcagttaagtacctgtgcttggtgatgttctgggttgaaatgcat

SEQ ID NO: 3116 - DNA, 558 bp, Triticum aestivum
tttttgcgctcgccgaccgggagcggcggtccggcgccgcgggagggcagggtcggtctccggacggccttggagcgcagatccggcccgcccggcaagcggcaatgcagcaggcgcagcggagcaagagttcggcggaggtggacttcttcacggagtacggcgacgccaaccggtacaagatccaggaggtcattggcaaggggagctacggggttgtgtgctctgcccttgatctgcagaccaggcagaaagtggccatcaagaagatacacaatattttcgagcatacctccgacgcagcgcggatcctccgcgagatcaagctcctgaggctcctacggcatcctgacgtcgtcgagatcaagcacattatgttgcctccctccagaaaggacttcaaagacatctacgttgttttcgagctcatggagtctgatctccaccaagttattaaggccaacgatgacttgacaaaagagcattaccagttctttctctaccagctactccgagccctcaagtacattcatactgctagtgtttaccatcgtgacc

SEQ ID NO: 3117 - DNA, 916 bp, Triticum aestivum
gagaaggagaagaagaacagatgacatcggaggagaagaaagcattgcgggaagagaaattgaaacaagaggagaagtatatgtgggctgttgttgatggtgttagagagaaggttggcaatttcagagtagaaccaccaggcttgttcaggggacgaggagagcatcctaagatgggaaaactgaagagacgtattcgtccaagtgatattacaataaacattggaaaaggcactccagtcccagagtgtccaatagagggacaaagctggaaagaagtcaaacatgacaatactgttacatggttggccttttggaatgacccgattagccaaaaagatttcaagtatgttttcttggcagcaagcagctcactaaagggacagagtgacaaggagaaatatgagaagtcccgaaaattgaaggatcacatacacaacattcgtgtaaattacacaaaggatttcaatagcaaagatgtctccaagaagcaaattgcattggcaacatacctcatagataaactagcccttagggctggtaatgagaaggatgatgatgaggctgatactgttggttgttgtacgctgaaggttgataatgttacctgcgtgcctccaaataagcttcagtttgacttccttggtaaagattctataagatatttcaacactgtagaggttgaattacctgtatacaatgcgattgaggaattccgtactggcaaaaaggctggagatgctgtctttgaccagcttgatacaacgaaactaaatcatcacctgaaggacttgatgcctggccttactgcgaaagtgttccgtacatataatgcttcgattaccttggatgctatcttgcacgaagaaacagaagatggaacccttcttgaaaggattgctgtctatcaacgagc

SEQ ID NO: 3118 - DNA, 784 bp, Triticum aestivum
ccccatgtctgtcagtcccagactgcacaagctcctggccgacgatgtcgtcttcgtcaaccctgaaggccagtgcagctatgggtatcttgcccccgagtacgccaacacggccgcttcaccgagaagagcgacgtcttcgcctttgggatagttgttctccaggtcatcacgggcaggagggccgtctcacaagtgaaggtaggcacagcgtccagcgatctcgaaggcctgatagatccataccttggcggcatcttctcgacgactgaagctgccaggcttgcagaggtcgctgtgcattgcacgtccgaagcagcgagccagaggccgaccatggaggctgtggttcagcaactcagcggctgatgccgtggatcggaaccgagctgatgaagatgtctgttgggaggccttttgtagtagtaagctggaggacagtgatgatccagttgccacccaatgaggtctgaggtcttttgtagtaataatctgacctgctaatgtggaacatgtcgccattaactatttagtcactttcctggtgatctcaccatttctaagtatcacaatctcttcacaacttgaatgctgaaagattgtgtatcaatgagattgacttgaacccttggttagctagatcagcatgccaaaatgttgaatgtgtgagccatttggttcagggattttagcatctgtggtgtaaactttgatggctttgtgctactgccatagtgccatagcctgcattcaagtgctctgccatatgtttaaagcatggcaa

SEQ ID NO: 3119 - DNA, 1321 bp, Triticum aestivum
cgcgctggtgcaagggaagatcgaggtggtgaaatgctcgctgctcggctccgtgctctccaacctgcttctcgtccttggcacctcgctcttctgtggcggcatcaagaacctcggggccgaccagccctacgaccggaaacaagcggacgtgagcacgggtctgctcaccctgggcgtgctgtgccagtctctgccgctgctgctgcgttacgccgtcagctccggggagcatgctgtcgccactgacaccacggtgctggagctctcaagggcctgcagtttcatcatgctcctcgcctacttcgcctacctcttcttccagctcaagacgcatcgccagctcttcgagccgcaggagattgagggcggcgatgatgatgaggaagaggcggtcctcggctttgggagcgcgctcttctggctcatcctcatgaccatcataatcgccgtgctctccgagtacgttgtcggcaccatcgagccgacctcgcagtcgtggggtctctcggtgagcttcatcagcatcatcctgctccccatcgttggtaacgcggcggagcacgccggagccgtgatcttcgccctgaagaacaagctggacatcaccctcggtgtcgccttggggtcggctacccagatctccatgttcgtggtgccattgagtgtccttgtcgcttggatcatggggattcagatggatctcgacttcaagctgctagagactggctctctcttcatctcggtgctagtgacggccttcaccctccaggatggaacgtcacattacctcaagggagtcctcctcctcctatgctacattgttatcggcgcctgcttctttgtcacgagacaaccagcacctcacgcgaacaacaacggcacgctgctggatgtcccaacgggtcccatgattgtccaggtcgcataagtactgattgattaagagggctgcctcggcaaactggcatgcgtgcaagacagcgaacgaagtgtttgagcctgaagccaccaaattctgtctatcatatctgggcataactgtgccaaggaagattcaggaagagaattccccgtgtcagagtccccatccaaaaggaatcggttgattagttgttgccagaaaagcatgcaattgtaccagatattttctttattttctcgaatcgtacgtactgctagctatttttattgcttcttgtatattgtctaggctgttcgccgtgcaataagcctagctcatatgcgtctagccatatgtatacatcggcaacagtgggttgttacagttatgcggatcagtatgatatatgtaatgatg

SEQ ID NO: 3120 - DNA, 605 bp, Triticum aestivum
aggagaggacggttgtcttcttcagggtgttcaagaccaacgacaccaattacgtctgtcctcatgtgtaatgacccaacaaggtctgtattatgagtcgcagatctacaggccgacctttgcgggcttcgtcaatgtcgacatagccaagaccaagaagatcgccctcaggacattgattgaccattctgtggtggagagcttcggggccggcggaaagacgtgcatcctgacgagggtttacccgaggaaggccatcggggacgacgcgcacctcttcgtcttcaacaacggcgagtcggacatcaaggtcaccattctgtggtggagagcttcggggccggcggaaagacgtgcatcctgacgagggtttacccgaggaaggccatcggggacgacgcgcacctcttcgtcttcaacaacggcgagtcggacatcaaggtcaccaaactgcacgcgtgggagatgaagacccccacgatgaacaagctgctggagcagtagcagcggcctagaggatcgaggagtagaagtagcctatcctagccatagctagctagcttattagtttcgctgagatggatcaattaggagaggctgaagtt

SEQ ID NO: 3121 - DNA, 653 bp, Triticum aestivum
tctgggagaactagtcgttcatcgttgctcttgtgtactgcgtcacgggcatcggctacaccttcgccatcttcttccagccaggctccgcacaactgtggtctgcactgctcccagtcgttctcaccttgatagcaactcagcagaaggacactatcatagctgatctttgctacacaaagtgggctctggaggcgttcgtgatcgccaatgctcacaactacaccggggtgtggttgataacacggtgcggctctctgcaaagtaacggctacgacatcagcaacaggagtctctgtttatgggtcctcgtggccaacggggtgatcttccgctgcgtagccttcttctgcatggtagtcttccagaagcactgacccctctgtcgatagatccgttcatcgattctttctttctctgcgtaacagaaaaatgtacaattgttagagctttctgtctttcacagcatgcatgaggtgtagataagaacaacagatttacctttttcttgttgtggagatgtaaagagcaggatgttgagtagcagcaggcagctggtcaggaatgccctaatttttatgtagaggcgtatccattttcagattagctgatgatagcacatgtcagaggtacacttcagttgtgcctcagcc

SEQ ID NO: 3122 - DNA, 711 bp, Triticum aestivum
aaggagagcaggccccccagactcaggagaagaagctcatcctgagatcaagaaggtaccaagcaaggacagatgggagctgtgaaagttatggcaaaggaccttattcgcacaaggcatcagatcacgaaattttatgccctgaagtcccagttgcaaggtgtatctcttcgtattcagaccctgaaatcaacacaagccatgtcacagatgaacaggcagatgaatctaccggcactgcagaagataatgcgggactttgagatgcaaaatgagaagatggaaatggtcagcgaggttatgggtgatgccatcgacgacgccttggagggtgatgaggaggaggaagaaacagaagagctagttagccaggtcctcgacgaaatcggcatcgacatcaactctgagcttgtcaaggctccggctaccgcagtcgccatgccggttgcagcgggaaaggcgcctgttcaagctgaagctgcgggcgggatggacggtggaatagacgatgacttgcaggcacggcttgataacctgaggaagatgtgagcattgacggattgtccacgcccgcgcaattctctgtagttttgtaccatataaatgccactccggcaaatctattgacatatcatttgcagtgtgtttggcattgaccatctgtatatagacagatcatcatattttcaataagtcacatactaggcttgg

SEQ ID NO: 3123 - DNA, 702 bp, Triticum aestivum
tcgctgagtcaagaaggtagccaagcaaggacagatgggagctgtgaaagttatggcaaaggaccttattcgcataaggcatcagatcacgaaattttatgccctgaagtcccagttgcaaggtgtatctcttcgtattcagaccctgaaatcaacacaagcaatgggggaagccatgaagggcgtcacaaaagccatgtcacagatgaacaggcagatgaatctaccggcactgcagaagataatgcgggactttgagatgcaaaatgagaagatggaaatggtcagcgaggttatgggtgatgccatcgacgacgccttggagggtgatgaggaggaggaagaaacagaagagctagttagccaggtcctcgacgaaatcggcatcgacatcaactctgagcttgtcaaggctccggctaccgcagtcgccatgccggttgcagcgggaaaggcgcctgttcaagctgaagctgcgggcgggatggacggtggaatagacgatgacttgcaggcacggcttgataacctgaggaagatgtgagcattgacggattgtccacgcccgcgcaattctctgtagttttgtaccatataaatgccactccggcaaatctattgacatatcatttgcagtgtgtttggcattgaccatctgtatatagacagatcatcatattttcaataagtcacatactaggc

SEQ ID NO: 3124 - DNA, 722 bp, Triticum aestivum
caggagaagagctcatcgctgagatcaagaaggtggccaagcaaggacagatgggagctgtaaaagttatggccaaggaccttattcgcacaaggcatcagatcacgaaatttttatgccctgaagtcccagttgcaaggtgtatctcttcgtattcagaccctgaaatcaacacaagcaatgggagaagccatgaagggcgtcacaaaagccatgtcacagatgaacaggcagatgaatctaccagcactccagaagataatgcgggactttgagatgcaaaatgagaagatggaaatggtcagcgaggttatgggtgatgccatcgacgatgccttggagggtgatgaggaggaggaagaaacagaagagctagttagccaggtcctcgatgaaatcggcatcgacatcaactctgagcttgtcaaggccccggctaccgcagtcgccatgccggttgcagcgggaaaagcgcctgttcaagctgaagctgcgggcgggatggacggtggaatagatgatgacttgcaggcacggcttgataacctgaggaagatgtgagcactggactctgacggattgtccacgcccgcaattctctgcctgtagttttgtaccataaatgccactccggcaaatctattgacgtatcatttgcagtgtgtttggcattgaccatctgtatatagacatatcatcatattttcaataaatcacatact

SEQ ID NO: 3125 - DNA, 1017 bp, Triticum aestivum
gacgaatcaaccaacccactataaccaatccgcgtcaacagctcaacacccatctcctctccggcgtatctaatcctccaccatccgacgcgcaacaggaaggggaacagccagatcgatccgtgggactcacagtccagcccaatccaggcagccggccggccggatccgacctccgcccgccgccatgagcttcctcttcggcaagcggaagaccccagctgagctgctgcgggaaaacaagcggatgctagataagtccatcagggagatcgagagggagaggcagggcctgcagactcaggagaagaagctcatcgctgagatcaagaaggtggccaagcaaggacagatgggagctgtaaaagttatggcaaaggaccttattcgcacaaggcatcagatcacgaaattttatgccctgaagtcccagttgcaaggtgtatctctccgtatccagaccctgaaatctacccaagcaatgggggaagccatgaagggcgtcacaaaagccatgtcacagatgaacaggcagatgaatctaccagcactccagaagataatgcgggactttgagatgcaaaacgagaagatggaaatggtcagcgaggttatgggtgatgccatcgacgacgccttggagggtgatgaggaggaggaagaaacagaagagctagttagccaggtccttgacgaaatcggcatcgacatcaactctgagcttgtcaaggccccggctaccgcagtcgccatgccggttgcagcgggaaaggcgcctgttcaagctgaagctgcgggcgggatggacggtggaatagacgatgacttgcaggcacggcttgataacctgaggaagatgtgaacattgacggattgtccacgcccgcgcaattctctgtctgtagtttcgtaccataaatgccactccggcaaatctcttgacgtatcatttgcagtgtgtttggcattgatcatctgtatatagacagatcatcatatttcaataaatcacataag

SEQ ID NO: 3126 - DNA, 867 bp, Triticum aestivum
cgcaggtgaagaccgccgccaccgacggctacgacgccgtgcaggtcgggtaccacggcgtgcgcgaggacaagctcacccgcccggagctgggccacctcggcaaggccagcgcgccgccgctgcggcacctgcaggagttccgcctggtggccgtcgacgccttcgaccccggccaggcgctcgagttcaacgagctcttcaaggagggcgacctcgtcgacgtctccgccaaatccatcggaaagggattccaaggtggaattaagaggcacaacttcaagcgtggtctgatgactcacggttccaagagccacagagccctaggttcgatcggtgcggggacaaccccagggcgggtgtacaaggggaagaagatgcccgggaggatgggcggaaccaagaccaagatcaggaagctcaagattgtcaggatcgacaatgatctcaaagttgtgatgatcaagggagccattcccgggaagcaggggaaccttctccgcatcacgccagcgaagattgtcggcaagaacatccccaagagctagatctgtgctgtgtttcatcttgtaagagttcatttgtttccttttccatgtctggctatgttgtattcctaggtccaggttttgtatacatgttcagttcgctaaagctaatctttggacacaagtgcattctcctccatgttgtcaaccacttcttcaccttcttttggactcgaaacgaagcagattctctctatcaaaaaaaaataataaaaagacaagaagaaggggaggagggggcgggagctacaaaaacagccacggtccgagcgcggggaagcagccacagccacagaggcacacaaaacaggagggcgga

SEQ ID NO: 3127 - DNA, 728 bp, Triticum aestivum
ccggaaaacgggaagcccgtgccggtgacggtggtcggttccgggaggggggcaacgtggtgacgcaggtgaagacggccgccaccgacggctacgacgccgtgcaggtcgggtaccacggcgtgcgcgaggacaagctcacccgccctgagctgggccacctcggcaaggccagcgcgccgccgctgcggcacctgcaggagttccggctggtggccgtcgacgccttcgaccccggccaggcgctcgagttcaacgagctcttcaaggagggcgacctcgtcgacgtctccgccaaatccatcggaaagggattccaaggtggaattaagaggcacaacttcaagcgtggtctgatgactcacggttccaagagccacagagccctaggttcgatcggtgcggggacaaccccagggcgggtgtacaaggggaagaagatgcccgggaggatgggcggaaccaagaccaagatcaggaagctcaagattgtcaggatcgacaatgatctcaaagttgtgatgatcaagggagccattcctgggaagcagggaaaccttctccgcatcacgcccgcgaagattgtcggcaagaacatccccaagagctagatcggtgctgcgtttcaccttgtaagagttcattcgtttctttttccatgactggcactgttgtattcccaggtccaggttttgtatacatgttcagtttgctaaagctaatctttg

SEQ ID NO: 3128 - DNA, 380 bp, Triticum aestivum
tttctattgagatatgcaaagctaataggaagattttgaggagttggtgggatcagacccagacaggaacattgattgagattgatgatgtgaaatccctcaaggatgatgaaattgcatcatatgttcatagatttggcggcttcgacttggtgattgggggcagcccatgtaacaatcttgccggaagcaaccgacaccatcgtgatggcttggagggcgagcactcatctttgttctatgactactttaggatcttgaattccgtcaagtcggctatggcgaacatgtagcctaatcgctgtagtacctatgctatcgtttaatgcttatatctaggaactgtaaccgatctaacgttaaacattgagtgatgtggg

SEQ ID NO: 3129 - DNA, 636 bp, Triticum aestivum
cagtgagctggctatctccacgtagtgatcaagaggctctaagctgcacccgccgggccgctcctgctcccacgggagtgtcgcgaggcatgtcgggtgatgggctacgacgtgcccaagggcacacaaggtgttgtgaacgtgtgggcgatggggagggaccacatgtactggggtgacgcggaggcattcaggccagagagattcgaaaacagcaccatcgacttcaagggagccgacttcgagttcctcccattcggagctggccggaggatgtgccccggcatgtcgctcgcgatggccaacatggagttgtcgctagctagtctccttttccactttgattgggagctgccctgtggcatgaggcccgaagatatggacatgacagagactttcggtatcacagcgagaaggaagttcaagctctcggtgcacgcaaaatcccacgtcccatgtggaaattgatttgtttgttaatggctcaatgcatgtagggatggcgccttaatttggaattatatgtattttctggccaatacattcgcgtagctgcaaggtgtcatcatcgtccttgtacagttgaataccctgtttgaatctcagttgctgttgcatatgtatgtctcatttata

SEQ ID NO: 3130 - DNA, 589 bp, Triticum aestivum
gctatctccaactagtgatcaaggaggctctaaggctgcacccgccggggccgctcctgctcccacgggagtgtcgcgagacatgtcgggtgatgggctacgacgtgcccaagggcaccaaggtggttgtgaacgtgtgggcgatggggagggacgacatgtactggggtgacgcagaggcattcaggccagagagattcgaaaacagcaccgtcgacttcaagggcgccgatttcgagttcctcccgttcggagctggccggaggatgtgccccggcatgtcgctcgcgatggccaacatggagttgtcgctagctagtctccttttccactttgattgggagctgccctgtgacatgaggcccgaagatatggacatgacagagactttcggtatcacagtgagaaggaagttcaagctctcggtgcacgcaaaatcccacgtcccatgtggaaattgatttgtttgttaatggctcaatgcatgtagggatggcgccttaatttggaattatatgtattttctggccaatacatttgcgtagctgcaaggtgtcatcatcgtccttgtacaattgaataccctgtc

SEQ ID NO: 3131 - DNA, 1092 bp, Triticum aestivum
ggagcttactgacctgtacaacgcgaggcagtatgttgagaaaaagatgaaggacgataagtcatctaataacatgaatgaaaccaagtgggatgaggagatcaagaaagcagcagagaagggccagctgagtaacatgaaggagtgtgaggatatcctcgaggacatgctccactgggacaagttgactactgatgagataaagcaaaaggtggaggccaaatttaacgagttgggggacatgtgtgagatgggggagcttgacctgagcaggcttatgagctatttaaagattttgaggataagatggtctcagagtgcacagaactgatggaagcagaaccgctgactgtaaatgaattttctggggcagataataagagcgtcgagttgaatgatccacctggtgagggacctgttctaaggtgggagtcacgcattgtctttgcccctggtggtgatgcatggcatcccaaaaataggaaagttaaactcagtgtaactgtcaaggaactgggactttcacggcatgctttccgtcgattacgtgaggttgttggaaagaggtataattcaggaaaagatgagctcacaataatcagtgaaaggtttgatcatcgagaagagaacagaaaagattgcttgagaacactgtatgctctagtggaagatgcgatgaaagccgatgtgttggccaatgctgctagagatgcttatgttaaggggaggctccaggctaactctcagttcatggaccggctgaagatgaagacacaaaaattaaggcaagctgcataagctgcagaatggagcttccggttggaatatttcatctcccttgttatcaattatggggaccgtcatgctcaatatttgtacggctatcagcaatacatggataaggagaaagatgtgtccttctgcacttcattttgctgcccttctttgcactattttgtaggtttactgtatattttgctccttccgaaggaaactatattttatattccgaacataccatgcccgtgcaaccactttgcacaagcgattagtgaagaaactattaattgttcctgaataagaaagctacgc

SEQ ID NO: 3132 - DNA, 1596 bp, Triticum aestivum
ttttgactgctgctgtcacttgctgaccagagactggggaaagaaggctttgaggctggtgccatgtgttctttctgatcgtggcttgtctcatttgatgaatttgataagatgaatgatcaagaccgagttgctatacatgaagttatggaacagcaaactgtgaccattgccaggcaggaatacatgcatcgctaaatgcaagatgtagtgtaattgctgcagcaaatccagtatatggatcttatgatcgttcaataacaccacaaagaacattgggcttccagattcactgctctctcgttttgatttgctttttattgttctggatcaaatggatgctgagatcgatcgccagatttcagaacatgttgcacggatgcatagatactgtgctgatgatggaggagcaaggtcttttgataaagcaggatatgctgaagaagaagatggtgatgccaatgcagccatatttgttaaatatgatagaatgctccatgggcaggatagaaggcggggcaagaaggccaaacaggacaggctgactatcaaattcctgaagaaatatatacattatgcaaagaaccttattcagcctaggctcactgatgaggcatctgaccacattgcaactagatatgctgagctcagagatggcagtgcaaatgcaaaggctggtggaggtacccttccaattactgcaaggacactggaaacaataattcgtctatctactgcccatgcgaagatgaaactgagacatgaggttcttaaaactgatgttgaggctgcactgcaagttctgaattttgcaatattccataaggaattgactgacatggaagaccgtgagcagagggagactgagaaacaacaagctgagcaagatgcaggtgcaggtggtgataatgtagatgggcctggaggtgcaagcggtggcaatgcagacgtgcatggaagctctggcaacgacccaatggatgtggatggaggctcaggcaatgcatcaaatgatcaggatgtttcttcacagagaatggaagcatttgaggcgattcttggacagcatgtgctggcaaaccatgttgatcaaatgtccattgatgaagttgagcaaacagtcaacagagatgcagctgttgcttacaccagaggccaagtagagttcatcctggagaggatgcaagatgcgaacaggataatgataagggacggcattgttcgcatcatctagtcagaacatggattgacgttggacaagctgattgtggcatgcgctgtcctgatctgttctccgctttgtctgaaatcctggagaggctttgctgaaactctgcatgtgtggctgagctgtctgttgattactttgtatcttgatttttatcagtgaggtttaaattgatggtactatttattcatgtaatgtactgtctgacctagtgctatttagtccctgattatgtctggtttgcatggttaaatgcatctaaactagttgcaccgggcatatatgacagccattgtcacaagaaatggcttgatctgttggtgcccaaatttaccctaccaatagtgctataatactttggctttcgc

SEQ ID NO: 3133 - DNA, 688 bp, Triticum aestivum
gcttgcgtgtaaatccaacctttatgtggatgggaaggtttgtttaagcctcttaaatacttggactggcagagggaatgaagtatgggatccatcctcatctagtattctccaagtactagtctcacttcagggactagttctcaatgaaaagccctatttcaatgaagctggatatgagaagcaagtcggtactgttgaaggggagaagaatgcactgccatacaacgaaaacacatatctgctaagcgtgaaatccatgttgtatatcttgaggcggcctcctatgaatttcgaggattttgtgaaaagtcacttctgcaagcgcggcgactacattctcaaagcttgtgaggcctacttgcaaggagctgtggtcggcacgctgaatgacgatgcctgccccactgatactaacaaggagtactcttgctccatgggcttcaaacttgcattgggcaaaatcttgccaaggttgatcacagccttgaaggacataggagcagactgcagccagtatgagcacctcgggaagaccgagaccgctcaagaaagctgaacaccgagctgaggattgtattcaaatcttttcttggcttgagaaaacatgataaaacttcacctcccgctgtttccgtataaatgtacatccaacatttgttgttttattatctcaacatgaacattt

SEQ ID NO: 3134 - DNA, 1342 bp, Triticum aestivum
tgatcctgcaaatgttgatctgcaaaatgcagtccagaatagcattgaaatggaaaatgggtcattcaattcccaagatgaaacttctgttggaagtggtccactctctgttgcttttggctttgttacgcgactggcgagtgagatcttcgcccgagaatctggtgatgacattgataaaaacgaggatgagaaccgcatggcagcatcggagagcaccactgtggcaacaaatgactctaatgctgagaagtccgtagatgtagttatggctgacgagcctgcagattctgattgcttgaaacactttgatgttctgcagtgccctccggaccatcactaccttgaaaacatagcacatggtaccggtggacgaaagtgggtcaaaaaagttcagcaagaatggggcatacttgagaagaatctaccagattatatttatgtcagggtatttgaagatcgtatggatctcatgagagctgtgattattggagcaagtggcacaccataccaagatggtctgttcttctttgatttctaccttccacctgagtttccacaagctcctccgtcggcatactatcattctggcggcttgcgtgtaaatccaaacctttatgtggatgggaaggtttgtttaagcctcttaaatacgtggactggcagagggaatgaagtatgggatccatcctcatctagcattctccaagtactagtctcactccaggggctggttctcaatgagaagccctatttcaacgaagctggatatgagaagcaagtcggtactgttgaaggggagaagaatgcactgccatacaacgaaaacacatatctgctaagcgtgaaatccatgttgtatatcttgaggcggcctcctatgaatttcgaggattttgtgaaaagtcacttctgcaagcgcggccactacattctcaaagcttgtgaggcctacttgcaaggagctgtggtcggcacgctgaacgatgatgcctgccccaccgatactaacaaggagtactcttgctccatgggcttcaaacttgcattgggcaaaatcttgccaaggttgatcacagccctgaaggacataggagcagactgcagccagtacgagcacctcgggaaaaccgaaaccgctcaagaaagctgaaaatcgagccgagggttgtattcaaatcttcccctggcttgagaaaacatgataaaacttgacccccctgctgtttccgtataaatgtacattcaacatttgttgttttattatctgaacatttgggaaacgtggttccaaatgaatccatcatctcttccaaactgggaattgaggtgtgtcctgcac

SEQ ID NO: 3135 - DNA, 728 bp, Triticum aestivum
ggcgggcgggtgtgggcgcgcacggggtgcagcttcgacggcgccggcaacgggcggtgccagacgggcgactgcggcggcaagctgcagtgcacgcagtacgggcaggcgcccaacacgctggccgagttcgggctcaacaagtacatgaacctcgacttcttcgacatctccctcatcgacgggtacaacgtgcccatgtcgttcctgccggcccccggctcccccgggtgccccaagggcgggcctcagtgccccagggtgatcacgccgcagtgccccaacgagctgcgggccgccggagggtgcaacaacgcgtgcacggtgttcaaggaggaccggtactgctgcaccgggtcggcggccaacaactgcgggccgaccgactactcgaggttcttcaagggccagtgctccgacgcctacagctaccccaaggacgacgccaccagcacctacacctgccccggcggcaccaactaccaggtcatcttctgcccatgatcgagctaaaactaggcagccattgaagcggtctcgatcgagcacacagacaagaaggagtctatctgatcttatataaaaataagcgtgattggatgcatacgttcatatgtacaatcacatgtaagcgggaaatggatgtattcgacaaggaaattgctaaaaagatttgagagggctatttactatattttccaagtccaccgaatatacatcacatttca

SEQ ID NO: 3136 - DNA, 1020 bp, Triticum aestivum
acttaagctccactacaacaagggagaggagagaacacgatggccacttcatcagtcctcctccctgtgctcctcctggtggccgtcgccggcgcggaggcggcgaccttcacggtgatcaacaagtgccagtacacggtgtgggcggcggcggtgccggccggcgggggcaggaagctggacgcggggcagacgtggagcatagacgtgccggcgggcacgacgagcgggcgggtgtgggcgcgcacggggtgcagcttcgacggcgccggcaacgggcggtgccagacgggggactgcggcgggaagctgcagtgcacgcagtacgggcaggcgcccaacacgctggcggagttcgggctgaacaagtacatgggccaggacttcttcgacatctccctcatcgacgggttcaacgtgcccatgtcgttcgtgccagcacccggcacctccgggtgccccaagggcgggccgcggtgcccgagggtgatcacgccgcagtgccccagcgagctgcgggccgccggagggtgcaacaacgcgtgcacggtgttcaaggaggaccggtactgctgcacagggtcggcggccaacaactgcgggccgacggactactcgaggttcttcaaggggcagtgctccgacgcctacagctaccccaaggacgacgccaccagcatcttcacctgccccggcggcaccaactaccaggtcatcttctgcccatgagtggccatgaaagggtctcgagcacatagacaagaataagtctatgtctatccgttcttatatatcaaaataagtgcaactggatgcatacattcgtacgcacatgtaagccggaaatggatgtattcgatcgacgtgcgtaataaagtcgtgcatgaataaaatgctcttgcgtaataaatacatgcgtgcatgttcttgtagtagatatgattgagtgttcttgtagtactactactagataagatatctataggtgactacattgcctaagagcatggttaataataa

SEQ ID NO: 3137 - DNA, 641 bp, Triticum aestivum
cagcgatacaagtctctcggcaactcatttcaagttgatacagttgcttaccacttgtcagtgctgaggcgcatgtttcccaatggtgttcgtgtgctgtccttattcaccggtattggaggaggagaggtagctctgcacaagcttgggatccacatgagggtagtggtttcggtagagataggtgaagctagtaagaagattttcaaaagttggtgggatcagacccagacaggcacattgattgagattgatgatgtgaaatctctcacaaatgatagagttgcatcatttattagtcaatttggtggctttgacttggtgattgggggcagcccatgtaacaatcttgccggaagcaaccgacaccaccgtgatggcttggagggcaagcactcagctttgttttatgactatgtcagaatcttgaatttcgtcaagtcggccatgggaggacgtaggatgtagcctaatcattgtacactacctatgctatcgtttaatgcttatatctaggaactgtgacttatctgtgtttaaacgttgaattgacatggaggatttattttggagaaagctcacattaacatttaggcatatggtttattgttgctaattaatttagagcctgttcatcttta

SEQ ID NO: 3138 - DNA, 887 bp, Triticum aestivum
acaatttgccaattgagaacagatcgcctcttcttcctctgcccccaaagacaatatttgaggcattccctcattacaagaagtggtggccttcctgggacacgagaacacatcttaattgcttacaaacatgtgtagcaagtgcaaagctgacagaccggatccagcgtgctcttgtaagctcaagcaatccaccgccaaaaagtgtccagaaagatgtcatggacgagtgcaaaaaatggaatcttatctgggttgggaaaaacaaggttgcgcccttggagcctcatgagatggaattactacttggtttcccaagggaccacacaaggggagttggcaagacacagcgatacaagtctctcggcaactcatttcaagttgatacagttgcttaccacttgtcagtgctgaggcgtatgtttcccaatggtgttagggtgctgtccttattcaccggtattggaggaggtgaggtagctttgcacaagcttgggatccacatgagggtagtggtttctgttgagataggtgaagctagtaagaagattttcagaagttggtgggatcagacccagacaggcacattgattgagattgatgatgtgaaatctctcacaaatgatagagttgcatcatttattagtcaatttggtggctttgacttggtgattgggggcagcccatgtaacaatcttgccggaagcaaccgacaccaccgtgatggcttggagggcaagcactcagctttgttttatgactatgtcagaatcttgaatttcgtcaagtcgacgatggcaggacgtaggatgtagcctaaccattgtactacctatgttatcgtttaatgcttatatctaggaactgcgacttatctttgtttaaat

SEQ ID NO: 3139 - DNA, 686 bp, Triticum aestivum
gctcgcgtggcaccgccatgggctgtatcatcgggccactaacattcatgctgttctacaaggcatttgacataggcaacccagaagggccctggaaggcaccgtatgctctaatctaccgaaacatggcgattcttggtgtggagggtttctctgctctaccccagcattgcttgcagctgtgctatgggttctttggctttgcagtggtggccaaccttatgagggacctcttgccgccgaagtatggcaggtgtgttcccctaccgatggcaatgggggttcctttcctcgtcggcgcgagctttgccatcgacatgtgcgtgggaagcttagtagtcttcgtctggaacatgatggacagaagtaaggctgcactgatggtgccggcagttgcatctggtttgatatgtggagatgggctttggatcttcccttcggccttgcttgcactggccaagatcagcccaccattctgcatggcatttaggcctacacactagggacagtaacaaactactctatgtacagttagaagacatacatcctggcaagaatgcagtaaataggttttgcatagccgggcgagattgtagcatgcacatgcattttttcttcttgtattgatatgttgctgtatatagttttggcaacaagtcacacaaggtgtaatactgtaagatgtg

SEQ ID NO: 3140 - DNA, 868 bp, Triticum aestivum
tgggaaggttgccctcttcattcttgcagcctgggctggaaaggactctggtgtagttgctggcttagtaggctgcggtctggtgaagtcgctggtgtcaatatctgctgatctgatgcatgatttcaagactgggcatctcacactaacatctcccagatcaatgcttattgctcaggctattggcaccgccatgggctgtatcatcgggccactaacattcatgctgttctacaaggcatttgacataggcaacccagaagggccctggaaggcaccgtatgctctgatctaccgaaacatggcaattcttggtgtggagggtttctctgctctaacccagcattgcttgcagctgtgctatgggttctttggctttggagtggtggccaaccttatgagggacctcttatcgccgaagtatggtaggtgggttcccctaccgatggcaatgggggttcctttccttgtcggcgcgagctttgccatcgacatgtgtgtgggaagcttagtagtctttgtctggaacatgatggacagaaataaggctgcactgatggtgccggtagttgcatctggtttgatatgtggagacgggctttggatcttcccttcggcattgcttgcactggccaagatcagtccaccattctgcatggcatttaggcctacacactaggacagtaacaggctaggtctatgtacagttaggaaacatacatcctggcaagaatgcagtaaataggttttgcatagctgggcgagattgtagcatgcacatgcatttttttcttcttctattgatatgttgctgtatagttttggcaacaagtcacacaaggtgtaatactgtaacatgtgggaataa

SEQ ID NO: 3141 - DNA, 652 bp, Triticum aestivum
ggagccctccgctcatttcccttggagaagatacactatggcgagagagagcggcgggcatgagctcccttgcatacttcatgtccaaggacacgatcgatcacttcaacacgatcgtgaagccgatcgtctacctctccatgttctacttcttcaacaacccgaggtcgtccatctgggagaactacgtcgttcttgtcgcggtcgtctactgcgtcacggggatcggctacacctttgccatcttcttccagcccggttcagcacagctgtggtcagcgttgcttccggttgtcctgaccctcttctcgaatgagcagaaggacagcgtctttgctaacctatgctacacaaagtgggcgctcgaggcgttcgtgattgcaaatgcgcagaggtactctggtgtttggctcatcacgcggtgcggttcgctggtgaagatggggtacgacatcgaccacaagatcacgtgtatacttgtccttgctgcgaacgggatagtgttccggtgtatagccttcttctgcatggtcatcttccaaaagcactgatgatttctttcgttttttcttcatcagcatatgtatcccatgtatgtatgctatgtatgtttgtaactgacagactgatcgagtagtagtagaacaagaag

SEQ ID NO: 3142 - DNA, 563 bp, Triticum aestivum
tcaacgtgtgggcgatggggagggacgacagtatctggggcgacgcggaggcattcaggccggagaggttcgagaacagcaccgtcgacttcaagggcgccgacttcgagttcctccccttcggagccggccggaggatgtgccccggcatgtcgctcgggatggccaacatggagctggcgctggctagcctccttttccacttcgactgggagctgccctgtggcgtcggggccgaagacatggacatgacggagaccttcggcatcacggtgagaaggaagtccaagctctgggtgcacgcgaaaccccacgttccatgtgagaattgatttgtttgttaggaaaaatatgtactccctcagatcggaggtagtagctgattggtacccgtggccaatagattcgtgttgcggccttgcacgattgaataccctgtgtaaatctcggtaggctgttgtactcatttgtttctttgttcaaagagttttggttgtatcgatggagaactgtagatgccaaatgcatccaattcggtagctatgaacaacaatggagggacg

SEQ ID NO: 3143 - DNA, 749 bp, Triticum aestivum
acgtatccatttcagctttcgtcgtatgcccctgttatctctgcggagaaggcttaccatgagcagctctctgtgcctgaaatcaccaacgctgtgtttgagccctcaagcatgatggccaagtgtgaccctaggcatggcaaatatatggcctgctgcttgatgtaccgtggtgatgttgttcccaaggacgtcaatgctgcggtagcaaccatcaaaaccaagagaactgtccagttcgtcgactggtgccctaccgggttcaagtgtggcatcaactaccagccaccatccgttgtccccggaggcgacctggcaaaggttcagcgggccgtgtgtatgatcagcaacaacactgccgtcgccgaagtgttctcgcgcatcgaccacaagttcgacttgatgtacgccaagcgcgcgttcgtgcactggtacgtcggcgagggcatggaggaaggtgagttctcagaagcccgtgaggacttggccgctctggagaaggactacgaggaggttggcgccgaaggcgcggacgacgagggcgatgagggggatgactattaagtagctggttaataagtagttggctggttaatgattggctttgatctgtatactcagtaagtatggttccattgcgttacatattgattgctgttatgcgtgtttcctttcctgtaatgtactgaagatgttgttagggtggccatgattgttcccattttggctttcgatgctactcgtcccaa

SEQ ID NO: 3144 - DNA, 733 bp, Triticum aestivum
catttcatgctttcgtcgtatgcccctgttatctctgcggagaaggcttaccatgagcagctctctgtgcctgaaatcaccaatgctgtctttgagccttcaagcatgatggccaagtgtgaccctaggcatggcaaatatatggcctgctgcttgatgtaccgtggtgatgttgttcccaaggacgtcaatgccgcagtcgcaaccatcaaaaccaagagaactgtccagttcgtcgactggtgccctaccgggttcaagtgtggcatcaactaccagccaccttccgtcgtccccggaggcgacctggcaaaggttcagcgtgccgtgtgcatgatcagcaacaacaccgccgtcgccgaagtgttctcgcgcatcgaccacaagttcgacttgatgtacgccaagcgcgcgttcgtgcactggtacgtcggcgagggcatggaggaaggtgagttctcagaagcccgtgaggacttggctgctctggagaaggactacgaggaggttggcgccgaaggcgcagacgatgagggcgacgagggggatgactattaagtagctggttaataagtagttggctggttaatgattggctttgatctgtatactcagtaagttttccgttgcgttacatattgattgctgttatgcgtgtttcctttcctgtaatgtactgaagatgttgttagggtggccatgattgttgataccccatttccccattttggct

SEQ ID NO: 3145 - DNA, 727 bp, Triticum aestivum
acccaatggctgtctttggagcccctcaagcatgatggccaagtgtggaccctaggctatggcaaatatatggcctgctgcttgatgtacccgtggtgatgttgttcccaagggacgtcaactgccgcagtcgctaaccatcaaaaccaagagaactgtccagttcgtcgactggtgccctaccgggttcaagtgtggcatcaactaccagccaccctccgttgtccccggcggcgacctggcaaaggttcagcgggccgtgtgcatgatcagcaacaacactgccgttgccgaagtgttctcgcgcatcgaccacaagttcgacttgatgtacgccaagcgcgcgttcgtgcactggtacgtcggcgagggcatggaggaaggtgagttctcggaggcccgtgaggacttggccgctctcgagaaggactacgaggaggttggcgccgaaggcgcagacgatgagggcgacgagggggatgactactaagtagctggttaataagtagttggctggttaatgattggctttgatctgtatactcagtaagtatggttccattgcgttacatattgattgctgttatgcgtgtttccttttcttgtaatgtactgaagttgttgttagggtggccatgattgttgataccccatttcctcattttggctttcgatgctactcgtcccatgtttggtgtgtgtgcatcattctgagcacgtactgcaa

SEQ ID NO: 3146 - DNA, 600 bp, Triticum aestivum
attctgaggatccaatgccctaacggagagtggttcatcagttaatgggcgcacaaattctggtttttctcgtggttcttctgaggctggtttagatgaagatcaatcctcaactggtaagagtggggattcatcattttttgctggtttcttgaagaaggggttcaaggacctttctttatttaaccagtccatggatagtgttaaaatttcaatcgatggccatccaatctcggaaagagctcttaagaaggcagaaaagaaagctggtcctgttgaacctggctcatactggtatgactgccgtgctggaaataagctacgcagtcttggcaaacttgctcccacaattgagaagctgaagcgtggttttggtatgcacgtccctgaagggtttaggtagctggatataatgccgggttcctgcatttctaataatcagtttaatcacctccctccagctacctattggagggcaagtttgtgatttctactgaacctgacatggacgctttttaagtagtacttgggagtgctggtgtgcagcatagatgtagtactcaagaagctatgatcacatgatcttgtggttttactatt

SEQ ID NO: 3147 - DNA, 808 bp, Triticum aestivum
gaaagctggtcctgtttgaacctggctcatactggtatgactgccgtgctggattttggggcatcatgggtagagaatgtattggcattattcctccatatataagagaattcaattatccaatgcccagaaattgtgctggtggagacactgatgtcattgtcaatggcagagaacttcatcagagagatttagatttgcttgtaggaagaggacttccacgtatctctggcaaatcatattccattgagatttctggaaatattaccgatgatgctggaaataagctacgcagtcttggcaaacttgctcccacaattgagaagctgaagcgtggttttggtatgcacgttcctgaagggtttaggtagctggatataatgccgggttcctgcatttttaataatcagtttaatcacctccctcgcagctacctattggagggcaagtttgtgatttctactgaacctgacatggacgctttttaagtagtacttgggagtgctggtgtgcagcagatgtagtactcaagaagctatgatcacatgatcttgtggttttactattgatgaccttggtcctactaattcagtttatttgctgaaagcaatgtttgaaaatgatgcaatctgccaggcagcgctaatttctctgcagctttttcttacgagtgttattgtcttgtgtattttctcaccacgggaagcattaggtatatgtgcaattatcggcttgtaatatgttcctagcgctataccttctctaatatatttatgtgtaaatatgttactatttgatcacctcttcc

SEQ ID NO: 3148 - DNA, 1270 bp, Triticum aestivum
  N_region (47)..(47): n = any nucleotide
aaagtgaaggtacatccagagatatgaccacacagcaagaagatganacaaccgtctgaaagttgagaacacaagtaatgagtttgacaagaagaacacagcggacagcaacagtgccctcgaacatgcgaacactgccattgaatttgaaggtacaagcacaagtgagagatatgaagaaaacctaatggaacaagataatggaaaattgcatgagccatgtgctgaggatgccaatgccctaacggagagtgggtcatcagttaatgggcgcacaaattctggtttttctcgtggttcttctgaggctggtttagatgaagatcaatcctcaactggtaagagtggggattcatcattttttgctggtttcttgaagaaggggttcaaggacctttctttatttaaccagtccatggatagtgttaaggtttcaatcaatggccatccaatctctgaaagagctcttaagaaggcagaaaagaaagctggtcctgttgaacctggctcatactggtatgactgccgtgctggattttggggcatcatgggtagagaatgtattggcattattcctccatatataagagaattcaattatccaatgcccagaaattgtgctggtggagacactgatgtcattgtcaatggcagagaacttcatcagagagatttagatttgcttgtaggaagaggacttccacgtatctctggcaaatcatattccattgagatttctggaaatattaccgatgatgctggaaataagctacgcagtcttggcaaacttgcccccacaattgagaagctgaagcgtggttttggtatgcacgtccctgaagggtttaggtagctggatataatgctgggttcctgcatttttaataatcagtttaatcacctccctcacagctacctattggagggcaagtttgtgatttctactgaacctgacatggacgctttttaagtagtacttgggagtgctggtgtgcagcagatgtagtactcaagaagctatgatcacatgatcttgtggttttactattgatgaccttggtcctactaattcagtttatttgctgaaagcaatgtttgaaaatgatgcaatctgctaggcagcgctaatttctctgcagctttttcttatgagtgttattgtctttatgtattttctcaccacgggaagcattaggtatatgtgcaattatcggcttgtaatatgttcctagcgctataccttctctaatatatttatatatgtaaatat

SEQ ID NO: 3149 - DNA, 610 bp, Triticum aestivum
catccgggagtaattggttcagaatcatcccatcttcgagccaggtgcttctgccaggaaatgtgggaaatgacaatcttgtagagcagcagaaagcaaaccctgtcgccctgctcctgtcgtccgctatgatgttgaggcatttgcagttcccgtcgttcgctgaccgtctggaaactgcggtgaagcgggtcattgcagagggcaagtacaggacaaaggatctgggcggcaccagcaccacccaggaagttactgatgcagtgatcgctaatctggattagatacctgatgcacgcctgaagaatcgattcttttggaggactggtttacaggtcccaacttttgagtgctattttttccgtacagcgttagatcggcaattatatatttcagaaataattgagaaacccacgaggattattcttcccatgatactttgtagcaaggcaaaacaccttgtgttgcagagggggtagctggctaccttcaatttaaacggcatgcattgaaagtttattctcagttcttattcgtggttatcactcccatgtaaccggaatccggtcctcttttctttggaaagggaatctggtcttctgaattgcta

SEQ ID NO: 3150 - DNA, 861 bp, Triticum aestivum
atggttgttctggagtctgccggagatgccgctaatatccaagtattgagtgataatgaaatcattgttgacaactgctgcatgcaacttgtttcaaggcctgagcagtttgatgttatggttacacctaacctttacggcaatttggttgccaacacagctgcaggtcttgttggaggaacaggtgtcatgccaggaggtaatgtgggtcaggatcatgccatcttcgagcaaggtgcttctgcaggaaatgtgggaaatgacaatcttgtagagcagcagaaagcaaaccctgtcgccctgctcctgtcgtccgcgatgatgttgaggcatttgcagttcccgtcgttcgctgaccgtctggaaactgcggtgaagcgggtcattgcagacggcaagtacagaacaaaggatctgggcggcaccagcaccacccaggaagttactgatgcagtgatcgctaatctggattagatacctgatgcacgcctgcagaatcgattcttttggaggactggtttacaggtcccaacttttgagtgctattttttccgtacagcgttagatcggcaattatatatttcagaaataattgagaaacccacgaggattattcttcccacgatactttgtagcaaggcaaaacaccttgtgttgcagaggggatagctgtctaccttaaatttaaacggcatgcattgaaagtttattctcagttcttattcgtggttgtcactcccatgtaaccggaatcgggtcctcttttctttggaaagggaatctggtcttctgaattgctatgcatgtcactgtcagattttgtatggtactcgagctatagctcccaaatcctgtccccct

SEQ ID NO: 3151 - DNA, 755 bp, Triticum aestivum
ttgctgctaaatatccaagtattgagtataatgaaatcattgtttgacaactgctgcatgcacttgtttcaaggcctgagcattttgatgttatggttacgcctaacctttacggcaatttggttgccaacacagctgcaggtcttgttggaggaacaggtgtcatgccaggaggtaatgtaggtcaggatcatgccatcttcgagcaaggtgcttctgcaggaaatgtgggaaatgacaatcttgtagagcagcagaaagcaaaccctgtcgccctgctcctgtcgtctgctatgatgttgaggcatttgcagttcccgtcgttcgctgaccgtctggaaactgcggtgaagcgggtcattgcagatggcaagtacaggacaaaggatctgggcggcaccagcaccacccaggaagttactgatgcagtgatcgctaatctggattaggtacctgatgcacgcctgaagaatcgattcttttggaggactggtttaaaggtcccaactcctgagtgctattttttccgtacagcattagatcggcaattatgtttgagaaataattgaggaacccacgaggattattcttcccactatactttgtagcaaggcaaaacaccttgtgttgcagaggggatagctggctaccttaaatttaaacggcatgtattgaaagtttattctcagttcttattcgtggttatcactcccatggaaccggaaatctggtcctctttttcaggaaaagggaat

SEQ ID NO: 3152 - DNA, 1181 bp, Triticum aestivum
agaggaggaggagacgagcgccctccagttcgacgacatcgacgaggactacgaggatggatacggcgggcgcgccccgcgttcacggcccccacccgcccgcgcaccggcaaggccgctctcccgctcaagcgcgaccgcaccaggtccaagagatacctggagatacagaagctgagggagagcaagaaggagtacgacgtgcccatggccatctcgctcatgaagcaggtcgccaacacccgcttcgtcgagtccgcggaggcgcatttccgcatgaacctcgaccccaagtacaacgaccagcagctccgggccacggtcaatttgcccaaggggacgggacagaccgtgaaaattgcagttctcacccaaggtgagaagatagatgaggcagggctgcaggcgctgatattgttggctcagatgacttgattgaacaaataaaaggaggattcatggagtttgacaaattgattgcgtcacctgatatgatgcctaaggttgccagcttgggtaagattctaggaccaagaggattgatgcccaaccccaaagctggtactgtttctccaaacattactcaggctatcgatgagttcaagaaaggtaaagttgaattcagagttgataagacagggattgcgcacattcctttcggcaaggttaacttccctgaagaagaccttattgcaaacttcatggctgttgttcgctccattgagaggaacaagccatctggtgcaaaggggatatactggaaaacggcatatgtatgctcatcaatgggaccttcaatcaagctgaacattaaagaaatgctcgactatggcgcagattcgtctaactagatgtcaccacgaccaattaagtcatcaggcatttgctgccaacttcacaggcttgaccatccatcccttgtgataaatacacactgagaaacacgactgtgggggaacactgggaggtgcttaggtacagtttttttttagtttcacggacatccgacgtcggcagttaaacagtgccctgatcaacaaacaagcggtattgttggtcgtttgtatttatgagcgaattatgcatgcacttacacatgtatttttgtctgatgtttgttgtaatgttcatcattttgtcaatagtcatccttgagcttcagccaatatcatgtcctcacc

SEQ ID NO: 3153 - DNA, 597 bp, Triticum aestivum
tcggtcggctgtgcacgacggactgcaagatcaagttctcggacctgaaggcgagacgaagcttcaggttcatcgtgttcaagatcgacgagaagtcgaggaaatcaaggtggagaggctcggtgagaccagttacggctacgaagaattcacaaacatcctcccagctgacgagtgtcgctatgctgtctatgacctcgacttcgtaaccgacgagaactgccagaagagcaagatcttcttcttctcctggtctcctgacacggcaagaacaaggagcaagatgctttatgcgagctccaaggacaggttcaggagggagatggacggcatccagtgcgagatccaagcgaccgaccccagtgaaatgagcctcgacatcataaaaagccgagctcactaatgaagcacaagtacatatactccagctccacaacgtacaatgaatatatccatatgaaacccttccgcaatcgacggctcacgccatgcccatggattaatgggcatgggatacctctcgcttacaactatcgtttaaatcatttgttccatatgctatctttcagtcttggggataagctctgtcgacaatga

SEQ ID NO: 3154 - DNA, 749 bp, Triticum aestivum
ctggtgacaccaagggagcatttgtgcagccctgcattctatgaagcatttggtctgactgtcattgaggccatgacatgtggtttgccgacaattgcgacatgccacggtggccctgctgaaatcattgtgaacggggtgtctggcctgcacattgatccttaccacagcgacaaggccgcagatatcctggtcaacttctttgagaagtgcagcgaggatccaagctactgggacaaaatgtctgaaggaggcctgaagagaatttatgagaagtacacctggaagctgtactcagagaggctgatgaccctgaccggcgtgtatgggttctggaagtacgtgagcaacctggagaggcgcgagactcgccgttacctggagatgttctacgctctgaagtaccgcagcctggctgctgcagttccattggcagttgacggcgagagctccgacaactagcgcggtgcaatggggcatgaagaggcgcattcagcgggagggtgaagtgtcggctgcgttatgatttgtctgtctaccgtagtttccatttggtctggtcgtggggtgtgttaatttgttgtcccggcacatttgtgaggtcctgggcagtgctcgctggttcatgccagccgcatttgttgcgtggaataaacgcctgcccatattgttcatctttcatcagagttcaatgcaatgtttcgttgtctgtctcacttctcctctctgccattggacattggatgatc

SEQ ID NO: 3155 - DNA, 802 bp, Triticum aestivum
gaacgtgttcgcaatggtgagctgtaccgcacaatctgtgacaccaagggagccaatttgtgcagcctgcattctatgaagcttttggccttactgtcattgaggccatgacatgtggtctgccgacaattgcgacatgccacggtggccctgctgaaatcattgtgaatggggtgtctggtctgcacattgatccttaccacagtgacaaggccgcagatatcttggtcaacttctttgagaagtgcagcgaggatccaagctactgggacaaaatgtctgaaggaggcctgaagagaatttatgagaagtacacctggaagctgtactcagagaggctgatgaccctgaccggtgtgtatggattctggaagtacgtgagcaacctagagaggcgtgagactcgccgttaccttgagatgttctacgccctgaagtaccgcagcctggctgctgcagttccattggcggttgacggcgagaactccgacaactagcccggtgcaatggggcatgaagaggcgcattcagcgggagggtgaagtgtcggctgcgttatgatttgtctgccgtagttttcatttggtctggtcgtggagtgtgttaatttgttgtctcggcacatttgtgaggtcctgggcagtgctcgctggttcatgccagccgcatttgttgcctggaataaacgcctgcccatggtgttccatctttcatcagagttcaatgcaatgtttcgttgtctgtctcatttctctgtctttcaaaattatttgatcaccccttttgtcatgaatgaacctgg

SEQ ID NO: 3156 - DNA, 701 bp, Triticum aestivum
gacaccaaagggtgcatttgtgcagcctgcattctatgaagccgtttggcctgactgtcattggaggccatgacatgtggtttgccgacgattgcgacatgccacggtggccctgctgaaatcattgtgaacggggtgtctggtctgcacattgatccttaccacagcgacaaggccgcagatatcttggtcaacttctttgagaagtgcagcgaggatccaagctactgggacaaaatgtctgaaggaggcctgaagagaatttatgagaagtacacctggaagctgtactccgagaggctgatgaccctgaccggcgtgtatgggttctggaagtatgtgagcaacttggagaggcgtgagactcgccgttaccttgagatgttctacgccctgaagtaccgcagcctggctgctgcagttccattggcagttgacggcgagagctccgacaactagcgcggtgcaatggggcatgaagaggcgcattcagcgggagggtgaagtgtcggctgcgttatgatttgtctgtctaccgtagttttcatttggtctggtcgtggagtgtgtgcaatttgatgtctccggcacatttgtgaggtcctgggcagtgcttgctggttcttgccagcggcatttgttgttgcctctgaataaacgcctgcccatattgttcatctttcatcagagttcaatgcaat

SEQ ID NO: 3157 - DNA, 724 bp, Triticum aestivum
ttctgggtaacccgctcccgccccctttccccgcccgtctggggtcagattcatgccagacaagcccaattgaaatgaggcttaagcggtgggaacggaagaagtgtaagccaaacagtcttcctatgctgcacaagatgcatgttagggtcggcgacacagtgcaggtcatcgcaggccgtgagaaaggtaaagttggagaagttgtacggctttacaagcacaacagcactgtgatagtgaaggatctgaacttgaagtcaaagcacaagaaaggcacagaggatgaaccgggtgaaattgtcatgattgaaggccccattcatagctcgaacatgatgctctactcaaaggagaagaacgtgacgagtagggttgggcacaaaatcctcgaggatggcaccaaggtccgctacctgaagaagaccggtgaagtgatcgacagcgttgataactgggtgaaggtgttcaaggaaggagattctgagtcatcatcgtagtatggaaacgctgcacatgctctcaaccttggctgcgcttattgctgcccaaacgcttactcggctggtgctgctgcttgtaagatcagttttcttctagcttcagagcctcttttgtaaattactactactactacaaagttgtcaccatttttgcaatgcttggtccagcgagaaggccttttttttttttacatttctgtcattttgatgaatagtaatga

SEQ ID NO: 3158 - DNA, 832 bp, Triticum aestivum
ctgcgagttagcgagtgacgaaagatgacggcgactatggccggcattgcggcgctgcatggcgccatgtgggcgctctccgtctcggccgcgagcaccagcgcattctggggcaacccgctcgccgccaccttctccgccgcgccgtctggggtcagattcatggtccaagacaagcccaattgaaatgaggcttaagcgatgggaacggaatgaagtgtaagccaaacagtcttcctatgctgcacaagatgcatgttagggtcggcgacacggtgcaggtcatcgcaggccgtgagaaaggtaaagttggggaagtcgtacggctttataagcacaacagcactgtgatagtgaaggatctgaacttgaagtcaaagcacaagaaaggcactgaggatgaaccgggtgaaattgtcatgattgaaggccccattcatagctcgaacatgatgctctactcaaaggagaagaacgtgacgagtagggttgggcacaaaatcctcgaggatggcaccaaggtccgctacctgaagaagaccggtgaagtaatcgacagcgttgacaactgggtgaaggtgttcaaggaaggagattctgagtcatcatcgtagtatggaaatgctgcgcatgctctcaaccttagctgcgcttattgctgcccaaacgcttactcggctggtgccactgcttgtactgtcagtttttttctagcttcagagcctcttttgtaaattactactactactacaaagttgtcaccatttttgcaacgcttggtccaacaagaaggccttcgacttacatgtctgtcatttcgatgaatcgtaag

SEQ ID NO: 3159 - DNA, 817 bp, Triticum aestivum
tgctgcttctctgcgagtgagcgagtgaggaaagaggacggcgacgatggccggcatggcggcgctgcagggcgccatgggggcgctctccgtctcggccgcgagcaccagcgcctttctggggcaacccgctcgccgcccaccttctccgcccgcgccgtctggggtcagattcatggccaagacagcccaattgaaatgaggcttaagcgatgggaacggaagaagtgtaagccaaacagtcttcctatgctgcacaagatgcatgttagggtcggcgacacagtgcaagtcatcgcaggccgtgagaaaggtaaagttggagaagtcgtacggctttacaagcacaacagcactgtgatagtgaaggatctgaacttgaagtcaaagcacaagaaaggcacagaggatgaaccgggtgaaattgtcatgattgaaggccccattcatagctcgaacatgatgctctactcaaaggagaagaacgtgacgagcagggttgggcacaaaatcctcgaggatggcaccaaggtccgctacctgaagaagaccggtgaagtaatcgacagcgttgataactgggtgaaggtgttcaaggaaggagattccgagtcatcatcgtagtatggaaacgctgcacatgctctcaaccttggctgcgcttattgctgcccaaacgcttactcggctggtgccgctgcttgtactatcagttttttttctagcttcagagcctcttttgtaaattactactgctactacaaagtgtcaccatttttgcaacgcttggtccagcgagaaggccttcgttttacat

SEQ ID NO: 3160 - DNA, 674 bp, Triticum aestivum
cgaggccagttcgacggtaccagacacgctcacacgcacacgagccggcagtactaccgagactgcaccgtgagcggcaccatcgacttcatcttcggcaacgcgcaggtggtgttccagaactgcatcctccaggtgcgcaagtgcatggagaaccagcagaacatcatcacggcgcaggggcgcaaggagaggcactcggccggcggcatcgtcatccacaactgcaccatcgagccgcacgcggagttcaaagaccacatgggcaggctccggacgttcctggggcggccgtggaaggagcactcccgcaccctctacatccagtcggagatcggcgacctgatcgacccgcaggggtggctgccgtggctcggcgacttcgcgctcagcacctgctactacgccgaggtggacaaccgggggccgggggccgacatgagcaaccgcgtcacgtggaagggcgtcaagcacgtgacctaccggcaggcggaagagaagtacaccgtggagaggttcatccaggggaagctctggatctccaagtacggcgtgcccttcatcccggggttgctgccgcaggagcaggccggccacactgatgacactgagcgaagctagcgttcgtccggggtcgacgaagatggattgttaattttatggatggatggatg

SEQ ID NO: 3161 - DNA, 809 bp, Triticum aestivum
gtaccaggacacgctgtacacgcacaccagccggcagtactaccgcgactgcaccgtgagcggcaccatcgacttcatcttcggcaacgcgcaggtggtgttccagaactgcgtcctccaggtgcgcaagtgcatggagaaccagcagaacatcatcacggcgcaggggcgcaaggagaggcactccgccggcggcatcgtcatccacaactgcaccatcgagccgcacccggagttcaaggaccacatcggcaggctccggacgttcctggggcggccgtggaaggagcactcccgcaccctctacatccagtcggagatcggcgacctcatcgacccgcaggggtggctgccgtggctcggcgacttcgcgctcagcacctgctactacgccgaggtggacaaccgggggccgggggccgacatgagcaatcgcgtcacgtggaagggcgtcaagcacgtcacctaccggcaggcgcaagagaagtacaacgtcgagaggttcatccaggggaatctctggatctccaagtacggcgtgcccttcatcccggggttgctgccgcaggagcaggccgcccacactgacactgagccaagctagcgttctttcggggtcgaggatgaagatggattgtggacaagggttgttaattttatggatagaggatcggttgtacgtacactgttgttgatgtatatcatctgtgtatcgtcgtacagtatatgtgagatgcatgtcaatgtagaatgtagaatgtatgtgcgtgtacactgctctttcgaccacccatgctcacaattgacaa

SEQ ID NO: 3162 - DNA, 726 bp, Triticum aestivum
tgctttcagcatgtggaaacacctgcttgaaaggtgtttttttgtggctttgggggttttcgttcatctgaacttctaaagctccttgtaaatcagctcgagcctctaacagagcagcagttgatggggttatccagcctcgagcaatcctcacaccaggccgaggatgcactatcacaaggaatggaggcattgcagcaatctttggctgaaacgttggctggttcccttggtccatcaggatcttcaggaaacgtggcaaactacatgggtcaaatggctatggctatgggaaaacttggaacccttgagaatttccttcgccaggctgacaatctacggcaacaaactttgcatcaaatgcaaagaattctgacaatacggcaagctgctcgagctctccttgcaatacacgactatttctcacgtttgcgtgccctcagttctctctggcttgcgaggccacgggagtaaaacatgtgtgccatcttttggcgcttcatgagctgatcctagaaatgtggacaaattgcgacgcatttgcagaagattgatggttcagttccctctgaaaaatatattgacgccttgtgttctcatattgtacttcgatgttgtacaagtagccaggtaggggtaaggcttgtaactgtaagttaccatgaatttatgattgacatattgtacaattgtattagcaataagataagcgtagattaaaggtgc

SEQ ID NO: 3163 - DNA, 741 bp, Triticum aestivum
atcgtcatggggaggtatgagctggggagattgttagggaaaggagcatttggcaaggtgcactacgccaagaaccttgagtcaaaccgaggtgtcgccataaagattttggacaaggagaaggtgctcaaggtcgggctcgcggagcaggtcaggcgtgagatcacaaccatgcggttggtagtgcacaaaagcattgttcagctccatgaggtcatggcgacacgaagcaagatctacttcgtcatggagtacatgaaaggcggtgagctctttgacaaggtctccaagggtggcaagctcaccgagggtgctgcacataagtacttccagcagctcatcagtgcagtggattactgccacagccgtggcgtgtatcaccgggacttgaagcctgagaacctactgcttgatgagaatgaaaatctgaaggtttctgattttgggctgagtgcactttcagaatcgaagagacaagatggcttgctccacaccacctgtggatcacctgcttatgtggctccagaggtgatcagcaagggaggctatgatggtgcaaaatcagatatctggtcttgcggggtcatcctgtttgtcttgtagctggttacctcctttcagggtcaaaatgatagaatgtccggaagatggaaggggatcagtgccgtgtgggtccaaaattggagggtgtcagactgcccgtcgaaaggttatccagaaaggcccggtcaagcgggaaaa

SEQ ID NO: 3164 - DNA, 598 bp, Triticum aestivum
tggagctaacttctttagaactagggacatgatagtggcaaatttgggtgcaaaacctttggtgatacagttgccgattggttcagaggacaatttccaaggagttgttgatctaataagaatgaaggctattgtatggacaggggaggaactcggtgcacaattttcataccaagacatacctgctgatcttgaagagttggctcaagactatagacttcagatgatcgaaactattgttgaattggatgatgaagctatggagggctatctagaaggaaaggaaccggatgaggcgactgtgaagagattaatcagaaaaggaacaataggtgccagctttgtccccattttatgtggttcagccttcaaaaacaagggtgtccagccattgcttgatgctgttgttgattacttgccatcaccacttgacctgccaccaatgaagggtactgacccagatgacccggaattgattcttgaaagacgtccaagtgatgatgaaccattttctgggttagctttcaagatcatgactgatccatatgtggggtcactaacgtttgtccgcatatactcagggaagctgatcgctggt

SEQ ID NO: 3165 - DNA, 1171 bp, Triticum aestivum
gagcccacagatgcaagtctatgtcattcgttgcactcatgaatactggcacctgagatcataaagggtgaggggcatgggagtgctgtggactggtggacttttggcatattcttgtatgaacttcttttcggcaagactccattcaaaggttcagggaacagggcaacgctattcaatgttgttggccagcccctcaggttcccagaatcacctgttgtgggttttgctgcaagggatctcataagggggttgctgatcaaggagccacagcatcgattggcgtacaaacgtggagccacagaaataaagcagcacccattctttgaaggtgttaactgggcattgataaggtgcgctactcctccagatatccccaagccagttgaaatccctcggccaggagcctcgacaagtcagaaggcaacaccgtcagccgagaaaggtccagacaattatcttgaatttgatttcttttagtggattcttccaagaccatttcatgtgcaagctgtaaagttcttttttcctagacattttctgcattctaataacttgatatgtagatggcatatgttcctagtgttgttggtaagctccgttcgcagttcatttcacctccattgatcacattggatgggagcctctatcaggagtaagctgtaatccctcatcaattattgagaagtagggtctcttgaataacaaataaatgtttccgttctgtctgcaaccgctgttttgaaagctaaatttggtggtgtaccggaagctgatcacacctttgatgtggtaaataaatgtcagctggagcagctgcatttatgcccttcaaatcggcaaggaactcgtcctgccgtctgaaaaacagggggaaacctaagatgttacaatgctaatgctcagtagaggaccgatcttcagactgggtggttcagtagaggaccagcatgcctgctatgcataaatgttgtttatgctgcattgctatgagttgctgcttgctgaattgttgccactgatgatactttagtggatttgcctctgcatcacgggaaagatagtttccgagttggcacgtgaattacagttctgagatgtgcctttttttgtgtgtgcactagttctgacttttcttcgccaaccactcactaatcagcaataaaataac

SEQ ID NO: 3166 - DNA, 753 bp, Triticum aestivum
gcttagagctgtcatagttgggcctgcaggcactccttaccatgacgggttgttcttttttgatgtctatttcccttcccagtatccatgtaaacctcctcaagtgaattaccgctctggaggtctgcggcttaatccaaatctgtatgcctgtgggaaagtctgccttagcctcttaaacacatggactggtagtgggtgtgagatgtggaacccatccacttcaactatgttgcaggtcctggtctccattcaagccttggtgctgaatgctaaaccttatttcaatgaacctggtcattcgatgtatgctaacacaccccttggggagaagcagtccctggcttataatgaagagacttttctgctatcctgtagaaccatgctgtattctcttcgcaatccaccaaagcattttgagcacttcattggtggacatttccggaagtatgggcgtgacatcctcgtaggatgcaaagcttacatgggcggtgcccaagttggatgccttgctggagacggagtgcaagatgtcgacgagggtgacaaaagctgctcacaaaatttcaagtgctcgctagagatattatttaagggtctcattaacgaattcactgatttaggagtagcttgtcatgaattccaggcccagattgtgaactctggagctgcagcagacaccacattaaggctataagttataggtgatcccaaggatcatgttgaccaaattttgttttgaaataaacatat

SEQ ID NO: 3167 - DNA, 686 bp, Triticum aestivum
tccccccgccgccgcccgcgcagagccccgaatctccctacccgcggcagccatgagcgacggcaaggacaccctcgacctctccgccctcggcgccgccgtccccaacgccgcagagctcagcgccgaggacaaggccaacctcgtggagtcgattaagaacacgctgcagggattggcggcgcggcacacggacgtgctcgagagcctggagcccaaggtcaggaagcgcgtcgaggcgctcagggagatccagagccaacatgatgaatttgaggcaaagttttttgaggagagagctgcacttgaagctaaatatcagaagatgtatgaaccactgtactcaaagcgtcatgatgttgtcaatggtgtggttgaggcagaaggcgtaaccaaagattcaggtgaagctgctccagatgagaaagaggaaaagggtgtgccagatttctggttgaatgcaatgaagaaccatgaaatccttgctgaggagattcaagagagggatgaggaagctctcaagtacctcaaggatatcaagtggtacagaattactgagccaaagggtttcaagcttgagttccacttcaatactaatccattcttcaagaatgaagtgctttcaaaaacgtaccacatgatcgatgaagatgaaccaatcctagagaaggtatgactgaattgat

SEQ ID NO: 3168 - DNA, 624 bp, Triticum aestivum
gaaggtcctagccagaaaccctcgatttgtcaaagagaagtatcttatgcaaaccatatatcagagcttgatctctcaaattgtcagcgatgcactccaagttaccggcttctacctaaaaattacccaacgcctccggcaggcaacaagactgatcttggtgccacggttcttaatgatcactgggtgtcagtgacatcagggagtgaagactattcgtttaagcacatgcgcaagaatcagtatgaagaaagtttatttagatgcgaagatgacaggttcgagttggatatgctgttggagtcagttaatgcagcaactaagcgcgtcgaggagttgatagaaaaaatgcaagataactcagtaaaaccagaaagcccaatacgcatcgatgagcacttaactcctttgaatctaaggtgcattgaacggttatatggtgaccatggtctggatgtgatggacgttcttcgaagaaatgctagtgttgcgctgccagttatcttatctaggctaaaacaaaagcaggaggaatggtcaaggtgtcgatcagatttcaaacaggtttgggctgacatttatgccaaaaattaccacaagtcacttgatcatcgcagttaacta

SEQ ID NO: 3169 - DNA, 682 bp, Triticum aestivum
agttgatagaaaaaatgcaagataactcagtaaaaccagaaagcccaatacgcatcgatgagcacttaacttctttgaatttaaggtgcattgaacggttatatggtgaccatggtctggatgtgatggacgttcttcgaagaaatgctagtgttgcactgcctgttatcttatccaggctaaaacaaaagcaggaggaatggtcaaggtgtcgatcagatttcaacaaggtctgggctgatatttatgccaaaaactatcacaagtcacttgatcatcgcagtttctatttcaagcagcaagactcgaagaatctcagcacaaaatctctagtgactgagattaaagaaattaatgagaagaaaagaaaggaagacgatgttctcattgctattgctgctggaaataggcggcctatagttcccaatatgtcatttgagtatgtagatgcaaatatccatgacgatctttataagatcgtcaagtactcatgcggagaagtctgtggctcggaccaactggacaaagtgatgaagattcggacaactttttctggagcctatatagggcattccgtctcgatcccacggcgccgtggatgcagacctacataaacccaagtttgcattcacaaattggtttgcaatgtgcggacgcatatactcttagatgagtggcgcaa

SEQ ID NO: 3170 - DNA, 785 bp, Triticum aestivum
aggagatgttcaaagtgatggatactgataatgacggtatagtctcatatgaagagttgaagagcgggattgcaaaatttggttctcaccttgcagaatctgaagtgcaaatgttaatagaagctgtggatacaaatggtagaggagcactagattatggtgaatttttggctgtctcacttcatctacaaaggatggcaaatgatgagcaccttcggcgggccttcctgtttttcgataaggatggcgatggttttattgagcctgaggagcttcaggaggccctggcggaggatggggcggtagatatcacggaagtggtgaaggacatattgcaagaagttgacaccgacaaggatggcaaaattagctttgaagagtttgtagcaatgatgaaaaccggcacggactggcgaaaggcttcacggcattattcgagaggacgtttcaatagcctaagcataaggcttatcaaggatggatctgtaaagatgggaaatgagtgaaatcacaggcttgcagctggcgctcttgtcccggtcacgtaagtccggccgttggcccactaagcatagaccctctttccttctctgatgattattttggcggaaatttaattagataggctccccccctgattggcttactcgtgtaagtagctttcccggtatcgctgaggtgaggagcacgcaccgaatgatgcaccaactgctcctgcctgatgatatctccttttgctgtacctgatgctaagtgttgtacaatattttgttgtttccccctca

SEQ ID NO: 3171 - DNA, 779 bp, Triticum aestivum
gagaatgtctctagcgaggctcttgaggctgcccgtattgcttgcaacaagtacatgacgaagaatgctggaaaggatgcgttccacctgagggtcagggtccatccataccatgtccttcgtatcaacaagatgctttcatgtgccggggctgataggctccagactggaatgaggggtgcttttgggaagcctctgggtacctgtgctcgtgtggacattggccaagtactcctatctgtgcgctgcaaggagagcaatgctgttcatgctgatgaagccctccgccgtgccaagttcaagttccctggccgtcaaaagatcattcgcagcaggaagtggggctttaccaagttcaacaaggctgattacatcaagtacaagagtgagggaagaatcgtgcctgatggtgtcaatgctaagctgcttggtgtccatggccccattgctaaacgcgcccctgggcaggcgatcctggcttgaggcagttgaagcatgcacagaccatttccttcgctagatggaactcatgagttttgtttttgctttagccagtatatttccccatgcttgaacgagtgttaagtaaagatggcagctggctgcagtataatctacttctgtagttctttactgtagaccgtttctcatggtggaggttgacatatctgcagttgtcctgttttagcactttcttgagattgttatctacaagtgctgaaattttctggatcatctatgaatgatgtataacttttgcctatgcaaaatcacctttc

SEQ ID NO: 3172 - DNA, 745 bp, Triticum aestivum
agctgcccgtatgcttgcaacaagtacatgaccaagaatgctggaaaggatgcgtttcacctgagggtcagggtccatccataccatgtccttcgtatcaacaagatgctttcatgtgctggggctgataggctccagactggaatgaggggtgcttttgggaagcctctgggtacctgtgctcgtgtggacattggccaagtgctcctatctgtgcgctgcaaggagagcaatgctgttcatgctgatgaagccctccgccgtgctaagttcaagttccctggccgtcaaaagatcattcgcagcaggaagtggggctttaccaagttcaacaaggccgattacatcaagtacaagagtgagggaagaatcgtgcctgatggtgtcaatgctaagctgcttggtgtccatggccccattgctaaacgcgcacctgggcaggcgatcctggcttgaggcagttgaagcatgcacagaccatttccttcgctagatggaactcatgagtttttatccgctttagctagtatattccccatgcttgaaccagtgttaagtaaagctggctgctggctgcagtataatctacttctgtggttctttactgttggccgtgtcctggtggagttttacatatctgcagttgtactgttttagcgctttctggagattgttatctacaagtgctacagattttctggatcatctaggaattatgtataacgtttgcgtttgctcaatctat

SEQ ID NO: 3173 - DNA, 707 bp, Triticum aestivum
gagaaggagagggagcagccgcagccatgggtcgcgtccgcaccaagaccgtgaagaagacctcccgccaggtcatcgagaagtactactctcggatgaccctcgacttccacaccaacaagaaggtgctagaggaggtctccatcctccagtcgaagcgcctccgcaacaaggtggccggcttcaccacccatctgatgcgccgcatccagcgcggccccgtgcgcggcatctccctcaagctgcaggaggaggagcgtgagcgccgcatggacttcgtgccggagaagtcggcgctcgaggtcgacgagatccgcgtcgacaaggagaccatggacatgctggcgttcctcggcatggctgacctccccggcgtcgagcgcgcccccgaaaccacctctgccgccgccccctaccgccagcccttcaacggaccccgcggtggcaaccgcgcctaggttcctccgcatcgtcatcgtacccctatattatgctttatgtcttttagatctgttacttgtggcaagtaatgttttgaactcaaggcttaagttcgaggtgttttgatctgcgtatggtggacatgatctgtttatctcaccgtttatctgaagtgattcgatatattactgttgatctttgaagtttatgctcgttgctcgatgatcgattgatttatgagctatctacctattgttaattatata

SEQ ID NO: 3174 - DNA, 676 bp, Triticum aestivum
gcccaagccgccgccggagaaggagacggagcagccgcagccatgggtcgcgtccgcaccaagaccgtgaagaagacctcccgccaggtcatcgagaagtactactctcggatgaccctcgacttccacaccaacaagaaggtgctcgaggaggtctccatcctccagtcgaagcgcctccgcaacaaggtggccggcttcaccacccatctgatgcgccgcatccagcgcggccccgtgcgcggcatctccctcaagctgcaggaggaggagcgtgagcgccgcatggacttcgtgccggagaagtcggcgctcgaggtcgacgagatccgcgtcgacaaggagaccatggacatgctggcgttcctcggcatggccgacctccccggcgttgagcgcgcccccgaggccacctctgccgctgcgccctaccgccagcccttcaacggaccccgcggtggcaatcgcgcctaggttcctccgcatcgtcgtcgtcgtacccctatcatctttacatgttttattattagatctgttacttgtggcaagtgatgttttgaactcagagcttaagttcgaggtattttgatctgcgtatggtgaacatgatctgtttatctcatcgtttatctgaagtgattcgatatattactgctgagctttgaagtttaagctc

SEQ ID NO: 3175 - DNA, 620 bp, Triticum aestivum
gagaaggagaggaagcagccgcagccatgggtcgcgtccgcaccaagaccgtgaagaagacctcccgccaggtcatcgagaagtactattctcggatgaccctcgacttccacaccaacaagaaggtgctcgaggaggtctccatcctccagtcgaagcgcctccgcaacaaggtggccggcttcaccacccatctgatgcgccgcatccagcgcggccccgtgcgcggcatctccctcaagctgcaggaggaggagcgtgagcgccgcatggacttcgtgccggagaagtcggcgctcgaggtcgacgagatccgcgtcgacaaggagaccatggacatgctggcgttcctcggcatggccgacctccctggcgtcgagcgcgcccccgaggtcacctcctccgccgccccctaccgtcagccgttcaacgggccccgtggtggcaaccgcgcctaggttcctccgcatcgtcgtcgtacccctatattatgctttatgtcatttagatctgttacttgtggcaagtaatgttttgaactcagagcttaagttcgaggtgttttgatctgcgtatggtggacatgatctgtttatcgcaccgtttatctgaagtgattc

SEQ ID NO: 3176 - DNA, 638 bp, Triticum aestivum
ctcctctcgcattcacccccaggccactcaggcttccgccgaggcagaacattacaccggaggtagaggggaaacgcgcaacagccatggcctcgcatccgatcctttcagtgatcgctgtggtcgccatctttgccctcgccggcaccgccgtcgccaatgacctccccgactacattgttcagggacgggtctactgcgacacgtgccgtgccgggttcgagacaaatgtgaccgagtacatcaagggtgccaaggtgaggctggagtgcaagcgcttcggcactgagaaagttgagcgctcgatcgacggcgtaaccgacgagactggcacttacaaaatcgagctcaaggacagccatccggaggatatctgcgagatggttcttgtccagagccccctcccaaactgcaacgagattcaggaactcagggaccgcgccgagatagtcctcagcaggaacgttggcatcagcgacaacatccgcatggccaacccgctcggctacctcaaggacaagccgctgcccgtctgccctgacctgctcaagacgttcaaccttactactgatgatgatcactgagcagagcaggcagaccgccaacatggtaccactggagaggctgctgcaccacac

SEQ ID NO: 3177 - DNA, 752 bp, Triticum aestivum
tcaccccagtcatcagctccgccgagcagacaatcaccggagtagagggaaacgcgcaacagccatggcctcgctccgcatcctttcagtgatcgccgtggtcgccatctttgccctcgccggcaccgccgtcgccaatgacctccccgactacattgttcagggacgggtctactgcgacacgtgccgtgccgggttcgagacaaatgtcaccgagtacatcaagggtgccaaggtgaggctggagtgcaagcgcttcggcactgagaaagttgagcgctccatcgacggcgtaaccgacgagaagggcacttacaaaatcgagctcaaggacagccatccggaggatatctgcgagatggttcttgtccagagccccctcccaaactgcaacgaggttcaggctctcagggaccgcgccgagatagtcctcagcaggaacgttggcatcagcgacaacatccgcatggccaacccgctcggctacctcaaggacaagccactgcccgcctgccctgacctgctcaaaacgttcaaccttactactgatgatgatcactgagcagagcaggcagaccgccaacatggtaccactggagaggctgctgcaccacaccaataaatctgttatctggcatgcaaatagcatggttgtatcagcagagtacagcatcaatgcgtagctgtctctaatgctacttacagccttgtgatgtaccagatcttgccatcgattcttcttctgcaagctg

SEQ ID NO: 3178 - DNA, 905 bp, Triticum aestivum
ctcctctctgcattcacccctagatcattcagcctccgccgagccagaacacacaccggaggtagaggggaaacgcgcaacagccatggcctcgctccgcatcctttcagtgatcgccgtggtcgccatctttgccctcgccggcaccgccgtcgccaatgacctccccgactacattgttcagggacgggtctactgcgacacgtgccgtgccgggttcgagacaaatgtcaccgagtacatcaagggtgccaaggtgaggctggagtgcaagcgcttcggcactgagaaagttgagcgctcgatcgacggtgtaaccgacgagactggcacttacaaaatcgagctcaaggacagccatccggaggatatctgcgagatggttcttgtccagagccccctcgcaaactgcaacgagatccaggatctcagggaccgcgccgagatagtcctcagcaggaacgttggcatcagcgacaacatccgcatggccaacccactcggctacctcaaggacaagccgctgcccgtctgccctgacctgctcaaaacgttcaaccctaccactgatgatgatcactgagcaggcagaccgccaacatggtaccactggagaggctgctgcaccacaacaataaatctgttatctggcatgcaaatagcatggttgtatcagcagagtacagcatcaatgcatagctgtatctaatgctacttacagccttgtgatgtaccagatcttgccatcgattcttcttctgcaagctgtaacaaatcttttcaacaaaagtcaccatccatctaacctgataggaacaatgccatttcatttctttctaaattaccaacttcagaaatcgctcatgttagataacgccttgactgtaatttacacccatggcact

SEQ ID NO: 3179 - DNA, 720 bp, Triticum aestivum
  N_region (4)..(4): n = any nucleotide
cacnggcgacggagaccgagaccttcgccttccaggccgagatcaaccagctcctctcgctcatcatcaacaccttctactccaacaaggagatcttcctccgcgagctcatctccaactcctccgatgccttggacaagatcaggttcgagagcctcacggacaagagcaagctcgatgcgcagcccgagctcttcatccacatcatccccgacaaggcgaccaacacgctcacgatcgtcgacagcggcattggcatgaccaagtcggacctcgtcaacaacctcgggaccatcgccaggtcggggaccaaggagttcatggaggccctcagccgccaggcgccgacgtgtccatgattgggcagtttggtgtcggtttctactccgcctacctcgtcgccgagagggttgtcgtcaccaccaagcacaagcgacgacgagcagtagcgtgctgggagtcccaggccggtggctccttcaccgtcactcgtgatacgtctggggagcagctcggcaggggtaccaagatggtcctctacctcaaggacgaccagatggaataccttgaggagcgccgcatcaaggatctagttaagaagcactctgagtttatcagctaccccatctccctgtggactgagaagaccactgagaaggaaatttctgatgatgaagatgacggaggagaagaaggatactgaggagggtcagctgaggg

SEQ ID NO: 3180 - DNA, 484 bp, Triticum aestivum
tcgtcctgcaggacaccagcatcgtcacgccggagaaccaccccatccacctccacggctacgacttctacatcctcgccgagggcttcggcaactacgacgccgagaaggacgccgcgaagttcaacctcgagaacccaccgcagaggaacaccgtggcggtgccggtgaacggctgggcggtcatccggttccgcgccgacaacccgggggtgtggctcatgcattgccatctcgatgtgcacatcacctggggcctggcaatggcgtttctggtcgaggacgggtatggcgagctacagtcaactggaggcgcctccagttgatcttccaatgtgctaatgaccggcaaagatacaaacaccagggatattgaaggctgcccacacgttctattctcagttcctgccatttggggggtatttgtgatctttattttgtacttctaactaggggttttgattctccaccatgatttgtaaca

SEQ ID NO: 3181 - DNA, 279 bp, Triticum aestivum
ccacatgatctgccgcgacgaccggccctacgccgacggcaccggcaacccggacaccggcgccgacttcggggccgcccccgacatcgaccacctcaacccgcgtgtgcagaaggagctcgtcgagtggctcaactggctcaggaccaacgtcggcttcgacggctggcgcttcgacttcgccaagggctactccgcggacgtcgccaagatctacatcgaccgctccggggccagcttcgccgtggccgagatatggacgtcgctggcgtacggtgg

SEQ ID NO: 3182 - DNA, 496 bp, Triticum aestivum
  N_region (142)..(142): n = any nucleotide
ccggccgccgcggccgggaccccgcggcgccgcaagtccggatcgactacgcccgtgcaccagacgcccggggtcgcctggcccagcccctaccccgcggggggcaccagcccgctgccggccggggtgtcgccctcgccgngccaggtccacagcccaggcggttcttacaagcggccccttccgcgccgccctcgccggccaagcacatcaaggccacgctcgctaagaggctgggcggagggaagcccaaggaggggccgataccggaggaaggcgcggttgcggccggagccggcgctggagccgtcgcggatggggcggaagcggaaaggccattggacaagacgttcggattcgggaaaaacttcggggccaaatacgagctcgggaaggaggtggggaggggccatttcgggcacacctgctcggccgtcgtgaagaagggcgagtacaagggccagaccgtcgccgtcaagatcatctccaaagctaa

SEQ ID NO: 3183 - DNA, 862 bp, Triticum aestivum
ttccttaggatatttcttcatcgtttgattgccatagctctgttcacatcattggcggtgtcgtggttcaaataacagttgtcaggggagaaaccaagtccgagcgaaagttgttgaggtgatcacaagcttatgtggctggcatcagtttgcacaaccatttctttcattgcctcatgctatattgtgctagccgccatttccaatgggcagcaatactggttagtttaataggtggtgttacaatgactggtgttcttggaacaatgacgtactttgtggtgaaatcaaagcgcatgaggaagattagaaaaaaagagaagatgtcaagaagaagcggctcaagctcctgggttgataatactgaaatctcagagactgagcttaatcaagtgtatgccttgtaaagagacagggtgtttgaactcagccttgcctctgcaattgagaatgtacatgcttaatcaagtgtatgccttgtaagacacagggtgtttgaactcagcctcatatctggaatcgagaatgtacatgaaaattccagatgcgcgcattaacaaatagattactcacattattccttgattgtacaattcctttctgtaatgacaaacatgcatacctaaaagggaggcccattgtctaaggctcatgcagttgaagaatccatctgtgcacaatctgttgtaaagtcggttgcacttattctatatgttacattttccagccatcaaaaaagtgcacaatctgttgtaacatgtgaaggtgcacattataaaaaccacttacatttttccagacaatcaataattcaacgagacattatgttctggatatggtggtaagtatgcatctacattac

SEQ ID NO: 3184 - DNA, 708 bp, Triticum aestivum
ctttttgctactgttgctttcgcagctatattcactgtacctggtggaaatgaaaacaatggagttgcgattgttgtccagactgcttcctttaggatattcttcatctttaatgccatagctctgttcacatcattggcggtggtcgtggttcaaataacagttgtcaggggagaaaccaagtctgagcgaaaggttgttgaggtgatcaacaagcttatgtggctggcatcagtttgcacaaccatttctttcattgcctcatgctatattgtgctaggccgccatttccaatgggcagcaatactggttagtttgataggtggtgttacaatgactggtgttcttggaacaatgacgtactttgtggtgaaatcaaagcgcatgaggaagattagaaaaaaagagaagatgtcaagaagaagcggctcaagctcctgggttgataatacggaaatctcagagactgagcttaatcaagtgtatgccttgtaaagaggcagggtctttgaactcagcctcgcctctgcaattgagaatgtacatgcttaatcaagtgtatgccttgtaagacacagggtgtttgaactcagcctcatatctggaatcgagaatgtacatgaaaattccagatgcgtgcattaacaaatagattactcacattattccttcattgtacaattcctttctgcaatgacaaacgatgca

SEQ ID NO: 3185 - DNA, 810 bp, Triticum aestivum
catttcaagatgttgagggggagatgaagaaagaagacgtgctaggttagaacgtcatcagaggacccgtgagcgagcggcaaaagctttggctgagaagaatgaacgagatatgcaggttcagagggaacaagcagaaagagatagaattggtgactcattagactttgaaattaagaggtgggctgctggaaaagagggcaacttgcgtgctttactatcaactctgcaatatatactttggccagagtgtggatggcaagctgtatccttgaccgatttgattactggtgctgctgttaaaaagcagtacagaaaggcaacgttatgcatccatcctgataaggtgcaacagaagggtgcgactcttcaacagaaatatattgctgagaaggtctttgacatgctcaaggaggcatggaacaaattcaattctgaagagctgttttaagccatccctgtgaatgtacagccagcttttaactaagtgtacccatgtgaagccctggagcattaagatgcagccgatcttctttttggtgcagctccatcaaagttatcagtgtattataggttctgttcaaatgcagacttctgttctttgaggattactggccggttgctttgggatgattcttttttatattatataccttggagggccaaagattacatgtatttcttcaacaccatttgtctatggtcagaccacagaaagtcgaaaccacagtttatgctttacttaagatcttacaagaaacagatgtacaagtatgctttgccctttgattattctcactcttgtactcc

SEQ ID NO: 3186 - DNA, 882 bp, Triticum aestivum
atttgaatttgaaagtacccgatcatcatctgacgcatttcaagatgtggagggggagagtgaagaaagaagacgtgctaggttagaacgtcatcagaggacccgggagcgagcggcaaaagctttggctgagaagaatgaacgagatatgcaggttcagagggaacaagcagaaagagatagaattggtggctcattagactttgaaattaagaggtgggctgctggaaaagagggcaacttgcgtgctttactatcaactctgcaatatatactttggccagagtgtggatggcaagctgtatccttgactgatttgattactggtgctgctgttaaaaagcagtacagaaaggcaacgttatgcatccatcctgataaggtgcaacagaagggtgcgactcttcaacagaaatatattgctgagaaggtctttgacatgctcaaggaggcatggaacaaattcaattctgaagagctgttttaagccatccctgtgaatgtacagccagtttttaactaagtgtacccacgtgaagccctggagcattaagatgcagccgatcttctttttggtgcagctccatcaaagttatcagtgtataataggttctgttcaaatgcagacttctgttctttgaggattactggccggttgctttgggatgattcttttttatattatataccttggagggccaagattacatgtatttcttccacaccatttgtctatagtcagaccacagacaagtcgaaaccacagtttatgctttacttgagatcttacaagaaacagatgtacaattatgctttgccctttgattattctcacgcttgtactccacagtgtgcagtttgactattaattctcaacatgat

SEQ ID NO: 3187 - DNA, 717 bp, Triticum aestivum
gagcaagcagaaagagatagaattggtgactcattagactttgaaattaaaaggtgggctgctggaaaagagggcaacttgcgtgctttactatcaactctgcaatatatactttggccagagtgtggatggcaagctgtatccttgaccgatttgattactggtgctgctgttaaaaagcagtacagaaaggcaacgttatgcatccatcctgataaggtgcaacagaagggtgcgactcttcgacagaaatatattgctgagaaggtctttgacatgctcaaggaggcatggaacaaattcaattcagaagagctgttttaagccatccctgtgaatgtacagcagcttttaactataagtgtacccacgtgaagccctggagtattaagatgcagccgatcttctttttggtgcagctccatcaaagttatcagtgtataataggttctgttcaaatgcagacttctgttctttgaggattactggccgtttgctttgggatgatacttttttatattatataccttggagggccaaagattacatgtatttcttcaacaccatttgtctatagtcagaccatagaaagtcgaaaccacagtttatgctttacttaagatcttacaagaaacagatgtacaattatgctttgccctttgattattctctcttgtactccacagtgtgcagtttgactattaattctcaacatga

SEQ ID NO: 3188 - DNA, 712 bp, Triticum aestivum
caaatcgtacttgttgaaaccctagcgccatctcgccgccggcgatgtccgcttgacggacgcgccaccgagaaagcaccaaactcctccgagccctcccctctctctgatccgtcgcccgcccgcgggatccggatcgtcttcagccatgtcaaaggccagggtctacgccgacgttaacgtggtgcgccccaaggagtactgggattatgaggccctcgccgtccagtggggtgagcaggatgactatgaagttgtgcggaaagttggaaggggcaaatacagtgaagtctttgaaggtatcaacgtcaacaataatgagaaatgtgttattaagatcctgaagcctgtgaagaagaagaagatcaaaagagagatcaaaatactacagaatctctgtggaggtccaaatattgtgaagctgcttgatattgtcagggatcagcattcaaaaacaccaagcttgatctttgaatacatcaataacacagatttcaaagtgctatatccgacattgacagattatgacattcgctactatatctatgagttactgaaggcttgggattactggcattcacaaggcattatgcaccgagatgtgaagcctcacaatgttatgatagatcccgagcttcgaaaactccggttatagactggggcctgctgaatttacctcccgggaagggataacggcgggtggcccaaggca

SEQ ID NO: 3189 - DNA, 1364 bp, Triticum aestivum
ggtctgaccaacgctgttccgggcaatgctcgccgtttttatttcggtggcccttccccccatcttgctaatgaacagtctgttgcaatatactttaatcaagtcatggctgctattggaggaaacactgctggtccaggtgatgctgttcttaatgtgtacataaaccatgacaagaaattcgcttttgtggagatgaggtctgtggaggaagcaagcaatgcaatggcactggatggcattttgtttgaaggtgcaccagtgaaggttagaagaccaacagactataacccttctctggcagctgccctgggcccaagccagccaagctccaatttgaatcttgctgcggttggcctaacaccaggttcagccggagggttagaaggcccggaccgtatttttgtgggtggtctcccctattacttcacagaggctcaagttcgggagctgcttgaatcatttgggcctcttcgaggatttgatcttgtgaaagatagggaaactggtaactcaaagggctatgcgttctgtgtctaccaggacctcaatgtcactgacatagcctgcgctgctctaaatggtatcaagatgggagacaaaactcttacggtcagacgagcaaaccagggctcagcccaacctagaccagagcaggaaaatatcctgttgcaggcacagcagcaggtgcagttacagaaacttgtgtatcaagttggagcgctccctacaaaggttgtatgcctgacccaggtagttactgctgatgaattaaaagatgatgaagaatatgaggacattatggaggacatgaggttggaagctgggaaatatggtaacttggtgaaagttgtcatcccgcgccctcatccgagtggagagccagtttctggagttggaaaggtgttcttagagtatgcagatgttgatggttccaccaaagcaaagacggcgatgcatggaaggaaattcggtggaaacccagttgttgcggtcttctaccccgagaacaagtttgctgatgaggactatgacgcggcagcataaattatctctcttttccaatgacaatagtgctttgtgtagtttgttcgatttacagcaacgttttcccttctagtcgagctttcctgtagcctggatttatgcagaaccgccagttattaatattggaagatagattgcctaaagatgatctattggtcttgtcccttaatcttgactggcgtttagaggtcccagggtatcgccattctcttcgtttagcgcccttgaaagattattagcaagtaactttacctttagctttaccctgcaaatggctcaaaagagtcatcttgaacaacttggcatggtaaataaga

SEQ ID NO: 3190 - DNA, 1156 bp, Triticum aestivum
  N_region (1110)..(1110): n = any nucleotide
actcccatgaactacatgatgaagataatgatatggattgctggcatgacatacatggccgagataatgccacaatgggaaacttggataacagtccagtacaaagacttgaggctgcggaagtgaaatctggtggtaaattgcattgttgtaagagaaaatccagcaagggcaaggcaaaggatgattactcatatggagatgagaaattgcaaatgctgaacatagaatcaatctctaggaagcaaaagagtgatagccagtttgatgaaggttgcgacagagataacgctttggactctttgcttaatgatgtggatgaagccgcacgagagaactgttatgaagttcgggaagaagaaatggatggcatggaagtgaagcctagagggaagatgcaaactggtaagagaaaaaccagcagatgtcaagcgggtgataaagcagctaaatttccttgtgatatagaagggtgtgacatgagcttcagctcacagcaggatttgttgttgcacaagcgtgatatttgtcctgttaaaggatgccagaaaaagttcttctgccataaatacctgctccagcaccgcaaagtgcacatggataaaggccactcaattgtgaatggaagggctgcaagaagacattcaagtggccatgggctaggacagaacacatgagggtccatacgggggtgcgaccttacgaatgcatggtacctggctgtggtcagacattcagatttgtgtcggatttcagccgccacaagagaaagactggccattccagtggtaagaaaaataaggagagtacataacttctaatccctgtgcagtagtacaggttctttctctgaagggtatgctgattgaataactgcatcagattccatttgtcgttggattaacctgcattaggagtctaattcattccattgtttactgactccgcataatgagtcaatttttccagtgccttgggtccaactggcctgttgttgactggggttattccaagtcaattgtatgtgctttagtttatcgccaacgcttggggaagttccttttgtcttcatggttaaattgacatacttatcttgctgtctggtggcantctgttagttgttcgttgttattttcctatttattattacggattg

SEQ ID NO: 3191 - DNA, 650 bp, Triticum aestivum
ggccgtgtcgtcgaacgacatgtccactggcaggcgacgatcaggggccgagcgacagcccctactcgggcggcgtgttcctggtgaccatccacttcccgccggactacccgttcaagccccccaaggtggccttcaagaccaaggtgttccaccccaacatcaacagcaacggcaacatctgcctcgacatcctcaaggaccagtggagccccgccctcaccatttccaaggttctgctgtcgatatgctcgctgctgacggaccccaacccggacgacccgctggtgccggagatcgcgcacatgtgcaaggccgaccggaccaggtacgagtccacggccaggggctggacgcacaagtacgccatgggatagataatgaagagcttcagctcgatcgagcttgaagatgtggaaaccatgtaccgatgaataataatcaatcaaccttttgcttcaaattatactagctgatgctgagtatgaacttaatcaccgtcagtcctctcccgtgcgaagggttgttcgcacaagtgacacgcagagagcatacactcacccctataaatttagaaaaatacgagcaccagtgtcaagtctaggacattaactctgttggcctagggatacaattgtcattctaaccag

SEQ ID NO: 3192 - DNA, 689 bp, Triticum aestivum
  N_region (249)..(249): n = any nucleotide
  N_region (258)..(258): n = any nucleotide
aaaacaagcagtagtgtgagatcaccttgagattaggatacaagttccacatccatctgcccaagaacaggttaagacattagcgtctttcctggaaattttggtggttcctagaggaaatggcgctgaggaggatcgtcaaggagctcaaggacctgcagagggacccgccgacctcctgtagcgcagggccggtgtcgtcgaacgaccatgttccactggcaggcgacgatcatggggccgagcganagcccctantcgggcggcgtgttcctggtgaccatccacttcccgccggactacccgttcaagccccccaaggtggccttcaagaccaaggtgttccaccccaacatcaacagcaacggcaacatctgcctcgacatcctcaaggaccagtggagccccgccctcaccatttccaaggttctgctgtcgatatgctcgctgctgacggaccccaacccggacgacccgctggtgccggagatcgcgcacatgtgcaaggccgaccggaccaggtacgagtccacggccaggggctggacgcacaagtacgccatgggatgagatagataactaaacaagagcttgagctcgatcgatcgaactcaaagatgtggaaaccatgtaccgatgaataatactcaatcaaccttttgcttcaaattatactagctgatgctgag

SEQ ID NO: 3193 - DNA, 644 bp, Triticum aestivum
ccccacgctgtgctctccacagttagcgtcattgtctacttctgctgctttgtcatgggctttggcccgatccccaacattctatgtgcagagattttccccaccagagtccgtggtgtctgcatcgctatttgcgccctcacattctggatatgtgacattattgttacctacagcctgcctgtgatgctgaatgctattggtctagcaggtgtctttggtatatatgcagtcgtttgctgcatcgcctttgtgttcgtctacctaaaggtcccagagacaaagggcatgcccctcgaggtcatcaccgagttctttgcggttggtgcgaagcaagcgcaggccaccattgcctgattcatcatggagctttgttttcagtttgcacactgcactgaaaattgcaaattggacgggtcctcatgaggaacggaaaaccttttgagttgtaaatgagatagctacccaaagagttcatcacgaggaacgggaagctgtaaaagtaggaggatttcatgcccccatttcatcgtctattcttgcttattagtactgtactgtaatcgtcattagttgttgtggggaagttcaacttgctaatctgattctgaactactatgctgatgtctgaaataaagaaaaag

SEQ ID NO: 3194 - DNA, 1028 bp, Triticum aestivum
gagcgcgagatcaccaaggacatcgtcatgcccaatatttctacggcaacgctggaaagaaagcatagcatctctgagtgcggaagcgctagacacccagcagaagacaagagctcatcatatgctgatgactggatggtgcagttcgctcgtctattcaagaaccatgttggttttgattctgatgcattagtggatctccgtgacctcggtacgcggctgtgcatcgaggcaatggaagacaccatcacaagcgaagaagcccaggagatatttcatgcggcagaggcaaaatttcaggaaatggcagctttagcgttgtttaactggggcaacatacacatgtctcgcgcaaagaaacgactatctttatcagaggatgcttcaaaggagtctgtactttcccaggtcaaaaccgcatacgaactggcatgcgctgaatacgtcaaagctggaaagaagtttgaagatactgtggatgtaaagccagacttttatgaaggccttattgcgcttggaaatcaacagtttgagcaagcaaagctgtcttggcgttatggagatgcttgtaaggtagacatgcgaactgaagtactagagctattcaatcgtgctgaggataacatggaaaaaggaatggagatgtgggaggggatagaatacttgcgactaaaaggattgtctaaatcaaaaaaggagaaaatcctactggataagttgggattggatgggcaccaaaaagatttaacagcagatgaagcgtttgagcaagcttcaaatatgcgatcacagctaaacatttcatgggctaccattctttatgagcgatcagtagtagaattccagttaggtcttgctagctgggaggagagtctcaccgaagcaattgagaaatttaagaccggtggagcttcgctggcagatatcagtgtaatgataaagaaccattgtgcgaatgagaaaactcaagaaggtatgatgtaatcgtgtgacctttttctgtaattttttgttcctctgttgctaaa

SEQ ID NO: 3195 - DNA, 1020 bp, Triticum aestivum
ggaaagaaagcatagcatctctgagtgcggaagcgctagacacccagcagaagacaagagctcatcatatgctgatgactggatggtgcagttcgctcgtctattcaagaaccatgttggttttgattctgatgcattagtggatctccgtgaccttggtacgcggctgtgcattgaggcaatggaagacaccatcacaagcgaagaagcccaggagatatttcatgccgcagaggcaaaatttcaggaaatggcagctttagcattgtttaactggggcaacatacacatgtctcgtgcaaagaaacgactatctttatcagaggatgcttcaaaggactctgtactttcccaggtcaaaaccgcatacgaactggcatgcgctgaatacgtcaaagctggaaagaagtttgaagataccgtggatgtaaagccagacttttatgaaggccttattgcgcttggaaatcaacagtttgagcaagcaaaactttcttggcgttatgcagatgcttgtaaggtagacatgcgaactgaagtactagagctattcaatcgtgctgaggataatatggaaaaaggaatggagatgtgggagggaatagaatacttgcgactaaaagggttatctaaatcaaaaaaggagaaaatcctactggataagttgggattggatgggcaccaaaaagatttaacagcagatgaggcgtttgagcaagcttcaaatatgcgatcacagctaaatatttcatgggctaccattctttatgagcgatcagtagtagaattccagttaggtcttgctagctgggaggagagtctcaccgaagcaattgagaaatttaagaccggtggagcttcgctggcagatatcagtgtaatgataaagaaccattgtgcgaatgagaaaactcaagaaggtatgatgtaatcgtgtgacctttttctgtaattttttgttcctctgttgctaaatcatcaataccaaaacttgtatatgtacacaatgtatgttaataa

SEQ ID NO: 3196 - DNA, 701 bp, Triticum aestivum
ttgctgacacaacagaaccccagatctcgacttcgcctcgccagctctttcggcgagaccagacgcaggccgtcaccagccgcgtcgtcggaacatatgggtacatggcgccggagtacgtgatgcgcgggaactactccgtgaagtcggacgcgttcagcttcggggtcatggtgctggagatcgtgacgggcaggaagaacaacgactgctacaactcccagcagtctgaagatgtcttgactacgatatgggagcactggacggccggaacagtgctggctacggtggacccgagcatcggcagcagcttctcagagagcgacgtccgaaggtgcgtccacgtcgggcttctgtgcgttcaggggaacccggcggatcggccggtgatgtcgtcggtggtcatgatgctcggaggcgaaacagtctctctcagcgccccgtccaagccggcgttctacgcgaggaacgccggtgccgatcactcggtcatctcgtccactgtgtccgtgcaggatggtcctggagtgtctatttaacaagttcagttgcagattaattcatgcctcacgcctgagggcatgtgtaaagaaatctatttttttaaagaggtcaccctgcataagtgatgcacattctgtaagatggtttcactgcaagatggagagatgtcattcaaggcaaggttgttgtactgtaac

SEQ ID NO: 3197 - DNA, 606 bp, Triticum aestivum
gcgagggatagaattgctgtaatcacatggaatatcccgatcagataactcagaccataactcatgagttaatacatgcttatgatgactgtgttggcaagaacatggactggacgaactgcgctcaccatgcttgctctgagattcgagctaatcatcttagtggcaattgccattacaaacgggaactgatgaaaggcttcctgaagataagggggcatgagcctgaatgtgttaaaagacgttcgctggaatctgtcaagaacaacccttactgttcagagacagctgcaaaggatgcaattgaggctgtgtggaatatatgctacaacgacacacgcccgtttgatagggctccatgaagtgcaagctgttgagagagttttgtgtcctttcagatgagctctgtgaagttcaagcctgtgggacaggttagtttcccttgagatgggctccatggagtacaagcctgtagggacagtttagtatcgcttcagattgtacttcagcagagcatcacaacaaaatccggaaatttggcgctgaaccaaaactttgaatgtatattagtccaaacaatgtaacagattattccatgcaattgaa

SEQ ID NO: 3198 - DNA, 689 bp, Triticum aestivum
ggatagaagtttgctgtaatcacatggaatatcccgatcagataagtcagaccataactcatgagttaatacatgcttatgatgactgtgttggcaagaacatggactggacgaactgcgctcaccatgcttgctctgagattcgagctaatcatcttagtggcaattgccattacaaacgtgaactgatgaaaggcttcctgaagataagggggcatgagccagaatgtgttaaaagacgttcgctggaatctgtcaagaacaacccttactgttcagagacagctgcaaaagatgcaattgaggctgtgtggaatatatgctacaacgacacacgcccgtttgatagggctccatgaagtgcaagctgttgagagatttttgtgtcctttcagatgagctctacgaagttcaagcctgtgggacaggttagtttcccttgagatgggctccatgaagtacaagcctgtcgggacagtttaggttcgcttcagattgtacttctgcagagcgttgcaacaaaatctggaaatttggcgctgaaccaaaactttgaatgtatattagtccaaacaatgtagcaacagattattccatgcaattgaattcttttgcatggcacattgtgacagagttcactgagctcaaaataagactgggcgtaactgattaattctttcccaggtaaa

SEQ ID NO: 3199 - DNA, 661 bp, Triticum aestivum
cagggggacctcatcgagagcgtccgcgtcctgccgcgcaaggtgcacttgcacgcaggcactgatgaacctctgaatgtgacattcatgagagcaccttcttcggcgctgctcaaaatagatgttcctttaatgtacattggagaggacgcctcacctggcctcaggaaaggagcttacttcaacaccataaaacgaactgtcaagtttctctgccctgctgacatagtcccaccatacattgaagtggacctaagcgagttggacgtcgggcagaaactgctgatgcgcgatctgatagtccacccggcgctgaaattgcttcagtcgccagatcaacccatctgtagcattatagggtcaagagcccccgaccagaagaaagagaaatcaaaataactctctccactgtattaactatttccaacagaataaacttgttttgctatctatgctcgagttattcagttcttgattatcccacctagaacgaatactactaggatgattttgtagcaagagaccactgttttacctgaggaatggaagccagatgctacagataagaatacggcaggaatgtctaaatatgtttatgtgattttgttcacagaaacttcactgtgatgtattttatcagaaaagcgtttatctcttgaca

SEQ ID NO: 3200 - DNA, 727 bp, Triticum aestivum
agctcgtcgaccacctcgggacggtccttcttcctctcccgcctcttccgtctccaggtttggtccgagcaggccgggcagggggacctcatcgagagcgtccgcgtcctgccgcgcaaggtgcacttgcacgcaggcactgatgaacctctgaatgtgacattcattagagcaccttcttcggcactgctcaaaatagatgttcctttaatgtacattggggaggacgcctcacctggcctcaggaaaggagcttacttcaacaccataaaacgaactgtcaagtttctctgccctgctgacatagtcccgccatacattgaagtggacctaagcgagttggacgtcgggcagaaactgctgatgcgcgatctgatagtccacccggcgctgaaattgcttcagtcgccagatcaacccatctgtagcattatagggtcaagagcccccgatcagaagaaagagaaagagaaatcaaaataactcgctccgctgtgttaactatttgcaacagaataaacttgttttgctatctatgctcgagttattcagttcttgattatccttcctagaacgaatactaccagtatgattttgtagcaagggaccactgttttacctgaggaatggaagccagatgctacagataagaatacggcaggaatgtccaaatatgtttatgtgattttgttcacagaaacttcactgtgatgtattttatcggaaa

SEQ ID NO: 3201 - DNA, 743 bp, Triticum aestivum
cggtgccgtccaagcagatccgcaagctcgtcgaccacctcggacggtccttcttcctctcccgcctcttccgtctccaggtttggtccgagcaggccgggcagggggacctcatcgagagcgtccgcgtcctgccgcgcaaggtgcacttgcacgcaggcactgatgaacctctcaatgtgacattcatgagagcaccttcttcggcactgctcaaaatagatgttcctttaatgtacattggggaggacgcctcacctggcctcaggaaaggagcttacttcaacaccataaaacgaactgtcaagtttctctgccctgctgacatagtcccgccatacattgaagtggacctaagcgagttggatgtcgggcagaaactgctgatgcgcgatctgatagtccacccggcgctgaaattgcttcagtcgccagatcaacccatctgtagcattatagggtcaagagcccccgaccagaagaaagagaaatcaaaataactcgctccgctgtgttaactatttgcaacagaataaacttgttttgctatctatgcgagttattcagttcttgattatcccacctagaacgaatactactaggatgattttgtagcaaaagaccactgttttacctgaggaatggaagccagatgctacagataagaatacggcaggaatgtccaaatatgtttatgtgattttgttcacagaaacttcactgtgatgtattttatcagaaaa

SEQ ID NO: 3202 - DNA, 713 bp, Triticum aestivum
gtcatccacagaggcgcagcttaagcaacttcatgccgaaaaggcagaagcatctgctgagagtgagaagctgatctctggattgaagcaagatattgccaatcttaagacagagctcgagttagtgtcctcacagaaagctgcagttgataataaggtgtctggtttgctgagtgatctcacaacttgtgatgaaaagatgaaggagatggatagccacttgcatcagctgcacctggagcatgtgcaagtgattgcagaggcagatgctgcacggaagtccgtggcagaactgcgtgcacgggtgcgtgagctcgaggaagaggttgagaaacagaagctcatggccttcgacagcgcagaggggaagcgggaggcgatcaggcagctgtgcttctcgctcgagcactaccgcgacgggtatcagcagctccggcaagttcttcagggccacaagaggccgatggtgatggcaacgtgatcagccagccagcagcttgctggatcctcttctctctggatgcctaaagtcagtatgtcaatgtaatgtaaacatccctttccccttcccctttcttcatgtagcttcggtctactccttagtagtcttggtaaagcttgtgctttgtagttgcttcagctactggtactgtctattgtgtgtgatgtaatatattatggaccattatggcattccttttcaaaatcatctg

SEQ ID NO: 3203 - DNA, 663 bp, Triticum aestivum
cgcagcttaagcaacttcatgccgaaaaggcagaagcatctgctgagagtgagaagctgatctctggattgaagcaagatattgccaatcttaagacagagctcgagttactgtcctcacagaaagctgcagttgataataaggtgtctggtttgctgagtgatctcgcgacttgtgatgaaaagatgaaggagatggatagccacttgcatcagctgcacctggagcatgtgcaagtgattgcagaggcagatgccgcacggaagtccgtggcagacctgcgtgcacgggtctgtgagctcgaggaagaggttgagaagcagaagctcatggcctttgacagtgcagaggggaagcgggaggcaatcaggcagctgtgcttctcgctcgagcactaccgcgacgggtatcagcacctccggcaagttctgcagggccacaagaggccgatggtgatggcaacgtgatcagccagccagcagcttgctggatcctcttctctctggatgcctaaagtcagtatgtcaatgtaatgtaaacatccctttccccttcccctttcttcatgtagcttcggtctactccttaggagtcttggtaaagcttgtgctctgtagttgcttcagctactggtaccgtctaattgtgtgtgatgtaatatat

SEQ ID NO: 3204 - DNA, 680 bp, Triticum aestivum
gccgaaaaggcagaagcatctgttgagagtgagaactgatctctggattgaagcaagatattgccaatcttaagacagagctcgagttactgtcctcacagaaagctgcagttgataataaggtgtctggtttgctgagtgatctcgcgaacttgtgatgaaaagatgaaggagatggatagccacttgcatcagctacacctggagcatgtgcaagtgatagcagaggcagatgccgcacggaagtccgtggcagaactgcgtgcacgggtgcgtgagctcgaggaagaggttgagaggcagaagctcatggcgttcgacagcgcagaggggaagcgggaggcaatcaggcagctgtgcttctcgctcgagcactaccgtgacgggtatcagcagctccggcaagttctgcagggccaccaagaggccgatggtgatggcgacgtgatcagccaaccagcagcttgctggatccttctctctggatgcctaaaatcagtatgtccatgtaatgtaaacatccctttccctttcccctttcttcatgtagcttcggtctactccttagtagtcctggtaaaagcttgtgctctgtagttgcttcagctactggtaccctatgatgtgtgtggtgtaatatattatggatcattgtggcattcctttttcatcatctgcct

SEQ ID NO: 3205 - DNA, 1328 bp, Triticum aestivum
aaagcatgccaggtttgactgctgacaaatgacactaaaccttctaagggcacccacctacacatgataaaagaagacacatcatccacagtttcagatcctgggacctgcgtgggatacaggacccaggtgggatctgagcctaaatgggataatcaacctaattgggaacctgaaactcctatcgagctacatggtccatcagatgacattgagcttggtctcactaaggaactagtcccaagcttagatgaaagatgggtcattaggaaagggcgctatcttggtgtattggtatgcaaccattcgtgcaagactgtgcagagtttaagttcccagattgttgctcccaaggctgaatatgacgacaactgtctggacctgctgctggttggtggaagtgggaggctaaggttattaaggtttttggtgcttttgcagtttggaaaacacatttctcttccgaacgtggaatatgtaaaggtacgatccgtgagacttaaggcaggtccgaatacacatgatgggtgtggtattgatggggagctcctccatgtcaaggggcaggtccggtgcagtttgctacctcagcaaagtcgtttgatcggtaggccagccaaaaaccctgtacagtaactgtaaatacataaccctgcagcactatatctgcctggaaattcacacctacaaccggcaactttcttgttctttttacctctgcatccagaacagcctcgctgacagacaggcacatataactccagcgatgtacattcgcgcttgatggccgaaagtgccatacggtgacatttatccaagagttgtaaagcctatctggtctgcagcctgttgcgcttctcttcgtttagccttttctttggctggtatcggaagtgttatagagcaatctatctgatcagtgtatttgcggggacggtttggttcggaagagcatggtgcccacccctggtatgtgcggttgtttggagtcccctggtgccggccacttgatgcttgtcaccccccattagagggacaaacaaaacactcccaatgctatgtccctgatcagctcgttacaaaagtgcgaacagatttctatcgtgtcatgttcccggtatagtataggatttggatgaaccaaaaaaggagagaagatatttgtggtgctgctggcttttccacctatagtttttttgtgtgtgatgtattgagttgtaatttgtcccagctgtctgtcataacgtgttggatcataaatctttgtcaagataaacctgcaggtacatatgtggtactatgtgttgttctctgctggggaataaaca

SEQ ID NO: 3206 - DNA, 631 bp, Triticum aestivum
atagtgattttagcaataaaatgaccatctcctgagagcaattctgcagaagcaaagacaacaacacatgattgatgaatttgggggttactatccagaacacttatactggcaacagaatgatgaaccccggaatgaagatcaggaaatggaggtcagggtaagaagcgaaatggcccagattcatcatgaaatatatgaactacgtaagttggcggaaacttgtattgcatcccaagtaaagatgcagcattccattaaagaagaggtgtgcagcgcacttcgcgaagctgggttgatgccaagcaagcctgacataacagcaaaaaagggcacgtgctgcatctgccatgagatgcaagttgactctttactttacaggtgtggccatatgtgcacctgcttcaactgtgctgatcagctgaaatcgagcagcgggagttgcccaatctgtcaatctcctatcgacgatgttgttcgggctcacctgaatttttgagacttaggatttaggaagatgaaagaaaaaaagccgacactcccagctttagaagtggagttcgtgaagcctggttttgaggaggcttcttgccttttgttaaccactaaaaactataggagctaggttttc

SEQ ID NO: 3207 - DNA, 735 bp, Triticum aestivum
ccagaacacctaataactggcaacagaagaggaaccccggaatgaagatcaggtggcatctgcaccgggttcattagcacctgtctgcccatgtcacagcccaccacccaagagaattggcagcactcatcaatttgaacatcaacaacatgaaaatcaaaatttgcttgaaatggaggtcagggtaagaagcgaaatggcccagattcatcatgaaatatatgaactacgtaagttggcggaaacttgtattgcatcccaagtaaagatgcagcattccattaaagaagaggtgtgcagcgcacttcgcgaagctgggttgatgccaagcaagcctgacataacagcaaaaaagggcacgtgctgcatctgccatgagatgcaagttgactctttactttacaggtgtggccatatgtgcacctgcttcaactgtgctgatcagctgaaatcgagcagcgggagttgcccaatctgtcaatctcctatcgacgatgttgttcgggctcacctgaatttttgagacttaggatttaggaagatgaaagaaaaaaagccgacactcccagctttagaagtggagttcgtgaagaccctggttttgaggaggcttcttgccttttgttaaccactaaaaactataggagactaggttttctcgagaaaatgtatatatgttattgtgcaactgcgacacgtgttgactgggaggcaaaacatagatctaatcaaaat

SEQ ID NO: 3208 - DNA, 1018 bp, Triticum aestivum
cagaaggtacactcgatgctgtttgtgcaccatgcctgtcgtcaaccatagcactggttccttgcgggatatgggtcatgtaccactcccatatcggtagtgcaacggtggttcatctatgacatacaacagtcgatgtatggcatcgtaggaagtccttggttccatggatccatccgcatacaatgcgacacgccacttgtggccttggatgaaatctcatggaggctggatttgcacattgtgcactcagggcgcgggagagctgcgagtgggtggggttcatcgacatcgatgagttcctgcacttaccctgggaaccataaccctacaagatgtcctccggaattactcaagcaggccaaggattggtgagctcaggactgcgtgccacagctttggtccatcaggtcggactaagattccgaaaaaaggcgtcacgacaggctacacctgccggctggctgcgccggagcggcacaagtcaattgtcaggccagatgcactgaatccatcactgatcaacgtggtgcaccacttccatctgaaggaagggatgaagtatgcgaatattggccagggagtgatgctgatcaatcactacaaataccaagtctgggaggtgttcaaagaaaagtttgctggccgcgtggcgacctatgttgccgattggcaggacgaggagaatgttggatccagggacagggcgccaggtctagggaccaaaccggtggaaccggaggattggccaagtcggttctgtgaagtatatgacactggtttgaaagattttgtacacaaagaattcacagatccacagactggaagtcttccatggtagatgggtaaggacggcatttgatccgcacagcacacggtacatgatatggagagaaaaacagataacgaaagaagaaacacgaaattaagttaggtggtagagtgggttttgcacttcggtatatttttagaccttgttgttaggtttgctgtccttaatttagaagcatcatttttt

SEQ ID NO: 3209 - DNA, 639 bp, Triticum aestivum
acgtgcaagacttgtaaactgagatggagggagtagatgacaaaggtagggactaaattaaggggtgacttcttgtaagaataagtccatttcaacacctcaactcttgcccgactctggaataaaccctcaacccataaaccaggtacttcagactcatttctgccaaaacaagatccaaagtagggacttgttttgaaggtttaagggtgtcaagtgtacggttctaccgctttaaaacatgtatttcccgcactgaacattaacacagttgccatgtcatttggagaaggtatggagagaggctaccttgtgtggatatcttcgtatgcaccgcagatccacactcagagccaccaagtcttgtcatctccaccgtcctatcgctcatggcatacaattacccagctgaaaaaattagtgtgtacctttctgacgacggaggttcgattctcactttctatgctctgtgggaggcctccttatttgcaaagcattggataccattctgcaagagatataacattgagccaaggtcaccagccgcttacttctcagagtcagatgggcatcaagatttgtgcagcccaaaggaatggtcacttatcagggagatgtatgaagatatgactgagcgaa

SEQ ID NO: 3210 - DNA, 630 bp, Triticum aestivum
aatttttacctgacaaagcagctgtatcaattcgctcagtcatatcgttcatacatctcctgcccagaagaatgaaaaagaagtcagttgtcatgccaaatgctgagcactacgggtaggctgcacttaacattaagcatcttatctaatcacatgtgtgtgccatgccattccctgttcaatagccatttgattacatgtgttaaagaaaatatgtttggaaaatctgcttaccctgataagtgaccactccttcggggtgcacaaatcttgatgcccatctgactctgagaagtaagtggctggtgaccttggctcaatgttatatctcttgcagaatggtatccaatgctttgcaaacaaggaggcctcccacagagcatagaaagtgagaatcgaacctccgtcgtcagaaaggtacacactaattttttcggctgggtaattgtatgccatgagcgataggacggtggagatgacaagactcggtggctctgagtgtggatctgcggtgcatacaaagatatccacacaaggtagcctctctccataccttctccaaatgacatagtaactgtgttaatgctcagtgcgggaaatacatgttttaaagcagtagaaccttacact

SEQ ID NO: 3211 - DNA, 458 bp, Triticum aestivum
ctagattgtatcccctgacgaagaagcgtgcgaagcctgcagtgccactgggtgccaactacaggcttattgatattcctgtcagtaattgtctgaacagcaacatatcaaagatctatgtgctcacgcagttcaactcagcttctcttaatcgtcatctctcacgagcctatgggagcaacattggaggttacaagaatgaaggatttgttgaagtccttgctgcacagcagagcccagataaccctgactggtttcagggtactgcagatgctgtaaggcagtacttgtggctattcgaggagcataatgttatggagtatctaattcttgccggagatcacctgtaccgaatggactatgaaaagtttattcaggcacacagagaaacagatgctgatattactgttgctgccttgcccatggatgaggaacgtgcaactgcattgggccttatg

SEQ ID NO: 3212 - DNA, 744 bp, Triticum aestivum
tagcatatctttaactcgatacaagtagaatggcatcaaattcatagttcatgcactcgtgttgtttacctctgcttaatttgttggttttgcatgttaaaaataaattaagcccatgtaaccgatgaacgtggcatgccgataatggcggaaggaatatcgcggaagatcgccgacccattcgactacggaggcgggaccatcaatccttgcggggcggctcatcccggcctcatatatgacatcgatccaagtgattacagcaaattcttcaaatgcaccatcagcaacaagaggacacccgtggattgcaacaccaccaccatgcaaccagcgtattacttgaacctgccatccatatcggttcccgatctcaggcatcccatcaccgtttccaggactgtgaccaatgtcggcgaggtcaattctgtgtaccatgccgcagtccagagcccagcaggagtcaagatggaggtcgtcccgcccgttcttgtgttcgacgctaccaacaaagttcagacgtatcaggtgaagctatcacctatgtggaagttgcacgggtactacacatttggtagccttacctggcataacgaccaaaagacagtgaggattccaattgtgacacgacttacaattgaagaattctactgagttgttgcataataaaataaaaatatcatttccacacttaacaataaaaagcagacatgcatggcagtgatgaggaaaacatgccacctg

SEQ ID NO: 3213 - DNA, 611 bp, Triticum aestivum
  N_region (604)..(604): n = any nucleotide
tcacctcaggcagtagaagggtcgaggaaacagattcagaggtgtttcactttagaagaagctactgatacaattctcctgtgtagttccatcgttcatgatctggcatacaaggcagcaacaattgcactggagcacgagcaagaatcagaacgccctcgaccaactgttaccattgtagggaaatccattcgagacgaggatggtttccttaagctgccccacagaagaaccccaaatcgtaaggttaaaaggaaaagattggaaggtgaaacaacaaccatcacagaaaccgctgaaaaagaatccatcgtcgaagatccttcacctgtaccttctgcttcaggaatcacaagggcatctgataatatgaaacctccaaagttggaatccaagtgcaactgtgtaattatgtaagttacttcaggcaaccatccagtatgccaaagagacatgggatacacacgcacgcaaaaccactactttgcgccagcctgcttcaaatcgctatcagcaacggatagagttccacacgtgtctctagattatttttcgacgatagtgcattttctgttttttaggcaacaggaattgcactgcgagnattcttt

SEQ ID NO: 3214 - DNA, 593 bp, Triticum aestivum
tgagggtctacggagcactgctgtggtcgcctgggggaaggtcctcaacacgccggagggccatgcgtgtctacaattgggtcgttcaacgacatagccaatccgggagacgcgcggcggggccgtctggggtcggtagctgttcgtgagggagcaggaggacctgctgtcggacctcaacgacatcccgaagaaggcttgcgaccggcggatcaacgagttcgtgaagcgggcgcggtcggccaaggtgcacgcgcacatcgtggggcacctcaagaaccagatgccggcgctgatggggaaggccaaggcgcagcagaagctgctggagacgctggacgagcagttcgccaaggtgcagaaggagatgcacctgccgccgggcgacttccccagcgtcgacgagtaccgggacacgctcagcgcctacaacttcgaccgcttcgagcggctccataccaagatggtcaaggacgtcgacgacatgctcgcctacgacatcccggacctcctcaagcagttcaggaacccctacgaatgaactgaaggacaaatggacaatgtagattccaaaggcagaacacccgaatttc

SEQ ID NO: 3215 - DNA, 757 bp, Triticum aestivum
agatcaccactcttgtgttcgagccttcgaagcgtcatggtccaagtgcgactccctgggcacggcaagtacatggcctgctgccttcatgtactcgtggtcgacgtcgtgcccaaggacgtcaactctcgccgtccactccatcaagaccaagaggaccgtgcagttcgtcgactggtgtccgactgggttcaagtgcgggataaactaccagccgccgacggtggttccgggaggggacctggccaaggtgcggcgagcggtgtgcatgatcagcaacaacacggccgtggccgaggtcttctcgcgcatcgaccgcaagttcgacctcatgtacgccaagcgcgcgttcgtgcactggtacgtcggggaagggatggaggagggggaattctcggaggccagggaggatctggccgcgctggagaaagactacgaggaggtcggagctgagtgtgaagacgacgaggacagaaggcgatgagtactgagttgatcaagcatgggtacgtgcttaattgggtggcagtgttgtgcacttcatgccgtatgttgttcttctctgtccctgtttgcttgccgttgcatctgtgatgttcggtggttagcagagtacaaaaattgtcagattggttcgggtgcactgacggctcggtgccacatagtctgtgaggaggtggtatcgatacatcataataatgaacgaagattttttgtactgcaagttgcaggggtatgtcttcctttacttcgttgt

SEQ ID NO: 3216 - DNA, 834 bp, Triticum aestivum
gaagcacccaagccccagtcagttctaagaccgagagaggcgagaggaagccaggggatgctgctgcgaagggagatggccgggaagggaggcaaggggctgcttgcggcgaagacgacggcggccaagggcgccgccgacaaggacaaggacaagaagaaggcgcctgtgtcccgctcgtcccgtgccgggattcagttcccggtgggccgtatacacaggcagctcaagcagagggtctcggctaatggccgtgtgggtgccactgccgctgtgtactctgcagcaatccttgagtacctcactgccgaggtccttgagctggccggcaacgccagcaaggatctcaaggtgaagcgtatcacccctcgccacctgcagctcgcgatccgtggagacgaggagctggacaccctcatcaagggcaccatcgctggtggtggtgtcatccctcacatccacaagtccctcatcaacaagacctccaaggagtgaatgaaacgcaataacgggtagttgtgctttgtatcttcgtgatcccttgttatgttgtgctatctgtgatgtgttgctattatcacaacctgaataggttgtctgaatttgtgatggggctagctttcggtaacttgttattagggaaagacttggcaaatgtaatcgtgatatggaaccacttatatttggtttcctgaagaccagacaatccttactattcgtcttcatggatatccaggtttaactttcttttatttttgttggtttcgctcaagatcactgcaactggagtgcctgccggctggacgctttgttagattatgtttatgtatagtt

SEQ ID NO: 3217 - DNA, 695 bp, Triticum aestivum
agctcctccacagagagaggcgagaggaagccaggtaggaggctctgctgcaaagggagatggccgggaaaggaggcaaggggctgcttgcggcgaagacgacggcggccaagggcgccgccgacaaggacaaggacaagaagaaggcgcccgtgtcccgctcctcccgcgccgggattcagttcccggtgggacgtatacacaggcagctcaagcagagggtctcggctaatggccgtgtgggtgccactgctgctgtgtactctgcagcaatccttgagtaccttactgccgaggtccttgagctggccggcaacgctagcaaggatctcaaggtgaagcgtatcacccctcgccacctgcagcttgcgatccgtggagatgaggagctggacaccctcatcaagggcaccatcgctggtggtggtgtcatccctcacatccacaagtcactcatcaacaagacctccaaggagtgaatgaaatgcaataacgggtagttgttgtgtgttgtatcttcgtgatcccttgttatgttgtgctatctgttacgtgttgctattatcacaacctgaataggttgtctgaatttgtgattgggctagctttcggtaacttgttattaggtaaagacttggcaaatgtaatcgtgatatggaactgctcatatttggtttcctgaagactagacaccc

SEQ ID NO: 3218 - DNA, 730 bp, Triticum aestivum
acccaagcccaagtcagttctaagccttgtagctgctcgacctagagaggagagaggaagtcaggtaggaggctctgctgcgaagggagatggccgggaagggaggcaaggggctgcttgcggcgaagacgacggcggccaagggcgccgccgacaaggacaaggacaagaagaaggcgcctgtgtcccgctcctcccgcgccgggattcagttcccggtgggccgtatacacaggcagctcaagcagagggtctcggctaatggccgtgtgggtgccactgccgctgtgtactctgcagcaatccttgagtaccttactgctgaggtccttgagctggccggcaacgccagcaaggatctcaaggtgaagcgtatcacccctcgccacctgcagcttgcgatccgtggagatgaggagctggacaccctcatcaagggcaccatcgctggtggtggtgtcatccctcacatccacaagtccctcatcaacaagacctccaaggagtgaatgaaatgcaataacgggtagttgttgtgcgttgtatcttcgtgatcccctgttatgttgtgctatctgttatgtgttgctattatcacaacctgaataggttgtctgaatttgtgatggggctagctttcggtaacttgttattaggtaaagacttggcaaatgtaatcgtgatatggaactgctcatatttggtttcttgaagactagacaatccttac

SEQ ID NO: 3219 - DNA, 524 bp, Triticum aestivum
gccgccgctcggagcaagcgccgcaggggacgccgccatgtcgaagcgcgggaggggaggatcggcggggaacaagttccggatgtcctgggtctgccggtggcagcgacggtgaactgcgccgacaacacgggcgccaagaacctgtacatcatctccgtgaagggcatcaagggaaggctcaaccgcctgccgtcggcctgcgtcggcgacatggtcatggccaccgtcaagaaggggaagcccgacctcaggaagaaggtcatgccggcggtcatcgtgcgccagcgcaagccatggcgccgaaaggacggtgtcttcatgtacttcgaagataatgctggggtgattgtgaatccgaagggtgagatgaaaggatctgctatcacaggacccattggtaaggagtgtgctgatctctggcctaggatcgctagcgcagcaaatgccattgtctgaggagcttgttggggataatgatatgtttccttagtttcagagtggtactggatgatgaatgtact

SEQ ID NO: 3220 - DNA, 1196 bp, Triticum aestivum
ggcagctcaacacctatggcttcagaaaggtggatcctgagaggtgggaatttgcaaatgagggattcttgcgagggcagaggcacctcctcagaaatattaagcgccggaaacctacacatgggtctcagaatcagcaatctcttggctcttaccttgaggtggggaactttggacatgacgtggagatagatcatttcaaaagggacaagcagctcttgatggctgaagtggtgaagctcagacaggagtaacagaacacaaggtcagatctgcaagccatggaaaagaggctgcaaggaaccgagcagaagcaacagcagatgatgtcattcttggcgcgagtcatgcagaatcccatgttcatacgccagctgatctcccagagtgagatgaggaaggagcttgaagatgccatctcaaataaaagacggcgccgcatcgaccaaggacctgaagctgtcgatggcatgggcactggctctaccctggaacaagggtcacaggtaatgtttgagaagcaggagccagtggactcgctcgtgaacggtgtcatatccgatcttgaaagctcgtccgtcgacacaaagggagctgaggtgcagcagagtgtcgcttccagccgttcggagcaactgagaggcaggcccagtggagagctaaatgatgatttctgggaggacctgctgcatgaaggggggctcggcgaggaggccagcaaccttgtggttccagatgacatgaacttgttggctcagaagatggactagctccacttgaagaacacaaagtctggacagtaatccatcgccgagcagccccgagaatccttaccagcaagcctgttgttatatatgtgtatatatatgtccatgtcggccatgatcagtcagtcgagtagatcactgccgcctttggtgatgatgctaccatattatcttggtgtcggtcttattttcgtcattgccgtgtttagttcagctttcgggaggattctatttggtatcagttatttctgctagctactgtcggtctaacgaactgcagtgtttctgctagctcgtgtgtattggcattgtcagtatcagtatgagaaataaatagaagagtacccagtatatagcacgtatatctgcagtgactgtatctggatgaccactcgatgtacagtatacttccttgtgtgtatgtataat

SEQ ID NO: 3221 - DNA, 647 bp, Triticum aestivum
cctcgcgcggcccagggacaacgccggcgtcctgctgctcttcagggacaagccctacctccaccccgagaaggtggtggacctggtgagaagagcggtgccactggccctcgaggtagaggacgacccaaggagagaagagctgaggcagctccaggagaagaaggacggcatcgacaagctggcgcacaagcaggtccggcgcatcctctggtccggcctggggttgatcatgtcccagatcggcctcttcttccgcctcaccttctgggagctctcgtgggacgtgatggagcccatcgccttcttcaccaccgcatccgggctgctcgtcagctacacctacttcctcgtcacctccagggacccgacgtaccaggacttcatggagaggctcttcctgtccaggaggaggaagctctgcgccacgcacaggttcgacatggagaggtacctggagctgcacaggcattgcaagtgccctctcgaaggtcactatcctcctcatggtcccaagcttcacaacttgtaacacctgaagtgaaatctcccagctggactctctggtttgggcaataggcaaatatgtagcttccgaagtgttcgctacatctttgcagaagtcaccagttacctgctagatcaat

SEQ ID NO: 3222 - DNA, 1057 bp, Triticum aestivum
ccgacaaccaattctggtaatctcttttccctaaatggaggcaatcatagcccggaatttgaacgtaagccggcgaagaggggtcggacagaacatccggagaagaacaattctgccatgtctgggggcagcccaacgatgcaccagagagtccttggggcactggcttgggcgctgagggagacggaggaggcatttttcaaggcagcagaggagggtgcggccgacaacccggagattgggctgatggggtcatgcgtactagtgatgctgatgaagggcgagaacgtgtatgtgatgaatgtcgggaacagtcgtgccgtgttggcgagaaggccggagcccaatcttgataacatcctcggcaaggcgacagagaaggatctgcagcagttgaaggccgagatcatggatggcctacagtccgtgcagctcaacgctgaacacagtacctccgttgaggaggaggtaaagaggatcaaggccgaacatattgatcgcaacgccatcatccacggcagagtgaaggggaaactcaacatcaccagagcattcggggctggctacctgaaggagccaaagtggaacagtatgttgttagcgtgcttcaagattgattacatcggcaaggacccctacatcaattgcatcccatcactgcaccaccaccgtatcggtccaaacgacaagttcctggtgttgtcgtccgatgggctctatcagtatttcaccaacaaagaggtggttgatgaggtagagatgttcacagctgcgtatcccaagggcaatccttctgagcatctcatccgagaagtgttacttcgggctgcaaggaaggccggtatggactaccatgaactgctcaacatatcctatgacgaaaggaggaggtaccatgatgacgtttccatcatcgtgatctcattcaaagcacatgcaccatgaacaacaaccttgttaggtctttgttttccttctcttgagaataatgttcctttatcgccgaaagcccgaaactgatatgcatagttctagtagtatgcttatgtaataagtt

SEQ ID NO: 3223 - DNA, 509 bp, Triticum aestivum
atcgagagaaagaaagggaccaaagaagagaggaagggaagatgagcaacgcagctagcacaacccccctcctcgcccactacaagatggggaaatttgatctttctcacagggtggttcttgcgccgctcacaagggagcggtcgttcggaaacgttcctcagccccatgccatactgtattatcagcagagagcaaccaaaggaggccttttgattgctgaggccaccggagtttcagacactgctcaagggtacaaagatactcctggcatctggaccaagaagcaggtagaagcatggaagccgatcgtcgatggggttcatgccaaaggaggaatatttttctgtcagatttggcatgtaggaagagtctccaatcatacttttcagcctaatgggcaggctccaatttcaagcaccggttaagcaatcaaacctgcaacgagagccgatggcattggattggctaaagtctcaactcctagggcgactaacggctgattgaat

SEQ ID NO: 3224 - DNA, 538 bp, Triticum aestivum
gttttttgaaaagtcttctttccccacagtagagagcagtacgccggggcaaggagcagacgaaggaagatgagcaacactgccagcagcgccgccctcctcaccccctacaagatgggaaggttcgatctttcccacagggtagttctcgcaccactgacaagggagcgatccttcggaaatgttcctcagcctcatgccatactgtattatcaacagagaacaaccaaaggaggccttttgattgctgaggccactggagtttcagacactgctcaagggtacaaagacactcctggcatttggacaaaggagcaagtagaagcatggaaaccgatcgtgaatggggttcatgcagaaggaggaatatttttctgtcagatttggcatgtaggaagagtctccaatcacacttttcagcctaatgggcaggctccaatttcgagcactgattagccactcaaacctgtagttagagccaacggcatagatgtacctacaatctcaactcctaggcggctacagactaatgagattc

SEQ ID NO: 3225 - DNA, 557 bp, Triticum aestivum
ttctctgttccgctgtaaaggcggagcagcctggaacagggttgttggatctgaccggctatctctgagccgaggagactcgccgccagatgctgcccaccggcaggagcaggcctcagcccaggcccgcgcccagatcttggtcccttctcagacatggacttctctgatccgaagcgcaactccaggtacctcagcaagatcatcatggtcgcgctcctcacggccatgtgcgtcgtcatgctcacccagccgccctgccataggaaggctcccagcgtgttctccatccatgaactcggagtaacacatgtgttggtgacgggtggcgctggctacataggatcgcatgcggctcttcgattgctcaaagactccttcagagtcaccattgtggataatctctcaagaggaaatatcggggcggtcaaggttcttcagaacttgtttcctgatcctgggcgattgcaattcatacatgctgatttaggcgatccaaaagctgtcaacagaatattcgcagagaatgcatttgatgccgtcatgcacttcgctga

SEQ ID NO: 3226 - DNA, 726 bp, Triticum aestivum
tactttgtgatcttctttggtccgatccttcgaatgaagcacaagggtgggctatgaatgatcgaggtgtctcatatacatttggacctgataaagtggctgaatttcttgagaagcatgatttagacctcatctgccgagcccaccaggtcgttgaggatggctacgagttctttgctgatcgtcagctagtaacaatattttcggcacctaattactgtggagaattcgataatgctggtgccatgatgagtgtagacgagacgctgatgtgctccttccaaatactcaaacctgcaaggaaaatgttgcctggttcaactaataacaagtctggcttcaagtcaatgagaggatggtgacggtggcacggcgattggtgagcaagctgtggtctcatttgcgggcaggcacgtgcctaccacgagcggctgcgactaaccggcgttttcgccgatgcctcgagcccggaccggaacaagaacgcagattgtacaactctctcgtcgatggactgtacatcgttcatgtcggattaacacttgttgtaatgtattattgtttttctaccgtgcggatctctttatcgtacgagaggacgatgtgaatgaaactgctgctcctcctccccctctaaattcaaggattcaggcaggcatatacgccaataaaaactggtaagagtcttgggtgctggcgtgggatcttgacacagggacaaaaatt

SEQ ID NO: 3227 - DNA, 1481 bp, Triticum aestivum
tttggttcggacctcccggcgggacagtgatcatcaggagccggcggcgcttcaaatcaaatcccccaaaagagcaaagcagagcgagatttgctcgatctgtgcttgattcctttcctttttgttgctgttgcggggatagccttgttttcttcttctttaactgtcgccgctctgtgcgttgttgagaagctcttgattgatggagaaggggatggatccggcgctgctggacaacatcatcgccaggctgctggaggtgaatcagcctcaagcccgggaagaacgcgcactgtccgagtcggagatcaagcagctctgcgccgcctccaaggagatcttcctcgcgcagcccaacctcctggagctcgaggcccccatcaaatctgcggtgatgtccatgccagtattctgatctcctgaggctctttgaatatggtggatatcctcctcagtccaactatcttttcttgggcgattacgtggaccgaggaaagcagagccttgagacgatatgccttcttttggcttataaggtcaagtaccccgagaacttctttcttctaaggggaaaccatgaatgtgcatcagtaaaccgcatctatgggttctatgatgagtgcaagcgcagattcagtgtgaaactctggaaaacatttacagactgttttaactgcttaccggtatcagcattgatagatgaaaagattctatgcatgcatggaggtctttctccagagttgaacaagctggatcaaatactcaacctcaatcgccccacagatgtgcctgataccgggttactctgtgatcttctttggtccgatccttcgaatgaagcacaaggatgggctatgaatgatcgaggtgtctcatatacatttggacctgataaagtggctgaatttcttgagaagcatgatttagacctcatctgccgagcccatcaggttgttgaggatggctacgagttctttgctgatcgtcagctggtaacaatattttcggcgcctaattactgtggagaattcgataatgctggtgccatgatgagtgtagacgagacgctgatgtgctccttccaaatactcaaacctgcaaggaaaatgttgcctggttcaactaataacaagtctggcttcaagtcaatgagaggatggtgacggtggcacggcgattggtgagcaagctgtggtctcatctgcagtcaggcgcatgcctaccacgagcggctgcgactaaccggcgttttcgctgatgcctcgagcccggaccggaacaagaacgcagattgtacaactctctcgtcgatggactgtacatcgttcatgtcggattaacacttgttgtaatgtattattgtttttctaccgtgcggatatctttatcgtgcgagaggatgatgtgaatgaaactgttgctcctccttcccccctctaaattcaaaggattcaggcaggcatacgccaataaacactggt

SEQ ID NO: 3228 - DNA, 735 bp, Triticum aestivum
ctatttctgggccagtactccgtgagtcccgacaaaggacatggaccgagcatcattggctcgccgatcatctcaaggaatagttgacctggttcacgatgtccggctttggcttctccttcttggactttgacttggacttggatttcgagaagaatcgaggaccacaagcatgttgttggaacaacacaggatggctgaatgcaagcaggctggaccagtacgctgcattattcctctgcagcgcgtctaagccaggatttgcacccctgatcacggttgggctcactgaacaacgaagagagaggtcaaaatcagtcagcatgatgtgcccatcctcccgaactaggacattttctggcttgagatcacggtatataatcccaagcatatgcaggtactccaatgcaaggagcacctctgctacatagaactttgctgcttgctctgaaaaatgttttccaggctgcctttgtcgaagggtgtgcaagtccccgccagggcagaactccataaccagacacgaaaacttgtccgtctcaaaatgagtatatagggttggcagaaatggatgatccagggactgcagtatctcccgctcggtctgcgcccggagcagcttcttccgactagccagagatgttttatccatcaccttcattgcaagtgactctttgtaccactcattcagagagatacacacttccgatatcaccagaacccagtttcttaagc

SEQ ID NO: 3229 - DNA, 734 bp, Triticum aestivum
atctagtcttggcagcagcactgcagcatatgtgcttacattgcaccgcagctgcttggatctggtattcctgaagttaaagcatatcttaatggagttgatgcttattctatacttgctcctagcacactctttgtaaagatatttggttcaatacttggagtttcagctggatttgtacttggaaaggaaggtccaatggtacatacgggggcgtgcattgcaaacttacttggtcagggagggtcacgcaagtaccatcttacatgcaattggctaagatatttcaagaacgacagggataggcgggatttgattacgtgtgggtgcgcggctggagtggccgctgccttccgcgcacctgttggtggcgtcctgtttgctcttgaggaagcagcatcatggtggcgaagtgctcttttatggagagcattctttacaactgctgttgttgctgtcgtgttgaggactctgattgagttctgtcgcagtggaaagtgtggtctctttgggcaaggtggattgattatgtttgatctaagttcaacagttgcaacctatagtagtccggatctacttgcaataattctccttggaataattggtggtatattcggaggcctctttaactttctcttggataaaattcttcgtatttacagtattatcaatgagtaagtaccgaggatgaattgtaataaatgtgattgcataatttttctattttcgatacc

SEQ ID NO: 3230 - DNA, 732 bp, Triticum aestivum
gcgctgccttactatgatgcgttcgagaggccacgtgaggagatgcctaggattggcgggcgcttgtgaagaacagggagggagaccaagtagaagattctcgacaattacttgggcagcagggatggctcctgctcttgttaaatgggacagccactcacttcttatagcctgaccacatggaaagattgaaatgcctctgcaaagtttttaacaggaacatattgaaagcttgacagaacataacaatgaaactcacctcctgcaagaagtctgccacgccttttctctcaggacatctgaaacccgctgattcaaagaactcgagcacttgttcacgggggccattgtagacaacctgaccgtctgagaggagaattatatcgtcaaacagttcatatgtctcaggtgctggttgcagcaaggaaataactgctgttccaccaagagtgtgaatagtttgccggatggagttcacaatctggaaggtagtcgaactgtcaagtccagttgatatctcgtccatgaaaagggctcgtcctggcgtgacgagcatctccgctgcagatgggatgggtgcgttagatacttggatcgtacaggacacatggtattttacttactcccttgatgaatcacctgtggtcactctctttttttgccctcctgatattcctctcaacatgttatttcctacgattgtgtcggcacacatatccaatcccaggatct

SEQ ID NO: 3231 - DNA, 711 bp, Triticum aestivum
cgccgcgccgttgttgttgccatcctgctcctccgcaagtgcaccgccgacggcgcgtgccctgcgggcctcccgcgcgattggcgcgggttcgagctctggatcgccggattcgggcggactggattctgctggctggttgcgccgggtttgctgccttgttcctgcccaattttggcggatcttgcggccgttccgtgctgaaaggatggcgaggtgagtggtgacgcgctcgatcttgggagtagtttctgctgagttcgtagctctcccattgcctgcaacgagtggtatcgtcagggccgccgaacccaatggggcctgggcagccaggaggcggtgcctcacttctccggacaagttctagcctgctcagtggtggccaacagggaatgggtgggggtggcggcatgctgcagtcgcagtccccgttctcatctcttgtctccccaaggtctcagtttggtggaaatggcttgctgggagcaacctctaatgtctcctccctgctcaaccggtcatcgtttggaaacgggagccctgttccaagtccaggacaaatgccaaacggtgggcttccgatgaatacccttcagcagagaggggggcttgatggcgctggtgattttactggcactggaggatccgatcctatgtcgtttccatcctcctcctcgcaggttagtttgggcaatcacctaggttcagata

SEQ ID NO: 3232 - DNA, 706 bp, Triticum aestivum
aatgggttggactaactatgcctctgcccacagagatcgccgtgaccatggctaccccttggcatagaacaaagccccaagaaagccctgcgtaccgtaccaccatggaccctctcggaccgtggtggcgagaacatgggcctacgttgggttcttccctcgggcaaacggggagcccctcttcacacggccactttgtcgttggttggagcttcgcgctggacaggcttagctccgatgttgaatatcttgtcgttgcatgccttggccgccgatcggacccaagtcacggtccaaagtgttgcagatcgtgctacccatagcatcctccacaacggttttatccatgggcatcattgtttacattttggttcgaaggcatctcaggtacgcggaggtccatgaggactgggagaaagcatttggccgcaccgattctcttacaaggatttatttcaagcgaccaaggggttcagccagaagaacctactcggagctggaggctttggaagcgtctacaagggcgtgcttcgcaagtctcacatggaggtcgccgtgaagaggctgtcgcatgagtcaaggcaagggatgaaggagtttatcacggaggttgcaagcatgcgaagcctgcgccaccgcaatctggtgccgttgctcggttattcccgacgaaagggagaatttctcttggtctatgtttacatgc

SEQ ID NO: 3233 - DNA, 701 bp, Triticum aestivum
catatgacaccattttttgggtttgatggggataaccgaatccccctgaaaagagaggctgctgtagtcgtggaaggactgaagaagatgggcattcatccagtgatgctcacaggcgacaactggaggactgcacaagctgttgcgaaagaggttggcattgaggatgtgagagcagaggtcatgcccgcgggcaaagccgacgtggtccggtcgctccagaaggacgggagcatagtggccatggtcggggacggcatcaacgactccccggccctcgcggcggcggacgtcgggatggccatcgggggcggcacggacatcgccatcgaggcggcggactacgtgctggtgaggaacaacctggaggacgtgatcacggcgatcgacctctcgaggaagaccttcaaccggatccgctggaactacttcttcgccatggcgtacaacgtggtcgccataccggtggccgccggcgcgctgttcccggtgacggggctccagatgccgccgtggctggccggcgcctgcatggccttctcgtccgtgagcgtggtgtgctcctcgctgctgctgcggagatacagaaaacccaggctcaccaccgtgctgcagataactgtagagtagagcgatagcttcttttgtgaatactgtaagtcccgttcaccatttttacagaagtgaaatgaaaagaaaga

SEQ ID NO: 3234 - DNA, 697 bp, Triticum aestivum
  N_region (252)..(252): n = any nucleotide
ggtactgggtacgccaaagacaatcactgtggatttattttggcagattgtggtcttgatgtttggtttccaacacccgtggaactaattccagccggaaccatacctcggctcaccccagatgatccggaggtactgggaattggacgtgggaccacttggctgcctaatgaatcttcctgccgtgcttcagcatgtctatgatcacacaggaggccagaaagttcactatatcggtcactcctgggaacncttgagtattctgcagccttctctgagcacaggttacttcatttagttcgatcgactgtgttgctctgcccattgcttatctgtataagacaaatcgaaactcacccggcttgctactcaaatcctccttgcagaggcatttcactttctaggatatcgtgagttcaatcctgttgggccagtttcacatgaaattctgctcataatatgcggtgaccctgaaatcgactgctacgacctatttacggctgttatgggaccggactgctgcctcaatgcttcaactgtatgtaacttcctgcagcatgctacacagtccacctctatcaagaaccttattcacatgtcgcagatgatcaggtacgaaggggtcagaaggtatgactatggcaacgccaaggaaaacatgaagcattacaaccagccacgccccccgctgtacaac

SEQ ID NO: 3235 - DNA, 684 bp, Triticum aestivum
catctccttgcagagaagtcatcatatcctcaccaagaccgcaaacaataatagtggaactgattcgtgggaatggtagcaggtttacaccagcttttgatgcagcatccaaatggatttatgccacatcaaatgccgccaccccatcaacaaaatggaatgctcccaattcaacactctccaccccagttctcacaactacatgcccagatgcttggtgcccaacattctccgccacaaaatctgccgatgtttggtcctcggcatccttcaccacaaatgatgggtagatttgatccaaattttgtcatgcctgacttgagtgatcccagagccagatcgatgttacaccatggaaggcatggcccacgctatcctccccaaggttttgagcctggcatatgagaatggataataggtggcagcggttcagatccaagtacatgtccactgaagaaattgagaacatcgcaaggatgcagaaagctgccactcagatcaccgatccatatattgatgattactatcatcaagcttgtttggccagaaaatcagcaggagcacaactgaagcactacttctgtccaaccttgatcagagatacatcttctcgtgcacgcagtaaggatgagccacatgcgtatcttcaggttgatgctcttgggcggctcccattttcttcca

SEQ ID NO: 3236 - DNA, 683 bp, Triticum aestivum
cagatggtgattccatgtacatctgattgctgcacctcatgcactggcaaaattatacaactactccaattgaaatgtccctaggagagtgccaagatccaagccacctagataaagatctgataagggggaagatactggtctgcagctattccataagatttgtacttggcctctcttctgtgaagcaagctttagatacagcaaagaatgtcagtgctgcaggaattatattttacttggacccttttgtccttggtttccagctgaacccaactccaatggatatacctggacttataataccatcatctgatgactctaagatattcctaagttattacaacgattcgcttgtacgagatgggccgtcagacagagttgtcaagtttggtgcagttgcaaaaatactaggaggtctgaagccaaattatggtagttcggcaccaaaagtgatgttttattctgctagggggcctgaccctgaggataatacattggccaatgccgatatcttgaaaccaaatgtggtagcacctggcagttccatttggggtgcttggagttcgcgtggattggattctgctgaatttaccggtgaaagttttgcgatgctctccggtacaagtatggctgcaccacacattgctggccttgctgctctaatcaagcagaagtttcct

SEQ ID NO: 3237 - DNA, 681 bp, Triticum aestivum
  N_region (134)..(134): n = any nucleotide
tttaatcaccgtgatctgaagcctgaaaatctacctcctggattgagaatgaaaaacctagaaagtctcagattttggtttgagtgcccctgctgattgcgcgaggcaggatggtcttcctggcgacaccacantgtggaactccagcttatgttgcccctgaagtgcttagcaggaaaggctatgatggtgcaaaagcagatgtatggtccagtggagtaattctgtttgtgcttgtggctggttaccttccttttcatgaggcaaatctgatagagatgtacagaaggatttccaaagcggacttcaaatgccctcggtatttttccgctgagctgaaggagctattacataaaatccttgatccagatcccagtactaggattacaatctctaggataaagagaagtgcttggtacagaagaccagttgaggtaaatgcaaagaaaaccgagcctgaagcaagcacaacaccttttcagctgaagctgcgtcgccaggctcgacaggatgcagcacttctgagggaaatcaagggtcattaagcctcccaaacctgaatgcatttgacatcatctctctgtcaacagggttcaatctatctgggttttttgaggatgagtatggtcgcagggaagaacggtttaccactaggcagcctgtaacaatagtacttacaaa

SEQ ID NO: 3238 - DNA, 675 bp, Triticum aestivum
aatgatctacttggtttcccaaggaccacacaaggggggtcgcaagaccgagagatataaatctcttgcaactcattccatggtgataactgttgcttaccacttgtcggtgctgagggacatgtttcctaatggtggttagtgtgctgtccttgttcaccggtattggaggaggagaggtagctttgcacaggcttgggattcacatgaggacagtggtttctgttgagataggtgaagctaataggaggattttgaggggttggtgggatcagacccagacaggcacgctgattgaggttgctgacgtgaaatctctcacccctgatataattgcatcatacgttggtagatttggcggcttcgacttggtgattgggggcagcccatgtaacaatcttgccgggagcaaccgacaccaccgtgatggcttggagggcgagcaatcttctttgttctaccactacttcagaatcttggatgtcgtcaagtcggctatggcgaggatgtaggctatggcaaggatgtagcctaagcattgtagtaccctatcttatcacgtagtgtttaaccgcaacttcttttgttctacatagagtaagaggcttcttttgtttagttgcttcatgtccttttctttgcttgcacttacaactatgtatcaagcacttaaat

SEQ ID NO: 3239 - DNA, 674 bp, Triticum aestivum
tacttctggaaaagttcccagaggttaccaatggggttctcctcttgcagacatggatgtattatgagcagggagatttgcgaaaatcatagacagttctgcgggtgatgatatggatattgaacaagcctgcaggttcctgaaagttggacttctctgtacacaagatgtcacaagacatcgacccactatgtcaactgtcgtcagcatgctaacaggcgaaaaggatgttgactcggagaagatcagcaagcccgctacaattagcgactttatggaccttaagatcaggagcatgaggagagaaaataacattgcattcgcttcatcctccacgttgctatccactatcatggcacactcttctcctttgttgtcgcaagagacgacacaagcctccatcacattcaccgcaatatcagagcgtgagtgacctgaagttggttgcaaatatgaagaccatgtagagaagtagcatagccagataccctttttcttcagaagttttcttcgtagtgtatagattcactttgtttatagtgtacacagcattgctgggacaaagaagtttcatgagttttactttgtgcgtacaatactagattggtggcgcatgccattgtatatgtgtgcatgtacatcctgtccgttgtttgtttggtggaaagaaaata

SEQ ID NO: 3240 - DNA, 674 bp, Triticum aestivum
cttggtagctttgcctgctgtactggagtctcccaactgtggttcatgaatgtttgttccgttcattgcgagatactttctactttaggtgtaatctatgagcgaggattaataggaatgtatcacgactggtgtgaagggttttctacttacccaaggacatatgacctcatccatgctaacggtgtcttcagtttgtaccaaaacaagtgtaaatttgaagatatactgctggaaatggaccggatcttacgcccagagggcgcagttataatccgtgacacagttgacgctcttgtaaaggtggagaaaatagccaatgccatgaggtgggagacaacactggccgaccatgagggcggccctcgtgtgcctgagaagatcctctttgcagttaagcaatactggactgccgacagcaagagccgccgctaacatgtctggattattgttctcgcttctcttcaggataacttttgtccctggcggcgttcgttgcaagtacacattagacggcgtgtagagaactgaagaaccaagccagtgacaactagaggagagtaaaatatgtcttctatttatcgttggtgttgtatttttctttatttttgttcgtgctgtattcttgtttatttttgttcgtgttgtatcttagaaattcatgaagtggagag

SEQ ID NO: 3241 - DNA, 658 bp, Triticum aestivum
cctgctgatgggctcttcatttctgggtttttctcttttgattaatgagtccagcctaaccggcgagagtgaacctgttgttgtaaatgaagaaaacccttgttcttttgtcgggtaccaaggtccaagatgggtcctgcaagatgcttgttacaacagttggtatgcgaacccagtggggaaaactaatggctactctcagcgaaggcggggacgatgaaaccccactgcaggtcaaacttaatggagtggcaactatcattggtcagatcggactatttttcgctgtcataactttcatcgtcttgtctcaagggttaatcagcaaaaagtatcacgatggtctgctcttaagctggtcaggggatgatgcactggcaatgttggagcattttgctattgcagttaccattgttgtggttgctgttcctgagggattgcccttagcagtcacactgagtctggcatttgcaatgaagaaaatgatgaatgacaaggcgctggttcgcaacttagctgcatgtgaaactatgggctcagctactaccatctgcagtgacaagacagggacactaacaactaatcatatgactgttgtcaagacctgcatttgtggaaatatcagagaggttaacagtcctcagaatgcgtctaagtt

SEQ ID NO: 3242 - DNA, 652 bp, Triticum aestivum
agatccgcaggacggactgagcgagagtacaaggatcggaggaagagagcggtggtctttcttggcgctgctgcttgcgttgctgcggaagtcgtttctcggttgcagggaggagggcccccaaggcgaaggttgtgcgatggagatcgggtggccgacggaggtgcagcacgtggcgcatgtcacctttgataggttccatggattcctggggctgcccgtcgagctcgaacccgaggtgccccgccgcgctcccagtgccagtgcaagtgtctttggagtttcaacagaatcaatgcagtgttcgtatgattccagaggaaacagtgttccgacaattctcttgatgatgcagagacgtctttatgaacaaggtggtcttcgggcagaaggtatttttcgtataaatccagagaatagccaggaggagcttgtgagagaccggctaaacagcggaatcgtgccgtatggtattgatgtccactgtttgtcaggtctaataaaagcatggtttagagaactgccgagcggggtgctggaccctattccacctgaacaggtgatgcaatgccaatctgaagaggattgtgctcgggttgcgaaatgcctcccactagctgaagcggccttacttgactgggccgttaatttg

SEQ ID NO: 3243 - DNA, 637 bp, Triticum aestivum
cgttatgtcaaatcagaaactagttttgtgacattaggacagcgtgttctttctaatccactgaaagtgagaatgcattatggtcaccagacgtgtttgatagaatatttcatattacgagggtggcataagtaaggcgtcccgtatcatcaatatcagcgaggatatatttcagggtttaactctactctacttcaagggaacataactcaccatgagtatatccaggttggtaaaggaagagatgttgggcttaatcagatcgcactatttgaaggaaaagttgcgggaggaaacggcgaacaagttcttagcagagatatatacagacttggccagctttttgattttttcaggatgttatccttctatgtgactactgttgggttttacttctgtactatgctaactgtactgacagtgtacatatttctctatggtaaaacttatctggctttatctggtgttggagaatcaattcaaaatagggcggatatacagggaaataaagcattgagcgtggctctgaacacccagtttcttttccagattggtgtgtttactgcattcctatgattctaggtttcatcctggaagaaggtgtcctgacggcttttgttagcttcattactatgca

SEQ ID NO: 3244 - DNA, 636 bp, Triticum aestivum
ggagcttgtactagagtcaaatgtcaaatagagaccccaagtacatacccataagcgtgagcgcgcgctcggattgcccgtgcaaatgagctatgacgtgccgcttctcggggcgcaagaggccacgcgccggggaaggcgccgcacggcggggggcaagacgacggcaatgccagcttcgtgcgaacttgcctcaacggcaccaacggcttggcaggtgttgggctgctgtcgatgccgtacgcgctcgcggagggtggatggctgagcctggcgctgctcgccgccgtggccgccacctgctggtacacgggcctcctcctcgggcgttgcatggccgctgaccaggcaatccggacgtacccggacatcggcgagcgcgccttcggccgccggggacgcctggtcgtgtccgccttcatgtacgccgagctctacctcgtcgccatcggcttcctcatcctcgacggcgacaacctcgacagcttttccccggcgccagcgttcacctggggcccgtgtcgcttgcggggaagcagctgttcgtcgtgctggtggcgctcatggtcgcgcccacgacgtggctgcgcagtctgggcgtgctcgcctacgtctccgctgcaggcgtgttcgcgt

SEQ ID NO: 3245 - DNA, 631 bp, Triticum aestivum
cgtaagttactaaaacatgggcatgattgtgctctagccttgctggtgcttaatgaagatgatacatcaatgatgatgcattcgaggtatgtgctctattgatagtgtcattttggccacttacagattccagccagcagttgtgcgggtcatgctagcattaaatgagcttagcgagcctgctgcatataatgaaagcgtggatggccaaaaaacattgaagcctctctaagaatcttctatgggatggtgcttggacaaggaatactctatgccgtggcctgcatgtttgagttcttttctttcatccctcgaagatccctcatccgcggtggtggatttaaaggtcagtggggaatgagatctgtcaatatgtattacgcatatgcatcagagaaatgcatgcaagggggtgtgcttgctccaaagaagatcaacctcagcacctttgccatgaattctgtgaactcggattcatccaagaatcagctcgccgggatacgaatgatgcacaactttctgcaaagtcaaccaaccaaggcacactcctttcaaaactcgccacttctaccaagacgatggccagaataatcagaatgttggattggacaagtccaaaggatacagctat

SEQ ID NO: 3246 - DNA, 631 bp, Triticum aestivum
ctgcatctggttctgcaacaaatggaacgttcatcatgacaataaagatacaaaaaatagtctctctatgatgaccagctatgctctgtttggttacctgtagcgcctgctgcctatgttgccttgggttgtgtagtttcagctggaactgctgaaccacctttgtctgcagttttttgtttaactgcttccttgatttcttcatgtggtctaagggattgtattgcactgaggggtaatactaatacgtcattttggcgcgttgataatgcttttggtacctttttaccgggggatcctgctaatgtcagtgtgcatccaaatgcttacgatcttcgccacatgctattcaatagtgcggattcatcttcgaagaatagctctaaagggaaagatagtcggaatgacgatgcctctcagatagagagatcagcgttgacttcaggtcggctgtttgaagcagtagcaagcttcaaacttgtttggtcaaacgatggaatgtctgcgccaaaaaagctctcagtatggcgtccaatgatgtcggaaggaatgttttactttggggacatcgctcttaacgggtatgaacctccgaattcagctgttgtccttcgtgatactggtgaagata

SEQ ID NO: 3247 - DNA, 629 bp, Triticum aestivum
cagacataccagggcgtgggattcgttgtgtaccatgcaagtttgcaagacatgttaccgcatgtactcccgcaccactttgttaaaggattcgaactgttgatacttctggttgtgtatctgacttacggaagttcgctacaagagctcgaatttgtacctatttgtcactttctcgatatggttcctggttgcatcctggctctttgcaccatttatttttgatccatcatgttttgagtggcagaagacggttgatgactggagagattggaggaagtggatggggaaccgagggggtattggcatgtctgtggaacaaagctgggaggcttggtggataggtgagcaggagcaccttaggaaaagtaacattcgtgctcttctctttgagataatcctttcacttcgcttcttgatctaccaatattgtattgtgtaccatctgaacatagcacacctcaacagaaccattcaggtatacacattgtcatggctggttgcgcccgttgttctaatagttttacagctgctttcaataggacaacagaagtttgggttcgacttgcagtgtttgttccgcatcctcaagggccttctcttccttggcattctcactgtgatggtcg

SEQ ID NO: 3248 - DNA, 628 bp, Triticum aestivum
cccatcgccttcgatcgttctgaccggcattctgttgaagtagaccggagccgagatggagcgacgccggaagctgttcatcgtggcatctcgtggacaccaacgaggaccgcctccgggagtactttgagaagtacggggaggtggtggaggctgtcatcatgcgcgaccgagccacgggccgcgcccggggcttcgggttcatcgtgttcaccgacccagcagttgcagagcgtgtaataatggagaagcatatgatcgacggccggatggtggaggccaagaaagctgtccctagagacgatcagcaagctcttagcaagagtggtggcagtgctcatggatcaccagggcccagtcgcaccaagaagattttcgttggtggtcttgcatccaccgtgacagaggcagacttcaggatgtattttgagcagtttggcacgatcactgatgttgtggtgatgtatgatcacaacacacagcgtcctagagggtttgggttcataacgtacgattctgaagacgctgtggacaaggcattgttcaagacattccatgaacttaatggtaagatggttgaagtcaagagggctgttcctaaggagctatcacctggacctagcatgcg

SEQ ID NO: 3249 - DNA, 628 bp, Triticum aestivum
gagcattcgtctcactgttgtggagaccatgacatgtggactccctactttggccacagtccatggtggacctgccgagattatagagcacgggatctcagggttccacatagatccttatcatccggatcaagctgcaaaatctgatagctgacttcttcgaacaatgtaaacaagaccccaaccattgggttgaagtttctaatagaggcctacaacgtatatatgagaaatatacatggaagatctactctgagaggttgatgacattggctggggtttatggcttctggaagtatgtctcgaagcttgagaggcgggagaccaggcgctatcttgagatgttctacatattgaagttccgtgaactggcgaagactgtacctcttgcagtagatgaggcacactgactgtaggtcctcgacgtgatgagatctgagggaaatcttcctgctgtcagtgggaatggtataggcaataatgtgcagcagatggccgcttggccgataataaaatggaatgtaacttgtgtgttcagcaagtgacgaacttgggagttgggactctgtaaaactagatttgtcaaacatcttgtctatgtacattaaaatagtttgatactcagtgc

SEQ ID NO: 3250 - DNA, 626 bp, Triticum aestivum
agcttctgggagtttgtattgggacgccctgcaaagatactaccctgataatcccttgctgcatgtgcttttgtctcctttgactggtcggcatcgccaccgaaggctgggccgaacggctcccatgatggcatcggaatcttcgcgagtatcatcctggttgtttctgttaccgcgacgagtgactaccagcagtctttgcaattcagggacctggacaaagagaagaggaaaattcttgttcaggttacaagggacgggttcaggcaaaggatattgatagatgatcttcttcccggtgatgttgtccatctagctgttggagatcaggttcctgcagatggcgtctttgtttctgggttttctctgttgctggatgagtccagtctaactggagagagtgagcctgtcgatgtaaatgaagacaagccttttctttcatcagggaccaagtcctagatgggtctggccaatgctggttacatcggtcgggatgcggacacaatggggaaagctaatggctgctctcactgaaggtgggaatgatgaaactccgcttcaggttaaacttagtggagttgcaaatattatcggtaaaatcggcctgttttttgctgtgttaactt

SEQ ID NO: 3251 - DNA, 612 bp, Triticum aestivum
ctgacaaagaatgaatccaagatatcagattttggaattgcgagactattggcgcaagaccagacccatggaattaacgaaacatgtcgtcggcacatacggatatatggcgccggagtacgtgatgcgtgggaactactccgtgaaatctgattcattcagcttcggcgtcatggttcttgagattgtgacgggaaggaagaacaatgactactgtaattctgagaaatctcaagatcttctgaatgtgatatgggagcgttggatggccacaacggtgttgggcatgatggatccgtgcatgaacaccagcttctcagagagcggcgtactaagatgcatccatatagcgcttctgtgtgttcaagaaaacccggctgatcgaccgcttatgtcgtctgtggtcatgatgctcggaagcgataccgtgcctctctctgccccatctaagccggcgttctacgtccagaaggctagcgacaactttggcatcgcgtcaacttagcacaattaacatgttcttgagttgaaaattaaagaggtcggctctctgagcagttttaacacgggccctcgtaccttctcttttactaaaagtgtataatagaccag

SEQ ID NO: 3252 - DNA, 607 bp, Triticum aestivum
gtcaaagagaattctagccccatgcaaaggggaatgtggctccatttctcccgctttcactcacgtttgacacatcagatactctgttgacatgccaccggaaatgaaagcacaaggcgtagttgaagaccgattggagctcctcaaaggtgttagtggatctttcaggccaggggtactgactgccctgatgggtgtcagtggtgctggcaagactactctgatggatgtgttggcagggagaaagacaggtgggtacattcaaggaaacatcagcatttcaggatacccgaagaaacaagagacctttgcacgcgtatcaggatactgcgaacagaatgatatccactctccgcaggtgacagtctatgagtcgctgcttttctcagcgtggctccgtctccccgaggatgttgattcaacaaagaagggtgttcatcgaggaggtgatggagcttgtggagctcaagcctctgaaagatgcattggttggtctaccgggagtgaatggtctgtcaactgaacagaggaagaggctgaccattgctgtagagctcgttgctaatccttctatcattttcatggatgagccaacctccggacttga

SEQ ID NO: 3253 - DNA, 606 bp, Triticum aestivum
  N_region (437)..(455): n = any nucleotide
gtcacgtcgcgcagatcaatcgggctcaacaccatgggcatctccctcgtccgcattgactatgcgccaaatggcctcaaccctccgtcacacccacccgcgctccaccgagatcttgaccgtgctagagggttgcctccacgtcggcttcgtgacctcgaaccctgagaacagacacttcaccaaggttctcgccaagggagatgtgtttgtgttccccaagggcctcgtccattaccagttcaataatgggaatactcatgcggtggccatcgcggcgctgagcagccagaaccctggagtgatcacggtagccaacgcagtgtttggatcggagcctgccatctcagatgatgttattaccaaggccttccaggtggagaagaacacggtagattggatccaagcacagttctaaaaagtcttgtgttgcggcnnnnnnnnnnnnnnnnnnngaagtactattttatctttagcttcatttggattgcattgcatgttcttcataagtattgtaagttgaggatttttaatcctcatgtgtatgttctttacctatgtaacattgatgtattgtggtacacacctctatttgtttattgcaaa

SEQ ID NO: 3254 - DNA, 606 bp, Triticum aestivum
  N_region (102)..(102): n = any nucleotide
cataaggcaaacgtatttattgactgacaacggcgagccagacatattttgagaatataagtaatgggttgttctcctttcttctgctataaaagtggggcnacacgccagcaaatttctactcatactgaagacctccctggtgatattaatacaataagatacacttatagggagctagcaagggcaacagaaaattttaacccatccaacaagattggtgagggtggttttggatcggtatataaggggcggctaaggaatggaaaacttattgctgtcaaggtgttatctgtagaatcaagacaaggactaaaggagtttctgaatgaactgatgtcaatttccaacatatctcatggcaatcttgtcagcctttatggctattgtgtggaaggaaaccagaggatccttgtctacaattaccttgagaataatagccttgcacaaacacttctaggttctggccgcagcaatatccagttcaattggagaagtagagtaaatatttgccttggtatcgcccgaggattagcatacctccatgatgatgtcaatccccacattgttcatcgggatatcaaagcaagcaatatacttcttgat

SEQ ID NO: 3255 - DNA, 604 bp, Triticum aestivum
ttcgacgtggagcgactgacggcatggtgtaccgcacgcggcgctgtgcgagtgcctgaggctgtacccgtccgtgcccttcgagcacaaggcggcggtggccgacgacgtgctccccagcgggcacgagatgaaggccggggacaagatactcatcttctcctactgcatggcgaggatggagggcgtgtggggcaaggactgcatggagttcagaccggagaggtgggtcaccgccgacgggaagctgaggtacgagccgtcctacaagttcatctccttcaacgccgggccaaggacctgcctcggcaaggagatggcgttcgtgcagatgaagaccgccgcggccgccgtgctgtggaacttcgcagtcgaggccgtgccgggacacgttgtcgagccgaagctgtccatcattctccacatgaagaacgggctcgccgtcacagtcaagaggaggaacgtcgcgggcgtgcatggctagctagtggtatacgtacctacgtgcctactgcctacacgtctcggccacaaagtatacggggcgtatgtaacgtagcggacacgtacgtacatgtacgcgtattatatgtatgcaagagtg

SEQ ID NO: 3256 - DNA, 603 bp, Triticum aestivum
ttctgattttggactatgcaagctcattgacagggatatgagtgaagtggttactagaatgagaggcacaccaggctatttggctcctgaatggttgacatcgcagatcacggaaaaggccgatgtctacagctttggcgttgtggtcatggaaataatcagtggaagaaagaacctcgacacctctcaacctgaagagagcatccatcttatcaccctattggaagaaaaggtgaagagtgatcagttagcagatctagtcgacaagcagagtgatgacatgcaagtgaacaagcaagaggtgattcggatgatgaggatggcaatgtggtgtttgcagattgattgcaaaaagaggccgaaaatgtcagaggttgtcaagtcttggaaggcaccataaacacgggaaacaacatagattataagtttgttgcaacaactacagtgaactttggcgtggcaggagatgcatgctcctcagctccacctttggcttcagatgtatcaggccccagatgaaacgggactatcctgagaagataggcaaccagattatgtataggagatctgtgagtccacaaaaaaaacatgttttgttgtatt

SEQ ID NO: 3257 - DNA, 603 bp, Triticum aestivum
tgtttatctgtataagttggaaatgtactagctggatcccctggatgtgctgcatgatggtgatgaccaaggagggtgctcattttagcccccctctgcggactgcctttctggaagccccagaaagtttagaacctctggtccgctgtatcagtgttgggcttccccctattcaagacaagtccattcaaattctcgcaaggctatgtcaggaccaatcttctctgcttagtgagcagataaacagaagtcaaggctgcattgattctcttgtcagtagagttatggaatcgacaaacatggaaataagaatctccagtgcaatcaccctcatatctgcgttgaaggacaacagagaagattcaattgaagttcttgaagcatcaggacatctgaagagtctaatatctgcactcattgatatgttgaagcaacattccacttcaacatccctagacattgaagtctggaaaccttacacagagaagagtttgttcaattgtgagcaggatgttttggatgtgcctgaatcgggaaaggttctggaagaaactgttgcacgtttgctctcactaatttgttcttctcatcccaggagtaaag

SEQ ID NO: 3258 - DNA, 598 bp, Triticum aestivum
gggtgctcgcagcgtgcgccgcacccgtacagcgtgtccaaggcgcggtctggggctcgtgcgcgccgtggcaggggagatggcgcgctccggggtgtgcgtgaacgccatctcgcccagctacatcccgacgccgccggtgatgcgcaccctggaggagtggtacccgaaggcgaccgccgaggagcgtcggcggatcgtggagcaggacgtcaacgagatggaagggacggtgctggaggccgaggacgtggccagggcggcactgtacctggcgtccgacgaggccaagtacatcaacgggcacaacctcgtcgtcgacggcgggtacacggtggggaaggcgaccaacatgccggcgccggtgcagtaagggcctattcggagtcattctgcttccggagcagatggagatgcagtgtaaaaccaacaatgctacacatacacgtttttacgtttacatggttgattttacgtgacggttttttattgggtgttagttgggaaggggccccacctccaagaaaatcaggggggcgatgtttatgaagtttggaaggagcttgtaaactcctgtaaagccatgtagatatagcat

SEQ ID NO: 3259 - DNA, 598 bp, Triticum aestivum
cgtcttcagtcgagctctttgtcggtatgaaggaggccaacaccgcaggtccgtgcgcatagatgaaatggagcagaggtgttcaaggcgttgctctggtttgtgtataccgactccttacaggtgacagaagaggaagatgaagatgtcatgtgccagcatctgcttgttgcggcggacaggtatggcatggagcggctgaagagtatttgcgaggaaaagctatgcaagttcgtcaacgcagccacaatagcgaccatcctgacgttagctgagcagcaccactgtgatggcctaaagaaggcgtgctcaaggtttcttggctccccggccaatcttagggctttgttggacagtgacggcttcgatcatctcagcaggagctgtcctttggttgctaaaaatctgattgccatgtcggcccttgtttagtgggattgttgctttagcaattatagttccacggtctgaaatggttttcttgtaccagcaatggtccttagctccctagtttggtttcaagacttattatctggtatttatcgtggattcttattgtatgactatcagactacctatctaacatttgaagaaacag

SEQ ID NO: 3260 - DNA, 598 bp, Triticum aestivum
cgtgctgtcatctctgtcccgtttgacatgcccgacggcgacgtcaggctcttcattggggactggtacaagaagaaccacacggacctcaggaagatgctcgatgatgggaaggagctcgggatgcccgacggcgttctcatgaatggcaagggccgtatcggtacaatgactccctcgtcccggctggcatcgagtacgagaccatcaatgtcgagccaggcaaaacataccgcttcagagtccacaacgtgggcgtctccacgagcttgaacctgaggatccagggacacaacatggccatggtcgagacggagggctcctacacgatgaagcagaacttcaccaacctcgacatccacgtggggcagtcctactcctttctggtcaccatggaccagaatgcaagcagcgactattacatcgtggccagcgctcggttcgtgaacgagtcgctctggaccagggttaccggtgttgcaattctgcactactctaattcaaagggcaaggcgtctggtctgctccctgacccgccgaatgatgagtacgacaaatctttctccatgaaccaggcacggtcaatcacggatgaacg

SEQ ID NO: 3261 - DNA, 598 bp, Triticum aestivum
ccatcagtgcattgatgatacccaagggaaatgttgggggcatgttcgacaaagacagttttgtggagacatttgaaggatgggcgaagtcagttgttactggcagagcgaaactcggagggattccggtgggtgttatagctgtggagacacagactatgatgcagctcatccctgctgatccaggccagcttgattcccatgagcgatctgttcctcgtgctgggcaagtctggtttccagattcagctactaagacagcgcaggcaatgctggacttcaaccgtgaaggattacctctgttcatccttgctaactggagaggcttctctggtggacaaagagatctttttgaaggaatccttcaggctgggtcaacaattgttgagaaccttaggacatacaatcagcctgcctttgtatatatccccaaggctgcagagctacgtggaggggcttgggtcgtgattgatagcaagataaatccagatcgcattgagttctatgctgagaggactgcaaagggcaatgttctcgaacctcaagggttgatcgagatcaagttcaggtcagaggaactccaagagtgcatgggtag

SEQ ID NO: 3262 - DNA, 595 bp, Triticum aestivum
cgcgccggagctccagcccggagagcaacaccagcggcgcggcggtggcgccgacgagcggaagaggaagaggatgctgtcgaaacagggagtcggcgaggcggtccagggcgaggaagcagcagaggctggaggagctgatcgccgagcggcgcgcctccaggccgagaacgcgcgcgtcgaggcgcagatcggggcctacgcgggggagctgagcaaggtcgacggcgagaacgcggtgctccgcgcccgccacggcgagctcgccgggcgcctccaggcgctcggcagcgtcctggagatcctccaggtggccggcgcgcccgtcgacatcccggagatccccgacgacccgctgctccgcccatggcagccgccgttcgcggcccagcccatcgtcgccaccgccatggccgacgccttccagttctgagccaccatggagagctcgcacgccatggccattggcatcaatggcatggttgcagctgcattacaactagtagtactagcctctgtggttgtgtctgatgatgcttattatgtttaattatggtttgcttcatgttgttttcattaatctagaccattaata

SEQ ID NO: 3263 - DNA, 595 bp, Triticum aestivum
agataaacgggagatcgccacaatgaagctaatacgacatccaatgtggtccagctgcatgaggtgatggctagcaaatcaaagatatacatggttcttgagtttgttgagggaggcgagctttttgataagatcgtcaattctgggaagctaggagaagatgaagcaagacgatacttccaccaacttataaatgcggttgattattgtcatagtcgtggagtgtaccatagagatctcaagccagaaaatctgctccttgattcatatggagctctcaaagtttcggatttcggtctcagcgcattttctccgcaaacaaaagaggatggacttctgcatactgcttgtggaactcccaattatgttgcacctgaggtgcttgctgataaaggttatgatggtatggctgctgatgtgtggtcctgtggcataatcttatttgtccttatggctggatatttgccctttgatgaccccaacttaatgactctgtataaattgatctccagagctaatgtttcttgtccaccatggttttctaccggtgcgagaaatcttattaagcgcattctcgatcccaatcctcacacta

SEQ ID NO: 3264 - DNA, 592 bp, Triticum aestivum
acaactcgtttgaaggacttcactggggggtttggacaataatggaatggatttcgtgagacccttccctgggctttctggcctacagaagtggaaaattgaatttttccaagtggtttcactcgcaatgaacaaagtggacaagggaaaggactttcaaagaaggcccgctgagggttcaccctctgctttgcctgtgcctgatggaagagccagcagtggacctcagaaggggcagttgtccaatgggaggacaacgggtccagcaaggcgctcgaccaagggaaattggaccctcgaagaggacgatatacttcggaaggctgttgaaatccacaatgggaaaaattggaaaaagatagctgagtgttttcctgataggaccgacgttcaatgcttgcataggtggcagaaggttttgaatcctgagctagtcaaagggccatggtctaaagaagaagatgacatcattattcagatggtaaagaaatatggacccacgaaatggtcaaccatcgcccaagctttgtcagaacgcattgggaagcaatgtcgcgaaaggtggcacaatcaccttaatcctggtataaac

SEQ ID NO: 3265 - DNA, 590 bp, Triticum aestivum
  N_region (578)..(578): n = any nucleotide
aagtgcgtgacacacaagtcgtgaggaaagtcacatggaaaccttgaagaatgtgtgtttgacatttggatgaagatcagattcttcaggatgaccatgaaaaggaaccaataaagatatctcagcccaaatccgggagtggtcaaagggaaaagaaggaaatattcggtcattgctttctacactgcaatatgttctctggcctgagagtggatggaaaccagttccattggttaacataattgaaggagcagcggttaagaaagcttatcagaaggcattgttatgtcttcatccagataagttgcaacagcgaggagctgccatgcatcaaaagtatatagcagaaaaggtttttgagattctacaggaggcatggaaggaattccattcagtcacttttggatagtctttcgtagcttcttttgttcagcatgtctacctgtttgcggtggtgccccaatggacgtgaataatcttatcccgataatgtgtagacatggtacaaagccatcttttaagccggcgaactgcgccgtttgaacttgttttggtgtaaatgcaagtgaaccgaccantgctaccctttg

SEQ ID NO: 3266 - DNA, 585 bp, Triticum aestivum
  N_region (49)..(49): n = any nucleotide
gaggacttgcccctatgtgcacttcccacagccaaaggttacagcaggncggaatgctcgtgtaatcctgtgcggttctttgtgatcgtgtcgatgcaagatcgggaagtggatggtttgagacactgctaaacagccaccctaacatcagctcgaacggcgaaatattcaacagagtggatagaagacaaaatatatcgtctatcgtacaaacactcgacaaactgtatgacctggactggctcacaagtgcagcaaagaatgagtgcacggctgcatttggattcaagtggatgctaaatcagggttttatggaccatcatgatgatatacttagttatttgaacaagaagggtgtctctgtgatatttctcttcaggagaaatacactacgcaggcttatctctgtgttggccaacaactatgacagagatgcaagcagctgaatggaacccacaaatctcacgtccactcggaagaagaggccgagatactcgcaaaattcaaaccagaactggacgtgtcaaccctggtttcaaacatcagggatgtcgagaagtacatgggagactgcttggacagctt

SEQ ID NO: 3267 - DNA, 583 bp, Triticum aestivum
  N_region (510)..(510): n = any nucleotide
tgctcgcaaagaattcagattcagaaaggaaaccaaagcagctgtcccatatccaagctcgatggcggctgccacagagactattcacattacaagaatatgcagcgagcagttcttacttaccagtgtgcgtggagacaaaggcttgcaagaagagagctcagaaatctcaagatggccgcaagagaaactggagccctcaaagaggccaaagataagcttgagaagcgcgttgaagagttaacatggcgcttaggactggagaagcgattaaggactgaccttgaggaagcaaaagctcaggaaattgctaagctgcaagaaacattgcatgacctacagcttcaagttgaagaagcaaagaccatggccactaaggaaagagaagcagcgagaaaggcaattgaagaagcacctccagtaatcaaagagactcctgtattggtcgaagacactgaaaaagttaactcgctaacagctgaagttgatcaactgaaggctttgctgcanactgaaaggcagccacagagactgcaaagaaagaacatgctgaagctgaacggagaaatgaagaactaatgaa

SEQ ID NO: 3268 - DNA, 581 bp, Triticum aestivum
cagtacagtacacagcagcaagcctgttgcgagatatgtgcgtgcaagctcggcctgttctgagcaactcagacctgaagaatatctcttacatcttgcgagaggtgttggaaggaataatggatgcagaaggagcagagctagagatccttcttggccttagttcacaaatatgtaatgttgttcctgaagactttgcccgagaactagattgtggtgagattaaggaaagatttataaagaggcttgtcgatgtgcttaactcaaatatggtacccactgctcattgtcctggaatcaggagggcagtagttcaacatgcagtatacatgatggagaacaagcctagctacgcaaactatttcaacagatgctggatgatggaagcactggtaatggtagaaagtacaccttcaaaggctgaaaattatagactcttctggggtgatgcaggactcatggagcacagcatacctctctctgctctcgtggccagagcgaaaagatgtctgtgagtggctacaaggtatcagcagcgtcacctgaacatgtattttgatgatattggacttctgctagta

SEQ ID NO: 3269 - DNA, 580 bp, Triticum aestivum
gcgaccaggtggagatggaggaggccgccaggttccgccacgcccactccttcatcatcaagctccccgacggctacgacacgcaggtgggggagcgcgcctgcagctctccggcggccagaggcagcggatcgccattgcccgtgcgatgctcaagaacccggccatcctcctcctggacgaggccaccagcgcgctggactccgagtcggagaagctcgtgcaggaggcgctggaccgcttcatgatcggccgcaccaccctcgtcatcgcgcacaggctctccaccatccgcaaggccgacctcgtcgccgtcctgcaggctggcgccgtctccgagatgggcgcgcacgacgacctcatggccagaggggacagcggcgcgtacgccaagctcatccgcatgcaggagcaggcgcacgaggcggccctcgtcagcgccaggaggagcagcgcaaggccctccagcgcccgcaactccgtcagctcacccatcatgatgcgcaactcctcctacggccgctcgccctactcccgccgcctctccgacttctccaccgccgacttcagcctgtccgtc

SEQ ID NO: 3270 - DNA, 579 bp, Triticum aestivum
tccttaccctgcattgcaatcgttcacgggaaataaattatgggactcctacttctttaaccaattagaataagtgatttgaagaaagtgaatccaatcagagcatgtgaatatttcaacagttgcttcaaggatccatcagcttttaccgttgtagtagttggaaacatagacccagccatctcaatcccactgattttggagtacctgggtgggataccgaaggtacaggatacagttcagccacttagtcgtgaggatctaaagggattgccctttcaagtttccggaaaccataattagagaagttgtccgcagccctatggttgaagctcagtgcttcgtccaactagggtttccagtggttctaaagagcacaatgatgacggaggatattcactatgtcggatttctaagtaaacttctcgaaacaaaaatcatgcaagtactccgcttcaaatatggacaggtctactcagttaatgtaggtgtcttcttaggtggcaacaaaccttctagaagtggagatgttcgtggagacataagtgtgaatttctcatgcgatccagacatgtcatc

SEQ ID NO: 3271 - DNA, 575 bp, Triticum aestivum
gcacatgacttcatcagcaacctcaaggatggatatgacacatggtgtggcgagagaggtgttcagctgtcaggagggcagaagcagcgcattgcaattgcccgtgccatcctgaagaacccggccatcttgctactagatgaggctaccagtgcactggacagccagtccgaaaaggtggtacaggaggcactggagagagtgatggttggcaggacaagtgtggtggtggcacacaggctcagcacaatccaaaactgtgacctgatcactgtgctcgacaaaggaattgttgtggagaagggcacacactcatccctcatgtcaaagggtccctctggaacatattatagcttggttagtttgcaacaaggaggcaaccagaactaaagtatttccatgacaatagagcactcgtatttgaattagaactgtaagcaaggatggcgatcagatcatttaaactttcggcgacaatgggctatttttcctcctgttgcactatcagtatatagaagtgtgccaagcttgtagtttattcatataactgctggatatgtattgcagtgatgcaa

SEQ ID NO: 3272 - DNA, 575 bp, Triticum aestivum
cccgtcgagagccacaagaagaacataatggagaaagaattcttcacagagtatggagaggcaagccagtaccaaatccaagaagttgttggcaaggggagttatggagtagttgctgctgcaatagatacccgcaccggcgagcgggttgcgattaagaagatcaacgatgtgtttgagcacgtctcggatgccacgcgcatcctccgcgaggtcaagctccttcggctgctacgtcatccagacgtggtggagatcaagcacataatgctccctccttctcggagggagttccaagatatatatgttgttttcgagctcatggagtcggatctccatcaggtcatcagagctaatgatgacctcacggcggagcattaccagtttttcctttaccagcttctccgcgctctcaagtacatccatggagctaatgtatttcatcgcgatctgaagcccaagaatatactggccaacgcagactgcaaactgaaaatttgtgactttggacttgcgcgtgtatcatttaatgatgctccttcagctatattttggacggactatgtagcacaagg

SEQ ID NO: 3273 - DNA, 573 bp, Triticum aestivum
gtcgacgctctccgggacctgcgcaagcgcccatcatacgcccactcctaaccctacccactccgacgaggacaacggcacgaacgaggatggcaaaaagaggaagaagaggaagaagaagtgggccaagtccatctccgacttcgcgggagtcctccgcgtcctcgacgtctacaggatggccaccgtcaggttcaagggcgacctcgacctctggttccgctacctcgagttctgtcgccagaagggccacggccggatgaagcaggttatggcgcaagccattcgttaccatcccaaggttcctgggctttggatgtatgcagcagcgtgggaatttgatcagaacttgaatgttgctgcagcacgtgcacttatgcagagtggtctcagatcttgtccagaatctgaagatatgtggattgaatatcttcgcatggagcttacctaccttaacaagcttaaggctcgaaaggtagctcttggggaggatgtgaagacactgcaaaaaagtactgatgattcgggtcagtggaaagaggagaacaagaattgttcatgtcacttgatgaa

SEQ ID NO: 3274 - DNA, 573 bp, Triticum aestivum
tctactcccgcctccccatgcagggccagagcaacaccgtcacgtcgcaggccgcaccaacccggaggcagaacaccggcacctccatccagggctgcaccctcctcccgtccccggagctcgcggccaacgccgcctttgacacgcgcaccttcctcggccggccgtggaagaactactcgcgcaccgtggtcatggagtcgtacatcggcgggctcgtcgacgccaccgggtggatgccgtggtccggggacttcgcgctcgacacgctctactacgccgagtacataactctggtccgggtgccgacaccggccgtcgggtcagctggccgggctaccacgtgctaggcgacggcgccgatgccggcaactttaccgtcgacaacatggtgctcgggggcaactggctgccgcagaccggcgtgccgttcaccagcggattgaagtattgatccgtcaacttatcatatatgctttgaacggtagacatatatttaccgtaggtaaatcacctactgtttgtcctaaaaaactatacatacatattgatgatgtggtctgactacttcgg

SEQ ID NO: 3275 - DNA, 570 bp, Triticum aestivum
acagagagatcaattcttctcttagatatgaggtttgcatgctgcagaagcacttgatattcgtagtgaggaaaggaagtgtaacctcaaatctgctgatgcttcacacaagcaacatcttgaaaatgtaaggaagattactaagctagaagaagaatgcaagagattgcgctcaatggtacgtaaaaggctaccaggaccagctgctgttgctagaatgagaagtgaagttgaaacactgggcagcagtacaacacacataaggacaggaaagttgaattctacgccatccttcagttcatatgatcagatacagaactcttccatgcatcacatgtgagtccttcattgcttgcaaggctacatgtgacggaagatgaaaataaggccatgaaggaatctctttctagaaaggatggtgaacttcagctttcccgtaccatgcttgctcgcacaacctctaaactttcccaagttgaagctcaactcgaagacttatcaggtgatcgagctaccacagaactggcaaaaagaagtcctacagtggttgaaaatcttctttcatctatc

SEQ ID NO: 3276 - DNA, 570 bp, Triticum aestivum
  N_region (159)..(181): n = any nucleotide
cctcaaggccaccgccccaccccgacaccgtctacgtccagtccggggaccgcgggtcaaggaccacgcgtgctgggagcgcacggaggacatggacacgccgcgcaccgtgtacaaggtcgaccccagcacccccggctccgacgtcgccgccgagannnnnnnnnnnnnnnnnnnnnnntccctcgtcttccgcaagtccgacccggcctactccagccgcctcgtcgccagggccaagagggtgttcgagttcgctgacaagcacaggggcgtgtacagcgccaagctctcgtcctacgtctgcccctactactgctcctactccggataccaggacgagctgctatggggcgccgcatggctacaccgggccaccaagagccccgtctacctcagctacatcaaggtgaacgggcagctgctcggcgccgacgagcaggacaacaccttcgggtgggacacaagcacgccggcgcccggatcctcctctccaagtccttcctggtgcagaagctgggcgcgctgcaggagtacaaggcccacgccgacagcttcatctgctccatg

SEQ ID NO: 3277 - DNA, 569 bp, Triticum aestivum
catttgaaagcttttggctagattttgggcatgtccagcttgctaagattctgatagataatggcttttcctgggacaacctaacgatgttaagattctactattcagtagagcacccagtgactgcggatgtgatgtcccgtgtattttctgaggcattcgccgagcttgaagaaggtggtgttggttcctgcacacctgatggggttcctattttcaaacatcgtgccagtgtcggcatctggttgcttcacatcgttaagcgacattatatcatgcgagctattagcttcgaaagtttaagacaagaacttggcttgcgcatgtacgtgcatgatttgtttggtactcgctgaaatgcagttcgtttctttggccttttgggaggttggagccttagcatctccagtctaagccagaacttggcttgcacatgcattaggtaaacaattgcgatagagttagcagcgacatttttctgtgggttttatcatatgatactacactatatgatagtacatactataaacattgggcctgattagcggtcctgaagcttgcattgacaa

SEQ ID NO: 3278 - DNA, 568 bp, Triticum aestivum
gctttgctgatctgcaaaaccacagatggagctggatggaaaggcgtgcgctgctgttggtcagagtgggctgatggcactctatgacatgttgtttacccaacttgatgtgtcatcatcacaacttcttgtgacagatagtgacttcgacattcaaatttccgggagcgactccgcgaaactgtcgagtcattattagagcttagagttattccaatatttaatgaaaatgatgccatcagtacgaggaaggctccatacgaggattcatctggtatattctgggataatgacagtttggcaggtctactggcattggaactgaaagctgatctccttgttctgcttagtgatgtggatggcctctacagcggtccaccaagtgaaccttcatcaaagttaatacatacttatatcaaggaaaaacattatcatgaaattacttttggagacaagtcccgtgttggtagaggtggcatgacagctaaagtccaagctgctgtgtgggcttcaacgggtggtgtacctgttgttattacaagtggatgtgcatctcagagccttgtta

SEQ ID NO: 3279 - DNA, 566 bp, Triticum aestivum
cactgttgaagggcgttccaaacccaaaggccatccactcgtccaaggctgtaggagagccgccgttcttccttgcttcctccgtcttgtttgcgataaaagacgcgatcacagcggccagggcagaggagggtcatctcgactggttcccccttgacaacccggcaacacctgaaagaataaggatggcgtgtgttgactccattaccaagaaatttgccagtgtatattaccgtcccaagcttagtgtatagtggcaacacctagaagggggaaaccagccaacttctgacaagctacacctacttacctcagacaacaaaatgtaactgagataagatcatgctagactcaagatgcatcgatctgaagcaaagttaagtacacaggactgcggtgatatatattaaagagatctacattgaacagagtgagctagacgtgggaactgcaaaattcatcgacaacttgtcatgctgagaatttagatgcatatatgtttttaagttttttttaaaattacagatgctatgtggttgaacctagctcaacggtaccacatctaa

SEQ ID NO: 3280 - DNA, 564 bp, Triticum aestivum
cttcagacctgtcagagatatggacgaagttacacttctgttcgacaactctgaaattttcttgcaagacctctttgctaaataaaaatggcaatcagataacctctattgatcagaaggcatgtggggacggatcttcattgtatcaacaaaatcatggctcacatcttggttacactgggcaggtgttgtttaatgttgacctgaaggtacaggctaactatcaaggtgagcatgtcccattggtttctttgatgagcagactggatggcaaagctattgttggacaccctatccaagttggaattcttgaagaaggttcaatggacaggcttattttgggcagtgatcttgttctggaaaatagcacagcagcaccacctgcttggccgacaggcagaaggactgttatgccaagagtcccacgtttgaatccatcacgagcaaccttagatggcaatgccaccgatgagcagggggtcaagcatgcaaagaaaagcaccaccagtgtccggaggccattttcgcagaaatctcaaagaagccctctggcttcaagaaagc

SEQ ID NO: 3281 - DNA, 561 bp, Triticum aestivum
ccggaagatgtggcttcttcttgataaacactgctggcttaaatgcacaatggttggagactatttgggtgaaagagacgagtttcctctcaaagtcatgcatgcctatgtggatgcactaaactttaaagggttggatttcggtgaggcaattagattctttctgcgaggtttcaggttaccaggggaagcacagaaaattgacaggatcatggaaaaatttgctgaacgcttctgtaaatgcaacccaaatgtttttaccagtgcagataccgcttatattcttgcttattctgtgatcttgctaaacactgatgctcacagtgtcatggtgaaggataagatgtctaaggctgattttatgcgcaataacaggggaattgatgatgggaaggatttacctgaagcttacttaagtacattgtacgaccaaattgttagcaatgagatcaaaatgagtgctgattcttcagctgcacaaaccaagcaaaccaacagcgtaagtaagcttctaggcttagacaacattatgaaccttgtcaattggggactgacagaaga

SEQ ID NO: 3282 - DNA, 561 bp, Triticum aestivum
gtgacatcaagggtgcctatctccttggtgtataacgaaggagttctaaaaatagctgattttgtctggctaattactttgacccaagtaaaaaccatcctctgacagccgggttgttacactgtggtaccgaccgcctgaactattgctagggtcaactcactatgattcagctgttgatttgtggagtgttgggtgtgtatttgctgagttgttacgtggaagacctatcttacagggaagaaccgaggtagaacaattgcataagatctttaagttatgtggctcccctgctgatgactattggaagaagtcaaggttgcctcatgcaacaatatttaaacctcactgtccttatctaagtacccttcgagatgtttttaaagaggtgccggaacatgcattcagtttactagaaactcttctgtcggtggagccatacaagcgtggtactgcatcatgcgcccttacatccgagtttttcaagacaaaaccttatgcatgcgaacctataagcttgcctcagtatgcacccaacaaggagatggatgcaaagttacg

SEQ ID NO: 3283 - DNA, 561 bp, Triticum aestivum
tcccaagttcctcaaggaaggggagcgcgtgctcgtgggcttcaccggcccgttcggcttccacagggtcacgcccagggacctcatgtcctccttcatcggcaccatggtctgcgtcgagggcatcgtcaccaaatgctcactggtgaggccgaaggttgttaagagtgtgcactactgccctgccactgcggcttttatgtctcgtgaatacagggacattacatcttttgtaggcttacctactggttcagtttatccaacaagggatgaaaatggcaatttgttggtcaccgagtatgggatgtgtcaatacaaggatcaccagacattgtccatgcaagaggttcctgaaaatgctgcccctggacagctcccaagaactgtggatgttattgtagaagatgatcttgtagattgttgcaagccaggtgaccgtgtctcaattgttggtctatacaaggctcttccagggaaaagcaagggcagtgttagtggtgtcttcaggactgtccttattgctaataatgtttcacttctgaacaaagaggcaaatgcgcc

SEQ ID NO: 3284 - DNA, 551 bp, Triticum aestivum
cagtgtcttcatctgtgtacaaaacatccagatggcttcatgggatgtggaaagcaagtcgtcttgaagctactgtcacaaaggtggaaactgctgctgtcatagtctattggattgcatctgcacactgtggtacaaatcaagattctgtcccccctgaggagcagaacccaaaggatctgactcttctgtcttgcttttcatatgcaagctggcattggctgaatggtgtcatcctcaaccacacacatcatcatgtgccaatgacgctttaatggagtgttcaaaaatgaaagagctcaattctgagcaggctgatgttcctgaatctgccgttgatgttcaggctgaacaggctcaaaatactaaaacagatgtaaatcccctggagaaacatggtgattctcttgcagatcgatcaaatatgtcagatggagataatacatgcgtagccaaagattcagaatctggcactagtgtatcaacccttccaaaggagggagtgcatgaccatgctacttacagaaagaagatcagaaaagtttttgtca

SEQ ID NO: 3285 - DNA, 550 bp, Triticum aestivum
cctttcgagacctgatgttgaacagccgcgagccgatgcaggtgtgggtggactacgatggccaggccaggcaactcaacgtgacactggctcctgcgcacgagcccaaacccaggtatcctctcctctctgaagccattgacctctcctctgtcctcacggagacaatgtatgttggcttctcgtcgtcatccggcgtggtgtcaacgcaccactatgtgcttggatggagcttcagcttggacgggcctgccccgcctcttgatttctctaagcttccagcactgccacgtgtgggttcgaagcatcggtccatggtcttggctctcgtgctaccactagcaaccgtattgatcatcgccgcggtgctagctgccgcctccttctttgtgtggcgtcggcgtcgatttgctgaggtgcgcgaagattgggaggatgagttcggcccacaccggttcgcatataaagatctatttcgtgccactgatggattcaagaatggaaatttactcggctactacggcgatgacggtgccacctttcgagacct

SEQ ID NO: 3286 - DNA, 549 bp, Triticum aestivum
ccactccgtgttcgaagacatcgccattggagttgccgagacggaagccgacgcgtggaaggcgctgtggaccatcagcctgcacaagatcttggccgcgatcgccatgggcatcgcgctgctccggatgctccccgaccggcccctcctctcctgcttcggctacgccttcgccttcgccgtctccagccccattggcgtcgccgtcggcatactcgtcgacgccaccacggagggccgggtggccgactggatctatgccatctccatgggcctcgccacgggcatctttgtctacgtctccatcaaccacctcgtcgccaaggggtacaggccccagaggcccgttgccgccgacacgcccgtcggccggtggctcgccgttgcgcttggcgtcggtgtcatcgcggtcgtcatgatatgggacgcctgaatgtggttcatgataactagaaccatttacctatggatgtaagcctattgtcctgctaagctagttggacaccagatttgcagtaccagctgaccaaatgaagcagctaatgacag

SEQ ID NO: 3287 - DNA, 546 bp, Triticum aestivum
atcttctcctactgcatggcgaggatggagggcgtgtggggcaaggactgcatggagttcaggccggagaggtgggtcaccgccgacgggaagctgaggtacgagccgtcctacaagttcatctccttcaacgccgggcccagaacctgcctcggcaaggagatggcgttcgtgcagatgaagaccgccgccgccgccgtgctgtggaacctcgcagtcgagaccgtgccgggccacgtcgtcgagccgaagctgtccatcattctccacatgaagaacgggctcgccgtcacggtcaagcggaggaacatcactggagtgcatggctagctagtacgtacgtgcgtgcctagtgcctacacgtctcggccgcaaggtatacggggcgtacgtagctacgcgtagcggccacgtaagtacatgtatacgtattttatgtgtgcaagagtgccatgtgtgcttactactagatgtgcgttgtgacatgtgtgtaagctgtatgtatgtgtgccctaaatagaaaatggacgtattgggcaccagctt

SEQ ID NO: 3288 - DNA, 544 bp, Triticum aestivum
tcatagtcgtcatatgtcgtgcccgtgatattataggttccagtctctgtgattgataaccgaggcatactgtaagatagctgattttggattagcaagtgttctgtgatcctgtactaaggcaccctttgactaccgtgtggtcacactttggtatagaccaccagaacttctgcttggtgccacaattatggtgttgctgtagatctgtggagtactggctgcattcttgctgagctatatgctggcaagcctatcatgcctggtagtacagaggttgagctattgcataaaatatttaaactctgtggttcgccatcagaggactattggaggaagtctaaacttccccatgcaaccatttttaagccacagcatccatatgcaaggcgtgttacagacacatttaaagacttcccttcacctgctctagcattagtagatgttcttctttcagtagacccagccgatcgacggacagcgtcttctgcgttgcaagtgagttttttacaacaaaaccatatgcttgcaatccttcagtttg

SEQ ID NO: 3289 - DNA, 539 bp, Triticum aestivum
ccgatgcccgaaccgttgctcttgaggcttcatgttttggtgatggaatttataggaaaaggagttggctgctcctcgtcttaaggatgctgctttgtcggatgacaagttgcgtgaaacttactttgagattgttacaacgatgcggacactttacctaaagtgcaagcttgtccatggtgatttgagtgaatacaacattctttattttgagggacacttgtacatcattgatgtttcacagtctgtcgaccttgaccatccttcagctttggatttcctgaaggaagattgcttgcatgttaatgatttctttgaaaaacgaggcattcctgtcatgacagtaacagagctatttaattttgttgtggatcaaaatatcgctgatgaagatgttgatgattacttggagaaggttcaacaaagattttggaaaatggagatacagctgcagatgatgatgaaattgctccgacagtcttggtgcaggtaggaatatgaatattgtactatgcatttgtgcagctttgccagaaata

SEQ ID NO: 3290 - DNA, 537 bp, Triticum aestivum
gaggtgacttcgaagaaagatcaaagcaatatctgggtgcggggtgatgagtcctaccggttcgtgtccggttaaggactttgtgcgtgcattccagtcattccacaccgggagagctataagaaaggagctcgctgtgccattcgacaagagcaagagccatccagcagcattgacaactacgaggtatggtgtgagtggcacggagctgctaaaggcaaacattggcagggagatcctcctcatgaaaaggaactctttcgtctacatgtttagaaccttccagctgatcctcatgtcatttattgcaatgacgctcttcttccgtacaaagatgaagcgcgactcggtgacaaatgggggcatctacatgggggcactcttctttggtgtgctcatgatcatgttcaatggcttctctgagcttgcactcaccgtctttaagctacccgtgttcttcaagcagagggacctccttttctacccagcatgggcttacacaataccctcatggatcctcaagatcccaataacatt

SEQ ID NO: 3291 - DNA, 530 bp, Triticum aestivum
tcggcaccccacgcccaacctgcgcgacctctacgcgctgggccggaagctcgggcagggccagttcggcaccacctacctctgcaccgagctggccacgggggccgactacgcctgcaagtccatctccaagcgcaagctcatcaccaaggaggacatcgacgacgtgcgccgcgagatccagatcatgcaccacctctccggccaccgcaacgtcgtcgccatcaagggcgcctacgaggaccagctctacgtgcacatcgtcatggagctctgcgccgggggcgagctcttcgaccgcatcatacagcgcggccactacagcgagcgcaaggccgccgagctcaccaggatcatcgtacaggggtcgtcgaggcctgccactcgctcggggtcatgcaccgggacctaaagcccgagaacttcctgctcgccaacaaggacgacgacctctcgcttaaggccatcgatttcggcctctccgtcttcttcaagcctggccaaattttcaccgatgttgttggaagccc

SEQ ID NO: 3292 - DNA, 529 bp, Triticum aestivum
cagtctttagcgctctcagaaattgatgccatgctgactttcaaagtcgatctccccttgaagaatagcatcaatattcccttctcagtttcagcccagaatggaggaacaccgctgagaagaatgtacagaataacacctgcactccaaacatctatctctttaccatagtttctcctaaggacttcaggagcaacataataagcacttccaacgatgtccctatacatttttccttcttcaatgaagaccgaaagcccgaaatcagtggccttgagcacagcattctcatccttggtcgcgagcaagaagttctctggcttcagatcgcggtgcatcactcccatgaaatggcaaacattgacaacattcacaactcctctgcagattgtagcagctgcacgctctgagtagtgccccttggcaataatccgatcaaacagctccccgcctgcacagagctccatcacaacatgcacgctgcccttgtcctcatatgctccacagaactccactatgttcggctgcc

SEQ ID NO: 3293 - DNA, 527 bp, Triticum aestivum
ttcatggtatgtaaatgagggactacgagaaatcctcactacggggatatctaactgaaggactagctgttggctgatacaccatgcaacttcttttggttttgatcgtggatggttttcatgtggttgctgatacaccatatgctgaagtggtggaagtcatgaaaatgtgcatgccactgttactaccggcctctggtgtcattcactttgtcatgtctgagggtcaggccatgcaggcgagtggcctcatagcaaggtgggatcttgttggcccatcttctggtaggagcgctgaaccatttcatggcacttttccaaaacttgaacctccaactgctatttctggcaaagttcatcaaaagtttgctgcaagtgtgaattctgcgcacatgatccttgcaggatatgaacgtagtatcaatcacgtaagaaatacaattttttcagtgtatagttattcttccacttttgtttccctttgtctatctcgttgccactttcctcgtctacagagtgaaactaac

SEQ ID NO: 3294 - DNA, 510 bp, Triticum aestivum
tttgagacatcagcaggcatttggttattccagtgaagatgtgcaaatggtaattgaaacaatggcttcacaagggaaggagccaacattttgcatgggtgatgacattccattagccgtgttgtcacaaaagccacacatgctctttgattatttcaagcagcgatttgcacaggttacaaatcctgcaattgatccactcagagaaggtttagtcatgtctcttgaagttaacattggtaaacgaggcaacatcttggaggttggccctgaaaatgctgaccaggttaccctgtcaagtcctgtgctgaatgaaggtgaactagaatcactattgaaggacccaaaattgaagcccaaagtactctcgacatacttcaatatccgtaaaggtctagatggttcccttgagaatgcaattaaggctctttgtgaagaagctgatgctgctgtgagaagtggttctcaacttcttgtgctttccgatcgttctgaagcacttgaaccaac

SEQ ID NO: 3295 - DNA, 505 bp, Triticum aestivum
  N_region (79)..(79): n = any nucleotide
  N_region (272)..(272): n = any nucleotide
tctggcaagactgttgcccttgttggagagagtggtagcggcaagtcaacgttaattggactgttggagcgattctacnatcctgattcaggcaccatctcattggatggagcggaaatcaagagcttaaacatcaattggttgagggaccaaacgggacttgtgagccaagagcctgtactcttcaatgatacaatccgtgccaacatagcctatggtaaggatggggaagttactgaggaggagctaattgcagctgcaaaggcatccantgcgcatgagttcatatcaagccttccccaaggatatgacaccacagttggggagagggggatacagctgtcgggtggccagaagcagcgggtggcaattgcaagggccatactgaaggaccccaagatactactacttgatgaggcgactagtgccttggatgccgagtccgagcgaattgtgcaggatgcattagacatgtgatggtcggcaggaccacggcttgttgtgg

SEQ ID NO: 3296 - DNA, 503 bp, Triticum aestivum
gactacaaattaacttacccaagcggaacagcaaccgccgtgcttataaatggatttcatgcgcctaagggagatgatgtggcaaagatgcaagtgaatggattcacaaaatactttgcaattagcttcttctggagcttcttccagtggttttattctggtggagatcattgtggcttttcgcaattccccactcttggactacgagcttggaaacattcgttcttctttgatttcaatctcacatatgttggggcagggatgatttgcccccaccttgtgaatatctctctccttcttggctctattctctcgtggggcgtaatgtggccactgattgctgatttgaaagggaactggtatccggcagatttaccagaaagcagcatgagaagtctgcaaggttacaaggccttcatttgcatagctctcatcctaggagacggcatatacaattttacaaagattattcttaagaccgtcgcgagtatgcttgacaaatc

SEQ ID NO: 3297 - DNA, 498 bp, Triticum aestivum
acgtcgttgtgcgcgccgaggaggtgctggcgttcgccaagacccaggcggactacatcctgggcacgaacccgatggagacgagctacctggtcgggtacagcgacaagtacccgcggcgggtgcaccaccgggcggcgtcgacggcgtcgttcgcggacgagaaggggttcatcgggtgcgcgcaggggttcgactcgtggtacagcgctggggaggagaacccgcacgacctcgtcggcgccgtcgtcggcgggcccgacggcgaggaccggttcaacgaccagcgcggcgcgtacatgcagaccgaggcctgcacgtacaacaccgcgcccatggtcggcgtcttctccaggctcatggagctcgacgcggaggagcggctgcgggagcaacgagacctgtgaagaagcggctcgtcgccggccggtgaatatgttcagctgtaggaatgttaattgaataactgagaaaaaaatgtggaaaaagaaagagtgg

SEQ ID NO: 3298 - DNA, 498 bp, Triticum aestivum
ggcatccccgaagaaatgatccgggaggcgctcaaagtcatccttgacgtaagaaaccatccggtgctcatccactgcaagagaggcaagcaccgtaccggctgcgtggtgggctgcctgaggaagctgcagaagtggcgcctgtcctccgtcttggacgagtacctgcacttcgcggcggccaaggccaggaaaaccgaccagaggttcatggagctcttcgacacgtcaagcttggtgcatctgctggcctcgcagtgttgatgaaagcgagcgagcgtttttcgtttctcttttggcctgtcccgatcgtgccaccatgcggctgcgacgacctgtcttttcccgcggcgatttacagagaataatgttactagaacaatcatgggccatatctgtgagagatacaaggggaccaatgagagatgtactccttgaatgctcaaaaataacaattcaaagtgtatggcacagtatcattattcccgcaaaaaaaat

SEQ ID NO: 3299 - DNA, 483 bp, Triticum aestivum
ttgcacggcggtgctttccatgctgggatgagcctgcatttaaggccaagttcaagataacattggaggttccagctgaactggtagcattgtccaacatgccagtagttaaggagacagtctgcgggcctctgaagactgtctattatgaggaatctccacttatgtcaacatatctagtcgcaatagttgttggtttgtttgattacatagagagctcaacgttagaaggcaccaaagttcgtgtgtatacccaagttggcaagactagtcaaggaaagttcgcattagatgttggggtgaagtcactggatctattcaaggattacttcgccactccttacccactacctaagttggatatgattgctatccctgattttgctgctggagctatggagaactatgggttggtcacttaccgagaatcagctttgctttatgatgagcaattatcgtcagcatccaacaaacaacaggtag

SEQ ID NO: 3300 - DNA, 482 bp, Triticum aestivum
tggagagcttcggcacgccggacttcacgatatacaacgccggcaagttcccctgcaaccgctacacgcactacatgacgtcgtcgacgagcgtggacatcaacctggggcggcgggagatggtcatcctgggcacgcagtacgccggggagatgaagaagggcctcttcggcgtcatgcactacctcatgcccaagaggcgcatcctctccctccactccggctgcaacatgggccgagacggcgacgtcgccctcttctttgggctctcaggtactacgttcgttaacggaacgtaacagatccatcatccatccatggattggatggatccgtccggccgcaagaaccgtcacctgcccaaccgcatgcacctgactgacgccttcgccttgctcagcggcccgtctagtctagtttcaataaatattagcattatcgtgtgatgtcaccttttcagttttccaataatatgaaacaca

SEQ ID NO: 3301 - DNA, 482 bp, Triticum aestivum
tgaaggatgaatcgcctgacacatcggagccaccgccgtcacggctgaagaaggctgtggagctggagccccactccgctcagaacagagacgagcagttcgtctggccctggatgggagtgttggtcaatgtgcctactgagtggaaaggagggcgccaggtcggggaaagtgggaaccgcctgaaggagcagctcttggccttttgcccgcacaaggtcattcctttgtggaactatagaggccacaccgggaacgccatcgttgagtttggaaaagactatgcttctttctgcaatgccttcaagtttgagaaccactttgaggcagaaggacatggcaagcgggactgggagcagcgcaagtatcaagggcgcgagatgtttggatgggttgcaagggctgatgatcagagagccccgggaccgatcggggagcatctgcagaaaaatggtgatctgaaaaccgttgcagaacttgag

SEQ ID NO: 3302 - DNA, 479 bp, Triticum aestivum
gaggaggaggtgaaggtggaggtggaggaaggcaacgtgctggtgatcagcgggcagcgcagcaaggagaaggaggacaagaacgacaagtggcaccgcgtggagcgcagcagcgggcagttcatgcggcggttcaggctgccggagaacgcgaaggtggaccaggtgaaggccggactggagaacggcgtgctcaccgtcaccgtgcccaaggccgaggtcaagaagcctgaggtgaaggccattgagatctccggttaagctcctgaagatgtgatcggtgagggaagaagtcatgtttggtgtcagtaattcagtatttcagtgtgtgtttgtttggtcgtgcaagtatggtctgctgctggtgtgtcgtacgcgttgggagtccgagtggctgagtcggccggtttcatgtattcctttgtgagtacttgagtaatcgccttcttagttcttgctcgttgaggaataaataaaga

SEQ ID NO: 3303 - DNA, 467 bp, Triticum aestivum
gcgccatcccaagctcgcacagatcatcccacccgtagcgacgacagcgttcatctttgccgcgggcaccctcatcgtcctcctaatacgacggcggctcaagtacagcgagctccgggaagattgggaggtcgagttcgggccgcaccggttctcctacaaggatctgttcagcgccaccggcgggttcaaggagaagaatctgctcggtgtgggagggttcgggagggtatacaaaggggtgctaccggcgcccaaactggagatcgccgtcaagaaggtgtcacatgactcaaaacaaggcatgaaagagttcatcgccgaggttgtgagcattgggcgactacaacatcgcaatctcgctcagttacatggttattgcaggcgtaaaggtgaactgctcttggtatacgagtacatgtcaaatgggagccttgataggcacttgtatggcgatgatgagaagc

SEQ ID NO: 3304 - DNA, 455 bp, Triticum aestivum
  N_region (38)..(38): n = any nucleotide
ctttcgaaaggggatgttgaactatgttttgcgtccantacatgcgataaagttatagaaggagaagttcaagtcggagttcaagagcacttctacatggaacctcaatgcactcttgtctggccagttgattctggaaatgaaattcatatgatctcatctactcaagctccccatacacatcagaagtatgttgctaatgttcttggtcttccactatcaaaagttgtttgcaagactaagcgtattggtggcggatttggtggaaaagaaaccagatcagtaatatttgctgcggcagcttccgtagcttcctattgtctaagaaggccagtaaagattgttttggatagggatgttgacatgatgacaactggacaaggcacagtttcttggggaaatataaggttggatttaccaatgatgggaagatactggccttagacctcgaaatt

SEQ ID NO: 3305 - DNA, 433 bp, Triticum aestivum
gggaattggggatggcgtcaaagaggatacagaaggagctcaaggatctgcagaaggatccccctacatcatgcagtgcaggtcctgttggtgaagacatgttccactggcaggcaacgataatgggtccatctgatagcccatatgctggtggagttttcctagttaccatccacttccctcctgattatcccttcaaaccacccaaggtggcgtttcgcaccaaggttttccatccaaacatcaacagcaacgggagcatttgccttgacatccttaaggaccaatggagcccagcactaaccatttccaaggtgttgctgtcaatctgttccctgctgactgatccgaaccctgatgatcctctggtccctgagatcgcccacatgtacaagacagataggcacaagtacgagaacacagcaaggacctg

SEQ ID NO: 3306 - DNA, 432 bp, Triticum aestivum
tggaaaccgaactgggtgataaagttggatatgctatccgatttgaggacgtcacttgttctagcactataataaagtatatgacagatggagtgcttcttcgtgaaaccttgaaagatgccgaccttgataaatatcgtgttatcgtcatggatgaagcacacgaaagatccctcaatactgatgttttgtttggcatattgaagaaggttgttgcacgccggcgggattttaagctaattgtcacatctgcaaccctaaatgcagacaaattctcaaagttctttggaggtgtgcctgtatttaacattccaggcaggacatttccagttaatatcttgtttagcaaaacaccatgtgaagattatgtggaagcggcagtgaagcaggccatgacaattcacataacgagtggccctggcgacatcctca

SEQ ID NO: 3307 - DNA, 409 bp, Triticum aestivum
tgatgcctgcactttccctatgtgtatggatgcattttttctacaaaacgtgttttgttcttaccactattctctctcccatcttcattcttcaataaccgagcttatttcacagcatgttatggaacacggcaaaccccatgagcgatctgctatcattgagaagttgattgggcagattgtacaaatgagccagcaaaagtttgcctcaaacgtcattgagaagtgtttatcctttgggaatcctgtagaacgccaaatcttaattggtgaaatgcttggttccacggaggaaagtgaacatcttgaggtgatgatgaaagatcagtttgcaaactacgtggtacagaaggtgttggagacctgcgacgaccagcagagggaggcgatcctcacgaggatcaaagct

SEQ ID NO: 3308 - DNA, 402 bp, Triticum aestivum
tctcaagagcttgaagttcctggacatctccaacaaccggttctcgggtccaatccctgatgatattggcagtctccggagcctgcagaacatgtcgcttgccgggaacaacttctcaggtccattgcctgactccattgacgggctcgcgtcgcttcagtcgctggatgtgagcggcaatgctctctctggcccattgccggcagctctgaaaggtcttcggagcatggttgctctgaacctctcatataacgccttcacaaagggcattcctgctgggcttggcctccttgtgaacctccagtctgtggatctgagctggaatcaattggatggtggtgtcgattggaaattcttgatcgagtcaactgttactcatgttgacttcagtggaaacttgct

SEQ ID NO: 3309 - DNA, 401 bp, Triticum aestivum
ggtgccaccgacggatgcgcataagacgagtcccccgcctgaaggtcccgggccaactggtgggaaggagcaggaaggaggagcgggtggggagaagaagaatccgacagaagaaattaagaaggtgttgagttgtgaggatgcagcggagaaatgttctgttccaggagaaattaccgcttgccttcaggtttttaaggatggtaaagccactaattaccttggaaacttcactatgttcaattaattgagtttctgtttgctaaaatttataagggtagacatatttttatcaactgtatctgttgagtaaaaaaaatgttcttctgaattagtaccttttgcaagtccatttgagccatgcttgcatagttgcattcagtttgagccagttttattgc

SEQ ID NO: 3310 - DNA, 308 bp, Triticum aestivum
tccataccatccacaatatatatgagaaaattggatgtggtatcgactacatcacgctagggttgcatccagaattcgagaactcaaggtgtttgttcatagttaggacggacggcgagcaggtcgatttttctttctggaagtgcatcaagggtctcataagacaaaagtaccccgtgtacgcggacagtttcattctcagacatttccgcaggaggcaagactactgaactagtgatccgtacggttgttttcgtgtaatatttctgtgattttgatcttgtccacgcgcctttaatatcatgtga

SEQ ID NO: 3311 - DNA, 663 bp, Triticum aestivum
cccacggctggtgacctcatcttggtggggaggactttgacaaccgtatggtgaaccactttgtccaagagttcaagaggaagcacaagaaggatatcagtggaaaccccaggtctttgagaaggctcaggacttcttgtgagagggcgaagaggaccctttcttccactgcccaaaccaccattgagatcgattcactctttgagggagttgatttctattccaccatcaccagggccaggtttgaggagctcaacatggacctcttcaggaagtgcatggagccagtggagaagtgcctgagggatgccaagatggacaagagcactatccatgatgtcgtgcttgttggtggttccaccaggatccccagagttcagcagctgctgcaggacttcttcaacgggaaggagctctgcaagagcatcaaccctgatgaagctgttgcctacggtgctgccgtgcaggctgcaatcctcagcggtgaggggaacgagaaggtgcaggaccttctcctcctcgatgtgaccccactgtctcttggtcttgagactgctggaggagtcatgactgtgctcatcaccaggaacaccaccatccccaccaagaaggagcaggtcttctccacctactccgacaaccagcctggtgtgctcatccagg

SEQ ID NO: 3312 - DNA, 638 bp, Triticum aestivum
ctggaacaaggtggactacgggatgttccggttcctgcgtggcggactcggagcacgactggcgggaggggactccgcagtacaagttcatcgaggagtgcctctccacggtggaccggaagcaccagccgtggctcatcttcgcggcgcaccgggtgctgggttactcctccaactcgtggtacgccgaccagggctcgttcgaggagcccgagggccgggagagcctgcagaagctgtggctagcggcaccgcgtcgacattgccttcttcggccacgtccacaactacgagcgtacttgcccgctctatcagagccagtgcgtcaccagcgagcggagcaactactcgggcaccatgaacgggaccatctttgtcgtggcaggacggcggcggcagccacctctcgggctacaccagcgcgacccccaagtggagtgtgattcagggataaagactacgggttcaccaagctcactgccttcaaccactcgtcgcttttgttcgagtacaagaagagcagcgacggcaaggtgatatgactccttcaccatccatagggaactaaccgcgacgtgctcggatgcgtgcatgacagattgcttccccaccacacttgctacctaccatcgagctac

SEQ ID NO: 3313 - DNA, 671 bp, Triticum aestivum
cgggaggggactccgcagtacaagttcatcgaggagtgcctctccacggtggaccgcaagcaccagccgtggctcatcttcacggcgcaccgggtgctcggctactcctccaacgcgtggtacgccgccgagggctccttcgaggagcccgagggccgggagagcctgcagaagctgtggcagcggtaccgcgtcgacatggccttcttcggccacgtccacaactacgagcgcacatgcccgctctaccagagccagtgcgtcaccggcgagcggagccactactcgggcaccatgaacggcaccatcttcgtcgtggcgggcggcggcggcagccacctctccagctacaccacggccatccccagatggagcgtcttcagggatcaagactatggcttcgtcaagctcacggccttcaaccactcgtcgcttttgttcgagtacaagaagagcagcgacggcaacgtctacgattccttcaccgtcgatagggactaccgcgacgtgctcagctgtgtgcacgacagctgcttccccaccacactcgctctctgaccgtctagcggcccatcatggcaacgttgctagccggagagtggctaacaaggttggtcctcatgagcttaatctgtggaataaaactggccagctgcaccattaattagttt

SEQ ID NO: 3314 - DNA, 1596 bp, Triticum aestivum
cttcatttggtgtgctgctccaatttctggaccagtatctatctgcttctcgatccaactactctggctctatttcaccagccggttcctggcactggagattctgcaagggcaaatctaattctggaccgctcaataagcatggagaaccaacaaagagatcctctggcccccagtcaggaggagtgaccccaatggctcgccagaattctggccatctaccgcctattcttccgacaactgggctcatcacatcaggacctatctcctctggacagttgaactcatctggtgctctacgaaaagtatcaggcactcttgattctactgtttcgatgaagatgcgtgccacctcttctgcttacaacccggctgttacaaatcttaatgagcaaaatagctactcaattaaggccagtttgccaaagccgatactatgggcggctattctgctctttgcgatggggttcatagcaggtggcttcattctagctgctgttcataattcgattttgctggtagttgttgtggtgatatttggatttgttgctgcgctcttggtttggaacatttgctggggaacaagaggcatgactaggtttgtcagtcgctatcctgatgctgatcttagaattgcgaaagatggagagtatgtgaaggtcacaggggttgttacttgtggaaatttcccccttgagtcctcatttcaaagggttccaagatgtgtatacacttcgtcctgcttgtatgagtataggggttgggactcaaaagctgccaacactcagcatcgccgatttacttggggattacgttcaattgaacggcatgcggtcgatttctacatctctgatttccaatctgggttgcgagcattggtcaaaataggatatggtgcacggctaatcccatatgtcgatgaagctgttgttattgacataaatccagaaaacaaggacatgtcccctgaatttttgagatggatacgggaaaggaacctctcaagtgatgatcgtataatgcgcctaaaagaaggatacattaaggagggaaacactgttagtgtcatcggtgttgttcaaaggaacgataatgtgctgatgattgttccaccacctgaacccttcaacactggttgccagtggggcaagtgcctcctcccaactagccttgatggactagtcttaagatgtgaagacacgtcgaacggtgatgtaattccagtatagctatctagcctcgttctggcagttcacctggggaaaagggaaaccaatatttgactttgggtttattttatggattgaaaaatgtgcaaatgcaaggtgtgattatggtttagtacaatattgatagtcagttgctcacggcttgattgtgtagtattttttgcattttgctcttttttggttgggcaatgaatacctgtaagattgatggcttcagtactaccatggagctctttggagatagagtggaaccatgttcatatgttcttttttattttggtttgtagcattacagcatcataaaccattctccagttccccactctgtatctatacttcttcatacataactccagctctcatggta

SEQ ID NO: 3315 - DNA, 742 bp, Triticum aestivum
tgatcgtaagccacttggtatgaatatcaactcagcaaaagtggcttctaataatagcacaaataagacctttttgttgaagactgcaccacctaagactctgcaacctgatgatgattcagatgatgatcataagccacttgttcagaggttcaacccagcaaaaggggcttctaataatagcacaagtaagcccgttttattgaagcctgcacctaagattgtgcaatctgatgatgattcagaggatgagaaaccacttgccagcaggttacccactaatgctgctccaaaaagtagaggtagtacctctgattcagaggatgagaagccactgtctgcccgattttcaagaggtactgcaggtacatctgcgagtatctcaaattccaaggacaagctcccgtctaacaacaaggggccaaccaataattcgagtgctccccggaattcagttaaaaggccaggtgataacaataatcaaacaagttcagctcttaagaagaccaaatcttctgatgcttctgcctcaggaagtgtcaaaagagaatccaaggatgatgacagtaacagtgtacccgtcgaaagaaaactgacaccgggggagtcttcaaaaagcaagccacctgtaaagaatattgtaaagaagagtcctttatccgttaagaaggataataagaaattcaaaacaaaacaagaaaacatgaaaagttcccagttctcaaatcactgagggtgcctc

SEQ ID NO: 3316 - DNA, 1285 bp, Triticum aestivum
tgagggttttctctggccgtatatatccacaaaagctggggaatggtaccatctggcctcggaagcaatgatttcaaagggctctatggatacaatgtttttatctctgtatctatgatacttggtgatggtatctataacctcatcaagatcatttatgctactatcaaggaaataatgaatgcacgatcaaagcaaggaaggcttccccttgtccgggctcaggatgatgatgaaagttctgaattatcttctgaagagaagcttctgaatgacgtatttgtaaaggacagtatccctccctggttagcaggatctggttatgtggggcttgcagcaatctcaactgcaactgtaccaatgatgttcccacagctcaagtggtaccttgtcctttctgcctatgttgttgcacccctactcgccttctgcaactcatacggcactggcctaacagactggaaccttgcatccatatacggaaagattggccttttcatttttgcctcatgggttggccagcatggtggtgtgatcgccggcttagcagcttgcggtgtcatgatgtccatagtatccacagctgctgatctcatgcaggacttcaagactggttactttaccctctcttcaccaaggtccatgtttgtgtcacaattgattgggactgctcttggctgtgtcattgctcctctcaccttttggctttactggtcggcctttgatgttggcaatcctgatggcatgttcaaagctccatacgctgtcatcttccgtgagatggcaattttgggagtcgaaggattctcggccctcccccaacactgcctagcaatctgctctttcttcttctttgcagccatagcgatcaacctcctgagggacgtcactccagacagcgtgtccaaattcatcccactcccaatggccatggctgttcccttctacattggagcgtattttgcgattgacatgtttgttgggacggtcatcctgtttgtctgggagaagattaaccgcaaggagtcggaggactttgcaggcgcggttgcttcgggtttgatctgtggtgacggcatctggagcgtcccttctgcaatactctctatcatgaggattgacccgccgatgtgcatgtacttcaagccatctcttgcctagggcgtaaataggctgtagctagaatgtttgttttattgggatgccacaaatagaagagaaccacatcgtgtacatatttatttcacacacgtgtaaatcaatactgcggcaaaaatcgcagcag

SEQ ID NO: 3317 - DNA, 1218 bp, Triticum aestivum
  N_region (6)..(6): n = any nucleotide
  N_region (9)..(9): n = any nucleotide
  N_region (37)..(37): n = any nucleotide
ctgccntgntcccaccattgcagctcttagcaatccngaagtggaaatggccttcttctgaaaggaggaaaagaagctatgagatcaaacacaatattacataaggtcataaccagtgtgattccagatgctgttggtaaaaagcttattggccttgtgaaaagcaaagatgaaattgctgatcttctaaagcttgacgatgtgattgatcttgttattccaagaggcagtaacaggcttgtttctcaaatcaaagcacaaaccaagattcccgttctgggtcatgctgatggtatctgccatgtttatattgataaatcagctgacatggacatggcaaaacgtatagtattggatgcaaaggttgattatcctgcagcgtgtaatgctatggaaacactgcttgttcataaagatctgaacaagacagagggtcttgatgatttattgatggaacttgcgaaagaaggagttgttatttatggtgggcctgtcgcacatgacacattgaaagtaccgaaggtagattcatttcatcatgagtatagctcaatggcatgcaccctcgaatttgttgatgatgtgcagtcagcgattgaccatataaatcgttatggaagtgcacacacagattgtattatcacaactgataagaagtcagcggatacttttctacaacaagttgacagtgctgctgtgttccataatgcaagcacaaggttctgtgatgggactcgctttggtctaggtgcagaggttggcataagtacagggcgcatacatgcccgtggacctgttggcgtcgacggtcttttaaccactcggtgcattctgcgagggagtggacaagtagtgaacggtgacaagggagttgtgtacacccacaaggatcttcctttgcaatgagggtagaggattcctgctgtagagcaatttttatagaataatcctcttcaaagcccccttctctctgtgcgaggaatgaaggaagacaagagagcattgttgttactatgtcgctatctagttccgtgattattcgtgtacaatgatttatccatacaatgtcgtagttatggcactagctgttgtaactgtagaattgcatcggtacatctatgctacatatatgaagtagctgtactgtttctgatgaagtctcgaatccgttgtcatgttgtctttctatggcaaagagcacctgaaatgaatgtatcg

SEQ ID NO: 3318 - DNA, 1052 bp, Triticum aestivum
cgatttgagttcatcattaacaatggtggtatcgactctgaggaggactacccctacaaggagagggacaaccgttgcgatgctaacaagaaaaatgcgaaggttgttaccattgatgggtacgaggatgtgcccgtgaacagtgagaagagtctgcagaaggcagttgcaaaccagcccatcagtgttgcgattgaggctggtggcagggcattccagctctacaaatcgggtatcttcaccggaacctgtggaacagcacttgatcatggtgtcgccgccgttggttatggtacagagaacggcaaggactactggctcgtcaggaactcctggggtaccgtctggggagaggatggttacatccggatggagcgcaacatcaaggcatccagtggcaaatgtggtattgccgtcgagccttcctacccgaccaagacgggcgagaaccccccttaaccccggcccaactccaccatctcccgccccaccgtcttccgtctgtgacagctacaacgagtgccccgcgagcacgacctgctgctgcatctacgagtacggcaaggagtgcttcgcctggggctgttgcccactcgagggtgctacctgctgcgatgatcactacagctgctgccctcataactatcccatctgcaacacccagcagggaacctgcctcgcggccaaggacagcccactgtcagtgaaggctcagaggcgtaccctggccaagcctatcggtgctttctctggcattgcaactgacggcaagaagagcagcgcgtaaacatttgcatcacgacattcatacagccaacggccatggtgattaacttctgcaaatgatcacctggtgatccacgatcgaaggcgcagcatggcgatagctatgctctctagtatcttctttataatagatgctcctgtacataatcctaaaatcgggttcgatcatttacagaaccaccaaatttgcttttgcatatgtatatgtaaaactcagctcattccctcacagtttggagctgccattgttattatggaattcatca

SEQ ID NO: 3319 - DNA, 1202 bp, Triticum aestivum
gctttctcagcaatagcagctgttgaaggcatcaaccagattgttacgggcgacatgatccctctgtccgagcaagagcttgttgactgtgacacttcatacaacgagggatgcaatggaggtctgatggactatgcgtttgagttcatcattaacaatggcggtatcgactctgaggaggactacccctacaaggagagggacaaccgttgcgatgctaacaagaaaaatgcgaaggttgttaccattgatgggtacgaggatgtgcccgtgaacagtgagaagagtctgcagaaggcagttgcaaaccagcccatcagtgttgcgattgaggctggtggcagggcattccagctctacaaatcgggtatcttcactggaacctgtggaacagcacttgaccatggtgtcgccgccgttggttatggtacagagaacggcaaggactactggctcgtcaggaactcctggggtaccgtctggggagaggatggttacatccggatggagcgtaacatcaaggcatccagtggcaaatgtggtattgccgttgagccttcctacccgacgaagacgggcgagaacccccctaaccccggcccaactccaccatctcccgccccaccgtcttccgtctgtgacagctacaacgagtgccccgcgagcacgacctgctgctgcatctacgagtacggcaaggagtgcttcgcctggggctgttgcccactcgagggtgctacctgctgcgatgatcactacagctgctgccctcataactatcccatctgcaacacccagcagggaacctgccttgcggccaaggacagtccactgtcagtgaaggctcagaggcgtaccctggccaagcctatcggtgctttctctgtcattgcaactgacggcaagaaaagtagcgcgtaaacatttgcatcaccacaatcctacagccaacggccatggtggttaacttctgcaaatgatcacctggtgacccacgatagaaggcgcagcatggcaatagctgtgctctcaagtatcttctttatagtagatgctcctgtacataatcctaaaatcgggttcggttgttcacagaaccgccacatttgcttttgcatatgtatatgtaaattcagcacattcccaggcagtttggggctgctattgttatatggaattcatcaagaaacaagataagcaga

SEQ ID NO: 3320 - DNA, 1194 bp, Triticum aestivum
ctcgttgataaaggagaaccagtggtaccaacgatactatggaccatgcaaaggaagctatatctacttgggggccttcaggctgaagggttcttcagaataaatgctgacaatagacaggaacagcatgtcagggagcaactaaacagaggtgttgttccagatggagttgacttgcattatcttgcaggccttataaaggcatggttccgagaacttccaagtggagtattagactcattgactccagaacaagtgatgcattgcaacactgaagaagagtgttctcgtattgcgagtattgtacctccagtggaagcagcattactggattgggccattaatctgatggcagatgttgtggagcatgaaaactacaacaagatgaatgctcgcaacgttgctatggttttcgcgccaaacatgactcagatggccgatcccttaactgctttgatacatgcagttcaagtgatgaattttttgaagacattgatactgaagactgtcaaagaaagggaggaggcagctgccgcaacaaggggattcacctccagctctggttccccgagtgacaaagatgcgcctcaggcattaaatcttttggacaaccccttaaattgctcaagtcgggaaaatgtcgaacgccccatgattagtggggctactctcgaccactttctctttagcatggaacaagcgcttcaccaagatgcgcaagccagtgtcggagaacccaagaagtgtgacaccggtacagcacatgacaaatacaatgacgaattttctcctgtggacagtgattttagtaatagccaagatgacagcagttctggaaacaaattcagtaacgacagtgtggaaggtttgtttgacagattcaaatttaggaaaggggtaggcagaatctgcaggcacccagtgtttcagttgagtaggtccatgaagaagtctgatgaagcaggacaggcttgtgcatgacatggtaggatgtgtatgtaattgatgattcccctagttttgcagctgtttagcgcttaactcatacgccatttctcctagttcgtctgtagaagctataagcccatttgattgtactagtactgaactgctgatgtggagttcttggcgtgtacagtatatagttcaactatatcgtaccagcatcctgttgtttgaaaagatgaatgtatc

SEQ ID NO: 3321 - DNA, 1185 bp, Triticum aestivum
gagagaccaaggggccggccggagacgcgcaaagccatagcttggttcctgttgcatcgatcgttgcggttgcggagatgggtcgcgggaagatcgagatcaagcggatcgagaacgccacgaaccggcaggtgaccttctccaagcgccggggcgggctgctcaagaaggccaacgagctcgccgtgctctgcgacgcgcgcgtcggcgtcgtcatcttctccagcaccggcaggatgttcgagtactccagccccgcctccagcttgagggatctcattgagcagtaccagaacgccaccaacagtcagttcgaggagattaaccacgatcagcaaatatttgtggagatgacacggatgaggaacgagatggagaagctggatggcgccatccggaggtacacgggcgatgacctctcctccctctccctcgccgacgtcaacgacatcgagcagcagctcgagttctccgtcgccaaagtccgtgcaagaaagcatcagctcctgaaccagcagctcgacaacttacgtcgcaaggagcatatcttggaagatcagaacagtttcctgtgccgcatgatcagcgagaaccagcatggcagtgaccggaagatggcggtgatgccgccggtgctgtcgatgctgacgccggccttcccggcgacgccgtactacacgggcgaggagtcgtcgagcaccgcgctgcagctgacgtccccgcagcttcagctccacgccgccgaagccgccgggttccggctgcagccgacgcagcccaacctgcaggacccggcgtgcagcagcctccacgccggccacggcctccacctctgagatttgatcatcacgcgccgccggtgatggattggttgattcatgggctcccttgattcatggattctaggaagaagaagatcacggtggatggaagattgacccttatgatgcatgcatgaggacgactatttaatttgggagctatatgtatgtaagataagattgcagctgtgtgacctgtgtcttaggctgttctttcatcatgttgcgtacttaagctagctatatacaattgtctggtcaaatgttggtacgtacgtagaaattaaatagttgtgcacgcatggggatcgaggacgatgcatacatgtaataaatataagttcagagtgaattccacttttta

SEQ ID NO: 3322 - DNA, 1810 bp, Triticum aestivum
  N_region (569)..(569): n = any nucleotide
acggagtccaccaccagtctcctcccctcctccttctcctcctacccccgcctccaaggcccctccgcccgcccgccgacctggtccgctggtccggggtgctctgtccggcacgaatccatcggcgcttgttgcgggaatgcggggagttcattggtgagccgctatgggttgcttcccgtgcttcgattcgggctccgacggggagctgctctaccccaagcagggcggcggaggcggcggaaatggcacgggcggacggactgcggacgcggcatcgtacctccggcgtcggcgcccgcgaggagagacccatggtcccgccgcgcgtcgagaagctccccgcaggggctgagaaggcaagggcaaaaggcaatgccggaatgaaggagctttcagatctcagggatgccaatggcatgtcctttctgcgcagacgttcaccttccgccagcttacagctgccacgaggaacttcagggaggaatgcttcattggggagggagggttcggacgtgtttacaagggccgtcttgatggaggccaggttgttgctataaagcagctcnatagggatggaaaccaaggaaacaagaatttctggtggaggtcctcatgctcagtttgctgcatcatcaaaccttgttaatttggttggttattgtgctgatggagagcaacgccttctggtgtatgagtatatgccccttggatcattggaagaccatctccatgatctccctcctgataaggaaccgttggactggaacactaggatgaaaattgcagctggtgctgctaaagggctggaatacctccatgacaaggcacaaccaccagttatatatagagacttcaagtcatcaaatattctattgggtgatgatttccatccaaagctgtcagactttggtctcgctaaattgggtcctgttggtgacaagtctcatgtctctacacgtgtgatgggaacatacggctattgtgctccagaatatgctatgacagggcaacttacagtcaagtcagatgtctatagctttggagtggtgttgcttgagttgattactggccggaaggccattgacagcaccagacctcatggggaacaaaacctcgtgtcatgggcacgccctcttttcaatgacaggcggaagctcccaaagatggctgatccagggctgcagggacgatatcccatgcgtgggctctaccaagccctcgctgtggcgtcaatgtgtattcagtcagaggctgcttcgcgaccacttatcgctgatgttgtgactgctctttcctacttggcgtcccaaatttatgatcctaatgcgatccatgcctcgaaaaaggcaggtggcgaccagcgaagtagggtttctgatagtggaaggacgctcctgaagaatgatgaggcaggcagctcaggacacaagtcggatcgggatgattcccccagggagcctcctccggggatccttaatgacagggagaggatggtggctgaggcgaagatgtggggtgccaacctgcgggagaagacgcgtgctgctgccaatgcacaggggagcctcgattctccaactgaaaccggatagtggcagtcgtcaacctgtggccttgtgttttctctctgtcgactgtgcttgctttcgattggcgggaaaagatgaattgggtgctttccggtggtgttagatgtgtacatttataggggcaaaacaaaaacaaaacaaacagagaagaattgggtgactttgtactggatatggtcgtacctgtaaattcttggaaaattttgcgacgatggaga

SEQ ID NO: 3323 - DNA, 1050 bp, Triticum aestivum
taaccaaccagcaacaatgcacaacaactcattccaaatgatcttcactcactagtcactggtgagccttgttgtcagcacgcccgccgtccccttctccccagccgtcctcgagcggcatgtccggcatcaccttcttccagaaccagtgcttcctccacagcagcaccatctcctcgatgggcacgcccttggtctccggcaggaagacgtagacgaagacggtcatgaccgtgatccaggcggcgaagaagaggaagatgccgaacttgaaggcgcagagcatggacaggaacgcctgcgcgatgacgaaggtgaagaagaggttgacggccaccgtgatgctctgcgccgccgagcgcgtctccagcgggaagatctcgctcggcaccgtccaccccagcggcccccacgaccacccgaacgccatcacgaagaggcagatcaccaccacctctccactccactaccaccgaagcagctcccactgaagcagcggcggaagaagaagaagctagaggacatgggggcgcagagagctctcctcgcgagcttcctgctcgccgcgttggccacccaggccttcgtctccgtctcggccaggaccggcccgacggacaaggcaagccaagatgacgtgaagaagccggactgcgtgccgtcgctcgacccgcacaacttccccggccacgggggcaccaccgtgccgcttccctcgcacgggggctcctccggcacgcccccctaccacggaggttccggcacgacgccgtcgcacggcggctccggctcgactccgtcgcacagcggctctggtcgttgcctgacccttcgcacggcgggtacgggacgccgccttcgcacgggggctctggatcgttgcctgacccatcgcacagcggaggaggttacgggtccaccccagatgcgccgtcacacggcggaggcgcgtacgggagctccccgacgccttccactggcggtgcctacggcagctcacccactccgtcccacgacggaggcgcctacgggagctccccgacgccggcc

SEQ ID NO: 3324 - DNA, 664 bp, Triticum aestivum
catcagcggcggcattcagatgatcgtttgccaggtgatcggtggcggtgatactcggggtgaagttcgggacggacaagcagctgtcgcggagctactcgatcgtggtggtggtggtgatctgcctcttcgtgatggcgttcgggtggtcgtgggggccgctggggtggacggtgccgagcgagatcttcccgctggagacgcggtcggcggggcagagcatcacggtggccgtcaacctcttcttcaccttcgtcatcgcgcaggcgttcctgtccatgctctgcgccttcaagttcggcatcttcctcttcttcgccgcctggatcacggtcatgaccgtgttcgtctacattttcctgccggagaccaagggcgtgcccatcgaggagatggtgctgctgtggaggaagcactggttctggaagaaggtgatgccggacatgccgctcgaggacggctggggagaaggggacgctgggcgtgctgacaataagggtcagtgaagatcatttggaatgagttgtgcattgttggttggttagatcctgtaagacacagtattttttttcatgcgatgcaaagcctccagaatggcgggtactctaccaggcttgttcgataaatgagactcatattagcatgaaaaaaaaacactcaagag

SEQ ID NO: 3325 - DNA, 673 bp, Triticum aestivum
cattaggaagtcggaagaagagattgttgctatcaaagctcaaaatggacaagtacttggccgtggtgaatgagaaagaaactgaaaatactgagctgctggagaagatgagtcatctggaggctcagctagttgaagccaacaaggctagcgaggaagccaaggccgagacccggcaattgaaggataaactattagacaaagagaacgaattacagaacatacaagaggagaacgaggacttgcaggcaaaggaatcagctgcttctgagaagataaaggagctctcttatctagtgccgaatggaacaacaaatggtggcaacaagggagactcggctctcgacagcaacgggttgcagtcagcaaagacatacaacggcggcacgtcgccaaccaaacagcagcagcaaaagaagaagaaatttaaatttagcggcttactgaagaaaaagagctcaaattagcacaagaccaccgtcttatgttgttcctttgttgtatgctatgtgacatctcctttctttgactagccacccacccatgcctctagttttctgagtctgtcatcatggtaaagcaagtgttgggtgtttcagagaatacaaaagagccggccgattgtatttacagccatgcgtttgtttcttgcatttgtgtaagttcagtgatg

SEQ ID NO: 3326 - DNA, 812 bp, Triticum aestivum
cagaagctaagaacgtgtctgaggaatggcagtccaaagagctaagttttgtcaactccattaggaagtcggaagaagagatcgtcactatcaaagctcaaatggacaagtacttggccgtggtgaatgaaaaagaagctgaaaataccgagctgttggagaagatgaatcatctcgaggctcagctagttgaagccaacaaggccagtgaggaagccaaggccgagacccgtcaactgaaggacaaactattagacaaagagaacgaattacagaacatacaagaggagaatgaggacttgcaggcaaaggaatcagctgcttcggagaagataaaagagctctcttatctagtgccgaatggaacgacaaatggtggcaacaaggaagaagataacgagaatggtggcggtgtggatgacgaaccggtcgtggtggttgccaagatgtgggagaacagcaaggtcaccgactacgactcatccaaggagaaggagaacgacggcgagtctgaagtcgatctggagtccaacaagggagactccaccctcgacagcaacgggttgcagtccgcaaagatgaacaacggcatcacatcgccaaccaaacagcagcagcaaaagaagaagaaatttaaatttagcggcttactgaagaaaaagagctcaaattagcacaagatcaccagtcttatgttgttccttcgttgtatgctatgtgacatctcctttctttgactagccacccacccatgcccctagttttctgagtctgtcatcatggtaaagcaagtgttgggtgtttcagagaat

SEQ ID NO: 3327 - DNA, 1141 bp, Triticum aestivum
ccaggagaaatacctcatcaaacaggaagagatcgagcacgctcgggcacaagtagaggaactcaacaatagtctgcagaatgccaaggagagctatgaggtgatgctcgatgaagtaaactacgagaaagtttgcctcaagaagtccgttgagagaatggaggcagaagctaagaacgtgtctgaggaatggcagtccaaagagctaagttttgtcaactctattaggaagtcagaagaagagatcgttgctgtcaaagctcaaatggacaagtacttggccgtggtgaatgaaaaagaagctgaaaataccgagctgctggagaagatgaatcatctggaagctcagctagttgaagccaacaaggctagcgaggaagccaaggccgagacccggcaattgaaggacaaactattagacaaggagaacgaattacagaacatacaagaggagaacgaggacttgcaggcaaaggaatcggctgcttcggagaagataaaagagctctctttcctggtgccgaatggaacaacaaatggtggcaacaaggaagaagacaatgagaacggaggcggtgtggatgacgagccggttgtggtggttgccaagatgtgggagaacagcaaggttaccgactacgactcgtccaaggagaaggagaacgacggcgagtccgaagtcgatctggagtccaacaagggagactccggccttgacagcaacgggctgcagtccgcaaagctgaacaacggcatcacatcgccgaccaaacagcagcagcaaaagaagaagaaatttaaatttagcggcttactgaagaaaaagagctcaaattagcacaagatcaccatcttatgtttgttcctttgttgtatgctatgtgacatctcctttctttgactagccacccacccatgcctctagttttctgagtctgtcatcatggtaaagcaagtgttgggtgtttcagagaatacaaaagagccggccgattgtatttacagccatgcgtttgtttcttgcatttgtgtaagttcagtgatgatgattcatgttgtagtcatagtgattgtatttattcatacatatgccctgggtaatggtgttgtacatggaacagagatttccaatcaatgcagt

SEQ ID NO: 3328 - DNA, 882 bp, Triticum aestivum
taactgtacttctgatatgcaaaactggatttctgagagtaaatgctataatcaaattttaattcttttttaaagcacttggcatttgatgtctctgagaatttgtgcttaagcaccagcagatgcgtatctgtggaagttatttcttaatcaactagtgtagcaagtccacagaaatttactctgatggctgataagttcagcttggctttatgccccaggatttgaaatcatttcaaagacaagttatatcatggtaaacaaaggaacttacatgtctcttttgtaccattgattcattaggcggacgtggacaacagtgggaccattgactatatagagttcattgctgcaacattgcatctgaataaactggagcgtgaggagcatctggtggcagccttttcatattttgacaaagatggaagtggttacatcacagtggatgaactgcagcaagcttgccaagagcacaacatgccagatgcttttcttgatgatgtcattaaagaagctgaccaggacaatgatggtcgcattgactatggagaatttgttgccatgatgaccaagggcaatatgggggtggggcgaagaacaatgagaaacagcctgaacatcagcatgagggacgcacctggtgcaatctagacttccacgatgtacatacagcttgtggccttagcttcttcctgccttcccgctctacgaagacttcctgcaattttcgaatcttgtaaaatgcctgtgtggatgtgtgtttctggggattctgatttagctcgtcaattgattcgacggaacgcatgctaagctgggttggaatgatctcacacgttgctgctgcttaatccctgccaaatgttcggtgaattacctcct

SEQ ID NO: 3329 - DNA, 847 bp, Triticum aestivum
ctatctcgcattaagcaattctctgcgatgaataagttgaagaagatggctttgcgggtaatagctgagagcctctcagaggaggaaattgcagggttgaaggaaatgttccagactatggacgccgataacagtggtgcaattacatatgatgagctcaaagaaggcttgagaaaatatggctccacattgaaggataccgagattcgtgatcttatggacgcggcggatgtggacaacagtgggaccattgactatatagagttcatcgctgcaacattgcatctgaataaactggagcgtgaggaacatctagtggcagccttttcatatttcgacaaagatggaagtggttacatcacagtggatgaactgcagcaagcttgccaagagcataacatgccagatgcttttcttgatgatgtcattaaagaagctgaccaggacaatgatgggcgcatcgactatggagaatttgttgccatgatgaccaagggcaatatgggggtggggcgaagaacaatgagaaacagcctgaatatcagcatgagagacgcacctggtgcaatctagacttccacgatgtacatacagcttgtggctttagcttcttcctgtcttcctgctctaccaagacttcctgcgattttcgaatcttgtaaaatgcctgtgtggatgtgtgtttctggggattctgatttagctcgtcaattgattcgacggaacgcatgctaagctgggttgaaatgatctcacacgttgctgctgcttaatccctgcaaaatgttcagtgaattacctcctactatatctccctggaattgttaactcttaaaatggcttgtca

SEQ ID NO: 3330 - DNA, 1121 bp, Triticum aestivum
gctgtgcaaaaaatatggaccagaagctgatgtatggaccgctggtgtaattctctacattctgctgagtggtgtacccccattttgggcagagacacagcaaggaatatttgatgctgtactgaaaggtgtcatcgattttgattctgaaccctggcctgtgatatctgacagtgcaaaagatctgataacaagaatgctcaatcctcgcccagctgaacgcttgacagcacacgaagttctatgccatccatggattcgtgatcagggagttgctcctgatcgtcctcttgacacagctgtcttatctcgcattaagcaattctctgcgatgaataagttgaagaagatggctttgcgggtaatagctgagagcctctcagaggaggaaattgcaggcttgaaggagatgttccagactatggacgctgataatagtggtgcaattacatatgatgagctcaaagaaggcttgagaaaatatggctccacattgaaggatactgagattcgtgatcttatggatgcggcggacgtggacaacagtgggaccattgactatatagagttcatcgctgcaacattgcatctgaataaactggagcgtgaggagcatctggtggcagccttttcatattttgacaaagatggaagtggttacatcacagtggatgaactgcagcaagcttgccaagagcacaacatgccagatgcttttcttgatgatgtcattaaagaagctgaccaggacaatgatgggcgcatcgactatggagaatttgttgccatgatgaccaagggcaacatgggggtggggcgaagaacaatgagaaacagcctgaatatcagcatgagagacgcacctggtgcaatctagacttccacgatgtacatacagcttgtggctttagcttcttcctgtcttcatgctctacaaagacttcctgcaattttcgaatcttgtaaaatgcctgtgtggatgtgtgtttctggggattctgatttagctcgtcaattgattcgacggaacgcatgctaagctgggttgaaatgatctcacacgttgctgccgcttaatccctgcaaatgttcagtgaattacctcctactatatctgcctg

SEQ ID NO: 3331 - DNA, 1290 bp, Triticum aestivum
gtcattatctgtcatcaacagttcttccctctattgagggtgacagattaaccattccacgtgagagaatttggcgaaagatgagtacgaacgcaatttcatatcttctgttgtacctcctgatgaaattggagtgaaattcgatgatattggcgcgcttgaggatgtcaagaggacactggacgagctcgttgctcttccatgaggagaccagagcttttttctcatggcatttattaaggccctgcaaaggtgttttgctttttggtcctcctggcacaggaaaaacactcttggcaaaggcactcgcgactgaagctggggcaaattttatcagcataaccggttctacattgacatcaaagtggtttggagatgctgagaagttgacgaaggcccttttctcttttgctagccgactagctcctgtcatcatatttgtagacgaggttgacagcttacttggcgccagagggggtgcacttgagcatgaagcaacaaggaagatgcggaatgaatttatggcagcttgggatggtctaaggtccaaagagaaccaacggatccttattcttggtgctacgaatcgtccatttgatttagacgatgctgttatacggcgtttacctagacggatatatgttggccttccagatgtggaaaaccgaaagaaaattctcaagattttactggctacagaaaacttagaatctgattttaaattcgatgaacttgctaatgtgacagaaggttattcaggaagtgatctgaagaacctatgcatagcttcagcatacaggccagttcaggaacttctagaagaagaaaagaagggacgtgtgagtagcaacagcactcacttaagaccccttgtattggatgattttatacaggcaaaagccaaggtaagcccgtctatatctcataacgcaacaagtatgaacgaattaagaaaatggaacgaacagtatggtgaagatggcagcaggacaaaatcgccgtttgggtttggcaactgacatgttacagtagcaaagtgttgtttgtaaaatcaataggctgcctatttagtgacaggaagtcggcccccatttttcgccctgagcctatttatacagcctctcagtgatcctgtacaaatagcaaaatatcaagtcaaacgacaaattccaagttttcctgtagctggtactaccggggattccccaattttccaacattgcaaacgctgagctacaaatttgctccagctctgcaagagcctgacccaggtgtaagtagcaccagaaa

SEQ ID NO: 3332 - DNA, 1075 bp, Triticum aestivum
tggtgctaaattatcatgccaccttcggcacttgatcgtcttgcgtctctgcatattgagtaccctatgctatttgaagtacgcaacacagcagcagaacgcacttcacactgtggtgtcctagagttcattgcagaagaagggatgatctacatgccatactggatgatgcaaaatcttcttttgcaagaaggagatatggtgtttataaaaaatgccaacctcccaaagggcacatatgtgaagctgcagcctcatacaactgacttcttggacatttcaaatcccaaagcaatcttggaaaaaactttgcggaactactcttgtctaaccactggtgacagcattatggtggcatataataacaagaagtactacattgatatagttgaaacaaagcctgccagtgctataagtataattgagactgattgtgaggttgactttgccccaccacttgactataaagaacctgagcgacccaaacctactgctcctcccagcgctgatcctgctgcagaggctcaagatgaggaggaaccaaagttcagccccttcactggtcctggaaggcgcttggatgggaagcctgctaaagatttggatgcatcatcctcttcgcctgcaaagcgacaagctaatgcaaccaacagtgttcagccctcagcagcctccacaccacagatcacggcgccacgtaaaaccacaggaaagcttgtctttggctctggtggaagccagtcatcaaaaggaacagaaaaggtgcccgacaaggatgcaaaggaggatccgaagaaagaggagccgaagttttcagcattcacgggaaagaagtactccttgaagggctgaatgccagagtatgtatttatcagcacttcctgtcacaaacatcatcagggctaagagttcagtcagctactgtttagtttcctgatcccttgggagctggggcatctttcggtggactaccaatgcttcttttctgtcaactgtgatccttatgtcagccgccgtgggtcagtttggctgatgtgtacaaagtatttcaatgtctgttcatggattcttagcg

SEQ ID NO: 3333 - DNA, 1070 bp, Triticum aestivum
aaaggcagttgcccctgtccagatgagttccaatccttccaatcgttccaagtcaaatgctgaagatgatctgttttggggcccatctgaccactccaaacaagataagaaacagtcagaattcccaagtctagcaagtcagagtaaaagttccatgacgaaagaccagtcttcagtaaaccgtcacaagtctcaggctagcaagttgccactttcaacggctcctagtgctaacctcattgggaaagggaaagcagaggcagcaaacaagcagacagaggcaatggacttccgggattggtgcgacagcgagtggtccaggctcactggaacaaatgatacaagtttccttgagttctgcattaagcagtcgactgctgaagcagaaatgcttctccgggagaacgtcggctctctcgaccgcaacggccagttcatcgacaggttcctcaactacaaggcttttctgtccacagatgtgatcgagatggcattcagagcgcccagcaaccgtgccccccgcctgaaccccgcttctgcagccaaaggagggccaagtgctgaggcagagcaggatacaggaggaaagaaaaaagggaagaaagggaagaaggtgagcgcagcggttttagggttcaatgtagtcagcaaccgcatcatgatgggagagatccagaacgtggattagtaggactgcatacaacggtggcaccgcgctgtacatacttttggcgctctcgatagatcgttttgacttgttgcgatggcaaccgagcatatgcggtggtgattttcgtctcttttttcgagaaagtgcatccattgcccaattttggcttcctgtaactcacaccagattttgttctcgatagaacttcactgcagatgaacctagattcatttggtttacacaaaacacaaaacaaaaaagaggggggggcacaagaagacaccgttaaagcgcggtaggaggtcaaaccctttaagggcgccaaaaaaacgggggcgtaacaccggggggaaccgggtccctactgccccttcctcccagaaaacatatgtgactaatc

SEQ ID NO: 3334 - DNA, 1272 bp, Triticum aestivum
ggatctgcagccaaagccccattacctgttagttccattgattcatcagttatgtctataccagctgaaaagggcaaatcttcaaagcaagcgaaacaagaaaaggaaatacttccggctcctccaagtggtccatcctttggagattttgttccttggaagactgaccagacaaattttgcgcctgctccagcatggtccaatgactctacgaaggtgcacaaacctttgtctttgagagatattcagagagaggaagaaaggagatcaggtgttgtccagcaacaaccaccctcacctactccagcaaaggtttcggtgaaccaacggaatcatggtaatgcttcttctaagcaagcttctgggtcttctccatcaaaggcagttgcccctgtccagatgagttccaatccttccaatcgttccaagtcaaatgctgaagatgatctgttttggggcccatctgaccactccaaacaagataagaaacagtcagaattcccaagtctagcaagtcagagtaaaagttccatgacgaaagaccagtcttcagtaaaccgtcataagtctcaggctagcaagttgccactttcaacggctcctagtgctaacctcgttgggaaagggaaagcagaggcagcaaacaagcagacagaggcaatggacttccgggattggtgcgacagcgagtggtccaggctcactggaacaaatgatacaagtttccttgagttctgcattaagcagtcgactgccgaagcagaaatgcttctccgagagaacgttggctctcttgaccgcaatggtcagttcatcgacaggttcctcaactacaaggcttttctgtccacagatgtgatcgagatggcattcagagcgcctagcaaccgcgtcccccgcctgaacccctcttctgcagccaaaggagggccaagtgccgaggcagagcaggatacaggaggaaagaaaaaagggaagaaagggaagaaggtgagtgcagcggttttagggttcaatgtagtcagcaaccgcatcatgatgggagagatccagaacgtggattagtaggtctgcatacaacggtggcaccgcgctgtacatacttttggcgctctcgatagattgttttgacttgttgcgatggcaaccgagcttatgcggtggtgattttcgtctcttttttcgagaaagtgcatccattgcccaatttttggcttcctgtaactgacaccagattttgttctcgatagaacttcactgcagatgaacata

SEQ ID NO: 3335 - DNA, 726 bp, Triticum aestivum
cggtcatctcggcgagaaggcgtaccacgagcagctgtcggtgtcggagatcaccaacagcgcgttcgagccgtcgtccatgatggccaagtgcgacccgcggcacgggcaagtacatggcgtgctgcctcatgtaccggggcgacgtggtgcccaaggacgtgaacgcggcggtggccaccatcaagaccaagcgcaccatccagttcgtggactggtgccccacggggttcaagtgcggcatcaactaccagccgcccaccgtggtgcccggcggcgacctggccaaggtgcagagggccgtctgcatgatctccaactccaccagcgtcgtcgaggtcttctcccgcatcgaccacaagttcgacctcatgtacgccaagcgcgccttcgtgcactggtacgtgggcgagggcatggaggagggcgagttctccgaggcccgtgaggacctggccgccctggagaaggactacgaggaggtcggcgccgagggcggcgatgatgaggatggcgaggaggacgacgactactgatctgctcgtccgctcgacggaggatctgtctcctctgctgcctatctttaactacatgttgctgtgctgtcctgttttggaaacttgtgtctgggtgttgggttgttaagccgtcggtgctttctatgtcgctgttgaactgcatcattagtacttcgtggaacaagtgtctcgcttaattgatgttcat

SEQ ID NO: 3336 - DNA, 1052 bp, Triticum aestivum
ctagttctagtccaagctcgggttcaccgtgtacccatcccctcaggtgtcgacctctgtggtcgagccctacaacagtgtgctgtccacccactccctgctggagcacaccgatgtctccatcctgctcgacaacgaggccatctacgacatctgcaggcgctccctggacatcgagaggcccacctacaccaacctgaaccgcctcgtctctcaggtgatctcatccctgaccacctccctgaggttcgacggtgccctgaacgtggatgtgactgagttccagaccaacctggtcccatacccgaggatccacttcatgctctcgtcctatgcgccggtcatctcggccgagaaggcgtaccacgagcagctgtcggtgtctgagatcaccaacagcgcgttcgagccgtcgtccatgatggccaagtgcgacccgcgccacggcaagtacatggcgtgctgcctcatgtaccggggcgacgtggtgcccaaggacgtgaacgcggcggtggccaccatcaagaccaagcgcaccatccagttcgtggactggtgccccacggggttcaagtgcggcatcaactaccagccgcccaccgtggtgcctggcggcgacctggccaaggtgcagagggccgtctgcatgatctccaactccaccagcgtcgtcgaggtcttctcccgcatcgaccacaagttcgacctcatgtacgccaagcgcgccttcgtgcactggtatgtgggcgagggcatggaggagggcgagttctccgaggcccgtgaggacctggctgccctggagaaggactacgaggaggtcggcgctgagggtggcgacgatgaggatggcgaggaggacgacgactactgatctgctcgttcgctcgacgggggatccgtctcctctgccgcctatctttaactacatgttgccgtgctgtcctgttttggaaacttgtgttgggttgttaagccgtcggtgctttctttgtcgctgttgaactgcatcattagtacttcgtggaacaagtatctcgcttaatttgttc

SEQ ID NO: 3337 - DNA, 613 bp, Triticum aestivum
ctttgatgagagcatggcttcacatccaccgccaccgccaaggtgcctccatcgacaagaagattagggctcagcgagaagtttaccatgggcactacagtggtaaacgagaaggtcaaggagatggaccagaagttccaggtctccgacaagaccaagtcggcgctggctgcggcagagcagacggtgagcaacgctgggtccgccatcatgaagaacaggtacgtcttcacgagcgcgtcgtgggtcaccagcgcatttggcaaggttgccaaggccgccaccgacgtcagcacgatgacgaaggagaagatgtcagccgaggaccagcaaaagggctccgggggcagctcgtacacgcccatccgctgatcctcaccccccgctcctctatgtgcctcttgccatgttgtattatttattggtggatcagaagacaacattagatatatagaacacaccagatcaccccttccatatgtgaacctttgcaacccaggatttttttctctctttgtagaacaggaaatttaccttgggttttacatgttacagaactgttcaaggtagaattggaatgaaccttttactttgttaagttgtggaaggtgct

SEQ ID NO: 3338 - DNA, 1108 bp, Triticum aestivum
cctaatcaccaccgccgccggcctaacccccctttcctctgctacgcgcgcgatggcggcggcgacggctccggtggaggtgcccgtggcggcgccggtgaggactgtgaaggtcacaaatgtttccctgagtgcaactgagcaagacattaaggagttcttttctttttcaggagacattgaacatgtggatatgaaaagtggtgacgagtggtctcaaattgcatatgttacttttaaagatgcccaaggagcagagactgcgcttcttctttcgggcgcaacaatagttgacctttctgttatcattgcacctgctccagagtatcaaccgccccctactgcctctgctccactgatgagtggaaccagagtaccagtgggtggtgacaatgtggtccacaaggctgaggatgttgtcagcactatgcttgccaggggtttcaccctgggcaaagacgcctgtcggcaaggcgaaatcttttgatgagaggcatggcttcacatccactgccaccgccaaggtggcctccatcgacaagaagatagggctcagcgagaagttcaccatgggcactacagtggtaaacgagaaggtcaaggagatggaccagaagttccaggtctctgacaagaccaagtcggcgctggctgcggccgagcagacggtgagcaacgccgggtctgccatcatgaagaacaggtacgtcttcacgagcgcgtcgtgggtcaccagcgcgttcggcaaggtcgccaaggccgccaccgacgtcagcacgatgacgaaggagaagatgtcagccgaggaccagcaaaagggctccgggggcagctcgtacacgcccatccgctgatcgttgcccccgttccgctgcgcctcttgccatgttgtattatttattggtggatcagaagacaacattagatatatagaacacatcagatcaccccttccatatgtgaacttttgcaacccaggatttttctctctttgtagaagaacaggaaatttactttggggttttacatggtacagaactgttcaaggtagaattgaatgaaccttttactttgttaagttgtggaagggtgctgtaataatattgct

SEQ ID NO: 3339 - DNA, 1042 bp, Triticum aestivum
cgcccttcccccttctccacccaccaccgcctgcggaccgatcccgatctgatatcgccgccgcgcgcgcgccggacaagatggctcccgtgtcggctctggccaagtacaagctggtcttcctcggcgaccagtccgtcggcaagaccagcatcatcacccgcttcatgtacgacaagttcgacaacacctaccaggctacgattggtattgatttcctgtcgaagacaatgtaccttgaagatagaactgtgagactccaactctgggatacagctggtcaggaacgattcaggagtttaattccaagctacatcagagactcttcagttgctgttattgtattcgatgttgcaagcaggcagtctttcttaaacacgtcgaagtggatagaggaagttcgcactgagaggcatggcttcacatccactgccaccgccaaggtggcctccatcgacaagaagatagggttcagcgagaagttcaccatgggcactacagtggtaaacgagaaggtcaaggagatggaccagaagttccaggtctctgacaagaccaagtcggcgctggctgcggccgagcagacggtgagcaacgcagggtccgccatcatgaagaacaggtacgtcttcacgagcgcgtcgtgggtcaccagcgcgtttggcaaggttgccaaggctgccaccgacgtcagcacgatgacgaaggagaagatgtcagccgaggaccagcagaagggctccgggggcagctcgtacacgcccatccgctgatcctcaccccccgttcctctatgtgccttgccatgttgtattatttattggtggatcagaagacaacattagatatatagaacacatgagatcaccccttccatatgtgaacttttgcaacccaggattattttctctctttgtagaagaacaggaaatttactttggggttttacatgttacagaactgttcaaggtagaattggaatgaaccttttacttggttattaagttgtggaagggtgctgtaataatattgctagtggctg

SEQ ID NO: 3340 - DNA, 1244 bp, Triticum aestivum
atagacacttgatgctcaatatcagttgtggcaacgatggtgatgaatttacattcctgaccaataaaaatgctccaaagaataagcttgtgcggaacacttatttcttctggttacacaagtaacaagaaagatatcgaactcgatggatcacatccaactttgctatatggttatggtggattcaacataagcattaccccttctttcagtgttagtcgtcttgtcctatgcaagaacatgggttctgttgtctgcattgcgaacatccggggtggtggagaatatggggaggagtggcacaaagctggagcacttgcaaagaaacagaattgttttgatgacttcattgcttgtgcggaacaacttatttcttctggttacacaagtaacaagaaaatatgtattgaaggtggaagcaatggtggtcttctaattgctgcttgtattaaccagcggcctgacctttttgggtgtgccctggctcatgttggtgtcatggatatgcttcggtttcacaagttcacaatcggtcatgcctggactacagattatggttgttcagataaggaagaagaattcggctggcttatcaaatattctccccttcataacgtgaagagaccttgggagcaagctttggtgataattgtcagtatccagcaaccatgctgttgacagctgatcatgatgaccgtgttgtgccattgcactcgctgaagttgttggctacaatgcagcatgtcttgtgcactagcattgagaacagcccgcagaccaacccaataattggtcgcattgaccgcaagtcagggcatggagctggcaggccgactaaaaaattgattgatgagccgcggaccgttacagttttatgtcgaagatgttgggcgctacatggactgactagttcaattctgtcctggaggtgctgtgtgctgagcacacaagacggtgaaaggtgtaatcctggaggggaaagattgctatcgcttcagctgctgaacagtttttgagttcaagtactacaattctttgaagcttacaacacttacatgtttgtgttgtgcaagagcctatatattcttccatatgtgaaaggggtgtgtgtttctgcttagaaaaatgctgttgaaaacttgaaatggaccaatgaagctgtctggctggaacgatttagtcaggacgctcagcctgtccctcgcggctcagggtatgtcttgatagatttatttaaagtattt

SEQ ID NO: 3341 - DNA, 1023 bp, Triticum aestivum
ccagcctcccccgcctcgccggagatcacgagaggcccgccccccatccccgcgatggacgcctcctaccgccgctcaggtgcgggcggaggcggcggctcagccccccgcaccgtcgaggaggtgcccaccgagctgccggagccggcgctcgggatcactttgcgcgcgacgggatgaagcgcagcgactggctcgcgcttgtcgctgtccactccgattcgtggcttgtctccgtagctttctactatgcggcgcggctcacccgcaacgaccggaagcgtttatttggcatgatgaatgatttgccaaccgtgtatgaagtcatctcaggtatgagacaatcgaaggagagggacagatcgggtggtattgacaacagcggtagaaacaagctgccatcaaagcatacagtcgaggcgccgccaccaccacgtgcagaaaataacgccagggatgccgatgaaggctacgatgaagatgacggcgatcacagcgaaaccttatgcggaacatgcggtggcatatacagcgccgaggaattctggattgggtgcgacgtgtgcgagaggtggtaccatggcaagtgtgtgaagataactccggcgaaggcggagagcataaagcagtacaaatgcccaagctgcagctccaagagacctaggcagtagcagcgccgcctccttttggcgggggacggcccccatggatgggggccttgaagcagcagcagcagcggttgagactagactccttgtgcaaggctaactactaccgtcttgctatgtttactgtacctttcgtttcaggtttacatatggtgatgatgctaatgcttgtgggggaagatgacacacattttcgaagccttctaacgtttccatgtcctgaagaggagtcaaaggtgtatgttgccgggaagggatagtagaatgatgaaaatatgtgtaacttttcatgggaagttcatgttccataatccgagaggtttatttatactattctatctatgttaatatatgt

SEQ ID NO: 3342 - DNA, 912 bp, Triticum aestivum
atgaagcgcagcgactggctcgcgctcgtcgccgtccactccgattcgtggcttgtctccgtagctttctactatgccgcgcggctcacccgcaacgaccggaagcgtttatttggcatgatgaatgatttgccaaccgtgtatgaagtcatctcaggtatgagacaatcgaaggagagggacagatcgggtggtattgacaacagcggtagaaacaagctgccatcaaagcatacagtcgaggcgccgccaccaccacgtacagaaaataacgccagggatgccgatgaaggctacgatgaagatgacggcgaccacagcgagaccttatgcggaacatgcggtggcatatacagcgccgaggaattctggattgggtgcgatgtgtgcgagaggtggtaccatggcaagtgcgtgaagataactccggcgaaggcggagagcataaagcagtacaaatgcccaagctgcagctccaagagacctaggcagtagcagcgccgcctccttttggcgggggacggcccccatggacgggggccttgaagcagcagcagcagcggttgagactttagactccttgtgcaaggctaactactaccgtcttgctatgtttactgtacctttcgtttcaggtttacatatggtgatgatgctaatgcttgtgagggaagatgacacacattttcaaagccttctaatgtttccatgtcctgaagaggagtcaaaggtgtatgttgccgggaagggatagtagaatgatgaaaatatgtgtaacttttcatgggaagttcatgttccaataatccgggaggtttatttatactattctatctatgttaatatatgtattattagtctgttcagctgtcatgtggaacctgttgtgaaataacaattttggttaaaggg

SEQ ID NO: 3343 - DNA, 832 bp, Triticum aestivum
cacacagccactcagcttctggcgtaccacgcaggagccggagcgcgcatcggcgtccgacttcaagaaccaccagctgccgctggcgcggatcaagaagatcatgaaggctgacgaagacgtgcgcatgatctccgcggaggcgcccgtgctcttcgccaaggcctgcgagctcttcatcctcgagctcaccatccgctcctggctgcacgccgaggagaacaagcgccggacgctgcagcgcaacgacgtcgccgctgccatcgcgcgcaccgacgtcttcgacttcctcgtcgacattgtgccgcgcgaggaggccaaggaggagcccggcagcgcagccctcgggtttgccgccggaggggttggtgcggccggtgggggccccgccgctgggctgccgtactactatccgccgatggggcagccggcggcaccgatgatgccggcctggcatgttccggcgtgggaaccggcgtggcagcaaggcggggcggacgtggaccagggtgccgggagcttcggcgaggaagggcaagggtacacggggggccatggtggctcagctggtttccctcctgggcctccaagctccgagtgatcgatgccagagctgtatgcgcgcattgtatactcaatgctatttaccacggcgcgcaatgtaattgtaattgtgcaagtatatggcatgtcttgcgttaattaaggactaacacaagcagttatttatcccttttggaaaaaaaagcagataactaccgtgagtttgaatccgggcatgcaggatatgcatcatccatgcatctctatttttaatggagcagttggtagt

SEQ ID NO: 3344 - DNA, 1159 bp, Triticum aestivum
  N_region (354)..(354): n = any nucleotide
ttttcatccagccctctctctagcttggcaatggccgcgagggcgtgtcctgctgcttctggttaccgtgtgtgctgaagcatctgacgcgcttgcgccgagcagcaggagctagccgttcatgctcttcttccctccccttggcatctgaagcagtaagagctcaagttcacagagggcgttcgtccgatctacaaagcccagctgtacatcgccttagctagcttgcagatcgcaagctagatagtaatggagaaccaccagctgccctacaccacccagccgccggcaacgggcgcggccggaggagccccggtgcctggcgtgcctgggccaccgccggtgccacaccancacctgctccagcagcagcaggcccagctgcaggcgttctgggcgtaccagcggcaggaggcggagcgcgcatcggcgtccgacttcaagaaccaccagctgccgctggctcggatcaagaagatcatgaaggccgacgaagacgtgcgcatgatctccgcggaggcgcccgtgctcttcgccaaggcctgcgagctcttcatcctcgagctcaccatccgctcctggctgcacgccgaggagaacaagcgccgcacactgcagcgcaacgacgtcgccgctgccatcgcgcgcaccgacgtcttcgacttcctcgtcgacattgtgccccgcgaggaggccaaggaggagcccggcagcgcagccctcgggtttgccgccggaggggttggtgcggccggtgggggcccagccgccgggctgccgtactactatccgccgatggggcagccggcggcacctatgatgccggcctggcatgttccggcgtgggaaccggcgtggcagcaaggcggggcggacgtggaccagggtgccgggagcttcggcgaggaagggcaagggttcacgggcggccatggtggctcagctggcttccctcctggacctctaagctccgagtgatcgatgccagagctgtatgcgcgcattggatactcaatgctgtttaccacggcgcgcaatgtaactgtaattgtgtaagtatatggcatgtcttgcgttagttaaggactaacaacaagcagttatttatccatttgaaaaaaaaacaagcagaaaactaccatgagtttgaatccagaca

SEQ ID NO: 3345 - DNA, 1001 bp, Triticum aestivum
gcacgcatccatcccgtacctgtccgacgagggaggagaaaaaaatgctgcgccacgccgcccgccgcctcgcctcccgcgccgccgctgccggcagcggctccatgagccgcagggccctcgcgacggcgcaggcgcccgcggaggcgggcgaggaccccgccttcctggaggcgtggaagaaggtgacaacaatcatcgagcccccccagacgcccatgtcggccatgaagccccgcccgcccacgccggcctccatcccctccaagctcaccgtcaacttcgtcctcccctacaagtccgagatcaccgacaaggaggttgacatggtaatggtaccggctacaactggcctgatgggtattttgccaggccatgtttccacaattgcagagctcaagcctggtgttatgtctgtacatgagggaaatgatgttacaaagtactttgtgagcagtggctttgcattcatccatgcaaactccattgctgatgttgtggctgttgaggctgtcccccttgatcagattgaccaaagcttggtccagaaaggtcttgctgaattcactgccaagcttggatcagcctcgactgacctagagaaggcggaagctcagatcggagtggatgttcacagtgcgctcagtgctgcattgactggttgatgatgacatcttacatttttatgtccttttcatccgcatctttagaatgtgagtcgaagtcggcaaactcatgaacgagggtggagggaatgatcttaaataaattatactccatctcaaagaaagacttgtttcttcctgcgaggatttttgtaatggtaatattttcctgtgttccaaaatccagtgccgccttcggtttttatttcttcatttcaaatggaattgattgatttccatttcataattgcagtcaaattgtcaaaatataatcaaagttattttttttcatgtttgtgatgttgtggttcctggtgagttgaattcttcaaaatt

SEQ ID NO: 3346 - DNA, 985 bp, Triticum aestivum
gcatccatcccgtacctgtccgacgagggagaaaaaaaatgctgcgccacgccgtccgccgcctcgcctcccgcgccgccgctgccggcagcggctccatgagccgcagggccctcgcgacggcgcaggcgcccgcggaggcgggcgaggaccccgccttcctggaggcgtggaagaaggtgaccacaatcatcgagcccccccagacgcccatgtcggccatgaagccccgcccgcccacgccggcctccattccctccaagctcaccgtcaacttcgtcctcccctacaagtccgagatcaccaacaaggaggttgacatggtaatggtaccggctacaactggcctgatgggtattttgccaggccatgtttccacaattgcagagctcaagcctggtgttatgtctgtacatgagggaaatgatgttacaaagtactttgtgagcagtggctttgcattcatccatgcaaactccattactgatgttgtggctgttgaggctgtcccccttgatcagattgaccaaagcttggtccagaaaggtcttgctgaattcactgccaagcttggatcagcctcgactgacctagagaaggcggaagctcagatcggagtggatgttcacagtgcgctcaatgctgcattgactggttgatgatggcatcttacatttttatgttcttttcatccgcatctttagaatgtgagttgaagtccgcaaactcatgaacgaggatggagggaatgatcttaaataaattatactccatctcaaagaaagacttgtgtttcttcctgcgaggatttttgtaatggtaatattttcctgtgttccaaaatccagtgctgccttcagttttcatttcttcatttcaaatggaattgattgatttccatttcataattgcagtcaaattgtcaaaatataatcaaagttattttttttcatgtttgtgatgttgtggttcctggtgagttgaa

SEQ ID NO: 3347 - DNA, 968 bp, Triticum aestivum
tctgcaggtcgcacacatccatcccgtacctgtccgacgagggaggagaaaaaaaaaatgctgcgccacgccgcccgccgcctcgcgtcccgcgccgccgctgccggcagcggctccatgagccgcagggccctcgcgacggcgcaggcgcccgcggaggcgggcgaggaccccgccttcctggaggcgtggaagaaggtgaccacaatcatcgagcccccccagacgcccatgtcggccatgaagccccgcccgcccacgccggcctccattccctccaagctcaccgtcaacttcgtcctcccctacaagtccgagatcaccaacaaggaggttgacatggtaatggtaccggctacaactggcctgatgggtattttgccaggccatgtttccacaattgcagagctcaagcctggtgttatgtctgtacacgagggaaatgatgttacaaagtactttgtgagcagtggctttgcattcatccatgcaaactccattactgatgttgtggctgttgaggctgtcccccttgatcagattgaccaaagcttggtccagaaaggtcttgctgaattcactgccaagcttggatcagcctcgactgacctagagaaggcggaagctcagatcggagtggatgttcacagtgcgctcaatgctgcattgactggttgatgatgacatcttacatttttatgtccttttcatccgcatctttagaatgtgagttgaagtccgcaaactcatgaatgaggatggatggaattatcttaaataaattatactccatctcaaagaaagacttgtgtttcttcctgcgaggattttgtaatggtaatattttcctgtgttccaaaatccggtgctcccttcagttttcatttctcagttgtgacttgaatcaaatggaattgattgatttccatttcataattccagtcaaattgtcaaaatataatcaaagt

SEQ ID NO: 3348 - DNA, 1011 bp, Triticum aestivum
gttatgatgctttccacgttgaggcacccaaatatcgtaaggttcatcggggcatgcaggaagtcgattgtttggtgtatcattactgaatattgcaaaaggtggctctgtcaggcagttccttgcccgaaggcagaccaagtctgtgcccctgagattggcagtgaaacaggcgcttgatgttgccagaggaatggcatatgtgcatgccctgggatttattcacagggatctgaagtcagataaccttctaatttcagcagacaaatccatcaagattgcagactttggagttgctcgaatcgaggtaaaaaccgagggaatgactccagagacaggaacctaccgttggatggcgccggagatgatccagcacaggccttatgatcataaggtcgacgtgtatagctttgggattgtgctgtgggagctcatgaccggcatgctccccttcacaaacatgacagcggttcaggcagcttttgctgtggtgaacaagaacgctcgtcctgcgatcccacaagattgcctgcccgctctaagccatatcatgacccgttgctgggatgcaaaccctgaagtccgcccatcattcaacgaggttgtgaccatgctcgaggctgctgagacggacgttgtcagcaatgtccgtaaggcacggttccgctgctgcatctccgagcccatgaccaccgactgagactagtgccaggatacagagtaccagaaaatgaaaaatgggaagaagaacgaggatgggaaaggaggcgacgcaatctcgatgtacagaccacactgatacacctgggcgttgcgtgtgcctgcctatccggaggtctgatggctgccgtgggctaagctaggttcttcattgctgctttctactatcttgtcttagttgcatgggttggagtgattgtttgccaagtatggatgatgctaccttgtatgttttctgttttcttggaaggatgctatctggtatgttaacaaggagctatggtatggtat

SEQ ID NO: 3349 - DNA, 722 bp, Triticum aestivum
agggaatgactccagagacaggaacctaccgctggatggcaccggagatgatccagcacaggccttatgatcataaggtcgacgtgtatagctttgggattgtgctgtgggagctcatgaccggcatgctccccttcacaaacatgacagcagttcaggccgcttttgccgtggtaaacaagaacgcccgccctgcaatcccgcaagattgcctgcctgctctgagccacatcatgacacgctgctgggatgcaaaccctgaagtccgcccgtcattcaacgaggtcgtcaccatgctcgaggctgccgagacggacgtcgttagcaacgtccgtaaggcacggttccgctgctgcatctccgagcccatgaccaccgactgagactagtgccaggatacagagtaccagaaaatgaaaaaatgggaagaagaacgaggatgggaaaggaggcgacgcaatctcgatgtacagaccacactgatacacctgggggttgcgtgtgcctgcctatccgaaggtctgatggctgccctgggctaagctaggttcttcattgctgctttctactatcttgtcttagttgcatgggttggagtgattgtttgccaagtatgaatgatggtaccttgtatgttttctgttttcttggaaggatgctatctggtatgttaacaaggagctatggtatgtattctccgcaagcaaagagctatcttgtct

SEQ ID NO: 3350 - DNA, 720 bp, Triticum aestivum
ttgtggcccgtaacagcatggaacttctttcaactgttcgtttcatcctcccctcagcaggatgctttgcaggatgacttgacaaccactcttgtgcaacaatgctaccaatctcaacatactatccagagattcatcgagacggctggagacaatgaggccttgctctttgaggccttgagtgtgaacgatgaggtcctgaaagtgctatccaaatacgaagagatgaagaagcccatggcgtcggcgcgtgcagaacagccagtggtcataccaattgccacagagcatgaagattccgtgactgttggcaatgaggatgccctggtaagaaaaccagctgctgctcgagcaatgtcgggcggcgatgatgatatcctcgatgatcttgatgagatgatatttggcaagaagggaggaagcagttcccaggacgtgtccaaaaggcaggacccaaagaaggatgacctaatcaacttctaaataccgtcccagcaagttccagagttcctctagggatacacagcatgtctgctgcttttatactgctgaacgatgtctgtattcatccagtagaagactgcactgcacgtacattcagttagggatttgggtcgcttgtttatttgcatacgatgataccttgtcctccagagtttgttcagttgataagttgctgcatacttctcgtcttctggtttcatggttatatgcgtcaga

SEQ ID NO: 3351 - DNA, 1000 bp, Triticum aestivum
tgtcagctgattgatgacccccagacgtgtcaataacaggaacagccctcacgctcattgaagcatgggagaatctggtgatgagctccgctactgccggtctatgagcaaacctacaagagcctgaaatcaagaggaattcggtttcctggacgtgacaatgagagcctggcccccatatttactccaccacgctctgttgctgaagctgaagttgctgcaaatttctcccagcagatattcgaagatgtacatgtgcatacatatactgctgaagaaacaaaggaagctttcgatgtggcccgtaacagcatggaacttctttcaactgttcttgtcatcctcccctcagcaggatgctttgcaggatgacttaacaaccactcttgtgcaacaatgctaccaatctcaacatactatccagagattcatcgagacggctggggacaatgaggccttgctcttcgaggccttgagtgtgaatgatgaagtcctgaaagtgctatccaaatacgaagagatgaagaagcccatggcttcggcgcgtacagaacagccagtggtcataccaattgccacggagcatgaagattccgtgactgttggccatgaggatgccctggtcagaaaaccagctgctgctagagcaatgtcaggcggcgatgatgatatcctcgatgatctcgatgagatgatatttggcaagaagggaggaagcagttcccaggacgtgtccaaaaggcaggacccaaagaaggatgacctaatcaacttctaaataccggcccagcaagttgcggagttccattagggatacacagcatgtctgctgccttttatactgctgaacgatgtctgtattcatccggtagaagactgcactgcacgtacattcagttagggattgggtcgcttgtttatttgcatacgatgatactttgtcgtccacagtttgttcagttgataagttgctgcaacttctcatcttccagtttgcgtt

SEQ ID NO: 3352 - DNA, 1236 bp, Triticum aestivum
ccggactactgtcgttgttaccaaccagccggcaatctccatccacaagctctaaagaaagaaacgggcaatcagaaagccttctcttccaagaagtgacgcgggagaggggcagagcggcgcaagccatggccatggcggagcagcagcagcagatcgagcacagccacctcgccatcagaggcctcaacctccacgtagcccaagcaggcacaggcgagctcgggacggtgctgttcctgcacggcttcccggagatatggtactcgtggcgccaccagatgctggccgtggccgccgccgggtaccgcgccatcgcgccggactggcgggggtatggcctctccgaccagccaccggagccagaggcggcggtgtaccgcgacctggaagaggatctccttgccgtcctggatgcactatccgttcccaaggcttaccttgtggcaaggatttcggagccatgccagcttatgattttgctcttcgtcacccccccgtacatgcggtgttatgtgtttgggtatcccttttcttcacggtggctcctccttcactgccatgcccgaaggcttctatatactgcgttggcgggaaccaggaagagcagaggcagactttggcaggtatgacgtcaagcgagtcgtgcgcaccatctacattctcttctctagaagcgaaatcccgacagcgaaggaagatcaagaaatcacggatctcgcggacctgtcgactccccttccagagtggttcaccgaggaggatcttgcagtctacacgtccctctatgagaaatcaggtttcgtgtatccactgcagatgccatacaggtctctccataagaggcaaccaatcgaagacccaaattcgaagtcccggtgttcgtcgtcatgggggagaaagactacgtgatcaagttccccggggtcgaggccgtgttgaaaaatggcaccatggagaagtttgcgccggatctgaagatcacttacatccctgaaggaagccatttcgttcaggagcagttcccggacaaggtcaacgagctcctccttggcttcctcaaggaccatcctgtggcttgacacacggggtctataagtctattatgcttggcctgcacttggttgagcaccctactccgtgcacattctgcagtgttatgaacatatgatgcgtgcttcctgtgaagtgaaggatatgctagtttcatcaacaacctttaataataaatatacg

SEQ ID NO: 3353 - DNA, 998 bp, Triticum aestivum
tgcactatccgttcccaagtgccctctagccctcgattgtggggagaatcaatgtccgcttcaggggcttaccttgtggcaaaggattttcggagccatgccagcttatgattttgctcttcgtcaccccaaccgcacatgcggtgttatgtgtttgggtatcccttttcttcacggtggctcctccttcactgccatgcccgaaggcttctatatactgcgttggcgggaaccaggaagagcagaggcagactttggcaggtatgacgtcaagcgagtcgtgcgcaccatctacattctcttctctagaagcgaaatcccgacagcgaaggaagatcaagaaatcatggatctcgcggacctgtcgactccccttccagagtggttcaccgaggaggatcttgcagtctacacgtccctctatgagaaatcaggtttcgtgtatccactgcagatgccatacaggtctctccataagaggcatccaatcgaagacccaaaatttgaagtcccggtgttcgtcgtcatgggggagaaagactacgtgatcaagttccccggggtcgaggccgtcttgaaaaatggcaccatggagaagtttgcgccagatctgaagatcacttacatccctgaaggaagccatttcgttcaggagcaatttccggacaaggtcaatgagctcctccttggcttcctcaaggaccatcctgtggcttgacacacggggtctagtctactatgcttggcctgccctcggtctcataagaaccctactccgtgcacattccgcagtgttatgaacatatgatgcgtgcttccattgaagtgaaggatatgctagtttcatcaacaatctttaataaatacgtatgtatgttgggtccgtgttgtatctaatcctttagaacgccatagtgttcagtcctcctgggaaccgtgtatttcgccaaaaacctatctgaatttcacttggaattccaaggaatcgaatcgaagat

SEQ ID NO: 3354 - DNA, 734 bp, Triticum aestivum
ccacatgctaagatgaagatgaacactagtcccgaaggtaaacaaggagattgtcaagatgcagagagtgaatgctccagctgggcagatgcagctcaagggcttgattgaggcctatgttgaaaaaacgggcagcacgaaaggtgccaaaattctgaacgaatgggaggcatatctgccactgttctggcagttggtgccacccagcgaagaagactcgcctgaagcttgtgctgagtttgagagagtacttgccaggcaaaaaacagcagtacaatctgccaagtgatactagccgaagcccaatcgtcaaaatgatcaaagctaatcggaggttaagcgttcttactgcgatacttgaaagtgattttctcagaccgcggtccttctgaatcactaacgtcaccaaaggctgcaattttgtggaagctctgtccaaggcatcttctggaaacgagcttgcagattccgtcgaagattcttctgcacggtcttgcagcctaggtaaccaaccacccctgtaaattggttcgctgacgcttggctgcaaggcccggcccctgttgaactgctgctttcttgtacaggattcctggcttcgcctgtgtaattgtattttttgttctcgacacattagttcttctatttatacccgtcctgtggtaggcatgcgagttgcatgtgctttagttcagtatacagaaataaataaagtgtatgatgaagtaggactt

SEQ ID NO: 3355 - DNA, 1030 bp, Triticum aestivum
gtggagagctggttgtagttcctgtagatgatacaggacttgttcccgaggatgctgctatagttgggaacacttgtctgtatggagctacgggctgtcaagtatttgtgagatgcaagacaggagaaagatttgcagttcggaattctcttgggcaagcagtggttgagggcacaggagatcattgctgcgagtacatgaccggtggatgtgtagttgtactcggcaaagttggaagaaacgttgcagccggaatgaccggtggcctagcctacatgttagatgaagatgatacactagtcccgaaggttaacaaggagattgtcaagatgcagagagtgaatgctccagctgggcagatgcagctcaagggtttgattgaggcctatgttgaaaaaacgggcagcacgaaaggcgctaaaattctgagcgaatgggaggcatatctgccactgttctggcagttggtgccacccagcgaagaagactcaccagaagcttgtgctgagtttgagagagtacttgccaggcaaaaaacagcagtgcaatctgccaagtgatactagccaaagcccaatcgccaaaatgaccaaagctaaacggagggaaagcgttcttattgcgatactggaaagtgatcttctcagaccgcggtccttctgaagcactaacgtcaccaaaggctgcaattttgtggaagctctgtccaaggcatcttctggaaacgagcttgcagactccgtcgaggattcttctgcacgctcttgcagcctaggtaaccaaccacccctgtaaattggttcgctgacgctaggctgcaaggcccggcccctgttgaactgccgctttcttgtacaggattcctggcttcgctgtgtaattatattttttgttctggacacattagttcttatatttatacccgtcctgtggtaggcatgcgagttgcatgtgctttagttcagtatacagaataaatgaagtgtatgatgaagtaggacttctcaggtgtcgataactcggtggaact

SEQ ID NO: 3356 - DNA, 834 bp, Triticum aestivum
gttgagggcacaggagatcattgctgcgagtacatgaccggtggatgtgtagttgtactcggcaaagttggaagaaacgttgcagccggaatgaccggtggcctagcctacatgttagatgaagatgatactctagtcccgaaggtaaacaaggagattgtcaagatgcagagagtgaatgctcccgctgggcagatgcagctcaagggcttgattgaggcctatgttgaaaaaacaggcagcacaaaaggcgctaaaattctgagcgaatgggaggcatatctgccactcttctggcagttggtgccacccagcgaagaagactcgcctgaagcttgtgccgagtttgagagagtacttgccaggcaaaaaacggcagtacaatctgctaagtgatactagccaaagcccaatcgccaaaatgaccaaagctaaacggagggaaagcgttcttactgcgatacttgaaagtgattttctcagaccgcggtccttctgaagcactaacgtcaccaaaggctgcaattttgtggaagctctgtccaaggcatcttctggaaacgagcttgcagataccgtcgaggattcttctgcacgctcttgcagcctaggtaaccaaccacccctgtaaattggttcgctgacgctaggctgcaaggcccggcccctgttgaactgctgctttcttgtacatgattcctggcttcgcctgtgtaattatattttttgttctgcacacattagttcttatatttatacccgtcctgtgttaggcatgcgagttgcatgtgctgtagttcagtacagaataagtaaagtttataatgaagtagg

SEQ ID NO: 3357 - DNA, 465 bp, Triticum aestivum
gcggggaagctatttcatttatcggctgtgatgataatcagacatcagcggatacttcagccttgtcaaagatcacttcgactggcgcaatgacattttgcttcatccaagctattgaacaaggccaggccaccacatatgggagtatcctgaactccatgcgttcgacaatacggaacacgggaagtggtgcctcaatggctggaggtggtgcagttacatcactcatttcaatgcttctcacagggggaagcgctagtactggtggattgagacaggtaacttcttggggttggcatatgcatctcagaatatccttattggaaccacagctaactgcatgtgacacatttgatgtgtatgcgaaaccattttcactatgatacatttgtggtattctccattgtgttctgtgattctatcatgagtccgggtttaactatcatgtacagctagttgaaatgg

SEQ ID NO: 3358 - DNA, 1004 bp, Triticum aestivum
cctcaccacccgcttcagttccccgacgactccatcatcatgctcaccgaagaacaaaccgacccttacaaaatcccaacaaagcataacataaggatggccatgtattggcttttacaaggttgtcaacctggagactcattggtgtttcattattctggccatggggcgcaacaaagaagctacagtggagatgaagttgatgggatggatgaaaccctctgcccgttggattttgagacacagggaatgattgtggatgatgagataaatgctgcgcttgttagaccacttccccatggagctaaacttcatgcactcatagatgcttgccacagtgggactgcacttgatttgccgtttctctgcagaatgagcagaactgggcaatacgtatgggaagatcacagaccgcgatctggtgtctggaaaggaactagtggcggggaagctatttcatttagcggctgtgatgataatcagacatcagcggatacttcagccttgtcaaagatcacttcgactggcgcaatgacattttgcttcatccaagctattgaacaaggccaggctaccacatatgggagtatcctgaactccatgcgttcgacaatacggaacacgggaagtggtgcctcaatggctggaggtggtgcggttacatcactcatttcaatgcttcttacagggggaagcgctagtactggtggattgagacaggagccacagctaactgcgtgtaatacatttgatgtgtatgcgaaaccattttcgctatgatacatttgtggtattctccactgcgttctgtgattctatcacgaggccgggtttaaactatcatgtacagttaacaggtgcaatggcttctccatatatagagctaactttgtatcatttgatgctcatattcgaattaaagtgtttgccccctttgaattgttccatgtgtgagggattcgccatttattctgtcactcagaccacataataagatatggtgc

SEQ ID NO: 3359 - DNA, 973 bp, Triticum aestivum
  N_region (117)..(117): n = any nucleotide
  N_region (154)..(154): n = any nucleotide
  N_region (199)..(199): n = any nucleotide
  N_region (211)..(211): n = any nucleotide
atttgaaacactctatttagctatggaactaggtgtagactatgttgacatcgagttaaaggttgctgacaaatttgttggttttctttctgggtaataagccagataagtgtaaancttacttgtttcttcacataattatgaacagtacccncatcctggcgaggcatcttggcaaatcttgtagccaggaatacanagaagttggagnctgacatagttaaagttgcaacaactgctacagacattgttgatgtgtcaaggatgttccaagtgatggtgcactgccaagtgcctatgattggattggtgatgagtgagagaggtttgatgtcaagggtgttatccccaaaatttggtggatatcttacctttggaatacttgatgctacaaagacatcagcatctgggcaaccaacacttgaagaattattggacgtttacaatataaggtgtataggacctgatacaaaagttcttggtcttatagccaacccagtaaagcagagcaagagcccaattttgcacaataaatgtctacaatctgttggatacaatgctgtttatcttccacttctggcagacgatcttgctagatttcttgacacatattcatctccagatttttcaggatttagttgctctcttcctttcaaagtggatgcagtacattgttgccatgaacatgatgctgttgctaagtcaataggtgccataaacactatagttaggaaatcagacggcaaattagtgggctacaatacagactacattggagcaatttctgctattgaggatggtctggggtcaaaggatgctgctatgtcaccattgtctggcaggcttattgttgttgtaggtgctggtggtgctgctaaggcaattgcctatggggcaaagaagaagggtgcaagagttgtagtagcaatcgtacctatggtaagatttgtatttatccgatttgaaattcata

SEQ ID NO: 3360 - DNA, 960 bp, Triticum aestivum
ggaggtgggggcgggggagggggaggaaaccctagctccggcggcacggcggcggcgctccggcacgacccgggcctgtcgcgggagtggacgccggaggagcaggccatcctcgacgagctgctcgtcaagtatgcatctgatgcacctgttattcggtatgcaaaaatagccatgaagttgccagagaaaacagttcgagatgtggctttgcggtgtagatggatgagtaaaaaggagagtggtaaaagaaagaaagaggaccacagctcatcaaagaaaagcaaggacaaaaaggagaaggttgcagattcttcatcgaaaccacctgttcatatagctggaaggccgagtgttccgccatactccctcccagcacttcccgttgatgatgacgaaatttcatccaaagcaattggaggtccaacaggagaactccttgaaactaacgcccaggttttaagtcaaatttcaacaaaccttggcaccatgcagatacaggataacatctctctgctgtgccaaactcgagataacatactcagggtgttgaaagagatgaatgatgcccccgagatcatgaagcagatgccaccactacccgtgaagataaacgaggatcttgtcaactccatactccccaggccaactgtacctatgcagtagtgatagtgaatggaatgtgtcttccatagtctgaagagccccttagataggcagcaaaaataatactcctaagaaaaatgccagccttggccctagttcgttcgttttagacccttcctcatgtcatatatgtatctgcagatgttgatcttccaactgttactcaaattagggggttggaacatgtacagggctaccaggggttgcttctactgcagttgtgagtttccaactctggcattctttgtagtgtaatagcctaatgtgaatgtgatggaatatgtgagttggcct

SEQ ID NO: 3361 - DNA, 574 bp, Triticum aestivum
agaatcctgggaactatcagtgagcttcattagcatcatcttgattccgattgtcgggaatgcacagagcatgctggggcaatcatatttgcttttaagaacaagctggacatcaccctcggagtatctctggggtcagctacgcagatttccatgtttgtggtgccactgagtgtccttgtggcttgggtcatgggggttccaatggatcttgatttcaacctgctagagactggttctttgttcctcgcaatattggtcacaagcttcaccctccaggacgggtcgtcgcattatctgaagggactgcttctcctcctttgctacgccgtgatcggcgtgtgcttttttgtcctgagacgacgttcagctgatggaagcaactaatcgggttcagcctagcagatcggcttagttcagggttccccgaaaaccggacggtgattaagctgaagatggtgaagagaagaaggtagtagagtacctccctggggcagatgagcaagattgtagatcgagactgaatcaggtgtttatggtcatcgcagtcctgtaaattaatcgagtttaatgt

SEQ ID NO: 3362 - DNA, 652 bp, Triticum aestivum
atcatcttgattccgattgttgggaatgcaccagagcatgctgggccaataatatttgcttttaagaacaagctggacatcaccctcggagtatctctggggtcagctacgcagatttccatgtttgtggtgccactgagtgtccttgtggcttgggtcatgggggttccaatggatcttgatttcaacctgctagagaccggttctttgttcctggcaatattagtgacaagcttcaccctccaggacggatcgtcgcattatctgaagggactgcttctcctcctttgctacgccgtgatcggcgtgtgcttttttgtcctgagacgacgttcagctgacggaagcaactaatctggctcagcctagcagatcggcttagtccagagtgccggtgattgagttgcagatcgtgaagataagagaagaaggtagtagagcacctccctgggcagatgagcgtgcatgaggcagcagctaagccaagcagtagggcctgcctgcctgcgtgtaagattgtagatcgagactagtgttggctaaatcaggtgtgtttatggtcatcgcaggcctgtaaattaatcgagtttaatgtatccattagtgcacctaaaaggctatggtagctacggaggtaattaaggcaggagca

SEQ ID NO: 3363 - DNA, 588 bp, Triticum aestivum
accgtgatttcaggcgtaagaaagatgatggtacagaaccagaagttgacccagaaagagatcaaaggactgtatttgccttccagctatcgttgaaggcagatgaaagggatgtctatgagttcttctcaagagcagggaaggttcgtgatgtccgccttatcatggaccgaaactcgcggcgttccaaaggagttgggtacatcgagttctatgatgtcatgtctgttccaatggcaattgctctaaccggtcagccgcttctagggcaagcagtaatggttaagccatcagaggccgaaaagaacttagctcagtcaaatgcgacatctggtggagcagcttcaggtggagcaagaaagctgtatgttggcaaccttcattccaatattaccgaggaccaattgagacaggtctttgaaccatttgggcaagtggagcttgtccagctgcctgtagatccactcactgggctatgcaaaggttttggtttcattcagtttgcatcttttgtgataattggagatttcttctttttctttgtagcagtatacgagaatgatggatttttttctatgccatataaaa

SEQ ID NO: 3364 - DNA, 586 bp, Triticum aestivum
cctggagaacatcgcctacggcaaggacggcgtgacggaggaggaagtcgtcgaggcggccaaggtggccaacgtgcacggcttcgtcggcgcgctccccgacggttacaggacgcccgtcggcgagcgcggcgtgcagctctccggcggccagaagcagcgcatcgccatcgcccgcgcggtgctcaaggacccggccatcctcctgctggacgaggcgacgagcgccctggacgcggagtccgagtgcgtgctccaggaggcgctggggcgcatcatgaagggccggacgaccgtgctggtcgcgcaccggctgtcgaccatccgctgcgtggactccatcgccgtggtgcaggacgggcgcgtcgtggagcagggcagccacggcgatctcgtgtcgcggccggacggcgcctactcgaggctgctgcagctgcagctgcaccacgggtgacgatgatggattggcgtcctgctccggcatggcggctgtagatacagagtagaccgaggcgagctttgatcgacactccgatgagcaacagggatttgctgtagtgcggcggcggcccaaatggtgataggt

SEQ ID NO: 3365 - DNA, 906 bp, Triticum aestivum
gagttcagcctgaggatccgagctggccagagccaggcgctcgtgggagcgagcgggtcggggaagagcactgtcatcgctctcatcgagcgtttctacgatcccatggccgggaaggtcatgatcgacggcaaggacatccgtcggctcaacttgaagtctctccgtctcaagatcggcctggtgcagcaggagcccgtcctgttcgccaccagcatcctggagaacatcgcctacggcaaggacggcgtgacggaggaggaggtcgtcgaggcggccaaggtggccaacgtgcacggcttcgtcagcgcgctccccgacggctacaggacgcccgtgggcgagcgcggcgtgcagctctcgggcggccagaagcagcgcatcgccatcgcgcgcgcggtgctcaaggacccggccatcctcctgctggacgaggcgacgagcgccctggacgcggagtccgagtgcgtgctccaggaggcgctggggcgcatcatgaagggccggacgaccgtgctggtcgcgcaccggctgtcgaccatccgctgcgtggactccatcgccgtggtgcaggacgggcgcgtcgtggagcagggcagccacggcgatctcgtgtcgcggccggacggcgcctactcgaggctgctacagctgcagctgcaccatggatgatgatggattggattggcgtcctgctccggcatggcggctgtagatacagtgtagaccgaggcgagctttgatcgacactccgatgagcaacagagatttgctgtagtgcggcggcggcggcccagatggtgataggtgttagccggaagaactagtgttctcttttctctgtaaccgatcaggattatgatgaaggccttgttacattttgttcccacttgcacttatgtccgg

SEQ ID NO: 3366 - DNA, 897 bp, Triticum aestivum
ctgttcctgctgcgtatgctggggcttatgcaatccaagtgctgctgcttccggttaccagggtggccctccaggcgctaatagaggaccctggggcagtcaagctccgtctggttatggcactgggggttatgctggcaatgcaggctatggtgcatggaatagctcttctgctggtgggaatgcacccactagtcaggcacctggtgcagctgcaggttatggaaaccagggctatggttatggtggatatggaggagatgcatcatatggtaatcatggagggtatggtgcttatggtggccggggagatggtgctggaaatcctgctactggtgcagcctctgggtatggtgctgctggatatggaagtgggaatggaaactctggatatccaaatgcgtggactgatccttcacaaggcgggggatttggtggtgcagtcaatggagcttctgagggccaatcaaattatggcagtggttatggtggtatgcagcctagggttgctcagtagaagaggctgttataatgttcatggtgtgaaccagtgcatttgggcagcatatgtattattgcggtattctggctttgctctcgtcttcctgaaggccatccattctgccggttaaatcagtatttctcctggttggaatgcttgatcctttcgtggcttaactagaacttaagtcaataagtagctattatgtcgagtagctgtatcttcataatgctttatttatgtttagcttatcctttggtgtgctttgtcatgagtggagtttcaggttgctttatctctagtttaaagctagagtagcttcactgcttatggaccaaattatctagttgtatctctattctacagaatcatatattcgtgtttgactgtagtat

SEQ ID NO: 3367 - DNA, 773 bp, Triticum aestivum
gcaatgcagctatgtgcatggaatagctcttctgctggtgggaatgcacctactagtcaggcacctggtgcagctgcaggttatgggaaccagggctatggttatggtggatatggaggagatgcatcatatggtaatcatggagggtatggtgcttatggtggtcggggagatggtgctggaaatcctgctactggtgcagcctctgggtatggtgctgctggatatggaagtgggaatggaaactctggatatccaaatgcgtggactgatccttcacaaggcggaggatttggtggtgcagtcaatggagcttctgagggccaatcaaattatggcagcggttatggtggtatgcagcctagggttgctcagtagaagaggctgttgtaatgttcatggtgtgaaccagtgcatttgggcagcatatgtattattgcagtattctggctttgctctcgtcttcctgaaggccatccattctgccggttaaatcagtatttctcctggttggaatgcttgatcctttcgtggcttaactagaacttcagtcaataagtagctattatgtcgagtagctgtatcttcataatgctttatttatgtttagcttatccttcggtgtgctttgtcatgagtggagtttcaggttgctttatctctagtttaaagctagagtagcttcactgcttatggaccaaattatctagttgtatctctattctacagaatcatatattcgtgtttgactgtagtatttatgctggatactc

SEQ ID NO: 3368 - DNA, 1340 bp, Triticum aestivum
accgatgttgtggtgatgtatgaccagacaacacagcgcccccggggcttcggcttcattacctttgactcggaggatgcggttgaccgtgtgctgcacaaaaccttccacgatcttggagggaagatggtagaggtgaagcgtgctctgccccgagaggcgaatcctggctctggcggcggcggccgttccatgggaggtgggggttttcatagtaacaatggacctaactccaatgctagcagctatgatggcagaggcgatgctagcagatatgggcaggcgcagcaaggcagtggtggctacccaggttatggcgctggagcttatggcagtgctccaactggatatggatatgggcacaccaatcctggaactacatatggaaattatgggtctgcagggtatggaggtgttcctgctgcgtatgctggggcttatggcaatccaagtgctgctgcatctggttaccagggtggccctccaggcgctaatagaggaccctggggcagtcaagctccatctggttatggcactgtgggttatgctggcaatgcaggctatggtgcatggaatagctcttctgctggtgggaatgcacccactagtcaggcacctggtgcagctgcaggttatggaaaccagggctatggttatggtggatatggaggagatgcatcatatggtaatcatggagggtatggtgcttatggtggtcggggagatggtgctggaaatcctgctactggtgcagcctctgggtatggtgctgctggatatggaagtgggaatggaaactctggatatccaaatgcgtggactgatccttcacaaggcggaggatttggtggtgcagtcaatggagcttctgagggccaatcaaattatggcagcggttatggtggtatgcagcctagggttgctcagtagaagaggccgttataatgttcatggtgtgaaccagtgcatttgggcagcatatgtattattgcagtattctggctttgctctcgtcttcctgaagaccatccattctgccggttaaatcagtatttctcctggttggaatgcttgatcctttcgtggcttaactagaacttcagtcaataagtagctattatgtcgagtagctgtatcttcataatgctttatttatgtttagcttatccttcggtgtgctttgtcatcagtggagtttcaggttgctttatctctagtttaaagctagagtagcttcactgcttatggactagttgtatctctattctacagaatcatatattcgtgtttgactgtagtatttatgctggatactctctccctatctgtgttaagtcctt

SEQ ID NO: 3369 - DNA, 1249 bp, Triticum aestivum
agataatgcaaaagacctgtaaggggaatgcttaacccagatccaaggaggcgtttgacagctcagcaagtgcttggtaataatcaaatttccacaagataactgtactggattggattccttctgttcttcttaaatggatacagaattacatacattgtgtaaatttcagaagatttccgccctaagatcatttaattgcattgcttgtgtctcatgttcataatttgtattttcttccagatcatccctggtgacagaatattaagaaggctccaaatgtcaatctgggtgagacagttaaggccagacttcaacagttctctgtgatgaacaagttcaagaagcatgcacttagggtatacctcagtctgacttgaaccaatcctctttcacgttagacttgctttctagaaatttccttacatatttgtatttattacaggtcatagctgagcatctttcggtagaagaggtggccggcataaaggatatgtttgaaaagatggaccttaacaaagatagtatgattaattttgatgaactgaagcttggactgaataaacttggccaccaaatgcctgatgcagatgtccaatactaatggatgctgctgacgctgatggaaatgggtgcttagactatggagaatttgttactctgtctgttcacctgaaaaagatcggcaatgacgaacatctgcacaaggcatttggatactttgatcggaacaagagtggatatattgaaattgatgaactccgggagtcattagctgatgatctgggaccaaatcatgaagaggttatcaatgccatcatccgtgatgtggacactgataaggatggcaagataagctttgatgagtttgtggcaatgatgaaggccggaaccgactggaggaaagcctcgagacaatattcgagagaacggttcactagcctcagcttgaagctgcagaaggacggatcgttgcagataacaagtacccaatagtagatgataccgcaataggcaagttgtgaattccagatgaaaaccaaccttgtgtagcttcctggttttgttgacaagtatttcttttgttcatctgggtattctgttgcgctctaatttccgcttggtatcctgatgaagcattagttgattgttgaagatttattttgtacgtagattgtgtgatccagaccatcacaaaaagtactacgcctttgatgaaaggtagtgtacaagagaaagaggaaaaagt

SEQ ID NO: 3370 - DNA, 937 bp, Triticum aestivum
cgccgagtcgccgtcccctcgctttcaacccccctcgggcgaaagcaagaattcctcgctagaatccgaccccgggccgatttgcgtggcttctgtgcggccctttctgcgccatggacttctgatccggggcctctcggatcttggggggaagaaggtgggtggcgggcggtggtcggtgagccggccgggagatggccggcgggaaggagccgatcgaggtcaagttccggctcttcgacggcacggacatcggccccagcaagtacgaccccgccaccaccgtctccgcgctcaaggacttcatcctcgcccggtggccgcaagataaggaaataactccaaaaactgtcaatgacctgaagctcatcaatggtggaaagatattggagaataaccggacacttgccgagtcgcgtgttacaataggagaggtccctggaggtgtaattacaatgcatgtggtagtgcgccctccacaagttgacaaaaaccgtgagaagcagctgggcaattcccccaagcagaacagatgcggatgcaccatactgtgatacggcacccccctggtgatgttcgatgcgcctagttgtagaatttctcttgtgcttttgttgcgtccacgacgcggtgtgtattcattttgacatccagttcatggagccattgaaactcgatctagaaacgcatgcatgtactcctgaaagcatgtttgggaatctggtgggactggctgggagtgaaggttcctccttgggatgttgctgatgtgtgcaggagtcaaggaatggatcggatgcttgctgttgtgtaaattgtaatgtggaaacaaccatcttttcatttttcctttggctactgtttgacattatatcgattctttttagcgctgctgtttgccatgtaaaacagatatattgtaccatcctggaatata

SEQ ID NO: 3371 - DNA, 681 bp, Triticum aestivum
caagttccggctcttcacggcacggacatcggccccagcaagttacgaccccgccaccaccgtctccgcgctcaaggacttcatcctcgcccggtggccgcaagataaggaaataactccaaaaactgtcaatgacctgaagctcatcaatggtggaaagatattggagaataaccggacacttgccgagtcgcgtgttacaataggagaggtccctggaggtgtaattacaatgcatgtggtagtgcgccctccacaagttgacaaaaaccagaagcagctgggcaattcccccaagcagaacagatgcggatgcaccatactgtgatacggcacccccctggtgatgttcgatgcacctagctgtagaatttctcttatgcttttgttgcgtccacggcgcggtgtgtattcattttgacatccagttcctggagccattgaaactcgatctagaaactggctgggagtaaaggttcctccttgggatgttgctgctgtagcaagtgtgtgcaggagtcaaggaatggattggatgcttgctgttgtgtaaattgtaatgtggaaacaaccatcttttcatttttcctttggccatgtttgacattataccgattctttttagcgctgctgtttgccatgtaaaacagatatattgtaccattggaatatatatacggt

SEQ ID NO: 3372 - DNA, 662 bp, Triticum aestivum
cccggagatgccgcggaaggaccgatcgaggtcaagttccggctcttcgacggcacggacatcgggcccagcaagtacgaccccgccaccaccgtctccgcgctcaaggacttcatcctcgcccggtggccgcaagataaggaaataactccgaaaactgtcaatgacctgaagctcatcaatggtggaaagatattggagaataaccggacacttgccgagtcgcgtgttacaataggagaggtccctggaggtgtaattacaatgcatgtggtagtgcgccctccacaagttgacaaaaaccagaagcagctgggcaattcccccaagcagaacagatgtggatgcaccatactgtgatacggcacctccccggtgatgttcgatgcgcctagttgtagaatttctcttgtgcttttgttgcgtcaacggcgcggtgtgtattcattttgacatccagttcctggagccattgaaactcgatctagagacgcatgcatgtactcgacactcctgaaagcatgctggggatctggtgggactggctgggagtaaaggttcctccttgggatgttgctgctgtagcaggagtcaaggaatggattggatgcttgctgttgtgtaaattgtattgtggaaacaaccatcttttcatttttcct

SEQ ID NO: 3373 - DNA, 1047 bp, Triticum aestivum
gtggaggtatattctgcaaagaatgttccaagggaagatgcttgatgcccatgaagttcagactgcgtgatcctcagagagtgtgtgatgcttgctacgacagacttgatccactccaggccttattgatcaactacaacagtcatgccatgcagcctgccaaacatgacgtcatggattggacaagtacgaggagctggttgaatttgcctgttggattgtcaatggagtatgaaatatacaaggcaacaaacacactgaggaaatattgccaggtttctagattaaatcctgagaagtcataccatcatctatcctcaagggagcaaaggggcttgctgtgctcacagtggccaagcagatgcagttcttacgtacaaaatgggcactggtcttgtagttgctcgccgatcagatggatcatggtctgcgccatcagcgattttatctgttggattgggatggggagtgcagattggaggagaattgacagattttataattgtgcttcatgatcttaaagctgtcaaggcattcagcagccgcatgcatctttctcttggggcaggattgagtgcggcagcaggaccaattggcagagcccttgaagcagatgttcgagcaagtgaaaaaggttctgggatatgctacacttatagctgcagcaaaggtgcctttgttggggtctcccttgaaggaaatgtcgtgacaacaagaccagacaccaatctgcgcttctatggggacgcctacgtgaccacgaccgatatcctgtttgggagggtggagaagcccagagctgcgcaacccttgtactcggctctcgatgatctgttctcaaaaatggtttgctagttctagccattgtagtctcagcattcagcggtgtacatatatctaaaatatgctaggaacagtccttgggagaaaatatcccagaaaaaaatgtacagcttttattgggtgggttcactgcaagtatgtgtccacgcatgtaaatattgtcaggagatcactatgttatccgccgtcgtggcttgattattg

SEQ ID NO: 3374 - DNA, 608 bp, Triticum aestivum
aagctgtctgactatggatttagaaagctgttgcctattctaggtagctttgaagtgagcagatcttatgctgccatcgggtccattgccccggagctagcatccccgagcttgagatacagtgataagagcgatgtatttagctttggggtggtgttgcttgagattgtgacagggcggaagccagtggagagccctggggctgctatacatgtgattttgcgcgactatgtcagagagacactggaggatggtactaaatcggactgcttcgatcggagcctgaggggattcattgaagccgagttggtccaagtgctcaaactaggcctggtatgcacttccaacacaccatcaagccgaccaagcatggcggaggtggtgcagttcttggaatctgttaggactaattcttgatgttctgctatctggaacatagtagcagaataggatgttaaaacaggaaaagggttttctgattttttaacagatgaagatcacatttcttctttaattctttattattattattgtggccccagtccttttgtaaatgtgtttagatttgtctgctcattatctatacttttttttagatctgtttgatg

SEQ ID NO: 3375 - DNA, 1383 bp, Triticum aestivum
gggaaacccattactatgtggatcaccattgaacaatctgtgtggtggacagcgagcaagacgattgtcagtcgctatcataatcgtcattgtcgctgcagcgctcatacttattggggtctgcattgtctgtgctatgaacattagggcctatacaatgaggagtaaggaggagcaggaagggaaggaggacgaagaggtgctggtctccgagagcatatcagtcggatctctaggccaaaatgccatcattggtaagttggtgctcttcaccaagagcctgccttcaaggtatgaagattgggaggaaggaaccaaggcactggttgacaaagactgccttgttggtggagggtcagttggcacggtgtacaaggccacctttgagaatgggttgtccattgccgtgaagaaactggagacactcggaagtttgacaaaccaggatgagtttgagcatgagatggggcagcttggtaacctcaaccaccccaatctggtcacatttcagggttattactggtcgtcctcgatgcagttgatcctgtcggagttcgtgaccaaagggagcttgtatgatcacctgcatgggaaccgtcgtcgtgcattttccagaagtagcagcggaggtgagctctcctgggatcggaggtttagggttgcacttggaacggcgcgtgcacttgcatatcttcaccatgactggcgaccacaagtcttgcatctcaacatcaagtcttcaaacataatgatagatgaagaatatgaagccaagctgtctgactatggatttaaaaagctgctgcctattctaggtagctttgaagtgagcagatcttatgctgccatcgggtacattgccccggagctagcatccccgagcttgagatacagcgataagagtgatgtatttagcttcggggtggtgttgcttgagattgtgacagggcggaagccagtggagagccctggggctgctatacatgtgattttgcgcgactatgtcagagagatactggaggatggtactaaatcggactgcttcgatcggagcctgaggggattcattgaagccgagttggtccaagtgctcaaactaggcctggtatgcacttccaacacaccatcaagccgaccaagcatggcggaggtggtgcaattcttggaatctgttaggactaattcttgatgttctgctatctggaacatagtagcagaataggatgttaaaacaggaaaagggttttctgattttatttttttaacagatgaagatcacatttcttctttaattctttattattattgtggccccagtccttttgtaaatgtgtttagatttgactgctcagtatctatagtttttttagatcatctgcagga

SEQ ID NO: 3376 - DNA, 1002 bp, Triticum aestivum
cacccaaggattaatcaggttgttccgccacagtttgggaccagaaggaaaggtggaactcatatcttgtatgaatccttctgttagtcagaggggagttcttgtatgtgttggacgagcaccaaggaaaaaatctgttgatgattatgaggtgcaacctttaatacacaacccacatgcactgcctctattcagagatcaaccaagccgtaaacgccaaagagagaagatgatgaaagaccccctcaaatcgcacaaaccagaagctcctgttagtggtccagggtttggtggtaaaattggcacaacaaaggcagcttgctgacacagtatctcatgaaggaaggtggtttaattaaggagacctggatggatgaagatccaagagaggcaattttgaaatatgctgatgctgcaaagaatgacccaagtttattgcaccagcatatgctcaaactcagccggaaaccgtcttcgcagagtctgattccgacggagaagagaaaaagtaacatatggatgtaagctattttgtttctttagtaaaatgagcttttggcacaacaatgttctgttttctgacggagtgaatctaatgcagcgactattaagtttcttgcatgagtcctgcaacatgtacttttactgaggagaaactatagaatgctgaattagccaccatcgggagctcgttttttctgaagatacccagggaaaagcttgtcgcacaggaaaactgttacaataagacgggtccactcaagctcctttgtcaagtgaatgaagattaacataccagattcatgttacatcaggatgaggtttttgctgtaccttcagtttaccagccattatccatactctgcacgcttgatccagtgtatcgccattagcccacgagaaagctgtactgttttttccttccgtgttgttgtcgtctttgtgatgattgatgtgacgtgtagagtagacaaggaagaccgatttgcacttttcatcatg

SEQ ID NO: 3377 - DNA, 1070 bp, Triticum aestivum
ggaaaatgaagactcctttgaaagtgttcgacgatctgcgtaataactatgcggagacaaatgcttcatttagttcagacgagcaacttatttttacaggaacctctgttgagaaagatggcagaaatggaggcctactttgcttctttgatagaaggaaactagagcttgtatcaagggtgggaatttcaccacattacagtgtgataaggtcactctggcacccaaggattaatcaggtgttcgcaacagttggggacaagaaggaaggtgggactcatatcttgtatgatccttctgttagtcagaggggagctcttgtatgtgttggacgagcaccaaggaaaaaatctgttgatgattatgaggtgcaacctttaatacacaacccacatgcactgcctctattcagagatcaaccaagccgtaaacgccaaagagagaagatgatgaaagaccccctcaaatcgcacaaaccagaagctcctgttagtggtccaggtttggtggtaaaattggcacaacaaaaggcagcttgctgacacagtatctcatgaaggaaggtggtttaattaaggagacctggatggatgaagatccaagagaggcaattttgaaatatgctgatgctgcgaagaatgacccgaagtttattgcgccagcatatgctcaaactcagccagaaaccgtcttcgcagagtctgattccgacggcgaagagaaaaaataacatatggataattagcaaccatcgggagctcggttttttctgaagatacccagggaaaagttgtcgcacaggaaaactgttacaataagacgggtccatcaagctcctttgtcaagtgaatgaagattaacaaaccagattcatgttacaacaggatgaggtttttgctgtaccttcagtttaccagccattatccatactctgcacgcttgatccagtgtatcgccattagcccacgagaaagctgtactgttttttccttccgtgttgttgtcgtctttgtgatgattgatgtgacgtgtagagtagacaaggaagaccgatttgcattttcaaaatg

SEQ ID NO: 3378 - DNA, 878 bp, Triticum aestivum
tgcctcgagccgccgtcgccatggggagaagcctgcgaggtgctatcggcagatcaagaacaagccataccccaagtcaaggtactgccgtggtgtgcctgaccctaagatcaggatctatgatgttggcatgaagaagaagggtgtcgatgagttctctcactgtgttcaccttgtctcatgggagaaggagaatgtgtccagtgaggctctcgaggctgcccgtattgcttgcaacaagtacatgaccaagcatgcaggaaaggatgccttccacctcagggtcagggttcacccgttccatgtgctccgtattaacaagatgctttcgtgcgctggggctgataggctccagactggtatgaggggtgctttcgggaagccgcagggagtctgtgcccgtgttgccattgggcaggtcctcctttctgtgcggtgcaagcccaacaatgccatccatgccactgaggcccttcgtcgtgccaagttcaagttccctggccgccaaaagatcattgagagcaggaagtggggcttcaccaagttcaaccgcaacgactacctcaagttcaagagtgagggcaggatcttgcctgatggagttaacgccaagctgctcggatgccatggccgccttgcgaaccgcgcccctggacaagctttcctgtctgccgcataatctagcagaagactatcagttctgtcgaagcttattttactgtgtggaacttagattccaagcacctgtggtgctatgttattttgtctgaatgttgtgtcgaaccttgttatcgaagatattatctattttgtgatgatggtactaatatgaatggcctgttgaatcattgctgcttgaatttgtttttcaatgtatt

SEQ ID NO: 3379 - DNA, 858 bp, Triticum aestivum
gtcaaggtactgccgtggtgtgcctgaccctaagatcaggatctatgatgttggcatgaagaagaagggtgtcgacgagttctctcactgtgttcaccttgtctcatgggagaaggagaatgtgtccagtgaggctcttgaggctgcccgtattgcttgcaataagtacatgaccaagcatgcaggaaaggatgccttccacctcagggtcagggttcaccccgttccatgtgctccgtatcaacaagatgctttcgtgtgccggggctgataggctccagactggtatgaggggtgcttttgggaagccgcagggagtctgtgcccgtgttgccattgggcaggtcctcctttctgtgcggtgcaagcccaacaatgccatccatgccactgaggcccttcgtcgtgccaagttcaagttccctggccgccaaaagatcattgagagcaggaagtggggcttcaccaagttcaaccgcaacgactacctcaagttcaagagtgagggcaggatcttgcctgatggagtcaacgctaagctgctcggatgccatggccgccttgcgaaccgtgcccctggacaagctttcctgtctgccgcataatctagcagaagaagtctatccgttctatcagaacttattttactgtgtggaacttagattccaagtgcctgtggtgctatgttattttgtctgaatgttgtgtcgaaccttgttatggaagatattatctattttgtgatgatggtactaatatgaaccgcctgttgaatcattgccgcttgaattcgtttgtcaatgtattttgctgtggtggatgcttcattttatgaagctacatcaggaaaatgttata

SEQ ID NO: 3380 - DNA, 592 bp, Triticum aestivum
gcgtccgtatgaattgctctacggcaagacaccattcaggggacctggcaatgatgaaacacttacaaatgtggtctcacaggggctgaagttccctgatagcccagctgtcagctaccaggctcgcgatctgatcagagggttgctcgtgaaggagccagagctccggctaggctcgaggaaaggagctgccgagatcaagcggcatcccttcttccaaggcctgaactgggccttgatccgttggactgcaccgcccgagaccccgaagagcgtcgacgcctcaaccctcactgcagcggtggcacggaagaagaaggaaggcaagtgcctcgagttccggatgaatggagacgacattgagtttgagctcttctagtggtggcggtagtagcagtagaagttgtagtggtagtacgttgtgttctgaagaatatccataccgtggtagctagaagtagtagtcccacagttccccagtccccactcccctgcagtttttctgttgaagatgagttatcagttgtcacctgccaatgttgggatgtagagtaactgagtaaggtcgggcgttgtgcctgtaactttatta

SEQ ID NO: 3381 - DNA, 1348 bp, Triticum aestivum
gtcttgcctagtgatggagtattgtccaggcggtgacctgcatgtcctaaggcagaagcaacctactagatgcttttcagaagccgctgctaggttttatgtcgctgaagttctcctagcattggagtatctgcatatgttgggggttatatatcgcgatctgaagcctgagaacatacttgttcgtgaagatgggcacatcatgctctccgactttgatctgtccctgaggtgttcagttaatcccatgcttgtgaggtgctcatcagtaggaagagatgaacctcctaggccttccggaccttgtgctgaaagctgcatcgatccactgtgtatccagccatcctgggccaactcttcttgcttcacacctcggctggtatcttctacaccttccaggacacggagagctgagcccctgaagaaaccatcacttccgcagcttgttgtcgagccgactgatgcaaggtcaaattcgtttgtcgggacccatgaataccttgccccggagatcatcagaggagatggccatggcagctcggtcgattggtggactcttggcatctttctgtatgaattgctctacggcaagacaccattcagaggacctggcaatgacgaaacacttacaaatgtggtctcacaggggctgaagttccctgatagcccagctgtcagctaccaggctcgcgatctgatcagagggttgcttgtgaaggagccagagctccggctaggctcgaggaaaggagctgccgagatcaagcggcaccccttcttccaaggcctgaactgggccttgatccgttggactgcaccgcccgagaccccgaaaagcgtcgacgcctcgacccttacggcagcggtggcacggaagaagaaggaaggcaagtgccttgagttccggatgaatggagacgacattgagttcgagctcttctagtggtggcagtagtagcagtagaagttgtagtggtagtacgttgtgttctgaagaatatccataccgtggtagctagaagtagtagtcccacagttccccactccccactcccctgcagtttttctgttgaaaatgagttatcagtagagtaaggtcgggtgttgtgcctgtttattccttgttaataccagtccagatatccagatgagcccatgggtcttgtgcaagcatttttcttttgaatgcagccatggtcttgcaagcaatggcatctggttgcagttgtgcactactgcttgcagtagtcgttgttgcttgatacagtatgtagcagtagtaactcaagtaaggtccagtaataagttgtgtaacatatgttcttgttcattaataatatcataaagt

SEQ ID NO: 3382 - DNA, 765 bp, Triticum aestivum
ctcaggatcattcgggaagctcgatttcctgataaacatcaggcatttcaggctgatcgagatcccagttctgcttgcgaaagttaaagaacaggttgaaagcatggatgtagatcagagagttcaatggatgaaagaaaattccaaggagacatatgaggaagcacaaagaatgcatgagaacaactactatggggcaaagcttgtcacagaggcactacttcctcttcttcagttgtcctcctctgggagaattgtcaatgtctcatcaggtttttcactgctaagaaacttcaacagtgaagaactgaagaatgagtttaacgacgtcgacaaccttactgaaaagagactagaggagctgttggattcattcctagaagatttcaaggccaatttgatagaggcacatgggtggccgaccggtggctcgtcagcgtacaaagtcgccaaagctgccctcaatgcttacacaaggattctcgccaagaagtaccctaggatgcgcatcaactgtttgacgcctggttatgtcaagagcgacatgtcgatgcacatgggagttttgacgcctgaggagggcgctagcaacccggtgaaggtcgctctcttgcccgacgatggcccgacgggtgcttattttgatagggatggcgtggcctcgtttgtgtgactctgtcgtacgtgtaatggtttcgtccggttttactttcagaatatgagacacctgtaactgtagttgtcaataaacattgtgcagtttaa

SEQ ID NO: 3383 - DNA, 739 bp, Triticum aestivum
tgcgaaagttaaagaacaggttgaaagcatggatgtagatcagagagttcaatggatgaaagaaaattccaaggagacatatgaggaagcaaaagaatgcatgagaacaaactactatggggcaaagcttgtcacggaggcactacttcctcttcttcagttgtcctcctctgggagaattgtcaatgtctcatcaggcttttcactgctaagaaacttcaacagtgaaaaactgaagaatgagtttaacaacgctgacaatcttactgaaaagagactagaggagctgttggattcgttcctagaagatttcaaggccaatttgatagaggcacatgggtggccgaccggtggctcgtcagcctacaaagtcgccaaagctgccctcaatgcttacacaaggattctcgccaagaagtaccctaggatgcgcatcaactgtttgacgcctggttatgtcaagagcgacatgtcgatgcacatgggagttttgacgcccgaggagggcgctagcaaccctgtgaaggtcgctctcttgcccgacgatggcccgacgggtgcttattttgatagggatggcgtggcctcgtttgtgtgactctgtcgtacgtgtaatgttttcgtccggttttactctcagaatatgagacaccgtaacagtagttgtcaataaacagtgtgcagtttaacctgtgctgtgcactcgaatcgacatgcaaattgacaaatttgatctatg

SEQ ID NO: 3384 - DNA, 854 bp, Triticum aestivum
agcgagttcaatggatgaaagaaaattcgaaggagacatatgaggaagcaaaagaatgcatgagaacaaactactatggggcaaagcttgtcacggaggcactacttcctcttcttcagttgtcctcctccgggagaattgtcaatgtctcatcaggcttttcactgctaagaaacttcaacaacgaagaactgaagaatgagtttaacgacgtcgacaaccttactgaaaagaaactagaggagctgttggattcgttcctagaagatttcaaggccaatttgatagaggcacatgggtggccgaccggtggctcgtcagcgtacaaagtcgcgaaagccaccctcaatgcatacacaaggatccttgccaagaattaccctaggatgcgcatcaactgtttgacgcctggttatgtcaagagcgacatgtcgatgcacatgggagttttgacgcctgaggagggcgctagcaaccctgtgaaggtcgctctcttgcccgacgatggcccgacgggtgcttattttgatagggacggcgtggcgtcgtttgtgtgactgtcgtacgtgtaatggttttgtccggttttactttcagaatatgagacacctgtagcagtagttgtcaataaacattgtgcagtttaatctgtgctgtgcactcaaaaatggacatgcgtgtgtgtatgatccatattggtcgatgaggtctatcgatcttgtgggtatgtgtagggtcaaacaatgcgacaacacacacacgatgacgtatgggtgttgctggcaggcaataggatgacgtatgggtgttgctggctgatggacatgcttggtttgttaacaaattagccaacc

SEQ ID NO: 3385 - DNA, 505 bp, Triticum aestivum
ggacagctccaaaagaggcacgaggtgcctgtggatcctgaggagtatgcacgtgataatctcaagtttggtcttgttgaggttgtctacgaatgggcaaagggaacgcctttcgcggacatatgtgagctgacagatgtatctgaagggctgattgtaagaacaattgtgcggttggatgaaacatgtagggagttcaggaatgcggcttccataatgggcaactctgctttgtacaagaaaatggagatcgcgtccaacgcaatcaagcgtgacattgtctttgcagcaagtttgtatgtcacaggaatatgatgcatgtaggcccggtgtagcctaaacctagcggtgtttgtaagtagagaaattcctgttctggatgtctaatttcttcacaagcccaatcatgacaagcgcacaactgtaaagatgtttttagtgacagtaccatctgacaccgttgacaccaggtgcccatgagtgagcagaatcaacaaaatctact

SEQ ID NO: 3386 - DNA, 1379 bp, Triticum aestivum
aaaagctggtcgcaaacctgttcgaaatggctcgtgaaaatgccccctccatcatcttcatcgatgaaattgattctttgtgtggccaacgtggagaaggtaatgaaagcgagtcttctaggagggttaagacggagctgctcgtccaaatgcagggtgttggccataacgatgacaaggtccttgttcttgctgctacaaacactccatatgctctggatcaggccgtcaggcggcgttttgacaaacgcatctacattccactgcctgaccttaaagctagacaacgcatgctcaaggtccatctcggcgacacccctcacagcctgaccaagagcgatttcgagagcgtggctcaccggacagatggcttctccggctcggacatcgccgtctgcgtgaaggacgtgctgtttgagcccatacgcaagacgcaggacgccatgttcttcttcaggtcagaggacggcggcggcggcacgtggacgccgtgcgggccaaagcaaccaggggccgtgcagaccaccatggaggagctcgcggcggaaggcatggctgaccagattaccccgcctccgatctccaggacagacttcgacaaggtccttgcgaggcagagaccgacggtgagcaaggcggagctgggagtgtatacaaggttcaccaaagagtttggggaggagggctgaattttacgtacacccaggattttacgttctgtaaatgttgccatacgattactgacttgaacatttataggcctgtatagctttgtgaagtcatagcaattcttcttgtacatgcttgttggttaaaagcatcagaaattgattagacaaaacagtagattttgctgatactactcactcatgggcacctgctgtcaacggtatcagatggtactttcactaagacatattctctacttacaaacaccgttaggcctacatgcatcatattcctgtgacatacaaacttgctgcaaagacaatgtcacgcttgattgcgttggacgcgatctccattttcttgtacaaagcagagttacccattatggaagccgcattcctgaactccctacatgtttcatccaaccgcacaattgttcttacaatcagcccttcagatacatctgtcagctcacatatgtccgcgaaaggcgttccctttgcccattcgtagacaacctcaacaagaccaaacttgagattatcacgtgcatactcttcaggatccacaggcacctcgtgcctctttggagctgtcctaagttgattgccgtgtcatagagcctaatacggagacagagagaagaacaaaaggtacttgaggtatgtatcatgtaagcaagcaattacaccctctgttcgttagtactt

SEQ ID NO: 3387 - DNA, 690 bp, Triticum aestivum
atggctcataggcgctgactgccccttgattggacaccagaatgaagatagcacttgatgctgcaaggggattagcataccttcacgaggattcacagccttgtgtaatccacagggatttcaaagcttctaatatattgctcgagaatgactttcatgctaaagtgtctgattttggtttggccaaacaggcgccagaagggcgcttaaattatctttcaactcgtgttatgggaacttttgggtacgtagcaccagagtatgcaatgacaggacacttaattgtaaaaagtgatgtatatagctatggagttgttctacttgaactacttactgggaggaggcctgttgacatgtcacaatcttcggggcaggagaatctagtcacatggacacggccagttcttcgggataaagataggctacaggaactagctgaccccaagcttggtggacaatatccgaaagatgattttgtgagggtgtgcacaatcgcagcagcctgtgtttccccggaggcgaaccaaaggccaacgatgggcgaggtggtgcagtcacttaagatggtgcaacgctccacggagttccaagaatctgtaccgacaccgccagctcgtcctaatgcccggcatactgcaacgacctatgaatctgatggcacttcatccatgttctcatctggacccttct

SEQ ID NO: 3388 - DNA, 908 bp, Triticum aestivum
gctttcttctgcagctggagttagcttccaagcggcgcagtcaggaaagcacaagcaaccaaaaaattctcagaaggcacttcaaatccctagggccttccctgccaatccagaaaggttctacggtgatgaagatgacgaggacgaagatgatgataatgttgttcgagaagatgacaatgatgttgagttaccggagtctctcccaagctcaaccgaatgtgaatcttccatccatccagcgaaagagctcaatctgctcgaacacgaagacaagacaaggatgttcttgttccagttgccgaaatctcttcctctgctcagaacaccatccactgtagttcataggaatggaagggccattgtcaaggaggtgaaagaagggtacaacctgaatgatctgccaggggggtacatgggcaagatgctggtgtacaagagcggcaaggtcaagatgaagctgggagatgccgtgttcgatgtgagcccaggcacggaatgcgggatgcagcagcacgcagtagcggtgaacactagaaggaaacattgctgccagcttggggagatcgagaggcagcatgtcgtggtgaccccggatgtcaactccctgctgaatgacaatagggactagctgcaacccgcgaaccgatcaattctaatagcttggcaaatatggtgtgcatatatgctagaataacttatgcgttttaactgcattatgataaatgtaaatttgtagctgtagcctgtagctgttggtagcgctcgtgtcacagcagtagtctagaaatgctgcttgcagctgatgagtgctgtatcttgagtacccttgtatcttactagcaggcagaaggcgcagcggcacgctgcgcccgtgtttaaacacgttgttgtttgagttatatcga

SEQ ID NO: 3389 - DNA, 720 bp, Triticum aestivum
atccacgaagagctcatctgctcgaaccggacgacaagacaaggatgttcttgtttcagttgccgaaatctcttcctctgctcagaacaccatccactatagttcataggaatggaagggccattgtcaaggaggtgaaagaagggtacaacctgaatgatctgccagaggggtacatgggcaagatgctggtgtacaagagcggcaaggtcaagatgaagcttggagatgccgtgttcgatgtgagcccgggcacggaatgcgggatgcagcagcacgcagtagcggtgaacactagaaggaaacattgctgccagcttggggagatcgagaggcagcatgtcgtggtgaccccggatgtcaactccctgctgaatgacaatagggactagttgcaacacgcgaaccgatcaattctagtaatagcttggcaaatatggtgtgcatatatgctagaataacgtatgcgttttaactgcatgatgataaatgtaaatttgtagctgtagcctgtagctgttggtagcactcgtgtcgcagcagtagtctagaaatgctgcttgcagctgatgagtgttgtatcttgagtaccctgctgatgagtgttgtatcttgagtacccttgtttcttactagcaggcagaaggtatggcggcacgccgcgcccgtgtttaaacacgttgttgtttgagttatatcgaggtttttcttaacaccatg

SEQ ID NO: 3390 - DNA, 610 bp, Triticum aestivum
gcgcactccccctaacaagtagccacgcgggagagaggaagccatggccatgtcgctctccctcgcgcgtcctggccctcccgccggtcctccaggccctccccggcaggaggcaggcccactccgccctcgccttcccggccaactcattcttcggcgcgccgctggccgtggccgccgccggcgccgccgcgctctccccggcggccccgctcccgcgctccctcgccgtcgtcgccgccgggaaggggtacaagatgaagacgcacaaggcatcggcgaagcggttcagggtgacgggcaccgggaagatcgtgcggcgctgcgccgggaagcagcatctgctcagcaagaagaacgccaagcgccggaagaggctctccaagacggtccaagttaacaagagcgactacagcaacgtgatgggtgcgctgccctacctcaaagtgaacaagaaagcaggctgagatctaccgggtctggtgaaatgactgccactgagtttctgttcacccacttgtaattttgtgcatctttatctgtatgcctttttttcttaaatacataccaatgccagacttcacattccaagcaatcataaacaactatt

SEQ ID NO: 3391 - DNA, 691 bp, Triticum aestivum
taatccagtcaaccgtgaaggatccatccaatctggatgccagggtgaagctttcctcaacatgtttgaagtcacactacacgaaatgcctgatgcagaattcaagagtaatgtcaatgctctcattgacatgaaacgggagaaatacaagaacataagggaggaatcagcattcttttggggggagatttctcaaggaacactgaaatttgatagaaaggaagcagagattgctgcactggaggagcttaagaaggaagagctgatagagttcttcgataatcatgtcaaggttggcgcgccagaaaagaagatccttagcatacaaatctatggtggtctccatgcctccgagtacgaaaagattgttcatgatgctccgccaccgcattcgcatcgaataactgatatattcagcttcaggaggtcgagacctttatatggttcattcaaaggtggtgctggtcagatgaagctataggacaactttgtttcgagtcatatttacatgtcacacttgaattgttcctatagaaaataatgtgtgggacaaatgttcgcacttttggctaggctgaatattccataccaaatctagtagtatcagtttgaaattttacatgttgtattcttctctatactgattatcagacctgaaagtgttcgaccggcataattctaaacctgttta

SEQ ID NO: 3392 - DNA, 646 bp, Triticum aestivum
tttcctgaagatgtttgaagtcacctacacgaaatgcctgatgcagaattcaagagtaaatgtcaatgctctcattgacatgaaacgggagaaatacaagaacataagggaggaatcagcattcttttggggggagatttctcaaggaacactgaaatttgatagaaaggaaacagagattgctgcactggaggagcttaagaaggaagagctgatagagttcttcgataatcatgtcaaggttggcgcaccagaaaagaagatccttagcatacaaatctatggtggtctccattcctccgagtacgaaaagattattcatgatgccccgccaccacattcgcatcgaataactgatatattcagcttcaggaggtcgagacctttatatggttcattcaaaggtggtgctggtcagatgaagctataggacaacttcgtttcgggtcatatttacatgtcacttgaattgttcctactatagaaaataatgtgtgggacaaatgttcgcacttttggctaggctgaatatattccataccgaatctgtcatatcagtttgaaattttacatgtaattcttttttatactgattatcagacctgaaagtgtttgactggcatacattctacacctgtttatatca

SEQ ID NO: 3393 - DNA, 831 bp, Triticum aestivum
gtcctacttcagttgcttgctgttgtagctaagcaaccggcttttcaccaattacgttcggtcgagcaacttgggtacatagcactgcttagacagagaaatgattcaggagtccgtgggttgcaatttataatccagtcaaccgtgaaggatccatccaatctggatgcaagggttgaagctttcctgaagatgtttgaagtcacactacacgaaatgcctgatgcagaattcaagagtaatgtcaatgctctcattgacatgaaacgggagaaatacaagaacataagggaggaatcagcattctttggggggagatttctcaaggaacactgaaatttgatagaaaggaaacagagattgctgcactggaggagcttaagaaggaagagctgatagagttcttcgataatcatgtcaaggttggcgcaccagaaaagaagatccttagcattcaaatctatggcggtctccattcctccgaatacgaaaagattattcatgatgctccgccaccgcattcgcatcgaataactgatatattcagcttcaggaggtcgagacctttatatggttcattcagaggtggtgctggtcagatgaagctataggacaactttgtttcgagtcatatttacattcacttgaattgttcctatagaaaataatgtgttggacaaatgctcgcacttttggctaggctgaatattccataccaaatctagtcatatcactttgaaattttacatggtattcttttctatactgattatcagacctgaaagtgttcgaccggcatactttctaaacctgtttatatcatgaatcaga

SEQ ID NO: 3394 - DNA, 735 bp, Triticum aestivum
aacgacagcctcgagagcatctccgatccttcgtctccaagccgagatgcagaaggagtgagatgctgcaggaggccaatatctccaagttcaagtcgcaagtgcagagctcgcaggaaaaccatttctctttgttacagcgggagactgaaaaactccgtggagacattgataagatgaggagtgaactgaagtatgagattgacaaggtcactgcagggcagcggttggatctgaaccttgaaagagggcgcatacgtgatgagctcgccaagcagaatgaagaaaccacagatctcaccacaaagcttgacaaggaaattcattcactgaaggcccagctggaggcagcaaagtatgatgtcatcaaatactgcataggtaccatcgtttcgatatcagccgttggactcgccgttctccgcatcgtgatgtgaacccgaacacatgttctttcgtttacccatttatccatggaggccacaaagaggatagttccgattctgttcctagttttttcaatgggggcaaaacttggtcaggggaatgctgtaacatctgtaagatagatcgacctgcagaaggaatatacaaccgaaatgattctttacctgtgcttgagctttgtggtattgacgcttaactagcatgcttccccagtctctgccgacgcggaagtcactgttgtgttgcaattaacacgctgtggacatctaatcctagcaatgaaggaag

SEQ ID NO: 3395 - DNA, 820 bp, Triticum aestivum
accctaatggcattttaagttttaagtacatttatagttgatttctgaagtattaatgagttatgggagaatgaactttttgtagaatagttccaaacaggccaggctagcagcaagtgggaaccttaattcttcttccccttgacccccattgaccttttgaaaatgaaacaaagtagtttcatctattagtgcttacactgggcattacttatttacttccatgacaattccagtggttgctctgtctttgtcatgtttctgtcacaattattaagattgttttgtcggtgttatatgattaaaacatgattgctccaggcgcatacgtgatgagctcgccaagcagaatgaagaaaccacagatctcaccacaaagcttgacaaggaaattcattcactgaaggcccagctggaggcagcaaagtatgatgtcatcaaatactgcataggtaccatcgtttcgatatcagccgttggactcgccgttctccgcatcgtgatgtgaacccgaacacatgttctttcgtttacccatttatccatggaggccacaaagaggatagttccgattctgttcctagttttttcaatgggggcaaaacttggtcaggggaatgctgtaacatctgttagggtgaaaaagttcctcaagacctgtaagatagatcgacctgcagaaggaatatacaaccgaaatgattctttacctgtgcttgagcttcgtggtattgtcgcctaactagcatgcttccccagtctctgccgacgcggaagtcactgttgtgttgcaattaacacgctgtggacatctaatcct

SEQ ID NO: 3396 - DNA, 771 bp, Triticum aestivum
gtcctcaacgacagcctcgagagcatctccgagtccttcgtctccaaggccgagatgcagaagagtgagatgctgcaggaggccaatatctccaagttcaagtcacaagtgcagagctcgcaggaaaaccatttctctttgttacagcgggagactgaaaaactccgtggagacattgataagatgaggagtgaactgaagtatgagattgacaaggtcactgcagggcagcggttggatctgaaccttgaaagagggcgcatacgtgatgagctcgccaagcagaatgaagaaaccacagatctcaccacaaagcttgacaaggaaattcattcactgaaggcccagctggaggcagcaaagtatgatgtcatcaaatactgcataggtaccatcgtttcgatatcagccgttggactcgccgttctccgcatcgtgatgtgaacccgacgacatgttctttcgtttacccatttatccatggaggccacaaagaggatagttccgattctgttcctagttttttcaatgggggcaaaacttggtcaggggaatgctgtaacatctgttagagtgaaaaagttcctcaagacctgtaagatagatcgacctgcagaaggaatatacaaccgaaatgattctttacctgtgcttgagcttcgtggtattgtcgcttaactagcatgcttccccaatctctgccgacgcggaagtcactgttgtgttgcaattaacacgctgtggacatctaatcctagcaatgaaggaaga

SEQ ID NO: 3397 - DNA, 817 bp, Triticum aestivum
  N_region (149)..(150): n = any nucleotide
  N_region (158)..(158): n = any nucleotide
  N_region (160)..(160): n = any nucleotide
  N_region (166)..(166): n = any nucleotide
  N_region (613)..(633): n = any nucleotide
gcactgcttcataagaaaatacgcgattcatatactcatcctcagtttatatccgatgtaatgaagccactacaaattgagcagctcatggatcaggaggtgctgaatttatcaggtggagaactccaaagggtggcgctatgttcttnntgccttgngnaccagncccgtggccagaaaaaatctaccttatcgatgagccgagtgcgtaccttgattcggagcagcgcattgtcgcctcgaaggtgatcaagaggttcatcctccatgccaagaagacggcgttcatcgtcgagcacgacttcatcatggcagcctacctggcggacaaggtggtggtctatgaggggcgcccctccgtcgagtgcactgcctgcacgccacagtccctggtgtctgggatgaacaggttcctatcgcaccttgacatcacgtttcggagggacccgaccaactaccggcctcggatcaacaagatggactcgaccaaggaccgggagcagaaggccgcggggtcctactactacctcgacgactgactgataggcgcgccgcccctcccgagagaatttggtttgactgatcttgtttttaggtgaattgaattacgctnnnnnnnnnnnnnnnnnnnnnctgggtttgtccccgtttttgtcctgggttttgtactgacgttggagagatttggcagatgagacagcgaactgcacctgctctgtcccaggtcaaaagcaactctgttatcttggttacttaattagcagctactaattgaattagcatacatgcaaagccagacctgatctgaatctgatgg

SEQ ID NO: 3398 - DNA, 811 bp, Triticum aestivum
ctgtttccttgatagccttgcaggcaagctccacacggctttgacgttctattcttgtacaaatctgaaagtgaataatgtagaagtgttgtaacagccaacaaatccacatatcaatggagcgttgcagtcgatgtaaggatgtcacgccgtatcatatcagagcacctggcactagccccaacaccgacgacatccatatcacccatagtaaggatgtgaaagttatggactgtgcaatcaagactggggacgactgcatgtcaatcgaggatgggactgagaatctacatgtcaagaacattgtgtgtggaccagggcatgggataagcattgggagcttaggtgatcgcaactctcaagctcaagttgcaaacatcaccattgacggggtgcgactgcacgacacgacgaatggagctcgtatcaagatatggcagggcgggcggggttatgcaaagaatatcgtgttcaagaacatgataatggataatgtacgggacccgatcattatcgaccagaactactgcgactcggctacaccatgtactaaacaggtgaaagaacatgacgaccatgatgggtttattcatttgtttatgtacattgattttattttttgttgattgttttctgagatagcaacccgctcataccaagcggtgtatgtacatagatataacctggtgtgttattcttttgtatagaaagcggctgtggaggtgagcatgtgttgtttaagaacattagggggacagggcctcaagagaggctatcaagctcagttgcagtaaagctgtaccttgccatg

SEQ ID NO: 3399 - DNA, 679 bp, Triticum aestivum
ggccgccgcgaagaaaaggagcttatcatggcttcaaaacgtatcctgaaggaactcaaggacttgcagaaagatcctccgacatcatgcagtgcaggtccttctggcgaggatatgttccattggcaggcaaccattatgggtcctcctgatagtccctatgctggaggtgttttcttagtgaatatccatttccccccggactaccccttcaagcctccgaaggtatcgttcaagacaaaggtcttccatccgaacatcaatagcaatggaagcatatgcctcgacattctgaaggagcaatggagtcctgctttgacaatctctaaggttctgctttcaatctgctcactgcttaccgaccctaacccggacgaccctctcgtccctgagattgcccacatgtacaagacggatcggtccaagtacgagacgacagcccgcagctggacgcagaagtatgccatgggatgatccgaagcccatgctcgtatccactgcttgcatgcagaagattgtgttgctgtcccgagaaactatctctgggccattattttctttgattacttgttggtcgcgtgtgtctccctgatccatgtaggatcgcgtcgtagtcaaaacatcaacgtatcattgccaaagtccataatgaaattgacatatgcttctcttagataac

SEQ ID NO: 3400 - DNA, 747 bp, Triticum aestivum
gagggcctctctctccatcccgacctctcgtggccgccgcgaagaaaaggagcttatcatggcttcaaaacgtatcctgaaggaactgaaggacttgcagaaagatcctccgacatcatgcagtgcaggtccttctggcgaggatatgttccattggcaggcaacaattatgggtcctcctgatagtccctatgctggaggtgttttcttagtgaatatccatttccccccggactaccccttcaagcctccgaaggtatcgttcaagacaaaggtcttccatccgaacatcaatagcaatggaagcatatgcctcgacattctgaaggagcaatggagtcctgctttgacaatctctaaggttctgctttcaatctgctcgctgcttaccgaccctaacccggacgaccctctcgtccccgagattgcccacatgtacaagacggatcggtccaagtatgagacgacagcccgcagctggacgcagaagtatgccatgggatgatacgaagcccatgctcgtatccactgcttgcatgcagaagattgtgttgctgtcctgagaaactatctctgggccattattttctttgattacttgtcggtcgcgtgtgtctccctgatccatgtaggatcgcgtcgtagtcaaaacatcaacctatcattgccaaagtccataatgaaattgacatatgcttctcgtgataactacgtctggtgttggttctccctcccattcgctaaata

SEQ ID NO: 3401 - DNA, 808 bp, Triticum aestivum
gcaaagacccgagcggaaaaggagcgagggcctctctctccatcccgacctctcgtggccgccgcgaagaaaaggagcttatcatggcttcaaaacgtatcctgaaggaactgaaggacttgcagaaagatcctccgacatcatgcagtgcaggtccttctggtgaggatatgttccattggcaggcaaccattatgggtcctcctgatagtccctatgctggaggtgttttcttagtgaatatccatttccccccggactaccccttcaagccgccgaaggtatcgttcaagacaaaggtcttccatccgaacatcaatagcaatggaagcatatgccttgacattctgaaggagcaatggagtcctgctttgacaatctctaaggttctgctttcaatctgctcgctgcttaccgaccctaacccggacgaccctctcgtccccgagattgcccacatgtacaagacggatcggtccaagtatgagacgacagcccgcagctggacgcagaagtatgccatgggatgatacgaagcccatgctcgtatccactgcttgcatgcagaagattgtgtcactgtcccgagaaactatctctgggccattattttctttgattacttgtcggtcgcgtgtgtctccctgatccatgtaggatcgcgtcgtagtcaaaacatcaacctatcattgccaaagtccataatgaaattgacatatgcttctcgttataactacggtagtgttggttctcccattcgctatatggtgcctgtggatggaaatgtttgttctgtggccagttggcc

SEQ ID NO: 3402 - DNA, 559 bp, Triticum aestivum
cattggagagaagccccatgatgttttcaccagggaaggaaacgatcttgtcatgacacagaagatctccttggtggaagcattgactggctataccgtgcaactcacaacgctcgacgggcggagcttgtctagacaagttaactcggtaatccaccctagctatgaagaggtgatccctggagaggggatgccaatacccaaggagccctgtaagaagggaaatctgcgcgttaagttcagcatcaagttcccttccaggctgacatctgaccagaaagctgggatcaaaaggctgttgggttcttagccctgtgtgccattttctatagactgatgaaagcgactgtgaatatctccagcatgtggctaggtagatttctatctgtccggtttggacaatgagcggaattggtcttggttattccgtttacatacctgtagaaatgatgttgtcattctatgtgttgtttttccccataacttggtagaggctttttcacatatgtgaccaggctggttgttgtcaatgttttaatctgttcttcctcgggattgc

SEQ ID NO: 3403 - DNA, 795 bp, Triticum aestivum
gatattgtcttcatcattgaagagaagccccatgatgttttcaccagggaaggaaatgatctagtcatgacacagaagatctcgttggtggaagcactgactggctataccatgcaactcacaacgctcgacgggcggaacctgtccatacaagttaactcggtgatccaccctagctatgaagaggtgatccctggagaggggatgccaatacccaaggagcccggtaagaacggaaatctgcgtgttaagttcagcatcaagttcccttccaggctgacgtctgaccagaaagctgggatcaaaaggcttttgggttcttagcctttgtgtgccatttctatagactgatgaaagcgactgtgaatatctccagcgtgtggctaggtagatttctatctgtccggatgggacaatgagcggaattggtcttggttattccgtttacatatacctgtagaaatgatgttgtcattctatgtgttgttttccccataacttggtagaggctttttcacatatgtgaccaggctggttgttgtcaatgttttaatctgttcttcctcgggatcgtaggaaggtttgagttcagaaaggttatacagattttgttccctgtcgtgttgggataattcggctttgttatatatttgaactagctatggtcccgtgtacaaatgacataggaactatggtgcattctcagtaccaatttagtgtacgaatgacatgggaagtctggtgcattctcagaaccaatttatgctatacatgagatagagcacagggaagtct

SEQ ID NO: 3404 - DNA, 836 bp, Triticum aestivum
gccgctactcccctgcctcccccagagctcgttagggttttctcctttttcgggggagaaatctcaagaggcggcaccatgctcgtgtaccaggacaagctttccggcgacgagcttctgtcggattcgttcccgtacagggagctggagaacggcgtgctctgggaagtcgacggccattgggtcgttcaaggagcagttgatgtggacattggagccaatccctctgctgagggtggtggtgatgatgagggtgtcgatgaccaggccgtgaaggtggttgacattgttgacaccttccgtcttcaggagcaacctgcttttgacaagaagcagtttatctctcacatgaagcgctacatcaagaacctctctgccaagcttgaaggggatgacctagatgttttcaagaagaatgttgagtctgccacaaagtatcttcttagcaagctcaaggaccttcagttctttgttggcgagagcatgcatgatgatggcggcgtggtgttcgcctactacaaggagggagctgctgatccaactttcctgtactttgcacatgggctgaaagaggtcaagtgctaatcgcactgtatgctaaaatctatgcggtcgtcagtatttttgctctgctctatggttgtcagtcgactctccaatgttgtgtcggtaactatcagatgttgagtgtcttgaaaactttctgataattgtgggatttgctttgtaatggtaatcgtgaaattggtgtggttatgttttggtcaatgcctcggcttttactcgctagaatcaagcgattttgcccctgttattctatcagattatcttatgtc

SEQ ID NO: 3405 - DNA, 652 bp, Triticum aestivum
gaagctgacaaagccatcgagacgttcaatcgctacgacatcagtggaaggcttctgaacgtaaacagggcagctcaaaggggctcccgtgttgagagacctcctcgacagtttgcatcttctttcagggcttatgttggtaacctgccatggcaagcggaagactctaggttggtgcaattgttcagcgagcatggggaagtagttaacgctacagttgtgtacgacagagaaactgggcgttcacgaggatttggttttgtaactatggcttcaaaggaggatcttgacagtgctatttcagcgcttgatggacaggagatggatggccgcccactccgagtgaacgttgccgcggagcgaccacagcgagggttctgatgcagaggagagcgggtgcttcttttggacacacgagagcaacactgctgaaatgttactgcagaagactgaagcatgtcaccacttaaaaatcctgcactagcctcctgatgctgggctatctcctcccatcccatgttcttttttcatgcttccgtttgctgctgatgtcatcatgttaatttcttgtcaacaccatgagttcaacttttcaagtaggctactgtaatgatgtcctagtgttctcatgataatcgaagaaggttttgtt

SEQ ID NO: 3406 - DNA, 781 bp, Triticum aestivum
caacagagagtcaggccagagccgtgatttgatttgttaccatgagtactattgaggaagctgacaaagccatcgagacgttcaaccgctacgacatcagcggaaggcttctgaacgtaaacagggcagctcaaaggggctcccgtgttgagagacctcctcgacagtttgcatcttctttcagggcttatgttggtaacctgccatggcaagcggaagactctaggttggtgcaattgttcagcgagcatggggaagtagttaacgctacagttgtgtacgacagagaaactgggcgttcacgaggatttggttttgtaactatggcttcaaaggaagatcttgacagtgctatttcagcgcttgatggacaggagatggatggccgtccactccgagtgaacgttgccgcggagcgaccgcagcgagggttctgatgcagaggagagcgggtgtttcttttggacacacgagaacaacactgctgaaatgttactgcggaagactgaagcatgtcaccacttaaaaatcctgcactggcctcctgatgttgggctatctcctcccatcccatattcttttttcatgcttccgtttgctgttgatgtcatcatgttactttcttgtcaacaccgtaagttcaacttttcaagtaggctactgtaatgatgtcctagtgttctcatgataatcgaagaaggttttgttggtaatgctaatatgatatgtatgcaaagggcagactgcacggcagcgttgtttactgtttgcaaattatata

SEQ ID NO: 3407 - DNA, 737 bp, Triticum aestivum
cagagagtcaggcagagcgtggatttgattgtaccatgagtactattgaggaagctgacaaggccatcgagacattcaaccgctacgacatcagcggaaggcttctgaacgtaaacagggcagctcaaaggggctcccgtgttgagagacctcctcgacagtttgcatcttctttcagggcttatgttggtaacctgccatggcaagcggaagactctaggttggtgcaattgttcagcgagcatggggaagtagttaacgctacagttgtgtacgacagagaaactgggcgttcacgaggatttggttttgtaactatggcttcaaaggaggatcttgacagtgctatttcagcgcttgatggacaggagatggatggccgcccactccgagtgaacgttgccgcggagcgaccgcagcgagggttctgatgcagaggagagcgggtgtttcttttggacacacgagaacaacactgctgaaatgttactgcggaagactgaagcatgtcaccacttaaaaatcctgcactagcctcctgatgttgggctatctcctctcatcccatattcttttttcatgcttccgtttgctgctgatgtcatcatgtcactttcttgtcaacaccatccagttcaacttttcaagtaggctactgtaatgatgtcctagtgttctcatgataatcgaagaaggttttgttggtaatgctaatatggtatgtatgcaaagggcaa

SEQ ID NO: 3408 - DNA, 626 bp, Triticum aestivum
ccgtctcgtcgctttgctccccacgaaagaattctaaattcttgcttaacaaaacgagaaagcggatcctatccttcgtgggatccgcgtcggttcttgccctcgccgcgtcgaatccggcagcttttctttcctcctctgaatccctccgcccggccagccgccgtcgactgagccggcggttgttgggatcttgcgtcgcggggcgatccggcccggggggagatggccggcgggaaagagccgatcgaggtgaagttccgcctgttcgacggcacggacatcgggcccaacaagtacgactccgccaccaccgtcacggcgctcaaggagttcgtcctcgctcggtggccgcaggacaaagacattattccaaaaactctcaatgacgtgaagctcatcaatgctggaaggatacttgagaataacaaaactcttgctgagtctcgagtcccagtaggggaagttccaggaggtgtgatcacgatgcatgttgttgtacgccctccccaaagtgacaaaagtggtattgatttgatttccctcttatttattcaaagtcccatctctttatatgtttgatgatctcacttggtttaagatccgaagggttgaacttctgttat

SEQ ID NO: 3409 - DNA, 690 bp, Triticum aestivum
ctcgcaccgcgtcccctccctctcctgtcgcgtgcgctcggccagcaaaaagcttccacataaaggccaacaagagaaaccataatctgttgggtgccagtcaaacctcaacaacaaagtttcatgtctgatctcgacgttactctgccatctgccttcgatccttttgctgaggcaaatgctgaggatgctggtgcaggcccgggcgcaaaagattatgtgcatgtgcgcatccagcagcgcaacggcaggaagagtctgaccactgtccagggcctgaagaaggagttcagctacaacaagatcctcaaggatctcaagaaggaattctgctgcaatggcacagtagtccaggatccagagctaggccaggtcattcagcttcagggtgatcagcgtaagaatgttgctactttcctagtccaggctggaattgcgaagaaggagctcatcaagatccacggcttctaagctgaagccgcctccgataaatgcccgaaccgccagccggttctactctatattgaagacttaaggcatctatattgccgcccgcttgttgaaccggtttcttgcttgatgcaagttgtgttgtcacctggttattatgctgctgctgtaccagcatatcagtatggtttgtctaagatgttgccgactaaataaaaatccgtatcgtttggctgcaaa

SEQ ID NO: 3410 - DNA, 1119 bp, Triticum aestivum
tttgcatccctgttccagatggtggtgttggttttgactaccgcctgcatatggctgtagcagataaatggattgaactcctcaagcaaagtgacgaatcttggaaaatgggcgatattgtgcacaccctaacaaatagaaggtggcttgagaagtgtgtaacttatgcagaaagtcatgatcaagcactagttggtgacaagactattgcattctggttgatggataaggatatgtatgatttcatggctctggataggccttcaactcctcgcattgatcgtggcatagcattacataaaatgatcaggcttgtcaccatgggtttaggtggtgaaggctatcttaacttcatgggaaatgagtttgggcatcctgaatggatagattttcccaagaggcccacaaactcttccaaccggcaaagttctccctggaaataacaatagttatgataaatgccgccgtagatttgatcttgaggaaaaatatgggtttatgacatctgagcaccagtatgtttcacggaaacatgaggaagataaggtgatcatcttcgaaagaggagatttggtatttgttttcaacttccactggagcaatagcttttttgactaccgtgttgggtgttccaagcctgggaagtacaaggtggccttggactccgacgatgcactctttggtggattcagcaggcttgatcatgatgtcgactacttcacaaccgaacatccgcatgacaacaggccgcgctctttctcggtgtacactccgagcagaactgcggtcgtgtatgcccttacagagtaagaaccagcagcggcttgttacaaggcaaagagagaactccagagagctcgtggatcgtgagcgaagcgacgggcaacggcgcgaggctgctccaagcgccatgactgggaggggatcgtgcctcttccccagatgccaggaggagcagatggataggtagcttgttggtgagcgctcgaaagaaaatggacgggcctgggtgtttgttgtgctgcactgaaccctcctcctatcttgcacattcccggttgtttttgtacatataactaataattgcccgtgcgcttcaacatgaacatataatattct

SEQ ID NO: 3411 - DNA, 822 bp, Triticum aestivum
tgttgtgttctggcccactcatctccttgtcggctgttgaagaaggtgggcacatcgttcatgcgttaaggatcacgggccacaacgggttcccagtggtcgacgagccgcctgtatcagaagctccggagctggttgggctggtgcttaggtcacatgtgttggttcttctgagtgggaggaacttcatgaaggagaaggtgaaaacaagtggtagctttgtgctcagaagatttggtgcgtttgactttgcaaagcctggttccgggaaaggtatgaaaatcgaggacctagatttcaccgaggaagaaatggagatgtatgtggatctccatccaatcacaaacacttcgccgtacacggtggtcgaaacaatgtcgcttgcaaaggctgcagtcctgttcagggcactagggctaagacacctgctggttgtgccaaagaccccagggagatttcctattgttgggattctcacgaggcacgatctgatgccggagcatatccatgggctgttccccaatctccgcaagtcacactgagaagcaaaatcagcaggccacacaaaattttcttgcagtattgttatttctcatgaaggtgctgcttcattggatcatggaataatcaatctgatatatttattgtaaaaagagctgattccccaatcagcagtcgagtggatttcattttggcagcttgtgtaacaaacaatcctctccttgtcagtacatgttctctcttttgcctcacacatcttctcatatgcacctgctgtaacttggaacgcaacaccttgtcggtagtagcagaatgctatcc

SEQ ID NO: 3412 - DNA, 1503 bp, Triticum aestivum
tcacaaatgagctccacatgctccccttggtcatgctcgtcctcctgatatcgaagaccataccgattgcttcaacaaaggtgtgtatgaccagatcgtggtgatgaaaggcttgccattcatggaggctcatgctgaaccgtacatgaggcacttggtagctagtgatgttgtgtctgggccactcatctccttttcgggtgttgagaaggtgggcaacatcgttcatgcgttaaggatcacgggccacaacgggttcccggtggtcgacgagccgcctgtatcagaagctccggagctggttgggctggtgcttaggtcacatgtgttggttcttctgagtgggaggaacttcatgaaggagaaggtgaaaacaagtggtagctttgtgcttagaagatttggtgcgtttgacttcgccaagcctggttccgggaaaggtatgaaaatcgaggacctagatttcaccgaggaagaaatggagatgtatgtggatctccatccaatcacaacacttcaccgtacacggtggtcgaaacaatgtcgcttgcaaaggctgcagtcctgttcagggcactagggctaagacacctgctggttgtgccaaagaccccagggagatttcctatagttgggattctcaccaggcacgatctgatgccggagcatatccatgggctgttccccatctccgcaagtcacattgagaagtaaatcagcaggccatacaacattttcttgctgtattgttatttctcatgaaggtgcttcttcattggatcatggaataatcaatctgatatatttattgtaaaaagggctgattccctgatcagcagtcgagtggatttcattttgtcagcctgtgatctttgtgtaacaaacaatcctctccttgtcagtacatgttctctctttttgcttcacacgtcttctcatatgcacctgctgtaacttggaccgcaacaccttgtcggtagtagcagaatgctatccatagagatttctgaacaaatgatgccgacaaggctctgaaatctgaatcttagtgttcattcatgaccaaggaaatgcagctgcttccatacgcgctggctggctgtccacacgccagtggggtggcgcctcgtttgttgctgtcacatgctggtgttggttcttgcagcaggatcgccgggatcctcctttccacagcgactccggtggcacctactgctgacctgaccaccggagctccgttggcccacaggccagtggcgggtagggcgaccccggacatgaaccgatgaacggaaagggggaacagtgacaggcaaagcaccatgatgctgcctctattgattccagcagcaggtgcggtcattgcttgctagtagtgtctctcgccgctagttgcttttccttcttttcttttttgtgcgaggcatcaggcgtggcaaatgccaagaacttttttttgaactttatgcacaaactcctcaacagctttggtgctagtattaa

SEQ ID NO: 3413 - DNA, 748 bp, Triticum aestivum
cgttcgaccgatcagctccatcgtacagaatttgccgatgtcggcctcgacacgaaagacgtcgtggtcttgtcaggtgcccacacgatcgggcgagcccggtgcgtgctgttcagcgaccggctgacgtccaccaagagctcggccgacccgacgctggacgctaccatggccgccgacctgcagaagctctgcaccggcggcgacggcaaccagaccaccgcgctggacgtgagctccgcggacgtgttcgacaagcagtactaccacaacctgctgagcaagaagggcctcctgacctctgaccagggcctcttctccgccgacgaggacatcgtcgccagcaccacaaaggcgttggtgcagacgtacagcgacgacggcgagcagttcttctcggacttcggcgcgtccatggtgaagatggggagcataccgttgccagccggatccgccggcgagatccgctgcaactgcagggttcccaataaaaaatgagcaacggcgagcagagctcatcatctgctaggtgaaagatgaacgggtagctaggaagaactagccgactggttaataaagcaggagtgaggattcaatcccaggcacctgtgcactggtgctagccagtagaacacactgggtgttacttcatcagctgctagatgatcttggaattaaatatagtcaatgaaatgtgttgttgtgtgtaatattaatatgttaaatgctcgaaaaaaaaagatcaaat

SEQ ID NO: 3414 - DNA, 590 bp, Triticum aestivum
  N_region (351)..(351): n = any nucleotide
ccgcttcataacctacaggctggagaaccagaaggaggtcattgtggaccaaactggggagcgcgaggccacctatgaggacttcaccaagaccctgcctgagaacgactgccgattcgcagtgtttgacttcgacttcaccaccccggaggatgtgccaaagagcaggatcttctatatcttctggtctcctgacaccgcaaaggtgaggagcaagatgacgtacgcgagcaccaacgagaagttcaagaggaccctggacggcatccagattgagatgcaggccactgacccgagcgaaatcagcctggacgtgatcaaggagcgcgcgcactaaggcaaatcatcccnatgcctcgcaatatggatttatgtcaactatagatttggcggtgtgactcttgaaactttcttgatgatttgtggctttgttaccgtgtcgaaaggccctcctcccgtggtccgtgagaccacggagggcttgctctatcatgtaatctgttctttttcctctgcccatttatatgccgggccttatgctgctgcactgcactgttcttccaagttacggttataaataatcaaatgtt

SEQ ID NO: 3415 - DNA, 435 bp, Triticum aestivum
gagaatttccctgataagatggttccttgtgcatcaggattccaaagcaggattggctttggcatgattggcttaggggacagcatatgtttgtttggtggagtgattgggcctgggccaagaaatcagtgcattaagccattgtctgatgttgatatcttgaatgtcgcaagcgagaggccaacctggcgacaaggatcgccgatgacgcgttgccgagggagtatcgcaggctgtgctctgctgaagatataggcttgttccagtgtgggatcgtgctgttgctgaaaactgcagatggattttatttattctgcatctcatttaatttctgaaaaaaaggttaactatgcttttagttctggatcacttgttgtagcattgaggatatatgttggccatgactcgaatgtcagattgtcaatcagttattat

SEQ ID NO: 3416 - DNA, 746 bp, Triticum aestivum
gcaatcgatatcggagctgagattacgatcctgaactgacaccttgggagtccctccctgacctccgtcaggcacatcccctctgcatgctctgtcttgtcatcaaggaataagatgcacgtattgcataaagggatatccacagtccagattctcgacagatgcggtaaattattggctgttgaggacttacttctttggctgccaaggcccaatggcaatggttggtggagagttgtatgtgctgagcaatagctgcattaggaagcagcatggagagaatttccctgataagatggttccttgtgcatcaggattccaaagcaggatcggctttggcatgattggtttaggggacagcatatgtttgtttggtggagtgatcgggcctgggccaagaaatcagtgcattaagccattgtctgatgttgatatcttgaatgtcgcaagtgagaggccaacctggcgacaaggatcaccgatgacgcgttgccgaggtagtatcgcaggctgtgctctgctgaagatctaggctcgttccagtgtggcaatgctgttcctgaaaactgcagatggattttatttattctgcatctcatttaatttctgaaaaaagattaactatgcttttagttttggatcacttgttgtagcagtgaggatatatgttggccatgactcgaatgtcagattgtcaatcagttatcatactactactatattatacatttatactacatgtgcct

SEQ ID NO: 3417 - DNA, 711 bp, Triticum aestivum
aaaaaatctctcctcgctctcgtccgagtcgcgtgaggagaaaggagggaagccggaaagggggttctcgccgaggcggaaggaggagatggccgggaagggaggcaagggcctgctcgcggccaagacgacggccgccaagaccgccgagaaggacaaggggaagaaggcccccatctcccgctcgtcccgcgcgggacttcagttccctgtgggccgtatccatcgtcagctgaagcaaaggactcaggccaatggccgtgttggtgctactgcggcggtctactctgctgccatcctggagtacctgacggctgaggtcctggagctggctggcaacgccagcaaggatctcaaggtgaagcgtatcacccctcgtcacctccagctggccatccgtggagacgaggagctcgacaccctcatcaagggcaccattgctggtggaggtgtgatcccgcacatccacaagtccctgatcaacaagtcttccaaagagtgagaaaatatatagcaaaggagcatctctagcttaaactggacattttctcagtcgtctgtgagataagtttatcgtcgcgtcgtttagcgtttagctgtgctccttccagatccaagtcgttgtctgtctgtgtaatgtttacctggtactgattcagtcatttggacatggtgtttatgttggttcgttgactctgtgactggactctg

SEQ ID NO: 3418 - DNA, 708 bp, Triticum aestivum
aaatctctctccgctccccgctccgagtcgcgtcgcgtgaggagaaaggaagggaagccggaaagggttctcgccgaggcggaaggaggagatggccgggaagggaggcaagggcctgctcgcggccaagacgacggccgccaagaccgccgagaaggacaaggggaagaaggcccccatctcccgctcgtcccgcgcggggctgcagttccctgtgggccgtatccatcgtcagctgaagcaaaggactcaggccaatggccgtgttggtgctactgcggcggtctactctgctgctatcctggagtacctgacagctgaggttctggagctggctgggaacgccagcaaggatctcaaggtcaagcgtatcacccctcgtcacctccaactggccatccgtggagacgaggagctcgacaccctcatcaagggcaccattgctggtggaggtgtgatcccgcacatccacaagtccctgatcaacaagtcctccaaagagtgaacagaaaaaatagcaaaggagcatctctagcttgaactggacattttctcagtcgtctgtcagataagtttatcgtcgtgtcatttagtgtttagctgtgctccttccagatcgaagtcgttgtctgtctgtgtaatgtttacctggtactgattcagtcatttggacatggtgtttatgttcgttcgttgactctgtgatta

SEQ ID NO: 3419 - DNA, 746 bp, Triticum aestivum
acgcggggaaaaaatcctctctcgggctccccgctccgagtcgcgtcgcgttgaggagaaaaggaagggaagccggaaaagggttctcgccgacgcggaaggaggagatggccgggaagggaggcaagggcctgctcgcggccaagacgacggccgccaagaccgccgagaaggacaaggggaagaaggcccccatctcccgctcgtcccgcgcggggctccagttccctgtgggccgtatccatcgtcagctgaagcaaaggactcaggccaatggccgtgttggtgctactgcggcggtctactctgctgctatcctggagtacctgacagctgaggtcctggagctggctggcaacgccagcaaggatctcaaggtgaagcgtatcacccctcgtcacctccagctggccatccgtggagacgaggagcttgacaccctcatcaagggcaccattgctggtggaggtgtgatcccgcacatccacaagtccctgatcaacaagtcctccaaagagtgaacagaaaaaatagcaaaggagcatctctagcttaaactggacattttctcagtcgtctgtgagataagtttatcgtcgtgtcgtttagcgtttagctgtgctccttccagatcgaagtcgttgtctgtctgtgtaatgtttacctggtactgattcagtcatttggacatggtgtttatgttcgtcgttgactctgtgattggactctgaatgcaaaaacctttt

SEQ ID NO: 3420 - DNA, 734 bp, Triticum aestivum
ggcagtgccaaaagaatacgtaccaggcgtgatgaaggggattgaagaaagcttgcccaacggtgtccttgctggttacccagttgtggatctaagagcagtgctggttgatggctcctaccacgatgttgattcaagtgtccttgcctttcaaattgcagccaggggggccttccgtgaaggattgaggaaagctggcccacgactcctggaacctataatgagggttgaagtgattacccctgaggagcatttgggtgatgttattggtgacttgaactctagaagaggacaagttaacagcttcggagataagtccaggtggacttaaggtggttgatgctttcgtgccgctggccgagatgttccagtatgtcagcactctgaggggaatgtccaaggggcgcgcgtcgtacacaatgcagcttgccaagtttgacgttgtcccacagcatatccagaaccagctttctgcggcaaaagaggaagctgctgcttaaatcttcagtattcgtagataatatatatgaggacggcagagcaggtgagtataggacatcaaggtgtatgtagctttgtagtgtcgaacccagtgggtgatattatttgccattgtttttggacctgataatgtccataattttgcaagctgttataatttcataatgaccttgtcaagttctcacaaacgagaaaacagttcgttataaattttgcctacatgcttcagtcca

SEQ ID NO: 3421 - DNA, 724 bp, Triticum aestivum
gagtgaataaaggagggcagtgccaaaagaatacttaccaggcgtgatgaaggggattgaagaaagcttgcccaacggtgtccttgctggttacccagttgtggatctacgagcagtgctggttgatggttcctaccacgatgttgattcaagtgtccttgccttccaaattgcagccaggggtgccttccgtgaaggattgaggaaagctggcccacgactcctggaacctataatgagggttgaagtgattacccctgaggagcatttgggtgatgttattggtgacttgaactctagaagaggacaagttaacagcttcggagataagccaggtggacttaaggtggttgatgctttcgtgccgctggccgagatgttccagtatgtcagcactctgaggggaatgtccaaggggcgcgcgtcatacacaatgcagcttgccaagttcgacgttgtcccacagcatatccagaaccagctttctgcggcaaaagaggaagctgctgcttaaatcttcagtattcgtagataatatatatgaggacggcagagcaggtgagtataggacatcaaggtgtatgtagctttgtagtgtcgaacccagcgggtgatattatttgccattgtttttggacctgataatgtccataattttgcaagctgttataatttcataatgaccttgtcaagttctcacaaacgggaaaacagttcgtaataa

SEQ ID NO: 3422 - DNA, 636 bp, Triticum aestivum
ctggacgcccttgacctcaatgcccgcatcccgactactgcctgcccgcctgatgacccagccggcgtcgtcgagcagattgtcgacctgggggcgctgggctaccgtgccccggagctggcggcatccaagaagccatccccctcgttcaagtctgacgtctacgcctttggtgttgcgctgctggagctcctgactggccgatgcgcgggtgacgtcatcacggggtctgaaggcggcgtcgacctgaccgactgggtgcggctgcgggtggcggaaggccaagaatcggagtgctttgacccggccatggcttcggactcggagaaccagcagggggtgaagggcatgaaggaggtgctgggcattgcgttgagatgcatccgaccggtctccgaaaggcctgggatcaaatctgtctacgaggatctttcatcaatctagctagccaccatcattctgtagctttagagttggatgctcatgtgctgttagcttgtgcctcaaacactggtgtttctgtaggtgtgtggcatcaacttgatgcctgcaagttcagatggcaatgtctcattggttcccaagtgccgccgtgctgtacttacattgtttattatggaatctgcttttgcaagt

SEQ ID NO: 3423 - DNA, 738 bp, Triticum aestivum
  N_region (93)..(93): n = any nucleotide
gatccgttgatgtggcacgtggcctgaatacctccatttcgaccgtgcaatgcctcatggaacctcaaggccaccaacatcttgctggacgcnccttgacctgaatgcccgtgtcgcggactactgcctgcaccgcctgatgacccaggccggcgttgtcgagcagattgtcgacctgggggtgctgggctaccgtgccccggagctggcggcatccaagaagccacccccctcgttcaagtctgacgtctacgcctttggtgttgcgctgcttgagctcctgactggccgatgcgcgggcgacgtcatcacggggtctgaaggtggcgtcgacctgaccgactgggtgcagctgcgggtggcggaaggccaagaatcggagtgctttgacccggccatggcttcggactcggagaacccgcagggggtgaagggcatgaaggaggtgctgggcattgcgttgagatgcatccgaccggtctccgaaaggcctgggatcaagtctgtgtacgaggatctttcatcaatctagctagccaccatcattctgtagctttagagttggatgctcatgtgctgttagtttgtgcctcaaactctagtgtttctgtaggtgtgtggcatcaacttgatgcctgcaagttcagatggcaatgtctcattggttgcctagtgccgccgtgttgtacttacattgtttattatggaatctgcttttgcaagtagattagccaactt

SEQ ID NO: 3424 - DNA, 739 bp, Triticum aestivum
cgacctcaagacgcgcgtgtgccagagagagacgctggcagactggtcaaggcagcaaccaccataatctggaccaggtcggccctgcacgccgctgtaaacttcggcagtacccgtacgcaggttaccaccccaacaagccgtcagcgagccgtcgtccgatgccggagccgggcaccgaggaatatgccatgctggcccgcgagcccgaaaaggtattcatccacactatcaccaaccaggtgcaggccatcattggcatttcactgctcgagatcctatccaagcactcctccgacgagatttacctcgggcaacgtgacacgccggagtggacatcagacgcgaaggctctagaggcgttcaagcggtttggcacgaggttggagggcatcgagagcgaggtggttgccttgaacgggaacccccagctcaagaaccgcaatgggccagtcaagttctcatacatgttgctctaccccaatacctctgaccacatggcgatgccaccgggctcacggctaggggcatccccaatagcatctccatttgatgagatatttggagaatggttgctgctcgctagcatgcggaaatgttggggtgcatgcttcctgggtcattgcttgaataatctacgtacatcatgcccatttgccatccaagtgatgtgtgcttggctagccactggcaatgtatcttccatgtatatttccctttcatttatatcaataaaatg

SEQ ID NO: 3425 - DNA, 940 bp, Triticum aestivum
atggctcgacttgatagagaagcaccaaactaccaaaaggatggctacaacgattttaatacattctacatacaggctgcatctggtactaaaggtggctctagtggttcccctgttgttgattgccaaggaagagctgttgcactgaatgcaggaagcagcagttccagtgcttcggccttctaccttccattagacggtgtagttagagcactcaatctgatacgtggctgttgggacacatttggtagcaagccagaatctgcttatattcctcgtggtacacttcaggtgacttttcaacacaaaggtttcgaagaaacttgatgtcttggacgcaggaatgaaaccgagcaggctgtacgacttgtttctccagcaggggagactggaatgctggttgttgattctttgttctgttattgcaggtgccagatggacctgcagacaaacatctgaaacctggtgacgtgctgattcgcatgaatggggagattgtaacgcaatttctcactatggagtccttacttgatgagagtgttggcagcgagataaatttgcagatcgaaagaggtggaactcctttgacagtaaagctgaaggtaggggatttgcactccataactccaaatcatttcctggaagttagtggtgctgtcatccatccactttcataccagcagtgtttttgcagcattggcacccgttgtctaagcagcgggaccgaaagaggctgggactgatgatgaacccgttgtgtgatgatgctagcctccttgcctcgcaacaagccccctcactcagtggccacttggtggtctttctccctattggttttatgcttttcttaggtgtgtttgtgcgtgagtgccccagtaggatcttctatttcgttgaacttgacagtcttgtatggacgtggtgttgactttatttatat

SEQ ID NO: 3426 - DNA, 1125 bp, Triticum aestivum
tagattgcttgcaaggctggaagtgtcagcgctttgtgctgtatgccgtgacacacctgaggatgctgttgtggcgatgtgtggtcatattttctgctatcagtgtatatacgagcggataacaactgatgaaaacatgtgccccgtccctaattgcagaaacacgttaagtactgaatcagtattttcatcagggacattaaagatttgtatctccggcaagaccagtactcatgcgatagcgagttcatcagcagacgatgagctatcttctatcagtcaaagcagttacatctcctcgaagatacaagcaaccgtcgatatactgaattctatcattaacatgcatgcccttacagacagtgataccattgaatcaaatccaaaccgagtatcccctgtgaaagccattgtcttctcgcagtggactggcatgctggatttgctggagttttcactgaacagcaatcttatacagtacaggagactagacggaacaatgtccctcaattcaagagataaagccgtgaaggattttaacaccgacccagaggttagagttatgattatgtcattgaaagcgggtaatcttggtctgaacatggttgctgcttgccatgtaatactccttgatctttggtggaatccttatgctgaggaccaggcaattgatagagcacacagaattggtcagactcgtccggtcactgtctctcgtctaaccattacagatacggtggaagatcgtattttatctctgcaggaggaaaagagagcgatggtcaactctgctttcggtgaagacaaatccagtgcccacgctactcggctgactgtagatgatctgaggtatctgtttaggatatgattgcgaggagatgatcccttgttgcgttgctagctttggaaatcgtcaaagtggtggcagcatgtacgttgcttgcaatctacctatgtctctccctgccccgccgacgatccagttttgtcatgctccgatcgatcttacatgtgacatcggagggccaactagctagcatgtctagtgtaacgtacttatgtccctgagaattcttgtgtgctctgttccctgtgatgacaggagagatccatatgtatagtgtg

SEQ ID NO: 3427 - DNA, 820 bp, Triticum aestivum
gactacgtcgtggccgccggagccgcgttcctcgcgtacctgctcctgccgccggcctggtccctgctctcatacggcctacgcggctacaaaggtgacctgagcccagctcaagctctggacatggtcacctctcaaggttacctgatcatcgacgtgcgaagcgagaacgacaaggccaaagccggcgtgccgcagctcccctccaacgcaaagaacaagatcatcgctctgccgcttgaagagcttccgaacaagataaagggaatggtgcgcaatgcgaagcgagccgaggcggagatcgccgcgctgaagatctcctacctcaagaggatcggcaagggctccaacatcgtcgtcatggactcgtacggtgacaactccaagattgtggccaagacactcaacagcgtggggttcaagaactgctgggtcatggccggcggcttctccggccgaaaagggtgggcgcagagccgccttgggacggactcctacaacctctccgtggtcgaagtcgtgaagccgtcacgggtgattccggcggccgctgaacggttcgtgacggtctcgtcgacttcgactccctccaggacgagtcgcaagcttctccctggcagtgtggacagctgagaaaagatttgaactctgtagaaatccaatgtccatttcactgaatttccagctttttgttctgtaacctgtacaatgttagtgctgcaagctgcttataagcatcctcagaaaaaaacgccgcaaacatccagggcatataaccattggtggaaaattagaaactgttttagaggactaatgttaa

SEQ ID NO: 3428 - DNA, 579 bp, Triticum aestivum
aactcctgccagtattttttgtcgcaaccctgcaaagagaataacaatgagggagatcaggaaccacccctggttcttgaagaacttgccaagagagctcacggaagctgcccaagcaatgtactacaagagagacaacagcgccccgacctactcggtccagtccgtggaggagatcatgaagatcgtggaggaggcgcagaaaccgcctccttccaccactccggtggcgggtttcgggtgggcggaggaggacgagcaggaggatggcaagaagccagaggaggaagcggaggaggaagacgaggaagatgagtatgagaagcagttgaatgaggtccgtgccagcggtgagttccacatcagctagctgatgggggtgcttcactggcgtgagaaggccacagaccggggataaaatttgtcatatagtttgtagtgtgtggttttgttctcgagtttttctcttcattattgtctcgattctgcaacagtgtaaattaccaaagtggttccgtcgctgtctttacaatgactgattaagctagcattgcggaaacataatgtatggaataaatc

SEQ ID NO: 3429 - DNA, 1163 bp, Triticum aestivum
aagatgacgagaatgtggcgagggagatcaataaaccccggtcgctgcggcatccccacataatccgattcaaggaggtggtggtcacgccgacgcacctggcgattgtgatggagtacgcggccggcggcgagctcttcgaccggatctgcaacgccgggaggttcagcgaggacgaggccaggtacttcttccagcagctcatctgcggcgtgagttactgccacttcatgcaaatttgccaccgggacctgaagctggagaacactctgctggacggcagcccggcgccccgcctcaagatctgcgacttcggttactcaaagtcgtcgttgctgcactcgaagcccaagtcgacggtcggcacgccggcgtacatcgccccggaggtgctctcccgccgggaatacgacggcaagacagcagatgtgtggtcttgtggagtgaccctttatgtgatgctagtcggcggttacccttttgaggatcctgatgaccccaagaacttcagaaagaccattgggagaataatgtcaatccaatacaaaataccggagtacgtccacgtatcccaagactgcaagcaactccttgccagtattttcgtcgcaaaccctgcaaagagaataacaatgagggagatcaggaaccaccctggttcttgaagaacttgccaagagagctcacggaagctgcccaagcaatgtactacaagagagacaacagcgccccgacctactcggtccagtccgtggaggagatcatgaagatcgtggaggaggcgcagaaaccgcctccttccaccactccggtggcgggtttcgggtgggcggaggaggacgagcaggaggatggcaagaagccagaggaggaagtggaggaggaagacgaggaagatgagtatgagaagcagttgaatgaggtccgtgccagcggtgagttccacatcagctagctgatgggggtgcttcactggcgtgagaaggccacagaccggggataaaatttgtcatatagtttgtagtttgtggttttgttcttgagtttttctctttcattcttgtctccgattctgcaacagtgtaaattaccaaagtggttccgtcgctgtctttacaatgactgattaagctagcattgcggaaacataatgtatggaataa

SEQ ID NO: 3430 - DNA, 896 bp, Triticum aestivum
  N_region (112)..(112): n = any nucleotide
  N_region (227)..(227): n = any nucleotide
  N_region (314)..(314): n = any nucleotide
tgctaacatcccatcagacccccagagaattctgtatttctactgatgctgattcagagaatgggaccccagtaaaaacgccatcccctccttgacctgtattctgtttgtngggatgtcaacagggctgtgcttgggttcagcacttgctggcctgaaacttgaaacaaatgggctgttgacctgaacaactttgcatgcaagagccttaaatataaccatcccanaacagaggttcgaaatgaaaaagccgaggattttcttgcacttcttaaggaatgggcgattctatgtgacaaatatgtccatagcantgattctgatgcagcagatcctgttgaggaagaggaagatgatgagcctcttggaaaggatgagtttgtggtggaaaagctacttgagatctgctatggtggcactgggaggaaaaatggaatccattttaaggttcaatggaaaggatatggcccagaagaggatacctgggagcccatagaaaacctgagtgactgcccattgaaaattaaagagtttgtgcaagaagggtacaggcgaaacattctaccccagcctggtcaggttgatgttatttgtggtggcccgccctgccaagggataagtgggttcaaccgatttagaaaccgtgataaccctttagaagatgagaaaaatcaacaaatggttacctacatggacattgtctcttatctgcaaccaaagttcgtcctgatggagaatgtggtggacattctgaaatttgctgatggctatcttggaagatatgcattgagccgtcttgtatctctgaactaccaagcccgccttggaatgatggtagctggttgctacgggcttcctcagttcagaatgcgtgtgttcctttggggagctctccc

SEQ ID NO: 3431 - DNA, 631 bp, Triticum aestivum
cacgactcgccggctgtcgccagccgatataattcaccgaccacagttaagtgctattatgaccagctgttgttcgggggctggagcctgccatgaccgcggggtgctgcaccgtgatattaagggtcgaatctgcttttggataacaatggcatgttgaagattgcagattttggtctggcgtcattctttgatccgagccgtaagcaaccgatgacaagcagggttgtgacactatggtaccgcccaccagagttacttttgggcgcgaccgattatggggtgggcgtggacctatggagcgcgggatgtatactcgcggagttgttggctgggaggcctattatgccaggccgaaccgaggtggaacagctgcacaaaatttttaagctgtgtggctcccccacagaagaatattggaaaaagtcgaagttgcctcatgcaacgatatttaagcctcagcagccatacaaaagacgaataacggatacattcaaagattttccacatccgcactgcggttgattgaaacactacttgcaattgatccggctgatcgtttgacagcgtcctctgcattaagaagtgatttctttaccactgaaccttatgcatgcgaaccatcgagtct

SEQ ID NO: 3432 - DNA, 1425 bp, Triticum aestivum
ccgagcactgtgtcagctgaattgttctaaggtttctttagtagattgtcttagtttttgtgtttagttgatgttgatgaatctctatcagtcaaatttcgaacctgtaaattgatagatcttcaccgttcagtttctgttgctttaataataatagattcttatcattgtattttttctatttttgttgtaattctacattttgctctcggacaacaatacaatgcagaaggtttaacagtaggataatttcagcaaaatgcattgaacttgtttattttacttttagagagggcttggtgccaggtacaaaatgtaggcgcctccccccctccaggtttcctgcataaaactcatttcaggctgttgtggtttatacagaatggaaatgaaagcaaaatatcttaagatggcaacatcggagcaacagagggcggatgaaaatgtgctgaagcttgtggaaaaacacaagagggagaaacaagctgctctaaatgagattatcaagttagagcagaaactggatgccaagcagaagcttgaattagaaataaaacagatgcagggaaaattggaagtgatgaagcatatgccaggtgtggaagactccgaatcaaaaggaagatagatgaacttagttgccgagcttgaggacaagtatgatgaaatggatgcaatggaatcactccaccatactctacttatgaaggaaaggataagcaatgatgagttgcaagatgctcggaagaagttaatagatggtttgcgggatcttacaactggccgaggaattataggaattaaaagaatgggtgatcttgatctgaaatcatttgcgattgcttgcaaaaataaaatgtcaaaagaagatgcaggcgttactgcttccattctttgttcaaagtgggaggaggagattaaagatccagaatggcacccttttaaagttatcgtggatgaaggcaaagagaaggaaattctccgcgaggatgacgagaagctgcgagaactgaaagaagagtatggcgaagtgtatggcttggtaacaaggctctgcttgaagttaacgagtataaccctagtggccgctatcctgtacccgagctgtggaacttcaaagagaagaggaaagcaactctcaaagaagctgtccagtacgtcctgagacagtggcgcacacagaagaggaagcgctgagcccagatatctaaattcctgtagtgaactagaagtgcgtttctgttattttcctcatgaatgttggtaaacgtttagttgtctaggtttccttggattattcagcctggtgtagcattgacatgaatgctagtacttggagattgtgaatcgccctttcaggataatctttttcgtgccaagctatgtgctagtatgaatgaacggctactagtttgttgatttcaa

SEQ ID NO: 3433 - DNA, 571 bp, Triticum aestivum
tgtcgcacgcggagcaggcgcacccggacgagctggacgaggagttcgacacgttcccgacgtccaagccgagcgacgtggtgcgcatgcggtacgaccggctgcgcagcgtggccggcagggtgcagacggtggtgggcgacctggccatgcagggggagcgcgcgcagtcgctgctgagctggcgcgacccaagggcgacggccatcttcatcaccatgtcgctcgtcgtggccgtggtgctctacatcacgccgttccaggtggtggccgtggtgttggggctcttcatgctccgccacccccgcttccgcagcaagcagccgtccgtgcccttcaacttctacaagcgcctccccgccaagggtgacatgctcctatgaccatgtttcttttctcttcttttttgcgtagagtcctcgaaattaatttcagtacatatatattcactactacgtactactactacactgcacaatcgatcactttgtgtttgtgtgatcagagaatcatagaaataaaaataagaaaggctggaatggattccgtggatagatactctgaacattca

SEQ ID NO: 3434 - DNA, 621 bp, Triticum aestivum
acgatactggtgcacgtgctcttcgctcatcctggtgtgctacccggagctgatcctggccgacggtgttcttatacctgttcatgatcggggtgtggactaccggcggcggccgcggaagccgccgcacatggacacggtgctgtcgcacgcggagcaggcgcacccggagcgagctggagcgaggagttcgacacgttcccgacgtccaagccctcggacgtggtgcgcatgcggtacgaccggctgcgcagcgtcgccggcagggtgcagacggtggtgggcgacctggccatgcagggggagcgcgcgcagtcgctgctcagctggcgcgaccccagggcgacggccatcttcatcacgatgtcgctcatcgtggccgtggtgctctacatcacgccgttccaggtggtggccgtcgtcttcgggctcttcatgctccgccacccccggttccggagcaagcagccgtccgtgccattcaacttctacaagcggctccccgccaagggtgacatgctcctatgaccatgccatgcatggatctctcctcttctctttttttttgcatagagttatctaaattaatttcagtatatatatatatattcactattacta

SEQ ID NO: 3435 - DNA, 765 bp, Triticum aestivum
cccgcgcgaggctccccgcggtcacctctatcactccgtttgcatcgtcagtgctggagatgcacaattcctgccctgtctccgctcttgcctcccgcccctatcctcgaggaggtggagccccaggaactggatcggccaccaacacagatcactatcaggtttaccaccaaccgccgccgcatccgcacaaacagtgatgcagtggctccggtcgcgacatcgcctactcagctcgcagaggcgatgacaggggaaggaggtactggacctgcgaatagcgcagaaactgtatcgtctgaatggccaccgcccccagaatctgatgccgtcgtgtcagagacccgtgagattgagggcttctttgattgagccagaagatagagtttgcaggtatgaacatcttatgactagtgtccatggagcatgaattgaacttctgcttagtggactaatcagttgcagtgaagccagtactttggttcggtgatatggactagttgagttacatttgcttgtgtgttctatcttctatgctagttgatcgatggtaagctggaatagcttataatcatatgaacattcatatgtagctgaacttggagttattatacttactttggaccgcatgttagctgatatgtggtgatatatgtgttttctgttgttaattttgtaagtcttgtaccttgtacactcttttttggtacactgtaattatttgtcgagagttgttattttttaaagatgttctatatatccaac

SEQ ID NO: 3436 - DNA, 613 bp, Triticum aestivum
acagaggttctactccaagattgcaggactaacagtatgaaaaggaatgctagcttgcattctctgaggatcaccacccgtccccgtccttccgcaaccagaaaataaggcgaggaggcgtgcctgatcactggaacactgcgatccatgagtaccagaactcgaagcaggcgctccaaggggggccgccccagagccaccgtgtggacgtggaggagctcaagctgcgtgatgccacgagcgccgcgcagcacgccgcgacgatggccaggctcaagagggagaaggcccattgcctgatgcacaaggcggacctggccctccacaaggcctcggtggccgtcatgatcgcggacgcgatcaaggcgtccagcagggactcgtcgcgggcggcggcggctgacagcaggagggacgacgggcggtgacgcctcgttgtcgggcgtgagcatgatgcgtgcggacgcatcgttttgtcgataggatcaatgcagtagatagcgtcgggccgtagaaaaaccaaccttcctccaaaccccaaaccagttctgtttgatccttttgtacatgtgatatttcttcctccttaccttgttcagagtcttgtctgggg

SEQ ID NO: 3437 - DNA, 669 bp, Triticum aestivum
agatcatcgtgaatgtgttcaggctaccacattgatccctaccagggtgacaagctctctgctctgctcgttgagttctttgagaagtgccaggttgaccccagccactggaccaagatctcacagggtgggcttcagcgtattgaggagaaatacacctggaagctttactctgagaggctgatgaccctcaccggtgtgtatgggttctggaagtacgtctccaaccttgagaggcgcgagacccgccgctacctcgagatgttgtatgccctcaagtaccgcaccatggccagcacagttccattggctgtcgagggagactccgcgagcaagtaatttggccacctcctgaccaaaagaagagtggcttggattcctgcaaagattgagatttgagaatgctttggttttcttcctagacgctgctctttttaagattcaaggtcgagtcagtgtgctagtttggtttagtagttggagtgagtcgagactcgggacagaggaaaatgtggtgtgtgtcagtcggttggtgcttgtcgtatttcttggatgttactgttgaataatagaagcggccttggcgtcgtttctgaaataataatagtagcatccttcctcgttttcaagaaaatctttgtcacagctgctgacctctattatttaata

SEQ ID NO: 3438 - DNA, 472 bp, Triticum aestivum
ccaacggtgacacccatcttggaggtgaggactttgaccacagaatcatggattacttcatcaagttgatcaagaagaagcacggcaaggacatcagcaaggacaaccgtgctcttggaaagctgaggagggaagctgagcgtgccaagagagccctcagcaaccagcaccaggtccgcgttgagatcgagtccctctttgacgggactgatttctcggagccactgacccgtgcgaggttcgaggagctgaacaacgatctgttccgcaagaccatgggaccagtgaagaaggccatggatgatgctggtctcgagaagacccagatccatgagattgttcttgttggtggcagcaccaggattcccaaggtccagcagctcctcagggactactttgacggcaaggagccaaacaagggtgtgaaccctgatgaggctgttgccttcggagctgcagtgcagggaagcat

SEQ ID NO: 3439 - DNA, 726 bp, Triticum aestivum
caagagggcggcgagaagtacatcctgtgttttgacctggttggtggtacttttgatgtcaggtatcttgaccatgacaaatggcgtctttgaggtgttggccacacaacggtgacacccatctcggaggtgaggactttgaccacagaatcatggattacttcatcaagttgatcaagaagaagcacggcaaggacatcagcaaggacaaccgtgctcttggaaagctgaggagggaagctgagcgtgccaagagagccctcagcaaccagcaccaggtccgcgttgagattgagtccctctttgacgggactgatttctcggagccactgacccgtgccaggtttgaggagctgaacaacgatctgttccgcaagaccatgggaccagtgaagaaggccatggatgacgctggcctcgagaagacccagatccacgagattgttcttgttggtggcagcaccaggattcccaaggtccagcagctcctcagggactactttgacggcaaggagccaaacaagggtgtgaaccctgacgaggctgttgccttcggagctgcagtgcagggaagcatcttgagcggcgagggcggtgacgagaccaaggatatcctgctcctcgatgtggcgcccctcaccctcggtatcgagacagttggaggagtcatgaccaagctgatccccagtgacaccgtcaatcccatcaaagagtcgcaggttttca

SEQ ID NO: 3440 - DNA, 610 bp, Triticum aestivum
gcgctcatcgcgcgttcgccgactgcactcgccaacaggcgtcatgcgcgtcttcgagacgtcggatttctgcctggagccgcgcggggacacggcgacgcggcggtcaacgttcgacgccatccttgccggctgcatcccggtcttcttccaccccgggtcggcgtacactcagtacacgctgcactttccgagggaccacgggaggtactcggtgctcatcccgcacgccggcgttgccgcggggaacgtgagcatcgaggagaccctgaggaagatcccgccggaggaggtgaggaggatgcgggaggaggtggtccggctcatcccgagggtggtgtacgcggaccccaggtcccggcgcgtgggcttcagggacgcgttcgatgtcgcgctggaggccgtcatcggtcgggtggcgaagcggcggcggggcgaggccgccggccggtagcagtggcactagtcgccatcgacggttgtgcacgctattgtgccgtgctgaattgagtccaacaatttcaggattacgtgcgcgagtggaacgacttttccctttctggtttcgtgcctggagttccggatcgggtcgttaccgtgtaatcagcta

SEQ ID NO: 3441 - DNA, 587 bp, Triticum aestivum
tgacccccctaactcatcaaagcgccgattcagggtcaagccctgtgatccaagcaccgtagagcctccacagcgaatgcttcatggctttggatgctatcttttctccgtcggcatcggtgcagatagaatcatatgtggaggcgaggatggctctgtcagggtctggaacttctcagaagcactggagattgagaagaaggcacaggctttaaggagtctgagacaggagaaccgcatgaggcggaggaaggcgcaagtggagatgaatgcaaatggtagaagggttgaccattgctcagtagccatgaaaaggaacccattgaagggtgataagagtgtcacctggcaaatcaagcgccccatcagtgacaaggtcaaatcctagattgggtatttgtacccttcgtaatataacatttttcttttccgattccatccataagctcggtttgctacatgtaggtcaacatttggcaatttcctatattcaacttatatctagtgcactgtggtcgcatttgatatgtatgcaattcttatttgacctggtgtacattgggtccactggaagaaagttttccata

SEQ ID NO: 3442 - DNA, 608 bp, Triticum aestivum
tgatgcaggatcgcactaattgatttgaggaagatcctgacccccctaactcatcaaagcgccgattcagagttaagccctttgatccaagcaccgtagagcctccacagagaatgcttcatggctttggatgctatcttttctccgtcggcatcggtgcagatagaatcatatgtggaggcgaggatggctctgtcagggtctggaacttctcagaagcactggagattgagaagaaggcgcaggctttaaggagtctgaggcaggagaaccgcatgaggcggaggaaggcccaagtggagatgaatgcaaatggtagaagggttgaccattgctcagtagccatgaaaaggaacccattgaagggtgataaaagtgtcacttggcaaatcaagcgtcccatcggtgacaaggtcaagtcttagattgggtatttttacccttcgtaatataacatttttcttttccaattccatccataagctcggtttgctacatgtaggtcaacatttggcatttccctatattcaacttatatctagtgccctgtggtcgcatttgatatgtatgcaattcttatttgacctggtgtacattgggtccaatgg

SEQ ID NO: 3443 - DNA, 584 bp, Triticum aestivum
gacccccctaaactcatcaaagcgccgtttcagggttaagccctttgatccaagtaccgtagagcctccacagcgaatgcttcatggctttggatgctatcttttctccgtcggcatcggtgcagatagaatcatatgtggaggcgaggatggctctgtcagggtctggaacttctcggaagcactggagattgagaagaaggcacaggctttaaggagtctgagacaggagaaccgcatgaggcggaggaaggcgcaagtggagatgaatgcaaatggtagaagggttgaccattgctcagtagccatgaaaaggaacccattgaagggtgataagagtgtcacttggcaaatcaagcgtcccatcagtgacaaggtcaagtcttagattgggtatttgtacccttcgtaatataacatttttcttttccgattccatccataagctcggtttgctacatgtaggtcaacatttggcattttcctatattcaacttatatctggtgcaccgtggtcgcatttgatatgtatgcattcttatttgacctggtgtacattgggtctaatggaagaaagtccccat

SEQ ID NO: 3444 - DNA, 800 bp, Triticum aestivum
agggaaggatcacttccctggtctaacatcctactggagatgagtatgttcctgtgcagctattaaaggatcaatactgcaaccggaggaatcagcaagggccaggattcctggtgagaatggaacagttacaggaagagcttgcccaaaggtctttatggtacattttgcaaggaatgccctttgggaacatacaagaatgttaccggatcttcaaaatctctctgctttccgtgcccttcaggcgaacttcctcgccgtgccgtgtacacaagtgtccgaggaggggctgctgaaactccatgcccgtacatatgtgtgtcagacagatatcgcatgcctcactgttatactgctcttgaagagttaatatacacttttgggggaccttggttatttggtctacttctttcaggccttcttattttgttagctcttgttttaagtgttgctcggatgaaatttgctggcactgatgagttacccgggccagcaccaactcaacaagggtcgcagattgatcactccttccctttcctagaatcactaaatgaggtcttggaaactaatagagctgaagaatcacatggtcatgtacacaggatgtatttcatgggcccaaacaccttcagtgaaccttggcatctcccacacaccccagcagaacagattacagagattgtgtatgaggatgcatttaatcggtttgtcgatgagataaacacacttgcagcttatcagtggtgggaaggatcaatttacagtatcctttgtatacttgcataccctttggcttggtc

SEQ ID NO: 3445 - DNA, 605 bp, Triticum aestivum
gcaagaatttgttgatggtgcactcagtcatatagtgcacatgtcaaagatcataggtgaagaaatcggctgtggacatccaatgtggcctgctgtgattcatggtcattatgccagtgcaggagttgctgctgctctgatatctggagcacttaacgttcacatggtatttactgggcattttcttgggaaagacaagttggaagggcttctcaagcaagggagacagacaagggaagaaataaatatgacatacaaaataatgcgccgaattgaagcagaagaattatctcttgatgcatctgaaatagtaattgcaagtactagacaagagatagaagagcaatggaatttgtatgatggttttgaggtcatgcttgcaaggaagcttcgtgcgagagtcaagcgtggtgctaattgctatggacgttacatgcctcgtatggttataattcctccaggtgttgaatttggccatatgattcatgaatttgatatggaaggcgaggaagatagccattccccagcctctgaagatccgcctatttggtctgagataatgcggttcttcacaaatcctaggaaacctttgattctggctgttg

SEQ ID NO: 3446 - DNA, 607 bp, Triticum aestivum
ccattcttggttcaaagtgggaagaggagattaaaaatccagaatggcacccttttaaagtttatcatggtcgagggtagagagaaggaaatttctccgtgaggatgacgagaagctgcaggaactgaaagaagagcatggtgaggaagtctatgggctggtgacaaaggctttgcttgaagtgaatgagtacaaccctagcggccgctattctgtgccggagctgtggaactacaaagagaataggaaggcaaccctgaaagaagtggtccagtacgtgctgaggcagtggcgcacacagaagcggaagcgctgagcccaagtacctaggttcctgaagcaatgaagtagtgaagtagaagtgtattgatcttatattgtcatgaactcgtgaatgttggtgatggtttagctgtggatcattcagccttggccctggccctggccctggttggtatagcattgacatgaatgctggtaattggagattgcgaactgtcctgttaggatgtattttgtaccaagctatgaagtaactgtcgctggaatgcgtgtaagattcactgatttcagcgacagttaaatccgaacggagttagtagtatga

SEQ ID NO: 3447 - DNA, 1374 bp, Triticum aestivum
ttcatctgttggatctctgaagtcaagaacccaccactgataatcttgttctgcagcagactaggcttgagtgatgggggaagccgccggcgaccgtgtcctcagccgcctccacagcgtcagggagcgcatcggcgactccctctccgcgcaccccaacgagctcgtcgccgtcttcaccaggttggtcaaccttggaaatggaatgctgcagtcccaccagatcattgctgaatacaacaccgcaatccctgaggcagagcgcgagaagctcaaggacggcgcctttgaggatgtgctcagggcagcgcaggaggcaattgttatctcgccgtgggtcgcgcttgccatccgtccaaggcctggtgtctgggagtatgtgagggtcaacgtgagcgagctcgctgtcgaggagttgagcgtccctgagtacctgcagttcaaggaacagcttgttgaaggaagcaacaaggactttgtgcttgagctggacttcgagccattcaatgcctccttccctcgcccttcgctgtccaagtccatcggtaacggcgtgcagttcctcaacaggcacctgtcatcgaagctcttccatgacaaggagagcatgtaccccctgctcaacttcctccgcgcacacaactacaagggcatgactatgatgttgaacgacagaatccgcagcctaagtgccctccagggagctctgaggaaggccgaggagcatctgtctggtctcccggcagacaccccgtactcggacttccaccacaggttccaagaacttggtctggagaagggttggggtgactgcgccaagcgtgcgcaggagacccttcacctgctcctcgaccttctcgaggctcccgacccgtccacgctcgagaagttccttggcacaatcccgatggtgttcaatgttgtcatcctctcgccgcacggttactttgcccaagccaatgtcttggggtaccctgacaccggaggccaggttgtctacattctggatcaagtccgtgctatggagaatgagatgctgctgaggatcaagcagcaaggccttgacatcacaccacggatccttattgtcaccaggcttctcccagatgcaaccggcacgacctgcggtcagcgtctggagaaggtcctcggtacagagcacacccacatccttcgtgtgccattcagaactgaaagtggaattgttcgcaagtggatctctcgttttgaagtctggccgtacctggagactttcactgaagatgtggcacacgagatctctggagagctccaggccaatcccgacctcatcatcggaaactacagcgatggaaaccttgttgcgtgcttgcttgcacacaagatgggtgttac

SEQ ID NO: 3448 - DNA, 602 bp, Triticum aestivum
atttggatgaagtggatgctaatccggaggaatacattaaggaggctcgtctctgtgttagcgaacgaccatgacaaaaggagaagcagttgaacggcacccacaaagcgcatgtgcactcacaagaggaggctgagatcctagcgaggttcaaaccggaggtggacgtgtcatctctgatcccaagcatgagaagcgcggagcagtccatggacgcctgcctgcgccgcttccgcgccacgcgccacatgatcctctactacgaggacttaatccgcgacaacaatgcgctgtctcgggtgcaggagttcctggggctcccggtgaggaggctgtccagcaggcacgtcaagatccacaccagcccactcccggacctggtggacaactgggaggacgtgagacgcacgctcaagcccacggagtttgctcgtttccttgacggctgaagactactagtagacagaacatgtcgattcatctgtttttgctacggcaggcccttctgttttcttttctttcgtgggactgcacaatggggttggaagttgttgttcagctgttttccttctcaaagataacggagtagtgcccagataata

SEQ ID NO: 3449 - DNA, 708 bp, Triticum aestivum
gaggaacatcttaggaatgcagaaagatgtgtttgcatgctagagagctaccttgcgagggaatcggcagggtagccgcccctgtttctgctttgattgaccttgatgacaccgcttcacagcagcacacaacacacctcttcttccatgtgcttctgcacaatggggttcgacgtggcatctcaaccatcatcttagattaccacctcggaggggacggttgaggtcatataccacccgcaggctccctttgaaggtccgggatcgctgctgctgttctgtgtgcatagcatacatctgcctgccatcatgggagagcagaaggggaatattctgatggggaagtacgagatggggaagatgctcgggcaagggacctttgccaaggtctaccatgcccgtaacatcgagacctcgcagagtgttgccatcaaggtgaccgacaaggagaaggttctgaagggcgggctcacggatcagatcaagcgcgagatatctgtgatgaagctggtgaagcacccaaacattgttcagatgtatgaggtcatggcaaccaaaacaaagatttattttgtgttggagcatgtgaagggtggagagctgttcaacaaggttcagaggggaaggctcaaggaagatgctgcaaggaagtacttccagcagctgatctgcgcggttgacttttgtcacagcaggggtgtctatcac

SEQ ID NO: 3450 - DNA, 752 bp, Triticum aestivum
catgtgtatcaggcatgtggaagacaccagctgagaggtgtttcctatggcttggaggtttccgaccttctgagcttttaaagcttctttcgacccagcttgaacccctaactgagcagcagctgtcagggatatgcaaccttcagcaatcatcacaacaagctgaggatgctctttcacaaggaatggaggctcttcagcagtctttggcagaaacgttggctgggtctatcggctcttctggatctggatcaacaggaaatgtggcaaactacatggggcaaatggccatggccatgggaaagcttggaacccttgaaaatttccttcgccaggctgacaacctgcggcagcagactcttcagcagatgcaaaggatcctgaccacaaggcagtctgcccgtgcacttcttgtgataagtgattactcatcccggcttcgtgccctaagttctctctggcttgctcgaccaaaggaataacaagcgcgtgtgatttgactgcaatacattttcgcagtttgggggtgatggtggtggcagtcatgcaacagacttgattcagagaaacttgcacatactataatccaaagcgatgttgtgttcaggtagcttagccatatagtgaagttgagtgcattagggccgggtccttgttgtaccgttaaccgctgtaaaattggcatctaatggttgccaagtaatctttaagatcctaatttgcagagagccatccctgttagatgtgcattt

SEQ ID NO: 3451 - DNA, 674 bp, Triticum aestivum
ctcgagctccagcgcatggggatcggtctttttgtgtccaccatcgcagtggcagtcgcagcattggtcgagatcaagcgcctggagagcgcaagatccgagggcctggtccatcagaaggtgcctgtttccatgagcattctctggcaggcgcctcagtacctgctgatcggggtcggtgaggtgttcacgtccatcgggcaggctgagttcttctacaaccagtctccggattccatgagaagcctgtgctcggctttcgcccttgtcaccgtgtcgcttggaagctatcttagctcgttcatactgacctggtgtcgtatcttacgacgcgtggggagcagatggggtggattcctgacaacctgaatgaaggccaccttgaccgcttcttctggctcattgctggcctcagctccctgaattttctcgcttttgtttattttgcacagcagtacaagtgcaagaaagcttctgtactttgatgtttccgcctttgccttgtattgtacagaaagttgtgtggatatttctctcatgaacaagctaacaatgtacaggctacaatgtatagtcttctgtaatgtacagtcttgtatcctttgatagttgtatacatttgtttacttggagagtgggaatagtgtgccttttccccttgttaatgaagctta

SEQ ID NO: 3452 - DNA, 460 bp, Triticum aestivum
ctgccagtgagcgatcttagaagaatatccaggccaagcctccgagcatcaacttcgtcaaatctgccaaatcatgagccgccagttgatggaatccatgctgctgcagcaccgtctgcagatcaaacttctaattcgagcacaatggctgtgattcaggaggatgctgcttttactgaaagcgtaggagaaccaagcaatgcaggttcctcaagaaccctgaggaggaggggaagaagcgatgccttaggttcgttggatgtggatggtggcgaaacacaccggaacaagagaaggcggctgaactaaagctaagaaggccgaaccgagtattgcagaggcttcagcgttgctccagtttttacggttcgctcttctcaatgagcccattttatctctttgggcacactgtgctgagtctgatcaaaagtcttcctcttccgcttgtttaatagggtac

SEQ ID NO: 3453 - DNA, 493 bp, Triticum aestivum
ccttgttggccttgcaaatacggaaaggttggcaactgcagtgagcgatcttagaagaatatccaggccaagcctccgagcatcaacttcgtcaaatttaccaaatcatgagccgctagttgatggaattcatgctgctgcagcaccgtctgcagatcaaacttctaattcaagcacaatggctgtgattcaggaggatgctgcttttactgaaagcgtaggagaacctagcaatgcagggtcctcaagaaccctgaggaggaggggaagaagcgacgccttaggttcgttggatgtggatggtggcgaaacacaccggaacaagagaaggcggctgaactaaagctaagaaggccgaaccgagtattgcagaggcttcaatgttgctccagtttttacggttcgctcttctcaatgagcccattttatctctttgggcactatatgctgagtgtgatcaaagtcttcctcttctgcttggttaatagggtgc

SEQ ID NO: 3454 - DNA, 595 bp, Triticum aestivum
cgatcttacgtgggaataacttaaaacagacaatggggagtacaaatgcattttgttgcctgcaaataggaaatggtcctccaaggcaaaccaagctggttaaccagagcatctgcccggtatggaacgagggattcacttggttattcgacatccccccaaaagggcagaagctgtacatcttgtgcaaaagcaaaaatacatttggaaagtcaaccctcggaagagtaaccatccagatcgacaaagttgtcactgagggagtttacagtgggttctttagcctcagccatgacggcggtaaggatggctcaagaacactagagatagagattgtatggtcaaatagaccggccaacgacaatatgtagcatggctaatttcgcatggtgccaatattattgtcggggcgcttagatgtaaatcagccccataaacatccacattcatcgcagtgtagaaaattacatggtttacagacatctgcctcaacattatttcgaggtcgttcttggtttagcccctgtagctgcatacggattttggaccggctattttgtttgtacaggtttatttcctgtaattataatttaga

SEQ ID NO: 3455 - DNA, 697 bp, Triticum aestivum
actacagatgcttatgaagacctgtcctcccagttttcatgacagagctgatagcttactgcattgcctgcctggttgcttgaccgtgaccatcttacgtgggaataatttaaaacagacaatggggagtacaaatgcattttgttgcctgcaaataggaaatggtcctccaaggcaaaccaagctggttaaccagagcatctgcccggtatggaacgagggattcacttggttattcgacatccccccaaaagggcagaagttgtacatcttgtgcaaaagcaaaaatacatttggaaagtcaaccctcggaagagtaaccatccagatcgacaaagtggtcaccgagggagtttacagtgggttcttcagcctcagccatgacggcggtaaggatggctcaagaacactagagatagagattgtatggtcaaatagaccggccaacgacaatgtgtagcatggctaatttcacatggtgccaatattattgtccgatcgcttagatgtaaatcacccccataaacatccacattcattgcactgtagaaaattacatggtttacagacatctgcctcacgattatttcgaggtctttcggtttgtagcccctgtagctgtaaacgtattttggaccggctattttgtttgtacaggtttatttcctgtaattataatttagagtagcttggtgtg

SEQ ID NO: 3456 - DNA, 601 bp, Triticum aestivum
cctttgtggcacacatgagtatcttgcaccagaatcatcaaaggggatgggtcacgggagtgctgttgactggtggacgtttggtgtgttccttttatgaacttgtgtatggtaggacacccttcagaggtcctgggaatgatgaaacattggcaaatgttgtttcccagaatctccggttcccggataacccggttgtcagcagcaatgcaaaggatctcatcagaggattgctagtcaaggagccggagaacaggctgggaacgttgagaggagcagctgaaatcaagcagcaccctttctttgaagggttgaactgggccttgatacgatctgctgccccaccagagacacggccttgcgatgtcgtgactcttgcgacggtgcggaagaagaaagaaggcaaatgtctggacttcaggagcgccgaggagctggagtttgaagttttctagtgaggtcttggtacagtttagcacaatttctgccgatagtctacaatttttctgttgagtaggtaaaggttggggctgtctgtacatggtagattcttgtatgctcagttgctgctatattctgtgaatagatcacttttcttaat

SEQ ID NO: 3457 - DNA, 659 bp, Triticum aestivum
gttgatcgatggcttccaagagatcctgaaggagttgaaggacctgcaagaaggaccctcccacctcatgcagcgcaggtcctgtgggtgagacatgttccattggcaagctactattatggaccctcagacagcccatttgctggtggggtattcttggtgaacattcatttcccaccggattatccttttaaaccaccgaaggtctctttccgcaaccaaggttttccacccgaacattaatagcaatggcagcatttgcctcgacatcctcaaggaacagtggagtcctgcacttaccatatcaaaggtcctcctgtcaatttgttcactgctgacggacccgaaccccgatgatccgttggtgccggagattgctcacatgtacaagactgatagggccaagtatgaatccaccgctcgctcctggacacagaagtacgccatgggctaaagccagccaaactggtggacgtgtcgaaacccaacgacgttatcacctaaataaccatcaagtcaccactctccccccaacgaagtatgaatggacttttgagggctgttgtgcccagttgaactcatatgtaccctaccttgtgaagtccgtttcagtctggtagtctgttctacctgactgttctgttatttaagtcgtttcc

SEQ ID NO: 3458 - DNA, 739 bp, Triticum aestivum
tgccacacagtttccgagttttcgccttgagaatttgctcttggtgcttgtgggaaatttggaagtctcacgtcgtcgaatcaggaaatagccaacactgatggaagacctttgtttcttagacattgtgcatatcacacatacttctctgtttctgacataagtgaagtacgtgtcgaagggctggaaacaatggactaccttgacaacatgaagggaaaggagcgtttcacagagcaaggagatgctattgtattcgaatcagaagttgataaggtatatcttgctgcaccctcgaaagttgcaattattgatcatgacatgagaagaacattcgtcgtgacaaaagaaggacttccagatgctgttgtttggaacccttgggataagaaggcaaaagctatgcaagattttggggatttagaatacaagcacatgctttgtgtggagcctgcagccgttgagaagccaattaccctcaagcctggtgaagagtggaaaggaaggcttgggctctccgctgttccttccagctactgtagtgggcagttagatccattaaaggtccttcatggttgagttctcacttcttcctcatgtacaggttatgttttactctagctaagctgtgttctggtttcaatgtatcacttattggattatgttctggtacttacataccacggcaacaacaagtctctcggagcattatggttatgaatatacctggtatgtgatt

SEQ ID NO: 3459 - DNA, 707 bp, Triticum aestivum
atctgagcaaggacaagttgtccctgcaaaggctcagggaactgctgagaaggcgaaggttgagctttcctcaactccacagactgaaatcatctccccttcatcacagcagatgcctctggtgcgaagcatttcaacattaccttgaccagatcaaagtttgagtctcttgtgggcaacctcattgagagaactcgcatcccatgcacaaactgcctcaaggatgctggtgtttctgcaaaggagattgatgaggttctactggttggtggtatgacaagggtgccaaaggtccaggatattgtttctcagatattcggcaagtctccaagcaagggtgtcaatcctgatgaggctgttgccatgggagctgccattcagggtggcatcttgaggggtgatgtgaaggagctcttgttgctggatgtaacacccctttcccttggtattgagactcttggaggcatcttcacaaggctaatcaacaggaacaccacaattccaaccaagaagagccagaccttctccactgctgcagataaccagacgcaggttggaatcaaggtgcttcagggtgagagggagatggccacagataacaagcttcttggtgaattccagcttgaaggtattccaccagccccgaggggtatgccacagatcgaggtcacttttgacattgatgccatggtattgtcaaggtgtca

SEQ ID NO: 3460 - DNA, 591 bp, Triticum aestivum
gtgaccccactaagacatctttatttgatctagttcaacagtttaagggacttcagcacaaatttctatgagaggaaaaagaagaatattgttagtttcttaggcagacgaagccacgcagaataagttacagactcttcaactgtaagctgtggggaatgtatgtcgacttgttcgcagtaacccaagattctgacaaatgtttcctgcaccttgggatatgcacctattcttatgtccccttcaatataacctcctgttttccttcctgctaatacatctagtagagttgtcttcccagctccactaacacccattagtgcagaaagaacaccgggacgtaaagctccagttatgttattaagcagtcgaagtcttcttgttggatagccttgtttcagcatttcctacaagagagtacatttcttacgtacctccatcatcaaatacgaaccaggcaagaaatataaaaaactacaaagcaaatgtatagggggcttgcttaattaccggtggggtatcaatgtagtagttcagattgtggaatgtaattggaagatgcatagttggtatagtcatctttgctgcaat

SEQ ID NO: 3461 - DNA, 629 bp, Triticum aestivum
ctaagacatcgtggttatttgatctagttcaacagtttcaaggacttcagcaacaaatttctatgagaggaaaaagaagaatattgttagtttcttagatcttgtttgtttgtcgacatgagaaggcagacgaagccacgcagaataagttacagactcttcaactgtaagctgtggggaatgtatgtcgacttgttcgcagtaacccaagattctgacaaatgtttcctgcaccttgggatatgcacctattcttatgtccccttcaatataacctcctgttttccttcctgctaatacatctagtagagttgtcttcccagctccactaacacccattagtgcagaaagaacaccgggacgtaaagctccagttatgttattaagcagtcgaagtcttcttgttggatagccttgtttcagcatttcctacaagagagtacatttcttacgtacctccatcatcaaatacgaaccaggcaagaaatataaaaaactacaaagcaaatgtatagggggcttgcttaattaccggtggggtatcaatgtagtagttcagattgtggaatgtaattggaagatgcatagttggtatagtcatctttctgcaataagatgaatgcattgaa

SEQ ID NO: 3462 - DNA, 591 bp, Triticum aestivum
catgtgttcaaatggagcagaggaatatactagggaggagataaactggagttacatagagtttgttgataatcaagatgtgctagacttgattgagaagaaaggtggattgattgcgcttctggatgaagcatgtatgtttcccagatcaacacatgagacatttgcacagaagctgtatacacatttaagaataacaagcgattcgtcaaaccaagctttcacgtacagactttacagttgtccattatgctggcgatgtgacataccaggctgatcatttcttagacaagaacaaagattatgtagtggcggaacatcaggatttgctgaatgcttcttcatgtccttttgtagctagtttattcccttcactccctgaagaatcatcaaagtcttcaaaattttcatctattgggtcacgttttaagctgcaacttcagtctctcatggagaccttgagctctactgaaccccattatattagatgtgtgaagccaaacaatctcctcaagccagccatttttgagaacacaaatgttatacaacaactacgatgtggaggtgttcttgaagctatcaggataagct

SEQ ID NO: 3463 - DNA, 970 bp, Triticum aestivum
ccagctgatgttgcctggaaaatgatgacacgctgtcgctaaagagcacttctgtgcgagcccaggaccatccaaccactaactctgttattgttgcagcagaaatcagatctactgatctgtcatggtgtcgtggacacattgtcaaacgaagaagacgatgctgaacttgatctggatagcccgaccgagggcttctcatctatttcggaggctattgaggacattcgacaaggaaaacttgtgattgtcgttgatgacgaatcaagagaaaatgaaggtgatcttatattggctgcttctttggttaccccagaggctatggctttcatagtaaggcatagcacaggaattgtgtgtgttagcatgaaagaaaatgatctggaaagattgaaccttcctttgatggtttcacacaaaggaaaatgaggagaagctatgtactgctttcaccattactgtggatgctaaagaaggcacaacgactggggtatctgcaaaggatagggcaaagacagtcatgactcttgcatctccttactcaaagcctgaagatttcaatcggcctggccatattttccctctgaagtacagagatgggggtgttctcaaacgagctggacacactgaagcatctgttgatcttgcgaaacatcgtaggaagaactaccgaccctgcaaactaactccttagagttagactgaatctttctaactactgttgatgtagtagttcatctcataggtaaccactcttattgtatccgcactgggattggagcttgtgttgcccccatctctctgcattcgtctagaatgtcagttgtgggtgatttttggactggttttgtcaagcacttcgttaggtggtattttggtgaacctggaaatggcgcgcagctgctgttatctgggagcttaggaaactacttagaatttagacttttttgccatcctgtcttacaggctg

SEQ ID NO: 3464 - DNA, 1075 bp, Triticum aestivum
gcggccggtggaggcggccaagaacgccgcggcgcggtaccgggaggccgtggggctgcaggtcgaggccttctggcggcgcaactacctgctgctcgtcggcgccggaggcgtcatcgtctgcatcgcgctctggcgggtcatgttcggcatcgccagcaccttcgtcggcctctccgagggcatggccaagtacggcttcctcgcgctcgccaccgccatggttgccttcgctggtatgtacgcacgtgcaaggttcaccataaatcctgacaaggtttacaggattgcaatgacaaagctcaatacatctgctgcaatccttgaagtgatgggtgcacccttagctggcactgatgtcagagcatatgttatgtctggtggaggccctaaactaaaggacttcaaattcagggttggtggcaaacggtgctttcttatcttccccatcaaaggatcagaaagaaagggtcttgtaagtgttgaggtcaagaagaaaaaaggacagtatgacatgaagctgcttgctgttgacataccgatggcgacagggcctgaccagcggctattccttgtcggcgacgagcaggagtacaaggttggtggaggcttgatatccgagctgcgggatcctatagtgaaggctatggctgcagaaaaggagtttgattatcttgatgaaagagaggacgcagaggatgagcgcagggagcgagaggaggccgaggaagaggcagccgaagcgttaaggcgagaggaggacagattacgggaggaggcgaaagagaggcagcggcgagaagctgagaatcttgagaaaggcagctgacccaattgacccacaccgcttttttcttcgtgttgtgcatttctcaactttacctcctcactcttacatgcgtagcgatcagcattttcgcggcgacggaaagattgcgtctgagtttcagagaggcggtttcgcctttcacagcgtgtcgatagggtaataaattttggctgctcctcaaaatggtttactcgggagcgcattgtgtaatttagtggctgcatgaatgaatgatggctgtagcct

SEQ ID NO: 3465 - DNA, 760 bp, Triticum aestivum
acagtataacagcaaggctctttgttgccattggaagaggagagatgcttccgtccaggacactcgtcttctcctcctgcaagtctggctgcaagcactcatcgatgactactcatggctacaatgcagctgccggtcatttgataggaagcttgtcgaggaagggattgggcagacaatcctgacacttcctttggaagaccagcggtctatattactgtcatggctcgggaggttcttgaaattaggcgataactgtccgaatttgcagagggcattcgaggtatggtggagaaggactttcgtcagaccttatgtcaaccaagcaaggtaatgtctgtcctatgatcaaacagaagctcatcttgaaacgatagggaagagtagtgattgtagccatagattctttcggggattgtcgtggtcaatctgatagtggacatgaaacccggtgagaatttcagtggctagtttttccttactgcgtaaatgtcgatgacacaggaaatttgtatgactgcacgttttagcctatgatgtaaaaccatatgcttttccagtagttgttataagaaaacctcgatcaacagctccttctccattgtacttcttttttactttcaagttgttatcaaatatgaccagcatttccccttctccttgttagttgaaggttgcgcatggattgtccaaggactgtacacattatttccttctccagcagaaattcagggttgtaaacagcccatatagcaatcaa

SEQ ID NO: 3466 - DNA, 581 bp, Triticum aestivum
taagaagcacaataaagtcggtatgaagcctatgagaggatggcaatacagatattgacagggctggaataccttcacagtcagaagccagcgattattcatagggatttaaagtgtgacaatatattcataaacggtcatgatggacaagtgaagattggtgactttggtctggcgacatttttgcatcaacggaaaaccagaagtatcaaaggcacattagagtttatggcaccagaactcttcaccgggaattacaatgagttggtggatatatattcatttgggatgtgcatgcttgaaatggtgacatgtgaatatccatacagtgaatgcgaaggcaagccatggatatacaagaaaatttctgaaggtataaaaccagctgtgctttccaaggttgaagatgcagaagtaagaggtttcatagaaatctgtttggctcccgcagctgaaagactttgtgcaagtgagctcttgaagaactgtttcctccagaaagacaagcctatcccaatcccagcgcctcctatttcagtctccctggtcttgagtgtgactaaagatgggcggcagtctgc

SEQ ID NO: 3467 - DNA, 571 bp, Triticum aestivum
ccaagattagcatccctgaggaaaataatggccagtctgaagaagattcctgttctaacagatcctgcacagcactcgaggctcggtctagtgcctagaagagctgatctggacatgaaccaacatgtcaataatgtcacttacattggttgggtcctcgaaagcatacctcaagatattattgatacccacgagttgcaaacaatcactcttgactacagaagagaatgccagcatgatgacatagtcgattctctcacctatatagaggaaggggatgagataaattctaatggatctctgttttcagcgccgcacccagaagagcagcgccagttcttgcactgcttgagatttgctggggctggggatgagatcaaccgtggtcgcaccgtgtggaggaaactagctagatagaaagtgatatgtatttgctcatatgtattgtgctgttccatttgttttaccgttttgctctttgcgaccggcgccgcatcacgagagaatcaactgtacccggaattttgtgattacgtttgtgacctgtgtaacaatcaatgccatctgtggc

SEQ ID NO: 3468 - DNA, 671 bp, Triticum aestivum
atgatgaaccgaatacacgcagacttcaaagagtcagtgacgaagtcagggatgaggtgtttatccactgtccgaagagtccaagattagcattccctgaggaaaataatggcagtctgaagaagattcctgttctaacagatcctgcacagcactcgaggctcggtctagtgcctagaagagctgatctggacatgaaccaacatgtcaataatgtcacttacattggttgggtcctcgaaagcatacctcaagatattattgatacccatgagttgcaaacaatcactcttgactacagaagagagtgccagcatgatgacatagtcgattctctcacctatatagaggaaggggaggagataaattctaatggatctctgttttcagcgccgcacccagaagagcagcgtcagttcttgcactgcttgagatttgctggggctggggacgagatcaaccgtggtcgcaccgtgtggaggaaactagctagataaaaagtgatatgtatttgctcatatgtattgtgctgttccttttgttttactgttttgctctttgcgaccggcgccgcatcacgagagaatcaactgtacccggaattttgtgattacctttgtgacctgtgtaacaatcaatgccaatctgtggcaaatgttggacctcagctg

SEQ ID NO: 3469 - DNA, 728 bp, Triticum aestivum
tactcccgatgttagaccggtatgtgctgagcagtaagatccagagtgcacttggatatatggcgccagaattcgcatgcaagacggtgaagatcaccgagaagtgcgacgtctacggctttggggtgcttgcactggaaatcttgacgggcaggaggcccgttgagtacttggaagatgacgtggtcgtgctatgtgacttggtgagaagcgcgctggaggaaggcaggctggaggactgcatggatccgcgactgtgcggcgagttcgcgatggaggaggccattccgatcatcaagctgggcctcgtttgcacatcgcaggtgccgtcgaaccggccggacatgggcgaggtgttgagtatacttgatgtggtgaggagccctcaggacagtccaggggatgagatggtataagcaaggtctcttttgaaactctgttctgtgtgtgcctgggtttttgtttttctactagatgcatatatgatgcccggttgggaagaagggaggaagcaaagagtggtgatgcattgtggaatgcttgtagcttgtagtttggttctgaaatcttagggggttggcgatgctgttttgctgcttctctgcgattctttggttcattccttggatgaaactgtagctttctctgctcgtgtggggtattgccgcgagaggttgtggccggcatctcaggcacccctgaaatgactgatatctgattgccttctt

SEQ ID NO: 3470 - DNA, 564 bp, Triticum aestivum
  N_region (142)..(164): n = any nucleotide
cgacgcccaccggtgtacgtccagtggcgacgccttccgcgaccactcgtgctgggagcggcccgaggaacatggacaccccgcgcaccgtctacaaggtggacccccagcagcccgggctccgacgtcggccggccgagannnnnnnnnnnnnnnnnnnnnnntccatcgtcttccgcgacgccgaccccgcctactccaagcgcctgctcgaccgcgccatctccgtgtttgagttcgcggacaagtaccgcggggcgtacagcagcagcctgtactcggcggtgtgcccgtgctactgcgactacgacgggtaccaggacgagctgctgtggggggcggcgtggctgcacaaggcgtcgcgccagcgggtgtaccgcgactacatcaagaagaacgaggtggcgctcggcgccagcgactccatcaacgagttcggctgggacaacaagcacgccggcatcaacatcctcatctccaaggaggtgctgatgggcaaggactccttcttcaagtcgttccgggtgaacgccgacaacttcatctgcaccctcctccccggca

SEQ ID NO: 3471 - DNA, 565 bp, Triticum aestivum
ctccttgccgacgatgttgtcttctcactctgaaggccagtgcagctatggggtatcttgcccctgagtacgccacacgggacgcttcaccgagaagagcgacgtctttgcctttgggattgttgttctccaggtcatcacaggcagaagggccgtctcacaagtgaagataggcactgctaccagcgacctcgaaggcctgatagatcccagcctcggcggcatcttctcgaggaccgaggctgccaagcttgcagaggttgccgcacattgcacaagcgaagcggcgagccagaggccgatgatggatgctgtggttcagcaactcagcggctgatgccgaggatccgaaccgggctgatgaagatgtcttttgggaggccatttgtagtagtaagctggaggacggtaatgatccagttgccacccaatgaggtcttttgtaatagtaatctgacctgctaatgtgggacgcgtctccactaattcactagtcactttccaagtgatctcacttctcaccatttcatggttaagtatcacatctctttgccactggaatatg

SEQ ID NO: 3472 - DNA, 1040 bp, Triticum aestivum
caggacgccatgggggaaaaggtcggcaagttcatccagctgatggtgacgttctttggaggcttcgctgtggccttcgcgcagggatggctcctcaccctcgtcatggtggccaccatcccgccgctcgtcctctccggcgcggtcatgtccaatgtcgtcgccaggatggcgtcgctggggcaggccgcctacgccgaagccgcggtcgtcgtcgagcagaccgtcggctccatcagaacagttgcatctttcactggggagaagaaagcggtggagaagtacaacaagtcgcttaagtgcgcttacagttccggtgtccgggaaggcctagtcgctgccatcggcatgggcaccgtcatgatgctcctgttctgcggctactccctgggggtatggtatggagccaagctgatcctagagaagggatacacaggtgcccaggtcatgaatgtcatcttcgcggtgcttaccggctcactagctctaggacaggcgtcaccaagcatgaaagcattcgcaggaggacaggctgcagcatacaagatgtttgaaacaatcaacagggagcccgaaatcgatgcatacagcacagagggtaggatgctagatgacattcagggggatatcgagttcagagatgttcacttctcctacccaacaaggcccaatgagcaaatattcagaggtttctcccttgccatacagagcgccaaaaccgttgcattgttggccagagtgggagtggaaaatcaacagttatcagcttgatcgaacggttttatgatcctcagctcggagaagttctaatagatggagtgaatatcaaggagttgcagttaaagtggatcagaagtaaaattggcttagtgagccaggagccggccctgtttgctgctagcataagagataacatagcttatggtaaggacaatgcgacagatcaggaaatcagagctgcggctgagcttgctaacgcctccaaattcattgataaattaccccagggtttcgctacttcggttggtgaacatggaaca

SEQ ID NO: 3473 - DNA, 383 bp, Triticum aestivum
tataaaggaggtgatggttaatgggatgcttgtgaagataaagtattgcgacacctgcatgatttaccggcctcctcggtgctctcactgttcgatatgcaacaactgtgtggagcgattcgaccatcattgcccctgggttggacaatgcattggtcagcgcaattaccgatactttttcctatttgtttcgtcctcgactcttctttgcatttatgtctttgccatgtcggcactacacatcaagtttctcatggacggagactatcctacagtatggaaggctttcaaacactctccagcttgcttggtgcttatgatatattgtttcattgctctatggtttgttggcgggctcactggatttcattcgtatctcatta

SEQ ID NO: 3474 - DNA, 675 bp, Triticum aestivum
cttccgcagcaaatgcccaatgtctttgatcaagaaagtaaagtagtcgggatgacaggtgttgatgagttgaccagtcctattcaaccttatcctaatccagaaaatctctctttatactacaaagatccacaaggtcgaattcaaggcccattttctggtgctgacatcattggctggtttgaggctagttattttggtattgatttactggttcgagttgcaaatgctcctcctgatgcgcctttcttaatgcttggagatgttatgcctcacctacgagcaaaggcagggccacctccagggtttagcagcacaaaatcaagtgatatgctaatgccggagactccacctacagggaaatttgtcagctccagcagcacacatagcggatcagctggtgtcggtatttttaacagtgggccaagcaggaatggcggtgctgttgaagctcagaatcgttttctggagtcactgatgtctaatggtatgcaaggtccttcagctgctatgactggagggctgaatgaatataacagcagtagctttggcaacattgcgatggccggaggcgagatggggaatagcatgaattatcttttggcacagcagagattgttggaaagacaaaatcttcccaaaatgctgttccatattggtctgcagatggtattc

SEQ ID NO: 3475 - DNA, 540 bp, Triticum aestivum
cagctccgcaggaggcgagcttaactccgcaatggcatccggcttgaagaatatgaaacgcgagagggacatgctctacaagcagatgctgaagaagctcaccaacggggacaaggagggcatctacaccagatgggggatcgatctgggctccaaacagcggcggcttcagctatctcgcctggtatggacgcgggctgacatggagcatgtccgagagagcgcctcgctggtggcgaggctgatcgacttggttgagccagggcaggctctcaaggagatgttcggcctcaacttcacgctggctcccagaaccgaacgccggtctttcagcctgctgggcgcttgatctttgacgtatgtatggaggtagaagggtttggtttacgtagtacaggaggttcacttaacaggaggagaggactatgctccaccgcatcgattggtttcactcgtgtctctaccttgttcttgtttttgcttgtgtattgtgtgcgtgtgcgtgtgcgatattcctgtgtgcaatcttacaaaagtgaa

SEQ ID NO: 3476 - DNA, 719 bp, Triticum aestivum
cgtctacatggaagtggagcacaggagactgtccttcatcctgagctcgttcagcaccagctccgcaggaggcgagcttaactccgcaaccgcatccagcttgaagaatatgaaacgcgagagggacatgctctacaagcagatgctgaagaagctcaccaacggggacaaggagggcatctacgccagatgggggatcgatctgggctccaaacagcggcggcttcagctatctcgcctggtatgggcgcgggctgacatggagcatgttcgagagagcgcctcgctggtggcgaggctgatcgacctggttgagccagggcaggctctcaaggagatgttcggcctcaacttcacgctggctcccagaacccaacgccggtctttcagcctgctgggcgcttgatctttgacgtatggatggaggtagaatggtttggtttacgtagtacaggaggttcacttaacaggaggagaggactatgctccgccgcatcaattcgtttcactcatgtgtctctgccttgattttgcttgtgaattgtgtgtgtagaagtgtgtgcgcgcgcgatattcctgtgtgcaatcttacaaaagtgaatcaatcagacagtacagttctgactatccgtgctgtcgtatgcccgtttgtggggattcgtccatctagtccatcttttttgccgcaaaagcgaagtcaagcaataataagggaactt

SEQ ID NO: 3477 - DNA, 1005 bp, Triticum aestivum
cccaactcaggaccggcgacgacctccgctcttcgccaaatcccagctgaacacattcttggggacaacccgatgaagatgagctacgtggtggggtacggcaagaagacccgaagcggctgcaccaccgtggggcgtccacgcccaagaacgggatcaagtactcgtgcaccggcgggaacaagtggcgcgactccaagaaggccgaccctcacgtgctcgtaggcgccatggtcggcggcccggacaagaacgacaagttcaaggacgcgaggatcagctacgcgcagaacgagcccacgctggtcggcaacgccgggctcgtcgccgcgctcgtcgccatcaccaacagcggacgcggcacgggcgtcggcgccgtcgacaagaacaccatgttctccgccgtgccgcccatgttccccgccgccccgccgccgccggccacgtggaagccctgaggagaggtctgcccgaccggccggttttacgccgacgttgagcaggtcgaacacttcgattgggttcggttggtagtgcaattttctggccatcatgtaaaattcttttgtattatacacacgttaaccgtggcgcgcgatacgacggtggcatgcctcacgcatggcctgtactactgtagatgtttcttgtgcacaatttgggtatggacaattaatggatacttgttgattcccaaaaatgaacgccgaagaaaaagggggcggccgccaaagggccccaggtttacatcccgggggaagccccgatgaagcccatctaaggggcgcctacatcaagacgcagggggaggcgtatacacaccgggggcggggaaccccgtgggggccccaattatcgggggtggggaccccctttaaacatagggggaggaactagcagccccgtcggcatggcggtcgcgaccaaggcagtcatgaccagacaatcgtgcacgtccgcggcggaagggagtcagccttacctaatgaacgacaagacacatct

SEQ ID NO: 3478 - DNA, 575 bp, Triticum aestivum
ccatctccgatcgtgctgtcgagaggctgagaagattgccggaccaatctatcctggtgaatactggtatgattaccgtgcagggttctggggtgtaatgggccaatcgtgccttggcatgatacctcccgtacattccgcaacttaactatcctatgcccaagaactgcgccggtggaaatactggtatttgtatcaatgggagagaacttcaccagaaagatttcgacttgctcgtgggtcgaggtctctcagaatctcctgacagatcatataaggttgagatgtctggtaaagtgtacgatgaagtctctggtgaagaactttattgtcttggcaaacttgcaccaactgtcgagaagatgaagcgcggtttcggtatgcgccccccaaggaccatccgttgagaaagaggggtcaaaaaattggcctcaggatctgggtaactcaccgcgccagaactggggatatcgtggtcctggagatcattcgccgagtcggtcgatagacgatagcccacattgtggactacataaaatcattttgcaagttctggttctcctatgtagctatga

SEQ ID NO: 3479 - DNA, 532 bp, Triticum aestivum
ggtgctctcaagttcactagcagtgagaaacttgtgggcatgctgaagaaacaggcggaatctggtagaccctatggtgcaatatgcgcttcccctgcttacgtcctcgagccacacggattactcaagggtaagaaagcaacatcatttccacccatggcgcacctgcttacagaccagagcgcgtgcgaatacagggtcgtcgtcgacggtaaccttatcacgagcagagcgccagggaccgccacagagttcgccctagccatcgtcgagaagctatttggtgaggagaaagcggtcgcattagccaaggagttggtttttatgtgacaatgtgcatcgttgaggctgggagtgcccattttacatggctaatatggggctctatctaggttggtcacttgttgattatgtataagctataggtacacatattaaacaatcccgtctgatatatctgatgaatgtcagtttgaagatctttaataaggttgacatggactgcaaagcagcaattgttcataatggaatt

SEQ ID NO: 3480 - DNA, 1267 bp, Triticum aestivum
catatggctgttgccgacaaatggattgaacttctcaaaggaaacgatgaagcttgggagatgggtaatattgtgcacacactaacaaacagaaggtggctggaaaagtgtgttacttatgctgaaagtcacgatcaagcacttgttggagacaagactattgcattctggttgatggacaaggatatgtatgatttcatggcgctgaacggaccttcgactgacctaatattgatcgtggaatagcactgcataaaatgattagacttatcacaatgggtctaggaggagagggttatcttaactttatgggaaatgagttcgggcatcctgaatggatagactttccaagaggcccacaagtacttccaagtggtaagttcatcccaggaaacaacaacagttacgacaaatgccgtcgaagatttgacctgggtgatgcagaatttcttaggtatcatggtatgcagcagtttgatcaggcaatgcagcatcttgaggaaaaatatggttttatgacatcagaccaccagtacgtatctcggaaacatgaggaagataaggtgatcgtgtttgaaaaaggggacttggtatttgtgttcaacttccactggagtagtagctatttcgactaccgggtcggctgtttaaagcctgggaagtacaaggtggtcttagactcagtacgctggactctttggtggatttggtaggatccatcacactgcagagcacttcacttctgactgccaacatgacaacaggccccattcattctcagtgtacactcctagcagaacctgtgttgtctatgctcctatatgaactaacagcaaagtgcagcatacgcgtgcgcgctgttgttgctagtagcaagaaaaatcgtatggtccaatacaaccaggtgcaaggtttaataaggatttttgcttcaacgagtcctggatagacaagacaacatgatgttgtgctgtgtgctccccaatccccagggcgttgtgaagaaaacatgctcatctgtgttattttatggatcagcgacgaaacctcccccaaataccccttttttttttgaaaggaggataggcccccggtctctgcatctggatgcctccttaaatctttgtagccataaaccattgctagtgtcctctaaattgacagtttagaatagaggttctacttttgtatcttctttttgacagttagactgtattcctcaaataatcgacatgttgtttactcgaagatgagaaataaaatcaga

SEQ ID NO: 3481 - DNA, 531 bp, Triticum aestivum
acatgttctacttcagaatcgagatgtgcctggtagggttaaatagtcagagcatggcagggatagattatatgtctgctaagtttggtaacgaggaggaccccgtggccattagtattgtgtcagctggtgtgtataggatgaccaaaagcttgagagaggtaatcttgcactggagaggagtttgcataggggtaatcccattagagtcgttcgcactgtgaaagacttgacttgttcaactggtaagatatacatatatgatggcctttaccagattagagaagcctgggtggagaaagggaaatctggtttcaatatgtttaaacacaagttgctcagagaacctggacaacctgatggcattgcagtgtggaagaagactgaaaaatggagggaaaatccatcctctagagatcgtgttatattgcacgacatatcatacggtgtggaaagtaagcctatctgccttgtaaatgaggttgacgatgagaaaggtcctagccacttcacctatacaactaaacttaa

SEQ ID NO: 3482 - DNA, 686 bp, Triticum aestivum
cttgaagctgggagtatcatgatggaacgcttgaactttcgccctcaaataagaacacagaggattgggagaggttccaaggtgtcgaggtcggtgacatgttctacttcaagaatcgagatgtgcctggtagggttaaatagtcagagcatgcagggatagattatatgtctgctaagtttggtaacgaggaggaccccgtggccattagtattgtgtcagctggtgtgtatgaggatgccgaagatgatgatccagatgttctggtttacagtggacatggcatgtctggtaaggatgaccaaagcttgagagaggtaatcttgcactggagaggagtttgcataggggtaatcccattagagtcgttcgcactgtgaaagacttgacttgttcaactggtaagatatacatatatgatggcctttaccagattagagaagcctgggtggagaaagggaaatctggtttcaatatgtttaaacacaagttgctcagagaacctggacaacctgatggcattgcagtgtggaagaagactgaaaaatggagggaaaatccatcctctagagatcgtgttatattgcacgacatatcatacggtgtggaaagtaagcctatctgccttgtaaatgaggttgacgatgagaaaggtcctagccacttcacctatacactaaacttaa

SEQ ID NO: 3483 - DNA, 1550 bp, Triticum aestivum
  N_region (152)..(177): n = any nucleotide
atctgagccgcgtaaaaccctagccgtctccaaatcagtcacccgccaccgccgccaccgtccatggacacttccctggctgccgccgctgtcaccgcagaggcctccgcccccgccgccgcatcaacggaaccttccgcggctcctgatgnnnnnnnnnnnnnnnnnnnnnnnnnngctgccggcgccggcgccgaagacctcgcggggggcgtggcggcattgagcctggacgagcggttcgacttgctgatgagcataggcgaggagtgcattcagcccgacgagcttaagcggcttctgcagaacaagcccgtccctatctgctacgacgggttcgagccctccggccgcatgcacattgcccagggtgttgtgaaggcaattaatgttaacaagatgatcagagcgggatgcaaagtgaaaatctggatagcagactggtttgcacagctaaacaacaaaatgggtggcgatctgaaaaaaatccagactgtcgggcgctacatgattgaaatatggaaagcagctggtatgaaccttgatggcgttgaattcttatggtcttcagaggaaattaataggcgtgcaaatgaatactggccacttgtaatggacattggcaggaaaaataatatcaaaagaataacgaggtgttgtacgattatgggtcgctctgacaatgaggaattgactgctgcacagatcttctatccttgcatgcagtgtgctgatatattcttcctgaaggctgacatatgccagttgggtatggaccaaaggaaggttaacatgttagcaagggaatattgcgatgacatcaaaaggaaaaacagccaattattctgtcacatcatatgctccccggtttcaaagaaggccaggagaagatgtcaaagagtgatccgacatcggctatctttatggaagatgatgaggctcaggtaaatttgaagataaagcaagctttctgtcctcccaaaattgttgataaaaatccgtgcctggagtacatccagtacattgttttcccttggtttgacaagtttgaggttgtccgcaaagaaaacaatggcggtaacaagacatttttaaccatggatgaacttgttgctgattatgaagcgggtgatttgcatcctgccgacgttaaacctgctttggcgaaagcgatcaatgaaatattgaagcctgttcgtgaccacttcaacagcagcagtgaagccaaaattctcctcaatactgttaagaagtacagggtaagcaattgaggagcaaataccttcctggtcattacatggacacccaacagacaatggaagcatacacattttggttggcagagtttcgtgggcacaatttttggcaatactaatacctctatagctgatatgcatcagaaactgtcgtgattatgttgatcagtgtacaatatctttgcgtgtcaccttcaattgagaagttataagatgcttggcgtgacattgtagctaacatttaaggtaaacgcattaaatcaggcgactgattttgtcaattgtcagtccgtt

SEQ ID NO: 3484 - DNA, 525 bp, Triticum aestivum
actgcatttcctcttgctctgatattatctcctacccgcgagctatcagtccaaattcatgaagaagcaaagaaatttgcataccagactggtgttaaggcttgtgttgcatatggtggagcaccattcatcagcagttgagagaactggaaagaggtgttgatatactagtggcaactcctggtcgtttgatggatctgctggagagagctagagtatcactgcaaatggtgaattacttggctcttgatgaagctgaccggatgctcgatatggggtttgagccacagatacgcaagattgttgagcagatggacatgccccctcgtggtgtgagacagaccatgctgttcagtgctacttttccaaaggagatacaacgcctggcatcagatttccttgcagactacatcttccttgctgttggaagagttggctcaagtactgatttgattgcacaaagggtagagtttgtccttgaagcggataaaagaagttacctcatggaccttattcatgcgcaga

SEQ ID NO: 3485 - DNA, 614 bp, Triticum aestivum
cactgcatatgtggtccactgagatcattgtgcacggttgtccggctaccacatcgatccttaccagaatgacaaggcctccgcactgcttgtggacttctttgggaagtgccaggaagacccgagccactggaacaagatctcgcagggaggactccagcgcatcgaggagaagtacacctggaagctgtactctgagaggctgatgaccctttctggtgtctatggtttctggaagtatgtctccaacctcgacaggcgcgagactcgtcgctaccttgaaatgctctacgccctcaagtaccgcaaaatggctgcaactgtcccattggctgttgagggcgagacctcgggcaaatgatttgtccttaccagagaaataaatggcgggcgagcgctccgctttaccgttcttgattcagtgatgaagcacagatcggagagtgttatgcctttgattgtcctttgttaccgttcttgattcagtatgaactttagttcctgttgaggccccggccgtgttgtcgcggtaggggaactggatggatgctgtgttgttggtactttctcatggatacagtatttgaatgaatgaataagatagtctttgtttt

SEQ ID NO: 3486 - DNA, 1064 bp, Triticum aestivum
cttacctccctccatactgagattgaggagctactcttcagtgatattgagaatgctgagcacaaatttgtgctgaaggacaagaagaagccgatcatcttctcgatggctaggttggaccgtgtcaagaatatgactggcctggtagaaatgtatgggcggaatcctcgcctacaggagctggtaaacctagtggttgtctgtggtgaccatggaaaggtgtccaaggacaaggaggagcaggcagagttcaagaagatgtttgatcttattgaacagtacaacctgattggacacatccgctggatctctgctcagatgaaccgtgtccgcaatggtgagctctaccgctacatctgcgacatgaagggagcctttgtgcagcctgctttctatgaggctttcggtcttactgtgatagaggccatgacatgtggccttccaacattcgccactgcatatggtggtccagctgagatcattgtgaatggtgtgtccggctaccacatcgatccttaccagaatgacaaggcctccgcactgcttgtggacttctttgggaagtgcaaggaagacccgagccactggaacaagatctcgcagggaggactccagcgcatcgaggagaagtacacctggaagctgtactctgagaggttgatgaccctttctggtgtctatggtttctggaagtacgtctccaacctcgacaggcgcgagactcgtcgctaccttgaaatgctctacgccctcaagtaccgcaaaatggctgaaactgtcccattggctgttgagggcgagacctcgggcaaatgatttgttcttaccagagaaataaatggcgggcgagcgctccgctttaccgttcttgattcagtgatggagcacagatcggagggtgttatgcctttgcttgtcctttgttaccgttcttgattcagtgatgaactttttcctgttgagtccccgtgttgtcgcggtaggggaactggatggatgctgtgttgttggtactttctcatggatacagtatttgaatgaatgaataagatagtctttgtttt

SEQ ID NO: 3487 - DNA, 861 bp, Triticum aestivum
ccaaaccaaatcccaaagcgacaacagaaaagctcgagctcttgcttgggtggacgagcgagcagagcgccgatcgcagcagtagcagcaggaggaagatgtcgtcggtgttcagcggcgatgagaccgcccccttcttcggctttctcggcgccgccgcggcgctcgtcttctcatgtatgggagcggcctacgggacggccaagagcggcgtcggcgtggcgtccatgggagtcatgcgcccggagctcgtcatgaagtccatcgtgcccgttgtcatggctggagtgctcggtatctacgggcttattatcgccgtcatcatcagtaccgggatcaaccccaaggccaagccctactacctcttcgacggctacgcccacctctcgtccggcctcgcctgtggccttgcaggccttgctgctggcatggccatcggcattgttggtgatgctggagtcagggcaaatgctcaacagcccaagctgtttgtcggcatgatcctcatcctcatcttcgcagaggcgctcgctctctacggtctcattgtcggcatcatcctgtcatcccgagctggccagtctcgtgctgattaggcatgttccatacacgcggccctgtgtgccctcttgttttatattattcagacagcaaactgagctctagaggttatcatgtctagttttcattcttctgtttggtggagaaaaaaacatctgtagcaaagggagctttgcccttgatgtaccattctttttccgtctggatgctgggtgggggttgatgcttatttatgcacagttatttaccttttgggtctggctggacggtgtaatctggtgaataagcgagaacttaatg

SEQ ID NO: 3488 - DNA, 714 bp, Triticum aestivum
gcggctctcgtcttctcatgtatgggggcggcctacgggacggccaagagcggcgtcggcgtggcgtccatgggagtcatgcgcccggagctcgtcatgaagtccatcgtgcccgttgtcatggctggagtgctcggtatctacgggcttattatcgctgtcatcatcagtaccgggatcaaccccaaggccaagccctactacctcttcgacggctacgcccacctctcgtccgggctcgcctgtggccttgccggacttgctgctggcatggccatcggcattgttggtgatgctggagtcagggcaaatgctcagcagcccaagctgtttgtcggcatgatcctcatcctcatcttcgcagaggcgctcgctctctacggtctcattgtcggcatcatcctgtcatcccgagctggccagtctcgtgccgattagccaattaggcatgttccacacacgcggccctgtgtgccctcttgttttatattattcagacagcaaactgagctctagaggttatcatgtctagttttcattcttctgtttggtggagaaaaaaacatctgtagccaagggagttttgcccttgatgtaccattcttttcccgtcaagatgctgggagggggttggtgcttatgtatgcacagttatttaccttttgggtctggctggacggtgtaatctggtgaataagcgagaacttgcaatgc

SEQ ID NO: 3489 - DNA, 676 bp, Triticum aestivum
ggcttgaacaagtgagcatgatgctgtagggccattccataattggcactgtcagtagacggaatcttgtggcatggggtaataatgaatatggccagctggggattggagatacccaaccgagatcacaacctatccgtgttgaagggctatctaacctctcattggttgacattgctgctggaggttggcattcagccgcattaactaaagaaggagaggtatatgcttggggaagaggagaacatgggaggctcggctttggggatgataagagcagtcacatggtgccgctaaaggttcagcttctagctggcgaggatattgttcagttcagcaccagggttcactcttctaaatgcttgcaggtatcatgtggagggacccattcagttgtgctaaccagtgatggccgaatgttctcttatgggaggggcgatcatggccgtctaggcgacggtaggaaggtgactacgggtcacccaatggaagtgcccataaacttgccgccaccaaagaccagcaccagctccgaagggctatggcaagcgaactacgttgcctgtggcggacgacacacactcgccaccgtgacatggaccgatatgtaacagggcatgatcacttgagtgtatgaattgaaattgtggtaacagtaatggagaataagaagtag

SEQ ID NO: 3490 - DNA, 1043 bp, Triticum aestivum
gctcgggcacccgccggagaccaagacagagagctccccggcgcatgtcgacgccctcatcggggtcaagatcgtgcaggcagcgatcggcgggtggcattgcctcgcggtggacgacaagggccgggcttacgcttgggggggcaacgaatatgggcagtgcggggaggagcctgagaggaaggaagatggcacaagggcactcaggagggacatccccatcccacagcgatgcgctctcaagctcaaagttcggcaagtagctgcgggggggactcactcagtggttttgacacaagaaggccatgtctggacttggggacaaccgtggcctccgggtgatatcaaaaaaatatctacgccagtacgtgtgcaagggcttgaacaagtgagcatgattgctgtaggggcattccataatttggcactgtcagtagacggaatcttgtgggcatggggtaataatgaatatggccagctggggattggagatacccaaccgagatcacaaccgatccgtgttgaagggctatctaacctctcattggttgacattgctgctggaggttggcattcagccgcattaactaaagaaggagaggtatatgcttggggaagaggagaacatgggaggctcggctttggggatgacaagagcagtcacatggtgccgctaaaggttcagcttctagctggagaggatattgttcaggtatcatgtggagggacccattcggttgtgctaaccagtgatggccgaatattctcttatgggaggggcgatcatggccgtctaggcgacggtaggaaggtgactacgggtcacccaatggaagtgcccgtaaacttgccgccaccaaagaccagcaccagctccgaagggctatggcaagcgaactacgttgcctgtggcggacgacacacactcgccatcgtgacatggaccgatatgtaacaaggcatgatcacttgagtgtatgaattgaaattgtggtaacagtaatggagaataagaactagaagttgtgcacttcaggcttcat

SEQ ID NO: 3491 - DNA, 672 bp, Triticum aestivum
gaagatcctgctctgaacttctcaagatctgcttgaaaatgctggggctgtgttccgcaccagcgagaggtttctaggtgctatcaagcagtatttgtgcctatcacttttgaagaactgtgcctcgtcacatatgattgtttttcagttatcttgttctatttttattagcttggtttcaagatttaggccaggattgaaggcagaaattggagtattttttcccatgatcattctaagagttctggaaaatattgcacaaccaaattttcaagcaaagatgatagttcttcgttttttggagaagctctgtactgattctcaaatcttggttgacattttcatcaattacgactgtgatgtccactcatcgaacatatttgagaggatggtcaacggtctgcttaaaacagctcaagggcctcctgcgggtattgctaccacattggtaccgcctcaggatacgacaatgaagagtgaagcaatgaaatgcttagtttctatcctcagatccatgggagatcggatgaataagcagctaagtattccagatcctgaatctcctaagattgaatcagagcaaaacgataatgatggtggacatgagtttccccagacagagatcctgggagatggtctagcgaggtatccgattcaattccgaagtttcaa

SEQ ID NO: 3492 - DNA, 996 bp, Triticum aestivum
attacgactgtgatgtccactcgtcgaacatatttgagaggtgctgcatcactcacttttcattatcattactatagttgactagtgaggttttattctcataaatagctgcagaaacctatttactattgtgtttcattttctgtatgtttttccgacaggatggtcaacggtctgcttaaaacagctcaagggcctcctgcgggtatcgctaccacattggtaccgcctcaggataccacaatgaagagtgaagcaatgaaatgcttagtttctatcctcagatccatgggagattggatgaataagcagctacgtattccagatcctgactctcctaagattgaatcagagcaaaacgataatgatggtggaaatgagtttccccagacagagatcaatggagatgcttctagcgaggtatccgattcacattcagaagtatcaaatggggtttcagaggctgcatctttggagcagcgtcgagcttacaaaatggaacttcaggagggtatcgctctgtttaaccggaagcctagaaagggaattgaattcttaataaatgccaacaaggtcggggagtcagctgaggatatagctgctttcctgaaaagtacttctggcttgaacaagactatgattggtgattatttaggggaaagggaagatttatccctcaaagtcatgcatgcatatgtggattcttttaattttcagaatatggaatttgatgaagcgatcagagcctttcttcaaggttttaggcttcctggagaagctcaaaagattgatcgggttatggagaaatttgcagagcgttactgcaaatgcaacccaaaggccttttcgagtgcagacacagcttatgttcttgcttattcagtcataatgcttaacactgatgcacataacccaatggtcaaaaataagatgtcaccagaagatttcataagaaacaatcgtggtattgatgatgggaaagcctaccagaagaat

SEQ ID NO: 3493 - DNA, 686 bp, Triticum aestivum
tgatctttctttatggtgttcaacaatgttgtctcttcatgcacgctccgcgtgactcgcacattcagttgctaaagcgcatccggcgctaccttcgtggtcctcgaagcagcaacacaccgtctcgcgctccagtgcggaggctgagtaccgggctgtcgcgcacgccgttgccgaggcagtctggttgcgacaactccttggcgagctccaccaggctcccacgcgtgctaccgtggtctattgtgacaacgtgagcgcgatgtacatgtcaactaatcctgtgcaacaccagcgtacgaagcacgtggagattgacttgcacttcgtccgggagcgtgtgtcgctcggcgagttcgcgtcctccatgtcccgacgagctcccagtttgccgacgtcttcaccaaggggctacggacgagcatcttcctcgacttccggtccaacctcaacgttcgggagccccacgtttcggctgcggggggctgttggaagtctactacatgacctgatggacaacggccttgaccaggtccttcggatagttcaggaggtgcgtgcactacgtgcgcacgtccaccacgcatgcatgacatgctcggccacggccattgtacacgatctctccctcacccccttgtacctctccgcatgtataaataaccttgcgagatatgaatacatgt

SEQ ID NO: 3494 - DNA, 792 bp, Triticum aestivum
gcagccgccgccagcagctgcgcaaaggctcgacaaaccctaaccctagctccatagctagcttagcttccttcctctcgatctagctagagccatggcgccgaccaagggcgaggggccggccatcggcatcgacctcggcaccacctactcgtgcgtcggcgtgtggcagcacgaccgggtcgagatcatcgccaacgaccagggcaaccgcaccacgccctcgtacgtcgccttcaccgatctcggagcgcctcatcggcgatgccgccaagaaccaggtcgccatgaaccccagtcaacgccgtcttcgatgcgaagcgtcttatcggcagaaggtttgctgatgctcctgtccagagtgatattaagatgtggccgtacaaggttattcctggcccagcagacaagcctatgattgtagtgcagtacaagggtgaggacaaccagttttcagctgaagaaatttcttccatggtcctcatcaagatgcgtgagatcgccgaggcttacctaggagtaactattaagaatgctgttgtcacccgtgcctgcttacttcaatgattcccagaggcaggcaaccaaggatgccggtgttattgctggtcttaatgtgatgcgtatcatcaaacgagccaacagcagctgcaattgcctatggtcttgacaagaaggctaccagtgtcggtgagaagaatgtgcttatctttgaccttggtggtggcacttttgaatgtctctctccttaccattgaggagggatttttgaggtgaagcaccggctggtac

SEQ ID NO: 3495 - DNA, 711 bp, Triticum aestivum
caagttttggatctctgcagattgtttatgggagaacgatggaagttgcgagggatatgggtcctcgtgcttttccggtgaaggaggtacacaaaatagcagtgttagatattaggttagcgaatgctgatcgtcatgcagggaacattctagtgtccaaggaagaaggtgccacctgcaagctgattccaattgatcatggttactgcctgccagagaagtttgaggattgtaccttcgagtggctttactggcctcaagcccgtgagcggttcagtgatgaaaccattgcatacattgaatctctcgacgcggaagaggacatcaagcttctcaggttccacgggtgggagctgtcttcaagctgtgcccgcgtcctgcgcatcagcaccatgctcctgaagaagggcgcggcgcgaggcctcacaccctatgacataggacgtatactgtgcagggagactgtgaatagagattctgtgatcgaggacatcatccaggaagcggagggcgccgtcctcccggggacgagcgagaacctgttcctggagacggtgtcggagatcatagaccgctacctcctcgtcaagtaatatctgtttagaaacactcagaataactgatctagttgttcggctgtatccggtttgctgtaagtatgtttcacaaggcactgccccaggcctcctcctcaagggactaatgatttca

SEQ ID NO: 3496 - DNA, 695 bp, Triticum aestivum
aaatagcagtgttagatattagtttacgaatcctgatcgtcatgcagggaacattctagtgtccaaggaagaaggtgccacctgcaagctgattccaattgatcatggctactgcctgccagagaagtttgaggattgcaccttcgagtggctttactggcctcaagcccgtgagcggttcagtgatgaaaccattgcatacattgaatctcttgacgcggaagaggacatcaagcttctcaggttccacgggtgggagctgtcttcgagctgcgcccgcgtcctgcgcatcagcaccatgctcctgaagaagggcgcggcgcgaggcctcacaccctatgacataggacgtatactgtgcagggaaaccgtgaatagagactctgtgatcgaggacatcatccaggaagcggaggacgccgtcctcccggggacgagcgagaacctgttcctggagacggtgtccgagatcatagaccgccacctcctcggcaagtaatatctgtttagaaacactcagaataactgatctagttgttcggctgtatccggtttgctgtaagtatgtttcacagggcactgccccagacatcctcctcaagggactaatgatttcatttgtttctagccccgaacgattctcgtttgtttgtagccgctcaagaacatttccttctgtgaatatagatgtctgt

SEQ ID NO: 3497 - DNA, 694 bp, Triticum aestivum
acatgtggtgatgatcctcgcagtaagggagaacgcgaacccatcaggcgcgccagttggttggagcggagacggccgcaaattgcgcgtgttgcgcactgacaacggcggcgagttcacggcggctgaattcgcgtcgtactgcgccgatgagggcatccagcgccactactccgcgccgtacagcccgcagcaaaacggcgtcgtcgagcggcgcaaccagacggttgtggggatggctcgggctctcctcaagcagagagggatgccggctgtcttctggggagaggcggtgctaacagccgtctacatcctcaaccgctctcctactaaggcactcgacggcagaactccgtacgaggcctggcatgggcagaagccggcggtctctcatttgcgggtctttggctgccttgcgttcgccaaggagctcggccacatcggcaagctcgacgacaggagcactccgggagtcttcatcggctacgcggagggctaaaaggcctaccgcatcctcgacccaaagacacaacgtgtgcgcacagcgcgagacgtcgtgttcaacgaagggcgagggtggcaatgggacaaggcggtggacgacggctcgacgccgacgtatgacgacttcattgtcgagtacgctcacttcaaggaagctgggggagcaagcagctcctcttcaccgggcacg

SEQ ID NO: 3498 - DNA, 669 bp, Triticum aestivum
acaacaacaaataaaattacatttcactcctacagctcactacatcatagatagtacatggcaatcattcaattttactaggcagtatacgagtacatctcatttcaaataaacagtactgctcttggaagcaaaataggccgccacacgccatggtgcgccatcttactcgatctggccccaagtaaccagaagtgctgcttgctcccttgtaatagccaaaatggacggcacaaacaatgagcatcctcgtgccaagcccgatgggttccccacgatactcttctacccagctgggaagaaaagctttgagcctataactttcgagggggaccggacagtggtagagatgtacaagttcctcaagaagcatgccgccatccctttcaagctcaagcgcccggactcgtcagcggcacggaccgacagcgccgagggcccaggctcgaccaccgacagcgagaagagctccggctcgaacccgaaggacgagttgtaggggattagatacaccattgacaacaagtacgaggaggcgccgatgatgttgaaatcaggaggtggggaaggaatggctaagctaggtatcaaccaaccttggctgctgcaagtgtatgctgacaacacaaatacgtattaactactgtagaatccaatgaaataaaagca

SEQ ID NO: 3499 - DNA, 615 bp, Triticum aestivum
atgatgaggacgtcaaattgttgttggcaagagtctagatcaaatagttctggatgagtcaaaggatgttcttttggaggtatatgcaccatggtgtgggcattgtcagtcactggagcctatctacaacaagttgggcaagtatctccgtggcatcgactcccttgtaatagccaaaatggacggcacaaacaatgagcatcctcgtgccaagcctgatggattccccacgatactcttctacccagctgggaagaaaagctttgagcctataactttcgagggtgaccggacggtggtggagatgtacaagttcctcaagaagcacgccgccatcccgttcaagctgaagcgcccggactcgtcagcagcacggaccgacggctcaggctcaacgactgagggcgagaagagctccggctcgaacccgaaggacgagttgtaggggattagatacaccattgacaacaagtacgaggaggcgccgatgatgtcgaaatcgggagattgagaaggaatggctaagctaggtatcaatcaaccttggctgctgcaagtgtatgctgagaacacaaatacgtattaactactgtagaatccaatgaataaaagcaa

SEQ ID NO: 3500 - DNA, 900 bp, Triticum aestivum
ctcccacggcactgcgccgccgtctccccgaagctcagggatggaggggcgtaccctactcctcgaccaggcggcacccagcgcgtccgcccctactggccgctccgcctcgcaggcgacgggggacgaggccgcggctaaagtcgaattatcaaaaaggagctgtgtctcatgcaattcaaaggatttacaagccatgtcagaagattctgctaaaacgttgctagagcaggtggctggctgggaggtgaaaaatgagggcgacattctgaaattgcacagggcatggaaggtgaagaactttgccaaagggcttgagttctttcagcttgttgctgctgttgcggaggaagaaggtcaccacccagatcttcatcttgttggttggaataatgtgaaaattgatgtgtggactcactcagtcagtggtttaacatataatgatttcatccttgctgcaaagatcaatgaactcaagctaggaggccttttgagcaagaaaaaagctactgcccaggagtagctctcgttaatcaaaagatatccttttgtattttgtgaaaattgcatatgccgctccaaaagcaggattcgtccagtatatattctgggataaatgatggtttggcgatgctattggttcttcatgagaagttcaaggaggatttctgatattattttattgttaatgagtcatgccagtaagctttctgtatttgttcgccgtgaagagcaatggggcattgcacacttacctatgtatactgctacctgattatcgttggtctcttgtataaaggccttgctatcattatgtatggtccttcgtccccaatgtgtagtatgaacggtcttttgacctgtggaatgtattcctaatcctgatctatagaactgcct

SEQ ID NO: 3501 - DNA, 712 bp, Triticum aestivum
gccgcccgccgggtaccaccccctctttccaagatgtcgaaggcgagggcgcgaggatccgctggaaacaagttccggatgtcgctgggtctgccggtggcagccactgtcaactgcgctgacaacactggtgccaagaacctgtacatcatctccgtcaagggaatcaaggggcgcctgaacaggcttccttccgcctgtgttggtgacatggttatggccactgtcaagaagggaaagcctgacctgaggaagaaggtcatgccggctgtcatcgtcaggcagcgcaagccatggcgccgaaaggacggtgtcttcatgtactttgaagacaatgctggagtcattgtgaacccaaagggagagatgaaaggttctgccatcactggaccgatcgggaaggagtgtgccgacctgtggcccaggattgccagcgcagcgaacgccatcgtctgatctgatcgccggagcagctagatgatcaaagctttgatagcatgtccctcttttcttctagtttattacttgtggcccttgaggatgagtttcctggattatgtaatgctgctggattatggtctgttagctttaagattttgcactgtggtttggctactgagatttggtgagtctgaacctgaaaaagcttttgatcggatttatctctgttgtggcaagtattcacctgagatgtctggcttagatgttaatt

SEQ ID NO: 3502 - DNA, 1081 bp, Triticum aestivum
atgtaagtagtaagtactcagtttgtaaggataaaacggtagcatcaacagcttaagccagtcctactactcactgcatgggcaccgctcgcatcagttcttccccttggccgaagagcctggttctttgtcctgcttaaaggccttcttcaggaagaatgccatgtgccaagctgtgcgccgaggttagatcggcctttcgacagacaagacgatgcttccaacttcatgcacaagagtccacttgcaatcgtttcccgtgatgacttcttccctagctgcttgcagggagaagtcccggactgaaggtgtaggaggagcaacagccgcagcctgtattcactggagatcgattcactttcatccacagttagctctgcgaagtcctgggaccgccccctcttcttccaagatgtcgaagcgagggcgcggaggttccgctggaaacaagttccggatgtcgctgggtctgccggtggcagccactgtcaactgtgctgacaacactggtgccaagaacctgtacatcatctccgtgaagggaatcaaggggcgcctcaacaggcttccttctgcctgtgttggtgacatggttatggccactgtcaagaagggaaagcctgacctcaggaagaaggtcatgccggctgtcatcgtcaggcagcgcaagccgtggcgccgaaaggacggtgtcttcatgtacttcgaagacaatgctggagtcattgtgaacccaaagggagagatgaaaggttctgccatcactggaccgatcgggaaggagtgcgccgacctgtggcccaggattgccagcgcagcgaacgccatcgtctgatctgatcgccggagcagctagatgatcaaagcttttgatagcatgtccctcttttattctagtttacttgtggcccttgaggatgagtttcctggattatgtaatgctgctggattatggtctgttaggtttaagattttgcactgtggtttggctgctaagatttgttcagtttgaacctgaaagagcttttgatcggatttatctctgttgtgtcaagtattcacctgagaagtctggcttgaa

SEQ ID NO: 3503 - DNA, 701 bp, Triticum aestivum
gccctcgtcgccccgcaccgtcgcgcacctggaggtgaggggggagcagccgctgctgaagttgaattatcaaagaagagttgtatcccatgcaattcaaagtatctacatgccatgtcagaagattctgctaaaaagtcacttgaacaggtgactggttgggaactgaaaaatgaaggtgacatattgaaattacacagagcatggaaggtgaagaattttgtaaaagggcttgagttctttcagcttgttgctgctcttgctgaggaagaaggtcaccacccagatcttcatctcgtcagttggaacaatgtgaaaatcgatgtctggactcattcagtcagaggtttaacagataatgacttcatccttgctgcaaagatcaatgaactcaagctagaaggccttttgagcaagaaaaaggctacttcccaggagtagatttgggagatcaagcagataacttttaatgtgtagacgccaagaaatgcccttttatagtctgatgattgtacatgccgttccaaaatgagtacttccgatgtgaattccacttaccatttggtgagatctatccgttctgggcgatgcgtttctccgatgttgcgaatctaggatcatcctaatacttgtctgtatcttctgaatatataccgtagtttgaaggtgtcatgtatgcaatggcatagatatatgatcat

SEQ ID NO: 3504 - DNA, 874 bp, Triticum aestivum
ctgacgccgcaaccgcgcgcagcccgtaagaccggaccggtcacctcctccgctcccgtcagttccgccactttcactgcgagccccactgacctcaaaggcctcaacatggcaggtctgctgctgcgtagattcatcgggatccagccccgggcgccgatgaccgccgccggtggaccgcgctcttctacgcctcgtgtccctcgtcgccccgcaccgtcgcgcacctggaggtgaggggggaacaggccgctgctgaagctgaattatcaaagaagagttgtatcccatgcaattcaaaggatctgcacgccatgtcagaagattctgctaaaaagtcccttgaacaggtgactggttgggaactgaaaaatgaaggtgacattttgaaattacacagagcatggaaggtgaagaattttgtaaaaggacttgagttctttcagcttgttgctgctgttgctgaggaagaaggtcaccacccagatcttcatctcgtcagttggaacaatgtgaaaatcgatgtctggactcattcagtcagaggtttaacagataatgacttcatccttgctgcaaagatcaatgaactcaagctagaaggccttttgagcaagaaaaaggctacttcccatgagtagctttgggagatcaagcaaatgacccttgttttgcatgctctctgttttactaccttcgtcccataatataagagcgttttatacactagtgtagtgtcaaaaacgttcttatattatgagagtaacttttaatgtgtagaccccaagaaatgtccttttatattgtctgtgatgattgtacatgccgttccaaatgagtacttccgatgtgaattccacttaacctttggtga

SEQ ID NO: 3505 - DNA, 803 bp, Triticum aestivum
atgcagttctctctgcgtacattcatccggatccagccccggcgccgatgagcccgccggtggaccgcgcccttctacgcctcgtgtccctcgtcgccccgcaccgtcgcgcacctggaggtgaggggggagcagcccgctggctgaagttgaattatcaaagaagagttgtatcccatgcatttcaaaggatctgcatgccatgtcagaagattctgctaaaaagtcacttgaacaggtgactggttgggaactgaaaaatgaaggtgacattttgaaattacacagagcatggaaggtgaagaattttgtaaaaggtcttgagttctttcagcttgttgctgctgttgctgaggaagaaggtcaccacccagatcttcatctcgtcagttggaacaatgtgaaaatcgatgtctggactcattcagtcagaggtttaacagataatgacttcatccttgctgcaaagatcaatgaactcaagctagaaggccttttgagcaagaaaaaggctacttcccaggagtagctttgggagatcaagcagataacttttaatgtgtagatgccaagaaatgcccttttatattgtctgcgatgattgtacatgccgttccaaaatgagtacttccgatgtgaattccacttaacctttggtgagatctatctgttctgggcgatgcgtttctctgatgatacgaatctgggtcaccctaatacttgtttgtatcttctgaatatatacagtagaaggtgccatgtatgcaatggcatagatttttttttaagatcaagatgcaatg

SEQ ID NO: 3506 - DNA, 684 bp, Triticum aestivum
atcactggacaccattaaggaattgctcaagatttcctggaggacaagctcacaccatcctacaagtctgaccccagtacctgaatctaatgatgaggacgtcaaagttgttgttggtcaagagtctagatcaaatagttttggatgagtcaaaggatgtccttttggaggtatatgcgccatggtgtgggcattgtcagtcgctggagcctatctacaacaagctggccaagtatctccgtggcatcgactcccttgtaatagccaaaatggacggcacaaacaatgagcatcctcgtgccaagcccgatggattccccacgatactcttctatccagctgggaagaaaagctttgagcctataactttcgagggggaccggacggtggtggagatgtacaagttcctcaagaagcatgccgccatccctttcaagctgaagcgcccggactcgtcagcggcacggaccgacggcccaggctcgacggccgagggcgagaagagctccggttcgaacccgaaggacgagttgtagggggtttacatacgccattgacaagcacgaggtgctgctgtcgaaagcaggggatgcagaagggacagctaagctaggtatcaacttgggccgttggaggtgtatgctgagaacacaaatattgactagaatttcgataaataaaagc

SEQ ID NO: 3507 - DNA, 710 bp, Triticum aestivum
cttcttcagtggtgaaatatcactggacaccataaggaatttgctcaagatttctggagcacaagctcacaccatctacaagtctgacccagtacctgaatccaacgatgaggacgtcaaagttgttgttggcaagagtctagatcaaatagttttggatgagtcaaaggatgtccttttggaggtatatgcgccatggtgtgggcattgtcagtcactggagcctatctacaacaagctggccaagtatctccgtgggattgactcccttgtaatagccaaaatggacggcacaaacaatgagcatccccgtgccaagcccgatggattccccacgatactcttctatccagctgggaagaaaagcttcgagcctataactttcgagggggaccggacggtggtggagatgtacaagttcctcaagaagcacgccgccatcccattcaagctgaagcgcccggactcgtcagcggcacagaccgatggctcaagctcgacggccgagggcgagaagagctccggttcaaagcccaaggacgagttgtagggaattagttacgccattgacaagacaagttcgaggtgccgatggtgccgatgaagtccgaggtggagaagggatagctaagcttggctgctggaagtgtatgctgagaacacaaatacgtattaactactgtagaatccaacaaataaaagcaagatgt

SEQ ID NO: 3508 - DNA, 838 bp, Triticum aestivum
cccggagctcagggatggaggggcgcccctactccgcgaccaggcggcactcagcgcgtccgcccccactggccgctccgcctcgcaggcgacgggggacgaggccgggctaaagtcggtgagcgcgcgccgccgccgctgccccaattatcaaaaaggagttgtgtctcatgcaattcaaaggatttacaagccatgtcagaagattctgctaaaacgttgctagagcaggtggctggttgggaggtgaaaaatgagggtggcattctgaaattgcacagggcatggaaggtgaagaactttgccaaagggcttgagttctttcagcttgttgctgctgttgccgaggaagaaggtcaccacccagatcttcatcttgttggttggaataatgtgaaaattgatgtgtggactcactcagtcagtggtttaacagataatgatttcatccttgctgcaaagatcaatgaactcaagctaggagacctttttgagcaagaaaaaagctactgcccaggagtagctctcgtgaatcaaaagatatccttttgtattttgtcacaattgcatatgccgctccaaaagcaggattcgtccagtatatattctgggataaatgatggtttggcgatgctattggttcttcatgagaagttcaaggaggatttctgatattattttattgttaatgagtcatgccagtaagctttctgtatttgttcgccgtgaggagcaatggggcattgcacacttacctatgtatactgctacctgattatcgttggtcttttgtataaataaaggccttgctatcattatgtatggtccttcttcccca

SEQ ID NO: 3509 - DNA, 658 bp, Triticum aestivum
tccggtatcgacaatgtccagttgcttccaatcccgaaagcatcctagagatggtgacgaggaaagagataccaagggtaatggcaaggtgtgggtgcccaagacgatccggatcgatgacgtagatgaggtagccaggagttctatctggtcacttattgggatcaagggtgacaaggtggagaaggatgatggcaaagggtgtaagcttgcaagggtttttgatccaaaggatgaggcaaagatgtcaagccacagaggtaacaatagcctgccattcttgaaggggaacccagctgcactgtcgcgctcagtgaacttccaagagagatcttgagcaccatctggaaattcttcatgctgccttctgctactataaaaccatgtagcatgatacagctgaaattttgtacattagataattgcatactagataagagacatggagtgttcaacatagctataagcagatcctgtaactgtagctgtactaggtaacttgtagatagctatttgggttggggaagattgggagcagaagttcctgtatctgtagataaatatgatatattgattggaatgtttggcagggctacctttgcacgatagcaccgaaacaattggtagctgtctgatcccattgtataaccaagatgag

SEQ ID NO: 3510 - DNA, 586 bp, Triticum aestivum
ctgcttctccggtatcgtacaatgtccagttgcttccaatcccgaaagcaccctagagacggtgatgaggaaagagataccaagggtaatggcaaggtgtgggtgcccaagacaatccggatcgatgacgtagatgaggtggccaggagttctatctggtcacttattgggatcaagggcgacaaggaggagaaggatgatggcaaagggtgtaagcttgcaagggtttttgatccaaaggatgaggcaaagacgtcaagccacagaggtaacaatagcctgccattcttgaaggggaaccctgctgcactgtcacgctcagtcaacttccatgagagatcttgagcaccatctggaaattcttcatgctgccttctgctactataaaaccatgtagcatgatacagctgaaattttgtacattagataattgtatactactagataagagacatgaagtgttcaacatagctataatcagatcatgtaactgtagctgtactaggtaacttgtagatagctatttgggttggggaagattgggagcagaagttcctgtatctgtagataaatatcgatatattga

SEQ ID NO: 3511 - DNA, 693 bp, Triticum aestivum
cagcaatcccccaaatctcctcagcctcccgcgcatctcctccgacatggcccgcaccaagcagacggcgaggaagtccaccggcggcaaggcgccgaggaagcagctggccaccaaggccgcccgcaagtccgccccggccacaggcggcgtcaagaagccccaccgcttccgccccggcaccgtcgccctccgcgagatccgcaagtaccagaagagcaccgagctgctcatccgcaagctccccttccagcgcctcgtccgcgagatcgcccaggacttcaagaccgacctccgcttccagtcctccgccgtctccgccctgcaggaggccgccgaggcctacctggtgggcctcttcgaggacaccaacctctgcgccatccacgccaagcgcgtcaccatcatgcccaaggacatccagctcgcccgccgcatccgtggagagagggcctaagctctgttcgtcgtcgtctgttagtcgtcctcttagcctgatgtgttcatcggtggaaatgtgcgtgctagtgtttgttcgtgtcgtggtcgatgtagtgtgtctgttctgatgtcaccatcttgctgtcatcagtaactgaaatgaaaatgttgctatctgttctaagatctgtgccatttgatgcttgtttttcattgtctgcgagcccgttgttgaatgtgattcctcaactg

SEQ ID NO: 3512 - DNA, 740 bp, Triticum aestivum
tccgcatccagtttggtcgccttccgattcgaacctccccgaaatccgcagcagtcgacaggaggccaaaggcgccgccatggcccgtacgaagcagaccgcccgcaagtccaccggcggcaaggcgccccgcaagcagctcgccaccaaggcggcgaggaagtctgcgccgacgaccggcggagtgaagaagccccaccgctacaggcccgggaccgtggcgctccgggagatccgcaagtaccagaagagcacggagctgctgatccgcaagctgcctttccagcgcctggtccgcgagatcgcgcaggacttcaagacggacctcaggttccagagccacgccgtgctggccctccaggaggcggccgaggcgtacctggtggggctgttcgaggacaccaacctgtgcgccatccacgccaagcgcgtcaccatcatgcccaaggacatccagctcgcccgccgcatccgtggcgagagggcctaagctgccccctccgccgacgccgttagtgagtcggaatgtgttgattctggttgtagtttgttcctaattgctgtgctaggtctctctgcttttgtgtagaagaaatatggttgttggtacaagcaagacgaacttgttatgtgatgatgttacttttggtttgcgatgaagcaaacgtatgtcgaagacctcagaactgctgttgttgttggcaacgactcagctcttgtcgtgtccttaccccatcgtg

SEQ ID NO: 3513 - DNA, 578 bp, Triticum aestivum
atcccacgcaggcgaacacccactcaaaccctagcttcctccccactccatctccgatggccccgcacgaagcagacggcgcgcaagtccaccggcggcaaggcgccgaggaagcagctggcgaccaaggcggcgcgcaagtcggccccggccaccggcggcgtgaagaagccccaccgcttccgcccgggcaccgtggcgctccgggagatccgcaagtaccagaagagcacggagctgctcatccgcaagctccccttccagcgcctggtgagggagatagcgcaggacttcaagaccgacctcaggttccagtcctccgccgtctccgccctgcaggaggccgccgaggcgtatctggtggggctcttcgaggacaccaacctgtgcgccatccacgccaagcgcgtcaccatcatgcccaaggacatccagctcgcccgccgcatccgtggggagcgcgcctaggtttggccgtagcagttcgtgtcttgcgatctggttgtactaaggaaatgtgctgggtttctctgtagtgttgataagctttccagatgttctgacgctgaaatgaaatg

SEQ ID NO: 3514 - DNA, 661 bp, Triticum aestivum
ggctcaccaccgagccgcctacccgtaccgggccgccaacggcacctgcaaagccgccaagagctcccccgtggtggtgcgcatcgacggacaccaggacgtgccggccaacagcgaggaggcgctggccaaggccgtggcgaaccagcccgtctccgtggccatcgatgccagcgggaaggcgttcatgttctactccgagggggtgttcaccggtgactgtggaacagacctggaccacggcgtcgcggtggtcgggtacggggtggcggaggacggcaaggcgtactggacggtgaagaactcgtgggggccgtcatggggggagaaggggtacatcagggtggagaaggattccggtgccgaaggcgggctctgcggcatcgccatggaggcatcctaccccgtcaaggcggacagcaaacccaagcccaagcccaggcgcgcgctcggcgcatgggagtcgcagtgatcgacccgtctgcttgtctgaattatttctacgatcattcctagttaaattagggtgaaaataaattacagctgaatcaagtgcttctctgtccacacgcaagaattaggtgtgtgtagcgtgggaccaggacgatccacataatttgtttggatttatgaaaataatgtaaaatgtaataatgtaatg

SEQ ID NO: 3515 - DNA, 612 bp, Triticum aestivum
aagatctcaatctcagtctccatctccatcctccaaaccgcacgcagcagcccatccctcgccgccgcccgcctcccgcagctccgatggcccgcaccaagcagactgcccgcaagtccaccggcggcaaggcgcccaggaagcagctcgccaccaaggcggcgcgcaagtcggcgccggccaccggcggcgtcaagaagccccaccgcttccgcccgggaaccgtcgcgctccgtgagatccgcaagtaccagaagagcacggagctgctcatccgcaagctccccttccagcgcctcgtccgggagatcgcccaggacttcaagaccgacctccgcttccagtcctccgccgtctccgcgctccaggaggccgccgaggcgtacctggtcgggctgttcgaggacaccaacctgtgcgccatccacgccaagcgcgtcaccatcatgcccaaggacatccagctcgcccgccgcatccgcggggagcgcgcctaggctctgtatccgccctgtgtcagctgcccttgaatcccgctagatgtttatgactctgtagttgtctgctcctccttatgtttccctccttgtatttctaatggatgccatcaaa

SEQ ID NO: 3516 - DNA, 745 bp, Triticum aestivum
atcagccaccgtatagtatctggagccttcgtcgccgtcgattcgaacctcccccaaatcagcagcagtcgaccggaggcgccgccatggcccgtaccaagcagaccgcccgcaagtccaccggcggcaaggcgccccgcaagcagctcgccaccaaggcggcgaggaagtcggcgccgaccaccggcggagtgaagaagccccaccgctacaggccggggaccgtggcgctccgggagatccgcaagtaccagaagagcacggagctgctgatccgcaagctgcctttccagcgcctggtccgcgagatcgcgcaggacttcaagacggacctccgcttccagtcccacgccgtgctggccctccaggaggcggccgaggcgtacctcgtcgggctgttcgaggacaccaacctgtgcgccatccacgccaagcgcgtcaccatcatgcccaaggacatccagctcgcccgccgcatccgtggcgagagggcctaagctgtcctctccgtgaacgacggtagtggatcgggatgagttgattccggttgtagtttgttcctaattgctgttctaggtcttaagcttttgtgtagaagaaatatggttgttaggtatgagtaagacgaaccaacttgatatgtgatgttccttttggtttgcgatgaagcaaacgtatgtctatgttgaagacctcagaaccattgttgttcgctgcaactctgttgttgtcgtgccgttgatcc

SEQ ID NO: 3517 - DNA, 912 bp, Triticum aestivum
gaagggcctggccgcggccgacaacagcgaggagctcctccggcggtaccagcttggcgaggagctggggcgcggcgagtttggggtgacgcgatggtgcatggacgtggcaacgggagagaagctcgcgtgcaagtcgatcagcaaagcggaagctccggagcagcgtcgacatcgaggacgtgcggcgcgaggtagccatcatgcggtcgctgccctcgcatgtaaacgtcgtgcggctccgtgaggcgttcgaggacggcgactccgtgcacctggtcatggaggttttccaaggggggccgagttctttgaccgcatcgtcgtgcgcggtcactacaccgagcgtgctgccgccgctgtcatgcgcactatcatggaggtcgtgcagcattgccaccagaacggtgttatgcaccgggaccttaagcctgagaatttcttgtacgccaatgcatctgagagctcccctctcaaggttatcgacttcggactctccgtgtgcttcaagccaggtgaaagattcagtgagatcgtcggatctccctattacatggcgcctgaagtcctgaagagaaactatggacaggaaatcgacatctggagtgcaggcgtcatattgtatatcttgctactgtggtgtccctccattctgggccaaaacggacgaagggattgcgcaggccatcatccgatcacgcgtcgacttcgagcgcgagccttggccgaaggtgtcagacaacgccaaggagcttgttagcaggatgcttgaaaacaacccttatgccagattgacggctcaacaagttttagagcatccatggatacagaattccaccgctgctccgttatcaccttctgttcttttctggagttctcttttacctgataaatgaggaagtgtatgttgtg

SEQ ID NO: 3518 - DNA, 1025 bp, Triticum aestivum
gtgagatcgtcggatctccctattacatggcgcctgaagtcctgaagagaaactatggacaggaaatcgacatctggagtgcaggcgtcatattgtatatcttgctatgtggtgtccctccattctgggccaaaacggacgaagggattgcgcaggccatcatccgatcacgcgtcgacttcgagcgcgagccttggccgaaggtgtcagacaacgccaaggagcttgttagcaggatgcttgaaaacaacccttatgccagattgacggctcaacaagttttagagcatccatggatacagaattccaccgctgctccaaacattcctcttggtgaagcagtaaggtcaaggctaaagcaattcactgtcatgaacaagttcaagaagaaggccttgcttgtggtggcggaatacttgcctgctgaagagctggaggcaatcacggaactgttccacatgctggacactaatcaaggatgggcacctgacaattgaggagctcaggaaaggtctacaaatgatagggaacaatgtccatgatacagatgtggatatgctcatggaagccgcggacttagatggaaatggcaccttggactgcaaggagtttgtcacggtctccattcacctgaagaaaatccgcagcgaggaacacctccccaaggtgttcaattacttcgacaagaacatgagcgggttcatcgagatggaagagctcaaggaagcgctatccccaagaggcgaccagaaggccatcgaggagatcatcttcgacgttgacattgacaagaagcttcaaccagttggggtctactacatggaaaacagagaaactactccattacatgacaaccacgaaggaaataaatctttgatgtgagcaaatcactaaagagaaaagcttgtggccacaagcaacctgtcactgatatgtctccgtcgtatctactttttcaaacactttttctctggtcttggactctaatttgcatgaccagggcaggcgctggttttagcagaatt

SEQ ID NO: 3519 - DNA, 1281 bp, Triticum aestivum
  N_region (873)..(875): n = any nucleotide
  N_region (896)..(896): n = any nucleotide
  N_region (909)..(909): n = any nucleotide
  N_region (919)..(919): n = any nucleotide
  N_region (928)..(928): n = any nucleotide
  N_region (947)..(948): n = any nucleotide
  N_region (969)..(969): n = any nucleotide
  N_region (974)..(975): n = any nucleotide
  N_region (994)..(994): n = any nucleotide
  N_region (1003)..(1003): n = any nucleotide
  N_region (1015)..(1015): n = any nucleotide
  N_region (1032)..(1032): n = any nucleotide
cgacaacgacggggcgagggcggctcatggaaacgccttgagtacatcaagaaaaaacggcgggctcaccaccgagccgcctacccgtaccgggctgccaacggcacctgcaaagccgcgaaggtggccaagagctcccccatggtggtgcacatcgacggacaccaggacgtgccggccaacagcgaggaggcgctggccaaggccgtggcgaaccagcccgtgtccgtgggcatcgatgccagcgggaaggcgttcatgttctactccgagggggtgttcaccggtgagtgtggaacagagctggaccacggcgtcgcggtggtcgggtacggcgtggcggaggacggcaaggcgtactggacggtgaagaactcgtggggcccgtcgtggggggagaaggggtacatcagggtggagaaggattccggtgccgaaggcgggctctgcggcatcgccatggaggcatcctacgccgtcaagacggacagcaaacccaagcccacgcccaggcgcgcgctcggcgcctgggagtctcagtgatcgtcccaatctctatgcgtgtctgaattatttctactatattcctagttaaattagggtgaaaaaataaattacagctgaatcaagtgcttctccgtccacacgcaagaattaggtgtgtagcgtgggaccaggacgatcgacataatttgtttggatttatacgaatgtaatgtaaaatgtaataatgcatgcaatgtactggtaatgtttgtaagtgtaatacccacgatgcggctatatctcctacgtgtcggagcacgacttagaggcataaccgcattgtaggcatgtgcaagaggggtaatctttacacatcccatgtactgnnnaataagaaagacggtacaccnagttggcttatanatcaacactntcacacagnatacattgaataaagcatnntacaatcatccagaatacaantcaannggtccgactacggaaccanaaataaaangaaggtcacccnctaatgctagatccccngatcgccccgactggctccactactgatcaactaaaacgaaacaacacaatgatcaatatcttcatcgagctcctccttgagctcggtagcgtcacctatacggtatcatcggcacctgcaaactggttttggaagtaatgtgtgagtcatggggactcagcaatctcacaccctcgcgatcaagactatttaagcttatgggtagggaaaaggtatgaggtggagctgcagcaagcactagcatatat

SEQ ID NO: 3520 - DNA, 710 bp, Triticum aestivum
gtttcgaagtcgccgccgaggagagcagtcgaccagacgccatggcccgtaccaagcagaccgcccgcaagtccaccggcggcaaggcgccccgcaagcagctcgccaccaaggcggccaggaagtcggcgccgaccaccggcggagtgaagaagccccaccgctacaggcccgggaccgtcgccctccgggagatccgcaagtaccagaagagcacggagctgctgatccgcaagctgcccttccagcgcctggtgagggagatcgcccaggacttcaagaccgacctccgcttccagagccacgccgtgctggccctccaggaggcggccgaggcgtacctggtgggactcttcgaggacaccaacctgtgcgccatccacgccaagcgcgtcaccatcatgcccaaggacatccagctcgcccgccgcatccgcggggagagggcctaggccagggaggccaatccagcccctgccgccgtcgtcgctgcattcggcattctggggcgcatgccaacgtgcgccagcatttgtactagtagttgattagcctcccttgtcgagatatgcatcttgtggatcgttgtagaaaaccatgttggttggttaccgtagttacaaaggctcttgtctgcttaattggttttggttttggtttgcggtgatgcaaaccgatgcttactgtaatgaaattgttggttaatacag

SEQ ID NO: 3521 - DNA, 620 bp, Triticum aestivum
ctcccgagcaatcctctctgggcgcccacgcagcaagccctccactcccgatggcccgcacgaagcagacggcgaggaagtccaccggcggcaaggcgccgcgcaacaagctggccaccaaggcggctcgcaagtccgccccggccaccggcggcgtgaagaagccgcaccgcttccgccccggcaccgtcgcgctccgggagatccgcaagtaccagaagagcaccgagctgctcatccgcaagctgcccttccagcgcctggtgcgggagatcgcgcaggacttcaagaccgacctccgcttccagagctccgccgtctccgcgctgcaggaggccgccgaggcctacctcgtcgggctcttcgaggacaccaacctctgcgccatccacgccaagcgcgtcaccatcatgcccaaggacatccagctcgcccgccgcatccgtggcgagagggcctagtatgcttcctagaatcctagtgtctgatctgttctcgaggtgtagagatgtgttagtttcttatcagcccgtgtctgtggtagtaaggttccttgatggttgcgttatggtgtggtgtatgtgatggtaccatcttgttatcatcatccatgagaagtt

SEQ ID NO: 3522 - DNA, 723 bp, Triticum aestivum
ccggcaccatcgacttcatccttcggcaactcgtccgccgtccttccagaactgcctcatcatcacgcgccggcccatgggacaaccagcagaactcggtgaccgcgcacggccgcacggaccccaacatgaagtccgggctggtcatccagaactgccgcctggtgccggaccagaagctgttcgcggaccgcttcaagatcccgtccttcctgggccggccgtggaaggagttctcgcggctggtcatcatggagagcatgatcgccgacttcatcaagcccgaggggtacatgccgtggaacggcgacttcgggctcaagacgctctactacgccgagttcggcaaccgcggccccggcgccggcaccagcaagagggtcacctggccagggttccgcgtcatcgggaacaaggaggccgagcagttcaccgcagggcccttcatcgacggggcgacatggctcaagttcaccggcatgcccaactacctcgggttcaaggtctaaacgcgcatgcatgcatatgcatgcaacgcctgccccctgtacatgagataccgatcgaggtaacgtaatgtgtgtacagaacgtgtgatgactgatacttgcaagatcagctaaaccttcgctgctccgttatcaccttctgttcttttctgtggtttgtttctggagttctcttttccttggtaaatgattaagtgtatgttgtgacaatgat

SEQ ID NO: 3523 - DNA, 673 bp, Triticum aestivum
catcatcagcgcgcggccccatggacaaccagcagatctcggtgaccgcgcacggccgcacggaccccaacatgaagtccggggctggtgatccagaactgccgcctggtgccggaccagaagctcttcgcggaccgcctcaagatcccgtcctacctgggccggccgtggaaggagttctcgcggctggtcatcatggagagcatgatcgccgacttcatcaagcccgaggggtacatgccgtggaacggcgacttcgggctcaagacgctctactacgccgagttcggcaaccgcggccccggcgccggcaccagcaagagggtcacctggccagggttccgcgtcatcgggaacaaggaggccgagcagttcaccgcagggcccttcatcgagcggggcgacatggctcaagttcaccggcatgcccaactacctcgggttcaaggtctaaatgcgcatgcatgcatatgcatgcaacgccctgcgccctgtacatgagataccgatcgaggtaaacgtaatgtgtgtacggaacgtgtgatgactgatgcatgcaagatcagctaaaccttcgctgctccgttatcaccttctgttcttttctgtggtttgtttctggagttctcttttaccttggtaaatgattaagtgtatgttgtgacattgatta

SEQ ID NO: 3524 - DNA, 729 bp, Triticum aestivum
actcgccgccgtgttccagaactgtctcatcatcacgcgccggcccatggacaaccagcagaactcggtgactgcgcacggccgcacggaccccaacatgaagtccgggctggtgatccagaactgccgcctggtgccggaccagaagctgttcgcggaccgcttcaagatcccgtcctacctgggcaggccgtggaaggagttctcgcggctggtcatcatggagagcatgatcgccgacttcatcaagcccgaggggtacatgccgtggaacggcgacttcgcgctcaagacgctctactacgccgagttcggcaaccgcggccccggcgccggcaccagcaagagggtcacctggccagggttccgcgtcatcgggaacaaggaggccgagcagttcagccgcagggcccttcatcgacggggcgacatggctcaagttcaccggcatgcccaactacctcggattcaaggtctaaacgcgcatgcatatgcatgcatgcaacgcctgccccctgtacatgagataccgatcgaggtaaacgtaatgtgtgtacggaacgtgtgatgactgatgcttgcaagatcagcaaaccttcgctgctccgttatcaccttctgttcttttctggagttctcttttccctggtaaatgattaagtgtatgttgtgagttgtgacattgattaactggaaaatgtatcattcagatgcccataactggtatgc

SEQ ID NO: 3525 - DNA, 657 bp, Triticum aestivum
cagcccccaaccaccagagcctcctcctcccctccggcgcatcgacgacatggcccgcaccaagcagacggcgaggaagtcgaccggcggcaaggcgccgaggaagcagctggcgaccaaggccgctcgcaagtccgccccggccaccggcggcgtgaagaagccccaccgcttccgccccggcaccgtggcgctccgcgagatccgcaagtaccagaagagcacggagctgctcatccgcaagctccccttccagcgcctagtgcgcgagatcgcccaggacttcaagaccgacctccgcttccagtcctccgccgtctccgccctgcaggaggccgccgaggcctacctcgtgggcctcttcgaggacaccaacctctgcgccatccacgccaagcgcgtcaccatcatgcccaaggacatccagctcgcccgccgcatccgtggcgagagggcctaggctgctgcacctgcaatccgtgttaggctgagttcatcggtggaaaatagtggtgtttcagaatgtgcgtcgtgttagatccatgttagatccctgttcctctcatggtgggtggatgtgttatgcctaatctgatggtaccttcttgttgccatcagcaatggaaatgaaaaaatgttggttgctgttgtcataca

SEQ ID NO: 3526 - DNA, 736 bp, Triticum aestivum
gacaaccagggcaacatgtgtgaccgcgcacgggcgcacggaccccaacatgcccaccggcatcgtgctccaggggtgcaagatcgtgccggaggacgcgctgttccccgtcaggcagacggtgcctagctacctcggacggccgtggaaggaatactcgaggacggtgatcatggagagcaccatcggcgacctcatcaagcccgaggggtggtcggagtggatgggtgacctcgggctcaagacgctctactacgccgagtacgccaacaccgggcccggcgccgggacaagcaagagggtgacctggccagggtaccgtgtcatcggacaggccgaggccacgcagttcacccccggcgtgttcatcgacggcatgagctggctcaagaacaccggcacgcctaacgtcatgggcttcatcaaatgatcgtgccagtttgccggccatttgactccggccgcgtgcatgcatgtgcatgcgcttgtccggtggatgcttgacgagacacgtggagttttaggaacaaattaaggaaggagacataaagcaagatctgtttgtgtattatttgtacagaagtgcaaaagcagttcaagcaaaagaatttctctgtgtaatgtaattgattagaacattttcgaaaaaggggtttcccctgctttgtattccaaagcaacggagccaattagaacactttcaacatggctacgatgtatcgttttcactgtccag

SEQ ID NO: 3527 - DNA, 712 bp, Triticum aestivum
tccagaactgcctcagacggtgcggaagcccatggacaaccagggcaacatgggaccgcgcacgggcgcacggaccccaacatgcccaccggcatcgtgctccaggggtgcaagatcgtgccggaggacgcgctgttccccgtcaggcagacggtccccagctacctcggacggccgtggaaggaatactcgaggacggtggtcatggagagcaccatcggcgacctcatcaagcccgagggatggtcggagtggatgggtgacctcgggctcaagacgctctactacgccgagtacgccaacaccgggcccggcgccgggacaagcaagagggtgacctggccggggtaccgtgtgatcggacaggccgaggccacgcagttcaccgccggcgtgttcatcgacggcatgagctggctcaagaacaccggcacgcccaacgttatgggcttcatcaaatgatcgagccaccagtttgccggccatttgactccggccgtgtgcatgcatgcatgcatgcgctcgtccggtggatgcttgacgagacacgtggagttttaggaagaaattaaggaaggaaacataaagcaagatctgtttgtatattatttgtacagaagtgcaaaagcagttcaagcaaaagaatttctctgtgtaatgtaattgattagaacatttcaacatggtcctgatgtggcttttcttttccaca

SEQ ID NO: 3528 - DNA, 652 bp, Triticum aestivum
ccaatctccctcccaaccaatccaccaaggaaaccccgatggcccgcacgaagcagacggcgaggaagtccaccggcggcaaggcgccgcggaagcagctggccaccaaggcggcgcgcaagtcggcgccggccaccggcggcgtcaagaagccgcaccgcttccgcccgggcaccgtggcgctccgggagatccgcaagtaccagaagagcacggagctgctcatccgcaagctgcccttccagcgcctcgtgcgggagatcgcgcaggacttcaagaccgacctccgcttccagagctccgccgtctccgcgctgcaggaggccgccgaggcctacctcgtggggctcttcgaggacaccaacctctgcgccatccacgccaagcgcgtcaccatcatgcccaaggacatccagctcgcccgccgcatccggggagagagggcctaagatcgtgtctgtcttatctgcaggtgtagagattagcatgtgttgcgtggtgatgtgatctggtattgtggtaggaagatccctcgttcgtgctatgttaggtgtgttgtgatgttaccatcttgttgtcatcagcaatctgaatgaaagctggctatcagatctctctccattttgtgttcttctgacgcattttgttgttt

SEQ ID NO: 3529 - DNA, 710 bp, Triticum aestivum
ttagacgcgtgggtcccaatcccccaaatctcctcagcctccctgccggcgcatctccgactccatggcccgcaccaagcagacggcgaggaagtccaccggcggcaaggcgccgaggaagcagctggccaccaaggccgcccgcaagtccgccccggccaccggcggcgtcaagaagccccaccgcttccgccccggcaccgtcgcgctccgcgagatccgcaagtaccagaagagcacggagctgctcatccgcaagctccccttccagcgcctcgtccgtgagatcgcccaggacttcaagaccgacctccgcttccagtcctccgccgtctccgccctgcaggaggccgccgaggcctacctggtgggcctcttcgaggacaccaacctctgcgccatccacgccaagcgcgtcaccatcatgcccaaggacatccagctcgcccgccgcatccgtggagagagggcctaggctgcagtctgcaatccatgcgtcgtctgttagatccctgttagcctgagttcgtcggtggaagtgtgtgtgtgctagcagtagggtttcagactgtgcctgtgttgttcttgtcatggtggatgtggtatgcctaatgtgatggtaccgtcttgttgcggttaagctgtgcaatgtagctagtttccggctctgttttgctctatcctggccatatgggaattctgaatttgcg

SEQ ID NO: 3530 - DNA, 647 bp, Triticum aestivum
attcctcccaatcccccaaatctcctcaacttcccggcgcatctccgacgacatggcccgcaccaagcagacggcgaggaagtccaccggcggcaaggcgccgaggaagcagctggccaccaaggccgcccgcaagtccgccccggccaccggcggcgtcaagaagccccaccgcttccgccccggcaccgtcgcgctccgcgagatccgcaagtaccagaagagcaccgagctgctcatccgcaagctccccttccagcgcctcgtccgcgagatcgcccaggacttcaagaccgacctccgcttccagtcctccgccgtctccgccctgcaggaggccgccgagtcctacctcgtcgggctgttacgaggacaccaacctgtgcgccatccacgccaagcgcgtcaccatcatgcccaaggacatccagctcgcccgccgcatccgtggcgagagggcctaggccgcaatctgcaatcaatatgccgtctgtccttgttaggttgagttcgtccgtggaagtgtgtgtgctattagggtttacgaatgtgtctgtgttgttcttgtcatggtggatgcgttatgcctaatctgatggtaccgtcttgttgccatcagcacattttcagtggaaatgaaaatgttg

SEQ ID NO: 3531 - DNA, 637 bp, Triticum aestivum
agcagttcccctcctcaacccccgagagtccgccgcgcccacccgccagccccgatggcccgcacgaagcagacggcgaggaagtccaccggcggcaaggcgccgcggaagcagctggcgaccaaggcggcgcgcaagtcggccccggccaccggcggcgtgaagaagccgcaccgcttccgccccggcaccgtcgcgctccgggagatccgcaagtaccagaagagcaccgagctgctcatccgcaagctgcccttccagcgcctggtgcgggagatcgcgcaggacttcaagaccgacctccgcttccagagctccgccgtgtccgcgctccaggaggccgccgaggcctacctcgtggggctgttcgaggacaccaacctctgcgccatccacgccaagcgcgtcaccatcatgcccaaggacatccagctcgcccgccgcatccgtggcgagagggcctaggttgcctcgtggttgtctgatctggagactggtgtagagatgttagcttcgtctcgttagcatgtgtctgatcttgcatcgtggtaggaagatccctcgttcgtgccagtatggctgtgttatgttctagtgtgtactgtctgatgttaccctcttgttgccatcagcaatg

SEQ ID NO: 3532 - DNA, 598 bp, Triticum aestivum
aaatccccaagcgcgacaaccaactccgcctcgacctcccggcgcatctccgacgacatggcccgcaccaagcagacggcgaggaagtccaccggcggcaaggcgccgaggaagcagctggccaccaaggcggcccgcaagtccgccccggccaccggcggcgtcaagaagccccaccgcttccgccccggcaccgtcgcgctccgggagatccgcaagtaccagaagagcaccgagctgctcatccgcaagctacccttccagcgcctggtgagggagatcgcccaggacttcaagaccgacctccgcttccagtcctccgccgtctccgccctgcaggaggccgccgagtcctacctcgtggggctcttcgaggacaccaacctctgcgccatccacgccaagcgcgtcaccatcatgcccaaggacatccagctcgcccgccgcatccgtggagagagggcctaagctctgtgcgtcgtcgtctgttagtcgtcgtcttagccagatgtgttcagcggtgaaattgtgcgtgtttgtagtgtctgttcgtgccatggtggatgtagtgttcctgatctgatgtcacctccttgct

SEQ ID NO: 3533 - DNA, 621 bp, Triticum aestivum
gtgaaatcccaatctccaaagccgcagcgcagcagcagccagatccccatcccctccaccacgatggcccgcacgaagcagacggcccgcaagtccaccggcggcaaggcgccgaggaagcagctcgccaccaaggcggcgcgcaagtcggcgccggccaccggcggcgtgaagaagccccaccgcttcaggccgggaacggtcgccctccgcgagatccgcaagtaccagaagagcacggagctgctcatccgcaagctccccttccagcgcctcgtccgtgagatcgcgcaggacttcaagaccgacctccgcttccagagctccgccgtctccgccctgcaggaggccgccgaggcctacctcgtcgggctgttcgaggacaccaacctctgcgccatccacgccaagcgcgtcaccatcatgcccaaggacatccagctcgcccgccgcatccgaggggagagggcctaggttctgggtcgccggtaatactggctagtagctgttcttgtcttgtgatccggatgtgtgtcgggtgcttctgtttgttggtgttgatatgatgtgtcgtcttatcctaatgtattgtgatgcttgaatgaaattgcaatggaaaag

SEQ ID NO: 3534 - DNA, 720 bp, Triticum aestivum
ttcaatttcgagttccaccgcccgctcccgcacagcaaaggcaaccgaagccggcgagaggagccatggcccgtaccaagcagaccgcccgcaagtccaccggcggcaaggcgccccgcaagcagctcgccaccaaggccgccaggaagtcggccccgaccaccggcggcgtgaagaagccgcaccgctacaggcccgggaccgtggcgctccgcgagatccgcaagtaccagaagagcacggagctgctgatccgcaagctgcccttccagcgcctggtccgagagatcgcgcaggacttcaagacggacctccgcttccagtcccacgccgtgctcgccctccaggaggccgccgaggcctacctcgtcggcctcttcgaggacaccaacctctgcgccatccacgccaagcgcgtcaccatcatgcccaaggacatccagctcgcccgccgcatccgcggggagcgcgcctgagcgggagccagaccaatccgaccccagacgtccccgccgccgccgcattcgagggcatgccgccgttcgttcgccagcagtagttgattcgccgcctgccgttttagatcgtgttaattttggtttgcgttgatgcaaacagatgcttactgtgaaactgttggttaatatactgttgatcgaccattatcgactgtatgcaattctgatgtgctgtggagttgttgccccctgttctctgaat

SEQ ID NO: 3535 - DNA, 511 bp, Triticum aestivum
caagaagacaccaccaccagccgcgccgatggcccgcacgaagcagacggcgcgcaagtccaccggcggcaaggcgccgaggaagcagctggccaccaaggcggcccgcaagtccgcgccggccaccggcggcgtcaagaagccccaccgtttccgccccggcaccgtcgcgctccgggagatccgcaagtaccagaagagcacggagctgctcatccgcaagctccccttccagcgcctggtgcgggaaatcgcgcaggactttaagaccgacctgcggttccagtcatccgccgtctccgccctgcaggaggccgccgaggcgtacctggtggggatgttcgaggacaccaacctgtgcgccatccacgccaagcgcgtcaccatcatgcccaaggacatccagctcgcacgccgcatccgcggcgagcgtgcctaggtctgggtcgccggtaatacctgctgggtagtagctgttcctgtctcgtgatctggatgtgtgtcggttgtg

SEQ ID NO: 3536 - DNA, 597 bp, Triticum aestivum
cgtgggcgaacgcgtgggcgccgcacccgatctcccaagaacacaccaccaccagagccgccgacccccaagtccccgatggcccgcacgaagcagacggcccgcaagtccaccggcggcaaggcgcccaggaagcagctcgccaccaaggctgctcgcaagtcggcgccggcgaccggcggcgtgaagaagccccacggcttcaggccgggaaccgtcgccctccgtgagatccgcaagtaccagaagagcacggagctgctcatccgcaagctccccttccagcgtctggtgcgggagatcgcgcaggacttcaagaccgacctccgcttccagtcctccgccgtctctgcgctgcaggaggccgccgaggcgtacctggtggggctgttcgaggacaccaacctgtgcgccatccacgccaagcgcgtcaccatcatgcccaaggacatccagctcgcccgccgcatccgtggggagcgcgcctaggttcgtcctggtcgccggtaatgcttgctagctgttcttgtcgtgtgatcctggtgtgtgtctggtgcttctgtttgtcggtgtcgatatgatgtgtcatctggtcct

SEQ ID NO: 3537 - DNA, 524 bp, Triticum aestivum
ccgatctcccaagaagacaccaccaccacccgcgccgatggcccgcacaaagcagacggcgcgcaagtccaccggcggcaaggcgccgaggaagcagctggcgaccaaggcggcccgcaagtccgcgccggccaccggcggcgtcaagaagccccaccgtttccgccccggcaccgtcgccctccgcgagatccgcaagtaccagaagagcacggagctgctcatccgcaagctccccttccagcgcctcgtccgggagatcgcgcaggacttcaagaccgacctccgcttccagagctccgccgtctccgcgctgcaggaggccgccgaggcgtacctggtgggcatgttcgaggacaccaacctgtgcgccatccacgccaagcgcgtcaccatcatgcccaaggacatacagctcgcccgccgcatccgcagggagcgcgcactagatttggggtcgccggtaataactgggcagtatctgttcattgtcacatgtgaattcgaaatgtgtgatgagatgc

SEQ ID NO: 3538 - DNA, 769 bp, Triticum aestivum
aaggggccaggcgggctcatggacaacgccttggagtacatcaagagcaacggcggggctcatcaccgagctgcctacccgtaccgcgccgcccaaggcacctgcaacgtcgcgagagcggcccagaattcccccgtggtggtgcacatcgacgggcaccaggacgtgccggccaacagcgaggaggcgctggcccaggcggtggcgaaccagcccgtgtccgtggccgtcgaggccagcgggaaggcgttcatgttctactccgagggggtcttcaccggcagctgcggcacggagctggaccacggtgtcgcggtggtcgggtacggcgtggcagaggacggcaaggcgtactggacggtgaagaactcgtgggggccgtcgtggggggagcagggctacatcagggtggagaaggattccggcgccgcgggcgggctctgcggcatcgccatggaggcgtcctaccccgtcaagaccgacagcaagcccaagcccacgcccaggcgcgcgctcggcgcctgggagtcgcagtgatcgactcgtctgcgtgtctgaattatttctactatcattcctactagttaaattagggtgaaaataaattacagctgagtcaagtgcttctccgtccacacgcaataattaggtgtgtgtagcgtggggccaggacgatacacataatttgtttggatttatgaaagtaatgtaacaatgtaacaatgtaatatactggtaatgttagttcaaaatttaaatttgaactaaa

SEQ ID NO: 3539 - DNA, 547 bp, Triticum aestivum
  N_region (150)..(150): n = any nucleotide
gcggcgtcgttgcaatggtcaacacggctgaagatcgccctgggcgccgccaaagggttggcgttcctccatgaggccgagaacccggtcatctaccgggacttcaagacctccaacatcctgctagactcggattacaaagcgaactgntcggatttcgggctagccaaagatggaccggaagaagacgagacgcacgtctccacccggatcatgggcacgcagggctacgccgcgccggagtacattatgacagggcatctgacggccaagagcgacgtgtacggcttcggcgtggtgctgctggagctgctgacggggcgcaagtcggtggacaagagccggccgccgcgggagcagaacctggtggactgggcgcgccctacctcaacgactcccgggcgctggaccgcgtcatggacccaaacctcgccgggcagtacggcggcggggccgcgcagagggccgccggcactggcctacaaagtgcgtcagcttcaatcccaaagtcccggcccgcacatggtccgccggtcgtcagcggcgt

SEQ ID NO: 3540 - DNA, 605 bp, Triticum aestivum
ctcgaaccttccaagctcctcccggcctcccctcgcttccaccgagtccctccgatggcccgcaccaagcagacggcgcgcaagtccaccggcgggaaggcgccgcggaagcagctggcgacgaaggcagcgcgcaagtcggcgccggccaccggcggcgtgaagaagccgcacaggttccgcccgggaaccgtcgccctgcgcgagatccgcaagtaccagaagagcacggagctgctgatcaggaagctgccgttccagcggctggtgcgggagatcgcgcaggacttcaagacggacctccggttccagtcgtctgctgtgtccgcgctgcaggaggccgcggaggcgtacctggtggggctcttcgaggacaccaacctctgcgccatccacgccaagagggtcaccatcatgcccaaggacatccagctcgcgcgccgcatcaggggcgagagggcctgatgaacgagctctctgtctctgttctcggccggctttgatgttctcggtgttgtcgtgtgttaggatttagaaaatgttgggctgtcgcctgttgcttgctatcttgtagggatggttcgcctctggattgttcaatggaa

SEQ ID NO: 3541 - DNA, 735 bp, Triticum aestivum
cggctcatcacagagccgcgtacccgtaccgcgccgccatagggcacctgcaacgtcgcgggagcggcccagaactcccccgtggtggtgcacatcgacgggcaccaggacgtgccggccaacagcgaggaggctctggcccaggccgtggcgaaccagcccgtgtccgtggccgtcgaggccagcgggaaggcgttcatgttctactccgagggggtcttcaccggcagctgcggcacggagctggaccacggcgtcgcggtggtcgggtacggggtggcggaggacggcaaggcgtactggacggtaaagaactcatgggggccgtcgtggggggagcaggggtacatcagggtggagaaggattccggtgctgcgggcgggctctgcggcatcgccatggaggcgtcctaccccgtcaagaccgacagcaagcccaagcccacgcccgcgcccaggcgcgccctcggagccagggagtcacagtgatgactgatcgatccttctgcggatctgaattattactactactatcgttcctagttaaattaagggtgaaataaattaaagattgaattaagtggttctgcgtgggcacgcggcaagaattaggcgtgtgtaacgtcggaccaggtcgatcgatatctatttggattctgaatgtactgtaaaatataatgtaatgtaatacactgccagtaatagtgtatgaaacacttgctaatatattgtgta

SEQ ID NO: 3542 - DNA, 723 bp, Triticum aestivum
catcaagacaacgcgggctcatcaccgagccgcctacccgtaccgcgccgccaacggaacctgcaacgtcgcgaccgccgccaagagctcccccgtggtggtgcgcatcgacgggcaccaggacgtgccggccaacagcgaggaggcgctggcccaggccgtggcgaaccagcccgtgtccgtggccgtcgaggccagtgggaaggcgttcatgttctactccgagggggtcttcaccggcagctgcggcacggagctggaccacggcgtggcggtggtcgggtacggcgtggcggaggacggcaaggcgtactggacggtgaagaactcgtgggggccgtcgtggggggagcagggctacatcagggtggagaaggattcgggtgccgcgggcgggctctgcggcatcgccatggaggcgtcctaccccgtcaagaccgacagcaagcccaagcccacgcccacgcccaggcgcgccctcggagccagggagtcacagtgatcactgatcgatccttctgcgtatctgaattattactactactatcgttcctagttaaattaagggtgaaataaattaagattgaattaaatggttctgcgtgggcatgcagcaaagaattaggcgtgtgtaacgtgggaccaggtcgatcgatatctatttggattctgaatgtaactaggaacgatagtagtagtaataattcgccatggcgacggcca

SEQ ID NO: 3543 - DNA, 678 bp, Triticum aestivum
gcgatcccgtttcctatggatacatcggctcccgagttacccttacactctcaaggtgaacgagaagagcgacgtgtacagcttcggtgtggtgctgctggagctcgtgaccggacgcaagccggtgggtgagttcggcgacggcgtggacatcgtgcagtgggtgcggatggccaccggatcgaccaaggaaggcgtgatgaagatcgccgacccgcgcctctcgacggtgcccgtccaggagctgacgcacgtcttctacgtcgccatgctctgcgtcgcggagcaaagcgtcgagcggcccacgatgcgggaggtggtgcagatcctggccgacatgccaggggcgacgtcgatgaccgccggcacgacacggtcggaggccaccgtcgaaggagaggaggaggagcatcaggacgggccacaggagtccccggcgcagcaggatctcctcagcatttagtggctgtacctttgtcgcggcctctgtaccttgtggtgtactcttcggaatgtggtagtgtgtccggatgcgtgtgcaagaggaagcaagcatgtgctagattagtgtatgatgataatgtcgtggattaattagacctgtgtaatctctgttgtagtaggagtactgtcttgtacaagtagttagtgggtctcgtctctccattgaatcgaagt

SEQ ID NO: 3544 - DNA, 564 bp, Triticum aestivum
tcgccggcgaagcacccacacccaaacccctccggctccaatggcccgcacgaagcagacggcgcgcaagtccaccggcggcaaggcgccgaggaagcagctggcgaccaaggcggcgcgcaagtcggccccggccaccggcggcgtgaagaagccccaccgcttccgcccggggaccgtggcgctccgggagatccgcaagtaccagaagagcacggagctgctcatccgcaagctccccttccagcggctggtgcgggagatcgcgcaggacttcaagaccgacctgaggttccagtcctccgccgtctccgcgctccaggaggccgccgaggcgtacctggtcgggcttttcgaggacaccaacctgtgcgccatccacgccaagcgcgtcaccatcatgcccaaggacatccagctcgcccgccgcatccgcggggagcgcgcctaggttttcggtcgccgccggtcaagctactgggttgtagcgcttcctgtctggtgtcttctgttcggtggtgttgatatgatgtgtcgtcttgtcccattcccatgtagcatgag

SEQ ID NO: 3545 - DNA, 583 bp, Triticum aestivum
gagagagctacagtctctgctgagctggagagacccaagggccaccgcgctgtttgtgaccttctgcttcatcgccgcgatcgtcctgtacgtcacaccattccgcgttgtggtcttccttgcaggcctgtacaccctgaggcacccgaggttccgccacaagatgccgtctgtcccgctgaacttcttcaggaggctgccggcaaggactgatagcatgctgtaaggtgcaaccgtctcttatcgctccgtgatgcggcgccttcctcgtttcggtggctcgatgctgagcatgttctatagctgcaactgagatgatgctggggtcgaagcgcggttgccaaaaaattgaactgaactatgtcgttgtttgtagtcttttcagttgcccgcgtgtctgttttggaacagttttgaacctttcctgttgacgactgaaacgcctgatgtgtgagtagttattatgcatgtatgccgcctgaagaaattgtgctatcacctgagcttctgctgtgccccatcatcttttgcatttgcatctagtaatggttcttcccattttttccataggaatgctgatcta

SEQ ID NO: 3546 - DNA, 846 bp, Triticum aestivum
atacgccacaatcttctctaccgagtccctgattggagtgtggtactaccggtggcggtcgaggcagcctccgcacatggacactcgcctctcacatgcggagaccgcccatcctgacgagcttgatgaagagtttgacaccttccctacatctcgcccacctgacatcgtcaggatgcggtatgaccgcctccggagcgttgctgggaggatccagactgttgttggtgatcttgcaacacaaggagaaagactgcagtctctgctgagctggagagacccaagggccaccgcgctgtttgtgaccttctgcttcatcgctgcgatcgtcctgtacgtcacaccattccgtgttgtggtcttccttgcaggcctgtacaccctgaggcacccgaggttccgccacaagatgccgtctgtcccgctgaacttcttcaggaggctgccggcaaggactgatagcatgctgtaaggtgcaaccgtctctctcgctccgtgatctggcgccttccttgtttcggtggctcgatgctgagcatgttctatagctgcaactgagatgatgctggggtcgaagcgcggttgccaaaaaattgaactgaactatgtcgttgtttgtagtcttttcagttgcttgtgtgtctgttttgggacggttttgaacctttcctgttgacgactgaaacgcctgatgtgtgactagttattatgcatgtatgccgcctgaagaaattgtgctatcacccgagcttctgctgtgtcctatcatcttttgcatttgcatctagcagtggtcggcctgcatgagaagattcagtgtgcgcctgggaccctgttaatgatatt

SEQ ID NO: 3547 - DNA, 557 bp, Triticum aestivum
gcccatcctgatgagcttgatgaagagtttgacaccttccctacatcacgcccacctgacatcgtaaggatgcggtatgaccgcctccggagcgttgctgggaggatccagactgttgttggtgatcttgcaacacaaggagagaggctacagtctctgctgagctggagagacccgagggccaccgcgctgtttgtgaccttctgcttcatcgcggcaatcgtcctgtacgtcacaccattccgcgttgtggtcttccttgcaggcctgtacaccctgaggcacccgaggttccgccacaagatgccgtctgtcccgctgaacttcttcaggaggctgccggcaaggactgatagcatgctgtaaggtgcaaccgtctctcgctccgcggtccggcgccttccttgtttcggtggctcgatgctgagcatgttctatagctgcaactgagatgaagctggggtcgaagcgcggttgccaaaaaattgaactgaactatgtcgttgtttgtagtcttttcagttacctgtgtctgttttgggacggttttgaacctt

SEQ ID NO: 3548 - DNA, 582 bp, Triticum aestivum
cgagaagagcgacgtgtacagcttcggcgttgtgctgctggagctggtcaccgggcgcaagccggtgggggagttcggcgacggcgtggacatcgtgcagtgggtgcggacggccaccgggtcgaccaaggaaggcgtgacgaagatcgccgacccgcgcctctcgacggtgcccatccaggagctgacgcacgtcttctacgtcgccatgctctgcgtcgcggagcaaagcgttgagcggcccacgatgcgggaggtggtgcagatcctggcggacatgccgggggcgacgtcgatgaccgccggcacaacgcgggtggaggccaccgtggaaggagaagatgaggagcatcaggacgggccacaggagtccccggcgcagcaggatctcctcagcatttagtggctgtacctttgtcgcggcccctgtaccttgtggtgtactcttcggaatgtggtggcgtgtccggatgcgtgtgcaggaggaggcaggcatgtggtagattagtggtagtgtatgatgataatgctgtggatgaattagaccggtgtaatctctgttgtggtagtactgtctagtac

SEQ ID NO: 3549 - DNA, 704 bp, Triticum aestivum
gtctcaacgcaacgccgcggctccgagtgcatgtccgcgatcgccggttcctacggatacatcgctcccgagtatgcctacacgctgaaggtcgacgagaagagcgacgtgtacagcttcggcgtggtgctgttggagcttgtcaccggacgcaagccggtgggcgagttcggcgacggcgtggacatcgtgcagtgggtgcggatggccaccgggtcgaccaaggaaggcgtgatgaagatcgtcgacccgcgcctctcgacggtgcccatccaggagctgacgcacgtcttctacgtcgccatgctctgcgtcgccgagcagagcgtcgagcggcccacgatgcgggaggtggtgcagatcctggccgacatgccaggggcgacgtcgatgaccgccggcacgacgcggtcggaggccaccgccgaaggagaagaggaggagcatcaggacgggccacaggactccccggcgcagcaggatctcctcagcatttagtggctgtacctttgtcgcggcccctgtaccttgtggtgtactcttcggaatgtggtggcgtgtccggatgcgtgtgcaggcatgtgctagattagtggtatgatgataatgttgtggattaattagaccggtgtaatctctgttgtagtggtggtactggcttgtacaaagcggttagtgggtctcgtctctcccattgaatcgaa

SEQ ID NO: 3550 - DNA, 596 bp, Triticum aestivum
gacttcgggctgtccaagtacgggccggagctggacaaggacgcacgtgagcaccaatgtgaagggcagcttcgggtacctggacccggagtacttccggcggcagatgctgacggagaagtcggacgtctactccttcggcgtggtcctgctggaggtgctgtgcgcccgcacggtcatcgacccgacgctgccccgggagatggtgagcctggccgagtgggcgacgccgtgtctcaggaacggtcggctcgaccagatcgtcgaccagaggatcgccgggacgatacggccggggtcgctcaagaagctcgcggacacggccgagaagtgcctcgccgagtacggggtggagcggcccaccatgggggacgtgctctggtgcctcgagttcgcgctgcagctgcaggtggggtcgtcagacggctcggacgtcgacaccatgttgccgccggcgccgcctgtgcccgtgaaaacgccagaggttcagcgtagcctgtccgccgctaccatggcgaccgacgctgctgccatgaccaccaacttgggtgatctagacggaatgtccctgagcggagtattctcgaagatgatca

SEQ ID NO: 3551 - DNA, 878 bp, Triticum aestivum
ccgccctccgctccattcgtttcgatctatttcggcttcttcctctccaagctacagccccggccatggcggcgacgatccagtccgtgaaggccgccagatcttcgacagccgcggcaaccccaccgtcgaggttgatgtgtgctgctcagatggaaccttcgccagggccgctgttcccagcggtgcatcaactggtgtttatgaagctttggaactgagggatggtggatctgactacttgggaaagggtgtatccaaggctgttgacaatgtgaactcgattatcgcgccagctttgattggcaaggaccctacagctcaaactgagctcgacaactttatggttcagcagcttgatggaaccaaaaacgaatggggttggtgcaagcagaagcttggtgctaatgcaatcctggctgtgtcactagctatttgcaaagctggagccagcatcaagaagattccgctgtaccagcacattgccaaccttgctggcaacaagcaattggttttgcctgttcctgcattcaatgtcatcaatggtggatcccatgctggaaacaagcttgctatgcaggagttcatgatccttcctactggagctgcctcattcaaggaggcaatgaagatgggcgttgaagtgtaccacaacttgaagtctgttatcaagaagaagtacgggcaagatgccaccaatgttggagatgaaggtggttttgctcctaacattcaggagaacaaggagggtcttgagctcttgaagactgcaattgaaaaggctggatacaccggcaaggttgtcattggaatggatgttgctgcttcagagttctacaatgacaaggacaaaacatatgacctcaacttcaaggaag

SEQ ID NO: 3552 - DNA, 595 bp, Triticum aestivum
tctgaatctccatctccatctcgatctccaaaccgcagcaacccacctccctccccgccgaccccgcagcagctccgatggcccgcaccaagcagactgcccgcaagtccaccggcggcaaggcgccgcggaagcagctcgccaccaaggcggcgcgcaagtcggccccggccaccggcggcgtcaagaagccccaccgtttccgccccggcaccgtcgcgctccgtgagatccgcaagtaccagaagagcacggagctgctcatccgcaagctccccttccagcgcctcgtccgggagatcgcccaggacttcaagaccgacctccgcttccagtcctccgccgtctccgcgctccaggaggccgccgaggcgtacctcgtcgggctcttcgaggacaccaacctgtgcgccatccacgccaagcgcgtcaccatcatgcccaaggacatccagctcgcccgccgcatccgcggcgagcgcgcctaggctctgtatgcgccctctgtcagctgcgcctgaatcctgctagatgtttatgactcctgtagttgttgtttgccctgcttgtatgttccaatgatgccatcaaatgt

SEQ ID NO: 3553 - DNA, 614 bp, Triticum aestivum
agaagtcggcgagcctgccctgaactacgaggattttgctgctagcctccccaccaatgaatgcagatacgcgatattcgactatgactttgtcaccgaggagaactgccagaagagcaagatattcttcgtcgcatggtctcctgacactgcacgcgtgaggagcaagatgatctacgcgagctccaaggagaggttcaagagggagctcgatggcatccaggtggagctccaggcgacagacccgaccgaggtcggctttgatgtgatccaaggccgtgccaactgagcaccatggctgtgctgctgcttaccttaagtatgagcctccgatgaggatttagcgcgctcgccgaggctggtcatgagctgtttaccatgaggcaattgtgatttgagttgccagtatgtaccacctaaggaagatgtaagccatgactggcgcgacgacaaatgtatcctttctggttgttgattcgtggatcctgagatcagttgcatcttcatggtagaattttggtagattctgtgttgtgagccttcatactaggatcactggttcttgaaactaatgatgccatgatgtccactgaggcttattatccaacacattt

SEQ ID NO: 3554 - DNA, 1088 bp, Triticum aestivum
tcctggtctatgaccacatggctcatggaactctgcgtgagcacctatacaagacccagaatgcaccgcttagctggaggcagcttttggagatctgcattggtgcagctcgtgggctgcactaccttcacaccggtgcaaagcacaccattatccaccgtgatgtgaagacaacaaacatcctactggatgagaaatgggtcgccaaggtttcagattttggtctgtccaagactgggccatcgatggatcatacacatgtgagcacagttgtcaagggcagtttgggttacctagatcctgaatacttccgcaggcagcagctcaccgagaaatctgatgtctattcgtttggtgtggtgctgttcgaggtcctctgtgctcggcctgccttgaacccgactcttgcaaaggaagaagttagcctggcagaatgggcattgcactgccagaagaagggaattcgggatcagattgttgatccctacctaaagggaaagattgttccgcagtgcttcaagaagtttgccgagacagctgagaagtgcgttgccgacaatggcatcgagcgccccttcgatgggagatgtgctttggaatttggagtttgctcttcagatgcaggaaagttcggaggagtatcggaagctttggctgtgggatgtcggatgagggcactcccctggtgatggctggaaagaaggatcccatgacccatcgtatcgattcaagcaccaccacgaccacgacaacttccctaagcatgggcgaccaaagtgtcgcgagcatcgactcggacgggctgacgccgagcgccgtgttctcacagatcatgaaccccaaggggcggtgaggtaaaaatctgggcctgcttgtcgcccttgaggcctaatttattcattgagtctattttcatcagtttgtgccatcttgcaagattaataggaattgggggtcagagtattgtttcacgttagacattttgcattgccttgtttttctcttgttcacgcagcttgtcctgactctgctttttagcatgtcgtaactaccgccgctgctacgtgctattgacccgacaagtcaag

SEQ ID NO: 3555 - DNA, 846 bp, Triticum aestivum
ccagcagccgccgcaagagagagcagggagcgaggaggaactcgacgagagagggcatcgaatccgcctccttcttcctcgcggggtcgtccccgactccgaggcctccgacatggcgaacgctgcgtcaggcatggctgtggacgacgaatgcaagctcaagttcctggagctgaaggcgaagcgaacccaccgcttcatcatctacaagatagacgataagaagaagatggttgttgtggagaaagtcggcgagcctgccctgaactatgaggacttcgccgccagcctccccaccaatgaatgcagatacgcgatattcgactacgactttgtcaccgaggagaactgccagaagagcaagatattcttcgtcgcatggtctcctgacacggcacgcgtgaggagcaagatgatctacgcgagctccaaggagaggttcaagagggagctcgacggcatccaggtggagctgcaggcgacagacccgaccgaggtcggctttgatgtgatccaaggccgtgccaactgagcaccatggccgtgctgctgcttaccttaagtatgagcctctgatgaggatttagcgcgctcgccgaggctggtcatgagctgtttaccatgaggcaattgtgattgagttgccagtatgtaccacctaaggaagatgtaagctgtgactggtgcgacgacaaatgtatcctttctggttgttgattcgtgggtcctgatatccccccttcttacctgctaagatcagttgcatcttcatggtaaaattttggtagattcttgttgtgagctttcatactaggatcactgggtcttgaaactaatgatgcccat

SEQ ID NO: 3556 - DNA, 475 bp, Triticum aestivum
  N_region (26)..(26): n = any nucleotide
  N_region (37)..(38): n = any nucleotide
  N_region (46)..(46): n = any nucleotide
  N_region (64)..(64): n = any nucleotide
cctcttgtgatactagtctgtatccngagctgatacnncctacaanctttctctacctattccngattggagtgtggtactaccggtggcggtcaaggcagcccccgcacatggacactcgcctctcacatgcggagaccgcccatcctgatgagcttgatgaagagtttgacactttccctacatctcgtccacccgacatcgtgaggatgcggtatgaccgcctccggagtgtcgctgggaggatccagactgttgttggtgatcttgcaacacaaggagagaggctgcagtctctgctgagctggagagacccaagggccaccgcgctgtttgtgaccttctgcttcctctagtactagatatatgaaacaccgttttcttaatcgacagtttgatcgttgtagcggtgaaaaaataaagtgtcatgcactatcatgtaagaacccgaactatactagttcaaacttgggaa

SEQ ID NO: 3557 - DNA, 1086 bp, Triticum aestivum
gggcacgatgcgggacgagacgctggtggccgtgaagcgcggcaaccggcggacgcagcaggggctgcacgagttccacacggagatcgagatgctgtcccggctgcgccaccggcacctggtctcgctcatcggctactgcgacgagcgcggcgagatgatcctcgtgtacgagtacatggccatgggcacgctgcggagccacctgtacggcgccggcctcccgcccctgtcgtgggagcagaggctggaggcctgcatcggcgccgcgcgggggctgcactatctccacaccagctccgccaaggcgatcatccaccgggacgtcaagtcggccaacatcctcctcgacgagagcttcatggccaaggtggccgacttcgggctgtccaagaacgggccggagctggacgagacgcacgtgagcaccaaggtgaagggcagcttcgggtacctggacccggagtacttccggcggcagatgctgacggagaagtcggacgtctactccttcggcgtggtcctgctggaggtgctctgcgcccgcaccgtcatcgaccccacgctgccgcgggagatggtgagcctggcagagtgggcgacgccgtgtctcagaaacggccagctcgaccagatcgtcgaccagaggatcgccgggacgatacggccggggtcgctcaagaagctcgcggacacggccgacaagtgcctcgccgagtacggggtggagcggcccaccatgggggacgtgctgtggtgcctcgagttcgcgctgcagctgcaggtggcgtcctcagacgtctcggacgccgacaccatgttgacgccgcccgtgcccgtgaaaacgcccgaggttcagcgtagcctgtccgccgctaccgtggcgactgacgctgccatgaccaccaacttgggtgatctagacggaatgtccctgagcggagtattctccaagatgatcaagagcgacgaggtcaggtgaagccaaaagatgcttcgtccacgttgtacaaactgaagcacatgtatatgtcaattttgtgtttataggatgtagtacatgacaaacaatgtacaaactttcat

SEQ ID NO: 3558 - DNA, 890 bp, Triticum aestivum
accccctccccctccccaagcagccgcgcaacagagagagcaggaagcgaggaggaactctacaagagagggcatcgaatccgcctccttcctcgcgcggtcgtctccgacatggccaacgcggcatcgggcatggctgtggacgacgaatgcaagctcaagttcctggagctgaaggctaagcgaacccaccgcttcatcatctacaagatagacgataagaagaagatggttgttgtggagaaagtcggcgagcctgccctgaactacgaggacttcgccgctagcctccccaccaatgaatgcagatacgcgatattcgactatgactttgtcaccgaggagaactgccagaagagcaagatattcttcgtcgcatggtctcctgacaccgcacgtgtgaggagcaagatgatctacgcgagctccaaggagaggttcaagagggagctcgacggcatccaggtggagctgcaggcgacagacccgaccgaggtcggcttcgatgtgatccaaggccgtgccaactgagcaccatggctgtgctgctgcttaccttaagtatgagcctctgatgaggatttagcgcgctcgccgaggctggtcatgagctgtttaccatgaggcaattgtgatttgagttgccagtatgtaccacctaaggaagatgtaagctgtgactgggcgcggcgacaaatgtatcctttctggttgttgattcgtggatcctgatatcccctttttgccctgctaagatcagttgcatcttgatggtaaaattttggtagattctgtgttgtgagcttccatactaggatcactggttcttgaaactaatgatgccatgatgtgcactgaggcttactatgcaacatattttgatgataaat

SEQ ID NO: 3559 - DNA, 556 bp, Triticum aestivum
caccggcgaacacccacaccctcacccacccctcttctccgatggcccgcacgaagcagacggcgcgcaagtccactggcggcaaggcgccgaggaagcagctggcgaccaaggcggcgcgcaagtcggccccggccaccggcggcgtgaagaagccccaccgcttccgcccgggcaccgtggcgctccgggagatccgcaagtaccagaagagcacggagctgctcatccgcaagctccccttccagcgcctggtgagggagatcgcccaggacttcaagaccgacctgaggttccagtcctccgccgtgtcggcgctgcaggaggccgccgaggcgtacctggttggcctgttcgaggacaccaacctctgcgccatccacgccaagcgcgtcaccatcatgcccaaggacatccagctcgcacgccgcatccgcggggagcgcgcctaggttttcattcgccgccgttgacaatactgggtagtagctgctcgtgtctggtgttttctgtctgtggtgttgatatgatgtgccgtcttgtcctatgtagcctg

SEQ ID NO: 3560 - DNA, 564 bp, Triticum aestivum
ctcaactccccggcgcatctccgacgacatggcccgcaccaagcagacggcgaggaagtccaccggcggcaaggcgccgaggaagcagctggccaccaaggccgcccgcaagtccgccccggccaccggcggcgtcaagaagccccaccgcttccgccccggcaccgtcgcgctccgcgagatccgcaagtaccagaagagtaccgagctgctcatccgcaagctccccttccagcgcctggtgagggagatcgcccaggacttcaagaccgacctccgcttccagtcctccgccgtctccgcgctgcaggaggccgccgaggcctacctggtggggctcttcgaggacaccaacctgtgcgccatccacgccaagcgcgtcaccatcatgcccaaggacatccagctcgcacgccgcatccgtggcgagagggcctaagctgctctgtgcgcgtcgtcgtcttagccagatgtgttcagcgctgaaagtgtttgttcgtgccatggtggatgtagtgtgcctgatctgatgtcaccatcttgctgtcatcagtaatttagatg

SEQ ID NO: 3561 - DNA, 703 bp, Triticum aestivum
cttccagttcaagttccccaaccggcagcgcgcgcaagccgaagcccagttagaattcgcgtaggaggaggagagatccgatggcgcgcacgaagcagacggcccggaagtccaccggcggcaaggcgccccgcaagcagctggccaccaaggcggcgaggaagtcggcgccgaccaccggcggcgtgaagaagccccaccgctacaggcctggcacggtggcgctgcgcgagatccgcaagtaccagaagagcacggagctgctcatccgcaagctgccgttccagcgcctggtgcgggagatcgcgcaggacttcaagacggatctccgcttccagagccacgcggtgctggcgctccaggaggccgccgaggcgtatctcgtcgggctcttcgaggacaccaacctctgcgccatccacgccaagcgcgtcaccatcatgcccaaggacatccagctggcgcgccgcatccgaggggagcgcgcctagatcaagcatctgccttagcaacttccatcgctggattgcagcaatgtagctgtctgttcgtcgcctctggtttcagatcgtgttggcaataggcgacttttattttgctgtaaaaaaaaattctggttggttacagagttacaacgactcattttcttatttcgtctaaggcttgtgctaaaatgcaaaacaagttactcgttgttttatag

SEQ ID NO: 3562 - DNA, 612 bp, Triticum aestivum
cccaaatctccaagcgcgagcgacaaccggccctgcctcaaccccccggcgcgtctccgactccatggcccgcaccaagcagacggcgaggaagtccaccggcggcaaggcgccgcggaagcagctggcgaccaaggccgcccgcaagtccgccccggccaccggcggcgtcaagaagccccaccgcttccgccccggcaccgtcgcgctccgcgagatccgcaagtaccagaagagcacggagctgctcatccgcaagctccccttccagcgcctcgtccgcgagatcgcccaggacttcaagaccgacctccgcttccagtcctccgccgtctccgccctgcaggaggccgccgaggcctacctcgtcggcctcttcgaggacaccaacctctgcgccatccacgccaagcgcgtcaccatcatgcccaaggacatccagctcgcccgccgcatccgtggcgagagggcctaggctgcaacccatgcgccgtctgttagatccctgttaggctgagttcgtcggtggaaatgtgtgtgcttgtagtgttcttgccatggtcgatgcgttgtgcctaatctgatggtaccctcttgttgccatcagcggtg

SEQ ID NO: 3563 - DNA, 647 bp, Triticum aestivum
gcgtccgcaaatccccaagcgcgagcgacagccagctccgcctcaacctcccggcgcatctccgacatggcccgcaccaagcagacggcgaggaagtccaccggcggcaaggcgccgcggaagcagctggcgaccaaggccgcccgcaagtccgccccggccaccggcggcgtcaagaagccccaccgcttccgccccggcaccgtcgcgctccgtgagatccgcaagtaccagaagagcacggagctgctcatccgcaagctccccttccagcgcctcgtccgcgagatcgcccaggacttcaagaccgacctccgcttccagtcctccgccgtctccgccctgcaggaggccgccgaggcctacctcgtcggcctcttcgaggacaccaacctctgcgccatccacgccaagcgcgtcaccatcatgcccaaggacatccagctcgcccgccggatccgtggcgagagggcctaggctgcaacccatgcgtcgtctgttagatccctgttaggctgagttcgtcggcggaaatgtgtgtgctactgtagtagtgttccagaatgtacctgtgttcttgtcatggttgatgcgttgtgccccatctgatggtaccctcttgttgccatcagcgatggaaatgaaaa

SEQ ID NO: 3564 - DNA, 620 bp, Triticum aestivum
gaaagatctcatcttcccctccgaccaccagagcgagcagccagatccgcagcccctccatcccaatggcccgcaccaagcagacggcccgcaagtccaccggcggcaaggcgccgaggaagcagctggccaccaaggcggcgcgcaagtcggcgccggcgaccggcggcgtcaagaagccgcacaggttcaggccgggaaccgtcgccctccgcgagatccgcaagtaccagaagagcacggagctgctcatccgcaagctccccttccagcgcctggtgcgggagatcgcgcaggacttcaagaccgacctccgcttccagtcctccgccgtctccgcgctccaggaggccgccgaggcctacctcgtcggactgttcgaggacaccaacctgtgcgccatccacgccaagcgcgtcaccatcatgcccaaggacatccagctcgcacgccgcatccgaggggagcgcgcctaggctgttcgtcgtggtcgccggtaatactggctagtagctgttcttgtcctgtgatccgggtgtgtgtccggtgcttctgtttgtcggtgttgatatgatgtgtcgtctggtcctatgtatcgtcatgctcgaatgaaatggcaa

SEQ ID NO: 3565 - DNA, 635 bp, Triticum aestivum
gtgaaatcccaatctccaaagccagatcccagcccctccatcccaatggcccgcacgaagcagacggcgcgcaagtccaccggcggcaaggcgccgcggaagcagctcgccaccaaggcggcccgcaagtcggcgccggcgaccggcggcgtgaagaagccccaccgcttcaggccgggaaccgtcgccctccgggagatccgcaagtaccagaagagcacggagctgctcatccgcaagctccccttccagcgcctcgtccgtgagatcgcgcaggacttcaagaccgacctccgcttccagtcctccgccgtctccgcgctccaggaggccgccgaggcctacctcgtcgggctcttcgaggacaccaacctgtgcgccatccacgccaagcgcgtcaccattatgcccaaggacatccagctcgcccgccgcatccgaggggagcgcgcctaggttcgtcttggtcgccggtaatactggccagtagctgttcttgtcctgtgatccgggtgtgtgtccggtgcttctgtttgtttgtgttgatatgatgtgtcgtctggtcctatgtatctcgatgctcgaatgaaatcgcatggcaacggaaagatcagttaatgatctaactgcaggtt

SEQ ID NO: 3566 - DNA, 593 bp, Triticum aestivum
atctcaatctccatctccaaaccgtagcagcagcagcacccctccttgccgacgaccccccagccccgatgcccgcacgaagcagacggcgcgcaagtccaccggcggcaaggcaccgaggaagcagctggcgaccaaggcggcgcgcaagtccgccccggccaccggcggcgtgaagaagccccaccgcttccgcccgggcaccgtcgccctccgtgagatccgcaagtaccagaagagcacggagctgctcatccgcaagctccccttccagcgcctcgtccgggaggtcgctcaggacttcaagaccgacctccgcttccagtcctccgccgtctccgccctgcaggaggccgccgaggcgtacctcgtcgggctcttcgaggacaccaacctctgcgccatccacgccaagcgcgtcaccatcatgcccaaggacatccagctcgcgcgccgcatccgcggagagcgcgcctaggctctgcacgcgccccgtccgccgcgcttggttgctagctgttttatgactctgtagttgtttgccctccttgtatgtcctgtggatgccatcgaatgttcaaatctctggtttg

SEQ ID NO: 3567 - DNA, 843 bp, Triticum aestivum
ccaatcctcaatcccccaaacaatccaccaagcaaacccgatggcccgcacgaagcagacggcgaggaagtccactggcggcaaggcgccgcggaagcagctggccaccaaggcggcgcgcaagtcggccccggccaccggcggcgtgaagaagccgcaccgcttccgccccggcaccgtggcgctccgggagatccgcaagtaccagaagagcacggagctgctcatccgcaagctgcccttccagcgcctcgtcagggagatcgcgcaggacttcaagaccgacctgaggttccagtcctccgctgtgtcggcgctgcaggaggccgccgaggcatacctggtggggctgttcgaggacaccaacctctgcgccatccacgccaagcgcgtcaccatcatgcccaaggacatccagctcgcaagacgcatcaggggcgagagggcctaagattcgtctgcttccttcccagttgctgctgcctactgaacttcactggcttctcaacatagagtcagtcctacagcatgtcttgggtgttattctgcaccattgcatttgctgcatttcatcatcagcattcattattcattggtggcttggtcagtaaccgttctgggcagtttctttttattggtatcacttgttgcatttctagttttctaccgagattgattatctttcagcttgcagaccttataccaggagacagtaggagtatttagcaaagctatgagtcgctggcttgcaactttgctagcaaggcctttgctaatatgtatgcttgccagttatgtcatcctcattttcctctcctgaatgaacaagtaatatcatgtcat

SEQ ID NO: 3568 - DNA, 1018 bp, Triticum aestivum
gcccgcagcaaccaaagccaagtttcgaagccgccgccgccgaggagcaggagaaggcgagaagccatggcccgtacgaagcagaccgcccgcaagtccaccggtggcaaggccccccgcaaacagctcgccaccaaggcggcgaggaagtcggcgccgacgaccggcggagtgaagaagccccaccgctacaggcccggtaccgtggcgctccgggagatccgcaagtaccagaagagcacggagctgctgatccgcaagctgccgttccagcgcctggtgagggagatcgcgcaggacttcaagacggacctccgcttccagtcccacgccgtgctggccctccaggaggcggccgaggcgtacctggtggggctgttcgaggacaccaacctgtgcgccatccacgccaagcgcgtcaccatcatgcccaaggacatccagctcgcccgccgcatccgcggggagcgcgcctaagcgagcgaggcaagtccagccccccgtcaccaccgtggcgacgttcgccggcattactagtactagttgattagcttcccctgtcgagataatgcatcttgtggtccgttgtagaaaacctggtgtgattagttatcctagttacggagactcttgtctgcttaattggttttagtttgcggtactattgcaaaagggatgcttactactgtgatgaaactgttggttaatatagtcttgattaacaattgctatcgatgtatatgcagacctgtggtgctgtgctagttgttacctcctgccctctgtatcctctcgtgatttcctcttctttgagtcgtttccgtgatctcctctggcgggacggaggtcccgttggatttggattctggcgcgctcgactcggaaccccgctttggttctcgcgcagaatgtagatacacagttaccagttccgacttgcgagtaattttaaaattgtgatcctttttgtcattttggctgctcggctgtgcagtgtgtgacggtccacagtttgatt

SEQ ID NO: 3569 - DNA, 820 bp, Triticum aestivum
ctgacgcgtgggcaatcccccaaatctcctcaacttcccggcgcatctccgacgacatggcccgcaccaagcagacggcgaggaagtccaccggcggcaaggcgccgaggaagcagctggccaccaaggccgcccgcaagtccgccccggccaccggcggcgtcaagaagccccaccgcttccgccccggcaccgtcgcgctccgcgagatccgcaagtaccagaagagcaccgagctgctcatccgcaagctccccttccagcgcctcgtccgcgagatcgcccaggacttcaagaccgacctccgcttccagtcctccgccgtctccgccctgcaggaggccgccgaagcgtacttggtggggctcttcgaggacaccaacctctgcgccatccacgccaagcgcgtcaccatcatgcccaaggacatccagctcgcccgccgcatccgtggcgagagggcctaggccgcaatctgtgcgccgtgagtgtttaggtccatcttagcctttgtccagccttggaaatgtatgcgtgctagtgtttgttcgttccatcgtggatgtagtgtgtctgatctgatgtcaccttcttgctgtcatcagtaactgaaatgacaatgttggctatctgttctaagatctgtgccttttggtgtgagcctgccattgaatgtgatgcacgaaacggtggatttgattatcccgatttgtgaaattttctgccggtgttagctactttgtcctaaataagttgcttccaagtatttagcttgaatgatgccttggctgtattaaatttcagtaaatcactagtaatc

SEQ ID NO: 3570 - DNA, 617 bp, Triticum aestivum
ccccaaccctcccagcgctcccccctcctcaacaacctcccggcgcatctccgactccatggcccgcaccaagcagacggcgaggaagtccaccggcggcaaggcgccgaggaagcagctggccaccaaggccgcccgcaagtccgccccggccaccggcggcgtcaagaagccgcaccgcttccgccccggcaccgtcgcgctccgcgagatccgcaagtaccagaagagcaccgagctgctcatccgcaagctccccttccagcgcctggtgagggagatcgcccaggacttcaagaccgacctccgcttccagtcctccgccgtctccgccctgcaggaggccgccgagtcctacctcgtggggctcttcgaggacaccaacctctgcgccatccacgccaagcgcgtcaccatcatgcccaaggacatccagcttgcccgccgcatccgtggagagagggcctaggccgcaatctgtgcgccgtgagtgtttaggtccaccttagcctttgtccagcgttggaaatgtatgcgtgctagtgtgttgttcgttccatggtggatgtagtgtgtctgatctgatgtcaccgtcttgctgccatcagtaactgaaa

SEQ ID NO: 3571 - DNA, 607 bp, Triticum aestivum
tcccaatctccaaacgccacagcgcacagcagccagatccccagcccctccatcccaatggcccgcacgaagcagacggcccgcaagtccaccggcggcaaggcgccgaggaagcagctggccaccaaggctgctcgcaagtcggccccggccaccggcggcgtgaagaagccccaccgcttccgccccggcaccgtcgccctccgcgaaatccgcaagtaccagaagagcacggagctgctcatccgcaagctccccttccagcgcctcgtccgggagatcgcccaggacttcaagaccgacctccgcttccagtcctccgccgtctccgccctgcaggaggccgccgaggcgtacctcgtcgggctcttcgaggacaccaacctgtgcgccatccacgccaagcgcgtcaccatcatgcccaaggacatccagctcgcccgccgcatccgtggggagagggcctaggtcttggttcgccggcagtaccgggtagtagctgttcttgtcctgtgatccgggtgtgtgtctggttcttctgtttgttggtgttgatatgatgtatcgtgatgcttgactgaaatagcaatggaaaagttcagttatc

SEQ ID NO: 3572 - DNA, 594 bp, Triticum aestivum
aaatcccaatctccaaactcctcagcgcagcagcagccagatccttccccatccatcccaatggcccgcacgaagcagacggcgcgcaagtccaccggcggcaaggcgccgaggaagcagctcgccaccaaggcggctcgcaagtcggccccggccacaggcggcgtgaagaagccccaccgtttccgccccggcaccgtggcgctccgggagatccgcaagtaccagaagagcacggagctgctcatccgcaagctccccttccagcgcctcgtccgggagatcgcccaggacttcaagaccgacctccgcttccagtcctccgccgtctccgcgctccaggaggccgccgaggcgtacctcgtcgggctgttcgaggacaccaacctgtgcgccatccacgccaagcgcgtcaccatcatgcccaaggacatccagctcgcccgccgcatccgtggggagagggcctaggtttggggtcgctgctggctagtagctgttcttgtcctatgatctgaatgtgttcagggcgcttctgtttgttggtgttgatatgatgtatcgtgatgcttgaatgaaattgcaattaaaaag

SEQ ID NO: 3573 - DNA, 729 bp, Triticum aestivum
gtgaaatcccaatctccaaactcctcagcgcacagcagccagatccttccccatccatcccaatggcccgcacgaagcagacggcgcgcaagtccaccggcggcaaggcgccgaggaagcagctcgccaccaaggcggctcgcaagtcggccccggccacaggcggcgtgaagaagccccaccgtttccgccccggcaccgtggcgctccgggagatccgcaagtaccagaagagcacggagctgctcatccgcaagctccccttccagcgcctcgtccgggagatcgcccaggacttcaagaccgacctccgcttccagtcctccgccgtctccgcgctccaggaggccgccgaggcgtacctcgtcgggctcttcgaggacaccaacctctgcgccatccacgccaagcgcgtcaccatcatgcccaaggacatccagctcgcccgccgcatccgtggggagagggcctaggtcttggttcgccggcagtactgggtagtagctgctcttgtcctgtgatccgggtgtgtgtcgggtgcttctgtttgttggtgttgatatgatgtgtcgtctggtcctatgtatgctgatgctcgaatgaaattgcatggaaagttcagtgttatcgatctgatgctcgaatgaatttaattttgcttgtaaatcgctccgtgattctgcgatggtgttcttgtcacatgtagcaagttgttgcagtgatggaatt

SEQ ID NO: 3574 - DNA, 643 bp, Triticum aestivum
ctccagtcccagatcccccaagagctcgcactcccccaccccaccccagcctctcgtcccgatggcccgcacgaagcagacggcgaggaagtccaccggcggcaaggcgccgcggaagcagctggcgaccaaggcggcgcgcaagtccgcgccggccaccggcggcgtgaagaagccccaccgcttccgccccggcaccgtcgcgctccgcgagatccgcaagtaccagaagagcacggagctgctgatccgcaagctccccttccagcgcctggtgcgggagatcgcgcaggacttcaagaccgacctccgcttccagagctccgccgtctccgcgctgcaggaggcggccgaggcctacctcgtcgggctctttgaggacaccaacctctgcgccatccacgccaagcgcgtcaccatcatgcccaaggacatccagctcgcccgccgcatccgtggcgagagggcctagagcgcttcgagcttggttggaggtgtagaggtgttagcttctgaatctgtgttgcgtggtggaaatctggcgttgtggtagtaggattcctctgttcgtgccatcgtggctgtgttatgttcctgttctgtgtctgatgtaaccatcttgttaccatcagcaatgaaaagt

SEQ ID NO: 3575 - DNA, 631 bp, Triticum aestivum
cccagatcccccaagaactccctctctccgcccccaccctcccttcccgatggcccgcacgaagcagacggcgaggaagtccaccggcggcaaggcgccgcggaagcagctggcgaccaaggcggcgcgcaagtccgccccggccaccggcggcgtgaagaagccccaccgcttccgccccggcaccgtcgcgctccgcgagatccgcaagtaccagaagagcaccgagctgctcatccgcaagctccccttccagcgcctggtgagggagatcgcgcaggacttcaagaccgacctccgcttccagagctccgccgtctccgcgctgcaggaggccgccgagtcctacctcgtcgggctcttcgaggacaccaacctttgcgccatccacgccaagcgcgtcaccatcatgcccaaggacatccagctcgctcgccgcatccgtggtgagagggcctagagcgtgtcgagcttcttcggaggtgtagagaatgttagcttctgaacctgtgttgcgtggtggaaacctggtgtcgtggtagtaggattcctcgtttgtgccatggtggctgtgttgtgttcttgtgctgtgcctgatgtaaccatcttgttaccatcagcaatgaaaagt

SEQ ID NO: 3576 - DNA, 558 bp, Triticum aestivum
cgccgaacaactctcaccggaacgcagcaaattccccagccttccctcgacccagatccgcaaaatggcccgcacgaagcagaccgcgcgcaagtcgaccggcggcaaggccccgcggaagcagctggcgaccaaggcggcgcgcaagtctgcgccggcgaccggcggcgtgaagaagccccaccgcttccgccccggcaccgtcgcgctccgcgagatccgcaagtaccagaagagcaccgagctgctcatccgcaagctgcccttccagcgcctcgtccgggagatcgcgcaggacttcaagaccgacctccgcttccagagctccgccgtgtccgccctgcaggaggccgccgaggcctacctcgtggggctcttcgaggacaccaacctctgcgccatccacgccaagcgtgtcaccatcatgaccaaggacatccagctcgcccgccgcatccgcggggagcgcgcgtaggcgccctctcgctcctgcttgatctcttcatgcctcatcgtgccatgatctagccgtgctgtagtttttagtatgtgcaatgg

SEQ ID NO: 3577 - DNA, 692 bp, Triticum aestivum
ctcgagccccgctccacttcaaaacacccggagcagcctctccgatctcccatcccagcgcccccagcaccccccgcgatggcccgcacgaagcagacggcgcgcaagtccaccggcggcaaggccccgcggaagcagctggcgaccaaggcggcgcgcaagtcggccccggcgaccggcggcgtgaagaagccgcaccgcttccgcccgggcaccgtggcgctgcgcgagatccgcaagtaccagaagagcacggagctgctcatccgcaagctgcccttccagcgcctggtccgcgagatcgcgcaggacttcaagaccgacctccgcttccagagctccgccgtctccgccctgcaggaggccgccgaggcctacctcgtcggcctcttcgaggacaccaacctctgcgccatccacgccaagcgcgtcaccatcatgcccaaggacatccagctcgcccgccgcatccgcggggagcgcgcctaggcgcctcgctcgccgcactgctaggtgttttaggctccctgttcccgtcgtgttccatgtgtgcgtcgctcctatgtaactggcttgttgctgtgcttcgatgtactacttatatcgatgaaatatggctaccaggatgagataaaatccctctgaattattctcttatttctgtgcttgtctccaccctcttaattactggg

SEQ ID NO: 3578 - DNA, 512 bp, Triticum aestivum
gatctcccatccccgcgccccccgctcctcccgcgatggcccgcacgaagcagacggcgcgcaagtccaccggcggcaaggccccgcggaagcagctggcgaccaaggcggcgcgcaagtcggccccggcgaccggcggcgtgaagaagccgcaccgcttccgcccgggcaccgtcgcgctgcgcgagatccgcaagtaccagaagagcacggagctgctcatccgcaagctccccttccagcgcctggtccgggagatcgcgcaggacttcaagaccgacctccgcttccagagctccgccgtctccgccctgcaggaggccgccgaggcctacctcgtcggcctcttcgaggacaccaacctctgcgccatccacgccaagcgcgtcaccatcatgcccaaggacatccagcttgcccgccgcatccgcggggagcgcgcctaggcgcctcgcttgccattgctaggtgtttaggatctgttcccgtcgtgttccatatcttatcgctcg

SEQ ID NO: 3579 - DNA, 557 bp, Triticum aestivum
aaaatctcattctccatccccaaaccgcagcagcagcaacccatccctccccgccaaccccgcagcagctccgatggcccgcaccaagcagacggcccgcaagtccaccggcggcaaggcgcccaggaagcagctggcgaccaaggcggcgcgcaagtccgccccggccaccggcggcgtcaagaagccgcaccgcttccgcccgggaaccgtcgcgctccgggagatccgcaagtaccagaagagcacggagctgctcatccgcaagctccccttccagcgcctcgtccgggagatcgcccaggacttcaagaccgacctccgcttccagtcgtccgccgtgtccgcgctccaggaggccgccgaggcgtacctcgtcgggctgttcgaggacaccaacctgtgcgccatccacgccaagcgcgtcaccatcatgcccaaggacatccagctcgcacgccgcatccgcggggagcgcgcctaggctctgtatgcgccctgtgccagctgcacctgaatcctgctagatgtttaatactctacagtagtctgctcct

SEQ ID NO: 3580 - DNA, 791 bp, Triticum aestivum
gggcggcccgctcgcgatctaggtgaaaatctcattctccaaacaccagagcgtcgcagcagccagatccgcagccagcccagctccgatggcccgcaccaagcagactgcccgcaagtccaccggcggcaaggcgccgaggaagcagctggcgaccaaggcggcccgcaagtccgccccggccaccggcggcgtcaagaagccgcaccgcttccgcccgggaaccgtcgccctccgggagatccgcaagtaccagaagagcacggagctgctcatccgcaagctccccttccagcgcctcgtccgggagatcgcccaggacttcaagacggacctccgcttccagtcctccgccgtctccgcgctccaggaggccgccgaggcgtacctcgtcggcctcttcgaggacaccaacctctgcgccatccacgccaagcgcgtcaccatcatgcccaaggacatccagctcgcacgccgtatccgcggggagcgcgcctaggctgttcgtccggccgccaccgccacggttccatcctggttgatcctgattggattcgatccgtcctgttattctagtccacccgtgcttcgaattgttactactaggttctagttcaagtaacggtcgtttgctgttgattaccagttggaaaaattggaaaggaagtgatctattttatccccatttctgagatcttatggatggacttttgtgcttggatgctttgtatggtgtatgatgatgccatcataggaatgattctcgtgctgagtttttttgctctgtacat

SEQ ID NO: 3581 - DNA, 749 bp, Triticum aestivum
ttccgcacccacttcggtcgccttccgattcgaacctcccccaaatccgcagcagtcgacaggaggccaagccaccgcgatggcccgtaccaagcagaccgcccgcaagtccaccggcggcaaggcgccccgcaagcagctcgccaccaaggcggcgaggaagtcggcgccgaccaccggcggagtgaagaagccccaccgctacaggcccgggaccgtcgccctccgggagatccgcaagtaccagaagagcacggagctgctgatccgcaagctgccgttccagcgcctggtccgcgagatcgcgcaggacttcaagaccgacctccgcttccagtcccacgccgtgctggccctccaggaggcggccgaggcgtacctcgtcgggctgttcgaggacaccaacctgtgcgccatccacgccaagcgcgtcaccatcatgcccaaggacatccagctcgcccgccgcatccgtggcgagagggcctaagccgtcctccccgtcaacgccgttagtggatcggaagtggaatgtgttgcttccggttgtagtttgttcctaattgccgtgctaggtctatcttcttctgtgtagaagaaatatggttgttggagtaagacgaacttgatatgtgatgatgttccttctggtttgcgatgaagcaaacgtatgtttatgatgcagacctcagaaccattgttgtaggcagcatcactgctgtcgtcgtgtgtgaatgtttgctgttcga

SEQ ID NO: 3582 - DNA, 627 bp, Triticum aestivum
ctccccagcaatcctctctccgcgcccacgaagcaagctccacactcccgatggcccgcacgaagcagacggcgaggaagtccaccggcggcaaggcgccgcgcaagcagctggcgaccaaggcggcgcgcaagtccgccccggccaccggcggcgtgaagaagccccaccgcttccgccccggcaccgtcgcgctccgggagatccgcaagtaccagaagagcaccgagctgctcatccgcaagctccccttccagcgcctggtgcgggagatcgcgcaggactttaagaccgacctccgcttccagagctccgccgtctccgcgctgcaggaggccgccgaggcctacctcgtcgggctcttcgaggacaccaacctctgcgccatccacgccaagcgcgtcaccatcatgcccaaggacatccagctcgcccgccgcatccgtggcgagagggcctaggctgcttcctagaatcctagtgtctgatctggtctcgaggtgtagagatgcgttactagtttcttattagcccttgtctgtggtagtaaggttcctcgacagttgtgttatggtgtgatgtactgtatgtgatggtaccatcttgttatcatcatcaatgagaagt

SEQ ID NO: 3583 - DNA, 658 bp, Triticum aestivum
ttctagatcgcgagcggccgtcccccaacccctcccagcgctcctccctccccaacctaccggcgcatctccgacgacatggcccgcaccaagcagacggcgaggaagtccaccggcggcaaggcgccgaggaagcagctggccaccaaggccgcccgcaagtccgccccggccaccggcggcgtcaagaagccccaccgcttccgccccggcaccgtcgcgctccgggagatccgcaagtaccagaagagcaccgagctgctcatccgcaagctccccttccagcgcctcgtccgcgagatcgcccaggacttcaagaccgacctccgcttccagtcctccgccgtctccgcgctgcaggaggccgccgaggcctacctcgtcggcctcttcgaggacaccaacctctgcgccatccacgccaagcgcgtcaccatcatgcccaaggacatccagctcgcccgccgcatccgtggcgagagggcctaggccgcgatctgcaatccatgcgtcgtctgttagatcgttgttaggaagtgtgtgtgctcgtagtgtttcagaatgtgcctgtgttgttcttgtcatggtgggtctgttatgcctaatctgatggtaccttcttgttgccatcagctatggaaatgaaaaatgttggctt

SEQ ID NO: 3584 - DNA, 754 bp, Triticum aestivum
aggcgaaataatttagtagtagctacagtactatttattcatccatccactccaatccccaatctccctcccaaccaatccaccaagcaaaccccgatggcccgcacgaagcagacggcgaggaagtccaccggcggcaaggcgccgcggaagcagctggccaccaatgcggcgcgcaagtcggcgccggccaccggcggcgtgaagaagccgcaccgcttccgcccgggcaccgtggcgctccgggagatccgtaagtaccagaagagcacggagctgctcatccgcaagctgcccttccagcgcctcgtcagggagatcgcgcaggacttcaagaccgacctccgcttccagagctccgccgtctccgcgctgcaggaggccgccgaggcctacctcgtcgggctcttcgaggacaccaacctctgcgccatccacgccaagcgcgtcaccatcatgcccaaggacatccagctcgcaagacgcatccggggcgagagggcctaggatagtgtctgtctcttctgcaggtgtagagattagcatgtgttttgcgtggtggagtgatcccgtgttcgtgctatgttgggtgtgtgtgatgttctagtgcagtgtctgatgttaccatcttgttgtcatcagcaatctgaatgaaagttggctgtcagatctctctccactttgtgttcttctgacgcattttgttgttcgtaatcctgaaatgtcaatgaatggtttctttgctgaaaaaaaa

SEQ ID NO: 3585 - DNA, 892 bp, Triticum aestivum
  N_region (8)..(8): n = any nucleotide
  N_region (37)..(37): n = any nucleotide
  N_region (78)..(78): n = any nucleotide
  N_region (107)..(107): n = any nucleotide
  N_region (179)..(179): n = any nucleotide
  N_region (181)..(181): n = any nucleotide
  N_region (239)..(239): n = any nucleotide
  N_region (274)..(274): n = any nucleotide
  N_region (287)..(287): n = any nucleotide
agatttanttaggtgatacaagtaccagttcctgaantgagaacacctacgtacagtaaccatgagcacctgcggcanaagtggactcaaatggagggtttattcanagttcagcacatctgaactttcagatgacctcgttaagctggatgagcatcttgtagagacccggtgcgttnantgaggattcggcgggcggttatttgcggcgaaaagcctagctccccacacaaggagcnccttactggtgtcatccttgtgcacaattacctcnataaagcacaggntgtccttgtgaggtcctagggatgcctcaattgcttcccccaatccctcctcctcaagcaccagaacctcctccccccggcgcatcgccatggcccgcaccaagcagacggcgaggaagtccaccggcggcaaggcgccgaggaagcagctggcgaccaaggccgcccgcaagtccgccccggccaccggcggcgtcaagaagccccaccgcttccgccccggcaccgtcgcgctccgcgagatccgcaagtaccagaagagcaccgagctgctcatccgcaagctccccttccagcgcctcgtccgcgagatcgcccaggacttcaagaccgacctccgcttccagtcctccgccgtctccgccctgcaggaggccgccgaggcgtacctggtggggctcttcgaggacaccaacctctgcgccatccacgccaagcgcgtcaccatcatgcccaaggacatccagctcgcacgccgcatccgtggcgagagggcctaagctctgttcgtcgtcgtcttagccagatgtgttcatcggtggaaatgtagtgtgcctgatctgatgtcaccatcttgttgtcatcagtaatttaaatgaaaaatg

SEQ ID NO: 3586 - DNA, 710 bp, Triticum aestivum
caatgggggctacaccatcgagtgaagatccatgacggtccttacaacgtcatcaagaactggaactacaccagcttggtggaagcattccataatggcgagggcaaatgctatactgcaaaggttcgaacggaggaggaactggaggaagcaattgaggcatccctaggacctcacaaggacagcctgtgctttatagaggtaattgtgcacaaggatgacaccagtaaggagctccttgtgtggggagctaggcttttcgccgcaaataaccgcccgccgaatcctcagtgaacgcaccgggtctctacaagatgctcatccagcttaacgaggtcatctgaaagttcagatgtgctgaactctgaataaaccctccatttgagtccattgctgccgcaggtgctcatggttactgtacgtaggtgttctcagttcaggaactggtacttgtatcacctaaataaatctgaaatcgatgctgtggccagctaaagacgctcttggtttcggcatctttcttggttattccaactgacggaagtttcagacttgctgtgcttttcaaaggcacacgttaggcattaaagaagaagaaagctgtgcttatagaatctgaagatgattgaattatgtggtgaagcagcagcgtagttcaatggtgcacctggtggacaaatctctaagatggacaatttccttctttgata

SEQ ID NO: 3587 - DNA, 628 bp, Triticum aestivum
aaatcccccaagcaagcaagcaagcagccaccgaagcagcctccgctcccctccccgaccccgaagcaatggcgcgcacgaagcagacggcgaggaagtcgaccggaggcaaggcgccgaggaagcagctggcgaccaaggccgcccgcaagtcggccccggccaccggcggcgtgaagaagccccaccgcttccgccccggcaccgtcgcgctccgtgagatccgcaagtaccagaagagcacggagctgctgatccgcaagctgccgttccagcggctggtgcgggagatcgcgcaggacttcaagaccgacctccgcttccagagctccgccgtgtccgcgctgcaggaggccgccgaggcgtacctcgtcgggctcttcgaggacaccaacctctgcgctatccacgccaagcgcgtcaccatcatgcccaaggacatccagctcgcccgccgcatccgcggggagagggcctgagcagcggtcgccgtgtgcgtgcgttgtcagagagtcgtgctgtgatgttccggtcttagagcttggtggtgtagctaacatgttcctgtccgctctcgtcgttgccttgccatatgtagccccttgctgcgatgaattatcaatgaaga

SEQ ID NO: 3588 - DNA, 641 bp, Triticum aestivum
cccaaatctcccaagcagttcatctcctcaaccctgagcccgccgcgcccgcctgcccgccccgatggcccgcacgaagcagacggcgaggaagtccaccggcggcaaggcgccgcggaagcagctggcgaccaaggcggcgcgcaagtccgccccggccaccggcggcgtgaagaagccgcaccgcttccgccccggcaccgtcgcgctccgcgagatccgcaagtaccagaagagcacggagctgctcatccgcaagctgcccttccagcgcctggtgcgggagatcgcgcaggacttcaagaccgacctccgcttccagagctccgccgtgtccgcgctccaggaggccgccgaggcctacctcgtggggctgttcgaggacaccaacctctgcgccatccacgccaagcgcgtcaccatcatgcccaaggacatccagctcgcccgccgcatccgtggcgagagggcctagattttgcttcgtggtgcctgatctgacgtgtagagatggtagcttcgtcttagcatgtgttgagtggtggaatgatcttgtatcgtggtaggaggaatcctcgttcgtgctagcatggctttgttatgttcttgtgtactgtttgatgttaccctcttgttgccat

SEQ ID NO: 3589 - DNA, 644 bp, Triticum aestivum
gatggcccgcacgaagcagacggcgcgcaagtccaccggcggcaaggcgccgcggaagcagctggcgaccaaggcggcgcgcaagtcggccccggccaccggcggcgtgaagaagccgcaccgcttccgcccgggcaccgtcgcgctgcgggagatccgcaagtaccagaagagcacggatctgctcatccgcaagctccccttccagcgcctggtgagggagatcgcgcaggacttcaagacggacctccgcttccagagctccgccgtgtccgcgctgcaggaggccgccgaggcgtacctcgtcgggctcttcgaggacaccaacctctgcgccatccacgccaagcgcgtcaccatcatgcccaaggacatccagctcgcccgccgcatccgcggggagcgcgcctaggttttgggtcgccgccggtgacactgggtggttgctgttcctgtctggtgatcctgatccggatgtgtgctgggtgcttctgtttgttcgtgttgatatgatgtgtgtcctcttgtctgtcccgatgctggaatgaaatggcaatgcaaagttcagttatcatctggtgcctcatgtttgctgcatgattgcatttgtgatttttcaagtgttatagttgtgaaatgaagta

SEQ ID NO: 3590 - DNA, 476 bp, Triticum aestivum
tggagaactacgcctacaacatgaggaacaccgtcaaggacgacaagatcgcgtccaagctccccgccgacgacaagaagaagatcgaggacgccatcgacggcgccatcagctggctcgacaccaaccagctcgcggaggcggacgagttcgaggacaagatgaaggaactggagggcgtctgcaaccccatcatcgccaagatgtaccagggcgctggcgccgacatgggaggcatgggcggtgccgccggcatggatgaggatgcgccggccgggggaagcggtgcggggcccaagatcgaggaggtcgattaagctgctggccgtggtgatttggcggctgggagagtacaaatgtgtgaactctggagtgttaagtttgtgaagtgtcgtcgtttttagattttggagaagggggaactttggatggatgtcagtgttgatgtaatcctgaacttgtatcgatttaggtag

SEQ ID NO: 3591 - DNA, 656 bp, Triticum aestivum
ctcgcgccacgtcagctgcccgatttgccgttccgtcgtcgtcgtgccatccagcctcccggctgcggcgactgatgccgaggcagagggcggccaagtggaagagcaccaggtgtttgacgaaatgtccccgtcggaatcactgcccgagggttccgaggattccgatgcctcgtcggacactcaaagtgaggatgcccaagttgtagcagaggagaatggaagtgcggcgcccaagccaatacggcgctctgcctccatggactcgccgctgttccttgtggttgtgcctgaaggtcagggtggtgctctgcaggctaatcgcaaattgccgagtggtcgacagatgagcatcttcagggcgaaggagaaggaggcagcagggacatcttcatcctcttgtcaaacaggcgggttcaggattgccaggtctatgtcaagcagtggtcggggattgttcttctcaaggaatgggcgctccactggcaacgtgctgccactttgagttggtgtaatgttactgtcaagaggatacagcctcagcaaagccgggagctggtagtgtactcacgtgtctgttaatagagagtttacatgggtagcagtggctcggagagaaaatctcatctgaattcacgaaatctgtgagtgaccag

SEQ ID NO: 3592 - DNA, 598 bp, Triticum aestivum
  N_region (332)..(355): n = any nucleotide
gcatggtgcaggaggcggagaagtacaagtcggaggacgagcaggtgcggcacaaggtggaggcccgcaacgcgctggagaactacgcgtacaacatgcgcaacacggtgcgggacgagaagatcgcgtccaagctccccgccgacgacaagaagaagatcgaggactccatcgaggacgccatcaagtggctcgacggcaaccagctcgccgaggccgacgagttcgaggacaagatgaaggagctggagagcatctgcaaccccatcatctccaagatgtaccagggtgctggcccgggcggcgcggccggcatggacgaggacatgccnnnnnnnnnnnnnnnnnnnnnnnntgggagcggtgccgggcccaagatcgaagaagtggactgagtgagtcgtgacaggtcctggagtggtagtgtgttctgttgcctgtggtcgtgtgtggttctgtcgaataacgaggacgcttgtatgagtgtagttattaatgatgtagtactaggttagtagaggaaatgataaataatgtgtaaacgcaagaacgacatacacatgtggttcattgtactagtatgttgttttgcctggtt

SEQ ID NO: 3593 - DNA, 626 bp, Triticum aestivum
  N_region (5)..(5): n = any nucleotide
  N_region (15)..(15): n = any nucleotide
  N_region (68)..(68): n = any nucleotide
  N_region (72)..(72): n = any nucleotide
actgncagaagaacnagatcaccatcaccaacgacaagggcaggctgagcaaggaggagatcgagaanatgntccagcaagctgagaagtacaagtccgaggacgaggagcacaagaagaaggtggagtccaagaacgccctggagaactactcgtacaacatgcgcaacaccatcaaggacgagaagatcgcctccaagctgccggcggacgacaagaagaagatcgaggatgccatcgatgctgccatccagtggctggacacgaaccagctcgctgaggcggacgagttcgaggacaagatgaaggagctggaggccctgtgcaaccccatcatcgccaagatgtaccagggtgctggtgctgacatggagggcggcatggacgacgacaccccagctgcgtccggcggccccggccccaagattgaggaggtggactaaacagtcgatgttatgtggtggaggcgacgaagcctgctgctagttattattatgtcgtctcttatccgagacttgaggttgtgatggttattgtttcgctccgagtggtccgagttattccgtgcgggttggaacattcgtggattaaatgggccacgatgtcacgtcttagtcaatatatta

SEQ ID NO: 3594 - DNA, 632 bp, Triticum aestivum
tcgagcgcatggtgcaggaggcggagaagtactagtctgaggacgagcaggtgcggcacaaggtggaggcccgcttacgcgctggagaactacgcgtacaacatgcgcaacacggtgcgggacgagaagatcgcgtccaagctccccgccgaagacaagaagaagatcgaggactccatcgaggacgccatcaagtggctcgacggcaaccagctggccgaggccgacgagttcgaggacaagatgaaggagctggagaacatctgcaaccccatcatctccaagatgtaccagggcgccggcccgggcggcgcggccggcatggacgaggacatgcccggcggcggcgcgggcaccggcggtgggagcggtgccgggcccaagatcgaagaagtggactgagtgagtcgtgacaggtcatggagtggacgcggctatgccgcacttaaaatgttctgatgcctgtgttcgtgtgcttctgtcgaataacgagggtgcttgtatgagtttggttaatgacctagtagtactaggttagtagaggaaatgataaataatctgtaaaagcaagaacgacaatacacacgtctggttcctgtactatgttgtttttgcctgagcttcccaggagc

SEQ ID NO: 3595 - DNA, 923 bp, Triticum aestivum
  N_region (651)..(673): n = any nucleotide
gcttgtttttgctgaaggcgcagaaaatggccttgaattcacgattgtgagacctttcaattggattgggccaaggatggacttcattcctggcgttgatggtcctagcgagggtgttcctcgggttttggcttgcttcagcaacaatctcctgcgcagagagcccctgaagcttgtcgatggcggcgagtcccagagaacttttgtttacatcaaggatgccattgaagctgttcttttgatgattgaaaaccctgctcgagccaatggtcatatcttcaatgttgggaatcctgacaatgaagtcactgttagggagttggccgaaatgatgacagaggtctacgctaaggtctcaggagagcccccgctggaggagcctgtgatcgacgtgagcgcgaaagaattctatggggaagggtacgacgacagcgacaagaggatccccgacatgaccctgatcaacaagcagctagggtggaaccccaagacccctctcaaggacctgctggagacgacgctgacctaccagcacaagacctacaaggaggccgtcaagacgcagatgtgcctggccacggcgacgccttcaagctagacgggctcttgatcttttggaagccagatacttatatcgtagtgaaacaaacnnnnnnnnnnnnnnnnnnnnnnncgcctctagatcccaccccacccacctatcttcttacctacctagattcgtcgtcattgtgtaaccctatatcgggcaaagggaactgagtatctgagtatctattatatacctgtggtggcagtgtttgttacattttgttggttggttgcacctcccgtgctattcttttgctgttagtgagagagatatattcttgttcggcatagctgattatgatgatgtgagattacggtctggaagtttacaa

SEQ ID NO: 3596 - DNA, 732 bp, Triticum aestivum
tggcaagttcgagcttcggcatcctctgcaccaggggttcccagatcactgtcgcttggacatgacgccaatggtatcctgaacgtgtctgctgaggacaagacgaccgggcagaagaacaagatcaccatcaccaacgacaagggcaggctgagcaaggaggagattgagaagatggtccaggaggctgagaagtacaagtctgaggatgaggagcacaagaagaaggtggagtcgaagaacgccctggagaactactcgtacaacatgcgcaacaccatcaaggatgagaagatcgcctccaagctgccggcggacgacaagaagaagatcgaggacgccattgacgctgccatccagtggctggacacaaaccagctcgctgaggcggatgagttcgaggacaagatgaaggagctggaggctctgtgcaaccccatcatcgccaagatgtaccagggtgctggtgccgacatggagggcggcatggacgatgacaccccggctgcttccggcggtgctggccccaagatcgaggaagttgactaaacgagttgatgttctgttgcagaggcggtgaagcctgcttcttagttattatgtgtgttctatcgttatcttagactgggttgtggtggttattgttttggtacgagtggtcggggttattctgtgcgagttaacattcgtggaacatcagtggattatgggtcgtcacgtctaagtaatata

SEQ ID NO: 3597 - DNA, 751 bp, Triticum aestivum
cccaggggagttccccagatcacgtgtctgccttgacatcgacgccaatggtatccgtgaacgtgtctgccgaggacaagacgactgggcagaagaacaagatcaccgatcaccaacgacaagggtaggctgagcaaggaggagatcgagaagatggtccaggaggctgagaagtacaagtctgaggacgaggagcacaagaagaaggtggagtctaagaacgccctggagaactactcgtacaacatgcgcaacaccatcaaggacgagaagatcgcctccaagctgccggcagacgacaagaagaagatcgaggacgccatcgatgctgccatccagtggctggacacgaaccagctcgctgaggcggacgagttcgaggacaagatgaaggagctggaggccctgtgcaaccccatcatcgccaagatgtaccagggtgctggcgccgacatggagggcggcatggatgacgacaccccggctgcatccggcggcgctggccccaagattgaggaggtcgactaagctagtcgatgttctgtggcagagacctgctgcttagttattattatgtcgtgccctatcgttatctgagactgggttgtggtggttattgttttggtccgagtggtcagggttattccgtggagtaaacattcgtggaacatcagtggattatgggtcacgtcacgtctaagtaatatattaatctaaatcatccagtggattatgctgcttgtagcaatca

SEQ ID NO: 3598 - DNA, 836 bp, Triticum aestivum
gagaggacaaggaccagggacaacaacctgctcggcaagtttgagctctccggcatcccgcctgcactcaggggtgtccccagatcactgtctgcttcgacattgatgccaacggtatcctgaatgtctctgctgaggacaagaccactggccagaagaacaagatcaccatcaccaacgacaagggcaggctgagcaaggacgacattgagaagatggtccaggacgcagagaagtacaagtctgaggacgaggagcacaagaagaaggttgacgccaagaactccctggagaactacgcctacaacatgaggaacaccatccaggacgagaagatcgcctccaagctgcccgctgacgacaagaagaagatcgaggacgctgtcgacgctgcgatccagtggcttgacgccaaccagcttggtgaggttgacgagttcgaggacaagatgaaggagctggagggcctctgcaaccccatcatcgccaagatgtaccagggcgctggtgctgacatgccgggaggcatggacgaggacgcgccggctgccagcggcggtgctggccccaagatcgaggaggtcgactaagttagtcgctttcatatacgccatttgattcagtcctgggtgccaatcatatcacctgggctggaagttttgttgtacttttggtctgtagcatcagtgtcgtaaacaatgcaatgatgcatgttttggctcattgttgatttcagcttaatgcttattgtttgtactacctacacctgtgatttcattctgaattcttagagcttaaatttggctgttgtctctgtattcgagttcagagttaag

SEQ ID NO: 3599 - DNA, 766 bp, Triticum aestivum
agtcgtccaggagctggatcgtcgtgtcccgccggtcgtgaaagaggtgccgacctatgctcgctctgcagcagctgaggtgcagaagacaggcataatggggcacagcaactggcctggccaagtcggccattgctcgtgctgagccaaaggcccgtgacttgtatacccgctatgagcctgtggcggagcgcaaggctgctgaagcctgggccgccctgaaccgcctcccgctcgtcccctcggtgacccgtgctgtcctccccacggcagcacagctctcagccaagtacaactctgccgtgcttgatggcgcgaagcgtggcaactccgtcgccacctacctcccgctcgtcccaactgagcgcattgcaagggttttcgccaacccggccgccgacactgcgcctgccacagctcctgagatgcagcccatcccgacgcagtaacaataagagctacccggagttctattattacctaatagctgtaggagtcagtatctcgttgtagtgtcttgtttggcttgtggtggacagtggtattatgtgtggatggtcactgtggtatccgcctgtgtatggaggcgagaatgctgctgctgtgcggcaacacctgctttgcgttttagtttgtgctgcatgaaccactgtgtgtaatgctttgaatcaaagttacatgaaacaccatctgtaaattcataactctttttatatgagtgtgtatttgactgtcattggcattgttttatttgctattactcgag

SEQ ID NO: 3600 - DNA, 757 bp, Triticum aestivum
gaacgtgtctgctgaggacaagacgaccgggcagaagaacaagatcaccatcaccaacgacaagggcaggctgagcaaggaggagattgagaagatggtccaggaggctgagaagtacaagtcagaggatgaggagcacaagaagaaggtggagtccaagaacgccctggagaactactcgtacaacatgcgcaacaccatcaaggacgagaagatagcctccaagctgccggcggatgacaagaagaagatcgaggaggccatcgactctgccatccagtggctggacacgaaccagctcgctgaggccgatgagtttgaggacaagatgaaggagctggaggccctgtgcaaccccatcatcgccaagatgtaccagggtgctggcgccgacatggagggcggaatggatgacgacaccccagctgcatctggcggtgctggacccaagatcgaggaggtcgactaaacgggtcgatgttctctggcagaggcggcgaagcctgctgcttggttattatggtgtcctattgttatctgagactagttgtggtggttattgttttggtccgagtggtcgggggttatgctgtgcgagttaaacattcggtggaacatcaggattatgggtcacgtcacgtcgaagtaatatagtattattctaaatcatccggtgcttttgggcagttcactatccttttcttttcatgggagtgtgttaatcattccattttttctatgcgcctaataagctggt

SEQ ID NO: 3601 - DNA, 906 bp, Triticum aestivum
caggttttcaccacctaccaggaccagcagaccccgtctccatccaggtctttgagggtgagcgtagcatgaccaaggactgccgtcttctcggcaagttcgacctttctggcattcccccagctccaaggggcactcctcagatcgaggtcaccttcgaggttgacgccaacggtatcctgaacgtgaaggccgaggacaagggcacgggcaagtcggagaagatcaccatcacgaacgagaagggccgcctgagccaggaggagatcgaccggatggtcaaggaggcggaggagtttgccgaggaggacaagaaggtgaaggagcggatcgacgcccggaaccagctggagacctatgtctacaacatgaagaacacggtgggcgacaaggacaagctggcggacaagctggagagcgaggagaaggagaaggtggaggaggccctcaaggaggcgctcgagtggctggacgagaaccagacggccgagaaggaggactacgaggagaagctcaaggaggtggaggccgtgtgcaaccccatcgtgtcggccgtgtaccagaggtccggcggcgcgcccgggggcgagggcgccgacggcggcgtcgacgacgaggaccatgacgagctgtagatggtttgtgaaccaatttttgtaatggtagggtggagaggacatggataattggtactgctgcttactaaggtctggggttgttgggggtggtcgggtttattcgcagacaccggtactgttgttagtctgttggccgagctgtagagaactctttgctgctgctgttacttccttctgatgttttttcgttttgttattatatagccggatggattcgcatcggaactttatgtgaagaatagatgatgcagtttatctatacctcctg

SEQ ID NO: 3602 - DNA, 786 bp, Triticum aestivum
cttgcagttcgactttctgcatcctcccgcacccaggggagttccccagatcacgtctgctttgacatcgatgccaatggtatcctgaacgtgtctgctgaggaacaagacgactgggcagaagcacaagatcaccatcaccaatgacaagggcaggctgagcaaggaggagatcgagaagatggtccaggaggctgagaagtacaagtcggaggacgaggagcacaagaagaaggcggagtccaagaatgccctggagaactactcgtacaacatgcgcaataccatcaaggacgagaagatcgcctccaagctgccggccgacgacaagaagaagatcgaggatgccatcgatgctgccatccaatggctggacacgaaccagctcgctgaggcggatgagttcgaggacaagatgaaggagctggaggccctgtgcaaccccatcatcgccaagatgtaccagggtgctggtgccgacatggagggcggcatggacgacgacaccccagctgcatccggcggccctggccccaagatcgaggaggtcgactaaacagtcagttgttctgttgcagaggcggcgaagcctgctgcttattataccgtgtctgtgttatctgagacttgaggttgtggtggttattgttttgcttccgagtggtcggagttattccgtgcgagttgcaacattcgtggtagtggatcaagggttatgatgtctcacgtctaagtatattattagtttgttggtatttctactgtacctttatattactttgattc

SEQ ID NO: 3603 - DNA, 591 bp, Triticum aestivum
aatacggcgctctgcctccatggactcgccgctgttccttgtggttgtgcctgaaggtcagggtggtgctctgccggctaatcgcaaattgccgactggtcgacagatgagcatcttcaaggcgaaggagaaggaggcagcagggacatcttcatcctcttgtcaagcaggcgggttcaggattggcaggtccatgtcaagcagtggtcggggattgttcttctcacggaatgggcgctccactggcaacgtgctgccactttgagttggtgtaatgttactgtcaagaggatacagcctcagcaaagccgggagctggtagtgtatcagtgtctgttgataggaagtgtataccggatacctgcagtggctcggagagaaagtctcattctcatctgaaatctgtgagttgaccagagtaattattgtgtgataagtatttctcgagtggatgtgctcgtgttaacttgcatgcctaagtttcctttatcacatgtccacttcaagctctgctcaagtgaattttggggaagaagctgaaggttggcttcttcatgtaatatttatgtatagcaatcttgcaaagagtgg

SEQ ID NO: 3604 - DNA, 508 bp, Triticum aestivum
agaacatgatgtgcgccgccgacccgcgccacgccggtacctgacggcctcggccatgttccgcggcaagatgagcaccaaggaggtggacgagcagatgatcaacgtgcagaacaagaactcgagctacttcgtggagtggatccccatcaacgtcaagtcgagcgtgtgcgacatcgcgcccaggggcctgtccatggcgtccaccttcatcggcaactcgacgtccatccaggagatgttccggcgcaaggccttcctccactggtacacgggcgagggcatggacgagatggagttcaccgaggccgagagcaacatgaacgacctggtcgccgagtaccagcagtaccaggacgccaccgccgacgaggaggaggagctgtacgaggacgaggacgacgccgacctccaggagtaggggcgtgcgaggtctgggttcttctgtgatcgcgtgcgtgctcagtcgggggctatttctgatggctccatgttgctgctactagta

SEQ ID NO: 3605 - DNA, 681 bp, Triticum aestivum
  N_region (355)..(383): n = any nucleotide
ccgcctgcttccgagggaagatgagcaccaaggaggtggacgagcagatgctcaacgtccagtacaagaactcgtcgtacttcgttgagtggatccccaacaacgtcaagtcaagcgtgtgcgacatgccgcccaggggcctgaagatggcgggcacctttgtcggcaactccacgtccatccaggagatgttccgcagggtgagcgagcagttcacggccatgttcaggaggaaggccttcttgcactggtacacgggcgagggcatggacgagatggagttcaccgaggccgagagcaacatgaacgacctcgtcgcagagtaccagcagtaccaggacgcgaccgctgaggnnnnnnnnnnnnnnnnnnnnnnnnnnnnncgtgacgcgtagtagtggcgatcgcgctccgccagctatatgtcccccgcttcaggtctgtcgctgtgtccagtgagagtttgtggtttcctcctgtggcttggatgagtcgaggttgcgtcttgtactccgttttgtaatttgctacggctagtagtgcgttgcagtgtgtcttgttccgcatccatcctttggtcggtcggtcggtccatagctgacggtggcctgaactgtcgagtgctctccctgagctggtcgtcgtcgccttgtaagttctgacaattattattgttagtcg

SEQ ID NO: 3606 - DNA, 676 bp, Triticum aestivum
acgggcgctacctgacggcctcggccatgttccggggcaagatgagcaccaaggaggtggacgagcagatgctgaacgtgcagaacaagaactcgagctacttcgtggagtggatccccaacaacgtcaagtcgacggtgtgcgacatcccgcccacaggcctcaagatggcctccaccttcatcggcaactcgacgtccatccaggagatgttccggcgcgtgagcgagcagttcacggccatgttccggcgcaaggccttcctgcactggtacacgggggagggcatggacgagatggagttcaccgaggccgagagcaacatgaacgacctcgtgtccgagtaccagcagtaccaggacgccaccgccgacgaggagggcgagtacgaggacgaggaggacgatgccgacctccaggactagagatcaaccgagtaccgcgtatgattattggttttcttatgttaatttgatgattgctttaggcttgtgtagtgctgtttctgtctttcttggtgggtgctgttgttgaggagcagaaaactcatggaagggtggttgctggtgagatagcttggtataacctctggcacaattgctgtgtgcaagcaacgccttgttgcgttctactggtagtggtgtgtgttgtctggtgtccagtgtctaactatcat

SEQ ID NO: 3607 - DNA, 688 bp, Triticum aestivum
  N_region (380)..(406): n = any nucleotide
cgctacctcacagcctctgccatgttccgtgggaagatgagcaccaaggaggttgacgagcagatgctgaacgtccagaacaagaactcatcatactttgtggagtggataccccacaatgtgaagtcaagcgtgtgtgacatccctcccacaggcctgtcaatgtcgtccacctttgtcggcaactccacctccatccaggagatgttccgccgtgtgagcgagcagttcactgccatgttcaggaggaaggctttcttgcactggtacaccggggagggcatggatgagatggagttcaccgaggcggagagcaacatgaacgatctggtcgctgagtaccagcagtaccaggatgccacagccgacgaggaggaagnnnnnnnnnnnnnnnnnnnnnnnnnnnctgcctaagccacctgacctcatatggtcatcctgctgtctgttagatatgccttgtgtttactattgctgtcgatttggtggtgcttgtggtgcggatagatctttaggtggttggtaacacttatagatgcttttgctgcttcggcgaatcgatattttttgaactgttttttttttgtatgttgatggtggttttatgcgaactgtgatattagcgtaactgtgggcttgatacccgtaaatttggcaactatattttgtgtctgttttctgtgcattt

SEQ ID NO: 3608 - DNA, 668 bp, Triticum aestivum
  N_region (436)..(461): n = any nucleotide
cggagctcacacagcagatgtggacggccaagaacatgatgtgccgcggcggacccgcggcatggccgctacctctcggcgatccgcccatgttccggggcaagatgagcaccaaggaggtggacgagcagatgatgaacgtgcagaacaagaactcctcctacttcgtggagtggatccccaacaacgtcaagtccagcgtctgcgacatcccgcccgtggggctcgccatgtcctccaccttcgtcggcaactccacctccatccaggagatgttccgcagggtcagcgagcagttcaccgccatgttccgccgcaaggccttcctccactggtacaccagcgagggcatggacgagatggagttcaccgaggccgagagcaacatgaacgacctcgtcgccgagtaccagcagtaccaggacgccaccgccgnnnnnnnnnnnnnnnnnnnnnnnnnncccgccgccgaccaagcctgatcctttccgttcatccattccttgcgtagcgtcggtttatgctgccaatcgagttcagggtcgccatatatacatatatctactcttcatcatgccgttagtatgtagtattataccgtaatatcttgtcgtcgtgtttgcctgtatttgtatgtatgcttttttcgtgctacctacatatatggt

SEQ ID NO: 3609 - DNA, 674 bp, Triticum aestivum
tcacggtgccggagctcacacagcagatgtgggacgccaagaacatgatgtgtgcggccgacccgcgccatggccgctacctcacggcgtccgccatgttcaggggcaagatgagcacaaaggaggtggatgagcagatgatgaacgtgcagaacaagaactcctcctacttcgtggagtggatccccaacaacgtcaagtccagcgtctgcgacatcccccctgtcggcctcgccatgtcctccaccttcgtcggcaactccacctccatccaggagatgttccgcagggtcagcgagcagttcaccgccatgttccgccgcaaggccttcctccactggtacaccagcgagggcatggacgagatggagttcaccgaggccgagagcaacatgaacgacctcgtcgccgagtaccagcagtaccaggacgccaccgccgaggaggagtacgacgacgaggaggagcccgccgccgaccaagcctgatcccttccatgcattcgtccattcctcgcgtacttgggtttgtgctgccaatcgagtttgagtagccatatatacatatatctactcttcatcatgtcgttagtacgtagtattataccgtaatatcttgtcgtcgtgttggcctgtatttgtatgtatgcttgtttcgtgctacctttatatact

SEQ ID NO: 3610 - DNA, 607 bp, Triticum aestivum
  N_region (398)..(423): n = any nucleotide
atgatgtgcgcggccgactcgcgccacggccgctacctcacggcgtccgccatgttcagaggcaagatgagcaccaaggaggtggacgagcagatgatgaacgtgcagaacaagaactcctcctacttcgtcgagtggatccccaacaacgtcaagtccagcgtctgcgacatcccgcccgtggggctcgccatgtcctccaccttcgtcggcaactccacctccatccaggagatgttccgcagggtcagcgaacagttcaccgccatgttccgccgcaaggccttcctccactggtacaccagcgagggcatggacgagatggagttcaccgaggccgagagcaacatgaacgacctcgtcgcagagtaccagcagtaccaggacgccaccgccgnnnnnnnnnnnnnnnnnnnnnnnnnnccagccgccgaccaaccatgatcatcccttctcttcgttcgtctccctttccatgcgtgcgtacgtcggtttgatttgtgcagctgccaatccagttcaggagggtcgccatatatacatatatctactcttcaccatgtcaagttagtacctagtagtattatgtaccgtaatatcttgtcgt

SEQ ID NO: 3611 - DNA, 625 bp, Triticum aestivum
caacgtcaagtcgagcgtgtgcgacatgccgcccagggggctgaagatggcgggcaccttcgtcggcaactccacgtccatccaggagatgttccgcagggtgagcgagcagttcacggccatgttcaggaggaaggccttcctgcactggtacacgggcgagggcatggacgagatggagttcaccgaggccgagagcaacatgaacgacctcgtcgccgagtaccagcagtaccaggacgcgaccgccgacgatggagtacgacgaggaggagtgatgaggtacgcgacgcggagtagtggcgccgtgccctgctccaccccagctatatgtcccccggttcaggtctgtcgccatgtccaggtcgcgtttcctccggtgagggtttgtgtggtttcctcctgtggcttggatgagtcgaggttgcgtcttgtgctccgttttgtaatttgctacggctagtagtgcgttgcagtctgtcgtgttcagcatcatttggtcagtcggtccatagctgacgatggcctgaactgtcgagtgctctccttgagctagtcgtcgccttgtaagttctgacaagtattattgttagtcgttcgcttctagcttaccaatataatgagt

SEQ ID NO: 3612 - DNA, 742 bp, Triticum aestivum
gtcccggactgacccagcagattgtgggactccaagcacatgatgtgcgccgccgactcccggcacgccggtacctgacgcctcgccatgttccgcggcaagatgagcaccaaggaggtggacgacagatgatcaacgtgccagaacaagaactcgtcctacttcgtggagtggatccccaacaacgtcaagtcgagcgtgtgcgacatcgcgcccaggggcctgtccatggcgtccaccttcatcggcaactcgacgtccatccaggagatgttccggcgcgtgagcgagcagttcacggccatgttccggcgcaaggccttcctgcactggtacacgggcgagggcatggacgagatggagttcaccgaggccgagagcaacatgaacgacctggtcgccgagtaccagcagtaccaggacgccaccgccgacgaggaggaggagctgtacgaggacgaggacgacgccgacctccaggagtaggggccagcgaggtctgttccgtggatcttccttgatcgttgcccggggctatttctgatggctccatgttgctactagtagtgtgtgtgtttcgcgcttgctggcccccgtcgtcttcggggtgtcgtggactggttgcttgtgtagtttgtctgtgtcgggttaatccggtagtcagtttgttggtgaacttgagatcttagtagcaggtttgtaatatgtctggctctgaatcctaatgccatgtttgctgttt

SEQ ID NO: 3613 - DNA, 662 bp, Triticum aestivum
agcaccaaggaggttgacgagcagatgatcaacgtgcagaacaagaactcttcctacttcgtggagtggatccccaacaacgtcaagtcgagcgtgtgcgacatcgctcccaggggcctgtcgatggcgtccaccttcatcggcaactcgacgtccatccaggagatgttccggcgggtgagcgagcagttcacggccatgttcaggaggaaggctttccttcactggtacacgggcgagggcatggacgagatggagttcaccgaggccgagagcaacatgaacgacctggtcgccgagtaccagcagtaccaggacgccaccgccgacgaggaggaggagctgtacgaggacgaggacgacgccgacctccaggagtaggggcgagcgagcgaggtctgtgttcctccgtgatcgtgtgcgtgctcggtcaggggctatttctgatggctccatgtcgctactagtagtgtgtgtttcgcgcttgctggccccaatcttcggggggttgtggacttgttgctggttgtgtagttggtctgtgtcgggttaattcggtagtcagtttgttgcgccttacggtggacttgagatcttagtagcaggtttgtaatatggctctgaatcctaatgcaacgtttgctgtttcttcacaatgaaca

SEQ ID NO: 3614 - DNA, 912 bp, Triticum aestivum
  N_region (418)..(445): n = any nucleotide
aaatgtgggatccaagaacatgatgtggccgcagacccccgccacgccgctacctcaccgcctcgccctgcttccgagggaagatgagcaccaaggaggtggacgagcagatgctcaacgtccagaacaagaactcgtcctactttgtggagtggatccccaacaacgtcaagtcgagcgtgtgcgacatgccgcccagggggctgaagatggcgggcaccttcgtcggcaactccacgtccatccaggagatgttccgcagggtgagcgagcagttcacggccatgttcaggaggaaggccttcttgcactggtacacgggtgagggcatggacgagatggagttcaccgaggccgagagcaacatgaacgacctcgtcgccgagtaccagcagtaccaggacgcgaccgccgacgnnnnnnnnnnnnnnnnnnnnnnnnnnnnacgcgacgcggagtagaggcgccggatgtgccctgctccccaacccagctatatgtcccccggttcaggtctgtcgccatgtccaggtcgcgtttcctccggtgagggtttgtgtggtttcctcgtgtggcttggacgagtcgaggttgcgtcgtcttgtgctccgttttgtaatttgctacggctagtagtgcgttgggagtctctcttgttccgcgtccatcctttggtcggtcggtcggtccatagctgacggcggcctcaactgtcgagtgctctccttgagctggtcgtcgtcgtcgcctttgtaagttctgacaagtattattgttagtcgttcgcttcatcagcaaccaaaaaatcagtattggtagtggtttctcattatctttgtgaatattgtacttatgtcggaatgtttttgcctcgttatttgtgtatatttacgtatgctcgctcaaaaaaaa

SEQ ID NO: 3615 - DNA, 668 bp, Triticum aestivum
  N_region (426)..(443): n = any nucleotide
gaactcgaggctacttcgtggagtggatccccaacaacgtcaagtcgagcgtgtgcgacatcgcgcccaggggcctgtccatggcgtccaccttcatcggcaactcgacgtccatccaggagatgttccggcgggtgagcgagcagttcacggccatgttccggcgcaaggccttcctccactggtacacgggcgagggcatggacgagatggagttcaccgaggccgagagcaacatgaacgacctggtcgccgagtaccagcagtaccaggacgccaccgccgacgaggaggaggagctgtacgaggacgaggacgacgccgacctccaggagtaggggcgtgcgaggtctgggttcttctgtgatcgcgtgcgtgctcagtcgggggctatttctgatggctccatgttgctgctactagtannnnnnnnnnnnnnnnnncgcgcttgctggcccccatcttcggggtgtcgtggacttgttgcttgtgtagtttgtctgtgtcgggttaattcggtagtcagtttgttgcgcgtgcgttacggtgaactagaggtcttagtagcaggtttgcaatatggctggctcattgtttcttcacatagtttgtgatgattgtcgttgtcaagtgctccaccacctcgagggcaatattggctttaccag

SEQ ID NO: 3616 - DNA, 743 bp, Triticum aestivum
cccaaggcacggccgctacctcactgcctcagccatgttccgtgggaagatgagcaccaaggaggttgacgagcagatgctgaacgtgcagaacaagaactcgtcatactttgtggagtggattcccaacaacgtcaagtcgagcgtgtgtgacatcccgcccacgggcctgaagatgtcttccacattcgtcggcaactccacatcgatccaggagatgttccgccgtgtgagcgagcagttcaccgccatgttcaggaggaaggccttcttgcactggtacacgggcgagggcatggacgagatggagttcaccgaggccgagagcaacatgaacgacctggtggccgagtaccagcagtaccaggacgcgacggtcgaggaggaagaggactacgaggatgagcaggaggacgaggaggccgcctaagccatatctcctcccattcttcctatggatatgccttatatcgctcgccaagtcgttggagtgctcgtggtgctgttaggtgatgatagctagatgctattttttttccgttataaatgttggtcgttttgcctcgacagacttattttttcgttatgtggacctgtggttgtcgtgtatgctcatgtcgtgatgagcatttggtgtaaggtttgactgtgactgctaccagtgttattcagtagtgctactagactgcaaaatctctattctgtgtccaatatttttgggccaagttgccaaatatgcttct

SEQ ID NO: 3617 - DNA, 560 bp, Triticum aestivum
gacatcccgcccattggcctgaagatgtcttccacatttgtcggctactccacatcgatccaggagatgttccggcgcgtcagcgagcagttcaccgccatgttcaggaggaaggccttcttgcactggtacacgggcgagggcatggacgagatggagttcaccgaggccgagagcaacatgaacgacctggtggccgagtaccagcagtaccaggacgcgacggtcgaggaggaagaggactatgaggatgagcaggaggacgaggaggccgcctaagccatatctcctcccattcttcctatggatatgccttatatcgctcgtgctcgtggtgctgttagctgatgatagctagatgctatttttttttccattctgaatgtccgtcgtgttgcctagacagacttattttttcgttatgtggacctgtggtcgtcgtgtatgctcatgtcgtgatgagcatttggtgtaaggtttgactgtgactgcttggtgtgttattcagtagtgctactagattgaaaacctctattctgtgtccagtatttttaggtcaa

SEQ ID NO: 3618 - DNA, 884 bp, Triticum aestivum
  N_region (610)..(632): n = any nucleotide
agtggcgtcacttgttgcctccgcttccccggccagctgaactctgacctccggaaactcgcagtcaacttgatcccgttccctcgcctccatttcttcatggttggctttgcaccactgacctcaaggggttctcagcagtaccgtgccctcactgttcctgagttgacccagcagatgtgggactcaaagaacatgatgtgtgctgctgacccgcggcacggccggtacctcacagcctctgccatgttccgtgggaagatgagcacaaaggaggttgatgagcagatgctgaacgtccagaacaagaactcgtcgtacttcgttgagtggatacccaacaatgtgaagtcaagcgtgtgtgacatccctcccacaggcctgtcaatgtcgtccacctttgttggcaactccacctccatccaggagatgttccgccgtgtgagtgagcagttcacggccatgttcaggaggaaggctttcttgcactggtacaccggtgagggcatggatgagatggagttcaccgaggcagaaagcaacatgaacgatcttgtcgctgagtaccagcagtaccaggatgccactgccgatgaggaggaagagtatnnnnnnnnnnnnnnnnnnnnnnncctaagccacctgacctcatccggtcgtcctgctgtctgctagatatgccttgtgtttactattgctgtcgatttggtggtgcttgtggtgcggatagatctttaggtggttgataacacttatagatgcttttgctgcttcggcgaatcgatattttttgaactgtcttttgtatgttgatggtggttttatgcgaattgtgatattagcgtaactgtggacttgatactcgtaaattctggaattatatt

SEQ ID NO: 3619 - DNA, 916 bp, Triticum aestivum
  N_region (553)..(579): n = any nucleotide
ggaaactcgcagtcaacttgatcccgtccttcgcctccatttcttcatggttggcttcggcaccactgacctcgaggggttctcagcagtaccgtgccctcactgttcctgagttgacccagcagatgtgggactcaaagaacatgatgtgtgctgctgacccgcgtcacggccggtacctcacagcctctgccatgttccgtgggaagatgagcacaaaggaagttgatgagcagatgctgaacgtccagaacaagaactcgtcatactttgttgagtggatacccaacaatgtgaagtcaagcgtgtgtgacatccctcccacaggcctgtcaatgtcgtccacctttgttggcaactccacctccatccaggagatgttccgccgtgtgagcgagcagttcactgccatgttcaggaggaaggctttcttgcactggtacaccggtgagggcatggatgagatggagttcaccgaggccgagagcaacatgaacgatctggtcgctgagtaccagcagtaccaggatgccacagccgacgaagaggaagnnnnnnnnnnnnnnnnnnnnnnnnnnnctgcctaagccaccagacctcatacggtcgtcctgctgtctgctagatatgccttgtgtttactattgctgtcgatttggtggtgcttgtggtgcggatagatctttaggtggttgataacacttatagatgcttttgctgcttcggcgaatcgatattttttgaactgttttttggatgctgatggtggttttatgcgaattgtgatattagcgtaactgtgggcggacttgatactcgtaaattcggtaactatattttgtgtctgtttactgtgcgttttcgctcacgatttctgaaatttggtctattgttgctccaacattttgaaaagttg

SEQ ID NO: 3620 - DNA, 760 bp, Triticum aestivum
gccccccgacccaggcacgtcgctacctcaccgcctcagccatgttccgtgggaagatgagcaccaaggagtggatgagcagatgttgaacgtgcagaacaagaactcgtcctacttcgtcgagtggatccccaacaacgtcaagtcgagcgtgtgtgacatcccgcccactggcctgaagatgtcttcgacgttcgtcggcaactccacatcgatccaggagatgttccgccgtgtgagcgagcagttcaccgccatgttcaggaggaaggccttcttgcactggtacacgggcgagggcatggacgagatggagttcaccgaggccgagagcaacatgaacgacctggtggccgagtaccagcagtaccaggatgcgacggtcgaggaggaagaggactatgaggatgagcaggaggatgaggaggccgcctaagcgggcttccccctttcttcccagggatatgccttatatatcgctcgttatgtcgttggagtgctcgtggtgctgttaggtgatgatagctagatgctatttttttccgttctaaatgtcggtcgtgttgccttgacagacttattttttcgttatgtggacctgtggttgtcgtgtatgctcatgtcgtgatgagcgtttggtgtaaggtttgactgtgactgcttggtgtgttattcagtagtgttgctagactgcaaaatctctgtttcgtgtccagtatttttgggccaagttgccaaatatgcttctgtcatcttggga

SEQ ID NO: 3621 - DNA, 584 bp, Triticum aestivum
ctgtgtctctcgaatgttcagcacgcgttgcggctgttgcattccttagcaaggagaaaatcgccgccaaagtggagcacttgaagaagacgttcaggtggtctgatgccgaggtgggcattgctttgtccaagcttccaattgtgctggtgaggtctaaccagatgctggagagcaggtcagagttcctaatctctgaggtggggtttgagccagcatacattgctcatcatccggcattgctcacgtacagcctggagggccggatcataccccggtactatgttgtaaagtttcttaaggaaaatggactgctggatcacaaccggagctactattctgcagtcatggtgatggagaaagtattcgtggacaagtacatatgccctcacaaggaagttgcaccataccttgctgaagactatgatgccgcttgcagaggggaggtgtcaactagattcaaatttacatgaaaaatggtaacagtacggcacaacaaatttcttacattctgcgttatgctattcattcctgatttggtgttattggcctaactgaattgtagctgtctgctattgataatc

SEQ ID NO: 3622 - DNA, 719 bp, Triticum aestivum
ggcgtgcttcgaagtctggtgtaccccgtggatctcggatgttcaagcatgcgctacagttgttgcattcctcaggcgaggagaagaatcgccacccaagtggagcacttgaagaaacgttcaagtggtcgggatgccgagtgggcatgctgtttctaaggctccaaagctgctgacgatgtccatcgaatcgctgcagcgcaggtccgagttcctcatctccgaggtggggttggaaatgacatacattgtttatcgcccagcaatgctcatgtacagcttggagggcaggatcagaccccgatactatgttgtcaaatttctcaaggaaaatggattgctagatcacgaccgggactactatgctgtagtcatgatcagcgagaaggtattcgtcgagaagttcatatgccctcataaggatgctgcaccgcacctcgctaatgactatggagcagcttgcagaggagaggttccagctagattcagtttcacatgaaccaagactaataagaaaattggtatgttcattatgtcattcagtagagaagaaagcattgcgctgctatgaacttgtccttcctcgtgttgtcatattgcacacatcttggaactaggagagtatgaggtcagggcattctgccaatttctttgaagtatcaatgagtagtatttctgcacactctgtatctttgtgttctaaaatgcccattgcagtt

SEQ ID NO: 3623 - DNA, 607 bp, Triticum aestivum
cctctcgccagccctcgagaggtcgtcaagccaatgtggcgtttactgccaggagtgcaccgctaggtgcttgcgatattgccacaggtgtgtgccactgtaccaaggatgctcaccgccagcgcggaacaaatacgggcggcggcggcgaaggtcttggtgtgccccgtggctccgtgatgttcaggaaaattctgctgtgtgttgaattgctcggcgaggagaagattgccgccaaagtgaagtacttgaagagcaccttgggctggtcggatgctgaggtgggcattgccttgtccaaggatccgtctgtgctgaggaggtcaaagaacatgctgcagcgcagatccgagttccttctctctgagttggggttggagccggcctacattgctcatcgaccggcaatcctcacttacagcctggagtgccggcccagaccccgctactatgtcgtgaaatttcttaaggaaaatgggttgctagcacacagccatagctactatacagcactgctgcggactgagaaggtatttatggagaagtacatatgccctcacatggaagctgcaccacagcttgctgaagactacgctgccgcctgctg

SEQ ID NO: 3624 - DNA, 661 bp, Triticum aestivum
acattgccaagttgtgcatcgctgagccatggctgctcgcctcaaacgtagagtgcgtccaggcaatggcagcacgcgcccaagctattggtgtgccctgtggctctcggatgttcaggcacgcgctgaaggctgttgcattcctcagcaatgagaagatcgccgccaaagtggagcagttgaagaagatgttcaggtggtcagatgccgaggtgcgcattgctttgtccacgcttccatctgtgctgatgaggtctaaccatatgctggagagcaagtcagagttcctaatctccaaggtggggtttgaaccagcatacattgctcatcatccggcattgctcacatacagcctggagggccggatcataccccgctactatgttgtaaagtttctcaaggaaaatggactgctggatcacaaccggagctactattctgcagtcattgtgatggagaaagtattcgtggacaagtacatatcccctcacaaggaagttgcaccataccttgctgaagactatgatgccgcttgcagaggggaagtgccgactagattcaaattaacatgaaaattggtaacagtacggcacaacgatattttttacattccgtgttatgctattcattcctgatttggtgttcttggcctaactgaatg

SEQ ID NO: 3625 - DNA, 698 bp, Triticum aestivum
cacaaccaaaccaagtccggtttaggaagacgcaaagggatggagttcaaagggcagcacgacaaccccgccaaccgcgtggacgagtacggcaaacccgttcccgctggccggcggcgtggggggggagcgcacgccgctcctggcaccggcgggcagttccaggcccgcaggggggagcacaagaccggtgggatactgcatcgctccggcagctccagctcaagctcgtcttccgaggacgacggcatgggcgggaggaggaagaagggcatgaaagagaagatcaaggagaagctccccggcggcaacaaggacaaccagcagcacatggcgactggtacggggactggaggagcctacgggccggggactggaactggtggagcctacgggcagcaaggccacgcagggatggccggcgccggcactggcaccggcaccggcgagaagaagggaatcatggacaagatcaaggagaagctgccgggacagcactgagctgccggctccggctggctgcttgactgcttcctttgcatagctacgcgtcaaagccttccacttccacgtgatctttttgttcaataataagatgaagctgaacgagaagttgtctctgatcgcatccgtgtcagggacacttctctgtatacagcgtgcgttgtgtttgttatgtttgtgtgctcgggcttcat

SEQ ID NO: 3626 - DNA, 673 bp, Triticum aestivum
ctggaggtgcatctggtcgacgccaagggcctctccggcaccgatttcctcgggaagatcgacccgtacgtgatcgtcagtaccggagccaggagcgcaagacagcaccgcccgagatgcggggaggaacccgagctggaacgaggtgttgaggttccagatcaactcctccgctgccaacgtgcaggataagctggtcttccggatcatggaccacgacaccttctcccgcgacgatttcctcggccaagcaacgatcaatgtgaccgatctgatcagcataggcatggagagcggcacatcgcggctgaacccggccaagtacagggtggtcaccgccgacaactcgtaccacggcgagatcaaatcggcatcaccttcaccgccgcaaaggttgatgcccatggcaaggttgaagaagatggagcacaggttggaggctggatgcagagctttcgtgagcacaaggtctgagggtccgctcggatccttcggtcgtgcataattagtgttgttgccgtgttggatgtggccaaccgtatcatatgcctatggttgaatgatgtgactccaagtgtgtatgctgcattttgtagcacttaagtcagaaactgtccattcttgatatctccaacgagaacagcttaggatcgccaaattcgtttatgattaa

SEQ ID NO: 3627 - DNA, 665 bp, Triticum aestivum
gtcattcttcgtcgacgccaaggccctcttcgcagcgatttcctagggaagatcgacccgtatgtggtggtcagtaccggagccaggagcgcaagagcagcacctccagagatgaggggaggaacccgagctggaacgaggtgttccggttccagatcaactcctccgcggccaacgggcagcacaagctcttcctccggatcatggaccacgataacttctccagcgacgacttcctcggccaagcaacgatcaatgtgactgatctgatcacccttggcatggagagcggctcgtcgcagcaaaacccggccaagtacagcgtcgtctccgccgacaactcgtaccacggcgagatcagagtgggcatctcgttcacggccaccaaggtcgaagaagacggcgcgcaggtcggaggctggatgcacagctctcgcgagtagagcatgatgccaaggacttcgctcgtagcgcattagcgttggaagttatgcccgtggttgaacgatgtggttccaattgtatgtacgttgcaactgtagctttttagaagatgtatagtaccagtagccagaagtcagaacagtttagagatgtcgggtccgataattgtcgatttgtggttcttattctaggggaaattgtgattctgaatgcgaacgaca

SEQ ID NO: 3628 - DNA, 606 bp, Triticum aestivum
  N_region (592)..(592): n = any nucleotide
aaggagcttggaaccgtgatggcgctcccttggccagaacccgaccgaggcagaggtgcaggacatgatcaacgaggtggatgcggacggcaacggcaccatcgacttcccagagttcctgaacctgatggcccgcaagatgaaggacaccgactcagaggaggagctcaaggaggcgttccgtgtgttcgacaaggaccagaacggtttcatctctgcagcggagctccgccaggtgatgaccaacctcggggagaagctttccgaggaggaggtggaggagatggtccgcgaggccgacgtggatggcgacggccagatcaactacgacgagttcgtcaaggtcatgatggccaagagaagggagaagaggatagaggagaggagagcgccgtcggccaagaagagcgctgcaggggcgtctggtgcaaagggcaacaaatgcataatcctctagctgaaaccatcgagcgtgcatagtgtgtgtggtgcgctcggagcgctggtccccgaccgacgcatctgagctgttgtatgtatcaatgtatgttcatgtgtatcccggtgtatgatggccatcagcctacgactntaaccattctcaag

SEQ ID NO: 3629 - DNA, 768 bp, Triticum aestivum
ccccacgccatcatcgccccatcaacgcgcactcgcgtaacatttgcaggccctcatcgtcccctcgaggtctccgtttgccatggcggaccagctcagcgaggagcagattggcgagttcaaggaggccttcagcctcttcgacaaggacggcgatggcagcatcaccaccaaggagcttggaaccgtgatgcgctcccttggccagaacccgaccgaggcagagctgcaggacatgatcaacgaggtggatgcggacggcaacggcaccatcgacttcccagagttcctgaacctgatggcccgcaagatgaaggacaccgactcagaggaggagctcaaggaggcgttccgtgtgttcgacaaggaccagaacggtttcatctctgcagcggagctccgccaggtgatgaccaacctcggggagaagctttccgaggaggaggtggaggagatggtccgcgaggccgacgtggatggcgacggccagatcaactacgacgagttcgtcaaggtcatgatggccaagtgaggaacaaccaccctctgaaataaccctttctattttcgtcgaataacgaaccgtctggcactactacttcataacaatttttaccttattattattacgtgcacgctgctggtactgacacttgttggctaggtgtagtcactgaggggagaagggccagatactattttttttgttctcttggtcacggacttctcctgtactttgctggatttggtgtttttctcggctgggtt

SEQ ID NO: 3630 - DNA, 740 bp, Triticum aestivum
ggcgacggttgcatcacaactcaaggagctgggaacagtgatgcgttcgctgggacagaacccaacggaggcagagctccaggacatgatcaacgaggtggacgcggacggcaacggcaccatcgacttcccggagttcctcaacctgatggctcgcaagatgaaggacacggactcggaggaagagctcaaggaggccttccgggtgttcgacaaggaccagaacggcttcatctcggccgcggagctccgccacgtcatgaccaaccttggcgagaagctaacagacgaggaggtcgacgagatgatccgcgaggccgatgtcgatggcgacggccagatcaactacgaggagttcgttaaggtcatgatggccaagtgatcccgccgatgtcccggtggacggtggtattattattttaccggggaggaggaaattgtgctatgcatattagtagtaaggaatgcggctctcgtttccttgtctttgccccaaaccagaagaagcgtactagtagacgtagttgctgaagagcattcatggaatcctcctcccctgctgctaccttgtctctctcccgtgtgtcattgaaacatctttctttctgtgtgaatctgcaagacttggccccttcgttatgaaccctcattgcagctgaatccgttcgatccaagttccgttctacttctattttgtacgtatcaatcctcggccagcggctacttcagttggcagatgc

SEQ ID NO: 3631 - DNA, 787 bp, Triticum aestivum
accgcgcccgtttattattccccttcgcgcagccgcccccgtgtctcccgtgcgcaccttctcgaagcctcccccatggcggaccagctcaccgacgagcagatcgccgagttcaaggaggccttcagcctcttcgacaaggatggcgacggttgcatcaccaccaaggagcttggaaccgtgatgcggtccctcgggcagaaccccacggaggcggagctgcaggacatgatcaacgaggttgacgcggacggcaacggcaccatcgacttccccgagttcctgaacctgatggcgaggaagatgaaggacacggactcggaggaggagctcaaggaggcgttccgcgtgttcgacaaggaccagaacggcttcatctcggcggcggagctgcgccacgtgatgaccaacctcggggagaagctgacggacgaggaggtggacgagatgatccgggaggcggacgtggacggcgacggccagatcaactacgaggagttcgtcaaggtcatgatggccaagtgaggtggcggcgggacaggggtcttccctcccacgaaataagcttaaaattcaagtggattggaatgccagacagactcgcgtggttgtattttgtgctatgttttttaaggatactgttgcctgttgggtagttggtcgggttatctatcttgtagcggtgtagtcttgggggagcagcatcggaattactacctggtttcttttggttgtggcacttatcttgttcgtcttatcatggaatttaggggcgtcgtgcaaatct

SEQ ID NO: 3632 - DNA, 868 bp, Triticum aestivum
cagaacgctcccggcgtctctctgtttgctctcgcgtccgccgcgcccatcctcgtccgcgcctgcgcccggcccgtgctcgctcgctcccgcccgatccaccggtccaccaccgcgccggcggcatggcggatcagctcaccgacgaccagatcgccgagttcaaggaggccttcagcctcttcgacaaggacggagatggttgcatcaccaccaaggagctgggaacagtcatgcgttcgctggggcagaacccaacggaggctgagctccaggacatgatcaatgaagtcgacgctgatggcaacggcaccattgacttcccagagttcctcaacctgatggcccgcaagatgaaggacactgactcagaggaggagctcaaggaggccttcagggtgttcgacagggaccaaaacggcttcatctctgctgctgagctccgccacgtcatgacgaacctcggcgagaagctcaccgacgaggaggtggacgagatgatccgtgaagccgacgtcgacggtgatggccagatcaactatgaggagtttgtcaaggtcatgatggccaaatgagcaccgtgctccgtgctcccaagacaggaggagaattgtgcattgcatattagtttaagatgcaactcttatttgatcgatttccagttaagcatcctacctagctgtagctgctaaaacggatcggacgacgcaattcctgctatgttctccagtgtgtttccagacctcttgtgttttatgtgaacttgtgtcctccctggtgtatcctgattgctgttgggccccgtttgtagtatattttttcatcaacttctgcttcactcttctagtatcaatggaaagccggtgtt

SEQ ID NO: 3633 - DNA, 800 bp, Triticum aestivum
cctccctcgcctcgatccaccgcgccggcggcatggcggatcagctcaccgacgaccagatcgccgagttcaaggaggccttcagcctcttcgacaaggacggagatggttgcatcaccaccaaggagctgggaacagtcatgcgttcgctggggcagaacccaacggaggctgagctccaggacatgatcaatgaagtcgatgctgatggcaacggcaccattgacttcccagagttcctcaacctgatggcccgcaagatgaaggacactgactcagaggaggagctcaaggaggccttcagggtgttcgacaaggaccaaaacggtttcatctctgctgctgagctccgccacgtcatgacgaacctcggtgagaagctcaccgacgaggaggtggacgagatgatccgtgaagccgacgtcgacggtgatggccagatcaactacgaggagtttgtcaaggtcatgatggccaaatgagctccgacccaaatgctccgaagacaggaggagaattgtgcattgcatattagtttaagatgcaactcttatttgatcgatttccagttaagcatcctacctagctgtagctgctaaaacggatcggacgacgcaattcctgctatgttctccagtgtgtttccagacctcttgtgttttatgcgaacttgtgtcctccctggtgtatcctgattgctgtttggcccgtttgtagtatattttttcatcaacttctgcttgactcttctagcatcaatggaaagccggtgtttcgtatttcttcgactctctattaat

SEQ ID NO: 3634 - DNA, 541 bp, Triticum aestivum
  N_region (34)..(34): n = any nucleotide
  N_region (47)..(47): n = any nucleotide
caccaccaagagcttggaaccgtgatgcgctccntcggccagaaccntaccgaggcagaacttcaggacatgatcaacgaggtggatgcggacggcaacggcaccatcgacttcccagagttcctgaacctgatggcccgcaagatgaaggacacggactccgaggaggagctcaaggaggcgttccgcgtgtttgacaaggaccagaacggtttcatctccgcggcggagctccgccaggtgatgaccaacctcggggagaagctgtctgaggaggaggtggaggagatggtccgcgaggccgatgtggacggcgatggccagatcaactacgacgagttcgtcaaggtcatgatggccaagagaagggagaagaggatagaggagaggagagcgccgtcggccaagaagagcgtggcaggggcatccggtgcaaagagtggcagcaaatgcacaatcctctagctgaaaccatcggacgtgcatagtgtgcgtgtggtgcgctcggagcgctggtccccgaccgacgcatctgagctgt

SEQ ID NO: 3635 - DNA, 820 bp, Triticum aestivum
ctgagacccccccacgtcatcatcgccccatcaacgcgcagctcgcgtaacatttgcaggtcctcgtcgccccttcgaggtttcggtttgccatggcggaccagctgagcgaggagcagattggcgagttcaaggaggccttcagcctcttcgacaaggacggcgatggcagcatcaccaccaaggagcttggaaccgtgatgcgctccctcggccagaaccctaccgaggcagagctgcaggacatgatcaacgaggtggatgcggacggcaacggcaccatcgacttcccagagttcctgaacctgatggcccgcaagatgaaggacacggactccgaggaggagctcaaggaggcgttccgcgtgtttgacaaggaccagaacggtttcatctccgcggcggagctccgccaggtgatgaccaacctcggggagaagctgtctgaggaggaggtggaggagatggtccgcgaggccgatgtggacggcgatggccagatcaactacgacgagttcgtcaaggtcatgatggccaagtgaggaacaacccccctctgaaataacccttttctattttcgccgaataacgaaccacctggcttcgtaacaacaatttttaccctattattacgtgcacgctgctggtactgacacttgttggctaggtgtagtcactgaggggagaagggccagatactattttttttgttctcttggccacggacttctcctgtactactttgctggatttggtgttttttcttggttgggttgcttcttggttcatgcttgtcgttcggtttgttgaaagttatata

SEQ ID NO: 3636 - DNA, 802 bp, Triticum aestivum
ctgagacccccacgccatcatcgcccatcaacgcgcagctcgcgtaacatttgcaggccctcgtcgccccttggaggtttcggtttgccatggcggaccagctcagcgaggagcagattggcgagttcaaggaggccttcagcctcttcgacaaggacggcgatggtagcatcaccaccaaggagcttggaaccgtgatgcgctccctcggccagaaccctaccgaggcggagctgcaggacatgatcaacgaggtggatgcggacggcaatggcaccatcgacttcccagagttcctgaacctgatggcccgcaagatgaaggacaccgactctgaggaggagctcaaggaggcgttccgcgtgtttgacaaggaccagaacggtttcatctctgcagcggagctccgccaggtgatgaccaacctcggggagaagctgttcggtaggtagtgtaggtggtaggtagtatggtccgcgaggccgatgtggacggcgatggccagatcaactacgacgagttcgtcaaggtcatgatggccaagagaagggagaagaggatagaggagaggagagcgccgtcggccaagaagagcgcggcaggggcatccggtgcaaagagtggcagcaaatgcataatcctctagctgaaaccatcgaacgtgaatagtgtgtgtggtgcgctggtccccgcccgacgcatctgagctgttgtatgtatcaatgtatgttcatgtgtatcccggtgtatgatggccatcggcctacgactgtaaccattctcaaggtaaacgaataaaagt

SEQ ID NO: 3637 - DNA, 747 bp, Triticum aestivum
tcgccgcgagaagccgagaaggaagagcctgagaaggtagcatggcggacaactcaccgacgaccagatcgccgagttcaaggaagccttcagcctattcgacaaggacggcgacggttgcatcacaaccaaggagctgggaacagttatgcgctcgctggggcagaacccaaccgaggcagagctccaggacatgatcaacgaggtcgatgccgatggcaacggcaccatcgacttcccggagttcctcaacctgatggctcgcaagatgaaggacaccgactcggaggaagagctcaaggaggccttccgggtgttcgacaaggaccagaacggtttcatctcggccgcggagctccgccacgtcatgaccaacctcggcgagaagctaacggatgacgaggtcgacgagatgatccgcgaggctgacgtcgacggggacggccagatcaactacgaggagttcgtcaaggtgatgatggccaagtgatccagccgatgttcatgtccggtggtattattatttttaccggggaggaggaaattgtgctatgcatattagtagtaaggaatgcggctctcgtttccttgtctttgcccccgaaccagaagaagcgtactagtagacgtagttgctcaagagcattcatggaatcctcctcccctgctgctaccctgtctctctcccgtgtgtcattgaaacatctttctttctgtgtgaatctgcaagacttggccaattccgcg

SEQ ID NO: 3638 - DNA, 662 bp, Triticum aestivum
atggcggacaactcaccgacgaccagatcgccgagttcaaggaagccttcagcctattcgacaaggacggcgacggttgcatcacaaccaaggagctgggaacagttatgcgttcgctggggcagaacccaaccgaggcagagctccaggacatgatcaacgaggtcgatgccgatggcaacggcaccatcgacttcccagagttcctcaacctgatggcccgcaagatgaaggacaccgactcggaggaagagctcaaggaggccttccgggtgttcgacaaggaccagaacggcttcatctcggctgcagagctccgccacgtcatgaccaacctcggggagaagctaacggacgatgaggtcgacgagatgatccgcgaggccgacgtcgacggggacggccagatcaactacgaggagttcgtcaaggtgatgatggccaagtgatccagccgatgttcatgtccggtggtattattatttttaccggggaggaggaaattgtgcattgcatattagtagtaaggaattcggctctcgtttccttgtctttgccccgaaccagaagaagcgtactagtagacgtagttgctgaagagcactcatggaatcctcctccctgctgctacctgtctctctcccgtgtgtcattgaaacatc

SEQ ID NO: 3639 - DNA, 841 bp, Triticum aestivum
caaccaccgcgccccgtttattattccccttcccgcagccgccccccgtgtcccgcgcgcaccttctcgaagcctcctccctccctccctcatggcggaccagctgaccgacgagcagatcgccgagttcaaggaggccttcagcctcttcgacaaggatggcgacggttgcatcaccaccaaggagctcggaaccgtgatgcggtccctcgggcagaaccccacggaggcggagctgcaggacatgatcaacgaggttgacgcggacggcaacggcaccatcgacttcccggagttcctgaacctgatggcgaggaagatgaaggacactgactcggaggaggagctcaaggaggcgttccgcgtgtttgacaaggaccagaacggcttcatctcggcggcggagctgcgccacgtgatgaccaacctcggggagaagctgacggacgaggaggtggacgagatgatccgggaggcggacgtggacggcgacggccagatcaactacgaggagttcgtcaaggtcatgatggccaagtgaggtggcgggacagggggtgtcctcccacgaaataagcttaaaatttgctctcaagtggattggaatggaatgccagacagactcgcaaggttgtattttgtgctatgttttttaagtactgttgcctgttgggtagctggtcgggttatcttgtagcggtgtagtcgtggggagcagcatcggatttacctggtttctagtcttatcatggaatttaggggctttgtgcaaatctcgttttgccctgcggtttgcttgtatgcttgggttgtgttcagctccaaatgctggccggaagta

SEQ ID NO: 3640 - DNA, 727 bp, Triticum aestivum
cccccatgcggacagctcaccgacgagcagatcgccgagttcaaggaggccttcagcctctttcgacaaggatggcgacggttgcatcaccaccaaggagctcggaaccgtgatgcggtcccttgggcagaaccccacggaggcggagctgcaggacatgatcaacgaggttgacgcggacggcaacggcaccatcgacttccccgagttcctgaacctgatggcgaggaagatgaaggacacggactcggaggaggagctcaaggaggcgttccgcgtgtttgacaaggaccagaacggcttcatctcggcggcggagctgcgccacgtgatgaccaacctcggggagaagctgacggacgaggaggtggacgagatgatccgggaggcggacgtggacggcgacggccagatcaactacgaggagttcgtcaaggtcatgatggccaagtgaggtggcgaggacaggggtccctcccacgaaataagcttgaaatttgctctcaagtggattggaatggaatgccagacagactcgcaaagttgtattttgtgctatgcgcctgtttttttaagtactgttgcctgttgggtagttggtcgggttatcttgtagcggtgtagtcgtggggagcagcatcggaattacctggtttcttttggttgtggcacttatcttgcctgttaggcttcgtcttatcatggaatttaggggctttgtgcaaat

SEQ ID NO: 3641 - DNA, 623 bp, Triticum aestivum
gcctccaacatcctcctcgacggctgcttccgcgcgcacctctccgactttggcctcgccaaggtcggccccgtcggcgacaagacccatgtctccaccagggtcatgggcacctacggctactgcgcccccgagtacgcgctcacgggcaagcttaccaccatgtccgacgtctatagcttcggcgtcgtcttcctcgagatcatcacggggcggcgcgtcatcgacacgtccaggccccgcgatgagcacaaccttgtgcagtgggcggcaccgcgcttcaagagcaagaagcgcttcagggagatggccgacccgctcctccgcggcgcatacccaaccaaggggctctaccaggcgctcgccatctccgccatgtgtctgcaggaggatgccacaatgcgcccctccatcgccgacgttgtcacggcgctcgactacctcaccggcgccgcaaagccttcccctagccctacccctcaacaacagtcgccttcccctagccctagccctacccctactcaacaacagtcgccacccaaggccaaggaggacgatgatgccactgactagtagttataacaacacaaacatgtatctgtctgtatatatgcaagtcttct

SEQ ID NO: 3642 - DNA, 732 bp, Triticum aestivum
cgccgccgtctggagtggaacacgcgcgtgaagatcgcgcacggcgcggcgagggcgctgcggtacctgcacgaggcggtgtcgccgccggtgatctaccgcgacctgaagccgtccaacatcctcctcgccgacgacttcagcgccaagctgtccgacctggggctggcccggatcgggccctccggcgacgacacccacgtgtccacgcgcgtgatgggcaccttgggctactgcgcgcccgactacgcgctcaccggccgcctcaccgtcaagtcggacgtctacagctttggcgtggtgctcctggagctcatcaccggccgcagggccttcgacgctgacgccggcgacgagaggcggctcctggactgggccaggccctacctcgcggacgtgcgcaagatgtacggccggctggccgacccggcgctgcgcgggcgattccctcggcgcgcgctctaccagctcgccgtggtcgcctcgctctgcctccacgacaggcccaacctccggccgactatgtcggacgtcacccgggccatcgaccacgtggcctcgcagccgtggcaacccgcctccgccggcgccggcggcggtgcagcccatcagcgtgccaaatcgtgccaaatatgaaattaaatcttgttgtagaagtatactccatatgatacaaaaatcccttgagttgtactaaaccagcaccaacgacaagcattattggagggagta

SEQ ID NO: 3643 - DNA, 951 bp, Triticum aestivum
ctccaagctctccgacttcgggctcgccaagctcggccccctcggcgacgagagccacgtcagcaccagggtgatgggcacctacggctactgcgcccccgagtacgccatgaccggcaagctcaccaagatgtccgacatctacagcttcggcgtcgtgctgctcgagctcatcaccggcaggcgggccatcgaccccaccaagcccacggaggagcaggttctcatccactgggcggcgcctctgatcagggacaggaaaatgttcgtgaggctggcggatccgttgctggggaaggacttcccggtgaagggggctgtaccaggcgctcgccatcgcctccatgtgcatgcaggaggatcccagcaagaggcccaagatcggcgacgtcgtggacgcgctcaccttcctcgctgaacagaagtactatcctcaacgagaccgggaagctgctcaggcgaagggcggggactgcagcactgcctcgcaaaaaggacatggtttctgagatcaaagccgatgatgacatgaagcagcgatgagccagacgaccatagaatataatataatataagagatgcataaaggaggagatgcagcagaactatatctctgcgactctgcccccctcacatttcttgtgtaccgtacaccacataggcaggatgtaagagcagcaacgaatcatcttgactgatgatgctgatttgttagtcaaggcctcaaattccagcagcaaaagccaagagctgagccgtctattcctgagctgttccaaggactgccaccttcattattagcttctagatcaacatgcaaacattaccattttccatcattctggtctgcatgtaatctaaaatctatcccgccaaggatttgtggaattgataactctagtagaacgtactcaaaaacaaaaggtgatcgaagttgcaaataattattgg

SEQ ID NO: 3644 - DNA, 701 bp, Triticum aestivum
aacatgcgtggtatctgctatgaggtctgtgatgttgttctccacacggatgctattcacaggggtggtggtcaggttatcccaacggcgaggagggtcatttacgcttctcagctcactgccaagccaaggctgctggagcccgtgtacctggttgagatccaggccccggagaacgcacttggtggtatctatggtgtgctgaatcagaagagaggccacgtgttcgaggagatgcagaggcaaggtaccccactctacaacatcaaggcctacctgcctgttatcgagtccttcgggttctcgagcaccctgagggccgcgacgtccggccaggccttcccccagtgtgtgtttgaccactgggacgtcatggcctccgatcctttggaaccctggcacccagtcggcgacgctcgtgacggagatccgcaagaggaagggtctcaaggagcagatgacccccctatccgacttcgaggacaagctctaaattttggggcttcgaggacaagctctaaattttggggccatgttttggtactggctcttgctgtgaagggaggcgcggtatttttctccctatgtgtcttccttactatgttgttgtttgtatgtggtgctactgagactatggttttgatgatggttgtggtgatgtaacagatgttaaacttagatcatacatttctggcatccca

SEQ ID NO: 3645 - DNA, 621 bp, Triticum aestivum
gacaaggacttcaactccaagctctccgacttcgggctcgccaagctcggccccctcggcgacgagagccacgtcagcaccagggtgatgggcacctacggctactgcgctcccgagtacgccatgaccggcaagctcaccaagatgtccgacatctacagcttcggcgtcgtgctgctcgagctcatcaccggcaggcgggccatcgaccccaccaagcccacggaggagcaggttctcatccactgggcggcacctctgatcagggacaggaaaatgttcgtgaggctggctgatccgttgctggggaaggacttcccggtgaaggggctgtaccaggcgctcgccatcgcatccatgtgcatgcaggaggatcccagcaagaggcccaagatcggcgacgtcgtggacgcgctcaccttcctcgccgaacagaaatactatcctcccaaaaaggacatggtttctgagatcaaagccgatgatgacatgaagcagagatgagccagacaaccataggatataatattataagagatgcataagggaggagatgcagcagaactatatctctgccccctcacatttcttgtgtaccgtacaccacataggcaggatgta

SEQ ID NO: 3646 - DNA, 1811 bp, Triticum aestivum
cacacgagctgggtcattcaaattcaaatcatatatctgagttgagcccgagggtgtcctcggccactctcgcgtcgatctgctatggggttagttagtcgtccgccgtgaggaaatgtaacagcaagatgctcctcggcggcggctcttcatctccgtgtggtgtgcgcggcaaggaacaaccattgacccccggcaagcacaacgcggtcgaggaagaagcgcttctaggaggaagaagaagtccagcaagaagttcagctgcgtcccctgcgtcagcctcaccgagctcaccaggcgcgccgagtgcgaggccatcgccgacctcgtcaacaacatctcggccaagtcagacattaccagtcacatgtacgcggccgaggagatcctgcggatcaccaaccagaacatccccagcagggtgctcaccttccgtgagttgtccgcggcgaccaacaacttcagccccaacaaccttgtgggcgagggcggcttcgggatggtgtacaaggggcacttcaaggacaccaaggaggatatcgccgtgaagcggctggacaaggaagggttccaggggaaccgcgagttcctggtggaggtgctgatgctgagcctcctgagccaccccaacctcgtgaatctgatcggctacagcaccgacctcgaccagcggatcctcgtctacgagtacatgcccaacggctcgctggaggatcatctcctagatctcccggagaacgccaaggcgctcccctggcagacgcggatgaggatcgcggtgggcgcggccaagggcatcgaatacctgcacgaggtggccaaccctccggtcatctaccgggacctcaaggcctccaacatcctcctggacaaggacttcaactccaagctctccgacttcgggctcgccaagctcggccccctcggcgacgagagccacgtcagcaccagggtgatgggcacctacggctactgcgcccccgagtacgccatgaccggcaagctcaccaagatgtccgacatctacagcttcggcgtcgtgctgctcgagctcatcaccggcaggcgggccatcgaccccaccaagcccacggaggagcaggttctcatccactgggcggcacctctgatcagggacaggaaaatgttcgtgaggctggcggatccgttgctggggaaggacttcccggtgaagggggctgtaccaggcgctcgccatcgcatccatgtgcatgcaggaggatcccagcaagaggcccaagatcggcgacgtcgtggacgcgctcaccttcctcgccgaacagaaatactatcctcaacgagaccgggaagctgctcaggcgaagggcggggactgcagcactcctcccaaaaaggacatggtttctgagatcaaagccgatgatgacatgaagcagagatgagccagacaaccataggatataatattataagagatgcataagggaggagatgcagcagaactatatctctgccccctcacatttcttgtgtaccgtacaccacataggcaggatgtaagagcagcaacgaatcatcttgacttgatgatgctgatttgttagtcaaggcctcaaattccagcagcaaaagccaagagctgagccgtctattcctgagctgttccaaggactgccacgttcaatattagcttctagatcaacatatatgcaaccgccatccttttccatcattctggtcttcatgtaatctaaaatctatgtgaggaggatttgcggaattgataaccctagtagaacactcaaaaaataaaaggtatttgaagttgc

SEQ ID NO: 3647 - DNA, 706 bp, Triticum aestivum
  N_region (35)..(35): n = any nucleotide
gggttccagtgggcgtcaaaggaaggcgcgttgcntgaggagaacatgctggcatttgcttgaggtctgtgatgttgttctccacactgatgctattcacaggggtggtggtcaggtcattcccacggccaggagggtcatttatgcttcccagctcactgccaagccaaggctgctggagcctgtgtacctggttgagatccaggccccggagaatgcacttggtggcatctatggtgttctgaatcagaagagagggcacgtgttcgaggagatgcagaggcaaggtaccccgctctacaacatcaaggcctacctccctgtcatcgagtcctttgggttctcaagcaccctgagggccgcgacgtccggccaggcattcccccagtgtgtgtttgaccactgggacatcatggcttctgatcctttggaccctggcacccagtcggcgacgctcgtcacggacatccgcaagaggaagggcctcaaggagcagatgacccctctgtccgatttcgaggacaagctctaaatttttggtgctgttatcccatacctgctattgtgttgttaaagagagctgcactattttgtatcgatgagtctatcttactgtcttgctgttaatgacctatttgtcgtgatactgggaactatgttttgatgtctggtgatgtaacggatgttttacttagattatgtatct

SEQ ID NO: 3648 - DNA, 1220 bp, Triticum aestivum
aggggattgactatgtgcctgaagtgaccgatgacggcactcccccgttctctccggggcgcctgggagcaccccccatcttcatcatctgtaataactgggcgaccggaatcgcgaggataccggagacgggggtggtagacgccatgcaggcttttgcctcccaggttctgcacctgtgggagaagcagaggttagagtggaggcagggcatgatggccaacagagaaatggacagggagcttagagtgatggagagggatcaagtgtcgatgcgcaaggccctcgaagcacagaataagaagctcgtgcttgtttcgaatcagggcggcgtgtccttatctgcgcaggctgtgcaggatggtgatccgccctctgaagtgggtctgcaatcatgcatgaacaagtttttcgaagcgatggagagcttcgccgccgcctgcgcaaatgcgtacaaggatctccatcttcgttgcgaagaagagagaactcgacctgcccaggagaccgacagagtttcctagtggcattttcagacattgcttgtacagtgagaagcaacggacctgtggtttggatgagcagcaaaggtgcacatagcagcagtatcacagattcaaattgcactgtctttctccctctgttgggttttgggatcgtcactgggttttaagcagcccatgtgaaagcttgtcctaaagatgagctctgatgatcagattcccactgctcttaccaaaccttttgagaactaggctgtagcctagtggcaagagagcgcagtgacgtctccagcaaccagggttcgagccacgtcggggacgaatttctggtttctcacaaggaatgcttctcctatatcaataaaccatgggtgctagtgcccatgagtttcatcttaccaaaccttttgatgatcgtctgctcctcctcatcaatcgttgtaccaatgccggccggaagactgcgttatcgccagaaggaagaaagcatcagagacaaaggagaaacagaaggcaaacagaaggcgcggatcggaatagagatcttttatcattcatgatgaaaaccctacaattgtcggtgtaagagcttggttctctagccaatgcatgatcctgatagatgtttggtgctcattctggagctctgctacagcttcgtccccaagttatccggggattgagctttttagtatagacaaaggtcctggcaccgct

SEQ ID NO: 3649 - DNA, 1180 bp, Triticum aestivum
gtgaccgacgacggcactcccccgttctccccggggcgcctgggagcacccccatcttcatcatctgtaataactgggcgaccggaatcgcgaggataccggagacgaaggtggtagacgccatgcaggctcttgcctcccaggttctgcacctgtgggagaagcacaggctagagtggaggcagggcatgatggccaacggagacatggacagggagcttagggtgatggagagggatgaagcgtcgatgcgcaaggcccttgaggcacagaataagaagctcgtgctcgtttcgaatcagggcggcgtgtccttgtctgcgcaggccgtgcgggatggtgatccgccctctgaagtgggtttgcaatcatgcatgaacaggttcttcgaagcgatggagagcttcgccgccgcctgcgcaaacgcgtacaaggatctccatcttcgttgcgaagaagagagaactcgacctgcccaggagaccgacagagtttcctagtggcattttcagacattgcttgtacagtgagaagcaaccgaccctgtggtttggatgagcagcaaaggtgcacatagcagcagtatcacagattcaaattgcactgtctttctccctctgttgggtttcgggatcgtcactgggatttaagcagccgatgtgaaagcttgtcctaagatgacctctgatgatcagattgccactgctcttatcaaaccaatctctcaagatttgatgatcttctgctcctcctcttcgtcaatcgtcataccgatgccgaccggaggaagatggttctttagacaagtgaatggtcaccggtgttatcgccggaaagaagaaagcatcagagacaaggagagacacaaggcgctgatcggtatcggaatagagatcttttatcattcatgaaaaccctacaattgtcagtgtaggaagtatgaactcggtcttctctagccaatgcatgatcctgatacatgtttgcttgttcattgtggggctctgctacagctttgtgcccaagttatccggggattgacctttttagcgtagacaaaggtcctggcaccgcttgcagactctgatttttcaaccactgtcgaaattcacattttatttattcctatatatacatatgattcagttgtaatcatgacttttgtacagctatggtataa

SEQ ID NO: 3650 - DNA, 648 bp, Triticum aestivum
tgcttgagtctgtgatgtgttctgcacaactgatgctattcacagggtgttgccaggtcatcccaacagccaggagggtcatttatgcttctcagctcactgctaagccaaggctgctggagcctgtgtacctggttgagatccaggccccggagaatgcacttggcggtatctatggtgttctgaatcagaagagagggcacgtgtttgaggagatgcagaggcctggtaccccgctgtacaacatcaaggcttacctcccggtcatcgagtcgttcgggttctcaagtaccctcagggctgcgacatctggccaggctttcccccagtgtgtgttcgatcactgggacatcatgtcttcggatcctttggaggccggctcccagtctgccacccttgtcacggagatccgcaagcgcaagggtctgaaggaacagatgacccctctgtctgatttcgaggacaagctctaaacttttggttctgttatctcctatatagtgtagttggttttgctgctaagagagctgcactattattttgtgtctactgagtcgtggctgtattgctattggaatgtactcctatctgtcgtgatactggcactttgttttgatgtctatcgatgttaaaacttagattatatat

SEQ ID NO: 3651 - DNA, 647 bp, Triticum aestivum
agggtgttgtcaggtcatcccaacaagcccggaggtcatttatgcttctcagctcactgctaagccaaggctactggagcctgtgtacctggttgagatccaggccccggagaatgcactcggcggtatctatggtgttctgaatcagaagagagggcacgtgtttgaggagatgcagaggcctggtaccccgctgtacaacatcaaggcttacctcccggtcatcgagtcgttcgggttctcaagtaccctcagggctgcgacatctggccaggctttcccccagtgtgtgttcgaccactgggacatcatgtcttcggatcctttggaggccggctcccagtctgcgacccttgtcacggagatccgcaagcgcaagggtctgaaggaacagatgacccctctatctgatttcgaggacaagctctaaacttttagttctgttatcatatgggtctagtttgcttttgctgctaagagagctgcactattattttctgtctgttgagtcgtggctgtattgctattgggatgtcctatcactttgttttgatgtctatcgatgttaaaacttagattatatatctgttatccactggtagttcgttgtttgtgttagatcctgctctgcctgattatttattgct

SEQ ID NO: 3652 - DNA, 749 bp, Triticum aestivum
gagggagcatgtgtgaggagtacatgcgtggcatctgctacgaggtctgtgatgttgttctccacactgatgctattcacaggggtggtggtcaggttatcccaacggcgaggagggtcattttacgcttctcagctcaccgccaagccaaggctgctggagcccgtgtacctggttgagatccaggcccccgagaacgcacttggtggtatctatggtgtgctgaatcagaagagaggccacgtgttcgaggagatgcagaggcaaggtaccccactgtacaacatcaaggcctacctgcctgtcatcgagtccttcgggttctcgagcaccctgagggctgcgacgtccggccaggccttcccccagtgtgtgtttgaccactgggacatcatggcctccgatcctttggaccctggcacccagtcggcgacgctcgtgacggagatccgcaagaggaagggtctcaaggagcagatgactcccctatccgatttcgaggacaagctctaaatcttggggtcatgttttggtactggctcttgctgtgaagggaggcgcggtatttttctccctatgtgtcttccttactatcttgttgtttgtatgtggtgctactgagactatggttttgatgacggttgtggtgatgtaacagatgttaaaactttgatgatctatccgtcgtcagctggtggttatttttactgtgctgtgtttgcttttgtgctacatcttgctttcattta

SEQ ID NO: 3653 - DNA, 627 bp, Triticum aestivum
acaggttgtgtcagtcatcccaacggcgaggagggtcatttacgcttctcagctcactgccaagccaaggctgctggagcccgtgtacctggttgagatccaggccccggagaacgcacttggtggtatctatggtgtgctgaatcagaagagagggcacgtgttcgaggagatgcagaggcaaggtaccccactctacaacatcaaggcctacctgcccgtcatcgagtccttcgggttctcgagcaccctgagggccgcgacgtccggccaggccttcccccagtgcgtgtttgaccactgggacatcatggcctccgatcctttggaccccggcacccagtcggcgacgctcgtgacggagatccgcaagaggaagggtctcaaggagcagatgacccccctatccgatttcgaggacaagctctaaactttgggtcatgttttgctgctggctgttgctgtgaagggaggcgcggtatttttctccctatgtgtcttccttactatcttgttgtttgtatgtggtgctactgagactgtggttttgatgatggttgtggtgatgtaacagatgttaaacttagatgatatatttctggcatcccacggtggttatttttactg

SEQ ID NO: 3654 - DNA, 896 bp, Triticum aestivum
ctgaggagtttgggtgggacaaggatctcgccaagaagatttggtgctttggacctgagacgactggccccaacatggttgttgacatgtgtaagggagtgcagtatctgaatgaaatcaaggactctgttgtggctgggttccaatgggcatcgaaagaaggtgctctggctgaggagaacatgcgtggcatttgctttgaggtctgtgatgttgttctgcacactgatgctattcacaggggtggtggtcaggtcatcccaacagccaggagggtcatttacgcttctcagctcactgccaagccaaggctgctggagcctgtgtacctggttgagatccaggccccggagaatgcacttggcggtatctatggtgttttgaatcagaagagagggcacgtgtttgaggagatgcagaggactggtaccccgctgtacaacatcaaggcttacctcccggtcatcgagtcgtttgggttctcaagtaccctcagggcggcgacatctggccaggctttcccccagtgtgtgttcgaccattgggacatcatgtcttctgatcctttggaggccggctcccagtccgcgacccttgtcacagagatccgcaagcgcaagggtctcaaggaacagatgacccctctatctgatttcgaggacaagctctaaacttttgcttctgttacatggtctagtttgcttttgctgctaagagagctgcactattatctgtctattgagtcgtcgtcgctgtattgctattggaatgtactcctatctgtcgtgatactggcactttgttttgatgtctgtcgatgttaaaacttagattatatatctgtcgcgatacttttgatgtctatcaatgttaaaacttagactatatatctgtta

SEQ ID NO: 3655 - DNA, 614 bp, Triticum aestivum
gctcactgctaagccaaggctgctggagcctgtgtacctggttgagatccaggccccggagaatgcactcggtggtatctatggtgttctgaatcagaagagagggcatgtgtttgaggagatgcagaggcctggtaccccgctgtacaacatcaaggcttacctcccggtcatcgagtcgttcgggttctcaagtaccctcagggcggcgacatccggccaggctttcccccagtgtgtgttcgaccattgggacatcatgtcttctgatcctttggaggccggctcccagtctgccacacttgtcacggagatccgcaagcgcaagggcctgaaggaacagatgacccctctatctgatttcgaggacaagctctgaacttttgcttctgttacatggtctagtttgcttttgctgctaagagagctgcactattatctgtctattgagtcgtcgctgtactgctattgggattcctatcggtcgtgatactggcactttgttttgatgtctgtcgatgttaaaacttagattatatatctgtcgtgatactggcacttcgttttgatgtctgtcgatgttaaagcttagattatacaagtatctgttatcc

SEQ ID NO: 3656 - DNA, 924 bp, Triticum aestivum
gctgaggccattgatgacgggcgcattggcccgcgtgacgatcctaaggtgcgttccaagatcctgtctgaggagtttggctgggacaaggatcttgccaagaagatttggtgctttggacctgagacgactggacccaacatggtcgttgacatgtgtaagggagtgcagtatcttaatgaaatcaaggactctgttgtggctgggttccagtgggcgtcgaaggaaggtgcactggctgaggagaacatgcgtggcatctgcttcgaggtctgtgatgttgttctccacactgatgctattcacaggggtggtggtcaggtcattcccacggccaggagggtcatttatgcttctcagctgactgccaagccaaggctgctggagcctgtgtacctggttgaaatccaggccccggagaatgcgcttggtggcatctatggtgttctgaatcagaagagagggcacgtgttcgaggagatgcagaggcaaggtaccccgctctacaacatcaaggcctacctccccgtcatcgagtcctttgggttctcaagcaccctgagggctgcgacgtccggccaggccttcccccagtgtgtgtttgaccactgggacatcatggcttccgatcctttggaccccggcacccagtctgcgacgctcgtcacggagatccgcaagaggaaggggctcaaggagcagatgacccctctatccgatttcgaagacaagctctaaatttttggtgctgttatcccttacctggtcttgtgttgttaaagagagccgcactattttgtatcgatgagtcttgctgttaatgacctatttgtcgtgatactgggaactatgttttgagatgtctggtgatgtaacggatgttttacttagattatgtatctgttgtccactggttcttttgct

SEQ ID NO: 3657 - DNA, 1807 bp, Triticum aestivum
gtagtcttggtgtgacctatgtaagaatgatgagaaggacttgatgggcaaggctctcatgaagcgtgtgatgcaaacttggctgcctgccagtcgtgctctgcttgagatgatgatatttcacctcccctctccttcaaaggcccagaggtaccgtgtggagaacttatacgagggcccccttgatgacatatatgcaaatgctatcagaaactgtgaccctgatggtcctcttatgctgtacgtctccaagatgattccagcatctgacaagggtagattctttgcctttggacgtgtttttgccgggagggttgcaactggcatgaaggtccgtatcatgggtcccaactttgttcctggccagaagaaggatctgtatgtgaagagtgtccagcgtactgttatctggatgggaaagaagcaagagtctgttgaggatgttccctgtggtaacactgttgctttggttggtttggatcagttcatcaccaagaatgcaaccctgacaaatgagaaggaagttgatgcctgcccaatcagggcaatgaagttctctgtgtcccctgttgtgcgtgttgctgttcagtgcaaggtggcctctgatcttcctaagcttgttgagggtttgaagcgtctggccaagtcagatcctatggttctctgtaccattgaagagtctggtgagcatatcattgctggagctggagagcttcaccttgaaatctgtttgaaggatcttcaggatgacttcatgggtggtgctgaaatcattgtttcccctcccgttgtctccttccgtgagactgttctggagaagtcctgccgtactgtcatgagcaagtccccgaacaagcacaaccgtctttacatggaagctcgccccttggaggagggactggctgaggccattgatgatggtcgcattggcccacgtgatgatcctaaggtgcggtccaagatcctgtctgaggagtttgggtgggacaaggatcttgccaagaagatttggtgctttggacctgagacgactggccccatcatggtcgtcgacatgtgtaagggagtgcagtatcttgaatgagaatcaaggactctgttgtggctggtttccagtgggcgtcaaaaggaaggcgcgttggctgaggagaacatgcgtggcatttgctttgaggtctgtgatgttgttctccacactgatgctatccacaggggtggtggtcaggtcattcccacggcccaggagggtcatttatgcttctcagctgactgccaagccaaggctgctggagcctgtgtacctggttgagatccaggccccggagaatgcgcttggtggtatctatggtgttctgaatcagaagagagggcacgtgttcgaggagatgcagaggcaaggtaccccgctctacaacatcaaggcctacctccccgtcattgaatcctttgggttctcaagcaccctgagggccgcgacgtccggccaggccttcccccagtgtgtgtttgaccactgggacatcatggcttctgatcctttggacccaggcacccagtcggcgacgctcgtcacggatatccgcaagaggaagggcctcaaggagcagatgacccctctatccgatttcgaggacaagctctaaatttttggtgctgttatcccttacctggtcttgtgttgttaaagagagctgcactattttgtatcgatgagtcttgctgttatgacctacttgtcgtgatactgggaactatgttttgatgtctggtgatgtaacggatgttttacttagattatctatctgtt

SEQ ID NO: 3658 - DNA, 691 bp, Triticum aestivum
ttcgtcttcgtcgcgacagcaacgccacgtcgggctcggctcaagtgcgccaaggagttggcaacggccatccgcggcgccatcatcctcgccaagctctccatcgtgcccgtcaggaggggctactgggggaacaagatcggcctgccccacaccgtgccctgcaaggtcaccggcaagtgcggctctgtcaccgtgcgcatggtgcctgccccgaggggttctggaatcgtcgccgctcgtgtccccaagaaggtgctccagttcgctggtattgatgatgtcttcacttcctcgcgtggatccaccaagacacttggcaacttcgtcaaggcaaccttcgactgcctgatgaagacctatggattcctcacccctgacttctggagggagacgaccttcaccaaggggccgtaccaggagttcaccgacatcttggcgaagccgacaaaggccttgatgcttgatgcaccagttgagaagatagaagcttaggatgttggcgtaaatggtttttgctagctgggagctgtgtaatgcactatgctttatttagttattaagactttgaatcgtgctgcttcaggatgtctctctgccgtcaagtgttggtttgtggaactatgctactctcttttatcgtcaatggatgctacataattatagataaaaaatgactgattgccataat

SEQ ID NO: 3659 - DNA, 646 bp, Triticum aestivum
cgcgcgcacctgtcgcgactttggcctcgccaaggtcggccccgtcggcgacaagacccatgtctccaccagggtcatgggcacctacggctactgcgcccccgagtacgcgctcacgggcaagctcaccaccatgtccgacgtctatagcttcggcgtcgtcttcctcgagatcatcacggggcggcgcgtcatcgacacgtccaggccccgtgatgagcacaaccttgtgcagtgggcggcaccgcgcttcaagagcaagaagcgcttcagggagatggccgacccgctcctccgcggcgcatacccaaccaaggggctctaccaggcgctcgccatctccgccatgtgtctgcaggaggatgccaccatgcgcccctccatcgccgacgttgtcacggcgctcgactacctcaccggcgtcgccaagccttcccctccctctcaacaacagtcgccttcccctagccctagccctacccatcctcaacaacagtcgccttcccctagccctagccctacccatcctcaacaacagtcgccgcccaaggaggaggaggatgatgccactgactagctattaacaacaaacatgcatatctgtccgtgcaacatgtatacatatataccaaagcagagtcttgtt

SEQ ID NO: 3660 - DNA, 697 bp, Triticum aestivum
atgcgcatcgcgcagggcgccgcccgggcctcgagtaccgtccacgacgcctcccgccgccccggcccgcccgtcatctaccgcgacttcaaggcctccaacatcctcctcgacggctgcttccgcgcgcacctctccgactttggcctcgccaaggtcggccccgtcggcgacaagacccatgtgtccaccagggtcatgggcacctacggctactgcgcccccgagtacgcgctcaccgggaagctcaccaccatgtccgacgtctatagcttcggcgtcgtcttcctcgagatcatcacggggcggcgcgtcatcgacacgtccaggccccgtgatgagcacaaccttgtgcagtgggcggcgccgcgcttcaagagcaagaagcgcttcagggagatggccgacccgctcctccgcggcgcataccccaccaaggggctctaccaggcgctcgccatctccgccatgtgcctccaggaggatgccaccatgcgcccctccatcgccgacgttgtcatggcgctcgactacctcaccggcgtcgccaagccttcccctacccctacccctcaacaacagtcgccttcccctagccctagccctacccctacccctcaacaacagtcgccgcccaaggaggaggatgatgccactgactagttataagttataacaacaaacatgatatctgtct

SEQ ID NO: 3661 - DNA, 931 bp, Triticum aestivum
cggcggccgtcgtggccctcgccaggaggaggagaagtgggtgcccgtcaccaaactcggccgcctcgtcaaggagggccgcttcaccaagatggaggagctctacctccactcgctacccatcaaggagcaccagatcgtggagcactctgcccggggctcaaggacgaggtgatgaagatcacccccgtgcagaagcagacccgcgccggccagcggacccgcttcaaggcgttcgtcgtcgtcggcgacagcaacggccacgtcgggctcggcgtcaagtgcgccaaggaggtggccacggccatccgcggcgccatcatcctcgcaaagctctccatcgtgcccgttaggaggggctactgggggaacaagatcggcctgccccacaccgtgccctgcaaggtcaccggcaagtgcggctctgtcaccgtgcgcatggtgcccgccccgaggggttctggaatcgtcgccgcgcgcgtccccaagaaggtgctccagttcgctggtattgatgacgtcttcacttcctcgcgtggatccaccaagaccctcggcaacttcgtcaaggcaaccttcgactgcctgatgaagacctatggattcctcacccctgacttctggagggagacgaccttcaccaaggcaccgtaccaggagttcactgacattttggcgaagccgacgaaggccctgatgcttgatgcaccagccgagaagatagaagcttaggatgtccgtgtaaagggtttttactagctgggagctgtctaatgcactttgctttattcagttattaatactttgaatcgtgctgtttcaggatgtctctgtttgccgtcaagtgttggtttgtggaactatgctactctcttttatcgtcaatggacgctacataattatggcaatcgatcttttttatctatagatg

SEQ ID NO: 3662 - DNA, 836 bp, Triticum aestivum
gaggagctctacctccactcgctccccatcaaggagcaccagatcgtggagcagctctgcccggggctcaaggacgaggtgatgaagatcacccccgtgcagaagcagacccgcgccggccagcggacccgcttcaaggcgttcgtcgtcgtcggcgacagcaacggccacgtcgggctcggcgtcaagtgcgccaaggaggtggccacggccatccgcggcgccatcatcctcgccaagctctccatcgtgcccgtcaggaggggctactgggggaacaagatcggcctgccccacaccgtgccctgcaaggtcaccggcaagtgcggctctgtcaccgtgcgcatggtgcccgccccgaggggttccgggatcgtcgccgcgcgcgtccccaagaaggtgctccagttcgctggtattgatgatgtcttcacttcctcgcgtggatccaccaagacccttggcaacttcgtcaaggcaaccttcgactgcctgatgaagacctatggattcctcacccctgacttctggagggagacgaccttcaccaaggcgccataccaggagttcaccgacattttggtgaagccgaccaaggccctgatgcttgatgcaccagccgagaagatcgaagcttaggatgtcggtgtaaagggtttttacaagctgagagctgtctaatgcactttgctttatttagttattaatactttgaatcgtgctgtttcaggatgtctctttttgccgtcaagtgttggtttgtggaactatgctactctcttttatcgtcaatggaagctacataattatggcaatcagtcttttttatctataga

SEQ ID NO: 3663 - DNA, 587 bp, Triticum aestivum
catggccaagatctacgtcgaccacagcaagccggcgttcgtcgttggcgagctctacgaacagggaccgacagctgctcgcgaactgggtgcagggcgtcggcgggccggccacggcgtttgactttcccaccaagggcgttctccaggaggccgtgcagggcgatctggggaggatgcgtggcagcgacggcaaggcgcccggtctgattgggtggatgccggagaagaccgtcacgttcatcgacaaccacgacactgggtcgacgcagaggttgtggccattcccctcggataaggtcatgcagggctatgcgtacatcctcacacacccgggcataccatgcatcttctacgaccatgtgttcgactggaagctgaagcaggagatcaccgcactggctagagtcaggtcaaggaacgggatccatccgggtagcaaactggatatcctcaaagccgaaggcgatctctatgttgcaaagattggggacaaggttataaccaagatcggggcaagatacaatattggcaaaaacgtgatcccctcgggtttcaagattgcagctaaaggcaacaactactgt

SEQ ID NO: 3664 - DNA, 680 bp, Triticum aestivum
cggcgtgcgtctgcgggcatggtgttcgacttcacgaccaaagggattctgaacgccgccgtggaggcgagctgtggcggctgatcgacccgcaggggaaggctcccggcgtgatggggtggtggccggccaaggccgtcaccttcgtcgacaaccacgacaccggctccacccaggccaagtggccattcccctacgacaaggtcatgcagggctacgcgtacatcctcacccatcccggcatcccatgcatcttctacgaccatttcttcaacctggggttcaaggaccagatcgcggccctggtggcgatcaggaagcgcaacggcatcacggcgacgagcgccctgaagatcctcatgcacgaaggggacgcctacgtcgccgagatcgacggcaaggtggtggtgaagatcgggtccaggtacgacgtcggggcggtgatcccagccgggttcgtgaccacggcgcacggcaacgactacgccgtctgggagaagaccgcagccgcggccacactacaacggagctgaagcctccactgaagcgcggcggcaacatgatttgaactacattgtccgttctgctatacacacgcagatattgttattgtagtatatacttgtacccagaaatgagctttacgaataggctcacacagactatagtaaataaagtat

SEQ ID NO: 3665 - DNA, 889 bp, Triticum aestivum
caagtactccaacgccgcgccacagggacaccgcgcggcttcgatccgcgcccgacatcgaccatctcacccgcgggtgcagagggagctctccgcctggctcaactggctcaaactgacctcggcttcgtcggatggcgcctcgactttgccaagggatactctgcggccatggccaagatctatgtcgacaacagcaagccgtctttcgtggttggtgagctctacgatagggaccgacagctgctcgcgaactgggtgcatggcgtcagcgggccggccacggcgtttgacttccccaccaagggcgttctccaggaggccgtgcagggcaacctggggaggatgcgcggcagcgacggcaaggcgcccggtccgattgggtggatgccggagagaaccgtcacgttcatcgacaaccatgacactgggtcgacacagaggttgtggccattcccctcagacaaggtcatgcagggctacgcctacatcctcacacacccaggcataccatgcctcttctacgaccatgtgttcgactggaagctgaagcaggagatcaccgcactggctagggtcaggtcaaggaacgggatccatccgggtagcacactggatatcctcaaggccgagggcgatctctatgttgccaagattgggggcaaggttataaccaagatcgggtcaagatacaatattggcaacaacgtgatcccctcgggtttcaagattgcggctaaaggcaacaactactgtgtttgggagaagagtggcctctgaattcatgctggtgaatggaattagttctagttttcaaactggatatctacgactaggcatgatttatgagattaaatattccgaatttggttttaaatgtacggtccta

SEQ ID NO: 3666 - DNA, 397 bp, Triticum aestivum
ctagccaatcattcatccagagaagaagagtgcagtgaacagtgtgagatcgacggtagcgcgcgcgatggggaagaatggcaaccacctgtgctgcttctctctgctgctgctgcttgtcgccgggttggcgtccggccatcaagtcctctttcaggggttcaactgggagtcgtggaagcagagtggcgggtggtacaacatgatgatgggcaaggtcgacgacatcgccgccgccggagtcacgcacgtctggctgccgccaccatcgcactccgtctccacccaaggttacatgcctggtcggttgtacgacatcgacgcgtccaagtacggcaacgcggcggagctcaagtcgctcatccgcgcgctccacggcaagggcgtccaggcgatc

SEQ ID NO: 3667 - DNA, 580 bp, Triticum aestivum
tgcccagatctacgtcgactcagctaccgccgttcgtcttggcgagctctacgaccggaccgacagctgtctcgcgaactgggtgcggggcgtcggcgcgccggccacggcgtttgacttccccaccaagggcgttctccaggaggccgtccagggcgatctggggaggatgcgcggcagcgacggcaaggcgcccggtatgattgggtggatgccggagaagaccgtcacgttcatcgacaaccacgacactgggtcgacgcagaggctgtggccattcccctcggacaaggtcatgcagggctacgcctacatcctcacacacccgggcataccatgcatcttctacgaccatgtgttcgactggaaactgaagcaggagatcaccgcactggctacggtcaggtcaaggaacgggatccatccgggtagcacactggatatcctcaaagccgagggcgatctctatgttgccaagattgggggcaaggttataaccaagatcgggtcaagatacaatattggcgacaatgtgatcccctcgggtttcaagattgcagctaaaggcaacaactattgt

SEQ ID NO: 3668 - DNA, 583 bp, Triticum aestivum
  N_region (130)..(149): n = any nucleotide
cttcctaatcgtagttcgtcctcgcccaattcgagcagtcatgtcgctgattccccgcggcaacgccttcgaccccttctccctcgacctctggaaccccttcgacggcttccccttcggctccggctannnnnnnnnnnnnnnnnnnnctcttcccctcgttcccgcgcatcagctccgagaccgcggccttcgccggcgcgcggatcgactggaaggagacgcccgaggcgcacgtgttcaaggcggacgtgccggggctgaagaaggaggaagtggaggacggcaacgtgctccagatcagcggcgagcgcaacaaagagaaggaggagaagaccgacacgtggcacagggtggagcgcagcagcggcaagttcctgcgcaggttcaggctcccggaggacgccaaggtggagcagatcaaggcggccatggagaacggcgtgctcaccgtcaccgtggccaaggaggaggccaagaagcccgaggtcaagtccatcctgatctccggatagaccccttctccctcgacttcaactcgctcttgttagtgcctaactgctcagagcctgtaataagtgtg

SEQ ID NO: 3669 - DNA, 731 bp, Triticum aestivum
gaccgcgccgggcagcgcacccgcttcaaggccttcgtcttcgtcggcgacagcacacgccacgtcggcctcggcgtcaagtgcgccaaggaggtggccacggccatccgcggcgccatcatcctcgccaagctctcgatcgtgcccgtcaggaggggctactgggggaacaagatcggcctgcccccacaccgtgccctgcaaggtcaccggcaagtgcggctccgtcaccgtgcgcatggtgcccgcccccaggggttccggaatcgtcgccgcccgcgtccccaagaaggtgctgcagttcgccgggatcgatgatgtcttcacttcctcgcgtggatccaccaagacccttggcaacttcgtcaaggctacctttgactgcctgatgaagacctatggattcctcactcctgacttctggagggagacaaccttcaccaaggcgccgtaccaggagttcaccgacatcttggcgaagccgaccaaggccctgatgcttgatgcaccagctgagaagatagaagcttaggatgaagggtttttactagctgggagctgtctgttgcactttgctttattatagtcgagaaccaggtgtctttgaattgtgctacttgtggaagtctctgtttgctgtcaaagttttggattatggtgcaatgctactctgttattggcaatggatgctacataattatgccaatcgcagtgttatttctctagatgtt

SEQ ID NO: 3670 - DNA, 806 bp, Triticum aestivum
cagatcgtggagacgctctgccccggggtcaaggacgagtgatgaagatcacccggtccagaagcagacccgcgccggacagcgcacccgcttcaaggccttcgtcgtcgtcggcgacagcaacggccacgtcggcctcggcgtcaagtgcgccaaggaggtggccacggccatccgcggcgccatcatcctcgccaagctctcaatcgtgcccgtcaggcggggctactgggggaacaagatcggccagccccacaccgtgccctgcaaggtcaccggcaagtgcggctccgtcaccgtgcgcatggtgcccgcccccaggggttctggaatcgtcgccgcccgcgtccccaagaaggtgctgcagttcgccgggatcgatgatgtcttcacttcctcgcgtggatccaccaagacccttggcaacttcgtcaaggcaaccttcgactgcctgatgaagacctatggattcctcacccctgacttctggagggagacaaccttcaccaaggcgccgtaccaggagttcaccgacatcttggcgaagccgaccaaggccctgatgcttgatgcaccagccgagaagatagaagcttaggatgtttgccatgaaagggtttttactagctgggagctgtctgttgcactttgctttattatagtcgagaacaaggtgtctttgaattgtgctacttgtggaagtctctgtttgctgtcaaagttttggattatggtgcaatgctactctctgttatcggcaaaggatgctacataattatgccatccagtgttatttgtctagatgt

SEQ ID NO: 3671 - DNA, 892 bp, Triticum aestivum
cccgtcaccaagctcggccgcctcgtcaaggagggccgcttcaccaagatggaggagatctacctccactcgctccccgtcaaggagcaccagatcgtggagacgctctgcccggggctcaaggacgaggtgatgaagatcaccccggtccagaagcagacccgcgccggacaacgcacccgcttcaaggccttcgtcgtcgtcggcgacagcaacggccacgtcggcctcggcgtcaagtgcgccaaggaggtggccacggccatccgtggcgccatcatcctcgccaagctctctatcgtgcccgtcaggaggggctactgggggaacaagatcggcctgccccacaccgtgccctgcaaggtcaccggcaagtgcggctccgtcaccgtgcgcatggtgcccgcccccaggggttccggaatcgtcgccgcccgcgtccccaagaaggtcctgcagttcgccgggattgatgatgtcttcacttcctcgcgtggatccaccaagacccttggcaacttcgtcaaggcaaccttcgactgcctgatgaagacctatggattcctcacccctgacttctggagggagacaaccttcaccaaggcgccgtaccaggagttcaccgacatcttggcgaagccgaccaaggccctgatgcttgatgcaccagccgagaaggtagaagcttaggatgttgccataaaagggtttttactagctgggagctgtctgttgcacttccctttattatagtcgagaaccaggtgtctttgaattgtgctacttgtggaagtctctgtttgctgtcaagttttggattatggtgcaatgctactctctgttatcggcaacatttttggtctgtgctttgtgttgatcgtatccatttgcc

SEQ ID NO: 3672 - DNA, 714 bp, Triticum aestivum
aggtgggcgcgcgcgtcagcaggcatggtgttcgatttcacgaccaagggatactgaacgcggccgtggagggcgagctgtggcggctgatcgacccgcaggggaaggcccccggcgtgatggggtggtggccggccaaggccgtcaccttcgtcgacaaccacgacaccggctccacgcaggccatgtggccattcccctccgacaaggtcatgcagggctacgcgtacatcctcacccaccccggcatcccatgcatcttctacgaccatttcttcacctgggggttcaaggacgagatcgcggcgctggtggcgatcaggaagcgcaacggcatcacgccgacgagcgctctgaagatcctcatgcacgaaggggacgcctacgtcgccgagatcgacggcaaggtggtggtgaagatcgggtccaggtacaacgtcggggcggtgatcccggccgggttcgtgacctcggcgcacggcaacgactacgccgtctgggagaagcccggcgccgcggggagactgcagcggagctgaagtctccactgatccaccattcgatcgagcatgaattttctgaagtaggagtacatgattcacttctgctatattcacgcagatactatgattaactatgtatacttgtacccaaaattgatgagctatacgaattgctcacacgactgtactaaataaagtaatgaggatacga

SEQ ID NO: 3673 - DNA, 1365 bp, Triticum aestivum
ctcctcttcgagagcacagctagatagagctgaagaacatggcgagcaaacactcgtccctctccctcttcctcgtcctccttggcctgtcggccagcttggcctccgggcaagtcctgtttcaggggttcaactgggagtcgtggaagcagagcggtgggtggtacaacatgatgatgggcaaggtcgatgacatcgccgccgccggagtcacccacgtctggctcccgccgccgtcgcactctgtcgccaacgaaggttacatgccaggtcggctgtacgacatcgacgcatccaagtacggcaacgcggcggagctcaagtcgctcatcgcggcgctccacggcaagggcgtgcaggcgatcgccgacatcgtcatcaaccaccggtgcgccgactacaaggacagccgcggcatctactgcatcttcgagggcggcacctccgacgccgcctcgactggggcccccacatgatctgccgcgacgacaccacctactccgacggcacagccaacctcgacaccggcgacggcaagcctaactacgaccaggacgcgcaccggcagaatctggtgaactgggtggacaaggtgggcggcgcggcctcggccggcatggtgttcgacttcacgaccaaagggattctgaacgccgcggtggagggcgagctgtggcggctgatcgacccacaggggaaggcccccggcgtgatggggtggtggccggccaaggccgtcaccttcgtcgacaaccacgacacgggctccacgcaggccatgtggccattcccctccgacaaggtcatgcagggctacgcgtacatcctcacccaccccggcatcccatgcatcttctacgaccatttcttcacctgggggttcaaggacgagatcgcggcgctggtggcgatcaggaagcgcaacggcatcacggcgacgagtgcactcaagatcctcatgcacgaaggggacgcctacgtcgccgagatcgacggcaaggtggtggtgaagatcgggtccaggtacgacgtcggggcggtgatcccggcagggttcgtgacctcggcacacggcaacgactacgccgtctgggagaagcccggggccgcggcgacactgcagcggagctgaagtctccactgaccggagatgatctgatctacattgtccattctgctacacacacgcagatattgttgtggtttaacttatgtatacttgtacccaaaattgatgagctctacgaatggctcagcacgaatgtagtaaataattattgaggatatgaagaggtataagaggcgattgcgccatttggatgcttcagcatatataaataaatgaaaaggaaaagacagttgcac

SEQ ID NO: 3674 - DNA, 797 bp, Triticum aestivum
gggggcggcgcggcgtcggcaggcatgggttcgacttcacgaccaaggggatattgaacgccgcggtggagggcgagctgtggcggctgatcgacccgcaggggaaggctcccggcgtgatggggtggtggccggccaaggccgtgcaccttcgtcgacaaccacgacacaggctccacgcaggccatgtggccattcccctccgacaaggtcatgcagggctacgcatacatcctcacccaccccggcatcccatgcatcttctacgaccatttcttcacctgggggttcaaggaccagatcgcggcgctggtggcgatcaggaagcgcaacggcatcacggcgacaagcgcactcaagatcctcatgcacgaaggggacgcctacgtcgccgagatcgacagcaaggtgctggtgaagatcgggtccaggtacgacgtcggggcggtgatcccggccgggttcgtgacctcagctcacggcaacgactacgccgtctgggagaagccaggcgccgcggcaacacggcagcggagctgaagtctccactgatccaccattcgatcgagcatgaattttctgaagtaggagtcatgattcacttctgctgtattcacgcagatactatgattaactatgtatacttgtacccaaaattgatgagccatacgaattgctcacacgactgtactaaataaagtactgaggatacgaagagatttaataaattcgagtttgtaccatctgtgttggtgcatctgggagggtgactatcagatggaatgatagcatgtttt

SEQ ID NO: 3675 - DNA, 588 bp, Triticum aestivum
atcccgcgcacctcctccgaccgcggcccttcgcgggcgcgcgcatcgactggaaggagacgcccgaggcgcacgtgttcaaggcggacgtgccggggctgaagaaggaggaggtgaaggtggaggtggaggacggcaacatcctccagatcagcggcgagcggaacaaggagcaggaggagaagaccgacacctggcaccgcgtggagcgcagcagcggcaagttcctccgcaggttccggctgccggagaacgccaaggcggagcaggtgaaggcgtccatggagaacggcgtgctcaccgtcaccgtgcccaaggaggaggccaagaagcccgaggtcaagtccatccagatctccggctagagcgatgaagtggagtgcagagcagtggcgtggagtctcgccccggtcgtcgtgataaaataaaatcaagaagagtccggccgtctgtgcgtgcgaatggtccaatgttgcagtcagtgttttgagtctctcgtgtcagtgttttgagtccggtttgttgtttgttcttcagtctgtactggctctgtactccatcagcaactgagtaaattcattaccttct

SEQ ID NO: 3676 - DNA, 635 bp, Triticum aestivum
gcagcaacagcacgcagcctcatcccgcgcacctcctccgacacgcgtccttcccgggcgcgcgcatcgactggaaggagacgcccgaggcgcacgtgttcaaggcggacgtgccggggctgaagaaggaggaggtgaaggtggaggtggaggacggcaacatcctccagatcagcggcgagcggaacaaggagcaggaggagaagaccgacacctggcaccgcgtggagcgcagcagcggcaagttcctccgcaggttccggctgccggagaacgccaaggcggagcaggtgaaggcgtccatggagaacggcgtgctcaccgtcaccgtgcccaaggaggaggcccagaagcccgaggtcaagtccatccagatctccggctaggcgtctgcgcgctcgctgcgcgatgaggtggactgcagagcagaggtgtggagtttcgccccggtcgtcgtgatgaaataaaatcagagtttggttgtgcgcggtgtgttagtactcagtgttgtgagaatggtccaatgttgcagccagtgttttgagtctctcgcgtctgtgttttgagtctagtttgttcgtcaatctgtaattcatcagcaactgagtaaatccattaccatctccgtctcggat

SEQ ID NO: 3677 - DNA, 779 bp, Triticum aestivum
cacaaatcaatcgctcacccttccgcttccaacactaatcaaatcgtcgattccttccaccagcagctcgaatccccatcaacaatgtcgctgatccgccgcagcaacgtgttcgaccccttctccctcgacttcttcgacccttttgacggcttccccttcggctccggcagcagcaacagcggcggcagcctcgtcccgcgcacctcctccgacacggcggccttcgcgggcgcgcgcatcgactggaaggagacgcccgaggcgcacgtgttcaaggcggacgtccccgggctgaagaaggaggaggtgaaggtggaggtggaggacggcaacatcctccagatcagcggcgagcggaacaaggagcaggaggagaagaccgacacctggcacagggtggagcgcagcagcggcaagttcctccgcaggttccggctcccggagaacgccaaggcggagcaggtgaaggcgtcgatggagaacggcgtgctcaccgtcaccgtgcccaaggaggaggccaagaagcccgacgtcaagtccatccagatctccggctaggcgtctgcgtgctcgctgcgcgatgaggtggactgcagagcagaggtgtggagtttcgccccggtggtagtgatgaaattaaaaaaaaccagagtccggctgtccgtgcgtgcgctgtgtgtctagtactctagcgttgtgtgcgaataaatctcgtctgtgtttcgagtccagtttgctcatccatctgtatttcatcagcaactgagtaaatccat

SEQ ID NO: 3678 - DNA, 681 bp, Triticum aestivum
actcgacaccatgtcctgattcccccgcaagctttcgacccttctccctgacctctcggaccccttcgatggcttccccttcgctccgcggcatcaccagcttcttcccctcgttcccgcgcgcatcctccgagaccgcggccttcgccggcgcgcggatcgactggaaggagactcccgaggcgcacgtgttcaaggcggacgtgccggggctgaaaaaggaggaagtgaaggtggaggtcgaggacggcaacgtgctccagatcagcggcgagcgcaacaaagagcaggaggagaagacgggcacgtggcacagggtggagcgcagcagcggcaagttcctgcgcaggttccgcctcccggacaacgccaaggcggaccagatcaaggcggccatggagaacggcgtgctcacagtcaccgtgcccaagaaggaggtcaaggagccggaggtcaagtccatccagatttctggctaggctgcttcgggattgaggttcgattcgctgctctgaggttggactcgctcctttcgtgacttctgctcaaaggcctgtaataagtgtggatttgggtccgtgttgggtgtgagtgtgcccttgtcagtactgtgttcaacgtccgcgtccagagttatagtcatgtaatgcaagcatccagtccgtaccgctgtgatcaact

SEQ ID NO: 3679 - DNA, 793 bp, Triticum aestivum
gaaaagaaaagcatccatcgcctgaatttgagagcttcctaatcgcagttcgtcctcgcccaaatcgagcagccatgtcgctgattccccgcggcaacgccttcgaccccttctcccctgacctctgggaccccttcgacggcttgccccttcggctccggcggcagcagcagcctcttcccctcgttcccgcgcatcagctccgagaccgcggccttcgccggcgcgcggatcgactggaaggagacgcccgaggcgcacgtgttcaaggcggacgtgccggggctgaagaaggaggaagtgaaggtggaggtggaggacggcaacgtgctccagatcagcggcgagcggaacaaggagcaggaggagaagactgacacctggcaccgcgtggagcgcagcagcggcaagttcctgcgccggttcaggctcccggaggacgccaaggcggaccagatcaaggcgaccatggacaacggcgtgctcaccgtcaccgtgcccaaggagggggccaagaagcccgaggttaagtccatccagatctccggctaggctgcttgagattaaggttcaggttcagttcgctgctgtgagtttcaactcgctcttttgtgccttttgctcgtgtggatggatttgggtgcgtgttcaacgtccgtgtccagagttatagtcatgtaatgcaagcatcgagtccaaagtgtgatgtactgctgtgatcaacttctgtgctgatttgaacgagcgagtcacagttctctcttaactgcttttggaacttcgattttacttc

SEQ ID NO: 3680 - DNA, 795 bp, Triticum aestivum
cgacttcacgaccaaagggatactgaacgccgccgtggagggcgaactgtggcggctgatcgacccgcaggggaaggcccccggcgtgatggggtggtggccggccaaggccgtcaccttcgtcgacaaccacgacacaggctccacgcaggccctgtggccattcccctccgacaaggtcatgcagggctacgcatacatcctcacccaccccggcaccccatgcatcttctacgaccatttcttcacctggggtttcaaggatgagatcgcggcgctggtggcgatcaggaagcgcaacggcatcacggcgacgagcgcactcaagatcctcatgcacgaaggtgatgcctacgtcgccgagatcgacggcaaggtggtggtgaagatcgggtccagatatgacgtcggggcggtgatcccggctgggttcgcaacgtcggcgcacgggcaacggctacgccgtctgggagaagaccgctgccgcggcaacagcacaacggagctaaagcctccagcgatccaccattcgatcgagcatgaattttctgaagtaaataattcacttctgcagttctgctatagacacgcagatattatcaatcaactatgtatacgtctgtccaaaattgatgagctctacaaattgctcacacgactgtagtaaataaagcaccgagtatatgaagagttataagaggcaattacgccatttgccatgtgcatgataagacgccgagttggatatggctactcaagtgacataacatgtactccctccataccaaaatataa

SEQ ID NO: 3681 - DNA, 522 bp, Triticum aestivum
cattccccctcccgaacaaggtcatgcaggggtacgcatacatcctcacccaccccggcaccccatgcatcttctacgaccatttcttcacctggggtttcaaggatgagatcgcggcgctggtggcgatcaggaagcgcaacggcatcacggcgacgagcgcactcaagatcctcatgcacgaaggagatgcctacgttgccgagatcgacggcaaggtggtggtgaaaatcgggtccagatacgacgtcggggcggtgatcccggctgggttcgcaacgtcggcgcacgggcaaagctacgccgtctgggaaaagatcggtgccgcggcgacaccacgacggagctgaagcctccaccgatccaccattcaatcgagcatgaattttctgaagcaaatgattcacttctgcagttctgctatagacacgcagatattttattaactatgtatacgtctacccaaaattgatgagctctacgaaccgctcacacggctgtggtaaataaagcattgaggat

SEQ ID NO: 3682 - DNA, 660 bp, Triticum aestivum
cgtggagggcgaactgtgcggcttgatcgacccgcaggggaaggctcctggcgtgatggggtggtgccggccaaggccgtcaccttcgtcgacaaccacgacacgggctccacgcaggccctgtggccattcccctccgacaaggtcatgcagggctacgcatacatcctcacccaccccggcacaccatgcatcttctacgaccatttcttcacctggggtttcaaggatgagatcgcggcgctggtggcgatcaggaagcgcaacggcatcacggcgacgagcgcactcaagatactcatgcacgaaggagatgcctacgttgccgagatcgacggcaaggtggtggtgaaaatcgggtccagatatgacgtcggggcggtgatactggctgggttcgcaacgtcggcgcacgggcaacggctacgccgtctgggagaagaccgctgccgcggcaacagtacaacggagctgaagcctccactgatccaccactcgatcgagcatgaattttctgaagcaaatgattcacttctgcagttctgctatagacacgcagatattattaactatgtatacgtctacccaaaattgatgagctctacgaattgctcacacgactgtagtaaataaagcactgaggatatgaagaggtataag

SEQ ID NO: 3683 - DNA, 705 bp, Triticum aestivum
  N_region (156)..(176): n = any nucleotide
caaatgtgaagcttggctcttccgaggatgaatgacgctacgggcgtgaaaatgaccgccagagatagacccacgcgctgaggacaaggagctcaagtaccagcttctgaagaagtacagtggctatttgacagcctccggccaagagttctcccnnnnnnnnnnnnnnnnnnnnnctcccaaaggaggccaggcagaagctacttcactggtgggagctgcactacaagtggccttacccctcggagacagaaaagattgcgcttgcggaatcgacagggctagaccagaaacagatcaacaactggttcattaaccagaggaaacggcattggaaaccgtctgaggacatgccgtttgtcatgatggaaggattccacccacagaatgccgctgccctctacatggacggtcaattcatggctgacggcatgtaccgccttggttcgtaaacctactttgaacaatcgatctggcgaaaggtgattgtcacattggaaaagatatttgtattcaggactggttaaaaatacatggacattgttattgaatttttgggtcgttcccggattcacaggctcgctctagtttcagtgatggcatatagttctcccgtaatgttgtaaatttcgattcgatgggttgcagtttagatgtatttggatctcctatttgatatgattgtatgtttcagatttgtgaaac

SEQ ID NO: 3684 - DNA, 600 bp, Triticum aestivum
ttcactgtgggactgcactacagtgcccttacccctcggagacagaaaagatcgcgcttgcggaatcggacagggctagaccagaaacagatcaacaactggttcattaaccagaggaaacggcattggaaaccgtctgaggacatgccgtttgtcatgatggaaggattccacccacagaatgccgctgccctctacatggacggtcagttcatggctgacggcatgtaccgccttggttcgtgaacctacttgaacaattgatctggcgaaaggtgattgtcacattggaaaagatatctgtattcagcactggttaaaatacatggacattgttattgaatttttgggaccttcccggattcacaggctcgctctagtttcagtgatggcatatagttctcccgtaatgttgtaaatttcgattcgatgggttgcagtttagatgtatttggatctcctgtttgatatgattgtatgtttcagatttgtgaaacatgttcaaagttgcctatctgaatcacttatgtacattggtttttctgttaacagttgaggtggatatggtcacgataacgtgtatattgtatgaaaatttca

SEQ ID NO: 3685 - DNA, 584 bp, Triticum aestivum
ctcccaaaggaggccaggcagaagctacttcactggtgggagctgcactacaagtggccttacccctcggagacagaaaagatcgcgcttgcggaatcgacagggctagaccagaaacagatcaacaactggttcattaaccagaggaaacggcattggaaaccgtctgaggacatgccatttgtcatgatggaaggattccacccacagaatgccgctgccctctacatggacggtcagttcatggctgacggcatgtacagccttggttcgtgaacctacttgaacaattgatctggcgaaaggtgattggcacgttggaaagatatctgtattcagcaactggttaaaatacatggacattgttattgaatttttgggaccttcccggattcacaggctcgctctagtttcagtgatggcatatagttctcccgtaatgttgtaaatttcgattcgatgggttgcagtttagatgtatttggatctcctatttgatatgattgtatgtttcagatttgtgaaacatgttcaaagttgcctatctggaatcacttatgtacattggtttttcttttaacagt

SEQ ID NO: 3686 - DNA, 634 bp, Triticum aestivum
cggggtcgtccgaggatgagctggacacgagctgcgaagaggagatcgaccccagcgcggaggacaaggagctgaagcaccagctgctgaggaaatacggcggctacgtggggagcctccgccaggagttctgcaagcggcgcaagaaggggaagctccccaaggaggcccgccagaagctgctgcactggtgggagctgcactccaagtggccctacccctctgagacggagaagatcgcgctggcggagtcgacggggctggaccagaagcagatcaacaactggttcatcaaccagaggaagcggcactggaagccggcgccggaggacatgcccttctccgtgatggacggcggcgtgggcgtgagcttcctccccgccccgcagggcccggcgctgtacatggacagggcgccgttcatggtggacggcatgtaccgcctcgggtcgtgaggcctctctccctttctccatcggacggggactgccggccggtgccgtcggcgtggtacgtaagctccatgcatggcaacggcatgcggccggtacgtaacgtacttagtctgacgacgactactcaatattatgttccttcggtaaatactccatatatatctgccgttcacgtgaac

SEQ ID NO: 3687 - DNA, 720 bp, Triticum aestivum
aggggagacaagagcttcgctgagattgatgcccacggcgtggaccaggagctgaagcaccatctcctgaagaagtacagtgggtacctgagctcccttgaagccaagagctgtcaaaagaagaagaagaaaggaaagctcccgaaggatgctcgccagcagctcctcagctggtgggagatgcactacaagtggccttatccctcggagagccagaaggtggcgctggcagagtcgacgggcctggacctgaagcagatcaacaactggttcatcaaccagaggaagcgccactggaagccgtcggacgagatgcagttcgtgatgatggacgcgtaccacccacctaacgccgccttctacatggacggccacttcgtcaacgacagcgggctctacaggttcggctagctcggccaggcctcgtctcttaccgttaccggtgaccttggtcggcgccaatggcggcgaccgagtgccttatgctgaagcacttggggaccgacgaccgaagctagttaagttagcgtttgtgtgccgcatgcgagctggaaggaggccgcatgcttattttgtttatcatcactacttatacctacgtacctatcatttatgcatggactcgatcgcctttgtgtggttttgtagcgattgacgcgaccatatggacaaccgcctgtttgctgcgacatgccttgctacgcgcatgcttgaataatt

SEQ ID NO: 3688 - DNA, 664 bp, Triticum aestivum
tctcgccagagcaccaccagaaccatcgccctcaaccaactcatcaatggcgtcgccggcgctgggggcggggacgccgccgttcctcaccaagacgtacgcgatggtggacgacccggagaccgacgacaccatctcctggaacgagtccggcacggcgttcgtggtgtggcgccgcgccgagttcgagcgcgacctcctccccaagaacttcaagcacagcaactttgcctccttcgtccgccagctcaacacctacggattcaggaagataggccttgacaggtgggagttcgccaacgagtgcttcaggaaaggggagaagcgcctgctcggcacgatacagaggcggaagggatctggcgccggggcgccgccgcccgcgatgatggcgacgccgatggcgacggcgattccgatctcgcccacgccgacgagctccggcggggacgccgcggtctcgtcgtcgccgccgcccgggctggcgctggtggccaccggcgcgatggccgagctggaggaggagaacgcgcggttgcggcgcgagaacgcgaggctggcgcggaagctcgagcgcgcgcggcggctctgcgacggcgtgcggcacctcgtgtggcggatgaccacgggggcctcactgggcccgcggctcaaagccgggcca

SEQ ID NO: 3689 - DNA, 733 bp, Triticum aestivum
cgtcgtgtcgcggtcgagaaaatttatttttatcaaaaaggcttcttccgtacgttcctttctttggtgaggtggccctctaccgcatctggaagctactacggggttccccgggccagatccggccgggaggggcagaggaggcgccggcgtgatgtcggccgagcatggcgctgcggcggcggacggggctggggcggagcctcctctcccggcgccgatgccggggctggcgacgtcggcggacgcggcggggcagaggtccctgccgacgccgttcctgaccaagacgtaccagctcgtcgaggacccggcggtggacgacgtgatctcgtggggcgaggacgggtcgacgttcgtggtgtggcggccggcggagttcgcccgggacctgctccccaagtacttcaagcacaacaacttctctagcttcgtgcggcagctcaacacctacggatttaggaagatcgtgccggaccggtgggagttcgccaacgactgcttccggcgaggcgagaagcgcctgctctgcgacatacaccgccggaaggtggtccagtcggccgggcttgctgctgcggctggcgccgccgcggctggggcggtcacgtttggcactgcggcgatccctatggagctgcgcgggacgcgctccggctcgccggagccgaggtctcctcgagggagcggtttgtcgtcactcggctccgggggggaccggtggggccgccgg

SEQ ID NO: 3690 - DNA, 1135 bp, Triticum aestivum
ggagttggagcatgggggcctggcgccgcggcgatggaggggctgcacgagactggcccgccgccgttcctgaccaagacgttcgacctggtggccgacccggccaccgacggcgtcgtctcctggggccgcgccgggaacagcttcgtcgtctgggacccgcacctcttcgccgccgtgctgctcccgcgcttcttcaagcacagcaacttctccagctttgtccgccagctcaacacctacggttttagaaagatcgatccagacagatgggaattcgcaaacgagggtttcattcggggccagagacagcttctaaagatgataaagagaaggaggtcattgtcctatctcccttcatcacagcagcaggcccttggctcttgcctcgaggtcggccagttcggattcgacgaagaaatcgaagtgctaaagcgtgacaagaacgccttactcgcagaggtggtgaaactgaggcaggagcagcagagcagcagagctgacatgcgagccatggaagagaggttacaccacgtcgagcagaagtcagctccagatgatgggtttcctggcaagagctattacagaaccctgacttctttctccagctgatccagcaacaaaataaactgaaggacctcgaggacggttacccgacgaagaggaggaggcccatcgacgtaatgccgttccttggtccctgaggggaccagtcagagtgagccactcgagtccacattcatttttgaggacagggaattttcagagctggagaatttagccatgaacattcagggcatcaggaagggcatggaggatgacagaggtggtcggaatcagggctgtggtgaggccgagctgactgacgacttctgggaggagctgctgagtgaaggaatgagggatgaagctgagatgctagagctggagaggaggagatctagatgtttcgacgcgtagcgcaaaatatgggtcatctaagtaacaacgatccaaactctaccagaattcataaccatttaatctatatacagttgtatagatagctgtattgcatattgtagtgctaattcatagtcaaagactgattgtattgcggttccacaccgattatgtggtatatatctagtggtat

SEQ ID NO: 3691 - DNA, 615 bp, Triticum aestivum
  N_region (480)..(499): n = any nucleotide
cgcggctacacccagttcgcgccgcactacatcacctggtactgcccggaggccttcgtcctgagcgcgcagtgccggtcgcagtgcatcaaccacggccgctactgcgccccggacccggagcaggactttaccaccgggtatgatgggaaggacgtcgtggtgcagaacctgatccagatctgcctcttcaaggtcgccaacgagagccgcaagccgtggctgtggtgggactatgtgcacgacttcgccatccggtgccccatgaaggagaagaagtacaccaccgattgcgctcatggtgtcatcaagtcccttggaatggacattgacaagattacccagtgcgtcggagaccccgatgccgacgaggacaatccagtgctcaaagcagagcaagatgctcaaattggtcatggtgctcgaggggatgttaccatactgccgactttcgtcgtcaataacagacagtacagaggnnnnnnnnnnnnnnnnnnnnccgtccaaaaggacccagccttagaaaggcgtgattgcgacgtaaagctctctatagtgtccctaattaattcctggcccgcgttacacctctgcctggaaacccgcttcccattt

SEQ ID NO: 3692 - DNA, 937 bp, Triticum aestivum
tcgcttcctccctgccctgccctgccctgctctagcaccggcctgagctcgcgcgtggtgttactgctgagtttggccggaatggggcggtcgccgtgctgcgagaaggagcacaccaacaagggggcctggaccaaggaggaggaccagcggctggtcgcctacatcagggccaacggcgagggctgctggcgctcgctgcccaaggcggccggcctgctccgctgcggcaagagctgccgcctgcgctggatgaactacctccgtcccgacctcaagcgcggcaacttcaccgacgacgaggacgagctcatcatccgcctccacagcctcctcggcaacaagtggtctctgatcgccgggcagctgccgggcaggacggacaacgagatcaagaactactggaacacgcacatcaagcgcaagctcctgtcccgcggcatggacccccacacgcaccgcccgctcacggccgtcgacggcggcgcggcatcccgccctgcacacatagcagtgccggcgagggcagcgccacccacgatgttcgccctgccgacaaagcagccgccggtcgtggagtcgtcgtccgacgacggcagcagcggcgcgacgagcacgggggaaccacggtgccccgacctaaacctcgacctgtcggtgggcccgccggcggccgacacgccgacctcgcacccggtctgcctctgccgccacctcggcttccgcggcggggaggcatgcagctgccgtcaggccgacagcccgggctcccaggggggcgggttcagatatttcaggccgttggaggaaggccagtacatatgagacgagacgagacggctaggccctaggctccacagcaatttgcaagacggtgaatttttccacctccacagcaccaccgtctcacaaaacggtgaaaaaaacggtgaaagaa

SEQ ID NO: 3693 - DNA, 848 bp, Triticum aestivum
  N_region (298)..(325): n = any nucleotide
gcgtcgtccccaagctcgcagggctgctgaggtgcgggaagagctgcaggctgaggtggaccaactacctgaggcccgacctcaagcgggggctcctctccgacgaggagcagcagctcttcatcgacctgcacgcgcagctcggcaacaggtggtccaagatcgcggcgcagctgcccgggaggacggacaacgagatcaagaaccactggaacacccacatcaagaagaagctccgcaagatgggcatcgaccccgtcacccaccgcccgctggatcaagtgccccctcgtcccgnnnnnnnnnnnnnnnnnnnnnnnnnnnncaccaccgcgtggcagcagcaggacggcgccgagcactgccagcaagtggaggatgaggacgtgaaggcggtcccgctgatccagccgcacgaggtcacggcgccaccgcccaccgcaagcagcaattgctctgtttcccctgcctcggtcgtctcgccgtcctgctcctcgtccgcggcgtccggtctggaggcggcggagtggccggagccaatgtacctcctcggcatggatggcatcatggacgttggctcgggctgggacgccggcttcgtcgtccccggcggcctcagcgtcgacccgttcgaccactactacccggaccctgcaggcttcgatcaagaagcctggctgtaacgccatccttgcagcagcaatgcacatagacggatcatagatccgcttctttcgccagttcgatctcccctcccctcccctcccctagctagtaggttagcttccatgtcgaaatgttaccgccatacccacctcagcttttcttggaacttggaagaaatgcat

SEQ ID NO: 3694 - DNA, 1245 bp, Triticum aestivum
ctcgctgccgcactgctctgctctagtagaaggtcgatcggcatggggaggtcgccgtgctgcgagaaggagcacaccaacaagggggcgtggaccaaggaggaggaccagcggctgatcgcctacatcagggtcaacggcgagggctgctggcgctcgctgctcaaggcggccggcctgctgcggtgcggcaagagctgccgcctccgctggatgaactacctccggcccgacctcaagcgcggcaacttcaccgacgacgaggacgagctcatcatccgcctccacagcctcctcggcaacaagtggtctctgatcgccgggcagctgccgggcaggacggacaacgagatcaagaactactggaacacgcacatcaagcgcaagctcctctcccgcggcatggacccccatactcaccgcccgctcacgcccgtcgacggcgccgcggcgtcccgcccggcacacatagctgtgccagcgagggcagcgccacccacgatgttcgcccccctgacgacgaagcagcctcccatggagtcgtcgtccgacgacggcagcagcggcgcgacgagcacgggggagccgcggtgccccgacctgaacctcgacctgtcagtgggcccgccggctgccgacacgccgacctcgcacccggtctgcctctgccgccacctcggcctccgcggcggggcggtgtgcagctgccgtcaggccgacagcccgggctcccaggggggcgggttcagatatttcaggccgctggaggaaggccagtacatatgagacgagacaggacggctaggccctaggctccacagcaatttgtaagacggtgaatttttccacctccacagcaccaccgtctcacaaaacggtgaaagaatatctaatctgttcataatatttcaaccatgaatatttgtcctctctgtccctaattttgtatcgttggttggtgctgctgtgctgtgaaaaaaacgaggggataatgtgacaaaggttggtgtgtgttttttgtggaaaaagggagtagctgatgtgaggtagcgggcacattattgtttcgggcatcagattccggtgttcctttcctgtgcagttttggtcgtgtggatggatgttgcgcagggcaatcatgtggtgtgtttttctggtaggtatttcggcttgtctgtgtttgcactccacgaattcttcagttggcagggagttaggcagtggagaaactcgtatggccaaact

SEQ ID NO: 3695 - DNA, 659 bp, Triticum aestivum
gcaagcccaacctcaaccaggacccgcaccggcaggagctggtgaactgggtgaacaaggtgggcggctccggccccggcaccacgttcgacttcaccaccaagggcatcctcaatgtggccgtggagggcgagctgtggcggctgcgcggcactgacggcaaggcgccgggcatgatcgggtggtggccagccaaggcagtgaccttcgtggacaaccacgacaccggctccacgcaacacatgtggcccttcccttctgacagggtcatgcagggatatgcctacatcctcacgcacccagggaccccatgcatcttctacgatcatttcttcgactggggcctgaaggaggagatcgatcgcctggtgtcaatcaggacccgacaggggatacacagtgagagcaagctacaaatcatagaggctgacgccgacctttacctagccgagatcgacagcaaggtcatcgtcaaactcgggccaagatacgatgtcgggcacctcattcccggaggcttcaaggtggtcgcgcacggcaaagattatgccgtatgggagaaaatataagcaaaattaccggagctcatgatgtccacgtagtacgatttagtacttcctccgtgtaaaagtgaggatgagggacatccattgtatttt

SEQ ID NO: 3696 - DNA, 809 bp, Triticum aestivum
cgttgccgccgccgcggcgagagccccggcggcgcaggcgtggggcaaggaggggcactacatgacctgcaagattgccgacggtttcctgacgagcgaggcgtcggcggcggtgaaggagctcctgccgtcgtgggccaacggagagctcgcagaggtatgcgcgtgggcggacaagcagcgcttccggtaccggtggtccagccccctccacttcgccgacacccccggcgactgcaacttcagctacgccagtacgggactgccacgacaccaaggggaacaaggacgtgtgcgtggtaggagctatcaacaactacaccgccgcgctggaggacccctccagcccgtatgaccgggacggagagcctgatgttcctggcgcacttcgtgggcgacgtgcaccagccgctccactgcggccacgtcgacgacctcggcggcaacaccatcaaactccgctggtacaggaggaagagcaacctgcaccacgtgtgggactctgacgtgatcacacaggccatgaaggacttttacaacagggaccaggacaccatgatcgatgccatccagcgcaacatcaccgacgactggtccagcgaggagaagcagtgggaggcgtgcggcagcaaaaccaagatcacctgcgccgaaaagtgagctctcggatcacgatgatgatgagccaatccaaccgcaaaactgaacatgtatatattcagaggctagatctgacggctgagaacggtcgaatgtaggtacgccaaggagagcgcattgctggcctgcgacgacaacgagggcgtcga

SEQ ID NO: 3697 - DNA, 645 bp, Triticum aestivum
gccccgctaccacggtcgacttcaccagcaagggcatcctgaacgtggtccgtggagggcgagctgtggcggctgcgcggcaccgacggcaaggcgccaggcatgatcgggtggtggcccgccaaggcggtgacctttgtggacaaccacgacaccggctccacgcagcacatgtggcccttcccgtctgacagggtcatgcagggatatgcctacatcctcacgcacccaggcaccccatgcatcttctacgatcatttcttcgactggggtctgaaggacgagatcgatcgcctggtgtcaatcaggagcccggcatgggatacacagtgaaagcaagctgcaaatcatagaggccgacgccgacctttatctcgccgagatcgacggcaaggtcatcgtcaagctcgggccaagatatgatgtgggacacctcattccgggaggcttcaaggtggccgcgcatggcaatgactatgcggtatgggagaaaatatgagcaaaattgccgaaggagctctacaattttttccctatgtgtacgtgatacatattggtccgagctcacgttgtccacatagtacgatttagtacttcctccatgtaaaagtgaggacgaggggcatccattgtattctcaaaaaa

SEQ ID NO: 3698 - DNA, 721 bp, Triticum aestivum
gcccaacctcaaccaggaccagcaccgcaggagctggtgaacgggtggacaaggttggcggcaaaggccccgctaccaccgttcgacttcaccaccaagggcatcctgaacgtggccgtggagggcgagctgtggcggctgcgcggcaccgacggcaaggcgcccaggcatgatcgggtggtggcccgccaaggcggtgacctttgtggacaaccacgacaccggctccacgcagcacatgtggcccttcccgtctgacagggtcatgcagggatatgcctacatcctcacgcacccaggcaccccatgcatcttctacgatcatttcttcgactggggcctgaaggacgagatcgatcgcctgatgtcaatcaggacccgacatgggatacacagtaaaagcaagctgcaaatcatagaggccgacgccgatctttatctcgccgagatcgacggcaaggtcatcgtcaagctcgggccaagatacgatgtgggacacctcattccgggaggcttcaaggtgaccgcacacggcaatgactatgccgtatgggagaaaatatgagcaaaattgccgaaggagctctacaattttttccctatgtgtacgtgatacatattggtccgagctcatgttgtccacatagtatttatttagtacttcatccatgtaaaagtgaggacgaggggcatccattgtattctcaataaataataaccg

SEQ ID NO: 3699 - DNA, 641 bp, Triticum aestivum
  N_region (30)..(30): n = any nucleotide
  N_region (64)..(64): n = any nucleotide
cacgttcgatttcaccaccaaagggcatcntgaacgtggccgtggagggcgagctgttggccgntgcgcggcaccgacggcaaggcgccaggcatgatcgggtggtggcccgccaaggcggtgacctttgtggacaaccacgacaccggctccacgcagcacatgtggcccttcccgtctgacatggtcatgcagggatatgcctacatcctcacgcatccaggcaccccatgcatcttctacgatcatttcttcgactggggcctgaaggacgagatcgatcgcctggtgtcaatcaggacccgacatgggatacacagtgaaagcaagctgcaaatcatagaggccgacgccgatctttatctcgccgagatcgatggcaaggtcatcgtcaagctcgggccaagatacaatgtgggacacctcattccgggaggcttcaaggtggccgcacacggcaatgactatgccgtatgggagaaaatatgagcaaaattgccgaaggagctctacaattttttctctatgtgtacgtgatacatattggtccgagctcacgttgtccacatagtacgattagtacttcctccatgtaaaagtgaggatgagggacatccattgtatttttgctaaaataataa

SEQ ID NO: 3700 - DNA, 671 bp, Triticum aestivum
caaggtgggcggctccggccccggcaccacgttcgacttcaccaccaagggcatcctcaacgtggccgtggagggcgagctctggcggctgcgcggcaccgacggcaaggcgccaggcatgatcgggtggtggccagccaaggcggtgaccttcgtggacaaccatgacaccggctccacgcagcacatgtggcccttcccttctgacagggtcatgcagggatacgcctacatcctcacgcaccctgggaccccatgcatcttctacgatcatttcttcgactggggcctgaaggaggagatcgatcgcctggtgtcaatcaggacccggcaggggatacacagtgagagcaagctgcaaatcatagaggctgacgccgacctttacctggctgagatcgacggcaaggtcatcgtcaagctcgggccaagatacgatgtcgggcacctcattccccaaggcttcaaggtggtcgcgcacggcaatgactatgccgtatgggagaaaatataagcaaaattatccaagcagctccacaattttttttcctatatatgaatgccacacctattagtccgagctcgtgttgtccacatagtacgattttagtacttcctccatgtaaaagtgaggatgagggacatccattgtatttttcataaataataat

SEQ ID NO: 3701 - DNA, 704 bp, Triticum aestivum
ccaggaccagcaccggcaggagctggtgaactgggtgaacaaggtgggcggctccggccccggcaccacgttcgacttcaccaccaaaggcatcctcaacgtggctgtggagggcgagctgtggcggctgcgcggcaccgacggcaaggcgccaggcatgatcgggtggtggccagccaaggcggtgaccttcgtggacaaccatgacaccggctccacgcagcacatgtggcccttcccttccgacaaggtcatgcagggatacgcctacatcctcacgcaccctgggaccccatgcatcttctacgatcatttcttcgactgggggctgaaggaggagatcgatcgcctggtgtcaatcaggacccggcaggggatacacagtgagagcaagctgcaaatcatagaggccgacgccgacctttacctggccgagatcgatggcaaggtcatcgtcaagctcgggccaagatacgatgtcgggcacctcattcctcaaggcttcaaggtggtcgcgcacggcaatgactatgccgtatgggagaaaatataagcaaaattatccgagctgctccacaatttttcttccctatatatgaatgtcacacctattagtccgagctcgtgttgtccacatagtacgattttagtacttcctccatgtaaaagtgaggatgagggacatccattgtatttttcataaa

SEQ ID NO: 3702 - DNA, 711 bp, Triticum aestivum
gtcgctggcgtacggcggggacggcaagccgaacctcaaccaggacccgcaccggcaggagctggtgaactgggtgaacaaggtgggcggctccggcccgggcaccacgttcgacttcaccaccaagggcatcctcaacgtcgccgtggagggcgagctgtggcggctgcgcggcaccgacggcaaggcgccgggcatgatcggatggtggccagccaaggcggtgaccttcgtcgacaaccacgacaccggctccacgcagcacatgtggcccttcccttctgacagggtcatgcagggatacgcctacatcctcacgcacccagggaccccatgcatcttctacgatcatttcttcgactggggcctgaaggaggagatcgatcgcctagtgtcaatcaggacccggcagggcatacacagtgagagcaagctgcaaatcatagaggctgacgccgacctttaccttgccgagatcgacggcaaggtcatcgtcaagctcgggccaagatacgatgtggggcacctcattcccggaggcttcaaggtggccgcacacggcaaagactatgccgtatgggagaaaatataagaaaattaccagagcaactctgcaaattagtcatgttgtccacatagtacgattttagtacttcctccatgtaaaagtgaggatgagggacatcaattgtatttttcataaatgagaat

SEQ ID NO: 3703 - DNA, 743 bp, Triticum aestivum
  N_region (709)..(709): n = any nucleotide
caaccaggaccgcaccggcaggagctggtgaactgggtgaacaatgtgggcggctccggcacgggcaccacgttcgacttcaccaccaagggcatcctcaacgtcgccgtggagggcgagctgtggcggctgcgcggcaccgacggcaaggcgccgggcatgatcgggtggtggccagccaaggcggtgaccttcgtcgacaaccatgacaccggctccacgcagcatatgtggcccttcccttccgacagtgtcatgcagggatacgcgtacatcctcacgcacccagggaccccgtgcatcttctacgatcatttcttcgactggggcatgaaggacgagatctatcgcctagtgtcaatcaggacccggcaggggatacacagtgagagcaagctacaaatcatggaggctgacgccgacctttaccttgccgagatcgacggcaagatcatcgtcaagctcgggccacgattcgatgtggggcacctcattcccggaggcttcaaggtggccgcacacggcaaagactatgccgtatgggagaaaatataagaaaattaccagagcagctctgcaaattagtcatgttgtccacatagtacgattttagtacttcctccatgtaaaagtgaggatgagggacgtccattgcatttttcataaataataatcaataagcgttttgctattcatggtttactcaatnttcgttgaccaaaagttgcatagagcatgaccgt

SEQ ID NO: 3704 - DNA, 722 bp, Triticum aestivum
acctgaaccaggaccagcaccggcaggagctggtgaactgggtggacaaggtcggcggcaaaggccccgctaccacgttcgacttcaccaccaagggcatcctgaacgtcgccgtggagggcgagctgtggcggctgcgcggcaccgacggcaaggcgccaggcatgatcgggtggtggccagccaaggcggtgaccttcgtggacaaccacgacaccggatccacgcagcacatgtggcccttcccttctgacagggtcatgcagggatatgcctacatcctcacgcacccagggaccccatgcatcttctacgatcatttcttcgattggggccttaaggaggagatcgatcgcctggtgtcaatcaggacccggcatgggatacacagtgagagcaagctgcaaatcatagaggccgacgccgacctttatctcgccgagatcgacggcaaggtcatcgtcaagctcgggccaagatacgatgtggggcacctcattccgggaggcttcaaggtgggcgcgcacggcaatgactatgccgtatgggagaaaatatgagcaaaattaccaaagcagctctacgagttttttacaatatgaatgacatacatattagtccgagctcacgttgtccacatagtacgatttagtacttcctccatgtaaaagtgaggatgagggacattcattgtatttttgataaaataataaacaataagg

SEQ ID NO: 3705 - DNA, 673 bp, Triticum aestivum
actgggtggacaaggttggcggcaaaggccccgctaccacctttgacttcaccaccaagggcatcctgaacgtcgccgtggagggcgagctgtggcggctgcgcggcaccgacggcaaggcgccaggcatgatcgggtggtggccagccaaggcggtgaccttcgtggacaaccacgacaccggctccacgcagcacatgtggcccttcccgtctgacagggtcatgcagggatatgcctacatcctgacgcacccagggaccccatgcatcttctacgatcatttcttcgactggggccttaaggaggagatcgatcgtctggtgtcaatcaggacccgacatgggatacacagtgagagcaagctgcaaatcatagaggctgactctgacctttatctcgctgagatcgacggcaaggtcatcgtcaagctcgggccaagatacgatgtgggacacctcattccgggaggcttcaaggtggccgcgcatggcaatgactatgcggtgtgggagaaaatatgagcaaaattaccagagcagctctacgagttttttacaatatgaatgacatacatattagtccgagctcatgttgtccacatagtacgatttagtacttcctccatgtaaaagtgaggatgagggacatccattgtatttttaataaaata

SEQ ID NO: 3706 - DNA, 807 bp, Triticum aestivum
cgggggcgaacgtgaacgccggcgtcgacccggggcgatcgagaagctgtacgaggacgtgccgccgatgccgctgatggcgctgaaccacatctcgcgcctctgcaagtccgtcgacgcctccgtccggttctacgtcaaggcgctcggcttcgtcctcatccaccgccctcccgcgctcgacttctccggcgcctggctgttcaactacggcatcgggatccatctcgtccagagagacgacgcgcgacgggccgccgacgtcaaccccggcaagctcgaccccatggacaaccacatatcgttccagtgcgaggacatgggcgcgatggagaagaggctgaaggagatggggatcaggtacatgaagaggaccatcaacgaggaggagggttcgccgatcgaccagctcttcttcaaggaccccgacggcttcatgatcgagatctgcaactgcgagaacctcgagctcgtccccgccggcgcgctcggccgcctcaggctcccccgcgaccgccacaacccgcctctccggatggacggcgccgacgagtagcaccaagccagacgtagcaaggggcctgcgcgcgcgtgcgtagctaagtaagttagctagtggtgtaacgaactgctgttacgttttaattctgggcagtactcccaggttcctctttactagtatgttgcgtcgtgtgtgtttcccaatcagctggtagctgcaccctgattttttgctggccagtgctcggtcccgcttcgcctactgtattatgctaagagagcttttatagtgctccggctaaaata

SEQ ID NO: 3707 - DNA, 537 bp, Triticum aestivum
gagatggcaactacattcgcggcaccaattctctgcaacttgagagcgaacccacgcctgaaccacagcaccagacaacagccacggcacttgcacctgagctcggcgagaatggcgccaacgctgacaggctcaagagcacggagcgacttccgcgcggcggccgtgtacaaggtgaagctgatcgggccggaggggaaggagagcgtgatcgaggtggcggaggacagctacatcctggacgcggcggaggaggccggcgtggagctgccctactcgtgccgcgccggcgcgtgctccacctgcgccggcaaggtcctggagggcggcgtggaccagtcggaccagtcattcctcgacgacgcgcaggtcagcgccggtacgcgctcacctgcgtcgcttaccccacctccgacctcgtcatccagacgcacaaggagtccgacctctactagcatgtagcagcagcactagtttcattcaatctttgacactctgtctgatctgatctgcctgcatatgtagtgtcacctgaat

SEQ ID NO: 3708 - DNA, 625 bp, Triticum aestivum
taaagtcgaacaacatcatcctctcgcgggactgaacgcgtgcgttttcggacttcggccttcgcagttcatggccacccctcacttcgacccgcggctcgtcgggtaccgcgcgccggaggtcctggaggccaagaagccgacgcaaaagtccgacgtgtacagcttcggcgtgctgctcctggagatgctgaccgggaaggcccccttgaggtcccccggccgcgacgactccatcgagcacctcccgaggtgggtgcagtccgtggtccgggaggagtggacgtcggaggtcttcgacgtcgacctgcagaggcaccccaacaccgaggacgagatggtgcagctgctccaagtcgccatggcgtgcgtcgccgttcatccggaccagcggccgaggatggagcaggtcgtcaggaggatcgaggagatccggagctccggctccgggacgacgacgaggacgtctcccgaggacaagccgagggaagagcacatccagatcacctgaggcgaagacaataggtctgatactgatagcgtccccgtctgcctgcaaactaagttgacggccgttttgtttactgataccattcttttactagcagtaagtaaatttgcttcc

SEQ ID NO: 3709 - DNA, 445 bp, Triticum aestivum
cgagaaccaacggtacagatgatgatgggaaggagagcgtgatcgaggtggcggaggacagctacatcctggacgcggcggaggaggccggcgtggagctgccctactcgtgccgcgccggcgcgtgctccacctgcgccggcaaggtcctggagggcggcgtggaccagtcggaccagtcgttcctggacgacgcgcaggtcggcgccggctacgcgctcacctgcgtcgcctaccccacctccgacctcgtcatcgagacgcacaaggagtccgacctctactagcatgtagcagcactagtttcgttcaatctttggcagtctgtctgatctgatccgcctgcatatgtaagctgtcgcctgaatcttagctaaattttattcttgcttcatcgccgtcgactttaaaccttggaggcaaaggttggcaccttttttttttt

SEQ ID NO: 3710 - DNA, 696 bp, Triticum aestivum
ccccttgcctcgctccggattgctagcgcggcggccgcacacttccttcccttccctaccagttaccagaccccaagcacccgagatggcaactacattcacggcaccaattctgtgcaacttgagagcgaacccacgcctgaaccacagcaccagacaacaacaggcggacttgcacctgagctcggcgagaatggcgcccacgctgacaggctcaagagcacggagcgacttgcgcgcggcggcggtgtacaaggtgaagctgatcgggccggaggggaaggagagcgtgatcgaggtggcggaggacagctacatcctggacgcggcggaggaggccggcgtggagctgccctactcgtgccgcgccggcgcgtgctccacctgcgccggcaaggtcctggagggcggcgtggaccagtcggaccagtccttcctggacgacgcgcaggtcggcgccggctacgcgctcacctgcgtcgcctaccccacctccgacctcatcatccagacgcacaaggagtccgacctctactagcagcactagtttcattcaatctttggcactgtgagtgtgatctgatccgcctgcataatgtagctgtcgcctgaatcttagctaaattttattctcacccccccttcatcgccgtcgacttttacctgagcaagtgcactttgtattttccaaaaaaa

SEQ ID NO: 3711 - DNA, 594 bp, Triticum aestivum
gtacgagttccagatgcagtacggctccatcgggtgttcggtcggggcgctgctcggctacgcgcagggcgccactgacaagcgtgtcatcgcttgcatcggcgacggcagcttccaggtgacggcgcaggacgtgtccaccatgctccgctgcgggcagaacagcatcatcttcctcatcaactacggcggctacaccatcgaggtcgagatccacgacgggccctacaacgtcatcaagaactggaactacaccggcctcatcgacgccatccacaacggcgagggcaactgctggaccgccaaggtgacctgcgaggaggagctgacggcggccatcgagacggcgacgggggacaagaaggactgcctgtgcttcatcgaggtggtggcgcacaaggacgacaccagcaaggagctcctcgagtggggatcaagggtctccgccgccaactccaggccacccaacccgcagtagacgacactagtagatcttgattttgatgatttgagcgaggcattttcgatttagagtccaacgtacgtttgattactagcatgcgtgcatgcatgcaagcttagcatactgtttag

SEQ ID NO: 3712 - DNA, 615 bp, Triticum aestivum
ccaccttcccctgcacacaacccaccaccggaatccccacccgccctctcgaagcagcagctagcgatggcccccaaggcggcggagaagaagccggcggcgaagaagcccgcggaggaggagccggcgacggagaaggccccggccgggaagaagcccaaggccgagaagcggctgccggcggccaagacggcggccaaggagggcgaaggcaagacgaggggccggaagaagggcggcaaggccaagaagggcgtggagacgtacaagatctacatcttcaaggtgctgaagcaggtgcacccggacgtcggcatctcctccaaggccatgtccatcatgaactccttcatcaacgacatcttcgagaagctcgccggcgaggccgccaagctcgcccgctacaacaagaagcccaccatcacctcccgggaggtccagacctccgtccgcctcgtcctccccggcgagctcgccaagcacgccgtctccgagggcaccaaggccgtcaccaagttcacctcctcgtagattctattctttgtagaaatgtagatggttctgttacttttagtggttgttgactctggttatctgcaaatcgttcaagtaata

SEQ ID NO: 3713 - DNA, 755 bp, Triticum aestivum
ggcgacgactcggcgcgcgcggcggttggttcggagccgacgagggccactcggggcacgcgaagggagcgcggcgccggcctccgccgtgggtgctcgcggcatcggcgaggacgacctcctcgaggggtttcgcagcccaggtaagccggaatcaaacagttcatcctcagacgaacttcccttgttgcaatggaatccaagttctttcggttcctgaagcttgtcggagttggtttcaaagcaaggacagagcatgaggccgtgagttgtttctgaaacttggctacagccacgaggtgcagttcaccgctccacccgccgtccgtgtcttctgcttcaaacccaacataatatgctgcactggcatcgacaagcacagggtgcaccatttcgcgggagccgtccgaagcagtaaacctccggaagtgtacaaggggaagggcatactgtacatcgatgaggtcataaagctgaagccggggaagaagcagcagaagaagtaacacatgggtgagcttccccatttgacttctagcctgttgttaagacgccgcgctgcatttgtggttccgcagatttcatgtggttttctctgtgccggattttggcaggccccggtaccaggctggacctagtaataatactctgtatgcgacgtatgtgaaacgtctgatgaatttgttgtatatgacttgcataccgtggggtggatcggcggattccaacttttttgttttgttttgagctggcta

SEQ ID NO: 3714 - DNA, 458 bp, Triticum aestivum
cacaaagacaagtcaacctcaccggagagaaaggagaagcgaagatgtcggggcgcggcaagggaggcaagggtctgggcaagggcggcgccaagcgccaccggaaggtgctgcgggacaacatccagggcatcaccaagccggcgatccggcgcctggcgcggcggggcggcgtgaagcgcatctcggggctcatctacgaggagacccgcggcgtgctcaagatcttcctcgagaacgtcatccgcgacgccgtcacctacaccgagcacgcccgccgcaagaccgtcaccgccatggacgtcgtctacgccctcaagcgccagggacgcaccctctacggattcgggggctaggctccggcgaggcgaatcgagctcgcaccacttgatcagatgttcagattagcagtagctaggcgttgttcagtgttaccggtgatcgatgtaatttatgat

SEQ ID NO: 3715 - DNA, 641 bp, Triticum aestivum
gatatgagcagccttgtgatccgtgcgtgcaggtacgagttccagatgcagtacggctccatcggctggtcggtcggggcgctgctcgggtacgcgcagggcgccacggacaagcgcgtcatcgcctgcatcggcgacggcagcttccaggtaacggcgcaggacgtgtccaccatgctccgctgcggccacaacagcatcatcttcctcatcaacaacggcggctacaccatcgaggtcgagatccacgacgggccctacaacgtcatcaagaattggaactacaccggcctcatcgacgccatccacaacggcgagggaaactgctggaccgccaaggtgacgtgcgaggaggagctgacggcggccatcgagacggcgaccagggacaagaaggactgcctgtgcttcatcgaggtggtggcgcaacaaggatgacaccagcaaggagctcctcgagtggggatccagggtctccgccgccaactccaggccacccaacccgcagtagacaccagtagcagatctagatttttgatgatttgagccaggcattttcgatttactagaatccgacgtacgtttgattttactagcatgcttgcatgcatgcaaacttcgaatatattagtatttctagg

SEQ ID NO: 3716 - DNA, 607 bp, Triticum aestivum
  N_region (42)..(42): n = any nucleotide
tattcagattgatcccaaaggacatgagaaagaagccaagcngaagattaagcgctacatgacgattatggattccatgacagcagcagagctcgacagtacaaacccgaagctgatgacagagtcgcgaatcatccggatcgctcgagggtctggcaggcaaatcagagacgtgacggacatgctggaagagtacaagaggctagccaagatgtggagcaagatgaaggggctaaagatgccgaagaacggaaagatgagtgacctgtcccagaaccttaacatccagcagatgaccaaggcgctcccgccgcaagtgctgaagcagatgggtggcatgggtggcctgcaggctcttatgaaacaaatgggcggcaaggacatgagcaaaatgctcggtggcatggggctgggcggtgattagcctggcaaatgtaggtagagtttcctctgggcataggtggtgtgcttgctgcgttgtggagtttgttatatttatatagatctcaaaagatttccatcctgacaaatatagtccccaactcctgacaaatttatttgaaatttctctgcaactaacatctaccaggtcatcaaatttacagct

SEQ ID NO: 3717 - DNA, 806 bp, Triticum aestivum
  N_region (754)..(754): n = any nucleotide
ccacttcgctagtttactgcagcgtggggagtggatctccggcgagcacgagacgagctccgatggcgagcggaggcggatacgcctgggccctcgcggcgggcctcaacgccgcgctcgccgccatctccgccaagttcttcgctcccatgttgctcaaatacggcatggtgatacttttcaacgtgacaatgtgggggtgctacgtgaacagcctcaaagctttgtcctccctccaggcaacagtcaccaacttcgctgccaacttcatctcgtcgggtcttgcagggtatttcctgtttcaggagcctctgccttccaagtggtttgcaggtgccagtgtgatcattcttggtgtgttcatcctcagcaaatcaagcattgaggagaaagtgaactctgattgattgggagttgctagccgtctgatagctgggacataaattttgcgagcttatacctctatttccagtgcgtgtttgctcgtcctgatacaatgttaaacatccgaaattaatgtgtacatttggtctcagctcatccactaacatgtacactagtatggtttgagatacacgacccagtttgtaatttgtactccatccgtccgaaaaaacttgtccctcaaatggatgtatgtagcaccaagttagtgctagatacatccattcgagggacaagcttgggacaagttttatcggacggagggagtaagtaagaagtgagcacatgatctaagagttgcttgctttcnttcacggatagggcattcaaactgttttagcattatcaatgatcttaggtat

SEQ ID NO: 3718 - DNA, 837 bp, Triticum aestivum
  N_region (522)..(552): n = any nucleotide
ccgcgcttctacctccaggacgcctcgctccggcagctgacgtgctcaccgccaacgcctccgccgcggcggcgtgctctccaccgtgctccaggtcaccgtcgcctcccgcaaccccaacgaccgcgtcggcgtctacctacgaccgcctcgacgtctacgcctcctacaagtaccagcagatcacgctggcctccgcgctcccgccggtgtaccagggccacggcgacgtcgaggtgtggtccccggtgctctccggcccgaacgtccccttcgcgccctacctcgccgacgcgctcgccaaggacgtccaggccaggtacctcatcctccaggtgaagatcgacggccgcgtccggtggaaggtgggcagctggatctccggccactaccacatcttcgtgacctgccccgccttcctcatcggcaccggcggcaacggcgcgcccggggccaacgggctcaggttccagaccgccacctactgccacgtcgaggtctagccgtccgtccgtacgtgcnnnnnnnnnnnnnnnnnnnnnnnnnnnnnnnctgctccgtcggcggcggcgaggtaggtttcttgcgggtggcgcgcgcgcgtgcgcgtagccaagaagatcatcaaggctgaaggccaagggggtggtacatggtggtaataagtgttagcgtcgaggggtataggtgtaaaaaggaaaagagaatttagtgttggttactcctactaaattgtgttttgctcgtttttaattgttggtaaggtatttattccacgtttaattgtcgatatatataaacctgttgttacgacggaattaaagtgaaatggttaat

SEQ ID NO: 3719 - DNA, 687 bp, Triticum aestivum
tccacgtgaaggaagggaggcctgtttgagttcctgtatgaaaggataaagaagaagggacatgctgtcgtcgtcgttgctgaaggcgctggtcaggaggtggattccccggactgatgaccagaagcgcgagcaggatgagtctggcaacatgctgttccttgatgttggcccctggctgaaatctgagctgggtagatggtggaagagagaacaccccactgagttgttcactgtgaagtatatcgatcctacctacatgattcgagcagtcccagcaaatgctactgataatctatattgtaccctgttggcgcattcagccatccatgggatcatggctgggttcactggcttcgtacctggcccgataaatgggaattacagctacataccactggaagatattgccgtggccaagaacccagtggatgtgaatgatcacaaatgggcatgggttagatcagtcacagaccagcctgatttcctaaagccctaagattaaggcccaagttctgcggtgccaggaagtagtaagttgatctacccctctctggatgacagtcaaaattattttcttttaatctaggtttccgttcttcaataaagcatcagtgagcgtgttctctggtttgtgtgtttgtgtgtatgtctgcaaagttgttgtaattctgttgtaagtatgat

SEQ ID NO: 3720 - DNA, 613 bp, Triticum aestivum
ccggccgccgagagcaaggtcgagaaggcggcggagaagaccccggcgggcaagaagcccaaggccgagaagcgggtgccggcgggcaagacggcggccaaggagggcggcgagggcaagacgaggggccggaagaagggcagcaaggccaagaagagcgtggagacgtacaagatctacatcttcaaggtgctgaagcaggtgcacccggacgtgggcatctcctccaaggccatgtccatcatgaactccttcatcaacgacatcttcgagaagctcgccggggagtcggccaagctggcgcgctacaacaagaagcccaccatcacctcccgggagatccagacctccgtccgcctcgtcctccccggcgagctcgccaagcacgccgtctccgagggcaccaaggccgtcaccaagttcacctcctcctagactgaatctctgattgcgtcgccttgttgttccaaatgtagtagttggctgctgctgactctgcttatctctctgcaagtagtggtagtggtggatgattgccaacgctctgttggctccttggttgttagaggtgaacttgttgcttttgcaaactgatatcagtatccagaaaacg

SEQ ID NO: 3721 - DNA, 798 bp, Triticum aestivum
agttccagagccggaagagctgaaaagcatttgctcggtacgatgtcgcaactgtcctaaagaagttctactcccttcaattagatgaccttgctgcccctcctggagtagaggtcatagatttttttgaggcatcatcatccccacttccttggatgtcggaggaagaactgggacagtatgccgagaagtttcagaagtctggcttcacaggacccctcaactactaccgcgccatggacacgaactggaagcttagtgcgccctggcatggtgcaaagatcatggtgcctgcgaagttcatcgggggtgagaaggacatcggtgtcgagtcctttggagtcaagcgctacatcgagagcgggggtttcaagtccaatgttcctgatcttgaggtttccatcattgaaggacaccatttcctccagcaagagcaggccgagagggtgaactctgagatactgtccttcctggacaagctttctggagaggaagcacataataagaacgaagttggcgaggaggtgggtaactaagaaccgagtaaaaactaaaaagatagtgtatgagcttgttttagattgtgaaagttgtcttttctaaactgaaatataagctggtggaccgacatactcaaataaatgtcagagataggcttcaataaagtgtactcctggttaacagaatacaaaggggaccttcgaaggtgaactcctttctaatgtggtactccctccgttcgaaaaaacttgtcccaagcttgtcccttaaatggatgtatctagcactaatttgatg

SEQ ID NO: 3722 - DNA, 700 bp, Triticum aestivum
cccacccgaagcggcagcccatggccccccaaggcagacaagaagccggccgccgagaacaaggtcgagaaggcggcggagaagacccccgcgggcaagaagcccaaggccgagaagcggctgccggcggggcaagacggcgtccaaggaggccggcggcgagggcaagacccggggccgcaagaagggcagcaaggccaagaagggcgtggagacgtacaagatctacatcttcaaggtgctgaagcaggtgcaccccgacatcggcatctcctccaaggccatgtccatcatgaactccttcatcaacgacatcttcgagaagctcgccggggagtcggccaagctcgcccgctacaacaagaagcccaccatcacctcccgggagatccagacctccgtccgcctcgtcctccccggggagctcgccaagcacgccgtctccgagggcaccaaggccgtcaccaagttcacctcctcctagactgaagatgcgccgcttgttgtgccagatgtggctgtctgatgtatctctgctgttgactctgcttacctgcaagtagaagtagtggtagtagttcgtgtggtagaagattgccaacgctttgttggcttcttggttgtgagaactgaacgtgttgcttttgcaaaatgaaatctatctagaaaatgttgcggttgtggtactactacatctatg

SEQ ID NO: 3723 - DNA, 600 bp, Triticum aestivum
  N_region (176)..(199): n = any nucleotide
gcaagtctcccacctcgcgcgttgcaaccttccccaatccgatctcttgtcgcctccgccgaagccgccatggcgcccaaggccgagaagaagcccgctgcggagaagaagccggtggagacagagaagaagcccaaggccgagaagcgcgtgcccggcaaggacggcggcgccgnnnnnnnnnnnnnnnnnnnnnnnngcgtcgagacctacaagatctacatcttcaaggtgctcaagcaggtccaccccgacatcggcatctcctccaaggccatgtccatcatgaactccttcatcaacgacatcttcgagaagctcgccggcgagtcggccaagctcgcgcgctacaacaagaagcccaccatcacctcccgggagatccagaccgccgtgcgcctcgtcctccccggcgagctcgccaagcacgccgtctccgagggcaccaaggccgtcaccaagttcacctcctcttagattaccgtcgcctgaatctcttattggctttgttccgaatgttcctatgtcgtcaatcatagggggttatattcccctttacagacagtgtaaaaatgagtcagatttgctaaactcaatgaa

SEQ ID NO: 3724 - DNA, 945 bp, Triticum aestivum
gcgacacaaactgcaaagcatgatgttatggattggacttctgcgagagggtggttgaatttgcctattggattaacattggaacatgagatatacaaggcagcagtatcccttaggagctacagtcaggtttcaaggataaacccgggaaaatctattccgcatgcagtccttagtggagcaagtggacttgctatcttgacagttgtaaaagctggtgcatttcttacatacaaacttggaactggcttagtagttgctcgtagatcagatggatcatggtctccaccctctgctatagcttcagctggattaggatggggagcacagcttggtggtgagttgatggatttcatcatagtgcttcatggccttgaagctgtgaaaaccttcagcagccgaatgcatttttcactcggtgcaggtttaagtgctgcagcaggacctgttggtagagtattagaagctgatgtgagagctggtaataaaggttctggagtttgctatacatatagtcacagcaaaggcgcatttatcggggtttctctagaagggaacattgttaccaccaggatggatgcccatctgcggttctacggcgacccgtatctgacgaccagtgatatacttatggggaatctggagcaaccaaatgctgctaaatttctgtacccagcgttggatgacctatactcgggtctggattgttagcacgaccaaaaaaaaaatcacatctgtacatatttgattttattccaactgtagctagttgtgttgattctcaaaatgcttctgtcagtttggcgggcagggtttgcttcagataaacagctgcaacctgttgccctaggatggaagtctgtaaagtcaatgtcttgctatgaatttgatcagcagaatgaaatacactataaacagtactgtatgtattttggagtaattttt

SEQ ID NO: 3725 - DNA, 483 bp, Triticum aestivum
ctcgaaccaaggagggatcgtcagccatgtccgggcgcggcaagggaggcaaggggctcggcaagggcggcgccaagcggcacaggaaggtgctgcgcgacaacatccagggcatcaccaagccggcgatccggcgcctggcgaggaggggcggcgtgaagcgcatctcggggctcatctacgaggagacccgcggcgtgctcaagatcttcctcgagaacgtcatccgcgacgccgtcacctacaccgagcacgcccgacgcaagaccgtcaccgccatggacgtcgtctacgcgctcaagcgccagggccgcaccctctacggcttcggcggctaggcttttcctcgcccccctcccctgcagatatcccaaagcttgatggaaccgcggcttgtttagctctctatttgctctgtagttcgaactgaatcgtggaacaagtgcttcgcatatgttgctggaaatcaacttgtctcagtga

SEQ ID NO: 3726 - DNA, 593 bp, Triticum aestivum
ggcggcccccgctcgaacttaacctccccacacgctcgaaccagcggcacccatggcacccaagcggcggagaagaagccggtggcggcggcggagaagaccccggccgggaagaagcccaaggcggagaagcgggcgccggcgtccaaggaggccggcggcgaggggaagacgaggggcaggaagaagggcagcaaggccaagaagggcgtggagacgtacaagatctacatcttcaaggtgctcaagcaggtgcaccccgacatcggcatctcctccaaggccatgtccatcatgaactccttcatcaacgacatcttcgagaagctcgccggggagtccgccaagctcgcccgctacaacaagaagcccaccatcacgtcccgggagatccagacctccgtccgcctcgtcctccccggcgagctcgccaagcacgccgtctcagagggcaccaaggccgtcaccaagttcacctcatcctaggcttcgtcgtcgtttcatgagttgatggcatcgtgtaggtagttggcagtatgatgttacaatctctgtaagaattgtgctgcttgcggccttgaagaaatagtaat

SEQ ID NO: 3727 - DNA, 566 bp, Triticum aestivum
  N_region (88)..(88): n = any nucleotide
cgcatccatgcccccaagcggagaagaaccgtgctggagaagctcgagaagacgacggcggcgaagaagaccaaggccgagaagcgcncgccggcgtccaaggagggcggcgagaagaagggcaagaagaagtccaagaagagcgtggagacttacaagatctacatcttcaaggtgctgaagcaggtgcacccggacatcggcatctcctccaaggccatgtccatcatgaactccttcatcaacgacatcttcgagaagctcgccggcgagtcggccaagctcgccaggtacaacaagaagcccactatcacgtccagggagatccagacctccgtccgcctcgtcctccccggcgagctcgccaagcacgccgtctctgagggtacaaaggccgtcaccaagttcacatccgcttagataccctgctcttgtgttttctctgaatgtgttgatttctcctggctgttgatgaatccattgttcgttgtagttagatgttcagagtgcatcatcttgtaatttgtgacgacacaaatgtttcaggatccggaggaaatagtaat

SEQ ID NO: 3728 - DNA, 667 bp, Triticum aestivum
gccgccaccacagctcctcctccatttgcatctcactcagctccaaggaagaagccgtcagccatgtccggccgcggcaagggagggaaggggctgggcaagggaggcgccaagcgccaccggaaggtgctgcgcgacaacatccagggcatcaccaagccggccatccgtcggctggcgcggcggggcggcgtgaagcgcatctcggggctcatctacgaggagacccgcggcgtgctcaagatcttcctcgagaacgtcatccgcgacgccgtcacctacaccgagcacgcccgccgcaagaccgtcaccgccatggacgtcgtctacgcgctcaagcgacaggggcgcaccctctacggcttcggcggctgatctgctgatgctgctccgtccagtatcgtccagctgctgttccatctgccggagtgcgcgtgttgttccgtcgttctgtgtagcagggtcagccatgaatacgaatgcaatgaaatcagagttcttgcggtgttaattatcttggatgcatctctcgacatgtttctgtaagcttgttaaattcttcccagcaagaaaagcttaggagataatgtactagctgaggtaaatattggaaattcacgaaccaatctctgagcaaacattacactaaacggctaaaggtgtgaat

SEQ ID NO: 3729 - DNA, 722 bp, Triticum aestivum
agtggatctccggcgagcgcgagacgagctccgatggcgagcggaggcggatacgctgggccctcgcggcgggcctcaacgccgcgctcgccgccatctccgccaagttcttcgctcccacgttgctgaaatacggcatggtgatacttttcaacgtgacaatgtgggggtgctacgtgaacagcctcaaagctttgtcgtccctccaggcaacggtcaccaacttcgccgccaacttcatctcgtcaggtcttgcagggtagtttcctgtttcaggagcctctgccttccgagtggtttgcaggtgccagtctgatcattcttggtgtgttcatcctcagcgaatcaagcattgaggagaaagtgaactctgattgattgggagttgctacaagtctgttagctggggcataaatttttgagcttatgccactatttccagtggatgtttgctcgtcctgatgcaatgctaaacatccgaaaataatgtgtgcatttggtctcagctcatccactatcatgtacactagtacggtttgagatccagcacccaatttgtaatttgtaggtaagtgagcacacgatgtaggagttgcttgctttgcttttttccacggggagggcatttcaaactgctgtagcattgtcggtggatctatattttgcatttctcttgttgtaattttgtgacatcacattaagctgatcacatactatgtgta

SEQ ID NO: 3730 - DNA, 770 bp, Triticum aestivum
cggcgaccacttcgctagtttgctgcagcgtggggagtggatctccggcgagagcaagactagctccgatggcgagccgaggcggatacgcctgggccctcgcggcgggcctcaacgccgcgctcgccgccatctccgccaagttcttcgcgcccatgttgctcaaatacggaatggtgatacttttcaacgtgacaatgtgggggtgctacgtgaacagcctcaaagctttgtcgtccctccaggcaacggtcaccaacttcgccgccaacttcatctcgtcaggtcttgcagggtatttcctgtttcaggaacctctgccttctaagtggtttgcaggtgccagtctgatcattcttggtgtgttcatcctcagcaaatcaagtattgaggagaaagtgaactctgattgattgggagttgctaccagtctgttagctgggacataaattttgcaagcttattcctatatttccagtggctgtgtgctcgtcctgatgcaattctaagtatccgaaaataatgtgtgcatttggtctcagctcatccactaacatgtacactagtacagtttaagatacaccacccaatttgtaacggtttaagatacaccacccaatttgtaatttgtaagtaagaagtgagcacatgatctaagagttgcttgctttggtttcaacgggagggcattcaaactgttgtagcattatcggtggatcttttttgttctttgcatttctcctgttgtaaatttgtgacatcacagttaa

SEQ ID NO: 3731 - DNA, 1221 bp, Triticum aestivum
gattaatttcctactcatggtcgtgcgatactctaccacaccaacttaattatatatacacagctagctatctcctcttcaacaccaacacatagcacaactagattactactagagttcagttcagaccttggatcacacgcgcaaacacaagctagtagtagagtactacaagatggccggaggcggagaagaagaggcgaagctgctgggcacgtgggcgagcccgttcgtcctgcgagcgcagcttgcgctcagcttcaagggcgtgagcttcgagaacgtcaacgaggacctctgcaacaagagcgacctcctcctgcgctccaaccccgtgcacaaggcggtgcccgtgctcatccacaacggcaggcccgtctgcgagtcgctggtcatcctgcagtacgtcgacgaggcctttggcgggacgcccctcctccccgccgacccctacgaccgcgccatcgcccgcttctgggccacctacgtcaacgacacgttcttcccgtcgtggaggccgctgttcaggcgacgacggcggagcagagagcggaggcgttcgagaacgtgctgcctcaggtggagacgctggagcgggctctcacggagtgctccaaggggaaggccttcttcggcggcgacgccgtcgggatcgtcgacctcgcgctcggaagcttcgtggtgtggatccgggcggtggacgaattgggcggcaccaacctgctggacgaggccagggtcccgggcctggcggcgtgggccgagcggttcatggccgtagacgccgtggaggaggtgatgcccgaggccgggaggatcatggagcactacaaagggtttctcgcgaaactggctgcacctgctggttctagctaattgcgatgctcgcctactttttcgtcagtgatatgtgagaaatatttaagctctgcttggaagtgtgcgtgttgaataaagagagcaaaatgtgttgtcagtgtgttcagatgtaattgtgttcaataaagagatctgtatagtggaacaattctagtgggtattaatctatcgtcttgatggttatgatttttttttatttttatgaaggggagcaggatggcatgatttataccccggtaatatcagtagaagcacgagtatcacgtatgatctaaccatgttaactgtaaactgatagtctcatcttcagataagcatcttttatactgatttataacagag

SEQ ID NO: 3732 - DNA, 782 bp, Triticum aestivum
gggacccgtccctgtccgccaccgcgcagttcacgctcgcctcccgcaacccccacgaccgcgtcggcgtcctctaccggcgcctcgacgtcttcgtcacctaccgcgacgagcccgtgaccgtgccggtgtctctgccgcccgcgtaccagggccaccgggacgtcaccatctggtcccccgtgctgtccggggagtccgtgcccgtggccgggttcgtcgccgacgccatgaagcaggacatcgccgccgggtacgtggcgctgcaggtcaaggtcgacggccgcgtccggtggaaggtcggcagctgggtctccggcagctaccacctcttcgtcagctgccctgcggtgcttgccgccggccccggcggtgtcccgcccggggctggtggccccacggcaccgccggccgcgccgtcgcgtcgctgaagttcacgcagcccacagggtgcaccgtcggcacgtgaaggaaattacgtactaacgtgcctacgtggaagaaattatgtactaagtagcggtttaattttctgcttatgtctcgtgtaacgggagaataaaatgtacttcaattttggaactaacgattgcatttgtatttctttgccgtcgcatcatgatctatctatgggccgttaagagcgggcatatataagttcttccgaatatttaaaatgtaaatggtgcagcatatataagttctcccgaatggtttagttttcgtgtcatgtctcatgtaacgtgagaataaaatttaattcatttttaaacctaacattg

SEQ ID NO: 3733 - DNA, 763 bp, Triticum aestivum
tgccaccaaggagggtctgaagctcgatgagagcgaggatgagaagaagaagcaggaggagctcaaggagaagttcgaggggctgtgcaaggtcatcaaggaggtgctgggcgacaaggtggagaaggtcatcgtctctgaccgtgttgtggactccccttgctgtctggtgactggcgagtatgggtggaccgccaacatggagaggatcatgaaggcccaggccttgagggactcgagcatggctggctacatgtcaagcaagaagaccatggagatcaaccctgagaacgccatcatggacgagctccgcaagcgcgccgacgccgacaagaacgacaagtcagtcaaggacctggtgatgctgctcttcgagacctccctgctcacctccggcttcagccttgaggaccccaacacctttggcaccaggatccaccgcatgctcaagcttggcctgagcattgacgaggacgatgaggcgcctgagaacgacaccgacatgccgcccctggaggacgacgctggtgagagcaagatggaggaggtcgactaagcgccaagtctgcctgtcgtcggatgttcatgccctgcaccgcctagttgtttttatctttagtgtcgacgttggatggttttggcacgtttagctgtatcggttttgtcttttggctggccaaacattaagcgcggctagctgtttgtggtactcgtggaacagttcgttattgttggttctattatatgttagctatatttctat

SEQ ID NO: 3734 - DNA, 737 bp, Triticum aestivum
ccttccaacgcgcggcacaagcgtccatgcgccccaagcggagaagaacccgcgcgaagaagcccgcgaaggaggaccgcgcaggagaaggccccggtcccgccgggaagaagcccaagccgagaagcggctgccgcggggaagaccgccgccggcaaggagggtggcgacaagaagggcaagaagaaggccaagaagagcgtggagacgtacaagatctacatcttcaaggtgctgaagcaggtgcaccccgacatcggcatctcctccaaggccatgtccatcatgaactccttcatcaacgacatcttcgagaagctcgccggcgaggccgccaagctggcgcgctacaacaagaagcccaccatcacgtcccgggagatccagacctccgtccgcctcgtcctgcccggcgagctcgccaagcacgccgtgtcagagggcaccaaggccgtcaccaagttcacctcctcctaggctcctgccttcttctctgcgagtccccctctttcctggttcctcgtggtgtgatgaattgatgttaccctgtagttagattatgttccgactgtcatcctgtaagaaattgcgcactcagcactgttaattggatctgaagtaacactgttcagcactgttattccgtcggaaatatctgaagaaatgctatcgttgctgcttcagtctgattcgtacgtgtgtatgttcgcaatttaattcaggaagcactcgattat

SEQ ID NO: 3735 - DNA, 673 bp, Triticum aestivum
ccgtgcgcccgcctcggctcccacagaaaatccccaattccttcgtcttcctcttcgcggacgcacacagcagagcacacagcgagaagatgtccgggcgcggcaagggcggcaaggggctgggcaagggcggggcgaagcggcacaggaaggtgctgcgggacaacatccaggggatcaccaagccggcgatccggcggctggcgcggaggggcggcgtgaagcgcatctccgggctcatctatgaggagacccgcggcgtgctcaagatcttcctcgagaacgtcatccgcgacgccgtcacctacaccgagcacgcgcgccgcaagaccgtcactgccatggacgtcgtgtacgcgctcaagcgccagggccgcaccctgtacggcttcggcggttaggggatagctagcttcagtgtgtctaccaggtcgctgctccgcgaatgcttgtgcctgtggtttaatttaatgcttgttgtgaggaagtgctatctggatttgtttctctgttcaatatcgtcagtccagccattgcttctgatttgacaccgtttgagtttgtgaaattcttttcattcggtcctgcaaatctaacttggcaaatttgtcatctggatttgtttaccatttgcgttttttgcatctctagattgtaatatgaatttctgaaa

SEQ ID NO: 3736 - DNA, 742 bp, Triticum aestivum
atctccaagtcccaacaccttccggcggcgaacaacccacccacttttctccccctcccgaagcagcgatggcccccaaggcggagaagaaaccggcggcgaagaagcccgcagaggagagcccgcggcggagaaggccgagaaggccccggcggcgaagaagcccaaggccgagaagcggctgccggcgggcaagaccgcctccaaggaaggcggtgagaagaagggcaagaagaagagcaagaagagcgtcgagacctacaagatctacatcttcaaggtgctcaagcaggtgcaccccgacatcggcatctcctccaaggccatgtccatcatgaactccttcatcaacgacatcttcgagaagctcgccggggaggccgccaagctcgcccgctacaacaagaagcccaccatcacctcccgggagatccagacctccgtccgcctcgtcctccccggggaactcgccaagcacgccgtctctgagggcaccaaggccgtcaccaagttcacctcctcttagactgcgtcgcctgtatctagtagcaaatgtagttctatactgttggcttagtgcttgtccgtggactctggttatctgcaagtaatagtagtcctacttttggatgaaaattgccgaatcattgtaaatgctttgttggctcgtcggccacctgcaagaactgaattatgtccgcttcaattggcaaatgaagatttcggaaacgttgttggttct

SEQ ID NO: 3737 - DNA, 646 bp, Triticum aestivum
cggcggcgccgagaaagccgaagaaggggcggtctcatcgccgctgaacaccgacgacatcttcctcctcctggtgctactgctgggatcggggtctgctcgctcgtccacccaagcaagagctcgagctcgagcttttctgttgtcgctttgggatttcaccgctactccaaccccacattcgcttgccagcagctcgaagaggatcgtcggcgaccatgtccgggcgcggcaagggaggcaaggggctcggcaagggcggcgccaagcgccaccggaaggtgctgcgcgacaacatccagggcatcaccaagccggcgatccggaggctcgctcggaggggtggcgtgaagcgcatctcggggctcatctacgaggaaacccgcggcgtgctgaagatcttcctcgagaacgtcatccgcgacgccgtcacctacaccgagcacgcccgccgcaagaccgtcaccgccatggacgtcgtctacgcgctcaagcgccagggccgcaccctctacggcttcggcggctaggcgcttcctcgcccctcccctgcagatcccaaaagcttgatgataccgcgacttgtgtggtttgctacttcctctgtagttccaagtgaatcgtgaaacaaactactcgcatctgg

SEQ ID NO: 3738 - DNA, 553 bp, Triticum aestivum
cttctctctcgccttcgaagcagccgccgcagcatccatggcccccaaggcagccgagaagaagccggtggagaagacccccgcggggaagaagcccaaggcggagaagaaggtgccggcgtccaaggagggcggggacaagaaggggaagaagaaggccaagaagagcgtggagacgtacaagatctacatcttcaaggtgctcaagcaggtgcaccccgacatcggcatctcctccaaggccatgtccatcatgaactccttcatcaacgacatctttgagaagctcgccggcgagtccgccaagctcgcgcggtacaacaagaagcccaccatcacgtcccgggagatccagacctccgtccgcctcgtcctccccggcgagctcgccaagcatgctgtctccgagggcaccaaggccgtcaccaagttcacctcatcctaggctcctcttgtgttgattcttgtgtttctttcctcttcctcgtctgatgaattctgtagctagctgtgtgtgttctgacagtgtcatcttgtaacaatggtgctgact

SEQ ID NO: 3739 - DNA, 606 bp, Triticum aestivum
  N_region (440)..(440): n = any nucleotide
  N_region (576)..(576): n = any nucleotide
caccacaccgccgcaacaaccaccaccagcaacacacacacacagagaagcgaagatgtctggccgcggcaagggagggaagggtctcggcaagggcggcgccaagcgccaccggaaggtgctccgcgacaacatccagggcatcaccaagccggccatccgtcgtctcgctcggaggggcggcgtgaagcgcatctcggggctcatctacgaggagacccgcggagtgctcaagatcttcctggagaacgtcatccgcgacgccgtcacctacaccgagcacgcccgccgcaagaccgtcaccgccatggacgtcgtctacgcgctcaagcgccaggggcgaaccctctacggcttcggcggctaggcctgcgcccgctgctccagtctccgtcgactctgactctgctagctgctgttctggtgctatgcgtttcgtntctgaatgcgtgcgtgcgtgcgttgctgttccatcggtctgtgtagttagtggatggcgatggatctgaatgcagtaagttcgtcagagtgcgtgtgttgttctatcggtctctgtagtcagttcctctgtggaangcgatggatatgaatgcaatgggattgttg

SEQ ID NO: 3740 - DNA, 845 bp, Triticum aestivum
ttgtaatgggcacaactggcggggatcagcagttactgtacaaatcagtgcaagattcaaataactatgcactaatatctccgcaaatgggcaaacaggttgttgcatttcttgctgcaatggaaacaatcgcggagcagtttcctggggccttttcaggctatcgtttggaggtactggaatcccatcaagcaggaaagctggatacatctggtacagctaaagctgtaattgcttgtttcgagaagttaggcgcggtctttgacatggaccggatggttaagatcagggatcctgagcaacagctttatatggtgggtgtccccgaagaacacattgaagggcatgcattccatctgtaccatctgacttctcccgatgacagcgtttcatttgagttccagcacaatgtttgtggccgttcaatctacgccgaagggtcagttgatgccgccgtatttctgtacaagaaggtacaatcaatggatcctaagagaatttacgacatgattgatgtcttgcaagaaggcgatatgtggtgaagttattgtttagctcttcatgcatccgagcgaaattttgaaacaatcttcttgtatcctcctaaatataagtcgttttagagatttcaacaagtgactacatacgagcaaaatgagtgaatctaaactctaaaatatgtctatacatccgtatattgtagttcatttgaaatgtctaaaaagacttgtatttagaaacggagggagtagtgagtagtggtctgaaacagtggagttttttcagggttgatgatatatgtactgaaccgcatgcacccgaatagtttactccagaaccttaaa

SEQ ID NO: 3741 - DNA, 864 bp, Triticum aestivum
cgagcagagtccttcccgagcgcggacagcggggtcttacgagcagcgcctccctctctagagcagccgctcccgctcagcaacgccgccgcccggatctacgccggcgaccattccataggcagggcatcaacactgtcaattgcagaggcttggagctgcttcggcatccagtagagcaaacaagaagtaaagtcggaaacaaatatttcatcctcggacggacttctcatctcgcaatggaacccaagttctttcggttcctgaagcttgttggagttggcttcaaagccaggacagagcgtgaagccgcgagttgtttttgaaactaggctacagccatgaggtgcagttcacggctccacctgccgtccgcgtcttctgcttcaagcccaacataatatgctgtactggcattgacaagcatagagtgcaccatttcgctggagctgtccgatgcagtaagcctccagaagtgtacaaggggaagggcatactgtacatcgacgaggtcataaagctgaagccggggaagaagcagcagaagaagtaacacatggtgggtaaacatccccattcgacttctagcttgttaagacgtcgcatcgcatttgtggtgccgcggatttcacgcggttttctcgtgccggattatgcctagccccagtaccgggatggatttcgtaataatactccgtatgctatgtgagttatctggtgagcatgtgctgtatgacgtgcataccgtgggggcggatcagcacattcaaacatttgtgtttttgttttgggctggctagatgcatgtaacctacttcaatagcctaatgtgtttgttgatgtcactactgtcttcatattgtg

SEQ ID NO: 3742 - DNA, 500 bp, Triticum aestivum
gcaacaagcaccaccagcaagccacacagagcagccaagcgaagctcgccggagagagaagcgaagatgtcgggccgcggcaagggagggaaggggctgggcaagggcggagccaagcgccaccggaaggtgctccgggacaacatccagggcatcaccaagccggccatccgtcgtctggctcgcaggggcggcgtgaagcgcatctcggggctcatctacgaggagacccgcggcgtgctcaagatcttcctggagaacgtcatccgcgacgccgtcacctacaccgagcacgcccgccgcaagaccgtcaccgccatggacgtcgtctacgccctcaagcgccagggccgcaccctctacggcttcggcggctaggccgcgcccgtccggtcgaatccgcctcgcgccgccagattcgtagctagccatcggttgttcagtgttcattgtcttcgctgtaatggaatggccgcatctcgctgctgtctgttgtttcg

SEQ ID NO: 3743 - DNA, 536 bp, Triticum aestivum
  N_region (16)..(17): n = any nucleotide
tacacaggccgattgnncagcaacgcacgcacgcacagcagccaagcgaagctcgccggagagggaagcgtcgaggatgtcgggccgcggcaagggagggaaggggctcggcaagggcggcgccaagcgccaccggaaggtgctgcgcgacaacatccagggcatcaccaagccggcgatccggcggctggcgcggaggggcggcgtgaagcgcatctcggggctcatctacgaggagacccgcggcgtgctcaagatcttcctggagaacgtcatccgcgacgccgtcacctacaccgagcacgcccgccgcaagaccgtcaccgccatggacgtcgtctacgcgctcaagcgccagggacgcaccctctacggattcggcggctaggccgcgccggtccagtcgaatccgcctcgcgccgccagattcgtatttagctagccatcggttgttcagtgttcatggtcttcggtgtaatggaatggccgcatctcgctgctgtctgttgtttcgatgtactactagcatggaatgg

SEQ ID NO: 3744 - DNA, 703 bp, Triticum aestivum
attccccactggttctcctacctaccagcgaaaccccacctccccgcacctccgaccttcgtagcggcagcagaatccatggcgcccaaggcggagaagaagccggcggcaaagaagcccgcggaggaggagcccgcggcggagaaggccccggcggcgaagaagcccaaggctgagaagcggctgccggcggggaagtccgccgctggcaaggacggcgacaagaagggcaagaagaaggcgaagaagagcgtggagacgtacaagatctacatcttcaaggtgctgaagcaggtgcacccggacatctgcatctcctccaaggccatgtccatcatgaactccttcatcaacgacatcttcgagaagctcgccggcgaggccgccaagctcgcccgctacaacaagaagcccaccatcacctcccgggagatccagacgtccgtccgcctcgtcctccctggcgagctcgccaagcacgccgtctccgagggcaccaaggccgtcaccaagttcacctcctcctaggctccggtcttcttctctgagagtttccctcttttctggttcctggcggtgtgtggtgaattgatgttaccctgtagttagattatgttccgactgtcatcctgtaagaaatcgtgcactgttaattggatctgaagtaaaactgttattccctcggaaatatctgaagaaatgc

SEQ ID NO: 3745 - DNA, 791 bp, Triticum aestivum
gcatcctaaccctagttcggcgacgactcggcgcgcggcggcggttggttcggagccgacgagggccactcggggcacgcgaagggagcgcagccgccggcctccgccgtggttgctcgcggcatcggcgaggacgatctcctcgagggtttcgcagcccaggtaacccggaatcaaacatttcatcctcagacaaacttcccttgttgctatggaatccaagttctttcagttcctgaagcttgtcggagttggtttcaaagcaaggacagagcaaggaggccgcgagttgtttctgaaactaggttacagccatgaggtgcagttcactgctccacccgccgtccgtgtcttctgcttcaaacccaacataatatgctgcactggcatcgacaagcatagagtgcaccatttcgccggagccgtgcgaagcagtaaacctccggaagtgtacaaggggaagggcatactgtacatcgacgaggtcataaagctgaagccggggaagaagcagcagaagaagtaacacatgggtgagcctccccatttgacttctagcctgttgttaaggcgccgcgacgcgtttgttgccgcagaattcatgtggttttctctgtgctgggctagtatggctagccccggtaccaggctggactttgtaataaatactccgtatgcgacgtatgtgaatcgtctgatgaacatgcatatcgttgggtgggggtggatcagcggattcacaaacatttttgttttgttttgagctggctggatgtgacgtatcttcaata

SEQ ID NO: 3746 - DNA, 959 bp, Triticum aestivum
atttgagggatcacttttcctcgtatggcaacatggtgaacatcagataatggtggatcacagcactgggcgttcaagaggttttggttttgtcacttttgaaagtgaggattctgtcgaaagggtcatatctgagggaagaatgcgtgatcttggtgggaagcaggttgaaataaagaaggctgaaccaaagaaacatggaggtgatcaccagtagccaccaccgttcctccgattccacaaccgctcgcagctcgagatcggcagccatgtccgggcgtggcaagggaggcaaggggctcggcaagggcggcgccaagcgccacaggaaggttctgcgcgacaacatccagggcatcaccaagccggcgatccggcggctggcgcggaggggcggcgtgaagcgcatctcagggctcatctacgaggagacccgcggcgtgctcaagatcttcctcgagaacgtcatccgcgacgccgtcacctacaccgagcacgcccgccgcaagaccgtcaccgccatggacgtcgtctacgcgctcaagcgccagggacgcaccctctacggcttcggcggctagggcctgcagattcgaaaagcttgatggaaccccgacttgtctagttcgctgtttcctgagtagctccaattgaatcgtggaacaaagttaatcgcatgtgtttgttggaaatcaaacttctctctgcaaataccgcgtttctgaatttgtttcgctgtttggtctctgccgggtcgatattgaggtggcgatgagttgatttgccataatttactaggagccccggattagccgtacttgtttgcagtataatttgaaatgttaaacaacgccgcagtgactgtacaattgtgtatgtcgattcagcaacatcatttgctctgcttctgtatctatctggcgattatacagctctgtgttttgtttgtctgtttgttt

SEQ ID NO: 3747 - DNA, 580 bp, Triticum aestivum
  N_region (21)..(21): n = any nucleotide
cccaatgaccgcgtcggcatnttctacaggcgcctcgacgtcttcgtcacctaccgcgacgagcccgtcaccgtgccgatctccctgccgcccatgtaccagggccaccgggacgtcaccatttggtcgcccgtgctgtccggggagtccgtgcccgtcgccggatacgtcgccgaggccatgaagcaggacatcgcctccgggtacgtgtcgctgcaggtcaagatcgacggccgcgtcaagtggaaggtcgggacctgggtctccggcagctaccacctcttcgtcagctgccccgccatgctcgccgccggccccggcggcatgccgctcggaggtggccccaatggcaccgggggcgccgtcgcgtcactgaaattcacgcagccgacagggtgcaccgtcggcacatgatagaatggaccgctcatacggccgcacgtccgtactgtaagtggaaggaactacgtagccggctagttcttctcttcgtgtctctaaacaatttctgtttgttgttagtaataaattgtctaaagctctcttaatttttgtatgtcacgtgtaatgggagaataaa

SEQ ID NO: 3748 - DNA, 543 bp, Triticum aestivum
acactcagaagcgaagatgtccggccgcggcaagggagggaagggcctcggcaagggcggcgccaagcgccaccggaaggtgctgcgcgacaacatccagggcatcaccaagccggcgatccgccgtcttgcccgcaggggcggcgtgaagcgcatctcggggctcatctacgaggagacccgcggcgtgctcaagatcttcctggagaacgtcatccgcgacgccgtcacctacaccgagcacgcccgccgcaagaccgtcaccgccatggacgtcgtctacgcgctcaagcgtcaggggcgcaccctctacggattcggcggctgacctgcgcccgctgctccaatctccaatctccatcgactctgactctgctagctgctgttctggtgctatggtttcgtttctgagtgcgtgcgttgttggtccatcggtctgtgtagttagtggaaggcgatggatctgaatgcagtcagttcgtcagagtgcgtctgttgatctatcggtctctgtagtcagttcctcagtggaaggcgatgaat

SEQ ID NO: 3749 - DNA, 659 bp, Triticum aestivum
cgccgtcgaagcacccatggcgcccaaggccgcagagaagaagccggtggagaagaccccggcgggcaagaagcccaaggcggagaagaaggtgccggcgtccaaggagggcggaggcgagaagaaggggaagaagaaggccaagaagagcgtggagacgtacaagatctacatcttcaaggtgctgaagcaggtgcacccggacatcggcatctcctccaaggccatgtccatcatgaactccttcatcaacgacatcttcgagaagctcgccggcgagtccgccaagctcgcgcggtacaacaagaagcccaccatcacgtcgagggagatccagacctccgttcgcctcgtcctccccggcgagcttgccaagcacgccgtctctgagggcaccaaggccgtcaccaagttcacctcctcctaggcgtcttccgatggcagcgttttgtgtgtagttagcagtgcgatggtacaatctctgtaggaattgtgctgcttgttggtctgaagaaatagtaatgtcgctgtctgaattattgctcaacgtgtgcttgtattattcagtttcggttggaaggttcttctgtacgccttgctacttctcatttttgtgcagtttgaatctggtactgtagttcggaaatctgcaggtacaa

SEQ ID NO: 3750 - DNA, 892 bp, Triticum aestivum
ttgcatgaaccaacaattccattacattcagacccatcgccttccacaaaggcacagactacacagaccgacagaacaccaactcacgcactcagaaacgaaaccgtagcacgagaacaggagcagcatccagcagagtcgactcgatggagcagcagcaggcgcaggtcagccgccgaagccgtagagggtgcgtccctgtcgcttgagcgcgtagacgacgtccatggcggtgacggtcttgcggcgggcgtgctcggtgtaggtgacggcgtcgcggatgacgttctcgaggaagatcttgagcacgcctcgggtctcctcgtagatgagccccgagatgcgcttcacgccgccacggcgagccagacgacggatcgccggcttggtgatgccctggatgttgtcccgcagcaccttccgatgacgcttcgcgccgcccttgccgaggcccttcccgcccttgccgcggccggacatggttgactgcttggagctgactgagatggaaacggatgaggagccacctattccattctcgtgtacttgcttttgtgatttttcattcctgaagaaatgggcgacatcaaggtgccaagactgttatgcgttctattactcatgccacttcttttagttccttgctcagaagccaagacctgcgaggtagctagcagtacctatcggaaaatagcatgcagggtggatccatgtgctaaagcctgccacaaggagggctttaccaaggggttatgttacatatacccaccatttatatttctttgtatctgcaaaaaagagtgttgaacaaagaaaacattgcaattcgcgtaggatgtgtgatgtaacaaataataaggttgggtagtatgatgaattaataatgagcaat

SEQ ID NO: 3751 - DNA, 1318 bp, Triticum aestivum
gaaaggcgcggctgctggtctctctagggttcgtcggcccggcgcgggggtgcggcgggggacccgtgcttctgcttccgcaccgagagtatggctggaaggcacaccattgttctcgtgcaaccatctccaaacaaagcgtccagaacttttatggacttcagttcactcaaccaagcactggatggtatctgtgcccgttatgaaaagaaaatcatggatatcaacccgatggccaggaacttcacttatgacatcaccgacctctacaatttcatcgatggcctagcggacatcagcgcgctagtgtatgatcatcaactccaagcttttttgccgtatgacaggcagtggataaaacagaagatgttccagcacctcaagaaccaggcacggcagtagccagccgctggttctgattaacaaaagcaagtgtacaaggtggtatgtctgttgtctgtagtttcagatggtgtgagagacctagggttcatgtgctaattgtaagagaagatgatcgatttgcttggctatctgccatttctgatgcgacaccgacacaccgtagtactccctccgttcctaaatacttgtctttctaggcatttcaacaagtgactacatacggagtaaaatgagtgaatctacactctaaaatatgtctacatacatccgtatgtgatattcatttgaaatgcctagaaagacaagtattttggaacggagggagtagtagtaatcaaacgtacgctggattctagtaaatcgaaaatgcctcgctcaaatcatcaaaatcgagatctagtataatgtctactgcgggttgggtggcctagagttggcggcggagaccctggatccccactcgaggagctccttgctggtgtcgtccttgtgcgccaccacctcgatgaagcacaggcagtccttcttctcctcggtcgctgtcgcgatggccgccgtcagctcctcctcgcacgtcaccttggcggtccagcagttgccctcgccgttgtggatggcgtcgatgaggccggtgtagttccagttcttgatgacgttgtatggcccgtcgtggatctcgacttcgatggtgtagccaccgttgttgatgaggaagatgatgctgttctggccgcagcggagcatggtggacacgtcctgcgccgtcacctggaagctgccgtcgccgatgcaggcgatgacgcgcttgtcggtggcgccctgcgcatagccgagcagcgccccgacggaccacccgatggagccgtactgcatctggaactcgtacccgcagccgtcggggagcttgagcttc

SEQ ID NO: 3752 - DNA, 518 bp, Triticum aestivum
tggaaatctcagcagcaaaaacacacacactcagaagccaatctcgccggagagggaagcgtcgaggatgtcgggccgcggcaagggagggaaggggctgggcaagggcggcgccaagcgccaccggaaggtgctgcgggacaacatccagggcatcaccaagccggccatccgccgtctggctcggcgtggcggcgtgaagcgcatctcggggctcatctacgaggagacccgtggcgtgctcaagatcttcctggagaacgtcatccgcgacgccgtcacctacacggagcacgcccgccgcaagaccgtcaccgccatggacgtcgtctacgccctcaagcgacagggccgcaccctctacggattcggcggctaggtcgcgccggtccagtcgagtccacaacgcgccgccatactcgtactactagctagccatggttgtcttcggtgtaatggaatggccgcatctcgctgctgtctgttgtttcgctgtattactagcccggaatggaaat

SEQ ID NO: 3753 - DNA, 544 bp, Triticum aestivum
ccgccgcaacaaccaccagcagcaacacacacacagcagcgaagatgtccggccgcggcaagggagggaaggggctgggcaagggcggcgccaagcgccaccggaaggtgctccgcgacaacatccagggcatcaccaagccggccatccggcggctggcgcgacggggcggcgtgaagcgcatctcggggctcatctacgaggagacccggggcgtgctcaagatcttcctggagaacgtcatccgcgacgccgtcacctacaccgagcacgcccgccgcaagaccgtcaccgccatggacgtcgtctacgcgctcaagcgccagggccgcactctctacggattcggcggctgacctgcgccctctgctccaatctccatcgactctgactctgctagctgctgctgctgttctggtgctgtggtttcgtttctgaattcagagtgcgtgcgttgttgttccgtcggtctgtgtagttagtggatggcgatggatctgaatgcagttagttcgtcagagtgcgtgtgttgtctgtggaagga

SEQ ID NO: 3754 - DNA, 720 bp, Triticum aestivum
cgtccgtcccactcccagcgaaacaccccgctccctctctcaagcagccgccatggcccccaagggcagacaagaagccggccgcggagagcaaggtggagaaggcggcggagaaggcccccgcgggcaagaagcccaaggccgagaagcggcttccggcgtccaaggaggccgccggcggcgagggcaagacgaggggccggaagaagggcagcaaggcgaagaagggcgtggagacgtacaagatctacatcttcaaggtgctgaagcaggtgcacccggacatcggcatctcctccaaggccatgtccatcatgaactccttcatcaacgacatcttcgagaagctcgccggggagtcggccaagctcgcccgctacaacaagaagcccaccatcacgtccagggagatccagacctccgtccgcctcgtcctccccggcgagctcgccaagcacgccgtctccgagggcaccaaggccgtcaccaagttcacctcctcatagactgaagatgcgtccgtcgcctgtagttggtctctgtatctgcacctgtactgtcgactctgcttgtctctctgcaagtagtgctggtagtctgctgggtgatcgccaacgctttgttggctaattaattggttgtaagaactgaagttgttgtgtttggcagactgatatatctatctagaactgaacttgtggtggtactatatctgtatca

SEQ ID NO: 3755 - DNA, 769 bp, Triticum aestivum
accagtccatagaactggagttgaaatagggcatcaacactgtcaattgcagaggcttggagctgcttcggcatccagtagagcaacaagaaggtaaagtcggaaacaaatatttcatccttggaaggacttctcatcttgcaatggaagccaagttctttcggtttctgaagcttgttggagttggcttcaaagcaaggaccgagcgtgaaggccgcgagttgtttctgaaactgggctacagtcatgaggtgcagttcaccgctccacctgccgtccgcgtcttctgcttcaaacccaacataatatgctgtactggcattgacaagcatagagtgcaccattttgctggagctgtccgatgcagcaaacctccagaagtgtacaaagggaagggcatactgtacatcgacgaggtcataaagctgaaaccggggaagaagcagcagaagaagtaacacatgggtaacctccccatttgacttctagcttgtttagataccgcatcacatttgtggtgccgatttcatgtggttttctcgtgccggattgtggctagccccagtgccatgctggacttcgtaataatactctgtatgctatgtgaatcatctggtgagcatgtactgtatgacttgcataccttgggggcggatcagcacattcaaacatttgtgtttttgttttgggctggctagatgcatgtaacctactttcaatagcccagtgtgtttgttgatgtcactactttcttcatattttctctata

SEQ ID NO: 3756 - DNA, 563 bp, Triticum aestivum
ctcctcgacccccatcctctcgcggcgtcgaaccaagaagagatcttcagccatgtcggggcgcggcaagggaggcaaggggctcggcaagggcggcgccaagcgccacaggaaggtgctgcgcgacaacatccagggcatcaccaagcccgccatccggcgcctggcgaggaggggcggcgtgaagcgcatctccggcctcatctacgaggagacccgcggcgtgctcaagatcttcctcgagaacgtcatccgcgacgccgtcacctacaccgagcacgcccgccgcaagactgtcaccgccatggacgtcgtctacgccctcaagcgccagggtcgcaccctctacggcttcggcggctaggctcttccttgcccccttgcagatcccaaaagtttgatgataccgcgacttgtgtagttctctacttcctctgtagttcgctatttcctctgtatttcgaactgaatcgtggagcaaacctattcgcagtttgttagaattcaaacttgtctaagtgagataccgtgcctctgattttgtcctgctgcatctctgttaa

SEQ ID NO: 3757 - DNA, 687 bp, Triticum aestivum
ccaccgccgtccctcagattccactacatccgctcgcagcttgagatcgtcagccatgtccgggcgcggcaagggcgggaagggactcggcaaggggggcgccaagcgccaccggaaggtgctgcgggacaacatccagggcatcaccaagccggcgatccggcggctggcgcggaggggtggcgtgaagcgcatctcggggctcatctacgaggagacccgcggcgtgctcaagatcttcctcgagaacgtcatccgcgacgccgtcacctacaccgagcacgcccgccgcaagaccgtcaccgccatggacgtcgtctacgcgctcaagcgccagggccgcaccctctacggcttcggcggctaggtccggccgactgtcgcctgtcttcgtcgcagcctgcagattccaaaagcttgatggaaccctgacttgttcagttcgctatttcctctgtctgtagttcgttggaaatgaaacttgtctctgtcagtctgtcgtaaatctgattttgttcgctggttggtcttctgcatctctgttcggtacgattgtggtctcctttgtacacaacacccaaaacaaaaaaagacaaacgaagataaaacaggggggcgagacacaagaggaccaacacacaagcggacgcgcaggaaaagaccagagaggcacagatataccgccgg

SEQ ID NO: 3758 - DNA, 602 bp, Triticum aestivum
gcaccacacctctccccgtccaagtagcagcaaccaacggcatccatggcccccaaggcggagaagaagccggtggcggagaaggccgagaagaccacggcggggaagaagaccaaggccgagaagcggccaccagcgtccaaggagggcggcgagaagaaggggaataagaagaacaagaagagcgtggagacgtacaagatctacatcttcaaggtgctgaagcaggtgcaccccgacatcggcatctcctccaaggccatgtccatcatgaactccttcatcaacgacatcttcgagaagctcgccggcgagtccgccaagctggcgcgctacaacaagaagcccaccatcacgtccagggagatccagacctccgtccgcctcgtcctccccggcgagctcgccaagcacgccgtctctgaggggaccaaggccgtcaccaagttcacctcctcttagatagcctgctcttgtgtcttctctgaatgtgttgacttctcgtggctgtttgatgaatccattgtactctgtagttagatgttcagaacgcaccattttgtaatttgcgaggacacaaatgtttcaggatttggaggaaa

SEQ ID NO: 3759 - DNA, 507 bp, Triticum aestivum
caccgttcctccgattccacatctgctcgcagctcgaagaggatcgtcagccatgtccgggcgcggcaaaggaggcaagggactgggcaagggcggcgccaagcgccaccggaaggtgctgcgcgacaacatccagggcatcaccaagccggcgatccggcgcctggcgcggaggggcggcgtgaagcgcatctcggggctcatctacgaggagacccgcggcgtgctcaagatcttcctcgagaacgtcatccgcgacgccgtcacctacactgagcacgcccgccgcaagaccgtcaccgccatggacgtcgtctacgcgctcaagcgccagggccgtaccctctacggcttcggcggctaggtccggccgacggtcctcggtctttgtcgcttccggcagattccaagagcttgatgaaaccctgacttgtctagttcgttgtttcctctgtctatgtagttcgaactgaatcgtggaacaaagttaatcgcacatcatgttgg

SEQ ID NO: 3760 - DNA, 706 bp, Triticum aestivum
cgccccagtcatctcagctgagaaggcttaccatgagcagctctctgtcgctgagatcaccaacagcgccttcgagccatcctccatgatggccaagtgtgacccccgccacggcaagtacatggcctgctgtctcatgtaccgtggtgatgttgtgcccaaggatgtcaacgccgctgtggccaccatcaagacgaagcgcaccatccagtttgtggactggtgccccactggtttcaagtgtggtatcaactaccagccacccagcgtcgtcccaggcggtgaccttgccaaggtccagagggctgtctgcatgatctccaactccaccagcgttgtcgaggtcttctcccgcattgaccacaagttcgacctcatgtacgccaagcgtgcctttgtccactggtacgtgggtgagggcatggaggagggagagttctctgaggcccgtgaggatctcgctgccctggagaaggactatgaagaagttggcgctgagttcgacgagggtgaggatggtgatgagggtgatgagtactagagctgctgagttcaacgacctgatgtacgccaagcgttccttcgtgtgatctgcccgagtggctttatctgctgtctgtctgtttgaatgtttgctgtgtggtgtttggtttacaacctgtggtatgtttgaacctggcttcgcaccttggtcaatatgcatgtt

SEQ ID NO: 3761 - DNA, 548 bp, Triticum aestivum
caccactcccaacacagctcaatcccaccggagagacaggcagaagcagctgcggcggcggagatgtcgggccgcggcaagggcggcaaggggctggggaagggcggcgccaagcgccaccggaaggtgctccgcgacaacattcagggcatcacgaagccggcgatccggcggctggcgcggcggggcggcgtgaagcgcatctcggggctcatctacgaggagacccgcggcgtgctcaagatcttcctcgagaacgtcatccgcgacgccgtcacctacaccgagcacgcccgccgcaagaccgtcaccgccatggacgtcgtctacgcgctcaagcgccagggccgcaccctctacggcttcggcggctaggccaccaacgccgggctgctccagccagcaacgagataaattatttctataaggctagtagtatttgtctatggttcgtggtctcttcggtgttgtttgctctgctctgttcctgcttgatgttgggatcgatgtactagtaccaagactgaatgaaaatcgaatttggaaat

SEQ ID NO: 3762 - DNA, 1196 bp, Triticum aestivum
  N_region (96)..(119): n = any nucleotide
agcaacactgcaacaagaggcacagaaggagagaaggcgaagcttgagctgagttaggatgggtttgctgctgctgcttcacgtcctgctcgtcgnnnnnnnnnnnnnnnnnnnnnnnncgcaggcgtggggcaaggagggccactacatgacctgcaagatcgccgacggtttcctgacgagcgaggcgttgacgggggtgaaggcgctcctgccgtcgtgggccaacggcgagctcgcggaggtgtgctcgtgggcggacagccagcgcttccgctaccggtggtcgagccccctccacttcgccgacacccccggcgactgcgagttcagctacgccagggactgccacgacaccaaggggaacaagaacgtgtgcgtggtcggggccatcaacaactacaccggcgcgctccaagactcgtccagcccatttgacccgacggagagcctgatgttcctggcgcacttcgtgggcgatgtgcaccagccgctgcactgcggccacgtcgacgacctcggcggcaacaccatcaaactccgctggtacaggaggaagagcaacctgcacaaggtgtgggattcggacgtgatcacagaggccatgaaggacttcttcaacaaagaccaggacgccatgatcgagtccatccagcgcaacatcaccgacgactggtccagcgaggagaagcagtgggaggcgtgccgcagcaaaaccacgacctgcgctgagaagtacgcccaggagagcgcgttgctggcatgcgacgcgtacgagggcgtcgagcaggacgacaccctaggagacgagtactacttcaaggcgctgccggtcgttcagaagaggctcgcccagggaggcgtgaggctggcggcgatcctcaaccggattttcagcgggaacggcaggctgcagagcatctgatcgatacaatttgctcgaaaataaagaagaataagaagattttcctgtctgaccacattatagcttcaccaaaatcactgaattcacgattatatttgttatccacccaccaaggcggcttagagtcgttgtatctgttaactccattgtatcctccacctcggagcggcttagagtttctgcagcgaatcattgtatccgtatgtgtgtgtactcatcttcatttcctctttacggtagcaatctactcccatgtgattgtgaccttttc

SEQ ID NO: 3763 - DNA, 590 bp, Triticum aestivum
ctccgagccaaacacctcctccctcactcccacctccgaagcttcagcggcagccatggcccccaaggcagacaagaagcccgcggccgagaacaaggtcgagaaggcggcggagaagacgccgcgggcaagaagcccaaggccgagaagcggctgccggcgggcaagacggcgtccaaggaggccggcggcgaggggaagacccgggccggaagaagggcagcaaggcgaagaagggcgtggagacgtacaagatctacatcttcaaggtgctgaagcaggtgcaccccgacatcggcatctcctccaaggccatgtccatcatgaactccttcatcaacgacatcttcgagaagctcgccggcgagtccgccaagctcgcccgctacaacaagaagcccaccatcacctcccgggagatccagacctccgtccgcctcgtcctccccggcgagctcgccaagcacgccgtctccgagggcaccaaggctgtcaccaagttcacctcctcctagattgactatgcgtcgcttgttgtgatagatgtagttggctgctgttagtcgctgactctgcttatgtatctgcaa

SEQ ID NO: 3764 - DNA, 944 bp, Triticum aestivum
ttttggctgctgcctgcattgtaaaaaagatcacatagctccgaagaatcccttcgtgacaagacgctttcagtatggtatacccgtccacctttcaggatgcatcactctgcgaagcgtttgatggaatttgagttagatgaagaacttgaggggttgagtgatgagctccttaaattattggttacatatggatctgatggaggctacttcattgagactgaagatggctcttctcctggttttgatgtcaaagtagatggtaggagcgaacatgatttccgggttgaagttggtggtgtgcaaacagacgtgacattagcattttattcaaaggacaatagcaaacatatacacatctggcatgggaagcatcaccatcattacaggcagacgatgagagctgagcatttacttgatgatagttctcaacctagccaggcttccgagggaagatcacatccaaaaggaagtgttttggcaccaatggctggtttggtcgttaaggttttgcttaaggatggggtacacgtggaaaatggtcagcctgtcatggttatcgaagcaatgaagatggagcatgttgtgaaggcgcctcgggcaggttatatagaaggactgaaggctaccgctggacaacaagtttttgactccagtgtccttttcactgtcaaggataagagcacaagctgatgaacccagaaattggagccacatatcagaattctagtggcggctccgcccttgggaaagaagaataagcaaacaagcagctggagatcattctgtgactaaataatgctaggtgatctctctagtatagctggagatcatatcttccggcacccatttcctgtatagcgtgtacatcaatgtcagtggcattgtgcgatgtaaaaaatcatgtgagtatgtaacgcaacttgcctgccttgcaatgtcca

SEQ ID NO: 3765 - DNA, 518 bp, Triticum aestivum
ggacgcgtggagcagccaccacctacctcacaaagaaagacaggtcaacctcacccaggagaagaagagagagaagcgagaagatgtcggggcgcggcaagggaggcaaggggctcggcaagggcggcgccaagcgccaccggaaggtcctccgcgacaacatccagggcatcaccaagccggcgatccggaggctggcgcgtcggggcggcgtgaagcgcatctcggggctcatctacgaggagacccgcggcgtgctcaagatcttcctcgagaacgtcatccgcgacgccgtcacctacaccgagcacgcccgccgcaagaccgtcaccgccatggacgtcgtctacgccctcaagcgccagggacgcaccctctacggtttcgggggctaggctccggcgaggcgaatccagcttgcaccacttgatcagattagcagtagctaggcgttgtcagtgttcatggtaattgatgtaatttatgatgtgtggtgcctgttcgctggaatggattaa

SEQ ID NO: 3766 - DNA, 872 bp, Triticum aestivum
aaaaaaacaaaaaaaacagagtccttcccgagcgcggacagcgggctcctaccagcagcgtctccctccgacctccctggagcagccgctcacgcccagtaacgtcgccgcccggatctacgccgtcgaccattccataggcaggcatcaacactgtcaattgcagaggcttggacctgcttcggcatccagtagagcaaacaagaaggtcaagccggaaacaaatatttcatcctcgttcggacttctcatctcgcaatggaagccaagttctttcggttcctgaagcttgttggagttggcttcaaagccaggacagagcgcgaaggccgcgagttgtttctgaaactgggctacagccatgaggtgcagttcaccgctccacctgccgtccgcgtcttctgcttcaagcccaacataatatgctgtactggcattgacaagcatagagtgcaccatttcgctggagctgtccgatgcagtaaacctccagaagtgtacaaggggaagggcatactgtacatcgacgaggtcataaagctgaagccggggaagaaacagcagaagaagtaacacatgggtaaacctccccatttgacttctagcttgtttagacgccccatcacatttgtggtgccgcggatttcatgtggtttttctcgtgccgggttttggctagccctagtaccatgctggacttcgtaataatactctgtatgctatgggaatcatctggtgagcatgtactgtatgacttgcataccgtgggggcggatcagcacatttgaacatttgtgtttttgttttgggctggctagatgcatgtaaacagcccaatgtgtttgttgatgtcactactttcttcatattct

SEQ ID NO: 3767 - DNA, 673 bp, Triticum aestivum
  N_region (4)..(4): n = any nucleotide
cccnacacacacaccacagcacctctccccgccgaagcgtccgcatccgcatccatggccccgaaggcagccgagaagaagccggtggagaagaccccggcgggcaagaagcccaaggcggagaagaaggtgccggcgtccaaggagggcggggacaagaagggcaagaagaaggccaagaagagcgtggagacctacaagatctacatcttcaaggtgctgaagcaggtgcacccggacatcggcatctcctccaaggccatgtccatcatgaactccttcatcaacgacatcttcgagaagctggccggcgagtccgccaagctggcgcgctacaacaagaagcccaccatcacgtcccgggagatccagacctccgtccgcctcgtcctccccggcgagctcgccaagcacgccgtctccgagggcaccaaggccgtcaccaagttcacctccgcctgattccgccgtccacgtgtcttctttgatgtatccatcgatcgatgttgttgctctgtagtagttagctgctcgtgctctgtcgtgttgtaacttgtgctggttgtgtgggatcacatttcatgatccggagaaatagtaacagtgcttatttcagttcttgccatgatcctgtgtgggctactttggtcttggttcgatttgttgtgcgagc

SEQ ID NO: 3768 - DNA, 700 bp, Triticum aestivum
cagcctcgggacccgtccctgtccgccaccgctcaggtcacgcctcgcctcccgcaaccccaacgaccgcgtcggcgtgctctaccggcgcctcgacgtcttcgtcacctaccgcgacgagcccgtggccgtgccggtgtccttgccgcccgcgtaccagggccaccgggacgtcaccatctggtcccccgtgctgtccggtgagtccgtgccggtggccgggttcgtcgccgacgccatgaagcaggacatcgccgccgggtacgtggcgctgcaggtcaaggtcgacggccgcgtccggtggaaggtcggcagctgggtctccggcagctaccacctcttcgtcagctgccctgccgtgcttgccgccggccccggcggtgtcccgcccggcgctggtggccccaacggcaccgccggccgagccgtcgcgtcgctgaagttcacgcagcccacagggtgcaccgtcggcacctgaaggaaattacgtactaagtagcggtttaattttatgcttatgtctcgtgtagtcgtgtaacggggagaataaaatgtacttcaattttggcattaacaattgcaatttgtatttctttgccgtcgcatcatttgatctatctatgtgtcgttaagaacgggcatatataagttcttccgaacgtttaaaatgtaaatggtgcagcacatataaattctcccg

SEQ ID NO: 3769 - DNA, 814 bp, Triticum aestivum
cgacgcgtgggcgaacgcgtgggcggacgcgtgggcggacgcgtgggttcaagcgcatccacacacacacacaccacagaccacctctccccgcccaagcatccccatccgcatcctcatccatggcccccaaggcagccgagaagaagccggtggagaagaccccggcggggaagaagcccaaggcggagaagaaggtgccggcgtccaaggagggcggcggggacaagaagggcaagaagaaggccaagaagagcgtggagacgtacaagatctacatcttcaaggtgctgaagcaggtgcacccggacatcggcatctcctccaaggccatgtccatcatgaactccttcatcaacgacatcttcgagaagctggccggcgagtcggccaagctggcgcgctacaacaagaagcccaccatcacgtcccgcgagatccagacctccgtccgcctcgtcctccccggcgagctcgccaagcacgccgtctccgagggcaccaaggccgtcaccaagttcacctccgcctgattcggtcctgtccctgtgtgtgtcttcctggtggatggatcgatgtcgccctgtagtttcctgctcggactttgtcctcttgtaacttgtgctggctgtgtcttgtgtgggatcatatttcatgatctggagaaatagtagcggtgcttatttcagttcttgccatgatcctgttcgtgctactttgtcttggttcgatctgtggtgcaagctcgcttttctctgtaaatctctgtggacgacgactgtgaacttgcagagatgtttccctgtctcaattc

SEQ ID NO: 3770 - DNA, 1189 bp, Triticum aestivum
gacaaagcacgctcggccggcgaggcgagtgagagagtcaactcgaccatggagtccggcggtgcaggcgaggtgcggcactggaacgccgacgtcaacggcgtctccctccacgtcgccgagcagggccccgccgccggcccggcggtgctcctcctccacggcttcccggagctctggctctcctggcgccaccagatggccgctctcgccgcccgcggcttccgcgccctcgcccccgacctccgcggctacggcgactccgacgcccccgcggaccccgccgcctacaccatgctccacgtcgtcggcgacgtggtcgcgctcctcgaccacctccgcctccccaaggtggtggtggtgggtcacgactggggtgcgcaggtggcgtggcatttctgcctgttccggccggaccgggtgcgcgccgtcgtcgcgctggggatcccgttcttcccccgctcccctcgtccgatggcggagatgtccgcggcgcgcggcgacgggttctacatcacgcagttccaggagcctggaagagctgaaaaggcatttgctcggtacgacgtcgcgactgtcctaaagaagttctactcccttcaattagatgaccttgctgctcctcctggagtagagatcatagattttttcgaggcgtcatcatccccacttccttggatgaccgaggaagaactggggcagtatgccgagaagtttcagaagtctggcttcaccggacccctcaactactaccgcgccatggacacgaactggaggcttactgcgccctggcacggtgcaaagatcacggtgcctgcgaagttcatcgggggtgagaaggacgtcggtgtcgagtcctttggagtcaagcgctacatcgagagcgggggtttcaagtccaatgttccagaccttgaggtttccatcattgaaggccaccatttcctccagcaagagcaggccgagagggtgaactctgagatactgtccttcctggacaagctttctggcgaggaagcacataattaagaaccaagtctgcgaggaggcgcataactaagaaccgagtaaaagggtagtgtatgagctggttttagatgtgaaagttgtcttttctaaactgaaatataaagctggtggacctatccactcaaataaatgtcagagataggcttcaataaagtgcact

SEQ ID NO: 3771 - DNA, 744 bp, Triticum aestivum
cccaccttcccgtctcccgtgcccccaatccccaccgtagcccccaatccccacccatcttcccggagcagcgatggcccccaaggcggagaagaagccggcggcgtagaagcccgcggaggaggagcccgcggcggagaaggccgagaagacccctgccgggaagaagcccaaggccgagaagcggctgccggcgggcaagaagaccgcctccaaggagggcggcggcgagaagaggggccggaagaagggcaagaagagcgtggagacctacaagatctacatcttcaaggtgctgaagcaggtgcaccccgacatcggcatctcctccaaggccatgtccatcatgaactccttcatcaacgacatcttcgagaagctcgccggcgaggccgccaagctcgcccgctacaacaagaagcccaccatcacctcccgggagatccagacctctgtccgcctcgtcctccccggggagctcgccaagcacgccgtctccgagggcaccaaggccgtcaccaagttcacctcctcttagattccgttgcctgtatctagtaccagatgtggttgttcactctggttatcgccaagtagaagtagtgctagtgctggatgggagttgctgaatgcttacgcgatgcttcgttcgctgtaagaacagaattatgaaccttatggtgccgcttttgcaagctgagatttagcagcgttgcttatgatctgactgttgtttgcttttct

SEQ ID NO: 3772 - DNA, 671 bp, Triticum aestivum
cctccttcaatcctccagcgaaaccccgccccaccccaccgtcagcatccatggcgcccaaggccgagaagaagccggcggcgaagaagccagtggaggaggagcccgcggcggagaaggccgagaagaccccggccgggaagaagcccaaggccgagaagcggctgccggcgggcaagtcgtcggcggcggccaaggagggcggcaaggcgaagaagaaggccaagaagagcgtggagacgtacaagatctacatcttcaaggtgctgaagcaggtgcaccccgacatcggcatctcctccaaggccatgtccatcatgaactccttcatcaacgacatcttcgagaagctcgccggcgaggccgctaagctggcgaggtacaacaagaagcccaccatcacgtcccgggagatccagacctccgtccgcctcgtcctccccggcgagctcgccaagcacgccgtctccgagggcaccaaggctgtcaccaagttcacctcgtcctgagtctcgtagttagctgtttgggtgtgtttgtggccgtgttatcgtgtaagaatcgcatcgctatgtttctggatctcgagaaatagtaacggtgcctgcctcaatgttcagtacatgctcgtgttattttgttctggtcttcaattcttcatctctaatcaa

SEQ ID NO: 3773 - DNA, 927 bp, Triticum aestivum
  N_region (527)..(527): n = any nucleotide
  N_region (529)..(546): n = any nucleotide
cccgcaatcccccactctccgaaccggcgatggcccccaaggcggagaagaagccggcggcgaagaagcccgcggaggaggagccggtgacggagaaggccgccgagaaggccccggcggcgaagaagcccaaggccgagaagcggctgccggcgggcaagacggcgtccaaggaggccggcggcgaggcgaagacgaggggccggaagaagggcagcaaggcgaagaagggcgtggagacgtacaagatctacatcttcaaggtgctgaagcaggtgcaccccgacatcggcatctcttccaaggccatgtccatcatgaactccttcatcaacgacatcttcgagaagctcgccgccgaggccgccaagctcgcccgctacaacaagaagcccaccatcacctcccgggagatccagacctccgtccgcctcgtcctccccggggagctcgccaagcacgccgtctccgagggcaccaaggccgtcaccaagttcacctcctcctagattgcatctgcattgctngnnnnnnnnnnnnnnnnnngtagcgactgtagctggttctgttgctttagttggtgcttgccgactctggttatctggaactctcaagtgctcttattgctggatggggaattgattgatggatgactgccaatgctctgttgcctcttttggcaaactgatatatcaaaagcagtagttcatttcagcagcttctgattaccatctctgccacacgattgtgctttttgtaatgtaagtttttaggttgatgatgcgctcacagtaagttacatttatgcgttaggcacagaaccaactgtattgttgaacgtgttgggtttaactgagcacgcagagcttgactctggttatctgcaagtagttgtactactattgttactttgttagtgattgcttc

SEQ ID NO: 3774 - DNA, 516 bp, Triticum aestivum
ccaacacaagccaatcccaccggagagacaacagagaagcgaatcagcggcggcgaagatgtccgggaggggcaagggcggcaaggggctggggaagggcggcgccaagcgccaccggaaggtcctccgcgacaacatccaggggatcacgaagccggcgatccggcggctggcgcggcggggcggcgtgaagcgcatctcggggctcatctacgaggagacccgcggcgtgctcaagatcttcctcgagaacgtcatccgcgacgccgtcacctacaccgagcacgcccgccgcaagaccgtcaccgccatggacgtcgtctacgcgctcaagcgccagggccgaaccctctacggcttcggcggctaggccaccgacgccgggatcttcaagcaagcaaagagattagcagtatttgtctagggtacgtggtctcttcggtgttgtttgctctgctctgttcctgcttgatgtatcgggaccgatgtactagtaccaagactgaatgacatgga

SEQ ID NO: 3775 - DNA, 723 bp, Triticum aestivum
ttccccaccagttctcccaccgtccaccgtacccccacctcccctccgaagcggcggcggcagcagcgtccatggcgcccaaggcggagaagaagccggcggcgaagaagcccgcggaggaggagccggcggcggagaaggcccccgcggcgaagaagcccaaggccgagaagcggctgccggcggggaagacctccgccggcaaggagggcggcgagaagaagggcgggaagaagaaggccaagaagagcgtggagacgtacaagatctacatcttcaaggtgctgaagcaggtgcaccccgacatcggcatctcctccaaggccatgtccatcatgaactccttcatcaacgacatcttcgagaagctcgccggcgaggcggccaagcttgcccgctacaacaagaagcccaccatcacgtcccgggagatccagacctccgtccgcctcgtcctccccggcgagctcgccaagcacgccgtctccgagggcaccaaggccgtcaccaagttcacctcctcttaggctctttgtcaaatctcttctggcgtgtgatggatccatgttgacctgtagttagatcatgttccgtctgtcatcttgtaagaaaacgtgctctcggtactgttattcagacccgaagtaacaacactgttcaaccctgctgttccctcggaaatatctgaagaaatgctaagcttgccgcttcaatctgataaaa

SEQ ID NO: 3776 - DNA, 606 bp, Triticum aestivum
ccaccaccgttcctcccatcccacactcgctcgcagctcgagatcgtcggccatgtccgggcgcggcaagggaggcaagggcctaggcaagggcggcgccaagcgccaccggaaggtcctccgcgataacatccagggcatcaccaagccggcgatccggcggctggcgcggcggggcggcgtgaagcgcatctcggggctcatctacgaggagacccgcggcgtgctcaagatcttcctcgagaacgtcatccgcgatgccgtcacctacaccgagcacgcccgccgcaagaccgtcaccgccatggacgtcgtctacgcgctcaagcgccagggccgcaccctctacggcttcggcggctaagggccggccggccgacgggagtcactctttgtcgccgcctgcagattccagaagcctgatgaagccccgacttgtttagttcgctatttcctctgtagtttgaactcaatcgtggaacaaagttattcgcatatattgttggaaatgaagcttgtctgttgtctctgtgctgataccctgtttctgattttgtctcgctggttggtctctgttgggtacgatattgaggcggcgatcagttg

SEQ ID NO: 3777 - DNA, 720 bp, Triticum aestivum
  N_region (575)..(595): n = any nucleotide
agcgaaacacccccgctccctctcccacctccgaagcagcagcagccatggcccccaaggcagacaagaagccggccgccgagagcaaggtcgagaaggcggcggagaagaccccggcaggcaagaagcccaaggccgagaagcgggtgccggcgggcaagacggcggccaaggagggcgccggcggcgagggcaagactcggggccggaagaagggcagcaaggccaagaagggcgtggagacgtacaagatctacatcttcaaggtgctgaagcaggtgcacccggacgtgggcatctcctccaaggccatgtccatcatgaactccttcatcaacgacatcttcgagaagctcgccggggagtcggccaagctggcgaggtacaacaagaagcccaccatcacctcccgggagatccagacctccgtccgcctcgtcctccccggcgagctcgccaagcacgccgtctccgagggcaccaaggccgtcaccaagttcacctcctcctaggctgaatctgaatgcgtcgccttgttgtagttggctgctgttgactctgcttatctctctcannnnnnnnnnnnnnnnnnnnngcactagatgattgccaacgctttgttggatccttggttgttgcttttgcaagctgatatctatgtagaatgtggaagttgtggttgtgtatccgtatccacagtgatgatttgacagatgttgg

SEQ ID NO: 3778 - DNA, 694 bp, Triticum aestivum
cgaccgcctcgacgtctacgcctcctacaagtaccagcagatcacgctggcctccgcgctcccgccggtgtaccagggccacggcgacgtcgaggtgtggtcgccggtgctctccggcccgaacgtccccttcgcgccctacctcgccgacgcgctcgccaaggacgtccaggccgggtacctcatcctccaggtaaagatcgacggccgcgtccggtggaaggtgggcagctggatctccggccactaccacatcttcgcgacctgccccgccttcctcgtcggcgccggcggcaacggcgcgccgggggccagcgggctcaggttccagaccgccacctactgccacgtcgaggtctagccgccgaaccgtacgcgctctggcttgcttgctgtgcgtgcctgcttgcctcctctgctccgtcgacggcgacgaggtaggtttcttgcgggtggcgcgcgcgcgtgcgcgtcgccaagaaggatcgtcaaggctgaaggccagggggtggtacatggtggtaataagtgttagcgtcgaggggtatatgtgtaaaaaaggaaaagagaatttagtgttggttactcctactaaattgtgttttgctcatgtttaactgttggtgaggtatttattccgcgtttaattgtcaatatatataaacctgttgttacgatggaattaaagaaaatg

SEQ ID NO: 3779 - DNA, 473 bp, Triticum aestivum
ccaccgtgttcggaacgcatgggcgatcagcagggacccaaagcactgggatgacccggagaagttcaagccagagcgatttgagaccaccacgattgacttcaagggcacagactttgagtttcttccgtttggtgctgggcggaggatatgcccgggcatcacgtttgcgcaggccaatatggagattgtgctcgccacactgttgtaccactttgactggaaactccccggcaaggccatgcccggcgagctggatatggcggaggagatgggcatctcggtccgaaggaagaacgatcttcacctgtgtcctgttgttcgtgttaacccatgtgcccttgtgtagctgctttacttgtcacaccatgtagctaccagtctatgctatgtgatcatgtaagaagtcacccatttggactgtaaaaggaaccggtgtgattatgtatgaaaaaatgtccattaattaatga

SEQ ID NO: 3780 - DNA, 1150 bp, Triticum aestivum
cggagatcatcaaggtcggcgcggggttcagcctggacgacatgttcccgtcgtggaggctcgcgagcgccgtcggcggcatggcgcgccgcgcggagcttaaccaccgcaagacgtacgagctcatggactgcgtcttccggcagcaccggcagctgagagaggccgtagctgaaggcgccatcaacgaagaggaggaagaccttgtggacgtgctccttggatacagaaggaaggcggcctcgaggtgcctctcaccacgggaaacatcaaagccgtcatccttgacctcttcaacgccgggagcgagacgtcagcgaatacactccaatgggccatgtcagagctaatgaggaacccaatgcacaaggcacaagtcgagctgcggaatagcctccaagggaaatcaacggtgaccgaggatgacctggctggcctaaagtacctaaagctcgtcatcaaggaaaccctgaggctgcacacggtgttgccactgcttctcccgagggagtgccgggagacgtgcaatgtcatggggtacgacgtgcccaagggcaccaccgtgttcgtgaacgcatgggcgatcagcagggacccaaagcactgggatcacccggagaagttcaagccggagcgatttgagagcaccacggttgacttcaagggcaccgactttgagtttcttccgtttggtgctgggcggaggatatgcccgggcatcacgtttgcgcaggccaatatggagattgtgctcgccgcactattgtaccacttcgactggaaactccctggcaaggccatgcccggcgagctggatacggcggaggagatgggcatctcggtccgaaggaagaacgatctttacctgtgtccggttgtccgtgttaatccatgtgctcttgcatagctgctttacttatcgcaccagtagctaccggtctatgctatgcttatgtaagaagtcacccatttggactataaatggatgtaagcaaccggtgtgactatgtatgaaaaaatgtccattaatttggggacttaataaaggagtggaaagttggagctggagcaaatctccctttgttttctttttttctcaaccatgtttgtaaaaatgtccattaatgtagcgacttaataaaggagaaag

SEQ ID NO: 3781 - DNA, 697 bp, Triticum aestivum
gatgacttgctggcctgaagtacctaaagctcgtcatcaaggaaaccctgaggctgcacacggtgttgccactgcttctcccgagggagtgccgggagacgtgcaatgtcatggggtacgacgtgcccaagggcaccaccgtgttcgtcaacgcatgggcgatcagcagggacccgaagcactgggatgacccggagaagttcaagccggagcgatttgagagcaccacgattgacttcaagggcaccgacttcgagtttgttccgtttggtgccgggcggaggatatgcccgggcatcacgtttgcgcaggccaatatggagattgtggctcgctgcactgttgtaccacttcgactggaaactccctggcaaggccttgcgcagcgagctggatatggcggaggagatgggcatctcggtccgaaggaagaacgatctttacctgtgtcccgtggtccgtgttagcccatgtgctcttgtgtagccgctttacttgtcacaccatgtagctaccagtctatgctatgtgattatgtaagaagtcacccatttggactgtaaaaggaaccggtgtgactatgtatggaaaaatgtccattaatttggtgacttaaaggagtggaaagttggagctggagcaaatctccctttgttttcctttttttcaaccatgtttgtaaaaatgtccaaatcaa

SEQ ID NO: 3782 - DNA, 732 bp, Triticum aestivum
tgtgtgtgttctttgtgttgtgtaagacaaacccaaaagagagttgtgtcagataaaggcagagttgtgcgagacagctcaagaaggaagaagaggtgggcgctgcgagagggcggcgccaacactggggaggcacggcgtgcgcgtgaacgccatctcgccgcatggcatcgcgacgccgttcgggctgcgcgggctggcggagctgctcccggaggcgagcgaggaggagctgaggcggctggtggagtcgggcatgagcgagatgggtgggatggtgctggaggtggaagacatcgcgcgggcggccctgtacctggcgtccgacgaggcaacgtatgtcaacgggcacaacctcgttgtcgacggcgggtttaccgtggggaagctgattcacacgccggatccggtgaggagtgagtaacaggcatggcatggcatgacagtgataaagatgaggcctaggccaaaacttgattatccgtgaagaagatggtgtctcctgttgtgattgtattgatcacttgggcagctacttgaagtgttgtagcttctgcttggagaggcgacgcaatttgctcctcggataaacgaatactgatattgacttcttgatgttttccagccatctgtatgaaaattcctatgcatgtggtgttttgtgtatcaggtttccatgctgcatccgtaaagactttgcaatttgggccagtagcttgcattataacctgc

SEQ ID NO: 3783 - DNA, 710 bp, Triticum aestivum
ccgccggcttgacgttccggcacaaccacgcccgggtcaccgggaggatgagtttggagtccgtcgcatcgctcgacctgccgacttcgaccgcaccatggcagccaacgtccggtctgccgtcgccggcatcaagcacgcggcgcgggtgatggtgccgcgccggagcgggtgcatcatctgcaccgcgggcacggcgggggtgctcggaagcggcgtaaaccccgcgtactgcatctccaaggccgccgtgattggcgccgtccgggcgttggccggggagctggggaggcagggcgtgcgcgtgaacgccatatcgccgcacgccatcgcgacgccgttcgggctgcgcgggatggcagagctgctgccggagacgagcgaggaggagctgaggcggatggtggcgacggccatgaacgagatgggcgggagtgttctggaggtggaggacatcgcgcgggcggccgtgtacctggcgtccgacgaggccaagtatgtcaacgggcacaacctcgtcgtcgatggcgggtttaccgtggggaagctgattcacatgccggatccggtgagcagtgcgtgacaggcatggcaatgacagcgatggagatgacgcaacatgcactagttcccctagctacaagtattgtggtacagagggagtagtattgagatacccatcgtccacagcatgcgccataaataaggga

SEQ ID NO: 3784 - DNA, 859 bp, Triticum aestivum
cacgcgttgcgacgtgaccgacgaggcgcaggtcgccgcggcggtggacctcgccgtggcacgccacggcaagctggacatcatgctcaacaacgccggcatcgtgggctccctggcgcgtcctcggctgagcgatctcgacctcgccgacttcgacgccgtcatggcaatcaacgcccggggcgtcatggccggggtgaagcacgcggcccgcgtcatggcgccgcgccgcagcggcagcatcatctgcatggccagcgtcgccggcgtgctgggcagcgtgacgccgcacccgtacagcgtgtccaagacggcggtgctggggatcgtgcgcgccgtggctggggagatggcgcgctccggcgtgcgggtgaatgccatctcgccaaactacatcccgacgccgctggtgatgcgcatcctggagcagtggtacccgaaggccagcgccgaggagcaccggcggatcgtggagggggacatcaacgagatgaagggcgcggtgctggagccggacgacatcgcgagggcggcgctgtacctggcatccgacgaggccaagtatgtcaacggccacaacctcgtcgtggacggcgggttcacggtggggaaggcgcccaacatgccggcaccggcgctgtaaaacgaagcgagttcctgaaataaatttacttcctacagtactatatacatactactagtacgtagtattgtattgcgccggaagtagaatcaccgagcattacgtttttgtttcaggattgaaacaacgaattgtcctcgatgccgagtagtacgtgcacacgttgaccccatgcggaaatactccctagatgagagcagcccgattgtttttgtt

SEQ ID NO: 3785 - DNA, 1330 bp, Triticum aestivum
gtcgcacttcgccaagatccgcaaagatgatccgagcggtgcaggtcgtcaccaggtaacgccggggttggtttcggaagagaacgccgtgcatgtgcgtgctaatcttggtcttggtgtgtctgcgcgtttgtgttgcaggggggagagccgccgggctgcgctggcgtcggtggccggctacgtcagccaccgcggctactccacggcctcgagctcgcagaggctggccgggaaggtggccgtgatcaccggcggggccagcggcatcggcaaggcgacggccgcggagttcgtcaggaacggcgccaaggtcgtcctcgccgacgtccaggacgacctgggccgcgccctggcggccgacctcggcccggacgcggcatgctacacgcgctgcgacgtgaccgacgaggcgcaggtcgccgcggccgtggacctcgcgggggcccgccacggcaagttggacatcatgctcaataacgccggcatcgtgggctccctggcgcgtccccggctgagcgatctcgacctcgcggacttcgacgccgtcatggcgatcaacgcccggggcgtgattgccggggtgaagcacgcggcccgcgtcatggcgccgcgccgcagcggcagcatcatctgcatggccagcgtcgccggcgtgctgggcagcgtgacgccgcacccgtacagcgtgtccaaggcggcggtggtcgggatcgtgcgcgccgtggcgggggagatggcgcgctccggggtgcgcgtcaacgccgtctcgcccaactacatcccgacgccgctggtgatgcgcatcctggaggagtggtacccgaaggccagcgcggaggagcaccggcggatcgtggagggggacatcaacgagatggagggcgcggtgctggagccggacgacatcgcaagggcggcgctgtacctggcgtccgacgaggccaagtacgtcaacgggcacaacctcgtcgtcgacggcgggttcacggtggggaagccgcccaacatgccggcaccggcgctgtaaaacgaagcgagctcctgaaataaatttacttcctatatacgtactactagtacgtagtagtattgtattgcaccaccctcaaaaaaaagagtattgtattgcaccggaagtagaatcaccgagcattacatttttgtttcacgattgaaacaacgaattgtcctcgatgccgagtacatgcatacgttgaccccatgcggagtactagatgacagcagccggattgttgtatctttgtggctagacctgtgcgttcggtttattcggtttacatggttcggttatacgttttgtgtatgt

SEQ ID NO: 3786 - DNA, 527 bp, Triticum aestivum
tcatgctcaacaacgccggcatcgtgggctccctggcgcgtccccggctgagcgatctggacctcgccgacttcgacgccgtcatggcgatcaacgcccggggcgtgctggccggggtcaagcacgcggcccgcgtcatggcgccgcgccgcagcggcagcatcatctgcatggccagcgtcgccggcgtgctgggcagcgtgacgccgcacccgtacagcgtgtccaaggcggcggtgctggggatcgtgcgcgccgcggccggggagatggcgcgctccggcgtgcgcgtcaacgccgtctcgcccaactacatcccgacgccgctggtgatgcgcatcctggagcagtggtacccgaaggccagcgcggaggagcaccggcgtatcgtggagggggacatcaacgagatggagggcgcggtgctggagccggacgacatcgcgagggcggcgctgtacctggcgtccgacgaggccaagtacgtcaacggccacaacctcgtcgtcgacggcgggttcacggtg

SEQ ID NO: 3787 - DNA, 580 bp, Triticum aestivum
tcgcacttcgccaagatccgcaaagatgatccgagcggtgcaggtcgtcaccagggggagagccgccgggctgcgctggcgtcggtggccggctacgtcagccaccgcggctactccacggcctcgagctcgcagaggctggccgggaaggtggccgtgatcaccggcggggccagcggcatcggcaaggcgacggccgcggagttcgtcaggaacggcgccaaggtcgtcctcgccgacgtccaggacgacctgggccgcgccctggcggccgacctcggcccggacgcggcattctacacgcgctgcgacgtgaccgacgaggcgcaggtcgccgcggccgtggacctcgcggtggcccgccacggcaagttggacatcatgctcaataacgccggcatcgtgggctccctggcgcgtccccggctgagcgatctcgacctcgcggacttcgacgccgtcatggcgatcaacgcccggggcgtgattgccggggtgaagcacgcggcccgcgtcatggcgccgcgccgcagcggcagcatcatctgcatggccagcgtcgccggcgtgctgggcagcg

SEQ ID NO: 3788 - DNA, 568 bp, Triticum aestivum
cagcgtgtccaagcgccgtgctggggatcgtgcgcccccgccggggagatggcgcgctccggcgtgcgcgtcaacgccgtctcgcccactacatcccgacgccgctggtgatgcgcatcctggagcagtggtacccgaaggccagcgcggaggagcaccggcgtatcgtggagggggacatcaacgagatggagggcgcggtgctggagccggacgacatcgcgagggcggcgctgtacctggcgtccgacgaggccaagtacgtcaacggccacaacctcgtcgtcgacggcgggttcacggtggggaaggcgcccaacatgccggcaccggcgctgtgaaacgaagcgagctctttgaaataaatttacgtcgtgttgcattgcaccagaagtagaaccaccgagcattacgtttttgtttcagaattgaaacaacgaattgtcctcaatgtcgaggacgtgcatacgctgaccccatgcggaaatagatgagagcagcccggttgttgttatctttctggctactaaccggatccgtatgtggtgcttactacaccacatgaaga

SEQ ID NO: 3789 - DNA, 1300 bp, Triticum aestivum
agaagcccaaggagggggaggaggacaatgcccaatggactgacaagcccaaggagggggagggcgagggggagaagcccaaggaggaggaggcggctgcccccgccgcctgccgccgccgccggaggaggtcgtgatgcgcgtctacatgcactgcgagggctgcgccaggaaggtcaagaagatcctcaagagattcgatggggtagaggacgtcattgccgactccaaggcacacaaggtggttgtgaagggaaagaaggcggctgccgacccgatgaaggtggtggagcgcgttcagaagaagacgggccgcaaggtggagctcctctcgccgttaccgccgccgccggaggagaagaaggaagaggaaaagaaggaggaaccagagccgccgaaacctgaagagaaaaaggagccaacggtgatctccgtggtgctgaaggtgcacatgcactgcgaggcctgcgcccaggcgataaagaagaggatcgaaaagatgaaaggagtgcaatctgcagacccagacctgaaggcgtcggaagtgacggtgaagggcgtgtttgaggaggtcaagctggccgagtacgtgcacaagcgcaccggcaggcatgcggccattatcaagtccgagccggtcgccccggccgagaaagccggcgaaggcgacgccaaggatgagaagaaggcagccgaaggcggcgaagagaagaaagacgacaaggaggagaagaaggacgacaaggatggcgccccagaggaaaagaaagaggagaaagacaaggaggatggcggcgccggcggcgaggagaaggagaaggagaaagaccccggcgccatcgccgcagccaacctctacatgcactacccgcagttcgccttcccgggagggtactacccgccgaggccggggtacgccgcctaccctccgccgccggcctacccgccgtacccgccgcagatcttcagcgacgagaacccgaacgcctgctccgtcatgtaaaaaaggttagaaccttggtggtctagagtggaaaacaaataagaaggggagaagggactgcatgagttgaggggtgccatggcagcaaaaatgccgtcgagcaaagcaaatggcagcagcttgaagaaagtaccaggcttttttgcggtcaggttttccttttttttgaaccttttatgtttttaccgtctggtataaagtaagtctggacttccttgtcagttgatggatgttttcatcttatgtagatttttctttttgccttgtactgaacttatgtaaaaactgttattatag

SEQ ID NO: 3790 - DNA, 1354 bp, Triticum aestivum
caaaaaatcgttaaagatgttccccagagacgagttgagaaaagacttctgccagatgtataccccgaatgatatggagtcaccttgatgatattggtgcgttggagaatgtaaagggaaacattgaaggatttggtgatgctcccattcaaagccggaattgttctgcaaagggccagttaacgaagccttgcaagggaatattgctcttcgggcctcctggcactgggaaaactatgcttgctaaagcagtagcaactgaagcaggcgccaacttcatcaatatatcaatgtcaagcattacatcgaagtggtttggcgaaggggagaaatatgtgaaggctgttttttcattagcaagtaaaatatcccccagtgttatttttattgatgaggtcgatagtatgttaggaaggagagaaaatcctggggagcatgaagccatgcgcaagatgaaaaatgaatttatggtaaattgggacgggttgcgaacgaaagataaagaacgtgtactggttcttggtgccacaaatagaccttttgacctggacgaggctgtgattaggaggttcccccgcaggctaatggtaaatttacctgacgcatcaaatagagagaaaattttgaaagttattttagcaaaagaagagttgggacaagatactgatctggagtcacttgctaatatgactgatggatattcaggaagtgacctgaagaatctatgtgtaactgcagcgcactaccccattcgagaaatcctagagaaggaaaagaaggagaagaatgttgcaaagtcagaaggtaggcctgagcctgccttgcatggaagcgaggacatccgtcctcttagtttggatgacttcaaatctgcccatgagcaggtttgcgcgagcgtgtcatctgattcggcaaacatgaatgagcttgtccaatggaacgacctctacggcgaaggaggttcaaggaagaagaaagcactgagctacttcatgtgagagctctcacaagaatgtgccatattgtacagtcgctatactacccctccctcctcggcaggtgcatcttggcgacttgtccggcctaaaccagtcgggtttttcctgcctctccccttcaggagcagcggccgcctaccatcctgatcctcctccctcccgtgtaattaaaattgtgcaccgagtctgggttatttatcagcttctgtttgttcctattaacttcaaaaaagagaatcctccatcctcctctcttgatcacctgcctgtttgcagccattgtcgttgagcttggctgtaggccccttgtgtgcacctatgtacatgtttaatgaaagggcatggaataagaacct

SEQ ID NO: 3791 - DNA, 350 bp, Triticum aestivum
gaagattgccgccttcgttcccaatgatggttgcctgaacttcatcgaggagaatgacgaggtgctgatcgctggattcggtcgtaagggacatgctgtgggagatattcccggtgtccggttcaaggtcgtcaaggtgtcaggtgtttctctgcttgccctcttcaaagagaagaaggagaagcccaggtcttagattgccgttgcatggagtagacagtatgtcgggcctttagatgttgaaggaggatggtacctttgtgtttacagcacttttaagttgataacttatgatcgtgttggtgaaaactatgccttgtcacattttgctcctgttatgggaaagtgct

SEQ ID NO: 3792 - DNA, 635 bp, Triticum aestivum
caacaagaacagcttggattggagaagaacactctgtatgactacttgcttaatcctaagaagtacatccctggaaccaagatggtcttacctgggctgaagaagccacaggaccgtgctgatctcattgcgtacctgaagaaagccacctcctcttgaaagggcatgatgatgctgtgatcttgtcatggcgagtaaattcattttgcagtaaaataagaagatcgctgcctttgtgcccaatgatggttgcctgaacttcatcgaggaaaatgacgaggtactgattgctggattcggtcgtaagggtcatgccgtgggagatattcccggtgtcaggttcaaggttgtcaaggtatctggtgtgtcgcttctcgctctcttcaaggagaaaaaggagaagcccaggtcttagattgcatttttgttaggcaaggatggaatggactgtaaggctctggtcgtttgaggaggaaagttgcctgctatgtttacaatgtcctatataacctgaagttgtactagcgagatttgttccttctctgctgttgctttctcttaacagttgctattaagagtattgtttccatgatctggatatatattgttgcttttatctcatgtgctatgattgt

SEQ ID NO: 3793 - DNA, 432 bp, Triticum aestivum
gaagatcgctgcctttgtgcccaatgatggttgcctgaacttcatcgaggagaacgacgaggtgctgattgctggattcggtcgtaagggtcatgccgtgggagatattcccggtgtcaggttcaaggttgtcaaggtatctggtgtgtcgcttctcgctctcttcaaggagaagaaggagaagcccaggtcttaggttgcatttttgttaggcaaggatggaatggactgtaaggctctggtcgtttgaggaggaaagttgcctgctatgtttacaatgtcctatataacctgaagttgtactagcgagatttgttccttctctgctgttgctttctcttaacagttgctattaagagtattgtttccatgatctggatatatattgttgctgtgttactctgctggctagtgggttttatctcatgtgct

SEQ ID NO: 3794 - DNA, 712 bp, Triticum aestivum
gtgcgccggccagcctgctgatggctccaagcttttcgttgcggtcttgcctgggctactgatgatcattcgctgaaggaggcgtttcaaagctttggtgaggtcgttgaagcacgtgttatcactgacagggagactggaaggtctagagggtttggttttgtgagcttcgccagtggcgaggatgcaaagagtgctgcagaaaacatggacggcaaggagcttgctgggaggaacgtccgtgtgaactttgccaacgagcgaccttcgggtggtggcggcggtggcttctctcgtggcggcggtggctatggaggtggtggcggcggatacggcggcggtggctacggtggtggcggtggatacggcggcggccgtggtgctgctggaggtggctatggtggtgaccatgagtcctactaagaagagcactggctatcaaatttaaaataatgaagtttttaggacagtgtcttgattatgtggaacctaatgttacgtcgttctatgttctttttggttttggtttgtttcttgatagtgcaagagttaatttgtgtatgctgcttcgaggctcggatgagtctcaaggaagttcatgcattttgccgtatattgcactgtacttgtagagaatgatcgcgtatgttagtgtgatcataaattctcttcgcattacattcaaatatattgagatcttcgctagaaattt

SEQ ID NO: 3795 - DNA, 962 bp, Triticum aestivum
ctcccctcttaaaccccagcccccactccccattccccattcccccctcccccgccgtctcgtcccagctcgccctccagaggttttagtcttcctccatggcggccctcatcaagctcggaagccttcttaggcagagtgctgtggctagcagtgcctccaccggctcggctcctgccctgttcaacgctgcccgcttcatgtgcgccggccagcctgctgatggctccaagcttttcgtcggtggtctcgcctgggctactgatgatcattcgctgaaggaggcgtttcaatgctttggtgaggtcgttgaagctcgtgttatcactgacagagagactggaaggtctagagggtttggttttgtgagcttcgccagcggcgaggatgcaaagagtgctgcagaaaacatggacggcaaggagcttgcggggaggaacgtccgtgtgaacttcgccaacgagcgaccttcgggtggtggcggcggcggcggcttctctcgtggcggcggtggctatggaggtggtggcggcggctatggtggcggtggctttggtggtggcggcggatacggtggtggccgtggtggtgtggcggcggctatggtggtgaccgtgagtcctactaagaagagcactggctatcaaatttaaaataatgagtttttaggacagtgtcttgattatgtggaacctaatgttacgtctgtctgttatctgcgatagttgaactcaataggggcagagatgtggttctatgttatttttggttttgcttttttcttgatgatgcaagagttaatttgtgtatgctgcttcgaggcttggatgagtctcaaggaagtttcatgcattttgccgtatgttgcgctgtgtacttgtagagaatgattgcgtatgttagtgtgatcataaattctcttcgcattacattcaaatattaagatcttagctataaatttg

SEQ ID NO: 3796 - DNA, 508 bp, Triticum aestivum
gccaaaccagcgcgtgtcctggagatggttgcgtgcgccgaaggtataggtgtgccccgtggctccggaatgttcaggcgcgctctgcagtctgttgcattcctcagcaaggagaagatcgccaccagaatggactacttgaagaagacggttaggtggtcggatgcggaggttggcattgctgtgtccaagggtccatctgtgctcgtgacgtcaaaggacatgctgaagcgcaggtctgaattccttatctctgaggtggggttggagccggcgtacattgcccgccgcccatcattgctcaattatagcttggagggccggctcaggccccggtactatgttatgaagtttcttacggaaaacagattgctcaagcgtgccatgtgctactatacatttgtcaaggccaccgagatggaattcttggacaagttcatatgcccttacaaggaagctgcaccacaccttgctgaagactatgcagctgcttgcaaaggggaagtgc

SEQ ID NO: 3797 - DNA, 693 bp, Triticum aestivum
gtcgattgaggaccgttgaccaggatgactggtgcactatgctaagatgactgaagaatgtggagtggaagttcagattgttggtgatgaccttctagtcaccaacccaactagagttgcaaaggcaatccaggagaagtcatgcaatgctcttctgctcaaggttaaccaaattggatccgtcactgagagtatcgaggccgtgaagatgtcaaaacatgccggctggggtgtgatgaccagtcacaggagtggtgagaccgaggacacattcattgctgatttggctgttggtctgtccacgggtcagattaagaccggggctccgtgccgctcagagcgtcttgccaagtacaaccagcttctgaggatcgaggaggagctggcgcgatgaccgcggtgtagcgctggcctcaagttccgtgcaccggtggagccctaactagatgggatctgcacgagtttttgtgaaaatgggtgtgtttaacctccggaatgaactctggttgaagctcttaggattgagcaataatgaatgccgcgcatgttttatgtgaacggaacggatatgtacccccaaacttgctccaattttggtccttgtggatatgtacctgattccggccctgaacctattatggatgctcgtaatatctatgtttttggcgcatcatctattgccgattattctgt

SEQ ID NO: 3798 - DNA, 646 bp, Triticum aestivum
agctcttgaagactgcaattgaaaagctgaatacaccggcaaggttgtcatggaatggatgttctgcttcagagttctacaatgacaaggacaaacctatgacctcaacttcaaggaagagaacaacgatggttcccagaagatatctggagatagcctgaagaacgtatacaagtcattcgtgagcgagtaccccattgtgtcgattgaggacccgtttgaccaggatgactgggtgcactatgctaagatgactgaagaatgtggagtggaagttcagattgttggtgatgaccttctagtcaccaacccaactagagttgcaaaggcaatccaggagaagtcatgcaatgctcttctgctcaaggttaaccaaattggatccgtcactgagagtatcgaggacacattcattgctgattaagaccggggctccgtgccgctcagagcgtcttgccaagtacaaccagcttctgaggatcgaggaggagctgggcgatgccgcggtgtacgctggcctcaagttccgtgcaccggtggagccctactagatgggatctgcacgagtttttgtgaaaatgggtgtgtttaacctccggaatgaactctggttgaagctcttaggattgagcaataatgaatgccg

SEQ ID NO: 3799 - DNA, 768 bp, Triticum aestivum
gccgcccatggcagtgacgaacgccgtgtcatggcggagcgaggggattcggtacaagaagaatgaagtgttcttggatgtggttgagagtgttaacattcttgtcaatagcaacgggcagatcgtgagatctgacatcatcggcgcgctgaagatgcggacctttctgagtggaatgcccgagtgtaaacttgggttgaatgatagagttcttttggaagcgcaaggccgagcaactaaaggaaaagcaatagatctggatgatatcaaatttcatcagtgtgttcggttgaccagatttgagaatgataggactatatcattcgtccctccagatggagcttttgatctaatgacttacagactcaccacacaggtgaagcctctgatctgggtagaagcacaagttgagaagcattcaagaagccggatagagatcatggtgaaggcaaggagccagttcaaggaaagaagcaccggaacaaatgtagaaattgaagtacctgtaccctatgatgcgacaaacccaaatataaggacttcaatgggttctgcggcatatgcacctgagagagacgcaatggtctggaaaattaaatcatttcctggtggcaaggaatatatgtgtagagcagagtttagccttcccagcattacctcggaagaagcccactgaacaatctttaatttcctttctaccgaaaaaaacatggataaaaacatgaagagaggtcatggaaagtttttaattcaagtgtttgtaatttt

SEQ ID NO: 3800 - DNA, 1148 bp, Triticum aestivum
gaagaatgaagtgttcttggatgtggttgagagcgtcaacattcttgtcaatagcaatgggcagatcgtgaggtctgacatcatcggcgcgctgaagatgcggacctttctgagtggaatgcccgagtgtaaacttggtttgaatgatagagttcttttggaagctcaaggccgagcaactaaaggaaaagcaatagatctggatgatatcaaatttcaccagtgtgttcggttgaccagatttgagaatgataggactatatcattcgtccctccagatggagcttttgatctaatgacttacagactcaccacacaggtgaagcctctgatctgggtagaagcacaagttgagaagcattcaaggagccggatagagatcatggtgaaggcaaggagccagttcaaggaaagaagcaccggaacaaatgtagaaattgaagtacctgtgccctatgatgccacaaacccaaatataaggacttcaatgggttctgcggcatatgcgcctgagagagacgcaatggtctggaaaatcaaatcatttcctggtggcaaggaatatatgtgtagagcagaatttagtcttcccagcataacctcggaagaagcaacccctgaaaagaaagctccagtacgtgtgaaatttgagataccatattttactgtttcaggcattcaggttcgttatctgaaagtcatcgagaaaagtggataccaggcccttccttgggttaggtacatcacaatggctggtgaatatgagctgaggcttatctgatctctgctctagctgttggaacaatcgagcagtttgttagagtctgaggaggcgaggcgaggagcacatgtagtgctgcacctgaattaccgcggcaggatagatggcgtttaccggcaggttggggctcttctccctaaagctccacccttccaccatgcagagttctcttagtggtttttacccatgtttgctgtaagttatcatccatcagtacagttgcctagttgaattcttgttttccaattctttcctggtcgatatcacatgtatcatattggtttatttgccctattgatgtcactcacaagcttgggccctgtttctaatgttactattttgcttccaagctattttcgattaggac

SEQ ID NO: 3801 - DNA, 964 bp, Triticum aestivum
tcaaacaacagtctcctggactctgattttgaagcgcatgttgctgatttcgggcttgccaagttcttgcaggactctggcacatcagagtgcatgtcagccattgccggttcttacggctatattgctccagagtacgcgtatactctcaaggtggatgaaaagagcgatgtttacagcttcggtgtagtgcttcttgagctgattacgggaaagaagccggtaggggagtttggcgatggtgtggacattgttcactggatcaagatgatgacgggttccaaaagggagcaggttatcaagatcatggacccaaggctgtcaacagtgcccgtgcatgaggtaatgcacgtcttctatgttgcgttgctttgtgtggaggaacagagcgtgcagcgacccacaatgcgggaggtggtgcaaatcctcagtgagctacccaagccgactacgaagcatggagaggagcagcttactggtagtggtgatggtgatgaatctggtcctgtaggacctcctgaaactgtggagcctgcaactgatgaagcaaaggagcagcaccaacagcagcaaccgagctcgccgtcttcacttcctcccaatctcatcagcatctgaagaactgtcaacctgaattattgccatttattttgtcaaatttggatgtttaattcttgtagtcttaaggtttggtatgctgttctctgcagcataggtctctggctttctagttgtgctgtcaagctgaattgtttacgtaggtactcctatttgtgctgtaaatatcatgctattttttttctatatctctactttcctgttacaatcaagagactagtcagggagttaagagattagttatggtggagctatcctgctttcctgttacaatcaagtgctttctccatccagtgtggcatctaacaatgactctgcaaatcatcaagatttcttaaaggttttc

SEQ ID NO: 3802 - DNA, 603 bp, Triticum aestivum
agatgatgaacaactgcgccgtccggagcgtcctcagtggtgtcatggggggtggtcttggtgtacttatgggactattttttggagctttggaaaatccaataatgtcagaggagatgacagcaaggcaacaaatagtctaccaggcaaaacagatgggcaggaaaagtatgagccatgctaagacctttgcagtaatgggcttgattttctctgcagctgaatgcgtcgtagagaaggctcgggcaaagcatgacattaccaattcggcagtagctggctgtgtcacaggaggggctttagctgcaaaaggtggccctcaggccacatgtatcgggtgtgtgggttttggtgccttctccgtggcgattgagaagttcatggaacggcatacttgaatcggtgatggaaacgttgcatcctataaaccaagtgatgcgtctttgtagcaaatcattagcaggattcagcattggccgaagaagttttggttattctgcaatattcagtcgttggcatgtatcccaagatggggtaacctaaattttaagtcttgcggctgtccatccattgcactgagtagctaacttagtctgtagccag

SEQ ID NO: 3803 - DNA, 719 bp, Triticum aestivum
gtggagccgctccggctgccaacgccggaggagatcaagggccaggagatgatgaacaactgcgccgtccggagcgtcctcagtggtgtcatggtagggggtggtcttggtgtacttatgggactattttttggagctttggaaaatccaataatggcagaggagatgacagcaaggcaacaaatagtctaccaggcaaaacagatgggtaggaaaagtatgagccatgctaagacctttgcagtaatgggcttgattttctctgcagctgaatgtgtcgttgagaaggctcgggcaaagcatgacattaccaattcagcagtagctggctgtgtcacaggaggagctttagctgcaaaaggtggccctcaagctacatgcatcgggtgcgtgggttttggtgcgttctctgtggcgattgagaagttcatggagcgatataactgaatcggtgatggaaacgttgcatcctataaatcgagtgatgctgtctttctagcaagcattagcaggattcagcattggccgaacaacttttggtttattttgcaatattcagtcgttggcatgtatgtactcagagatggcgtgacctaaattttacgtctcgcggctatccatcgcactgagtagctatattgtttctccagtctgtagccagtttgatgtcatggcatgtggtatacgcattttgacttatgcaatctcgtagctagctg

SEQ ID NO: 3804 - DNA, 730 bp, Triticum aestivum
cgagctgtccggcatccctcctgcacccaggggagttccccagatcactgtctgctttgacattgatgccaatggtatcctgaacgtgtctgccgaggacaagacgactgggcagaagaacaagatcaccatcaccaacgacaagggcaggctgagcaaggaggagattgagaagatggtccaggaggctgagaagtacaagtctgaggatgaggagcacaagaagaaggtggagtcaaagaatgccctggagaactactcctacaacatgcgcaacaccatcaaggatgagaagattgcctccaagctgccagcggacgacaagaagaagattgaggacgccatcgacgctgccatccagtggctggacacgaaccagctcgctgaggcggacgagttcgaggacaagatgaaggagctggaggccctgtgcaaccccatcatcgccaagatgtaccagggcgctggtgccgacatggagggcggcatggacgacgacaccccggctgcttccggcggtgctggccccaagatcgaggaggtcgactaaatgagtcgatgttctgttgcagaggcggtgaagcctgcttcttagttattatgtgtgtcctatgttatctgagactgggttgcggtgtgttttggtacgagtggtcagggttattctgtgcgagttgacattcgtggaacatcagtggattatgggtcacgtcacgtctaagtaatacaa

SEQ ID NO: 3805 - DNA, 651 bp, Triticum aestivum
aatggcattctgaacgtctctgcggaggacaagacgactgggcagaagaacaagatcacaatcacgaatgacaagggcaggctgagcaaggatgagatcgagaagatggtgcaggaggcagagaagtacaagtcagaggacgaggagcacaagaagaaggtggagtcaaagaatgcctggagaactatgcctacaacatgcgcaacactatcaaggacgacaagatcgcctccaagctagctgcggacgacaagaagaaaatcgaggacgccattgaccaggccatccagtggctggacggcaaccagcttgctgaggcagatgagtttgacgacaagatgaaggagctggagggcctctgcaaccccataatcgccaagatgtaccagggtgccggagctgacatggcgggtggcatggacgaggacgatgcgcctccggctgccggcggcgctggccccaagatcgaggaggtcgactaagcgagcacttgtaccagtcttttaccctaaagtttatcccgttcgttatgttggatgctactgcagtacgtggtgttggatgtgagctttgtgtgtgtgaactgcgtttgctgctgcctgcttttctgttaatgttagttacatctggtgatatgctgctattgctctt

SEQ ID NO: 3806 - DNA, 741 bp, Triticum aestivum
  N_region (8)..(8): n = any nucleotide
  N_region (15)..(15): n = any nucleotide
aaacaacntgctggncaagtttgactctccggcatccttcctgccccccaggggtgtgccccagatcacggtgtgcttcgacattgatgctaatggcattctgaacgtctctgcggaagacaagaccactgggcagaagaacaagatcacaatcacgaatgacaagggcaggctgagcaaggatgagatcgagaagatggtgcaggaggcagagaagtacaagtcagaggacgaggagcacaagaagaaggtggagtcaaagaatgccctggagaactatgcctacaacatgcgcaacaccatcaaggacgacaagatcgcctccaagctagctgcggacgacaagaagaagatcgaggacgccattgaccaggccatccagtggctggacggcaaccagcttgctgaggcagatgagtttgacgacaagatgaaggagctggagggcctctgcaaccccataatcgccaagatgtaccagggtgccggagctaacatggcgggtggcatggacgaggacgatgcacctccggctgctggcggcgctggccccaagatcgaggaggtcgactaagcgagcacttgtaccagtcttaccctaaagttattccgttcgttatgttggatgctactgcagtacgtggtgttggatgtgatgtgtgtgaactgcgtttgctgctgcttttctgttaatgttagttgcatctggtgatatgctgctattgctctcgtccacctgag

SEQ ID NO: 3807 - DNA, 779 bp, Triticum aestivum
tttgagctctctgcatcccgcctgcgcccaggggtgttccccagatcactgtctgcttcgacattgatgccaacggtatcctgaatgtctctgctgaggacaagaccactggccagaagaacaagatcaccatcaccaacgacaagggcaggctgagcaaggacgacattgagaagatggtccaggacgcagagaagtacaagtctgaggacgaggagcacaagaagaaggttgacgccaagaactccctggagaactacgcctacaacatgaggaacaccatccaggacgagaagatcgcctccaagctgcctgctgatgacaagaagaagatcgaggacgccgttgacgccgcgatccagtggcttgacgccaaccagctcggtgaggttgacgagtttgaggacaagatgaaggagctggagggcctctgcaaccccatcatcgccaagatgtaccagggcgccggtgctggcatgcccggaggcatggacgaggacgcgccggctgcgagcggcggtgctggccccaagatcgaggaggtcgactaagttagtcgcttttatatagtgagaaatacactatacaccattttattcagtcctgggtgccaatcatatcacctgggctggaagttttgttgtactttttggtctgtagcatcacgagacttgtgtgtgtcgtgaacaatgcaatgatgcatgttttggctcattgttgatttcagcttaatgcttattatttggactaccctacccgtgtgatttcattctgaatta

SEQ ID NO: 3808 - DNA, 792 bp, Triticum aestivum
gagggtgagaggacaaggaccagggacaacaacctgcttggcaagtttgagctctccggcatcccgcctgcacccaggggtgttccccagatcactgtctgcttcgacattgatgccaacggtatcctgaatgtctctgccgaggacaagaccactggccagaagaacaagatcactatcaccaacgacaagggcaggctgagcaaggacgacattgagaagatggtccaggatgcagagaagtacaagtctgaggatgaggagcacaagaagaaggttgatgccaagaactccctggagaactacgcctacaacatgaggaacaccatccaggacgagaagattgcctccaagctgcctgctgacgacaagaagaagattgaggatgctgtcgacgccgcgatccagtggcttgacgccaaccagcttggtgaggttgacgagtttgaggacaagatgaaggagctggagggcctctgcaaccccatcatcgccaagatgtaccagggtgccggtgctgacatgcccggaggcatggacgaggacgcgccggctgccagcggcggtgctggccccaagatcgaggaggtcgactaagttattctctttgatatagtgagaaaatacactatacgccatttgtttcagtcctgggtgccaatcatatcacctgggctggaagttttgttgtacttttggtctgtagcatcacgagacttgtgtgtaccgtaaacaatgcaatgatgcatgttttggctcattgttgatttcagcttaatgcttattaggtga

SEQ ID NO: 3809 - DNA, 635 bp, Triticum aestivum
ctcaagttccaggactcaaggcgaagaggagcttccgcgtcatcgtgttcaagatcaatgagaaggtgcagcaggtggtggtggacagggttggggaaaaaaatgagagctatgatgatttcacagcctgcttgcccgctgacgagtgccgctacgcggtgtttgattttgacttcgtcactgacgagaactgccagaagagcaagatcttcttcatctcttgggctcctgacacatcaagggtgaggagcaagatgctgtacgcgagctccaaggaccgcttcaagagggagctggacggcatccaggtggagctacaggcgaccgacccgagcgagatgagcatggacatcgtaaaggggcgagccctctgaagaagagaaaatccgagaacagctacttactacgtacacccacatccaaacccaggagcaggagcagaggaggccttcatctgcgccggctcctgttcttgcagttcctccccatccattttccctgccattcttttcctggaagcgaagtgctgtgttctgtatgagactgtatgccgtcttcattcttgttttcccccgtgtttggtgccatagtctctgactactgctgtaaactagaacatattcgcatttgatgcc

SEQ ID NO: 3810 - DNA, 754 bp, Triticum aestivum
tccgtccgtggaaagaagagaaagcccatcgtcagccatggcgaactcggcgtcgggcatggccgtgagcgacgagtgcaagctcaagttccaggagctcaaggcgaagcggagcttccggttcatcacgttcaagatcaacgagcagacgcagcaggtggtggtggaccgggtggggcagccgggcgagacctacgccgacttcaccgccaccatccccgccgacgagtgccgctacgccgtcttcgacttcgacttcgtcaccgacgagaactgccagaagagcaagatcttcttcatctcctggtccccggacacgtccagggtgaggagcaagatgctgtacgcgagctccaaggacaggttcaagagggagctggacggctaccaggtggagctgcaggccaccgaacccagcgagatgacgttggacatcgtcaaggccagagccctctgaacaaatttctcatcgcatcgctccttgcaggctccaaggccagcagctggatctacatcacgccctacgtacctgcgcccccgtaccatcgtatgccgtttcccctccgtcgtcggtgtcggagcctccccctccttgtaaactagacatagatggtctctctcgttgtctttcccgtttccaagattttagacggcatgcccgatcttatttccccccttgttgctgaggtgcgtactacgtaaatttgtccgtgctcgttgtgtaagcgactcgctccacacgggccgcacggca

SEQ ID NO: 3811 - DNA, 848 bp, Triticum aestivum
gattgataatgaagggcgctcttcgttgtttgtttgttgtttgtgtgattgcaatgcaaggcgaaactcggcgtcggggcatgggccgtgagcgacgagtgcaagctcaggttccaggagctcaaggcgaagcgaaccttccggttcatcacgttcaagatcaacgagcagtcgcagcaggtggtggtggaccgggtggggcaaccgggcgagacctacgccgacttcaccgccaccatccccgccgacgagtgccgctacgccgtcttcgactttgacttcgtcaccgacgagaactgccagaagagcaagatcttcttcatctcctggtccccggacacgtccagggtgaggagcaagatgctgtacgcgagctccaaggacaggttcaagagggagctggacggctaccaggtggagctgcaggccaccgatcccagcgagatgacattggacgtcgtcaaggccagagccctctgaacaatttcccatcgctccttccaggctccatggccagcagctggatctgcatcatgccctacgtacctgcgcccccgtatcgtatgccgtttcccctccgtcgtcggtgtcggagtctccccctccttgtaaactagacatagatggtctctctcgttgtctttcccgtttccaagattttagacggcatgcccatcttattttccccttgttgctgaggtgcgtactacgtaaatttgtccgtgctcgttgtgtaagcgactggctccacacgggccacacggcaattattcacgaaaagacaaacattagtaggtgtcttttagcatagtggtctccataatgtgctcgttccaaaaggagccctc

SEQ ID NO: 3812 - DNA, 674 bp, Triticum aestivum
aacagaagaggacgtcatcgacgacctcatggcattccaagagagcaaggagtactatgctaaggtcggacaaggcgtggaagcgcgggtacctcctgtacggcccgcccggcaccggcaagtccactactgactagccgccatggccaacttcctcgacctacgatgtctacgacctcgagctcacggccatcaacaacaacaccgagttgcggaagctcttcatcgagacgacgggcaagtccatcatcgtcatagaggacattgactgctccgccgacctcaccggaaaacgccgcaaggacaagaaggcctctcgcgacaaggactctgatggcaacgacaaacccaagctaccaatcgagccagagaaggatgacgcggccaatgtgacgctctctggcctgctcaacttcatcgacgggctgtggtctgcgtgcggcggcgagcggatcatcatcttcaccaccaactacaaggagaagctggacccggcactgatccggcggggcaggatggacaagcacattgagatgtcttactgccgctttgagagcttcaaggtactcgccaagaactacctagatgtcgtcgggcacgagctgtttggggagattcagcagctgctcgaggagaccgacatgtcgcccgctgacgtggcggacgaacctgat

SEQ ID NO: 3813 - DNA, 1053 bp, Triticum aestivum
  N_region (303)..(325): n = any nucleotide
  N_region (967)..(967): n = any nucleotide
gcaagtcatcatcgtcgttgaggacatcgactgctccctcgacctcaccggcaagcgcaagacgaagaagaagaaaccaaacaagaagaagagcaagagcggcgacaaaaagaagaaggccccgcggcaccggcaagtccaccatgatcgacgccatggcaaagtacctggactacgacgtgtacgaactggagctgacgtcggtgaagaacaacaccgagctgcggaggctcttcatagagaccaagggcaagtccatcatcgtcgtagaggacatcgactgctccctcgaactcaccggcnnnnnnnnnnnnnnnnnnnnnnnaccaaacaagaagaagaagccaagagcggagacaaaaagaagaaggccccgccggcgccaggcgccggcaaggacgaagaaaacaaggtgacgctgtcggggttgctcaatttcatcgacgggctgtggtcggcatgcggcggcgagcggatcatcgtgttcaccaccaaccacaaggagaagctggacccggcactgatccggcggggcaggatggacgtgcacatcgagatgtcatactgctgcttcgagtccttcaaggtgctcgccaagaactacctgcacgtcgacgaccacgagctcttccatgaaatccggcaacttctaggggcggtcaatatgaccccggccgacgtggccgagaacctgatgcccaagtccaaaaagaaggatgtggacacctccctggccaggctggtcaaagcgctcaaggaagcaaaggaggaagcgttggccaaagcactggccggggcagagcacgaagagggagccgaagatgatgacgaggaggaagatgacagcagcagctcgagcgaagaggaggaaaatgggaagaaaaaagaagagtagaatgatatatacgcaatgatatcatagttttttacaagtactcgtatgtatgaaggcaataagaacttgtantcgtacataacatcatcagtttcaaatgagtaaatatatctccaagcacaaaatgtgagatgatgatacggtcgacaaaatgcgtc

SEQ ID NO: 3814 - DNA, 633 bp, Triticum aestivum
agaggagcttccgcttcatcgtgttcaagatcaatgagaaggtgcagcaggtggtggtggacagggtcggggaaaaaaccgagagctacgatgatttcacagcctgcttgccagctgacgagtgccgctatgcagtgtttgattttgacttcgtcactgatgagaactgccagaagagcaagatcttcttcatctcttgggctcctgacacatcaagggtgaggagcaagatgctgtacgcgagctccaaggaccgcttcaagagggagctggatggcatccaggtggagctacaggcgaccgacccgagcgagatgagcatggacatcataaaggggcgagccctctgaagaagaaaacctgagcccagctacttactacgtacaccgacacccaccccaggagcaggagcagaggagggccttggtctgcaccagctcctgttcttgtagttcctccccatccattttccctgtcattcttttcctggaagcaaagtgttgtgttctgtatgagactgtatgccgtcttcattcttgttatcccccgtgtttggtgccatagtctctgactactgctgtaaacttagaacatatttgcatttgatgcctggtgtgaagcctaatgtggcgt

SEQ ID NO: 3815 - DNA, 639 bp, Triticum aestivum
agctggaggtttagaagccctgatcgcatctttgtggtggcctccccgtactacttcaccgaggctcaagtgcgggagttgcttgaatcctttggaccgttgcgaggatttgatcttgtgaaggatagggagacaggcaactcgaaaggatatgccttctgtgtataccaggatcttaatgtcaccgacattgcctgtgctgccctgaatggtatcaagatgggagacaagaccctcactgttaggcgagcaaatcaaggcacttctcaaccaaggccagagcaagaaaccatcctgttgcacgcacaacaacaagtgcagatgcagaaactcgtgctacaagttggaggcgctctaccgacaaggtggtatgcctgacccaggtggtttcagcagatgaactgagagatgatgaggaatacgaggatattttggaagatatgagggaagaagggcgcaaatatggtaaacaaatgaaatccatggacttgccttcatcttgttttaaacccttgcattctgtaatcattgtgttcagttactgaacttgttttgttttgtgtgttgtctttttgtgtgtcttttttgtagtccacataaatgccattgcagagtcttttgtagtccaaccccatgcat

SEQ ID NO: 3816 - DNA, 562 bp, Triticum aestivum
ctgtttttgaggtaaatgctgccactgcatggtccaccagaatgaagatcgcatgggtgctgcaaggggtcttgccttccttgcacgaaagctgagaagcctgtcatttacagggacttcaagacatcctacatattgctcgacgaggagtacaacgcaaagctctctgacttcgggctggcgaaggatgggccggtcggcgacaaatcacacgtctcgacccgcatcatgggcacctacggctacgccgccccagagtacatcatgacagggcacctgacggcgatgagcgacgtgtacagctacggggtggtgctgctggagctgctgacggggcgcaagtcgctggacaggtcaagaccggtgagggagcagacgctgacggactgggccttcccgctgctggcgcacaggaagaaggtgctgggcatcgtcgaccccaggctcaccgccgacgactaccccgtgaaggccgtgcacaagacggccatgctcgcctaccactgcctcagccgcaaccccaaggccaggccgctcatgcgcgacatcgtcgccaccctcg

SEQ ID NO: 3817 - DNA, 447 bp, Triticum aestivum
gacaagaaggcctctagtgacaaggactccgacgatgatgacaaacccaagctaccgatggatccagagaaggacgacgccaccaaggtgacgctctcgggcctcctcaacttcattgatggactttggtctgcttgcgggggtgagcggatcatcatcttcactaccaaccacaaggacaagctcgatccggcgctgatccgtcgaggaaggatggacaagcacatcgagatgtcatactgccgcttcgagggcttcaaggtgctcgccaagaactacttagatgtcatcgagcatgagctgtttggggaaattcagcggctgctcgaggagaccgacatgtcgcccgccgacgttgcagagaacctgatgccaatgtcgaagaagaaaaaaagggaccctgatttgtgtttgtcgggcctcgtcaaggcactcaagcaggccaag

SEQ ID NO: 3818 - DNA, 881 bp, Triticum aestivum
atgtgagcacagttgtcaagggcagttttggttatctagatcctgaatatttccgcaggcagcagctcactgagaaatctgatgtgtattcgtttggtgtggtgctgttcgaggtcctttgtgctcggcctgccttgaaccccactcttgcaaaggaagaagttagcttggcagagtgggcactgcattgccaaaagaagggaattcttgatcagattgttgatccctacctgaagggaaagattgttccgcagtgcttcaagaagtttgccgagacggctgagaagtgtgttgccgacaatggcatcgagcgcccttcgatgggagatgtgctttggaacttggagtttgctcttcagatgcaggaaagcgcggaggagagtggaagcattgggtgtgggatgtcagatgagggcactcccctcgtgatggttggaaagaaggatcccaatgacccatcaattgattccagcaccactacgaccacaacaacttccctaagcatgggtgaccaaagtgtcgcgagcatcgactcggatgggctgacgccgagcgcggtgttctcacagatcatgaaccccaaggggcggtgaggtaaaaatctgggtctgcttttcagtcagtcaccgttggggcctgcctaatttattcattcagcatattttcatgcgtttgtgctcttgctgtctcgcaagttatgcattagaagtcaaaaaattgttccatattagatatttctgtcttgccttgtttttttttcttcttcctcttcttcagtgttgtaatgactatgcttatttgcatgttgttattgtaccaccactgctatgtgttgttgatccaacatgtaatactgtatgagaaaaagaaagtgatgtgca

SEQ ID NO: 3819 - DNA, 1636 bp, Triticum aestivum
ctcgccaccacacccaatcgcccgctcgctccctcggctcggcgtcgatcgatctctccttctacccgagctgctccgtcgtccggacggcgccgtcgaccgcgtgcttgccagatctgaagtcaaagcaggagaggacggacatgcagggagcgccggtggacagcccgggggcggcggaggcggcggcgcggccgagccggtacgagtcgcagaagcgccgggactggcacacgttcgggcagtaccttcgcaaccaccgcccgccactggagctctcgcggtgcagcggcgcccatgtcctcgagttcctccgctacctcgaccagttcggcaagaccaaggtgcacgccgcgggctgccccttcttcggccacccttccccgccggcgccgtgcccgtgcccactccgccaggcctcgggcagcctcgacgcgctcgtcggccgcctgcgcgccgccttcgaggagcacggcgggcggcccgaggccaacccgttcggcgcgcgcgccgtccgcctctacctccgcgaggtgcgcgactcccaggccaaggcacgtggcatcgcctgttgggagtaaaccacgcctccagacgatgactggtgtgcatgcacgggtatgcgctccaggtccgactcataaggcagcggccgttggcaagagcggagggctagtgcgttggttcgttagctagcccgcatggccgggtctcctgtgtacgcgcatgcaccgtagttagcaggttagttggttagtgcatgcatgcatcatggatatggatgccgtgcatgtagctggcttagtgagtttgttagctagactagtgcgtgcgtgcgtggagttagtggccggtgtggtggccggatggtgtgtgtgcagccgggtataaaaggcctcctgatgtattgatgaagtggagccgtgtgtagccatgtagtcactgtaaggaagaaaaggattggggcgttcgtgcgcccgtggcggcgttcgtgcgccggccggaaaatcttgtgtccattcttcttcttccacctccattcgattgcgaggagaggtagctagagggccgcggttccaacatcctgctgctgcagcgcgaactcgaggttccacagcacgtcgcccatggacggccggtccacgccctggtccgccaggcacttctccgccgtctcggcgaacttcttgaggcagtcgggcgcgatcttcccctccagcaccgggtcgatgatctcctccagggtgcccttccgctggcagctcagcgcgtggtccgccaggctcacctgctcccgcggcaggctcgggttcagcgccggccgcccgcacagcacctcgaacagcaccacgccgaacgagtagacgtccgacttctccgtcagcttctgccgccggaagtactccgggtccaggtacccgaagctgcccttcaccatggtgctcacgtgcgtctggttctgcaccgtcggccccgtcttggagagcccgaagtcggacaccttggccacccacttctcgtcgacgaggatgttggtggtcttgacgtcgcggtggatgatggtgtacttggcgcccgtgtgcaggtagtggagcccccgggcggcgccgatccgatctccagccgctgcctccac

SEQ ID NO: 3820 - DNA, 708 bp, Triticum aestivum
cgcaaccctagagcctcgcctccctcctccccctctcccgggcgcctccaccccccgccttagcggcgcgaagcgaccatgacgttcaagcggaggaacggcgggcgccaacaagcatggccgcggccacgtcaagtacatccgctgctccaactgcgccaagtgctgccccaaggacaaggctatcaagcgtttcttggtgaggaacatcgtggagcaggctgctgtgagagatgtgcaggaggcttgtgtgcatgatggatatgtgcttcccaagctgtacgccaaggtgcaccactgtgtgtcttgtgccatccatgcccacattgtccgtgtccgctcgcgtgagaacaggaggaaccgtgagcccccgcagcgtttcaggcgcagggatgatggcccgaggcctggacagggtggcccgccccgtgctggtggacctggtggcgcgcctgctggcgctggtgccgttcctggtgctcctgctccccgtgtctagtttgggaatgcttccgtgatatggagccagccctagttttactcgtccctggatattgaactattctacctagtttttgctgcaatcggttgtactgaaagttggttggtcaagcacaatttgtgatcaggtctttatgttttgacatttcgctgctatctatatcagagagaaccttttggtttgtctgggatgccccttgttgtttt

SEQ ID NO: 3821 - DNA, 761 bp, Triticum aestivum
gccgcaacctagagctcctccatcccctcctctcccgggcgcctccaccccccgcctagcggcgcgaagcgaccatgacgttcaagcggaggaacggcgggcgcaacaagcacggccgcggccacgtcaagtacatccgctgctccaactgcgccaagtgctgccccaaggacaaggctatcaagcgtttcttggtgaggaacatcgtggagcaggctgctgtgagagatgtgcaggaggcttgtgtacatgatggatatgttcttcccaagctgtatgccaaggtgcaccactgcgtttcctgtgccatccatgctcacattgtccgtgtccgctcccgtgagaacaggaggaaccgggagcccccgcagcgtttcaggcgcagggacgacggcccgaggcctggacagggtggcccgccccgtgccggcggccctggtgcccctggtggtgcgcctgctggcgccggtgccgttcctggtgcccctgctccccgtgtctagtttgggaatgctttgtccgtgatatgcgccagccctagttttactcgtatctggatattggactattctacctagtttttgctgtaatcggttgtactgaaagttggttggtcaagcacaatttgtgatcaggtctttaatgttttgacaatttcgctgctatctatatcggagagaaccttttggtttgtctggggattgccccttgtggttttgtgttcatgcatcatatcatcttgtagttctttcatgatgaga

SEQ ID NO: 3822 - DNA, 702 bp, Triticum aestivum
gccgccgcaaccctagagcctcgcctccctcctctcctctcccgggcgcctccaccccccgcccagcggcgcgaagcgaccatgacgttcaagcggaggaacggcgggcgcaacaagcatggccgcggccacgtcaagtacatccgctgctccaactgcgccaagtgctgccccaaggacaaggctatcaagcgtttcttggtgaggaacatcgtggagcaggctgctgtgagagatgtgcaggaggcttgtgtccatgatggatatgtccttcccaagctgtacgccaaggtgcaccactgtgtttcttgtgccatccatgctcacattgtccgtgtccgctcccgtgagaacaggaggaaccgtgagcccccgcagcgtttcaggcgcagggacgacggcccgaggcctggacagggtggcccgccccgtgctggtggccctggaggccctggtggtgctcctgccggcgctggtgctgtccctggagctcctgctccccgtgtggcgctttgatctagttctggcatgattgggcggtggcgccatccctagttttacccgtgtctggatattgaactattctacctagtttttgctgcaatcggttgtactgaaagttggttggtcaaaagcacaatttgtgatcaggtctttaatgttttggcaatttcgctgctatctataatcagagagactttt

SEQ ID NO: 3823 - DNA, 1707 bp, Triticum aestivum
cccccaccctccgctcccctctcgccgcccattgttctgcctgcggagaaccatctcatatctcggccaagatagagggaaatcctgcacatccagggtgggcaatgcggcaaccagatcggtgccaagttctgggaggtggtgtgtgatgagcatggcattgacccaactgggcgctacaccggtacctctgacctgcagttggagcgtgtcaatgtctactacaatgaggcctcctgtggtcgctttgtgccccgggctgttcttatggacctcgagcctggcaccatggacagtgtccgcactggcccttacgggcagatcttccgccctgacaacttcgtctttgggcaatctggtgcgggtaacaattgggccaagggccactacaccgagggtgctgagcttatcgattctgttttggatgttgtgaggaaggaggctgagaactgtgactgtctgcaaggattccaagtatgccactctcttggtggtggtaccgggtctggcatgggtaccctgttgatatctaaaatcagggaggagtaccctgaccgcatgatgctgacgttctcagtgttcccctcaccaaaagtatctgatactgtggttgagccatacaatgcaactctctcagtccatcagctggttgagaatgctgacgagtgcatggttcttgacaatgaggctctctatgacatctgtttcaggactcttaagctgaccacacctagctttggggacttgaaccatttaatctctgctaccatgagtggagtcacatgctgcctaaggttccctggtcagctgaattccgacctccggaagctggcagtgaaccttatcccattcccccgcctccacttcttcatggtgggctttgctccattgacatcccgtgggtctcagcagtaccgtgccctcactgtcccagagctcacacagcaaatgtgggatgccaagaacatgatgtgcgccgccgatcctcgccatggccgttacctcactgcctctgccatgttccgtggaaagatgagcacaaaggaggtcgacgagcagatgatcaacgtccagaacaagaactcatcctactttgtggagtggatccccaacaatgtcaagtccagcgtctgtgacatcccaccgacagggctctccatggcgtccaccttcgttggcaactcgacctccatccaggagatgttccggagggtgagcgagcagttcactgccatgttcaggaggaaggctttcttgcattggtacactggtgaaggcatggacgagatggagttcactgaggctgagagcaacatgaacgaccttgtctcggagtaccagcagtaccaggatgctactgccgatgaggagggcgagtacgaggatgaagatcaggagcctgaggaggacatgtaaggtgggaggtccatgtggtgctttgctgggtgggggggttctgggggcagagtttgatctgtttggtgctttgttataaatctgtttatcatcgcaactaccgcttgtacgccaccgccattcttcatgcctttcctaagctttgtatttctcatgttatggcaccttttcggtattgtatcacttgatgccatccggtatgttctgtgttgaggtttctggacctctctggtggtgaatggcttctgagttggtatttcttgcaaattatttcgtcagactgtatgcagg

SEQ ID NO: 3824 - DNA, 868 bp, Triticum aestivum
gggcttcgctccattgacatcccgtgggtctcagcagtaccgtgccctcacggtcccagagctcacacagcaaatgtgggatgccaagaacatgatgtgcgccgccgatcctcgtcatggccgttacctcaccgcctctgccatgttccgtggaaagatgagcacaaaggaggtggacgagcagatgatcaacgtccagaacaagaactcgtcctactttgtggagtggatccccaacaatgtcaagtccagcgtctgtgacatcccgccgacggggctctccatggcgtccaccttcgttggcaactcgacctccatccaggagatgttccggagggtgagcgagcagttcactgccatgttcaggaggaaggctttcttgcattggtacactggtgaaggcatggacgagatggagttcaccgaggcggagagcaacatgaacgacctcgtctcggagtaccagcagtaccaggatgccactgctgacgaggagggcgagtacgaggatgaggatcaggagcctgaggaggacatgtaaggtgggatgtccatgtcgtgctttgctgggtgggggttctgggggcagagtttgatctgtttggtgctttgttataaatctgtttatcatcgcaactaccgcttgtacgccaccgccattcttcctgcctttcctaagctctgtatttcctatgttatggcaccttttcggtattgtatcacttgatgccgtgcggtatgttctgtgttgaggtttctggttctctctggtgctgaattcaggctttctgtagttggtatttctgcggtaattattttgtcgaattctgggtgcatcatggttccgacctacgcgcattctcaagtg

SEQ ID NO: 3825 - DNA, 516 bp, Triticum aestivum
ccgtgccctcactgtcccagagctcacacagcttatgtgggatgccaagtacatgatgtgcgctcgccgatcctcgccatggccgttacctctactgcctctgccatgttccgtggaaagatgagcacaaaggaggtcgacgagcagatgatcaacgtccagaacaagaactcatcctactttgtggagtggatccccaacaatgtcaagtccagcgtctgtgacatcccaccgacagggctctccatggcgtccaccttcgttggcaactcgacctccatccaggagatgttccggagggtgagcgagcagttcactgccatgttcaggaggaaggctttcttgcacttggtacactggtgaaggcatggacgagatgaagatcaggagcctgaggaggacatgtaaggtagggaggtccatgtggtgctttgctgggtgggggggttctgggggcagattttgatctgtttggtgctttgttataaatctgtttatcatcgcaactaccgcttg

SEQ ID NO: 3826 - DNA, 666 bp, Triticum aestivum
agcaatgtggatgccaagaacatgatgtgcgccgctgatcctcgccatggccgttacctcaccgcctctgccatgttccgtggaaagatgagcacaaaggaggtggacgagcagatgatcaacgtccagaacaagaactcgtcctactttgttgagtggatccccaacaacgtgaagtccagtgtctgtgacatcccgccgacggggctctccatggcgtccacctttgttggcaactcgacctccatccaggagatgttccggagggtgagcgagcagttcactgccatgttcaggaggaaggctttcttgcattggtacactggtgaaggcatggacgagatggagttcaccgaggcggagagcaacatgaacgaccttgtctcggagtaccagcagtaccaggatgccactgccgacgaggagggtgagtacgaggatgaggatcaggaggccgaggaggacatgtaaggagggaggtccatgtggtgctttgctgggtgggggggttctgggggcagagtttgatctgtttggtgctttgttatgaatctgtttatcatcgcaactaccgcttgtacgccaccgccgctcttcctgtacggaatctgttttctatgttatgaatctattttctatgttatggcacctcctgggtattgtatc

SEQ ID NO: 3827 - DNA, 815 bp, Triticum aestivum
cttcttcatggtggcctttgcccgctcacatctcgtgggtcacagatgtaccgctccctgcactgtcctctgagctcacaccagcagatgtgggactcgaagaacatgatgtgtgctgctgacccgcgcccatggccgctacctcacagcctcggccatgttccgtggcaagatgagcaccaaggaggttgacgagcagatgatcaacgtgcagaacaagaactcctcctacttcgtggagtggatcccgaacaacgtcaagtcaagcgtgtgtgacatcccaccacgcggcctctccatggcgtccaccttcattggcaactccacctccatccaggagatgttcaggcgtgtgagcgagcagttcacggccatgttcaggaggaaggctttcttgcattggtacactggcgaggggatggacgagatggagttcactgaggccgagagcaacatgaacgaccttgtctccgagtaccagcagtaccaggacgccactgccgacgaggagggcgagtacgaggaagaggaagagctggagcaggagtaagatcggtgacgattgcatctctccgtttatgtggtattgtggttttcgtacaactggagcttgttactagtagagactagagggtaccatggctacaactctgctgcttgtttgcgtgtcttggcatgtattggatttgtactgcgttcgtttgtaggcatgttcactcgatgctatgtttctttgcgtgaattatttattctatgtgaggtttcaagcaagtggatttgaaatacagtagaatgctttgtagtttgaacaatga

SEQ ID NO: 3828 - DNA, 540 bp, Triticum aestivum
tgagcaccaaggaggttgacgagcagatgatcaacgtgcagaacaagaactcttcctacttcgtggagtggatcccgaacaacgtcaagtcaagcgtgtgtgacatcccaccacgcggcctctccatggcgtccaccttcattggcaactccacctccatccaggagatgttccggcgtgtgagcgagcagttcaccgccatgttcaggaggaaggctttcttgcattggtacactggtgaggggatggacgagatggagttcactgaggccgagagcaacatgaacgaccttgtctctgagtaccagcagtaccaggacgccactgccgacgaggagggcgagtacgaggaagaggaagacctggagcaggagtaagatcggtgacaaattcatctctccgtttatgtggtattgtggttttcgtacaactggagcttgttactagtagagactagagagtaccatggctacaactctgctgcttgtttgcgtgtcttggcatgtattggatttgtactgcgttcgtatgtaggcatgt

SEQ ID NO: 3829 - DNA, 736 bp, Triticum aestivum
gtcctgagctcacacagcagatgtggactcaaagacaggatgtgtgctgccgacccacgccatgccgctacctcacagcctcggccatgttccgtggcaagatgagcaccaaggaggttgatgaacagatgatcaacgtgcagaacaagaactcttcctacttcgtggagtggatccccaacaacgtcaagtcaagcgtgtgtgacatcccaccacgcggcctctccatggcgtccaccttcatcggcaactccacctccatccaggagatgttccggcgtgtgagcgagcagttcacggccatgttcaggaggaaggctttcttgcattggtacactggtgaggggatggacgagatggagttcactgaggccgagagcaacatgaacgaccttgtctccgagtaccagcagtaccaggacgccactgccgacgaggagggcgagtacgaggaagaggaagagctggagcaggagtaagatcggtgacgattgcatctctccgtttatgtggtattgtggttttcgtacaactggagcttgttactagtagagactagagggtaccatggctacaactctgctgcttgtttgcgtgtcttggcatgtattggatttgtactgcgttcgtatgtaggcatgttcactcgatgctatgtttctttgcgtgaattatttattctatgtgaggtttcaagcaagtggatttgaaatacagtagaatgctttgaagtttg

SEQ ID NO: 3830 - DNA, 769 bp, Triticum aestivum
tggttttacctttggtccactggtctgacaactgaggtcaagttccgttgagatgcaccacgagtccctcctggaggcgcttcctggtgacaatgttggcttcaacgtgaagaacgttgctgttaaggatctgaagcgtgggtttgttgcatccaactccaaggatgaccctgccaaggaggcagccaacttcacctcccaggtcatcatcatgaaccaccctggtcagatcggcaacggctacgcccccagtgctggactgccacacctcccacattgctgtgaagtttgctgagctggtgactaagatcgacaggcgatctggtaaggagctggaggcgctgcccaagttcctgaagaacggtgacgctggtatcgtgaagatgattcccaccaagcccatggttgtggagaccttcgccacctaccctcctcttggccgcttcgctgtgcgtgacatgagacaaacggttgctgttggtgtcatcaagggcgtggagaagaaggaccccaccggcgccaaggttaccaaggctgccatcaagaagaaataggcatctatctagcagaaggtttttgttcatggtcattgcttttgttgctgcagactcttatcccgggcgagcaatgatcctgtctgtcgtttaattactgtatttctattcctgcttcggctaaactcctgtgccttgagactgatctgttgtgaaatgcaagttattagattgcaacttgttatcttgtttctgctgcttttgccaaatggttg

SEQ ID NO: 3831 - DNA, 597 bp, Triticum aestivum
  N_region (572)..(572): n = any nucleotide
acgtgaagaacgtgctggtaaggatctgaagcgtggttgttgcaccactccaaggatgaccctgccaaggagcagccacttcacctcccaggtcatcatcatgaaccaccctggtcagatcggcaacggctacgccccagtgctggactgccacacctcccacattgctgtgaagtttgctgagctggtgactaagatcgacaggcgatctggtaaggagctggaggcgctgcccaagttcctgaagaacggtgacgctggtatcgtgaagatgattcccaccaagcccatggttgtggagaccttcgccacctaccctcctcttggccgcttcgctgtgcgtgacatgagacaacggttgctgttggtgtcatcaagggcgtggagaagaaggaccccaccggcgccaggttaccaggctgccatcagaagaaataggcatctatctagcagaaggtttttgttcatggtcattgcttttgttgctgcagactcttatcccgggcgagcatgatcctgtctgtcgtttaattactgtatttctattcctgcttcggctaaactcctgtgcncttgagactgatctgttgtgaaatg

SEQ ID NO: 3832 - DNA, 1559 bp, Triticum aestivum
gccgcctcctctcggttccttctccttcctcggagctccagccatgggtaaggagaagactcacatcaacatcgtggtcattggccatgtcgactctggcaagtcgacaaccactggccatctgatctacaagcttggaggtattgacaagcgtgtgatcgagaggtttgagaaggaagccgctgagatgaacaagaggtctttcaagtacgcctgggtgcttgacaagctgaaggccgagcgtgagaggggtatcaccattgatattgccctgtggaagttcgagaccaccaagtactactgcaccgtcattgatgcccctggtcaccgtgacttcatcaagaacatgattactggtacctcccaggctgactgtgctgtgctcatcattgactccaccactggtggttttgaggctggtatctccaaggatggccagacccgtgagcacgccctccttgctttcacccttggagtgaagcagatgatctgctgctgcaacaagatggacgccaccactcccaagtactcaaaggcccgttatgaggaaattgtcaaggaagtctcttcgtacctgaagaaggtcggctacaaccctgacaaggttcccttcgttcccatctctgggtttgagggtgacaaccatgattgagaggtccaccaaccttgactggtacaagggccctacccttcttgaggctcttgaccagatcaatgagcccaagaggccctcagacaagcccctgcgtcttccccttcaggatgtttacaagattggtggcattggaactgtgcctgttggacgcgttgagactggtgtcatcaagcctggtatggttgtttacctttggccccactggtctgacaactgaggtcaagtctgttgagatgcaccacgagtccctcctggaggcgcttcctggtgacaatgtcggcttcaacgtgaagaacgttgctgtcaaggatctgaagcgtgggtttgttgcatccaactccaaggatgaccctgccaaggaggcagccaacttcacctctcaggtcatcatcatgaaccacctggtcagatcgggcaacggctacgccccagtgctggactgccacacctcccacattgctgtcaagtttgctgagctggtgaccaagattgacaggcgatctggtaaggagattgaggctgcgcccaagttcctgaagaacggtgacgctggtatcgtgaagatgattcccaccaagcccatggttgtggagacctttgccacctaccctcctcttggccgcttcgctgtgcgtgacatgagacaaacggttgctgttggtgtcatcaagggtgtggagaagaaggaccccaccggcgccaaggttaccaaggctgccatcaagaagaaataggcgcgctatcttgcagaaggattttgttcacggtcattgcttttgttgcttcagactcttatcccgagcgagcaatgatctgtctgtcgtttaattactgtatttctattcctgcttcggctaaactcctgtgcccctgagactgatttgttgtgaaatgcaagttatta

SEQ ID NO: 3833 - DNA, 607 bp, Triticum aestivum
  N_region (12)..(12): n = any nucleotide
  N_region (157)..(157): n = any nucleotide
ctcacgatggcntccaccttcatcggcaactcgacgtccatccaggagatgttccggcgcgtgagcgagcagttcacggccatgttccggcgcaaggcgttcctgcactggtacacgggcgagggcatggacgagatggagttcaccgaggccgagngcaacatgaacgacctcgtctccgagtaccagcagtaccaggacgccaccgccgacgaggagggcgagtacgaggacgagctcgaggacgacgacgccgacctccagggctagagatcaaccaagtactactgcgtacgattatcggttcttttctcatgttaatttgatgattgctttaggcttgtgtagtagtgctcttctgtctttcttggtgggtgctgttgttgaggagcagaaaactcatggaagggtggttgctgatgagatagcttggttggtactataacctatggcacaattgctgtggaatgtgcaagcagcaacgccctgttgcgttctactagtggtgtccagtgtcttcactatcatgttcaaatctaatgtaatctgaagttgctcgtgtctgatttcagttcatgatttgtggtatgctcttcatctaattatc

SEQ ID NO: 3834 - DNA, 1075 bp, Triticum aestivum
caaggaggccgagaattgcgactgcctccaaggtttccaggtgtgccactcgctgggcggcggcaccggctccggcatgggcacgctgctcatctccaagatccgggaggagtacccggaccgcatgatgctcaccttctccgtcttcccctcgcccaaggtctccgacaccgtcgtcgagccctacaacgccaccctctccgtccaccagctcgtcgagaacgccgacgagtgcatggtgctcgacaacgaggcgctctacgacatctgcttccgcaccctcaagctcacaaccccgagcttcggcgacctgaaccacctcatctcggccaccatgagcggggtcacctgctgcctgcgcttcccggggcagctcaactcggacctccgcaagctggccgtgaacctcatcccgttcccgcggctgcacttcttcatggtgggcttcgcgccgctcacctcgcgcggcagccagcagtaccgcgcgctcaccgtgccggagctcacccagcagatgtgggacgccaagaacatgatgtgcgcggccgacccgcgccacgggcggtacctgacggcctcggccatgttccggggcaagatgagcaccaaggaggtggacgagcagatgctgaacgtgcagaacaagaactcgagctacttcgtggagtggatccccaacaacgtaaagtcgacggtgtgcgacatcccgcccacgggcctcacgatggcctccaccttcatcggcaactcgacgtccatccaggagatgttccggcgcgtgagcgagcagttcacggccatgttccggcgcaaggcgttcctgcactggtacacgggcgagggcatggacgagatggagttcaccgaggccgagatagcttggttggtactataacctatggcacaattgctgtggaatgtgcaagcagcaacgccctgttgcgttctactagtggtgtccagtgtcttcactatcatgttcaaatctaatgtaatctgaagttgctcgtgtctgatttcagttcatgatttgtggtatgctcttcatttaattatcgtgttaaattttaaagcc

SEQ ID NO: 3835 - DNA, 788 bp, Triticum aestivum
gggattatgcttcaggaaattgattagtagtcccaaacccatgattggtgtgcttggtgggatttgagaggaagttctatcccacttgcatccaactccaaggatgaccctgccaaggaggcggccaacttcacctcccaggtcatcatcatgaaccaccctggtcagatcggcaatggctacgccccagtgctggactgccacacctcccacattgctgtcaagtttgctgagctggtgaccaagatcgacaggcgatctggtaaggagctggaggcgctgcccaagttcctgaagaacggtgacgctggtatcgtcaagatgattcccaccaagcccatggttgtggagaccttcgccacctaccctcctcttggccgcttcgctgtgcgtgacatgagacaaacggttgctgttggtgtcatcaagggcgtggagaagaaggaccccaccggcgccaaggttaccaaggctgccatcaagaagaaataggcgtgctatctagcagaatgtttttgttcacggtcattgcttttgttgcttcagactcttatcccgagcgagcaatgatctgtctgtcgtttaattactgtatttctattcctgcgtcggctaaactcctgtgcccctgagactgatttgttgtgaaatgcaagttattagattgcaacttgttagcttgtttttctgctgcttttgccaaatggttgcctgtttaagatgcttctttttatcgaactttagtttgcatctgttagtactgtgtattctttcatggagttgtctag

SEQ ID NO: 3836 - DNA, 765 bp, Triticum aestivum
tgtcggctcacgtgaagacgtgctgtcaaggatctgaagcgtggtttttgcatccactccaaggatgaccctgccaaggaggcagccaacttcacctctcaggtcatcatcatgaaccaccctggtcagatcggcaacggctacgccccagtgctggactgccacacctcccacattgctgtcaagtttgctgagctggtgaccaagattgacaggcgatctggtaaggagattgaggctgcgcccaagttcctgaagaacggtgacgctggtatcgtgaagatgattcccaccaagcccatggttgtggagacctttgccacctaccctcctcttggccgcttcgctgtgcgtgacatgagacaaacggttgctgttggtgtcatcaagggtgtggagaagaaggaccccaccggcgccaaggttaccaaggctgccatcaagaagaaataggcgcgctatcttgcagaaggattttgttcacggtcattgcttttgttgcttcagactcttatcccgagcgagcaatgatctgtctgtcgtttaattactgtatttctattcctgcttcggctaaactcctgtgcccctgagactgatttgttgtgaaatgcaagttattagattgcaacttgttagcttgtttttctgcttcttttgccaaatggttgcctgttgttctttttatagaactttagtttgcatctgttagtattgtggattctttcatggagttgtctagctgtggttgtcttctgatctccg

SEQ ID NO: 3837 - DNA, 968 bp, Triticum aestivum
attgctcgccgcgcgcactccgatcaattcaccccgcgcactccgatcaatactgcccaatcaacagaccgatcccacgcgcattccctccgctccccgccccggatcgaccgaccgaccgaccgcgccgcgcgaccgccgggagagcatggggagcgggggcaggacggatctggacggcggcgccgtggcgccgctgaccatctgcgtgatcggcaccggcggcttcatcggctcgcacctctgcgagaagctcatggccgagacccagcagacggtcctcgccgtcgacgtctactgcgacaagatccgccacctcgtcgacccgcccccgccccacctcgccggccgcatctccttccaccgcctcaacatcaagaacgactcccgcctcgagggcctcatcaagatggccgatctgacgataaacctggcggcgatctgcatgccggcggactacaacacgcgcccgctcgacaccatctacagcaacttcatcgacgcgctccctgtggtcaagtactggatccggaagtcgtttgccctgtacgtccaagtcggggcatgcgataaaagaggtcagacttggagaacagcaagcgtctgatccacttctccacgtgcgaggtctacggcaagaccatcggcagcttcctccccaaggaccaccccctccgcaaggttatttgcatcttgattaggagatgatggtgatcatcttttgttgcgggaacctgttagataaagtttatgtgatttgaacctgcaagatacagttttgtataatgttgtgtgagataaaagttgtgaacataggagataagttattgatatgtgttggcctgtctaatgttatgcgagataaagttgtgtgagaaagttttctatacttgtgttattactgtgggaaagaagtactgttactatactgatttgagagtattggctgtaaataaaagaggcttgcc

SEQ ID NO: 3838 - DNA, 712 bp, Triticum aestivum
gcgtccgtccgcctccaccccaccggtcccgacccctctcctccaaggtaagcccgcggcggcggcgagcgcgagcgagcggcggcgatgacgacccgcttcaagaagaaccggaagaagcgcggccacgtgtccgccgggcacgggcgtgtgggcaagcaccgcaagcatcccggaggccgcggtaacgccggaggcatgcaccaccaccgcatcctcttcgacaagtaccatcccggctacttcggcaaggtcggtatgcgctacttccacaagctcagcaacaggttctacacaccgacggtcaacgtcgagaggctctggtccatggttccgtccgacaaggcggcggaggccggcggcgacaaggcccccgtggtcgacgtctcgcagttcggctacttcaaggtgctcggcaaggggatgctgccggagaagcccatcgtcgtcaaggccaagctcatctccaagatcgccgaaaagaagatcaaggccgccggcggcgcagtcgtgctcgttgcctagggttctgttcccgaccgtgccccgagatctatatctgaactattagttgtttcccgtaccagcaatttgtgttgaagaagacatcgttagtttgttatcctggttcctgtgtggtaaaccaacatcttatgagaattttgcgctatgttatgccagtttatatcagacgagttatccatatctgtgc

SEQ ID NO: 3839 - DNA, 1117 bp, Triticum aestivum
cattttcgtaccaagatatcacaaactgttcaagtgatggatggtcacgactcacaaggtccggctcggaccgggggtgtcatttgacatcggctgtgcgcgaggcggctcgagagaccatcggcagcttcctccccaaggaccaccccctccgcaaggaacctgaattttatgtactgacagaagatgagtcaccctgcatctttggtccaatcgtgaaacagagatggtcctacgcgtgcgcaaagcagcttatcgagaggcttgtttttgctgaaggcgcagaaaatggccttgaattcacgattgtgagacctttcaattggattgggccaaggatggacttcattcctggcgttgatggtcctagcgagggtgttcctcgggttttggcttgcttcagcaacaatctcctccgcagagagcccctgaagcttgtcgatggcggcgagtcccagagaacttttgtttacatcaaggatgccattgaagctgttcttttgatgattgaaaaccctgctcgagccaatggtcatatcttcaacgtggggaaccctgacaatgaagtcactgttagggagttggctgaaatgatgacagaggtctatgctaaggtctcaggagagcccccgctggaggagcctgtgatcgacgtgagcgcaaaagaattctacggcgaagggtacgacgacagcgacaagaggatccccgacatgaccctgatcaacaagcagctagggtggaaccccaagacccctctcaaggacctgctggagacgacgctgacctaccagcacaagacctacaaggaagccgtcaagacgcagatgtgtctggccacggcgacgccttcaagctagacgatgacggcgcagctatgctgctcttgatcttttggaagccagatacttatatcgtagtgaaaccgtcgtcgtcgtttttgtcgcgcctctagatcccacccacctatcttcttacctacctagattcgtcattgtgtaaccctatatcgggcaaagggaactgagtatctgagtatctattacatatacctgtggtggcagtgtttgttacgtttggttggttgcacctccagtgctattatttttttgctgtt

SEQ ID NO: 3840 - DNA, 747 bp, Triticum aestivum
cgctcgactccgcctccaccccacccgccccgacccctctcctccaaggtaagcccgcggcggcggcgagcgagcggcggcgatgacgacccgcttcaagaagaaccggaagaagcgcggccacgtgtccgccgggcacgggcgtgtgggcaagcaccgcaagcatcccggaggccgcggtaacgccggaggcatgcaccaccaccgcatcctcttcgacaagtaccatcccggctacttcggcaaggtcggtatgcgctacttccacaagctcagcaacaggttctacaccccgacggtcaacgtcgagaggctctggtccatggtgccgtccgagaaggcggccgaggccggcggcgacaaggcccccgtggtcgacgtctcgcagttcggctacttcaaggtgctcggcaaggggatgctgccggagaagcccatcgtcgtcaaggccaagctcatctccaagatcgcagagaagaagatcaaggccgccggcggcgctgtcgtgctcgttgcctagggttctgttcgcgaccgtgccttgagatctattatatctgaactattagttgtttcccgtaccagcaatttgtgttgaacaagacatcgttagtttgttatcctggttcctgtgtggtaaaccaacatcttatgagaattttgcgctatgttatgccagtttatatcagacgagttatccatatctgtgctcctatttatgtttcgtttgatctgtgttaatcccta

SEQ ID NO: 3841 - DNA, 904 bp, Triticum aestivum
  N_region (859)..(859): n = any nucleotide
ccaccccatcctccccgacccctctccccccaggtaagcccgcggcggcggcgagcgagcggcggctatgacgacccgcctcaagaagaaccgcaagaagcgcggccacgtgtccgccgggcacgggcgtgtgggcaagcaccgcaagcatcctggaggccgcggtaacgccggaggcatgcaccaccaccgcatcctcttcgacaagtaccatcccggctacttcggcaaggtcggtatgcgctacttccacaagctcagcaacaggttctacactccgacgatcaacgtcgagaggctctggtccatggtaccggccgagaaggcggcagaggccggcggtgacaaggcccccgtggtcgacgtctcgcagttcggctacttcaaggtgctcggcaaggggatgctgccggagaagcccatcgtcgtcaaggccaagctcatctccaagatcgccgagaagaagatcaaggccgccggcggcgctgtcgtgctcgttgcctaggggataggtttgtgacaattcggatgaaaatcttgctcgtctttggctggtgccacccgtgacggccccctgtgggtgtcgtttcccctccttgaaggcgttgctttttttggagatagcgccttggagatgttgctgtggtgtgtcgacacctcactctttctcacttgattggttgtctctgggcaaaagcctaggttcggatccggatcggtgatggcggcatccttgatgtcgttcttctgttgggatcattgcttttggaggcacgacttggaggtcctagtttgctttcctgtggtcagggccgtctccaggaattcgggaccccgcttccaatgcttttgaaaagcnaatttctctatacttcttgaaaaatgaaagcagaccctgtataga

SEQ ID NO: 3842 - DNA, 557 bp, Triticum aestivum
gccggcggcttcatcggctcgcacctctgcgagaagctcatggccgagacccagcacacggtcctcgccgtcgacgtctactgcgacaagatccgccacctcgtcgacccgcccccgccccacctcgccggacgcatctccttccaccgcctcaacatcaagaacgactggctacttcggcaaggtcggtatgcgctacttccacaagctcagcaacaggttctacactccgacgatcaacgtcgagaggctctggtccatggtaccggccgagaaggcggcagaggccggcggtgacaaggcccccgtggtcgacgtctcgcagttcggctacttcaaggtgctcggcaaggggatgctgccggagaagcccatcgtcgtcaaggccaagctcatctccaagatcgccgagaagaagatcaaggccgccggcggcgctgtcgtgctcgttgcctagggttctgttcgcgactgtgccttgagatcatattatatctttactattagttgtttcccgtaccagcaatttgtgttgaacaagacatcgttagtttgtt

SEQ ID NO: 3843 - DNA, 859 bp, Triticum aestivum
  N_region (181)..(181): n = any nucleotide
  N_region (192)..(193): n = any nucleotide
  N_region (203)..(204): n = any nucleotide
  N_region (210)..(211): n = any nucleotide
  N_region (315)..(316): n = any nucleotide
  N_region (334)..(334): n = any nucleotide
  N_region (336)..(337): n = any nucleotide
  N_region (345)..(345): n = any nucleotide
  N_region (347)..(348): n = any nucleotide
  N_region (356)..(358): n = any nucleotide
ggcgcccgagcaaggagcagcaactcctttagcctcgcagaaccccacctcgctggcccgagcaggggtggagcgcctcgtcctcgcctccatctaagcgcagagagagagagatggcgagggctggatctggctaggtggccatggagaatgacgacttggccctgcagccgatgccaanctcatcaactnntcttcccagnntagcannagaagtcaagcccttttgtggtacgatctatcccgaaggaggtcgtcccccgagcccgcatccctgtcgtcgaccttgcgcacagggaaggtcgcaatctgcgnntcatcgaggccggtgggntnntcatctgncnnttccaccnnntctacgagaagctcatggccgagaacccgcacacggtcctcgccgttgacgtttactgcgacaagatccgccatctcgtggacccgcccccgccccacctcgccggccgcatctccttccaccgcctcaacttcaagaacgactcccgcctcgagggcctcatcaagatggccgatctgacgataaacctggcggcgatctgcatgccggcggactacaacacgcgcccgctcgacaccatctacagcaacttcatcgacgcgctccctgtggtcagacttggagaacagcaagcgtctgatccacttctccacgtgcgaggtctacggcaagaccatcggcagcttcctccccaaggaccaccccctccgcaaggttatttgcatcttgattaggagatgatggtgatcatcttttgttgcgggaacctgttagataaagtttatgtgatttgaacctgcaagatacagttctgtataatgttgtgtgagataaaagttg

SEQ ID NO: 3844 - DNA, 1500 bp, Triticum aestivum
acggatctggacggcgccgccgtggcgccgctgaccatctgcgtgatcggcgccggcggcttcatcggctcgcacctctgcgagaagctcatggccgagacccagcacacggtcctcgccgtgcgacggtctacgtgggacaagatccgccacctcgtcgacccgcccccgccccacctcgccggacgcatctccttccaccgcctcaacatcaagaacgactcccgcctcgagggcctcatcaagatggccgatctgacgataaacctggcggcgatctgcacgccggcggactacaacacgcgcccgctcgacaccatctacagcaacttcatcgacgcgctcccggtggtcaagtactgctcggagaacagcaagcgcctgatccacttctccacgtgcgaggtctacggcaagaccatcggcagcttcctccccaaggaccaccccctccgcaaggaacctgaattttatgtgctgacagaagatgagtcaccctgcatctttggtccaatcgtgaaacagagatggtcctacgcgtgtgcaaagcagcttatcgagaggcttgtttttgctgaaggcgcagaaaatggccttgaattcacgattgtgagacctttcaattggattgggccaaggatggacttcattcctggcgttgatggtcctagcgagggtgttcctcgggttttggcttgcttcagcaacaatctcctccgtagagagcccctgaagcttgtcgatggcggcgagtcccagagaacttttgtttacatcaaggatgccattgaagctgttcttctgatgattgaaaaccctgctcgagccaatggtcatatcttcaacgttgggaaccccgacaatgaagtcactgttagggagttggccgaaatgatgacagaggtctacgctaaggtctcaggagagcccccgctggaggagcctgtggtcgacgtgagcgcgaaagaattctacggcgaagggtacgacgacagcgacaagaggatccctgacatgaccctgatcaacaagcagctagggtggaaccccaagacccctctcaaggacctgctggagacgacgctgacctaccagcacaagacctacaaggaggctgtgaagacgcagatgtgtctggccacggcgacgccttcaagctagacgatgacggcgcggccatgctgctcttgatcttttggaagccagatacttatatcgtagtgaaaccgtcgtcgtcgtttttgtcgcgcctctagatcacacccacccatcttcttacctacctagattcgtcattgtgtaaccctatattgggcaaagggaactgagtatctattatacctgtggtggcagtgtttgttatgtttggttggttgcacctcccgtgctattcttttgctgttagtgagagatatattcttgttcggcatagttgatgatgatgtgagattacagtctgggagccttattactgtagtttttagcagagttaatgtcgag

SEQ ID NO: 3845 - DNA, 594 bp, Triticum aestivum
gccaacttcaccgcccaggtcatcatcatgaaccaccctggccagatcagcaacggctatgccccggtgctggactgccacacgtcccacatcgctgtcaagtttgctgagatccagaccaagatcgaccggcggtctggcaaggagattgaggcggcgcccaagttcctcaagaacggtgatgccgggttcgtcaagatgatccccaccaagcccatggtggtggagaccttcgcccagtaccctcccctgggccgctttgctgtgcgcgacatgaggcagacggttgccgtgggcgttatcaaggccgtggagaagaaggatccgaccggcgccaaggtgaccaaggctgcggccaagaagaaatgagatggtgtcgggcggcggcgtcgttggtggttctttaccacatctatggtggtggcggcggtatacggtggtggtcatagtcgtgttagcggatttgcaaacttgttaagcttcggttatttgtgtcgagcagtgttcgaactgcttattactgtggtcagcatagtatcgttccttgtgttggtgaaacttcgtcagataaagttgctattttatatatgcgtg

SEQ ID NO: 3846 - DNA, 734 bp, Triticum aestivum
gccgtcaaggatctcaagcgtgggtatgtcgcttccaactccaaggacgaccctgccaaggaggctgccaacttcaccgcccaggtcatcatcatgaaccaccctggccagatcagcaatggctacgccccggtgctggactgccacacgtcccacatcgccgtcaagttcgctgagatccagaccaagattgaccggcggtctggcaaggagattgaggcggcgcccaagttcctgaagaacggtgatgccgggttcgtcaagatgatccccaccaagcccatggtggtggaaaccttcgcccagtaccctcccctgggccgctttgctgtgcgtgacatgaggcagacggttgccgtgggcgttatcaaggctgtggagaagaaggatccgaccggcgccaaggtgaccaaggctgcggccaagaagaaatgagatggtgtcgggcggtggcgtcgttcgtggtactttaccacatctgtggtggtggtggcggtatacggtggtggttatagtcgtgttagcgaatttgcgaacttgttaagcttctgttatttgtgtcgagcagtgttcgaactgcttattactgtggtcatagtattgttcggttgtgttggtgaaacttcgtcagataaaattgctattttatatatgcgtgatatttggagtcattttatgtctgctgctgcctctacaagtatatttgataatggtgtttgttttgcaaggtggat

SEQ ID NO: 3847 - DNA, 622 bp, Triticum aestivum
tgccaacttcaccgcccaggtcatcatcatgaaccaccccggccagatcagcaacggctacgccccggtgctggactgccacacgtcccacatcgctgtcaagttcgctgagatccagaccaagatcgaccggcggtctggcaaggagattgaggcggcgcccaagttcctcaagaacggtgatgccgggttcgtcaagatgatccccaccaagcccatggtggtggagaccttcgcccagtaccctcccctgggtcgctttgctgtgcgtgacatgaggcagacggtcgccgttggcgtgatcaagagcgtggagaagaaggatccgaccggcgccaaggtgaccaaggctgcggccaagaagaaatgagatggtgtcgggcggtggcgttgttggtggttctttaccacatctatggtggtggtggcggtatacggtggtggtgatagtcgtgttagccgatttgcgaacttgttaagctttggttatttgtgtcgagcagtgttcgaactgcttattactgtggtcatagtatcgttcggttgtgttggtgaaacttcgtcagataaagttgctattttatatttgagtgatatttggagtcgttttatatctgctgcc

SEQ ID NO: 3848 - DNA, 1210 bp, Triticum aestivum
aaaaccctagcagcgaaatccactcgatcgaaaaagttcttcgtctccctctcgcggaatccacagcgcagaccggccgatcccccgcggaagagcagcagcagagatggcgcagtccggcaacaacgacgccgccccgatcagcacccagcccgcggcggaggatgtgacggtggagaggacgcccgaggaggaggaggccaggctgaggtacctcgagttcgtgcagcaggcggcggcgcaggcggtcgtgctggccgccgcggcctacgcgtacgccaagcagggcgccggccccctccgccccggcgtcgaccacgtcgaggggaccgtcaaggccgtcgtcggccccgtctacgaccgctaccacgccgtgccgctcgacctcctcaagttcctcgaccgcaaggttgacgagtctgtccaggaactggaccgccgtgttccacccgtcgtgaaggaggtgccgacctatgcccgctctgcagcagctgaggtgcagaagacaggcataatgggcacagcaactggactgggccaagtcggccattgcttgtgctgagcccaaggcccgtgacttgtatacccgctacgagcctgtggcggagcgcaaggctgccgaagcctgggccgccctgaaccgcctcccgctcgtcccctcggtgacccgtgctgtcctccccacagctgcacagctctcagcgaagtacaactctgccgtgcttgatggcgctaagcgtggcaattccgtcgccacctacctgccactcgtcccaacggagcgcattgcaagggtgttcgccaacccgtccgctgatactgcgcctgccacagctcctgagatgcagcccataccgacgcagtaacaataagagctacccgttgttatgttacctaatagctgttaggagtcagtatctcgttgtgtagtgtcttgtttggcttgtggtggaccgtggtattatgtgtggatggtcactgtggtatccgcctgtctggaagcgactctgaatgctgttgctgtgcagcaaagcctgctttgcgttttagtttgttctgcatgaaccactgtgtaatgctttgaatcaaagttgcatgaaacaccatctgtaaattcacattctatttttatgtttgtgtgtattgactgtcaattggcattgtttacaactgctctgcagttatttgcatgtgatgaattgtttataca

SEQ ID NO: 3849 - DNA, 825 bp, Triticum aestivum
gttacgaccgctaccacgccgtgccgctcgacctcctcaagttcctcgaccgcaaggttgatgagtctgtccaggagcttgatcgtcgtgtcccaccggtcgtgaaggaggtgccaacctatgcccgctctgcagcagctgaggtgcagaagacaggcataatgggcacagcaactggactggccaagtcggccattgctcgcgctgagccaaaggcccgcgacttgtatacccgctacgagcctgtggccgagcgcaaggctgccgaagcctgggctgccctgaaccgcctcccgctcgtcccctcagtgacccgtgccgtcctccccacagctgcacagctctcagccaagtacaactctgccgtgcttgatggtgctaagcgtggcaactccgtcgctacctacctcccgcttgtcccaacggagcgcatcgcaagggtttttgcctacccggcagctgaccctgcgcctgccacagctcctgagatgcagcccatcccgacgcagtaacaataagagctacccggagttttattattacctaatagctgtaggagtcggtatctcgatgtagtgtcttgtctggcttgtggtggacagtggtactatatgtggatggtcactgtggtatccgcctctgttgaggggattcgaatgctgttgctgtgcagcaacacctgctttgtgttttagtttgttcttcatgaaccactgtgtgtaatgctttgaatcaaagttacaggaaacaccatctgtaaattcattactgtttttatgcgagtgtgtatcgactgttggcactgttttattcgctattacaaga

SEQ ID NO: 3850 - DNA, 1689 bp, Triticum aestivum
tcggctccttctccttccttccagtttcagccatgggtaaggagaagactcacatcaacatcgtggtcattggccatgtcgactctggcaagtcgaccatcactggccagctgatctacaagcttggaggtatcgacaagcgtgtgatcgagaggttcgagaaggaagccgctgagatgaacaagaggtccttcaagtacgcctgggtgcttgacaagctgaaggccgagcgcgagaggggtatcaccattgatattgccctgtggaagtttgagaccaccaagtactactgcaccgtcattgatgcccctggtcaccgtgacttcatcaagaacatgatcaccggtacctcccaggctgactgtgctgttctcatcatcgactccaccactggtggttttgaggctggtatctccaaggacggccagacacgtgagcatgccctccttgctttcactcttggagtgaagcagatgatctgctgctgcaacaagatggacgccaccactcccaagtactcaaaggcgcgttatgaagaaattgttaaggaggtctcttcctacctgaagaaggtcggctacaaccctgaaaaggttcccttcgtccccatctctgggtttgagggtgacaacatgattgagaggtccaccaaccttgactggtacaagggcccaacccttcttgaggcgcttgaccagatcaacgagcccaagaggccctcagacaagcccctccgtcttcccctccaggacgtttacaagattggtggcattggaactgtgcctgttggccgtgttgagactggtgtcatcaagcctggtatggttgtcacctttggtcccactggtctgacaactgaggtcaagtccgttgagatgcaccatgagtctctcctggaggcgcttcctggtgacaacgttggcttcaatgtcaagaatgttgccgtgaaggatctgaagcgtggttttgttgcatccaactccaaggatgaccctgccaaggaggcagccaacttcacctcccaggtcatcatcatgaaccaccctggtcagattggcaacggctacgccccagtgctggactgccacacctcgcacattgctgtcaagtttgctgagctggtgaccaagattgacaggcgatctggtaaggagctggaggccctgccaaagttcctcaagaatggtgatgctggcatagtgaagatgattcccaccaagcccatggttgtggagacctttgctacttaccctcctcttggtcgttttgctgtacgtgacatgaggcaaactgtggctgttggtgtcatcaagggcgtcgagaagaaggacccaaccggggctaaggtgaccaaggctgccatcaagaagaagtaatttgacaattgatatccaaatcactgtttcaggcaccaagcagtttttagtattggctgagttttgttaagggcattgttcgtactgggtatattctagctgttcagctgttagcgctgcatatcgtgcccttagtggtgtctgtcttgtgccttctacatactgtcctaatgtaagcttcggtgaaacctggatgttatgagacttggttgtgtcttttaatactagtttgttgaattttatctgtgtagatgctttatctagtgcatttttggatgcatctaaacgttcttttgttttgaaggtgtcctta

SEQ ID NO: 3851 - DNA, 755 bp, Triticum aestivum
gtctgacactgaggtcagtctgttgagatgcaccacgagtctctcctggaggcgcttcctggtgacaacgtcggcttcaacgttcaagaacgttgccgtgaaggatctgaagcgtggttttgttgcatccaactccaaggatgaccctgccaaggaggcagccaacttcacctcccaggtcatcatcatgaaccaccctggtcagattggcaacggctacgccccagtgctggactgccacacctcgcacattgctgtcaagtttgctgagctggtgaccaagattgacaggcgatctggtaaggagatagaggccgcgcccaagttcctcaagaatggtgatgctggcatagtgaagatgattcccaccaagcccatggttgtggagacctttgccacttatcctcctcttggtcgttttgctgtccgtgacatgaggcagactgtggctgttggtgtcatcaagggcgtcgagaagaaggacccaaccggggccaaggtgaccaaggctgccatcaagaagaagtaattcgacattgatatccaaatcactgttcagacaccaagcagtttttagtattggctgagttttgttaagggcattgttcgtactggtatattttagctgttcagctgttagcgctgcatatcgtgcccttggtggtcgtctgtcttgtgccttttacatactgtgtcctaatgtaagcttcggtgaaacctggatgttatgagacctggttgtgtcttttaatact

SEQ ID NO: 3852 - DNA, 1644 bp, Triticum aestivum
ccccgaccgccgtcgtcgccgtcgcctcctcctctcggttccctctccttccttcggagacttcagccatgggtaaggagaagactcagatcaacatcgtggtcattggccacgtcgactctggcaagtcgacgaccactggccacctcatctacaagcttggaggcattgacaagcgtgtgatcgagaagttcgagaaggaagccgctgagatgaacaagaggtctttcaagtatgcctgggtgcttgacaagctcaaggctgagcgtgagaggggtatcaccattgatattgctctgtggaagtttgagaccaccaagtactcctgcactgtcattgatgctcctggtcaccgtgacttcatcaagaacatgatcactgggacctcccaggctgattgtgctgtgcttatcattgactccaccactggtggttttgaggctggtatctccaaggatggccagacccgtgagcacgctctccttgctttcactcttggtgtgaagcagatgatctgctgctgcaacaagatggatgccaccactcccaagtactcgaaggcccgttatgaagaaattgtcaaggaagtctcttcatacctgaagaaggttggttacaatcctgacaaggttccctttgttcccatctctgggttcgagggtgacaacatgattgagaggtccaccaaccttgactggtacagggccccaccctgcttgaggcacttgaccagatcaacgagcccaagaggccctcagacaagcccctccgtcttcccctacaggatgtttacaagattggtggcattggaactgtgcctgttggccgtgttgagactggtgtcatcaagcctggtatggttgttacctttggtcccactggtctgacaactgaggtcaagtccgttgagatgcaccatgagtctctcctggaggcgcttcctggtgacaacgttggcttcaacgtcaagaacgttgccgtgaaggatctgaagcgtgggtttgttgcatccaactccaaggatgaccctgccaaggaggcagccaacttcacctcccaggtcatcatcatgaaccaccctggtcagattggcaacggctacgccccagtgctggactgccacacctcacacattgctgtcaagtttgctgagctggtgaccaagatcgacaggcggtctggtaaggagctggaggccctgcccaagttcctcaagaatggtgatgctggcatagtgaagatgattcccaccaagcccatggttgtggagacctttgccacttaccctcctcttggtcgttttgctgtccgtgacatgaggcagactgtggctgttggtgtcatcaagggcgttgagaagaaggacccaaccggggccaaggtgaccaaggctgccatcaagaagaagtaattccacaattgatatccaaatcactgtttcagacaccaagcagtttttagtattggctgagttttgttaagggcattgttcgtactgggtatattttagctgttcagctgttagcgctgcatatcgtgcccttggtggtgtctgtcttgtgccttacatactgtcctaatgtaagctttggtgaaacctggatgttatgagacctggtttgtgtcttttaatactagcttgtt

SEQ ID NO: 3853 - DNA, 1036 bp, Triticum aestivum
caaaccacaaatggcgatagagcacaataatggaatcgaaatagagtatttaaacgacacatcatagctcgcacacaggtgcaggagtcggaagtgcaacaacgcccaggaacaccacttaacatacactaagattctccaaaaaagacttgacactaaaacttctgctagataactcgatggcagacaccagagcactcatttcttcttgatggcagccttggtaaccttggcgccggtggggtccttcttctcaacgcccttgatgacaccaacagcaaccgtttgtctcaagtccgttgagatgcaccacgagtccctcctggaggcgcttcctggtgacaatgtcggcttcaacgtgaagaacgttgctgtcaaggatctgaagcgtgggtttgttgcatccaactctaaggatgaccctgccaaggaggcagccaacttcacctctcaggtcatcatcatgaaccaccctggtcagatcggcaacggctacgccccagtgctggactgccacacctcccacattgctgtcaagtttgctgagctggtgaccaagattgacaggcgatctggtaaggagattgaggctgcgcccaagttcctgaagaacggtgacgctggtattgtgaagatgattcccaccaagcccatggttgtggagaccttcgccacctacccacctcttggccgcttcgctgtgcgtgacatgagacaaacggttgctgttggtgtcatcaagggcgttgagaagaaggaccccaccggcgccaaggttaccaaggctgccatcaagaagaaatgagtgctctggtgtctgccatcgagttatctagcagaagttttagtgtcaagtcttttttggagaatcttagtgtatgttaagtggtgttcctgggcgttgttgcacttccgactcctgcacctgtgtgcgagctatgatgtgtcgtttaaatactctatttcgattccattattgtgctcttatcccatttgtggttttgtctgcctgtgttgaatgctcttaatagatgga

SEQ ID NO: 3854 - DNA, 757 bp, Triticum aestivum
ggtctgacaacttgaggtcaaagtctgttgaggatgcaccacgagtctctgctggaggcgcttcctggtgacaacgtcggcttcaatgtcaagaacgttgctgttaaggatctgaagcgtgggtttgttgcatccaactccaagggatgaccctgccaaggaggcggccaacttcacctcccaggtcatcatcatgaaccaccctggtcagatcggtaacggctatgccccagtgctggactgccacacctcccacattgctgtcaagtttgctgagctggtgaccaagatcgacaggcgatctggtaaggagctggaggcgctgcccaagttcctcaagaatggtgacgccggtatcgtgaagatgattcccaccaagcccatggttgtggagaccttcgccacctaccctcctcttggccgctttgctgtgcgtgatatgagacaaacggttgctgttggtgtcatcaagggcgtggagaagaaggaccccaccggtgccaaggttaccaaggctgccatcaagaagaaatgagtgctctggtgtctgccatcgagttatctagcagaagttttagtgtcaagtcttttttggagaatcttagtgtatgttaagtgttattcctgggcgttgttgcactttgactcctgcacctgtgtgcgagctatgacgtgtcgtttaaatactctatttcgattccattattgtgctctcatcccatttgtggttttgtctgcctgtgttgaatgctagtac

SEQ ID NO: 3855 - DNA, 799 bp, Triticum aestivum
tgcgccccgctcgagaagcctggtatggtgttacctttggtcccacttggtctgacaactgaggttcaagtctgttgagatgcaccacgagtctctcctggaggcgcttcctggtgacaacgtcggcttcaacgtcaagaacgttgctgtgaaggatctgaagcgtggctttgttgcatccaactccaaggatgaccctgccaaggaagcggccaacttcacctcccaggtcatcatcatgaaccacctggtcagatcggcaacggctacgccccagtgttggactgccacacctcccacattgctgtcaagttcgccgagctggtgaccaagatcgacaggcgatctggtaaggagctggaggcgctgcccaagttcctgaagaacggtgacgctggtatcgtgaagatgattcccaccaagcccatggttgtggagaccttcgccacctaccctcctcttggccgcttcgctgtgcgtgacatgagacaaacggttgctgttggtgtcatcaagggcgtggagaagaaggaccccaccggtgccaaggttaccaaggccgccatcaagaagaaatgagtgctctggtgtctgccatcgagttatctagcagaagttttagtgtcaagtcttttttggagaatcttagtgtatgttaagtgttcctgggcgttattgcactttgactcctgcacctgtgtgcgagctatgatgtgtcgtttaaatactctatttcgattccattattgtgctcttatcccatttgtggttttgttttcctgtggtgaatcctagtact

SEQ ID NO: 3856 - DNA, 761 bp, Triticum aestivum
ctggtatggttgttaccttgggtcccagtggtctgacaactgaggtcaagtctgttgagatgcaccacgagtctctcctggaggcgcttcctggtgacaacgtgggcttcaacgtcaagaatgttgccgtgaaggatctgaagcgtggttttgttgcatccaactccaaggatgaccctgccaaggaggcagccaacttcacctcccaggtcattatcatgaaccaccctggtcagattggcaacggctacgccccagtgctggactgccacacctcacacattgctgtcaagtttgctgagctggtgaccaagattgacaggcgatctggtaaggagatagaggccgcgcccaagttcctcaagaacggtgatgctggcatagtgaagatgattcccaccaagcccatggttgtggagacctttgccacttaccctcctcttggtcgttttgctgtccgtgacatgaggcaaactgtggctgttggtgtcatcaagggtgtggagaagaaggacccaactggcgccaaggtgaccaaggctgccatcaagaagaaatgaggcgtttacctgaatccgtctatgtctgctttttgagatctctagtagtttagtgcctattaagttttgctactgttagcgccgtgtgatatgcgccctgttgatgtgtcatttgagtactgtcgttaatttcggcttttgacaaaacatggaagcttctgagactactcatttttatcctctgctttggaatgttaggct

SEQ ID NO: 3857 - DNA, 807 bp, Triticum aestivum
tggtgtcatcaaccttggtatgttgttacctttggtcccactggtctgacaactgaggtcaagtccgttgagatgcaccatgagtctctcctggaggcgcttcccggtgacaacgtcggcttcaacgtcaagaatgttgccgtgaaggatctgaagcgtgggtttgttgcatccaactccaaggatgaccctgccaaggaggcagccaacttcacctcccaggtcatcatcatgaaccaccctggtcagattggcaacggctatgccccagtgctggactgccacacctcgcacattgctgtcaagtttgctgagctggtgaccaagatcgacaggcgatctggtaaggagctggaggccctgcccaagttcctcaagaatggtgatgctggcatagtgaagatgattcccaccaagcccatggttgtggagacctttgctacttaccctcctcttggtcgttttgctgtccgggacatgaggcaaactgtggctgttggtgtcatcaagggtgtggagaagaaggacccaaccggcgccaaggtgaccaaggctgccatcaagaagaaatgaggcgtttacctgaatccatctatgtctgcttttgagatctctagtagtttagtgcctattaagttttgctactgttagcgccgtgtgatatgcgccctgttgatgtgtcatttgagtactgtcgtgttaatttcggcttttggcaaaacatggaagcttctgagactactcatttttatcctctgctttggaatgttaggctgctacttttagtcttggctgctgtttctcgtt

SEQ ID NO: 3858 - DNA, 1647 bp, Triticum aestivum
atcgccgccgcaggctttgactccatcgcctctccctcctcttcgtctccggccggccaggtagttaacagctccagcagccatggggaaggagaagatccacatcagcattgtggtcattggccatgtcgactctggcaagtcaaccacgaccggccacctcatctacaagcttggaggcattgacaagcgtgtgatcgagaggtttgagaaggaagccgctgagatgaacaagaggtctttcaagtatgcctgggtgcttgacaagctcaaggctgagcgtgagaggggtatcaccatagatattgctctgtggaagttcgagaccaccaagtactcgtgcactgtcattgatgctcctggtcaccgtgatttcatcaagaacatgatcactgggacctcccaggctgattgtgctgtgcttatcattgactccaccactggtggttttgaggctggtatctccaaggatggccagacccgtgagcatgctctccttgctttcactcttggtgtgaaacagatgatctgctgctgtaacaagatggatgccaccactcccaagtactcgaaggcccgttatgaagaaattgtcaaggaagtctcttcatacctgaagaaggtcggttacaaccctgacaaggttcccttcgttcccatctctgggttcgagggcgacaacatgattgagaggtccaccaaccttgactggtacaagggccccacccttcttgaggccctggaccagatcaatgagcccaagaggccctccgacaagcccctgcgtcttccccgttcaggacgtgtacaagattggcggcattggaactgtgccagtggggcgtgttgagactggagtcatcaagccaggcatggttgtcacctttggtcctactggcctgaccactgaggtgaagtctgtggagatgcaccacgagtctctcctggaggcgcttcctggtgacaacgtcggcttcaacgtcaagaatgtggctgtcaaggatctcaagcgtgggtacgtcgcttccaactccaaggacgaccctgccaaggaggctgccaacttcaccgcccaggtcatcatcatgaaccaccctggccagatcagcaacggctatgccccagtggctggactgccacacgtcccacatcgctgtcaagtttgctgagatccagaccaagatcgaccggcggtctggcaaggagattgaggcggcgcccaagttcctcaagaacggtgatgccgggttcgtcaagatgatccccaccaagcccatggtggtggagaccttcgctcagtaccctcccctgggccgctttgctgtgcgtgacatgaggcagacggttgcggtgggcgttatcaaggccgtggagaagaaggatccgaccggcgccaaggtgaccaaggctgcggccaagaagaaatgagatggtgtcaggttctttactgcatctatgatggtggtggcggtgacggcatttggtggtggtgatagttgttctagtcgttttgaaaacttgttaagcttcggttatttgtgtcgagcagtgttggaactgcttattgctctggtcattgtatcgttcggttgtgttggtggaactttgtcagttaatgttgctactatatatagtcatcatgtttgg

SEQ ID NO: 3859 - DNA, 902 bp, Triticum aestivum
cccaagaggccctcagacaagcccgctccgtcttccccttcaggacgtgtacaagattggcggcattggaactgtgccagtgggccgtgttgagactggagtcatcaagccaggcatggttgtcacctttggtcctactggcctgaccactgaggtgaagtccgttgagatgcaccatgagtctctcctggaggcgcttcctggtgacaacgtcggcttcaacgtcaagaacgtggctgtcaaggatctcaagcgtgggtacgtcgcttccaactccaaggacgaccctgccaaggaggctgccaacttcaccgcccaggtcatcatcatgaaccaccccggccagatcagcaacggctatgccccggtgctggactgccatacgtcccacattgctgtcaagtttgctgagatccagaccaagatcgaccggcggtctggcaaggagattgaggcggcgcccaagttcctcaagaacggtgatgctgggcttcgtcaagatgatccccaccaagcccatggtggtggagacctttgcccagtaccctcccctgggccgctttgctgtgcgtgacatgaggcagacggttgccgtgggtgttatcaaggctgtggagaagaaggatccgaccggtgccaaggtgaccaaggctgcggccaagaagaaatgagatggtgtcaggttctttactgcatctatggtggcggtggcggtatttggtggtggtgatagttgttctagttgttttggaaacttgttaagcttcggttatttgtgtcgagcagtgttggaactgcttattgctctgtcattgtatcgttcggttgtgttggtgaaacttcgtcagttaatgttgctactatatatagttggcatgtttggagtcgttttatatcagttg

SEQ ID NO: 3860 - DNA, 794 bp, Triticum aestivum
ggaggcgcttccgggacaagtcggcttcaacgtcaagaacgtggccgtcaaggatctcaagcgtggatacgtcgcttccaactcgcaaggacgaccctgccaaggaggctgccaacttcaccgcccaggtcatcatcatgaaccaccctggccagatcagcaacggctatgcccccggtgctggactgccacacgtcccacattgctgtcaagttcgctgagatccagaccaagattgaccggcggtctggcaaggagattgaggcggcgcccaagttcctgaagaacggtgatgccgggttcgtcaagatgatccccaccaagcccatggtggtggaaacctttgcccagtaccctcccctgggccggtttgctgtgcgcgacatgaggcagacggttgccgtgggcgttatcaaggccgtggagaagaaggatccgaccggcgccaaggtgaccaaggctgcggccaagaagaaatgagatggtgtcaggttctttactgcatctatggtggtggtggcggtggcggtatttggtggtggtgatagttgttctagtcgttttgagaacttgttaagcttcggttatttgtgtcgagcagtgttggaactgcttattgctctggtcattgtatcgttcggttgtgttggtggaactatgtcagttgatgttgctactaaatatagtcgtcatgtttggagtcgttttatatcagttgatcatgtttcttgtcatgcaaagttgaatttttgttttgcttccttaactattcctattcctgtgcttcttttgca

SEQ ID NO: 3861 - DNA, 721 bp, Triticum aestivum
gttcttctgtgacaaatgctgcagtttacaagaagcacagaaaagaatgaagataaagaaacagccaaacatcctggtaatccatctcaagcgcttcaagtacatcgagcagcttgggcgctacaaaaagctgacataccgagttgttttcccactggagcttaaactcatgaacacggtcgacaactcagacttggaatattccctcttcgctgtgctagtccacgtcggaagtgggccaaaccatggccactacatcagcgtggtaaagagccacaaccactggttgttcttcgacgatgagactgttgagatgaccgatgagtccatggtacagacattcttcggctcggcacaggagttcagtggtaacaccgacaatggctacatactcttctacgaaagcgtcgctaaaacaagctgatgccttccgtatatctcgtgattagcaacacggtttttttttccttttgtcgccacaccccctgctccgtgctatatagaagattcggtaaatcagaataattagaatggcaaagaccattcaaccttagatgctttggtggagtcagtgcttagcaataaaagaagctgtgacgagttttgcgggtgggtactatagccgccgaatcttgcagtcttcttgatgttgtgtttccgttgtgttgtggcgcaagtttgtattgatctggaataatgtttctcaagaagatcttatcat

SEQ ID NO: 3862 - DNA, 688 bp, Triticum aestivum
ttcagttacaagaagcacagaaagaagaagataaagaaacagccaaacatcctggtaatccatctcaagcgcttcaagtacatcgagcagcttggccgctacaaaaagctgacataccgagtcgttttcccactggagcttgaaactcatgaacacagtcgacaactcagacttggaatattccctctttgctgtgctagtccacgtcggaagtgggccaaatcatggccactacatcagcgtggtaaagagccacaaccactggttgttcttcgacgatgagactgttgagatgaccgatgagtccatggtacagacattcttcggctcagcacaggagttcagtggtaacaccgacaatggctacatactcttctacgaaagcgtcgctaaaacaagctgatgccttcctgcgtatctcgtgattagcaacacagtttttcattttgtcaccacacctactgctccgtgctatatagaagattcggtaaattagaataattagaatggcaagaccattcaaccttagatgctttggtggagtcagtcagtgcttagcaataaagaagctgtgacgagttttgcgggtgggtgctgtagccgccgaagcttgcagccttcttgctgttgttttccgttgtggcgcaagtttgtatcgatctggaataatgtttcttaagaagatctt

SEQ ID NO: 3863 - DNA, 1113 bp, Triticum aestivum
aaaatttgttgacctgcttggcagatctttttgcgcagataagcctatcgaagaaaaagactggtgttatttctccaaaacgttttgtccatagagtgaggaaacagaatgaattgtttcgtagtaatatgcaccaggatgcccatgaatttttgaattttttgttgaatgagattgtcgatattctggaaaaagagtttagtactgtgaaggattctcctgaaagcacatcccctggaggggtggcaaatggcgaagtttatcatttagccaatgaagttcgaagggagccgctggttacatgggtccacaagaattttcagggtattttgaccaatgaaacaaagtgcctgatgtgtgagactgtcaccgcaaaggatgagacatttttagatttgagcatcgacattgaacagaatagttcactaacaagctgcctgaagagtttcttttccaccgagattttaaatgccgaggacaagtttttctgtgacaactgctgcagtttgcaagaagcacagaagagaatgaagataaaaaaggcgccacaaatattggtgatccacttaaagcgcttcaagttcattgaacagctgagtcagcacaagaaactgtcataccgagtggtataccccatggagctgaagctgagcagtgcctctgatgatgtggattgcgaatactcactctttgctgtggtagtccacgttgggaacgctgccaaccacggacattatgtaagccagattaaaagcggcgaccactggctgtcatttgacgatgacagtgttgacaaaattcaggagtcaaccctgcaaacgttctatggttcttctcgcgaatattctggcaacagcgatcatggctacatcttgttctatgagagcgttgcaaagagctaggaattttccaggattagtgctagcgctgaaaataataattacagtgtgcaggatgggaacctgataccttttggtttcaaaatttcctcagtttatttactgcactgcaatagaatatagagtaattcgataagtgaaagttcgactaaagtttttcttgtaacagagaccaaacgggtattcagattcggacagaacttgtatggcgatt

SEQ ID NO: 3864 - DNA, 593 bp, Triticum aestivum
cactgatgattttgttctgagagcagctacgagatttcagaaaagcaaatggactatgcttcagatgtggagataagtacagcaaggaacatcaatgtaagaagcctctgcagctacttactatacaagttggtgaacatggggaagtgtattctattgcagtgcagtaaataaactgaggaaattttgaaaccaaaggtatcaggttcccatcctggacactgtacatattattttcagcactagcactaatcctagaaaattcctagctctttgcaacgctctcatagaacaagatgtagccatgatcgctgttgccagaatattcgcgagaagaaccatagaacgtttgcagggttgactcctgaattttgtcgacactgtcatcgtcaaatgacagccagtggtcgccgcttttaatctggcttacataatgtccgtggttggcggcgttcccaacgtggactaccacagcaaagagtgagtattcgcaatccacatcatcagaggcactgctcagcttcagctccatggggtataccactcggtatgacagtttcttgtgctgactcagctgttcaatgaacttgaag

SEQ ID NO: 3865 - DNA, 1289 bp, Triticum aestivum
agagccttaatcttgatgctgcaaagaagaaggtgcttgattttgtagagggtgaaatgggttacatcgcacctaacctatctgcaattgttggcagtgctgttgctgcaaaattgatgggaattgctggtggtttgggagcacttacaaaaatgcctgcttgcaatgttcagctacttggagcaaagaagaaaaatcttgctgggttttctagtgccacatctcagtttcgtgttggctatcttgaacaagccgaagtatttcagagcacccctccagccctgaggacccgtgcttgcagggttatagctgcaaaggcaactctagcagcaagaattgattcaactagaggtgatccaactggaaaagctggtcgcaacttgttagaagaaattcgcaagaagatcgagaagtggcaagaaccacctcccgcaaagcttccaaaaccacttcctgttccagattccgaacctaaaaagaagagagggggtcgccgccttcgaaaaatgaaagaaagatatgcggtgactgatatgatgaagcttgcaaaccgaatgcagtttggtataccagagtagagctcattaggtgatggtttgggggaaggttatggcatgcttgggcaggccggaagtgggaaactacgtgtctcagctgcgcaaaacaaacttgctgctaaagtggcaaagaaattcaaggagaggagttatggtagcggtggcgcaacatctggactgacatctagtttagcctttacaccagttcaggggatagagctgtcgaacccacatgcccacgggaaccttcttggaagtggaacacagagcacctatttctccgagacggggacgctttctcggatcagtaggccctgactgcggttggaatccgaacatgaaaagggcctgagattagaagagaggattgtttcttggtcccggcgattccatctcattctgcacacaacgctcaagagctcttgggattcttgcaccaggacataatcaacttgtcttctcagttgtaccgtggggttttgtatatgtaagtacagttagcggcttagcgcacaacaacatcacagcatatgaagccaggcggcactcaacattacctatgcttgcttggagcgtggataatctttccagaaaacccgccggaattgaattgttggaactgtcttgtctataacatccgccattgcatgctatgcagaggcatgctgaatcattccataccacaatgtgagtcgtggtcgcgatgcaaattttgatattattttgagagtg

SEQ ID NO: 3866 - DNA, 1057 bp, Triticum aestivum
gcaaaaatgcctgcttgcaatgttcagctacttggagcaaagaagaaaaaatcttgctggattttctagtgcccacatctcagtttcgtgttggctatcttgaacaagccgaagtatttcagagcacccctccagctctgaggacccgtgcttgcagggttatagctgcaaaggcaactctagcagcaagaattgattcaactagaggtgatccaactggaaaagctggccgcaacttgttagaagaaattcgcaagaagatcgagaagtggcaagaaccacctcctgcaaagcttccaaaaccacttcctgttccagattccgagcctaaaaagaagagaggtggtcgccgccttcgaaaaatgaaagaaagatatgcggtgactgatatgatgaagcttgcaaaccgaatgcagtttggcataccagaggagagctcattaggtgacggtttgggggaaggttatggcatgcttgggcaggccggaagtgggaaactacgtgtctcagctgcgcaaaacaaacttgctgctaaagtggcaaagaaattcaaggagaggagttatggtagcggcggtgcaacatctggactgacatctagtttggcctttacaccagttcagggaatagagctgtcaaacccacatgcccacggcaaccatcttggaagtggaacccagagcacctatttctctgagacgggcacattttctcggatcaataataggccatgaccgagcttggaatctgaaggcaaaaaggtcctgagattagaagaggggatcgttccccggtcccagcgattccatctcattctgcacacaacactcaagagttcctgggattcatgcacttgcacagaatcagcttgtattctcagctgtatcgcggggttttgtaatgtaagtacacaaagcgcactacaacatcacgaggtctgaagtcaggcagtacccaacgttacctatgcttcgagcgtcaataatcgttctagaaaacccgctggaattgaattgttgaactgtcttgcctgaaacatctgccatgctggatcatt

SEQ ID NO: 3867 - DNA, 686 bp, Triticum aestivum
agcccaacatggtcacccactggttctcgactctcaagaaggtggcccctgaggtgattgctgagtacaccgcccgcacactattccagaggaccgtcccgtgcgtgccgtccccgccattgtcttcctctctggtggacagagcgaggaggaggcgatccctgaactctgaacgccatgaacaagctccagaccaagaagccatggaacctgtccttctccttcgggcgtgccctccagcagagcaccctcaaggcctggtccggcaagacggagaatgaggagaaggccagggcggcgttcctggtgaggtgcaaggccaactctgaggccaccctcgggacctacaagggcgacgccacccttgccgagggcgcctcggagagcctccatgtcaaggactacaagtactgatctgccccccgctggatggtttgggcattcctgcttactacctccgtctgaaaataagtgtctgacacttatttttggacggagtagtatctgtttggtttcatagtcttgatatttttaaatatcaatccttgtttttaataatataagcttctacttatagttaatttttgacgttgaatcccctgtaatacatttgctgagcagaatgtttttgctctaagcggtattgtattttttctgcttacaatgaaatgaaatgtggacccccg

SEQ ID NO: 3868 - DNA, 662 bp, Triticum aestivum
atcccgctcctggtgccgcacatgaacctagcgacgccaagctcgccggctacgaccatccccgccgagtccaagatcctcgtcaacgcctggttcctcgccaacgaccccaagcggtgggtgcgcgccgacgagttcaggcccgagcgcttcctcgaggaggagaaggccgtcgaggcccacggcaacgacttccggttcgtgcccttcggcgtcggccgccggagctgcccagggatcatcctcgcgctgcccatcatcggcatcacgctcgggcgcctcgtgcagaacttccagctgctgccgccgccggggcaggacaagatcgacaccaccgagaagcccgggcagttcagcaaccagatcctcaagcacgccaccatcgtctgcaagccactcgaggcttaattgaattgaggtctcggtcatgggcgcgcgctgacgcggggagatggatccatacatgtgactgtgtgttttgccttctttctttttggtgttttgcagtagtataagtttaatttttctttggtgttggcctatttgtcttcatgtgaggcgtcgtgttgtaaatttccatatagttggcatgtgatgtaatccaaatacgacatgattacaaattttgcaactcggagaaggtcaaaaccacttggtactct

SEQ ID NO: 3869 - DNA, 473 bp, Triticum aestivum
gatgagttcaggccggagaggttcctcgaggatgagaagcccgtcgaggcccacggcaacgatttccggttcgtgcccttcggcgtcggccgccggagctgccccgggatcatcctcgcgctgcccatcatcggcatcacgctcggacgcctggtgcagaacttccagctgctgccgccgccggggcaggacaagatcgacaccaccgagaagcccgggcagtttagcaaccagatcctcaagcacgccaccattgtctgcaagccactcgaggcttaactgaattgaggtttcggtcatgggcgcccgctgacgcggggagatggatctatgcatgtgactgtgtattttgccttctttctttttggtgttgttttttgcagtagtaagtttaatttttctttggtgatggcctatttgtcttcatgtgaggcgtcgtgttgtaaatttccatatagttggcaatgtgatgt

SEQ ID NO: 3870 - DNA, 661 bp, Triticum aestivum
agccatccgctctcggcccacaggacctcacgacccagctcgcggtacgacatccccgcgagtccagatcctcgtcacgcctggttcctcccaacgaccccaacggtgggtgcgcgccgacgagttcaggcccgagcggttcctcgaggaggagaaggccgtcgaggcccacggcaacgacttccggttcgtgcccttcggcgtcggccgccggagctgccccgggatcatcctcgcgctgcccatcatcggcatcacgctcggacgcctggtgcagaacttccagctgctgccgccgcccgggcaggacaagatcgacaccaccgagaagcccgggcagttcagcaaccagatcctcaagcacgccaccatcgtctgcaagccactggaggcttaagaattttcgatgaacgacatggaggtttatggcatgcgtgcgtccacgctgatgcggggagatccatctatgcatgtgactttgtattttgcatttcttttttggtgttttgtagtagtataagtttaaattatttttttggtgttgggctatttgtcttcatgtgaggcgtcgtgttgtaaatttccatatataatgtgatgtaaaacttcttggctccaaaaaacgacatggttactcattttgcatgcaactccgagctgg

SEQ ID NO: 3871 - DNA, 734 bp, Triticum aestivum
ttataaggccctcaacgacctagcatgtcctcctccgagggcactctcctgaagcccaacatggtcacccctggttctgactccaagaaggtggcccctgaggtgattgctgagtacaccgtccgcaccctccagaggaccgtccctgctgccgtccccgcctattgtcttcctctctggtggacagagcgaggtaggaggcgatccctgaacctgaacgccatgaacaagctccagaccaagaagccctggaacctgtccttctccttcgggcgtgccctccagcagagcaccctcaaggcctggtccggcaagacggagaacgaggagaaggccagggcggcgttcctggtgaggtgcaaggccaactccgaggccaccctcggcacctacaagggcgacgccaccctcgctgagggcgcctccgagagcctccacgtcaaggactacaagtactgattgatctgccttcggtgctgtggcccgtttgggcgtcccgcttaccagtatcattgtcattgtttggtttcctgagtcctgatatatcctcggatatcgaacatcgtttttaataatatggaacttgtgttttcataataccgtagtagtttctttttggagttgaagtaccctgaaaatcgggtgctgcgtatcgtaaattggagcaggtttttgttccatggtcctgtaatttacctgctcatacaatgttaaaacctgtcatattctgagta

SEQ ID NO: 3872 - DNA, 610 bp, Triticum aestivum
gaggtgattgctgagtacaccgtccgcaccctccagaggaccgtccctgctgccgtccccgccattgtcttcctctccggtggacagagtgaggaggaggcgaccctgaacctgaacgccatgaacaagctccagaccaagaagccctggaacctgtccttctccttcgggcgtgccctccagcagagcaccctcaaggcctggtccggcaagacggagaacgaggagaaggccaggacggcgttcctggtgaggtgcaaggccaactccgaggccacccttggcacctacaagggcgacgccacccttggcgagggcgcctctgagagcctccacgtcaaggactacaagtactgatctatctgccttcggagctgtggcccgtttgggcgtcccgcttaccagtatcattgtttggttttctgagtcctgatatatccttggatatcgaacatcgtttttaataatatggaacttgtgttttcataataccgtagtagtttctttttggagttgaagtaccctggaaatcgggtgctgcgtatcgtatattggagcaggtttttgttccatggtcctgtaattttcctgctcatacaatgttcaaacc

SEQ ID NO: 3873 - DNA, 562 bp, Triticum aestivum
ctctggtggacagagtgaggaggagcgaccctgaacctgaacgccatgaacaagctccagaccaagaagccatggaacctgtccttctcctttgggcgtgccctccagcagagcaccctcaaggcctggtccggcaagacggagaacgaggagaaggccagggcggcgttcctggtgaggtgcaaggccaattccgaggccaccctcggcacctacaagggtgacgccaccctcgctgagggcgcctctgagagcctccacgtcaaggactacaagtactgatctatctgccttcggagctgtggcccgtttgggcgtcccgcttaccagtatcattgtttggttttctgagtcctgatatatcctcggatatcgaacatcgtttttaataatatggaacttgtgttttcatgatatcgtagtagtttctttttggagttgaagtaccctggaaatcgggtgctgcgtatcgtatattggagcaggtttttgttccatggtcctgtaatttacctgctcatacaatgttaaaacctgtcatatgctgagtacacatgtgttc

SEQ ID NO: 3874 - DNA, 669 bp, Triticum aestivum
cgcatggccatcccgctgctggtgccccacatgaacctccacgacgccaagctcgccggctacaacatccccgccgagagcaagatcctcgtcaactcctggttcctcgccaacaacccggagcagtggaagcggcccgacgagttccggccggagcgcttcctggaggaggagaagcacgtggaggccaacggcaacgacttcaggtacctgcccttcggcgtcggccgccggagctgccccggcatcatcctcgcgctgcccatcctcggcatcaccatcggccgcctcgtccagaacttcgtgctcacgccgccgcccggccaggacaagctcgacaccacggagaagggcggccagttcagcctccacatcctcaagcactccaccatcgtcgccaagcccagagtgttctagagcagcgacgtaacgtgctctggagtttggacttccagcattttggtttggtggtgttgtactttcacgattgttcgctcgtcctaagtatacttgattatagtatccgtcacagagtagacacacgtttcgttaatgttatccgcaagaaaacagaggagctgaagaaatgtcgaacggggaggaaaagactggacgatttccgtcagatgtactcctgatgctgccataaattaaatcctcgaaaatatt

SEQ ID NO: 3875 - DNA, 568 bp, Triticum aestivum
cgccgacaaccccgaacagtggaagcggcccgacgagttccggccggagcgctttcctggaggaggagaagcacgtggagccaacggcaacgacttcaggtacctgcccttcggcgtcggccgccggagctgccccggcatcatcctcgcgctgcccatcctcggcatcaccatcggccgcctcgtccagaacttcgtgctcacgccgccgcccggccaggacaagcttgacacgactgagaagggtggccagttcagcctccacatcctcaagcactccaccatcgtcgccaagcccagagtgttctaagcagtcccgtaccggacgtacgtgctctggagtttggacttccagcattttggttcggtgttgtactttcatgattgttcgctcgtcctaagtatacttgattatagtatctgtcacagagtagacgcacgtttcgttaatgttatccgcaaggaacagaggagctgaagaaatgtcgaacggggaggaaaagactggacgatttccatcagatgtactcctgatgctgccataaattaaatcctcacaatattgatg

SEQ ID NO: 3876 - DNA, 1492 bp, Triticum aestivum
tcccgcgagggccagacttggtgttcacgtgtacgcgacccctgcgcagatcggcgcatcatgccgtgccgttcttcaccacaaggtggtgcacagtaccggcccggtgggagccgaggcggcccttcgtggtggacaacgtccgcgccgaccccaggccgccaccgatggcgtcgtgctccgccgccacctgcagctcatgatgtacaacaacatgtaccgcatcatgttcgaccggcggttcgagagcatggacgaacccgctgttcctccgcctccgggcgctcaacggcgagcgcagccgcctcgcgcagagcttcgagtacaactacggcgacttcatccccgtcctccgccccttcctccgcggctacctccggctctgcaaggaggtcaaggagacccgcctcaagctcttcaaggattacttcctggacgagaggaagaagctggtgagcaccaaggccgtggaagacaacggtgggctcaagtgcgccattgatcacatcctggaggcggagcagaagggggagatcaacgaggacaacgtcctctacatcatcgagaacatcaacgtcgcagcgatcgagacgacgctgtggtcgatcgagtgggggctggcggagctggtgaaccacccggagatccagcagaagctgcgggacgagatggacgcggtgctgggcgtcgggcaccagatcacggagcccgacacgcacaggctcccctacctgcaggcggtgatcaaggagacgctccggctgcgcatggccatcccgctgctggtgccccacatgaacctccacgacgccaagctcgccggctacaacatccccgccgagagcaagatcctcgtcaacgcctggttcctcgccaacaaccccgagcagtggaagcggcccgacgagttccgccccgagaggttcctcgaggaggagaagcacgtggaggccaacggcaacgacttcaggtacctgcccttcggcgtcggccgtcggagctgccccggcatcatcctcgcgctccccatcctcggcatcaccatcggccgcctcgtccagaacttcgtgctctcgccgccgcccggccaggacaagcttgacacgactgagaagggcggccagttcagcctccacatcctcaagcactccaccatcgtggccaagcccagggtgttctagagcagcgccgtgccggacgtacgtgctctggagtttggacttccagcattttggtttggtgttgtagtactttcatgattgttcgctcgtcctaagtatacttgattatagtatctgtcacagagtagacacacgtttcgttaatgttatccgcaagaaacagaggagctgaagaaaggccaaacctgatgctgcgataaattaaagttaaattcttgaaatcttgatgattttttcataaacgaaataactctccctctgttgtaattatcttgatgcatctgtaacgatcacttgttgcacgttggtga

SEQ ID NO: 3877 - DNA, 762 bp, Triticum aestivum
cgtcgagtctccgaggtcatctacaacagagaaaccgaccagagccgtggatttgggtttgtcaccatgagtacaattgaggaggctgagaaggctgtggagatgttccatcgctacgatgtgaatgggaggctgttgactgtaaacaaggcagctcctagaggcgcccgggtggaaaggcctccccgtgattccggctcttcattcaggatctatgtgggcaacctgccatggcaagtggacgactctaggttggtggagctgttcagcgagcatggcaaagtggtcgatgctagggtcgtctacgacagagacactgggcgctcacggggatttggtttcgtgacaatggcgtcgcaggaggagctggatgatgccatcgctgccctcgatggacagagcttggaggggcgtgccctaagggtgaacgtcgcagaggagcggccacctaggaggttctaatgaaggtgtatttggcggtggactacgacaagattgctgcgtaagagacacgatagcacgcctgataccggcttagaccccccatcatcctcccatccatccttgtgtcatgtcttgtctactctctccagtgtttttctcttttgctatctgcctcttgcttccacgttctcaatctgtcgatgcaattcaaaagttttgtctgacatactacgtatatttaagccccatgggtgtggtgttaccccgagattcatgctcacctgatattggaaaaggatccaaaactcccttatgcga

SEQ ID NO: 3878 - DNA, 980 bp, Triticum aestivum
  N_region (609)..(609): n = any nucleotide
  N_region (656)..(656): n = any nucleotide
  N_region (738)..(738): n = any nucleotide
gcgggatcaagctgttcgccgggatgagcttgccggacctctacccgtcgtcccgcctcgcgatgctcctcagccgggtgccaggccagatgaagcggtaccgcgaagaacgggacgcgttcatggacgccgccgtccgcgagcaccaggagaacagagcggctgacgacgacaaggagggtttgctcgacgtgctcctgaggatccagcgggaaggccacctgcaattccccatgtccattgacaacatcaagtcggccgtcggggacttgttcgccggggggagcgacacgtcagcaacgaccctggaatggaccatggccgagctcgtgaagaaccccagagtgatggggaaggcgcaagacgaggtccggctagccctcgccggacaacccaaggtaacagaggactccctcggcggcctgaactgcatgcgcctggtgatcaaggaggtgctccggctgcaccctccggcgccgctgctgctgccgcgtgagtgcatgaacgactgccgggtcctgggcttcgacgtgcccaaggggaccatggtgcttgtcaacgcctgggccattagcagggaccctgcccactgggacgccgctgaggagntcattccggagaggttcgagcgcggcgagatcgacttcaagggggcngatatggagtacacgccattcggggcgggccgaaggatgtgccccgggatgtcgttcggtttggccaatgttcagctcgcgntcgccgggctgctgtaccatttcgactgggagctgcccggcggggcggggcggagaccgaggagatgggagtcaccgtgaagtgcgccgtgaccttctgcttgttccggtggtccgagcgcccttaccactagactattagctctagctagccaggttctgctaatcgacagggggtattatattagtagcaagtcacatgggagatggcgtgaacttttaattttcagtttgcgaacatgt

SEQ ID NO: 3879 - DNA, 618 bp, Triticum aestivum
aacagtcggagtctccctgcgacagcgaaggtcctactcaccctacgacaggcgcattcttgctcgccccgccatggtcatcgccaccgttcaagatctccataccgctacagaaggcggagtcgcgctcccatgaccgttctgtttcagcatactacagcaggcgctattctccaaggagcagaagacggagctactctcgcagcatatcgccacgcaggagctactcccgcagctgctctccggcgtcggaagaatcaaggagctgttctccgcggaaaggacgcgccgaaagcaaggcatcacgcagcaggtcacctgggaagaggcgttccagagaaagctatgctcacagccgcagttcatgctcgaggtccgtctccagggaacgctcaacctcagcaagcacctgatgttttacgaagcgccaggccaccgtatttccgttgtaatgttggaattttagtaacttggatgtttgtaaacagtgtggatggtatgatcgtgcacctagtgaagcagctgtatttcgtcatggttctggacttgcatgccatatgcatgctaaacgctgtactttatacttctgttttcagtatggttggcagtttacatcat

SEQ ID NO: 3880 - DNA, 635 bp, Triticum aestivum
ggcggtgtcgcaggtggtaactgacatacgcagaggcgaagctgaagacagagactcgagaggcttcgggaggacaggatcgcagtcgcagcggcgacgaagcaaagatgtcgtattcgaggtacaggagtcgttcaaggagtgtggactcgagtgatgttgagaaccctgggaacaatctcttcgtgactggtttatcatctcgtctaactgatcgagatctggagaagcatttctctacagagggagaggtgattgatgcaagtatagtacttgatccatggacaagggaatcacggggattttggtttgttaccatggctactcttaaggaggcagaacactgcatcaaatatctcgaccgttcagtgctggaaggtcgtgtcattactgttgagaaggcaaagagaagacgaggccgaaccccaacaccaggaaggtatctgggcaccaaatcatcgcgtggaaggaggtattcccgaagcaggtcacctgttaggagagaccgttacagctcacgctactcgcctgagcgagaacgctcttattctccttatcgcagaggacgatcatactctcgtcgtgacaggcgtagatcatactcccctgatgacaggagggaaaataatctccct

SEQ ID NO: 3881 - DNA, 745 bp, Triticum aestivum
agagaccgttacagctcacgctactcgcctgagcgagaacgctcttattctccttatcgcagaggacgatcatactctcgtcgtgacaggcgtagatcatactcccctgatgaaaggaggcgatactactctccctatggcagaaggagatcatactctccttctgacaggtcggagtctccctacgacaggcgtaggtcctactcaccctatgacaggtcctactcaccccgccatggtcatcgccaccgttcaagatctccataccgttacagaaggcagaggtcgcactcccacgaccgttctgtttcagcatactacagcaggcgctattctccaaggagcagaagacggagctactctcgcagcatatcgccacgcaggagctactcccgcagctgctccccggtttcagaagaatcaaggagctgttctccacggaaaggatgcgccggaagcaagccatcacgcagcaggtcacctggcaagaggcgttctagagaaagctatgctcacagccgcagttcatgctccaggtccgtctctcgggagcgctcaacctcagcaagcacatgatgttttacgaagcgccttgccaccgtatttccgttgtaatgttggaattttagtaactctgttgtaatggtatgatcgtgcacctgtatttcgtcatgactgttagaataaatccgaggtacgtgaacgatccatcgaggagcaagtaatcacagacaatgatgacaca

SEQ ID NO: 3882 - DNA, 687 bp, Triticum aestivum
accgccaccgctccccatctcgatctaaaaccgagggtttcgtccagctccgtcgccgcgacccaaaccagagcccgccccacccaccccagccagccagccatgccgaagaacaagggtaagggaggcaagaaccgcaagcggggcaagaacgaggccgacgacgacaagcgcgagctggtgttcaaggaggacggccaggagtacgcgcaggtgacgcggatgctcggcaacgggcgctgcgaggccatctgcgtcgacggcaccaagcgcctctgccacatccggggcaagatgcacaagaaggtctggatcgccgccggggacatcgtcctcgtcggcctccgcgactaccaggacgacaaggccgacgtcatcctcaagtacatgaacgacgaggcccgcctactcaaggcctacggggagctccccgacacgctccgcctcaacgagggcgttgacgtcgacggccccgaggagggcgagggcgacagcgactacatccagttcgaggacgaggacatcgacaagatctaagccttttttcctcctccctcgcctatactgtgtgttctattctgttctaatagcgtctgtgtcggtcggtgggctgttgtggattgatggatttggtaacgagaaatcgttgtgacttgaggtgcctaaataattgttgattatcgtgtt

SEQ ID NO: 3883 - DNA, 736 bp, Triticum aestivum
cgctccccatctcgatctaaagccgagggtttcgtccagctccgtcgccgcgacccaagccagagccagccccaccccagccagccagccatgccgaagaacaagggtaagggaggcaagaaccgcaagaggggcaagaacgaggccgacgacgacaagcgcgagctggtgttcaaggaggacgggcaggagtacgcgcaggtgacgcggatgctcggcaacgggcgctgcgaggccatctgcgtcgacggcaccaagcgcctctgccacatccggggcaagatgcacaagaaggtctggatcgccgccggggacatcgtcctcgtcggcctccgcgactaccaggacgacaaggccgacgtcatcctcaagtacatgaacgacgaggcccgcctgctcaaggcctacggggagctccccgacacgctccgcctcaacgagggcgtcgacgtcgacggccccgaggagggcgagggcgacagcgactacatccagttcgaggacgaggacatcgacaagatctaagcttttttcccctcctcctccctcgctcgatatactttgtgttctattctgttctaatagcgtccgtgtctgtctgtgtcggtcggtcggtgggctgttgtggattgatggatttggtaacgagaaatcgttgtgatttgaggtgcttaaataattgtcggattatagtgttcgtcgtattattatgctttgcaacaagccatctgatgat

SEQ ID NO: 3884 - DNA, 917 bp, Triticum aestivum
gcaccaccaccgctccccatctcgatctaaaaccgagggtttcgtctagctccgtcgccgcgagccagagccagcccaccccagccagccagccatgccgaagaacaagggtaagggaggcaagaaccgcaagaggggcaagaacgaggccgacgacgacaagcgcgagctggtgttcaaggaggacgggcaggagtacgcgcaggtgacgcggatgctcggcaacggccgctgcgaggccatatgcgtcgacggcaccaagcgcctctgccacatccggggcaagatgcacaagaaggtctggatcgccgccggggacatcgtcctcgtcggcctccgcgactaccaggacgacaaggccgacgtcatcctcaagtacatgaacgacgaggcccgcctgctcaaggcctatggggagctccccgacacgctccgcctcaacgagggcgtcgacgtcgacggccccgaggagggcgagggcgacagcgactacatccaattcgaggacgaggacatcgacaagatctaagctttttcctctcctccctcgctcgatatactttgtgttctattctgttctaatagcgtccgtgtctgtctgtgtctgtcggtgggctgttgtggattaatggatttagtaacgagaaatcgttgtgatttgaggtgcttaaataattgtcggattatagtgttcgtcgtattattatgctttgcaacaagccatctgatgattattatggtcttgatattgatttgttctccttgattggtttgccgtaatttgggaaacttcctgaggttggcaggactctacttcactaatctggttgcacattagcctcctttatttaattcttcctcttcaaaagaagaacaattatgttctgtttactgattgaagttcacgggacaaaatt

SEQ ID NO: 3885 - DNA, 650 bp, Triticum aestivum
  N_region (13)..(13): n = any nucleotide
catcatcaacacnttctactccaacaaggagatcttcctccgtgagctcatctccaacgcctccgatgcgttggataaatcaggttttgagagcctgactgacaagagcaagctggatgctcagccagagctgttcatccgtataatccctgacaaggccacgaacacactcacacttattgacagtggtattggtgatgaccaagtcagacctcgtgaacaaccttggtaccattgcgaggtctggcaccaaggatttcatggaggcactggctgctggtgctgatgtatccatgattggtcagtttggtgtcggtttctactctgcttaccttgttgctgagagagtcattgtgaccagcaagcacaacgatgacgagcagtatgtgtgggagtcccaggctggtggttccttcactgtgacacgtgatactactggagagccccttggaaggggtactaagatcaccctctacctcaaggatgatcagttggagtaccttgaggagcgtcgccttaaggatctggtgaagaagcactctgagttcatcagctatcccatctctctctggacggagaagaccactgagaaggaaatttctgacgatgaagatgaggatgagaagaaggatactgaggagggcaaggtt

SEQ ID NO: 3886 - DNA, 575 bp, Triticum aestivum
ttcctccgcgagctcatctccaacgcatccgatgcgttggataagatcaggtttgagagcctgactgacaagagcaagctggatgctcagccagagctgtttatccatattatccctgacaaggccacgaacacactcactcttatcgacagtggtattggtatgacaaagtcagacctcgtgaacaaccttggtaccattgcaaggtctggcaccaaggatttcatggaggcactggctgctggtgctgatgtgtccatgattggtcagtttggtgtcggtttctactctgcttaccttgttgctgagagagtcgttgtgaccagcaagcacaacgacgacgagcagtatgtgtgggagtcccaggctggtggttccttcactgtgacacgtgatactactggagagccccttggaaggggtactaagatcaccctctacctcaaggatgatcagttggagtaccttgaggagcgtcgccttaaggatctggtgaagaagcactctgagttcatcagctaccccatctctctctggacggagaagaccactgagaaggaaatttctggtgatga

SEQ ID NO: 3887 - DNA, 647 bp, Triticum aestivum
ggggttggcttctcctccccactcagtcctcggttcccggcccggttcggttcgttagggtttagtagtggggaagaggaggaagaatggcggacgtcgagtaccgctgcttcgtcggcggcctcgcctgggccaccgacgaccagtccctccagaacgccttctccaagtacggcgacgtcatcgactccaagatcatcactgacagggagacgggccgttcccgcgggttcgggttcgtcaccttcgcgtcggacgaggcgatgcgccaggcgatcgaggccatgaacggccaggacctggacggccgcaacatcaccgtcaacgaggcccagtcccgccgcgccggcggaggcggcagccgcggcggctccggcggcggcaactggagggagtgaatggtggggcccctcgctggccagttatcctagttacccgatccgtttttacctgtctaccaaaatgttatcgctcgctcgctcccgagtatcctagatctcgctccgtcgcgtaggttccgagatgttcaggctaccgttagatgtgacgctgctaccgttccgtgttactgttccgtccccgctctgttcgctatgcttctaagattgaaatgaaaacctgagcaaagtttggcctcgcatgtgatg

SEQ ID NO: 3888 - DNA, 536 bp, Triticum aestivum
ccgccgcccacgccgcaggagaagaagcagacgcgcggaggagagcttccaggcggcgaccatggtgaacgttccaaagaccaagaagacctactgcaagaacaaggagtgcaagaagcacaccctccacaaggttacgcagtacaagaaaggcaaggacagtctttctgctcagggaaagcgccgttacgaccgcaagcagtcaggatatggtggccagacaaagcctgttttccacaagaaggccaagacaacaaagaagattgtgctgaagctgcagtgccagagctgcaagcattactcgcaacgcgctatcaagaggtgcaagcactttgagatcggtggagacaagaagggcaaggggacctctctcttctaagctgatgatatccctgttttgttcagtgttgtgccagaacttcccactcgaacaatgtattagtatcatattggtattctgggtataactgtatgggctatggagcatatgttttgcctttcctgtcaacgactctcttcagatccttgagacaagt

SEQ ID NO: 3889 - DNA, 919 bp, Triticum aestivum
  N_region (508)..(530): n = any nucleotide
ggcttctcctccccactcagtcctcggttcccggtccggtcccgttccgttcgttagggtttagtagtagcggggaagaggaaggaatggcggacgtcgagtaccgctgcttcgtcggcggcctcgcctgggccaccgacgaccagtccctccagaacgccttctccaagtacggcgacgtcatcgactccaagatcatcactgacagggagacgggccgatcccgcgggttcgggttcgtcaccttcgcgtcggacgaggcgatgcgccaggcgatcgaggccatgaacggccaggacctggacggccgcaacatcaccgtcaacgaggcgcagtcccgtcgctccggcggcggcggcgcggcttcggcgcggcggctccggcggcggctacggcggccagcgtcgtgaaggaggaggcgcggcggctccggcggcggcggcggcggctacggaggtgctcgcagcggcggcggccggtggctacggcagccgtgagggcgcggcgnnnnnnnnnnnnnnnnnnnnnnncgtcggctacggcgcagccgcggcggctccggcggcggcaactggagggagtgaatggtggggccgctcgctggccagttatcctagttaccgatcctttttttacctgtctaccaaaagtgttatcgctcgcctcccgagtaccctagatctcgctccatcgcgtaggttccgagatgttctggctaccgcttagatgtgacgccgctaccgttccgtgttacctgttccgtccccgttggctatgaatgaaatgaaaaatcagagcaaagtttgttcgcatatgatgcttctcgcggaagtgcaagtttgttcctttttctgtttgtgccgtgaacgctttaccttgccgctggatgatattttgctgcacccactacggccatgtt

SEQ ID NO: 3890 - DNA, 581 bp, Triticum aestivum
cggatccaccgccgcttccgcagccatggtgaacgttccgaagaccaagaagacctactgcaagaacaaggagtgcaagaagcacacgctccacaaggttacccagtacaagaaaggcaaggatagcctttctgctcaggggaagcgtcgttatgaccgcaagcagtctggatatggtggccagacaaagcctgttttccacaagaaggccaagacaacaaagaagattgtgctgaagttgcagtgccagagctgcaagcattactcacaacgcgctatcaagaggtgcaagcactttgaaatcggtggagacaagaagggcaagggaacatctctcttctaagctgatggtatcctgttatgtttaggatgttgtgccagaacttcccacaagaagaatgtattatctttaattttctggttataaccctatgggctatggagcatatgttttgctattgtgtcaactactttctccagatctaatcgacaagtaaaatgttgtttatgctcggagtgcggtatctttgttcttggtctgattagaattgctgtcgcagtgtatgctcatgatgggatga

SEQ ID NO: 3891 - DNA, 706 bp, Triticum aestivum
agaagaaaaatacgggtgacgccattacttaggtggcgcgaaactatatcctaccaaccggcaagcttaaactacggtagatatgtggtcgtcgagtactacgcggacgattacagtagtaaagttgacagcaaagaagaggatccaccgccgcttccgcagccatggtgaacgttccgaagaccaagaagacctactgcaagaacaaggagtgcaagaagcacaccctccacaaggttacccaatacaaaaagggtaaggacagtctttctgcccaggggaagcgtcgttatgaccgcaagcagtctggatatggtggccagacaaagcctgttttccacaagaaggccaagacaacaaagaagattgtgctgaagttgcagtgccagagctgcaagcattactcacaacgtgctatcaagaggtgcaagcacttcgaaatcggtggagacaagaagggcaagggaacatctctcttctaagctgatgatattgtcgttatgtttagaatgttgtgccagaacttcccacaagaagaatgtattatctttaattttctggctataacattctaaacataacagcgatatcatcagcttagaagagagatgttcccttgcccttctaagctgatgatatcgctgttatgtttagaatgttgtgccagaacttcccacaagaagaatgtattatctttaattttctg

SEQ ID NO: 3892 - DNA, 1426 bp, Triticum aestivum
agctctccaacaaggacttcgactcgtatgtgctatctgagtccagcctgttcatctattctcagaagattgtgatcaagacctgtgggactaccatgctcctgctcaccattcctaggattcttgagcttgctgaagagctgtgcatgccgcttgctgccgtcaagtactctcgtgggatgttcatcttccccggcgcacagcctgctccccacaggagcttctctgaggaggttgatgtcctgaaccgctacttcggccacctgaagtctggtggcaatgcttatgtgatcggagacccagcgaagcctggccagaagtggcacatctactatgccaccgagcaacctgagcagcccatggtcaccctggagatgtgcatgactgggctggacaagaagaaggcctctgtcttcttcaagactcaagctgatggccacgtttcctgtgccaaggagatgaccaagctctctggaatctctgacattatccctgagatggaggtctgtgacttcgacttcgagccctgcggctactccatgaacgccatcaacggatctgccgtctccaccatccatgtgacccccgaggacggcttcagctacgcgagctacgaggtcatgggcatggacgcctccgccctggcctacggcgacatcgtcaagagggtcctccggtgctttggcccttcagagttctctgtggcggtcaccatcttcggtggccgtggccacgccgccacctggggcaagaagctcgaagctgaggcatacgactgcaacaacgttgtggagcaggagctcccctgcgggggcgtcctcatctaccagagctttgccgcgaacgaagaggttgctgtctctgccgggtcgcccaggtccgtcttccactgcttcgaggccgagagtgtgcagagccaccctctggtcaaggaaggcaagctcgccaacctcctcgcatggcgggcggaggaggattccctggaggagggcgcggtgctgtgcgagtgattggctgtcgctgttccgtctgtggactttgttctgactaagtttgtcgtttggttactgtgaagcagctggccaggctattgctactccgaataaactattagctctaggtggtttgctgcgtctgccacaatgagcgtacttctggggagaagttgtctcaaactgataaataagcattttttttctaagacgagtgtcactttgttatcatattcatgttctgtaatcgaaactacttcacagccgatagctgttggacgattcaagcacgattcttaatctagtggctgtgttgcacctagtactaggtatcgatggcctgaattgcagtatcgtccaacaatcggctggaacatgtcgtgtgcatagcagcactcttctgtaattggtgttactctgtgccaagttgcagt

SEQ ID NO: 3893 - DNA, 626 bp, Triticum aestivum
  N_region (43)..(43): n = any nucleotide
  N_region (178)..(178): n = any nucleotide
gcgcccagggacgtcggccgaagacgagtgaacatgagggtgntccgcgcgctcggggctcgctactgcgggcgatgagccgggacgtggctggcgtcacaacgccgatgctatatgtggcgatgctctacagttggttcgcgtggcacgtggaggaccatgagctgcatagcctggnctacctccacttcggcaagcccaagacttggtacggcgtgccccgagatgccatgcttgccttcgaggatgctgtccgtgtccatgggtacgcggacgacctcaatgccatcagtgcgacagacgagccagacggttgggactggcaccaggtgtagagggctctggtacatggaccaggaggtgcagccagacttggtgtgtgctgcgaccatggaggacaaggagaagcaggcgatgatccatcactgtaggatggggcatgtgtcttttgataagatgagtagaatattttcggatgttatgtgtggaataggcaagggcaagctgacatgtgatgcttgtgaatatgcaaaacacacacgagcctcatatgtgagtaagtggctcaggagcatatctccttttatgcttattcattcggatgtatggactagccctatggtgtc

SEQ ID NO: 3894 - DNA, 1575 bp, Triticum aestivum
  N_region (7)..(8): n = any nucleotide
  N_region (14)..(14): n = any nucleotide
  N_region (52)..(52): n = any nucleotide
ttcgcanncgatcnaatccctctcggcttgatgcttcacgataatctgaccnagttctctagtctttctccctctgttcctctctgctctgctttctgactcaaaactgcaacaatggctgccccgacctctgcgatcggatttgagggctacgagaagcgccttgatatcaccttctctgaggcatcaatctttgctgaccctcatggtcgtggcctgcgcgccctctccagggcccagattgactctgttcttgatcttgcacggtgcaccattgtgtccgagctctccaacaaggactttgactcgtacgtgctatccgagtcgagcttgtttatctactctcagaagattgtgatcaagacctgtgggactaccatgctcctgctcaccattccaaggattctcgagctggctgaagagctgtgcatgtcgcttgctgctgtgaagtactcccgtgggatgttcatcttccccggtgcacagcctgctccccacaggagcttctctgaggaggttgatgtcctgaaccgctactttggccacctgaagtctggtggcaatgcctatgtgattggagacccagcgaagcctggccagaagtggcacatctactatgccaccgagcaacctgagcagcccatggtcaccctggagatgtgcatgactgggctcgacaagaagaaggcctctgtgttcttcaagacttctgctgatggccatgtctcctgtgctaaggagatgaccaagctctctggtatctctgacatcatccctgagatggaggtctgtgacttcgacttcgagcccctgcggctactccatgaacgccatcaacggatctgccttctccaccatccatgtgacccccgaggacggcttcagttacgcgagctacgaggtcatgggcatggacgcttcggcccctggcctatggcgacatcgtcaagagggtcctccggtgctttggcccttcagagttctcagtggcggtcaccatcttcggtggccgcggccatgccgccacctggggcaagaagctcgacgccgaggcatacgactgcaacaacgttgtggagcaggagctcccctgtggaggcgtcctcatctaccagagctttgccgcgaacgaagaggttgctgtctctgccgggtcgcccaggtccgtcttccactgcttcgaggccgagactgtggagagccacccgctggtcaaggaaggcaagctcgccaacctcctcgcatggcgagcggaggattctctggaggagggcgtggtgctgtgcgagtgatttgctgtcgaatgttcagtctgtggaatttgctctgactgtttgtcttttgtcgtttggttactgtgaagcagccggccaggctattgctctctgaataaactattagctctaggtggtttgctgcgtctgccacaatgagcatactgtttggggaaaagttgtctcaacttataaataagcattttttttctaggacgagtgtcactttgttattactactgaattcctttctgcctgtatcatattcatattctgtaattggagttactagatgccaagt

SEQ ID NO: 3895 - DNA, 878 bp, Triticum aestivum
gaccatttcatggttccaaagaggtattcctctctgaccactatgatgtacagagtgctgacacaatagagggaaaatgcaatgtccacagcttccgtagctacacaaagcttgattctgtgaatgccgaggacttcttctgtcgctttgactacaaatcagcatccggcagtttcgtgcccgaccgtatagctgtgttttgcaagtgtgagatgccgtacaatcctgatgaccttatgatccaatgtgaggaatgctctgactggtttcacccttcttgtattggaatgaccattaaagaagcaaagaaacgagaacacttcttctgccagagctgtactgctgaaaatgggaagacaactgagaattctcatgaagccacggcagagtcagaagaaaggccggtggagtcgaaaaggcggagaaggtgatgggctggattaatttgatggaatttccacacggatatacaaactacatagccttctagtctgaggtctgtggtgttgtttgtggcagtctgtgaccccttctaatgtcaggcatgcagtgtacataacttgtaacctgagattgttgtattaggagaaaatagaatttggacgctagtgtcagagtttgagcagtatggtaccatcaagatcccttgtgatcttccctcaaaaaagaaaaaaaatcctttgtgatccattatgctgtggggcctgaccagccttttacgtttgtgagagtcgaatcttgtgttgccatgtggaatgttttgtgtctttgtttcggagcaactcgtggtgcagtatctgtgtagactgatttttagcatttgatttagctgcgtaatttttatagaactattgttgcttaagatcgttaataaagct

SEQ ID NO: 3896 - DNA, 1089 bp, Triticum aestivum
cccaagaagatcctcgagtcctacaccatcaaggggtccgacaaagtcatcaagcctggggactgtgtgctaatgagatcagctgatacatcaaagccaccttatgtggcaaaagttgagtccattgaggcagcagggtctcgaggcacaaatgtgagagtacgggttcgatggtactatcgtccagaagaatccattggtgggaggcgaccatttcatggttccaaagaggtattcctctctgaccactatgatgtacagagtgctgacacaatagagggaaaatgcaatgtccacagcttccgtagctacacaaagcttgattctgtgaatgccgaggacttcttctgtcgctttgactacaaatcagcatctggcagtttcgtgcccgaccgtatagctgtgttttgcaagtgtgagatgccgtacaatcctgatgaccttatgatccaatgtgaggaatgctctgactggtttcacccttcttgtattggaatgaccattaaagaagcaaagaaacgagaacactttttctgccagagctgtactgctgaaaatgggaagacaactgagaattttcatgaagccacggcagagtcagaagaaaagctggtggagtcgaaaaggcggagaaggtgatgggctggattaatttgatggaattcccacacggatataccaactacatagccttctagtatgaggtctgtggtgatgtttgtggcagtctgtgaccccttctaatgtcaggcatgcagtgtacataacgtgcaacctgagattgttgtattaggagaaaatagaatttggacgctagtgtcagagtttgagcagtatggcaccatcaagatcccttgtgatcttccctcacaaaaaaaaaagatcccttgtgatccattctgcgatggggcctgaacagccttttacgtttgtgagagtcgaatcttgtgttgccatgtggaatgtttgtctttgtttcagagcaactcgtggtgcagtatctgtgtagaaggggatctgatttttagcatttgatttagctgtgtaatttttatagaactattgtcgcttaagatcgttaataaagct

SEQ ID NO: 3897 - DNA, 761 bp, Triticum aestivum
caaatgtcaaggttaaagtgcgctggtactaccgaccggaggagtccattggtgggcgcaggccattccatggcgaaaaggaggtgttcctctctgaccaccaagatgtgcagagtgctgacaccatagagtgcaagtgcaacgtctacagcttccgggactacaccaagctttctgctgtcaatcctgaggactatttttgccgcttcgagtacaagtcaatcacaggcagctttgtgcctgatcgcattgctgtgttttgtaagtgtgagatgccatacaaccctgacgatcttatgatccagtgtgaggaatgctctgattggtttcaccctgcttgtattggaaagacaatcaaagaagcaaagaaacttgagaattttacatgcgaaggttgtgttgctgaaaatggaaatggaaatggaaatggagtcaagaatgaaaattcgcatgaatctacaggcgaatcagatgagaagcaggtgcagtcgaagcggcgacggcggtgaaggcgaaggcgatctgggcggaagtcctccatctcttcacgcatgtgacgcggtggatgtacattgctgtttccagtttgatgtagaacgaacctgtattgagagtctcttctagagtctggcattcggccagtttgcgactttgcatatccatgtggacctacctgttagagggagtaatttttctctcttcttttttccttcccccttcgtgttgacatggacatttgtgagtgagcttcaatgcccttt

SEQ ID NO: 3898 - DNA, 801 bp, Triticum aestivum
cagcaggacctcgggcgcaaatgtcaaggttaaagtgcgctggtactaccgaccagaggagtctattggtgggcgcaggccattccatggcgaaaaggaggtgttcctctctgaccaccaagatgtgcagagtgctgacaccatagagtgcaagtgcaacgtttacagcttccgggactacaccaagctttctgctgtcaatcctgaggactatttttgccgcttcgagtacaagtcaatcacaggcagctttgtgcctgatcgcattgctgtgttttgtaagtgtgagatgccatacaaccctgatgatcttatgatccagtgtgaggaatgctctgattggtttcaccctgcttgtattggaaagaccatcaaagaagcaaagaaacttgagaattttacatgcgaaggttgtgttgctgaaaatggaaatggaaatggagtcaagaacgaaaattcccatgaatctactggtgaatcagatgagaagcaggtgcagtcgaagcggcgacggcggtgaaggcgaaggcgatctgggcggaagtcctccatctcttcacgcatgtgttgcggtggatgtacattgctgtttccagtttgatgtagaacgaacctgtattgagagtgtcttctagagtctggcaatcggccagtttgcgactttgcatatccatgtggacctaccagttagagggagtcatttttctctcttcttttttccgtcccccctttgtgttgacttggacaatggtgagtgagcttaaagtcctttcttcattgactagaaaaacaggatacctt

SEQ ID NO: 3899 - DNA, 705 bp, Triticum aestivum
gggcgcgcacgtctctgcggcgccggcagggtccgcgccgccgacgaagctccggcaggtggctaagcggcaggtggactacatcctcggggacaacccgctgcgcatgtcctacatggtcggcgtacggcccgcggttcccgcgccgggatccaccaccgcggcagctccatcccgtccgtggcggcgcacccggcgaggatcgggtgcaaggccggcgccgcctactacgccagcgcggcgcccaacccgaacctgctggtgggcgccgtcgtcggcgggcccagcgacgccaccgacgccttccccgacgcgcgcgccgtgttccagcagtcggagcccaccacgtacatcaacgcgccgctcatgggcctcctcgcctacttctccgcccaccccaacccggccgagtgggccgacgactaaaacccagcagcaggaggatgatatgtacatgaaaaataaaatgcctctgactgacttcggcgtactgcaggagtagtgcactagtactaagctttagcgtcattcatttgtttggtttaactgtaactaattactattattatcggcagccatttcctctcctgcggaaaagaaaagatcagggggctgtataggctgtatctgcaatgttatacttgtaagatttagcgtgcttgaatattggcactatgtaaaatgttcatcagcaaaagagcttct

SEQ ID NO: 3900 - DNA, 925 bp, Triticum aestivum
aatcagatatgcaacaccagtgcaccacagcaacagtgaagtgatctcggaacagttgcacaagcttgggttttcaagaggcggagctgaaagcgttctcaacggccaaaccggcaaaaggatgcagcaactgatccttcgcaggccccaacttctaccagaggctgatccacatggccgaggacaaggtgaagttccggaacacggggccagtgcacccgctcacgaggcagcccgtcgctgacaggaagaggttcggcggggtcaagttcggggagatggagcgcgactgcctgctggcccacggcgcggctgccaacctccatgagcggctcttcacgctgagtgacttctcggagatgcgcatctgccagacgtgcgagcggggggcgaacgtcatcatgcggcctgtttcgggcgggcggaagatccggggcccgtactgcgggttctgcaagtcctcggagaacattgtcaagatcgccgtcccttacggcgccaagctgctctaccaggagctcttcagcatgggcatctgcctcaagttccagacggaggtctgctagaccgagcttcgtcgtggtgtgtatataggttatctatatctatctatggttactgatggacatgttagttaaggttctctgtggttgtggacatggtagttggctgaggttatctgtggttatggacatgtagtggctacgtggaactccttgtgaccatggcgtttgcgtagctgggacaggcctgctcctatggagcgaagctggccgtgcagtgcaggatatcttgtgccgtggggatgtgcctctggcctgaagaaattctgttgagacactgttgtagcttagctagttgaacctgtctcactctgcccctggaatcaactttatcctagtgaacagaattatattgtatagtg

SEQ ID NO: 3901 - DNA, 971 bp, Triticum aestivum
  N_region (685)..(685): n = any nucleotide
  N_region (883)..(883): n = any nucleotide
gtaatttgcttgctcgacaagtgggttgcactgtgctggcctttgatcgccctggatgggggttaacatctcgacctcgcagaaaggactgggaagacaagaatttgccaaacccgtacgagcttgagtcacaggttgatcttctgatttcattttgcttagacatgggcttgggctcggtcattttagttggtcatgatgatggcggcttgctggcactgaggaccgcagaaaagttacgtgcttctggagattctaggaaggttgaagtgaagggagttgttcttataggcgtaagcttatcaagagaagtgattcctgcatttgctcgtatactcctgcatactcctctgaggaaaaagcacatggtgcgcccacttctacgtactgaaatcactcaggtgatcaatcgacgagcatggtttgatgctaccaagttgacaacagatgttcttaatctttacaaggctccactatatgtcgagggctgggacgaagcactccatgaagtagcccgtctttcattttccaccgtcctatcatcaaaaaagagcaacgggaactactaagatcggtggaagacctccctgttttggtggtagcaggctctgaggatgctcttgtttctctgaagtcagcactaactatggcttcagaacttgtaattctaggtctagtaactatntcaggatgtggtcatctgccacacgaagaaatgtgccaatgcattgctctcagctctttctccgttcatctcaaaattggtatcatcagatgattcattgcaaagattgtagcatacacctgtccatcttcccttttgaattttgctctcttctgtgccctctacattgagtagatgacctctagctgttgcgagttngtgtgagcccatgttagttgcaaagtagtggagcctgacccaaaatctcaagggtcctagagctcccctaatttattttttggtcata

SEQ ID NO: 3902 - DNA, 759 bp, Triticum aestivum
gaccgcagaaaagttacgtgcttctggagattctaggaaggtcgaagtcaagggagttgttcttataggtgtaagcttatcaagagaagtgattcctgcatttgctcgtatactcctgcatactcctctgaggaaaaagcacatggtgcgcccacttctacgtactgaaatcactcaggtgatcaatcgacgagcatggtttgacgctaccaagttgacaacagatgttcttaatctttacaaggctccattatatgtcgagggctgggatgaagcactccatgaagtaggccgtctttcattttccactgtcctatcatcaaaaagagcaacggaactattaagatcggtggaagacctccctgttttggtggtagcaggctctgaggatgctcttgtttctctgaagtcagcacaaactatggcttcaaaacttgtaaattctaggctagtaactatatcaggatgtggtcatctgccacacgaagaatgtgccaatgcattgctctcagctctttttccattcatctcaaaattggtatcatcagatgattcattgcaaagattgtagcatacacatgtccacctttccttttgaattttgctctcttccgtgccctctacattgagtagatgacctctagctgttgcgagttgctgtgattccatgttagttgcaaagtagtggagcctgacccaaaatctcaagggtcctagagctcccctaatttatttttttggtcgtatgtatttctgttc

SEQ ID NO: 3903 - DNA, 675 bp, Triticum aestivum
attgctcgtatactcctgcatactcctctgaggaaaaagcacatggtgcgcccacttctacgtactgaaatcactcaggtgatcaatcggcgagcatggtttgatgccaccaagctgacaacagacgttcttaatctttacaaggctccactatatgtcgagggctgggacgaagcactccatgaagtaggccgtctttcattttccaccgtcctatcatcaaaaagagcaacagaactactaagatcggtggaagacctccctgttttggtggtagcaggctctgaggatgctcttgtttctctgaagtcggcacaaactatggcttcaaaacttgtaaattctaggctagtaactatatcaggatgtggtcatctgccacacgaagaatgtgccaatgcattgctctcagctctttctccgttcatctcaaaattggtatcgtcagatgattcattgcaaagattgtagcatacacctgtccatctccccttttgaattttgctctcttctgtgccctctacattgagtagatgacctctagctgttgcgagttggtgtgatcccatgttagttgcaaagtagtggagcctgacccaaaatctcaagggtcctagagctcccctaatttattttttggtcatatgtatttctgttcccgatctgttcaattaa

SEQ ID NO: 3904 - DNA, 648 bp, Triticum aestivum
agttgggaggcgagaccgttctgaatgccacaacgtgaaaaggatgagtctttggtgttcatggggccaacctactatcagaggctcactcacatgccgaggacaaggtgaagttgcgcaacaccgggccggtgcacccgctcacgaggcagccagtggtggacaggaagaggttcggcggtgtcaagtttggggagatggagcgtgactgcctcctcgctcatggcgccaccgccaacctccaagagcggctcttcacgctcagcgacgtgtcgcagctgcacatctgccaggtgtgtgagcgggtggcgaacgtggtcttgaggcccgtcgaaggggggaggaaggtccgcggcccctactgcggcttctgcaagtccgcggagaacatactccggatcaaggtgccctacggtgcaaagctgctctaccaggagctcttcagcatggggatctgcctcaagttcgagacggaggccagttagaacctgatcgctctcttgaaaatgatgaacctgccctatgctgtgaaacctaacaccgattgggccttcaactttcacaagactgtttttatttaaggctgaacctgcactgtgctgtctaatttgatgaaatttcgaaccattctatggattgttatatggt

SEQ ID NO: 3905 - DNA, 385 bp, Triticum aestivum
gaggccatcatccgctccacgctggcgcgtgacgtggctgccgtgatggagtacaagggtctcccactgcaggaggctgtggacttctgcgttaaggagcggcttgatgaggggttcgcgggtctcatcgccgtgtctggcaccggcgaggtggcatacgggttcaactgcaccggcatgttcaggggctgcgccaccgaggacggcttcatggaggtcggcatctgggagtgagcatgtgcgggagctcagccggagatgtctgcgtgtacatgcatttggccatcctgcgattgccatctggttctagtctaggaatcctccgtagtagcactggttactacataaccatgagctaccggataataaatatgtgaccgcctat

SEQ ID NO: 3906 - DNA, 546 bp, Triticum aestivum
cacgggagggctgatgaacaagatgacgggccgcatcggcgactcgccgctcatcggcgccggcacctatgcgtgcgggcactgcgccgtgtcgtgcacgggcgagggcgaggccatcatccgctccacgctggcgcgcgacgtggcggccgtgatggagtacaaggggctgcctctgcaggaggccgtagacttctgcgtcaaggagcggctcgacgaggggttcgccgggctcatcgccgtgtccggcaccggcgaggtggcgtacgggttcaactgcaccggcatgttccggggctgcgccacccaggacggattcatggaggtcggcatctgggagtgagcaagtgcatctcggagtgtacatacatttggccatcctgcgattgccatctggttctagtctaggaatcatcggttagcagtagcactcgttacttcataaccatgagctaccggataataaatatgtgacgaactatgatgcaccacgtgcctgaaaaaaggttcaaagttccatgaatcccttctattgtaaaataatcc

SEQ ID NO: 3907 - DNA, 662 bp, Triticum aestivum
ggcgggagaaccacaatagcaacggcatggtgatgaacgggctgcccatcagcatctacgcgccgagacggtggggtgcgcggtggtggactctaacggcttcacggcggcggcgacgtccactggcgggctgatgaacaagatgacgggccgcatcggcgactcgccgctcatcggcgccggcacctacgcgtgcgggcactgcgccgtgtcgtgcacgggcgagggcgaggccatcatccgctccacgctggcgcgtgacatggctgccgtgatggagtacaagggtctcccactgcaggaggctgtggacttctgcgttaaggagcggctcgacgaggggttcgcgggtctcatcgccgtgtctggcaccggcgaggtggcgtacgggttcaactgcaccggcatgttcaggggctgcgccaccgaggacggtttcatggaggtcggcatctgggagtgagcaagcaagcgcgtggggtcgcagtggccgctctgaactctgaagatagtgtgacggtgtgagtctgcatttggccatcttgcgatcgccatgtggttctaatctgggatcctgggttagtagcggtagtagtggatctgagattggagattgggaggaataataagatgatgatatcacgatggtatacattgtatgc

SEQ ID NO: 3908 - DNA, 704 bp, Triticum aestivum
cccgctcgccggggccgacacgtgcagcgcgctgccgcagcctccgagaatcacaataacaacggcatggtgatgaacgggctgcccatcagcatctacgcgccggagacgggtgggctgcgcggtggtggactctaacggcttcacggcggcggcgacgtccacaggagggctgatgaacaagatgacaggacgcatcggcgactcgcccctcatcggcgccggcacctacgcgtgcggtctctgcgccgtgtcgtgcacgggcgagggcgaggccatcatccgctccacgctggcgcgggacgtggcggccgtcatggagtacaagggcctcccgctgcaggaggccgtggacttctgcgtcaaggagcggctggacgaggggttcgcggggctcatcgccgtgtccggcaccggcgaggtggcgtacgggttcaactgcaccggcatgttcaggggctgcgccaccgaggacggcttcatggaggtcggcatctgggagtgaagcgcgtgcgctggccagaactctgaagatagtgtgcgtccgttcgtgtgtctgcatttgggcatcctgcaattgccatgtggttccagtctgggatcctgatttagtagcagtagtagtggatcggggattggagattgggaggaataattatgatgatgacgattgtgatggccgtggaaaataataatgtgaaaag

SEQ ID NO: 3909 - DNA, 888 bp, Triticum aestivum
gtcatggacaagtccccacagtcctagctcgccttcgacggcgccgaggatttcccgcgcgagcagggcctggaggttgtggataacagctacttcatcacggaggataacgtgggcatgctcaagctcgccaaggaggccaacagcatcctcttcgactaccgcatcccgctggcgggcaccgacacttgcagcgcgcaggcagcggcggtggagggccacggcagcaatggcatggtgatgaacgggctgcccatcagcatctacgcgcaggagacggtcgggtgcgcggtggtggactctaacggcttcacggcagcggccacctcgaccggcgggctcatgaacaagatgacgggccgcatcggcgactcgcccctcatcggcgccggcacctacgcgtgcgggcactgcgctgtgtcgtgcaccggcgagggcgaggccatcatccgctccacgctggcgcgggacgtggcggccgtcatggagtacaagggcctcccgctgcaggaggccgtggacttctgcgtcaaggagcggctggacgaggggttcgcggggctcatcgccgtgtccggcaccggcgaggtggcgtacgggttcaactgcaccggcatgttcaggggctgcgccaccgaggacggcttcatggaggtcggcatctgggattgaagtgcgcgagctcagccggagatgtgtccgcatgtagtgtgtgtacatacgtttggtcatcctgcgattgccatctggttttactctaagaatcctcggttactagcactggttacttcaaagccatgagctaccggataataaacatgggactgcctatgcacgacgtgcctcaaaaaagttccatcagtaacttatattgtagaccgtttgatc

SEQ ID NO: 3910 - DNA, 841 bp, Triticum aestivum
gtcagtcggtcacaaattcccaaatccaccggagaaagataatcatcaggcagagctgcagcaggtggccatggccgactcccccgagttagctcgtgctcgggacgtcctgagcgtgcgcgccgacgagcacgcgcgggtggacgcgctctcctccgccgcatccgcatccgcatccctatcatcggccactactcatctgtcgccgagcttcttcgagggattcgcgctgcgcgggatccgcgtgctccgcctccatccggggttcatccactgctcctacaccgtccccccgagcctcaccgactccaccaccggctgcctcgccgccggtgccgttgtcgccctggtcgacgagatcggctccgccgcctccatctccgaaggccaaaacctcaaggtctccgtcgacatttccgtcgccttccccgatctctcccaggcccgcccgggggaccggctgagcataacggcaagggcgctcggacacaagggcgcctactccggcacacacgtgctcttcaccaacgccggcaccggcaacgtcgtcgccgagggcaggcactccctcttcggtaacatgaagaagtcgccaccacccaagccagcagccactactcacaggagcaacttgtgatgatgcctctgcctgcctgctcctactccactattctattctgtattctgatgaagagtacttgtcatcagacttcaagtataaagaaaatatgttctgaacgggcgcctactccaagttcggcttgtatatgtaaccttgattcagagcagtgcgatgtatgatgtgtaattatgcaactcaactttggtaatcagagctact

SEQ ID NO: 3911 - DNA, 586 bp, Triticum aestivum
ctctgcttctcctcctactctcgggtgactgtttgattggtaggcgcgcctaagctagctagcaatggcggcccagggaaaaggcggtgcggccgtggtcgtgggcgtgctgctcgtctgcgtgctcctgagcgcggcggcggtggtggaggcggcggtgttcaacgtcggcgaccgcggcggctggtccttcaacaccaactcctggcccaccggcaagcgcttcaaggccggcgacgtcctagtgttcaagtacgacgcgacggcgcacgacgtggtggcggtgagtgcggcggggtacaaggcctgcgccaagccggccaagggcgccaaggtctacaagtccggcgccgaccgcgtcacgctcgcccgcggcacaaactacttcatctgcagcatccccggccactgccagtccggcatgaagatcgccgtcaccgccgcctagcgtcgtgtatcgtacgcgcgatgttatgacacgacgagcgaaacttaattcctgaccaaaataaaaggccgagcgtacgtgcttcgttctttcaagtcctagatcaatgtgcactgtttgatttgcactcaaccgatc

SEQ ID NO: 3912 - DNA, 662 bp, Triticum aestivum
cctcactcacatacctcctctgcttctcctcctactctcgagtgactgtttgattggtaggcgctcctaagctagctagcaatggcagcccagggaagaggcagtgcagccgtggtcgtgggcgtgctgctcgtctgcgtgctcctgagcgcggcggtggcgcaggcggcggtgttcaacgtcggcgaccgcggcggctggtccttcaacaccaactcctggcccaccggcaagcgcttcaaggccggcgacgtcctagtgttcaagtacgacgcgacggcgcacgacgtggtggcggtgagcgcggcggggtacagggcctgcgccaagccagccaagggagccaaggtctacaagtccggcgccgaccgcgtcacgctcgcccgcggcacaaactacttcatctgcagcatccccggacactgccagtccggcatgaagatcgccgtcaccgccgcctaacctcctacatcgtacgcgcgatgttacgtgacacgacgagcgaaacttaattcctgataataaccaaaataaaaggccgagcgtacgtgcttcgttctttcaagtcctagatcaatgtgcactctttgatttctactcgaccgatcgtacttgctcttgtatggtgccatatgtgctgattttgtactcatgtatacgag

SEQ ID NO: 3913 - DNA, 702 bp, Triticum aestivum
ctccctctcagcatttctcctctcaacctgcctctcctcgtacctgctggcttgatcggtagctgctaacctagctagcaatggcggcgcagggaagaggcagtgccaacgtggccgtggtcctcggcgtgcttcttctctgcacgctcgtggcggaggcggcggtgttcaacgtcggcgaccgcggcggctggtccttcaacaccaactcctggcccaccggcaagcgcttcaaggcaggcgacgtcctagtgtttaagtacgacgcgacggcgcacgacgtggccgcggtgagcgcggcggggtacaaggcctgcgccaagccggccaagggagccaaggtctacaagtccggcgccgaccgcgtcaccctcgcccgcggcacaaactacttcatctgcagcatccccggccactgccagtccggcatgaagatcgccgtcaccgccgcatagcctcatcgcgtcgtccatcgtcgagcagcgtctttacgtgacacaacgaccgcagcttgatttactaataataaccaaataaacgggcgagcgtacatacttcggtactatcgatatcaggtgcccggtcagtgtagtcgtattgattatcgtacggtgtgtactatttgattccccactccatcgatcataattgctattttatggccctctgtgatgattttgtacttcatatatacatgaataa
